United States Patent Application Publication US 2007/0042381 A1 - sequence listing, part 92

SEQ ID NO: 4143499 - RNA, 60 nt, Human
gcuaaacuggcauugcugcagaaagaugagauagaguugaaccagcagguagaguuuggu

SEQ ID NO: 4143500 - RNA, 80 nt, Human
gcuaaagaugcaagugagcuuuuaguaacuucccugauuacuuucaggcuuugcaaaaaagcucauauaugguauugggc

SEQ ID NO: 4143501 - RNA, 73 nt, Human
gcuaaagcaccucaauucuagccacacccgugccauagaauggucacugggaccuaggacugagcugcucugc

SEQ ID NO: 4143502 - RNA, 97 nt, Human
gcuaaauaaauuauucaauuuuaauaucagugugauaccucaccaaagaaugucugcauuuucagaggaaaucucauugagaggucaaaauuuaagc

SEQ ID NO: 4143503 - RNA, 79 nt, Human
gcuaaaucuuacucucaggccugauuccuaaagcaaagugggugacagggagaugaggcuaugaauggggagauuuggc

SEQ ID NO: 4143504 - RNA, 91 nt, Human
gcuaaaugagacaacacaaggaaauuguuugguauaacaccugacauguugugcuaagcaauuugcuuaauauuugcuauuauuuuuaagc

SEQ ID NO: 4143505 - RNA, 79 nt, Human
gcuaaauuuuaccaaggucuuuuaaguccuuuggcugaaacagguauucaggacaguauaggcuuuaggagaauauggu

SEQ ID NO: 4143506 - RNA, 96 nt, Human
gcuaacacuuguagaaaaguuugacuauauucaagccaagaacacaaggauucuuggcugucuuugaaguuagggacucaucugcaaaugugaagc

SEQ ID NO: 4143507 - RNA, 61 nt, Human
gcuaacaggcuccaugaacaacgugugugugcucgucccaccauucauagggccuggaagc

SEQ ID NO: 4143508 - RNA, 80 nt, Human
gcuaacccagccaggugugucuggccccgaaguccauccuucuuggaccuuaccugggguucauacuugguuguggaugc

SEQ ID NO: 4143509 - RNA, 60 nt, Human
gcuaacuucuugguccugagcuguuauauaaugugucagcucuagcucucagaauguagu

SEQ ID NO: 4143510 - RNA, 55 nt, Human
gcuaagaggcuauaucuuucuccucuaaagggagugguuuacagcaucucuuggu

SEQ ID NO: 4143511 - RNA, 76 nt, Human
gcuaagaucagaucugcugucaagcugcacacucugaugugggcugugcaaaugaguugcagaucaggacuuuagu

SEQ ID NO: 4143512 - RNA, 85 nt, Human
gcuaagauguuauucucuacuuacuguguugacaucugcauuuguaguaaaaagcaauggugaguaaaucugcuggcgucuuagc

SEQ ID NO: 4143513 - RNA, 106 nt, Human
gcuaagcacaugucauauauucgcuaauuuaguccuuacagugcagagucuuaccaucccccuuuuacaaaugaggagcuggagucagagaauuaagacacuuagc

SEQ ID NO: 4143514 - RNA, 64 nt, Human
gcuaaguggcuuuugaucuugcugcagagugaagaugccccacagaagccaggagccgcugggc

SEQ ID NO: 4143515 - RNA, 55 nt, Human
gcuaauaauuccuuugugaacuaugaaagaaaucuaucacugaggcuuuguuggc

SEQ ID NO: 4143516 - RNA, 92 nt, Human
gcuaaugaggacagugcugcugaggaguuucuuauaugugucuuccaguacaugugugcaaagauuucucuggggcauguuuuucagucugc

SEQ ID NO: 4143517 - RNA, 60 nt, Human
gcuaaugagguccuagagagugugugggguucaccguguacaaucuagggccucaggagc

SEQ ID NO: 4143518 - RNA, 63 nt, Human
gcuaaugucacucuguuuccucugcauacagauagagcaugcagaggacccagauguauuugu

SEQ ID NO: 4143519 - RNA, 73 nt, Human
gcuaauuaguaaccuaauuccaucuguaaugucugaucacaucagcaccuggauuaguguuugacugaauagc

SEQ ID NO: 4143520 - RNA, 62 nt, Human
gcuaauucacaguaggaaauuuuaaaaaagguuugaggaagauuuccuacugggagauuagc

SEQ ID NO: 4143521 - RNA, 83 nt, Human
gcuaauucugcccuccuuccuuccuccuccaguucugguaggauaugagauacaagaggaagaggucuggggcaaugaauggc

SEQ ID NO: 4143522 - RNA, 56 nt, Human
gcuacaaauaaaaugggugacuaauccccaguucuuggacccauuauauuuguagc

SEQ ID NO: 4143523 - RNA, 72 nt, Human
gcuacaaguucaaagcuccugguacaguagguagauuuuccuaugagucacuuaggaguuuugcccuguggu

SEQ ID NO: 4143524 - RNA, 75 nt, Human
gcuacagcccagagggaagggaaugagguaagggcguuuuauuuugcuccuguuuuuuuggagacauuuguaagc

SEQ ID NO: 4143525 - RNA, 63 nt, Human
gcuacauccuucaaaaggaauagcagguggugucccccagccuggcugaccugaagguguagu

SEQ ID NO: 4143526 - RNA, 71 nt, Human
gcuacaugaggcauagcagggaucggacgccgcagagucccugacucuuccccccuggugugucuaugagu

SEQ ID NO: 4143527 - RNA, 70 nt, Human
gcuacaugaugugucagucagcuauugcugcuuaacaaacaauuucaaagcucacuggcauauaagaagc

SEQ ID NO: 4143528 - RNA, 103 nt, Human
gcuacaugauuuccaaugguacugagucuaacauuaacauuagguuuaaacauuaacuuuuguagaucaagaauguccacuuguccuuggaaaauuauuuagc

SEQ ID NO: 4143529 - RNA, 130 nt, Human
gcuacauuugggaauuccagcuggggcugggaggaagugaaagaggaggacgguucccagaaggcgcauaacaggcauuuucagugggggcuuuccuucugccacuccgauaagccccucgaguuccugc

SEQ ID NO: 4143530 - RNA, 114 nt, Human
gcuaccagaugagacugaaaaagacacagaaguuuauuauucaacuucauguuuggaaagcaaaagcaaggggcagugaaagugugcaacuggucaagggucuaacuuuggagc

SEQ ID NO: 4143531 - RNA, 60 nt, Human
gcuacccugcccucaggcugcuucccucccaagggaaacacuaugccaagacagggaagc

SEQ ID NO: 4143532 - RNA, 82 nt, Human
gcuaccugaacuucccauguacagacuggcucucuagauuagcucagugcaacguugugcauucaaggugaauguucagagc

SEQ ID NO: 4143533 - RNA, 74 nt, Human
gcuacucucuguguuucugagaaucccaccugugcagcgcagggacuggacacuuaagaagcccagaaaacagc

SEQ ID NO: 4143534 - RNA, 77 nt, Human
gcuacucuuucuuagcuuugcuucugggagccaagaguaauuauucuguuuguaaagagucaagcaaagaagauagc

SEQ ID NO: 4143535 - RNA, 75 nt, Human
gcuacugggggcucuuccagggaagacgcuggcgggaauaggauggggcuggcagcuggggagccucgcgguggc

SEQ ID NO: 4143536 - RNA, 117 nt, Human
gcuacuguugcugugguuguauuuuauuuguugaacaauccuguacuuugaaaugauucauuuaagagccaugaaacauucaaagcaggaugugugacucacauagcaaacaguagc

SEQ ID NO: 4143537 - RNA, 79 nt, Human
gcuagaagagcugccuggagaggcagggauggcccgugguugaacagagagcuuuccuacccuuccaggcagagcuagc

SEQ ID NO: 4143538 - RNA, 78 nt, Human
gcuagaagugacuaagguuggcaguggaauugggagcuuaguaggcccaaucaacuguguggcuuucuucacuuaggc

SEQ ID NO: 4143539 - RNA, 58 nt, Human
gcuagaauauuggguaggcaaguagcagcaucuacaacagucuaaugcaguauucggu

SEQ ID NO: 4143540 - RNA, 74 nt, Human
gcuagaccguugugggauauuuuucaguguaaaaacuagcauugugcaauguuuuacaauuuauguucauuagc

SEQ ID NO: 4143541 - RNA, 55 nt, Human
gcuagagaccagaggccuugaaggaaggaagcccaagggucucuccuggcucugc

SEQ ID NO: 4143542 - RNA, 67 nt, Human
gcuagagaugcacuuucuuuucaacaguucuaagaaaugagaagguuagauaucaaggcaucucagc

SEQ ID NO: 4143543 - RNA, 55 nt, Human
gcuagaggcaacaacuuuauaggcggaaggggccuuauagaucacaucuucuagc

SEQ ID NO: 4143544 - RNA, 63 nt, Human
gcuagauggcucucccagagauaucacuuuucagauuuacgaugccugggauuauccacuggu

SEQ ID NO: 4143545 - RNA, 59 nt, Human
gcuagcaaaugucauuuggaagguaaagauaaaagcuuucagagaguacaguugcuggc

SEQ ID NO: 4143546 - RNA, 59 nt, Human
gcuagcaaguggcagaacgagguuauaaauucauagauccuggcugcacaguugcuggu

SEQ ID NO: 4143547 - RNA, 65 nt, Human
gcuaggaagauauuuggguaaaguuaauacaaggaucucuuauuaccuuggcuuagcuucuuagc

SEQ ID NO: 4143548 - RNA, 87 nt, Human
gcuaggacaagugccaauuagagacauccaucugggggccuggcaguggcagagagcugaggaggugucuauaaugguacuuccagu

SEQ ID NO: 4143549 - RNA, 78 nt, Human
gcuaggcuaacucccuuccagaggcuucagggaagaagcuguuuccuucccccuuuucagcuucuagaagcugccugc

SEQ ID NO: 4143550 - RNA, 77 nt, Human
gcuagggaagaagaacccauuuugaauuaaaaucccgugcauauuggucucauuuuaaaauguggucucucccuagu

SEQ ID NO: 4143551 - RNA, 71 nt, Human
gcuagguagugucagaaccaagcuggaaccaggggaucuggcucugggcuuggauuggcucugcuguuggc

SEQ ID NO: 4143552 - RNA, 63 nt, Human
gcuaggugaccuuggcucuuacagggugaucuucacauucugucaccgagggcauccaaaagc

SEQ ID NO: 4143553 - RNA, 68 nt, Human
gcuagguguccucguccaaagauucuguuuaauugaugauugauucuaaugggccaggaaacacuggc

SEQ ID NO: 4143554 - RNA, 56 nt, Human
gcuagguuggggaaguucuccuggauaauauccugcagaguauuuuccaacuuggu

SEQ ID NO: 4143555 - RNA, 104 nt, Human
gcuaguaaaauaaacaccccgauucucauuugugugcaauucagaauauuacccagauguugggaugaauacaaugggaucaucugugggaaaagcacauuagc

SEQ ID NO: 4143556 - RNA, 77 nt, Human
gcuaguagcagagccaggucucucuguagauccaugggcuccagagcugggucugugcucaccacauugcaacuagc

SEQ ID NO: 4143557 - RNA, 65 nt, Human
gcuagucagugggcauguauguauaguuacuuagauagauguugccuaacugcccucugaaaagu

SEQ ID NO: 4143558 - RNA, 63 nt, Human
gcuaguccacagccauccaggccguuuccucuuugucuuggcuuggaguugaauggacguagc

SEQ ID NO: 4143559 - RNA, 99 nt, Human
gcuaguccugugauggcuauuuagaguuaagcaucaauuucuuaugaguggcaucauguucucccaugcuuaacucuguacauaguuucaaggaaaagc

SEQ ID NO: 4143560 - RNA, 55 nt, Human
gcuagugagcucuuugucaucugacuguaaguuuggcaaauaugcuuucauuagc

SEQ ID NO: 4143561 - RNA, 76 nt, Human
gcuagugggccuuauuuccugugugaaacaacuuuuaucaaaauguauuugacacugggagugugggugaacuggu

SEQ ID NO: 4143562 - RNA, 61 nt, Human
gcuagugggucccaggacuuagucucuugucuacauauacucaucuucugguauccacagu

SEQ ID NO: 4143563 - RNA, 74 nt, Human
gcuaguguuuauuaaucaugagggcucuccuucuguguauuguucucagggaccuuaugaauaaaaaugcuggu

SEQ ID NO: 4143564 - RNA, 59 nt, Human
gcuaguucuuugcccugagcagaaguccuuggaaagcuacugagggcaaagagugaagc

SEQ ID NO: 4143565 - RNA, 59 nt, Human
gccccaguguccugcagggcaguagcuuuuugacauuguucaugcccugugccuggugu

SEQ ID NO: 4143566 - RNA, 91 nt, Human
gccccaucuccaggguuucuucucuguauaguuuccucuaaauccagaguuccuauuacagggaagccuugggaacauuuuagaaggaggc

SEQ ID NO: 4143567 - RNA, 65 nt, Human
gccccaugcauauugugaaaauguagauugguaugcacgaacuauugcauauuguguaccagggc

SEQ ID NO: 4143568 - RNA, 80 nt, Human
gccccaugccugccacaguaccccaagagugucugccauggcugucccugacugucaccuccugggguuggggcuggggc

SEQ ID NO: 4143569 - RNA, 55 nt, Human
gccccauuuccuuccuggggcaggguuagucauccggcccugcaggagguggggc

SEQ ID NO: 4143570 - RNA, 70 nt, Human
gccccauuuucagcccccacucguggcaguacaguaucuuccugcugggaaucgagguguggaaaggggu

SEQ ID NO: 4143571 - RNA, 75 nt, Human
gccccauuuuggaggcaccugguugcaggggaccacagcuaggugagucacaacugggugucuucaucagggggu

SEQ ID NO: 4143572 - RNA, 130 nt, Human
gcccccaaagagugcugaauuuuuguugcacaugcuuaaaaaugcagagaguaaugcugaacucaaggguuuagauguagauucucuggucauugaguauaaccgaguaaacaaagcaccuaagaugcgc

SEQ ID NO: 4143573 - RNA, 76 nt, Human
gcccccaacuuuugaaaggacuuagagagaaaaauggcaaaagugccuucugggauuuuugaagacuccugggggc

SEQ ID NO: 4143574 - RNA, 67 nt, Human
gcccccaucuccccacaggaacccgacaucauccaagucaauccugagccccagggagguugggggu

SEQ ID NO: 4143575 - RNA, 79 nt, Human
gcccccgccggagccgccccagggccgccggcaaacagagucccuuucaaguuuuccgcuggggccgccuggcgggggc

SEQ ID NO: 4143576 - RNA, 60 nt, Human
gcccccuacuguucugugcuucagcacagccugguuugucaagaggcacauaguuggggc

SEQ ID NO: 4143577 - RNA, 59 nt, Human
gcccccuccauugggccugcuucccggagcuggagccgagcaggccagugucagggggc

SEQ ID NO: 4143578 - RNA, 81 nt, Human
gcccccucuagcauaugcacgucuauuuaugaagacacuuagccaggauuuaguaaguucacugcaaagcuccaggggcgc

SEQ ID NO: 4143579 - RNA, 97 nt, Human
gcccccucuucuccagggaugcgugugugcaaaccauugccccugagaguagaugcggcuguguguguacauccuugccccugagaagagagguggc

SEQ ID NO: 4143580 - RNA, 59 nt, Human
gcccccugacacuggccugcucggcuccagcuccgggaagcaggcccaauggagggggc

SEQ ID NO: 4143581 - RNA, 73 nt, Human
gcccccuucuuuccugggcgccuuaggugguagucagccacaccacaacugccagccaggaaaggguaagggc

SEQ ID NO: 4143582 - RNA, 87 nt, Human
gcccccuuggggcccacagaggcaccaccaggcccccaaagacccauuucucugucuccagcuguggucccucuguccucauggugc

SEQ ID NO: 4143583 - RNA, 58 nt, Human
gccccgagggauugaaggcaacuaaaaauagugcauuaaauauaaucuguugaggggc

SEQ ID NO: 4143584 - RNA, 93 nt, Human
gccccggagaccuggaggacagcagugcuggcacuuggguguccaugggcccgucugccggcucugccugugcugcaaguguuggccgugggu

SEQ ID NO: 4143585 - RNA, 126 nt, Human
gccccuauuguucagcccaugugcauuuucuguccuugcuacccuauuugcuuuguuuaucacccaacugaguaagcaccgggauggucaaggaaggcaguugaaugccaucuacagauagagggu

SEQ ID NO: 4143586 - RNA, 69 nt, Human
gccccucaccuggacccugggaggagggcgggggaccgcaucugcgaagcguccgaggacaagaggggc

SEQ ID NO: 4143587 - RNA, 59 nt, Human
gccccucccugggcgugcccuggugcuacacgcaccugugggcagccucgggagugggu

SEQ ID NO: 4143588 - RNA, 91 nt, Human
gccccucuugucuuuccugggccagggugagggcugagaggucuuccuggggaagauugagcagacggcacuuuggcuggggaagaagggc

SEQ ID NO: 4143589 - RNA, 62 nt, Human
gccccucuuucuggaaggcagagugggccacagggguuuauggagacuuucagaagcggggc

SEQ ID NO: 4143590 - RNA, 55 nt, Human
gccccugaaauucauagggugauauauaaucaccaaugugaugauauuaggaggu

SEQ ID NO: 4143591 - RNA, 68 nt, Human
gccccuggccuggaggaaguuccugcuggauccuuuacuucccagaaacugcuccccugguaggcggu

SEQ ID NO: 4143592 - RNA, 68 nt, Human
gccccugggcugcccauuccacuggauggucacauuaauuugcaaccacaggaggauggcugcugggc

SEQ ID NO: 4143593 - RNA, 63 nt, Human
gccccugggggccccugcccuggcucccugaccacacacagaggcugcagggagcccuggggu

SEQ ID NO: 4143594 - RNA, 78 nt, Human
gccccuucacccaguuguugccggcucuggacuggccaaacacgaaguuguccggccgaaagaucugaccgaaggggc

SEQ ID NO: 4143595 - RNA, 82 nt, Human
gccccuuccaucagaccugcugugagcaacaaccuguggcuguggcuguggcugugacuggcagaggugucugggguggggc

SEQ ID NO: 4143596 - RNA, 66 nt, Human
gccccuucccugguagaaguuuuggaugaguugagggagagacuguccagcuccagggaggcaggc

SEQ ID NO: 4143597 - RNA, 69 nt, Human
gccccuugaacuacaucacccuauuucuguccauggugggcaguacuuuaagggaugaagcucuggggc

SEQ ID NO: 4143598 - RNA, 108 nt, Human
gccccuuucuacacucacuucccuggaacccgugauccugacuccccuccucccggaccccaagcauccaggacguguacgguauaaggggaaguuguagugggaggc

SEQ ID NO: 4143599 - RNA, 70 nt, Human
gccccuuucucuccugcuagagaauaacagcaccugcuuugagugggugugguccucuagugaaagaggu

SEQ ID NO: 4143600 - RNA, 89 nt, Human
gcccgaggcacuaucugucacucuuggugaauuugcaaaugccuaucauagaggcaguuucccaagagacagaaugguauccuuugggc

SEQ ID NO: 4143601 - RNA, 64 nt, Human
gcccgaggucccaguugcccaggucaggcagaaagugugucuggaggggaaacugaggccuggc

SEQ ID NO: 4143602 - RNA, 69 nt, Human
gcccgaguugacgggcuccccggugcgcggaugcagccaggucgugcagcggagcuggucacugcgggc

SEQ ID NO: 4143603 - RNA, 77 nt, Human
gcccgcaccagcuucucuggccgcaguguggaguugugcugugccagccgcaagcccaccauggccgaagcacgggc

SEQ ID NO: 4143604 - RNA, 66 nt, Human
gcccgcccacuguuuuccuuggugcguuucucuuuaaaugcaaauaagugcaggcgugguguuggc

SEQ ID NO: 4143605 - RNA, 60 nt, Human
gcccgcugcuugccacuucccucuccaaacgcuggcggggguggguggcagcaccgaggc

SEQ ID NO: 4143606 - RNA, 71 nt, Human
gcccggaacacgguggccauggucagguagcggccaugucgcggguugcacauggccaucauguucuuggc

SEQ ID NO: 4143607 - RNA, 78 nt, Human
gcccggauuuuggcggacugagaacgcgggccacguaggccuuggccugcgcgucugggucugucucugacucugggu

SEQ ID NO: 4143608 - RNA, 55 nt, Human
gcccggcaggagugggcccggcucccggguggcuugggcccaguucccgcugggc

SEQ ID NO: 4143609 - RNA, 56 nt, Human
gcccggcuugugauuggcugagauagcacagagcuccagccaaucagagcugaggc

SEQ ID NO: 4143610 - RNA, 82 nt, Human
gcccgggacuccccaacagcgacguccuccccaacaggccccagccucccuugacaguaccugcuggguggggccccgaggc

SEQ ID NO: 4143611 - RNA, 68 nt, Human
gcccggggcccagggcugcaaguggacgcugcagcgcuuccggcaguaccuggcguccaaacacgggc

SEQ ID NO: 4143612 - RNA, 55 nt, Human
gcccggucucucuaguuuagaccgauaaauuggucuacauugagagagcugcugc

SEQ ID NO: 4143613 - RNA, 66 nt, Human
gcccgugggccuccccuuuacgagccacggagagcuucggggcuggagggccggggccugcgaggc

SEQ ID NO: 4143614 - RNA, 56 nt, Human
gcccgugucuccugcucugugggccgaguucuugauucaccagcucaggcaggggu

SEQ ID NO: 4143615 - RNA, 88 nt, Human
gcccguucuugcuguguugugcugccuccauauccgucaggaagagccuuuccagaaugauucugggcauauacuaagaagagcaggu

SEQ ID NO: 4143616 - RNA, 82 nt, Human
gcccuaagcccagguaggagagucaacaugucccccagccaauuagggacauguugacuauccuaccuaggcuuagacaggu

SEQ ID NO: 4143617 - RNA, 130 nt, Human
gcccuaaucuguggugucucaucuuuccuccccucccuccuccuucccacugugccugaguguguauugucaaagugucaagugaggagggaaagagaaaaccaggccagauaacgcagaauugguaugc

SEQ ID NO: 4143618 - RNA, 77 nt, Human
gcccuagagaagaugugaacagaaccacaggccauuguagucuggguaggagucugucaugucaccuccuauggggu

SEQ ID NO: 4143619 - RNA, 56 nt, Human
gcccuagggagggauguuggcaugaggaaccugccaagucacauauucccccuggc

SEQ ID NO: 4143620 - RNA, 80 nt, Human
gcccuagugagauuuuauauaucaagcagggaacuucuggauuccauugcucaauauagaguuuccaauaucacgauggc

SEQ ID NO: 4143621 - RNA, 79 nt, Human
gcccuaugauuuuucagggagagaaaucacagcucuaugccaggaggugauuucuaaucaucugaauguuguaaugggc

SEQ ID NO: 4143622 - RNA, 58 nt, Human
gcccucaaccuccuuuccugcugggguucccaacucacaguaagcgggguuggagggc

SEQ ID NO: 4143623 - RNA, 78 nt, Human
gcccucacagagcucauacugggaggcacacaggcaggagacuuucagcaaacuccugugugagagcugugcuggggc

SEQ ID NO: 4143624 - RNA, 105 nt, Human
gcccucagcgccccggaaggguacggggcagccuccaggaaagcugucaggagacgcuuccucccgagguggucccggcggccaaguggggcucgguugacgggc

SEQ ID NO: 4143625 - RNA, 55 nt, Human
gcccucaguggauucuuauuguucuucaaguaaugaccaaaauccuucagagggc

SEQ ID NO: 4143626 - RNA, 69 nt, Human
gcccucaugcaaaugcuagagaauguuggaguaugaaaccagggcuucuuggcauuugcuggggagggu

SEQ ID NO: 4143627 - RNA, 67 nt, Human
gcccucccagcccccaucgagaaaaccaucuccaaagccaaaggugggacccguggggugcgagggc

SEQ ID NO: 4143628 - RNA, 78 nt, Human
gcccucccucaacugggcagcacagggggauucuguaagcagagcugcccuggcggagcugcucgggagggguggggc

SEQ ID NO: 4143629 - RNA, 65 nt, Human
gcccucccuggauccuuccgugucuguccccauugacacagcauggcaaauaucgagggcagggc

SEQ ID NO: 4143630 - RNA, 57 nt, Human
gcccuccuggccugugcagagccccgcuuggggguccugcgugggcccaggacaggc

SEQ ID NO: 4143631 - RNA, 73 nt, Human
gcccucgagucugcggaguuugcagagcgcgagccguuuaaauuuagcgcuuugggcugccuggagcgagggc

SEQ ID NO: 4143632 - RNA, 104 nt, Human
gcccucgcccggcuugcugggaguuguagucucuuaacugcucuaagccaguggcuugcagggcuacaggacuacaacucccaggaugcgccgggcgugggggc

SEQ ID NO: 4143633 - RNA, 65 nt, Human
gcccucggcugguacccugagaaguucaguuguuagcuggaaaucaggucuauacuaugagaggc

SEQ ID NO: 4143634 - RNA, 55 nt, Human
gcccucuaacgugaccuuagccuucauucaucacagguugaaaguaggugagggu

SEQ ID NO: 4143635 - RNA, 76 nt, Human
gcugggaaaaagaauucagugauauuucuccuauuugcuuuugaaagaagagaaauauggcucaguuccacccggc

SEQ ID NO: 4143636 - RNA, 127 nt, Human
gcugggaaagguugugacugcccugaggcccagccgcccugagagcuugguccuguccuuguuuucugggcugggcugugucugcauguugaagggcugucuuugaaaauggccuucacuuucuagc

SEQ ID NO: 4143637 - RNA, 56 nt, Human
gcugggaagagaugcacaugauuggcucucgugagcucgugugaaucaucuccagc

SEQ ID NO: 4143638 - RNA, 55 nt, Human
gcugggagaauauuuaaaaugccucagaagaugaagcauuuuaagcauccccagu

SEQ ID NO: 4143639 - RNA, 61 nt, Human
gcugggagcucugagccugcuaugggucuucuccaugggccuuacucuaagggcuucuggc

SEQ ID NO: 4143640 - RNA, 65 nt, Human
gcugggaugcaggacggcauggauguacagccauccuguacauggauggggccugcauccuaagc

SEQ ID NO: 4143641 - RNA, 61 nt, Human
gcugggauggcuuuccugcauuaugacacuuaccucgugguuccaagauggcugccacagc

SEQ ID NO: 4143642 - RNA, 64 nt, Human
gcugggcacagaauagauggcccauuaauacucacugauggguuuauugauuuguguguccagu

SEQ ID NO: 4143643 - RNA, 59 nt, Human
gcugggcagccccuacagagagcgcuccaaauaccaagccaaguaggguccuccccagc

SEQ ID NO: 4143644 - RNA, 63 nt, Human
gcugggcagugagugaguccuuuugaaggggcauaucuccuuccccacucacuccugcugggc

SEQ ID NO: 4143645 - RNA, 115 nt, Human
gcugggcaguucuucuggucuuggcuggguucccuccuaugcccacugaaagcugagugggagcucucgcuggguauaugagggagcgacuggcugucagcuggaacaucuuggc

SEQ ID NO: 4143646 - RNA, 62 nt, Human
gcugggcauuugcaggucaggcacccucaggauuccagggccccugggaaggcagccccagc

SEQ ID NO: 4143647 - RNA, 92 nt, Human
gcugggccagggugaggccacuuccccacagcccuggaaaugggaggucccgggcuaccuugggaggaugaauuagcccacauccugcuagc

SEQ ID NO: 4143648 - RNA, 83 nt, Human
gcugggcccaccauugagaugaugugucuuuccugccuggguacuguccacagggagcauugugacauaucacugggcccagc

SEQ ID NO: 4143649 - RNA, 66 nt, Human
gcugggccguuuggacuggcgcacggccccacgcugggccagcugcagguguuccagauggccagc

SEQ ID NO: 4143650 - RNA, 58 nt, Human
gcugggccuguggcuuggcucuagggcugcuucuggcccccuaggcacagagcccagc

SEQ ID NO: 4143651 - RNA, 91 nt, Human
gcugggcggaggcugggugaccaaggaagaggggagccagggcugggccugagggcugucugaagcuugggagucacggucucagcucagc

SEQ ID NO: 4143652 - RNA, 61 nt, Human
gcugggcuccagcccgggaccaggugcucuaggugggccugggccugggcuggggaacagu

SEQ ID NO: 4143653 - RNA, 58 nt, Human
gcugggcuguaguuugcugacccugugucuacaguauuaaucaaauuuacaacccagu

SEQ ID NO: 4143654 - RNA, 64 nt, Human
gcugggcugucccaaccccauccccugggaguuucagcacaggaugcacugggacuggccaggc

SEQ ID NO: 4143655 - RNA, 61 nt, Human
gcugggcuucucaaugcugccucugagaggagagaggugagggcauugugggugccacagc

SEQ ID NO: 4143656 - RNA, 108 nt, Human
gcugggcuuuggcauggccucuagcaugccugcuguggugugaggcucagcagcucuauugcccaugucuaacccagcuggaugcauggaggcucuggcuuucccagc

SEQ ID NO: 4143657 - RNA, 65 nt, Human
gcuggggagccuggaguuucugaugggaggaggcuaccucuacccucgcuccucgguuccccugu

SEQ ID NO: 4143658 - RNA, 57 nt, Human
gcugggggaggaggggcucuauggcugacugacggagcagcaguauccuuccccggc

SEQ ID NO: 4143659 - RNA, 64 nt, Human
gcugggguauccguuaguaagaugggcacggucccucgcugccugcucugauuuuugccccagc

SEQ ID NO: 4143660 - RNA, 89 nt, Human
gcuggggucuaggaaaugucccuacagcuauguaugcugggcuaccauauccauuuucucucuguggggucaaaauccagugccucagc

SEQ ID NO: 4143661 - RNA, 94 nt, Human
gcuggggucucuggggagcagcaagcagugcacggguucucagugcccaggacagccccugcagaugccuugugccccuuagggagacgcuggc

SEQ ID NO: 4143662 - RNA, 56 nt, Human
gcuggggucuuccuguaaaacaacucaggucccaaaccuacccaggaagacucagc

SEQ ID NO: 4143663 - RNA, 62 nt, Human
gcugggguucccugggcguaccugcaaugaucccguccauuugcuccagggcagcuuccagc

SEQ ID NO: 4143664 - RNA, 79 nt, Human
gcugggucaaagagaguuuaagugacuugccgaaggacaaacagcuaguuaaauggcagcacuugaacuugagcccagc

SEQ ID NO: 4143665 - RNA, 77 nt, Human
gcuggguccagccauguccugguccuccaccaugggcccagcccugggacucggccaggacagauggcccacuuagc

SEQ ID NO: 4143666 - RNA, 59 nt, Human
gcugggugcugccuggggagccuggaaguccguccgcauccagggcgcaggaucugagc

SEQ ID NO: 4143667 - RNA, 93 nt, Human
gcuggguggaaccuuggaugucaucuccuccagcucuccgaucucaggauggagucccagagaagggaagggauucacccagggucacccagu

SEQ ID NO: 4143668 - RNA, 57 nt, Human
gcuggguggcacuucugggguccagcagauguuucacuuggacuuccugucuccagu

SEQ ID NO: 4143669 - RNA, 67 nt, Human
gcugggugggcacccagccugggcugugggcacagggacagccaucccaggcuggggcuccuccagc

SEQ ID NO: 4143670 - RNA, 58 nt, Human
gcuggguguucaggagcugggcucaugucacaugagggcccaugugggagcacuuggc

SEQ ID NO: 4143671 - RNA, 55 nt, Human
gcuggguuucuggaucucuaggucuggaaaggcuuuccuuucuuugacacccagc

SEQ ID NO: 4143672 - RNA, 65 nt, Human
gcugguaaaugcucaacaauugccuuuccaggaauuaaaauugcuaguuuguagcauuugccagc

SEQ ID NO: 4143673 - RNA, 57 nt, Human
gcugguaagcgacaaagucagguuugacucacacagccuggcuccagaacuuccggu

SEQ ID NO: 4143674 - RNA, 99 nt, Human
gcugguacaugugcuuauucagccuuuugggcaauucagugggaccugacacauguugucauccugcccuggagaaggcugacaguugguggugccagu

SEQ ID NO: 4143675 - RNA, 58 nt, Human
gcugguauaauaauguuuuucagccugaccuuuggcaaaaggcacuaugucugcuagc

SEQ ID NO: 4143676 - RNA, 71 nt, Human
gcuggucacuaugugucccuuugaccacggguaaauauuucuauuuggucccuggaaggcacuagugaugc

SEQ ID NO: 4143677 - RNA, 122 nt, Human
gcuggucagaggcuuuuacaauguuugggcagcuguuguggauuggaaagagaacuagguuuggaauccaaagagcuucauuuccauuuauucuccuauguaagagcuguacgaccuuaggc

SEQ ID NO: 4143678 - RNA, 56 nt, Human
gcugguccugggguugcagcauccagcugggagccucuguagcuccaggauccagu

SEQ ID NO: 4143679 - RNA, 62 nt, Human
gcuggugauagauguuuguucaugcuuaucuucauauauaggaacagacauuugcaauuagc

SEQ ID NO: 4143680 - RNA, 55 nt, Human
gcugguuacuucauuagguccucucauugauugaacccugcugaagugaugcagc

SEQ ID NO: 4143681 - RNA, 58 nt, Human
gcugguuagcaucugcguuggguuggacuuuccagguuuaaaacaagggaugcccagu

SEQ ID NO: 4143682 - RNA, 72 nt, Human
gcugguuccuuccagaggcucuaggggagaauccaugucaugcuucuuuccuaguuucugguggcugccagc

SEQ ID NO: 4143683 - RNA, 59 nt, Human
gcugguugucccuggacuuagagaagguaaggcugagagagguuccagccacaaccagc

SEQ ID NO: 4143684 - RNA, 62 nt, Human
gcugguuuagugaaauaggccagagagauuucuuguugcuugaaauucacuggguccugggc

SEQ ID NO: 4143685 - RNA, 66 nt, Human
gcuguaaacccagguggacaaggcuuucacacuauaaaguaagcucaaagucuaaccuggcacagc

SEQ ID NO: 4143686 - RNA, 102 nt, Human
gcuguaaucucuagugcgggguuucucaacaguggcaccacuggugguuugaacugauaaucuucuguugugggagcuucugugcauuguaggauacuuagc

SEQ ID NO: 4143687 - RNA, 82 nt, Human
gcuguaauuaagauuuugaaugguuugaguucucacugaugugcucaauucagaaaaauucacuccuaagaucauuuauggc

SEQ ID NO: 4143688 - RNA, 67 nt, Human
gcuguacagcaggaggugaguagcaggugagcauuacuaucugagcuccgccuccugucagaucagc

SEQ ID NO: 4143689 - RNA, 67 nt, Human
gcuguacagccaugggcuucucuguguccuucccuggacucaugguagcacaggcugugugagcagc

SEQ ID NO: 4143690 - RNA, 86 nt, Human
gcuguaucaauuugaucugaaacacaaggauaauguucccagcuguggcaucuggguccuuggaaauuucaucagacagugccagc

SEQ ID NO: 4143691 - RNA, 58 nt, Human
gcuguauuaauagaguaugugguaggauauaaaauccccauacacuauucuguauagu

SEQ ID NO: 4143692 - RNA, 85 nt, Human
gcuguauuuuugaugcugagaaaccugucuggcacacagugugugcucaauaaauguuucugacugaauagauagaagauacagu

SEQ ID NO: 4143693 - RNA, 86 nt, Human
gcugucaccaugcaggcaccagacccgggcccggcaccagacacuaccucaccccgcccaggucugccagccugugggaccucagc

SEQ ID NO: 4143694 - RNA, 81 nt, Human
gcugucacugaccagguggaggugugagguccuggggcaucauggcaggaccuuggacauccacuuucucaggucugcagc

SEQ ID NO: 4143695 - RNA, 77 nt, Human
gcugucagucacaugcugugggaucuguauuguguauucuggucacaacacauuccugcagacaugaugcuugcagc

SEQ ID NO: 4143696 - RNA, 60 nt, Human
gcugucccaugguugcaagaugacugcaguucuaggaauuacaucuguaauccgggcagc

SEQ ID NO: 4143697 - RNA, 72 nt, Human
gcugucccccaggguccggauaacccugggcaggcugucccccgggguccggguaacccugggaagggcggc

SEQ ID NO: 4143698 - RNA, 60 nt, Human
gcugucccgaaccccugguaauagaauuguuuaucuuuauaccaagaaguuugggaaagc

SEQ ID NO: 4143699 - RNA, 80 nt, Human
gcugucccuguggccucuguggcuguggaccuggucugugucuuaagagaccaggcugcagcagcaguggcccaggcagu

SEQ ID NO: 4143700 - RNA, 62 nt, Human
gcugucccuuucacaagguuuugggaacuaaugcuucauuucaagcuuggggugggaacagc

SEQ ID NO: 4143701 - RNA, 63 nt, Human
gcuguccucgucucucacgcaaaccuucaguuuuugcgauaaauccaaggaggccaggagagc

SEQ ID NO: 4143702 - RNA, 83 nt, Human
gcuguccuuuaaccuugugugucuagaauuucauuuuaucuuuuagguuuauguaguugaagugcuauaaaguaaaggauggc

SEQ ID NO: 4143703 - RNA, 121 nt, Human
gcugucgagucugcucuuaggaagaggagcugagcuuuggcccuggagguuacuggggggaaaguggccaguacagcccaggccaggcuggcuccgagaaagagcuaaggcgggggacagc

SEQ ID NO: 4143704 - RNA, 95 nt, Human
gcugucgcagacagaaaggggucucaguggguggagaaguggaccugcucacagaagaagaccaccucuccaaccuggacuuccuccacgauggc

SEQ ID NO: 4143705 - RNA, 81 nt, Human
gcugucuccagcguguggugucauuccagguucagccagcagaauuaaguggacaaaugaaugaugaacaccaaagauggc

SEQ ID NO: 4143706 - RNA, 71 nt, Human
gcuccaggagcucacagcucgcuccagcuacaucacuggccuccacgcugggacguggagcucucuggggc

SEQ ID NO: 4143707 - RNA, 56 nt, Human
gcuccagucuuggcuuggucaaugucuggcacaacacagcaauuaagacugugggc

SEQ ID NO: 4143708 - RNA, 130 nt, Human
gcuccaucuugcgggccgaagcgcgagugcugcucugugacagccuccggccgcggccuucccagcugcuaccgccgcuuuucggaugggcugugauagauggaguagcagcgaagacugcuagaagagc

SEQ ID NO: 4143709 - RNA, 69 nt, Human
gcuccauuuccauguuuacugggacacaacauuguuccacuugguugcaucagaaaauaugggaagagu

SEQ ID NO: 4143710 - RNA, 78 nt, Human
gcucccaagauuuuugaucugagcaguuggagagcuagaguucccacugacugagauggaaaaagcugcgagaggagc

SEQ ID NO: 4143711 - RNA, 56 nt, Human
gcucccaaggacucacugaguacccucucaguuaacucagagaaaugucugggagc

SEQ ID NO: 4143712 - RNA, 95 nt, Human
gcucccaagucgcacccagugcgagccugugcuggccucuuggggcuagauaucccggugagccaggcaugacugccucggugcagcuuuucggc

SEQ ID NO: 4143713 - RNA, 62 nt, Human
gcucccaccuuugcuaucaguacuuaugccuaguaggccuugcugaaggcaggggagguggc

SEQ ID NO: 4143714 - RNA, 58 nt, Human
gcucccagcauugcugcugaauaagccagcccuuugguuacuucagugcagagugagc

SEQ ID NO: 4143715 - RNA, 68 nt, Human
gcucccagcccugcgugccaggggacugccuucaacaggaugguccgggauggacgcgggcugggcgu

SEQ ID NO: 4143716 - RNA, 57 nt, Human
gcucccagguccccaccugucugcugccuuggucagcagcccugggaccuggccugc

SEQ ID NO: 4143717 - RNA, 76 nt, Human
gcucccauugcuucaaagauccuccacuagaguaucagggacccucuuuaaaugggaucuuuguagaaguaagagu

SEQ ID NO: 4143718 - RNA, 61 nt, Human
gcuccccaaaagcuccaggaaaggauacuucuuggccucucuucuggcuucugguggcugc

SEQ ID NO: 4143719 - RNA, 83 nt, Human
gcuccccagggccccucaauucuccaccagugcaggucuagauauacaucugccugaaccacucuuggaguuuucuugggggu

SEQ ID NO: 4143720 - RNA, 82 nt, Human
gcucccguuaucuuugcaaucugcaaagcuguggaggcugguacccaaccuuccgcggcgcgggcgcaaggccgaggggagc

SEQ ID NO: 4143721 - RNA, 63 nt, Human
gcucccugaaauucagaugccuccaugcagugaccucaagugaugccugcauuucaggagagu

SEQ ID NO: 4143722 - RNA, 61 nt, Human
gcucccugcagcugagaguuccuucccuggaagccuauuuuauuaugcauguaaggggagu

SEQ ID NO: 4143723 - RNA, 57 nt, Human
gcucccuguucucagccaugaugucuggaucuccaauucacuuugaaggaugggagc

SEQ ID NO: 4143724 - RNA, 83 nt, Human
gcucccuuccugaaugcuguugugcuguggagcugcugucauauucaaccccacaggugcuugcauaucaguggugggugagc

SEQ ID NO: 4143725 - RNA, 60 nt, Human
gcuccgcuauuuugucuaugcugugguggccccagggcaguggcauguggguaguggugc

SEQ ID NO: 4143726 - RNA, 125 nt, Human
gcuccggccuuaggcggcacccgggccugaagggguuguuugggccucaggcggcguccagggcggccgaacuugagggccaggcggggacagagcgcccgaguagccgcgccacggccggccgc

SEQ ID NO: 4143727 - RNA, 57 nt, Human
gcuccgugacacuuucuucaugcccuccuugcuggcaauacaagacuggucaugagc

SEQ ID NO: 4143728 - RNA, 79 nt, Human
gcuccuacuagccagaggaguguggaugcuaaagaaggacuucucaucucuggcugauauuccucugcuacuccugagc

SEQ ID NO: 4143729 - RNA, 56 nt, Human
gcuccuacuucagccaagaaaacucaguccucacaggauuauguugcugaaggggc

SEQ ID NO: 4143730 - RNA, 108 nt, Human
gcuccuagaaccugaggaaggggugagaaucaaggcagcuguagggauuuggcaaaacagggacaaaugcacaggcucuccagggccuggauuccagguuuaaugagc

SEQ ID NO: 4143731 - RNA, 76 nt, Human
gcuccucagcucccaugcacccucuaagaaggaccagccuggucagauauagguggagcauggggacguguggggu

SEQ ID NO: 4143732 - RNA, 81 nt, Human
gcuccucccacugccuucaccugcccuaucagcagcuuccuccuuuuggaggccgauucgggugugggcggugggcacagc

SEQ ID NO: 4143733 - RNA, 68 nt, Human
gcuccucccagugugccccuccugcagcugccccagagcuugggagggaggccgcugugcaggggagc

SEQ ID NO: 4143734 - RNA, 66 nt, Human
gcuccucccugggaagggucucagcaguggcuugcagacgucugcuguggguccccaggagggagc

SEQ ID NO: 4143735 - RNA, 55 nt, Human
gcuccucucugggccucacgcgcccgucgggggcugagaagguguggagaugggc

SEQ ID NO: 4143736 - RNA, 60 nt, Human
gcuccucugaaaaagcaauguuuagaauugagaccugaacaaugagucauucaggugagc

SEQ ID NO: 4143737 - RNA, 55 nt, Human
gcuccucuuauuucaucagggccucugagagguuucugcucaguaguaagagugc

SEQ ID NO: 4143738 - RNA, 62 nt, Human
gcuccugaacuugugauccgcccaccuuggcuucccaaagugcugggauuacaggugugagc

SEQ ID NO: 4143739 - RNA, 96 nt, Human
gcuccugaaucccuggggacuuccagagguucucagcccugugguguuucauagcuggaagagaaccucgaaugggcaucugcaggucagggaagc

SEQ ID NO: 4143740 - RNA, 129 nt, Human
gcuccugccuuccccuaugugggauucccauuggccugccauucccuacucuaauggaagaaucugaugagcuuccuguugagagagggagggaaggagugguuccagcaagggguuaguuagcagggc

SEQ ID NO: 4143741 - RNA, 56 nt, Human
gcuccugcuuagcuucucucccggacacccugagacugagaagcucgcagugaugc

SEQ ID NO: 4143742 - RNA, 127 nt, Human
gcuccugguaauaaucucauuuuguaauuuugcucuuuagucacagggcuucauuugggacacucacauuuuuguucucuuugugauuauuugugauuaaggaguugagguuaugacuuuaaggugc

SEQ ID NO: 4143743 - RNA, 63 nt, Human
gcuccugucuuggggcacuggcuccccccacaccccugccaugcucccacccuagucaggggc

SEQ ID NO: 4143744 - RNA, 59 nt, Human
gcuccugugggauucaugacauuaauucuccagaauuuuuggguugugauuacaggagu

SEQ ID NO: 4143745 - RNA, 70 nt, Human
gcuccuuaagcuucucccgagugggcagcaccagcuuccgggcuggccugggcagaggcuaugguggggc

SEQ ID NO: 4143746 - RNA, 79 nt, Human
gcuccuuccccugagccaagcagcuucccagggcgccaccagccccgagggccgaaagcugcuuuggcucccgcagagc

SEQ ID NO: 4143747 - RNA, 61 nt, Human
gcuccuucugaggacucuaaagaggacgccuuccugcgucuuccuagcuucaggagguugu

SEQ ID NO: 4143748 - RNA, 71 nt, Human
gcuccuucuggccccuggucucugguguuugugcugugucagccucauaccaagucagaggccucaugggu

SEQ ID NO: 4143749 - RNA, 77 nt, Human
gcuccuuuuaagggauaauaagauguuuguaauguuuaugucuuccaaaugaauuguaaauuccuugaaaacugagc

SEQ ID NO: 4143750 - RNA, 108 nt, Human
gcucgaacucaggcaguucagaggcuccuagccacuggccugggcagcucugggcuccagaggcuccuagccacuggcuugggcagcucugggcugcugguggugagc

SEQ ID NO: 4143751 - RNA, 68 nt, Human
gcucgaagucaguuuaaggcagaguauugcuaucucuugcaucucaagauucugcuuucugauagagc

SEQ ID NO: 4143752 - RNA, 72 nt, Human
gcucgggcucugggccagucucggccgcucugccaccugggcaggcggcgcgcugccucgacgcgccugugc

SEQ ID NO: 4143753 - RNA, 75 nt, Human
gcucgguagagguacuccccucaaaguuaauaagaaacuaagaaauuaauuuccugucaggugccucugcccagc

SEQ ID NO: 4143754 - RNA, 70 nt, Human
gcucguuuaccugaacuggucugcugcccgguuuagaugaauucaugcagagccagucaggauaaggagc

SEQ ID NO: 4143755 - RNA, 86 nt, Human
gcucuaaaauaggacaauuuuggcauaguucuguguuugaagaacagagaguugcuaaugugcagaauaaugucgagaauuggagu

SEQ ID NO: 4143756 - RNA, 82 nt, Human
gcucuacagagaaaaucucagugaggacacccacacuaucacauguuagcaggcuguccuuuacugauugcuucuggagagc

SEQ ID NO: 4143757 - RNA, 82 nt, Human
gcucuagagaaaaaacucaagugagagacucagggcuucuuuaaauguaauugcucucacucagagauuuucuuucuagagc

SEQ ID NO: 4143758 - RNA, 98 nt, Human
gcucuagguuaaccuuuaaaugugacuuaauccuuggguggggcauaguaugaugggcagcaucccacccacuccugagaugcuaaagguugaggagc

SEQ ID NO: 4143759 - RNA, 57 nt, Human
gcucuagguuccuagccaagucaguuuccuucagaugucuggcugcaaugccagggu

SEQ ID NO: 4143760 - RNA, 92 nt, Human
gcucuauaacaaauuuccuugaaacucuguagcuaaacauaaugaucaugucauugucuuuuaauuuuaugggucagaaauuugggcagagc

SEQ ID NO: 4143761 - RNA, 89 nt, Human
gcucuaugacaauuuggcaggacuguuaaguauacagcugggagaaucagaccgccugcaugcaacucccaguucugccauuuauuagc

SEQ ID NO: 4143762 - RNA, 71 nt, Human
gcucuaugaggagcuguuuuaacugcugaaucuuagcagucuauaauaauagugccuaacacauagccagc

SEQ ID NO: 4143763 - RNA, 63 nt, Human
gcucuaugggcacagccagugugucccuaccucaugauuggagccauggcugccccauauagc

SEQ ID NO: 4143764 - RNA, 95 nt, Human
gcucucaauuaccuaugcucuaguaaucagaaauaaaaauuaguuguuuuguuaaaagugauauagugcaugggugauugcaacuuacuaggagc

SEQ ID NO: 4143765 - RNA, 79 nt, Human
gcucucacaguucuccagugccuuugagauccugaagaagggagaaccucagaaaggguugcugagggcugcagggagu

SEQ ID NO: 4143766 - RNA, 56 nt, Human
gcucucacuuuagguuggaccgauaccaagcggccacuuacaccuuuagugaaagc

SEQ ID NO: 4143767 - RNA, 83 nt, Human
gcucucacuuugguauuuccucaggcaugucggugcaauaagaugucagcaccaugacacuguuauggugagguaaggagagc

SEQ ID NO: 4143768 - RNA, 70 nt, Human
gcucucagaagagccaggcuacaacaauugcccuuuagaaaugagaucaauggccucucuuguggguggc

SEQ ID NO: 4143769 - RNA, 108 nt, Human
gcugaggcucaccucuggggccucuguuggaccuuccuggcuccugggguccagaggugggccgaggcagggagaggugugccgaggcagggagaggugugccgaggc

SEQ ID NO: 4143770 - RNA, 58 nt, Human
gcugagggcccugagucuagcugcucuucccaacggaucuagaaagccaggggccugc

SEQ ID NO: 4143771 - RNA, 63 nt, Human
gcugaggguaguuuaauuaggaagaaauuagguuucuucuaagauuucaaacuacagcucagu

SEQ ID NO: 4143772 - RNA, 56 nt, Human
gcugagguaggagguugcagugagccgagauggugccacugcucuccagccugggc

SEQ ID NO: 4143773 - RNA, 86 nt, Human
gcugaggugggcagggcuguggacacuuuggugaugggcagggcucagggcacuucggggguggacauggcucugggcacuuuggc

SEQ ID NO: 4143774 - RNA, 72 nt, Human
gcugagguuugggcuccuguugauccugucacccagagagugaacauaguacccaacaggaaguuuuucagc

SEQ ID NO: 4143775 - RNA, 61 nt, Human
gcugaguaauaacuguuugauaaaggaagcaucacaacuuccaucuacaauuauucucagu

SEQ ID NO: 4143776 - RNA, 109 nt, Human
gcugaguaggaaaagugcaucuggaaagaggauaguggguagguggggagacacuucuuuccuuuuuaccuucccagauccuuuucacuguacccaauaccucuucagc

SEQ ID NO: 4143777 - RNA, 88 nt, Human
gcugaguaucaaugucuuacauuuacugagcacuuucuucuugcgggauauugugcucagaacugugaauacaugugaacccucaagc

SEQ ID NO: 4143778 - RNA, 101 nt, Human
gcugaguauuauguggggaccaucccugggcagaguccggaagauggggguggaauccccguuuaguuuguuugcuucggggguuggcccuucagcucagc

SEQ ID NO: 4143779 - RNA, 65 nt, Human
gcugagucucuaucauagcugaacccugaggacagccucauagcucauguaucagggacuuuugc

SEQ ID NO: 4143780 - RNA, 64 nt, Human
gcugagugggagauaacuuaacagcuuguccccgauuguaauggcauguuuuuccccacuccgc

SEQ ID NO: 4143781 - RNA, 65 nt, Human
gcugagugugggggugcugaggacacggcgucugcacacugguguccaggcggcccucgcucagc

SEQ ID NO: 4143782 - RNA, 84 nt, Human
gcugaguuccuccuccagaagugucagugcaggcagcuagugugagcacacagccuucugcggaugcuggagggagcagccagc

SEQ ID NO: 4143783 - RNA, 55 nt, Human
gcugaguugaaagcagaggauaaagauuuuguuuaucgcuuugugcucaacuagc

SEQ ID NO: 4143784 - RNA, 73 nt, Human
gcugaguugacuccagacugcuuugaccaauagcacagugacccugugccaguucugggguguagcccuuagc

SEQ ID NO: 4143785 - RNA, 72 nt, Human
gcugaguuuuacuagugaaauuugcaaguaauuauuuauaaugauaugcaaauuaucaucaggcaauucagu

SEQ ID NO: 4143786 - RNA, 76 nt, Human
gcugauagauuuucuugucaucagaagucaucuuuuaucguggaaaguuacucuucuccuguaagaagaucaaagc

SEQ ID NO: 4143787 - RNA, 72 nt, Human
gcugauagggaucacugucuaaaguucuuguuugcauuuugaagucaacaauaauugcgguucucuauuagu

SEQ ID NO: 4143788 - RNA, 58 nt, Human
gcugaucacauuuccaaaacccauucguugacauagggguuuuggaaaugugaacagc

SEQ ID NO: 4143789 - RNA, 79 nt, Human
gcugaugaagacugaugcuaaaugggccgugugcuuccuguggcucuaauggaaaucauggcguguuuagcuuaauggc

SEQ ID NO: 4143790 - RNA, 64 nt, Human
gcugaugaccugguuaugggucucucagcuuggggacugggagacccccaaugccaggucucgc

SEQ ID NO: 4143791 - RNA, 96 nt, Human
gcugaugcaccaggcugagccucucaucugcaguuuucugugacuccauguuuugugcugccaagggugggggagcuugccuggcuugccaccagc

SEQ ID NO: 4143792 - RNA, 66 nt, Human
gcugauggggagugguugauggugaaaaucugucuccaagaucaccaugaagcggcucccacuugc

SEQ ID NO: 4143793 - RNA, 91 nt, Human
gcugauguuggagggcagccaggccuggugaccaaagcucuugacaguuuccugccuggucuggucucaguccuggcuuugcagccucagc

SEQ ID NO: 4143794 - RNA, 67 nt, Human
gcugauuauuacaugucuguggaagcuucuggagccagugguggagaggcagaugugaauaaucagu

SEQ ID NO: 4143795 - RNA, 80 nt, Human
gcugauucccacuggaauggauagagcagagucugccuuccccauccugacuucuuucuauuccgauccagaaagacugc

SEQ ID NO: 4143796 - RNA, 70 nt, Human
gcugauucugucuucugugaaagcagguggaaaagacguucugcugcauuccacagaagggaaaacaggc

SEQ ID NO: 4143797 - RNA, 70 nt, Human
gcugauucuguuuaaaaugaggcacuugugacacuuugaaugcacucugguucugaacaggaucuugagc

SEQ ID NO: 4143798 - RNA, 70 nt, Human
gcugauuuaaugguucauuaauuucucugcuaucauugauggagguuuuaggcugccauuauuuaucagu

SEQ ID NO: 4143799 - RNA, 88 nt, Human
gcugcaaagcugccccggaagccuuggggcuccucuguauagaagaacuggguggggcccggcgggguggugaagggcagacugcggc

SEQ ID NO: 4143800 - RNA, 66 nt, Human
gcugcaaaggugggggaggagcuggcagaaauagagucccuagcugcucacccacuuuuuagcagc

SEQ ID NO: 4143801 - RNA, 80 nt, Human
gcugcaaccgcuguugcucuugcacuugcuguggcuguaacuguugcugcuggugcauuagcugcaguucugguuucagu

SEQ ID NO: 4143802 - RNA, 68 nt, Human
gcugcacacaugugggauccgcagggcauuagagaaacccugacccaguggcccagcauguggugagc

SEQ ID NO: 4143803 - RNA, 130 nt, Human
gcugcacacucagggccuuguugaccacguccuggggcggcaccagggccuggugggucagcacgguaggcgggcccugcagccccagcaggucggugcugccugggaagagggcuuggggccccgcagc

SEQ ID NO: 4143804 - RNA, 64 nt, Human
gcugcacaguuaauaugugacagaacuaaugaaaccuaguucucaagacaauuaccugugcagu

SEQ ID NO: 4143805 - RNA, 65 nt, Human
gccuccuggaugggcucaugacugucaacaaauugcaucccacugcagcaccaugcagggcuggc

SEQ ID NO: 4143806 - RNA, 107 nt, Human
gccuccugggcaaaggcuaguuagaguggcguccuaggaaaggagggggcuaacaguguuucugguucaucuucuauccucagccccugccuagcuuguccagaggc

SEQ ID NO: 4143807 - RNA, 85 nt, Human
gccucgaaauaaauuuugguaaaaugaacuagcuuuccuuugcuguagccaaggauauuuagaaauuuugcaaauguuugagugc

SEQ ID NO: 4143808 - RNA, 116 nt, Human
gccucgcaacgucugcaccugcucgcccagggagcugcucugcuuccgugccucagauaaugccugccgggcggcauccagccguuccugggggacaggggcugauggugccuggc

SEQ ID NO: 4143809 - RNA, 87 nt, Human
gccucggagcaggccugguggugcaggaagcaucuggcugucacgccuggagcuagugugccccuggcccccggccugcuugcuggc

SEQ ID NO: 4143810 - RNA, 60 nt, Human
gccucggguacagauacccugauucuuaggagaauuuccaaauuucugucacacugaggc

SEQ ID NO: 4143811 - RNA, 70 nt, Human
gccucgguccaagucuuccuucccaaaccuuugucauuuagggauugagaagcugaguugggugaaaggu

SEQ ID NO: 4143812 - RNA, 65 nt, Human
gccucuaaaaauacaguagguaauaguucauaaagauuuuagaaauaguugacacuguuggaggc

SEQ ID NO: 4143813 - RNA, 69 nt, Human
gccucuauuggaaaauauccccccaaacagugcuaguuaguguuucugucuguuuucuacauagagugc

SEQ ID NO: 4143814 - RNA, 62 nt, Human
gccucucagagagaugaaacuuccaaagggcuggaggguuccccuauuugugaugacuaggc

SEQ ID NO: 4143815 - RNA, 128 nt, Human
gccucucaucacuccucuugccucucaccuccugaaaaagcaaguugccuagguugagaaaggaucggcaacagucaacuucuuuguccauuucccucaggagaggagaagguaugggaacuaguggc

SEQ ID NO: 4143816 - RNA, 120 nt, Human
gccucucccggcaagaugcaaagucaggcugaggaucucgggccuggacucaagcucacaucccuuccuuggcccucugcucagcuccucagcaccacugcucucugccacugggaaggu

SEQ ID NO: 4143817 - RNA, 59 nt, Human
gccucucuggaagaauacacuuagaaaggaaacucaucuuuucuuuucuuuuggggggc

SEQ ID NO: 4143818 - RNA, 75 nt, Human
gccucucuugccugccugcaucccacaguggggacugaggcccugaggccccaaggggaaguggcgggcggaugc

SEQ ID NO: 4143819 - RNA, 61 nt, Human
gccucugaaucaaagggccuauuugcuuggaacuaugcaaagcaaugcuccauucagaagc

SEQ ID NO: 4143820 - RNA, 101 nt, Human
gccucugcagcucagugaaguagauagcaucuguuuaaugagcucccacuucauuacagagcuguacuacuuacugagucauucuccuuaagcaugcaggc

SEQ ID NO: 4143821 - RNA, 63 nt, Human
gccucugcccuccugggacugcaugggaagcaggccaagugcaggaagggcuaaaguggaggc

SEQ ID NO: 4143822 - RNA, 58 nt, Human
gccucugcugacaagauggacagcaaugugugugcaucuuucaacaaugcagacuugc

SEQ ID NO: 4143823 - RNA, 83 nt, Human
gccucugcugagcugagaacacuugggcuaguccuugguuuccacauuucccugggucauuguuuuuguuucucacuagaugc

SEQ ID NO: 4143824 - RNA, 69 nt, Human
gccucuggagucagaccagcuuggguucaaacccugacaccaucgcucacgagcugugucacuuugggc

SEQ ID NO: 4143825 - RNA, 63 nt, Human
gccucuggcucaggucagacagggaguuaccaggaacccuuuccugcugccugcgggcaaggc

SEQ ID NO: 4143826 - RNA, 61 nt, Human
gccucugggccuccuccgacagccgggcaccugcgguggcgaggggggcggccgggccggc

SEQ ID NO: 4143827 - RNA, 56 nt, Human
gccucuguggccuuggaccagcuucugggaaagagccccugccuggcuacaggcgc

SEQ ID NO: 4143828 - RNA, 61 nt, Human
gccucuguuucccacaguguggagagcgaaauaaauacucucucacagucaaugcagaggu

SEQ ID NO: 4143829 - RNA, 67 nt, Human
gccucuuaggacgcccucccuuccaugcugugagccucccaagccagcaggagggugccugggcugc

SEQ ID NO: 4143830 - RNA, 76 nt, Human
gccucuuuccccagccaccccugucauugcucaaugggcucaugaauacaguggccaugguggcagggguggaggu

SEQ ID NO: 4143831 - RNA, 102 nt, Human
gccucuuuuucuagaagaguccucaugcuuggcaccaaauccuugaauuaguguuuaguuggcugaaagccaugagaccguugagaaaaaaaaguagaaggc

SEQ ID NO: 4143832 - RNA, 72 nt, Human
gccugaacaggaaagaaaugagaacaccaauucucacagaggugguacuuucagauuuuuucuguggauggu

SEQ ID NO: 4143833 - RNA, 61 nt, Human
gccugaaggagucagagagggccucaaaacagaggcauugucugagcugaguccucuaggu

SEQ ID NO: 4143834 - RNA, 55 nt, Human
gccugaaguugauugaaggacuauuaauuugcauggggagguaacaauuucaggc

SEQ ID NO: 4143835 - RNA, 64 nt, Human
gccugaaguuuagauuucaugaagacacucagaacuuguagguuuugugaaucuaggcccuggc

SEQ ID NO: 4143836 - RNA, 92 nt, Human
gccugacucuuggcaagugcuugaugaaugaucaauauuauuauuacuauuguuguuauuauuacuaagucuuccuaagaagagucaugggc

SEQ ID NO: 4143837 - RNA, 65 nt, Human
gccugacuuuuccuggguagcuccugggucaaaauuucaggcaggaucccagggaaggggcaggc

SEQ ID NO: 4143838 - RNA, 63 nt, Human
gccugagaaggcccagucaaggggcuagacaguucuguuucuccugagggccuucuuccuggu

SEQ ID NO: 4143839 - RNA, 58 nt, Human
gccugagaguugaaguucagugucacaaagccaagacuuggaggauuagcaaucaggc

SEQ ID NO: 4143840 - RNA, 57 nt, Human
gccugagauguagcgcaguggcaaaacaaacugccaucugaaaauuacauccuaggu

SEQ ID NO: 4143841 - RNA, 61 nt, Human
gccugagauuugaguuccuacugaguccccuacaggggcacagcuaugagcugaauugugc

SEQ ID NO: 4143842 - RNA, 63 nt, Human
gccugagccaggaggcagagacugcagugagccaugauugcacuacugcacuccagccugggu

SEQ ID NO: 4143843 - RNA, 57 nt, Human
gccugagcugcagccucaugauucgguuacgcuggcugaauuccaggccugcagggc

SEQ ID NO: 4143844 - RNA, 60 nt, Human
gccugaggaggucaccugaggugggaggagccaggccugucaucuccagacucccagugc

SEQ ID NO: 4143845 - RNA, 62 nt, Human
gccugaggauuguuggugcuuccaggcauauaaccccugggauacaugagugacuuuauggu

SEQ ID NO: 4143846 - RNA, 69 nt, Human
gccugagggcucuacucaccacccugcuuguccgcacauccaagcuccuugugggacuggggcuccagc

SEQ ID NO: 4143847 - RNA, 65 nt, Human
gccugaggguggccaaauuguauggccucuagagccagccaucacauccaggcuaccuccguggc

SEQ ID NO: 4143848 - RNA, 64 nt, Human
gccugagugcaucugcagacauuaugugagugguagggcuuagauggaauuagagcacugaggc

SEQ ID NO: 4143849 - RNA, 98 nt, Human
gccugaugacaccucaacuuuggacuuagccugcagaauuaugagaucauuaauaucuguuguucuaagccacccaguuuguggugcuuuguuauggc

SEQ ID NO: 4143850 - RNA, 73 nt, Human
gccugauuaugacuucccaggugguguggaguuccucuugacccagauaacuugaaggaagaagaaauuaggc

SEQ ID NO: 4143851 - RNA, 85 nt, Human
gccugauuggaaugcacacugagccugccuagggaaauuaggcuuaauucuggcucaguuuccuguauucuccuguaauacuggc

SEQ ID NO: 4143852 - RNA, 88 nt, Human
gccugauuugggccccuguuguggcuuugucuaauuauagaaauggauccuuagaguccucagcguuuugugggaccccaaaccaagc

SEQ ID NO: 4143853 - RNA, 56 nt, Human
gccugcaacauccuugcuccugagcccgcugcuuccuugagcacugguguugaggu

SEQ ID NO: 4143854 - RNA, 59 nt, Human
gccugcagagagaaccauucaaccugcucaaacgugguagauucucccaccugccaggc

SEQ ID NO: 4143855 - RNA, 72 nt, Human
gccugcagcaugcuaggucuugucaaacccucugcaccuugggcugcgcaguuaucuggacaugugccaggu

SEQ ID NO: 4143856 - RNA, 68 nt, Human
gccugcagcccuugguauuuuccgaucccagcugcucugugaggguggaaaguauuuggggaccaggc

SEQ ID NO: 4143857 - RNA, 56 nt, Human
gccugcaggcuaccuugaggccuuaacugucaacugaggcagcuggccaggcaggu

SEQ ID NO: 4143858 - RNA, 91 nt, Human
gccugcaguugguuccugggccugcauucaccaucacaucccccacuggugggcucuugggaauugacaauggcgugggaacagaucaggc

SEQ ID NO: 4143859 - RNA, 77 nt, Human
gccugcauauuuugugauucuguauauaugagauguccaggauaagcaaguuuacagagacagaaaguaguuuaggc

SEQ ID NO: 4143860 - RNA, 59 nt, Human
gccugccagcuggucugugcucauguuggcugcacucauggacuugaccggcugcuggc

SEQ ID NO: 4143861 - RNA, 65 nt, Human
gccugccaguguuugaggauuguaaaaauccacuugacaucaucuucauugacaucuggacgggc

SEQ ID NO: 4143862 - RNA, 80 nt, Human
gccugcccagcccgugggugugcagcugguggcucccugagaacauuagccacccugcaaaugcccaggaaggcagaggc

SEQ ID NO: 4143863 - RNA, 74 nt, Human
gccugcccagcugucuggcagggauggggguggcgguggcgcugcucaucccggcagcaggcagcuggggacgc

SEQ ID NO: 4143864 - RNA, 74 nt, Human
gccugcccccauggagugccugagggccagcaaacaccuguggcuuccuaggagcccgugcuuugggcaguggc

SEQ ID NO: 4143865 - RNA, 76 nt, Human
gccugcccuagguuaggcuguaugcucaauguggaguuuuccaucaugaauaagacaggccagccugggguaaggu

SEQ ID NO: 4143866 - RNA, 69 nt, Human
gccugcccuggucucuuggcugcccuaauggaaaggcuccaaguugcagcuuuagaaacaagggcuggc

SEQ ID NO: 4143867 - RNA, 69 nt, Human
gccugcccugguuacacuggaguccaaggugaagcggaugaccguguacucucaguagaccggaugggc

SEQ ID NO: 4143868 - RNA, 74 nt, Human
gccugccuuucugugaccagaguggccuuucuuggcucaggaacugagugcccucuggcacagagaugcagagc

SEQ ID NO: 4143869 - RNA, 79 nt, Human
gccugcgccuuucucccugccugccugcgccucccaugcagggccgacagcgccagccagggaagggagagacacaggc

SEQ ID NO: 4143870 - RNA, 59 nt, Human
gccugcgugccacagaccaccgugcugguuauaugaguaacuagggcuuggcagcaggc

SEQ ID NO: 4143871 - RNA, 97 nt, Human
gccugcucauuggaauugccuggagagcugguucaaagcagacucugauuccgcagaucuggaauaacccugcuuccaagugauuuccaugggcugc

SEQ ID NO: 4143872 - RNA, 55 nt, Human
gccugcuccggagagggaagcauugugugcagcucaggauucucagggcaguagc

SEQ ID NO: 4143873 - RNA, 61 nt, Human
gccugcucuggggcuuccucacguuccugauugagaaaugaaggcccuggagccacgaggc

SEQ ID NO: 4143874 - RNA, 62 nt, Human
gccugcuggcccaugaagacgcagucgaugcacugggucuuuuccuguggccaauuucaagc

SEQ ID NO: 4143875 - RNA, 58 nt, Human
gccugcuggcuggaaauucuccugagaucgguuggagucuauuugcaggcaugcaggc

SEQ ID NO: 4143876 - RNA, 67 nt, Human
gcuccuucugcccaucugcagacaugcguguccuucaagccaguguccagaaugggcaaaaaggagc

SEQ ID NO: 4143877 - RNA, 55 nt, Human
gcuccuuucuguugguggccccuucccgguugggaccaggcuugugggagggagc

SEQ ID NO: 4143878 - RNA, 59 nt, Human
gcucgaccgccagaaacuuccuucuccugacucaggccacagucuucuguguggugagc

SEQ ID NO: 4143879 - RNA, 61 nt, Human
gcucgccccggcacaguguccgucugcacagacgcccguggacgcacacgcgggggcgugc

SEQ ID NO: 4143880 - RNA, 58 nt, Human
gcucggggcaaacucgcucuuggacuugguugucuuuggucaggcaugugcccugagc

SEQ ID NO: 4143881 - RNA, 128 nt, Human
gcucguaggacgcccacagcccauggaaucaugaaugccgaggagcugcccccuucaucuuuaauucaaaugagccugaggaugacgauggcaauggcacugaugugggcugagcucuuaccacaugc

SEQ ID NO: 4143882 - RNA, 113 nt, Human
gcucuaacagagaaggagagaaaggagagagccgacccaguucuagccccaccugcuggguccugagcagaagggcuacacgggcucuccuucccucgccuccugguuggagc

SEQ ID NO: 4143883 - RNA, 77 nt, Human
gcucuaagccuagaccagucauuacucaugcccugggacaauucaggcuguguggauaauauugggguuuaguuagc

SEQ ID NO: 4143884 - RNA, 67 nt, Human
gcucuaaggccagccagcaaaucugugggagugauuuuaacccacgggggagcggcaggccuagggc

SEQ ID NO: 4143885 - RNA, 57 nt, Human
gcucuaauugaaaaauacugcacuuuaaugucugcauugcaguuucaggacgagagu

SEQ ID NO: 4143886 - RNA, 123 nt, Human
gcucuaccuaagggaagcuugaguagggcaugcuuuaguuuggacuuaugaaguauugcaugcuucauauuucaugaaguccaaacuaaagcacccccuacucaagguucccuuagcuagagu

SEQ ID NO: 4143887 - RNA, 57 nt, Human
gcucuaccucaucagaugacaaaagaauguucugcagcuuuuuggugggguggcggc

SEQ ID NO: 4143888 - RNA, 60 nt, Human
gcucuagaaagaaggaugugggauggaaauauacauaugcuuccccuucuuuuuggaugc

SEQ ID NO: 4143889 - RNA, 60 nt, Human
gcucuaggaggugugcuuagaacggaauucaagggucaucugagagcaccuccuuggagc

SEQ ID NO: 4143890 - RNA, 55 nt, Human
gcucuauaaggcccaguaaggucuccauaauagggaccuucaggaacuuaucagc

SEQ ID NO: 4143891 - RNA, 64 nt, Human
gcucuaucgucaggcauagugagacucuugucagagcaggcucacucuguuuggcucacagagu

SEQ ID NO: 4143892 - RNA, 68 nt, Human
gcucuaugaaccugaaucucacucccaaagacuucuuccuuccccguaagaacuuauguuuauggagc

SEQ ID NO: 4143893 - RNA, 58 nt, Human
gcucucaccauggcuggcagugugcggggacuucgcagccaccucccauggcgggggc

SEQ ID NO: 4143894 - RNA, 68 nt, Human
gcucucagcucuuuuuucacagaaagucuucugaaaaggacacgcuuccauggaacgaggcugggagc

SEQ ID NO: 4143895 - RNA, 81 nt, Human
gcucucaguuucuaguucucugccaaaaaagugacaugaucuugauuauaugcuuuuuuaguaguaacuuaggcagagagu

SEQ ID NO: 4143896 - RNA, 56 nt, Human
gcucucccauuuuacugauaagaaaagcaaggccacauugcaguuggguggggagu

SEQ ID NO: 4143897 - RNA, 100 nt, Human
gcucuccucaggauuggggucuggagugggugggaagccagaagaagagagccccuccacucugcugaggccuucccacuccccagagccuccggagggc

SEQ ID NO: 4143898 - RNA, 57 nt, Human
gcucuccugagccucacaagggcacugaaccacuuccuuuaugucacucuggagagc

SEQ ID NO: 4143899 - RNA, 112 nt, Human
gcucuccuugggccuuagugucagcucuaaagauuuauaaagguugcacuggaaccucuuuccaguuguuauuuuuauaaaggaucagugacauuuugaggcagauaagagc

SEQ ID NO: 4143900 - RNA, 84 nt, Human
gcucucgcucucagaauccuugcccaggugcauugcauucagacagcacucucacccagguagcaaggauuagagagggggagc

SEQ ID NO: 4143901 - RNA, 59 nt, Human
gcucucugagaccuuggcucuacaagccuuuuaaccagagagaggagucucagaugagc

SEQ ID NO: 4143902 - RNA, 58 nt, Human
gcucucugccauaugaggauacaaggagaagucaauaguauucaacuuggcagagggc

SEQ ID NO: 4143903 - RNA, 58 nt, Human
gcucucuggaagcgcagaucuguuuuaaaaguccugagcaauuucucgcaccagacgc

SEQ ID NO: 4143904 - RNA, 60 nt, Human
gcucucuggaagguaucauuaucuccauguuacaagggagaaaaugagccccacagaggc

SEQ ID NO: 4143905 - RNA, 70 nt, Human
gcucucuggauggacuaaauagggcuggcuuggaaaccgugagucagcuuccuacaaccaucucagaggc

SEQ ID NO: 4143906 - RNA, 74 nt, Human
gcucugaaaugaucacaagucugaagaaugagaaacauuuucauuuccauucaguguggucuggcagcuggagc

SEQ ID NO: 4143907 - RNA, 104 nt, Human
gcucugagaaacgaggcagcgggcacuggggcagccacauagacaacaucuaaauuuuuguugcuuuccugggucuugcccuguccuuacuguuucccuugggc

SEQ ID NO: 4143908 - RNA, 58 nt, Human
gcucugagagcuacacaggguagaccacagccccagguacccuguauggcucacaagc

SEQ ID NO: 4143909 - RNA, 55 nt, Human
gcucugagaggaugcugagcagcaacaucaacugcuuuuuuucccucuccagagc

SEQ ID NO: 4143910 - RNA, 56 nt, Human
gcucugagcugucuugcaggucaagggagaggggugcacauuggaaaguucagggu

SEQ ID NO: 4143911 - RNA, 55 nt, Human
gcucugaggagccaagaauguggaccuagguguccucuugucuuugcucaguagc

SEQ ID NO: 4143912 - RNA, 74 nt, Human
gcucugaggaggucgaagcaccuuguaugucaugugaaaaauauuuccaagcaaagugcuuugccuccagcugc

SEQ ID NO: 4143913 - RNA, 56 nt, Human
gcucugauaagcucccaaagaucaguccuuaucugaaaauuugauagaaucagagu

SEQ ID NO: 4143914 - RNA, 119 nt, Human
gcucugcaauaaagaagugacugaaaacuauagcacugguuuuucuugguuggaugaauuaaugcacauucugaaaaacaguguuuuagauuucaaguuccaggucuuccagaaggagc

SEQ ID NO: 4143915 - RNA, 65 nt, Human
gcucugcacauuuguuauuuugagguacaucaccuuggacuucaggaucaauauaugauguuagc

SEQ ID NO: 4143916 - RNA, 64 nt, Human
gcucugcaucauaaaauuuagaguugaagacagaugcuguaacuuaaaaggauugaugcugggc

SEQ ID NO: 4143917 - RNA, 61 nt, Human
gcucugcccagugcccugagaccuacugcaggagcaucagaaaggccacauggugcagagc

SEQ ID NO: 4143918 - RNA, 73 nt, Human
gcucugcccugaccugccucagagugggcuacaguacaccuuuggcaaacucaugggcagccuagggccaagc

SEQ ID NO: 4143919 - RNA, 95 nt, Human
gcucugccuuguuggggggugugugaggggcuaaucauaaagaauaauuugggagcuaguucuggacacacguucccagacugauuggguagagc

SEQ ID NO: 4143920 - RNA, 86 nt, Human
gcucugcucuucacacuacacccgugaccucuguuuccgugucuguccacggggaacggcgaugggugggugugagguggccgagc

SEQ ID NO: 4143921 - RNA, 63 nt, Human
gcucugcugagagccacguggcacaacuggggcuccauccaguugugugugccucuguagagc

SEQ ID NO: 4143922 - RNA, 98 nt, Human
gcucugcuguccugcugcuuucccugcuuguuuauaaauuggagaacaacuuucaacuuggugggagagcuguagucuaauaggaacaguaaaauggc

SEQ ID NO: 4143923 - RNA, 73 nt, Human
gcucuggauggcuggaugugagaucaagagguuaacuggugccuuuccuucugauucauccagaguccuaggc

SEQ ID NO: 4143924 - RNA, 65 nt, Human
gcucugggaaggaucguagugagaugcaggaauucacccacaaccacuaccaaccuuccaggggc

SEQ ID NO: 4143925 - RNA, 82 nt, Human
gcucugggcucagucuccugggggcuguuguugcucacauucugugaaaggcagcagagccuaggagcacucccuccacagc

SEQ ID NO: 4143926 - RNA, 59 nt, Human
gcucuggguagccacugccuggaaacaugagugucuauugguagaaccuugcccagggc

SEQ ID NO: 4143927 - RNA, 58 nt, Human
gcucuggugaguguaguucaggaaugcugacagcccuaagcaucuucacuuauuaggc

SEQ ID NO: 4143928 - RNA, 68 nt, Human
gcucuggugcaguagaaggccgacuucuccuguguggaagaaguuccccugcucugcugugggagagc

SEQ ID NO: 4143929 - RNA, 57 nt, Human
gcucuguagugggcaugugauucagccuuugccagucagguaccacauuacauuggc

SEQ ID NO: 4143930 - RNA, 69 nt, Human
gcucuguccagcgugcacagaaaguucuagaaagaacgaguacuucugagugucgcugguugaagaugc

SEQ ID NO: 4143931 - RNA, 72 nt, Human
gcucugucgcccaggcuggagugcaguggcgccaucuuggcucacugcaagcuccgccucccggguucaggc

SEQ ID NO: 4143932 - RNA, 56 nt, Human
gcucugugaaaacauaaauggaaggauggcccauucauuuaggaguucauaagagc

SEQ ID NO: 4143933 - RNA, 67 nt, Human
gcucuguguaaauguaggguccagauuggguuucagcaaaacacuagcccugcauuaacauccaggc

SEQ ID NO: 4143934 - RNA, 57 nt, Human
gcucuguguucccuccaggcuccugguugugaggaacaggaguggauggggcggggc

SEQ ID NO: 4143935 - RNA, 66 nt, Human
gcucuguugucuaggcugcaguacaguggugugaacauggcucacuguagccuugaccuccugagu

SEQ ID NO: 4143936 - RNA, 72 nt, Human
gcucuguuucccaggcuggaaugcaguggugugaucuuggcucacugcagccuccaucucugggguucaagc

SEQ ID NO: 4143937 - RNA, 75 nt, Human
gcucuuaaggaaguacccauucuuagggucaugcuugugcagucagccccugagagugagugccaccuuaagugu

SEQ ID NO: 4143938 - RNA, 68 nt, Human
gcucuuacauaauuuauggaaugguauacaacaucuacuguguacuaaacuuccauauauuacugggu

SEQ ID NO: 4143939 - RNA, 56 nt, Human
gcucuuagcagagauaccccugugagagaacaaauuggguuccucacgcuaagggc

SEQ ID NO: 4143940 - RNA, 58 nt, Human
gcucuuaggagguguuccuuaccugucacucccagguaaguaacaccacuccuggagu

SEQ ID NO: 4143941 - RNA, 102 nt, Human
gcucuuauuccucucauagguuacuguagaaauagugguugacaggacugaugucaguccagcuaacucaugauuuauugccuccuauggagagaguaaugc

SEQ ID NO: 4143942 - RNA, 69 nt, Human
gcucuucaguguccuuaguuagcuuuggggaaaauuaaucugcgggguggugcucgacacgcaggaugc

SEQ ID NO: 4143943 - RNA, 79 nt, Human
gcucuucaucuggcugccaccauccuccccccucgaaggcucccaggguaaggggagagugacggcaguggagaggggc

SEQ ID NO: 4143944 - RNA, 60 nt, Human
gcucuucccuaaucaccaucuucaguggagugucugaguuugguaucuagggggucaagc

SEQ ID NO: 4143945 - RNA, 114 nt, Human
gcucuuccucagaugcuugcgggugccuggguggaugcugacuguucugcucgggauuccccguagcugucugugaacacagcauuugucacaauagccugcgaagaggagggc

SEQ ID NO: 4143946 - RNA, 84 nt, Human
gcucuuccucucuaauccuuugucccugggugagagugcuuucugaaugcaaugcacccgggcaaggauucugagagggugagc

SEQ ID NO: 4143947 - RNA, 81 nt, Human
gcucuucucaggcuguggcuucaguucuugacuaauuaccaucaagauuaggcaaagaucaccaaguaacagucugugggc

SEQ ID NO: 4143948 - RNA, 70 nt, Human
gcuuuacugagaugacacagggcacaaaguaagugcaaacacagaccuguucauuuuccauucaggaagc

SEQ ID NO: 4143949 - RNA, 79 nt, Human
gcuuuacuuaagggaauguugugguugguuugaucuucuaucuagaccacuaaaacuuucucuauaucagcggugaggc

SEQ ID NO: 4143950 - RNA, 57 nt, Human
gcuuuagaggaaugggugaguggacaucuuaauauguagcaucucuuauuucucagc

SEQ ID NO: 4143951 - RNA, 59 nt, Human
gcuuuaggagacacgaaacagccuaaaacagcaugguuuggggcuguuucuccagaagu

SEQ ID NO: 4143952 - RNA, 73 nt, Human
gcuuuaguaguacacauuagucaagaguuugaaccaaguucagccauuuguuaacuauguguucuugggaagc

SEQ ID NO: 4143953 - RNA, 71 nt, Human
gcuuuauuagucugcaugucccaaaggaacagcaaagggacugucugccacugcaugcagaguaagaaggu

SEQ ID NO: 4143954 - RNA, 62 nt, Human
gcuuucaaauccuaauuccaacaacaacuggcuaagugacuuugggcaaguuaggaugaagu

SEQ ID NO: 4143955 - RNA, 77 nt, Human
gcuuucagaaguuacaggagaaagagaucacuucagacccagaugauccuaagauguauuuugagauaguugaaagu

SEQ ID NO: 4143956 - RNA, 58 nt, Human
gcuuucagcaacuaaagucuggauugauuuuuguggucuagauguacugcugaagagu

SEQ ID NO: 4143957 - RNA, 69 nt, Human
gcuuucagcucugcacuccacuguggcuuauuaagaaagaauaaaacucacacuggcagugcugaaggc

SEQ ID NO: 4143958 - RNA, 74 nt, Human
gcuuucaucgaguuauguauauuauuaugucaucucccuguauuugaguuaguuauuacaaacuccuugaaggc

SEQ ID NO: 4143959 - RNA, 73 nt, Human
gcuuucauuaaaugaguaaguguuucagagcuuuagcaauuauuauaguggugagcugcauuuauguggaagu

SEQ ID NO: 4143960 - RNA, 71 nt, Human
gcuuuccaagucuggauuuagaggugggccuugucuagaaagccaggucuaccuuuuuucaggcaaaaagu

SEQ ID NO: 4143961 - RNA, 76 nt, Human
gcuuuccagugaacgacuguugacuauuuggggauucucuuguucucagauccaucagaagucccacagagaaagc

SEQ ID NO: 4143962 - RNA, 55 nt, Human
gcuuucccuaagcauuuggggagucauuuacuccuuuggcugacgaggaggaggc

SEQ ID NO: 4143963 - RNA, 57 nt, Human
gcuuuccugccuuauucauucauuuccaggcaaugaggaugagcaggcaagacaagc

SEQ ID NO: 4143964 - RNA, 67 nt, Human
gcuuuccuggcccugucccugccucgcaagaagcgugggcccaagcagcggcggccgggugaagagc

SEQ ID NO: 4143965 - RNA, 73 nt, Human
gcuuuccugggaaaggggugucucugucccuaagcaaaaaggcagggaggaagagaugcuuccccagggcagc

SEQ ID NO: 4143966 - RNA, 62 nt, Human
gcuuucggggauggugucugagggagcaugauuguucugggcacacaggcccugguugaagu

SEQ ID NO: 4143967 - RNA, 68 nt, Human
gcuuucuaaucuauuuccuuacuuguuggcuggguaaguguuacauuugggaaauagaagaagaaggu

SEQ ID NO: 4143968 - RNA, 93 nt, Human
gcuuucuacuagauaugacaauuugugcuucuguucugaggccuuugaauugcacuccaaauauccucagggcagagguguuaagugagaagc

SEQ ID NO: 4143969 - RNA, 68 nt, Human
gcuuucucagcccagagccgcccccuuggugcccgcagcgaggaugaggcacuaggcccggaggaagc

SEQ ID NO: 4143970 - RNA, 78 nt, Human
gcuuucucuuuucccuuuaguuucugggcucuuuuccggaugauccgugugcuaggaagcuggggagaagucggaagc

SEQ ID NO: 4143971 - RNA, 59 nt, Human
gcuuucugauugcgaaaacaaagcuaguguuuuuggaaugugcuuuccaaauagaaagu

SEQ ID NO: 4143972 - RNA, 80 nt, Human
gcuuucugucccccuugacuugccucgggcccuaucuccucugguggggguggaaaggcaaguugucgggagcagaaggu

SEQ ID NO: 4143973 - RNA, 55 nt, Human
gcuuucuugaggcugugcuuucuucccuggcuugaagaguguacaagcagaaggc

SEQ ID NO: 4143974 - RNA, 101 nt, Human
gcuuugaaauccuaguugcugcacaaggaaauauguuaaagagacacauucucuguguuuacuuaaauguuuucauauaauguagaauugguuuucuaagc

SEQ ID NO: 4143975 - RNA, 58 nt, Human
gcuuugaagacagaucaauauaagccuaaggucuucauguuaagucuguuaucagugc

SEQ ID NO: 4143976 - RNA, 63 nt, Human
gcuuugacgacucuccggaguggugagaaacucaaucucagucacauuugggggugucaaagu

SEQ ID NO: 4143977 - RNA, 80 nt, Human
gcuuugacuccauuuauuauuuugaacaaucaagaaaaacaguuuucuugaugguggcagaagagugauauagaaaaagc

SEQ ID NO: 4143978 - RNA, 56 nt, Human
gcuuugcacaaccuuuaagacaauaauaauucuaaauugagucuuguguguaaggc

SEQ ID NO: 4143979 - RNA, 82 nt, Human
gcuuugccaggaccuguucuugggcagaacugaauauauacucaauucugaggagggaagaggaaggucauggcuaaaaggu

SEQ ID NO: 4143980 - RNA, 71 nt, Human
gcuuugcgucucauaaacucaguuuucucauccauagaauaggugguugggaggguuuaaugugacaaagc

SEQ ID NO: 4143981 - RNA, 76 nt, Human
gcuuugcugcuuguuucuccauuuuugucauuauuguucguaagcaaauagacaagauggcaggaaguaucaaagc

SEQ ID NO: 4143982 - RNA, 61 nt, Human
gcuuugcuggaaucaacgaaugugcuuaauucgaaggugucuuugucgguuacagcaaugc

SEQ ID NO: 4143983 - RNA, 76 nt, Human
gcuuugcuuauaggaacuauaugucuuaaagcuuuucugaauccuuaaagcaugaaguauaguucuggagccuugu

SEQ ID NO: 4143984 - RNA, 83 nt, Human
gcuuugcuugcuagaauuaaguggucaauaguuuccuaaaguugacguugcucagggagcgauuuaccauggcagggaaaagc

SEQ ID NO: 4143985 - RNA, 68 nt, Human
gcuuuggagccagauaagaccaggguuugaacucugauccugccagucacuaugucaccuucuaaggc

SEQ ID NO: 4143986 - RNA, 55 nt, Human
gcuuuggccaaagaaaugugaguggaaauaacacaugacauuucuaggugaaagc

SEQ ID NO: 4143987 - RNA, 57 nt, Human
gcuuuggcugucagucaaccaccaaagauuuauugaacauugacuuaacagcaaggc

SEQ ID NO: 4143988 - RNA, 84 nt, Human
gcuuugggguggcaaaugauagagccgauuaucacucugagaggaaagagaggaguggggcugugugcguuugcuagaccaagc

SEQ ID NO: 4143989 - RNA, 88 nt, Human
gcuuuggguauuuuauggccuggggccuaacuuaucuauuccccaaagaugaaagauguaguaccagguuuucugggguauguaaagc

SEQ ID NO: 4143990 - RNA, 68 nt, Human
gcuuugggugggugagcguggagcggcauaugggugauguucugcaagcccugccaccugcccuaagc

SEQ ID NO: 4143991 - RNA, 114 nt, Human
gcuuuguaaauaguaauuuuacccaguggugcauguuugagcaaacaaaaaugaugauuuaagcacacuacuuauugcaucaaauauguaccacaguaaguauaguuugcaagc

SEQ ID NO: 4143992 - RNA, 84 nt, Human
gcuuugucagcaucuguuuuucugacccaggauaagaucuuccuuuuagaucugcuggucaagggacagagcugaacucuaagc

SEQ ID NO: 4143993 - RNA, 55 nt, Human
gcuuuguccugcugaggaugugugacuggucccacaugcucuccaaggacagagc

SEQ ID NO: 4143994 - RNA, 95 nt, Human
gcuuugucuaccuaaaaccuuuuagcucuguuugacagaagaccucaaauaagagagcuuuaaacagagucugaaauguaaaggucugagagagc

SEQ ID NO: 4143995 - RNA, 59 nt, Human
gcuuugugauugauacuuaaaaaguacauaaauguguuguaaugucaaagucacaaggu

SEQ ID NO: 4143996 - RNA, 129 nt, Human
gcuuuguucuugaauggagcuaauuacagaguugucugcugcaggaugggcacucugcagucaguguguaaauagggacaauuagagcucauuuuaagcagacauggcuuccaaaaaaagaaacagagc

SEQ ID NO: 4143997 - RNA, 84 nt, Human
gcuuuguugaccuauaaucuaugugccaucccaugugcccauuuaacauguacaauucaaugguuuuuaggauauucacagagu

SEQ ID NO: 4143998 - RNA, 80 nt, Human
gcuuuuauaaauuuccuguuguguuagagucaauuccaguuugugaaauugagucucacagagggaggucaguaauuggu

SEQ ID NO: 4143999 - RNA, 59 nt, Human
gcuuuuaugucuucagagaauguaagugcagaagcgcagauuucuccagaaaacauagc

SEQ ID NO: 4144000 - RNA, 62 nt, Human
gcuuuuauuauaaugaggcagggaaaguuuugaccccgcucaucauugcacauaauggaagc

SEQ ID NO: 4144001 - RNA, 58 nt, Human
gcuuuuauuuccuccuuaauagaggaaaaaugcucugugaauugaggacaucaaaagc

SEQ ID NO: 4144002 - RNA, 97 nt, Human
gcuuuucacuuuaugguauauuuugcucuaugguggggagaugguucugggcucauguugacgccagagagaaacagaaugugcugaaaguaagagu

SEQ ID NO: 4144003 - RNA, 71 nt, Human
gcuuuucagacugcccauguuugccauuugcuguuugacugguaaauuguuuggcaagucugugccucugc

SEQ ID NO: 4144004 - RNA, 57 nt, Human
gcuuuuccaguguuuuuauugauuuuuccuggacucaggaaagaaggauuggagagc

SEQ ID NO: 4144005 - RNA, 68 nt, Human
gcuuuuccugacuuuccauuagcagaaagcuuuauaaaagcugccauuuauguaaaguacagaaaggc

SEQ ID NO: 4144006 - RNA, 63 nt, Human
gcuuuucuuacucccgcaaggcaagguuuggcagagcucuguaaagucgggagucaggaaugu

SEQ ID NO: 4144007 - RNA, 68 nt, Human
gcuuuugaauaucuagauuggugagaugcuagauuggugagauccauucauucagguauuuagugagu

SEQ ID NO: 4144008 - RNA, 56 nt, Human
gcuuuugacagugacaugucuuacaaaaugugaguagaccucacgugucagaaugc

SEQ ID NO: 4144009 - RNA, 82 nt, Human
gcuuuugaggcagugaagccagaucugaaauggacacacgguuuacuuaggguaaaggacuuuagugcuccacucaacaagc

SEQ ID NO: 4144010 - RNA, 65 nt, Human
gcuuuugugaguugcugagcucagauggcccaaaugggugggaaggcucagggaauucaggaagc

SEQ ID NO: 4144011 - RNA, 59 nt, Human
gcuuuuguuuucuuagaaaccuggccgcucuuggaauuuaggcuugagagaacagaagu

SEQ ID NO: 4144012 - RNA, 70 nt, Human
gcuuuuuacugagcugguccacugagguugaaggcuccaucaucuucuaccucuagccacugagaaaggc

SEQ ID NO: 4144013 - RNA, 60 nt, Human
gcuuuuuauucaucuccacugcugagaaaaggcaguguaaacuuaagagaauaucaaagc

SEQ ID NO: 4144014 - RNA, 78 nt, Human
gcuuuuuccuguagcacauucuuaaaauuugauuauucugaguaagaaaauauucauugagaggcucaccaggauugc

SEQ ID NO: 4144015 - RNA, 63 nt, Human
gcuuuuuccuucaccucuugagccucuuccccaauaagagacuggaagggaugaagaagaggu

SEQ ID NO: 4144016 - RNA, 66 nt, Human
ggaaaaagagagacagggauugugaaaagugggguaccuuuucaaacuucuauucucuguuuuuuc

SEQ ID NO: 4144017 - RNA, 66 nt, Human
ggaaaaagcauuacaugguacguauaacccccuucaagaguuauuucgucuuuuaauguuuuuuuc

SEQ ID NO: 4144018 - RNA, 61 nt, Human
ggaaaaagggaugucuggcucagaggguacuucuaaccccucgcucuaggcagcccugucc

SEQ ID NO: 4144019 - RNA, 122 nt, Human
ggaaaacaaucccccaagaccuuggccuucucccuguggaggaccccuuacccaccuugucauggacgucagggaccccucugaguggaggagucagauagggcuuggggggugucagggcc

SEQ ID NO: 4144020 - RNA, 64 nt, Human
ggaaaacaauucacuccagugaccccacagucacuguuucacuggcagaaugaauuaccuuucc

SEQ ID NO: 4144021 - RNA, 61 nt, Human
ggaaaacacuuugcagugaagcaaccacuuuuaaauugcugucugauucagggugauuucc

SEQ ID NO: 4144022 - RNA, 76 nt, Human
ggaaaacagggcagagacaugcuuccugaaagcuuccuugagccaucaagcagagguguucuuuuccuaguuuucu

SEQ ID NO: 4144023 - RNA, 62 nt, Human
ggaaaacaguuuaauaagcaucuuuggacauacaucuuuaugcuuaccucuggcuguuuucc

SEQ ID NO: 4144024 - RNA, 80 nt, Human
ggaaaagagagcggagggguauauuguggggucagauaaaucacagcacauuuggccagacacuaccccccuucauuucc

SEQ ID NO: 4144025 - RNA, 104 nt, Human
ggaaaagaggauguguugaaagacauggcugccuguggacacugcugaguaaauuuuggccagugugguguagucaugaagcuccaaaaacauauauuuuuucc

SEQ ID NO: 4144026 - RNA, 76 nt, Human
ggaaaagaucugagacauacauuuuaggggcaagugcuauacaacucgaggucucugaauaaugcuauucuuuuuc

SEQ ID NO: 4144027 - RNA, 74 nt, Human
ggaaaagcaauggaugagaaucugucuguucaaugcaauauuuuccuacagagauaacaaccaauugcauuucc

SEQ ID NO: 4144028 - RNA, 87 nt, Human
ggaaaagcaguugaauauauuucucuuaccuuuagcuuauucuaagaugaaggaaaauaaggagaaguaauugaaaugucagauucc

SEQ ID NO: 4144029 - RNA, 69 nt, Human
ggaaaagugaggcagcccaagggaauucaucuugugucgucuuaccuugggugccggucgcauuguucc

SEQ ID NO: 4144030 - RNA, 83 nt, Human
ggaaaaguuuuccugugcucaggucuuuuaugaauuauaaauaaccauucacuuuggaagauagcacaucauaaaauuuuuuu

SEQ ID NO: 4144031 - RNA, 75 nt, Human
ggaaaaguuuugugcagagaaggagcaguaguuaaaucuuagcucugccacuguuucugugauacgagacaagcc

SEQ ID NO: 4144032 - RNA, 77 nt, Human
ggaaaaucacaggcuuagaagauugacccugguuugaaacugggcaggcugcuucacuuuuuugagccucuguuucc

SEQ ID NO: 4144033 - RNA, 76 nt, Human
ggaaaauggaacuuaauaaguuuuguaauuauggggcaaaucuaugcaaauugcgauuuuuauuagguaauuuucc

SEQ ID NO: 4144034 - RNA, 58 nt, Human
ggaaaaugggaaccugaagccaggaggucaagccaagccaacagguguucuguuuuuc

SEQ ID NO: 4144035 - RNA, 85 nt, Human
ggaaacacaugaaaguuggugaguaaaaucuaggugaaauacaacugacaauagaaaaauacucacuugaauuugcaugguuucc

SEQ ID NO: 4144036 - RNA, 57 nt, Human
ggaaacacugugccaagccccaagaggauuacgcuuccagguguguaacguguuuuc

SEQ ID NO: 4144037 - RNA, 62 nt, Human
ggaaacagggagccuccaaagcuuucagauguuuucccaacuagcaggaggccccugcuugc

SEQ ID NO: 4144038 - RNA, 96 nt, Human
ggaaacaguaggagaggagggguaggcaggagccaggcugaggauuuagcaccucuucugguaaccuuuaucccuccucauucuuccuguguuucu

SEQ ID NO: 4144039 - RNA, 100 nt, Human
ggaaacccacauucauccuucugcuguucagaggaccucacuuauacuuauucucagagggaggugagauucuggaagugaagucaugagcagaguuuuc

SEQ ID NO: 4144040 - RNA, 84 nt, Human
ggaaacccaggccugucagagagcugccagugacccuuuacuuuucugggacacauguguggccgcuguagacaauggguuuuc

SEQ ID NO: 4144041 - RNA, 60 nt, Human
ggaaacccuugauaagaugagccauaaaccuauggugaacaguucauuuuaucauguucu

SEQ ID NO: 4144042 - RNA, 64 nt, Human
ggaaaccugucaaaucccuaaaacaaaggaccuucugggggguucugggacauugcagguauuc

SEQ ID NO: 4144043 - RNA, 88 nt, Human
ggaaacggaaguagcaguucucacguuccuggguagaugaagauggaggagagggcccagggcuggugggagaugcuggacugguucu

SEQ ID NO: 4144044 - RNA, 79 nt, Human
ggaaacgggagcuguugcgcaugcgcucggacgcuggcccguuccggggcacgggcgcacgcgcgcuccuggaguuucc

SEQ ID NO: 4144045 - RNA, 79 nt, Human
ggaaacuauuaggaugcuuaccgacuuacagugcugcuuagaugcuauagcaaguaggaaguguccuccuucaguuuuu

SEQ ID NO: 4144046 - RNA, 60 nt, Human
ggaaacuccucccacauaggacaaugggcaaguagagcccgccuuccaugggaggagccc

SEQ ID NO: 4144047 - RNA, 66 nt, Human
ggaaacuuuagcauuccaucuuggacuuguguuuugcaucaauuucaagagaugcugucagauucu

SEQ ID NO: 4144048 - RNA, 86 nt, Human
ggaaagaaauguaaccuugugagugacaguucccuugguucaaagcaauuacuagggauuacacuguauucagaaggcagaaaucc

SEQ ID NO: 4144049 - RNA, 84 nt, Human
ggaaagaagauacagauagaauuagugaguuaggaaaaucaucugaauccuugauuuaccaguuacuaucuuguaauacaaucc

SEQ ID NO: 4144050 - RNA, 77 nt, Human
ggaaagagagaaauuugucacugagagaguuagaaauuauuucaagauuuguagauaguguaauuaucucacuuucu

SEQ ID NO: 4144051 - RNA, 59 nt, Human
ggaaagaggacagcucuaacuaaagucaggacuauugcuauguuggacaugccucagcc

SEQ ID NO: 4144052 - RNA, 68 nt, Human
ggaaagaggagggacaccaauauauguucucuaggccuuuuagaaaacauggaguuguuccuuuggcc

SEQ ID NO: 4144053 - RNA, 70 nt, Human
ggaaagaggcucaaggugggccaguuuucaucauuucuccuucaggcugcccaagcgucugccuuucucc

SEQ ID NO: 4144054 - RNA, 78 nt, Human
ggaaagaguuaugucuuuguggcuaucuaggcaguuuuggggacuguucugaaaagaaacuaagucauaacucuuucc

SEQ ID NO: 4144055 - RNA, 67 nt, Human
ggaaagcagaugccaagauuuaccaaauuaacucugauguuggcaagaacugugcagucugcucgcc

SEQ ID NO: 4144056 - RNA, 107 nt, Human
ggaaaggaaaggacagugugauccugaagugcagcaugaagcacaugugacauagcagcaauaagucaucuuucugcugcacuuagcuuuagucugacucucauucc

SEQ ID NO: 4144057 - RNA, 84 nt, Human
ggaaaggaaauagaauauauuagaaauucugauuucuaauaggauguaagaaaucauguuucagaugaguuuuuuagcauuucc

SEQ ID NO: 4144058 - RNA, 69 nt, Human
ggaaaggaagcagcuguaguaggagguggggugcccucuaguggucaugcuuugguugcuguccuuucu

SEQ ID NO: 4144059 - RNA, 58 nt, Human
ggaaaggagugugaauuuucuuuggcauguuaaaugcuguacauauacauuuuuuucc

SEQ ID NO: 4144060 - RNA, 88 nt, Human
ggaaaggauucugucuuggccagccaucugggcugauugcacuccauccuucagccaggggaguggcgggccaggcaguuuccauucc

SEQ ID NO: 4144061 - RNA, 62 nt, Human
ggaaagggcagcccagaacugcugcaggugcuguccuguggggaaaggguccugcucucucc

SEQ ID NO: 4144062 - RNA, 60 nt, Human
ggaaagggcauggccuuuucacugcucccaacagcacccuagaaauggcuuggccuuucc

SEQ ID NO: 4144063 - RNA, 71 nt, Human
ggaaaguagagaauuggagcagugacaggucagggacaucccuucugauguuccucaguucucuucuguuc

SEQ ID NO: 4144064 - RNA, 91 nt, Human
ggaaagugaugcagaacaagugaugucucaugcaucuauuucucauuggcugcaucucuuauaagacaggcuuugcuguauaucacuuucc

SEQ ID NO: 4144065 - RNA, 66 nt, Human
ggaaaguggugguggaaagaggagugaaauuuacacaucucuuucaugaaacuaccccuuaacucc

SEQ ID NO: 4144066 - RNA, 68 nt, Human
ggaaaguuuuaugaauaaccaguguuuugaauauuguuuuagauaacaaugucuguucauaaaauacc

SEQ ID NO: 4144067 - RNA, 110 nt, Human
ggaaauagucaaggaaaacacaaauagcagcaucaguuuaucuccaucgauauuuuaaaggaucggagcaagaaaaaugcugcuuuuagugguuuguugccugguguucc

SEQ ID NO: 4144068 - RNA, 66 nt, Human
ggaaauauguugagucuaucuuuauggauccaucuccuuucuauaaagaagaguuaauauauuuuu

SEQ ID NO: 4144069 - RNA, 115 nt, Human
ggaaauauucucugugcucagcaauaagccagguuagacaucucucauuagacccagggauuaauuuggaucucuuguugcuaauccaaacccaauagaacuaagacuguuuacc

SEQ ID NO: 4144070 - RNA, 56 nt, Human
ggaaauauuugaucaaauuuaaggaggcauuucuuuaaccuuggucaagaauuucc

SEQ ID NO: 4144071 - RNA, 59 nt, Human
ggaaaucagaguuguguuuauauuaaggagcagggcaugcaaauacagcagcuguuucc

SEQ ID NO: 4144072 - RNA, 64 nt, Human
ggaaaucaguuggaacacaagcaguuuggggacagcccaccguugcuguuuccuacucauuucu

SEQ ID NO: 4144073 - RNA, 55 nt, Human
ggaaaucaucugauuggcuuucuggccuaugcuuccuucaguuggacugauuucu

SEQ ID NO: 4144074 - RNA, 58 nt, Human
ggaaauguaauucucuugaagauucuucccaaaggauuugacagagcauagcauuucu

SEQ ID NO: 4144075 - RNA, 63 nt, Human
ggaaauguauguauuaagcaccuggcaggcacagaaaggugcuuucacugauguaucauuucc

SEQ ID NO: 4144076 - RNA, 70 nt, Human
ggaaaugucagaggaacauauugaaagaaucugcauccuugaugucaaucaacccuuccuccauauuucc

SEQ ID NO: 4144077 - RNA, 100 nt, Human
ggaaauucggcuuugguauguacagccuuguucucuuuauccugccugcccuggccuggaagaacaagcagugcuuuccuuucaagggcuauugauuucu

SEQ ID NO: 4144078 - RNA, 64 nt, Human
ggaaauuucaggccaccagaugucuuuaugcaucugcauaaauaacagugccaugaaauugacc

SEQ ID NO: 4144079 - RNA, 59 nt, Human
ggaaauuucugauauccaacuauuuuugaccuacaagaaugguaauuugcagaaagucc

SEQ ID NO: 4144080 - RNA, 91 nt, Human
ggaaauuugguuguggccauguuguggaagugggaagggcagcugaagcagucuacacugaauuuccacagagagugaauagcaaguuucc

SEQ ID NO: 4144081 - RNA, 89 nt, Human
ggaacaagaauguugaugcaagaggcaucuuuuaaaaauaaguauuauuuugcauguguuuaguccagccucuuguuuuugcuuugucc

SEQ ID NO: 4144082 - RNA, 57 nt, Human
ggaacacaaggcauagcacacagaauuuccuuucauucuuugcauguccuuuguucc

SEQ ID NO: 4144083 - RNA, 75 nt, Human
ggaacacagugccuuacaaacugucuaaaccauacaguuuauacaguuuagacaguuuguaaggcacuguguucu

SEQ ID NO: 4144084 - RNA, 86 nt, Human
ggaacagcccacucugaggacuguaguucugaugguccuggugcugcuaucaggcaaggcccuuagagugucucaaguugaaagcc

SEQ ID NO: 4144085 - RNA, 107 nt, Human
ggaacaguaaaggcugacagcccagagggaagaggugucaucccuucaucacacaggaggaugucggaugcacacucuccccugccugguugaugcuggcuuuuucc

SEQ ID NO: 4144086 - RNA, 66 nt, Human
ggaacaguugagaugauguaccuuggugccacauaaacaagguuagaaauccugcuccacuauucc

SEQ ID NO: 4144087 - RNA, 57 nt, Human
ggaacaguugcgucaugggccugcugguacauugaccacagggccccgcggcucucc

SEQ ID NO: 4144088 - RNA, 69 nt, Human
ggaacauggaguaagccaaguuagaagagauaaagaacauuuucuggcuuauccuaacucuaacuuucc

SEQ ID NO: 4144089 - RNA, 70 nt, Human
ggaacaugggacaauuugaacacagugcucaggauaguuucuguguagcucagauauguccagccauucc

SEQ ID NO: 4144090 - RNA, 69 nt, Human
gccugcugucucugggcaggcagggggcugacaggucagcaggcugcuuuggcucagugacaucagugc

SEQ ID NO: 4144091 - RNA, 73 nt, Human
gccugcugucuguauggaggaggugcuagcccgguccaccgggcugcugcccaccccugcaugccccaguugc

SEQ ID NO: 4144092 - RNA, 69 nt, Human
gccugcugucuucccugcauguuuaugaauaaguagauacaaguucaaggaagggaggaaagccaaggc

SEQ ID NO: 4144093 - RNA, 88 nt, Human
gccugcuuaaagggauuugacuuggcugggaggagggcccuuuuguaccucccccuucuuccuccugcuguuagucuugaaugcaggc

SEQ ID NO: 4144094 - RNA, 102 nt, Human
gccugcuucuccugccuccuccucuuuggcuucuccuccucagcuccuuucuucuucucugaggguggcacaggcacaaagagagaaaacagagaagacagc

SEQ ID NO: 4144095 - RNA, 81 nt, Human
gccugcuugacuuucaggauguucaguauuaauuugcuuuuccaggugaugggagaaugcugagggaugagagaggcaggc

SEQ ID NO: 4144096 - RNA, 64 nt, Human
gccugcuugccugcaugaggagagcuggcuccaccagccagagaaagcucacaggcagugaggc

SEQ ID NO: 4144097 - RNA, 70 nt, Human
gccugcuuuaagucuguugccugacccccugacuaaauggagggaaaaaaauggaacagcucagggcagc

SEQ ID NO: 4144098 - RNA, 70 nt, Human
gccuggaaacaagcaagcacauaauuuucugcaagcccagaaauaguguuuguuugcuuguuuuucaggu

SEQ ID NO: 4144099 - RNA, 57 nt, Human
gccuggaaauugaggcacaguuccaacaccagggcggauucaggccuuuuuccaggc

SEQ ID NO: 4144100 - RNA, 58 nt, Human
gccuggaaggcggagguugcggugagcugagaucaugccacugcacuccagccuaggc

SEQ ID NO: 4144101 - RNA, 58 nt, Human
gccuggaagguggagguugcagugagcugagaucgcgcuacugcacuccagccugggu

SEQ ID NO: 4144102 - RNA, 74 nt, Human
gccuggacaagcacugugccucauaucugaugguaagauucauaguuuguaagagcacaggguuggagccaggc

SEQ ID NO: 4144103 - RNA, 55 nt, Human
gccuggacagaaaccaguccuggggggauggcuuccuuucuggggcuguccuggc

SEQ ID NO: 4144104 - RNA, 77 nt, Human
gccuggacgggugcuuguucccgcugcuuccggcuauggcugagagccuggccugggcaggcacaugccacaaaggc

SEQ ID NO: 4144105 - RNA, 93 nt, Human
gccuggacuagcucuugaaguuguagucagaugucaguuacagcugcaguuagcugaaagcuugacuggggcuugaggauccauguccaaggu

SEQ ID NO: 4144106 - RNA, 61 nt, Human
gccuggagaagauggaacuagcacagcacucuagugaggacucaggaccuucuucccgggc

SEQ ID NO: 4144107 - RNA, 78 nt, Human
gccuggagauuuuacaaacugcaggacccaacugaggaucugaaaacaauugagucuggcauauuguugacugcaggc

SEQ ID NO: 4144108 - RNA, 130 nt, Human
gccuggaggaucuacuuucaagagaccucacgcacggcuggcauauuggcgcuggcuucugcuaggagcccagccagagcugugugaugggggucucuauuuucuccaagugggcuucuucaggacuguc

SEQ ID NO: 4144109 - RNA, 64 nt, Human
gccuggagggucccucucuggagguauauguggcggccacaccauggagcauggcucacuaggc

SEQ ID NO: 4144110 - RNA, 55 nt, Human
gccuggaggguugagguuuuguuuuaauaaagaaaaucccauuuucuuccagugc

SEQ ID NO: 4144111 - RNA, 57 nt, Human
gccuggaguagcauggcaagccuacagcucacuaggaaagugcagcugcucccaggc

SEQ ID NO: 4144112 - RNA, 106 nt, Human
gccuggauguguucagguucugggcucuggagagccauaggcccuuguugggaguggccauccuagagggauggcugccagggcccugaccuagcaccaugugggc

SEQ ID NO: 4144113 - RNA, 62 nt, Human
gccuggcacaguagggacccaauaaaauaugugaaaacacaagugucccugaugggccaggc

SEQ ID NO: 4144114 - RNA, 65 nt, Human
gccuggcagugaugucuuuuggaucucagagccuuuaucugguuguaaaauuaucaugcucaggc

SEQ ID NO: 4144115 - RNA, 65 nt, Human
gccuggcauuaaaggguaaauuaaaauuacgacuauauuugguguucaucuuuuaguggcauggu

SEQ ID NO: 4144116 - RNA, 56 nt, Human
gccuggccaacguggugaaaccccgccucaacuaaaaauacaaaaauuggccaggc

SEQ ID NO: 4144117 - RNA, 55 nt, Human
gccuggcccagggcucuuguuggcacacucugcaggggcaaggcucaggccaggc

SEQ ID NO: 4144118 - RNA, 82 nt, Human
gccuggcccuaggucuuccagcccuagacucuaugcugucacgcuucagcagggucuccugagagaagaugcugggggcagc

SEQ ID NO: 4144119 - RNA, 82 nt, Human
gccuggcggcagcgcggccugcgccgcguagggcacguaggcgggcgcgcagcuggcgggcagagccgccaugcucgagggc

SEQ ID NO: 4144120 - RNA, 56 nt, Human
gccuggcuaauuuugguauuuuuaguagagacgagguuucaccaucuuggccaggc

SEQ ID NO: 4144121 - RNA, 56 nt, Human
gccuggcucgggcacucgccaggauggagauuucucaggcggcucgaaggucaggc

SEQ ID NO: 4144122 - RNA, 82 nt, Human
gccuggcuucaggucccugugagccuuggacucucuccucucucuuuggaguguccuuggcuugaggcaccucaugcugggc

SEQ ID NO: 4144123 - RNA, 78 nt, Human
gccugggaauuugggauacaucuugcugagccuagagacagaaaagagcuucuaggcugccuucccugagccccgggc

SEQ ID NO: 4144124 - RNA, 79 nt, Human
gccugggauagaaauuuagaacaagguuggauguuggugaucauauaaaaauagauuuguucuuuuuugucauuagagc

SEQ ID NO: 4144125 - RNA, 113 nt, Human
gccugggcuugagacuccagguuuucuguggucagagcuugagcuuauaacuauuggguuuuccuguuaaaucugggcacaguguagaaucuucaccuucuuauaagccuggc

SEQ ID NO: 4144126 - RNA, 61 nt, Human
gccuggguccacccugugaaguagaauccacugucaucuccuccacauggucaccccaugc

SEQ ID NO: 4144127 - RNA, 99 nt, Human
gccugggugaauuugauccuaaacuugcacugaccucaaaacagucagaaacucagccgcuuuuugucugugucagugccaguucauucauucacuggc

SEQ ID NO: 4144128 - RNA, 59 nt, Human
gccugguccaaagacaagaguucagguccccacuaagaagcucuaugacuuggccaggu

SEQ ID NO: 4144129 - RNA, 75 nt, Human
gccuggugagucugagcccccgggaagcugggcugagugcuccagagcuccagggcuacagaaggcacagaaggc

SEQ ID NO: 4144130 - RNA, 78 nt, Human
gccugguggagccuaggcuaagucuacaaaaauacggagcucagagcuccuaccuagauuucuuugcuuuauucaggc

SEQ ID NO: 4144131 - RNA, 56 nt, Human
gccuggugguauccuggcaagaauggcucgcuuaccgugguugugggaucccaggc

SEQ ID NO: 4144132 - RNA, 60 nt, Human
gccuggugguucaggagaauggcuucucuuaaggccaacuccucuaaccucuaucuuggc

SEQ ID NO: 4144133 - RNA, 74 nt, Human
gccuguacaugugugcgagcaggccaggugcauguaugugugugcaugcugugagugugccgcagagggcaggc

SEQ ID NO: 4144134 - RNA, 71 nt, Human
gccuguagaaagagggggcuguacauguugcagaaaugguugcaaauuugagcagacuguucaagacaggc

SEQ ID NO: 4144135 - RNA, 76 nt, Human
gccugucauuuucugguuaguuaaucauaaauaguuagugauggcuuguugauuaauuaacaggaaaaaugaaagc

SEQ ID NO: 4144136 - RNA, 70 nt, Human
gccuguccucuuccgccugucuguccuuuguguccaggaauuccccagacaguggggaaggaggagaggc

SEQ ID NO: 4144137 - RNA, 117 nt, Human
gccugugacucuccuccugucaccaacccacuaugauuguccucaugguugaauaggaagcuuaugaggccacaguuauagauuuaguuucugggaaggcuggauagaguuccaggu

SEQ ID NO: 4144138 - RNA, 71 nt, Human
gccugugcaaauuguguuugcuuuucucuuucaugacaggccaugcagagacucaaaacagugugaaaggc

SEQ ID NO: 4144139 - RNA, 69 nt, Human
gccugugcauagcagcggacucccuuagacguguguuuauuuuucacuguaguucguugcagcucaggc

SEQ ID NO: 4144140 - RNA, 84 nt, Human
gccugugggaagaugcuggcaaggugcuggagggcccuggaggcaaagggccugccucgaccuugccccccauaacccacaagc

SEQ ID NO: 4144141 - RNA, 95 nt, Human
gccugugggagggagugggcucugguggcaacauugcuggaguggggaaaucugaguucucuaguccugaccuugccaccagccaucucuagggc

SEQ ID NO: 4144142 - RNA, 85 nt, Human
gccugugucagcuguggcaggcugcggccgugugagcauucuguaaugcaacgcccucggcugugccuccgaggcuugcacaggc

SEQ ID NO: 4144143 - RNA, 72 nt, Human
gccuguguggcaaggugagaagugggcagggugaggagcggccaacccaccauuguuuugccuggcauaggu

SEQ ID NO: 4144144 - RNA, 71 nt, Human
gccugugugucuggaagcucagggagcagcugugaccugcacgugggauuccugagcucccaugaacaggc

SEQ ID NO: 4144145 - RNA, 55 nt, Human
gccuguuccuuaguggcuucaccgcuguauugucaguccccacagggcaaggggc

SEQ ID NO: 4144146 - RNA, 82 nt, Human
gccuguucucucucuugccuggguggugccugcugggaaccacaggguguuggcagccacccauggcuccagagaggugggc

SEQ ID NO: 4144147 - RNA, 99 nt, Human
gccuguugcaaguggagaggcagcccugagauaggacucugcuggcucagcccuccuccugagucuugaugccucucuccucauugcuuccacucaggc

SEQ ID NO: 4144148 - RNA, 57 nt, Human
gccuguuggguaacagaguucacugucugucucgcugcacuguuguucccagcaggu

SEQ ID NO: 4144149 - RNA, 81 nt, Human
gccuguuucacuuacccuuccuucagagugugaauucuaccacuaauuaggcugaggagugggugggcagugagaggaggu

SEQ ID NO: 4144150 - RNA, 85 nt, Human
gccuguuucagucagugaccucacuucuuaggauuguguagucuggagaaagcagucugggagaaggugagauuagugaccuggc

SEQ ID NO: 4144151 - RNA, 60 nt, Human
gccuguuucccugacgcuuacacaagcuaaggcaaggugaagcagcagcagggagaaggc

SEQ ID NO: 4144152 - RNA, 60 nt, Human
gccuguuucuaaucucauuucuuuauuauaacuugagagaaaaugggaugagaaaagggu

SEQ ID NO: 4144153 - RNA, 59 nt, Human
gccuguuucuagcuguaggaagcugagugguucacuuagccucaucagcagaauggggc

SEQ ID NO: 4144154 - RNA, 72 nt, Human
gccuguuuguuugcaaaggagccaaguagauguuccuaaagcuauucgaacugcuuugcagaccgagcaggu

SEQ ID NO: 4144155 - RNA, 71 nt, Human
gccuguuuuccugcugugguugggagacauucaauccagacaacuccuccuccacagcagcugacaauggc

SEQ ID NO: 4144156 - RNA, 62 nt, Human
gccuguuuuugcuucguuuaaguuauauuugguggcuaaguuuucgcaggcagauaauaggc

SEQ ID NO: 4144157 - RNA, 83 nt, Human
gccuuaaguucuuugugaguaauacagagcguuccaguguuccaggaagggacagaucugugcagacuggcagggucagaggc

SEQ ID NO: 4144158 - RNA, 79 nt, Human
gccuuacaccuaguggaggggagggacagggcauuagagaaugguugccagagaaucaccucuccuuccaggauggggc

SEQ ID NO: 4144159 - RNA, 74 nt, Human
gccuuacgcguccuugcccagggccuuucugaauuuuagaagcugccaccagcccagggcaggaucagggaggc

SEQ ID NO: 4144160 - RNA, 65 nt, Human
gcucuucuuuuccuaguguaagagaaaagugacccuucuuaugccuaaacacagggagagggagc

SEQ ID NO: 4144161 - RNA, 66 nt, Human
gcucuuggaaaagcacccagcuccugcaggacuuuccucucagugccugugggcuucuuccaaggc

SEQ ID NO: 4144162 - RNA, 63 nt, Human
gcucuuguccccagaaaggugaggcaggaugagcaccuccugucagcccuuuggggugagagu

SEQ ID NO: 4144163 - RNA, 102 nt, Human
gcucuugucgcccaggcuggagugcaauggcuugaucuuggcucacuacaaccucagucucccagguucaagcgauucuccugccucagccucccgaguagc

SEQ ID NO: 4144164 - RNA, 68 nt, Human
gcucuuucccacagugguuguggcauguggucauuaugauuucuguuuuaccacuguggcaucagagu

SEQ ID NO: 4144165 - RNA, 58 nt, Human
gcucuuucugucuugcagagaccaccuuuucacuguguucucauauggcagagagagu

SEQ ID NO: 4144166 - RNA, 87 nt, Human
gcucuuuggcuucuguuuuggcucuguucuuaggcuaguuuauugaagggcagagaaauagaugccgacaauaucuggauuuagagc

SEQ ID NO: 4144167 - RNA, 89 nt, Human
gcucuuugggaggccaaggcaggcggcugggaggugguuguagcgagccgagaucacgccacugcacuccagccuuggcaccauugagc

SEQ ID NO: 4144168 - RNA, 106 nt, Human
gcucuuuguuuacuugguucuaagccuuaaggauucagcccuauggaauggggguccaucugugcucugcacccccaaacaucaagggcugaccuggcucaaaggc

SEQ ID NO: 4144169 - RNA, 119 nt, Human
gcucuuuucucaugccaauguaagcagucaaucccuguuaaagaauagugccccuauugcugaaguaauaagucuguuguuuaauuggguauuugucacagaggauggaaaaacagggu

SEQ ID NO: 4144170 - RNA, 84 nt, Human
gcucuuuugguggguuugguuagguaucuuuggaauuugggugcuccaauaacaucuaaaaacuuauaaaaacuuagaaagagu

SEQ ID NO: 4144171 - RNA, 74 nt, Human
gcucuuuuucucuucauaugugaacucagugaugucugcaaccuaaaaggcaacauauugugggaugagagagc

SEQ ID NO: 4144172 - RNA, 65 nt, Human
gcugaaaacuguucuuguaacacuuaaauuguggugagcaguuuaaauuaugugagcaguuuagc

SEQ ID NO: 4144173 - RNA, 77 nt, Human
gcugaaaagagcuuuagaaaucucagaguuguccccucccacugcagcuuuagagagagaugaguucacauuuucgc

SEQ ID NO: 4144174 - RNA, 63 nt, Human
gcugaaacaggugugagaacaugccuuguggaaacaggugugagaacacgccuuguggucagc

SEQ ID NO: 4144175 - RNA, 66 nt, Human
gcugaaaguuuggauucuaagcuugagagaaaaaucaagcauagagacacaaauuugggaauaagc

SEQ ID NO: 4144176 - RNA, 79 nt, Human
gcugaaauacaaauuggaggaaauugcuuuugugggaaaacauuuccucuccucaguggauuucucuuuuguguucugc

SEQ ID NO: 4144177 - RNA, 63 nt, Human
gcugaaaucccagcauuccccaugccccagcccaucucagccaggacagagugcuggcucagc

SEQ ID NO: 4144178 - RNA, 62 nt, Human
gcugaaauguuuaauuugggaguaaacaucaacuuuaaagcaaccagguaaaauauuuuagu

SEQ ID NO: 4144179 - RNA, 61 nt, Human
gcugaacacaugcuuagauuucaguggauuccuucauccaugcaccuaacauuuguugagc

SEQ ID NO: 4144180 - RNA, 99 nt, Human
gcugaacacuguuuccuccucuucuuucacuuucaccuguaccucugcccgagaggcugugcagaguagugaggggacagagguacagacagaaccagc

SEQ ID NO: 4144181 - RNA, 55 nt, Human
gcugaacucuggacuuagcaggcuucccuauggucagugugcauuuagagucugc

SEQ ID NO: 4144182 - RNA, 65 nt, Human
gcugaauacagcaugccuuaugcuacgaaauuaaugcuuucauaaggcauuuuuucuguaucagu

SEQ ID NO: 4144183 - RNA, 85 nt, Human
gcugaauagggaaauugggaaguauuaagucucuccucaaacauuucgaauuaagaggccuguaguuccucuuuccauuuuuagu

SEQ ID NO: 4144184 - RNA, 78 nt, Human
gcugaaucguuuuuaaucagauauuggcaggcauauuaccaucucugccaguuagaaacugguuagacacuauaaagc

SEQ ID NO: 4144185 - RNA, 67 nt, Human
gcugaaugaggcgccagcuugcaucuagaggucaauucucuguauucaagcuucugcccaaacaagu

SEQ ID NO: 4144186 - RNA, 63 nt, Human
gcugaauugaguuggggagcuaccaagguagaaagcacuuggaaaguuuuuacugaagacagc

SEQ ID NO: 4144187 - RNA, 87 nt, Human
gcugacaagcugcuuagacuaauacuuaggacuagcgcagugucacuuuuccuaaguucaguuggucgaaguagucacagacucagc

SEQ ID NO: 4144188 - RNA, 58 nt, Human
gcugacagcaaggggcugcccucagauucuagaggcugcuugcaguuuccugucaugu

SEQ ID NO: 4144189 - RNA, 82 nt, Human
gcugacaggguugcgugcugaugucucacagcugccucuuucuuugaagugcugcucucagccaccaggaacuacuguuagc

SEQ ID NO: 4144190 - RNA, 89 nt, Human
gcugacaucucucccugaaagguuuccagugauauuguggcacaauuuguuggccagaauccuagagacccagggauggagaugccagu

SEQ ID NO: 4144191 - RNA, 61 nt, Human
gcugacaugaaaugauauuugggugggcuguccagucccucuucccuuuuuuucugucugu

SEQ ID NO: 4144192 - RNA, 122 nt, Human
gcugaccagauacaauuucccucucacuggucuuccaugcaguuucccaucaccugucuaaucagagaaggaaagcugacaugggcacagacuuuucaguacagagaagagaauauuccagc

SEQ ID NO: 4144193 - RNA, 93 nt, Human
gcugaccaggaggccaagaugagcuggcuccauggaugacccgguggggaagccuguggagacucguucacuugaaugccaccuagugccagc

SEQ ID NO: 4144194 - RNA, 57 nt, Human
gcugaccauuaggaggacgauacaagagaccuuugucucuuucucccaauggccagc

SEQ ID NO: 4144195 - RNA, 61 nt, Human
gcugacccacagacuccugagucacgaucaccgauuguuucaggaugguuuguuacacagc

SEQ ID NO: 4144196 - RNA, 65 nt, Human
gcugaccucccuguguguacaggcuggcacacguguguacacauccugacccaugggaggggagc

SEQ ID NO: 4144197 - RNA, 55 nt, Human
gcugaccuguggcagaagcucaaauugaaacaagaaauuaugaccccaggucggc

SEQ ID NO: 4144198 - RNA, 83 nt, Human
gcugacguuuaugugguugaagaauuacaucuaaguaauauuugaauauaugcgauuuuugacuucauaauaauugacgcagu

SEQ ID NO: 4144199 - RNA, 62 nt, Human
gcugacuauuuauauauuugauuccuuaaaagcaaugaggaauacaaagcagaugguccagc

SEQ ID NO: 4144200 - RNA, 80 nt, Human
gcugacucaugcuauuccagaauguaaauuauuccgcaggaaccagguuaaacacuuuggaaguggcgaugccaguuggu

SEQ ID NO: 4144201 - RNA, 79 nt, Human
gcugacugcagccucgaccuccccaggcucaggugauccucccaccucagccucccgaguaguugagacuacaggcagc

SEQ ID NO: 4144202 - RNA, 78 nt, Human
gcugacugucaucuggccuggccuuguguuuauccuucauuagcggaacgggcauggccagggcagauggcaggcagc

SEQ ID NO: 4144203 - RNA, 72 nt, Human
gcugagaacaaagaguuaauauuuaccugucaagaaagccagcauuuuaggacagugagcuauuaucuuggc

SEQ ID NO: 4144204 - RNA, 69 nt, Human
gcugagaaggucccgagauaccaggcugacuggaagcucccacacagcccauuucugggaccugagggc

SEQ ID NO: 4144205 - RNA, 70 nt, Human
gcugagaaucgugugaugugucuagcacagugccuggcauuguggcuagacagucacaauaaaugguagc

SEQ ID NO: 4144206 - RNA, 64 nt, Human
gcugagagggaacaagcuccuggccgggccuaauggguuccaggugugcucugugcccugcagc

SEQ ID NO: 4144207 - RNA, 58 nt, Human
gcugagaguggguuuaguuuggguucaugucuaaauuuacuaaucauccagucacagu

SEQ ID NO: 4144208 - RNA, 106 nt, Human
gcugagaugggcacgccagucuugagcaguggcagacaguagacuuucaagcaucauuccaaagaauuguuuccauugcagacugugucuaaauccauaaggcagc

SEQ ID NO: 4144209 - RNA, 61 nt, Human
gcugagcauuggaucaaaugacuugcccaaggucacagggcaggaaugaaccaaagccagc

SEQ ID NO: 4144210 - RNA, 64 nt, Human
gcugagccuggccagggugcgaucgugguggcucucgcagccguaggugcccuggucggccagu

SEQ ID NO: 4144211 - RNA, 66 nt, Human
gcugagcgccaguggcagcuggaacaggcaucccaaggggguuggcagcagcaaucacuggugagc

SEQ ID NO: 4144212 - RNA, 93 nt, Human
gcugagcggccagcauggcaagaccaacugcauuuccagcuuucuucuuuucuuuguggacauuggcaguuggguuugaacuguggcccuagc

SEQ ID NO: 4144213 - RNA, 70 nt, Human
gcugagcucaugucugcuuucagggaagcuuaaagccuccaaagucuggagcagcagagcaagaaucagc

SEQ ID NO: 4144214 - RNA, 94 nt, Human
gcugagcuccaaguucggggcugaaggcccggaggacagggcagagggcucccugccuacaggguuuucuuuuccauauuugagaaauguuugc

SEQ ID NO: 4144215 - RNA, 60 nt, Human
gcugagcucccagcaguaucuggcuuuaucaucaguagcuucacugcugucuggcuaagc

SEQ ID NO: 4144216 - RNA, 79 nt, Human
gcugagcuggcugcuggacaggccacauggaggagaaucgaggcauuccaccagcagccugucagccucuggcugcagc

SEQ ID NO: 4144217 - RNA, 59 nt, Human
gcugagcugggccuggacgggcagaucugagcuccagacuggccaagcccggcuccugc

SEQ ID NO: 4144218 - RNA, 87 nt, Human
gcugaggaagaauugagugggaagauacugagaggugacagcgugcuggcaacccucgcucacucucagugccuccucggccucagc

SEQ ID NO: 4144219 - RNA, 90 nt, Human
gcugaggacacugaugaggcucagagugguuaaauaacuuuuucaaaguuacuuaacaagacuugaguccaagguaucaaaugucaaagc

SEQ ID NO: 4144220 - RNA, 60 nt, Human
gcugaggaccagugagucuggcaagugguaaugcccacugccugugcacuggucuuuugu

SEQ ID NO: 4144221 - RNA, 59 nt, Human
gcugaggacgccaggcccuaaguaaacaccucauucaaacuaggcccuagcucugcagu

SEQ ID NO: 4144222 - RNA, 72 nt, Human
gcugaggauaacuugcuguuagucagcugugauuguuacagugcagcuauuacaacaguguacuuucccagc

SEQ ID NO: 4144223 - RNA, 61 nt, Human
gcugaggcaagaguuugauuagagacaacauaucaucacuaaagaacuuuuaggccucagu

SEQ ID NO: 4144224 - RNA, 107 nt, Human
gcugaggcaggagaauugcuuuaacccuggaggcggagguugcagugagucaagauugugccacugcacucuagccugggcgacagagcgagacuccgucucauagc

SEQ ID NO: 4144225 - RNA, 94 nt, Human
gcugaggcgggcugaucgcuugagcucaggaguuugagaacagccugggcaacaaggaugagacccugccucuacaaaaaauauaaaaauuagc

SEQ ID NO: 4144226 - RNA, 116 nt, Human
gcugaggcucagagagguuaaugaacuaagccaaggcucacuguuaauaaauagcaaagguaaaauuaaauuccauaucugcuugagauagaggccuugcuccuaauagcugcagc

SEQ ID NO: 4144227 - RNA, 84 nt, Human
gcugagggauucccuuggauggcaggacaaggacccagggccugugcucuucucauucuguuauucaaugccuaacccucaagu

SEQ ID NO: 4144228 - RNA, 60 nt, Human
gcugagggcauguguggcgacugaagggcugggcuauagcuagugcgcaugcgccucagu

SEQ ID NO: 4144229 - RNA, 59 nt, Human
gcugcacuucaauguagcagcuauuggcccuguguugcuacuggcugccuggaaugcgc

SEQ ID NO: 4144230 - RNA, 56 nt, Human
gcugcagaccucugagguccaugcugauucuucucuccaggccucuggucugcugu

SEQ ID NO: 4144231 - RNA, 56 nt, Human
gcugcagccuguuguaccagccugugcugaccugcaggcuucucaauagguucggc

SEQ ID NO: 4144232 - RNA, 75 nt, Human
gcugcagcugcugguggcugaaagagagagagagagagagagaccuccucuuaggccacuucccagagcuguggc

SEQ ID NO: 4144233 - RNA, 86 nt, Human
gcugcagcuuuuuacucuuccauuucuacuucacaguuccugugcaccagggguaugugggacagagaggaggaguagagcucagc

SEQ ID NO: 4144234 - RNA, 73 nt, Human
gcugcagggagcuggaaggcucccagcaacacagccugcccccucugggcagccaaccagcagccuguucagc

SEQ ID NO: 4144235 - RNA, 80 nt, Human
gcugcauuuuacuuaccuguuaguugccugucucuccaacuaggcuguaaagagcuaggaggaagaaugugaauugcagc

SEQ ID NO: 4144236 - RNA, 120 nt, Human
gcugccaacccugugccaggggguggugucuucagcacaggagcugcagugguuggacaggacacugcuggugagguccuugcuggacucagccaccucccgcacagggugggaaucagc

SEQ ID NO: 4144237 - RNA, 64 nt, Human
gcugccacaaggcugggaagcugagcagagcuggcaacagguucagaggcuacagucugggagu

SEQ ID NO: 4144238 - RNA, 66 nt, Human
gcugccaccuaguggucuuuagucgcuucgcaugucuauggugucuaggcuacgaagggggcaagu

SEQ ID NO: 4144239 - RNA, 78 nt, Human
gcugccacgaucucugcuguaguuggggcuguaaaaugcuuuccccgugagaaaugcaagcaggaagugguggacagc

SEQ ID NO: 4144240 - RNA, 55 nt, Human
gcugccagcccagcaaggugugcccuggcacccucucaucuuccuggggggcagc

SEQ ID NO: 4144241 - RNA, 55 nt, Human
gcugccagcucacucuccugagaacuggcugacuuggaguacuugagcuggaagc

SEQ ID NO: 4144242 - RNA, 70 nt, Human
gcugccauuuggaccuaacugggcuagucagagaaacugaugggaagagccagcaguauguccuggcagu

SEQ ID NO: 4144243 - RNA, 56 nt, Human
gcugcccaccccgaggcaggaaggggcucacuucccucuccucgaagguggccagc

SEQ ID NO: 4144244 - RNA, 100 nt, Human
gcugcccccauccccaugccagugcucuaaaaucagugcucucaaacaagggcagauggcgcaguggaaguucuggcaagaggggacugugaggggaagu

SEQ ID NO: 4144245 - RNA, 57 nt, Human
gcugcccucccagggcaagcuugcugcuucccaggagguaugucccccgagugcagc

SEQ ID NO: 4144246 - RNA, 65 nt, Human
gcugcccugagaaauagcaucauuuuuggguuuugguagaaaugaaagcagugcuucaaagcagc

SEQ ID NO: 4144247 - RNA, 67 nt, Human
gcugccuccucuuugccaaggucaugggugacuauuggcuggauaucaggcaagggggcaggagugc

SEQ ID NO: 4144248 - RNA, 68 nt, Human
gcugccuccugaaagcgcucugguuagguaagacaagccauuccguuaauguguuacaggagugcagc

SEQ ID NO: 4144249 - RNA, 88 nt, Human
gcugccugaggaauggguagguggucugcuauguaaaaaagagaacuggguuuacagcuagacauaccugaguucaaaucucagcagc

SEQ ID NO: 4144250 - RNA, 60 nt, Human
gcugccugccugcauuuaauccauaaagcaauagugcuguuugauagauggggaggcagc

SEQ ID NO: 4144251 - RNA, 98 nt, Human
gcugccuuaccggccuggcacuggcuuugaucagagugaccuuuuccuuccaaacgagagcacuuucgagagccggagaggaugcugguaauaguggc

SEQ ID NO: 4144252 - RNA, 56 nt, Human
gcugccuugccaggggcagaaacaaauagauggagaaguccccugagcgaugcagu

SEQ ID NO: 4144253 - RNA, 60 nt, Human
gcugccuugcgguguauuucugggcagagcagcucaccacaggaaccuccgcgaaacacc

SEQ ID NO: 4144254 - RNA, 68 nt, Human
gcugccuuugugagccaaggggagguuucucacucuuuaaaacuccugugggcuuaaaggaagguagc

SEQ ID NO: 4144255 - RNA, 71 nt, Human
gcugcgagccgcgcgcgcacggggagccauaggcuucgggguccaagcgcgugucguuuugggggagcagc

SEQ ID NO: 4144256 - RNA, 73 nt, Human
gcugcgcggccucugugaaauccgugggagucccagggggcaccucaaagcgguaugcagacggcucugcagc

SEQ ID NO: 4144257 - RNA, 107 nt, Human
gcugcgggcagcuguggguccaggcuggcuggcaggggacacagagcauugggaaacuaggggaugaugacucacccugcuggggcagccccuacccacgccucagc

SEQ ID NO: 4144258 - RNA, 90 nt, Human
gcugcgugugacccaugggagacagugcagggcgggaagaaggggaggccagcgucucucccucacucugccuccugggguuuccgcagc

SEQ ID NO: 4144259 - RNA, 66 nt, Human
gcugcuaaaaagugggugagcagcuagggacucuauuucugccagcuccucccccaccuuugcagc

SEQ ID NO: 4144260 - RNA, 64 nt, Human
gcugcuaagggugggaacuaccagugaaaugcuacgugcugcagggucagccccaccuggcagc

SEQ ID NO: 4144261 - RNA, 71 nt, Human
gcugcucacugguggauggacucucgggggcccugcuggccaggacacccccgggcauccacaagggcggu

SEQ ID NO: 4144262 - RNA, 61 nt, Human
gcugcucagugggccugagccugaagcuguauuaaggagucuaggcuucauccugggcagc

SEQ ID NO: 4144263 - RNA, 74 nt, Human
gcugcucaucgugguuugccaugcagccaggaaggaggggaccgccugccuucccugugggcgcccugagcagc

SEQ ID NO: 4144264 - RNA, 55 nt, Human
gcugcuccaguguucugucuagaaagcaacuucuggacaggauagugcaguacgc

SEQ ID NO: 4144265 - RNA, 62 nt, Human
gcugcucucccugcuguccucagccucucccaccaccggcuguggaccagguccugggcagc

SEQ ID NO: 4144266 - RNA, 77 nt, Human
gcugcucugaggccagagcugaccuaucaaugaagacuagagaggaucgcauuggugggggcuuggagaggggcagc

SEQ ID NO: 4144267 - RNA, 58 nt, Human
gcugcucuuugaaauccaucacugcuuuguaccaagacuaugccuuucgaggggcugc

SEQ ID NO: 4144268 - RNA, 96 nt, Human
gcugcucuuuguuauuucagccacagagugcaagaaagaccuuuugccguuuuauuagugugccaugcugaacgauauuagagguuuccuagcagc

SEQ ID NO: 4144269 - RNA, 55 nt, Human
gcugcugcugagaaugccucagguacaauugacacucuugguugcucagugcagc

SEQ ID NO: 4144270 - RNA, 72 nt, Human
gcugcugcuggcuuccugcuguuuugaggccucugaugcuggaagaacaggaggaagccagcuccccacagc

SEQ ID NO: 4144271 - RNA, 62 nt, Human
gcugcuggccgcccagcuucuccccgaucugggagaugcucggcucugggcggccaaacagc

SEQ ID NO: 4144272 - RNA, 58 nt, Human
gcugcugggauccugggucucagccguggcuggggcugcaucagcaggacccggcagc

SEQ ID NO: 4144273 - RNA, 73 nt, Human
gcugcugggccccuugaaaggcgucucccugggccugggaaugucuggacggcucuaagggggccagugaagc

SEQ ID NO: 4144274 - RNA, 62 nt, Human
gcugcugguagauucagcaucuggugaaguuugcuuccuggaucauagcgucuucuugcagc

SEQ ID NO: 4144275 - RNA, 71 nt, Human
gcugcugguccucagagcucaucucgaauagcaagaguaaaagauaagaaagacuggagggaccaaacagc

SEQ ID NO: 4144276 - RNA, 74 nt, Human
gcugcugguucgcagauggccuugcacaagccuuggcugcucagagcuuugcacuccagcuguggcccagcagu

SEQ ID NO: 4144277 - RNA, 66 nt, Human
gcugcugugccccaucugcagauuuccauuuuuaagaugcuucgggaauucucgcaggccaguagu

SEQ ID NO: 4144278 - RNA, 126 nt, Human
gcugcugugcccggaaauccauggccaccuuugcacucaggccacucuucccaucagugaaugaguguggcagggauacugaggcaggcugguuccagagagacccagggugcaucgaacggcagu

SEQ ID NO: 4144279 - RNA, 60 nt, Human
gcugcuguuccuccaguggauccaccauuuggcugcugucccugcuuggaacuggccagc

SEQ ID NO: 4144280 - RNA, 74 nt, Human
gcugcuguuuuggucauggaaucagaugucuuuuacuauucugaggcccaaagagcccagggugaaauagcagc

SEQ ID NO: 4144281 - RNA, 101 nt, Human
gcugcuuaauuaaagccugcuggcagaggggguuacucacuucagcaaguugcugaccccagaguaucccacuuggcugccagcagauugaaaggaguggc

SEQ ID NO: 4144282 - RNA, 64 nt, Human
gcugcuuagaaccauauuuaaaguuaucccauuacggaagagaaggagguguguuucuaggagc

SEQ ID NO: 4144283 - RNA, 81 nt, Human
gcugcuucaggcuggaacaacaugcuggaaaauuguggucugccaugcauuuccuuugauguuauuccaugccagaucagc

SEQ ID NO: 4144284 - RNA, 106 nt, Human
gcugcuuccaaaauggcaccuucuuccugccucuucauauggagaaaggaacaaaugcuguguccucauguggcagagaguggaaggggagaaagugccaggcagc

SEQ ID NO: 4144285 - RNA, 94 nt, Human
gcugcuuggaaaacauugcuggaacacugggauccacugagggagauucuuccagaaguguccugugucccagacugugacuuuucuaaccagc

SEQ ID NO: 4144286 - RNA, 67 nt, Human
gcugcuugggcccucugugccucaguuuccucaucuguaaccuacagaaguggcuucaaagagcagu

SEQ ID NO: 4144287 - RNA, 67 nt, Human
gcugcuuguuuucuuccuaauugcucauuucuuuuaaaugccaauugcaggaagaaaacuaaacagu

SEQ ID NO: 4144288 - RNA, 80 nt, Human
gcugcuuucugauuacucacauucuguuucuugcuuuuaaaaaaacaguaaagacaagaguguuggaccaguauugcagu

SEQ ID NO: 4144289 - RNA, 75 nt, Human
gcugcuuugacauccauucagugcaaaucacauugagucacuccucucugugaacuuuggaugguucugagcagc

SEQ ID NO: 4144290 - RNA, 62 nt, Human
gcuggaaaaggaggcaaaauauacuuccuacaaaauggcaaauuuugucuucuuuucuacgc

SEQ ID NO: 4144291 - RNA, 63 nt, Human
gcuggaagggaggcccagccggcagccaccaccuccuccuccaaccuguccucccauccacgc

SEQ ID NO: 4144292 - RNA, 64 nt, Human
gcuggacaucagcaggugcugguggagaccacucacugguuguuggcugguugcugagaucagc

SEQ ID NO: 4144293 - RNA, 65 nt, Human
gcuggacauggaaaucggcuugcuccauuggugguggggcauagagagguucaugucagcccagc

SEQ ID NO: 4144294 - RNA, 90 nt, Human
gcuggacgaacauucuggauguuugaggacucagaagacgcacaucccugugcccuucuuuuuuaaacaauuauuugaagacagucuagc

SEQ ID NO: 4144295 - RNA, 85 nt, Human
gcuggacuguaaaugaggcucauuugaggcuggggauacgugaaugugcuuguugugcugggcccagggagccucugggcacagc

SEQ ID NO: 4144296 - RNA, 67 nt, Human
gcuggacuuucucaguuccaucuagagccugaaacucaaaauccagaaaccacugaagagauccagu

SEQ ID NO: 4144297 - RNA, 101 nt, Human
gcuggagaaacuagaaaagauuaguaucaggcaugucuucugcacuguaagaacgcuuaggcaauagaauaugccugagggucugguuuaggaaucuaagc

SEQ ID NO: 4144298 - RNA, 63 nt, Human
gcuggagagcaaugaggggcaggcugugaacuccaaacgccuccuccaucauugcuucauggc

SEQ ID NO: 4144299 - RNA, 77 nt, Human
gcuggagagguuaugagacuugucuguggucucaaucaggcgagugcagaaccaguccucagacccaauuguccagc

SEQ ID NO: 4144300 - RNA, 84 nt, Human
ggaaccaaaaguguccagauuaugaagaaauacuguuuuaauaaguuaucucucuucaguauuuggauaacauuuugagggccc

SEQ ID NO: 4144301 - RNA, 78 nt, Human
ggaaccagaggccacauguggcugcucguauuuaaguuaauuaaaauggaacgauggccgggugugguggcucacacc

SEQ ID NO: 4144302 - RNA, 61 nt, Human
ggaaccuggaaucuauuacaaggugcucccagcuaagcucucaggguaacagccaggugcc

SEQ ID NO: 4144303 - RNA, 63 nt, Human
ggaacuaacuauucaagugcucauucagaacacucugacugaaagcuuaaauggaaaggaucc

SEQ ID NO: 4144304 - RNA, 82 nt, Human
ggaacucaucgagugccugguauguagguagcggaguggaauucaaaccccaggcuucugauuccaggcaccauguucuucc

SEQ ID NO: 4144305 - RNA, 119 nt, Human
ggaacuccucucuagaaaaauauccaauuaaaauucacaguggcagguguggguuguggaccuggucaaaaggcauaaaccaccaacccacccugugauuguuuuagcagaggauuucc

SEQ ID NO: 4144306 - RNA, 70 nt, Human
ggaacucucauauauuguuggugggaauauaaaauggcaaaaccauguuguaaaacagugugacgguucc

SEQ ID NO: 4144307 - RNA, 94 nt, Human
ggaacugacugcugggucaugggguagaagcauguuuauuuacugccauaagaaacugcuagacacaucuucauccacaaugauaaagaguucc

SEQ ID NO: 4144308 - RNA, 93 nt, Human
ggaacugcaaaagcuauuuauuacagagaaugcauauaagcucuuuuucacaugccaacuguauucuauugguaagugcuugcugcagcaucc

SEQ ID NO: 4144309 - RNA, 62 nt, Human
ggaacugcauucuuuaucccacaacccucacaggguuugcuuuaugaaagaggauguaaucc

SEQ ID NO: 4144310 - RNA, 77 nt, Human
ggaacugugguccucucaacugaagguugaaucuacuuccaagcuuccuuaccugguuguugacaggacucaguucc

SEQ ID NO: 4144311 - RNA, 77 nt, Human
ggaacuuaaagcacaggagaguucaguaacuugcucaaggucauguuguuguggacuaacuccuggucccaagcucc

SEQ ID NO: 4144312 - RNA, 86 nt, Human
ggaacuuauacuguaacagccagguuagugcuaauuguagacuuacaguaaagccuucugguugacagucacuacaccagaguucc

SEQ ID NO: 4144313 - RNA, 59 nt, Human
ggaacuuauuuggauaauacagcacagauguaccuuguuguacucaacagaugaauucc

SEQ ID NO: 4144314 - RNA, 87 nt, Human
ggaacuuguugggaacuggagcaaaagugacuccucuuaugguuuaacaaacagacuggaggcauuuugcuccugcccuagagaucu

SEQ ID NO: 4144315 - RNA, 72 nt, Human
ggaacuuuuguuucauuuacucauuaagcuuucugaaaugggagcuuuggcaaugaaacacaagaaaauucc

SEQ ID NO: 4144316 - RNA, 65 nt, Human
ggaagaaacccagcagaucagaggggcuauuggaagaacaaaagccccucauaucugcuuucucu

SEQ ID NO: 4144317 - RNA, 63 nt, Human
ggaagaaagaacguugguuaucuuagauaucucagucauaggaagguccaugucuuaucuucc

SEQ ID NO: 4144318 - RNA, 130 nt, Human
ggaagaaagagcuaggcuaaaaaauaaaaagagagacuuaugaaugagagaauaguggagcaacacaauugcuucagauucuuuucaugucuuuagguaucucucuuuucccaaauuaacuuuauuuucc

SEQ ID NO: 4144319 - RNA, 60 nt, Human
ggaagaaagguggacaacagguggccagcagugguccaccugugguuauuuuacucuucc

SEQ ID NO: 4144320 - RNA, 82 nt, Human
ggaagaacacuucaugauucauuucucaacuaagagaauagugcucuuauuuuucuagugaucagcuugaaguaguuuuuuu

SEQ ID NO: 4144321 - RNA, 78 nt, Human
ggaagaagaagagcaaggagucaaugcuucuguuaaacauaaauuaccagaauaaaaacuccuaugucucucucgucc

SEQ ID NO: 4144322 - RNA, 115 nt, Human
ggaagaaugcuuugaaaacagcagggcucuauagagguuagauguucuccagaugggaggcauuacuacuugucacuuccagaacauuccaugugcccugcccagagcacauucc

SEQ ID NO: 4144323 - RNA, 66 nt, Human
ggaagacauggcuguugugaggaucaaauggaaggauccaugagugcuuagaacaguccugggucc

SEQ ID NO: 4144324 - RNA, 71 nt, Human
ggaagagagagacgagugggguuuggccuuguggggucgccuaccacagccccccgcucaguuuccaaacc

SEQ ID NO: 4144325 - RNA, 71 nt, Human
ggaagagagggcugggccucaaacaaagccuguggugccucaggugagaccuccuagcccucugucauucc

SEQ ID NO: 4144326 - RNA, 68 nt, Human
ggaagagcugcuuaguuuugauuuucauuaagauaagaaugcugugucaaagccaggcaacucucucc

SEQ ID NO: 4144327 - RNA, 62 nt, Human
ggaagaggccacuauuuuuagggauugguagcacagaacuuccuugaauugugccacuuacc

SEQ ID NO: 4144328 - RNA, 57 nt, Human
ggaagaggcugagccaggucccuguaacugcauuugccugagucacauagcuucucc

SEQ ID NO: 4144329 - RNA, 60 nt, Human
ggaagaggguacuccuuuccuccugcuuuucuuacuaggauuuaucaggaacucucuucu

SEQ ID NO: 4144330 - RNA, 57 nt, Human
ggaagaggugucguagauuauucucaaguuccacuuugaagccuggcaccuucuucc

SEQ ID NO: 4144331 - RNA, 70 nt, Human
ggaagauagaaguucaaaaguuaucggugcaaaaggagugauacacaaaagacuucaauuucuaucuuuu

SEQ ID NO: 4144332 - RNA, 78 nt, Human
ggaagaugaggcuguuagggccugagguagcuggugcuuaagaagcagcugaccugaaaugacagucuuaguacuucc

SEQ ID NO: 4144333 - RNA, 76 nt, Human
ggaagaugggugguccuuacaggaggcuuacucauaggugugaagugaccucauuacggggccugcuccaucuuuc

SEQ ID NO: 4144334 - RNA, 63 nt, Human
ggaagauucagcauauaugagugggccuuuggccucggguuacuuaugaucugguugucuuuc

SEQ ID NO: 4144335 - RNA, 58 nt, Human
ggaagauuucugaugaguuacuugaugcuucugugccaaguaaaucagagaaauaacc

SEQ ID NO: 4144336 - RNA, 110 nt, Human
ggaagcagaaaggugguuuuagagucacucagauguuaaagggcuuuuuuugcaccaggaagccaagccucuagaagacccuauacucagugacccacccgucagccucc

SEQ ID NO: 4144337 - RNA, 75 nt, Human
ggaagcagagcagauggucuucauaaguuuuaagcaaaggugcuaagaaaacacaaaguuuacuuuucuacuucc

SEQ ID NO: 4144338 - RNA, 71 nt, Human
ggaagcagcaugcucugguacacaugggaaugaguuggaacacaggugugucuaggcucaugcuugcuucu

SEQ ID NO: 4144339 - RNA, 59 nt, Human
ggaagcagcuguuuccaggcguuguugccuuccuuggagcaaugcacacagcugcuucu

SEQ ID NO: 4144340 - RNA, 80 nt, Human
ggaagcauagggcauuauuaacuggaggaaaagugaugacuuuucccuuuuuguucauucuuaauaaauuaugugcuuuc

SEQ ID NO: 4144341 - RNA, 64 nt, Human
ggaagccaugagggacaguucuaguuacacugaguacaggaacucuaaugacccugaugguucc

SEQ ID NO: 4144342 - RNA, 66 nt, Human
ggaagccgcgggucaggucuaggcuagggccuucuuagacauuccugggcauuggcugcagcuucu

SEQ ID NO: 4144343 - RNA, 66 nt, Human
ggaagcuaugguaaucauccaccaagcccaguuucucauggcuugaguguuauccccagggcuacc

SEQ ID NO: 4144344 - RNA, 56 nt, Human
ggaagcugccaguccaccagcugcagaucaccugagcccuggggcuggugcuuacc

SEQ ID NO: 4144345 - RNA, 56 nt, Human
ggaagcuggcauauguaauccuagcccugggcaaccauguugucagcuaaaaaucc

SEQ ID NO: 4144346 - RNA, 83 nt, Human
ggaagcuggcugugcuguaaaaauggccuaaaucuguuuuucaccuucagaucauuggccuuucugcagugcacacaagcucu

SEQ ID NO: 4144347 - RNA, 72 nt, Human
ggaagcugguaugaacaggauaggaagggaguaagacauuucauucccucaucccaucauggccaguggucc

SEQ ID NO: 4144348 - RNA, 67 nt, Human
ggaagcuucagaagcugagguuccaggagccccaguccagcuccugaccuauuuuucucagcugccc

SEQ ID NO: 4144349 - RNA, 58 nt, Human
ggaagcuuucucuguuuccuuacuuuugacaugugggguugugaauuugagagcuucc

SEQ ID NO: 4144350 - RNA, 59 nt, Human
ggaaggaaagucugguuccaguuauuucaucaugguuggaagcagaaguuucaauaucc

SEQ ID NO: 4144351 - RNA, 57 nt, Human
ggaaggaagaggaccgagcuggugcaaagccagcuucucucaggguaucuuucuucc

SEQ ID NO: 4144352 - RNA, 82 nt, Human
ggaaggagacacaccaggaacucacccgcagaggccagcagccccucagcacagguggggccugggucacuguguuccuucu

SEQ ID NO: 4144353 - RNA, 82 nt, Human
ggaaggagccaaucaaaagcuuaccuuuucagucuuuguuauuguucaaggaugauugguaaugacacuaucuucuccuuuc

SEQ ID NO: 4144354 - RNA, 71 nt, Human
ggaaggagggaagggggaagagagcuggccguagacccgucuccggcccccgccucccccuuuccuccucc

SEQ ID NO: 4144355 - RNA, 118 nt, Human
ggaaggaucgggagagaugggaacauaggaaugaggcagagggcugugccggcugaggagaaagagccgggugagcccugcugcuucuuguauuuuacccacuugaugagaucugucc

SEQ ID NO: 4144356 - RNA, 70 nt, Human
ggaaggcagcaguggcugcuauugucucauuuucagauaugaaugggugguuugcccacuguugcccucc

SEQ ID NO: 4144357 - RNA, 56 nt, Human
ggaaggcagugaguucagcccuguacccgacauguggggcagagcuccugcuuucu

SEQ ID NO: 4144358 - RNA, 97 nt, Human
ggaaggccauguuagacggcaaaaugguuuucuagaacaugaaauggaauauacauugcccucauuucuauaaaccaggacucuaacaagggcuucc

SEQ ID NO: 4144359 - RNA, 64 nt, Human
ggaaggcugugaggggcccgcaugccagcccugugcggcagcccaggucucucucacuccuucu

SEQ ID NO: 4144360 - RNA, 80 nt, Human
ggaagggaaaauucauggguccagagcccugggcuuuguucccaaggcuccugggaaaggcuggacacauuuuucuuucc

SEQ ID NO: 4144361 - RNA, 85 nt, Human
ggaagggaugaggcaggagcggggacccugcccugcaagacuccaaagcccagguuuaggggucccuccuccucgccucccuucc

SEQ ID NO: 4144362 - RNA, 67 nt, Human
ggaagggcaggcacccacccucaccuguaaauucaggucuggggguccgggugccugcuccgaugcc

SEQ ID NO: 4144363 - RNA, 107 nt, Human
ggaagggcccugagccaggggccagcuuuggggccagguggcugcaggucccaccccggcucugcuaagccucugcuuucuggcccugggcaugucacugccuuucc

SEQ ID NO: 4144364 - RNA, 63 nt, Human
ggaagggcuggcuccguuaccuugaccuugucaaagauggugaggggguggagccaggccgcc

SEQ ID NO: 4144365 - RNA, 57 nt, Human
ggaaggggaaaacgucagaagaaaucuucuugguuuucaucugcuucuuccuauucc

SEQ ID NO: 4144366 - RNA, 78 nt, Human
ggaaggggaaggggccgggugguggcgggucugcgccagcgcucugcggcagcagccuccacucgccccacccuggcc

SEQ ID NO: 4144367 - RNA, 69 nt, Human
ggaaggggaagguuguauucagaaucaggugauccccgugcacagucagaggacuaccuucuccagucc

SEQ ID NO: 4144368 - RNA, 78 nt, Human
ggaagguauuagaaucuuuagaugaggacucuaaaauucgggaaaguuaagucacuuaucuaaagacacauaucuacc

SEQ ID NO: 4144369 - RNA, 64 nt, Human
ggaaggucagagggccaaaguuuucuaguaauucaucuaggaaauuaaccaccuuuggcuuuuc

SEQ ID NO: 4144370 - RNA, 55 nt, Human
gcugagggucuguucauguugcucugaauuuguaaggcuaagugaaccccuuagc

SEQ ID NO: 4144371 - RNA, 61 nt, Human
gcugagguacauaauaaaaauaacagcucagcaguaauugaguauuuauuaugugccaggc

SEQ ID NO: 4144372 - RNA, 55 nt, Human
gcugagguggagauugcagugagcugagaucgcaccauugcacuccagccugggc

SEQ ID NO: 4144373 - RNA, 72 nt, Human
gcugaguacuccagcugccuucugcgggaagucauuuaaugauguucuguucuaggauagguggcacucggu

SEQ ID NO: 4144374 - RNA, 78 nt, Human
aaaaugcugauuccagggccucauccucagagauuugaauucaacaggucuagaguggggccuggaaauaugcauuuu

SEQ ID NO: 4144375 - RNA, 91 nt, Human
aaaauggagcaucacaucuccuagguuauugaugcagagguaugucacaaggcccucuguagaaagagcccaggugguagucucccauuuu

SEQ ID NO: 4144376 - RNA, 75 nt, Human
uggguuauauuucucauauggugaucaguuauauuugaacaauaacuagaaaucauuuagaaguauugaaaccua

SEQ ID NO: 4144377 - RNA, 70 nt, Human
uggguucucacagguugggggaguugauaagaaacgggauucucagucauuucccucaccugcaauucca

SEQ ID NO: 4144378 - RNA, 60 nt, Human
uggguucuccagagcagacagagccaggguuuagguugcuggauguuuaugaaggaccca

SEQ ID NO: 4144379 - RNA, 62 nt, Human
uggguugcuguagauuuuuaaagucucauucuuauguuaaauuagaacaucaacagcaccua

SEQ ID NO: 4144380 - RNA, 74 nt, Human
uggguuggccuggaaggacagcgugauggcagucacagaagauaucacccccaucuuucuagauucccagccca

SEQ ID NO: 4144381 - RNA, 67 nt, Human
uggguugguaguugcagauauugucagaaaaguguauugcuaauucuuaagacugcaaaucaaccca

SEQ ID NO: 4144382 - RNA, 60 nt, Human
uggguuucauccugacucccacuggccagacauuguccacugggcaugaugagucaccua

SEQ ID NO: 4144383 - RNA, 63 nt, Human
uggguuucuuuccauguacuuuaguggcuugucagagcaguuguagucauggaaaauuuccca

SEQ ID NO: 4144384 - RNA, 80 nt, Human
ugguaaaguuaaaaagcagaaggggaauaauauuuugaccucacuaauuuguuuuccccuuuugcugacccagcuuucua

SEQ ID NO: 4144385 - RNA, 105 nt, Human
ugguaacucuugaauauuugucagguaauugcuaagugcaagggaguaugggaaaagauuacauucuacucugugguguauuugcauugacauaaauaguagcca

SEQ ID NO: 4144386 - RNA, 76 nt, Human
ugguaacuuuggacaucacuucuaccugaaagagaccuucgagcaauucuucucagguaaaaggguaucuacucca

SEQ ID NO: 4144387 - RNA, 66 nt, Human
ugguaagauuucaaguauaaguaaggucagaggaaagaaaguuuugcaaauacagaggucuugcua

SEQ ID NO: 4144388 - RNA, 80 nt, Human
ugguaaggaugagggaaagaugaaaaucuaggagucugcucucagauuucuuugcccauguuuccuaagcucuuuaucca

SEQ ID NO: 4144389 - RNA, 72 nt, Human
ugguacauaaucaucucccuaauuaugacucaucuccagacaauucgagauaguugaagagaugaaugacca

SEQ ID NO: 4144390 - RNA, 121 nt, Human
ugguacccaaauuuuuuuuucuuuuuaauuuaagaacuaagaagugcugaauugaauauguauucauuugaauauuuugcucaggcuucuaagaaaguugcagaagaggcuuuuggggcca

SEQ ID NO: 4144391 - RNA, 81 nt, Human
ugguaccuucuguaggugccaucucuaccucugacacagacugucugccucgaggcugagaaggcacagggcaaggagcca

SEQ ID NO: 4144392 - RNA, 82 nt, Human
ugguacugaaaaauaggucaaccguguaugauucgucacaaauaaagcgaaggcaacacggauaaccuaucuucaaguacca

SEQ ID NO: 4144393 - RNA, 81 nt, Human
ugguacuuggagagaggcuggccgugaugaauucgauucaucaaagcgagucauacacggcucuccucucuuuuaguguca

SEQ ID NO: 4144394 - RNA, 94 nt, Human
ugguacuuugucaaaaaugaauugacuguaaauguguggauugauuuguagguuaucuauuauguucuaugugucuguuuuuauggcaguacca

SEQ ID NO: 4144395 - RNA, 75 nt, Human
ugguagagacuugccuaaggucaugcaacuaguaauuaguggagcuaguauuugaccucaggaaguagaacuccg

SEQ ID NO: 4144396 - RNA, 80 nt, Human
ugguagaggugaggcaggaggguugagcagggucuaggaccuccaggcugaggagcucagacucuggccugaugauacca

SEQ ID NO: 4144397 - RNA, 88 nt, Human
ugguagagucaauacauacaaacuguuauuauuauuguggcgccaacaaccaaauuaggauggcaguuuugauaugcuuagccugcca

SEQ ID NO: 4144398 - RNA, 75 nt, Human
ugguagcugggucccucugcugaugggcacagcauuaaacggcguggccacucagcacaguggaugcagccucca

SEQ ID NO: 4144399 - RNA, 68 nt, Human
ugguagcuuuagugaaaaauaucagauuaugaugauuauaauuuuggugaugauacuaauagcuacca

SEQ ID NO: 4144400 - RNA, 65 nt, Human
ugguagugcuuaacaguuauucacuguaugaaugaaugaaugaaugauuucuuaggcaauugcca

SEQ ID NO: 4144401 - RNA, 73 nt, Human
ugguauaauguggcuugucgauauuagcaauuguuuauaucauguuaauaucugauaaugucccuugugacua

SEQ ID NO: 4144402 - RNA, 64 nt, Human
ugguauaauuauuccauguuccuaaguacuauuauaauuagggacauggaagagaaauuaacca

SEQ ID NO: 4144403 - RNA, 86 nt, Human
ugguaucuuucagaguacaaagugauuuuggaauugaaagaauuucuuuggguuaaaguuugucacugacuuguguuccugaacca

SEQ ID NO: 4144404 - RNA, 76 nt, Human
ugguaugccugucaccugccagcauacccaugauguacuucccuggugcuggguacugagccaggugacaugacca

SEQ ID NO: 4144405 - RNA, 127 nt, Human
ugguauguuguuaacagucagguagugguuaaguucugugccgugaucugcaucaacccuaaccucaaguagcgagaacggcaaugaaaauaauguauuuccuucuacaguacuuaauugugugcca

SEQ ID NO: 4144406 - RNA, 75 nt, Human
ugguauuaaaauauaccuucuuuuaugaaacaacuguaaaaguugauggucauauuuggggguguguguuuauua

SEQ ID NO: 4144407 - RNA, 64 nt, Human
ugguauuugcaggaauugugauuuuggaacuuuauuuaaauaaucaauuuuuguagauaugcca

SEQ ID NO: 4144408 - RNA, 75 nt, Human
uggucaaugcagcuacaaauacuuuuguaugcuucaggagguucucaugcuguguguuuuagcuccaucagauca

SEQ ID NO: 4144409 - RNA, 90 nt, Human
uggucacacuuuaucaauauucaaaaaucagcacggagacaacaacaacaaaucuguguugguuuuugaauauugauaaagugggguuca

SEQ ID NO: 4144410 - RNA, 55 nt, Human
uggucacaugcggggcuguagccugugagugcaggaagcuguuccuguguggcca

SEQ ID NO: 4144411 - RNA, 80 nt, Human
uggucaccuuuggaaugagcucaaauggcaagguugcauuacugaaugaaccuuugaggggagcucuuucagaggucuca

SEQ ID NO: 4144412 - RNA, 82 nt, Human
uggucagaacacguuggaguuguggauuaggucaaagcuaaaaugaaaugucuaauuccaccuuuuuccaacuuucaaucca

SEQ ID NO: 4144413 - RNA, 76 nt, Human
uggucagaaucccagaucuuucccaucaagcacagaauuuccccuggguuugcugggcaugucuuaauucuuccua

SEQ ID NO: 4144414 - RNA, 69 nt, Human
uggucaggccugagucuugugccccacccuggggcuagagaagaggcucagccagccaugccugaacca

SEQ ID NO: 4144415 - RNA, 55 nt, Human
uggucaguugugacuagaacacagaaucuuaauguuacacugucacagauggcca

SEQ ID NO: 4144416 - RNA, 74 nt, Human
uggucauaucauucugauguauaucuucaaaucacaacugaaaauauguaaagaauugguaaccucagugacca

SEQ ID NO: 4144417 - RNA, 59 nt, Human
uggucauucacaaguucagggaugccagaaauggcauuuagugaccugaacugaaacca

SEQ ID NO: 4144418 - RNA, 57 nt, Human
uggucauuucuaauacaggauuuaaaaauacaaaucuuguuuugaaagcaguggcca

SEQ ID NO: 4144419 - RNA, 70 nt, Human
ugguccagugucuucuacauaacaaauacucaguaaaccauaucuguuaugagaaagacauuagguaaca

SEQ ID NO: 4144420 - RNA, 65 nt, Human
ugguccaugcccacggaaugugugguuuccaagacaaccaugacccucuacauugggcugaguca

SEQ ID NO: 4144421 - RNA, 72 nt, Human
uggucccaggagaauaggugcaaaauguuucuucuacauuuucagccauuuagcagucuuucuuugggacua

SEQ ID NO: 4144422 - RNA, 63 nt, Human
uggucccuauugugguaagugggccuccauccugcuuggcucucuuagaaacuauagagauua

SEQ ID NO: 4144423 - RNA, 57 nt, Human
uggucccuuugacugcccgccacaagggaagauccaaaguguggcagagagugacca

SEQ ID NO: 4144424 - RNA, 58 nt, Human
ugguccucccuuaacuugucauguguggauuucaugauucuaaacuuaagggggagca

SEQ ID NO: 4144425 - RNA, 66 nt, Human
ugguccuggagcugaggaauagcuuugauuuuggggaaaauuagugaguccacaguuuucugauca

SEQ ID NO: 4144426 - RNA, 58 nt, Human
ugguccuucugucuuccgcaccucacaccaguguguggcacauacacaggagggcaca

SEQ ID NO: 4144427 - RNA, 98 nt, Human
uggucuaaagauuugcaauggauugaagaagguaagguuauuuccuauaacuuucaagaacuucuuuaauguacauuuugcaaagcuuacagagagua

SEQ ID NO: 4144428 - RNA, 80 nt, Human
uggucuauaaaaucauuuuguagacaaagugauauuuguuuguuucuuaaauauuucugcagaaugguuuuaaaaggcua

SEQ ID NO: 4144429 - RNA, 59 nt, Human
uggucuccaugacaucacaguggagugaaacaccuccuagaauagugugucuggagcca

SEQ ID NO: 4144430 - RNA, 85 nt, Human
uggucuccuaaaauaugguacugacuuacugguaaucaaagaaaugcaaauugaagcaguaaugagguacuauuugggcuuauca

SEQ ID NO: 4144431 - RNA, 55 nt, Human
uggucucugacucugaagacccaagagggccugaggguagagaguagagagacca

SEQ ID NO: 4144432 - RNA, 81 nt, Human
uggucucugugacacuccugugagguagguggcaauggcuuuguggugaguugaccuuucauggugagugaucauaaacca

SEQ ID NO: 4144433 - RNA, 76 nt, Human
uggucugggugcggugcauuucuguggcauggagagccugggcucagucccugggggagucaccagcauccaacua

SEQ ID NO: 4144434 - RNA, 61 nt, Human
uggucuuagcuggaaggagggauggggaagaaaaggcaaucucucgcucucacugguacca

SEQ ID NO: 4144435 - RNA, 69 nt, Human
uggucuuauucuuggaucugagucucugaguuucagcucagcugcaguaaagcucuccagggcacgcca

SEQ ID NO: 4144436 - RNA, 69 nt, Human
uggucuucaauuuuugguaugauggaaagucuauuauucucuuuuuauauauggcaaaauugaggcuca

SEQ ID NO: 4144437 - RNA, 71 nt, Human
uggucuugaauuauuuaauaccuuguuccacacugucacuuaugagcaaugucuuuugcaguucaagauua

SEQ ID NO: 4144438 - RNA, 59 nt, Human
uggucuuugaccagggucugaucacuucucucuggucaguccuacacgcucagggacca

SEQ ID NO: 4144439 - RNA, 62 nt, Human
uggugaacaaauaauugcaguuuucccauuauuuucaaugaacugcaauaacuugugcacca

SEQ ID NO: 4144440 - RNA, 55 nt, Human
uggugacaccccaucucuaaagauacaaaaauuagcgggcgugguggugauccca

SEQ ID NO: 4144441 - RNA, 69 nt, Human
uggugacgucuccauguuguauugucucaagcacauauggcuggacagcaaacauggagagaaucauga

SEQ ID NO: 4144442 - RNA, 66 nt, Human
uggugacugcuucaauuuauuuucuaggggaaauaauggcuucuaauaugaauugagcacuuacua

SEQ ID NO: 4144443 - RNA, 73 nt, Human
uggugacuucuuaaauuggauugcuauuggacaagauuuucaguauuuaucccauugauuuaaggagacacca

SEQ ID NO: 4144444 - RNA, 60 nt, Human
uggugagauagagaaguuaaguaaaugcauuuacauuauguagauuucucuguuuuucca

SEQ ID NO: 4144445 - RNA, 92 nt, Human
uggugagccaauaagucucugccaagggucaacacuuuaaacauauaguuauaagacauuuuagagugugacuggccuuuuggaaaacacca

SEQ ID NO: 4144446 - RNA, 59 nt, Human
uggugagcucuggcagucuguggcucaccuugcucagucuagauacccaaugcucauca

SEQ ID NO: 4144447 - RNA, 74 nt, Human
uggugaggacuauuuuugagcugacacucccucuuaguuucuucaugucaccuuucguccugguuccuccgcca

SEQ ID NO: 4144448 - RNA, 64 nt, Human
uggugaugaggaaaugccugcugaguuguguaaagauucuaaaaugguguuucuucauuuucca

SEQ ID NO: 4144449 - RNA, 67 nt, Human
uggugcaaaaguaauugcaauuuuguagcugaaaggaauugcaaaaaccacaauuacuuuugcacca

SEQ ID NO: 4144450 - RNA, 69 nt, Human
uggugcacguagacagguuauaaaucagugaggugcccuuacauguuuguuuucucucucugagcauca

SEQ ID NO: 4144451 - RNA, 75 nt, Human
uggugcaugcagcuuguauuaguuaaugacugaggcauuagaaacucaguaaguuaauacaagcauaugcacaca

SEQ ID NO: 4144452 - RNA, 58 nt, Human
uucuuacuacauuugcaggcuaacuguugaaaaaacaguauuuuguuugugggaagaa

SEQ ID NO: 4144453 - RNA, 72 nt, Human
uucuuacugcagcagcccauggacaccuagagauggaaacagugcuggguccuuggcuguggcuguaaugga

SEQ ID NO: 4144454 - RNA, 130 nt, Human
uucuuagacuaacuauugucugauuuuagaagcuucaagauauuugguauuucaguuaaauacagaauaaagcgugaagcuuccaauauaauguaaaaaaugauaauaguaaaaauaauaauagcuaaca

SEQ ID NO: 4144455 - RNA, 85 nt, Human
uucuuagccaugucaaucaaugucaugacaauaguauaucaaagcaguguacuuccguggacuaauuguucugcaugguuaugaa

SEQ ID NO: 4144456 - RNA, 73 nt, Human
uucuuaguggaguauaaauuauuaggaucauuuaguuuuaugccuagauuaucccugauuuguccacugggag

SEQ ID NO: 4144457 - RNA, 98 nt, Human
uucuuauuuauuauguguauguagguauuuugugugugugaaaaguauauuaauauuuagaacagacaauagaaaaguauauagauugauagaaagaa

SEQ ID NO: 4144458 - RNA, 55 nt, Human
uucuucaaugugcccuguuuucuuuuauuggagaauaguuuuagaaauuggagaa

SEQ ID NO: 4144459 - RNA, 81 nt, Human
uucuucacaagauuuaaugcaacccaagcucuaccugaauuagucaggacucuucugguugcagaaauccaaguggcagaa

SEQ ID NO: 4144460 - RNA, 56 nt, Human
uucuucacauuugcccuuaugugugucaggaagauacaauccuagauguggaagaa

SEQ ID NO: 4144461 - RNA, 70 nt, Human
uucuucagaguuauugcauugggaauuauguaggaaaacaaauccauuucagaaugcauucuuugaagga

SEQ ID NO: 4144462 - RNA, 62 nt, Human
uucuucagguguauugaugucugugauuguucauuacagcaucaaagcugccuucuuaagaa

SEQ ID NO: 4144463 - RNA, 72 nt, Human
uucuucauucaucaguucaugucuagcugcuucaugucagaacgcuagaacucuguacgaugccuugcagaa

SEQ ID NO: 4144464 - RNA, 69 nt, Human
uucuuccaucuacacuaucauugauuaggaaagcaaugugguucaaaaugacagugugugauugaagaa

SEQ ID NO: 4144465 - RNA, 80 nt, Human
uucuuccugaugcucuggauguagucaagaacuuaaaauuguuggagauuggaaauugacacauuagagcuuguaaagaa

SEQ ID NO: 4144466 - RNA, 71 nt, Human
uucuucucaggaacagcugaccugacaauggggccuuucucucaacuugucauuuaguucuuucggaagaa

SEQ ID NO: 4144467 - RNA, 61 nt, Human
uucaaauaucaucugcaaagcacaucuagaaauuuagcuggugaugcagauaauguaugaa

SEQ ID NO: 4144468 - RNA, 94 nt, Human
uucaaaugggguguuuaaugucucagauaacauguauucuaaagccaauccaaauuuuagagugcagaauuugcaguuaaaauacuucauugaa

SEQ ID NO: 4144469 - RNA, 69 nt, Human
uucaaaugggguucauagacucuuagauacuccaaggaggagcauuaggaggucuauggacauccugaa

SEQ ID NO: 4144470 - RNA, 129 nt, Human
uucaacauucuauuucaacacugagaaugaauaauaugcuuaugaugucucaaguuuauuaccagcgaauaauucugguugacuaaagaugucuaaauauauuguuccuauuaaguguauacaugugaa

SEQ ID NO: 4144471 - RNA, 60 nt, Human
uucaacauuuuugaguuuagguuccucucagaaaugcuaggaugacucaauggaugugaa

SEQ ID NO: 4144472 - RNA, 63 nt, Human
uucaaccacuggucagcaugguagaccagcccccaggggcuucuccugacaggccauggugaa

SEQ ID NO: 4144473 - RNA, 78 nt, Human
uucaagagagugagugagaaggaagucacaaugccuuuuaugaccucucaggaaucucacaugcucacuucuguugaa

SEQ ID NO: 4144474 - RNA, 75 nt, Human
uucaagcacaggauuaguggauuugucuugcugaacaugguagagaugaaaaauacuggucugcaacagcuugga

SEQ ID NO: 4144475 - RNA, 62 nt, Human
uucaaggaaaccagcauuuggucagcaccuucaaugcaaaucauugcucuagguuccuugga

SEQ ID NO: 4144476 - RNA, 76 nt, Human
uucaagggcgucauggggggaaacauuacugcuuuugaucaaaagauacuguuuuaaucucccauugcucucugag

SEQ ID NO: 4144477 - RNA, 55 nt, Human
uucaagguaugguagcuggucacacauucuggaaaauaguuugcugugcuuugaa

SEQ ID NO: 4144478 - RNA, 66 nt, Human
uucaaguaaugagcaauauuuugggaaagauuauucucuuccucaugaauucucguaucgcuugaa

SEQ ID NO: 4144479 - RNA, 57 nt, Human
uucaagucaaggaaagaggucugagaagaacaacucugccaucaccuugaucuugga

SEQ ID NO: 4144480 - RNA, 66 nt, Human
uucaaugacccacagccagguuuuaggagagacaacauauaggauaaggcauaaagguacauugga

SEQ ID NO: 4144481 - RNA, 59 nt, Human
uucaaugggaggggagaauuauugcauuuuuaggcaagaauagcuaccucccauaugga

SEQ ID NO: 4144482 - RNA, 73 nt, Human
uucaauuacacaaagcuccccaaauaguaggucauucagccuugccuauaaccagagcuuuuguagacuugag

SEQ ID NO: 4144483 - RNA, 70 nt, Human
uucaauucauaagaaagacacacaucacaagcaagguccccaugcuugcuuggacuuuugcgugauugag

SEQ ID NO: 4144484 - RNA, 68 nt, Human
uucacaaagggaauguguaggacauguuuucuuuugacagaccagcuuucauucccuuuguucacgaa

SEQ ID NO: 4144485 - RNA, 61 nt, Human
uucacaaccaaucugugggguacgguuaccaugugucccaggccagaacuugguugcugag

SEQ ID NO: 4144486 - RNA, 70 nt, Human
uucacaagcaguuacuauuuacuauuauauuacucccuugggaacuauaauggaguguggcugcuucgag

SEQ ID NO: 4144487 - RNA, 70 nt, Human
uucacaagugugaaggcagagccccagagcccccaugugaucaggugcugagccaagugcacuugaugaa

SEQ ID NO: 4144488 - RNA, 102 nt, Human
uucacaaucauuuagguagacaggacuuugcaugggucugaaggcuugcauggcagauggaggcaaagagccagcaaaucugguuguaaaugucaaugugaa

SEQ ID NO: 4144489 - RNA, 58 nt, Human
uucacacagcaacuguaugaauugguuccuaccauuaucugcauuuugcugaugugga

SEQ ID NO: 4144490 - RNA, 67 nt, Human
uucacaccaugcuuuguggaacccggggucuagagaggugcuuugggggcugcagugcguguguggg

SEQ ID NO: 4144491 - RNA, 127 nt, Human
uucacacuggucagaagccuuaugagugcagugaaugugggaaaucuuuugcugcaagcuccuaucucacuagucacaggagaguucacacuggucagaagccuuaugagugcagugaaugugggaa

SEQ ID NO: 4144492 - RNA, 57 nt, Human
uucacagaacacaaaugccacuuucuucacuccuugggcaagaggcuguucuguggg

SEQ ID NO: 4144493 - RNA, 121 nt, Human
uucacagauagaaugcaucuucaccagagacaagcaaauaauaacuuauucccuuuauuugagcuugugucccuuugaugacucuuccuaaaaugacuaagaugacucuuccuucaguuaa

SEQ ID NO: 4144494 - RNA, 64 nt, Human
uucacaggaugagugauguugaagaagguuaugaaccuuuauauaucaacuucuccacagugaa

SEQ ID NO: 4144495 - RNA, 58 nt, Human
uucacagguugaagccuaauccuacaauguaacuguauuuggaaacagggccugugag

SEQ ID NO: 4144496 - RNA, 55 nt, Human
uucacauguuggacauagaggaaaggauaugcaccaguccucugccaacugugga

SEQ ID NO: 4144497 - RNA, 56 nt, Human
uucacauuagccaagagauggaaucaacuuggguauccauuaauggcucaauggaa

SEQ ID NO: 4144498 - RNA, 77 nt, Human
uucacauuccucugacuuaaaucucucuauucucuuucuuuuugcgagggugugggggcaaguuugagauguguggg

SEQ ID NO: 4144499 - RNA, 76 nt, Human
uucaccacucucuaagguagguacuauaauuuccucuauuuuauguaugaggaaacugaagcccagagagggugga

SEQ ID NO: 4144500 - RNA, 75 nt, Human
uucaccagaguuggaauaauuuugaccaaagcauuuuuacuuauaaacauagggucaaaguguucuuuuguugaa

SEQ ID NO: 4144501 - RNA, 55 nt, Human
uucaccauuucccacuaaaccauuggagggccaagcggaaggugacaguggugaa

SEQ ID NO: 4144502 - RNA, 58 nt, Human
uucacccugagccccaccucugccucuucuauaacagacuggcuuggcucuggcugaa

SEQ ID NO: 4144503 - RNA, 62 nt, Human
uucacgaggugacuuugguuuagacauuucugucucugggccucaguuuucucagcugugaa

SEQ ID NO: 4144504 - RNA, 62 nt, Human
uucacugaggauucccauacuugcaagguaaguccaaaauugcaaaaugagucuugagugaa

SEQ ID NO: 4144505 - RNA, 55 nt, Human
uucacugccaacuaacauggaauuuguuuuguugcauggccucguuugcggugga

SEQ ID NO: 4144506 - RNA, 127 nt, Human
uucacuggaggauuauacaucccuuucugacugacaucagaaauagucauguuacuuuuuuugcugaugaaguguggaugaauauauuauaugucaugucuagguagaaucuguaauagccagugga

SEQ ID NO: 4144507 - RNA, 71 nt, Human
uucacuggggaugcuagaaauugcucccgguuuuucagccaagauaaaaucagcauuccaagcagagugaa

SEQ ID NO: 4144508 - RNA, 59 nt, Human
uucacugugaauaaaggcucccaaugaauucucaugaguuuuuaauggucauagcugag

SEQ ID NO: 4144509 - RNA, 95 nt, Human
uucagaaaggaacacaguggcauugggaugagaagugcgaggguugaaugaaucagcuuuaggaaaaccuucauuuuucucucuccauucuagaa

SEQ ID NO: 4144510 - RNA, 56 nt, Human
uucagacaaggaaaguuuucccagcagaagcccugagaugacucuuauugucugaa

SEQ ID NO: 4144511 - RNA, 56 nt, Human
uucagacaauaagagucaucucagggcuucugcugggaaaacuuuccuugucugaa

SEQ ID NO: 4144512 - RNA, 64 nt, Human
uucagaccaaguacuaauggcauuaauguuuugcuagugcugugcaucauaguguuuggcugaa

SEQ ID NO: 4144513 - RNA, 78 nt, Human
uucagacucauacaacuaagaguuucagaaucucucaggaacaugauguugugaaugucuagguuuuaugucauugaa

SEQ ID NO: 4144514 - RNA, 64 nt, Human
uucagagaacuucauggaagagaucauuuugagcugagccuugaggaaaugaggauuuucugag

SEQ ID NO: 4144515 - RNA, 60 nt, Human
uucagagaugaucccugaguuucauaguaucauauagaaauucaguccuucaacucugag

SEQ ID NO: 4144516 - RNA, 59 nt, Human
uucagagccagcaacacuaggcugauuucuucucacacugcugucucuguggcucugag

SEQ ID NO: 4144517 - RNA, 56 nt, Human
uucagauuuuuuaauagguaaugugguuaccugaaguugcuauuaaagaaucuggg

SEQ ID NO: 4144518 - RNA, 69 nt, Human
uucagcacugacugagugguuaaguugauuaaaagcugauagagccagugcccucauguacaggcugga

SEQ ID NO: 4144519 - RNA, 74 nt, Human
uucagcagaacuuucaaggaaccugggaaccuaucaugaggcaugguuguccugcagcuccuguucuugcuggg

SEQ ID NO: 4144520 - RNA, 58 nt, Human
uucagccaucauuacgaaaucaaaaaccacuuuuuaagaugguuguagauggacugaa

SEQ ID NO: 4144521 - RNA, 80 nt, Human
uucagcccuaguguauccuggccuaaaaauacagaacaaucaaguugauuguuggaaaugagaggcuaggcaggguugga

SEQ ID NO: 4144522 - RNA, 59 nt, Human
uucagccuguuucaaagaagucaguggauguuaacaucugauucauugaaaugggugaa

SEQ ID NO: 4144523 - RNA, 79 nt, Human
uucagcgauucuuucugcaaaugcuggaaaaacucccuccugugaaucuccagagguauguagagaguauauguaagaa

SEQ ID NO: 4144524 - RNA, 56 nt, Human
uucagcuaugcgcuuugggcaaacuuuacuuuuuuugccucagucugcugccugaa

SEQ ID NO: 4144525 - RNA, 71 nt, Human
uucagcuauuauacccacuuuucaggcauguaggaguaagggcaaaggaaaagucggggaugcuagcugaa

SEQ ID NO: 4144526 - RNA, 65 nt, Human
uucagcugagagggugcugggcgaagcugguggguaggacucaaauccagcacccucacagagaa

SEQ ID NO: 4144527 - RNA, 83 nt, Human
uucagcuguuuauggugaugcuacauuuugguuuauaaauauguuugugguauaaaaaaaugaguauaaccauagguuuugaa

SEQ ID NO: 4144528 - RNA, 83 nt, Human
uucagcuuugggaaagcagauacuuauuacagugaaaugacuuuuuacaacagacaggaauaagauuugcuuaagaagcugaa

SEQ ID NO: 4144529 - RNA, 64 nt, Human
uucaggaaagcugcggucaccugugguuugagaaaugcccucucccagagcagugguuccugaa

SEQ ID NO: 4144530 - RNA, 75 nt, Human
uucaggacaacacuucauuccagcuauagguggcaaaagaugcuauggcagggaauacagauguuuaaauaugaa

SEQ ID NO: 4144531 - RNA, 76 nt, Human
uucaggaugcugccauacuauaaggcugucaaguggugagacuagaccaaguuucuggguaaggaaguaaucugag

SEQ ID NO: 4144532 - RNA, 72 nt, Human
uucaggcaggugugagaaacgugaccaguugguggagucgcuuaacuggggugucuucagacugagccugag

SEQ ID NO: 4144533 - RNA, 76 nt, Human
uucaggccuguugcaggcccagggagggagaccaaguguccucgguucccagccuggcccugcuagaggccccgaa

SEQ ID NO: 4144534 - RNA, 75 nt, Human
uucaggcucuugggauguaaccuuuguuccgugacagccuuuaauggggccuaaggacuacucucagaccaugag

SEQ ID NO: 4144535 - RNA, 69 nt, Human
uucaggcugauaaaugacaguaauuguucuuaaguugaagagcugguuuaauaugcugucuggccuggg

SEQ ID NO: 4144536 - RNA, 59 nt, Human
uucagggacuuugauguaucagacuuuaaaaggaguugacaggucacauggucucugaa

SEQ ID NO: 4144537 - RNA, 76 nt, Human
uucagggcacucugacauuuugagaaugacauguuuguuguauguuguuuguucucuugucaguccuucccuagag

SEQ ID NO: 4144538 - RNA, 61 nt, Human
uucagggccuuguucaggagugaagaaugucauucaugauugacuaucaagagcaccagag

SEQ ID NO: 4144539 - RNA, 56 nt, Human
uucuucucccugccucuguucugugcucugggggcacugccaggcaggguggggaa

SEQ ID NO: 4144540 - RNA, 65 nt, Human
uucuucuccgaggagggcuggugcagguugagguugagguuggaccaguaggaguuggagaggaa

SEQ ID NO: 4144541 - RNA, 66 nt, Human
uucuucugacugagguuauugcaauaaaauauuuacuauuauaagcaauagcauucaaaugaagga

SEQ ID NO: 4144542 - RNA, 72 nt, Human
uucuugagggcuaggacaguuaggacaacugacuucuuuuaggaggucaggcucaagcugggcccugaagaa

SEQ ID NO: 4144543 - RNA, 87 nt, Human
uucuuggagaaacaccucuuacauauagcaugaguacauacuauuguguucagguuaauaugcucagcaauguguaaguuucaagaa

SEQ ID NO: 4144544 - RNA, 86 nt, Human
uucuuggaggaugugcggcugcccgagcuggauguaggcgauuggcuggucuuccccuccaugggugccuacauguccuccaugag

SEQ ID NO: 4144545 - RNA, 56 nt, Human
uucuugguugucacguggucuuggagaaaugcacggccauguuuccuuacuaagag

SEQ ID NO: 4144546 - RNA, 59 nt, Human
uucuuguacuggagauacaugauaugcaacauuaaauauugguguccuagagauaagag

SEQ ID NO: 4144547 - RNA, 129 nt, Human
uucuuguccauguccgaccgggccccugugcucaccccccgcgccaggcccaggcagugcggcgcugcuuccggucugggccaggcgagccgagggcgggagcggggcccgcgaggccccucucgagaa

SEQ ID NO: 4144548 - RNA, 88 nt, Human
uucuuguccuacagggaaaagccugcacauacuaaaguuaucuagguuaucuuggaaaguuuuagcuguccaguucccaggacaagaa

SEQ ID NO: 4144549 - RNA, 74 nt, Human
uucuugucugcuugaugagugugccaagcaauaaucucuuguuuugguguuuucaucuaagcuguugagaagag

SEQ ID NO: 4144550 - RNA, 82 nt, Human
uucuugucugguuugcucaucuuuuacuuggagacaagagcuguucaccuugcucugauuagguggaaacaagacaguagaa

SEQ ID NO: 4144551 - RNA, 80 nt, Human
uucuugucuguggcuacuauuauucugucaucaguacucuacuaguuaggaugcacaggaaguguccccauuugacagaa

SEQ ID NO: 4144552 - RNA, 63 nt, Human
uucuuguuuuccuguuucuugcaagcccuugacaaauggcagcuaggggcagggaauucagaa

SEQ ID NO: 4144553 - RNA, 64 nt, Human
uucuuguuuugugcugcucaaagaagggauuccucagugaucggugagcaccaagaaucaagaa

SEQ ID NO: 4144554 - RNA, 57 nt, Human
uucuuuacucccaggaugugccugcaaacuuggcccaggauggugugagugugagga

SEQ ID NO: 4144555 - RNA, 114 nt, Human
uucuuuacuugcaucugcagcccugauuagaaugacagaaaugaggccaaaggccguuuucaacuuugcauucuauuauuuagccuggcguaguauaagugcuuaguaaaagaa

SEQ ID NO: 4144556 - RNA, 83 nt, Human
uucuuuagauagaugugaaaauagacauuauuucucuaugauuaaccaucagagagaaauaguuuuugacacauuucaaggaa

SEQ ID NO: 4144557 - RNA, 55 nt, Human
uucuuuagguagauccaguuuuucaucugauaucauuugccuucugccugaagaa

SEQ ID NO: 4144558 - RNA, 56 nt, Human
uucuuuauggaauggugauagugauacugcugacucgccagggaugcuguaaggaa

SEQ ID NO: 4144559 - RNA, 74 nt, Human
uucuuuauguuaacaguaaagaauugugcaaggaagcuucuaacugggccaguucuuuacucguccauaaggaa

SEQ ID NO: 4144560 - RNA, 106 nt, Human
uucuuucaugauauugaaaagaacuggaagaagugaaagcuuugccacauugcuugcauucauaguguuuccuuccagugugagucuuuucaugucuaugaaagga

SEQ ID NO: 4144561 - RNA, 108 nt, Human
uucuuucccaggagucagugcuuaugucuguauguggagagggguugauauucagaucaacugaucuaugaacaguauccauacugcccaaaacuucugaggauagaa

SEQ ID NO: 4144562 - RNA, 73 nt, Human
uucuuuccugccagaagguuccugcugcagcucuccugcuaguuuagcuuagccuucugguuuaagggaugag

SEQ ID NO: 4144563 - RNA, 67 nt, Human
uucuuuccuugccucagugaaguuuuacagucaaugcgggguuccauauuuaaggcaggggguagaa

SEQ ID NO: 4144564 - RNA, 130 nt, Human
uucuuucgaaaaguaugaauaagccauuagaauuuaaaauuuacagaugcauugcaguggaaugggagaaagacauccuuguacaacguuuuaaauuugacaguucucaguugauucagaugcagagaga

SEQ ID NO: 4144565 - RNA, 76 nt, Human
uucuuucuauuaccagggggaguagaaaaaugaauaaauccuauccauaccacuacuucccuuucacuggagugag

SEQ ID NO: 4144566 - RNA, 86 nt, Human
uucuuucuuauaauuagaaucuuauuuggggaaggcaaaaaucaaguguuuauuaaaggagauuuugacuuuugguuaagagagaa

SEQ ID NO: 4144567 - RNA, 63 nt, Human
uucuuugaggacauuuuagaaaguuguuaaauuuaauagcagcauauugugucuucauaagga

SEQ ID NO: 4144568 - RNA, 56 nt, Human
uucuuugcugugucuggcuuucucuuuccuaugaauaaagucucaacagcugagaa

SEQ ID NO: 4144569 - RNA, 62 nt, Human
uucuuuggugucauguuggacccuucagacuuugauugcuggaaaucagcauacacagagaa

SEQ ID NO: 4144570 - RNA, 81 nt, Human
uucuuuguacuucacuucacaagaggcuggagauauuccaaucucaacaucagaauggaaucucuagguucuaacaaggaa

SEQ ID NO: 4144571 - RNA, 96 nt, Human
uucuuugucccugcuuauauuugucaacuuuacaauccuuuuauuaccagcaaaagcuuugggaagcuacaaauaaaagcagggauuauaaaagga

SEQ ID NO: 4144572 - RNA, 64 nt, Human
uucuuugugcauccaauuuucucccugagaacgugaacccaggggaguggaacguacacaagaa

SEQ ID NO: 4144573 - RNA, 63 nt, Human
uucuuuuagcaaguacugaagucugccagccauaugccacugcaucaguaacuuuuaagagga

SEQ ID NO: 4144574 - RNA, 77 nt, Human
uucuuuuagugcuucuguccaaauauaugaagauugaaauaaauaguaaaauauauuugauugaaaaauuagaggag

SEQ ID NO: 4144575 - RNA, 129 nt, Human
uucuuuuauaagggugccaaauucuagacagcaggagccuucauaugcuguaauuaugucugugguaaucuuauauuuagagcaugaauguuucuguuguaauuuuaaggcaguaagaagguagaggga

SEQ ID NO: 4144576 - RNA, 81 nt, Human
uucuuuuccaauccugguaauugauuauauggagucaaauaagccauagcaauuaagcuccagaauucacuggggaaagaa

SEQ ID NO: 4144577 - RNA, 61 nt, Human
uucuuuuccuacacagcgauuuaacccuuuacuaggguaaaggauaguuauaggauaagaa

SEQ ID NO: 4144578 - RNA, 62 nt, Human
uucuuuugaaaauaucacaggagcagcuguuccucagcuauuuugaguggauuuucugagaa

SEQ ID NO: 4144579 - RNA, 61 nt, Human
uucuuuuuauauugacaaaagguaugcagacauuaccuuuaagauagcauuguagagagaa

SEQ ID NO: 4144580 - RNA, 129 nt, Human
uucuuuuugucagaaaagcuuuugcuuaauuggaagccucauucagauuugugccuguguaucuucauuagcauauugcagggacagucuggauaaaaaccaguugacaaagaauugacauuuaaagaa

SEQ ID NO: 4144581 - RNA, 82 nt, Human
uucuuuuuuccaugugaacagguaugucauuccuucccaagguaguaaacauagaauguucuuccuaccuggauugagagaa

SEQ ID NO: 4144582 - RNA, 129 nt, Human
uucuuuuuuuuuuuuuuuugagaugaagucuagcucugucacccaggcuggauugcaguggcucgaucucggcucacggcaaccuccgccucccggguucaagugauucuucugucucagucuccugaa

SEQ ID NO: 4144583 - RNA, 78 nt, Human
uugaaacaagauccacagacuuggcugaaaucaugggaaagauuuuggaacaucacaagucauggauuggaguuucag

SEQ ID NO: 4144584 - RNA, 74 nt, Human
uugaaacuacggauuccuggacccucguauguuaagcuucagucugggaugaggcccaggaaucuguauuuuga

SEQ ID NO: 4144585 - RNA, 103 nt, Human
uugaaacuuuaaccucuccuauuaaaacuuuugucuauuucuacugcugugcacacacaguuuugagugacuaaagguuuuaauggcugcaguuaaguuuuag

SEQ ID NO: 4144586 - RNA, 96 nt, Human
uugaaagcauugaaagcugggagcaaguacucaucuuugggaauuucauccuugcaggauuggggacuuagaguugccagauguucuuauuuucaa

SEQ ID NO: 4144587 - RNA, 60 nt, Human
uugaaauucaguguucuucccguaacccaguuagggaucaagaaaacuacugaguugcag

SEQ ID NO: 4144588 - RNA, 80 nt, Human
uugaacagcucugaagcaguaaaugaaauauugacugaguuacuugucauuuaauuugcaaugauuucagugcuuuucaa

SEQ ID NO: 4144589 - RNA, 62 nt, Human
uugaaccuaguuaguucugggucauccugacucaggaauccuggacuauuaacuugguucaa

SEQ ID NO: 4144590 - RNA, 61 nt, Human
uugaacucuggcugggaaguauaagggcagagucuuucuacuuucucaaaucagacuuuaa

SEQ ID NO: 4144591 - RNA, 72 nt, Human
uugaagaaacuucuugcaauuuucaucuuauuucaaagaacaucagguggguuuugaagaaacuucuugcaa

SEQ ID NO: 4144592 - RNA, 84 nt, Human
uugaagaacacugcauugagguuucauacuuccuuaaaugcucauaaaucuucuaggaauuauccuuaaugcaguaagcuacaa

SEQ ID NO: 4144593 - RNA, 65 nt, Human
uugaagaaccaucugugccacuggcauauugacacagcgucauccagauacagugguuucuuuag

SEQ ID NO: 4144594 - RNA, 84 nt, Human
uugaagaagaggguuagauuuuaagaaagaaagugugcuuauuucacucaugucuuugcagaauuuaacuuugcuuuacuuuaa

SEQ ID NO: 4144595 - RNA, 55 nt, Human
uugaagcaaauucugugcaguacuaauaugugagaagcauggaauugugcuuuag

SEQ ID NO: 4144596 - RNA, 59 nt, Human
uugaaggcccuaucuccauauacauuuauauucagagguacuggggcuuggggcuucaa

SEQ ID NO: 4144597 - RNA, 84 nt, Human
uugaagguagggaacucugucuucacucaugaguaccuuccaacacgagcucucaggaguaaagacagaguucccuaccuucaa

SEQ ID NO: 4144598 - RNA, 59 nt, Human
uugaagguuugauccuuauuuauaagcuucuugcuugugaauagaagucagaccuacaa

SEQ ID NO: 4144599 - RNA, 59 nt, Human
uugaaguucuaagccccaguaccucaaaauguaacuguauuuggggauagagucuucaa

SEQ ID NO: 4144600 - RNA, 96 nt, Human
uugaaguugcuaaaugaguuuugugcuuucaaaguuaaguaaaagaaacuuucuuuuacuuugugucaagucaagaaaacuaauagguaauuucag

SEQ ID NO: 4144601 - RNA, 81 nt, Human
uugaauaacuuugcauaaaggagcauuucuccaugauuguuuuagagaaaacuuuggcuucuuuagugcuaggcuauuuga

SEQ ID NO: 4144602 - RNA, 79 nt, Human
uguacuccuucuacauucuggaauuuuauugaucaaaacaaaacuuaggugagguauuaguaaauuccaugggaguaua

SEQ ID NO: 4144603 - RNA, 70 nt, Human
uguacugauaaauguguaacaaccagcucucuggggggagaacgggaauguaugcacauauauagguaca

SEQ ID NO: 4144604 - RNA, 63 nt, Human
uguacugggcauugcuguggaccugauaccacccuccaucacucuguaggcuguccaugugca

SEQ ID NO: 4144605 - RNA, 58 nt, Human
uguacuuacuaucuaccucauccaauuauugcaaggauggaaugcgguaguaugugca

SEQ ID NO: 4144606 - RNA, 122 nt, Human
uguacuuuauuuggugcuuuuggaaagagaucaagcaagauagaguugcaaauauucagccuuuauugaguguugugaguuuucuccuguucucugacaucaagaguacugcacaggguaua

SEQ ID NO: 4144607 - RNA, 75 nt, Human
uguacuuugcaaaugaagcucugaggagguaacuaccuucuucaaaguaauagagacuauauuaaugcagauaua

SEQ ID NO: 4144608 - RNA, 63 nt, Human
uguagaaauguugguauuaacauuuuaauugaugauagaaauguugguauuaacauuuuaaca

SEQ ID NO: 4144609 - RNA, 65 nt, Human
uguagaaauuaggaaaguaacacuuaugugacacucagaggugccauugcuugccaguuuguaua

SEQ ID NO: 4144610 - RNA, 68 nt, Human
uguagaaguaggagucaucucauugauugucuugaguaaaaggaaauggcucaugcaucuuuucuaca

SEQ ID NO: 4144611 - RNA, 125 nt, Human
uguagacguuucuguguguggugugcguacaugucugucauauguaugaucucuguacaugucaauauguguauaugugauguacauguacaugccugugugaugagcauacacgucugucugca

SEQ ID NO: 4144612 - RNA, 130 nt, Human
uguagagaaauagauuugugcuauaccucauguaugaauaaauggggcuguuccucucagccagacagaggugaauagauccucauuuauugauuuaucuggaguguuuuuguuuguuugcuuuugguua

SEQ ID NO: 4144613 - RNA, 78 nt, Human
uguagagcaacuguauuggaaauauagcaaaaugcuugccuuugcugugaauccauuacugucaccuccuguucccca

SEQ ID NO: 4144614 - RNA, 68 nt, Human
uguagaggggugucaauauuaccaaaguuacuugcuuuggggacugagaggugauagugacauuuaca

SEQ ID NO: 4144615 - RNA, 129 nt, Human
uguagauuuauugaacauauuuuauaaauaucaaauaauguuaguauguaaucuuaucagggaugcaaauauaaucaugauauauagagcuagauguuaaagugauauuuguuaaaaauaaguccuaca

SEQ ID NO: 4144616 - RNA, 71 nt, Human
uguagcaccuagaguauuuuaucacugcucaaggaaacauuugacuuguugugcggugcuuuggguuuaca

SEQ ID NO: 4144617 - RNA, 70 nt, Human
uguagcacguuaguguuagagccaagugcuaaaccccaacucugcccgaauucagcauagaugugcugca

SEQ ID NO: 4144618 - RNA, 61 nt, Human
uguagcagcuaaguagcgcaguuaagagucuggacucuggaucugaacgcuugggugcaca

SEQ ID NO: 4144619 - RNA, 79 nt, Human
uguagcaucacaaggagaagucuguugagauugcugccccucacagcuucaacaguuugauuucugucuuuucacuaua

SEQ ID NO: 4144620 - RNA, 90 nt, Human
uguagcaugugguuguauuaaugaacguuacaggagagcuuuauaaucauuuauaaaucuguaacauucaauaaagaaacacauguugca

SEQ ID NO: 4144621 - RNA, 82 nt, Human
uguagccuucagcauggcucuggccucagugugaguuaccaguauugugaguacgcuggagcagggcuagcagugggguaua

SEQ ID NO: 4144622 - RNA, 70 nt, Human
uguagcuacuguuuacuguguaauauaacccugaagauuagguuacaguuaccacuuagcaguuacuaca

SEQ ID NO: 4144623 - RNA, 79 nt, Human
uguagcuccaaaccuguuaucuauaaucaguacacuuuacuggauuuaacagaauaccagguucaacuuggaacugaca

SEQ ID NO: 4144624 - RNA, 80 nt, Human
uguagcuuuuggugguuaguggagggaaaccuuuuaugauuuaaauacuuuuacuccacugauugguuaccaucacugca

SEQ ID NO: 4144625 - RNA, 89 nt, Human
uguagcuuuuguuggugguguuauuuuuuggcuuugucauaucauuugugaaaguuaggauguaguaauugacaagauuaaaagguaca

SEQ ID NO: 4144626 - RNA, 69 nt, Human
uguaggaauggauucuagaaggaagaugaagaaaugagaaagcaugguaauucuagaacuguucucuca

SEQ ID NO: 4144627 - RNA, 57 nt, Human
uguaggaauguuuuuaaguuggcuguuuuuccccagucuacucuuacuguuucuaca

SEQ ID NO: 4144628 - RNA, 76 nt, Human
uguaggcaacuguaacacaaugguaucuguguaaucuaaacauagaacagauaauacauugugcuacaauguaaca

SEQ ID NO: 4144629 - RNA, 84 nt, Human
uguaggcuuucuccaaauauucaucuacuucugcaaugaaacagagguuguugcugggauuagaaaguguuugaaaggccugca

SEQ ID NO: 4144630 - RNA, 78 nt, Human
uguagggcagcugcaucaggcacuauucccacauguuucacauuguauguagcucagugucugagugcaggcugugca

SEQ ID NO: 4144631 - RNA, 66 nt, Human
uguagucccagcuacucaggaggcuaaagugggaggauugcuugagcccaggaguuggaggcugca

SEQ ID NO: 4144632 - RNA, 57 nt, Human
uguagugaggaaagacugguuguauuaacuguucugagccacaguuuucucacugca

SEQ ID NO: 4144633 - RNA, 55 nt, Human
uguaguggcagugguagugucugcuccauaaagguaaacacagccucucuuuaca

SEQ ID NO: 4144634 - RNA, 74 nt, Human
uguaguuaccagccuuugcaucccccaucugcucaagcaaauugaagagaagaggcaagugguuggcuucugca

SEQ ID NO: 4144635 - RNA, 65 nt, Human
uguaguuagugaagcaggugaagugcuuaaaacagaauuugacacauuaaaugcucacaaacaca

SEQ ID NO: 4144636 - RNA, 89 nt, Human
uguaguucauuucugauacagucccaacacaaauggcuguccuauuuagauggcauuggucaagacugauaucaagauagguaacuaua

SEQ ID NO: 4144637 - RNA, 79 nt, Human
uguaguugcaugugacucuauuuaugcauaauaaaguaauggagccuauguaagggugaugguuauaugcaaguuuaca

SEQ ID NO: 4144638 - RNA, 57 nt, Human
uguaguugccagcccaagggcugauuuccugucaguuccugugugguuugcacuaca

SEQ ID NO: 4144639 - RNA, 112 nt, Human
uguauaagcauuccauguuaacagaacuugcaguggcaguuagaaaauauuccagucaaauuucugguuuuggagcugaguuuauugccuguuuguuguuugaucuuauuca

SEQ ID NO: 4144640 - RNA, 71 nt, Human
uguauacuggguugggcuuuugaguugauucgaaguuccguauuuccuucaucagccuauccuguuauaca

SEQ ID NO: 4144641 - RNA, 55 nt, Human
uguauaggaaguguagugcuuggaaucgaguuuuacggcauuuuacuuucugaca

SEQ ID NO: 4144642 - RNA, 79 nt, Human
uguauauagaauacacagggaaaguuugagaagugaaggacugaccccuccaacugccguucugucuauuuuauacuca

SEQ ID NO: 4144643 - RNA, 95 nt, Human
uguauauauacaugcauguaacugcauguguguggcaugauacaugaugaaauaugaaugcaugugcauacaugcacaguguauguguauaugca

SEQ ID NO: 4144644 - RNA, 65 nt, Human
uguauaugucuuuauaaauguauaauguauuugguaaugugcaguagcauguaauaaagacagca

SEQ ID NO: 4144645 - RNA, 64 nt, Human
uguaucuaauggagcauguaugguguugaguuucauguagaucaccauaaauguacaagauaca

SEQ ID NO: 4144646 - RNA, 75 nt, Human
uguaucuccugauuguuuaaugcuguguaaaaagcacccagaagaaaggcacaguacagugcagaggaagauaua

SEQ ID NO: 4144647 - RNA, 127 nt, Human
uguaucuguuaggaggcacaguuguuucuaagaggguguagaaaagcauaacuugcugcacauagugggggcugucaguaucuugugucccucccaguagacagcugggugccccaugugcggugca

SEQ ID NO: 4144648 - RNA, 62 nt, Human
uguaucuuauucaucacugaaucccagcacauguagguguucaggaaaugaauacagacaca

SEQ ID NO: 4144649 - RNA, 70 nt, Human
uguaucuuggaucuugaugcuccaagagugaaacuguuucuuucaacuauggaguucagaucuugagcca

SEQ ID NO: 4144650 - RNA, 55 nt, Human
uguaugcaggaccccaaaacucugacgcuuucauagaguccaggggccuguagca

SEQ ID NO: 4144651 - RNA, 66 nt, Human
uguaugcauuuuugagguuaacucaauggagaguagccucccuuagugaaccuggaagaugccaca

SEQ ID NO: 4144652 - RNA, 62 nt, Human
uguauggcuagacuguugugaucuacauccucauaaaauuuaucacaauaugagcucauaca

SEQ ID NO: 4144653 - RNA, 86 nt, Human
uguauguauaugucuauuugugugugcauguguguguggguuugaguuugugugugcaugugagcacaaguuugcaugugugugca

SEQ ID NO: 4144654 - RNA, 105 nt, Human
uguaugugggaccaaauaggacagaaugugugcaagcaaguguguuaugcugcacguuugauauaaguuuuucgcauaucugagcucuuacguuccccaaaugca

SEQ ID NO: 4144655 - RNA, 82 nt, Human
uguaugugggauguguguauauauguauguauauauaaauauauauauaaacagcauaaaauacgcuuaagaaaaacaugca

SEQ ID NO: 4144656 - RNA, 75 nt, Human
uguauguguaaaacuucaguaggagccaaccucuuuuaacauaagguguugguuacuaaggaggaaaucacagca

SEQ ID NO: 4144657 - RNA, 60 nt, Human
uguauguguauguacauaugcauacauauauacuuguauguguauguacauaugcauaca

SEQ ID NO: 4144658 - RNA, 65 nt, Human
uguauguucuuugaaauauuuuagaaagauaucaugagcuguuugaaguaauuuaaagaaagaca

SEQ ID NO: 4144659 - RNA, 71 nt, Human
uguauuaagugcccauacagcucaauggguauucauugugcucauugagcuguauggacacaaugaguaca

SEQ ID NO: 4144660 - RNA, 57 nt, Human
uguauuagauuguacagacaucuuucaagagggaagcauuucuguuuaucuaucgca

SEQ ID NO: 4144661 - RNA, 57 nt, Human
uguauugaauuguguuauaucugcuuaugugcaaugauaaaagauacaauucaguca

SEQ ID NO: 4144662 - RNA, 63 nt, Human
uguauugguuacuugauuuuauguucugagguuguuagggccaguauuaagguaauuaauaca

SEQ ID NO: 4144663 - RNA, 76 nt, Human
uguauuguauugggaugagcucuaagucuaaugauuggugugcuuaugagaagagagacauuuggauacagaaaca

SEQ ID NO: 4144664 - RNA, 59 nt, Human
uucaggggaggggcuguguugcagagaccacagucacagcaaagacacucucaacugaa

SEQ ID NO: 4144665 - RNA, 77 nt, Human
uucaggggauauuugaggaaacuuacaaggcagaaggggcagucucuuucuugucucuuuuucacucagccccugga

SEQ ID NO: 4144666 - RNA, 92 nt, Human
uucaggucaugagguggcacacacuuccugccccacccaccccuauuguguggucaauaggcagaauugaaaugugucacuucuggacugag

SEQ ID NO: 4144667 - RNA, 57 nt, Human
uucaggucaugauccauuggugaguggugagaucaacuuaguaagucaugaccugaa

SEQ ID NO: 4144668 - RNA, 85 nt, Human
uucaguacaacauuagaguaucuuaugccaaacuccuucuaauucccagggaaacauuaggaaacuacuauuauguuguagagaa

SEQ ID NO: 4144669 - RNA, 72 nt, Human
uucaguccaucaggcguggcauaguucaaauuaccaagucagcaugaaaagucccacucuaaauggacugaa

SEQ ID NO: 4144670 - RNA, 86 nt, Human
uucaguccuugaaccuuuuccuucccuggaugagaagucuguuuaauauacucucaauggggaaagaguuggugagagacacugag

SEQ ID NO: 4144671 - RNA, 89 nt, Human
uucagugacuacaacaauggcuuugugcuaagaaauaaaugaaucaaaauuuaaaauaagacaaaguuaacaguuggauaguuaaugaa

SEQ ID NO: 4144672 - RNA, 86 nt, Human
uucaguucuuggccaugacaggacaggaagucagacauaccucccuguaccucccucccucuuaugguuuagacccaacaacugaa

SEQ ID NO: 4144673 - RNA, 66 nt, Human
uucaguuguuuauucuucagcaacaucugaguauccucgagaaaugaguggaaugaaccgcuagag

SEQ ID NO: 4144674 - RNA, 64 nt, Human
uucaguuugccaguauuuuauugaugauuuucacaucaguguucaucagggguauuggccugaa

SEQ ID NO: 4144675 - RNA, 64 nt, Human
uucaguuugccaguguuuuauugaugauuuucacauugauguucaucagggauauuggccugaa

SEQ ID NO: 4144676 - RNA, 80 nt, Human
uucuccucguggcugcagcggcuguggagaaaccagguguggccagugucuuagugcggcugcugcagccacaaggagaa

SEQ ID NO: 4144677 - RNA, 79 nt, Human
uucuccugcauuuagcgccaugugaggagcagagaggguugcuuuucccugugccuaguuggccuaaagugcaguugaa

SEQ ID NO: 4144678 - RNA, 80 nt, Human
uucuccuggaguuuucaacauauugaaguuacaguauugcaguuuuacuauaguacauacuucaaauguacuuaagggaa

SEQ ID NO: 4144679 - RNA, 62 nt, Human
uucuccugggagggguugcccaaagucuuaucaccggagugggucagcugccuccaggacaa

SEQ ID NO: 4144680 - RNA, 79 nt, Human
uucuccuuauccucaaagguauuuagaugcacauacaugguggcccaugguccagaaacugcugagauaagaaagggaa

SEQ ID NO: 4144681 - RNA, 85 nt, Human
uucuccuuccugcuccuggaagcagcugguacugaggucaucccuggagccacaaagcccucccugcgccagagaggaaggggaa

SEQ ID NO: 4144682 - RNA, 83 nt, Human
uucucgcgggaguuuuggaagccgcggcugggcaucagcaaacagcucuugcacagggcaguggcucccgaggagacgcagaa

SEQ ID NO: 4144683 - RNA, 90 nt, Human
uucucgucccugaccucucuccuagccaagcaagcuucuucaccaagauaggauaagagagauguggcugagagaagacggggaagagaa

SEQ ID NO: 4144684 - RNA, 130 nt, Human
uucucguuucccugcugcuuccuaaaacugugucuuuccuguaacugcuguucaaaaaauguuuuuugaaugaauaaugcagugggaaacauaaagccauuuaauaaagcaaggaagggauauugaugaa

SEQ ID NO: 4144685 - RNA, 65 nt, Human
ugugacuauuucaugucuaaugucuauggaguaucuacaaugcaccaggcaugauguggagcaca

SEQ ID NO: 4144686 - RNA, 55 nt, Human
ugugacuggaguccagcccacuggggagcaauccauuugguugugaccugucgca

SEQ ID NO: 4144687 - RNA, 88 nt, Human
ugugagaaggaugagauuugggaggggccaggggcagaaugauauggucuggcucuguguccccacccaagucucauuuugaauugua

SEQ ID NO: 4144688 - RNA, 72 nt, Human
ugugagaauuguuccucauaggccuucuggaagauaguacuuaacaggcuucaguagggagcaugucucaca

SEQ ID NO: 4144689 - RNA, 56 nt, Human
ugugagacguaggccaucgaggauggugaaccaauuuucauggucuuaguuucaca

SEQ ID NO: 4144690 - RNA, 60 nt, Human
ugugagacguguuagaacaguguuuuauauuuaaacacccccauucauacgcaucucaca

SEQ ID NO: 4144691 - RNA, 60 nt, Human
ugugagcucagaggcgucuuuguccaaagaaacuuugaaggcagauuccuugagcucuca

SEQ ID NO: 4144692 - RNA, 96 nt, Human
ugugaggacacacaaugaagacuggaaggaacagaguuugaaacaaucucacaugcuuuccacucuguucucuuugaaucuuucgcuguuuuuaca

SEQ ID NO: 4144693 - RNA, 85 nt, Human
ugugagggcaugagaugugggaggggccaggggcagaaugauaugguuuggcucuguccccacccaaaucucaucuugaauugua

SEQ ID NO: 4144694 - RNA, 86 nt, Human
ugugagggccagcucaggguccuugggcugcugauagggacaccaaggcuaggcucagggucccuuggugcugguccuaagccaca

SEQ ID NO: 4144695 - RNA, 95 nt, Human
ugugagugcauguauguauguguguaugugccuauaucuauguaacaaguauguauaauacauauacacaucaucuauauaaguaacaacucaua

SEQ ID NO: 4144696 - RNA, 82 nt, Human
ugugaguuuuuaaagagaaugugaaggaguucuuuugaugaacuuuuuucuuacuuuacaaagucuuuuuagagccaucaca

SEQ ID NO: 4144697 - RNA, 84 nt, Human
ugugauaaggauuaaguagcacacugcauaugaagauugcuuagcaaucuguaaaguacuguguaaauacaagggcuuauuaca

SEQ ID NO: 4144698 - RNA, 60 nt, Human
ugugauccugggccugguaccugaagcugaggacucaguuccagugcccacccuagcaca

SEQ ID NO: 4144699 - RNA, 79 nt, Human
ugugaugcuuuucuaguagaaaccaacuggcaugugagaaaucugaccauccugaaaccuucaugcuagagaggccaca

SEQ ID NO: 4144700 - RNA, 78 nt, Human
ugugauggacaguuauugaggugcuuagcugggggcuccacucuagucuuaaucugagcagcccucaaggaaaucaua

SEQ ID NO: 4144701 - RNA, 65 nt, Human
ugugaugggcugauuaauagcagcacaaguggcugcuccuugagauuaauuaaucaccugucaua

SEQ ID NO: 4144702 - RNA, 130 nt, Human
ugugcaagaugagggagacaucaggagucaagauuggcucugaaguuucuaucuuaguaaaccgggcgucugugaugcuucuugagauagaaacaccaauugacuaucugaaagauuuccauaaugugca

SEQ ID NO: 4144703 - RNA, 77 nt, Human
ugugcaauuaaugagcuucugcacucauagaccuaguaguccagugagggagguagauuucaucaaauaauuacaca

SEQ ID NO: 4144704 - RNA, 94 nt, Human
ugugcacagcuuccagaacacagaaugcagagaugcccagaauuaauggucuggcagcaagucuguuucucauguuuuccaaucugaauguaua

SEQ ID NO: 4144705 - RNA, 68 nt, Human
ugugcagacuucuuugugagcauuuucugacccaucagaaaauuauaucuuuuagggaacuuaacaca

SEQ ID NO: 4144706 - RNA, 65 nt, Human
ugugcagcacuagugcagggccugcagcacuguguccuugcuggcccaguacuaaugucugcaua

SEQ ID NO: 4144707 - RNA, 63 nt, Human
ugugcauauccuuuguguaggcaauuucaaucauagaaauuaguuuuaagaaggauuuguuca

SEQ ID NO: 4144708 - RNA, 57 nt, Human
ugugcauguccuauaacucagucauuucacaucuagagacacaagaagacaugcaca

SEQ ID NO: 4144709 - RNA, 69 nt, Human
ugugccgaucaggaguuucuauuguuccaaaauuaaacagaaauuuuggcuugaaacuuacugggcgca

SEQ ID NO: 4144710 - RNA, 67 nt, Human
ugugccucaucuucacagacaacgggccauccugcugagagaugucccuugucugugaugucugcca

SEQ ID NO: 4144711 - RNA, 58 nt, Human
ugugccugauggucacguggccacaugcacccuuggcuagaucaccauccaggccaca

SEQ ID NO: 4144712 - RNA, 99 nt, Human
ugugccuucauuauauucuucaucuggacguuuguaaagcucuucaacaguacgauacgcuucuaaggagcgcuccagaaaaaauauugagagugcaca

SEQ ID NO: 4144713 - RNA, 55 nt, Human
ugugccuucccucugcugauuugauccggaggauggcagcaagaaugaaggcaua

SEQ ID NO: 4144714 - RNA, 84 nt, Human
ugugccuuuuaaguucaagucuuggauauaaccagucagaaccucuguuauaauuaugaguuggggauggggauagaaggcaua

SEQ ID NO: 4144715 - RNA, 79 nt, Human
ugugcgcuaaauuuucacugagaauacuugaucugaaucuagauuucauaaaauuuucaguugaaaaaguugguucaca

SEQ ID NO: 4144716 - RNA, 59 nt, Human
ugugcgugguucccggggccauguucacaagcggacacggaggcgcacacacacgcaca

SEQ ID NO: 4144717 - RNA, 76 nt, Human
ugugcuacaacuuuagcaauguuaguauaugucucguuacacuggacuuaauuagcucuuguucuaguucuagcca

SEQ ID NO: 4144718 - RNA, 79 nt, Human
ugugcuagcugcagguauagucaaguaugcuugcacagaugugcagguacaaagcuacugccugacaacagcgaguaca

SEQ ID NO: 4144719 - RNA, 57 nt, Human
ugugcuauuugacuguuugcuagguuucuaugacaucuaccaacagcaggaagcaua

SEQ ID NO: 4144720 - RNA, 119 nt, Human
ugugcucuaggccagugaccaugugauccaucauggggcccaugugcuccaagccagccuccaugccugcaagcaccaugugcuccauguucaggcccacguguucgauggcagggcca

SEQ ID NO: 4144721 - RNA, 55 nt, Human
ugugcucugaagagugcaugucacaauacuguccugacacaccugccauagcaca

SEQ ID NO: 4144722 - RNA, 76 nt, Human
ugugcucuggugucaggcuguccucggccucauggguggauuggcugagggcccugaagcuuggcauuuaggucca

SEQ ID NO: 4144723 - RNA, 81 nt, Human
ugugcugauagacuggauggaaggaggauaguauuagagcagguucugugcaucuuucuauucucuagucuuuggggcaca

SEQ ID NO: 4144724 - RNA, 85 nt, Human
ugugcugccccuuuuucaacagaaaacaguuugcuugcaaucugccugcaggcugcccucuuguguugaaauagggaaaugcaua

SEQ ID NO: 4144725 - RNA, 66 nt, Human
ugugcugccugucuugauugaaugguacaccugggaucagagcaugucaucagauagguuaguaca

SEQ ID NO: 4144726 - RNA, 76 nt, Human
ugugcuggugcuaauggauggcgaauuagagugaaguggccagaccagaucccuguuugccucuggccccagcuca

SEQ ID NO: 4144727 - RNA, 86 nt, Human
ugugcuguauucauaaauuugcuuagagccaaucuugauuguuucuucauuucaauuaagagagaguugaagcaagaaauagcaga

SEQ ID NO: 4144728 - RNA, 86 nt, Human
ugugcuucuaugugcguguauuggucuguguuaauguauuuaaauacaaguuuauuugauuagaacacuaaacguuuaggaagcca

SEQ ID NO: 4144729 - RNA, 86 nt, Human
ugugcuucugcgccuagccucagguuuacuauguauaaaugaagucuaaauaaccaccuggugggcuagugcaaguauuaagcaca

SEQ ID NO: 4144730 - RNA, 63 nt, Human
ugugcuucuugcagcuccuguaccccuuacccuggggcagccaguaugaaugcaugaggcaca

SEQ ID NO: 4144731 - RNA, 119 nt, Human
ugugcuugguugcuucacucuugacagagguaggacuccucagagagcagcuuggggugucucugugccuggacuguguccuguggucagagcccugcuuccaggaaagggccaagcca

SEQ ID NO: 4144732 - RNA, 63 nt, Human
uguggaaaaaccacaaguuugggggugagagagaccuuuguuugaaaucugguuuuugccaca

SEQ ID NO: 4144733 - RNA, 89 nt, Human
uguggaaacaagggaaguuucagaguuagugcuggcugagcucucacugcuuccagucucuacucugagauaauaacuugacugccuca

SEQ ID NO: 4144734 - RNA, 63 nt, Human
uguggaagacacugaauaugcaacuacugaccuugugccugggcaucuugaaggucuuccaca

SEQ ID NO: 4144735 - RNA, 68 nt, Human
uguggaauuucuuucagguauguagugggacauagcuguccacaguauagcuaaaggaaauacccaca

SEQ ID NO: 4144736 - RNA, 61 nt, Human
uguggacaccaagccagcuuaccaaaaccagaggcagaaagcugaggguucgguguccaca

SEQ ID NO: 4144737 - RNA, 59 nt, Human
uguggaccugauggaaauuaauaguguugagcauuauucuagaaguccaccagucuaua

SEQ ID NO: 4144738 - RNA, 127 nt, Human
uguggagaaacuggaacccucauacacugcugguggaauuguaaaauaguguggccgcuuuggaaaacagucuggccauucaucaacugauagccauagaguuaacauaugacacagaaauuccaca

SEQ ID NO: 4144739 - RNA, 130 nt, Human
uguggagauucagcauuaccuaggaauguauaagaagaacucugggcuucaagucagauuugcuaagucacaaacucuggggguggagcccagcaaacugaaccuuaacaagccuccgggaaauuccaua

SEQ ID NO: 4144740 - RNA, 64 nt, Human
uguggagauugagaugguucacauguguuucaggaugucauuugaaccacucagaacucauuca

SEQ ID NO: 4144741 - RNA, 59 nt, Human
uguggagcagcgucacagccuuccaaaggaagauggaugguggcuggcuugcucacaca

SEQ ID NO: 4144742 - RNA, 81 nt, Human
uguggagcccuuuaagugacuccuguauguaugggcagaauaucgauccuugcucugggaccgucauuaaaauuuuucaca

SEQ ID NO: 4144743 - RNA, 75 nt, Human
uguggagcuccagcaucuggguuaaaauuccggcuguauccuuuacuggcuguguaaccucaggcaaguuccuca

SEQ ID NO: 4144744 - RNA, 90 nt, Human
uguggaggcagccgagucagauugcagacagggcuugaccuucaccaaugggguagccuugggcaauuuggacacugggcuguuucuuca

SEQ ID NO: 4144745 - RNA, 57 nt, Human
uguggaggcauuugccucuucuggucuccuuacacaggcuaggcaugugcuaccaca

SEQ ID NO: 4144746 - RNA, 124 nt, Human
uguggagggaacaagaaggcucuucuuuggagagguuuaaggaggagaugaaaauacauaaguccaagagauccugaagcucucuuaaggaaagagguuaaaaaaagaagguucuuaauacaca

SEQ ID NO: 4144747 - RNA, 62 nt, Human
uguggaguggucugaaggcucccauggccuuuccuugcuggggucuucaggaugacuugaua

SEQ ID NO: 4144748 - RNA, 76 nt, Human
uguggcuuucaagaagucauuuagccucucagacuauuuuucaucugugaaaugaagauaauucuugucugcuuca

SEQ ID NO: 4144749 - RNA, 90 nt, Human
ugugggaaaauaaguagaaaucaggauuugggaggagguuucaaaggagacuuuaguccuuccuuccugaaauuuuaguguuuuuuuuca

SEQ ID NO: 4144750 - RNA, 63 nt, Human
ugugggacaaggaugaagauauuaaaaacgcugaccucuaguuuacaauguccuuggaccaca

SEQ ID NO: 4144751 - RNA, 56 nt, Human
ugugggagucagacagccugagauuguagugauuguggaucugucuguuuccucca

SEQ ID NO: 4144752 - RNA, 55 nt, Human
ugugggaguuacuuguacuagccuuuuaagagguucuauacaaagauuucucaca

SEQ ID NO: 4144753 - RNA, 57 nt, Human
ugugggauaaucaggaaggugccaacuucauaauuggcaccuggcugacugucucca

SEQ ID NO: 4144754 - RNA, 74 nt, Human
uguggggaacagaggaggguguugcugauaucugaggucaugggagacccaagcuucgccuuccuuucucugca

SEQ ID NO: 4144755 - RNA, 71 nt, Human
uguggggacggggcaggaauggcaugugccaccugaggaauggcucagugacauuccucccacaucccaca

SEQ ID NO: 4144756 - RNA, 64 nt, Human
uguggggaggaggcagagucuagaggggacaaacuaaucacagaaaucuguuuuuucuauugca

SEQ ID NO: 4144757 - RNA, 71 nt, Human
uguggggaguuggaaguugacagggccaagucagaaaacuacgaucccuuguuaacuuuccugccccuaca

SEQ ID NO: 4144758 - RNA, 114 nt, Human
ugugggguuuuauagccucagaacacaauggcgugugccacagauugcucuuuccauuuguauuuuguguguaguacacagccaauguccugcuugcuguaaccuuuccucuca

SEQ ID NO: 4144759 - RNA, 79 nt, Human
uguggguuccuuggagucaugauggagguggacuauauagucuugucucuggccucuaaugauucacaucauucccaca

SEQ ID NO: 4144760 - RNA, 78 nt, Human
ugugguacggugggcuuccuggagccugugcucucuaauugucuuaguggcuaagagcaucaggaguuugcagccaca

SEQ ID NO: 4144761 - RNA, 78 nt, Human
ugugguaucauggcaagaauauuggaccagaagucaggaaagacuguguuacgaaguuguugugaaugugauauuaua

SEQ ID NO: 4144762 - RNA, 65 nt, Human
uguggucaguagaauguuuugcuuucuuauagucacaacagcauagaacagucuucugagccaca

SEQ ID NO: 4144763 - RNA, 56 nt, Human
uguggucauucucugucuucacacccuccugcagaagacaccagagacuggccuca

SEQ ID NO: 4144764 - RNA, 74 nt, Human
uguggucccagccugucugucuccaaagcugagcucuuacucaucuuccaaggcuggagaggagaggggcugua

SEQ ID NO: 4144765 - RNA, 75 nt, Human
uguggugacucuauccuugugugcacaaacaggccacagcaguuuagauccuaagcacagggacagaucaucaca

SEQ ID NO: 4144766 - RNA, 64 nt, Human
uguggugauggaugcacaauucuguauauauacuaaaacccacugaaauguacacauuaccaca

SEQ ID NO: 4144767 - RNA, 77 nt, Human
uguggugggcccuggggccgggggugggaugcaggcaucccggcugauuucuacccugcggucuuggggcaccuaca

SEQ ID NO: 4144768 - RNA, 69 nt, Human
uguggugggcuucauggaguucuacaccaaggagguacuugggggacgaccagggagcccccuaccgca

SEQ ID NO: 4144769 - RNA, 89 nt, Human
uguggugggguguuucuggcaucuaguggguagaaguccaagaaggauucuucuaacauccuacaaugcaaacaacagcccccaccaca

SEQ ID NO: 4144770 - RNA, 96 nt, Human
ugugguguggggagcgguccugugcauugcaggguguucagcagcaucccuggugucuauccagucagugccgguagcaccccuccagucaucaca

SEQ ID NO: 4144771 - RNA, 60 nt, Human
ugugguguuggcauagcauguaucauagcauauagcuaugcuagcugugccaacaccaua

SEQ ID NO: 4144772 - RNA, 86 nt, Human
ugugguuccaguguuacuaccgugggucuucacuagguauuacuaaaauggagccuggaggggccagggugguaauggaugccaca

SEQ ID NO: 4144773 - RNA, 123 nt, Human
ugugguugccccgaaguggagcaggcaagguaacacuugaagccauuuuugcagagaauugcacaaacagcagcgggugucauagacucagugguuccacuucggaucgagaaaacacccaca

SEQ ID NO: 4144774 - RNA, 71 nt, Human
ugugguuguaggauugagguccugcugggauugcuguuggugccugcagaccacacucaguccuggcuaca

SEQ ID NO: 4144775 - RNA, 62 nt, Human
ugugguuuccuucauggggugauaacuauaccuacauuacacauggauuaaaugagaccaca

SEQ ID NO: 4144776 - RNA, 70 nt, Human
uguguaaaccagagcgcucaagccuucccuccagggggaguugggaaggcagugucugguugaaagcaca

SEQ ID NO: 4144777 - RNA, 72 nt, Human
uguguaacucauuauguuuacucauuuggcuuaacuucuaagaagcucagaguuaaauauagugcucaaaca

SEQ ID NO: 4144778 - RNA, 65 nt, Human
uguguaacuguauauuaagguggccccugauauuccagggucgcuuaauauauguuuaaaacaca

SEQ ID NO: 4144779 - RNA, 57 nt, Human
uguguacauugccuuuuaaaggugggucaaaggcaccauccuuggcacguuuauaca

SEQ ID NO: 4144780 - RNA, 74 nt, Human
uguguaccuucucucucuucuuuguaggggcccuuuuaggcuugggcucuggcuuuggaggagcagguuuagca

SEQ ID NO: 4144781 - RNA, 60 nt, Human
uguguaggggcagucuaggauaccuccauuucuuggcacauccuagcuucucucuguaca

SEQ ID NO: 4144782 - RNA, 70 nt, Human
uguguaucuccuauugguucuguuucuuuggagaacccagacuaauugaacaaguaauagaagaguacca

SEQ ID NO: 4144783 - RNA, 81 nt, Human
uguguaugaaaguguuuuguaaacagaaaaguauauacaaguguaggacauuuauuuuuguuucaaaacauguaucacaca

SEQ ID NO: 4144784 - RNA, 79 nt, Human
uguguauuauuugcucaguguuuuccagggucuacugaaggaauuuaguggccgcaaauauucagacaagcaauacaua

SEQ ID NO: 4144785 - RNA, 106 nt, Human
uguguauucuauggcuaauggacucagcauccaagugccuuuuagagcccugaugcucuaacaaggcaauuugugauccugcgauuauccucagccaagucauaca

SEQ ID NO: 4144786 - RNA, 71 nt, Human
ugugucaaugauagacaagaucuaagguaccuuuggggagccauuaccacuuuuccaucagauuuggcaca

SEQ ID NO: 4144787 - RNA, 58 nt, Human
ugugucagugucuccuccccaucacgagcaucgggggugguggugagucacgggcuca

SEQ ID NO: 4144788 - RNA, 79 nt, Human
ugugucccccgcuuuccugggaagacugugaggacaggagcuugucccuguucauauccccagcacagugccuggcaca

SEQ ID NO: 4144789 - RNA, 60 nt, Human
uguguccuaggcacuaaaugugagucagcacugcugaagcaaaacgugcucuaggaggca

SEQ ID NO: 4144790 - RNA, 61 nt, Human
uguguccugggguggggaugggugacaaacgguagcaucaggccagcaaucccugggcaca

SEQ ID NO: 4144791 - RNA, 65 nt, Human
ugugucugaacaugcuuuguaaaugggaauaucaucuguuaauucuagagcacuguacagauaua

SEQ ID NO: 4144792 - RNA, 103 nt, Human
ugugugaauguucauugcaguauuauucauaauaaccaaaaaguggaaacgacccaaauguccaucagcuggugaguggauagacaaaaaugauaugcauaca

SEQ ID NO: 4144793 - RNA, 61 nt, Human
ugugugaggauguauuuuaucagagucucaucaugaccugggugaaauaguccucaagaca

SEQ ID NO: 4144794 - RNA, 92 nt, Human
ugugugaggcaugucaauccucaacuauucuguuaauacucucacacuuuggcugaauuacuuauuaguggggaugaccugagcuuugcaca

SEQ ID NO: 4144795 - RNA, 81 nt, Human
ugugugauaaugcaaggcuuugugaauuuuaaaugauucugcagaugaauuugagauacaguaaagccuucauuagauaua

SEQ ID NO: 4144796 - RNA, 65 nt, Human
ugugugaucuuagacaacucacuguaugucccagagacacauauugacuugccuaagaucacaca

SEQ ID NO: 4144797 - RNA, 81 nt, Human
ugugugaugcguagguucucuggccuaacaauccaugguccuuuucacuuugguuaaaggacagagcccuaguuucauaca

SEQ ID NO: 4144798 - RNA, 80 nt, Human
ugugugcauaaaggauuugaagagacagcagaaagaccaacuaggaauucauugcaguucuucagguuacaauggacaca

SEQ ID NO: 4144799 - RNA, 88 nt, Human
ugugugcaugcccuaugccacugacauggacaauuuuagcuaaaagcuaaaagccucccagguuaugaguaaacagggugcuuacaca

SEQ ID NO: 4144800 - RNA, 102 nt, Human
ugugugcccacaagcuugguggccaggagacauuugucaaaggaaugccugauugcaugaaugaacagaugccuucucccaugaauugccuuggugccuaca

SEQ ID NO: 4144801 - RNA, 63 nt, Human
ugugugcccugcauuaggugacuuccaguucacaaacucagucucugcaugaugcagcacaca

SEQ ID NO: 4144802 - RNA, 130 nt, Human
ugugugccugccaaggccuggcaggugaagggaggcgggggccacaucagggcugcuugggggucucuggggagagggucccaugccugagcccccgcccgcccugccucccagggucuggcgugcguca

SEQ ID NO: 4144803 - RNA, 129 nt, Human
ugugugcuauuuccagauugucuccaaguaguuggcugcuggguaugauuaugaaacugaaugaugggccauggaguguuucaugccauuuccagauugcccccaaguauuuguggacauguucacaca

SEQ ID NO: 4144804 - RNA, 56 nt, Human
ugugugcucgauggcccugcagcccuccucaguggggcacgcagguggggcgcgca

SEQ ID NO: 4144805 - RNA, 61 nt, Human
ugugugcugacuuggaguggacggacccaucaaagucaugucugcccuuggcucagccaua

SEQ ID NO: 4144806 - RNA, 57 nt, Human
ugugugcuuaagggcugaaccugacggaagagaauggguucauggccuggccacaca

SEQ ID NO: 4144807 - RNA, 100 nt, Human
uguguggaaagagcacucugcuccugauguuggggaugucaugccacccacguacaucacuguccucagcauuccagcacucuugccuauucuccgugca

SEQ ID NO: 4144808 - RNA, 94 nt, Human
uguguggaugcaguguuuguccagcugaaggcagccucacucggcugacuaccugaugagugauuuuccccaagcugacagcugcuccaacaca

SEQ ID NO: 4144809 - RNA, 60 nt, Human
ugugugggugguugaugcuagcugucagcuggaaccucagcuggccagaacgccuacaca

SEQ ID NO: 4144810 - RNA, 75 nt, Human
uguguguaaagagaagagcacaguauugauacuaguuaggcaaacaguaaauggugguuuuuaucauuacucaua

SEQ ID NO: 4144811 - RNA, 86 nt, Human
ugugugucuugagggcagugaaucugagagccugggaugcauguuuaucuggcuuaucucauuagauucuuugaucaaaacucaca

SEQ ID NO: 4144812 - RNA, 64 nt, Human
uuggccaggucuggguagcagaggauggguucccaguccagguggaggccuuagacuuggaagg

SEQ ID NO: 4144813 - RNA, 97 nt, Human
uuggccaggugcgguggcucacaccuguaaucccagcacuucaggaggcugaggcagguggauuacaaggucaagaguucgaaaccagccuggccaa

SEQ ID NO: 4144814 - RNA, 97 nt, Human
uuggccagguuggucucgaacuccugaccuugugauccacccgccuuggcuucccaaagugcugggauuacaagugugagacaccgcaccuggccaa

SEQ ID NO: 4144815 - RNA, 69 nt, Human
uuggccaguggacuaaguucugacauguugcaugacaccuucccagaacuugguuucaaacacgguuga

SEQ ID NO: 4144816 - RNA, 56 nt, Human
uuggcccacaguaccaugcugucaacugcauaugacauggguuauugugagguuaa

SEQ ID NO: 4144817 - RNA, 73 nt, Human
uuggccugacuuauucuuccgcaaagcuugcaaguaaugucaaguaacagcaggagggaaugaaguuagacaa

SEQ ID NO: 4144818 - RNA, 78 nt, Human
uuggccuguuguggcuucuuccucucugaugugggacaaguucccucaggagcuggauaggaccacaauacagguuga

SEQ ID NO: 4144819 - RNA, 71 nt, Human
uuggccuugauuaugccaguagauaauggguaugugacaguuuuagcuucucuggccuuugaucagguuga

SEQ ID NO: 4144820 - RNA, 56 nt, Human
uuggcgcccaggacgccgccgcuguacuccccggcggccgcguccagggccgccag

SEQ ID NO: 4144821 - RNA, 113 nt, Human
uuggcuaagaauugguguauaucacaucucuggcuuggauuaugguuggaaguggcccagugccugucaaaccucaucucucacugaauauaacaccaucuaauacaugccaa

SEQ ID NO: 4144822 - RNA, 103 nt, Human
uugagacggugccuugcucuguuucccaggcuggaaugcaguggugugaucuuggcucacugcagccuccaucucugggguucaagcgauucuuccgccucag

SEQ ID NO: 4144823 - RNA, 94 nt, Human
uugagacuggaugcuuccuuaccagaagaugaagaguccucacagccugugccggauuucucacuuucugugggaaugugucucccuguuucag

SEQ ID NO: 4144824 - RNA, 93 nt, Human
uugagagacaugaagccagacaguuaagggaaucugacgauacaucugggccuauccaaucauuguaaaugguuuuguuuggcuuccuuuuaa

SEQ ID NO: 4144825 - RNA, 58 nt, Human
uugagagaggaaacauagucucagcagccauuaguggagacugaguguagcugcucag

SEQ ID NO: 4144826 - RNA, 55 nt, Human
uugagagccuaccauaugccaggcacugugugcuggcagugguaccggcucucag

SEQ ID NO: 4144827 - RNA, 93 nt, Human
uugagagcuagaaggaagcauuucuagaaggagagaaacaagguguagguugaccaaacauuugccuggguguguuaucuuccuuguucucaa

SEQ ID NO: 4144828 - RNA, 82 nt, Human
uugagaggauauaagaaaguaauuuugucugaguuuuagguuuuggccaugauugaaacaaguugcuuucuauuccuuacag

SEQ ID NO: 4144829 - RNA, 69 nt, Human
uugagauaauucagcacagaggaaccaguacaggucucugauagcuguaccaagugcugauuaacucaa

SEQ ID NO: 4144830 - RNA, 64 nt, Human
uugagauccccaggaaggacaaccugccucauauaacaugcugcuguuucagccugggucucaa

SEQ ID NO: 4144831 - RNA, 65 nt, Human
uuaaagucaauuucuuuuaaugucuggcuuucaguagauuguagcuagcuuugggaggauuuuaa

SEQ ID NO: 4144832 - RNA, 90 nt, Human
uuaaagugcaguuaaagucuuuauacagaaauauaugcccuauaaacacagaguauaucuuuuuaaggacugaugaaauagucacuuuaa

SEQ ID NO: 4144833 - RNA, 62 nt, Human
uuaaaguguuaacugaagcuuaggugggggcuaccuucuguauguaacaguggacauuuuag

SEQ ID NO: 4144834 - RNA, 74 nt, Human
uuaaaucaguaggcuacuccuuaaaaugacuuccuaaaauaucuuugucaaacauuuggaagccuuugguuuaa

SEQ ID NO: 4144835 - RNA, 63 nt, Human
uuaaaucauuucccuuuagaucacaaagguaccuuuggggcuuauugggacaaugcaauuuaa

SEQ ID NO: 4144836 - RNA, 129 nt, Human
uuaaaugagagaccuuagggaggcagcuuuguugccauguggcuuaucacauuguccauggaggaaguaauguuccuccuuuaagugguguagccugagagaaagauggccuccaagaucuuuaauuaa

SEQ ID NO: 4144837 - RNA, 127 nt, Human
uuaaaugaguuaaagcauauaaaaccuucaacauaguaccuggcacauaauaguggcucacacuuguugagauuugcuaugugccagguaguguuuuagcauucuguacauguauuuacuuauguaa

SEQ ID NO: 4144838 - RNA, 65 nt, Human
uuaaaugcuaucgcauaaaaccuggaacauguauuccauagguugcuuugaugauaagcagauaa

SEQ ID NO: 4144839 - RNA, 76 nt, Human
uuaaauuacugcagauuguguggagcaaagaaauauuauugaagcauuucaaaauuccaggcaagccugaauuuaa

SEQ ID NO: 4144840 - RNA, 83 nt, Human
uuaaauuacuuuuaacuuuacagaauaagaauacuggcgacccuaucaggucccaauuuuuccuuuuuuggagugugauuuga

SEQ ID NO: 4144841 - RNA, 84 nt, Human
uuaaauuccugugccugacuaggugaaucaauauggaaaagauauuauaaaaauauuguuuccuccuuugucagguagguuuaa

SEQ ID NO: 4144842 - RNA, 94 nt, Human
uuaaauugauuuuauuuugguaaauguuugccuggacucagcauuuuauaugagaaaaacagggacaucuaccaaaguacaaaauguuauuuaa

SEQ ID NO: 4144843 - RNA, 130 nt, Human
uuaaauuuacugaggcuugcuuuauggaguaacauauggucuacucucgugaacauaccauauguaauugaaaauguuuauuuugcagaguaggguauacuauaaauaucaauuaggucacgguaguuga

SEQ ID NO: 4144844 - RNA, 68 nt, Human
uuaaccugcaacagaucugucuugccacaacaaacugggucaagaccaagaaauguuagucugguuag

SEQ ID NO: 4144845 - RNA, 63 nt, Human
uuaaccuguuaugcccccagagcccucaguggagcgcccguacuuugccggcaugacguuuga

SEQ ID NO: 4144846 - RNA, 57 nt, Human
uuaaccuuuuguguguuugaauuggggugcuaauaauaucaaaacacaaaugguuga

SEQ ID NO: 4144847 - RNA, 99 nt, Human
uuaacuaauuuuuguugaguauuuucuuaugagcaagacucuauauuaguuacugaaauaguaaauuaucguggagagaaugcugggaaacuugguuga

SEQ ID NO: 4144848 - RNA, 109 nt, Human
uuaacugcugggaggcucuauuucaucuuauguaaacuacagauaauaccuacucaccucaaggguguaucaaggguuuauguaagcuaaauuuguagaaagcaguuag

SEQ ID NO: 4144849 - RNA, 61 nt, Human
uuaacuggggaagcauuucaugguuauguagccuuuggcuuggaaagucucacccaguuga

SEQ ID NO: 4144850 - RNA, 117 nt, Human
uuaacuuuaaagaucaaugaguccguaaaacuagaccgugagucuaaaagaaccuuaauguccucagucuuuuaguaccuuuucugucuggauuucauggguuggucugauaguuga

SEQ ID NO: 4144851 - RNA, 69 nt, Human
uuaacuuugagaagcaauuuccaacugugcuguguucagcgguugagcguguuuacuccccuaaguuag

SEQ ID NO: 4144852 - RNA, 84 nt, Human
uuaagaaaguguaaaguuuuaugggaagaugugcaauuaauucaaccacuugcaguccuaaauauauagcuggauacuucuuaa

SEQ ID NO: 4144853 - RNA, 70 nt, Human
uuaagaagaaguaaaacuuuauguuuguuuuagauuggagaaaugaugcaaauucuuugcuucuucuuga

SEQ ID NO: 4144854 - RNA, 129 nt, Human
uuaagaauugauuuaguguaaagauaauauagcaagauuuuguuuagguuauggaugcucucuaaaaaugcauaauacuuguuugccuaaaauuuugauuauguuuuaucuuauuuugucacaguuaaa

SEQ ID NO: 4144855 - RNA, 69 nt, Human
uuaagacauuuuuggagauuaugaaacaaaauuuucugauggucaauauaaucuucgaaaauguauuag

SEQ ID NO: 4144856 - RNA, 75 nt, Human
uuaagaucacaagguccugguggauagaaaauauauauuauuucuguacucaucacagugacuuggcagucuuga

SEQ ID NO: 4144857 - RNA, 108 nt, Human
uuaagaugugucuucaauuuguauaaaaugguguuuucauguaaauaaauacauucuuggaggagcaccauugugcuggugugaaugauuccauaguaacaaucuuga

SEQ ID NO: 4144858 - RNA, 98 nt, Human
uuaagauuaccauaguauaucuucagaaauuauagguaacuaaagaaacugcaguaugaucaauggagauguaacuugucuaucugaaguaauuuuga

SEQ ID NO: 4144859 - RNA, 106 nt, Human
uuaagcagugcauugugaauaacuuucuauguuaauacacauauuuccugaauaucauuuuuaauaguuaacauaggaguuuguuguaugguuguacauuguuuaa

SEQ ID NO: 4144860 - RNA, 85 nt, Human
uuaagcuauuuaauucuacuucagaaauacuaucuccuuguuuauucaguggcugugcgucuggaguggaguuugaacugcuuaa

SEQ ID NO: 4144861 - RNA, 67 nt, Human
uuaagcugacuuuaauagcuucugugcuuuguaaagaaagcaagaaaguguggagagccuagcuuaa

SEQ ID NO: 4144862 - RNA, 58 nt, Human
uuaaggagcacaguguauuaaucuguucuuuuucagaugugcacuuuuuguaucuuaa

SEQ ID NO: 4144863 - RNA, 61 nt, Human
uuaaggggacagauuuugucagguucagaccuuggcuccaacacuaaauguguuuccuuga

SEQ ID NO: 4144864 - RNA, 79 nt, Human
uuaaguacaaguuucaguaugauuccuccaguagccgaccaaaggcggauuuuaaacuaagaaacacaccuguauuuag

SEQ ID NO: 4144865 - RNA, 109 nt, Human
uuaaguacuggcugaauaggguagucugugugccguuugugagaauguuuccuaacaggaggaagucugcaacgcacugcaaaaccuaaccugaucauacaguauuuga

SEQ ID NO: 4144866 - RNA, 67 nt, Human
uuaaguucugggguaaugagaauugccuggcuaauggcuagugaaugcuuauaacguuagaauguga

SEQ ID NO: 4144867 - RNA, 82 nt, Human
uuaaguugggcucucaucagggaugccucggugcuuuggcucugggagugaaaagccaugcauaccuaagagcucaggguaa

SEQ ID NO: 4144868 - RNA, 62 nt, Human
uuaaguuugagugccucugggauuuccagguagagauucccagugggugacuggaggcuugg

SEQ ID NO: 4144869 - RNA, 90 nt, Human
uuaauacaauuagcuuuagggaggacaguuacaacaggaagcaaauuccuugcagcauccgguccucucuuagccauguuaguugauuaa

SEQ ID NO: 4144870 - RNA, 78 nt, Human
uuaauacaccuguauaccuaauugcuguugugaaacacauuucugcacaaauuuuagguuauagguuuucuguguuga

SEQ ID NO: 4144871 - RNA, 64 nt, Human
uuaauacagucuccagaaguaauugagccauuaacugguuuauacacugauuagauuguguuaa

SEQ ID NO: 4144872 - RNA, 125 nt, Human
uuaauacauuagaacauuauucugguggauuaguuuggccagcaugaaucuauccuuugaauaauaguacacucugagccaaaacuaauucgcuuucuaaaccagaaaaauuagaaugugcuuaa

SEQ ID NO: 4144873 - RNA, 71 nt, Human
uuaauacuggauugauucacaacacuagcugaccccaaauauaagaugagcuaguguuaacccaguguugg

SEQ ID NO: 4144874 - RNA, 88 nt, Human
uuaauauaggagugcagauccugauugcaguucuuuuagauaaauagagaagugggauugcaggaucuuaggguaguucuguuuuuaa

SEQ ID NO: 4144875 - RNA, 129 nt, Human
uuaauaugagugagaugcuuguuucuauaaugaauuugcaaauauguguuucuauuucaaaaaguaguguauucaugugugcaggugucagcuggauaaauauauauaacagcuuuuuaaguauuauag

SEQ ID NO: 4144876 - RNA, 87 nt, Human
uuaaucaauauuucauugacacugaucuucauaauguagaccucagaauaauuugugaggcauuaaagggaggucaaauuugauuaa

SEQ ID NO: 4144877 - RNA, 88 nt, Human
uuaaucaugcugguugcaaacuuuuguugaaagaagauggugcauuuuggcagccaucucugaaaucaaagcuguccuagauauuuaa

SEQ ID NO: 4144878 - RNA, 64 nt, Human
uuaaucucccccucucucaagcccgggagaaacagacauucccauggcuuaggagggaguguga

SEQ ID NO: 4144879 - RNA, 86 nt, Human
uuaaucucuagcagcuucuauuuucuugguuuauaaaacaucugagcuauuuaaaaggaaguggagugagcuggcauagcuauuga

SEQ ID NO: 4144880 - RNA, 79 nt, Human
uuaaucuuugaugcaaguuguuguguuauuacagaauccaucauaaugaaguaaugaccccacugugcucagagguuaa

SEQ ID NO: 4144881 - RNA, 69 nt, Human
uuaaugcugugaaaaauccaacuuguagcagugaacuguuuauagaaggagcauucacuuagcaguuaa

SEQ ID NO: 4144882 - RNA, 78 nt, Human
uuaaugggcuugcaucacaguaucucuguaaugcucaauccugguauugugcagaacugcuggugugagccgcauuga

SEQ ID NO: 4144883 - RNA, 67 nt, Human
uuaauuaaagggacuuuugcuggcucuuugcagauugcugcuggcgccccauauaguucuuaauuaa

SEQ ID NO: 4144884 - RNA, 71 nt, Human
uuaauucguauuuauauucucaauaccugccagauacuaggcuagguauugggacuauaaagacgcauuag

SEQ ID NO: 4144885 - RNA, 63 nt, Human
uuaauuguaaaguuugccuguuuaaugcucagggcagugaccagaguaucccuuuagaauuaa

SEQ ID NO: 4144886 - RNA, 68 nt, Human
uuaauuucagacugcuuuuauaaaggacauaacuaguagcaugguaaaagugcaguccaugaaauuaa

SEQ ID NO: 4144887 - RNA, 75 nt, Human
uuacaaaaacauugugcuaucuccucggagaaucugucauacagacaguucccacuuggugcacuaugauuguga

SEQ ID NO: 4144888 - RNA, 82 nt, Human
uuacaaaguuuaagguggcacugcuaaagaucauuuauuuuagacauuccuaucuuaauaagugcccuuuacaacuucuuga

SEQ ID NO: 4144889 - RNA, 73 nt, Human
uuacaacuugcagaggauguugcuuuagagacaaaauaaguauguggggaguaaaucccugccauuguuguaa

SEQ ID NO: 4144890 - RNA, 89 nt, Human
uuacaagggaauucaaaucugaauaaauuucuuuuagucuuauuauaaagaugacucaaagacagcuucagguggaauuauucuuguga

SEQ ID NO: 4144891 - RNA, 56 nt, Human
uuacaagggucaguguguuugugcuguacuuggcauuuucacaaauuacucuguag

SEQ ID NO: 4144892 - RNA, 69 nt, Human
uuguuuuaugccuccucaaaucugccacaaggaagccacaugugagaccugaggaggcaaucuaaacag

SEQ ID NO: 4144893 - RNA, 92 nt, Human
uuguuuucauugacaugauagcuuuuugucauagagucuuagugaaggaggcucucaaauaagcuguuaaauuauguuauaugaucagacaa

SEQ ID NO: 4144894 - RNA, 74 nt, Human
uuguuuucggccacaaugaguccuuuagugccauuguggacucacaaugcacauggacaucaggcugugaauga

SEQ ID NO: 4144895 - RNA, 55 nt, Human
uuguuuugauagcugguaacuuugaacuaaagggacauuacuguuaucaaaacag

SEQ ID NO: 4144896 - RNA, 75 nt, Human
uuguuuuguuuugagauggagucuugcucugucgcccaggcuggagugcaguggcgccaucucagcucacagcaa

SEQ ID NO: 4144897 - RNA, 130 nt, Human
uuguuuuuaccaccuuagaacugcaauuguaucucauagaaugauuuguuuguuuagugaucuagauuagaaacuagccacacagaauacaccuggaggcauaacuaaguaaaaacaauaaauaaaacaa

SEQ ID NO: 4144898 - RNA, 58 nt, Human
uuguuuuuggauguuguaugugcauauguuuacguauugcaagcaauuccaaaaggaa

SEQ ID NO: 4144899 - RNA, 76 nt, Human
uuguuuuugugccaagacuauauugugcuuuguccuuugugaaacauggagcccaauauaaucuuagcaauagcaa

SEQ ID NO: 4144900 - RNA, 91 nt, Human
uuuaaaaacaaguccuggugagguagugggagggaaaggaccuagaccuucaccuccuucuaacugcuagaggcuaccaauauuuuuuaaa

SEQ ID NO: 4144901 - RNA, 69 nt, Human
uuuaaaacaggcuugcaacauguuuucuuaaguaauagcuagaacaaaucgauggaagccuggcuuaga

SEQ ID NO: 4144902 - RNA, 77 nt, Human
uuuaaauguggcaauggaaaagugaaaauagcuuuuaagauaaagcaauugucucugaauuuucagcugcaucuaaa

SEQ ID NO: 4144903 - RNA, 76 nt, Human
uuuaacauuggcaaacucacauuauuagagaaugcaacacuaguuuaacugaaugaaugguuugucuuauguuaga

SEQ ID NO: 4144904 - RNA, 85 nt, Human
uuuaacuggaauucccuacaagauuuuuaaaacuguauuuuuaaacuauauaauccaaaagguuuugugggggaaguuaguaaaa

SEQ ID NO: 4144905 - RNA, 77 nt, Human
uuuaacuggucuccugcugcuucccuuguccccacuugcucuguucucaacauggcagccagggugauccauuuaaa

SEQ ID NO: 4144906 - RNA, 128 nt, Human
uuuaagaaaccacuuuucuugcuaugcccugauaaucuugccucuugaauaacucauuuccaucaagagcaggacagaaucagaacagcauggacaaggauaaucucuaaaaugugguuucaaaugga

SEQ ID NO: 4144907 - RNA, 61 nt, Human
uuuaagaacauaaauucauacgggcaggaaaugagaaacugcucuuugaaaugcucuuggg

SEQ ID NO: 4144908 - RNA, 123 nt, Human
uuuaagagaguuggggagggguccugagagaaugaagaaucugaggacagucauucuuccuugugagugacuugcauuggaauguuugucucaucuucuccucuggauuauaagcuccuuaaa

SEQ ID NO: 4144909 - RNA, 62 nt, Human
uuuaagagcauauuaauaguggagaaauuuuauuuucuucugugaaauaagugcuucuuaaa

SEQ ID NO: 4144910 - RNA, 80 nt, Human
uuuaagauuguuuaagacauuggcauugacuguaacaccuggcuguuagaggucuuuccaauuuuauggguucucuugga

SEQ ID NO: 4144911 - RNA, 55 nt, Human
uuuaagcagagaaaugauguauuugauaugcagguaccucuuucuucugugugag

SEQ ID NO: 4144912 - RNA, 79 nt, Human
uuuaaggaacaccguuuacaccacuaccgcuuauuccguaguuuguuauaacuguaguuaauguguacgguaccuuaag

SEQ ID NO: 4144913 - RNA, 70 nt, Human
uuuaagggauuuggagaccaaggcuucauacacaugcaaucagaggcuucuggugucaguauucuuugaa

SEQ ID NO: 4144914 - RNA, 96 nt, Human
uuuaaggguuuguacaaauuuugacaucuaggaaagguacaugacgaaauugccaaaacauucugugaugucauaaguuaaggacuuccauuuaaa

SEQ ID NO: 4144915 - RNA, 59 nt, Human
uuuaaggugggagaaaacucuuaggucauccaccuccuggauuuuccuuccaccuugaa

SEQ ID NO: 4144916 - RNA, 63 nt, Human
uuuaaguaaagauucccuguucucuucaauuuauuugaagguauuggggaauauuugacuaaa

SEQ ID NO: 4144917 - RNA, 57 nt, Human
uuuaauaaguugucagcacauaaaucaucagagaucaggccauggcagcuuguuaag

SEQ ID NO: 4144918 - RNA, 71 nt, Human
uuuaauauuuggugacugcucuaaggaaaacauaguaauuuggggcagcauaacaaucacugaauguuaga

SEQ ID NO: 4144919 - RNA, 93 nt, Human
uuuaaucuguggagccuuagucuuuggauuuuaaaaauacuuugaaacacccuaguauuuauaaucugccaaagagagaguucacuuguugaa

SEQ ID NO: 4144920 - RNA, 68 nt, Human
uuuaauuagcaagccagagagcuaacaauuaucucaccugucagcucucuugacagcuugcuguugaa

SEQ ID NO: 4144921 - RNA, 77 nt, Human
uuuaauuuccucagaugcugaauauuagccucaugauccuuugucagggguaaauguaguauacuugaggaauugaa

SEQ ID NO: 4144922 - RNA, 65 nt, Human
uuuacaacauaggccccaagaagaaggcuuuguuggacuugacucugugcggucuguguuaugaa

SEQ ID NO: 4144923 - RNA, 55 nt, Human
uuuacaagucagggacuguucuggauuuaauucccccaguccgauguguuguaaa

SEQ ID NO: 4144924 - RNA, 59 nt, Human
uuuacaauagggucugaaugaagugugaagauaccuuauuuuaaaugccuaauuguaaa

SEQ ID NO: 4144925 - RNA, 62 nt, Human
uuuacacuuauuaugaagcuuuuccugugaaguuauacaaccugaguuuuaaugaguguaaa

SEQ ID NO: 4144926 - RNA, 57 nt, Human
uuuacacuuuccugggaacaucuggaacgcaaauuucuauccccagggaaguuugag

SEQ ID NO: 4144927 - RNA, 84 nt, Human
uuuacagauuuaaguugcguggguuugaauccaguccugcagcccacuacuggggaucugggccucacacacauuaucuguaaa

SEQ ID NO: 4144928 - RNA, 74 nt, Human
uuuacagcuaugucuugguguucucugguuaaacaacuucacagaacagcaacaucagacaaaguuacugugaa

SEQ ID NO: 4144929 - RNA, 58 nt, Human
uuuacagugagagcuuagugagucacuuaaccugugccucaguuuucucaccuguaaa

SEQ ID NO: 4144930 - RNA, 73 nt, Human
uuuacauacaugacacugggcuacagguccuacugugugucuuccuuuugucacccgguguuauguucauaaa

SEQ ID NO: 4144931 - RNA, 55 nt, Human
uuuaccaggucugugcaggugucaaucagcuuuugcaugggugcagccugauaga

SEQ ID NO: 4144932 - RNA, 90 nt, Human
uuuaccgugacguccuagagcaggguuggggcagcgugcacuagcagaagaagugugggugcugccuccuuccugccaggagaagguaga

SEQ ID NO: 4144933 - RNA, 72 nt, Human
uuuaccuacuguuuucuuuauaguacagcagauuuuuaaauuaguuuguaauggagcaaacagguuggugaa

SEQ ID NO: 4144934 - RNA, 62 nt, Human
uuuacgaauggggugacaacuuaugauaaaaacuagagcuagugaauuagccuauuuguaaa

SEQ ID NO: 4144935 - RNA, 92 nt, Human
uuuacugagacaggguacacaguaguaggacaauaugugguggaaaaaacagccacauuuuucugcuccugaacagugcaugaucuaguaaa

SEQ ID NO: 4144936 - RNA, 88 nt, Human
uuuacugauuucguuaacaagagguaaagcucucauuuaauaucaggcccaccugggaagagagaauuugcugacauuaaugugugaa

SEQ ID NO: 4144937 - RNA, 67 nt, Human
uuuacuguuacaccuaccuucuuggaaagggcuaugaacucaagacaugggugagagugacagugaa

SEQ ID NO: 4144938 - RNA, 77 nt, Human
uuuacuuaauauucugaauuuuucuugggucgcuguuagucaaauagagauaacuagauuacagaagaauaaguaga

SEQ ID NO: 4144939 - RNA, 128 nt, Human
uuuacuuacuguguuuuuucccaucuauaauccaagcuucaggaggucggucuccuuuuuguauuguuuuguauucacaaguggacccuucauggugccuggcauguaguaggcaccacaggaaugaa

SEQ ID NO: 4144940 - RNA, 105 nt, Human
uuuagaaagaagaggcacaucuugauaacaugcugagaacugaggcaacugaugucuuuaggcucuuauagucccagcauguuuuuaagagcuacugaauuugaa

SEQ ID NO: 4144941 - RNA, 74 nt, Human
uuuagaaaugcgauaacauuuguauagcgcuuuguaaagggcaaagcgcuauauaaauguuaacuguuauuaga

SEQ ID NO: 4144942 - RNA, 81 nt, Human
uuuagaaguuguagcuguucauuguaagucauuuugcaauuuuacaaugaguuauuuaauagaaaggcagcauauuuuaag

SEQ ID NO: 4144943 - RNA, 117 nt, Human
uuuagaaucagugaauaaaaacagcgaauauaaacuuuuauaaagcugcagauauggguugaaucuggaucaauucuguuuuguaaaaguuuauaacuauuugucacugacuuuaaa

SEQ ID NO: 4144944 - RNA, 108 nt, Human
uuuagaaucuuggaucucuuccacucacacuaggauguuguuucuagaaaucucccugaaguaugguacugacucuuggugguaaaaguggagaggcuuagaacugaa

SEQ ID NO: 4144945 - RNA, 90 nt, Human
uuuagaauggucucgccaucagcuuuggcgcugagcaugaagucgagugugcugugccaugccgcugccauagugaggcgagacccugag

SEQ ID NO: 4144946 - RNA, 62 nt, Human
uuuagacccugggagauugacuggcuuauaaaguccuauguuggcaauuucaauggucugaa

SEQ ID NO: 4144947 - RNA, 129 nt, Human
uuuagacgagcaucucgacggcaggggcucuuguucacuuauguucucccauugugaguagcauaaugccuggaauaccguaagugcugaagaaagguuugugggguugauuaauuauugaacucugaa

SEQ ID NO: 4144948 - RNA, 107 nt, Human
uuuagagaaagcaugucugaaucuauauauagugggaauuacgauauacuggagcaaccauguaauauuaucuuacucuguuauuagugauucagcaugguccugaa

SEQ ID NO: 4144949 - RNA, 60 nt, Human
uuuagagagaauuuucaaagugcuccuuugaugauggaguuugugauaguucauuuuaag

SEQ ID NO: 4144950 - RNA, 72 nt, Human
uuuagagauuugucugauaguagaaugugaaaauugaaugucuuaauuauuuauuucagaaagguuucuaga

SEQ ID NO: 4144951 - RNA, 57 nt, Human
uuuagaggaggaagaaauuuuggcaauucucuaagccagcugccuucauuuucuaga

SEQ ID NO: 4144952 - RNA, 115 nt, Human
uuuagaguaccucccucacuuccugaaggauuuguccauugcuuauuucuacuuugccaguaugcaaccguugaauauuuguauggcacuuucaaagauccuggaguacucugaa

SEQ ID NO: 4144953 - RNA, 59 nt, Human
uuguuucccuggaucuagagcugccgccucaaucagcgacuggcauucaggugaggcag

SEQ ID NO: 4144954 - RNA, 77 nt, Human
uuguuuccuacggugacuuuuauucaauugaauuuaaaaccccagaugaaagugaauacaugucacucagcaggcaa

SEQ ID NO: 4144955 - RNA, 65 nt, Human
uuguuuccuuuuauaaggcuugagguguuuuugacuuuauuucugcuuccuugagaaggagauag

SEQ ID NO: 4144956 - RNA, 128 nt, Human
uuguuucuccccaucaaacuugccuucccacagacaugcugcucuggcuggagcaaugacuuggccaucuauccaagcauauggcacagagcagcugccagggcagggugggauggaggugggggcag

SEQ ID NO: 4144957 - RNA, 60 nt, Human
uuguuucugagugaguguaggccugacccuugggcauggcugaacauuacucauagucaa

SEQ ID NO: 4144958 - RNA, 70 nt, Human
uuguuucugugaggcuuuauguaagggugcaguauucugccuugauauaaaacugucucccaugauauaa

SEQ ID NO: 4144959 - RNA, 64 nt, Human
uuguuugagauuuucugccauugcagcacuuuguuauucaaaagugagcagaaaagucaaggga

SEQ ID NO: 4144960 - RNA, 76 nt, Human
uuguuugagcccaggaggucgaagcugcaguaagcuacaaucaugccacugcacuccagccugggagacaaagcaa

SEQ ID NO: 4144961 - RNA, 77 nt, Human
uuguuugauuuuugagacagaguuucacucuugucacccaggcuggagugcaaccucugccuccuggguucaagcaa

SEQ ID NO: 4144962 - RNA, 58 nt, Human
uuguuuggaacuuggugccacccugccaucguagcuggcuugcuaauguuccaaauaa

SEQ ID NO: 4144963 - RNA, 74 nt, Human
uuguuuguuuugagauggagucuugcucuguugcccaggguguagugcaguggcucgauuucagcucaccgcaa

SEQ ID NO: 4144964 - RNA, 74 nt, Human
uuuaucauuuuuucucaguucuaauuaauaggaguaaugaucauuguuaguguguuuaggacugaaaagauaga

SEQ ID NO: 4144965 - RNA, 62 nt, Human
uuuauccacaguauccaaaaucuggccccugguggguaccuuuugaauagcugcuggauaaa

SEQ ID NO: 4144966 - RNA, 60 nt, Human
uuuauccauucaccaguugaacauuugggcuauuugcaguuuuugguggucauggauaga

SEQ ID NO: 4144967 - RNA, 116 nt, Human
uuuauccuugagcuuaugcaaaacacuuccaggagacuuccagaaauauugggguggggaguccuuuauaggaaauaggucuucugugaacuugugauguuuccucuguggauaaa

SEQ ID NO: 4144968 - RNA, 79 nt, Human
uuuaucucauuuaauuccaaaauauuaauccagucagucauucucuugaauaggguuaguugguaguuaauugaauaga

SEQ ID NO: 4144969 - RNA, 59 nt, Human
uuuaucuguauaucucaaguguugauguaugugacacuuugauagauaaugcagguaaa

SEQ ID NO: 4144970 - RNA, 55 nt, Human
uuuaucuuauuccaccaccuugggaucucaccguaguggguuggaagggaaugaa

SEQ ID NO: 4144971 - RNA, 125 nt, Human
uuuaugacaguucuacuucuuuguccucuggguaaaaguguauauaugacuuauaaaagugauauucauguuuauaguauaugcuauucugagcuagaagcaaaauggagaaacuuuguuauaaa

SEQ ID NO: 4144972 - RNA, 68 nt, Human
uuuaugauuaugguagaaacaagaagugagauuuucacucuguguuuagugcugccauucuuugugaa

SEQ ID NO: 4144973 - RNA, 129 nt, Human
uuuauggaugcccccucagaaaaauaugcaaagggguaacuggcuuggaaauggguauuuaugcauaguaaaucccacucacgaguuuugccuauuugaagcuucucucaaugacagugcaucugugaa

SEQ ID NO: 4144974 - RNA, 84 nt, Human
uuuaugggacauuaugaucucuguggcauccacucaacuuugacauugcgguacagaaguggccauagacaauauguaaaugaa

SEQ ID NO: 4144975 - RNA, 66 nt, Human
uuuaugggauauaguaaaacaugaauugggucucugaaaaccaauuuagauuuauguuaccauaaa

SEQ ID NO: 4144976 - RNA, 74 nt, Human
uuuaugggguggugggaaccaaguaguggcaucucacugggguuuuguuauucucuacucaucacuccuauaga

SEQ ID NO: 4144977 - RNA, 66 nt, Human
uuuaugggucaugcacucuguugcaacuauucaauucugcugcuguaacuagaaagcacccaugga

SEQ ID NO: 4144978 - RNA, 76 nt, Human
uuuauguaauuuuggaguuucugcugaggaaaccugagugaacucauuucagaugcauuuagaauauuugcauaaa

SEQ ID NO: 4144979 - RNA, 58 nt, Human
uuuauguccuuguuuuggugacacuauacuaguggcucccucagacaagguauauaaa

SEQ ID NO: 4144980 - RNA, 84 nt, Human
uuuauuaagcaauucagcaaaccuagaaacauauauuuuguuguuguuguuguuguuagggaauucacugaaaugcugaauaga

SEQ ID NO: 4144981 - RNA, 56 nt, Human
uuuauuaaucuguuuaugcugucaaggaggaaacuugaccagugcagauaagugag

SEQ ID NO: 4144982 - RNA, 122 nt, Human
uuuauuaaugaguguaaccuccuacacaauacaucaacaugauuucaugcauuuagaggauaaaaauuuccuaguuaaguggaaaauuguggagauggcuucuggaggaccuucauucuaaa

SEQ ID NO: 4144983 - RNA, 68 nt, Human
uuuauuagauuaucaaagaggugagaccaaaaaaagauuaagggacugcuucuugagaaucugguaaa

SEQ ID NO: 4144984 - RNA, 129 nt, Human
uuuauucacuuaaugagcuucuauuggcagacuacugugucguugaacagagaggauaaagacaagaaacuuuuucuuuguaaagccacaguccuugucucacgacccaugguucaugguggaagcaua

SEQ ID NO: 4144985 - RNA, 68 nt, Human
uuuauucaucaucuguucauauuaagccacacauaagcauuugugugguggcagcagaggugagugaa

SEQ ID NO: 4144986 - RNA, 115 nt, Human
uuuauugagcaucaccuagaugucaagaacuauacauuacucauugagucacagaaacaacuuugagugauaagugugauuaucuucauuuuacagaagguugaaguucaacaga

SEQ ID NO: 4144987 - RNA, 64 nt, Human
uuuauugagcaucuacuaugaacugggcacugugaaagacagugcaaguguagaaacuaauaag

SEQ ID NO: 4144988 - RNA, 80 nt, Human
uuuauuguguaccugcuaugugagauacauuauguaaagcacugagcaugaugucucucacauagaagguaaggcaugaa

SEQ ID NO: 4144989 - RNA, 76 nt, Human
uuuauuuauuagccacaugcagacuuucaugguuugcuuuuuguucuggauguuuguguguguggaaauacauaaa

SEQ ID NO: 4144990 - RNA, 89 nt, Human
uuuauuucauuagagaagaauuguaaguaccagcaugcuauuuauacucucaaaaagcuuugccugcugacauucugugcuggaauaaa

SEQ ID NO: 4144991 - RNA, 100 nt, Human
uuuauuucuauuaugugcagaguaaggcagcuguuaaaugccauuaagauguuaauuuccuggcugaagacauugccaaaugugacacaaauaaaaugaa

SEQ ID NO: 4144992 - RNA, 58 nt, Human
uuuauuucuccagaaugcugucuguggcauucuccaaggcagauuuaggagaaaagaa

SEQ ID NO: 4144993 - RNA, 84 nt, Human
uuuauuuggcagcugucuucuggaugaauguggaagggaacccuuggacacaggaaagucagccagaagauuaagccagguaag

SEQ ID NO: 4144994 - RNA, 57 nt, Human
uuuauuuggcaucucugccaagagacacuaaaagucuauggcauugguccagauaaa

SEQ ID NO: 4144995 - RNA, 59 nt, Human
uuuauuugguggucaggcagcccuggguucaaauccuggcucgauugcuaccaauuaag

SEQ ID NO: 4144996 - RNA, 72 nt, Human
uuuauuuuccuagaaccaugcucaggaaggaaauguugccuccuguuuaggcuguggucugggaucugugaa

SEQ ID NO: 4144997 - RNA, 71 nt, Human
uuucaaaagaacccucaggcagaauguauucucuuauuaaaugaaugugagggaucugccugcucuugaaa

SEQ ID NO: 4144998 - RNA, 80 nt, Human
uuucaaaagauucgagcgauguauaaaaucucuuguuuuacuagguguggaguuuuguaaaggccugaauuucaguggaa

SEQ ID NO: 4144999 - RNA, 89 nt, Human
uuucaaacaugcuguucuguauugauucuguuaggcauugggaauccaaaugcacugauuuuaguuaauuagcucagauaugcaagaaa

SEQ ID NO: 4145000 - RNA, 61 nt, Human
uuucaaacugcuaccuuuuaugugcagcacucacagcugccacuugaagcucaguuugaag

SEQ ID NO: 4145001 - RNA, 67 nt, Human
uuucaaacuuuacucuugaaucuucuuuuccuugucagggaacucuucaaggguggauguccuggaa

SEQ ID NO: 4145002 - RNA, 60 nt, Human
uuucaaagguggaagagugaauaaguauaguaauucagucacuaagcacgccuauuggaa

SEQ ID NO: 4145003 - RNA, 68 nt, Human
uuucaaaguuuccuagaucaguguucuuaauguugccacacauuugaaucaccugggaagcucugaaa

SEQ ID NO: 4145004 - RNA, 74 nt, Human
uuucaaauauuuaaaggaauuauuauaaguggguaucuuuuaucaauaaucuuucuuuuccagauaguuugaaa

SEQ ID NO: 4145005 - RNA, 120 nt, Human
uuucaaaucccugcuugggaaugaugggggcaauuugccaaaaugcagauuccugggucccagugauucugacucaguacaucuggaguuggccccagaauucaaguugguuuuuugaga

SEQ ID NO: 4145006 - RNA, 57 nt, Human
uuaguguaaauaacugccuagacaaguaaauuauucuugcuagguaaccugcacuag

SEQ ID NO: 4145007 - RNA, 63 nt, Human
uuaguucacauucuagaauguuaucguggauuaaacauauggugacuccuaaaugugaaauaa

SEQ ID NO: 4145008 - RNA, 112 nt, Human
uuaguucacugcuccuuccccagugucaagcuuagccaggugcucauuaaagaauuacaaaaugagcaaaugguuacuugacucgugagguaggauaagacaaugagacuga

SEQ ID NO: 4145009 - RNA, 77 nt, Human
uuaguucuccaaauugacuauguucucuggaucaucuugucuuuucuucuagaaacucucaaucugggauguacuaa

SEQ ID NO: 4145010 - RNA, 93 nt, Human
uuaguuggccucuaaaauuuagucugaaagggugaacauugaaggaaauagacuaaagaauguguacuuuuucaugcucagaugguguauuaa

SEQ ID NO: 4145011 - RNA, 71 nt, Human
uuaguuucacagccacacuagcuacauuugaagagcucagucacuauauguggcuaguggcuaugaucuga

SEQ ID NO: 4145012 - RNA, 129 nt, Human
uuauaaaaaguaaggacaauguuaacgucuaucugacagugcugucaaauauguuuucauauaugaaauacuuaaaacauuguuuggcaguagguaaguacuugauaaauauuaucuucucuuuuauga

SEQ ID NO: 4145013 - RNA, 64 nt, Human
uuauaaagaaaugauuuccagaagcccaagaagccugguauucugagguaucauuucuuuguga

SEQ ID NO: 4145014 - RNA, 55 nt, Human
uuauaaagaugguuuaaucucuagagauggagacugagcauuaguauuuuuauaa

SEQ ID NO: 4145015 - RNA, 69 nt, Human
uuauacauuaaacaggcuuuuggaaaguuacauuuaaauggaauuuuugaaaagcuguaauauguguaa

SEQ ID NO: 4145016 - RNA, 99 nt, Human
uuauaccaaauuaaauguugaauguuuuaguccauccaggcugcuauaacaaaauaccacagucugggaggcuuauaaacagaaauuuauuugucauag

SEQ ID NO: 4145017 - RNA, 81 nt, Human
uuauagacacuggccugugcugucucaccuuucuuuuuauauaugaaaaugaacaguacaaagcacagacccaggucuuaa

SEQ ID NO: 4145018 - RNA, 64 nt, Human
uuauagaugugucuaguuugagcaccuaaagguugauaacucaggaaaggcagagugucuguaa

SEQ ID NO: 4145019 - RNA, 86 nt, Human
uuauauagcaguguaugaaaagcuuucuagcuauguucuacagcuguguggaguucaguagcuugaaagcaccauaauuuauauaa

SEQ ID NO: 4145020 - RNA, 80 nt, Human
uuauauaguuuuagaauguuuaaaaaugguuaugauggaguucccaagaauaaagauuuuuaggcauuucuucuauguga

SEQ ID NO: 4145021 - RNA, 64 nt, Human
uuauaucuaaguguauguaagagggugaagggaagugggugcaucuuuuuacaaguagguguga

SEQ ID NO: 4145022 - RNA, 56 nt, Human
uuauaugauugaagugcauaagacauacuuuuagguuuuggcacugagugguauaa

SEQ ID NO: 4145023 - RNA, 74 nt, Human
uuauauguugaagcccuaauacacaguaccucaggaugugacuguauuugaaguuagggccuuacaauauguaa

SEQ ID NO: 4145024 - RNA, 121 nt, Human
uuauauucaucauauuuuauuuucaaccuaucuuggauaagcaugaaaauaggucugauagucauaaggcuaucacuacacuucagcuuuaagaaguuguuagguuuaugaggacuuguaa

SEQ ID NO: 4145025 - RNA, 88 nt, Human
uuaucaucaccaguaucaucugcaaagcauuuugauaaauaccugguuuuacaugacugcccuugucagggccugcugguguagauaa

SEQ ID NO: 4145026 - RNA, 65 nt, Human
uuaucaucacuggauggaaauauacagcuuacugcuaagaucauauuuccagguuagugagguaa

SEQ ID NO: 4145027 - RNA, 90 nt, Human
uuaucauuucauuuaauccucacagcagcucugcgagauacaugacuuuauuuauuuauuuuugcuguggugauuuuaaaaugaggauaa

SEQ ID NO: 4145028 - RNA, 55 nt, Human
uuauccaggucugcuuuuccugccuaggcuagauuagaaauggcagaauggauag

SEQ ID NO: 4145029 - RNA, 81 nt, Human
uuauccuccauugguuauaguaauugcauggauuuacugguauuucagauucacaaugauacauaagcgauagagagauga

SEQ ID NO: 4145030 - RNA, 81 nt, Human
uuaucuaaaacacaguuucucuaugagaguucagugaaaauuccccuucccaaacugauucuaugaaugacuguuagauaa

SEQ ID NO: 4145031 - RNA, 61 nt, Human
uuaucucucacuuuuaaggacaauuuuuaaaaagauucauguuuuuucaaguggggaauga

SEQ ID NO: 4145032 - RNA, 81 nt, Human
uuaucucuuccuuucuaaaauccuaaugacaaguuuaguucagcauggauuuaacuauucaugagguuugggaauagguag

SEQ ID NO: 4145033 - RNA, 85 nt, Human
uuaucuguuuugcuuuuugagcuuccccacgagguuuuauuucaagaagaccaucugcugcuacaaaaagcuugagaacaauuga

SEQ ID NO: 4145034 - RNA, 74 nt, Human
uuaucuuuuucuacucuaacauuuguuagauguucacucaggugaagucagcaguuuguuggggugauggguag

SEQ ID NO: 4145035 - RNA, 80 nt, Human
uuaucuuuuuggcuuacuuguaguuuguaauguuucaacaauaaguauggauaauuaacaagauagggauaaaaagauaa

SEQ ID NO: 4145036 - RNA, 67 nt, Human
uuuggagcuguggcuuucuguuucuguuuuugguuuaaucuguauugagagccacagcgugcacaga

SEQ ID NO: 4145037 - RNA, 122 nt, Human
uuuggauguaauguaaugaauaaauguuacuaacaacuccucucuggaguuaugcagaguauguuugugaaaagccuaugacacacccagagagagcuguauuugauacauaauauaccaaa

SEQ ID NO: 4145038 - RNA, 77 nt, Human
uuuggauugcuuggaugcuucgaacagccaugaaaaguagccugccuguggcauuuagaggccaagcaauugacaga

SEQ ID NO: 4145039 - RNA, 67 nt, Human
uuuggauuucauuuuaauuucacugggaagccauuggagggcuugaugaaagaaggugcagucugaa

SEQ ID NO: 4145040 - RNA, 71 nt, Human
uuuggcaaagucuuagcaacuaucgcuuuauccuguggaaaaagcucaaggguguugcagagaccuccaaa

SEQ ID NO: 4145041 - RNA, 78 nt, Human
uuuggcagagucuuuugucaguaauguuagagaugggaguggacaaccagagacaacugagcagaggaaaugaccaag

SEQ ID NO: 4145042 - RNA, 87 nt, Human
uuuggcagucuggguggcugagcuacagcgaagcaaaucugaaucugccauaugcguuguccucaggaugcucagagucuagccaga

SEQ ID NO: 4145043 - RNA, 62 nt, Human
uuuggccugguaccacauagauuuagguuuaauuuaaauuuuacccucguacacaggucaaa

SEQ ID NO: 4145044 - RNA, 74 nt, Human
uuuggcuauugauagcagcaaagacauuuuuccuucccuuuugggaaacagucaugguugcuguucaagcuaag

SEQ ID NO: 4145045 - RNA, 59 nt, Human
uuuggcucuucccguaccauaagaauuguaaaagcuuguaucuauauggggagaccaaa

SEQ ID NO: 4145046 - RNA, 64 nt, Human
uuuggcugcuagcuaauuuuuauuagcccgucaccaggguuucuuuagguucugacaguccaaa

SEQ ID NO: 4145047 - RNA, 68 nt, Human
uuuggcuguguuaccacuucaugucuacccuccaggagaguuuauaaggguuggcugggacagccgag

SEQ ID NO: 4145048 - RNA, 70 nt, Human
uuuggcuucucuguuuuaguauuuccagugguuuacacaagagguuagcuauuagcaggcgaucguuaaa

SEQ ID NO: 4145049 - RNA, 67 nt, Human
uuuggcuuggggucauaaagaggaaaaaaacuuuaaauuuuuuuuccaacuuaagacuucagugaaa

SEQ ID NO: 4145050 - RNA, 88 nt, Human
uuugggaaagucuucuaaauuaccaagacaauacuguauuaagagagauuuuguauuugguguauuuaaugagcaagcaacucccaaa

SEQ ID NO: 4145051 - RNA, 79 nt, Human
uuugggaagucugcagauacugaugauaagcacucuuuaaagaagaauguaguuuagaaguaaggucagauuucuggag

SEQ ID NO: 4145052 - RNA, 107 nt, Human
uuugggagaaagaaaaggagacagauugcuguggaaauauaagauguuauuucugcgaaaauacuuguaucuuuaccaauuuuaaaugucgguuuucuucucccaaa

SEQ ID NO: 4145053 - RNA, 64 nt, Human
uuugggagccacugguugccucuuucuguucccucuugcccagggacaagccacagcucccaga

SEQ ID NO: 4145054 - RNA, 72 nt, Human
uuugggcaaagcuagaaggaaauuuuauguucuuguugcaaccucauugaauccuuccuucagaaguccaag

SEQ ID NO: 4145055 - RNA, 74 nt, Human
uuugggcauuaagauagcucgaucuuucauuuggcuuaauuuucaaaguuaucuggcuuucuuaaugacuuaaa

SEQ ID NO: 4145056 - RNA, 56 nt, Human
uuugggccugaccggugucucuggcuaacuuucugcugccaggucuuggguccagg

SEQ ID NO: 4145057 - RNA, 59 nt, Human
uuugggcguuaucucuccugcuaccuagggagaggucagcaaggcucuuaaugcccaaa

SEQ ID NO: 4145058 - RNA, 100 nt, Human
uuuggggaggaaaaagagaaagggaaagaagucagccacagugggagaaggggcuccuuuucuucauuucuugucuuccccuuucucuccccacccuaag

SEQ ID NO: 4145059 - RNA, 130 nt, Human
uuuggggaugaggccaugauucugaggucagugccaugccauggucuaauaaaguuugcauucaaugcuguuuguuucuguaugaucaauauuguaaagucagucucuuugucauggacucagcuuugga

SEQ ID NO: 4145060 - RNA, 59 nt, Human
uuugggggcuuacuugugagauucaguuuucacugguuagaagaaguaagcacuccggg

SEQ ID NO: 4145061 - RNA, 59 nt, Human
uuugggugcuaagggugugggcuccaagaaauaaucacacaucuuccagaguagcuaaa

SEQ ID NO: 4145062 - RNA, 63 nt, Human
uuuggguuuugcuugauauaaaugaagccagagaucucuuaugaaacucaagccagauccaag

SEQ ID NO: 4145063 - RNA, 75 nt, Human
uuugguauucccauuuccuagcacguugcucucuagagcuucauaucaacagcaggugguagagaaaaauccaga

SEQ ID NO: 4145064 - RNA, 86 nt, Human
uuugguauuuaaaagguagauuuuccuucuaugguuacguguuugaugguuaaucauagaggaaaauccacguuuucaguaucaaa

SEQ ID NO: 4145065 - RNA, 86 nt, Human
uuuggucucuuuacauacuucuuggaaguuuuguucauugaagauuuuaauuaggaaacaaagcuuagcaggagaggagagccaga

SEQ ID NO: 4145066 - RNA, 92 nt, Human
uuuggugagaagaacaaaugaacauauaagcuugaauuaaaaauaaauauaaaauuuaaaaaguaaguuacauuuggaacuuuugguccaag

SEQ ID NO: 4145067 - RNA, 80 nt, Human
uuuggugaugcauuucugcaaacuuccacgucucgcucuggggccaggagacugguguuugcugggcuguuucuuccaag

SEQ ID NO: 4145068 - RNA, 65 nt, Human
uuuggugcauuucucacugagcagauaaaagagcuauuuuuauccauucagugagagguaucaaa

SEQ ID NO: 4145069 - RNA, 72 nt, Human
uuugguguccuaaauauagugauucauguaacuggacagguccaaaggcauuggcuccugugggacaugaaa

SEQ ID NO: 4145070 - RNA, 75 nt, Human
uuugguuauauccaaaguuucucagaaacuggauauaaacuucuucaguucugaaaaacuuuggauauaaccaga

SEQ ID NO: 4145071 - RNA, 87 nt, Human
uuuguaaagcuauagaguccaaaguaugaauaugcuacaauuuaugcauauacuuuccuccuuugguaagcuuuugguuuucacaaa

SEQ ID NO: 4145072 - RNA, 63 nt, Human
uuuguaaagucacagagcaggugcaaguggguuuugcuuccuggaugugacuuuguuggcaaa

SEQ ID NO: 4145073 - RNA, 76 nt, Human
uuuguaaauaugaaggauacaccucugauuuucauuuuauuggguugagaacagggcaguuccuuauaguggcagg

SEQ ID NO: 4145074 - RNA, 77 nt, Human
uuuguaaauuuguacugccagauauuaaacauauugcaagguuacaguaaaugcuuuggugcugguacagaaacaga

SEQ ID NO: 4145075 - RNA, 57 nt, Human
uuuguaacacucccacucuucuuccaaagaggcaagaagaggugacaggguuauggg

SEQ ID NO: 4145076 - RNA, 124 nt, Human
uuuguaaguauuagaaucaccugguggucuugauaaaguacguaggcccaggccuagccuacuucaaagagccugguccuguagcacuugauuaguucuccaggugaugccaauacccuccaaa

SEQ ID NO: 4145077 - RNA, 84 nt, Human
uuuguaauaucuacuccagaugauaagggacaguaacccuauggaaggcuacugccccuuaucaucuggaguagacaucacaaa

SEQ ID NO: 4145078 - RNA, 56 nt, Human
uuuguacuagucaguaaauaguaguauugugacuacaaaugacuauuugguacagg

SEQ ID NO: 4145079 - RNA, 84 nt, Human
uuuguagagacaagguuucaccauguugcccggguugaucucaaacuccugggcucaagugauccacccaccuuggccuccaaa

SEQ ID NO: 4145080 - RNA, 61 nt, Human
uuuguauucuagccacuguugaugucugucugcacccagaccaggaggccuggagcacaaa

SEQ ID NO: 4145081 - RNA, 130 nt, Human
uuugucaaaaugcuacuuuauaaauauugauaauuaauuucaguaaucuccuuagguuuacaguaauauacuaugugguacaugggacauugacauuaauuauuaagauuauaaugcaaauuuugacuga

SEQ ID NO: 4145082 - RNA, 80 nt, Human
uuugucaacaaaggcccacagcugugagggucacuuguagaaaacaauggagauuugagaacaguugagggcuagacaga

SEQ ID NO: 4145083 - RNA, 78 nt, Human
uuugucagaaggaagaagcauguggugauggcacuggguaauuggcgaugucauuuaugcuucuucagugcuuacaaa

SEQ ID NO: 4145084 - RNA, 63 nt, Human
uuugucagcuguauaaugcagguaacuuuaucuaccuuauagaauugugcagcccuuggcaga

SEQ ID NO: 4145085 - RNA, 70 nt, Human
uuugucauuuaauagcuuuugucuuuuuucuaugggaaagacaagguuguacuauuaaaauagugauaaa

SEQ ID NO: 4145086 - RNA, 68 nt, Human
uuugucuuggccccaccugugccagcccuaggauggaacugcugacacuguugggaagcccagacaga

SEQ ID NO: 4145087 - RNA, 59 nt, Human
uuugucuuuaguugcguuaucuuacuuuuccaaaaggggaucuguaaguugaagacaaa

SEQ ID NO: 4145088 - RNA, 84 nt, Human
uuugucuuuauguagcuuauaguugagugcacaaaauaaauauggaauacaucugugucauacaacaauaaguaccgagaugaa

SEQ ID NO: 4145089 - RNA, 118 nt, Human
uucauuagguuuguuuaguuuccauugcuucagggguguuaguuuuguguucccaacuagauuauaaacuccucuugcauuccugauggcagugacuugaaggcauuuauuugaagaa

SEQ ID NO: 4145090 - RNA, 116 nt, Human
uucauuauaaaguuaucauaaaguuaucuagaaaagcauagcaaaggacuuuguaaaaguagguuagcucauuuacaaagaguguucuuuuccaguuuuuuagcaaugacaaugaa

SEQ ID NO: 4145091 - RNA, 56 nt, Human
uucauugaaauuaagcccaacuggccaauuuggugagugcuugauuugucaaagaa

SEQ ID NO: 4145092 - RNA, 73 nt, Human
uucauugaauccaguagcuauuuaugauacucauguuagugauaugagguaugauaauagcuugggauaugag

SEQ ID NO: 4145093 - RNA, 77 nt, Human
uucauugcugucuucacuuccugguuucucaaaguauagauaaguggauucagaaagggagugaagaugguauagaa

SEQ ID NO: 4145094 - RNA, 77 nt, Human
uucauuuaauaaaguucugcuggcauauaugauguuucucuaaauugguugcuacuuaggagcuuuauucuaaugga

SEQ ID NO: 4145095 - RNA, 77 nt, Human
uucauuuauuuauccagcagcuauucaaaagguacccaccaggggccagauuuuggauacuguggauaaaauaggaa

SEQ ID NO: 4145096 - RNA, 96 nt, Human
uucauuuccaaauguugccauucauuauucucuuuaauguucuggaagacgcauacuuuaggacuaauuucaggggauauaugaggucagaaugaa

SEQ ID NO: 4145097 - RNA, 62 nt, Human
uucauuuccugaucuguaaaauagcgaccugccucagagagcuguugcaaggauugaaugag

SEQ ID NO: 4145098 - RNA, 69 nt, Human
uucauuugugacuacggaggaaaguccaccagugggcuuucuggacccuucugugagugaacaaaugaa

SEQ ID NO: 4145099 - RNA, 88 nt, Human
uucauuuugaaauggaauuucugguauguauaugcuuuuauuaacauuuuuauugcaaagaaauacaugcuuaccauagaaaaaugag

SEQ ID NO: 4145100 - RNA, 65 nt, Human
uucauuuugugcacuuaaccaugacugcgugcugcacaagacaauggguaaguguaacauaugag

SEQ ID NO: 4145101 - RNA, 72 nt, Human
uucauuuuguuuagcugucuggccaggccuagcucauaggucaaguuuagauagaguuaaaauacuagugaa

SEQ ID NO: 4145102 - RNA, 87 nt, Human
uuccaaagacuuucgaacuuaaugguuccuaaaauguguaauugucuuucccaaccaccuuuuuaaagaucauugaacuugauggaa

SEQ ID NO: 4145103 - RNA, 77 nt, Human
uuccaaagagaagaaauauggauuauagauucgcaguuuagaaucuguagagacgaauguguuauuuuccucuggaa

SEQ ID NO: 4145104 - RNA, 59 nt, Human
uuccaaagcacuugauguaaaguaauaaaacuacuguacauaaagguuugacuuuggag

SEQ ID NO: 4145105 - RNA, 62 nt, Human
uuccaaagcauuugaauuuuggaaauguaacauauauguuuccaugcaguagagcuuaggga

SEQ ID NO: 4145106 - RNA, 60 nt, Human
uuccaaaguguuaaguucaguucaggguagcuucccugcucuguuaauuaaacuuuggaa

SEQ ID NO: 4145107 - RNA, 59 nt, Human
uuccaacuugcuucuuaaaugaguuuuuagauauagagcauuuagaggggcaggaggaa

SEQ ID NO: 4145108 - RNA, 119 nt, Human
uuccaagaaagauccauuuuuaaaagaugauuugcugacacuucagaucuugaauccaaggugcugauucaugcaguuugaaguucagggaauugcuuaaaguuauagcuuccuaggaa

SEQ ID NO: 4145109 - RNA, 102 nt, Human
uuucuuuuuggacuugauggggggcgccauggucucuuggucacuuucccccucguaguccuccaggcugcuguugguguccgccucguagccaaacagagg

SEQ ID NO: 4145110 - RNA, 55 nt, Human
uuugaaacucccuuuugucuaguagacugugcccuacaguagaagggauuucaaa

SEQ ID NO: 4145111 - RNA, 85 nt, Human
uuugaacaaaugugguuucucagcauucucugugcaagaugcccauuuugaaugauuccugagagauccuaaacuuguguucaaa

SEQ ID NO: 4145112 - RNA, 79 nt, Human
uuugaacaaguuuuccuuuauugaguaccaacccauguaaugguaaccuggacuuuaauaaaagggaaaugaguuugaa

SEQ ID NO: 4145113 - RNA, 68 nt, Human
uuugaacccaggaggcagagguuacagugagccgagauugcaccacugcacuucagccccaucucaaa

SEQ ID NO: 4145114 - RNA, 71 nt, Human
uuugaacucaggcagucugacuccggaggcuauauacauuuacccuccuugguacacugcuuuuuuucaaa

SEQ ID NO: 4145115 - RNA, 58 nt, Human
uuugaagccuuguagauuuacguaguaaagaaaccuguguaaaucuguauucuucaaa

SEQ ID NO: 4145116 - RNA, 89 nt, Human
uuugaauggggccaguauuagguaaaggacuugcaggcuggagccaagccuaggacccucccugaugucaaggcugcauccauaucaga

SEQ ID NO: 4145117 - RNA, 104 nt, Human
uuugaauggggguacuggaauaaauagcuccggauaaauuuuaaaaucacuaaugaauuuuggaaugcccauggacuggucauguucuauuaccagaauuuaga

SEQ ID NO: 4145118 - RNA, 75 nt, Human
uuugacacaaaaaaauagggaauuuguauagagaaguuucccucuuauaaaaggacucccauuugauuguucgaa

SEQ ID NO: 4145119 - RNA, 86 nt, Human
uuugacagcuugagggcuagauguauauaccugguguggaaugcaaagaccauucuccaauauaacauuugguaccuccgaucaag

SEQ ID NO: 4145120 - RNA, 56 nt, Human
uuugacaguccccugauguuugcauguagaagugcagggauuauuacacugacaaa

SEQ ID NO: 4145121 - RNA, 62 nt, Human
uuugacagugaugauauauacagaaagguauauagccugcuaauauguuuucacuguauaaa

SEQ ID NO: 4145122 - RNA, 82 nt, Human
uuugacauacauauuaaaucaagaauaucagcuugucagcuuguuaaugaaugagaaguuuuguugaaugugugaagucaga

SEQ ID NO: 4145123 - RNA, 66 nt, Human
uuugacaucagaauuugauuccugggauauucagauguagccagagauacagauucucauuacaaa

SEQ ID NO: 4145124 - RNA, 59 nt, Human
uuugacauugccaauuugcucacagucauugacugcugaaacagaugccaaugaucaag

SEQ ID NO: 4145125 - RNA, 58 nt, Human
uuugaccuuugccagggauaaccagauauucucuuauuucugaauccaaaaggucaga

SEQ ID NO: 4145126 - RNA, 64 nt, Human
uuugacucugggugcuuuuucggauacauuuucuucaacacuguuaaggggccucacugucaga

SEQ ID NO: 4145127 - RNA, 59 nt, Human
uuugacuugauggcuuacauccaaaaugaugucauacaugcuugagcuacauggucaaa

SEQ ID NO: 4145128 - RNA, 71 nt, Human
uuugagaaguaaauaacagagaaaaugggaagagcaauucuuccccauugucuuuauuauuuccuuccaaa

SEQ ID NO: 4145129 - RNA, 57 nt, Human
uuugagacaauauuaaccuaucuuugccuucaggaaagaggacauaucugucucaaa

SEQ ID NO: 4145130 - RNA, 85 nt, Human
uuugagccaggucagcccuugauguuugggggugcagagcacagauggacccccauuccauagggcugaauccuuaaggcuuaga

SEQ ID NO: 4145131 - RNA, 92 nt, Human
uuugaggaaauugcugagggccagaaaguuauugagauaacuugguauuugauggaucucaugaauuuuuagugcuuucuacauuucccaaa

SEQ ID NO: 4145132 - RNA, 60 nt, Human
uuugaggaguuuuucuagagcuaaguaugaaaagauucaguuauagaaauacuuuuugga

SEQ ID NO: 4145133 - RNA, 64 nt, Human
uuugaggcagcuggacauaacuaaccuggaaagaauuuagguaaaugugauggcugucuacaaa

SEQ ID NO: 4145134 - RNA, 70 nt, Human
uuugaggccgcuauaagauugguuaguauggacguaguaacugacaaaacagucucuguagugccugaga

SEQ ID NO: 4145135 - RNA, 76 nt, Human
uuugagugguuuaugcuuccugauuggacucugacuaauauguuaggaagggucccaggagauaaacccacacaga

SEQ ID NO: 4145136 - RNA, 79 nt, Human
uuugaguuauaagguggugauuagguuuucagguuuagagaagugugagacaaccuaauuaaacaccuuuuugcugaaa

SEQ ID NO: 4145137 - RNA, 76 nt, Human
uuugaguucacaguguuugauuuaggggccacucuuuauuggauggcaccaauauuucagacuauugauauucaga

SEQ ID NO: 4145138 - RNA, 75 nt, Human
uuugaguuuaggguggagacuggaagcaggggagcccuggcccucugcaggucacgcuccagccuggaacccagg

SEQ ID NO: 4145139 - RNA, 113 nt, Human
uuugauaaacacuauucagcaccuauaauucauucauucuguaaguaacuauugagcacauacaauaugccaagcaagugaaaguagugggacuaugauggugacacgucaga

SEQ ID NO: 4145140 - RNA, 71 nt, Human
uuugauacguauucugggccgauuacaaaacuuccagaacuagucuuuguaaaugccuagcauaauucaga

SEQ ID NO: 4145141 - RNA, 111 nt, Human
uuugauauuuuaagggagcuauuuauuccucacauucgagugauguguauggguaguuauuuguacaaauuuuucacauugaauggaagaauagaguccuuuguauucaag

SEQ ID NO: 4145142 - RNA, 62 nt, Human
uuugaucccagauuucugugauugcaaauuucaguuuguuuauuacaguucuuggaauugaa

SEQ ID NO: 4145143 - RNA, 69 nt, Human
uuugaucuguugcugaagggaaggucuugaaugccaagcuguuggcaagcuacuuucagaauuaucaaa

SEQ ID NO: 4145144 - RNA, 125 nt, Human
uuugaugcugcuggggcauaauuagcagagccuuucuggagggcacuugguaaucuguaccaagagcuuuagaaaugcucauucauuuuuaccuguugauucuacuuccagaaauugguaucaga

SEQ ID NO: 4145145 - RNA, 65 nt, Human
uuugauggaaggagaaauaagcauuccaucuauaucugauugguccuuccuuuuccuucgucaaa

SEQ ID NO: 4145146 - RNA, 78 nt, Human
uuugauggaauuuguuguugcuccccuaagagaggacaccagcggccugucucugggaguugagcagcagccaucaag

SEQ ID NO: 4145147 - RNA, 60 nt, Human
uucccacacucccaguuaaacacagugauuuuccugguguucaagugucaaguguuggaa

SEQ ID NO: 4145148 - RNA, 63 nt, Human
uucccacaguucagaacaaaggguuuaaaucagucagcucuuguuaucugugcuugugaggaa

SEQ ID NO: 4145149 - RNA, 80 nt, Human
uucccacucuuggaucucgaagacuaagcaucucugaucaagcaucucugaucaagcaucuuggucuacgauccugggag

SEQ ID NO: 4145150 - RNA, 99 nt, Human
uucccagaacaaagauucugauugauucaguuuauaccuguugauuaucuacccuugguucaauuggcuauggaguggcaugcaggaucugaaguggaa

SEQ ID NO: 4145151 - RNA, 56 nt, Human
uucccagaaugaauggauggaggcauuuagacccccaucccaugucauucagggga

SEQ ID NO: 4145152 - RNA, 66 nt, Human
uucccagcagagccagcaagccgaacgccuccagcgcggccgggacggaggagcggcucuggggaa

SEQ ID NO: 4145153 - RNA, 60 nt, Human
uucccagcuguccuuuguccuauaagaaguugagcuuuuuagcaugaagcagcuggagaa

SEQ ID NO: 4145154 - RNA, 85 nt, Human
uucccauagaaggcuuugugcguagugaguggucaaugaauacuaauggcuacuguuuauguacagcagcuguucacuuugggaa

SEQ ID NO: 4145155 - RNA, 71 nt, Human
uucccaucugagcaggagaugccccuggugacuuucuguucacuggcugaucaccugccucaggccgggaa

SEQ ID NO: 4145156 - RNA, 55 nt, Human
uuccccacccaaaagaacuguuguuccccguucacaguuccacauggcuggggag

SEQ ID NO: 4145157 - RNA, 56 nt, Human
uuccccagagaccuuaaaacuugcacaucgugagacuuuaagaaguuucugaggaa

SEQ ID NO: 4145158 - RNA, 62 nt, Human
uuccccaggggcuccugccuuuggauucaggccccccacagcgcaggagcuucccuggggaa

SEQ ID NO: 4145159 - RNA, 57 nt, Human
uuccccaguagugacaaucaaaacuguguccagacguugccaguguccacuggggga

SEQ ID NO: 4145160 - RNA, 82 nt, Human
uuccccaucugccuuuggugacaggcaugugugggcauuccuuaccucccccaccagccugaucaucaaagcaacaagggaa

SEQ ID NO: 4145161 - RNA, 68 nt, Human
uuccccauggccuguccuauuccugucugucucacacugacacguuugaaccaggauagaccagggaa

SEQ ID NO: 4145162 - RNA, 70 nt, Human
uucccccacagguuugucugauguaaugauauauucaguguuaauuaacaauagagaacccauuugggaa

SEQ ID NO: 4145163 - RNA, 79 nt, Human
uuccccuggauccuccaccaauaaagcugaugaagcuacuugcugccacuggcucaauggugcagggagccgaggggga

SEQ ID NO: 4145164 - RNA, 88 nt, Human
uucccuaacugccuaagaagacucagaaauucaccaagaaucaaagguuuucuuugaauuucugacugucuuugucacagccagggga

SEQ ID NO: 4145165 - RNA, 77 nt, Human
uucccuaucuccaaauucagucacagucugagaugccaaagguuagggcuucaacagaugaauuugggggaggagag

SEQ ID NO: 4145166 - RNA, 87 nt, Human
uucccucaguguguauuguagcuagguuuuuguagaacauagcaauguuuaaagccaaaguaguacaaccuauacauugguuuggag

SEQ ID NO: 4145167 - RNA, 57 nt, Human
uucccucuccuacucaggaaaggacuggaaacugaucuuccuggaugugagaggcaa

SEQ ID NO: 4145168 - RNA, 90 nt, Human
uucccugauuaauuaugaucagcaaagugcuucagugggagcuuagcaggagcugacauaagcacuuucuaaccauagauuucaguggaa

SEQ ID NO: 4145169 - RNA, 127 nt, Human
uucccugccugagagagcucugggcuuuuucuaagaacauaacagaagcugugugggggagaaccucaaagcugggcuagguuuguuucagaaagagcagagaguauauauguaaaagagcagggaa

SEQ ID NO: 4145170 - RNA, 72 nt, Human
uucccugcugcagaucagcugaguccuggccacucucagugacauggcccagaaguuuggaaaggcaaggaa

SEQ ID NO: 4145171 - RNA, 59 nt, Human
uucccugggacuggccugcaccucuugucgcuugcuggugcugugcccucugcugggaa

SEQ ID NO: 4145172 - RNA, 76 nt, Human
uucccugggcugacuccuuccagcagagcuagguuagcccacccagcuuugcagcugugggaggagacucagggag

SEQ ID NO: 4145173 - RNA, 55 nt, Human
uucccuuaaccguaggacagucuguggggucacaggaagucuuuucuuaggggaa

SEQ ID NO: 4145174 - RNA, 77 nt, Human
uucccuuuggcuuuaagguuuauuuagaauucaugaaguugugucugugcugaaaagcuuugaaccguuaaagggaa

SEQ ID NO: 4145175 - RNA, 86 nt, Human
uucccuuugugaauggggcucuaagacuuagaaaggggaggugaauucccugagacagugcagaguacauuuguggcaaagcggaa

SEQ ID NO: 4145176 - RNA, 66 nt, Human
uuccgcucugaccugccauguccagugcacaccauuccugcuacacagccagaagucaggguggga

SEQ ID NO: 4145177 - RNA, 55 nt, Human
uuccgcugaaaaaucuauaggcauucccaauuccuguggaguuccaucaggggag

SEQ ID NO: 4145178 - RNA, 66 nt, Human
uuccggggccuagcugcacacccuccuguccguacucaccggagagcucugcacuaggcccuggga

SEQ ID NO: 4145179 - RNA, 108 nt, Human
uuccuaaagaucaauaaguugguggucuuuaauuacuagggucguuccguguuucuccccuuccuguuucaaagacagccauauuuguccuuuucuggucuuuaggga

SEQ ID NO: 4145180 - RNA, 95 nt, Human
uuccuaaggacccagcauuugaggccuugugccucaacccuuuucgucaaagagggaaagguagugaggucacaaucgcuuuugccuuuagagaa

SEQ ID NO: 4145181 - RNA, 70 nt, Human
uuccuacuuucauggguuuucuuuaucuauaucuaauguucagcagacaagaaauacugugaaaguugaa

SEQ ID NO: 4145182 - RNA, 66 nt, Human
uuccuagacaccugcguguguaagucccaauucucaaaacggggaaugcaaggccagggucaggag

SEQ ID NO: 4145183 - RNA, 80 nt, Human
uuccuagggcuuaaaguuuucuagaauaaguuuuucauagcaaaggauuuguuugcccacaacuauuaagccacagagaa

SEQ ID NO: 4145184 - RNA, 95 nt, Human
uuugcuucuucucuaauugaaucuaagcauguuaaaauauuguuuuuccucagugaaggcagcuuaauggauugaauuagcaauacagagguaaa

SEQ ID NO: 4145185 - RNA, 93 nt, Human
uuugcuuugccucuguacauggaacaagaacucagauuuacuucuuugguacaugaaggauuaguuccaugcugucagucuaggagaagcaaa

SEQ ID NO: 4145186 - RNA, 64 nt, Human
uuugcuuuucccugucucugauuugguacuuagcacugggucauauaccacagggaagaccaaa

SEQ ID NO: 4145187 - RNA, 130 nt, Human
uuugcuuuuccuuuacucaaaaccaggaugggcauuucuuccccaagugaauuuuaacgcagcugcugcaggcugcagaauaaaaccccgcuggagaaagaugcuccauuaaaguaagauugaagccaaa

SEQ ID NO: 4145188 - RNA, 95 nt, Human
uuuggaaaagugcaguaacuugcccaagucaaccaacuguuaaaugugcaucuggauucaaauaugggccugggugacugacuuucaaguccaag

SEQ ID NO: 4145189 - RNA, 60 nt, Human
uuuggaaauaauuccaucucauuaugcauauuugcauuugguaauggaguuauuuuuaaa

SEQ ID NO: 4145190 - RNA, 70 nt, Human
uuuggaagcuucucugccagccuguaaaaggaacuucucaggcaaucaguguagaguaacaguuuucaaa

SEQ ID NO: 4145191 - RNA, 86 nt, Human
uuuggaaggcugaggcgggcgcaucaccugaggucaggaguucgagaccagccugaccaacguggugaaaccccgucucuucuaaa

SEQ ID NO: 4145192 - RNA, 75 nt, Human
uuuggaagugaauuacuccucccagcaccauuaagagauagccuugugcccugaaagaguuaauucacuuccaga

SEQ ID NO: 4145193 - RNA, 56 nt, Human
uuuggagccuugggggcuuugaggauuuccugcucuucauuucuugggguuccaag

SEQ ID NO: 4145194 - RNA, 56 nt, Human
uuuggaggaguagacacaaaccuuucaggcauuugcuuaugucuacucugacuaaa

SEQ ID NO: 4145195 - RNA, 77 nt, Human
uuuggaguccuuuuagucuccucuaaguagaagacacuuauuugaggaagaucggagggaaacugcauaacuuugaa

SEQ ID NO: 4145196 - RNA, 57 nt, Human
uuuggaugaggacuaucguuguuuugaacugaaaaggcuagaagugccucaucuaga

SEQ ID NO: 4145197 - RNA, 86 nt, Human
uuuggauuugggauuuuuucagauuugggaauaugugcauuauauaccggguugagcaucccaaaucugaaaguccaaaaucugaa

SEQ ID NO: 4145198 - RNA, 113 nt, Human
uuuggauuuuaaaauuaagaaaaugacuguguaggugauaucagcaagauggcaguauaggaauuucuagcccugauucccucacagaaacauuaauuugacaaugaaccaaa

SEQ ID NO: 4145199 - RNA, 63 nt, Human
uuuggcagaaauguggcugggagcuucauugcugauuuuuucaguuuuaauauugcuguggaa

SEQ ID NO: 4145200 - RNA, 71 nt, Human
uuuggcagagaacacacaugauucccccaaauauguuucuggaaacggaauugagucuguucugugcugag

SEQ ID NO: 4145201 - RNA, 65 nt, Human
uuuggcaggcugcuugggucaugucugcucuucaguuggacauaccuaaggcaggaccugaagaa

SEQ ID NO: 4145202 - RNA, 57 nt, Human
uuuggcauuuaauaggugaucaggaucuauuaauucucuuuuuccuuuaaugccaag

SEQ ID NO: 4145203 - RNA, 130 nt, Human
uuuggccaguuggaggcauuuaguaagagauaggaagagcuggaaaagaguaaggucacaguacuuauuccugcagcccacuuucugccagcucaccaugggucuauugagugccuguccaguggucaag

SEQ ID NO: 4145204 - RNA, 75 nt, Human
uuuggccuuugguugguaguuucuguuuccuuucccuagguaaggauuuacaaugauucuagguaagugugcaaa

SEQ ID NO: 4145205 - RNA, 59 nt, Human
uuuggcguguuauaguuggguuggguggcugugccucucccugaacaugacacaccaga

SEQ ID NO: 4145206 - RNA, 99 nt, Human
uuuggcuugagcugcuguauucaucacaggguccuucuguuccugagcaacuauugugggguuuaugagcccuggaaggaauagcaaguuagagcugga

SEQ ID NO: 4145207 - RNA, 69 nt, Human
uuuggcuuuucaggaaaucagaacucaaguggggaggcuugcuuccuacucacugguuuucuggcuggg

SEQ ID NO: 4145208 - RNA, 63 nt, Human
uuugggaaagccuuucacagggugauagaaucuauuuuauucagcucucuagaggcacucaga

SEQ ID NO: 4145209 - RNA, 59 nt, Human
uuugggaaauaguagaaaaugugauuaaaggcauacauaaucugagcuguguucccaga

SEQ ID NO: 4145210 - RNA, 127 nt, Human
uuugggaacuguccccaccccugaggccaaucugguucugaaccuucucuuccuugccuugggcagcuuugggggaggguuagcaaaggcacagaacagaaaggcccugggcugugcaggcuccaaa

SEQ ID NO: 4145211 - RNA, 75 nt, Human
uuugugagcuuaauguggaccugguuucuaguucuaauaaacauagauauggacauuucaacauuagguuucaaa

SEQ ID NO: 4145212 - RNA, 99 nt, Human
uuugugaggugaugagugcuggggagauaggaagagaguggggaccauguuucuaaucugauucuccuaccgacgaccagcucaguuguuauuuacaaa

SEQ ID NO: 4145213 - RNA, 92 nt, Human
uuugugauggaauuucaggcaggaagggaggacuuguuuugacagacagaagccugguccucugucuugucugcaacugcugccauaacaaa

SEQ ID NO: 4145214 - RNA, 130 nt, Human
uuugugcauaauuaaguaguugaugcuuuugagcugcuucuuauaaugugucucuuguguuaaggugcaucuagugcaguuagugaagcagcuuagaaucuacugcccuaaaugccccuucuggcacagg

SEQ ID NO: 4145215 - RNA, 88 nt, Human
uuugugcaugcauaugucaacugugcugguuaauaaucacauuacaaauuauuaaucauacugcaagucaaugaaaugugaguacaaa

SEQ ID NO: 4145216 - RNA, 81 nt, Human
uuugugcccuucuacccuuggcuguguugccugcccucugguagagacagcaauggcaacagcaagcaaagaaggcccaga

SEQ ID NO: 4145217 - RNA, 72 nt, Human
uuugugcucuuagucauuuuuauucuaucucuacacugauugagguuguuacaugaauacugagagcacaaa

SEQ ID NO: 4145218 - RNA, 60 nt, Human
uuugugcuggaaucuggcugccaccgcaauauccugcaggaagcaaccagguccaacaaa

SEQ ID NO: 4145219 - RNA, 73 nt, Human
uuuguggcagauguaaucugacagcuggagugaaguuacgagauuuucuaguguaguuugcaccuugagcaga

SEQ ID NO: 4145220 - RNA, 56 nt, Human
uuugugggggagaaaugugacauuuagaacaaaugucauagcauuucuucaauaaa

SEQ ID NO: 4145221 - RNA, 62 nt, Human
uuuguguaccuuguacauuuguauugucaacuucacuagcgaacagauucauggugcacaga

SEQ ID NO: 4145222 - RNA, 60 nt, Human
uuuguguucugauuuuucuacaaugaauaugaauuacuuguguggaaaaacagaagcaga

SEQ ID NO: 4145223 - RNA, 74 nt, Human
uuuguguuguguuaccauugucuaggucauuguuacuuaaguacaguacuugccauaugguauucaaguacaaa

SEQ ID NO: 4145224 - RNA, 91 nt, Human
uuuguguuuugauuuuucauuuguccaaauacuauguagggauaugauuuucuaaagacaaauauagugaccagguggaacaagggacaaa

SEQ ID NO: 4145225 - RNA, 59 nt, Human
uuuguuaggguuucagcuagccaaaaaugguauuuucauuugcugaaauucuaaacaaa

SEQ ID NO: 4145226 - RNA, 70 nt, Human
uuuguuauuucauuuugguuaugccauaaauaacacccaauuuuagcauuccugggaugauuuaggcaag

SEQ ID NO: 4145227 - RNA, 68 nt, Human
uuuguucaaauuuuccuaucuggguucuaaggaauguucuauuuucagguagaaauagauuuggcaaa

SEQ ID NO: 4145228 - RNA, 83 nt, Human
uuuguucauuuaacaaauauuuguugaguucuuaugaugugccaaacacuguucuaggagccaagaauauagaaaugaauaaa

SEQ ID NO: 4145229 - RNA, 97 nt, Human
uuuguuccuucuaaggauuccagugagggaguuggguguauaggaaggaaaucuuauuguccaaguuucccuuugaaaccucuuagaauggaauaaa

SEQ ID NO: 4145230 - RNA, 64 nt, Human
uuuguugaaugaauagguguccagaugggaggaaggucucagccccuauucaauucaaaccaaa

SEQ ID NO: 4145231 - RNA, 64 nt, Human
uuuguuguguguguauaugguaucuggaacauggaccugugauuaccagccugacaccaacaaa

SEQ ID NO: 4145232 - RNA, 64 nt, Human
uuuguuuauagauggccacaaugacagaguugcauaguugugucagaaacaucugguaagcaaa

SEQ ID NO: 4145233 - RNA, 60 nt, Human
uuuguuucaucagcuccagguuaggcaaacacaaguagcucuggccugcagugaagcaag

SEQ ID NO: 4145234 - RNA, 84 nt, Human
uuuguuucugaaugccaggcucuguguucagccuagcagaaaggccucuuauccuuuugggcucccacaggcuuguggaauaaa

SEQ ID NO: 4145235 - RNA, 55 nt, Human
uuuguuuuauuggggaaaaugauuuuuguucauguucuuuuucugauaaaacaag

SEQ ID NO: 4145236 - RNA, 88 nt, Human
uuuguuuuguuuuuaccgaguacuuaaaaauuaucaaaguggaaagcuuuuuuuacuugaauguuuugggugucuggaauaaagcaaa

SEQ ID NO: 4145237 - RNA, 55 nt, Human
uuuguuuuuggaaguccccuuaggguuucaaggccccaaggcuucaaagaguaga

SEQ ID NO: 4145238 - RNA, 129 nt, Human
uuuuaacaagaagcccuggaaagaaaugcugguuuaauaauuaguuauugaucguggcuaaugccaucgugaauaccacuggauuagucagagaccaguaaaucggagcacgggcauuucccuugucaa

SEQ ID NO: 4145239 - RNA, 64 nt, Human
uuuuaacaaggaucaacuuuuaggcaaaucauagaagacuugucuaugguuacauccuagaaga

SEQ ID NO: 4145240 - RNA, 130 nt, Human
uuuuaacuaagggaaccaaccagcugcuuauaaccauggauguauguuuuacgcuuguacaguaaaaguacaaaguaauguauaauaucgacucugacuguuaaggaaugcuuguauccagaaguuuuaa

SEQ ID NO: 4145241 - RNA, 67 nt, Human
uuuuaacuuuaccauuucuucaguuguaaaaugaugcaccaacugacagugugcccggagguuagaa

SEQ ID NO: 4145242 - RNA, 93 nt, Human
uuuuaaggacguaugaauauggaguuuacuuaguguaauauuuguguuacacccacaaaaaauuccaaauugcagauguuuuauaccuuaaag

SEQ ID NO: 4145243 - RNA, 57 nt, Human
uuuuaaggugcuuacuguguguguuguauuucauuuccacaguauucuuccuuaaaa

SEQ ID NO: 4145244 - RNA, 92 nt, Human
uuuuaaucuuauuucuccauccagagucauggcuagaauaaggaagagagacagcauuugguacugacucacaguggagaaagagguagaga

SEQ ID NO: 4145245 - RNA, 59 nt, Human
uuuuaauugcaauuauggucccuuaugaguccccugggagggcaugauugcaauuaaaa

SEQ ID NO: 4145246 - RNA, 77 nt, Human
uuuuacaagaggcuuuucuucagguaucaauagucucaucccauuuuaucgaauugcacuaggagcuucuuguagaa

SEQ ID NO: 4145247 - RNA, 66 nt, Human
uuuuacaagcugagucguuaaaacaaaugguuaaauucaucuggacuagcuccuucagcuguaaaa

SEQ ID NO: 4145248 - RNA, 64 nt, Human
uuuuacacuucgguugugugcauacacuuguguauuugauguuuuaugcaacaaaaguguaaga

SEQ ID NO: 4145249 - RNA, 75 nt, Human
uuuuacugacuuaauauagauuggcuauggaauugacccaagguuuacauuauagucuauauugugaaaguaaaa

SEQ ID NO: 4145250 - RNA, 90 nt, Human
uuuuacugucagauuucucaucaccagcuuuaacaggaaccuuuggauggaaacccugggagggagaaaucagagcugacccaaguagaa

SEQ ID NO: 4145251 - RNA, 92 nt, Human
uuuuagaagaaaagucucccuuuaagaccauuauauaugaugagauauugucuggguuauaguuaguaggucauuaaagggauugucugaaa

SEQ ID NO: 4145252 - RNA, 60 nt, Human
uuuuagaagugccuauccuaugccaaggagaggcauaggauacuauucucauuuuugaaa

SEQ ID NO: 4145253 - RNA, 78 nt, Human
uuuuagaguccuugcauaucugaaaauguuucuuccagacugugaaacaugagucugugugaaagugauucauugaga

SEQ ID NO: 4145254 - RNA, 119 nt, Human
uuuuagcacugaauaauauuccacagucuggaugcaccaaaguuguugucuuuuuuuccuccauucaccuacuaaaggacaucuugguugcuuccaaguuuuggcaauuaggacuaaag

SEQ ID NO: 4145255 - RNA, 84 nt, Human
uuuuagcagcuguuuuuccagucucuggaaggcuauugucuucucaucugaugcuggagcuggaagaguaggcaguugguaaga

SEQ ID NO: 4145256 - RNA, 80 nt, Human
aaaaaaauuauuucauugauuggcuucuauacauguuuucuugggaauaugugggugcuaaucaaaaugaugauuuuuuu

SEQ ID NO: 4145257 - RNA, 74 nt, Human
aaaaaagugugaauuuuagagucaggagauauuccagaaucauuucacucuuggcuuucucauuuaccugguuu

SEQ ID NO: 4145258 - RNA, 60 nt, Human
aaaaaccuuucauugcaaauguuugugccuggauggauuuagaauugcagaaagguuuuu

SEQ ID NO: 4145259 - RNA, 57 nt, Human
aaaaacucugugcgagcuaugagaguguaagcuuuauaguuauauacagauguuuuu

SEQ ID NO: 4145260 - RNA, 88 nt, Human
aaaaagacacagcuaaguuuagagagaauggggacaggcacuaggaguuuccaaguuuucuuugagcucacacauagauugccuuuuu

SEQ ID NO: 4145261 - RNA, 92 nt, Human
aaaaagcagcauguacuuggauaagacaaaccuagggcuuccuucgaguuaaggaacagucuuggaagucuuguuauaguuaaugguuuuuu

SEQ ID NO: 4145262 - RNA, 125 nt, Human
aaaaagucuaaacuaugugaaggaagugguuuuacaaagagaaagaucaauugccuacacaauucaaauuuucuagugaauuuuuuaauuugugguuuacuuuauucauuuuggaguuacuuuuu

SEQ ID NO: 4145263 - RNA, 78 nt, Human
aaaaagucugauuuauguuaggagaauuuagcuugcccuuuggucucucaguuuuuaaaugauauaauuagacuuuuu

SEQ ID NO: 4145264 - RNA, 57 nt, Human
aaaaaucuuggagauuuaugugggaaauaacaucuacugaacauccauaagauuuuu

SEQ ID NO: 4145265 - RNA, 64 nt, Human
aaaaauuaggccagaggagcagcuuuggaguuuauuuucuccaagguuuucuggcacuauuuuu

SEQ ID NO: 4145266 - RNA, 99 nt, Human
aaaacacaaauagaaagcuucaaauuaguggaauaauaaugaucaaugaaacugaaaauauuacugaauuauuaauuuguguugugucuguuuuguuuu

SEQ ID NO: 4145267 - RNA, 80 nt, Human
aaaacagaggugccugggcccauccuagaucaauuaacucaaagucucugcaguuggagcccagacacuggcauuguuuu

SEQ ID NO: 4145268 - RNA, 69 nt, Human
aaaacaugcuggauuuagaauauaaccaacaaccuaacuaggucaugagauguucugagucaauguuuu

SEQ ID NO: 4145269 - RNA, 130 nt, Human
aaaacauguauaggagaaucuaaauaaaaguuacuuggaugaaaaaugagaauuuucccucugaagcagaacuagagagaagacguguuucauucauuuguucuuugauucauucauuuauucaacagcu

SEQ ID NO: 4145270 - RNA, 65 nt, Human
aaaaccacuuccuugcuauugggcuguugcaaaagauaauagauaauaguuucagaaguuguuuu

SEQ ID NO: 4145271 - RNA, 104 nt, Human
aaaaccagaaccaaguuaauuagguuuacugaauuaguggaacaucuaaauuggauuccauuccgcuguuuaguugaaguuuaucuuagcuuggagcugauuuu

SEQ ID NO: 4145272 - RNA, 59 nt, Human
aaaaccagaaucaguaucucccacacucacaacugaguucuggaugugauuuugguuuu

SEQ ID NO: 4145273 - RNA, 129 nt, Human
aaaacuaaaggguggaguauccagaacuuuggguagaacuuucagaaauuccaaagaaagacugacauucuuuggguacucgaaaaguugaacugagaugcuucuggaaacuuaauuucauuauuauuu

SEQ ID NO: 4145274 - RNA, 114 nt, Human
aaaacuacugaauuuugauauuuccagcucuuuauugccaauauucuugggugauaaacuugggaaagcccauugacaaagaagugauuguauuaaaaggaaacagaaaguuuu

SEQ ID NO: 4145275 - RNA, 88 nt, Human
aaaacucuauugcuauuauucuguugcuuuuacaguauguaguauauuauguuuacuggaagaaaaaauggaaaaacaauggaguuuu

SEQ ID NO: 4145276 - RNA, 56 nt, Human
aaaacugaaauacgauccaauggcagauccgccugcaaggaaggugauucaguuuu

SEQ ID NO: 4145277 - RNA, 62 nt, Human
aaaacugacuucuugaaauggaaggccgauguguguucccauguuaccaaggagucacuuuu

SEQ ID NO: 4145278 - RNA, 68 nt, Human
aaaacugggcagcuguaucagggagugugacuuuguaccauauucucuuuuuauaccuguucauuuuu

SEQ ID NO: 4145279 - RNA, 76 nt, Human
aaaagaaaaaaaauucuggcaaaauucacaagaaauggcaaauuagugaauuguugcccauguuuuuauuucuuuu

SEQ ID NO: 4145280 - RNA, 129 nt, Human
aaaagaaaacuuuccaaaucuaaaguauucguucucaaagucgaccaagaggaaucaguuacauacuaugacugcauucauuugguuggcauugucauacuuacuuaugauugaugauaaaucucuuuu

SEQ ID NO: 4145281 - RNA, 129 nt, Human
aaaagaaacagaugaggaaagaguagcaaaaucaagacugucccaggaagugagugucagucaaagguuuugaaaucccucaaauaguuacuucugcugucuugguuuuguccaccucccuucuuuuuu

SEQ ID NO: 4145282 - RNA, 92 nt, Human
aaaagacggacaagcagaaguaauagccuaauagucacccauaaucccaccauggggagauaacaugguuaguguuuuuaugucuguguuuu

SEQ ID NO: 4145283 - RNA, 74 nt, Human
aaaagaucaugcuacgaauggugauggaguccagucacacccgucucucuccagagucaucgagcauuccuuuu

SEQ ID NO: 4145284 - RNA, 80 nt, Human
aaaagauuaaugauguuguagauugugugcugacaaauuggagccuccaaugcacauaacugaccacaucuaaaacuuuu

SEQ ID NO: 4145285 - RNA, 91 nt, Human
aaaagauuuuaucuggaagaauauggaaguuaccugacuucagccauggcuggaucuagggguuuucauaauuuuauugggauucucuuuu

SEQ ID NO: 4145286 - RNA, 77 nt, Human
aaaagcacucguuaguauuucugcaaacccaaggauuugguacuccuggcaaagcagggcuauuuggagguguuuuu

SEQ ID NO: 4145287 - RNA, 85 nt, Human
aaaaggggaucaguaagugaauaaugaguaaagcugucuaauauaaacaauuauaaucauuauuuucuuguauugacuaccuuuu

SEQ ID NO: 4145288 - RNA, 55 nt, Human
aaaagucugcucucauuucagauggacaaguaaaucagaaagaagguagauuuuu

SEQ ID NO: 4145289 - RNA, 78 nt, Human
aaaaguuacacgacuauuuaugugacauggagucguauuaguagugacgugcccacauaaauagcacugugaauuuuu

SEQ ID NO: 4145290 - RNA, 63 nt, Human
aaaaguuacaguuggaacugugaaaaaguggauacgcuuauuuuacaccaccuagucauuuuu

SEQ ID NO: 4145291 - RNA, 56 nt, Human
aaaggggaucgaugcacucuggggccagagacccugagcugcaccuugaccuguuu

SEQ ID NO: 4145292 - RNA, 77 nt, Human
aaaggguagagguuugauauguggaauauuuaucucagauuauugagauggagaaugacaauuaagguuuuccuuuu

SEQ ID NO: 4145293 - RNA, 60 nt, Human
aaaggguugcagcauagaaguuuccaggcaaauuggugauugaaugcuugcuaacacuuu

SEQ ID NO: 4145294 - RNA, 93 nt, Human
aaagguaaagguuauaaagguuaggggaaagggaagaauugagcaugaaccccaggcuucuagccuugaugacugggagagugagaugccuuu

SEQ ID NO: 4145295 - RNA, 130 nt, Human
aaagguaagggcagggcugugggcaggaugagggguaaaggcguauugggagugggauggggagacucuaacgccauuccacauaggccuucaugacaccugcuuggguuagccgcuaaccccauuccuu

SEQ ID NO: 4145296 - RNA, 57 nt, Human
aaagguaguacuucuagaagggaggcgaucagaguccaauuaggagauauuacuuuu

SEQ ID NO: 4145297 - RNA, 77 nt, Human
aaagguauaaguucaucuuuuuuugcauguggauauucaauuggaccagugaccauuuguugaaaagauuauccuuu

SEQ ID NO: 4145298 - RNA, 59 nt, Human
aaaggucccuugucggagggggaugggaggaauucauuauuuugucagaagggacuuuu

SEQ ID NO: 4145299 - RNA, 65 nt, Human
aaagguggugaguacaguuagguguggcaauuaaugagccaccaucugcugaaacaucacacuuu

SEQ ID NO: 4145300 - RNA, 62 nt, Human
aaagguuuauuuguugcucacaucuugacccaguacaggucagcugagcagaguaaggcuuu

SEQ ID NO: 4145301 - RNA, 55 nt, Human
aaagguuuuauucugagcucugggcccauauuccaauugcuuuguggaagccuuu

SEQ ID NO: 4145302 - RNA, 58 nt, Human
aaaguaauuggcaggauucagucucugguuguuacagauucuaaguccuaguuauuuu

SEQ ID NO: 4145303 - RNA, 87 nt, Human
aaaguaguggcagagucaauaauuuuauggagagaauugggaauuuugaauccucucccuuuguuguuucaagaaaugcacugcuuu

SEQ ID NO: 4145304 - RNA, 129 nt, Human
aaaguauugcacugaaaauaacacacuugaggggaaagauuauggguugaagcagcaagucuauggaucacaucacuguucugccaacuuugguuaccaaauuaggugaguucaauucaacaaaucuuu

SEQ ID NO: 4145305 - RNA, 81 nt, Human
aaagucacaguuagaaagugucugcuuggguccugaaucuaucuaauuccuagcccagugccuauucuacacauugacuuu

SEQ ID NO: 4145306 - RNA, 55 nt, Human
aaagucacgcugaugggaaauggcaacaucaggauucccacccaagugugucuuu

SEQ ID NO: 4145307 - RNA, 55 nt, Human
aaagucagaaauuguguaaagugguagcccauucaacuuugcauuuccugauuuu

SEQ ID NO: 4145308 - RNA, 55 nt, Human
aaagucauugcuguuaucaaugcugcacaucuccagaguggcagccuuuggcuuu

SEQ ID NO: 4145309 - RNA, 62 nt, Human
aaagucccuugugccauguaagaugauuuaugcacagguucuggcauuuguacagggacuuu

SEQ ID NO: 4145310 - RNA, 90 nt, Human
aaagucuagcuaaaaucagugcuguaaacaaaaggaaacauuuacguuuguuucuguuugccauauauaguagccuugauuuuuuacuuu

SEQ ID NO: 4145311 - RNA, 104 nt, Human
aaagucuuuguaauugggcuaagugugcuuucaugaugauucuauucuccccaaggaagaaucauccugcaagagucuccucagccauuaugcaaacagauuuu

SEQ ID NO: 4145312 - RNA, 74 nt, Human
aaagugaagagaugauggcagccagagggccagaaccuucucaggccacuuggaggaugccgcauucugacuuu

SEQ ID NO: 4145313 - RNA, 115 nt, Human
aaagugauacugaaagaagaaguuucugcucaugguauacagacuugcuaagauauuuagugccaccuuccaaguaucaugagcaaaaacauuguucuucuucuaggacuacuuu

SEQ ID NO: 4145314 - RNA, 58 nt, Human
aaagugauuuagucuuauaaaggggaucauuucacgaccucaaagucugagucacuuu

SEQ ID NO: 4145315 - RNA, 65 nt, Human
aaagugcaucaaaugacuucccccaccuuucccaugaauuagggugaaacuguuuggggcauuuu

SEQ ID NO: 4145316 - RNA, 69 nt, Human
aaagugcugggauuacaagugugagccacugugcccagcucacaccuauaaucccagucccagcauuuu

SEQ ID NO: 4145317 - RNA, 55 nt, Human
aaagugcugggauuacagacgugagccaccacgccuggccuaucauaagcauuuu

SEQ ID NO: 4145318 - RNA, 79 nt, Human
aaagugugagcuggaaagguaggauuucaagaccagcugagucuauaagaggucaucaaaucuaccugcuccccacuuu

SEQ ID NO: 4145319 - RNA, 55 nt, Human
aaaguuaagaaagggaugcuuaagggcucuuuggagcauccaugacuuuggcuuu

SEQ ID NO: 4145320 - RNA, 56 nt, Human
aacacauauuuuugcugagcaugguucugaaaaccacagaagcaaaaguagguguu

SEQ ID NO: 4145321 - RNA, 130 nt, Human
aacaccccaugaauuaugaaguuuuccagucuggcugguaggaauaggcacaauucccagacuugugugagugcuggguacuguucccauuaacacuuucaggugguucuuuuccuaacuuuggguuguu

SEQ ID NO: 4145322 - RNA, 57 nt, Human
aacacugcugcuggguucuguguguuugugccucacauaggauuccagaacacuguu

SEQ ID NO: 4145323 - RNA, 80 nt, Human
aacacuuacuugugcaucugagauuuuaaauaauaugguauucuggaauguuugaagcuccgguguauaggaaugguguu

SEQ ID NO: 4145324 - RNA, 66 nt, Human
aacacuucucaucacugcaagccauagcuuuaaauggcggugaggucugcaguuguagaagauguu

SEQ ID NO: 4145325 - RNA, 56 nt, Human
aacacuuuggaugcagaaccaagacaauuuccauuugguaugcaucccaagguguu

SEQ ID NO: 4145326 - RNA, 64 nt, Human
aacagaaaauuuccguugcccagguguuggguuuaucaccuggaagauaugcugauucucuguu

SEQ ID NO: 4145327 - RNA, 64 nt, Human
aacagaaagaggaugcagaucucauuuuuauuuggaggaugcagaucacauuuuucugucuguu

SEQ ID NO: 4145328 - RNA, 57 nt, Human
aacagaaaugagcgugucugggccuauacaaagaaccccagaagcacucuucauguu

SEQ ID NO: 4145329 - RNA, 79 nt, Human
aacagaacccgagugugaaucuuucaccacuggauuugcguuuccuccauaaaacuucaugcuuaacaggguuucuguu

SEQ ID NO: 4145330 - RNA, 64 nt, Human
aacagacagaaaaaugugaucugcauccuccaaauaaaaaugagaucugcauccucuuucuguu

SEQ ID NO: 4145331 - RNA, 67 nt, Human
aacagagcugguaagugguagaggccuaaauucaacucuagaaaucugugcuuucaaccagucuguu

SEQ ID NO: 4145332 - RNA, 130 nt, Human
aacagauaaugaauuauugucagccuacucuccuccagcugugcaagacgccauagacucugucuucaugcaccucacagcuaggugggagugcugggaaauaaacguaaaaauaaauuauuugucauuu

SEQ ID NO: 4145333 - RNA, 77 nt, Human
aacaggaauaguggagcaacaagauagauugacacugucaaauccucaugccuaucuuugguugacuacauccuguu

SEQ ID NO: 4145334 - RNA, 76 nt, Human
aacaggcggaagcaagucccacccugcccuuccaggggauggggcccggcugggcagaggggcgcuucccucuguu

SEQ ID NO: 4145335 - RNA, 55 nt, Human
aacaggcuaaauuguccauuucuccagcaguuuugaggcagacaaggagucuguu

SEQ ID NO: 4145336 - RNA, 78 nt, Human
aacagggagaacugccuucugcucaggguucagucaccggacugagggcccaagcaaggcgggcucacguccucuguu

SEQ ID NO: 4145337 - RNA, 87 nt, Human
aacagggcagguuggaugcuguagugaugacaaaguuaaaggaaagucacucuucaguucagcaucagacagccaaauugcucuguu

SEQ ID NO: 4145338 - RNA, 88 nt, Human
aacaguaaaagagacaguuacuuaaguuugcuuuguaaauaacuuaaauuuuacaaggaaaaucuugaaguacagaauucuuacuguu

SEQ ID NO: 4145339 - RNA, 55 nt, Human
aacaguacauaaugcgcaaaaccgggucugaucgugguggaguguuauguguguu

SEQ ID NO: 4145340 - RNA, 60 nt, Human
aacaguggucuggggaguggagguggcuagauugaauguccuccagaaaagaccucuguu

SEQ ID NO: 4145341 - RNA, 57 nt, Human
aacauaggucugagagcauccugguuaagaggaaccuggcuucuuuacaucuguguu

SEQ ID NO: 4145342 - RNA, 62 nt, Human
aacauauaaacucuuaaguucagagacguaaguucauggaacuuuuagaguuuaacaguguu

SEQ ID NO: 4145343 - RNA, 85 nt, Human
aacauaugacaucauuacaaaggacagcagaaaaauaauuggaauuauauuguugugagguucuuauauguggugguguaauguu

SEQ ID NO: 4145344 - RNA, 64 nt, Human
aacaucagagccauuuaaagucaguuuuugccgcuuaagaacacuuuuaaauggcuuguaaguu

SEQ ID NO: 4145345 - RNA, 89 nt, Human
aacaucaggaucugcaaauaggggugugaauaaggacgaaucgauaggcucuaauuuauggcauauuccucauuguagaguucucuguu

SEQ ID NO: 4145346 - RNA, 72 nt, Human
aacaucauagacacaucaaggaucaguuuugccagcuggcaaggacuggaaaagguguaguguguguguguu

SEQ ID NO: 4145347 - RNA, 65 nt, Human
aacaucuaguaauucaguuuucagaucguuacgaguuugaguuuuaccuguauuacuggcauguu

SEQ ID NO: 4145348 - RNA, 55 nt, Human
aacaucucucucacuucuuuucuguugacuucaauauggcaguggagggguaguu

SEQ ID NO: 4145349 - RNA, 62 nt, Human
aacaucugggcccugauuuugggcauccucacgaccauucugcucaucgucaucccaguguu

SEQ ID NO: 4145350 - RNA, 67 nt, Human
aacaucuugucuaaugucagcuaccaccaccucaauggggcacaccuuuggcauuuagacaagaguu

SEQ ID NO: 4145351 - RNA, 62 nt, Human
aacaugaaaguugcuaagugcagugaagguucucccugcuccuuucauccaauucucauguu

SEQ ID NO: 4145352 - RNA, 55 nt, Human
aacaugagauguucaguuacuguggaagagcuuccacagaauauacauuuuaguu

SEQ ID NO: 4145353 - RNA, 77 nt, Human
aacaugagguauaguucuauuagaugacauccugguggcuuuauucauuuagugcuauacuaaggauuucucauguu

SEQ ID NO: 4145354 - RNA, 62 nt, Human
aacaugauguauuuucuugucuguggguuguuggcuuccaaagucauggaaaacaucauguu

SEQ ID NO: 4145355 - RNA, 128 nt, Human
aacaugcaggaggcaaugggaacaaacuacggggaaauagagcuggaaccuugaucaggcugcaccugaagacugauuuuccacuaggcuuuuccauauacaguuguuccuuauuauuccuuuuuguu

SEQ ID NO: 4145356 - RNA, 65 nt, Human
aacauggaggcagacagacguggguucaaauuccaagucuguuccacguucgucugucccauguu

SEQ ID NO: 4145357 - RNA, 70 nt, Human
aacauucaaguucugguuuaugggacucagugagcuucuuuuggauaaauauggacuauagcuuguuguu

SEQ ID NO: 4145358 - RNA, 116 nt, Human
aacauuccugagaucucagggaaacggucacccauguuuuaguuuugucucauacuauauaaauuagaagcaaaguaaauuucugcauguguacuccccugagaccagacaauguu

SEQ ID NO: 4145359 - RNA, 61 nt, Human
aacauucuuuagcucuuccugcacuuccucaccguguaggcuccaugauggcagagauguu

SEQ ID NO: 4145360 - RNA, 85 nt, Human
aacauuuauuucucugggucuuuacuagauuucacauaaacacacacugaaaacauuagagaugcccuagcugaaguacuguguu

SEQ ID NO: 4145361 - RNA, 66 nt, Human
aacauuucauaacuugacuuuucucuggacuauauuccaaugagauuuucauguggugcagauguu

SEQ ID NO: 4145362 - RNA, 74 nt, Human
aacauuuccuuuggucuugaugaacuguuaggucaguuuaccucaaacuguuuuuuggccuaaggaaaucuguu

SEQ ID NO: 4145363 - RNA, 85 nt, Human
aacauuuugaauauagcagaggcaaggaugugaauguuugcuuggcgcuauuuaucaggaagugcuucugcuuguuuauuauguu

SEQ ID NO: 4145364 - RNA, 59 nt, Human
aaccacaugaaaagaguaauauguguuuauagaguauauauauauguaugcgugugguu

SEQ ID NO: 4145365 - RNA, 66 nt, Human
aaccagacauggaaauuuaguguuacgagcuaaauugugaccucccaaaauuccuauguugacguu

SEQ ID NO: 4145366 - RNA, 109 nt, Human
aaccagaccuuuuuuuuuguugagcauuauauuauaaaagacgugaaucauaacuucaaauguguuucugagaguuguaguguauccacucucaaagugucguuugguu

SEQ ID NO: 4145367 - RNA, 66 nt, Human
aagaaucuaugguacauccaagaggucggcaaauagucaaauuaucuggauguaucuggaugucuu

SEQ ID NO: 4145368 - RNA, 69 nt, Human
aagaaugccaauaagacacacaacugucaaggggaacaaacacuucugcuugcuggucaggguauucuu

SEQ ID NO: 4145369 - RNA, 74 nt, Human
aagaauguaagaguacuuuaguaggcaaauuaaaaauguuuaauuucuagggacuaaggugcuauaacuuucuu

SEQ ID NO: 4145370 - RNA, 77 nt, Human
aagaaugugauuuguuuauaguuauaagaaaacguugaauuuuuuuuagcaaaacauuaugucugugacacauucuu

SEQ ID NO: 4145371 - RNA, 63 nt, Human
aagacagagaaagggugaauuccuucucccuucuggagcagggcuauuucuuuuucugcucuu

SEQ ID NO: 4145372 - RNA, 57 nt, Human
aagacagagugcccaaggaguuuggucccucccugggguuccuggcucuucuguuuu

SEQ ID NO: 4145373 - RNA, 60 nt, Human
aagacaggcucggcacuagccucagccccucccuaugcugaggaagccaaaggcugucuu

SEQ ID NO: 4145374 - RNA, 103 nt, Human
aagacagucuaggaggaggaggagguagggugugaaacagccaggcucucuccaaaucccaaguguugacacagccaucuugucccaucccuggaagccucuu

SEQ ID NO: 4145375 - RNA, 78 nt, Human
aagacauuuauggcuguguuacccaaggucaggaaaauguuaaaaccuccuuggcuaguacuggccagcuugugucuu

SEQ ID NO: 4145376 - RNA, 56 nt, Human
aacagagcuggugacuccagguagccauagcaacugugagguaacgcugcucuguu

SEQ ID NO: 4145377 - RNA, 77 nt, Human
aacagaguggauguggcacaugcugcugcuucugggcgcaaguuuuaagagccauugugcauaccaccagcucuguu

SEQ ID NO: 4145378 - RNA, 57 nt, Human
aacagcacauaagccgaagacuguguguguguguugcacagguacauuauggcuguu

SEQ ID NO: 4145379 - RNA, 72 nt, Human
aacagcacuuuugauauccuauacaaguaaaggaaccccucuauuuguucucaggaucauccuaggucuguu

SEQ ID NO: 4145380 - RNA, 62 nt, Human
aacagcagggggaccugcuggucaccagauuuguccacccccgugcaggugccacugcuguu

SEQ ID NO: 4145381 - RNA, 81 nt, Human
aacagcuguucugcagagaagcaauugggaaguucuggucucugccaauauuuucuaaguguguuucauaggacacuaguu

SEQ ID NO: 4145382 - RNA, 64 nt, Human
aacagcuguuggccagaauccaggaggucaaaacuggccagcuguaucuuuggccagcaguguu

SEQ ID NO: 4145383 - RNA, 80 nt, Human
aacaggauugaauugaguucuacauaaccugcucuauuuuagccugucaacuguguauaacucuuaauucauuagcuguu

SEQ ID NO: 4145384 - RNA, 93 nt, Human
aacaggcaccucugaaguuauauauguugaaaauuuaugagcagggacaguagaaccuacacuauuuuggaauaugugacuuuccucccuguu

SEQ ID NO: 4145385 - RNA, 73 nt, Human
aacagguuuaaugauggucauggcaacuuuuuggcacagugaaaaauaucgcccaugaucaacguguucuguu

SEQ ID NO: 4145386 - RNA, 80 nt, Human
aacaguaaaagcauccagaugggccagggguuuguucauguacuuacagaacaucuagguucucaucgauauuuucuguu

SEQ ID NO: 4145387 - RNA, 96 nt, Human
aacaguaauguaccagccuggcucaguuaggucagaaacagaucaaaaagcagaaaagucggcuguuuccuaacugagcugcuuugcuuagcuguu

SEQ ID NO: 4145388 - RNA, 84 nt, Human
aacaguaggccauaaacaugcauuacaauugcauaguauuauugauauuauugucaggugauguguguaggagucucaauuguu

SEQ ID NO: 4145389 - RNA, 65 nt, Human
aacaguaggguacagcccuggauucgcacugugaguucagauccuggcucugccacucauuuguu

SEQ ID NO: 4145390 - RNA, 55 nt, Human
aacagucuuccuacggccauuaucauaugaagugugguggaaaguaaagaguguu

SEQ ID NO: 4145391 - RNA, 82 nt, Human
aacagugagccacugcuguguacuggcugugcugcuaggaucuggggcugagccaugggcacugcagaguagcuuuccuguu

SEQ ID NO: 4145392 - RNA, 56 nt, Human
aacaguuggaagggccuggaucuuuagcucugggucuuuggacuuuccaauuuguu

SEQ ID NO: 4145393 - RNA, 76 nt, Human
aacaguugucaccagcugcuccucaggaacugcuugacuucuuagcaaaucuuuaagaucacuuggugagauuguu

SEQ ID NO: 4145394 - RNA, 76 nt, Human
aacauauaaguuucccuuaaauuauggcaucuauuugguaaacaguauagaauaaucugaggaaaugcuauguguu

SEQ ID NO: 4145395 - RNA, 57 nt, Human
aacauauuugguuaacugcugagucaacuuucuguuuagaucuuaggcaaauguguu

SEQ ID NO: 4145396 - RNA, 58 nt, Human
aacaucaagccauaauggcagccaguggcuagauauacugggcuguuacuugacuguu

SEQ ID NO: 4145397 - RNA, 62 nt, Human
aacauccauguuuuuaagauuuuaucuuagguaaguagaauugguuggggaauguggaaguu

SEQ ID NO: 4145398 - RNA, 76 nt, Human
aacaucucaagucaaaccuugcucacaggagggaauaaacccaucaggagcaacaucuuugaaucaugaguauguu

SEQ ID NO: 4145399 - RNA, 65 nt, Human
aacaugagcauucuugugcuugcuuccuggugcuaggucauaaagaaugagaauguucaacuguu

SEQ ID NO: 4145400 - RNA, 66 nt, Human
aacaugaggcucucaggggagcuguauugguaaaugauggucucuccacaggggcaucucguuguu

SEQ ID NO: 4145401 - RNA, 59 nt, Human
aacaugcccgcuguaugccauuccuacuggacaggaguccucgcugucagcugcauguu

SEQ ID NO: 4145402 - RNA, 91 nt, Human
aacaugcuauuggagugauuaaagcuaggauaaaauggauuugaaucaauuuuuauaauaguuugguuuucagauuacccaguuucauguu

SEQ ID NO: 4145403 - RNA, 103 nt, Human
aacauuauauucuucagucagggccgcauugguggacaugugguagcuaucauucuguaugcuacacucaaucagugcuauuaggcagacugaaauaucuguu

SEQ ID NO: 4145404 - RNA, 105 nt, Human
aacauuauuauuacuuaacagcuuuuaugggaccagccauuccugagauuaaaugagaaacuaaagugagucccugguuagaagguugugaucuaauacauugcu

SEQ ID NO: 4145405 - RNA, 59 nt, Human
aacauugagcugguggagaggaguauaaacaucaucccuuccaucacuuugcuuauguu

SEQ ID NO: 4145406 - RNA, 107 nt, Human
aacauuggguucuuuuguguucuaccuucaaaacaaucuguuugcauuugaaauauaaguguuuaagcuuuuuaggaguuaguguaauaagagaaugugaauauguu

SEQ ID NO: 4145407 - RNA, 58 nt, Human
aacauuguuuugcacaacucuucauaaagaaagaguuuuaauggugccagacacuguu

SEQ ID NO: 4145408 - RNA, 88 nt, Human
aacauuuagaccgacauguuuauuauuuuauguaauguauuuauauagaguuggugugcuuaaaguaguggauuguuauugaaauguu

SEQ ID NO: 4145409 - RNA, 58 nt, Human
aacauuugugaaguacuuagauuaugccagaacgugcuauauacuuuucacagauguu

SEQ ID NO: 4145410 - RNA, 67 nt, Human
aacauuuuuuagagucccacauuuccuuauuuauacuguguuugaauguacggcuuuggauaguguu

SEQ ID NO: 4145411 - RNA, 82 nt, Human
aaccaauugaguguaagauagccuuggguuauuuuaaaugaguuaaggaagcccaagucucaucuucaguaccauauugguu

SEQ ID NO: 4145412 - RNA, 59 nt, Human
aaccacaaugugaagaaggaggugcuccugauugggcuucuuuucucagcuuugugguu

SEQ ID NO: 4145413 - RNA, 62 nt, Human
aaccacacuggcuagugaagaagcaggagcuucuuguuuuaauugcucaccaaugguugguu

SEQ ID NO: 4145414 - RNA, 63 nt, Human
aaccacaugaaauugcuuauauuugaccauuuuugacugaacaagugguaauuuuaugugguu

SEQ ID NO: 4145415 - RNA, 78 nt, Human
aaccaccgcauccccgccccuuuuugucgaccacuuacaggcccuuugaggucguggagagcaggggaugcgggcguu

SEQ ID NO: 4145416 - RNA, 64 nt, Human
aaccacuuuaauuagcucaugauucuguguauuaucaauuuguguugggcucauucaggugguu

SEQ ID NO: 4145417 - RNA, 63 nt, Human
aaccagaagcuuccuacauuguucuuuccuguacaauuggcuuaaagaagagguuuucugguu

SEQ ID NO: 4145418 - RNA, 62 nt, Human
aaccagccaagacuugcauguccaugcccauggaggcaggcccagcaacuuuggacugaguu

SEQ ID NO: 4145419 - RNA, 62 nt, Human
aaccaggagauuaaagaaaggugccauagaauaccuauuuaccuuucuugaucuuucugguu

SEQ ID NO: 4145420 - RNA, 86 nt, Human
aaccaugaaaugacauuaucugagaguguccuacaacuucagcuguuguaauuucacaccucaugguggccucugauuucaagguu

SEQ ID NO: 4145421 - RNA, 76 nt, Human
aaccaugccugaaaaucaagguaguuugguggucuaaggauagccaggaaauuaaugauauuucagguucagaguu

SEQ ID NO: 4145422 - RNA, 129 nt, Human
aaccauuucucgaugauuucagagccuucauucugagcaucaguuauaugcucuccaguguaaugacuuuauagccaagcacaguaauugauauuacugugaaggcccuuaacuuaucaagaaaugguu

SEQ ID NO: 4145423 - RNA, 75 nt, Human
aaccauuuuaaggcaaggggcauguacuuuguaaaccuuuuguuacauauugccaaauugcccuauaaaugaguu

SEQ ID NO: 4145424 - RNA, 63 nt, Human
aacccaacauuagcuuauuguaaggugaaaccugagcaaagguccuggggcuagugguggguu

SEQ ID NO: 4145425 - RNA, 74 nt, Human
aacccaccuaauauaugaugguggauuagauuaauaaauuagugcaauuucaaugcacucaugguugguggguu

SEQ ID NO: 4145426 - RNA, 130 nt, Human
aacccagauuuccucacucccagcccagugcuuuccccccgugcuacauucauucuuuaaucauccauugacaggauggauucuguaugugggauggaagguaaucacacacaguguggcuucagaggcu

SEQ ID NO: 4145427 - RNA, 62 nt, Human
aacccaggccuugaccucauuuucauaaauuccaaauuuagugagguccauguuaauggguu

SEQ ID NO: 4145428 - RNA, 67 nt, Human
aacccagggaaguguccagucccaaguuccagcuuugccuggagccacuuugcaucuaccuuggguu

SEQ ID NO: 4145429 - RNA, 63 nt, Human
aacccauaugugaccuucuuuauccagcaguguuuuuacugcagggucucugcaaaugagguu

SEQ ID NO: 4145430 - RNA, 119 nt, Human
aacccauugccuucaggugagacuucaugcagaagagagcuguuucuuuucuuucuccaaaccuucucagagacaugauuuauggacuuucuuuuucaaagcauuucaggcaggagguu

SEQ ID NO: 4145431 - RNA, 59 nt, Human
aaccccaggagcgcgugaacaggcugcuggcacggcgcaccguccgcugcuccgagguu

SEQ ID NO: 4145432 - RNA, 65 nt, Human
aaccccaguacugugacucagugagggcccaguuaggagauuacaagacacagugcugaaggguu

SEQ ID NO: 4145433 - RNA, 129 nt, Human
aaccccuagagaacuugguauguggccuugagagucuuugaacuucuccauucugaugcugaagcggcaucccagaacuugggaagcuuccaucccaacguccauacaaaugcuacuuuucuuucuuuu

SEQ ID NO: 4145434 - RNA, 77 nt, Human
aaccccuagcuucugggaguguuuacuacaaagauucacacuuguagaaggcuccucucagaaaugucuaggagguu

SEQ ID NO: 4145435 - RNA, 78 nt, Human
aaccccugccuuccacaaacacauccugagcacuguguuuggacagugcuuaggacgcauuuguggaaggcagggguu

SEQ ID NO: 4145436 - RNA, 70 nt, Human
aacccucaaucuggguaacaaggaagcuaagguaaucuuuggccuucucauuugcuuauuuguggggguu

SEQ ID NO: 4145437 - RNA, 86 nt, Human
aaccuacuagauugcagaugcauaggucaggccuaggggucuugcuugcuugccugugucugaccaugcacaugcacuuguauguu

SEQ ID NO: 4145438 - RNA, 78 nt, Human
aaccuauaaguaauaucagaugacaucuucuaugggguuauuuuagcagggauaucaucugacaucuucuauaagguu

SEQ ID NO: 4145439 - RNA, 112 nt, Human
aaccuauugaaucaggacaaggugaugguucugcuccuguggcaaucuaggucucagaaucugguaugcaggcaggguguaaagagcagauugcauuuucaagagaaagguu

SEQ ID NO: 4145440 - RNA, 96 nt, Human
aaccucugggccaagaggugaaguuaaaaaccagucucuggcuguuucagagaguuacuacuccaccugcuuguaaaauucugucucuuugagguu

SEQ ID NO: 4145441 - RNA, 67 nt, Human
aaauuggaagcugucauuuuuuaaaacaguaagucaaugaguuacaugugugacaguaucacuguuu

SEQ ID NO: 4145442 - RNA, 109 nt, Human
aaauugugggugucgauaaauguuuacuguuguuucaaaccacucaguuuuggaguaauuuauuaugcagcaauagauaaaacauuuaccaguuuaucacauacaguuu

SEQ ID NO: 4145443 - RNA, 130 nt, Human
aaauuucaggggagauauguguaauauuuauauuuaauacugcuaugagaauagauauacauuuauuaguuugucaguguaacucuuauagcagcuguggaagggaggaggcguauauauuuuccuugau

SEQ ID NO: 4145444 - RNA, 76 nt, Human
aaauuucccugaaggcauauauucuaaacaggacagcaagaaucugucuuuaaauaaaguguuuugagggcgguuu

SEQ ID NO: 4145445 - RNA, 57 nt, Human
aaauuucuugaggcucucuagcucuggucaaauuaucaucagaguuuuaagaaauuu

SEQ ID NO: 4145446 - RNA, 129 nt, Human
aaauuuuaauuaaggagaaguauuguaaaacagaacagaauagauuauacuugaagcauuugguauuuuugguguauaauuuauugaaugggcuguaauaauuuagaauauuucugcccgugguuuuuu

SEQ ID NO: 4145447 - RNA, 91 nt, Human
aaauuuuuuguuagcuacaguuauaugugauaaguaauuucuuugauguuaagagauggacugaucuuuauguguagaugauaagauauuu

SEQ ID NO: 4145448 - RNA, 87 nt, Human
aacaaacaaaaaccuucacuguuggcuuugcuugucuuggagauuucaagggccuacagaaggcagcagugagaaauuuuggcuguu

SEQ ID NO: 4145449 - RNA, 59 nt, Human
aacaaagaugccaaaaggaagacagauuuucaucugugauuucaaagggugucuuuguu

SEQ ID NO: 4145450 - RNA, 87 nt, Human
aacaagccaaccccauaccuuucucaagcacaugugcacauugacacaugucaauugcagacaggccuugugggguuuccauuuguu

SEQ ID NO: 4145451 - RNA, 106 nt, Human
aacaagcuucuaggagucaggacuuaagcucuuuguaguucuacuuuauauccuuugaaucuguggcagaaggcuaagguguccaccugaaguuugaagucuuguu

SEQ ID NO: 4145452 - RNA, 59 nt, Human
aacaaguucuaagugucuacuuugacagacaggauuaaaaguaggugcucauauuuguu

SEQ ID NO: 4145453 - RNA, 69 nt, Human
aacaauaacuagacaugccauggaaagaagcugccuaucaagaacaccauggauguucuuguuuuuguu

SEQ ID NO: 4145454 - RNA, 100 nt, Human
aacaauagaaauuacuguauuugauaagugaaguuuauuuuagggaguaucauuuuuuuaagaagguguaauuuauauacaguaaaauuuauccuuuguu

SEQ ID NO: 4145455 - RNA, 111 nt, Human
aacaauauuugcuauuguuugauugcuuuuagagcuguaucaaagagccuuaaccauuguguguuauuuuuugcuuuauagccucuaaccuaagcgucaauauauauuguu

SEQ ID NO: 4145456 - RNA, 78 nt, Human
aacacagaaaggcaccuucuggccagacacagugcaggaaauuugccuuucauggcucaggagggaucuuugcuuguu

SEQ ID NO: 4145457 - RNA, 57 nt, Human
aacacaggaaauugguaaauggagagaaacuguugucccuuugcuuucaucuguguu

SEQ ID NO: 4145458 - RNA, 60 nt, Human
aacacaggcauacuggcuccagaguauggguuuuagccacuguaugccuauaauuguguu

SEQ ID NO: 4145459 - RNA, 57 nt, Human
aacacauggcaagagcaggaaaugggaagacuaccuuuuuucuggcagcuauguguu

SEQ ID NO: 4145460 - RNA, 62 nt, Human
aacacccacuucugugagagacggucuguaaacaaugaacuguggcucagggaaugcauguu

SEQ ID NO: 4145461 - RNA, 58 nt, Human
aacacuaaugggagaacaacccuaauaaggucaacaaaaauguucuuguaauaguguu

SEQ ID NO: 4145462 - RNA, 56 nt, Human
aacacugucagccuuugauggacaaaagcuggacaaagucaaucucugaugguguu

SEQ ID NO: 4145463 - RNA, 62 nt, Human
aacacuugaacugaucuauacucaaugagaggaggucauugauuacaggaaguucaaguguu

SEQ ID NO: 4145464 - RNA, 61 nt, Human
aacacuuugggcauggccuucccucucagauaaacaggagggggaggcagcaccagagguu

SEQ ID NO: 4145465 - RNA, 62 nt, Human
aacagaaaagguagguggcuuuuuuagugcuuggguuuccuguuggugugacuuacccuguu

SEQ ID NO: 4145466 - RNA, 98 nt, Human
aacagaaaugagaguaaaaauugaggugcaaaaugucugauuuauggaugaaauuuguuaugcccagugauuuuuuuugcuacuuuaaauauucuguu

SEQ ID NO: 4145467 - RNA, 70 nt, Human
aacagacagugauucuucacauuucugggacuaaaugacccuuugauaaucugaugaauaacugaauguu

SEQ ID NO: 4145468 - RNA, 94 nt, Human
aacagacauauccuugggccugggguagugucggacaaagcaccuuguaacucucuuucucugaauuucccaaggcuaucugggguaugugguu

SEQ ID NO: 4145469 - RNA, 56 nt, Human
aacagacuauuugaguuugcagcaaucucuuccugcuuugaacuuuguacucuguu

SEQ ID NO: 4145470 - RNA, 72 nt, Human
aacagaguacacuuaauaagcuuaaucugaaacugauaguuugguagauacaguguuaaguguggaaguguu

SEQ ID NO: 4145471 - RNA, 116 nt, Human
aacagauagaaaauacauucucuagacuauguggcuuguuugggcuggccagggucuagccugaccauccagaccaguccaugggucugcucaguggguggaguuaucuuuuuguu

SEQ ID NO: 4145472 - RNA, 82 nt, Human
aacagauccaaacagauaagggacaauuucagcuaggacaugucauuugaauuuuguuguuuguuuucgucuuguuuuuguu

SEQ ID NO: 4145473 - RNA, 57 nt, Human
aacagcagcaaguaagcaggucugccugagcaguuaacugucaagacuccugcuguu

SEQ ID NO: 4145474 - RNA, 91 nt, Human
aacagcauccuagagggacagccuggaaccaggaguuacacgaguugggcaccagcucgugaccuuguucuaguuccaccuauacucuguu

SEQ ID NO: 4145475 - RNA, 58 nt, Human
aacagcucugcugcuggcugggcuggguuuaucggccagcgcucacucagagcauguu

SEQ ID NO: 4145476 - RNA, 82 nt, Human
aacaggaaagcuacucugcagugcccauggcucagccccagauccuagcagcacagccaguacacagcaguggcucacuguu

SEQ ID NO: 4145477 - RNA, 72 nt, Human
aacaggaagauagggguagaaaguuugccguccuauauaguagacuccuucucacugccuguaccuccuguu

SEQ ID NO: 4145478 - RNA, 107 nt, Human
aacagggaacagagggaggaauuucugacagcagaugaagccugcagauuuuuaccuacuuuguguaagccuuccuucucuauucucuuuucuccuccaucccuguu

SEQ ID NO: 4145479 - RNA, 67 nt, Human
aacaggguuugagguaaacuaaagaggggggagucucuaggcuguucaugcucagaccuaccauguu

SEQ ID NO: 4145480 - RNA, 56 nt, Human
aacaggugagggagcuuugugccugguagacuccuuggccuuggguuucgccuguu

SEQ ID NO: 4145481 - RNA, 57 nt, Human
aacaguguuuuucuucagcacuaagauaaauacaauguuucugugagaaacacuguu

SEQ ID NO: 4145482 - RNA, 58 nt, Human
aacaguucugugccugcaaccgugcagcugaacauggcuggaagaaaacagaauuguu

SEQ ID NO: 4145483 - RNA, 65 nt, Human
aacauaaacaaugucguaacuuaguuuucccucagugaagauauaggaccgacuuguuuauaguu

SEQ ID NO: 4145484 - RNA, 60 nt, Human
aacauaagggagcuucaaaacuuuagauuccuggaguauugaaaagcuacuuuacauguu

SEQ ID NO: 4145485 - RNA, 73 nt, Human
aacauagggaggugauuaggaccauguauuuuggaggcaaacugucuguauuugaguccugccuacccugguu

SEQ ID NO: 4145486 - RNA, 62 nt, Human
aacauaggguagcuguaugucaguacuucccuccuagaccagcaugccugcaucuuaguguu

SEQ ID NO: 4145487 - RNA, 61 nt, Human
aacauauggauguugaauuaacuuugucucauuauggcauuuaauuugauaucuauaaguu

SEQ ID NO: 4145488 - RNA, 101 nt, Human
aacaucauuucuucucaagcuccucagagacaucauaaugaaguuuccugguuggaguaguguaggaaaucucuuuugugguguuuagaaaagauaauguu

SEQ ID NO: 4145489 - RNA, 62 nt, Human
aacaugaauaggguauucuuuggcuggaucaaaauuauaaagguccaauuucuauucauguu

SEQ ID NO: 4145490 - RNA, 79 nt, Human
aacaugaguacagauggauguaagccagagucuugauggcaggaagauaaagacaugcuuauaggcaucaugcaauguu

SEQ ID NO: 4145491 - RNA, 78 nt, Human
aacaugcucugcuuuuuaaaaggaguccaacuuaagaacugccagauuaaaacgggcuugcuaagaagagcgcauguu

SEQ ID NO: 4145492 - RNA, 70 nt, Human
aacauuaaucagaguuauuugugcugcuucgcaggugucuagcugccuuaaauuacuuugugaaaauguu

SEQ ID NO: 4145493 - RNA, 67 nt, Human
aaccaaaggaaccugauuuucuuuagugggagagagaaaucuuguuugagagaaggauccuaugguu

SEQ ID NO: 4145494 - RNA, 80 nt, Human
aaccaagcauuuaccaagauagcaucugguuucauggcuaccuacccaaaugaaccagcuaucuuuguaaagaaaggguu

SEQ ID NO: 4145495 - RNA, 107 nt, Human
aaccacacccugacccugugccccacaaagcagaggccuagguggaaggcccagggugugggccgcucccuggaccacugcagugguggcuugggcagagugggguu

SEQ ID NO: 4145496 - RNA, 76 nt, Human
aaccacaccgagauuugcaagaguaagaauuucugccuauuggcuagaauuucaggacuccuguauucggguuguu

SEQ ID NO: 4145497 - RNA, 72 nt, Human
aaccaccaaaaccauugaaagaaaggauaaugggauuugaccuaaucaguucuuccaaggugcuuugugguu

SEQ ID NO: 4145498 - RNA, 79 nt, Human
aaccacuuuuaguuaucagugugguuucuggacugcuuggguccaaucccaguuccuccgcuugcuaauuaggugaguu

SEQ ID NO: 4145499 - RNA, 68 nt, Human
aaccaggaaaaguuaugaauagaagagcugggggcacuugucccucaaaauaguuaugauuccugguu

SEQ ID NO: 4145500 - RNA, 58 nt, Human
aaccaggacaauuugaauagaaaccauuauuauggacauucuugauuugauccugguu

SEQ ID NO: 4145501 - RNA, 63 nt, Human
aaccaggcucugcaaaaucaggcuccaagacugucacaaggagccuccuucagagucuagguu

SEQ ID NO: 4145502 - RNA, 68 nt, Human
aaccaguuaagcuaauuaguuccagcauggcuauguccaagcagagagcagaauuaaguuuuaugguu

SEQ ID NO: 4145503 - RNA, 72 nt, Human
aacggauaauuaggaaauucagccauuuugaaguuacuugacucugguuaugguuguuuucuaagcucuguu

SEQ ID NO: 4145504 - RNA, 65 nt, Human
aacguaccgacuuuucacaacaaucauuuauuuagcccaugauucugugaauuaguuggguaguu

SEQ ID NO: 4145505 - RNA, 81 nt, Human
aacguagauggcagugaaggaugccaaugaucaaugaaguacuuuucugucacaaguaauccuuuucuugcuuuuuguauu

SEQ ID NO: 4145506 - RNA, 70 nt, Human
aacguagggucauguuucuauacugagcaaaagggcuucuuuugcucaguauagaaaaugauaucauguu

SEQ ID NO: 4145507 - RNA, 83 nt, Human
aacuaacaaaaaagcaguauaaguaacggaagguuucucccacacucaaaccauuuauuauaaguauugcuauuuggucaguu

SEQ ID NO: 4145508 - RNA, 91 nt, Human
aacuaacugcauuauucauaugugccuuuuagguugaguguuuguuaugcuacauuuacuuaucaaaagucagugaaauguuugucuaguu

SEQ ID NO: 4145509 - RNA, 74 nt, Human
aacuacaaagucuuuuacaacagucauucuugguguauagcuaguggaggugaaaugggaagauuauuguaguu

SEQ ID NO: 4145510 - RNA, 76 nt, Human
aacuagaaaaagacuuucugagaaacugcuuggugaugagugacuuuaacucagagagcuaaaccuuuuuuugguu

SEQ ID NO: 4145511 - RNA, 94 nt, Human
aacuauguggcacauugggaagauuuagauccacugccuguuuuucauccuuuuccaccugcaguuuauucuucccaagugagcucauauuguu

SEQ ID NO: 4145512 - RNA, 58 nt, Human
aacuauugcccucuggcugacaggcuguuaacauacagucuucuagcuggguuugguu

SEQ ID NO: 4145513 - RNA, 127 nt, Human
aacucaaaccuuggauaugauauuacuaacugaaggcagggaugauuauuuuuccauauuuaaucaaaauaacagcacuguugaugguccaaaugguuuccugguuagaauuugaagcaauugaguu

SEQ ID NO: 4145514 - RNA, 77 nt, Human
aagcuacaugcaaguaacagaacguggaugggcaucaucucgccaguuucuacagcugcugcuucucaugucaguuu

SEQ ID NO: 4145515 - RNA, 57 nt, Human
aagcuagaaggagugcgugauuccuuggcucuaggcuuuaggcauuuggauuggcuu

SEQ ID NO: 4145516 - RNA, 55 nt, Human
aagcuaugaccugccagcuuucaggaugacauccaagaggcaguagucaaagcuu

SEQ ID NO: 4145517 - RNA, 67 nt, Human
aagcucacacuucaggacucuggggcaacagaaacccguugcagguuccccuuuugauguguaguuu

SEQ ID NO: 4145518 - RNA, 55 nt, Human
aagcucugaggugagcaaucggguuuuuuucuagccuuagcacaaagcagagcuu

SEQ ID NO: 4145519 - RNA, 74 nt, Human
aagcugaaggauguuucccaguccauuaggcaguuuaaaguccuugcuauggcucagaguucaucuuuuagcuu

SEQ ID NO: 4145520 - RNA, 76 nt, Human
aagcugaauaacuucagugugguauaaaacgugguuuuuaggcuauguuugugauugcugaaaagaauucuaguuu

SEQ ID NO: 4145521 - RNA, 73 nt, Human
aagcugacacugcuaacuccuggaguucuguguauaacccaaauucauagcccuugacauagccugucagcuu

SEQ ID NO: 4145522 - RNA, 77 nt, Human
aagauauuugggggagaggaugauuucuuggucuagggaguccuuuauaauuugaaucacuucccuccaaauggauu

SEQ ID NO: 4145523 - RNA, 77 nt, Human
aagaucacaguagcuaauauugcauuaugaugauacugccuucccagaaaugauugcagucuugcugcugcugucuu

SEQ ID NO: 4145524 - RNA, 67 nt, Human
aagaucaucaauggaugguaaaacuacugagcacauugucgcuagagaacaacauucauauggucuu

SEQ ID NO: 4145525 - RNA, 83 nt, Human
aagauccacccaggacuugacuuagugucuaggucagccugugaccuacauggcuuuaaguaaguuuccugaggguggauuuu

SEQ ID NO: 4145526 - RNA, 56 nt, Human
aagauccucagccagugaggcgccuucccugugcccagcacauugcugaggaccuu

SEQ ID NO: 4145527 - RNA, 55 nt, Human
aagauccuggguccacagaagcagaaggaagcuuccagugagacugagaggucuu

SEQ ID NO: 4145528 - RNA, 105 nt, Human
aagaucuauuugaaucuguaaacaaguagagauuacagugugcaaaaaguaauccuuuuuggcaccucuaguaagcucugcuucuugcagaucucggaggaucuu

SEQ ID NO: 4145529 - RNA, 72 nt, Human
aagaucuggaaugaaugagguucugugguccccuuauaaagccucuugcauuccaaauguguaaaugauuuu

SEQ ID NO: 4145530 - RNA, 79 nt, Human
aagaugaaacuggggugagguaccucugggucacuguuaagaaguaaaauguagaggcucuucauugcaguaguaucuu

SEQ ID NO: 4145531 - RNA, 67 nt, Human
aagaugaaugcugcucucauaauuauagcuucaaaccugugauucaaugggcugccauaaucaucuu

SEQ ID NO: 4145532 - RNA, 91 nt, Human
aagaugagguaugagguucuaugaucaugauggaacuuugaauaacauuuuugugacagucgugauuauaccuaucuuaaccaauagucuu

SEQ ID NO: 4145533 - RNA, 62 nt, Human
aagaugagugaccagaaaugauucuccagcucauaugugggccacugaauuuucugcaucuu

SEQ ID NO: 4145534 - RNA, 62 nt, Human
aagaugcuggcaggaauagcuagcggugaucccuuauacauagcuucucuuuucaacaucuu

SEQ ID NO: 4145535 - RNA, 61 nt, Human
aagaugcuugcaaauuucugaagccugggagagaaauccuagcagaccugacaaauaucuu

SEQ ID NO: 4145536 - RNA, 80 nt, Human
aagaugguagcagcagagcagguccucccacgcgugcucgcccagcauguggcuggaauccugccagcucugccccucuu

SEQ ID NO: 4145537 - RNA, 85 nt, Human
aagaugguugcagcuguagaggggagaaagagcaaaacuccauauauauuagucuuccuuuaucuuacagugcugcauuuauuuu

SEQ ID NO: 4145538 - RNA, 99 nt, Human
aagauuaauauuuccauagugagacaugugaauauuuguacuagguagaauguggaauaaguuaaauaaccucauguccguuggaaaauuguugguuuu

SEQ ID NO: 4145539 - RNA, 84 nt, Human
aagauuacacugaguuuuaccaggcacauucuucuuguugacaugcaaguaccuguggcuugguggacuuuuuguaggaaucuu

SEQ ID NO: 4145540 - RNA, 59 nt, Human
aagauucuagaggaacuucuuagaguaauuguuucugaguuugaaaucuuuagaguuuu

SEQ ID NO: 4145541 - RNA, 79 nt, Human
aagauucucagagugaaagaaucuauaauccuguuacauaagcauaauaggcaacuguucuuccacucuauggagucuu

SEQ ID NO: 4145542 - RNA, 113 nt, Human
aagauuguuaauuagauagaaaacuaguuaauguacuacggggaaauacaauugugguccuguuuuauugcccuguaguacaggacagaaaucauucgcaauuuaccagucuu

SEQ ID NO: 4145543 - RNA, 66 nt, Human
aagauuuaccacuuuauucaaguuuuaguuauccauaaauuugugaaaguaaagugguggcauuuu

SEQ ID NO: 4145544 - RNA, 91 nt, Human
aagauuuauauaauauacaagggacugugaauugaagaaagaacugagaguuuucuccaaggauacaguccuguguaacacuguaaauguu

SEQ ID NO: 4145545 - RNA, 79 nt, Human
aagauuuggaguuaaaggcaucucagcuaagauccaggcucugccuuucagcuggaugaauuuggaacacucuaaacuu

SEQ ID NO: 4145546 - RNA, 67 nt, Human
aagauuugucuuggucucaucugaguacuauaaugucauuguuagauggggucaggauggaaaucuu

SEQ ID NO: 4145547 - RNA, 106 nt, Human
aagcaaagguauugggaggaagugggauagaacugagcuuugaagaccgugcuaaaauauuuacagacuccccagguuaucucaaguucucuccaggaauuagcuu

SEQ ID NO: 4145548 - RNA, 63 nt, Human
aagcaagguuguuagguucuaagacugaagcugcucuuuaucucuucucccaacaccuggcuu

SEQ ID NO: 4145549 - RNA, 74 nt, Human
aagcaagugaaucuggcuauuugugugaguacguguguagcaaucugcucacaauuaucagaaguauugagcuu

SEQ ID NO: 4145550 - RNA, 61 nt, Human
aagcaaugcauuuggaaguauugaagcagggacccuuguaagagcuacacaaaugcugcuu

SEQ ID NO: 4145551 - RNA, 94 nt, Human
aagcaauggagguuugccuacaaacgaaucuaucugaaaauguccccgucuacuauuuagagauuccuuuggggaaagcacuacccaguggcuu

SEQ ID NO: 4145552 - RNA, 59 nt, Human
aagcaauguguuugaaaggccaagcacuaauaauuuguugcccauucaaacaauuguuu

SEQ ID NO: 4145553 - RNA, 66 nt, Human
aagcaauugguuuuaguaaaaugagacuucuucaggagucacuccuuuacuguggacccauugcuu

SEQ ID NO: 4145554 - RNA, 90 nt, Human
aagcacauacuguuuguaaguaagagagguucagcaaacauuucuuaaauaaaugaauuuugcugauauuuugcugauacagucuggcuu

SEQ ID NO: 4145555 - RNA, 74 nt, Human
aagcacgaugacuaaaugauccucuugguccuuuugggcaccagcccucccagaguggacaucaucaggugcuu

SEQ ID NO: 4145556 - RNA, 71 nt, Human
aagcacucuacuaucagaucaaucaaagauucugugagugaauuuauugguuugcauggugaagcaagcuu

SEQ ID NO: 4145557 - RNA, 79 nt, Human
aagcacuggcacagagacagaaggauuaaagagugguucaucucggaaaucuugcucugauuuuguuuguugguuucuu

SEQ ID NO: 4145558 - RNA, 57 nt, Human
aagcagaagagggcuagguagauuacagcagauaugcagccuuggcauucucugcuu

SEQ ID NO: 4145559 - RNA, 76 nt, Human
aagcagaauucuaauuccauuaaauugauguucaacagaacacacugaauuuuguggaaacuauggaggucugcuu

SEQ ID NO: 4145560 - RNA, 77 nt, Human
aagcagauuuuugguugauauuuugugaaucauuuugcuuucaguaauauguuuauaagauaucuuccuuucugguu

SEQ ID NO: 4145561 - RNA, 62 nt, Human
aagcagccuggcaugaugcuuucucuguggcccacucaccuucuguguauuugcugcugcuu

SEQ ID NO: 4145562 - RNA, 62 nt, Human
aagcagcuuccccaaagugccuuggcucccaagggcccuuuacuuacugggaaaaucugcuu

SEQ ID NO: 4145563 - RNA, 70 nt, Human
aagcaguaaaggcacacacuccuuguuauauuccugggagaugaaaggaauacugugccuccugacucuu

SEQ ID NO: 4145564 - RNA, 128 nt, Human
aagcagucacuugacagaagucuggaagcuaagcuuugcccuaggugagcacauuuucccacuucucuaauagaugugaaauucuucagguuaacuugucuuuugagagaugacuguaccaucugcuu

SEQ ID NO: 4145565 - RNA, 75 nt, Human
aagcauccagcacaugagaaagauguaggcugggaggcuagaccagucucucuuuuacauuuuuucugccuguuu

SEQ ID NO: 4145566 - RNA, 80 nt, Human
aagcaucguggcgaggcgggcaggggugcagggucccggcagggcagcccaggugcccucugccuuacugucggcugcuu

SEQ ID NO: 4145567 - RNA, 89 nt, Human
aagcaugaagucuuauauuuugaagucagaaagcauuaugcucugaaaggcauaaaguuuuguugccugacuuuaaaaugugaauguuu

SEQ ID NO: 4145568 - RNA, 62 nt, Human
aagcaugaauccaaaccuuucugaccuggauauaggucagcaguuucuuugaauuucugcuu

SEQ ID NO: 4145569 - RNA, 59 nt, Human
aagcaugaguuaccugcuucuaagcccaacuuggccagugggcaggugugcuuaugcuu

SEQ ID NO: 4145570 - RNA, 78 nt, Human
aagcaugauaaaaucuaguacuaguuaggaagaguauuucuauagucuaaucugacuagaauuaaaucaaccauguuu

SEQ ID NO: 4145571 - RNA, 66 nt, Human
aagcauguagugaagauuuauaugauaagggaaaagagaaccucuuugucacaucaucccaugcuu

SEQ ID NO: 4145572 - RNA, 93 nt, Human
aagcauucuuaugugcccagcucagugguggucacuugguggaagaauaugaucuaucaccaaggaguuacuacuuaguuugggaggaaucuu

SEQ ID NO: 4145573 - RNA, 76 nt, Human
aagcauuuaacaaauuggggaaaaacauuugcaacucaguugacagugucaguuuccuaauauauauuaagagcuu

SEQ ID NO: 4145574 - RNA, 91 nt, Human
aagcauuuuuaauuccuauuuccaugaaacacaaaaaguugauuugaaugcuucuuaguuuacucauggagauagguauuugggaauucuu

SEQ ID NO: 4145575 - RNA, 70 nt, Human
aagccaaaggcuccagugaccucugggaagagagagcccuucaaggucauuccagccauuccccuggcuu

SEQ ID NO: 4145576 - RNA, 62 nt, Human
aagccaacaugauuacuauaauguaaaacauauaaacaucaugaauaguaguauguaggcuu

SEQ ID NO: 4145577 - RNA, 95 nt, Human
aagccaaggaauguaggugguuucuggaagcuggaaaaggcaaggaaauggauucuuccccagagccuccagaaauacaucuugcaccuugacuu

SEQ ID NO: 4145578 - RNA, 55 nt, Human
aagccacugcagcaggagcugccauggggaaacaugguaccugcuuuaguagcuu

SEQ ID NO: 4145579 - RNA, 59 nt, Human
aagccaggaauggagucuucgccagagaccaaaucagccggcaccuuguucuuggacuu

SEQ ID NO: 4145580 - RNA, 55 nt, Human
aagccagguguugugguaagagaugccuccggcuauuuuuucccaggccuggcuu

SEQ ID NO: 4145581 - RNA, 115 nt, Human
aagccauguuauuacuaaauguggguuuuuaucuuguguauuguugugagccacugaagggcuuuaaucagguaacaugauaaaacuuacauuuuuagaaaaguuaguugggcuu

SEQ ID NO: 4145582 - RNA, 112 nt, Human
aagcccccuuucacauuuuagucauuuguuacaguggcacuccacuccaaguaccaaagucuguggucguuuucuauugcucuguaacaaauugacauguaauuaguggcuu

SEQ ID NO: 4145583 - RNA, 76 nt, Human
aagccccucagaaggaaguuagaguauggaaauauuaauaagaaugacccauauuugcuucuugcugauaaugcuu

SEQ ID NO: 4145584 - RNA, 110 nt, Human
aagcccugcccaagaagccacaacccagccccaguacaggcuccuuagauuuaucugcagcaaggauuuagggacaagggucugggguugaggcuucuagggcugagcuu

SEQ ID NO: 4145585 - RNA, 61 nt, Human
aagcccuggaaaagcaucauugagauugguucaccucccauccauuguuuucccaggguuu

SEQ ID NO: 4145586 - RNA, 56 nt, Human
aagcccuguccggggggaagaaagacaaccucccgagucccucaaggcaggugcuu

SEQ ID NO: 4145587 - RNA, 62 nt, Human
aagcccuguuaggcacuggggauaugacaauaaacaagaaaauucucagccucauugggcuu

SEQ ID NO: 4145588 - RNA, 56 nt, Human
aagcuguacuuagcauugacuccucugcuacagcaggagucugggggaugcagcuu

SEQ ID NO: 4145589 - RNA, 55 nt, Human
aagcuguuuuggccuuaguugaguugaugaaacuucagaacguuaagacaggcuu

SEQ ID NO: 4145590 - RNA, 114 nt, Human
aagcuuacccaaggucagaauucauucaagaugcauuggugucuuuuugagcauuaauuuccaccaguugugcacauucuaggacuaguagcgguuugaguuuccugguagcuu

SEQ ID NO: 4145591 - RNA, 71 nt, Human
aagcuuucccacauaucuugcauuuaugagguccaccuccagugugcauuaucaugugucuucgaaagcuu

SEQ ID NO: 4145592 - RNA, 80 nt, Human
aagcuuucuuagcagcccucuuggucacuaggcacacuaccuaggagucaagcugugacaagaggcugcuucuuaaacuu

SEQ ID NO: 4145593 - RNA, 67 nt, Human
aagcuuugccacacucuaguuuccauggaagccaauucuaagguggaaacuagagugugggaagcuu

SEQ ID NO: 4145594 - RNA, 81 nt, Human
aagcuuuguuggaaaagacagaauucuagaauguuaugacgauaaaucacauuguuggaaauugucuuucucuaaaaguuu

SEQ ID NO: 4145595 - RNA, 101 nt, Human
aagcuuuuuccuguguuuuucucagagauuuauggaaaacugucagaaucagugauuauguaaaaguuucucuagagucuuugaaaccauggaaaaggcuu

SEQ ID NO: 4145596 - RNA, 64 nt, Human
aaggaaaaaaagguuagcauggcuguaucuggguaagggaacuacaaauggcuuuuauuuccuu

SEQ ID NO: 4145597 - RNA, 109 nt, Human
aaggaaaaggagagggcggguugaggccaggacuccagguguccaggacuccagguguccaggacuccagguguccaggccuccagggccgcacccucaugacagccuu

SEQ ID NO: 4145598 - RNA, 75 nt, Human
aaggaaaaugagcugcaugcaacuguuuaaauauagaaaaugauguuuaggaagauguugcuggacuccuuccuu

SEQ ID NO: 4145599 - RNA, 57 nt, Human
aaggaaacagaggaugaccuugcuucauuauuuaagcagcucagccucuguuuuuuu

SEQ ID NO: 4145600 - RNA, 68 nt, Human
aaggaaauacaacauguauucauuagguggauauccacuaaaccacggauucaugcauuguaguccuu

SEQ ID NO: 4145601 - RNA, 114 nt, Human
aaggaaaugugcuuggugccuccauuucuguuauaccuuucucaggagcugauaauuggaaauguuuuaagagagguuauaauuagggcuugggggcuucauguauaguuuuuu

SEQ ID NO: 4145602 - RNA, 59 nt, Human
aaggaagaagacucuuuacuccucaauccacuagagagaguuaaaagcucuuuuucuuu

SEQ ID NO: 4145603 - RNA, 92 nt, Human
aaggaagaagcaggugugugccccagacagaagugauuuuuuuggcaagggaagacacuaaacuggggcuucagauccaucucgcugaccuu

SEQ ID NO: 4145604 - RNA, 94 nt, Human
aaggaagaagugauugaagggcucuuuguauuuuggaaucaauguaugcaacauaugacucaugauaacaaaagcuaccaguuuuuuuuuuuuu

SEQ ID NO: 4145605 - RNA, 106 nt, Human
aaggaagaugagaagguggaagcugaugggagacagggcagcuugugggugucucuuucuucuccuccuccuccucuuuuuccuacuucuacucccucucuuccuu

SEQ ID NO: 4145606 - RNA, 73 nt, Human
aaggaaggaauuugggauuccaggacuugggagcaucccucaaauucuauucuauacucagcuuucuucucuu

SEQ ID NO: 4145607 - RNA, 78 nt, Human
aaggaauucagcacagcuguggggucauucaugugguuggggcgggugaugugacuccacagcugugcugaauuccuu

SEQ ID NO: 4145608 - RNA, 130 nt, Human
aaggacaccggccaguuggcccccaggagcaggaggcuggucagcguuugucagagcagggcucaucacugauaacaaaagugcuggccacgccagugcuggaggcaggcuggggacugugcuuaucuuu

SEQ ID NO: 4145609 - RNA, 57 nt, Human
aaggacagagagccauuccagacucacccaguauugaaacagggcucucugcuccuu

SEQ ID NO: 4145610 - RNA, 130 nt, Human
aaggacaggacaggugaggcagggccagguggagcaugugaggacugaguugcuggcaggugcaccuguguccaccccucccauguccuucaugcccaugucuccaacccuacguguguccccagugcuu

SEQ ID NO: 4145611 - RNA, 78 nt, Human
aaggacaucuugcuugcugggcauuuucacuuggaaacccauucuuacagggagaugcuacaguucagcucuguccuu

SEQ ID NO: 4145612 - RNA, 65 nt, Human
aaggacugcuaaaccucucugagagcugccagauguuccugccuagccucagguuguugguucuu

SEQ ID NO: 4145613 - RNA, 86 nt, Human
aaggagaagauaaugaauuuauugaaugucuugguacugugccaaguuuuuuuacauaaaugguuucauuuaaucuuuacaaacuu

SEQ ID NO: 4145614 - RNA, 68 nt, Human
aaggagagaugggcucuuuuagacaggaacuccuggaggggaacagacagaagcuuaucuccuuccuu

SEQ ID NO: 4145615 - RNA, 64 nt, Human
aaggagcaagauaagaucauuuacacuauuguuuuaacauuaguaaugauuguaucuuguccuu

SEQ ID NO: 4145616 - RNA, 59 nt, Human
aaggagcgcuuagggggcagaaucuaacccagauuuugcugcccucaaagguccucuuu

SEQ ID NO: 4145617 - RNA, 82 nt, Human
aaggagcugaacccacaaauauuuacugaauccacugguuugccccaggggcagcauguaaaauuuccaaacuucacuccuu

SEQ ID NO: 4145618 - RNA, 81 nt, Human
aaggagcugugaagaggcuagagccaaguaaggggcuaccggagguggcucaggggucuggcucugucaucaggucuccuu

SEQ ID NO: 4145619 - RNA, 59 nt, Human
aaggaggaaaauauuguugcuguuaccucuuuauuaaagcaaagcagugcauccucuuu

SEQ ID NO: 4145620 - RNA, 58 nt, Human
aaggaggaaaugaaaggaggguuugaaauacuuguguagacaaucuucauuccuucuu

SEQ ID NO: 4145621 - RNA, 84 nt, Human
aaggaggaaggccagccuuggaacccugagucucuguggucaggagcgccucagggggcuggacuuuucacucaucuuguccuu

SEQ ID NO: 4145622 - RNA, 78 nt, Human
aaggauauugauuauuaguucacaauagcaccagguagacagggcuuaugugcaauaaggaguaauaguaaaaucuuu

SEQ ID NO: 4145623 - RNA, 64 nt, Human
aaggaucaggcgccaugggaaguguggugcggccguuuccccuacuucucuccgccucgugcuu

SEQ ID NO: 4145624 - RNA, 66 nt, Human
aaggaugccauuaaagaagcauuaugucacauuugucacuuugugucacauuuaguuggcauuguu

SEQ ID NO: 4145625 - RNA, 90 nt, Human
aaggauuauaagcauaaauugauacuguagccagagcagacuuaacacuucauguccugguucacaucuguuuaucuguuuucaguucuu

SEQ ID NO: 4145626 - RNA, 68 nt, Human
aaggauugcugucucuuuauuauuuguuuauuuucuaagcaagcuaacauaggagauugcuaucucuu

SEQ ID NO: 4145627 - RNA, 67 nt, Human
aaggcaaaugauuuuuaugucuccuuugucuguuccuaagacacuuggagucauuagucauuuccuu

SEQ ID NO: 4145628 - RNA, 59 nt, Human
aaggcaagcauugggaacagggcgguggagcaacuagccuaggugacccugcuuggcuu

SEQ ID NO: 4145629 - RNA, 58 nt, Human
aaggcacuacgcugcuggggcgguuguccuauuucugucuaugccagugugguuucuu

SEQ ID NO: 4145630 - RNA, 78 nt, Human
aaggcacuguuaugcacugguacuauucguguacacuauaaggaaugauguaucaguuuuacgucuaaucagugucuu

SEQ ID NO: 4145631 - RNA, 65 nt, Human
aaggcaggagaaaggugaauucacucugucuucaagagcuggcacagccaucuucuccugcucuu

SEQ ID NO: 4145632 - RNA, 115 nt, Human
aaggcagugcagggcuggagguccuggaggguggcggcgggucguccuaacuagcaggcugaaaggugcuggaggggaugccuucacucagaggaaguucacagccaccugccuu

SEQ ID NO: 4145633 - RNA, 61 nt, Human
aaggcauaccugaauguuuguggguggugcaacuuuuacuaacuuucaggauacugcucuu

SEQ ID NO: 4145634 - RNA, 79 nt, Human
aaggcauuagagcuaaaucaucauuuauguuugucacagggguugcaaauguauaaugagauuccagaguuaauguuuu

SEQ ID NO: 4145635 - RNA, 57 nt, Human
aaggcauucuuuagcuucuaaggcauuauaacaauaugcagaagcacaagaugucuu

SEQ ID NO: 4145636 - RNA, 65 nt, Human
aaggccaaaagcauaauccucacaaaugcaauaaugcacauugucagcuuaguuuuucuggucuu

SEQ ID NO: 4145637 - RNA, 61 nt, Human
aaggccucccucuuucaugggacccuaacuaaggucuuugagguguggagggaaggcucuu

SEQ ID NO: 4145638 - RNA, 87 nt, Human
aaggcugaauaauauuucguugcguggcuagaccacacuccguguacccauucaucuguucauggccacccggauuguuuucgccuu

SEQ ID NO: 4145639 - RNA, 61 nt, Human
aaggcugcuuuuaacaugcauacaacacguaugggaguguauguguguaucaagcugccuu

SEQ ID NO: 4145640 - RNA, 63 nt, Human
aaggcugugaacuuuucgggaacuggaacuguuuaacuugaacccaggauuguuuaaagcuuu

SEQ ID NO: 4145641 - RNA, 80 nt, Human
aaggcugugguggagacuguuguuuugcccacugguguccccuccuuugggcacacagcuagauuaccauucucagccuu

SEQ ID NO: 4145642 - RNA, 61 nt, Human
aaggcugugucagaagcucccuggggggguuguggguccccaguuccuggcacgcagccuu

SEQ ID NO: 4145643 - RNA, 64 nt, Human
aaggcuucuccccaguauggauucucugauguguaaucaagucugaccucugggugaaggccuu

SEQ ID NO: 4145644 - RNA, 55 nt, Human
aaggcuucuuaugcaauuguuuuugaccuuacaaggacaucugcuuuugagcuuu

SEQ ID NO: 4145645 - RNA, 70 nt, Human
aaggccaggaggacaguuagaggacugggaaauagauucccacuuaacugugacuucucucccaauccuu

SEQ ID NO: 4145646 - RNA, 62 nt, Human
aaggcccuagaaucuauauugcaaaaagaacagaggcaaaaaauggaaaaaauuagggcuuu

SEQ ID NO: 4145647 - RNA, 81 nt, Human
aaggccuaguucccagcugagauugagcaaggcaauacucugucuccuugauucaacucucauacuguaaacagcugucuu

SEQ ID NO: 4145648 - RNA, 56 nt, Human
aaggccuccaaggacgggcgccgugcgcggcaacugccugcaguuuugaagcccuu

SEQ ID NO: 4145649 - RNA, 74 nt, Human
aaggcuaacuuguacuuuccccagcaggcagcuggcacccugagcccucggcuggggcagagcaaaggagccuu

SEQ ID NO: 4145650 - RNA, 63 nt, Human
aaggcuaaguaaggcucuuucucugccugucuuugagcugagacaucagucuuauuuugccuu

SEQ ID NO: 4145651 - RNA, 82 nt, Human
aaggcuguaaguccaagaucaaggugccaguaggguugauuucuccugaggccuuucuccuuggcuugugggcugcagccuu

SEQ ID NO: 4145652 - RNA, 75 nt, Human
aaggcugugcuugccagcacuuggccagcugugccccaaagugcagcucagccacuguuuggcccuagcagccuu

SEQ ID NO: 4145653 - RNA, 78 nt, Human
aagggaacccaggagguccugacguuguucccuauuuuacuuuugccugaauuacuucaggacacccugugcuuccuu

SEQ ID NO: 4145654 - RNA, 128 nt, Human
aagggaacuguggauguaaaaaauccuuuguucuuuaaacacaccuuuggaacugugaccuugacauccauggaucaugugguaaagaggaguguuuaccaaaaagugaucaaaacagagcagcccuu

SEQ ID NO: 4145655 - RNA, 55 nt, Human
aagggaagcacuuuacgaugagaccuuuuacuauuucaucuuggaguacuccuuu

SEQ ID NO: 4145656 - RNA, 59 nt, Human
aagggagcucuaaguagagggaccagcaggcgcaaaggcccugugguaggagcuuccuu

SEQ ID NO: 4145657 - RNA, 56 nt, Human
aagggaggcucggccggcugcugcuuacgcggguaaccugucggaaagccuuguuu

SEQ ID NO: 4145658 - RNA, 78 nt, Human
aagggauacaccagagagugagauaauuucacauacaagugauguguuugagagagauuuccuuucuggugagccuuu

SEQ ID NO: 4145659 - RNA, 67 nt, Human
aagggauggcagcggagcuggaaaugauuacaaagucagagaaugaguccaucaauugccacaucuu

SEQ ID NO: 4145660 - RNA, 80 nt, Human
aagggcauauggagggaucuuuuugaaggaugaggcaccuuuuacauuacccucucaacugaaguccuguuauauccuuu

SEQ ID NO: 4145661 - RNA, 87 nt, Human
aaggggagacuugcucuaauuaugcauauacauuugacuauguaaagguaguuguagacuauauguauaaauaacaaguuaacacuu

SEQ ID NO: 4145662 - RNA, 66 nt, Human
aauucuaagcauccaucucuucuucaccuuucagugaggguggaaagaugaagauguuuaaggauu

SEQ ID NO: 4145663 - RNA, 55 nt, Human
aauucugaucaguucuuuuaagcuucauugaaagagaaaaggagagaucagaguu

SEQ ID NO: 4145664 - RNA, 56 nt, Human
aauucugaugaauaaaucauccugauaaauuccagggcugguuugucaugagaauu

SEQ ID NO: 4145665 - RNA, 62 nt, Human
aauucugcuucaucagcucuuugauuaacuggaaacaugguucauagaagagaggcaggauu

SEQ ID NO: 4145666 - RNA, 102 nt, Human
aauucuugagggggcaggcucuggcuuauucugggcaacugacuucaagugggaccccugagcuaccuauguaagcaaagagucagccaucucuggagaguu

SEQ ID NO: 4145667 - RNA, 82 nt, Human
aauucuuggcaagccaguguuaagugacugguuuuacacuuggugugacugaauggguacugaggcucagcuugccugaauu

SEQ ID NO: 4145668 - RNA, 121 nt, Human
aauucuuuaauugggacuguaccugcaagcauuacacuucuaaaugaagccucaaaggcucauacaauggaauagugagaaauguugcagaagaagucaucuaaauaugccaugaggaguu

SEQ ID NO: 4145669 - RNA, 124 nt, Human
aauucuuuagauuucacuuugagaacugaggagcaagagcagugcaggaacauagcuucuuuacccucucucaagaaguaugccagcacuggcucuacaguaaaacagugauaucuuuucuguu

SEQ ID NO: 4145670 - RNA, 92 nt, Human
aauugaagaguacauuuaggauucauugaaagccuaauaaugcaacacccugccuuucuuuccagugaaauuuugaauguugaauuucaguu

SEQ ID NO: 4145671 - RNA, 65 nt, Human
aauugcccuuauuugaguucacugaggaacacuguugggucaaguuaggucaaguuaggucaauu

SEQ ID NO: 4145672 - RNA, 59 nt, Human
aauugccucgugucugagucuguucaggcugcuagaacggaauaccauacuggguaauu

SEQ ID NO: 4145673 - RNA, 83 nt, Human
aauugcucgugaugguucccagugaggaagcaaugcagagugugugcaccugccuuccuccucagagcugccacuuggcaauu

SEQ ID NO: 4145674 - RNA, 119 nt, Human
aauuggauuaugaauauaaauagccaugugcuggccccaguggccagugugcacucccaggcuggugcuuggcagacuggguccuggggaaggcuugggcuguuuguuuauuuucaauu

SEQ ID NO: 4145675 - RNA, 77 nt, Human
aauugggaauaauaguacuuaucucugucauugugaucauacagugaauacuguaugugcuauuuccuagccuaauu

SEQ ID NO: 4145676 - RNA, 92 nt, Human
aauuggguuuugauucuuuaccaccuguaucacauuuuuccuuuccauuucaaggaaaacucgcaaagugguuaggaaaucaggaagcaauu

SEQ ID NO: 4145677 - RNA, 80 nt, Human
aauuguaggacguagauaacuuuuggguauucauggacuuuguauucuguguuaaagcucuaaaguuuucucuuucaguu

SEQ ID NO: 4145678 - RNA, 81 nt, Human
aauuguauaugguucaaccuaauacagcagaaagaaauucccacauucuuucugcuguauuagguugaacugcauaaaauu

SEQ ID NO: 4145679 - RNA, 74 nt, Human
aauugucaguuaugcuuauuuguuggaaauagugcuuucucuuucuuuucguuucuuaaguguaauugacaauu

SEQ ID NO: 4145680 - RNA, 98 nt, Human
aauuguuuuguuauaguuauuguuuuguuguguuuuguuuuagaacaauuugucugacaaagaccuucaacaagauuuugaagugauguacugcgauu

SEQ ID NO: 4145681 - RNA, 77 nt, Human
aauuuaaaucauauaguucaugugugcaccuguccugcaguuugaggcaggugugaaugugaauuaagauggcuauu

SEQ ID NO: 4145682 - RNA, 130 nt, Human
aauuuaauguuuccccuguggccuaaaagacuaaugaagcuucuuaaguuccugcagcagucccagacuguaacuuaggcacaagaagcugggucauuaagcuaaaggucucuggaugagcaucaucucu

SEQ ID NO: 4145683 - RNA, 126 nt, Human
aauuuagcuacuacugauuuaacuuggagcugauucagaugccuuucucugucuuucaagaguguaaaagguaaaauuuuagaaacuuuggaggauagauugauuuuguuccauuuagcucaaauu

SEQ ID NO: 4145684 - RNA, 64 nt, Human
aauuuaggucuaugauucauuuugagcuaauuuuuguguguagugaaggauaaggaucuaaauu

SEQ ID NO: 4145685 - RNA, 71 nt, Human
aauuuagucagugucauuauuagaguugugcuuucauaaaaagaaucucucaagugugacaaggcuaaauu

SEQ ID NO: 4145686 - RNA, 123 nt, Human
aauuuauauuccugugcauguuuuuuacaucuugucuauguccuggugucgaccaacguggacaauguaaaucaggauagcauuagaacaaagcaagaaagauguacagaggggaacggaauu

SEQ ID NO: 4145687 - RNA, 56 nt, Human
aauuuaucuuggagaaaucaguguguuucauacacuggcuuugauccagauagauu

SEQ ID NO: 4145688 - RNA, 84 nt, Human
aauuuaugagguuccuaaucuccauauguucaguuaugcagugaaauaugauuuguuugcauugcauagacauccucauagauu

SEQ ID NO: 4145689 - RNA, 63 nt, Human
aauuucacauaaggcucauuggccagagcugucaccuggccacucagagcuguaugggagguu

SEQ ID NO: 4145690 - RNA, 63 nt, Human
aauuucaccugcacuacaucgccaggccuucuucugguuaggugaaugugagcugguggaauu

SEQ ID NO: 4145691 - RNA, 55 nt, Human
aauuucccaguuucugugggagagugggagccucucccacagaaacugcgaaauu

SEQ ID NO: 4145692 - RNA, 63 nt, Human
aauuuccucuugucauauuuugggcuucacuaacgcauccccuugacaggacgaagggaaguu

SEQ ID NO: 4145693 - RNA, 130 nt, Human
aauuugcugagaaacaucaacaaaguaagguuuugcuuuaugaaggaacaaugcucccaaaaaguuggguguaaguuggauuuuuaugagacaauuuaguauuuuaagugcacaaugugaauugguuauu

SEQ ID NO: 4145694 - RNA, 77 nt, Human
aauuuggaagggaggguggugcaugccuguguguuugucagcugagcagagcuguauuuaucuuuccaauucaaauu

SEQ ID NO: 4145695 - RNA, 91 nt, Human
aauuuuagauuauuucacaauuuuaaggagcaaaauagguucacgauucauauccaaauuaugcuuugcaauuggaaaaggguuuaaaauu

SEQ ID NO: 4145696 - RNA, 61 nt, Human
aauuuuaugccuugcacguuggaguucaugggaguuagacauguaacuaaggcauggaauu

SEQ ID NO: 4145697 - RNA, 119 nt, Human
aauuuuaugugagguagucuagaaguuaaugagguaagguauucagggaauucucauuuaaguuccccagaaucauuuauucaaacuagcucaucucuaauugcaucucauuuaaaauu

SEQ ID NO: 4145698 - RNA, 77 nt, Human
aauuuuggcaggauuaaauuugaacugggcauagguuguauaugcagaaaacuaaacaugaugccuguacuaagauu

SEQ ID NO: 4145699 - RNA, 67 nt, Human
aauuuugggacagguuuauuauguagcauuauugaagcaauagcugauuaauguacuaccuaagauu

SEQ ID NO: 4145700 - RNA, 85 nt, Human
aauuuuucacuuuaaacaaguuacucuggcuguaaugaggaaaacaguuuugaaauggccaagagucgauuuggggagaaaaauu

SEQ ID NO: 4145701 - RNA, 79 nt, Human
acaaaaaaagaauaaucucuucccaguaaaaauggcucagguuaggucuagagcuaagggaaaggauuauucuuauugu

SEQ ID NO: 4145702 - RNA, 58 nt, Human
acaaaaggauuuuugcuaggaagacaaacuuuuuguauuuccugguuuagaucaaugu

SEQ ID NO: 4145703 - RNA, 64 nt, Human
acaaaaguguccugcuuucacauuuagauuauaacaugaacagguggaggccaggauacuuugu

SEQ ID NO: 4145704 - RNA, 100 nt, Human
acaaacacacuuagguuaauuaaaugguggucauucauuuuuugguagauaucuucccugagaagacugcaucauauuugguaaacugcaggauguuugu

SEQ ID NO: 4145705 - RNA, 77 nt, Human
acaaacacauucaaauagaacucacagacaagagcaguuauuuaacaguucucuuggguguguguuuauauguuugu

SEQ ID NO: 4145706 - RNA, 126 nt, Human
acaaacugccacacauuaggggacaaaaacaguagacauuaauuuucuuauaauucuggagacuggacguccaagaucaagaugucagcaggguugguuucuuuugugccucucuccuuggcuugu

SEQ ID NO: 4145707 - RNA, 62 nt, Human
acaaagaccauguggccugaaaagccuaaaauguugaggcuuuaaaauauuugggucuuugu

SEQ ID NO: 4145708 - RNA, 78 nt, Human
acaaagcaugauagggagcccaugggcagaugucugcaauuuauaaaugugugcccugaagcacccucacccuucugu

SEQ ID NO: 4145709 - RNA, 83 nt, Human
acaaagcuuucuguacauaaaggaggcucuuugccaagauugguauuugcaaagagaauccuguguguccugagagcuuaugu

SEQ ID NO: 4145710 - RNA, 79 nt, Human
acaaaggcauauguuccucugcuccaucuuuacuguuucaggaaaggguagggcccggagacagacagccuggcuuugu

SEQ ID NO: 4145711 - RNA, 58 nt, Human
acaaaggugcgucccuucagcucuucuccguggagcucggggcuuucuguauuuaugu

SEQ ID NO: 4145712 - RNA, 60 nt, Human
acaaagucugaaaccugaggcaauggacccacagaacuauuccuuggugucagaauuugu

SEQ ID NO: 4145713 - RNA, 76 nt, Human
acaaauagaauaaaaggaaaugugccugacacugcacuaaguauguggguguguuuguauauuuuucucugcaugu

SEQ ID NO: 4145714 - RNA, 55 nt, Human
acaaaugacucaaacaccacuuugcagaaguaaaggugcuaggcugagucuuugu

SEQ ID NO: 4145715 - RNA, 66 nt, Human
acaaaugucuacauugagaauaaugcaguaaagaaaaggaugcacuucuuaauaugagauaugugu

SEQ ID NO: 4145716 - RNA, 84 nt, Human
acaacacagagacccugcaauagaaaacucaauacuuaaggaaaaaagccuguauuuuauuucaguucacgguuaugcuguugu

SEQ ID NO: 4145717 - RNA, 58 nt, Human
acaacagagcuggacugagaggcccugcugaaggucacucagccuguccccugucugu

SEQ ID NO: 4145718 - RNA, 57 nt, Human
acaacaggcagguugagaaacauuuucuuggagaguuucuugauucuugccaguugu

SEQ ID NO: 4145719 - RNA, 59 nt, Human
acaacagugugguggaaggagcacuagauuaaguacuaauucugcugccacaucguugu

SEQ ID NO: 4145720 - RNA, 72 nt, Human
acaacauuuaagucucugacucacacaauguagcuguuaauuacauuucugucuuagggacuguuucguugu

SEQ ID NO: 4145721 - RNA, 68 nt, Human
acaacuagaaagaacauauuuccacaucggccugggacaggucugguuuaugccuuuugaucuggugu

SEQ ID NO: 4145722 - RNA, 106 nt, Human
acaacuugcuggugaaaaagugccacucggggaggcugcuaacaaggaaguuaaaugcuucugccacgagcaguuucuucgcuguauuuuucaugagcuguaaugu

SEQ ID NO: 4145723 - RNA, 61 nt, Human
acaagagacaagagguucuucuggccuccaggagaaguuuaagaccuuugauuucucaugu

SEQ ID NO: 4145724 - RNA, 89 nt, Human
acaagagacaucaacugggacuguguaaauauaagaaaguaucuccucaguuaagucaauaucaaucucagccacuggguguuuuuugu

SEQ ID NO: 4145725 - RNA, 84 nt, Human
acaagagcccaacaucuguaucauuaguacaucaauacgcuuguguguauguguggauagauguauauacuacauguucuaugu

SEQ ID NO: 4145726 - RNA, 78 nt, Human
acaagauacuaggucccaauccguggaaacuguuaauguuacuucacaggaaaaauggguccuuuaagaugucauugu

SEQ ID NO: 4145727 - RNA, 101 nt, Human
acaagaugaauucugguggaauuuaugauuucuauauaaaaaaugaaaccauaaaaaguauuagaagaaauuauagguagacguuuuuagaaucauuuugu

SEQ ID NO: 4145728 - RNA, 70 nt, Human
aauguaucaguugccuacuacauggcaggcagagggcugugugugugugugugugugcaaauauuauauu

SEQ ID NO: 4145729 - RNA, 70 nt, Human
aauguauuuuccauugggacugugugcuuuagauucucuuuauuauuugaguguuaauggaaauuauauu

SEQ ID NO: 4145730 - RNA, 57 nt, Human
aaugucagccugaaagcuauucuucacuucaaggggauuagagcuucagcugauauu

SEQ ID NO: 4145731 - RNA, 77 nt, Human
aaugucauaggugccacugaauugugaacaccuacaauuaaauaaguagguauuucccaaaguggcauggugguguu

SEQ ID NO: 4145732 - RNA, 62 nt, Human
aaugucaugagccugcucuuguuucucuccacugggaacagaggaaugggcuacaaggcauu

SEQ ID NO: 4145733 - RNA, 55 nt, Human
aaugcacaaaaauuguauguaaacauguguguguaugcaugcuuguguguguguu

SEQ ID NO: 4145734 - RNA, 74 nt, Human
aaugcacaugucuuggccucaccuccagccuacucaauuauaauuucugguuuuagagcccagaugucuguauu

SEQ ID NO: 4145735 - RNA, 63 nt, Human
aaugcagaacuucuguuaguacuauucauguuuuugcuaaaugugcacacagaaauuugcauu

SEQ ID NO: 4145736 - RNA, 74 nt, Human
aaugcagauuucuuggcuccucucacagacucagggaccaaaaauuuugugauguggaccuggcaaucugcauu

SEQ ID NO: 4145737 - RNA, 77 nt, Human
aaugcagcuggcaagugucugagguuuuguauuagcccacaaagggcauaauuaucucagacacuuguuuauucauu

SEQ ID NO: 4145738 - RNA, 74 nt, Human
aaugcagguauuccuggccucaccccaacuauuuuaauuucagguaauuugggugggguucaggaaucuucauu

SEQ ID NO: 4145739 - RNA, 112 nt, Human
aaugcaucaggcguuuuaagaaugaagugaaaguaagaaaguaggacugcccaauggaggacagucuuccaagaguuauauuucucucuuuuuucuaaaugccuauggcauu

SEQ ID NO: 4145740 - RNA, 80 nt, Human
aaugcaugguaucagaaguguuuuggauuucagauuuuuuuugggaaucuggaauauuugcauuguaccaguucagcauu

SEQ ID NO: 4145741 - RNA, 86 nt, Human
aaugcccucacaggcaugcuuuaucugugagaaccugagagcagaaaagcuuugguaauuaauuugauagguucuggauggguauu

SEQ ID NO: 4145742 - RNA, 57 nt, Human
aaugccuuuccacuggguaucaggaguacuugagcagcuauuaguggaagaggaauu

SEQ ID NO: 4145743 - RNA, 77 nt, Human
aaugccuuugcucaugucaccaaagcacaagcagaaacauuacugcuuagugucuuccaggacaugguaauaguauu

SEQ ID NO: 4145744 - RNA, 70 nt, Human
aaugcuaacauugguuuauaucccuugagcacacaccagcuggauaguaggaggaagccaguucagcauu

SEQ ID NO: 4145745 - RNA, 66 nt, Human
aaugcugaguccugugagucuuccuagcaaaucaaaucuggaaggggucuugaggacuccagcauu

SEQ ID NO: 4145746 - RNA, 58 nt, Human
aaugcugcugcaugaacagcggucacgaugcuagugggccagggagugcaggagcauu

SEQ ID NO: 4145747 - RNA, 58 nt, Human
aaugcuggaucuccuccuuggcaugcuuauuaucucccucgggagcagauccaccauu

SEQ ID NO: 4145748 - RNA, 65 nt, Human
aaugcuucugagaggucaaggcaaaaacuaaagaagcuguuggauuugacagcucagagggcauu

SEQ ID NO: 4145749 - RNA, 81 nt, Human
aaugcuucugauuuuccuacugauaaacaguuauuagaaaauaauuggauaaaaauaauuaguaggacaguugaagguguu

SEQ ID NO: 4145750 - RNA, 83 nt, Human
aaugcuugauacuauauuguuuacagacuuccuugugacucauggcucuucacaugucagucuuaaacagaugggaagguauu

SEQ ID NO: 4145751 - RNA, 57 nt, Human
aaugcuuugccaacagcuauugucuuugacaagugacugugcuggcaacauagcauu

SEQ ID NO: 4145752 - RNA, 57 nt, Human
aauggaaugaauaagcaagcugauaucaauuuaucagcuuaucuuguuaguuucauu

SEQ ID NO: 4145753 - RNA, 73 nt, Human
aauggagagaacugaccugaaaggauuuugauacaagguuguugacuguuccuaagguaagauucucuauauu

SEQ ID NO: 4145754 - RNA, 60 nt, Human
aauggauuccagggggaccauucaguaggauauugcaguggugcuagguggaauauaguu

SEQ ID NO: 4145755 - RNA, 91 nt, Human
aauggauuuaagcauaauuugauuuuauaguuggugaacguggcucaauuaacuucaccagguguacaguuaguugaucuugggcucuauu

SEQ ID NO: 4145756 - RNA, 62 nt, Human
aauggcagagcugggauaugaacccagguagucuggucaugaaguucccacucugagccauu

SEQ ID NO: 4145757 - RNA, 70 nt, Human
aauggcaguugagauggaguuuuggggauaugggcuucuuggaacauuuccuuuuacuccggcugcuauu

SEQ ID NO: 4145758 - RNA, 73 nt, Human
aauggccuguuagaguugucucagguuaggguuagaugauccugccuucauacugcuguaucaacuggccauu

SEQ ID NO: 4145759 - RNA, 77 nt, Human
aauggccuuacaggucugugucaucaucuguaacagagaaggcugagaagauggugucaguagauucuggggacauu

SEQ ID NO: 4145760 - RNA, 55 nt, Human
aauggcuggguuucauuuuguaaaggcauuuguuuagaaacuggucuuagccauu

SEQ ID NO: 4145761 - RNA, 70 nt, Human
aaugggagacugguuuauguaucaucuagaauugugauaugguucaaggggauaauaaaccuuacuuauu

SEQ ID NO: 4145762 - RNA, 57 nt, Human
aaugggaggauuuucucucuugcauaaauacacagagaccugaagagcuuccucauu

SEQ ID NO: 4145763 - RNA, 74 nt, Human
aaugggcugccaggggccucacaggccaugguaaugcagaagcccuggcuagauugagcccuugcaugcuuguu

SEQ ID NO: 4145764 - RNA, 129 nt, Human
aauggggcaaggugagaaugaacccugugggauuggauuugauuuguagauaguguagauacauuaauauauuauauuguguuauauaucacaucuuauccuaucuuaucuuauucuggcauguugauu

SEQ ID NO: 4145765 - RNA, 65 nt, Human
aaugguaaaugaaacagucuccagacuuggaugacaccaucagaagucuggacugcuucuccauu

SEQ ID NO: 4145766 - RNA, 79 nt, Human
aaugguuaguuuggaaggaggagcaucuggauguaaugaauuuacauguauugauuucucuucuuccaaauauauuguu

SEQ ID NO: 4145767 - RNA, 79 nt, Human
aaugguucugcaggugguuuggacacugcucaagaguccccuuggcuggcaggcaacggaccacuagucagaaauaauu

SEQ ID NO: 4145768 - RNA, 108 nt, Human
aauguauacuuuaaguucuaggguacaugugcacaacaugcagguuuguuacauaugcauacaugugccauguuggugugcugcacccguuaacuugucauuuacauu

SEQ ID NO: 4145769 - RNA, 79 nt, Human
aauguccaagucacagauuuucagcagacaggagaauaaaauccaugccaaugauggaaacuugggaacuuggcacauu

SEQ ID NO: 4145770 - RNA, 64 nt, Human
aaugugagggaaaucagucagaauuggcaauaucucacaauuucacugauuuuuccccagaguu

SEQ ID NO: 4145771 - RNA, 86 nt, Human
aaugugcucuguauucuauggcaguuggugauaauaauagcuugguuucuuuuggugcauuuccuucaaggaguugagaggacauu

SEQ ID NO: 4145772 - RNA, 78 nt, Human
aauguggaaauuugagaagaaauaguuugcaauuguguuuacuuuacaauuggccaauguuucucacuguuccucauu

SEQ ID NO: 4145773 - RNA, 56 nt, Human
aauguggguccuauggaguuucaguaucagacuuauaaaacucauagacucauauu

SEQ ID NO: 4145774 - RNA, 81 nt, Human
aauguguaauuggauuguaacauagaguaaaugcuugagggaguggauaccccauuuucuauguuguaauuguuacauauu

SEQ ID NO: 4145775 - RNA, 79 nt, Human
aaugugucagaaggcaauggggauaucugggcccuaguuucaacucagcuacaaauucacauuuagccucugacauguu

SEQ ID NO: 4145776 - RNA, 68 nt, Human
aauguguccuauaacuagaaauguguuuugagcaauuuguaggcucaguuuauggucuaguucauguu

SEQ ID NO: 4145777 - RNA, 94 nt, Human
aaugugugaaaaauacuugcuucaaauaaauguuuaauuauagacauuauaaugacaauauuaauuuggagggaguguauuuaacuaauacauu

SEQ ID NO: 4145778 - RNA, 56 nt, Human
aauguuaauggaucaaccuagacaucuuugugguguuaaacaugauccauuacguu

SEQ ID NO: 4145779 - RNA, 56 nt, Human
aauguugacguuggccagggccuuuccaaacaagccaggccaaaagguucaacauu

SEQ ID NO: 4145780 - RNA, 60 nt, Human
aauguuuaagaaaaauagcagcaguuucacuaugcugagugcaauuuagacuugaacauu

SEQ ID NO: 4145781 - RNA, 60 nt, Human
aauguuugaacuuugcauauuugacauaguuccugguaggaauagcacagcucaaacauu

SEQ ID NO: 4145782 - RNA, 76 nt, Human
aauguuuucaguagauuggcuaauuugauacuuugaaaaacaaguauacuauuauugucaguuuauaaauggcauu

SEQ ID NO: 4145783 - RNA, 77 nt, Human
aauuaacaugggacguuauuuuaaugacugauuuuaacuagaucaugugauuugaaguaaugggucugugucugauu

SEQ ID NO: 4145784 - RNA, 76 nt, Human
aauuaauucaauguuucuuaucaaguugaaaucaggaggguuuucaggucagcuggaugggagaccauguuugguu

SEQ ID NO: 4145785 - RNA, 67 nt, Human
aauuaauucaguuuuuaagggaaggaggagacccaaaucauaucccuaaauaaauucuggaugaauu

SEQ ID NO: 4145786 - RNA, 77 nt, Human
aauuaccuauuugaguccuguuuccaauuuguuggguuauauacccaugaauggaaucacuggagcauaugguaauu

SEQ ID NO: 4145787 - RNA, 68 nt, Human
aauuaccuuugaaguugugugggguuuuuucgucucccuuagaugacccacaguuaaccaaaggaauu

SEQ ID NO: 4145788 - RNA, 130 nt, Human
aauuacuuaauuaaaaaauggggagaaacauaauuugagcccuuuacaguaugguuguaucaaaacacauuuuauugagagaucaaacuuguaaaugauccaauuugugauuuuccaugccuuugagauu

SEQ ID NO: 4145789 - RNA, 62 nt, Human
aaucuacuucugcauauaccaggaaaggcuguuaaagacucugaaaugggcaaaaguagauu

SEQ ID NO: 4145790 - RNA, 58 nt, Human
aaucuaggacgccugccaugcuaggacccccuacaucucuucuuaaggcuccaggauu

SEQ ID NO: 4145791 - RNA, 71 nt, Human
aaucuauaugcuuuucacauacauaaauaaugacaagaaaacauuaggagcaggguggagagcaauagauu

SEQ ID NO: 4145792 - RNA, 130 nt, Human
aaucuccauacuugaacuuuuucuguuauuaaaucuugcuguaccucuacaagguaaauaugaccuuucuaggugagcaggauuucaugguguaauaguuuugugcuucugacuaguguaggugaccauu

SEQ ID NO: 4145793 - RNA, 66 nt, Human
aaucucuguugcuaugauaguuaagauacuaggaaaguccuuugugaacuaugaauagaagagauu

SEQ ID NO: 4145794 - RNA, 62 nt, Human
aaucugaggcuggcacgggaggugucaguagagacauaggcacacugucccauccucagguu

SEQ ID NO: 4145795 - RNA, 77 nt, Human
aaucugcccggaggagccuuccagacugcccacacuaggccaggugugggaggucuggaaggcuccccaggcagauu

SEQ ID NO: 4145796 - RNA, 57 nt, Human
aaucuggaguuaauguuuucgcucaaggaagcugaagacuaucaauacuccaugguu

SEQ ID NO: 4145797 - RNA, 94 nt, Human
aaucuuggugaaucguaauugcuuguuuucggucauaagaacauaaggaagaaucuguauugcagaaaauaggcaguguuuacucugcgagauu

SEQ ID NO: 4145798 - RNA, 118 nt, Human
aaucuuguuuguuguaacuaaugagugcccucuggaagugauggcaggucauuaccauuauucaaauuuauaugaucagccuauccuaucuagacucauuuucagugauagauagauu

SEQ ID NO: 4145799 - RNA, 59 nt, Human
aaucuuucaauacugcacuguguuuucuggucacagcguaaaugggguguugaaggguu

SEQ ID NO: 4145800 - RNA, 99 nt, Human
aaugaaauaaugcaauauguacacuuacagguauaucuucuuaguaaaauguauuuaagcuucauauaugugugagucaauaguuugugucucuucauu

SEQ ID NO: 4145801 - RNA, 129 nt, Human
aaugaaugaacaaugggcucucacaauuauuugcuggagauaaugaugcuaacccaguccaguuagcagaacuagacuggguuaacaucauuaucugcagcaaauaauuaugagaacccuguaauucuu

SEQ ID NO: 4145802 - RNA, 77 nt, Human
aaugaaugacaguugguuggacccaaguaaggaguuguuaguaaguuccuuucugguauuuaaccaaagcauuuguu

SEQ ID NO: 4145803 - RNA, 76 nt, Human
aaugacagcuacagggagagcauugccacuuggaaacaacuuugcagauguuguuccugccuguagacagguuauu

SEQ ID NO: 4145804 - RNA, 104 nt, Human
aaugagaaauguguagcauuggcauugggagcagcagggagaugcggagccugagauuccaguuccguccccucugaccuugcugauaugcaaauuguuucauu

SEQ ID NO: 4145805 - RNA, 124 nt, Human
aaugagauaacagguaucauugcuuuguaaauuguagagcuauucaugacauuuaaacauugaugucaauauuuauugagugcuaagaauaaucugcaaagugugcuacauggagcaucuuauu

SEQ ID NO: 4145806 - RNA, 84 nt, Human
acagcgugcuggaccuuccugagccugugccuugagagcagugaguuuucucacagcaggggccaggucugucuuguucgcugu

SEQ ID NO: 4145807 - RNA, 91 nt, Human
acagcugaaucauaauuuuuguugcucuguuuacuugaugaucaaggccaaaguccaguaaaaagcgacaggaaguguauauucagguugu

SEQ ID NO: 4145808 - RNA, 73 nt, Human
acagcugcuguguuucugcuagaaaauaaauaacaaauauauugacaugccuuuuccuuagaacagcagcugu

SEQ ID NO: 4145809 - RNA, 56 nt, Human
acagcugcuguuuuugaaggacgccagucucuuaugcuucauuggcagcagacugu

SEQ ID NO: 4145810 - RNA, 65 nt, Human
acagcugguuaucagagaggccuaggccagaacucaugccagcgccucucccauggcuauccugu

SEQ ID NO: 4145811 - RNA, 66 nt, Human
acagcuguaugugaggccacagugaaguuuguauacaggguuuuguuugccacacaaaacaguugu

SEQ ID NO: 4145812 - RNA, 58 nt, Human
acagcugugguuugccaauccuuuagacccaucuggucuagagacugccaccagcugu

SEQ ID NO: 4145813 - RNA, 55 nt, Human
acagcuucuauuucucuguacucuaugucuuugaguuuggagagaaagaaguagu

SEQ ID NO: 4145814 - RNA, 64 nt, Human
acagcuuuagagaagaaagguugcuguuggauucaagggcagcuuugagucuuagaguacuugu

SEQ ID NO: 4145815 - RNA, 84 nt, Human
acagcuuuuaacuugaccuguauaaaacacugaauuuaggagcuugcaugacguguuuacguaccaggcuaaggaaaaaauugu

SEQ ID NO: 4145816 - RNA, 67 nt, Human
acaggacuuugccauaugggucuuguuuccucaacuggugugaaaacucugugugaguagagccugu

SEQ ID NO: 4145817 - RNA, 93 nt, Human
acaggaucaaagggaaccuguuaggguugcuuuuggcugcaacuaacagaaaacugccccagugacccuaacagguagggcuuugguuccugu

SEQ ID NO: 4145818 - RNA, 63 nt, Human
acaggauuccaggauuccaggacaaauugauuacaaaugaccugcaaaugcuuggcacccugu

SEQ ID NO: 4145819 - RNA, 64 nt, Human
acaggcaagucacacaacuuguacaagaauucaucuugggccaggugcaguggcucaugccugu

SEQ ID NO: 4145820 - RNA, 58 nt, Human
acaggcaccaugacucuugugcagauugucuuguuuuaauaugggugaugaugucugu

SEQ ID NO: 4145821 - RNA, 60 nt, Human
acaggcacugucaagucaugaagaugugaguuucuuccuagcccugacagcaguggcugu

SEQ ID NO: 4145822 - RNA, 56 nt, Human
acaggcagcugcgacaagagagcccuuuugccgaaaauagcuuuccagcagccugu

SEQ ID NO: 4145823 - RNA, 55 nt, Human
acaggcagguccugucccagcugcagagcagaguggugggacacgaucugccugu

SEQ ID NO: 4145824 - RNA, 56 nt, Human
acaggccauaaaggcaggcccuucuuccucccucggguggcccccuuuauggaugu

SEQ ID NO: 4145825 - RNA, 87 nt, Human
acaggcccuugacucuuucuggugacucaggaggauaaagcugcauuucagucugauggcuccuucauuaugggucagauggccugu

SEQ ID NO: 4145826 - RNA, 85 nt, Human
acaggccuguaugcugauuauaagccagacguuucagacauuuugugaaaagauuuuagugucuggcuauauuuaaaugcucugu

SEQ ID NO: 4145827 - RNA, 65 nt, Human
acaggcgcuggggccaaggcuaaauaauuccucuguauucacaugccuucacucccagaguuugu

SEQ ID NO: 4145828 - RNA, 70 nt, Human
acaggcugaccggcugcacggccgggagggcgcggcuucuaggcccaggccugcggcuggggagcgcugu

SEQ ID NO: 4145829 - RNA, 85 nt, Human
acaggcuuucuggacaggucaaagcccaugaugacccauaaugagagaaguuggacacuauggcuugacuugcaccggcaccugu

SEQ ID NO: 4145830 - RNA, 77 nt, Human
acaggcuuuguaguucuggcucuccccugcuggguucagucgggcuuuccaaggguagggccaggccuuuugucugu

SEQ ID NO: 4145831 - RNA, 83 nt, Human
acagggacacacuugcauuugagaaaguucuccuggcagcagggugcacagcagaggaagcagauucggggaggugccccugu

SEQ ID NO: 4145832 - RNA, 65 nt, Human
acagggagcugacaaccaaggaguggcugauaaauacuccagcuuucuccccucgguuucccugu

SEQ ID NO: 4145833 - RNA, 60 nt, Human
acagggcuggggcacuuggcuggcacaggauggccaagccucugaagagucuuuuccugu

SEQ ID NO: 4145834 - RNA, 130 nt, Human
acaggguuucacuguguuagcgaggauggucucgaucuccugaccucgugaucugccggccuuggccucugaaagugcugggauuacagguuugagccaccgcgccuggcccucacacuucuugcucugu

SEQ ID NO: 4145835 - RNA, 98 nt, Human
acagguaaaguagcaugauuuauaacuuugggcccaccuguugagaguugggguuuauuacaagguuccagaauuaugcucuuuucuuccagcccugu

SEQ ID NO: 4145836 - RNA, 114 nt, Human
acagguaagcucucaaucauuguugacuacauaagaagaccaggguucaagucuuggcuccauucuuuaugaguugugugaucuaaauuuuuuggagccuuaaauuuuaccugu

SEQ ID NO: 4145837 - RNA, 72 nt, Human
acaggucucugcucuagagucugugauugucucccgagauggaccgugaacuucucaagggcagagacuugu

SEQ ID NO: 4145838 - RNA, 74 nt, Human
acaggucugaggcuauccacgcacaugggcuugaccuacauuaggucaagaauugaugugguuuuuaaaccugu

SEQ ID NO: 4145839 - RNA, 78 nt, Human
acaggucugguuggccucucccaaauggcuuugggugacccuaucccccuggcugcaggcagaggcugucuggccugu

SEQ ID NO: 4145840 - RNA, 61 nt, Human
acaggugagggguucuaggcuguauggagaaagaaaggaaagccaggaaguccccaacugu

SEQ ID NO: 4145841 - RNA, 83 nt, Human
acaggugucucugccucggccuuggcauguacagucgguuugaagcucugcugcucgccacggcccaggggagcuaugccugu

SEQ ID NO: 4145842 - RNA, 97 nt, Human
acagguguugaguaguuuccugggccuuuaaugcuuuaaauuuauuauuuaacaacuaaagccauacugaaagccacuuggaaacuucagcugaugu

SEQ ID NO: 4145843 - RNA, 55 nt, Human
acagguuuaagagguauuuccucuuucucauaggaaaugcuuuguauauaucugu

SEQ ID NO: 4145844 - RNA, 91 nt, Human
acaguaaagucuuggcgguauucucagagugaccaagucuuucuaucuuuggaaagaguuacacaguuucagaaacugcuaagauagcugu

SEQ ID NO: 4145845 - RNA, 55 nt, Human
acaguaacucuuuuacccuccuccagguauagauuuggguuggagaaguuucugu

SEQ ID NO: 4145846 - RNA, 55 nt, Human
acaguaauugugaacuuaacgucucagaauugggccaagaaagugcaguuacugu

SEQ ID NO: 4145847 - RNA, 62 nt, Human
acaguagauugguaugaugucagagaaggaauuccuggaugacucgggacuacauuuacugu

SEQ ID NO: 4145848 - RNA, 79 nt, Human
acaguaggugcucaauacauguguguggauggugcgcccagccaccuggagauuucuauacauguaagggcucugcugu

SEQ ID NO: 4145849 - RNA, 75 nt, Human
acagucaaacaaauuaacauauccaucaccuuccauaguuaccuuuuguguguguguguuuguuugugugugugu

SEQ ID NO: 4145850 - RNA, 70 nt, Human
acagucgcgguugcugauugagaacaggccugucccagcaguucucagaggagucgggagcugcggcugu

SEQ ID NO: 4145851 - RNA, 80 nt, Human
acagucuucuucucugucuucuguacuuuguuccuaugaccccagggaggccauaguuugggagucagggggaagagugu

SEQ ID NO: 4145852 - RNA, 58 nt, Human
acagugauucugcaaaccauaucgaacccauguuagauauuugcauucuagucacugu

SEQ ID NO: 4145853 - RNA, 57 nt, Human
acagugguauggacugaaauuguuucuauaauaagcccaccagcuuuaugcuacugu

SEQ ID NO: 4145854 - RNA, 86 nt, Human
acaguguaguaaaaguguagagacuuuggaaccagacagaucuucaucggaaucccgguucugucucuacacuugcucugugcugu

SEQ ID NO: 4145855 - RNA, 128 nt, Human
acaguguauaucaauuucaaggcacagggaggaaacauccauuuuguucaaaagcaucagacuuuguggauucuguuuggaugcagcagaaguguucuucucuuucaaaaguauuagaaacgcauugu

SEQ ID NO: 4145856 - RNA, 103 nt, Human
acagugucauuuguuuaggagaaucuacaaugaaaaaauguuuaaauuaaauguuuaggcauuuaaagauguaagacucgcuuaucuggcacauagacauugu

SEQ ID NO: 4145857 - RNA, 78 nt, Human
acagugugugccucugugggcagagcugccugucguagaagggccagggcagcaugcagcgggggugagggcuucugu

SEQ ID NO: 4145858 - RNA, 98 nt, Human
acaguguuggaggcugaaaauccaagaucaagguaucagcagauuugguuucuucaaagacuucucuccuugacuugcagauggcaccuucucacugu

SEQ ID NO: 4145859 - RNA, 70 nt, Human
acaguuaugcaagugcuuuccucacacuuggcaugcagccuaagugcuuuguggagaauuuguauuuugu

SEQ ID NO: 4145860 - RNA, 68 nt, Human
acaguuccccucaacagggcugggaccaucugcaggcacuuacuucagcugugugccaggggagaugu

SEQ ID NO: 4145861 - RNA, 73 nt, Human
acaguugcagaggccucaaaccagaccugaugauucagaaucucagaugcuagggcugagcuauuugcauagu

SEQ ID NO: 4145862 - RNA, 64 nt, Human
acaguugggcuuauguaauuuuaagauggaaaacauuuuccuuuaaaauuuuaaaagccacugu

SEQ ID NO: 4145863 - RNA, 55 nt, Human
acaguuuggcaaaugucccacagcccgcuuguccuggggugugugccugagcugu

SEQ ID NO: 4145864 - RNA, 63 nt, Human
acaguuuuggaaguauuacuaucccucuuuacaaaugaggagagacugaaacaccaagacugu

SEQ ID NO: 4145865 - RNA, 91 nt, Human
acaguuuuucaggagcacauuuguuucucuagaguagguccucuuuggaguccacuuugagaagcugaugaaagcuauggauucucauugu

SEQ ID NO: 4145866 - RNA, 55 nt, Human
acauaaaauagcaaauaaaacaggcuuuuccuguguccugguguuaauuuuaugu

SEQ ID NO: 4145867 - RNA, 62 nt, Human
acauaaacaugcuuacauucucaacacaaguggagagagaucaaccugugcauguucugugu

SEQ ID NO: 4145868 - RNA, 82 nt, Human
acauaacccagcggaagagcuggagcugcuacaggaaaaguuuuguaaucuugaaauauguucagcuuuuuuguagguaugu

SEQ ID NO: 4145869 - RNA, 83 nt, Human
acaaugaaugaugauuagaaguuauagaggugcagauucauauccacacagauaaguguuuucuaacaaaccauuaucauugu

SEQ ID NO: 4145870 - RNA, 80 nt, Human
acaaugaucagaauuaaagugcccuauguaaagcauuuuucaggaagaggguagaggcauugcuuaauuucagauuuugu

SEQ ID NO: 4145871 - RNA, 78 nt, Human
acaaugcauacuucgaaauuucaguggauguuuuucuuuaucauuguaugaauaagguuuugaaguacaauguuuugu

SEQ ID NO: 4145872 - RNA, 84 nt, Human
acaaugccuagcacauaguaggcucucaaugaauauuugcuuaaugccgaaugaauuaagagccuacuaugugccgggcgcugu

SEQ ID NO: 4145873 - RNA, 56 nt, Human
acaauggcggcgccaggcccuaauuggggacagaggcacccgcgcgcggccauugu

SEQ ID NO: 4145874 - RNA, 73 nt, Human
acaauggggcaacaugaagaaaacagaacccuugcacacuguuggugggacuguaaauucauauggccauugu

SEQ ID NO: 4145875 - RNA, 80 nt, Human
acaauguaccugguauguaauaaguguucuaaaaucacugacaggauuauuagacaauauguauuuuauauguguguugu

SEQ ID NO: 4145876 - RNA, 59 nt, Human
acaaugugauaauuuaaagauaugggaucucccaguuguuuuggagguuuuuucauugu

SEQ ID NO: 4145877 - RNA, 76 nt, Human
acaauuauccuuuuggcaucugucucugcuuguacuucucugcaaucaauuggcucauguaugaaagggugugugu

SEQ ID NO: 4145878 - RNA, 67 nt, Human
acaauucagaaagcaguugucaaugggcuggagcuuucagcugauaaggaggcauuucuggaauugu

SEQ ID NO: 4145879 - RNA, 65 nt, Human
acaauuggcaugaggucuaugaauauguaguucacagguauuuuucauauuucucuugcuauugu

SEQ ID NO: 4145880 - RNA, 62 nt, Human
acaauuugguuacuuccuuagaauucauuuuagugguguguuuucucuggauagccagaugu

SEQ ID NO: 4145881 - RNA, 100 nt, Human
accaaaggcuccugagggcugcuuccagagcuagccaaagccugugccuuuggggacuuggccuggaugcagccuuagaugucgcaggcgcacauguggu

SEQ ID NO: 4145882 - RNA, 70 nt, Human
accaaaugcugacggcugccugcuucaaacccugccacaucagcagggagggagcacagcggcauuuggu

SEQ ID NO: 4145883 - RNA, 67 nt, Human
accaaccaaaaacaaugacuuuggagaaaaauuagacucagaaagucuguccaggcauuggguuggu

SEQ ID NO: 4145884 - RNA, 79 nt, Human
accaagauagucugaaguuuagaguguuguaauuuacuauggggagagggcacaagacucugagccccaagcaauuggu

SEQ ID NO: 4145885 - RNA, 76 nt, Human
accaagcaacaugaugaccacguguauccauaagcacagcaccuggcuggcugagggcuggucacauuuguuuagu

SEQ ID NO: 4145886 - RNA, 56 nt, Human
accaagggcagagccuacauagaccugcaggcagccccugaggcucagcuccuggu

SEQ ID NO: 4145887 - RNA, 82 nt, Human
accaaguuagguuuuauccucuguuuacaugugugcuuuagagagggcacauguguaaaaguggauaaaagugacccauggu

SEQ ID NO: 4145888 - RNA, 86 nt, Human
accaauauuguuauaauauggagauugacaacuagaacaggagccucuuucuuagauguuagcucugugugggaugcagugagggu

SEQ ID NO: 4145889 - RNA, 55 nt, Human
accacagcaggcccuggaagcuggaacccccaccugcugccuuguccugcuuggu

SEQ ID NO: 4145890 - RNA, 79 nt, Human
accacaggcaccagagggaguuucugagguugcagaggugacugagcaauaucuuccaagcucccugguguauucuggu

SEQ ID NO: 4145891 - RNA, 56 nt, Human
accacagugaguuagauugaccauguuuuucaauugugguugguuaugccuguggu

SEQ ID NO: 4145892 - RNA, 69 nt, Human
accacauucaucaguguuguacugauugaucuuagaaauauauaaauagaauaauagugacgaaugggu

SEQ ID NO: 4145893 - RNA, 107 nt, Human
accacauuccuaggcacucuucuaggcacuggagauacagagaugaacaagacagagauggucacaguuuuucugucucuuacauugcagaaagagagggauguggu

SEQ ID NO: 4145894 - RNA, 90 nt, Human
accaccaacuuaaaaaggcugguguggggguuucauuaagacaauuucuuaaaauuguuuaaagauacaucccugaauuccuuugguggu

SEQ ID NO: 4145895 - RNA, 69 nt, Human
accacccccagcuaauuuuugaauuuuuaguagagacgggauuucaccauguugguuggcuaggauggu

SEQ ID NO: 4145896 - RNA, 56 nt, Human
accaccucagcucuggauggcacuuaagucagccucaauucauuggccaggguggu

SEQ ID NO: 4145897 - RNA, 82 nt, Human
accaccuucugauaauugagaacaggaguguucuuuuaggauuuuccuggauaccuaccaccuguucucacacgaggcuggu

SEQ ID NO: 4145898 - RNA, 56 nt, Human
accacgccuggcuaauuuuuguagagacaagguuucaccaucuuggccaggcuggu

SEQ ID NO: 4145899 - RNA, 78 nt, Human
accacuccaucuccaacucccuccccugucuagcuucauugaaaacugcaggauggguagaaguggaagagguguggu

SEQ ID NO: 4145900 - RNA, 130 nt, Human
accacuucagggaugauuucuggaccauugauaaaaagcuuagucaauagugaauauagaguaugauuucuuaguuuuuaucuuucuuuugaauugcuuuaagugggugguagcugaaucccucgagggu

SEQ ID NO: 4145901 - RNA, 65 nt, Human
accacuuugacaauuugauaggaacauaucuuuguguauuuucauguuucaauuguuaauguggu

SEQ ID NO: 4145902 - RNA, 80 nt, Human
accagaaccagcccagcacuaaguagauuuguguuggauaaaugaaaaugaccauuccgcuuuuugcugggcuguuuggu

SEQ ID NO: 4145903 - RNA, 72 nt, Human
accagaacccuaggccuguguugccguacuuuuaucaacucaaauacaggugugagggucucuuuacucggu

SEQ ID NO: 4145904 - RNA, 74 nt, Human
accagacauggucauugcucucaaguugcuggcauucuaauggcagcagaaauagaagucaaugauagcugugu

SEQ ID NO: 4145905 - RNA, 64 nt, Human
accagaggaagggaaucucaagucuuuaccucccacagucuggugugauucucucucuuuuggu

SEQ ID NO: 4145906 - RNA, 56 nt, Human
accagaggcagacuuacacuccagucugugauuggcuacauguuucuguuucuggu

SEQ ID NO: 4145907 - RNA, 57 nt, Human
accagaggccucuagggccccucaggaccuugucuugccccuggccaggccccuggu

SEQ ID NO: 4145908 - RNA, 64 nt, Human
accagauuugagcgucuuaaaccuacucaguaguagguuucuacuccaguuacaaccaucuggu

SEQ ID NO: 4145909 - RNA, 67 nt, Human
accagcagcacaauuuccaagucauguuauuuuuguuaaaaaugaacuagccagguugugcuguggu

SEQ ID NO: 4145910 - RNA, 95 nt, Human
accagccaucaugcucauguccgggaucucaguccucuggggaaggugagguggcuuuuccucagccaaggcugggauccucagugggugcuggu

SEQ ID NO: 4145911 - RNA, 70 nt, Human
accagcccuucaucaccuaacuugugauuuacagacacugagcacauugcagguugagaaggugcuuggu

SEQ ID NO: 4145912 - RNA, 82 nt, Human
accagccuacuagugcagcacauauaaacaaagagaaaacacauuuucucaaucaaacaugucugacugucuagauaguggu

SEQ ID NO: 4145913 - RNA, 65 nt, Human
accagccuggccaacauggcaaaaacccaucucuaccaaaaauacaaaaguuagccagguauggu

SEQ ID NO: 4145914 - RNA, 62 nt, Human
accagcuaccuuaacagugucaagccucugcuuuggggauagacacaaaggguaguaauggu

SEQ ID NO: 4145915 - RNA, 71 nt, Human
accagcuggucaccugggcacuauucucucccuucugucugugucccuuugaaagcaguugaccaccuggu

SEQ ID NO: 4145916 - RNA, 67 nt, Human
accagcuuuucucaccagaugguguugcuaucaagcauagccuuccucugccugagacuuugcuggu

SEQ ID NO: 4145917 - RNA, 85 nt, Human
accaggccucugugugucauuugucaauccuuuucuguagugggaagcagggagcaggaacauaauugauugcacagcucugagu

SEQ ID NO: 4145918 - RNA, 58 nt, Human
accaggcucccugccagggccggcgcagugcagcgccugagcuacuagggagucuggu

SEQ ID NO: 4145919 - RNA, 57 nt, Human
accagggcacauuccggccagauacccccacuguucugcugcuucuuugcccugugu

SEQ ID NO: 4145920 - RNA, 96 nt, Human
accagggccucagauucagugggaaugaaguggaggcccagaaagaaucauguccaggugaagcucuaccauucccagcaguauuugaggacuggu

SEQ ID NO: 4145921 - RNA, 55 nt, Human
accaggguacuucuagguggggcuugcagcugccccuguccugcuaggcccuggu

SEQ ID NO: 4145922 - RNA, 70 nt, Human
accaguagugccucauuuuuaaguguuauauaaauauucuguggccaaaauaaaaugaggucuaacaggu

SEQ ID NO: 4145923 - RNA, 60 nt, Human
accagucucugcaugccugcugugccuggaaaaggcaauccugcauguuagggauggggu

SEQ ID NO: 4145924 - RNA, 68 nt, Human
accaguuauuagcccuacaacuuugaacaaaucacauaaucguucauaauugcugguuaguaacuggu

SEQ ID NO: 4145925 - RNA, 74 nt, Human
accaguucuuuagaaguugaugguauugguuuuacauuauuucucauuuugcuucaaagguuauuuguacuggu

SEQ ID NO: 4145926 - RNA, 63 nt, Human
accauaugugucagguacacucauuagcucaacuuugcugaugaggauauagauacacaaggu

SEQ ID NO: 4145927 - RNA, 59 nt, Human
accauccaaacugcuuucuguggauccaaucuguaaucugcagagcgcgucuggauugu

SEQ ID NO: 4145928 - RNA, 60 nt, Human
accaucuagaagucccugagggcucaaaacugccccaccagugagaccuucuaagguggu

SEQ ID NO: 4145929 - RNA, 58 nt, Human
accaucuuuuacauuacugcccagaguucuuuuucugaagcaccgguaagaugguggu

SEQ ID NO: 4145930 - RNA, 72 nt, Human
acagaauugggcuggcugaacuucaaccugaucccaucaggcagggaagcuuccagucaagcugaaugcugu

SEQ ID NO: 4145931 - RNA, 111 nt, Human
acagaauuuguacuuuuuuauuagcacguuaguggaguuugaagcuguuaguugaucuuuucaggauauuuucaugagcuuuacuaguuuaggaaacagugcuuuuucugu

SEQ ID NO: 4145932 - RNA, 55 nt, Human
acagacaauuuuacugagccauuuguuuauuuaggauggccugcuagaagucugu

SEQ ID NO: 4145933 - RNA, 61 nt, Human
acagacauuuuaagacacuuuacucaaauccgucaucgaguaaaggaguugcauuguuugu

SEQ ID NO: 4145934 - RNA, 65 nt, Human
acagacccaguuccacaaacuggaacuucuacaacucuugcuuccaguuaaucacugaguccugu

SEQ ID NO: 4145935 - RNA, 77 nt, Human
acagacuuggaaucugcuuuuuauuguauaaaucaauuuuagcaguauuuguaaauaguaguaagaugccaagaugu

SEQ ID NO: 4145936 - RNA, 60 nt, Human
acagagaaagugggcugaagauuuccaaacauuuuucacucucaccuacuauuucuuugu

SEQ ID NO: 4145937 - RNA, 67 nt, Human
acagagaccuggccuugcuuugcauuaucccgggcgggggaagcaacgaggacucagauuucucugu

SEQ ID NO: 4145938 - RNA, 88 nt, Human
acagagcauaacagugagcaauguuaggucucuuuagaucacuaauaagggaaccaguggaaugauaugcucauucaaaugagacugu

SEQ ID NO: 4145939 - RNA, 58 nt, Human
acagagccccauugcuugcccaaguccuuuuccagaagaggccagcacagggcucugu

SEQ ID NO: 4145940 - RNA, 55 nt, Human
acagagcucccagccaucuccucccuguucuggaagacugaugggaagacucugu

SEQ ID NO: 4145941 - RNA, 55 nt, Human
acagagcuuaggaugacucccagugauucucacuuccugguguuuacagcuuugu

SEQ ID NO: 4145942 - RNA, 71 nt, Human
acagaggaccacagaugagccugcagagaaauacucuacuaguuugccggcucuaugugguuuuggauugu

SEQ ID NO: 4145943 - RNA, 57 nt, Human
acagaggcagugugagauacugaaugagaauugcgaucugguugaacauuccucugu

SEQ ID NO: 4145944 - RNA, 66 nt, Human
acagagguguuccagaccuagggagcuuucuaacaaagucauggaagcagguagggauaccauugu

SEQ ID NO: 4145945 - RNA, 63 nt, Human
acagagguuaggauggguuguaaacacuuuauuauuauacagagccuaauaucuaaucuuugu

SEQ ID NO: 4145946 - RNA, 64 nt, Human
acagagucauaagcauguuuuagggucuucaucgugaaccacucuuuaacagacuuugaucugu

SEQ ID NO: 4145947 - RNA, 63 nt, Human
acagagucuuacguggugauaacaaugacauuaugucucuuuuaucaccuguagguucuuugu

SEQ ID NO: 4145948 - RNA, 95 nt, Human
acagagugcauuacacaguaacuggcguguaguaaaugcucauuaaauguuauuuuauuaaacguuagguuuuauuuuaugauaauuuauuuugu

SEQ ID NO: 4145949 - RNA, 60 nt, Human
acagaguguaaugagaaugcaguugguuauguucauaccaauucucauuacaaucuuugu

SEQ ID NO: 4145950 - RNA, 56 nt, Human
acagauaaauuuauaggaguguucuaaggaagucacugcuucaggcauuuaucugu

SEQ ID NO: 4145951 - RNA, 120 nt, Human
acagauaucacccaucucagguuggcuggcucagggugcaguguccaugacaccagaacccuuuccugguccugugacggagcgccagagguaugcagagcuuggcuuucgggugacugu

SEQ ID NO: 4145952 - RNA, 80 nt, Human
acagaucaauccauacucagaaaguauugcagaaaccagaaaccaaaaauguuuguagacagcacugagauggguucugu

SEQ ID NO: 4145953 - RNA, 80 nt, Human
acagaugaauuuuggggggcacacaauucagcccauaacaaauacugaaggcuucucaguggcucccuugaauugucugu

SEQ ID NO: 4145954 - RNA, 67 nt, Human
acagaugacacauuugugcuguugaaggaaaacucagugacucagauagacacaaauuguuccaugu

SEQ ID NO: 4145955 - RNA, 63 nt, Human
acagaugaguuaaagcagagugagaucuagagcccaaaucuccugugugccauucuuaucugu

SEQ ID NO: 4145956 - RNA, 70 nt, Human
acagaugauaugggaaaagggcucggauucaccuggcuucaaauccuggugcugacacccauagcucugu

SEQ ID NO: 4145957 - RNA, 97 nt, Human
acagaugauuugucuucuccuguggagagauuuuguuuuagcagugauaauuuauucacuuuacagaugguuuccugacauuggaaagacauucugu

SEQ ID NO: 4145958 - RNA, 119 nt, Human
acaucuggacgugacugcaugaaguuacccaugggauaacaagaaggcugaggaaagaacaugaauucccugaccuucaucccaggagcucaguuugucuuuguuuuagcuccagaagu

SEQ ID NO: 4145959 - RNA, 58 nt, Human
acaucugggccuugcuguuccagcgcugcgagggugcugaggagggcacccggggggu

SEQ ID NO: 4145960 - RNA, 65 nt, Human
acaucugguuacagauuuagaaagagaacacuuucuucuuucacagugcucuguaaguauggugu

SEQ ID NO: 4145961 - RNA, 61 nt, Human
acaucuucccacacuugcaaaaucuucauagaacaugguggaaguggaugggcaaagaugu

SEQ ID NO: 4145962 - RNA, 75 nt, Human
acaucuugcuuccuuuacagaugggcaaaaugaggcuuagaaaaacgugaugcuucugcagaggaaguagggggu

SEQ ID NO: 4145963 - RNA, 73 nt, Human
acaucuugguuaaucacuuugcacucuuauuugaucuucaugacaauuaucuaaguaagugacagccaagugu

SEQ ID NO: 4145964 - RNA, 58 nt, Human
acaucuuuguuucuuaguguauagaucaggggguuaacacugggagugacaauugugu

SEQ ID NO: 4145965 - RNA, 69 nt, Human
acaugaaaccugagucuaacucuccuucccuguugaccuccagggacauccaagugccauguuuuaugu

SEQ ID NO: 4145966 - RNA, 73 nt, Human
acaugaaaugaaaggcucaccacuucauaggcuuuaaggaaauucuuggccagguguggugccucacucaugu

SEQ ID NO: 4145967 - RNA, 69 nt, Human
acaugacagcuaaggcuccuucuagguauaaaacguuauaaugucuagaauauaagcuuagccacaugu

SEQ ID NO: 4145968 - RNA, 65 nt, Human
acaugauauuaaugucuuauuuuucuuaaacacuuguuaugcggauuaagugagauauuacaugu

SEQ ID NO: 4145969 - RNA, 69 nt, Human
acaugauuauagugacuugugguuuaaccuguaagcuucaucugguaaugacaggcaauguaauugugu

SEQ ID NO: 4145970 - RNA, 58 nt, Human
acaugcaaagggaugcaauuauaagaccauaguauuauugauugaucucugugugugu

SEQ ID NO: 4145971 - RNA, 56 nt, Human
acaugcaagccccugaacacauguuuaggcuagauaugacccagggcuggcagugu

SEQ ID NO: 4145972 - RNA, 62 nt, Human
acaugccaaguaugauucacaugugugaaaaaacacacaaagaauauucucucugagcgugu

SEQ ID NO: 4145973 - RNA, 57 nt, Human
acaugccaauuugguuaguucaaguucauaacaauugacugagccacauuggugugu

SEQ ID NO: 4145974 - RNA, 80 nt, Human
acaugccuccguggagcuggaagggucugcuugugggguaacuucuuaccaugccaacaggaccuuccaauccaucaugu

SEQ ID NO: 4145975 - RNA, 129 nt, Human
acaugccuggcacucuagcacuugaggauagcugaaugaaguaaguuguugauguugcaguccugugaggaucacuucagaacuguuauaacagcuguuuuuugggagcugguguuggauggggugugu

SEQ ID NO: 4145976 - RNA, 80 nt, Human
acaugcugcuagagagugacaaucgcaaguguggcugcuuuuacagucagagcuauguuguuauauuauaguaggauugu

SEQ ID NO: 4145977 - RNA, 57 nt, Human
acauggcccugcacccagagcaguuccaugagcaguuucaugggagcaggagucugu

SEQ ID NO: 4145978 - RNA, 62 nt, Human
acauggcuuucucuaaugugguauugcaaauauuugucgugcccaguaaaugaaagcuuugu

SEQ ID NO: 4145979 - RNA, 73 nt, Human
acauggggaaaacagaggaaauuagaaaaggcccuguaguuugguuaaugauaccuauguuaauuucccaugu

SEQ ID NO: 4145980 - RNA, 64 nt, Human
acaugguugaaugcuuuauuugaaguaaagaugugugaucuuugaaugaaguuauuaaugaugu

SEQ ID NO: 4145981 - RNA, 80 nt, Human
acaugguuucugucucuuuucaagcuacccuuuguccagggugugucaaagaguagcucaagaagagacagaagucaugu

SEQ ID NO: 4145982 - RNA, 129 nt, Human
acauguauaaguugccaaccuggugccaauuaauggaacccugggcaaagucacauacaugauauucaacacaucauaguaaugcuucacccauucauuugggauccaggaaaagucucucauacaugu

SEQ ID NO: 4145983 - RNA, 99 nt, Human
acaugucggggauggcagagaggaccagggucugggcucuaccuuccuuccauggaggaagcagagccaccagcuuuggacugcccaucucugaauugu

SEQ ID NO: 4145984 - RNA, 63 nt, Human
acaugucuacacauucugcaauaguuaauacaugccauucuacaguggaauuuguagaugugu

SEQ ID NO: 4145985 - RNA, 69 nt, Human
acaugucuccuccugagaccccuuguccugacacacuacaggucucuggcugucucaggaguggcacgu

SEQ ID NO: 4145986 - RNA, 86 nt, Human
acaugucuuuguaguguguauucagcaagcgaaacagaaaauuaugaauuucuacuuaugugugaaauaugcucuguaaugcaugu

SEQ ID NO: 4145987 - RNA, 74 nt, Human
acaugugcuaagggccagagcugggauuuguacccaggccaccugacccagcucucugcucuuagccucuaugu

SEQ ID NO: 4145988 - RNA, 57 nt, Human
acaugugggugagcucagcuggggcuggaagaacugccaggcagccuacccacuugu

SEQ ID NO: 4145989 - RNA, 129 nt, Human
acaugugguuauuuguaaaagugcacugacuuuggagucagcuagaccuguguucaggacccucuaagucugacccugagcucaauguccugagucuauuguuuugcauuugaaucauaacuccacugu

SEQ ID NO: 4145990 - RNA, 73 nt, Human
acauguucucaagagcuggguggcaagcuagccaagaggugagguucagccagucagcuuucaggaggagugu

SEQ ID NO: 4145991 - RNA, 75 nt, Human
acauuuagguucuuacugucuucaaugucuagcucuguggaggcugacaauacagagagagcaaaaacuaagugu

SEQ ID NO: 4145992 - RNA, 58 nt, Human
acauuucuuugcuagacagcagaagaaucugcaagauguuuaucuggcacacugaugu

SEQ ID NO: 4145993 - RNA, 70 nt, Human
acauuugaagucugagauggucucuuuguuacucuguugauugacuggaauucgucuuugcuucuauugu

SEQ ID NO: 4145994 - RNA, 56 nt, Human
acauuugagcauauuucuugucacuuuuaauggugcuuuaaauauguagcaaaugu

SEQ ID NO: 4145995 - RNA, 61 nt, Human
acauuugauaauuauaaagacauaugauucugugaaaauagagugucuguaaaucacgugu

SEQ ID NO: 4145996 - RNA, 75 nt, Human
acauuuggagaugggcacucaggcugaggccgugaaagacuuaaggccuuucuagcuuugugcuccuccauuugu

SEQ ID NO: 4145997 - RNA, 74 nt, Human
acauuugggugugaaaaaguucugugucacaaauuuuuguggagggcaggaagagccuuuucacacuucaaugu

SEQ ID NO: 4145998 - RNA, 81 nt, Human
acauuuuucucuccccuuuggaagaagggucuagaacauucuuguguuuaagacugugaccgaagaaggaggaagaagugu

SEQ ID NO: 4145999 - RNA, 57 nt, Human
acauuuuuggaguacuuguguggaaccaggaagccacaagagagacacuaggaaugu

SEQ ID NO: 4146000 - RNA, 117 nt, Human
acauuuuuuuucacagagagacuguggaauggaaugacucuccagagcugcagauugaaggcauauuuucaucugacuuuggugauuauguuuccaaucucucugggaauaaggugu

SEQ ID NO: 4146001 - RNA, 83 nt, Human
accaaaagugaggaauggcuuaaugugggauacucaguggauuugccuaagguuuccaaauuggguuagguuuuaauuuuggu

SEQ ID NO: 4146002 - RNA, 56 nt, Human
accaaacauuuuaaauaagggauacucaaccgguaucuguucucugaguguuuggu

SEQ ID NO: 4146003 - RNA, 60 nt, Human
accaaaucccaguucuaggaucuagaucccaauucuagaaguuggggcuagggauauggu

SEQ ID NO: 4146004 - RNA, 108 nt, Human
accaacaauaacaagaagccaauuucguauaucaaauuugcaagggcuauaaaaauaauaguauuagaaagaguauaccagaaacaagcauucuuagacauuguuagu

SEQ ID NO: 4146005 - RNA, 72 nt, Human
accaagaauagaggcuucucggauggggcaguuugaauaaaugaccgcucugagagugucuccuuuuuuugu

SEQ ID NO: 4146006 - RNA, 58 nt, Human
accaagcccaccaucaauggagugagcaaguaaacuccucugauggaggagggcuggu

SEQ ID NO: 4146007 - RNA, 57 nt, Human
accaagcuagaacauuacaggcacugcugccuuugcuugugggauucucagcauggu

SEQ ID NO: 4146008 - RNA, 82 nt, Human
accaaggaagcuggauuccucuuuugagauaaugcugagccaguagcagcuguuagaaacaggaagccguguggacucuggu

SEQ ID NO: 4146009 - RNA, 76 nt, Human
accaaggacacugaccccaagcuguccugccuagcguccagcgucuucuaggaggguggggucugccuguccuggu

SEQ ID NO: 4146010 - RNA, 64 nt, Human
accaaguuuacagucugucuagcaauguguuuagggaaaauauccauauugacagcuauuuggu

SEQ ID NO: 4146011 - RNA, 71 nt, Human
accaauacucccuuuuauugccuuauaacucucucaagcuaugaaaugguaguaggaagggcuaucuuggu

SEQ ID NO: 4146012 - RNA, 56 nt, Human
accaaucuagagcauccacuagguguaacaaggugucugguugugcacggguuggu

SEQ ID NO: 4146013 - RNA, 66 nt, Human
accaauggacaggcugagcuuccucaagugucaggccugggaugugcguuuagcuugcuguuuggu

SEQ ID NO: 4146014 - RNA, 101 nt, Human
accacagaggcaucugcuaaaaucugcuguguccccugugcggguguuagcgaugcauucagccuagcagcacagccagaaaaagcagcaugaacuggagu

SEQ ID NO: 4146015 - RNA, 88 nt, Human
accacauguauaaaugcacauauauguguauacauauguauaaauugugugugugugugugugugcaugcacauagaauauuaguggu

SEQ ID NO: 4146016 - RNA, 60 nt, Human
accaccccauuguauccuauagcacaguugaacugguuuaaaagccaugcauggggaggu

SEQ ID NO: 4146017 - RNA, 60 nt, Human
accaccugcuucugauucucuaggaagacugcugagagucaacaucgagccacugguggu

SEQ ID NO: 4146018 - RNA, 93 nt, Human
accacgcccagccagauuuauuuugcuaagugcuugugagaauuugaaauaauauauauaagauacuuggcauagugccuggguggugguggu

SEQ ID NO: 4146019 - RNA, 72 nt, Human
accacuaaguuccuuuucacuucuaggaguauaauacccucauuugacagauguggaaagaaguuagaaggu

SEQ ID NO: 4146020 - RNA, 82 nt, Human
accacuggcaaaacaguuacgagcgcagaccuuggggucagacuuggguuugaauccuggcuguaugacuugccagcugugu

SEQ ID NO: 4146021 - RNA, 66 nt, Human
accacuuaggaaacauuugaagaggauuauguguccuaguagucuucugaaaaaucuuccuuuggu

SEQ ID NO: 4146022 - RNA, 69 nt, Human
accagaacuggggacugaggcacugaaggugcucuccugggcucccacguaccuggucccucuuuuggu

SEQ ID NO: 4146023 - RNA, 77 nt, Human
accagaagaguaaaauguagaaggcuauagacuaggagucagaaguccugguuacuuuuuucuaccuacagucuggu

SEQ ID NO: 4146024 - RNA, 80 nt, Human
accagaagccucauccucucuaguguuuaggcaacauauauaugcaaucuuauugcacuggggaaaacaggcuucuucgu

SEQ ID NO: 4146025 - RNA, 83 nt, Human
accagaaguggaaaagugaugcaauucagguucaucggaaugcaggaucuugggaauuugacauugacacaccuaugucaggu

SEQ ID NO: 4146026 - RNA, 111 nt, Human
accagaaguucuuaaucugagguucauggagucuuaggcaaucuauggauaggcuccacaggcagccacaugagcuccugaacuuuuuuuugcagcauugugaacuguggu

SEQ ID NO: 4146027 - RNA, 71 nt, Human
accagacagaagugacaccucuucccuuuccagucccugugggcuugguggugucauuuggcaugucuggu

SEQ ID NO: 4146028 - RNA, 72 nt, Human
accagaggcagagccaggucuaggagucucuucucaacagagguucucccuguccccugagcuuucuuuggu

SEQ ID NO: 4146029 - RNA, 65 nt, Human
accagcagaaaaugccuacuguggacucccuucagaaacauuccugcaaaauaggcucuguuggu

SEQ ID NO: 4146030 - RNA, 80 nt, Human
accagcaugucaguggaccuggagaggccaguucuugaaauaggaugaggacccucuuagguuucugacgaugucugugu

SEQ ID NO: 4146031 - RNA, 67 nt, Human
accagccuggcacacagcaggcucucaggaacacugcugaaagcacaaguggccuagguguccuggu

SEQ ID NO: 4146032 - RNA, 65 nt, Human
accagccuggccaacauggcaaaaccccaucucuacuaaaacuacaaaacuuggccgggcguggu

SEQ ID NO: 4146033 - RNA, 72 nt, Human
acguuuugauagcagugacauuuuaaugugaucaucuuaucuuggacacauaaagcagcugcuucaaaaugu

SEQ ID NO: 4146034 - RNA, 61 nt, Human
acguuuuuagucuccaaucuuucagagaauccugcuggacaggaucugagacugagagagu

SEQ ID NO: 4146035 - RNA, 75 nt, Human
acuaaaagcagaaauucagcugaguucuagagcacucgagagccucgcgucucacucaucugagccugcugaggu

SEQ ID NO: 4146036 - RNA, 92 nt, Human
acuaaacugguggguuauucaguagaguagcaggauauaagccacuuaucuauauuguuaaacuguauugcauaagggcccaccaaaauggu

SEQ ID NO: 4146037 - RNA, 79 nt, Human
acuaaagguuugcagaagggcacagugaucaauuccuuuggaaagauugguuguggcuuuucuguaaacagacaggagu

SEQ ID NO: 4146038 - RNA, 70 nt, Human
acuaaaugccugggacucuguuaucuugguaccuggaagacuaguucagugucccaaggcuuaguuuagu

SEQ ID NO: 4146039 - RNA, 64 nt, Human
acuaaauuuaagacccacagggaaguuguauguacuauaaaauucucuggguccugaacagggu

SEQ ID NO: 4146040 - RNA, 70 nt, Human
acuaagaauuuuggcuucugaccugcagaaaaugggaaacauggaaggcucaggaguggagagaauuggu

SEQ ID NO: 4146041 - RNA, 68 nt, Human
acuaagaugcaggaaaugcuagagaaauugcuacaaugguggcuuuagcuuuggauuuccagaucagu

SEQ ID NO: 4146042 - RNA, 79 nt, Human
acuaagcucuucucaaguguuaaguuuaaagacaguuaauuaucagcuauucuuuagagcacgggaaaaacaguuuagu

SEQ ID NO: 4146043 - RNA, 59 nt, Human
acuaaggaauuggagcauguguucauuuaaaggaagaacauagcauuccauucauuagu

SEQ ID NO: 4146044 - RNA, 67 nt, Human
acuacaaacucuggucaucuagcaguauaggauauuccacugcccccugaagaccagguuuuauggu

SEQ ID NO: 4146045 - RNA, 61 nt, Human
acuacaaaucccagaaggucaugcagugggggcggccgcggugacuucugggauuuguggu

SEQ ID NO: 4146046 - RNA, 56 nt, Human
acuacaguaagggaggcagcauuggaacccagcucuaacccuccauuugcuguagu

SEQ ID NO: 4146047 - RNA, 114 nt, Human
acuacauaaaauuuguuguaugucaaaguauuaggguccucccaggaauugaugucacaccaaaggacuuagcugaagggcauuuaauaaauagacugcuucgaaggugugagu

SEQ ID NO: 4146048 - RNA, 81 nt, Human
acuacccugggugucugugcuuguuacaauggaggccgaucccucagccacaccaggagcagauauggacauaagggaagu

SEQ ID NO: 4146049 - RNA, 68 nt, Human
acuagaagacauucaucuagucaguauuccauaguugucaaaaauacuggagauggaaugcuuuuggu

SEQ ID NO: 4146050 - RNA, 111 nt, Human
acuagacauucaaaaacacucccuggcagauuuaacauuggaacucguuuugaaagaacaauguggaaucuccuucacugggaguuuuugaauaaguaugaaauuucuagu

SEQ ID NO: 4146051 - RNA, 65 nt, Human
acuagacuccccuggagaggauuuaaaaaauauugaugccugggcuucaucccggagauucuggu

SEQ ID NO: 4146052 - RNA, 74 nt, Human
acuagagggcagcagagaacacaaugauggcaagauggccauuuuguccagucuuugucuucagcucuccuagu

SEQ ID NO: 4146053 - RNA, 78 nt, Human
acuagaugaggaagccagggcauuggccacccagugacacagauacugaagccuccuggccuuugcuccucauucagu

SEQ ID NO: 4146054 - RNA, 66 nt, Human
acuagcacagacagaaugagauaacccagauugauugauuuagcuggggcuuucauucuugcuggu

SEQ ID NO: 4146055 - RNA, 55 nt, Human
acuagcuuuccugccauguccugcggccaagcguugggggagcugggaagcuggu

SEQ ID NO: 4146056 - RNA, 75 nt, Human
acuaggaaggcauaugggcagacugggcauuccacuucugaaggccaaaaauugugauaugugcagauuccuagu

SEQ ID NO: 4146057 - RNA, 73 nt, Human
acuaggacacaugccauugcuuuaaaauuaaguagaaaaacugcuuggguguauaguggcagcaaauccaagu

SEQ ID NO: 4146058 - RNA, 55 nt, Human
acuaggcccugccugaaggagggggcuuucucccucuccagacacugggccuugu

SEQ ID NO: 4146059 - RNA, 56 nt, Human
acuagguuggggaaguucuccuggauaauauccugaagaguauuuuccaacuuggu

SEQ ID NO: 4146060 - RNA, 84 nt, Human
acuaguaucagcaggcacaccaaaaacuguguccaucaaaugcugggccauaaccucauuuuaugcugugcccuugguacuagu

SEQ ID NO: 4146061 - RNA, 66 nt, Human
acuaguguccuuauauaagaggccccagagaucugcuuugcccccuucaucaugugaggacacagu

SEQ ID NO: 4146062 - RNA, 98 nt, Human
acuauaacucuuuuaucucaguauuucuaguuucuuccacaguagcuccucaaaacgugguuguagauuuggaaauaaauguaauugaguggaccagu

SEQ ID NO: 4146063 - RNA, 55 nt, Human
acuaugcucugcugccagaggacucuuccaaaguuuuacaggucauagguauagu

SEQ ID NO: 4146064 - RNA, 73 nt, Human
acuauggcagaugguuccugggagccuuugguggagaaagccaguggcugugaccagggaccuuugcuggagu

SEQ ID NO: 4146065 - RNA, 75 nt, Human
acuauguagcacaugccgggagugaucugccagacauucuaauuugaaccagauaucucuggguagcuacaaagu

SEQ ID NO: 4146066 - RNA, 68 nt, Human
acuauuaauuaccacaguccccuuuccugaaaaaagauauuuugguuuuggaguggguaguuaguggu

SEQ ID NO: 4146067 - RNA, 85 nt, Human
acuauuuagcuguucaaguuccuggaaaagggauaucauguuuaccuuacucuauuuccaaagcugaguugagcaaguuaaaagu

SEQ ID NO: 4146068 - RNA, 63 nt, Human
acuauuuccagcaguaagaagacagacuggguccuuagcuugcuucuuuccucugccaauggu

SEQ ID NO: 4146069 - RNA, 62 nt, Human
acuauuugagaaacuggagguauaucagugaauaaaauugauauaacucuuguucuuauagu

SEQ ID NO: 4146070 - RNA, 83 nt, Human
acuauuuuagucugggcccugaagaugagacuucaguuaaguaugacucuuguuuguagagcccaccugacuaaggauauggu

SEQ ID NO: 4146071 - RNA, 60 nt, Human
acucaaaguuagagcaagagucuguuacaacugugacaguucugagcuauaauugcuggu

SEQ ID NO: 4146072 - RNA, 59 nt, Human
acucaaauagcaacggugagaagcucaggcugccauuaauuucacugugugucuugggu

SEQ ID NO: 4146073 - RNA, 61 nt, Human
acucaaauuugucaacugaagcuaagaagaucagcuaggcaaauagaagauaagugugggu

SEQ ID NO: 4146074 - RNA, 60 nt, Human
acucacucagcccaacccugcacaaggagaaaauuccugguaaaguucgggcuggggagu

SEQ ID NO: 4146075 - RNA, 61 nt, Human
acucagaaaaccagcgucaaaccccacccugcccaggauguggaccuugccuggugagagu

SEQ ID NO: 4146076 - RNA, 108 nt, Human
acucagaaacuaugggccuguuaucucauuugccugguuuuauuucauauguggaucuuaugcugagauagcugacuaggcauccaggcuuggccacaucuucuaagu

SEQ ID NO: 4146077 - RNA, 70 nt, Human
acccugcccucuccagcucagguuccaggauaaguucugggguccauuaguggguuggagggguaaaggu

SEQ ID NO: 4146078 - RNA, 67 nt, Human
acccuggcauagagaccugagucaugcaggcccuggacuguuguaacaggcacucugugccaggagu

SEQ ID NO: 4146079 - RNA, 72 nt, Human
acccuguuaugguguaacauuugauuauuacguuuuauugucaugucacuacaucauaaauauaugcagggu

SEQ ID NO: 4146080 - RNA, 70 nt, Human
acccuucugcagggcagguccccaagccccguaucucagguucugaccaggauguguccucagcaguggu

SEQ ID NO: 4146081 - RNA, 55 nt, Human
acccuuuggguuccccaagccugccugccugguccuugggccugcccagaguggu

SEQ ID NO: 4146082 - RNA, 96 nt, Human
accgaaauucaaauaaauaggcuguauaaccccaugcgacuguaauuuuccuuuuauagucagcuuguuuacuguuuauugaagagaaugucuggu

SEQ ID NO: 4146083 - RNA, 73 nt, Human
accgaccuggaggagcgcugaccagcuggcugaacccugccagcgacucuggaagggccgcuccucccucggu

SEQ ID NO: 4146084 - RNA, 78 nt, Human
accgcacgcauccccacacccggucccucccgcucagcccuggccggcacagagaggcuggguuggagaucgaguggu

SEQ ID NO: 4146085 - RNA, 86 nt, Human
accgcacucauguaggccacggaaagcagguugcacuccucauaggacagcucggugcccugcuuggucauggccuucaugcaggu

SEQ ID NO: 4146086 - RNA, 66 nt, Human
accggaacgaucgugcaggucauaaaugguugaucuuggaguuuggcaugaccugcgcuucacggu

SEQ ID NO: 4146087 - RNA, 60 nt, Human
accggagucuagaaugugcugacccagcucaaugugcagagguggcagguagacucaggu

SEQ ID NO: 4146088 - RNA, 56 nt, Human
accgggcaguguggcuccagagucugugcccuuagcucugagucacacugcccugu

SEQ ID NO: 4146089 - RNA, 61 nt, Human
accguccauaaaugucuguuuuuuugagaccuuggcaaagaggaggauugaugugggaggu

SEQ ID NO: 4146090 - RNA, 59 nt, Human
accgucucaucaugcccuguugaauaauaaacauugcucacaggggcagacgaguuggu

SEQ ID NO: 4146091 - RNA, 56 nt, Human
accgugggcaaugggaccuggaugcccguggccaaccaggguccagcugccauggu

SEQ ID NO: 4146092 - RNA, 102 nt, Human
accuaaaaacagcuuuuuaaagcuaguaguauuucaauguugacuuuaauuggaaggaaacuaugagaugaauaacuccugcuaagaaaccuguauauaggu

SEQ ID NO: 4146093 - RNA, 82 nt, Human
accuaaccagucugcggggcaggcucauucccauggccuuucucccacgggaaccaccccucugcccugaaguugcccaggu

SEQ ID NO: 4146094 - RNA, 65 nt, Human
accuacaacuuucuguuaaauguuagucauucugaugaguaaaaaguucagaaugguuguugggu

SEQ ID NO: 4146095 - RNA, 84 nt, Human
accuacagacccagaauccgcauuuuaacaagauguccagaugauucauaugcacauuaguguuugagaugcccuggucuaggu

SEQ ID NO: 4146096 - RNA, 73 nt, Human
accuacaggugagccucuccuccuggauuccagguaaggaugccuagaaacagagcagguggcccauguaggu

SEQ ID NO: 4146097 - RNA, 73 nt, Human
accuacaugggccaccugcucuguuucuaggcauccuuaccuggaauccaggaggagaggcucaccuguaggu

SEQ ID NO: 4146098 - RNA, 60 nt, Human
accuacauguuccacauaguuguagcuguaucuggguaucacugugcacauaugauaggu

SEQ ID NO: 4146099 - RNA, 76 nt, Human
accuacccccaagucucugucuuaggccaggccuuggggaacccaggcucaggccaggagcagcuaggugagaggu

SEQ ID NO: 4146100 - RNA, 83 nt, Human
accuacuauguggcaggcauugugacgaguguucuacaggggugaagaugugaaacagucacaguccugucuucauaguaugu

SEQ ID NO: 4146101 - RNA, 65 nt, Human
accuagaguagaaguuugcuuuuuaaaaaaaucauggauuggcaagagucagcuucuguaugggu

SEQ ID NO: 4146102 - RNA, 69 nt, Human
accuagaucuacaaguugugacuugauaccuacaaguaagguauaguuugcgauuugugguucuuuggu

SEQ ID NO: 4146103 - RNA, 129 nt, Human
accuagccuuggggacuucuuuagaaagaaggcauauuuucacugaaccaaaguaaaucuuaauuacauauuugcuuaccauggagagccuuuuugcuucugaaugggaaucuguaaccgauaaaaggu

SEQ ID NO: 4146104 - RNA, 57 nt, Human
accuagcuaaucauucugaucucauaggugaggaaauucagacccagauuagcaggu

SEQ ID NO: 4146105 - RNA, 58 nt, Human
accuaggcuggagugcauuggcgugaucucggcucacugcaaccucugccucccaggu

SEQ ID NO: 4146106 - RNA, 69 nt, Human
accuaggguaguucgauuauaugcagagcuguuuuauucauuguuaauccugcaaucagcuacccaggu

SEQ ID NO: 4146107 - RNA, 58 nt, Human
accuagguauuugccacuucacauuuacauuuguguaaauaugacuagaaugccaggu

SEQ ID NO: 4146108 - RNA, 85 nt, Human
accuaucugugcaccugaguccugaugcucuggcaggagaaaaccccauuuuaucugucuuuaucaggauuuagcagaggaaggu

SEQ ID NO: 4146109 - RNA, 88 nt, Human
accuaucuuuggaacacaauguuucuuucagcacaugucacaauguguauaaaguauuucugaggggauguguuucuaaguuaaaggu

SEQ ID NO: 4146110 - RNA, 58 nt, Human
acucugugaagucuuauuaugcacaucuuacaaaugaagcaacugaggcuuauagagu

SEQ ID NO: 4146111 - RNA, 95 nt, Human
acucugugaccccuaaugcagcugauuaacuucauuguaguucaucggaagaaauaaagacuaaugauuugaucuucuuuagggguuucaugagu

SEQ ID NO: 4146112 - RNA, 94 nt, Human
acucuguguuuaacauuuugaggaacugccagacuguuuuccaaaguggaugcaucacauuacauucccaucagcaauguauuaacacaagggu

SEQ ID NO: 4146113 - RNA, 62 nt, Human
acucuucauuuccauccaacugggaaccaucacaaacgaggaucugaugggaguuggggagu

SEQ ID NO: 4146114 - RNA, 79 nt, Human
acucuugaggaacugaguaccaugauucguagaagcagggcauuggccgcgaguaaauauugugcuuuuucucuagggu

SEQ ID NO: 4146115 - RNA, 117 nt, Human
acucuuggcugagucuuugugcuucuguucuguccugaaggacacgugaggagccagaaacaucuggcagccucugguccuuaguucagauacaacauccaugaagcugccaggugu

SEQ ID NO: 4146116 - RNA, 69 nt, Human
acugaaaaacuugcugcuugcuuacagaaugaauagaagugaauguacuagaagcuguaauuuuucagu

SEQ ID NO: 4146117 - RNA, 82 nt, Human
acugaaaguggagacugacugccuguauuugauuauguaauggauuaaauacagucaucaagucuuugccccuccuuucagu

SEQ ID NO: 4146118 - RNA, 55 nt, Human
acugaaaguugaugagucacugugccucucgggguagugaguuaucagcuacagu

SEQ ID NO: 4146119 - RNA, 58 nt, Human
acugaagaauaagcaugggguugcauuuagccacagaaaccauguguucuacaucagu

SEQ ID NO: 4146120 - RNA, 111 nt, Human
acugaagccaagcagcacuuuugguuugaaugagcauaagagggcuuaauuguugucucaucuuuuagagcauuucugauucaaaggugucaugcaaucauugguagcagu

SEQ ID NO: 4146121 - RNA, 130 nt, Human
acugaauaauauuccauuguguggaugcaacacaguuuaucgauucaccuaccgagggaaaucuuggucgauuucagguuuggguaauuaugaauaaaguugcuauaaacauacaugugaagguuuuugu

SEQ ID NO: 4146122 - RNA, 84 nt, Human
acugaaugcucccguuuuaacuagugggcuaccgugaguaguuuaggucacaggaguuaacauaauuaagagagaguauuuagu

SEQ ID NO: 4146123 - RNA, 63 nt, Human
acugaaugguuacuacccugggucuucuaccgaaagaaagaacaugggugugggcauucaagu

SEQ ID NO: 4146124 - RNA, 61 nt, Human
acugaauuguuucaaacucuagagucaccugugacauguggccuggagagaaaagaugagu

SEQ ID NO: 4146125 - RNA, 65 nt, Human
acugacaauuuuucaaagaagcuuaucucagccaagucugcaauagucacugaaaaauugugagu

SEQ ID NO: 4146126 - RNA, 76 nt, Human
acugacagagcuacauaguaacccacaaaucuaagcaacuguauggguguguguguguuugugugugugugugugu

SEQ ID NO: 4146127 - RNA, 78 nt, Human
acugacaucucuccaaaggaaggugcuauaguuaaacccacucuacagauguggcaacugaguucagagaggugcagu

SEQ ID NO: 4146128 - RNA, 56 nt, Human
acugaccuucucagcuaacucagcaaaacccagcaugucagugugacuuggucagu

SEQ ID NO: 4146129 - RNA, 130 nt, Human
acugagauuggaagaaguagaguuaaaaguuuuuacuaccuuugagaagccugcgggcauguucacagucgucccaugccagccagguucugaggcuaacugcuugugccccugcugcuucacauggcau

SEQ ID NO: 4146130 - RNA, 65 nt, Human
acugaggccuaacucuugacuuuuugacaguggugcucauaagaaaguuuggggcugggcacggu

SEQ ID NO: 4146131 - RNA, 93 nt, Human
acugaggcuuaaagaacuugggguuguggguggcuuauuaagacauucuaaugccauuuugaaaccaaguuauuuccuucaaaaacccucggu

SEQ ID NO: 4146132 - RNA, 55 nt, Human
acugaggcuuaaagagauuagguaacgucugggcuacucugggagccuaaccagu

SEQ ID NO: 4146133 - RNA, 67 nt, Human
acugagugaugugagaaaaugaacucuaacacuaaaguuaguuucauguagccauauuuaccucagu

SEQ ID NO: 4146134 - RNA, 56 nt, Human
acugagugguacauuguguaaugauggaacgccuuuaucuacaguguccauucagu

SEQ ID NO: 4146135 - RNA, 76 nt, Human
acugaguuagacuuuggugauccagaacucuuuuccuuucugagaugccugggccauggaagucucugcccccagu

SEQ ID NO: 4146136 - RNA, 77 nt, Human
acugaguaagcagaggcauuuuuaucuggaaggaggugagucccauaagauaaauugcacuuuuucuuacauugagu

SEQ ID NO: 4146137 - RNA, 84 nt, Human
acugaguagucugaaggauuagagagcacuuagcguccugcugggcacauggugaauguucucuaaauacuccuucuacuuagu

SEQ ID NO: 4146138 - RNA, 119 nt, Human
acugaucuacuccuucauuaauaucccaaauuuagguaacagucuguagagugugccaguuaguacagccuguuaccuauauuugggauaugaauauauuauccaaggaguagaacagu

SEQ ID NO: 4146139 - RNA, 70 nt, Human
acugauggagacuccacugugauucacucguuuacuuaaaaacauuucagggaugucuguaaauuucagu

SEQ ID NO: 4146140 - RNA, 111 nt, Human
acugauguguuccacugguuaggaaaugugaaccaagaagucaaagcgaucucuuugauccuauugauuuugugauuuuuagaaagugacuuagcauaccugggcaucagu

SEQ ID NO: 4146141 - RNA, 113 nt, Human
acugauuucuaucacuuuaucacuguuagcugaaguuaaagaagaauaguuccuuucucuaacaagaacauaacucucuuugauagcuguuugaaaggauagucugcaucagu

SEQ ID NO: 4146142 - RNA, 115 nt, Human
acugauuuuuaaaacaagaaaauacaucugaauuuugaugugcauugauaucuucaagcauuguauccaaauguuauuuuaaaauuugaauguaggcucuuuuuaaaaauucagu

SEQ ID NO: 4146143 - RNA, 72 nt, Human
acugcaaaaaugggugcauucaguaauuucagauuuucagugcuauuuuuauugcaacucauuuuguguagu

SEQ ID NO: 4146144 - RNA, 75 nt, Human
acugcaaucaccagggccuuagcuccccuuggaauaugaggguucccucuugcagcagccaagguucugugcagu

SEQ ID NO: 4146145 - RNA, 58 nt, Human
acugcacaccuccagggcacuauuuccacaugaauguuguccccuagaguugugcagu

SEQ ID NO: 4146146 - RNA, 59 nt, Human
acugcaggcucggaagugcuggcuuugccugacgcaagaguugagcaccggguagcagu

SEQ ID NO: 4146147 - RNA, 97 nt, Human
acugcaggucuuuagguugagugcaaauucaaugaacauguuuaagcgacuaaaaauguuccagcaaacauugauuuguuaguagcuuagauguagu

SEQ ID NO: 4146148 - RNA, 76 nt, Human
acugcaguugggacaaagacuccuugaauucagagcugugcuuugaaauucaaggagucuucgucccaauugcagu

SEQ ID NO: 4146149 - RNA, 95 nt, Human
acugcaucacugccacauccucugugcaauagaaaguggcauggaagaaugacuccaauaucugccacuugcacuuggguguggaguuuaccagu

SEQ ID NO: 4146150 - RNA, 81 nt, Human
acugcauguuuaauuaaagaacagcccuccucuaucuuccccagauagaggagggcuguucuucagucgaagauauggagu

SEQ ID NO: 4146151 - RNA, 74 nt, Human
acugccaccuccagccucuugaaaguuguuagcuuccuucagcacagcugaaaggguguuggaguguucucagu

SEQ ID NO: 4146152 - RNA, 57 nt, Human
acugccggcgccugcgguuccuccuggccccaaggcaccgcugcaggcgccugcggu

SEQ ID NO: 4146153 - RNA, 97 nt, Human
acugccuccugucucuugacccaguuuaaccuauccauuaugugauaucccuucuauuauaguaugggcuacuuaaaaacaagcaggcaugggcagu

SEQ ID NO: 4146154 - RNA, 73 nt, Human
acugcggccaggagaagcaucugaguguaauagcccagccaagcaaaguagauuccaaucuucucuccauagu

SEQ ID NO: 4146155 - RNA, 67 nt, Human
acugcuacauugaaauuugucauguaacuauauucauucauuaugcaugauucugcaaaugaguagu

SEQ ID NO: 4146156 - RNA, 55 nt, Human
acugcucucuuugcaggggcuagggcagugccuggcucaaagccaaggggguugu

SEQ ID NO: 4146157 - RNA, 55 nt, Human
acugcugauuuagcuuugugggcccacuaauggcauuauuguccacaucagcagu

SEQ ID NO: 4146158 - RNA, 81 nt, Human
acugcugccaaaauaauauuccuaaagcaugauucucauugccaucacugcuuucaaaaauuauugcuggcaggaagcagu

SEQ ID NO: 4146159 - RNA, 101 nt, Human
acugcugcuccuugcuuucucacacuuuccacugaggucacuuggggcacgacugagucaagacuuccagaggguguggaaauaucagggaagcaaacagu

SEQ ID NO: 4146160 - RNA, 60 nt, Human
acugcugcuguggcugaaagcaucuuccagaaauucugaggacacagcccagacagccgu

SEQ ID NO: 4146161 - RNA, 59 nt, Human
acugcuggcaucugaauuauguauuaauaaaaguuagauucaugcaguaugcuaguagu

SEQ ID NO: 4146162 - RNA, 81 nt, Human
acugcuucuccccugaauaucuacuguguccccacucuguuaaagaucacauaaauagauuauugggagggaacauguagu

SEQ ID NO: 4146163 - RNA, 66 nt, Human
acugcuugcuagaagcuuaaagguauuggguuggacuccauugcuuguucauggccuaguggcagu

SEQ ID NO: 4146164 - RNA, 129 nt, Human
acugcuuuuagggaauguguauauuagaauagcuugccuugugcucgauuugcuuuuguuggauuauuccuguuuaagcagagcaagcguauuuauucuacugugaaccauuuaauaauuacaugcagu

SEQ ID NO: 4146165 - RNA, 58 nt, Human
acuggaaaugagaugauaucaguuuggagauucagauaccuguccucccauauccagu

SEQ ID NO: 4146166 - RNA, 96 nt, Human
acuggaacauaguaauguaaguggcagaguuuguucuauaggccuauuaauguuguuuauagguccacugcaauuugccaaauauauuauaccagu

SEQ ID NO: 4146167 - RNA, 64 nt, Human
acuggaaugugauccaugugaagaacagaauuuauucuguuuaauucaccaucauguucccagu

SEQ ID NO: 4146168 - RNA, 90 nt, Human
acuggacacucuggggcaaauaauucucugcucugggggcuguaggauguuucauagcaccccuggacgguagggccaccagaugccagu

SEQ ID NO: 4146169 - RNA, 76 nt, Human
acuggacugaagcaagauuugacuucgugguuugacacauguccaauuacuccacaacauuuaugccucaguaggu

SEQ ID NO: 4146170 - RNA, 56 nt, Human
acuggagaggccccaagauauuuggucaacgaccaaauaucuuggccccuccuggu

SEQ ID NO: 4146171 - RNA, 108 nt, Human
acuggagcaggaugacaauggagcugugagacugauagggaagagguguuugcuucugcuuuggguccuauuuuuuucaugccgaccauguucagaaauggcucuugu

SEQ ID NO: 4146172 - RNA, 55 nt, Human
acuggcagaggauagcacuaauggaggaugucuaugugguauaaagccugucagu

SEQ ID NO: 4146173 - RNA, 65 nt, Human
acuggcaguuuuagaaauugauuugcaaguuugguuaaagcucccauuaucuucugaaacccagu

SEQ ID NO: 4146174 - RNA, 71 nt, Human
acuggcaucccacugguacaggaguauucaguguucuaacccugguagggucuuaccaauggauugucagu

SEQ ID NO: 4146175 - RNA, 70 nt, Human
acuggcauuuggaaauugcaagugauuugcauggugaaauacagugaacauggaaauuuccuauuucagu

SEQ ID NO: 4146176 - RNA, 58 nt, Human
acuggccaggagcuggaaauacauugaguaaaacagacauagcucuagcccuggaggu

SEQ ID NO: 4146177 - RNA, 78 nt, Human
acuggcgacuuccaguguuuauuccauuaguauucaauuauauuucccagauaaacagcuggaggccaucucuucagu

SEQ ID NO: 4146178 - RNA, 82 nt, Human
acuggcuccagguaaagcugcccucauucccagugcaucaacugacugacaucuggggcuugggcagcugcauuaagccagu

SEQ ID NO: 4146179 - RNA, 65 nt, Human
acuggcucucugccuuucucaaugacaccuuugagacuugggagucagggaggcagagaggcagu

SEQ ID NO: 4146180 - RNA, 56 nt, Human
acuggcuggaguugccaaggcuggagguaaggccaaaagcacuucacccagcuagu

SEQ ID NO: 4146181 - RNA, 68 nt, Human
acuggcuucccaaaacuuuaguuggggguacucuugcauuucugaagcucuggcguuggggagguagu

SEQ ID NO: 4146182 - RNA, 56 nt, Human
acugucacugacagaaucaacauauauugucugaaauuuccaaagucagaggcagu

SEQ ID NO: 4146183 - RNA, 69 nt, Human
acugucaucagaagaugaaaauuucauggguucuuaaccugggauacaugcaucuuuggauagaauagu

SEQ ID NO: 4146184 - RNA, 95 nt, Human
acugucauuuugucugggucuaaaaauucucagauggccuuauucacaugucuggacaaucuguuaggauuguuggaauguccagaaugacuagu

SEQ ID NO: 4146185 - RNA, 57 nt, Human
acugucugucuguuguugagaagcaguaaugcuuaggaugcuagcaggcaugagggu

SEQ ID NO: 4146186 - RNA, 76 nt, Human
acugucuucaaacugggccauguguuccccuggggagacuggagguccuucuaagggguucacaggcauagauagu

SEQ ID NO: 4146187 - RNA, 55 nt, Human
acugugaagaaugcacuggggaccugcuugcugcuccucaggccaguuuuaaagu

SEQ ID NO: 4146188 - RNA, 69 nt, Human
acugugacuuuguucuaauaguaucucucuggcugaauguugagaauaaacuagagcuaggucaagggu

SEQ ID NO: 4146189 - RNA, 70 nt, Human
acugugagcuugauuuuuguuuauccuuacaacuuuaguaaaagaggauaauaauaaucucguuuacagu

SEQ ID NO: 4146190 - RNA, 126 nt, Human
acugugcaaacuagaagaccuguguaaucauuuaaucacauagccaucucuuugagaagauaggauuuaguuaucaucaaagugaguggcuacaugaaggauugcauuauuuauguuagcuuaagu

SEQ ID NO: 4146191 - RNA, 63 nt, Human
acugugcauuccccaaccuguguuuaagcugagagcaagguuccuuauggggauggcuacagu

SEQ ID NO: 4146192 - RNA, 61 nt, Human
acugugcuugcuggccaguagcugugcccccauuuuacagcuaaggaagcugaggcacagu

SEQ ID NO: 4146193 - RNA, 61 nt, Human
acuguggcacagaaauguugacuguuaauaacuugcccaacgucaaugucuggccaauggu

SEQ ID NO: 4146194 - RNA, 130 nt, Human
acuguggguucuugggugagucacuuugccuccaaaggcaucaguuuccucaucuguuaggugagauuauacagacuggccuagcagggaagcagugaggauggcauuaaaucaagcacuaauccagggu

SEQ ID NO: 4146195 - RNA, 58 nt, Human
accugguuccuccucacugcuguguccccagcuuuuugcacagugcaugggaccuggu

SEQ ID NO: 4146196 - RNA, 66 nt, Human
accuguaggaacgccuucauuugcuuuauuucugacauuaaauuugcaaaaaggcacuuuccaggu

SEQ ID NO: 4146197 - RNA, 67 nt, Human
accuguauuaaacuuauuaaaagcuuggcaaagcggccaacaguacuuagaaaguuaauauaaaggu

SEQ ID NO: 4146198 - RNA, 56 nt, Human
accugugccggggucuccaggacaaaugccuggaaguuggaggccaggacacaggu

SEQ ID NO: 4146199 - RNA, 58 nt, Human
accuguggcaggugauguguggauguuuguuagcgcaccauacacaauuugcaacggu

SEQ ID NO: 4146200 - RNA, 79 nt, Human
accuguguucccgcaguuuccaccuaacagucucuucacugugcaguggcagcgugugggugugcauacaaacacaggu

SEQ ID NO: 4146201 - RNA, 56 nt, Human
accuuacucaagucucacugguaauuacuucauuuugcagaugagaaaagugaggu

SEQ ID NO: 4146202 - RNA, 70 nt, Human
accuuagcauuagagauagaaauagucuagauuuuuaagacuguugcugauucuuucugguggaauuggu

SEQ ID NO: 4146203 - RNA, 65 nt, Human
accuuaggaucucauccaugccacaggaaaacaaaaguggcucaagauugaugagucuuaguggu

SEQ ID NO: 4146204 - RNA, 56 nt, Human
accuuauucuugcccuuagaugacacaugauuccaucuaaauagguaaaaugaggu

SEQ ID NO: 4146205 - RNA, 72 nt, Human
accuucaagagcaucuaacacauaagccugaugaaaacaguugcugcaguuuaaguuugggugggugggggu

SEQ ID NO: 4146206 - RNA, 66 nt, Human
accuucacauucagaaaaagcccguuguaauguccagugguaacaauggagccuaagaguggaggu

SEQ ID NO: 4146207 - RNA, 76 nt, Human
accuucagaguauugcaggcuucaaacucuccuagcaauaccuuggguuugguauggagucugaguuucuagaggu

SEQ ID NO: 4146208 - RNA, 108 nt, Human
accuucccauggauuaagacauuuuagagauagggaaagucacugaggcccguuacaacugugaauuuucuuaugaugcugaaaugaauuuuaaucuggccaaaaggu

SEQ ID NO: 4146209 - RNA, 73 nt, Human
accuucuaauuguguuugcauaucuuaaaaaacauauuugauuaaguaagaauguaaguacaacuugggaugu

SEQ ID NO: 4146210 - RNA, 68 nt, Human
accuucugcagccacagcugaagguugcugagugcccaccauguccucggcucugugcugcugaaggu

SEQ ID NO: 4146211 - RNA, 112 nt, Human
accuucugucccaugcucugaaauucuuuuacggcucuacuuucccuucagugaucuuucuucaagaugacagugacagccaaaggcuuuuucauagcuuggaacagaccgu

SEQ ID NO: 4146212 - RNA, 103 nt, Human
accuugacugcauaucguuuauaauugagugguggugacaaauauaaaaugaaucauuauaggagucauuauaccauuauaauugugucaagugcuacaaggu

SEQ ID NO: 4146213 - RNA, 55 nt, Human
accuugagcaagaguaggaacugaauuuucuuucagauucuuuuguguucauggu

SEQ ID NO: 4146214 - RNA, 82 nt, Human
accuugcaauuuucuuguucuuuagaggcagcaguuguuauuuuuccuccauuguuccuguguggaaaagggccuguuuggu

SEQ ID NO: 4146215 - RNA, 95 nt, Human
accuuggaauauguagaaaugcagauucuuaggccccaccucacaaaacucugggauggagucuagcaaucuguguuuuaauaaguuuuucaggu

SEQ ID NO: 4146216 - RNA, 90 nt, Human
accuuggcaagaucacguucauugaggaagggaggaagcccagauugcaguguugacagggaaagacuucucuucccagggacacagggu

SEQ ID NO: 4146217 - RNA, 60 nt, Human
accuuggcagaggucugagguuuaucuuucauucccugaaccucaagcaacaaccaaggu

SEQ ID NO: 4146218 - RNA, 57 nt, Human
accuuggcuggggccugaauccugcagaaacuuggucagguagggcaucagccuggu

SEQ ID NO: 4146219 - RNA, 66 nt, Human
accuuggggauacacuggccaaguggaggagcugauggcagacuccucccagugugucccuguugu

SEQ ID NO: 4146220 - RNA, 62 nt, Human
accuuggggugaugcugaaagauugccauuuucaugcagacuaucaaauugcuccacuaggu

SEQ ID NO: 4146221 - RNA, 64 nt, Human
accuuuaagagcaggucugugggcuccagauaccagcuggcaaccgcauggccugcuucauggu

SEQ ID NO: 4146222 - RNA, 59 nt, Human
accuuuaugaaacagcugucguaacaggaauucugagaugacaguguggcauggaaggu

SEQ ID NO: 4146223 - RNA, 55 nt, Human
accuuuuacggugugacuagcaaaugccgugguuuuugcaaagucagugaagggu

SEQ ID NO: 4146224 - RNA, 69 nt, Human
accuuuugccgaagguaucugagaugaugugaaacuauuugaaucucuugagacuuugggguuaaaggu

SEQ ID NO: 4146225 - RNA, 97 nt, Human
accuuuugcucauuagcuuaaaugaacucaaugaucucccagcccaaccagacugcugggagucugugauucaaagcccucaccugagcucagaggu

SEQ ID NO: 4146226 - RNA, 97 nt, Human
acgaaggaggaaaaggaaggaggugucaguuggacugccccaaggcaacccuugagccaucaggacagcucaacaccuccucuguuuucuucuuugu

SEQ ID NO: 4146227 - RNA, 62 nt, Human
acgacagcuucuugggccgggccucuggggacagggguuccugcucucuaggagcugccugu

SEQ ID NO: 4146228 - RNA, 75 nt, Human
acgaggaaacguuugcaaauacugagcacgcaaucaauacucgauaaucgguggcugccaguauuaccuccuugu

SEQ ID NO: 4146229 - RNA, 61 nt, Human
acgagguaggcccaucuggauuagugaucuuugucuacuuccagaccugugcuugcucugu

SEQ ID NO: 4146230 - RNA, 66 nt, Human
acgagucacugggagucguaagacacggcccugccguucugccccucuguggcucccagcccucgu

SEQ ID NO: 4146231 - RNA, 75 nt, Human
acgagugucugguaguuaugguaaagaaucaacaauucaaaauguucaucauucaucuuauugccagucccuugu

SEQ ID NO: 4146232 - RNA, 58 nt, Human
acgauguguuggauuacaaggugaugcuucaguaucaccuugugagguuacauaaugu

SEQ ID NO: 4146233 - RNA, 78 nt, Human
acgcagauuuuagcuuucagaacuuuguuucaggaagauguauuugaagcaggugggcaugaaagcugaaagcugagu

SEQ ID NO: 4146234 - RNA, 76 nt, Human
acgcgauggccucuucccgcguucucggcggguacggcgcgccgccugccugcggcccgcggggagguggucgggu

SEQ ID NO: 4146235 - RNA, 76 nt, Human
acgcgcugagccccucacgcgcccuccugggcccuggcggacccagaggccccauuggcugugcgucucaaggugu

SEQ ID NO: 4146236 - RNA, 87 nt, Human
acgcucucaguaaaagaugaaugaaugaaaaaugggucagaugcaccugcaaugaugugugauucauucucaaaguugugugggugu

SEQ ID NO: 4146237 - RNA, 55 nt, Human
acggaauguccuauuguaggcgguuggagacaccuguguuuuaaugauauucugu

SEQ ID NO: 4146238 - RNA, 129 nt, Human
acggaggggcuuggcaaugccugcucucuugagaucucugcuaggguucagcagugccuuaaaucuaggggucaagccuggcccaguaguuuacccuuagggagcaagcuuuggcucuugcagcucugu

SEQ ID NO: 4146239 - RNA, 64 nt, Human
acggauaucugugcguauagcauuguacuuuaucagguauguacauauguguauauguaucugu

SEQ ID NO: 4146240 - RNA, 90 nt, Human
acggauugugccuuggaaagaauacugugcuggaaauuaguagaucucuaacuuucagcaaguaauucuggacccaaguaccucauucgu

SEQ ID NO: 4146241 - RNA, 81 nt, Human
acgggcacucagcugagcccucagcccucauggcuuucccgaugcucaccggugcagaggagccagcuggggagccucugu

SEQ ID NO: 4146242 - RNA, 61 nt, Human
acgggcugggacggggaagcucugugggaaacacucuaccuucucuucuucucuuaaccgu

SEQ ID NO: 4146243 - RNA, 87 nt, Human
acggggaagugaccacauacuuucuuuuucacgcauaggauuuguuuaucuauguugaguuuuagaaaguuaacaucauuuguuugu

SEQ ID NO: 4146244 - RNA, 125 nt, Human
acggugaggccaagaauauccugccuacucuggcgggcgggcgagccacgaagccugcuggaagggcaugaaucauggucccugccugccaagugcucacuugggauguguucgaggcuggcugu

SEQ ID NO: 4146245 - RNA, 77 nt, Human
acggugaggucauacaaggcacuggugauuuaugucuccuggccuuuuaucuccagcagugcuuuugagcccacugu

SEQ ID NO: 4146246 - RNA, 73 nt, Human
acggugcccagggacucugagagccugaggguggcacgucaccucgggggccauugggagcccuggaugcugu

SEQ ID NO: 4146247 - RNA, 120 nt, Human
acgguucagggaaccagaagccugaaagcaagcugucuggaggcucugagggagaagggguucccucccccucccuagcuuccgggggcugccggcacuuauuggcaucccuagacucgu

SEQ ID NO: 4146248 - RNA, 78 nt, Human
acgguuccaauaauuguucugaauuggauucuguugaaaaccuccuuaacagaauugaaaguauaaucugggcacugu

SEQ ID NO: 4146249 - RNA, 81 nt, Human
acguaucacguggaucagcuauggaacagauaccccaaaccgagggcugucugacuccaaguuggagcuccaguguccugu

SEQ ID NO: 4146250 - RNA, 78 nt, Human
acgucaucauacaaagagccgcugaugucagccccguagaucggggagacaaaggugagguucuuccaguauuugcgu

SEQ ID NO: 4146251 - RNA, 79 nt, Human
acguccuuggagcuguggagcccugguagggaccccagcucucgggaggggcccugcgggggcuccuaguacaggaugu

SEQ ID NO: 4146252 - RNA, 85 nt, Human
acgugauauauuuacuuccccaguugugguguaagcauccucuaaaaaugcuuacaccacaauuggggaaguaaauauaucaugu

SEQ ID NO: 4146253 - RNA, 58 nt, Human
acgugcuggagaagagcucgccuggccaccgggccacggccccgcagacccagcacgu

SEQ ID NO: 4146254 - RNA, 87 nt, Human
acguguccuuauuuuggaaauaaaugcuucugaaguuaaaauaaauguauuuaauuaguagaggcauuuaguucugagguggaaagu

SEQ ID NO: 4146255 - RNA, 89 nt, Human
acgugugagcccucagugacugguccuucacagccacacucugugggaugcagagucugugcuggggccagcucgggagagcugaccgu

SEQ ID NO: 4146256 - RNA, 72 nt, Human
acuguuauuuguaauccauuauuuggccaguaugggucugaauuuuguaaugggugugccuuaguauacagu

SEQ ID NO: 4146257 - RNA, 62 nt, Human
acuguucaaguuuuaugcuggaaaauaacuugauguucauagucuccagcuaaaugugcagu

SEQ ID NO: 4146258 - RNA, 61 nt, Human
acuguucuucccauuuauauugggcaccacuuuugguuguauuuaugaugggauggauggu

SEQ ID NO: 4146259 - RNA, 72 nt, Human
acuguugaaugagugaauucuaaaugcuaaagaguuuuccauucaaaguaagaauuuauuacaaaagacagu

SEQ ID NO: 4146260 - RNA, 100 nt, Human
acuguugccagugaaucuugacuacucuugugccugaugcgaccgugagucugcguaucucuguuuuaggagauagugaaugaaacugggaaccaacagu

SEQ ID NO: 4146261 - RNA, 69 nt, Human
acuguuguugaucagacagcacuucuuuaucucuuuaaguuuuaagugcuguuucugaugaaugccagu

SEQ ID NO: 4146262 - RNA, 76 nt, Human
acuguuucacguguuuaagcccaaagauuaugucaagaaguggcuuguaaguggcggcuugaaagcuggaaauugu

SEQ ID NO: 4146263 - RNA, 56 nt, Human
acuguuucacucuuuaagaauugccuauguaauucaauuuugcagaggaaugcagu

SEQ ID NO: 4146264 - RNA, 61 nt, Human
acuguuuucuagaaacaaugccuauuucaguuaugaacuagucuguuuugaagaaaauggu

SEQ ID NO: 4146265 - RNA, 82 nt, Human
acuuaaaaaccuauuuuauaauuuaaugugcaucauuaguggugaguguauuaaguuaugaaguuaguagggucaguaaagu

SEQ ID NO: 4146266 - RNA, 77 nt, Human
acuuaaaaguugcuucccuaacucuuaucccugggaaaugaucuagcauccaaguaugaggaaacaaccuuuugagu

SEQ ID NO: 4146267 - RNA, 75 nt, Human
acuuaacauucaaaaggaggcaugggcaauuccuuucaccaucuuucuuugcccccuuuucuuguuacacugggu

SEQ ID NO: 4146268 - RNA, 82 nt, Human
acuuaacugcuugcuuucacaccaugccuauaaaaccuuuuugguuuuagagguucuaugugucuggaaaguacagugaagu

SEQ ID NO: 4146269 - RNA, 64 nt, Human
acuuaaugugauagcuguuaaaaugucuuuaugugacuuaaugauagaugucauggucuugagu

SEQ ID NO: 4146270 - RNA, 77 nt, Human
acuuacagcaauuagaguggcgagugauuuacacucguuucuuuaagguguaaauugccacuuauugcucaguaagu

SEQ ID NO: 4146271 - RNA, 86 nt, Human
acuuaccuucucuuucugucacucuccuuggcugacuccuuccugccaggugggagacagacagcauuuucuuaagcagggucagu

SEQ ID NO: 4146272 - RNA, 76 nt, Human
acuuacuugauugcuucgauaugcuaauuugaauuccccuagaagcagacucugaggcaaggauucacauguaagu

SEQ ID NO: 4146273 - RNA, 86 nt, Human
acuuagacccccugagaggcaguaauugugggcaauagcuggacuuuuguauuguaauugcugcuauuagucuuaaaagucuaggu

SEQ ID NO: 4146274 - RNA, 61 nt, Human
acuuagacuaaccuguagaugaguuugguaugcaucaggauaccucacaguuggucucagu

SEQ ID NO: 4146275 - RNA, 82 nt, Human
acuuaguaguuggguaguugauuaugcagcugaaacuaauacguacagcuccaaaaaucacuguuuauaauacuaacugagu

SEQ ID NO: 4146276 - RNA, 55 nt, Human
agacuguagggauagaggucuuaaugugaauuagguuuuucuaauucuaaagucu

SEQ ID NO: 4146277 - RNA, 59 nt, Human
agacugugacuagaccuauaucuuuuugaggucuacaaauaagauguaagucaaggucu

SEQ ID NO: 4146278 - RNA, 55 nt, Human
agacugugccucauuuuuuaagugcccagcauugguaauggacaggcaauagucu

SEQ ID NO: 4146279 - RNA, 94 nt, Human
agacuuuaaauguaccgaacuguauugguuuucuauugcugcauaacaaauuauugcagccuuagagacuuaaaacaggacucauuuacugucu

SEQ ID NO: 4146280 - RNA, 64 nt, Human
agacuuucagcaacucuacuuugagggaacaaaccgacucccugaauacuggugcugaaaguuu

SEQ ID NO: 4146281 - RNA, 71 nt, Human
agagaaaaacauaacccuaggagauaagagagcaccaaggcuaauauuaacccugaggguuuguguucuuu

SEQ ID NO: 4146282 - RNA, 75 nt, Human
agagaaaagagauccauuuuccaugagaggucucaauacuucaaaagcccuacuagaaauguaucucuugauucu

SEQ ID NO: 4146283 - RNA, 63 nt, Human
agagaaaccagcauuuaaaccaggaaccgcugaaaagcaggauucaaaaugguguguuugucu

SEQ ID NO: 4146284 - RNA, 103 nt, Human
agagaaagaaaaauagcaaccaaugcacaucacucugaagaaaagcugggccugcaguuuucugaauaagcaggaugauuggugccucuaauuuucugucucu

SEQ ID NO: 4146285 - RNA, 68 nt, Human
agagaaaggcagcccuggcucagccuggcccuccgacccugagcaggcaugagccaggccccuccucu

SEQ ID NO: 4146286 - RNA, 74 nt, Human
agagaaaugaagucugcacaugcauguguuuuguaccauauauaccacagugaagcaugcagacaucuuucuuu

SEQ ID NO: 4146287 - RNA, 77 nt, Human
agagaaaugguaaaaagcaaacagaaccccaagcuuugcucacaagcuuggggccugcuaugcucuaccuugucucu

SEQ ID NO: 4146288 - RNA, 62 nt, Human
agagaacaaauuaaaggugguuauagacagaagcauuuucacuacuuuuuaauuuggucucu

SEQ ID NO: 4146289 - RNA, 64 nt, Human
agagaacguggaauguggcuccuuggucccauucagccuguaaggggauacuuccacuuucuuu

SEQ ID NO: 4146290 - RNA, 83 nt, Human
agagaacucucuuauuacuguauuaauccagagcagccaguuugcuaaggaaaggaaauacaguaaucuccuugagguuuucu

SEQ ID NO: 4146291 - RNA, 113 nt, Human
agagaacuuuuuaaaacuuccuuuucuaggugcaugcuucacuggauauugauaaucuuucuuuucucuguguucucuagagcuguacaaagaaaggugauucuaaaaucuuu

SEQ ID NO: 4146292 - RNA, 114 nt, Human
agagaagagaaugaagagaggcagccaaguacucacuuugacagagaaaugaauccuggaaagggcuuccgcuggaaggugaguucgcucuguuucucucaugcuuucuuuucu

SEQ ID NO: 4146293 - RNA, 55 nt, Human
agagaaggauggcggugggaggauagucaggguucugcccccagccaaauucucu

SEQ ID NO: 4146294 - RNA, 57 nt, Human
agagaagucucagcacacuugcuguucaucugcucuaugugcccugcagacuucuuu

SEQ ID NO: 4146295 - RNA, 67 nt, Human
agagaaucaaacugagcugaacaaauugcgaguggggcguccagcugugcuguuggcuugucucucu

SEQ ID NO: 4146296 - RNA, 81 nt, Human
agagaauggaguuuggggucaaauacucacggguuccuucgguuauuaguuugggauuugcuuuguagagguucauucucu

SEQ ID NO: 4146297 - RNA, 61 nt, Human
agagacaagaaggcagugaggcccgugcaggugcugcugggcccccagugaccuucucucu

SEQ ID NO: 4146298 - RNA, 68 nt, Human
agagacaagaugagcagcucagugucagcacuaggaucugauugcagagcgugugcuuucuucccucu

SEQ ID NO: 4146299 - RNA, 63 nt, Human
agagacaguuggggauuagugauuacugugacuuggauagucucacucugauuaggugucucu

SEQ ID NO: 4146300 - RNA, 106 nt, Human
agagacauuuugguuggagaaagauguuuagagugagacagcuggguuugaauaaaacuucaguacuuaguauuuuucagcuuugaaucucagaacaagaguuucu

SEQ ID NO: 4146301 - RNA, 63 nt, Human
agagaccauuauguauaaucacagagugucacaggcaugacaugaaugauuaugcaaaacucu

SEQ ID NO: 4146302 - RNA, 86 nt, Human
agagaccauucugguuaaauguuucagugaaaaguuaagacuggucuaucggucuuaacuaucauuugaacaccuggaaaaucucu

SEQ ID NO: 4146303 - RNA, 89 nt, Human
agagacccacaaagcucaaagcccauugugcuaggcuccugacccaucugaacacugagcgggcacugagcgggcucugagcgggcucu

SEQ ID NO: 4146304 - RNA, 79 nt, Human
agagacccuuugccuggagggacauggagaccugggagcagcugggccuucaggugucccugugggccugguagucucu

SEQ ID NO: 4146305 - RNA, 69 nt, Human
agagacgaagguaaacacaugaaugucuguauuuccgcacacaucaugccaaguuucaccugccuuucu

SEQ ID NO: 4146306 - RNA, 81 nt, Human
agagacgaugcuggauuaucucaagggaacagcagugaaccaucuugauuaaccuugaggaguccauaguaucacguuuuu

SEQ ID NO: 4146307 - RNA, 71 nt, Human
agagacuggagggcaagcuuugaacaucagcagcuguaucagaugcugccagggcucugcccacauucucu

SEQ ID NO: 4146308 - RNA, 109 nt, Human
agagacuuuagaaguuaucuggucaggaucucccaguacauaucucuccuguguauguaagguuacaggcauauguuuguggaagacuuguuagauaagaaggugcucu

SEQ ID NO: 4146309 - RNA, 106 nt, Human
agagagaaggaaagagaucuuuugggggcauagagcucauugguagcagagcaguuauuggucuucuguucccuauuucaggucucuuuucauuaugccacucuuu

SEQ ID NO: 4146310 - RNA, 106 nt, Human
agagagagagaguguguguauuugugugacuguguguuuguguguguugugcauuuacauagaguaucauacuggaugcaucacuuuauauaguuauuuuuucucu

SEQ ID NO: 4146311 - RNA, 76 nt, Human
agagagaggcagaaacugagacagaaggacagagagagaaaugcucuguuacucugaauguuucuacugauucuuu

SEQ ID NO: 4146312 - RNA, 80 nt, Human
agagagagguuaaugcagaauugcuaaguaucugaucaggauuugaaagcagggguuugcaauucuguagaccuugcacu

SEQ ID NO: 4146313 - RNA, 88 nt, Human
agagagcaaaggcaagaauguuagagauucuuagguuuuaguagaaagagcauaguuugaagccagaugaccuugcguuuaaaucucu

SEQ ID NO: 4146314 - RNA, 58 nt, Human
agagagcauugaggaaaucuucugucuggucucagaauccuuugcucauuugcucucu

SEQ ID NO: 4146315 - RNA, 77 nt, Human
agagagccacgcagggguugcaaugcugggugaguugggccguuugucucuucuguauuguuaacucaggguucucu

SEQ ID NO: 4146316 - RNA, 55 nt, Human
agagagcucccagucuccucuccauggcuccuugccugguugcuggggugccuuu

SEQ ID NO: 4146317 - RNA, 130 nt, Human
agagaggcaguaguuucuaauguaaccuaggauaugcuugggacugauacaguggaaaaguggaaucuaguguauuucucuuaggcauuaaaguuuggugcugacauaagaauguaauuucuguagcuuu

SEQ ID NO: 4146318 - RNA, 70 nt, Human
agagaggguuuucauuucugagcauucucugaaaagaaugagggcucauugacauggaaaagccacuucu

SEQ ID NO: 4146319 - RNA, 87 nt, Human
agagagguaaauuauacagauaucuaagauguaaacgguucuagaccuuuuggccauuuguugcauuuauuugguguuuaucucuuu

SEQ ID NO: 4146320 - RNA, 56 nt, Human
agagaguagguccacagucaucugaaucccagcucuggacaguggccuauggcuuu

SEQ ID NO: 4146321 - RNA, 65 nt, Human
agagaguguaacccaugguuuggcauuagguguucgaugaaaaggcagcuggguagcaucuuucu

SEQ ID NO: 4146322 - RNA, 61 nt, Human
agagagugucauugggucaguaaaaguugaaugcuuuguaaagagucaaaggcaugucucu

SEQ ID NO: 4146323 - RNA, 78 nt, Human
agagaguuccaugcccucuguacugccagucagauuuuaaccuuuauuuuugcccagugcugacagggaggaaccucu

SEQ ID NO: 4146324 - RNA, 65 nt, Human
agagaguugcuaguuuucaggauaccuccaacuaaaaaggcauccuggagaaaagaaacauuucu

SEQ ID NO: 4146325 - RNA, 59 nt, Human
agagauaauuagguuaaaugaggccaugaguggccucauccaauaugacuguuaucucu

SEQ ID NO: 4146326 - RNA, 130 nt, Human
agagauagaugcauuuucagauugcagaugccagggguguguugauuguuccaguaaugauacuacaacugggccagcaacugcaauggauuucaccaccugauuaaguuuacaguaaugcacugucauu

SEQ ID NO: 4146327 - RNA, 74 nt, Human
agagauagggaacuagacaaagagagaagaaaugugaagcaucuggcucacuuagucuaggacacucagucucu

SEQ ID NO: 4146328 - RNA, 57 nt, Human
agagaugacaugagggacuuaagggacuccauucccccugucccccauggucucucu

SEQ ID NO: 4146329 - RNA, 58 nt, Human
agagaugcaaugguauauggucaccuaaaguaggauaauggacaucuauugcuuuucu

SEQ ID NO: 4146330 - RNA, 130 nt, Human
acuuuccagccuccagaacugugagaaauacauguccguuguuuaagccacccaaucugugauauuuaaucuuguuauagaagccugagccaacuaagacagguguuuacaguguuuucugcuuuaaagu

SEQ ID NO: 4146331 - RNA, 62 nt, Human
acuuucccucuagccaaauuuuaaaacuguagcuguguuucaaaggaggcugagaggauggu

SEQ ID NO: 4146332 - RNA, 58 nt, Human
acuuuccuagacuucagugacagccugggucaggggcuggucacgaaacugggagagu

SEQ ID NO: 4146333 - RNA, 57 nt, Human
acuuucuauggcuuauuaugagguuuaauuuuaucuuguaauaagcaauauggaagu

SEQ ID NO: 4146334 - RNA, 76 nt, Human
acuuucucauuuagcuuucucucacuggugaugagaaaauccuuaguccacuacucugugaaaagcuguagaaagu

SEQ ID NO: 4146335 - RNA, 98 nt, Human
agaaguggacaaaugagauauugguaagaaucaagaaucaaguugguuucaguuguuuugcaggauccuuacaaaugaacauuuuaguccuugcuuuu

SEQ ID NO: 4146336 - RNA, 66 nt, Human
agaaguuaaagcauauggaaauaugauauugagaugcaaaaucaaaagacauguguuuuaacuuuu

SEQ ID NO: 4146337 - RNA, 78 nt, Human
agaauaaacauacucucauauuugaagugaccaaugauauauccuuauuggugcaauuaugaggguguguuccauucu

SEQ ID NO: 4146338 - RNA, 98 nt, Human
agaauacacuaaguauguuuuuaagagaaugcauuagcagagcuacaccauuaaaauauuagcaaaguguauuucccuugaauuacuuaauguguucu

SEQ ID NO: 4146339 - RNA, 77 nt, Human
agaauacucaauuuguuggaaagcauguagguuagcaaauuucaauuccuguguucuuuuaaucauauugaaauucu

SEQ ID NO: 4146340 - RNA, 65 nt, Human
agaauauaacagauucaaagauaagucucuaaagaggaaggcaaucuuugcaucaguuguuuucu

SEQ ID NO: 4146341 - RNA, 75 nt, Human
agaaucacaagcaacgacuuucaagcuguggguccccaaucuacuacuugucuccuuuuuuguuauguguauuuu

SEQ ID NO: 4146342 - RNA, 58 nt, Human
agaaucacagggaguuccugcuuuggauugggccauccaggaaagccugugugagucu

SEQ ID NO: 4146343 - RNA, 72 nt, Human
agaaucagccugaguuugcagcuuaaagccaaaggauuugauacaaucacuggcagcugccagggugguucu

SEQ ID NO: 4146344 - RNA, 86 nt, Human
agaaucauaugcugaagaaucacagggacugacaggggaaaaauguaaaugucauaguuuugcuaauuacuuuagcauguguuucu

SEQ ID NO: 4146345 - RNA, 58 nt, Human
agaaucccaauucuggcugauuuagcaccaaggaagcuuucuccagcuuugggcuuuu

SEQ ID NO: 4146346 - RNA, 69 nt, Human
agaauccugaugaaaaggagagaacgugggagaauaaaagacuaucauaagucuuuucaucaggaaucu

SEQ ID NO: 4146347 - RNA, 74 nt, Human
agaaucucucauuaauugccgaugagaaugcaaaagagugcagccacuuuggaagacaguugaugggaguuucu

SEQ ID NO: 4146348 - RNA, 114 nt, Human
agaaucuuuauguauuaggugugucuccugaagaaggcagauauuuguuuuguaauauauuuuauucuaccugucuguauuuuuuaaguagagcacuuagaccauuuacauucu

SEQ ID NO: 4146349 - RNA, 77 nt, Human
agaaugaaguuaagaggaugcugggccugccugccuuccucaugggacagugagagucuacacccucaaugcauuuu

SEQ ID NO: 4146350 - RNA, 65 nt, Human
agaaugauggagucuucugaguuauuggauaguauauacugcaauuuucagaaauuccaaauuuu

SEQ ID NO: 4146351 - RNA, 77 nt, Human
agaaugcuacagaagugaucuuggaugacuuucaaggcaagaugagaggaggucgagcaacuucugcuugguucucu

SEQ ID NO: 4146352 - RNA, 56 nt, Human
agaaugggaguuggggagggguuuauauuuuuuguccuucuucaguaguuuguucu

SEQ ID NO: 4146353 - RNA, 84 nt, Human
agaaugggcuccugucuguagagggagcgggauuccgaggggcagagguuaugguggagugcuccgucuuggacagggcauucu

SEQ ID NO: 4146354 - RNA, 88 nt, Human
agaaugguauaguauaauauucuuugaacaguuuuccugugcauaguaaaauaccuauggaagaauugucggggaugugcuccauucu

SEQ ID NO: 4146355 - RNA, 80 nt, Human
agaauguacauagacaaagaucagaagaguuugaaauaacacaguuuauauucaguuguaaucuuuguuaguuacauuuu

SEQ ID NO: 4146356 - RNA, 62 nt, Human
agaauguagucuuggagauuuaauacccuagauagugagugugaauuucccucuaucauucu

SEQ ID NO: 4146357 - RNA, 74 nt, Human
agaaugucuaaugaauugucuagaaauugaaauacgcaccuuuuaugaauagggacauuucauaagaccauucu

SEQ ID NO: 4146358 - RNA, 63 nt, Human
agaaugucuuucuguucuaugagauuuaggcuuugcucccuagucuuauacagaaaacauuuu

SEQ ID NO: 4146359 - RNA, 66 nt, Human
agaauguguguguguguuugugugugugugugugugugcauucgcacauuaacacucauaucuucu

SEQ ID NO: 4146360 - RNA, 130 nt, Human
agaauguugaggcucagcagaauuaagcaaauuuuccaagaucacacagguaacaaguggcagaaugucacuucaauacuagaugugugauuccaagguugauuuuguuccugcuguguaaagcaauucu

SEQ ID NO: 4146361 - RNA, 113 nt, Human
agaauuaauuuuauuuuaucuaauaugcuucgaauugggcuucuggaauucaacaugcaaauguaugcuccuagugcaaauuggagcaugcccagauuaauggagaaaauucu

SEQ ID NO: 4146362 - RNA, 77 nt, Human
agaauuagaacacuuggcuuuggauuuaaucauuaucccuagcaauguuuuagagauagccaaguguuucacauuuu

SEQ ID NO: 4146363 - RNA, 78 nt, Human
agaauuaggugguuugguuuugguggccagcucaggcacagacuugcugccuugcuucaaucaaaccguuuggccucu

SEQ ID NO: 4146364 - RNA, 59 nt, Human
agaauuccucuaggaucugccccuuucuuguucuccaggcaguaugccuuggacauucu

SEQ ID NO: 4146365 - RNA, 59 nt, Human
agaauugagcuuuggagggguccaggaguggaagguccaacauggggaagcucagauuu

SEQ ID NO: 4146366 - RNA, 68 nt, Human
agaauuguguuucaggguacuugaucugauuaagcauccagauccaagggcaugcugaaauaaguucu

SEQ ID NO: 4146367 - RNA, 65 nt, Human
agaauuuauccaggcuuaaugggagccaccucaacugggaggguguuccuuucccugggaagucu

SEQ ID NO: 4146368 - RNA, 67 nt, Human
agacaaacccaguggcuguuuuuguuuguuugcuucaauaaaauaagugaaagcccuggguauguuu

SEQ ID NO: 4146369 - RNA, 96 nt, Human
agacaaauuauguagcuuguucaaagucauaaaacuuguaaguggaucagagauucaaauuugaguccguaugacuuuuucaccccugcuaauucu

SEQ ID NO: 4146370 - RNA, 62 nt, Human
agacaacaucacuaaagcugagaaaacacaucuucucucgugucucaagugauagguugucu

SEQ ID NO: 4146371 - RNA, 67 nt, Human
agacaaccacgcccuucauuugggucagacuuuuagacaaaacccugggaaggcuuuugguauguuu

SEQ ID NO: 4146372 - RNA, 65 nt, Human
agacaaguauuuaagguuaguauauuuuauuuuaacaaaguauugcuacaucugaugcuuggucu

SEQ ID NO: 4146373 - RNA, 67 nt, Human
agacaaguuacaccugugcuugauuuuagguucauauuuuauaugucaaacagguguaauaaugucu

SEQ ID NO: 4146374 - RNA, 72 nt, Human
agacaauauguauauuaagaauugaugcucugugaggucaguaacuuuauuuuugauguagucauauugucu

SEQ ID NO: 4146375 - RNA, 92 nt, Human
agacaauguacagguagguauggugcagucuuccaguggucccuagugggauuaaguagcaagcugaucauucuugccuguuuuaucugucu

SEQ ID NO: 4146376 - RNA, 74 nt, Human
agacacagauucucugaggcaggggcagcuggagagacuuucuccaugccuccuauuccuuuuuucucuugucu

SEQ ID NO: 4146377 - RNA, 72 nt, Human
agacacagucaccuuaucaggaugucuuugggaugcgguuccuuucuggaaacauuacagggugaugugucu

SEQ ID NO: 4146378 - RNA, 57 nt, Human
agacacagucugucuggaggaguccccaaagacuguuccaauuggugaugugugucu

SEQ ID NO: 4146379 - RNA, 72 nt, Human
agacaccucacuuaaaaauucuaguuauggaauaauugugaugccauaggaagaaaauuaagcaagcugucu

SEQ ID NO: 4146380 - RNA, 82 nt, Human
agacacuuacuucccagagcucuggagguuggaagcccaacaucacgcuuccagcugagguggccucuguggaggucugucu

SEQ ID NO: 4146381 - RNA, 100 nt, Human
agacacuucuaaggugugaacucugugaauuuacaaagaggcaacagcucuaggauagagacuguggcucuuugaagggaaaaucuacuuugaagugucu

SEQ ID NO: 4146382 - RNA, 55 nt, Human
agacacuuucagaaguguuugcaaguucagauucuaaugacacuuuucagugucu

SEQ ID NO: 4146383 - RNA, 57 nt, Human
agacagacauucuagagccaccacauuucugucuucgugacuuuggaaaugcuguuu

SEQ ID NO: 4146384 - RNA, 77 nt, Human
agacagacggggaaggauugaguugacccaacaucaucuaucuggcuggacgcucauuuuucuucuccugccugucu

SEQ ID NO: 4146385 - RNA, 60 nt, Human
agacagcuccuacugaagccauguuuaaacagacacuuggaggagaggagggaguuggcu

SEQ ID NO: 4146386 - RNA, 61 nt, Human
agacaggagagggaacugccggacuggcaggacaggaaugcgcaggcccucucucuagucu

SEQ ID NO: 4146387 - RNA, 95 nt, Human
agacaggggcaggguucucagguggcccccaugagugggugacaucaggagaccccgcaucaggcaagguuaccugugugccugcugacuugucu

SEQ ID NO: 4146388 - RNA, 120 nt, Human
agacaguugaguugagcccuguaucuguaaaugcaaauguagcuuuuugggaaaaaauauaauuaacuuugaauuugcauuuacauagcauagauuucagauuaauuuaacuuaacugcu

SEQ ID NO: 4146389 - RNA, 76 nt, Human
agacaguuggcccauuuuuaguagauuuagugauuaaagacucaguaugucagagugaaaauggucccaaaagucu

SEQ ID NO: 4146390 - RNA, 129 nt, Human
agacauaaaaaaacaauguuuucaaaagauacugaaugucauggaaaaauuuauucuuauguuaagugaaaaauaggaagauaaacauuuguauguaaggaaucauuagaauauuguuaaaaugugugu

SEQ ID NO: 4146391 - RNA, 72 nt, Human
agacauacacauuauagagaguauaauaggguuguauacacaccuacauauaccuauauaaugugugugucu

SEQ ID NO: 4146392 - RNA, 59 nt, Human
agacauagauaggcacugauugcauccgucugcaaacauguccuuggauaucuauuucu

SEQ ID NO: 4146393 - RNA, 59 nt, Human
agacauauauugcaauucacugggcguuugagugagcuuggaagauugccauguugacu

SEQ ID NO: 4146394 - RNA, 77 nt, Human
agacauguggacuagaucuggaacagccugaaguuuagagccaaacucagcuaaacucagucuauguccaccuaucu

SEQ ID NO: 4146395 - RNA, 63 nt, Human
agaccaaacuacaugaguaugcccagaaacagaguggcuggcucagcuuacuuuugagggucu

SEQ ID NO: 4146396 - RNA, 71 nt, Human
agaccacauccagggagccccucgagcuguuuuucuaaacaagaauaguccucuccuuggaauuuguuucu

SEQ ID NO: 4146397 - RNA, 59 nt, Human
agaccaccagggaaagguggcauguguuauuuaugcucaaccugaggucccuauggucu

SEQ ID NO: 4146398 - RNA, 76 nt, Human
agacccaggacacugcuucucuggcagagccagcccuggcugggcucccucacaucggagccugugcccucagucu

SEQ ID NO: 4146399 - RNA, 105 nt, Human
agacccuuccuauuacagccgauaggccaguguuuuccaaacuacguucuuuggaauguuauugaacuacgagcucuuaguagauguaacugaaagaauggguuu

SEQ ID NO: 4146400 - RNA, 58 nt, Human
agacccuugcagucugguugucuguguaaaaggcauucacgaacauauugcaggguuu

SEQ ID NO: 4146401 - RNA, 65 nt, Human
agaccucaagaauugcccagggcaagagccaagcaccgcgcucuggguucugauuuaugagcgcu

SEQ ID NO: 4146402 - RNA, 77 nt, Human
agaccugaaaagcaaggccaggacaccaggggacuucaggcuucagccuuggcccauuccugucuuuucaaggugcu

SEQ ID NO: 4146403 - RNA, 57 nt, Human
agaccugagugcaggagccaggcuguggagcgugugugugggccugcaucugggucu

SEQ ID NO: 4146404 - RNA, 57 nt, Human
agacaugucaccaauucuuacugauucucauucucagugggccaaguguaugugucu

SEQ ID NO: 4146405 - RNA, 89 nt, Human
agacauuccucugcuuuacagucaccaaacuuugcugcaagaaauguaucagauuugucaagugacuuccugaagcaauaggaaagucu

SEQ ID NO: 4146406 - RNA, 89 nt, Human
agaccaaaauuccauuuguuugccuaugugaaggguuuauuauuaauuacccuauuaauuuauguccaaaccagaugugauuuccuucu

SEQ ID NO: 4146407 - RNA, 70 nt, Human
agaccaccgggagggacgaacaacucuggagugccagcuuuaugaacuguaacccucaccgcgaaggucu

SEQ ID NO: 4146408 - RNA, 59 nt, Human
agaccauagggaccucagguugagcauaaauaacacaugccaccuuucccugguggucu

SEQ ID NO: 4146409 - RNA, 58 nt, Human
agacccaggguuugagcucugcaggaauggccgacuccuugugguuugagccugggcu

SEQ ID NO: 4146410 - RNA, 75 nt, Human
agacccccaugcaagaaugguaauaaugugacuuuaacuuacauugaaauccaauuaucauauguuugugggucu

SEQ ID NO: 4146411 - RNA, 62 nt, Human
agaccccgaugacuccaguuuauaacccuggauucccaggggugcucagagccaugggggcu

SEQ ID NO: 4146412 - RNA, 68 nt, Human
agacccucacgcugucucugguguggagcccuguuaaacuccacacauuagagccaaugucagccucu

SEQ ID NO: 4146413 - RNA, 60 nt, Human
agaccgagaggaauccugacugaggcagggaucgccggucagccagaggcuucuugguuu

SEQ ID NO: 4146414 - RNA, 57 nt, Human
agaccuacuggcacauugguaucauccuuauuuuacagauggccaguuuagagguuu

SEQ ID NO: 4146415 - RNA, 57 nt, Human
agaccuggaaguucaagagaaagagaugaguucuugucucuaccccuccccaggucu

SEQ ID NO: 4146416 - RNA, 81 nt, Human
agaccuguccucccccaaaguuugcacggauaaucggaaggugugguagggugggcuugggggaagccaggagaagggucu

SEQ ID NO: 4146417 - RNA, 67 nt, Human
agacgcacagggccuuauauccagaaggacaucaccuuuggguuuuaaugcucugcacuugcugucu

SEQ ID NO: 4146418 - RNA, 60 nt, Human
agacgcugaaguucuuucauaucuuaauuagcaguuaauuaaguggaggugcuggugucu

SEQ ID NO: 4146419 - RNA, 91 nt, Human
agacggggcuucugugggagaugggaagguggaugccaggagaccugcaauugaguaaaaucuuuccuauuugccuaaagagacccucucu

SEQ ID NO: 4146420 - RNA, 71 nt, Human
agacuaagugauguagcucauuugugcaauaggucagggacuggguugcaggaagcacacacauguagucu

SEQ ID NO: 4146421 - RNA, 59 nt, Human
agacuagcuccaaaguuaguguuguuuuucuugauggcauuagcuucaaaagcuugucu

SEQ ID NO: 4146422 - RNA, 56 nt, Human
agacucagaguagaaaauagguuccaggcauggacuuucauuguuacucagaguuu

SEQ ID NO: 4146423 - RNA, 56 nt, Human
agacucaugguaaggguagaaaccggcaucuccacaugucuacccucucagagucu

SEQ ID NO: 4146424 - RNA, 72 nt, Human
agacucucaagagagugcugcuugggguucgacuguguucuuuagaacuccauuuuucaaacuuuagaguuu

SEQ ID NO: 4146425 - RNA, 85 nt, Human
agacugaauuguuucagaaaguccaggguuuaaucccagcuuuuacucaagagcagagagccuggacuuuucugagccucaguuu

SEQ ID NO: 4146426 - RNA, 55 nt, Human
agagggugaaugagauagaaaaacaagacaugauuuuucuggguacucucccucu

SEQ ID NO: 4146427 - RNA, 64 nt, Human
agagguaagaauagaggauuggggauggguugucuggcuuucaauuuccucaguucuuacuccu

SEQ ID NO: 4146428 - RNA, 73 nt, Human
agagguaagcaguggcaagugcugggcccagaaccaacacuugguugucagcugcuuaguccaaguauccucu

SEQ ID NO: 4146429 - RNA, 130 nt, Human
agagguaagucucgguugcagaggggacuggggcagaagugaggauuguccagccuauccgacugguugggcagcuguuuguccuccuguuacucuccccaacuccugcccugcacccugccacauuucu

SEQ ID NO: 4146430 - RNA, 74 nt, Human
agagguaccgcaaauucauucaguugaagaaaauccagugaguucuauaauuaaaaugaaggcauuguaucucu

SEQ ID NO: 4146431 - RNA, 61 nt, Human
agagguaccuagaaguauugcuaggcugugauuaggaaugcagaauuuggggguaaccuuu

SEQ ID NO: 4146432 - RNA, 73 nt, Human
agaggucaugcaaggcugaaacaugguggguuucuggcccaccaaaagugaaaagaccuuucuggguaccucu

SEQ ID NO: 4146433 - RNA, 84 nt, Human
agagguccagucaguaacacuauuuucauauguaucuaucuguauguauauauauaugaauauagguacuguauauguguaucu

SEQ ID NO: 4146434 - RNA, 94 nt, Human
agaggucuuaaaagcuuaguguacauuuaauuuugcaaaucaauacuauuauuccugguuugcagcugcaguaaauguucaccuguagaucucu

SEQ ID NO: 4146435 - RNA, 85 nt, Human
agaggugugaguucaucagcuucucaaaauggcuuagaucccaaaaagauuaagacccauugcuggaagucuaguucaugccucu

SEQ ID NO: 4146436 - RNA, 82 nt, Human
agagguuggcuguguuucauuuaggaacuuugaauuuuuccacuauuaguuuugauuccuugaaauauccuugcccauuucu

SEQ ID NO: 4146437 - RNA, 78 nt, Human
agagguuggggcaggcagugacuguucagacguccaaucucuuugggacgccucuucagcgcugucuucccugccucu

SEQ ID NO: 4146438 - RNA, 122 nt, Human
agaguaacuacagggacccuuuguuuaaauagcauguuugcucuuuuuaaaggagguaauuaauggcaaaggacuuuggaacuggaggaacaugcuagaaaagcaacccuugagugccaucu

SEQ ID NO: 4146439 - RNA, 63 nt, Human
agaguaaugugacucuguuucugaaaacaguuuuuguuacuaggaaaagaguuucacccaucu

SEQ ID NO: 4146440 - RNA, 71 nt, Human
agagucaaguagggcaugggcuuuccauggcucccuucagcccuucuggcuccaggcuccuauuucacuuu

SEQ ID NO: 4146441 - RNA, 56 nt, Human
agagucagugucuguugaaggccugcugccugccugguucacagacagcugucuuu

SEQ ID NO: 4146442 - RNA, 125 nt, Human
agagucccagugcagaagcugaacuuaauaccuuugacauuuaaggcagucacuuaaucagauuacucucucugguuauagccuaugggaauucacagguguuaaauuagcuucagaaggacucu

SEQ ID NO: 4146443 - RNA, 86 nt, Human
agagucccuugaacccaggaggcugaggcugcagugagccaagauugccucacugcacuccagccugggcaagagcaugagacucu

SEQ ID NO: 4146444 - RNA, 86 nt, Human
agagucucgcugugucucccaggcuggaguguaguggcgcgaucucggcucacugcaagcucagccucccggguucaugacauucu

SEQ ID NO: 4146445 - RNA, 83 nt, Human
agagucucuugucacccaggcuggauugcagugguacaaucuuggcucacugcaaccuccgccuuuuagguucaauugacucu

SEQ ID NO: 4146446 - RNA, 73 nt, Human
agagucugauauuuguaccagagugagucacugcuuuuaaucccuuauuuuggauuugccaacauuagacucu

SEQ ID NO: 4146447 - RNA, 58 nt, Human
agagucugaugucaacaguucuggaagagauuccacagaauuggucuuaccagacuuu

SEQ ID NO: 4146448 - RNA, 57 nt, Human
agagucugcuccagauguguccuuuauuccagaauccaggcugaaggagcagauuuu

SEQ ID NO: 4146449 - RNA, 55 nt, Human
agagugaguaaaauggaguauguaaaagucauauauacuacauuucucugacuuu

SEQ ID NO: 4146450 - RNA, 70 nt, Human
agagugcaguuggggugaggggaucuaagaggcugguucuccuccgccucucuuccaccucugcaccucu

SEQ ID NO: 4146451 - RNA, 83 nt, Human
agagugcaugcaguggccgauauuagagguaaaggguuggaaacagcuccagguagugccuuaucguuucaauguguaacuuu

SEQ ID NO: 4146452 - RNA, 67 nt, Human
agagugccaaggcugagaaauucugcccuagcuacagcuaaggacagaauucuuuuaguucaucuuu

SEQ ID NO: 4146453 - RNA, 83 nt, Human
agagugggagaggauuucugggcucccacauauuucauuaggauugcuuuggaaaugagggcgcuuagauucccugcugcucu

SEQ ID NO: 4146454 - RNA, 62 nt, Human
agagugggcaugaauacauauuugcugaauagaucagcaaauuaaccaaucaugcucgguuu

SEQ ID NO: 4146455 - RNA, 110 nt, Human
agaguggucuaguggggaaggcaccagcuuaggagccuggagagcugaacucuagcuuggguucugucagaagcuagcuccugggaaauguacuucaccccugagcaccu

SEQ ID NO: 4146456 - RNA, 67 nt, Human
agagugguuggacucagagugucuuuuucaaauagugaggauagcuuagauacaguuuaauuacucu

SEQ ID NO: 4146457 - RNA, 55 nt, Human
agaguguaaaaacuuagugagaugauaguguuaguuaucauacauguuacacucu

SEQ ID NO: 4146458 - RNA, 68 nt, Human
agagugucacuuucaacauuuaucaguuuaucagaggugcuauuuuucugguuuuaaauggacacuuu

SEQ ID NO: 4146459 - RNA, 75 nt, Human
agaguguuccugcugcacgggcgcccccagaugcacaacguucagcagauugaagccugggggugcucacgcucu

SEQ ID NO: 4146460 - RNA, 55 nt, Human
agaguguuuuggagugggaaggcaggcuucacuugcauuucacccagggcacucu

SEQ ID NO: 4146461 - RNA, 57 nt, Human
agaguuagguccagaauguugcuuaguuucuauucugaaagcaucucugccaacucu

SEQ ID NO: 4146462 - RNA, 93 nt, Human
agaguuccaaaagcuuauugauaauauagugcauaacauuuaaagguccucaugucucugagggcuuuuauaugccuuagcucauggaauucu

SEQ ID NO: 4146463 - RNA, 55 nt, Human
agaguuccaagcccauggcauuccugagagugaggaagcagggacauggaacuuu

SEQ ID NO: 4146464 - RNA, 57 nt, Human
agaguucugcgguaugugagaaacugaaccacagaccucuacauucccagcaacucu

SEQ ID NO: 4146465 - RNA, 56 nt, Human
agaguucuuuacuguguaaugcuaaauaucuuguugcgguuacacaggagagcucu

SEQ ID NO: 4146466 - RNA, 72 nt, Human
agaguugcagauggcugccuucuugcuguguccucacauggcagagaaagcgagccacacuuucuguuaucu

SEQ ID NO: 4146467 - RNA, 97 nt, Human
agaguuucauguauggcugaauucaucaagaaaaucuccuucucuauuccuugaaaugauuuucuugaggguuugcuuuguucucacagaaggcucu

SEQ ID NO: 4146468 - RNA, 68 nt, Human
agaguuucuugugagcacugacaguuuucuaagccagcaagcaaccucaauacucacaaagagauuuu

SEQ ID NO: 4146469 - RNA, 129 nt, Human
agaguuugacuuacaacucagccauucucugcuacuuauauaagagcaaagucaugucaaaaaagaagccaaaaugaaacggaauguucuuuaucgcaagaaugacugaaguuucgccaauuaaacuuu

SEQ ID NO: 4146470 - RNA, 89 nt, Human
agaguuuuuaauuaugaagugauguugaauuuugccagaugcuuuuucugcaucuuuugagauaaucaugugauuucauccuuuauucu

SEQ ID NO: 4146471 - RNA, 128 nt, Human
agauaaaaggaaaagaaagugcaaguagauuugggaucuauagauuggggaaagacauucauacagucaggaccagauguucacuggaaguuuuuuccuucuggauccuucuuuggcuauaggaaucu

SEQ ID NO: 4146472 - RNA, 62 nt, Human
agauaaaaugauuuucuggaucuucgaguuaauauugauaaugcagcuauaucauuuuguuu

SEQ ID NO: 4146473 - RNA, 129 nt, Human
agauaaagaaauuaaggccaaaagacaugcaguuaaaagacagcagagccaguggcucuagaguuuccucucuuuacaguuacacucugcugcuuuagcaaaugcuuuucaccacaauuauuaagaucu

SEQ ID NO: 4146474 - RNA, 68 nt, Human
agauaagaguuuugauguuucuauuucuuauuacuuccuguuagaagagaaucauggaaacucuuucu

SEQ ID NO: 4146475 - RNA, 76 nt, Human
agauaagcuaccuuugccagaacaguaguaacuccuuucuuugcuugaugguccacuggcaugaggagcuuuguuu

SEQ ID NO: 4146476 - RNA, 83 nt, Human
agauaaggaagauuuguguuaagcugauuguguugauguuuugaaggaacuuuaaaccauaguuuaacauaagagucuuauuu

SEQ ID NO: 4146477 - RNA, 129 nt, Human
agauaauauagaaagccacaauuuaaggccauugacugauauagugaaggcugugugaaaguucucucacucagagacauuuuuuagucuugacauauuugcauuggcuuuaaaaaguucauauuauuu

SEQ ID NO: 4146478 - RNA, 61 nt, Human
agagcagccucagcucccuguggggugacucauguguccccaggcacuggcuggguucuuu

SEQ ID NO: 4146479 - RNA, 58 nt, Human
agagcagcucgcuaccucucuaacauaauguguaacaagguggagagccagcugcucu

SEQ ID NO: 4146480 - RNA, 68 nt, Human
agagcagcuggggcagagaccagggcagagagcugaugcccagagagggugcuccuccaugcugcucu

SEQ ID NO: 4146481 - RNA, 57 nt, Human
agagcaggguguuacaggacugaacucagcuuuauuucagcugagcauccgugcucu

SEQ ID NO: 4146482 - RNA, 70 nt, Human
agagcauaguguuaaauugauucaccuuucuccaugugagaauuguaagcaauuugauuagcuuuucucu

SEQ ID NO: 4146483 - RNA, 55 nt, Human
agcaguugagugggaaucaggcauugguuuugcuuagaagccuaccagaauugcu

SEQ ID NO: 4146484 - RNA, 63 nt, Human
agcaguuuagcuauacugcuuguugucuuggggcaaaggaaaguagauagcuaaaguuuuguu

SEQ ID NO: 4146485 - RNA, 60 nt, Human
agcaguuuuagggagacacauuaggagcuggagugaacacuuaucaucucuauaacugcu

SEQ ID NO: 4146486 - RNA, 112 nt, Human
agcauaaauaaaacgcuugacagaagguuuuauccuaaguuuucagucauuaaauaucugaaauaauaggaaauuaagucucuuuugucaaacaaggacaucacaauaugcu

SEQ ID NO: 4146487 - RNA, 55 nt, Human
agcauaaguugguacagccacuuuagagaacuucuuaguggucucuacuuacgcu

SEQ ID NO: 4146488 - RNA, 73 nt, Human
agcauacacuuuagggcaaaguuucaacaguuccaugccgagcuuagagacuuucgccucugacauguuagcu

SEQ ID NO: 4146489 - RNA, 68 nt, Human
agcauacuugacacuucucuauuugcaaugauugccaugauaggccguggagagagaaguguguagcu

SEQ ID NO: 4146490 - RNA, 56 nt, Human
agcauagagaaguggccgcuugcugugcuucagcagcucaacagugucucuauucu

SEQ ID NO: 4146491 - RNA, 127 nt, Human
agcauauacucuuaacuaaaauugauuuucuccuguaguaaacauuuucauauuuucugguagcucaggauguuuugaauauauuugcuauguuuagggaauuuccaaucuuaauauaaguguugcu

SEQ ID NO: 4146492 - RNA, 56 nt, Human
agcauauggaggcagcuauucaguuaugcugagcuaugcugcaauaucauuuugcu

SEQ ID NO: 4146493 - RNA, 62 nt, Human
agcauccaggagcauuaagagaacauagggcucagccuuguggugcuggugguuuuugugcu

SEQ ID NO: 4146494 - RNA, 56 nt, Human
agcauccugccucuccucccaaugguucugugauguugggaaaaugaaaaggagcu

SEQ ID NO: 4146495 - RNA, 74 nt, Human
agcauccuucucugagauagacuaaguggcagaauaagaaaucuguuaaggucuauuaguggagaaggaggacu

SEQ ID NO: 4146496 - RNA, 59 nt, Human
agcaucuggucaugagugagaagaacaugacagcauugucucugguguggccagaagcu

SEQ ID NO: 4146497 - RNA, 61 nt, Human
agcaucuguaggaaguggaaagucucagaugauucaggaggcuaagguucugccagaagcu

SEQ ID NO: 4146498 - RNA, 92 nt, Human
agcaucuguuucagagaagaacagauccaugcauauggaugugggauuacuuucuuugcagcuggauuuaucuuuucccagugauagguguu

SEQ ID NO: 4146499 - RNA, 84 nt, Human
agcaucuuaugcauaaaaggaggucacuuuauuccugcucaacucuggggggagaucugagaucuuauuuuuuguaaaugugcu

SEQ ID NO: 4146500 - RNA, 120 nt, Human
agcaugaaauuuuguuuugagucaagguguuucauuagcugugaaacagcagaagagguuuuacuauuucuauuuuggacucauagaaggaaaugcaaaugaaucaaaaucuauuaugcu

SEQ ID NO: 4146501 - RNA, 58 nt, Human
agcaugcuuggcauuugucagagacgacuagaucugauuuaaauacaugagcacugcu

SEQ ID NO: 4146502 - RNA, 84 nt, Human
agcauggcacauuuuuaaaucugcucuuaaaugucacucuauuaucaagagcagcauuucauguagauugagaacaguugugcu

SEQ ID NO: 4146503 - RNA, 72 nt, Human
agcauggcuuacuuucagggaguauggcuucuauaucaauuauccaucucagaguuuagagcugagccaucu

SEQ ID NO: 4146504 - RNA, 93 nt, Human
agcauguccacaaggcuggaggcagcacgagggcaggaaccaagucugcuugaugauugcugucuccccagggccucccauguggaccaugcu

SEQ ID NO: 4146505 - RNA, 68 nt, Human
agcaugugaagauagcuguuacaucuugcauaucgucucagugagauucaggcaugucuucauuuguu

SEQ ID NO: 4146506 - RNA, 73 nt, Human
agcauuaauaucaacagguauggaugagauugcauugaaagcugugcauugcauuugucauuguugaggugcu

SEQ ID NO: 4146507 - RNA, 68 nt, Human
agcauuagaacauuccaucacuggguauuagacuuaugguuuacuugacuugaugaauguucuuuguu

SEQ ID NO: 4146508 - RNA, 91 nt, Human
agcauuauagaggcuuauuuacccagauucacaagccaagguugacuauauuaauuguggcugucuuuggcuaacuaggucuuguaaugcu

SEQ ID NO: 4146509 - RNA, 117 nt, Human
agcauuauuggaccacagcuguauucauucauuacauauugucuaugacugcuucuguguuacaagggcagaauuggauaguugugauaaagauuauacagcccauaaaaucuugcu

SEQ ID NO: 4146510 - RNA, 79 nt, Human
agcauucauucuaguugagggagacaaauaauauguaaguaaauaauguauguuuuauaucaggugauuaaggaauguu

SEQ ID NO: 4146511 - RNA, 84 nt, Human
agcauuccugcaguucauguaucauguauccaaacaaaaggcucgaacugcaggaauacaugauacaugaacugcaggaauguu

SEQ ID NO: 4146512 - RNA, 110 nt, Human
agcauugaaacagguggacucaagccauuccucugucucuuuucuggcacuguaguuauagauguaagcagaagaacagcuuguuugaaguaauggcauguuugaauguu

SEQ ID NO: 4146513 - RNA, 105 nt, Human
agcauugcugucuuuuuugucaucauuccguuuugcauuguuaucauucucuuuugcauuguuaauaucagaauguaaugguccuuaggaaagcacaguguggcu

SEQ ID NO: 4146514 - RNA, 56 nt, Human
agcauuucuuuuaaucacagugguguuacuagcaguacugugugaucuggaaagcu

SEQ ID NO: 4146515 - RNA, 64 nt, Human
agcauuugccaacagaagguguacuacugaaugcuaauaucggugagagccugucugugaugcu

SEQ ID NO: 4146516 - RNA, 85 nt, Human
agccaaagagaugucuguacgaguuacaauggggucgaccaggaggcagucaaaguaaaaguauagaguuuguauuuuuuuagcu

SEQ ID NO: 4146517 - RNA, 61 nt, Human
agccaaagcagcaacgugcauauaaccugcacuugucugguuagcacuuugcuuuuugucu

SEQ ID NO: 4146518 - RNA, 58 nt, Human
agccaacaacucugagcccaguuucuaucuaaaaacuggagcuaauacuuguuuugcu

SEQ ID NO: 4146519 - RNA, 82 nt, Human
agccaacaccagaggugggagugaucugguaggugguaacugcugugucccaagcuaauggcucacuguuucuuguguggcu

SEQ ID NO: 4146520 - RNA, 69 nt, Human
agccaacagaagaauuucucucaugauuugaaucugauuucagaaagggaccaguucuuuugaagggcu

SEQ ID NO: 4146521 - RNA, 60 nt, Human
agccaacccgcugcugcagagagcccucuacgaauagcccgcucugugcuggcggaggcu

SEQ ID NO: 4146522 - RNA, 82 nt, Human
agccaagagagugauuaugucuggcugguuaaugagcuaauccuuauuaggaaaaggucagaugugcacacugacucuggcu

SEQ ID NO: 4146523 - RNA, 74 nt, Human
agccaaggugaaccagcaguugccugaaaaagaccuuuccuugccuucuuaguuagucccugguaccuuuggcu

SEQ ID NO: 4146524 - RNA, 77 nt, Human
agccaaguaccacacuagacauuagguagguucaugggccuguggucuguuaucaaugucuuguguuaauccaggcu

SEQ ID NO: 4146525 - RNA, 83 nt, Human
agccaaguuuuaaacuuagaaggaacaguuuagugcaguagucuuguauugaaaaacuuucugagaaauuaaaaaauuaggcu

SEQ ID NO: 4146526 - RNA, 70 nt, Human
agccaauuagauguugaagucauauuugggcucauggcccauggcauaguguucaaccucucauuuugcu

SEQ ID NO: 4146527 - RNA, 57 nt, Human
agccacagaugggcaaucuuucugucaugccacugaauaaagauguccuuuugggcu

SEQ ID NO: 4146528 - RNA, 64 nt, Human
agccacaggcugucugaauggaggcccccagcacgggggcccccuguugagucagccuugggcu

SEQ ID NO: 4146529 - RNA, 67 nt, Human
agccacagugggcuaccagcucaauaaucuuccaauugucccaagcuccaaauggcccauugaggcu

SEQ ID NO: 4146530 - RNA, 79 nt, Human
agccacccuugugcagguucaugaugggugggucugcucagccagugggcugcucacaugagaucuguacauccgggcu

SEQ ID NO: 4146531 - RNA, 56 nt, Human
agccaccucuaucuugggcuccauguuccccaccuuagcuccugguauaggugccu

SEQ ID NO: 4146532 - RNA, 80 nt, Human
agccacuacuuaaaaccaagccacuuuugugguuuucagauuuuugaaaaacacaaguggcuuggucuuaauuagcagcu

SEQ ID NO: 4146533 - RNA, 59 nt, Human
agccacucauucauucguucaacaguguuuauugagcagcugagcuggaaugagaggcu

SEQ ID NO: 4146534 - RNA, 67 nt, Human
agccacuugggguggggagaggcaaguaggcaggugucugucccucucacaccucaccagaguggcu

SEQ ID NO: 4146535 - RNA, 81 nt, Human
agccagaauuacugcaguaaccacuguaggugugugugguguggcuuuagacacuuauuugugguaguguuuauuuugguu

SEQ ID NO: 4146536 - RNA, 72 nt, Human
agccagaguagcugcccugcaccuuggccaggaccaggguccaugugagaggagacagggaagugccuggcu

SEQ ID NO: 4146537 - RNA, 92 nt, Human
agccagcaggccaggggagagcaaggugauuuccuggcugggucacgcugaggaacaauacaggcuuuauuccucccggccuuguccugguu

SEQ ID NO: 4146538 - RNA, 56 nt, Human
agccaggaaaagagccuucacuagaaacuaacuaugcaggaccuugauccuggacu

SEQ ID NO: 4146539 - RNA, 62 nt, Human
agccaggccuuuucucaagguugugucuguaguaaguaaccuugagggaugagguaguggcu

SEQ ID NO: 4146540 - RNA, 84 nt, Human
agccaggcgcggcuggaccacgacguggcggccgccgugagcggugucuaccgccgugcaggccgcgacguggccgcccuggcu

SEQ ID NO: 4146541 - RNA, 61 nt, Human
agccaggucagcucacccugcuucaacaggauuccagccugugugugcuguggaccuggcu

SEQ ID NO: 4146542 - RNA, 96 nt, Human
agccagguucccacuugaguccaggaguuggggcagcagugaacccugaucaugucacugcacuccauccugggcaacagaguaaagauccugucu

SEQ ID NO: 4146543 - RNA, 56 nt, Human
agccaguaucacucuguguucuugauuuuuucuuaucgacauuccugacacuggcu

SEQ ID NO: 4146544 - RNA, 57 nt, Human
agccaguccaucacuaaugggucauuuaccuugauugacucaguguuaggacuugcu

SEQ ID NO: 4146545 - RNA, 66 nt, Human
agccagucucagaugugcgucagccacaggcuccaggggccacgugccuggccacaccugcugguu

SEQ ID NO: 4146546 - RNA, 61 nt, Human
agccagucugcauggcaggagagaggagaugcuucuccauuucuaccaaaugugacuggcu

SEQ ID NO: 4146547 - RNA, 130 nt, Human
agccaguuuugguugucauaacuggagugggacaugcuguguuacuuggcaucuaauggguauagauuagggaugcugggagacagcaggcaguucacacaucacccccacaacaaagcaguaucuggcu

SEQ ID NO: 4146548 - RNA, 62 nt, Human
agccauagaaacugagacaaggauuuaccaagcguaaaucuggacagucucguuucuaagcu

SEQ ID NO: 4146549 - RNA, 55 nt, Human
agccauccuacuaccucagcaugaaacauguugugagaggguaaaguaguaugcu

SEQ ID NO: 4146550 - RNA, 63 nt, Human
agccaucggccuauggcuggccuuaggaaucagucucuagccagacucaagggccaccaggcu

SEQ ID NO: 4146551 - RNA, 130 nt, Human
agccaugucuaagucagagucuccuaaaaagccugaacagcugcagaagcuuuucaucacaugguugaucuuugaaauaacugaugaggguuucuacagccauuuugagcagugagaacucuuauggacu

SEQ ID NO: 4146552 - RNA, 73 nt, Human
agaaggaaagaaaggugaggucuggucuucaauugaaaauugaagaguugauuauuaucuucgaacacauucu

SEQ ID NO: 4146553 - RNA, 72 nt, Human
agagccauccuugcccuaaaugucugugugaugagcuguaagacccuacacggcacuuuaggaaggggcacu

SEQ ID NO: 4146554 - RNA, 59 nt, Human
agagcccaggcaggcauccaggccuccucucucuaucccugggcuccuccugcugcucu

SEQ ID NO: 4146555 - RNA, 62 nt, Human
agagccccugggucacacagcccgucuccaguagggcuggggaaaagaacccagggcgcucu

SEQ ID NO: 4146556 - RNA, 55 nt, Human
agagcccguguccugcagaaagacagcuguuucucuguccacaagcacaggcucu

SEQ ID NO: 4146557 - RNA, 68 nt, Human
agagccgcccacgcugccgucuuucuugcgguucuuccgugggaaaauuggcgcguggggcuggcccu

SEQ ID NO: 4146558 - RNA, 73 nt, Human
agagccgguuugggccucggccaaggacgggguguccuggcccagccugggugugaggcccauccgcggcucu

SEQ ID NO: 4146559 - RNA, 69 nt, Human
agagccugcagcugugaagaaaagcucucagaauucucaaagacaagagcacauagucugagagguuuu

SEQ ID NO: 4146560 - RNA, 102 nt, Human
agagccuugugcacaagcaucucaguggguuguauauuuauuucucuaauauuuuuucauuagcagagguaaguguggcaauagggggguuuggcugguucu

SEQ ID NO: 4146561 - RNA, 63 nt, Human
agagcgggaguguugagcgcccugccagguuugugcacucuggcccagccccacuccuguucu

SEQ ID NO: 4146562 - RNA, 80 nt, Human
agagcuagagggauguaaggaauauagcaucuguugaaugaguaauaaagccuuauugauuuuaccuuccaucuagcucu

SEQ ID NO: 4146563 - RNA, 75 nt, Human
agagcuaggcauaagcccagguaaguggcucaugcuuauuuuagugaucagggccauaucuugugcaccagcucu

SEQ ID NO: 4146564 - RNA, 110 nt, Human
agagcucacugaaauugccaaugaugucaaaugcugcaaacucaucaaggaaaaugaagacugagaaugaguucauugcauuugacaguuggagaucuuuggugacaucu

SEQ ID NO: 4146565 - RNA, 79 nt, Human
agagcucaguguguuaugguuaauggaaauguugucauugucagauugccucuuaacuguaauauaaauaugagucucu

SEQ ID NO: 4146566 - RNA, 56 nt, Human
agagcucccuaaagcgagguggucauacuauagaugccaggacugcuggggacucu

SEQ ID NO: 4146567 - RNA, 82 nt, Human
agagcugaaaaguuacccagagucauguuuauucccuuuucuacuaagcagggaacuugaacucugggugcacaugaguucu

SEQ ID NO: 4146568 - RNA, 64 nt, Human
agagcugcaggguggacccaggcacuguucccauuggcauccugggucuccuccugcuggcucu

SEQ ID NO: 4146569 - RNA, 57 nt, Human
agagcuggcugcugcggugcuuucaagucaucuauuguuucauuguaggugggcucu

SEQ ID NO: 4146570 - RNA, 61 nt, Human
agagcugguucaaguccuggcucugucacuugcuguaacagaccagauacugaacuuuucu

SEQ ID NO: 4146571 - RNA, 64 nt, Human
agagcugucugcuuggcuuauaaccucaggcugacauaagccugaugaagaagagcccaguucu

SEQ ID NO: 4146572 - RNA, 63 nt, Human
agagcuguuaauuuugcacuggcuugccuuaugcacguaugacauuccaaaguugauggcucu

SEQ ID NO: 4146573 - RNA, 55 nt, Human
agagcuguuuauugaugucacagagaagaugggacgagccuuauagacagacucu

SEQ ID NO: 4146574 - RNA, 58 nt, Human
agagcuguuuuuccaaacuauugagcauggugacuuagugauuggaaaaacuaguuuu

SEQ ID NO: 4146575 - RNA, 61 nt, Human
agagcuuauaucuuggccauccuggacaugcacuaugauuggacaccuaagauaugagccu

SEQ ID NO: 4146576 - RNA, 106 nt, Human
agagcuuguggccaagaagauggaguugcaggugguuuggccauagagcugaugcuugcuaaauguguuauaucugugauggucauuuuagguuaauaaaagcucu

SEQ ID NO: 4146577 - RNA, 77 nt, Human
agaggaaagaggagagaagagaaauauucacauucuggguuuaaugagaaugaaucuuuugcuuucccagcaacucu

SEQ ID NO: 4146578 - RNA, 80 nt, Human
agaggaauagaccuuuggugccagccauuaacuuggaaacagaaaaggaaggucauugguaccagcuguguguucacuuu

SEQ ID NO: 4146579 - RNA, 72 nt, Human
agaggaaugaguauguuuaugaaaaagcauuagaaaaacagaugccuuuaucaguuucauggcuuugcuucu

SEQ ID NO: 4146580 - RNA, 75 nt, Human
agaggaccacuuggaaagguuuuacaaagcgcuggcugcccagcugcccgggccauuuaccaggcuuguccaucu

SEQ ID NO: 4146581 - RNA, 65 nt, Human
agaggagcugagccacguccuggcggccaugaagaaagcagcugccaggaaggacugagcucccu

SEQ ID NO: 4146582 - RNA, 64 nt, Human
agaggauagcaaaucuguuucagguauauuuggaauuuguuagaucuuguuacagauuuccuuu

SEQ ID NO: 4146583 - RNA, 72 nt, Human
agaggauaucuagacuggauuuucacugcuuuugcaaguaagcuuugcagugagaauucaguagguacuuuu

SEQ ID NO: 4146584 - RNA, 91 nt, Human
agaggaugagaacacagauucugguaucagucauaccuggguagaaaucucagcucugucacuuacuagcugugugaauuauucaaccucu

SEQ ID NO: 4146585 - RNA, 55 nt, Human
agaggaugccuccaaaugagggcagagcagcagcuuuccaacucagaggcccucu

SEQ ID NO: 4146586 - RNA, 68 nt, Human
agaggcaacaacaaucuacccuagcuucuuuuuacaaagaaaagacugggauagauuuuuuugucucu

SEQ ID NO: 4146587 - RNA, 106 nt, Human
agaggcaaccugguuagcucccacauuuggacucaaggaucucagaagagugaagcaccugaagguuucugggaguuucugugggagcugcagaaucuuugcuucu

SEQ ID NO: 4146588 - RNA, 70 nt, Human
agaggcaagggaccuuucugggaucucuuuuacaagcacacuaauuccauucaagaggacucuggccucu

SEQ ID NO: 4146589 - RNA, 59 nt, Human
agaggcacuaagggaagagcagaggaaucuacaccuguguuugguuccagagggccucu

SEQ ID NO: 4146590 - RNA, 61 nt, Human
agaggcacuguggcuuaccaaagcuaaagauguuuuagucagaaagaagccauaugccuuu

SEQ ID NO: 4146591 - RNA, 88 nt, Human
agaggcagacauauguuguaaacauuccaaucgugaggaaucucagaguuuucuuggaauguuaagacaaagcauucucucuuccucu

SEQ ID NO: 4146592 - RNA, 57 nt, Human
agaggcagauuggugcccucuguauagggaugguggagaggucauugggcugguucu

SEQ ID NO: 4146593 - RNA, 79 nt, Human
agaggcaggcugaaguuuaacuugaauucuuucucugcuuuucugagcacagaaaagauaaguuaauucuccuugaacu

SEQ ID NO: 4146594 - RNA, 66 nt, Human
agaggcagguuaucugggauuaaacagcucaggcccccauggcccaggcuggaauuccaggccucu

SEQ ID NO: 4146595 - RNA, 71 nt, Human
agaggcauucuucagcaggggacacuaucugccucauuccagauaguagcacuucugcuaagucuuccucu

SEQ ID NO: 4146596 - RNA, 72 nt, Human
agaggccagguggucaggggcugaggugccccacaaggucguggggguagguaguucugaccagcgccaucu

SEQ ID NO: 4146597 - RNA, 58 nt, Human
agaggccaguggcugugcugucauauccuaagaggcagccacgcagucuugggucucu

SEQ ID NO: 4146598 - RNA, 77 nt, Human
agaggcccagauuagaagcugaauguucauuuuccucuugugucuauuccuuuuguguuugguuugacugggucucu

SEQ ID NO: 4146599 - RNA, 101 nt, Human
agaggccccaagcuaaaggcaucaaucacauuugcccccauauuccaacuuuaguaguugagugugacagugugauucagccgcuuuuguucaaugucucu

SEQ ID NO: 4146600 - RNA, 55 nt, Human
agaggccgggugccugcucagaccuuuccggcaccgcgaggaggcccuggcguuu

SEQ ID NO: 4146601 - RNA, 67 nt, Human
agaggcugccugcauucuuuggcucauggcccccuccuccaucuuugaagccagcagcguagcaucu

SEQ ID NO: 4146602 - RNA, 80 nt, Human
agagggaagcguccuucugcuggucaucccaguggucacagaguacaccaugcuccagcaggacacaccucacgcccucu

SEQ ID NO: 4146603 - RNA, 72 nt, Human
agagggacuccaccugcugcuucuggaucugaagaagaggggacuaugagccaaggagugcagguggcuucu

SEQ ID NO: 4146604 - RNA, 55 nt, Human
agagggaggaaggccagcacucaaaaaacaagagaagcaaugcuuuuuuuccucu

SEQ ID NO: 4146605 - RNA, 66 nt, Human
agagggaggugauacugaacguaacacacuucgaguuuuguguuacauuuggggguaccaccuuuu

SEQ ID NO: 4146606 - RNA, 71 nt, Human
agagggcccaccucccuauccauggaagcugcuacgcccuggauccuggaucagcgggggcaggcaccucu

SEQ ID NO: 4146607 - RNA, 62 nt, Human
agagggcucauucaucugggcuuggcuuugccuuggcugagccagagggagucgggucaccu

SEQ ID NO: 4146608 - RNA, 88 nt, Human
agagggcuguuucuaaauucaguuuauuuugauacuuuaauggcagucaaagccuggaucaaaauggaagaauuuggcugcacuuucu

SEQ ID NO: 4146609 - RNA, 82 nt, Human
agaggggcaaacuggggaggggaggggagacuuguaaacaugagugcaauuuuccucugguuuccccagaaguugcccguuu

SEQ ID NO: 4146610 - RNA, 56 nt, Human
agaggggcucauauccugucauuguacuuaaugcuaauaaggauguuggccccucu

SEQ ID NO: 4146611 - RNA, 72 nt, Human
agagggggaccgagggcuguggcaucacagucgugggcaucuacuggcuggccacacccugguacacccucu

SEQ ID NO: 4146612 - RNA, 92 nt, Human
agagggugacaccgcuccagcugcgggcuguggggaggagauuugcacccugacacccacugccagccgcccggaggcaguucucacccccu

SEQ ID NO: 4146613 - RNA, 71 nt, Human
agacaggcuguuugcauagcauguuugcaucaguaaaauauugaaaaugacauuugugcccaaguccaucu

SEQ ID NO: 4146614 - RNA, 57 nt, Human
agacaggggaaaggugaauuugcucucugagcugaggcacccaucuucuccugcccu

SEQ ID NO: 4146615 - RNA, 65 nt, Human
agacagggucuugaucagagcucacugcaauaucaaacuccuggguucaagugauccuccugucu

SEQ ID NO: 4146616 - RNA, 65 nt, Human
agacagugaagugauaguuugccuaguuugagccuuggucuucuaggccuucuguuuuccuguuu

SEQ ID NO: 4146617 - RNA, 67 nt, Human
agacaguguucacuaagguuagcuuuacuuuugccuaguaaauaauggguuccuagugaaccuguuu

SEQ ID NO: 4146618 - RNA, 93 nt, Human
agacauagauguagauuagcuagaagguugaaagcagggggagaguuagacccccuauucaggccaucgagcuguauauacuuugcuguguuu

SEQ ID NO: 4146619 - RNA, 126 nt, Human
agacaucacuuucugaaucugauuugauucauaauucaacugaucuauuuugauuuugcauuuuagaaaaacagcagaguguagaaggagaaauggaucuuaaaucaaaggguuucagaugaaucu

SEQ ID NO: 4146620 - RNA, 63 nt, Human
agacauggccacaugauaaucaaguagaaugcuuguuaaagugcagauuacaugggcucugcu

SEQ ID NO: 4146621 - RNA, 72 nt, Human
agacaugguguugguguuugugagucgagccugaaaacacuucuccaguuccaaauaccugucaccuugucu

SEQ ID NO: 4146622 - RNA, 72 nt, Human
agacauuaugcuaagugaaagaaaccagacacaaaaggcuauguuuguaugaucccauuuagugaaaugucu

SEQ ID NO: 4146623 - RNA, 61 nt, Human
agacauuuccuagacaucaauggcuaguccaauuguguaagaugauguuugggaaaucucu

SEQ ID NO: 4146624 - RNA, 64 nt, Human
agacauuuccugugaaccuacuacauacaugaaggucaucagaguaggugauaggaaaguuucu

SEQ ID NO: 4146625 - RNA, 69 nt, Human
agacauuucugggccacaagccugugugaugcuuuucagaucaaaacccaggucgugccugcuauguuu

SEQ ID NO: 4146626 - RNA, 96 nt, Human
agaccagaggcuccaauagggccagcuucaugaguguacaaccuguguagacacacagcacacuauucuuagaaggggcccauguuugcuugguuu

SEQ ID NO: 4146627 - RNA, 73 nt, Human
agacccuccucagggauuaaggucaaaggugggaggaagaaggcuuccauuggccuuuuauccuagagguucu

SEQ ID NO: 4146628 - RNA, 61 nt, Human
agacccuuguuccuuguaccuggaugaacuugguuuccggggacaguucccacuggggucu

SEQ ID NO: 4146629 - RNA, 64 nt, Human
agaccgcagagcacuggggagggaugcgccgaucaggugggccaagcccaggcuuugugggucu

SEQ ID NO: 4146630 - RNA, 63 nt, Human
aggacacagcaggagguugggggaaaggaaugaggccacucccugggccuccugcuaugcacu

SEQ ID NO: 4146631 - RNA, 65 nt, Human
aggacacagccugugaacugggggagcccugcuacucaccagccacucucccagcacagcuuccu

SEQ ID NO: 4146632 - RNA, 81 nt, Human
aggacacgucagagcucaugagcagagccaacucaggccuggguuccaauucuggcucugucacugugagcuaugugaccu

SEQ ID NO: 4146633 - RNA, 55 nt, Human
aggacacuuggcuauuguuccaauuuaggacagugguuuuccuccaaguaauccu

SEQ ID NO: 4146634 - RNA, 71 nt, Human
aggacagaccuaggacuggagcucagguuccucugccuccaaagccccgcuccuaaccacugggcuguccu

SEQ ID NO: 4146635 - RNA, 63 nt, Human
aggacagaguggggucucaguaggaaguggccaucagaaggcucuaugcaagacccuaguccu

SEQ ID NO: 4146636 - RNA, 69 nt, Human
aggacagcccaauuucucaguuuaauuccaacucacggggaggauuugaauuguugaaaugauagucuu

SEQ ID NO: 4146637 - RNA, 75 nt, Human
aggacaugagauuugggaggggccauguguggaaugauaugguuaggccuuguguccccacccaaaucucauccu

SEQ ID NO: 4146638 - RNA, 99 nt, Human
aggacauggauuauggccuggauuuaauuaacuguugcucauggcaccaugcaggcugacauuuaauuauauucaguuuagcccuuuauuauauauccu

SEQ ID NO: 4146639 - RNA, 69 nt, Human
aggaccccagagauaccaguuuuaaugacuagguagagauagaaaauaagauuguguguccugugugcu

SEQ ID NO: 4146640 - RNA, 88 nt, Human
aggacuaaaaugaucaggguggggcuggcuaucaaaauuuaaaacuuacauguauuuugguccagcagucccacuuccaggaucuccu

SEQ ID NO: 4146641 - RNA, 95 nt, Human
aggacuaaugggaagagcggguggggagggaagaguuuugcuuuuugugcucugcugccuuuggcuucuccuaccaccucuuaacagcaggaacu

SEQ ID NO: 4146642 - RNA, 92 nt, Human
aggacucaauagguguuauucaacuugugucucuuaauuucuacaacuaaaaguaauggacuaguugaagacacacuaguucuuugggucuu

SEQ ID NO: 4146643 - RNA, 76 nt, Human
aggacucacaggugaaaaaugaccucuuugcaauccuuauugauccaccagcugaggucuuuuuuauguggaaccu

SEQ ID NO: 4146644 - RNA, 59 nt, Human
aggacucaccugaccuuuugcagcuugaauuuccucacuuguaaaacaaggugaauccu

SEQ ID NO: 4146645 - RNA, 65 nt, Human
aggacuccggaaguacucucuccuggauuucauuaaaucuaaugaguuagauaauuuuggagccu

SEQ ID NO: 4146646 - RNA, 70 nt, Human
aggacucgugaccucugugguaccaaggcaccaucugaagagcuggagucagacccaggcucaugguccu

SEQ ID NO: 4146647 - RNA, 74 nt, Human
aggacucuacaagaaaggaaagaaucagaugugugcauaaaauaaucuguuuguuuacaccuuuuugggguccu

SEQ ID NO: 4146648 - RNA, 95 nt, Human
aggacucugugacuucaggagcccugguggguggacagaagcucccugcucccccagccugucuacccagcagcgcuuuggccagucccauuccu

SEQ ID NO: 4146649 - RNA, 65 nt, Human
aggacucuuuacggaucauccccaaagcuacagauuuugagacggggaagacugucaggauuccu

SEQ ID NO: 4146650 - RNA, 70 nt, Human
aggacugacaagggcuguggguuuaagaaguuuacauagguaguggccuuccuggcacccuuguuagccu

SEQ ID NO: 4146651 - RNA, 55 nt, Human
aggacugauauggcccagccucuggcuuuaccugcucuggccccuuaucaguccu

SEQ ID NO: 4146652 - RNA, 103 nt, Human
aggacuuacucagugccuggcacagaguugacccccacuguggacuugcacagcaaccacagaaccucagcuuugagcucagagagcccugauguugaguucu

SEQ ID NO: 4146653 - RNA, 84 nt, Human
aggacuugagauugauuucaaggauguuagagguggugugcugggagaagucuuccuuugcauucuuaaacccuuucaagucuu

SEQ ID NO: 4146654 - RNA, 66 nt, Human
aggacuuuucuccaagccaguccuuccccuguccccccuuguaagggcugucuggauuagaagccu

SEQ ID NO: 4146655 - RNA, 62 nt, Human
aggagaaagacuggacagccaaccucaggaguucacuggguuugaaugaagucuuucugccu

SEQ ID NO: 4146656 - RNA, 60 nt, Human
aggagaagccacacauugggugucuggucaacaucaaauacccauccuugguucacuccu

SEQ ID NO: 4146657 - RNA, 66 nt, Human
aggagaauguggcuacauauggaagaagcuguguuuugaccagauagaugauggucccauucaccu

SEQ ID NO: 4146658 - RNA, 63 nt, Human
aggagacacugagacuucaccauuggccauuaucuggccuugcugguccgcucagaguuuccu

SEQ ID NO: 4146659 - RNA, 57 nt, Human
aggagacucagagaccuggccgaauccugccugcaggacaggccaacugagucaccu

SEQ ID NO: 4146660 - RNA, 121 nt, Human
aggagacugagaggaggaaguugaguagcuucucugaggucacaugaggagugagagagagccccagucauaaugaccccagaguccgcauucuuuacugccgccuugcuuucaguguccu

SEQ ID NO: 4146661 - RNA, 57 nt, Human
aggagacuggacaagaauaugguucugagaagggugcuaguucuuguccugucuguu

SEQ ID NO: 4146662 - RNA, 66 nt, Human
aggagacuugauucauuuugugucuggaacagucagugcaauguuacaaacugaaaugaguuuccu

SEQ ID NO: 4146663 - RNA, 55 nt, Human
aggagagugggggaaacagaugagugguuuagucacauguuugcuacauuuuucu

SEQ ID NO: 4146664 - RNA, 96 nt, Human
aggagaugggauuucaguggguaggaaaggcucuucccuaggaaaaaaaggaaggggagagccaaaucuuccugcucuaggaagccucaaacuccu

SEQ ID NO: 4146665 - RNA, 104 nt, Human
aggagcaaauugauaaagaugccugggucaguggcaagcugggugguuccuaauuuauaaaaacaccucgaguuccauuacucagccccuucuuuucugcuccu

SEQ ID NO: 4146666 - RNA, 62 nt, Human
aggagcaacccaggguuccuuugaauucuuugacaaaggucuuauggccuugggcugcucuu

SEQ ID NO: 4146667 - RNA, 62 nt, Human
aggagcaccaugacucaguccucagaagaagugaucugugaggugguuacuguggugcucuu

SEQ ID NO: 4146668 - RNA, 88 nt, Human
aggagcagaagauguuaagaaggaauugaaguuuaggccauacggggaggugcucaucuguuuuaacuguauuugucuucuggccccu

SEQ ID NO: 4146669 - RNA, 57 nt, Human
aggagcaguuguugagcaagccaccaccaccgaggugaaugagcucugacugcuucu

SEQ ID NO: 4146670 - RNA, 76 nt, Human
aggagccaaucaaaagcuuaccuuuucagucuuuguuauuguucaaggaugauugguaaugacacuaucuucuccu

SEQ ID NO: 4146671 - RNA, 73 nt, Human
aggagccccguccuggggaaucuugcaggggaaggcauggaaccuggccugcagcucucagggaaggguuccu

SEQ ID NO: 4146672 - RNA, 58 nt, Human
aggagccguacuuccugugacuuuaagcaacugagagcaccaggaacagugugguccu

SEQ ID NO: 4146673 - RNA, 59 nt, Human
aggagccuccuucucaugugcagcuacaaauagcaugucuagcagauugggggcugccu

SEQ ID NO: 4146674 - RNA, 88 nt, Human
aggagcucagaggugaggagcauucaggacaagccucccagagaggccuggcugucguuuugugaaauuuccucuauuucuuccuccu

SEQ ID NO: 4146675 - RNA, 60 nt, Human
aggagcucuucaguauuggaaaagggaacaacaccuuuccucuucauccuggaagcugcu

SEQ ID NO: 4146676 - RNA, 61 nt, Human
aggagcugaagaauagcaggugggcacacugauggguucuccuguuguuuuucuuucuccu

SEQ ID NO: 4146677 - RNA, 60 nt, Human
aggagcugauagucuauggagaaugagaguaaacaccuuccaaaggcugugauuaguccu

SEQ ID NO: 4146678 - RNA, 94 nt, Human
aggagcuucccaguccuuugagccaguucugaguauuccccaagccccaccuaccccgcccagggaucccagaaugggaaggacugcaguucuu

SEQ ID NO: 4146679 - RNA, 109 nt, Human
aggaggaagggaaaagaggcggggggaaguauuuguuuuugcauccaucaaagaaagcaauguuuuuggaugcugcauugaaugcuugcucccuuacuuccagccaccu

SEQ ID NO: 4146680 - RNA, 55 nt, Human
aggaggagcagcuuuuugucuccauagaggauggaauaaaaaguaucuuauuccu

SEQ ID NO: 4146681 - RNA, 68 nt, Human
aggaggcacugggugagggucacuggcuccaggugggugggguguccaggccucugccucgugccccu

SEQ ID NO: 4146682 - RNA, 87 nt, Human
aggaggcacugugggagcauuuuugucugcauuuuagcaaauaugcuugauugccagaggugcucacguugugguuuuucccuuccu

SEQ ID NO: 4146683 - RNA, 61 nt, Human
aggaggccaagggcaaagcggagagugccggagagcccucauuccuguucccucgccaccu

SEQ ID NO: 4146684 - RNA, 56 nt, Human
aggaggccuuugcacccggauuccgugguuggauucagggaggaaaggggccuccu

SEQ ID NO: 4146685 - RNA, 69 nt, Human
aggaggcugguucaggccauauuccaaauccucaucugugugugaguggcauucuuagccuagccuccu

SEQ ID NO: 4146686 - RNA, 74 nt, Human
aggagggcaggcuggcugccuaaaaauaggaggagacuggguuuuuggggagggcagcuuaagcuuguuuuucu

SEQ ID NO: 4146687 - RNA, 73 nt, Human
aggagggcuaggaaaaccaggaugggaaucagaaagaagcguccuccuggccaaggacguuuccugccuucuu

SEQ ID NO: 4146688 - RNA, 68 nt, Human
aggaggggaaggaugugacguggcugacauguuguacguguacucaguacuugcauccucuccuuccu

SEQ ID NO: 4146689 - RNA, 63 nt, Human
aggaggggcagccugagagcgacaacguggaguucccaugucucagguacaugcguccugccu

SEQ ID NO: 4146690 - RNA, 63 nt, Human
aggagggugcaguaggggagaauugaauacagaaugugggaggucacuuugcugaacucuucu

SEQ ID NO: 4146691 - RNA, 112 nt, Human
aggaggguggucuugguuggaaccgcccagcccacucuugcuuauaacuugggucagcaagaagcugugggcuuccagggguggaauccuagaggagaccuccuacaggccu

SEQ ID NO: 4146692 - RNA, 94 nt, Human
aggagguaguucuguuuuugcaaauuccaauccaauauuuaugacagucaaagaugagugagucaaaggguagguuguagaggaacugcuuccu

SEQ ID NO: 4146693 - RNA, 65 nt, Human
aggaggugaacucuggggccacccucccagcucugugcugagagcccacagcucguuccucuccu

SEQ ID NO: 4146694 - RNA, 105 nt, Human
aggaguaauuucuuuagcugaaauguaagcauagagguuggggucugugugcuaaccuguguuguguuugcaguuguaauuuagauucgagaagugguuuauccu

SEQ ID NO: 4146695 - RNA, 94 nt, Human
aggaguacgacgcugugguagcuaugaucaugccacugcacuccagccugggugacagagcaagaucuagauaauuacagucuguccugcuccu

SEQ ID NO: 4146696 - RNA, 58 nt, Human
aggagucuguugaaaugucuauuaucuugugguauaucagcacauuaaacauacuccu

SEQ ID NO: 4146697 - RNA, 60 nt, Human
aggagugaggaugucauggaccucacagaaggugacagugaggccucagccucagcuccu

SEQ ID NO: 4146698 - RNA, 61 nt, Human
agaggcagcugaagcccaggcagaacccaaagaugguuccccagaggcuccagcuuccccu

SEQ ID NO: 4146699 - RNA, 68 nt, Human
agaggcagcuuuguucugccaauggcccauaucucaagcagauacuccagaacagaauaaauuucucu

SEQ ID NO: 4146700 - RNA, 78 nt, Human
agaggcauccaacagacaacuccuguggcucacccaggucaggguggguacauuucaggcugucuuguagcugcuucu

SEQ ID NO: 4146701 - RNA, 63 nt, Human
agaggcaugggucugucccuucggauuaagaaucuuuaaccuggggccugaagaccaucuucu

SEQ ID NO: 4146702 - RNA, 88 nt, Human
agaggcauuuuauaggcauucuugaucccauuucugugaguaacaugcacucauaaaauagauucuaggaugucuuaucucugcuccu

SEQ ID NO: 4146703 - RNA, 94 nt, Human
agaggccagggcgggaaggggaggaggaggaaguggaacccagcucccaacccugccccgcuggcccucaccuuccucccucaccgcugccucu

SEQ ID NO: 4146704 - RNA, 64 nt, Human
agaggcccuuucugaaacugcgcauuugaaauauaagcucuggcuuccaaaggaaugggccuuu

SEQ ID NO: 4146705 - RNA, 84 nt, Human
agauccuugugagggugucuucaggagaauuggggcacaaaaaucgacagaaacccccuucucucugaagaccccaaacuaucu

SEQ ID NO: 4146706 - RNA, 78 nt, Human
agaucuagucucagcuuaucaaucgcagcccaggauccauaagauuuaaacaagcuggacugauaagucuugcugucu

SEQ ID NO: 4146707 - RNA, 92 nt, Human
agaucugagaggcugauaaguugcauguugagaaauucagaccccauguccucucucggguuucacacugcagcaucagagagcuugaaucu

SEQ ID NO: 4146708 - RNA, 81 nt, Human
agaucugcuccuaccagaggcaggacuucugcagcaggugacuguggcugcaggaguuccccucugccuggccaaagguuu

SEQ ID NO: 4146709 - RNA, 57 nt, Human
agaucugguuggaguccugacaugcuacuuacuugcuguuugaccuuggccaaaucu

SEQ ID NO: 4146710 - RNA, 87 nt, Human
agaucuuggccucucucgauacagugccaacucuccagcacauggcuccuuucuggguggcacugauaaugagacgugucaaauucu

SEQ ID NO: 4146711 - RNA, 90 nt, Human
agaucuuuuccacccuuugcugcucuuccucccccugugccagacuucagggaaccggaggucacaaggugaguaaaggagaaagugucu

SEQ ID NO: 4146712 - RNA, 64 nt, Human
agaugaaaauacgugacuuuaaauguuuguuuauaaaaauguuugaagggauuaauuuuuaucu

SEQ ID NO: 4146713 - RNA, 76 nt, Human
agaugaaaauuccugggacucuuuaucagagauuaugguauagcauuucuuuguuggaguccaaggauauuuauuu

SEQ ID NO: 4146714 - RNA, 78 nt, Human
agaugaaaucaaaugagguuaauacagugcuucuguaacucuauuugaggcauauguauuugcauucguuuguucacu

SEQ ID NO: 4146715 - RNA, 64 nt, Human
agaugaauguuacaggaccuaagaugaaaaaaauuugcuggauggaucugugacaguuuagucu

SEQ ID NO: 4146716 - RNA, 94 nt, Human
agaugacuggaaauugugcaaaggagggucuuguugauuguaucucuguuaugcuaucuaacugggcuauuuuauugggcaaugcuucauaucu

SEQ ID NO: 4146717 - RNA, 63 nt, Human
agaugagugagagcaucaacuucucugacaaccuaggccaguaaguagugcuugugcucaucu

SEQ ID NO: 4146718 - RNA, 58 nt, Human
agaugaguguguguguguguguguguguguguguauauguguguauauauagucauuu

SEQ ID NO: 4146719 - RNA, 83 nt, Human
agaugcagagagagccccaggggaggugcccugcagucccgaacucgacugacauccuacaccccugggucuccccagugucu

SEQ ID NO: 4146720 - RNA, 83 nt, Human
agaugcugauaugauauuuaagcugaucauuucugauugguagggccaacaauugaacagaugaguuaaauaccucagaaucu

SEQ ID NO: 4146721 - RNA, 95 nt, Human
agaugcugcuuuaaguuguuuugagaugugguucaaggguguuuguugaucaaacaccaagagcuagcuauuaccaagaauaauaacuagcauuu

SEQ ID NO: 4146722 - RNA, 57 nt, Human
agaugcuggggccccucggauggccuggcagcuccccccagcggugcccuagccucu

SEQ ID NO: 4146723 - RNA, 58 nt, Human
agaugcuuguuccaucuuaacccagagacuggagaaauaggcagaggagcagguaucu

SEQ ID NO: 4146724 - RNA, 85 nt, Human
agauggaaccaaagcauugugaacauuuuuauuaaaacagcaaaugaagcuaugaaagaagugucacauugccaaguauucaucu

SEQ ID NO: 4146725 - RNA, 92 nt, Human
agauggaagcuggcaucucucagaggucuucagccucuggaaacaggcccaggggacugaccgacccucagcauuugauguuggcaacaucu

SEQ ID NO: 4146726 - RNA, 82 nt, Human
agauggaauuuaaaaagcaugugguucgagucaucauugggaaaacaugacaaagauuauggaacacacaugaauuccaacu

SEQ ID NO: 4146727 - RNA, 57 nt, Human
agauggagauguuuugaaguugcuuauaaauaugcagguaaaggaacauuucuguuu

SEQ ID NO: 4146728 - RNA, 70 nt, Human
agauggcagugaauaaauuuugacuugacuuaaggacuugaauuucccuugcauuuauagacugccauuu

SEQ ID NO: 4146729 - RNA, 61 nt, Human
agauggccaaauaacagcuugcaugcugugucaggcaugccccuuuguaguguggccuucu

SEQ ID NO: 4146730 - RNA, 63 nt, Human
agauggccccagcuggugugcucuggaauccuuggcgccaaggccaugcugccaggggcuucu

SEQ ID NO: 4146731 - RNA, 56 nt, Human
agauggccccaggugcccagggccacgccuccucccucugcuccugcugcccaucu

SEQ ID NO: 4146732 - RNA, 56 nt, Human
agauggcugucuucucccuguguucucaccuggcacagaggaugaggcagcucucu

SEQ ID NO: 4146733 - RNA, 57 nt, Human
agauggggcugaaaguuccaauccucuaaucacaugaucggcaaccagcccccaucu

SEQ ID NO: 4146734 - RNA, 114 nt, Human
agaugguggucaaaaauauggccggaugagcagacugggagucaggaagaaguguuugcaaugacuucugacuucucucuuguuuacuucuccuuucacuuuuaaccccccuuu

SEQ ID NO: 4146735 - RNA, 78 nt, Human
agauguaaauucuccuggccaggaugaccuaacaggaugaccuguucucccugaugcccaggaagaaaugacuugucu

SEQ ID NO: 4146736 - RNA, 55 nt, Human
agauguaguagugggucuuuuaugaaaauauaaauaaugaucuacaacuauuucu

SEQ ID NO: 4146737 - RNA, 84 nt, Human
agauguauuccaccuggcccagguggucguugaggcuggugcugcgggccuuggcaggcacguccugcggcuuguaguacaucu

SEQ ID NO: 4146738 - RNA, 65 nt, Human
agauguccugugugccuccugugaucaggcccuggcauggcaggaaggacaugcacugaauaucu

SEQ ID NO: 4146739 - RNA, 61 nt, Human
agaugugaauucugacuucagguuuuaugaaguacauagcuugucuagugaauucauaucu

SEQ ID NO: 4146740 - RNA, 108 nt, Human
agaugugauuuuucucuauuuuucuuggcuaguguuuugggguuuauauuuggcauaaucuaaucugauauuagccaaaaagaguacugaagagagagacuuugcacu

SEQ ID NO: 4146741 - RNA, 118 nt, Human
agaugugcuugguuaccauuuuuuuauaagcucauauugcccucuuuauauuaaggagccaaggaaaacaguauuuguguuuacuuccugaaaaauggcaggaaaucaagguacaucu

SEQ ID NO: 4146742 - RNA, 107 nt, Human
agaugugggugcaugaacuuuggcugcauuuuggguucguuaacagagcaaagaauuugccagugaagccccgaugcguuuugccccaaguaccuugcccuucauuu

SEQ ID NO: 4146743 - RNA, 86 nt, Human
agaugugguuacagaauaaguaauuguaaaaugaaugagugaacaauuuuuuucccaaaggcaauugccuguucuuacuaccaucu

SEQ ID NO: 4146744 - RNA, 79 nt, Human
agauguuaucagggagcuggaguuggaguacuugcauuuuguguuugugccagcuguccauguuccucuucauauauuu

SEQ ID NO: 4146745 - RNA, 62 nt, Human
agauguugauucuuacucucaauagcuguccuaagaaguuaauggguugaacaucaaggucu

SEQ ID NO: 4146746 - RNA, 62 nt, Human
agauguuuuuccaggucuaauuauaagagucauaaggcuggaaagauuuggagaaaacaucu

SEQ ID NO: 4146747 - RNA, 85 nt, Human
agauuaacaaaaaucggcuucuguccuuauggaguucagacuuucacuguguguacuugaaagggcagguccuuugcauuagucu

SEQ ID NO: 4146748 - RNA, 61 nt, Human
agauuaaugagcuuugaguggguaaaacagcacaugcccauuauucagccauuaaauuucu

SEQ ID NO: 4146749 - RNA, 69 nt, Human
agauuagaaguaacuucuguuugugguuuugcucacuuaaagcugcagauaggauguuauuucaauucu

SEQ ID NO: 4146750 - RNA, 79 nt, Human
agauuagagugagagauaaggucagagacauaaagggcauuauaggccauugucagggcuuuggcuuuuacucuugucu

SEQ ID NO: 4146751 - RNA, 114 nt, Human
agauuagugaacauauauuugcccccucuacuacugcaggagcuucuuguuugccaggacagggcuauauuccucagagcugaggaggaguugaaucauguggucauuuauucu

SEQ ID NO: 4146752 - RNA, 58 nt, Human
agauuauuuuuaacaauuauugugaauuuggacucucaguauguguuagggauaauuu

SEQ ID NO: 4146753 - RNA, 71 nt, Human
agauucauuguggauauuuucugacccaggcuauugaauugcaggauuucaaaguaucacacaacgagucu

SEQ ID NO: 4146754 - RNA, 67 nt, Human
agauucuaaaugagauguacauaacucacugaaagcgccaguggguauguugauuucauuuaugucu

SEQ ID NO: 4146755 - RNA, 82 nt, Human
agauugaaguccaagucuaaacacauauuuaaaacguuuuguacugucuguucuaaauaugcugauuaggugacuuugaucu

SEQ ID NO: 4146756 - RNA, 72 nt, Human
agauugagaaaucggaugguugccgugucuguguagaaagaaguagacaugggagacuuuucauuuuguucu

SEQ ID NO: 4146757 - RNA, 61 nt, Human
agcaggacagggcagguaccgugcuaaaaacccaccucgguccugcugcuccugucguguu

SEQ ID NO: 4146758 - RNA, 76 nt, Human
agcaggcgggagauuuauuauuuuggggugauuaaaccgaagcuuccaacaccucagugaguguuuccuucuugcu

SEQ ID NO: 4146759 - RNA, 58 nt, Human
agcaggcugaugggcaugcuugcaucaacagaacaugggaggcaugauauuagcuguu

SEQ ID NO: 4146760 - RNA, 55 nt, Human
agcagggcagcugaugcgcacgucgagacccgugagaagcgugagaagcucugcu

SEQ ID NO: 4146761 - RNA, 71 nt, Human
agcagggcuggugcugagcagguaggaugggcccucacucccucuucagccucaucucagcccgugcugcu

SEQ ID NO: 4146762 - RNA, 95 nt, Human
agcaggggauggguagagguggcagcugcugcuacugcaggugcuuccccucacaccacagaugcaggucugcucaccugaccucucacccugcu

SEQ ID NO: 4146763 - RNA, 59 nt, Human
agcaggggcagggcuggggaugcaagaaagcaggcugggucccaggcugggcuccagcu

SEQ ID NO: 4146764 - RNA, 57 nt, Human
agcaggguugguuucuccucaggccccucuuccuggcuugcaaacuaccaccuugcu

SEQ ID NO: 4146765 - RNA, 77 nt, Human
agcagguguagagucggcaccuggccagaggagaggauagggguugcuuccucgaggccagcguggucugcacugcu

SEQ ID NO: 4146766 - RNA, 73 nt, Human
agcagguuagcuuuguuuaucaaggggcaauccuccugagcuuugucuccagaaagaaaaagcaaugccuacu

SEQ ID NO: 4146767 - RNA, 95 nt, Human
agcaguaaggagcaucggcugagucugaggggagagcugggugcuccuugcaccucccuggcccuggcaggucucuuugcugaucuugugcugcu

SEQ ID NO: 4146768 - RNA, 128 nt, Human
agcaguacucaaggaguuagaaauuggaucauuaagaauagcuacuaaacuauauucucaagguaaauuuuaaugugaucuaguagcugauuuuaaugagcccauucuuuguucuuugcuuaccuguu

SEQ ID NO: 4146769 - RNA, 72 nt, Human
agcaguccguccugucaagcagcugagggccagagcuggagggcugcaguggcugguuagggacaggacgcu

SEQ ID NO: 4146770 - RNA, 55 nt, Human
agcagugggauauugaaguauauggaacuauagucuauguaugaggucuucugcu

SEQ ID NO: 4146771 - RNA, 59 nt, Human
agcagugggugacagagcugagaauugaacccuauuuuuaucccuccagagccacugcu

SEQ ID NO: 4146772 - RNA, 55 nt, Human
agcaguguucuaaucuggcuaguggagaaggcugcaggacuacucgagcacugcu

SEQ ID NO: 4146773 - RNA, 59 nt, Human
agcauacaggucugaaacagcuacuguacaauagacagaaagcuccaggccuggaugcu

SEQ ID NO: 4146774 - RNA, 59 nt, Human
agcauagaaaagauucccagaguccugcucuguggaaaggaaagucuugauauuaugcu

SEQ ID NO: 4146775 - RNA, 90 nt, Human
agcauagggcagcaggaggaggagagugggccucugagucccagccccaggucugaucucagccccgcgccucagaagcugcucaguguu

SEQ ID NO: 4146776 - RNA, 88 nt, Human
agcauauacaaugcucuaaagauugcucaaaacugugaccugaauuuuaggauucuguuuuauaguggccaaucucaguuguauugcu

SEQ ID NO: 4146777 - RNA, 75 nt, Human
agcauaucacauuuggagauuuaugaauguuauaccauccuugcauuccugagauaaaucucaugugaccaugcu

SEQ ID NO: 4146778 - RNA, 58 nt, Human
agcauauuauggccuauugcuggaaauuacaaguaccagcauuagaguacuauaugcu

SEQ ID NO: 4146779 - RNA, 77 nt, Human
agcaucaccuacaggauuaauaaaaaauuguaucauaauauugaugauguuuuuagaaguccacaaaggagauugcu

SEQ ID NO: 4146780 - RNA, 58 nt, Human
aggaaucagaauucuuagaauugcucauagguaaauaacugggaguauugacuuuccu

SEQ ID NO: 4146781 - RNA, 69 nt, Human
aggaaugcagauuccuaggccacacccccagauauaaaucuggaacaaagcuuaggaauuugcaauuuu

SEQ ID NO: 4146782 - RNA, 74 nt, Human
aggaaugggagacuauguucagcaggcaugacagcauuuucuaaauguuauuacuguuggcaaagucuuaucuu

SEQ ID NO: 4146783 - RNA, 71 nt, Human
aggaaugggaggaggggagcugagagcuggggacaaggaacuucucagaguuccucuggagucccaauccu

SEQ ID NO: 4146784 - RNA, 56 nt, Human
aggaauuauuugucuuagucuuccuucuaaaccaaggaggaguagaaauagauccu

SEQ ID NO: 4146785 - RNA, 74 nt, Human
aggaauugucugccuuuaucaucuccuuagguuguuccaguuuuuaaaggauaguguaaacgcucuugauuccu

SEQ ID NO: 4146786 - RNA, 62 nt, Human
aggaauuuaagggcucagagagauggagugacuuugcuucagucuuuuaacuuuaaguuccu

SEQ ID NO: 4146787 - RNA, 80 nt, Human
aggacaacgggguacccagccccuggagaggccucggcuggcuaucucauucuccaggggcugcugugccaccuugcccu

SEQ ID NO: 4146788 - RNA, 58 nt, Human
aggacaagcuaaaggacuuccuuccccaaggcuaugaagguaguaaauguuugcuccu

SEQ ID NO: 4146789 - RNA, 89 nt, Human
aggacacacaguuggcagcaaaaccagaaucagaacccaggucuuuccaggccucucuguugcuguuuuguguuuguauguuugcuucu

SEQ ID NO: 4146790 - RNA, 57 nt, Human
aggacacaguuacuuauuuugccugcuugaagguaaccauucagagauugcugucuu

SEQ ID NO: 4146791 - RNA, 94 nt, Human
aggacagaacugucucuguuaacuuccagggcuaaggcaauguauagccuucaggauuuaggaagaugaacauaccagagauagcuugaaucuu

SEQ ID NO: 4146792 - RNA, 69 nt, Human
aggacagaaggcugugguucuauacagaagacaagaacacugcuuugguauugcacacugucuucuccu

SEQ ID NO: 4146793 - RNA, 76 nt, Human
aggacagauaaagcaaggaugacugaagacccuaaaacuccccaaaggaagcuuuaaucaaaauuuuugccugccu

SEQ ID NO: 4146794 - RNA, 55 nt, Human
aggacagcaguuggugagguucuuauaauuggucccugaccauucagcuugucuu

SEQ ID NO: 4146795 - RNA, 65 nt, Human
aggacaggaugaaauuauggagcguuauauuugaugagagccgaauggaugauuacaucuuuccu

SEQ ID NO: 4146796 - RNA, 83 nt, Human
aggacagugccuaacauauguaaaggucuuugaguucuucaggaauaaauggcacuuuauaaauguuaaacuacaaguuuccu

SEQ ID NO: 4146797 - RNA, 102 nt, Human
aggacaugaaagauggccaggcuggcuggagcucaggcccagcaaggcccccugggggccauggucaugggugagcuuggguuuggcuucuguuuucgucuu

SEQ ID NO: 4146798 - RNA, 92 nt, Human
aggacaugcuucgagaugugaaccauucugucuaagcuggcuacguuuuccuugaaugcacggggugauaugaauggucucagcagugucuu

SEQ ID NO: 4146799 - RNA, 55 nt, Human
aggaccagccuccaggucucuuuuccccagagaauaaagacugcagguuuguccu

SEQ ID NO: 4146800 - RNA, 104 nt, Human
aggacccguccgcggcgugaaggcugcugggaagugugguccaagcgcggauuagggccugcucggagucccaggagccccucuugcagcugccggaucggccu

SEQ ID NO: 4146801 - RNA, 129 nt, Human
aggacccucaaagcuauauaaggagauaagcuuucacaguguaauauauuuuucuuucauauaauuacauuugugagcugacagagagguaaguuaugaaggguuuguugcucuaugcuuagggggcuu

SEQ ID NO: 4146802 - RNA, 59 nt, Human
aggaccgcucucugagaaacaaggaccuagagguccaggucaucuuggagagcuguucu

SEQ ID NO: 4146803 - RNA, 56 nt, Human
aggaccucgcauuuacuaagcuccugguaugagcuaagaacugugccaggugaccu

SEQ ID NO: 4146804 - RNA, 80 nt, Human
aggaccuugcuagugaagaauugggcaggggcaggcaaggcuguugagaagcucugccaccaccuacacuaguauguccu

SEQ ID NO: 4146805 - RNA, 55 nt, Human
aggaccuuuggcaaggcugcucugacaaagagaaaucuaagaugcucaaggaccu

SEQ ID NO: 4146806 - RNA, 128 nt, Human
aggacggugaggacccuggagugcaacauuuaaggaggcacucgcucucaggguccuguaagugcaggguccgcaccugugagugagcgccuccuuaaaucuugcaccaacagccucacccuaguccu

SEQ ID NO: 4146807 - RNA, 61 nt, Human
aggacuaggggaugggccauauuugcaagaugagaaaugcagaggucuaagauucuagcuu

SEQ ID NO: 4146808 - RNA, 72 nt, Human
aggacucuguggucuguuuaauggguaagcauggggagcaccaguacaaaugaaaauagaccacuggguccu

SEQ ID NO: 4146809 - RNA, 95 nt, Human
aggacugccuagcuuuaugaggagaccuuaguauccaucagagaaaucuauguucacucugcuagguuucugccaugagguuguggaaaugucuu

SEQ ID NO: 4146810 - RNA, 61 nt, Human
aggacuggcuucuccagaaaucuugguggccacugaacaccgaacaggaggagccacuccu

SEQ ID NO: 4146811 - RNA, 76 nt, Human
aggacuuaaagauuaacucucagaaaagaggagcaaaagccagacgucucuuuuggugagguuaaaauuuuuuccu

SEQ ID NO: 4146812 - RNA, 57 nt, Human
aggacuucccuggcucccagcugacucuagugguccccggagaagcccaggaauccu

SEQ ID NO: 4146813 - RNA, 65 nt, Human
aggacuucuuaacuguauauacuaugagauggugaaacacauuucugggcaaguuauagaauccu

SEQ ID NO: 4146814 - RNA, 63 nt, Human
aggacuuuucugacauauccagucucagugaaaggccacugucacugugauguuagagauccu

SEQ ID NO: 4146815 - RNA, 65 nt, Human
aggagaaaauggaagacagauaaggcagaaaauaugcuuuacaacuuucuguucuguauucuguu

SEQ ID NO: 4146816 - RNA, 79 nt, Human
aggagaaacuguaaagcaggugaguagaacagacagcaucaauccaggucuacauuucuccuuuuuacauuuuuuaccu

SEQ ID NO: 4146817 - RNA, 80 nt, Human
aggagaaagaaaagagcaugcauuaaucaguuucucugcaacagacacuaauuaagcugcuuuacuuacaguuaucuccu

SEQ ID NO: 4146818 - RNA, 78 nt, Human
aggagaaagaguuucugauacuggaaucgaugccacugaucagugccaucugauaccaaaucaaugccacuguuuccu

SEQ ID NO: 4146819 - RNA, 72 nt, Human
aggagaacaauuucacaucuaucucagauuuguuuugcggauaaaaugagauacaguuugaaaguagcuccu

SEQ ID NO: 4146820 - RNA, 88 nt, Human
aggagaagcuguuuccuucuuuuagauuuccacucuuuuauucugcugagagagggcauagaaaaagggaaaaaaaggaauuucuccu

SEQ ID NO: 4146821 - RNA, 87 nt, Human
aggagaauuuguguuuuuauaaccaaguucugcuuguuacauuuuaagagugacaagcagguuuuguuguggauuagcaggacuccu

SEQ ID NO: 4146822 - RNA, 56 nt, Human
aggagacacaucacacuagcaucugagcaaaagcaggagcugggauguggacucuu

SEQ ID NO: 4146823 - RNA, 83 nt, Human
aggagaccauccauagauugagagaugguguuugcaagauauuuacagauaagacuauauccagacuauggaaggaucuuccu

SEQ ID NO: 4146824 - RNA, 79 nt, Human
aggagagcaauuuuuuccaugcucuuacagaugagacaagucccuuggaaacugagaaggcaugggaugauugacuucu

SEQ ID NO: 4146825 - RNA, 81 nt, Human
aggagagcagcugugacauggacagugauugauuaccugucauuuauugcaauuucugaucucugaguacagcagcuuccu

SEQ ID NO: 4146826 - RNA, 55 nt, Human
aggagagcgucagguagggaacaaugaacacuguccccaccuacacacugcuccu

SEQ ID NO: 4146827 - RNA, 76 nt, Human
aggagagggccuagaagcuccauaugcaggacccucccagauauugcccuguaugugucuuuaucuggcucuuccu

SEQ ID NO: 4146828 - RNA, 77 nt, Human
aggagaguggcagguuagggaguagaaucagcugcuauuuaaagagacaguauuuccucuucuuaacuuacuuuccu

SEQ ID NO: 4146829 - RNA, 62 nt, Human
aggagaguuggcugauaaggcauuuguaggauauaccaggccaaauucagucagcagcuccu

SEQ ID NO: 4146830 - RNA, 101 nt, Human
aggagaugagaggggggacauucauuuaggccaggcucccagccucgggccuccaggccaagccugccuggcaguguaauuccugucaaguuuuaucuuuu

SEQ ID NO: 4146831 - RNA, 96 nt, Human
aggagaugcaagagugagaauuuuacaaaauaccuccgauguuccuauuucauaagcauuuggguuuagauuugcugagauucgucuugcaaaccu

SEQ ID NO: 4146832 - RNA, 62 nt, Human
aggagauguauuuguuucuugagauaauuuugagauuauucagagaaugguaugcuuuuccu

SEQ ID NO: 4146833 - RNA, 65 nt, Human
aggagaugugugcuacaggugugggaagacugaaaagguuuuuuaaaauuagcacugcauuuacu

SEQ ID NO: 4146834 - RNA, 64 nt, Human
aggagauuugaguuguaguuccacuucugccacuaacuucugugggaucugaggcaagucuccu

SEQ ID NO: 4146835 - RNA, 78 nt, Human
aggagcaaugagguagaacaggaauugaauuauuucuaauugggaaggaauugcacauuucaguguucuguugcucuu

SEQ ID NO: 4146836 - RNA, 111 nt, Human
aggagcacaaaaguuagauuucacuucagagaagugcauucaguauucauaggccuucuggaggagcaaggcugugagaagaaugauauuaggugaaaaauauuggcuccu

SEQ ID NO: 4146837 - RNA, 59 nt, Human
aggagcagggcagugaauucuggcacuugucagugccagggcuaaauuauucugcuccu

SEQ ID NO: 4146838 - RNA, 56 nt, Human
aggagccguaggggauucacaugcuuacagacaggugaagguagacugggcuuccu

SEQ ID NO: 4146839 - RNA, 58 nt, Human
aggagccuauuauuagcauggcaucuucauuuguggcugcuucuagaauuaggcucuu

SEQ ID NO: 4146840 - RNA, 129 nt, Human
aggagccuccccagcccaccagagagccucgggucccaggcaggccacuggcaggccacugacagucccugggcuuugccugugaguuaagccgggaguugaguaauugcuggcuggguucuggcuccu

SEQ ID NO: 4146841 - RNA, 62 nt, Human
aggagcgaguggcgggggcucaccgggcgccaggugcuugcuccuaggacgccgcugcuccu

SEQ ID NO: 4146842 - RNA, 130 nt, Human
aggagcuaauauuuagagcuuugcaaauucgucacuguuaaacaccuauguuuaaaaauacaugaagcccuaaauguuuugacagugcugcuaaaaugcaaaguaaaauuccaugucucauauuguuucu

SEQ ID NO: 4146843 - RNA, 83 nt, Human
aggagcuccccugggcccuucagcuuccucugcagccucagguaugagaggaggaggaggaggcccccugggcagugacuccu

SEQ ID NO: 4146844 - RNA, 58 nt, Human
aggagcucucccaugcugcagauaccguucugaaucucugcaguuugucaagguuccu

SEQ ID NO: 4146845 - RNA, 82 nt, Human
agggcacagcuauuagauuggacuuccgcacaaugucuaguacagacuugcucaaugcuugaagccaauaauuaaugacccu

SEQ ID NO: 4146846 - RNA, 111 nt, Human
agggcacuuagcaccuugcagaaauaagaggcuuuauaacuauuuguuccauaauagaugguuggcugaauaaaugaauagagcuguuuucuccaaagcccaagaugcucu

SEQ ID NO: 4146847 - RNA, 56 nt, Human
agggcagcaaaucugagucugguaggguggacucuuaccagguuuuguagugcccu

SEQ ID NO: 4146848 - RNA, 73 nt, Human
agggcagcacuggggcugaugcguucgugugacucccaggucagcaugcgcuugaucagcuccaccaugcucu

SEQ ID NO: 4146849 - RNA, 56 nt, Human
agggcaguuaugaaugucuccaaaacuauuucagggguaauucaugaacauguccu

SEQ ID NO: 4146850 - RNA, 60 nt, Human
agggcauggggcccucugacuuauguauuccuuuacuuggagacucaguuucuaugcucu

SEQ ID NO: 4146851 - RNA, 61 nt, Human
agggccagaggcaccuugcagcaggcgaaacuugucagcccagcaggguccuucugguccu

SEQ ID NO: 4146852 - RNA, 64 nt, Human
agggccagaguauguuuagcuuugcgggccacagauggccucuguugcauaugcugcugggucu

SEQ ID NO: 4146853 - RNA, 65 nt, Human
agggccccuggagaaaagaaccaugaggaagcaugcucucagaauucuccacgcucagggucccu

SEQ ID NO: 4146854 - RNA, 57 nt, Human
aggaagagcuuacuuguuguuccaaggccuaauuggagaucuagguuggcauuuccu

SEQ ID NO: 4146855 - RNA, 59 nt, Human
aggaagaggguggcagauaaucacaagcaagugcuggcugaauauuuuagccucuuccu

SEQ ID NO: 4146856 - RNA, 129 nt, Human
aggaagcauuugucaugaguagcacuggugacucaaacuuauuuuuuagcccugccagccaagagcaacaggaaugaacucgagugaucugauuuauuagugaaaaaaaaccaacuacaaacuuuuccu

SEQ ID NO: 4146857 - RNA, 62 nt, Human
aggaagccacgaguggcacgggucugcuguuuuugaaggagacggugcaguccugguuuccu

SEQ ID NO: 4146858 - RNA, 61 nt, Human
aggaagccaggcugggggaucugauuagaaaacuucugcagucuccagucuuggacuuacu

SEQ ID NO: 4146859 - RNA, 80 nt, Human
aggaagcccuucagagggacauucaagggaaauuuugaccacaccguuuuucuccuuagguguucacuugagaccucccu

SEQ ID NO: 4146860 - RNA, 68 nt, Human
aggaagcuguucugaaucaguaaguaugauuuuuuaacacaaugauucacaagcagcacuuauuuccu

SEQ ID NO: 4146861 - RNA, 71 nt, Human
aggaagcuucauguuuuagcugcaaaaugaaaguauuuuucaacuguacuacuugaacauguauguuuccu

SEQ ID NO: 4146862 - RNA, 73 nt, Human
aggaagcuuuaaaguauagaggacaaaaacaaggcuuacuguuuuucccuacucugacuuuaccuggcuucuu

SEQ ID NO: 4146863 - RNA, 63 nt, Human
aggaaggaagagacaccauuuggauaauuuucuugccucaaguaauguaucucuguucuuccu

SEQ ID NO: 4146864 - RNA, 62 nt, Human
aggaaggacuccaugguccgucagcuuccagcgucguggcugaugcaucugguaucuuuccu

SEQ ID NO: 4146865 - RNA, 66 nt, Human
aggaaggcgaggaagaauauggauuuuacagcacauuaggaaaaucguuucguuccugguuuuucu

SEQ ID NO: 4146866 - RNA, 61 nt, Human
aggaaggcuucuuuggucuucucccccuuaaucacacaaggucagguaagaucaccuuccu

SEQ ID NO: 4146867 - RNA, 77 nt, Human
aggaagggacgcucggguccucugaugcccacgggccuucugcguguggaaggcagaggucugaugcgucccugccu

SEQ ID NO: 4146868 - RNA, 102 nt, Human
aggaagggagacaggugcuagaguagagagagucuuagggcuaauucaagugguagauuggccagguccauuucuccaucugggccucaguuuccucauccu

SEQ ID NO: 4146869 - RNA, 58 nt, Human
aggaagggagcaguuuguuguuugagugcucuuaaagcaaauaaucugcuugcuuuuu

SEQ ID NO: 4146870 - RNA, 57 nt, Human
aggaaggggagaaguuaaagcuucucucuuccaucugcguuggcuucuuuccuuccu

SEQ ID NO: 4146871 - RNA, 75 nt, Human
aggaaguaaggauuuaacauucaguugcuaacauguuuagaugauggcagcagaccccuaagucuaccgccuccu

SEQ ID NO: 4146872 - RNA, 68 nt, Human
aggaaguagauaacuaaagaaagggauuaaaguauuaaauuuaguuucuuuccuuagucauucauccu

SEQ ID NO: 4146873 - RNA, 74 nt, Human
aggaaguagggcugaggcgagggagaugcugagcaagggugccauuuaagcagucccagccucagccccauccu

SEQ ID NO: 4146874 - RNA, 79 nt, Human
aggaagucagugacagagacaaaaaucagauuuuaggccucauaaaacugugcauuucaugucuuuuccuggucuuucu

SEQ ID NO: 4146875 - RNA, 67 nt, Human
aggaagugacggagcauggaacccagcccuuaaaaacugugcuguuuucuucuguaccgugccaccu

SEQ ID NO: 4146876 - RNA, 79 nt, Human
aggaaguguagcauagauagagaugaacauaaaacaaggauuuugguucuuuuguaauguuuucuuaaucucauuuucu

SEQ ID NO: 4146877 - RNA, 65 nt, Human
aggaagugugcaauuaauuucuauuuaccaucccuucuucucuagaaaaauugauaucgcuuccu

SEQ ID NO: 4146878 - RNA, 66 nt, Human
aggaaguuuucuguacucgcucuuggcgaauccccagaggagccccaauugagcaguacguuuccu

SEQ ID NO: 4146879 - RNA, 62 nt, Human
aggaauagaccacuucacugagaggcagaacuugaguucuauccuuguaaagggcuguuucu

SEQ ID NO: 4146880 - RNA, 61 nt, Human
aggaauagauauggaacagagagauguaaauuguaucuuuguuauugcuuuaucuauuccu

SEQ ID NO: 4146881 - RNA, 68 nt, Human
aggaauagcaaacagacaugcacaagugcuuuucaagccucugcaugcaugauguuugguagcauccu

SEQ ID NO: 4146882 - RNA, 68 nt, Human
aggaaucuggaagacacagcuaccauaauaccaucuguugauggaaggccuguuguguccuaggcccu

SEQ ID NO: 4146883 - RNA, 56 nt, Human
aggaaugugaggcaaguugugaaauucaauuaauucuacagccagcccacguaccu

SEQ ID NO: 4146884 - RNA, 75 nt, Human
aggaauuggggcucagggagacagugcagaugucaauacuguggcuucugcuguugccaugaguaauaaaguccu

SEQ ID NO: 4146885 - RNA, 66 nt, Human
aggaauuguaaugagaaagagagugaauugggucauaauuucucuucguuuucauuaaauaugacu

SEQ ID NO: 4146886 - RNA, 61 nt, Human
aggaauuguguuguaguggagagcuuuuugauuuugcucucucuugaauucauaguuuccu

SEQ ID NO: 4146887 - RNA, 59 nt, Human
aggaauuuuucuagccggaguuacaggucaaauaccaugcuuuuuacuagaggauuccu

SEQ ID NO: 4146888 - RNA, 62 nt, Human
aggacaaaagccagaacuugcagggaguuguaaauucugcuaagaaguuuggauuuuguccu

SEQ ID NO: 4146889 - RNA, 76 nt, Human
aggacaaccuggagugcgcuuguuuccucgugugacaaauggauucucauacaggcucaagcuauacgguuuucuu

SEQ ID NO: 4146890 - RNA, 56 nt, Human
aggacaauuagacucuuuguuucuccuaugauccuaagagucagcuugacuguccu

SEQ ID NO: 4146891 - RNA, 77 nt, Human
aggacacacagcucuuuggcguuggcagagccaggugugagcucuggucugccuggaucacagccccuguguggccu

SEQ ID NO: 4146892 - RNA, 81 nt, Human
aggacacagaagcccaaaaggggcauggccacacacugaguuaacagcagaguuggagccagcccagggcucugauguccu

SEQ ID NO: 4146893 - RNA, 61 nt, Human
aggacaccuaggcacauccccgucucuggguccccagccuuaucaugugucugaguguccu

SEQ ID NO: 4146894 - RNA, 60 nt, Human
aggacaccuaucccaugaagcccguauuuucuaucaguggcuucuuggagaugguguuuu

SEQ ID NO: 4146895 - RNA, 63 nt, Human
aggacagacugugaugcuuuugaugacuuauucucagaaguuacauacugucacuucuguccu

SEQ ID NO: 4146896 - RNA, 61 nt, Human
aggacagcccccaacagcaacauuuaucuaaccaaaauguaaguagugccaagguugucuu

SEQ ID NO: 4146897 - RNA, 129 nt, Human
aggacagugggggacugugccccuuguccuugaagcaggaacguucugggguguguggccagcuccuucucacagcuuucagauuguucccaagggcauggagcauggagcaggucccucguggucucu

SEQ ID NO: 4146898 - RNA, 55 nt, Human
aggacaguguggaagagggugcccaugggagggacaaucucaggcaggcuguucu

SEQ ID NO: 4146899 - RNA, 66 nt, Human
aggacaucacucgccgccugucucgaaguggugagcgccaccacaucgggcggacacugggguccu

SEQ ID NO: 4146900 - RNA, 58 nt, Human
aggacaugaagaaagggcaagguuugauggaaaagcuuuguuuccucuaaucuguccu

SEQ ID NO: 4146901 - RNA, 73 nt, Human
aggacauucugagcuacuaauuaggcaucuggugugaggggagguggcugccaagcaggucagagaaguuccu

SEQ ID NO: 4146902 - RNA, 63 nt, Human
aggaccaccgguccauccacccaagcacuagacccgcucagacauguauugaccguguggccu

SEQ ID NO: 4146903 - RNA, 119 nt, Human
aggaccagaggugugugucugcaccgcgagcuccacagcagacccugcacucacugucagguaagcaaaaccagagagagacaggguuguggugccgugaugcugcacuacccuuaccu

SEQ ID NO: 4146904 - RNA, 60 nt, Human
aggaccagccuugacugccccagcacagaaauggcuacaguggcucagugcugguguccu

SEQ ID NO: 4146905 - RNA, 92 nt, Human
aggacggcgggugcggccuggccuccagaugugggcugugagugacccccacccaccccauguccauauggggggugaggccaccucugccu

SEQ ID NO: 4146906 - RNA, 58 nt, Human
aggacugaggcuccccuaggcucaguuguagauuuugaggcucuugaguuucaguucu

SEQ ID NO: 4146907 - RNA, 59 nt, Human
aggacuuagaacauuauguacugaaucagccccucugucuguaauaugugcugaguccu

SEQ ID NO: 4146908 - RNA, 80 nt, Human
aggagcugcccugggcagguauacaaaaaauguaauguguacuuaagcuuucauuugauauauuuguuuagugugauccu

SEQ ID NO: 4146909 - RNA, 58 nt, Human
aggagcugggccuuccagagaccuuugcauggaggcguccagggaaggcccagcugcu

SEQ ID NO: 4146910 - RNA, 70 nt, Human
aggagcugguggggaggaacugggagagccugggccaguaggcuucccugccucacuuauucucagcccu

SEQ ID NO: 4146911 - RNA, 66 nt, Human
aggaggagcaugggaaggcucugguggagagaacccuugaccaccagaucuccccugaugccuccu

SEQ ID NO: 4146912 - RNA, 62 nt, Human
aggaggauccuguguccugcuuuuccuuuaucaaaccaaaaagcuggcaauguuguccucuu

SEQ ID NO: 4146913 - RNA, 64 nt, Human
aggaggcacucgcucggggaugguuuggugguccccgaccccugccucagagcgcaggcccccu

SEQ ID NO: 4146914 - RNA, 58 nt, Human
aggaggccgcugaugggcucccugagacugcaggcgugauauccccaucaaggccccu

SEQ ID NO: 4146915 - RNA, 76 nt, Human
aggaggccggaagggaggaucuuucucuagcauguaguguaucaaguuugaggagaagacuuugcuuccccuuccu

SEQ ID NO: 4146916 - RNA, 71 nt, Human
aggaggccuggguuaccuacucguggggagggguccagacuguugcagaguaagggguagccaggcccccu

SEQ ID NO: 4146917 - RNA, 76 nt, Human
aggaggcggaagggaaaggagggaaacagagcggugaggaguuucacuuuuguucucucuuuucugugugcuuccu

SEQ ID NO: 4146918 - RNA, 76 nt, Human
aggagggccugcagggaagucccagcuccuggggagaccccuugccccggggcaggagucccuguagaguccuccu

SEQ ID NO: 4146919 - RNA, 56 nt, Human
aggaggggaugcuuccucuagcaugucaauucccuugcugagguagcuuuccuccu

SEQ ID NO: 4146920 - RNA, 59 nt, Human
aggagguacuggcuggugcauuguaggauauuuugcagcauucuuggccacuacucacu

SEQ ID NO: 4146921 - RNA, 76 nt, Human
aggagguagcucuuacucucuccggccugcacagagcugaggaaagcaggcuggggagaggggaagcacauguccu

SEQ ID NO: 4146922 - RNA, 63 nt, Human
aggaggucagagccccaugcugggaagcauagguugagcucacggaugggguucuguccuucu

SEQ ID NO: 4146923 - RNA, 76 nt, Human
aggaggucugcagaaaggcacccacugggucucauagugugaggccucuuguguuuguccuuguucccagccuccu

SEQ ID NO: 4146924 - RNA, 69 nt, Human
aggaggugaccaggugccugggggagcugcuggcugcggccugugccagcugggcccugcccacguccu

SEQ ID NO: 4146925 - RNA, 63 nt, Human
aggaggugaggcuaagugacacaggggcauggaaagcuccuuguggcuguggccucagcugcu

SEQ ID NO: 4146926 - RNA, 59 nt, Human
aggaggugcguggugauccccucugcuguugugcagaggaaugugcccacccaucuccu

SEQ ID NO: 4146927 - RNA, 80 nt, Human
aggagucagcaaauuuuuuuaguaaaagaccacauauuaaauauuuuagguuuugcaggcuauccuuugcugcaacuucu

SEQ ID NO: 4146928 - RNA, 66 nt, Human
aggaguccauguuaaaucuaguuauguuuaaauuguaauggaaaagagcuguuuacauggauuucu

SEQ ID NO: 4146929 - RNA, 58 nt, Human
aggaguggaauuacuggguucugggagauacacauacuuaguuucaguaacuacucuu

SEQ ID NO: 4146930 - RNA, 89 nt, Human
aggagugucacucugucaccaggcuagagugcaguggcgcgaccuugucucacugcaaccucugccucccagguucaagugauucuccu

SEQ ID NO: 4146931 - RNA, 68 nt, Human
aggaguucaaggcgagcucaauaaacuagaucacaaagucauuuuuacaacgcuugccuugucuuccu

SEQ ID NO: 4146932 - RNA, 79 nt, Human
aggaguucacugugcaggcucugagccccacccaguauuagaacgggaccugagaugcggaggccugccaggagcuucu

SEQ ID NO: 4146933 - RNA, 76 nt, Human
agucuuuagauaguaaauagcacuaagucuaaaagcaaggagauaagauuucauguuggauacuguuucaagaacu

SEQ ID NO: 4146934 - RNA, 56 nt, Human
agucuuuggcugccugaagcccaagucaacaucugacugcagccacgugagagacu

SEQ ID NO: 4146935 - RNA, 65 nt, Human
agucuuuuucucuauaucccgcuuucuucuuuuucuccagcugcaggagcuagagcugaaagacu

SEQ ID NO: 4146936 - RNA, 86 nt, Human
agugaaaauucagagacaguucuggggcaggagccagauuugacccauuccuaucccuaccauugucucuugagacucuguucacu

SEQ ID NO: 4146937 - RNA, 64 nt, Human
agugaaauacuuaauugaauauuagauugcuguggcaacugguagaaagcaguaagugguuacu

SEQ ID NO: 4146938 - RNA, 76 nt, Human
agugaacagaugcgcuugguugccagaccgcgcccuuugcgggucuaucaaaagggcaagcgcauauucuggagcu

SEQ ID NO: 4146939 - RNA, 112 nt, Human
agugaaggagaaaguggcuuuugugguaugaaaauuguaaaguucuuuuuaaaaaaggaaagaagaaacaaaaagauuuuuaaacaaacaaaaacuaagagaauucaucauu

SEQ ID NO: 4146940 - RNA, 112 nt, Human
agugaaggcuuggagaggggcacugcuuacccggccugacuucaguguccuuauacgugaaaaggcagagggucgaaguuaguguuucuaaaauauauuucagccuaacacu

SEQ ID NO: 4146941 - RNA, 65 nt, Human
agugaaggguccaaggcuuugcguuuagcacugcuacuuaguggcuaugugaccuuaaaaucacu

SEQ ID NO: 4146942 - RNA, 74 nt, Human
agugaauaaauugaauugauauuucaucugagauugcucaaucagauguaaaggcagacuuuaauuuuuguacu

SEQ ID NO: 4146943 - RNA, 60 nt, Human
agugaaugacaaaugagagguucagagggaucagaggaccugcuccaugucaccuucacu

SEQ ID NO: 4146944 - RNA, 67 nt, Human
agugaaugcuuccaaaauaccaagccuguuccuucugguuugggcaguauuauuggaguuaugggcu

SEQ ID NO: 4146945 - RNA, 87 nt, Human
agugacaaaucaugcuuaauccuucuuguguucauuagcgugacauuaauccugauagacucaauugggguauaaggugagagcacu

SEQ ID NO: 4146946 - RNA, 129 nt, Human
agugacaaguggacuaagugaaaucauauggguaaugaaacuuggauuucauuuaacccguuccuauaauuaagggaaaugugucaguuucauucucucaguuggcgaucaucuuagucugcuugggcu

SEQ ID NO: 4146947 - RNA, 61 nt, Human
agugacagccaaauccauccaugucagagcaauggccuaugguaugugguuucguguggcu

SEQ ID NO: 4146948 - RNA, 65 nt, Human
agugacauuuguaacacgugacagguugcuugauaaaggguaacauuucucuuacaaaugcuacu

SEQ ID NO: 4146949 - RNA, 65 nt, Human
agugaccgaggcacuuggcaacacuccuuccuccagcaucacugucacuagugccuucugucauu

SEQ ID NO: 4146950 - RNA, 66 nt, Human
agugacuggaggcugguguaagucccugcgacagcugggcuccaacuacaucagccuuaccacacu

SEQ ID NO: 4146951 - RNA, 81 nt, Human
agugacuugagagagguggccugcaagugcagauggccaagacgaguggccagcaagugcagauggccaagacgagucauu

SEQ ID NO: 4146952 - RNA, 109 nt, Human
agugacuuuucccacugaaggggacacagaggaaacuaugauuaggaguuuccagacaccuguguuccagccaugguuucccuauguccucgccuugggacccagcacu

SEQ ID NO: 4146953 - RNA, 73 nt, Human
agugacuuuugguccugagcaaaacuaugugugauaugcacuucauaagugacaguuuagggcaauggucauu

SEQ ID NO: 4146954 - RNA, 86 nt, Human
agugagacagacugacaggcaugggacgagggggugcuggacuuggaacccagagccugaggaugucccagcucagacuauucacu

SEQ ID NO: 4146955 - RNA, 56 nt, Human
agugagacaguggacucugcaucaucacaaacaugcugagaaaaucacugcuuacu

SEQ ID NO: 4146956 - RNA, 57 nt, Human
agugagauuuggguuguuuaacaugugguuuaaaaccauagucucccaguccuuauu

SEQ ID NO: 4146957 - RNA, 60 nt, Human
agugagcagagacgggggccuccagcauagcugcugguuuugaccuguuucuaguucucu

SEQ ID NO: 4146958 - RNA, 68 nt, Human
agugagcuucugacagaugcaccugugacaucacucugccaucccuggugacacuguggauguucacu

SEQ ID NO: 4146959 - RNA, 104 nt, Human
agugaggauuuucuuuaacugcauuaacacuggaccauuuaaacuugagguuuucaucuuuuucaguuuaagucaugguuacagaguuggcagggguaucuacu

SEQ ID NO: 4146960 - RNA, 62 nt, Human
agugaggcucaacccacagggguugcuugggaacuguugcccgugaggaguuggguguuauu

SEQ ID NO: 4146961 - RNA, 130 nt, Human
agugaggcugugccaaaacaacuuugcucuucacauuucccauugcagcaacauuuaaagaaggauuauuucugaaaaugugcaugagucagaaguggggaaugaguaauucugugcuuuggacuuuauu

SEQ ID NO: 4146962 - RNA, 66 nt, Human
agugaggugauuuccuuuugcaaagucagauauugugcucugagugcuuugagaaaucaccugauu

SEQ ID NO: 4146963 - RNA, 65 nt, Human
agugagugcgcagaucuugucuuggcuaugggcugcccgucaugccauccacaucuguuucuccu

SEQ ID NO: 4146964 - RNA, 71 nt, Human
agugagugcugagauggguccauugaaagaagaaagauuucugaaguggccaauaugucaugcucuucacu

SEQ ID NO: 4146965 - RNA, 70 nt, Human
agugauaugucucucagguuuaacuuuaagcaauagauguuucaagcaaacucugagaaauaaauuagcu

SEQ ID NO: 4146966 - RNA, 55 nt, Human
agugaucugccugccuuggccucccaaagugcugggauugcaggcaugagccacu

SEQ ID NO: 4146967 - RNA, 72 nt, Human
agugaucugcucagguuaccuagcuaguaaguggcacagcugaacagguccaagguuccugaauagaggauu

SEQ ID NO: 4146968 - RNA, 67 nt, Human
agugauuccugugcuuauuccagucugggaaucaccugccgagauggaguguggccaggcaguaacu

SEQ ID NO: 4146969 - RNA, 80 nt, Human
agugauucucuuguaagcuauguucagguggucaagauaaaaaugacauuccuagcaacaugguccuacauuaaauuauu

SEQ ID NO: 4146970 - RNA, 82 nt, Human
agugauugcuucugguagaauucaauagaguugucauaucaaauuaaguuuuaucgaguuucaccagauagggauauucacu

SEQ ID NO: 4146971 - RNA, 96 nt, Human
agugcaccucauagaagcuuuuaauagucuuuauauuuacuaaagaauaggacuaacuauggaacuaugaagaugagcuggaaaugacaggugacu

SEQ ID NO: 4146972 - RNA, 78 nt, Human
agugcagaaucaguacagaacgacaaagauaaaguugcugcuccuacuuugguucuugcuucugugcaauucaguacu

SEQ ID NO: 4146973 - RNA, 58 nt, Human
agugcagcccagccccagaaccuuucugggaaggacggacagagggcuugggcugccu

SEQ ID NO: 4146974 - RNA, 89 nt, Human
agugcagggagggggccuggagggaguggggauagacacgcccccugcuugccuggcaccacagccuuucagacuccuuacccuguccu

SEQ ID NO: 4146975 - RNA, 72 nt, Human
agugcaggggcucuaaugcaugaucacuuaaggaccaccacaaaugguauuugucauucgaguucugcuacu

SEQ ID NO: 4146976 - RNA, 107 nt, Human
agugcagguaggugugacaugcaugaggcaaagaugucauugguaagacaagugaucguuuccuugagugcauaucuuuggcucauaccauuccacaacccaguacu

SEQ ID NO: 4146977 - RNA, 91 nt, Human
agugcaugcaucauuaauccucaagccuguacaaccaggacagagcauguggaaaggugugcaggcuugaggauuaggugaugcaugcacu

SEQ ID NO: 4146978 - RNA, 74 nt, Human
agugcauuugguuuagagaugucuauauguuaucugaaaguugucuguauggcuugucuuuauaccaggaagcu

SEQ ID NO: 4146979 - RNA, 65 nt, Human
agugcauuuuagcucugauucugugauuucuaaaugagugauuacaguaacagcuacaaugcauu

SEQ ID NO: 4146980 - RNA, 55 nt, Human
agugccaagguauuaauuuauauguaaaccuaucuuauaauaaugccugggcucu

SEQ ID NO: 4146981 - RNA, 115 nt, Human
agugccaggagaggaccggagcauaguuagugcuuauuaaauaguaucaugauaacaugacacauguaaaacacuuagcaauguucaauaaacucuggucccuuuccuccccacu

SEQ ID NO: 4146982 - RNA, 82 nt, Human
agugccauggcacuuuacacccauuuggcuggugaacauuacaaagcuggguaaugccaaguguugguggggcugugggacu

SEQ ID NO: 4146983 - RNA, 81 nt, Human
agugccccaggucaggaggccucugccauuucccaauucugacgggaagugauggagaaaagccucuuccuugugggugcu

SEQ ID NO: 4146984 - RNA, 129 nt, Human
agugccccauggccaaauauucuugcacugucuuccuuggaucuuuccuaugauuugugcacauacugcagugaaaauggcaaagagagauccugcagggauugguaauuuuucaccguggguggcacu

SEQ ID NO: 4146985 - RNA, 70 nt, Human
agugccuggugcccuuaagaugagaacagcaauaauaaucacaccuuucauguaccguguaccaggcauu

SEQ ID NO: 4146986 - RNA, 126 nt, Human
agugcggcagguuuucuucaguggcauguaaugguacuuucugauuuuaagcucuaauuuaucucgcagauuaaagcaaugaaaggggucagaaucuauugguguuaagaagucagccucagcacu

SEQ ID NO: 4146987 - RNA, 62 nt, Human
agugcgggugcucaugccugaguaaaaaugauagcaguuuuaggaacaaagagccucacauu

SEQ ID NO: 4146988 - RNA, 104 nt, Human
aggaaccaggaagcucucugagcugaacaauggucucuguuuggggcuggcaaggguucaucuuuucugauucugcagagacccugugaguuuucuuuguucuu

SEQ ID NO: 4146989 - RNA, 65 nt, Human
aggaagaacagauaauggacgcuggaagcccuuucuugccuggcaccgguuaaucuguuuuuucu

SEQ ID NO: 4146990 - RNA, 65 nt, Human
aggaagaccacccccuacagcacacuugcauaaaaacauguccugagggugguuggucacagccu

SEQ ID NO: 4146991 - RNA, 87 nt, Human
aggaagagaaggaagaugugggugucuucagcugguaaacucaacauuguuagcucugacaaaggccacuuacacuaggcuuuuccu

SEQ ID NO: 4146992 - RNA, 76 nt, Human
aggaagaggagcacacacauuucucuuuuuguaaguuagaaacguuaaauaagugacauguuuuacucuucauccu

SEQ ID NO: 4146993 - RNA, 63 nt, Human
aggaagaggugugcaauggugucuuuggaguccaaaaaaugcugauaucuucauuccuuuccu

SEQ ID NO: 4146994 - RNA, 61 nt, Human
aggaagaguguuaccuauggguaccuuguaguucaggaaggaccugggaaaaccuuuuccu

SEQ ID NO: 4146995 - RNA, 65 nt, Human
aggaagauaauuucagaaaagugauacgaacgugauaucaaaguuucccagaaguugucuauccu

SEQ ID NO: 4146996 - RNA, 86 nt, Human
aggaagcaccuguguucuuuucucuaaacugauaaacuaaugucuauuuuuaccuggaggaaaagaaaaucaacagaugcugaccu

SEQ ID NO: 4146997 - RNA, 62 nt, Human
aggaagccacgaguggcacgggucugcuguuuuugaaggagauggugcaguccugguuuccu

SEQ ID NO: 4146998 - RNA, 57 nt, Human
aggaagccuggggcugcccucgugucacccagucauuggaaagucucagugccuccu

SEQ ID NO: 4146999 - RNA, 75 nt, Human
aggaaggacauaaggaauucccuuucugacagaacucguugguuacuuguuaggaauuucuacuauugccuuccu

SEQ ID NO: 4147000 - RNA, 73 nt, Human
aggaagggaaguauuucguucugaaaaaguauuuuacccaaacuggagugcucagugagaugcuccccucucu

SEQ ID NO: 4147001 - RNA, 69 nt, Human
aggaaggggguuaacugggugccaggccugggcuuccacggaacaggcuucaucucguugacaccuccu

SEQ ID NO: 4147002 - RNA, 61 nt, Human
aggaaguaaaguggagucccuacaaccagcugggugacuuuagccaagggacuugcuucuu

SEQ ID NO: 4147003 - RNA, 79 nt, Human
aggaauacuagaccaagugucaggagacuuggauucuacuccuggcucugccacuaacuugguauuuccugguuuuucu

SEQ ID NO: 4147004 - RNA, 58 nt, Human
aggaauauauuuggaauaugugacgcuaaucuagcuuauugcauccaaaugcauuccu

SEQ ID NO: 4147005 - RNA, 80 nt, Human
aggaaugaaagaugcucccgugccuccgccuuggcgccgucuucccuccacacgccagggcaggggagcaucugccuccu

SEQ ID NO: 4147006 - RNA, 59 nt, Human
aggcugcgagcucuuguucugagagcccucuggccucucagaaccucaguuugcucucu

SEQ ID NO: 4147007 - RNA, 75 nt, Human
aggcugcugccugguuuuuguaguccaucgaugucuucuuccugggcucacagccaaggcuccauaucccagccu

SEQ ID NO: 4147008 - RNA, 56 nt, Human
aggcugcuggaggauuuaugccuucaguguggcuucuguaaguucuuaggcagcuu

SEQ ID NO: 4147009 - RNA, 73 nt, Human
aggcuggagugcaauggcaugaucuuggcucacugcagccucugccucccagguucaagcgauucuccugccu

SEQ ID NO: 4147010 - RNA, 77 nt, Human
aggcuggagugcaauggcgugaucuuggcucacagcaaccucugcuucccggccggguucaagccauucuccugccu

SEQ ID NO: 4147011 - RNA, 73 nt, Human
aggcuggagugcaguggcgugaucucggcucacugcaaccuccgccuccuggguucacgccauucuccugccu

SEQ ID NO: 4147012 - RNA, 79 nt, Human
aggcuggagugcaguggcgugaucucugcucacugcaaacucugccucccggaaucacgccauuguccugccucagccu

SEQ ID NO: 4147013 - RNA, 73 nt, Human
aggcuggagugcaguggugggaucucagcucacugcaaccucugccuccuggauucacaccauucuccugccu

SEQ ID NO: 4147014 - RNA, 63 nt, Human
aggcuggagugcaguugcacagucuuguugcgaguacaggcguugagcuacugcacccagccu

SEQ ID NO: 4147015 - RNA, 83 nt, Human
aggcuggauaggcagaggucagagugagugagcgacaacccugagucucauucucagacucuuggccucagcuucuccaucuu

SEQ ID NO: 4147016 - RNA, 57 nt, Human
aggcuggcauacauuuguucuuucuuuugccagaacaacccaucgguguggcagcuu

SEQ ID NO: 4147017 - RNA, 76 nt, Human
aggcugggaaggcgguuggggcagcuugggggcagcuccagaguugccaggcucagccccuaucuucuucccuccu

SEQ ID NO: 4147018 - RNA, 58 nt, Human
aggcugggcggugcagcagagugaguggaguuccacggacccugaggcuccccagccu

SEQ ID NO: 4147019 - RNA, 101 nt, Human
aggcuggggacuagcagaauagaggaguuugcuggugugugcaguggcccccacgccuaccaguaggagcucuugggguuuaucauaguccaguccagucu

SEQ ID NO: 4147020 - RNA, 58 nt, Human
aggcuggugccugcagugaaucauauaauuaauuugguauuacaugacacuccagccu

SEQ ID NO: 4147021 - RNA, 87 nt, Human
aggcuggugcugacauuuggguucccugacagcgaugcugccaaaaucagugaugcagauuagggaaucugccaggcccucaagccu

SEQ ID NO: 4147022 - RNA, 64 nt, Human
aggcugucaccuggcaaccucuguguuucuuuucccaaggccacagcuccagucaggugacccu

SEQ ID NO: 4147023 - RNA, 64 nt, Human
aggcugugaaauguggcaaggagauucaaggaccucauucaaaggcucacguuugcauaugcuu

SEQ ID NO: 4147024 - RNA, 72 nt, Human
aggcugugaguaguucuuguugaaucauuuuacuggcaguaaaccagaugaagauacaagaacuccacacuu

SEQ ID NO: 4147025 - RNA, 87 nt, Human
aggcugugaguuucuuuggaaggcaggcuucugauuagguguugccaaaggcucugccuaaacguuuguuuucuguugauggagucu

SEQ ID NO: 4147026 - RNA, 100 nt, Human
aggcugugguccaggugcaucuugugcuucuucuuuagcuacucacaagaggugagcugagguugaagagugaacgaagguagguguugaucaacagucu

SEQ ID NO: 4147027 - RNA, 56 nt, Human
aggcuuagaaaggguaagugacuuucucaaacagaguguuaccuagagcugggccu

SEQ ID NO: 4147028 - RNA, 92 nt, Human
aggcuuagagcuaauuagucuguuaucugguagagcacuaauguacauggcugauuuaauauacagauuaacagauuuaaagcuuuuacccu

SEQ ID NO: 4147029 - RNA, 61 nt, Human
aggcuucagacaaauguuauggauggauuguauaucucccagauucacauguugaaguccu

SEQ ID NO: 4147030 - RNA, 55 nt, Human
aggcuucugagcauggaguuuugcaaagacagaaacaccaaugugccuggagccu

SEQ ID NO: 4147031 - RNA, 69 nt, Human
aggcuuguucuggggagauuuguuuuggaacuucaacucuguucugaagaauuccuaggaacuaagcuu

SEQ ID NO: 4147032 - RNA, 64 nt, Human
aggcuuuccaggacuucauggcucugaaucagaauuucagaggugcaagaaguucugaaagccu

SEQ ID NO: 4147033 - RNA, 64 nt, Human
aggcuuucucuguggugaggagggugcaauagaaaggcaucuggucgccccgugggagcagccu

SEQ ID NO: 4147034 - RNA, 70 nt, Human
aggcuuucuuaggucagguaucagcagguauuguucaauguccacugccucucaggaugcuugacagcuu

SEQ ID NO: 4147035 - RNA, 65 nt, Human
aggcuuuuuucuccgaguggucugucuuaggaaaauguuugauuaucuuggcuugaaagaugcuu

SEQ ID NO: 4147036 - RNA, 129 nt, Human
agggaaaauuuaggcaagaaucuuuauugagguuuccuuggucaaacgugaggcagggcagggugagcagguuuagaauuggcuagugggaauacuuucaaugggcuuugggguguagggguugucccu

SEQ ID NO: 4147037 - RNA, 82 nt, Human
agggaaacccaguugcuuggguggauccagacaaaauggauuuucauccuuggauuuugugcccacgccucugggucaccuu

SEQ ID NO: 4147038 - RNA, 80 nt, Human
agggaaagcuaagagcuugaagcaucuguaauuggcauucaaagccauucauaguacaguucuagcuuuuacauuuuccu

SEQ ID NO: 4147039 - RNA, 76 nt, Human
agggaaaguaagcauuucauuaacucugugaaauuuguauguugagucagaaaauaaaugaaugguacuuuacccu

SEQ ID NO: 4147040 - RNA, 86 nt, Human
agggaaaucaaggaaggcuucauggaggaggugaguccugaacugauucagauugcacuaauauucauaaguagcuugauggcccu

SEQ ID NO: 4147041 - RNA, 65 nt, Human
agggaaaugaggcuggcuuuuuacuuguaguacucuacaacaguaggaaaacaugucuagucuuu

SEQ ID NO: 4147042 - RNA, 86 nt, Human
agggaacauggagucuaauggacugacucagugcugccaguuauaaaaugagaagccuugagcaguucacuuggucugugugaccu

SEQ ID NO: 4147043 - RNA, 55 nt, Human
agggaacauuugcacuguuggugggaauguaaacuagacaguguggagauuccuu

SEQ ID NO: 4147044 - RNA, 61 nt, Human
agggaaccugcuucaggaagugauaggucugauauuucccaaagauuuccugcaagccccu

SEQ ID NO: 4147045 - RNA, 74 nt, Human
agggaacuugaaggauuauucuagaccuaaucuccauaguccccugugguaggcagaauaauuccuccuucccu

SEQ ID NO: 4147046 - RNA, 72 nt, Human
agggaagaaguuaaauaaauggaccaggagugguuuuucaugguaccauguugcuuugauuugcacuucucu

SEQ ID NO: 4147047 - RNA, 129 nt, Human
agggaagaaucacuugggagcuuuuaaaaauaccuuuccaggaccccauauucacugaaccagaaucucuggggauuggagccugggguucgagauuuuugacaaguuccuaaggcgauucugauuucu

SEQ ID NO: 4147048 - RNA, 74 nt, Human
agugcgguuuugggguuuacaagagcugauggauguaaagugcuuagaagaaugccuaggacagaguacgcacu

SEQ ID NO: 4147049 - RNA, 88 nt, Human
agugcguguuaaaacaacaaaccacugcaccagcucauaugugcaggcugagugagcugcauggagcugucugcaugguuuacguacu

SEQ ID NO: 4147050 - RNA, 55 nt, Human
agugcuaaaggaucacagggucaaguagaacacaggaccauguugccuuuggccu

SEQ ID NO: 4147051 - RNA, 72 nt, Human
agugcucaugaggcuuaauuaucagugaaaugucuugcuuuagauuucacagcuuaauaaggcucagagacu

SEQ ID NO: 4147052 - RNA, 82 nt, Human
agugcucauuauauuguagagagggccuuuggagcucucauuagauuugacaggaauucucucuagggggaaacugggcauu

SEQ ID NO: 4147053 - RNA, 77 nt, Human
agugcuccggaccuggcugacucauggggcucccucgaaccccuuacuuguggccagccccauggacaguucccacu

SEQ ID NO: 4147054 - RNA, 61 nt, Human
agugcucucugagugagggacaagcuggauucagggccagcugguucucaccaggggugcu

SEQ ID NO: 4147055 - RNA, 68 nt, Human
agugcucuugggagagaauaaucaauagguugguauugauuugcuaaucauuauucuguccuggcauu

SEQ ID NO: 4147056 - RNA, 61 nt, Human
agugcugagccuuuucuggggggcacugguuuagacauugugccccuuagggguuaagccu

SEQ ID NO: 4147057 - RNA, 68 nt, Human
agugcugaggccauacuccauaccaauuaaaauagaaucuguuggguaggaucagugguaucaguauu

SEQ ID NO: 4147058 - RNA, 87 nt, Human
agugcugagggauggaguuuauauagagaguagaguagagaguguggucacuauugaauuaacuauuaaaguuuaucuuuuguuacu

SEQ ID NO: 4147059 - RNA, 59 nt, Human
agugcuguggcuuucauggaggaaacaggacucacuucuagccuccaaguccccagccu

SEQ ID NO: 4147060 - RNA, 65 nt, Human
agugcuuaguaaauugucgauguuaauauuauuaaugaaauuuaauccugacaaugacaagcacu

SEQ ID NO: 4147061 - RNA, 57 nt, Human
aguggacauucugcacuuggagugagcaagauaaacuccaggcugaugaugucaacu

SEQ ID NO: 4147062 - RNA, 65 nt, Human
aguggaggcucagaaagaggagauguuuggcaagccucccaaauucauuucauugugucuucacu

SEQ ID NO: 4147063 - RNA, 71 nt, Human
aguggauuaccaagaaauuucuuaagaacuaauuuucuauacuggauuagugaaguuucuugugguuuauu

SEQ ID NO: 4147064 - RNA, 66 nt, Human
aguggcaccagcggcaugcaagcccagggcugccugauucuggacuccaugcugccuggagcuucu

SEQ ID NO: 4147065 - RNA, 62 nt, Human
aguggcagagcugguacuugagccugggucugcuugguucuaaagcucaagcucuugccauu

SEQ ID NO: 4147066 - RNA, 60 nt, Human
aguggcagggcuuugcuguucuucacucucagcccccugaaagcaguucuuccugccucu

SEQ ID NO: 4147067 - RNA, 119 nt, Human
aguggcccagguaugugaugcuccggacucugcaguggcccagcuugcaggcuucaaacagaggugcuccccaggaccagccuuugagcaagggcugcguagagacaggccugggcucu

SEQ ID NO: 4147068 - RNA, 55 nt, Human
aguggcucacgccuguaaucccagcacuuugggaggccgaggcaggcggaucacu

SEQ ID NO: 4147069 - RNA, 55 nt, Human
aguggcuccugccugcaaucccagcacuuuagaaggcugaggcagguggaucauu

SEQ ID NO: 4147070 - RNA, 62 nt, Human
aguggcugcuaugaucaggacaacuaacgugguugaacuagaauggaucuuaggaagucacu

SEQ ID NO: 4147071 - RNA, 58 nt, Human
aguggcugcuggaguggagaugggaauggguaggacuuuagccgcuccaguagccauu

SEQ ID NO: 4147072 - RNA, 67 nt, Human
aguggcugucuuccaaaaucugcaacguauuuuauaaacguuauuacugacuugguaagcggccauu

SEQ ID NO: 4147073 - RNA, 55 nt, Human
aguggcuugugaaaagcuggugacucucagagcgccugccuuuuggaggcacauu

SEQ ID NO: 4147074 - RNA, 115 nt, Human
agugggaaaugaggagugagguagggagaggaaggaaugugccucaacaugaaaacacugaggaucauuuugaugcccuuuuaguuccuuaccuacuaacaucucuaguccuauu

SEQ ID NO: 4147075 - RNA, 98 nt, Human
agugggaggaucccuugagcucaggaguuggaggcuacagugagucaugauugcaccacuguacuccagccugggggacagagugagauccugccucu

SEQ ID NO: 4147076 - RNA, 63 nt, Human
agugggagguggagacacagcugaaggcugccaacaaaccuuagcugccagaccauucuuacu

SEQ ID NO: 4147077 - RNA, 56 nt, Human
agugggauagcugggugucagaauucuguuuccguucuuguccuugcucucccacu

SEQ ID NO: 4147078 - RNA, 75 nt, Human
agugggcucccucacauaccuguuuucccuuuauuuguguuauaaggggauggauauguagagaaaggagcuccu

SEQ ID NO: 4147079 - RNA, 71 nt, Human
agugggcuguaaauaacugguaauugggguuuuugguggacaaaauuaccuaguuauuuucucugcccgcu

SEQ ID NO: 4147080 - RNA, 66 nt, Human
agugggcuugacugaaauaguucauuuaggaugagaacuuuguguauaguugagucaaguuucacu

SEQ ID NO: 4147081 - RNA, 64 nt, Human
aguggggaggaaaggcucccucccucugcaccagucuuugcagaggguccuuaccuuccucacu

SEQ ID NO: 4147082 - RNA, 63 nt, Human
agggcauuggcacagaucugcuuucacccugagucucucuaggugucucuguguccaugccuu

SEQ ID NO: 4147083 - RNA, 81 nt, Human
agggccagacuugaauaucuguuguccaugcagaaagugacccaagucauuuccucaacacucagaaacauuuaaagcucu

SEQ ID NO: 4147084 - RNA, 79 nt, Human
agggccauauggcugagaugggcuccaggcuaggguugggugaggguugaugcuugguccacucaguccagaugccccu

SEQ ID NO: 4147085 - RNA, 63 nt, Human
agggcccuucucagagcauggcccuuugccgcugcauaggucauguguccaggagguagcccu

SEQ ID NO: 4147086 - RNA, 66 nt, Human
agggccgugucuggcuggcuggcuggcuggcuggcuggcuggcuggcuggcuggcugaccggccuu

SEQ ID NO: 4147087 - RNA, 130 nt, Human
agggccuccaucugucugccuggaacauguggucucaucaguguggcaguucacuguggcuagagcucauuagagaaugugcugacauugacuaccggccccuacguucaauucuuuucuugaggcuccu

SEQ ID NO: 4147088 - RNA, 57 nt, Human
agggccugagcucuccuccagugcgggcgucuuauucuggaugaugccucaggcucu

SEQ ID NO: 4147089 - RNA, 94 nt, Human
agggccuggugcaggaagggcgggugacggggguguccuggagcuggagaacagcagccagcccuguuuaugugucacuuguaaaggugucccu

SEQ ID NO: 4147090 - RNA, 68 nt, Human
agggcucacuccaaauaucaccuguucaguaggcuuuccaauagcacugaagaugucuuaguggcccu

SEQ ID NO: 4147091 - RNA, 69 nt, Human
agggcucuuccuuugccucucagcugcucuucccuggaggguugugggggaggcaaggaaaggggcccu

SEQ ID NO: 4147092 - RNA, 83 nt, Human
agggcugaagucauccacuaugggggagagcagcuggccauucccaggauccuucccauugcauagauggcuguguuaguccu

SEQ ID NO: 4147093 - RNA, 87 nt, Human
agggcugaagugggggagggcaaggacaggggaaaaggucacaacaugacccuuaauuucccuuugcacucuacaauuucagacucu

SEQ ID NO: 4147094 - RNA, 96 nt, Human
agggcugaguaggaagggucugaggaacuccuauaauuguaauuccaguuaccucaauuggugagcucuuuagacugggacguuuauucuggcucu

SEQ ID NO: 4147095 - RNA, 64 nt, Human
agggcugcaaugguagugacucccccagggcugccucagcccgcaucucgcuaaagauagcccu

SEQ ID NO: 4147096 - RNA, 66 nt, Human
agggcugcuccuuugucagcuggaggugcggagagucuugucugggcuggcacugaggagagcucu

SEQ ID NO: 4147097 - RNA, 57 nt, Human
agggcugcuuugcuaaauauggaagcccaugugacacuugacuuagcaaaaggcuuu

SEQ ID NO: 4147098 - RNA, 75 nt, Human
agggcuggcccugggugggacucugcauuaggcaguuuucccugccaguuuuuccccucaggcagccagugcccu

SEQ ID NO: 4147099 - RNA, 61 nt, Human
agggcugggcacugugcaagguauuuuaaaucuuauauagcauuguacagcaaccaacccu

SEQ ID NO: 4147100 - RNA, 105 nt, Human
agggcugggccuggaauccauggcuugggaagggcccuguguacaaccacugaccguuggaagugaauauuguccuucuccaccacccgugccaggccugccacu

SEQ ID NO: 4147101 - RNA, 56 nt, Human
agggcuggggagacacaggugggaagugaaaucccagcucccuguuuccucacucu

SEQ ID NO: 4147102 - RNA, 56 nt, Human
agggcugguauguccaugaaagucccaugguggaaggacucucaggggcuagcccu

SEQ ID NO: 4147103 - RNA, 67 nt, Human
agggcuuacaguucuuccccuuucucuuuccaguuggcuggaaggcagauauaaagacuagagcucu

SEQ ID NO: 4147104 - RNA, 73 nt, Human
agggcuucuucacccuucucuucauuuccagagagccaaucccagaggauggagagaagggauuccaggcccu

SEQ ID NO: 4147105 - RNA, 60 nt, Human
agggcuugccauugccuguuagagauccuuuggguccguucagaagcaaggcagguaccu

SEQ ID NO: 4147106 - RNA, 72 nt, Human
agggcuugguuuucucagcuggaccaugauccuauuuuuauguuugagcucagagaacaugauuaaugcccu

SEQ ID NO: 4147107 - RNA, 130 nt, Human
agggcuugugagacgaggacgcugggcugagaagauagggcuucacuaggcggagggccccaggguaccccauacacaagccugccuuggcuucucguccaauuuggugcaucucacacuacacagcccu

SEQ ID NO: 4147108 - RNA, 74 nt, Human
aguguuauuuauuguuucauaaaacuuccaauuagugaaucaacugggaaccuugauagauaguuauuagcacu

SEQ ID NO: 4147109 - RNA, 56 nt, Human
aguguucaauuugagcucaaaggcaucugcaaguaauugaggagauauugaauacu

SEQ ID NO: 4147110 - RNA, 105 nt, Human
aguguucccugggccucauugcacuuuggguccaggacaggcagcugcugcucuuuggccuucguccuggaauccuagaacagugucagaccaggguuggacacu

SEQ ID NO: 4147111 - RNA, 130 nt, Human
aguguuccguggagaaauggagguuguucacaggaaagccuuucccuugaagaggggcaaagguugcuucuucucaaggggcagguggaauuuagguuuuaacuuucuuugcaagauccaccccaacauu

SEQ ID NO: 4147112 - RNA, 83 nt, Human
aguguugcaugaaaauaucuuguauagcccuggcacauacaaagugcucaguaaaugguacguauauuuuuaucauuaacauu

SEQ ID NO: 4147113 - RNA, 69 nt, Human
aguguugcuauauuuauugucuuuuaaauguuguaucauacccaggagagagacagagaaaguaacauu

SEQ ID NO: 4147114 - RNA, 69 nt, Human
aguguuggcuggccaccucacagccagaucuuccuccucucugcuaauagagguggccauguccagccu

SEQ ID NO: 4147115 - RNA, 64 nt, Human
aguguuggggcaaucuugggggggauucuucucuaaucuuucagaaacuuugucugcgaacacu

SEQ ID NO: 4147116 - RNA, 101 nt, Human
aguguuuccuuucaaccuaauuuuaacugguaauugcuucuccaugguuccucuggagaaucugucagugugguagugggaacaggggagaaggaaaaacu

SEQ ID NO: 4147117 - RNA, 90 nt, Human
aguguuucuuggacuuucuaggguagaggaaaaaugggacaaugaaauaacucuuuuauucuuuuaugucuguuggagucuugaaacucu

SEQ ID NO: 4147118 - RNA, 72 nt, Human
aguguuugggggccuuguaacagauagugaaaaggugguaugaucaauagcuugcagguguguccaagcacu

SEQ ID NO: 4147119 - RNA, 83 nt, Human
aguguuuggggguguccgcugccgcucagcgcccucugguccccacccaagaggggaagggccgcagccacccucugggcacu

SEQ ID NO: 4147120 - RNA, 55 nt, Human
aguguuuggggugauuguaaccucauuauuuuugacacuagcugccccgaaugcu

SEQ ID NO: 4147121 - RNA, 85 nt, Human
aguguuuucuccaguacagcugcagcagccuguucaaccgugugacauucagcaggcgguagcugccacuuccccgaaggcugcu

SEQ ID NO: 4147122 - RNA, 56 nt, Human
aguguuuuucaggagcagaacagggauuaauugaucuuuugucucugaauaauauu

SEQ ID NO: 4147123 - RNA, 63 nt, Human
aguuaaccuggaggacugcaauccaugugcuagcccacauggccauucaucgacuccagcacu

SEQ ID NO: 4147124 - RNA, 78 nt, Human
aguuaacuccugucuguauuauucaccacucugcccccaacuccuauaagaguggcuaugcaugacuggaauauaacu

SEQ ID NO: 4147125 - RNA, 80 nt, Human
aguuaagaaaguguggagauugaacuaaaacuuaggccuucuggcuucuaauuuaguucuaucuuuauaguuacauuacu

SEQ ID NO: 4147126 - RNA, 76 nt, Human
aguuaauaagcugaggcucuggcugcagaaccugaacucuuaaccccucugcagaauugucucaagcuagauagcu

SEQ ID NO: 4147127 - RNA, 130 nt, Human
aguuacagaucacccacucauuuccuaggaaucuuugcccagagacucagccuccagucagaggaggcaccacucaucucuggggcgggugggauuuuaccaaggaagagucaggucguucuguuuuccu

SEQ ID NO: 4147128 - RNA, 94 nt, Human
aguuacaggugggcccugcgccugcugcauccucacccuugugauggggcgacacuugggagggugugggcagcuguaaagggcacuggagacu

SEQ ID NO: 4147129 - RNA, 77 nt, Human
aguuacaucaucuacagaauggagggucagagauaccugaauacguauuuaagaucuaucccauuuuguauguuacu

SEQ ID NO: 4147130 - RNA, 59 nt, Human
aguuacauucugagcugaguaguuuaaaaccacuauuaagcucuccaggaaauguaucu

SEQ ID NO: 4147131 - RNA, 84 nt, Human
aguuacauuuuccuucugaauucaccauguucuccagaagguaggcuugugaacuuccagaugauaaacaaggagacuguaacu

SEQ ID NO: 4147132 - RNA, 62 nt, Human
aguuacccugucuguauugguuugcuaugguugccauaaaauauaucacagacugggugguu

SEQ ID NO: 4147133 - RNA, 78 nt, Human
aguuaccugagugcuacccagucucugucaauuucguacaucagagucucccagcaccugguguagcacucaggugcu

SEQ ID NO: 4147134 - RNA, 73 nt, Human
aguuacucacugaggguuuauuuugauauuaacuacuuauuuuccagugucuaccaaccgucuaguaguaauu

SEQ ID NO: 4147135 - RNA, 77 nt, Human
aguuacugagucccccccagguuugccacacugaaccagaaacaccagugagggccuugggaggagggucagaaacu

SEQ ID NO: 4147136 - RNA, 62 nt, Human
aguuagaaggaauucuagaagguuuuguuuaagauaacaaaaguguaggaauuccuuaugcu

SEQ ID NO: 4147137 - RNA, 89 nt, Human
aguuagauaaagccccugauaguugcuacccugcaaacuuaauguuucucuagcagcuugcacacauauuagacgguaaauauuucacu

SEQ ID NO: 4147138 - RNA, 72 nt, Human
aguuaggagaagguaucucugaucuccgagauacaaugcauggaucgcgaucuugaaauaucuuuuccuacu

SEQ ID NO: 4147139 - RNA, 77 nt, Human
aguuagguaaaaauauguuuuccaguugucaucuuaaaauagagacacagaacacaaaagcauagguaagccuaauu

SEQ ID NO: 4147140 - RNA, 55 nt, Human
aguuaguaugcaguuggccagaauaacucuuuuuccccgcugccugcaacugacu

SEQ ID NO: 4147141 - RNA, 65 nt, Human
aguuagugcauguaaugugcuuagagcgugccuggcaugccagaagugcuuuauaaguguuaacu

SEQ ID NO: 4147142 - RNA, 68 nt, Human
aguuagugugcucugguugccaugcugugaacgguuaagugcagugagguauuaccagggccaggacu

SEQ ID NO: 4147143 - RNA, 76 nt, Human
aguuauaaggcuugauauuuacagucuuuauagaaguaaaggaccccauguaauuaucaaauaguccuagguagcu

SEQ ID NO: 4147144 - RNA, 108 nt, Human
aguuauaauugaauuaaugauaugggcaagugugagacacacaaaauuaacauuugaagaggccugguuuaauuuugucuuuuacauauuugugucuccaauuauacu

SEQ ID NO: 4147145 - RNA, 82 nt, Human
aguuauaggguacauguacacaaugugcagguuuguuacauauguauacaugugccauguugguguacugcacccauuaacu

SEQ ID NO: 4147146 - RNA, 68 nt, Human
aguuauaggugguuuugagaauacuucuuuccaguuugggucaagagugaucagagcuuuauauagcu

SEQ ID NO: 4147147 - RNA, 71 nt, Human
aguuaugaagauuuucggguacuugauaaacaucuucaucuguguauuuaugaccgaagauuuucccagcu

SEQ ID NO: 4147148 - RNA, 110 nt, Human
aguuaugccuccuuuaaagcaagacagaccacgugacagggccccaggaucgauuuuuaugcacuaagggcucugcgcacgguucuuuuugcaaaugaacuggugugucu

SEQ ID NO: 4147149 - RNA, 129 nt, Human
aguuauggcuuuuguguucauucuucaaguauucugugauuuguguuuaauacaaggaccucccagaccugacauugcaaggguagguuuaaauauaaauucuagauguugagaggugauauaugaccu

SEQ ID NO: 4147150 - RNA, 56 nt, Human
aguuauucagggacauuuacucuaagaagcaagagauuugguggccugcaguggcu

SEQ ID NO: 4147151 - RNA, 66 nt, Human
aguuauucagugaauuucaggucaagagucagucaugauuuuugcccugcaguacauaaauuggcu

SEQ ID NO: 4147152 - RNA, 62 nt, Human
aguuauugaguaucuauaaugugcuacauaguaugaaaagugcaagggauacuacauugacu

SEQ ID NO: 4147153 - RNA, 127 nt, Human
aguuauuuacagugugaagagugcucugagauugaauuucucagcauaucaaaaccaagucagccuguuauugauggcugugauuuacucagugagcaaaaauuucucuacuaacaauguuauaucu

SEQ ID NO: 4147154 - RNA, 57 nt, Human
agguggccaagacuguuugacaugugacccaggucccagacccucuagaggccaccu

SEQ ID NO: 4147155 - RNA, 107 nt, Human
agguggcgaaggcuguggccacaccauggucucagaugcugaggcaggccuaugugacugccaguggguaggccauggugaguggagaaaacaggcaguuguccccu

SEQ ID NO: 4147156 - RNA, 83 nt, Human
agguggcuaauguuuccaucaaauuugaugacccucuaaauucaggcuagaguuauuacagagugaugugacuugguccaccu

SEQ ID NO: 4147157 - RNA, 126 nt, Human
agguggcugacauuuuuagcccccggggugggaugucacagacggcuguuuuuacguugucggggaaccagucagcaaaguagcugcuguucuuaucuugaauguugaacauuuguucauccaccu

SEQ ID NO: 4147158 - RNA, 92 nt, Human
aggugggaaguaggagugagacacaaacacauuuagaggagaugacaaggauccuuugcauuuauguguccauuuuuaaacuguucugcacu

SEQ ID NO: 4147159 - RNA, 56 nt, Human
aggugggccucgagcauccccugggcugugucagcacagggcucugggccuggccu

SEQ ID NO: 4147160 - RNA, 61 nt, Human
aggugggugcagggggcuucuuagggcucuccaaauacuccuuagccaccccugaccuccu

SEQ ID NO: 4147161 - RNA, 84 nt, Human
agguguagcucauauuccagaguuuccuguaugagcaggcuaaaauuacugaccacaggacucucugaaaauguaccuauacuu

SEQ ID NO: 4147162 - RNA, 71 nt, Human
agguguauuuccucagggcugcuucuugcuuguucucagagaaguuggccaaucacugacaaaaugcauuu

SEQ ID NO: 4147163 - RNA, 79 nt, Human
aggugucaguggugucuaaaguauagugauaaaugguucaggaugaauguuugucaucccuuuugaaacugagacacuu

SEQ ID NO: 4147164 - RNA, 63 nt, Human
agguguccaggaagaugcuggccuggccaagccauuugucugggcccuucuugcuggaggccu

SEQ ID NO: 4147165 - RNA, 60 nt, Human
aggugucuggauggguguccuugugaacuguggcucugaggacacccugagacagaacuu

SEQ ID NO: 4147166 - RNA, 79 nt, Human
aggugugugugagugugugugcgugugugcauguguguguguguguaugcaagugccaugugcacagugccaaccaucu

SEQ ID NO: 4147167 - RNA, 63 nt, Human
agguuaaacuuccugcagggcuuucucugaagucacagccauuaguucugcagaggcaaaccu

SEQ ID NO: 4147168 - RNA, 83 nt, Human
agguuaaggaaauuguucccuaaauguagcauugcucggauugacagcugcugaagugagagaauugcagguuucuuaaaccu

SEQ ID NO: 4147169 - RNA, 65 nt, Human
agguuacaugaucugugugacuuugcuagggcugccguaacaaaguaccauagauuggguggcuu

SEQ ID NO: 4147170 - RNA, 102 nt, Human
agguuagcaggugauggagcuggugauuguguuugugcauaucugagggugugauaagccccagcugguuuuagcacaguuagcucucagugcuugaguccu

SEQ ID NO: 4147171 - RNA, 60 nt, Human
agguuagugcugaaaugacaugggaacuagaccauuucuaaacuggauucagccuggcuu

SEQ ID NO: 4147172 - RNA, 55 nt, Human
agguuaugaagugguagagcugagaucuggaccagcucugaugacuuuacaacuu

SEQ ID NO: 4147173 - RNA, 66 nt, Human
agguuauguuuuauuuucugcuuauaacaagcaagcuuaugagcagucagacaagcaucacugccu

SEQ ID NO: 4147174 - RNA, 77 nt, Human
agguuauuggaagaaaacuucauggccgaagaaugauaaagaucguuuucuucacuuugcaaguugcucagaaaccu

SEQ ID NO: 4147175 - RNA, 120 nt, Human
agguucacuuggggaguuuguuaaacagugcagauucccgggccucucccuagaaauucugauuuaguaaauuuggguugggcccagagaauccacagguuuaagcuucccggggauccu

SEQ ID NO: 4147176 - RNA, 78 nt, Human
agguucacuuuauacucaguuuccugcuaaaaguccuggcuuggagucagcagggccugagugaccuaacuguggccu

SEQ ID NO: 4147177 - RNA, 55 nt, Human
agguuccaucaccugcaguggagagcaagugcuguccucugcagugagguggccu

SEQ ID NO: 4147178 - RNA, 113 nt, Human
agguuccucaaaaaaaccucugucuguuuauucaucaguuaauguaaguauguagcaucauugcuucuuuaaaugauagucaacaaggagagagaauaaugaggacaggaccu

SEQ ID NO: 4147179 - RNA, 71 nt, Human
agguuccucuuccucuggccugaugccaccucaccccaauuuccaaggcacaggcucugcuagaggagccu

SEQ ID NO: 4147180 - RNA, 96 nt, Human
agguuccuugaugugccuuucaggaacaaggccuaugggacucugugacucaggaacacaguacuuuuccugauggcaaggcagcaucaagauccu

SEQ ID NO: 4147181 - RNA, 93 nt, Human
agguucugugauuagcuaugugauuuaaacaagguuggauaaguuucuuacuguuguaauacuuagaucacugaauagucuuguugagaaucu

SEQ ID NO: 4147182 - RNA, 73 nt, Human
agguucuguuuuaggaacauucgucuuguagagguaagaagacugcuucaagaaucuuccugaccacuaaccu

SEQ ID NO: 4147183 - RNA, 56 nt, Human
agguugaccgagcaaguggccaccuuauuggcucucaagcacuugcuggucuaccu

SEQ ID NO: 4147184 - RNA, 77 nt, Human
agguugagguggagaaggaggagggggcugcuguggcgggggcagaggcggcauccccacuuccuccugcccggccu

SEQ ID NO: 4147185 - RNA, 106 nt, Human
agguugcauuaauuuauacucccaccugcagaguacuucagggucucauccauucuuugaagccauuacuguguuagggggcacugucuuuauucaugaacagccu

SEQ ID NO: 4147186 - RNA, 79 nt, Human
agguuggagugcaauggugaguucucagcuuauugcaaccuuccccucccagguucaagcaauucuccugccucagccu

SEQ ID NO: 4147187 - RNA, 76 nt, Human
agguuggcgcuaaaguauuugugauuuuuaccauugaaaguaauggcaaaaacugcaauuacuuuugcaccaaccu

SEQ ID NO: 4147188 - RNA, 72 nt, Human
agguuggcuaugagagcuuuagugggugcauaaagaauaucacuaauccgccaggcuugguagcucaugccu

SEQ ID NO: 4147189 - RNA, 76 nt, Human
agguugguacaaaaguaauuacgguuuuugcuuuuaaagguaauggcaaagauugcagucacuuuugcaccaaguu

SEQ ID NO: 4147190 - RNA, 92 nt, Human
agguuggugcaaaaguaauugcgguuuuuaccauuauuuaacuuuugccauuacacuaauggcgaaaaccacaauuacuuuugcaccaaucu

SEQ ID NO: 4147191 - RNA, 80 nt, Human
agguuggugcaaaaguaauugcuguuuuugcauuacuuuuuaaaaaauggcaaaaacugcaauuacuuuugcacuaaccu

SEQ ID NO: 4147192 - RNA, 76 nt, Human
agguuggugcuaaagucauugcgguuuuugucguuaccuucaguggcaaaaaccauaauuacuuuugcaccaaccu

SEQ ID NO: 4147193 - RNA, 95 nt, Human
agguugguuuguggagcuuguauaaacaagacuggccaacuuugcacaguugugagaauuagccggauucuuguuuugccuuuaagagcaauccu

SEQ ID NO: 4147194 - RNA, 112 nt, Human
agguuguuguuguucuugcuguuuuuaagaacacaugagauuuauauuuuuggaggccuguguccuucugagauguuguuuuacagauucuuuaagcgagaccuaacaauuu

SEQ ID NO: 4147195 - RNA, 79 nt, Human
auaguuuccuaagaauucuaggaagagacuggguuauuacccucccauuuccauguagcaauuuucucaagggugcugu

SEQ ID NO: 4147196 - RNA, 77 nt, Human
auauaaagacaauguucugucugacuugucagugcuuauaugaucauagacaggcucacauugacuguucuuuauau

SEQ ID NO: 4147197 - RNA, 83 nt, Human
auauaaucuccuucccaugagugugggcaggauccaugaaugugauggaguuaugcuacauuauauggcaaaggagauuuuau

SEQ ID NO: 4147198 - RNA, 70 nt, Human
auauaauguaaaaugugcuuagacaaggcuaaggucaccuagccugucugcgucacgcuuauuuuuaugu

SEQ ID NO: 4147199 - RNA, 130 nt, Human
auauaaugugacugaauuauuaaaaggcaagugucaccagcgugagcauaggaccaagggcagucauguugcacuaacacagcuggugcacuagcucugauucuaaugauauauucagcauucaaaauau

SEQ ID NO: 4147200 - RNA, 64 nt, Human
auauacaagugagaagaagaguucugaagucuagguuugaaugagcucugcauucucaguaugu

SEQ ID NO: 4147201 - RNA, 112 nt, Human
auauaccauguggcauuacuugcuuuuagcuugcgguguuuugcaguucaggauuuagugacauugaaaguaauaacuuuguucaagugcaagugaugcaaugugugugugu

SEQ ID NO: 4147202 - RNA, 74 nt, Human
auauacccacaaacauauauguaauuuuucacaaauauguaacugugauaacaugcaugcuuuggugggugugu

SEQ ID NO: 4147203 - RNA, 114 nt, Human
auauacugcagauaaaauuguggacugagcaguuauauaacuaucuagaugcauuuuauuuacuaagagcagugggccuuguuaacuucaguucuaagaucgauuuaaguauau

SEQ ID NO: 4147204 - RNA, 80 nt, Human
auauacuguauaggacaagucauaauugcaauguauaaucauguuauguacauucauggugacuuguauguauggucuau

SEQ ID NO: 4147205 - RNA, 81 nt, Human
auauacuuacuuccucacuuacuuuugugguuugguagcuuuuucuuuacacauuuaggagguggggaagcacagagauau

SEQ ID NO: 4147206 - RNA, 81 nt, Human
auauagcacuaucuuuagcauuacuuuauucaguaaaugagaacugcaaaaguucugcuggagaggacuggaugcauauau

SEQ ID NO: 4147207 - RNA, 59 nt, Human
auauagccagcuccuggcagaguuuuaaugacaacauucugggagggcugguucaguau

SEQ ID NO: 4147208 - RNA, 90 nt, Human
auauagcuuguuuuguucaaguagaaagugaccaaauucuccuagacugagaaaagauuggcauguuugcuugugcauaucagauugugu

SEQ ID NO: 4147209 - RNA, 94 nt, Human
auauauucugacugguaucaaacaauuaauuagauuuuuacaaagaauauaaaauagauuuuaauuaguguauugguauguuggucaaauaugu

SEQ ID NO: 4147210 - RNA, 108 nt, Human
auauauuuaaaaaauauaccucuucugccagugaaaauaaugauuaucccuggaaggguaaauuauuauaaaauuccugugaaggaugaggcuaugaauuaaauuuau

SEQ ID NO: 4147211 - RNA, 57 nt, Human
auaucaaaauaaacagcaugcaggcuauugggccuacuugugcuuauguuuagauau

SEQ ID NO: 4147212 - RNA, 58 nt, Human
auaucacaggaaaggaagauacacagauaaauuuuggauuuaucuuuuccagugguau

SEQ ID NO: 4147213 - RNA, 65 nt, Human
auaucagaaauaguaagcagagcucacggaauuugugauuuaaugcaaugcuguagucuugauau

SEQ ID NO: 4147214 - RNA, 70 nt, Human
auauccaauguguuccauugcaugugccuuuugcuccagaggccaaaaaugcaaggacauguaaugaugu

SEQ ID NO: 4147215 - RNA, 63 nt, Human
auaucucauuaccuugcuguucugcuucauuaucugaccagccucgggcagggugcuggguau

SEQ ID NO: 4147216 - RNA, 62 nt, Human
auaucucucugucuuccugagaguuuuauuaaauguuaaaguuuucugugauagagaggugu

SEQ ID NO: 4147217 - RNA, 80 nt, Human
auaucucuggcauugaugggugugguugcucuacuaauuccuagggcagggcagcgcugauuaggguuugccagacuugu

SEQ ID NO: 4147218 - RNA, 56 nt, Human
auaucuguaucuauauuucaauagauguguaguuauagagauauagaaguagaugu

SEQ ID NO: 4147219 - RNA, 84 nt, Human
auaucuuaaagggaagcaaauucaaauuagaauguuuugccugugacaagccucgcuuuggauuucgcuuuccaacucagcugu

SEQ ID NO: 4147220 - RNA, 63 nt, Human
auaugaaaauguuuuagcuguaggauguacucuuaagguucccaaagcaagcaguuuucaugu

SEQ ID NO: 4147221 - RNA, 60 nt, Human
auaugaagcuguugcuucucaagauguacaguaaguacacugaaagaagccagcuugugu

SEQ ID NO: 4147222 - RNA, 79 nt, Human
auaugaccagcuuugcauuuugauaagaucacuuuggcuacuguguugaaagauguuaggaaaguuaggguggacauau

SEQ ID NO: 4147223 - RNA, 123 nt, Human
auaugacuaacaguuuggauuuucaaguucaagaauguuugugcagagucaucugaguccucccuacaggugguuuuuuucagcacauuuuacuuagucaaaucaucaaacuauugaucaugu

SEQ ID NO: 4147224 - RNA, 58 nt, Human
auaugacugagguugaauaaugaagcagggaugcacauguuuuucuaucucagcgugu

SEQ ID NO: 4147225 - RNA, 130 nt, Human
aguaucaguauccuuccucacuaguucacuugcuuuugucauugugauuuucucugaauuuugagaagguauauguacaauagacauuuaaguuggauacuaaaaggguauaaaggacuucugauuuacu

SEQ ID NO: 4147226 - RNA, 75 nt, Human
aguaucagucuuagcagauaguagaacauguauaugugauuuaugacacauucuuuugacuguuuaauugauauu

SEQ ID NO: 4147227 - RNA, 68 nt, Human
aguaucaucuuccauguucuugacacaguggcacuaaaucaugugccaguggagcacauggugaagcu

SEQ ID NO: 4147228 - RNA, 60 nt, Human
aguaucaugacggauggaaucuccauuaaaaggagaucuuaguggccaaugucagaugcu

SEQ ID NO: 4147229 - RNA, 73 nt, Human
aguaucgucucuuagucaauauuuucuggugacaagaaauccacucaaaauaccaccacuaggggaggauauu

SEQ ID NO: 4147230 - RNA, 67 nt, Human
aguaucuguuucagucccuguguucaauaauuuugguuauacaccuuggaguggaauugucgguauu

SEQ ID NO: 4147231 - RNA, 56 nt, Human
aguaucuuuacuuaaauagucaguaugccaggauggcauauuuugagugauguauu

SEQ ID NO: 4147232 - RNA, 74 nt, Human
aguaugaauuauauucuauuuuaucuuauaugcacacaguguaaaaaaaucuagaggaggaugugaugcauauu

SEQ ID NO: 4147233 - RNA, 76 nt, Human
aguaugaccacauggagauuuggaaagcagcuggaucacauaacugugcugcugaauuaaacucuauguggcagcu

SEQ ID NO: 4147234 - RNA, 73 nt, Human
aguaugaccuaagguccaguggaaacuagagugaacauuacucuagguuugacauggacugagcagguucccu

SEQ ID NO: 4147235 - RNA, 68 nt, Human
aguauuagcagacaagcugcuggaaaaguuaaaucuuuaaaaaguuugcaauuugugcugcaaaugcu

SEQ ID NO: 4147236 - RNA, 69 nt, Human
aguauuagggauuuuuauagguauuuauagguauuuuuuauaaagucauuaugaagaucuaauuaagcu

SEQ ID NO: 4147237 - RNA, 75 nt, Human
aguauuauagauauaggacaguacuguaucauaccucugugaauguaaaauaucuuguacuugcuuuaugauacu

SEQ ID NO: 4147238 - RNA, 64 nt, Human
aguauucuggaauucuaugugagggacaaacacucagaagccagcagcaguguucuagaauacu

SEQ ID NO: 4147239 - RNA, 60 nt, Human
aguauuuagcugacucgcuacacucuacggaagcaauaugaagugaucugcugcaguacu

SEQ ID NO: 4147240 - RNA, 70 nt, Human
aguauuucugauucuaugcuggaaguaauaaugacugaguacuuuauuucaaaguggagaauuagacacu

SEQ ID NO: 4147241 - RNA, 62 nt, Human
aguauuuguggacauugccaaacgucccuugaggggcaaaauuggccuuugucucagacacu

SEQ ID NO: 4147242 - RNA, 75 nt, Human
aguauuuucugagacacaguggcugaaaaguuguaauuuuaugauuuaucagaggcuauguuucauauugaugcu

SEQ ID NO: 4147243 - RNA, 71 nt, Human
aguauuuuuguagcauuuuuccaguguuggcugagcugcuuucauuagaagaacaguuauauuaacuaucu

SEQ ID NO: 4147244 - RNA, 129 nt, Human
aguauuuuuuaaauuaugacuuuauuacuuuaagugggguagaggcaaauauuuguuuuaaaaaaggcaagauucagagucuucuaaccucauaucuucaauguuugaaagaauaaugaugaauuuauu

SEQ ID NO: 4147245 - RNA, 110 nt, Human
agucaagcccuaggggagcuuagaaguguguggugggggaaaggguuugugaccuaagagaacccauguuucucccuuuauaagacuguaauucuucccucucuuugacu

SEQ ID NO: 4147246 - RNA, 84 nt, Human
agucacaagcaaaauggcuuuugcacuuaaaucggacacaaaauccauuuuggcucacuguaagggcuaaugcuuucagugacu

SEQ ID NO: 4147247 - RNA, 58 nt, Human
agucacaggcaagagggcuccagauuuaggucuuugguucucagcccugccguguacu

SEQ ID NO: 4147248 - RNA, 97 nt, Human
agucacagugucuucaggauauguagagauaaaauccaaauaugauuauuucaaauuccagggucagcucauacaugaucaacugagguacuggacu

SEQ ID NO: 4147249 - RNA, 60 nt, Human
agucacauggacucaggaugacaaaagaagaauccuugacaucuguuuugucccugugcu

SEQ ID NO: 4147250 - RNA, 76 nt, Human
agucacguucccuuuggaggaucuaagggagaaucucuuuccuuuccuuuccaugcuucuagaggcugcguagauu

SEQ ID NO: 4147251 - RNA, 84 nt, Human
agucacucgaggccgggagggagcgcgugcagaggauggucccuggugacugucugcaauguuuucccauccuggccaggugcu

SEQ ID NO: 4147252 - RNA, 56 nt, Human
agucagagacccuagaucuaauuuauugugagguaaauuagggagggauucugacu

SEQ ID NO: 4147253 - RNA, 67 nt, Human
agguuuaggcuccugaguccacagcacaccaacagucuguagugcaguaucucugggagugggaccu

SEQ ID NO: 4147254 - RNA, 75 nt, Human
agguuucucugaggcaccaaauggagggguccagcuagcagcuggcuccuggucuggagcuucaaggagaggucu

SEQ ID NO: 4147255 - RNA, 126 nt, Human
agguuucuguugauguauuauuguugcuaucaugucuauuuuacgguaucuauuuauugcaggccacucaauucuuuguaauaauguaggaugauaaaugaguguguuaauaaccaacuagaaccu

SEQ ID NO: 4147256 - RNA, 80 nt, Human
agguuugaagagcuguaugccauaugauugcauaugaugccacagggaugccaaucauauggcauagagcucugcauccu

SEQ ID NO: 4147257 - RNA, 80 nt, Human
agguuuggguuuuaauuauaucugggcaguuagaaaaugcaauucuuuccuauggcucacaaauaauaaauuucaaaucu

SEQ ID NO: 4147258 - RNA, 119 nt, Human
agguuuguuuauuaaacauaaauagagaaugucaacuguaccuaaagaaagugcauugcuaauccaaagggcacucauuuuuacugcaauugagcauuaaauuuuacuauaaacuuccu

SEQ ID NO: 4147259 - RNA, 84 nt, Human
aguaaaacauuguuuaauuuuauuugacuuuaugacguugcuuuucaacaagcaaauguuaaauguguuaagacuuguuguacu

SEQ ID NO: 4147260 - RNA, 77 nt, Human
aguaaacaguuauuuucagcuaggaaagccacucucaaucagguagugguuucuuaagcugaaaaaggcuuuccacu

SEQ ID NO: 4147261 - RNA, 68 nt, Human
aguaaacauucuucaaauaucacucuuuguggaaaugcauuagagggaggcaagaauggaaguuugcu

SEQ ID NO: 4147262 - RNA, 58 nt, Human
aguaaacuguagcuacuuaacuaaaugauuucguguggcugagauccuacuguuugcu

SEQ ID NO: 4147263 - RNA, 78 nt, Human
aguaaagagcagauuugcuuucagccuuaaggauagagauacugccuaucacuggagugaaaggcaaacaugcuuacu

SEQ ID NO: 4147264 - RNA, 78 nt, Human
aguaaagcacuccagaauguuaccaguuagucugucaccauaguagcagcaucuggggaacauucaagauguauuauu

SEQ ID NO: 4147265 - RNA, 70 nt, Human
aguaaaguauccaguuauucuucuagggcugcuuagucaaguuaacuggaagauaugacaauaguuugcu

SEQ ID NO: 4147266 - RNA, 59 nt, Human
aguaaagugaagauauacuguuguccucauaaggggaaaucaaagaucuuuacuguauu

SEQ ID NO: 4147267 - RNA, 76 nt, Human
aguaaauggcugagcucccuguguguuggguaauuuauguuccuuuguccauugauucguucaacugccauuuacu

SEQ ID NO: 4147268 - RNA, 126 nt, Human
aguaaauuauucugcaaauauucugcuuauauuucauuggcccaaacuuagucgcaucaugccaccuugaggucaucugaaguacuaggcugagaagaaaauaauuugcaugacuuaauauuugcu

SEQ ID NO: 4147269 - RNA, 103 nt, Human
aguaacaagacaaccucaaggaguaaauauuuuauguaaugaauuaaccaugcaagguucauucauucaugaauguuaauuagaauccugagguuaaauugcu

SEQ ID NO: 4147270 - RNA, 66 nt, Human
aguaacugguccucggauguuguggaguugguaaauagcucuaauacaaggcaggaagcaguaacu

SEQ ID NO: 4147271 - RNA, 77 nt, Human
aguaagagcgaaaaauguguaaauauguuugaggacuacaaaaagcuguggcauaaguacauauuuuuauagaugcu

SEQ ID NO: 4147272 - RNA, 86 nt, Human
aguaaguugacucauguaaucuuuggauacagcuuaagcuuuugaugcuucugucaucucacugauauagaugagcugugcuuacu

SEQ ID NO: 4147273 - RNA, 110 nt, Human
aguaaguuggccaaagucacacagcuaggaggcagcagagccaggauuucaaucuccaggcucuaggcugcucuccauggagcuguugaaucacacauuuuguccuugcu

SEQ ID NO: 4147274 - RNA, 59 nt, Human
aguaauguccuaaggcuggcaggaagaugggaaguucccuggccuggaaggauaucacu

SEQ ID NO: 4147275 - RNA, 129 nt, Human
aguaauuaaugaaaugaaauaacuuauuaugauaaaugcccacugacuucagggauaaaaaguaauucauguuuuggauauaccucugggucauguuuguuuauaugaagaguuuucagcaguugaacu

SEQ ID NO: 4147276 - RNA, 77 nt, Human
aguaauuggaugcuacuucugugaugaaacuacacaagaugugaguuuugucuugcuagaaguuucugucccuugcu

SEQ ID NO: 4147277 - RNA, 91 nt, Human
aguaauugugcaagguuaauaugaacagcagaaggaauguaaaaauguaaaguggucuucuaauucuuauguaagcuuugucauaguuauu

SEQ ID NO: 4147278 - RNA, 76 nt, Human
aguaauuucucauuccgcuaaucauuugugaacuauuauuuaacugucagagucccauaguggagugacaaguucu

SEQ ID NO: 4147279 - RNA, 66 nt, Human
aguacaaagugcuccugguucucagggaagcagugauuuauuaaaagaacaccagggcauuuuacu

SEQ ID NO: 4147280 - RNA, 76 nt, Human
aguacaagucuggggauggugcugcacuugaguuaccuuuaaaugagaggcacaguuucauccccgggcuuauacu

SEQ ID NO: 4147281 - RNA, 61 nt, Human
aguacacaguagacuuucucauccuaggcauguggcuggagaggaggaaauaucuggugcu

SEQ ID NO: 4147282 - RNA, 73 nt, Human
aguacagacagcagcaauagcagugacauuuuccaaggacucuacggaugugucaggcccugcauuaugugcu

SEQ ID NO: 4147283 - RNA, 57 nt, Human
aguacagauuuagacacgauagguuguuggaaccuggcguugggauaagucagugcu

SEQ ID NO: 4147284 - RNA, 109 nt, Human
aguacagggccucguaguacucaucaauuaaggccaugacaucugaaucauugccucagaauuacacagggccuugauagaauuuaagaguggaguggggucugguauu

SEQ ID NO: 4147285 - RNA, 64 nt, Human
aguacaugcagaacuaacagauguuuuauacagauacaaaaauauuuguuauaagcaaugugcu

SEQ ID NO: 4147286 - RNA, 58 nt, Human
aguacauuaauuuugcucaauggccuuucuauaaaaugagcaucaaauugaugggacu

SEQ ID NO: 4147287 - RNA, 129 nt, Human
aguacauuacucaaugcuggaugcauagucagugcuuuauguuuaguauccauuuucaguaaauuauuauauuuuuugaaaacucaaaauguggagcacugaucagucuuguauauguguacaugaauu

SEQ ID NO: 4147288 - RNA, 73 nt, Human
aguaccaccaaacaauuugcauuuccuuagggaguaauuuuccuacaggacaaauagcaguugucaaaggacu

SEQ ID NO: 4147289 - RNA, 65 nt, Human
aguaccaguguuuguugagaaaggcaacuaagcuuuugguuggcuuuagcccaaaugacuggacu

SEQ ID NO: 4147290 - RNA, 72 nt, Human
aguaccaugcuuccugacuggucucuuggggccccuuuagucucccagucuuugccauggaagcauggugcu

SEQ ID NO: 4147291 - RNA, 68 nt, Human
aguaccauuaaaauggaauguagugaucauucagauucaacuaauguuuauuuuaugaaguggcuacu

SEQ ID NO: 4147292 - RNA, 88 nt, Human
aguacuacuucagugcuucuggugggcgugagggagaaaauuaaacauaagccacacuccuucauucagcaaguauuuauuaagugcu

SEQ ID NO: 4147293 - RNA, 69 nt, Human
aguacugcaggugguggcccagguuggucuuguaggaagcccgccguccuacgccaucauagcgguacu

SEQ ID NO: 4147294 - RNA, 60 nt, Human
aguacugggaauggagccugggccucggcaccaugccuagggccgccacuuuccagugcu

SEQ ID NO: 4147295 - RNA, 69 nt, Human
aguacugugcaguguuguaacccgaauacuuugcugguaugugaaguuuuugaaauauugaacagugcu

SEQ ID NO: 4147296 - RNA, 67 nt, Human
aguacuuacaauagugccuggcauagaguaugccuucaauacauguuagcuacuauuguuauaaucu

SEQ ID NO: 4147297 - RNA, 111 nt, Human
aucauggggagcuuuaaaaauuucugauacccggucacccuccagaaccaauaacaucagaauuucuaaggguaaaacccagggaucaguauuuuuuaaaccucuccaggu

SEQ ID NO: 4147298 - RNA, 68 nt, Human
aucauguuugccucuuauuugccagaagaaacauauauguaaauucugaaauaggagauagcugugau

SEQ ID NO: 4147299 - RNA, 63 nt, Human
aucauuaaagacaucacagauuacacaguauucuguguccugggucucugauucuuuuuagau

SEQ ID NO: 4147300 - RNA, 73 nt, Human
aucauucauauacuuuucuauagcuuucucaaauguccaaaacaccaugagggcuuggaagagaguagauggu

SEQ ID NO: 4147301 - RNA, 87 nt, Human
aucauucugcaagucucuagccaaaaggucacaugcuaacuugguacguauguauauauguuggguagaauacuugcuccagaugau

SEQ ID NO: 4147302 - RNA, 60 nt, Human
aucauuuaguuggcuugcuguaguggacucagacaauauauacaaguaaugcugaaugau

SEQ ID NO: 4147303 - RNA, 119 nt, Human
aucauuugguuuugugugacuuauccaugaaagccaucuguauuaagugaagcagcaacuuugcuuuacuuuccguggagaugaaagcuugaauuauguguacacaauuuuagaaugau

SEQ ID NO: 4147304 - RNA, 61 nt, Human
auccaaauuuagcaaguauuuacugacuaacuauugguuaaaagacacugcuagaugggau

SEQ ID NO: 4147305 - RNA, 70 nt, Human
auccaagauuggagauuccuggucuguguagaguauaugguuuugcacgaaaucuuucuagucuugugau

SEQ ID NO: 4147306 - RNA, 75 nt, Human
auccaaguauccucagaggcagaugguaagaaugaaaguucccacuaccaucuguucugacccaaauccuuggau

SEQ ID NO: 4147307 - RNA, 82 nt, Human
auccaauucagucauuaagacaacuggaguaaccagacuguaaaaugguuggucugguuauuucuuaaugauguaauuggau

SEQ ID NO: 4147308 - RNA, 68 nt, Human
auccacacucuccaagggcucccagacgucucucaccagaacaggagcucucuguccuugggagggau

SEQ ID NO: 4147309 - RNA, 84 nt, Human
auccacagcccacagccaggcguggcuucagcagccccuggacccugagggcauggggcccaugccgggcuuugugggcaggau

SEQ ID NO: 4147310 - RNA, 72 nt, Human
agucagagccugaaauugucugugcccaagucucuccucagaaauuuagcacagcauuuucccuuucugucu

SEQ ID NO: 4147311 - RNA, 112 nt, Human
agucagaggagagguguggagucuauaggacagaguucccugauggcccacaggacucugcaguccgaggccuccgggaaguggccuguugaaccaggacaaucuugugacu

SEQ ID NO: 4147312 - RNA, 90 nt, Human
agucagaguuaacaugugguucucuaguagcaguuucuuucuaauaaacuuuacuugaaagaacaugugugauagauuuugcucaugauu

SEQ ID NO: 4147313 - RNA, 80 nt, Human
agucagauaaugcuacaaauucguaaucaauuauuucacggugaaauuaaucaguuuaaggguuuggggauugacugacu

SEQ ID NO: 4147314 - RNA, 71 nt, Human
agucagauuuccuccuacgcuuaucacuuuauauguggaaaauggaguaaaagaguaggaggaauaaggcu

SEQ ID NO: 4147315 - RNA, 96 nt, Human
agucagcugguauagaagaaucaacugaaaauuggugagagugaagacuaucuuccuuuucuguugcuuuugauuucuauauaauccagguguacu

SEQ ID NO: 4147316 - RNA, 81 nt, Human
agucaggcagggcccuccccgcucagggcagggcucaaauuccagaccugcccgcaacagggcggggaggccagccuggcu

SEQ ID NO: 4147317 - RNA, 64 nt, Human
agucaguguucuggguuguaaucuguaaacuauugucuucacauaacucucacagaagcugacu

SEQ ID NO: 4147318 - RNA, 59 nt, Human
agucaguugcaguuuauggaugauucgguuaugguuuacucuguaugcuugcacugauu

SEQ ID NO: 4147319 - RNA, 58 nt, Human
agucaguuucccuggaaagcagccuguuagauggagcuuugagugcaggaagcuuacu

SEQ ID NO: 4147320 - RNA, 86 nt, Human
agucaguuugccaacauguacuauuaagaggccuaaaugcacacauuacugacacaaugggcuauaauugugcuuuugaaacugcu

SEQ ID NO: 4147321 - RNA, 72 nt, Human
agucauacaguguggcauguagucuuuugugaaauaggcuugaauucuauuuuuaccacuuauugugugacu

SEQ ID NO: 4147322 - RNA, 72 nt, Human
agucauauacugccuuguagauuauuagcauucgauguauaugugucuagucuacaugguuaguauuaagcu

SEQ ID NO: 4147323 - RNA, 82 nt, Human
agucaucagguuuugugaggaccucagcagagucuguccucaggcaggagucauugagagggguccuuggaguucuggagcu

SEQ ID NO: 4147324 - RNA, 76 nt, Human
agucaucauuuuuagcauaugggaauacauauuacgauaaagaaagaaguguucucuggucugaccaaugauggcu

SEQ ID NO: 4147325 - RNA, 70 nt, Human
agucaucccgcacugcucagcucucugugagaauaauuaucgucaccuugaaugcagcagcguggagacu

SEQ ID NO: 4147326 - RNA, 62 nt, Human
agucaugacuccauuggucaagcuaaaagaaguauuagcaaaggccaaguggauucaugauu

SEQ ID NO: 4147327 - RNA, 88 nt, Human
agucaugagagucaaauaagaagaugcaugugaaguacuuagcacagggccuaaagacuuuauaugcaucacauuggcuguuauuauu

SEQ ID NO: 4147328 - RNA, 92 nt, Human
agucaugaggagacaggagagagcucugugccugggauaguuguguugugacauucuaaaucagagagcucuguuuuagucaacuugagauu

SEQ ID NO: 4147329 - RNA, 58 nt, Human
agucaugggaucugcaaaagagguaguuuuacuacuuucuuucugauccuuaugcacu

SEQ ID NO: 4147330 - RNA, 67 nt, Human
agucauuuucugccuguaaucuauucagcuucucgagugcugaccaagugcuuggcagagaauggcu

SEQ ID NO: 4147331 - RNA, 56 nt, Human
aguccaaagcagaugagggccagggaauggaugcuggccuugucuggugaaggacu

SEQ ID NO: 4147332 - RNA, 63 nt, Human
aguccaaaugguuuuugcauauucagguuaucuuugaccugaagcagagaaaaccagaagacu

SEQ ID NO: 4147333 - RNA, 74 nt, Human
aguccaagaguacaaaguugcaguuaugugauuauagucaguaauacuguauacugcaaauuugugaagagacu

SEQ ID NO: 4147334 - RNA, 57 nt, Human
aguccaagaucaaggugucaacagguuugguuucuccugacaccucucuccuuggcu

SEQ ID NO: 4147335 - RNA, 99 nt, Human
aguccacaucuuggggauccugucccaugcuuccaccuagugcaauaggacagacuguugugaggaugugagcgugaaccagggcccaggacaagggcu

SEQ ID NO: 4147336 - RNA, 70 nt, Human
aguccagagggcagcagcuccuccuagcuggaccagaauccagcuuccuggcuuccugcccuuccuggcu

SEQ ID NO: 4147337 - RNA, 56 nt, Human
aguccaggucucugagucacaacagaagaaaacugcugaacaagagcaccuggauu

SEQ ID NO: 4147338 - RNA, 88 nt, Human
aguccagugcccagccagcucuuauuuucucuccuaaaucugcaguggcagauugagcuggggaugagugaggcuuguggucuggauu

SEQ ID NO: 4147339 - RNA, 62 nt, Human
aguccaugaugaaaccagauccaaggucuugaucuugaucuuuuuacuacaucauggugacu

SEQ ID NO: 4147340 - RNA, 79 nt, Human
aguccccacagagccgucugcaaagcaugagaacuggagcauucauuuacuuagcaugcaguguucugcccaggguucu

SEQ ID NO: 4147341 - RNA, 60 nt, Human
agucccuggauugucucugucaagcaccaucugugcacaccagagacauauccaaaggcu

SEQ ID NO: 4147342 - RNA, 87 nt, Human
agucccuucugccuagcugccaggcagggagauggcugggcaugcagcuuguccuccauuccuacaagucugguaggcagugugacu

SEQ ID NO: 4147343 - RNA, 64 nt, Human
aguccuaaacucagcacauucuggguggucaagcacucuggccaugcugcaguuucaugggacu

SEQ ID NO: 4147344 - RNA, 69 nt, Human
aguccucauuucugcaacccugaaaggcggcuauuccauccccauuuuacacuugaggaaacugaggcu

SEQ ID NO: 4147345 - RNA, 57 nt, Human
aguccugcccccuggaacauccaaacccccugguccagguuuucugaaggcaggacu

SEQ ID NO: 4147346 - RNA, 80 nt, Human
aguccuggaggaguaauuaguguccagcuucugcuuaucaaagcuuugccaggaggcuugguccacaugauuccaggauu

SEQ ID NO: 4147347 - RNA, 81 nt, Human
aguccuggaggcuagagguccaagaucaaggugccagcaggguugguuccuucugaggucccuguacauugcuuguagacu

SEQ ID NO: 4147348 - RNA, 65 nt, Human
aguccuuacaccuggaaccuauaauccaaccuuauuuggaaaaaugggucuuugcaggugggauu

SEQ ID NO: 4147349 - RNA, 59 nt, Human
aguccuuccucugaucuaggguaugaaucugugugugcacugggaaagaaggagggauu

SEQ ID NO: 4147350 - RNA, 70 nt, Human
aguccuuggcuuccacugugugcccccuggauggugagggcuagaaggggguagcaugaggagugggacu

SEQ ID NO: 4147351 - RNA, 78 nt, Human
aguccuugguuggaccugacagcacgcuccagucuuaccuuucacugguagcacagcagcgucuaaccgauagggacu

SEQ ID NO: 4147352 - RNA, 59 nt, Human
agucgcuguuggucguggcacugaggcccagaucaugccaccuccucuaacaaguggcu

SEQ ID NO: 4147353 - RNA, 58 nt, Human
agucuagaggauggguccagaugggggaugggcuuccaucuuggaagcaucucugacu

SEQ ID NO: 4147354 - RNA, 57 nt, Human
agucuaggggagaggccucaggagaaaccaacccugcuggcaccuuggucuuggacu

SEQ ID NO: 4147355 - RNA, 66 nt, Human
agucuauccaauguucagaucugagauucagcaagaaauugccaaauaaagcugaccagauggacu

SEQ ID NO: 4147356 - RNA, 87 nt, Human
agucuaucccaauaugucucugcaguugggugacccaauaugucucugcaguugggugacccaauaugucucugcaguugggugacu

SEQ ID NO: 4147357 - RNA, 79 nt, Human
agucuaugaaauuuuuucucuuguuaauguacugaaaguuguaucucauucaguuucacuugaagaaaagacauggacu

SEQ ID NO: 4147358 - RNA, 64 nt, Human
agucuaugcuuaaaauaugaaacugagcaaaagucauuggucaauauuuuuaugagcauagauu

SEQ ID NO: 4147359 - RNA, 63 nt, Human
agucuauuuuagcugcauauguuuucuguauuaauugggugauguuagcugcuauaguagauu

SEQ ID NO: 4147360 - RNA, 56 nt, Human
agucuccacuugacaucagcagggucacgaaggacucagaugaccaagagggggcu

SEQ ID NO: 4147361 - RNA, 65 nt, Human
agucucccuccccgcccgacuucaccaccagagccaccagaagaguuugcaagggaugggagauu

SEQ ID NO: 4147362 - RNA, 97 nt, Human
agucuccuggcagcggagcuccugcugcccgccaugggugucugugaugcugccgugcccacugggggcugcaggcacuccagcaucaggauggacu

SEQ ID NO: 4147363 - RNA, 99 nt, Human
agucucugacauccccucaccaggucuguacagccuggcucugagaggcucugucuggguccgggacuguggauguguguggggagucaggcccaggcu

SEQ ID NO: 4147364 - RNA, 75 nt, Human
agucucuggcaucuccugguacaauagauguucacuagacugugagcucugagacaguagagauggcaccugacu

SEQ ID NO: 4147365 - RNA, 60 nt, Human
agucucuuccucaugcauauguacuuuccuccacauuguacgcugcaugaggaggggccu

SEQ ID NO: 4147366 - RNA, 58 nt, Human
agucugaaggauggaagguaccguagagaucaucgacccauuccuucaucuuucagcu

SEQ ID NO: 4147367 - RNA, 67 nt, Human
agucugaagguacaauagaaauaauuaagcacacaaugugguuugauuaguuuuguugaagaaggcu

SEQ ID NO: 4147368 - RNA, 77 nt, Human
agucugaauguuacagagcccuuuggaaaauggcuuaccuggcuucugucaugcucauguaauuguacauucagacu

SEQ ID NO: 4147369 - RNA, 56 nt, Human
agucugaguuaguggaaauguagugaaugcccuaaguauuucacagauucaugacu

SEQ ID NO: 4147370 - RNA, 56 nt, Human
agucugauggcaguguagugcuuccugaaucauggaagcaaggcuaaaucaugauu

SEQ ID NO: 4147371 - RNA, 95 nt, Human
agucuggaaauaucuuuguguuugcuuacuuguaugcugccucuauuccuagaagucugcaaacucagugagauaaaaguggaccuuuccaggcu

SEQ ID NO: 4147372 - RNA, 66 nt, Human
agucuggagugauuaugugggaaguaugaaacaugccucaacccacaauggucuuacuacccgauu

SEQ ID NO: 4147373 - RNA, 76 nt, Human
agugggggguugggcugaggagggcguggccugugauugacagccgucgcucccucccucggccaccucccccacu

SEQ ID NO: 4147374 - RNA, 78 nt, Human
agugggggugccccagacacgcauguggggucuagugugaccaccagcagcggugugagggugcauacagcccccacu

SEQ ID NO: 4147375 - RNA, 96 nt, Human
aguggggguugcaggagagaacuggcuccuucuagacaggggaauaucgugguuaggguucuggagucagauucaaucugggcucugucaccuacu

SEQ ID NO: 4147376 - RNA, 68 nt, Human
aguggucagaauauuccauaagggucuuagcaagaaggccaguucucuggggaugcacucugaccacu

SEQ ID NO: 4147377 - RNA, 56 nt, Human
aguggugagaccuggugcuuuccuaaugucuaaggaccagucccuagucuuauccu

SEQ ID NO: 4147378 - RNA, 61 nt, Human
aguggugauaaccacuaucauagcuaccauuaaauuauucguugugacugguugucucgcu

SEQ ID NO: 4147379 - RNA, 57 nt, Human
aguggugaugaggauaacauuuauccaauaaauaaauguguaaaccuccauuacccu

SEQ ID NO: 4147380 - RNA, 84 nt, Human
aguggugugauuccucugggaauucugagcaagcaaauauuuuuguuagacaugacagaauuuuccaggcauguuauuaucacu

SEQ ID NO: 4147381 - RNA, 66 nt, Human
agugguguggggauaagcacucugccucugguuugcauagauuuagguucuaaucccagcacugcu

SEQ ID NO: 4147382 - RNA, 102 nt, Human
agugguuauuugaagcaucgugugcucaguggagccugagacuagccucugaugugaauauucugaggaaucuugacacauuugacagucagguagcucacu

SEQ ID NO: 4147383 - RNA, 55 nt, Human
agugguucaugccuguaaucccugcaauuugggaggcugaggcgggaggaucacu

SEQ ID NO: 4147384 - RNA, 70 nt, Human
agugguucuuauuuauuucgguuccuuagaacauuuuuaaauugccuuaggagcuaauucauaagccacu

SEQ ID NO: 4147385 - RNA, 76 nt, Human
agugguugagugcauaugcaugagauuugguucugcauuuauuucggauggucucauguccuaugugcuuaucacu

SEQ ID NO: 4147386 - RNA, 130 nt, Human
aguguaaaaugcagaguguugucaacuuaucacaccaagaauauuuuuuugcaccuuuuuaguuuggaagggucaaauugagaugacagaggaauaguggauaagagcuauagugcuauuaaauuacauu

SEQ ID NO: 4147387 - RNA, 62 nt, Human
aguguaacuugcuggaaaaacuaggacccaagagaccagcuccuaguugccaaguuaccacu

SEQ ID NO: 4147388 - RNA, 56 nt, Human
aguguaauaccugcauauacacagaaggauggaaguguauggcaggccgaggcacu

SEQ ID NO: 4147389 - RNA, 68 nt, Human
aguguaaucagcagacuaggcagauuacuugaaauuucaauuucuuuccccucugcugagaguacacu

SEQ ID NO: 4147390 - RNA, 74 nt, Human
aguguacaguguucucuuccuguauagcacuuguauuuucaagagcuagggucauugagagaacacuucucacu

SEQ ID NO: 4147391 - RNA, 75 nt, Human
aguguacuuaagcacuaauauuuuggcaccuuugaaaagaacagggcugcaagacguuauuagcgucaguacauu

SEQ ID NO: 4147392 - RNA, 65 nt, Human
aguguagguguuuaguaaauguuucucuuccccuggaagaugacagaugcuuagaguccucuacu

SEQ ID NO: 4147393 - RNA, 109 nt, Human
aguguauagcaaggccacuccucugagcucaaagacaucagaaccagcugagcaagaccccuccucagaggucugaguuucagcuccucaaggugugucuucuagaacu

SEQ ID NO: 4147394 - RNA, 86 nt, Human
aguguaucuuagcagacuuggcuacuguuccacugugauugaguuaugaagcauguacagcuagcaagguuucuguagguaaaacu

SEQ ID NO: 4147395 - RNA, 63 nt, Human
aguguaugguugaguuguguuaagaacauucaccuuguugugcaaccaucaccaccauccacu

SEQ ID NO: 4147396 - RNA, 63 nt, Human
agugucagugugagauaaucuuggagaacaggcauuuuaccaggaauuauuuuacauuuugcu

SEQ ID NO: 4147397 - RNA, 71 nt, Human
agugucaucuggaaggacgugugcucaacccugaaccuguuuucauguggguccucgucuuccaaggcacu

SEQ ID NO: 4147398 - RNA, 65 nt, Human
aguguccauaaauaaaguuuuaaugcaacauaaucauguucauucauguauugucuauggaugcu

SEQ ID NO: 4147399 - RNA, 59 nt, Human
aguguccuggcaaggguuucaggguuucaaaaacagauuccacuaaccccuaggacauu

SEQ ID NO: 4147400 - RNA, 63 nt, Human
aguugucagucaaagacauuuguguuaaaugaguuucagguguuucuauuuuggcugcuagcu

SEQ ID NO: 4147401 - RNA, 78 nt, Human
aguugucuaagacuuuggcacacaggucauaacccuucuauguacuccaugcccugcuguguaucauuuuagaugacu

SEQ ID NO: 4147402 - RNA, 70 nt, Human
aguugugcugcagggaacugaggcccagaggcugagcccuugccugcugggcccugcccugcugcccacu

SEQ ID NO: 4147403 - RNA, 99 nt, Human
aguuguggagcccccugggcagugagaaaggucagguuuuugauuggcaaaguaagccucaagacauuuuuaauugcucuuuccuccuacuagacaacu

SEQ ID NO: 4147404 - RNA, 61 nt, Human
aguuguuaggggaguaaacaugugcugcuuugcacacauugguuuuacuccuuugacuucu

SEQ ID NO: 4147405 - RNA, 84 nt, Human
aguuuaagaucuuaacaugcucuguuucuuggauguuuggaaaauguuuauuugagagacagagacaggaaugcguuuuagacu

SEQ ID NO: 4147406 - RNA, 94 nt, Human
aguuuaaugaaaauggguuguauguaaaguuuguaauagaaaacaggaaaguggucuuguacauaauuauuguaaacuacuauuuuuauaagcu

SEQ ID NO: 4147407 - RNA, 60 nt, Human
aguuuaauuggaggcguggcucggacguaaauucaaggagcugcggcuagaaagugaauu

SEQ ID NO: 4147408 - RNA, 56 nt, Human
aguuuaauuugcauucugaauauuaccauguguucauggagaaugcaaagcaggcu

SEQ ID NO: 4147409 - RNA, 64 nt, Human
aguuuacagacagacuucccacccucagggucaucugagguauuggccauugucuguucagacu

SEQ ID NO: 4147410 - RNA, 71 nt, Human
aguuuaccucuagcuccuacaaguacagcaaagaagaaauuuuuuuauggcaugaaggagagaauaaaacu

SEQ ID NO: 4147411 - RNA, 79 nt, Human
aguuuagccggcuaaaacaauacccauguacuggcucaugguccuguagaucagaacagcaggguguggcugguucucu

SEQ ID NO: 4147412 - RNA, 61 nt, Human
aguuuauaaaacauugcguggcguagccaagguccuaggucauagaaugaguuaaugaacu

SEQ ID NO: 4147413 - RNA, 59 nt, Human
aguuuauagcaucauaaauaagaugcauucguugccuuuacauuugagagcuauaagcu

SEQ ID NO: 4147414 - RNA, 69 nt, Human
aguuuaugaacacugauggaaaguauguuucuuucuguggaaauucauuuuucuuagugugcauuaucu

SEQ ID NO: 4147415 - RNA, 63 nt, Human
aguuuauucucuggucuuaguaguugcuuaauaauucauugauuaagaacuacagaauaaacu

SEQ ID NO: 4147416 - RNA, 73 nt, Human
aguuucagacauagaucugugauucauucugaguuaauuuuugcaaaggauguaaggucuaugucuagauucu

SEQ ID NO: 4147417 - RNA, 69 nt, Human
aguuucaucagaggcaucuggcaaggcucucaugguuugacugucaccagaucucucuguaaugggauu

SEQ ID NO: 4147418 - RNA, 85 nt, Human
aguuucauuaguagaacaguuaggguaaugauuggaaauuuaaauaugaugccucauuaacuguccuuaauuacuauugacaacu

SEQ ID NO: 4147419 - RNA, 91 nt, Human
aguuuccuuucauuaaugaggucaucuguuuugguuacugagggaaacucaaaacucucgggaccuagauaccugauaaugcugaacagcu

SEQ ID NO: 4147420 - RNA, 80 nt, Human
aguuucuaaaccuuuaccagacuagcaagagauguuccauucaaauaaguucucugauguaugggugacaggcaagagcu

SEQ ID NO: 4147421 - RNA, 72 nt, Human
aguuucuuccaagcuguauguuccuagagguuaucacaaagacuccucuaguggcaacuggcuugcagaacu

SEQ ID NO: 4147422 - RNA, 58 nt, Human
aguuucuugccgugcuuuccauuggcauacccuaacugaaagccacuggcaagagacu

SEQ ID NO: 4147423 - RNA, 65 nt, Human
aguuucuuucuggucuguggacuauaauggguacaguucaccucuccacaaguuagaaggaaauu

SEQ ID NO: 4147424 - RNA, 59 nt, Human
aguuugaagaaggugagaugcagaccucgguucgagcccugcauugccuuuuacaagcu

SEQ ID NO: 4147425 - RNA, 86 nt, Human
aguuugaagaggacagaguuucgguaagcauagaauggcuuucucuauuuuaagcaagauuuuauggaaaugacuuucuuuaaacu

SEQ ID NO: 4147426 - RNA, 80 nt, Human
aguuugaaguaggauggaaugcaaaugugucaggcacacacacacagucucacacacuguugcucauccaggcacaaacu

SEQ ID NO: 4147427 - RNA, 56 nt, Human
aguuugauaaacaccagcuaguccgguaccugggcuaucuggcaaaaugucaaacu

SEQ ID NO: 4147428 - RNA, 71 nt, Human
aguuugauugggcugaaguagagggcagaaucuuaccagccucugcuuauuucuguuuagcuuuucauauu

SEQ ID NO: 4147429 - RNA, 90 nt, Human
aguuugcacaaucaccauuaguuaacuucuuucuguaaucagaaaugacacaggaagagagauaauaauagacugggaauuuuguagacu

SEQ ID NO: 4147430 - RNA, 65 nt, Human
aguuugcugaaaugucuuuagcaguguuuguucaauaaaugcuuucuaaaucaucucagcuuauu

SEQ ID NO: 4147431 - RNA, 89 nt, Human
aguuugcugcucauguagaagggauuuuaaaggugcuaaaagacaucaaucugaaauguuuccuagcuauaaagcucuuccagcagacu

SEQ ID NO: 4147432 - RNA, 61 nt, Human
aguuuggcugcugggaacucaaacaauaccaaguacugugugaauucugagcaguuuagcu

SEQ ID NO: 4147433 - RNA, 104 nt, Human
aguuuggguucucauuaucuagcauauuccuuggcaaaaaauauaugucuaucacauguuucuuugaugaguaaggggaugagaagguaauaggauuauaggcu

SEQ ID NO: 4147434 - RNA, 86 nt, Human
aguuugucucaggacaaccucagguugcugcagugucucucuaucucccuguagugucuacugggcguuguaccuuuggacaggcu

SEQ ID NO: 4147435 - RNA, 101 nt, Human
aguuuuaaaaucauguauuucacaguaaauccagaagaaauuaugcacuuaauuuuucugggugaauuguguuauagagguaauagaggauuauuaaaauu

SEQ ID NO: 4147436 - RNA, 58 nt, Human
aguuuuacagacaauuucagaggcuucaugaagucccugaaacaucucuguggauccu

SEQ ID NO: 4147437 - RNA, 82 nt, Human
aguuuuaggguacaugugcacaacgugcagguuuguuacauauguauacaugugccauauugaugugcuguacccauuaacu

SEQ ID NO: 4147438 - RNA, 82 nt, Human
aguuuuaggguacaugugcacaacgugcagguuuguuacauauguauacgugugccauguuggugugcugcacccguuaacu

SEQ ID NO: 4147439 - RNA, 79 nt, Human
aguuuuagguggugauucuggaauuuucuauauaugcugugauugggcaaaagcuuagaaagcagaaaccaucagagcu

SEQ ID NO: 4147440 - RNA, 82 nt, Human
aguuuuauaugucaugcugagaggguuuguacuauauuaugaaggaaguaaagacuuaauagaagcaugacauagccaaauu

SEQ ID NO: 4147441 - RNA, 94 nt, Human
aguuuuauuacuucuuugacguguauauguguauuuuaugacaaacauuuuaaguugcauggagcacacaguaugcuuuuaaugacauauaacu

SEQ ID NO: 4147442 - RNA, 82 nt, Human
aguuuuauuagaagguccaugacucggcauaguaagacuaauacccugcuccagaauuaugaccauacgucuuugugaaacu

SEQ ID NO: 4147443 - RNA, 79 nt, Human
aguuuucuaaauacuagccuucagauuuuagaauugcuguuguaagagaagauucugaaggacuaguuuuuacaaaacu

SEQ ID NO: 4147444 - RNA, 64 nt, Human
aguuuucuaguauauaacuagaucuuccuacaacuaggaagauuuuacggaguauuaggguauu

SEQ ID NO: 4147445 - RNA, 82 nt, Human
aguuuuuaaaaugucaaugucuggaauugauucccagagauuguucuuggauccaucucaggcauaggaauuuuuuaaagcu

SEQ ID NO: 4147446 - RNA, 66 nt, Human
aguuuuuaacgccauguuugaacaugaaauggaagaaagcaaaaagguaaacauggcuuaaaggcu

SEQ ID NO: 4147447 - RNA, 130 nt, Human
aguuuuuaccugccucacaggagugucuuaagaauugauucacauuuacaaagcacucagaaauccuuggauuugagaugcuguagaagugagugcauuauuauuauuaucaaccugaggcagauaaauu

SEQ ID NO: 4147448 - RNA, 112 nt, Human
aguacuagggaaaggauagggcagguaacuauagacauagccguaauuuauuuuguaaaagacagauguaaacaagguuauuguccauauaauuugcuauucaccaaguacu

SEQ ID NO: 4147449 - RNA, 83 nt, Human
aguacucugugugcgaguucucugugugugcgaguacugugugugagugcucagugugcacgaguacucugugugugaguacu

SEQ ID NO: 4147450 - RNA, 87 nt, Human
aguacugcuggagagaaaugacaaagcuaaacuuuuggaugacacacaauuucaugguuuguuaucucagcuccaccaagcaguccu

SEQ ID NO: 4147451 - RNA, 80 nt, Human
aguacugggauuacaggugggagucacugugcccagcuaagggauaguuuagaagauucacuaucuuguagcucaauauu

SEQ ID NO: 4147452 - RNA, 58 nt, Human
aguacuuagcgcguuguguagaauguaauaggcacucaaccaauguuagcuuaguacu

SEQ ID NO: 4147453 - RNA, 56 nt, Human
aguacuuugcacuuugcucagacuuacaugacuaggaagagcagaaccaugguacu

SEQ ID NO: 4147454 - RNA, 57 nt, Human
aguacuuuucuuuugagaaacugcaacaguuauuuaaaucucagaggaaaaauugcu

SEQ ID NO: 4147455 - RNA, 56 nt, Human
aguagaaaguugcaggaggaaugaaaaauaauaccuaaugaccugcggcauucucu

SEQ ID NO: 4147456 - RNA, 67 nt, Human
aguagaacugucagauguuauaugcuuccugagaugaggaagcagcaaaucugcaguaucaucuacu

SEQ ID NO: 4147457 - RNA, 65 nt, Human
aguagaauggaacagauauuuguggcagguuugcuggagguucuauguauaucuuuccauucacu

SEQ ID NO: 4147458 - RNA, 130 nt, Human
aguagaauuuugaagacaaauauuggcugguucuuuuucugagggcugacugcuuagcuguggucacugugugaugugauagaaagguaguggacuuugaggaagacagauuugggcucuaguuucuauu

SEQ ID NO: 4147459 - RNA, 55 nt, Human
auaacaugagccagauugaaagggagugauuuucauucaucuuaggucauguuau

SEQ ID NO: 4147460 - RNA, 75 nt, Human
auaacuaguucugccauucagugucacaugucugugucugauuuuaugaccuccuaagugacagaauucgguuau

SEQ ID NO: 4147461 - RNA, 55 nt, Human
auaacugccugaugacucucaagcucaggugugaccuucauagacaggcuguugu

SEQ ID NO: 4147462 - RNA, 74 nt, Human
auaacugucaugugaaauuacuuuaauggggaaaaucaaacccaauuacagcaaugcuacaagaugacaggggu

SEQ ID NO: 4147463 - RNA, 79 nt, Human
auaacuuaacuucucugagccucauuccuguguaaaauggguguaggaagugaggaauuagguuuauaagaaggguugu

SEQ ID NO: 4147464 - RNA, 82 nt, Human
auaagagcagcgauucauuagguggggaucucuaaauauuugcuaucaguauuacguaacuacuuaaauugcuucuacuuau

SEQ ID NO: 4147465 - RNA, 72 nt, Human
auaagaugagcagacuguaucaaugucaguauugugguugugauacuguacugcaguucugcaaaauguuau

SEQ ID NO: 4147466 - RNA, 63 nt, Human
auaagcuuuguccuugaggagcucauaguccacuaggagaaaugggccuugggacacaauuau

SEQ ID NO: 4147467 - RNA, 57 nt, Human
auaaggcuuaaaccuuguugccacagcuggcuuucaaauuuggcuuuaagccauuau

SEQ ID NO: 4147468 - RNA, 68 nt, Human
auaagguuaacaucaucagugauaauucauguugauagcauguacucccugauaugaugugauguuau

SEQ ID NO: 4147469 - RNA, 69 nt, Human
auaaguaaauucagaaacucugggcagaacuccaaaauuugagguuuugcuuaaguucucuuuauuugu

SEQ ID NO: 4147470 - RNA, 94 nt, Human
auaaguaccuauuuaucuuuucuauuugcugcaacuauaugaaaauauauauggauauaaucagacuggaaaggacuuugaaaaugguauuugu

SEQ ID NO: 4147471 - RNA, 72 nt, Human
auaaguaggaaaauuugaauauggacugguuauuggaggguacagggaaauauucucaauuuucuugggugu

SEQ ID NO: 4147472 - RNA, 81 nt, Human
auaaguauuacagaaguguugaaguuuucauggguuauuccauaaaacauuuuaugacuucaugcuucacuguccauuuau

SEQ ID NO: 4147473 - RNA, 69 nt, Human
auaagucucaugagagcugaugacuuuacaaggggcuuccccuuucacucagcucucauugucucuugu

SEQ ID NO: 4147474 - RNA, 83 nt, Human
auaauaauguuaccucccugugccucaguuuccucauuugaaaaauggggacaguagcugcgcauagcugauaggauuauugu

SEQ ID NO: 4147475 - RNA, 99 nt, Human
auaauacuaacuucacagggcugcugugaguuaauauuuguaaugccuuuaggauggcguuuggcacacaguaagcccuaagugaauguuggcuguuau

SEQ ID NO: 4147476 - RNA, 57 nt, Human
auaauagcagaccucugagugauaacugauacuauuccuccugggacugcugguuau

SEQ ID NO: 4147477 - RNA, 72 nt, Human
auaauauuuggauaggacaguagggaguaacuaguuaauuuucccaaaguuguagcuauccaggaauauugu

SEQ ID NO: 4147478 - RNA, 101 nt, Human
auaaucccuuuucugugucugggggaucccuggacaugucugcacaaagccccgagucacuggguccuuggcagcaguccaccccacacagaacugauugu

SEQ ID NO: 4147479 - RNA, 58 nt, Human
auaaugaagccacguuaaauuggcuguacaaacauccaaacaaaugaggccucacugu

SEQ ID NO: 4147480 - RNA, 87 nt, Human
auaaugaagucuccgaguguaugaaaguagccggcuucaaaauaaaaucuuugagugcauacuuuauuuuaauacuuauuuuguuau

SEQ ID NO: 4147481 - RNA, 78 nt, Human
auaaugacaagacauagucucugagugucuccuuuccuuccacuagacuugaaucaauacuaugauuuuguacauugu

SEQ ID NO: 4147482 - RNA, 99 nt, Human
auaaugcauuauacgagaaagcugucuauagaaucaugcaguuuguguucaaccccuaaauagaaugcagcugugggcagggcuucuaauaaacguugu

SEQ ID NO: 4147483 - RNA, 60 nt, Human
auaaugggaagcuagagagcaugguuccagccaucacucagcuuucaagcuugucauugu

SEQ ID NO: 4147484 - RNA, 85 nt, Human
auaaugguuucauccucugaauguacuucauaaucuuuuuucuugcuuaaaaggaaugugacauuuuggggugaauagccauugu

SEQ ID NO: 4147485 - RNA, 121 nt, Human
auaauucgaaaauuaaaucugcucaaaugcuuuuguggauugauaagagacaagugauuauggaucaagucauuaauauucaucaauguaaagaauaaguuggggaauuauauagaauugu

SEQ ID NO: 4147486 - RNA, 82 nt, Human
auaauugagacaacaccaaaugcuaguguggaugaggagaaacuggauuacacauacaaugcuuuucggguuguaaaauugu

SEQ ID NO: 4147487 - RNA, 72 nt, Human
auaauugugggcuugccuggcucuuggcagccucuccccuccaagacccuuaauagccuugcagacgauugu

SEQ ID NO: 4147488 - RNA, 93 nt, Human
auaauuuaaaagaccaguaguauggauuaugaaaacacgagcccaccacagggaaaguuaaagucuauguacuacacuuguuuuuuaagcuau

SEQ ID NO: 4147489 - RNA, 80 nt, Human
auacaaauugugucucaggcagugguucuagaguuuucagugucucucaagaugauggcaggaugagacaacaauuggau

SEQ ID NO: 4147490 - RNA, 95 nt, Human
auacagagagacugaaaguuaugugccacuuuuugaagaugacuacuccaaauugguuaaauuuucaaaauugguauguuaaaaagaguugguau

SEQ ID NO: 4147491 - RNA, 57 nt, Human
auacaggccuuggcaggcaugugacagagaagguuuguuauaugcuuaaggaugugu

SEQ ID NO: 4147492 - RNA, 86 nt, Human
auacagugcucaaauaacaugcuuauccaaggaaaagguaaagcaagucauuuuugcuauuuggaaaagcauuuggggaugugugu

SEQ ID NO: 4147493 - RNA, 83 nt, Human
auacauaaaugagauuauuuaaaaugcgguaauguugugaaaaacaaacacaggcacaacugaguagacucauuugauaguau

SEQ ID NO: 4147494 - RNA, 62 nt, Human
auacauaggagaauaacuucagagauauggaagauauccacuggguugaguuucugauguau

SEQ ID NO: 4147495 - RNA, 130 nt, Human
auacauauauauauauauauauauauauauauauauauauaugugugugugugugaguauauauauauaugcacagacauacacauauaugaauuuauguguuuguauacauauauauauauauauauau

SEQ ID NO: 4147496 - RNA, 68 nt, Human
auacaugagaagguuuuggcauauacugugguacauaauaaauguuacuuuccuuucacaucaugugu

SEQ ID NO: 4147497 - RNA, 83 nt, Human
auaccaaggcuuugacagugucuaucuuauugguuaugguauccauggcuccuaggauggugccuggcacugaguguuggugu

SEQ ID NO: 4147498 - RNA, 56 nt, Human
auacccagcucuuucguuuuggguccucacaaaugguaaaagugugagcugggugu

SEQ ID NO: 4147499 - RNA, 80 nt, Human
auaccccaaaacuaguaguaccauuguagguauguaggagagaaauuaauucacuacauacaguggaugcuuuagggugu

SEQ ID NO: 4147500 - RNA, 81 nt, Human
auacuaucaauaugacagcacuguugaagguggccuugaccaccuggcugagguagugcuugucauguuuuucuaugguau

SEQ ID NO: 4147501 - RNA, 75 nt, Human
auacucaaguuuauauaguaaguuauucucauuaucacuuucugugaaugaguuuggcugcuguucuugaaguau

SEQ ID NO: 4147502 - RNA, 69 nt, Human
auacucaguuugccuugguaccaaugagcuacagguaaacacuguaagaucaaaggcaaaggugggugu

SEQ ID NO: 4147503 - RNA, 67 nt, Human
auacugaguacauaaauugugaagucagaagaccugacuccauccaaucuguguucuacaacagugu

SEQ ID NO: 4147504 - RNA, 67 nt, Human
auacuguggagaguauccugaaauccuacguaagcaguagagucccaggccuuuuuuccugcagugu

SEQ ID NO: 4147505 - RNA, 121 nt, Human
auacuuagccggaaaucacuugaacccaggaggcagauguugcagugagccaagaucaugccacugcacuccagccuggguaacaaagcgagacuccgucucaaaaaaaaaaaaaaaguau

SEQ ID NO: 4147506 - RNA, 85 nt, Human
auacuuaguuucuaagacucugcaaaucagcuuauaagcucuaugucaaggugaaaagaacagaguuugccaaacuccagaguau

SEQ ID NO: 4147507 - RNA, 77 nt, Human
auacuucagugaguuuuuagucuugucugcuuuucaaacuuaagagggacaucucacaaacaacuuuauugagguau

SEQ ID NO: 4147508 - RNA, 71 nt, Human
auacuuccucauuuuagcagucuugcugacuguacuuuauacagugucucacugcugaaaucaauuagugu

SEQ ID NO: 4147509 - RNA, 78 nt, Human
auacuuguugagagaaaaaauuuauugguaaaacuaucucaaagcuuaucaaugaaauuauucuuucauuuugggugu

SEQ ID NO: 4147510 - RNA, 94 nt, Human
auagaaaaauacuuauuuuaggaacuuagguuuauggauuuuaucaugagauucauaguguucccuuaguuccuauuaauagauuuuuaucuau

SEQ ID NO: 4147511 - RNA, 89 nt, Human
auagaaaucauuauugucuaggcuuuuggagaagcauaugcugugaaaaugaucacggcugugcuccuaaaagccagucauguuucugu

SEQ ID NO: 4147512 - RNA, 61 nt, Human
auagaaauggcagcuggugcuauuucacuuuaaauaaauguuugguacuagcgcugucuau

SEQ ID NO: 4147513 - RNA, 103 nt, Human
auagaaauugugccaggaaaauggaaucaccuguauugucaccaauauuauagguccuauaucauuuuucaaauuuuugguaauauaauaauauaacuucuau

SEQ ID NO: 4147514 - RNA, 126 nt, Human
auagaauagagcucagaaauaaauccauauauuuauagugaacugaucuuugauaaagaugccaagaaaugcauaaucgaggaaaggacaguuccuucaauaaaugguauugggaaaucuagauau

SEQ ID NO: 4147515 - RNA, 102 nt, Human
auagacccagcaggacagaaaacuagguuuaacuuucacagaaacugaugaaauaaaaugguuucuuucaaguuaaaacuguuucuuucaaguugaaacugu

SEQ ID NO: 4147516 - RNA, 86 nt, Human
auagagagugauaaaauagaaacagugguccagaauuaucuacucuaaaugcccuugaauuucugucucccauuuauugccucuau

SEQ ID NO: 4147517 - RNA, 96 nt, Human
auagagcgugggaugcuaggaaaagagcccagucuggcuggcugucucucucucaacucaugguccugaggcuuguuuccacuccuucaugccuau

SEQ ID NO: 4147518 - RNA, 62 nt, Human
auagaggugaaauaaaacauuagagguaaaugauuuuacccacugaugcauuuucucucugu

SEQ ID NO: 4147519 - RNA, 64 nt, Human
agucuuugaaaucugguguguguuuuauaccuacagcacacagacuaaccauauuucaggcacu

SEQ ID NO: 4147520 - RNA, 83 nt, Human
agucuuugcuuuuacuuguaucacuccguaucauuuaaucuagugcuauaacugagaagauacauaguagcugucaacuggcu

SEQ ID NO: 4147521 - RNA, 86 nt, Human
agugaaagcugaaguucauacaauggccauuaaggcucuacuugauuuggucccuuguugugucccugauaucacuuccuuccacu

SEQ ID NO: 4147522 - RNA, 69 nt, Human
agugaaagucuugguguguuuuuauccuucagguaaagucugguaaaugaugagaagcaccccuuuccu

SEQ ID NO: 4147523 - RNA, 55 nt, Human
agugaaaugauucugagcaagauaaguaaucucuuggaaccucaguuucaucacu

SEQ ID NO: 4147524 - RNA, 96 nt, Human
agugaaauuuucugcuucuuaucaaguggcaaaucuuuugaaauugauauuucauucucauggacgcuauuuaguugaagauguauuuauuuuauu

SEQ ID NO: 4147525 - RNA, 75 nt, Human
agugaagcauuagaaaagcagcugggaccuuaccuggcauguaguuggugcccagcaagcuuucaaugacccacu

SEQ ID NO: 4147526 - RNA, 68 nt, Human
agugaagccaggagagcaaaggucacucugguuuccaagugguuugcccagcuuuucggcuuuucacu

SEQ ID NO: 4147527 - RNA, 127 nt, Human
agugaaggcacuugaaggcaucugugcaggaggaugacaacugcaaacauuaaucaccccaaaguguccuagccuccuuugcaguugucacccuccugcauggauggccuguacagaugucuucgcu

SEQ ID NO: 4147528 - RNA, 65 nt, Human
agugaauauggcuugaguuucagacuauguuagagcuccugauauucagucucaucaaauucacu

SEQ ID NO: 4147529 - RNA, 70 nt, Human
agugaauggcagauggccuggaaccaaagccuccuggcucccaauccauugcuucugccaugaaaucauu

SEQ ID NO: 4147530 - RNA, 85 nt, Human
agugaauuaggcagaaagauuuucaacaggaggugaaaaaguuucuaccucuuguuugaaaauguuucuaaaaucuaaguucauu

SEQ ID NO: 4147531 - RNA, 65 nt, Human
agugacaaccaggcacuccugaggucugacccuaaccuuuuggucgagccuccagccuugucacu

SEQ ID NO: 4147532 - RNA, 56 nt, Human
agugacauuauuuuguguacuaggauguccucuuguuuagacagauuuguguuacu

SEQ ID NO: 4147533 - RNA, 76 nt, Human
agugaccuaugugggcaaucccugcuucagcacccccuucagcuccaguaauuugauugcccagaauauucucauu

SEQ ID NO: 4147534 - RNA, 64 nt, Human
agugacuggaugcuaagcguuggagacuuguccacauucuccacgugauggaguccaggccacu

SEQ ID NO: 4147535 - RNA, 70 nt, Human
agugacuuaauggugguuguggacucugagggcguuggagauguucaguuaacacagacaccaggccacu

SEQ ID NO: 4147536 - RNA, 130 nt, Human
agugacuugaucaugucccaggucaggguguuuucacuccagacagggagccugaguugguggugagugugauacaaagcuuucugucugguauagucuaaagaucuuguggcuugauauaucaauuccu

SEQ ID NO: 4147537 - RNA, 62 nt, Human
agugagaacaguuaaaaguugaaaguugaaguuagaagcuuuggacuugugacucuucuccu

SEQ ID NO: 4147538 - RNA, 69 nt, Human
agugagcauguauucauguggaacucagauaacuaaaaaaguaaaguuguaucugaaugcauguaggcu

SEQ ID NO: 4147539 - RNA, 102 nt, Human
agugaggccaccaucaauggcccaagugcccugaccugaagcguagggagccuccuguccuuuuggcagggagggucgcugggccuuguuggauucccuccu

SEQ ID NO: 4147540 - RNA, 66 nt, Human
agugagguggggucacagggacagccagauaauggggagccaugagucccuggggcccuacuuccu

SEQ ID NO: 4147541 - RNA, 84 nt, Human
agugagguugaauaucuuuauguugguaaaaucuucuuucucuugaugcgccaucaucaagaauguacagccaauaaagucacu

SEQ ID NO: 4147542 - RNA, 75 nt, Human
agugaguagacaaaaggguugccaccuugaaaguauaucuauacuguagauguugcauccugacgucuauuuucu

SEQ ID NO: 4147543 - RNA, 93 nt, Human
agugaguaggugagaggguggguuuuacuggcgaaggguccccagagaagaggacucuuccagcaaugugaaaucacccugcuuccgugcacu

SEQ ID NO: 4147544 - RNA, 111 nt, Human
agugagugaguugacaaugcuucagcuguagaugaccccaggguuugugucagaauaagaagcuaagacccugaaguuuucuaugauugauucuuuguucauucauuuauu

SEQ ID NO: 4147545 - RNA, 73 nt, Human
agugaguggauguaggaauugggguaaaugagcaauagcugccuugucauuucaaguucugugucuuacuccu

SEQ ID NO: 4147546 - RNA, 57 nt, Human
agugauagaaaaugccuggcaagcgugacaucaacucuugaccugcaagucaucauu

SEQ ID NO: 4147547 - RNA, 70 nt, Human
aucaguggugcugaauuauggugaguacauuggcacucacuccaauuuuacccauucagacucacuugau

SEQ ID NO: 4147548 - RNA, 126 nt, Human
aucaguuaaaaauucuuaacauguuauuucaagcugccuagaguugaaugucuacaaaauaugauguuuggggauaccacguagcuuuggcaguagagaguuauggcagaaauacauuguacuggu

SEQ ID NO: 4147549 - RNA, 91 nt, Human
aucaguuuacugugaaggauuaguagguacaguucauaugaaugaaaugaacuauuuggacaguaucucuuauuccucaaaacaaauugau

SEQ ID NO: 4147550 - RNA, 65 nt, Human
aucaguuucacuugcuugcaaagaucugaauugauacagauauugguacaaaaaugagaacugau

SEQ ID NO: 4147551 - RNA, 74 nt, Human
aucauacaaauuuagauuuggauagagguuuagaaauuuaucuaugacauuuucccagauuuauuccuguagau

SEQ ID NO: 4147552 - RNA, 87 nt, Human
aucauacacucagugcggaaggcuagaaacgaugcuuauaauaacuccauagucaaauauuucugcuuucucuugcacagugugggu

SEQ ID NO: 4147553 - RNA, 63 nt, Human
aucauaguccaguagcaccagguuaccccagcuuaauugcuggccuggcuuugcaucugugau

SEQ ID NO: 4147554 - RNA, 71 nt, Human
aucauaucuuuucucuucccuauuaaaacuccuccucuguucagggaacuuggggaagaaaaggaugugau

SEQ ID NO: 4147555 - RNA, 71 nt, Human
aucaucacuguguucaguucaugaugccuauggaguucuacuggugucagugaccuagcacggugcuagau

SEQ ID NO: 4147556 - RNA, 59 nt, Human
aucauccuguuaauguccacucuagaaauuuacuagaaguaaacagaaagcaagaugau

SEQ ID NO: 4147557 - RNA, 57 nt, Human
aucauccuuugcuuuugugggucccuucuguguaggccugcagauauauaggauggu

SEQ ID NO: 4147558 - RNA, 129 nt, Human
aucaucuaggugcuggguccagcaguguggcacaauccuauuuguaggcugggccaguucugaagaucacaauacucagcugcuagacagaagugugucaaaacugcaccugaaggaaagaccaaggau

SEQ ID NO: 4147559 - RNA, 93 nt, Human
aucaucuggacauaguguuaaaauggagauucuuauuuaaauagagucuggcugaggccugagagucuacauuuuuagcaagguccaggugau

SEQ ID NO: 4147560 - RNA, 102 nt, Human
aucaucuggggagcuuucaaaaguacagaugccagggaaaucagguaauuggucuggaguggguccugcacauuaguauuuuuuaaaagcucuucagaugau

SEQ ID NO: 4147561 - RNA, 106 nt, Human
aucaugcuuugggucacaaugcguuaaaucuguggccuuugcaucgaagccaugcuuucaagauguaaaaccuauggagcugacaccaggggcccaacagcaaggu

SEQ ID NO: 4147562 - RNA, 83 nt, Human
aucauggaaagguucagcaagcuuaauacuccacucaacauuagacacauaugguaggacgaauuucugaacagccccaugau

SEQ ID NO: 4147563 - RNA, 91 nt, Human
aucauggucagaagaacuguaagaagcaggucacagacagggcuuguggggcaagccucucucuuucugcucucuggguuccuguccaggu

SEQ ID NO: 4147564 - RNA, 66 nt, Human
aucauggucugagggagugagugggggcugaaaucacgccaauaacucugcucccuaagccaugau

SEQ ID NO: 4147565 - RNA, 129 nt, Human
aucauguauuuuauaagauauuuuucuuagucauuucuguuucuucagugcuuaguacaguacuuaacauguagaaugcacuugauaaauguuaacugacuugagaaauuaggaucuuauaacauugau

SEQ ID NO: 4147566 - RNA, 67 nt, Human
aucauuaacacuaaggcgcugauucucugaaagacguucaacugaagagagccuugaggaagaugau

SEQ ID NO: 4147567 - RNA, 74 nt, Human
aucauuacagguuuuagaguggauucuagaaagaaagaacguucauucagaaucuuucuagagucuagaaugau

SEQ ID NO: 4147568 - RNA, 84 nt, Human
aucauucugaacauuuuuaaggauacuuuaaggcauuuuagcuucuguaugucaaagaugucuuugaaaauaguuuuuuauggu

SEQ ID NO: 4147569 - RNA, 67 nt, Human
aucauucuggaguccagauccauuuggcugcaaagguuuggguaauggaugauggaccugaacugau

SEQ ID NO: 4147570 - RNA, 68 nt, Human
aucauugagauuuuuuacaacugcugcacugggugacaguaacaccuguggugaaaauuuuucaagau

SEQ ID NO: 4147571 - RNA, 123 nt, Human
aucauuguuuuaaucugaucaaggcagauuaccaaacgggauaauauagauaccaaaguagguuauaaaaauugaaauauccuguuugguugucugccuugauuucauuaaccagacaauggu

SEQ ID NO: 4147572 - RNA, 77 nt, Human
aucauuuaugugugcuuuuuccaugcauuucaauuuaauaauuugauauguaaguuuaagcacaacaagaaagugau

SEQ ID NO: 4147573 - RNA, 95 nt, Human
aucauuuccaagguguucagguuuucccauuuuagcauccugcaaaagacauccacuuugcaguugauggggucuuagaauccuuuaaacauggu

SEQ ID NO: 4147574 - RNA, 80 nt, Human
aucauuucuuuggagauaugugaaaaaaacagcaucaauagucgacucucuucuuuaugcauaucuucaauggcagugau

SEQ ID NO: 4147575 - RNA, 61 nt, Human
aucauuuguaagcauggcguuggaagaaaaguuuguccaaauuagccgugguuauagaggu

SEQ ID NO: 4147576 - RNA, 94 nt, Human
aucauuuguugaauuuuaaaaguccacugaaguugacugaagaugaacuugaaaucauuuguugaacuuuagugcgcuuuagaugacugaugau

SEQ ID NO: 4147577 - RNA, 62 nt, Human
aucauuuuaauaaaguguaaagauucugaauaucgguugucugggcaccuuguugacaugau

SEQ ID NO: 4147578 - RNA, 63 nt, Human
auccaaacucugaguuccauuccccuccugaaaugagagaggauuggccccaggaguaugggu

SEQ ID NO: 4147579 - RNA, 58 nt, Human
auccaaagaaugcuuagaccugcagccaauggcucuuggugggucugguucucuggau

SEQ ID NO: 4147580 - RNA, 63 nt, Human
auccaagaaaucuauacucagcuaaccuucuaauugugaggguagaauacagguauuuuggau

SEQ ID NO: 4147581 - RNA, 77 nt, Human
auccaagagcacuugacauuuuguggacaugauguuuaucuuugagguuaaccacaagaugcaaacucuaacaagau

SEQ ID NO: 4147582 - RNA, 70 nt, Human
auccaaguguugacaaccacagagcaacuacagaaggaacuuuguucucugaagguuguggaacuaugau

SEQ ID NO: 4147583 - RNA, 72 nt, Human
auccaauggauauuuuaugugagaaaacuguuaguauacagcauuccuuuccaguaaauuauugaguugggu

SEQ ID NO: 4147584 - RNA, 67 nt, Human
auccacgcuccuaauaaaugugguuuagcugcugcucuuaaaacuacacuuugggaccagcauggau

SEQ ID NO: 4147585 - RNA, 59 nt, Human
auccagaaggccacccggggauggaguucuguguggaagcuguccguggccuucuggau

SEQ ID NO: 4147586 - RNA, 64 nt, Human
auccagaucuucugugcaccuagcaucggcagcauguauguucaguuagcacugaagucuggau

SEQ ID NO: 4147587 - RNA, 60 nt, Human
auccagcaguguggucaccuuucacacagugugcaaggucuuaggagcauggugcuggau

SEQ ID NO: 4147588 - RNA, 88 nt, Human
auccagcucagcccccuauaaugacacauggugaguccuuccuauauacucacugaaagaaugacauuauggaaagauugaguuggau

SEQ ID NO: 4147589 - RNA, 78 nt, Human
auccagcuguuuucauuugauguaacaaagaacaagcagaaacuuuguuuuauccaaauggauaauaguguccuggau

SEQ ID NO: 4147590 - RNA, 56 nt, Human
auccaggccugagucugguccuggguuugggccugggccugggacuuaggcugggu

SEQ ID NO: 4147591 - RNA, 71 nt, Human
aucacaguuuccauaggucagcaguccagacauggcugaguccucugcucaaugucuuaugagacugugau

SEQ ID NO: 4147592 - RNA, 81 nt, Human
aucacaguuuuagcuguuaaauagaaugcuuuggggaaugauguuaauaucugcagauagcuuaacagcaaaacuguugau

SEQ ID NO: 4147593 - RNA, 62 nt, Human
aucacauagucauauaccuuugcauuccaggcacuuaaaaagaaugcaaauggcuguuugau

SEQ ID NO: 4147594 - RNA, 62 nt, Human
aucacauucuuucaaagcagucacggcccaccuaaaaucaagggcaggagagggaauguggu

SEQ ID NO: 4147595 - RNA, 66 nt, Human
aucaccaaccaguagcugaguucaaaaacuacauauuucuugggcaguccucuacugguaugugau

SEQ ID NO: 4147596 - RNA, 105 nt, Human
aucaccaugagauuuccaguauacugauuagauaguaagugacuaaaggacuacuuucaacugggcggaucugagaaggcuauucugagagguaacauuuaagau

SEQ ID NO: 4147597 - RNA, 85 nt, Human
aucaccgcaccaauccuagaacuuaguuauuaucacccuccuuuuguauguguggaaacuaagacuagagagacuuuguauugau

SEQ ID NO: 4147598 - RNA, 114 nt, Human
aucaccuagaaggcuuguugaaauagaucucugggucucaccaccagguuuucugauuugggagggccacaguggggccugagaaucugcauuucuagcaaguguccaggugau

SEQ ID NO: 4147599 - RNA, 111 nt, Human
aucaccugaagagcuuguuaagacacagauuuauuggccccuucucagagaugccuauugaaguuaguuggggcccaagaauuugcauuuuuaaccaagcucgcagaugau

SEQ ID NO: 4147600 - RNA, 64 nt, Human
aucaccugagccugacccagagccaccuagauaugaguacuuguuucaaggcucccugagggau

SEQ ID NO: 4147601 - RNA, 92 nt, Human
aucaccuggggaucucauuaaaaauguagacucugauucaguagggcugggcugaggucaagauucuacauuuguaacaggcuccaggugau

SEQ ID NO: 4147602 - RNA, 59 nt, Human
aucacucugagaggucacuggaaaagaacgagaacagcuuuccccauuucuuaggugau

SEQ ID NO: 4147603 - RNA, 118 nt, Human
aucacuguuauuauggugaauaccgaaugacuucacaauaaugugacacuuaaaaugcuagugcaauuuauuguuaagaaggacauuuuuuaguuuguucacuaaugccuacgguggu

SEQ ID NO: 4147604 - RNA, 62 nt, Human
auccuuaauuuacuugcaucuuaccuagccugaaguaaaaacggugcuuguagcuuaagggu

SEQ ID NO: 4147605 - RNA, 67 nt, Human
auccuuaucuucccauugugugcagccccagaauggguccugggacucccaagcuuggaggaaggau

SEQ ID NO: 4147606 - RNA, 84 nt, Human
auccuuauucuuuuucaaggaaaugacaugcugcccucauuucuaaaucuagaugucaucuuuuuaaagaagagacccugggau

SEQ ID NO: 4147607 - RNA, 83 nt, Human
auccuucuccuuauauuguaagguaagcauggguguacuggaaacaccacacucagaaccauuuacucugaggaaaaaaggau

SEQ ID NO: 4147608 - RNA, 79 nt, Human
auccuucuuugaagccagagaggaagguuuaggucaguaauggcagccucagguuuucuuugaaaucauagaaauggau

SEQ ID NO: 4147609 - RNA, 112 nt, Human
auccuugagaugaaaguuuuugcuaccauguaccagcaacuggaagucagauccauuggacugauuggggucccugcugugucauggcauaaaaugguuucauaucauugau

SEQ ID NO: 4147610 - RNA, 58 nt, Human
auccuugguaagagaguuggauuugagugacaucuggaggcuuucuauaccuagagau

SEQ ID NO: 4147611 - RNA, 99 nt, Human
auccuuuagguguguuggaguuuagaaaugauugagcuguaauacuuuuccagaguauugcuccuacagucaauuucgaguuccuuaagcccuauugau

SEQ ID NO: 4147612 - RNA, 92 nt, Human
aucgacccagcaguguccccaacgccugaggaccagcacccaucugugacaaggcacagggguccgcgauguuggccacugcuuugggugau

SEQ ID NO: 4147613 - RNA, 70 nt, Human
aucgcuuaagccugggaggcagagguuguagugagccaagaucgugccacuacacuccagcuugggcgau

SEQ ID NO: 4147614 - RNA, 59 nt, Human
aucggcaagccccacaccgucccuugcaaggugacaggccacugcggcucugugcuggu

SEQ ID NO: 4147615 - RNA, 80 nt, Human
aucggccuggcgcaguggcucacgccugcaaucccagcacuuugggaggccaaggagggcggaucacagggucaggagau

SEQ ID NO: 4147616 - RNA, 82 nt, Human
aucuaaaaacuuaucaguagauuucaggggagaggaaaagaccauuuuaauucuuuugcaagacuauugauuaguaacagau

SEQ ID NO: 4147617 - RNA, 92 nt, Human
aucuaaaauacuauauguagauuguaccaaugucaauuuccuaguuuugauauuguacuaggguuacauguuacuuauggaguaaacuggau

SEQ ID NO: 4147618 - RNA, 61 nt, Human
aucuaacaccuguuagcucuaauuuucuuuccugagaagcacaccaguagacaggguagau

SEQ ID NO: 4147619 - RNA, 65 nt, Human
aucuacguuagcugccuggccuuaguggggcucacacuccgccaagaguuuccagcugcaaggau

SEQ ID NO: 4147620 - RNA, 62 nt, Human
aucuagaaaaggugacuaaaaucugucaaaguacaaauuuuaggaugugccuuuuguuaggu

SEQ ID NO: 4147621 - RNA, 57 nt, Human
aucuagaaaguguugaagaucaugugagggaaacgugaacugucacacacuucugau

SEQ ID NO: 4147622 - RNA, 70 nt, Human
aucuagacuuucugggucaguauuuuggcuucuccagaauccgcuugacuuugaaguaucaaaccuagau

SEQ ID NO: 4147623 - RNA, 58 nt, Human
aucuagauuuaacagaguauaaguuacuauaggucaucuuguauuccuugaaucaggu

SEQ ID NO: 4147624 - RNA, 60 nt, Human
aucuagccaagggucagcugcacagagagacacauuuaggugaagacacuuuggcuugau

SEQ ID NO: 4147625 - RNA, 108 nt, Human
aucuaguuugaaagucagccagcuccuggucugagcucuaaaacuaacuccagaugaauugcccuuacaguaaucagauccagcgucucuggcugaucucuauuagau

SEQ ID NO: 4147626 - RNA, 69 nt, Human
aucuauaaaauuagucaaaacacugaguguuacaaaaauaguucaguguuuuaacugucuuuuaggggu

SEQ ID NO: 4147627 - RNA, 99 nt, Human
aucuauagaucagcuuuucaaugugaauuuuguccggccagcuuuuaacuaucaucugaagcagguggaaaauucuuaucaggauauagguagauagau

SEQ ID NO: 4147628 - RNA, 99 nt, Human
aucuaugaggugcuuuuauauuguuuucuuugcaguuucugagacuguuaaagcucaaaaguaagaggcugcaggcuggaaaucagagggacucuagau

SEQ ID NO: 4147629 - RNA, 73 nt, Human
aucuaugguaaaugagcauauguuccuuccuauacauaccuaccaugguggugagcauuugcuuauuuuaggu

SEQ ID NO: 4147630 - RNA, 97 nt, Human
aucuauguacuuuucucuauguguguuguaguuugaugaaaaguuaauacacacaagcacaaacacacacacauuuagggacuucuggguuauaggu

SEQ ID NO: 4147631 - RNA, 113 nt, Human
aucuauuaaauaauacagugguugagcuuggcucugaguucaccaacaagugugcuuaaauaaggugaauuacacugugagcugaagggcugcucgguguauuuuguaaagau

SEQ ID NO: 4147632 - RNA, 126 nt, Human
aucuauugagauaaucaugugguuuuugucuuugguuccguuuauaugcuggauuacguuuauugauuuguauaugucaaaccagccuugcaucccagggaugaagcccacuugaucauaguggau

SEQ ID NO: 4147633 - RNA, 71 nt, Human
aucucacaucuugguugauuuucuuuaugccgauugagggauaagcugaauagucaacacaaaauauagau

SEQ ID NO: 4147634 - RNA, 70 nt, Human
aucucagggauuccauucuugcuuuugaucuggaugaaaacaaauggaagaaagaugagugcccucggau

SEQ ID NO: 4147635 - RNA, 57 nt, Human
aucucagggcagagguaggugaggaaagagcuuauaugacugccccuucucugagau

SEQ ID NO: 4147636 - RNA, 88 nt, Human
aucuccacauugcuguucugcaccagacuucagcaccugcuaguuacaaugaaguuuuugcugcugggcaaaaccaaaguuuggagau

SEQ ID NO: 4147637 - RNA, 96 nt, Human
aucuccaccuccugaggcugggcguccuugugccagcuacuacucagcucuugcacaggccugagugugggcacgggggccuuggccgggugggau

SEQ ID NO: 4147638 - RNA, 85 nt, Human
aucuccccauguccagaagaacaguaauuccaagugcuuauacauaaauuauguuaggcauuaaaauuauauauggucgguagau

SEQ ID NO: 4147639 - RNA, 56 nt, Human
aucuccuacaugggaggagagaaaguuuuccuacucgccagucccauacaggagau

SEQ ID NO: 4147640 - RNA, 60 nt, Human
aucucucccuagguuagcggucaggcagaccuugcucugaacgaaccuccugggagagau

SEQ ID NO: 4147641 - RNA, 81 nt, Human
aucucugaaagaagaaauagucuaucugaacguaacucaaauuagguauaagaagauuauuuauaauagcucucaagagau

SEQ ID NO: 4147642 - RNA, 66 nt, Human
aucucugaugaugacuuugugaaaaugcuccuaccaccuggaaggauaaacagagcacaucaagau

SEQ ID NO: 4147643 - RNA, 95 nt, Human
aucucuuaccccugcuuucaaagaauguaucagauaaagcauguggaaaagaaaucuuuccaagccagugugauaugaaguagaaggugauggau

SEQ ID NO: 4147644 - RNA, 75 nt, Human
aucucuugguuacauuggcaguuuugaucugguuuuaaucaagauuuccuggauguaauucccauaagaagagau

SEQ ID NO: 4147645 - RNA, 86 nt, Human
aucucuuguuuuuaagugaugaaagcagaugucuaauauuguccuuaaggcaagaauuuuuacacuuauuuauuaauugaagagau

SEQ ID NO: 4147646 - RNA, 76 nt, Human
aucucuuucucuuggcagcugccugaacagcaguuuguggaaaggacugcugucaguuggcaggaugagggugggu

SEQ ID NO: 4147647 - RNA, 129 nt, Human
aucugaaaaaucacuuuugucuuugcuucuaaauguuuugcucccaugugguuauuuaauucugcaaauggcacagggacagaauuuuuaugacuaguaaugugcaaguaaauguguguuccaucugau

SEQ ID NO: 4147648 - RNA, 55 nt, Human
aucugaaaagccucuuacuccuuuuguuaagaggguauauaguguuuuugcagau

SEQ ID NO: 4147649 - RNA, 62 nt, Human
aucugaaaagcuuuaaugagcuaauacuagauaugccauaguuuuugaagcuucauuuagau

SEQ ID NO: 4147650 - RNA, 59 nt, Human
aucugaagaggucauggcugacauuuuuccaauauaaaugaaaaugugacuucucagau

SEQ ID NO: 4147651 - RNA, 93 nt, Human
aucugagacuaccuuauugcaaccagguggugaugucugagaggaacuuaggauuuauuacaagccaugguuuaaagguaaaagauuucagau

SEQ ID NO: 4147652 - RNA, 85 nt, Human
aucugauguccugcaggcugauagaggauuccauugcagaccugaucucuauguggaauuggaaaucagcauuguaguuucaggu

SEQ ID NO: 4147653 - RNA, 57 nt, Human
aucugcagaaacugugacuauguuguuauauggcaaauaggaauuaaguuugcagau

SEQ ID NO: 4147654 - RNA, 74 nt, Human
aucugcaggucuguccuggagaaccucaucaaggugagccacacagcccagcuccaggagaggccugaccaggu

SEQ ID NO: 4147655 - RNA, 78 nt, Human
aucugccuugagcuuacacaggaagcagccuggagccagacugcccagguucaaauagcugugugaccuuggacagau

SEQ ID NO: 4147656 - RNA, 100 nt, Human
aucuggacuagaacauauuacucaugugacuauauucucugguuuccaggcuauagaaaauuguaucacacgacuaugcuuuguucucugaaaaacagau

SEQ ID NO: 4147657 - RNA, 57 nt, Human
aucugggcagggcagcaaggcgagccacacuucaccuaaacuaauuccugcugagau

SEQ ID NO: 4147658 - RNA, 82 nt, Human
aucugggguuacgauuauucacagauguauuggaacuccuacacaaugggagcuacuuugugaaaagugaaauacuccagau

SEQ ID NO: 4147659 - RNA, 62 nt, Human
aucuggguuccuacucuguuagcuuucugccuggaaaauuugauucuuucagggaccuagau

SEQ ID NO: 4147660 - RNA, 73 nt, Human
aucugucugguuggagaaucacugcaagccaaggcguggcauuggccaauggugauucccggccuccucaggu

SEQ ID NO: 4147661 - RNA, 76 nt, Human
aucugucuucuacuuuuuaagugguuggaaaaaaaucuaaguggucucuuccaacuuugaaaauguuaugaaagau

SEQ ID NO: 4147662 - RNA, 83 nt, Human
aucugugucagaccccggcaguaaaacuuuauggguucuuccccgugaaauauuuuguuuaugucacgugggucucaucggau

SEQ ID NO: 4147663 - RNA, 72 nt, Human
aucuagaguucuugcuuauucuuuccacaauucauggaaacaugagagauugaauuaggagauuucuaaggu

SEQ ID NO: 4147664 - RNA, 61 nt, Human
aucuaggagcaugaagggaaggcaugaaaacccaaagcuuuuccugugaugcuuccugggu

SEQ ID NO: 4147665 - RNA, 72 nt, Human
aucuaggcauuuauuuuccaagccaauguccugucuuauuaagguaccacuuuggaagauaaugcuuaugau

SEQ ID NO: 4147666 - RNA, 129 nt, Human
aucuaguucuguuucuauuaacguuuuucucuuaguguuuagucauuuggauuugaucuuuugcauggcucauaauuauuuuguauuggaucccagauauuguauaagacaaaauuguagacucuggau

SEQ ID NO: 4147667 - RNA, 130 nt, Human
aucuauguuuaacuuuuucaggaaucaucaaaguguuuuucacaguggcugugccauuugacauucccaccaucaguguacaaggguaugguagcuuauuuuuaugacuuacguagguaucagacaggau

SEQ ID NO: 4147668 - RNA, 61 nt, Human
aucuauuagccuguugcauuuucacugcuaagcauuugagacguguacagagcuucaggau

SEQ ID NO: 4147669 - RNA, 114 nt, Human
aucuauuauugcuggcauuucuuuccccacugggcuguuuuuugaguggaugucauacucaucucauacagaaggcauguccaucaugcuagagcagugcugucaauauuagau

SEQ ID NO: 4147670 - RNA, 62 nt, Human
aucuauucuacucacaggaaggguuucccaauuuguuaaagaaacccucucuguagaaagau

SEQ ID NO: 4147671 - RNA, 78 nt, Human
aucucaaccucugaggacagaagggggcucucaaauccgcccaugcauugagaucuucgcucuucacagaggugggau

SEQ ID NO: 4147672 - RNA, 56 nt, Human
aucucauguucugaaccccaagguauucuaugacagaaugcaaaggacacugagau

SEQ ID NO: 4147673 - RNA, 88 nt, Human
aucuccaagauguauuaagugcaaaaaugaaaguauagaaccacguuccugauaagcuaccauuuguauauaaagcaugugugggggu

SEQ ID NO: 4147674 - RNA, 55 nt, Human
aucuccaggaagugucauuuaccuacccugcggugugaauagugccccuggaggu

SEQ ID NO: 4147675 - RNA, 115 nt, Human
aucuccaugauagccacuugucagcaaguagagcaugcacccuguacaggaaccagguguguacaaggccaucuacaugcuguagagucccuuaaagccaguggcuuaugguaau

SEQ ID NO: 4147676 - RNA, 62 nt, Human
aucuccauuugcaguuucaauagugucgucuaugaaacuuuugagcaaugcugcaaagagau

SEQ ID NO: 4147677 - RNA, 122 nt, Human
aucucccaucuucuaagcuaucguuagucuucuuucauuuacucaguuuccagaacugaauuuguguagauggucuggaagcaguagcucagguggcucauagaauuugaugcaaaggagau

SEQ ID NO: 4147678 - RNA, 71 nt, Human
aucuccucuacuuuuccugugaagcuguuucuucuccuucuggaagauaacagcaggaugauagaggaggu

SEQ ID NO: 4147679 - RNA, 91 nt, Human
aucuccuggagagcuguugaaaugcagacugugaaucaguaggucugggguacugcugagaaucugcuuuucuaacaagcucccaggugau

SEQ ID NO: 4147680 - RNA, 55 nt, Human
aucuccuguuuugagggggauuuaggagccucaggcuucccuuagagcaaaagau

SEQ ID NO: 4147681 - RNA, 79 nt, Human
aucucuccuggaaugcagaaguguggcccaacaggaucuucuaagccuuugcaacacaaaguuugauucccagcaagau

SEQ ID NO: 4147682 - RNA, 84 nt, Human
aucucucuggagucuagaccuggggcaaacguuuucuggaaagagcuagauaauaaauguuuuagguuuugugggccaagaggu

SEQ ID NO: 4147683 - RNA, 58 nt, Human
aucucugguccaaauguuaccuuuaccucaaauguggagaauagcaugcuuuagagau

SEQ ID NO: 4147684 - RNA, 129 nt, Human
aucucuuuuccacagugacaauccugagugucuccugcaguucugcaugugacacuguuuugagucaucauuuaagaccuugucuaaacauguagauauugucaaugcuacuaugucuuuauuaauauu

SEQ ID NO: 4147685 - RNA, 63 nt, Human
aucugaaaguauauuuccugcuguuuaucugcuuccagaacuggcugaaguuuacuuuuuggu

SEQ ID NO: 4147686 - RNA, 77 nt, Human
aucugaaaguuguauugacaagaaagcgucuucuuuuucagccaguuuggcugaauuuuuugucuuuguaacuagau

SEQ ID NO: 4147687 - RNA, 87 nt, Human
aucugaaguucccauggagagaggcaagucaaagugcaaauguugaagcugccguuuuucuccaucagcuuucuugggaauugaggu

SEQ ID NO: 4147688 - RNA, 130 nt, Human
aucugaauccauuuagaguagaaaugguaucccugugauuggcuuccuucuuauugucagucucugcuaaaagagugagaagagaugaggaagaaaaugggaagcagaaucuccucuuuuggguucuggu

SEQ ID NO: 4147689 - RNA, 55 nt, Human
aucugaccuucuguuugagaacaauguuccccaaauguguaaggaaguguuagau

SEQ ID NO: 4147690 - RNA, 103 nt, Human
aucugaucuagugacuuaguucugcauguauaauuaauuggcagcauguucacagcuccuacuaagcugccugauuuacauagugaagcuagcagaugcagau

SEQ ID NO: 4147691 - RNA, 97 nt, Human
aucugaucugcuacuuaucuuuguaaguuauauguaguauauugauaauaacagguuacacauacauugcuuacaaggugauagagauagauuagau

SEQ ID NO: 4147692 - RNA, 83 nt, Human
aucugaugcgauuuuuuaagcugcugguuuguuccaaacugauaucucaaaggaguacaaauuauagcgcuuggaauuuagau

SEQ ID NO: 4147693 - RNA, 76 nt, Human
aucugccucuucuucauugcgaucuuagccuuuuggauuucaauuucuucauuuguaaagaggggggaugguagau

SEQ ID NO: 4147694 - RNA, 75 nt, Human
aucugcuggcuuuaguaauaaguuucucccuuaaaaggugaacgggcuuugacuaaaguguaaauaaacagugau

SEQ ID NO: 4147695 - RNA, 59 nt, Human
aucugcugucacauguuugaagcaugaauauauccuuccaagaaacaagugaugcagau

SEQ ID NO: 4147696 - RNA, 67 nt, Human
aucuggaauaggauaauaucuauuugauuugaaauugaacagaugguagcauuauguugguccagau

SEQ ID NO: 4147697 - RNA, 57 nt, Human
aucuggaaucaguggcuuacccuccuugagcaggaguagcuauacaggauuucggau

SEQ ID NO: 4147698 - RNA, 61 nt, Human
aucuggagcucugcacaccuggcccaaaauacacuugagcaggugauguugacuuuaagau

SEQ ID NO: 4147699 - RNA, 83 nt, Human
aucuggauaauucagauuuacaacacuacuuauccuugaaaugguuucaagggaaaaaugguuuuguggggacuuguuuagau

SEQ ID NO: 4147700 - RNA, 86 nt, Human
aucugggaagccccagcucugccaagcgucagcuccgagcccucgccagucucugaagcugccagcgcagggcuggggacccagau

SEQ ID NO: 4147701 - RNA, 70 nt, Human
aucugggcauggaggaaagagaaaugagucugcuuuauuuugcuaauuauaucuuucuuuccgccuagau

SEQ ID NO: 4147702 - RNA, 58 nt, Human
aucugggccuguucccucaccuaguuagaacacagcaaaugaggccaaggucacagau

SEQ ID NO: 4147703 - RNA, 58 nt, Human
aucugggucuaugaucucacuucaaaguuuuggaguaagaaauucuguagauccugau

SEQ ID NO: 4147704 - RNA, 87 nt, Human
aucugguacauguuaaugaauuuuugcaguuccuuuggauauaaucucuuuccuccacugucagguucagcauguuucuagccaggu

SEQ ID NO: 4147705 - RNA, 63 nt, Human
aucugguauuauuucacaugugaaguacagacuugauguuauucucacaauaugaugccagau

SEQ ID NO: 4147706 - RNA, 104 nt, Human
aucugguauuggcaaggagguggaguaacacugcagaugaaagcauaaguugguacagccacuuuagagaacuucuuaguggucucuacuuacgcugaacagau

SEQ ID NO: 4147707 - RNA, 63 nt, Human
aucuggucucaaucaagcuacuggguaagagacuuuuguguaauugaaauugagaaccaugau

SEQ ID NO: 4147708 - RNA, 78 nt, Human
aucuggugcccuuccagcauucuuagaccucuauacucuuaaaguccguugcauaugacugggagcaagggacuagau

SEQ ID NO: 4147709 - RNA, 76 nt, Human
aucuguaaauuguauuuguacaagacaugugauugccaagagcuuucuccacagucuuugcagaagcaauauaaau

SEQ ID NO: 4147710 - RNA, 63 nt, Human
aucuguaagagacuauugagcaucuuggccgcuuccaaaaugaccucagaguuuuugucagau

SEQ ID NO: 4147711 - RNA, 60 nt, Human
aucuguaguauuauacuaaggacuaaaugagauaaagucacuaaaguguuuagugcagau

SEQ ID NO: 4147712 - RNA, 90 nt, Human
aucuguauguggaccauugcaaauaaacaaguauacauuguauguugagaaaguacuguguaucaacauguuuuuuguguucaugcaggu

SEQ ID NO: 4147713 - RNA, 62 nt, Human
aucugucacuauuggccagaacaagcaacauuacuucucucuguuugaugguggagccaggu

SEQ ID NO: 4147714 - RNA, 63 nt, Human
aucuguccuggagcuaggcuucccaccaggcgaaaaugaaggccaggaggagcuccaguaggu

SEQ ID NO: 4147715 - RNA, 89 nt, Human
aucugugaaccaggucagcuggcaucuauaccagaguccuuccggccuacauguggucacuuguuuggagccagcuguaauucacaggu

SEQ ID NO: 4147716 - RNA, 88 nt, Human
aucuguggcuguugacagaaugagucaugaagauuagcaauguguuuauugguuacagaaaaugauuuauaauguggaagauacaggu

SEQ ID NO: 4147717 - RNA, 81 nt, Human
aucuguguaugauaagccaugucguggucaugguguacugcgguagacuacaaauucuaugguuuuuauuauaagcaagau

SEQ ID NO: 4147718 - RNA, 62 nt, Human
aucugugugcagggaugagugcagguacgugugaguguguaaguguauguguguacaggggu

SEQ ID NO: 4147719 - RNA, 72 nt, Human
aucuguugucugggucggugccacugugggggaaaacaaaggccuucccuaccuuccugcccagagacagau

SEQ ID NO: 4147720 - RNA, 83 nt, Human
aucuguuuggggauaggugcaauaaauaaauagauuguuguaauuaauaauaaucaauguguuauuguaauuaacauuuagau

SEQ ID NO: 4147721 - RNA, 102 nt, Human
aucuuaaccuccgagcuaauuggcaagcagauuuccacuaaauuuauccaucucucaacaauuuauggagguaguuuuguaugcuaaggccuggauuaagau

SEQ ID NO: 4147722 - RNA, 62 nt, Human
aucuuaagguaagaggcuuagcgugaugcagcuuucucaucaagugccuuucaccucuaggu

SEQ ID NO: 4147723 - RNA, 56 nt, Human
aucuuagagaguuuuuauauccuaaaaagaucuuugaaggagaaagcuuucuuggu

SEQ ID NO: 4147724 - RNA, 74 nt, Human
aucuucuaccucccuguggcaacaauauuuucuaauuaaaggaguccuuuugugccacagggaggauuucugau

SEQ ID NO: 4147725 - RNA, 76 nt, Human
aucuuggaauccuucucuucucuuauguauucugaccuugaagggucacuguauuuggaagggaugggaccaugau

SEQ ID NO: 4147726 - RNA, 65 nt, Human
aucuuggcaucaccacuuacuuacuagucccuaaugguggcuucucugugggguguugugaggau

SEQ ID NO: 4147727 - RNA, 89 nt, Human
aucuugucucaaauggccuuugggcacugugggcagagaugaucgacugcugucccuucugugcccucggugcugggccugagcaggau

SEQ ID NO: 4147728 - RNA, 60 nt, Human
aucuugucuguuaguuggugugggggagaaaacaaauguuucuaaucuuacagacaggau

SEQ ID NO: 4147729 - RNA, 78 nt, Human
aucuuguugagaccagacacgaugccuugcucuucuuccauuaccagugucaggcacagugccuggaaucaaacagau

SEQ ID NO: 4147730 - RNA, 60 nt, Human
aucuuuagagucaucugagugucaacacacucuauuuaugacacucguaauuuuagaggu

SEQ ID NO: 4147731 - RNA, 62 nt, Human
aucuuucuaugguacuuucuccauaucauaaaaacuuuggagaccuguauuauugggaagau

SEQ ID NO: 4147732 - RNA, 55 nt, Human
aucuuucuccauauacaucuuucaucauauaaagggagaaguaaaggggaaaggu

SEQ ID NO: 4147733 - RNA, 76 nt, Human
aucuuucuggacagauuuguucuuuugggcuaaugaaaaauugaugguuauggguggagaacaggaccagaugggu

SEQ ID NO: 4147734 - RNA, 62 nt, Human
aucuuuguaguuauaaacgacuuuuguuuuaauaacaaaguuguugauuuucuacuaagggu

SEQ ID NO: 4147735 - RNA, 83 nt, Human
aucuuugucaaugcucauccccccauuugcaaaaugagggucaaauggugaccucaaaguagagggagaugaggaccagagau

SEQ ID NO: 4147736 - RNA, 66 nt, Human
caaauagcucuuuaguccuggccauuccagaccagaagcucggagucagagcagaagggcugcuug

SEQ ID NO: 4147737 - RNA, 58 nt, Human
caaauaguaugagcaaugauucuggguuucagccucauugccugguuuauacuguaug

SEQ ID NO: 4147738 - RNA, 99 nt, Human
caaauauauaugcuagcagggauacaguuaaaaaguucaaugguuauuuaggaauuaccuuuggaguuagcuguguucaaaaauuagcauauuaguuug

SEQ ID NO: 4147739 - RNA, 70 nt, Human
caaaucaccacuuaauggguuaaagcagaaaccauauuauuugcucacaacucuaugggucugugauuug

SEQ ID NO: 4147740 - RNA, 67 nt, Human
caaaucauaauuguauacauucauggggcaccauguuauguuuuauguaucuauacaauaugaagug

SEQ ID NO: 4147741 - RNA, 74 nt, Human
caaauccacauuuaggucucuaaaauuauucugucuccugaggauguuucagggucagccuguauguguauuug

SEQ ID NO: 4147742 - RNA, 60 nt, Human
augccuggguuccauccucagagauuuggauucaauuuaagugagugggagcccagguau

SEQ ID NO: 4147743 - RNA, 64 nt, Human
augccugugucaucuuucuuguucacauuuauaucaaugcugagcacagcaaagagacaaguau

SEQ ID NO: 4147744 - RNA, 128 nt, Human
augccuuaggcccaccccuggccucccuggaggggagcaacauagucacucucuaguuacagaguacuugguguagauaaugaugcucuccacccugggccaaaguggccaugcaugggccaagacau

SEQ ID NO: 4147745 - RNA, 68 nt, Human
augccuuauggacuuugggcucuuuguagauagauguuucaagcagagucaaaaguaccacaaguuau

SEQ ID NO: 4147746 - RNA, 69 nt, Human
augccuuauugcauuuugugaauuccuuuucauguauaacauuaagauucacagagugaaugaaaguau

SEQ ID NO: 4147747 - RNA, 89 nt, Human
augccuugaaaaaugauuuuguagcugaugcagaagccgucugcguauggcuguucuuugcaucaguccucaauaaaauccaagggcau

SEQ ID NO: 4147748 - RNA, 72 nt, Human
augccuuugccaccaggagaaccagugcaacugaaguuuccacugccugcugcucuccuguggcauccacau

SEQ ID NO: 4147749 - RNA, 59 nt, Human
augcguuaguuacugaaagcauauauuuguccacauguuuucuaaguaacuggcagcau

SEQ ID NO: 4147750 - RNA, 56 nt, Human
augcuacuuaaaguauaggggaauuuaaauuauugccuuuaugcaaggacuggcau

SEQ ID NO: 4147751 - RNA, 71 nt, Human
augcucaccgucuugggaucuacauagcuauguacacugggccuugugugcagaaucucaggagugauuau

SEQ ID NO: 4147752 - RNA, 60 nt, Human
augcucagggcacacucuggaccaauuaaauccaaaucucaaggagagugacccaagcau

SEQ ID NO: 4147753 - RNA, 79 nt, Human
augcucaggugccuuggcuaauuguuaucugguuauuaucuaucaaggaacaauuacuaccaaggccuguaggaggcau

SEQ ID NO: 4147754 - RNA, 77 nt, Human
augcugaaggccuucccacagugaucgcauucguacgguuucucccccguguggcuucgcaugugcgucuucagcgu

SEQ ID NO: 4147755 - RNA, 62 nt, Human
augcugaaucccagaguccccaagaaaccauacuuugcaugguggcuucagggaguuagcau

SEQ ID NO: 4147756 - RNA, 130 nt, Human
augcugagaugaaucagaaauuugcgccccaccccaccccggcuucuauuaggucggugcaaaaguaauugcaucaaccuaauaucagcucauggguuagugguguucacaaccaucugauuucuauugu

SEQ ID NO: 4147757 - RNA, 66 nt, Human
augcugaggaacaucuaucacauaaacgagauuccuuaauuguuuagcauaaagauuuuccagcau

SEQ ID NO: 4147758 - RNA, 82 nt, Human
augcugauuccuaggaguugaggagugugaggucucccaggagcaacucagaggcuuccuuccucggagcuggaacuggcau

SEQ ID NO: 4147759 - RNA, 75 nt, Human
augcugcguaucaacaggguggccaguguauuuuuacauguaaguacacaaaggcacucuguuguuaccacgcau

SEQ ID NO: 4147760 - RNA, 112 nt, Human
augcugcuucaguaagugucaugguauggggagauaggaauuaacccacaucaaccaaacuagagcuuuggucugauucuugcuccccaagauggggcccgcaaagcagcau

SEQ ID NO: 4147761 - RNA, 78 nt, Human
augcuggacauauggagagguucaauacauguuggugaccaaaugaagugauguugauuuuaccacuuacuccaguau

SEQ ID NO: 4147762 - RNA, 62 nt, Human
augcuggagcccugaaugggcaggaagcauugcgguuuccauuucauucagagcucuuucau

SEQ ID NO: 4147763 - RNA, 64 nt, Human
augcugggaaguccuaaccacaucaagaaugccucagaucagugacccaaggaccuuccagaau

SEQ ID NO: 4147764 - RNA, 87 nt, Human
augcugggcuguggcacggcauguuugcgguaagcuacucagauuuaaggcccuuaguguaaauugugcuugagauaaggccagcau

SEQ ID NO: 4147765 - RNA, 59 nt, Human
augcuggggccucagaccagaacaguaauuuagaaccucugguaguggggcccagguau

SEQ ID NO: 4147766 - RNA, 56 nt, Human
augcuuaaccuugguguacaauaagcacaauauugauguacaacaaugcugagcau

SEQ ID NO: 4147767 - RNA, 58 nt, Human
augcuuccaugaacguucuugucaauguugacaaaugcaagagcuuuccaugggguau

SEQ ID NO: 4147768 - RNA, 129 nt, Human
augcuuccuucccuguucuggagguuggguccucuuccauaagguguuguccuuugguacagcuuuguuguaccauauagaugguaccuucugggccuggacaaucacuugaccaaagggaugggagcu

SEQ ID NO: 4147769 - RNA, 61 nt, Human
augcuuggccccuuuauagccuuaaauauaaaaagaaugcugucuuugaagggguuaguau

SEQ ID NO: 4147770 - RNA, 60 nt, Human
augcuuggcguuucacuuccuguccacugagacaguccuaagucaugcaugccauagcau

SEQ ID NO: 4147771 - RNA, 81 nt, Human
augcuugugucuccauugaacauccucucagaaccuuuagcaugcuaauguguuugugaauguccaagggagucauaacau

SEQ ID NO: 4147772 - RNA, 58 nt, Human
augcuuuauuggagacagucauuguaucaacaguacacuugaucuccaguacagacau

SEQ ID NO: 4147773 - RNA, 76 nt, Human
augcuuuuuguaauccuaaaauuaauuccaguuagcuuggcaaaaguuuuagguuauuuuauuuggaaggaagcau

SEQ ID NO: 4147774 - RNA, 56 nt, Human
auggaaagcuuuagaauuguacucagucaagcugacaguucagacaaguguuccau

SEQ ID NO: 4147775 - RNA, 62 nt, Human
auggaaauacagccagagcagaaauaacagucuauuucccucugccugugcuguguuuucau

SEQ ID NO: 4147776 - RNA, 79 nt, Human
auggaacagaugccugauucauaggagguuccccaggacucuccucucauggggucugagggucaggaaucugugcugu

SEQ ID NO: 4147777 - RNA, 63 nt, Human
auggaagaaagagacaauuugauuugggaauccagggauauuuguacacucuuuuuauuccgu

SEQ ID NO: 4147778 - RNA, 71 nt, Human
auggaaggaauguggcaugcagcugaccucugguacaggacagcaagaggaagcugagaugccucuuucau

SEQ ID NO: 4147779 - RNA, 67 nt, Human
auggaaguuggaaccauucauaaaucuagggcugcuuggacagaaucgugguuccacaacuucucau

SEQ ID NO: 4147780 - RNA, 66 nt, Human
auggaaucagagaaaacaagauaugaggauucuuuaaaaaucugcccugucuuuuucugaugacgu

SEQ ID NO: 4147781 - RNA, 129 nt, Human
auggaauuaggaccagaagcuugucugaugcuuuccuuuuuacuguaugagugugguagucuuugaacaagugaauggcaucauagugcaguagaggagagcccaggauuggaaucuagcuuuuaccau

SEQ ID NO: 4147782 - RNA, 57 nt, Human
auggaauugaagacagcauaggggccagaaccuugugucaggaaguuucaguucuau

SEQ ID NO: 4147783 - RNA, 121 nt, Human
auggacaccagauggcggaagaggcugcagaggugcugccagagacaaggcuaggguccaccccucuggcugcuaccuuugaaaaggcuauggcuucuuccuuagaaaaggggcaucacau

SEQ ID NO: 4147784 - RNA, 72 nt, Human
auggacauacguuuucauuucucuuggauagauaccuaggaguggaauugcugauugaaauaguauguuuau

SEQ ID NO: 4147785 - RNA, 64 nt, Human
auggaccagaguugacuacaaaccacagauuucaccugugacauuuguuaauuuugaaguucau

SEQ ID NO: 4147786 - RNA, 66 nt, Human
auggagaaaguacagcaggcaacaaaaauagucuucucauuacuguuuucuguguauuuuuuccau

SEQ ID NO: 4147787 - RNA, 105 nt, Human
auggagaacggcuucuguccugcauaaguuccuuuuuuaaucaacacaggguaaauuucuuaucucugugggaggaggaguaggcuucagaaguuauugcuucau

SEQ ID NO: 4147788 - RNA, 86 nt, Human
auggagaagcuaaaagagaugugguuuaaugaggacuaaaaucaagacuuaagagaauuuacacauuuuaauuggcauuucucuau

SEQ ID NO: 4147789 - RNA, 85 nt, Human
auggagauuccaguuaguggcagcuuauccgguuacuuuagagacugauuaaugaguugucacuguuuuauuggauaucggucau

SEQ ID NO: 4147790 - RNA, 73 nt, Human
auggaggaguaaaacuggaaugaaauuuacgaugcuuaaaggccauuguuaguacauuugagaacucuaacgu

SEQ ID NO: 4147791 - RNA, 77 nt, Human
auggagguuuggggaguuccuuuaggcccccaauaaaccuguuuguggaggccuggggaguuucuucagacccccau

SEQ ID NO: 4147792 - RNA, 129 nt, Human
auggagugacgagggagaauugaccuauggaaaccucuggcucagugccuucagaagucagggugucaguuuucaggcucugccagacacuguggccaaggccaagggugcuccgucaaaucuauccau

SEQ ID NO: 4147793 - RNA, 64 nt, Human
auggaguugacggccgacacccagaucucguacuccgaguuggggcucaggccgccgaugcugu

SEQ ID NO: 4147794 - RNA, 106 nt, Human
auggaugaaacucaaggauauuaugcuaagggaaauaagccagacacaaaaagauaaauacugcaugauuccacuuauaugauucaucuugaguagucaaauccau

SEQ ID NO: 4147795 - RNA, 58 nt, Human
auggaugacuuggaagccugucauuuaacuguucugauucaguuucuuccucaucuau

SEQ ID NO: 4147796 - RNA, 60 nt, Human
auggaugaguccuugagacacagcuuaaauggaaaagcauuaugucuugcauucauccau

SEQ ID NO: 4147797 - RNA, 63 nt, Human
auggaugcuuuucuuuucagcaagacuucaauugucuaccuguuuauauaggagaagcucugu

SEQ ID NO: 4147798 - RNA, 66 nt, Human
auggauggauggaagaagaauccuaugagguugugcuugccuccugguugcuucuccaacaaccau

SEQ ID NO: 4147799 - RNA, 74 nt, Human
auggauguauuuuagaucugcuuugcccuauaugauugcuacaugugucuacugagcauuugaaauaugacuau

SEQ ID NO: 4147800 - RNA, 85 nt, Human
auggauucuacagguuaggaauuuggacagagaacaauaguuugucucugcuucccaauuucugggaccucuauuuggaagacau

SEQ ID NO: 4147801 - RNA, 78 nt, Human
auggauugugaguagaaguggcauaugucacucuuggaccaaagcauuuaagagcuaguaugucauuucacagucugu

SEQ ID NO: 4147802 - RNA, 102 nt, Human
auggauuugccuauucuggacauuucauguaaauggaaugauacaauauguuaccuuuugugucuguauucuuuuagcaugauguuuucaagguuuauccau

SEQ ID NO: 4147803 - RNA, 76 nt, Human
auggcaaguggcuguucucauuggccuggcuuccccuugagacuggggaugaggaaaaugaaacagcaacugucau

SEQ ID NO: 4147804 - RNA, 113 nt, Human
auggcaaucccaggagagcucaaugguuauuuuuggaugcuaguuaguuacaggguggagcauauaacuaacuaguguucaaaauaccuacugagcucucuugggacugccau

SEQ ID NO: 4147805 - RNA, 56 nt, Human
auggcacaggagaggagggcuguuugugcacgggcagcuccugcagcugcugccgu

SEQ ID NO: 4147806 - RNA, 57 nt, Human
auggcacugggagucuguggggguucuuaucugauuacuucaauuucucagugaagu

SEQ ID NO: 4147807 - RNA, 72 nt, Human
auggcagaagaguagaagagcaagcuagcugaaugcugcaugaagucuuuuuuauaggcgucuuaauaccau

SEQ ID NO: 4147808 - RNA, 56 nt, Human
auggcagccuguggacagucaaggguaccggggccagggcuuauaggaccugccau

SEQ ID NO: 4147809 - RNA, 61 nt, Human
auggcagggcccuuggcucccaugccagcgcaugggacuggacaguggagggccauguggu

SEQ ID NO: 4147810 - RNA, 63 nt, Human
augcuacacuauuugcugagcaagguauaacuugcuuugagucagagguaagagaugaagcau

SEQ ID NO: 4147811 - RNA, 61 nt, Human
augcuacacuccgcgaaaauguaaaauuuuagaagaaguucucuauuugugggugaaguau

SEQ ID NO: 4147812 - RNA, 63 nt, Human
augcuauguuaugacaagcaugacagacuugauggggaucuguucugacucaugacauugcau

SEQ ID NO: 4147813 - RNA, 84 nt, Human
augcuauuggcuccuucuaacaugucuuuacauucucagauauuugauggcagacaguuugaaggcccaacaaaaaugugguau

SEQ ID NO: 4147814 - RNA, 129 nt, Human
augcuauuuuaaaaauaguucauuuauuuaagaauacuuuuugaauaauucucaguaccaucugguagcuggaaaucaaagaaguggaucuuaacauucauagaggaacuguuuuuuaaacaguuuuau

SEQ ID NO: 4147815 - RNA, 77 nt, Human
augcucacaggcaaguuguuugcuaucucagaaauuaauuaacccugggaggggcaggucccaaguugucaaagcau

SEQ ID NO: 4147816 - RNA, 68 nt, Human
augcucaguugcuuucugauuuauaccauacacgugaaucaaagaaugugacugaaauauuuaugcau

SEQ ID NO: 4147817 - RNA, 68 nt, Human
augcuccucgagugucucacagacaagaaaacuaauuccuuggguauaggucaggcacgugagagcau

SEQ ID NO: 4147818 - RNA, 66 nt, Human
augcucuauacugauaauuuugacuggugcuaauuuaccagucaguucugauuauguggauugcau

SEQ ID NO: 4147819 - RNA, 68 nt, Human
augcucugccugcucaccagggcucugcugcucuuuuaccaccagauugcccuuggcaaggcuuguau

SEQ ID NO: 4147820 - RNA, 82 nt, Human
augcucuugguaccaauucuuaaguauuccugauaggccacugccuucagccuagaacuugagaggacccaguucuuagcau

SEQ ID NO: 4147821 - RNA, 88 nt, Human
augcugagaauggcaguggauccaaugguaucuucucuguaaaguugaggaaugcgagaauugcuuuuuuaccugccauucuucucau

SEQ ID NO: 4147822 - RNA, 80 nt, Human
augcugagguccagagcuggcacacugucacugccacacuuugccaaugcaagugacaaggccagccuggauuccagugu

SEQ ID NO: 4147823 - RNA, 109 nt, Human
augcugagugguguuuacugcucauuagcucagauaccucugagagauucugccuaaacuacuauaaaucucuuauuugagcagcaaguagauagccaugaauaugcau

SEQ ID NO: 4147824 - RNA, 77 nt, Human
augcugcaggagggcccaccuugggaguggcaucuggggucccacagaggccaccagagguggugccugggcagugu

SEQ ID NO: 4147825 - RNA, 62 nt, Human
augcugcagguugagucuuagagccaguacugucugggaaagaagauucugauuuguagcgu

SEQ ID NO: 4147826 - RNA, 61 nt, Human
augcuggcuagaauauuuuaaaacuguuuuuauugaaaaguacaaauguucuagccaucau

SEQ ID NO: 4147827 - RNA, 59 nt, Human
augcuggcuuuuugugucaaagaucaugucuguaucucagagaggcagaggcacagcau

SEQ ID NO: 4147828 - RNA, 57 nt, Human
augcugggugagcauuaauagagguucccuuuuccccuugcacuaucacccuggcau

SEQ ID NO: 4147829 - RNA, 61 nt, Human
augcuguggccagaguucaacuuuacaaaguuuuugaaguugguucucuucagccuagcau

SEQ ID NO: 4147830 - RNA, 64 nt, Human
augcuguguuuggagguuugccaggagauauuucuaacugagcagcaccuucaagaaacaggau

SEQ ID NO: 4147831 - RNA, 57 nt, Human
augcuuacuguaaaggucacaugguguuaaauuagcacuuugauauacagaaaguau

SEQ ID NO: 4147832 - RNA, 71 nt, Human
augcuuacuguacauuccguuuguugcacaguagacaguuggcaauaaaagugugaagugcagagaggcau

SEQ ID NO: 4147833 - RNA, 71 nt, Human
augcuucccuaacugcaaagccaaucucaggaguugaguagcuccugaaagaagcuuugaguuagaaguau

SEQ ID NO: 4147834 - RNA, 84 nt, Human
augcuugcaagaaacauauuccacaagcguuuggguaagucauauauuauuugacacuuuggaaauaaauuucuuguuaagugu

SEQ ID NO: 4147835 - RNA, 59 nt, Human
augcuuucuucuuuccuguaagcaaagaucaauucuucccuaggugcugaagauagcau

SEQ ID NO: 4147836 - RNA, 93 nt, Human
augcuuuuugaugcuuagaguagauuucucuuuaagaugauguaauauuagucuucuaugaaguucagagaucuauaccauagcucaaagcau

SEQ ID NO: 4147837 - RNA, 82 nt, Human
auggaaagggauuaaccuaaagaaggauguguguuuucuggaaggauaauaaaucucugcuccucuuggguuuuuccuccau

SEQ ID NO: 4147838 - RNA, 93 nt, Human
auggaaaguacugguuaaguaguagaugcagauuguuuggguuugaauccuggcucccucauuuacuacucaugugaccuauuuacuucccau

SEQ ID NO: 4147839 - RNA, 74 nt, Human
auggaagacuugggaugcucaggguccugcuagccuucaaacugcaggacucugagcaucccaagucuuaccau

SEQ ID NO: 4147840 - RNA, 93 nt, Human
auggaaguguuuuagacauggaugcugaguggagaaugguuaagucaaucagucaucccagcuuucaucucuaguguccugauagcacuccau

SEQ ID NO: 4147841 - RNA, 73 nt, Human
auggaauacuaagcccaagaacacauggucugaccuugaacccugguucugaucugcuucugaguuauucuau

SEQ ID NO: 4147842 - RNA, 60 nt, Human
auggaaugcucccuggggacauggggccgacccucucccuuucgaggggcagcaguccau

SEQ ID NO: 4147843 - RNA, 82 nt, Human
auggacaauuaguugauuccauguuugggcuguucugaauaaugcugcuaugaacaugagaaugcaaauaucucauugacau

SEQ ID NO: 4147844 - RNA, 59 nt, Human
auggacagguacugcaguggguggcagauggccacauaaugaucauaguccuugaccau

SEQ ID NO: 4147845 - RNA, 65 nt, Human
auggacgagccacagaaauucuacuuugaaucaggggaauuaauugugugguuugaauaauccau

SEQ ID NO: 4147846 - RNA, 65 nt, Human
auggacugaauuucuugaaggcaggauacuucuuuuuaguuuuguacucucagaauucagaacau

SEQ ID NO: 4147847 - RNA, 62 nt, Human
auggacugggcucuagaaaggaaagaagcaggcgacagcuuuaacccuagugcucagugcau

SEQ ID NO: 4147848 - RNA, 89 nt, Human
auggacuucucgcacgggcuggcgcucucccagcgcugccccaacgccguggagccgcuguggguggagggcgccgggcacaaagacau

SEQ ID NO: 4147849 - RNA, 80 nt, Human
auggacuuugcuaucguguauucuagccaugucuucuucacaaacauguaguaguuuggagacacugguuuagcauucau

SEQ ID NO: 4147850 - RNA, 62 nt, Human
auggagacauuacacuaagugauagaagccagacacaaaggccauuuauuguaugauuccau

SEQ ID NO: 4147851 - RNA, 69 nt, Human
auggagacucugcuaagaauauaauucaaucuuaaggacagaguuaauccuuuuuugacagaguugcau

SEQ ID NO: 4147852 - RNA, 56 nt, Human
auggagcccagauucuuuguuugcuuuaaagaaaguaaucuggaauuugguuuugu

SEQ ID NO: 4147853 - RNA, 69 nt, Human
auggagggaaaaguggagagccacagaguuggcaaauaaugcuaucauccucuccucucuucauucuau

SEQ ID NO: 4147854 - RNA, 84 nt, Human
auggaggggaggagagaaagugauggauauggauacauuuaggagaauguguacaaccaagcacuaaacucuccuuuucugcau

SEQ ID NO: 4147855 - RNA, 65 nt, Human
auggagggguggggacaaugcacugauguuuaaaaagacaucuguuguuuuucaccacccaccau

SEQ ID NO: 4147856 - RNA, 70 nt, Human
auggaucucuuccagguucugguugggaagcagaggaaugaacuuaacggccucuggaaguaaugucuau

SEQ ID NO: 4147857 - RNA, 59 nt, Human
auggaugaugguguguccugugucgccuugccaggggcuucucagcacacuguccacau

SEQ ID NO: 4147858 - RNA, 73 nt, Human
auggaugggauauugcuugccacuucuccccaaggaccagagagaggauuaaugaggcaguauucacauuuau

SEQ ID NO: 4147859 - RNA, 61 nt, Human
auggauguuaugagcauugauauaagauguuaauuuacauuguucacucauagacaucuau

SEQ ID NO: 4147860 - RNA, 61 nt, Human
auggauuagcaugguaaugcagucacccccugcuaaucggggcgaguaccagcugauccgu

SEQ ID NO: 4147861 - RNA, 63 nt, Human
auggauucaagaaccaagggagaguaaaauugguccaucucacccuaacucuaaaggauccau

SEQ ID NO: 4147862 - RNA, 114 nt, Human
auggcaagucacuuucugaaacugggcuguagcucuagacaaaugauuguaugaaguuuuaaauaaacauacaacauuuacguuaggcuguuucuugaaaugauuuauugucau

SEQ ID NO: 4147863 - RNA, 75 nt, Human
auggcacagcucacccaucacgucugcuucccacuaacaagcaagagugccaugggaugaggucuccuaggccau

SEQ ID NO: 4147864 - RNA, 79 nt, Human
auggcacuucaauguaauaaaauacucuauagcauuaaaaugagauagaauauuuaaugacagaagaaaagguggccau

SEQ ID NO: 4147865 - RNA, 59 nt, Human
auggcagaaaggcaugugggcccagcugucuaacucuaguccacugcucuuucugcugu

SEQ ID NO: 4147866 - RNA, 105 nt, Human
auggcagcugguaaugucuugcagcugguugaccaguuuaaugaugccaaaaucuggcuacaucccucuccuguucugaccagugcagggaucagcuuucgucau

SEQ ID NO: 4147867 - RNA, 89 nt, Human
auggcaggcagccagcuguucuuuaauuuaacccuuugucuuugcagggacaaaacacauuaguuuaaaaagaagcugcugcuagcuau

SEQ ID NO: 4147868 - RNA, 59 nt, Human
auggcaggcauugcaacauguacauacugagugcugaguaugugcccugugccuguggu

SEQ ID NO: 4147869 - RNA, 71 nt, Human
auggcagggcugagcccaggcauguaguaagcccuccaagcuuguuacccaccuuucucaugccaagucau

SEQ ID NO: 4147870 - RNA, 82 nt, Human
auggcagugucccuggccacaguguccagcagcagcauggcagccgcagcagggcucuguggucagacaggggugcugcugu

SEQ ID NO: 4147871 - RNA, 55 nt, Human
aucagagcugugauucccacucuugcugcacggcgggcugaauugcgccucugau

SEQ ID NO: 4147872 - RNA, 68 nt, Human
aucagaggauggccuccaaagaauucccuggacauuaugggaauuacauuguuagccuuccuacugau

SEQ ID NO: 4147873 - RNA, 81 nt, Human
aucagauguauuuuuuaaauguagcauuuguuauuuuacuuuuuaaaauaaagcaugcuuguuuggagagcacuacaggau

SEQ ID NO: 4147874 - RNA, 62 nt, Human
aucagcaaguccuguuaauucuaccuucaaaacaucucuugaaucucacaggcuuuguugau

SEQ ID NO: 4147875 - RNA, 119 nt, Human
aucagcaccaccugggaacauguuagaaaugcaaauuaucaggcuucucuagaaccacuaagaagcucuggcgaggccuagcaaucuguguuuuaacaagccuuccaggcaaugcugau

SEQ ID NO: 4147876 - RNA, 128 nt, Human
aucagcacugacucagaacuuguuggaaaugcaaauucucagaccccacccuagaccuucuggauccgaaacucuacagguggggccuggcaaucuguguuuuaacaaguugucuagguaacgcugau

SEQ ID NO: 4147877 - RNA, 57 nt, Human
aucagcagaguuucaucuugggaugauggaaauauucuaaaauuagauuuuggugau

SEQ ID NO: 4147878 - RNA, 127 nt, Human
aucagcagcaucuggauacuugcuagaaauggaaauucucuggcccuauuccaggccuuccaaguuggaaacuuugugauggggcccagcacucuguguuuuaacaagcccucuagguaauucugau

SEQ ID NO: 4147879 - RNA, 91 nt, Human
aucagcugaagaucauguuaaaauauacauucugauucuguaggauuaggguggauauuuugcauuccaaaagcuccuagaugaugcugau

SEQ ID NO: 4147880 - RNA, 64 nt, Human
aucagcuuggaccaauaagaugaggaaaagaaaauaaaauucauucuagcaguuacaggcugau

SEQ ID NO: 4147881 - RNA, 89 nt, Human
aucagcuuuugaccacucaggaguugguaauauuguggauuucguaguuucuauucuauaaccauacccugaaauucuugagagcuggu

SEQ ID NO: 4147882 - RNA, 57 nt, Human
aucaggcagugacaugaucagauuuaugcuuuggaaaggucacuguggcugcaggau

SEQ ID NO: 4147883 - RNA, 60 nt, Human
aucagggcaggaugcugugauuauucuuauugcaaggaaauaugagcagcuugucuugau

SEQ ID NO: 4147884 - RNA, 63 nt, Human
aucaggugucggucaggcgguuuuuaaagguuucucuaaaauggucucagcuggcaccaggau

SEQ ID NO: 4147885 - RNA, 79 nt, Human
auuagcuuuggaacuuugacaacacguuauuugccuccugugggggugccuuggugugcuguaggguucugugguugau

SEQ ID NO: 4147886 - RNA, 59 nt, Human
auuagcuuugguggaaaggaguguaaaaugauuccuuuucuaaagacaccaaugccaau

SEQ ID NO: 4147887 - RNA, 63 nt, Human
auuaggauguagcuaugucaucaucccaucccugaugggauggaucaauuaagcugcccuagu

SEQ ID NO: 4147888 - RNA, 65 nt, Human
auuaggcaaggacuggcauuaucuuauguuucuuggaauuuccuuggaacaaugcagucucuagu

SEQ ID NO: 4147889 - RNA, 56 nt, Human
auuauguguagagaugaguagguccuguuuggauaacucauuugucugcaucuaau

SEQ ID NO: 4147890 - RNA, 84 nt, Human
auuauuagguuggugugaaaguaauugcgaguuucaacauuacuuuaauggcauaaacugcaauuacuuuugcacccuaauaau

SEQ ID NO: 4147891 - RNA, 88 nt, Human
auuauucauucuaaaauauuaauuuugugugggaucaaaggaaguggaugugcuuuuuguggaacaagguugaccaagaauggaugau

SEQ ID NO: 4147892 - RNA, 59 nt, Human
auuauuccuauggccacugcuacuacuaucaagguauggucgcagauacauggaauaau

SEQ ID NO: 4147893 - RNA, 130 nt, Human
auuauugcagccauauagguauggccuguguugauuuaugugacacuccuuaauguucugaagaauccugaauacaugaggcucauuuaugucaugucacaggauuguaccaugaugaaauagaaaucau

SEQ ID NO: 4147894 - RNA, 70 nt, Human
auuauuuauuuuugaauaccuagccucuaucacacuauaggcacuuggcaggugcucaaaaauauuuggu

SEQ ID NO: 4147895 - RNA, 90 nt, Human
auuauuucaugguauugcagaggcaauuaguuauacaaauuagguaaucauguaucaacaaaggccuuguguuugugccguauagguaau

SEQ ID NO: 4147896 - RNA, 71 nt, Human
auucaacugcugauuaugaaagugacacauucuaggaugaugcaccuuuaaauucagcaguaaacaugaau

SEQ ID NO: 4147897 - RNA, 91 nt, Human
auucaaguuaaucuggacccuuagaaugugaucuuauguuagaaauagaguccuugcagaggucacuaguuaaggugagguuauacugaau

SEQ ID NO: 4147898 - RNA, 55 nt, Human
auucaauaucuguguauuggaaaucagaacuaauuccaauauauagugaguggau

SEQ ID NO: 4147899 - RNA, 59 nt, Human
auucacagggacaaugggagagcaaaauaaaguugcuuuuaggaucucacucugugagu

SEQ ID NO: 4147900 - RNA, 69 nt, Human
auucacagucauucagcaaacauuuauugugucggccaugugccacgcacuaugcuggagagugggaau

SEQ ID NO: 4147901 - RNA, 67 nt, Human
auucaccuuuccccaaaaugagaaacagcagaagcauuauaaagcugcccaugggugacagguggau

SEQ ID NO: 4147902 - RNA, 55 nt, Human
auucagcugacuuugauucauuuauaaauaaaauguaaaguagagucagcuaaau

SEQ ID NO: 4147903 - RNA, 66 nt, Human
auucagugucuugaucugggaaugauaauauuaacuaccuccauagauugcuacaagucauugaau

SEQ ID NO: 4147904 - RNA, 74 nt, Human
auucaguuucuuagugacacaaaucucaggguaaauuuaugccuucaugguuuguuuccuuaaaaaauaugagu

SEQ ID NO: 4147905 - RNA, 65 nt, Human
auucauuaaggcucaguuuuaggcauuagggaugcaaauguauacuacagggucuugcuaugaau

SEQ ID NO: 4147906 - RNA, 60 nt, Human
auucauuagccacuaacuagcacagucguaugagucugauguuguuuuauggcuaugaau

SEQ ID NO: 4147907 - RNA, 75 nt, Human
auucauuuaaaaauauuuacuggauaucuacuaaaaggccucuuagaaggugcuugguaaauauuuuaggggaau

SEQ ID NO: 4147908 - RNA, 67 nt, Human
auuccaccagcuuuggcggugacagguaaguugaugaugcauagcugucuccugggcuagguggaau

SEQ ID NO: 4147909 - RNA, 63 nt, Human
auuccagauggcuucaaguaagcugucaguucacaucuggccucuugaauugccaccuggaau

SEQ ID NO: 4147910 - RNA, 71 nt, Human
auuccaggggaguggcagagggacagccagcacgagacauuuucaagguuguuuuucccacccuuuagaau

SEQ ID NO: 4147911 - RNA, 85 nt, Human
auuccauuugagcuuaaguaucugcauuugaacuucaacuacagccucaauauagcaguguacuugagaaccgccaauguggaau

SEQ ID NO: 4147912 - RNA, 89 nt, Human
auucccaccuuaguuugggguguuuugaagagguucagagacuaaaucuuaaaccuuauuugaauaccaacgauagcuauuuugggaau

SEQ ID NO: 4147913 - RNA, 85 nt, Human
auuccccuuauugucccaauaggauugucaacagcucccagggccugcauguuuucuuaauugugauuaguaaguaagagggagu

SEQ ID NO: 4147914 - RNA, 84 nt, Human
auucccugaucuucaguuucguuaucuaugagaugggaauuaauuauaaccguaccuuacugacaacgagauuguuugaggagu

SEQ ID NO: 4147915 - RNA, 56 nt, Human
auuccuagguuugagggaaccaaaaggaaaauuuaugggcaccaaaaccuaggagu

SEQ ID NO: 4147916 - RNA, 91 nt, Human
auuccuauuuuauucagcuuagaaugugagcccuucugcacaggccaugccggucugagcacaucacacagcucagaauaacguaaggaau

SEQ ID NO: 4147917 - RNA, 79 nt, Human
auuccugaagccccauuuccaauuuucaaauuucuucuuggagaagagguagaaaauaauggagagaagcugaaggaau

SEQ ID NO: 4147918 - RNA, 79 nt, Human
auuccugaaguugcuggaaaguuaaauuuuggaaaggugacacugcuucuccagugacucaucugagcgccucaggaau

SEQ ID NO: 4147919 - RNA, 71 nt, Human
auuccuuggcucauggcucacucccaucuucuaaaccagccaugauagguugagucuuuugcacaaggaau

SEQ ID NO: 4147920 - RNA, 55 nt, Human
auucggucacacccauuaauggucaagaccaccuucauuauggcugugaaagagu

SEQ ID NO: 4147921 - RNA, 59 nt, Human
auucuaaccaaaacugaaugcuaguagcaggaacugguaugaagauugcggucuggaau

SEQ ID NO: 4147922 - RNA, 61 nt, Human
auucuacacaaagcaagaagacugguguugccaguggguuucuaacaugccuugugagaau

SEQ ID NO: 4147923 - RNA, 98 nt, Human
auucuagccagcauuuaaggguggauacaggagaucaaaguauuugaauacuugcuucacuuucuauuugugucuggucccucaaugcugagugggau

SEQ ID NO: 4147924 - RNA, 77 nt, Human
auucucauguaugaugggaggaauggaauuuuauuacuuuugaaauggcuagucaaugucccauuuauuaaaagagu

SEQ ID NO: 4147925 - RNA, 88 nt, Human
auucuccuuccagcuuguucucaugccuuucucaucaccugcugaggccuugaucacggacagagcagacgagcagcggggggacaau

SEQ ID NO: 4147926 - RNA, 66 nt, Human
auucucugaucugaaggaggaauggugcucaauuaagacauuugucuucuuucagauuagcagggu

SEQ ID NO: 4147927 - RNA, 76 nt, Human
auucucuuuuuauucaguauguuggacguuaugugacuguaguacacaugcuuugauuauuguuuuagaggaggau

SEQ ID NO: 4147928 - RNA, 59 nt, Human
auucugaaauuuuccacauaucaaaguggccucaauggcucuuggaaaaaguucagaau

SEQ ID NO: 4147929 - RNA, 57 nt, Human
auucugaagcagaaaaggcagagaaugaggacagaacagcucugccaguuuuagaau

SEQ ID NO: 4147930 - RNA, 89 nt, Human
auucugaguaguaauguccuuuaaguaaucagcaugguuaucaaccuaccaaccacagcucuaacuauuaagaggucauggcuuagaau

SEQ ID NO: 4147931 - RNA, 55 nt, Human
auucugauaucuuauucuagcucugucacuuaugagcugggaaaguuuauagaau

SEQ ID NO: 4147932 - RNA, 61 nt, Human
auucugauaugaacacacauauauauauaauuguguacuugugaaagugcaugucuagaau

SEQ ID NO: 4147933 - RNA, 101 nt, Human
auucugcaauaggagggguucaggcuauauuuaaagaagaacuuccugcccaggaaagauguucuauguugagauagcuaauccucccaaaauagcagagu

SEQ ID NO: 4147934 - RNA, 61 nt, Human
auucugcucagcauuugugauugaauuugacucucaaauuauucaaaaagcuguguugagu

SEQ ID NO: 4147935 - RNA, 59 nt, Human
auucugcuuuugcugaccuaccauucuacagccauggugauaggucaggaaagcagagu

SEQ ID NO: 4147936 - RNA, 55 nt, Human
auucugguucuugcucauugugucucuaggcauuuuguagggcaggaaucagggu

SEQ ID NO: 4147937 - RNA, 91 nt, Human
auucuguaguuaagacugcuuuggacauuuuuaaaaacuaauuggguuaaaauuaguguuuaaagguuucagaguucacuuaaauaggaau

SEQ ID NO: 4147938 - RNA, 87 nt, Human
auucuuacucaaugauuagucuucaacauucucacauacucucagccacuuugaguaaacgaagauacaucauucaggagugagaau

SEQ ID NO: 4147939 - RNA, 58 nt, Human
auucuucacauaagugcuguacuccaauuggaacggaagccaguacuaugagaaggau

SEQ ID NO: 4147940 - RNA, 70 nt, Human
auucuugcauaaagauuuuauugcauagguuauaggauaaaaugcaagagaaauguuuuguggaaagagu

SEQ ID NO: 4147941 - RNA, 60 nt, Human
auucuuggggugaugggcauggggguggaggagaucacuucuagagucagcuccaaguuu

SEQ ID NO: 4147942 - RNA, 66 nt, Human
auugaaacuagaaccacuuguauuuccuuccaugaugccgauaggaaccgagaggucuggaucaau

SEQ ID NO: 4147943 - RNA, 80 nt, Human
auugaaggcaaagcgauaccagagcuaaaacguuaaugaaaaaccuaauuaacuuggcuagguagcuuucugcugucaau

SEQ ID NO: 4147944 - RNA, 91 nt, Human
auugacggauauguuuugauugaaggauuaguuuacucauucauucauuuguucagauaauucaauucaauucuaaauauauugacucaau

SEQ ID NO: 4147945 - RNA, 99 nt, Human
auugagcaggggcuguggauagaaauuuccuguaggggcuugcgaaggcaucuucacugguccuuuauaggaacccucuaugcauuucccuuugccagu

SEQ ID NO: 4147946 - RNA, 67 nt, Human
auugaggugggaggugaggcaugauguuugguaauuauauaggaucauguacaugccuacuaucaau

SEQ ID NO: 4147947 - RNA, 113 nt, Human
auugaguuaagaaggccaggacuuuaaauccuccuccccaggaugaucaguccauuggaugcgaguuaucccuggaaggaggcaugacuuuggcugaagaaguuuuccucagu

SEQ ID NO: 4147948 - RNA, 60 nt, Human
auugaguugcauuuuccauaauucagcaaagauuugaagacauggaaaauuguacucaau

SEQ ID NO: 4147949 - RNA, 93 nt, Human
auugaucacuuuuucuuaugaaauguauucagauauguauugaagacuuauuugaaugcagucuguacauuuuaagaauuucagcuguuuaau

SEQ ID NO: 4147950 - RNA, 65 nt, Human
auugauucucauaggaccaucuuuucuuuagcaagauacagauauuuggcccuuuggggaucagu

SEQ ID NO: 4147951 - RNA, 63 nt, Human
auugauucugaugaaaguccauuugagagccaagaaugagugugcugguccaucugaaucaau

SEQ ID NO: 4147952 - RNA, 55 nt, Human
auugcaagucagagugcaggugucuaauuccaggcaucaggcuuucuguugcgau

SEQ ID NO: 4147953 - RNA, 127 nt, Human
auugcacauacuugauauacauguauauacauauaaguagacauguguauguuugggcauaugcauguauaauauaugcauguguacuuaugugucuguuaauaugcacguauauauuuguuauaau

SEQ ID NO: 4147954 - RNA, 55 nt, Human
auugcaggauacccagguagagaacacugaucucucugcauuucuggguggcaau

SEQ ID NO: 4147955 - RNA, 61 nt, Human
auugcaggccaguguccugggcgauuccguguggaauagaccacagcaaagguuaugcaau

SEQ ID NO: 4147956 - RNA, 59 nt, Human
auugcagggcaucuaugucuggucucaggauuuucuuguaucagcaacugccacucagu

SEQ ID NO: 4147957 - RNA, 69 nt, Human
auugcagguaccuuggguugaguucauucuggcaccagugagcuuucaccccaaggaggcagaagcagu

SEQ ID NO: 4147958 - RNA, 71 nt, Human
auugcaucaauuucaugugcacugauuuaggcgaagaugcguaggaaaagagcaaggaaaugaggugugau

SEQ ID NO: 4147959 - RNA, 67 nt, Human
augagacagaauugaagcugaguaaauauacauuaguguguuuucuuuauguaauucugaaucuuau

SEQ ID NO: 4147960 - RNA, 129 nt, Human
augagaguugcagccucagcaccagcuuugcaggagguggcugaacuugagggaguacccagaaggggguccucagagaugggcaucuaagauacuucagaguuguugacgccauggggcaacuuucau

SEQ ID NO: 4147961 - RNA, 57 nt, Human
augccgucagcuuauuaaagaacuaguuugggacuuguuucaguugguuaauggcau

SEQ ID NO: 4147962 - RNA, 61 nt, Human
augccuaugccauuuugagauguuaaugauucauuucacuacaauucacaagugguggugu

SEQ ID NO: 4147963 - RNA, 66 nt, Human
augccuccgcugcucgcagcgggccuggccucggccccgggcuccacgcacgcgagaggugggcgu

SEQ ID NO: 4147964 - RNA, 73 nt, Human
augccuucugucccagaugucuggaacucccuggacacguagggauuucugugugucuggccacagaagucau

SEQ ID NO: 4147965 - RNA, 66 nt, Human
augccuuggcuagaucuuucagaagaaacuaacaaaggauguuucgggagagaaagaccaaagcau

SEQ ID NO: 4147966 - RNA, 72 nt, Human
augccuuucacaggugacuggggauaacucacuaccuggagguccaugucauucucaucgcugugauugcau

SEQ ID NO: 4147967 - RNA, 66 nt, Human
augcgauaacuagagggaaagaguacuugccucauacggcagauucuucauucauucuacaagcau

SEQ ID NO: 4147968 - RNA, 66 nt, Human
augcgcuuugugugaagcagugacagugcaaucugcuaagauagcugcugcuguggacaaagccau

SEQ ID NO: 4147969 - RNA, 68 nt, Human
augcggggucccugauugagccuuucuguccccugcaggacagagguggaccucagcaggcucugcau

SEQ ID NO: 4147970 - RNA, 116 nt, Human
augcgugugugaagcagucuguuuuauagagugagcauauauguaaucguuuucauauaauugaaaaugugcuguguguugcauuuuauucucaugucgacuuuucuacuauguau

SEQ ID NO: 4147971 - RNA, 74 nt, Human
augcuaaaguauugacagagggucagaagaggggaaggagcugguccuucauccccaccugucuaugcuagcau

SEQ ID NO: 4147972 - RNA, 58 nt, Human
augcuaaauggccaguaccaaaggagggaaaagaacuccuggggauguucuuuagcau

SEQ ID NO: 4147973 - RNA, 72 nt, Human
augcuaagacaagacauugguaaagauaugggaaaaucuguauuaacagcaauaaugucuuuguuguagugu

SEQ ID NO: 4147974 - RNA, 60 nt, Human
augcuacagcccucuuugcauauucaucucugauaugcaccaaaaggagcugucugucau

SEQ ID NO: 4147975 - RNA, 76 nt, Human
augcuagaacuguucuaagcaauaucuaaacacuauguccauguauauggcauguuacuuagaauaauucuggcau

SEQ ID NO: 4147976 - RNA, 61 nt, Human
augcuagcaauuuaguaucuguuagguguaauauccuggcacuaugcuuacaugcuuauau

SEQ ID NO: 4147977 - RNA, 74 nt, Human
augcuaucuagaacaauuauugucacagauaagauuuguuugugcccugucuguucucaguaaauuaggagcau

SEQ ID NO: 4147978 - RNA, 75 nt, Human
augcuaucuauuucauuauggucaauguuuacuuacaauaauauguagcaaugcucuaugaugaaaagccagcau

SEQ ID NO: 4147979 - RNA, 59 nt, Human
augcuaucuucagcaccuagggaagaauugaucuuugcuuacaggaaagaagaaagcau

SEQ ID NO: 4147980 - RNA, 75 nt, Human
augcucagagaaccacugaccucggggcauguaguuaacaccugcagugcuugaagagguggccaguuugaaugu

SEQ ID NO: 4147981 - RNA, 111 nt, Human
augcucaugugacaaugaagacuucuaguuuugccuuaucaacaucaugcuacuaaaauucaucuauguuguugaguauagcugcaguucauuuauuuuucacuacuguau

SEQ ID NO: 4147982 - RNA, 61 nt, Human
augcuccaccuuuugcaggaacugucaucaaguuaaaagcugcugugaaauguggcaguau

SEQ ID NO: 4147983 - RNA, 56 nt, Human
augcuccaguacuuagccuugcaaaccucaacauggcuucuccagguacugagcau

SEQ ID NO: 4147984 - RNA, 61 nt, Human
augcucugggaaagcauugccuugaucaaaugccaaggcuguugcaugccacagauagcau

SEQ ID NO: 4147985 - RNA, 87 nt, Human
augcugaagaccaauuugggccauggcgaggcugcagcauagcuggccuuggaagccugguuuguagguugguuggaaucauagcau

SEQ ID NO: 4147986 - RNA, 60 nt, Human
augcugaggacaaagagaucaagcaggguauagagcugcugauccuaaagucugcagugu

SEQ ID NO: 4147987 - RNA, 80 nt, Human
augcugauagggugccuuuuauugcugugaaauauuggcugcaguguagacaugauagcuggagggcaccuuguaaccau

SEQ ID NO: 4147988 - RNA, 128 nt, Human
augcuggcucuccaagcugggacagaagauagggucaguucccacuugcucuccacgggcgcgggcccagcagagaggagguggcccugucuugagagcccagcugccuuuugucgagggccaguauu

SEQ ID NO: 4147989 - RNA, 98 nt, Human
augcugggagggacugaguguugaauagacgcuuugaggcucuggagagggcagacguuucccaggcccucagggcugccacucagccaccucggcau

SEQ ID NO: 4147990 - RNA, 61 nt, Human
augcugucaguauuaugugcaguccauuaccaaggcaaauuauauaacaugcugucaguau

SEQ ID NO: 4147991 - RNA, 75 nt, Human
augcugucccuguguccccaagguucagcccacaguuuccgcagcucugauuucaaggggaagcaaagacgauau

SEQ ID NO: 4147992 - RNA, 130 nt, Human
augcuuagaaacaaacuacccauuuuuuugacauuuaugaggcaauuggaaauuuuaacacugacuggauaguuguugauauuacggaauuguuaaccuuuuuaaugugugauaaugguauuguuaggau

SEQ ID NO: 4147993 - RNA, 63 nt, Human
augcuugcuucagggaaguuagaggcaccaggcccugcaucucacuucccugcagcaucccgu

SEQ ID NO: 4147994 - RNA, 57 nt, Human
augcuuuaaacuauaaauccacaguauuuggugacuguggaggugcagagaaggcau

SEQ ID NO: 4147995 - RNA, 64 nt, Human
augcuuugaaguuuuuccucauaaagaacauaaugcaguaacuuaggagagaccauuaaagcau

SEQ ID NO: 4147996 - RNA, 76 nt, Human
augcuuugccacagaacucuuccaaaugcagcuaaagcuuccugaggcuaagaugcaugaggaucuggggaagugu

SEQ ID NO: 4147997 - RNA, 77 nt, Human
augcuuuuaacuccuuuaucccauaaaucuguugcaguacaguuaauaauuugcaggguagaaauggacagaggcau

SEQ ID NO: 4147998 - RNA, 64 nt, Human
auggaaaaagucaugugcacagagaacagucuaugaauggugacugauuuaaacguggcucuau

SEQ ID NO: 4147999 - RNA, 76 nt, Human
auggaaagauuuucauucuuauuugugaucuggacaguggguggacuaguucagauccauagagaaaaaucuccau

SEQ ID NO: 4148000 - RNA, 59 nt, Human
auggaaaugugaagcuggcacuuagauaugaaagucugagcuuccagagcacauuccau

SEQ ID NO: 4148001 - RNA, 129 nt, Human
auggaaauuucuguuccaaaggugaagucucucauggcugacagcacuggaucgcauuaacaaggaaaccagcccugcucucuggcugugggaucagacacaaaaucuaaggaacaguuugacuucaau

SEQ ID NO: 4148002 - RNA, 79 nt, Human
auggaagcaaugucaaggagaccaaaacgcgggugucagaacuucccuuuguuuuuauuucugugccguuuguuuucau

SEQ ID NO: 4148003 - RNA, 70 nt, Human
auggaagcagcucagauugacugaauugacucugcaaacccuucaggaacauuaauggaguugcuacuau

SEQ ID NO: 4148004 - RNA, 59 nt, Human
auggaagggguccacguauacucgagcuuuugcuugggauaaaucucagcuucuuccau

SEQ ID NO: 4148005 - RNA, 81 nt, Human
auggaagucacucaugugggaaacagaaaauccaucuuucaauugucccagaagguucuuucucaacaugaauguuucuau

SEQ ID NO: 4148006 - RNA, 60 nt, Human
auggacagauuaacacaguagauguauucagcaauagaacgacaguguuauucuggccau

SEQ ID NO: 4148007 - RNA, 65 nt, Human
auggaccagagccucauucugugaugcuaucauuucugcauccacagauucacugcacuggccau

SEQ ID NO: 4148008 - RNA, 74 nt, Human
auggagaaaggccagcucacagaugagacuaaaaugaaacccagguuuccucuggcuucuggcuuuaucuccau

SEQ ID NO: 4148009 - RNA, 66 nt, Human
auggagaugauaauggcuuuuugaagggucguuauaaggauuaaacggaaacauuuuuauuuccau

SEQ ID NO: 4148010 - RNA, 76 nt, Human
auggaggacucucuugggggagagcagagggauaagccccucaucucucaaggaucccagagcaaaauccuuccau

SEQ ID NO: 4148011 - RNA, 70 nt, Human
auggaggagggcuuuugaggcugggagaaauauaugguauuuacacugguucucagagcucauuuucugu

SEQ ID NO: 4148012 - RNA, 55 nt, Human
auggaggaugugcagcaugggcaggaaaagagccuucagugguguacauuuccau

SEQ ID NO: 4148013 - RNA, 66 nt, Human
auggagguaaauaagaguaugucuggaauauaggagaucccugaaggcaucucuuaguaucaccau

SEQ ID NO: 4148014 - RNA, 63 nt, Human
auggagguguuugauaauuugguugcuaugcaaccacuuuacaauuauguaagcuccuaccau

SEQ ID NO: 4148015 - RNA, 69 nt, Human
auggaguaauuuucuuaaaacaucaugauggccgaaauaauggugaugccauaguaaaauuugcuucau

SEQ ID NO: 4148016 - RNA, 61 nt, Human
auggaucuucccucauuucugagguuaaaauacuuuuuaauaaaugaugggaauaaucuau

SEQ ID NO: 4148017 - RNA, 80 nt, Human
auggaugggcugccugaguacaagucccagagcuuucccuuaauagcugugagacuuggggcagguuacuucucuuccau

SEQ ID NO: 4148018 - RNA, 74 nt, Human
auugccaagaaaauuuagaauaggaagggauauuauuaucugcuugaaacuucuuauacuacauuugagguaau

SEQ ID NO: 4148019 - RNA, 64 nt, Human
auugccauuucucaaauaugacuagauauuaaauuuuuuuuaguugcuaaacagaaguggcaau

SEQ ID NO: 4148020 - RNA, 87 nt, Human
auugccuagccaugucucuccaagccugggagagccaucuguggccaaaacuguccucuggccuuucccaggacacgggcaggcagu

SEQ ID NO: 4148021 - RNA, 59 nt, Human
auugccuaguucagaguaauuucuaggucagugaacccuaauguuucugaacagguagu

SEQ ID NO: 4148022 - RNA, 88 nt, Human
auugcgauauauccuuauguugcuuuaacuggaggaacuaaaauaacuguggcucugauaguuacagcaggcaggauauauaggcaau

SEQ ID NO: 4148023 - RNA, 63 nt, Human
auugcuaccccaacaagggcaguguggccgguggggccaucuggcuuggguguggguagcagu

SEQ ID NO: 4148024 - RNA, 75 nt, Human
auugcucuuugaauuuaccauugugggguaauugaaaagaccccauauuaacaagaguaauuucaacagaguggu

SEQ ID NO: 4148025 - RNA, 59 nt, Human
auugcucuuuuaaaucaaucacugugacugaaaugugcaggacaguuuggaagagaggu

SEQ ID NO: 4148026 - RNA, 56 nt, Human
auugcugacucaauaauugaaggaaucucuugguugcuucauuguguggucacagu

SEQ ID NO: 4148027 - RNA, 124 nt, Human
auugcuuugguuccucaggaucuuuuguguuuccacaugaauuuuaagacuguuuuuucuauuucuaugaagaaugucguugguauuuuaauuggaaaugcauugaaucuguagcuugaguaau

SEQ ID NO: 4148028 - RNA, 70 nt, Human
auugcuuuuucuagugguugcaugauuaucaugccucugaugauaaaucugcacccacugaaaaugcagu

SEQ ID NO: 4148029 - RNA, 85 nt, Human
auuggaaacagaagguggugucuuuagaaagaagcagacaacagcaugugccucaaaccuggagauauaccuucucucugcuagu

SEQ ID NO: 4148030 - RNA, 58 nt, Human
auuggacacauuuucuucuuaaggauuuguguuuccuccaggauaaaauguguugagu

SEQ ID NO: 4148031 - RNA, 56 nt, Human
auuggacaggcuauauaauuuaauaauugggauuaggcuguguagcagugugcagu

SEQ ID NO: 4148032 - RNA, 129 nt, Human
auuggacugggcuccugggagucuuuguggugcuucaugugccagagcugaaaauaaugcuguaagagcugauuggucaagucuugcaggugacagcccaaggaaucccaguccucuaucccauccacu

SEQ ID NO: 4148033 - RNA, 62 nt, Human
auuggagggucugagcugaggggaaaucacggacgugcaucaccccuaaucagacugcuaau

SEQ ID NO: 4148034 - RNA, 68 nt, Human
auuggcaucuugggcuuagggcacuuaccacuuuuugacaguaggauaagagccuguccaaugugaau

SEQ ID NO: 4148035 - RNA, 64 nt, Human
auuggccuaugaucuugagagccaccuaucaauuauacuuucaacaggaugauaauaggcuaau

SEQ ID NO: 4148036 - RNA, 75 nt, Human
auuggcucauuuguagaaucauuauuucuaguaauguauuacggagacaaagaugcuacauucucaucagucagu

SEQ ID NO: 4148037 - RNA, 59 nt, Human
auucuuucuucucaggcuggguaaauccacgauuuccugcuuuuccugggggaaagaau

SEQ ID NO: 4148038 - RNA, 128 nt, Human
auugaaaauucaaauuagaaaacgaacucuuggagauacuaguaagauauuugacaggcgccgaaugcuccaucaagcuggcuguugcuauuucaaggguuaugaucauucugaugaagauauuuaau

SEQ ID NO: 4148039 - RNA, 64 nt, Human
auugaaauugaugaaauucuugcauuccagugcuucaaagaccuggacuuucaucaguuuuaau

SEQ ID NO: 4148040 - RNA, 65 nt, Human
auugaacucugcaggagcugccuuuguuucucugccuuaacauguauuuguuccugcagauuagu

SEQ ID NO: 4148041 - RNA, 61 nt, Human
auugaaugccacgcuucccccaucugcuguaauaacagugcugggucugcuuggcuucagu

SEQ ID NO: 4148042 - RNA, 81 nt, Human
auugagaauuguuuaacuaguuuucacacuucuucaacaggucuaggaguugaaagcaaaaguugauauuauguucuggau

SEQ ID NO: 4148043 - RNA, 57 nt, Human
auugagauuugggccugaggagaggguuuccaacuccagggcuggccagaccucggu

SEQ ID NO: 4148044 - RNA, 56 nt, Human
auugagcuauuucuuguauacaguaaagcacacaaacuguacauauagagcucagu

SEQ ID NO: 4148045 - RNA, 59 nt, Human
auugaggcagcauaguucaggggcucuaagaaaaguuucuggaacaaggcugcuugggu

SEQ ID NO: 4148046 - RNA, 78 nt, Human
auugaggugaacccuaaacuaucaguagcuauaagucuucuuuuggcuucuuguuugguuuaagaggauuccugcaau

SEQ ID NO: 4148047 - RNA, 61 nt, Human
auugagucuuuucauuucacauaugaggaaaucaaggcccagagaagugaagugacucaau

SEQ ID NO: 4148048 - RNA, 94 nt, Human
auugauagcaacagagagaggccacugcuauuaauucacugcugauuacugaugcuuauuaaggaugauaguaguggguuuuuuuccugucagu

SEQ ID NO: 4148049 - RNA, 73 nt, Human
auugaugcugcucugaguauuaacggaggccacaaacuauguggccucauuuauaucacuuagaguugucagu

SEQ ID NO: 4148050 - RNA, 76 nt, Human
auugauucaacuuucuugaaugcaauuuuuuaaaacauuuaaguugcguaauauugaucgagucauuugauucagu

SEQ ID NO: 4148051 - RNA, 107 nt, Human
auugauuuuccccagaggggcauuagaauucagaaugcauuucuaaucaguuugcuguaccuaacuuauuagaauugcuguuugauuagugcccacugcaaaucaau

SEQ ID NO: 4148052 - RNA, 65 nt, Human
auugauuuuuacauguggugugaagaagaggucaaacuucauucuuuuacaugugaauauucagu

SEQ ID NO: 4148053 - RNA, 66 nt, Human
auugcacaggacugugauccaguaaccaagauaaaggccucuuguguucaucccagucugugcaau

SEQ ID NO: 4148054 - RNA, 93 nt, Human
auugcaggccuugugucccaagucuuuucagccccuucaucauagagugacccugugcuaaguucugcaaaagauaaucaugcaggccgugau

SEQ ID NO: 4148055 - RNA, 59 nt, Human
auugcagggaggcagguagauggcuuucgguaggggcccauguauagcuucacugggau

SEQ ID NO: 4148056 - RNA, 121 nt, Human
auugccaaaacugcuugucuaaguaucuuguuuaugaauguuacuauagagugguggcccuuuacacuguaguaugaauuaguggccagcaugcuugacagagagcgcagaacagggcagu

SEQ ID NO: 4148057 - RNA, 84 nt, Human
auugcccuuugaacuccagacuacuaauuuagugaauucuucacuauuucuagaugcucugauaacagagguuaaggggacagu

SEQ ID NO: 4148058 - RNA, 84 nt, Human
auugccucagguucauggccagcucagagcacucaguuacugacaggcauguguguggacgagcguggcccaucugggugcgau

SEQ ID NO: 4148059 - RNA, 75 nt, Human
auugccucuguuccauguuuuguuccauauaaacauccagacacaggucucaugggagaaacaucaugaggcagu

SEQ ID NO: 4148060 - RNA, 77 nt, Human
auugcucucugugugccuguacaucugcucucauugcagucgguacaacugcgagauguuuagccagcagccguaau

SEQ ID NO: 4148061 - RNA, 82 nt, Human
auugcuggaagaagcaggucuugcucucaacaggcauaugaauuaucuuccuguaccaagcaccugcauagcuucaggggau

SEQ ID NO: 4148062 - RNA, 65 nt, Human
auugcuggcccagaugcuuuagcgagaaaacugucuacaacagcuaagcaucuggauguagcaau

SEQ ID NO: 4148063 - RNA, 84 nt, Human
auugcugugguguguagacugccaguaauaucucaaggaugagcugggccuagauauuaccagcagucuaugcaccauaguaau

SEQ ID NO: 4148064 - RNA, 62 nt, Human
auugcuuauaacacuugcauuuguaugagacuugagucuuguacaacagguuuuauuucgau

SEQ ID NO: 4148065 - RNA, 69 nt, Human
auugcuugaacccaggaggcagagguugcagugagcugagaucaugccacugcacuccagccuggcaau

SEQ ID NO: 4148066 - RNA, 81 nt, Human
auuggaagggaacaccauuugaccuuguaagcauggcuauacuuauuauuggaagugcauggcaaaguguguccuuccagu

SEQ ID NO: 4148067 - RNA, 69 nt, Human
auuggagugguuuaaauagcuguuguuuauuuacuaucacagagccggcaacuguuuugagcacccagu

SEQ ID NO: 4148068 - RNA, 86 nt, Human
auuggauauuccucugguccuaaagcccuacuccaaaucuuaguccauauggauaaggcuggaccuagaucucugaaccuuccagu

SEQ ID NO: 4148069 - RNA, 129 nt, Human
auuggaugauuggguauuuguuucuaaaugcaguuggcagucauuguagaacugauuugaauuacauuguuuuaaaagguacucaggcugcuguacugugaauggcauuugguagagccucauccauau

SEQ ID NO: 4148070 - RNA, 110 nt, Human
auuggcagauaaggauuggaaucagugaguucucagcuuaguaugcugugggucauacaggcauaguguugagaagcauacugguacuuaguugacacuuauuuaauaau

SEQ ID NO: 4148071 - RNA, 60 nt, Human
auugggaaacugaagcuugggccaaguggaggaacauggcucccuccuagcuuucccaau

SEQ ID NO: 4148072 - RNA, 60 nt, Human
auugggguuuauuuuuauccagauuauuuuuauuaauuguacaaaaaaguagaccuuggu

SEQ ID NO: 4148073 - RNA, 116 nt, Human
auuggguggggagaagauccccuugcuucuugagaucauuuauuuaccuuucuugcuuagaaagacaaauaaauggucugaaagugcuuauuugggggguaguuuuuuuuuuuaau

SEQ ID NO: 4148074 - RNA, 57 nt, Human
auugguaguccuggaugccucuagguggcaguucaaguggcauccagaacuaccagu

SEQ ID NO: 4148075 - RNA, 62 nt, Human
auuggucuaggcuuuaaaaagaccagcagccucuacuucugcugggagaagccagauacaau

SEQ ID NO: 4148076 - RNA, 58 nt, Human
auuguaaaguacuguguacaauucaguagcuuuuacugcgcucacaaugcuuugcaau

SEQ ID NO: 4148077 - RNA, 64 nt, Human
auuguaaauagugccacaauaaacauacuugugcaugugucuuuauagugguaugauuuauaau

SEQ ID NO: 4148078 - RNA, 56 nt, Human
cacaugggaagaauaauguuuggcauaauuauaaaaagcaauuaccuucccaugug

SEQ ID NO: 4148079 - RNA, 59 nt, Human
cacaugggugugccuggaggaagaaaaauguucauucugccuuccuugcuccccaugug

SEQ ID NO: 4148080 - RNA, 99 nt, Human
cacauguauuuguuaauguuuuggaguuaccugacauauagguauagguauaggaaaaccuauuccagguauucuucaagaggugauaguuguugugug

SEQ ID NO: 4148081 - RNA, 60 nt, Human
cacaugugcaaauacugaggcucacaaaucauuccugugaacucagcuguagcucaugug

SEQ ID NO: 4148082 - RNA, 58 nt, Human
cacauucauggaguuugccugucagcaaugugaugucaacagguaaauaugaauagug

SEQ ID NO: 4148083 - RNA, 82 nt, Human
cacauuccuauuugaucauuuuucugguaaaauuguucucaagguccaagcguagccaggggaauuccaggaaagauuugug

SEQ ID NO: 4148084 - RNA, 70 nt, Human
cacauugggaguugaguuauuaggauaggcugggggcagagauaauguuaaaaauucagcucuagaugug

SEQ ID NO: 4148085 - RNA, 69 nt, Human
cacauuguaguaaaagcugcugugaauguuauaauggugguugcuaugggcaacagcagucacaaugug

SEQ ID NO: 4148086 - RNA, 62 nt, Human
cacauuuagguuccuauagccaugaacccaugaaucuaaugcaaaguaggaaacugcaugug

SEQ ID NO: 4148087 - RNA, 56 nt, Human
cacauuucauuggcuuacguaauauuuaauucuauuauguaaguuacaaagaugug

SEQ ID NO: 4148088 - RNA, 71 nt, Human
cacauuucuaacuagaacgucuaguugcuggaggcucaaguugaaaucccuggacuuucuaguauaaugug

SEQ ID NO: 4148089 - RNA, 62 nt, Human
caccaauuuccugcaggggcuggugggcgcgauugcucuggacagcccuccaggaaggggug

SEQ ID NO: 4148090 - RNA, 62 nt, Human
caccacagcauccacuagaaggaauauuuaggguuuuguuucuuuuugaguauguuuuggug

SEQ ID NO: 4148091 - RNA, 62 nt, Human
caccacaugugcucuucuuucaguuuaggcauaccagcgcagcugcagaagacacaguggug

SEQ ID NO: 4148092 - RNA, 72 nt, Human
caccaccacacccagccauguucaguucucuagaguauauaccuagaaauggaauugcugggucauauggug

SEQ ID NO: 4148093 - RNA, 55 nt, Human
caccaccaccauuuaauguuuguuaaagcagugcauaaucuaaauggggguugug

SEQ ID NO: 4148094 - RNA, 106 nt, Human
caccacguuggccgggauggucuugaucuccucaccuugugaucucccugccuuggccucccaaagugcugggauuacaggcgugagccaccgugcccggccagug

SEQ ID NO: 4148095 - RNA, 109 nt, Human
caccacucacauggaacuuacuuucuaguggaauucugguauguuuuaauggaagauaagguuguaucugaauuacuauugguaaaggugagcaaaauuuagagugaug

SEQ ID NO: 4148096 - RNA, 71 nt, Human
caccagaugcccgggcuccaucggacuuggguuugaucucagacucuagagauggggucuguuuguuagug

SEQ ID NO: 4148097 - RNA, 69 nt, Human
caccagauucugguaauuucaagggcaggucaauuacuggcugccuauagaauuauuaguacaaaggug

SEQ ID NO: 4148098 - RNA, 78 nt, Human
caccagccccaggccuggcaggggggcagugguggcucugcaagcugucacucaccaggccugcaucgggcacaggug

SEQ ID NO: 4148099 - RNA, 106 nt, Human
caccagccugguuugcuuuugucucuacuucuugaucugucgaccucagauauuaccucucagccuugaugaucaaaggugaggaucuggcucacucgugcuggug

SEQ ID NO: 4148100 - RNA, 56 nt, Human
caccagcgacugugaccagcaauagcccccuggcuccagcuguccuguagcuggug

SEQ ID NO: 4148101 - RNA, 86 nt, Human
caccagcuguuguccagucagugauggagagagugcagcaucguaggauucuccagucacugacuucgagauucuauuagucggug

SEQ ID NO: 4148102 - RNA, 56 nt, Human
caccagcuuugcccacugcccaggggaugcuuugacggcaguagaggcagcucgug

SEQ ID NO: 4148103 - RNA, 82 nt, Human
caccaggagcugagagucaccagcuuuagguugccugccagagagcucugccgggcccuggauuuggcauuagccuugagug

SEQ ID NO: 4148104 - RNA, 64 nt, Human
caccaggcuggagugcaguggcaagaucucgguucaagccauucuccugccucagccucuugug

SEQ ID NO: 4148105 - RNA, 108 nt, Human
caccaugaccuguguuaaugaaguuaauugaauuuaagaucaauaaugguuaauuauugcaauuugacauucagagauaaauggcuuuaagacagagaaguaugugug

SEQ ID NO: 4148106 - RNA, 63 nt, Human
caccaugugaaugacauauuuuguacugcucuacccagguagaacauaagucauucauuugug

SEQ ID NO: 4148107 - RNA, 103 nt, Human
caccauucuucugagaauccuuaacagaagcuucugcuccuuuggguccuccuuggaugucaguaaaugagcaaaaauuuccacauuuucaggagagaggcug

SEQ ID NO: 4148108 - RNA, 67 nt, Human
caccauuuaguagcaagagcucagagauugcaucuuguucuccagugcuucuagaaaauaccuggug

SEQ ID NO: 4148109 - RNA, 70 nt, Human
cacccaacacuagcgcaaauacgcccaugagcugcucuauuuauaguguguaaagugcagugauuggaug

SEQ ID NO: 4148110 - RNA, 129 nt, Human
cacccacccccucagauccuggaggaagcuaccacugcaacugguugacuucuaggcccuacaacugacugaggccuccagcaguccugggagacuuacccagccauggugcuuccaauaggaugaugg

SEQ ID NO: 4148111 - RNA, 57 nt, Human
caaaugcacaaaacuuacgccaagccaaggggucuugcagagacuugugugcauuug

SEQ ID NO: 4148112 - RNA, 59 nt, Human
caaauggggugaaacaccaagacaguuaaaaguauuugucuuuaugacuugcccauuug

SEQ ID NO: 4148113 - RNA, 78 nt, Human
caaaugguuaggcugagagaacuagaugcuuuaguagcuacuguauuuggcauuuauuugucucauucuuacuaucug

SEQ ID NO: 4148114 - RNA, 106 nt, Human
caaauguauacaccacaugcuaaccucacaaaauuggaauaagcuuuugaaaagaaauugguccuugaagcuuguaucuaauauuggcacuggauuauagaauuug

SEQ ID NO: 4148115 - RNA, 91 nt, Human
caaauguccuuuggccuuuugucaaauccacacugaccucuuuucaaaugcguguggucaguguuauuuuucaaaggcccuuugaaguuug

SEQ ID NO: 4148116 - RNA, 56 nt, Human
caaauguugacuaagaggguuuaagaacuaagaggagacccucuaguuuuuguuug

SEQ ID NO: 4148117 - RNA, 78 nt, Human
caaauguuuaaguuuacagugucuuguugacuguacacgcaacauuguacagcagaucuguggagcuuauucaucuug

SEQ ID NO: 4148118 - RNA, 55 nt, Human
caaauguuugcaucacagggcauuuccuuuguccagugguacauggagacacuug

SEQ ID NO: 4148119 - RNA, 74 nt, Human
caaauuagcagcaugugccuuaaaucauucuauuguuugauuauagauuguagaaguucacugcugcuguuuug

SEQ ID NO: 4148120 - RNA, 79 nt, Human
caaauuauauugaauauguccuguauugguguuacucccugauaucacaagacaagacaaauugcaauccagggauuug

SEQ ID NO: 4148121 - RNA, 59 nt, Human
caaauuccaaaaauaacaaaagcguuagaugauaacaacgcucuuuguaagggaauuug

SEQ ID NO: 4148122 - RNA, 72 nt, Human
caaauuuaaacaugugauauaugauccugcuggaaacuguuuuagcaacaugguuaucacauuagaaauaug

SEQ ID NO: 4148123 - RNA, 129 nt, Human
caaauuugccuuuuguaagaaucacuccaggugcuuauuaaacaugcauauucccacaccccaucccagaaguauugaaucggaauguuuaauggaugccugugugauucauacgaugaggcaaguuug

SEQ ID NO: 4148124 - RNA, 94 nt, Human
caaauuugguuugugacaguuuagaacuacuguggcuaggauugaauaaagauugccagucagugguuuaaaaguuaugguggcucagaucuug

SEQ ID NO: 4148125 - RNA, 64 nt, Human
caacacaggacagucuaguaacaguacaguucaaagggaacguuacuuauagacguguuguuug

SEQ ID NO: 4148126 - RNA, 75 nt, Human
caacacagugucugugcuucaguguuccucuuaucaggaaggauaauaugugugaugcauggacuaacucuaaug

SEQ ID NO: 4148127 - RNA, 64 nt, Human
caacacaguucagcacagaacugaaccaagcccucugcagaauucccuucucugagcuguauug

SEQ ID NO: 4148128 - RNA, 113 nt, Human
caacacaugucugaacagggaaagaaaauacaaagauggaagguuauguuaaguucaaaaacaaacaaacaaacaaacauuuugucaucuuucuggccugguaguuuguguug

SEQ ID NO: 4148129 - RNA, 57 nt, Human
caacacugugcuugcauccuguggaaagucacauuuggggucaagugaaugguguug

SEQ ID NO: 4148130 - RNA, 55 nt, Human
caacagaggaguggccugauccgaguggcauuuaacaagguucacuuuccuguug

SEQ ID NO: 4148131 - RNA, 72 nt, Human
caacagaugauuuauauuuuucuaaacucuuuucauuaaaugguuuaagggagaauauugauggucauggug

SEQ ID NO: 4148132 - RNA, 57 nt, Human
caacaggguagcaaaaauguggaaauaaucuggguucuugaugcuaccuuuaaguug

SEQ ID NO: 4148133 - RNA, 69 nt, Human
caacagggugagaccccaucucuacuuaaaacacaaaaauuagcagggcaugguggugcacaccuguug

SEQ ID NO: 4148134 - RNA, 95 nt, Human
caacaguagugggugagagaagagcuuuauaucuggauucaguuucucauaaaugaaauaaaugugucuuuuuaaggccuuccgcaugccuguug

SEQ ID NO: 4148135 - RNA, 101 nt, Human
caacaguuuggaugaagguugaggugagucaugcauuggaggaacuaaaagaaaguccuaagccagguaggacucaauuccucuuccucauccagauggug

SEQ ID NO: 4148136 - RNA, 66 nt, Human
caacauaccugagaguuagguuuuuauguuccccuaauaugacaauauugagucuuagguuaauug

SEQ ID NO: 4148137 - RNA, 75 nt, Human
caacauucaacauggcuggucuaguaacuauuuuauuauuuuagagaugggaucucacuauguugcccaugcuug

SEQ ID NO: 4148138 - RNA, 57 nt, Human
caacauuuucauggccagggagagauuccauuucauggccagggagagagaauguug

SEQ ID NO: 4148139 - RNA, 75 nt, Human
caaccacacaauuucaguugcaugcaaccauaaguauuuguuucuggcucauguaccuguagguuggcagggcug

SEQ ID NO: 4148140 - RNA, 67 nt, Human
caaccacacauucauuugcuauuguguauggcugcuuuugagcuacuacaguagaggugaguaguug

SEQ ID NO: 4148141 - RNA, 86 nt, Human
caaccauuuuguuuggauucaaccuuuucuccaguggcugagucucaagcccuggagaaaagguugaauccaucuaagaauuauug

SEQ ID NO: 4148142 - RNA, 77 nt, Human
caaccgucugaugauaagcagaaauuauuugcagaucaagacaauuguucugcagucuggauguccucagaugacug

SEQ ID NO: 4148143 - RNA, 60 nt, Human
caaccugacaagguuaaugaauacccaaauagcuggaaaaaaauuaugccugugagguug

SEQ ID NO: 4148144 - RNA, 74 nt, Human
caaccugcucagcuucagcacacugggcaucacaaauagugucacucagugcagcuaggcaugagaagagguug

SEQ ID NO: 4148145 - RNA, 75 nt, Human
caaccuggcugcaagacaagguugguuuccaagccuuccuggaccuccagauuugauuugcacuauuuaugguug

SEQ ID NO: 4148146 - RNA, 61 nt, Human
caaccuggcuuuuguggcaucuugcuuacccuauuuugcagaacacagauaccaaagguug

SEQ ID NO: 4148147 - RNA, 75 nt, Human
caacgcuacaggcagagccaaucgugggguaagaagugucaaaucuaccacccccggccuucugucugaugcuug

SEQ ID NO: 4148148 - RNA, 129 nt, Human
caacggcguuggggcaagccucucugcaccugcguguccagccucuccugcaugccagaaguccccaggcaggaguguggugggacauccggcugggguaaggacaggcacccucccacagugucaggg

SEQ ID NO: 4148149 - RNA, 55 nt, Human
caacuacuguuuuugccucuuuagaaggcucuccuuuuugaggaagaauaaguug

SEQ ID NO: 4148150 - RNA, 106 nt, Human
caacuagauggugagcuucaugaaggugggcccaugcccucgacuacaguagcccuccaguguuggccucaggguugggcccauuaaggaugcuuauuuuagguug

SEQ ID NO: 4148151 - RNA, 103 nt, Human
caacuauaacagcugguggcauuuagauucuaaauacugcuuguucuccuauguaugcaucauuagaaucagguguuauaaucauccauggcugcaauagaug

SEQ ID NO: 4148152 - RNA, 64 nt, Human
caacuauccugugagacuuguccauuaucuucacuuugcagauaguaacaauuuauaggacuug

SEQ ID NO: 4148153 - RNA, 57 nt, Human
caacucacugagccuugccagcuuggugccuuaccguccugauaacucagugcuuug

SEQ ID NO: 4148154 - RNA, 130 nt, Human
caacucccaguuauguguugggugaggcucuagauguauugauguucuugggaugcuuuuucauggauuccagggaagagcaaggcaguuuauagacagcuuauuccaacacuggguuugaacuaaguug

SEQ ID NO: 4148155 - RNA, 55 nt, Human
caacucuacucuacuuuuccugaaauccuucagguauaaaguucagggagaguug

SEQ ID NO: 4148156 - RNA, 57 nt, Human
caacugaggucucagccaauuauggagagcucuggcugugggauggccccucaguug

SEQ ID NO: 4148157 - RNA, 96 nt, Human
caacuguaugucugauccauuuucuauguucacauuuaaauaaaguucuugcugugauguuuaaauguuuauagagaguacaggcuuaauaaguug

SEQ ID NO: 4148158 - RNA, 76 nt, Human
caacuugagaacucauuguuuucuccauuugcauuuacaacuucauagagccugagaggauaaugggguuaagaug

SEQ ID NO: 4148159 - RNA, 73 nt, Human
caacuugagagucggcuucacuuauguuaugggagauucugccaacucccuuaacaagcccaacuuucauuug

SEQ ID NO: 4148160 - RNA, 81 nt, Human
caacuuguaggacaaaauacuuacuggagaacauuuuuguaauguuguuuuucaugugaauauauuugucuuagaacauug

SEQ ID NO: 4148161 - RNA, 100 nt, Human
caacuuuauuuuauuuucccuuuaugagaauuugucagcaggaauugugaaaagugauuauaauauuccuuguuguagguggaaaauggaaaaggaguug

SEQ ID NO: 4148162 - RNA, 65 nt, Human
caagaaaaguacucuugcagaaacaucaggaaguucaccaugaacugcaagacaugcuguucuug

SEQ ID NO: 4148163 - RNA, 85 nt, Human
caagaaaauaguaaaaaggcagaaagaauacuuccuauugcuacaaaaggaauguuaguucuguauacaaaguauuauuuuguug

SEQ ID NO: 4148164 - RNA, 63 nt, Human
caagaaacauacagcugaugaacccagcucacaguugcacugaaaucaccugguguuuccuug

SEQ ID NO: 4148165 - RNA, 75 nt, Human
caagaaaguauuuacauuaacaucuccauggucucuuugacccucuugcaggugugagugaagugcuuggcucug

SEQ ID NO: 4148166 - RNA, 57 nt, Human
cagaaauuuauuggacucacaguucugaaggcugagaagucccagaucaaauuucug

SEQ ID NO: 4148167 - RNA, 95 nt, Human
cagaacaauaaacacaguggaacacagucauuagaggcagccauaauccauggccugcuguguacugaugucaacccugcugcguuugacaucug

SEQ ID NO: 4148168 - RNA, 76 nt, Human
cagaacacuuagccuucaguaaauccacugugaugggcaaaugccugccacauuuauuugaggcuaauugcuucug

SEQ ID NO: 4148169 - RNA, 69 nt, Human
cagaacagaggaggaagcacacggcuuguauuaaaagggaguuaauggaauguuuccucuuuuauucug

SEQ ID NO: 4148170 - RNA, 83 nt, Human
cagaacaggucauaaauuuaucuuugaguguuuuaaauuaucugauuuuagugucuuugacacauucaaaggaaugacuuuug

SEQ ID NO: 4148171 - RNA, 104 nt, Human
cagaaccccuucgggagccuguuaagguguauauucugugguuccuccggucuaggauaaagcccaggaaucugcaucuugaccacauucccugagggauucug

SEQ ID NO: 4148172 - RNA, 69 nt, Human
cagaaccugaggugggcaucagcauucucagacuggcaccggcuggcugcaugcccccuccuucuucug

SEQ ID NO: 4148173 - RNA, 78 nt, Human
cagaacuaccaaaucucaaucugaguauuaacaacuccgcaggugguuccuacgcacauugaauuuuggaaagugcug

SEQ ID NO: 4148174 - RNA, 61 nt, Human
cagaacucaguaguauggcuuuguugaucaguaaugacuagcagggauguuauuacuucug

SEQ ID NO: 4148175 - RNA, 71 nt, Human
cagaacucuagguaaaugagauauuucacugcucaugcugugugaccuucaugucccaucugccuagacug

SEQ ID NO: 4148176 - RNA, 61 nt, Human
cagaacuugaucagagcugaagacauauuugguagucuucugcaucugaauuuaaguacug

SEQ ID NO: 4148177 - RNA, 104 nt, Human
cagaagaaauggaugugacugcuuuacauuaauuucuacugaucccauccaaacagauaauaucagaagaaauggaugugacugcuuuacauuaauuucuacug

SEQ ID NO: 4148178 - RNA, 61 nt, Human
cagaagacuuuucuuuguccugucucaucuggccugucugugacaauagaaaagucuuuug

SEQ ID NO: 4148179 - RNA, 62 nt, Human
cagaagagaagagaggacaugauagauaccuggcuauuucagcaucucaaccuucucuacug

SEQ ID NO: 4148180 - RNA, 130 nt, Human
cagaagagaagcuaagcccuguggacggcaaauggacccaaggacacgggcagggacagagcugcuuccacugagccagcuguuaggugcuuguguucuuggcccccuggccgggguugucuuugauaug

SEQ ID NO: 4148181 - RNA, 69 nt, Human
cagaagagaggggaacugggugugcauggcaguuaugcuaugagcacagcucaguacucccucuggaug

SEQ ID NO: 4148182 - RNA, 57 nt, Human
cagaagaucagagcuuucugugaaccaauccuuuucacacagagcucucugcuucug

SEQ ID NO: 4148183 - RNA, 77 nt, Human
cagaagcaacuuaccaagggguauuuaaagacaugaaaauuuccagaaauaccauuuggugcaucccuuuguuucug

SEQ ID NO: 4148184 - RNA, 60 nt, Human
caaguaacaucugaacaugauguggaccauucauauccuaaagacauagguguuaccuug

SEQ ID NO: 4148185 - RNA, 57 nt, Human
caaguaacuaaagauauccauuuacaugaaaauaagaaugguuucauuggguacuug

SEQ ID NO: 4148186 - RNA, 130 nt, Human
caaguaacuaugcaugaagauacaccaggaacagcugccagcgacucauccucugggggacccauccagcucagccagucagucaguugcuggcauuuguucacagguugcaaacaacagaaagugcuug

SEQ ID NO: 4148187 - RNA, 68 nt, Human
caaguacaaguugucagggcaacugauguuaagugauuaaacaguacuugauaauuugcacguacuug

SEQ ID NO: 4148188 - RNA, 70 nt, Human
caaguacugauggcuccagguguuuucuauguuagauucccuuugaaaguacugaugccaucagcacuug

SEQ ID NO: 4148189 - RNA, 81 nt, Human
caaguagagccacaagagucaauuuguuuuugcuauuuugauuuaagauacaucaaagcaaauuggaaugugguuauaaug

SEQ ID NO: 4148190 - RNA, 120 nt, Human
caaguauugccauuuauaaaugccugagcuggagugagggaccauauuugugaaacugcaagauguguccucaaaucaguucucccuuucuucagcugugcaucuacgaugcauuucuug

SEQ ID NO: 4148191 - RNA, 58 nt, Human
caagucacccuccucagcccagugugaauuguguuucuguccugaggcagguggccug

SEQ ID NO: 4148192 - RNA, 61 nt, Human
caaguccaggacucagaguucaggaaaaucaggagucuccugaaguauggguauggaguug

SEQ ID NO: 4148193 - RNA, 60 nt, Human
caagugaaugaugugaaguguaaacaaccaucuauguuucauguuacugucauacacuug

SEQ ID NO: 4148194 - RNA, 55 nt, Human
caagugaauguagcaaacuugaaccuggaauaggugucugccuuuacuucacuug

SEQ ID NO: 4148195 - RNA, 85 nt, Human
caagugagaggugacauugagaacacagcuaaauugacacagugccagguauuguucuaaguguuuuguucaugucacuuaauug

SEQ ID NO: 4148196 - RNA, 59 nt, Human
caagugcaugguggcaaagaaugcaaugauaauuaauugcccuugcugccauugccuug

SEQ ID NO: 4148197 - RNA, 72 nt, Human
caaguggcagucggaagucaggagaaucgggugguaauucuggcucucuuaccaccuggcugucuuuacuug

SEQ ID NO: 4148198 - RNA, 59 nt, Human
caagugguagccggccucaggccucagccggugagggaugaugagacagcuaccacuug

SEQ ID NO: 4148199 - RNA, 56 nt, Human
caaguguaaccuuuccugcuaaaacucuucuugggucuggcagcauugguaccuug

SEQ ID NO: 4148200 - RNA, 82 nt, Human
caaguuaaaacugcucugucuucuguagcuaauaauucuuggcacugggauuauguuucaggauggcagaacagucugcaug

SEQ ID NO: 4148201 - RNA, 56 nt, Human
caaguuaucagaaggcacuuuuaauuucugguuugaaucugcuucccugugacuug

SEQ ID NO: 4148202 - RNA, 65 nt, Human
caaguucaucucuagacaggaggcuggugagguggacaucagccaggcccuaagagauugaccug

SEQ ID NO: 4148203 - RNA, 82 nt, Human
caaguuccaguuggcuuuugcuauacacauguguauccaacguuugcucaucuggcuucaguaacagucucacuuuaauuug

SEQ ID NO: 4148204 - RNA, 64 nt, Human
caaguuccuguuacuccccagaauuuauuauugguguauuauuuugguaagaaggaggagauug

SEQ ID NO: 4148205 - RNA, 61 nt, Human
caaguucuaggcagugggaacagcuggugcaagcucugagguggccacagccuggcacuug

SEQ ID NO: 4148206 - RNA, 56 nt, Human
caaguuugcugauccuuguuuuaaacaauaaacaaagccaggaaccaguaaaccug

SEQ ID NO: 4148207 - RNA, 107 nt, Human
caauaaacaaaaaauauggaucauaucacagcucuuucauugcuuucauuucuugagauauaugaauguaugugauauauuugauguccuguauuuuaucuuuauug

SEQ ID NO: 4148208 - RNA, 62 nt, Human
caauaaagaagauuuuugcaauacauguauaaaagcaaaagcaacacagaucuucuuuguug

SEQ ID NO: 4148209 - RNA, 67 nt, Human
caauaagaguugugugguuauucaguguguaaguuggcacauuucagaaucacacagcuuggguuug

SEQ ID NO: 4148210 - RNA, 129 nt, Human
caauaccccucauuccuuuacgugguugcuacaggcgaguggguacgcuuuuggucucugcagguucugccgugaguccagcaggaugcaagugccaucuuguagaauucaugggaauggaggaggaug

SEQ ID NO: 4148211 - RNA, 68 nt, Human
caauacuucaaucucguucuuauguaaugagccuuaauuaaccaagugcuccuagaaugaggguguug

SEQ ID NO: 4148212 - RNA, 64 nt, Human
caauagcuaggcugguaaaggacugaacaucuacaaggauacccuccuuugcuaguugcuguug

SEQ ID NO: 4148213 - RNA, 81 nt, Human
caauaguuuuagcaacaauugaugauucuuaugugaaacauuauuucuguguugcuuaucaaaugagugcugagacucuug

SEQ ID NO: 4148214 - RNA, 110 nt, Human
caauauauaaauuuuaaugccaagacaggaaauucaaucuaagaaaugaucacuugccaaauuaaugauccguuuacaucugagguuagagcugaggcauaauuauauug

SEQ ID NO: 4148215 - RNA, 73 nt, Human
caauaucacauuuguucuugaaucuaagcccuugggaugccauccaauuggaauugugaacuaagugauuuug

SEQ ID NO: 4148216 - RNA, 81 nt, Human
caauaugaauguauguguuuauuuucagauuuucuuaucaaauguguaagaucuagaaggcaaauauagugcuguauguug

SEQ ID NO: 4148217 - RNA, 76 nt, Human
caauaugcuguuuugaauucucuagaacuuuguugcuccaaaaucaaauaucuucagauaaagggagaguauguug

SEQ ID NO: 4148218 - RNA, 83 nt, Human
caaucagaucaggcccugugcaggugugcagcagcugagcuuuguagcgcugcagaagcguguucaggacacuggauucguug

SEQ ID NO: 4148219 - RNA, 104 nt, Human
caaucaucauuaaggcuaaacugaagcucaacucaaauugguagugauaagagaaugccaaaugauugauaaaugaguuuuaaguccuuggucuuaagauuuug

SEQ ID NO: 4148220 - RNA, 79 nt, Human
caagaaaguggugauuauauccccauuuccagguuaaugaaggagaaccuggagguaauguuauuuuuguugauucuug

SEQ ID NO: 4148221 - RNA, 77 nt, Human
caagaaauggcugugugcuucuccccauuucucagacgagaaaauugaggcaugagaaaaacaacaaaaccaucuug

SEQ ID NO: 4148222 - RNA, 82 nt, Human
caagaaccguguaccuacucuuuaaacaaauagguuuaauacuguuuaaaaauauaaaggguacuguauagauguguucuug

SEQ ID NO: 4148223 - RNA, 57 nt, Human
caagaagccgagcuacaggcucuggcuuuggccaugugccuguucacaggcuucuug

SEQ ID NO: 4148224 - RNA, 68 nt, Human
caagaagucuuacauaaacaggaaauggaguugugugcgcuugguugcuguaaauguagacuucauug

SEQ ID NO: 4148225 - RNA, 75 nt, Human
caagaaugguuuuauuauugccuuucuaaacaaguggaauauuuggaugaacagguaaucaguaaaauguccuug

SEQ ID NO: 4148226 - RNA, 82 nt, Human
caagacaacuauauuaacuugugauccuggauuggaaccuuguccaggaacagaauguuagugcaacaguuggugacgcuug

SEQ ID NO: 4148227 - RNA, 76 nt, Human
caagaccccuggcuucucugcauuguucuagcuucugauccauucagggaacaugaggagagcccuugggguaaug

SEQ ID NO: 4148228 - RNA, 75 nt, Human
caagagacauuuaucucucaguucuggaggaugggaaauccaagaucaaggcacugacagauucugugucuguug

SEQ ID NO: 4148229 - RNA, 79 nt, Human
caagagccagauguaagcuggacacugacccacugucccuuggaauggcuaugucuauguccagccugcucugcuguug

SEQ ID NO: 4148230 - RNA, 83 nt, Human
caagagcggaucacucuucuggaucucagaaauuuuagaaagcaaauacugugggaugcaguaggaacaauuauccguuuaug

SEQ ID NO: 4148231 - RNA, 117 nt, Human
caagagggaaagugugagauuuuggaaaauauaugcucugggauccugaaagccaaaccuucucuuuucacaaacucagggugugugacaucuucagaaucaaaugaguucuuuuug

SEQ ID NO: 4148232 - RNA, 129 nt, Human
caagaggguggcuggugggagggggugugccugugacagcgaccugggcagggcaucccucucaugccuggaagaacuguccggucaaugucgcaggcccagcacaccuucccaacgagcugaaagcug

SEQ ID NO: 4148233 - RNA, 61 nt, Human
caagaguuucugggucaaggauuugguggcuuggcauggaguucuggcccaggguuucuug

SEQ ID NO: 4148234 - RNA, 60 nt, Human
caagaugaaacuacagggaggaaagauuagucaccuugguucccuagagugcucaucuug

SEQ ID NO: 4148235 - RNA, 68 nt, Human
caagaugccaugccccaauacaggacaccuugcgugggccuuggugggucuugcggggcagcuucuug

SEQ ID NO: 4148236 - RNA, 96 nt, Human
caagcacguuacaccaaucaguugcagcugugacauugcgccgaggcucugaaguggguaauugcagaccacagcuaggcuggaaugcuguguuug

SEQ ID NO: 4148237 - RNA, 57 nt, Human
caagcagauauuuuagucaagaauuccagagaaggcugcuccuaaaaugucuacuug

SEQ ID NO: 4148238 - RNA, 56 nt, Human
caagcagguccugaaucugguccaucaugcagauagccaacgcagaaccauguuug

SEQ ID NO: 4148239 - RNA, 84 nt, Human
caagccagcagcucuuccauuuccuucagccugagaucaaaugauuaagcuuuagaaauguaggagauacuguugagaagcuug

SEQ ID NO: 4148240 - RNA, 64 nt, Human
caagccagggggcccuugcaggugagcgagccaagccuuucuuuucucagggccucucugcuug

SEQ ID NO: 4148241 - RNA, 76 nt, Human
caagcccauucauucacauuuugucuauggcuacuuugacccuacagcuauaguuagugagugagugaaugaauug

SEQ ID NO: 4148242 - RNA, 60 nt, Human
caagcccuuccgggaacaguuguagauuuuugcugccuucagcacguccucaaggguuug

SEQ ID NO: 4148243 - RNA, 81 nt, Human
caagcuagccuucccgagauggcccaagacgccuccuccuggggucuggggugaaggccguccuuggggacugggagccug

SEQ ID NO: 4148244 - RNA, 69 nt, Human
caagcuuuucuuuugauauuuguuacauuugugaaauaauauaacaaugcaguuaaugggaagagcaug

SEQ ID NO: 4148245 - RNA, 62 nt, Human
caaggacagguggagugguuagcaggccauugcgugguugccguuuguucuaccagaccuug

SEQ ID NO: 4148246 - RNA, 70 nt, Human
caaggacccguggauggaaggccacugcagagugugagcuggcagaugcguuuucauuuucgguucuuug

SEQ ID NO: 4148247 - RNA, 80 nt, Human
caaggagaguccagguguggcuggggcagaggccuuuguaaggcagguucuaugccaacaccugucuauggacauccuug

SEQ ID NO: 4148248 - RNA, 55 nt, Human
caaggagagucuucucaugguauccccaaggaucucugaguuguacuuucccuug

SEQ ID NO: 4148249 - RNA, 81 nt, Human
caaggaugguuucuucagucuuugugaaaaauaguauuucagucuucucuauauucagaaaacugagcgaugacauccuug

SEQ ID NO: 4148250 - RNA, 78 nt, Human
caaggauguugacacaaacagugauguaguaaaaauaauuucuacuuacugagcacucacuuuuguuauagguccuug

SEQ ID NO: 4148251 - RNA, 60 nt, Human
caaggcaguagguguuucaaacugagucuggauugaccuagcuggaaccucuacuccuug

SEQ ID NO: 4148252 - RNA, 76 nt, Human
caaggcauuucagcucuaguaagcagacaccagcccacugcauuguguuugagaucugaagcugaauauggcuuug

SEQ ID NO: 4148253 - RNA, 95 nt, Human
caaggccuccucggugucuggguccccuacugucaaccucauagccccugaggucauaaaagccaggggagucagcugcuggagaucugguuuug

SEQ ID NO: 4148254 - RNA, 66 nt, Human
caaggcuugggguguuuauugacaggccuagcccaugcagaacgcuauucagaacacugggccuug

SEQ ID NO: 4148255 - RNA, 77 nt, Human
caagggaagcuggccgcgccuccgcgacgguguucuuggcacggaggacugaggcgcaguccggcugucuccccuug

SEQ ID NO: 4148256 - RNA, 77 nt, Human
caagggaagugaagguuugagucugaacagguuccaaaauggauugugcaaaaccucaggccucccuccuuccucug

SEQ ID NO: 4148257 - RNA, 58 nt, Human
caagggauggacuuugaaauuccacagaacuggguucaaauuuuaucuccauccuuug

SEQ ID NO: 4148258 - RNA, 85 nt, Human
cacauuuuuaggaaauaagcauguacucaagcaaauguuuauuuauaaauaugcugauuguaguauugcuuauaaccagaaugug

SEQ ID NO: 4148259 - RNA, 81 nt, Human
caccaacagacuaaaugacagguaccauaguggggacauuuuucuggcuccugguacagugccugucauuuagaaguggug

SEQ ID NO: 4148260 - RNA, 62 nt, Human
caccaauuggcuuuucaugacaacucagcgauagauugcaauugcuauggagagcgugugug

SEQ ID NO: 4148261 - RNA, 65 nt, Human
caccaccacgccuggcuaauuuuugguagagacagguuuucaccauguuggccaagcuggucuug

SEQ ID NO: 4148262 - RNA, 81 nt, Human
caccaccagaggaucuuauuaaaaugcagauccacauucaacgucuguaauuuugcauuucuaaugagcuccgggguggug

SEQ ID NO: 4148263 - RNA, 100 nt, Human
caccaccugcuugguggcuucggggaugugcacggugucaaacggggcugccacagcacacgucccgcccuuguacuugccgagccgacagcccacggug

SEQ ID NO: 4148264 - RNA, 87 nt, Human
caccacgaugacaugagaggcugaaguguacaugggugaagagcacuccaucaucucucuaccucagucuccagaacuugucuggug

SEQ ID NO: 4148265 - RNA, 74 nt, Human
caccacugccagaucauuggauucacacaugcugaggcuucaguggcucaauguggguugaagaugcaguggug

SEQ ID NO: 4148266 - RNA, 85 nt, Human
caccagaaagugucucaagcaaucucugugucccugccugaucccggccacagggaacacggggaugcuggucagacucagggug

SEQ ID NO: 4148267 - RNA, 65 nt, Human
caccagcacauuaguaucuaagaacaugaaaguucagcauaugucuuuuaccuaaugagcuggug

SEQ ID NO: 4148268 - RNA, 56 nt, Human
caccagcgacugugaccagcaauagcccccuggcuccagcuguccgguagcuggug

SEQ ID NO: 4148269 - RNA, 64 nt, Human
caccagcugagcccucagggcagagaagggggcaucuaugcagagaucugggcgucggcuggug

SEQ ID NO: 4148270 - RNA, 73 nt, Human
caccagcuuaaccaagggaucaaugucaacaccaccaauaauuggaugaauugaaaucauugggcaccuggug

SEQ ID NO: 4148271 - RNA, 60 nt, Human
caccagcuugggcuguggaaaugcuauuuuauaguuggcaauuccaccaugagcuaggug

SEQ ID NO: 4148272 - RNA, 73 nt, Human
caccagguaucuaaaggauuuaauuuagugguaauagacaccacuaagagagcaucccuuugcugcauuggug

SEQ ID NO: 4148273 - RNA, 90 nt, Human
caccagguuggucagaagagacacagcuuugagcagccaguggcaaagcauugucauguggcaauuaaagcaggugacuaaugcuggaug

SEQ ID NO: 4148274 - RNA, 70 nt, Human
caccaucagccaguuugauucuauuuguuucucaagucccccaagaacagaaccuggcacagagauggug

SEQ ID NO: 4148275 - RNA, 58 nt, Human
caccaucauccauccaucuucuccaauuaacuugggggagaauaugaggaugauggug

SEQ ID NO: 4148276 - RNA, 112 nt, Human
caccaugcaugugaaucaccuggggggcugcuuaaaaugcagauucugucucaggaggucugggguaggaacaagagucugcauuucuaacaggcucuguguagugcuggug

SEQ ID NO: 4148277 - RNA, 60 nt, Human
caccauggggagagucugggucagugauugcucuggccaacugugggguccccgauggug

SEQ ID NO: 4148278 - RNA, 65 nt, Human
caccauuguggaauauauccugcuaaucuggcuaaagaugacugcaggacaaaauuuccagggug

SEQ ID NO: 4148279 - RNA, 63 nt, Human
caccauuuuuagaugggccaaauagaugcucuagaccucugugguggcaucuguaaaauggug

SEQ ID NO: 4148280 - RNA, 59 nt, Human
cacccacggacuguguaauugcugcuaucggggcugaugggcaggcacagcccugggug

SEQ ID NO: 4148281 - RNA, 58 nt, Human
cacccacugagcucaugucccagggcuaggcucugccugaggacaggagacaugggug

SEQ ID NO: 4148282 - RNA, 65 nt, Human
cacccagagccugagagggauaguaaaacaaucacuacuuuauguaaaccuguaaguucugggug

SEQ ID NO: 4148283 - RNA, 59 nt, Human
cacccagcauggugggucaggcccuggcuuugaauacuggccucaccacuagcugggug

SEQ ID NO: 4148284 - RNA, 62 nt, Human
cacccaggagguugggaagggccccaaaacacaagcggcguuucauucagcacccugaggug

SEQ ID NO: 4148285 - RNA, 85 nt, Human
cacccauaugucccuccagugucccaguggggaguuagaggaaugguucucaucuccaggaaagacacuggacugauaccaggug

SEQ ID NO: 4148286 - RNA, 130 nt, Human
cacccccaccccagcucccugaccacgggcugcggaagagugggacguuauggaaccuucucagcuuauucagagaggcuucuucuuccuauuuagucucccucuggcuuucccugcugggaucugggug

SEQ ID NO: 4148287 - RNA, 73 nt, Human
caccccccaacccgaaggcugccaguggcccucuugggguccuccaggagcgcagcccaaggguuggggacug

SEQ ID NO: 4148288 - RNA, 86 nt, Human
caccccggguccuguccucugggugccccaucccagggccucacaucuuccaagauggacacucagagggaggccaaccuggagug

SEQ ID NO: 4148289 - RNA, 64 nt, Human
caccccucaggucuggcaguccccuacccacuggccuaaucauacugugcagccugaggaugug

SEQ ID NO: 4148290 - RNA, 61 nt, Human
cacccgaaagcugguccuaauugagccauuuucugaaugcuagccuuggaccggcugggug

SEQ ID NO: 4148291 - RNA, 89 nt, Human
cacccgacuccuggauuuggugagagugcuuuacaagcaaccauguguguuguggcugaucaaagcgcucagaauccaggggaaggcug

SEQ ID NO: 4148292 - RNA, 76 nt, Human
cacccuagucaaggagcaagcuugccggcugcccaccggggaugcccagcccuuggcuggcuccuugccugaugug

SEQ ID NO: 4148293 - RNA, 96 nt, Human
cacccucaugggcucuuggugcaacucuggaucuucugguaaaagagaaguuuuucccuucugagccaagcuugcaacaggguuaauuugggggug

SEQ ID NO: 4148294 - RNA, 55 nt, Human
cacccugacuucugacgauguuucuggaauacaguuaauugucagaagucaugug

SEQ ID NO: 4148295 - RNA, 83 nt, Human
cacccugcagacagcuccagaggcagugaugaaguuucugcuauagguuagccuuuuauucucuucuggagucuucaugggug

SEQ ID NO: 4148296 - RNA, 126 nt, Human
cacccugccccacaaccucaggagccagggcccuucccccaagccccuccucaaaccucagccagacuccaccccuggcugaaggagggaagaaggcucuguguccugggaacccaggggccugug

SEQ ID NO: 4148297 - RNA, 61 nt, Human
cacccugcugucccacagcgcugaccacagggagagagguuugcuggggacauacagggug

SEQ ID NO: 4148298 - RNA, 78 nt, Human
cacccuucccaaagcuacucuucugacuggccacaggggccugcaagucagaguucuuggggagacacugccauggug

SEQ ID NO: 4148299 - RNA, 69 nt, Human
cacccuucccccacaccccucgguuuaagcugaaacucgauccgucuacccugugggugugcaagggug

SEQ ID NO: 4148300 - RNA, 64 nt, Human
cacccuuuccuggccaagcagaguggaaagcccaagcuuuccaggaugccguggcacagaggug

SEQ ID NO: 4148301 - RNA, 77 nt, Human
caccgaaaaugaaaggcccuucuccagagaggcccaaagcaauguuuugagcacaacucuuggagagcuggguggug

SEQ ID NO: 4148302 - RNA, 77 nt, Human
caccuagaauuccuucacagauuauacuguaaauccaaacuacaggacuuucugaaaugcaggcaauuugcuaggug

SEQ ID NO: 4148303 - RNA, 89 nt, Human
caccuagcaucucacugauuuacugugccuaagacaggaaauauuggcaaacauguuuaguuagaaucaauggaguauguuccaaggug

SEQ ID NO: 4148304 - RNA, 77 nt, Human
caccucaggccugcaggaaaggcuccccugccugccugacaaaccuggcuggggccucaccagcaggcccgagugug

SEQ ID NO: 4148305 - RNA, 62 nt, Human
caccucaucugucauccuagggaaugccuuaauuuauucuuguaauuuggagaaaugaggug

SEQ ID NO: 4148306 - RNA, 58 nt, Human
caccucccaggccaccaggaggcagcucaugaucacaacuugguggcucugggaagug

SEQ ID NO: 4148307 - RNA, 57 nt, Human
caccucucagcuaggaguaaguagaaccaccaaccuaugccuggugcagaagaggug

SEQ ID NO: 4148308 - RNA, 89 nt, Human
caccucugcugccaagagcuggagaggcagucuaucauucaagaagaaugacucuaugcuuccuuauuagcccuaggcuggcagaggug

SEQ ID NO: 4148309 - RNA, 97 nt, Human
cagcacuuugugaauuuuucuguuucacaguauucagaauucauuagaacauguuugauuagaaugcacaugaggcaagcaaaauuagcacagucug

SEQ ID NO: 4148310 - RNA, 57 nt, Human
cagcagagaugagauuccuauaguuauuuauugaacuuggauuuucaaucauugcug

SEQ ID NO: 4148311 - RNA, 63 nt, Human
cagcagagcauuugguaggaggucaggagcucacaggagaugggauucugccgaugccugcug

SEQ ID NO: 4148312 - RNA, 79 nt, Human
cagcagaguggccaaggcugaggcccugggcuuggccugauguggccguggccggucccuggccuuggucucucuccug

SEQ ID NO: 4148313 - RNA, 61 nt, Human
cagcagauggacugguuuuuagcacuccugagggggagaggauggagccagucugucucug

SEQ ID NO: 4148314 - RNA, 59 nt, Human
cagcagcaacaacggaagccuucaguguucacuucuggagccucacgucuugacugcug

SEQ ID NO: 4148315 - RNA, 104 nt, Human
cagcagcauacguggagaugaggcgagaggcuugggcuaguaaggaugccaccuauacuucugcccggacccugcuggcuauccugcgccuuuccacugcucug

SEQ ID NO: 4148316 - RNA, 82 nt, Human
cagcagccaguuaacauuuagagugaaggccaagcguaaaacaagaaaugacccuuggcccacucucagaauguggcgaaug

SEQ ID NO: 4148317 - RNA, 70 nt, Human
cagcagccucaaguuuauuuuccacaggcaacucaucagcccagggacaguagaggcuugaucgcagcug

SEQ ID NO: 4148318 - RNA, 61 nt, Human
cagcagccugucuaaaguauguuugguaauuuccgccaagaccugcaucugauaggcccug

SEQ ID NO: 4148319 - RNA, 107 nt, Human
cagcagcgguggcugcagaacagcgguggcuguagaacagcgguggcuguagaacagcaguggcuguagaacaguggauauuggugaucugcaaaugcugcugccug

SEQ ID NO: 4148320 - RNA, 81 nt, Human
cagcagcugaucuuagacauuucuagcccauaaaacugugagaaauauuuggaggcugggaaguccgagaucacaaugcug

SEQ ID NO: 4148321 - RNA, 55 nt, Human
cagcagcugguugaauccuucucaugcuugaaaacucugacuucaacuucugcug

SEQ ID NO: 4148322 - RNA, 63 nt, Human
cagcagcuucuguugaucagaaacacaaccccacuguuaacucugcauucgagggaggcucug

SEQ ID NO: 4148323 - RNA, 62 nt, Human
cagcagcuuuggagugugagugcugucucuuuggagagauugugggcuccuugagggcucug

SEQ ID NO: 4148324 - RNA, 60 nt, Human
cagcaggaaguacuagcuuugaauccaggauuccugccucccagacuggugcugcugcug

SEQ ID NO: 4148325 - RNA, 71 nt, Human
cagcaggauguaugucuuauucuucuaccagaugagaagagaaugcacagagacaaauaccauccauacug

SEQ ID NO: 4148326 - RNA, 56 nt, Human
cagcaggcugauuaggccucguccauuauagagagugacuuccuaaucgccagcug

SEQ ID NO: 4148327 - RNA, 83 nt, Human
cagcaggguccugucuuccuucugcucugugggacagugccagggcacugccaggcagcagagggagaagcggggagccguug

SEQ ID NO: 4148328 - RNA, 66 nt, Human
cagcaggucucagacuggcaggcagugagcuagauuaugccugaaaaccuguuuuguuggccuaug

SEQ ID NO: 4148329 - RNA, 55 nt, Human
cagcagucaggccugugggagacagaggguggguucacagggcaccuggcuccug

SEQ ID NO: 4148330 - RNA, 65 nt, Human
cagcaguccacauagucauuaauuucugcugcugacaucaggaaagaggauuaugugugugucug

SEQ ID NO: 4148331 - RNA, 61 nt, Human
cagcagugaugugugaggguucguuaauuauugcucuuacugauguuugcacaggcuguug

SEQ ID NO: 4148332 - RNA, 61 nt, Human
cagcaguggccaucuguguggucccaguucccaacucagcuguuuucacaccggccuguug

SEQ ID NO: 4148333 - RNA, 55 nt, Human
cagcaguggcugcaggcagcuggguacacgcuguaauuugcauggcugaaugcug

SEQ ID NO: 4148334 - RNA, 84 nt, Human
caaagggcccuggcuggcaccaggcaugcugggagaggggagaguuauccuuggagcuauuuuccuggaugucaccguguuuug

SEQ ID NO: 4148335 - RNA, 69 nt, Human
caaaggucagaugaccauacugaucuugucuugacuucucaguguuuccugugguacagcugaccucug

SEQ ID NO: 4148336 - RNA, 65 nt, Human
caaaguauaguguaggauggcaaaauagucauguacauuuauuuaaauauuuugcauuuacuuug

SEQ ID NO: 4148337 - RNA, 56 nt, Human
caaagucuuggugaucaacuuuuucacaacaaaacauugcuguugccaagauuuug

SEQ ID NO: 4148338 - RNA, 58 nt, Human
caaagugcuggaauuacaggugugagccaccgcacccugccccuauuccugccuuuug

SEQ ID NO: 4148339 - RNA, 55 nt, Human
caaagugcugggauuauaggcaugagccaccuugccuggccaauuccagcuuuug

SEQ ID NO: 4148340 - RNA, 67 nt, Human
caaaguuggggcuguugaaccaaacugacauuucuuaacaguugaucuucuuaaagaccucacuuug

SEQ ID NO: 4148341 - RNA, 56 nt, Human
caaauacuggguaaguuaauuucaaauggcuuuggaguccaacaaaccuguguuug

SEQ ID NO: 4148342 - RNA, 80 nt, Human
caaauacuucugacaauucaguaacagcaugccuuuuuuggugauuguuguaaaauuugagaugucagcuuuguauauug

SEQ ID NO: 4148343 - RNA, 56 nt, Human
caaauagacuucaaucucuugaauuagauauguacaagauauugagugucaguuug

SEQ ID NO: 4148344 - RNA, 61 nt, Human
caaauagcaggugguucugaguauuuauuuuauaguaaauacagcagacuccuguugucug

SEQ ID NO: 4148345 - RNA, 118 nt, Human
caaauauuucacgaugguuuuaaaugucauaagugugaguuaugucccugcucaccuccccuucugauuugagcagaugucuaacuuuuacaugagaucagaauaaucugauuguuug

SEQ ID NO: 4148346 - RNA, 116 nt, Human
caaaucacuugcagaacaaauuaguucacauaaauuguauuuuucauuccaagugagaugcuggucucauuacuugaauggauaggauuugaacuguggcugcgagaacagaagug

SEQ ID NO: 4148347 - RNA, 101 nt, Human
caaaucauaaagcuaucguuacaccauuuaagaaagccaaauuucaguuaugcucugaauuuggcagugucuugaaguaauuaucuggaguuauguauuug

SEQ ID NO: 4148348 - RNA, 63 nt, Human
caaauccugcagggcuuagauggcaguggccuggugcaaaggaaaauuuaagcccccagguug

SEQ ID NO: 4148349 - RNA, 93 nt, Human
caaaucuauuuacauagcaaagccucuaugcuccucccagaguuuaggaggccuggccaagcacuggggucaaaauguguaaaaugggcauug

SEQ ID NO: 4148350 - RNA, 92 nt, Human
caaaugaaugagucagacuugacuuuguaaguuuuuacaugcuuauauaaugugaaaauuaucuccuuaaggacuagacuuauaaauauuug

SEQ ID NO: 4148351 - RNA, 104 nt, Human
caaaugagagacagagcuaguaucugaacccaagcagucagccugaagacugauccuuaaucagcaggccaugcugcuuuucaagauuugcugccucucaucug

SEQ ID NO: 4148352 - RNA, 94 nt, Human
caaaugcaaugaauguggccagucauguaguaaccagauagagagucaggaaguugcaucaacugagucauuaaucagcucauucauuuauuug

SEQ ID NO: 4148353 - RNA, 82 nt, Human
caaaugcccccagagccagcaaguccccuuccugccccgcuaaaagaggaauaagaacuugucucuggcagccucuuauuug

SEQ ID NO: 4148354 - RNA, 64 nt, Human
caaaugcucagcauucaagugugugcauguacacacacacacacacaugcaugcuugccauuug

SEQ ID NO: 4148355 - RNA, 65 nt, Human
caaauucuuugaauacaaacuaucugagcacuaaucucagaugcagacuugguucaggcaguuug

SEQ ID NO: 4148356 - RNA, 68 nt, Human
caaauugaucugucuuuaugaacagggcacaguaaagcacccaugcugaaauaaagauggucacuuug

SEQ ID NO: 4148357 - RNA, 66 nt, Human
caaauuuuagcaucugaacuguugaaaaggaaggauucaucagcacagcagaugcuucaauguuug

SEQ ID NO: 4148358 - RNA, 58 nt, Human
caacaaacugacuuauguucucagcaguguagacacugaagggccugagcagauguug

SEQ ID NO: 4148359 - RNA, 66 nt, Human
caacaacaucuccaaccuacauccacuugggggacagccagcgugcugugggagggagcuggcuug

SEQ ID NO: 4148360 - RNA, 110 nt, Human
caacaaggaugcugccacaggcuugggagcagagccacugaaaacaggcagccuagugcccacugguggcuccgcuuccaugggcuggaaaaugagcggcagacugauug

SEQ ID NO: 4148361 - RNA, 63 nt, Human
caacaagggacaguguucuaaacagagaguuuaguucuggcuuaggaauuuauuccauuguug

SEQ ID NO: 4148362 - RNA, 74 nt, Human
caacacaggcuugaaagaguauucaugaggaccuaaaagcccuaaguucuagguagugcucuuucccugaguug

SEQ ID NO: 4148363 - RNA, 68 nt, Human
caacacugacaauggacugauuuucauggcuuugaaaauuuuuaaguuaguucauucaauuaggguug

SEQ ID NO: 4148364 - RNA, 64 nt, Human
caacacuucuuauacuuacugaagagacagacauacugcaaauucaguguauuuaagaauguug

SEQ ID NO: 4148365 - RNA, 124 nt, Human
caacacuuuaucauuccacagacuugcuccgggcugaacguggacugggccugggucucaguacuggggacagggguccaggcguggcccagaugaacucaggaugugugguuuggguguguug

SEQ ID NO: 4148366 - RNA, 73 nt, Human
caacagaaaucaauuuucccauggcuucagaaguugcgaaguccgagaucaaagugaaguugguuuccuguug

SEQ ID NO: 4148367 - RNA, 61 nt, Human
caacagaccuggauucaaaaacuaccuuucuauauugggauucuuguuuccaggucuggug

SEQ ID NO: 4148368 - RNA, 124 nt, Human
caacagcucugcaagcuugggguugugguucacaauuuuuacugauugggcgacugagaugcagaaaggccacaguuacucaguuuguaugugagcaguccaagguucaaacccaugucuguug

SEQ ID NO: 4148369 - RNA, 130 nt, Human
caacaucucacuggccagaacuaugucacauggccaucccuagcugccagggaggcugggaaguuaaguacuucagcuuucuagacucuguggucaugauggcaagggcaaggggcugaaguggguguug

SEQ ID NO: 4148370 - RNA, 70 nt, Human
caacauguguggauaaugcacuauccauauggguguguguuuauauauguguauguguccacaucuguug

SEQ ID NO: 4148371 - RNA, 83 nt, Human
caacauguguugccaaauuggccuugaucucucuaacugcuguggaauagcucugagauucgugggucucuugagacauguug

SEQ ID NO: 4148372 - RNA, 80 nt, Human
caacauuauguuucugaggacuuuccauguuaaugugaccccaauuuauucauuuuaacagucagaguuuuccauuguug

SEQ ID NO: 4148373 - RNA, 64 nt, Human
caccucuguccuggcuggucucgugcacgcaagccaugcaggugccagcucucaggcaggagug

SEQ ID NO: 4148374 - RNA, 89 nt, Human
caccugagucugcaucucugacuuuuucucaguguaccccacaggcuguuacacagauuuaaaagcagggaaagagaggcucaagggug

SEQ ID NO: 4148375 - RNA, 74 nt, Human
caccugaugcgguggugcgugugauuugucaaaagaaagccuucuggaugcuguuaagauguacccuucaggug

SEQ ID NO: 4148376 - RNA, 62 nt, Human
caccugauuacuuucucuaguauaauuggcuucauuuagaugcagccagagggaagcaggug

SEQ ID NO: 4148377 - RNA, 124 nt, Human
caccugcacuuuguuuggauuugccucuauacccacugcauuucucugauguuuuuuucuaccauucuguuuggacagagcaucagaugaaaucaacugcugagagagggaagugagugcugug

SEQ ID NO: 4148378 - RNA, 66 nt, Human
caccugcagggcuuagaaaugguggcuauaaucagaaagcauguagcaauagaagccuugcagcug

SEQ ID NO: 4148379 - RNA, 130 nt, Human
caccugcauucuguuacccggcuucucagcagggcaggaaacauucccauaacacauggagugcuuugguuuugggggguuucugcauuucccugcugaggauccagaaaucaggugauagaauauuuug

SEQ ID NO: 4148380 - RNA, 73 nt, Human
caccugccucauuugucccugcuggaacuugcugccuuugucccacacccugcagggcagcugaagcuaggug

SEQ ID NO: 4148381 - RNA, 70 nt, Human
caccugccuccugggacaggcuggcacaggcacauucuuaugcuggaaucugugucccaggggucaagug

SEQ ID NO: 4148382 - RNA, 74 nt, Human
caccugcuccccaggggccuugugaauuuggaggguucucugcuaagcucacauggcucuaggaggugcuggug

SEQ ID NO: 4148383 - RNA, 65 nt, Human
caccuggucaagggaggagacacagcccuaccagcggucagguuuggucaacuccuuauuaggug

SEQ ID NO: 4148384 - RNA, 90 nt, Human
caccuggucccaugaacuuauuucugaacuuuucaucacggaggacuguagggagaagccaacagagcuguuuucacaagggaccaugug

SEQ ID NO: 4148385 - RNA, 86 nt, Human
caccugguuguguuauaugcauuguugcagagaaauuuaaucuaauuuuuuuuagcuuccugugcaaugccuaaucacaaaaggug

SEQ ID NO: 4148386 - RNA, 62 nt, Human
caccuugcauucuuuuaauuuacuugaauucaaguggaaaaacugaggagagagcugaggug

SEQ ID NO: 4148387 - RNA, 58 nt, Human
caccuugcuagguauuugggaugcaaagacagaugucuaucccuggccuuaaggagug

SEQ ID NO: 4148388 - RNA, 83 nt, Human
caccuuguauguggcuuucugcguuuucuccagagcgcacaagggcuggugagaagaugcuggaaguguggcaacucagggug

SEQ ID NO: 4148389 - RNA, 87 nt, Human
caccuuucuuuugauugagcaguuucaaaauacuauuuuuguuuaauuugcaaagggauauuugagaucucaaugaggacuacggug

SEQ ID NO: 4148390 - RNA, 89 nt, Human
caccuuuggcggccauguggucaucuggguuuguggcaucaggugagcagaccuggguugccacugacccaggggccacccagauggug

SEQ ID NO: 4148391 - RNA, 91 nt, Human
cacgagcauguguuucuuuuagaggagagcuucaauuuuacuauaauugucuaaagacggagcugcuuugaucugaagaauuauuauugug

SEQ ID NO: 4148392 - RNA, 84 nt, Human
cacgagccuccuguaaaugaggugcuacuguuuucccauguccauuuccaagacaaggacauagaggcccugcauggcucagug

SEQ ID NO: 4148393 - RNA, 63 nt, Human
cacgcagccagagggggugugaucagauguguguucugguuggauggcucuuguggcugugug

SEQ ID NO: 4148394 - RNA, 58 nt, Human
cacgcgugcuccucaguguccucugucuccaggcaugggcugcugggagagcugcgug

SEQ ID NO: 4148395 - RNA, 68 nt, Human
cacggcccaguggggagcuucugccuuggacugcaggcagcucaggggaguuugcuacuaggugggug

SEQ ID NO: 4148396 - RNA, 127 nt, Human
cacggcuggaaacggggaagcuggauuuggaguuugccugacugcagagaggcaccucuguucccguggugucucugcuuuccuugcagggcagugcacauuucuugguuuuccuuuuaaagccgug

SEQ ID NO: 4148397 - RNA, 70 nt, Human
cacgggaaggguacauggggugaaguccaggggaaaccagaugccaguuucccauuguuccccuccagug

SEQ ID NO: 4148398 - RNA, 65 nt, Human
cacgggauucuuuugccuagggcugaaaagaugugucugcuagccaaguagggggaaagcccgug

SEQ ID NO: 4148399 - RNA, 112 nt, Human
cacguauaugaagaaguacugguuuagaccaaggcaauuggcuuguauaagaggccuacccucauaccaaaagccaguuuccuuggucuaggccaguguuuacugguaugug

SEQ ID NO: 4148400 - RNA, 59 nt, Human
cacgugcaggucuuaggagacaaaggaagggaagugacuguuuccuggccuggugugug

SEQ ID NO: 4148401 - RNA, 114 nt, Human
cacguuuuccuccuuaucugcuucccugguguuuauugaaugauacuguacccaaaacccugugauagacacuguaugagcuggguggggaggauacaaggaauauuagacgug

SEQ ID NO: 4148402 - RNA, 58 nt, Human
cacuaaaacuacauuggaaacacauucccuaccacuugugcuaagagugguuuuagug

SEQ ID NO: 4148403 - RNA, 81 nt, Human
cacuaacaauuuucuggucagauguuaagucaaaaauggagauucccuucauuuucagcacccaucugaaagauguuauug

SEQ ID NO: 4148404 - RNA, 63 nt, Human
cacuaaccauauucacacuaugcccagugugugugcugugcugugugugugugugugugugug

SEQ ID NO: 4148405 - RNA, 79 nt, Human
cacuauggaaaaucaguuugagaaauggcagggagagcaauaggagguuguuagauauuucuuagaagaagccauggug

SEQ ID NO: 4148406 - RNA, 114 nt, Human
cacucacccaggagugcguuuuuauaaagcagguccccagacacucaccagagcauucuguagauuuagugugccugggaaucugcguuuuaauaggcaccucugauugaagug

SEQ ID NO: 4148407 - RNA, 62 nt, Human
cacucaccgccuugcccggccgggcccaggugcagaugaggcccuccuggcaggcagugaug

SEQ ID NO: 4148408 - RNA, 89 nt, Human
cacucaccuuuuuugagaaaugcuguucacuggcaugcuucccaaagaagcagccauuuaaaaugaauugguauuucuuuccgggagug

SEQ ID NO: 4148409 - RNA, 125 nt, Human
cacucacgcuguaaaaucccccaucuccgggugcagacugggggcucuaacagcuuucaugaauaucgaaaauucucuuaaagcuuccaguuucaaucuggauauuuggauauaugugugaugug

SEQ ID NO: 4148410 - RNA, 59 nt, Human
cacucagcccacccauguuuguguaaacugaguuuugccggaacauagcagggcuggug

SEQ ID NO: 4148411 - RNA, 122 nt, Human
cacucauuguauuucuucagagucagguacuugaagucuugaugaagcaguaauaaguauugauuuuauugaaacuucacuuuuugaguaaauuccuucuuagaauuuuauguagugaagug

SEQ ID NO: 4148412 - RNA, 76 nt, Human
cacuccccucaaaguuauaacaucucccaucaacaucagcucagaauggcagugaugcuuaugguuugugggggug

SEQ ID NO: 4148413 - RNA, 69 nt, Human
cacuccccucccacacagcccgcucaccggaccccaccccguccgggccagauggcucuggggagagug

SEQ ID NO: 4148414 - RNA, 56 nt, Human
cacuccuacuccagagugcuaggcuauguaaacuccagcuccuggacuagagagug

SEQ ID NO: 4148415 - RNA, 84 nt, Human
cacuccucagggccaucucugucccuaacaguacaccgugcugugugcagcucaggggauacgagggugggccugguccuagug

SEQ ID NO: 4148416 - RNA, 69 nt, Human
cacuccucccucucugucuauucccccaccuccguuaccacacauagguaagcagugaggugaggagug

SEQ ID NO: 4148417 - RNA, 129 nt, Human
cacuccugcagaugagguacaggggaagccaccagagagaagcugugcagguccccacugccugccagggcacuggagagggcaggggccagcagagcccuccugauccccgucaaugggcagauggug

SEQ ID NO: 4148418 - RNA, 117 nt, Human
cacucggugcugagggguaugcucugccucugucuccucugaggugccagcagagccuguccuggccucacucuggccuggggagugggggugcuguauccucuacagggcugacug

SEQ ID NO: 4148419 - RNA, 55 nt, Human
cacucucacugagcucaugccaaacuuaaagaacuugguguuagaccagagagug

SEQ ID NO: 4148420 - RNA, 85 nt, Human
cacucucucaggcaucagaagauggcucuggaaauaaagguucauuuauuuccaugcaccugucauuugguuccuaagugaugug

SEQ ID NO: 4148421 - RNA, 59 nt, Human
cacucugauuccacaaggcuccccgaccccgcuagucaucugccuuguugucaguggug

SEQ ID NO: 4148422 - RNA, 62 nt, Human
cacucuggggaugcaaggagaggugagaauuacagccauuuuugcaauaaucucccacagug

SEQ ID NO: 4148423 - RNA, 95 nt, Human
cacucuguccacaguacacaggguuguggccuuaaaggcucagcaaggucaucauuucugagccuacaguaacagcccuguggucucacagaaug

SEQ ID NO: 4148424 - RNA, 78 nt, Human
cacugaagacagcaugauacaugaugcucuuggccgcuuguacaggaaguggcguguggacaugaugcaaguucagug

SEQ ID NO: 4148425 - RNA, 123 nt, Human
cacugaagacucaggcuucucugaaggcaaaauuacaaaguuauuaggaauucucuuaaugguuuacucugauuuauggauguguuuagucagcccaucaucauccaugaguauucaaaagug

SEQ ID NO: 4148426 - RNA, 77 nt, Human
cacugaagcuuuuaguucacaccaggguagcagaagucagcuugcuucuugcuuccuuuaagugauuggcuuuggug

SEQ ID NO: 4148427 - RNA, 65 nt, Human
cacugaaggaaggacuacugcaucccuaauaaugagcggaccuguaauaggauuucacugcagug

SEQ ID NO: 4148428 - RNA, 73 nt, Human
cacugaagugcaugcaugucagggauccuggaacuauuuugcuucuuuucuuggagaugcaugcccguuagug

SEQ ID NO: 4148429 - RNA, 70 nt, Human
caagucaauuauuacgguucugagacauugaacccagaaaaucauuucagagucaggaaugcuugauuug

SEQ ID NO: 4148430 - RNA, 94 nt, Human
caagucuaaagagccaaagucauuguaauauaugcuaagggcaaagggaaauagucaauagcuuuguuagaaugucuucaggucuuugaguuug

SEQ ID NO: 4148431 - RNA, 93 nt, Human
caagucuuaaaucaucauugccuguuucccuuggaaaccaaggagaaccugguugaacaccaguuggggaaauagggauguugccugagcuug

SEQ ID NO: 4148432 - RNA, 86 nt, Human
caagugacagagcugggauuugaagccaccuuuacccaaccuuuccauccuaggagcuuacaaucauuucaguuuaguugaccuug

SEQ ID NO: 4148433 - RNA, 81 nt, Human
caagugaccuacucaggaucacgcagugagugcagcccagccggggcucagcuccaggugugcaucuugauauggcauuug

SEQ ID NO: 4148434 - RNA, 98 nt, Human
caaguguccccaauacauuuucuucuuucaucuuuggcaucagggccagcuacauaaucuguggggcccagugcaaaaggaaaauauggggcuucuug

SEQ ID NO: 4148435 - RNA, 78 nt, Human
caagugugauuuucauuuucuaagcuuuuaaugcuguguuuuuagguguuuuagaguuucuaaauggaauuauaacug

SEQ ID NO: 4148436 - RNA, 60 nt, Human
caaguguggcugucuguucuccuaggucagacaagacuggaagggggacagccacacaug

SEQ ID NO: 4148437 - RNA, 66 nt, Human
caaguguuuugacccuguggaaacuaaguuuuguuaccuauggcucucuacaggucaagaccauug

SEQ ID NO: 4148438 - RNA, 108 nt, Human
caaguucaagaacugggaggcaagaaagagcacagcuuguuuaaggauuagccauguuuaguugcauggcuggaaugcaacuguguguuguugggguuuuugagguug

SEQ ID NO: 4148439 - RNA, 105 nt, Human
caaguucugucaaugggauuuuuaaaaaguauuuucaaaccaccagagaggcagccugguguugcggaaaacacuuugaucugaaaguguugauucaaggacuug

SEQ ID NO: 4148440 - RNA, 106 nt, Human
caaguuucagagcauggcuuggcucuagucugccuggcugggcugcucauggggacaaggcuggugucagaggagucaggugagcugggucaugccucgaaucaug

SEQ ID NO: 4148441 - RNA, 72 nt, Human
caaguuuccagagagagggaaaauacugaugugagcuacauauuugucucugcacuuuacucagggaauuug

SEQ ID NO: 4148442 - RNA, 80 nt, Human
caaguuugacauuuaaauugcaggcagcccuggguccauuccaggagcuggcugugguugagugcaguucugaucacuug

SEQ ID NO: 4148443 - RNA, 96 nt, Human
caaguuuggucaaggggugaguguguccgacuccaaggagcaucuccguuucugagugggaacucucaugacacugugucccuugccucaggcuug

SEQ ID NO: 4148444 - RNA, 77 nt, Human
caauaaaauguaguaagaagagcaggagcuuuggaaucuacuuggguucaaacucuugcucugcuaguugcuuguug

SEQ ID NO: 4148445 - RNA, 64 nt, Human
caauaacuaguaauuauuccgguccccaaacagaagaggacuggaaaaucuugacuagcuguug

SEQ ID NO: 4148446 - RNA, 88 nt, Human
caauacugagccagcauuccuacaugauaagaauuaguagaaauagaaaaauuacuccugcuuagauaggauauguucucucauauug

SEQ ID NO: 4148447 - RNA, 68 nt, Human
caauagcacaucacuccagugaguuucuaguucccugagggacuaaccguggggagaugugcucauug

SEQ ID NO: 4148448 - RNA, 86 nt, Human
caauauaauaauguuuugcuguaguguucugaugucaaauaagaaugcauuagagaauuaaaggcacgugacauuauuaguacuug

SEQ ID NO: 4148449 - RNA, 78 nt, Human
caauaugaugaccuuaaaauuuuaauucuaggguggagagaauugucuuaguucucaugaauuuuaagucaugauuug

SEQ ID NO: 4148450 - RNA, 72 nt, Human
caauauuccuguggcuuccacaucaugaucucaagucaugggaugagggugagccacaugagccauauguug

SEQ ID NO: 4148451 - RNA, 76 nt, Human
caaucacaucacuucuuuugaaaucugcuggugauuggucaccaugcaucaguuaaaaggaguaagcaugugguug

SEQ ID NO: 4148452 - RNA, 58 nt, Human
caaucacuccacaauaugguucuuaccccuucagugagugcuauggucugaguguuug

SEQ ID NO: 4148453 - RNA, 78 nt, Human
caaucaggcuugcauagaaaccauaaaggagcucgucaggcugcuggagugagugguuucuuaugaacagccucauug

SEQ ID NO: 4148454 - RNA, 59 nt, Human
caaucaguaaccggaucaugguuccagaggcuuaacugacaagugauuuuugcugauug

SEQ ID NO: 4148455 - RNA, 84 nt, Human
caauccuuuuccuugguaagauuaucauauguaagagcuuuacaagcuuucaugaaaauaaucuacuuacgggggcagggauug

SEQ ID NO: 4148456 - RNA, 63 nt, Human
caaucuggcaaauuaauugaagcuaacuuuagaugaugucaguuagauugccuccuuagauug

SEQ ID NO: 4148457 - RNA, 56 nt, Human
caaucuuaguggcuuacaaagaguuacugcucucucauguguguccauugugauug

SEQ ID NO: 4148458 - RNA, 124 nt, Human
caaucuuucaacuagacagcagcugucucuuuacguacgggcauggcugacauagaggacugaauugucuccugucagaagcauccugaggaagggucagcucucaggucaagaggagggauug

SEQ ID NO: 4148459 - RNA, 89 nt, Human
caaugacucgcucagcauugauugugaggccucugcaggagcagucagcucugacuggcagaauucucagauguagaaguggguuguug

SEQ ID NO: 4148460 - RNA, 55 nt, Human
caaugacuggaagggaagcagagcugcugugcuucaucacuucucaguuaacuug

SEQ ID NO: 4148461 - RNA, 71 nt, Human
caaugacuuaaauugggggugacacaucugaacaucagcaugugcucuacaugcuccauguuugggucuug

SEQ ID NO: 4148462 - RNA, 72 nt, Human
caaugacuuguuuuguaacugaaggcaagagaccuucccuguccaugucucaguauacgaaacacuucuuug

SEQ ID NO: 4148463 - RNA, 71 nt, Human
caaugauaauguagaagcccggaggaaggagagccuuacccagagcacuugagcuuuugcauuccuuguug

SEQ ID NO: 4148464 - RNA, 76 nt, Human
caaugcacgcucagauuugaccuaagaaacaccuuaaaacauuaaaaauucaucagucagagcugguguuguauug

SEQ ID NO: 4148465 - RNA, 81 nt, Human
caaugcccagugccuguggccacugcgucugcaaucugucuuguggaaugacauaugcugggccucaggugaaucacauug

SEQ ID NO: 4148466 - RNA, 80 nt, Human
caauggugaaauuacgggauuuuuuaaguuaauggcaucuauggcauuguuuguaaaauuccaguagcccuucauaacug

SEQ ID NO: 4148467 - RNA, 114 nt, Human
caaugguucggauccuuuacauagugcuuucccacuacaagcugcaaacuauaauuucaguggaaaugguaagugggaggcauuagcuguguuuuauuucacaaaaguucauug

SEQ ID NO: 4148468 - RNA, 73 nt, Human
caauguaauguaugcaguguagaugcaugagaauuuuuaagacgcucuuggugucauuacuguaauuauugug

SEQ ID NO: 4148469 - RNA, 78 nt, Human
caauguauggugugggugaugaauuuguucuugucacagcagaggacugaguauucuuuacccaaaugcuauagauug

SEQ ID NO: 4148470 - RNA, 101 nt, Human
caaugucucuuuuuuaaccuuuugacuuugcugugaaaccaugggaaguuauugacuuuacaggcacuucaaguauacaaucaggcagaaaaagggcauug

SEQ ID NO: 4148471 - RNA, 60 nt, Human
caaugugagaauaacucaaaacaaugaguucucauugugaggaauuuuguucucuuguug

SEQ ID NO: 4148472 - RNA, 73 nt, Human
caauguguaucaccaaagguuuucaucacagcaagaaguacuucugaagcuggaggaagcuuugggcacauug

SEQ ID NO: 4148473 - RNA, 64 nt, Human
caaugugucuggcauggcucuauuccauuuauuuuagaucauggaauacgcaccagaugcacug

SEQ ID NO: 4148474 - RNA, 71 nt, Human
caauguuguucaggcuuugcucuguugauuucuauuuauuggaaaaacaacuagaaccugaagcaauauug

SEQ ID NO: 4148475 - RNA, 55 nt, Human
caggccuggcccccggcacacccagaggaaggagaggcuggguggcucaggugug

SEQ ID NO: 4148476 - RNA, 64 nt, Human
caggccuggguucaaaucccuuaagauacauggccuagaguagggguugucaaacuaaggccug

SEQ ID NO: 4148477 - RNA, 129 nt, Human
caggcgcagccccuuaccuggcugggcuccugggcagcugggcgguggcgugaagguggcugggugcucagaucugcucuccaucggcugcccugcccuggcccagcccagccucugggagugaccugg

SEQ ID NO: 4148478 - RNA, 56 nt, Human
caggcgccucgcauggcacacucagaccgcugggaggguggccgcaugggugcgug

SEQ ID NO: 4148479 - RNA, 55 nt, Human
caggcggcaagcagcaggggcuccggcaucagccccccagcaccuugccagccug

SEQ ID NO: 4148480 - RNA, 61 nt, Human
caggcgggcaggugcggccccuccccgccgccgcagagggccgggucccacugcccgucug

SEQ ID NO: 4148481 - RNA, 72 nt, Human
caggcgugaaggaggacacccaggacugggcgccuuggccccccgcuccuuaccuguccaaccucaucucug

SEQ ID NO: 4148482 - RNA, 105 nt, Human
caggcucagagaagauacguggacuuccuucgagucauauaguuguaacccagguuaggacaugugccuccagggcagaguccaccugccuuggucucuagucug

SEQ ID NO: 4148483 - RNA, 55 nt, Human
caggcucagaugcccugcgcugcucuccauugaggaguugggcucuggaggccug

SEQ ID NO: 4148484 - RNA, 79 nt, Human
caggcucaguuugggcucuucuugucucugguuagaauguauuauucuuuauagcuauuggaugaguacuugcagucug

SEQ ID NO: 4148485 - RNA, 56 nt, Human
caggcuccccaccugggagaggagugcccagcucugauccugccuggggccgccug

SEQ ID NO: 4148486 - RNA, 65 nt, Human
caggcucuaacucucgccuuggacuucaauuguuggaaaaaaggcaaugagggagauagagugug

SEQ ID NO: 4148487 - RNA, 64 nt, Human
caggcucuggaaaaccacuagcaggaaauuacguuuucccguuagguucauccaugauuaucug

SEQ ID NO: 4148488 - RNA, 59 nt, Human
caggcugacugugugaccuugggcaagcaucaucucuugaaaugcacacagacagcuug

SEQ ID NO: 4148489 - RNA, 61 nt, Human
caggcugcguuugugaaagguaauuaaauugugauaauguuuccauucagaccccagcuug

SEQ ID NO: 4148490 - RNA, 66 nt, Human
caggcugugauggauguaaaggaccgauucccaacgauuguccuuuaugaaaaccucauaagccug

SEQ ID NO: 4148491 - RNA, 73 nt, Human
caggcuguuggaaggccagcaccuugaguccuuuauggaggaccccacgggcuucuuucaacuucaaccccug

SEQ ID NO: 4148492 - RNA, 56 nt, Human
caggcuuaagaugcuagagagcuuuguagcucuguguauacauucucuuggguuug

SEQ ID NO: 4148493 - RNA, 104 nt, Human
caggcuuccugcugccuagggauuucuggagauacugcucuccauauuccccauggaguuauggucucuguauuuucaggucucuccuggaagauggaaaccug

SEQ ID NO: 4148494 - RNA, 82 nt, Human
caggcuucucugcuucugggacaucuggacaguuucauuuggaggcuucuacguggucccagggucuucugcaguaaguuug

SEQ ID NO: 4148495 - RNA, 75 nt, Human
caggcuuggccagacagagaggcuuuguuaggggaaagagaagcuaguugagcuuuagugucagguagggaccug

SEQ ID NO: 4148496 - RNA, 65 nt, Human
caggcuugggucagaaggcuuguuccuuagucacauguugcuacaaguaaaugacaccaggccug

SEQ ID NO: 4148497 - RNA, 56 nt, Human
caggcuugugucucagcugcaggcaguuaucacaaaugcacgcuagcacagguuug

SEQ ID NO: 4148498 - RNA, 115 nt, Human
cagggaaauggugggcugccgggcagggacgaggcugggggacaggcuggcugucuccacggcugcgcuccuggccacguucuugcugggcuuagagucugcuuccguuucguug

SEQ ID NO: 4148499 - RNA, 87 nt, Human
cagggaaccccaggagucaccagcccaaagucaccccgggaugacuggcgaugcugggggguuggggcugggggacccagguccuug

SEQ ID NO: 4148500 - RNA, 56 nt, Human
cagggaauucagcuucugguauggacaagcaagcuucuaccauguugacuuuccug

SEQ ID NO: 4148501 - RNA, 66 nt, Human
cagggacaauggcagagccugaaauucuuccuagucguccaauucagguucacuccccuguuccug

SEQ ID NO: 4148502 - RNA, 77 nt, Human
cagggacacauggcugggaugggguagagaaaggagucuccuuuuucucauacuacccuuuaguuauuguguauuug

SEQ ID NO: 4148503 - RNA, 111 nt, Human
cagggacgagggccugggcgcagggcugaccuugugcuccgaggcgggcagcagcgaggggcugggggcccggcggagcagagggggccgcaucucgaacuccacgcccug

SEQ ID NO: 4148504 - RNA, 77 nt, Human
cagggagccccagcauggagcuuugggccuugguuucgggaaacugggacuggcccuggcugcuaggcugcucccug

SEQ ID NO: 4148505 - RNA, 72 nt, Human
cagggagcuggauccugggaucuggaugaccaaggagagauguggugcagagagggaucuagggcuucccug

SEQ ID NO: 4148506 - RNA, 58 nt, Human
cagggaggagcagccugcucuagcccacuuugcucucaggauugaaugcuucucccug

SEQ ID NO: 4148507 - RNA, 55 nt, Human
cagggauuaacuuggcaccuucuaaacugaagaaggagccaaauuuuagacucug

SEQ ID NO: 4148508 - RNA, 75 nt, Human
cagggcaauugaacagugggcaugugaagacugaaggcucauguaguauauuaucccacucauuugaugacucug

SEQ ID NO: 4148509 - RNA, 61 nt, Human
cagggcacgcggugggcuggugguuucauagccgacacacagcgccuaccaugugcagcug

SEQ ID NO: 4148510 - RNA, 85 nt, Human
cagggcagagaugaacagccuggccucuugcuaggcagcccuguguugucugaguggugcaaggcugacauuucuucuugcccug

SEQ ID NO: 4148511 - RNA, 68 nt, Human
caccgugugcuugucguggagccaggcucggugccuaccaggccugagucaagauguggcaccuggug

SEQ ID NO: 4148512 - RNA, 61 nt, Human
caccguucagcccuguggcaggcaacugugccuguguauacaacuuauaggagccacggug

SEQ ID NO: 4148513 - RNA, 76 nt, Human
caccuaauccacccugugguggcuuucuggagagggaggcaucuaagcugagcuguggcuggguggagugugggug

SEQ ID NO: 4148514 - RNA, 98 nt, Human
caccuaauuuagaugacugagaugaugagauuuggaacuuuugagcuaaugagacugugagcuuuuaaucuuauguuaauguuaugauggauagagug

SEQ ID NO: 4148515 - RNA, 56 nt, Human
caccuagcaugaaauucagcagaaggcaaagacuccuacugaacucugauuaggug

SEQ ID NO: 4148516 - RNA, 84 nt, Human
caccuaguauagggccugaugcguaggagaccuuccagaugugggucagucuuauucagugggcucugccauuuucaguaggug

SEQ ID NO: 4148517 - RNA, 61 nt, Human
caccucacagaguucaggacuaaaugugaucacauguaaagugucuagaacauuguaggug

SEQ ID NO: 4148518 - RNA, 60 nt, Human
caccucacagguccaagagauccuccuacuucagccccuugagugguuggaccagaggug

SEQ ID NO: 4148519 - RNA, 66 nt, Human
caccucaggcuccccgggggugagcacugugaaucacagaaguguccuccucugggagccagggug

SEQ ID NO: 4148520 - RNA, 122 nt, Human
caccucuuaugauuaauuaaccuuuuguggaguaacuaggacaucugugugggaugagauguacuuuggucagacuucaguuuuuaguuguucagcaagaggauaauuaauuauaagagcug

SEQ ID NO: 4148521 - RNA, 86 nt, Human
caccucuucugcccauuucagcagcccauguuuggauuuuuaggcccuacuggauuccaaacagucaccaugggaagaguggggug

SEQ ID NO: 4148522 - RNA, 88 nt, Human
caccugaccucgagucuuucaaauggccauuggcuuagguuaccccaauuagccagacucauuuggaaguauccagaggagucaggug

SEQ ID NO: 4148523 - RNA, 112 nt, Human
caccugaggauguguuaggaaugcaguuuccugggccccaacccagaccuacugaaucaggaacucugggaaugaggcccagcgauuuucauuuuagcaaaacuugcaggug

SEQ ID NO: 4148524 - RNA, 66 nt, Human
caccugagucccggagguugaggcugcagugagccacgauugugccacugcgcuccagccugggug

SEQ ID NO: 4148525 - RNA, 60 nt, Human
caccugccugguccuuagggcuucccucuucccauuugcccggaaaaccacuaucaggug

SEQ ID NO: 4148526 - RNA, 95 nt, Human
caccuggcugucugggagggguggcccuggcguguaccguuugcugauuucugugccguagguacuuacaccagggcuuuaaaggcaccagugug

SEQ ID NO: 4148527 - RNA, 73 nt, Human
caccugggacuuuguuaauaucucacauuccugguucacaggaaucugugguuuuaacaggcaccuccaggug

SEQ ID NO: 4148528 - RNA, 59 nt, Human
caccugggucauugcugguguuaaggcagaaggaaaagacaacacggcagacccaggug

SEQ ID NO: 4148529 - RNA, 64 nt, Human
caccugggucugucuuauaggaauggagggccggccugucauaacuuuaaagacagugugggug

SEQ ID NO: 4148530 - RNA, 92 nt, Human
caccuggucauuuccuugggaaauuacucugcuaggagaagaguuagaugcuuuuccuugagauuuuuuucuagguaggaaauugccaugug

SEQ ID NO: 4148531 - RNA, 60 nt, Human
caccugguggggcccacaaaccucuguuugcuucauuuugggacucuagagacucaggug

SEQ ID NO: 4148532 - RNA, 73 nt, Human
caccuguaaucccagcuacucgggaggcugaggcaggagaauugcuugauccugggaggcggagguugcagug

SEQ ID NO: 4148533 - RNA, 73 nt, Human
caccuguaaucccugcuacucagguggcugaggcaugugaauugcgugaaccugggaggcagagguugcagug

SEQ ID NO: 4148534 - RNA, 60 nt, Human
caccugugacucucugccucucguuccacaaguagggcaggccagaaaugucagggagug

SEQ ID NO: 4148535 - RNA, 61 nt, Human
caccuguuguuuauucaucucucaaguguggcugacuucagggaugagaauaaacaaugug

SEQ ID NO: 4148536 - RNA, 79 nt, Human
caccuuggcuugccaaagugcugagauuacaggugugaaccaccacagccagcuauucuagagccuuuuagccaaggug

SEQ ID NO: 4148537 - RNA, 70 nt, Human
caccuugggaggcugaggcagguggaucaccugaggucaggaguucgagaccagccuggccaacaaggug

SEQ ID NO: 4148538 - RNA, 91 nt, Human
caccuuuaaucuggcuuggaucaggcaauaauaucucagauuucaaggguagagugcuuuagguguuuggcugaacucuagacuuaaggug

SEQ ID NO: 4148539 - RNA, 67 nt, Human
caccuuuaggccuggcuggaucugccaccgcccuccugggggucaccuuuccagcaggucugaggug

SEQ ID NO: 4148540 - RNA, 86 nt, Human
caccuuugcaauugagugaggaggaaguuuucauuuauucuucaagauagaguaaaucacucuucucucaccaccuugucuuugug

SEQ ID NO: 4148541 - RNA, 81 nt, Human
cacgagaaaauggcagaagugauauaaugugacuucagaggcugagucacaaaaggccauguggcuuccgccauguuugug

SEQ ID NO: 4148542 - RNA, 75 nt, Human
cacgagauaggauggcgagaaagugagagagagaguucuucacucuuuagagguacaucucuucuccugcuugug

SEQ ID NO: 4148543 - RNA, 90 nt, Human
cacgauaccucucuuugcuggaacucugaagucccugggacauuuuuaugaagucucagugguguuuugaguccagcauaguuacaagug

SEQ ID NO: 4148544 - RNA, 87 nt, Human
cacgaugcaaaccaaggcaggguggcccuccagugagcaagaugacuuucuucugccacuucacauugccugggucucuugcaucug

SEQ ID NO: 4148545 - RNA, 68 nt, Human
cacgaugccauucacuuaggcacuugcuuguucuagaaauauuuauuaagcacuagguguggcaggug

SEQ ID NO: 4148546 - RNA, 60 nt, Human
cacgcagcuggugggccuccagggucuccacggugauguuggggucccacaggcugccug

SEQ ID NO: 4148547 - RNA, 130 nt, Human
cacgccuggcuaauuuuuguauuuuuaguagagaugggguuuugccaggcuggucucgaucucccgaccucaggugauccacuugccucggcuucccaacgugcuggaguuacaggugucagccaccgug

SEQ ID NO: 4148548 - RNA, 57 nt, Human
cacgggugggaaagaacauuuuucacccaaaucaagaguggucuuuuucacccagug

SEQ ID NO: 4148549 - RNA, 82 nt, Human
cacggugagcaugggaagggccgauggagccucaugggaggaaccaugaguucugagaagcccuugauaccuaaacacugug

SEQ ID NO: 4148550 - RNA, 63 nt, Human
cagcagagcauuugguaggaggucaggagcucauaggagaugggauucugccgaugccugcug

SEQ ID NO: 4148551 - RNA, 90 nt, Human
cagcagauggguuuggcugccuucuauuuagcuuauccacuagcacauucauggaugcugaauuccagggccccacuacccagccuucug

SEQ ID NO: 4148552 - RNA, 59 nt, Human
cagcagcaagcagugguggcagccacauccuggcaaccacgucugcacuguagcuguug

SEQ ID NO: 4148553 - RNA, 57 nt, Human
cagcagcagcuaaaggaaagagcucugagguucccaguuucuugucggcuguugcug

SEQ ID NO: 4148554 - RNA, 59 nt, Human
cagcagcucacucagguggcucuacagcaucauaggcccacuuuccuggugagcagcug

SEQ ID NO: 4148555 - RNA, 75 nt, Human
cagcagcucagccuccuucccauugguucucacaaagcaugcuucucuggguggagcaggcuggugcuucaguug

SEQ ID NO: 4148556 - RNA, 85 nt, Human
cagcaggaggagccgguuuagauacaaauggauuccauggcaacuccugacuccacaugacuucuaauaacuggcauuucaguug

SEQ ID NO: 4148557 - RNA, 114 nt, Human
cagcaggauagaguuacagaauuuauuaggaguugagugucaaacuuccguguaauaacuuacagcaagacagaccgcucaauuugccugggaguuagcaaaaucuacaagcug

SEQ ID NO: 4148558 - RNA, 61 nt, Human
cagcaggcagccauuucacuguggggcucccugcaucaaugcacugaauggcacccuguug

SEQ ID NO: 4148559 - RNA, 64 nt, Human
cagcagggagcacugcgagcggcagugaggggcccucucugacggugcagaugcuuuuuggcug

SEQ ID NO: 4148560 - RNA, 128 nt, Human
cagcagggcagccccuugauuucuuccgcagacugcaccuccagcggcuggugagcaaugagagccagaggcgccagcugguggggaagcugcagguccuuguggaggaggccuuugguugccagcug

SEQ ID NO: 4148561 - RNA, 56 nt, Human
cagcagggccucuggcacugguccuuagcugugggcuucagugagagucccugcug

SEQ ID NO: 4148562 - RNA, 61 nt, Human
cagcaggucugcauuugaggucugaaaauguacauuucuaacaaguguccagaugcugcug

SEQ ID NO: 4148563 - RNA, 68 nt, Human
cagcaguaauuagugcugcaugaugccucauucagcaagaaaggcagguugcuacccauuaacugcug

SEQ ID NO: 4148564 - RNA, 67 nt, Human
cagcaguacucccagaacaaacccugcaugacucaagguuguuuucugggcagugggcauucuguug

SEQ ID NO: 4148565 - RNA, 56 nt, Human
cagcagucacacaaacucuggaaucauggcauuugauuucuaaguuuugcuugcug

SEQ ID NO: 4148566 - RNA, 84 nt, Human
cagcagucccauuccucuggccagggauuaacuuuccgcacagcaacgugaugaaguuuggccaaggagacauggagaaggcug

SEQ ID NO: 4148567 - RNA, 62 nt, Human
cagcaguggaugcuaauuauuggcaugggaaagugcucuuaggauacacagcuucacuguug

SEQ ID NO: 4148568 - RNA, 69 nt, Human
cagcaguggggaagcuacaggguuucuuguucucuagcuggccagagccccugagcuucccuguggcug

SEQ ID NO: 4148569 - RNA, 57 nt, Human
cagcaguguacaaggugucagaguaugcacggcgcuuugguguuccggucauugcug

SEQ ID NO: 4148570 - RNA, 108 nt, Human
cagcagugugaaagccaggggacauaugggcagggaggaaguucagugggagggcauuuaugcaaacauucgcuugucucugcuccugggcgucuuaaauauugucug

SEQ ID NO: 4148571 - RNA, 81 nt, Human
cagggcaggacugggugggcaagcguggacugcaucuguccugcaugggguccugcgucuggcucgcccggugccgugcug

SEQ ID NO: 4148572 - RNA, 74 nt, Human
cagggcaggaggaggcaggugggcagaggaauagcagccguuuguucuggaggccccuuccuucucccgucuug

SEQ ID NO: 4148573 - RNA, 55 nt, Human
cagggccaccguguuugcugcucgaugagagaggaggcauggaaauggcacacug

SEQ ID NO: 4148574 - RNA, 84 nt, Human
cagggcccuagggcucagccuccuccucagcccacgaagccaugugacugcugggcuggggaucgaaggcagagccugguucug

SEQ ID NO: 4148575 - RNA, 79 nt, Human
cagggcccuguggcauucucggcaccaucugccccgugccugugcgcugcugcugccaagggugccacaggcagcacug

SEQ ID NO: 4148576 - RNA, 66 nt, Human
cagggccgggggaggcaagagacaugccaagaacauauuugcaugaccuagccuccuucaguuuug

SEQ ID NO: 4148577 - RNA, 56 nt, Human
cagggccucucaucccacgggcuucuccaggacaccgcguggggcagaggcaccug

SEQ ID NO: 4148578 - RNA, 58 nt, Human
cagggccuucguaaguguccggccccaagcauccugggguggacgucugaggucacug

SEQ ID NO: 4148579 - RNA, 66 nt, Human
cagggccuuuguuccacaaguguaaacagcgaugcacaaagcugguuacauucaaaacaaacucug

SEQ ID NO: 4148580 - RNA, 130 nt, Human
cagggcgcgucgcgcuggccguuccagccggggucaccgcgcugcucgccccacaugcccucauggcuguuguuccagggggggcaguggggugggccgcccugguggugcggguaggguggcugcucug

SEQ ID NO: 4148581 - RNA, 60 nt, Human
cagggcucagaagacagaccucagcugccuucuagaccagcuggucugcucuuggcccug

SEQ ID NO: 4148582 - RNA, 55 nt, Human
cagggcucaucugugugaccaguagaauacuguggaagaaacaaugugagaccug

SEQ ID NO: 4148583 - RNA, 75 nt, Human
cagggcuccuaaacggaagauuuuuuaaauaaacugugcuccucagaauaugacaagauuuuccuaggaaaucug

SEQ ID NO: 4148584 - RNA, 109 nt, Human
cagggcucugucucagcugucuuggcaacaccuggaagacaugggccucugcaaggucucauacuuucaggagguguugaugaaggauauggacagaucugaagcucug

SEQ ID NO: 4148585 - RNA, 56 nt, Human
cagggcugaagaaauucaaaagauaugagaaaaucuuugaugaauuucagacucug

SEQ ID NO: 4148586 - RNA, 68 nt, Human
cagggcugauguggaauuugaaugagauuauucauguaaggcacccauguucauacagacaugccuug

SEQ ID NO: 4148587 - RNA, 80 nt, Human
cagggcugcugcugccagcgacaccucagaaagcauagccucggcuuccugccccaugugucccuggaagcuguacccug

SEQ ID NO: 4148588 - RNA, 77 nt, Human
cagggcuggcucaggcuccuucccagggauggucaccacagggucugccaucccugugugaggggcagccaguugug

SEQ ID NO: 4148589 - RNA, 62 nt, Human
cagggcuguggaaaacuggugcuuccucaaaaaguuaaauacagcauuuccacguggcccug

SEQ ID NO: 4148590 - RNA, 80 nt, Human
cagggcuguuuucugcaacucuguucauuuaauucuuccaaaucuuucauggcccagcccaaguacagaaaagagcccug

SEQ ID NO: 4148591 - RNA, 81 nt, Human
cagggcuuuauuaagaugcgaaugcugaucuucucuuaucuucuaugggccuucagcgucuggauuuuuaugggcuugcug

SEQ ID NO: 4148592 - RNA, 123 nt, Human
caggggacagauuaggagaauacagacaucauucggaguauugacaugugaagcuaagaguaauggaaucacuuucuucauacaauuuuuugacauauguacaaagcuacuauagguucccug

SEQ ID NO: 4148593 - RNA, 57 nt, Human
caggggagaaacuuaauaaauauugguugaguauuauuaaaauguguuucucuucug

SEQ ID NO: 4148594 - RNA, 130 nt, Human
caggggagagacccgccccucugccaccuggcccucggaguccagcugccacucaccaucccacugcaaagcacaggugggcagcagcgggccugccggggcgccagcaggaugguggccucuccagcug

SEQ ID NO: 4148595 - RNA, 77 nt, Human
caggggaucccuucagaaggaaggaagcauucuguucaagacacgggcagggguggccuuccuuugggggcuuaaug

SEQ ID NO: 4148596 - RNA, 66 nt, Human
caggggauggggguggaggagaggggcucucuuuugaugucccugagggucucucugaugucccug

SEQ ID NO: 4148597 - RNA, 76 nt, Human
caggggcaagagcaguguuuuacucagcugaugcuauuagcuggggcuuugaugaacugauuugcuuuugcuguug

SEQ ID NO: 4148598 - RNA, 71 nt, Human
caggggcacuaaugacauuguauccacagagcaaaauuugaauguucuguaaugaugucauuaaacuccug

SEQ ID NO: 4148599 - RNA, 57 nt, Human
caggggccuggcugucuaggaaggguucagaaggcacacccaagacucaggccccug

SEQ ID NO: 4148600 - RNA, 77 nt, Human
caggggcuaggcugcucugcgaagucagcugccuguguauuccugaaacaagcaccuccccgggagcagccuccuug

SEQ ID NO: 4148601 - RNA, 56 nt, Human
caggggcuccccacagagggaccugaaggcggcucugugcucgggggagcucucug

SEQ ID NO: 4148602 - RNA, 121 nt, Human
caggggcucuuggcuccuuguaaauucaguucuuccagaugguucuuuagcuccuguuuuggccccguggcuaaugaguucgagaucugcugaugagaaugggaguauuggagagccucug

SEQ ID NO: 4148603 - RNA, 65 nt, Human
caggggcugauggaacucaggccuccccgacucugagggagguccugcucuuucauuaacccaug

SEQ ID NO: 4148604 - RNA, 76 nt, Human
caggggcuuucucccucacaaagcauucucuucauggaaggaugaugaaguaaaucuuaugucagggagccaccug

SEQ ID NO: 4148605 - RNA, 76 nt, Human
cagggggugguccaggcugcgcuagaccugggguggaguugguguaucaggugcgguccuagguggccacugcuug

SEQ ID NO: 4148606 - RNA, 85 nt, Human
caggggugaagugcugcugaaaacuggaacucuugauaauuuuaugaccucaguucaauucaguuagauaaaguaaauacuucug

SEQ ID NO: 4148607 - RNA, 95 nt, Human
caggggugagcgcucagagcaggaaggggaugaugggcaugcgcaggggcggguagucccggaacuccuucagguagcugcggugcuugcccuug

SEQ ID NO: 4148608 - RNA, 90 nt, Human
caggguaaaaaguuggaagacaagaaaucaauuguuggcgaauaaugucaauguuaauuuacugucuucauuuuuuaaaucacuacuuug

SEQ ID NO: 4148609 - RNA, 77 nt, Human
caggguagaaggagucuccccuguuggccagguuuucaccagaaauacuguccaccauggagcaaggccuugcccug

SEQ ID NO: 4148610 - RNA, 83 nt, Human
caggguagagaugaacagacacccgcauggcuggcuggcugccucugaauccacccaccugcugguuuugcucuccugcugug

SEQ ID NO: 4148611 - RNA, 70 nt, Human
cagggucaaaaccuuggggccagucacacaaucuacucaggguaggaugacuggaacccaagugagcuug

SEQ ID NO: 4148612 - RNA, 58 nt, Human
cagggucaggaggaucuggcuucccauuggccgacacgacagaauccuucucgcuuug

SEQ ID NO: 4148613 - RNA, 81 nt, Human
caggguccgggcaggcgccucuuccaggcccgggauuaaugagucucuggacugggagauggcagaggcauguagacuuug

SEQ ID NO: 4148614 - RNA, 69 nt, Human
cagggucugggaggucacguccuacaggcaaggcuguuucaagggcugcuaccuuaaucaguuauucug

SEQ ID NO: 4148615 - RNA, 61 nt, Human
cagggucuggggggcaugggcaaccauaggaagggauguaaaugcacccucagggucccug

SEQ ID NO: 4148616 - RNA, 89 nt, Human
cagggucuugcucuguugcccaggcuggaaugcaguggcgccaucuuggcucacugcaaccucugccucccggguucaagcaagucuug

SEQ ID NO: 4148617 - RNA, 68 nt, Human
cagggugacugcccuggccacugccaggcgagggcucgggggaggguggcagaggugcaucagcccug

SEQ ID NO: 4148618 - RNA, 85 nt, Human
cagggugcugucucccucuccugaguacugugugaaucaguccucaugucccacucacacacucucagaggguggcagcaauuug

SEQ ID NO: 4148619 - RNA, 64 nt, Human
caggguggaguuuucagcccucugacauuaaaaggugaagcagaggacaugaaaacucgcucug

SEQ ID NO: 4148620 - RNA, 60 nt, Human
caggguuucaucaaugauuucuuauugugcaaagaaaaagagaugaaucuugagacucug

SEQ ID NO: 4148621 - RNA, 58 nt, Human
cagguaaaaauaaauuugugagagucacaguucuggcuagggaauuuucuuuugccug

SEQ ID NO: 4148622 - RNA, 66 nt, Human
cagguaacuuguaauuaauggcagcaauuaguuccucuggcuauuuguugcgggaauugcuauuug

SEQ ID NO: 4148623 - RNA, 60 nt, Human
cagguaacuuuagugaaagagcucugaucccucaguuuaucuauucauuacaguuauuug

SEQ ID NO: 4148624 - RNA, 83 nt, Human
cagguaaggggaauuggggcagagagauuauaauuaaccuagccauaguuuugggaaugucugugccuuaaaacuucuuaaug

SEQ ID NO: 4148625 - RNA, 69 nt, Human
cagccucugccauguuggaauuucaaacccaaaacagcugcuuggaaggagccagcaugccagaggcug

SEQ ID NO: 4148626 - RNA, 111 nt, Human
cagccucuggguaaauaggauaucuucauagacucaagaacagugaucuugaucaucuggcaagaauguucuuguagucaugaauauggcacuuccuucgcuguagggcug

SEQ ID NO: 4148627 - RNA, 60 nt, Human
cagccugacaccagcuuugggcuuuaaaucucauuuucccaacagagcugguagcagcug

SEQ ID NO: 4148628 - RNA, 76 nt, Human
cagccugcuucagggcuuucccuuguagaaauuuaguguaaaccuugaguuggggagaacagcucuggccaggcug

SEQ ID NO: 4148629 - RNA, 67 nt, Human
cagccuggccugggacugcugaagaugaaguauaggagaauuucugcugcauucucaguacaggcug

SEQ ID NO: 4148630 - RNA, 73 nt, Human
cagucaauuuuuugggucuuucaggcuaaggcagauugucuuguggucugauuccaccuaacugaauugacug

SEQ ID NO: 4148631 - RNA, 64 nt, Human
cagucacacucagaaugacuagagucugauaccaugaaagacauccaggagcugagucugacug

SEQ ID NO: 4148632 - RNA, 58 nt, Human
cagucacauggaugauggauagcguugggagcuguuuucucuaucuuccagguggcug

SEQ ID NO: 4148633 - RNA, 64 nt, Human
cagucagauguaaguuggaagcuggggcaaaaauauagggcaguuguugaugaagaucugacug

SEQ ID NO: 4148634 - RNA, 56 nt, Human
cagucagauuuaaagcuguuugaugcgcgugcauuaagaaagcucagagcugggug

SEQ ID NO: 4148635 - RNA, 60 nt, Human
cagucagugccaccagccacugccuuuugcuaaccucagaggcuggaaggggcacugcug

SEQ ID NO: 4148636 - RNA, 59 nt, Human
cagucauauuccucacuaggcuauuuuguugggggcaaaaugcucuggggauaagacug

SEQ ID NO: 4148637 - RNA, 83 nt, Human
cagucauggguucuuaguuucuguuucugauuaagccaguaaagcuccuuccucagagagacagaaacuaaacaccauggcug

SEQ ID NO: 4148638 - RNA, 57 nt, Human
cagucauuggcaagucuuucccugagguauuucaagaauugcuaauccaagugacug

SEQ ID NO: 4148639 - RNA, 80 nt, Human
cagucauuucguuuccuugccucgggguaccuugccuuucaagguugaagaguguccuuguaaaaauaauguuguggcug

SEQ ID NO: 4148640 - RNA, 61 nt, Human
cagucauuuuauuugaaaauuaggcgucuccucggcacccucauuuauugagaaaugacug

SEQ ID NO: 4148641 - RNA, 129 nt, Human
caguccaaaaagagguccugcaauuggccuguuuucuaucuccgucauaucauucauuccuugcagucacacaugaagacaauggagagcagaguacucugggcaugguggguccucaaaagauauuug

SEQ ID NO: 4148642 - RNA, 84 nt, Human
caguccacaccagauggcagcgugggagagggacaucagcucuagaccuucccucacuucuaguuauaagccuuugggggacug

SEQ ID NO: 4148643 - RNA, 67 nt, Human
caguccacagaguuguaaacauuuaccagugcaccacugcauguuuucuacuuuguacaaugggcug

SEQ ID NO: 4148644 - RNA, 130 nt, Human
caguccacugcuguccugcacgacccaugcuuggaucugcccugcugugccuggagccacuucuugaaguagcacagggcauaugcgguggccaggaucugagugugugagaagugauagcacaggacug

SEQ ID NO: 4148645 - RNA, 74 nt, Human
caguccucagcaccagaacuagggcacacugggccagguauuaggccuuaaguuguggguugaggagaauucug

SEQ ID NO: 4148646 - RNA, 57 nt, Human
caguccucucugaaaaacgacuaaggugguagcuuucuaacguagacagggagguug

SEQ ID NO: 4148647 - RNA, 63 nt, Human
caguccucucugugucugcacccuaugaccagugugggccaugccagcucagaguuaggacug

SEQ ID NO: 4148648 - RNA, 89 nt, Human
cagucuccauggcaacaaguaaagggggaagaaacauuuucuuaugaaugggaagccuuucccuuuugccuugcguggagugguggcug

SEQ ID NO: 4148649 - RNA, 68 nt, Human
cagucucuguuguggcccaaugcaaagcuuuaccuaacagaugcuuugaauaggguggcaacaaacug

SEQ ID NO: 4148650 - RNA, 81 nt, Human
cagucugacucuucuaggggcucauugucaacacuuaauaagugaaacagaagcuccuggaauauuugaaagagucaggug

SEQ ID NO: 4148651 - RNA, 129 nt, Human
cagucuggaauauucaugaccaguugcaacaagagcauuuuuccaguuggacaguagaaaagggacguaguacugucuuauuuugaaguguucacaaguuggauguuaacugugagucuguccuugaug

SEQ ID NO: 4148652 - RNA, 75 nt, Human
cagucuuaauugggagaaaguuguuuguuauuuuaguaaaaaucugccaugcugcaacuuucucccauuggacug

SEQ ID NO: 4148653 - RNA, 60 nt, Human
cagucuugcuuuacugagauggcuaauuuguuuagcaguuauuuugagaaugcaugacug

SEQ ID NO: 4148654 - RNA, 57 nt, Human
cagucuuguuacagagugucuuuucuggcaauuucaagaaggcaccagcaaggacug

SEQ ID NO: 4148655 - RNA, 99 nt, Human
cagugaaguaacuuaaauugugugugugugugcaugauucuagggccauaccuaauuuaugucuuaaguaugcuaauucuaaaguuauauuuucaacug

SEQ ID NO: 4148656 - RNA, 71 nt, Human
cagugaaucacugggcugcaucucauguuaaaugucucaggaggacagaggugcccagggcagguuuacug

SEQ ID NO: 4148657 - RNA, 93 nt, Human
cagugaauuuuucuucauuugucuguauaaggaaauuugguauuucaaguaugucacugaaugcagauacgugacaaagagaucuaacaacug

SEQ ID NO: 4148658 - RNA, 55 nt, Human
cagugacucacacaaacaugugugcucauguuucaugagagcugugagucugcug

SEQ ID NO: 4148659 - RNA, 58 nt, Human
cagugacucaugccuguaaucccagcacucugagaggcugaggcggguagaucaccug

SEQ ID NO: 4148660 - RNA, 57 nt, Human
cagugacugcuucaccaccagagccgccacccagugccuggacugggagcagcacug

SEQ ID NO: 4148661 - RNA, 69 nt, Human
cagugagccaguguuucugugccccaguguuccugagaguuagaacacagaaaacagagcaggcucuug

SEQ ID NO: 4148662 - RNA, 68 nt, Human
cagugaggagcccgaggcccugagagagaaccaggcugguccucuucagagggaccucgggaccacug

SEQ ID NO: 4148663 - RNA, 61 nt, Human
cagugaguccgcagcucucagcugagucgucaguggcucagaaaaugaaauggacucucug

SEQ ID NO: 4148664 - RNA, 91 nt, Human
cagugaguguaggucacaagggcuuuguaggcuuugcuggaggauccacuucagacagagguaggggcaagggguccugugaagacaccug

SEQ ID NO: 4148665 - RNA, 79 nt, Human
cagugaguucugcuacuuuugaaagucaucaaagccaacuucuccaggaugaaauauuucagagcagagugccuuccug

SEQ ID NO: 4148666 - RNA, 71 nt, Human
cagugauaauuauggccacuaaccauauugagcaauugagcaauugcaauguguuagaugguuuuacauug

SEQ ID NO: 4148667 - RNA, 81 nt, Human
cagugaucuacacaccaaaucacucugguuacucuggggagguagauuggaguaacaggguauuuguguggggggugucug

SEQ ID NO: 4148668 - RNA, 59 nt, Human
cagugauggauauggagaagucagcaggacuuccaaacuguuucguauuuaugcuacug

SEQ ID NO: 4148669 - RNA, 61 nt, Human
cagugauugugugaugaugaagauucauucauucauucauucauucagcacauauuuauug

SEQ ID NO: 4148670 - RNA, 98 nt, Human
cagugcacuuggcauuuucugucuuuguuggaauaauucacaaagugagcaacugagaggaauuccugggaaggcacagccagugugagggggcacug

SEQ ID NO: 4148671 - RNA, 124 nt, Human
cagugcaugcaaacugaauggcaggcucucuucugaagggguaauuagagcugcucccucacauggcacuggaggcacccuuagagaggccugcugccccucacgucaguagugcaugcagcug

SEQ ID NO: 4148672 - RNA, 68 nt, Human
cagugcauuugucaggaauugaaaaguuuuggagccaguucgaggacuuucuccugcacaaaguguug

SEQ ID NO: 4148673 - RNA, 117 nt, Human
cagugccaggugacucuggcuaagaugcucuagggcugaauuuuuuaaugccagcuuucccaggggaucaguaaagguuuugcccuggguauuccaaccaggagagccuguguccug

SEQ ID NO: 4148674 - RNA, 56 nt, Human
cagugcccaagaugugccaugcccaauuucaggagcuggagauagaauggccacug

SEQ ID NO: 4148675 - RNA, 58 nt, Human
cagugccugucuuauucuuacaagcugaccuaacaugcaacuggagaaucagguauug

SEQ ID NO: 4148676 - RNA, 81 nt, Human
cagugcgucgaagucacauggaguagggcagcugugcacuagaaaggcaaacugcugugcuccauugucuucacugcacug

SEQ ID NO: 4148677 - RNA, 67 nt, Human
cagugcugagugcuuuaccuagauaauguuauuucaaucucaugauaacuugguuaaguaggcacug

SEQ ID NO: 4148678 - RNA, 100 nt, Human
cagugcugcauggguugucacucauauucagucacugaugcagguugcacacagcccugagcccugugucuaauauggcugauacccauguauggcauug

SEQ ID NO: 4148679 - RNA, 63 nt, Human
cagugcugcauucucuggacagcuuucauaggcuguacgaacucagagagucacagugaacug

SEQ ID NO: 4148680 - RNA, 64 nt, Human
cagugcugguguaggcugaccaacuuguuuugguuuucccaggccguacccauuuuuagcacug

SEQ ID NO: 4148681 - RNA, 78 nt, Human
cagugcugguuucacccaaccgaugugcagaagccaaaauuuugauuuauauccuuugggugagauuuuugaguguug

SEQ ID NO: 4148682 - RNA, 86 nt, Human
cagugcuguaucugugauguuggcaaguuauucagccucucaaagccccugguuuggaauaaaaacaacucacagagacagggcug

SEQ ID NO: 4148683 - RNA, 61 nt, Human
caguggaaacuuuaagacaguccucaagagcuagcagcagucuuggggguagagaucacug

SEQ ID NO: 4148684 - RNA, 70 nt, Human
caguggaagagucuccagcaacuuauugacaauuucaagcccuguuaggggucucuaucuccuuucacug

SEQ ID NO: 4148685 - RNA, 80 nt, Human
caguggacucuggguugagauguaaugaccagagccaguguucaacgugggaaaguaccucucuaaacccagggacauug

SEQ ID NO: 4148686 - RNA, 58 nt, Human
caguggagaggugaggaaugcuugggcuuuuguccaucucuguuccugccuuucucug

SEQ ID NO: 4148687 - RNA, 84 nt, Human
caguggaucagagccaacuaggagauuaagguagaucuuaacaaagucgcuguuccugaaugccuggcuggcuuugcugcacug

SEQ ID NO: 4148688 - RNA, 67 nt, Human
caguggcauagcuaguauuucuuccauggcuagcugauuaauggcagacaaagcagcaugccuauug

SEQ ID NO: 4148689 - RNA, 58 nt, Human
caguggcucacaccuguaaucccagcacuuugggaggccgaggcagguggaucaccug

SEQ ID NO: 4148690 - RNA, 63 nt, Human
caguggcuucucaugucauucagaggaaaagccaaaggucuuaacagugacugagaggcccug

SEQ ID NO: 4148691 - RNA, 61 nt, Human
cagugggacuccagcucuucuccuugcccacggaggcaucucuggaaguuuggguccccug

SEQ ID NO: 4148692 - RNA, 55 nt, Human
cagugggcacagaucucugcaagacauuuccaggucagacuucugugccccucug

SEQ ID NO: 4148693 - RNA, 77 nt, Human
cagugggcaccaaagcagaggcuaagaugaguggguguuauugcauuuaacacucgcuaagagccugcuggccccug

SEQ ID NO: 4148694 - RNA, 56 nt, Human
cagugggcagagaucuggaucaaacugccaccccguagagucccuugggcccgcug

SEQ ID NO: 4148695 - RNA, 91 nt, Human
cagugggcauauaguauuaucucauugcaguuguuugaauguguaauucccaggcuaccagugaggucaaucuccuuuuauauguuuacug

SEQ ID NO: 4148696 - RNA, 56 nt, Human
cagugggcugugauggauucaccuuguugugucugucuccaaggcauggcccagug

SEQ ID NO: 4148697 - RNA, 79 nt, Human
caguggggauaacgaaggcugaugcgggauuaaaagcauaauguugaugguguugaguuaguucugguuauuccuucug

SEQ ID NO: 4148698 - RNA, 73 nt, Human
caguggguuagauggacuuccuggacuaaagcacagcuggaaaguaccagaugguccagagucuagccccaug

SEQ ID NO: 4148699 - RNA, 63 nt, Human
caguggguuaucugugggaacuuuggaaagggcuugagaauucuuacaaggcuggcccacuug

SEQ ID NO: 4148700 - RNA, 106 nt, Human
caucuaacauugcuuggaguguuuauuuuuaagugcauauuuuuguuguagagggaaagauuaugaucucuaccaauuuaaacuguacuuuccgagcauauggaug

SEQ ID NO: 4148701 - RNA, 79 nt, Human
caucuauauauggaagccuguauuuuggaacagacauaugaaaguguuucuuccaaaggcacguucuccugaaaagaug

SEQ ID NO: 4148702 - RNA, 70 nt, Human
caucuaucccuuaacaaaaguuuacuuagugccuucucuaugcuaggcacuguguuacauguugaagaug

SEQ ID NO: 4148703 - RNA, 70 nt, Human
caucucucuguucauugagucaaaacggaauauuuagugggcuccuuuuugguucugggauacagagaug

SEQ ID NO: 4148704 - RNA, 84 nt, Human
caucucugcuauacucagguguugucuaaagcuucagacuaauuuauugaauggacauggacaacugccucagcuucagacaug

SEQ ID NO: 4148705 - RNA, 66 nt, Human
caucucugcugcagaucauuuuacaccugcuuuuccucacuuuguuuuuggcucugcagccagaug

SEQ ID NO: 4148706 - RNA, 109 nt, Human
caucucuuuacuccauccauucauuugcccaguaagucacagguuuucuucuugaaucacugacucucacugguuaguugaguuuuaggaugauugaggaggagagaug

SEQ ID NO: 4148707 - RNA, 87 nt, Human
caucucuuugcaaaacuaggaaaaguugaagccuuguggaaagacugcuacauaacccauggcuuucagauuucuauguuggaggug

SEQ ID NO: 4148708 - RNA, 69 nt, Human
caucugaaauucuuccuccagcugucucgauagcgaugcuugacagacuggaggagaauaguuugaaug

SEQ ID NO: 4148709 - RNA, 80 nt, Human
caucugauuucuacugcagcugcucaacucugcugucguaaugggaaagcagccauagauagcaugcaaaagaaugggug

SEQ ID NO: 4148710 - RNA, 58 nt, Human
caucugcaaaggaugaauccuguuaacuuuuuggaaaacugguucucuuuugcuugug

SEQ ID NO: 4148711 - RNA, 56 nt, Human
caucugcagggccccacagccaugggcaucaggaccagggcucugccuugcugaug

SEQ ID NO: 4148712 - RNA, 93 nt, Human
caucugccacuuguuuggggagcuccuacucuaugccagacacugaaagugcucagggacaauggagaggggcauucuaagcugaggcaggug

SEQ ID NO: 4148713 - RNA, 56 nt, Human
caucugcccacucgggucucuggcaauacuaaccaggcuucacgaugggugaggug

SEQ ID NO: 4148714 - RNA, 71 nt, Human
caucuggucagcagaggggaaggcaucugucucuccaauggcuccugcagagccccccuucugaucacaug

SEQ ID NO: 4148715 - RNA, 78 nt, Human
caucuguauuucaccaggaaauucaguuuuaauaaucacuguguuacuacauaugcaguuugaauugaaaugcagaug

SEQ ID NO: 4148716 - RNA, 79 nt, Human
caucuguauuucuagaaugguagcacuauugcugaugaacuagaugguaccagugcugcacuucuggggaucacacuug

SEQ ID NO: 4148717 - RNA, 59 nt, Human
caucugucucauuucuguauuuccggugcccacguagggauuuacccaauggauagaug

SEQ ID NO: 4148718 - RNA, 81 nt, Human
caucugugauacuccuuauacuacuuugugguauguggauacuucuuauacaucauuuauggaauaaggugaucauacaug

SEQ ID NO: 4148719 - RNA, 56 nt, Human
caggggugggcugagguggggagggagccuccucucuggcagaggcccuaucccug

SEQ ID NO: 4148720 - RNA, 90 nt, Human
cagggguggggugggucgugggcccugcuccauucaguggugccucugccugccucggaacucggggucccugcccacccauacccucug

SEQ ID NO: 4148721 - RNA, 78 nt, Human
cagggucaaucagcuaaauaaacuagucauucagucaacuagcauugauuagauuuuagcaagauggaauugacuuug

SEQ ID NO: 4148722 - RNA, 58 nt, Human
cagggucacucugucugcuguguggagaacaguccgcaggaagacaaggguggaaaug

SEQ ID NO: 4148723 - RNA, 89 nt, Human
caggguccuggcuauaauucuccuguucaauaaauagaaaaaucuuuuuuacagacaacuuaauaggggauuuaguagugagggcuuug

SEQ ID NO: 4148724 - RNA, 55 nt, Human
caggguccuuugccaacacuuggauggcucacaguccaggcuggaaggggcguug

SEQ ID NO: 4148725 - RNA, 56 nt, Human
cagggucugugcaagaacacgccuuggugaucauggugucauuucuacaggccgug

SEQ ID NO: 4148726 - RNA, 62 nt, Human
cagggugcgccacucagauguaccucucccuugccaugggcuccacugagugugugcuccug

SEQ ID NO: 4148727 - RNA, 55 nt, Human
cagggugggcuuccagucacccgcacauaugcggggcacuggccgcccaucccug

SEQ ID NO: 4148728 - RNA, 99 nt, Human
caggguguugaugagaaggcauuucauggcagacuuuaacccuggacuggauucuggggaagguuacaagucuccaucuccuguucuuaucaaaacuug

SEQ ID NO: 4148729 - RNA, 84 nt, Human
caggguuaagccacaagcauccuggacaguuuccccuauuaccccacaaugauauugggccuccgggaugcuggccacaucuug

SEQ ID NO: 4148730 - RNA, 67 nt, Human
caggguuagcccagaaagcaaaugucucugaucagcagggcaaagggagccucuggagcugaguuug

SEQ ID NO: 4148731 - RNA, 74 nt, Human
caggguucucagguacaggagccauccucuccccagaguggcccaggacaggagccuguuaguugagugcucug

SEQ ID NO: 4148732 - RNA, 63 nt, Human
caggguucugcaucgccucgaacccgcaggccguggcggguucuccugaggaagcagggacug

SEQ ID NO: 4148733 - RNA, 76 nt, Human
caggguugauuccuucuggaggcucugagggugagucugcuccggaccccucuugcccagccuccaguggguccug

SEQ ID NO: 4148734 - RNA, 60 nt, Human
caggguugggcuccaaggauggaauggcaagcuggcaucccaccgauggucccaacacug

SEQ ID NO: 4148735 - RNA, 101 nt, Human
caggguuucaccguggugucaaucuccugaccuugugauccgcccgccuuggccucccaaagugcugggauuacaagcgugagccaccgcgccugaccuug

SEQ ID NO: 4148736 - RNA, 85 nt, Human
cagguaacuaaagcauuacuagacuggauuuuggaguuugaguagaaagauaacagaauuuagcuuguaugaaugcuuuuaugug

SEQ ID NO: 4148737 - RNA, 72 nt, Human
cagguaacuuauuguccacucugccauuccuaucauuccacacugaugggcuggugagggaucauuuauuug

SEQ ID NO: 4148738 - RNA, 64 nt, Human
cagguacauuuuuuuuccuccuuauuuugaggcagaagcuauuggaggaaaaaggaaugacuug

SEQ ID NO: 4148739 - RNA, 69 nt, Human
cagguagcgacagccagcuuugcugugguugaggagacucaugcaacggcucgcugagccgcaggccug

SEQ ID NO: 4148740 - RNA, 72 nt, Human
cagguaggagcaggcuggugggugucugauuuuauuguagcuaggcuaauucauuggcuugaacuccaccug

SEQ ID NO: 4148741 - RNA, 61 nt, Human
cagguagguuuuaggcuaaacagagaguuauacucuuccuuauuguuugggacucugccug

SEQ ID NO: 4148742 - RNA, 68 nt, Human
cagguaguuauuuccuacuauaaacaaaccuuugaaaucagacuuuuuugguggagagaagcuauuug

SEQ ID NO: 4148743 - RNA, 76 nt, Human
cagguaucucccacagaccaugaguggaagcgaugagugucccuucuuuuacaggucuuggguuaagaagcaacug

SEQ ID NO: 4148744 - RNA, 73 nt, Human
cagguauucaaugggcauuuguugaaccaacuaaugagaaaguauuuauucaacaaguauuuauugagcacug

SEQ ID NO: 4148745 - RNA, 90 nt, Human
cagguauuccaugguucauccauucuacaagguagcagggaagaauucugaaguuccuuuguuaucuguaaaugguuagugugagaccug

SEQ ID NO: 4148746 - RNA, 78 nt, Human
caggucacacaagaaguuaaugggcaaagucaagaaccuacauauuauggccauuucuuaaacucuucccugggccug

SEQ ID NO: 4148747 - RNA, 105 nt, Human
caggucacucaggggugacugaacuggagaugcucagggcuucagagggcaccccuccugcaagcuaccccuagcaucagcucagggccacccugagcuggccug

SEQ ID NO: 4148748 - RNA, 58 nt, Human
caggucagcuuggagcaucucugcagaacagggcagugccgagcuucaggcuaaccug

SEQ ID NO: 4148749 - RNA, 74 nt, Human
caggucauaagugcacaaaugcuguugcuagauacuuaucucuggcugacaaauaggugcaguucaaugaaaug

SEQ ID NO: 4148750 - RNA, 58 nt, Human
caggucaugaucugaaaguugucauggagcacuuuaagcaggaacaggucaugaucug

SEQ ID NO: 4148751 - RNA, 79 nt, Human
cagguccaguaagacguacuauugguuuauaccuuuuuacauaaauuguacuacaccauaguacugaguacaccaccug

SEQ ID NO: 4148752 - RNA, 117 nt, Human
caggucucuggcuucaucaggugcacucugagcugcagcagguggacacacucaccucccagagggugcaggugaggagguggcaccuggcuuagguuauucuggcucaagggccug

SEQ ID NO: 4148753 - RNA, 57 nt, Human
caggucugcagacagggccaugggguuuggucucugcccugcccuggggccggccug

SEQ ID NO: 4148754 - RNA, 67 nt, Human
caggucuuugauggugauccaguggcaggaggagcucagcuggaaugggaaucaggaaagagaccug

SEQ ID NO: 4148755 - RNA, 61 nt, Human
caggugaccugggauccgcugccaguacaaucccauccugagcagcugcccccagucccug

SEQ ID NO: 4148756 - RNA, 56 nt, Human
caggugauucuaauauguauccacggcugagaacucaugcacguuggaaucaccug

SEQ ID NO: 4148757 - RNA, 123 nt, Human
caggugauucucucuguuuccauguuauuuaucuuccucccuuccuauugaaggcgucauauggaguguugaaggcuggugguaaggaggaaaaaggaaugaacacugaaucaguaauaucug

SEQ ID NO: 4148758 - RNA, 116 nt, Human
caggugccugugagugcagcugggacccugcccuguggccuuuggauccugaagaaugugcuggaucaugaaccaggugcaggggagggugaaguccugcagcagaaaggcaugug

SEQ ID NO: 4148759 - RNA, 108 nt, Human
caggugccuucuccguguccuccugcacagagaugcagacuggcucaggcauggccugcccccaggagcucacugucuaaugggaagagacaugcaugaaagcagcug

SEQ ID NO: 4148760 - RNA, 73 nt, Human
cagguggccaugggcccugcuggaguccuggcaggaggcgccaucagugccaggcccagcagggcggccccug

SEQ ID NO: 4148761 - RNA, 86 nt, Human
cagguggcccagugugaaaggucauuuaucugaaaggaaacauuccugaagugacugaugagugugccuuucagcuggcauauuug

SEQ ID NO: 4148762 - RNA, 62 nt, Human
cagguggcccguacccagccucuuaacacccaugaacuagaggccagcuagcgggccaucug

SEQ ID NO: 4148763 - RNA, 71 nt, Human
caggugguaaauggcagauccacaguuugaagcccaauggcuuggcugggaacugugauucaaacuguuug

SEQ ID NO: 4148764 - RNA, 82 nt, Human
cagguggucaauuggagucacaggagaagaaugggcacgagguacaggccuguuuuccucaauggcuugcugggcucagcug

SEQ ID NO: 4148765 - RNA, 79 nt, Human
cagguguaagcagucuaggguguauaaggaagccucacacuuuuggggcucuucuggcaugcugcucugcuguucccug

SEQ ID NO: 4148766 - RNA, 60 nt, Human
cagguguacacauuguguuuauauuuguauguaaaucuauacgcauaauguuuauuccug

SEQ ID NO: 4148767 - RNA, 77 nt, Human
cagguguauuacuggccugcggaagacuuggaugucccagcaugguagaaggccaggucccugcagugcaacgcuug

SEQ ID NO: 4148768 - RNA, 60 nt, Human
caggugucaaaauacuaaguggcuauaagcacacgcaggagaguauuuuguaaaacccug

SEQ ID NO: 4148769 - RNA, 66 nt, Human
caggugucugaccuagccugcugucugcugggcucacuucaaagcaauagguuaggucaagaucug

SEQ ID NO: 4148770 - RNA, 87 nt, Human
cagguuauugcaauauuguaucagaauagcagcuucuagauggguuagagcuuguuguuacugaugcauuucucuguuaugggccug

SEQ ID NO: 4148771 - RNA, 58 nt, Human
cagguucaacagcuagcuguggacagagccagacuuugaaugcaggcuguugaaacug

SEQ ID NO: 4148772 - RNA, 55 nt, Human
cagguucagagagggacagaaagagagggaguuugaggucggcucucugagccug

SEQ ID NO: 4148773 - RNA, 64 nt, Human
cagguucucaggcucugagacccuaugggaaauugccuauagggccccacagccugggaaacug

SEQ ID NO: 4148774 - RNA, 60 nt, Human
cagguucuugaagccuucuggcaccugaagaauguuggaaugacuucuucaagaagccug

SEQ ID NO: 4148775 - RNA, 55 nt, Human
caggcagagucagauuagacuugauagauauucaagucucucuaauaaaugcuug

SEQ ID NO: 4148776 - RNA, 56 nt, Human
caggcagagugagguggucuaauuugaagguguuuacuuccaacugacucagcuug

SEQ ID NO: 4148777 - RNA, 66 nt, Human
caggcagcagcucagccgggcacugcagagagagagucugggcagcauccagcagagcugcaacug

SEQ ID NO: 4148778 - RNA, 56 nt, Human
caggcagcaggagcccugcucgcaucucccauuguagcuguggccuugcuggucug

SEQ ID NO: 4148779 - RNA, 58 nt, Human
caggcagcucugcuuuuccuaaauaucagaggacacuaggaauaugcagggucaccug

SEQ ID NO: 4148780 - RNA, 67 nt, Human
caucuuaauaugggauguuuggaaaaguuacuuaagcuuucuaaacuucaauucuaaauugcagaug

SEQ ID NO: 4148781 - RNA, 69 nt, Human
caucuuacccaucugguuuuugagucuggacaagcuccucuccagcuccucuacccgaugcguaucaug

SEQ ID NO: 4148782 - RNA, 57 nt, Human
caucuuaccccugcuaaugaccaaguauucucuggcaauuggggacuggguaaggug

SEQ ID NO: 4148783 - RNA, 106 nt, Human
caucuucacagaccugcccaaccuccuggguuggcaacugggauuuucuugguccuuccagggauggccuagacuagcuuggagauguaggggguccaggaagaug

SEQ ID NO: 4148784 - RNA, 84 nt, Human
caucuuccagugucacauggggcucccguacacaacuucccagcaaaccugggaugcaggagcccuugggcucuggugccaaug

SEQ ID NO: 4148785 - RNA, 69 nt, Human
caucuucuaguuccuucuuccaaacccaucaucucauaggugaggcagggaaggggagccaugagggug

SEQ ID NO: 4148786 - RNA, 130 nt, Human
caucuugaacuguguuauacaaaguaccuggagaaaaaggaagugggaguauuauuuuacuucaucuugguagacaauacauuuauucccuuuucauucagcagacauguuagguauaaacacuguugug

SEQ ID NO: 4148787 - RNA, 63 nt, Human
caucuugaagguuucuuuagcuuuucacaaagucuuagaaaacugagagacuaaaucaggaug

SEQ ID NO: 4148788 - RNA, 65 nt, Human
caucuuggagauguugaugugugguguccaaaacugaugcuccaaacagcaauucuuuaaagaug

SEQ ID NO: 4148789 - RNA, 60 nt, Human
caucuuuaacagaauggauuuggccaccuucagacaugcccuguuuauuuugauaagaug

SEQ ID NO: 4148790 - RNA, 72 nt, Human
caucuuuagaauuuaaugguacagaaaucauaguuagcuuagugauucugaaauauuagaaaaauggagaug

SEQ ID NO: 4148791 - RNA, 64 nt, Human
caucuuucucuugauccugcuuuccgaucuugauuggacugaagacagcgaggacagaggggug

SEQ ID NO: 4148792 - RNA, 85 nt, Human
caucuuugcccauuuuagcaauuggaaucuaguucaugaaguaaguguugaacagucuucaugcuagaauggcacuaaguagaug

SEQ ID NO: 4148793 - RNA, 85 nt, Human
caucuuuuugugugugugcaugcuuccguuucuggcugggguuuucccaguguugcaugaggcaguaccacagugcacagaggug

SEQ ID NO: 4148794 - RNA, 67 nt, Human
caucuuuuuucccacccuucuaggacaaacucaugcaaagugaggggagcuguggugaaaagaggug

SEQ ID NO: 4148795 - RNA, 59 nt, Human
caugaaaaggcuuuucuagugaaguuccggugauguuucagcuggagauccuuguugug

SEQ ID NO: 4148796 - RNA, 85 nt, Human
caugaaaaugggcuuuuccuguuucauagaaaacugaacaauuuauuucagucauugauggaguaggucaguguuuaucuucaug

SEQ ID NO: 4148797 - RNA, 129 nt, Human
caugaaacaagccccagggcaggaaggcuggcaucuuuccaccugaaugacuguuuaaguaaaagcagcacacgggagaaagacaggcuagucuguuuuccuuguaauugguguuggcuugaauauaug

SEQ ID NO: 4148798 - RNA, 90 nt, Human
caugaagcaaauaucuaugcaauaccuucugaaaauaauggaucaguaccuuauuuaauggaggucauuguuagaauuuugcauuuuaug

SEQ ID NO: 4148799 - RNA, 64 nt, Human
caugaagcacacuguguagagggcaugagagaugccgaauagcugcucacagaugugcucagug

SEQ ID NO: 4148800 - RNA, 56 nt, Human
caugaagcauguuuugucaugaggcaacucaguugacaaccucaugcuuugucaug

SEQ ID NO: 4148801 - RNA, 87 nt, Human
caugaauagaaugcuggcugccuuucaccucaucucauccauuaacugugaaaggugagagccagccuuauuuuucuaaauaucaug

SEQ ID NO: 4148802 - RNA, 129 nt, Human
caugaauagugaauaggaaaaugaugaaauuguugcugcuuuuuauagaggcuuagaaucauggaaaucauuugcuuuaagguauaaaagggaauaauuucauuuucuacuuuuuacuuuaaauuucug

SEQ ID NO: 4148803 - RNA, 55 nt, Human
caugaaugaguaauuuacaaagcccauuaaggcggcacagaauuacuuauuuaug

SEQ ID NO: 4148804 - RNA, 57 nt, Human
caugaauuauuuuucacaagaugaacaugguuuuaaucugugagaguauaauuuaug

SEQ ID NO: 4148805 - RNA, 63 nt, Human
caugacaagcaugugguaaaaagacccggguuccagucccaggucugccacguguuuguugug

SEQ ID NO: 4148806 - RNA, 55 nt, Human
caugacaucugcuuaguaugaauuugacguaagaccuuacuaggugagggucaug

SEQ ID NO: 4148807 - RNA, 76 nt, Human
caugaccacaugugcacugcuguauggccccagggcacugccaugccuuccaccccauugagcuagugcacacaug

SEQ ID NO: 4148808 - RNA, 66 nt, Human
caugacuacuuaguuugagagcauggaaacguucauauuuuaguucugugcuuuuuaagugugaug

SEQ ID NO: 4148809 - RNA, 80 nt, Human
caugacucauuagugaguugauuauauuuuaccauuguuguucauauuuugucgauguucuuauaccauugugggucaug

SEQ ID NO: 4148810 - RNA, 62 nt, Human
caugacugagaaguugugcguaauauguauacucacaucccauuggccaaaucuuagucaug

SEQ ID NO: 4148811 - RNA, 84 nt, Human
caugacuucuagauucuucuuuugagucucugagugagugguggugucaugaaaggagacgguuaagagggagugaggagcaug

SEQ ID NO: 4148812 - RNA, 62 nt, Human
caugacuuuuccuuuugaaugaaaaagauuuuauuuucuucuucucaugggauaaguacaug

SEQ ID NO: 4148813 - RNA, 60 nt, Human
caugagaagggguggaguuagaacacagguaaauauacucccagcccuuaggaacucaug

SEQ ID NO: 4148814 - RNA, 68 nt, Human
caugagauaauuuuucuccagucuucaucaugagaaucuugugugucuccuggaggaaaaaucucaug

SEQ ID NO: 4148815 - RNA, 67 nt, Human
caugagcauaauuagaauccaagugaccugugaguucauuccaguccugguucugauucugacagug

SEQ ID NO: 4148816 - RNA, 77 nt, Human
caugagcuaaagcuuuacuugcuuuguuacaaaacuuuauuaaaguuuuaaguuaauauaauugaggcugugucaug

SEQ ID NO: 4148817 - RNA, 57 nt, Human
caugagcucuucucuuggauccaggauucaaacauccaucuugggacagggcacaug

SEQ ID NO: 4148818 - RNA, 88 nt, Human
caugaggcauuuuuggaaaguguacaaauuugaauaaggacuggauauuacguauuauaaaauuguucauuuuccuaaggugacaaug

SEQ ID NO: 4148819 - RNA, 69 nt, Human
caugaggugugggaggagcuacauaaguuggaucuaacuuuccaaauaaguaaugucuuccuuuucaug

SEQ ID NO: 4148820 - RNA, 88 nt, Human
caugagucaagguaaauaaaaguucccugguuagaaaagggcaccaaaaaagccuuugaaaaguaguucaacuugacuuugacuuaug

SEQ ID NO: 4148821 - RNA, 67 nt, Human
caugagugccuucuaggugcuguggauauaguacugacuaaagucagacacaguacuugcccucaug

SEQ ID NO: 4148822 - RNA, 62 nt, Human
caugagugugccagucugauauggugagauaagccugggacagaugugcugccgcauucgug

SEQ ID NO: 4148823 - RNA, 94 nt, Human
caugaucucagcccucaaaaaccuugagccucugccuggcagucccagacaaaggcaucggcaauuagggagcauugaugagggcaagagcaug

SEQ ID NO: 4148824 - RNA, 55 nt, Human
caugaucugguccuacugugggcagcgcugcugcccagagccugagaggauuaug

SEQ ID NO: 4148825 - RNA, 82 nt, Human
caugaugcuguguuacugagauccggccccuggaggaguuuucuuuuacaauuuccccuaugccauuucacacagacauuug

SEQ ID NO: 4148826 - RNA, 60 nt, Human
caugauggcucaugcuuguaaucccagcaauuugggaggccgaggcaggcagaucacaug

SEQ ID NO: 4148827 - RNA, 57 nt, Human
caugauguaguuguugguagauagagguuuguucucugaccauuugacaacauccug

SEQ ID NO: 4148828 - RNA, 55 nt, Human
caugauuauguguuagaguuuggucagaguuuaccuaauucacagcauaauuaug

SEQ ID NO: 4148829 - RNA, 72 nt, Human
caugauugagcuuggaagcagauccucacccagugaagcuuggagaugacugcauucccggcagauucccug

SEQ ID NO: 4148830 - RNA, 82 nt, Human
caugauuuuauuuuucagugcacuuuuucuggaaaacaauuuugcaaggugcaagguauucagaugaagugcugaaaucuug

SEQ ID NO: 4148831 - RNA, 82 nt, Human
caugcacagugauaucugaagaauuauugcuuccuuuccaauaucauuccacaagcauuauugagaugauccugcaugcaug

SEQ ID NO: 4148832 - RNA, 62 nt, Human
caugcagaugucaugaggcaugucuggcaggucacugcuuuugugucuaaucugauugcaug

SEQ ID NO: 4148833 - RNA, 80 nt, Human
caugcagcuacgcuccacuugaguaggccugaucucuuauccugccucuucagcucagcuggaccaucguguuuugcaug

SEQ ID NO: 4148834 - RNA, 55 nt, Human
caugcaguugaagcacagagaggggauccuagccuuucuguuauaaaauuccaug

SEQ ID NO: 4148835 - RNA, 57 nt, Human
caugcauauaaggcacauguauuuccauaagugugagugugugugugugugugugug

SEQ ID NO: 4148836 - RNA, 60 nt, Human
caugcaucgaugaaugcguggguggauucauagguggccacauggguggauggaugcaug

SEQ ID NO: 4148837 - RNA, 61 nt, Human
caugcauguuuacuacagugacguagaaugauuuuucuaggagcuguauuaaagauacaug

SEQ ID NO: 4148838 - RNA, 61 nt, Human
caugcauuaugcauuugugaucugggcucaaacugcagcugccaguguggcaugaugcaug

SEQ ID NO: 4148839 - RNA, 116 nt, Human
caugccacauuucuuuugaugaugucauauuuuugcaggguuggauuuuuacuaguugugauacagaucaagcacugugcaaaaaucaguguggaacaggaaaggaggguggcaug

SEQ ID NO: 4148840 - RNA, 105 nt, Human
caugccagcugcuguggguguguggggccuucggguccugugggauggcgagugugugugcugagcaggaccuguagggccugcaucccaggugagugggccaug

SEQ ID NO: 4148841 - RNA, 57 nt, Human
caugccauucccugauccuaaccuuccuuaaggaaguucaaguaggagaguggcaug

SEQ ID NO: 4148842 - RNA, 73 nt, Human
caugccguaucaggaaaucuccagucaggccgcguuguuuauuuagccugcugaggccucuugguauggugug

SEQ ID NO: 4148843 - RNA, 62 nt, Human
caugccucuguuuuaguuguugacugggguugaacaggaaggcagcuuucaauaggguuaug

SEQ ID NO: 4148844 - RNA, 94 nt, Human
caugccugguuuagaagauuuuggggacuugcccucagcuuuauugcucuuggggcuccuguagaucucuaaagcaccucaagcccaggcuaug

SEQ ID NO: 4148845 - RNA, 78 nt, Human
caugcuagcgcucaucugccgccugccggacgguccccuucgcucgucuggaaggaggagauggagccgaugcucgug

SEQ ID NO: 4148846 - RNA, 121 nt, Human
caugcucaguuucuuuccauggauaaacaaaauguagaugagauauuuuuuguuagcuugaauagaggaauuuauuucauauacauacugccugucuguacaguugauugaaaauagcaug

SEQ ID NO: 4148847 - RNA, 57 nt, Human
caugcucuagauucucucuaauccuacucagucagaguuuggggaaguuugggcaug

SEQ ID NO: 4148848 - RNA, 129 nt, Human
caugcucuuuucuuauccuuuuacuucuuuggcuugacaaaaauaacacagcauaaaaugcaccuagcauuaugauguuuguucuuguuccucuucugauaaggacuaaauguauaauuaaggaaaaug

SEQ ID NO: 4148849 - RNA, 60 nt, Human
caguaaugugcucugcauccagucugugucugucugccggugcagagcugacauuaccug

SEQ ID NO: 4148850 - RNA, 56 nt, Human
caggcuuaaaagcagauuuugagucauaaauauuaaacucugccauuuuuggccug

SEQ ID NO: 4148851 - RNA, 112 nt, Human
caggcuugguuccuucugaggacuaugagggaaggaucuguuucaggccccuuuccuuggccuguacauggccaucuuuaccuucauggucuugucccuaugugcaugccug

SEQ ID NO: 4148852 - RNA, 87 nt, Human
caggcuuguuaaauagguaaauuguguguugcuaggggaugguguacggauuauuuugucacccagguaauagcaguuuggagccug

SEQ ID NO: 4148853 - RNA, 76 nt, Human
caggcuuuacuauuuggucuuggauuauuucuggaaauauugagagguucagaauuuuaaaccaaggaaaagccug

SEQ ID NO: 4148854 - RNA, 80 nt, Human
caggcuuuccacagcuguccuguaacaggugugucaacuggggauuuuccuguugccccaggacugcugccaagacccug

SEQ ID NO: 4148855 - RNA, 71 nt, Human
caggcuuuguaccuggggucuuaacuagacuuuaugagaauuaagcaauaagaucuuagaugcaaaaacug

SEQ ID NO: 4148856 - RNA, 88 nt, Human
caggcuuuuuuaugaccacagaggaauuugaagaggcaggaacacaacugaaaaaaaaucucuucccuuuaugguaugugaaggugug

SEQ ID NO: 4148857 - RNA, 65 nt, Human
cagggaaagucacuuccuucugucagccuccuccaugaaaucgaggugaccuaguugacccccug

SEQ ID NO: 4148858 - RNA, 87 nt, Human
cagggaagaaguagcaugauuauuauacuguggaucuuugucaacucccuguuuucaaggcuaauccacaguauauguguuucccug

SEQ ID NO: 4148859 - RNA, 129 nt, Human
cagggaagaauaaguggcugucauagaagaggacuucugagcugcuuuaaaacuuuucaauauauuaccguuugaugcagcacauaguagucuaccacuuguaugcuauauuuacuugagauuuaccug

SEQ ID NO: 4148860 - RNA, 94 nt, Human
cagggaaggaucguuggagacagagcuuugggggucuuguacaagaugauauuuaaguuccuuuucaacaacuuuaugauccuauaauucucug

SEQ ID NO: 4148861 - RNA, 56 nt, Human
cagggaauacuaugacacacaggugauucacuggagcaucucuugguauuccucug

SEQ ID NO: 4148862 - RNA, 72 nt, Human
cagggaaugcuaaauccagaagcagucaauaaauuuauuuuauuucugauuuuguuugugaauugguaccug

SEQ ID NO: 4148863 - RNA, 59 nt, Human
cagggacagauccagggacacaacugggauaaccgguauuccugguaagccugucacug

SEQ ID NO: 4148864 - RNA, 62 nt, Human
cagggacagcacuaaacucuuguugugauauagguguuagaugauaagggaggccgucucug

SEQ ID NO: 4148865 - RNA, 84 nt, Human
caucaagccuacaggugaguggcagugggaugcuaucaggccauugugugucuuucgcaccuacugcccuugugggaguugaug

SEQ ID NO: 4148866 - RNA, 58 nt, Human
caucaagcugugcuacuggguaagcagaagguggaaggccccaggagcaguauugaug

SEQ ID NO: 4148867 - RNA, 77 nt, Human
caucaaggucaagcuggaggcugagaucaccaccuaccaccgccugcuggaagauggugaggacuucaaucuuggug

SEQ ID NO: 4148868 - RNA, 111 nt, Human
caucaauaccguuuuaauaugaaccuguaaaucacauuuaguggcuauagaaaaaccuuuuggcacagcaacaugugguaguguagguaaacauuagcugaagguaauaug

SEQ ID NO: 4148869 - RNA, 78 nt, Human
caucacagaccugaacugcugaaugcuauuccucauggaaacugaggcauggacauuucggcagcucccccuuggaug

SEQ ID NO: 4148870 - RNA, 97 nt, Human
caucaccacauucuaggugcuuaucuucaacuugaucauuugaauauuaguauauccguaaaugguugguuaaggcauguguguguauguggugaug

SEQ ID NO: 4148871 - RNA, 62 nt, Human
caucacugcuucuaaaaugguguuauaucuuaggauuuucauuuguuuuuaggaguagggug

SEQ ID NO: 4148872 - RNA, 76 nt, Human
caucacuuggcucauaucccggccaucauuaggaggaauuccccgaaaugaugcugacguuuuaguugacauggug

SEQ ID NO: 4148873 - RNA, 130 nt, Human
caucagaaucaccuggagaacuuguuaaaaccauggauggcugggccucauccucagaguuucugacucuagaagucugggguggggcccaagaaaugugaauuuuuaacaagcccccaggggaugccag

SEQ ID NO: 4148874 - RNA, 83 nt, Human
caucagagcugaaaauauacuaggauuuuauuuuccaugagaaaauaguucuuuaugagaaaaagauuguaacagcuuuaaug

SEQ ID NO: 4148875 - RNA, 55 nt, Human
caucagcagucacaugaugcugucuguccagauagucaugauguuaacucugaug

SEQ ID NO: 4148876 - RNA, 75 nt, Human
caucaggcagagagggcugagcuagaacaaaaugcaauucucuucguuccuguccagagcucuuucugcuugcug

SEQ ID NO: 4148877 - RNA, 78 nt, Human
caucaggcccugaucccaauguauuuuaaucaccuuaaggaaaagaacugcaugggauuaaucucugggucaauggug

SEQ ID NO: 4148878 - RNA, 62 nt, Human
caucaggcugggaacacagaucaggauuucaaaugcccccuucucuguggccuucccugaug

SEQ ID NO: 4148879 - RNA, 88 nt, Human
caucaggguuguuuccaucugagagcugugaagaagcuguuccaugccucucuccuaauuucaggugcuuugcugaaaauccuuggug

SEQ ID NO: 4148880 - RNA, 58 nt, Human
caucagucugaaagccagggaguuggucugagugacaaggaauugguuucagaugaug

SEQ ID NO: 4148881 - RNA, 69 nt, Human
caucagugcggcaucugucauccugcuaggcccaaauuguuuucuaugauggaugucacagucuguaug

SEQ ID NO: 4148882 - RNA, 78 nt, Human
caucaguguggucagugugacauuuuuuaaguuauuugcauuuaaucuuagaacauuucauaauguuaccacuugaug

SEQ ID NO: 4148883 - RNA, 69 nt, Human
caucaguguugucauguuguugcacauugcaggguuuccuuuuguaaggcuaaauaauauuccacugug

SEQ ID NO: 4148884 - RNA, 77 nt, Human
caucauaccucccacccccuccgggaagggaaauuacauuuccccauuuuagcaagggguggcgagagggaagaaug

SEQ ID NO: 4148885 - RNA, 79 nt, Human
caucauagugugacccauggcaagggcaguaauaaccaccaaaaucuccugcauuugcaauggguacacaaccaagaug

SEQ ID NO: 4148886 - RNA, 89 nt, Human
caucauauucuucugacaauagccaugccauuuuguguucccagggccaaggagaagacagaaaccuguuuggcuugaggaauguuaug

SEQ ID NO: 4148887 - RNA, 61 nt, Human
caucaucucucccccaggccugggccacacugcccuguccuguggugacagguacaagaug

SEQ ID NO: 4148888 - RNA, 56 nt, Human
caucauuccacauguaccacuagcaguugcccccuuugcuagugugugguguggug

SEQ ID NO: 4148889 - RNA, 62 nt, Human
cauccacagcccuugaugauaauuuauccauguuaggcagggugacgaggccccugugauug

SEQ ID NO: 4148890 - RNA, 70 nt, Human
cauccaugugugaaucccagaaccugugacuguuaccuuacauggcaaaagggacuuuacagcagaggug

SEQ ID NO: 4148891 - RNA, 68 nt, Human
cauccauuuccuccacuauaaaggggaauuuuaauuccuacccgacucgguaguaggggaauugggug

SEQ ID NO: 4148892 - RNA, 74 nt, Human
caucccauagaaagaggcagggguugcaauugaaaacacacugacagauuaaaccccaguucucuuacuggaug

SEQ ID NO: 4148893 - RNA, 93 nt, Human
caucccccuggcucaccgugcuccaggcagaugggccggcuucagagcuuuugugcugaaggccccuuugccuggaacgucuuugccuggaug

SEQ ID NO: 4148894 - RNA, 72 nt, Human
cauccgcagagcucacacaagauagcugugccugcgugugcccauaugcaucugugugcgugucugcgugug

SEQ ID NO: 4148895 - RNA, 58 nt, Human
cauccgguucguggucaccuuguggaacucauuggccacgagguucacgcgcuggaug

SEQ ID NO: 4148896 - RNA, 127 nt, Human
cauccgucaccauaaccagccuacagagagcagcuggcacagaccucuucaggaugcgggggucuccucacuucuccaugccucgggaagagucugugggagcucucugugaauguagugaugugug

SEQ ID NO: 4148897 - RNA, 77 nt, Human
cauccuacagccacacgccauuuaagcgaacucauuugagaauguuucaggcuugcaugauuggaguggguggggug

SEQ ID NO: 4148898 - RNA, 65 nt, Human
cauccuucccaaggacagggcaucuaaccagagaacagaaggagauggcccaguggggcagggug

SEQ ID NO: 4148899 - RNA, 57 nt, Human
cauccuucuugccuucacccuucccugaccacacagccaggguggcaaaggagggug

SEQ ID NO: 4148900 - RNA, 83 nt, Human
cauccuugcuucuucuuguuccaugaaagacagaccugaagcuagauuucacaucaugggauggaagcugcuuauugaggaug

SEQ ID NO: 4148901 - RNA, 76 nt, Human
cauccuuguuugucauaacucugcugcaaguuauuuuggucucugugacuuguggcggcaccaugauuaggguuug

SEQ ID NO: 4148902 - RNA, 79 nt, Human
cauccuuuauuacucuauggcauacuugaaaauuucuuaauuuauugugguguccugucagcuagagugaaggaggaug

SEQ ID NO: 4148903 - RNA, 66 nt, Human
caucgagaagugacuuucuuauggccacacaacuugacgguggucagagcugcacauucuaugaug

SEQ ID NO: 4148904 - RNA, 65 nt, Human
caucggcagggauuuguuuaagacgagaaggcuguuggccuacgugcaaggucccugccccugug

SEQ ID NO: 4148905 - RNA, 99 nt, Human
caucgggagaagcugugugaaugcaggguaaguguuaacagaagugggacagaauuucugaagauucgccuuuguuuauccaguccccucugccugaug

SEQ ID NO: 4148906 - RNA, 62 nt, Human
caucuauauucuggaauguccauuuacuuuaauguaguguaguggaauuuagaguauaauug

SEQ ID NO: 4148907 - RNA, 130 nt, Human
caucuaugaaguacauugugaaaacuucauuauugaaccuuguuuuuugggagaaggaagcugagauucagagaaacugagguuuagagaaaccaagugauuugccccugaacuacauggcuauuaaaug

SEQ ID NO: 4148908 - RNA, 62 nt, Human
caucuauugagcuguuuuucugguaguaugcuaggcugcuaugcuaggaggauacugagaug

SEQ ID NO: 4148909 - RNA, 118 nt, Human
caucucaauagcuaccauuguuuccucugcccacuaggagcucauuguggauggaugggccuuccuccaggguccauaaugaacucugggcagguggagguaaaauaagcccuggaug

SEQ ID NO: 4148910 - RNA, 71 nt, Human
caucucacuuucaauugcaauauuccagcagcucaauggccacauagggcuucuggcuacuguaugagaug

SEQ ID NO: 4148911 - RNA, 58 nt, Human
caucucggcuaggcuauggugcccucuuguuugguuaaacacuagucuagaugggaug

SEQ ID NO: 4148912 - RNA, 83 nt, Human
caucucuagugcaugcugccaccugugguagucuguaguuacugucagucaccaccagguggcaguauuguugaauagaaaug

SEQ ID NO: 4148913 - RNA, 128 nt, Human
caucucuauaauaaaaaggaaaaagaggaauccccuuuguagguuucauaguuuauacugauauuucugaugucgucucagagaauuagucacaauuauaggaacucagaaggcauuccguggagaug

SEQ ID NO: 4148914 - RNA, 68 nt, Human
caucucugguucagucucuguggaaugauaccuggauauuaggaauugcaggaugauuggacacgaug

SEQ ID NO: 4148915 - RNA, 78 nt, Human
caucucugugcuuuuuauuauuuuugguaggcugugggaaacuguucuacaauaugaauaaugaagagcugugaaaug

SEQ ID NO: 4148916 - RNA, 55 nt, Human
caucucuguguccccacacccagccugacacauggagccugggauacaauagaug

SEQ ID NO: 4148917 - RNA, 92 nt, Human
caucucuuccccagcgcccaggggcagggcucucuggccuggcuugugcugguucccagagucccugcugucaggugcugggaguggaggug

SEQ ID NO: 4148918 - RNA, 86 nt, Human
caucugacauauugcuuauuucuucuuuuguuuguuuccucccacuagaauacaaggaccaugaggcagacccuuugugucauuug

SEQ ID NO: 4148919 - RNA, 58 nt, Human
caucugaugcuuugauuugguuucucuagaagcacauucugagacagggauucaggug

SEQ ID NO: 4148920 - RNA, 70 nt, Human
caucugcaagagccccauuuccauauaaggucagauucugagguacaggagguuggggcuacagcauaug

SEQ ID NO: 4148921 - RNA, 63 nt, Human
caucugcucuuucaggagccagaguucaaccucuaaagcucugagugauuaaggagcuucaug

SEQ ID NO: 4148922 - RNA, 55 nt, Human
caguuauuuugaggauuaaaugagauaucauuuauauuguccugaaguguaauug

SEQ ID NO: 4148923 - RNA, 66 nt, Human
caguucaaaguuaagcagcaguugcacaacuuccagcaacuuucucagccggcuacuaaugagcug

SEQ ID NO: 4148924 - RNA, 87 nt, Human
cagggacaggcuuuacuuucucucugaaugagaauguagccuugcugauauuacauugguuucagagaaaggaaagccggauauuug

SEQ ID NO: 4148925 - RNA, 55 nt, Human
cagggacauugguggccagguuguuguccacggaaccucucccuuugugucccug

SEQ ID NO: 4148926 - RNA, 97 nt, Human
cagggaccaauaauagaaucauuucuacucauccuuuggagaagagccauuucuccuuucugcaaacuaagagugggucuuuuguuuguuggccuug

SEQ ID NO: 4148927 - RNA, 99 nt, Human
cagggaccugagcuuggggcuggaugugagaugagugcugcguaucuuggauauaauccauaaccuggugucauuuuagccucaggcaagugcucccug

SEQ ID NO: 4148928 - RNA, 62 nt, Human
cagggagaggcugguggaguaagguccagcgguauucggggguccucugucaccucgcccug

SEQ ID NO: 4148929 - RNA, 60 nt, Human
cagggagcagugugcuaacuaugugacaugugacuuuagccugcagguacauugcuacug

SEQ ID NO: 4148930 - RNA, 55 nt, Human
cagggaggucugagugcggaaagccuggaccacaggaaugugccuagccucccug

SEQ ID NO: 4148931 - RNA, 59 nt, Human
cagggaguggggaauaguguggugucucuugaaugccgccugguuucuccgccccccug

SEQ ID NO: 4148932 - RNA, 62 nt, Human
cagggauggccuggcgggccacagugagccuucugcucaagagccacuagugucugucccug

SEQ ID NO: 4148933 - RNA, 55 nt, Human
cagggauugugcuugcaaucgcagagugguugcaaaugggcaaagcagaucccug

SEQ ID NO: 4148934 - RNA, 79 nt, Human
cagggcaagugcuucugaugguggaaugcuucagcccaggaggccaagcagaaccauucaggcacauuucuagucucug

SEQ ID NO: 4148935 - RNA, 76 nt, Human
cagggcaccgucucccucagagcuccagucccgagagcugacagcagccugggcucuaagggagcaccgucuccug

SEQ ID NO: 4148936 - RNA, 71 nt, Human
cagggcagagcugccucucacugggucugggucagccaagagccaccauuuguggaaugcacucugugcug

SEQ ID NO: 4148937 - RNA, 75 nt, Human
cagggcaggaauuugacauugcgaaagggaaaaauaaagaaaugagcuuugggcauguacaguuuuucuguccug

SEQ ID NO: 4148938 - RNA, 56 nt, Human
cagggccggugucccuccugcagaaagcucacccugucuccugggcccuggcccug

SEQ ID NO: 4148939 - RNA, 59 nt, Human
cagggccucuccuccaggaacugcgucugaacauaccagagccugcaguggagaccuug

SEQ ID NO: 4148940 - RNA, 97 nt, Human
cagggccuggugcucucugaagcaccuggacggugccuggggacuuacggagcccagggcuggaccagugcuugggaggccagagcaugggguccug

SEQ ID NO: 4148941 - RNA, 64 nt, Human
cagggcuccaugcagggacuccccgaccccagaagcugggaaggaaacaccucauggaguccug

SEQ ID NO: 4148942 - RNA, 61 nt, Human
cagggcucugaccagaaucuggacucugauuguggugcaauuuucugaaucuggugcccug

SEQ ID NO: 4148943 - RNA, 62 nt, Human
cagggcuggauuucauuucuagcuuaauuaaauccuagaagcacaccugaccucuagcuuug

SEQ ID NO: 4148944 - RNA, 55 nt, Human
cagggcuggcuguggcaaucucucaucuccagguuaccacuuguugccagcucug

SEQ ID NO: 4148945 - RNA, 63 nt, Human
cagggcuggcuuccaaguuguucugaaaaugguuuaagagagcagggaaaggagucagcugug

SEQ ID NO: 4148946 - RNA, 64 nt, Human
cagggcuuaaugucauauuaguuugugccuccaggaaggagguggaaagauggcugggacccug

SEQ ID NO: 4148947 - RNA, 74 nt, Human
cagggcuuaggaaagccuugcccgucacugggaccagcaacaccgcuuucccacucugcagggcuuuggcuuug

SEQ ID NO: 4148948 - RNA, 62 nt, Human
cagggcuugccuugccccggcgcucgucgcuucccugggcgccgggcgguuugcaagcccug

SEQ ID NO: 4148949 - RNA, 63 nt, Human
caggggaaugagugcccagaaagcccuggcugguccuggggcugagcugccacucaccuccug

SEQ ID NO: 4148950 - RNA, 62 nt, Human
caggggacauuaaagcuccauacccaauauucucugaguagggaaaguaguaauggccuuug

SEQ ID NO: 4148951 - RNA, 66 nt, Human
caggggaucugccugcuuucuuacauguuuguuucuauggacagauagaaaucagcauguccucug

SEQ ID NO: 4148952 - RNA, 61 nt, Human
cagggggcagggcugggccucggggucagccaacuggagucuggcuuggcgcugcccucug

SEQ ID NO: 4148953 - RNA, 76 nt, Human
cagggggcugaugcaguggcuucagugucagugacuaaccaguggcccuggagugacucguaaggcagguacccug

SEQ ID NO: 4148954 - RNA, 74 nt, Human
cagggguacugucaguaguuuuaagucuguuaaaugagauuucccagaacagauccuggcucccaguaccugug

SEQ ID NO: 4148955 - RNA, 59 nt, Human
caggggucuccauuccagcaggcacugaugaaaagccuccaggagugauaaggccacug

SEQ ID NO: 4148956 - RNA, 81 nt, Human
caggggugcagcaccacaccuggcuaauuuuuugcagagcugagguuucacuauguuggcuaggcuggucucgaacuccug

SEQ ID NO: 4148957 - RNA, 64 nt, Human
cagggguggcaggaccagggaaaagcaaagucguuucauccaaggagaccuugcagagccucug

SEQ ID NO: 4148958 - RNA, 55 nt, Human
cagggguguugggccagggccagggaaguccaucuggcagcacccacacccucug

SEQ ID NO: 4148959 - RNA, 58 nt, Human
caggguagacaguaggugucuguguccagggcucacccuauaccucugugaaccccug

SEQ ID NO: 4148960 - RNA, 57 nt, Human
cagggucaggcugcuagaagcugagcuuuugcagcuugguuuuuaguuucugaacug

SEQ ID NO: 4148961 - RNA, 62 nt, Human
cagggucugcuacacuuggcaaggguuaagauuagaauuagagucaggauuaguaaacucug

SEQ ID NO: 4148962 - RNA, 79 nt, Human
cagggucugcugguguaucuguaccacugcugggacuuugguaguucaguguugugcacauacaaaauguaugccucug

SEQ ID NO: 4148963 - RNA, 76 nt, Human
cagggucugguugagggcugggguggugacggcgugauugugccuggcuaccggguucucagccaggcagcaccug

SEQ ID NO: 4148964 - RNA, 73 nt, Human
cagggugcagcccagguggaguaaucuaugggaagcgugggugaggauucugccugggccucgcuuagcccug

SEQ ID NO: 4148965 - RNA, 55 nt, Human
caggguggcaggcaccauggccuauaccaggggcuacagcaugccugccacccug

SEQ ID NO: 4148966 - RNA, 57 nt, Human
caggguggccagguagauaauaguuccaucccuguuauugcuuucccugccuuccug

SEQ ID NO: 4148967 - RNA, 92 nt, Human
cagggugguagaauguaaagaauagagguuuuagaauuagauacauuuuagcuggaauccuacuucuaacacuugcuagguuugcuacccug

SEQ ID NO: 4148968 - RNA, 59 nt, Human
caggguggugguaguuguuuuaauaugugaaaauguagcuuuuaaacaucacuauuuug

SEQ ID NO: 4148969 - RNA, 78 nt, Human
cagggugguuccaccuggcgagggguaugccuccugacuguccaggacaaugccccuggccuggggaacauagcccug

SEQ ID NO: 4148970 - RNA, 75 nt, Human
caggguucugguccagaguccuugcuagagacuggucuucuauccuguuuccucauggcacugggcuggccccug

SEQ ID NO: 4148971 - RNA, 79 nt, Human
caggguugggauuggaacuggggcuuuugcacgugggaggcaugcccugucccccacccaugcccugucccccacccug

SEQ ID NO: 4148972 - RNA, 98 nt, Human
caggguuugcuugguaggcacuguguuuguaggaguacagucuuaacugcuguaacaaaggggcuccaaaguacagugacuuaccaagagagaaguug

SEQ ID NO: 4148973 - RNA, 85 nt, Human
cagguaaaauauuggguagguccuuuggaguucuagacucaguuugagauuacagaagauaugcucaacauccuccuuugaccug

SEQ ID NO: 4148974 - RNA, 87 nt, Human
cagguagaggcugggcugugacaacaaugucagaagcuaucuauugagggcuucuugugugucaggcucugagccaaacacugccug

SEQ ID NO: 4148975 - RNA, 67 nt, Human
cagguagggauaugauggugauccaauaucuauuggucuucuuguccauccauuuugucccuuccug

SEQ ID NO: 4148976 - RNA, 74 nt, Human
cagguaguagaugauagggccagaauuugaaauuuaaauuuauuucugauuuguaaugucauccuauacuucug

SEQ ID NO: 4148977 - RNA, 55 nt, Human
cagguaguguguagcacagcaguucucaucucagacugcccacuagaacuaccug

SEQ ID NO: 4148978 - RNA, 61 nt, Human
cagguauauuuugaucacccucuaugaguaagguuuuauaauggugaacaaaaugacucug

SEQ ID NO: 4148979 - RNA, 59 nt, Human
caggucagauuugacuuuaucaacuaggcacuggguuuuaugaagacaaauccgacuug

SEQ ID NO: 4148980 - RNA, 59 nt, Human
caggucauaacuaugcaugaacauuuuuuaucaggaauggccgauguguaugugauuug

SEQ ID NO: 4148981 - RNA, 56 nt, Human
cagguccaaauguugagacugaugucuuugucacaguugaagucuauuuggaccug

SEQ ID NO: 4148982 - RNA, 58 nt, Human
caggucccaguguuagggugacaacugcaaaaauuugguuaucauucucuugggccug

SEQ ID NO: 4148983 - RNA, 82 nt, Human
cagguccugugacucuccgcaccaugccgggugggggaaccacauguucccuggcucuggugaggagaaguuaggagacuug

SEQ ID NO: 4148984 - RNA, 105 nt, Human
caggucuaugguggcagggccagcuggcaggagagucagggcuuggcagcuucuucugcaagaugcaucugugcuuccugccacuaccaagccaccuggcuccug

SEQ ID NO: 4148985 - RNA, 57 nt, Human
caggucucccaagggccagggagcaggaaaaucucucagcugcuuuugggaggccug

SEQ ID NO: 4148986 - RNA, 123 nt, Human
caggucugcuauugaaaaccuuauuagagccaaucuuugggcucuugguugagagcuuguauuacccgggaacuagagacuuggcagggaugggacagggaaaaauucaaugccauagacuug

SEQ ID NO: 4148987 - RNA, 65 nt, Human
caggucugugugccauuuccaaccuucaaguugaugaggggagggaaacggucacacgcaaccug

SEQ ID NO: 4148988 - RNA, 120 nt, Human
caggucuuacccagucaggaggaaugagauaagggaucugccccuagaagcugucuggcugcuuuuugguagagcaggcaugcugcauugaggggcucucuuccucaucuggacuaccug

SEQ ID NO: 4148989 - RNA, 61 nt, Human
caggucuuauuuauuucuguauccccagcagaaggcccgggacacaguagaugagugacug

SEQ ID NO: 4148990 - RNA, 88 nt, Human
caggucuugagucuguaaggauguucagggccagaucccagaacagggaauucuccagguaaauggcauccugcccacucacugccug

SEQ ID NO: 4148991 - RNA, 69 nt, Human
caggucuugaguugccugucugcccauagaccucccuggcagccgcuagcaggcacucuagaggagcug

SEQ ID NO: 4148992 - RNA, 71 nt, Human
caggugaagugggacuggguugcaagaccuggugcggcuuuucuccacggugcagccugucccuucuccug

SEQ ID NO: 4148993 - RNA, 68 nt, Human
caggugaauuugugacuggccuuuugcuuucuugggaggagagacacaggcauuauaaauuucaccug

SEQ ID NO: 4148994 - RNA, 60 nt, Human
caggugagagcugugggacccugacacagcugucuagggaauugugguuuucuuagacug

SEQ ID NO: 4148995 - RNA, 82 nt, Human
caggugagggugugguacuuaccgcuauguuccuuccagaauuuaaguaggaaaaauugguaaagugcucuaacuucauuug

SEQ ID NO: 4148996 - RNA, 63 nt, Human
caggugcaagaaagguaauugcugguacaaaauaugccauuaccuguuuuacaugcacaacug

SEQ ID NO: 4148997 - RNA, 123 nt, Human
cauuuuuaucuuuguaacuuccucauacagcucacuuguuucaucuucucuuuucccauaguggagagaagcuaaacccugaagcuaagauuguucugugugcuugaagucaaagagagaaug

SEQ ID NO: 4148998 - RNA, 56 nt, Human
cauuuuucuccugacaucugggguugguuucauugaggauuuacaggggaaaagug

SEQ ID NO: 4148999 - RNA, 65 nt, Human
cauuuuugguugccacagcugggcagggguuguuccugguaucuagcagguggcggccagcgaug

SEQ ID NO: 4149000 - RNA, 77 nt, Human
caguuuaugaauagcauuaugaugcugcagaccuaccccgucuccauccacccugcauuauauuugcuguaaaacug

SEQ ID NO: 4149001 - RNA, 94 nt, Human
caguuucaauggcugcagagcauguccucaggacagugugugugcccccagcagcccugcuccucgggaggaccugcuuaagcagucauagcug

SEQ ID NO: 4149002 - RNA, 125 nt, Human
caguuuccuggccaagacauucugggaugucucuuauacccuucucugguugcagucuucauagggcaagauuguuuugggggaagugguucuguaaggaccuuccaggucuugcuaggaaauug

SEQ ID NO: 4149003 - RNA, 57 nt, Human
caguuugaugaugagauggggauuuaaccucugcuugccaucauuaucaguucacug

SEQ ID NO: 4149004 - RNA, 76 nt, Human
caguuuguaauuggaugauguagacaaaaauaugcuuuacccuagggguauauacauugucugcuucuacaaucug

SEQ ID NO: 4149005 - RNA, 56 nt, Human
caguuuuagggcaaugugaagagugcauuucucucucaccuguugcgaugaagcug

SEQ ID NO: 4149006 - RNA, 76 nt, Human
caguuuucauuacugcugugauuuucauaucagaucaugggggagggagguagagaucacaugcugauggaaaaug

SEQ ID NO: 4149007 - RNA, 75 nt, Human
caguuuucuugccauauuucagcccuuauuccuucugugaauaagcuuuugacuugguagggaagauaacuacug

SEQ ID NO: 4149008 - RNA, 80 nt, Human
caguuuugaaaguuauugaaccuuauuuagagucaggugguuuuuauuguaguauaugugguucaguaauuuggaaguug

SEQ ID NO: 4149009 - RNA, 77 nt, Human
caguuuugaauaggggaaaaguguugucucuagauaaauuagaauuuaaagcaugcugcuuuuccauuuuagaacug

SEQ ID NO: 4149010 - RNA, 97 nt, Human
cauaaaagcuaaugcauaaucgaggaauguaaaaaauucggcaucauagauuuaaaugauauuggauugagacauuuuagaaauguaagauuuuaug

SEQ ID NO: 4149011 - RNA, 71 nt, Human
cauaaagaggugcaguuugcuuguauuuugaacucucgugucuagugcagcaacaaacugcccuccuugug

SEQ ID NO: 4149012 - RNA, 85 nt, Human
cauaaagccaacagggcuggaggagauccagaggcuguggucucauagcuuccuaccacccuccccaagcuaguuggcucagaug

SEQ ID NO: 4149013 - RNA, 91 nt, Human
cauaaagcucuuccaaaugcaaguucauauuuuguucucacuucuugugugugagaacaaaauaugaacuuacauuuggaagagcuuuaug

SEQ ID NO: 4149014 - RNA, 57 nt, Human
cauaaagggacauuaugggacauaguaaaaucauaaugucacaaaagucccauuaug

SEQ ID NO: 4149015 - RNA, 102 nt, Human
cauaaauaaucaaggucugacuauuuuauuuucgguggcuguguuuguucuaaauuaagaaugccauugagauugaaguaagcaugcugacuguaauuuaug

SEQ ID NO: 4149016 - RNA, 83 nt, Human
cauaacagcuucuauugugaagggaaaaauagugcauucaaaauauaauggaauauacuccauucacgauaguaagaaaaaug

SEQ ID NO: 4149017 - RNA, 92 nt, Human
cauaacuugaaucacaguaacuucaugcauuucaaaugggauaaagucagccaagaaguguuuagguuugcagucgauugcucaagauuaug

SEQ ID NO: 4149018 - RNA, 56 nt, Human
cauaagaauauuuaguggcagcugcaggcugaugauuuuccacuagauagguugug

SEQ ID NO: 4149019 - RNA, 64 nt, Human
cauaaggagcacacaaucuagaacccucgcaugggugguucacaguaagguuugugcuucuaug

SEQ ID NO: 4149020 - RNA, 63 nt, Human
cauaaggugucucucugcuucuuggagcuggacgguuuccaagggcugagauacaucuagaug

SEQ ID NO: 4149021 - RNA, 58 nt, Human
cauaaguggagauuagaacuuggcuguuuggccccagggcuuuucucacuagacuaug

SEQ ID NO: 4149022 - RNA, 55 nt, Human
cauaauauacuacauugaugaauauuacaugauaugguggauguaauauauuaug

SEQ ID NO: 4149023 - RNA, 78 nt, Human
cauaauauauagacuugucuaccaugaauauuuaggaaccuagauacaugaaauggcagauaguguuauuucauuaug

SEQ ID NO: 4149024 - RNA, 107 nt, Human
cauaaucccaaggucuggcauacuguaguaaagcggaaagggugauagggaagaugucuugcuguacugacuugcuuagcugguacuagcuuaggcacugggauaug

SEQ ID NO: 4149025 - RNA, 64 nt, Human
cauaaucuguuguuaauauugacuugaagaaaaaucgaguuaauaggucuucaagagcauuaug

SEQ ID NO: 4149026 - RNA, 72 nt, Human
cauaauggggcauucuguggagcucagacaaugcauguccagagcucuguacacagaggguguccaauaaug

SEQ ID NO: 4149027 - RNA, 57 nt, Human
cauaauguuccagaaaaauccacuuuggcugccaaaguagcccuucuggaauuuaug

SEQ ID NO: 4149028 - RNA, 77 nt, Human
cauaauucuagggcugggcaaacaagacucuucuuguuucuucagggagacucucauugucaagcuugaaaauaaug

SEQ ID NO: 4149029 - RNA, 61 nt, Human
cauaauuucacugucguauggccgcugaguuaauguacuuacaaaugacagagaaagugug

SEQ ID NO: 4149030 - RNA, 66 nt, Human
cauacagucacugugguaccacugucgacauuacaguucaucccgguaucaaagugacuggauaug

SEQ ID NO: 4149031 - RNA, 71 nt, Human
cauacauuuugcauauuuaccauagcauaagagaaucuugaagaacaauuuuauagaugugcaauugugug

SEQ ID NO: 4149032 - RNA, 79 nt, Human
cauaccuaauaguuugaguguggaagaguagaacauaauguugacuagaaguucagcaacucaaaccuauuagcaguug

SEQ ID NO: 4149033 - RNA, 67 nt, Human
cauaccuggauaucauucauucuccucaaaagaaggagaauccacucaaaaugaacaucaggaugug

SEQ ID NO: 4149034 - RNA, 55 nt, Human
cauacgccauaggcuccucacuucaacagugaagaaggugauuucuaugguuaug

SEQ ID NO: 4149035 - RNA, 58 nt, Human
cauacucucuuaggugggacucgccuccugggcaguuuuccaugacucagagagaaug

SEQ ID NO: 4149036 - RNA, 100 nt, Human
cauacugauucuaucucuaugaaaucuagaguaggcagaacagaucuguggugauugaaaucagaucagugcuugccucuggaggagauugacaagaaug

SEQ ID NO: 4149037 - RNA, 64 nt, Human
cauacugugaagcuuacuauuucauuaucucuuccuucgcuagaauguaagcuuugcaagugug

SEQ ID NO: 4149038 - RNA, 92 nt, Human
cauacuuaucacuaacacccuaauaaucacagacuagugcacagaucaagauguuaacaguuaauuguuguuggguguugggaauaugugug

SEQ ID NO: 4149039 - RNA, 70 nt, Human
cauacuucuaagcucaaauugguauauuuuuaacaugguauauggaugagauaaugagccauggaagaug

SEQ ID NO: 4149040 - RNA, 120 nt, Human
cauagaaaauuucagcguauaaaauaaaauuaauaauaguagaugcuuauaaagagcauauuguguuccagguaguaugcacuauagguauuaacuaauuaauagccugaaaagucuaug

SEQ ID NO: 4149041 - RNA, 56 nt, Human
cauagacauugauagguuauauuuguuuuauaacaauuguguaccuaauguuugug

SEQ ID NO: 4149042 - RNA, 60 nt, Human
cauagagcugguuuacucaggaauuuggguuuccuuucaacucuucguccagcucuugug

SEQ ID NO: 4149043 - RNA, 80 nt, Human
cauagcacaggagauucagagggcugggaugacuucugagcugcucucuauacccaaggcccuuucaauuucuagcugug

SEQ ID NO: 4149044 - RNA, 65 nt, Human
cauagcagcauggagaaaccguucagauacuaaguaauugaguguguguuucuucuuggugcaug

SEQ ID NO: 4149045 - RNA, 64 nt, Human
cauagcauuuaauguauugucaaugacuaauuucauggucuaauggcagaguugaguaguuaug

SEQ ID NO: 4149046 - RNA, 79 nt, Human
cauagcucagauguucuguugggagaaugguucucucaugucuuguugagcaugaggcucuccaagcagaugaguagug

SEQ ID NO: 4149047 - RNA, 74 nt, Human
cauagcuuccaccgccccauccuucuucuaaaucuuuaauuuugcaaagccauagggaguggugguagccugug

SEQ ID NO: 4149048 - RNA, 61 nt, Human
cauaggauguugccucuaauugcugugcauuaauuauuagcaucugggcaucaauuuugug

SEQ ID NO: 4149049 - RNA, 86 nt, Human
cauaguacagcaaaaugggauaauagaaguagaaugcaacuuauagauauucuccuuguguuauuuuauauguguguauauauaug

SEQ ID NO: 4149050 - RNA, 87 nt, Human
cauagugccuguuuuauuucuggcauuguugcacguacuuguauugcucuuuuaauugucauaacaaccuguaggacagguacuaug

SEQ ID NO: 4149051 - RNA, 63 nt, Human
cauaguguccugcuaaugggugaaauaaauuuuauuuaggguuuuauuuauauaggacacaug

SEQ ID NO: 4149052 - RNA, 91 nt, Human
cauauacucauaucacauuggaccuuccugacaauccuaugagcuaagcacauuaguugcagcuagaagauucacugugcugugguauaug

SEQ ID NO: 4149053 - RNA, 57 nt, Human
cauauacugaggagacuuuauauguagccaugcauguuuaaagaucuucuguaugug

SEQ ID NO: 4149054 - RNA, 68 nt, Human
cauauagucacacacauaaucuaagauuauaugccaaauauauuauggggugugugugugagugugug

SEQ ID NO: 4149055 - RNA, 72 nt, Human
cauauauaugccauuuaaaaaugaccaaaugacgugcuaaccaugguugucuuugggugguagaauuauaug

SEQ ID NO: 4149056 - RNA, 117 nt, Human
cauggggaaacugaggcugagagcagugcugcagucacacggcuaucucagagcagaugcagaggugggcccagugggcuccagugccgcucacuccuucagucugagggcuucaug

SEQ ID NO: 4149057 - RNA, 57 nt, Human
cauggggaugaggcugagacuucuuccaaggagcaaucagcuugcuucauuauuaug

SEQ ID NO: 4149058 - RNA, 67 nt, Human
caugggguaccuugguaugcuugguagagcuaugacagguucugcugaagccagggagcaagccaug

SEQ ID NO: 4149059 - RNA, 96 nt, Human
caugguaugugaaaugacucugcucaguucaaggaagguggaaucugagcugauuuucucauuuucugaacugaaaaagucaggcacaguaaccug

SEQ ID NO: 4149060 - RNA, 71 nt, Human
caugguauuagguugcuagagcugccauagcaaaguaccacagacuuggugguuuaagcaauaguaucuug

SEQ ID NO: 4149061 - RNA, 84 nt, Human
caugguauuaugaugaggauuaaauggcaugaaacauguaaagugcuugccacagugccuuuuagugcucaauaaagugaggug

SEQ ID NO: 4149062 - RNA, 60 nt, Human
cauggugguacacgccuguagucccagcuacucaggaggcugaggcaggaguaccacuug

SEQ ID NO: 4149063 - RNA, 61 nt, Human
caugguguauguaaagucugagggccauuuagauauaugccacaggcuucuauacacaaug

SEQ ID NO: 4149064 - RNA, 100 nt, Human
caugguucuaaugaggguauucuuuauugucauuugaaguaaaaaugcauuuuucaugaggcuguauuaauuugaccauaaauaucuucuuauuuccaug

SEQ ID NO: 4149065 - RNA, 59 nt, Human
caugguuuggaguuaguuccauguucuggguucaaauucuagcuaacucacuaacuaug

SEQ ID NO: 4149066 - RNA, 59 nt, Human
cauguaacuccuuaaagcagcuggaaaaagacaggucuguuagguugcuuuaagacaug

SEQ ID NO: 4149067 - RNA, 71 nt, Human
cauguaggcauucuccuguauaugugcauacacacacuccuaaguuguguaaauguguaccugccugcuug

SEQ ID NO: 4149068 - RNA, 67 nt, Human
cauguaguuggguagcuuguaguaaaaugcucuauaaugcauuuguuuauaaguuccccagucacug

SEQ ID NO: 4149069 - RNA, 83 nt, Human
cauguauauuaggaaaggaagaugaggugcugcuuaguguaccuugugacuaaguauaucucuucuccuaauucuaacacaug

SEQ ID NO: 4149070 - RNA, 63 nt, Human
cauguaucuguuuaucuugucaucuggcuucccucagcacagugcaugaugggcagaagagug

SEQ ID NO: 4149071 - RNA, 60 nt, Human
caugucaaagcagacugagagcgguaccaauuaugagaccccagcugauuuuuugacgug

SEQ ID NO: 4149072 - RNA, 59 nt, Human
caugucagcaaagcaucacuccaaucugaacuuucugauuuccagcuuugccuggcaug

SEQ ID NO: 4149073 - RNA, 129 nt, Human
caugucccuuuagaggcauuaaugugacaagcauauugcauuuagagugaaacauuaugcaucaacuaaaacacugguacaugaccaagcauguuaaauguauguucauauuuuuguuacaaaggagug

SEQ ID NO: 4149074 - RNA, 77 nt, Human
cauugcccaguguguggccuguggaaguuacucauuaaauacuggguaccuaacuuaccuagguccacaugguaaug

SEQ ID NO: 4149075 - RNA, 58 nt, Human
cauugccuccuccuguuagaauuugcagcagaauccuguggccugggaggaggaaaug

SEQ ID NO: 4149076 - RNA, 79 nt, Human
cauugcuggguguggugguuuuucucauuucuguauaaauuuucaauuugaaaacagaguggagccaaacuuugcaaug

SEQ ID NO: 4149077 - RNA, 81 nt, Human
cauugcuguuccauguguguacagugccuugcucuccacuuuuaccugcaagcaucuccucaucauuugggucucaguuug

SEQ ID NO: 4149078 - RNA, 63 nt, Human
cauugcuuccucacagcuuccuauguacaaauacugggcauuugggagucuggaugaaagaug

SEQ ID NO: 4149079 - RNA, 76 nt, Human
cauugcuuuuaauauaaaugcuuuauaguguauuaugcaagugaaauaugagaaagacuuuagguuagaggcauug

SEQ ID NO: 4149080 - RNA, 130 nt, Human
cauuggaaucaccaggagagcuuguaaaaauguagacugcugggcugcacccccagaguuucugauucaguaggucugggguggggccugagaacuugcauuucuaacaaguucccaggugaggcugaug

SEQ ID NO: 4149081 - RNA, 98 nt, Human
cauuggaguuacauaguccuagugaagaggaaguggggcacaugcaagauguaaugugcugcuuugccucaucuuuauuucuauuuuaagcuucaaug

SEQ ID NO: 4149082 - RNA, 62 nt, Human
cauuggaucuagccaggaaaaccugaggccuggcucugccucuuccuggcucuaggaccuug

SEQ ID NO: 4149083 - RNA, 87 nt, Human
cauuggcccucuaagcccuugcuagagaauauuuguuaagacauuuuguagucuaauacucauuucuguaacucggcuucgggaaug

SEQ ID NO: 4149084 - RNA, 96 nt, Human
cauuggguaggaguaaguguauguagccuauacuagugggaacaacuaccccaccaacacuguucugggcaaaugucacuuucuuuuuuccccuug

SEQ ID NO: 4149085 - RNA, 58 nt, Human
cauugucuacuguggaggcaaauccuuugauugauaggucaaugcucuauagucagug

SEQ ID NO: 4149086 - RNA, 78 nt, Human
cauugucuguuuuguguuuuuggaaguauuugagagugguauuuuugcaaguauugugggaaagcagaaaggagaaug

SEQ ID NO: 4149087 - RNA, 84 nt, Human
cauugucuuugccaaauguuuuuauucuacaacaguugaucacauauguuauacuuuuaaugggaacaggcaagucagauaaug

SEQ ID NO: 4149088 - RNA, 128 nt, Human
cauuguggcccucucuuaaaaucauugacugccgagaucugggcccaggcggcucucggacugaaccggucugugcuaggcagccuggcccacucggccuucaaaacacaagggaugggagacauaug

SEQ ID NO: 4149089 - RNA, 57 nt, Human
cauuguggccuauuugacuuugguuuccuaauacugagcaaaguaccuggcacagug

SEQ ID NO: 4149090 - RNA, 56 nt, Human
cauugugggccugucguggguggggccagcagcacaugcaugccgggcugacagag

SEQ ID NO: 4149091 - RNA, 97 nt, Human
cauuguguauguuuauguauuuguguguagguguguaugugugugugugauacauacauacaucaaguaucacaagacauugaccuuauauauuaug

SEQ ID NO: 4149092 - RNA, 66 nt, Human
cauuguuaccaucuuuuaccuacaccauugaguaaggugggauagguuuaaguugguggcauaaug

SEQ ID NO: 4149093 - RNA, 73 nt, Human
cauuguucuaccuggaauagagucucuccaguccucugcuugacuggauuuaggaugcucaggcugaagaaug

SEQ ID NO: 4149094 - RNA, 56 nt, Human
cauuuaauaagcuuuauggacucaggauauaaaaucagaguaaagcuuauuacaug

SEQ ID NO: 4149095 - RNA, 57 nt, Human
cauuuaccagcugugcacugauaaugauuuacuuuguaggcaguacaguuguaaaug

SEQ ID NO: 4149096 - RNA, 81 nt, Human
cauuuacugcaaaggaagagccaagcagucaucaauagugcagcuguggauaacuauuggcuuuaagcuuugcuuuaaaug

SEQ ID NO: 4149097 - RNA, 86 nt, Human
cauuuagggcccugcuuuauggauagccuuuccccacacugugggaagguaggcaggggagcugucuggguugagggcccugguug

SEQ ID NO: 4149098 - RNA, 69 nt, Human
cauuuagguagacuuuaucccuggcuuucucugaagagcuucacuaaaugauaaauugucucuuaagug

SEQ ID NO: 4149099 - RNA, 120 nt, Human
cauuuauaccuaguaaaauuccucuucuugcuuuugcuauugaaacuuguaauggcaaauugaagcuacuuuaaaacuauggcagaagucaagaugaguuuuuacuccacaugguaaaug

SEQ ID NO: 4149100 - RNA, 83 nt, Human
cauuuaugacuugagccuggguucauuuaugaauuuagucuggauuaacuucuuugguguuacccagcucauuccuuuaagug

SEQ ID NO: 4149101 - RNA, 67 nt, Human
cauuuaugagucuuacugcagugaagcuuccuguguauggaaguguaaauucacagacuucaaagug

SEQ ID NO: 4149102 - RNA, 87 nt, Human
cauuucaauguauaacaggaaguauucaaacagauuucaccuaaacuggagaacuguuguuaauguaacugcuguuauaucaaaaug

SEQ ID NO: 4149103 - RNA, 99 nt, Human
cauuucacuuuaguuaauuucuguaaauucaacuauguauagucuucuuuacgaaaaggagagaacauacuugagaaauauaauuuaagagugcaagug

SEQ ID NO: 4149104 - RNA, 80 nt, Human
cauuucagauuucuuuucaagagggugcuucuaaaguaacuauugcgcaaaaguccucugaaaaaauaggucaagaagug

SEQ ID NO: 4149105 - RNA, 74 nt, Human
cauuucaucucauuuggaaauuacucauuguccugauguuuuuuaggcuagagaauuuuaaguagaguaaaaug

SEQ ID NO: 4149106 - RNA, 71 nt, Human
cauuucauguaaucauuuagguggcuaaucucauccaaauaauuuauggccucuuggugcuugaugaaaug

SEQ ID NO: 4149107 - RNA, 62 nt, Human
cauuuccacuucugaaaacuggaauaauagcaccugcuucacacaguuuuuaggaagaaaug

SEQ ID NO: 4149108 - RNA, 86 nt, Human
cauuuccaugaggagcuccuugaaaugagcaugagacccuuaaagagcaugcuaaagacacaauaaguagcuucuaaaugguuuug

SEQ ID NO: 4149109 - RNA, 69 nt, Human
cauuucccacuggguucuguuuggccacugccuggcuucgcagcugugcugauugcucaguagggaaug

SEQ ID NO: 4149110 - RNA, 67 nt, Human
cauuucccccagcccacaagcauauuaaaaugacuguuuuuaagcuuuuacggguugaggugauuug

SEQ ID NO: 4149111 - RNA, 78 nt, Human
cauuucccuaauaauuggcaauguugagcauauuuucauguucuuauuggccaauuguauaacuucuuuggagaaaug

SEQ ID NO: 4149112 - RNA, 121 nt, Human
cauuuccuguuacuuggugguagccugcuacaggcuucaguuucucuugagagcgggagcugugucuuguuucuccuggugccugauauauaguagguauuccauaaauaaguugugaaug

SEQ ID NO: 4149113 - RNA, 62 nt, Human
cauuucuacagcuucuucagaagaaugcuaacaacaacuucuuagggaggucucuggaaaug

SEQ ID NO: 4149114 - RNA, 117 nt, Human
cauuucuauuuuaugugccaaaguuacuacgaaugugagcaauacuacugaucucgguuuuauuuuaaagugauuaguauuugcagauuugugucaauuuacauauuuauggggaug

SEQ ID NO: 4149115 - RNA, 66 nt, Human
cauuucugcugauuucagguuuucuuucaguggugaaugacaaagacaugcaauuagcaaggaaug

SEQ ID NO: 4149116 - RNA, 84 nt, Human
cauuucuucccugcuggaagccuuucuaacuccuauuagcucacuggaugcugcuuucaaaggcuuucuagaugggguggaaug

SEQ ID NO: 4149117 - RNA, 67 nt, Human
cauuugaacauuccugaaugaagcaugggcauucuuugcaaaauacuuaagggaauguuuuccagug

SEQ ID NO: 4149118 - RNA, 79 nt, Human
cccagcuggccagagacagagacaggaguuggccggggcugccuggcuucaaaaccuaucuuugaucaucugugcuggg

SEQ ID NO: 4149119 - RNA, 55 nt, Human
cccagcuguugucucucacauauuaauuaggggugacaggaacaacagcccaggg

SEQ ID NO: 4149120 - RNA, 67 nt, Human
cccagcuuagcucucccuccccagauuccuguguggcauggacugagggauagaggugcuuccuggg

SEQ ID NO: 4149121 - RNA, 56 nt, Human
cccagcuucuggcguggagccugaccauagugagcucuuuaucagccgaggcaggg

SEQ ID NO: 4149122 - RNA, 59 nt, Human
cccaggaacagcacagaacagcagggccuggccucugggucuucuguguccuuuguggg

SEQ ID NO: 4149123 - RNA, 65 nt, Human
cccaggaagaggggucagguguuggggccucacacugcccccuucuggaucucccucauccuggg

SEQ ID NO: 4149124 - RNA, 60 nt, Human
cccaggaagagugaguggcauuugaaauccauaucgucuugcuagucugcuguccuaggg

SEQ ID NO: 4149125 - RNA, 78 nt, Human
cccaggaagucugguggccuggggauuuggugggucugcuccuuagcaguggccuggggcucuguguguguaucuggg

SEQ ID NO: 4149126 - RNA, 56 nt, Human
cccaggagaccugugaaaggaccguuuacuccuuucuugaaacagcaucuuuuggg

SEQ ID NO: 4149127 - RNA, 60 nt, Human
cccaggagagggaaccaaauguccauguccugacagcacagccaguucaccucuccuugg

SEQ ID NO: 4149128 - RNA, 56 nt, Human
cccaggagcaggcccaaggacacaugggcccuaugagcugaggaaccugcccuggg

SEQ ID NO: 4149129 - RNA, 58 nt, Human
cccaggagccaucugucuuggcaugccccagacagugccacagauggaggaaucuggg

SEQ ID NO: 4149130 - RNA, 56 nt, Human
cccaggagcugagcagggagccucagaggaggcugcugcaagagccagcucuuggg

SEQ ID NO: 4149131 - RNA, 56 nt, Human
cccaggaggcggagguuguggugagccgagauugcaccacugcacuccagccuggg

SEQ ID NO: 4149132 - RNA, 56 nt, Human
cccaggagguggagcuugcagugaaccgagaucgcgccacugcacuccagccuggg

SEQ ID NO: 4149133 - RNA, 59 nt, Human
cccaggauguguacaaguagcuccaugauuacaguggggccacagugggaaauccuggg

SEQ ID NO: 4149134 - RNA, 55 nt, Human
cccaggcaggagugcaguggcaugaucucgggucacugcaagcuccgccucuggg

SEQ ID NO: 4149135 - RNA, 56 nt, Human
cccaggcaggccuacacaaugggagcugcucccugcagcccccgggccggccuggg

SEQ ID NO: 4149136 - RNA, 56 nt, Human
cccaggcagucuggcucuaaagccuauucccuuuccacuaagccaggcugccucgg

SEQ ID NO: 4149137 - RNA, 57 nt, Human
cccaggcagugugugcaugcgugcaugugugcgugugcguguguguguguguugggg

SEQ ID NO: 4149138 - RNA, 97 nt, Human
cccaggccucuggcucuggggugugauuuggcuagagauggauccaggacucuuuccccuuuaggucccugcccaaagcccuuggggcagagguggg

SEQ ID NO: 4149139 - RNA, 57 nt, Human
cccaggccuggccaggggaugccugcaaccaugcggauaccccacaccagggcuggg

SEQ ID NO: 4149140 - RNA, 67 nt, Human
cccaggccuggcugcagcucgccuuucacacccagauguaggagcgggcgcgggagcccugccuggg

SEQ ID NO: 4149141 - RNA, 57 nt, Human
cccaggcuagaaaggccaacaacccauguauguggucuggggucuaguuggccuggg

SEQ ID NO: 4149142 - RNA, 56 nt, Human
cccaggcuggagugcaaugacgccaucguggcucacugcaagcuccaccucccggg

SEQ ID NO: 4149143 - RNA, 85 nt, Human
cccaggcugggauggagccacugucugcacccgaggaggccuccagagcaggaggcgggagcagcagcucugagcccggcuuggg

SEQ ID NO: 4149144 - RNA, 55 nt, Human
cccaggcuuuuaaguuagacagacuuggguugcagucuugcuuguaggaccuggg

SEQ ID NO: 4149145 - RNA, 66 nt, Human
cccagggaaugacucuggccuuuuuccugggccccauuggccugggaccagcagagcagcccuggg

SEQ ID NO: 4149146 - RNA, 108 nt, Human
cccagggacacucuguuaaggcuguaagcaaugagauaaucaugggagcagugaagcuuuuaugucacuuauuucaugugccagcgugugguguaguaaacccauggg

SEQ ID NO: 4149147 - RNA, 65 nt, Human
cccagggauuauaaaggugaaaauaugcacaaacuuugccaauaucauguuuguagucucaaggg

SEQ ID NO: 4149148 - RNA, 63 nt, Human
cccagggcccaggacagcaucagggaccaccacucggguaaccccugggacuugggcucuggg

SEQ ID NO: 4149149 - RNA, 73 nt, Human
cccagggcuggacuagaagcagggcucaugaaaagcgcauggccucugaggcucugcuucuguggcucuuggg

SEQ ID NO: 4149150 - RNA, 79 nt, Human
cccucccuucucaagcaggccugccuggucaucugugaaccauuucauggcuggcacuggccuggguuccaggggaggg

SEQ ID NO: 4149151 - RNA, 130 nt, Human
cccuccucacugguagggcccgcacaaaguccacagggcugaggcuggcuucuugaacugagcucuuugugaggagccuuccuuucuggggcucugcugccaucuaguggaagacaugcacaagguuggg

SEQ ID NO: 4149152 - RNA, 67 nt, Human
cccucggcacaucuuaauuguuacugcuccuaauuggcccggcacugucgauuaugaugagucaggg

SEQ ID NO: 4149153 - RNA, 69 nt, Human
cccucgggaaguuuguuuggacugggaugacugaacuaggucuuuuuucugaguccuaaacccccaggg

SEQ ID NO: 4149154 - RNA, 69 nt, Human
cccucuaaagcagaauuucccacacugggacugggaggccucagggaugguggaggaauuucaagaggg

SEQ ID NO: 4149155 - RNA, 71 nt, Human
cccucuagggaggcaggacugagggaggcugggcgccccgucccuccugcacuugcuuuccuucaguaggg

SEQ ID NO: 4149156 - RNA, 83 nt, Human
cccucucaagaggcuaauauggcacaugaacacagacauuuccucugguguguauguggaccaugugaagaugagggagaggg

SEQ ID NO: 4149157 - RNA, 65 nt, Human
cccucugacugggccaguucugggcuuugcaaagauggccuggaccuggucaggcggacgcaggg

SEQ ID NO: 4149158 - RNA, 57 nt, Human
cccucugagacagguagcucacccccgaccuugugggcagcaccagcucucagaggg

SEQ ID NO: 4149159 - RNA, 73 nt, Human
cccucugauucuaucuuuccuguggccuuacaucuguggcuugucugcccacacagggggaugaguuauuggg

SEQ ID NO: 4149160 - RNA, 70 nt, Human
cccucuguccccaccaacauaugccugacucccugagcaggcccuuagccuuggugggauuucagcaggg

SEQ ID NO: 4149161 - RNA, 121 nt, Human
cccucuucucccuagugacacacauggucacaucagagugguggccugguguuccagcuguguacacaccaagcugugcuacucauccccugauggacugaguuauuuguauuagagaggg

SEQ ID NO: 4149162 - RNA, 64 nt, Human
cccucuuugacaccauuccucauuguccuaggcacaggcaacugaggucuccagugcagaaggg

SEQ ID NO: 4149163 - RNA, 75 nt, Human
cccucuuugccugucugcagggcugucauugugugauucauaacucaauauuaaccacagaugagggaggagugg

SEQ ID NO: 4149164 - RNA, 77 nt, Human
cccugaaccuuguuccugcccuccucccaccccuguccuccuggaggaaggcugcuucaggagcugcaggcucaggg

SEQ ID NO: 4149165 - RNA, 86 nt, Human
cccugaagacagacacccagccugcuguccccggcacacugcacagugccuggcacauagugggcaugcaggacuguauuuguggg

SEQ ID NO: 4149166 - RNA, 114 nt, Human
cccugaagcugggauuuagguaaggggaggaccuuuccaaggcuuguuuacagcucagauuugcagaggaccagguauuugggaacuccucuucugaagaaccagauugcaggg

SEQ ID NO: 4149167 - RNA, 93 nt, Human
cccugacaggccuaauugcugcucauuccucaugcugccccucacgccgcugguuagggagccagggaugcagcacagugaaggaaguuuggg

SEQ ID NO: 4149168 - RNA, 94 nt, Human
cccugaccggcuagagagccugcuaccucauuccagaguuaucacugccacaccucggggucggggguggaggcucgauagggcugguuagagg

SEQ ID NO: 4149169 - RNA, 104 nt, Human
cccugaccuucucccuggugccccuuuagccccugcagagacuucugccuuucccuaggauacaugguugcuggggguggcagagcuagaaccagggugguggg

SEQ ID NO: 4149170 - RNA, 57 nt, Human
cccugacuuaguugcaaauggaaaccgggcauuguuuccaggaguggcugggcaggg

SEQ ID NO: 4149171 - RNA, 71 nt, Human
cccugagaaagaggaggagacggggcggggcccaggacgggauccuugcccgcugccucugaguuuguggg

SEQ ID NO: 4149172 - RNA, 81 nt, Human
cccugagaggccagcuccagcccaucugcucgugugcagcacauacagcguauagacugggcucagaagagcagucuaggg

SEQ ID NO: 4149173 - RNA, 69 nt, Human
cccugagcagcagggagacuggugcagccccaagcagcugcccggcugagcucaccugcuuguucuugg

SEQ ID NO: 4149174 - RNA, 90 nt, Human
cccugaggagcuucucagaauuguguccacugggcugacugagcaggugcccagguucccagguugcacaauucuaaggucacucagagg

SEQ ID NO: 4149175 - RNA, 61 nt, Human
cccugaggcccuccuggggucugugccgcaccaauuauacacagacugggcugccuuaggg

SEQ ID NO: 4149176 - RNA, 58 nt, Human
cccugaggcuggagugcaguggugcgauuucagcucacugcaaccuccgccuccuggg

SEQ ID NO: 4149177 - RNA, 100 nt, Human
cccugaguugcaaugacaggcccugggaaggggaagagaauuccucugugggaacucucugucuucuagggauaaaccgagucugcugcuggacacaggg

SEQ ID NO: 4149178 - RNA, 56 nt, Human
cccugaucgagguuggcaaagguggcccugagcugcagucagcaccauggacaggg

SEQ ID NO: 4149179 - RNA, 60 nt, Human
cccugaugacaccauauuagccuagagacugccuuucucuggucuucuauugcaugaggg

SEQ ID NO: 4149180 - RNA, 78 nt, Human
cccugcaaucuaagccugcuuggcuucugaagagguaaucacaaugcccacuagaaucaagcaguagagcagacuggg

SEQ ID NO: 4149181 - RNA, 57 nt, Human
cccugcagcauucucuaacugggacuucagaaacccauuaggaaaaggagugcaggg

SEQ ID NO: 4149182 - RNA, 117 nt, Human
cccugcagugucuucacaucaguguucaggcaggcagagggcaaaugcaggacagcaaagcugcauuucagaagguucgucugcugccuccaguggacagaaagcacaugagcaggg

SEQ ID NO: 4149183 - RNA, 62 nt, Human
cccugcagugugaccucaccuaaaaguccagccggggauggagagggugcagcugacagagg

SEQ ID NO: 4149184 - RNA, 66 nt, Human
cccugccccuucgggcagccuccucuuguauguaugguccuggaaggaaggccuggaguggcaggg

SEQ ID NO: 4149185 - RNA, 73 nt, Human
cccugcccugccacccuggcggcagccugcuccccuggggggccucucugggcugccgaggcugugggcaggg

SEQ ID NO: 4149186 - RNA, 56 nt, Human
cccugcccuuccuccucucacugggcauccacagguucaggagaaagggaccaggg

SEQ ID NO: 4149187 - RNA, 58 nt, Human
cccugccucccugaaggcacagcuuuuccuaacccugagccgccaggaaggccauggg

SEQ ID NO: 4149188 - RNA, 93 nt, Human
cccugcucccaagugacuuugucuucagauaggcauucuuccuggacuucccuauacaggaagaugagagacagaauaaauggugguucaggg

SEQ ID NO: 4149189 - RNA, 83 nt, Human
cccugcucccuagguggccccaggccucugccagcccuguggggcucauguggcaggguuggccaccuuaccaugagaugggg

SEQ ID NO: 4149190 - RNA, 60 nt, Human
cccugcucuuagugccugugugaaugagugaaauugaugcugguguuuuugggaccaggg

SEQ ID NO: 4149191 - RNA, 82 nt, Human
cccugcugccaaggaaguuuuaggagaggaauccagucuuaucagguuccuagcuuaaaacauuuugauaaucccagcaugg

SEQ ID NO: 4149192 - RNA, 56 nt, Human
cccugcugccccgggaggcccauggaaguggccaggcuggguccccagcugcaggg

SEQ ID NO: 4149193 - RNA, 97 nt, Human
cccugcuggcagcugggggcgcagcagcccagggcucucagaguggccuuccaacacucggggcucagaagcugcuccgcggagccugccagcaggg

SEQ ID NO: 4149194 - RNA, 67 nt, Human
cccugcuuuauauuacauaguguuugagauaaacauugugaauccauucuaugugaaauguccgggg

SEQ ID NO: 4149195 - RNA, 56 nt, Human
cccuggacaggaggccguuuccagcuucccuggagcauggcaguccguguucaggg

SEQ ID NO: 4149196 - RNA, 130 nt, Human
cccuggagauuucagagauaaacccgaccuggaucugcauuuacauugcuuguaauugucaaauggaagacagcugcaaacaguuaagaugcaggcgugggaaacaaauauugggaguagaaaggaaggg

SEQ ID NO: 4149197 - RNA, 72 nt, Human
cccuggaggucgggcccuuuucagucacauuuaccaucuccuaaauucacugccuggccuggccucacuggg

SEQ ID NO: 4149198 - RNA, 78 nt, Human
cccuggauccuucugaagaaauucuacuaagcugugcuggauggcagcuggcugaaucuucugcaauacacuucaggg

SEQ ID NO: 4149199 - RNA, 60 nt, Human
cccuggcauaaaacuucuccagagauaaaauagcuuucugacaggaggguuguggcaggg

SEQ ID NO: 4149200 - RNA, 96 nt, Human
cccuggccaaguucugcagccucucggggccugguccugugucugugaggcaggacacacccagcucacgggggugcugugggugugggggcgggg

SEQ ID NO: 4149201 - RNA, 61 nt, Human
cccuggcccagcccuaccuacgugcucugauccugggagcccacagcugagcuggccaggg

SEQ ID NO: 4149202 - RNA, 58 nt, Human
cccuggccugaggcucggcaugggucagcuguggccguggagccucuuggccguaggg

SEQ ID NO: 4149203 - RNA, 78 nt, Human
cccuggccugggcggcugccuccacgaugccacugcucaucgaggggcagcgagugcggcugccacaguccgccgggg

SEQ ID NO: 4149204 - RNA, 68 nt, Human
ccacucuggacuaacagcagccucaggguguuaaagcucacucugaggcugcuguaagucuagagugg

SEQ ID NO: 4149205 - RNA, 94 nt, Human
ccacucuucaaaaguagagucuauuuuucuuaaauguggguuggccugugacuugcuuuggccaagagaaugugagagaaaugauauugggugg

SEQ ID NO: 4149206 - RNA, 99 nt, Human
ccacugaggucauggacgcacacugagcugcucuaaucucgccuuuuaggcucaucuacagggccagcuagagcccucgccgccaugucaucuccuugg

SEQ ID NO: 4149207 - RNA, 64 nt, Human
ccacugauccagagccaaccaaggcaccucaggaaauggaaggccacauugccucuggauuugg

SEQ ID NO: 4149208 - RNA, 58 nt, Human
ccacugauucugccaggucucugcaauugcacugcauggaacugggacuggucagagg

SEQ ID NO: 4149209 - RNA, 129 nt, Human
ccacugcaggugaaauggacaccuggcucucccugguguccccuccaggagcugucacugggcaguccgccuuccaggaugggacauaguggagcaggcacggggggccaugucagccugucagucggg

SEQ ID NO: 4149210 - RNA, 63 nt, Human
ccacugcuuuuuucccccgagccuguaagggcauguccccagcagccagggagagaaccaggg

SEQ ID NO: 4149211 - RNA, 130 nt, Human
ccacuggccaggcacuggggauaggcagggguggugugagaaguaggggcucaggugcuucuuagggacacaucagccucagcuuugggccaccuuccugagacuggcugccugguuuuggggcaagugg

SEQ ID NO: 4149212 - RNA, 57 nt, Human
ccacugggggcugcucccagguguggguagauggugccuggggaauggccccagugg

SEQ ID NO: 4149213 - RNA, 55 nt, Human
ccacugguuuuauuguagcuuaaaauugagcucuccacacauaggacuagcuugg

SEQ ID NO: 4149214 - RNA, 68 nt, Human
ccacugugcuuguguucauuguuaauugaagucacacugugugcacaagagagcgauaagcacucugg

SEQ ID NO: 4149215 - RNA, 76 nt, Human
ccacuguggucuccugucuuggccuucccaaacgggacagguugugucugaaggcaagaagagaaccaucgguugg

SEQ ID NO: 4149216 - RNA, 107 nt, Human
ccacuucugauucauugcuguuugcccugcccuugcuauuucuaacaagaugccaugugugaaugggaguagaugaggagugggcagagaggaauacuuuggaaggg

SEQ ID NO: 4149217 - RNA, 80 nt, Human
ccacuuuuuaaaauccuucaauuagaaccaauugaccagagcccauguguaauugcuaaaugaaggagaagggaacuugg

SEQ ID NO: 4149218 - RNA, 92 nt, Human
ccagaaaacagcaguggcaggagaaggcggcugcgggaacauuuucuccuuccaaaagagcuuucaucacucuacuuagcuuucauuucugg

SEQ ID NO: 4149219 - RNA, 75 nt, Human
ccagaaaggcaaugaauacuguuuuuguuaauaacuagcuggugacagaaagcucuuucaaucuugccuuccugg

SEQ ID NO: 4149220 - RNA, 78 nt, Human
ccagaaaguaucuucuagagccagccgcaagagcugugagcugcuuccaaguuaggcgagcugguggugguacccugg

SEQ ID NO: 4149221 - RNA, 98 nt, Human
ccagaaccuaguccuguaauuauauggugaauuucucggaaugcuucggcaacgucuugacauucaaucauguauacuucauuuugggacugagcugg

SEQ ID NO: 4149222 - RNA, 82 nt, Human
cccugcgcggccccgcaagcugacuguccuccacgccugcucuccugcaagccaggaaggauccagcacgcggccggcaggg

SEQ ID NO: 4149223 - RNA, 55 nt, Human
cccugcuacucaggaggcugagucaugagaaucacuugaaccugggaggcagagg

SEQ ID NO: 4149224 - RNA, 112 nt, Human
cccugcuauuuauuaauuuucauuggacuuuguaggaaaaagucacaagcaacaucagaauguuuugaacucuuagcagaggaccgaguggaaugugaaguaaacugaaggg

SEQ ID NO: 4149225 - RNA, 63 nt, Human
cccugcugagagccagggcuggcauuagugacaagaccgugccucccggggcucuuccuuggg

SEQ ID NO: 4149226 - RNA, 56 nt, Human
cccugcugccuucacccaggacagcagacagacuagccaggaugaugcaagcaggg

SEQ ID NO: 4149227 - RNA, 82 nt, Human
cccugcugcuaaaauuaacuaauuguuaaaguaauaaccauggacccucauggccuauuuuaauagucaguggcaaucuggg

SEQ ID NO: 4149228 - RNA, 69 nt, Human
cccugcuuccuauccacacaaugccucugaaaucggaaagggcaccacagguggugugggaaggcaggg

SEQ ID NO: 4149229 - RNA, 67 nt, Human
cccugcuucuaucccuccacugcacugccuuuuauuuauaaaaugaggcacugggggaugagcaagg

SEQ ID NO: 4149230 - RNA, 74 nt, Human
cccuggagaauuuugucaccagacauuguaauuauguuuuuagaugaugucacauguguggcauuuuuccaggg

SEQ ID NO: 4149231 - RNA, 81 nt, Human
cccuggccagguggugccucuguucgcacaggucuggagaagugcagcagcaccaggcccccugcugagauugagccaggg

SEQ ID NO: 4149232 - RNA, 86 nt, Human
cccuggccuuggugagguagcagagacagugaauguucaacuucugaguaauuuauagguaacucugcagcaacacuaacacaugg

SEQ ID NO: 4149233 - RNA, 79 nt, Human
cccuggcucugugccccgaugguccccucccugccccauuaaggccaggagcccaggcugggguucagaguguccaggg

SEQ ID NO: 4149234 - RNA, 94 nt, Human
cccuggcuugacugggcagggcuuccagagaacgaugaaagcugggggaacugagcucaaagugucucuugacuuucccgggaagaagcugugg

SEQ ID NO: 4149235 - RNA, 60 nt, Human
cccugggagccuggcaguugcugagcccauacgccucagggacuggugagcuuccagugg

SEQ ID NO: 4149236 - RNA, 61 nt, Human
cccugggagcgcagcaggcacaacccuugcaucugguguuugccuccugcagcuccuccgg

SEQ ID NO: 4149237 - RNA, 64 nt, Human
cccugggcagugagcuguggugggguagaggacccuucccucccugccaggcccaacccauggg

SEQ ID NO: 4149238 - RNA, 94 nt, Human
cccugggccaggcuguuucugucuguguggacacggcugcccugcacuugguuggccuccaagacagacgaaaagcuagcaagcagccucaggg

SEQ ID NO: 4149239 - RNA, 62 nt, Human
cccugggcuguucugccccuggguuugcugucccaaacagugggccuagccggaaaccaggg

SEQ ID NO: 4149240 - RNA, 61 nt, Human
cccugggcuguuugcugucccaagccccuucuggaaguuagaagcagcaaagggcccgggg

SEQ ID NO: 4149241 - RNA, 87 nt, Human
cccuggggaaaggcucaacagcuguacuuugucuaggaacuuuuacguaggauaaagucuuucucauuggccaugcugucccuaggg

SEQ ID NO: 4149242 - RNA, 83 nt, Human
cccuggggccggggugcagcugagggccucuucuagggacccaacuccugauccagccccugccggccgcaccuuccgcaggg

SEQ ID NO: 4149243 - RNA, 76 nt, Human
cccugggugaguguccaaggucagcgagagucacuuguggaggggacggaagaugaccuggcugaucuggccaggg

SEQ ID NO: 4149244 - RNA, 55 nt, Human
cccugguucauauaggcaaguuuaagcagugauuuaaaacugccccugaccuggg

SEQ ID NO: 4149245 - RNA, 58 nt, Human
cccuguauagauacaggucauagggaaauagucucgugaggccugugagugucuaggg

SEQ ID NO: 4149246 - RNA, 89 nt, Human
cccuguccugucuucgaguauuuguuuuuaaugcugggugucgaucgagacaacaagcgcucagagcaaagcaaggaugcauuacgggg

SEQ ID NO: 4149247 - RNA, 91 nt, Human
cccugucuuguggaaucagaauuacugaauggagcccaggcauuuuuuaaaaaaguucccuugguaauucuguuccuuagcaagucuuggg

SEQ ID NO: 4149248 - RNA, 56 nt, Human
cccugugaaccucucaaugacucaggagggacuccagagcaguggaguuuccaggg

SEQ ID NO: 4149249 - RNA, 68 nt, Human
cccugugcacacacuucacucugcugccaaaagcaaccaaucgccugucagaguggaugugcaugggg

SEQ ID NO: 4149250 - RNA, 70 nt, Human
cccugugccuuggcgcugugccacggagggccgaaggaaggcgggcacuuacugccaaggcgagccaggg

SEQ ID NO: 4149251 - RNA, 77 nt, Human
cccugugcucugugagcaucccuuaccggaaguuccaccaggagcugggcaaggcugaagcuaccagguguggaggg

SEQ ID NO: 4149252 - RNA, 59 nt, Human
cccugugcugggcccugagaccaggggccucugccaccuucagaaugcuccaggcaggg

SEQ ID NO: 4149253 - RNA, 64 nt, Human
cccuguggugacaggccugucugcacaugaggcugugagggcacaggccugugugcacacgagg

SEQ ID NO: 4149254 - RNA, 66 nt, Human
cccuguguaguauuuguacacauauaucagcuccucagcuuuauuuguugcauauguuuuaugggg

SEQ ID NO: 4149255 - RNA, 66 nt, Human
cccuuaaauccaucucuccgagaaguuucuagcugacguuuuucagggggucauggagggugaggg

SEQ ID NO: 4149256 - RNA, 128 nt, Human
cccuuagaacagcugccuaauacucaagagccucaagccuucugauuuauauaugcagauacuacauauggaauuuguuaaaaauuagaucgccucuacuuuuuggguggugugggugggaggagagg

SEQ ID NO: 4149257 - RNA, 56 nt, Human
cccuuagcucugggcagccgguggcuuuggcggccacuggccaccacuggcagggg

SEQ ID NO: 4149258 - RNA, 60 nt, Human
cccuuagcuggugagcccagcgccuccuguguggggcggucugggcugcccagcuauggg

SEQ ID NO: 4149259 - RNA, 99 nt, Human
cccuuaucuacauagaauagucagcaagaucauggacucuggacccagaacaccugaguccuagacuuuucugccacuuaagagcuaugugaugcuggg

SEQ ID NO: 4149260 - RNA, 70 nt, Human
cccuucaauugacuagagguaaugagaaagaacccacccuccuuucuuuauaucugcuaguggguugggg

SEQ ID NO: 4149261 - RNA, 102 nt, Human
cccuucagugccacgaccuuccugugccaaucauggguaugaugucaguucaucuaauccuugagcugcaguuagccccagaugaggaaacagacuggaggg

SEQ ID NO: 4149262 - RNA, 61 nt, Human
cccuggcucugguaacauuggguagcucccuaguuguuggccuucccuaccugggccaggg

SEQ ID NO: 4149263 - RNA, 61 nt, Human
cccuggcuggcucugcccggacaguccuuagggacaucuugguccugcccaccagccaggg

SEQ ID NO: 4149264 - RNA, 95 nt, Human
cccugggacaucucucuuagcaugcugauauuuggcugcuucucugauaaugggagcagcauucucugguauggggugcuguggaagaccuaggg

SEQ ID NO: 4149265 - RNA, 59 nt, Human
cccugggcaagcccuauuuuccucccugcuaacuugaugacaacaggggaaguucaggg

SEQ ID NO: 4149266 - RNA, 73 nt, Human
cccugggcaguuucucccucucuccagcuguccagucaaauuucaggcuggagaagccaaacuagucacuggg

SEQ ID NO: 4149267 - RNA, 55 nt, Human
cccugggccuuuuggggacaagcagcucucugaggaccccacaggaggcccuggg

SEQ ID NO: 4149268 - RNA, 81 nt, Human
cccuggggugggguggucagggugagcaggugggcucugugagccuguuuccccaugcccugacucaccccaaucccuggg

SEQ ID NO: 4149269 - RNA, 109 nt, Human
cccuggguguggcaucggggcauggcugugagcaggcagcuucagagcaagguggguugugugaaggagguggcuggcucagagccaggccuucagcugaggccugggg

SEQ ID NO: 4149270 - RNA, 78 nt, Human
cccuggguucugaguccuccuuugaaggccacccugccagaaaggaagagccugauggagguuucuggggacuuuggg

SEQ ID NO: 4149271 - RNA, 58 nt, Human
cccuggucagggaaggcgccuggcuuccagcugugagacaggcuccgcaggacuaggg

SEQ ID NO: 4149272 - RNA, 85 nt, Human
cccuggugccccuuuagccccugcagagacuucugccuuucccuaggauacaugguugcuggggguggcagagcuagaaccaggg

SEQ ID NO: 4149273 - RNA, 58 nt, Human
cccuggugggaaugauugcaggaaggagugggaaagacugcaggugcugccaucaggg

SEQ ID NO: 4149274 - RNA, 71 nt, Human
cccuguaacugugguuaccucuugucuuagucaguucaggcugguauaagagaauaccauaggcucagugg

SEQ ID NO: 4149275 - RNA, 130 nt, Human
cccuguagauuugccuggugcauguaaugaaaccugcagcuuuauggggugauggcagugcucugcugccuuacuuucaaguggcuggggguuuuuuuaguuuggcagguacagauuuuuuuuaauuggg

SEQ ID NO: 4149276 - RNA, 79 nt, Human
cccuguagccugaguggugaaaccccaucccccuaggggcacauggacaauggaggugcagcauccucagcagcauggg

SEQ ID NO: 4149277 - RNA, 78 nt, Human
cccuguauuuacuccagagguucucaucugggacugauucuuccccacucccuccaugagaugucuggcaauguuggg

SEQ ID NO: 4149278 - RNA, 125 nt, Human
cccugucccaaauauucuaauuuaauggcuguacgguggggcuaggaccucaggaugauucacuccaccgagguauccggucguccugaaguauagccaagguugagaagcaccgauagacacgg

SEQ ID NO: 4149279 - RNA, 80 nt, Human
cccugucccccucucagagggaagcugccucugaagaggcaggaagcugaggcucugagagggaaguggguugcccaggg

SEQ ID NO: 4149280 - RNA, 80 nt, Human
cccugucccgccacucugcugucugauggcaggaauggagugccucuccuacacagauaacagagacgcgggggcagagg

SEQ ID NO: 4149281 - RNA, 130 nt, Human
cccuguccuugcucccgucccuggcccggaccuuggcugucuccucuuugugccgagauugucagucugugcggcuacagcgggguggagacggccggcucugucacggcuucaugagagcggggacggg

SEQ ID NO: 4149282 - RNA, 121 nt, Human
cccugucggcauggcaacuucaaggcuguaccucuuguuagugacugccuggauggaagaaaagccaccuuucaccagggcuccagccagccuacagccgagguuagacccagccacaggg

SEQ ID NO: 4149283 - RNA, 70 nt, Human
cccugucuccaaaacaaucucagaugagauucucaugagaacacaauuuguuuggagaaauuagcauggg

SEQ ID NO: 4149284 - RNA, 63 nt, Human
cccugucuguggugcuccuaugcuguccauugaggacucagcuggaacgucacaggagcaggg

SEQ ID NO: 4149285 - RNA, 76 nt, Human
cccugugcacuaucugcauuuuuaaugauuugguuacuuuuguaguuauauuuaagaaguccaguguguaucaggg

SEQ ID NO: 4149286 - RNA, 129 nt, Human
cccugugcauuguucagggcaagccuagagguccuugagccuuugcucuggcggccagcagauggaacugcuggagcuccgggcuguaggaggccaggugcucugcgcucucacuugcagcgggcugag

SEQ ID NO: 4149287 - RNA, 69 nt, Human
cccugugugcccaucugggauggggcuguggguguuccuugauguccucacagaugggugcauagcagg

SEQ ID NO: 4149288 - RNA, 69 nt, Human
cccuguucucagcaucuucaacuuuggggcugccugagaaggcaagcgcagaagcggaggaaggaaggg

SEQ ID NO: 4149289 - RNA, 63 nt, Human
cccuguuuaagaaaccuguaaaggagcucaaaucaaguaaaaucugaugguuucugagcaggg

SEQ ID NO: 4149290 - RNA, 56 nt, Human
cccuguuuauuuuuggagagaacacauuuuugcugcuuuucaggagcuaugcaggg

SEQ ID NO: 4149291 - RNA, 130 nt, Human
cccuguuuucucauugcugaaaaaugguaugcugccuuuugcaaagucuuuauuuuguaucuuuaucuuaaaguggaagauaaagacuuugaaaaagacagcauaucuuuaaagagaauggaaacaaggg

SEQ ID NO: 4149292 - RNA, 63 nt, Human
cccuguuuugugaggcacccacagguagagucuucgacaccuagggggcuucccagagaaggg

SEQ ID NO: 4149293 - RNA, 86 nt, Human
cccuuaaaaaugcuucugaguucuuuggggcagaagugcaagaagaaugcuuucuguaauuaaaagggcaggggcauuugugaggg

SEQ ID NO: 4149294 - RNA, 81 nt, Human
ccgcuccucaugccacuugaagccuuaucagucacuuauacuuuggugugaaugaaggaagggggcuagggagugaagugg

SEQ ID NO: 4149295 - RNA, 71 nt, Human
ccgcugaagccggugacauuucaccaaagcuacucccuuuggaagcagcuggugcaaaugucacucagcgg

SEQ ID NO: 4149296 - RNA, 81 nt, Human
ccgcugacaaagauuccuguguccacgcacuggcaugaucccuccugaucgugccuuucguugacagauccuggaagacgg

SEQ ID NO: 4149297 - RNA, 71 nt, Human
ccgcuggcccuggggcaggaggguacagggaguuggcccugagccccucugaccucagagccgaggcgcgg

SEQ ID NO: 4149298 - RNA, 70 nt, Human
ccgcugucaccagcugcugacaugggcaggucccuuguggggcugccugugcgggucgcuagggcggugg

SEQ ID NO: 4149299 - RNA, 98 nt, Human
ccggaaagcuggcugaaaugcagaucccucacucugacauccugcgucaguacggcugagaauucugcauuuaagcgaccccuugaugcucauucugg

SEQ ID NO: 4149300 - RNA, 65 nt, Human
ccggaagagcuggcccaaucugagcauccccaagaaggugcugggaguagccagguucauguugg

SEQ ID NO: 4149301 - RNA, 56 nt, Human
ccggagagaccccaucugcugggacagaagguccgaagucauuggguguccuucgg

SEQ ID NO: 4149302 - RNA, 84 nt, Human
ccggaguucuggaggcaggcugccaggauacuguguauccauacucgaauauucauccugcaaagucuguuucuaacgcugugg

SEQ ID NO: 4149303 - RNA, 56 nt, Human
ccggcccugcccugcccugcggaacgccggcucugcagcugccucuggcgggccgg

SEQ ID NO: 4149304 - RNA, 129 nt, Human
ccggccgcggggccccggguacuucgccggagcgcgcgcggccgccgagagaguugugggcgaaguaaacuuggcuccucuccucggagucggggagcugcccgcgaagggcgccgaggccgcggccgg

SEQ ID NO: 4149305 - RNA, 104 nt, Human
ccggcgcaugcgugucccgcuccggcgcgguuuagugggugcggccuggagagcccacgccagccggacacugggccacgucggagccgccggggcggcgccgg

SEQ ID NO: 4149306 - RNA, 101 nt, Human
ccggcgucccuagagaagaagcacccagagggccuuuggaguuauccaucgaccuggaucucuccuuggcuuuguuggaucucucauuccuggaccuccgg

SEQ ID NO: 4149307 - RNA, 129 nt, Human
ccggcuaccccuccagcccguugagcccaggcauuuuguaacauaaguggcacuuugcccagauuaaacgucuauggcagagacacuuaucaccuuagaucuuggggucagagcugcuuugaaagccag

SEQ ID NO: 4149308 - RNA, 64 nt, Human
ccggcucggcgaccaggcugaaacucauguuugaauuuagugagccguuuguucguuaguccgg

SEQ ID NO: 4149309 - RNA, 80 nt, Human
ccggcugagacucugcuacaggccgagguugguugauugucuuggcagcuaacaaaagccgaaguaggugucucaguggg

SEQ ID NO: 4149310 - RNA, 56 nt, Human
ccggcugugggcaggaaaccucuguuccucucacaggggccucuccacacagccgg

SEQ ID NO: 4149311 - RNA, 77 nt, Human
ccgggggacccguggcaggcugccugcucuugcucccagggaagcugcugggcagggcagccuugccgggucccagg

SEQ ID NO: 4149312 - RNA, 79 nt, Human
cccuuuuuucauuugggucaguuuuccauaggcuucccaaaucaucuaagucuguguugauaauuccagagacaaaggg

SEQ ID NO: 4149313 - RNA, 126 nt, Human
ccgacgcccuucacuccccccccuuuuuccuccaaaaacuacaucagcgaaacgugaagguccuuagugucugauccguaguuacaucuuggaaaagaaaagggaaagauaaauaaaaaauguugg

SEQ ID NO: 4149314 - RNA, 62 nt, Human
ccgacuguaucuugcauuucagaguucagagaaguuucuuuaacgaaaugcaagaaagaugg

SEQ ID NO: 4149315 - RNA, 71 nt, Human
ccgagaccugaagauacaaaugugggcuuucuugaacuguuuugagaagagcacugcuguauuuuccuugg

SEQ ID NO: 4149316 - RNA, 125 nt, Human
ccgagagccacgcagagccuggccuuggccuuggccuccuggugcuggggcugccgccgcugcggggguugccgcugcgccgggugcugcuggggccgagguugaacagagacgccagcuuucgg

SEQ ID NO: 4149317 - RNA, 77 nt, Human
ccgagcacauucccaggagcugcugguacagcuugccucaauaucuuaucagcaggugaauuccuggaugugcuugg

SEQ ID NO: 4149318 - RNA, 63 nt, Human
ccgagcgggacacauuagucaugcacaaacaagagcagcccuugccugacuuuauuugcuugg

SEQ ID NO: 4149319 - RNA, 56 nt, Human
ccgaggcuggagugcaguggcgcgaucucagcucacugcaagcuccaccucccagg

SEQ ID NO: 4149320 - RNA, 55 nt, Human
ccgaggcuggagugcaguggcgggaucuuggcucacugcaagcuccgccuccugg

SEQ ID NO: 4149321 - RNA, 55 nt, Human
ccgaggcuggagugcaguggcgugaucucgacucacugcaaccuccgccuaccgg

SEQ ID NO: 4149322 - RNA, 83 nt, Human
ccgaggcugggaggacugcagaugggugcaucccugugaagucucagggcugggcucagaccuagugaacuccacggccuggg

SEQ ID NO: 4149323 - RNA, 64 nt, Human
ccgcaaggacuggucacccgcgcugagacaccgccagcugccuaugaccuagccuccaaagcgg

SEQ ID NO: 4149324 - RNA, 55 nt, Human
ccgcagagcaguaucaugaguuggaaugacugccuugcuccuggaugaccugugg

SEQ ID NO: 4149325 - RNA, 61 nt, Human
ccgcagaggcagacccuccagggcggugcagcaccuccacggcgucgucuaccaucugugg

SEQ ID NO: 4149326 - RNA, 93 nt, Human
ccgcagcagaucauuucauauugcuuccguggaguguagcgagucagcuaaauacuuugacgccggugggaauagcgaugauuaugguagcgg

SEQ ID NO: 4149327 - RNA, 80 nt, Human
ccgcaggcuccggggugcccuggcucagcgcagaaaggacgccgcgcacagguacagcccaggccgcccgggagccgcgg

SEQ ID NO: 4149328 - RNA, 57 nt, Human
ccgcagggcaaacccagguguucagggcaaggccuggacacugucugugaccugugg

SEQ ID NO: 4149329 - RNA, 81 nt, Human
ccgcauagugcaggcacagguggacuucacagucagcuggauuugauuaugagucgacugugccacuuaccggcugugugg

SEQ ID NO: 4149330 - RNA, 57 nt, Human
ccgccauuccuacugccugauguccucucaggagggcucugaggauggagcuggugg

SEQ ID NO: 4149331 - RNA, 67 nt, Human
ccgccuugauuccucucuaccugguuguuagacugcugggaaaauauggagagugauuucagugugg

SEQ ID NO: 4149332 - RNA, 121 nt, Human
ccgcgcugccauucuucuccaucugccugggaugcaggggcuguguuuuggguuucauuaugguauccagcaccuaguguagcccugggcacacagcagauguuuuagagggacguguagg

SEQ ID NO: 4149333 - RNA, 130 nt, Human
ccgcuccugcuugaucuccuccaggaucuucucaugcagggaccuuugcuuugguggcaacgggcgcagccgccucucagagaccugcgguggggaagcgagaccugcgguggggaagcaggaccugcgg

SEQ ID NO: 4149334 - RNA, 60 nt, Human
ccgcugcaggcagaaucucccaaugggcuuccaggguuuaccaguuugcauugcagaugg

SEQ ID NO: 4149335 - RNA, 114 nt, Human
ccgcugccccucucaggcccgggagcccgcguaccuggcagucagucuuuccgcagcgccgaggugggugccggagagagacgccgggaccgggacuggcgggccggcuggcgg

SEQ ID NO: 4149336 - RNA, 70 nt, Human
ccgcuggcaccaggugcuggaggacaucaacguucagcuugaaaagccggccagcaucgguaucccucgg

SEQ ID NO: 4149337 - RNA, 82 nt, Human
ccgcugggaaguggagucagaaugcgacaggccucauaauucuccagugggccuccaucuuaucuuacucuguauucccugg

SEQ ID NO: 4149338 - RNA, 92 nt, Human
ccgcugucucuacaacuccagcuccacuuccuucugcccucagcccacccucagagcugaguggaggugagacaggagguguagagcugugg

SEQ ID NO: 4149339 - RNA, 85 nt, Human
ccgcuuggugagguuucggggcugggcggcaucacccaggccuacgugguacacccugccguccaccucgauggccacugagcgg

SEQ ID NO: 4149340 - RNA, 76 nt, Human
ccggaaauggcuccagcuuggcuucaccucccagcgaccaauagggagggaguggaguggggaugcacauugaugg

SEQ ID NO: 4149341 - RNA, 130 nt, Human
ccggagagacgucgcgcuguggccugaaguggcgcaagcuugcuuuguaaauaucuguggucccgauguagugcccagaacguuugugcgaggcagcucugcgcccggguuccagcccgagccucgccgg

SEQ ID NO: 4149342 - RNA, 74 nt, Human
ccggagaugcugcagcucgagggucccgccugcaccauccauggcucucgagauccuucagagcgcggacccgg

SEQ ID NO: 4149343 - RNA, 74 nt, Human
ccggagccaaagcugccuugcugaggagaaauccaaguggguuuccuccucccccaaggcauccagccucccgg

SEQ ID NO: 4149344 - RNA, 73 nt, Human
ccggcguccugguccugccuccccaugcacuggagggcagccgcauaggacagcagguccggggucaagccgg

SEQ ID NO: 4149345 - RNA, 60 nt, Human
ccggcgucucacuuccgccugcgagccuucgggggccgcgcggcucucgcgagauguggg

SEQ ID NO: 4149346 - RNA, 67 nt, Human
ccggcuggccugcuggcguccaggcuguucuuggucagugcgaggggcugcuccaggccaaggcugg

SEQ ID NO: 4149347 - RNA, 67 nt, Human
ccggcuggggcgaggaaugcaggcgccuagagccuuggagcuccugaaacguuccugccgccuccgg

SEQ ID NO: 4149348 - RNA, 96 nt, Human
ccgggagaugccugugagccaaggcuguggugggcuuugagccagacacuuugacucugccucccuugccaggccagguucauuugucucuucugg

SEQ ID NO: 4149349 - RNA, 72 nt, Human
ccgggagcuguaacgagccauugcugcgauuauuauuaucucucguagucaugcauuucauuacagcucagg

SEQ ID NO: 4149350 - RNA, 64 nt, Human
ccgggaggaagaauggaguggagugggcccagcaggaaugucuguuccaccuuucuucauuugg

SEQ ID NO: 4149351 - RNA, 60 nt, Human
ccgggccccucuccgccccacacagcgcaccgacugccacgagggcuggaggggacccgg

SEQ ID NO: 4149352 - RNA, 71 nt, Human
ccgggcggagugggcggugaggauaccacagcuacugcuucccugcacaguucgccuucuccaaggcccgg

SEQ ID NO: 4149353 - RNA, 87 nt, Human
ccgggcgggguucuugggugccccgccuaagccggccugggcgucuccagcugcuuuuagggccgggcucccaggacuuucgcccgg

SEQ ID NO: 4149354 - RNA, 72 nt, Human
ccgggcgugguggcacucaccuguaguuucagcuacucuggaagcugaggcuggagagucacuugaacccgg

SEQ ID NO: 4149355 - RNA, 122 nt, Human
ccgggcguggugucagacgccuguaaucccagcuacucaggaggcugaggcaggagaauugcuugaaccugggaggcggagguugcagugagcugagaucacaccacugcacuccagccugg

SEQ ID NO: 4149356 - RNA, 77 nt, Human
ccggggccugcuccaggcuggggugcagguuggcuggcuggcuguacugacgaggaagccuggagggagagcucugg

SEQ ID NO: 4149357 - RNA, 130 nt, Human
ccggggcuccacaucacacaacuccagcaguuuccaccauucaugcuaauauucuuaguaaaaagcaccccuggaguagaaagcauugugaauggugcccccuggaguuguacgaggcaagaggcccugg

SEQ ID NO: 4149358 - RNA, 94 nt, Human
ccgggggcgucuauccuccuccuggccccaucccucaccugugggggaggcuaagugggugucagggcccugucagagggugagccacccccgg

SEQ ID NO: 4149359 - RNA, 77 nt, Human
ccgggucggcggcgggcuuggcuccagggcccaggaggaacugcugcugcucuucaccauggccucgcugcacccgg

SEQ ID NO: 4149360 - RNA, 72 nt, Human
ccgggugcagugguucacgccuguaaucccagcuacucgggaggcugagacaggagaaucacuugaacccgg

SEQ ID NO: 4149361 - RNA, 94 nt, Human
ccggucugcggccccgcccuccucgcaaguuuuaggcgcucccaaguccccgccccagacuagcccaaaccugcgagcagagcgguagagccgg

SEQ ID NO: 4149362 - RNA, 68 nt, Human
ccggugccugguuuggggaauguucgugggauauguuccaaaggacugacggaccaaucagguacugg

SEQ ID NO: 4149363 - RNA, 65 nt, Human
ccgucauggcacuucuacucuguguuuuccaggaagauagcacagagguggaaguguauaugugg

SEQ ID NO: 4149364 - RNA, 58 nt, Human
ccguccacugugugauacuuaguuauggcagcccuagcaaacucauacaugugggugg

SEQ ID NO: 4149365 - RNA, 64 nt, Human
ccugacuaucuagaaucugaauauucuuauuugggaagaauccccaaacaggugagauagcagg

SEQ ID NO: 4149366 - RNA, 68 nt, Human
ccugacuuaagucuccuguugggcaacaggugcagaaauuucaguuagacaggaggcauaaauucagg

SEQ ID NO: 4149367 - RNA, 119 nt, Human
ccugacuucgcacaccagcugcagagggaauuccaggguuucuguccaggcagucacuggugccuccaggccugggcaagaaggggcguccuccuggguuggugggcugugagcucggg

SEQ ID NO: 4149368 - RNA, 76 nt, Human
ccugagacaucagugcucuugguucuugggccuuuggacuccgaaacuuacacuacugaugacccuuguucucagg

SEQ ID NO: 4149369 - RNA, 74 nt, Human
ccugagagagaagcgaccugguauaagccacuggcugcuauacacaucugguuaauuccuucaauccuuuuagg

SEQ ID NO: 4149370 - RNA, 58 nt, Human
ccugagagccagugccugcccauccuacaacaggaaacagugcaucaaagcucucagg

SEQ ID NO: 4149371 - RNA, 56 nt, Human
ccugagagugguguacaggagauaucaaaucucuauagcauaaacccauuuuuagg

SEQ ID NO: 4149372 - RNA, 56 nt, Human
ccugagaucagugcauuuggugaacuguauguuguguuccagauuggugucucagg

SEQ ID NO: 4149373 - RNA, 101 nt, Human
ccugagauucaagcaauaagugcuuaugguugaaugcuacugaaguguugcaaauuuuguuacacaguauugugacuauaacuugagaauuuaauuugggg

SEQ ID NO: 4149374 - RNA, 57 nt, Human
ccugagauuucauugucuggccucucuaaagggaugauaauggucucaucucauagg

SEQ ID NO: 4149375 - RNA, 92 nt, Human
ccugagcaaggagauggguuaggaggauauuugaguaucuugugaaagucgaugggauucuggauugucugcuugaauauugaauuggcagg

SEQ ID NO: 4149376 - RNA, 58 nt, Human
ccugagcagcucugaggggcgagucucugacgguggggcucccccucguccugccagg

SEQ ID NO: 4149377 - RNA, 58 nt, Human
ccugagcaguuugcacaaaaaaugcauaugaugacauuuugccucuuggcugcuuagg

SEQ ID NO: 4149378 - RNA, 61 nt, Human
ccugagcaugcuuucugaccuguguuuagaaaaaauggacacuaaauggaagugucugagg

SEQ ID NO: 4149379 - RNA, 55 nt, Human
ccugagccugcagccgagcagagcgcgcucacucucgccgguccuggaggccagg

SEQ ID NO: 4149380 - RNA, 62 nt, Human
ccugagccuggcucaugcacucuggccuuccaggucaagcgugggguaugaccagagccagg

SEQ ID NO: 4149381 - RNA, 59 nt, Human
ccugagcugacucuccuuucagacagcuaaagaccuugaaagcaagaagccagcacagg

SEQ ID NO: 4149382 - RNA, 79 nt, Human
ccugagcuucagcacugcugcuguacacacaugaucuguuuuuuacuguuuuuuggcucucagcagugacuggugcugg

SEQ ID NO: 4149383 - RNA, 58 nt, Human
ccugagcuuugcuuuccucaucugugaaaaugacaagagugaggcaagauggcucugg

SEQ ID NO: 4149384 - RNA, 89 nt, Human
ccugagcuuuuccacaaaaucaaugguucccaaguaauucauucuaaaacuaaugcuugagacacauaugaauuuggaggaaccuuagg

SEQ ID NO: 4149385 - RNA, 59 nt, Human
ccugaggaaugagugaggagccaauuguuaagauuauuccuuugccuacauuuuucagg

SEQ ID NO: 4149386 - RNA, 60 nt, Human
ccugaggacacacgcugcaggagagcagccucgagucuuuucugccuucgaggucucagg

SEQ ID NO: 4149387 - RNA, 62 nt, Human
ccugaggaguuauuuuuugauauucuuucacaagagaauuucaguugcuaauaaguucuggg

SEQ ID NO: 4149388 - RNA, 93 nt, Human
ccugagucagggagagguuggggaggugggcuaaggacucucucgagcuaugacugagagcucuccuguccccucccugagcccugaggcagg

SEQ ID NO: 4149389 - RNA, 61 nt, Human
ccugaguccaggccccagggauucuuguuuaauaggccuugggugcagccuggguauuggg

SEQ ID NO: 4149390 - RNA, 79 nt, Human
ccugagucccuagggccccccaaaagcccagaggucaccgggcagguggagggcagugucggggcccagggaugagagg

SEQ ID NO: 4149391 - RNA, 57 nt, Human
ccugagucccugucucucuggcagcacccagugcuuggcaugcagcaggcacucagg

SEQ ID NO: 4149392 - RNA, 67 nt, Human
ccugagucugaggagaagcuaagaaacacaguuuacaucaagaagcugggucucucuugaggcaagg

SEQ ID NO: 4149393 - RNA, 68 nt, Human
ccugagugacuuggccuuccagucuggucccccuucucgccaguccugggcaggucaggccagcuagg

SEQ ID NO: 4149394 - RNA, 56 nt, Human
ccugaguugucaguugcuguagcuucucugagucaaaguaacuuagcaacucuagg

SEQ ID NO: 4149395 - RNA, 62 nt, Human
ccugaguuucuggcuccuuuuuuacaaugugggugcagagcaaggagccuaggaggcucagg

SEQ ID NO: 4149396 - RNA, 80 nt, Human
ccugauaaaagcugaggcaaaagagguucauucagcaaaccuuaugugaauaauuccuuuuugucaagugcuaugucagg

SEQ ID NO: 4149397 - RNA, 118 nt, Human
ccugauagccacagguuggaggcagccagugcauugccgugucuaggucuucagugggaagcucugcccuuguucuccuaagccugguaagucuggcuuuucuaaacaggcagucagg

SEQ ID NO: 4149398 - RNA, 67 nt, Human
ccugaucuuugacugaccucugacccuggccguggacuggcuuugauucagacagucgcaguucugg

SEQ ID NO: 4149399 - RNA, 56 nt, Human
ccugaugagggaaguuuuuuugagcacgugcuauguaucucagacccugugucagg

SEQ ID NO: 4149400 - RNA, 77 nt, Human
ccugaugcgguuuaugggugaccaguccaagccccggggcaaggaugagauggaucugcucuaugaacugcugaagg

SEQ ID NO: 4149401 - RNA, 56 nt, Human
cccaggcuggagugcaguggcgcaaucucugcucacugcaagcucagccucccggg

SEQ ID NO: 4149402 - RNA, 56 nt, Human
cccaggcuggagugcaguggcgcgaucucggcuuauugcaagcucugccucccggg

SEQ ID NO: 4149403 - RNA, 56 nt, Human
cccaggcuggagugcaguggcgcuaucucggcucacugcaagcucagccucccggg

SEQ ID NO: 4149404 - RNA, 56 nt, Human
cccaggcuggagugcaguggugugaucucggcucacugcaaccuccaccucccggg

SEQ ID NO: 4149405 - RNA, 70 nt, Human
cccagggaagaccacuuccuggagggggcuugccacacuuauguucauuccacaguugucuuucacuggg

SEQ ID NO: 4149406 - RNA, 77 nt, Human
cccagggacacccaguuauuaggccaucuucaguagccaauggccaguaauagcuucugguguccccucuucuuggg

SEQ ID NO: 4149407 - RNA, 72 nt, Human
cccagggcagaggcugggaggcuuucaggccacagauuuccaccauuugccaagcuucccugcucuccaggg

SEQ ID NO: 4149408 - RNA, 61 nt, Human
cccagggcaucacauccaguguugggcuuucaauuccaucugccugcuuaugaugccuggg

SEQ ID NO: 4149409 - RNA, 61 nt, Human
cccagggccccauuugcccauggcagcagcacagagcaggcagacagaugagggugcuggg

SEQ ID NO: 4149410 - RNA, 75 nt, Human
cccagggccggccuuugcgagcauucugagcagcgagcagagaaugcucgcuggggcacagguagaggcucuggg

SEQ ID NO: 4149411 - RNA, 66 nt, Human
cccaggggacugccaggaacacagccccaucccggccacgugaucauucucuagccuuccccuggg

SEQ ID NO: 4149412 - RNA, 113 nt, Human
cccaggggcacauggcauggagaguaaauggcagaaucagaauguggacacaaauuuguuugggucugaauccuguguucuuuucauuauaucgagugucuggccuccuuggg

SEQ ID NO: 4149413 - RNA, 57 nt, Human
cccagggugcagggcccucggcuucugguuggugccgcugcagggcugcgccugggg

SEQ ID NO: 4149414 - RNA, 80 nt, Human
cccagggugggcuucuuucugggguccuucggcugcaguacaaguggggcaugcacagaugagacuccaucuacccuggg

SEQ ID NO: 4149415 - RNA, 98 nt, Human
cccaguaaucauuguuuccuuucugguuuggucauagcugggaagagccaaccaaccaaauaugaauaaaccaaggacagauacaaccauuuaagggg

SEQ ID NO: 4149416 - RNA, 63 nt, Human
cccaguaaucggagaguacuuaaauaaggccaaaauaggcccaugguuucuuugauagcuggg

SEQ ID NO: 4149417 - RNA, 55 nt, Human
cccaguaccucuguucccugcuacauucccuacguaaggaauauuuguaucuggg

SEQ ID NO: 4149418 - RNA, 75 nt, Human
cccaguccucccaucuuuugagguccagcuggucccaaauaagacuuucuuuuaccucaaggaugaggcucuggg

SEQ ID NO: 4149419 - RNA, 85 nt, Human
cccagucuuugcuauugugaauaaugccgcaauaaacauacgugugcaugugucuuuauaguagcaugauuuauaguccuuuggg

SEQ ID NO: 4149420 - RNA, 64 nt, Human
cccagugcuauuuggacacagggaacaagggcuccucucuccuccuuuguugagauaaauuggg

SEQ ID NO: 4149421 - RNA, 57 nt, Human
cccaguggaaggaguagaagaccaaugaacuaaggggcguaugccuccuuccacggg

SEQ ID NO: 4149422 - RNA, 61 nt, Human
cccagugggugcugggcucugccgauacuuggucuugaggcagcugggcagcacucauggg

SEQ ID NO: 4149423 - RNA, 78 nt, Human
cccaguuucuuuauuaggguaaggcuuuucuuaggaccaaaguuuuugggcaggcuuuucccuagagggagugcuggg

SEQ ID NO: 4149424 - RNA, 121 nt, Human
cccauacaaaauauaauguccaugcaauauuuauuuaaaaguuuauuuuagcuccggaaagguguugaagauuauucuauuaaaaguugaauuguguuugggauauuuucuauuguauggg

SEQ ID NO: 4149425 - RNA, 72 nt, Human
cccauccagcguuuggccucuuaguuguggagugccacaugguucuguacuucaggggcucuguugggcggg

SEQ ID NO: 4149426 - RNA, 84 nt, Human
cccauccucaucagauuucagaugcucggcaguugacacagcuacagcaaaggacucugagucaucaucucauugugggauggg

SEQ ID NO: 4149427 - RNA, 79 nt, Human
cccaucucuaaaaugggaauauaauuuuagcaaccacacaguggguguucugaagguguaucuguuaauuggagauggg

SEQ ID NO: 4149428 - RNA, 94 nt, Human
cccaucuguuugggcaaacagggugugaacaguguaaaacaugauuaaugcugcaaguuaguauacauucuguguucaaguaugaacagguggg

SEQ ID NO: 4149429 - RNA, 64 nt, Human
cccaucuuaaugaguuucacuuccucaucuaggaaguggcucuccaagaagucacagagauggg

SEQ ID NO: 4149430 - RNA, 71 nt, Human
cccaugcacccccacggaaggccguacgccccaacacucacccccagggcggccgccuccuggggccaggg

SEQ ID NO: 4149431 - RNA, 71 nt, Human
cccaugcccuaaaggacuggcaguauaugacauaaacacaauaaucuugcacacuuccuuuaggccauagg

SEQ ID NO: 4149432 - RNA, 72 nt, Human
cccaugccuaaucuggugugcucuggacuugcaggaucccuggaguugcagcuaccagacauggugcguggg

SEQ ID NO: 4149433 - RNA, 58 nt, Human
cccauggacacugccuguuuugggacccucuggucccucagacagauguguuccuggg

SEQ ID NO: 4149434 - RNA, 82 nt, Human
cccauggugccuucccacccugcgaggcugcacucucaacugggaggcaccagcccccuggcaggguuucagagcucauggg

SEQ ID NO: 4149435 - RNA, 62 nt, Human
cccauuacuucugauguauucuacuggucaaugagccacagaguccgcauuugaggcgaggg

SEQ ID NO: 4149436 - RNA, 71 nt, Human
cccauuagaaagcuguugaaguaauucagccaugagacgacaguggccugaaauaaaguagcagaaguggg

SEQ ID NO: 4149437 - RNA, 88 nt, Human
cccauuauaccacacagcaagagcuaaaugaccaucuuucuagaaugcaguuggggaguucuuugcacagugugugcaugugagaggg

SEQ ID NO: 4149438 - RNA, 58 nt, Human
cccauucccuuuacuguugcauuauaagcugcauacagacagauaccagggacauggg

SEQ ID NO: 4149439 - RNA, 73 nt, Human
cccauugugaagguccagagagaugaucaggacagcucauggcucaguccuggcaccucacuggcuacaaggg

SEQ ID NO: 4149440 - RNA, 56 nt, Human
cccauuuagaccuauucugcccaaaaugcagugguacagaaaccugucaaaguggg

SEQ ID NO: 4149441 - RNA, 59 nt, Human
cccauuucccugggggcaggaggaucacuugcggugcucuaagaacucuaggaauuggg

SEQ ID NO: 4149442 - RNA, 77 nt, Human
cccauuucuugauuccaccagugaagagcacaaauaaagacuaagcccucuuccggauuuauggagagagaagaggg

SEQ ID NO: 4149443 - RNA, 57 nt, Human
ccuggaaaaugccacuuucacaaguguaaacgcuuaacuggaaacuggguuucuagg

SEQ ID NO: 4149444 - RNA, 65 nt, Human
ccuggaagaaucucuacucaaguacuuguuggaaguucuuuggguggaguagggguuuuaacagg

SEQ ID NO: 4149445 - RNA, 68 nt, Human
ccuggaagagucugcauauuuaucaugagucuaaacaaggauuagacuucuaaauagcagcuucuggg

SEQ ID NO: 4149446 - RNA, 95 nt, Human
ccuggaagcacauggcacgaggacagagacagcagcugguaguccaguucuaaaaccaauucugcuucuacugccaaacacugcccaguuccagg

SEQ ID NO: 4149447 - RNA, 118 nt, Human
ccuggaaggccaccauaacuucuggauccugcauggcugcaagaaccucuggaucacuaagaauuucauugaauccaggcauuccagccauuccagacaugcccccucccauuccagg

SEQ ID NO: 4149448 - RNA, 101 nt, Human
ccuggaauuaagcucugaguuucucagcuccacuugcagcuaggcuugguuaaggcuaagccaaugaagugugaguagaaaugcuguauggagcuucuagg

SEQ ID NO: 4149449 - RNA, 65 nt, Human
ccuggaauuguagguuuggccaggaguuugccaggauugcucgaaggucaucuuccaaucccagg

SEQ ID NO: 4149450 - RNA, 101 nt, Human
ccuggacgggaggcucgccgucucccaugcaggugcccgaugccugugugugcccaggcacagggcagaggguccguggcgagcggcagcaccuugucagg

SEQ ID NO: 4149451 - RNA, 69 nt, Human
ccuggagccuggaguggggaacgguagcagacugcugaugcccucagccaccuccaaguucuucucagg

SEQ ID NO: 4149452 - RNA, 56 nt, Human
ccuggagcuucuggugcuagagcaguuucuuuccauccugcccaaggagcuccagg

SEQ ID NO: 4149453 - RNA, 80 nt, Human
ccuggaggaggagguuggagggcugcccugcagggucacugcaccucugcccagagccucuuaccuccagauccuucagg

SEQ ID NO: 4149454 - RNA, 85 nt, Human
ccuggauccgcucccggccccaagcuccacacagccgggaaggaagcucgcguuuguuuugcuggcgccagggauacgguccagg

SEQ ID NO: 4149455 - RNA, 56 nt, Human
ccuggaucuuuguuguaaauaucaaccucaauggcaauuuggagcagugguucagg

SEQ ID NO: 4149456 - RNA, 71 nt, Human
cccccaaaccaucagugagccccuugaugagcagggcucuugccacuucaucaggguggucagucgggggg

SEQ ID NO: 4149457 - RNA, 81 nt, Human
cccccaccaucccaaguugcucugucccaaggcccacaaggaacccugaggggagaagcagcagccugggauuggugcugg

SEQ ID NO: 4149458 - RNA, 59 nt, Human
cccccagagcuccugcacuguccuucccaacccuugggcucccagaggagcuuuggggg

SEQ ID NO: 4149459 - RNA, 79 nt, Human
cccccagaggaaucugguaaagaagacaaacagggccaggcgcgguggcucacuucuuuaaucccagcacuuugggagg

SEQ ID NO: 4149460 - RNA, 76 nt, Human
cccccaggaggcccccaggcucuggagaaccugcggggaaccaaggcuuccugaggcuugggggucagccuggggg

SEQ ID NO: 4149461 - RNA, 94 nt, Human
cccccaggccucagccgggccgaguggguaccggagcaggugcccgugggaccggccggcuggugaccgcugggcuuccggcugguggaggggg

SEQ ID NO: 4149462 - RNA, 66 nt, Human
cccccaguggcaggggaagcagguguggaguggguucaggcuggcuggguccugcagacugggugg

SEQ ID NO: 4149463 - RNA, 61 nt, Human
cccccaugacugcuucaucuugcaucuguggugccuagcauggcagccaguacaugguggg

SEQ ID NO: 4149464 - RNA, 75 nt, Human
cccccaugguaauauagugugugagagagugaaacaccuguuuagcuuuuuuguguauuaagaagcuacaggggg

SEQ ID NO: 4149465 - RNA, 70 nt, Human
cccccauuuucucaccucucagaugggugucauaaaccaucgguuugucuugaggcuggggaaguggggg

SEQ ID NO: 4149466 - RNA, 70 nt, Human
cccccccaggcaccccaggugagcacugucagcugccaagagcccagagcucccaagggguugggguggg

SEQ ID NO: 4149467 - RNA, 82 nt, Human
ccccccugcuuccuccuuauuugggaccaccugguggccagcagaagaccaggggaucugauuuaggaugggagccggaggg

SEQ ID NO: 4149468 - RNA, 63 nt, Human
cccccuacagggacagcacagaggccacuuccuggcuuuacacagcugguucuuguguccggg

SEQ ID NO: 4149469 - RNA, 67 nt, Human
cccccucuacuacugcaggagcuucuuguuugccaggacagggcuauauuccucagagcugaggagg

SEQ ID NO: 4149470 - RNA, 67 nt, Human
cccccucugccgggguccuucaccuugaugggccacaggccccucugaggguccccagcguuggggg

SEQ ID NO: 4149471 - RNA, 64 nt, Human
cccccugggaacugaaugucucgguauaaaacacgauuguacauuuguucaauucugagguggg

SEQ ID NO: 4149472 - RNA, 61 nt, Human
cccccugguguggcugucacagagggaaguggacguccugugguuugaccccaccagaugg

SEQ ID NO: 4149473 - RNA, 60 nt, Human
cccccuuugacugaugaagcaacuccaggagggucagcauguucuuaggucacagggugg

SEQ ID NO: 4149474 - RNA, 82 nt, Human
ccccgaggugcacaggcucuggggcaggauggcugaagcacaaaucucagcucugucaacagcuagcugugugaucuugggg

SEQ ID NO: 4149475 - RNA, 92 nt, Human
ccccgaucaaugaauacaucugaaggcuaugaauacuauaacaaaaagcaggagaugacauaugaccuaagaugugugccaaauguuugggg

SEQ ID NO: 4149476 - RNA, 56 nt, Human
ccccggaagcugaaggaugacugcgggaguuucaguccccuacauaguuccugggg

SEQ ID NO: 4149477 - RNA, 83 nt, Human
ccccggcucuccucuggaugguguauugcaaggagggagcuguucuccccauuaugcagucauuauguggagaucugcugggg

SEQ ID NO: 4149478 - RNA, 75 nt, Human
ccccgucucccuggugacucccaaagcugggccuucaaccuacagcugcguagcggggaaccagggagcugaggg

SEQ ID NO: 4149479 - RNA, 56 nt, Human
ccccuaacuaaagggaagcuaaagaaguuacuucuacacuuuucauuagcuagggg

SEQ ID NO: 4149480 - RNA, 81 nt, Human
ccccuaauugaucuuccugcaagacugagcugcccguccaaauggcagaacagccaacuguguaggaggagagcuuaaggg

SEQ ID NO: 4149481 - RNA, 57 nt, Human
ccccuagaacacgcagacacugagucuucucaggcucaccugugaguccuggcuggg

SEQ ID NO: 4149482 - RNA, 80 nt, Human
ccccuagcgaaucucagcuggugcugcgcagagacagcagucagcgucugccgguggcgcggcccaggaggagcagaggg

SEQ ID NO: 4149483 - RNA, 56 nt, Human
ccccuagcuaaugaaaaguguagaaguaacuucuuuagcuucccuuuaguuagggg

SEQ ID NO: 4149484 - RNA, 55 nt, Human
ccccucaaaaaugccuggucccucugcauaaaggagaacauggcagguggagggg

SEQ ID NO: 4149485 - RNA, 61 nt, Human
ccccucccugggccuggcuugguggggugagcccaacaggugagcucuaucuagggagggg

SEQ ID NO: 4149486 - RNA, 75 nt, Human
ccccuccuggagcauggcuuuggaggauagcaaccccgaacuugcaauccugacugcuaugugaccuuggggggg

SEQ ID NO: 4149487 - RNA, 65 nt, Human
ccccucggcuucagcucaggccccucggggagcaucccuugccgugagacugacagccuuugggg

SEQ ID NO: 4149488 - RNA, 62 nt, Human
ccccucugccaagcuagaacguucccaggcccaaugccuuggggaggggcuggcagaguggg

SEQ ID NO: 4149489 - RNA, 59 nt, Human
ccccucuuccgggcaagccccaggcgugagucacuggagagcgcgacgggaggaagggg

SEQ ID NO: 4149490 - RNA, 55 nt, Human
ccccucuuggcauugagugccaguccucugccaggcucuguguuacaaguugggg

SEQ ID NO: 4149491 - RNA, 59 nt, Human
ccccugagauucuggcuugggacuggacuuggauuuguccagccagaguggcccagggg

SEQ ID NO: 4149492 - RNA, 94 nt, Human
ccccugaggagagcagguuaaggugugguaguuuaguucugcaggaaaaucauaggcagagcucgaggccaacacuucucugccucuguugggg

SEQ ID NO: 4149493 - RNA, 59 nt, Human
ccccugaucuaauuccuuagggucagguagaaguuagccaggcagguguggagaagggg

SEQ ID NO: 4149494 - RNA, 129 nt, Human
ccccugaucucaggugauccaccugccucggccucccaaagugcugggauuacaggcaugagccaccucgcccagcccaauccuagcacuuugagaguccaaggcaggcagaucacuugagcacgggag

SEQ ID NO: 4149495 - RNA, 72 nt, Human
ccccugcagcugggccagggccaccggcaccucccaguacccgcuggugccucugggucccaggugcugggg

SEQ ID NO: 4149496 - RNA, 84 nt, Human
ccccugcagugacagguggcucugacagcucugguuugucagcaggcagacacaugaggaugaggggaucaugaggaugagggg

SEQ ID NO: 4149497 - RNA, 85 nt, Human
ccccugcugacuucaggcucccugcugggcucuggagaugcauagaucaacaaggucccccaggagcuugggauucuaagagggg

SEQ ID NO: 4149498 - RNA, 129 nt, Human
ccccuggcagugagggcucaggcaugucuucuccuuggucauuuguauguuccuccuuaggacuuugaaucuugaaugaggcaugcaaaggggaagggacagcuuagaauccuccugugacagacgugg

SEQ ID NO: 4149499 - RNA, 68 nt, Human
ccccuggcuuggaggguagggugugguguguagauacugaacagcaccuuccuauccaggagaugggg

SEQ ID NO: 4149500 - RNA, 96 nt, Human
ccccuguccucggugacccugggccuugcaucccagagccagcacgcacgccgggcuccccccaugcaggugccccugggacacuggguaucuggg

SEQ ID NO: 4149501 - RNA, 63 nt, Human
ccccuguugggucagauccuggucuaucaugcgacgguggcaccagagggggcucugcagggg

SEQ ID NO: 4149502 - RNA, 61 nt, Human
ccccuuccaggaagcagaaucgggccuggucaaaaaccauuuauuuuccccaaggaagggg

SEQ ID NO: 4149503 - RNA, 56 nt, Human
ccccuuccuguacacuucuugccagagcagaacugggaggugagugugggaaaggg

SEQ ID NO: 4149504 - RNA, 65 nt, Human
ccccuucugaaaccuucaguaugaagccauuauguuuuacccuuuccagguuuuaacauaagggg

SEQ ID NO: 4149505 - RNA, 57 nt, Human
ccccuuggcugcucucaagucccuuuacgaugaggcuggcuuguagcagcgaagggg

SEQ ID NO: 4149506 - RNA, 76 nt, Human
ccccuuugagaaauuacuucagugauggcacagguuuugccuucauccuucugugacuucucagguuggcuggggg

SEQ ID NO: 4149507 - RNA, 103 nt, Human
ccccuuuuuaagaaucagcacccuggguaugaggcaaguuuggaaacugaaugguuuggaaacaucucugccuuuauucauggaguuggggagugaggagggg

SEQ ID NO: 4149508 - RNA, 88 nt, Human
cccgagcugcuccucauaucuguguuucccuuuugcucaggugcuagugcaggagcucgaggagcaucagguacggagccccuucggg

SEQ ID NO: 4149509 - RNA, 101 nt, Human
cccgaggccucacagcugggaaaggagaggagggauuugguuuuggaucacaaguccaggccucccucuccugcacaguccuugggcuggaggagucaggg

SEQ ID NO: 4149510 - RNA, 65 nt, Human
cccgcagggccuuagcagcggcugccgcagcucaaucgcggagcaacuagccgggcgucugcggg

SEQ ID NO: 4149511 - RNA, 104 nt, Human
cccgccacgccucgcgcgcugcggcucuuagaccccuggagccccuuuuuugccagagcuaccgguccacgguuuaaaugaucgcagcgaagauacauaaaggg

SEQ ID NO: 4149512 - RNA, 67 nt, Human
cccgccuccagcccacgcaggccugcccuggccuccugggagcgggcggcgauggcugggguguggg

SEQ ID NO: 4149513 - RNA, 115 nt, Human
cccgcgaggggcucugcacccgcccuugaggcacccucaagcaguggcacgugcugauagguaggcgacagcuugauggugcgcacgcgggcgucggcggagguggccucgcggg

SEQ ID NO: 4149514 - RNA, 71 nt, Human
cccgcggccucugcgccucagccgaccuccaccgcgggugcgugcgggggugcgggggugaggggugcggg

SEQ ID NO: 4149515 - RNA, 56 nt, Human
cccggagccugggacugggggucaugcugcugcguccccuuccacacagcucuagg

SEQ ID NO: 4149516 - RNA, 73 nt, Human
cccgggaaaaagauucaagcggcaaaguccggaggaaacgaggagcaggcuuucaagagucuucuuccagagg

SEQ ID NO: 4149517 - RNA, 101 nt, Human
cccgggaacuguuagaaaugcacauucucagcugggccuuuaccuacggaguugucaacccuggaugggcccugcagugugaguucuagcaagcccacggg

SEQ ID NO: 4149518 - RNA, 80 nt, Human
ccuugcuaaccugcugcuuugauguguaaaucauaaaucaaucaccauuauucacucauuaaagcaggaccuuaacaagg

SEQ ID NO: 4149519 - RNA, 89 nt, Human
ccuugcugagccucaguguccuccucuauacauaugggauaauaucacccaugucauggcguuguggggacuaacugaaaucacuuagg

SEQ ID NO: 4149520 - RNA, 83 nt, Human
ccuugcuuccuucccguucuucuccuugcccuacuccaggaggaacaugaccuugcuuuggagagggacaggaagggaggagg

SEQ ID NO: 4149521 - RNA, 86 nt, Human
ccuuggaagcaaaugauugaagcuauauaaaaaagcucagcaaugcugaagcuuuaggauggguucaucauugaaugucccugagg

SEQ ID NO: 4149522 - RNA, 96 nt, Human
ccuuggagcuuauuggagaucagaugcagaggcuggggguacccaggcugcggagacucccccagcuucugcccguguuugcucuccugccccugg

SEQ ID NO: 4149523 - RNA, 84 nt, Human
ccuuggauguacuggcagaugggcagaaggccuugcaugcuggcuuccugccaugcugucuucuguucugugaggcuuccuagg

SEQ ID NO: 4149524 - RNA, 56 nt, Human
ccuuggcaggggagaaauauauggaggaaaaucaguaccuuuguuuccucccaagg

SEQ ID NO: 4149525 - RNA, 123 nt, Human
ccuuggcucccacucgccugaagggcaggaccuugggccuucccuggcaucuuguugccacagagaccaggagccacaggaggagccggauccccuccuccagggaaggggagcuucacgagg

SEQ ID NO: 4149526 - RNA, 87 nt, Human
ccuugggagaggaugaguguauuuugcacgugagaagaaugauucacauucuucucacgugcaaaauacacucauccucucccaagg

SEQ ID NO: 4149527 - RNA, 59 nt, Human
ccuugggaguggugaccacagcucagggccuggguuggauccugguggcugcccuaggg

SEQ ID NO: 4149528 - RNA, 56 nt, Human
ccuugggggagauugugcaucucuaagaaaccaaaucuuugagugcucucccuggg

SEQ ID NO: 4149529 - RNA, 65 nt, Human
ccuugguagcuauauuuucguuuuauuauaauauauuugauuagcuuugaaugugcugccaaagg

SEQ ID NO: 4149530 - RNA, 71 nt, Human
ccuuggucuagccuuccaaccuaccuuccaaccuggaaauuugggaggugugggaaacgggugaccucagg

SEQ ID NO: 4149531 - RNA, 57 nt, Human
ccuuggucugauaggccagggguaaucucauuucucugggcugcuuaaggaucaagg

SEQ ID NO: 4149532 - RNA, 73 nt, Human
ccuuggugccauaagguuuggggccaugcacaauggcugaugccuguagucccaacacuuugggaggcggagg

SEQ ID NO: 4149533 - RNA, 76 nt, Human
ccuuguaguuguuucccccauugucugucaaaguggagaguaaucccagaugguuugcaugggagggcuacaaagg

SEQ ID NO: 4149534 - RNA, 64 nt, Human
ccuugugugaggucgguuaccugagacaagcaaguguuucucauaaggucagauuucacaaugg

SEQ ID NO: 4149535 - RNA, 63 nt, Human
ccuuguguuuuuacuuacuguccccagugugcuagcuacugcagggacacgaagacaaauagg

SEQ ID NO: 4149536 - RNA, 76 nt, Human
ccuuguuauugugaauaaugccgcaauaaauauacuugugugugucuuuguagcagcaugauuuauaauccuuugg

SEQ ID NO: 4149537 - RNA, 58 nt, Human
ccuuguuucucucccagauaagcuaagguuggcaggggcugaggggagugaggcaggg

SEQ ID NO: 4149538 - RNA, 60 nt, Human
ccuuuaaccucuuugaaccucagugugagugugcuggcaaagaggagagagaggaagagg

SEQ ID NO: 4149539 - RNA, 75 nt, Human
ccuuuaacuuggaucagguuucucucuuuagauuuuuacugagacuccagagugacuauuugucccauucagagg

SEQ ID NO: 4149540 - RNA, 98 nt, Human
ccuuuaauccaucuccuuguuucguuaaaugcuaaaacugacauuacuuaacauaauuaaaguuuucagauuugaugcugaggaagcugcuuuagagg

SEQ ID NO: 4149541 - RNA, 63 nt, Human
ccuuuacaguagcccuuuugaaaccucuaggcagcaggaaacagagaagggcugcucuguugg

SEQ ID NO: 4149542 - RNA, 76 nt, Human
ccuuuacggcaaucaggaugacuauaaggcugcauuuggagugggcucuuuuuaguacacuugacugcuuacaggg

SEQ ID NO: 4149543 - RNA, 55 nt, Human
ccuuuaggccaucuguuccaccuggcuaugaagguuggccugaauggucaagagg

SEQ ID NO: 4149544 - RNA, 129 nt, Human
ccucaaagaccgagcucaaaccuguucucuuccauguugaucucuucagugugagcuguggaacaaucucaugcacagccaucuaagaaauacaaaauuggaaucacagcagguugaggaauugggggg

SEQ ID NO: 4149545 - RNA, 83 nt, Human
ccucaaccugucuuaauauaucaaugauucuuuuuacuguaguuauagauaggguuaauugguguccugaggcaucauggagg

SEQ ID NO: 4149546 - RNA, 70 nt, Human
ccucaacucuuucaagggcccuaguuuggcuuugggaaagucagaaucagggccucuucaaaggaagagg

SEQ ID NO: 4149547 - RNA, 69 nt, Human
ccucaagauuaaaugcuuuguuuguguuucuaggucuccaagcagcuuugaaguauuuggucuccgggg

SEQ ID NO: 4149548 - RNA, 119 nt, Human
ccucaauuguaagucacauuccaauuccagagaugauaaaaugugguaaacaugugucugaagaguaauucaauauaguguuagcucauuugauccucccauugacuccacaaagcagg

SEQ ID NO: 4149549 - RNA, 80 nt, Human
ccucacaacccugaggcaaguacuuucccuuuuuacagaaagaugaaauaauuugccuaaaaggucacauaguuguuagg

SEQ ID NO: 4149550 - RNA, 104 nt, Human
ccucacaagauuuuuuaguacgaacauuuuacaaaaguugcuuuauaguuccacaaaggcauauaaaugcacuuuugaaauauaucagacagaugguuaggagg

SEQ ID NO: 4149551 - RNA, 59 nt, Human
ccucacacagggagucugaggggauaguguuuaagugagcacucaggcuuccucugagg

SEQ ID NO: 4149552 - RNA, 64 nt, Human
ccucacagccaguaaucuaccccugucccccuuaucccaggccugcauaguuauuggcuggagg

SEQ ID NO: 4149553 - RNA, 56 nt, Human
ccucacagcccuccucuagcacugaucuggcugaacucugcagagcagcugugggg

SEQ ID NO: 4149554 - RNA, 68 nt, Human
ccucacaugccugagguggucugcaaauguuuguaaauggaaugaauggggauucucaggcagguagg

SEQ ID NO: 4149555 - RNA, 83 nt, Human
ccucaccauggacuggaccuggagaauccucuucuugguggcagcagccacagguaaggggcucccaagucccagugaugagg

SEQ ID NO: 4149556 - RNA, 73 nt, Human
ccucaccuggggaucuaggcugauggagcagccacugucuggcagugcuggcucuaggcugagacaggugagg

SEQ ID NO: 4149557 - RNA, 72 nt, Human
ccucaccuugcugagugacauugguaaaucccagucccggaauucaggccguguccuucagggagagugugg

SEQ ID NO: 4149558 - RNA, 111 nt, Human
ccucacgcgucuuauucauuacugcuagucccgauucuuccuauacaggaaguaaacgcauuguccugaugggaggaaugggucauggaaguuuaauuccuuugccucagg

SEQ ID NO: 4149559 - RNA, 58 nt, Human
ccucacuuuccccaguaaggggacccaugggucuuucugcugagugggcaggugcagg

SEQ ID NO: 4149560 - RNA, 62 nt, Human
ccucacuuuguuuucauugaaugccauauguaccaagcacugcagugaacacaaagagaagg

SEQ ID NO: 4149561 - RNA, 84 nt, Human
ccucagaaaggacagagugagggugguauuucucuaucuauucgaaucaguacuuuccuacuccuuacuuuucuuuugcuuagg

SEQ ID NO: 4149562 - RNA, 88 nt, Human
ccucagaauuaccccaccagaggggugggagcugggauauuuauacaccagcugccaucagccuuuggaugagguuguuccuuugagg

SEQ ID NO: 4149563 - RNA, 64 nt, Human
ccucagacuucucuuuaguacuaaaugucauaaugaaaugacauuaaaauggagaauuuugagg

SEQ ID NO: 4149564 - RNA, 74 nt, Human
ccucagaguauauagugcagcacagaaugauaauagccucauugcucucacucugcuugggccauaucuggagg

SEQ ID NO: 4149565 - RNA, 61 nt, Human
ccucagaugcgcgggugccuaucuguauauucauuauacagaacugcacgugcacgcgagg

SEQ ID NO: 4149566 - RNA, 100 nt, Human
ccucagaugggccacgugcccucgugggacccucauugucaccgugagcucuuuccaaggggacgccaccagugggggccugggcaggaggcagcugagg

SEQ ID NO: 4149567 - RNA, 68 nt, Human
ccucagauuccaucuuucagcuuuguuggaucuguuuggauuuagggaaauaagagguggaaaggagg

SEQ ID NO: 4149568 - RNA, 69 nt, Human
ccucagauugcuggaguagaaaacuuaacuuuccaaaacacugaguuguuuucagcccagcauuagagg

SEQ ID NO: 4149569 - RNA, 59 nt, Human
ccucagcauccuggugaaguagacaucacaaucacacaccacagauuuggaagcugagg

SEQ ID NO: 4149570 - RNA, 70 nt, Human
ccucagccagccacuucccaggagccauggagguggagacuugggggguccugggccaagggcugugagg

SEQ ID NO: 4149571 - RNA, 64 nt, Human
ccucaggaacccuggucuccugcucuaccaagucagcacggaguugaggggugcagaccugggg

SEQ ID NO: 4149572 - RNA, 63 nt, Human
ccucaggacagcugggccaccaccaggacucuaguaugguggacaaggugcugucccaugagg

SEQ ID NO: 4149573 - RNA, 89 nt, Human
ccucaggagcugaugauugucucuccucucuccaaguucaaaacugcagccacagggggugagggacaaagccauaucucuuguucagg

SEQ ID NO: 4149574 - RNA, 55 nt, Human
ccucaggauccgcaggugcaguggccgcgcucccacugaacuuguguucuagagg

SEQ ID NO: 4149575 - RNA, 72 nt, Human
ccucagggcuuugcugaccccauucugagucaggccccagccaggucuugggagaugggacagaaagugagg

SEQ ID NO: 4149576 - RNA, 57 nt, Human
ccucaggggugcccacagcugccccacgcaguagcugcuugugggaauccuuggagg

SEQ ID NO: 4149577 - RNA, 57 nt, Human
ccucagucuugaauuagccagaugugccuuucaguccuuggcugagcuggacugagg

SEQ ID NO: 4149578 - RNA, 63 nt, Human
ccucagugcaggaauuuccuuagaaacauuacaaauggcucuaaauucuuuccuggguugagg

SEQ ID NO: 4149579 - RNA, 56 nt, Human
ccucagugcguacugaacagugaccaugugcuggaugcugugugaggcacuagagg

SEQ ID NO: 4149580 - RNA, 109 nt, Human
ccucagugcugguggcuggagguuggaccauguuggggguuucaccaggauuuacuauagucuugcagacagcuuccagccugcucuuagucagcccucccgguucagg

SEQ ID NO: 4149581 - RNA, 70 nt, Human
ccucaguguuagguucucagcuucugagagugcugucaucuguggucuccaaagcuuaggacuacugagg

SEQ ID NO: 4149582 - RNA, 64 nt, Human
ccucaguuuccucauguuaauauggaauauucccuguuucauaguaugaugaggauugacuagg

SEQ ID NO: 4149583 - RNA, 125 nt, Human
ccucauaauuuuauaauucaaugcagcuaaauguugcuuaaaauuuggcuccauaugugucaucuguuaaauaauuaauguagcauuuagcugauuuagaaagaauugaaauauuuuuaugcugg

SEQ ID NO: 4149584 - RNA, 72 nt, Human
ccucauaugguggaagggggaagacagcucuguggagacucuuuuauaagggcacuaaucccuuccaugagg

SEQ ID NO: 4149585 - RNA, 63 nt, Human
ccucauauuugaguuggaauccuggagaucauuuaguccaguucuaucauuuuagagaugagg

SEQ ID NO: 4149586 - RNA, 79 nt, Human
ccucaucguguuguuucuuugcuuguuuuaguuucuucuaugugugcuaagcauuaugguaaagaaguaaaugaugagg

SEQ ID NO: 4149587 - RNA, 100 nt, Human
ccucaugaaugggauuugugcccuuaugaaagaggcccaagggagcuuguuugcccccucugccacaugagggcacagcaagaaggugccauccgugagg

SEQ ID NO: 4149588 - RNA, 89 nt, Human
ccucaugucagcaugugcagugccacagaggugaagcccacugcccuuuuguagucagcucucucuguggccaugcgcacucauucagg

SEQ ID NO: 4149589 - RNA, 69 nt, Human
ccucauguguccuauucuuggagcuaaaggagccugcagcucagaaaugccaguagguacaugugaagg

SEQ ID NO: 4149590 - RNA, 97 nt, Human
ccuccaaaggacucugauaggccaagguuagaccaauugcuguguccagaauggggcacuuuggcuaaccuggguuaucagccuacccuguggcagg

SEQ ID NO: 4149591 - RNA, 90 nt, Human
ccuccaaauguuuagcaauaggagggaaggagguggguggugucaggcugauuuacauauugucuauuguucaagugcuacaugaggagg

SEQ ID NO: 4149592 - RNA, 74 nt, Human
ccucuuacuaagacauugauauuaggcaguguaggggaugucuuuuguugccuacuuauuaaaauuguaagggg

SEQ ID NO: 4149593 - RNA, 76 nt, Human
ccucuuagcuuagauucagcauugcaaacucuguucuguccaagagccaggcaggcaauguugacugguggagcgg

SEQ ID NO: 4149594 - RNA, 78 nt, Human
ccucuucuaggcaugcuuacuccugggcucauaucauucaggcuaagagacugaaagagccccaggggccugcagagg

SEQ ID NO: 4149595 - RNA, 57 nt, Human
ccucuugauugguuggaagcggcacuuacuacguggcggauucugacugugaagagg

SEQ ID NO: 4149596 - RNA, 59 nt, Human
ccucuugcugagguaaccauauccugcagccauggcuggagaagguggcucagcaaagg

SEQ ID NO: 4149597 - RNA, 75 nt, Human
ccucuugggcuuuggucuuagaaucaguauuuauuuauuaggagcugggagaaggacuaaauggccuagaagagg

SEQ ID NO: 4149598 - RNA, 81 nt, Human
ccucuuggguccccagcugaaggagagaaugaaagauaccccuucucauuaucuuggcucauuucuguuggaacuaagugg

SEQ ID NO: 4149599 - RNA, 64 nt, Human
ccucuugucuaggcugccauggugugacagcugaccacuucuggcucuaacuaggcaucagagg

SEQ ID NO: 4149600 - RNA, 81 nt, Human
ccucuuguuucuacauuuguaaccagauucaagucucaccaggccccagagugugaguuacaaagugugaaccaugagagg

SEQ ID NO: 4149601 - RNA, 59 nt, Human
ccucuuucugguuuguggauggcugccuucuagcuauagccucacagggcagagagggg

SEQ ID NO: 4149602 - RNA, 113 nt, Human
ccccuccagccucuuucauuugcaaccuuccauucaguucugcugguucugcucugugucaagagugucagagaauuggggggaaggugaauuaugagguggcuggcaggagg

SEQ ID NO: 4149603 - RNA, 107 nt, Human
ccccucccccacgcccacugccuccccagaacccuccaggcugcagcuccugugugagaucgggccccaguccugcggggacuggauggguggggguggggaagggg

SEQ ID NO: 4149604 - RNA, 65 nt, Human
ccccucccuccugcuccuccugcugugugaugcccagcaguguggaagcugaggggcagcugggg

SEQ ID NO: 4149605 - RNA, 130 nt, Human
ccccucgacgugugggcucauggggugauggcacuggucucgucgcuggcagaagacggucauaccgcgaugcccuugguuuccaggaugaggcugggcacaugccgcacagacaagcccacgcggaugg

SEQ ID NO: 4149606 - RNA, 76 nt, Human
ccccucucugaauccuugcccaggugcauugcauugagccagcacuagcacccagauagcaaggauuagagagggg

SEQ ID NO: 4149607 - RNA, 66 nt, Human
ccccucuuuuuguuguauaagcccuuucuacucccagacaggcugauagaccauaaauaagggggg

SEQ ID NO: 4149608 - RNA, 66 nt, Human
ccccugccauagucaaaucuaaacauguuccagaaguguauauguuuggguauggucauggagggg

SEQ ID NO: 4149609 - RNA, 88 nt, Human
ccccugcugaaacacuaccgccagccagcgggcucaugcaccuuggccuguugcuccuaggggucaccugugcuauucagccaagggg

SEQ ID NO: 4149610 - RNA, 104 nt, Human
ccccugcuuaguaggagcucuggguggcaggugucuccuggugcauaguggggcugggcgugggaggcccugcccagagcuccucgcugguguugcagcagggg

SEQ ID NO: 4149611 - RNA, 59 nt, Human
ccccuggacucuauaaauguuagggguuugccugacagugagcuugggguacuuugggg

SEQ ID NO: 4149612 - RNA, 87 nt, Human
ccccuguucucacacucccagagcuggcagcagcuucuccucaugucugaggagccuagccaugcuugugggagaugauggcauggg

SEQ ID NO: 4149613 - RNA, 77 nt, Human
ccccuucuuguucuguccucacugcaggccuauuaaacacagugaagccacaguggggcggagauuuugguaggagg

SEQ ID NO: 4149614 - RNA, 72 nt, Human
ccccuuguuugugggauuguucuggauacugacuguguuccucuugagaaagaacagccaauaaaagagggg

SEQ ID NO: 4149615 - RNA, 76 nt, Human
ccccuuuccuccugugaggcuuaagcccagggucaccuccucugugaaucuucccuucccucauaggagguggggg

SEQ ID NO: 4149616 - RNA, 123 nt, Human
ccccuuuccuuucgucuggccgugcuggcggggcuggcucugggccucagacacucuggaaucgccaaggucugagcucagggccuggcccccuucccaggcuaacagccgggaggacggggg

SEQ ID NO: 4149617 - RNA, 58 nt, Human
ccccuuucucccgcgucuggcccgccccgcugugugaggcuugcgugggaggaggggg

SEQ ID NO: 4149618 - RNA, 104 nt, Human
cccgaagugugaccuuccaggcccacaggguggcuggcgcugcgcuucuucguggcccgcgacagugcggccaccuucaucggccaguggcgcacugaucuggg

SEQ ID NO: 4149619 - RNA, 69 nt, Human
cccgagagaguucugagcuuuccaaauauggaugcuuuuugcauucccaaagcaucacgaacauuuggg

SEQ ID NO: 4149620 - RNA, 90 nt, Human
cccgagcccuggaguccucuccuagguccugggcauccagacaacaaauggggggcacaggccaugggaggacagcaugagagguuuggg

SEQ ID NO: 4149621 - RNA, 70 nt, Human
cccgagccugguggugucuuccucuggccgccgcguggagugcucggagcagaaggcgccgccggccggg

SEQ ID NO: 4149622 - RNA, 64 nt, Human
cccgcagggccugccugguuccuggaagucuucccagucuucccagccagcccgggcccugggg

SEQ ID NO: 4149623 - RNA, 67 nt, Human
cccgccggcccgcaggugacccagcgcuggaaaaacgccagcgacguggccuggcgagcuggcgcgg

SEQ ID NO: 4149624 - RNA, 100 nt, Human
cccgcgccgguggaguagggggcaggagagaccugcugccucuggcgccaaccuuuccauucagugcgucuuuccugccuagcccacguucccgggccgg

SEQ ID NO: 4149625 - RNA, 75 nt, Human
cccgcuccccuccaccgggcgagagaaccggggcgcgccccucuccagcucuccccgguacgagcggccgcgugg

SEQ ID NO: 4149626 - RNA, 77 nt, Human
cccggaacaaacacggguagauggcaccaccugguggccgcacugccacagagccaucccagccugugguuccaggg

SEQ ID NO: 4149627 - RNA, 69 nt, Human
cccggagucccggguccugcuuccugcucagguuuuggucuggaaucuucaggguccuggggcuccggg

SEQ ID NO: 4149628 - RNA, 70 nt, Human
cccggcccccgccuggcccauugcagggcagcacccaguuguuaucguggaggcccaggcggcagccggg

SEQ ID NO: 4149629 - RNA, 60 nt, Human
cccggccuggaauccugcaugcuccagcuccugcugugucugccugggauccauucuggg

SEQ ID NO: 4149630 - RNA, 56 nt, Human
cccgggaggaggaaguugcagugagcugagauggcacaacugcacuccugccuggg

SEQ ID NO: 4149631 - RNA, 77 nt, Human
cccgggagugccugggggaggugcaaggccaccugcugagcauggguucuggagggccucccuuggugucucccggg

SEQ ID NO: 4149632 - RNA, 103 nt, Human
cccgggccacgugcguccccgguucgcgggcagcucugacccucuccaggccagccuggaccgcagggaugcccggcacuggcuggagacuguggcgcccggg

SEQ ID NO: 4149633 - RNA, 107 nt, Human
cccgggcccgcccugcccgccgugcgccucagccucgugcgccucggggagccggacagcgccggggccggggagccgcccgccacgcccgcggggcugggcucggg

SEQ ID NO: 4149634 - RNA, 58 nt, Human
cccgggcuacagguagcccaggccacccccagagggcuguggcugccucuggcccugg

SEQ ID NO: 4149635 - RNA, 129 nt, Human
cccgguaauuaguguaaacccuuugucugccuuugauacccacagcuucuccccgcugcggcuuccuccgccuggagcgcgggcggggagggccuguggggagggcggccagaccccugauccccgcgg

SEQ ID NO: 4149636 - RNA, 57 nt, Human
cccgguagcuuaggaugcggcccccuugguuagggagggaucugcuaggcaaugggg

SEQ ID NO: 4149637 - RNA, 102 nt, Human
cccgguaucuuauuaauucugcauguuaugaaauaaauauagaucagacaauugcagugaugguucuaucuuuuuauuaugcauuugguucuuggugccggg

SEQ ID NO: 4149638 - RNA, 86 nt, Human
cccggugugucugcagggcaggcuggcccccgggggcugcaaccgcaguccucaguaaggaucgucagcucugacaggcgacuggg

SEQ ID NO: 4149639 - RNA, 74 nt, Human
cccgguuuuacagagcaggcuacuggggcuuggaugggucaagggaccuacuuaaguucacagagccagcuggg

SEQ ID NO: 4149640 - RNA, 79 nt, Human
cccgucccuuccuggucagguaacugggcugaagggcacucacccuugggcuggggacucuguccuucuggagagcggg

SEQ ID NO: 4149641 - RNA, 62 nt, Human
cccgugaguuacagagugagauuuuaaaagguaaaaugaaauuccauuaugauaauuucggg

SEQ ID NO: 4149642 - RNA, 82 nt, Human
cccgugaucccugagguuucugcauucugacccuaugauuuaaguccccagggacuucagcugcaguuauguuuagggaggg

SEQ ID NO: 4149643 - RNA, 63 nt, Human
cccguuccucccugaguggggacagcuucagcaucugcagcauccacucacugggagaggggg

SEQ ID NO: 4149644 - RNA, 69 nt, Human
cccuaaaccacccaccucacagcauagugcagagauguccuggcagugcuucuggugugugggaugggg

SEQ ID NO: 4149645 - RNA, 113 nt, Human
cccuaaauguacuuguugaagcccuaacucaaauaccucuccaugugacuuuauuuggaaacagguuguuacagagguaauuaguuaagaugaggucauaacggaguagaggg

SEQ ID NO: 4149646 - RNA, 74 nt, Human
cccuaacuagcgguuugacuuugagcacaucacugccuccuccgugccucaguuuccucuucuguugaaugggg

SEQ ID NO: 4149647 - RNA, 63 nt, Human
cccuaacuuuauuugcuaaguagagccuagcuuagguaaaucuaaugcaauuagaaauuaggg

SEQ ID NO: 4149648 - RNA, 61 nt, Human
cccuaaggcagcccagucuguguauaauuggugcggcacagaccccaggagggccucaggg

SEQ ID NO: 4149649 - RNA, 66 nt, Human
cccuaaguccugugcccauaucuuagcuuccagauauaauguggcugugaaguagcaggggcaggg

SEQ ID NO: 4149650 - RNA, 126 nt, Human
cccuacagcuuacuggcacuuggauuuucuuugaagauggcaaauuuagaaacuuauuuucucauaguucuggaguuugagcacuucaauaucaaggugccagccaauucagaaucugcuaaaggg

SEQ ID NO: 4149651 - RNA, 78 nt, Human
cccuaccuccuuugggucugcccacuacucuccauucccaaggauuguuggcugagagugggacagugggagggaggg

SEQ ID NO: 4149652 - RNA, 130 nt, Human
cccuaccuucugagaaucauuugcauguaauccucucuuaugaaaauuucuacaccaguuaggguucuugguugaaaauaacagaaauauuuccaggugaaggaaagugcauucaaaucuaugguacagg

SEQ ID NO: 4149653 - RNA, 59 nt, Human
cccuacgugauagcuauuaccaucuuuauuucacaaguaaggaagcugagauguagagg

SEQ ID NO: 4149654 - RNA, 76 nt, Human
cccuacuaucaagguuucauggaaaaucuaggcaaggcagaacuuccucagaaggacaagagacaaagaagugggg

SEQ ID NO: 4149655 - RNA, 70 nt, Human
cccuacuccagcucuuaacugcggaagcuuucauugauuugauuuguuuuuagcaaaggagggagaaggg

SEQ ID NO: 4149656 - RNA, 90 nt, Human
cccuacuuuuguucuguuuaguuuugacaguaagucagagacuuggucaauaaaaugauugugcuuacuguuuacugucgaaccuuaggg

SEQ ID NO: 4149657 - RNA, 77 nt, Human
cccuagagugugugucuccacugugcuauuuuucagaagaauaugaggaacaguacucggaggccagacuugugggg

SEQ ID NO: 4149658 - RNA, 92 nt, Human
cccuagcugucuucggcggagggcggggccgcuaaucacuuuccagaguggggccgcgguccugcccucgcuugugagggcccaggcugggg

SEQ ID NO: 4149659 - RNA, 57 nt, Human
cccuaggagcuucagagagaaccuggcccugccagcaccuugauuuggggcuucggg

SEQ ID NO: 4149660 - RNA, 64 nt, Human
cccuaggcugggcucuuggcuuuauuacccaugcacauugaaaguucagcgcaaaagucaaggg

SEQ ID NO: 4149661 - RNA, 71 nt, Human
cccuaguucaauguacuuuuccagaaggcuuaaguuccuugucuaugucauaagauucauuguaauuaggg

SEQ ID NO: 4149662 - RNA, 100 nt, Human
cccuauccccuccccagguggcuucuuggagacauacgaggcucugugugacuacaauggcuucccuuuccgagaggagauucagugggugaggguaggg

SEQ ID NO: 4149663 - RNA, 59 nt, Human
ccuguauuuuaauucguguuuucuugggaggagagagggcauggaguguagguggaagg

SEQ ID NO: 4149664 - RNA, 82 nt, Human
ccugucacagaccaggaaaaccacuuuugauaccugaaagucaaaguuacuugugguuuucuuugguugcacugauuaaagg

SEQ ID NO: 4149665 - RNA, 130 nt, Human
ccugucagaucagcugugguauuagauucucaugggagcucaaacccaguggugaaccaugcaugcaagagacauggguugugugcuccucaugagacucuacuaacuaaugccugaugaucugaagugg

SEQ ID NO: 4149666 - RNA, 69 nt, Human
ccugucaugaagccugcuggaccaagcucaugcuguagccaguacaagugaaaucagaggcuuugcagg

SEQ ID NO: 4149667 - RNA, 55 nt, Human
ccuguccagaauuuuugcaaccggaaagagggcaaagaacaucggagugggcggg

SEQ ID NO: 4149668 - RNA, 77 nt, Human
ccuguccaucauuuugguuguugcuuuccuuuuccuggcagacagggccuaaaguuucaauagaggaaguggggagg

SEQ ID NO: 4149669 - RNA, 78 nt, Human
ccuguccuggcccagcgaggccaccuacaggugagacguccccuguagacgggguuccuggugucaggagguaucagg

SEQ ID NO: 4149670 - RNA, 96 nt, Human
ccugucucucuuguagaguagucaaacuguaguguccauuuuuguauuuacuagggugaugcauuggaaaacuauggcucaacaaaagaguucagg

SEQ ID NO: 4149671 - RNA, 94 nt, Human
ccugucugagauugugcagggaagugcagggccugcccagcaggauuuccguucugugugugcugcccucaaaaugucuacacacucagauggg

SEQ ID NO: 4149672 - RNA, 58 nt, Human
ccugugaagccaggaaaaggacccuaccaguggguccugagagccuuggcuucagagg

SEQ ID NO: 4149673 - RNA, 59 nt, Human
ccugugacuuggcaaaccuccaugaggaaggcucaagggauuggaagagcagucacagg

SEQ ID NO: 4149674 - RNA, 80 nt, Human
ccugugagcuggcuuuucagaugcugcggaguaauucccucuaacccacacugaagcuccaggaucugaaaguucgcggg

SEQ ID NO: 4149675 - RNA, 123 nt, Human
ccugugauucuuggcaugcugcucaccacugucugacccuggcccauugcugugccucugagccaggcggcgccugcccaugggcuagagagagcagaguggaggggcaugacccugcacagg

SEQ ID NO: 4149676 - RNA, 90 nt, Human
ccugugcaggagucaguugcagucaggacacagcaugaacaugaggauccccgcucagcuccuggccuuccugcugcucugucucccagg

SEQ ID NO: 4149677 - RNA, 122 nt, Human
ccugugcaugauccgagcuaaggagugggacccugcuggcuugacagaggccugggagaagcagggcuuagcuccuucugugcaccagccauccaucuucugugcuuuggaucagguaaggg

SEQ ID NO: 4149678 - RNA, 68 nt, Human
ccugugcauugaguuugcacccugcagagaaugaacacaggaguguaauaaagugacucagagccagg

SEQ ID NO: 4149679 - RNA, 58 nt, Human
ccugugccagccccuucugcuguucuccucccugcagcacggguacagccuggccagg

SEQ ID NO: 4149680 - RNA, 61 nt, Human
ccugugcuggacccuggaaggugguaagcagcuugccugcccuuucugauccagucagagg

SEQ ID NO: 4149681 - RNA, 55 nt, Human
ccugugcugggaaaacacggagguugcuaagcccuuugugugucacgugcacagg

SEQ ID NO: 4149682 - RNA, 61 nt, Human
ccgggccgccccgcguuucuuagauguccgugugcuauugagaagccgccgggcagccugg

SEQ ID NO: 4149683 - RNA, 69 nt, Human
ccgggcggugcagggcucacucggcuggcgucccgggggaugggccaccaggagucuccgcuggcccgg

SEQ ID NO: 4149684 - RNA, 70 nt, Human
ccgggcguuggcauuugccuguaguccuagcuauucgggaggcugagggaggagaauugcuugaacccgg

SEQ ID NO: 4149685 - RNA, 95 nt, Human
ccgggcucaaucaauucuuccaccucagccuccagaguagcuugcauagucccagauacuugggaggcugagguaggaggauugauugagccagg

SEQ ID NO: 4149686 - RNA, 69 nt, Human
ccgggcugucugcugugcacugagcagaaacaaguuuuuaauucucuccuugacaggcaggcagacugg

SEQ ID NO: 4149687 - RNA, 77 nt, Human
ccggggaggcugaggcaggaguucaggcugcgggacaccccugcagccuggcuucgcgccuccguuucugcaucugg

SEQ ID NO: 4149688 - RNA, 61 nt, Human
ccgggggcaggguaaaccgagguaaguagcucuguguuacugccugcuacuaugcccacgg

SEQ ID NO: 4149689 - RNA, 65 nt, Human
ccggggguugucagguuugguacgccaagcuggucggcugguuccacuaaccugagagccuuugg

SEQ ID NO: 4149690 - RNA, 90 nt, Human
ccgggucgggagccccucguggccaggcguccgcgcggcucaagaccgagguccgccacgcugggccgcucgugggcggcucucacccgg

SEQ ID NO: 4149691 - RNA, 63 nt, Human
ccgggucugcuccaccugcagcccuucggucgcgccugggcuucgcgguggagcgggacgcgg

SEQ ID NO: 4149692 - RNA, 56 nt, Human
ccggguugagguucccauagaugguuuuuguccguuucuuggucuucccgaccugg

SEQ ID NO: 4149693 - RNA, 115 nt, Human
ccggguuugcuuucuucucagccugcgaggcuccucauucaguaugcuguguugugugguuagcuguuccauagucauacugaaaguggcuucucagaugcugcuugaguccugg

SEQ ID NO: 4149694 - RNA, 68 nt, Human
ccggucaaguugacacuuuaaaacugaucaucagagcagcucucaagugugaguuuuaaagucacugg

SEQ ID NO: 4149695 - RNA, 129 nt, Human
ccggugagggccaaggggagcuggaagggucucucuuguuagcccaggaagcccagggaccaguggguccccccgaaagccccugugcuugcagcaguguccaccccagugucuaacaguccucccggg

SEQ ID NO: 4149696 - RNA, 95 nt, Human
ccguaaucagguaaaaaaggaucacagaugaugagcaguuccucccaagacacacaggcuguaggaacaggccucguuuucuauuuucaccgcgg

SEQ ID NO: 4149697 - RNA, 84 nt, Human
ccguacucuccugaggggacaggacucauccaggcucucaucaagucugcaacuugugauuugucucuuccaagcagaguuugg

SEQ ID NO: 4149698 - RNA, 98 nt, Human
ccgucauucauugaacagauguuuuaugcuucagaugaggguuuuuaguaccugagaccaacauugacuaauagaacuuuuuguaaugauugaaaugg

SEQ ID NO: 4149699 - RNA, 83 nt, Human
ccgucguaccaguguucuggaauccuaugagagggacaaacaaucagaacccaguagcaguauuccggaauacuuuuugaggg

SEQ ID NO: 4149700 - RNA, 77 nt, Human
ccgucuucaccuccuuucuggggcuucagcaccugcaaggaugcuuaggcuggagaaacaggaggaggaagaggagg

SEQ ID NO: 4149701 - RNA, 71 nt, Human
ccgugaccucaguacugcaguuugguuggugucuuaaccaagcucaauggucugaguauucaggguuacgg

SEQ ID NO: 4149702 - RNA, 82 nt, Human
ccgugauggggggggaauggaggaaaagucuguuuaugauuaugaauugaacuuugaaccauuccuauuguuccugccaagg

SEQ ID NO: 4149703 - RNA, 71 nt, Human
ccgugcggccucggggcccggcucucagcgcccuccagcagagccccgcggccagccucgggccgcaaugg

SEQ ID NO: 4149704 - RNA, 73 nt, Human
ccgugcgugccucgcgugaaagcuccgccuuccgucagacggacgugggucgggacuccgccucgcacguggg

SEQ ID NO: 4149705 - RNA, 62 nt, Human
ccguggcgagcaugagucacucugggccucaucugaacccuaucuuggcaucuugcuugugg

SEQ ID NO: 4149706 - RNA, 72 nt, Human
ccgugguuacuggcugggccugagggcugugcgccaucugggcaagguucagggcuaccaguggguggacgg

SEQ ID NO: 4149707 - RNA, 83 nt, Human
ccguguaauaaaugacuguugguguugauuaaauagugagacucagccgaggcacuuaaucaaucuccgaagccguuuacagg

SEQ ID NO: 4149708 - RNA, 86 nt, Human
ccguguccucggaucccgcgggcccgcauugccaggcgcugcgcccagcgcugggccgaccugggcugcagguacaggggucacgg

SEQ ID NO: 4149709 - RNA, 71 nt, Human
ccgugucuuguaugcugaugacaccaccuaagucucucucucaggauaaugguguugcauacggagcuugg

SEQ ID NO: 4149710 - RNA, 63 nt, Human
ccgugugcauauguguguauacaaacacgcaugcaugccuggauggacauacguaugcacagg

SEQ ID NO: 4149711 - RNA, 123 nt, Human
ccguguuugcugugccuucgggaucguuugugcuauucuagcugcuguuucacaauaaaggcgaacagggugaaagcaguuuagauaggcaaaggaaaagaaucaagggacagacuggcaugg

SEQ ID NO: 4149712 - RNA, 129 nt, Human
ccguuaauuauaucacaguuaauuguuggaauguaugggaggcagcagggcaccuaauuuuguuuuguuuuguuuuaagacagggucuugcucuguugcccaggcuagaguacaguggugugaucaugg

SEQ ID NO: 4149713 - RNA, 62 nt, Human
ccguuauuuucuucuuaaaaaaaccuuuuuaaaggaaggugugaagagaugggaagagaugg

SEQ ID NO: 4149714 - RNA, 85 nt, Human
ccguucguggcccaccgugguggucaccaaauugagggcuuccuggaaggaccuccucacggugcccauccacugggucaugugg

SEQ ID NO: 4149715 - RNA, 61 nt, Human
ccguugacagcugccacaaaggccaugaugagagucaauggagaugaugacaguguugcgg

SEQ ID NO: 4149716 - RNA, 70 nt, Human
ccuaaacccccuguugggaaucaccuuuauuugcuguugcgguuaaagugaucuugucagguuguuuagg

SEQ ID NO: 4149717 - RNA, 97 nt, Human
ccuaaagcaaauccuugaaagauucuaauuuuaaguugaacauguacauguaaucauuaacauuucucuuagaguuggacuuugcuuuugcugcagg

SEQ ID NO: 4149718 - RNA, 108 nt, Human
ccuaaauggucucagaaccaugaucuugucuuuauuucauauuccaacuuaagugguguaauaugcuuaacaauggguggaauaaaucaguucugagaagcacuaagg

SEQ ID NO: 4149719 - RNA, 88 nt, Human
ccuaacaagccagaugguauaguagggagagcacuggucugagaguuaaagacccaguucugccacuacuuuacccuaggaucuuggg

SEQ ID NO: 4149720 - RNA, 78 nt, Human
ccuaacaguucguucuucauggguucuuuuaggauauguugaagccgaccucuuccuccccaaagagagcgugucagg

SEQ ID NO: 4149721 - RNA, 94 nt, Human
ccuaacauuuaacugcagugaaagggaaguuugguucaagacagucugaggaaucucuccauacuugccuuuggccucugcaguugacucuggg

SEQ ID NO: 4149722 - RNA, 59 nt, Human
ccuaaccugucucccauuucuccagccugggcggaggcagggaaaggagagacaguagg

SEQ ID NO: 4149723 - RNA, 57 nt, Human
ccuaagaccucaaucaauaguguucucaaaggagaaagcaauguuagaggccuuagg

SEQ ID NO: 4149724 - RNA, 102 nt, Human
ccuaagccuagcgcccucaccuguucaacagcaauaaucaggccugucuugccuaccucacuagauuauugcaagcagugaagggacgugaacaggcucugg

SEQ ID NO: 4149725 - RNA, 73 nt, Human
ccuaagcgcuuggcacugugccuggcacauuuacuauuugugaauuggaagcuagugaccgaguuaacaaagg

SEQ ID NO: 4149726 - RNA, 67 nt, Human
ccuaaguugagaagccaguagcugagagcuaucucuccccaauucuuacugguguuucagucuuggg

SEQ ID NO: 4149727 - RNA, 68 nt, Human
ccuaauauguggaugaauaaagugcagacauacuaucuugccuuugcuuuuguucuucaauaaauagg

SEQ ID NO: 4149728 - RNA, 67 nt, Human
ccuaaucacagaaggcagucuucuagugaauucaauuaacuggaaaaugccuugugugaguuaaugg

SEQ ID NO: 4149729 - RNA, 58 nt, Human
ccuaaucucuugagugcuuaguuacauuacaugucuuaagcacuguuaguagaaaagg

SEQ ID NO: 4149730 - RNA, 74 nt, Human
ccuaaugcaguagguauuaaagaaguaaauccuauuccuuaauucugcuucucacuucuugccucugcauaagg

SEQ ID NO: 4149731 - RNA, 80 nt, Human
ccuaauucugccuucuuggccacuucccugagagcacaucugacacacuaucauggcuucaaggaagcaggcagaauggg

SEQ ID NO: 4149732 - RNA, 87 nt, Human
ccuacaauggaucauuagaaugggacagauuccuggaagaguucuagaacauccaguaucaaaguccuaguccaaucucccuguagg

SEQ ID NO: 4149733 - RNA, 69 nt, Human
ccuacaauuuaauuucugaagccagaaauauaaauggauuuuuauaauggcuucugaguauuagguggg

SEQ ID NO: 4149734 - RNA, 55 nt, Human
ccuacagacaaaccagugacuagauacauuagcucuuucuggaguugucugaagg

SEQ ID NO: 4149735 - RNA, 68 nt, Human
ccuccaacaauuauaaauauuuucuagggguaacgauaugugcccuugugacuguacuuguguggagg

SEQ ID NO: 4149736 - RNA, 57 nt, Human
ccuccacucuggccucucagguucagacaccauucaggcagcacacagcaguggagg

SEQ ID NO: 4149737 - RNA, 83 nt, Human
ccuccacuuuuccccucuuugguuaaucacacagauucugcugagaauugugccuuuacacaaagauugaacagccuuggagg

SEQ ID NO: 4149738 - RNA, 78 nt, Human
ccuccagcucuggagggggcggccccugugggcacagcccagcguguguuccuggggaccugccuucccugagcgagg

SEQ ID NO: 4149739 - RNA, 58 nt, Human
ccuuccucacccucucugcuucccacugggggagcccuggcaugagaugugagggagg

SEQ ID NO: 4149740 - RNA, 64 nt, Human
ccuuccucagcaggucuguguaccagcuucguacaaggcuggugcaaauccauccuguugaagg

SEQ ID NO: 4149741 - RNA, 63 nt, Human
ccuuccucuagccuaguaaugccuguucauccuucagcucagguaucacuuccuuagggaagg

SEQ ID NO: 4149742 - RNA, 78 nt, Human
ccuuccucuugggcccuggaaaugaggcaugugcgcgccuccuccgugcacccagggccaggcguugaagacggaagg

SEQ ID NO: 4149743 - RNA, 60 nt, Human
ccuuccugcuuaacauauggucaaguugggaaccaauugcuaaguuaaagcgggagcagg

SEQ ID NO: 4149744 - RNA, 129 nt, Human
ccuuccuggugggacucuggucuuugcugccagaacagcucaucuggcccagaguguaucccuucuguuggcacaggugggguucuuguguuagcaacagccaccgagaccaccagccaccuggaagag

SEQ ID NO: 4149745 - RNA, 67 nt, Human
ccuuccuuccugucuuccuuacugaucuugggaaaggccugccuagugcgggaggauggagguaggg

SEQ ID NO: 4149746 - RNA, 69 nt, Human
ccuucgccccggaggcugacggcaccaucuucuucccagagaggaggccgucacccuuccugaagaggg

SEQ ID NO: 4149747 - RNA, 85 nt, Human
ccuucguguggagauguuucugcauugccuuaaauacagccuaugucugcuuuugagaauuaauagcaggaaaaauugucgaagg

SEQ ID NO: 4149748 - RNA, 111 nt, Human
ccuucuagguguucaucauccugaggacuggcaguggcagcagaaagagggcuccucuuucccaguagcucucccagaauucaaggauugacucaaacuagcccaguuagg

SEQ ID NO: 4149749 - RNA, 57 nt, Human
ccuucuauuguacugaggaauaaagcuuuaauuuagagcaugucucagucaacaagg

SEQ ID NO: 4149750 - RNA, 68 nt, Human
ccuucuccccuaaauccccaguguucucaguuuccagggcacaggagaaggaucuggcugggaggagg

SEQ ID NO: 4149751 - RNA, 56 nt, Human
ccuucuccuuucuuuuaaaaugucagguuaagucugauaaacuggagagguggagg

SEQ ID NO: 4149752 - RNA, 58 nt, Human
ccuucucuaggccuuauaggucuucuugcucaagagaagauuaaaaucugugagaagg

SEQ ID NO: 4149753 - RNA, 74 nt, Human
ccuucucuuuaauccuugauacugguacuagugcucuccacaugcaaugcaccuuggcagggauucagaugggg

SEQ ID NO: 4149754 - RNA, 62 nt, Human
ccuucugaauuuaaaauguuuaaaaagguuuaaaagccuuuuaaacugcagaauuuagaagg

SEQ ID NO: 4149755 - RNA, 62 nt, Human
ccuucugggaggcuggcugucauaacuccuuauguuugcacagcauuccacgguuuauaagg

SEQ ID NO: 4149756 - RNA, 62 nt, Human
ccuucugucucccucauauugaugcaugacuggugugaauggguagagagagagaaaggagg

SEQ ID NO: 4149757 - RNA, 58 nt, Human
ccuucuucgugaucucaguugauuuuugcaucugcauuuaucuagauuauugagaagg

SEQ ID NO: 4149758 - RNA, 76 nt, Human
ccuucuucuggccauccucccuugacuccugcuuuuccagugggagauggagcugggagguggugguagaagaagg

SEQ ID NO: 4149759 - RNA, 62 nt, Human
ccuucuuugaaauacugagaguuacacaaugaaugugauaucucuuucauuuuagagucagg

SEQ ID NO: 4149760 - RNA, 57 nt, Human
ccuucuuuggcuuggauaugguuggcuacucguugccaaucacaugucaagagcagg

SEQ ID NO: 4149761 - RNA, 91 nt, Human
ccuucuuuuccacucuuuuccucucuuuccuggcuggccucuaggucaggccugaggaauugaggggguaagucaggaucccagcaggagg

SEQ ID NO: 4149762 - RNA, 101 nt, Human
ccuucuuuuccucuaccaguaaucuuaacacuggcgggauugcuaauaacagcaauggaaugaauagcagggcccacuaggggagauuacugagaagaagg

SEQ ID NO: 4149763 - RNA, 72 nt, Human
ccuugaaacaggccaggcucccaccuugcuugugcaacagccacuccaggggccagaagccuggccucaggg

SEQ ID NO: 4149764 - RNA, 60 nt, Human
ccuugaaaugagaaaaaguuggagcuuaaguaagugaauugaagcuauuuccauucaagg

SEQ ID NO: 4149765 - RNA, 64 nt, Human
ccuugaagaagaguuggugaauuaaggaaauguucucaaugagucacuaucacuuucucugagg

SEQ ID NO: 4149766 - RNA, 118 nt, Human
ccuugacagcuuugagcauaaauguagguauuuaggaagaugaguaucaacuugcaacucucacuuuuugcagacgcauuguuccuaaacaucccuaaugcugaucauagcuccaggg

SEQ ID NO: 4149767 - RNA, 67 nt, Human
ccuugacucaagugcaagcccugcaugacacggugcaugcaggcuccaggugcacauaugagcgugg

SEQ ID NO: 4149768 - RNA, 94 nt, Human
ccuugagagguugcugaaagcccugacuggcuccagaaaugggcaguguuaccucuucaguggguuucaguagcuguaaacuugaaacuuaagg

SEQ ID NO: 4149769 - RNA, 60 nt, Human
ccuugaggaaccugagucugaucauuuuuguguugggaaaugacauaugguuucugaagg

SEQ ID NO: 4149770 - RNA, 80 nt, Human
ccuugaguuugcaaccuuaauagguuaacuguggugaggaaaaaacacauagacagcuagggcugcagggaccucagagg

SEQ ID NO: 4149771 - RNA, 66 nt, Human
ccuugauccuugcucagccacuacuccugauaugcccucaagaagugcauaguaauggagucaagg

SEQ ID NO: 4149772 - RNA, 68 nt, Human
ccuugauuagauauuuuuauugcaaaaaguaaaaaauauuuuuauugcaauaaaguguguauuugagg

SEQ ID NO: 4149773 - RNA, 55 nt, Human
ccuugcagaccucccauggcugccugcucuguagggccucaggagggcugcaugg

SEQ ID NO: 4149774 - RNA, 65 nt, Human
ccuugcaggggaacaggcagugaguauauaaauuaauaaaacauuguugucaccucuguacuagg

SEQ ID NO: 4149775 - RNA, 55 nt, Human
ccuugcaguuguuacuguagccucucugagccucaguuuccucaacugcaaaagg

SEQ ID NO: 4149776 - RNA, 97 nt, Human
ccuugcccacgcccaccggccaugccccaggccucaccugcccaccuagaaccucugaguaggauaggguggggcuuuuagcaggcagguuacaagg

SEQ ID NO: 4149777 - RNA, 87 nt, Human
ccuugccccuugccccuuuccauggcucuccuagggugcggguugcggggcuuugggcagcuuggacuggggagacuaggugcaagg

SEQ ID NO: 4149778 - RNA, 70 nt, Human
ccuugcucggucaugcuguccccagccuagcucagugggaggggagugggacaggugauucagagcaggg

SEQ ID NO: 4149779 - RNA, 130 nt, Human
ccuugcucuuguaggagcucccugggccccuggguuccccacucugggccaccacaauccaugcagcaugcagguuuguuccguuucccagauggagaggcugagggcuuaccacaggguuccgucaagg

SEQ ID NO: 4149780 - RNA, 83 nt, Human
ccuugcuuucaaaggccagcuuguagggcugguggaaacaaccaaauacccaucgccauauagaaaggcccaagagagcaagg

SEQ ID NO: 4149781 - RNA, 68 nt, Human
ccuuggaaagagguucuaauuuaacuauccugguaaacaagaaggaaauaaaggauuucugaccaagg

SEQ ID NO: 4149782 - RNA, 96 nt, Human
ccuuggaaccuccuaugugcugcaucuuuggauggaaauuggagucccagagacaaaugaggcuccacccugcuuccagaagcucagaguccaggg

SEQ ID NO: 4149783 - RNA, 99 nt, Human
ccuuggacaaauucuuaccucaguuugcauaucugugaaauggagauacuauugguacucauuuuauagaguuguguagauuaagugauuaauccaugg

SEQ ID NO: 4149784 - RNA, 59 nt, Human
ccuuggagaagacagugccaggaagaggaguugcuuggcacaugacauucuccauaagg

SEQ ID NO: 4149785 - RNA, 79 nt, Human
ccuuggcagggggagcuccucaaccccgaaccuugcacagcugagugggagaaaccagaggggucuuuuguugucaggg

SEQ ID NO: 4149786 - RNA, 64 nt, Human
ccuuggcgaaucagaccacagcaggacuuuauuaauuaaauugcuguaggcugauugcugaagg

SEQ ID NO: 4149787 - RNA, 63 nt, Human
ccuuggcuauaaucucugaauguaucauacuccuauacauuucaugaguuauuauaguggggg

SEQ ID NO: 4149788 - RNA, 55 nt, Human
ccuuggcugguaagccaaaugaaagcaggguuuucauagaggaagccagucuugg

SEQ ID NO: 4149789 - RNA, 69 nt, Human
ccuugggccugccccaggcuucagcucauacaaaaggugcaaggguccauauggggcaggagccugagg

SEQ ID NO: 4149790 - RNA, 83 nt, Human
ccuuggggaaagugagccuauaaacaaguccacacugaaauauuagugauggguaacuguuuagggagcucccucucccaggg

SEQ ID NO: 4149791 - RNA, 58 nt, Human
ccuuggggaaauagagacccuuguaagaaugaggucuuguauuugauuccuuccaagg

SEQ ID NO: 4149792 - RNA, 70 nt, Human
ccuuggggccuccccaagcagcagggauucaccagggaaccccgcucaggcugggugaggcucuggaagg

SEQ ID NO: 4149793 - RNA, 59 nt, Human
ccuugggucuaggccagggaguauucaaggauguucuccagguaugccugaauucaagg

SEQ ID NO: 4149794 - RNA, 71 nt, Human
ccuuguaguacucagcauuaaaggaaauccuguggaaaacgagguccugaugaucucugagagccccaggg

SEQ ID NO: 4149795 - RNA, 68 nt, Human
ccuugucccuggaaguguuucaagcaaaggauaaaugcuccucacucaggacagauuccagagaaagg

SEQ ID NO: 4149796 - RNA, 63 nt, Human
ccuugugacuaacuuacaccauuacacauacuuugcuucugaugguuaaguucugucaaaugg

SEQ ID NO: 4149797 - RNA, 102 nt, Human
ccuugugauagagaagaucacuaucuuauguucugaugacucuccaaagaggguaggauucuguuuaaguagucucagggccugguuaucuuuauuucaagg

SEQ ID NO: 4149798 - RNA, 56 nt, Human
ccuugugcucaguagccugagaaggacgguaacaggucaaggcugcugggccaggg

SEQ ID NO: 4149799 - RNA, 67 nt, Human
ccuuguggcaucggagagauagaggggccaguucaucggcuucucccuucuucugauugagaugggg

SEQ ID NO: 4149800 - RNA, 73 nt, Human
ccuuguuuucagugguaguugcuaaucuaauguguucauuacugagcuuguagcugcaucacuccaaauucgg

SEQ ID NO: 4149801 - RNA, 63 nt, Human
ccuuguuuuuaugaacauccaggaugcccaggagagugucccugguuacguauaaagaugagg

SEQ ID NO: 4149802 - RNA, 73 nt, Human
ccuuuaaaugcaaggcacauuccuuuucuuagaacagagaucaggaaacuuuuugugugauuuuguguaaagg

SEQ ID NO: 4149803 - RNA, 86 nt, Human
ccuuuaaugguugcacacaguuagagguagaguccagcccacagcuucccagguaagggcucuauccuacuguuuacccaccaagg

SEQ ID NO: 4149804 - RNA, 68 nt, Human
ccuuuacuucuuuuuuauauacuguacuuccuuuuaaucgugcagaauauuauggaaaaaguacaagg

SEQ ID NO: 4149805 - RNA, 67 nt, Human
ccuuuagcugugacguaucucuauggaagaauguggccuuucucuaaagauauuuauggcaaaacgg

SEQ ID NO: 4149806 - RNA, 76 nt, Human
ccuuuaguucccaugagagggugguggugacugauuucauuagauacagcagcccaccuucuucugaggcugaggg

SEQ ID NO: 4149807 - RNA, 62 nt, Human
ccuuuaguugcuuuaguugagcugcuccucuagcagcagcuccagcccaggcagcuccuugg

SEQ ID NO: 4149808 - RNA, 74 nt, Human
ccuuuauguuccuccucugaagugaauuuuaugccuguggaaagugccagaauaggaggccaggaaaaugaagg

SEQ ID NO: 4149809 - RNA, 60 nt, Human
ccuuuauuuucuguagcuuuucuaaacuccacaaggagaaauaggcacuggaauuaaggg

SEQ ID NO: 4149810 - RNA, 78 nt, Human
cuacccgcaccggggaccccagucugaaauccuggcauuuauuuaaggaugcagcugguaucccauggauucgaaugg

SEQ ID NO: 4149811 - RNA, 57 nt, Human
cuaugaugucccuaggcagguaguuggcaauugauagugaaagaugggauaucauag

SEQ ID NO: 4149812 - RNA, 76 nt, Human
cuaugcaccccuaguguaugcacaaugaucauaggcaguacauagcuacagcauuguucaacacugacuugcauag

SEQ ID NO: 4149813 - RNA, 60 nt, Human
cuaugccauuagcuucugaagcccuugaaucaagauuuaagaggaguagcuguggcacag

SEQ ID NO: 4149814 - RNA, 130 nt, Human
cuaugcccucaguuugucccuuucugggggcccugccgucugggcaucagacugcgggcgggucuaccaucagccaagcgcaggggaugcauucuccgagacgguucccagguggugcugugagggcagg

SEQ ID NO: 4149815 - RNA, 63 nt, Human
cuaugccuggaccccaucuaccauuauuuaauuuauuugguauaggaugagggucaggcauag

SEQ ID NO: 4149816 - RNA, 64 nt, Human
cuaugcuuugauuuccucagcugugaguugugaacaaugcuuguuguugagaguuagaacaugg

SEQ ID NO: 4149817 - RNA, 55 nt, Human
cuaugggauguggucuaaaugcuuugccugggcaucagagguugccacucccugg

SEQ ID NO: 4149818 - RNA, 85 nt, Human
cuaugguauucuugaugcaagguauguuauuguuaucauuuauuuaucagaugcucaguauaugcucuuucaucaaauaguauag

SEQ ID NO: 4149819 - RNA, 60 nt, Human
cuauggucuggaccgagguccuugaaugccaggccccaugggccucggacuucaucguag

SEQ ID NO: 4149820 - RNA, 57 nt, Human
cuaugguuucugccacaacuacucaucucuaccauuguagugcaaaggcagccauag

SEQ ID NO: 4149821 - RNA, 79 nt, Human
cuaugucaucagagagugaaaaggauaugucuuguguuagauggaaaaaaugggcaugucacaauucuuaaugggaugg

SEQ ID NO: 4149822 - RNA, 65 nt, Human
cgcaucgcccagcucaucucccacaaccaggcggugguggacgaugcccagcuggacaacgugcg

SEQ ID NO: 4149823 - RNA, 73 nt, Human
cgcauggagcuggaggccuugccugcaggcacaggaaccugcugcuaguggagagccuugaggguuccaagug

SEQ ID NO: 4149824 - RNA, 129 nt, Human
cgcauuaaaaagaccuagagagauucagcaguacugaggccuggccccaccacagaccaaugaaagcagaauaucuggggaggggucaggcaucuuuauucuuugaacuccucagcugauuuuaagagg

SEQ ID NO: 4149825 - RNA, 90 nt, Human
cgcauuuuauuaaaauaagaacaagaacaccuacaguucuagauucagaaagcuggauuguaguuguguccuuguaacuuaaaagaugug

SEQ ID NO: 4149826 - RNA, 78 nt, Human
cgccaaugcaagcaagauggucacaacacacuaagauauguguucaguacuuguaucauuggguuuguguuacuggug

SEQ ID NO: 4149827 - RNA, 63 nt, Human
cgccaccaugccuggcuaauuuuuuguauuuuuaguagagacagguuggucaggcuggucuug

SEQ ID NO: 4149828 - RNA, 64 nt, Human
cgccacuaggcucgcuacgaggaagcgccgcugaggguccaucuuuuuaagagaucuagugacg

SEQ ID NO: 4149829 - RNA, 79 nt, Human
cgccacuuaaugaaccuguuuguggagaguccaccuggugccugccuggcuuuaggaacccgcagcaguccgaguggug

SEQ ID NO: 4149830 - RNA, 75 nt, Human
cgccagcccugggucccggcuucuauccaccgggugugacccggcugggcggccugcuugggacccagggcggug

SEQ ID NO: 4149831 - RNA, 61 nt, Human
cgccagggcucccgcgguguccgggaagugacucuuccuggcagagggcggccucgaggcg

SEQ ID NO: 4149832 - RNA, 61 nt, Human
cgccagggcucgcucuugcccuucgccuggaaggccgaggaacggagcgggccgagcagcg

SEQ ID NO: 4149833 - RNA, 65 nt, Human
cgccagggcuucagagguuuuggcagggacucauguuuggccgggugacccaggagcccuuggcg

SEQ ID NO: 4149834 - RNA, 73 nt, Human
cgccauagugaauugucucagacguugauagaugaagugucugcgugggaguaauacagcuucuuuaugaacg

SEQ ID NO: 4149835 - RNA, 59 nt, Human
cgcccaccuccaggcggaugcuuuccguggaggccagcagcuccuggaggugagaggcg

SEQ ID NO: 4149836 - RNA, 89 nt, Human
cgcccccaccgcugcucgugccaggacgcgcaguuugcaguugcagcucuggcacuggcgcgggauggcggagcuucccuuggauggcg

SEQ ID NO: 4149837 - RNA, 74 nt, Human
cgccccuggaaccucaggucggacuugggcgggacccggcaggucuggacagggcagagaccgagucaggggcg

SEQ ID NO: 4149838 - RNA, 70 nt, Human
cgcccuaagggaagaugcugggugauugccacgccucccucugagcuccuggcuucauucucuuagggug

SEQ ID NO: 4149839 - RNA, 86 nt, Human
cgcccucccaccucugggggcuuccuuacccucuuauuuugauuguaaaacaagcaucccagggucagguuaagggagucauggug

SEQ ID NO: 4149840 - RNA, 58 nt, Human
cgcccucugucaccuugcagacggcuuucucuccgaaugucugcaagugucagaggcg

SEQ ID NO: 4149841 - RNA, 90 nt, Human
cgccgagacaacugggagaggcgcgggacucgcccguuccgcggaacgccgggaaggggucaccuccugaugaaguuuccgguuccggug

SEQ ID NO: 4149842 - RNA, 76 nt, Human
cgccggcagccaggacaugcacggggccgggagugcauucacccccugcgcccggcacgucauaaagcugugggug

SEQ ID NO: 4149843 - RNA, 66 nt, Human
cgccuccauguuucagcaucuacaucaugggcuugcuccuggaauggacuaaaaacaauggaggug

SEQ ID NO: 4149844 - RNA, 95 nt, Human
cgccuccgcagcauccucgcggccucugcggccuuucccuccucucgucugggcuaggcccaguagucgacggcgcuggucggcugaggcaggcg

SEQ ID NO: 4149845 - RNA, 82 nt, Human
cgccugcccccgcagcuccacagccugcgugcgccggacccacuccugcagcuccugugcugagugugccuuggugcaggcg

SEQ ID NO: 4149846 - RNA, 57 nt, Human
cgccuuccuucuaaaaauagccaaccccccaaugcgggaaaggugggaggugaggug

SEQ ID NO: 4149847 - RNA, 56 nt, Human
cgcgaggccaggacaugaaagcugaggggccauccucucauguggcuggccacgug

SEQ ID NO: 4149848 - RNA, 63 nt, Human
cgcgcucauuuccgccuccuucucgggcacucagcauuccggacgggggcggagagaggagcg

SEQ ID NO: 4149849 - RNA, 57 nt, Human
cgcggcuccucccugccugggcagugaccauugcuaggggcuggcguggagccugcg

SEQ ID NO: 4149850 - RNA, 69 nt, Human
cgcggcuguaacaaaauaccuuggauugggugauuuauaaauaauagaaagguauuuuuugcaguucug

SEQ ID NO: 4149851 - RNA, 65 nt, Human
cgcgggccaauuccaggagccggcggcggcgagccgcgcccuggcugauaccggaaaggccugug

SEQ ID NO: 4149852 - RNA, 69 nt, Human
cgcggucucagcccucgccagcagccacgcgcgucugggggcggcgcgcugcgagcggcugagaccgcg

SEQ ID NO: 4149853 - RNA, 62 nt, Human
cgcguggcuccgcaggcuccauucuccacacagucgucuaggggggcgccaggagccccgcg

SEQ ID NO: 4149854 - RNA, 62 nt, Human
cgcuacaugcccuugaugugaaagucauucccauauggagucaucaucugggcuugggggug

SEQ ID NO: 4149855 - RNA, 55 nt, Human
cgcucagacagacaccagccagcuucaccuugugcugccucugcgacucugggcg

SEQ ID NO: 4149856 - RNA, 62 nt, Human
cgcucgcgccgcaccgguccaccagguacuccaccacguccagguggccguagcgggcggcg

SEQ ID NO: 4149857 - RNA, 65 nt, Human
cgcucugcucccuuccuccuugauguuucuguaaagagcauuuggauuuugaagagaguauugug

SEQ ID NO: 4149858 - RNA, 64 nt, Human
cgcugacucugggauuuucuuauaaaaaugccugauggacgggaggaagaucuggaggucggcg

SEQ ID NO: 4149859 - RNA, 55 nt, Human
cgcugagaggugacagcgugcuggcccuccucacagcccucgcucgcucucggcg

SEQ ID NO: 4149860 - RNA, 55 nt, Human
cgcugccugcgccaccaccacgucccugacgugaaauaugggggcgcaggccgcg

SEQ ID NO: 4149861 - RNA, 59 nt, Human
cgcugcgaggcgcccuuguugcugcccaucugcaggcugacauugagcgugucgcagug

SEQ ID NO: 4149862 - RNA, 56 nt, Human
cgcugcuuaugagacuggcacgugccgugugugacgugugggccugugaagcggcg

SEQ ID NO: 4149863 - RNA, 55 nt, Human
cgcuggcucccaugagcucucacgguuuugcugugcuuuguugaugacggccacg

SEQ ID NO: 4149864 - RNA, 55 nt, Human
cgcugugccauggauucaguucaggucaagugauguuccugguuuaugggcagug

SEQ ID NO: 4149865 - RNA, 60 nt, Human
cgcuguguggcugugccgucacguguguaccccugcuuuguggcugugccgucacacgug

SEQ ID NO: 4149866 - RNA, 109 nt, Human
cgcuuauuaggguguaaccguggucacaguacuuaauucucuaaauuugauuccugagcaacaaaguggggaaugauaguauuggugcuguuacuauuaugauaaugug

SEQ ID NO: 4149867 - RNA, 73 nt, Human
cgcuugaaccugggaggcggagguuguagugagccgagauugcgccacugcacuccagccuagcaaauaagug

SEQ ID NO: 4149868 - RNA, 70 nt, Human
cgcuuguucuuuucggccugugagaaggccacaaacaguuguuacuuuuucaagucaaagaggguaugcg

SEQ ID NO: 4149869 - RNA, 76 nt, Human
cgcuuuaacaccagggcagcagccuagucuugcagugacuccugaugggcauuagugcuguuugcugaggagggcg

SEQ ID NO: 4149870 - RNA, 85 nt, Human
cgcuuuugcgugggcagcugcagggauggugacucgggcuagcucagauguggcugccguuaguccccagcugcgcgcucccccg

SEQ ID NO: 4149871 - RNA, 64 nt, Human
cggaaagaugcagaguugcuuaagcauccaagcaaaauuguauguugucaucugcauuccacug

SEQ ID NO: 4149872 - RNA, 77 nt, Human
cggaacccggaucccacgaccccggcccuaccuuucuccgugccgcugggcugcgucggggaagccacgggguuccg

SEQ ID NO: 4149873 - RNA, 56 nt, Human
cggaagacaguccgcucuuucaaugcuguggcuaucuuggagagcugcugcuuccg

SEQ ID NO: 4149874 - RNA, 90 nt, Human
cggaauuuacuguuucuacuguugccaaggucacagggaaguggacacuuucaugugcaauuagcaauauaaguuaggacaauauuucug

SEQ ID NO: 4149875 - RNA, 75 nt, Human
cggacgcagaugagcagccuggauguugggcagcccaccccagagagcggcccagggucccugcucucugugcug

SEQ ID NO: 4149876 - RNA, 80 nt, Human
cggacuuggguuuuccuggcagucaggugcuuugcacaauuuauauggcacagugacaacccaggauaaauuugucucug

SEQ ID NO: 4149877 - RNA, 75 nt, Human
cggagcagcugcagagggcucccccuuccuaagcuucuucucauuggcaggguggcaucucucugagcuguucug

SEQ ID NO: 4149878 - RNA, 125 nt, Human
cggagcaucucagaaucuacgguuugaccuccugccaauucucauggugucuuuauacauuuuaacacaaaaauaagauguuuucacuugagagcgagagggaaaugaacuguuaaggugcucug

SEQ ID NO: 4149879 - RNA, 77 nt, Human
cggagcgcagagagaggggcugccuggccaggcagggucagcgggccccagcagacccuccucugcucccagcucug

SEQ ID NO: 4149880 - RNA, 67 nt, Human
cggaggccuggcugucaguccccaacuaguagggccugugggguacccugggaccgccaggccaccg

SEQ ID NO: 4149881 - RNA, 78 nt, Human
cggaggcuggaauucugcggcuggggacagcuguugcugcaauugagcugcacugacuuccccggcugcacagccacg

SEQ ID NO: 4149882 - RNA, 63 nt, Human
cggaggguggcuguccagccgggagccucugauccacggggcuuggaccagccaccccacccg

SEQ ID NO: 4149883 - RNA, 76 nt, Human
cggaucucuuagauccugcccuaagauguuauauuuagaucugugaaaauauuuuagggccaggagauaagaucug

SEQ ID NO: 4149884 - RNA, 72 nt, Human
cggaugcuaggcuguguuucagacccuguucacacucucuuuguccaugggcccagacacagucuugugcug

SEQ ID NO: 4149885 - RNA, 78 nt, Human
cggcacagucaaaggcaugcauggucugcuccccaggcuggcuguaggaguagugagaugcagucauugcuguuguug

SEQ ID NO: 4149886 - RNA, 64 nt, Human
cggcagagcccugagucagccucguaaauugugugacaggcaagaccagaaagggcugauguug

SEQ ID NO: 4149887 - RNA, 58 nt, Human
cggcagcugagagcacagcagaggcgguagcugcucuuugugccaugcagugaggccg

SEQ ID NO: 4149888 - RNA, 65 nt, Human
ccuggccgauggaguaggcucugauccuguaaguacaggaugcggccugacucuaagcaggcagg

SEQ ID NO: 4149889 - RNA, 91 nt, Human
ccuggccucuucccacugagcuauuuacgcugcuggggaucaauacuauugauaaauccauguaaaugguaauguggcugucaggcccugg

SEQ ID NO: 4149890 - RNA, 73 nt, Human
ccuggcgcaguggcucacgccugugauuccaacacuuugggaggccgaggcaggcggaucacuggaagucagg

SEQ ID NO: 4149891 - RNA, 63 nt, Human
ccuggcgcaguggcucugcuccacacuccuccucuucacccuggggccagccaccucgccugg

SEQ ID NO: 4149892 - RNA, 73 nt, Human
ccuggcggaagaaguguuugcccgguguugcagugagcuccugaaaagcgcuugcuuccugcacucagccagg

SEQ ID NO: 4149893 - RNA, 67 nt, Human
ccuggcuaaggcuauguguuaaggcagauugggaaaucccagcugccucaccuaugaccuugccagg

SEQ ID NO: 4149894 - RNA, 60 nt, Human
ccuggcucaggcacgcauggcucagcuagcuccacagacagccaagccuugggagccagg

SEQ ID NO: 4149895 - RNA, 64 nt, Human
ccuggcugagggggcucugcucaggaccacccauuuccauggcaaccagagcccucuggcuggg

SEQ ID NO: 4149896 - RNA, 78 nt, Human
ccuggcugaggguagcggcauuucugggaucgggcacuuuucuuggcuuuggucucuguaggcuaccccauagugagg

SEQ ID NO: 4149897 - RNA, 64 nt, Human
ccuggcugcauuuugcuggauguauuggaguagaaugaggauggauucaaggacagcagugagg

SEQ ID NO: 4149898 - RNA, 71 nt, Human
ccuggcugccagccaguuugcugauggcugucuucaaagacaacugccauuuccugguuucaucagccagg

SEQ ID NO: 4149899 - RNA, 69 nt, Human
ccuggcugugcauugccggcccagcccucuucugaagaaucccagcagccaggccagcaguguaccagg

SEQ ID NO: 4149900 - RNA, 61 nt, Human
ccuggcuucccugucuuauggaaugcaauccuguugcuuucugucuuauggaagcuguagg

SEQ ID NO: 4149901 - RNA, 68 nt, Human
ccuggcuuccuucaugaccuggucugcaaugcuaacuauggugacgugaaaggaacauuucagccagg

SEQ ID NO: 4149902 - RNA, 85 nt, Human
ccuggcuugaaaguggcucauguggcuucugcccugugguuucacuggccuggacucaggcacguggccacauuucacugccagg

SEQ ID NO: 4149903 - RNA, 74 nt, Human
ccugggacacagaccaccaggcccuggucaggaccccucccauguggcugugugguuuauuuguggcucaaagg

SEQ ID NO: 4149904 - RNA, 56 nt, Human
ccugggaccucgcgggaagcgggacugggaaaggguauccgccgggaggucccagg

SEQ ID NO: 4149905 - RNA, 125 nt, Human
ccugggacugcugugucuaguggggagaaggccacggaauggagcugggaauuuuaaaaucaaguggcuauuucuucuggguucacuucuaccucacuggugaauuggcuguucucugacccagg

SEQ ID NO: 4149906 - RNA, 84 nt, Human
ccugggagcuuguuagaaaugcagaaucuuggccccaugccagaucagcuuaaucagaaucugcauuuuaacaagauucccggg

SEQ ID NO: 4149907 - RNA, 66 nt, Human
ccugggaggccaggguagggcccauugugggagcaaccacggcaccucccuuccuggcuuccgagg

SEQ ID NO: 4149908 - RNA, 57 nt, Human
ccugggaggcuguuuccagccucagcgccuccgcuacugcuguuccagcugcccggg

SEQ ID NO: 4149909 - RNA, 98 nt, Human
ccugggaucuuaucugccuccacucugcugccucgguguggguaccauccuaaggguggauccccugugguagcaagauggaugcagguggcaacagg

SEQ ID NO: 4149910 - RNA, 80 nt, Human
ccugggaugaugacucuuccgcugagaaguuuggcuuucuguggggcucuaagugaccuuagggaaguguuauucucagg

SEQ ID NO: 4149911 - RNA, 72 nt, Human
ccugggcaagcucuggguggacacaucccuuuagucuugaagauuccgugacccccuagagcugagcccagg

SEQ ID NO: 4149912 - RNA, 76 nt, Human
ccugggcaagucuuggucccucucugggccccuuugccguaggucccugguggggccagacuugcuacuuucuagg

SEQ ID NO: 4149913 - RNA, 59 nt, Human
ccugggcacaggggagcagagucacuuaagccaauggggacugggcugacuugugcugg

SEQ ID NO: 4149914 - RNA, 65 nt, Human
ccugggcgccuugggggacagauccaucaacagcugcccucagaucguccucucaacaacccggg

SEQ ID NO: 4149915 - RNA, 68 nt, Human
ccugggcucaggcuugggcagcugcaccuaucaccccuggagaaggcagaccaagccuggcacccagg

SEQ ID NO: 4149916 - RNA, 57 nt, Human
ccuggggagagaaagcccagccacacccuccagccugacuauaauucugucuccagg

SEQ ID NO: 4149917 - RNA, 79 nt, Human
ccuggggagccuggccuggggggacacaucccaccaaggcuucuggaggggugggcccagcccagugcugguccccagg

SEQ ID NO: 4149918 - RNA, 84 nt, Human
ccuggggcagggaucggggaaaagggaggcuguggcccccuucacaccuggcauauuccuccuucccccgacauccccuccagg

SEQ ID NO: 4149919 - RNA, 78 nt, Human
ccuggggcuccagagcagcggaguccguggugagaccagaccccaucagagggcugcucugcaaagagccccacgagg

SEQ ID NO: 4149920 - RNA, 74 nt, Human
ccuggggcucugcacagagcagcagagcuagagccaugaaacccacagacuuggugccugagcgcagcuccagg

SEQ ID NO: 4149921 - RNA, 63 nt, Human
ccuggggcugggcaugguguucccucaggagggcugacccucuggaggaugcucggucccagg

SEQ ID NO: 4149922 - RNA, 76 nt, Human
ccuggggcugggcugcaggcuggauuugcuuuugugcaggauauuacugcaggagcucagccugcagggagcuggg

SEQ ID NO: 4149923 - RNA, 59 nt, Human
ccugggggccaggaaggugugagcaacagugcugaccggccacucuuucugcccacagg

SEQ ID NO: 4149924 - RNA, 55 nt, Human
ccugggggugugcuaugaucugugacugggcauuucagaagcaugcccucuuagg

SEQ ID NO: 4149925 - RNA, 78 nt, Human
ccuggggugggaccaacaggcaguucccauaauauucuuuaaggcacccgugagcugccagcuggcccggcuuccagg

SEQ ID NO: 4149926 - RNA, 63 nt, Human
ccugggucagaccuugaggagaccucaaguggcacccuuggucuggcagggucagggcccagg

SEQ ID NO: 4149927 - RNA, 55 nt, Human
ccugggucccugagagaugauugcuccugagcaguggccucuccccagacccagg

SEQ ID NO: 4149928 - RNA, 68 nt, Human
ccugggugccaggcuuggucugccuucuccaggggugauaggugcagcugcccaagccugagcccagg

SEQ ID NO: 4149929 - RNA, 64 nt, Human
ccugggugguuccggcaaggagagcuccacugugagagccaaaggcuugucugcaauccccagg

SEQ ID NO: 4149930 - RNA, 59 nt, Human
ccuggguuaauucuccggcuuuauuggaggcagagaaagagaagaggaggaaacccagg

SEQ ID NO: 4149931 - RNA, 82 nt, Human
ccugguauugugacacauauaccucuucuugaguuuugacagcuuucagauaggagaugggaguguggaguauguaaccagg

SEQ ID NO: 4149932 - RNA, 88 nt, Human
ccuggucccugcccccaccuggccuacagggaccagccccacggaaggcucuugaggccagguaaccauggggaggggaggaaugggg

SEQ ID NO: 4149933 - RNA, 79 nt, Human
ccugguccuugggcggggcagagggcuaucuuugugggaguggaguggcuuuucuugcuucuggcugaugggacuaagg

SEQ ID NO: 4149934 - RNA, 83 nt, Human
ccuggugauucugauaggcccagcccgagucagccuucagcuguguggucuguggugacugggguguggguacagacgccagg

SEQ ID NO: 4149935 - RNA, 57 nt, Human
ccuggugccgguagacgcgcagaaauuccaccugugcgcgcugcccggcgccccugg

SEQ ID NO: 4149936 - RNA, 56 nt, Human
ccugguggcuucuggguggacgauggguugguaguuuaaucaggagccuaauuagg

SEQ ID NO: 4149937 - RNA, 91 nt, Human
ccugguggggccccucaggggcugguuccagggcacuguugagggagcagggcucgcugccagcuucagggacgguggccccacguccagg

SEQ ID NO: 4149938 - RNA, 63 nt, Human
ccuggugguguauaauagaauguuuguaaauaaaaauaaagcauuauuauaaagaccacaggg

SEQ ID NO: 4149939 - RNA, 60 nt, Human
ccuggugucauguuaguaaggucaacuauuuucauguuuggacugcugcaggcacucagg

SEQ ID NO: 4149940 - RNA, 68 nt, Human
ccuggugugccuuccccgguggucuguuucuuuaggacaggaacgcagcugucuggaaggcacccagg

SEQ ID NO: 4149941 - RNA, 79 nt, Human
ccugguugccugcccgcuaguaucugcacagucuugcuagaggggauaaaagcagaaagcuuagaggguuugcacuagg

SEQ ID NO: 4149942 - RNA, 88 nt, Human
ccugguugguuaucucauacacucagauauuccauaagucagccuguggcuucugaaacuguauugagaaaaagcuguauaaacuagg

SEQ ID NO: 4149943 - RNA, 81 nt, Human
ccugguuugccaacugcagccagacuuugugcgaaauuguauuuuaccacuuuuuaaaagguuaugagcugucaaaccugg

SEQ ID NO: 4149944 - RNA, 127 nt, Human
ccuguaagaacuccacaggcaagccgaaagaccugcucuacaggcaggaggugcuucccugggguuaaugccuccaugggaccuaccuccugugcuggagggaaggaggcuaaagccagggagauug

SEQ ID NO: 4149945 - RNA, 81 nt, Human
ccuguaaguuuccugggcuacguguugacagcauacaagaaauuugucaugucugacucucacguaccuacagaaugcagg

SEQ ID NO: 4149946 - RNA, 129 nt, Human
ccuguaauacuugguuugguucuguacaacugaagugaauuuuuagugacaagcccaucaacagugaauuugcucagaggcucacugucuacuuuaguccucaguugucaggaucccauguggcuaugg

SEQ ID NO: 4149947 - RNA, 84 nt, Human
ccuguacaggacucuucccuggguccauccuuuuggucuacaacacuaggccugagggguauccaagggguaacaguuugcagg

SEQ ID NO: 4149948 - RNA, 62 nt, Human
ccuguacuagggucucauugccucagcauagauuuagcagcuagugggacauaugguacagg

SEQ ID NO: 4149949 - RNA, 57 nt, Human
ccuguaucuucucuguugaaguaucuguucagaucuuuugugaggacaagguacggg

SEQ ID NO: 4149950 - RNA, 61 nt, Human
ccuguauuugcaacuuuucuuaguuugaaauucuuuaaggaacagcaucugcaaacacagg

SEQ ID NO: 4149951 - RNA, 78 nt, Human
ccugucacuuuuuauagguguugagauguccgauagauaugaaauaagcaucuccaccucaauaaauaaaaagacagg

SEQ ID NO: 4149952 - RNA, 55 nt, Human
ccugucauacuaacguagugggccagcugccucuauaauaucguuaauaggcagg

SEQ ID NO: 4149953 - RNA, 94 nt, Human
ccugucaucucuaggguuuauuaauucucuggaauucuaguaaauugcuaauuuaucagaaguuagagaaagacuuuagucaaaaagauucagg

SEQ ID NO: 4149954 - RNA, 74 nt, Human
ccuguccaagcccaaggcuucccugcuggccccuggucuuccaguagccagcugggccuuagggcugggccugg

SEQ ID NO: 4149955 - RNA, 108 nt, Human
cggccgcuccucagccuguccccucccuccugugggcucucaaagugcggcuugguuucuccaucucgacccugaggccuggagguggggacgggacugugggcgccg

SEQ ID NO: 4149956 - RNA, 94 nt, Human
cggccucacgugcugcugccgucagauaaugguggggcugaaacaucaagauggcuucccucaugugucugguaggagcuuagugguggggcug

SEQ ID NO: 4149957 - RNA, 73 nt, Human
cggccugcuccuggcaucucugcguccuugccaugagauguaugucgggcagagauuccaggaaaaauggcug

SEQ ID NO: 4149958 - RNA, 56 nt, Human
cggccuugacccccggcgccggcgccgcagccgccgcgccgggcccggguuggccg

SEQ ID NO: 4149959 - RNA, 59 nt, Human
cggcgaugggccagguccuccgaauccccaaggccuccagggcuacgggcaccguccug

SEQ ID NO: 4149960 - RNA, 88 nt, Human
cggcggcgguggggugccugacucgaaaugcggcuggugcaggccaagccacacacugucugcuucgacucuucaccuccaauccccg

SEQ ID NO: 4149961 - RNA, 73 nt, Human
cggcggcugcggccgggcaucguauggcgcuagagaacuucggcggcgagcgggaccugcgccugggccgccg

SEQ ID NO: 4149962 - RNA, 77 nt, Human
cggcgggaggaagcccagacaaugagcccuuguucccuguccucgggcccagggccagcgucucgggcuaucagccg

SEQ ID NO: 4149963 - RNA, 104 nt, Human
cucaggcuccauaugguguggcaacuguggcaaaguuuaaaaaaaauccuuuugggauuucuacuugaacuugcuaaauaagcaccaccaauauugaccuugag

SEQ ID NO: 4149964 - RNA, 85 nt, Human
cucaggcugugacccuccagagggaaguacuuucuguugucugagagaaaagaaagugcuucccuuuggacuguuucgguuugag

SEQ ID NO: 4149965 - RNA, 58 nt, Human
cucagggaaaagggccagggagaugcuacugaugcucucugggcagcccaguccugag

SEQ ID NO: 4149966 - RNA, 111 nt, Human
cucagggcgagaccagcggggcacaugcagagggagggccaggcagcucccagggggccaggccaggcauguccucugcagaacuuguucuuuggugggcuccuaccugag

SEQ ID NO: 4149967 - RNA, 130 nt, Human
cucagggcuaugguauggauuaaucaauguuaugcacacauuagcacagggucuggcaacuuuaacauaccuacggugcuguggugcuauauauacauucaguuauacaauuuaaaccacaugugcugag

SEQ ID NO: 4149968 - RNA, 56 nt, Human
cucaggggauagcuuaaguuucugcugugaaguaggaggaaaaguuaucugcugag

SEQ ID NO: 4149969 - RNA, 61 nt, Human
cucaggucaggaaaauaagauuguggguuuuuuuugcaaacucaucuuuucuguccucgag

SEQ ID NO: 4149970 - RNA, 91 nt, Human
cucagguccccaaaucauggucuuuguucugcacuauugucucagcuaaauguggauuaauagacacaaccaagcugauuuuggauuagag

SEQ ID NO: 4149971 - RNA, 63 nt, Human
cucaggucgcuauuucucuuaccccaauuugggacaacuuugagggacaugguggcuucugag

SEQ ID NO: 4149972 - RNA, 64 nt, Human
cucaggugggaguagaaugcuaggcucucacguuguaucagauuccuguuucuuccuaccugag

SEQ ID NO: 4149973 - RNA, 81 nt, Human
cucagguuuuucaucucugcuuuguaccuugcaggaaacaaggcgaggcacaagugcuggggaugagauuucaagcccgag

SEQ ID NO: 4149974 - RNA, 61 nt, Human
cucaguacuuugaucauuuuggccuauugagguccaaacaggucaaaauauuaacuuaggg

SEQ ID NO: 4149975 - RNA, 63 nt, Human
cucaguaguggggagcccagugucagaggcaucccucagagcacagaaucuucccaugcaaag

SEQ ID NO: 4149976 - RNA, 70 nt, Human
cucaguauucaaagaaccuuuagcauugguugucuaaacaacaucccaugcuaagguuuuuggaauggag

SEQ ID NO: 4149977 - RNA, 57 nt, Human
cucaguccgucccgcuaggugcaaagcagccucuuauccaccagagggcggacuaag

SEQ ID NO: 4149978 - RNA, 61 nt, Human
cucagucuuucccucccucaguuggccuuaaauugguccgaucuggaaucugaaggcugag

SEQ ID NO: 4149979 - RNA, 60 nt, Human
cucagugggcauaguucugaaauaugugcucuacacugucucccaggugugcccaguggg

SEQ ID NO: 4149980 - RNA, 106 nt, Human
cucagugguaaagaaaaugcaugggaacuuuuaaagaaauugcauguaauaacugaauauuccacagugcaacagcaguucucuuuauauucccaggcucauugag

SEQ ID NO: 4149981 - RNA, 129 nt, Human
cucaguuaaauuugaaguucagauaaacaacauaugcuuuuuuaguauaaguauagcccaugaaauaguugggauauacuuaugcuaaaaaauguuuuguuguuugucugaaauugcaguguaacuggg

SEQ ID NO: 4149982 - RNA, 94 nt, Human
cucauaaaagaaacugccccugcccccugcccaucgucauuuaauaaaucaacaggucuguuucaguggccugauguguaauggcauuuaugag

SEQ ID NO: 4149983 - RNA, 119 nt, Human
cucauaagaagggaacggucugggauuggugaauccucagguaauuuaaaauacuccuaauguuuaguguuucaaauuacuugaggauucaccaaucccagaccuuucccuucuuaggg

SEQ ID NO: 4149984 - RNA, 61 nt, Human
cucauaaguuaagugccuaauguuuagucuuaucgcugauuguacagacacuuaguaugag

SEQ ID NO: 4149985 - RNA, 98 nt, Human
cucauagacugaguauagcugaguuuaaauucuuaucaaaucugacaauccuuauguuuuaauuggugaauugagaccauuuguacuuaaucuauuag

SEQ ID NO: 4149986 - RNA, 69 nt, Human
cucauauuuaucucaugcuuaguaauuugucuucccgaggaaaugucugucucaugaggaaaacauggg

SEQ ID NO: 4149987 - RNA, 113 nt, Human
cucaucagccucuucucccucuggauguccucccggccagccaccaagaccaugaacuuuggcuggcagagagcuggugaggaucgcgguuuggcuggagaugggguugagag

SEQ ID NO: 4149988 - RNA, 70 nt, Human
cucaucucucuucaccuuuuuguuuccucugugaaagcagggauagaauuugaaaagugaugggaaugag

SEQ ID NO: 4149989 - RNA, 55 nt, Human
cucaugguuagagcccagaaagcaagagagaaagccuucuccagccugaccugag

SEQ ID NO: 4149990 - RNA, 89 nt, Human
cucaugguuuuauuacugacacagggguauaagagauguuugaaaaaaggucauccuuuauaagacuuguauucagggguaaaccugag

SEQ ID NO: 4149991 - RNA, 58 nt, Human
cucauuaauuugcuuagacuuaucucauugucugagacaagugaggugaauagaagag

SEQ ID NO: 4149992 - RNA, 73 nt, Human
cucauuauugugcauuuuuguguuuaaagcauuagaauagcuguuguaagggauacaaagauuaauaguagag

SEQ ID NO: 4149993 - RNA, 84 nt, Human
cucauuccauuucuguauuaggucugauuuaguagcaaguuauaggaaccaagacaaaccagcuuaagcaagaugagaacugag

SEQ ID NO: 4149994 - RNA, 70 nt, Human
cucauucuucaucacuaccuugugaguuggguuucauuaucauguccauuuuagagaugaagaaacugag

SEQ ID NO: 4149995 - RNA, 59 nt, Human
cucauugcagcugcauuacugugggagcugucccucuagagacacugggcugcaauggg

SEQ ID NO: 4149996 - RNA, 55 nt, Human
cucauugcccagauccccacagaagauccggaagucaucuggggauggggaagag

SEQ ID NO: 4149997 - RNA, 74 nt, Human
cucauuggaauugauggacagagaugaagaaaauguaaacagauuuucuaauuuuaacccauuuauuuuggaag

SEQ ID NO: 4149998 - RNA, 128 nt, Human
cucauuguaaauacauauuaacucucaccaugaugagaaggcugaugacagauucugcucaccuuaaugguggggcagggccuuggucaucuuuuuaacccggugauuagugggaugucugcagagag

SEQ ID NO: 4149999 - RNA, 77 nt, Human
cucauuguguuuuaccuacuucugaauaugugucauacuuaggaucagagugguaaguaagugaaacauccagugag

SEQ ID NO: 4150000 - RNA, 113 nt, Human
cucauuuauuuuuacuucuuuuggaacuuaacaucugacuugcagacauaauaaguauguauuauauuuacuguauuugaaguugaaagaugaaagaagaaaauaugaaugag

SEQ ID NO: 4150001 - RNA, 80 nt, Human
cucauuuuaauguguuuguacauauaaaucuuguauuuacagauaauuucagaaacacaugguauguauagacaaaugag

SEQ ID NO: 4150002 - RNA, 80 nt, Human
cucauuuuagaauuucaguguaucuuccaaaagccauuuuaaauggcuguaggucuagaugacugauccuuagggaugag

SEQ ID NO: 4150003 - RNA, 61 nt, Human
cucauuuuauuugcuccuccuuauauuuuucacuccccuaggaggguuucaaugggaugag

SEQ ID NO: 4150004 - RNA, 75 nt, Human
cuccaaacucaagucaaucaaggguguaggcaaguguaaccacugcaugcacuaucuagaugaugaacucuggag

SEQ ID NO: 4150005 - RNA, 58 nt, Human
cuccaaagcuuccacuugauagauaaguccacuaugaacaguugauguagcuuuggag

SEQ ID NO: 4150006 - RNA, 75 nt, Human
cuccaaauacauacuuucaauucccaagaccuagcaaagcugagugugucuggaaauuuaagguaugagauggag

SEQ ID NO: 4150007 - RNA, 76 nt, Human
cuccaaaugucuuucuucugcuacguggcuuguuuaaacagccuccaaaaauguguagaaagaaagaaaaagggag

SEQ ID NO: 4150008 - RNA, 129 nt, Human
cuaaguaauuuuguggcuucaucaacagaauagaauaguggcuuggagugugaacucuggagucagacaaccuggauucaaauuucagcucugucacuugcuagcuguauguccuuaggccagacuuag

SEQ ID NO: 4150009 - RNA, 84 nt, Human
cuaagugcuucagguagauagauggcugauguucagauucaaauguuacuccugccugaagguccuauuuuuugaaauacugag

SEQ ID NO: 4150010 - RNA, 59 nt, Human
cuaaguucagaguucucauuugugaugcaaaaccacugcaccuguagaaucugacuuag

SEQ ID NO: 4150011 - RNA, 75 nt, Human
cuaaguugcaugaggcucucucuccuccugguuuucugaccuagaaggaaaaccugucuuauguccccugcuugg

SEQ ID NO: 4150012 - RNA, 69 nt, Human
cuaaguuucaauucuuuucacaaagagaacuuuuaaaaguugacuuugugcuuugaaugauagcuauag

SEQ ID NO: 4150013 - RNA, 71 nt, Human
cuaauacagucucugauaacugucaguucuagguaucuagagaugaugaaaagagagacuuagguaucuag

SEQ ID NO: 4150014 - RNA, 59 nt, Human
cuaauaucuuggcauuucucaccuggaauuaggagacaguuggaaacuccugauauuag

SEQ ID NO: 4150015 - RNA, 74 nt, Human
cuaauauuuuacucagcauuugaaaaauacuuugacuacaaucaaaaguuuucuaagucugagggaguauauag

SEQ ID NO: 4150016 - RNA, 95 nt, Human
cuaaucaaucagcaggagcagccuagagagccacuuugagaagaauucugaggcugucucugggcuccacuugaaaucuuaucuugauugauuag

SEQ ID NO: 4150017 - RNA, 84 nt, Human
cuaaucaggaagcaugaugucaccguuuaauugaguuuuucacuucuucaugacagauuaaaugauggcaugucuuaugauugg

SEQ ID NO: 4150018 - RNA, 57 nt, Human
cuaaucucugcacucugccacaacucaaccaauuuguauggcagggagugauauuag

SEQ ID NO: 4150019 - RNA, 58 nt, Human
cuaaugacagcugcucccguuucugcugcuguggcagggagucuuggcacugucuuag

SEQ ID NO: 4150020 - RNA, 66 nt, Human
cuaauuaaggggcauuuuucugaugcagccuuccggugcagugaaaaaagaauguccaguuguuag

SEQ ID NO: 4150021 - RNA, 129 nt, Human
cuaauuaugugugaauugugcagaauucagggaagcuuauaaguuuucaugcucaauugugaauaguuuguuuucacagauaguauguaaauuaagcaaccaaaaaugaauuccuuaugcaucaucugg

SEQ ID NO: 4150022 - RNA, 67 nt, Human
cuaauuauguuguuauaaucaagauuuuugcacaauuuguguuuuauugaugaugacgccaaauuag

SEQ ID NO: 4150023 - RNA, 115 nt, Human
cuaauucuaacuucauuuugcuuuccagugguuuucugcuuagcauuuuagcuguuuucucugagaagcuuaagaauagggaaaaugucuagagggggaaaccacugagaauugg

SEQ ID NO: 4150024 - RNA, 65 nt, Human
cuacaacguccaggagaaggccauccagcgcuuuuucaguggcuauggccgccuccucgaaguag

SEQ ID NO: 4150025 - RNA, 63 nt, Human
cuacaaggcagcaaugaaugaaauggauuggucuccaccuccauggaacauucugccugguag

SEQ ID NO: 4150026 - RNA, 63 nt, Human
cuacaauggcccgucuuuccugagcccaguggagggucccaggggggcaggagucauugauag

SEQ ID NO: 4150027 - RNA, 77 nt, Human
cuacacaaugcauaaguuucucccagaagaucuuagaaguguugugccauuuccuggagaagcagugaauugugaag

SEQ ID NO: 4150028 - RNA, 73 nt, Human
cuacacagugccaaauugcaguuauuuaaaggugcaagauaugauguauuuuagcugggauugcacuguaugg

SEQ ID NO: 4150029 - RNA, 65 nt, Human
cuacacuggauaaaaauuuggaagucagauauacuaauucauugauuuucauuaauucagugugg

SEQ ID NO: 4150030 - RNA, 69 nt, Human
cuacagaaaaacuuggaggcuuucauugaccacaccaaaaacagagccaagcuaaguuuguuuuuguag

SEQ ID NO: 4150031 - RNA, 102 nt, Human
cuacagaugauuuuuaaugaguauuuugcauuaguuuagauuucaagugauuuauuuugaacauuagaauaaguaauugucauugguaaugucacacuguag

SEQ ID NO: 4150032 - RNA, 72 nt, Human
cuacagccaacaagaagggaaggcaugauuugugguuugcagaaugcauuuucuaucuuguacuggucauag

SEQ ID NO: 4150033 - RNA, 65 nt, Human
cuacagcugucacuccugcucuugggaugggccaauaccaagaguaaauucaugaugccaaguag

SEQ ID NO: 4150034 - RNA, 84 nt, Human
cuacaggcaauuacauuuuagcuguucacucucuuaauguuaugugggcagcuuggauuucuguaguuuuauuuauucuuguag

SEQ ID NO: 4150035 - RNA, 73 nt, Human
cgaggagcaucucuaaauccaguaaguggguuuuguuccccaucagcugggcagggagaaugccugcucuuug

SEQ ID NO: 4150036 - RNA, 78 nt, Human
cgaggaugaagugacugauccuuccugagaguuuuuaucuccgugcggggaggcuucggauuaaagccuugguccucg

SEQ ID NO: 4150037 - RNA, 83 nt, Human
cgaggcauugccuucaucuucuaucugagaauucuuuaaaguuagucuguucacaggaggguggaugcaugacacuggccuug

SEQ ID NO: 4150038 - RNA, 71 nt, Human
cgaggucuacauuuugugauuaugaaauauuaacauauauuuuacucucucuacugaugucuaggaccuug

SEQ ID NO: 4150039 - RNA, 96 nt, Human
cgaggucuggagaaugugggagaaaaggcuugaagagguuuugaagccaguuucugaaggccucuggagaguuuggacuggcuucuuuggccuuug

SEQ ID NO: 4150040 - RNA, 89 nt, Human
cgauagauacuugggugcagaaguguugagccauuuguuuugacccaaccauuuuggcucuguggauguucugaccugagaaucuuuug

SEQ ID NO: 4150041 - RNA, 130 nt, Human
cgaucaagccucuguuagauuaugguaugagaagaguaguaacagaaauuaugauggauucuuaccuucuuuccuaauauguguuacugacuuuuuuuguguggcuauucugcaugcauuggaagagacg

SEQ ID NO: 4150042 - RNA, 82 nt, Human
cgauggccuuuuugcaagguuuuggaagauuuucguuucaacggacuaaaaacuacugccaauagccucuagacaggccucg

SEQ ID NO: 4150043 - RNA, 62 nt, Human
cgaugguaucggccagccccggguugcacagcagcagccaccggcggggggugaugccauug

SEQ ID NO: 4150044 - RNA, 70 nt, Human
cgaugugaccuguuggacguuguuguuaggugcccaccugaaagccagaauucguccagccuggugaccg

SEQ ID NO: 4150045 - RNA, 62 nt, Human
cgauugcagaggcuguugcuaauuggagaagccccacuaagcagcggcagcuuccugcuucg

SEQ ID NO: 4150046 - RNA, 109 nt, Human
cgcacaucagcauuucacuuucuuucuucguggaaauucccaggcuaguuggacucauuuaauuuggagagagaaaccuuugucagugauaauguuuugaucaggugcg

SEQ ID NO: 4150047 - RNA, 61 nt, Human
cgcacaugggcaccugagggucugggaggcagcccggggcucuggaaggugcaccauggug

SEQ ID NO: 4150048 - RNA, 78 nt, Human
cgcacgcuccaccagcuucagcagccgcggcaccucggaccgcgaagccgcuucggcccggagcuggcggagcaggcg

SEQ ID NO: 4150049 - RNA, 59 nt, Human
cgcagagcggugaucaggcgcaggcgccggaaggaauccugcucuggggaccggcugug

SEQ ID NO: 4150050 - RNA, 130 nt, Human
cgcagaggcuuggggccaagcggaguuugcccugcggguccugcgcaaggccccagugccccggcuaaaccuuugccgcaggaucccggagccggcguccuucaaggagcacagagggccccguagcacg

SEQ ID NO: 4150051 - RNA, 82 nt, Human
cgcaggccugcagggcgugguggugcuggagcaguaccgcacugaggagcuggcucaggccuacgacgccuucacgcuggug

SEQ ID NO: 4150052 - RNA, 130 nt, Human
cgcagguccugggaucugguaggggauugacuucacaaauuaacguucaggugauggaaaccgugacagacgcggggcugggauugcuugcugugaggaguugccccaagggaucaaaggacaccuguag

SEQ ID NO: 4150053 - RNA, 55 nt, Human
cgcaggugaacuguucugcaguuugguuucgccugcagacaucuccaaaucugug

SEQ ID NO: 4150054 - RNA, 73 nt, Human
cgcagguggcagagccuugcggcuuuggagagagguggagccuuggugagguugggaggacugccuaacugcg

SEQ ID NO: 4150055 - RNA, 92 nt, Human
cgcaguuaguaagcagauugaaacauaggcagucgagcuggggaguccauuccucugaccaucauguuaugccaccucugcucuaugcugug

SEQ ID NO: 4150056 - RNA, 81 nt, Human
cgcauaguuauucagaauaaagacuacauuucuguuuguagaaauguacaaaccuucuuuguagcuggguauaaccaugug

SEQ ID NO: 4150057 - RNA, 74 nt, Human
cgccacgugacgcuccgcccucuuugagaucacaugauuuaacucaagucccgcaguguuccuccgcgcuggcg

SEQ ID NO: 4150058 - RNA, 75 nt, Human
cgccaggcaucucgcccacgaaguagguggcauuggcagugacgaucucaaagcaguguggguuggugcccggcg

SEQ ID NO: 4150059 - RNA, 79 nt, Human
cgccaggugcuuauuaggccgugcuccaaagucaucguccgguuucucauugugaugaugaagcaugguuacacuggcg

SEQ ID NO: 4150060 - RNA, 95 nt, Human
cgccaguuucaccaaaacccagaggcaggagugacccugacaggaacaaacccuaagguauucacuugccugcccagggucuggugcagcuggcg

SEQ ID NO: 4150061 - RNA, 64 nt, Human
cgccccgggcugcucuggaccgacagcugcuccccgggcugcucuggaccggcagcucgaggug

SEQ ID NO: 4150062 - RNA, 104 nt, Human
cgcccucagcugucgcuccuuauaaggcgggggccgggcggcgccggaggaggggccgcggcaucagcccgguccugggcucuggggcggcgcugggccgggcg

SEQ ID NO: 4150063 - RNA, 57 nt, Human
cgcccugauccgcccuccaccuuccucuccuccagguucugggccggagaaggggcg

SEQ ID NO: 4150064 - RNA, 70 nt, Human
cgccucagggcccuggacaacccucccuccuaggggguggaguggggggagcugagggggcccugaggug

SEQ ID NO: 4150065 - RNA, 107 nt, Human
cgccuccggcagccgccccaucuccgccccuuccggccagccgagccucauggcuuagauggcguccauggccgcagggguagccgugggcucggcugugggacacg

SEQ ID NO: 4150066 - RNA, 74 nt, Human
cgccuccuucuccguuugagcuagguuuaccugaacaaauaaaccaguugguuucaaugggacaggugagggcg

SEQ ID NO: 4150067 - RNA, 82 nt, Human
cgccucuuugccugguccugugggugcugugcaggcucccucagccaagcucggcauucccaggccuggcuccgaguaggug

SEQ ID NO: 4150068 - RNA, 60 nt, Human
cgccuggaaccucuaggaccagggacacaaacucuuaucuuggaaauggagguacuggug

SEQ ID NO: 4150069 - RNA, 71 nt, Human
cgccuuaugccggccugggucacucaggcaggcggggcgcggccccgucagcugugacucaggccccagcg

SEQ ID NO: 4150070 - RNA, 61 nt, Human
cgccuucuugucaauuugccauugucaccaaguccaggacacagcaucagagaagaaggug

SEQ ID NO: 4150071 - RNA, 55 nt, Human
cgcgagguggagguugcagugagccaagaucgugccacugcacuccagccuggcg

SEQ ID NO: 4150072 - RNA, 55 nt, Human
cgcgagguggagguugcagugagccaagaucgugccacugcacuccagccuggug

SEQ ID NO: 4150073 - RNA, 56 nt, Human
cgcgcccggaacugcgcccuggucucccucccagcgcccgcgcagcuccuggcgcg

SEQ ID NO: 4150074 - RNA, 123 nt, Human
cgcgccugaaggguuucuuucuaauaauggcccuggugcuugcgcaagucuagacugucagcucccagagggaaggcggcuggcagcuggcucugcgcaggcugggggcgccucccgggcgug

SEQ ID NO: 4150075 - RNA, 130 nt, Human
cgcgcgcgccgcagucccccgcccccgcucagugcggcagcggcugucggccagccggaguuggcgccgcggccugcccggcgcagccgcuguccaccugccagcgggggaggggcgcggccggcgcgcg

SEQ ID NO: 4150076 - RNA, 63 nt, Human
cgcgcugcagacagcggaggccugggccauauuccaggagcagaccguaguccugcaggugcg

SEQ ID NO: 4150077 - RNA, 91 nt, Human
cgcggagccucauggggguuggaguccccaagguuuccuuugugcgcaguauuggcggggccuuggacuaccacucccacaaggcaccgcg

SEQ ID NO: 4150078 - RNA, 80 nt, Human
cgcggccucugcuucucugcccaugagcaaucugcgggaaagaccugaugagcccggcucggcggggagggcgggccgcg

SEQ ID NO: 4150079 - RNA, 56 nt, Human
cgcggcggccggcgcucaccaugcagucccggccuggccagcgccggcugcucgcg

SEQ ID NO: 4150080 - RNA, 58 nt, Human
cgcgucccgggggagauccgugcggacgggacgccggagcagagccacucgggccgcg

SEQ ID NO: 4150081 - RNA, 78 nt, Human
cgcuacgggcgcuacguggccacccaguggugcguggccgucuacagccugugcuuccuggccacaguggccguggug

SEQ ID NO: 4150082 - RNA, 71 nt, Human
cgcuaucugucccugguccaagauuugacaaagugugcaaacaaguaaaucagacacagugaaaguuagcg

SEQ ID NO: 4150083 - RNA, 70 nt, Human
cgcucaacagacugucaugacacuauauaauagauugauuuuuaauguaguguagagauuagucucagug

SEQ ID NO: 4150084 - RNA, 88 nt, Human
cgcuccaccucccggagaggggcggggccaggcgagccucacccacggccucucguagcucacgcccccucucccggagccuggagcg

SEQ ID NO: 4150085 - RNA, 70 nt, Human
cgcuccaggcucagcgcgcacgucugcuccgagaaccgcugcggguggccaggcgccgggccuggcggcg

SEQ ID NO: 4150086 - RNA, 67 nt, Human
cgcuccccauuuauucuugagucuguuucacaaucauggaaagacucuguaucaugagggaggagug

SEQ ID NO: 4150087 - RNA, 68 nt, Human
cgcuccgacgcugggggccaggggaccggaccuucugggaggggucugggcucccagggucggcggug

SEQ ID NO: 4150088 - RNA, 121 nt, Human
cgcucuguagaugaggaaauggaggcugaaggagguagagugacauauacaaggugauauaucuaguuauuacauuuagucuucugauuccuauucuagcauucuauccacagacacagug

SEQ ID NO: 4150089 - RNA, 87 nt, Human
cgcuggugcaggacagcacaucuccugccagugucuccucccccuacagccuggucaggugagaggcgguccugcaugucaucagcg

SEQ ID NO: 4150090 - RNA, 110 nt, Human
cgcuguauacuccccaaauuaacuuguaggcucgcugggaagauuagaaagaaauuaaggcauagauccaguuccaagaagcuuacaaucuaauugaagacauacacgcg

SEQ ID NO: 4150091 - RNA, 82 nt, Human
cgcugugcaugauuugugcaguugagacaauaggcuggagaaaucuugcacuacguguguaacuguguaguuugucauagug

SEQ ID NO: 4150092 - RNA, 57 nt, Human
cgcuguguuuacaucauugcuguuaguucuugcaguuccugugugaccgagacagug

SEQ ID NO: 4150093 - RNA, 60 nt, Human
cucacggaauucucagugugguuuucaacaucacaaaacuacauuguccuuucugaagag

SEQ ID NO: 4150094 - RNA, 59 nt, Human
cucacgggaagggagacaguaggauaaauaucacagccuucugcuccagcuccucuggg

SEQ ID NO: 4150095 - RNA, 117 nt, Human
cucacuaauacauugauuuuuguaguagucucguucuuuuaaaauccgucaucaucaauauggcucauuaggaaaaagaggcuggcaaggaaauuuuucuuaaauguugaaagugag

SEQ ID NO: 4150096 - RNA, 62 nt, Human
cucacugagcuuccuguguuugucuauguaaacaccagucccaagagaggcucaguaaagag

SEQ ID NO: 4150097 - RNA, 78 nt, Human
cucacuguaucaguauuucuaaacauuggcuguacauuuaacuaugugaagaaguuuugggaaauacugauaccugag

SEQ ID NO: 4150098 - RNA, 64 nt, Human
cucacuguauuuuugaaucauugugguagaaauuuauuggaaucagauuuaaaaguauggggag

SEQ ID NO: 4150099 - RNA, 70 nt, Human
cucagaaaaccagaggcagcaguaccugagggccuccaacuugaccuuuccuccuccugcuucuacugag

SEQ ID NO: 4150100 - RNA, 63 nt, Human
cucagaauuacaucccauuuuaaagauucagcguuuucuccuuugagaagggucauuucugag

SEQ ID NO: 4150101 - RNA, 94 nt, Human
cucagaauuuaagagugugagcuucaagcuguucagaacuauuagauacagacaucauacuuacugagcuugaauucuuuauucucuuuaugag

SEQ ID NO: 4150102 - RNA, 69 nt, Human
cucagacaugaagucugacaaaagagccuugugugguguagggcucagaguccaguuucuugugcugag

SEQ ID NO: 4150103 - RNA, 59 nt, Human
cucagaccagccauuugccucuuccaaaaagcuggggcuaagcaugugggugguucaag

SEQ ID NO: 4150104 - RNA, 76 nt, Human
cucagacuguacucuuauagccaucugaaauacguuuucuagguagagauagauuguguaaggguacaguugugag

SEQ ID NO: 4150105 - RNA, 78 nt, Human
cucagagacagcaucaccaacuugagcaauuuucuuauuauacagaguuaauuaggugugugccuguuagccucugag

SEQ ID NO: 4150106 - RNA, 55 nt, Human
cucagagcucagcuuuguuaguuaauugaugacaucacuagccuuuaguucugag

SEQ ID NO: 4150107 - RNA, 77 nt, Human
cucugggccucauuuacucaucugcaaaacgugagggcuuguucuagguggauguguuggaugagugaauuccagag

SEQ ID NO: 4150108 - RNA, 130 nt, Human
cucugguaauggucacugacugcucuguugagcugcgguuucagggcacccccagggcagcccacuucccacccuggaguccccgagaggccugcacagcaccuggcccacaguugaugaccgugcaggg

SEQ ID NO: 4150109 - RNA, 84 nt, Human
cucugguacuuuauguaugcauuuauuugaauugaucuauuuaaacauuagauagguacuuaauuuaaaugcaagccuccagag

SEQ ID NO: 4150110 - RNA, 59 nt, Human
cucugguucaucgaccugacugcugauugaaagagcugacagugguagaugagcaggag

SEQ ID NO: 4150111 - RNA, 71 nt, Human
cucugucaaccuagcaagagauuaagccaagcaggccuggguuuggcuucgcugcuagcuaguugguggag

SEQ ID NO: 4150112 - RNA, 75 nt, Human
cucugucccuagcugagucaugggacuggggaagcuaccacucagauuccuccugugagcagcacagagacagag

SEQ ID NO: 4150113 - RNA, 57 nt, Human
cucuguccucacagccuuuuugcaguucaacaaacacaggcccugccagggacggag

SEQ ID NO: 4150114 - RNA, 56 nt, Human
cucugugagggucuguacagaacuuguuuaucuuugugccccuccccaccacaggg

SEQ ID NO: 4150115 - RNA, 91 nt, Human
cucugugaucauucagcuucaggacccugagccaccuccuggcaucugucauuuucagggccugucuguagaacugaagggguuacaugag

SEQ ID NO: 4150116 - RNA, 60 nt, Human
cucugugccagucugcacucggcuggaguaccagauaauccuucccgagucuguauggag

SEQ ID NO: 4150117 - RNA, 61 nt, Human
cucugugccuucuacuucacucuaggaaauuccugagaggaaugagaggaaggcaucggag

SEQ ID NO: 4150118 - RNA, 55 nt, Human
cucugugggcaauuauuaacucugcacaggaacgggaaaauagcugcucagagag

SEQ ID NO: 4150119 - RNA, 86 nt, Human
cucugugguuggagacaguuuaaccucuguaguagguucuguaguuaugguaagcuccagguccagagguucaacugugacuugag

SEQ ID NO: 4150120 - RNA, 98 nt, Human
cucugugucacuguuucaaaacaaagcuaguaauauuuuaauccccucaccacaagggcaugucuaauauagcuugucaugaggccagugacuuagag

SEQ ID NO: 4150121 - RNA, 64 nt, Human
cucugugucuuuaaagauuucauuuguuguugaaaaaaaugagugaauucaguuuaaaacagag

SEQ ID NO: 4150122 - RNA, 78 nt, Human
cucugugugcgucccuguggcuaagacaugacaagguagggcuuucaguggcauuuguuacagggccagcacacagag

SEQ ID NO: 4150123 - RNA, 57 nt, Human
cucugugugguaugauugucauuucccuuuuagagaugaggaaacugaaacacagag

SEQ ID NO: 4150124 - RNA, 57 nt, Human
cucugugugguccucuguauugaaaauacuugauguauucuaagagaccacccagag

SEQ ID NO: 4150125 - RNA, 81 nt, Human
cucuguucaccaggagcauuuuuuauuaguugcuauugugcaguuauuacugacugaaaaauacucaugggauuauuagag

SEQ ID NO: 4150126 - RNA, 89 nt, Human
cucuguuccagcaacccugguuggggggucagacuugauacacuuucagguugggaguggacccaccccagggccugcugaggacagag

SEQ ID NO: 4150127 - RNA, 55 nt, Human
cucuguucuucuaguccacugacagaacagucugucuguugagaugagagcagag

SEQ ID NO: 4150128 - RNA, 100 nt, Human
cucuguuuacucugcauugucaauuaugagguagauaucacauguguuuagccgaaaagauaaugcacaguaucucauaacaguguagaacaagacgggg

SEQ ID NO: 4150129 - RNA, 55 nt, Human
cucuguuucucagccuauuuccacuuguauggagcaagugggcuagaaaucaggg

SEQ ID NO: 4150130 - RNA, 93 nt, Human
cucuguuucuugccagccuuggacuucuaccauagcacucagacugagcuuagugucugugaugaggucaggaaggaaugcaagguagcuaag

SEQ ID NO: 4150131 - RNA, 68 nt, Human
cucuguuuguccaaaggccuuuugagauggcuggugaaccacucuuaagcaagcuguuggcaauaggg

SEQ ID NO: 4150132 - RNA, 105 nt, Human
cucuuaauuauauuaaagcuaaacacuuacuauguuuuucucggguuaauaagaaaaacuauuuuugcaacucuugaaaagcauuggauuugaaaggauagagag

SEQ ID NO: 4150133 - RNA, 76 nt, Human
cucuuacaugcacacaaaugugaacgugccucugauguuacuccaagauagguagugcauauuuuggauguaagag

SEQ ID NO: 4150134 - RNA, 86 nt, Human
cucuuaccuggugcuccucgcuaccaggugugggaucucccauaguccugggugugcaaggcagauacaaacaugccaggucagag

SEQ ID NO: 4150135 - RNA, 58 nt, Human
cucuuacgguacuaugaguugccaccaugucaugcaacauaacauauugcugaaagag

SEQ ID NO: 4150136 - RNA, 64 nt, Human
cucuuauaugcacauacauugggucuacugcacaaauuacagggcuccaagugucuuaugagag

SEQ ID NO: 4150137 - RNA, 85 nt, Human
cucuuaucuccuuuagccuggcagauugacauagccauuaaugaaaaugaacaauaugccagaaauauuuaacaggagguaaggg

SEQ ID NO: 4150138 - RNA, 62 nt, Human
cucuucacugguccuagguucagucucugccaacacagagcugccccaggccucgggaggag

SEQ ID NO: 4150139 - RNA, 79 nt, Human
cucuucaguggcuuuguuuccaaaugaaaaccagaaaaaugaugcuggaauuucauagaggcagcggcggauggaagag

SEQ ID NO: 4150140 - RNA, 67 nt, Human
cucuucauaggcacccugucugagggagaguucugcaguccccucaggcucugggugccuaccuggg

SEQ ID NO: 4150141 - RNA, 57 nt, Human
cucuuccaggaggauauggucccuuuuaccauuuagggacaguaguagucaggagag

SEQ ID NO: 4150142 - RNA, 57 nt, Human
cucuuccucuucugcugagaagugggggaauggacuuuggaggugggagggggaaag

SEQ ID NO: 4150143 - RNA, 81 nt, Human
cucuucuaaaccucuauguuaccucuauuagaauauuauuucugauguaguuuguggagaaacaaagcaggaauggaggag

SEQ ID NO: 4150144 - RNA, 89 nt, Human
cucuucucaccuugcagaauggagugagaguuaccaaauguagagcaaggucacagacuugucuccagggaugcuaggugaugacagag

SEQ ID NO: 4150145 - RNA, 70 nt, Human
cucuucuggccgccuccucacagcagccugggagcauucccuccacagcagacagggaggcggcugagag

SEQ ID NO: 4150146 - RNA, 60 nt, Human
cucuugaccucgugauccgcccaccuuggccucccgaagugcuaggauuacaggugugag

SEQ ID NO: 4150147 - RNA, 72 nt, Human
cucuugagcccaggaaguggaggcugcagugagcugucacugcaccacugcauuccagccugggugacagag

SEQ ID NO: 4150148 - RNA, 57 nt, Human
cucuugcuugcaaguggggauaaaaauagcuaccccauagauaauuguaagggauag

SEQ ID NO: 4150149 - RNA, 77 nt, Human
cucuugggcaccuuucagucaguuaacucagaaaguguuuacuuucaugacuuaacugacugaaagcauccaaggag

SEQ ID NO: 4150150 - RNA, 79 nt, Human
cgcuuagcugccagcccagcugccugccugcugucuccccacagggcugcaguagagccagcaugggaaacauugagug

SEQ ID NO: 4150151 - RNA, 56 nt, Human
cgcuuauguguauagggccaguaacauuuucagaguugucuuguaacacauaagug

SEQ ID NO: 4150152 - RNA, 90 nt, Human
cgcuucccgagucuaguuaggaguauaggaaugccuguuucuggcacauuaaccagucugggcauacaugagcucuaaagcagggaagug

SEQ ID NO: 4150153 - RNA, 108 nt, Human
cgcuucgcucccggccacgccuaucccaugaugcccccaaaucuggcucaaaagcugcuaguacugagcgcugguaaggggugcggggguggcguuggugggaaagug

SEQ ID NO: 4150154 - RNA, 72 nt, Human
cgcuucuccagccaccaccacugaaagguuauagaauauucuauuucaggacaccuuuaaaaacgagaagcg

SEQ ID NO: 4150155 - RNA, 55 nt, Human
cggaaacuugagaaccagccagaacauguagccuggcucuuggugcuaguuucug

SEQ ID NO: 4150156 - RNA, 69 nt, Human
cggaaagguggcuuccagcaguuauuacauucuucccucuucggaaggacugcuaggaagccgugucug

SEQ ID NO: 4150157 - RNA, 78 nt, Human
cggaaccagagucaggggcuauucagacuggcacagccaauguguccuacugaggagcuccuuugcugcuguguuuug

SEQ ID NO: 4150158 - RNA, 73 nt, Human
cggaagggcccagcgugguuccaucugcacauuccccuaccuauuccagaccuacacacgcauggguugucug

SEQ ID NO: 4150159 - RNA, 58 nt, Human
cggaagguggccggaagagccccgucccagcucagaugggcuuccccgccaucuuccg

SEQ ID NO: 4150160 - RNA, 65 nt, Human
cggaaucggaagaggugcacaugaacucagaaaaacugcguuucuaagugugauuuuagauuccg

SEQ ID NO: 4150161 - RNA, 129 nt, Human
cggacagaguuccuucucaggcagccggccaaggacaccagaaauuaagcaggggucuguggcucugccgucuagcuaugaccaaauuuaaauuugugcuuuuugccuugccugccagugaaccugcug

SEQ ID NO: 4150162 - RNA, 80 nt, Human
cggagagcagccgcgggcccuuuaagggccgcgaggugcgcggucucuuuaaggcggguccuggugguuucuguuuucug

SEQ ID NO: 4150163 - RNA, 62 nt, Human
cggagaugguauuugggugguaguuugcucuccaucagugcuaaagcaaaugccccucucug

SEQ ID NO: 4150164 - RNA, 69 nt, Human
cggagccuucaaaggaggugcugggucuuguccuccagcccgagcgcaccuguggaaaucaugguucug

SEQ ID NO: 4150165 - RNA, 113 nt, Human
cggaggcuagaaaucuaagaucaaaggugacaggauugguugcuucugaggccucucuccuuggcuugcagguggccaucuucguucugugucuucacaaggucuucccucug

SEQ ID NO: 4150166 - RNA, 125 nt, Human
cggaggugggaaggggccuaacggucagggcucagagaagcgguuucgccuucuuuuccgcggagggauccagacacgaccgcguccugaggcgguucugaaaagccgggccccuuaaaccucug

SEQ ID NO: 4150167 - RNA, 92 nt, Human
cggaguuuguguuuugcuaacagaguuuguaaggcucagaggguguugaaauguuucugagguuacugcuuuguagaacacauaggauuuug

SEQ ID NO: 4150168 - RNA, 79 nt, Human
cggauagcgcaauugauuugcucuuugcuuuuuacuugggagacaugcccagcugaacauguagagcaucucaggucug

SEQ ID NO: 4150169 - RNA, 55 nt, Human
cggaugagccacuuuggaugggauguucacuucccagacaaucauuggccaccug

SEQ ID NO: 4150170 - RNA, 78 nt, Human
cggauuauuaggcaaagauauuacguaguaaaguuuacuuaaacuaagguaagauuuuggacugugccuaaugauuug

SEQ ID NO: 4150171 - RNA, 64 nt, Human
cggauuuuaguagucuuuagagaucauuuaccgcaaugauuuccaaaaggcuucuaagggccug

SEQ ID NO: 4150172 - RNA, 55 nt, Human
cggcagaacgcuuguggccgccguuacgcucguguggaaacagcgccaucugccg

SEQ ID NO: 4150173 - RNA, 60 nt, Human
cggcagaugagguguguggccacuagaggcggcucugaauggcaggcaccucaagugcug

SEQ ID NO: 4150174 - RNA, 57 nt, Human
cggcagccagcggcucgagcaugcgcugagaguuugugcagcuggcccuggcugccg

SEQ ID NO: 4150175 - RNA, 69 nt, Human
cggcccaugguggcuuggaccagucacagugguccgggggcccagaugaggucugagcagaguggggug

SEQ ID NO: 4150176 - RNA, 78 nt, Human
cggcccauuugcguucuaauuucaggcguuccucaauccucuguggaaccaggaagggcgcaaauuauaaagggacug

SEQ ID NO: 4150177 - RNA, 57 nt, Human
cggcccuccagcugggguccuugcccacaggugacaaccucccagcuggcagugccg

SEQ ID NO: 4150178 - RNA, 55 nt, Human
cggccgcgacccgcagcucaaucgcagggcaaaccgagcugccugugcgcgcccg

SEQ ID NO: 4150179 - RNA, 81 nt, Human
cggccuccucuagggcuggguacacucuugccauggacaucugccuccugguuccuguuuggcccaguucagcccaggccg

SEQ ID NO: 4150180 - RNA, 70 nt, Human
cggccugcuaggcucugguagagccagggcuggaauuucccuggccccagaucccagagucuagagguug

SEQ ID NO: 4150181 - RNA, 64 nt, Human
cggccuggagucuuagguuauggugagcccaguguuggguuuuacuguggcaggcccaguguug

SEQ ID NO: 4150182 - RNA, 125 nt, Human
cuccuucccuuccccacccucuggccccagaaucuccuuggucucguuccaggccccccagcccugggccucagggucugaggagaccgucuggagccaggccugagucgggggugggaagagag

SEQ ID NO: 4150183 - RNA, 77 nt, Human
cuccuuccgcggucuuucuuacgcauaccuaguauauagagaaauuugaaccuuuugcuaagaaguuauggaggggg

SEQ ID NO: 4150184 - RNA, 87 nt, Human
cuccuucggugguggagauucagggacucacuccuauaauuccuucagcuugggucucuguugccuccaucaaguggccguaaggag

SEQ ID NO: 4150185 - RNA, 112 nt, Human
cuccuucuccucuucuccucaaaggcaggucauggccacuuuuuaaucugcaaaaaaaggauuacuugaguuucacuaaugaccuuuuuugacaagaaaaaaugggaaggag

SEQ ID NO: 4150186 - RNA, 99 nt, Human
cuccuucuuuccucccucucucugggcuuuguccugagacauccggaaaggaaagggcagucagacagcagccacagggagagggugguaaguggggag

SEQ ID NO: 4150187 - RNA, 103 nt, Human
cuccuugccucuccgguguguuuccugugucccgggcacccugcagaccuccuguuccugccacgggccuggggcaggggcaucaccaggacaggcuugggag

SEQ ID NO: 4150188 - RNA, 110 nt, Human
cuccuuggccaucauuccguucacaaucauuccguucacaacagggccaugcugcaucuggggaaaggccggugaucaugugagcaugaguggucauggucuauaaggag

SEQ ID NO: 4150189 - RNA, 72 nt, Human
cuccuugguguaguacugagcaauucaucuuccucuugacacugcccucaccuguaucugaaugccaagggg

SEQ ID NO: 4150190 - RNA, 109 nt, Human
cuccuuuaggaugguagauuuaguuagagaagccacaguggacaggucaaauccugugaucuuugguaaucuggcacauucauugauuuuauuauuuuguaaauuggag

SEQ ID NO: 4150191 - RNA, 63 nt, Human
cuccuuuucauagucaaguguguaugaguuuuuuagcugauggacguaggacuguugaaggag

SEQ ID NO: 4150192 - RNA, 128 nt, Human
cuccuuuuucagcacauuugguuugccuugauuuugacaagagugugauugcugcuaccccauuaugaaauuggggauagagaucuguggauucauugucaagguggaggaugcaggcagggaaagag

SEQ ID NO: 4150193 - RNA, 87 nt, Human
cucgaacauguuccagccuagcccuggagcagggaaauacaguuugcuggauuccucccuucuuugggugguaggggcagauuuggg

SEQ ID NO: 4150194 - RNA, 64 nt, Human
cucgaggcuuuaggucuugguuugaauccagacuagaaaaucauuacuuauuaaaagccuugag

SEQ ID NO: 4150195 - RNA, 81 nt, Human
cucgagguggagguguugggugaggugccugcagcuggcagcaguucccuccgccagcacuucuuuguuacccgcuucgag

SEQ ID NO: 4150196 - RNA, 110 nt, Human
cucgccaugaggacacuggaaccucggagccuguagcugggccucggcagugcagccacgguguauggcacugcagaguguuugcuaggcucaaagccggaaucugcgag

SEQ ID NO: 4150197 - RNA, 71 nt, Human
cucgccccugccugugggcaucaacaugucugucgagguccuggauugaacauaggcagaggaagagcgag

SEQ ID NO: 4150198 - RNA, 72 nt, Human
cucgcccgcacaggagcaagaguccucgucguuuuuaaucuggaaaugcacucugcuucugugacggguggg

SEQ ID NO: 4150199 - RNA, 75 nt, Human
cucgcgccugcgccaucucccggaaaaauuucgcgccacgcagagaugacagccaaggagaugaaggcgaccgag

SEQ ID NO: 4150200 - RNA, 68 nt, Human
cucgcguggcccgaagauccgagggucacacuacgugacuucugggugucuguggguacugcuguggg

SEQ ID NO: 4150201 - RNA, 67 nt, Human
cucgcugcagcccugcggaucacuucuccaggccuagggcugagggaucucuggggacugcacugag

SEQ ID NO: 4150202 - RNA, 62 nt, Human
cucggcuuccacauuuuuucaugucauuauuaaacucauggagaauacaaccagaagcugag

SEQ ID NO: 4150203 - RNA, 69 nt, Human
cucggguccuucucuagccuccuggguaaucucugcauauagagugcccaagcagaggagugauucggg

SEQ ID NO: 4150204 - RNA, 67 nt, Human
cucgggugccugcccugaaagaggugaaggaacucugaccuugccuaaacccagcccaggccccggg

SEQ ID NO: 4150205 - RNA, 62 nt, Human
cucgguagccauuggcaaugaagccucagaaauguuuucaggagucaugucaaugucucuag

SEQ ID NO: 4150206 - RNA, 80 nt, Human
cucgguagccguguggcgcagauuuccuccuccguggucucccgggcaacgcggagcugccugccaagccugcugccggg

SEQ ID NO: 4150207 - RNA, 80 nt, Human
cucggugguggcacugacaccuggcugaggucaccaguagcugagagacuccuuagcuagugcucagcugucacacuggg

SEQ ID NO: 4150208 - RNA, 62 nt, Human
cucguagggagagugcuacacuccagaacuagcagaagugggagcuguuacucucucuggag

SEQ ID NO: 4150209 - RNA, 64 nt, Human
cucgugugagaaucacagccaggucagcugguagccucuggcaagugauuuaucaugucccgag

SEQ ID NO: 4150210 - RNA, 65 nt, Human
cucuaauugaauaguuauucugcucaucucugagagauugagcaggcaaaguaucauauuuagag

SEQ ID NO: 4150211 - RNA, 97 nt, Human
cucuacacagcuuccgagcuagcagcagcacacauucagggaacauuggagggauuuucuucuucuuuugugggugguaauguuggugguuguggag

SEQ ID NO: 4150212 - RNA, 101 nt, Human
cucuacccugaaaaagccuccacaauuguaagugugcacuaauaaugaaaggugcauugaugaugcacauuuauaauugugggggcuuugucaaggugaag

SEQ ID NO: 4150213 - RNA, 84 nt, Human
cucuaccuuguacaagcugugugacuauuucugagucauucaugagcucuuagaggaccaucaguuugcucauaauggguggag

SEQ ID NO: 4150214 - RNA, 75 nt, Human
cucuacuaagcugucuagauuuuauccauuuuaccuugaugauccagauuuugggcaguucaaaaaugaguagag

SEQ ID NO: 4150215 - RNA, 65 nt, Human
cucuacucgauguguccacuuggcugucuaauuggugucccaaaguuaacacauccagaauagag

SEQ ID NO: 4150216 - RNA, 60 nt, Human
cucuacucugcuuucaguucaacaauuccuuccuaguuagaaggacugagguaaggugag

SEQ ID NO: 4150217 - RNA, 85 nt, Human
cucuacugaauaccuaagagaaucagugagcaguugugauaugaugguaucuaccacugauuccugaugugaaauuguucaaggg

SEQ ID NO: 4150218 - RNA, 67 nt, Human
cucuacuuauucaucugcaccaguucugacucucccagugagcagccaauuggaggaugaaguggag

SEQ ID NO: 4150219 - RNA, 78 nt, Human
cucuagaaacaaacaauuaguuguguggaagaaaugaaauaauagaguccagacuguccugacuguuuguuccugggg

SEQ ID NO: 4150220 - RNA, 58 nt, Human
cucuagaacugauugggaagaaaggaugugcaagucuacuucccggaagaucuuggag

SEQ ID NO: 4150221 - RNA, 107 nt, Human
cucuagacagccucggugccuuacucugagggauguacaagaaacauuuuuccagugauggaaagauucuuaccuauacccagugagaggaaagagagcauuugaag

SEQ ID NO: 4150222 - RNA, 81 nt, Human
cucuagagguaaaguauguuguggcuuuuaaaauagaauuucuguguuuaaaaaauguccauuuaugcauuguuucuagag

SEQ ID NO: 4150223 - RNA, 63 nt, Human
cucuagaguacgggcuggcaugccucuuuucuguuucagcguguuggcagcagugcucugggg

SEQ ID NO: 4150224 - RNA, 130 nt, Human
cucuagcucuugaccuugggcaagucacugucccugucugaacuguuuccucaacugucaaaugggggaguaaaugccuuccccacagcuuguggagagaaugcagugggcucaugguugguggcaagag

SEQ ID NO: 4150225 - RNA, 82 nt, Human
cucuaggcuggcugguuugcauucugaaaggcucacucacaggugagccauuaccaccugcaggaaucagcuagccugggag

SEQ ID NO: 4150226 - RNA, 60 nt, Human
cucuagucaccuuuggcaccugcaaaauagaaguuuugcuauaguggucuagggugagag

SEQ ID NO: 4150227 - RNA, 61 nt, Human
cucuagucauuugcggugucugcggaggucugcaagaucacaaucuucaaaucgauucgag

SEQ ID NO: 4150228 - RNA, 60 nt, Human
cucuaguuaguauucuucagugguuggaaaucucucuaaacuguuaagacguagcugggg

SEQ ID NO: 4150229 - RNA, 77 nt, Human
cucuauacaaguuucacuuugacauguuaccuuaucauauacuuaauaagaggaggcugaucauaugagguauagag

SEQ ID NO: 4150230 - RNA, 113 nt, Human
cucuaucucuuuuuuaacugcuuuauugagguauaguugacaauuuaaaauuacauauauuuaagauguacaaccacuucucuugaagacagagugaaaagguccugaaagag

SEQ ID NO: 4150231 - RNA, 97 nt, Human
cucuauguugugaaugcucauucucuugucuguauuuugaagguucacucuggugaacccaggaggugacacagggcuuggcacaaucacuauagag

SEQ ID NO: 4150232 - RNA, 113 nt, Human
cucuauguuguucacggguuguucgcaguuuaguccugccaccauggguugaaggcacaaaauaaauaaauccaaugcagauaagacaaacaccucauggucauaaccuagag

SEQ ID NO: 4150233 - RNA, 58 nt, Human
cucuauuugucaguuuggcuuuaagguuuucauuuuguuggcuagaagacagauaaag

SEQ ID NO: 4150234 - RNA, 81 nt, Human
cucucaagcguggcugcucugauggacgcugaacacugauuucugaacgaagccuuucccacagaugccacacuuguaggg

SEQ ID NO: 4150235 - RNA, 84 nt, Human
cugcugagggcuauucucuguuuccaagaugaaacuuuuugguaaauccuuggaggggaggaaugcuguguccucaaauggcag

SEQ ID NO: 4150236 - RNA, 68 nt, Human
cugcugagguccuugcucagacucaccccuauccauaagucugagacaaaguugccuuuacaaagcag

SEQ ID NO: 4150237 - RNA, 57 nt, Human
cugcugauguaagccaugcucugcugaucucaacggaguguaccuaugcaucugcag

SEQ ID NO: 4150238 - RNA, 56 nt, Human
cugcugcauuccucuuuaugagccuucucuggggugcuuaagguacaaugcagcag

SEQ ID NO: 4150239 - RNA, 77 nt, Human
cugcugccucugcauguuugcaucugaggaauuuucucuaguacugcaaguccuccugucagcacgcaugaggccag

SEQ ID NO: 4150240 - RNA, 66 nt, Human
cugcugcugagaaaaaugaaaagcucuuaaaggccauagacaaagcuucauugaccuccgcagggg

SEQ ID NO: 4150241 - RNA, 55 nt, Human
cugcuggaaucuuuaagcuggaaagaaauccagucuugaaagguagagucuacag

SEQ ID NO: 4150242 - RNA, 57 nt, Human
cugcuggccuagcccauccucucuggagcucaggcugaggcagggcuggcucagcag

SEQ ID NO: 4150243 - RNA, 55 nt, Human
cugcuggcuucuagucauucaaaucacuaauuugaauagugaagaagugagacag

SEQ ID NO: 4150244 - RNA, 68 nt, Human
cugcugggaagucaggcuauauuuuuggcaucacagugaucuccuuaguaccugauuucacagaccag

SEQ ID NO: 4150245 - RNA, 58 nt, Human
cugcugggguuuccugcagauggagcugcagcucagggacaaggggagaccccggcag

SEQ ID NO: 4150246 - RNA, 126 nt, Human
cugcuggguagcauaagaaguggauauuauggguauauggcuaaggggaaauugaguugggaaauuuaguuaggauuuggugguauaaaauuaugugguauauagucaccucuaugucucauuaag

SEQ ID NO: 4150247 - RNA, 91 nt, Human
cugcugggucaggaguccugccugcagccuucauccagugcauguugauggagcacgggaugcauggcaggugcuaaucucagaucugcag

SEQ ID NO: 4150248 - RNA, 121 nt, Human
cugcuggucuugcuuuugaaaacugugacuuuguuauucuagggccucaaguccugaucagagcagguucuagaaccuaggaguacuaaagucaguguaagaaaaauugaaagagaagcag

SEQ ID NO: 4150249 - RNA, 93 nt, Human
cugcuguacucaacuacauggcugcaguugugugaaggccgccccuccuaggcugucuggucaacaacugaguguggugagagacuaaggcag

SEQ ID NO: 4150250 - RNA, 56 nt, Human
cugcuguagagaaggguugucacuauguugcagcucugagacucuacagaagucag

SEQ ID NO: 4150251 - RNA, 75 nt, Human
cugcugucaugucugaggucauuccaaggacaugggagacugcuguccaugguuggauccucuuaacaucagcag

SEQ ID NO: 4150252 - RNA, 107 nt, Human
cugcugugaucaaggaauuagauaaucuggcuuguuugcuuaaggggucuguaucuugagacuuuuauagggcaguauuaaagcucugagccuccuuauuaugccag

SEQ ID NO: 4150253 - RNA, 58 nt, Human
cucucucuccuggguaaaaggguugauugccauccaggcacauccccaugagagagag

SEQ ID NO: 4150254 - RNA, 56 nt, Human
cucucucucggucuucugacccgaggauccuaccauguuaugaaggcuggggggag

SEQ ID NO: 4150255 - RNA, 62 nt, Human
cucucucuuugauauuuuuagccaucagauaccuugucugcaaugugugcucagagagugag

SEQ ID NO: 4150256 - RNA, 61 nt, Human
cucucugcaaguuuugaaauagauuuuugcauucauuuugacuuacggacuugcaagagag

SEQ ID NO: 4150257 - RNA, 80 nt, Human
cucucugcccccacucucggucuacccccuccaaggaguccaaagacccaggggagguccucagggaaggggcaagggag

SEQ ID NO: 4150258 - RNA, 61 nt, Human
cucucugcuuuacucauaggguuucaguuguuugaccuauuucucagaauagagcugagag

SEQ ID NO: 4150259 - RNA, 89 nt, Human
cucucugggagucuucugaauuacagcagguguuagguucaguagcgccuagcuuugccugaaguaaucagcaaacuucaaacagaaag

SEQ ID NO: 4150260 - RNA, 80 nt, Human
cucucugggauacacauuuuagcuuugucuuuauuggagcaaagacagcuaauaaaugaguguguucucaugaaugagag

SEQ ID NO: 4150261 - RNA, 62 nt, Human
cucucuggggcuuguagcagguuuuaauccugagauuacacucugguugugggccuugggag

SEQ ID NO: 4150262 - RNA, 57 nt, Human
cucucuggucccagauuccagaagcccucucaucuggcuuuggcucuggucagagag

SEQ ID NO: 4150263 - RNA, 66 nt, Human
cucucuucucccucccaugucuccaugcacucuauguaaugaggaaauagagggaaugaaggagag

SEQ ID NO: 4150264 - RNA, 58 nt, Human
cucucuucugcagaauuucucagagccuuugcuaugcucugagcgucuaagaggugag

SEQ ID NO: 4150265 - RNA, 67 nt, Human
cucucuugaaggggggcaguguugaucugaaucuuuuugucuaaugcuuuuucuuccucugggaggg

SEQ ID NO: 4150266 - RNA, 63 nt, Human
cucucuuggaugguauaagaauaauagaugaggaagcuacuauucaccuuucaugcaggagag

SEQ ID NO: 4150267 - RNA, 75 nt, Human
cucucuugggcucucugggccuuuguuccucuuuauuuacagagagagaagcauucuucucagggcacaagagag

SEQ ID NO: 4150268 - RNA, 76 nt, Human
cucucuuuacuggcugggugacucaggcaaguggcuuugcaucacugagccucaguuuucucaucuguaaaauggg

SEQ ID NO: 4150269 - RNA, 69 nt, Human
cucucuuuuucgugugccgaagccaugauuucucaaauucauucaguugugucauacaggaaaaggaag

SEQ ID NO: 4150270 - RNA, 59 nt, Human
cucugaaagacaagcucucauuauucccaucuuccugaugaugagcaguguguucagag

SEQ ID NO: 4150271 - RNA, 84 nt, Human
cucugaaagguggugggcagccuccuuuauuuuccuguuuucaugcuggaagauggaaaauggguuggaucacacucuucagag

SEQ ID NO: 4150272 - RNA, 67 nt, Human
cucugaaaguuagagaaaauagguggccauaagccuuaagccauauaaugaguuuaaacauucagag

SEQ ID NO: 4150273 - RNA, 56 nt, Human
cucugaacaacuugucauuccaagaaacacuugugaagaacaguuuguuccuugag

SEQ ID NO: 4150274 - RNA, 101 nt, Human
cucugaacuuggugaaaucaauuuuugacaaauugagaugaagaacuaauaugaggcuuggcauccacuuugcaaguuuaugaucuaaguugcauacagag

SEQ ID NO: 4150275 - RNA, 66 nt, Human
cucugaagggagggccaagcccuccauccaaccauucacugggccugucccccuccuccuucagag

SEQ ID NO: 4150276 - RNA, 59 nt, Human
cucugaauacuuuaagaauuguggaaagguugcacuccagaaaaguagaguuuucagag

SEQ ID NO: 4150277 - RNA, 65 nt, Human
cucugaaugaaguuauauuggcagcgcuacguuuaucacauuggccacuguagacucauucugag

SEQ ID NO: 4150278 - RNA, 73 nt, Human
cucugaauucuuuuguuuauggauuguagaaacugcuuuggggguaguuggauguagaagcagaaggacagag

SEQ ID NO: 4150279 - RNA, 60 nt, Human
cucugacuucaugaguguucaugaagcucuuauuuuagagcuauauucaagaagacagag

SEQ ID NO: 4150280 - RNA, 67 nt, Human
cucugagcacagcugucugaagcaggaguccugacccaggaaacucaaauggacaguugggccagag

SEQ ID NO: 4150281 - RNA, 59 nt, Human
cucugagcagaggccguggcuacuugaucugccgggaccagggcaacgcugucucagag

SEQ ID NO: 4150282 - RNA, 58 nt, Human
cucugagcccgcugcagccccagguccuuggggcagggguagccaggcgugcucagag

SEQ ID NO: 4150283 - RNA, 70 nt, Human
cucugagcccugugcagauggcagcuggggcaggccuccugcagacccaggugacugacagggcggugag

SEQ ID NO: 4150284 - RNA, 65 nt, Human
cucugaggauggggaaaaaauggaucuuuucuacauaaagacucaauuguucccuaaucuuagag

SEQ ID NO: 4150285 - RNA, 77 nt, Human
cucugaguagcugggacucaacugucugggacccacugucugggaacucagccgggugagcccugcuuggcugagag

SEQ ID NO: 4150286 - RNA, 64 nt, Human
cucugaucuagaccagaagcuguuguaagaauaucuugacaacaucucucacuggaagccagag

SEQ ID NO: 4150287 - RNA, 123 nt, Human
cucugauguugccaucucugucagcaagccgaaccaaacuguucacacacggaggccacaggacacugaccauugccugggcagggugugggggucggcagggcugggcagaccggcaaaggg

SEQ ID NO: 4150288 - RNA, 96 nt, Human
cucugauuauuggccugcuguuuguauggaccuguucuaugcauacuuuguaaugguucacauccuauaauuacagcaccaacauuuccuucaggg

SEQ ID NO: 4150289 - RNA, 76 nt, Human
cucugauuuucauugacaguucuuuaaguugcuuuggaaguguuguagcauuuugcuccuuaaggcagagucagag

SEQ ID NO: 4150290 - RNA, 76 nt, Human
cucugcagccagaggcaugaaaacuuuuuaaaaaguaucuucuuuucaguuucacucaguuggcuguaaauuagag

SEQ ID NO: 4150291 - RNA, 87 nt, Human
cucugccucauaucgggaaaguuuauaaugcucucuucaucaggugauagcagaagaacgucuuauaaauucacugauuagacagag

SEQ ID NO: 4150292 - RNA, 80 nt, Human
cucugcucauugcuguugguaguucugcuuguggccagcaaagccacauaauaccuaggacaguuugaugacaugcaggg

SEQ ID NO: 4150293 - RNA, 112 nt, Human
cucugcuuauaaugugugcuuuucggaggcuuuucuuagcauuaacggacgcucugggagaggagaaaguuggcagagagaagccuagcaaauauauaaauaagcuuuggag

SEQ ID NO: 4150294 - RNA, 100 nt, Human
cucugcuuuacauggcuacguuguuugagggcaggaguuggugagaauuaguuuggaaaacugacuucucucauucagacauagcuuuucuggagcagag

SEQ ID NO: 4150295 - RNA, 76 nt, Human
cucuggaacacagacagggcugaacugagcuugugagacuucaggucuugaggaccggccagcccuugggccagag

SEQ ID NO: 4150296 - RNA, 76 nt, Human
cucuggaccacagugcauggccuguaggcugacugcuuguuucugcuuuaaucuacauucugcucuguguucagag

SEQ ID NO: 4150297 - RNA, 66 nt, Human
cucuggacuuguacauacucaguuuugcccuauccggguccacccugagcauguagaguacuggag

SEQ ID NO: 4150298 - RNA, 57 nt, Human
cucuggagaacgcuauggaucuguagagagucccauagauuuguggagugcucugag

SEQ ID NO: 4150299 - RNA, 60 nt, Human
cucuggaggcagcaccagccagccaggaccagggcauggguggacugcagugucccagag

SEQ ID NO: 4150300 - RNA, 59 nt, Human
cucuggagugcagccugguggcuuuuaagaggagacacccggcgaaaugcucuccagag

SEQ ID NO: 4150301 - RNA, 59 nt, Human
cugaggcagaagaaaacuaaaagauucugaaggauugaaagaguuuucugcugcaguag

SEQ ID NO: 4150302 - RNA, 104 nt, Human
cugaggcaggagaaucacuugaacccaggagguggagguugcagugagccgagauugugccacugcacuccagccuuggcaacaagagcgaagcuccgucucag

SEQ ID NO: 4150303 - RNA, 104 nt, Human
cugaggcaggagaauugcuugaacccaugagguggagguugcagugagucaagauugugccauugcacuccagccugggcaacaagagcgaaacuccaucucag

SEQ ID NO: 4150304 - RNA, 78 nt, Human
cugaggcauccacugagcagaccauggcagaggucuucuuaaagcaccuacugugagcauggcugccccagugccuag

SEQ ID NO: 4150305 - RNA, 64 nt, Human
cugaggcauguuacaggacauaggaggagggacagccacccugaauguccuguugcugccccag

SEQ ID NO: 4150306 - RNA, 83 nt, Human
cugaggccaacuucugggcaugcugaguagccagaaguuuuauucaccauaauagaagcuuuucucaguguccuugguaucag

SEQ ID NO: 4150307 - RNA, 60 nt, Human
cugaggccugggggcguggacgugacuauuaugaugcuguccaagugcuuuugguuuuag

SEQ ID NO: 4150308 - RNA, 80 nt, Human
cugaggccugucauugucuuguucacauaccagggcgaguugaagaugaaggaugggaccaagacaaauggaguccugag

SEQ ID NO: 4150309 - RNA, 84 nt, Human
cugaggccuuucaagcucccagggcugggcaaguuuuaugaaacgucuucccagaagccacugggagaaccagggcagccucag

SEQ ID NO: 4150310 - RNA, 58 nt, Human
cugaggcucuuuaaaucuuuuggaucuacccagguuccaggagaauuccagggcccgg

SEQ ID NO: 4150311 - RNA, 56 nt, Human
cugaggcugggcaugggguccacaucugguagaaaggucccagugcucagucacag

SEQ ID NO: 4150312 - RNA, 79 nt, Human
cugaggcuuaaugaguuaaaucacuugccgaauaucaugguuugaaaauggcagaagugaauuaaaaagugggccugag

SEQ ID NO: 4150313 - RNA, 55 nt, Human
cugagggaauggaaggagguggccgcgcuaccaccaucugcuugccuguccucgg

SEQ ID NO: 4150314 - RNA, 61 nt, Human
cugagggagaagugaucucuacugauagcuuucuucaguggaggaucuugguuucuuucag

SEQ ID NO: 4150315 - RNA, 77 nt, Human
cugagggauugacucaugggcuugacccuacagaaaguuaugaacuggucuguguguuugcccugucccuucuuuag

SEQ ID NO: 4150316 - RNA, 78 nt, Human
cugagggauuuuuuuugggaaaaguaaacuuugccuuacacuugggcauuuguugaguugccagcuaacaucucuuag

SEQ ID NO: 4150317 - RNA, 64 nt, Human
cugaggggcaggauuauugggauuuuucacuucuaaaauuuuguuuaagugaucugcuuuuuag

SEQ ID NO: 4150318 - RNA, 126 nt, Human
cugagggggucuuucaaccuucccucuacauauccggcaucugaagcaaaugaaacagcucucaaucugaugaguugacaguuuuucaaaucuggcauguagugggugcucuuggagaagccucag

SEQ ID NO: 4150319 - RNA, 72 nt, Human
cugaggguccuggaggaauaaucuccuacccuuaaguaagggggagggaggcaguucuucuggggccagcag

SEQ ID NO: 4150320 - RNA, 72 nt, Human
cugagggucugacaaugugacuuagccaucaucaagguaagugaugucugaggacaaaugucaagaucucag

SEQ ID NO: 4150321 - RNA, 61 nt, Human
cugaggguugucuagauuuccucccuuccugcucaagggggcagguuuuuauaggcuucag

SEQ ID NO: 4150322 - RNA, 76 nt, Human
cugagguaauuuuccagauaauccccaccccaaaucggguaaugccuggccugauugaucaggacaguugccucag

SEQ ID NO: 4150323 - RNA, 63 nt, Human
cugagguaccuggagcaggucccccugagcaccgucaacagggucuccuucucaggcauccag

SEQ ID NO: 4150324 - RNA, 81 nt, Human
cugaggucauggggagcucguggcagaaaggaauagaagcuuccaucuggcuggcuucucuguuacagcccccugccucag

SEQ ID NO: 4150325 - RNA, 59 nt, Human
cugaggucugcagggcugugcauacgaucugagccguacugaaaggccaaggacuucag

SEQ ID NO: 4150326 - RNA, 58 nt, Human
cugaggugcuagggucccugcuggccaacccugccauccagagacugggcaccagcag

SEQ ID NO: 4150327 - RNA, 88 nt, Human
cugaggugggcccuauauuaguuaaggguauucuuuuaaauuucacauucucagaaggagaaagaaauuuuugauuggcccagcuugg

SEQ ID NO: 4150328 - RNA, 85 nt, Human
cugagguugugcagacagcugaaggaugauucagggagcagaucccagcucauucucaauucuccuaucagcuggccagcuuggg

SEQ ID NO: 4150329 - RNA, 78 nt, Human
cugcauccuuuucugugcagugagcagcugacguggugugccagcucucauuguauaggcuuuuaucacaggaaguag

SEQ ID NO: 4150330 - RNA, 81 nt, Human
cugcaucgaugagugccucugagccacaugcguuuguucagguggaugggaugaggcagcucagggggaaauugagggcag

SEQ ID NO: 4150331 - RNA, 59 nt, Human
cugcaucucaaccagacugcucucugcaacgauuccagagaugcaguuaugagaugcag

SEQ ID NO: 4150332 - RNA, 56 nt, Human
cugcaucucugcuagucagucauuccagccgugacuugguagcuccaggggugcgg

SEQ ID NO: 4150333 - RNA, 57 nt, Human
cugcaucugcauaaucaacuucuuaaaauuuuuuaggaguuguauugagcagauuag

SEQ ID NO: 4150334 - RNA, 60 nt, Human
cugcaugagccugaggcuccuugagaagauucugggcagggagcuaaaaggcuggagcag

SEQ ID NO: 4150335 - RNA, 73 nt, Human
cugcaugagugaggugucugaguggggaccuguggacagcguggcuuggcucaggcccuggcuuuacauggag

SEQ ID NO: 4150336 - RNA, 73 nt, Human
cugcaugucugugucuaaucaggucagucagaacucugcgaugucuaguugccuuuuagcacaacccaugugg

SEQ ID NO: 4150337 - RNA, 57 nt, Human
cugcauguguguuaagaugcuuucugcguugucagccaaggaaagccccauaugcag

SEQ ID NO: 4150338 - RNA, 72 nt, Human
cugcauucagucuguuguggcauauuguuuugguugaaguauauaaagauauggccucauacagacauguag

SEQ ID NO: 4150339 - RNA, 83 nt, Human
cugcauucccccaguagggccccaaaaugccaggcucuguggaaagcagaccuugccugcuggggcuggggcuggggaugggg

SEQ ID NO: 4150340 - RNA, 55 nt, Human
cugcauuccuuccagacacaagaccuagaauacauaggcuggagaaaggaaucag

SEQ ID NO: 4150341 - RNA, 92 nt, Human
cugcauuugaucgauguaucaucuuaaaucuagaauguggugcugcuaccagacucuacauuuuccuuggggauauuaguuguuacaugcag

SEQ ID NO: 4150342 - RNA, 126 nt, Human
cugcauuuuaggccacccagucuaagacagagagguaaaauauauagugcuugggccacucguuuguuauuaaauucacuauguauucagcuucacuuauauccuuagaaaaguuugcgaaugcag

SEQ ID NO: 4150343 - RNA, 82 nt, Human
cugccaccauuaaugaacuaaaucagccuuugcuauuuuaugaucugucucauuaaaauggaguugauuuucucugugguag

SEQ ID NO: 4150344 - RNA, 130 nt, Human
cugccacccaccacuucacccaagggcuuccaagaacacauguucuuaacuucuguuuccucugaggccuucgagcagugggaaggaacagggugucacuuggagcccaagugucucccaagggguuuug

SEQ ID NO: 4150345 - RNA, 86 nt, Human
cugccaccuucgaauauuuagguuucucucauaugaccuggugcuuucucugugguccuagagggugagcuaggcucgagggguag

SEQ ID NO: 4150346 - RNA, 56 nt, Human
cugccacguaccauuucuuaggguccuuuucaucuccagacuggccuaugugguag

SEQ ID NO: 4150347 - RNA, 55 nt, Human
cugccagcucucuggaggcucuuggggcccauccuacccucaggggaccuggcag

SEQ ID NO: 4150348 - RNA, 80 nt, Human
cugccagguuuugaggccugauaacacacugagauuaauacauggcucaaugauaguacaaucagccuaugaccuggugg

SEQ ID NO: 4150349 - RNA, 95 nt, Human
cugccaucaauguccccaagguucaugaagggugaauauagucuaacucaaaaggacaucuuuauccucaugagaaaagagacucugauacccag

SEQ ID NO: 4150350 - RNA, 93 nt, Human
cugccaucccugcugguggaagggguccgggcucuccacggcgggacaaugucucccacaagccuugguccucauucaggacagggaaggcag

SEQ ID NO: 4150351 - RNA, 84 nt, Human
cugccauggccaggacuagagggaggugaguaaagcacuggaccccagcucauuucacccuaguucuggcccaaaucccugcag

SEQ ID NO: 4150352 - RNA, 73 nt, Human
cugcccaagaaacucacuuugguugaacuuuuaaaaaauuguuccaggcaugucugaguccuucucugggcag

SEQ ID NO: 4150353 - RNA, 100 nt, Human
cugcccacuucuuuucuauuuucaggauucuuucagacuggggguguagcuccagcaggcuguggaaauccuggagcugaucagaaaaggaagugugaag

SEQ ID NO: 4150354 - RNA, 64 nt, Human
cugcccagcacccagcaugaugccugguacaauacagaugccccauaauugugugcugaggaag

SEQ ID NO: 4150355 - RNA, 63 nt, Human
cucuggaguucuucaagcuacuacaggcaacagaguuuaguagucugagugugaaccccagag

SEQ ID NO: 4150356 - RNA, 57 nt, Human
cucuggauugcugugagaugcucaugaaauaaugucugucucgugguuaauccagag

SEQ ID NO: 4150357 - RNA, 66 nt, Human
cucuggcacacuccuuccagguccuuucugcugcaggcaguuaccaaggacagagugugcaaagag

SEQ ID NO: 4150358 - RNA, 76 nt, Human
cucuggcaccagccugucugagucgugggacaccuggcuucagccacaauccacucugcccagacaggcugcagag

SEQ ID NO: 4150359 - RNA, 89 nt, Human
cucuggcauuaggauagacaauaagaguugauuauuaaaaugguaauacucuuaauguuuuauagauugaaauuuaugaugcccaagag

SEQ ID NO: 4150360 - RNA, 60 nt, Human
cucuggccugacugccuuugcuccugggcagaaccguccgugaagacagacagacagcag

SEQ ID NO: 4150361 - RNA, 55 nt, Human
cucuggcugccucucaggccugcuguagcuggugugccugcagagaaggucagag

SEQ ID NO: 4150362 - RNA, 61 nt, Human
cucugggaacacacgucacuucaugcuggaaaaaguugcugcacaaacuugugucccaggg

SEQ ID NO: 4150363 - RNA, 87 nt, Human
cucugggauuuggcgcgcaccauuggaauuauuuaacagcacuaggaggugauguugggaucgaaugguggaacguuggacuugggg

SEQ ID NO: 4150364 - RNA, 57 nt, Human
cucugggcaaguaugauagaaaacuuuucuuuguaaggccaaaucuacuucccagag

SEQ ID NO: 4150365 - RNA, 80 nt, Human
cucugggcaccucuagcucucucucagggcccuggggccacacugguggucaggccucgaggagacagcuacagccugag

SEQ ID NO: 4150366 - RNA, 97 nt, Human
cucugggccucaguuucaccaacaguauagugaagggguggacaaauuggcccaagauccuuucugugcugucagguccuccacuacugggccugag

SEQ ID NO: 4150367 - RNA, 56 nt, Human
cucugggcucagucugcuugguccugcagcccacugcguggcggcugagcccguag

SEQ ID NO: 4150368 - RNA, 59 nt, Human
cucugggucauucaucaaugaauguauuaagcauuuauugaacacuugcacuggcagag

SEQ ID NO: 4150369 - RNA, 70 nt, Human
cucuggucuucaaggccaccucuucucuaccauuuaacucuguguaaauuagggcuuugaagaacuggag

SEQ ID NO: 4150370 - RNA, 61 nt, Human
cucuggugucuccccuaagcuaccacuuacuguguguugaccagcugggggacgcguagag

SEQ ID NO: 4150371 - RNA, 58 nt, Human
cucuguaagugugcauuuucgguaacuuuuguaaacuaguuaggaaccacuugcagag

SEQ ID NO: 4150372 - RNA, 69 nt, Human
cucuguauuccugagaaggaacuauucucaaggaccugaguccaaguucaucuuacuuagaguacagag

SEQ ID NO: 4150373 - RNA, 64 nt, Human
cucugucaacaccaaagccucccagaaguggugauaccccugaggauaacuggugcugacagag

SEQ ID NO: 4150374 - RNA, 71 nt, Human
cucugucaccuaggcuggagugcagugacgcaaucucugcucacugcaaccuccaccagccugggcucaag

SEQ ID NO: 4150375 - RNA, 70 nt, Human
cucugucacugggcaucggagcugaaaggaggacaagacccugaggcuuggaggcuccaguggaacuggg

SEQ ID NO: 4150376 - RNA, 113 nt, Human
cucugucacuuacuacuagugugugugacuuugggcaagcucacugauucauucauuuaacacauauguauugagugcuugcucuguucuagacauuguacuaggugcuaggg

SEQ ID NO: 4150377 - RNA, 59 nt, Human
cucugucacuucuccagcugagugaccuuggcaagucgcucaggcugucugugcuagag

SEQ ID NO: 4150378 - RNA, 59 nt, Human
cucugucuuagcaucuuugcucagggaacucauccugagacaucucuccugagacaggg

SEQ ID NO: 4150379 - RNA, 80 nt, Human
cucugugaauccauugccuccccucugugauguauggggacugagcgagaucacagaggaaaggcaguugguaugcaggg

SEQ ID NO: 4150380 - RNA, 127 nt, Human
cucuguggaaagcacuucuguuccccuugcuuugaaacuggcaggagauaggcucagugcuggugggaaguagcuagccucucuuaucccuucaaagaagcaagaacaggacugaauuuuauuagag

SEQ ID NO: 4150381 - RNA, 60 nt, Human
cucugugugguagauuccauuauuucccucauuuguaaauaaggaaacugaggcacagag

SEQ ID NO: 4150382 - RNA, 61 nt, Human
cucugugugucaguaaggcagaaagaauacucuggagaguaagucuuacaggcaacaugag

SEQ ID NO: 4150383 - RNA, 55 nt, Human
cucuguguuccggguugcugcugccaucucgcgguaggcaucggaacugcagcag

SEQ ID NO: 4150384 - RNA, 74 nt, Human
cucuguuauccauauugaaaaagacaaauucagauuuuuucuaacugauagguuauuuucagugagauauaggg

SEQ ID NO: 4150385 - RNA, 72 nt, Human
cucuguucccaguguguuuaaugcauuccaggagucuguuugcauuuuaaaugcauugcauuuugaacugag

SEQ ID NO: 4150386 - RNA, 66 nt, Human
cucuguugcaguuacucaccucugcuguuguagcacaaaagcagcugugggcaauauguaaaugag

SEQ ID NO: 4150387 - RNA, 72 nt, Human
cucuguugccuaggcuggagugcagugacgugaucucggcucacugcaaccuccgccucccugguucaaggg

SEQ ID NO: 4150388 - RNA, 65 nt, Human
cucuguuuguugggcugucuugccuggaggcucuuuccuucuacaagccagcuccugccacagag

SEQ ID NO: 4150389 - RNA, 102 nt, Human
cucuguuuucucaguucgguugaucacaucuuuaugaguauuugugcuucaaaacuuaccaagaauguggcaaugccuaagauagaugagagagcuauggag

SEQ ID NO: 4150390 - RNA, 70 nt, Human
cucuuaaagcuggguuuugaugucucaccugaaauguucucaguacacucaagaaaccgguaauaaggag

SEQ ID NO: 4150391 - RNA, 67 nt, Human
cucuuaacugucugaaacugggguuucuuauuuucaggggaagaaacaggacacaggcagucuagag

SEQ ID NO: 4150392 - RNA, 79 nt, Human
cucuuaaguauauccauuugacuggaucauaaaucaguacacugccagugagauagugguauaugcuuauuuguaagag

SEQ ID NO: 4150393 - RNA, 58 nt, Human
cucuuagaguuuuuaauacauugugucuccaaacacaggaaaauaaaagaucuaagag

SEQ ID NO: 4150394 - RNA, 56 nt, Human
cucuuaguaaugccaugaagcagccacuuugggcagcuuuuuguguugucugagag

SEQ ID NO: 4150395 - RNA, 60 nt, Human
cucuuauacauauuuuuaggcgaccaaauggauggguugcuacugagugaauguugggag

SEQ ID NO: 4150396 - RNA, 72 nt, Human
cucuuauuugcaggucuccauuuugaugaguuuuucugaucugacaaaguaaaauggggacugugaacugag

SEQ ID NO: 4150397 - RNA, 71 nt, Human
cucuucaaagcagcagaaagcuggccccugggguaauuagcagagggccuauucuuugcugcuugggacag

SEQ ID NO: 4150398 - RNA, 74 nt, Human
cucuucaauuucaccuaucacuuaagccucucuccucuucagaggcuaaauaaaaggugggaagaaaagaagag

SEQ ID NO: 4150399 - RNA, 55 nt, Human
cucuucagcaaugcuuuaguccagcuuuggcugcauauuaaaauugcuuggagag

SEQ ID NO: 4150400 - RNA, 61 nt, Human
cucuucagcucugaggcucuggcucaaaugugaccacauguugucaccuuugacuguugag

SEQ ID NO: 4150401 - RNA, 64 nt, Human
cucuucaguuguugcauauucuacuguuggcuuuaauuuuccuuuguauaugagcacuggagag

SEQ ID NO: 4150402 - RNA, 92 nt, Human
cucuuccaauucauuugacuauuaggucgucugugauaaagugcuguugcuaggcaacaaggguagucagugagacucaugagcaugaggag

SEQ ID NO: 4150403 - RNA, 79 nt, Human
cucuucccaagccauccucugagcacuaggcaugacuucagaguuauauuaaggagcagcaggggguggguggggaggg

SEQ ID NO: 4150404 - RNA, 86 nt, Human
cucuuccccagcgcccaggggcagggcucucuggccuggcuugugcugguucccagagucccugcugucaggugcugggaguggag

SEQ ID NO: 4150405 - RNA, 89 nt, Human
cuggccuccagggcuuuguacaugguaggcuuucauucauucguuugcacauucggugaaggucuacugugugccaggcccugugccag

SEQ ID NO: 4150406 - RNA, 77 nt, Human
cuggccugaggguuuaaaugacuguuccucaaggacuuauacaauagucauuuggagcaccuuauuaaagaagucag

SEQ ID NO: 4150407 - RNA, 101 nt, Human
cuggccugaugugugacuuaggcaucacgggggaugcagguagcccaccccugggaccugugccuccaaguggucucuggggagaacaacgacaaggccag

SEQ ID NO: 4150408 - RNA, 94 nt, Human
cuggccuggguccccggugcacucacccgguccuucccaguccuggaccucaacguggacugggccaggugugggugaguggagggacggccag

SEQ ID NO: 4150409 - RNA, 56 nt, Human
cuggccuggugucugcgaggccugucgaaaggggauagguccauucaucaagccag

SEQ ID NO: 4150410 - RNA, 72 nt, Human
cuggccuucuucaggcuggggugcuaagguguuuuguggaagaggcugguggucgccugagccugaggccag

SEQ ID NO: 4150411 - RNA, 62 nt, Human
cuggccuuuucucuggucagauuuugagggguugccaccucagaguuggccacgagagccag

SEQ ID NO: 4150412 - RNA, 122 nt, Human
cuggcgaggaccaauaccuaauccccaggucgagugcagagccuugcgucaugugccaugugccguaguggccucagagaaggcugugcgggcgggcuccuggggaugcagucaccuugcag

SEQ ID NO: 4150413 - RNA, 96 nt, Human
cuggcgcacagucagggcaggauaggcaugaggcaucuucuaucauuuauauguugugguuguuuugcugucugucuuagaccugcucuuagccag

SEQ ID NO: 4150414 - RNA, 68 nt, Human
cuggcggcagggcccgggcauggcggcuccaugcaggacaggccauguccugggcaucugccacccag

SEQ ID NO: 4150415 - RNA, 55 nt, Human
cuggcuaaguaguugaguuaguuucuaaaaccaggccuuugaacugcugagucag

SEQ ID NO: 4150416 - RNA, 75 nt, Human
cuggcuauuuggaaugaaacagcagagccccaaagagaaaaauuuugaaagggcuccauguucauuuaauaccgg

SEQ ID NO: 4150417 - RNA, 69 nt, Human
cuggcucaccucuugcuacauuccuaggcugcgacucaggaggccugcagggaagcaaggguggcucag

SEQ ID NO: 4150418 - RNA, 79 nt, Human
cuggcucauuuucuuucacugcucaauaggggaaauuaaaagcaccuacuuuauagggauguggugagaacugagugag

SEQ ID NO: 4150419 - RNA, 72 nt, Human
cuggcuccugggcccugggcuaacucacuggcucagccuuggagcccagggggccagggcaccagggaccag

SEQ ID NO: 4150420 - RNA, 57 nt, Human
cuggcucugcugaaccuagugcaaagccucuucuggauaggacucacgcagagcugg

SEQ ID NO: 4150421 - RNA, 70 nt, Human
cuggcucugggcauagaaggaagcuuucagcugggguucccugcuuccuauucucuacugccaggcccag

SEQ ID NO: 4150422 - RNA, 66 nt, Human
cuggcucugucacccuuucuccugcauucuaaaucuggcuugagagagaggagagagagaggacag

SEQ ID NO: 4150423 - RNA, 79 nt, Human
cuggcucuuggcuagggagagucacaaguggguagaacauguuuuccaauucuggagcagucuuuggcccagagcucag

SEQ ID NO: 4150424 - RNA, 88 nt, Human
cuggcucuuucccuugcaugcauuugaagaucaugagucacgagucugugaaaugagacaggacuguaugcagggcugggagaguugg

SEQ ID NO: 4150425 - RNA, 119 nt, Human
cuggcucuuuccuuuuuaaauccgucuauagucuuggcaugccaguagccggcuugacuuucacaguuaagguuaucagagagucacuguucugucaugucaagucagccaggagccag

SEQ ID NO: 4150426 - RNA, 58 nt, Human
cuggcugaagggagugcugagucugugggagccauagcccgccccacccuuuaggcag

SEQ ID NO: 4150427 - RNA, 62 nt, Human
cuggcugauuuucucacuucucaacuaguuuuccuagcguucuaugagaaaguccuggucag

SEQ ID NO: 4150428 - RNA, 57 nt, Human
cuggcugcaggaaggagugggcuuugugccacagaccccgaguuugcagaguuccag

SEQ ID NO: 4150429 - RNA, 63 nt, Human
cuggcuggagucuggaggugugccaagggcuuuggcauugacaacuuucaguuccacugccag

SEQ ID NO: 4150430 - RNA, 91 nt, Human
cuggcuggcaggcaggcuggggagcuggggcucagucguaucccucccuggcuagcauuccaucacucagcaccccacccuccccaggcag

SEQ ID NO: 4150431 - RNA, 60 nt, Human
cuggcuggucaucagcaguacguggagagcucugaaaaacugcagaugcccaggacccag

SEQ ID NO: 4150432 - RNA, 57 nt, Human
cuggcugguuuuuaaagcuaggagaaauuuuaguuuguaaugaggagaaguagccag

SEQ ID NO: 4150433 - RNA, 55 nt, Human
cuggcugugcacaagguugggucucggugcucaccgggagccgggcauggaccag

SEQ ID NO: 4150434 - RNA, 65 nt, Human
cuggcugugcugacugagaggggacccaggaggucuaacuccucuauguacacauuuccagccag

SEQ ID NO: 4150435 - RNA, 63 nt, Human
cuggcugugucuuggaggagcugggcuggcccuccaggccaacuuugccaggagacagcacag

SEQ ID NO: 4150436 - RNA, 91 nt, Human
cuggcuucacauuccugaagagugaauguggcagugugccacccuauaggcuccacucuaccaugccacuccauaggcccagugacucuag

SEQ ID NO: 4150437 - RNA, 70 nt, Human
cuggcuuuuuagccugaaguuuucugagcaggggaaugucaugaucagagcugugcuucaggaaagucag

SEQ ID NO: 4150438 - RNA, 74 nt, Human
cugggaaaacugugaccccuguguuucccuaaugagucuggcauauagagagggguuaaaugaguuggucccag

SEQ ID NO: 4150439 - RNA, 78 nt, Human
cugggaaaggcugggugggacagcggggugggacagggguaagcccucagacugcugucccugccuggccccucccag

SEQ ID NO: 4150440 - RNA, 81 nt, Human
cugggaaaguaaacaggcuugcauuuggaauagauuaauaaacuauaagucccuucuaugucaauucugauuguuucuugg

SEQ ID NO: 4150441 - RNA, 107 nt, Human
cugggaaaguuacugaaccucuuugugcuucagcuuaucuuuuaacuaccugagagcaaagcugugaagagcaagugaggacaucaguauuaaaagcacuuugucag

SEQ ID NO: 4150442 - RNA, 93 nt, Human
cugggaaccuuacuggggaguguggauucuuugacagccaagacgccuugggcucuaaagcacauaucuuacaauaaggccaacucuuuucag

SEQ ID NO: 4150443 - RNA, 60 nt, Human
cugggaagaauccaagggcccucacuccaucuuuaaagagcccacccuggcuuuucccag

SEQ ID NO: 4150444 - RNA, 110 nt, Human
cugggaagaccuuuccgucggucugucagucugucccugccuggcgggcuuucucugggaaccgcugcagacgcgcuggcgaaagcaccaccgccaagagucaugcucag

SEQ ID NO: 4150445 - RNA, 105 nt, Human
cugggaagaggcgcuccucacuuccuagaugggauggcggccgggcggagacgcuccucacuuuccagacugggcagccaggcagaggggcuccucacaucccag

SEQ ID NO: 4150446 - RNA, 68 nt, Human
cugucuguggccuguuauaaugagaacaaccuauauauaucuugcuauuagcaauucccacagagcag

SEQ ID NO: 4150447 - RNA, 68 nt, Human
cugucuuaaauguuagguuguacugaguccaguaggucgcugaccuagcucagcuuguuauuugacag

SEQ ID NO: 4150448 - RNA, 81 nt, Human
cugucuuaccuaauuuacuacuucauugacuuacgggcagaaggauucagugguuaucaaguauuaaaguagaaaggauag

SEQ ID NO: 4150449 - RNA, 83 nt, Human
cugucuucucuguauguuuuaaaucggaauguuucaaaauguccugaaaucauuacuccuguaaaauuguccagaugaaacgg

SEQ ID NO: 4150450 - RNA, 81 nt, Human
cugucuuugaguggaaaauguagcagcuacgggaauuaaguuauaugguagcaugugugguuaccuacuugacggagacag

SEQ ID NO: 4150451 - RNA, 70 nt, Human
cugugaagcagaucugauagggcccugcugcgacaccaacagcagcucagggccaaggaugcuguugcag

SEQ ID NO: 4150452 - RNA, 122 nt, Human
cugugacuacagugaccagaccauacuauuacuaggagcaggauagaugccuacuagucugcggcauguaaggauauccucuccuaaguaaagaauaagcuguugcaccuuguaugccacag

SEQ ID NO: 4150453 - RNA, 57 nt, Human
cugugacuggaaucuggcucuuuauucagugguauuuggaacuaggcuccagugcag

SEQ ID NO: 4150454 - RNA, 62 nt, Human
cugugacuuagagugaguagagaggcaauuagggcacaugcuucgaucauuuugagugacag

SEQ ID NO: 4150455 - RNA, 77 nt, Human
cugugagaagguccugguguggcccugugacaugagccauuggcuuaaugucaaggucauucuagaggagaucauag

SEQ ID NO: 4150456 - RNA, 57 nt, Human
cugugagaccugauuucuucauuuggacaaugagaaugauaauaaucugucuuacag

SEQ ID NO: 4150457 - RNA, 66 nt, Human
cugugagaccuuggcucugcuggaaaggaccuuaacauuuuggucagcaggucuacagguucauag

SEQ ID NO: 4150458 - RNA, 83 nt, Human
cugugagaugaauccacacauggcaaaaaauuuucacagauugcuuguuucuaguuuuugucaugggauauuccauuuuucag

SEQ ID NO: 4150459 - RNA, 59 nt, Human
cugugagauguuucugguuagaguuucucucuccaagaaucugacuuaaacauuuauag

SEQ ID NO: 4150460 - RNA, 64 nt, Human
cugugagccagcacggauuucccaggaacguugcuguucgcuaggccacgugcuggccucacag

SEQ ID NO: 4150461 - RNA, 56 nt, Human
cugugaggccuuuggccagauauccuggcaagucugggcaauggaugcacucacag

SEQ ID NO: 4150462 - RNA, 62 nt, Human
cugugaucuggcugggacuucagggucauugugacccugccaggguccugacagacaagcag

SEQ ID NO: 4150463 - RNA, 76 nt, Human
cugugaugcuguuauucuaaugugugagcuggugaaugagaguucaugcuaaaauaaccguaucauucaaauucag

SEQ ID NO: 4150464 - RNA, 83 nt, Human
cugugauggaggucaaaccagggauccuguggucagccgugaacaggauguaugcagaguccucuggagggacuuguaagcag

SEQ ID NO: 4150465 - RNA, 66 nt, Human
cugugcaaggcagugcucuuggccaagguaucaauauucuugggaggggagcauuggccucagcag

SEQ ID NO: 4150466 - RNA, 56 nt, Human
cugugcaagguacauccuugauguguuacccacaucgucucaugaaucuugucaag

SEQ ID NO: 4150467 - RNA, 81 nt, Human
cugugcacgacuguuaccggacccaugcagcugaugucuccaucaugaaccaggugugccgggagcaguuugcuugcacag

SEQ ID NO: 4150468 - RNA, 86 nt, Human
cugugcacgacuguuacuggacgcacgcagcugaugucucuugucaugaaccaggugugccgggagcaguuuguccgcuugcacag

SEQ ID NO: 4150469 - RNA, 58 nt, Human
cugugcacuuuccacguguuugcaaguuuugauugaacaaacacuggcuggggcacag

SEQ ID NO: 4150470 - RNA, 57 nt, Human
cugugcagcaucuuucuaccaggaaucugugccccuguguguaaggaagcuuuaugg

SEQ ID NO: 4150471 - RNA, 83 nt, Human
cugugcagccccaggagacgcccaggcaagagacgaguggucgccacgccacacucccugggccacugguggcuguggaauag

SEQ ID NO: 4150472 - RNA, 130 nt, Human
cugugcagggcgccugggcgagggcaggggccacacccgcugucccugcugagcucgguccugaguuagaaccgucaggcucucagcaggcacggacaggcugcauguccucggaggcauggcccugcgg

SEQ ID NO: 4150473 - RNA, 68 nt, Human
cugugcauugccucuauucauuauauauuucuucuagcuuguaaucaugguagaggcaaaguggacag

SEQ ID NO: 4150474 - RNA, 55 nt, Human
cugugcauuguaggaucuuuagcagcauuccuggcuucucccuacaacaugccag

SEQ ID NO: 4150475 - RNA, 64 nt, Human
cugugccacucaguuugauuguuucagugauggaugggaauuugaagcugucagagguggacag

SEQ ID NO: 4150476 - RNA, 58 nt, Human
cugugccagggucuauuccagagagucagugguuucuuuugaaagaguccugcuacag

SEQ ID NO: 4150477 - RNA, 63 nt, Human
cugugcccuguggcuggcaccuggauuccacuuccucaguaaugcuugucaugaaugggccag

SEQ ID NO: 4150478 - RNA, 57 nt, Human
cugugccugccuuguucacugauguaucucuagcgccuacaacagggucgggcacag

SEQ ID NO: 4150479 - RNA, 55 nt, Human
cugugccuuaguauucucauuuuugcaauauaaaauuaggauauuaagaguacag

SEQ ID NO: 4150480 - RNA, 74 nt, Human
cugggggaugggagucauggggguggcccugucccugggggagccaggccacacagaugacugcuuuccccaag

SEQ ID NO: 4150481 - RNA, 60 nt, Human
cuggggggcuucuugcaggggcaacaugaucugauguacacuuuggaagagucacucugg

SEQ ID NO: 4150482 - RNA, 120 nt, Human
cugggggucugaggaaagacuguuuugaaagaggcugucagggaauggaaaggguuaagcuuuucauccugaagaaccugcuucccaaaucaggccuuccucccaucacuagacccugag

SEQ ID NO: 4150483 - RNA, 70 nt, Human
cuggggucaauggcaugagcuucaguuuaugauuuuugauuaagugacuaaaguaaugcuuaaaucucag

SEQ ID NO: 4150484 - RNA, 71 nt, Human
cuggggucagagagaugagaguggauggcggcggcggugguguugcuucucagccugucuggaaaucucag

SEQ ID NO: 4150485 - RNA, 60 nt, Human
cuggggugcauccacguggaguucucaaacauggagacuggccuggagaugcagcugcag

SEQ ID NO: 4150486 - RNA, 57 nt, Human
cugggguggguaaggaggggaggaaggagaggcucuugaacucuggacccaugccag

SEQ ID NO: 4150487 - RNA, 83 nt, Human
cuggguaagaaugaaguagauaugaaucuuacagccucuccguucugggaugugauucugucuccuucacuccggguauccag

SEQ ID NO: 4150488 - RNA, 93 nt, Human
cugggucaaaugguauuucuaguucuagaucccugaggaaucgccacacugacuuccacagugguugaacuaguaaaucauacauuuaaccag

SEQ ID NO: 4150489 - RNA, 56 nt, Human
cuggguccccucagugacacugagagacauaagucauugucacugucauggcccag

SEQ ID NO: 4150490 - RNA, 90 nt, Human
cugggucuagacuacaagcccagaagauuauuagagacuuuguccuuccagcacaugggaucuaaaauaaucuugcugucugaagcccag

SEQ ID NO: 4150491 - RNA, 58 nt, Human
cugggucuucagcagcaggcggggugggacuuuucaggcucucugcaugguggcucag

SEQ ID NO: 4150492 - RNA, 62 nt, Human
cugggucuuuuucuuccauugacaaaggaggguugacaagucugggaagaaaaggaacucag

SEQ ID NO: 4150493 - RNA, 79 nt, Human
cugggugaagaugaaugguucaaguuuuaaucauccucguuugcaacaucugaacauuuauccacauauguuuccccag

SEQ ID NO: 4150494 - RNA, 66 nt, Human
cugggugagcuggccagaggguagaagggaggcaguauagucugcucugauaccagcuacaucuag

SEQ ID NO: 4150495 - RNA, 93 nt, Human
cugggugauaauggaauacuaugcagccauaaaaaggaaugagaucaucuccuuugcggggauguggauggagcuggaagccauuauccucag

SEQ ID NO: 4150496 - RNA, 72 nt, Human
cugggugcucccaaaccugacaggcuccaggagaaacacagaccccugggcaugucgccugggcagcccgag

SEQ ID NO: 4150497 - RNA, 57 nt, Human
cugggugcuccggccucccccuucccgaaccucagacggggguggcuggggcuccag

SEQ ID NO: 4150498 - RNA, 98 nt, Human
cugggugcuggggacaggugugggcugggcucugaguuaggacgagccacugucccauuugagagucuccagccccaucauguucaaucccagcucag

SEQ ID NO: 4150499 - RNA, 60 nt, Human
cuggguggaucgcagccccaggacagccacgcugaggcccaggggugucugucuuuccag

SEQ ID NO: 4150500 - RNA, 64 nt, Human
cugugugcagggcacaauggaaguaaacaccacccacuauauauccccugugccuggcauacag

SEQ ID NO: 4150501 - RNA, 66 nt, Human
cugugugcuggggggagcccaugggaacucgauauggguuaaggcugguccccucugcguccacgg

SEQ ID NO: 4150502 - RNA, 68 nt, Human
cuguguggcuucucaucuuccacccacagcuucagaauugggcaaagguucuaagggaagccaugcag

SEQ ID NO: 4150503 - RNA, 83 nt, Human
cuguguggggacagcgagggcagacuugaguggauaggcacccucccgccacguccacccaggcugcccaggucuucccaggg

SEQ ID NO: 4150504 - RNA, 87 nt, Human
cuguguguaaguaguuagaauagucagauuguagauauacuuugaaaguagaccuaggauuugcugauuuaauuugucaugugauag

SEQ ID NO: 4150505 - RNA, 75 nt, Human
cugugugucgcaaaguuuguuuuagucuaaugauuuuuaugaaagaaguugcugaaauuaauauuggagccauag

SEQ ID NO: 4150506 - RNA, 122 nt, Human
cugugugugaggcuggcuggcugcuuuaggauaaauacuuccaggugagugugagcacagaugcugcuaggcauugucugggaguacccuggaaggucaggcccagcgucucuucuccacag

SEQ ID NO: 4150507 - RNA, 57 nt, Human
cuguguguggcuggagcuguugagcuugaugucagaugaugcugcagcgguaggcag

SEQ ID NO: 4150508 - RNA, 57 nt, Human
cugugugugguaugaguaaugcuauagucaaggcaugugcaaagugcuacaguauag

SEQ ID NO: 4150509 - RNA, 92 nt, Human
cuguguucagauucagauacugucuucacauuguugccuagccaugaguggggccacuuagugcuggugaacagugggcagcuuggagccag

SEQ ID NO: 4150510 - RNA, 89 nt, Human
cuguguucaggauguggcagggaccuuguagggaagugguuugaucaucaaggacuuccagcuagguucugcuaaaccauacaacacgg

SEQ ID NO: 4150511 - RNA, 71 nt, Human
cuguguugaaucagccugcugcugagucacagggaguaacugcagcugccuagggcuggcuucuagcaugg

SEQ ID NO: 4150512 - RNA, 76 nt, Human
cuguguuguuucaaugucuuuaaagugcaauagaucuuuacaauauaucuauuuuaagguaaaggcggcaaagcag

SEQ ID NO: 4150513 - RNA, 87 nt, Human
cuguguuuccuucaugagugaguaucucaagauacaggaaauggaaauugcugguaucuuagguccucggcucagaaacuggcacag

SEQ ID NO: 4150514 - RNA, 55 nt, Human
cuguguuuggacaacuuuucagauuucucuugucucuggggcuguguagaugcag

SEQ ID NO: 4150515 - RNA, 94 nt, Human
cuguguuuuaaauugcagaucuaaacagagugcuaguucacgggaaauuacauucucagauuaaaguagcauuuuguugugcagaaagcagcag

SEQ ID NO: 4150516 - RNA, 83 nt, Human
cuguguuuuagaacacaguaggauaguuugaggaugaaccuugaauuccaguuuucucagauuuucuauugugcuagauaugg

SEQ ID NO: 4150517 - RNA, 75 nt, Human
cuguuaagaacugugaaguaugugaaauuuuaucuuacuuauaauuuuacaaguuuacuucauggaugcugacag

SEQ ID NO: 4150518 - RNA, 57 nt, Human
cuguuacacggaccuucaaaucugggaagauucccucugaagcaaaugugauaauag

SEQ ID NO: 4150519 - RNA, 65 nt, Human
cuguuagaagggcugcaauccaaaacacugacaagacaaaugccggugaggauguggagcaacag

SEQ ID NO: 4150520 - RNA, 74 nt, Human
cuguuauuuggaagguauaaacacaauuuggagguauuuuuuaaaaauauuugcuguuuguucuccagaaacag

SEQ ID NO: 4150521 - RNA, 56 nt, Human
cuguuauuuuauaauucaagaaagggauuuucuuucccuugaauugcaaguaaugg

SEQ ID NO: 4150522 - RNA, 96 nt, Human
cuguuauuuuuuacaucuaaacugugaacaauuagaguaucaauucuuauaugaaagagugaccauuguuacagauuggcauguaauguugagcag

SEQ ID NO: 4150523 - RNA, 123 nt, Human
cuguucacaccuaaugucuugaagaguagguagcagcagugugggcugaaccuaggccagcuugcuuagcgggucacccugcugugaaguccuggcagguguugguaauguguggaaaugcag

SEQ ID NO: 4150524 - RNA, 75 nt, Human
cuguuccaugucucucucugagugccagaaagguucuuacccuugucugagugcacuaggaggggcaaaaggcag

SEQ ID NO: 4150525 - RNA, 58 nt, Human
cuguucccugucccucugaagccucccuugaugggacagugugguggacaaggagcag

SEQ ID NO: 4150526 - RNA, 80 nt, Human
cuguuccuaccucauugggcugggcaagaaucaauggagagucauggaaagcacucagcccagugccaggcaaggagugg

SEQ ID NO: 4150527 - RNA, 59 nt, Human
cuguuccuccaccucaacaaaccuuuacauccucacugguuugugaggccagagaacag

SEQ ID NO: 4150528 - RNA, 84 nt, Human
cuguuccucugucguuuagccaguugcccagaguagaaaggacaacuuacuuuucaagcagcugguuauuuuacugaggggaag

SEQ ID NO: 4150529 - RNA, 124 nt, Human
cuguuccuggcuuccccuuccaggaggggacguuugcaggucuggggguccuggugacuaagcuguuagcuccacucccugccuguuuccguccucacagcccugggagggccccgguggacag

SEQ ID NO: 4150530 - RNA, 59 nt, Human
cuguucgggcccaggccgaggaccugccaguagggcucaguugccuggagcccguucag

SEQ ID NO: 4150531 - RNA, 62 nt, Human
cuguucuagcuucuugggcuauaacuagauagauguuagcuggcccaagucugcuagaagag

SEQ ID NO: 4150532 - RNA, 65 nt, Human
cuguucugcugcauaaaaacuugaacacuccgaugaaugguuuuuauucuuugcagcagcuccag

SEQ ID NO: 4150533 - RNA, 84 nt, Human
cuguucugguggacacgauggaauucccucaacuauaacauuauuauauguuaugauugaaauuccaguuucuauaagggauag

SEQ ID NO: 4150534 - RNA, 77 nt, Human
cuguucuuuucacaguguuguggcucuuaauaggcuccccuggcgggccguucagagcccacgcugccucugagcag

SEQ ID NO: 4150535 - RNA, 61 nt, Human
cuguugaaauuguggagcucaaauauuuaacuuguguaaugcaguggaacaauuucaacag

SEQ ID NO: 4150536 - RNA, 76 nt, Human
cuguugaguuguacaaauucaguucuaggguggggcuuccacucaccuuucaagagaauuuagugcagcuuuuaag

SEQ ID NO: 4150537 - RNA, 75 nt, Human
cuguugcaugacugugcaugcuacuuaaucauuaaauuccguaauuacaacagcaagcacacuucaugugaacgg

SEQ ID NO: 4150538 - RNA, 84 nt, Human
cuguugcccaaagagugucccucacuggaccauaugaaaacaauuuuucucugguugguggggacccuugaauuugggauaugg

SEQ ID NO: 4150539 - RNA, 59 nt, Human
cuguugccucuuggcagucaccaaucugggguucauauauucugcacaagagacaauag

SEQ ID NO: 4150540 - RNA, 61 nt, Human
cuguugcugagguucaagggucuaaaacuugcugcucuccaggcccuggaccuauggacag

SEQ ID NO: 4150541 - RNA, 101 nt, Human
cuguugcuuugugccuaguugucugcuucugcuuugcugcauugcgacugggaaacugcaggagcuggagcuggcaguugcgauaaugcagaaagcagcag

SEQ ID NO: 4150542 - RNA, 79 nt, Human
cuguuggcaauauuuacugaaguugaaaauaugcauguucucucaccaccaguucuacuuccaguuauauagccagcag

SEQ ID NO: 4150543 - RNA, 67 nt, Human
cuguuggcucauggaauuagcuauuauuucggcaauggaaaggaauuaugguuaucuagagcaagag

SEQ ID NO: 4150544 - RNA, 107 nt, Human
cuguuggucuucuguuuagccauuauucucaguucugugcaggagugagcugaaacaaaguuguauagcccagagagugagaagcugcauuucaugucucccaacag

SEQ ID NO: 4150545 - RNA, 60 nt, Human
cuguugguuacaaguuugcucugccccaucaaagagggccaagaugucuugugacuacag

SEQ ID NO: 4150546 - RNA, 66 nt, Human
cuguuguaaagcuauucauuugguacugacacugacaggggcugagacagacggcuuuauacacag

SEQ ID NO: 4150547 - RNA, 57 nt, Human
cuguuguaucauuuguucacauuuccuuuagugguuguggaauagaaauuauaauag

SEQ ID NO: 4150548 - RNA, 80 nt, Human
cuguuguuuguuguuguuguuuuugaacggugguggccaaucugccuccacaauccagacauaauuucggcacuaaacag

SEQ ID NO: 4150549 - RNA, 59 nt, Human
cuguuuagaauucuaacuuuaaggagaaaagcucuuuuugguguugguucugaucccag

SEQ ID NO: 4150550 - RNA, 57 nt, Human
cuguuuauggagguaaggcaucuagcaaauaccugaguggcuuguuucuaugggcag

SEQ ID NO: 4150551 - RNA, 74 nt, Human
cuguuucuaagcaguuuuuagcuuuaccaguaaaucauauacaucauaggcauuauaaaaacugaaggaagcag

SEQ ID NO: 4150552 - RNA, 71 nt, Human
cuguuucucagaagucccuugcaucuuagucugcugcagcugcuaaugccaagacugcuguaaagaaacag

SEQ ID NO: 4150553 - RNA, 125 nt, Human
cuguuucugcuaagaugaagcauugcuagagggauaggcacaggaacaggaaaagaggaaaaugaaauccuuuccucauccuuaacuguccaguuucccucuggugcuugcauuuaaaaaaacag

SEQ ID NO: 4150554 - RNA, 92 nt, Human
cuguuugcacgggccagggcagggaggcuuucugggagugaggugagagcaaggcuguucccagaggcuccagucucuauuugugcagacag

SEQ ID NO: 4150555 - RNA, 81 nt, Human
cuguuuggaaagugugauuucaaggacuucaaucugugaggcuagcuucacauacuuuggaaucauugcuuauucauucag

SEQ ID NO: 4150556 - RNA, 101 nt, Human
cuguuuguaagcaagauuuuuuaacagguuauauuguacaggaucaauauuuugcuuuuuaacaaggauauuuguguaauaagaaacuuugccuuaggcag

SEQ ID NO: 4150557 - RNA, 86 nt, Human
cuguuuuguuuugaugauuacacuuuuaaaacagcuuucaguaugcuuuagcuguuugaacagugagacaucuuuuucauagauag

SEQ ID NO: 4150558 - RNA, 101 nt, Human
cuguuuuuaauuguuugguauuuugggaaugcaaguuauuguuuagaauuuauaugaccauuuaauaaguauuuccauagcuacuuugaaguguugugcag

SEQ ID NO: 4150559 - RNA, 85 nt, Human
cuguuuuuguucucacuacucuagcucuagaaagaucuagccucucuagaugucagagguggagauaguugggaaggaguaacag

SEQ ID NO: 4150560 - RNA, 88 nt, Human
cuuaaaaagggaaacacucaauuuaguaauucgguugccuagaugaaaucgaguggcuauugauccgugauguuucuagauuuuuaag

SEQ ID NO: 4150561 - RNA, 86 nt, Human
cuuaaaauuguuguuacuuucuugagugaugcuuaguguggaggcaacucuacagaggguuucuaaggauuuggcaauuuguugag

SEQ ID NO: 4150562 - RNA, 105 nt, Human
cuuaaagccuguuucagauuugauguccacacauuaugcucaccuggcaacuuguaucuuugcuuuuaagaagugcagcagguggcaggacauuuaggcugugag

SEQ ID NO: 4150563 - RNA, 72 nt, Human
cuuaaauuccacugccgaaugauacauuuaacccaucagggagauuguguguguguggcagggggugguggg

SEQ ID NO: 4150564 - RNA, 68 nt, Human
cuuaacaauugaacagcuguuacauuguuacgaguuuuuguggugguggcgauagcaguuggugugag

SEQ ID NO: 4150565 - RNA, 78 nt, Human
cuuaacagcacuuacuaggacuuagucuaauuuuucucuuuauauucuuaggcuguguggaugagucuuacuguugag

SEQ ID NO: 4150566 - RNA, 61 nt, Human
cuuaaccucuggggaccucaguuuccuuuucugcaaaacugagguaauugugaggauuaag

SEQ ID NO: 4150567 - RNA, 71 nt, Human
cuuaacuccgcuucugugagucaguguuucugagguaacaacacagaacaauaaccauagggagaguugag

SEQ ID NO: 4150568 - RNA, 130 nt, Human
cuuaacucucagaagauugacucuuugcugccaccuugcugauaccaugaauguuaaugcccauggcacugggcuuugcacagaguggauauucaguaaauggguaguucuuguuucucucccacauaug

SEQ ID NO: 4150569 - RNA, 68 nt, Human
cuuaacugaagcuggaagcgcuggcauagcccggggaggucagcacuguguccagucucccgguuaag

SEQ ID NO: 4150570 - RNA, 82 nt, Human
cuuaagaccauucugaugcaucauacuguuuacacucaaagcuuuguagcuaagauguuuacaguauggagaauguuuuaag

SEQ ID NO: 4150571 - RNA, 68 nt, Human
cuuaagcagcugaauucuucagacuccagugagcggagauugaguguguuugaagucagcuggugaag

SEQ ID NO: 4150572 - RNA, 106 nt, Human
cuuaaggguaaaggcugcgucuucuguuuccucugcgucuucucgaagcacuguguguaagggccagagcacagaggauguuucauacacgugccuuugcccugag

SEQ ID NO: 4150573 - RNA, 75 nt, Human
cuuaagucucauggcuucugucuuggaaacuuuaccuuuaaaagauuauuuaagacaggaaccaggagguuuggg

SEQ ID NO: 4150574 - RNA, 68 nt, Human
cuuaaguucacucuuuaugagaaagugcugccaaauuuagcauuccuuauucagggggagcuacagag

SEQ ID NO: 4150575 - RNA, 95 nt, Human
cuuaauaauacaguaccuuagucgagcucucuacucccucacaagaaggacuccaaauggaggguuccugagcuaggugugcagauaugaguaag

SEQ ID NO: 4150576 - RNA, 79 nt, Human
cuuaaucacucaggagggaucagcuaucacugccauuaaaagacaaaugcuuugaugguucuuuaccuggaagaauaag

SEQ ID NO: 4150577 - RNA, 67 nt, Human
cuuaaucucaccugcaaagucccuuuugccauggaaggucaccucuucacagguucaggggauuaag

SEQ ID NO: 4150578 - RNA, 77 nt, Human
cuuaauguaaaauuucuauaugaggagcuaaaguuuucuaucccaaauauuucuaguccuuguguagucacauuagg

SEQ ID NO: 4150579 - RNA, 63 nt, Human
cuuaauguggaagauguuaagugaaugucuaaaugguguugcugauaacauguuuucauuaag

SEQ ID NO: 4150580 - RNA, 98 nt, Human
cuuaauuuugauugagaauucuagugcaaagaagucugguaaguguagauuuuuuagcucaccagugucugugguauagaaaggcaguuuagagggag

SEQ ID NO: 4150581 - RNA, 63 nt, Human
cuuacacacuuacuggagaugaagcacaaaauugcuucaagcuuucuuguagguaaugugaag

SEQ ID NO: 4150582 - RNA, 81 nt, Human
cuuacagagaaaaaggcacuauagaagaaaacauuuuggauugagauuuagaaguucaggucuguaaucugguuuugugag

SEQ ID NO: 4150583 - RNA, 78 nt, Human
cuuacagaucuuaguuucuuggucacaguuuucaauuuagacacacuggcugaaauauggagugagaaggauuugaag

SEQ ID NO: 4150584 - RNA, 71 nt, Human
cuuacauuauucagguaccuauuaugugcuauucauauuggcacauaauaggugccugaauauuuggcaag

SEQ ID NO: 4150585 - RNA, 64 nt, Human
cuuaccaugggaaaaaggaagaagagggaacuuaccuucuuuucucuuacauuccacuggugag

SEQ ID NO: 4150586 - RNA, 82 nt, Human
cuuaccauugaacaguuauucuuuaugcaaccagcaucacagugcucuacuuugcuuggaaggaaugauggcauaauguagg

SEQ ID NO: 4150587 - RNA, 60 nt, Human
cuuaccuggccucaucaguaaaucaggggucuuccuggcaggucugagaggucuucugag

SEQ ID NO: 4150588 - RNA, 68 nt, Human
cuuaccuuguaaaggcccugucuccaaauacagccccauucugggguacggggucggugcaggguggg

SEQ ID NO: 4150589 - RNA, 112 nt, Human
cuucacaacugcuauuucacuucuugaaccaccugaggcuguuagucuaggucucaccuucacuggugagaccaaagcagagguuucagagugguagaggagcagcaugaag

SEQ ID NO: 4150590 - RNA, 78 nt, Human
cuucacacuauuuuguuuuccccuuucacagucaauuaguaauggcugccaauguggggcaaggcagaagaguuggag

SEQ ID NO: 4150591 - RNA, 74 nt, Human
cuucacaggaaggcaggagcagcaccaccugaggcuuuuucccuccagaggggcagcccugugcuuuggugagg

SEQ ID NO: 4150592 - RNA, 101 nt, Human
cuucacagggacuucucaccucacugucuauagcaggcuggagcacggauguaugcaugccccugcuauagaggcauggauguagcagugacccccugagg

SEQ ID NO: 4150593 - RNA, 104 nt, Human
cuucacauaggagcuggauguguagaaagaucuccaagauuuguggccaucacgauaauuuuggaggugucuuuuuaaaaggucucauuggcuccuuuacaaag

SEQ ID NO: 4150594 - RNA, 73 nt, Human
cuucacauauaaauacaacauguguuaaaggacuaaauuucuagugucacaguuuguacuuuauaguuugaag

SEQ ID NO: 4150595 - RNA, 86 nt, Human
cuucacaugcucaucuaguuugaacauuggggaggaaauuauuuucuucugaaacagugacagacagcaagaaagagcguaugagg

SEQ ID NO: 4150596 - RNA, 93 nt, Human
cuucaccacuucaccacugugcauccugggaaguggccuccuccuuuaaauagggauggaggucuccagggugugcucuggaaguuugugagg

SEQ ID NO: 4150597 - RNA, 118 nt, Human
cuucaccucccacuggccaaaagcagauuacaaaugcugacacacugagcauuugauagcaucucuuucugcuaucacgcagauguguuagcucuaacuguuuuuaaaugaggaaaag

SEQ ID NO: 4150598 - RNA, 75 nt, Human
cuucacugaaauguguucuaguguuuugcagaagguggaacuuuugggcaacaacaugggauucauuucuguagg

SEQ ID NO: 4150599 - RNA, 66 nt, Human
cuucacugugcucuggccaagcgcgugcgacuuccugucacaccuuaggccugagcgcuuauuaag

SEQ ID NO: 4150600 - RNA, 82 nt, Human
cuucagaaauugguuuagcucuuuccuguacagagacucacauaucugucuaaugugcucuguaggggaaagagagcugaag

SEQ ID NO: 4150601 - RNA, 71 nt, Human
cuucagaaucuaugugccagcuccaaauagucugcuuacugcaccuggagcuagcauuuagacaucuggag

SEQ ID NO: 4150602 - RNA, 79 nt, Human
cuucagagaguuugugaguccuugaagcaaaaggaaaaauuuugcugugaagugcaagcauucacgugugcuccuggag

SEQ ID NO: 4150603 - RNA, 61 nt, Human
cuucagauuguacacauaauugccuuuggcugccaaccaaaggcuuguguguucagugagg

SEQ ID NO: 4150604 - RNA, 64 nt, Human
cuucagauuuuguuuacugguagcuguuggagauauucugacuuccuguaaauagaauuccaag

SEQ ID NO: 4150605 - RNA, 75 nt, Human
cuucagcaggccaggcccugacuggaugcuggcgagucgagaaaaacacaaucgggccuccggccuugucugagg

SEQ ID NO: 4150606 - RNA, 55 nt, Human
cuucaggaaaaucucuaaggaugaaaauuccuuggccaccuagauugucuugaag

SEQ ID NO: 4150607 - RNA, 56 nt, Human
cuucaggagguugaccacggggcaaaggauuugcucuccuucucagcuuucugagg

SEQ ID NO: 4150608 - RNA, 89 nt, Human
cuucagggagugaucguauuuuaaaccagucaugguggacuauuucuccuuugacagugauugguuugggggugaacacgugacuggag

SEQ ID NO: 4150609 - RNA, 58 nt, Human
cuucagggcauauuauuggcucucgauaaaaggcaaauaguaaugauaagccuugaag

SEQ ID NO: 4150610 - RNA, 76 nt, Human
cuucagggcugccgggcagaccgugggcauggccaugaguguccccacaagaacugucaugccaggagcuuggaag

SEQ ID NO: 4150611 - RNA, 55 nt, Human
cuucaguagccacuggaugcacugggccugccaggcuccagggaacagacuggag

SEQ ID NO: 4150612 - RNA, 70 nt, Human
cuucagucuagggugcacuugauacaacuuuuaauuuggcuuuuuaucgugcauucuagcagcucugagg

SEQ ID NO: 4150613 - RNA, 69 nt, Human
cuucagugucugagacugggcacauaccuacaaaucucauuaggauguuaaauucucagagcucucaag

SEQ ID NO: 4150614 - RNA, 59 nt, Human
cuucaguuagccaauucagguccuagggucuauccucaugccugaaugcuuaacuggag

SEQ ID NO: 4150615 - RNA, 93 nt, Human
cuucaugaaaauuaugugcccuguuauagucugaggccucagcuccaugcuaucaggcuucaaggacagcagccacaggauaccucuaugagg

SEQ ID NO: 4150616 - RNA, 59 nt, Human
cuucaugaggguuauucuuguuggcauggagugcccugcaaggcagcauccuuuugagg

SEQ ID NO: 4150617 - RNA, 71 nt, Human
cuucaugccuguuuuuaaauuuuauaaguggggauuuguugcuuaacgaauugugggacugggucaugaag

SEQ ID NO: 4150618 - RNA, 82 nt, Human
cuucauggccugcagugcugccacagccccgccacccuccacgaugaugcggcuguugucgggcuuacgcagggccaggaag

SEQ ID NO: 4150619 - RNA, 67 nt, Human
cuucauggcugcaguccgugcccugggccacugucagccuagaggcucagcagaugccugccauaag

SEQ ID NO: 4150620 - RNA, 96 nt, Human
cuucaugggauuucuagaaacacugccuacacuuuaugaaaacuacauaguauucaccugugacagguagaguuuaucacuauuaauuuuaugagg

SEQ ID NO: 4150621 - RNA, 82 nt, Human
cuuccaagguaugcuaauuguuagucacauguucugcuuuuuaauaugguuugugucuugcuaacaaugaguaggacugaag

SEQ ID NO: 4150622 - RNA, 61 nt, Human
cuuccacuguggauuccaucauugaucuguauuaaggacucuaauggcuucugaguggagg

SEQ ID NO: 4150623 - RNA, 82 nt, Human
cuuccagaagaccuaagauacauggggccugggucagccuggcaacaugaggucuccaggccaauguagcaggcccuggagg

SEQ ID NO: 4150624 - RNA, 75 nt, Human
cuuccagaagcacaggcuuuuuugcucucgaauaucaggaugauaccuggaguucugagucugaugaccuggaag

SEQ ID NO: 4150625 - RNA, 80 nt, Human
cuuccaggaggcaauaguagaguccaggauuugagcucuguaucccuaauggcucaccuucuggauuuccuccugugaag

SEQ ID NO: 4150626 - RNA, 81 nt, Human
cuucuuuuaagugauuauaauaagaaaaggaaacgauguguuugggucuuuccuacuuuauugugaacuacuugagagaag

SEQ ID NO: 4150627 - RNA, 65 nt, Human
cuugaaaaaguuauuuuucuguuauagacgaugauuuucauaacagaagaugaaacuucuuuggg

SEQ ID NO: 4150628 - RNA, 71 nt, Human
cuugaaagaguuuggagacaagaucagaaagcaaauuuugacugucucuauggcucuaaaaucuagucaag

SEQ ID NO: 4150629 - RNA, 67 nt, Human
cuugaaaugaaugaugaucugugaaauuuucagugaaugagaguuacacaacuuaucacaucuuaag

SEQ ID NO: 4150630 - RNA, 65 nt, Human
cuugaacaguguaucuagaucaugguugccaugguugccuugacacaaugaacaucuguaucaag

SEQ ID NO: 4150631 - RNA, 70 nt, Human
cuugaacccaggaaguggagguugcagugagcugggauugcaccacugcacuccagccugggugacagag

SEQ ID NO: 4150632 - RNA, 69 nt, Human
cuugaacccgagaggcggagguugcagugagcugagaucgcgccacugcacuccagccugggugacaag

SEQ ID NO: 4150633 - RNA, 69 nt, Human
cuugaacccgggggguggagguugcagugagccgagaucgcgccauugcacuccauccugggcaacaag

SEQ ID NO: 4150634 - RNA, 61 nt, Human
cuugaacuggggcaguggagguugcaauuagccgaggucgcaccauugcacuccagccagg

SEQ ID NO: 4150635 - RNA, 66 nt, Human
cuugaauagcuucugccccuguagccugagucuuagaauaaacucauguggagcagagcugccaag

SEQ ID NO: 4150636 - RNA, 63 nt, Human
cuugaaugggccauaagacgguccaauucccucauuuacuggauuauggugcuucauucagag

SEQ ID NO: 4150637 - RNA, 56 nt, Human
cuugaauguguggccaggauaaugacagaaacuguccaguucaagccaacaucaag

SEQ ID NO: 4150638 - RNA, 77 nt, Human
cuugaauguuuggcagucuggguuggcaguuagcuaguuggaggaggugacugaaagcuagcuguccagcacccaag

SEQ ID NO: 4150639 - RNA, 84 nt, Human
cuugacaaggugaucacuuauucuguguguguauguguguguguguaugcauaugcacauacauacauaggugcacuggacagg

SEQ ID NO: 4150640 - RNA, 129 nt, Human
cuugaccggacagcugaugaccaggccuuugcagggagagagagcccagugauuaggccauucaacugccaucucaucucccucugcagacaauccacaguggccuguggucccacaccuguucccugg

SEQ ID NO: 4150641 - RNA, 72 nt, Human
cuugaccuggcagucacggccaugugcuguuuccaacacagcgcuccuccuggccaggcugcccagcucagg

SEQ ID NO: 4150642 - RNA, 115 nt, Human
cuucagauauacgaguuucuaccacucauuggucauuucuuaacuagagugaacaaaauuguuggcuuuuuaaggaaauugccugucugguggguaaagcguaucuauuuguaag

SEQ ID NO: 4150643 - RNA, 64 nt, Human
cuucagauguuugugucugauuaugggaaauagaaauauuuauagucauguaaaauauuugaag

SEQ ID NO: 4150644 - RNA, 118 nt, Human
cuucagcacucagcuuugaagacgucuuguuaaccucuauuguuuuguaucagugggcuacaugcucaucugaagaaugaauggaauuagcacaguauuuuuaagcaauuaguuggag

SEQ ID NO: 4150645 - RNA, 58 nt, Human
cuucagcauuucugccuucacaauuucugcuuagggaugaggauaaguaaagcugaag

SEQ ID NO: 4150646 - RNA, 90 nt, Human
cuucaggagaguaggagagacugaaguagucauugucauuaccucagcagguuaauauaauagcuuuucacucgcauuuaaauccagagg

SEQ ID NO: 4150647 - RNA, 81 nt, Human
cuucagggcucugccgugugcucacauggacacacguggagaacaggugcaacguggaggcauagcagaugcaacguggag

SEQ ID NO: 4150648 - RNA, 62 nt, Human
cuucaguaucagaguuauuuuucucucaggagagcuaggaacacuuaauucgauacuagaag

SEQ ID NO: 4150649 - RNA, 56 nt, Human
cuucaguaucugcaaaauggggacacuuguaccugucucccaaggagguccugagg

SEQ ID NO: 4150650 - RNA, 78 nt, Human
cuucaguguuuuuuuggaauaaaguaguguaugcauacauacauauaaaucuuuguuccuagaauuuagcacuguuag

SEQ ID NO: 4150651 - RNA, 78 nt, Human
cuucaguucugcagaaggcaaguucugaucacagauagaaauauaggguuucucaacaugcuuucuaacagguagaag

SEQ ID NO: 4150652 - RNA, 75 nt, Human
cuucauaccugagguagcugugaauguucugggucuccugcccaggcauacucagagcaugccacaagugggaag

SEQ ID NO: 4150653 - RNA, 102 nt, Human
cuucauaucauaggacauuguguugaaggcuguaggcaaaguaggagggcuguguugucuuccagcucugcuucacagucucuucugauucuaguugugagg

SEQ ID NO: 4150654 - RNA, 93 nt, Human
cuucauauuuuaaguuguggagggugggaugaaaaugagaggguaauugcuugagaugauuucuaauaucacuuccagcuguaaaaugugagg

SEQ ID NO: 4150655 - RNA, 63 nt, Human
cuucaucgaguuagaaaaacaaagggcugauauugccucuuugcagaaauaaacuugaugagg

SEQ ID NO: 4150656 - RNA, 75 nt, Human
cuucaucgguuggaaagggauaucuguacuucauuugacuuuaagagcagucaucauuuuuaccaucugauagag

SEQ ID NO: 4150657 - RNA, 64 nt, Human
cuucaugagcacagcugagcaggugcggcugccggaugacugcacaguuggcuacaucguggag

SEQ ID NO: 4150658 - RNA, 57 nt, Human
cuucaugaugaccaacugccaugauuccacaucauuguuugguaguacaucaugaag

SEQ ID NO: 4150659 - RNA, 56 nt, Human
cuucauggagacacgcgucugccuuguagaauguuacaggcugccuguuccugaag

SEQ ID NO: 4150660 - RNA, 67 nt, Human
cuucauuacaucuuggccaaaacucugccuaccacagggggauguuugaugccugguguguuuggag

SEQ ID NO: 4150661 - RNA, 94 nt, Human
cuucauucgggugcaauuguaacagaauuugcuaaacuccgcauuugauuucugaaguggauuuuaauuauucugucauaaacuugcaauggag

SEQ ID NO: 4150662 - RNA, 110 nt, Human
cuucauucuccagcaaugaagaggaaacauggccauucagacuguggaggaacuggaugaggagacaucuggaaguacagucuggaggccuguguuggggagagauggag

SEQ ID NO: 4150663 - RNA, 61 nt, Human
cuucauucugccaucugcagaaggggaacgaucaugucuccauuaguggguggcagugagg

SEQ ID NO: 4150664 - RNA, 71 nt, Human
cuuccaagaguaugcaugcauguuuguguguguaagcagucuauacgaguauguuuguauuuucuuggaag

SEQ ID NO: 4150665 - RNA, 86 nt, Human
cuuccaaguuccucauccagucaugacuaaggcagcaaauaaucaaguugcuucagcuacauaguaguggcuggaagaggguuuag

SEQ ID NO: 4150666 - RNA, 62 nt, Human
cuuccacagauaaaaacagagguucugggaagauacaugaauuccuggccuguauguggaag

SEQ ID NO: 4150667 - RNA, 56 nt, Human
cuuccaccucacgcuuguucagcacaaaaaguggggagcaauaguugaggugugag

SEQ ID NO: 4150668 - RNA, 81 nt, Human
cuuccaccucugaggcugagccaugaggccucuugccccaggggacaguaggacaguucugccuccagcaaaggugugaug

SEQ ID NO: 4150669 - RNA, 82 nt, Human
cuuccaccuggagcugcaguguccuucccuguugucaaagcacuagaguuucuggaugcugauuccagucuccagaagggag

SEQ ID NO: 4150670 - RNA, 106 nt, Human
cuuccaccuugaccauguucccagacuauuccggaagguucucuagaauugcugacccagucuaguaggaucucugggcucacuggguacuaugaugagcaggaag

SEQ ID NO: 4150671 - RNA, 65 nt, Human
cuuccagagauccaugaauaccugagcugugagcaaaacaucuguauauauguauuuuuaggaag

SEQ ID NO: 4150672 - RNA, 81 nt, Human
cuuccagcccaggagacagggauggccuggagaggucaugggacccuguggggccaucucagucaccuccagccagggaag

SEQ ID NO: 4150673 - RNA, 117 nt, Human
cuuccagcccucaagcuuuugcugcuccccaggaaggcccuuccuggugcuguucccuccccuccugcaggugccuuugggguccugccugggcugcagcaccagcuuggcuugagg

SEQ ID NO: 4150674 - RNA, 64 nt, Human
cuuccagcugcagugcugccuccugaaagugaucacaauuuagaagcaucaccuguucugggag

SEQ ID NO: 4150675 - RNA, 83 nt, Human
cuuccagcugugcaccaucuccccaggggcaucucucugcuggggcucccagcugggaggcuccucugugacugcacuggggg

SEQ ID NO: 4150676 - RNA, 85 nt, Human
cuuccauucgaauuugacugacugaggcagccugaguuauuuguaaagaacaacaaggcuuuucauucauaauuuuaguaggggg

SEQ ID NO: 4150677 - RNA, 77 nt, Human
cuuccauugucuucccaaauguaccucuuuuagaagggcauucuaggugagggagcauugugagaaaauacagggag

SEQ ID NO: 4150678 - RNA, 71 nt, Human
cuucccaaagugcugggauuacaagcgugagccauggcaccuggccacauuguuuccuauacuuguagaag

SEQ ID NO: 4150679 - RNA, 59 nt, Human
cuucccaauaugcagucauuuuaccaacucuuggagugauuuacuaccauauugggcag

SEQ ID NO: 4150680 - RNA, 75 nt, Human
cuucccagaccuguaggaucagaaauucagggggauuggacccuguagucuguguuuuauuggccuggguuugag

SEQ ID NO: 4150681 - RNA, 55 nt, Human
cuucccagacgggguggcagccgggcagaggcugcaaucucggcacuuugggagg

SEQ ID NO: 4150682 - RNA, 64 nt, Human
cuucccaucuccaacauuuuucuuuagggaaaucugaauaaaaugaacugguagaguugggagg

SEQ ID NO: 4150683 - RNA, 69 nt, Human
cuucccaucugguucuuuguauuuccuucagugacuaagugagaaauucuaugggggccaggugggagg

SEQ ID NO: 4150684 - RNA, 57 nt, Human
cuucccaugggggcugugcucgagaaggcugcaugccucuccaggucccaggggaag

SEQ ID NO: 4150685 - RNA, 85 nt, Human
cuuccccagcuuugcugauguggugcuggaguuccgacgaggcagccggaauuucucuccgugcuauuuuaguaucgcugagagg

SEQ ID NO: 4150686 - RNA, 56 nt, Human
cuuccccaggaccucugcuaaauagcucagagcuaaggcagagggccugggagaag

SEQ ID NO: 4150687 - RNA, 76 nt, Human
cuuccccauagucucuuuuauguacacccugacuucccagcagcagagugccgagauggaagcggaugaggggaag

SEQ ID NO: 4150688 - RNA, 86 nt, Human
cuuccccaucagugcuggugccccuugaggagaagccuuacagaggaagaguuggccaaaaggggcauuuaugugugauuuggaag

SEQ ID NO: 4150689 - RNA, 62 nt, Human
cuucccgguuuucuagaugaucaggaaauucagcaggccagaacuuuagaaagacugggaag

SEQ ID NO: 4150690 - RNA, 64 nt, Human
cuucccuaggggcuuugguaugcccaucagcaagaggugaaucaugcagagaacuccagggaag

SEQ ID NO: 4150691 - RNA, 130 nt, Human
cuucccuccccucacaccuuuuacauucucuucccauugucucuggaauguguuuugggugggugggugugggaggagauugaagaaugaagauggaugaaaggcuguguuccccaggagaggcuguuag

SEQ ID NO: 4150692 - RNA, 58 nt, Human
cuucccuuucuuaaagaguuaggcagugauauacaugucauuuagaaguaaagggagg

SEQ ID NO: 4150693 - RNA, 72 nt, Human
cuucccuuugagucaucagcaggcaacacucuuggcaacuaggucaaagagugccuuggucuggaagggagg

SEQ ID NO: 4150694 - RNA, 60 nt, Human
cuuccggucucgcuggguuuggggcaaguuaccaaggccccaggacagcgcaaucggagg

SEQ ID NO: 4150695 - RNA, 102 nt, Human
cuuccguggcacguguucguccuucugagccugcagcuuucacagcauccacuuggaugagggcuuugcaggacuuuagcagagcaugugcucacuuggaag

SEQ ID NO: 4150696 - RNA, 55 nt, Human
cuuccgugucaguuccagguggcacagcgccagcuuguccgaggagacgcggaag

SEQ ID NO: 4150697 - RNA, 130 nt, Human
cuuccuacgccggagaaagcugccauugucgaacauguccugggaggcgggguccaggcuccaguaguugcccuugccugggcggcccggcucgcgggggaucuugacgaagcagucguucagcgagagg

SEQ ID NO: 4150698 - RNA, 78 nt, Human
cuuccuauaauagaaucaguucucugggcaugaagguaaauuacuucuguucuaggcaaaagcugauuuuccaggagg

SEQ ID NO: 4150699 - RNA, 93 nt, Human
cuuccucaugucacuuccuggauucccaagggcugaggggaccccacagagagaagagaaccccgagucugggggucaaggagccugagggag

SEQ ID NO: 4150700 - RNA, 104 nt, Human
cuuuuaaucgcuucgucuuguuuccuuugcuuuuuaaauaauguauugaucauuuuuguaagccacuuuaaggauguaaaggaagaaggaggaaagugagaaag

SEQ ID NO: 4150701 - RNA, 80 nt, Human
cuuuuaauguuuauaacucaacuuggaggguucuuuuccaauggauucaggagccacuuaggugagauaaacaaggagag

SEQ ID NO: 4150702 - RNA, 68 nt, Human
cuuuuaccuccccaguguaucagcugcuaaucugagaaggguuuaccugcugaggcugaggguagagg

SEQ ID NO: 4150703 - RNA, 77 nt, Human
cuuuuaguauagaaaguuuaguauaaaagguuauagaggauuacuuuacaaaaagaaacuggaguucaugcuaagag

SEQ ID NO: 4150704 - RNA, 59 nt, Human
cuuuuagugcaucagacacccucucucacuguucagaaaugagaggaugcaucuaagag

SEQ ID NO: 4150705 - RNA, 80 nt, Human
cuuuuauuuucaaugccguagagcagagguggggaguauuucaagaaguucuugucauccuucccccuuuuggcauaaag

SEQ ID NO: 4150706 - RNA, 86 nt, Human
cuuuucaucugcuucuugcaguuucagguugaccuaaucgaacagauucugcagaucaacuugacugccucauagccucugagaag

SEQ ID NO: 4150707 - RNA, 55 nt, Human
cuuuuccacugagccucacaaaagguggcagagaccugagggcuccuuggaaaag

SEQ ID NO: 4150708 - RNA, 57 nt, Human
cuuuuccagaauaccucccugggagucuccgucugcacccaggagagcuuggagaag

SEQ ID NO: 4150709 - RNA, 62 nt, Human
cuuuucccaagauucagcccuccugaccuuaauggguuaccacacugaguuuuaggacagag

SEQ ID NO: 4150710 - RNA, 76 nt, Human
cuuuuccucugucaugacaucuguuuaucucaaaauucugggcugguauugagcuaaaagguucauguuggaaaag

SEQ ID NO: 4150711 - RNA, 78 nt, Human
cuuuuccuucauucucauuucauagugcuuaauuugauaagaguucuaguugcauuggcugcuaugcugggggaaaag

SEQ ID NO: 4150712 - RNA, 77 nt, Human
cuuuucuaggauaugggucauggucauguguagacaauacuuuugauacagucagcucacaauugucccuagaaaag

SEQ ID NO: 4150713 - RNA, 106 nt, Human
cuuuucuauuuuuguuguuguuguuguuguuguuguucuucacugcuuuuguagcaggacaagccucagacaaaacuccucagacaccgaguuaaagaaggaaggg

SEQ ID NO: 4150714 - RNA, 84 nt, Human
cuuuucucaugagguagggaguuuguuguuguuuugauaaauacuuagaugaacauauucaggcacuuuacccagugggagggg

SEQ ID NO: 4150715 - RNA, 70 nt, Human
cuuuucucugcgggucuuucauaguuugggaaaauaauaaacgaggagcugaagaaccuggagaggaagg

SEQ ID NO: 4150716 - RNA, 66 nt, Human
cuuuucugauauucauaggcagguauuuaauuuuacuaauuagcauccugugugaauguauuaaag

SEQ ID NO: 4150717 - RNA, 61 nt, Human
cuuuucugcuguguaaaaugaggguacuacuguauacccugccagcuucacaggaggagag

SEQ ID NO: 4150718 - RNA, 61 nt, Human
cuuuucugugucacccccaacccuaugacauuaguuuguguucguaccugacacagaacag

SEQ ID NO: 4150719 - RNA, 68 nt, Human
cuuuucuuguauuggaugccccaacccucaugugcaugggggaaagaggcauugcagugcaggagaag

SEQ ID NO: 4150720 - RNA, 72 nt, Human
cuuuugagaagugcugagugauugcaaaggagcccagccuagcuccuuagcaggcauucaggaccuuguaag

SEQ ID NO: 4150721 - RNA, 80 nt, Human
cuuuugaguggggcuacugcaaaguuugguccugguggaaacauagcaggucccuaggguuuggccagagcccccaaaag

SEQ ID NO: 4150722 - RNA, 106 nt, Human
cuuuugcucugaaagaauaaagucuuuuuccaucauuuuuacucagaaagaaauauaaauugaggaaggcugaggcuggagaauuacuuuaggccaggaguucaag

SEQ ID NO: 4150723 - RNA, 89 nt, Human
cuuuugguggcuuggcauuguguugauagaaguuauuuuucaaggauuccuaagcuuuuucuaaucauaauugucuccgccaugaaaag

SEQ ID NO: 4150724 - RNA, 130 nt, Human
cuuuugguguacuuuucauauaaggaugauuuuguaauauugauuucuauugagagguuaggaagauaacucauucuuuucucaaauggacaauauuguggggguuuuuuguacuaauaguauagguaag

SEQ ID NO: 4150725 - RNA, 61 nt, Human
cuuuuguagauaucgcccaaggugcucaccaauggucagcacugauagaagucaauaaaag

SEQ ID NO: 4150726 - RNA, 67 nt, Human
cuuuuguagauucauugaacuuuuguaaacacaccaggugaacaggaaaggaaagggucugggagag

SEQ ID NO: 4150727 - RNA, 78 nt, Human
cuuuuguagucaguaacguuucguaucaguucuuugcaauauaugugagaauggguggaugaugagugacuacagagg

SEQ ID NO: 4150728 - RNA, 55 nt, Human
cuuuuguccuuccuugguagucaccagacagaaugcuucagaggaaaggcaaaag

SEQ ID NO: 4150729 - RNA, 58 nt, Human
cuggggugaaaaagccaggacauguaguugccauauuuacaugcccuguugacuucag

SEQ ID NO: 4150730 - RNA, 60 nt, Human
cuggggugacagagugagaccuugucuucaaaaaagaaggcaaguuaaccuuucaaccag

SEQ ID NO: 4150731 - RNA, 94 nt, Human
cugggguuccuuccacccucaggccugaguggcagucccccuuuaaggucaugguaccuugggaggccauggucugagagucuagaaaccuggg

SEQ ID NO: 4150732 - RNA, 100 nt, Human
cuggguaaguguugcauuucucaugcuggcuggagugccucuggaggggugacugacagcugcuccugguuucccagcagcaugagcagggcccauccag

SEQ ID NO: 4150733 - RNA, 69 nt, Human
cuggguaucuuccugggagagucuguggggaugaaaaguuccagagaccagaacauggggauagcccag

SEQ ID NO: 4150734 - RNA, 58 nt, Human
cugggucaggcauuuaggaugaguuccgcuaggcggaucuucugcuugucuugccugg

SEQ ID NO: 4150735 - RNA, 66 nt, Human
cugggucucagucuucccacagugagaccggggaugucccugaagcugugugaaaacugggccugg

SEQ ID NO: 4150736 - RNA, 81 nt, Human
cugggucuccgguucugccgccuccugucccuccuuccggcugccccggccagaggggcucgaaggcgcguuggggcccgg

SEQ ID NO: 4150737 - RNA, 65 nt, Human
cugggucucuguccuggcugcccuggacucuaaccugaguucugggguccugggaugggauccag

SEQ ID NO: 4150738 - RNA, 65 nt, Human
cugggugacagagugagauggucucagagaaaaaagcacacaccagacucuaucaacucacccag

SEQ ID NO: 4150739 - RNA, 58 nt, Human
cugggugccccucagugccgagcacagguaucuggcccagagcacugcugggcaacag

SEQ ID NO: 4150740 - RNA, 62 nt, Human
cugggugcgugagcgcaugcgugcauguuuguguguguguguguuccacgcacauuugccag

SEQ ID NO: 4150741 - RNA, 60 nt, Human
cuggguggaaagugcugagaauguugagagaaaggagacauuccagcaugcgccuuccag

SEQ ID NO: 4150742 - RNA, 100 nt, Human
cuggguggagacucugccuuuggcccugaggaggcagcugcucccuuuugagcugggaggagcagcuucuguaggugucacgcccagaaacuccacgcag

SEQ ID NO: 4150743 - RNA, 126 nt, Human
cuggguggcuguuggugcuggcucaguggcuuggggagguuggggcugggauguaugucauuccugggcuuuccccucugguugugaguggcugcagcagcuccagguaucacggcuacaucccag

SEQ ID NO: 4150744 - RNA, 64 nt, Human
cugggugugugaagacaagauauauugcagcugaaaaaggcugggagggucuuuauucacuuag

SEQ ID NO: 4150745 - RNA, 69 nt, Human
cuggguuagaauucugguccuguccaaggucacaguuauuuugagcuaacaugacuagaagcuucucag

SEQ ID NO: 4150746 - RNA, 102 nt, Human
cuggguucuuagaccugguagggcuuggcuggggccaccagaccccagggagaagggaucauggcacaugcccuccagggagccagguacugcagaccccag

SEQ ID NO: 4150747 - RNA, 55 nt, Human
cuggguuucuaaggaaucucugagcacuuagacucagagauuuuaguagccacag

SEQ ID NO: 4150748 - RNA, 81 nt, Human
cugguaaaggggugggcauuagagcaguaccuaacguguagcaaaacagauggacugcucugagcccuuauccuuugccag

SEQ ID NO: 4150749 - RNA, 84 nt, Human
cugguaaugaagggaccugggccagagcucuuaaacuucucaaaggacaagcagccacagcccacaggacucuuuauuuuucag

SEQ ID NO: 4150750 - RNA, 83 nt, Human
cugguacacacgcaccucuggccuggcacgggucacggcugccauguaacacugggcugggcuccaggccagggugaacccag

SEQ ID NO: 4150751 - RNA, 129 nt, Human
cugguaccugugucugggagccacggaccaaggcugaggagggccugcaggaggucagagguggccccugugcccuacaccuuuccaggccugaccucugugagccccuuggaccugcuagagggcugg

SEQ ID NO: 4150752 - RNA, 88 nt, Human
cugguagugacugcccauccauguggcagggcuggccuccaggauggguccagccaagcauggcguggggcaugggcagggacaccag

SEQ ID NO: 4150753 - RNA, 64 nt, Human
cugguauguuuuuguccuccagggaucugguuuuaaucuggagcccuugauaauaaagcaccag

SEQ ID NO: 4150754 - RNA, 65 nt, Human
cuggucaccaagcucucuucccggcucuccuucuggaggggcagugggaggagggcuggggucag

SEQ ID NO: 4150755 - RNA, 59 nt, Human
cugguccaagugagguggccucugggaacauucuuaagaccuacaugucauuggagcag

SEQ ID NO: 4150756 - RNA, 109 nt, Human
cugguccaugagcugggucugcagcaguaacugccugugcugcgccuccuucucagaggucagcugcugauaggcagccacguacugcugcaggugacccagggacugg

SEQ ID NO: 4150757 - RNA, 63 nt, Human
cuggucccugcccaccugggagcuccuaccucgcaggcagugccagucucuggcaggggucag

SEQ ID NO: 4150758 - RNA, 99 nt, Human
cuggucucuuuggagggcccuuucauuggcagagcucucugggcaagaggagcuggggagccucacuccaguugagggguccucuggguccaggaccag

SEQ ID NO: 4150759 - RNA, 129 nt, Human
cuggucuucccucugugugccccacugccagguggcaccuuacccugcgcaggcgcucagccugcgcggugguacagaugcuucacucacacuugccgggggcuaaaaucacagccuaugaccaaccug

SEQ ID NO: 4150760 - RNA, 65 nt, Human
cuggucuuguuucuuaaacuaugugcuagaggaauuaagguauauuuauaagcaagcaggacugg

SEQ ID NO: 4150761 - RNA, 59 nt, Human
cuggugacucccucucccgcuucucccaacucugaggcccagggacugggaaucagugg

SEQ ID NO: 4150762 - RNA, 111 nt, Human
cuggugagagcagaccuauuugugaggcucuuuucugcugugucugacuucaggccaagccaggaagcagcaagaaagaacucacucauggagcccuuuguucugggccag

SEQ ID NO: 4150763 - RNA, 126 nt, Human
cuggugaguaggguagaggauggaggacauuggggaaaguggccccccggcgagagaggucgugugcacugagcgggagcagcuugagcuggggcuggcucucaggucgcauccuguggccaccag

SEQ ID NO: 4150764 - RNA, 66 nt, Human
cuggugcacauucgcucucauacacaucuaaacugaugcuaauagagaguaaagugaugcuaucag

SEQ ID NO: 4150765 - RNA, 68 nt, Human
cuggugccagcuguuucagagcccagugcgggauuuuccugaagcuccuccacggcagguggcaccag

SEQ ID NO: 4150766 - RNA, 63 nt, Human
cuggugccuccucucccaggucaaauauuaacuaucuggccuuggaaagaggggaggaaucag

SEQ ID NO: 4150767 - RNA, 82 nt, Human
cuggugcuauugaaauucuucauguccucuugaauguuuacaucuauaugaguauggggaauggccaauccaaaggcacuag

SEQ ID NO: 4150768 - RNA, 86 nt, Human
cuggugcucuuuccaccucucuuccuaucagguuuugcacucaaccuuccccagaaccaaauggaugguaagaggggcagcaucag

SEQ ID NO: 4150769 - RNA, 64 nt, Human
cugguggaaucugcuuagagcuuugaggagagaauucccagagccaagcuauggaugguacuag

SEQ ID NO: 4150770 - RNA, 70 nt, Human
cuggugggaagaggagcacuggaaugggaguuaggcgcucuacauucuccccggcuuccuccccaacuag

SEQ ID NO: 4150771 - RNA, 77 nt, Human
cugguggugguuuccuucugucauuugucaguucacuacauuuugaaauaauggcuuuaggaauccagugccaucag

SEQ ID NO: 4150772 - RNA, 65 nt, Human
cuuucacauccauuaacucauuuguuucucaaaagagaacagaugaggaaauggaguccagaaag

SEQ ID NO: 4150773 - RNA, 69 nt, Human
cuuucacuuauuuacuuauuuuuaaauuuuccacagcagagggagaagaguuaaaugaaugaguggggg

SEQ ID NO: 4150774 - RNA, 77 nt, Human
cuuucagaaagccaucugcugguucgcauguguauguaauccagguggaaccagucucugcaggugcacuuugggag

SEQ ID NO: 4150775 - RNA, 55 nt, Human
cuuucagcaucccugggauuacacaaguacuuguuucuccagggauccaugaaag

SEQ ID NO: 4150776 - RNA, 126 nt, Human
cuuucagcugaacuccucuucuugucuugaugagaaucucuuugacaagcagauaugauuucuguuaucaagaguucugcuuggucaggggcuguguuaacucaucuccagauaaucagugucuag

SEQ ID NO: 4150777 - RNA, 68 nt, Human
cuuucauucauucaucugcugacuugacaaguaccagagugguaauugugggcuuaguagagugaaag

SEQ ID NO: 4150778 - RNA, 89 nt, Human
cuuucauuccaauuugauguaagccauaaaugaaaugacuuggcugauuauaagucaguuccccaugaacauuuguuuacaucugaaag

SEQ ID NO: 4150779 - RNA, 130 nt, Human
cuuuccaaagcauuuugaaaaauguguuaguguguauuaauguuuguauauguuaguuaacuuuacaauuaauuuauuuguaauauaagcauuaauaguugugcuuauguguccauugugcaaaauuugg

SEQ ID NO: 4150780 - RNA, 88 nt, Human
gaaaccuggagacaugggguuggcauccuaacauuuuccuuauccuuugugugauguuggaaaaauugccugaugucuucucaguuuc

SEQ ID NO: 4150781 - RNA, 69 nt, Human
gaaaccuguuuugauuaacaaguaacgcugugacggcauaucucuuacaauuuaaugaaaagagguuuu

SEQ ID NO: 4150782 - RNA, 105 nt, Human
gaaacgccucacuaugucaaggagucgucucaugguggcugucacaugaagcaugaaggagugugauggaggacccagcgugggaggacagacagugaagccguc

SEQ ID NO: 4150783 - RNA, 68 nt, Human
gaaacgggguuucaccauguuggccaggcuggucucaaacuccugaccucaggugauccgcccgucuc

SEQ ID NO: 4150784 - RNA, 62 nt, Human
gaaacggugaugaaaagugccuuuauccaggaagucuucccugauggauuucaacaccuuuc

SEQ ID NO: 4150785 - RNA, 55 nt, Human
gaaacguuguggaaaauccucuggggaauagcugagaggacuuuuuugauguuuu

SEQ ID NO: 4150786 - RNA, 65 nt, Human
gaaacucaagagacugugacaccuguucaagcaaagcuaugcuuaacagauacaucugugguuuc

SEQ ID NO: 4150787 - RNA, 78 nt, Human
gaaacucacauucuugggccccacccucagaauuuccgacucaaugggucugggcuggugcucaugaauuugcauuuc

SEQ ID NO: 4150788 - RNA, 67 nt, Human
gaaacucucagauguuucuggaggguugcaucauuuuucgcccucaucagcaguggaugagaguuuu

SEQ ID NO: 4150789 - RNA, 81 nt, Human
gaaacugaaacacagguguaauuugcccgagguuacagagugugugccagaagggagguuugcaucuauguauccuguuuc

SEQ ID NO: 4150790 - RNA, 84 nt, Human
gaaacugcauuuugggggccagacagcacagaacacaauuccauguuucucuguguucuagccuggggcuccuuggcagaauuc

SEQ ID NO: 4150791 - RNA, 63 nt, Human
gaaacuggcugguuacuauuucuggugacacucaaaggaaguugugacagccaacuguguuuc

SEQ ID NO: 4150792 - RNA, 78 nt, Human
gaaacuuuuaugauuaaucuuguuuuguguugacacaacuaagguaauguuaacauguuaagaaauuagauaaguuuc

SEQ ID NO: 4150793 - RNA, 56 nt, Human
gaaagaaagcuuuuccuuugguggcauuugcuuagugugaggaaacauuuucuuuc

SEQ ID NO: 4150794 - RNA, 73 nt, Human
gaaagaaauugaggcuaaguaacuguccaugggcacauagcucaugaguuuaagguuuaggcuuaggucuuuc

SEQ ID NO: 4150795 - RNA, 82 nt, Human
gaaagaacaagaguaguuugguugacagcuguggcagaggagccgauagccgaguucuuaggcaaacaacucuuugacuuuc

SEQ ID NO: 4150796 - RNA, 57 nt, Human
gaaagaaugcuauagugacuuccauuugagcaguugcuguuggcuagcauuacuuuc

SEQ ID NO: 4150797 - RNA, 55 nt, Human
gaaagaccagcaugaggcuuuagcagguguguaagcucucagaacacuggucuuc

SEQ ID NO: 4150798 - RNA, 56 nt, Human
gaaagacuuccuuugagaguacuuucuuguacuugucaacccuuaugaagucucuc

SEQ ID NO: 4150799 - RNA, 62 nt, Human
gaaagagaaccugggccuagaugcuaauggaaacuaucccaugcuuucucagacucucuuuc

SEQ ID NO: 4150800 - RNA, 85 nt, Human
gaaagagcacuggauaggggguuagaugacuaagccugcugugugacuuccagcugguugcuuaaccucucugggcugcacuuuc

SEQ ID NO: 4150801 - RNA, 79 nt, Human
gaaagaugcacuuuuucucagaaggauugguuucccaaagggagagccuuagcccuuuucugaguagaagaccucuuuc

SEQ ID NO: 4150802 - RNA, 57 nt, Human
gaaagaugucagcuuagcuuuuaggaugaauucuugauguauaaguugauauguauc

SEQ ID NO: 4150803 - RNA, 79 nt, Human
gaaagauugcuuuuagaaguuaucaggauuaaaguugcauacagugcuacaagucauuccagguacuucuaaaucuuuc

SEQ ID NO: 4150804 - RNA, 66 nt, Human
gaaagccaggcuggccugggguuccauccucagaaacaugugugaaacccugagcaagucgcuuuc

SEQ ID NO: 4150805 - RNA, 72 nt, Human
gaaagcccugccuggggggaaguagggggcagcuuuugucuuccccugagaccccucagcacugaaguuuuc

SEQ ID NO: 4150806 - RNA, 59 nt, Human
gaaagccuguauuuauugagaguguaccauugcagguggcucuugagaugcagguaguc

SEQ ID NO: 4150807 - RNA, 70 nt, Human
gaaagcgccggcuauuugagcuacugaaagaaaaucaguuucuuucaauucuccuaaugcuaugacuuuc

SEQ ID NO: 4150808 - RNA, 81 nt, Human
gaaagcuggcaggugagguggcuggaacaaacuggucucaucagggaggccugugacaaacccgccuauuccuccgcuuuc

SEQ ID NO: 4150809 - RNA, 68 nt, Human
gaaaggagauauagacuucauauauuggugggauuuaaaucaaaccaguaggaagucuauuauuaguc

SEQ ID NO: 4150810 - RNA, 80 nt, Human
gaaaggagaucaugaggcugagugagccugcugggaguugguccaggcuacgugaggcugcguuagccucacuccccauc

SEQ ID NO: 4150811 - RNA, 96 nt, Human
gaaaggagugaaaugaauguuuggugaucagauagguaaauuguggcagacaaugacaaugcuaugugaucaucaaaccugauuuccuuuucuuuc

SEQ ID NO: 4150812 - RNA, 80 nt, Human
gaaaggauggacccugcuguuuucuucacuucagagagagaauccccuggggugacuuuaagacacaauguucaccuguc

SEQ ID NO: 4150813 - RNA, 61 nt, Human
gaaaggcagacaaggacacagugggccacaggacuggccuucugugcauuugucuccccuc

SEQ ID NO: 4150814 - RNA, 55 nt, Human
gaaaggcaucuucagucucugagcuucccacgcacauuugcuggaauugucuuuc

SEQ ID NO: 4150815 - RNA, 61 nt, Human
gaaaggcuaaaauuauaaggguuagagcaaguauuagcuauaccccuugauuuuagauuuu

SEQ ID NO: 4150816 - RNA, 60 nt, Human
gaaaggcuugguuuugaauauaugaacagcaaccauauauauucagacaagggcucuuuu

SEQ ID NO: 4150817 - RNA, 70 nt, Human
gaaagggauggcagucugcaugagaaaggaccugaaaugguauuuucugugugauugacuauuuucuuuc

SEQ ID NO: 4150818 - RNA, 55 nt, Human
gaaagggccuuggaacucaaagacuuagauuugagucuugguccaggcucauuuc

SEQ ID NO: 4150819 - RNA, 72 nt, Human
gaaagggcuuaggcagggcuggaagaucuugcucucacauuggcauagacuggaagccugccaagcaaauuc

SEQ ID NO: 4150820 - RNA, 113 nt, Human
gaaaggggaagccaaagauuguaucugguguucucuguuaucuucuuucugugaaagcccuagcuuucauuaguaugacagcacgcagaucaucuuuauuggcuuuuacuuuc

SEQ ID NO: 4150821 - RNA, 58 nt, Human
gaaagggguuaggcucggagauaguugacuaaccaacugcucugguagaaacucuuuc

SEQ ID NO: 4150822 - RNA, 102 nt, Human
gaaaggguguaacaaguaauccaugggagcagcagguaucuuuaaggggguccaaaagcugcuugagauccacugccuguugucauaucacguccacccuuc

SEQ ID NO: 4150823 - RNA, 75 nt, Human
gaaagguacaagguagagaaggauuugauuccaugacccuggauucaaagaucaugaucucuacugcugcauuuc

SEQ ID NO: 4150824 - RNA, 124 nt, Human
gaaagguagauaccuacaaacauggcaucuaaaaggugguuugauuaucccacugucaaguaucaguguuaugucaccuauuacugugauuuucaugugauguuuguagcagcaauuacuuuuc

SEQ ID NO: 4150825 - RNA, 81 nt, Human
gaaaggugaaauccuuuucuguucccauuaaguguuguuaaggccauuagcagaaauuggaauagagaaauaugaccuuuc

SEQ ID NO: 4150826 - RNA, 80 nt, Human
gaaagguugggguauuacuaguauaugucaagcaacuuucacgcagagauguuccacaaauauuggugccccauucucuc

SEQ ID NO: 4150827 - RNA, 64 nt, Human
gaaaguagaugacccaucucugagccaaugacaacaggaguacucauggauuuucucugcuuuu

SEQ ID NO: 4150828 - RNA, 110 nt, Human
gaaagucauaugguuggaaucauauaguauguauagaaucauacagucuguauauucagacuaguuucuuucacguaguaauaugcacuuaaauuuucuccaugccuuuc

SEQ ID NO: 4150829 - RNA, 119 nt, Human
gaaagugaaaacaauucuuaccuugugggccuuaaaaaagcaggcagcaggcuggauuuggcaugcaagccgguuugcugaccucugcucuacacuuggguuuuuuugucuuuuuuuuc

SEQ ID NO: 4150830 - RNA, 68 nt, Human
gaaagugcuaggaaguguuagagacugaauuucaaaccaaaggcuaacaccaaaauccaguacucuuc

SEQ ID NO: 4150831 - RNA, 84 nt, Human
gaaaguggaguuuggguacagccucaucacgggagcugcucugcguucucgggucaugcaggcuggcaucuaaugccaacuuuc

SEQ ID NO: 4150832 - RNA, 63 nt, Human
gaaaguggcagagucuguacuuggauccagaucuacauuuccauuagguacaaacccauuuuu

SEQ ID NO: 4150833 - RNA, 81 nt, Human
gaaaguuauguauguuuuuguauguguguguauauaugauucauauaugacacauaaaacaaggacugcuacaagaaauuc

SEQ ID NO: 4150834 - RNA, 57 nt, Human
gaaaguucguccuguggcuucucugucaaaccaaggagugcuccuggauggauuucc

SEQ ID NO: 4150835 - RNA, 60 nt, Human
gaaaguugcaaucauggcuuuugcaguaagcacugcuaugugaaguaguugcaaacuuuc

SEQ ID NO: 4150836 - RNA, 84 nt, Human
gaaaguuuucaccccuguuauagaaccaccucauucuuuuuaaugacugaauaguguucuauaauauggaugugucauauuuuu

SEQ ID NO: 4150837 - RNA, 73 nt, Human
gaaauaaagcccagaaucaagucuacuguuucccaauuggugugaccaugggcugaauucugcgcuucuuuuu

SEQ ID NO: 4150838 - RNA, 72 nt, Human
gaaauaacuauugaguaucugugaugucuggggcccuaugucaggugcugacacugcaaauauaaauauuuc

SEQ ID NO: 4150839 - RNA, 108 nt, Human
gaaauaagcagaaaaugcuuuugggguauuuuuuccaguaaauagcagagugacaacaagccuguuauuugcuggaagaguuuguuuaagcuuuuuuuguugcuuuuc

SEQ ID NO: 4150840 - RNA, 61 nt, Human
gaaauaauacagugcucuucuccauuugcuguggagcccugugguucauuguuauuauuuc

SEQ ID NO: 4150841 - RNA, 91 nt, Human
gaaauacagagugaccccaauauggccugaguccuugccucuucccaggagcaaggcuccagggcugugugggagcacacuuucugauuuc

SEQ ID NO: 4150842 - RNA, 85 nt, Human
gaaauacugacuugaaagaagggucuuuuaauugaugaaaucaaagauucucaaaaucuuucuuuuacugucuugaacguauuuc

SEQ ID NO: 4150843 - RNA, 109 nt, Human
gaaauaggagagagaaauggacgaggagaggaaaagcgaggcuauuauugaauaguaaaauggaagccauuguugucuucaucuucagcccauccccaacacuccuuuc

SEQ ID NO: 4150844 - RNA, 61 nt, Human
gaaauaguuugaauagugucuccuaggaucaaucuuuuggcugcucuuuucaugcuguuuc

SEQ ID NO: 4150845 - RNA, 76 nt, Human
gaaauaugaccucagugagugucaaaguuuacacuggaaaauaacuuuaaggugacaguauugauggcaggauuuc

SEQ ID NO: 4150846 - RNA, 73 nt, Human
gaaaugaugacugucuucugauguaaucagcuaaccaacacaaagaugaauaacacaacaggcagucauuuuc

SEQ ID NO: 4150847 - RNA, 87 nt, Human
gaaaugcaauagcaaaguuaucaaauuaauguuacaacaaaaucaauacauauuaaugggguuuucuuuguuuuuccuugcaucuuc

SEQ ID NO: 4150848 - RNA, 77 nt, Human
gaaauggaaugcauaaauauuguugggaguauucauuugaauuuugagcuuuacuuaaaacacauuuagcauuuuuc

SEQ ID NO: 4150849 - RNA, 55 nt, Human
gaaauggaucagagcaagcuuuuuuuggucauucaucagucuucugauccauuuu

SEQ ID NO: 4150850 - RNA, 74 nt, Human
gaaauggugagggguaaguaaaggaauugcaggaauaaaaaugaccaccugcaaaaguuagcccuucccaucuc

SEQ ID NO: 4150851 - RNA, 86 nt, Human
gaaaugguggguuggcucuuaaggucccugugcuauuuugauaagacucuaguaucuccagaccuugguaguucuaccaccauuuu

SEQ ID NO: 4150852 - RNA, 77 nt, Human
gaaaugguguaaaauaaaugccucagaaucaucccacccaaggggcaagggagcuggggcauuuauaccccaauuuc

SEQ ID NO: 4150853 - RNA, 70 nt, Human
gaaaugguuacagagauuuuuaagauguguuuuccaugccuacaugcucuuguaacugcuguaccauuuu

SEQ ID NO: 4150854 - RNA, 65 nt, Human
gaaaugguuucuugggagaagucaggagcugucaucagcaucugaugagcccaggugaccauguc

SEQ ID NO: 4150855 - RNA, 55 nt, Human
gaaauguagaguaucugaggauuucgucuacuuccuugauacuguauuauauuuc

SEQ ID NO: 4150856 - RNA, 99 nt, Human
gaaauguagcuguguagaaaugacagaguccuugaaaaauauucggguuauaagauaugacaucaaguuaccuggucauuacuauaacagucacauuuu

SEQ ID NO: 4150857 - RNA, 58 nt, Human
gaaaugucaagauauguuuggacuuugccuuggacaucgccgagcagauugauguuuc

SEQ ID NO: 4150858 - RNA, 81 nt, Human
gaaaugucacaucugucugcaauuggcuaccucuccauaggagaaacacugcuggaagccuggagaccagauguugcuuuc

SEQ ID NO: 4150859 - RNA, 61 nt, Human
gaaaugucugccaggcacauaguaggcacucagugaguauguguuauuugguauacauuuc

SEQ ID NO: 4150860 - RNA, 125 nt, Human
gaaaugugaagcagaaaaaucucgacaaugcuguugagacauucuuuuucuugggaaggccucaugucaaagcagcaaauauuaauccauuugucauaacagauguuuuucuguugaaacccuuc

SEQ ID NO: 4150861 - RNA, 59 nt, Human
gaaauguguucgugauuauuuguccauuuagggggacaucuguuuaacgaaggcauuuu

SEQ ID NO: 4150862 - RNA, 70 nt, Human
gaaauguuaaaaugcagauucugauucaguagauucuaggugaggcugaaauucugcauuucuaacaagc

SEQ ID NO: 4150863 - RNA, 62 nt, Human
gaaauguuaugagauauguacuauuggguggaaaccaaguauggaaauuccauaaacauuuc

SEQ ID NO: 4150864 - RNA, 63 nt, Human
gaaauguuuuguuugugacuaagcauaccauaguugggugcuuugcaaauaauagaaugucuc

SEQ ID NO: 4150865 - RNA, 63 nt, Human
gaaauuaaagcagguuaugaccauggcccgugaggcaugguuuuaugacucugcugaaaucuc

SEQ ID NO: 4150866 - RNA, 86 nt, Human
gaaauuacgggaacacagcuucucuuuccaaauauuaagaaaauguacguauuuaggcaauagauggcaguguuuccacaaauuuu

SEQ ID NO: 4150867 - RNA, 55 nt, Human
gaaauuauuuucagaauggagaaggcaguugucuucaucagggagaaauaauuuc

SEQ ID NO: 4150868 - RNA, 100 nt, Human
gaaauucccaggaagucucccuccuaaaacauguagcaguuuuucauuauccagagugaucauucugaaauugcuuuagggggaaagacgugggaacuuc

SEQ ID NO: 4150869 - RNA, 57 nt, Human
gaaauucuaucagcuuuuagugcccugaauacaguauuaacaguuguagaggguuuu

SEQ ID NO: 4150870 - RNA, 72 nt, Human
gaaauucucuggugcugugauacgaggcacuggaguuguaagcaaccaugucucucaugaccaaagaagcuc

SEQ ID NO: 4150871 - RNA, 63 nt, Human
gaaauugacacaugcaccagucuuuaaauggguuggaguuuagagauuucauguguuuauuuu

SEQ ID NO: 4150872 - RNA, 61 nt, Human
gaaauugauaucucugaagccugcugccuuaauggcagucuucagagaaauuaacucuuuc

SEQ ID NO: 4150873 - RNA, 73 nt, Human
gaaauuguuggggcuguacuaugaauaucuuguuucuaaagauacagucagacuuuagccauuuaacaauuuc

SEQ ID NO: 4150874 - RNA, 90 nt, Human
gaaauuuuauuuuuagauauacugcacgauauggugaauguacuuaacaacaguguauuguacauuuccaaauugcugagaguaaauuuc

SEQ ID NO: 4150875 - RNA, 81 nt, Human
gaacaaauaugagaaagaaaugagaauacauuuggaaaacucuuuuugaaucuuucaaauuucuuuggguuauguucuuuc

SEQ ID NO: 4150876 - RNA, 126 nt, Human
gaacaaaugcuaaauagaguaacaguuaaauguauguguacacucuucccaaaugccaagagugcagcgguggggugagauucagauauucauuuauuucuaagucuguaguuaacauuuauguuc

SEQ ID NO: 4150877 - RNA, 99 nt, Human
gaacaaauguuguggauucuuuuucaauugccauugcugucuugguuaaaacaaaaguguguaauguguuuugaaaaacaguauuuaaaguauuuucuc

SEQ ID NO: 4150878 - RNA, 75 nt, Human
gaacaaauugagaugauaaacaccugcuggguauguauacacccuuguacacacuguuugaucauuucuaaguuc

SEQ ID NO: 4150879 - RNA, 69 nt, Human
gaacaagccauacugggugaaaucaaagcacguguaaaggacgacugacacccagaccaugguuuauuc

SEQ ID NO: 4150880 - RNA, 85 nt, Human
gaacaauuguuccucucuguugcuaaauguauugccuaauuagagaaugaauaaaaugucauagcaaagagagugauauuuguuu

SEQ ID NO: 4150881 - RNA, 56 nt, Human
gaacacagucaagggcugcuguccucucauccuuggacaguccugcacugguguuu

SEQ ID NO: 4150882 - RNA, 69 nt, Human
gaacaccaugaaauguuuuguaagcaugcaucuguugaguauuugcuauacggagcaucuucagguuuc

SEQ ID NO: 4150883 - RNA, 129 nt, Human
gaacagauuuuauuagaugcuaaauauaguaagccucuccagagacaguauuacauuucaggggauuagaggauuuguaaaaccacugucugcucauaauggagggcuuaucaacugaaaaauauuuuu

SEQ ID NO: 4150884 - RNA, 95 nt, Human
gaacagcacaugggggaagagagaagaaugaucuuuacaacauagccuuagucgagaacauaucuguuuucuaacucccucucucuggguuguuc

SEQ ID NO: 4150885 - RNA, 55 nt, Human
gaacagccuggaguugcagggccucucaagcugggggcccugaccuuggcugcuc

SEQ ID NO: 4150886 - RNA, 75 nt, Human
gaacagcuacacaucaagucuuauggucacuuugaagagaauaaagccagagggauuccuggugugucuccguuc

SEQ ID NO: 4150887 - RNA, 66 nt, Human
gaacagugccagcacacaauaagcgcucauaaauauuaacugcuuuuaugauugucagcauuguuc

SEQ ID NO: 4150888 - RNA, 116 nt, Human
gaacaguuagacccauucccagucuuacaugagauuagucacaggauauuucauuuuaaguccaguggaauguuuuccuaaaucagacaagacucuuucaguguuuauggcuguuu

SEQ ID NO: 4150889 - RNA, 57 nt, Human
gaacaucauuguuugguucucuucuuugaggcuagaaugagaaucucuuugauguuu

SEQ ID NO: 4150890 - RNA, 62 nt, Human
gaacauccaugccaacuuuuucagagaacauuccaaaacaguauggcaugugguccauguuc

SEQ ID NO: 4150891 - RNA, 100 nt, Human
gaacaugagaaaacuuugaagugauggauguguucacuaucuugaguauauagugauauucucauugguauauacaugugucaaaaguuuauugcguguc

SEQ ID NO: 4150892 - RNA, 65 nt, Human
gaacauggccuuucucaguggugcuuuuuuucuaggaguuucacguagaucaggguccaggguuc

SEQ ID NO: 4150893 - RNA, 67 nt, Human
gaacauggcucuguuuuuuaugcucuauugaaaaugaucaucagaagcagaaacugggcuuguguuc

SEQ ID NO: 4150894 - RNA, 87 nt, Human
gaacauuagacucaacuucaaauggcuuaaguauaagugagauuuauuaucacacauaaaaagaagacuagagguaguguagugauc

SEQ ID NO: 4150895 - RNA, 61 nt, Human
gaacauuuccagaaaggaacuaggcauugcuuucuguucauuuguuccuuuagaaguguuc

SEQ ID NO: 4150896 - RNA, 81 nt, Human
gaaccacgacagggauugauauguuauagcccaggacaugaaccuagcaauaaagauaucauuucgauugucuguggcuuc

SEQ ID NO: 4150897 - RNA, 60 nt, Human
gaaccaggaagcaggcccucaccagacacugaaucugcaggcaccuggaucuuggaauuc

SEQ ID NO: 4150898 - RNA, 72 nt, Human
gaacccaaaccuggaccucccucugggugaucuucucuucuacagcccugucuaggugcagcuuugggucuc

SEQ ID NO: 4150899 - RNA, 64 nt, Human
gaacccaggaggggagcccucaggggauggggcugguccugucucugaagcccccuccuuuguc

SEQ ID NO: 4150900 - RNA, 61 nt, Human
gaaccccaacuuauaagacagaaagaacugagcuguucaggcuggguuggagauggggguc

SEQ ID NO: 4150901 - RNA, 129 nt, Human
gaacccgggagcggcuccggggcugucagcugcccgccuggcuccuccaaggccuggagcucggacgcgggcucugggggcuucuggggcgcggaagcgggcucgcggggagcaguggccgcccccggc

SEQ ID NO: 4150902 - RNA, 72 nt, Human
gaaccgaggauauggcauucuuuuuaaggguguguguauucacaacuuagggaagaaucccaaauugaauuc

SEQ ID NO: 4150903 - RNA, 69 nt, Human
gaaccuagguuuaggguacauguuuuucucuguuucaugaacuuacagugugguuugagcacuggguuc

SEQ ID NO: 4150904 - RNA, 61 nt, Human
gaaccucagugaaacuggaggugagcgaugugguucaggcauuuccauuucagugggauuc

SEQ ID NO: 4150905 - RNA, 63 nt, Human
gaaccuccaagaugguccaugcacagauauggcaaucaaugcugacuguuggcuaugagguuc

SEQ ID NO: 4150906 - RNA, 67 nt, Human
gaaccugaaagcagcugcucuggccuugaccaugggucaugccuggugccaguugcuagucugguuu

SEQ ID NO: 4150907 - RNA, 77 nt, Human
gaacgaacaggcaaacugugggaucccggccugccagggaggguucaggguaaagccuucaguuugcuuguucauuc

SEQ ID NO: 4150908 - RNA, 56 nt, Human
gaacgcugugcacuggguccaggaugacuugcacacccuguucacugcgcaguuuc

SEQ ID NO: 4150909 - RNA, 56 nt, Human
cuuuguauuuuaucauaguuuuauauguaccauaaaacugugaagcaaguacaagg

SEQ ID NO: 4150910 - RNA, 95 nt, Human
cuuugucaccucagugccuggaaagugucuccauccugguuauacuuaggguuguauccagugauuaugcacaucuggcauaaggccucacauag

SEQ ID NO: 4150911 - RNA, 77 nt, Human
cuuugucauauacaucaagauaaaaacugucagacuacacuagauucacagacaauuguuuugguguuaagagaaag

SEQ ID NO: 4150912 - RNA, 71 nt, Human
cuuugucuuuauaaugguucuaagaucaucagaaguuacuuuugugcauaaagggcuauaguacagcaagg

SEQ ID NO: 4150913 - RNA, 87 nt, Human
cuuuguggcucauggaacaguaugaaugcagaauguagcuuucuccacuuguggacugcuuugcauagcugccagaggccuccagag

SEQ ID NO: 4150914 - RNA, 59 nt, Human
cuuuguuagcagccaauuuguucuacuugauccagagcauuuaggcaacgcuaccaaag

SEQ ID NO: 4150915 - RNA, 66 nt, Human
cuuuguucucugcuucuguuuguauugagucagcuugcuuaggaauauagaucagugagacuaaag

SEQ ID NO: 4150916 - RNA, 81 nt, Human
cuuuguuggcuaccuuuaguugguuggaugcuggaccuguugaugaccagacagcagugacaagacuaagaaggcccaagg

SEQ ID NO: 4150917 - RNA, 55 nt, Human
cuuuguuucuuggcugggaucuuaagcugguaggauggacagccuggaaggaaag

SEQ ID NO: 4150918 - RNA, 85 nt, Human
cuuuuaaagaguggagaauaaaauaggagaugaaaauguauauuauuguuaauguuauuuuauuuuauuuacuacuuuguagaag

SEQ ID NO: 4150919 - RNA, 58 nt, Human
cuuuuaaaguauauguagggcccaaauauugcaugggcauacauacuuauucuaaaag

SEQ ID NO: 4150920 - RNA, 125 nt, Human
cuuuuaagaauauauuuagcaguguuaaacuugcugaaguugcucagcuccauccaauaaaaggauugaccaagagcaaauuagcauuucauuaacuauuuuaaauauaauacuaacuuauugag

SEQ ID NO: 4150921 - RNA, 76 nt, Human
cuucaugccugaaaggaggccacauggcuaggacagagcugugucuaaagccgaaggccuccaugaucagaugagg

SEQ ID NO: 4150922 - RNA, 73 nt, Human
cuucaugcuaaauaguuuaggaggcuaagugguuugagaauaaggcaaagugauuucuuaaaaaggcaugaag

SEQ ID NO: 4150923 - RNA, 99 nt, Human
cuucaugcucuggcagacagcgguccugggcaugaugcugcgaggcugggagccccagcauccguucucaggacugaacaucaaacggcggcgguggag

SEQ ID NO: 4150924 - RNA, 81 nt, Human
cuucaugcuuauuaccgggaucaucaagaauuuauugcaucauuaguuuuuaaaauauuggucucacuugguaagaugaag

SEQ ID NO: 4150925 - RNA, 62 nt, Human
cuucauggcccaucagacccagggcuggcaggaggcuagacagucuugaaggggucauggag

SEQ ID NO: 4150926 - RNA, 115 nt, Human
cuucaugucuauagaaaauuuucuucagaggagcugaauauauuuauauuaauuucucuuuaugggcaaauguauauuuugcuauuuuuggcagggauuuacuuuuugacggggg

SEQ ID NO: 4150927 - RNA, 55 nt, Human
cuucauuguucaauacacucaucauccauccaggacugaguggagugcaaugaag

SEQ ID NO: 4150928 - RNA, 61 nt, Human
cuucauuuuauuuccuucuguaucccccuccaccuggggaaaggaggggauagaaucaaag

SEQ ID NO: 4150929 - RNA, 61 nt, Human
cuucauuuuuaccgcgugucaaagagauaggucuguuuggauuuggggauggaguaugaag

SEQ ID NO: 4150930 - RNA, 124 nt, Human
cuuccaaaagucuccuucuggugaugacuucucuugcccuguggggccuccagccaguaagaauagcggcaaaucugggggcuucaugggguugugggcuuagagcugggaacgggacaggaag

SEQ ID NO: 4150931 - RNA, 57 nt, Human
cuuccaaagcacuuuauggaccuuguauuuggacaacaccuccaugaagcuuggaag

SEQ ID NO: 4150932 - RNA, 126 nt, Human
cuuccaaauuuuagacaugugugugugcuucuaauuauucccuugucccaaguccuucaaauguaaggaauaggccugguauagauaagugaguaauuaugaagcaauaugaugaaauuaugggag

SEQ ID NO: 4150933 - RNA, 62 nt, Human
cuuccaagaugaacagcaagcggauuuguagggguuucugcugugguucuguaauuggcaag

SEQ ID NO: 4150934 - RNA, 71 nt, Human
cuuccaaguugcucugcugaccugagcucauuacuuuuauauaaugauugcagcagaagcaucuauggaag

SEQ ID NO: 4150935 - RNA, 58 nt, Human
cuuccaauugagauugaggauggacaaacccuuccugaaccaaauucagugcuggaag

SEQ ID NO: 4150936 - RNA, 88 nt, Human
cuuccacuccucugagguuuaauuaggagaaucugucuuucugguacuuccgagagccuugcucuaaauuucucagaggaaagcgaag

SEQ ID NO: 4150937 - RNA, 61 nt, Human
cuuccacuuuccuuuccagauuacagcaaaaugucaagaagugguaaaggagggcuggagg

SEQ ID NO: 4150938 - RNA, 73 nt, Human
cuuccagaaacaggauugcuggcagggacaggcuuugcacaaggucugucucucaagggccguccuguggagg

SEQ ID NO: 4150939 - RNA, 58 nt, Human
cuuccagagccagucucugcgggacagagcccgccgcuucgaagaggccuugaggaag

SEQ ID NO: 4150940 - RNA, 56 nt, Human
cuuccagcugauuacaggcuauggcaggcuccauaaccuccccaauuagccggagg

SEQ ID NO: 4150941 - RNA, 83 nt, Human
cuuccaggucucacucuucucuuucuucgcuuguuggaugauagaucucaagaaucuagggaggauucugagacuuaagggag

SEQ ID NO: 4150942 - RNA, 96 nt, Human
cuuccagugugccuguggauccuuaugggaauaggauauuagguguucauagacccaugugaggaaggcuugcauuucuagcaggcuagcugguag

SEQ ID NO: 4150943 - RNA, 60 nt, Human
cuuccauacgcacaaagauagggguaggggaauauucccugugacacuguuugugguaag

SEQ ID NO: 4150944 - RNA, 99 nt, Human
cuuccauagucauuccacaaagauguguuuccaagucucucaacacccagaaaacgucaagggguuggaugccuuggaaauugugagauuguuaggagg

SEQ ID NO: 4150945 - RNA, 71 nt, Human
cuuccaugagucaauguauuuaacagcauuuuguaaauuacauagaauuacauaaauacaugaauuggagg

SEQ ID NO: 4150946 - RNA, 74 nt, Human
cuuccauguaucugcugcacagauugccuuuuacucccaauauacuggggugcuguugccuggcugcacggaag

SEQ ID NO: 4150947 - RNA, 115 nt, Human
cuuccauuuagaacuauuagguuggugcaaaaguaauugcaguuuugccacuuuuguuggcaauauccacaauuacuuuugcaccaaccuaauacuauuuuguucaauauagaag

SEQ ID NO: 4150948 - RNA, 130 nt, Human
cuuccauuuguccucauuucuuacuguggcuccauucacaugcccaagcagcaccagggcaacacauaguagcaggagaggugcucuggucaugguggagugaagcugagugaaagaggggaugcgggag

SEQ ID NO: 4150949 - RNA, 59 nt, Human
cuucccaaucucuucuccugcagggauaauaucacaugauuucugaggagaacagaaag

SEQ ID NO: 4150950 - RNA, 97 nt, Human
cuucccacuggagcugcugagcugauaggcugugagccuggggcugcuggggcucuagaggacagccugcucgagagugaagcuagcacaggggaag

SEQ ID NO: 4150951 - RNA, 69 nt, Human
cuucccaugucuagcuucagggucaaggugcucauucacccagcuacugaugauguugguugugggagg

SEQ ID NO: 4150952 - RNA, 85 nt, Human
cuucccccaaggccacuccagagacuggucucucauaucucaaacccgagaggggcucuuuacugugaggguggucugagggagg

SEQ ID NO: 4150953 - RNA, 115 nt, Human
cuuccccuaacucccaagaggacaugcuuauggccugcacugacuagggcagauuuucaaaccaguccuagcucuagcaaggcuggccugggguucugugggguugguggggaag

SEQ ID NO: 4150954 - RNA, 72 nt, Human
cuuccccuucccagcuucugccagaucugccuucagauuccucagucaugaagccucccugagaggggugag

SEQ ID NO: 4150955 - RNA, 86 nt, Human
cuucccuccuccccuccagagccuggacauucuggaaaagugucuuccuuuaagaauggucauucuggcaggacaggaaaggggag

SEQ ID NO: 4150956 - RNA, 66 nt, Human
cuucccugagcccaggcgggagcugagcucuucugagcggccgcccgaggaccuggguucuggaag

SEQ ID NO: 4150957 - RNA, 73 nt, Human
cuucccugguguucugucuguuugggaaacaguugagaauucccaucuuccagcuuucagggcuuuagggaag

SEQ ID NO: 4150958 - RNA, 81 nt, Human
cuucccuguguuaagccaaaccuuguggucccaggucaugauccaccaaagaccacaacuguuggaggaacacagggccag

SEQ ID NO: 4150959 - RNA, 63 nt, Human
cuuccgucgcguccaggguuuuauccguacucaucuugagccggcaucuggaugucauggaag

SEQ ID NO: 4150960 - RNA, 64 nt, Human
cuuccuaccaggacaugcauuaauaauggcuccuugugacucguaaagugcaugcuaggggaag

SEQ ID NO: 4150961 - RNA, 62 nt, Human
cuuccuaccauauuuagugcuuucuccaauuuucggagaaucuucaacagaaugguaggaag

SEQ ID NO: 4150962 - RNA, 67 nt, Human
cuuccucuguguccugggcuuguuucauucugacccucugugcuagaagcccaggacacagaggaag

SEQ ID NO: 4150963 - RNA, 61 nt, Human
cuuccugaacaaugccaucaauuauccccaaguguggauuaaaggauauaguucuagggag

SEQ ID NO: 4150964 - RNA, 59 nt, Human
cuuccugagcaaggaacuauagguauccuuaauggaguccauuaaucuuugucagggag

SEQ ID NO: 4150965 - RNA, 70 nt, Human
cuuccugagcuuccaguuccuccaggaugccuccagugcaaggcccuggcaagagacugaagauaggaag

SEQ ID NO: 4150966 - RNA, 57 nt, Human
cuuccuggcucggugccucacccuggaggguggcagugugggcugugagaugggaag

SEQ ID NO: 4150967 - RNA, 64 nt, Human
cuuccuggcugaaccaaugaagugggcuccugcucacugcaugggagaucagcuuucagguaag

SEQ ID NO: 4150968 - RNA, 66 nt, Human
cuuccugggcagcagcaggaggucucugcucuaaacugcagaccccagggcugcaugcugggggag

SEQ ID NO: 4150969 - RNA, 57 nt, Human
cuuccuggucuccagugguucuuacuggguagugcuggacaacagaguaccaggaag

SEQ ID NO: 4150970 - RNA, 67 nt, Human
cuuccuuaacuugucuagagguuagacaaaguuagcugcugucccaacccugagaagauucuggaag

SEQ ID NO: 4150971 - RNA, 108 nt, Human
cuuccuuagaggacuuaucacugggccauccugggaagcauguuguccuauggaagauugugaccgugggcagacagugcuuugcagcugaggcagucccugaugagg

SEQ ID NO: 4150972 - RNA, 64 nt, Human
cuuccuucucacuagcagcgcccucccugccugcacaggaggugcugugagguugagaaggaag

SEQ ID NO: 4150973 - RNA, 63 nt, Human
cuuccuuggaauaccauguugacagaggugcaaagugacuguaccugcugggugcugagggag

SEQ ID NO: 4150974 - RNA, 85 nt, Human
cuuccuuguugcugaugaaugucauacauaaugaaagauuauauccauuuauccucagcaguaaaucauuuaucacacaaggggg

SEQ ID NO: 4150975 - RNA, 80 nt, Human
cuuccuuucuuuaaccugaagugaucugcugaauuuuaauccuuuauccacacuucauagcaagguuggagaauuggaag

SEQ ID NO: 4150976 - RNA, 84 nt, Human
cuuccuuugacuuguuguagacgcgaagugacugaauugaaauugaauuaaguagagucauguguauagaagcucagauggaag

SEQ ID NO: 4150977 - RNA, 73 nt, Human
cuucgacucugugccugaagagcagcccagaagcaaaacaagagagcgaagcucaucaggcuuagagucaagg

SEQ ID NO: 4150978 - RNA, 62 nt, Human
cuucgauagcccaaggggcuggggguggcgagggggcccccauggcuucgaggcuggggaag

SEQ ID NO: 4150979 - RNA, 81 nt, Human
cuucggccucauuuuuacuuaaggaugcuugaaauaacuuucucaacaucauucugcuaguaacagaugaaggaaacgaag

SEQ ID NO: 4150980 - RNA, 63 nt, Human
cuucgucuagacaguuuccaaaagagccucuuuuuagagcccucuuuugugugcuagaugggg

SEQ ID NO: 4150981 - RNA, 104 nt, Human
cuucuacuccucaugaccaaagcuggcuuucaugguuuacucauguacuuacugaugaaacccugagacuuggggccagugacuguucagagguccaugugaag

SEQ ID NO: 4150982 - RNA, 71 nt, Human
cuucuauaaacugugaucuuucuuccaauuuuaacuugaaugucaggcaauaggaucacaguuccaagaag

SEQ ID NO: 4150983 - RNA, 68 nt, Human
cuucuaugaggagagacaugcacaggaacaaaagaauaacucuucagcauuuuucucuccuauaggag

SEQ ID NO: 4150984 - RNA, 68 nt, Human
cuucucaaaacucugcccuucucaaccccugcgcuagaguaggcagggcagaaggugcugaggagagg

SEQ ID NO: 4150985 - RNA, 69 nt, Human
cuucucaccuuaauguggucuuguguuauauugagagagggauuuuaaagaucaccuugacaugaaaag

SEQ ID NO: 4150986 - RNA, 91 nt, Human
cuucucagccuugcucugggcacuggaagccugcuguguaugucuuaucgaggugguguuucuugcccugagaugaauuaaggaagagaag

SEQ ID NO: 4150987 - RNA, 100 nt, Human
cuucucagggacuuucuuuauuaauucagugguuucugcaacaagaccccgagugcuagugcugaccauugauuuauaaagguagggagagauggaggag

SEQ ID NO: 4150988 - RNA, 73 nt, Human
gaaggcaggagaguuuggggaagggucagagcuuggaaaggcugcuggaacuuagcaugcucuccuagucuuu

SEQ ID NO: 4150989 - RNA, 64 nt, Human
gaaggcaggcaggugggaaucagggcaugaauugagaaaacuagagauuuaccuuugagccuuc

SEQ ID NO: 4150990 - RNA, 59 nt, Human
gaaggccacaaaaaaugucauaguaggugauaaugucuuugauaucauuuuuuggccuc

SEQ ID NO: 4150991 - RNA, 71 nt, Human
gaaggccucucagggauugcaaaauucauccucuaaaccaggaucaacccucucacacccuggacaccuuu

SEQ ID NO: 4150992 - RNA, 80 nt, Human
gaaggccugcuuccuagaaagaugucuuuucacuguagccucacaugacagaaauggggcgauaucucucuggggccuuu

SEQ ID NO: 4150993 - RNA, 58 nt, Human
gaaggccuguuggcgugggcucuagagcgcuggcuccgacaccaacaggcaugacuuc

SEQ ID NO: 4150994 - RNA, 98 nt, Human
gaaggcuaaggagcuaauccauugcacaucugagaagagauuggaccuugcaacucuuucucauuugcuguagagucuaguuuccuugauaugcccuc

SEQ ID NO: 4150995 - RNA, 112 nt, Human
gaagaaaugagagcucacaucuggccccauuuucugcauggagaaacugaguccugugggggcugcucaggcucaugcgaacuugaggguaagugagagcuuagcuuucuuc

SEQ ID NO: 4150996 - RNA, 66 nt, Human
gaagaacauugacagccuuuguugcuuugggaaucgaaguacaguagggugcuguuaguggacguc

SEQ ID NO: 4150997 - RNA, 61 nt, Human
gaagaacugacaaacuagaucacucugggguggcccuguaugugucugucugucucucuuc

SEQ ID NO: 4150998 - RNA, 84 nt, Human
gaagaacuggguccuugagucuagaguaagaguaauuaugaaaaaagaaucuguucugauuuacagagggcccagucacacagc

SEQ ID NO: 4150999 - RNA, 76 nt, Human
gaagaagaagaauggguuuggugagaggguuccaauauuaacaacccaacuucaagcucauuccucuaaccucuuc

SEQ ID NO: 4151000 - RNA, 70 nt, Human
gaagaagaaggguaaggaguguugacugugugugauccugucagugggccguccucucauucuuauuuuc

SEQ ID NO: 4151001 - RNA, 55 nt, Human
gaagaagagaacuggcauccuaaucuggugaucuggugauccguucuccuuuuuu

SEQ ID NO: 4151002 - RNA, 78 nt, Human
gaagaagguagaggacauugcuaaauaaugaaugaauggaugaaugaauaucuuuaacuugcaguauuuaccuucuuu

SEQ ID NO: 4151003 - RNA, 101 nt, Human
gaagaagguggcgccauaacaggggauugauuggaagucucuugaguucaauugcaagauccuacaguccauucuuuguggccaggcaaucaucuuucuuc

SEQ ID NO: 4151004 - RNA, 95 nt, Human
gaagaauaauucaugaacaugcuguugauggccugaguguuuucacuggugcuacagugcugucaucagugugugcauuguccugagaguuccuc

SEQ ID NO: 4151005 - RNA, 55 nt, Human
gaagaauccaugcuaauuuaccuguuuuauuaugggguagauuaugggguccuuc

SEQ ID NO: 4151006 - RNA, 87 nt, Human
gaagacagaugaauucucauauauuucugcauucaaucuguuauaauauguugucuugguugaaauauaugaagaaaaucuggcuuc

SEQ ID NO: 4151007 - RNA, 70 nt, Human
gaagaccagagggcuguguaaggauguuguggggauuucagagauggaucagauacagccuuuguacuuc

SEQ ID NO: 4151008 - RNA, 79 nt, Human
gaagaccauuaggguaauugaacacuuaucuugguacucacauuuucaaaggauagguauuaaaccccaaugaaucuuc

SEQ ID NO: 4151009 - RNA, 92 nt, Human
gaagaccucauacgauuuucaucgcuagguuggccuuuuaaauuaggaaguagguauaacuuuaugcauggaaaaccauuguuuguuucuuc

SEQ ID NO: 4151010 - RNA, 79 nt, Human
gaagacuucugaauauugagauaagaacugacaugggucacucaaggaaauggcaguguuucaguuuuuggagaacuuu

SEQ ID NO: 4151011 - RNA, 111 nt, Human
gaagagaauuaaagugucugacuugcaucuuaaaggagucugaaaagcagauauauacauaagcuuuuaaguugacaaguuuuauuucaagacucuuguuaaauucucuuu

SEQ ID NO: 4151012 - RNA, 61 nt, Human
gaagagagagugggguucugcggggcagagagagauacuguggaacaaacuuaaacuuuuc

SEQ ID NO: 4151013 - RNA, 57 nt, Human
gaagagaggcaggaauccugggugagggcaggggcucccuggguccugcuugcucuc

SEQ ID NO: 4151014 - RNA, 79 nt, Human
gaagagauaacagguugcuuuggugaaaugucuauuuguuaacacuuagguuuucauuaaagucaaaucuggucuaguc

SEQ ID NO: 4151015 - RNA, 100 nt, Human
gaagagcuagauuuacuucagguuuauugacuauuuaguagaaggucucugcucaggaaaacagucuaguaauugcuuagcaauaaucugguaugucuuc

SEQ ID NO: 4151016 - RNA, 76 nt, Human
gaagagcugucagaaaagcuaaugcaucucuugaucuaaaagagcuaguuuagaauggguuuucugaaagguuuuc

SEQ ID NO: 4151017 - RNA, 65 nt, Human
gaagagcuuaguuguccuagaagccaaacguaguauuugagguucaugugggcaucugauucuuc

SEQ ID NO: 4151018 - RNA, 105 nt, Human
gaagaggauauacaaugucauuagaaugugcugggacaguaaugguuguuuuauuauuauugcugcuaacauuuuauggcauagcauucaagaccuguccuguuc

SEQ ID NO: 4151019 - RNA, 73 nt, Human
gaagagggauuaguaguuaagacauaggcauguuaaaauguuauuccuuuugauucuagaaucuucccucuuu

SEQ ID NO: 4151020 - RNA, 81 nt, Human
gaagagucaacugccuuugcacuccacaugacucugagacacauggggauguggcccagcggucaggcugucugauguuuc

SEQ ID NO: 4151021 - RNA, 87 nt, Human
gaagagucccaaccaaaagucggcugcucucugguaaagauggauggucuuuuccucugcagagcaguuagaauguguuagcucuuu

SEQ ID NO: 4151022 - RNA, 84 nt, Human
gaagaguggcagguaagaccagaacagugguuuguauuucauaagauugggaugcucacauuucugauuauaccaaagcuuuuc

SEQ ID NO: 4151023 - RNA, 68 nt, Human
gaagaguuuaaaaugaaauucuaucuucagcucacaccagugaguugaagcauuucuuugagcuucuc

SEQ ID NO: 4151024 - RNA, 78 nt, Human
gaagauaaauguucaguagaauaggaauggaaucuaaugcuuuuucaugcugugguaaaucacugaaaaugugucuuc

SEQ ID NO: 4151025 - RNA, 69 nt, Human
gaagauaaugguaguagaaucucugcuaacagaaaauagagcggagcuuuucagcuaccagguaucuuc

SEQ ID NO: 4151026 - RNA, 71 nt, Human
gaagauaugaagaaacaacuuaguauuggccaugcauuugggugaaaguauagguauuucuaucaugucuc

SEQ ID NO: 4151027 - RNA, 56 nt, Human
gaagauauucucuaaauacuuucgaggcuggcauuuaaaagaaagagaaugucuuc

SEQ ID NO: 4151028 - RNA, 58 nt, Human
gaagaucacaccaaggaauuccacagguucugcugcaggaaggcuaugguguauuuuu

SEQ ID NO: 4151029 - RNA, 114 nt, Human
gaagaucuacccuuugaucuggagcuuuauuuguaauaauaguuggcgcagaaggaaucauuugcacauuuaauccuuuauaaguagcuuucuuugaucauuuuguagaauuuc

SEQ ID NO: 4151030 - RNA, 107 nt, Human
gaagaugccuccgcugaauuuuuuacuuucuugagucaugugcaaauacugaauguuaauuacaugcaauuaagagggugaauacaugauucucugguuguagauuc

SEQ ID NO: 4151031 - RNA, 64 nt, Human
gaagaugguaccuguaauauuaguccugacugugauuggucaauacaguguuaguuaucaucuc

SEQ ID NO: 4151032 - RNA, 67 nt, Human
gaagauggugagcaauucaguuccaggaaacaacccucuuccugaguucuaggcugccaccuucuuc

SEQ ID NO: 4151033 - RNA, 61 nt, Human
gaagauguuauggagagcucagacuucucauggaagccuucuugcuaucucuaagaucuuu

SEQ ID NO: 4151034 - RNA, 67 nt, Human
gaagauuaaugcaggaguuggaaaaaaugauuaaucaaaugucauucuaguuuuccuguagauucuc

SEQ ID NO: 4151035 - RNA, 69 nt, Human
gaagauuauccagaaugucuugcuggagaauuuguacaauuuucugcagugaugugcuggcaaauuuuc

SEQ ID NO: 4151036 - RNA, 67 nt, Human
gaagauucuaggcccuaccccacaccuaccaaaucagaguaucugaagguggggcuuaggaaucuuu

SEQ ID NO: 4151037 - RNA, 80 nt, Human
gaagauugcgucugagagcaggaggagcugcuggaacucuucuucccagccuuguuuuaaugcucuugagcaucaccuuc

SEQ ID NO: 4151038 - RNA, 64 nt, Human
gaagauuugugcuuuugaaucaguagacaauucagaaauugucuacuaagaaagacaauucauc

SEQ ID NO: 4151039 - RNA, 68 nt, Human
gaagcaaagagcuagugccgcuucagauacucauucccacagaagaggaugguuuuaguucuuuuuuc

SEQ ID NO: 4151040 - RNA, 72 nt, Human
gaagcaaauaccuuccacagugaccuugaagcagcuuucccccugcagcaaugguuaggaaaguaucguuuc

SEQ ID NO: 4151041 - RNA, 102 nt, Human
gaagcaagaaugcagauggauuacuucacauuugcaaugaaaaagaguagcaaagaaggcuguugcaaauguguggugaggcauuucaaacucacaggcuuc

SEQ ID NO: 4151042 - RNA, 62 nt, Human
gaagcaagcaggagaggacaagccuggaagcacagguguuucuucaugucucugcuugaguc

SEQ ID NO: 4151043 - RNA, 59 nt, Human
gaagcaauagaauuuaaaugcaguggcuuuguaaauugccacuacaguucuauaacuuu

SEQ ID NO: 4151044 - RNA, 83 nt, Human
gaagcaaugcugacauuugaacucagcuucagacaacaaauucagguuuguuuguuuguuuugcugaauacuucaauugcuuc

SEQ ID NO: 4151045 - RNA, 82 nt, Human
gaagcaccagcugcacugguuuguugaaauucaguaauggguuaaaccgugaugagacaacagcuugugcugcuuugccuuc

SEQ ID NO: 4151046 - RNA, 95 nt, Human
gaauaaugugagcagcagaucauguacuugacaaauaugugacuuugguuuaaaagcagaauguucauguaugugagcugcuauuaacuguauuu

SEQ ID NO: 4151047 - RNA, 111 nt, Human
gaauaauuugcucaaggucauacaacuaccaacaggaugggcgcacagagcuaggauuggaacccaggcaguuuggcuccgcagucuaccugcuugaccagcauuuuauuu

SEQ ID NO: 4151048 - RNA, 122 nt, Human
gaauaauuuguaggauuguuaucaggaucauguuaacuaagauuaacuauauuaaagugcuuugaauaguggcuggcucauagugagcauguaaguggugacgguuaaagacaauauuguuu

SEQ ID NO: 4151049 - RNA, 76 nt, Human
gaauacaaaacacacacacagauauuuugaauacauauguguauauaugugugugugucuguguguguguguguuu

SEQ ID NO: 4151050 - RNA, 100 nt, Human
gaauacaacuggccuuuggugauagugcagagaaauggggaaagggagggguauuuuugugcaguguuaucaaaauaaguuacacagaauaaaaguauuu

SEQ ID NO: 4151051 - RNA, 60 nt, Human
gaauacauaucagauguguuucuaggaaaccuggacagauuuuacaucuauauaguguuu

SEQ ID NO: 4151052 - RNA, 65 nt, Human
gaauaccaugaauucuugccuccacagucaagaugaacagaaaagguaggaguugauggauguuc

SEQ ID NO: 4151053 - RNA, 76 nt, Human
gaauacgggauuuugagauuaagcaaaauuuucaagaucagaaaguuuguaagugguagaucuaagauucugauuc

SEQ ID NO: 4151054 - RNA, 89 nt, Human
gaauacugccgugaugaaaguguuuacucaccuccaguggaguuuggccuaauuagaugguaaucacauuuaucugguacacaguguuc

SEQ ID NO: 4151055 - RNA, 72 nt, Human
gaauagaugggcgugacucugggacaaguaugaagacacugcucccuucuuccaagcuuaugcucaauguuc

SEQ ID NO: 4151056 - RNA, 81 nt, Human
gaauagcuaauaauacaugagauuaauguuuccagggccuaacaccuuguggauauuggauucucaucuaauuugucauuc

SEQ ID NO: 4151057 - RNA, 79 nt, Human
gaauaggaaguuuauugaguucaaguacuugaccuuuugugguccgucauuaaauuacuugaaaaugugcuuuuuauuu

SEQ ID NO: 4151058 - RNA, 58 nt, Human
gaauagugcuuuuguacauaggauuuuuaauaagaauuccuaugacugaguaauguuu

SEQ ID NO: 4151059 - RNA, 67 nt, Human
gaauagugggagaagguacugguuuagaguugggaaaccuggccaaggcauuggcuucucucauuuc

SEQ ID NO: 4151060 - RNA, 64 nt, Human
gaauauaauauguauguuuauauguugguauuuuucuaacgaauauguaugcauguugguauuu

SEQ ID NO: 4151061 - RNA, 66 nt, Human
gaauauaugccaaaauguuacauuucuuucggaaaaugggaagaggaagcauuauggcauacuguc

SEQ ID NO: 4151062 - RNA, 71 nt, Human
gaauaugacucagaaguugcaugcuuuggcucacauuccauuggucagaauuuagcuccuuggucauauuc

SEQ ID NO: 4151063 - RNA, 98 nt, Human
gaauaugccccugucaguauuuaacauuucuucugaaacugagucuagauacucaaucugcuccaguuuuuugaacaagaugaguagcaagguuauuc

SEQ ID NO: 4151064 - RNA, 130 nt, Human
gaauauggucaauaaaugguagcugccauuuuuguagucauuagaagaggcgagccuugaacgacuagccucuguugaaaauuacaaacaagagaguggccuacauuugcaaacagugagcauagccacc

SEQ ID NO: 4151065 - RNA, 68 nt, Human
gaauauguguuccuggacaagaggguccuaggaaggaccaggguaucuugugcaggcagcauauauuu

SEQ ID NO: 4151066 - RNA, 81 nt, Human
gaauauguuugucuuggacugcaucaacacaguugguuuucuccgagauugaguucauauaguucaagauacaccuuguuc

SEQ ID NO: 4151067 - RNA, 77 nt, Human
cuuauuuuauauugugcauuuauuuguuuaucuguuagccugccugcugcaguaagauguaagugcuauaaagucag

SEQ ID NO: 4151068 - RNA, 65 nt, Human
cuuauuuuucucuccagagcuuauaacauugggaaccaguuccaaagagcuggaucaaggauaag

SEQ ID NO: 4151069 - RNA, 88 nt, Human
cuuauuuuucucucuguaguccucaugccugcuacaguagcugccccacagcagacaccuuguagguguguacagaauggagaacgag

SEQ ID NO: 4151070 - RNA, 108 nt, Human
cuuauuuuucuuaaucagugucauugaagugacugaaagauugaaagcagagucugauaguauuucaguuacuuuaaaauuugaaccaaauuugaaaaagaaaauaag

SEQ ID NO: 4151071 - RNA, 66 nt, Human
cuuauuuuugguaaccuugcauucuuuacugugaaaucugugauaaugaggguuugccagguuaag

SEQ ID NO: 4151072 - RNA, 81 nt, Human
cuucaaagagcaacuguaagacaaaugacuucuaaacagaaaaaguagaagucagaaaguaauggaguggcaucuucaaag

SEQ ID NO: 4151073 - RNA, 112 nt, Human
cuucaaagauuguugugaggauuuaacauuugugaagcauuuagcauaguuccugcugcguaugugcuuaauacaugguguuuuguucuuauuauuuuaagaauagauggag

SEQ ID NO: 4151074 - RNA, 83 nt, Human
cuucaaauaagguacaguuuuaagaauaagcacaccaauaaacguuuguucuuaguauugagacugccgaccuggaugugaag

SEQ ID NO: 4151075 - RNA, 68 nt, Human
cuucaaaugcccugcaucaagugacacuccauggaaccaagggaguaucacacugcagucauuugcag

SEQ ID NO: 4151076 - RNA, 67 nt, Human
cuucaacugauuuagucugugccaucguauuuccugaugccccugggauaggcaaauauaguagaag

SEQ ID NO: 4151077 - RNA, 69 nt, Human
cuucaagccagugauguuugcugccuugguacauuguccguggcuccacaauuacacacuggaggguag

SEQ ID NO: 4151078 - RNA, 85 nt, Human
cuucaagucaacagugaugucuguggcucggaugaagauggacaggccaugcucagagaauucucagaugacucaagacuugaag

SEQ ID NO: 4151079 - RNA, 80 nt, Human
cuucaagugauggaggaaggcuaauaaugcaagaaaugauauuuucaacguacuuauuaucuucucccaaguacuaagag

SEQ ID NO: 4151080 - RNA, 56 nt, Human
cuucacaaacaccagaauggcuauuaucaaaaagaugauaacaaguguuggugagg

SEQ ID NO: 4151081 - RNA, 110 nt, Human
cuucacaaucauggugcuggguuuggaaggauacacugaugauaaugguguccagguuuucagcuguauccugagaacagccuggauggcaccgacacugaaugcugagg

SEQ ID NO: 4151082 - RNA, 68 nt, Human
cuucacagucacagccauuccucuagugggccccauccuggguccaucuggaugguauguguaagagg

SEQ ID NO: 4151083 - RNA, 59 nt, Human
cuucacauguuggaguccuuugcuuccagacuagaggacugggacuggaggauguggag

SEQ ID NO: 4151084 - RNA, 68 nt, Human
cuucacauucacuagaauggcuguaauuaaaaagagaaauaauagcaaguguuggugaagaugugcag

SEQ ID NO: 4151085 - RNA, 59 nt, Human
cuucacauugggcuugauaugaccuuuugcugcugcugaugucagucaguccugugaag

SEQ ID NO: 4151086 - RNA, 69 nt, Human
cuucaccaggaggcgucuucaguuuguucuuuaguuagcagcaauacuugagugccuuucuuacugaag

SEQ ID NO: 4151087 - RNA, 60 nt, Human
cuucacuacggucacgacccugggcuucagagggcuguucucaggaugugcugagugaag

SEQ ID NO: 4151088 - RNA, 84 nt, Human
cuucacucacccagucuuccacugucccgccuccacgcuggggacaggcaggcuugggacgagcuggaggaaggggaggggagg

SEQ ID NO: 4151089 - RNA, 61 nt, Human
cuucacuucacagaugccaagauuccuaaguaaagggaaagcuguggcaucuugaaggagg

SEQ ID NO: 4151090 - RNA, 78 nt, Human
cuucacuugcugagccucucuuauuugccgggcccucuucuuggagcugaagguguguggagagaggugggaaggagg

SEQ ID NO: 4151091 - RNA, 82 nt, Human
cuucagagaugagacuugcagauacuguaaaauuucaguauggucaugcuguugagaaacauaucucaggcucacuguggag

SEQ ID NO: 4151092 - RNA, 70 nt, Human
cuucagauccaucgucucugauccauugguaaugguucucuagggaucuguguugcgauggauucugagg

SEQ ID NO: 4151093 - RNA, 61 nt, Human
cuucagcagaugugcuagagauaggggcagugaucccaaauagcauguucucugcaugagg

SEQ ID NO: 4151094 - RNA, 58 nt, Human
cuucagccauuguggcuuuuguguuguauaaguguugcagaugcagagauggcugggg

SEQ ID NO: 4151095 - RNA, 60 nt, Human
cuucagcccugagugccagcagugggccaaagagucucucuugccagcauuaggcugaag

SEQ ID NO: 4151096 - RNA, 70 nt, Human
cuucagcuguggaaaggcuguaaggcuguucaggaagaagagcuagacuuucccuuuccaugucauggag

SEQ ID NO: 4151097 - RNA, 62 nt, Human
cuucaggaguaguuaccuagcauuguaugagaaagaucacucuucagagguaacuauugaag

SEQ ID NO: 4151098 - RNA, 64 nt, Human
cuucaggaugccuuugaacucuggaucucuccaccuggucugauucuguccagaggccugggag

SEQ ID NO: 4151099 - RNA, 129 nt, Human
cuucagggucaccuggggugccaguucagaauucagaguccuggccccacgccugaaaauacugacucacuaggccugggguggggccuggaaaucucuaucuuuaacacgccacugcugacucugacg

SEQ ID NO: 4151100 - RNA, 63 nt, Human
cuucaggguguguucagcaagagguaaggggucuaguucugcuggaaaugagcgcacaugaag

SEQ ID NO: 4151101 - RNA, 64 nt, Human
cuucaggugagcaggagauaaacagguaggauucaaggcuuaccagucugauuccuguuagaag

SEQ ID NO: 4151102 - RNA, 80 nt, Human
cuucagguugcgcccuuuaccacaaggacagaacuuaggucaaguuaccucucugugagagagaaaaggcaaacuuggag

SEQ ID NO: 4151103 - RNA, 59 nt, Human
cuucaguauacuucauaacauuuguuggaaagcaggaaaugaaaacgaaguauuugaag

SEQ ID NO: 4151104 - RNA, 56 nt, Human
cuucagugugccuaagucaguugugcuauguugcauaauuccagaggucacugaag

SEQ ID NO: 4151105 - RNA, 76 nt, Human
cuucaguuaugggcaacugaaaaauuguauucauaugaauugugcaauauaaccaguugucaugcaauaauuaaag

SEQ ID NO: 4151106 - RNA, 72 nt, Human
cuucaguuucuucuuauuuaaaaugugaauacuaauguguaucucauaugauuguaaugagaauaaauggag

SEQ ID NO: 4151107 - RNA, 75 nt, Human
cuucauaaucaaggcuacccuuucaccaaaaauuguauuauaaauuuugaagagccagggugguagaauguaaag

SEQ ID NO: 4151108 - RNA, 66 nt, Human
cuucauaguccucagaguuauuugaagugaacauuaguucagcuccuuauuucugagcaugugaag

SEQ ID NO: 4151109 - RNA, 114 nt, Human
cuucauccuuaaucacucacuugcuacucugucauuuauuuugcugucuguaaagacuugcaagcagacauucagguaggucaacagaguuucaggaaagauuauaggagaaag

SEQ ID NO: 4151110 - RNA, 88 nt, Human
cuucaucuaccagugaguacaugcacugagagggucucggcuccccuggaggccucccuccaccacugcaggucacuuacucaugagg

SEQ ID NO: 4151111 - RNA, 65 nt, Human
cuucaugaagaccucacaguggaaauaggugauuuuggucuagccacagugaaaucuugauggag

SEQ ID NO: 4151112 - RNA, 82 nt, Human
cuucauucaacuacuuugugugugaguuucuucuguaaaauugggacgcuaauuauauucauaucauagaguuauugagaag

SEQ ID NO: 4151113 - RNA, 68 nt, Human
cuucauuuggcaggcuggccucagcagcccggggucgucucucuguauccagcucugcaaugauggag

SEQ ID NO: 4151114 - RNA, 125 nt, Human
cuucauuuguacugcauuucuucaauuugauuugauuguaauggcucuuaaguuaggucaaacuuaaaggggccauuuuacagugaacaaagugagaguaaguccagaaaagccugcaugugagg

SEQ ID NO: 4151115 - RNA, 55 nt, Human
cuuccaaauguaaauaaguuucauccaauuaggugcacuuguugagauuuggaag

SEQ ID NO: 4151116 - RNA, 88 nt, Human
cuuccaacuccaugccuuaaucuugaguaucagaccaagaauucuggauuuuugucguuguuauuagaggcaaaggacaugauggaag

SEQ ID NO: 4151117 - RNA, 70 nt, Human
cuuccaagugucugcuuucagcuaguagguaaauaauggugccacuuacgaaaauaggagacaguggagg

SEQ ID NO: 4151118 - RNA, 74 nt, Human
cuuccacaaucugggucaucaguggcaugguucuucuauacagaaugucugggcccugaagacagucagggaag

SEQ ID NO: 4151119 - RNA, 88 nt, Human
cuuccagaagacagaauguauaugaucuaagguauugagcauaccaccucauguuugcccugucauaagcauuuuggucauucggaag

SEQ ID NO: 4151120 - RNA, 56 nt, Human
cuuccagagcugggcugaccuuuccaaucgacauuggcagguucagggcucugcag

SEQ ID NO: 4151121 - RNA, 74 nt, Human
cuuccagguacacugugagguuuccaagggcaaggauauucuuauuccucuuuggaucucaagguggcaggagg

SEQ ID NO: 4151122 - RNA, 71 nt, Human
cuuccaguaguaucauucucauucggaauacauuaaauuccauucuauaugcagaauaaucuaauugggag

SEQ ID NO: 4151123 - RNA, 61 nt, Human
cuuccaguggcuuccuucauaagcuuuaaaaaccuuuuaaagugaaggaagacacuuauag

SEQ ID NO: 4151124 - RNA, 66 nt, Human
cuuccaucacagaauuuuugcuuccagucacauguggacuuacgaaugauuauucuguuagggaag

SEQ ID NO: 4151125 - RNA, 64 nt, Human
cuuccaucccugccauuauagcccauuguucauaagcucauugggugaugacagggguggcugg

SEQ ID NO: 4151126 - RNA, 66 nt, Human
cuuuauagccagugcacaaauaaauauuaugugcgugugugccugugugugugcgcuugugugagg

SEQ ID NO: 4151127 - RNA, 64 nt, Human
cuuuauccaccuuacccuguuccaccuaagagagaaaaaugguggguggggaggaugggaagag

SEQ ID NO: 4151128 - RNA, 83 nt, Human
cuuuauccuacauauaacacagaagcuuuuucuauucccuggaugaacccacagggacagaaauucuuguuggacaggugaag

SEQ ID NO: 4151129 - RNA, 95 nt, Human
cuuuaugagggucccugucaucaaggauuuagcuguuucauuuacagauuccuguaaauguucaccagauccaugaccaguaauuuucacuggag

SEQ ID NO: 4151130 - RNA, 85 nt, Human
cuuuauguucugagcacugaacuuuaaucauuucugaagguggacagagucuaagaggucuuuaaaucaguccucaaauauaagg

SEQ ID NO: 4151131 - RNA, 57 nt, Human
cuuuauguuggggugucuuaguaauccguaaggaacaugauaggcauugacauaagg

SEQ ID NO: 4151132 - RNA, 71 nt, Human
cuuuauuuacaaaacaggcagugggccagauuuguaccacaggacauaguuugccaacugcuaauauaaag

SEQ ID NO: 4151133 - RNA, 89 nt, Human
cuuuauuuguguguguguuaacuuauuuaaugucagaucucauagaauaucacagauauuaaaugugauaauacauguacagugauuag

SEQ ID NO: 4151134 - RNA, 114 nt, Human
cuuuauuuuucuuaaauggcaguaauuauagcauggcuauauuguugcuccaaguuucucuggcuucuguauuuuauuugguuugcuguaaaugccuccuuaaggaacauaagg

SEQ ID NO: 4151135 - RNA, 112 nt, Human
cuuucaaguaagugcaauaaaugguucuguuggaaugggaaagaagggaggugcauacauacaugcauauaucuuauuuuucuguauagccaguaauuccacucuuuggaag

SEQ ID NO: 4151136 - RNA, 84 nt, Human
cuuucaaguauuuuaaggacuagugguaaagugagucucacaugugaguaaucacuguucacuguuguaaaauacuggccaaag

SEQ ID NO: 4151137 - RNA, 124 nt, Human
cuuucacucuuuccaucuguauguguguguauuuuuauguguguguguguguguguguguguuuguguauuaaguacagcaccaugagcacagggaaauagcaauaugaggguaaggguaagag

SEQ ID NO: 4151138 - RNA, 63 nt, Human
cuuucagaagguacugaagacauggaauuucugagggccaguuuuuccagugcuuucugugag

SEQ ID NO: 4151139 - RNA, 84 nt, Human
cuuucagcagcccuggagccgcauggagcagggaagggaguugucuacccuccggcauccuguguguuccaggcugugugggag

SEQ ID NO: 4151140 - RNA, 56 nt, Human
cuuccugcauggagucugaaugcuucaccagaaacucagagaacccggcaggcaag

SEQ ID NO: 4151141 - RNA, 69 nt, Human
cuuccugcuccccugccaauuccccuggaaagaaagaaagaagggagggagggaaggagggagaggaag

SEQ ID NO: 4151142 - RNA, 63 nt, Human
cuuccuggaaugucugcucaauguuuggggccuagcuccagugacacugcugcauucaggaag

SEQ ID NO: 4151143 - RNA, 90 nt, Human
cuuccuggaauuggagcucuuacaagaaggaaaagggagcacuuuugauaacaaguuucccuuuuucuugugaggcaguuuuccuggaag

SEQ ID NO: 4151144 - RNA, 72 nt, Human
cuuccuggagcuggugucuuucccucugggcaauauaagugccuuuugggaggaggcaucagcuucaggggg

SEQ ID NO: 4151145 - RNA, 64 nt, Human
cuuccuggaugagcaggcugauaaacauggcauucaugacccgcacguccgccauaccuggaag

SEQ ID NO: 4151146 - RNA, 61 nt, Human
cuuccuggcaacuggcugcaggugaggagggggaccugacuccuggcacucaguguggaag

SEQ ID NO: 4151147 - RNA, 55 nt, Human
cuuccuggcaugggucucaugaggacagcccccuguggagaccugggcaggcaag

SEQ ID NO: 4151148 - RNA, 60 nt, Human
cuuccugggcucuacuuggugcuugucaauaccaggcacacagaagaagacccaaggaag

SEQ ID NO: 4151149 - RNA, 76 nt, Human
cuuccuggugccaauuugccccuuugcugaagcacacucuucggugcaucuaaggggcaagcuuggugccguggag

SEQ ID NO: 4151150 - RNA, 85 nt, Human
cuuccuguacuccuggcucaggccccuggugccuuuggguccccacgccaucugcccaugggccugaggcccuaggccuggggag

SEQ ID NO: 4151151 - RNA, 72 nt, Human
cuuccugucauaugugcaaccccuaccuucauccaugucauugacugaaauguauauugccaguguaggaag

SEQ ID NO: 4151152 - RNA, 58 nt, Human
cuuccuuaagauuucccaagucaucuuugcaagguggcugaggcuuuucuuaaagaag

SEQ ID NO: 4151153 - RNA, 58 nt, Human
cuuccuuccuuccccgaaaugcuuuugccaauuacccagccagggugaaggaaagaag

SEQ ID NO: 4151154 - RNA, 61 nt, Human
cuuccuuuagugucauauacuuucucugaaacuuaacuuagaaaguguucuuugggggaag

SEQ ID NO: 4151155 - RNA, 76 nt, Human
cuucgaggaaguggccugaagugaaugcucucgugaaggacacauguggcacagagcaggccacuaaucugauaag

SEQ ID NO: 4151156 - RNA, 116 nt, Human
cuucgauggggaaugugaucuacaugaauuuggguaggagaaagaacagaucaugugugacuuuggggaacuuuucuccucugcucuugugauugugugaaacaugggaaaugaag

SEQ ID NO: 4151157 - RNA, 55 nt, Human
cuucgauugucuauggcccauagggcucugccaaaugggucccugcaguuugaag

SEQ ID NO: 4151158 - RNA, 61 nt, Human
cuucgugcuguaacaacagagugucugcaagugugguagauacgugcuugugcagauggag

SEQ ID NO: 4151159 - RNA, 88 nt, Human
cuucguuaucgugauaccugccagggugugaggcccggugugacaggugucaguuucacagucugugcagauccucacauguacugag

SEQ ID NO: 4151160 - RNA, 61 nt, Human
cuucuaagaacuuuguagccuguucuggaggcauuagaaagcuacuuagguuuuaaggaag

SEQ ID NO: 4151161 - RNA, 62 nt, Human
cuucuaauauaaagucuuugcaaacaaaccugugcuacaguugccagggcuuuaaguugagg

SEQ ID NO: 4151162 - RNA, 79 nt, Human
cuucuaauaugugugugugagaaaagcugguaaaggcaaauuuacucaacagaagcuuuguacaugugcauaucagaag

SEQ ID NO: 4151163 - RNA, 87 nt, Human
cuucuaauuaguuuaucuacugccacuuaagacauuugcaagccuaucugcaaagcucuuuguauaguggaaugaguaacagggaag

SEQ ID NO: 4151164 - RNA, 76 nt, Human
cuucuaccacaaucuuguguguuuuuucauuguuaagggaaggaaaacacaguauugauggaauccgcuuuagaag

SEQ ID NO: 4151165 - RNA, 69 nt, Human
cuucuaguauauuaauucucacgguuuagguuauuugaacuaagcugagagaacagaauaccaaagaag

SEQ ID NO: 4151166 - RNA, 80 nt, Human
cuucuaugagaucaucuuuuuuagauuccacauaugguuagggagauucuggucaaaagaugcacaauucucauuagaag

SEQ ID NO: 4151167 - RNA, 84 nt, Human
cuucuauguacucauacucggaugucaagucagacauguuagugaaacauuugaaaugccaugugaggagugcuacaauagaag

SEQ ID NO: 4151168 - RNA, 71 nt, Human
cuucucaaagcaccuggguuauaucuuagagaaauuacucauauuuaaggaaccacagcauguuagagaag

SEQ ID NO: 4151169 - RNA, 88 nt, Human
cuucucaagcucagaaucagcccuugcuauuaacaucuccuucaaggaucauuagaggcucccaagggccaaugggacuggguggaag

SEQ ID NO: 4151170 - RNA, 69 nt, Human
cuucucacauuagcccaucugguauuuggaguaaaauauacacccccgugaugugcuaauugucugaag

SEQ ID NO: 4151171 - RNA, 85 nt, Human
cuucucagagucccuugcuggcagucacuguugcgggagguugaauuuauccuguuuaauaguaguuguuauauugaaugagaag

SEQ ID NO: 4151172 - RNA, 70 nt, Human
cuucucaggcuaguaaaagaugggaaggagguuccucgccccccauccuguuucacuagcacacgaggag

SEQ ID NO: 4151173 - RNA, 59 nt, Human
cuucucagucuugguuagagagacuaguucuucuaggaggcucugcuggggcugaaaag

SEQ ID NO: 4151174 - RNA, 82 nt, Human
cuucuccaaccauauucaaauuacauuuacuaaugagucuggguuguuacugaguuauagaugccuugaguaaauggagaag

SEQ ID NO: 4151175 - RNA, 128 nt, Human
cuucucguaccugggccagggcacaggcgcuggagagcagccagaaagggcagucgaggcaaagugggcacaucucgaagcuguccuugcugccacacaguuccugccugcaaggcauggagcggagg

SEQ ID NO: 4151176 - RNA, 58 nt, Human
cuucucuaugauguucuaaggucuuuguagaccucaaggaaaaucuagacaguugaag

SEQ ID NO: 4151177 - RNA, 75 nt, Human
cuucucucccagugucauucuaagggaggugcuguguaggacgagagacuucucccaagugaggcuggagggagg

SEQ ID NO: 4151178 - RNA, 62 nt, Human
cuucucucugcauaggcauggguuuucaaacacaacccuggugccaugcgugcaaagggaag

SEQ ID NO: 4151179 - RNA, 55 nt, Human
cuucucugggaaagaagacaucaacccuugaguguuccuugcuuucccagaggag

SEQ ID NO: 4151180 - RNA, 58 nt, Human
cuucucuguguagagauucagagccugaaaagggugagaaggcuucugccuggaggag

SEQ ID NO: 4151181 - RNA, 67 nt, Human
cuucucuguucuuauguuugagaguccuugauauacagguggcauuuacaccaugggacuggauaag

SEQ ID NO: 4151182 - RNA, 62 nt, Human
cuucucuuccucuccucacugagcccucaagcuggaggcucuaugcaugggagcaggagagg

SEQ ID NO: 4151183 - RNA, 74 nt, Human
cuucucuucucugguggaggugcggugagugucaucucacucacacaugcuaagccagagaugagucagggaag

SEQ ID NO: 4151184 - RNA, 75 nt, Human
cuucugagaaaucuuugaguguaaggaauguggggcguuuuauagccacacuaaauaccuuagaguucggagaag

SEQ ID NO: 4151185 - RNA, 57 nt, Human
gaccuacucccaggucaguggagaaugagccugcuucaccaacaccugggauagguc

SEQ ID NO: 4151186 - RNA, 96 nt, Human
gaccuacugugaucucagaagcccuaaauuaucuuuauuuucuauaugugaacagaaaagccagcaggacuuuuagggaauucggaacacacuguc

SEQ ID NO: 4151187 - RNA, 99 nt, Human
gaccuauuuaagaugugcuucugcagagacuauuuauuuacuucuaucaagugccugggauacaacugacaugaaucacuuuaaauuuauuuuuggguc

SEQ ID NO: 4151188 - RNA, 66 nt, Human
gaccucagccaugggguggaucagcccgugggagagaccgagcugaagcccacguggcuuguaguc

SEQ ID NO: 4151189 - RNA, 60 nt, Human
gaccuccagcggcccugcagagccuguucggugagcugcucgggaaccgccuggaggguc

SEQ ID NO: 4151190 - RNA, 75 nt, Human
gaccucugagacuugaauuccucggcuggucugagaucuuccucugcaggcugccgugggguccaggcagugguu

SEQ ID NO: 4151191 - RNA, 67 nt, Human
gaccucugcaagagcuucaagguagaaagcacaauucugacaucuuucuggguucugcagacuuguc

SEQ ID NO: 4151192 - RNA, 79 nt, Human
gaccucugggaagccaguccugcuuccccccauguccacccuucagaggugcugguuggcuggacugccucccagaguc

SEQ ID NO: 4151193 - RNA, 66 nt, Human
gaccucuguccauucagaauggcccuggaacuaggucacaggagccauugcaggauggcagagcuc

SEQ ID NO: 4151194 - RNA, 79 nt, Human
gaccugaugugggccagcuuuucuccugggugugugacugaauccuucuucccagagcaugugcugccuuuguuagguc

SEQ ID NO: 4151195 - RNA, 75 nt, Human
gaccugcaauaacccaguaucugugauaaguuaaggggagacuaacccaucacagacacuggguuauugcaaguu

SEQ ID NO: 4151196 - RNA, 75 nt, Human
gaccugcaauaacccaguaucugugauaauuuaaggggagacuaacccaucacagacacuggguuauugcagguu

SEQ ID NO: 4151197 - RNA, 58 nt, Human
gaccugcaggugggagccugccucucaucgacaguggccagcaggcuuuuccuggguc

SEQ ID NO: 4151198 - RNA, 56 nt, Human
gaccugccugagcugccucugcucuccugacagagcaggccgugggaguguagguc

SEQ ID NO: 4151199 - RNA, 80 nt, Human
gaccuggauauauguuuuucuaauuagggaauuggagauacaugaacagucucucauagagaaaaauauauccauuaguc

SEQ ID NO: 4151200 - RNA, 74 nt, Human
gaccuggaugaccaaggagcaaguuuacaccugcugggcuuucuucaggaauugaguucuaugugcuccauguc

SEQ ID NO: 4151201 - RNA, 55 nt, Human
gaccuggccauccagcuggcaucuacuguuaucagagugcuagcccuggcugguu

SEQ ID NO: 4151202 - RNA, 77 nt, Human
gaccugggguuugggauggggccgguaccagggggcuguccccagcccucagcacacucccaucuaauucccaaguc

SEQ ID NO: 4151203 - RNA, 97 nt, Human
gaccuuacaaaucauuaggaucaaccugcccugagguuacagaugaauaaacugaggcccagagaugggaggugaucgggcuggugaguuguugguu

SEQ ID NO: 4151204 - RNA, 63 nt, Human
gaccuuguguuuuuacgugucauuugucugucugagaucaaauguuaagacaggaucaagguc

SEQ ID NO: 4151205 - RNA, 111 nt, Human
gaccuuguuguaggcuacagacaacuggagaguaaucucuguguuaacucaucucuagcugaccagaaggugcuauuuuagcugacugugggauaauggugacaagauguc

SEQ ID NO: 4151206 - RNA, 92 nt, Human
gaccuuucugucaacuccauuucccugccuccugcacugcgaggcuaccuucuugccuagggggccgggcagaagagagaacugagagcguu

SEQ ID NO: 4151207 - RNA, 79 nt, Human
gaccuuuguuacugauuucagugggcuuuuacagaaaugauaacgcugaugucuuggucccugaaaaugacaagagguc

SEQ ID NO: 4151208 - RNA, 67 nt, Human
gacgaaccuuggccgcaguccuugcgaacuguucgcaaaacagugcgggcugcggugggucagcguc

SEQ ID NO: 4151209 - RNA, 60 nt, Human
gacgcagagcagaagccgccagcugcccgaggacgcugaacuggcuucuguuuucauguu

SEQ ID NO: 4151210 - RNA, 73 nt, Human
gacgcuuacaucacuccagaaccacuggcagggagagccugggccaaaggaccugugggugacauugaagcuc

SEQ ID NO: 4151211 - RNA, 74 nt, Human
gacggagacaaggcugaacagugaagccggccucagagggcacaguggcuggggaguuugugcuuuguccuguc

SEQ ID NO: 4151212 - RNA, 76 nt, Human
gacggaucaguguucagggaccaggucccagggcugugaaugugcccauaggauuugauguuugcgcacugacguu

SEQ ID NO: 4151213 - RNA, 68 nt, Human
gacgggagcgccgccccugcugguguuggggugcccccuccugccaccggggguggcgauggcccguu

SEQ ID NO: 4151214 - RNA, 66 nt, Human
gacggggcugcuucaccuuuuuacggaggcagaaaguaagucuuguaagguacugagcuccccauc

SEQ ID NO: 4151215 - RNA, 58 nt, Human
gacguaggaugaaagauauguauauacguauguauguauugucucuuuuccuuaaguc

SEQ ID NO: 4151216 - RNA, 108 nt, Human
gaccuccuggcuccaugcccuacuccugcugauccugccagccagcagaaauuguguuggggguggaggcaggggcaggacaggauagaaacagaggagucugggguc

SEQ ID NO: 4151217 - RNA, 77 nt, Human
gaccugaaagagauuaaaugacuuccuaaguuuacccagcuaagcucccuggcucuuauucuaguuuucuuuagguu

SEQ ID NO: 4151218 - RNA, 105 nt, Human
gaccugacccucggggauccauccacguggcccacccaaguaaugcaccuuuuagaauauuugcugaaauaacugccaccugguggcaucuucugggucaauguc

SEQ ID NO: 4151219 - RNA, 81 nt, Human
gaccugaccugacaguuuaguguaauaguuacccagugauuggguuuuauacacaugaacaugcagaucuuuauuaggguc

SEQ ID NO: 4151220 - RNA, 90 nt, Human
gaccugcugaaguguguaugcuuuguuuaaagauuuucaaauaaaaauuugugugggucaaagaaagcaugucugcaggcugaggcgguc

SEQ ID NO: 4151221 - RNA, 64 nt, Human
gaccuggaaugaagggucccucaucuuucuguagagggaaaagcauguuccugcauugaagguc

SEQ ID NO: 4151222 - RNA, 68 nt, Human
gaccuggacgugcaggaagacaggcacaaaggcuggccuuggggacugaggccugcugcguucagguu

SEQ ID NO: 4151223 - RNA, 84 nt, Human
gaccuggagugcaucaggaucugaccagauaggaguuuuugccucgugucugggugcuacgauuuugugccguucucugagguc

SEQ ID NO: 4151224 - RNA, 110 nt, Human
gaccuggcccuggagcugcuuucaaagaucagggggcucacggguucuggggcuuuccccagccucuguuugcuccucucuugaaauccacaaucuccugggcugguguc

SEQ ID NO: 4151225 - RNA, 56 nt, Human
gaccuggcuuugggccccggcaguagucuuccugcugggcggaccuuggguagguc

SEQ ID NO: 4151226 - RNA, 92 nt, Human
gaccugggcagggugguagcaaugauagauuuuacaaauuaaggcauuguucuuuauuucaaaauuuucauuuaccuauauuuuccuugguc

SEQ ID NO: 4151227 - RNA, 93 nt, Human
gaccuguaggcagaauggguuguaggccauuuaggaaagguguauccuaaggaccagggcuuccagccuguggagauuccugugugcaagguu

SEQ ID NO: 4151228 - RNA, 83 nt, Human
gaccuuagggaaguuaccgaaccucuccaugccucaguugccucuucuguuacauggagauaauggugccuaccuuguagguu

SEQ ID NO: 4151229 - RNA, 55 nt, Human
gaccuuagggcagagguggugaccuccaccaccaccacccucuccccacuggguc

SEQ ID NO: 4151230 - RNA, 94 nt, Human
gaccuuagucuagacccaugguucucaaagagugguccugggacucuuggggauuccugagauccuuuuagggaucugugaggucugugagguc

SEQ ID NO: 4151231 - RNA, 65 nt, Human
gaccuuccaugccuucuuccaaaaggagcaacucaaauggcagauacccaggcaaauggaggguu

SEQ ID NO: 4151232 - RNA, 130 nt, Human
gaccuucuaugcccucucagcuccagaaaaacuugaucguauuggcgccuaccucucugagaggcucauccgugacgugggucgccaucgauauggguaaguaguuuggaagagagggagagagauuguc

SEQ ID NO: 4151233 - RNA, 130 nt, Human
gaccuugaaagaacuagagucuuuaagagaacagagacauucuaugaagauaauuuuaaggaccuugaaagaacuagcaucuucaagagaacagagucauucucuuaaagacgcuagugcucucuaaguc

SEQ ID NO: 4151234 - RNA, 75 nt, Human
gaccuugcuuccugcagccuguucagugggggcugcuuuaucccucagacccucccucugcuggguguagagguc

SEQ ID NO: 4151235 - RNA, 84 nt, Human
gaccuuuagcauagcauccaguucagauguugccuuuucacgaauuuaacuguuuguagcaucuguuggcugcuccuaaauuuc

SEQ ID NO: 4151236 - RNA, 114 nt, Human
gacgaaugcagagguagguacucaggaugcaauaugguggcuccauaguccauccgagaccugagcuauuucugcccucuguuauugcauccuuagcacauggcuuccaucguc

SEQ ID NO: 4151237 - RNA, 70 nt, Human
gacgagguucaggcacuugcccaacaucaccaagcaagucagugaugaagcuaggauuugagccucaguc

SEQ ID NO: 4151238 - RNA, 74 nt, Human
gacgaugugcauguauugggguagggaagccagugggucccaccuuggcuucuuuuuaguaaaugucaguuguc

SEQ ID NO: 4151239 - RNA, 88 nt, Human
gacgcacgcaaauuguccaccucguguugcuaagcgauuguuugucggccccgcacgcacagcucagcaugggaggaccgcgagcguc

SEQ ID NO: 4151240 - RNA, 89 nt, Human
gacgccuaccaagcagcuuaaaguguuguaucuccauuugcauauaaccugaauacaaaugcaauucaaugcauauuuuaaguuguguc

SEQ ID NO: 4151241 - RNA, 79 nt, Human
gacgccuuaaacuuuguucguccagacucaggcuuggguugggugcuugaguugcagagaugacagaguuuuugcuguc

SEQ ID NO: 4151242 - RNA, 67 nt, Human
gacgcggacugguuaauccauaaacagagagcaucaggcucuuggaucccugggaaccagcugccuc

SEQ ID NO: 4151243 - RNA, 80 nt, Human
gacgcugaagcacagauaauucaaguauccuggggagaaauuggaagaaaggaaauuugaacuuaucugucugacagcuc

SEQ ID NO: 4151244 - RNA, 69 nt, Human
gacgcuuaaguuguccaagaggcugagguugcaaagugauaguauuagaucuuggcaaaugggaguguc

SEQ ID NO: 4151245 - RNA, 127 nt, Human
gacggaaaccaauuugagugugacagcugauuugagaaagaaugaauuaagagauucaggcucuucugcuauguugaaaucauuuuuacugaaagauuagcuguuuggaacagggauugacuuuguc

SEQ ID NO: 4151246 - RNA, 92 nt, Human
gacgggcacagaaaccuggccgcggcuuuccgggagcugugggcacgcgagcugcucgaagccgguggcccggggaucgucgcugcccaguc

SEQ ID NO: 4151247 - RNA, 62 nt, Human
gacgucucucuucuugucuaaaugaggaauugaacccauggccaggccaagagaguacaguc

SEQ ID NO: 4151248 - RNA, 73 nt, Human
gacgucugacaauacgucugaaugcauucucauguuuaauaaugagugcugaucgaggcuguuuucagaaguc

SEQ ID NO: 4151249 - RNA, 77 nt, Human
gacgugcuuuccggaauggcaggguagcucauaagccuuugcagggucuggcucugccauccgcagaaggcagaguc

SEQ ID NO: 4151250 - RNA, 61 nt, Human
gacguggaaggggcgaggcacuuuccacccacaggugcgaugaccagugccccauccuguc

SEQ ID NO: 4151251 - RNA, 58 nt, Human
gacguggccgaaacucucuuuaaugcuacagcacaaaggccagagagaggcuaguguc

SEQ ID NO: 4151252 - RNA, 81 nt, Human
gacguuaaaagaggaaaugauugacuauauagauaugguucugacaauaguauucauuuccucugcuaagaaauugauguu

SEQ ID NO: 4151253 - RNA, 83 nt, Human
gacguuagcgcuccgccuucgccuggcaaacccugcgcgggcuccgcugccaggucaccagggguagcgccgggcgcgacguc

SEQ ID NO: 4151254 - RNA, 67 nt, Human
gacguuauuauggggaugugauucagagaagaaaacaaugauaugcacaggugucucuaguagcguu

SEQ ID NO: 4151255 - RNA, 124 nt, Human
gacuacaucacagcagcauacguggagaugaggcgagaggcuugggcuaguaaggaugccaccuauacuucugcccggacccugcuggcuauccugcgccuuuccacugcucugguaagugccc

SEQ ID NO: 4151256 - RNA, 81 nt, Human
gacuacccagggagugcuccuguucucccagcgccaaccaccaacagugcagugaccaggagcaggagacccuggggaguc

SEQ ID NO: 4151257 - RNA, 60 nt, Human
gacuacucagcaaacauuugcugguuacucucuguguucuaggaacuguucugagugguc

SEQ ID NO: 4151258 - RNA, 76 nt, Human
gacuagauggagaggaaagugcaguuuugggaaaugaaaacagaauuuuaagugcugguuuucuucucuuuugguu

SEQ ID NO: 4151259 - RNA, 111 nt, Human
gacuagccaaaagcugaaagguugcguuuuuuguaaaguguugacagaauuacccaagcaaaacucagcacuauuccaaugauccaauuucuuuuuuuuuuuuuuuuaguu

SEQ ID NO: 4151260 - RNA, 69 nt, Human
gacuagcuacagaagccguggucaggaaauaucuguugaauucaugaauaccccuucuguaauguuguc

SEQ ID NO: 4151261 - RNA, 129 nt, Human
gacuaggugaauuucucaaagucacauagcuacuaaaugaucagauaugagauuuuagcucacuaauuugggcuccaaaaucuaugucuucuauagucaagugguauuggaugagauacacauuaaguu

SEQ ID NO: 4151262 - RNA, 57 nt, Human
gacuauggguugagauuguuuagugugacuuugacagauccuuaacucagcuugguc

SEQ ID NO: 4151263 - RNA, 67 nt, Human
gacuauuaaacagccuccccuuucacucucaaaaaugucuugaguguggaugauagguugugugguu

SEQ ID NO: 4151264 - RNA, 73 nt, Human
gacuauuauuuauugacugucccaaaacgugaugaaauugguaaaugugaggagggucaaacugaguuauguc

SEQ ID NO: 4151265 - RNA, 130 nt, Human
gacuauucugcuuggaugguuaugugagauuuuuugggucuuguugaaguggccaaacugcaccuuagugaguacaguuucuacgacuuaagcacagaauccagauacaucacagccaagcagaacaauc

SEQ ID NO: 4151266 - RNA, 127 nt, Human
gacuauugaaucgaugcgaaggcauuaucccaggguuuaaaguuuggaaacauucuggucaacagacuucuguucaaguacuguagauuucaggaucaugccuagaaaacaucgcauuucccaaguc

SEQ ID NO: 4151267 - RNA, 65 nt, Human
gacuauuuucccauaugguugacagagcuucaccagguccuggucggugguguggggaggcaguc

SEQ ID NO: 4151268 - RNA, 66 nt, Human
gacuauuuugggcucuugcugaccugggccaaagucagguccagucaagagggcccaaaguggcuc

SEQ ID NO: 4151269 - RNA, 80 nt, Human
gacucaagucauaggcuucuuucagucuuuaugucaccucaggagacuuauuugagaggaagccuucuguacuugaaguu

SEQ ID NO: 4151270 - RNA, 70 nt, Human
gacucaaucauaaaacauaaggcccacaaauaccuagagagguauaguaacuggcauguuuaugauaguu

SEQ ID NO: 4151271 - RNA, 82 nt, Human
gacucacugcuccggucucaucuuucagcgucgagaugcguccgcucagaagacugcagggaagggacaccgagcaggcguc

SEQ ID NO: 4151272 - RNA, 59 nt, Human
gacucagauuuagaggguaagaaaagcuuucuuagaagaagcgcuuuuugagcugaguc

SEQ ID NO: 4151273 - RNA, 102 nt, Human
gacucagcucccugaaacagcuguuauugcugggguaacgcccagaggcugccugagggcaguucugggugcaacucuguucuggcagauguaugcugaauc

SEQ ID NO: 4151274 - RNA, 63 nt, Human
gacucagucccagacauaguaagggauuuaaugaaggucauuuugcugguaagggacacaguc

SEQ ID NO: 4151275 - RNA, 78 nt, Human
gacuccagcgcugggguaggagcaccuugaaggugaaggagcccagcgagcugcagcuuccuaguccagccucacguc

SEQ ID NO: 4151276 - RNA, 55 nt, Human
gacuccagggauuggaagaugugcugccacgcgacuuuccccucucccugguguu

SEQ ID NO: 4151277 - RNA, 78 nt, Human
gacuccaguacagugcauggcacugagcagguaugcaaccauuuuuguugcaugagcgaauguguccuguacagaguu

SEQ ID NO: 4151278 - RNA, 130 nt, Human
gacuccauaguaaagcagggugaucuucugcccuucagcacuauaguugggugugagaucuguugggcuuuugaauacucagccaugcaacaugcugggggcagcugucacauuggcucuuugugggauc

SEQ ID NO: 4151279 - RNA, 58 nt, Human
gacuccauuucugucccuauggcuuuggcuacuccaagugcaucagaucaguggaguc

SEQ ID NO: 4151280 - RNA, 61 nt, Human
gacuccuuucaugaacagguuucauauugcuuugugguguuccuggagccuggaaggaguc

SEQ ID NO: 4151281 - RNA, 80 nt, Human
gacuccuuuuuggcucacugcuuugcccaagagggcagccuuugucuuucugacccaagguaguugcuggagcucaaguc

SEQ ID NO: 4151282 - RNA, 71 nt, Human
gacucggagcagugaugggaggacgucaauuuugcaagggcagcauuauuugacgcucuuacugcucaguc

SEQ ID NO: 4151283 - RNA, 74 nt, Human
gacucuccuugggguuugggggcuugaccugggugcgcuuucuggacagacuuuacagccccgggggcacaguc

SEQ ID NO: 4151284 - RNA, 76 nt, Human
gacucugaacuuaccagcaggugaccuugggaaaggcagugccuuaccugagccccugcugguguauucucugguc

SEQ ID NO: 4151285 - RNA, 80 nt, Human
cuuugauauuuguuuggcagaguucaggccaaccccaggcuucugcccuugccagacaaguaagcugaugauauucaaag

SEQ ID NO: 4151286 - RNA, 64 nt, Human
cuuugauuucuauucagauguagaucugcugagagccugauccugcagccauuagaggucaagg

SEQ ID NO: 4151287 - RNA, 60 nt, Human
cuuugccauacagcaagacaaaucucagcaaacguaaaggauguaggauguauggcagag

SEQ ID NO: 4151288 - RNA, 66 nt, Human
cuuugccauuauaucaaaacuuaauucauuucaguuuucucugaaguuuugacuaagauggcuugg

SEQ ID NO: 4151289 - RNA, 66 nt, Human
cuuugcccacaucugcuuauuucauucccauucuuuuguggggaugaggaaguagugggggcaagg

SEQ ID NO: 4151290 - RNA, 88 nt, Human
cuuugccccugaguuuccaaaaacuaaguauuuugaaauuaauguuuuagcaaaaauuauauugaaguugaaugucagggaugcaaag

SEQ ID NO: 4151291 - RNA, 73 nt, Human
cuuugccucaccuucccaacucucagucagggaaggauuucucaaguagguuguggaagggagauggcaacag

SEQ ID NO: 4151292 - RNA, 69 nt, Human
cuuugccugugucagcagguggaagugcucaccagacauuaaauauucagcuugcugacugcggcagag

SEQ ID NO: 4151293 - RNA, 88 nt, Human
cuuugccuuaguaguaauuauaacugguuuuguuaauaccaauccuaaaguauuaacaauacccauucuaauuacuauuaaggcuuag

SEQ ID NO: 4151294 - RNA, 114 nt, Human
cuuugcuagucuucuauuuuuguuugaauacugaaucacauuacagcauaucuguauaaauaaauaguaguacaguagguugaauguaauucaguuuguagauugacugcaaag

SEQ ID NO: 4151295 - RNA, 58 nt, Human
cuuugcugcauucaggagcacaguuguauuucaucuacugcuugagaaugcaguggag

SEQ ID NO: 4151296 - RNA, 64 nt, Human
cuuugcugguuuggcguucugaugaguaaaaaucuauuugcucugacagugccagagagcaagg

SEQ ID NO: 4151297 - RNA, 61 nt, Human
cuuuggaagugaccacaauccugguccauuugccacuccaaggauucuggaacuuugaagg

SEQ ID NO: 4151298 - RNA, 89 nt, Human
cuuuggaaugaugaaucaggcagugggugauaagaccaaggaggacauuuucaccugguccuguuaacccuacuauuuggguucuaaag

SEQ ID NO: 4151299 - RNA, 62 nt, Human
cuuuggagggaaggaagauuauuugugugaacauauuuaaucuguauuccuacuuugcagag

SEQ ID NO: 4151300 - RNA, 81 nt, Human
cuuuggaguucccuaauuucccaauuggggguuuuaguuaaucuguccccagaaguuaagcagggaaaaaauucuucaaag

SEQ ID NO: 4151301 - RNA, 60 nt, Human
cuuuggcaagauuguguggcugaaguaauauuaguuuucuuccuauguaucuugcugggg

SEQ ID NO: 4151302 - RNA, 63 nt, Human
cuuuggcccugaaucaaggccagcaguuugcugaagcuguugguuucaagcaggagccuaaag

SEQ ID NO: 4151303 - RNA, 79 nt, Human
cuuuggcgcauaccugauucucagcagugugcucauuagaugcucagugugagugagaagugcagugugguugcuagag

SEQ ID NO: 4151304 - RNA, 55 nt, Human
cuuuggcugacagguuucuggucccugaaugcacucagaccaaugucagacaaag

SEQ ID NO: 4151305 - RNA, 100 nt, Human
cuuugggacuaucucuuggcacauccacagaaucuggacuccucuaagcauuugugacugcuucccgauucaguggcugugccaagagauagccucaaag

SEQ ID NO: 4151306 - RNA, 93 nt, Human
cuuugggggugaugcagaugucucggggugcaugcagauguuacaggugaugcauucugcacauccaagaacaggaaugcaaguccucugagg

SEQ ID NO: 4151307 - RNA, 66 nt, Human
cuuuggguuucuacuuucaguuucagcugaaguuggagacauuuuagauaaacgaaagaugcaaag

SEQ ID NO: 4151308 - RNA, 129 nt, Human
cuuuguaauauaauaaaauacaaaaaauguugagugauucacauauaugaaaugaggaauuaaaugagcaaaaaauuaaugguuuuucaggggucaugauauccacuuaauauauguuauauuaugagg

SEQ ID NO: 4151309 - RNA, 89 nt, Human
cuuuguaguauugagggcagugaugucaaacagugaauaaaguuauauaucuauguggugaucuuauuuuaaccucaauauuauuuuag

SEQ ID NO: 4151310 - RNA, 64 nt, Human
cuuuguaguuagguaaagcagaaaacacuccuucauuccugugaucugccuuggaucugcaaag

SEQ ID NO: 4151311 - RNA, 64 nt, Human
cuuuguauuucgcuagguacucccugauuaccugcaauuagguuaccauguggcgaauacaaag

SEQ ID NO: 4151312 - RNA, 62 nt, Human
cuuugucugagaaagugaguugcuugaggucaaggcucaagucuuacugucccagaacaggg

SEQ ID NO: 4151313 - RNA, 72 nt, Human
cuuugucuucaguuacucccaccugaaagcccacuguacaaaacgugcagguggagcugacugagggcagag

SEQ ID NO: 4151314 - RNA, 59 nt, Human
cuuugucuuccccacacuggguuggagaaaaagccuucagccuggaggcagagauaaag

SEQ ID NO: 4151315 - RNA, 59 nt, Human
cuuugugagcuucugguucaacacucguuuuacaagcaaagaaauggaggcucagagag

SEQ ID NO: 4151316 - RNA, 67 nt, Human
cuuugugcacuaguucacaaaauaggaaauuacucaaauguccaaauacguuugcugguguauaaag

SEQ ID NO: 4151317 - RNA, 129 nt, Human
cuuuguuaggacuuggguuuuuauuuagcucuacauaugcgaucauaggaugcagaagauauaucuucuacuggacacguauauauagaugcuuaaauguggcuaucccaagguuagguaauaauaaag

SEQ ID NO: 4151318 - RNA, 67 nt, Human
cuuuguuaucgggcccucucguucuuccagguaaacaucccugagcgagggaggucugaggacaggg

SEQ ID NO: 4151319 - RNA, 62 nt, Human
cuuuguuccucacuggaucuuuuaaagugcaaauccuagcaaaugaaaccugaggaagaaag

SEQ ID NO: 4151320 - RNA, 56 nt, Human
cuuuguuguuaauuggcgcuuaccucaccugaaggccuuugccaagaagagcagag

SEQ ID NO: 4151321 - RNA, 127 nt, Human
cuuuuaaaaaaugcagcuuaacccguauuuguuauaggugguuaugucagccuagaugcugcucucauuugaguugggauuucuucuuaaauaauaaauauuacaacaaauguauucuguaugaaag

SEQ ID NO: 4151322 - RNA, 121 nt, Human
cuuuuaaaauuucuagaaaaucugguauucuucugaagguaggaagcauuuugaauuaaaaaugucuuuggaaauguggauccuuacagauaccagaauauuuaagagagauuauucaaag

SEQ ID NO: 4151323 - RNA, 60 nt, Human
gaacuauaucuucaagaaaaugaaugucaacaguucaaauucuuggaaaggcuaugguuc

SEQ ID NO: 4151324 - RNA, 63 nt, Human
gaacucgucuuuugcauccuuguaauaguauuccccuuuuauuugaggagugagaguggguuu

SEQ ID NO: 4151325 - RNA, 83 nt, Human
gaacucucuauaauugccaaccuucaguaaaggucuguuuacaacaugcaacagcuuuaguguggguggugcuucgaagguuc

SEQ ID NO: 4151326 - RNA, 83 nt, Human
gaacugaaaauagagacugggaggugauauuuugauaaaaauaaauauuuuaacauugccaugguuaauuuuacuuucaguuu

SEQ ID NO: 4151327 - RNA, 57 nt, Human
gaacugaguuuucugccuggacaguguccuaagacucucuggcaagaucucugguuu

SEQ ID NO: 4151328 - RNA, 86 nt, Human
gaacuggccagccccagccuucucccuguccccucccucugccagccccaguggagaggccugagaggcugcggacuagcuaauuc

SEQ ID NO: 4151329 - RNA, 78 nt, Human
gaacugggcaaaaguugugaagcagcaauucuguuauauggacaguguucugcuuuuuaauccuauuuagcucauuuc

SEQ ID NO: 4151330 - RNA, 58 nt, Human
gaacuggucuuuuagguuuucugaaaaugcuuugaaagcuccugggaauuaccaguuu

SEQ ID NO: 4151331 - RNA, 70 nt, Human
gaacuguccuuuuaaugcagccgugaaaauuguuaccaagcaacaagcgggucuugagagguaagcauuc

SEQ ID NO: 4151332 - RNA, 86 nt, Human
gaacuuaagccaucccucagcagacagcaaaauaacuaaucccuauuuugacugacgcuaaggguuuuuaacuguggcuucuguuc

SEQ ID NO: 4151333 - RNA, 70 nt, Human
gaacuucuucuuuaagagacucuuaagaaaccaaguuauuaugaggagcucugagucuuaggagaaguuu

SEQ ID NO: 4151334 - RNA, 55 nt, Human
gaacuuggccugucugucuggcucgugaugaauggugagacccgcugacaaguuc

SEQ ID NO: 4151335 - RNA, 96 nt, Human
gaacuuguucgaaacagauuguggucuccaccccagagaguuucugagucaguaggucugggguggagccugagaauuugcauuucugacagguuc

SEQ ID NO: 4151336 - RNA, 72 nt, Human
gaacuuucucuggcuggaaacaggagauucagcagaaguugaagucagaguuuucaagcaugagaaggauuc

SEQ ID NO: 4151337 - RNA, 104 nt, Human
gaacuuucuuugucaacauaagauuauacuuauuuaugauguggcuaaagaaaugauaagaagucacagaaauaagauaguuauugcuugcauaauaaaaguuc

SEQ ID NO: 4151338 - RNA, 86 nt, Human
gaacuuugugagggugcagggugccucugcucccaccagcucugaggggcucccugggaccggcagcucacaucucacacaaaguc

SEQ ID NO: 4151339 - RNA, 105 nt, Human
gaagaaaaagagaaaaugguaugaggaagacaaagggaauuuuucguagcuuguuuauucuauguuaggaucuaugaaaagucuauucauuccuucucauucuuc

SEQ ID NO: 4151340 - RNA, 118 nt, Human
gaagaaaaggcauuugacaaaauccugcuaagauucuguucuuaaagauucaucaagcacaaccuguguugagaaggaucauuugagagggaggaacauugauaauugucuauucuuc

SEQ ID NO: 4151341 - RNA, 111 nt, Human
gaagaaaauuugcacugcuuuccacuaauuuuauuguggcagauuggcauuauuccuagagugcaauaaguauugcuuacaugaaagaggagagcgggacagggaagcuuu

SEQ ID NO: 4151342 - RNA, 74 nt, Human
gaagaaacagguguucuuuuuguacuccagagaaacuucuccugagcccagauaaaguacaaccauguuuuuuu

SEQ ID NO: 4151343 - RNA, 64 nt, Human
gaagaaagauuggcaugcuucacaagacuuugaccuuuaaacaaagcauggucagucuguuuuc

SEQ ID NO: 4151344 - RNA, 70 nt, Human
gaagaaagcaucuguguuucuagcuaggaaaucgauuauuucagcuaaaggaaacucagauauucguuuc

SEQ ID NO: 4151345 - RNA, 84 nt, Human
gaagaacagcguuguauucuucaauaucagagcgaagugacuucguaaaaauucuauagauguuagaaaucguugccauucuuu

SEQ ID NO: 4151346 - RNA, 56 nt, Human
gaagaaccugauauaggaaguaaaaacauuuuagucucuucuugauaagguucuuu

SEQ ID NO: 4151347 - RNA, 80 nt, Human
gaagaacuguguuugaaucuccuagcgauguuuuuugaaucugcauugaauagauagcuuggaugguuguuuaguucuuc

SEQ ID NO: 4151348 - RNA, 79 nt, Human
gaagaagaaauugcgucauccuucucaggcagagaugaucuuccugaccugcggggaggagggccgccuuuucggcuuc

SEQ ID NO: 4151349 - RNA, 66 nt, Human
gaagaagagcuaaggagaguucaauuuaacuuguuuuuggauacuguccuggagcucacacucuuc

SEQ ID NO: 4151350 - RNA, 56 nt, Human
gaagaagcauucugcuguuuuggauaauugguuuucagucaguaucuugcuuguuc

SEQ ID NO: 4151351 - RNA, 60 nt, Human
gaagaaggucaaauguguuuaguggaaaguuugcucuuuucaauagaaaugacauucuuu

SEQ ID NO: 4151352 - RNA, 62 nt, Human
gaagaaggugccagaggcuuacuguuugcuuaaacucacagaaggcccugugcaucuuguuu

SEQ ID NO: 4151353 - RNA, 69 nt, Human
gaagaaguggagcuuuuccuaucagagcuacucugugguacugguggagaggucuuccaugaugcauuc

SEQ ID NO: 4151354 - RNA, 79 nt, Human
gaagaaguugcuggcagguuuggugucuggugagggccacuuuccagguucacagacgccgacuuguuguuuugucuuc

SEQ ID NO: 4151355 - RNA, 60 nt, Human
gaagaaucaagcaguaauuuguguuccagauaaagagcaaacugauugugccuggucuuc

SEQ ID NO: 4151356 - RNA, 63 nt, Human
gaagaauggcauuuagaaaacaacauguuuguaggauauuguugccucuaggugcccucuguc

SEQ ID NO: 4151357 - RNA, 67 nt, Human
gaagaaugugcuaaugaaaacuuucaggaacagugauuuccucaagguuucuaccagcauguuaauc

SEQ ID NO: 4151358 - RNA, 82 nt, Human
gaagacauucaugaagaagggauauaauuuggugaccaauuccaugggagcugugaagaaaugccuuccuuagaauguuuuu

SEQ ID NO: 4151359 - RNA, 79 nt, Human
gaaaaaaaauucugguucaauacuaaacuucuuuaagauuuacugaggguguuuaauauuagaacaacuguuuugguuc

SEQ ID NO: 4151360 - RNA, 94 nt, Human
gaaaaaagaaugaccucuuccaguuuacauaucaggcguuaagauugaaugcccugugguucaugugagacucuggaagaguuuacuaauguuc

SEQ ID NO: 4151361 - RNA, 99 nt, Human
gaaaaaaugucuucuuguaaacuuucuaggccuaugauucagauacauuuagaggaacagggauuauaaagccuuucuguuuucagggagacagaauuc

SEQ ID NO: 4151362 - RNA, 70 nt, Human
gaaaaaggacauggauacuugauaagggggaaaucaaucuuucuuucuuucguuuauuuauuuaguuuuu

SEQ ID NO: 4151363 - RNA, 74 nt, Human
gaaaaagggagacaguugugugaggacauucccugaguggaaauuuggucuuuggcacaauuucuuuuugguuc

SEQ ID NO: 4151364 - RNA, 73 nt, Human
gaaaaaugaauggacugaucccugggagggugacuaugggcuagcagugcuccuauggaucaguuguuuuguc

SEQ ID NO: 4151365 - RNA, 58 nt, Human
gaaaaaugguuacauguguuagguguccagccucggggaaacaucuguaacuauuuuc

SEQ ID NO: 4151366 - RNA, 92 nt, Human
gaaaacaccccuugguuuuugcaaaguucccuacacauguauugaauuuccaauaacauuuaggauguuuugagagaugaagaauccuuuuc

SEQ ID NO: 4151367 - RNA, 69 nt, Human
gaaaacagaucugccaugaacagcagcugaggugaaaaucaucagugucucucugguacuucugucuuc

SEQ ID NO: 4151368 - RNA, 66 nt, Human
gaaaacaggaggagcuguuucagggaaagucaaguuccaugcaaagcuaguuccuuucgguaguuc

SEQ ID NO: 4151369 - RNA, 59 nt, Human
gaaaacaugauuugcaugauuuguaauuguuuaaaucaugagucugcaaauuauggauc

SEQ ID NO: 4151370 - RNA, 67 nt, Human
gaaaacuaacggaaaaguuaggaaaauucuccauuuuucacuccuaacucaucugggugaguuuguc

SEQ ID NO: 4151371 - RNA, 78 nt, Human
gaaaacucugaugccagucaaagaagaugacaagaaaaccuuguuaaaaauacucauuuacuuguuaacagaguuuuu

SEQ ID NO: 4151372 - RNA, 92 nt, Human
gaaaacugaagcuggacgcuggccuccaguccugucuuugccauuagcagcccugggaucuuagugccuucaccagccgagcuucaguuuuu

SEQ ID NO: 4151373 - RNA, 73 nt, Human
gaaaacugaguuaaauauuuucugaaguuucaguagcugcuggaauuggcuauauuauuuagccucaguguuc

SEQ ID NO: 4151374 - RNA, 68 nt, Human
gaaaacugcccagaagagaugaaagucuucagcaugaaaagcacuucaucucucucuggaguaacuuc

SEQ ID NO: 4151375 - RNA, 56 nt, Human
gaaaagacagcuccucuugaagucagaggugacucaugaagcacagcucucuuuuu

SEQ ID NO: 4151376 - RNA, 77 nt, Human
gaaaagaggagggcucaguaaacgguggauugaauuccuggauuacaauagcuacuugacuggccuuucuaaauuuc

SEQ ID NO: 4151377 - RNA, 70 nt, Human
gaaaagagugauggagucaaggcuagaacagcaucaugagggcuguucuauaaauacuuucggacuuuuc

SEQ ID NO: 4151378 - RNA, 67 nt, Human
gaaaagccaagagacagaugcccacccaggugaaggaagaucgagggggcucuguuucauggagggc

SEQ ID NO: 4151379 - RNA, 94 nt, Human
gaaaaggaaguugcuguugcugcauuuuuuuuaagcuguaaaaucuaauaugccccagcucugaugaaauguaccaggaggaaccugccuuguc

SEQ ID NO: 4151380 - RNA, 55 nt, Human
gaaaagucuaauagagugcuaguccacaguucaccagcauucuacuagacuuuuc

SEQ ID NO: 4151381 - RNA, 79 nt, Human
gaaaauacauagagaaaguauuagccuagaagucaggucccuugacuucuagauuuugaugcugcuucugcuguuuguc

SEQ ID NO: 4151382 - RNA, 80 nt, Human
gaaaauacggacaccagaagaugcuuuguaaaaugacagguauaacuucuaucagcaugucuuuugguaggcagguuuuc

SEQ ID NO: 4151383 - RNA, 55 nt, Human
gacuuguagucacauccaagaauuaacucauucggugagauuuguauuauaaguc

SEQ ID NO: 4151384 - RNA, 74 nt, Human
gacuugucacaggaaaggguguaagggugcagcucccugacccugcaaauauauccugugcacaaaauucaguc

SEQ ID NO: 4151385 - RNA, 76 nt, Human
gacuuguuuaauaauaccuuagcaaguggucuauggcuuucuccaccauuacaugcaaguguucaaaaacaggcuc

SEQ ID NO: 4151386 - RNA, 92 nt, Human
gacuuuagaccucaugguuuauuuggcauucugugaucuuaaaaauagauuauuuuucacuucaggauagaaaggccauggaguuaggaguc

SEQ ID NO: 4151387 - RNA, 55 nt, Human
gacuuuagagaaauguagaaguaccccacuggguaugaguaaguucuccagaguc

SEQ ID NO: 4151388 - RNA, 87 nt, Human
gacuuuauuuuuccaucguggggcuccuguaauuuuuaaaagucuguuugaagauauuaauuuggcaggaaugaggaagauggauuc

SEQ ID NO: 4151389 - RNA, 92 nt, Human
gacuuuccuccaaugucauauuugagaaugucauauugccacaauuguuaucuuggcaauaaugacauuuuaaaaacaggaaugggaagguu

SEQ ID NO: 4151390 - RNA, 63 nt, Human
gacuuucuucucuggcgguguguuuuccucuguuuccaggggagcucccaagagaagguuguc

SEQ ID NO: 4151391 - RNA, 84 nt, Human
gacuuuguagugucauauauuaccugccugaucuauaucuaaaugauguuaugaggaucaggugaaauauguggcugaaaaguc

SEQ ID NO: 4151392 - RNA, 92 nt, Human
gacuuuuguuugcuugcuugcuuguuuaguucacagauuaggaauaaaucuggacuggaacuuguaacaauuaacuagggcauuugaaaguc

SEQ ID NO: 4151393 - RNA, 116 nt, Human
gagaaaaagcaguuguuucuggguauauggacaggaguuaaggcugaguugacaagucaaaacuucuuguccucagcaccccugacuuuccucuauguguccuuuuguuucuucuc

SEQ ID NO: 4151394 - RNA, 91 nt, Human
gagaaaaaugaauggaaauuggaauuugaaucacuuccuaauuguuuuacuugguucaaauggcugcaguuaccauauacacauuuuucuc

SEQ ID NO: 4151395 - RNA, 67 nt, Human
gagaaaacugggaagaaggagugguuuacucuucaggcagagugcaaguucuuccuucuucuuucuc

SEQ ID NO: 4151396 - RNA, 80 nt, Human
gagaaaagaucugauaggcuucuuucuaucuggcugaaaugaaggccuagaaucuccaaguuuacucacuucugauuuuc

SEQ ID NO: 4151397 - RNA, 78 nt, Human
gagaaaauagucaggaugagggaugaggaguacacauaggaaauuuuugugauuuucuucauuuugauuguauugcuu

SEQ ID NO: 4151398 - RNA, 97 nt, Human
gagaaaauauugcuagacaaugacagugguuccaaggcagcuuuaagaacagaagugccacauguaacucacugugauucauaucuguguuuugcuu

SEQ ID NO: 4151399 - RNA, 57 nt, Human
gagaaaaucuugggucaagaauauauugccccuuauggucauguccaaauuuuucuc

SEQ ID NO: 4151400 - RNA, 97 nt, Human
gagaaacaggaggcaagaugaggaaggagggaaagcgcgcggggcucccuucuugucuccuugcgcuuuauccugcuucugucuccuuuugucucuc

SEQ ID NO: 4151401 - RNA, 97 nt, Human
gagaaaccauggagcaaggcuggucagauguggugaaauaaauacagaaagcucccuggaaaccuuuccuacaucuguaucucucuuucccuuucuc

SEQ ID NO: 4151402 - RNA, 77 nt, Human
gagaaacggaaacuuuuuccaaaguggcugcaucauuuuucauucccaccagccauguaugaggguuuccaguucuc

SEQ ID NO: 4151403 - RNA, 80 nt, Human
gagaaacucucucuuuggacaacaugauguguggaugugagguucacaguaucagucauuuugcuaaaugaggguaacuu

SEQ ID NO: 4151404 - RNA, 75 nt, Human
gagaaagaaaaagagaauacaggguaacaggaagcgcauuuucuugaauucaucugguucuuuuuguucugucuc

SEQ ID NO: 4151405 - RNA, 63 nt, Human
gagaaagauuguccuucaggggacaugacaucaauagguuucuggaaugagggacucuuucuc

SEQ ID NO: 4151406 - RNA, 56 nt, Human
gagaaagcuaaauaaguugauuacuguaucugguauggacuuauggaguguuucuu

SEQ ID NO: 4151407 - RNA, 117 nt, Human
gagaaagcuaacuaauugcuuuaaaacagauuuguauauucuuaacauuugcuaguuucaagaacuguggagauucggaagguacacauuaguuuagugaggaagauuuauuuucuc

SEQ ID NO: 4151408 - RNA, 104 nt, Human
gagaaaggaaaggagagaggagugaggggcagaaugugaucagggucuucugaguacccugacccugguuuguacucccccaccugcucuugaugcuuuaucuc

SEQ ID NO: 4151409 - RNA, 76 nt, Human
gagaaaggaaguauaaucaaagcagggcuacuaaaaguucccuagguaaguggcccaguauguauaaucuuaucuc

SEQ ID NO: 4151410 - RNA, 58 nt, Human
gagaaaggcauuccuaugcaaaauauuaaauuuuauuuccccaauaggggccauucuc

SEQ ID NO: 4151411 - RNA, 87 nt, Human
gagaaagucuugcuuugucacccaggcuggagugcaguggugcuguauuggcucauugcaaccuccuccuggguucaagcgauucuc

SEQ ID NO: 4151412 - RNA, 55 nt, Human
gagaaaugagggaugggcagaacccaagacucgggaccccagcccaccauuucuc

SEQ ID NO: 4151413 - RNA, 77 nt, Human
gagaaauggggacagaacuuuugacauuagccacagaaaaugaggauuuuugucauaaguguuugcacccaguucuu

SEQ ID NO: 4151414 - RNA, 86 nt, Human
gagaaauguuaauuuaaaaauuuuguccuuuggugaagcuauuuauacauguauaucuuaggguucuguuuuuaaguauauuuuuu

SEQ ID NO: 4151415 - RNA, 63 nt, Human
gagaacaaaagauagcccaaacauacaucucuaaugauaggugugccuuuaucuucuguacuc

SEQ ID NO: 4151416 - RNA, 68 nt, Human
gagaacagaggccaugagcugccaccuggaaaacauuagcuacaguuugguugugagaggccuuucuc

SEQ ID NO: 4151417 - RNA, 64 nt, Human
gagaacagaguguaccuuagcauaaaauaaucucuuuguuucugagauuaaaggaugcucucuc

SEQ ID NO: 4151418 - RNA, 71 nt, Human
gagaaccaggagcuguuugugacaggcuguggcagcugccuagaaaagcagagacaagcuucugggaacuc

SEQ ID NO: 4151419 - RNA, 63 nt, Human
gagaaccccacaucccuggccagcagagccgaugaguaaugaaggaaugagggagugggucuc

SEQ ID NO: 4151420 - RNA, 89 nt, Human
gagaacgucugguggugauuuagcccugcgcucacguucugcagcgugaugcagucacacugcgggcagcgcuggcccaccacguccuc

SEQ ID NO: 4151421 - RNA, 81 nt, Human
gagaacuauagaaaccuggucucucggugagaauaaauauaccccagauuuucuaauauaccaucaggcuucuauuuucuc

SEQ ID NO: 4151422 - RNA, 72 nt, Human
gagaagaaaaauuauuuagaagcuaauuuuucagaaaucucugguugacagagcuucaagucaugacuacuc

SEQ ID NO: 4151423 - RNA, 129 nt, Human
gagaagaauaaaggggccagaugggucguguagaggaugaagaggcacugacauauuuuaaauaguggggugguaaauguggguugguccuuuuguugaauauugcaugauggcucugagcagaagcuu

SEQ ID NO: 4151424 - RNA, 73 nt, Human
gagaagauugaaggcugggaauuaacaacugaaccuucucucacucauaauucuucaggccuuuugucuccuc

SEQ ID NO: 4151425 - RNA, 60 nt, Human
gagaagcagaaggaagcagggccuuucccacuuggcccuucuuuuaauagccaguuucuu

SEQ ID NO: 4151426 - RNA, 60 nt, Human
gagaagcagggucuuccucaguuggugggaagccugccaggggaguggacacugugucuc

SEQ ID NO: 4151427 - RNA, 61 nt, Human
gagaagccccgugugcuuucucauuucucagaggaguaagcugaggcagaggggcauucuc

SEQ ID NO: 4151428 - RNA, 111 nt, Human
gagaagcggcucaucccagauggcuguaggguccgauacauccccacucgcggcgcccugggcaaguaucggacucugagcucaugagagauuccacugugcuguccccuc

SEQ ID NO: 4151429 - RNA, 100 nt, Human
gagaagcuaguauagaaugaucugguaaagugguuggugaugauaaaaauauaaagacauuacacaaacacauuccagauaucuaaaucuaaugcaucuu

SEQ ID NO: 4151430 - RNA, 88 nt, Human
gagaagcugggaacuuacuuggguagaugauuuggcaauauucacucuuuccuuugccaccccaaccucccuaaguugagugcuuuuc

SEQ ID NO: 4151431 - RNA, 56 nt, Human
gagaaggagcagaaggaggaggggcugucugagaucuuuucucugugcaccuuuuc

SEQ ID NO: 4151432 - RNA, 77 nt, Human
gagaggacacaauuauagaagaaagcauagaauguauaauauugaaugugugacuuuuauaguuaacagugccuuuc

SEQ ID NO: 4151433 - RNA, 55 nt, Human
gagaggagagagaaacagccaccuacuaaggaagaagggcuuuuucuccccucuu

SEQ ID NO: 4151434 - RNA, 79 nt, Human
gagaggaggcuaugccgaggccugagcagaggaguggacguucugugcuggaugccucugcucggacuuugccucccuc

SEQ ID NO: 4151435 - RNA, 102 nt, Human
gagaggagguuuacccacucccugcacgccugccgucccugccccgcugggcagcccuucaguguggcuggcguuggggccagugaguugccucuuucccuc

SEQ ID NO: 4151436 - RNA, 56 nt, Human
gagaggaguagacacuuugguuuccauucuaaaaccaaagcuacagauuccauuuc

SEQ ID NO: 4151437 - RNA, 58 nt, Human
gagaggauccacaaaccaggaagucuaccuuccuaugggaguguugggaucucugcuc

SEQ ID NO: 4151438 - RNA, 66 nt, Human
gagaggccuggugcuccugaaugcagagcacgcaucggcucaguggggggacugaggccugaucuc

SEQ ID NO: 4151439 - RNA, 61 nt, Human
gagaggcucuaauaccagcaugguauguuauacaguugaugccauugcuuggaguccuuuc

SEQ ID NO: 4151440 - RNA, 81 nt, Human
gagagggagcagccaaggaguggccacugggucacauggcuccagcagggcccaugccccuccuucuggcauuucucucuc

SEQ ID NO: 4151441 - RNA, 96 nt, Human
gagagggcgagggagaggaggaugcugugccuggaaagcggcucuugaggagagcuggaaucucggcaaagcguccacucccuccccuccccuuuc

SEQ ID NO: 4151442 - RNA, 56 nt, Human
gagaggggagcaucuggcaaggggcccauuucucagcacaguacauuuccugucuc

SEQ ID NO: 4151443 - RNA, 58 nt, Human
gagagggguuuggguagguaagaaauucauuucuuacagaguuuacagagcccaucuu

SEQ ID NO: 4151444 - RNA, 56 nt, Human
gagaggguagaguaucaggcccccagggagcugggagcuggacccuuacaccuuuc

SEQ ID NO: 4151445 - RNA, 82 nt, Human
gagagggucugauugccugugucucccuguaccuccacucccaggccgaacugggcagaggacagggaagaucagaccccuc

SEQ ID NO: 4151446 - RNA, 60 nt, Human
gagagguaacaguuguguuuuguacaggccaagagaaagacagcuuagaguuugccucuc

SEQ ID NO: 4151447 - RNA, 81 nt, Human
gagagguacacgagaugcccugaggaaugucacgcuccaauucagaguuucccagcauuuugggcacugcuguacucucuu

SEQ ID NO: 4151448 - RNA, 85 nt, Human
gagagguccaagguuagagugucugguagcugcucuggcuuuaacaguuggcucgaauggcaaccaacacuaauaucugccuuuc

SEQ ID NO: 4151449 - RNA, 88 nt, Human
gagagguccuaaaaacugaugcuagaagagacguuuuuuguuguuaauaaaugauucugcugguacauuuuuauuaacacauucucuc

SEQ ID NO: 4151450 - RNA, 55 nt, Human
gagaggugaaauaguuguccggguucuugcugugaccaagaauguuuuaucucuu

SEQ ID NO: 4151451 - RNA, 64 nt, Human
gagagguuccucuuccuccauccuguuagaaggcagccaucugcaggcuaggaagagagccuuc

SEQ ID NO: 4151452 - RNA, 99 nt, Human
gagagguugaguaauuugcccacagccacacagcuuaaugacagaaucagaaugaaggauucacaucaaggacugucuggcugcaaaaucccagcccuu

SEQ ID NO: 4151453 - RNA, 88 nt, Human
gagaguaauaucugucuugugggggguugaaaggacuuuauucauagcuaaaguucagugccuucuauacacacuuauuuuuaaucuc

SEQ ID NO: 4151454 - RNA, 57 nt, Human
gagaguacaucagcaacagggcugaggacaggggcagccagagcugaugucauucuc

SEQ ID NO: 4151455 - RNA, 60 nt, Human
gagaguaucagugcucccagcuuagcauuaaaaugcagccugguggucacuggaguucuc

SEQ ID NO: 4151456 - RNA, 77 nt, Human
gagaguccguggcaggaguucaauugcccaugauuugcaguagaggucauuggacucaaaagaacuccuuggcuguc

SEQ ID NO: 4151457 - RNA, 88 nt, Human
gagagugauacaaggacauuuaggcagcagugaggaugaauaggccucuucuuucugccucucucugcuuggauuuguauucauuuuc

SEQ ID NO: 4151458 - RNA, 65 nt, Human
gagaguguguuauuaaagauggaacccaggagcaccaagauuccauguucuaaauaacagcucuc

SEQ ID NO: 4151459 - RNA, 65 nt, Human
gagaguucuugccuggguauuauuuucuuuguccuaaaagaaugggcccaagucagugaacucuu

SEQ ID NO: 4151460 - RNA, 94 nt, Human
gagaguuuaguuuaacuuggaguccuucaggccugaaguguggaguggggcuuuagagugucacucccuggggcuggacuccuggcugucuuuc

SEQ ID NO: 4151461 - RNA, 58 nt, Human
gagaguuugacccugcugggaaugugcaaaaauauuuggaggcaggauuucaacuuuc

SEQ ID NO: 4151462 - RNA, 75 nt, Human
gagauaaagaaucugacauaauuuccuguacuugcauagcaggaaguggaaacagauucaaauuuauuuugucuu

SEQ ID NO: 4151463 - RNA, 64 nt, Human
gagauacugcaguuaaguaauuagcugucugcaacuaguuaauuaagagauacugcaguaccuu

SEQ ID NO: 4151464 - RNA, 87 nt, Human
gagauagaggcugccuugugagccagcacccaccguaguuugcugacucagaaucuaggcagggugcugugccaugguuucugucuc

SEQ ID NO: 4151465 - RNA, 77 nt, Human
gagauagguacacauauauuaaaaauuguuauaucuucaugguaauaauuuuuuacuguaugaaguggcuuuaacuc

SEQ ID NO: 4151466 - RNA, 60 nt, Human
gagauagugaccucaugcuucccagagaacaucuucgcugggcuguccugaggucaccuc

SEQ ID NO: 4151467 - RNA, 62 nt, Human
gagauauaagaucuagaaaggagcagggccagagugaaugcugcuuuuuaagcuugaguuuu

SEQ ID NO: 4151468 - RNA, 62 nt, Human
gagauaugacuuugggagauauuacauaaccucagcagguuucuuuccaauauucaugucuc

SEQ ID NO: 4151469 - RNA, 91 nt, Human
gaaugucucauugucauuggaacagccagggucaggcagcuucugcucggacugacguggcgucugacccuugguggguugccagacauuc

SEQ ID NO: 4151470 - RNA, 92 nt, Human
gaaugugacaaauguuauuucuguucacaaucauauugccccaacucaacucugggggagucugggaauuggagagaagcauaugcacguuc

SEQ ID NO: 4151471 - RNA, 56 nt, Human
gaaugugggggaugcuagcuuguggugaaacucccaggaagaggccauccacaguc

SEQ ID NO: 4151472 - RNA, 85 nt, Human
gaaugugguggcagugaaguuugucaguuuugggguccaggcuugaagacaauggcagauuccccuccugucucucguaauauuc

SEQ ID NO: 4151473 - RNA, 62 nt, Human
gaaugugugucagagucuccaugguucgauggaagaggacucacaggacucugcauauaguc

SEQ ID NO: 4151474 - RNA, 88 nt, Human
gaauguguugccuguggagugcuuggcucagugccugcuacauauauagcacucguuaagugauaaguauuauuauaggcauauauuc

SEQ ID NO: 4151475 - RNA, 115 nt, Human
gaauguuccucccaccuccucacuucaggcucuguuauucuagagggcuggccugguuacaaggguagccagauuaacuagggucuaaaugggagagcuggggcacggaucauuc

SEQ ID NO: 4151476 - RNA, 75 nt, Human
gaauguugacucuaccaagcagauuaaauuuagucucugugaggcuugauuuguccugcuuaagauugagcauuu

SEQ ID NO: 4151477 - RNA, 61 nt, Human
gaauguuuaaaaggugcaguuugagcuuauuuaugcucauaggauguauucauggacauuu

SEQ ID NO: 4151478 - RNA, 80 nt, Human
gaauuaauuggagaaucuugaagaagcuaaauauaauguuuacauugaugaagcuaaaucuaagguuugucuaguaauuc

SEQ ID NO: 4151479 - RNA, 68 nt, Human
gaauuacagagggucggucguuuuaucaucacgguuugcuuuggcuaaaaccugacucuguguguuuc

SEQ ID NO: 4151480 - RNA, 61 nt, Human
gaauuagagggcacuugaauguuuuauugauaguccaauggcauuccaagucuucuuuuuc

SEQ ID NO: 4151481 - RNA, 102 nt, Human
gaauuauaacauggaaggagucaucacuggggccaugugagggacuguguaucaccacagaccuugcccuuaggaagcuuaaagccuuuuauauuauaauuu

SEQ ID NO: 4151482 - RNA, 66 nt, Human
gaauuaugcaauuuuuaucaauucagcaaaauguacacaugugcuguggugaggguuucaucuuuc

SEQ ID NO: 4151483 - RNA, 83 nt, Human
gaauucaggauucucucccauuuaccacuagggaaaacccuacugcuaaggaccguaaaugucggaggaucccccugagucuc

SEQ ID NO: 4151484 - RNA, 71 nt, Human
gaauucaguuugcuaguguuugguugaugguuuuugcauuaauaaucaucaaggauauuggucuguaguuu

SEQ ID NO: 4151485 - RNA, 68 nt, Human
gaauucauuugccaucaguguaauguguacuauuuuccaaaccauuuugcauuugaggcaaugaucuc

SEQ ID NO: 4151486 - RNA, 129 nt, Human
gaauuccucagcuuuaaaaauaguggcaucugguuccuuuucccugaagguauuuacucaagccaaggaaugaagcaccugugggugaagagcagaugaaagcuggaacuauaaaagccggagggaagc

SEQ ID NO: 4151487 - RNA, 60 nt, Human
gaauuccuuaggcucuugacuguuucuccacuauaaucagucuacggagaguaggaauuc

SEQ ID NO: 4151488 - RNA, 62 nt, Human
gaauucugagggaccccaucauuucuauggugccuccuaaaugcugugucaccuuaggauuu

SEQ ID NO: 4151489 - RNA, 83 nt, Human
gaauucuguaucacuuccuagauacgagauugaaaauaggccuuuuuucauguuggcauguuuuuaggagguaguuggaauuc

SEQ ID NO: 4151490 - RNA, 98 nt, Human
gaauugacaucuguuuaauggcuugcagagaaaagagguagagcuuguuauauuccuaucucuauuucuaugcagcugaaauugaucaguacaaguuc

SEQ ID NO: 4151491 - RNA, 127 nt, Human
gaauugagggacuguagaauuuacuuucugcuucuguauuuugggcuugaaucugggacaaugaucuuuucccucagcuggagaugagaaccgaacaacgaaaguagugccugcugugccuucaguc

SEQ ID NO: 4151492 - RNA, 91 nt, Human
gaauugcucuguaauugaaauugccuuggguuuucacuacgauuacuauaaauuguauaauucagguauuuucggguuugcugacagauuc

SEQ ID NO: 4151493 - RNA, 72 nt, Human
gaauuggcccagaaaauauggcuaaggugaccaauuuucuugguuuccccaggaauuuucuggcuuuaguuc

SEQ ID NO: 4151494 - RNA, 55 nt, Human
gaauuggggcucugggcagggagcucuguuugguucacugcucuagcccuaauuu

SEQ ID NO: 4151495 - RNA, 76 nt, Human
gaauugggguuugaggggagaaauucagagccgucaagccugacugagccucucuucccaccuccucccucacuuc

SEQ ID NO: 4151496 - RNA, 77 nt, Human
gaauuuaaagaggcacuccuuuuuaaggcugacccuguauuuacgggacccugagagcgaguggccucaugaaauuu

SEQ ID NO: 4151497 - RNA, 67 nt, Human
gaauuuaaauuuaaaucuaccaggggugucaugaugccaacuggaaaauuagauuaaaauugaauuc

SEQ ID NO: 4151498 - RNA, 88 nt, Human
gaauuuaugucauucacucaucuccuuuuaauuaaaaccuagugagauugguggcaauguugggaagcagauggaugagcaugaauuu

SEQ ID NO: 4151499 - RNA, 62 nt, Human
gaauuuauuugccauaagaaacaaaagccauuuugcuaaauggcugugaauggcaaauaauc

SEQ ID NO: 4151500 - RNA, 61 nt, Human
gaauuucccauucugaguggagacuggagcaaauccggagaaucucuagaaugggagauuu

SEQ ID NO: 4151501 - RNA, 85 nt, Human
gaauuucuaaaacuccucaugccgggucucacgcuacagauucagauuuaaucaguguaagauguggucugagcaucaggauuuu

SEQ ID NO: 4151502 - RNA, 69 nt, Human
gaauuugacuggagauaaugcuggcauacccaaaagcugcaugucugcaaauaucugccaguucuauuc

SEQ ID NO: 4151503 - RNA, 67 nt, Human
gaauuuggagagagauuaauguuggcucacuaugcauagaaaaacgucacuuucucucucucuauuu

SEQ ID NO: 4151504 - RNA, 68 nt, Human
gaauuuggccaaauaaucuugcagauggauaauuucagacugggaugaguguuuugaaggcgaaguuc

SEQ ID NO: 4151505 - RNA, 80 nt, Human
gaauuuggccuugaaauauuaguuccuucuggagagcccuauauucuaaccagaauaagcuguguugucaagcuguuuuu

SEQ ID NO: 4151506 - RNA, 74 nt, Human
gacagcuaccucaugcuguacagcacguguccaucugggaacacccucagcaugauguugucaguggugguguc

SEQ ID NO: 4151507 - RNA, 72 nt, Human
gacagcuaugcugugcaucuugccuggauguuuuuucagaggagggugcaggcaagagcaaaagcagcaguc

SEQ ID NO: 4151508 - RNA, 60 nt, Human
gacagcucguaccugcuuucucaccuaaaaggggaagaaggcuccaaguagaguuugguc

SEQ ID NO: 4151509 - RNA, 68 nt, Human
gacagcugaaaaauguaagguaaaugaaauuaugcuucuaucgccaacuuuauuuuguuccagcuguc

SEQ ID NO: 4151510 - RNA, 61 nt, Human
gacagcuggcaguggaaagguggccaggagguuuauauguuccuuuccugcagguacuguc

SEQ ID NO: 4151511 - RNA, 57 nt, Human
gacagcuucuaugugacgagcacuuucagugugacaggcucugaaccaagagcuguc

SEQ ID NO: 4151512 - RNA, 103 nt, Human
gacaggaaucuggugggcaggugcaccugagccaucugaacccguucagagucaccuuuuccucaggaugccuccguuuugcuccuagguuacaccuacaguc

SEQ ID NO: 4151513 - RNA, 107 nt, Human
gacaggagggaucaggacaggugggccuugggguggccuugucccugugccucucuagggcugggccugaccccaggaugaagcauccucauuccaucccuucuguc

SEQ ID NO: 4151514 - RNA, 68 nt, Human
gacaggauuuugauuucuugauuaugcccucugugacgaggccauaaauugcuggucaaaauucaguc

SEQ ID NO: 4151515 - RNA, 68 nt, Human
gacaggcagcagggcauagaggcacggaggcugcauggagaucccucacugcauuguccgcugucuuc

SEQ ID NO: 4151516 - RNA, 70 nt, Human
gacagggaaagaacaguaacuuuugacagaaauuuugcuuccugugagaugugguuauucucuuccuuuc

SEQ ID NO: 4151517 - RNA, 86 nt, Human
gacagggagaugagacagguguauaaucgggccucaagaaugcucuuuggaucuggaguccugcauuugcucuuagaucauuuguc

SEQ ID NO: 4151518 - RNA, 57 nt, Human
gacagggaggagcagagcuucugagucacacagucugcugagcucugccucccaguc

SEQ ID NO: 4151519 - RNA, 91 nt, Human
gacagggaugucccagaacaaaggccacagucagugggugcugagccccacagcccugcagccauggccuguggucuuggugguuccuguc

SEQ ID NO: 4151520 - RNA, 62 nt, Human
gacaggguccauucccagcggcacuagaaggcaggcugcucuaggggcagggcccuuggguc

SEQ ID NO: 4151521 - RNA, 59 nt, Human
gacagguaccggucagacuacggugacacaggcggcgugcgguuagacagguaccgguc

SEQ ID NO: 4151522 - RNA, 92 nt, Human
gaagagaggagguguagaaagagugugggcuuuggacucaggaacccucagcugaauucacaguucugcaccuuacuaggccugcucccuuu

SEQ ID NO: 4151523 - RNA, 80 nt, Human
gaagagcagaaagaaaguuucccccuucacagcuuaacaagguaugcuguuaagcucccagaagagggagaauggucuuc

SEQ ID NO: 4151524 - RNA, 56 nt, Human
gaagagccauuuaaauaguugucagugacaacuacaacuuacuugaauggcuuuuc

SEQ ID NO: 4151525 - RNA, 64 nt, Human
gaagagcuggaagugaagauaaccugaaaugcaggauguuuuccccuccuuucccugcucucuc

SEQ ID NO: 4151526 - RNA, 76 nt, Human
gaagaguggccucagagaaauacacaccucuuuuuaaagugauggauucuguauuagaucugagaacuucuucuuc

SEQ ID NO: 4151527 - RNA, 83 nt, Human
gaagaguuggaaaaacaaaugccauauauaaauucuaagccauaugaggacgaggaguaauggcauuuucuuccuuuuuccuc

SEQ ID NO: 4151528 - RNA, 66 nt, Human
gaagauaacauguugcagauucugccuccauagugaucagaguagcaaucugugauguguguguuc

SEQ ID NO: 4151529 - RNA, 57 nt, Human
gaagauaacuuuaaaaaguggccauacuguuugaggucugcuuuuuagugcaucuuc

SEQ ID NO: 4151530 - RNA, 102 nt, Human
gaagauagaaagcaagugugcuuacuuuacgggaucauagacuucaagauagaaaaaggaaucagugauccuauaaagugagcacaccugcuuucuaccuuc

SEQ ID NO: 4151531 - RNA, 127 nt, Human
gaagaugaaaguaaauuggucuagguguaucaauggcaaaggaaccuauuuuaaaaagucaagaauacuuuuaagaugguauuuuauaaagaugcauauaauaauaaacuuaaacuuucacaucuuc

SEQ ID NO: 4151532 - RNA, 89 nt, Human
gaagaugagaccugaaagaugcaugcugaagcuggcucagacugucucaaaagagcuaauugugugcaccucuucucaacuccaucuuc

SEQ ID NO: 4151533 - RNA, 60 nt, Human
gaagauuaccugagaccacuuguccccccucaaagaagcaaggucucagccaaaaucuuu

SEQ ID NO: 4151534 - RNA, 62 nt, Human
gaagauucuuugaggauuuuacuugagucagaaaaccucaguaaaaggaacaaagaguuuuc

SEQ ID NO: 4151535 - RNA, 77 nt, Human
gaagauugcguuuagaagauggcauuuuaaauguggguuucuccaaaggaagugccacucuucuuccagcuaucuuu

SEQ ID NO: 4151536 - RNA, 90 nt, Human
gaagauuugaaauuuauuuaaugcaugguuguuugccuacauauggccuaggccuguuugguacaaucugccaaguaucuucaaagguuc

SEQ ID NO: 4151537 - RNA, 102 nt, Human
gaagcaaaaaaguaauaggcaaaguuuaaaguagauuucagcuagaucauaaacagcuugggaugcugguuuaaauuuguagauguuuuugacuuauguuuc

SEQ ID NO: 4151538 - RNA, 67 nt, Human
gaagcaaauaacaugaccugugcuucacagaugaacaucuaggggcucagaaauguuagguggcuuc

SEQ ID NO: 4151539 - RNA, 79 nt, Human
gaagcaaguauaaucaauugcuuuuugaaucaauauuucaacaaaaugaugauaagauggaguugaauucucuugcuuc

SEQ ID NO: 4151540 - RNA, 66 nt, Human
gaagcaagugcaaggaagaggcagacacagaucagcaauacuugcuaaauccuugaguuuugcuuc

SEQ ID NO: 4151541 - RNA, 87 nt, Human
gaagcaauguaguuucuaaacugaacugucauaaaagaggauaugggcuuccaacuggcaugucaguaguaauuaaaauauuguuuc

SEQ ID NO: 4151542 - RNA, 61 nt, Human
gaagcacagggcucgaucucagcaggaaaacaucccuggcauggggacagcccgugcguuc

SEQ ID NO: 4151543 - RNA, 66 nt, Human
gaagcacauacauaggacuuagaccuggauucaggucugccacacugguucaguggaugugaguuc

SEQ ID NO: 4151544 - RNA, 109 nt, Human
gaagcaccccugggccucaugagcuaacccuugcaucccauguguggccauccaggggaagucggccugugcacaugugcaggaaagcacgggggcccccggggugguc

SEQ ID NO: 4151545 - RNA, 65 nt, Human
gaagcacgagccuuugaaaaugacuagcuauugauaauucaaaaucauuucagggccuuggcuuc

SEQ ID NO: 4151546 - RNA, 60 nt, Human
gaagcagaacccacuccccaacuucuccacucucugaaugaggagugauuuuuuugcuuu

SEQ ID NO: 4151547 - RNA, 62 nt, Human
gaagcagacaucaccugcuggcagcaggcaguauccucucagucagccuugauguccccuuc

SEQ ID NO: 4151548 - RNA, 72 nt, Human
gaagcaggagugaguguccucagcagaguuucccuaacucgaaucuccuggguugugacuuucuccugccuc

SEQ ID NO: 4151549 - RNA, 71 nt, Human
gaagcagggaugcauuuucugaguaauacaaaaaguuaucaaaagacaacaaauguguuccauaaugcuuu

SEQ ID NO: 4151550 - RNA, 56 nt, Human
gaagcaguucgaaagcaguuggggauuuccccaaaggcuuguuugaggacugguuc

SEQ ID NO: 4151551 - RNA, 71 nt, Human
gaagcaucacagcugugagagugcauugaagggggauucucuugaugcagaucauagccaagguauguauc

SEQ ID NO: 4151552 - RNA, 65 nt, Human
gaagcaucuuucagugcugucugaaguuguucuucauucaucagauggguuuugaaggauguuuu

SEQ ID NO: 4151553 - RNA, 67 nt, Human
gaagcauggagagcuauuuggaccuccagguuaaaacugaugcagccuggagcccuggccucccuuc

SEQ ID NO: 4151554 - RNA, 123 nt, Human
gaagcaugguacucagacauuuuaagggagggcauuuucugggucaucagggguuaaaggguugccagucuugacagcugaggcccagaguaccccccaccucuggacuucuaggcaggcuuu

SEQ ID NO: 4151555 - RNA, 74 nt, Human
gaagcauuuauuuagaagaguuuuaaaguacuuaggcgcaguccaaagcacucaauuucuaagcuaaaugcuuc

SEQ ID NO: 4151556 - RNA, 130 nt, Human
gaagcauuuggggacuuagaggaaugauaaaugcaaacagcccagaauccagaaacugucuugaacauuuaaacucuagacucugggaaugugugcaugucuucaguuagucagauguagauaauuuuuc

SEQ ID NO: 4151557 - RNA, 72 nt, Human
gaagccaccaaugagaguguuguuuuuccaaccgugguaucuggagacauuucucauuaaaaaauggucuuu

SEQ ID NO: 4151558 - RNA, 68 nt, Human
gaagccagagaggccuuagaauccauagcccauucccuucuggcuucugagucuccugacauugcuuc

SEQ ID NO: 4151559 - RNA, 70 nt, Human
gaagccaugcaggagacuggcugugguaguuuucaugugaauuuuuaucuucagugcuuuucaugucuuc

SEQ ID NO: 4151560 - RNA, 55 nt, Human
gaagccaugugacuauuucuagcucuaaaagugagcagaauuguuuuaugucuuc

SEQ ID NO: 4151561 - RNA, 67 nt, Human
gaagcccagaguucaaggcugcagugagcuaugaucgugcccaccacugcacuucagccugggcuac

SEQ ID NO: 4151562 - RNA, 63 nt, Human
gaagcccagcugucugguuccagagccaguguuacauggcucugaccucccaggcaguucuuc

SEQ ID NO: 4151563 - RNA, 71 nt, Human
gaagccuaaguauaaucagauaaccucaacaucaguaggacaacugaugcugaaccuuaacuuggagcuuu

SEQ ID NO: 4151564 - RNA, 65 nt, Human
gaagccucaacaucucugcgucugcaacuaauuauuuauaaugaccucaaagaugaugggguuuc

SEQ ID NO: 4151565 - RNA, 85 nt, Human
gaagcgcuugaaccugggaggcggaaguugcagugagcugagaucgugccacugcacuccagccucagugacaaagcgacacuuc

SEQ ID NO: 4151566 - RNA, 88 nt, Human
gaagcuaaagagaauuuguaagaauccagcgcaauucagaaucagagguuuuagagcugggauggauuuuccagaaaucuucuguuuc

SEQ ID NO: 4151567 - RNA, 84 nt, Human
gaagcuaaguacagagagaggcccgaggcugcuuguaguuucccagcuaggcaugccuauugccuccucugucuauuugccuuu

SEQ ID NO: 4151568 - RNA, 77 nt, Human
gaagcuagaagaggcaagaaaggacuuucuagagccuuuggaaagcaugauucugccacaucuugauuuuggacuuc

SEQ ID NO: 4151569 - RNA, 86 nt, Human
gaagcuauuuagugagucacauccuuuuagggagcaaaaguaucuaaggaauaagaugggugugaguugggacuagguauugcuuc

SEQ ID NO: 4151570 - RNA, 79 nt, Human
gaagcucagagaagggugugauuugccugagaccacacagccgguaacaggcaaggucacaccuugaacccgugucuuc

SEQ ID NO: 4151571 - RNA, 86 nt, Human
gaagcucccagaguccucugcccauguuuucuuagccagguuuguaaaagggaucauucuggagcagagggcguuugaggaaauuc

SEQ ID NO: 4151572 - RNA, 81 nt, Human
gaagcuccuguggcugaaagaggacuaaaguggcauuuucugccaggcuuugucacgcucccuuuugcccacaggugcuuu

SEQ ID NO: 4151573 - RNA, 76 nt, Human
gaagcucugcagggaaggguguggggagugauggacccauucuucuccaguucauccuaccauuuguugagggcuc

SEQ ID NO: 4151574 - RNA, 84 nt, Human
gaagcucugccucugaguuagagaucuagauuguuucucugcaucaaaaagcgacuagguuuuccagccagaaguggagguuuc

SEQ ID NO: 4151575 - RNA, 82 nt, Human
gaagcucuuggcaugugaguaauguucauaaguaguagccacuauugcuaugagcauuguucuuguccugaccuugagcuuc

SEQ ID NO: 4151576 - RNA, 106 nt, Human
gaagcugcaacaccuuucggaccuuugggcucagaccaucgauaccucugauucugauaacaaacaccaauuuggguucugcagguauauagaaguugccagcuuu

SEQ ID NO: 4151577 - RNA, 60 nt, Human
gaagcugcaggaaguagaagcggaguggguggcagcucccucccuugcuuccucagcuuu

SEQ ID NO: 4151578 - RNA, 73 nt, Human
gaagcugccauaacuucauggguucaaagcuggguucucuugggaccugcuuccaugcaauggcagucaguuc

SEQ ID NO: 4151579 - RNA, 61 nt, Human
gaagcugcucugccaagacaacaucaucaaucaauaagagaaugugucagcagggggcuuc

SEQ ID NO: 4151580 - RNA, 93 nt, Human
gacaccuggucugugguauuuuauuaugacagccuaagcagacuaauacagagugggaggguggcaguaauugaguuaccuggaccagguguu

SEQ ID NO: 4151581 - RNA, 92 nt, Human
gacacuccuagcagagggacaguguaaugcauaaaguuacggagaaaggaagguguguucugugcucauacacguucagcugcucagagguu

SEQ ID NO: 4151582 - RNA, 60 nt, Human
gacacucucucaggcuuuccuuguuuuugaugaccuggagucauuugaggaguacugguc

SEQ ID NO: 4151583 - RNA, 68 nt, Human
gacacuugccauaaaugaaaauacugucaacaugaauuuaaaugaaguauucucauauugguaauguu

SEQ ID NO: 4151584 - RNA, 75 nt, Human
gacacuugugcuguuucugagcuccggaucuuauucuuucagucaaccgguauuuacugagcgcacagucguguc

SEQ ID NO: 4151585 - RNA, 108 nt, Human
gacagaaguaccaggagggagggagagaagggcauguacacugcccuucagaacacguuucgggcaugacauguacugcucucucaucucauugggcaaaaucuaguc

SEQ ID NO: 4151586 - RNA, 84 nt, Human
gacagaaguccccgccccagcuguguggccucaagccagccuuccgcuccuugaagcuggucuccacacagugcugguuccguc

SEQ ID NO: 4151587 - RNA, 63 nt, Human
gacagacugugucugagguauucucuugcaaaucccugaggguacugaauaacaaagucuguc

SEQ ID NO: 4151588 - RNA, 71 nt, Human
gacagagaagagacucaugcgggccaugugcaggggaucccuugggccagcacugggugcucauucgaguc

SEQ ID NO: 4151589 - RNA, 72 nt, Human
gacagagcagaacauuucacaguaucuuguaguaaaagcaaaaacuguaaauguuucucaugauaagauguc

SEQ ID NO: 4151590 - RNA, 65 nt, Human
gacagagcccugauacccugagaccaggcuugcucucucugggugucuuaggagcucacuauguc

SEQ ID NO: 4151591 - RNA, 76 nt, Human
gacagaggaugggggcggcugaagcccagggaggggcuccccaucuucucggcucccaaugcucgccuucucuguc

SEQ ID NO: 4151592 - RNA, 73 nt, Human
gacagaggcaccagccccgcuagccugggaggcagccugguacccaggagggaggagggugggggccuggguc

SEQ ID NO: 4151593 - RNA, 60 nt, Human
gacagaucauugauuuucacucacugugcauaaaacacaguugacucucaagauccuguu

SEQ ID NO: 4151594 - RNA, 86 nt, Human
gacagauuuguuuaucuuggaaccuuggaggcucugcacccaaaagcuuuggcccuagacucuaaguccgcccccagcaaacuguc

SEQ ID NO: 4151595 - RNA, 64 nt, Human
gacagcaucucuuuuugcauuccuccuauucuggagaaauggagaagagauaguucuucauguc

SEQ ID NO: 4151596 - RNA, 117 nt, Human
gacagcauuuuguguaacucuuugcacaggggaguuuuaugcaacagacagaaacuuucugaguuguucugauugccugaagaugcccuguuuuagaggagcaaaauuuucccuguu

SEQ ID NO: 4151597 - RNA, 63 nt, Human
gacagcugugacagccaguugauguuaaacacagaagccucaacagacaggucuacagcaguc

SEQ ID NO: 4151598 - RNA, 69 nt, Human
gacagcuuaaggacucccugcauuaucuuccagggcaaccugacagccaggagagcuccuucagguuuc

SEQ ID NO: 4151599 - RNA, 61 nt, Human
gacaggagccagggagggucugguauagaacaauugugcgaagaaacuucuggcuguuuuc

SEQ ID NO: 4151600 - RNA, 82 nt, Human
gacaggauuccaguacaggucucucauuuccuucaugauuaggaauacuacuuugaaaugagagaccuguacuguaucuguu

SEQ ID NO: 4151601 - RNA, 79 nt, Human
gacaggcaugcuuucaggacuaacuaagcauggugaggaaacaagaaugauaauaguaucugaaaauguguugccuguu

SEQ ID NO: 4151602 - RNA, 79 nt, Human
gacaggcuuagggagggugcucugcccagguuccaauccugguuccacugcauaugagccuuguaucucugagcaaguu

SEQ ID NO: 4151603 - RNA, 121 nt, Human
gacagggaaauaacgaguaccccaggaagacugaauuugcauaguuggcaaaugcugccagacaaguucgcauucaacuguugcaucagauucauuuggaaagcuuuuaaaaaauauuguu

SEQ ID NO: 4151604 - RNA, 59 nt, Human
gacagggcaagacucugucuaaaauucuuuuuuaauuuuaggcagagucucgcucuguc

SEQ ID NO: 4151605 - RNA, 83 nt, Human
gacaggugcuguucaguucauaauuuggcuuccuagauguagaagucuccggcuucugagccaaaaagcgagcgggcccuguc

SEQ ID NO: 4151606 - RNA, 94 nt, Human
gacagguuagucuuuucugccauuuauuggagauaggcauauaaaacacugaguuuuauugagcacauaguauguggcaggcacuagcacuuuc

SEQ ID NO: 4151607 - RNA, 80 nt, Human
gacagguuggggagcuggggaagaaccaugggaagcaaacccuggucucuccaugcccuccacccucucaauaaccuguc

SEQ ID NO: 4151608 - RNA, 81 nt, Human
gacaguaaaauauagcaauuugcccaauuaccugcuugguagucugaguacugauuuugggguagauaccucuuuauuguc

SEQ ID NO: 4151609 - RNA, 78 nt, Human
gacaguaaacucguucccaaacccaagcacgacugugacuuguucucuggguuaggggaacuauugagucagaauguc

SEQ ID NO: 4151610 - RNA, 106 nt, Human
gacaguaaggauaccagugauuacugugcuuuugguaccuucgcuuucagugccuucagcggaggcauuuccaccaaugagcaagucaucaauguuacccucuguc

SEQ ID NO: 4151611 - RNA, 63 nt, Human
gacaguagugccaugaccuacagcccacugcccgcccgggcuguagaagaaucacuugcuguc

SEQ ID NO: 4151612 - RNA, 55 nt, Human
gaggcugccaaugugugcaugugugugugugugugugugcgcacaggugugccuc

SEQ ID NO: 4151613 - RNA, 76 nt, Human
gaggcugcccuggccauccagguugacugugacugacacaggcuugcacuaggguggcagugguggagguggccuu

SEQ ID NO: 4151614 - RNA, 89 nt, Human
gaggcugcguggcuuucugagcugcuuuggggaugaaugagauggccagagcugagcauccuucguccacagaggggcuuguaguucuc

SEQ ID NO: 4151615 - RNA, 124 nt, Human
gaggcuggaucacaggcagaugcaucugagaggccagaucaggcacgcggcagacccaaggagcuucucggcccagcucugccugcugccugggggcuccagcugcugaaugccuugaagccuc

SEQ ID NO: 4151616 - RNA, 122 nt, Human
gaggcuggcuuggggaaguggcagagccagaggacagcugggugucccacuucugaccccucaaggcagcaauggcagcuuucggcucucaccuggacuccucgucuucucgagacagccuc

SEQ ID NO: 4151617 - RNA, 64 nt, Human
gaggcuggggacuccccaccauagcucggucccagcuggguuaaaguggcugucacucagccuc

SEQ ID NO: 4151618 - RNA, 66 nt, Human
gaggcugguggaucaugaggucaggaguucgagaccagccugaccaacguggugaaaccccaucuc

SEQ ID NO: 4151619 - RNA, 57 nt, Human
gaggcugguuugccuuuuggcacaguggaaauagcaugugcucuggagccagcucuc

SEQ ID NO: 4151620 - RNA, 66 nt, Human
gaggcugucaaauggcucuaaaaguucugaugcaucauagguccuauaggugucuuugccagcuuu

SEQ ID NO: 4151621 - RNA, 84 nt, Human
gaggcuguuaauugauauaaagaacuucagguagguccuaaccccuuauuugaugguugauuauaaaucaguuauucuugccuu

SEQ ID NO: 4151622 - RNA, 59 nt, Human
gaggcuguuauguuguaaacuguaaaauuccaagugcuguauuuacaacuuagagccuc

SEQ ID NO: 4151623 - RNA, 73 nt, Human
gaggcuuaauuaaggcauagcuuguguugacauggguauaaagucaaugcuuaguuugccugaagaaaguuuc

SEQ ID NO: 4151624 - RNA, 81 nt, Human
gaggcuucccagcagaggaaagacucugaccuuaacaaugaagaguuuuagacccccuuaugcaaggaagaagaguaccuc

SEQ ID NO: 4151625 - RNA, 60 nt, Human
gaggcuugacuuuaagaugcuuuuuuucagagaagucucaaucuuuggcucagaagccuu

SEQ ID NO: 4151626 - RNA, 64 nt, Human
gagggaaaggaucacagaggcgcugagccgggauggcuacguguacaaguacgaccucucccuc

SEQ ID NO: 4151627 - RNA, 63 nt, Human
gagggaaagguuaauacaugauguuaccuuguaugagcaacagaauauuuugccuuucucauc

SEQ ID NO: 4151628 - RNA, 78 nt, Human
gagggaaugagcugcaggauuauggaauggagucacaggugguuccagcucuucaguucugcaaauucucacucuguc

SEQ ID NO: 4151629 - RNA, 76 nt, Human
gagggaaugggcaggcgugauccugguggguucuggagcucuccgauuccacggcucagccucaacguuccgacuc

SEQ ID NO: 4151630 - RNA, 67 nt, Human
gagggacacaggauuccuggcucugccuguagccacagaaguacgccugagggauucaguuucucuc

SEQ ID NO: 4151631 - RNA, 84 nt, Human
gagggacauugaguuaaaggcacuuaacgugggaggaugcauucauagguaaccuuuugcaagugccuugaccuauuuuuccuu

SEQ ID NO: 4151632 - RNA, 74 nt, Human
gagggacgggcaccuuuuucuuaauauucaucauaaucacuugguacuuauuaugagccaggugcugucuacuu

SEQ ID NO: 4151633 - RNA, 79 nt, Human
gagggacugaggggcuuucaggcccagcuuugcucugcaaaagguuuacuguggcugugaaacuucucagucaccccuc

SEQ ID NO: 4151634 - RNA, 81 nt, Human
gagggagaaacagaagggaaagcuuuuacagaagguccccaaagggccaaagagaguuucuucuuucuuuucuuuaaccuc

SEQ ID NO: 4151635 - RNA, 66 nt, Human
gagggagagugauggaccauugauggaaaaugcuuuucugaagcuuaaugguuuucccuuucucuc

SEQ ID NO: 4151636 - RNA, 127 nt, Human
gagggagcgaaagauccuaaccugcuacaggggucacucagagauagccucauuuccauacucaggagacaggaugcauacucuugguuaaucuucugugugucucauuagucuuuauccuucccuu

SEQ ID NO: 4151637 - RNA, 66 nt, Human
gagggagcuucaacuuacuaaaagauagaagaaauucucuugcuugggaauuggagauacucucuc

SEQ ID NO: 4151638 - RNA, 72 nt, Human
gagggagcuuuccugcagguuucccccggacggaauguguuucguccugugcaccugccugcagagccccuc

SEQ ID NO: 4151639 - RNA, 66 nt, Human
gagggagggggaguccggggcgugccucccggcgauccuggcaagugggcucccagaucuucucuc

SEQ ID NO: 4151640 - RNA, 96 nt, Human
gagggagucuugcucuguugcccaggcuggagugcaguggcgcgaucucggcucacuacaaccuccgccuuccagguucaagcaguucucugccuc

SEQ ID NO: 4151641 - RNA, 98 nt, Human
gagggaguuucgcucucguagcccaggcuguagugcaguggagcaaucuuggcucacugcaaccucugcauccuggguucaagugauucuccucccuc

SEQ ID NO: 4151642 - RNA, 67 nt, Human
gagggaugcagaaacagaggcccuauguaacagauuaacacagccccucucauagucuguauccuuu

SEQ ID NO: 4151643 - RNA, 96 nt, Human
gagggaugugaacagagucaguggucaggggcuucugagcuguaguucucuacagcuuccaguauucuugaaaggccauuucuguaaacccccuuc

SEQ ID NO: 4151644 - RNA, 89 nt, Human
gagggcaagugaaacaucccuaguuacaguggucauuugggaaaaucuaaaugugcucccaaacgaccuacuguguuuacauuugaauc

SEQ ID NO: 4151645 - RNA, 58 nt, Human
gagggcagaguuagggucauaguggucaucacuaacacuuuccacugacucugacuuc

SEQ ID NO: 4151646 - RNA, 69 nt, Human
gagggcaggauggcagagaaaagggugcgugaaggcauaagcaccugaaauuuucuccauuucccccuc

SEQ ID NO: 4151647 - RNA, 102 nt, Human
gagggcaggauuaauugagcugcucuggucccugcuugauuuuauaguguuugcggagcaccuugagaucaagcaguguagaguuacugacuucugccccuc

SEQ ID NO: 4151648 - RNA, 85 nt, Human
gagggcaggucgaggugcugcuguacuucuugcggcuggaggccaucccugcccuggacagcaagagacagagcauccuguucuc

SEQ ID NO: 4151649 - RNA, 81 nt, Human
gagggcauucaaagccucugugccucuugcgcuguugcuuuugucgggggaguugaggcacauggggagauggacaccuuu

SEQ ID NO: 4151650 - RNA, 61 nt, Human
gagggccacguucagggcucucugcaaccaaauugaacgcacagcccuguucguggcucuc

SEQ ID NO: 4151651 - RNA, 55 nt, Human
gagggccaggcagcaagaaggccucccagagaggacaaucuuuggccuggcucuu

SEQ ID NO: 4151652 - RNA, 86 nt, Human
gaccaugauaaauguucuauccauucauugagaguaaacacagcagucaacucaagaaggaugagcuauugcuauuuaaaaugguu

SEQ ID NO: 4151653 - RNA, 78 nt, Human
gaccaugucuauuucuuacccacaauuuuaucuggcauagugccuggcaugcagcugugggcaagaaaugacaugguu

SEQ ID NO: 4151654 - RNA, 57 nt, Human
gaccauguucacuuucucagaaggccucccugccccucugggagugggaaaaugguc

SEQ ID NO: 4151655 - RNA, 59 nt, Human
gaccauuucaggggcagggacucuguuaaacauuacagagauguccucuccaaaugguu

SEQ ID NO: 4151656 - RNA, 57 nt, Human
gacccaacacuuuagauauucccuucuguuauuagaggaaauuuccaaggugagguc

SEQ ID NO: 4151657 - RNA, 67 nt, Human
gacccaaguccaggcuggcguagagucgcugcugggucaggagcguucuuguggcaggauuugcguc

SEQ ID NO: 4151658 - RNA, 114 nt, Human
gacccaauggcuuuuagugugucucaguuuuaauuuugcaaaucuggugcuuugcuucuaugaguuaccagcaaugcuagucaacucugagucagacauccugguguguggguu

SEQ ID NO: 4151659 - RNA, 59 nt, Human
gacccagagacaguuucacagggucuacaaagagauagacccagagacuggcucugcuc

SEQ ID NO: 4151660 - RNA, 57 nt, Human
gacccagcaugacaccugcacauggcagcugugugguaggcggucacugcuguuguc

SEQ ID NO: 4151661 - RNA, 62 nt, Human
gacccagccuaugaaacaccaaaaagaaggcaauuuucuuuguauucaguugggcugugguu

SEQ ID NO: 4151662 - RNA, 103 nt, Human
gacccaggccacgcuggccccgggguguccugugccaagcugggauagagccucucucccccagcaaguggacggcccacgcuagggcucgggugcugagguc

SEQ ID NO: 4151663 - RNA, 84 nt, Human
gacccaggugcuuuuagcaauuagaauccagcaugccaacuaaccggccauguuauguucaaauaugucuacuugcacccuguc

SEQ ID NO: 4151664 - RNA, 65 nt, Human
gacccauaggaaucuguuguccuugugaaucgaaugacugaaacagcuauucacuacuauggguu

SEQ ID NO: 4151665 - RNA, 74 nt, Human
gacccaucgauggcucuagaacuguucagaaaacucuguauggguuggcuggaauauguggagaccauuggguu

SEQ ID NO: 4151666 - RNA, 62 nt, Human
gaccccaggcagaucagggggugcuucugguccauguccccuguccugaguucuuggagguc

SEQ ID NO: 4151667 - RNA, 72 nt, Human
gacccuaaagaauguggcauaaaagccaagcccauuaggcuaggcaaguggaccagagguuuauuggagguc

SEQ ID NO: 4151668 - RNA, 63 nt, Human
gacccuagagaaauguacuagucuaacuccuuugcaggauuuggaaggcguuucucuguaguc

SEQ ID NO: 4151669 - RNA, 65 nt, Human
gacccucgcugucuuuuccacaccgcaaagcagccaugguuugggccugggcuggacagccuguc

SEQ ID NO: 4151670 - RNA, 61 nt, Human
gacccuggaggcuuggaacugcacugacagacaucugugcagcccuuccuuccucuggguc

SEQ ID NO: 4151671 - RNA, 63 nt, Human
gacccuucuucaaaugcuaguaauaucaucaucauggugacuguuuuuguuuggggcuggguc

SEQ ID NO: 4151672 - RNA, 87 nt, Human
gagaauuguguugucugugacacauucagaauuaagaguuggggauauuuuaauacuauaauuugaaguacuauagucauauuucuc

SEQ ID NO: 4151673 - RNA, 80 nt, Human
gagaauuuaaaucaugcuguggcuugcagcuggggcuguguauagcugaagaaaagccucacagcacaagauuguuucuu

SEQ ID NO: 4151674 - RNA, 83 nt, Human
gagacaaaauuggagcagugagugaauguugccuugaccucauggguguaguguuugcaucucauugauuuccacuuugcauc

SEQ ID NO: 4151675 - RNA, 84 nt, Human
gagacaacagauguauacaggguugacucauagauuuagaaaguuauuagugcauguuaaugguguacaaauguuaauuguuuc

SEQ ID NO: 4151676 - RNA, 75 nt, Human
gagacaaccugauagaagcagaagcauaccaauucccaggaguuaaugcuguuuacuuuagucuccguuguucuu

SEQ ID NO: 4151677 - RNA, 69 nt, Human
gagacaagccaauuacugugccagguuagagaagaaaggagacaggccacaggcacagaggcuugcauc

SEQ ID NO: 4151678 - RNA, 101 nt, Human
gagacaauucauaucauauggccuuuacuuucucaaguauauaggaggcgagauuccuauuggcugaaagugaagaagauacacauggauuugaggguuuu

SEQ ID NO: 4151679 - RNA, 60 nt, Human
gagacacuggagagagaaacaggacugucagauaaagggcgucugugacuccuagaucuc

SEQ ID NO: 4151680 - RNA, 94 nt, Human
gagacagaguuucacucuuguugccuaggcuggaaugcaguggcgcaaucucggcucacugcagccucccagguucaagugauucuccugccuc

SEQ ID NO: 4151681 - RNA, 88 nt, Human
gagacagaugaggcccaaacauuacaaaugcuuuggaaaaauacacucauuuuauuugguguuugugcuuugacuaaacaucugacuc

SEQ ID NO: 4151682 - RNA, 82 nt, Human
gagacagauucaugaagcggagcauuugaacuugaacuuuacaccagugauuuaaaacaguguuuugcuuagaauuuggauu

SEQ ID NO: 4151683 - RNA, 63 nt, Human
gagacagccuacuccagucucagauuggaccacacaggguugggccugguuugugggugucuu

SEQ ID NO: 4151684 - RNA, 99 nt, Human
gagacaggagaaucgcuagaacccgggagguggaggucgcagugagcugaggucacgucacugcacuccagccugggcgacagagugagacuccgucuc

SEQ ID NO: 4151685 - RNA, 100 nt, Human
gagacaggagaaucgcuugaaccuuggaggcggagguugcagugagucgagaucgcgccacugcacuucagccugggcgacaagagugaaacuccgucuc

SEQ ID NO: 4151686 - RNA, 102 nt, Human
gagacaggaggaucgcuugagccuacggaggucaaggcuacagugagucgugacugcaucauuguacucuagccucugggcaacagaaugagauccugucuc

SEQ ID NO: 4151687 - RNA, 74 nt, Human
gagacaggaucuucuauagauauucugaagggaacuuccagacuuuuucagaaggcuuaggaguuuacgguuuu

SEQ ID NO: 4151688 - RNA, 67 nt, Human
gagacaggauuaguguucuuaucuucuaggucaagugcaaucuaggugguagaucacuaggcugcuc

SEQ ID NO: 4151689 - RNA, 77 nt, Human
gagacaggcagaaaagagcccugaaggacaaggucuggggaaccuggauguccucaggaaggcuuucugacuguguc

SEQ ID NO: 4151690 - RNA, 65 nt, Human
gagacaggggagagugaagagguagggagcccggcagucuuugcugaguacaucuccaaagucuc

SEQ ID NO: 4151691 - RNA, 68 nt, Human
gagacagggugaucgcuugagcccagaaguucaagaccagccugggcaacacagggagacccugucuc

SEQ ID NO: 4151692 - RNA, 111 nt, Human
gagacaggucugaagucaggugauuuccaugcaucuaauaccucauuuaaucucacaacaaaucuacuggagaugggaugacauuaauggagcugauauuaugcccguuuc

SEQ ID NO: 4151693 - RNA, 86 nt, Human
gagacagguuccugaguccccagacucccucccagacaggcagccagguggaagggaaaguuugggguccagcgccugcacuucuc

SEQ ID NO: 4151694 - RNA, 79 nt, Human
gagacauaauuuccaagugccuuuugaauuguuuucauuucccuagaaauaaacauugagugccuuugguauuggucuc

SEQ ID NO: 4151695 - RNA, 64 nt, Human
gagaccaagcuguauauuauugguuacaguuuucaguaacuugauaauuuaaguuuggguccuc

SEQ ID NO: 4151696 - RNA, 64 nt, Human
gagaccagucaucuuuuuaccagaauguuguauguuucugagugaucagaugcauugcuuucuc

SEQ ID NO: 4151697 - RNA, 74 nt, Human
gagaccaugugagcacgcccgaggcggcccggagaggggcggggcuucggaaugggcgaggccugauguggcuc

SEQ ID NO: 4151698 - RNA, 63 nt, Human
gagacccaucuucccagaccuuacaugugauccuuucagagaugacucaugggauuggguuuc

SEQ ID NO: 4151699 - RNA, 93 nt, Human
gagaccguaaucacugagcaguggcugaagauguuccuggaaaccauucuagccagaagccaaacugugaaucaggaagauacgggacaccuc

SEQ ID NO: 4151700 - RNA, 107 nt, Human
gagaccucucagaaucuuacgagguuggagaguuguuuggaaugcuggguucuggucuugucucugcuuccaaccagcuauggaaucuuguguauucuuucagucuu

SEQ ID NO: 4151701 - RNA, 73 nt, Human
gagaccuucuagcucaaaauuccguuuuaguacaauugaaaaacugaauuucaaagagguuaagagguguuuc

SEQ ID NO: 4151702 - RNA, 81 nt, Human
gagacgaggagguuggggcugcagugagcugugaucaugccacugcgcuccagccugaguaacaaagugagacccugucuc

SEQ ID NO: 4151703 - RNA, 110 nt, Human
gagacggagacggagucuugcugugucaccaggcuggagugcaauggcgugaucucagcucaaugcaaccuccgccuccuggauucaagcgauucuccugccucagccuc

SEQ ID NO: 4151704 - RNA, 55 nt, Human
gagacggaggauggcaucaucugugaauaacacagaugaugccauccuccaucuc

SEQ ID NO: 4151705 - RNA, 98 nt, Human
gagacggagucuugcugugucaccaggcuggagugcaauggcgugaucucagcucaaugcaaccuccgccuccuggauucaagcgauucuccugccuc

SEQ ID NO: 4151706 - RNA, 68 nt, Human
gagacggguagaucaccugaggucaagaauucaagaccagccuggccaacauggugaaaccccgucuc

SEQ ID NO: 4151707 - RNA, 68 nt, Human
gagacggguggaucacuugaggucaggaguuugagaccagccugaccaacauggugaaaccuugucuc

SEQ ID NO: 4151708 - RNA, 70 nt, Human
gagacucuuaagccaguggccuuccuguguuugucaaacuaaacuuuggauugugauugugccgaguuuc

SEQ ID NO: 4151709 - RNA, 90 nt, Human
gagacucuugggucagaggcaaagaacuuuauuacagcaauagcaguagcuagagcauuugcuuuaucuuguacugauucucugagucuc

SEQ ID NO: 4151710 - RNA, 61 nt, Human
gagacucuuucguuuccugguucucacacguggaauuuggaucuuugauagaguaggucuc

SEQ ID NO: 4151711 - RNA, 89 nt, Human
gagacucuuucuauuauuauucacuugacuuugucauuugugcugacauacagccaaagaucagugugcaaguuauuaaagagaguuuc

SEQ ID NO: 4151712 - RNA, 72 nt, Human
gagacugaaacugaggaaguaaaauuccuuggaguaugaaaauaacagggaguuuuuguuccucuagguuuc

SEQ ID NO: 4151713 - RNA, 99 nt, Human
gagacugaggcaggacaaucacuuagaacccaggaaguggagugagcagagaucacgcuacugugcuccagccuaggugauagagcgagucucggucuc

SEQ ID NO: 4151714 - RNA, 82 nt, Human
gagacuuaagacagacuuugaucuggauguugauaucacauugguucauagacaucgguucaaaacucuguaugaagcuuuc

SEQ ID NO: 4151715 - RNA, 61 nt, Human
gagacuuaugaggccucagagaaacauguuucagacagaggagcucgugcagaucgguuuc

SEQ ID NO: 4151716 - RNA, 68 nt, Human
gagacuucuucccagcuucccucacccuggugcuccucaggagaggccaaaaugagaagagaggucuc

SEQ ID NO: 4151717 - RNA, 61 nt, Human
gagacuuguacaaagauuucacagcuccccuuuugggauggauucuucuuuguacuaucuc

SEQ ID NO: 4151718 - RNA, 61 nt, Human
gagacuuuuuaaucacuaggaaugcuuucacauuugcauuuucgguuuaagaaaaaguuuc

SEQ ID NO: 4151719 - RNA, 129 nt, Human
gagagaaaaggagaggauaaugagugaaaugcaaugcagcaccuccuuggaacacacaguuacaauucaguucacagggcacacuggcucaccguauuuuuaacuaguuucucuccccaccuccuuuuu

SEQ ID NO: 4151720 - RNA, 119 nt, Human
gagagaaagauuuguccagggaauauagaaaauacugaguuagaguuaauuuccuaacacaugacuuguguucgauaaagguuuaaaguacuuuuuguuuggauuucgucuguucuuuc

SEQ ID NO: 4151721 - RNA, 75 nt, Human
gagagaaugaaaugaauggcuaucggauuauuaggaucuuuuuuaaacacccaagucauuucuuucuaucugcuc

SEQ ID NO: 4151722 - RNA, 65 nt, Human
gagagaaugugguauuuuaguuuaaguuagaaagaaagcacuuacuuuaggaaaccacuuuccuu

SEQ ID NO: 4151723 - RNA, 67 nt, Human
gagagaauuagggcguaauucagacaauugaaugcauacuuucuggagcuacaguccugaaccucuu

SEQ ID NO: 4151724 - RNA, 95 nt, Human
gagagaauucaaaguucgaaauuuagggagauggggcagaguagcuaauuucuggccaaaacaucuuuuuauauuucuuagcacagaaaucucuc

SEQ ID NO: 4151725 - RNA, 97 nt, Human
gacucaagcccaguagacuuuccuuugucccucuguguugggcaugccucagccuccugaaucagccccuggagggcauugaggcuggcuugauguc

SEQ ID NO: 4151726 - RNA, 73 nt, Human
gacucagguauaaaagcuagguagucucaguaaaaauaauugggccaaauagcuauuuacuacccaugagauc

SEQ ID NO: 4151727 - RNA, 60 nt, Human
gacucagugguugagagccugggccuccuagccagaggaccuggcuuugaaucuugacuc

SEQ ID NO: 4151728 - RNA, 85 nt, Human
gagagcagacacugccuucuuugaaguuccccuggaagaggccagacuuuuccacucugacauucagugagcacuguugcuacuc

SEQ ID NO: 4151729 - RNA, 84 nt, Human
gagagcaguagcagacuucuccagacugccugguaacucgaaagauuagugggaagacagaggaaaggaugugaacugcaucuc

SEQ ID NO: 4151730 - RNA, 69 nt, Human
gagagcccaucuuagcauagacccucugcccauguggucgggagggugcugugccaagaugaccuaguc

SEQ ID NO: 4151731 - RNA, 74 nt, Human
gagagcccuccuccagcugaguaagaacacuaugcuuugguuaugguuucaugagaggccgggggagccuuguc

SEQ ID NO: 4151732 - RNA, 72 nt, Human
gagagccuacuucuagggagacaaccugucugauacaguuagagcauccagaaaacucucagaagagcucuc

SEQ ID NO: 4151733 - RNA, 59 nt, Human
gagagccucugugacucacaggucacacauccgugaagcuguccuugauaggggcacuc

SEQ ID NO: 4151734 - RNA, 56 nt, Human
gagagccuggagguucugcugaagcaagucguugcuuucuagaaugacugguucuu

SEQ ID NO: 4151735 - RNA, 103 nt, Human
gagagcuauaaauucuuagcaguuuuuaaguuugaaaauaccuuuugugauaccuuaauuauagcauuuauuccagauuuggagaauggaguuugaaguuuuc

SEQ ID NO: 4151736 - RNA, 57 nt, Human
gagagcugcaacuucauaggccuucaggaguggcccugagguggguaagcaguucuc

SEQ ID NO: 4151737 - RNA, 56 nt, Human
gagagcuggauccugauucgucuuugagcuccucaaaggaacaaggcuucagccuc

SEQ ID NO: 4151738 - RNA, 63 nt, Human
gagagcugggcaugugaccaacagaacugcacauguguucugcgggcugucugccuuuuucuc

SEQ ID NO: 4151739 - RNA, 56 nt, Human
gagagcuggguucaaguagcugacaaaaugcagaaugagauuuguaacuagcucuu

SEQ ID NO: 4151740 - RNA, 79 nt, Human
gagagcuguggucaggaaguggcauuggagaauaaagagaggcacagauucucccucccaaccuugauaaacagaguuu

SEQ ID NO: 4151741 - RNA, 62 nt, Human
gagaggaaacugauguuuuuuacaauggccaacuguaugucuaaauuuucaguucuccuuuu

SEQ ID NO: 4151742 - RNA, 57 nt, Human
gagaggaaagaaccaaugacccaacucaaagcagucaggcagcaggaguuuccucuu

SEQ ID NO: 4151743 - RNA, 61 nt, Human
gagaggaaggaugcauauccaaagauuuuauguuuaucuugaggguucuaucuuguuucuc

SEQ ID NO: 4151744 - RNA, 81 nt, Human
gagaggaaguggagagcccuggaggucucacaacuucuauuuggaauuaacagauccacacagggcaucuugacucuucuc

SEQ ID NO: 4151745 - RNA, 56 nt, Human
gagaggagaagccugcgcuucagcucgugggccuuuuucuguagcuucuccuucuc

SEQ ID NO: 4151746 - RNA, 62 nt, Human
gagaggagcccugaggugaaggacugggaaaauguacagaaaaucucacaucagcuccuagc

SEQ ID NO: 4151747 - RNA, 71 nt, Human
gagaggaugggcugcuguggaugcaggaccucaggaaagguugaggcugagccacuggcagagcgcugcuc

SEQ ID NO: 4151748 - RNA, 84 nt, Human
gagaggcaaagauugugucuuguuugugucugucagaggccuagcaaagugccuagcacagagaagauuucaauuaacacuuuc

SEQ ID NO: 4151749 - RNA, 83 nt, Human
gagaggcagguuugaaaucugucccacuuuagcugagccacuuggggcagguuauaggacagauuuguuauacuccagcucuc

SEQ ID NO: 4151750 - RNA, 73 nt, Human
gagaggcauuauugagggagcagcugaaauuuauauucccgaucaguggcagcauucacaagugaugucucuc

SEQ ID NO: 4151751 - RNA, 58 nt, Human
gagaggccaaaaucccugccccauugcccccagcuggcagggugggguugguuuucuc

SEQ ID NO: 4151752 - RNA, 56 nt, Human
gagaggcuccgccacugcucagggucaaaagcccugcgcuagaacccaagucucuc

SEQ ID NO: 4151753 - RNA, 68 nt, Human
gagaggcugugugccauuguugcuagaggauugaaaaguauuucacacaggcugcgcauaagcuucuc

SEQ ID NO: 4151754 - RNA, 58 nt, Human
gagaggcuuaagggcugugaaggaaacaccugaaauuccauaauagcuagugccuuuc

SEQ ID NO: 4151755 - RNA, 59 nt, Human
gagaggcuuggaggugcaagguuugaaauugcuuaaaagcugaauauguccaucuucuu

SEQ ID NO: 4151756 - RNA, 57 nt, Human
gagaggcuuggccucaguucuguaggcaucuggggagucauugaagucaggccccuc

SEQ ID NO: 4151757 - RNA, 55 nt, Human
gagagggagccagccaggaaccgggaaacuugccucugcucuuggauucccucuc

SEQ ID NO: 4151758 - RNA, 68 nt, Human
gagagggaggaagggaggaagugaagaaggaaagagaaagaacuuuuaucagccauuccuuaccuuuc

SEQ ID NO: 4151759 - RNA, 63 nt, Human
gagagggagguaggcagggcacccuggaccuucuggcaccuuccuucuugccugcacccucuc

SEQ ID NO: 4151760 - RNA, 58 nt, Human
gagagggcaggccaucacccgaggucacacagaaaacccacaguggcagccccuucuc

SEQ ID NO: 4151761 - RNA, 90 nt, Human
gagaggggaggacagagggaaggagaguuguagcugaacaaaagagccaugaaaugcuuagcuguucucucuuugccauacucccucauc

SEQ ID NO: 4151762 - RNA, 78 nt, Human
gagaggguccccaaaagacaggugucugcggcccuuccagcugucggagugggagggacgggcacggagggcccucuu

SEQ ID NO: 4151763 - RNA, 59 nt, Human
gagagggugggaugaggaggaagagaaaggucuugaacguuuauucagccuacccucuu

SEQ ID NO: 4151764 - RNA, 63 nt, Human
gagagguguggcccaaagcacugcagccauuuugaaugccagagcuuucugucacauuaguuc

SEQ ID NO: 4151765 - RNA, 61 nt, Human
gagagguuccucccugcuuuacggccuggcugucagcuuuuuaguucaugagggauuucuc

SEQ ID NO: 4151766 - RNA, 79 nt, Human
gagagguugcuggaagcuaugguccaguucuauuuuuauauauggucugaccauggucuauuuagauauucagccucuc

SEQ ID NO: 4151767 - RNA, 94 nt, Human
gagaguaaaauucuacuguagagauuaacucaugguuuuaccgucaggaaaacugguaguuuugaguuaaucucuacgauagaauuucuuucuc

SEQ ID NO: 4151768 - RNA, 90 nt, Human
gagaguagaucuuauagaaguggcagcucagccuucccacuccuugacccuucagaggcccagggcugcucucugaauuuccccacucuc

SEQ ID NO: 4151769 - RNA, 61 nt, Human
gagaguagcagcaggaagcccuggcuugcagaccuaagcuggggcuccagcugugauucuu

SEQ ID NO: 4151770 - RNA, 75 nt, Human
gagagucagaagaccagggguugaguccuagcucugucccugacuugcuaggucacuguuggugggucuggccuc

SEQ ID NO: 4151771 - RNA, 61 nt, Human
gagagucgccugcacaugucaggguuagccagggagccauggcaggaaccaggaggcucuc

SEQ ID NO: 4151772 - RNA, 77 nt, Human
gagagugacagaagcagccgucacagauaggagcucucauuccucaugcucuuugaauguuucuucugaagucucuc

SEQ ID NO: 4151773 - RNA, 67 nt, Human
gagagugagggagacgcucaagacagauucucauauuuuaauaucugaagcaauauccccucacuuc

SEQ ID NO: 4151774 - RNA, 74 nt, Human
gagagugagugguggaguuuggguuuugaacacaacguguugucuucagggccugagcuuuuaauuaccaccuu

SEQ ID NO: 4151775 - RNA, 93 nt, Human
gagagugccugagggaucuauuuugggaccgcugucacuuggcucuucugcuaauaagcuuccagugugguggcccuccuucaggcauguuuc

SEQ ID NO: 4151776 - RNA, 71 nt, Human
gagagugcucacugcagucuucaucaaccaacuucuaagugggugucaaugaggagcagccucacgcuuuu

SEQ ID NO: 4151777 - RNA, 89 nt, Human
gagaguggaggcgugcggacauggguugcucaccuggcacuguugcagccacauugccgccacccuuaucccaugcuucucaaacccuc

SEQ ID NO: 4151778 - RNA, 56 nt, Human
gagaguguggagagguaguaguguggcuaacccagugcugaaucugccauauuuuc

SEQ ID NO: 4151779 - RNA, 77 nt, Human
gagagugugggaugcuguauuuaaggggaagucugaagagggacuugcuguuuuacuuacaagcucucucacuacuc

SEQ ID NO: 4151780 - RNA, 81 nt, Human
gagaguguuuccacugcucauuccacaggcaagccacagauccuggccacuccuugccuuggaggcaguacagacacauuc

SEQ ID NO: 4151781 - RNA, 63 nt, Human
gagaguuccacucauggcuucagggucaaccaacuuguugacccugagagcugaauggcuuuc

SEQ ID NO: 4151782 - RNA, 63 nt, Human
gagaguuccaguaaguggauucaggccuuuccuuuaggcccuaaguccugcuucugaacacuu

SEQ ID NO: 4151783 - RNA, 73 nt, Human
gagaguuugggauaagacagggacagggcacaguuaguugucagcuguuaucacugucuguccauggauuuuc

SEQ ID NO: 4151784 - RNA, 74 nt, Human
gagaguuuuuuacacuaugaaugagaauauaucuaguaaguaguucuggguauguuguggccugaauaacuguc

SEQ ID NO: 4151785 - RNA, 89 nt, Human
gagauaauuccagcucauauuuuaugugcagugccauacuauauuuuuaaguacaaugcauauauugauggguaaucaugguuuuucuc

SEQ ID NO: 4151786 - RNA, 92 nt, Human
gagauacaaucccaagguagccucuugagaugaacauggauaauugcuccaauguuauuaucuagaggcaaggaccuugagaaaugagucuu

SEQ ID NO: 4151787 - RNA, 68 nt, Human
gagauacaugcaucagccaguggcaaaggcuguauccagcuuccagcaaacacuggcugcuuugccuc

SEQ ID NO: 4151788 - RNA, 62 nt, Human
gagauacauuugugugcauguauguguacgugugugugcauguaugcauauauauguauuuu

SEQ ID NO: 4151789 - RNA, 83 nt, Human
gagauacauuuuuaaaccuaucuaagaaauagcccugauauugaaauggcuucuguggaauagguuugacagguguaagucuu

SEQ ID NO: 4151790 - RNA, 91 nt, Human
gagauacuaguaaguuaaaaacacuugauaggucaaaucagucugaacuuucauauugguagaaguaugaagugcuaaauaacuaaauuuc

SEQ ID NO: 4151791 - RNA, 75 nt, Human
gagauacugauuuuaauaagauccauuuggugccuuaaucaccaaaucucggacaggauuaaguauagauaucuu

SEQ ID NO: 4151792 - RNA, 65 nt, Human
gagauagcacucccacaccugcugacuguugacucugugugggcagggcaugaggugugcuucuc

SEQ ID NO: 4151793 - RNA, 66 nt, Human
gagauagugcuggcaggauagaagucuaaucaugaaaaugacauaccuuugcuuuugccauaucuu

SEQ ID NO: 4151794 - RNA, 90 nt, Human
gagauauguagggcaguuuagcacaacaucuggcaccugguaagcucuugguaaauguugauuguggcuauuuuugucccugguguguuc

SEQ ID NO: 4151795 - RNA, 60 nt, Human
gagauauuaggaggauucauaaugcacauggaaaugucaacuaugguauucugauguuuc

SEQ ID NO: 4151796 - RNA, 64 nt, Human
gagauauuuuuaaguguaauugaauuucauaaauaugacauuugguaacacuugagcauguuuu

SEQ ID NO: 4151797 - RNA, 90 nt, Human
gagaucaagguucauguuuucguuauucaauacuuuaucaccaggacuccccacagugaugaauuaguaacaaaugaggaaucuggccuc

SEQ ID NO: 4151798 - RNA, 75 nt, Human
gagaucauaauaauagcaguagcugccacugaggccuggcccugugccagaugcugcuuuguuuugcaugguuuc

SEQ ID NO: 4151799 - RNA, 56 nt, Human
gagauccccacaggagaagagcgggcuccgcauuccugcuuuuccccuuuggacuc

SEQ ID NO: 4151800 - RNA, 121 nt, Human
gacuccaguuuccaucccaggcccuuggggcucacauccuucuccaaaacuggcucccuggcaaggccaggccaggccaggcaggggaaggggcagucugggcccauaacucagccaaguc

SEQ ID NO: 4151801 - RNA, 70 nt, Human
gacucccgcggcuucccagaaugagggcuuugcagagcccucucuguaggcaaguacuuggcaggggguc

SEQ ID NO: 4151802 - RNA, 69 nt, Human
gagagagcauuuucaucguggcagaaauccuauuugcaacauugcccuggacaaugaauguguucucuu

SEQ ID NO: 4151803 - RNA, 58 nt, Human
gagagagcuaacagaagagcaaauguuuauugagugcucuauguguuauagcuguuuu

SEQ ID NO: 4151804 - RNA, 84 nt, Human
gagagagggagagaugguacagagaagguuacauaugaacacggagauucuguagcacuuuuguauucuccuuggaguacucuc

SEQ ID NO: 4151805 - RNA, 71 nt, Human
gagagagguggucucugagauuccaggacaaugaugauaauggcaguucugacucaucccaccaccuccuc

SEQ ID NO: 4151806 - RNA, 55 nt, Human
gagagauuacaguaaucucuguucacuggggcagcagaaaauaccuguaacucuu

SEQ ID NO: 4151807 - RNA, 106 nt, Human
gagagcaacugagacgggagggcuggugacagaagugccauacugugguccaccaaaaggugggaaacugcaguuccugccaagcccuuauccuguaguuccucuc

SEQ ID NO: 4151808 - RNA, 99 nt, Human
gagagcaagcuaguggauuugccucucagagucuacacagccaagugucacaacuuagagggugagugccuuugauugggcauguuccuggccagccuc

SEQ ID NO: 4151809 - RNA, 88 nt, Human
gagagcagaggguaggucagggaucugggcucagcuggagggagguccuccaagcauguggucaggagcccgccucucuccagcucuu

SEQ ID NO: 4151810 - RNA, 84 nt, Human
gagagccaaagguuuagggguucuauguuuaaguuucauccuuuuagcagagaucauagaacaccuaccuaccugucugcccuc

SEQ ID NO: 4151811 - RNA, 73 nt, Human
gagagccauuucauaaguugguguugacuuucucacaaaacugacaaaaguuggacgauuugugaaggcuuuc

SEQ ID NO: 4151812 - RNA, 68 nt, Human
gagagccgggaggggagugggcaggccuauuugucauagugcuuuggagcuuucuccuuucaucuuuu

SEQ ID NO: 4151813 - RNA, 71 nt, Human
gagccuagagacauaaguucaagaacaaagucuuugaccacaacaaguuuuugagcauguacuuugugcuu

SEQ ID NO: 4151814 - RNA, 90 nt, Human
gagccuaggaauugagcuucuuuuccuguggcucauccaugggucagacaccauggugaggaggaggaagagugcugagugucugagcuc

SEQ ID NO: 4151815 - RNA, 75 nt, Human
gagccucuguggcagggcucugcuguaguccuagugguagccauuggaacagugggccuugccugugcaggguuc

SEQ ID NO: 4151816 - RNA, 56 nt, Human
gagccugcgagggaguaaggcagagagcacuauuuugcagauuugaaagcaggcuc

SEQ ID NO: 4151817 - RNA, 72 nt, Human
gagccuggagucagcaagaugaaucagcaggagcccgaaggcccugccaucagccuugcugcagccaagcuc

SEQ ID NO: 4151818 - RNA, 59 nt, Human
gagccugggccugcacuaggcacagaguacagcccuuguccuugggcagugcccagcuu

SEQ ID NO: 4151819 - RNA, 75 nt, Human
gagccugucaaccaaggacagcuagugaugccacaaauguggcuguucucacuucccugucugugcagacaucuc

SEQ ID NO: 4151820 - RNA, 84 nt, Human
gagccuuacugucuucaguggcaaauggaucugucaacaggcuccauugccugggguuguugcugcugagauuaagggaagcuc

SEQ ID NO: 4151821 - RNA, 64 nt, Human
gagccuuaggaggucugcuuaucucucacagcaaugagcuggcagaggauggggacccaggcuc

SEQ ID NO: 4151822 - RNA, 62 nt, Human
gagccuucagugauuacccagaguuaagagaaugauuuaguuucuggcacacugagaagcuc

SEQ ID NO: 4151823 - RNA, 82 nt, Human
gagccuugauuuccucaucuguaaaacggggcugggaaggccuagcucccaggcagucaugaggacagaagagaacaggcuc

SEQ ID NO: 4151824 - RNA, 93 nt, Human
gagccuuggggugagacuucauugguucaagauuguucucuaccacuuuacacauucuuggacuuccaggaaguauuuaaccuacuaaggcuc

SEQ ID NO: 4151825 - RNA, 59 nt, Human
gagccuuucuugguuugucaggcagauacaccucuggccugauuuugcuaagagaauuc

SEQ ID NO: 4151826 - RNA, 90 nt, Human
gagcgagaguucagaacacacugggggaaacaagaugguccauuugcuaagaaacuuguggaacucccaggugagaaggggucucuguuu

SEQ ID NO: 4151827 - RNA, 66 nt, Human
gagcggaggcuuggaggccagcccugcuccucuuucugccugaacugggccucucaagccucccuu

SEQ ID NO: 4151828 - RNA, 73 nt, Human
gagcggcuagggcuucaggugugaggcaggagggguggggccagaacugcccacaccugagcugggccggcuc

SEQ ID NO: 4151829 - RNA, 61 nt, Human
gagcggugggaagcccaagagucacuguaguuucaccaggacacuggcuugucccgccauc

SEQ ID NO: 4151830 - RNA, 84 nt, Human
gagcuaacaucaaagggggagagguguuuggaugcuuagagagccagccuccgcacguuucucauccuccauugaaugcagcuc

SEQ ID NO: 4151831 - RNA, 62 nt, Human
gagcuacaaauccacaaggcacuuuauggcaauuccaagaaggggcugaaagguuuguguuc

SEQ ID NO: 4151832 - RNA, 62 nt, Human
gagcuacaacucagaguuccugugcauagugguuccauugaauucacagaucugagaaguuu

SEQ ID NO: 4151833 - RNA, 116 nt, Human
gagcuacaugguggcugagaaccuguuggggcagggguggugcuaucuccacagucccaccuggagacuguguggaccacucugaggcucaggagggaacaaaagcugccaagcuc

SEQ ID NO: 4151834 - RNA, 60 nt, Human
gagcuaggcuagggggagucgcugauucugcuuuucucugugguccccugagucuggcuu

SEQ ID NO: 4151835 - RNA, 55 nt, Human
gagcuagucaucugguugaacaagccugaaaggcagaagucauccaugacagcuc

SEQ ID NO: 4151836 - RNA, 65 nt, Human
gagcuauuggcagcauccaagucucgggauccaguuguuccugagaccaaguugcagccaugcuu

SEQ ID NO: 4151837 - RNA, 76 nt, Human
gagcucaaauuuuccagugagcaaauguagaauuuuaauuagcuucgaguccauuucucugcuggaaauagaucuc

SEQ ID NO: 4151838 - RNA, 82 nt, Human
gagcucaagacaaaugaaaacggaccagagcuauuccaccacguagugaaauccuggauuuuucaagucauguccugagguc

SEQ ID NO: 4151839 - RNA, 99 nt, Human
gagcucaccuccagcagaggaagagacaaauggugccgaccugcuccacuccugggacuggcagagguuggacaccauuccuuucucagagaggugcuc

SEQ ID NO: 4151840 - RNA, 57 nt, Human
gagcucagggcauugagcaagaaaacauacuuuuguaacaguagugcucugagacuc

SEQ ID NO: 4151841 - RNA, 69 nt, Human
gagcucagguggucaaaacaauucuaaugaaguugaguuucuacuucaauuguuuuguaucugagacuc

SEQ ID NO: 4151842 - RNA, 97 nt, Human
gagcucauugccuuccaaggccaguuucuucgccuaaugaaucacugcaugagggcgugacuagggcgaggacugacucugggcaggccuggggcuc

SEQ ID NO: 4151843 - RNA, 72 nt, Human
gagcucccguuagugauuauaaaacaguuuuuuucucuuugaaaagcagaaaaugaucacaaccuugaguuc

SEQ ID NO: 4151844 - RNA, 96 nt, Human
gagcucccucacuggcccaccaggcagcucugauuuaugucugauccucuucagauguccagcgucuggcugccuguggccuggagggacccccuc

SEQ ID NO: 4151845 - RNA, 119 nt, Human
gagcucgauagagagggagcagaggguuagcagauuuggaaaaugagaugaaaugaaguucaaauuaggaauuuguacaaauuuauguuaguucuucuguuacuauuacuagugggcuu

SEQ ID NO: 4151846 - RNA, 77 nt, Human
gagcucgcccccucaucugugagugcagaagccuggaagccugagcucaucugccuggaugauggcagggcgagcuc

SEQ ID NO: 4151847 - RNA, 108 nt, Human
gagcucuagaacuuccuucgugguacucaaggcuuccugggaauuccuucgucguucucaaggcuguccuggagcuuccuucaugguacccagggcuuccuggagcuu

SEQ ID NO: 4151848 - RNA, 59 nt, Human
gagcucuauguggcuggcaugucugccucgcucgggggacauugcuguucagugggcuc

SEQ ID NO: 4151849 - RNA, 129 nt, Human
gagcucuccagaugaugcuaaucugcagccagggcugagaaccacuggaugagaugagcucucaggacccugacaucucaggucugugguucacuaccccuggugcacaauaacaucuucugggagcuu

SEQ ID NO: 4151850 - RNA, 80 nt, Human
gagcucuuuuccaugucaauaaauauaacugcaugcuaucauuuuuaguggcugcaauauguugcauuguauggaugcuc

SEQ ID NO: 4151851 - RNA, 63 nt, Human
gagcugaagaugucagaaccguucagaaauacugccuggggaaaguucuugguucuucggcuu

SEQ ID NO: 4151852 - RNA, 103 nt, Human
gagcugaggaucuggacaguccaaaaagugcagcccaagagacucuguugaccucaaucacagauuuuucuccagggcuuuguguuuuuguccucuuuggcuu

SEQ ID NO: 4151853 - RNA, 61 nt, Human
gagcugaggcucaggcuggcguuaucuggcugcagcagccgccgccugcaggccucggguc

SEQ ID NO: 4151854 - RNA, 56 nt, Human
gagcugaguagaggcugcucccuucaggacaagguguacggucuccaacucaguuc

SEQ ID NO: 4151855 - RNA, 102 nt, Human
gagcugcagagugggaaacuaugggaugggcugggaauacacaggggaggaugccuccuuaaaguaggcuucggacuauguauauggauccccuuugggcuu

SEQ ID NO: 4151856 - RNA, 71 nt, Human
gagcugcauucaacauauucugaguaaaauaggccaauggccauuuuaaagacauuauaugugaaucacuc

SEQ ID NO: 4151857 - RNA, 84 nt, Human
gagcugcauucaauggaggaugagaaacgugcggaggcuggcucucuaagcauccaaacaccucucccccuuugauguuagcuc

SEQ ID NO: 4151858 - RNA, 55 nt, Human
gagcugcugcaguggucuugcuggaaaaccccucuagcaccuguguagaagcauc

SEQ ID NO: 4151859 - RNA, 60 nt, Human
gagcugcuggaaagugagcugucgccgauggcacucauaccagcuccuguucagcagcuc

SEQ ID NO: 4151860 - RNA, 93 nt, Human
gagcugcugugaaaauuggagcucagaggaggcagcuuaacucaguagcagagcagaaagcacugauaaguugcuugcucucaauggcggcuc

SEQ ID NO: 4151861 - RNA, 55 nt, Human
gagcugcuuuguuucagauuacauuuguaccucugaaaucuguaagcacuagcuc

SEQ ID NO: 4151862 - RNA, 73 nt, Human
gagcuggagccuccaugcccaacucugcucugcucuucuauuuccugacagcagcuaaggcauguuccuguuc

SEQ ID NO: 4151863 - RNA, 57 nt, Human
gagcuggcaagucuguccuuggcaguugccaagagguggguuggacagauacagcuu

SEQ ID NO: 4151864 - RNA, 58 nt, Human
gagcuggcuccgccaugcugcuccccacucaugcagagcaagcauugcugguuagguc

SEQ ID NO: 4151865 - RNA, 59 nt, Human
gagcugggacuuggaauccacagaggugaaacgguggggcaaauccaaucacucggcuu

SEQ ID NO: 4151866 - RNA, 66 nt, Human
gagcugggagcugggauuuggaucugcagcugggcgacuccgaagcuuuugcucuuucuaaugcuc

SEQ ID NO: 4151867 - RNA, 59 nt, Human
gagcugggaggacugggaacuugggaagccagggugaauuuucucauuccuuuccacuu

SEQ ID NO: 4151868 - RNA, 75 nt, Human
gagcugggaguuauagcauguuuuuaaauuguuuaaaguaaagcuuugcuguuaacaagcacucaucccuggcuc

SEQ ID NO: 4151869 - RNA, 56 nt, Human
gagcugggauuugaaccugggacuuccaccuuuguagucccuguuucucccggcuu

SEQ ID NO: 4151870 - RNA, 56 nt, Human
gagcugggcacacgccacuugacuguguggaagaggguggaugucugcaccagcuc

SEQ ID NO: 4151871 - RNA, 64 nt, Human
gagcugggcucugcggugucgcucucugggacuggagcggugaggacgcagaagccccaaccuc

SEQ ID NO: 4151872 - RNA, 58 nt, Human
gagcugucuugaaaauaagcuggagggauuaucacucucucugggucgagacagacuu

SEQ ID NO: 4151873 - RNA, 87 nt, Human
gagcugugcuauacuaaaaaguaggagauauauuuguuuauucagggggaggaaaaugucuuucuugguucugguuugcaauggcuc

SEQ ID NO: 4151874 - RNA, 59 nt, Human
gagcuguuuuuuaaaguuaggacccagagaaaucugacaucuacuacagaaagcagcuu

SEQ ID NO: 4151875 - RNA, 77 nt, Human
gagcuuauuucagcccuacuacuuggccaucugcagaccuaagagagagcaagugcaaauggguugagagaaagguc

SEQ ID NO: 4151876 - RNA, 87 nt, Human
gagcuuccauuacucauucgccuugcccaaggccucagcaaccgacguucgaaagccaggagaaaaggcgaaugauaaagggcgcuc

SEQ ID NO: 4151877 - RNA, 62 nt, Human
gaugaguccuggaacccugaaugcuuucuccaaagcauacucugguuuucagagauuacauu

SEQ ID NO: 4151878 - RNA, 55 nt, Human
gaugaguuugccuggccugcagcugggaaaggcugguuguuagggaagauucauc

SEQ ID NO: 4151879 - RNA, 92 nt, Human
gaugauagaauacuugguuacuguguugguuuauauauaugucuuuuaaguuuucauaagugauauuuagcuauagagcuuauuuuauuauu

SEQ ID NO: 4151880 - RNA, 65 nt, Human
gaugauauauauggaaagccuagugcaaaaacuggcaccuagcagguccuucaugaauauucauc

SEQ ID NO: 4151881 - RNA, 117 nt, Human
gaugaucuauaagccuggaauaggacaguuuuggaccaugguagggaacuuggaaauguuaguuggucuaaauuccugguuauggaauuaaaacaaguuguaucuacuuuaguuauu

SEQ ID NO: 4151882 - RNA, 76 nt, Human
gaugaugaggccagaccacucugcauggauccacagcagguacgcaauggaaugaauguggcuggcugccauuauu

SEQ ID NO: 4151883 - RNA, 78 nt, Human
gaugaugccuccccaaaccauggaguaaguucacaugcuggagcauguuaacagcugcuucuggugucaggcauuguu

SEQ ID NO: 4151884 - RNA, 56 nt, Human
gaugaugugauuugcauuucagaaggcugucucugcuccugaauuaucucaucauu

SEQ ID NO: 4151885 - RNA, 126 nt, Human
gaugauuaaacaaaauguagcauuuaguggugccccuguuauuucaugugugugcacuacaccuaccugagugcacacacaugaaguagcaugaacagcagcaagguccauuucacccucaucauc

SEQ ID NO: 4151886 - RNA, 64 nt, Human
gaugauuguugcauugcugcuuuauggaggagggaccagagaggcaggcaguucagcuguuguu

SEQ ID NO: 4151887 - RNA, 55 nt, Human
gaugcaaagcauuuuuguguguguguaugugugugugcaagaaugucuguguauc

SEQ ID NO: 4151888 - RNA, 60 nt, Human
gaugcaauuuggggaagaaagagacagcacgagugggucuuuucuguaacagauugcauu

SEQ ID NO: 4151889 - RNA, 77 nt, Human
gaugcagccuccaggccuggaccaugccagggcugggagucuuuucuccaggcaugucccaagccggauggcucauc

SEQ ID NO: 4151890 - RNA, 127 nt, Human
gaugcaggcacaguauuggcuacagagacauagcaggugguaaucaguaguuguucaggcaucaagggacagacauuuauugaacaccuagcaagagucuuaccuguugaacugacugccccugauc

SEQ ID NO: 4151891 - RNA, 60 nt, Human
gaugcaggcaugcuucugucugggcaggucugucugcuugugugggaguguguguguguc

SEQ ID NO: 4151892 - RNA, 76 nt, Human
gaugcagggucuccgugugacgaaugaggaggaaaaaggcaagacacucuuucucacaugaaugacugaguaauuc

SEQ ID NO: 4151893 - RNA, 58 nt, Human
gaugcauccuuucugucuucucugcuaaacagugagcuccaggaagaaaaggaucauc

SEQ ID NO: 4151894 - RNA, 58 nt, Human
gaugcaugcagaagagugaauacuugcuguggugaguuuucacauuucuguagugauu

SEQ ID NO: 4151895 - RNA, 80 nt, Human
gaugccacccccgugagcagcuggggccugugacgaugaccgggaacacgcacucccugccucagcuuuugguggccauc

SEQ ID NO: 4151896 - RNA, 61 nt, Human
gaugccagcuggcccuuugguagccuugagggggacugaggucacucacggccaguguauc

SEQ ID NO: 4151897 - RNA, 80 nt, Human
gaugccauuacaaaugccuguggagauauuuaaggagccagaugcuacuguuucaugucuuccgcagcucugaauguguc

SEQ ID NO: 4151898 - RNA, 66 nt, Human
gaugccccagaguggacucaggaggauggcauguguuagcauacugagcacagcucugugggccuc

SEQ ID NO: 4151899 - RNA, 93 nt, Human
gaugccuggcucuagggugugcggcagggcuacaggacugagaguguccaacucucuuggcccugccgcacuauccucagguuaacugguguu

SEQ ID NO: 4151900 - RNA, 67 nt, Human
gaugcgagcuguccugacccaggcacuucugcaacccagcagagagcccgggccagggcacaguguc

SEQ ID NO: 4151901 - RNA, 70 nt, Human
gaugcuccaggugucuccuaugagcacagcgaugccauuugccaaucuccuggugacaugccugagcauc

SEQ ID NO: 4151902 - RNA, 58 nt, Human
gaugcucccuuugaaugucaguuaccagcugcuuauggaagcuaagacaagggacauc

SEQ ID NO: 4151903 - RNA, 80 nt, Human
gaugcugaagaaugagcucaaagaucuuaagccccagaagcauggggaguguggguuuguaguuaaguucuuagaguguu

SEQ ID NO: 4151904 - RNA, 61 nt, Human
gaugcugagagguggagggaacccuuaagcuuuggacaauucucuccuccucucugccuuc

SEQ ID NO: 4151905 - RNA, 74 nt, Human
gaugcuggcucagagaaccuggguaacggaaaggagaggcagcuuuucccacucacugucucugacacaagcuc

SEQ ID NO: 4151906 - RNA, 57 nt, Human
gauggaagaaaaaugcaugucugggagcaaucacacucaagcauacaucuuccuguc

SEQ ID NO: 4151907 - RNA, 68 nt, Human
gauggaaggcugagugcuccccuagaugucuucaggcucuugaggcuugcauucacguggguucccuc

SEQ ID NO: 4151908 - RNA, 128 nt, Human
gauggaaguggcucucaaugggacggggagcuggaaaggggauggaaugggaagauaaucuuccuucuccgaacauccccagcugaacuccucuccaaccguagucuccaaugucuagccgccucuuc

SEQ ID NO: 4151909 - RNA, 55 nt, Human
gauggacagaggaggacagggauuuguagccacuucugcaaucgcucugaccauu

SEQ ID NO: 4151910 - RNA, 70 nt, Human
gauggacgcagccccaacaaaugggacaaggaccacauccggugucccaugaguggcggucaugaucuuc

SEQ ID NO: 4151911 - RNA, 82 nt, Human
gauggagaaagcccuggcggguggagggcccugaggcuccuacugcucccggcucugcgccugcggggacuuugaauucauc

SEQ ID NO: 4151912 - RNA, 73 nt, Human
gauggagaagcccagggcguggccgggcucagaagagcucugucgauuuacgguuacuucuuaggcugccguc

SEQ ID NO: 4151913 - RNA, 61 nt, Human
gauggagaagggaugggauagggagaaagucuguaagcuucuacccucuccugcucauauc

SEQ ID NO: 4151914 - RNA, 70 nt, Human
gauggagacaguuucugggcguucacagguaagcugauacuuugagauucucggagauuaguguucuauc

SEQ ID NO: 4151915 - RNA, 79 nt, Human
gauggagagccagaaaauagaguuucucugaguggcagccccuagacacuugauuuuucugaaagauaggcucuugauc

SEQ ID NO: 4151916 - RNA, 55 nt, Human
gauggagauaggcuccuggguauuuugaauaacaauacaaagagccccucucuuc

SEQ ID NO: 4151917 - RNA, 83 nt, Human
gauggagccaggccuauucacaugacccaggcauaggcaagcccaugauacugacugguucagugaaaggcaugggauccauu

SEQ ID NO: 4151918 - RNA, 64 nt, Human
gauggaggcaggagacagggcaaaccuugggccugggucugcgauuguccaccguggcuuuguc

SEQ ID NO: 4151919 - RNA, 63 nt, Human
gauggagucugaagcugggaacgacccuguccacccccaaguuccuuaagucagacgcuuauc

SEQ ID NO: 4151920 - RNA, 93 nt, Human
gauggauggaaggagaacucugagucugcagacaacuuagaagcauguuguugcuccuuuuugucuguagacagggcauccuguaguucuguc

SEQ ID NO: 4151921 - RNA, 62 nt, Human
gauggaugggcacagggguaggaaugagauuuuccauuccaaaacucuuguguucuuuuuuc

SEQ ID NO: 4151922 - RNA, 75 nt, Human
gauggcaauuguaauuuuguaaagauuuaugaguuguaauuuuguaaagauuuaugaaguucaauuagagccauc

SEQ ID NO: 4151923 - RNA, 126 nt, Human
gauggcagcucugagagagggcuugccuuauauuacaaagucugagaaaugaaaccuacaucguuagccucgagaucuuugucccugaugauauucugcagaugcccucucaaggguaaguccauu

SEQ ID NO: 4151924 - RNA, 67 nt, Human
gauggcaugauggcuuggggugcugugugggcuuauuuagcauuuguucuucaggccaaugcucauu

SEQ ID NO: 4151925 - RNA, 55 nt, Human
gauggccacauacauggcugggguguugaaggucucaaacaugaucugggucauc

SEQ ID NO: 4151926 - RNA, 88 nt, Human
gauggcucgaaccugggaggucaaggcugcagugagcugucauccuugccacugcacuguagcuugggcaacagagcaagagucuguc

SEQ ID NO: 4151927 - RNA, 70 nt, Human
gauggcugaggagagggcggaaguguccgcacgucgggccuccgaggcuucucuuucuccccuggcgguc

SEQ ID NO: 4151928 - RNA, 63 nt, Human
gauggcuggauaguugaagcucucaccauuaagauuuugaaugccucuuuucuccaguccauu

SEQ ID NO: 4151929 - RNA, 92 nt, Human
gaugggaucacucuuucugggcuccuugggagcaagugagaggaagcccuuaccugcaccagcagccuccauaaggaagggagcauccgauc

SEQ ID NO: 4151930 - RNA, 90 nt, Human
gaugggauggguggcgagccccaggcugggccgaccucacacugugcucugugccccugccguggaccaggugagccauacgucgccauc

SEQ ID NO: 4151931 - RNA, 68 nt, Human
gauggggaagggcagcugacagaugcuuaagaaggcuuaaaccauccugcugcugcuguugcuugguc

SEQ ID NO: 4151932 - RNA, 86 nt, Human
gaugggggcuggugaaggccuggugagaugcaacggccaaaccccuuguucugggccagugauuuuuccagcagccagcucccauc

SEQ ID NO: 4151933 - RNA, 67 nt, Human
gaugggguagcccugcccauuuggccugggauugcugccccuguggcucucugcaggguccccacuc

SEQ ID NO: 4151934 - RNA, 129 nt, Human
gaugggguuggggugggagucugugugugaaagcuuguccucuguagcucacuggaucucagcccagacugcuccucagaaucaccuggcagcuuucaaaaaacucugaugucugccccucaccuccuc

SEQ ID NO: 4151935 - RNA, 84 nt, Human
gauggguuggaggaaggauaaccuggauauaaacagauggguuagaagacucaugauguugcuucaggcuuuagcuuccccauu

SEQ ID NO: 4151936 - RNA, 103 nt, Human
gaugguacuggggccagaaacagggggaugacugcauugaaauuuuuugccuugauuucagcaagaaaucuucaguguucucccuggagccugguucaccauc

SEQ ID NO: 4151937 - RNA, 82 nt, Human
gaugguagaaagggcaaggcuuuggagcuugucaugugacaugagcaggcugccuuccaaagccucagucuucucagcuguc

SEQ ID NO: 4151938 - RNA, 75 nt, Human
gaugguagcccagaaagugugugcaguuguuuuuccaggagcauaagcaaauccacacacucugagucuucuauu

SEQ ID NO: 4151939 - RNA, 67 nt, Human
gauggucaggucaucucauggauggaaagagcuuaaaccacccacccauuuuugaaaccuugaccuc

SEQ ID NO: 4151940 - RNA, 77 nt, Human
gauggucucgaacucuugaccuugugauccacccaccuuggccucccaaagugcugggauuacaggcuugagccauc

SEQ ID NO: 4151941 - RNA, 57 nt, Human
gaugguggaggaaucgcugaagagcccaguaccaguucagcaagugucucuacuguc

SEQ ID NO: 4151942 - RNA, 83 nt, Human
gagguggggaagggccugaaaccuucagggcuuuggaagcuggagacaaagaccaugacaggguuucagggccugggcauguc

SEQ ID NO: 4151943 - RNA, 65 nt, Human
gaggugggugcugucaggcagggaaacuaaacaucuuuccuuacucuacuagcucccaggaccuc

SEQ ID NO: 4151944 - RNA, 76 nt, Human
gagguguagccccugccuuugaaccuggagauccugaccaugaucuccuggugcugcuaucagggguagauucuuc

SEQ ID NO: 4151945 - RNA, 58 nt, Human
gaggugugguccucagcccccagcggaugcuuaugugggggugcacgggccacaucuu

SEQ ID NO: 4151946 - RNA, 55 nt, Human
gagguguguuacagauugucauaacugauaaaucaaugacaaauguagccacuuc

SEQ ID NO: 4151947 - RNA, 125 nt, Human
gagguguuagagaagauaauaugauaauaaucaguuacuauaguuuuguuaggagaaccucccucauuuuuuaacuguaccuagauaacgaacuuugucaguuuauuuauuuuuuuuaauuucuu

SEQ ID NO: 4151948 - RNA, 87 nt, Human
gagguucacacugcaaauauuuuuccuuuuggaaaauagcacuuuuacuauucccagcagucagagcuaugugucuuugugaaucuc

SEQ ID NO: 4151949 - RNA, 55 nt, Human
gagguuccccauuguacuggcugauuuucucagacugcacuucaguuggagccuc

SEQ ID NO: 4151950 - RNA, 61 nt, Human
gagguugagaggugucaacgugcuggugguccucgcucgcucucagcgccuccucggccuc

SEQ ID NO: 4151951 - RNA, 74 nt, Human
gauaugccucugagcuguguccugggggcaguguacaaugugcuguacgaauccacacagcuggagcaggauuc

SEQ ID NO: 4151952 - RNA, 55 nt, Human
gauauggcuuggagacaugcacuugacggcagugacaacagcucucagccauguc

SEQ ID NO: 4151953 - RNA, 56 nt, Human
gauaugugaccuccauaugguuucaucuuucugaacacacagggagaccacauguc

SEQ ID NO: 4151954 - RNA, 64 nt, Human
gauauguguuccuuuaguucagaagaucauaucacuuauucugaauuucagagguaacaucauc

SEQ ID NO: 4151955 - RNA, 87 nt, Human
gauauucacucagcaagaaaaccaccucccaucaagcagccuccuggauaauguuuaaugaagaugguuuuucacugcugacauguc

SEQ ID NO: 4151956 - RNA, 77 nt, Human
gauauucagagcuuuauauuuaguaagggauucacuugguuuauauuguccauauuauaauuuagggcuuggauauu

SEQ ID NO: 4151957 - RNA, 65 nt, Human
gaggccucuucuuuguuaaccucuguaccuguguuuugucucugcucguuuucagagaagaccuc

SEQ ID NO: 4151958 - RNA, 56 nt, Human
gaggccugaaaggggaccuauggcugucacugaggccugugugccuucugggccuc

SEQ ID NO: 4151959 - RNA, 62 nt, Human
gaggccuggagaguuggaagauggacucugaggaucaagucuacucuugcuuuccugggcuc

SEQ ID NO: 4151960 - RNA, 55 nt, Human
gaggccuggcugggaggagguggguggaaaguccaaggcuccuccucuaggccuc

SEQ ID NO: 4151961 - RNA, 68 nt, Human
gaggccugugaagggacggaugcugcugcucacucguaacagcuugcugcaccuuaauagcugguuuu

SEQ ID NO: 4151962 - RNA, 81 nt, Human
gaggccuguuucauguuccugaacacaaagggucccgucagauguuucuuuguguuuaaagaggaagugagauucgcucuc

SEQ ID NO: 4151963 - RNA, 72 nt, Human
gaggccuguuuccuuggguugcuuaugaaggaagcagagcaacaaacccuuucagggaaacaauaugcacuc

SEQ ID NO: 4151964 - RNA, 56 nt, Human
gaggcgaggggcugcggcgagucuggcagaggcggugcccggauaccccuggccuc

SEQ ID NO: 4151965 - RNA, 80 nt, Human
gaggcgcuccauugcuggaaggacgcugagagggguucaaacaugggcagauguuccagaaccuuccugcuggaagccuu

SEQ ID NO: 4151966 - RNA, 69 nt, Human
gaggcggaaggguugcuugagcccaggaguucgagaccagccugggcaacauagggagaccccugucuc

SEQ ID NO: 4151967 - RNA, 68 nt, Human
gaggcggagagaacguagaugaccuaaauucuaguccucauuaucugcaguuuguuuucucuugucuc

SEQ ID NO: 4151968 - RNA, 96 nt, Human
gaggcgggaggauugcuugagcccaggcagagguugcagugaaccaagauggcaccacugcacuccagccugggugacagagcaagacccugucuc

SEQ ID NO: 4151969 - RNA, 68 nt, Human
gaggcgggcagaucaccugagaucaggaguucaagaccagccuggccaacauggugaaaccccgucuc

SEQ ID NO: 4151970 - RNA, 68 nt, Human
gaggcgggcagaucaccugaggccgggaguucgagaccggccugaccaacauggugaaacccugucuc

SEQ ID NO: 4151971 - RNA, 68 nt, Human
gaggcgggcggaucauuugaggucaggaguucgagaccagcuugaucuacauagugaaaccccgucuc

SEQ ID NO: 4151972 - RNA, 104 nt, Human
gaggcgggucccgggcccucgcgugucggccacgagggagccgcgcccauaggucuuugagugcagugcgggccggcaggcaacgcugggcccggccuuuccuc

SEQ ID NO: 4151973 - RNA, 59 nt, Human
gaggcggguggaucaccugaggucaggaguucaagaccaacauggugaaaccccgucuc

SEQ ID NO: 4151974 - RNA, 56 nt, Human
gaggcguuuauucucuucacgcugagagcucaguguuuagucaaguaagacgcguu

SEQ ID NO: 4151975 - RNA, 73 nt, Human
gaggcuaaaacauuuaaugguaacugaaauagcacaagaaguuaauaacaguugaaauuagaguccuggcuuc

SEQ ID NO: 4151976 - RNA, 75 nt, Human
gaggcuagaaugauuuggaauguuaggugucucauauaaugagccaaaugcauuuccauauuguucuguguccuc

SEQ ID NO: 4151977 - RNA, 58 nt, Human
gaggcucaccuccccgugaccgugcagcgugcugcugguccugccaacggugccccuc

SEQ ID NO: 4151978 - RNA, 96 nt, Human
gaggcuccgacgcgcaggcgcucuccggcucccguguaggaaccugcagagauccuggacugagcguuugucaccuagcucuguggacggacccuc

SEQ ID NO: 4151979 - RNA, 80 nt, Human
gaggcuccuggaggccauuacgagcucuaaaauacuaugauugcucauguuaguguuucuuagucgguacaaggaguuuc

SEQ ID NO: 4151980 - RNA, 80 nt, Human
gaggcugaagauggagaaggcuggucuuaagucgacaucccaucuugaaguucuugaguaggcacuucucagccagccuu

SEQ ID NO: 4151981 - RNA, 105 nt, Human
gaggcugaaggaggagaaucgcuugaacccgggagguggagguugcagugagccgagaucgcgccacugcacuccagccugggcaacagagcgagacucugucuc

SEQ ID NO: 4151982 - RNA, 58 nt, Human
gaggcugagaacuacaguggccuuuccccaggaaggcuguguucugguucuuagcccc

SEQ ID NO: 4151983 - RNA, 71 nt, Human
gaggcugagccuggaggcuugaaucuggccccagaugaccggucagaagcaggcagauuucagcucauuuc

SEQ ID NO: 4151984 - RNA, 98 nt, Human
gaggcugaggcacugaguguuugagucacuuccuccauggucacaaucuugguugguuggagccagaauuugaacucaggcaaucagucuuuagaguc

SEQ ID NO: 4151985 - RNA, 57 nt, Human
gaggcugcccacaccugcgccgaagggaaacugcucggggcuaggcaggcagaacuc

SEQ ID NO: 4151986 - RNA, 62 nt, Human
gaggcugcucaguagauggagcuuacacaacaaucgcugcgggccuggauugaaguagcuuu

SEQ ID NO: 4151987 - RNA, 62 nt, Human
gaggcugcugagggauggguaggagggcuaccagagccuggcuguccacaucacagagccuc

SEQ ID NO: 4151988 - RNA, 72 nt, Human
gaggcuggagcugggccaggcauuugcuggguccccaggccaucuggcuccaugcuccgcuucuugugccuc

SEQ ID NO: 4151989 - RNA, 59 nt, Human
gaggcuggcagaaaagcacaggaaccuuccucuaggccaagcuugucccugccugcuuu

SEQ ID NO: 4151990 - RNA, 64 nt, Human
gaggcuggcuuaauagggaugggcuuuacacaguguggcucugaauuauuccugagucauucuu

SEQ ID NO: 4151991 - RNA, 66 nt, Human
gaggcugggcauccauccaugagacagauucuccuguuugguuggaaggauggauagcucaggguc

SEQ ID NO: 4151992 - RNA, 87 nt, Human
gaggcuggucugaggcuccaaggaggugcucucagaugacccuugaauuccguucuaagcacaccuccuagagcagacucuugccuu

SEQ ID NO: 4151993 - RNA, 64 nt, Human
gaggcuguagguuggacccuaaucccagagccucauucugauggaggcuucaaccauacaccuu

SEQ ID NO: 4151994 - RNA, 66 nt, Human
gaggcuguuggcugaucugagucauuuucuacauaaaaugcaaacuuggaagcagugaacaacuuu

SEQ ID NO: 4151995 - RNA, 65 nt, Human
gaggcuuagaggcucugucacuugucuaguaucauacagucaagaaauggcagagccaaggcuuc

SEQ ID NO: 4151996 - RNA, 80 nt, Human
gaggcuucauuacguuaagguucagaaaucaauaccccaaaauauggggcuuugacaugcugaauuaaagaagcagccuc

SEQ ID NO: 4151997 - RNA, 67 nt, Human
gaggcuugaugcaugaggcagccuauguuauugaccccaacuaugggccagcaccauguuaagcacc

SEQ ID NO: 4151998 - RNA, 63 nt, Human
gaggcuuuacgucuuccccugggaccagcuuuuagugacaucccaggugcugcgugaagccuc

SEQ ID NO: 4151999 - RNA, 74 nt, Human
gaggcuuucuuguccuuggggugagcuuugauguugaggcacccagggucaccccguaggguucugcaggucuc

SEQ ID NO: 4152000 - RNA, 91 nt, Human
gaggcuuuggaguuagauaaaccuggguaggauucucugccuguuacuagcuauguguuccuucccagguugcuuuacuucucagagccuu

SEQ ID NO: 4152001 - RNA, 86 nt, Human
gagggaaaguuucagaaucccugcuugucuucaaaugucuccuuuugccuccacauuugcuugauuaggauauggaauuuucuuuc

SEQ ID NO: 4152002 - RNA, 126 nt, Human
gagggaagacaucagugaugggagguuuggcagacaacugagccucugcccauccaccaucaggcuguugccgagcaggaaugcaggucaacuguugucagaucuuccaaauuuucuuuuucuuuu

SEQ ID NO: 4152003 - RNA, 56 nt, Human
gagggaaggucacccuuguagccccugucaccugcuaccuugggaggcauucccuu

SEQ ID NO: 4152004 - RNA, 64 nt, Human
gagggacaggaugggucucuuucccuuccucuucucuaaagaagagaccuuucuccugccuuuc

SEQ ID NO: 4152005 - RNA, 57 nt, Human
gagggacccuggcuggagcuggccuggggugucugugcccuccugccaggggcuguc

SEQ ID NO: 4152006 - RNA, 78 nt, Human
gagggacucugaugcuguacuaaguuaugucuuguugcuaagacauaaaacagucagcgaaacaauacaauguccuuc

SEQ ID NO: 4152007 - RNA, 70 nt, Human
gagggacuucucauuuaccuuugcaaucaaggaacucacagagcauuuguuguagaguagguaggcccuu

SEQ ID NO: 4152008 - RNA, 71 nt, Human
gagggagaaaacuucagacuccccacuucucgcagugcagagagagggaauauuugggguauucucaccuc

SEQ ID NO: 4152009 - RNA, 77 nt, Human
gagggagagacagacaguggacuugauaaaggaaaugcauugagcauccucaacuucacguucugaauaauucccuc

SEQ ID NO: 4152010 - RNA, 87 nt, Human
gagggagagggaaagauuaagggaauuccuggaggcauaauucugucuuccuccggaagaccucagucuuuuucucuuaaguaccuc

SEQ ID NO: 4152011 - RNA, 92 nt, Human
gagggagaugguugauucagugggaguggggaguggcagagggugccuuaacuuuuucuggcuugaccccuacuuccuuauguguuuccuuc

SEQ ID NO: 4152012 - RNA, 68 nt, Human
gagggagcagaggauggaggaaaaccuagucugggagauuggaaaaugcuacauguucugcuucucuc

SEQ ID NO: 4152013 - RNA, 77 nt, Human
gagggagcuguucaggacugcuucaagaagaucuugccaagccuugucuauauggggcaguuaauaaacauucucuu

SEQ ID NO: 4152014 - RNA, 130 nt, Human
gagggaggaagacagggacgccaagggcucagggagaaggccgggaggagcaagggggcucgaggaguggccagagccccuugcugcccucuagaggccccggcugagcagagggucuguuguccacccc

SEQ ID NO: 4152015 - RNA, 73 nt, Human
gagggaggcaaaagaugggccauggagucacgcgaaucugaggacuggcuccaacuccaccuuugucucccuc

SEQ ID NO: 4152016 - RNA, 102 nt, Human
gagggaggguuggagcugcugggcagagcaggggcaauguguugcaagcacaggguaaugcugccucacauuggacccugcuaggcccuuuccaccucacuc

SEQ ID NO: 4152017 - RNA, 59 nt, Human
gagggagugccagagggccagcaagagguuggguggcuggcugacucagggacuccuuc

SEQ ID NO: 4152018 - RNA, 76 nt, Human
gagggauagacagcugguagcacuuccuguguuuggcgauccauggagcaggacaucuacccaguguuucucccuc

SEQ ID NO: 4152019 - RNA, 79 nt, Human
gagggaucagcgauggagagguccugauaguuccccuaauggacuuucucuccugccucucugccuuuacuguucccuu

SEQ ID NO: 4152020 - RNA, 69 nt, Human
gagggaugaagaagcaagaggaaauguggaccuuggggaagguaaacaggcucuugcucuuuggcccuc

SEQ ID NO: 4152021 - RNA, 64 nt, Human
gagggaugugccugaaggcagggaguuggaucuggugacuucuuaaguccuuuccacaucucuc

SEQ ID NO: 4152022 - RNA, 71 nt, Human
gagggauguggagcccccagcccagggccugguacccagcaggcucucagggaaaggccuccccuucccuc

SEQ ID NO: 4152023 - RNA, 110 nt, Human
gagggauucagaauaggggaagucuaugguugucaucuugcagggaaugagccuguaaaaaggcuuaaagaaauugaggagaggauuccaugcuccccugaauauccuuc

SEQ ID NO: 4152024 - RNA, 59 nt, Human
gagggauuuuagugcagcaacugaauguccuucaccguucugcagcacuaaaaacuuuc

SEQ ID NO: 4152025 - RNA, 121 nt, Human
gagggcagagauggcagcaagcauuccuuggcugaggccugcauugaacuagaaggcuguugauaaggcuuaucauggggacugcagccuagccucggauagcuccuccauccuucuccuc

SEQ ID NO: 4152026 - RNA, 80 nt, Human
gcaauagauacagaugauuuuuaugaaaacaaugcauuugcaaccauguuuucagaaagaguuagauacauaucuggugc

SEQ ID NO: 4152027 - RNA, 70 nt, Human
gcaauaggagaaggucuuguucacuuccugccaaaagcagugaagguuuacagggccccuucuucugugu

SEQ ID NO: 4152028 - RNA, 129 nt, Human
gcaauauaagugaagcaccuuuuucacugagugacucuuuguaaauguuuuauauuuugcagcaguuugacuuuacugaggguaauauaaaacauuuaauggaagcauuugggaagcuuaaguaugugu

SEQ ID NO: 4152029 - RNA, 77 nt, Human
gcaauauuuggaauccauauuaguaaauucugacacauacaugugcagaguuuuauguaugcauguagaagaauugc

SEQ ID NO: 4152030 - RNA, 109 nt, Human
gcaaucaggaggaaaggaaaugaacagccucagugagauuaggauauaaaauauaagcccuagguucuaugcucuuucugagguugcacauaaauuuggccucaaaugc

SEQ ID NO: 4152031 - RNA, 94 nt, Human
gcaauccaaauuuaucaagaaauucuguucagauagcuuauuuguagguuagcugucuaaaucaggacaaauuuccauguggaugcuguauugc

SEQ ID NO: 4152032 - RNA, 68 nt, Human
gcaaucugaaacauucugucagauuccucuccaaagaaaacuuuggcagcugucagaaugcaaauugu

SEQ ID NO: 4152033 - RNA, 74 nt, Human
gcaaucuguaagaccccaugaaggucugucccauggaagggggagaauuuccuuucauugugguuucacagagc

SEQ ID NO: 4152034 - RNA, 84 nt, Human
gcaaugaaggaaggacuggcacagccacugcaggcagggagcuuaucugccauugcccgcggcagugccagaauccuacaaugc

SEQ ID NO: 4152035 - RNA, 78 nt, Human
gcaauggguagugaaagggacuuuuuaggaagauuauucuggaugaguggagagccuggagucccugauuaaauuugc

SEQ ID NO: 4152036 - RNA, 88 nt, Human
gcaauggugaacuuggggauuuuaaagaccucugacugcauuccucaggaaagccaaggggcuuguggaguugcugguuugccucugc

SEQ ID NO: 4152037 - RNA, 62 nt, Human
gcaaugguuuauauuguuuuucaugccuacauagcaugagaaauuuauuacaagcuaacagc

SEQ ID NO: 4152038 - RNA, 95 nt, Human
gcaaugucuauagcacaacuuucuggguuaucugauccuaauuauaugguagcuauuuuauaacucugaaaguuauagauggcugauagcaaugc

SEQ ID NO: 4152039 - RNA, 57 nt, Human
gcaaugucuucuaagcucuaagcuggcuacagacuguggcugagcaguagaagaugc

SEQ ID NO: 4152040 - RNA, 64 nt, Human
gcaauguuauacuuaugugcaaaaauauacuuaagguauauuaugguuguagguuaacaauugc

SEQ ID NO: 4152041 - RNA, 69 nt, Human
gcaauguucucggaauguccuccagagcugaguucucucagcggauggcuugggagauucucgaacugc

SEQ ID NO: 4152042 - RNA, 79 nt, Human
gcaauuaauauaugcuguuaagaauugugucccaugcuguaaaagcauguucauuuucuuaaugugccauauccaaagc

SEQ ID NO: 4152043 - RNA, 69 nt, Human
gcaauuauacuucuugucuauguuguugccagccagcgguaccaaggagacaaagguguauucauuugc

SEQ ID NO: 4152044 - RNA, 56 nt, Human
gcaauucaaguugaguacagcuucucuuuggcaggaggcugagaaaacugaaaugu

SEQ ID NO: 4152045 - RNA, 55 nt, Human
gcaauucuggaagcuccauucauagacugugaugugaaugaugccccagaguugu

SEQ ID NO: 4152046 - RNA, 60 nt, Human
gcaauuguacuagaaaacaauagugauuuucuaauagcuauuguuuucuagcauaauugc

SEQ ID NO: 4152047 - RNA, 56 nt, Human
gcaauuguauuuauccccaggcagggacuccauugccagggcccugugugcaaugc

SEQ ID NO: 4152048 - RNA, 58 nt, Human
gcaauuguguguguaugugugugcacaugugugugucuacaaacguguacacauuugu

SEQ ID NO: 4152049 - RNA, 65 nt, Human
gcaauuuaccaggagucagaaggacuaguaagcugaacccagccaggucucugacagcugguugc

SEQ ID NO: 4152050 - RNA, 80 nt, Human
gcaauuucaugaggggcaaaaucucaguuguuuuucuaggucaucugcacuaugagaagauuugcucuucugagguuagc

SEQ ID NO: 4152051 - RNA, 60 nt, Human
gcaauuucucccagggacuggaugaugcaggcuuccuucaccagguucccaugggugugc

SEQ ID NO: 4152052 - RNA, 74 nt, Human
gcaauuuuuguaaugaaaaggaggaaauagauauuggaugaaacauagcuauuuccuacuuuuuuacuuauugc

SEQ ID NO: 4152053 - RNA, 85 nt, Human
gcacaaaguugcacagugagguagggcagaggcugaaugugaacggacacaucccagcccauccuccuccccuguguaauugugc

SEQ ID NO: 4152054 - RNA, 66 nt, Human
gcacaacaccaagggagguaucauucacauagacuacaacaggaugaguguucucugggguugugc

SEQ ID NO: 4152055 - RNA, 64 nt, Human
gcacaagaagcacuuuccuacauguuuccaggaagcauaggugacaagaguagcuuacaggugc

SEQ ID NO: 4152056 - RNA, 108 nt, Human
gcacaagccccuuuccugcccucugcuugccauugcugcuggaagauuuucucuuuuccaggagagcucuaaauggcuguagccagagggcugugugugugugugugu

SEQ ID NO: 4152057 - RNA, 82 nt, Human
gcacaagccuggcuccaccuggcagcuguuggccacggcucccaguccacauggcacaccugccuggcaggccuggcugugc

SEQ ID NO: 4152058 - RNA, 65 nt, Human
gcacaaggagcaguguaugaaaucuuaaaugaacaagcaaugccaugaaauugcuccuuuggugc

SEQ ID NO: 4152059 - RNA, 82 nt, Human
gcacacaaccgcaagcugucagugaggugagacaugcaacaagccaagguaugucuuuauucucugaugcgcgguuuggugu

SEQ ID NO: 4152060 - RNA, 57 nt, Human
gcacacacucuuucucuuuugaaggaauucauaaguucugauaaaggaggaagaugc

SEQ ID NO: 4152061 - RNA, 65 nt, Human
gcacacagcaucucacuucccagaaggaucuucaccuuuucaucuggaaacugagugcuaacugc

SEQ ID NO: 4152062 - RNA, 83 nt, Human
gcacacagcugggaggcucugggaagcagugaguucagaagucaaaucagaaaacucaaguccagagauuaaagauuguaugu

SEQ ID NO: 4152063 - RNA, 57 nt, Human
gcacacaggcaguuuccagccaggugugugccaguugcuggguauaugcuuguuugc

SEQ ID NO: 4152064 - RNA, 60 nt, Human
gcacacagggcagagagcuggcucaggguucccgggggcucugugguugugcuuuguggc

SEQ ID NO: 4152065 - RNA, 55 nt, Human
gcacacaguagggauucaaugaaagaauucugagguuaauugaaugacugugugc

SEQ ID NO: 4152066 - RNA, 103 nt, Human
gcacacaguccuguugguccagcacugacgccugggggaucucaguggggccugggggacugcacuggcgucagugaguuggagucaggaaucugucaagugu

SEQ ID NO: 4152067 - RNA, 78 nt, Human
gcacacauuuaaaugaagacugacuaaauaaaagguaccacacacuucuugguugguuucauuccauugcaugugugu

SEQ ID NO: 4152068 - RNA, 121 nt, Human
gcacaccuggaggcuggggggcugguccagguugagcaaguguacgagcaggcccugcagcuggccuuggagaucacugcucauguugggcagcagucucaguagcaccugcaggaugugc

SEQ ID NO: 4152069 - RNA, 64 nt, Human
gcacacggcagccuccuccugagauaguguccaucgcaaaccaggagauggcugcugugucagc

SEQ ID NO: 4152070 - RNA, 98 nt, Human
gcacacucacauccagguaguucuccaggggcuguucaucuaccagggugggagccucccacugggggaaguacuuucuggcuggguugagguugugc

SEQ ID NO: 4152071 - RNA, 101 nt, Human
gcacacucuaagguauggaucccuguaaacacuuaaggagagaucaaaugucaaaguaugcaaggucuccccugguguaguuucacuacuuuuuugugugc

SEQ ID NO: 4152072 - RNA, 58 nt, Human
gcacacuggagccuggaagauuaguaaggcuguacuuaugaguuccaguccagggugu

SEQ ID NO: 4152073 - RNA, 89 nt, Human
gcacacuguggagaaccagcacugcucucagacugagaggauuccaaacagcuucucuggacagcaggugcuguggcugaauagugagu

SEQ ID NO: 4152074 - RNA, 106 nt, Human
gcacacuugagugaagcacagacaugacaguugagcauguaagagauccauugggugcuacuugagaaagcaguuggacugcauucugguucucucugaaguuugc

SEQ ID NO: 4152075 - RNA, 65 nt, Human
gcacagaaaccugucuggagugggagguaaagucugcuguuccaaagaagagguuuuaaaggugu

SEQ ID NO: 4152076 - RNA, 78 nt, Human
gcacagaaccaggaauugcagggcugcauaucuuguugaaugcuguagacuuccugacagcucucugguuccuugugc

SEQ ID NO: 4152077 - RNA, 78 nt, Human
gcacagacuucgaauauaacuauuucugagcuuugaggacuugagcaagaaauguuacaguuguuauuugaaaagugc

SEQ ID NO: 4152078 - RNA, 59 nt, Human
gcacagagcuggcccuccaggccucucagccaacaggguucuacauccagcaucugugu

SEQ ID NO: 4152079 - RNA, 61 nt, Human
gcacagagguggaggacaaauagcgcugagaaugcugaagagguucuuuucaccucugugc

SEQ ID NO: 4152080 - RNA, 57 nt, Human
gcacagcagacuugguggggcuaaaaucuacucugguccccacuuacgaugcugugu

SEQ ID NO: 4152081 - RNA, 61 nt, Human
gcacagcaguuacugaaauaaaguaccuccucuauggagcuuccauucuaguuugcugugc

SEQ ID NO: 4152082 - RNA, 56 nt, Human
gcacagccucuaggaucgcuuccaguagaaugagucacuggcaaggcuuugagugc

SEQ ID NO: 4152083 - RNA, 71 nt, Human
gcacagcucgagcucaggagggagggcugcaccucagcccugacuacauccugcugaaagcuccagcuggc

SEQ ID NO: 4152084 - RNA, 76 nt, Human
gcacaggaccuagaagaacaugucaaacuauaaacugcuugugauugugaaugacuuuguucuuugcuucuugugu

SEQ ID NO: 4152085 - RNA, 101 nt, Human
gaucuggaaaauagcaggaagauaagagggaggugccucagucccgugggcaguuggugacucaggcaccuuccucuuaucugccugugggcacccagguc

SEQ ID NO: 4152086 - RNA, 123 nt, Human
gaucuggagucugucagguuuggguucuaauuacagugacaguugcuaugaucaaguacaacuuucuugacucacagugucuucauuuguauaauggagcuaacaacugauuugcagaggauu

SEQ ID NO: 4152087 - RNA, 65 nt, Human
gaucuggcauuguugcaagccuggaaucugggguccccagcaggagacuagcaacauaccagauc

SEQ ID NO: 4152088 - RNA, 70 nt, Human
gaucuggucaacauuuacugcccuggcccugggaggccugggggucggaggugaaaaguauugccccauc

SEQ ID NO: 4152089 - RNA, 80 nt, Human
gaucugugagguggccagaaucuugaggccuuuggguacugaugguaacaaugcuucaugauuuggccauguaauacauc

SEQ ID NO: 4152090 - RNA, 64 nt, Human
gaucugugugacccaaggacacucucuguucaccacuccagcagggagcugggccacacugauc

SEQ ID NO: 4152091 - RNA, 63 nt, Human
gaucuguuucauucacagucuggcacacacgaggugccagauaaauuuacugaauacagaauc

SEQ ID NO: 4152092 - RNA, 82 nt, Human
gaucuucacauuucauaccacagcuucuuugugacugagcugcacugggcagagcugaguaugaaggaugugagacaagauu

SEQ ID NO: 4152093 - RNA, 109 nt, Human
gaucuucucugccacccaccaccgccauguccagcgucuucggggugucuuccacuggcacaaacacccuccugaagggggcgagggguggcggcugggcaggcagguc

SEQ ID NO: 4152094 - RNA, 83 nt, Human
gaucuuucuuuaagcugcuguguggugaaacucaguauaaaacaaguuuaaaaauaacuaagaauuagcacacaguaaggguc

SEQ ID NO: 4152095 - RNA, 76 nt, Human
gaugaaaaauccaguucuuggaagcacaggagaaacaaggaauaccuccugccuccguggaacuggagaaguaauc

SEQ ID NO: 4152096 - RNA, 65 nt, Human
gaugaaaaauugcugugucauacugagacuacuaagaacaaugugugaugcagcaauaacucauc

SEQ ID NO: 4152097 - RNA, 56 nt, Human
gaugaaacucgucuuuaugcauggcugccuccuagaaauagagacagaguuuaauc

SEQ ID NO: 4152098 - RNA, 60 nt, Human
gaugaagcuuuuccauggcaggcaggcagcaggagcuguccagaguacggaagagucauc

SEQ ID NO: 4152099 - RNA, 73 nt, Human
gaugaagcuuuuguaguggguauuugaacaaaguccagcauuucaaaugauaccuauuacuaggcaaaacauc

SEQ ID NO: 4152100 - RNA, 57 nt, Human
gcaaagcauucuguggagucuaacugugauggguaaaagaccuagagaggguuuugc

SEQ ID NO: 4152101 - RNA, 84 nt, Human
gcaaagcauugaaugauccuaucuagcacaggggagggcaaacuuuucuguaaagggccugauagugaauauuuuaaguuuugc

SEQ ID NO: 4152102 - RNA, 59 nt, Human
gcaaagcuguagggcugagcuggaccggauucccuggugccuugggccuacagcgcugc

SEQ ID NO: 4152103 - RNA, 60 nt, Human
gcaaaggguggcugugaagugcuuggcaccaugccaggcacacaauggcuuccugauugu

SEQ ID NO: 4152104 - RNA, 70 nt, Human
gcaaaguaucugaccgauuauaaaguuauugcucuucauuauuuuuguaaucauguuagaagagcuuagc

SEQ ID NO: 4152105 - RNA, 72 nt, Human
gcaaagucauuaugccaaaguagaaauauacaagcaucagcuaucauauuuauaccauugguauugaauugc

SEQ ID NO: 4152106 - RNA, 57 nt, Human
gcaaaguccauucuuccagccagcucuugcuccagcccugcugugaugagacucugc

SEQ ID NO: 4152107 - RNA, 60 nt, Human
gcaaagucugcaucuggaucaggauguuaauucucuagacuacuguccaguagacucugc

SEQ ID NO: 4152108 - RNA, 95 nt, Human
gcaaauaacccugggucuccaggccagggcugcagcgagcagggguggggccgcgagcuuccuguuguucuuggcacggcugcccagcugucugc

SEQ ID NO: 4152109 - RNA, 121 nt, Human
gcaaauagauggcugauguuuuugagagaguauaaaaacagaggagagaacaacguaauagaugucuauccuaaaggcugcuuuuauauucauuacaauaaacaauucuggcuuucucugc

SEQ ID NO: 4152110 - RNA, 75 nt, Human
gcaaaugcauaucaaagacuugaacaggcaaucucuugaaauuugaggauuuuuaguuuuuaaugcuguauuugc

SEQ ID NO: 4152111 - RNA, 88 nt, Human
gcaaaugcuaaauacuugcaagucaaagauuuucauacggauuuuaugguguagaaaauguuagcuucauagucauuguugcaguugu

SEQ ID NO: 4152112 - RNA, 64 nt, Human
gcaaauguaaacagcaagagaagggagguuuucccuggagcaucucugcugucuacgaacuggc

SEQ ID NO: 4152113 - RNA, 69 nt, Human
gcaaauuaggcagugccauuguacgguaauuauguuuucuuaauguuuccacaacagcucugccuuugc

SEQ ID NO: 4152114 - RNA, 57 nt, Human
gcaaauugcuuuguacaugccuagcaccuuguaagugcucagcauguuaagcauugc

SEQ ID NO: 4152115 - RNA, 83 nt, Human
gcaaauuuuuuucuguuaagggccagauaguaaauauuuuaggcuuugugacuauacugucucuuauagauaauaaguuuugc

SEQ ID NO: 4152116 - RNA, 57 nt, Human
gcaacaacuuguaggacugcacuguagcuuugcuaggugcuguuucccaaguggugc

SEQ ID NO: 4152117 - RNA, 109 nt, Human
gcaacaucaguaucauuuaggaguuacuuagagaugcagauucucagguccucaaaacagaccuacugaaucagaaucucuaaggugggaccugggugucugugguugc

SEQ ID NO: 4152118 - RNA, 81 nt, Human
gcaacaucccugggggcccugaaaucaggguucagcuaggcuccuaugugcccugagggucuggguucccaguccuguugc

SEQ ID NO: 4152119 - RNA, 64 nt, Human
gcaaccaagagacuccuguacacauuuuaguuuugugaugcuggaauuuugcucuugcaauugc

SEQ ID NO: 4152120 - RNA, 81 nt, Human
gcaaccacuggaaugcaaacuccacuggagcaggagcuuuuucacugcuuuuuucaccagugucuuguauguaggaguugc

SEQ ID NO: 4152121 - RNA, 77 nt, Human
gcaaccagccuucuccugcaccuaacacaacgcucuccacauaucuggagggcuggugcuuggagaaucaguugugc

SEQ ID NO: 4152122 - RNA, 71 nt, Human
gcaacccagcucuuuuaucaugaggagagguagccaugcugacucaugaacagguggaggaaagggguugc

SEQ ID NO: 4152123 - RNA, 69 nt, Human
gcaacccuaggaaacuaaugaagaaacgcaacuugaaaauagguuauuucagaagugguccuaggaagc

SEQ ID NO: 4152124 - RNA, 64 nt, Human
gcaacccugggucaugguugacauuguuccuaguuuauguaugaggacuguggcucagaguugc

SEQ ID NO: 4152125 - RNA, 61 nt, Human
gcaaccuguugaacuggcugauggcccauuugcuggggcacaaguuccacuacagaguugu

SEQ ID NO: 4152126 - RNA, 75 nt, Human
gcaacucccaugcucucucugagaagcauccauggccucagccaggcuauuucagcagaagccggagacacuugc

SEQ ID NO: 4152127 - RNA, 71 nt, Human
gcaacucuggauggauauggacaguaagcccacaacuacuuggccuagagcauucuaucuccaacaggugc

SEQ ID NO: 4152128 - RNA, 82 nt, Human
gcaacucuguaaagcucaucauuaggaggcuaccaagaagaauaggauaguccucccacccaugaggagcuaacaguucugc

SEQ ID NO: 4152129 - RNA, 76 nt, Human
gcaacugcagguggauggcacuuuaauccuuaggaguggaugauaccaaggaaggggaaaguguaccuggagcugc

SEQ ID NO: 4152130 - RNA, 88 nt, Human
gcaacugggguuuucugcacuauuguguucacuauuagcauagcucuguauaaauacuguaauaguuucauaaugugcuuccagcugc

SEQ ID NO: 4152131 - RNA, 83 nt, Human
gcaacuuccuuucauuagagaguuuaugauaugguuagggggauaacuuacuaacucaugauuuccugguuaaggacuacggc

SEQ ID NO: 4152132 - RNA, 56 nt, Human
gcaagaaaaaggcuucaugaacuuaggccacugagaucauggagguuuguuccugu

SEQ ID NO: 4152133 - RNA, 61 nt, Human
gcaagaaggguaguuguaagagugaugcaacagcacuaccucauuuuuauugcuaccuugc

SEQ ID NO: 4152134 - RNA, 82 nt, Human
gcaagaaugaaugugucccaaacuagaugccacuggguuuuauacuggaugugguuuuggauuauucaugcuauaaaaaugc

SEQ ID NO: 4152135 - RNA, 113 nt, Human
gcaagacaauucccuuuacuuuucagacucggcuuuuccccugugaaauggagaugagaguuucuccgucacuggcgugaagugaggacuaaaugagauaaguguaggcuugc

SEQ ID NO: 4152136 - RNA, 57 nt, Human
gcaagacagugacagucacaauuggaauuuaaguuuccaacacugcccauuguuugc

SEQ ID NO: 4152137 - RNA, 59 nt, Human
gcaagacauuguauuguguuccuaagcuuaacgcauagcagcaagaaugggaugugugu

SEQ ID NO: 4152138 - RNA, 58 nt, Human
gcaagacuggagagugaauaauucccuuuagaagauguauucacaaagccaguguugc

SEQ ID NO: 4152139 - RNA, 116 nt, Human
gcaagagaagccuagguugugagcacuggcucagggcugcaucugccuggugaaagggugcccuuuucaaguaacacaaaugcacccugugggcuacuggcuacccggguaaaugc

SEQ ID NO: 4152140 - RNA, 73 nt, Human
gcaagagacgcugaccguuuguuugggagaugaaaacucaccguccuggaacaaucccgguuuagcucacggc

SEQ ID NO: 4152141 - RNA, 83 nt, Human
gcaagaggcguuagaauuugagauugagagucacuuauuuaaaagccacaucacaguuugucagaaaucauaacaccuuuugc

SEQ ID NO: 4152142 - RNA, 65 nt, Human
gcaagaggcuguuagacauugccucuucuccucaccuggagugaguguucauagcaggcucuugc

SEQ ID NO: 4152143 - RNA, 57 nt, Human
gcaagaguggaacaaaggcagccagugucuguuugccauccaacaguuccaucuugc

SEQ ID NO: 4152144 - RNA, 75 nt, Human
gcaagauuagaaucaacugugaggggaacuaauuuaaacaagcccuuccuuagucuuauugagucucauauuugc

SEQ ID NO: 4152145 - RNA, 71 nt, Human
gcaagcaaauuauuuauaggcaaauaccugauccaacugccuacugaaacucuuguaaauaucuugcuugu

SEQ ID NO: 4152146 - RNA, 56 nt, Human
gcaagcagaucuccggagggaagagaaagucccacaucuccgggccacugcucugc

SEQ ID NO: 4152147 - RNA, 56 nt, Human
gcaagcaugugccugggcucaggucucucugagccugagcccuugcuuaugcuucc

SEQ ID NO: 4152148 - RNA, 87 nt, Human
gcaagcauuauuuguauguuuugucugcucuugaaggugccuaaaauuuucaaaagacucagauguagcgugcauagcagcuccugc

SEQ ID NO: 4152149 - RNA, 88 nt, Human
gcaagccaagucuagauuuugccacuaaauacuguucuuuccuaccuuaagacaauuuggaaaggcagcuggcaaauucuagagcugc

SEQ ID NO: 4152150 - RNA, 66 nt, Human
gcaagccuucaggaccuguuuuugagcaaacuugcauuugagcaaacaagucucucaauggcuugc

SEQ ID NO: 4152151 - RNA, 60 nt, Human
gcaagcugcucuuauguggagguuucuccccacucuccucuguaugggggucugguuugu

SEQ ID NO: 4152152 - RNA, 105 nt, Human
gcaaggaaaauagauaauguuggaagccacuuuagauaccaucuuagugugaauuucagcaguaguggauggguaaaguauuuuccaaaauaauguaucccuugu

SEQ ID NO: 4152153 - RNA, 60 nt, Human
gcaaggagcaccuuucuggaacccccuauagcauccaaguuucuuucugggcucucuugc

SEQ ID NO: 4152154 - RNA, 63 nt, Human
gcaaggcaaggaauauuuaagaacgucagauucauugacaucagcuuuuguauuccuuguugc

SEQ ID NO: 4152155 - RNA, 62 nt, Human
gcaaggcagggaaaguggauuaggcuuggucguuuauucucguucuuuccuucuuccuuugc

SEQ ID NO: 4152156 - RNA, 59 nt, Human
gcaaggcugccauaaaagguguuaaucaugucauuugcuaccauuaauguaagcuuugu

SEQ ID NO: 4152157 - RNA, 81 nt, Human
gcaaggguugaggacugguugaaagcuuugccacauucuauacauuugaaagguuuuuuuccaguaucucuuaucuuaugu

SEQ ID NO: 4152158 - RNA, 58 nt, Human
gcaaggugcccaaggaagguugccgucuuuucaguauaagauccuaccugggucuugc

SEQ ID NO: 4152159 - RNA, 114 nt, Human
gcaaggugugguggcgcaugccuguaaucaucccagcuacucuggaggcugaggcaggagaacugcuugaaccugggagguggauguugcggugagccaagaucgugccacugc

SEQ ID NO: 4152160 - RNA, 60 nt, Human
gcaaguaucuucaaacugccucgaggacaaacugccuugaggaguacaaagcaugcuugc

SEQ ID NO: 4152161 - RNA, 59 nt, Human
gcaaguaugaaucaaagacuaucuguaaucaguggguuaagacagucauucaugcaugu

SEQ ID NO: 4152162 - RNA, 67 nt, Human
gcaagucacaagcauauaugcauuaagauuuuaaaaucuaagaugcuuaagauguugguggcauugc

SEQ ID NO: 4152163 - RNA, 70 nt, Human
gcaagucacuugggcucugugggccuuaguuuacugaccuguaaaaugagaucucugguccaaaucuugc

SEQ ID NO: 4152164 - RNA, 76 nt, Human
gcaagucaugugauuuucuuauacgaucacaugggugggcugucuuccaucuugugugaugaugagaaagcuaugc

SEQ ID NO: 4152165 - RNA, 116 nt, Human
gcaagucauuuaaccucuucaggcuuagucuucucauaguaaaacuagagcuaucauggaaugauuugcaggaugcuugugaggacuaagugaaaugaugcaguugagugcuuagc

SEQ ID NO: 4152166 - RNA, 63 nt, Human
gcaagucguucccuuguccucucacaaccauacacagcaaaggaggugcaaggcauggcaugu

SEQ ID NO: 4152167 - RNA, 69 nt, Human
gcaagucuugucauuuuaucgauaggauacuuuuuaguauuugaucauuagaaugauucuuugaauugc

SEQ ID NO: 4152168 - RNA, 80 nt, Human
gcaagugggucauuaggaaauguguugcaagcagaagcuugaaaacugcuugcacauuggcauuuucugucuccugcugc

SEQ ID NO: 4152169 - RNA, 60 nt, Human
gcaaguguacauaucagaauuguauagcuaguugaauuugcacaaacugaguacacuugu

SEQ ID NO: 4152170 - RNA, 82 nt, Human
gaucaguugauuuugagauaggggacuuguucugaauaacuccuuucgagacuuuucugcugucuaugcaaguccuuugauc

SEQ ID NO: 4152171 - RNA, 71 nt, Human
gaucauacccaggcuuauguuggucagguagaaacaaaugugccaccuauaaguugggugacauuaugauc

SEQ ID NO: 4152172 - RNA, 108 nt, Human
gauccaaagguuuccguuuauucaguguggugcacaguuuuguaaaguucccuauugguaaaaugucagagcuguuacuauucaugaauuaaauuacaacuuuguauc

SEQ ID NO: 4152173 - RNA, 59 nt, Human
gauccacagggcccuggcccaggaagaaacucaaaccugaccccaaagcccuggggauc

SEQ ID NO: 4152174 - RNA, 58 nt, Human
gauccacaguuugaugaucauauguauuucccagugccaaugaauauggacuuggauc

SEQ ID NO: 4152175 - RNA, 84 nt, Human
gcaaucagacaaaagaaagaaauagauggcauuuaaauuaguaaagaagucaaacugucacuguuuacugaugcguaugauugu

SEQ ID NO: 4152176 - RNA, 95 nt, Human
gcaauccugggauggcacaaguuucccacaguguugaauccucucuuuugacaguagagacaagcaguguggagucuuccuccucagugauuugc

SEQ ID NO: 4152177 - RNA, 78 nt, Human
gcaaucuaugaaaugucauuuaggauuauguuuaaacuaccaauauuaaacuauaucaaugaugauggcuuauagugc

SEQ ID NO: 4152178 - RNA, 63 nt, Human
gcaaucuguuuaguucugcguaugcuucaauucaauuucauggcaauuucauaaacagguugc

SEQ ID NO: 4152179 - RNA, 72 nt, Human
gcaaucuuuguguaaguaucuuuguaucuuuguauaagugcaaagcacugcacauauauuugcaauuguugc

SEQ ID NO: 4152180 - RNA, 73 nt, Human
gcaaugacccuuguuuaucauuucugaauauuauacaaauuugcagaaaugacaaaguaagaggaagcaaggc

SEQ ID NO: 4152181 - RNA, 55 nt, Human
gcaaugagcacccagagggcaguggcgacgauguucugagucaggugcuccuugu

SEQ ID NO: 4152182 - RNA, 67 nt, Human
gcaaugagucaggguucaauucccauggucuaagauggcuaggagauugagcucugaaguuccaggc

SEQ ID NO: 4152183 - RNA, 62 nt, Human
gcaaugauuuucaucagagaagucuacagugauuuguauaggcuuuaugguagaaaguuugc

SEQ ID NO: 4152184 - RNA, 68 nt, Human
gcaaugccuugguucucuacuuggaggagcuuguaagagccaccaaaauuggaaauuaaggcuagugu

SEQ ID NO: 4152185 - RNA, 76 nt, Human
gcaaugcggggagggcugagacuggggucugggcuguuccggacuucaacacucaccccuuguccccccgcagggc

SEQ ID NO: 4152186 - RNA, 78 nt, Human
gcaauggagguucuuacauauuuucauaugguuauuuauccgguggcuguaugaguucauguguagaccacauauugc

SEQ ID NO: 4152187 - RNA, 77 nt, Human
gcaauggauaacaccgguucuguccuaaucaccacuugugaucucaaggccuccuagggcagagcuaugucuguugc

SEQ ID NO: 4152188 - RNA, 97 nt, Human
gcaaugggaguaucaaggagaaugcagcaagguagugcuggacucagaucccaccuccagagcuuugcagugauuguucuuggaaaacuuauuuugc

SEQ ID NO: 4152189 - RNA, 64 nt, Human
gcaaugggcacagcccagcccaacugaacuugagccagucguaaaggcugugguggugccuugc

SEQ ID NO: 4152190 - RNA, 86 nt, Human
gcaaugguuaaaugggcuaauaugugcuaaaaccagugacugacaaguagcacuauauguuagcuauuaucaucauuaauuauugu

SEQ ID NO: 4152191 - RNA, 68 nt, Human
gcaaugucagucaagcagcaaaugugugaguacuucuuauggauuaagcagcauugacuuggcauugu

SEQ ID NO: 4152192 - RNA, 63 nt, Human
gcaaugucuucuauaguuacucauuuacacugaaacgugauggguaacuuuuagggcguuugc

SEQ ID NO: 4152193 - RNA, 61 nt, Human
gcaaugugucaggaaaagggccaugugcuuuucugccauguccuuuucugggauagauagu

SEQ ID NO: 4152194 - RNA, 85 nt, Human
gcaauguuagaaugucuuugguucaggaguaccucucagacuucugggagggccagugcucucuagaugcaucuggcaaaauugu

SEQ ID NO: 4152195 - RNA, 69 nt, Human
gcaauguuuccgugagcauccuugagcauguauacaugaaugcuugugcuauuauuucaugggagaggc

SEQ ID NO: 4152196 - RNA, 90 nt, Human
gcaauguuuccuuaaggcagauaagaauucagcaagcuuuauucaacaaacuugcagagaaauuucugguuuacuuccaggacacauugu

SEQ ID NO: 4152197 - RNA, 62 nt, Human
gcaauuaaagaagaccugccucaaacauuuucugugugaccugaggcaaguccuuuuauagc

SEQ ID NO: 4152198 - RNA, 62 nt, Human
gcaauuagaggggcugcugaaugggaauaguucaauucucucaauucuccugucccauuagc

SEQ ID NO: 4152199 - RNA, 63 nt, Human
gcaauuauuaagcuuucuccaguguuagcuugugcuaggccacuggugggguuuaaaagaagc

SEQ ID NO: 4152200 - RNA, 77 nt, Human
gcaauuccuucugaagccuuuguguuuggcaucgcuaggcagcccagggucagcauaaaggcacuagaaagagaggc

SEQ ID NO: 4152201 - RNA, 84 nt, Human
gcaauucuuuuccuugggagguucuguucgcacuugacuuuuaucaagcggacugagauacucugcuucaacccgaagaacugc

SEQ ID NO: 4152202 - RNA, 84 nt, Human
gcaauugcucuacuucucucuccaacaauucacuuuaguaggaacaaagcuggacauuguaggggggaaaggaaggggcuaugc

SEQ ID NO: 4152203 - RNA, 73 nt, Human
gcaauuucggauguugcugcuguagcaacagcguacuuagugcuugucacauacaggagcauuccgaaauugu

SEQ ID NO: 4152204 - RNA, 56 nt, Human
gcaauuuggggagguucagacucuuggagcgagaggcugcauguccccuaaacugu

SEQ ID NO: 4152205 - RNA, 101 nt, Human
gcaauuuucauuccucuuugacacagauauuuguaguggguaagaaguuauuuggcuuauuauuacacugggaauuuguuagaacagaguaaugacauugu

SEQ ID NO: 4152206 - RNA, 76 nt, Human
gcacaaaccccugcaugucuguaauuacagagccucuugaugcuggcugcuguuggcagcaugcuggggaacgugu

SEQ ID NO: 4152207 - RNA, 102 nt, Human
gcacaaaucgccaagggguucuguuagaacgcagacucugguucaguagguccgggguggggccgagccucugcacuucuuacagguccugggugacgcugc

SEQ ID NO: 4152208 - RNA, 83 nt, Human
gcacaaauucauuaauaagucuaacucuccuucagccauaagguauuuggagugagagacauguuaacacaugaguuaugugu

SEQ ID NO: 4152209 - RNA, 67 nt, Human
gcacaaauuucuggcccuauggcauguaccugcugacagaguacacuuauauuugucaauuuugugu

SEQ ID NO: 4152210 - RNA, 78 nt, Human
gcacaacauucuggagcuggcagggcccuggacgauccuuuguguacagcccgggcucugcggcucccaucuuugugc

SEQ ID NO: 4152211 - RNA, 55 nt, Human
gcacaagccagcuuuuaaauucugcucaauuccaauuuaagaguaggcauugugc

SEQ ID NO: 4152212 - RNA, 83 nt, Human
gcacaagucccugaguucucugagccuuagccaaugggccagccaaccggaggccuauaggcaagugcugcucuugggugugc

SEQ ID NO: 4152213 - RNA, 123 nt, Human
gcacaauguuaaagcaacaauaauugguuccuccuggcuuuucccauugaaggaaauugaaauucaauugacuuucaauggaauagccauggaguuccaauugucauugcuccgacuuugugc

SEQ ID NO: 4152214 - RNA, 60 nt, Human
gcacacagaacauuuggauccucgcagaaaagacuauuagacccaacaguucuguugugu

SEQ ID NO: 4152215 - RNA, 56 nt, Human
gcacacagaaucagugggcauaauaaaauaguuguguaugcagcuagguuuggugc

SEQ ID NO: 4152216 - RNA, 62 nt, Human
gcacacagugggaaaaccugaagucuuuuuauccuucuguuuuuagguggaccauggugugu

SEQ ID NO: 4152217 - RNA, 71 nt, Human
gcacacaucagguguggucaccacagggucuaaucacagagcuuugugcacacucaccugaccaccugugc

SEQ ID NO: 4152218 - RNA, 64 nt, Human
gcacacaugcaugugugcauccauguguguuugugcaugugugugugcaugcguguuugugugu

SEQ ID NO: 4152219 - RNA, 61 nt, Human
gcacacauucggauucuuaaccaccagcuuaccagauagcuugcuguguccgugugugugu

SEQ ID NO: 4152220 - RNA, 104 nt, Human
gcacacggcugggcucucuggcaggaaggcuucagggaaggacccaugugaggcuuugucugcccaguuagaaugagagggcuuuguacaaucagcacguaugc

SEQ ID NO: 4152221 - RNA, 69 nt, Human
gcacagacauguccacaaagcauucaaaugucuuauuuggguguccugcugggauauuguucagagugc

SEQ ID NO: 4152222 - RNA, 59 nt, Human
gcacagacucuagguucagcugcaguaaucguuacugcugccaaaugcgagcucugugc

SEQ ID NO: 4152223 - RNA, 55 nt, Human
gcacagacuuugauugcagucaauucacgcacccugaggcauagcaggucugugu

SEQ ID NO: 4152224 - RNA, 57 nt, Human
gcacagagaggcugugagcgccagggcugggaaucaggagcucaugcccuacugugc

SEQ ID NO: 4152225 - RNA, 65 nt, Human
gcacagagaucggaacagaaguagagaagugaaccucugucuccugcccuucugacucucuuugu

SEQ ID NO: 4152226 - RNA, 90 nt, Human
gcacagaggggaaggggggcaccugcaugcccggcugggucucuguagacaguggaucaugcgaggccuccccucuccuugacccugugu

SEQ ID NO: 4152227 - RNA, 105 nt, Human
gcacagcaagggugggcauggcuuuccugcggcaucaccaaaccugcugccccauccccagcaggugcagggaguucaggaugaacaugucagcugggcugcugc

SEQ ID NO: 4152228 - RNA, 65 nt, Human
gcacagcccccagucugaacagcagcugccuucuccuuugggcaguuugcucugggggacugagc

SEQ ID NO: 4152229 - RNA, 56 nt, Human
gcacagccggaccgaggaaaaggauuauuccccucuucacgcgggucgggccgugc

SEQ ID NO: 4152230 - RNA, 100 nt, Human
gcacagccuguaugaacccauguugaacccuggacuuucaggacuacuguauggcuaaccacagcccugcaaggccaggcucagcaugucacaguuuugc

SEQ ID NO: 4152231 - RNA, 65 nt, Human
gcagaggugaguuucucagcugagugggcuuugaaaucaauuucagcuugauuucuuacagcugc

SEQ ID NO: 4152232 - RNA, 70 nt, Human
gcagaggugcuagggcaggaggugaggaggaugggaaaauccccagccuuugcuuccugguucccucugc

SEQ ID NO: 4152233 - RNA, 71 nt, Human
gcagaguggaagugcuugggcuuugauguuggaaggaagcuuuuuccuggccaaguuacucucugcacugc

SEQ ID NO: 4152234 - RNA, 63 nt, Human
gcagauauauguguggauucuuguagagugccuucuacacaccagacacacacuauauguugc

SEQ ID NO: 4152235 - RNA, 64 nt, Human
gcagauaugcccauaauuaugugucuauaaauaagaccauuuccaccaugggcacauuauuugu

SEQ ID NO: 4152236 - RNA, 108 nt, Human
gcagaucugcgcgucguggauugcagcugcaggcugugcaggaagaagcagcaccgccacuuccucgucccggccucgcgcuucacgcugcuccagggcgcagaaagc

SEQ ID NO: 4152237 - RNA, 56 nt, Human
gcagaucuugguggccauuggcuggacuccaggugggcacuccgcucgaggucugc

SEQ ID NO: 4152238 - RNA, 72 nt, Human
gcagaugcuaaagauuuaagaauaauuuguggcagaaacuuuaaauuauaguuaaugucuguuuuuaucugc

SEQ ID NO: 4152239 - RNA, 55 nt, Human
gcagaugcugggacuccagagcuaccuacagcaggagagccuccacggcuucugu

SEQ ID NO: 4152240 - RNA, 60 nt, Human
gcagauggagagaggggaggaggccccaacguggggcaguggcuccccuguuuucccugc

SEQ ID NO: 4152241 - RNA, 59 nt, Human
gcagauggcagcauaguggcaaguuauggagacaugcaggccaauuuauucugccaugc

SEQ ID NO: 4152242 - RNA, 73 nt, Human
gcagauggcagcccaggcugggugcaaguacaguuagugaagccagccauugccaggguuaauccacuucugc

SEQ ID NO: 4152243 - RNA, 64 nt, Human
gcagauggcccgcuagcuggccucuaguucauggguguuaagaggcuggguacgggccaccugu

SEQ ID NO: 4152244 - RNA, 55 nt, Human
gcagaugguggaggcaagaggcuuuaucugagccuuugggacccuggccaccugc

SEQ ID NO: 4152245 - RNA, 82 nt, Human
gcagauuagcagcagcugacagugggugccggcucacccacaggaguaaggcaauucauaaucgguuaaccuugaauucugc

SEQ ID NO: 4152246 - RNA, 66 nt, Human
gcagauuaucgaaugcaaggggccacaugcuagcacauuuaugggcucugcuugcaucaugacugc

SEQ ID NO: 4152247 - RNA, 81 nt, Human
gcagcaaagacaacuguuuucuguaaagggccagaggaucaauacuuugucuuuugugggaaauauggucuuugucaaagc

SEQ ID NO: 4152248 - RNA, 74 nt, Human
gcagcaagacuucagggcuugguuuaaauugcuuuuuuauaucuuaguuguaaucagccuggagucuacuuugu

SEQ ID NO: 4152249 - RNA, 81 nt, Human
gcagcaccagcccccacuuguucuggggggcagucaggaaggaucuggucaguuccugaucccccaggacaaaggugcugc

SEQ ID NO: 4152250 - RNA, 59 nt, Human
gcagcacugauccuaaacuuagagcuggggugagucugaguguggggacagugguuugc

SEQ ID NO: 4152251 - RNA, 87 nt, Human
gcagagcgaguugcuggaggacacacccagaguugaggccgggccugaucccuggucugaagcccacgugguaccagcugccuuugu

SEQ ID NO: 4152252 - RNA, 77 nt, Human
gcagagcucagccuuggcagguggaggauggagcuuagagccuuccuccagucuuggugagguugagcccaauuugc

SEQ ID NO: 4152253 - RNA, 104 nt, Human
gcagagcugacuucuguccucuagccacccagacauguggucccagaugaaucaguacauguguaacaugaucugguggccccaaggcucagagucaucacugc

SEQ ID NO: 4152254 - RNA, 86 nt, Human
gcagaggcaguacuuacuaaaauccaggcauucugacuucaaguccagaggauuccagucuaguaccuggaugcacugguuuuugc

SEQ ID NO: 4152255 - RNA, 87 nt, Human
gcagaggcuccauuuuacagauacagaagcugagguauaaagagaaaaaaauuacuuaacuuauccuucugagaaaggggucucugu

SEQ ID NO: 4152256 - RNA, 55 nt, Human
gcagaggcugggugucccagucauccuaguuggccuggaccacccuccucuuugc

SEQ ID NO: 4152257 - RNA, 67 nt, Human
gcagaggcuucagggcuuuugaggguuacuuagccaagucauugccucuguucccggagccaucugc

SEQ ID NO: 4152258 - RNA, 57 nt, Human
gcagagggcagggguguuuguuccuuuccauaacuagacaccacugcacuucagagc

SEQ ID NO: 4152259 - RNA, 77 nt, Human
gcagagggcaugcuugguggccuguuaagacaucaauaaguuuagaagcauucagcgucaucgugcaugugaucugc

SEQ ID NO: 4152260 - RNA, 60 nt, Human
gcagagggcgagcuggcuggccuucgggguguggcuccuggccgccgccuugugcucugc

SEQ ID NO: 4152261 - RNA, 67 nt, Human
gcagaggguccgcaggcagggccgagagcaggcagcccaggccuggcuccaccgccgcggagcucgc

SEQ ID NO: 4152262 - RNA, 56 nt, Human
gcagagguccuagccaggagucggccucaguuaacuugaaccucugggauguuugc

SEQ ID NO: 4152263 - RNA, 58 nt, Human
gcagaggugucaccuuccaggacuagcugcuguuggccugggagugugccaucucugu

SEQ ID NO: 4152264 - RNA, 78 nt, Human
gcagagguucaagugaaaugcuuuuugcgaaaugugcaaguuccuuuuguacauuuacaaaagcuuuauuuacucugu

SEQ ID NO: 4152265 - RNA, 99 nt, Human
gcagaguauugacaaugucauuuuugacuuugaagugagccauauaagugucacaucacaugagugcaaggaacacugacauacuucuucagcugcugc

SEQ ID NO: 4152266 - RNA, 56 nt, Human
gcagagucagccuccgagacaguucuuuugugucugucucgaaggcuccacucugu

SEQ ID NO: 4152267 - RNA, 65 nt, Human
gcagagugaauucgacuggaacuuaaauuggaguaaacuguucagauaugaauucauaucucugc

SEQ ID NO: 4152268 - RNA, 62 nt, Human
gcagaguggagauguguguggaagcauuccuccugaauuuuuuauagacucucucccuuugc

SEQ ID NO: 4152269 - RNA, 60 nt, Human
gcagaguggggugggguguuggcuuuggugcucccuggaguugacacaucuuggcuuugc

SEQ ID NO: 4152270 - RNA, 70 nt, Human
gcagauacuccaagauauuagaaaacauguuuuccuaucuuagcaaacauuuggucuaguguguguuugu

SEQ ID NO: 4152271 - RNA, 78 nt, Human
gcagauagcacagugguaagggcauaggcacugagaucaugccccaugguccaaaugcuggcccugcuacuuaucagc

SEQ ID NO: 4152272 - RNA, 70 nt, Human
gcagaucauaacagauacauagaauugaauaagauaacccugauuucuuugugugucucugugcaucugc

SEQ ID NO: 4152273 - RNA, 65 nt, Human
gcagaugacacuucuccaucaagucaaauggaauuacuuugauaugaagagaggcguguuuaugu

SEQ ID NO: 4152274 - RNA, 55 nt, Human
gcagaugcaaggguacuggggccacagccucucacaguaugaauuguucaccugc

SEQ ID NO: 4152275 - RNA, 62 nt, Human
gcagaugccacuaggugaagugcguauuuucuuuucuugcuuuuauauacuguggucucugc

SEQ ID NO: 4152276 - RNA, 57 nt, Human
gcagauggugccaugucuuguggauauuuugaaaaaauaggacaggcucccaucugc

SEQ ID NO: 4152277 - RNA, 88 nt, Human
gcagauguaaagacagcuaagggcacaggucaccugcgagaagaugagcacucgguguccuugcuccuucagcuuucgcagcaucuuc

SEQ ID NO: 4152278 - RNA, 107 nt, Human
gcagaugucuacaacuccaaggacacaugcauuggucuauuaugugaaaaaguaauccauuucuauuacauuaagccaauggauucuugaguuugauuuauuacugc

SEQ ID NO: 4152279 - RNA, 75 nt, Human
gcagaugugaucaggaaauuauuuauuaauauuggcuuuaaaauuuugugaugaauaaacuugagagucaucugu

SEQ ID NO: 4152280 - RNA, 76 nt, Human
gcagauguuagcuguuuuuugugaggaaauaaugguguuagcuaugaguuuucuuggaaagaaagagcuuaaaagc

SEQ ID NO: 4152281 - RNA, 77 nt, Human
gcagauuuaccauauguacugaguaucuaugaucaccuguaaauacaaggaaugcauaugaguaaugaggagucugc

SEQ ID NO: 4152282 - RNA, 68 nt, Human
gcagauuucacucuuaauugcuuccugauaaucuugauuagcgaaaagaauggaguggagucauaugc

SEQ ID NO: 4152283 - RNA, 56 nt, Human
gcagcaaagcucuucaugugauacgauacuguuugacaugccccagcuucuguugc

SEQ ID NO: 4152284 - RNA, 72 nt, Human
gcagcaacagcagcugaggagcugggcucuggcccuccaccccggugcccaccucugcacuguugaugccgc

SEQ ID NO: 4152285 - RNA, 70 nt, Human
gcagcaacgagcucuccuucuuucauuugugaucugaaauuucauuuagugugggagugcuuuaagcugu

SEQ ID NO: 4152286 - RNA, 61 nt, Human
gcagcaagaugcaaacauccgucccccagaagccggggcccugauuugcuuauuuugcagc

SEQ ID NO: 4152287 - RNA, 57 nt, Human
gcagcaagcacugcagcagaccaaacuaugaugguccugugaagccauguuuguugu

SEQ ID NO: 4152288 - RNA, 64 nt, Human
gcagcaaucccaagucugagugaccagggucaguguuuagguuauaaaccuuuggauugcuagc

SEQ ID NO: 4152289 - RNA, 101 nt, Human
gcagcaauuuuucuucuuauucuuucuuugcaaugaagcugagaauaaugcccuuagguuuuucucacuauguauguagauuggaagcaggaaggagcugc

SEQ ID NO: 4152290 - RNA, 130 nt, Human
gcagcacagggcagcaugaaggggaagaggaacuagcauuuuguggguucugcugauguacugauuaucccagaacagucaguugaauccaaggagccuguuaacaccauuccagcaguccuacagcugc

SEQ ID NO: 4152291 - RNA, 84 nt, Human
gcagcacagguugggcugcgaggaggagaagacucgguccagcacuugcuuccgcuucuugaagccgcuccaccugcugccugc

SEQ ID NO: 4152292 - RNA, 56 nt, Human
gcagcacccccuccaugguugugacaaucaaaaaugucuccugcaggggugugggc

SEQ ID NO: 4152293 - RNA, 61 nt, Human
gcagcacuggcuugaucagaagcacuguccuaaauacaagcagcacugucugaccaguggc

SEQ ID NO: 4152294 - RNA, 79 nt, Human
gcagcagacaaguguuauccuaauagacaaguguuaucuucacuauuuagcaaucauguuuacgugacaugucuccugc

SEQ ID NO: 4152295 - RNA, 78 nt, Human
gcagcagaccuggggcuguggggaauuggcuguugcuaccaccugcagauucuucauugccccauucacuauugcugc

SEQ ID NO: 4152296 - RNA, 73 nt, Human
gcagcagagcucuuugaaccugggcagucugcuccugacacacgucaccacucacuagguugagggccugggc

SEQ ID NO: 4152297 - RNA, 58 nt, Human
gcagcagaugugggcccagagcagaaaauguucuggcuuaagucaucccaucugcagc

SEQ ID NO: 4152298 - RNA, 63 nt, Human
gcagcaggcacggucucgacaugcagaaagacgccagcaaguucguggaucugugcgugcugc

SEQ ID NO: 4152299 - RNA, 75 nt, Human
gcagcaggcuucauuccaggauuccccucccagggcaggaaggagagggcuguggggcaugaccaggccugcugu

SEQ ID NO: 4152300 - RNA, 95 nt, Human
gcagcagggcuggaugcagguggccagggagcugugcuggagcccggcugcucaaaccacagauuuggcccagccaaugccccucagcucugcgc

SEQ ID NO: 4152301 - RNA, 57 nt, Human
gcagcauacugcaucaaaugaggguuuuguuucuagcuuucucagaacaguggcugc

SEQ ID NO: 4152302 - RNA, 84 nt, Human
gcagcaucaucguuuacccugagugauugccuugugauaggaaugcaugaagccagcacuucacgggagcgauaagguaucugu

SEQ ID NO: 4152303 - RNA, 85 nt, Human
gcagcaucccuaccauuccagacuagacuguuauaaauccucuuuaauagucuuagaaucuugaguguguuuuacagaauggugc

SEQ ID NO: 4152304 - RNA, 59 nt, Human
gcagcauccugggccacaguccucacgacuggcugggccaaagagacccaggacgcugc

SEQ ID NO: 4152305 - RNA, 70 nt, Human
gcagcauccuugggcccagcuccugcugcaggcucuggagggaugcaggagacuauggcccaaggccugc

SEQ ID NO: 4152306 - RNA, 77 nt, Human
gcagcaugagucugcccaccgucccacucaaucagcugacaacucgagugagugugaggugggagcuuggaaucugu

SEQ ID NO: 4152307 - RNA, 82 nt, Human
gcagcauggagaagacaagcugaguguuguccauggccuagaaugcuagguguaagggaaccauuuacuuucuucucugcuc

SEQ ID NO: 4152308 - RNA, 115 nt, Human
gcagcauggcuugcucaugcauuuaacuaaggaauaugacaaacucaaccaaaguaauaauaugguuggguuuuucucccuucuuucuguaauaugggcgucucacauggauugc

SEQ ID NO: 4152309 - RNA, 90 nt, Human
gcagcaugggugguccucugagcacgccaggcacgagugugcagggagcuggugcacaugccucugugugcgggugagcaucuguguugu

SEQ ID NO: 4152310 - RNA, 56 nt, Human
gcagcauguugaaagggccacacauucucuugucucagggccuuuauacaugcugc

SEQ ID NO: 4152311 - RNA, 77 nt, Human
gcagcauuuucccugcuggcuggggccaggcauugguaccugcagccugggccaguccagccccagggaaagcuugc

SEQ ID NO: 4152312 - RNA, 74 nt, Human
gcagccaaaccaaugaacaacacugaaggaagauaacuuaauguauucuacuagcauuguucacuuggccuugu

SEQ ID NO: 4152313 - RNA, 63 nt, Human
gcagccaccauggcucugcagagcacgcugggcucugagugucugcagugccacagugggagc

SEQ ID NO: 4152314 - RNA, 89 nt, Human
gcagccagcugaguggaaugcacuuccaacaucuauuagaugaugcaguuuauaaaagugggugccgaagugucccuccuguguacagc

SEQ ID NO: 4152315 - RNA, 55 nt, Human
gcagccaggggcugugaccuguugagcugguggcuggucagagcuaccuggcugu

SEQ ID NO: 4152316 - RNA, 59 nt, Human
gcagccauccaagagacauuugugaaugugcauagcuuucauaauuaucuuaggacugc

SEQ ID NO: 4152317 - RNA, 57 nt, Human
gcaucuucacacaaagccaguggcauuuauugagcaccugcuauguaugaggauugc

SEQ ID NO: 4152318 - RNA, 64 nt, Human
gcaucuuguguaggcauauucauagaguuguauagaaaugcugcuuuacugccugcuacucugc

SEQ ID NO: 4152319 - RNA, 56 nt, Human
gcaugaaagauguuuggggcuuuuucuaauccaagacccagagcacuuuuucaugu

SEQ ID NO: 4152320 - RNA, 57 nt, Human
gcaugaagggagguggcagucaggaaggccacacugauugggccacacugauucagc

SEQ ID NO: 4152321 - RNA, 74 nt, Human
gcaugaauacacuuuagaaaaacgcugcaguucucgauagcugcuugccuugugucuagaauguaacaguaugc

SEQ ID NO: 4152322 - RNA, 57 nt, Human
gcaugaauucuuccccagaaugauucccucuggagggaacugggccagaguuucugc

SEQ ID NO: 4152323 - RNA, 93 nt, Human
gcaugacuuagugaguuuagggugcagguguauacuccacuuuuuauauaaucuguuuaaguucacacuuggcucugagucacuacugucugu

SEQ ID NO: 4152324 - RNA, 91 nt, Human
gcaugacuucuggggcuaggccauaaaaggcauagaaacuuaucuugucucuuggauugcuugcucugagaaugaaaagaaaugguuaugc

SEQ ID NO: 4152325 - RNA, 121 nt, Human
gcaugagagcagcaucugaaccacucaggaggcuggacgugcauuucuacaguggauuccuaauucuguuuucugggguggagaaauauguucagcuucuucagcaguuugugaaucaugu

SEQ ID NO: 4152326 - RNA, 92 nt, Human
gcaugagcagaaugugggcuuuggagucaggaagacccagacccaaauuuugcauuuuguuuccuggcucuguggccuugucuaguucaugc

SEQ ID NO: 4152327 - RNA, 62 nt, Human
gcaacccagcucuaguuaugccagggagucucucaacuccacucaggugcuuaaguugcugc

SEQ ID NO: 4152328 - RNA, 93 nt, Human
gcaacccugggcuacucaguuccugcuucguggaucugccuggggucaggacauaacaucugugaagcaggaaggacagugcccagagcuugc

SEQ ID NO: 4152329 - RNA, 96 nt, Human
gcaacccuuugagacagggucuauuuuuaucaucuuuacuuuucagauacaaaaacuggaggcccagagaggugaagugaccugucucaaggcagc

SEQ ID NO: 4152330 - RNA, 71 nt, Human
gcaaccggguggaauuagaauuguucuacauguaugugucagaacucuauugauguccaacuggucucagc

SEQ ID NO: 4152331 - RNA, 78 nt, Human
gcaaccucaggcauaaucucaucuuguuucuauuacaauuucaaauucuggaaaaaggaaguuguggucuggaguugu

SEQ ID NO: 4152332 - RNA, 62 nt, Human
gcaaccuccucucccugucagcuccucacagccucuguggacacgagcugagaagaggaugc

SEQ ID NO: 4152333 - RNA, 100 nt, Human
gcaaccuggacuaaaucauguaggagaagaaagauguaaaaggauguuuaaaaaaacauuccauauauaccuuguuuuuuagccaugaagagagguuugc

SEQ ID NO: 4152334 - RNA, 73 nt, Human
gcaacgcucuggcggggcagaaaguugucuuuugcucccacaaaagcaaacacuuuuccuggucaggcgaugc

SEQ ID NO: 4152335 - RNA, 85 nt, Human
gcaacgugaguguacauguuuccuauaccuaugccagcaauauguuucagcuguuggcuauagagucauguuuacucuaauuugu

SEQ ID NO: 4152336 - RNA, 105 nt, Human
gcaacuaaggcagugcggucacauuguuugagaauacagaugcaaaauuacuugugaauuuacuugcucauuuuuccaaaggauguaaucuguacacuuagaagu

SEQ ID NO: 4152337 - RNA, 94 nt, Human
gcaacuacuuacauagcauuuacauugcauuagguauuauaaguaaucuagugaugauuuaaaguauaugggaagauguguguagguuaugugc

SEQ ID NO: 4152338 - RNA, 71 nt, Human
gcaacuccagaauccuagggucagcggcugggcuggccguugaugauugaacugggauucuugugacuugc

SEQ ID NO: 4152339 - RNA, 56 nt, Human
gcaacugccggcagagccacgcccgcccggccacaguuccuguaaccggcagcugc

SEQ ID NO: 4152340 - RNA, 90 nt, Human
gcaacuugaacucgugaguguucccagagaaggaugaaaaagcaagugaaaggacuuguaaauuacucugggaagaugaguuggagcugc

SEQ ID NO: 4152341 - RNA, 113 nt, Human
gcaacuuucaagagacaauggaagccugggagggcugggcuaaugccuuccauguggccaagaugcgaccucucaggcuuuaaucagacagucucagaaugagguuacguugc

SEQ ID NO: 4152342 - RNA, 76 nt, Human
gcaagaaauuauagucauauacauuacaugcuugauucucaggcucugucugucuguaauauauauaacugugugc

SEQ ID NO: 4152343 - RNA, 74 nt, Human
gcaagaccugggagccucugcggcccacgacaccuacaguuuuagaaucuggagagcagaugccucuggcuugc

SEQ ID NO: 4152344 - RNA, 62 nt, Human
gcaagacuggggugucugaugguaagggggcucggccacauugucacagauucucagcuugc

SEQ ID NO: 4152345 - RNA, 68 nt, Human
gcaagagauaguacaaagaagaauccaucccaaaaggggagcugugaaaucuuuguacaagucucugc

SEQ ID NO: 4152346 - RNA, 55 nt, Human
gcaagagcagcuuccuuuauuacuggaagaaaaucagugagauugcugcucuagc

SEQ ID NO: 4152347 - RNA, 128 nt, Human
gcaagagcccgguucuggagugggaguagaagguacaggcauugcugcagcggcaggacaggagcccauugcugacagagugccuggccucaaauuacacuguaucagagcucgggcauaaaauuggc

SEQ ID NO: 4152348 - RNA, 61 nt, Human
gcaagaggccucgugcucagcgugcagaacacugaagccacgauagcuuccuaacacuugc

SEQ ID NO: 4152349 - RNA, 72 nt, Human
gcaagaguuagcagucuuguguguuaauaguuugccuuugaauuuagaacuagaaaacaagaugcugauugc

SEQ ID NO: 4152350 - RNA, 58 nt, Human
gcaagaugguuauaaaaaauguugaaaaagagacauucuuccuuuuguagcaucuugc

SEQ ID NO: 4152351 - RNA, 99 nt, Human
gcaagcccccucgggccucgggggauggggccggccacaccccugacuccgcccuggcucugccccauaccccugccguggggccgaccugggggaugc

SEQ ID NO: 4152352 - RNA, 75 nt, Human
gcaagccuagagccucauccucaggacgacugcugggaaucucugcagggcccuugggguugaacagcugcuugc

SEQ ID NO: 4152353 - RNA, 100 nt, Human
gcaagcguagccuuagggcuggccaggaguguguggcuauguuggcuccucucuggacuuaauuggguaugugcacauccucagccaaguauacacuugc

SEQ ID NO: 4152354 - RNA, 106 nt, Human
gcaagcguugccgcgccgcuaccgucgggggccggcccccgggcugcuuuucgugcgcggagcagcucggccagucaccaggcgcgugcggaggcggcgagccugc

SEQ ID NO: 4152355 - RNA, 66 nt, Human
gcaagcuccugcacuugucgcugaagagcaagggcucaggugggcguuccggugcgggaaccuugc

SEQ ID NO: 4152356 - RNA, 68 nt, Human
gcaagcugaguuauggagaauaaagucaugcuuuucauacaccugaguuuauggccaugauucaaggc

SEQ ID NO: 4152357 - RNA, 71 nt, Human
gcaagcugcugcuaagagauaaauugcucucccaccuccccagcugagagucaugucuggguaacagcugc

SEQ ID NO: 4152358 - RNA, 63 nt, Human
gcaaggaucuguuguggggccagugugccaugacacccuuggcagcaccagcaguguccuugc

SEQ ID NO: 4152359 - RNA, 71 nt, Human
gcaaggauuucagccaacagaaucuugucaaaauuccugaauugauucuucauggcugugaguccucaugc

SEQ ID NO: 4152360 - RNA, 58 nt, Human
gcaaggcagggagcagaaaacagagccacuugaaggcuuucugucugcgucugugugc

SEQ ID NO: 4152361 - RNA, 65 nt, Human
gcaaggcauaggagggugucaggccucugagcucaaacuaggccaucauauccccugugaccugc

SEQ ID NO: 4152362 - RNA, 68 nt, Human
gcaaggcugaccucucuagacuguauuaucccagcucccuugcccuucugguugggucaggccccugu

SEQ ID NO: 4152363 - RNA, 57 nt, Human
gcaaggcugccgcagccaaugguuggcgagccgccggcuggcugggcggggccgggc

SEQ ID NO: 4152364 - RNA, 58 nt, Human
gcaaggcugcugccacccaucugcaacucuccaccagagaugggaggcuguguuuugu

SEQ ID NO: 4152365 - RNA, 58 nt, Human
gcaaggcuggccuuaaugauuuuugggagugguccaaauagagauaggccagcuuugc

SEQ ID NO: 4152366 - RNA, 78 nt, Human
gcaaggguuuucagagcaacaguuuaugguuuuucuguuugguuuauagagauacuggcugcucuugagaaaacuugu

SEQ ID NO: 4152367 - RNA, 77 nt, Human
gcaagguacagggaaggagcaagacuuagacuuuggaaaagcuggcuucaaauucugacucuauccuugugcuuugu

SEQ ID NO: 4152368 - RNA, 113 nt, Human
gcaagguggaggugagguggacucagcaggguugcaugucagcucagaccccaaacuauugagaucagauagcuggcugcuuguagacucgacugaccucauuccacugcugc

SEQ ID NO: 4152369 - RNA, 105 nt, Human
gcauuauuaggguaguaacaaugauagcuaccguuuaugcugugcuaacuagggcacaguuauaagacuaagcuauucgcauacaucuaaucuuuauaauaaugc

SEQ ID NO: 4152370 - RNA, 81 nt, Human
gcauucacaggcucuccaccaugaggccucacacacacaucuccaauccuguguuccuccauggcaagggucuguggaugu

SEQ ID NO: 4152371 - RNA, 56 nt, Human
gcauucaggaaccggaaggguagaaacacaaagaauuccggugcuuccugggcugu

SEQ ID NO: 4152372 - RNA, 76 nt, Human
gcauucaucuacccagaacuauuuuugguguguguucauagacagcacacaccaaaguauuugguauuugagaugc

SEQ ID NO: 4152373 - RNA, 71 nt, Human
gcauuccugagggcccccuacuuggcaaacaaaacccuugaaagugggccuguaggguuuucaggaacaac

SEQ ID NO: 4152374 - RNA, 65 nt, Human
gcauuccuggcacccuggacccggccugugaguuaugacgagcugaguugggugguggggggugc

SEQ ID NO: 4152375 - RNA, 61 nt, Human
gcauuccuguaccucucugcuaguaucuaaugaugcauauuaaugagaguguauuggaugc

SEQ ID NO: 4152376 - RNA, 88 nt, Human
gcauucuuccacucugaccugcuaagccccuguccgaaugaaccacccauggagggagaggugaggccggggccggacugaaggaugc

SEQ ID NO: 4152377 - RNA, 64 nt, Human
gcauucuuuuuaggagguuccuguuauaaauaaccacaaaauaacuuaccuuagugaaggaugc

SEQ ID NO: 4152378 - RNA, 73 nt, Human
gcauugacuccuuucacugauagacucgccguuagggugcaacaucagccucacaguuuauuagaguaagugc

SEQ ID NO: 4152379 - RNA, 84 nt, Human
gcauugccguuuguagcaaagcuuacuuagugaugccaggaguucauuccaauccuuaagaaaguuuucuauaauuucaaaugc

SEQ ID NO: 4152380 - RNA, 82 nt, Human
gcauugccuuugccccaguacacaagauucugaaauuauaaucuuuauuuguaauucaugugccacuggugaacagggaugc

SEQ ID NO: 4152381 - RNA, 56 nt, Human
gcauuggcagaaacagcagggccagccggcuuugccuggcccuguuuucuccaggc

SEQ ID NO: 4152382 - RNA, 67 nt, Human
gcauugggccugaggccagaacuuccacuccgcaugcugucccgagguucccccgccaggacccugc

SEQ ID NO: 4152383 - RNA, 67 nt, Human
gcauuguggaaaauacagucuugaacaagggcauuuguggaccaagauuuauauuuucacacaaugc

SEQ ID NO: 4152384 - RNA, 92 nt, Human
gcauuuaacaacuaggaagucuuaacugacaguuuaaugggugcuaaagguguaagacccauuucuguaaguugaguacuauguuauuaugc

SEQ ID NO: 4152385 - RNA, 61 nt, Human
gcauuuacugugcuagagcauuuguuucucagagcccaaaagcucuuucugcuguagaugu

SEQ ID NO: 4152386 - RNA, 88 nt, Human
gcauuuaguuucucacuuccaguagccaaguuuagaaaauuaaacaaaauugugcucuuggaaguuagauuuuuguuaaucccaaugc

SEQ ID NO: 4152387 - RNA, 67 nt, Human
gcauuucaaauggaauaccuagguggcccagggggaccccugaccccuauauccuguuucuuucugc

SEQ ID NO: 4152388 - RNA, 87 nt, Human
gcauuucaucuuguuucucaucuguauggcacauauuuuugggauagcuccagucuauguaaacgucuacauuaaccagagaaaugc

SEQ ID NO: 4152389 - RNA, 55 nt, Human
gcauuucccacaggaaaguagacauuguugccaauguauugucugugggacaugu

SEQ ID NO: 4152390 - RNA, 79 nt, Human
gcauuucccaguccccaucaauaucagaucagacaggaggcuuuuuucuagaugacuuuaugauguagacaggaaaugc

SEQ ID NO: 4152391 - RNA, 96 nt, Human
gcauuucccaugauuggcuucaaauggagcaaccagagcugaacagaauuuggggguuucauguugaguuccagauugccauauggguucagaugc

SEQ ID NO: 4152392 - RNA, 73 nt, Human
gcauuuccugccaggguuccuuuaagcuuugugauucaguucccauggccaaggggccuaggcagggaaaugu

SEQ ID NO: 4152393 - RNA, 60 nt, Human
gcauuuccugugcuuggcauaugaggaaaacaacaacaaaugcucaguaucaggaagugu

SEQ ID NO: 4152394 - RNA, 84 nt, Human
gcauuugaggauaggcacaaaaugaaaauggcagauuucguucgaauucuguuagaagagacguuuuuaaagugccccuagugc

SEQ ID NO: 4152395 - RNA, 87 nt, Human
gcauuugagguguggccugauuuugcaucucuaacaagcuucaagcuaauauagaugcugcuggucuuggaacauacuuugaguagc

SEQ ID NO: 4152396 - RNA, 73 nt, Human
gcauuugaugaaagaguucucagaaacgugggucuaaauuugauucuaguccugagggcaucuguucaauugc

SEQ ID NO: 4152397 - RNA, 58 nt, Human
gcauuugcuuccugggucuugaauuuccaccauuaaauuucagucuaguggcgggugc

SEQ ID NO: 4152398 - RNA, 80 nt, Human
gcauuugguaaauaacaaucacaguguacaaguaagugauaguuugcaaaccugaacugcugugagcaauuuccagaugu

SEQ ID NO: 4152399 - RNA, 57 nt, Human
gcauuuguaaggauuaucugcguuauggauuacuugguuaguaaggcuugcagaugc

SEQ ID NO: 4152400 - RNA, 56 nt, Human
gcauuuguguccuguuuuaccaaaggcuugaaaacaaggcucagugacauaggugc

SEQ ID NO: 4152401 - RNA, 55 nt, Human
gcacaaagccaaaugaaagaugguucuugccuuccaggaacuuuuggcuuugugu

SEQ ID NO: 4152402 - RNA, 117 nt, Human
gcacaagagcaaugacuaaguucguuacaugugaucagaaagugaaacacaucuaccauguuaauguagcuuucaauuuauggugacauuuacugaaaauacucugcaauauuuggc

SEQ ID NO: 4152403 - RNA, 129 nt, Human
gcacaauauaugaaaguucuaauauucaacaguggacaaaugauuucuaccuuuuucaaucaauaaaaccuuuagaaaucucagagagacauuuguuuaauauuaggaauuuauucacuuguauaaaau

SEQ ID NO: 4152404 - RNA, 84 nt, Human
gcacaaugccuagcacauggucaucacuugauaaauagcagcugcuauuauuauguuaacuggacugauuuuaggcagcugugu

SEQ ID NO: 4152405 - RNA, 77 nt, Human
gcacacaauagucagaagacugugccagggaguguguuugcccuggcuagcucuggccaguuacugcuauuggcugc

SEQ ID NO: 4152406 - RNA, 72 nt, Human
gcacacaccacagagggaccuggggacgcccguuggucagggcuuuccuggccagcuguggugaguuugugc

SEQ ID NO: 4152407 - RNA, 56 nt, Human
gcacacagguagagcaugcuuuuguccuugaagaggauaauuauuuacuuuugugc

SEQ ID NO: 4152408 - RNA, 56 nt, Human
gcacacuugcaggguaugcucgggcacccguguccaagaggagcaggcaggugugc

SEQ ID NO: 4152409 - RNA, 60 nt, Human
gcacagaaauuccaacccuggacauaauucugagucagaguuggccuuucuguauuuugc

SEQ ID NO: 4152410 - RNA, 84 nt, Human
gcacagacuuaacccagaaacgcaggcggucaggaaaucuaaugauggcuucggaccugggcagacuugaguugagaccugugc

SEQ ID NO: 4152411 - RNA, 61 nt, Human
gcacagagacaggagugcucccagugccaaaaggagaacuggcuucugcuucugcuccugc

SEQ ID NO: 4152412 - RNA, 87 nt, Human
gcacagaggugacgggagggagggcugcacuggcaauuaggaaaauuggauucuagcccugcuucaccauuuacuucucuccugugc

SEQ ID NO: 4152413 - RNA, 62 nt, Human
gcacagaucuuuguuggacagcuguacaucugcacaguuucuuaagacugagaucuuacugc

SEQ ID NO: 4152414 - RNA, 96 nt, Human
gcacagcagcagccgagucuggagcagcaguauuggugacaagaugucaccagagcccaucugcuccuaggcaugacuuugacuaaacuguugugc

SEQ ID NO: 4152415 - RNA, 87 nt, Human
gcacagcccgcucgcuugcaggucuccaugagugcgaggggaacaagaccuuugugugcugagggccugcugugcaggggacuuugu

SEQ ID NO: 4152416 - RNA, 58 nt, Human
gcacagcucuccccaagacgaaaccuucagcuuucgauuguaaauccaagagcugugu

SEQ ID NO: 4152417 - RNA, 73 nt, Human
gcacagcuggacaugucggauagaaugaguucaucccuucaaagaugagcuuaaagccgccaucuaguagugu

SEQ ID NO: 4152418 - RNA, 104 nt, Human
gcacaggauaucauggguguaucaagaagaggcaccagacauggccucauauagaaaauguaaaagccacuguugucuuucagauaauucccagauagagcugc

SEQ ID NO: 4152419 - RNA, 66 nt, Human
gcacaggcagucucaucaggcauguagucaaugaaugacuguucacuaaugggaauguuaaugugc

SEQ ID NO: 4152420 - RNA, 88 nt, Human
gcacaggccaucaugaaaacuugacaagugagguaguaggaauuaauacuccuuuuuuuaguuaaguugucuaugagggauucuaugc

SEQ ID NO: 4152421 - RNA, 57 nt, Human
gcacaggcuccggaggagagcuguauuggaauucugacucacuccucguagcugugu

SEQ ID NO: 4152422 - RNA, 78 nt, Human
gcacagggcgcuuggggcaggaagcaggagaagugaaggaaaacguagcugaugguccugucucaaggagccuuuugc

SEQ ID NO: 4152423 - RNA, 130 nt, Human
gcacaggguaagaagucugcaugaagucugucugaggcuagagcaggggcucaauaaggucauacaggacucagguuccuuugcucuuucugacuacugguucucagcagguugccuuuuugugcugugc

SEQ ID NO: 4152424 - RNA, 62 nt, Human
gcacagguugcaaaaguucacauuuuagcuaacauguuuugugaugcuuuucuuaaccuugc

SEQ ID NO: 4152425 - RNA, 72 nt, Human
gcacaguaggcucagcucuaucuuaauuggauuuucugacaaucaccaguaacuuggagcugagugcugugc

SEQ ID NO: 4152426 - RNA, 55 nt, Human
gcacaguagguauuuacccagugugguaugcagggguagugcaaccauacugugc

SEQ ID NO: 4152427 - RNA, 59 nt, Human
gcacaguauugcacaacucuagggggcaacaucuacagugaaagguaugugagcugugc

SEQ ID NO: 4152428 - RNA, 56 nt, Human
gcacagucacugccugcaugucuaacuucccuagacagugaggacagggacugugu

SEQ ID NO: 4152429 - RNA, 59 nt, Human
gccaaggauaccagcugugagauuugaacaaguuacucaaccuugcugaguguccuggu

SEQ ID NO: 4152430 - RNA, 64 nt, Human
gccaagguuggaggaucacguuagcccaggaguucgaggcugcugugagcacuccagccugggu

SEQ ID NO: 4152431 - RNA, 57 nt, Human
gccaaguccaguggucaauuaucuggauuacuuucagucaaugaucaauggcucggc

SEQ ID NO: 4152432 - RNA, 89 nt, Human
gccaaugcauuagaugaagcuuagaagggcauuuucuaaccauuacaaauugccuagucuagcaucucaauuucaucuacgugaagagc

SEQ ID NO: 4152433 - RNA, 83 nt, Human
gccaauguuaucaugcuucaucaucacuguuagaaaccggaugcugacuuuggagcauggcccaauaagaaccuagcguuugc

SEQ ID NO: 4152434 - RNA, 77 nt, Human
gccaauuaacuauuauuuacuauaacucuugguuguugucagagacaucaacuauauagaaauugauuguaagaggu

SEQ ID NO: 4152435 - RNA, 61 nt, Human
gccacaaaaacaggaacaugucaacucaucuugcauggcagcaauuuuccugacuuugggc

SEQ ID NO: 4152436 - RNA, 85 nt, Human
gccacaaagagggcuccagcggugucggcugccucggugugcgguucacuguggcuguguccaccugcugccuuccucucugggc

SEQ ID NO: 4152437 - RNA, 64 nt, Human
gccacaacuuuuugccccaguuaguguuuguugaguucaacacagcuaugggguaggaaacggc

SEQ ID NO: 4152438 - RNA, 90 nt, Human
gccacaaguaccagugccaaggcucuuggucuggaauucugaaaacauuuaccucugacccuggcagcccacuggccauugcuugugugc

SEQ ID NO: 4152439 - RNA, 88 nt, Human
gccacacccugcagcaggucaggcugggcugguguuagagucaagaaugggaggcuugggacuguggucugugcugcagggugauggu

SEQ ID NO: 4152440 - RNA, 56 nt, Human
gccacaccuuccucuagccuaggaauugauaacccaggcgaggaagucacuguggu

SEQ ID NO: 4152441 - RNA, 56 nt, Human
gccacaccuuucucuagccuaggaauugauaacccaggcgaggaagucacuguggc

SEQ ID NO: 4152442 - RNA, 68 nt, Human
gccacacugcuuuuuagcccucucagaaccaaauagggucucaggagacuggagagcauggguguggc

SEQ ID NO: 4152443 - RNA, 88 nt, Human
gccacagaaagcaggaauguuuuguaugccucugagcuaagaaugguuuucacaggggccugcaaaaccuaaauauuuacugucuggc

SEQ ID NO: 4152444 - RNA, 68 nt, Human
gccacagaggagugcacacucucugggaucacuuccagagucagagaggugauuauuucauuuguggu

SEQ ID NO: 4152445 - RNA, 66 nt, Human
gccacagcccgagcaccaugagcuccggagacccugcacaccucggccucugccucuggcuguggc

SEQ ID NO: 4152446 - RNA, 55 nt, Human
gccacaggcuccagcaucaguaugaaauccauuacuguccgucaagcccuguggc

SEQ ID NO: 4152447 - RNA, 62 nt, Human
gccacagggcgagcggaggccagggacaggacucaggaccuuggagaggccgcccguguggc

SEQ ID NO: 4152448 - RNA, 75 nt, Human
gccacagugguaguaguaggcuuucaauuuugucuccaaaaaaaguauauuuuuagcuuacauuaccauuguugc

SEQ ID NO: 4152449 - RNA, 57 nt, Human
gccacaguuaugggaaacguaguuucaagagcugcuauaaucugccauaacugaggc

SEQ ID NO: 4152450 - RNA, 92 nt, Human
gccacauaucagauuaccucagaacauccugguuuaaaaugacaaauauuuauuaccucggaguuucugugagucaggaaucuggguguggc

SEQ ID NO: 4152451 - RNA, 69 nt, Human
gccacaugcauaugcauggacacucagagguuguuuauuaccuuugauuucaaaauauaugcuugaggc

SEQ ID NO: 4152452 - RNA, 81 nt, Human
gccacauuggagggacugguguacaauaguuaagagugaugauguccuuucagugcuucuguuuaccgguuuuucuguggc

SEQ ID NO: 4152453 - RNA, 57 nt, Human
gccacauuuuucuuguucuuggucccagaagcuuucugcagagaugaagaagguggc

SEQ ID NO: 4152454 - RNA, 120 nt, Human
gccaccaaauaugcguuacgugauguguauuacucuacuccaaaaggcuacaaucauguuuuaguuuacaugagugacgcccucuggaguagggcacuacacucagcugaaggugguggc

SEQ ID NO: 4152455 - RNA, 124 nt, Human
gccaccaccaucagccauacuauguguagugccuuauucaggaagguguuacuuaauagauuaauauuuguaaggcacccuucugaguagaguaaugugcaacauggacaacauuugugguggc

SEQ ID NO: 4152456 - RNA, 89 nt, Human
gccaccaccuggccuuggccugggacagagcagcaguggggaggggccuuugugcaucucugcuccuacagcucagggcugggaguggc

SEQ ID NO: 4152457 - RNA, 78 nt, Human
gccaccagcuugcccaccugcuuccucgcuugggcucugucauuucugauccaggugagugcaggugcagaugguggc

SEQ ID NO: 4152458 - RNA, 68 nt, Human
gccaccauagaggccuuccuguagguuuagcauauccaucugcuaccaggaaugcauucuagaauggc

SEQ ID NO: 4152459 - RNA, 123 nt, Human
gccacccaaguucauagcugcuauuugcuggcagcacgacaggaguggaaggaaacagcguagugaccccaccuuucuuuugagcugguaggaagaaaacagaagauggacuugggguugggc

SEQ ID NO: 4152460 - RNA, 108 nt, Human
gccaccccccacagccucuccagcagagugggagcccagggcugggcaagcccccgccuuguccgcaggugcccacaucucuuggguuggcagugguaggcagauggc

SEQ ID NO: 4152461 - RNA, 57 nt, Human
gccacccuggcuacugugaaagcuacagguggggguccugacagagagcaggguggu

SEQ ID NO: 4152462 - RNA, 56 nt, Human
gccacccuugcgucacugacauugggcucuucagucauugucauguuguaauuggc

SEQ ID NO: 4152463 - RNA, 84 nt, Human
gccaccgaggagccccaggcagccaggggaccuguccuucacccuagaggauagaagcccaaaggcugcggcugcugcaguggc

SEQ ID NO: 4152464 - RNA, 74 nt, Human
gccaccuccuugcaaaguugccaagaguuccagaagaaagagaaggcuacagcuuugcacaacagagagguggc

SEQ ID NO: 4152465 - RNA, 57 nt, Human
gccaccuguaagccauuaggccuggaaugaaaaucaagccugaaagcugccaguggc

SEQ ID NO: 4152466 - RNA, 62 nt, Human
gccaccugugugggccuuugugcaaauccaaggaaagcauccggugcccaacacaggcuggc

SEQ ID NO: 4152467 - RNA, 86 nt, Human
gccaccuugcugcccaugaaaauguagggaugcauaaagccaguguuuaggucauuccuuauguugauucagggaggucacuuggc

SEQ ID NO: 4152468 - RNA, 86 nt, Human
gccaccuuuauucuacucugccccagccaauaauggguacccuugaggcuuacaggcugcagggcuagagggagaugagagguggu

SEQ ID NO: 4152469 - RNA, 90 nt, Human
gccaccuuuggcacccuccagccacggcucuuuguuuucuauagcaucccuggggaugugaagguaaggaggggcaagaggguggguggc

SEQ ID NO: 4152470 - RNA, 88 nt, Human
gccacuaauccaauuaagaaaguucagcuucccaggucacugaaggaaaaugucucucaggagagguuuggacaugauagauuaaggc

SEQ ID NO: 4152471 - RNA, 59 nt, Human
gccacuagggggccauuuaguuuucugcaacaggagaacacuaaugguuucuuaauggc

SEQ ID NO: 4152472 - RNA, 55 nt, Human
gccacuagucaagagauuggggcucucuaaugagccaagacucccaucuaguggu

SEQ ID NO: 4152473 - RNA, 69 nt, Human
gccacuccucggccuuggguucuaguagcaacugaaagcuaggacacaggcaggaggagaucaccaggc

SEQ ID NO: 4152474 - RNA, 64 nt, Human
gccacucuacucuuuuccguugcuggcccuuagaccgaggacagcaaugacggggcagcugggc

SEQ ID NO: 4152475 - RNA, 76 nt, Human
gcagauucuugggcccuccccuugugaaucagaccuacugaaucagaacuucucagggugggguucacuaaccugu

SEQ ID NO: 4152476 - RNA, 61 nt, Human
gcagauuggagacagaugggcuccagcauuauccaugugugaggucauugucccaggcagc

SEQ ID NO: 4152477 - RNA, 77 nt, Human
gcagauuuaugagaggggaugggucuaccuggagugacuugaggaauacccagaagaccccguccaccuccuccugc

SEQ ID NO: 4152478 - RNA, 55 nt, Human
gcagauuucuugaggaaauguuuugcgguguuaacaaccuucuggagauaucugu

SEQ ID NO: 4152479 - RNA, 67 nt, Human
gcagauuugcuccagugcagcugcagccccaggaaaugaggaaaggcugugcuggaaggggaccugc

SEQ ID NO: 4152480 - RNA, 71 nt, Human
gcagauuuuuagaguguuaccaguauacccccuucauaccauggcgguccagcuguugauauucuaggugc

SEQ ID NO: 4152481 - RNA, 73 nt, Human
gcagcaaaugucaaagagaaacagucaugccuaagagucauuaaaugauuuguuuuucauucacaugggcugu

SEQ ID NO: 4152482 - RNA, 76 nt, Human
gcagcacagggcagugauuaaacucaggcacucaccccacccuaccugggaaucugaauucugucuuuucugcugc

SEQ ID NO: 4152483 - RNA, 56 nt, Human
gcagcacuggcaauagaauggacaacuagaacuugucccagcugggucagugcugc

SEQ ID NO: 4152484 - RNA, 65 nt, Human
gcagcagagccagaauuggaccaguaccucucugacuggggaaccugauuuuucuguuuugcugc

SEQ ID NO: 4152485 - RNA, 73 nt, Human
gcagcagaggaaagcaaaucuaaaacaacacaaaagguaauaguuguuuacuuggucaagcugucuucuuugc

SEQ ID NO: 4152486 - RNA, 78 nt, Human
gcagcagcagcagcaauuuucugucccccugguuuugucuucuggggcaucuugaccaggauuuguugcuguuucugc

SEQ ID NO: 4152487 - RNA, 103 nt, Human
gcagcagcaucaccugggauuuugaaagaaaugcagaaucucagcccuugaccuagggaaucagagucuacauuuucacaaggucuccaaaugaugcaucugc

SEQ ID NO: 4152488 - RNA, 60 nt, Human
gcagcagcccacagcuggaggccuaggaguguccaugggcauggacuguggagccgcugc

SEQ ID NO: 4152489 - RNA, 64 nt, Human
gcagcagcccagccuugucucuuuauaggguccuagagaaccggugguggcuggguugaaaagc

SEQ ID NO: 4152490 - RNA, 75 nt, Human
gcagcagcccaggcccagcaccagcggucuuccggcuccucugagggcugccacguugggcgaggggagccaugc

SEQ ID NO: 4152491 - RNA, 56 nt, Human
gcagcagcucccuauccaggcuccuguuugcagagcuggaaauggccgagcucugc

SEQ ID NO: 4152492 - RNA, 80 nt, Human
gcagcaggcuaagacagggagggcucucagccgcuuggauuucuacacagcugcaaguccuucccucucuuuucuggugc

SEQ ID NO: 4152493 - RNA, 86 nt, Human
gcagcagugcuauggccagggugccuguccucagcaaaccucauggucugacuggagaaucagggcccaguucuuagcaagguggu

SEQ ID NO: 4152494 - RNA, 121 nt, Human
gcagcagugggagcgguucacccuggcuuuauucuguuggcccucucauccugucccugccgcuuagacaaggaucaaggaugggccaaugggaugcaaagguagcugaacccacaccugc

SEQ ID NO: 4152495 - RNA, 59 nt, Human
gcagcauacagggagaguacucauuacccaggcagugguuacccuuucuaugcugcugc

SEQ ID NO: 4152496 - RNA, 112 nt, Human
gcagcauagcauauugugaaaaucuggaaccggcaccuugagagaaugaggauuaacccccuugaguuauuaauggcugaguuugaaggauaccucacugucccuguguugc

SEQ ID NO: 4152497 - RNA, 55 nt, Human
gcagcaucuagggcacuggccuggaguaucgcaggugcuuugccuaagguggugc

SEQ ID NO: 4152498 - RNA, 67 nt, Human
gcagcaucugagggguugugagaaauguaggauuuaaagguccuacaccugacccuacagaaacugc

SEQ ID NO: 4152499 - RNA, 90 nt, Human
gcagcaugggugguccucugagcacgccaggcacgagugugcagggagcuggugcaaaugccucugugugcaggugagcaucuguguugu

SEQ ID NO: 4152500 - RNA, 90 nt, Human
gcagcaugggugguccucugagcacgccaggcacgagugugcagggagcuggugcaaaugccucugugugcgggugagcaucuguguugu

SEQ ID NO: 4152501 - RNA, 64 nt, Human
gcagcauuuguggaaugggccccaaagcauuaccaaaugggaaaucaguagcccuaaaugcugc

SEQ ID NO: 4152502 - RNA, 121 nt, Human
gcagccaaagaagaaaaggaaggaaagaucaucugaggacuaaaauaguuuguuaaagggaacaucuuuauacuaguccuugaaaaagauuuuauccacauucuguuuaaaagagguuugc

SEQ ID NO: 4152503 - RNA, 66 nt, Human
gcagccagcuggagaccacuguuugcuggcuccugccuuaaaacagugacuuccaaccucagcugu

SEQ ID NO: 4152504 - RNA, 74 nt, Human
gcagccaggcauuaucuguagucagaauaauuuuucauacaaauaauuuuucaaguacagauugaaccugcugu

SEQ ID NO: 4152505 - RNA, 60 nt, Human
gcagccauagccaccucagaaggaccugagcugaggacaccaccugaggauuaugguugu

SEQ ID NO: 4152506 - RNA, 62 nt, Human
gcagccccagucuuguauauucugggacgacuucuucccaggaugaucgagagugggaaugu

SEQ ID NO: 4152507 - RNA, 78 nt, Human
gcagcccugcacaggucuguggcuggugauuuucaugaaagggagcaagagccacacugaccuguuguuggaagcugu

SEQ ID NO: 4152508 - RNA, 62 nt, Human
gcagcccugcaggcagcuccagaagcucaucggcaucuccauuggcagccugcgcgggcugc

SEQ ID NO: 4152509 - RNA, 57 nt, Human
gcagccuaauucuuugccauguaaaguaacauuuacagauucuggguauuagggugu

SEQ ID NO: 4152510 - RNA, 61 nt, Human
gcagccucaugaagcaggcacagcuucaggaaacccugcccuaugaccagcuucacucugc

SEQ ID NO: 4152511 - RNA, 122 nt, Human
gcagccugcugcuggucagguggcagauuguguuuuccaaagacugccuccccugcacauccguccugcagggcuuugcaaugcacagugggccugucaccccugccagaagagggggcugu

SEQ ID NO: 4152512 - RNA, 60 nt, Human
gcagccuuccugacuugagcugccauuguuccauugucacgggcagcuugggaagguagc

SEQ ID NO: 4152513 - RNA, 77 nt, Human
gcagccuuuuaauuuguuuauguaauuggcacacuuaaauggaaugugucaucauaugaauguuuuuaaaauuuugc

SEQ ID NO: 4152514 - RNA, 74 nt, Human
gcagcgcuccgcagagggagccgcgggcugcuuggucggccugccccgccggccccucauguuggagccgaggc

SEQ ID NO: 4152515 - RNA, 65 nt, Human
gcauaagguuggucuuaacuaccuguuguuuauuaacuucaggaagcuuuaugaccagcuaaugu

SEQ ID NO: 4152516 - RNA, 60 nt, Human
gcauaagugacauuguguccuucucaaucaucccaucgggggcauaaaaugucaaugugu

SEQ ID NO: 4152517 - RNA, 76 nt, Human
gcauaauguugauuugggcccugguguuaagauuguaucuaggaauaugaacaucugggccuaaggcuauaugagc

SEQ ID NO: 4152518 - RNA, 64 nt, Human
gcauaauuaaauucugggcaagauuuuacagaaaugcagcuucuuuuuucuaauuuaguugugu

SEQ ID NO: 4152519 - RNA, 98 nt, Human
gcauacagugcuuggaccagcaccugauaggcaguaaacuccaaauccuuauuugcuguuacucuuauuaugugguccuucuugggcucucagugugc

SEQ ID NO: 4152520 - RNA, 79 nt, Human
gcauacaucaaggcacguacuaggaaguuccuggagagguaggagccugaucauaaacacacuaguaugauugauaugc

SEQ ID NO: 4152521 - RNA, 61 nt, Human
gcauaccauggugaccagggugacaaaaagguguccuuuccacucuggccaccaucuuagc

SEQ ID NO: 4152522 - RNA, 72 nt, Human
gcauacucucauuggcccuaccugcagucgcucuacguaaggggcguuccagagucagccacugggagucgc

SEQ ID NO: 4152523 - RNA, 59 nt, Human
gcauacuguccaugacuugcacuauaaugcuucuauuugguguuaagaaauggaugugc

SEQ ID NO: 4152524 - RNA, 82 nt, Human
gcauacuuuaaauucauuccaacuuuugacaaaaaggagaagggaauuugugugaagguaugaugaguuuaaagaaacaugc

SEQ ID NO: 4152525 - RNA, 82 nt, Human
gcauagacaaugacauuucuccuugcaggagucaauagguuuuguguugguucaugcucauggugauagugaguuucugugu

SEQ ID NO: 4152526 - RNA, 83 nt, Human
gcauagacguuccagagugcugacgcagaccccuaaguuccaagggcuuugcaaaaucggcuucuguugugaaugucauuugu

SEQ ID NO: 4152527 - RNA, 79 nt, Human
gcauagaucuggcuucauucagcaugacaguucuaaagaacgucaucuuugcguguuguggcugaguagugucagaagc

SEQ ID NO: 4152528 - RNA, 67 nt, Human
gcauaggaaaagucuagauugaugaguggguaguuaaccagaaacuucacucaauugacuuuuuugc

SEQ ID NO: 4152529 - RNA, 62 nt, Human
gcauaggaacacauggacauuucugaucuuauauaaguauuauacuuuuguuguuccugugc

SEQ ID NO: 4152530 - RNA, 86 nt, Human
gcauaggccuaauaauuagauuuuauuuuggagagccguuggucuaaugggggagauagagucugaugguggaggcaauacugagc

SEQ ID NO: 4152531 - RNA, 58 nt, Human
gcauaggcuucucauuggggaagucaggggaagcccaucuuucucaggaaguuugugu

SEQ ID NO: 4152532 - RNA, 64 nt, Human
gcauaggcuuguccauccucuuuugccaccaaagugugguugcccaagagggaaagugcuaugc

SEQ ID NO: 4152533 - RNA, 58 nt, Human
gcauagggcuacuggucucaucccagcgaucgggacagaaauugcuaauagcucaugc

SEQ ID NO: 4152534 - RNA, 99 nt, Human
gcauagguuguagaaguguaugucuuaauccuuccuuaggaaagucuuaauccuugcuuaagaaagcuuaugauauuacugauaaggcaaggcuuaugc

SEQ ID NO: 4152535 - RNA, 61 nt, Human
gcauagugucaucuccucuuuguucagauaagacaacugaggcagaguaagauacaugagc

SEQ ID NO: 4152536 - RNA, 92 nt, Human
gcauauaauagcaaaaauaguaauaauaguuguuaauauuuauuuagaacugccaauuguugacaaugcacugugcuaagugcuuuauaugc

SEQ ID NO: 4152537 - RNA, 73 nt, Human
gcauauauguuauacacauauacguuuguguguauaugggugccgcacuguguguguguguguuuaugugugu

SEQ ID NO: 4152538 - RNA, 72 nt, Human
gcauaucaauagcugggaccugaauuagcaccauauggagcagaguucucuuccagcuaaccaaggguaugu

SEQ ID NO: 4152539 - RNA, 60 nt, Human
gcauaucacgucaacagagggaguauugacaacugguugucuuccuaguagacugugugu

SEQ ID NO: 4152540 - RNA, 72 nt, Human
gcauauggcagggacugggguucuugcuuggaacuaggacccaagcacaguuccugguaucccauaaaaggc

SEQ ID NO: 4152541 - RNA, 71 nt, Human
gcauauggguguaguuaggagugggguggggcugaagcaguuaggaucccacaccugucuauuccuagugc

SEQ ID NO: 4152542 - RNA, 82 nt, Human
gcauauucuuuuaaagcaggguuucuccaccugaacauuaccgacauuuugggcuggauaagucuuuguuaugaggagcugu

SEQ ID NO: 4152543 - RNA, 64 nt, Human
gcauauuuaugucucugcagagaauaaccugaccuuauuugcugcagugaccaugaaacagugc

SEQ ID NO: 4152544 - RNA, 61 nt, Human
gcauauuuucacaagcucuuggucuuagguauuugaaaauucaagggcuaaagagaagugc

SEQ ID NO: 4152545 - RNA, 99 nt, Human
gcaucaaaguuauuuuaguaaaaugcuuuugcugucauugcuuuaaaacuagcucuucgaagugggaaaaccaaaaguuuuauugaagcaauuuguugu

SEQ ID NO: 4152546 - RNA, 68 nt, Human
gcaucaaucuuauaucugcauaucugaaccuacccuaucagaaaauuugucuucauaugagauggugu

SEQ ID NO: 4152547 - RNA, 67 nt, Human
gcaucacauauuuaagaaacauguuuucuugcagguuauccugacuguuucucaaauuauguggugc

SEQ ID NO: 4152548 - RNA, 103 nt, Human
gcaucaccuggaauacuguccucuucugcagggucaauauggcauuaucauacccaugucccagaucacaggaggggagaaacacaggaauuccaggucaagc

SEQ ID NO: 4152549 - RNA, 68 nt, Human
gcaucacugcccauuaaaggugcuuugacucuauaucucuuuuucaguagcccacuaguaugcagugc

SEQ ID NO: 4152550 - RNA, 55 nt, Human
gcaggagacaacuguaaggagaagaaaccucauuggcucuuuaauuugcucuugc

SEQ ID NO: 4152551 - RNA, 102 nt, Human
gcaggagacagcaacgccaggggccgggaccucugucccagagacccuccgcgcccagucuguggugggacagugugccuugcuccuguguguucucccugc

SEQ ID NO: 4152552 - RNA, 60 nt, Human
gcaggagccaggccgagcugguccccaggcucccacaucuggccuguguuccccaccugc

SEQ ID NO: 4152553 - RNA, 61 nt, Human
gcaggagcuuugcuuacugcugagaugaauauaaaaaugaguaguaagauacagccccugc

SEQ ID NO: 4152554 - RNA, 81 nt, Human
gcaggaguaaugauaguucacuaauagcaaaagccagcugugcugguuuccuuuaauagugauauuguaguauuaaaaugu

SEQ ID NO: 4152555 - RNA, 77 nt, Human
gcaggaguccucuccagacuuucugcaggaucgcuaaugagaucaagucugccugucuggaggggcgauuauccugc

SEQ ID NO: 4152556 - RNA, 76 nt, Human
gcaggagucugggaaggcucugcagauauguucaacaaacaccuccaggaagucuucucagcacagcaccuccugc

SEQ ID NO: 4152557 - RNA, 68 nt, Human
gcaggauccgcugcuguuuggccuguagcucccucagcaggagcugccgaugcccagcugcauccugc

SEQ ID NO: 4152558 - RNA, 59 nt, Human
gcaggaugccagggcagcagcguguguuaggacgcugacccaggccuugcauugccugc

SEQ ID NO: 4152559 - RNA, 59 nt, Human
gcaggaugcuguauuauguguaugaccuuuucagucauguccugcauaguugcuucugu

SEQ ID NO: 4152560 - RNA, 65 nt, Human
gcaggauggugcccuuucugcccccagggaggcuuuggccagguaggaaaggcagauaucacugu

SEQ ID NO: 4152561 - RNA, 72 nt, Human
gcaggauucauucuggaggcuugagcaaagaaucugucuucuuagcuuuuccagcuucuagaggccaccugc

SEQ ID NO: 4152562 - RNA, 94 nt, Human
gcaggauugaagccuguuucauggcuuguaauaaauuuauagaugcuauaaucuucauuuccaagccacugugugauaaaagcccccauccugc

SEQ ID NO: 4152563 - RNA, 80 nt, Human
gcaggcacaugacuucaggugacugccuccaggcgcucgccuggaggaaguugcuggaagucagugcaaaugagaacugc

SEQ ID NO: 4152564 - RNA, 88 nt, Human
gcaggcagggcaaauaauuacuauccucacuucacauuagguuaauaacuugccgaaagucaaaggauuaguaauuaguucugcuggc

SEQ ID NO: 4152565 - RNA, 55 nt, Human
gcaggccagcagggccuccguggcgucuugggccgggaggcagaugcuggugugu

SEQ ID NO: 4152566 - RNA, 60 nt, Human
gcaggccaggcuaggggcugucagggaccuuccccagcguccccuccucccugguccugu

SEQ ID NO: 4152567 - RNA, 76 nt, Human
gcaggccagggcugugggggccugaaccaccuccuucuuugcaaagggacagccuggagccacagcccagggcugc

SEQ ID NO: 4152568 - RNA, 74 nt, Human
gcaggcccccaaauuugugcuuucauagucaucguuaaucaaauaggcagaaacacuguauuuagggaaccugu

SEQ ID NO: 4152569 - RNA, 130 nt, Human
gcaggcccuggcuugugucuacuugcgccucagugcugaucgucccucacuccugggugcugaccagcguuguccuagugaccugggagcucaggugugggaggcagaggugcagugcagccuggcuugc

SEQ ID NO: 4152570 - RNA, 66 nt, Human
gcaggccuggggcuggcuuccaguccagagcaagugcucuuccuccugcaugagccucaggccggc

SEQ ID NO: 4152571 - RNA, 93 nt, Human
gcaggcggcagggucugcagggcaaugaucccgagaggaguguggccaggaacccucuagggaacaccugccgugguugucccugcugcuugc

SEQ ID NO: 4152572 - RNA, 69 nt, Human
gcaggcgggcugccagauccuuggaaucuucuggaaugagagagguugagcugcagcccaaaggccugu

SEQ ID NO: 4152573 - RNA, 58 nt, Human
gcaggcuccaacuggaggaguugagaaaauuuaacuuuaaucaaguuuggaguuuugc

SEQ ID NO: 4152574 - RNA, 65 nt, Human
gcaacaucuaagcaagaaugagugcaacauuuaaguaaucguugcaugcuuguuugguugucagc

SEQ ID NO: 4152575 - RNA, 95 nt, Human
gcaaccaagauguacuuaccuucucuuggagaacucacuuaacagcuuaagugaguucuccaagagaagguaugucugcaacgcauuuaaguugc

SEQ ID NO: 4152576 - RNA, 64 nt, Human
gcaaccauuuggaauguaaaaacauucaacaaauguaacauuuucuccgcauuccagugggagc

SEQ ID NO: 4152577 - RNA, 77 nt, Human
gcaacccucccucaguuuuccagugugggcuuugcuuuauguacagcccucacucaacaauugccaagggauuuugc

SEQ ID NO: 4152578 - RNA, 57 nt, Human
gcaacuaccaggcucauaguagaccagccucaagccccugcugagagccuggcuugc

SEQ ID NO: 4152579 - RNA, 88 nt, Human
gcaacuagaaaauauuuguugagguaaugccuaucaaagaacugauagcuauauuguuuuuaucuaauagcaguuaugauuuauuugc

SEQ ID NO: 4152580 - RNA, 83 nt, Human
gcaacucuggcacagaucacuugacuaaaaugagacugggaauuacaauuauuuuagauugagucauuuucccaccauguugc

SEQ ID NO: 4152581 - RNA, 85 nt, Human
gcaacuggaauguuuguguuucccauucaggcuaagguuuucuugguaugaagguucuuggaacgcugcaucauaaucuacuagc

SEQ ID NO: 4152582 - RNA, 94 nt, Human
gcaacugugugaucucagcucacuguaaccuccaccuccuggguucaagugauucuugugccucagccuccuggguagcugggauuacaggugc

SEQ ID NO: 4152583 - RNA, 84 nt, Human
gcaacuucuuguggcuuagggacaaacucaacccauucucuacauucacaguuugggguucuuaagaccacaauaaaaaguugu

SEQ ID NO: 4152584 - RNA, 128 nt, Human
gcaacuugaguggaucauuucuuccuucuggaccucagcguccucaucuguaagauggggcuaaaagaagcccaguguuccuugaggggcuguggugagagguaaagaaaugagaauuugaagguugu

SEQ ID NO: 4152585 - RNA, 78 nt, Human
gcaacuuuaauuguauucauauuaaacauaucaauguuagaacugauguaauauguuuagcaugaauaugaagguugc

SEQ ID NO: 4152586 - RNA, 55 nt, Human
gcaacuuucaagcaccauggggggaaaaccaaaugggauagagcuuggaaauugc

SEQ ID NO: 4152587 - RNA, 80 nt, Human
gcaagaaaaaugcccauacuuuugcccugacauucuuagacaccuauuaagaaugaggaaaaguaagguaccaucuaugu

SEQ ID NO: 4152588 - RNA, 63 nt, Human
gcaagaaaggcaggcuuucacaucucagacuacccugagagcaaagguuagcuccuuucaagc

SEQ ID NO: 4152589 - RNA, 74 nt, Human
gcaagaagacgacagcagaagaagcaagccaaaugguuucuuuggcuauucuuguugcuguguguuuguuuugc

SEQ ID NO: 4152590 - RNA, 72 nt, Human
gcaagacaaggacugaguugaaaauuggcaccugguucaggucacugagcuguaauucugucuuugccuugc

SEQ ID NO: 4152591 - RNA, 55 nt, Human
gcaagaccugaguaaugucaggguguccucccuccagggcaguggcugggucugc

SEQ ID NO: 4152592 - RNA, 86 nt, Human
gcaagagcuauucacauucucaggccuggucucauacagagucaccuacaaugugugacuauuaggucuuguggaauucuucuggc

SEQ ID NO: 4152593 - RNA, 66 nt, Human
gcaagagcugaggcuggagaggugaauuggaccagguccaugauauccuugagccuuaucuuuugu

SEQ ID NO: 4152594 - RNA, 80 nt, Human
gcaagaggaugaaagugcucggcgcuggucccagguaaaguuaugacucugggcagguggucugaggauugcccauuugc

SEQ ID NO: 4152595 - RNA, 105 nt, Human
gcaagauggcuuaugaucuaaggaaagagccaguguccuuccugcggcaccagaagucccagaaaggacuuugguuggcuuggcuugggucucacacccaucugu

SEQ ID NO: 4152596 - RNA, 63 nt, Human
gcaagauuuuguuauucucauggcacauguaguguggcauguaccaugugacuggagucuugc

SEQ ID NO: 4152597 - RNA, 67 nt, Human
gcaagcaagacagaaguuacugccucuuuguuaaccaaucuuggaaguaacauucugucuuuccugc

SEQ ID NO: 4152598 - RNA, 86 nt, Human
gcaagcaauuuuugaucagguuuuucucaaaucaggucaaauucaugcaugaugaccuggugggcagagccuucaucaacggcugc

SEQ ID NO: 4152599 - RNA, 80 nt, Human
gcaagcagcuggggaggucguggggaagccgugcagaggcugcugccguaaaucccucagugaucuucuccccugccugu

SEQ ID NO: 4152600 - RNA, 72 nt, Human
gcaagcaggcaagcgugaguucucuaaacaaagagcggcuuuaagcagggaauuuuaggcuuccaagcuggc

SEQ ID NO: 4152601 - RNA, 57 nt, Human
gcaagcaggguuccuuagggcaccaguugguaaguguaagaggccucauccgcuugc

SEQ ID NO: 4152602 - RNA, 73 nt, Human
gcaagccccgacucucccugagagggaggcauuauauaauaacuguccgcagagggagaggcugggugcgugc

SEQ ID NO: 4152603 - RNA, 76 nt, Human
gcaagccuuucccuuguguaggacaccccagggccucacauucucugaauccacacaaggugauggauggcuuugc

SEQ ID NO: 4152604 - RNA, 71 nt, Human
gcaagcucagagguaaggagugacgcccgccaggacuagcugauggagccaugccuggccuuuccccuugc

SEQ ID NO: 4152605 - RNA, 82 nt, Human
gcaaggacagcaugagccuguccugugcaugugaauuuaaauuuuccauauguauacacaggcuguuuagcuucaucuuugc

SEQ ID NO: 4152606 - RNA, 114 nt, Human
gcaaggaggaggugugaggaggagggagccucuggcagcuuuuuguuucaggcuagaacuuucuagcaaggcuucagagcugucugacccaccugcugacuuauucuccccugc

SEQ ID NO: 4152607 - RNA, 64 nt, Human
gcaaggagguugaugccagggaguuggggccgaugaucuccagucccaggcagaaauccagugu

SEQ ID NO: 4152608 - RNA, 113 nt, Human
gcaaggauggagguuguccugcaaaggcauuuuaauucuaaagaaaaaggagauuaguggccucuacccaucuuagagaauagaguguccugacaccuucccuuccuccuugc

SEQ ID NO: 4152609 - RNA, 68 nt, Human
gcaaggcauagggaagagucauuagauuaccccaucugccugcucuccggaucccugauaugccuugu

SEQ ID NO: 4152610 - RNA, 92 nt, Human
gcaaggccacugugcacaauuccccuuccccugaggauagggcaggaccccucgggaaugagggucuuccagggaggagggagugaccuugc

SEQ ID NO: 4152611 - RNA, 57 nt, Human
gcaaggccugaggugggugcucauuugguguguguggcaccaaaagaaggccauugu

SEQ ID NO: 4152612 - RNA, 79 nt, Human
gcaaggcggaaggggugggugagccucaggggugcuucuggcucucacgcugaggccucucccacuccagcugcccagc

SEQ ID NO: 4152613 - RNA, 64 nt, Human
gcaaggcucugggagcacccugaagcccucacagccugggccucaguguccggagccugagugc

SEQ ID NO: 4152614 - RNA, 72 nt, Human
gcaaggcugagcacauuugcaugagcagaauguaaauacaggaggcuucuugcagaugagcuucucucuugc

SEQ ID NO: 4152615 - RNA, 83 nt, Human
gcaaggcugccucuccuccagaggcuguggggaaaaggucuguuuccuagucuuuuuauagcuucuggaggucugucacuugc

SEQ ID NO: 4152616 - RNA, 60 nt, Human
gcaaggcugugcacuuugcauuuugucaugcuucgucugcagucaguagcacagccuugu

SEQ ID NO: 4152617 - RNA, 62 nt, Human
gcaagggcagauagcugguccaagcacucuugugugcuuuugagcaaaucaucuguccuuuc

SEQ ID NO: 4152618 - RNA, 64 nt, Human
gcaagggcuuucugcucuggccuuaacucacauggcauuuuuaaggcauggcaaauguucuugc

SEQ ID NO: 4152619 - RNA, 81 nt, Human
gcaaggguuucucaaauacuguuccaggagaugcugugcugaaagagaauucuguacucaaauagguuugggaaggccugc

SEQ ID NO: 4152620 - RNA, 70 nt, Human
gcaaggucauauggaaguuguugcuuaauuuuucaagaaauugccaaauuguuuuccagagugacuaugc

SEQ ID NO: 4152621 - RNA, 81 nt, Human
gcaagguuuucuguuaaagugcaggcuacucagaaguuauuuucagagucagcucugccuuaauauuucaaacagucuugu

SEQ ID NO: 4152622 - RNA, 62 nt, Human
gcaaguaauucugcaagaaaccaguggcgccgacaggaaauuggagugcaggaucuguuugc

SEQ ID NO: 4152623 - RNA, 56 nt, Human
gcaaguagugggaaagaagauggauucaacucuaugucauuuaaaaugcugcuugc

SEQ ID NO: 4152624 - RNA, 82 nt, Human
gcauuacuuguuucacuggcagguuucucuagaaauauccuggaaaaauagcuucucuugucccugaggugaguaaaauugc

SEQ ID NO: 4152625 - RNA, 55 nt, Human
gcauuagacccaagguauuuuguugauguuaacauuuucugccaaugucuaaugc

SEQ ID NO: 4152626 - RNA, 73 nt, Human
gcauuagcaauuuuugauuuucaguguauuuuuuuccuaucugcagauacugaugaaggauaaaaauuguugc

SEQ ID NO: 4152627 - RNA, 59 nt, Human
gcauuauggcuuuuauccucucuugaggucauccucuggaagguaacaaggccauuagc

SEQ ID NO: 4152628 - RNA, 88 nt, Human
gcauuauuauuuaucuuuauuuuaaaauguauuauaaauguauuugucagcaacaugguauguauuuuaagagaaguaagugguaugc

SEQ ID NO: 4152629 - RNA, 66 nt, Human
gcauuauucagaguguagcaaauagauaauauagcuuuaucuacacagcaucgcucagagugcagc

SEQ ID NO: 4152630 - RNA, 74 nt, Human
gcauuauuugguucacuguucuaggcucuggggcucugcccuguggagcuuucaggauaaugaaaaagucuggc

SEQ ID NO: 4152631 - RNA, 82 nt, Human
gcauucagacauuucagugagaaagcaaucaaauaaauucacauauucagugcuuuugucacauggucaaaguuagaaaugc

SEQ ID NO: 4152632 - RNA, 93 nt, Human
gcauucauuuucaguuuuggaagaggacacagagacauucauuguucaaaacaggcauaauucaguguucuuuucuguuagcgaagcgaaugc

SEQ ID NO: 4152633 - RNA, 59 nt, Human
gcauuccauuuaaaucaaggcaggcacaagaccugcugcuuugcauugugaugggaugc

SEQ ID NO: 4152634 - RNA, 75 nt, Human
gcauucccuaaccucagcugaauucagggcacauaugggcaagugugccuucccaagacgccugaguuagggagc

SEQ ID NO: 4152635 - RNA, 65 nt, Human
gcauuccugacuguuagaguuugcugacccucaacugaaagcaaaauaagaacagaaagggaugu

SEQ ID NO: 4152636 - RNA, 73 nt, Human
gcauuccugcucugccaaguccucuuucuucacaacacagcugggaggagaaugaauggggagaagagaaugu

SEQ ID NO: 4152637 - RNA, 78 nt, Human
gcauucugaaugauuuguagauuuuuugcuguuguuuuuacuuaggcuucauaaaguuugcaauuuauguuaauaugc

SEQ ID NO: 4152638 - RNA, 59 nt, Human
gcauucuucacuaggugagagccaaggguauuggcagcaaucaccgcaugaaaugaagc

SEQ ID NO: 4152639 - RNA, 58 nt, Human
gcauucuuuccacgaggagguacccucggccgggcuuccugagugcuggagagagugc

SEQ ID NO: 4152640 - RNA, 56 nt, Human
gcauugaagaucuuagacuaggggccugggugucuccugucucuccucuucauugc

SEQ ID NO: 4152641 - RNA, 75 nt, Human
gcauugaagcagagauuauuauaacuaauuagaagucacacaucuguuagcuuuugguuucugacuuacuuaugu

SEQ ID NO: 4152642 - RNA, 87 nt, Human
gcauugagaagagaaagugacaguucaggucagauuuauugagcaucuauuuaauacuacuuguaauuguucuugucacuccccugu

SEQ ID NO: 4152643 - RNA, 71 nt, Human
gcauugagugucacaaggcauuuaucuguaggauugggucaccaaacucacagcacuugugucauuggagu

SEQ ID NO: 4152644 - RNA, 77 nt, Human
gcauugauaagcaugagacuuauuuugagccuguuuuaggaaacagagcaauucuuggguguuuugauuugcaaugu

SEQ ID NO: 4152645 - RNA, 85 nt, Human
gcauugauuagccuugaaguucaugugucugcagacccauauaaaaauguauuaucugucaauauaugugcugcagggaaaaugu

SEQ ID NO: 4152646 - RNA, 55 nt, Human
gcauugccacaugugucuuagcggacaucauugucuccaugugauaguggccugc

SEQ ID NO: 4152647 - RNA, 79 nt, Human
gcauugcuguccagacgagggccuggcacacaguguguucuuguaaaugcuguacucggguucucauccucacagcugc

SEQ ID NO: 4152648 - RNA, 66 nt, Human
gcauugcuuucacugcaauagaugaaugucaugaaaauguucuucucuuguaauggaaucagaugu

SEQ ID NO: 4152649 - RNA, 57 nt, Human
gcauuggcaccucacaggauagacagcaacugugcaugccugguugguugccucugc

SEQ ID NO: 4152650 - RNA, 61 nt, Human
gcauuguuguuuucucauggagaauaugguuacuaugcuuuguucacauggagcagaaugu

SEQ ID NO: 4152651 - RNA, 83 nt, Human
gcauuuaaaaauguccucaaaacugauugcagcaugacaucccucagauuuuguauucaguuuuaguuuaguuacuuugaagc

SEQ ID NO: 4152652 - RNA, 77 nt, Human
gcauuuaccacagugccugucuaaugccccaaguauucaauaaauauaaacuauuggccgggcgcgguggcucaugc

SEQ ID NO: 4152653 - RNA, 75 nt, Human
gcauuuaggcccccuuugcccaguauauucuagguuagcaccagaaauauauaugggucagagccaaccuuaggc

SEQ ID NO: 4152654 - RNA, 58 nt, Human
gcauuucaagggagcagcugaaagaagaagacacugauaggcucucccuugagagagc

SEQ ID NO: 4152655 - RNA, 109 nt, Human
gcauuucauggauuuacuacuugacauugaauuugaauguauguugcaauauggcccaacaauuauuuaaauuuauguagaugagccuuguaaagauaauauaaaaugu

SEQ ID NO: 4152656 - RNA, 55 nt, Human
gcauuucauguaagucagaccagaguuaaaugguuuuuaaaaugcaugacagugu

SEQ ID NO: 4152657 - RNA, 57 nt, Human
gcauuuccauuuucagccauuacugagaaagccaguuguggugcuuggaugggaggc

SEQ ID NO: 4152658 - RNA, 61 nt, Human
gccagccuccucuaacugccgaggcaacaaauaaagaaggcuucaugcuggaggggcuggc

SEQ ID NO: 4152659 - RNA, 77 nt, Human
gccagccugccaagcugcagacccccugucucauggaggcuaucuugagggaggggaaugugugcagagcaggaggc

SEQ ID NO: 4152660 - RNA, 60 nt, Human
gccagccuggccgggcccacacccuccagucgugacccugcaggccuggcccagccuggc

SEQ ID NO: 4152661 - RNA, 75 nt, Human
gccagccuggguaguggccuccccagcaaguugcaugucacuagcuuccuguggcugucacuccugggcccaggc

SEQ ID NO: 4152662 - RNA, 57 nt, Human
gccagccugugggggcucugugagacucagguuccugugugggccugcacggcuggc

SEQ ID NO: 4152663 - RNA, 73 nt, Human
gccagcuagaggcugcagugcacuaugagaacaccugugaauagccacugcauuccagccugaguaacauggc

SEQ ID NO: 4152664 - RNA, 80 nt, Human
gccagcugaggcuucuaggcuugacaucucccuccaccccgggaagaagauggaggcuuggugccaaggagccugcuggu

SEQ ID NO: 4152665 - RNA, 56 nt, Human
gccagcuggaaaucugcuugaagagccagccuucaggccaaauauuuauagcaggu

SEQ ID NO: 4152666 - RNA, 73 nt, Human
gccagcuggcaugcucuuuguccacaguaauucaacuauugacugacagccuacaaugggcaugugaaguggc

SEQ ID NO: 4152667 - RNA, 60 nt, Human
gccagcuuuauagcuucaaaggacaggcuagcucucuuguuagaagcuaaugcagcuggu

SEQ ID NO: 4152668 - RNA, 61 nt, Human
gccaggaaagccacuggcauacugggacaaguuggucaccccaggccccagucuuccuggc

SEQ ID NO: 4152669 - RNA, 59 nt, Human
gccaggaacuggcagugucguuuacaugaauguguuauucagaagagcugccucuuggu

SEQ ID NO: 4152670 - RNA, 62 nt, Human
gccaggaaugcauaaaugaccuuugccagcuucagggcuuucacacauuuugcuuuucuggc

SEQ ID NO: 4152671 - RNA, 64 nt, Human
gccaggacagggagacgggagcccaggagcggaagagcagaggggcagcccgcccucuccuggc

SEQ ID NO: 4152672 - RNA, 67 nt, Human
gccaggagauuuagcugcuuaacuccuguuguuuuuaaugggagucauguggcuaaaucucuguggu

SEQ ID NO: 4152673 - RNA, 73 nt, Human
gccaggaggcgaugcaggccaugguuucuuuggcaggaacugacaaggcgcccagccugccaagucuccaggc

SEQ ID NO: 4152674 - RNA, 61 nt, Human
gccaggaggcuccucggggcugacggcggggacucgcacgaggcaccgaggagccucuggc

SEQ ID NO: 4152675 - RNA, 60 nt, Human
gccaggaggcuuaacuggacaggggcuucuugaacauucucugugccuaaaccuccgggu

SEQ ID NO: 4152676 - RNA, 91 nt, Human
gccaggauggucucgagcuccugaccucgugauccgcccuccuuggccucccaaagugcugggauuacaggcaugagccaccgugccgggc

SEQ ID NO: 4152677 - RNA, 91 nt, Human
gccaggauggucuugaucuccugaccuugugauccacccgcuuuggccucccaaagugcugggauuacaggugugagccacugucccuggc

SEQ ID NO: 4152678 - RNA, 61 nt, Human
gccaggauuuggcucuuggguuucucguccauucuggggagcacugagaggcagguagggc

SEQ ID NO: 4152679 - RNA, 85 nt, Human
gccaggcaagauggacuguuuaugcugggcucuggaugaucucagaaggaggccugcagcaggagcaaacccaucuucgucaggc

SEQ ID NO: 4152680 - RNA, 64 nt, Human
gccaggcacucagucuggaucccucugagaucagguauuggggguugggugaguguuggauggu

SEQ ID NO: 4152681 - RNA, 64 nt, Human
gccaggcauuuauugauugaauaaauauuguacuauauucaguguaucaaugaaugcuuuuggu

SEQ ID NO: 4152682 - RNA, 112 nt, Human
gccaggcgacuccacgauggcuuccguccucagguucaccaucaacuaagacagacugaagauguaaguaguaauggaaggacacaaaagguacaagagucagaggccaggc

SEQ ID NO: 4152683 - RNA, 107 nt, Human
gccaggcgagugaucaagacuuacacagacauggcaucaugaccaguuucaguuuuucuggcucagacaccacucuguugaggaacagacuucuuggugagccuggc

SEQ ID NO: 4152684 - RNA, 72 nt, Human
gccaggcucugcugaucucagcugggcucacucuugcaucugagccagcuggugggucagcugggggcuggc

SEQ ID NO: 4152685 - RNA, 57 nt, Human
gccaggcugccuuaucucuagcacccucucgggcuuccugcagacaaacaguguggc

SEQ ID NO: 4152686 - RNA, 56 nt, Human
gccaggcuggagugcagugucuugaucucggcucacugcagcuccgccucccaggu

SEQ ID NO: 4152687 - RNA, 56 nt, Human
gccaggcuucccugagaggcugccgugagccagguggccuccccggaaugccucgc

SEQ ID NO: 4152688 - RNA, 60 nt, Human
gccagggacaggaucaagcugcccaguuacaaaucuguuauguauauucugugcccuggu

SEQ ID NO: 4152689 - RNA, 97 nt, Human
gccagggacucaggaguauuuugcuguagaaggccaaggaucaggugccucccagcugccuguauuugcuuccuucugcaauuccagauguuuuggc

SEQ ID NO: 4152690 - RNA, 55 nt, Human
gccagggagucugggccacagaucccaaaggcugauaugagcccuuaucuuuggc

SEQ ID NO: 4152691 - RNA, 57 nt, Human
gccagggaucuggccuuccauccucuaaggaggagcagagggugggacuuccuaggc

SEQ ID NO: 4152692 - RNA, 78 nt, Human
gccagggcaguguccaggguggucugcauccaguguugugcaacucucuugugagaccauccuggcacuucccucugc

SEQ ID NO: 4152693 - RNA, 77 nt, Human
gccagggcaucggggccuucuuuugguuuuacccaaauaagggagucagaguaacagaaaggcucaggugcucuggc

SEQ ID NO: 4152694 - RNA, 82 nt, Human
gccagggcuguagucucuggagacucuaggggaaucugugccuaccuccuccagcuuccaguggcuccugacauuccuuggc

SEQ ID NO: 4152695 - RNA, 58 nt, Human
gccagggcugugcagguuuguucagguucccuccugggccuucucgguuggcccuggc

SEQ ID NO: 4152696 - RNA, 60 nt, Human
gccaggggugcccacccaaggagccucuucaccugcucuuccagggugggcacugcuggc

SEQ ID NO: 4152697 - RNA, 56 nt, Human
gccagggugugcagggacaggauccgcaugucacugucuuuaugucucacuguggc

SEQ ID NO: 4152698 - RNA, 69 nt, Human
gccaggguuucuaugaggccugaagccuggagccugucauaggcaacugcagucugaggccucccuggc

SEQ ID NO: 4152699 - RNA, 61 nt, Human
gccaggucucauaaaugcagcuagcccucauccaagggcccaaguggccauugagccuggu

SEQ ID NO: 4152700 - RNA, 57 nt, Human
gccaggucucuucuuguacccagccccugaccugcugcuuuacugaagagauauggc

SEQ ID NO: 4152701 - RNA, 66 nt, Human
gccaguaaauagugagaaagaaacugaaguuaagucuaaguucacagcuccuuuuacucaacuggu

SEQ ID NO: 4152702 - RNA, 67 nt, Human
gccacagucacugcugcaggggcuggagagucaugaaaaccggguccugcaucccaugagugaaggc

SEQ ID NO: 4152703 - RNA, 76 nt, Human
gccacauauacuaggauagggaacucauggcuggagcaagauuuuuguauuucuuuauccuauuuguaggugaagc

SEQ ID NO: 4152704 - RNA, 76 nt, Human
gccacaucauuguagugcuucaucugcacagcacagccgcaucauuguagugcuagaagauagcuagaagauuggc

SEQ ID NO: 4152705 - RNA, 57 nt, Human
gccacauccagguggaucaaauuaguuaagagggcugugaguucauuugcauguggu

SEQ ID NO: 4152706 - RNA, 55 nt, Human
gccacaugcaauugcagcacguaacaucaguauuauuucuguaugcaucuguggu

SEQ ID NO: 4152707 - RNA, 70 nt, Human
gccacauggcuagcaccgcguugcuggcgcucugcuccaccggcgcguucagcgggcuggccguggaggc

SEQ ID NO: 4152708 - RNA, 66 nt, Human
gccacauuagcccucaccaucugagauuacugaaaaaacagauuguggugagaauugcuaguuggc

SEQ ID NO: 4152709 - RNA, 64 nt, Human
gccaccacacccggcuaauuuuguuauuuuuuauagagacaggguuuugucguguugugcaggc

SEQ ID NO: 4152710 - RNA, 73 nt, Human
gccaccagaacacagguucaaauucaggucgcuucuaugugaggaaaccuaccugaaaugaauuguuggucgc

SEQ ID NO: 4152711 - RNA, 61 nt, Human
gccaccagcagaacccaccagacagaagcuccgugcucugccuggcuggucacugccuggc

SEQ ID NO: 4152712 - RNA, 64 nt, Human
gccaccagcugcauaugcacguacuugaugguuccaucugcguugcgcuccugcagcaggaagu

SEQ ID NO: 4152713 - RNA, 60 nt, Human
gccaccaggagcccaguccaaaugucaccugcccaccacacacagcgggcuuccuguggu

SEQ ID NO: 4152714 - RNA, 68 nt, Human
gccaccaggcccgcugcuaugguggcuguucccugcccuuaagucaccggcagacguggccugauggc

SEQ ID NO: 4152715 - RNA, 66 nt, Human
gcagauuuggaaguugauuuaaaaaggaauuaucacaguuuccuuguaaaggagcucuaacacugu

SEQ ID NO: 4152716 - RNA, 62 nt, Human
gcagcaaaauugaagucaauguccaauacugagguugguggacugauuuucauuuuaaaugu

SEQ ID NO: 4152717 - RNA, 75 nt, Human
gcagcaagaggaaguuuauauuguaauuguaucaugaaaaugagaaccauaauguacaacugcuuuuaauacugc

SEQ ID NO: 4152718 - RNA, 78 nt, Human
gcagcaagagggaggcugagccacuguggagagcacacaggcucugccuaggaaaccucaugcuucucaugugcuugc

SEQ ID NO: 4152719 - RNA, 60 nt, Human
gcagcaaggguuauaucaaagauguauuaaaaugucuuaagucuauuuuccucaugcugc

SEQ ID NO: 4152720 - RNA, 61 nt, Human
gcagcaaucuucacagugucauuggugcaggaaacaugcaacaccacauggagcuuguugc

SEQ ID NO: 4152721 - RNA, 70 nt, Human
gcagcacgcuacaguuagggauuccugagugacuuagucacaugggcucuagacuuuaguguggagcugc

SEQ ID NO: 4152722 - RNA, 107 nt, Human
gcagcacucuguaaaugcagggcgguagauguuuguaaacacacugcugggcuacccaguaguuguguguaugcaugucuauauaucuguaaagacuguggugcugc

SEQ ID NO: 4152723 - RNA, 80 nt, Human
gcagcagaaggccaucuagugguaacuucugucuaaagacugcuggaaguuugcuguggauuaauggguacuuuuguugc

SEQ ID NO: 4152724 - RNA, 56 nt, Human
gcagcagauuguuuuuucaccugcagagcauauggguguggggacagggguguugu

SEQ ID NO: 4152725 - RNA, 61 nt, Human
gcagcagcaggagccguggggugaggcugcagccuccauccuguccaggcccugcuccagc

SEQ ID NO: 4152726 - RNA, 57 nt, Human
gcagcagcagggagucugacuuggugcuggaggacaucucaaggccccugcuccugc

SEQ ID NO: 4152727 - RNA, 65 nt, Human
gcagcagcggggccccugcgcgcggcgcccaccgucuccuccucgcgccgggcucgcgguguugc

SEQ ID NO: 4152728 - RNA, 77 nt, Human
gcagcagcuuuugcauucucauuuuguuuauuucuggacuggagaguaguaauuaggaugcagauaccagcugcugc

SEQ ID NO: 4152729 - RNA, 62 nt, Human
gcagcaggaauaggauaagcaaaggcaugaaaauggaaguugucugguccauucuggguagu

SEQ ID NO: 4152730 - RNA, 55 nt, Human
gcagcaggcaccagggcucguccuggcacgaugaaggaggaacccguggcugggc

SEQ ID NO: 4152731 - RNA, 57 nt, Human
gcagcaggcacuuaccguugcuguacaauaacuggaguuuauaguggaugccguugu

SEQ ID NO: 4152732 - RNA, 60 nt, Human
gcagcagggcaggauuugaacccaguucugacacugaaaucucugcuucuugcccucugc

SEQ ID NO: 4152733 - RNA, 62 nt, Human
gcagcagugcgggcagcuacagaagcucaucggcaucuccaucggcagccugcacgggcugc

SEQ ID NO: 4152734 - RNA, 74 nt, Human
gcagcaguguguguguguguguguguguguguguguguguguauucacauguacauaugcucaugaacuguugc

SEQ ID NO: 4152735 - RNA, 77 nt, Human
gcagcauagcugaguagucagggaucagagccaguucauuuagauucuaauuuugacucuugucucuuguuagcugu

SEQ ID NO: 4152736 - RNA, 81 nt, Human
gcagcauaggguaacaccaugguucccaaacugugugccaaggcucaugggggcaccauggugaauucacaagagugcugu

SEQ ID NO: 4152737 - RNA, 76 nt, Human
gcagcaugagcuauacaaaguagaguggaauuaucuucauugauuugaacacaauacuuuuguagccuaauguugc

SEQ ID NO: 4152738 - RNA, 81 nt, Human
gcagcaugggugugggcaggagcacaagucaggcucauguuuggucuccugacgccuucuccuugcccacucugagguugu

SEQ ID NO: 4152739 - RNA, 116 nt, Human
gcagcauuuguggcaguggcuaaaagcuguuccagggcuuggcugggacgguaucugcugaauaacuaggccaguccuagagccaagauccacagcucagcugcuguugcugcugc

SEQ ID NO: 4152740 - RNA, 61 nt, Human
gcagccaaugggggacuuggccaagcgucaggcacugauggaagacuccucucuuggcugc

SEQ ID NO: 4152741 - RNA, 61 nt, Human
gcagccacauggagcaggagguggggcaggcauuugucuuaccugccucuccugugccugc

SEQ ID NO: 4152742 - RNA, 55 nt, Human
gcagccagaagacucagaacaaaaguacacauuuuacucuguguacacuggcagc

SEQ ID NO: 4152743 - RNA, 88 nt, Human
gcagccagaucaggaguuuucagaaggauuuuaacacauggacacccacauacaaccugucuauaauuuccuucuucuccucaguugc

SEQ ID NO: 4152744 - RNA, 74 nt, Human
gcagccaggugggcugccucuccagcuccuucuggcuuucgcccuucggcugggacaggagcacccuaggcugu

SEQ ID NO: 4152745 - RNA, 80 nt, Human
gcagccaucuugaaauuaugcagggaaggcccaccagccucugagauggcugcuuccuuuccugcugaccuccugacugc

SEQ ID NO: 4152746 - RNA, 55 nt, Human
gcagcccaggagcaggcgacccgccccagccugagccuguuacucuugggcucgu

SEQ ID NO: 4152747 - RNA, 60 nt, Human
gcagccccgcgaucuccuuguggccgugcucacaggcgcacaugagggccguggagccgu

SEQ ID NO: 4152748 - RNA, 86 nt, Human
gcagccccuguuaaauaaaucauccaguaacgguuucuaauucccagacuugguugcaaaugaauuauucacaugguaaggccugc

SEQ ID NO: 4152749 - RNA, 55 nt, Human
gcagcccuagcgacaaauugaucagugaugauggaugaguacuguaggggcuugc

SEQ ID NO: 4152750 - RNA, 56 nt, Human
gcagcccucaucccgccugcguuccacaugaacaggucucugggcuugaggguggc

SEQ ID NO: 4152751 - RNA, 118 nt, Human
gcagcccugacagcagauaacuuacucugacuggauucugcuuuggcugugguuuggguuacagaugagaaggcugaccaguuaaggcagagaaguuaaaggccuggugcagggcugc

SEQ ID NO: 4152752 - RNA, 76 nt, Human
gcagcccugagcuggccugggcuugcggggcaccagaagagauacugguacaaagccaaggccugucuggggcugc

SEQ ID NO: 4152753 - RNA, 60 nt, Human
gcagcccuugggccauccuagaaccagccaagggcuuuuuuuuggccucagggcccuugc

SEQ ID NO: 4152754 - RNA, 68 nt, Human
gcagccggccuggaguuuggggaauagaggugugcccuuucucuaccaccacacaccaggcaacgugu

SEQ ID NO: 4152755 - RNA, 55 nt, Human
gcagccucagggcacucagaugcuuacauggugucucagggccccaaaggcuagu

SEQ ID NO: 4152756 - RNA, 75 nt, Human
gcagccuccgucaguuuucuguucuacaauuugauaaauggauuauacucacacguaggauaaggaauugguugu

SEQ ID NO: 4152757 - RNA, 89 nt, Human
gcagccucuugugcccugauuuguggaacucucuucuugcaugauuuccacuucuugcagggguuuccacuaaaucuaggaguguuugc

SEQ ID NO: 4152758 - RNA, 108 nt, Human
gcagccugagcuggguucucugcuuagggccucacaaaguauuggccagacugggcucuucucugcaggcucuggagaagaauccgcuuccaagaucauucagguugu

SEQ ID NO: 4152759 - RNA, 63 nt, Human
gcagccugccuggaugaauggcgccuugugagagcgccgcagggcucaccuccauggcagggc

SEQ ID NO: 4152760 - RNA, 57 nt, Human
gcagccuggauggucugacucuagagcucacucucugaaucacagucauucagcugu

SEQ ID NO: 4152761 - RNA, 63 nt, Human
gcagccuggcccugcugaacucugugguauaugggccugagcggaccucagcagccaugcugu

SEQ ID NO: 4152762 - RNA, 61 nt, Human
gcagccuugauccuuuccuuuucugauucagaaauuaccugugggugaggaagagcguugc

SEQ ID NO: 4152763 - RNA, 65 nt, Human
gcagcgacgcuggcugguucccugcuccaggcauguuccuccgcaggggaaccugcuagagcugc

SEQ ID NO: 4152764 - RNA, 76 nt, Human
gcagcgcagcacuuuugaaguuagacaucgagaguuugaguccuagauucacaccuugcuggcugagugcuguugc

SEQ ID NO: 4152765 - RNA, 65 nt, Human
gcagcgcgcugucagacuggcucgcaggcggcgcggccggcggacccguucgagacagcgcgggc

SEQ ID NO: 4152766 - RNA, 72 nt, Human
gcagcgggcuguccgccgacuuggccaggccgaugucggagaugggcgagaagguggacuuccacuugcugc

SEQ ID NO: 4152767 - RNA, 127 nt, Human
gcagcguggaacgacgggcuccucgguggccagcagcuggugagacacagccgcagccguagcugcagggcuaagacauguccgccggccucgcgguuugagaggcggccuguaccaagcacgcugc

SEQ ID NO: 4152768 - RNA, 82 nt, Human
gcagcgugggggugaggcagaggccccugcccacuggucccagagacagagcuggcagggaccuugcccacccuccuccugc

SEQ ID NO: 4152769 - RNA, 71 nt, Human
gcagcuacugugggacaucccucccuaugcuuuggcuccagcauaggugcucuguccucaguauuagcugu

SEQ ID NO: 4152770 - RNA, 68 nt, Human
gcagcuaguccaguuauguggcuucagugcuuuaagcaccaggauuugaacauagcuggcuacacugu

SEQ ID NO: 4152771 - RNA, 63 nt, Human
gcagcuaucugaucugacaaggucuggcuuccaggagccaugugggauuuuggugucuguugc

SEQ ID NO: 4152772 - RNA, 57 nt, Human
gcagcuauguaaagaggaucucugcaagcugcagucccauaucuuuaacauaucugu

SEQ ID NO: 4152773 - RNA, 58 nt, Human
gcagcucaagagaggugcuaugaggaacugcggaaacucauagggccuaaagagcagc

SEQ ID NO: 4152774 - RNA, 75 nt, Human
gcagcucuguuucaaagucagaaaaggaggcucagcuguuguuuuugcuucaagcugauuuagagacgagaaugc

SEQ ID NO: 4152775 - RNA, 62 nt, Human
gcagcucuucugguucugacucugugggugccuuucaccugcugguccucagcagagcaugc

SEQ ID NO: 4152776 - RNA, 57 nt, Human
gcagcugaaagaaggaagugucauucuugugaccuuagaugccugacuuucaguagu

SEQ ID NO: 4152777 - RNA, 112 nt, Human
gcagcugacuugaggucagagaagucuaugaggauguuaguggacuggaggugaugaguaggaaaccucugcugagaugcccaugguuaucacugggccucugauaagcugc

SEQ ID NO: 4152778 - RNA, 61 nt, Human
gcagcugaugaaaauguuguuacacucuugaagaacaagggcuguuauguuuuuauacugc

SEQ ID NO: 4152779 - RNA, 61 nt, Human
gcagcugcagaggcuuggucacgccuggaaguccuccccagcagccaggaaucugcagagc

SEQ ID NO: 4152780 - RNA, 56 nt, Human
gcccugugcgcugaguucaggggucagauuggcugccggaugacucucacaagggc

SEQ ID NO: 4152781 - RNA, 55 nt, Human
gcccugugcucccuauguaucugguucaguuucagagauuccgggacgcaguggc

SEQ ID NO: 4152782 - RNA, 112 nt, Human
gcccugugggagaggcuagugggagggugggcaaggccagagcguguccugccuccauguggagggagauacgggaagcugguaagucucccugccaaccucuccuuggggu

SEQ ID NO: 4152783 - RNA, 102 nt, Human
gcccuguugguuccugcuugggcucaggaccccagaggcccugccuguccagggccuauggggcccuagaguugaggacccacaggaaaauggggauggggc

SEQ ID NO: 4152784 - RNA, 57 nt, Human
gcccuuacaggguggucagccauguauggauuuccagcucuguaccacccugagggc

SEQ ID NO: 4152785 - RNA, 65 nt, Human
gcccuuagguacuacuuauucucagcacuuucaacuaguccagugagugccugguauauaagggu

SEQ ID NO: 4152786 - RNA, 82 nt, Human
gcccuuaguuuuaauagcugauuagccuacaauaaggucgaacuuguguuuuguuucuaauuagcaguaaaaacaacagggu

SEQ ID NO: 4152787 - RNA, 67 nt, Human
gcccuuauuugaauguaugaguuuuaguaagcacugugauaggaggauucauauacuuaaaucaggc

SEQ ID NO: 4152788 - RNA, 55 nt, Human
gcccuucaugaguccacaggaccucacgguucacaaauaugcacuuacgaagggu

SEQ ID NO: 4152789 - RNA, 65 nt, Human
gcccuuccccuccucuccugauauggggacuucugaguucccugggagaaguugagggcuggggu

SEQ ID NO: 4152790 - RNA, 76 nt, Human
gcccuuccugcaggacagccaucugguuguugggaccaacagggacagauuuaggcuuaguccaagcaagaauggc

SEQ ID NO: 4152791 - RNA, 86 nt, Human
gcccuuccuuucucgggucuguggaguugcuugcuggaaaugccucacuucaggugcugauuuggcacacguggaagggggagggu

SEQ ID NO: 4152792 - RNA, 89 nt, Human
gcccuuggcugccuugggacagcaaccaucugcuacaccccaugucaaggguguagccugagcuggcuggcuccaggaagagcaagggu

SEQ ID NO: 4152793 - RNA, 89 nt, Human
gcccuuuagaagguugucaggauuuguuuaguauaggccuaauauaggccuaauaugcaaaauugauacuugauauacucugagguggc

SEQ ID NO: 4152794 - RNA, 77 nt, Human
gcccuuuaucaucuucauauuccucagcuuuuauucccuuccugauggcuggaauguguggaugugaugacuggagc

SEQ ID NO: 4152795 - RNA, 57 nt, Human
gcccuuuggccugggacagcaagcagaguauuaucccagcuggucagggcaaugggc

SEQ ID NO: 4152796 - RNA, 77 nt, Human
gccgaaagcagggucaacauucuaaaaucugacugccucuggguggcaguucuguugaguguagacccuggucuggc

SEQ ID NO: 4152797 - RNA, 58 nt, Human
gccgaagcuccaagguuccuccgcuuccugcccgcaggcggaaccuuagagcuucagc

SEQ ID NO: 4152798 - RNA, 83 nt, Human
gccgaggaggaggaggcuccgggugcugcucaggaacuggggacccacgagugccugcacccugaguguucagcuccagaggc

SEQ ID NO: 4152799 - RNA, 62 nt, Human
gccgaggccgcgcccguccgcccgccgcccgagccgccgcccgcccuggacguggccucggc

SEQ ID NO: 4152800 - RNA, 79 nt, Human
gccgaggccucagcuccagcccucagcagcucuggacacaagagccgucugcucugacaacugggcugaggcagucggu

SEQ ID NO: 4152801 - RNA, 70 nt, Human
gccgaggucacagcccaagucaccugcaggagcgagguucuuguuuggauuuugggcaguaggaaucggc

SEQ ID NO: 4152802 - RNA, 69 nt, Human
gccgaguggggcugcuuaggcugcgcagcaagagguugguggcuuggaagacagccucggagugagggc

SEQ ID NO: 4152803 - RNA, 63 nt, Human
gccgauguuguggcaauggggucugcaguacuggagcugcaagagcccaccacacacuucggc

SEQ ID NO: 4152804 - RNA, 107 nt, Human
gccgccgagccccccauuuccagggccagggacacgcugucaggcuccaggucauccaccucacuggcugugucccuguccagaguaggggaggacggcacgguggc

SEQ ID NO: 4152805 - RNA, 84 nt, Human
gccgcuauaucagugaccugaaauguuuuucacuugcuuacaagcaguaaagaaacugauuuuggaggcugaaaaaauaguggc

SEQ ID NO: 4152806 - RNA, 58 nt, Human
gcccaggcuggagugcuguggugugaucauagcucacugcagccucaaucccucgggc

SEQ ID NO: 4152807 - RNA, 58 nt, Human
gcccaggcuggaguucaguggugagauuucggaucacugcaagcuccgcccccugggu

SEQ ID NO: 4152808 - RNA, 124 nt, Human
gcccagggaaguuuugcucugggucacacccaccucuggguggcugccaaucugccugccagaaaccgcaggcugggccgcggcuacccagagucagggccacggagcuuaggagaccuugggu

SEQ ID NO: 4152809 - RNA, 59 nt, Human
gcccagggcucuguccauuccuucauaggcugcuaugauugagaggagagccugagggu

SEQ ID NO: 4152810 - RNA, 106 nt, Human
gcccagggcugugugcugcgggaagaacgaccaggcucgggggaguucucccaccagucccaccaggaucgcucuuaucccgggccucacuucacccacccugggc

SEQ ID NO: 4152811 - RNA, 59 nt, Human
gcccagggcuucaaagagagaacagagagcaucauccccuuccucacaagucccucggc

SEQ ID NO: 4152812 - RNA, 72 nt, Human
gcccaggggcagcuggguggccucuccucggggcguuuggggcccacggagagacauuuacuguacucgggc

SEQ ID NO: 4152813 - RNA, 69 nt, Human
gcccaggucugcaggguucggagaguucccugcuuguucacgggagcugaggagccccgucggucuggc

SEQ ID NO: 4152814 - RNA, 55 nt, Human
gcccaggucuggcaucagcugugugcucaguuucagcuauaugccaggcccuugc

SEQ ID NO: 4152815 - RNA, 58 nt, Human
gcccaguaguucaagguugcaggacaccaugaucaugccacuguacuucagccugggu

SEQ ID NO: 4152816 - RNA, 92 nt, Human
gcccagugauuucuagcccucuuuaauccuucccuacaccaacugcugcgguaaugaggggcaaggggcggcugaggauugaggucacgggc

SEQ ID NO: 4152817 - RNA, 61 nt, Human
gcccagugccacuguagccgcuggggcaacuagagcuguccuggggcucuggcaucugggu

SEQ ID NO: 4152818 - RNA, 71 nt, Human
gcccaguggcauugacauguaaacaguauggugugcuugagaugcuguaagcuguucagaauugcuggagc

SEQ ID NO: 4152819 - RNA, 58 nt, Human
gcccaguguucaucaagaaaauguggaacugccuacagguuuuuguggauauaugugu

SEQ ID NO: 4152820 - RNA, 85 nt, Human
gcccaucauagcugaugguggcauccagaccguggggcacguggucaaggcccuggcccuuggagccuccacagugaugaugggc

SEQ ID NO: 4152821 - RNA, 69 nt, Human
gcccaucaucacuguggaggcuccaaguuccagggccuugaccacaugcuccacgguccuaugaugggc

SEQ ID NO: 4152822 - RNA, 59 nt, Human
gcccauccacuaggcggcccacagcagcaccccugcgucugccugcaguguggcagggc

SEQ ID NO: 4152823 - RNA, 70 nt, Human
gcccaucucuaguccagucucaaaaugcuauuuucccucuugagugcagauugagugaggcuagcugggc

SEQ ID NO: 4152824 - RNA, 61 nt, Human
gcccaugcacuuucugugauggcugauaauugcugauacaagaugacaggugcaugauggu

SEQ ID NO: 4152825 - RNA, 110 nt, Human
gcccauggagcuuggugaugccuccuggugcuggcugaggccaugagaggaggcagaagugggagaggagagcagcaggagcccuuaucaccaggaacacacacgugggu

SEQ ID NO: 4152826 - RNA, 71 nt, Human
gcccauggucagggaggcagggaccagccucuacccucucagccugugacaccugucuccucuuaccuggc

SEQ ID NO: 4152827 - RNA, 57 nt, Human
gcccaugguggcguucggugcaucuuagaguccucugauguucuagcggcaccaggc

SEQ ID NO: 4152828 - RNA, 87 nt, Human
gcccaugugucugagcagcuggagaaauaccacccuugauccacucccugggaugggguuggaaccuccacucagccaccagugggc

SEQ ID NO: 4152829 - RNA, 62 nt, Human
gcccauuccuggcauggcucacugugguccaggauggaagauagugaggcaguucagugggc

SEQ ID NO: 4152830 - RNA, 66 nt, Human
gcccauuuucacccaauauaacuagaggaaggugacccuuccuggaaagggagugagacaguuggc

SEQ ID NO: 4152831 - RNA, 73 nt, Human
gccccaacacugggcugcccugaugguccucacaacggugcugucgagaccauggggguaacuuggguugugc

SEQ ID NO: 4152832 - RNA, 58 nt, Human
gccccaagaauaaccagacaauagcacagaaaugaccgugcuguuuucauauucuggc

SEQ ID NO: 4152833 - RNA, 108 nt, Human
gccccacaucucugacauuucaagguccuugcaauuuucaucuuucuuuguuuaacuucguaaggcauggguagaagagaagccagugacuuagucuuaaaauggugc

SEQ ID NO: 4152834 - RNA, 130 nt, Human
gccccaccuccaacaccggggauuacaguugacuaugagauuugaguggugauaugguuuggcucuguguccccacccaaaucucaucgugaauuguacucccauaauucccacauguuguaggaaggac

SEQ ID NO: 4152835 - RNA, 84 nt, Human
gccccacucccaaagugauuuucuucuuaguuauugccucauuccacauacagugauugaugagaaaggcauaggagauuuggc

SEQ ID NO: 4152836 - RNA, 59 nt, Human
gccccacuuuagggaaacaaggaaacuuuguguaucuuucaguuccagaaaaggggagc

SEQ ID NO: 4152837 - RNA, 78 nt, Human
gccccagaaaggcucagauucccccaggccaucccccauccugaggacaagguuuugggcccuuuucuguuugcaggc

SEQ ID NO: 4152838 - RNA, 72 nt, Human
gccccagacgccacucgcggcggacggcggccaguucccagggguuuggagccgggugcgcaggcguggggc

SEQ ID NO: 4152839 - RNA, 68 nt, Human
gccccagaggcuggggaaggauacagcuagccagaggauccugucucucaucucccauccucugaugc

SEQ ID NO: 4152840 - RNA, 87 nt, Human
gccccagagguagcaugcuguggcuuuagcuccaaaucaccaucuacugcaaggacaggucacauacaaaugcuccuuucauugggc

SEQ ID NO: 4152841 - RNA, 109 nt, Human
gccccagaguccacaaaacugucuguguuucugcuucacuggccuggaggugauuggauuucuucuccugggcuugguugaaguuacguucauagucaagcucaggggc

SEQ ID NO: 4152842 - RNA, 72 nt, Human
gccccagauauaugcaaacaagcccaaagucacuggaagaaguagacuauuucuuuugcauagguuuggggc

SEQ ID NO: 4152843 - RNA, 56 nt, Human
gccccaggauaaauuuguaagaugcuugaggagcaaugcaaacauuacuugggugu

SEQ ID NO: 4152844 - RNA, 61 nt, Human
gccccaggccaggggucuguguugugguaagaagcucagagcacaggguuuugugccgggc

SEQ ID NO: 4152845 - RNA, 90 nt, Human
gccccaggcuuuggugcauuguuucucuacccaucccuaccucucuuauccccgauguuuggcucaaacgagugucuccuuggcuuuggc

SEQ ID NO: 4152846 - RNA, 62 nt, Human
gccccaggucugugcuccaagcaaaugggcucuguggugguuucagagggcagaucuggggc

SEQ ID NO: 4152847 - RNA, 61 nt, Human
gccccaggugguaaaccuaagaaugacuucaauuuuuaaacaucuuguugccuuaaggggc

SEQ ID NO: 4152848 - RNA, 79 nt, Human
gccccagguuuguuucucuaaggcuacauugugcaaugccagagugcaugcaucuggucuuggaaauagaauauggagc

SEQ ID NO: 4152849 - RNA, 65 nt, Human
gccccaguggcuuccgugucuagccugacacccgugucagcccagggacagaggccccgggaggc

SEQ ID NO: 4152850 - RNA, 60 nt, Human
gcccccaacagagccugaaugccauuuugcugccugaaugugcagaggaauguagggggc

SEQ ID NO: 4152851 - RNA, 59 nt, Human
gcccccagaccucagugggcugccuuggggugcagggguacagccuuggucuguggggc

SEQ ID NO: 4152852 - RNA, 59 nt, Human
gcccccagcgcugggccuguagggugugcuccugggaucaggccccaggccuggggugc

SEQ ID NO: 4152853 - RNA, 56 nt, Human
gcccccguaguagaugaggcgcagcagcuccugcuccucguaacucuguggugggu

SEQ ID NO: 4152854 - RNA, 58 nt, Human
gcccccuagccugcccgcugcucggggaauauugucaccagcaggccaggcagguggc

SEQ ID NO: 4152855 - RNA, 86 nt, Human
gcccccucuccuugguccuccugauaucugugaucucaugaaugggaugaugaagcagacucagguggugcaaggaaggcgguggc

SEQ ID NO: 4152856 - RNA, 106 nt, Human
gcauuuccuacuucgcaggcucauccggaguuucagucuugccuggccugcagcuucagccgaggucugcaaggcagcaccagcucuuggagccaggugggaaugc

SEQ ID NO: 4152857 - RNA, 93 nt, Human
gcauuucuacguuuaugagcuggcauucuucuguuaaacugcuuucacuugugaaacaggaugcagaggaggagacuuauucaacagaauugu

SEQ ID NO: 4152858 - RNA, 63 nt, Human
gcauuucuggcaaagccuguugguuuaauucagauguuaaauauuuucagcagggucaagugc

SEQ ID NO: 4152859 - RNA, 67 nt, Human
gcauuucugucagcugcuuugucucaccauggccuguaauggugaaaguguucacugccagaaaugc

SEQ ID NO: 4152860 - RNA, 68 nt, Human
gcauuucuuccauacagacaaugcaaugcaaugacaucauuucauuauauggaauguuggaaauaugc

SEQ ID NO: 4152861 - RNA, 62 nt, Human
gcauuugccuuucaccugcugcuuuucacuucccaaaauacacaggugcuaggucaauaagc

SEQ ID NO: 4152862 - RNA, 76 nt, Human
gcauuuggaacaaguccaggucaauuuaaagccaauaccaucugguuuuuaaauaaaccugaacugaguuaaaugc

SEQ ID NO: 4152863 - RNA, 63 nt, Human
gcauuuggaacuugguugagaugagaacauguuucuuaaaaaauuacagcaguggccaaaugc

SEQ ID NO: 4152864 - RNA, 68 nt, Human
gcauuuggauggagguucaagcacuaaaagaaaaugucucuugguaugcuuauuaucuucaacagagc

SEQ ID NO: 4152865 - RNA, 94 nt, Human
gcauuuuaaggcuauugucucuucauguguuuaauuuuuacauaaaacaaugauaauaaaaaaugaauaugauggaggauucucuguaaagugc

SEQ ID NO: 4152866 - RNA, 65 nt, Human
gcauuuuaggagaucacugagcacaaucugccauuugcccaagugcuggagacucacucaggugc

SEQ ID NO: 4152867 - RNA, 78 nt, Human
gccccuuaucccuaaggcaguagugucuguagggccucaggcaccuacauucucauuuccuucauguaugcagagggc

SEQ ID NO: 4152868 - RNA, 59 nt, Human
gccccuuccacuggcgaggagacagcgagaaggcgccaucucugacccaggaagagggc

SEQ ID NO: 4152869 - RNA, 59 nt, Human
gccccuucuucuggagauucaaacuaguugcuaaaaugaauucucccagaagaaugggu

SEQ ID NO: 4152870 - RNA, 66 nt, Human
gccccuugagaucaggagcuguuagggaggagcugccucuggccaauguugugaucacaagagggc

SEQ ID NO: 4152871 - RNA, 60 nt, Human
gccccuugcaccgcccugguuccuaagacaaguggaggcacagccagggugagaaggagc

SEQ ID NO: 4152872 - RNA, 101 nt, Human
gccccuuucuuggccacaucauauuuuaacagaguaaagaugcauaugucuuugagcauuagauuugccuuugaagcauggugaggcuaugguaggccggc

SEQ ID NO: 4152873 - RNA, 92 nt, Human
gccccuuuuuauggcucuggcagcugauauuaggacuugauuacuucugaacuccugaaaacauguuugcugucaguugcaaaagagguggc

SEQ ID NO: 4152874 - RNA, 82 nt, Human
gcccgaggccacagcagaguaguuuuccaacuuguuccaguuggcaucaaguuggaaaucuagucuucuuuucauuuugggc

SEQ ID NO: 4152875 - RNA, 66 nt, Human
gcccgaggccucugugacgucacggugucugcgggaggagaccaugacgucacagaggcuucgcgc

SEQ ID NO: 4152876 - RNA, 62 nt, Human
gcccgcagagaucuuuaacaaagucccuugcaggaggagcugagugcagaugucugugaggu

SEQ ID NO: 4152877 - RNA, 93 nt, Human
gcccgccgcccuccuccaccgccauggcguuguacagguccagcaugaacaugggugccgaguugugcuugcccuggaggugcgggcgcgggc

SEQ ID NO: 4152878 - RNA, 101 nt, Human
gcccgcgcucgggccgcccucccuggcagccgcacuccugguggcagcggucucugagguaggugguggcagccauggcaguggggccccggccgcagggc

SEQ ID NO: 4152879 - RNA, 70 nt, Human
gcccgcggaguuguaagggauguggcuugugcugggaaacacaguuaucaucccuuacacuuuguggagc

SEQ ID NO: 4152880 - RNA, 59 nt, Human
gcccgcugcuucagggacgugccagcggccgcgcuggccgagggccggggucgcguggc

SEQ ID NO: 4152881 - RNA, 107 nt, Human
gcccggaggcaggccagugugccgcugcugcaauagcaccaccuccgccuugccugcgaaggaaggcagggaagcuggcaucacggaacucuuccugugcucccggc

SEQ ID NO: 4152882 - RNA, 61 nt, Human
gcccgggauguggagguugcagugaggugagaucaugccacugcacuccauccagccuggc

SEQ ID NO: 4152883 - RNA, 74 nt, Human
gcccgggcacgaagggagcaggucccuguaagacagaggccucgucccagggugcgccugcccucggccuuggc

SEQ ID NO: 4152884 - RNA, 62 nt, Human
gcccgggcagcucggcacuggggcgaacccacucccgcucuuuccucgaugggcuccugggc

SEQ ID NO: 4152885 - RNA, 84 nt, Human
gcccgggcccaugcccgugugcccccugccaucgugcagaugcugcuggugcugcaggugggcacagugggcagagggucgggc

SEQ ID NO: 4152886 - RNA, 88 nt, Human
gcccgggcguccccgaacccucgcgcgcgggcggcuccggacgcaguguccccggccucugccccgcggggcucgggccgcgccaagc

SEQ ID NO: 4152887 - RNA, 81 nt, Human
gcccgggcugcagaagccaguguggucugcccauugggcagcaaugggcagguggcguuggcucuguggucauuggugggc

SEQ ID NO: 4152888 - RNA, 100 nt, Human
gcccggggaagaaagaggaauggagacuaaacgcuuaggacgauauuucugugaaaagcucugugguagcuuuagcuccauuuccuuaaauuaccugugc

SEQ ID NO: 4152889 - RNA, 69 nt, Human
gcccgggucaccaugaggacucuccgcagguugaaguucaugaguucgcccagccucagugaccugggc

SEQ ID NO: 4152890 - RNA, 62 nt, Human
gcccgugaugcccaucuuuccagcagagaccaaaauuagcugaggggaaaagggcuucaggc

SEQ ID NO: 4152891 - RNA, 67 nt, Human
gcccguggugcuuguggagcuggugcugcuugcgcagcuuguagaaggccacgagcaucaccgcggc

SEQ ID NO: 4152892 - RNA, 55 nt, Human
gcccuaauaguucugucuuuggggaugacauuaucuggggcagagcugacagggc

SEQ ID NO: 4152893 - RNA, 75 nt, Human
gcccuagaaguacacaucguuggccccgaaggagccccagcagccaugucggaccgcgaggugaccuuggagggc

SEQ ID NO: 4152894 - RNA, 60 nt, Human
gcccuagaaucacauuucuuguguauaaauacuagauucauuauuaaugugaucuugggc

SEQ ID NO: 4152895 - RNA, 84 nt, Human
gcccuagcuaauauccuuuccagaguacaguaucaaagaaacgauauuacuguaagaaaauaucugaaggguacaguccagggu

SEQ ID NO: 4152896 - RNA, 56 nt, Human
gcccuagcugccccagcggcucugguuucaccuucuucugggaaaugagcuggggc

SEQ ID NO: 4152897 - RNA, 56 nt, Human
gcccuaggaaaugaauacaguacacaaauguugccagcaugugaguuuccuugggc

SEQ ID NO: 4152898 - RNA, 90 nt, Human
gcccuagguggcagucacugucauccuccccauuuuacaaaugaguaagucaggguacagagagaugagguaacuugccaacagucaagc

SEQ ID NO: 4152899 - RNA, 105 nt, Human
gcccucaaaagcccaggcugacguuaucagagggcaaccagaugucaguguuugcacagccugucccuguccuggugauuuuguccuuggccugggaaugacugu

SEQ ID NO: 4152900 - RNA, 59 nt, Human
gcccucagcauccucagggccagugaguguccaccugggccaguguggggcugaagggu

SEQ ID NO: 4152901 - RNA, 69 nt, Human
gcccucagguccucgggggaggccggcugcaccgagccgggugucggccuugucccuguccugagaggu

SEQ ID NO: 4152902 - RNA, 69 nt, Human
gcccucagugaccacugauucagugccccaccaauacugcacauuauuuuacuggucaucugaguaggc

SEQ ID NO: 4152903 - RNA, 85 nt, Human
gcccucauucaggaagaagauacauuccauuucuacuuaauugcuuaaguuaaagaggcaugggaauguauggcuuuuggguggc

SEQ ID NO: 4152904 - RNA, 81 nt, Human
gcccucauuccugcccauggaagcuugcaggaauagcuggaauccagccuccugaacagcuccugagcaugggauaauugc

SEQ ID NO: 4152905 - RNA, 61 nt, Human
gcccuccaagcuucaucucaaccagaaguaaaacaggcuugugguugugugcuuugagagc

SEQ ID NO: 4152906 - RNA, 64 nt, Human
gcccuccagccuguggaaccggggucaagccagggcugcgagcggagccagaggcuggagaggc

SEQ ID NO: 4152907 - RNA, 57 nt, Human
gcccuccagggaggagcacggguucagguacauguggcaccugcccucccuggcugc

SEQ ID NO: 4152908 - RNA, 70 nt, Human
gcccuccaguuuuagaagauacuguuacaaaauccaaaugugagauaauacuucuuagcuggaacagggu

SEQ ID NO: 4152909 - RNA, 116 nt, Human
gcccucccugauaggagucugauaaggcccucaugcgucagagcccugcagcugacuagugcugagcucggcucccaggagggccuggaggucaggcugggucugcaggagggggu

SEQ ID NO: 4152910 - RNA, 62 nt, Human
gcccucccuggcuuuguccugaggcaggguuauguaaccagccgggucuggccaggcagggc

SEQ ID NO: 4152911 - RNA, 73 nt, Human
gcccucccuucugcacccuccugccaccggcuguuccucuggcagcuucugcucauggagggguggagguggc

SEQ ID NO: 4152912 - RNA, 76 nt, Human
gcccucgcagucuccacagaaggcuugccgggaagcggcagaugcugcugcuggaggcaggccuucccugcagggc

SEQ ID NO: 4152913 - RNA, 57 nt, Human
gcccucuccccagagcuucccuaguuauucucugagcacagcucuggggagaugggc

SEQ ID NO: 4152914 - RNA, 86 nt, Human
gcccucuggcggggcucuucuggcaaucccagggucuuucuuguagcugagccgauccuaugccagggccucgcugcucccagggc

SEQ ID NO: 4152915 - RNA, 58 nt, Human
gcccucuggcuuacuguuggguuuguccaauggcaggcaucagcaaguaucagagggu

SEQ ID NO: 4152916 - RNA, 67 nt, Human
gcccugaaaagcaucucaaaggagcuucaagucccaggggaaaagggaucucuuuaggugucagggu

SEQ ID NO: 4152917 - RNA, 95 nt, Human
gcccugagccccuuugagcuucaguaaccccccucugcaugccuugcucagacaucauuguuaggguccugugcaggggcuggagugcucagggc

SEQ ID NO: 4152918 - RNA, 85 nt, Human
gcccugcaagcuggggagaauuggguuaucuaagggauguaauucuguccuaaagguuuaacucuuuuccaccagccagcagggu

SEQ ID NO: 4152919 - RNA, 100 nt, Human
gcccugcccaccggagggcuggcgccccagauccuaggugaguuguagccuugacuucagcagcacucugcggguccccggcgcuccucugggccagggc

SEQ ID NO: 4152920 - RNA, 55 nt, Human
gcccugcccugagccguagacccgacucccucuggcgggucuccaggguacgggc

SEQ ID NO: 4152921 - RNA, 60 nt, Human
gcccugcucauuucacguguuuccuggcccagugaaagugugugguaugaauucaggagc

SEQ ID NO: 4152922 - RNA, 64 nt, Human
gcccugcugcagguucaccuaccugaccaugacgggcgaggagguggagcugugcagccggggc

SEQ ID NO: 4152923 - RNA, 59 nt, Human
gcccugcuucuggcaugcagaaagcaaucccacuguuuuugcauagcaaguagcauggc

SEQ ID NO: 4152924 - RNA, 58 nt, Human
gcccuggacaguuucugcaugugcugcagcugcaaagacagaaagcauguuccagggc

SEQ ID NO: 4152925 - RNA, 87 nt, Human
gcccuggaguauuugcccaccaauuacugucuccugcugguguuggcagacacaggaggaggaugguggucugggggaaccuagggc

SEQ ID NO: 4152926 - RNA, 86 nt, Human
gcccuggagucagaauguccuccugcggcugcacacggucaguugucuccccaggauuugggcuuuuuggcuucaguaaaugaggc

SEQ ID NO: 4152927 - RNA, 63 nt, Human
gcccuggaugcucauggcaucaagcaccuggaauaccaaaucaugaggucagagcauaggggu

SEQ ID NO: 4152928 - RNA, 74 nt, Human
gcccuggauguuuuuggcuucaaguuucuccacaauggggagaauguauuuuuagcucagaaauccagcagggu

SEQ ID NO: 4152929 - RNA, 84 nt, Human
gcccuggcccgguucuguuuauggcucugcgugggguuucuguagagcagcuccagcagaaccagagaccugggaaaagggggc

SEQ ID NO: 4152930 - RNA, 60 nt, Human
gcccugggagguuagaauauguauugggaaggauaacccaggucuccugcuucccagggc

SEQ ID NO: 4152931 - RNA, 56 nt, Human
gccugggauggcaucagccuucuugauguaauugagagauggauguuauuaugggu

SEQ ID NO: 4152932 - RNA, 57 nt, Human
gccugggccacugcccuggcuacaccgggaagucuggagcuagaaagugggccgugc

SEQ ID NO: 4152933 - RNA, 64 nt, Human
gccuggggaacuugauccuguccgucaagugcgaggaagcagaggggaucgaguaccuccgggu

SEQ ID NO: 4152934 - RNA, 98 nt, Human
gccuggggcucccacccaccuaaggaaugccauccuugucaccggcucacggggcagcucuuugguauccuuccagggugguguguacaaguacaggc

SEQ ID NO: 4152935 - RNA, 56 nt, Human
gccuggggggcaugucauaauagggacccucugcuuugcuugucaugcacucaggc

SEQ ID NO: 4152936 - RNA, 81 nt, Human
gccugggucaccggcuccaacgaggugagugggaaccaggaugucugcucccugaugugggcugcgugacaagccccaggc

SEQ ID NO: 4152937 - RNA, 57 nt, Human
gccugggugcccggcccuucucugggcagaaacccaggggcuggccgggcuccaggu

SEQ ID NO: 4152938 - RNA, 57 nt, Human
gccuggguuccugcuuuugugaccacauuuaauaacacaaugcauggaacucauggc

SEQ ID NO: 4152939 - RNA, 122 nt, Human
gccugguccacaguuuucccaugucucaccuuaaagcagaggugauaugacuuacuauucagguacguagucuuguuacgcuuuuugcaaaaggaauucagauaucgacccuacucccaggc

SEQ ID NO: 4152940 - RNA, 94 nt, Human
gccuggucuuggaucuuguuccucacagcugguucauucaggagguuagugcucugcugaggaggcuggaggcagagcuccaucuuggccuggc

SEQ ID NO: 4152941 - RNA, 60 nt, Human
gccuggugaggagaaaugcucagagccagacaacuggcuccuucauucuccugccaaggu

SEQ ID NO: 4152942 - RNA, 88 nt, Human
gccugguguaguauuugcuccuggaguuuuuugguugacucugggggcaccgagugucacucugacuccaguaaguaaugccaauggc

SEQ ID NO: 4152943 - RNA, 60 nt, Human
gccuggugucuccucugagccuaggcuguaguccaacaggggugggaggacacagcaggc

SEQ ID NO: 4152944 - RNA, 97 nt, Human
gccuggugucuggguugugucuggggcugcucccucucuccugcccuuugccagagagucugaggcagcugcagccauggccuccaggauaaugggc

SEQ ID NO: 4152945 - RNA, 80 nt, Human
gccugguuagcccagaugauugaaccaugggacaaaacugaugaagguuaugguuucaauuucuggguaggccaguuagc

SEQ ID NO: 4152946 - RNA, 122 nt, Human
gccugguuagcuagaaguuccugccuugucacagcacuaauccugcaauuucuccauuggauuucuggacugaugagcaauuuugaugcugauaaggcagaaacacaaucacucuccugggc

SEQ ID NO: 4152947 - RNA, 73 nt, Human
gccuguaaguaaaccacaguggugggagcagugcucgggacaguggacauugcacagcccuguggugaugggc

SEQ ID NO: 4152948 - RNA, 56 nt, Human
gccuguaauucccucuugauuaagauggugauauugauuuagcugggauugcaugc

SEQ ID NO: 4152949 - RNA, 83 nt, Human
gccugucaauuuuguguacaauuuuuuuggcaaauuuaacauucaaccacuuuuguuagcuuaguaccagaguugucacgggc

SEQ ID NO: 4152950 - RNA, 57 nt, Human
gccugucacccccccaucucacggauucuccaaaggacuuugggaggugugaggggc

SEQ ID NO: 4152951 - RNA, 61 nt, Human
gccuguccacuaaacagccaagcauguugggaaauuguugugaggugguuuggaagcaggu

SEQ ID NO: 4152952 - RNA, 60 nt, Human
gccuguccauggcaaugaugcagaaggccacgaaggucucuggguucagcuuggaggggc

SEQ ID NO: 4152953 - RNA, 130 nt, Human
gccugucccagcaaggacucccaggggccugggauucucaaaggggugccaccuccauuggaugccccuuuccuugagaaaccccaaagcccuuucagaggcuguucagcuguaaccucacuccaagggc

SEQ ID NO: 4152954 - RNA, 129 nt, Human
gccugucucgacgagccgcucacccaagcccagccuaaccaaugugcagacuacuguacacauugagagccuccugaacagguagucugaacacuggguuggcggggccggcuauccauccugcagaac

SEQ ID NO: 4152955 - RNA, 56 nt, Human
gccugugaaagggaggaugagcggcgcggcacagcccuccacaccuguucgcaggc

SEQ ID NO: 4152956 - RNA, 58 nt, Human
gccugugccucagccugcagccugcaccucuauguagcuguguggccacgggccaggu

SEQ ID NO: 4152957 - RNA, 57 nt, Human
gccuguggaccccucacccgagcggacugccauccccucugguccugucuggcaggc

SEQ ID NO: 4152958 - RNA, 59 nt, Human
gccuguggcccaacugucugucuguccuaccaccucaggcuacagggccuggccaaggu

SEQ ID NO: 4152959 - RNA, 59 nt, Human
gccuguggccgacugagagccuuuaugggagaguucgugggcagucugguggcuauggc

SEQ ID NO: 4152960 - RNA, 97 nt, Human
gccugugggagccugggggaagaggcaugaaguccuguagauuuguuacaucaagauguuaauguuuuuaaucaagguuccuaggugacccucaggc

SEQ ID NO: 4152961 - RNA, 62 nt, Human
gccuguguccuucccaguggggcacugcaggcagcuccccaauuggcaagggcacucgaggu

SEQ ID NO: 4152962 - RNA, 62 nt, Human
gccuguguuaaauauauugaguuuucuuaaagagggaaaaccugugaauaguuaacucaggc

SEQ ID NO: 4152963 - RNA, 55 nt, Human
gccuguuacuucucugcaggcaucuuucccacagcucugcagggaugugcagagu

SEQ ID NO: 4152964 - RNA, 58 nt, Human
gccuguuagaaccagugagggaagcaguucagccauccugccagugaagcugacgggc

SEQ ID NO: 4152965 - RNA, 59 nt, Human
gccuguuggugacuuucuguuggccaacaugggcugacuggaauguucuccagcauggc

SEQ ID NO: 4152966 - RNA, 78 nt, Human
gccuguuuccuaaaugugcuaauagcaugaaaaugacuuauuuccauguucucuguugugcuaugcuaagaaacaggc

SEQ ID NO: 4152967 - RNA, 62 nt, Human
gccuguuucuccuccuuggccccagauccgcgacuggcggcaaggugaggacgaacacaggc

SEQ ID NO: 4152968 - RNA, 64 nt, Human
gccuuaaagacaacugcagagcaaagaauccaagcgauuuacuuuugcguagugucuccgaggu

SEQ ID NO: 4152969 - RNA, 78 nt, Human
gccuuaaauagacauuuucucaacaucucuagaauaaaugcauuauuucuaaggauaguaaaaugucugauggaaggc

SEQ ID NO: 4152970 - RNA, 111 nt, Human
gccuuaacugcaucaaccggguuuacgaaacagccugauuuccagccccacccaucgcaacugcagcugucagguuucccggcucacguuucccuggaugagcagagaggc

SEQ ID NO: 4152971 - RNA, 85 nt, Human
gccuuaagcagaaaagcuaagugaaggaaaaccgucuuucuuuucaacuuccugacuucuuuuauagugaauuuucuuggagggc

SEQ ID NO: 4152972 - RNA, 57 nt, Human
gccuuaagucucacuccagguauuauuacuuccauuuacagaugaggagaccaaggc

SEQ ID NO: 4152973 - RNA, 72 nt, Human
gccuuacaucauugagacauacauacauuucaugaggcugaaugggauuuaugcugucuuugugaagugugc

SEQ ID NO: 4152974 - RNA, 92 nt, Human
gccuuacuugccucacuacugggucaacacauuuuauguguauaacauauguguacagaaaugugaugacgcaagaggcaagaguugacggc

SEQ ID NO: 4152975 - RNA, 64 nt, Human
gccuuacuuuuuccacuaaucauuguacugcagaaaggcaaagaauagugagaagauguauugc

SEQ ID NO: 4152976 - RNA, 72 nt, Human
gccuuaucauuuucuaccagcgguuugaauuuggcuucucaaaugcagaccaguaugaaaaacauaaguagc

SEQ ID NO: 4152977 - RNA, 64 nt, Human
gccuuauguugauaggaaucugauucccauuccuuuuugggaaugaguugggcagcauacaggc

SEQ ID NO: 4152978 - RNA, 69 nt, Human
gccuucaaguacugcauuuaucaaguggcgaaauuaaucagguauugauuaaaugcaugaauguaaggc

SEQ ID NO: 4152979 - RNA, 60 nt, Human
gccuucagcggccgcucgcugcggggacaccccgguggaugaguucucgcugccaggggc

SEQ ID NO: 4152980 - RNA, 58 nt, Human
gccuucaguaacugagacggaauguuuagaauacagaucuuuaucguugucugagggc

SEQ ID NO: 4152981 - RNA, 75 nt, Human
gccuucauucauuuaugucaugggcauuuauugagggccuaacauacaugagguucugucuuugacauagagggu

SEQ ID NO: 4152982 - RNA, 70 nt, Human
gccuuccacaccuugucacaguggccacuuccuaaggaaggccucccugugugcaggugugcagaagugc

SEQ ID NO: 4152983 - RNA, 67 nt, Human
gccuucccacauucuuuacauucauaagguuuuccaccaguaugaauuuucugauguuggguaaggu

SEQ ID NO: 4152984 - RNA, 68 nt, Human
gccuucccaggaaggaucguuugggagucuucuacaccuuagauuccccaugagaucuuuucaaaggc

SEQ ID NO: 4152985 - RNA, 56 nt, Human
gccuucccuggcuaggcaagcauaggcuucaaggaccuuaucugccagggacaggc

SEQ ID NO: 4152986 - RNA, 59 nt, Human
gccuuccggagccaaauggcaggcggaagacagcagccaggcaugggcuucugggcggu

SEQ ID NO: 4152987 - RNA, 56 nt, Human
gccuuccugacuuggcuguuggcccuaggugcuagggauagagagagaacaggggc

SEQ ID NO: 4152988 - RNA, 57 nt, Human
gccuuccugguauggguugauuuggagaugggaucacuuuaccucauucaggcaggc

SEQ ID NO: 4152989 - RNA, 55 nt, Human
gccuucucagagaggguaauauccagagacaaccuuggaccagcuuucaggaggc

SEQ ID NO: 4152990 - RNA, 79 nt, Human
gccuucucccauuguugcugcuucaagauauuguguccuacuucccaagguaaugaugugugaggcaauaacagggggc

SEQ ID NO: 4152991 - RNA, 89 nt, Human
gccuucugcgggucgcguugcagcugcugcugccuguccugcccgcgcgccgccugcugcagcagcuguucggcgaucaagccggaggc

SEQ ID NO: 4152992 - RNA, 83 nt, Human
gccuucugguauccugcaguugagugcaucuuuaggauggugauaaacaucaauaaguaggauaucaagauaacuagaagggc

SEQ ID NO: 4152993 - RNA, 81 nt, Human
gccuucuuauccucaaguucacagucuggucgcugcuguauuccaaggcagugaaaaaagacuuguugaacagaugaaggc

SEQ ID NO: 4152994 - RNA, 55 nt, Human
gccuucuuauuuuccugaggaagaagcuaguguuucuuaaggggaaguggggggc

SEQ ID NO: 4152995 - RNA, 97 nt, Human
gccuucuucccgaaaccagugauuucuguguggguagcuccuguuuauccagaccaaacugaucaacuuacccauaagaaagcuguucuucaaaggc

SEQ ID NO: 4152996 - RNA, 68 nt, Human
gccuucuuucuuaauagccaggaaguguuuuagagucauacucucugguguagaaagaccuucaaggc

SEQ ID NO: 4152997 - RNA, 73 nt, Human
gccuugaggucugagcagcuucugucugaaggccaggagguaggacuggguugcaggggcugcugggcagggc

SEQ ID NO: 4152998 - RNA, 92 nt, Human
gccuugaucagcuccacaaaguccugguguauggccagaucacucucgaaggcuucaugguuguggauaagggcuuugaugucugauagggu

SEQ ID NO: 4152999 - RNA, 57 nt, Human
gccuugaugauagcaggcagggaaguaguaauuucccuuuauuguucagcaaauggu

SEQ ID NO: 4153000 - RNA, 72 nt, Human
gccuugauucuguucuccuugagaaugugggauguuuuauaaacacauuaagaguuacaaauagaguagggc

SEQ ID NO: 4153001 - RNA, 56 nt, Human
gccuugccucagccauggaaacggcugcugcccacaccccugagcugugguaaggc

SEQ ID NO: 4153002 - RNA, 55 nt, Human
gccuugcugguuucugauccugcguugucauggacagccuuauugcgagcaaggc

SEQ ID NO: 4153003 - RNA, 77 nt, Human
gccuugcuuagucccaugcugcccugccccagccaugguugauuggaugagggcugagcacugggaccaacagcagc

SEQ ID NO: 4153004 - RNA, 58 nt, Human
gccuuggaacaauuauugcugcaauauauucaacagccaguacugaaugcuccaaggc

SEQ ID NO: 4153005 - RNA, 69 nt, Human
gccuuggaucaauacuauuaagaucauaugacuugacccauaaaugauuuauguaugugaaaucaaggc

SEQ ID NO: 4153006 - RNA, 57 nt, Human
gccuuggccuuccuaggccugaccuguucuaggccucuuagcugggaaggucagggc

SEQ ID NO: 4153007 - RNA, 58 nt, Human
gccuuggcuucuucauaugugaucuuaggguuccuaagggcagcaagagaagccaagc

SEQ ID NO: 4153008 - RNA, 62 nt, Human
gcgccuugagccuccaagguugccuuauauucuuggcaaaaguacacugguuguucaagggc

SEQ ID NO: 4153009 - RNA, 59 nt, Human
gcgcgcugaggcuggaggcgcacgagaaguucucgucuggcuucuccacgguaaagcgc

SEQ ID NO: 4153010 - RNA, 76 nt, Human
gcgcggggacgugugcgcacaccuguuuccacguggacgugguccuuugcuugucugcgcgcagcuguguccgagc

SEQ ID NO: 4153011 - RNA, 98 nt, Human
gcgcucaccgcacguccaugaugcugcugcgcuggccgucacgguggcucuccaggugggacagcgugaaggcgggcagucggcggauggcgaagcgc

SEQ ID NO: 4153012 - RNA, 69 nt, Human
gcgcuccugcucgcggccucucccagucccggaauuggggcugcggaucuaaggcugggaggggagugc

SEQ ID NO: 4153013 - RNA, 67 nt, Human
gcgcuucccaucaggagaccagguccugcuccuccccgaggggcaaccugagcuuguggagaaacgc

SEQ ID NO: 4153014 - RNA, 96 nt, Human
gcucucagcgccgcccucccagaccccagagacgucggucagggcgcggcgccccgggccacugcgggcucuuuccgggcgggcgacguggggggc

SEQ ID NO: 4153015 - RNA, 111 nt, Human
gcucuccauggaccauuuuacucagccugccaagcuguguucuacaccuuuguuuuuagacacaagcagcuuuugagcggaaaccugaaagaaggucaguguugugggagu

SEQ ID NO: 4153016 - RNA, 130 nt, Human
gcucucccggaugucugcgcugggucccgcggcagcaugucuaugucucuggaaggagugugggcaucaagggcccagacagagauacuauguugucagggcccagacagagauacuauguugucagggc

SEQ ID NO: 4153017 - RNA, 66 nt, Human
gcucucccuuccugagacccucacagugaugcucacugucugugaagucauaggaggggaccccgc

SEQ ID NO: 4153018 - RNA, 87 nt, Human
gcucucuagaggaccauggaggugcugccuagaaggagacagguuugcuguuuccugggccuguacuccauccgucuuuaggagagu

SEQ ID NO: 4153019 - RNA, 103 nt, Human
gcucucucccuuuuggugcugagggugggcuuuguuccuccagugcuuccucaaagacccccugguggccgaagcccucucucaggaccuccugguggagagc

SEQ ID NO: 4153020 - RNA, 110 nt, Human
gcucucugagcauucgagcgguccuugcuaguaucacuuggacauagcagaaaggagaaguccuuucuaucuaggguuagagugagaccaacugcucccuuucagagagc

SEQ ID NO: 4153021 - RNA, 74 nt, Human
gcucucugauuuaucccauucauagcaagcuacaucugugcaggcagcauagcuuagcuguggaggcagggggc

SEQ ID NO: 4153022 - RNA, 73 nt, Human
gcucucugcggcuuggcuguagcuuuagcgcuguugggcugacggccuggaguucagccaagucccaaugagc

SEQ ID NO: 4153023 - RNA, 64 nt, Human
gcucucugcugugcuuguggccacccgauguuggauacugggugauacugcagagcaacggagc

SEQ ID NO: 4153024 - RNA, 61 nt, Human
gcucucugggagcaauuguuugcuuggccugaggaaagcagcauagaugcuauccgagagc

SEQ ID NO: 4153025 - RNA, 56 nt, Human
gcucucuuuuuccagugguggucuacaggguugcuacauuuuuggaagacuagagc

SEQ ID NO: 4153026 - RNA, 67 nt, Human
gcucugaaaucauccaagcagaaaagugagaaagcacguuuuaugguuugcugaaugauuccagggc

SEQ ID NO: 4153027 - RNA, 72 nt, Human
gcucugaaugagggauucugagggcuaaggucagagucuauagaccggguccuucuuuccccaccucaaagc

SEQ ID NO: 4153028 - RNA, 79 nt, Human
gcucugaauuaaucacuuuucauuaguaccuguuuuacuuaccguagguaccaugcuaaaaguugaucucaauuugggc

SEQ ID NO: 4153029 - RNA, 70 nt, Human
gcucugacacauuuguucuaccuccuucaucucggggagacagcgugaaggauaaaugaaagucaggagc

SEQ ID NO: 4153030 - RNA, 82 nt, Human
gcucugagcagaugcucgcucucccauccauccucagaacaggucagggcuggggaggagagacguccacugcucacucagc

SEQ ID NO: 4153031 - RNA, 67 nt, Human
gcucugaguaaaugaaagcauuccugcacauuugaauuucacagguuuuguauuucacacugggagu

SEQ ID NO: 4153032 - RNA, 63 nt, Human
gcucugcacagggcugccaggcggcuucugucugugcaaggccacaggcacccuguguucagu

SEQ ID NO: 4153033 - RNA, 56 nt, Human
gcucugcaggagugaaagcaggccugauucauacaguuugcuuauuucuguagugu

SEQ ID NO: 4153034 - RNA, 64 nt, Human
gcucugccaccuuguaucaaaauaaucuggaacagguuuccauggaagcaaagguggaaguggu

SEQ ID NO: 4153035 - RNA, 79 nt, Human
gcucugccaggauacagugagaaugcagcuaauaacuuccaggagguuuccucugcugguuuucauuguaacuuagagu

SEQ ID NO: 4153036 - RNA, 77 nt, Human
gcucugccccucaccagcuguaagaucucggacccucugugagccuguguccucaucugcagcgaagggaucagggu

SEQ ID NO: 4153037 - RNA, 76 nt, Human
gcucugccugcauccgcugggcgggcaccacccacuccacuguccucgggccugcccacggggcuggcauaagagc

SEQ ID NO: 4153038 - RNA, 58 nt, Human
gcucugccuucucacuggguucaccucccaagguuuccagucuccugaaaggcagcgu

SEQ ID NO: 4153039 - RNA, 63 nt, Human
gcucugcugcccaggccugcuaggccugcacagggccauggcgggggucccuggcggcagggc

SEQ ID NO: 4153040 - RNA, 85 nt, Human
gcucuggccccagcgcgcucgaugguuuccgcgcggccgccggggcucgcacgguccagucgccagggggcgcgcuagccggcgc

SEQ ID NO: 4153041 - RNA, 70 nt, Human
gcucuggcccuggcaaacugggauucgagcccaggcaugaggcccaguccucugccgucugggccacagc

SEQ ID NO: 4153042 - RNA, 56 nt, Human
gcucuggcuacuccacccuguuggccaaggggcugaaggguggagcacuggccugc

SEQ ID NO: 4153043 - RNA, 63 nt, Human
gcucuggcuaguuaccucuuacccuuuccugaaaagacucaggaacuaagugacugucacagc

SEQ ID NO: 4153044 - RNA, 55 nt, Human
gcucuggcuuggggcacucgucggcgaagucagcguggguguuccagacccaggc

SEQ ID NO: 4153045 - RNA, 55 nt, Human
gcucugggcuuuaguuuguuaucuggguaccagagagcauagcuugagccccugc

SEQ ID NO: 4153046 - RNA, 55 nt, Human
gcucuggggucccugggggagaaggcacagccccugcccuggagacacuuaaagc

SEQ ID NO: 4153047 - RNA, 101 nt, Human
gcucuggguucugaaaagguggugggaaaaaaacuuagaacagagaaaauucuguccaugcuuuucucucaccauuuuugccuucuaacccuuaguugagc

SEQ ID NO: 4153048 - RNA, 57 nt, Human
gcucuggucugagcuuuggcccacgcucucuccacugggccacaucuuuuccagagu

SEQ ID NO: 4153049 - RNA, 55 nt, Human
gcucugguggugaucagacgcugggugagacagcagaggggauuucuaccagagu

SEQ ID NO: 4153050 - RNA, 90 nt, Human
gcucugguugagccuuguacaggauauuauaggcuuuaaaagaagaagaagaaagaccugguaugcuguacaaaaaacugcaaaccaggc

SEQ ID NO: 4153051 - RNA, 72 nt, Human
gcucuguagcccaggcuggagugcaggggugugaucucagcuuacugcaaccuccaccuccuggguucaagc

SEQ ID NO: 4153052 - RNA, 57 nt, Human
gcucuguaugagggugagagaugaagccaauaaacauuucuugauuaucuacagggc

SEQ ID NO: 4153053 - RNA, 71 nt, Human
gcucugucaccaggcuggagugcaguggugcgaucucggcucacugcaaccuccgccugcuguguucaagu

SEQ ID NO: 4153054 - RNA, 79 nt, Human
gcucugucagagcuguguguuuccacugagcucggguuucuccgauguguuucugugguaugcaguuugucacaggagu

SEQ ID NO: 4153055 - RNA, 90 nt, Human
gcucugucaucaggggcuugaggugcaugucggguggcuggcugaccacccagugggcauagcggcucagcguccagcaggcgauggagc

SEQ ID NO: 4153056 - RNA, 85 nt, Human
gcucugugcugccuggaauggucuucuuccuccucucagucuuugagggagaggcugaacuauccuaacaaggccagcucagggc

SEQ ID NO: 4153057 - RNA, 74 nt, Human
gcucuguguguaugaaauuguucaucuagaauuauuuaucuggaaaaaaagacacuuucaaauaugcacagagc

SEQ ID NO: 4153058 - RNA, 103 nt, Human
gcucuguuucauuccccaggggccuggcaggcgguggcuucaagguccgcagccaccauggccgcccuuuccacgguuucucaucuggggaacccaguagagc

SEQ ID NO: 4153059 - RNA, 71 nt, Human
gcucuguuuuuucaugaguaguuaucuguuuucaugacagguggucacuaacugccaagagagaauccagc

SEQ ID NO: 4153060 - RNA, 84 nt, Human
gcucuuaacccugcaauccacaguguuauuuccaggacugaguuguucuucaggaaggcuuuguagaagugccaggacuugagu

SEQ ID NO: 4153061 - RNA, 75 nt, Human
gcucuuacauuugagguaguuuguuguacaguaauacauaacuaaugcagaaauuaauaccuagaaguagggugc

SEQ ID NO: 4153062 - RNA, 70 nt, Human
gcucuuacuacaugcacaauuaggauauagcuucucuugugagcaaaggcuguuuauugguauuaggagc

SEQ ID NO: 4153063 - RNA, 94 nt, Human
gcucuuagguaagagaggagcaaauguauugcuagugacuuuuuggaggacucccccuccugcgguucaugcucauucuaaauugccugagagu

SEQ ID NO: 4153064 - RNA, 87 nt, Human
gcucuuaguuguauuaaguuuggcauauacuguguaaauacucugugaccaacuaguguuuacagaguaguggaaagcuuaaagagc

SEQ ID NO: 4153065 - RNA, 85 nt, Human
gcucuuaucagaucaugaaggaauuaagguaaggaguaggaaaaauguccauuacaacuaccuuuauugagucguuaauaagagc

SEQ ID NO: 4153066 - RNA, 118 nt, Human
gcucuucaggagggaguacaugggugugugcaggguggcacucacauggaucaggaggaacaugaccagguuccccagcagaguggcuguguacaugcccaggaacaccacgaagagc

SEQ ID NO: 4153067 - RNA, 77 nt, Human
gcucuucaucagacucugcuuguaucacauuugcuaggauacuacaggguauauaggcaaagcuaaaugugaggggc

SEQ ID NO: 4153068 - RNA, 96 nt, Human
gcucuucauucuuucaauuugcagagauaaauuccuaagauuucaggggcuggauacagucuugagaguuagagaaauaucuucaauuagaagagu

SEQ ID NO: 4153069 - RNA, 68 nt, Human
gcucuuccauauuacucaggguaaggaccuaagugguaaugccaauaccucgaagauaacuggagagc

SEQ ID NO: 4153070 - RNA, 61 nt, Human
gcucuuccuguuggccugcuuuuugaucaucuugcugucagaggagaccaaggggaauagc

SEQ ID NO: 4153071 - RNA, 84 nt, Human
gcucuucuuucauaaaagcacuuguauucuauuuaacuccugccauugagaaaagguagcuaaaacaggcuuuugaaagguagc

SEQ ID NO: 4153072 - RNA, 116 nt, Human
gcucuugauagcugcugugauagcuggauuuaggacgcuaucccugccuguggggcuguuugaaccaucuugugggcagccugcuuucugauccagcugugaagcuacccaguugc

SEQ ID NO: 4153073 - RNA, 122 nt, Human
gcucuuggagcaaaucuggcuuacaugcuucugaacgccaaauggcugaaggccaccucucucuacccccuuggcuggcaguuaucuuuggaugacuuggaagaagccacaguucccgcagc

SEQ ID NO: 4153074 - RNA, 56 nt, Human
gcucuuggccgcuaguugcugcuagacacagugcagugcaggagccuggccagagc

SEQ ID NO: 4153075 - RNA, 73 nt, Human
gcucuuggcugaagguggacacuugagucacccacucugauacaaauggggacacaggagcacccagcugagc

SEQ ID NO: 4153076 - RNA, 69 nt, Human
gcucuugucagcggcugcuccgcaggcuggccuugguuagggagccaccuggcaggacgcuggcacagc

SEQ ID NO: 4153077 - RNA, 78 nt, Human
gcucuugugccuuuaagcuucauaucaaaauauggaacauagccugugauuuccaugaagcugaaggcagcuuaaggc

SEQ ID NO: 4153078 - RNA, 84 nt, Human
gcucuuuagcuugugccauaugaaacuaccagugguaaaucauuccugaccaaaaauggcaguuuuauggcucaaccuaauagc

SEQ ID NO: 4153079 - RNA, 126 nt, Human
gcucuuuaguccaucuuaacucagcccucagaguagcugggagccaggugagugagaaagaugagaggcucacaccuguaauccuagcacuuugggagguugaggugggaggaucacuuuaggagu

SEQ ID NO: 4153080 - RNA, 80 nt, Human
gcucuuucccagccuggcgagugggcccuggcaguggcccuuucuuacugucagggaacaauguuauggcuugagagagc

SEQ ID NO: 4153081 - RNA, 58 nt, Human
gcugcaaauacagucaggaauguggcaggaaauuauuucugaaaacacacuuugcagc

SEQ ID NO: 4153082 - RNA, 70 nt, Human
gcugcaaggcuuauuuuccuccuuccugugcaaugauaacagcucugggguuggaaagugaucuaacagu

SEQ ID NO: 4153083 - RNA, 67 nt, Human
gcugcaauagauuaugaucuacagugugaaaagcuuuucacacuguagaucauaaucuauugauggu

SEQ ID NO: 4153084 - RNA, 71 nt, Human
gcugcaaugacuuuccuugcacauugguuuccacucguguggguauaaaugccggagaaauucuuggcagu

SEQ ID NO: 4153085 - RNA, 56 nt, Human
gcugcaccuacucugcccuuuagccggaagcgguaggcuggcuggcagugggcagc

SEQ ID NO: 4153086 - RNA, 58 nt, Human
gcugcagagcaaguucucuguuguuggcaaauaaagccauagcagagaugacuccagc

SEQ ID NO: 4153087 - RNA, 55 nt, Human
gcugcagcuuuaggauccagugaacuuugcgccacuaguaauccugugagccagc

SEQ ID NO: 4153088 - RNA, 63 nt, Human
gcugcaggacugaaagaugaggucaaucugcucaaggacggggcucugcucacagcccgcagc

SEQ ID NO: 4153089 - RNA, 63 nt, Human
gcugcaggagcuggagcugugggccuggggacaaguguccuaacagcccccgcucccugcagc

SEQ ID NO: 4153090 - RNA, 58 nt, Human
gcugcaggcggccgugguggcggccgccgccgccgccgccauuguguccgucugcggc

SEQ ID NO: 4153091 - RNA, 59 nt, Human
gcugcagggcagaagggcauagaugcaugcuaucucaucucaucuucaugcauugcagc

SEQ ID NO: 4153092 - RNA, 73 nt, Human
gcugcaggucagcuaggcagcugugauggccuugggauccauuggcaguuggcuagccugcagugaccucagc

SEQ ID NO: 4153093 - RNA, 79 nt, Human
gcugcagugcuggguacaaccaugucaguucaaaccagauucaauuugguugguuaaugugcccauuucccauugcugc

SEQ ID NO: 4153094 - RNA, 59 nt, Human
gcugcaguugguuauaaaaacgugacggaugauuuagguggcuguauucagcuguaagc

SEQ ID NO: 4153095 - RNA, 63 nt, Human
gcugcauauuuucugauucagaaggucugagguggcauuucugaauuccuaggauguugcggc

SEQ ID NO: 4153096 - RNA, 56 nt, Human
gcugcaugacagacaggccuggucacagcagguuacgaugcacugugucauccggc

SEQ ID NO: 4153097 - RNA, 74 nt, Human
gcugccaaacagggacaaauucccuauuugcaugauauucucaagaaaucccaagggaaacacuguuuaggagc

SEQ ID NO: 4153098 - RNA, 93 nt, Human
gcugccacggagccuccuggcggccaggguagggccugucggcccaguugcccacugccugcuccuggcuccacaaagggcuugcugggcagc

SEQ ID NO: 4153099 - RNA, 71 nt, Human
gcugccagccuaggccaggggugagcacuucugggcaagggccugagcugcccccuggccugcucuggugc

SEQ ID NO: 4153100 - RNA, 60 nt, Human
gcugccagcuuuccuuggcugauguagaugcauucauuccaggccagggagagcugcugc

SEQ ID NO: 4153101 - RNA, 129 nt, Human
gcugccaggcagccucaaagcgggagagcaccugacugccguugaauguuuaccgcgagacagacacaugguaacagauggaacucucaccauacacugaggucacugccauuggcauccccauguugu

SEQ ID NO: 4153102 - RNA, 58 nt, Human
gcugccaggcccuggggcuauggcacugcgugacccugcaaguccuaccuggcgaagc

SEQ ID NO: 4153103 - RNA, 92 nt, Human
gcugccaucugcugacugugagcuagggacuagggaaggagcagacuagaacagaagcugcacuucccgccucuuugcucagcagauagagc

SEQ ID NO: 4153104 - RNA, 62 nt, Human
gcugccauuaugggaacgagaagucugggcagccaguucgaauuccguuuuauaaggcuggc

SEQ ID NO: 4153105 - RNA, 95 nt, Human
gcugcccaggauccugucccucuaggaggcccucacaaucuucccacuugcacaggaccggggcugccuccucgagacaggaucuuaugggcagu

SEQ ID NO: 4153106 - RNA, 57 nt, Human
gcugcccagugugcucaugcaguuagaauguucagagaguaggacacugggccaagc

SEQ ID NO: 4153107 - RNA, 56 nt, Human
gcugcccucuguguuuguccuugccacagucacggggugcaugugcagaggggagc

SEQ ID NO: 4153108 - RNA, 56 nt, Human
gcugcccuguccggcucuccugcaacacaaaacaagggaagggucagucgggcagc

SEQ ID NO: 4153109 - RNA, 74 nt, Human
gcugccguccacuguccccugggaggcguccagagccgucuccaccugggcaacagugccucgacgguccaugc

SEQ ID NO: 4153110 - RNA, 68 nt, Human
gcugccuccuggguucaagcgauucucuggccucaggcuccagaguagcugggacuacaggugcaugc

SEQ ID NO: 4153111 - RNA, 78 nt, Human
gcugccugccaucugcccuggccaugcccguuccgcuaaugaaggauaaacacaaggccaggccagaugacagucagc

SEQ ID NO: 4153112 - RNA, 99 nt, Human
gcugccugggcugauuucucuacugcaugggauaggguggggaggauuaucacacccucucuaaccugcauggcagcuagaagggaggggcaaggcagc

SEQ ID NO: 4153113 - RNA, 86 nt, Human
gcugccuucccaucuccguguuggcucuuggagggaagccgaggcgggaauccaccaugauuuagcacuggcuugggucuggcagu

SEQ ID NO: 4153114 - RNA, 59 nt, Human
gcugccuucccggaaugucaucucccucuuucaccuggagccuucauuuuggaaggugc

SEQ ID NO: 4153115 - RNA, 92 nt, Human
gcugccuuugcucaggcacacaggcucccugggcggacucuaccugcccagucucuucuggcccuguggccuuugaugcacacgguuccggc

SEQ ID NO: 4153116 - RNA, 128 nt, Human
gcugcgagguggccguccacuggagggcgcuggucgggggccugacggccggcgccgcgcugcuggugcugcugcugcuggcgcugggcguccgggcggugcgcuccggaugguggggcggccagcgc

SEQ ID NO: 4153117 - RNA, 78 nt, Human
gcugcgcucagcccugcagugcggagguggcaacagguucccauuuguccuguugcuggcgcugcgggcgcugugggc

SEQ ID NO: 4153118 - RNA, 92 nt, Human
gcugcggcauucguccaccuggcucucgcagcgugugcccguguagccaggagcacaggcacaugagaagcuggcgaugccauccacgcagc

SEQ ID NO: 4153119 - RNA, 68 nt, Human
gcugcgggucucagaggcccucugguccguucagggugaggacagcugagaggccugggcccgugagc

SEQ ID NO: 4153120 - RNA, 57 nt, Human
gcugcuacugagccagaggggguaaagcaacagcguuuucucaguugugugagcagc

SEQ ID NO: 4153121 - RNA, 87 nt, Human
gcugcuagugucucuaaagugguuucuuauccccugcagcaucugccaagguucuguuuggcugaggaucuaugaggcaucugaagc

SEQ ID NO: 4153122 - RNA, 75 nt, Human
gcugcuauggcagugacuugaaggguagaaauuugauuaagaagucaauauuagccucaguucuucauagccagu

SEQ ID NO: 4153123 - RNA, 58 nt, Human
gcugcucucuggcccauugucaguggucaucugccagugacaaugggccagagguggc

SEQ ID NO: 4153124 - RNA, 74 nt, Human
gcugcucugaggucgaagcaccuuguauguuaugugaaaaauauuuccaagcaaagugcuuugccuccagcugc

SEQ ID NO: 4153125 - RNA, 61 nt, Human
gcugcucugcuucugagaggugcucuguuacugcguccuuacuuggcagaacgcagaaggc

SEQ ID NO: 4153126 - RNA, 63 nt, Human
gcugcugcugagagcucagccugaaaccucgcguucagguucauuacuacuucagcaguuugc

SEQ ID NO: 4153127 - RNA, 66 nt, Human
gcugcugcuggcaucauucugaaggguagaagcaggggaccuauaucagaguguguuacagcaagc

SEQ ID NO: 4153128 - RNA, 64 nt, Human
gcugcugcugugccuggcguccugugggacaagagugcaacagggcgcugggcaccuuggcagc

SEQ ID NO: 4153129 - RNA, 57 nt, Human
gcugcuggcaagcccaguuggagcagcacauuuguuagcuggaaacaugccggaagc

SEQ ID NO: 4153130 - RNA, 57 nt, Human
gcugcuggcguucugaccagaggaugccgcauccucuccaugucucacgccacuggc

SEQ ID NO: 4153131 - RNA, 60 nt, Human
gcugcugggcacccccugagcucucaguaaauggagcuauugggguuaugcccgcucagc

SEQ ID NO: 4153132 - RNA, 55 nt, Human
gcugcugggguggagaaacgcugugacccagucaguguuucuuuuaaugagcggc

SEQ ID NO: 4153133 - RNA, 60 nt, Human
gcugcugucagugguggcaguuccuacucuuucucucgaaucucuacugcugacaucagc

SEQ ID NO: 4153134 - RNA, 64 nt, Human
gcugcugucucaugcgaugcggaggugaaguggagucccccgacauugcucauggacuggcagc

SEQ ID NO: 4153135 - RNA, 57 nt, Human
gcugcugucuggucugagggcucaugcucucugugguuugagagccgggcagucagu

SEQ ID NO: 4153136 - RNA, 91 nt, Human
gcugcugugagaggugaaguguugcugugccaccugcuugggaagaccaagcugugucuaaucuuauacaucauuuuucugcucauucagc

SEQ ID NO: 4153137 - RNA, 83 nt, Human
gcccacccagaacagcagggaaauuccaagucaucgguuucuaguucuccccaugcgugugguggcccugcuuuguggugagc

SEQ ID NO: 4153138 - RNA, 95 nt, Human
gcccacccuuuuuccucuacaaauauuugugcugugagcucucccucucccaggccuaaugggagaaagggagagccagcacacgagcucugggc

SEQ ID NO: 4153139 - RNA, 70 nt, Human
gcccaccgcagccgagaccugggagcccgccugggccucacacucccucgggucgcggacugcgcugggu

SEQ ID NO: 4153140 - RNA, 65 nt, Human
gcccaccugcagccagucuaccugguggaaaguugccuucggucugaggcugcaagguggugggc

SEQ ID NO: 4153141 - RNA, 88 nt, Human
gcccacggugauugacagcuggcacacagcagcacccagggcgccacccgcccuccaugagugugcugcugguuuaauugaugugugc

SEQ ID NO: 4153142 - RNA, 97 nt, Human
gcccacuaugcuaauguacaucaguaacuguaaaacagggguucuuuguaaguuccucuuguguauauauaguaacuuauaacaauggcaugugggc

SEQ ID NO: 4153143 - RNA, 67 nt, Human
gcccacuuaggucgggcuucuucugacaguguguaagaccccacugugagcagcgaccugaggaggc

SEQ ID NO: 4153144 - RNA, 55 nt, Human
gcccagacaucaggggcuagauccccucaagaggagguuggaccugugucagggc

SEQ ID NO: 4153145 - RNA, 70 nt, Human
gcccagaccagggucccacagagucucccacuuccuggggauguucugaugccaugggaucccugggggc

SEQ ID NO: 4153146 - RNA, 69 nt, Human
gcccagagcccuaggggagaugcauguccaggcaguugggcccaggacagccuucuggggcuucugggc

SEQ ID NO: 4153147 - RNA, 56 nt, Human
gcccagaguggagggugcagaauggguagcacuuccauuaacacugagcuaugggu

SEQ ID NO: 4153148 - RNA, 65 nt, Human
gcccagaugcuuguuggcuggucuccaucuuuuagcacuggaagaccauauucagcaggcauggc

SEQ ID NO: 4153149 - RNA, 79 nt, Human
gcccagcacugccugagccaccggcagggacaucugaguuagaugacuugcagcuggcuggcuuucagcaggagaaggc

SEQ ID NO: 4153150 - RNA, 60 nt, Human
gcccagccaacaggaagcccagccuuucagaaagagccuggcaaggcccuguugacuagc

SEQ ID NO: 4153151 - RNA, 76 nt, Human
gcccagccgcuccuaagggcuggcacacggcugcaucagagaagacgugaaaagcaacauuguggaccggcugggc

SEQ ID NO: 4153152 - RNA, 62 nt, Human
gcccagccuccaagcuccaaggcccucucccccagucagcaggggagcuugguggcuguggc

SEQ ID NO: 4153153 - RNA, 70 nt, Human
gcccagccuggggucacuugcagccgcacccaccugccggugcgccaugugcucucggcccucgcugggc

SEQ ID NO: 4153154 - RNA, 67 nt, Human
gcccagcgggggacacaucucuugcaggaaggacugaugauugcaaggcuagguucacccacugggc

SEQ ID NO: 4153155 - RNA, 61 nt, Human
gcccagcuccagagccagaaacacuuggauuugaauccugggucugcuacuggagcucugc

SEQ ID NO: 4153156 - RNA, 70 nt, Human
gcccagcugaaauuuuuuaaauuaagaaaucauuuuucguuguuuaagaaaauucauguuguucucuggu

SEQ ID NO: 4153157 - RNA, 69 nt, Human
gcccagcugccuucccgguguauacccuugggauuucuaggcagguccccuggaaggcaccugcuaggc

SEQ ID NO: 4153158 - RNA, 64 nt, Human
gcccagcuucugagcaagccaggggccuggauggaggggcccguggcugugggggaagaggggc

SEQ ID NO: 4153159 - RNA, 63 nt, Human
gcucugcagcuuauuugcugugugaccuuaagcaagucacuacaccucucugagcugcugagu

SEQ ID NO: 4153160 - RNA, 61 nt, Human
gcucugccaaggacccauucucuugauuucagcucaaugaucuugucugccuuggcagggc

SEQ ID NO: 4153161 - RNA, 75 nt, Human
gcucugccauggccuggggaagaccaugggcaaaccucagcgaccaggcugcucauggguccugccccgcggagc

SEQ ID NO: 4153162 - RNA, 56 nt, Human
gcucugcccaaagcuguggcugguuaucugcuggacuaagagcugugggcauuggc

SEQ ID NO: 4153163 - RNA, 61 nt, Human
gcucugcccaaugucccuacaccuggaaaucccaggcagcagaggggugaggcaugggggc

SEQ ID NO: 4153164 - RNA, 68 nt, Human
gcucugccuaggaccuaaaaucuuauaggacauuuccuaaucauaaagaguuuagagucuugcagagu

SEQ ID NO: 4153165 - RNA, 102 nt, Human
gcucugcgcuuccacgaggcuccacuggaccuuucuugaauucuuuccucaagccuuggaggagcugaaauucacaaggauccaaagccccugcugcggagc

SEQ ID NO: 4153166 - RNA, 76 nt, Human
gcucugcucuuucaggcauagaccuugcugguucaguggcaguggcuagaucaugagugagcaucucuuuuagagc

SEQ ID NO: 4153167 - RNA, 69 nt, Human
gcucugcugauccgcagccauccggguucagcccagccuggccagcagcugcgggucaccagccagagc

SEQ ID NO: 4153168 - RNA, 62 nt, Human
gcucugcugggugggcaguuauuuucauggcuugccagcaagcugccccauucaguugaugc

SEQ ID NO: 4153169 - RNA, 75 nt, Human
gcucuggauaaggaguacagccggaggagggucacagagcccucagcucaagccccugugccuuagucuaaaagc

SEQ ID NO: 4153170 - RNA, 127 nt, Human
gcucuggccacagcaaccaaggaaugggaggagggaaguacagaggauggaggcaguuagggccuguguggaaugggcacugaggaggccugucuucccugcccucuucucccugcagcuccagagc

SEQ ID NO: 4153171 - RNA, 62 nt, Human
gcucuggccagacccucaguggggcugcugcccagcacugggcaauucugagccuaagaugc

SEQ ID NO: 4153172 - RNA, 73 nt, Human
gcucuggcucuggcuacuccacccuguuggccaaggggcugaagggcagagcacuggccugcaagggcugagc

SEQ ID NO: 4153173 - RNA, 71 nt, Human
gcucugggccacaucagaugaagacacgcagccuccuguuuagucuucuggauugaucgugguaaagcagc

SEQ ID NO: 4153174 - RNA, 56 nt, Human
gcucugggccauccuggccgggauccacaggcugccccgcccgggagccauugagc

SEQ ID NO: 4153175 - RNA, 60 nt, Human
gcucugggugaacuuggagcaaauaaccagagaaauagcuugucuccaaggccacagagc

SEQ ID NO: 4153176 - RNA, 57 nt, Human
gcucugguagauccucaggcucugaaauaccuagaagcugacugggguccccagagc

SEQ ID NO: 4153177 - RNA, 59 nt, Human
gcucuggugcccuguguggcaggagcucuuuuucaacaauuccaccagggcaccacugu

SEQ ID NO: 4153178 - RNA, 72 nt, Human
gcucugguuaugccuccgaaaccuggagugugagauaaagcacaaaggugugugggugugagaaugcagagc

SEQ ID NO: 4153179 - RNA, 57 nt, Human
gcucugucuuguguuccugaggugccaucuggcacaggacucgacugcagacagcgc

SEQ ID NO: 4153180 - RNA, 129 nt, Human
gcucugugacacaguucaagccgaugagguaugagcagaagaguucucugacugucuggaaagucugauuuccugauacagacaccacucuuuuccccaugccugaauucuagauguguugauagauac

SEQ ID NO: 4153181 - RNA, 67 nt, Human
gcucugugcugaagugaaauucaucaauaauggccuauuuuguuggucuuuucaguuagcacuuggc

SEQ ID NO: 4153182 - RNA, 58 nt, Human
gcucuguggcugaguuccuuauguuuuaauuaagcagggcuccugaaagccgcguggc

SEQ ID NO: 4153183 - RNA, 88 nt, Human
gcucuuauaaauaacucauuugcauuuuuccugucuuccaacauaagaaugaggauucaaagaccaacaaaugaaagucuaugggggu

SEQ ID NO: 4153184 - RNA, 76 nt, Human
gcucuuaucucuuucuauuucuuaaggcaaugcugcuauaaaugccuggauuaggagugugaagaccugauauagc

SEQ ID NO: 4153185 - RNA, 60 nt, Human
gcucuucagauggccaguuguccccuucaggauccugggaugggaccauguacgucuagc

SEQ ID NO: 4153186 - RNA, 78 nt, Human
gcucuucaugcaauauauaggaacaacuuaggguuguaaugcagugccugggaguuccuuuauaucacauuuaguugc

SEQ ID NO: 4153187 - RNA, 57 nt, Human
gcucuuccauuucucuugaacuucuggagcaggagagucacaucaugggauuugagc

SEQ ID NO: 4153188 - RNA, 85 nt, Human
gcucuuccccacaggggcuaccuggccagaggcugcugggucaggcagugcucaccugucaggucaaggaggcccagggaggugu

SEQ ID NO: 4153189 - RNA, 58 nt, Human
gcucuuccuggccucuuccaccaccagucaagcuggugcaggaguuggcagggacagc

SEQ ID NO: 4153190 - RNA, 60 nt, Human
gcucuucuaaagaauguacaggucuucgauguucuauggccuggguacauccugaggggc

SEQ ID NO: 4153191 - RNA, 56 nt, Human
gcucuucucagauuguacacucucagaaccugauggagaagugacuuggaaagagc

SEQ ID NO: 4153192 - RNA, 86 nt, Human
gcucuucucuccaaggccagcuggagggaugaggcaugacaaguccaucccuacagcuggcacuuccccuacagcugagagggggc

SEQ ID NO: 4153193 - RNA, 74 nt, Human
gcucuucugagauaaauaggucacaguucucuauugggagaacauuugucgaucaauuuguauaacaguagggc

SEQ ID NO: 4153194 - RNA, 90 nt, Human
gcucuucuuuucagauuucuuugcuuguguuuuuagccucuaucacuucauaguuucaaaauuuggcaaauaauuugagggugaagcagc

SEQ ID NO: 4153195 - RNA, 59 nt, Human
gcucuuggucucagccucugaaauagcugccugcugacucauaguguaaacacaggggu

SEQ ID NO: 4153196 - RNA, 95 nt, Human
gcucuuuaacauggcauuaugggguuaaauuucuccuagcacaaauucugggucagauugagccccuggugauugucucuuuccaguugguaggc

SEQ ID NO: 4153197 - RNA, 67 nt, Human
gcucuuuaguccaagccaugucugccucuuuccccgacccagcucagggccauggaccagcagcagc

SEQ ID NO: 4153198 - RNA, 81 nt, Human
gcucuuuauuuuaucuucaacuuggcaaacauuuauuaagcccaggacccuuguuugucaaugaagauaugaauaaugugu

SEQ ID NO: 4153199 - RNA, 80 nt, Human
gcucuuucucucagucucuuagaaucgcauauugucaggcauugucacacaugugauucuaagacagcgagagaaagagc

SEQ ID NO: 4153200 - RNA, 65 nt, Human
gcugaaagagugguggccguggugucacgagaagacuuggaaucgcagcugugccacuuaguagc

SEQ ID NO: 4153201 - RNA, 75 nt, Human
gcugaaaggaagaaguauuuuuguccuguuguaauuuuuauucaaaagggacucaaaauacuuuucaaauucagc

SEQ ID NO: 4153202 - RNA, 88 nt, Human
gcugaaaucuggcuuuucaaagggagaguauccagaaacagaagaugcugcucugagaggcucuuccuaauagaacugcugcuucagu

SEQ ID NO: 4153203 - RNA, 73 nt, Human
gcugaacaguggugccuugcuccagugccucugaagggcuuggaaauugcaggacacagcuuuacugcucagc

SEQ ID NO: 4153204 - RNA, 68 nt, Human
gcugaacuguuucuggugaaagaguagccuuccuucgcgggcacugacacugagggaagcagcucagu

SEQ ID NO: 4153205 - RNA, 86 nt, Human
gcugaagaggccuguuucucagugaguagaaaggcuggaaagguucuuuccagcucuuguugcccacugcccaguucuucuucagu

SEQ ID NO: 4153206 - RNA, 68 nt, Human
gcugaagcagauccagguguggcagggcgugacauuuggcccaggucagugucuggauccugcucagu

SEQ ID NO: 4153207 - RNA, 57 nt, Human
gcugaaggauuuaguucuuugcuuacuuaaagaaagguagcugaacaaucuuucagu

SEQ ID NO: 4153208 - RNA, 71 nt, Human
gcugaagggucaauuucuaagggcaguuuucuccaacuuaauucuguccaccuuugauaggcucucucagc

SEQ ID NO: 4153209 - RNA, 55 nt, Human
gcugaauaagagucuacuuugcuaguagauuugcucuagagacucauugcucagu

SEQ ID NO: 4153210 - RNA, 64 nt, Human
gcugaauccuuguuccaaacuccaguccccaggaaagccaaggaugugggguugagggaccagc

SEQ ID NO: 4153211 - RNA, 80 nt, Human
gcugaaugaccuagguucuaaaagaagcaaguucauaggcaaacuugcuugugaguugcucuuuugcuacuguggucagc

SEQ ID NO: 4153212 - RNA, 65 nt, Human
gcugaauggcgguuugggaagggcuuucugacauuugcagaggcccaggguacaggccgcucagc

SEQ ID NO: 4153213 - RNA, 90 nt, Human
gcugaaugggcuuggaaaugcuccccacccaguccuggaaggcauguccaccaacgucuuccuggaggggacagcaugggcccaacaagc

SEQ ID NO: 4153214 - RNA, 59 nt, Human
gcugacaauugaacagucuggaagggacaggaguuugugccaggcuggcaaaugggggc

SEQ ID NO: 4153215 - RNA, 76 nt, Human
gcugacaccacaaacagaguugaaaaauaggggucucaugugcaucccuuuuguccugcuugguuucggugugggu

SEQ ID NO: 4153216 - RNA, 129 nt, Human
gcugacaggggaugacacaaggugggcagagguaugggcauggugcugugguguucccugugaacagugucucaacaauggcccuaucaccuuugcuucuggcuggccugcgccacuuccucuguuucc

SEQ ID NO: 4153217 - RNA, 59 nt, Human
gccgucaaagugucuugugcucaucuaucuccaguacaaguacuguggcuuugaauggc

SEQ ID NO: 4153218 - RNA, 59 nt, Human
gccgucagugcauuuuuaagguauuucgagauguucauuauaccaaauugcauuauggc

SEQ ID NO: 4153219 - RNA, 62 nt, Human
gccguccuggaaagcaccgucuguuguucauucaauugcauccgggcuacuuccacaccggc

SEQ ID NO: 4153220 - RNA, 60 nt, Human
gccguccuggacugggugaggcacaugugcagguaugugcagcuaguccuggacuugggc

SEQ ID NO: 4153221 - RNA, 111 nt, Human
gccguguacagggagguugcuuggaauacuuuuguuaggaaaacgcacuuuuuguaguuggagccuguuuuuguaccuggcuuaaagugaugccucccagugaauacuugc

SEQ ID NO: 4153222 - RNA, 69 nt, Human
gccgugugugucugugugugugugugugugugugcacgcacaugcacccauguacauacacaugugugc

SEQ ID NO: 4153223 - RNA, 55 nt, Human
gccguuauucugcuggccccgggagcauucccauggaucaugcacgggagcaggc

SEQ ID NO: 4153224 - RNA, 103 nt, Human
gccuacaaggacacaucauugucacccaaauuucauaguugauguucgguuucacuguuggugcuguacauucuguggguuuggacauguguccuccuauagc

SEQ ID NO: 4153225 - RNA, 71 nt, Human
gccuaccagaauagaaugaaagaaggguuuauuugauccuguguucaagucauucauuuauuccacuaggc

SEQ ID NO: 4153226 - RNA, 76 nt, Human
gccuaccgcugcacugugggagccccuuucugggcuggccaaggccagagccggcucccucagcuugcggggaggu

SEQ ID NO: 4153227 - RNA, 56 nt, Human
gccuagacuuggagagguggaaggaacauuucguuuuuagggaccaggucauaggc

SEQ ID NO: 4153228 - RNA, 58 nt, Human
gccuagagcuauucaagguuuuauggaagauucuauagaccuacacuauagcuucugc

SEQ ID NO: 4153229 - RNA, 59 nt, Human
gccuagaugugguccaauuggcuaucuacgcuaauauaauccugcuucacauugaaggc

SEQ ID NO: 4153230 - RNA, 76 nt, Human
gccuagauguuacuuaaaauuauggcccauuuggauaaaauaucucaaaugacaacgugaucuuagagcagcaggc

SEQ ID NO: 4153231 - RNA, 57 nt, Human
gccuagcaaaugagaggagaaaauaagaugaucggcucuuccugacauaugcaaggc

SEQ ID NO: 4153232 - RNA, 122 nt, Human
gccuagccugggagugcuguaucccucuuucucccucugaggcuccaugcaggcuuuguugggcaacaaugaagccugcugccuguggcgggggaagcagggagggugagucuaggcaaggc

SEQ ID NO: 4153233 - RNA, 58 nt, Human
gccuaggaagcugagauugcagugagccaugaucaugacacugcccuccagccugggc

SEQ ID NO: 4153234 - RNA, 55 nt, Human
gccuagggguacagucugccuuuacagugaucacugugagaagguuuccgugggu

SEQ ID NO: 4153235 - RNA, 68 nt, Human
gcuccagcucccugucucugggguccaugccugucauggccaaagccacagcagaggaaugcucgggc

SEQ ID NO: 4153236 - RNA, 67 nt, Human
gcuccaggaggugcaccaguugugagguuuuggaaaagaucucaugcuguagugcacuaacuggagu

SEQ ID NO: 4153237 - RNA, 63 nt, Human
gcuccaggccacggcuucuuggacuuggagaccccaccugggagccuagagggccuauggagu

SEQ ID NO: 4153238 - RNA, 73 nt, Human
gcuccaggcucugggccgggcaccagccucugggaaaauggagggggugguggugagggcucggacaaggagc

SEQ ID NO: 4153239 - RNA, 57 nt, Human
gcuccaggguggaugacaauucccuaggcucccguccuggcugugccaccuuggagc

SEQ ID NO: 4153240 - RNA, 63 nt, Human
gcuccaugcuccauauggauauucuuuggaaacaaagcauuuuugaaaugguaggauuggggc

SEQ ID NO: 4153241 - RNA, 70 nt, Human
gcucccacugugggguuuggcuggaaccucaacugcagguuuggguacaggcuucaggugccuggggagc

SEQ ID NO: 4153242 - RNA, 75 nt, Human
gcucccacuguucuggcaccaucuguuguuuucagauguccugauagcucaagaauguguuuuaacaugggaagu

SEQ ID NO: 4153243 - RNA, 55 nt, Human
gcucccagcuggagccucaacagagguugugccugcuuggggugcagcugggggu

SEQ ID NO: 4153244 - RNA, 106 nt, Human
gcucccauugcugaggguucagaaaccaggcaguggaagcuaaaauuucaggggaaaucgggcggaacuauugcagaugguuucccccuugaauagagaugggggu

SEQ ID NO: 4153245 - RNA, 61 nt, Human
gcuccccaccuggaagccugcagacucgccgagcugagagaaucaugcugcaggugggggc

SEQ ID NO: 4153246 - RNA, 75 nt, Human
gcuccccauuauacucccacaucacugacuuuuguagauuaucugaucagucagaugaugugaggaguggguggu

SEQ ID NO: 4153247 - RNA, 76 nt, Human
gcuccccuugguccuccugggaaccagggugccccuuaguggugguggcccaggagaacccgaccaaggcaggagc

SEQ ID NO: 4153248 - RNA, 58 nt, Human
gcucccgugaaggcuguagaagaugaucugugucuugucucuuccagcaucugggggc

SEQ ID NO: 4153249 - RNA, 60 nt, Human
gcucccucccaccagccugcagguggggugccugugauuaggagagggcgguagaggagu

SEQ ID NO: 4153250 - RNA, 56 nt, Human
gcucccugaaaagaacaaaguccacauuauuguuacuuguuuugguuuuagggggc

SEQ ID NO: 4153251 - RNA, 55 nt, Human
gcucccugaagagauuuggucuuuauagguuugacauucagaucuuugcgggggu

SEQ ID NO: 4153252 - RNA, 60 nt, Human
gcucccugugcucugagugauaaucucuagagauguuuauaagaaguugcauaggguagc

SEQ ID NO: 4153253 - RNA, 79 nt, Human
gcucccugugguugggagaucuuuaggaguuggacuaucuuaaagauagacuaucuuaaaguuuucugaucauuugagc

SEQ ID NO: 4153254 - RNA, 109 nt, Human
gcucccuuacaucucccuggacuguucagggccugacaggcuuucuucucauuccuagucgucacucuggccucugcagcaguuccuuagauagauggauguuuggagu

SEQ ID NO: 4153255 - RNA, 59 nt, Human
gcuccguuucucggucacggaugagacagguggccugaggcugugggcggaggaggggc

SEQ ID NO: 4153256 - RNA, 65 nt, Human
gcuccuaauuccugugccucaggucucagccuuaguugugguucagccucaggacaggauggagc

SEQ ID NO: 4153257 - RNA, 55 nt, Human
gcuccuaccaugacacugccaggcaugggaugagcaggcagucacggucaggagc

SEQ ID NO: 4153258 - RNA, 65 nt, Human
gcuccucacacccacugcaaccaugguggcugccugugguucuuguguugugugaggauauuugc

SEQ ID NO: 4153259 - RNA, 56 nt, Human
gcuccucaccagcagccucaccuuccucugguggaaaugagaaggcaguggggagc

SEQ ID NO: 4153260 - RNA, 116 nt, Human
gcuccucaucuuaagauccacugauuugggaacuuaauuaugucugcaaaaucucuucacagcaguaccuagguuaguuucugugaauaacuagaggaugugaguauaccaggggc

SEQ ID NO: 4153261 - RNA, 80 nt, Human
gcuccucccauggccaguggucagugggagggugugcccugcgccugucugcauggccacugggcauguguguugggagc

SEQ ID NO: 4153262 - RNA, 78 nt, Human
gcuccucccuugcaggcagggccuccuggagccuugugcucauccugggcucugaggccccagcccugcacagagagc

SEQ ID NO: 4153263 - RNA, 58 nt, Human
gcuccucucugucugcugucuauagaaggaggcuaauagcagcagaucuggugagggc

SEQ ID NO: 4153264 - RNA, 55 nt, Human
gcuccucuugagagcuggauccacugcuaaugcagcuuuacucuccaaggugagu

SEQ ID NO: 4153265 - RNA, 73 nt, Human
gcuccugcccuuggaucuccaguuccccucagccuccaggugggccaacaggaggucuaggaauaguaggagc

SEQ ID NO: 4153266 - RNA, 112 nt, Human
gcuccugcugcccuccugcucagcagaggcccccuccacccauucuggggagucagaauccucaucuggguccucagggggcugcaacagucggggggcaggcucuagaggc

SEQ ID NO: 4153267 - RNA, 60 nt, Human
gcuccuggcucagaugcuaaauugucaccaguaacagggagcuauuaggguuagugaagc

SEQ ID NO: 4153268 - RNA, 121 nt, Human
gcuccugggaagacaaugccagcugugcgcugaaagucugugcaagcugcucccgugaaaaggaggacauuggcauggcagggcugugggcaggucuuaguggcuggacauucccaggagu

SEQ ID NO: 4153269 - RNA, 57 nt, Human
gcuccugggcucuaccuugcuacugacaucaggcagucaaaacagaguccuaggagu

SEQ ID NO: 4153270 - RNA, 75 nt, Human
gcuccugguauuuccuggaccaacugagauugggucaaaugaauaugauaggguauguccaagaaacacaggagc

SEQ ID NO: 4153271 - RNA, 61 nt, Human
gcuccuggugcuguagagauuuccggcgcacagaggcccccauucccugccaccaggaagc

SEQ ID NO: 4153272 - RNA, 63 nt, Human
gcuccuguaaauaacuuucauuuuuuaauaugcuuacagaaagaagguguauuugaguggagc

SEQ ID NO: 4153273 - RNA, 84 nt, Human
gcuccuguguagucaaagacagaugaccucgcuugaggauuuuauagcucuuggugguuuuagaugccuuuacugcauaugagc

SEQ ID NO: 4153274 - RNA, 68 nt, Human
gcuccuuaacagcaagaucugugucagcccuucuuuguggcucccacagugccuuguucuuauuaagu

SEQ ID NO: 4153275 - RNA, 87 nt, Human
gcuccuuagaacuccugcucuuuauuuucugguaucccaauugaacagacuggugggagcuggagaguacagaguuuauuaagcugc

SEQ ID NO: 4153276 - RNA, 68 nt, Human
gcuccuuagcuagcugcacaggcccugggcacuccugucacuguugcagccagcuuugcggaaggagc

SEQ ID NO: 4153277 - RNA, 62 nt, Human
gcuccuuaugguccugacccuacaguuccugucccaugaccagggccagaucaccaaggagc

SEQ ID NO: 4153278 - RNA, 105 nt, Human
gcugacauaugccaauuauauucagcaauauuguucccccagccuguugggucacguaacagccugagagaacaaugaugcugaauuaacgauugcaaugaaagc

SEQ ID NO: 4153279 - RNA, 88 nt, Human
gcugacauuaaggcuuuguagugauugcuucauuaaagguuaaggauuuccuaaucagcuaaaguauuacuagaaagcuguuguuugc

SEQ ID NO: 4153280 - RNA, 57 nt, Human
gcugaccacaggugggcuugcucacaaggcuguggucugcagguggauguggucagc

SEQ ID NO: 4153281 - RNA, 60 nt, Human
gcugaccagaggcaggucugggccuaaaggaggucauuucuggccuugcucuguggcagc

SEQ ID NO: 4153282 - RNA, 57 nt, Human
gcugaccagcuuaauucccuaucauaacagaugaagcaagauagaaagcugcucagc

SEQ ID NO: 4153283 - RNA, 58 nt, Human
gcugaccagugaugagccauuuaggugaacucucugaacaggcuaaguauuugguagc

SEQ ID NO: 4153284 - RNA, 78 nt, Human
gcugacccugacugucucuucucccaugagccuuucagagccaaaccagcugugggagaugugcggcagcuggucagc

SEQ ID NO: 4153285 - RNA, 110 nt, Human
gcugacguuuuauacacuuuugcagaugaaccucuuugugaaugucaugagcaguuaucagucuaucaugcagaguagaaagggcaaagcugaacuguaagggcgucagc

SEQ ID NO: 4153286 - RNA, 73 nt, Human
gcugacuaacacaucauggccagaggcucgcaggaaccuaaaccuguguuuccucuagaagccaugguucagc

SEQ ID NO: 4153287 - RNA, 86 nt, Human
gcugacuaggccaagguuagaaaagguacuuuccagaaguucaccaucccaggcagacucaaggugccuggcuuugccuucucagc

SEQ ID NO: 4153288 - RNA, 56 nt, Human
gcugacucaugccuggccagagcugagugugaccagcgcgcccaggcugggugagc

SEQ ID NO: 4153289 - RNA, 78 nt, Human
gcugacuccaacagagcccagguuuuaccacgugagcuucaaaugaggaaugaggccuggacucugcauggaaaaagc

SEQ ID NO: 4153290 - RNA, 68 nt, Human
gcugacucuccugagauggggaguuuccugaaucucaaacaucaagauuccccgcugggugagucagc

SEQ ID NO: 4153291 - RNA, 92 nt, Human
gcugacugggaggaagcaaaguggauauucaaauaggacauccagguagaaugaccaucuuguccugggaaaucccuuaggccugagucagc

SEQ ID NO: 4153292 - RNA, 76 nt, Human
gcugacuuucauuggcuuccaagauccgauuguuacauauucagaauuuuggggagcuaauuuuugaugugucggu

SEQ ID NO: 4153293 - RNA, 64 nt, Human
gcugagaacacagguucuagaaucagaaagaccuggaguuuggacuaucuguguggcuuugagc

SEQ ID NO: 4153294 - RNA, 55 nt, Human
gcugagaacacugaagguucauuuggcugagaaaccuuuuuguucuguucucagc

SEQ ID NO: 4153295 - RNA, 90 nt, Human
gcugagaagauaugcuguugaguaucuuuguuauuggaauaauuguuuuuugguauacaaauauuuagcacaaaaaauauuuucucuagc

SEQ ID NO: 4153296 - RNA, 85 nt, Human
gcugagagaaagaacuaaugugcaagguuucugaaucuggauuuaaaaagaaucugagacauuguaauguuggucugaguuuagc

SEQ ID NO: 4153297 - RNA, 61 nt, Human
gcugagagcaguguggccuuaaauaauauuccuuagcugagaaauaccacuagcucucugc

SEQ ID NO: 4153298 - RNA, 62 nt, Human
gcugagaucuguuccuguagaguccaagucuuagauggaggcuugagcuggaacagcuuggu

SEQ ID NO: 4153299 - RNA, 64 nt, Human
gcugagaugucuguaauucuaagcaugugucacauggaucuuuacuuacagacacuuccauagc

SEQ ID NO: 4153300 - RNA, 113 nt, Human
gcugagauugucucuagguccucccuucugccagcugguguccagggaaguggguccucuggccugcuuccugccagccagaauuucgaggaccuuguuucucccacugcagc

SEQ ID NO: 4153301 - RNA, 65 nt, Human
gcugagcagcguggggagcuggccauuaaggaugccaacgccaagcuguccgagcuggaggcggc

SEQ ID NO: 4153302 - RNA, 60 nt, Human
gcugagcaggguggggaaaggcgagaggcaaucugguuccuuaaaugcccaacuguucgc

SEQ ID NO: 4153303 - RNA, 61 nt, Human
gcugagcauguucccaggaauguauuaaggauuuuaauuuacaugucuggucauuuuuagc

SEQ ID NO: 4153304 - RNA, 63 nt, Human
gcugagccugugacccagggcccaggagcaccagccaccuuccuguucccgucgcagcuccgc

SEQ ID NO: 4153305 - RNA, 57 nt, Human
gcugagcuaauuagaaguggccagccagcaguuagucaauaaauagcuuggcucagc

SEQ ID NO: 4153306 - RNA, 73 nt, Human
gcugagcucucuggcugaucucaaucauggcuuuaaacauuccugaaugccugucugcagcccagagcucugu

SEQ ID NO: 4153307 - RNA, 72 nt, Human
gcugagcuucuccaacuguccuccccacaugugcccaauaugcagcgggaaggcagugggaggaacugcagc

SEQ ID NO: 4153308 - RNA, 84 nt, Human
gcugaggaagggcaucacgucugucugcaggguuuuacuguauggauccuguguaaauagaucugguuguacuucauuugcagc

SEQ ID NO: 4153309 - RNA, 61 nt, Human
gcugaggaugaacgcuuacaagcugccugucucuuugcuuuuagcugcaaguguucacagc

SEQ ID NO: 4153310 - RNA, 63 nt, Human
gcugaggccucaggaaugucguguguccuccuggaaccugcuccgagaucugggggccccagu

SEQ ID NO: 4153311 - RNA, 91 nt, Human
gcugaggcuagaagggcucauaggugagguacaaucagcuagucccaagacuccaguuaccuuggcugagggcccagggcuugcuucaugc

SEQ ID NO: 4153312 - RNA, 81 nt, Human
ggaaguggagcaaauggauggaaagcaauuuuuggaagaugaauuuccaaaaguauuggccaccauuucugcaccucuucu

SEQ ID NO: 4153313 - RNA, 71 nt, Human
ggaaguuagagaaugaacaaaugugguggagagugcugauucugcucugcaagauaauguuacgugcuucc

SEQ ID NO: 4153314 - RNA, 80 nt, Human
ggaaguuauuuggcucugguucuggcuccagaaaucuacccaugauaaagaugggcaagaaccacggccuuuugauuucc

SEQ ID NO: 4153315 - RNA, 75 nt, Human
ggaaguuuauaauuuuuugcuuuugugaauaguuugcuaaauaauuuaugaugcaaagaaaagguggugacuucc

SEQ ID NO: 4153316 - RNA, 76 nt, Human
ggaaguuuguuagaaaugcagaaugcuggacccaaccugaccuacugaauuagcaucugcauuuguaacuaguucc

SEQ ID NO: 4153317 - RNA, 58 nt, Human
ggaauaaaaggagguggcgagaacguucuugccuaaaccauuccccuuccuuuguucc

SEQ ID NO: 4153318 - RNA, 70 nt, Human
ggaauaaaccugguggaacggugaauacucagaauguguaggcugguuguacacaggaccauuuuguuuc

SEQ ID NO: 4153319 - RNA, 90 nt, Human
ggaauaaaggcuuccuagguaacaaacuucugacuuaagcagguuuugcugaaaacuuaagcagguuuugcugaaaaggaagcagauucc

SEQ ID NO: 4153320 - RNA, 75 nt, Human
ggaauagaggcuuuagacauaaaguucuucaucuguagcaauauuuugacuaucuuuaugcuggaaucuuuaucc

SEQ ID NO: 4153321 - RNA, 64 nt, Human
ggaauagaugggggauaaauuguauguccuuauaaaaauaauuugggugucugucaucaguucc

SEQ ID NO: 4153322 - RNA, 84 nt, Human
ggaauagauuuauuugacagcuuagugaaaauguaaauacacaauuguuuugcauuuuagauuuaggccuugguaggcuguuuc

SEQ ID NO: 4153323 - RNA, 58 nt, Human
ggaauagggagagaaucguuugccccaaagaaagcaucaaacccucuuuuccuguuuc

SEQ ID NO: 4153324 - RNA, 75 nt, Human
ggaauaguucaguauuugaaaccauaggcaaaagguagggucaguuggcuauuaacgugaaaacugagcuaauuc

SEQ ID NO: 4153325 - RNA, 78 nt, Human
ggaauauaaagguauaggacaaggauagagacuaaacauuucuuugguuucauguuuccucuugugcugcuguauucc

SEQ ID NO: 4153326 - RNA, 121 nt, Human
ggaaucaucaggagagucuugaaaauacuggugccugaguuuaacccucagagacucugauuuaauugguuuuugguauggcuuaugcaucagaauuuuuaaaaguuccccaaauuauucu

SEQ ID NO: 4153327 - RNA, 68 nt, Human
ggaauccaaggaugugacucagucagcuacaguaauguggccaguacugcacguucccaauggguucc

SEQ ID NO: 4153328 - RNA, 130 nt, Human
ggaauccuaugugcgguaaaaacacucagaacccagcagcagugcuuuggaauccugugugagcgacaaggacucaggaauucauagcauuguucuggaauuccauguaagaggcacacacugagaaccc

SEQ ID NO: 4153329 - RNA, 75 nt, Human
ggaaucugaguccuguugucccagaugggguuugaauuccccaugccuucugacucacagguauucuaagauucu

SEQ ID NO: 4153330 - RNA, 81 nt, Human
ggaaucuggcugaauuccugaaugccugacauuucacugggagaacuccaguggaugguguguucauuuuccagauaaucc

SEQ ID NO: 4153331 - RNA, 65 nt, Human
ggaaucuuaauggcauggaguuucaagcuagaaggcaauucugauuuccaagccauuuugguucc

SEQ ID NO: 4153332 - RNA, 76 nt, Human
ggaaucuucuuaagugagcuugaauaaucuuauucagugagaagauaaguucaacucauuuagcugaaguuauucc

SEQ ID NO: 4153333 - RNA, 79 nt, Human
ggaaugaauaagcacuuagcaagauccuucccuggcgugagugacuuuacgcaagugguuuuucuauguucuucauucu

SEQ ID NO: 4153334 - RNA, 91 nt, Human
ggaaugagaagucaucaaagugcuaauugaccauuugauauagcuuuugcuaugguacaauguguuuguuaggugagagaauucuuauucc

SEQ ID NO: 4153335 - RNA, 56 nt, Human
ggaaugagaguguguauuacugucauccauaaaugaguaguacacacucuaauucc

SEQ ID NO: 4153336 - RNA, 62 nt, Human
ggaaugagaugcuucucacugauuucaugaaacaccaucuucucaaagacaagcucucaucc

SEQ ID NO: 4153337 - RNA, 74 nt, Human
ggaaugagcaugcaccgagccacuguggcuucucccaccacacggcccagcugcagagguuugugcaacauucc

SEQ ID NO: 4153338 - RNA, 76 nt, Human
ggaaugauccgagggaggaaaaaugugggggucaaaagaaaaguaacagccuccuacauuccaccuuggacuuucc

SEQ ID NO: 4153339 - RNA, 93 nt, Human
ggaaugauucacucagaccagagccagagaggugccugcccugggccccaugaggcugcgguuccacucuggcccuccucugaccaucacucc

SEQ ID NO: 4153340 - RNA, 130 nt, Human
ggaauggaaauugauggauaaacacccuagauccucacucuuuggugggaugauucugagauauguucugcaguccucagagggucuccuccagaaugaacucaaguuauccauauucaaugaacauucu

SEQ ID NO: 4153341 - RNA, 63 nt, Human
ggaaugggagcuaaguccuggaggcacaugagggccuaagagauuauugcuccugcaaauuuc

SEQ ID NO: 4153342 - RNA, 82 nt, Human
ggaauggguuuguuagcacaggagucucuguuauaaaagugagcucuuucauauaugcagucucuugcccuucuacccuucc

SEQ ID NO: 4153343 - RNA, 68 nt, Human
ggaaugugaauuuauuuggaauaagaguuuuuugcagacaaguuaaggcucuccaaaugauauaaucc

SEQ ID NO: 4153344 - RNA, 82 nt, Human
ggaaugugagcagacaugauguaagcagaggccuuaaaugugcauaauuugcuuuucuugucaucuugucuucuuaugcucc

SEQ ID NO: 4153345 - RNA, 129 nt, Human
ggaauguuucaaauguauuggauaaaaacuuaguuaggcugacauuuguuaaguucuuggccugauuaaacauagcagcugucaguuucacauaaggagaaaugaacauugaauauauuugaaacugcc

SEQ ID NO: 4153346 - RNA, 80 nt, Human
ggaauuagugcaggcacugcagauuacaggcgcaguuacuggugagauugcgcucacuucagaugccaacuguaaguucc

SEQ ID NO: 4153347 - RNA, 57 nt, Human
ggaauuccauaguacagugaugaguguuacauacuuauaagagugcuauggggaucu

SEQ ID NO: 4153348 - RNA, 72 nt, Human
ggaauucuaguuaaaaauacagauucuugggcucuaccucagaccuacagagaucugcauuuuucuuauucc

SEQ ID NO: 4153349 - RNA, 67 nt, Human
ggaauucugcaaaauguuuaaggccuauucauuccauguguaucucucccuucauuuguagaguucc

SEQ ID NO: 4153350 - RNA, 61 nt, Human
ggaauugucuaguacucacggccacuaugacucuaaggugauaugaguucauuagacuucc

SEQ ID NO: 4153351 - RNA, 109 nt, Human
ggaauuucacuugaaaaagauaaaagauuucauaguaguaauagaauguuggcuaaguagcuaauuauugcauacuuaaauuuccggucuuuaaagugacaaaaauucu

SEQ ID NO: 4153352 - RNA, 80 nt, Human
ggaauuucagggguaauaugucagccagauaaaggcaaaaaagcaugccagugucuacuguggcauaucagcuccugucc

SEQ ID NO: 4153353 - RNA, 103 nt, Human
ggaauuucaucagggauggauggagacuggugaggauguucccuggggccuccuagaaagauuaggggaaaucucucgccaucuggccccaugcugaugcucc

SEQ ID NO: 4153354 - RNA, 66 nt, Human
ggaauuuuucuggaagcaauuauacuagaaacucacuauauaauuuucuugccagagaaacaagcc

SEQ ID NO: 4153355 - RNA, 62 nt, Human
ggacaaagguagacagucucugcagggcucuaaaaacuccuuuagaagaggcccugccuucc

SEQ ID NO: 4153356 - RNA, 62 nt, Human
ggacaacugucuucuucaugcuccaccauuauugcacaggugaggacagaauuugguugucc

SEQ ID NO: 4153357 - RNA, 75 nt, Human
ggacaagaugauacagccuaguuugagucccaucugagacacgguagugggauucaccaugggcuucagaagucc

SEQ ID NO: 4153358 - RNA, 112 nt, Human
ggacaaugcaaugugacucagaaaaucuguuuauucauccuguuucaccaauuccuaguugggugucauggggaaaauaacagacuucucaggaguuaaguuuucuuugucc

SEQ ID NO: 4153359 - RNA, 78 nt, Human
ggacaauggaacauacucuggcagccuggaaucucucagccuucccaggauggguucucgguugccugcuccacugcc

SEQ ID NO: 4153360 - RNA, 75 nt, Human
gcuggagcagagggcauggccauuuaagcuuuuggucaacacagugugaugggccugccugaaggcuguaccagu

SEQ ID NO: 4153361 - RNA, 72 nt, Human
gcuggagccuucugcucuguugaagaguggacccccucaagggacugugaaggcagagcuggggccuccagc

SEQ ID NO: 4153362 - RNA, 62 nt, Human
gcuggagcggguucgggccgcugcuccugcagcagacccugugccucagcaccgccugcagc

SEQ ID NO: 4153363 - RNA, 64 nt, Human
gcuggaggaauaauggcaucuuguacacuuugcaccuguauuaaguagcccuauauugcucugc

SEQ ID NO: 4153364 - RNA, 117 nt, Human
gcuggaggcuacaaaaacuggcuucucaaaguucuauugcacacaaauaauuacuucaagaaacaaaugaaguguuauuuauuggcaguaggaccuggauccuuggugaucaccagu

SEQ ID NO: 4153365 - RNA, 75 nt, Human
gcuggaggguagggacagaggagaagaugcugugggucgaggcccagggcucugcuucugccaugacucugcagc

SEQ ID NO: 4153366 - RNA, 57 nt, Human
gcuggagucccugccuuuccuuuuguuccagugguggaggugggcaggaccuguagc

SEQ ID NO: 4153367 - RNA, 130 nt, Human
gcuggagugcaguagcuauucacagacacuaccacaguacacugcaguccugagcuccugggcugaagccauccuucugccucagccuccagaggaacugggacuacaggcaugcgcuaccauacccagc

SEQ ID NO: 4153368 - RNA, 59 nt, Human
gcuggaguggcagaacuggggguccuggggcccagggcucaccacugugcacucccagc

SEQ ID NO: 4153369 - RNA, 115 nt, Human
gcuggauaauuugauuuuguacuccugaaauuuguuuuaauucugauuaagccuaacuugcgaucucaccagaaaggauuaguuugguauaaguuaaauuaauuucuuuuccagc

SEQ ID NO: 4153370 - RNA, 79 nt, Human
gcuggauggagugcaguggcgugaucucggcucacugcaagcuccgccucccggguucacgccauucuccugccucagc

SEQ ID NO: 4153371 - RNA, 116 nt, Human
gcuggauggcucaaacagaauuuggagauuagccauggacugaauugacugcuguuaagucacaauuagcauaggcugucugucuuuucaauuggucuggauaaugcagaaccggc

SEQ ID NO: 4153372 - RNA, 77 nt, Human
gcuggcaaaugugguguuugagcugccagggaucaucagggucucucugcagcccgggacacugcauauauucuagc

SEQ ID NO: 4153373 - RNA, 62 nt, Human
gcuggcagagcucugggcugggagggccaaggaggcagauugagcucaguagcucugcuggu

SEQ ID NO: 4153374 - RNA, 79 nt, Human
gcuggcagcauuucuacuaagaaaguugauuagauccucaagucacacaucuaaucccuuuagugaauugucauucagc

SEQ ID NO: 4153375 - RNA, 67 nt, Human
gcuggcagugggccugaggaagggugagaaacucuauucugcaccccaaguucuguccacugcaagu

SEQ ID NO: 4153376 - RNA, 78 nt, Human
gcuggcauucuaccuugguagguccauauguuaaauuaaguucaaccucauaauugucccugcaguuaggauaucagu

SEQ ID NO: 4153377 - RNA, 70 nt, Human
gcuggccaggccucacuggaguaggaauuuuagaugaaacugaguccguuucuccuugaaggcaggcagu

SEQ ID NO: 4153378 - RNA, 60 nt, Human
gcuggccauauauuuugcuguuguaguuguuuuaaacaaacagaaaacugugaggucagu

SEQ ID NO: 4153379 - RNA, 59 nt, Human
gcuggccauggggagugaggaggaaagcugugccccucgaaaggaagccccgggccugc

SEQ ID NO: 4153380 - RNA, 72 nt, Human
gcuggcccaggcucaguucuguggugagccucaggggagacucaccgcugggggcugagugcaggguccagc

SEQ ID NO: 4153381 - RNA, 55 nt, Human
gcuggccccgagugcuacgcucugaaacccgccauugccuuagcacaaggccagc

SEQ ID NO: 4153382 - RNA, 69 nt, Human
gcuggcccuggacucagaggugcugguggggucccauccaugggugaagcccuugaguccuccaucagc

SEQ ID NO: 4153383 - RNA, 56 nt, Human
gcuggccugggcagccugucggauucuacccucagcggguugcugcccagcccugc

SEQ ID NO: 4153384 - RNA, 76 nt, Human
gcggacagguggggcgcgagguccuggcucccucggagaccugcgggagggaccgcgcgccccagcaaggcgccgc

SEQ ID NO: 4153385 - RNA, 61 nt, Human
gcggagccccagggaggccaggagcuguucacaacuccaggaagccacacugggccucagu

SEQ ID NO: 4153386 - RNA, 103 nt, Human
gcggaggugggagguguuggguccauggcagagcccuucugcuggguuccuaucugagagcaggcagaggguccugugccagcagacgcucuuccuccucugc

SEQ ID NO: 4153387 - RNA, 76 nt, Human
gcggaguuuucuuagcuucagaauccauagagugaaauaauguccucuaguuacucuggauuuguggaaaaucugc

SEQ ID NO: 4153388 - RNA, 92 nt, Human
gcggauuacuguggugcccuaggcucagauucugcugagucacugugacugcggauuuggaaggcugagaguccuggggagacaugcuccgu

SEQ ID NO: 4153389 - RNA, 71 nt, Human
gcggcagagagcgagggcuuuccaggagccaaugagucuuuaacuccaagaggaagcccugcauucuccgc

SEQ ID NO: 4153390 - RNA, 92 nt, Human
gcggcagaugguguguccgcuggagagggggcugccaaagaagaggagucucuucccugguuucccuccuccaguguugucuccaucgacgc

SEQ ID NO: 4153391 - RNA, 56 nt, Human
gcggcagccuuucggguggauuuuguuguugcagugccaccuggccaaggcugugc

SEQ ID NO: 4153392 - RNA, 70 nt, Human
gcggccaacucauggaugggaagugcgacaggguuagcuagguuucacagacuuuccauagauuggcugu

SEQ ID NO: 4153393 - RNA, 99 nt, Human
gcggcccggccgccggggcggaagagggacagcgccagccugggcuccuccuccggcuggacgaucuccccuuccucgaucuccgagucgccgggcggc

SEQ ID NO: 4153394 - RNA, 120 nt, Human
gcggcccugaaggcagggcgcagcugguggcugggccuuccgauucucaaggcucugacuccauuuagggccuugggagucggaaggcccaucagccugcugaguucugccuccacccgc

SEQ ID NO: 4153395 - RNA, 60 nt, Human
gcggcgccugggacccgccagcagggccgccugccacggcugggagcuccgggugcacgu

SEQ ID NO: 4153396 - RNA, 57 nt, Human
gcggcggagacagcaggaagccccaaaacccgagcuggguuuccugcuuggagucgc

SEQ ID NO: 4153397 - RNA, 56 nt, Human
gcggcggcccauugucuggcgugauagguuugcagauuugacagcugggcgcacgc

SEQ ID NO: 4153398 - RNA, 61 nt, Human
gcggcugaggcgguggccaaggagcgggagcgcgcucaccgccggggccucgcacaggcgc

SEQ ID NO: 4153399 - RNA, 77 nt, Human
gcggcuuucuuuauguguaaaaggcauguuuuauugagauugaagagacaaugucuuuuggauagguaaggaacugu

SEQ ID NO: 4153400 - RNA, 95 nt, Human
gcgggaaaaacccucagcaggcgguuccuugugggggcuccagagagaggugaaggaggccacgcggggcaccgccugcugagcgggaaucccgu

SEQ ID NO: 4153401 - RNA, 89 nt, Human
gcgggaacaucaggauggauggacagacacuggccuucuggaagguucaacuccagcagggaagcugugcuguuucacaaauuggcugc

SEQ ID NO: 4153402 - RNA, 107 nt, Human
gcgggaccucugucaaccucacccuagcacuugacccccagagcuggucccuguccccaaaggagacagugaugggggugcaggaagcaggagcucagagucccagc

SEQ ID NO: 4153403 - RNA, 78 nt, Human
gcgggagcugcacacgccccggaaaccugggacagaaacugagucccucuccuuccuggugguggugacagcaccugc

SEQ ID NO: 4153404 - RNA, 57 nt, Human
gcgggccagugucuuggugaucuggaagggugacuugcaggcagaggcuuggcuagc

SEQ ID NO: 4153405 - RNA, 70 nt, Human
gcgggcccgggguuggggcagcuugggaaauucagagggggugaugcaggagccccuaauucugggcagc

SEQ ID NO: 4153406 - RNA, 130 nt, Human
gcggggaugggcccgugcggcuccgggugugggacguacccucagagcgcccgggguuauucccacugacuccagggaggugagugugcgcccuucgcucccugccgugucugugaggguccaucguugc

SEQ ID NO: 4153407 - RNA, 71 nt, Human
gcggggauggucugggcagccacuggagguagggugcgauccaggaagcagcuacagauccaccucccugc

SEQ ID NO: 4153408 - RNA, 75 nt, Human
gcggggcacauuuguaagagugggagccagaccccuggcagaccaggagucuaauuccugcucuuacucaccugc

SEQ ID NO: 4153409 - RNA, 70 nt, Human
gcggggcccagaggaccggggcgcccuggaccacauggucaggaugaccacgagccucuaacagccccgc

SEQ ID NO: 4153410 - RNA, 58 nt, Human
gcggggccgcugcgccuccaaccgagcgccgacagagggcgcccgcggcgagccucgc

SEQ ID NO: 4153411 - RNA, 130 nt, Human
gcggggcggggccuaggucgcgggccaucugggcucuggaaggaacccuuagaggagcgggaggacgccacagguccucggcggggcuccgcucccgugagccgcauguggcuggugagcucugaaacgu

SEQ ID NO: 4153412 - RNA, 75 nt, Human
gcgggggcuccucucccagagcugcagggucaggauuuggcugauuuucagcagcagagggagggcccuauuugc

SEQ ID NO: 4153413 - RNA, 57 nt, Human
gcggguugaagggcgcaucgaagucgucuucgaagucaccggugacccucggcucgc

SEQ ID NO: 4153414 - RNA, 57 nt, Human
gcggucagcgcugagccgagacugcgccccuccaggcgggcugagcgccuuggcugc

SEQ ID NO: 4153415 - RNA, 85 nt, Human
gcggugacaucagggcccagucccugcugucaugccccaggugacgugcugggcugacagcagggcuggccgcuaacgucacugu

SEQ ID NO: 4153416 - RNA, 79 nt, Human
gcggugaugccuccagcuaggaaguccuuggcgaaggagauggcuuguuccgucaugguggccuggcgggcagcggagc

SEQ ID NO: 4153417 - RNA, 74 nt, Human
gcggugccuggcucugcgugcagcuccgugccgcagauguggaagcuggggcucagggaccaggugcccaaugc

SEQ ID NO: 4153418 - RNA, 59 nt, Human
gcgguguagugggcuggggccgggcaacuuugcagccuaaucucagugccgcugaccgc

SEQ ID NO: 4153419 - RNA, 58 nt, Human
gcggugugggugugcacgcauguacauaacaugugccuguguaugugcaugcacacgu

SEQ ID NO: 4153420 - RNA, 70 nt, Human
gcgucacucacugggauccacgggcucccaaggccacggccuugggggagagggaccugcagagugacgc

SEQ ID NO: 4153421 - RNA, 83 nt, Human
gcguccuuggaggagcccugccgugggagucugggguuagaugcugcuuccggaacucuacuugggacuccucugggaggcgu

SEQ ID NO: 4153422 - RNA, 57 nt, Human
gcgucgccggcgccucgaggugcgccacucaagcccugcccaggaauccggcggcgu

SEQ ID NO: 4153423 - RNA, 56 nt, Human
gcugggaaccaugggaaggcagaguaccuccuuccacccccuaccccaugcccggc

SEQ ID NO: 4153424 - RNA, 63 nt, Human
gcugggaaguggcagagcuggacacaaacccagggagcguggcuccaggucugcacuccuagc

SEQ ID NO: 4153425 - RNA, 59 nt, Human
gcugggaaugugagcauucauucagauccauccccaucucugagaaaaauauucccagc

SEQ ID NO: 4153426 - RNA, 68 nt, Human
gcugggagaacuggguggagcaucuuguggacugacagacacgaguuggaacccugguucuuccacgc

SEQ ID NO: 4153427 - RNA, 68 nt, Human
gcugggagagacaauuuugguuuucaaagcaaggccuuuggagucugucaccuguuucucuauuuggc

SEQ ID NO: 4153428 - RNA, 58 nt, Human
gcugggagaggcccugaagugacucauuuuccauuuguuuuucagacucaucuccagc

SEQ ID NO: 4153429 - RNA, 60 nt, Human
gcugggagccccgagccagcgcccucgguggaggcagccggcauuccgagggcucccggc

SEQ ID NO: 4153430 - RNA, 117 nt, Human
gcugggaguauuuggguuugcucuagccugcagaauagaaaggaggggcucuugucccuucuugggggcaggguccaucuuucaauauugcuguuuagguauuucacugcugucagc

SEQ ID NO: 4153431 - RNA, 56 nt, Human
gcugggaguggaugaugcagcaacgaacaaaaugcucacaggguguaacuccuagu

SEQ ID NO: 4153432 - RNA, 59 nt, Human
gcugggagugggcaagaugagacuggcgccucugcaucugagugucccccaaacccagc

SEQ ID NO: 4153433 - RNA, 63 nt, Human
gcugggauggaggggcacaauuucaaaggaacaaauguugccugaaugcuucgucauccuggc

SEQ ID NO: 4153434 - RNA, 60 nt, Human
gcugggauuacaagcaugagccaccgcagcuggucauguuuaugacuucuaaucugaagc

SEQ ID NO: 4153435 - RNA, 61 nt, Human
gcugggauuacaagcgugaaccaccgcacccggccccuuguucacaguuucuaaucccagc

SEQ ID NO: 4153436 - RNA, 80 nt, Human
gcugggcacacauggacaauguauguaagaguacagagcaaugucuauuuacauggaauauugucuugugaaggcucagu

SEQ ID NO: 4153437 - RNA, 72 nt, Human
gcugggcagaggcugaugugggaugggcugcuccuggucccuugcccuccuuccccagcccucugccccagc

SEQ ID NO: 4153438 - RNA, 55 nt, Human
gcugggcagcggcagcaggggcagugccuucugcucuggcaggcacgggcccagc

SEQ ID NO: 4153439 - RNA, 71 nt, Human
gcugggcauguaaggaggagugggccaucaggggauggaggccauaccuccugacauggaauaaacugggc

SEQ ID NO: 4153440 - RNA, 80 nt, Human
gcugggccugcaaguucuggagccgggccugggcaguggcgacauaggugcagcugggccuagggaagcagggacccggc

SEQ ID NO: 4153441 - RNA, 64 nt, Human
gcugggcgaggucccugcauccaaccaucccgauuccugaugcuggguuaccuaagccuaaagc

SEQ ID NO: 4153442 - RNA, 58 nt, Human
gcugggcucaccaggccacuagacccccaaauguguauuugccuucugguggcccagc

SEQ ID NO: 4153443 - RNA, 60 nt, Human
gcugggcucagcugggcgugcugguguauggagcauaagguauggacagccgagcauggc

SEQ ID NO: 4153444 - RNA, 127 nt, Human
gcugggcugggcugagcugggcugagcugggcugggcuaagcuggacugggcugggcugagcuggacugggcugggcugagcuagacuuggcugagcugggcugggcugggcugggcugagcugggc

SEQ ID NO: 4153445 - RNA, 56 nt, Human
gcugggcuguuuggggacccaggaagugaggaacgugagucucccuuagcccacgc

SEQ ID NO: 4153446 - RNA, 85 nt, Human
gcuggggaaggcaaggaaggcaacaccaggaugcacugaaugguagauugucucugugggcaccugggaugccaccccccuuggc

SEQ ID NO: 4153447 - RNA, 57 nt, Human
gcuggggacccugccuaggggagagauucaccuccuccauguaaagguccccucagc

SEQ ID NO: 4153448 - RNA, 104 nt, Human
gcuggggacugucccgcgugggccaguggcaggaccaggcacgagggccagcaggagcagggcuggucacgucuccuccuccuucccccaugcagguucccagc

SEQ ID NO: 4153449 - RNA, 65 nt, Human
gcuggggagugaaauucuuaaauuccuaggcagacauggcauuuaggauucuuuaucuccuaagc

SEQ ID NO: 4153450 - RNA, 55 nt, Human
gcuggggcaggguggguggugggcuuuggagaccccagcccagcugugucccagc

SEQ ID NO: 4153451 - RNA, 86 nt, Human
gcuggggcaggugcuacuggcaucuguggguagaggccaggaaugcugcuaaaucuccuacaaugcacagggcagcccccacaagc

SEQ ID NO: 4153452 - RNA, 108 nt, Human
gcugggggcuugaacguggggcucccaggugcuggcugcagauuuuagaggugugggggacagacccuagcuuagcaguuucucuuuucccaguucuuagcccccagc

SEQ ID NO: 4153453 - RNA, 71 nt, Human
gcugggggucaggaaugaguucuggugcucuguaguccggugcaggguucccagcuuccuuccccuucagc

SEQ ID NO: 4153454 - RNA, 86 nt, Human
gcuggggucccagaggcccccacaggcuugaggcagccuugacuucccuuguggcugccaggauggccagggggccagccgccagc

SEQ ID NO: 4153455 - RNA, 73 nt, Human
gcuggggugggcucccagaaggcugaaaccugaggagaggaucccagggcagcucugggagucccaccccugc

SEQ ID NO: 4153456 - RNA, 80 nt, Human
gcuggggugucuugaaggugacauaucuggagccauagcaaagcuuugcucuauguugaccuucaguggacguccugagu

SEQ ID NO: 4153457 - RNA, 76 nt, Human
gcugggucaaccacaguaugucagcuccacuucuggccauaaggauugguccaggggguagauaugugauccaagc

SEQ ID NO: 4153458 - RNA, 57 nt, Human
gcugggucuggugucaggcgacguggaucacaucauuucaccugucucagccucagu

SEQ ID NO: 4153459 - RNA, 57 nt, Human
gcuccugucagucaucaggugcugguaaccagaaaugccugccaucugaacaggggc

SEQ ID NO: 4153460 - RNA, 63 nt, Human
gcuccugucaucaaacaauccuacugcccaaccucccaaagcacugggauuagaggcaugagc

SEQ ID NO: 4153461 - RNA, 58 nt, Human
gcuccugugaaggcauuaggugucacuaaggaugagaacagcaagccuucacaugagu

SEQ ID NO: 4153462 - RNA, 79 nt, Human
gcuccuguggcuuccacgaccuaauccuaacuccagggacucgcaggaguuaggauuaggucguggaagccacaggcgc

SEQ ID NO: 4153463 - RNA, 60 nt, Human
gcuccuuacauguacaagucuccuggcuuuccucgaaacaggaagacuguacuguaaagc

SEQ ID NO: 4153464 - RNA, 55 nt, Human
gcuccuucaggugguagcuguuguggcagaauagaagagugcuggacugaggagc

SEQ ID NO: 4153465 - RNA, 58 nt, Human
gcuccuucccuaggaagucauuuauuuacauaaaugacuaaugauccugggcaagggc

SEQ ID NO: 4153466 - RNA, 58 nt, Human
gcuccuucugcaggccuuauuuuaguuugugcucaaguuagguuuggaggaaauaugc

SEQ ID NO: 4153467 - RNA, 121 nt, Human
gcucgaagaaucacaaaacauguaugcauuuaaugucgaauguuuugcacagaaagggauuccaaagucaccugugcugaacaauucugcauugaugauggcacuguaagauucuaagagc

SEQ ID NO: 4153468 - RNA, 57 nt, Human
gcucgacucauuuuccaggcugaaugcuguagcucauuuagccuggaggguugaagu

SEQ ID NO: 4153469 - RNA, 63 nt, Human
gcucgauuuccgcuugaucugaucuguccaucacaaacacagauuagagccugggacucgggu

SEQ ID NO: 4153470 - RNA, 58 nt, Human
gcucggagucccaccugggaaaccuggguuggcccggaaaccucgggaggcucagagc

SEQ ID NO: 4153471 - RNA, 129 nt, Human
gcucggucaucagaggacgcagugacaccuggucccuggcgaggucccgcucuccccuuggcagaauggugagggcuagggacuccuccucagggugcuuuuguuuuguuuuuuuuggagacaagaguc

SEQ ID NO: 4153472 - RNA, 57 nt, Human
gcucgugguuuagcacgugcuucuuccuccaggcgaagccaagugcuggccaugggc

SEQ ID NO: 4153473 - RNA, 65 nt, Human
gcucguugaaccuguccccgagggacacugggucagaaagcaccuuugggacagguucacagggc

SEQ ID NO: 4153474 - RNA, 92 nt, Human
gcucuacaaccuuugggguccagauaagaccaucagcuauguggguugugccauccagcuguacuuuguccuggcccugggagggguggagu

SEQ ID NO: 4153475 - RNA, 78 nt, Human
gcucuacaggccuuaauugcagagcaauauagggaccaacucacuuaugcuuaaugcaaucuaauucugccuuggagc

SEQ ID NO: 4153476 - RNA, 86 nt, Human
gcucuacagguugaagauuuguugcauuuuaaaaagucucacccugaugggagaagaaugcaagauaaacuuuauuacuguaaagc

SEQ ID NO: 4153477 - RNA, 70 nt, Human
gcucuagaaccuauuagaaauguauugaaauuuggaauuuaguauuuaugaaugaauauguucuagaugc

SEQ ID NO: 4153478 - RNA, 98 nt, Human
gcucuagacuccucaaugcuguuucuuuuuaaaguuguauagaguauuugacaaugagauucaaacacuuugagaaguucucuaguacuucuagaagc

SEQ ID NO: 4153479 - RNA, 60 nt, Human
gcucuagcucccagggagcgucugaaaaugcccuggccagaaucccuggggagcugcagc

SEQ ID NO: 4153480 - RNA, 68 nt, Human
gcucuagcucccugugacaguaucugcuugaguuuuucaugcaaucucuuguucaggaugcugauagc

SEQ ID NO: 4153481 - RNA, 72 nt, Human
gcucuaggauuucacgggauucucauaaaucauccaagaaaauuuggaugagguugagaaucauuuuagggc

SEQ ID NO: 4153482 - RNA, 85 nt, Human
gcucuaggggaggcagaauagaguguggguucugccaugggucacauccggguuuuaauucugccucugccacaugaccuugagc

SEQ ID NO: 4153483 - RNA, 101 nt, Human
gcucuauggcaagugugcauuguagguuaguaugacacgguuauaggcucucuguaacaaugaauauagugacugauauuuuuugagcacuuacuauaggc

SEQ ID NO: 4153484 - RNA, 56 nt, Human
gcucucaacugagacugcaugaagucuacagcuucauuucauccagccuugagagu

SEQ ID NO: 4153485 - RNA, 57 nt, Human
gcucucagaugcuccagcagccagagaggugaugauggcccuggaacugcugagagc

SEQ ID NO: 4153486 - RNA, 83 nt, Human
gcucucagcucuguguuggccuuagaaccugcucugccacaggaagugcuuacuguggcucugagacacaggcucuccugagu

SEQ ID NO: 4153487 - RNA, 130 nt, Human
gcucucauagaacagauaucagaauguuacguccauauuccugagggcucagugaugacuacuuuuccugagauucccugaaugauauauacagacgcaauaauuucugaugauucauuaaaauuacagc

SEQ ID NO: 4153488 - RNA, 57 nt, Human
gcucuccaguucuacaacugucacaagaauguggcagccagggcuaagcuggggagc

SEQ ID NO: 4153489 - RNA, 56 nt, Human
gcucuccggcgcggcagcccccaguggcgaaccgcggagcugcaggagccgaaggc

SEQ ID NO: 4153490 - RNA, 124 nt, Human
gcucuccucccuggagggcuuuucagccccagaaccaaggagcucgguauggccuccgcuuucuaaacuuucuggcccugaguccuggcuuugggauguaaaagucuucuuucuagaggagagu

SEQ ID NO: 4153491 - RNA, 64 nt, Human
gcucuccugugcagaugcugcuggcgcugagcuuugugccuggggcagaaagggugaggacggc

SEQ ID NO: 4153492 - RNA, 92 nt, Human
gcucucgaugccauuuucaugaguuucuguucacacuguaacuaaagaauuucaagugcaugagccugaacuagugacaauggaaugauggc

SEQ ID NO: 4153493 - RNA, 60 nt, Human
gcucucuggucccaccuggccauuuaugcccugguccugaaugggguggguccaggcagc

SEQ ID NO: 4153494 - RNA, 63 nt, Human
gcucucuguccugugugcgcugguauccuugaugggagccuguggaaacugggugcagagagc

SEQ ID NO: 4153495 - RNA, 56 nt, Human
gcucucuguuauuaagaucuuuagaaaagucauaaggauagaaaagacaagagagc

SEQ ID NO: 4153496 - RNA, 56 nt, Human
gcucucuuggauuuuugugguuaccucauggcaaucucacuaagaagcaggggagc

SEQ ID NO: 4153497 - RNA, 63 nt, Human
gcucucuuugugccacuuaaggacauagugagaagguggcuguccgcaagcugggaagagagc

SEQ ID NO: 4153498 - RNA, 65 nt, Human
gcucugaaagugguauuauauuacugagaggaagggagcuuagugaggaaauccauuaucaaggu

SEQ ID NO: 4153499 - RNA, 59 nt, Human
gcucugacuggugggccacagugauguuuuggaucucuuggaaugugucaguucagggc

SEQ ID NO: 4153500 - RNA, 61 nt, Human
gcucugagaucauucacuguaaagauuuuucaauugaauuuagagguaauagauccagagc

SEQ ID NO: 4153501 - RNA, 58 nt, Human
gcucugagauugagccuuugguccccaccacuuccaguuugagcucaaucuccagagc

SEQ ID NO: 4153502 - RNA, 86 nt, Human
gcucugagcugaguggagaccccacuucuacaugcagcuuccauuaugagcacccaggaagugggguucucucacugugccggggu

SEQ ID NO: 4153503 - RNA, 57 nt, Human
gcucugaggcugggagcacucugcaaggugaugggucauguuuuuagcaucaggagc

SEQ ID NO: 4153504 - RNA, 62 nt, Human
gcucugagggcuguggaaggcuaaccccacugggggacauccagcucacagcucaucugggc

SEQ ID NO: 4153505 - RNA, 67 nt, Human
gcucugagugaucagcugggaaacauggccugggcacagcccucugccuagcuguauuacuuaaggu

SEQ ID NO: 4153506 - RNA, 55 nt, Human
gcucugcaggugaggcacuuggcuuucuggaccccgagauccucaucuguaaagu

SEQ ID NO: 4153507 - RNA, 61 nt, Human
gcuuugcucugcagcagcggagccagucugccugcuggggagucgcugcagagcgauaagc

SEQ ID NO: 4153508 - RNA, 56 nt, Human
gcuuugcuuccuuccccuucaaggaaaacauccugcccugguggagggugcagagc

SEQ ID NO: 4153509 - RNA, 82 nt, Human
gcuuugcuugaaacucuuggcaucuguuccuggaggauaaaaauuuaacuauucuggcucauaugcuaagaaguagcagagu

SEQ ID NO: 4153510 - RNA, 57 nt, Human
gcuuuggaguuaggacucggccaaaaaagcagaauuuuccuggaauuaacccagagc

SEQ ID NO: 4153511 - RNA, 67 nt, Human
gcuuuggauugguguuuugaaagaggaugaaaguuauuccuggcaaagugagcaucacuagcaaggc

SEQ ID NO: 4153512 - RNA, 128 nt, Human
gcuuuggcauggccauccauccuucuuaugccuuuucugcccaggagcaugcugguccagccaacugagaaauggauuaacagcuccuggguggugagagaaaaagcugcuggccaccugccacuugc

SEQ ID NO: 4153513 - RNA, 73 nt, Human
gcuuuggccagagcaugcacugccugcagaauauagccuuuaaaacugcuggcagccaugccuuggaaucugc

SEQ ID NO: 4153514 - RNA, 96 nt, Human
gcuuuggcucacuugccuggguuucagcugcagcuacuguacuuugauacugaagaagcagggcuagauauuugcaaguccaagcaggagggcugc

SEQ ID NO: 4153515 - RNA, 67 nt, Human
gcuuuggcuguuaacuaaaggcugcuauuuccaguccuggucuggaacagacauuagugagccaggc

SEQ ID NO: 4153516 - RNA, 126 nt, Human
gcuuuggguucccugaggcgcaaccacaggccuauguguggggcgucgggggacuugaggcuuccuugugauggucuccugaggcugccacacccucugucucugugucacugggagccccugagc

SEQ ID NO: 4153517 - RNA, 61 nt, Human
gcuuuggugacugauuuuuugggaggaaauucaaugucucauuagggaucaucacugcagc

SEQ ID NO: 4153518 - RNA, 67 nt, Human
gcuuugguuguuaaacauagagcuccauuacucccuugaugguguuaaugaaaaacaacucaugagu

SEQ ID NO: 4153519 - RNA, 64 nt, Human
gcuuuguauuugcuggagauauggaaaaguuuagcgacaaauuuucuaguaaucaauauaaagu

SEQ ID NO: 4153520 - RNA, 75 nt, Human
gcuuugugagucacuugacgucuguugcaacuacucaucacagugugaaugcagccagcaagugaauacauaagc

SEQ ID NO: 4153521 - RNA, 82 nt, Human
gcuuugugccagaaagguaaacacuggauugcauuguggauuaaaacaauaagaaaucccuuuccucucaggcuuucaaggc

SEQ ID NO: 4153522 - RNA, 63 nt, Human
gcuuugugcuuuaauugcugccccgguuuuaauggggcacuuugccuuuaugcacugcuaagc

SEQ ID NO: 4153523 - RNA, 58 nt, Human
gcuuugugugaaguccauggcguagaguucagaacuaggcuaguggucugggcaaggc

SEQ ID NO: 4153524 - RNA, 77 nt, Human
gcuuuuagagauuugucuaaugaguguguacuuuuaaauauccaaaauguacuucucuuuagcagaaaacuaggggc

SEQ ID NO: 4153525 - RNA, 55 nt, Human
gcuuuuagugugcucauugaugagugaaagucgccacacaugucaagcuaaaggc

SEQ ID NO: 4153526 - RNA, 62 nt, Human
gcuuuucauuucauagaauuguguuggggauuuaccaacaaccaaaaagaugaauguaaagc

SEQ ID NO: 4153527 - RNA, 77 nt, Human
gcuuuuccuuccccgagcgccucaagcagucucugggccgcaggaacagcccucugaagaggcgcuuggguagaggc

SEQ ID NO: 4153528 - RNA, 64 nt, Human
gcuuuucugagggggacuucgcuggcaggaccucuuaaccacugcugccaccccucaccagagc

SEQ ID NO: 4153529 - RNA, 109 nt, Human
gcuuuucuuaugaggagugguacuuagugggaaggacacuggacuggaagucaagagauuuuagacaagauccuucugaauuguaauuuccauuccucuaaaauaaagc

SEQ ID NO: 4153530 - RNA, 57 nt, Human
gcuuuucuuucauaugugggcuaaaagcccacccuuuguccaauagaaaugaaaagc

SEQ ID NO: 4153531 - RNA, 75 nt, Human
gcuuuucuuuuggacauaucugaugcugggaacucuuuaacugucccaggcuuccuaaugugugcaguuuaaagu

SEQ ID NO: 4153532 - RNA, 91 nt, Human
gcuuuugaagcaggaucguuugcuucauucucaaaacagccacuucagucccuccuuguucccaccugaagcaaacgcuucuguuccuugc

SEQ ID NO: 4153533 - RNA, 62 nt, Human
gcuuuugcugaaaacaguggcaaugauacucuuucugccuugcuggaugucaguuuuaaagc

SEQ ID NO: 4153534 - RNA, 55 nt, Human
gcuuuuggagucuuuacagacaaaaaugaguuuugucuguaaagacuccagaagc

SEQ ID NO: 4153535 - RNA, 84 nt, Human
ggagagagagaaaauuaauuaauggaggcuggaagucugagaucaaggugccggcaggguugguuuucucugaggccucucucc

SEQ ID NO: 4153536 - RNA, 62 nt, Human
ggagagagagauuguguuuauucugaacuauggcauaaauuaaucuggcaauuuguuucucc

SEQ ID NO: 4153537 - RNA, 59 nt, Human
ggagagaggcaucugaguuugcaagcuuggcaacuaggugaauggagaugcuuuuaacu

SEQ ID NO: 4153538 - RNA, 75 nt, Human
ggagagaggguggcaugcuuauucauucugcuaacucauuuuaccuggaagaguuaauaaugaacacuuucuccc

SEQ ID NO: 4153539 - RNA, 130 nt, Human
ggagagagguccuuuccccuguacucgcaauuuccagguuuuguuuggcaacuugguaaagugaccauuugcuuagccagaugugccugaacauuuuggaacucugagucaagagggcgguuccugcuuc

SEQ ID NO: 4153540 - RNA, 76 nt, Human
ggagagagucccaucuauucccuucugauuuacuccagggcugccugggcacaggggaauggaugaaaugagcucc

SEQ ID NO: 4153541 - RNA, 64 nt, Human
ggagagaguuuggaaaaguccuuaauagaacagaguuuguaaaagacauuucuaagcaauuucc

SEQ ID NO: 4153542 - RNA, 72 nt, Human
ggagagcaaacuggagccaguaggaguguacuuaacacuaacaagauccaccugaguuucaguuauuucucu

SEQ ID NO: 4153543 - RNA, 82 nt, Human
ggagagcagauguuggugggggcgggagcaugggccuuggaguccugcagggccuggcucagaccccaguucugucucugcc

SEQ ID NO: 4153544 - RNA, 75 nt, Human
ggagagcgaacauugguagagauucucaagaucuuguuucaccagaucuuucaguuucauaccaauuuauaauuc

SEQ ID NO: 4153545 - RNA, 61 nt, Human
ggagagcuggggccagagucaaggcaggcaaagagacuccucgacccccuccagucuuucc

SEQ ID NO: 4153546 - RNA, 55 nt, Human
ggagaggcauacauauacccagauucucaucccauggguauauguaugccucucc

SEQ ID NO: 4153547 - RNA, 63 nt, Human
ggagaggccugcuuuggcacucugggcaaaaagaguugcuaagaucccagagcaggccugucc

SEQ ID NO: 4153548 - RNA, 56 nt, Human
ggagaggcuggcagugcacucccugggcuggauccugagacagcaaaagccucucc

SEQ ID NO: 4153549 - RNA, 61 nt, Human
ggagaggcuuccagagucgugccucugcucagaggccaaaccuuccccaccaagccucucc

SEQ ID NO: 4153550 - RNA, 71 nt, Human
ggagaggggaauggugguauaugugguaggcuaaacaauggcccuccagagauguucacauucuaaucucc

SEQ ID NO: 4153551 - RNA, 94 nt, Human
ggagaggggauacagaaucaggcaugugugaguauaucuuauccaccugaaaauagaaggugaagagcuuagacagaaucaaagugccccuccu

SEQ ID NO: 4153552 - RNA, 59 nt, Human
ggagagggggcagugagccuggcacaggcagaguggcaggcacagccucccccaacucc

SEQ ID NO: 4153553 - RNA, 83 nt, Human
ggagaggucccgcucaucaaaggauugcaugauuuggguaaauggaaagccuaagaauuuuuuaggguaagcaggaccacucc

SEQ ID NO: 4153554 - RNA, 62 nt, Human
ggagaggugugcaugagaauuuccucaucuccuuuugaggaauuuuguauggauacuguuuc

SEQ ID NO: 4153555 - RNA, 56 nt, Human
ggagagucugagccugcuggaggcucuaacacucaggcuugcuuauaggauucucu

SEQ ID NO: 4153556 - RNA, 57 nt, Human
ggagaguggagacuguccaacaaggaaaugaguucauccuucaguucugcacuuucu

SEQ ID NO: 4153557 - RNA, 93 nt, Human
ggagaguucagaggacagaguccaggcuggucaaauagcuucccagcugggcgagaucuggcagaccgugugggcuguguucucuuccucucc

SEQ ID NO: 4153558 - RNA, 83 nt, Human
ggagaguuuuguugguugugggucauuguuaaauggaaaaagaaauuucagaaacacugaaacauugauugacagaacucucc

SEQ ID NO: 4153559 - RNA, 62 nt, Human
ggagauaauggagaggugucuuaugaccaucuucauagguaagagacacaucacauuucucc

SEQ ID NO: 4153560 - RNA, 124 nt, Human
ggagauagaugugaagcucuuaaucugguuccuucuagcauggggagcagaaagucagaagccaagaugcccuggcugaucuguucuucugucuugaggaaagaguauacguuaaacuauuucc

SEQ ID NO: 4153561 - RNA, 79 nt, Human
ggagauaggucucucuucuugaugggaagaauguuaaagaauuuacagacuugcuuugaaacagagacuuaauuucucc

SEQ ID NO: 4153562 - RNA, 67 nt, Human
ggagauauuuugagcuguuucucugguggcuuuuuaaaguaaaaaagcuagaggcaucucugucuuc

SEQ ID NO: 4153563 - RNA, 91 nt, Human
ggagaucaaauaucagcuucuauuuaucuuuguguucccagaacccaacacagaguuugacacaugggagacugauuguuuguaaaguucc

SEQ ID NO: 4153564 - RNA, 68 nt, Human
ggagaucaaaucugggauuucuaaaguuaagaauucaggccuuggaaauggauuagauuagaucuacc

SEQ ID NO: 4153565 - RNA, 68 nt, Human
ggagaucaguuaagaggccacggcaguuauaccacuguucaaagcugaguaguggccucuugccugcc

SEQ ID NO: 4153566 - RNA, 73 nt, Human
ggagaucgucaguguaugcuguggguaucugugugcuaaaaaacacagucuuaugcauacacuauuaaguucc

SEQ ID NO: 4153567 - RNA, 105 nt, Human
ggaaaggaaaggggaggugacaacugcuagugagaaaauaaccaggggaaagauuaggaaguuuuggugugcaguaugcaguguaaccacauucucuuccucucc

SEQ ID NO: 4153568 - RNA, 61 nt, Human
ggaaaggcagagugcucagcuggcauuuagucaaaagccuacuguaguagcugcuucuuuc

SEQ ID NO: 4153569 - RNA, 63 nt, Human
ggaaaggcuguggccgucagggaaauggagccagaugguccucaugaucgaugccaagcuccc

SEQ ID NO: 4153570 - RNA, 95 nt, Human
ggaaagggaacaacacgagaaccucucauuugauuaggaaauuguuuauacucuuaccaagugaauaugagcuguuuuuuguuguugauuuuucu

SEQ ID NO: 4153571 - RNA, 67 nt, Human
ggaaagggcagaggccuuggagguaaccugaccauuggaauuaauguccagccuuucccucacuucc

SEQ ID NO: 4153572 - RNA, 65 nt, Human
ggaaaggguggggugcuacaucuuuacagccagguggaaguagagguauaggcuucucgcccucc

SEQ ID NO: 4153573 - RNA, 69 nt, Human
ggaaagguuuaaguaggauuuguagcuggagaaacucuuucuaaacaagccuaauacuuuugcuucucc

SEQ ID NO: 4153574 - RNA, 58 nt, Human
ggaaaguacagccagcacccagacucaggugagucccaagcgcgugggcugugcuucc

SEQ ID NO: 4153575 - RNA, 67 nt, Human
ggaaaguaguguauucugcaugggagacuuacuguuuaaaaguaaauuucuuuuggauauauuuucc

SEQ ID NO: 4153576 - RNA, 76 nt, Human
ggaaaguauuguccugguauaauuguuuaaaaaugaaaagcaauuuaaaacagcauaugcaaggcagauauuuacc

SEQ ID NO: 4153577 - RNA, 61 nt, Human
ggaaaguccuucuaaagccagagcucaggaaugaguggggccacuggugugaagacuuucc

SEQ ID NO: 4153578 - RNA, 59 nt, Human
ggaaagugcucucucuauacacauugccagaaguugugugucauggggaaagacucacc

SEQ ID NO: 4153579 - RNA, 59 nt, Human
ggaaagugcuguuggauaaugcugucuuagauagaccuucauucacaacgcaccccucc

SEQ ID NO: 4153580 - RNA, 85 nt, Human
ggaaaguugagaggagcucguggccccagaacaaagcuugagaaaaguaaacaggcggcugcugccggcgagccucccuucuucc

SEQ ID NO: 4153581 - RNA, 109 nt, Human
ggaaaguuuugcaguggggggcuaauguggaaaauauaauugguuuuauauaaaaguccauaauauaagacacaaauaucuuuuacauuaacugaugggcaacacaucc

SEQ ID NO: 4153582 - RNA, 88 nt, Human
ggaaauaaaacugauacucaaguguuuuaaaugagguuauuacauucaacaaugcacuugaguauauacaggagacacuuuuauuuuc

SEQ ID NO: 4153583 - RNA, 82 nt, Human
ggaaauaaauuggccaauccuauugggugggauuuguguuaauaugagccccaccagauggaugaagcagauuuguuuaucc

SEQ ID NO: 4153584 - RNA, 130 nt, Human
ggaaauagucuucacuaguuucuucuggaauuaauccccucugguuccauuagagucagggaacaaucuguaguguagcagggugggacauuguauucuuagacaaggccggcuagaaggaagauguacc

SEQ ID NO: 4153585 - RNA, 91 nt, Human
ggaaauauugacucaacuagguuaggaagauacagaaugucguuaccuuuacaugauacguuuuauuuauuccuucuuaggaaucauuucc

SEQ ID NO: 4153586 - RNA, 104 nt, Human
ggaaaucacuggucacuguaccuggcacagagugagcauucaacucauuuauucaacaaaaauugauugaguacuuacuaugugcagguaccgauccauguucc

SEQ ID NO: 4153587 - RNA, 94 nt, Human
ggaaaugaauguucaguaggcagggcuguggggagaagauauugcuacuguguucuagccccaauguccacccaugccuauuguuuucucuuuc

SEQ ID NO: 4153588 - RNA, 71 nt, Human
ggaaaugcuucagaauagauaucucauuguuagaaaaaccuauuucugagguauuuuuuaaagcacaaucc

SEQ ID NO: 4153589 - RNA, 77 nt, Human
ggaaaugggaauuauuagaucuguuagggauccuguaagaaaaggcacaggacuuggaguucuaauauucuguuuuc

SEQ ID NO: 4153590 - RNA, 79 nt, Human
ggaaauggucacagcugccuggagccagaguugaccaucccacgggcuucagcugccccgggcacugcccgaccacucc

SEQ ID NO: 4153591 - RNA, 104 nt, Human
ggaaauguagucugacugugugcucaagaagaagagguaaagauacauuuuuggugagaagcauuagucuuugccacacuucuguacaacagugucuacauucc

SEQ ID NO: 4153592 - RNA, 75 nt, Human
ggaaauguggccagggcccacaggaugaacgugacucuagcccaccuucaggcugugggcacuggccauauuucc

SEQ ID NO: 4153593 - RNA, 67 nt, Human
ggaaauguuuagcucuagcugcugccuuuguacacauuaaaaagguacagggcuuccuggacaagcc

SEQ ID NO: 4153594 - RNA, 64 nt, Human
ggaaauguuuucaggauuuuaagaauauggaggaaaaugcuccccuuuccugaagaauauuuuu

SEQ ID NO: 4153595 - RNA, 72 nt, Human
ggaaauguuuucugucuguaguaacuauucacauucaggauuauguauuuuuacaaggaggauagcauuucc

SEQ ID NO: 4153596 - RNA, 108 nt, Human
ggaaauuaauacaggacccacggaauuggucucugcuaaagggaggcccaggucagccucccuucaguagagcccaauagggauccaguaggcguccuguggauuucc

SEQ ID NO: 4153597 - RNA, 73 nt, Human
ggaaauuacuuuugcuaacauuacaaaaggccuaaagagcaagugaauuuuaaucuuggcaaauguagcuucc

SEQ ID NO: 4153598 - RNA, 78 nt, Human
ggaaauuaucaacccuucucuuucacucacuauuuguagagcaagugaguggguggggagaggaaaguggggcauucc

SEQ ID NO: 4153599 - RNA, 76 nt, Human
ggaaauuuuaacagaucucauuuugagucagacacuaugcugggcauagaaugaugagcaaaagaggugaauuucc

SEQ ID NO: 4153600 - RNA, 64 nt, Human
ggaaauuuugacucauucccuuaaguacuagcuguuaagugguauuuaauauaugagaguuucc

SEQ ID NO: 4153601 - RNA, 68 nt, Human
ggaacaaaaaugucugcaauuugcguuuuagauuacauaugugaaagcaaccuguaacagugaguucu

SEQ ID NO: 4153602 - RNA, 77 nt, Human
ggaacaaaguuucuacuaggaugucuugaacacaaauagcucuuucauuguguauaagccuagugaaauuucauucc

SEQ ID NO: 4153603 - RNA, 91 nt, Human
ggaacaagccuuaguuagauaagacuuugcuccucuccugggagcuccaggacacuaaaaagccaagcuugcuaccaacgcuugcccuucc

SEQ ID NO: 4153604 - RNA, 73 nt, Human
ggaacaauggagcaugagcagaggagauauaugcaagauggguguccacuguggucccuugcugccccguucc

SEQ ID NO: 4153605 - RNA, 80 nt, Human
ggaacacauuguugagauugucauugacgaugagcagcuccucugucagcugcucauuggcgaucugagggaugagcucc

SEQ ID NO: 4153606 - RNA, 55 nt, Human
ggaacagagggagaaugagaaucagugggcagaauuaugguucucucacuguacc

SEQ ID NO: 4153607 - RNA, 103 nt, Human
ggaacagcagccuaauauuucauacuuucuuaugucucuuucuuuuagccaaaugcagaggaaccacucugagaagccaccggauguuaggagccuguguucc

SEQ ID NO: 4153608 - RNA, 90 nt, Human
gcugaaugauguuuuaugucccuuuuguguugucauuguucuaacuuuagugagaccauuugacauacaguggauggcugcauccagagc

SEQ ID NO: 4153609 - RNA, 82 nt, Human
gcugaaugcaagagugagguugggauuuugaaaaaagccuauaccagagacuucuuccuggccuccguucucugcauauggu

SEQ ID NO: 4153610 - RNA, 69 nt, Human
gcugaauguauggauucaugucugugagguauguauaaacacacgaugugaauucuugccccuucuagc

SEQ ID NO: 4153611 - RNA, 89 nt, Human
gcugaauucgcgcgcugucuggagccacugcugcugcuggggccacgucggguggcagcugcugcaaguggugcuaacacgugagcagc

SEQ ID NO: 4153612 - RNA, 107 nt, Human
gcugacaaaaguacagucagagaaggauuuaccuccagcuaggcuggguaggaauuuucugcagcuaggcuguagguaaauuacuguuugguguacuuugggccagc

SEQ ID NO: 4153613 - RNA, 73 nt, Human
gcugacacaaggcuucacacaguaugaacucaaaaaaggaauugucuuucaugcucaugucaggcaacucagc

SEQ ID NO: 4153614 - RNA, 67 nt, Human
gcugacagcguuuccagugaugccucaaaccuuccuaauaugcaagguaacuuucuaugcuuucagc

SEQ ID NO: 4153615 - RNA, 74 nt, Human
gcugaccccaagcucugccuuucacccccuacaucugauaguaggcaagagagaaaugugcaguuugggcuggu

SEQ ID NO: 4153616 - RNA, 77 nt, Human
gcugaccucugaggcuucagacuguacuggucgccagcuggccccagcccagaaccucuguaggccccagggagagc

SEQ ID NO: 4153617 - RNA, 82 nt, Human
gcugaccucuguuagucuucuugccacauguugcuggagccagaacagaggcccugaggcauuuaggcagauaacagacagu

SEQ ID NO: 4153618 - RNA, 62 nt, Human
gcugaccuugagauaaugcagaaccuggaggcccaccagguuccacgguguuuggaggcagu

SEQ ID NO: 4153619 - RNA, 59 nt, Human
gcugaccuugugauccacccaccuuggccucccaaagugcugggauuacaggccugagc

SEQ ID NO: 4153620 - RNA, 123 nt, Human
gcugacucuguguggcgaguguaagacgagagugggaaagauggggcugcagagguccauguggcuguuucacaagggcccugcaguccacacuguuguugggauuuuaguccucagagcagc

SEQ ID NO: 4153621 - RNA, 108 nt, Human
gcugacugagguguguugggggguuccagggugacaaguggcaaggagcuggguuugcccuucuccccagcccugguauucugaucaccuccuaugaacuccauuggc

SEQ ID NO: 4153622 - RNA, 90 nt, Human
gcugacuuauuuccuugcuuacaacauauuuagcuugauugggucacuacucuccuacaucaggcaaguauuuguaaguggaaugcaagc

SEQ ID NO: 4153623 - RNA, 57 nt, Human
ggagaucugagagcuggaaguggggagcguguuaccuuccaguugccagauccuucc

SEQ ID NO: 4153624 - RNA, 58 nt, Human
ggagaugccuuguuucaggaacccauucagccaaguuguccuggcaagccguaccucc

SEQ ID NO: 4153625 - RNA, 59 nt, Human
ggagauggccacgucacucagugcccagacaggauaacacugggagaacgagccuuucc

SEQ ID NO: 4153626 - RNA, 81 nt, Human
ggagauggcggaggcuggugguuaguuccauuuaaaugagcccauuggggugaacucauaaaccuucaguuuucaauuucc

SEQ ID NO: 4153627 - RNA, 75 nt, Human
ggagaugggaggggcaucucuccugugugcuccucgucagccccagcacagcagccgaaaugcccuuacauuucc

SEQ ID NO: 4153628 - RNA, 59 nt, Human
ggagauguggaagagguagagauggauggauacugaaaauacaaauuuuccauguuucc

SEQ ID NO: 4153629 - RNA, 84 nt, Human
ggagauguuacaaguuggguaggaaccuggcugauguugaaaggacucacauuuacauuuucucuggccuucuguaacauuuuc

SEQ ID NO: 4153630 - RNA, 59 nt, Human
ggagauuuugggcauguuucuggaaaauggccaaaacuguaagugccucaaggucgucc

SEQ ID NO: 4153631 - RNA, 60 nt, Human
ggagcaaagcuuccauaaagcagccuugaaccaggaugcccagaaauggcagcuuuaucc

SEQ ID NO: 4153632 - RNA, 87 nt, Human
ggagcaaggccaggcccuagggcuuuugggccuguucuucccgaggggcagccuaaucauguccuccuggaucuaauggccuugccc

SEQ ID NO: 4153633 - RNA, 79 nt, Human
ggagcaauggagaaaagaugagagggagccagccauccgaaagaagcugcccugcuugguuuauuuucagcuuugcucc

SEQ ID NO: 4153634 - RNA, 72 nt, Human
ggagcacacaacuuggauuccucauaugcacaggucacaauacgguuugugcuccugugagaaucuaguucc

SEQ ID NO: 4153635 - RNA, 100 nt, Human
ggagcacagaagaguuaagcaacuuuucuagacauggucguaaguuugaaaaauguagaucaggccugugguuucuaguagguugccuaacucuuucuuc

SEQ ID NO: 4153636 - RNA, 66 nt, Human
ggagcacagcuggagguagcauuuccaucugaacaugaugucagagcagcugacagccugccaucc

SEQ ID NO: 4153637 - RNA, 85 nt, Human
ggagcacgggaacaggacacauuucuuguucaggccucagaacuugcaguucuuccagacaggggcuguuccugcucccuccucc

SEQ ID NO: 4153638 - RNA, 65 nt, Human
ggagcacuuccugagugcguguuugcuuuugacccuggcugagacuggcagcaggaaguaucucc

SEQ ID NO: 4153639 - RNA, 68 nt, Human
ggagcacuuggaagcgagcacauggaggaacugucggguccucuucuuugagcuuuuuccuaggcucc

SEQ ID NO: 4153640 - RNA, 61 nt, Human
ggagcagacgcugcagucuuggggcagaauuucuucucuaggaagccucagugucugcuuu

SEQ ID NO: 4153641 - RNA, 63 nt, Human
ggagcagcugcucugguggucucucccaggcucugggggcggacccaugggaggggcuguuuu

SEQ ID NO: 4153642 - RNA, 56 nt, Human
ggagcagcugggacuugaaccuaggcagcgggguuccagaguccacaucugccacc

SEQ ID NO: 4153643 - RNA, 78 nt, Human
ggagcaggacaaugaggcugcagugaggaugggcuccauccuugaaugacucugcccuccuugaaauuuuucugcucc

SEQ ID NO: 4153644 - RNA, 71 nt, Human
ggagcaggagguggccucucuuggaccaagugcggcgaauucauuccauaagcagguucuuccugaacucc

SEQ ID NO: 4153645 - RNA, 59 nt, Human
ggagcaggcaaagaugaaaggagaaauuuauuuccucauaacaacucuuugccuuuucc

SEQ ID NO: 4153646 - RNA, 61 nt, Human
ggagcaggcucugugguuuccacacauaguucccagcacugcaauuaacccagagccuucc

SEQ ID NO: 4153647 - RNA, 55 nt, Human
ggagcagggcuccaaugucugggcuccguccucugaagccagaugcccugucucc

SEQ ID NO: 4153648 - RNA, 92 nt, Human
ggagcaucuacaagcagaaggugaggcguccccaccaugggucugcucugcagcccugcggaugucucaccagccuguauggggugugcucc

SEQ ID NO: 4153649 - RNA, 98 nt, Human
ggagcauuguuccuagaagcugccuugauaaagcugggagacaaagaucauugagaaggacugucugcagauuuaucagcagcugcugggacgugccc

SEQ ID NO: 4153650 - RNA, 124 nt, Human
ggagcauuuggucaggucaugggaugccaagcaugccuugcaaagcagucuucugugccuaaggcuccuuccuugcagaaacagaguuuugccauguccuuauuccucacugcucauaaccucc

SEQ ID NO: 4153651 - RNA, 99 nt, Human
ggagccaauaaggaaggcaguuuggagacuaagccagggcugcgagcagacagggugaaccucacuucucccaggaccugggcccacacugcuggcucc

SEQ ID NO: 4153652 - RNA, 104 nt, Human
ggagccaggcugagagcagugcugacaucugcugcugaagccagcauguaggaaagugggcaugggggugauggcagaggugggccugccucacagccagggcc

SEQ ID NO: 4153653 - RNA, 78 nt, Human
ggagccaggcuggagagagagugccuagcucugcaggggagccggucuggggaagcugggaucucucucccgcccucc

SEQ ID NO: 4153654 - RNA, 71 nt, Human
ggagccagucccgagccgcugucauggccgcgaccaccaggcggggcccccggccgagcucucgcggcucc

SEQ ID NO: 4153655 - RNA, 69 nt, Human
ggagccauggccagcccuucccgcagcuccgaagccacuggcaagccccgaggcagggauggccggccc

SEQ ID NO: 4153656 - RNA, 72 nt, Human
ggagcccacaccucuuggucugggucggccacacagagcucuaccaccggcucauccacggagaggggcucc

SEQ ID NO: 4153657 - RNA, 88 nt, Human
ggagcccagguuguuugugcagaggagugccugcaggccugugccaggccacccucagccccaccccuggcauccaucccugagcucc

SEQ ID NO: 4153658 - RNA, 55 nt, Human
ggagcccggccucuccagcagccacacaggccugcaguaggauggggcugggccu

SEQ ID NO: 4153659 - RNA, 83 nt, Human
ggagccuagacagagaagcgaguggaggcgcuguccugggcccucacuccucccagggugcccaccgcuucugcccagccucc

SEQ ID NO: 4153660 - RNA, 129 nt, Human
ggagccugcaagccacccugagggugcagaaaucugaaugucuggggccaugugcagaguguggccaagucguagcuguggcuucagcauucagagccucugccucuacuggggauuaaugcagguuuc

SEQ ID NO: 4153661 - RNA, 63 nt, Human
ggagccuugagcugaugcugacacuagcugagagaagauccauggcagcucuagucgaggccc

SEQ ID NO: 4153662 - RNA, 56 nt, Human
ggagccuugggagucggguccucaaggaaagaccuaugggaucagcccagggcucu

SEQ ID NO: 4153663 - RNA, 67 nt, Human
ggagccuuucagagguuacucaggaaauggacuccuguuuccugugacuaaucuggacagcggcuuc

SEQ ID NO: 4153664 - RNA, 71 nt, Human
ggagcgggcauguucucuccagacugcaguggguaucaggccccugcugcuggagaggaaauggcugugcc

SEQ ID NO: 4153665 - RNA, 98 nt, Human
ggagcggggaguagacaguuuagggaugcuguggcagggcugggugccaucggcugggacucaguccugaugacaggcccaagcuaucauuccugccc

SEQ ID NO: 4153666 - RNA, 90 nt, Human
ggagcguucuggguauuccaucguccccuggaagucuggcagguacaacccccucaacacuccagggagggagggaauccacaggaagcc

SEQ ID NO: 4153667 - RNA, 56 nt, Human
ggagcuaauaaguggcagaugcagucuauuugacuccagugccuaucauuaauucc

SEQ ID NO: 4153668 - RNA, 117 nt, Human
ggagcuauuauuucuggaaguggcuccugauuucagcugcuuccugaugugauggaggacacauggcucuggagcuggcggcugaugcagaggcacacugacugguuuaguggcucc

SEQ ID NO: 4153669 - RNA, 58 nt, Human
ggagcucagagccuauaguuggucacuuggaggugacuccagaggcugcugaggcucc

SEQ ID NO: 4153670 - RNA, 61 nt, Human
ggagcucagaggucccuucccuagugcaggagccucacugaaccagggaucucuaggcucu

SEQ ID NO: 4153671 - RNA, 94 nt, Human
ggagcucauggugcucgggcuguggcagggaagaggccaugcccuucagccguccccccgucuguccucucccugaccacaacgccagagcuuc

SEQ ID NO: 4153672 - RNA, 60 nt, Human
ggagcucccaggccccagcaaggauuuugauuaacaggaccuuaugggcugggugcugcc

SEQ ID NO: 4153673 - RNA, 84 nt, Human
ggagcuccucucugagcugggcucucuugagggcuaagggagccaguucucucggcccuagagcccagaauggaaaagagcuuc

SEQ ID NO: 4153674 - RNA, 60 nt, Human
ggagcucucuugugguacucccauguuguccagcacuuucggagucaccaagagagaccc

SEQ ID NO: 4153675 - RNA, 77 nt, Human
ggagcugacuuuauccugccugaccacgcaaugagccauacaaugcuccucuguggaugaggcaggugaaauucucc

SEQ ID NO: 4153676 - RNA, 71 nt, Human
ggagcugagcacccuuugugagcauaagucuacaacuguaggcuuguucaugacaagggugucacagcucc

SEQ ID NO: 4153677 - RNA, 55 nt, Human
ggagcugaugacgucaccauggcacucaugccugagauguucuuccaucaguuuc

SEQ ID NO: 4153678 - RNA, 84 nt, Human
ggagcugcagauguucauccauuuuccuuuccuucugaaguuccuucugccauggaaagagaaguugggaggaauuucagcacc

SEQ ID NO: 4153679 - RNA, 67 nt, Human
ggagcugcugugaggggagcuucugugggggaaacugccaugggggagcugcuguugggggagcugc

SEQ ID NO: 4153680 - RNA, 62 nt, Human
ggagcuggagugcagguugggguucgugaacuaacaaauuccugaucaaguuuucuggcucc

SEQ ID NO: 4153681 - RNA, 58 nt, Human
gcugggagacagacuuggaaccaggaguucuccaggccccgccauggucucucccugc

SEQ ID NO: 4153682 - RNA, 55 nt, Human
gcugggagaggaaccucgagggucgggugaagcccacccagaguccuccccgcgc

SEQ ID NO: 4153683 - RNA, 75 nt, Human
gcugggagcugaaagaaugaaggauuuagcuguuagucucugaaggcacaacaggccucauuccagcucuccggc

SEQ ID NO: 4153684 - RNA, 110 nt, Human
gcugggagggucagaagcucacguccccuggguuugggcaugaaauccugugcaaaacugcaugaaauguuggucccaaucgcaggcccgugaguuguggccaucuuggc

SEQ ID NO: 4153685 - RNA, 79 nt, Human
gcugggauagacauauuugaaaccaagagaaaaauguuuugaaaacacauucaucuucuuuagauaguaugguugcagu

SEQ ID NO: 4153686 - RNA, 59 nt, Human
gcugggcaagugccuuggguuuagaugcuaugaauggaugaaucuagggucacuccagc

SEQ ID NO: 4153687 - RNA, 65 nt, Human
gcugggcagcugaggccucucagucugugccugagcaagcaaggagcccugagcuguccccaugc

SEQ ID NO: 4153688 - RNA, 58 nt, Human
gcugggcaggccucgugagggccacggacauggagcuugucccuccgggcuucccagc

SEQ ID NO: 4153689 - RNA, 86 nt, Human
gcugggcagguggggagggguccaggaggcacuuaccagcuucuggcaccaggugcagccgggccccgacucgaugcauucccggc

SEQ ID NO: 4153690 - RNA, 83 nt, Human
gcugggcuccacccaucaggcagaguggaagcugcaagucuuccuugccucccccuuucuuccuggcuuggauggaguucagu

SEQ ID NO: 4153691 - RNA, 70 nt, Human
gcuggggaaauucuccaagguucauauuuauccgugugcuuagcgaagggacugaacuuuggacuucagc

SEQ ID NO: 4153692 - RNA, 115 nt, Human
gcuggggauuuguaaccuuaggcuugcuucuccuccacagcucuaaacaagcauguguuaaggaaaagcaaucugaugucugccuaaauauaacaggugaauauuguaccaaagc

SEQ ID NO: 4153693 - RNA, 107 nt, Human
gcuggggcaaauuacuucaucuccuuaguacuugguuuucuucucuauaaaauggagauauuaaucguacauaagguuauugugagguugaaaagagaugauccagc

SEQ ID NO: 4153694 - RNA, 61 nt, Human
gcuggggcaagggcagcuguuucucuggggguaaacacucuuaguugccaaaaugcccugc

SEQ ID NO: 4153695 - RNA, 64 nt, Human
gcuggggcacugggggucaggaccagacccauccauguuccuaggccucccuggagcacccagc

SEQ ID NO: 4153696 - RNA, 56 nt, Human
gcuggggccacagccuccuagcuuggagcaccaggaaaggugggcugggccaaagc

SEQ ID NO: 4153697 - RNA, 88 nt, Human
gcuggggcccacuugggcccucugcagcugcccagggccccaggagggguacaaaccugggacaagcaggggcccaaccacccccagu

SEQ ID NO: 4153698 - RNA, 129 nt, Human
gcuggggccccaaauuguuggucuucucuggacuuugggcucuucugaagagguuaucauagagggcugcugugcccucuggguaggaaccuucagaugaggcugcugcugaggaccugggcaccuggc

SEQ ID NO: 4153699 - RNA, 74 nt, Human
gcuggggcucaguugucuuugggaggcccuguguguccuguguagccaagggccuggacuaauuggaucccagu

SEQ ID NO: 4153700 - RNA, 108 nt, Human
gcugggggaccugggguaaugccucuguuuucaggcaucccuacaguuagguguggccauaugccuagguugccaauggaaggugagaggcaauuucccacuucuggc

SEQ ID NO: 4153701 - RNA, 72 nt, Human
gcugggggccagugucucuuccuuggugauuugccuccacuuuguuucuaggaagagcuauagguccccagu

SEQ ID NO: 4153702 - RNA, 65 nt, Human
gcugggggcuuggcagaggccgaggugaagauuaacuucuucacugcugcgcucccaaccccagc

SEQ ID NO: 4153703 - RNA, 63 nt, Human
gcuggguaccucaccgcugcugcuggggccacucuggccagcaguccacgaggugagaccagc

SEQ ID NO: 4153704 - RNA, 82 nt, Human
gcugggucagggaugcccaggaguaagugacauuguucucauagcagagccauguugugcuacugcugccagaugacccagc

SEQ ID NO: 4153705 - RNA, 65 nt, Human
gcugggucagugaggcugugucacccucuacaacuguagccagcagcuuugauucacugccuagu

SEQ ID NO: 4153706 - RNA, 77 nt, Human
gcuggguccugagguugccaggcaacaagucauguacuuggcaugguaguuaguuuccuggaaacauuaggagaagc

SEQ ID NO: 4153707 - RNA, 72 nt, Human
gcugggugccugaggcccaaggacucugucccgccauacacagggugggacggggcagggcgggcauugagc

SEQ ID NO: 4153708 - RNA, 61 nt, Human
gcuggucagaugcugccuaagccgagugaacauucagggcauggcugcacuuggcacuggc

SEQ ID NO: 4153709 - RNA, 56 nt, Human
gcuggucagggagggcacccaucaguaggguuuaugggggucuccccugcaccugu

SEQ ID NO: 4153710 - RNA, 84 nt, Human
gcuggucccagaugcuuugacaauaucauugcacugcuucucagagcacaguagugcaaccucgucagagcaccugcggccagc

SEQ ID NO: 4153711 - RNA, 113 nt, Human
gcuggucccucuaucuggagugcauaucucugcauggcuggcucuuucucauuauuuggguaguagaaagaacuucauguaaaacugcacuguccagcauaguagccgccagc

SEQ ID NO: 4153712 - RNA, 55 nt, Human
gcuggucccuuucuacugagcacagucagccuucugugccugaaacagaccuagc

SEQ ID NO: 4153713 - RNA, 85 nt, Human
gcuggucuagcaagcucuucuguggauuugaguccugaggcauggaguuguguccaagggagagcagagggcuacagagcacagc

SEQ ID NO: 4153714 - RNA, 88 nt, Human
gcuggucucgagcuccuggcuucaggugauccucccaucucagccucccaaaaugcugagagggcagcugugagccacugugaccagc

SEQ ID NO: 4153715 - RNA, 55 nt, Human
gcuggugauugccucaggaggccuuuuauuucuuucucugugguccaaucccagc

SEQ ID NO: 4153716 - RNA, 108 nt, Human
gcuggugcccuccaaaggcaguaucucaccuccugcccacccuccucccaacccucaggagggugcuugcagugagaugagaugccgcagggaauaaaaaccaccagc

SEQ ID NO: 4153717 - RNA, 57 nt, Human
gcugguggcagagcuccgcggcagcgugcgccaggcagugcggcucuaccacucggu

SEQ ID NO: 4153718 - RNA, 86 nt, Human
gcugguggcugagaaggaggcuccccaaagucugagggcuuggccccgggcccacucgaagccuccagcacuugagagccgccagu

SEQ ID NO: 4153719 - RNA, 71 nt, Human
gcugguggggccaccuaggagccacagugacacccaguguccugcagagcugccuguguggccugccuagu

SEQ ID NO: 4153720 - RNA, 61 nt, Human
gcugguuaucucggccacagagagcuguucgugauaggcuuucucggcagagaugaugggc

SEQ ID NO: 4153721 - RNA, 78 nt, Human
gcugguucacagaagcugccaggagaauggccuuccuuaacucuuggccagagguuucucucauguggugacaccagc

SEQ ID NO: 4153722 - RNA, 80 nt, Human
gcugguucuggccaggauggcaagaccaguggucucucagaggucauguggcuuucuuuucuuccuggccauagacuggc

SEQ ID NO: 4153723 - RNA, 99 nt, Human
gcugguugcccuaaugguggauucucuguucaaggauggugagcuaguguucagcucaggaagccacuccacagagauggccaccaaaagggcuucagu

SEQ ID NO: 4153724 - RNA, 122 nt, Human
gcugguugcugcagauugugggacagaguucuguuuuugcauauugauuuucuccucagggaaacacauuuuaggaaaaucuaguguagggcggaagucaauguaccaugagcaggaccagc

SEQ ID NO: 4153725 - RNA, 102 nt, Human
gcugguugggaagaaaacaacacagggauauuucagguggugccgcacaacaaacagcgguaguuuauggucugagauagucucuguucuuuuggaaccggu

SEQ ID NO: 4153726 - RNA, 78 nt, Human
gcuguaaaguuaucccaugugacucagcugccugcuguacugccaguugauagagucacauggucaauuccuaucagc

SEQ ID NO: 4153727 - RNA, 93 nt, Human
gcuguaaauucucugguuggaauucgcuguguuucugaaguguguauuaauacacauucuugaguuacagucuaccaucuugagagacauagu

SEQ ID NO: 4153728 - RNA, 90 nt, Human
gcuguaauugcuuugccagacagcaguuaaaggacaugugcuuuggcaaucauucucuugggcuugcuugccugguuccuuaguuucagc

SEQ ID NO: 4153729 - RNA, 80 nt, Human
gcuguacaacuucugaaguuuggagcauccagguaucagcuggcugcuagccagagcuucagagcaaguguucauuaagc

SEQ ID NO: 4153730 - RNA, 56 nt, Human
gcuguagaucacuuucuguugcugcaacccaacaguaacagcagggaaauacgugc

SEQ ID NO: 4153731 - RNA, 55 nt, Human
gcuguagggugucauaugaagccuucaaggcucauucuccaugugcccuuucagc

SEQ ID NO: 4153732 - RNA, 126 nt, Human
gcuguaguucaagcacagacccucucaccccagccagcccuucuccaccuuccgggcgcacagucuuagggguggagcagaggcugagguugggggccucacagucaaaggugcugagacaacagc

SEQ ID NO: 4153733 - RNA, 68 nt, Human
gcuguauaauuccuuucccuuccuacauucuuguuuguaauuuuuucgggggaagaggaguugcuagu

SEQ ID NO: 4153734 - RNA, 67 nt, Human
gcugucaaacauugagcacuugcuauuugcaggcauacugcuaagaucgcagcuaauauuugacagc

SEQ ID NO: 4153735 - RNA, 59 nt, Human
gcugucaagguagaaaacagagaauuucuuuauaacuugcaauuucuacaguuggcagc

SEQ ID NO: 4153736 - RNA, 55 nt, Human
gcugucaagguugggaggagaugaguacucgcccauccugcugaccuucacaagc

SEQ ID NO: 4153737 - RNA, 55 nt, Human
gcugucacaucaaggcacuaaacagcugaccugguugguccuaauuauugauagu

SEQ ID NO: 4153738 - RNA, 71 nt, Human
gcugucaccgucugggcaucugagcccagggagcccccgaggucagcugucuccccagaguggagagcagc

SEQ ID NO: 4153739 - RNA, 89 nt, Human
gcugucagcucaucagcucaccauggggaccacacucugcagaagugcagaggcugggaccucaggcaugagaugcagccuuuuacagc

SEQ ID NO: 4153740 - RNA, 56 nt, Human
gcugucaguuuuacccacagacagaagagaugacugucugugugguuuuugcaugu

SEQ ID NO: 4153741 - RNA, 57 nt, Human
gcugucaucagcuuucucaaagaagcuggaagucuagaugaguugagaaguugaagc

SEQ ID NO: 4153742 - RNA, 94 nt, Human
gcugucaucccgugccugugaccggcuuuggugccagcgucagccuguggcuaacacugugcccagagucccaccacccacccauggaucaagc

SEQ ID NO: 4153743 - RNA, 70 nt, Human
gcuguccaggguuauacagcugaacaaaauuacauuaaauuaaguuauggucuuauaauccagggauagu

SEQ ID NO: 4153744 - RNA, 66 nt, Human
gcuguccagguuguggagcaacaggaacucgcauucauugcuugugcaaauacaaaaugguacagc

SEQ ID NO: 4153745 - RNA, 79 nt, Human
gcuguccauuucauccagaguccuauuagcagccaucuacucuacugcuagaguccuggcuuuagaagaaagggauagu

SEQ ID NO: 4153746 - RNA, 104 nt, Human
gcugucccauccucuccugcuuuuauuucaugcccagugugccucagaguguuacgaagugugagaaccacugguagagagaagacaaggaggagagggagagc

SEQ ID NO: 4153747 - RNA, 98 nt, Human
gcuguccuuggaguagaauucaaggcaguaggaucuuccacaguggaagcauaaacuguugaaacuaacuguuuuauauuauauucacagagggcagu

SEQ ID NO: 4153748 - RNA, 56 nt, Human
gcugucgugagagacaacacagcgauaucucauauguugcaagcuuucaagauagc

SEQ ID NO: 4153749 - RNA, 69 nt, Human
gcugucucucccaggauccaugcugcuccuagccccguucugguccugugugcccccuggaagagcagc

SEQ ID NO: 4153750 - RNA, 73 nt, Human
gcugucucucuacagauccuauauagaaagcaaucgugaaaaucacuugucuuuuagggaugagaugagcagc

SEQ ID NO: 4153751 - RNA, 57 nt, Human
gcugucugccgcaggcugccaccaucccguaggccgggggaaaccugcggaggcugc

SEQ ID NO: 4153752 - RNA, 101 nt, Human
gcugucugcuuacccuguaauugaaugucugagagugauugaaaaaauguuauuucuucucaguauuacaugcuaauguacagagggcaaaaggagacagc

SEQ ID NO: 4153753 - RNA, 64 nt, Human
gcugucugggaugucacugcugcugaaaugucgauggcgucugucuagcaguacucacagaagc

SEQ ID NO: 4153754 - RNA, 75 nt, Human
gcuucagaagucaugcucagucuguuccuggaaaacagcagcaccuaggaaaccagcugagaaugcuucugcagc

SEQ ID NO: 4153755 - RNA, 59 nt, Human
gcuucagcaccucagcuggagaguccugggugccgcccucccgcugaagugcugacagc

SEQ ID NO: 4153756 - RNA, 59 nt, Human
gcuucagcauuucuuuucucuucucauucucuguaggaagagucugagugugcaagggc

SEQ ID NO: 4153757 - RNA, 99 nt, Human
gcuucagcuggacuuugagccucuucaugccgaucuggaagccguucauggccuggauggcugccugggcgcuggccggguuaucaaagcucacgaagc

SEQ ID NO: 4153758 - RNA, 78 nt, Human
gcuucaggaauggagggagugagagccuuuuccgacaaugccgaagaaggcucaucccucaccccagacgccuguggc

SEQ ID NO: 4153759 - RNA, 59 nt, Human
gcuucaggcagacagagcugugggucuagggcagagacccaugcaucccucuccugggc

SEQ ID NO: 4153760 - RNA, 65 nt, Human
gcuucaggcagcgaagggcagugggaggggagauauuaacuugccucuggccuuuggugcccagc

SEQ ID NO: 4153761 - RNA, 59 nt, Human
gcuucagguggccauuguuagugaagccaaaagacuucaguuaacuguguuaccugugc

SEQ ID NO: 4153762 - RNA, 56 nt, Human
gcuucauagcauucauugccugugcuugccacaccuugguugaugugcuguggugc

SEQ ID NO: 4153763 - RNA, 74 nt, Human
gcuucaucaacugcaaaauggguauaauaacacuugucucaaaaagacaauugccuauucagcagagugauagc

SEQ ID NO: 4153764 - RNA, 65 nt, Human
gcuucauccccagguuccacaaggauccuugggaguccuugaacagagggccugggugagacagc

SEQ ID NO: 4153765 - RNA, 65 nt, Human
ggacugagcugacaucuguuggcuaccaguacucccaccagcuaggggaaugugagccucagucc

SEQ ID NO: 4153766 - RNA, 86 nt, Human
ggacugaugaugcuguuagcuauaaaaccugucaggggagaagaauguucccugcugcaguguuugcugaaguuacaucaaugucu

SEQ ID NO: 4153767 - RNA, 61 nt, Human
ggacugcagauagacaagagccuccacuugagguggggacccuuccugugcugcugugucc

SEQ ID NO: 4153768 - RNA, 64 nt, Human
ggacugcccuggagacagcagaguauguggcacauuccagccagcucucuguccagggaagucc

SEQ ID NO: 4153769 - RNA, 69 nt, Human
ggacugccgucucggccucuucagauuuugagauaggggugugaguagagcuggggauccaggcaggac

SEQ ID NO: 4153770 - RNA, 60 nt, Human
ggacuggaagggaagggaagaaaugaaagucauugagagguuuccuuucauuuuaguacc

SEQ ID NO: 4153771 - RNA, 82 nt, Human
ggacuggagccuggccaggcuugggacagacacauccugauagggccugacugcgcaggccaugguacggcuccuguggucu

SEQ ID NO: 4153772 - RNA, 64 nt, Human
ggacuggaggagcggugcaugugggggcugaggcacagccugcacucaaacacucucuucuucc

SEQ ID NO: 4153773 - RNA, 56 nt, Human
ggacugggaaucagggagaugcauuuuguccacuagcuuugaccaugaaccagucc

SEQ ID NO: 4153774 - RNA, 59 nt, Human
ggacugggccucacacccaccaaauggaggcuucagcugguggaagggagcccaaaacc

SEQ ID NO: 4153775 - RNA, 88 nt, Human
ggacugguaccugcuuagggcugcagaacaauggccucugacaaacuggggccuguguccucuccagcuugacucgguuugccucucc

SEQ ID NO: 4153776 - RNA, 87 nt, Human
ggacuggucccacaagauguccucagagugggcagguccucaaaacaagaagacgcacccuuugagggcacaaugcagguacagcuc

SEQ ID NO: 4153777 - RNA, 75 nt, Human
ggacugugccaggccucaggagucuccacccucuccaguuuuggggccgucagucuccugggccugcaauuaucc

SEQ ID NO: 4153778 - RNA, 91 nt, Human
ggacuguggcagcuauggucuaagggccaacaccguucagcauuagccgauuguugccguauaggacuuugggaccauggcuaccagagcc

SEQ ID NO: 4153779 - RNA, 57 nt, Human
ggacuuccuaaugggcugcugcugggccugccgucucagcagauagcgggagaguuu

SEQ ID NO: 4153780 - RNA, 83 nt, Human
ggacuucuagggaauuuaguguaagugaggauggcaugugaaacaaaugccuccugacuuacacugagcuuauaaagaucucc

SEQ ID NO: 4153781 - RNA, 55 nt, Human
ggacuugcagcauuaggcuacacgugcucuacaaugugcugaggaugcaagaucc

SEQ ID NO: 4153782 - RNA, 129 nt, Human
ggacuugccacggucccuggucuuggugggcugggcguggagcuggaaugaugugaggcucuccaggggagcagggacacacacucauauaugcacagccugcccaggcugugggguguggcucggucc

SEQ ID NO: 4153783 - RNA, 58 nt, Human
ggacuuggagcugggaguccaauacccauccaggugcugacaacacagcuucaggucc

SEQ ID NO: 4153784 - RNA, 101 nt, Human
ggacuuggauaaaguuuuccuaaaugaugcacuggccugguguagggucaccaugugacauucugcccaccagcgguugcauaugaacucuguccuugucu

SEQ ID NO: 4153785 - RNA, 73 nt, Human
ggacuuuaaguuuguaaaauuagggaauucaaaggauuuuuguaacgcucuaauuuuauguuuguaaaguacc

SEQ ID NO: 4153786 - RNA, 61 nt, Human
ggacuuuggugcgaagucacuuuagaaaacugggaucuggaaggggccaggcgcggagucc

SEQ ID NO: 4153787 - RNA, 60 nt, Human
ggagaaagcuucagaaauggccuucuacuuugggagccuugaaccuugaagccuuccucc

SEQ ID NO: 4153788 - RNA, 64 nt, Human
ggagaaagucagcuccaagcagcacccuuugugaggggcaauuguuuugagugugauugucuuu

SEQ ID NO: 4153789 - RNA, 58 nt, Human
ggagaaaucacuuagaggaagugaccagggcuggucggcuuuuuauggugguuccuuu

SEQ ID NO: 4153790 - RNA, 112 nt, Human
ggagaaaugcauuucugucauagauaagagcauuguaaaauaaucuguuuuaaaguaaauaugaaauauagaauguuuggugcucugcugauuuguauucaaaauaaauccc

SEQ ID NO: 4153791 - RNA, 79 nt, Human
ggagaaauguggggaugagaguggaggaggcaauuuaugagugugguuggcuuugcucucuguccuaguauucagcucc

SEQ ID NO: 4153792 - RNA, 55 nt, Human
ggagaaccucuccauccagaacagaaaugagauguugggugagaguguuugcucu

SEQ ID NO: 4153793 - RNA, 77 nt, Human
ggagaacucaauuuggaauugucaguaaaugauggcucacuguuauauacuugcuuccaguccaagucuguuucuuc

SEQ ID NO: 4153794 - RNA, 60 nt, Human
ggagaacugcaaccguaucaggaacccugcuggcacaggagucugaacaaugcaguuccc

SEQ ID NO: 4153795 - RNA, 59 nt, Human
ggagaagaggggacugaggcugucacuguccuuuacccagaaucauuuuucccuucucu

SEQ ID NO: 4153796 - RNA, 87 nt, Human
ggagaagaucucagcguuguuauugguuaagagaaagaaaagccauuaucucaacuaccauauaacaaguuuaggagagacguuuuc

SEQ ID NO: 4153797 - RNA, 72 nt, Human
ggagaagauuggaauuaagcacuggaagcuuuuuauuuauuuuacaugcuuuauuccuacaagauuuucugc

SEQ ID NO: 4153798 - RNA, 73 nt, Human
ggagaagcaaauuugggguuguuagaggaggcaucuagccaggcucuucuggagccccaagaucuguaccucu

SEQ ID NO: 4153799 - RNA, 67 nt, Human
ggagaagcagcauagcucccuuaguugugucuuaggugaagcaacacuuggcuuuguuuguuuuucu

SEQ ID NO: 4153800 - RNA, 78 nt, Human
ggagaagcauugagcaguuuuugccacugaaguuugaagaaaccaguuucaaagaaaauugcuagucgauacuuuucu

SEQ ID NO: 4153801 - RNA, 62 nt, Human
ggagaagccuguugagagggccgugaacaucaucaugguuuauuagcugcacaggcuuuucc

SEQ ID NO: 4153802 - RNA, 81 nt, Human
ggagaagcgagccggugucuccaaugcccccagucagccauuugguccuggaugucuuggggacuccugcuugcugccucc

SEQ ID NO: 4153803 - RNA, 57 nt, Human
ggagaaggaaaauggggagguuaaggacccuacaccuaaaccuuuagaucauucucc

SEQ ID NO: 4153804 - RNA, 70 nt, Human
ggagaaguccugggccugguuuggagcuggugaggucugaggaccucuaggccauccagggccauucucc

SEQ ID NO: 4153805 - RNA, 75 nt, Human
ggagaaguuauggcaauaggcguguuuaggaggacguggcuauguauggacuugaggaacccgccugucuuuucu

SEQ ID NO: 4153806 - RNA, 87 nt, Human
ggagaaguuugauguguguaauucaguccuugcugagaaguguucuuguugaauuggggagacuguaauugacaugucagcucuucc

SEQ ID NO: 4153807 - RNA, 64 nt, Human
ggagaauaucugucucuaaugcauauuguuuaacacuaaacuguaugcauuuggcauauugucc

SEQ ID NO: 4153808 - RNA, 88 nt, Human
ggagaaucacuggaacccaaaagguggagguugcagugagcugagauagcaccacugcacuccagccugggugacagaacgacacucc

SEQ ID NO: 4153809 - RNA, 88 nt, Human
ggagaaucacuugaacccaggaggcgcagguugcggugagccgaggucaugccauugcacuccauccugggcaauagagugagacucc

SEQ ID NO: 4153810 - RNA, 88 nt, Human
ggagaaucacuugagcccaggaggucgaagcugcagugagcugucaucgugccacugugcuccagccugggugacagagugaaucucu

SEQ ID NO: 4153811 - RNA, 89 nt, Human
ggagaaucgcuugaaccagggaggcagagguugcaaugagcugcgauugugucauugcacuccugccugggcaacaagugcgagacucc

SEQ ID NO: 4153812 - RNA, 88 nt, Human
ggagaaucgcuugaacccaggaggcagaaguugcagugaguugagauagcacuacugcacuccauccugggcaacaaagugagacuuc

SEQ ID NO: 4153813 - RNA, 92 nt, Human
ggagaaucgcuugaacccaggaggcagagguugcagugagccgagaucccaccacugcacucuguucagccugggugacaaaacgagacucu

SEQ ID NO: 4153814 - RNA, 89 nt, Human
ggagaaucgcuugaacccgcgagguggagguugcagugagccaagauugugccauugcacuccagcuugggcaacaagagugaaacucc

SEQ ID NO: 4153815 - RNA, 88 nt, Human
ggagaaucgcuugaacccggaagguggagguugcagugagcugagaccacgccacugcacuccagccugggcgacagagcgagauucc

SEQ ID NO: 4153816 - RNA, 88 nt, Human
ggagaaucgcuugaacccuggaggcagagguggcagugagccgagaucguaccacugcacuucagccugggcgacacagugagacucu

SEQ ID NO: 4153817 - RNA, 87 nt, Human
ggagaaucgcuugaaccuggaggcagagguugcaguaagcugagaucaugccauugcacuccagccugggugacagagugagacucc

SEQ ID NO: 4153818 - RNA, 89 nt, Human
ggagaaucgcuugaaccugggaggcggaaguugcagugagccgagauugcgccauugcacuccagccuggacaacaagagugaaacucc

SEQ ID NO: 4153819 - RNA, 88 nt, Human
ggagaaucgcuugaaccugggaggcggagguuguagugagccaagauugcaccacugcauuccagccucggcgacagagugagacucc

SEQ ID NO: 4153820 - RNA, 67 nt, Human
ggagaaucuguucugucugugguuguuaacccucucaauaaagcuacaagguagcauuaguuucuuc

SEQ ID NO: 4153821 - RNA, 70 nt, Human
ggagaauggcuguguuagaugcuaaguugcucauugacugaggcugcuuuaacuggacggcuccauuucc

SEQ ID NO: 4153822 - RNA, 55 nt, Human
ggagaauggugaugaugcuaccuguucuaugacauguagcaugaggcacugugcc

SEQ ID NO: 4153823 - RNA, 70 nt, Human
ggagaauuaaaauaguuuuggucgaggccaugauguucucgguaaccuaaauuaauuuauaaaauucuuu

SEQ ID NO: 4153824 - RNA, 87 nt, Human
ggagaauugcuugaacccggcaggcggaguugcagugagucgagauugugcuacugcacuccagccuugccaacagagugagacucc

SEQ ID NO: 4153825 - RNA, 88 nt, Human
ggagaauugcuugaacccuggaggcggagguugcagugagccgagaucgcgccacugcacucuagccugggugacagagugagacucc

SEQ ID NO: 4153826 - RNA, 63 nt, Human
ggagacacagcugagcucccaggccaucaugggugacagggucagagcugagcugcucccucc

SEQ ID NO: 4153827 - RNA, 84 nt, Human
ggagacaggaacaauaccucuugccagaagcugaguugcacugaguuuugaugcucugguauugaguuguugcuuccucuuucc

SEQ ID NO: 4153828 - RNA, 113 nt, Human
ggagaccaaauuacccacuugugggaaggaaggugcagcgaucaaucauggggcucauuccaggcugcucacaagcugccccccaaccccaacaagggugggucuuggacucc

SEQ ID NO: 4153829 - RNA, 56 nt, Human
ggcacugcccaacccccugcccugucacacacagagcacaugagggagggcaugcc

SEQ ID NO: 4153830 - RNA, 88 nt, Human
ggcacugcuuguuuuagccauugagcaagguggguaagcauauugaauuugcugucauauccuccuuaaaggugcagcaaugcagguc

SEQ ID NO: 4153831 - RNA, 67 nt, Human
ggcacugggcaugggggucuggacaacaggcaucacgccccaaugagccugcagaccccaccaggcu

SEQ ID NO: 4153832 - RNA, 65 nt, Human
ggcacuggugguuucuccccagagaagugacaccuuccaguuaaucuuuggccggccccugugcc

SEQ ID NO: 4153833 - RNA, 69 nt, Human
ggcacugugggggagccagucccauacauauguauuaaaggauuuggauuccuuacucccaccagugcu

SEQ ID NO: 4153834 - RNA, 58 nt, Human
ggcacuucuaggcugccaugccugugguuacagcaggcuccagcagccagaggaagcc

SEQ ID NO: 4153835 - RNA, 76 nt, Human
ggcacuuggccuaauuucucagugugaucaggccucugcagagagaguucuugcccuagaaaaugaccacagugcc

SEQ ID NO: 4153836 - RNA, 58 nt, Human
ggcacuuguucaccuguggagcuggacccaggggucagaugccaacugaacaacagcc

SEQ ID NO: 4153837 - RNA, 61 nt, Human
ggcacuuuggaaaaauaccuggcauauauaguaagcaguauguuggccauuaccaaaggcc

SEQ ID NO: 4153838 - RNA, 78 nt, Human
ggcagaaagaguaaacagccuucucccagcuuucuuacuuuccacagcugagaguguaggauguuuacaguaucuguc

SEQ ID NO: 4153839 - RNA, 74 nt, Human
ggcagaaaguauagagauggcaugucaaagugccuguuacacaacaggagccaaacacaugccagcuuccugcu

SEQ ID NO: 4153840 - RNA, 76 nt, Human
ggcagaaauuaugagguaacagcuuaucaacauuugaaaauauugauaguugauauccucuuaaggaauauuugcc

SEQ ID NO: 4153841 - RNA, 77 nt, Human
ggcagaaauuucuaagcagccacuuccaagaagcuuuggaaagaaauauccagggaagugcuguguggaagucugcc

SEQ ID NO: 4153842 - RNA, 77 nt, Human
ggcagaagaagaugauggggcacucaaguguggcagcgaaguugaagccggcaugggcgucccccucacuggcugcc

SEQ ID NO: 4153843 - RNA, 58 nt, Human
ggcagaagaauauggauguccuugcucaagacaagagagaaucuguccuuucucugcc

SEQ ID NO: 4153844 - RNA, 66 nt, Human
ggcagaaggauuuaaaggaaagaaugucaguggaaggauaugcuuacagcuuaaaauccagcugcc

SEQ ID NO: 4153845 - RNA, 64 nt, Human
ggcagaagugaaggcacaauuguguagacuuugucaugcagccaauucauucauucuucuugcc

SEQ ID NO: 4153846 - RNA, 58 nt, Human
ggcagaauuggcaaguauguauuuguggcauccuucggagaaacagcacaauucuguu

SEQ ID NO: 4153847 - RNA, 60 nt, Human
ggcagaauuugcagguaaagaggcuuagggcugcauguucucugugugccuucaucugcc

SEQ ID NO: 4153848 - RNA, 80 nt, Human
ggcagacugggagaggccaaguagccgcuguccuagaacuguuagaguaaguagguggcgggauuugagcccagucggcu

SEQ ID NO: 4153849 - RNA, 74 nt, Human
ggcagagaaguaacgaggaagauaaggguuagcuuaacaagguuuguuuguacagauuuuccucggucucagcu

SEQ ID NO: 4153850 - RNA, 58 nt, Human
ggcagagaaucuggcuguuuacuggguuugccuauaagcaaauggucagauuuccccc

SEQ ID NO: 4153851 - RNA, 56 nt, Human
ggcagagcauucgauggaccugguuauucaucauccauauuccauugugcuuuguc

SEQ ID NO: 4153852 - RNA, 58 nt, Human
ggagcggagggagggccacugugcuggugugaggcaaggggcuggcgaccuguguuuu

SEQ ID NO: 4153853 - RNA, 68 nt, Human
ggagcgugcagcaugagcucauaccugccugggcugcaggcuuuguuucaugauugcugucauuuucc

SEQ ID NO: 4153854 - RNA, 62 nt, Human
ggagcuacuguuuacagaugccacagugacaccgcaccucauggcacugcuuagcagguucc

SEQ ID NO: 4153855 - RNA, 71 nt, Human
ggagcuaggcauugagcuucaguagccacuaacaucacaaaaagcuagagaggcagauguccugugccucc

SEQ ID NO: 4153856 - RNA, 73 nt, Human
ggagcuagggcccuaggagagccugaagaggacccaggugugcuccaggccccugccugggccugcuggcccc

SEQ ID NO: 4153857 - RNA, 104 nt, Human
ggagcucagaggcaaaggguucaauagucaaguugguggggacuuucccuacuuaaaguuauaauuugcuaauucggaucuauugcuuuuaaauaucgaguucc

SEQ ID NO: 4153858 - RNA, 56 nt, Human
ggagcucaggaguugauuauuuucccaaagcaggaaaguccaauaccuaaggcucc

SEQ ID NO: 4153859 - RNA, 99 nt, Human
ggagcuccagaguauauagacugcuuuuagcuaguaacuaguacugggguacuaguucccagcuaaaaguaacugaguaagaagggggauaguagcucc

SEQ ID NO: 4153860 - RNA, 69 nt, Human
ggagcuccuuccucuucugagugagacucccuccuaucuuggagcaggaaguccucucaggagaagucc

SEQ ID NO: 4153861 - RNA, 66 nt, Human
ggagcucgggaaaucugugcgcucgaacuuggcuccgccaagaagcugggcaaggauccgggcucc

SEQ ID NO: 4153862 - RNA, 66 nt, Human
ggagcucguucuaccagaccccagacuuguaggaugauagaaguaugugcuggcuagaagagcuuu

SEQ ID NO: 4153863 - RNA, 70 nt, Human
ggagcugaauagggguaccuagaguggauaauaugucuuuugucuauuuaggagacccugguucugugcc

SEQ ID NO: 4153864 - RNA, 80 nt, Human
ggagcugagagucaggcacaggggaaugucuuuuucccaugaaaaggcagccucucccuaguucuuguacccacaucucc

SEQ ID NO: 4153865 - RNA, 61 nt, Human
ggagcugagcagcgauggcggaagcagcagcagcggccgcuccucgcaccucaccaacucc

SEQ ID NO: 4153866 - RNA, 65 nt, Human
ggagcugagggagguuaaggagacccuggggacucacuuguucugucugggcuucccccagcucc

SEQ ID NO: 4153867 - RNA, 55 nt, Human
ggagcugcacgcucugaagccuccuggcucugaggacucagaggcugcuggcucu

SEQ ID NO: 4153868 - RNA, 68 nt, Human
ggagcugcagucacaugguguggagcuacacaaaagcuguguuaaucagaacugugugaauuagcucc

SEQ ID NO: 4153869 - RNA, 66 nt, Human
ggagcuggcuguguggaaagggcaggcagcaacaagagcuacacuuuguuucccagagcucgcucc

SEQ ID NO: 4153870 - RNA, 76 nt, Human
ggagcuggguuuccagcaggcaggagaggagguaagcgcucuccgcaguguccugcuguguuuggaaaccccaucc

SEQ ID NO: 4153871 - RNA, 55 nt, Human
ggagcuguagaucagcuaaucucaucccuuugggguucuggugaguauaagcucc

SEQ ID NO: 4153872 - RNA, 56 nt, Human
ggagcugucuugucauuuuuuagaguaaauauucuagaaacacaugcaaacagucc

SEQ ID NO: 4153873 - RNA, 66 nt, Human
ggagcugugcugggugaucaggugagccccagccuaagccugcugccugggacacucaccagcucc

SEQ ID NO: 4153874 - RNA, 67 nt, Human
ggagcugugcugggugugcuuaugaugcacucugaggcaucaucaagggaacaccaagcccauuucc

SEQ ID NO: 4153875 - RNA, 78 nt, Human
ggagcuucagucucaagugcugcucacccaggccauguuccugcugacucugguggugaccgcagagcugugggcucc

SEQ ID NO: 4153876 - RNA, 59 nt, Human
ggagcuucuagauagagugcaaauuauugccaauacuuuguacucuucuggaauaaucc

SEQ ID NO: 4153877 - RNA, 69 nt, Human
ggagcuugcaggccaggguggacagaggggcugugaauggcacaggcucagcuuaucugggcaggcucc

SEQ ID NO: 4153878 - RNA, 96 nt, Human
ggagcuugucguguacuuccugguccuguugggguguugcagucuugccaguaccaauggcccacacaggcucauaggccaggacgaccuugcucc

SEQ ID NO: 4153879 - RNA, 100 nt, Human
ggagcuuguuagaaauggaauuucuccggcuccacccuaaacccuguucagucagaaccuuugagguuggagccaagaacucuguguuuuaacaagcucu

SEQ ID NO: 4153880 - RNA, 69 nt, Human
ggagcuuuacauguguuuugucauuucaauaauauaaggauuaucugagaucagcagcauauuagcucc

SEQ ID NO: 4153881 - RNA, 87 nt, Human
ggagcuuugaaaauuaauaucuuggcccaacuccagaccaauuauuuuagauuuucuggugguaggccuggauauuagcaguguuuu

SEQ ID NO: 4153882 - RNA, 108 nt, Human
ggaggaaagaugccagggguaaagugggaaaaugggaaccugaagccaggaggucaagccaagccaacagguguucuguuuuucagugaguauauccugucuuucccc

SEQ ID NO: 4153883 - RNA, 92 nt, Human
ggaggaaagcaacaucuccacauauggugagcagcgucccgaccaugggccucgacggccuggagugguccugcugcccguguguggcuucc

SEQ ID NO: 4153884 - RNA, 71 nt, Human
ggaggaacacugugaaauuacccuuacuucuuggcagaaagauauauuuuggugauuucauuuuggcuuuc

SEQ ID NO: 4153885 - RNA, 80 nt, Human
ggaggaagggaggaaagauguaauauuaucuaaauaucguagcaacauuuggagauagauacauuuuucuccauuuuucu

SEQ ID NO: 4153886 - RNA, 72 nt, Human
ggaggaaucuacuuacacugcuguguggccagaaggaaaggaaagcucuauacagcuguugguguuuccucu

SEQ ID NO: 4153887 - RNA, 65 nt, Human
ggaggacacuggcucugccuucccuguuuaugcggcuccuggggacagacagggccagugucccc

SEQ ID NO: 4153888 - RNA, 65 nt, Human
ggaggacagagccugugcagaccggaauguuuaagugccugcagucugguuucagcuuugccucc

SEQ ID NO: 4153889 - RNA, 103 nt, Human
ggaggacuuguuaagacacaugcagcugggcuccauccccaaaguuuccgauucaguaggucugagguggggcuggagcauuugccuuuuuuauaaguuuccc

SEQ ID NO: 4153890 - RNA, 73 nt, Human
ggaggagaaggguauguguggcggagagucugcacuuccucucuaggccauucucggugcccugcugaccucc

SEQ ID NO: 4153891 - RNA, 60 nt, Human
ggaggagagagguugcaaacaccaccaaagauuuaugguguucucauuuucuuuccaucc

SEQ ID NO: 4153892 - RNA, 69 nt, Human
ggaggagaggaggaguauauauuagaaucacccagagggauuuucaguuaugcccucucuuguucuucc

SEQ ID NO: 4153893 - RNA, 76 nt, Human
ggaggagaguuuuaguucucccagucuugauucugucccuugaagagguuaggaaauagggcuguaaacuuccucc

SEQ ID NO: 4153894 - RNA, 59 nt, Human
ggaggagauuccccucucacuuuccagaaaaaggacaaagggaauuaggaaucuuuucu

SEQ ID NO: 4153895 - RNA, 57 nt, Human
ggaggaggaaggggggaaggguuaaaugaacagaaggccacccucucuuauuccucc

SEQ ID NO: 4153896 - RNA, 75 nt, Human
ggaggaggcucuggggccucagggccuacuguauacuccucugugacucugaaccugaggcuugggaguuccgcc

SEQ ID NO: 4153897 - RNA, 58 nt, Human
ggaggaggggggccgcaccugaaaucucauuugcagcuguuacggacccugucauucc

SEQ ID NO: 4153898 - RNA, 60 nt, Human
ggaggaggggugacugaaugcuuucccgcacugguugcauucauaggguuucucuccacc

SEQ ID NO: 4153899 - RNA, 112 nt, Human
ggaggaguaagaaggugggaauggggacauuacagaaugcaugguuagaaacaggcagcucugaccucugagccaauuucuguguccaguuuccccguccacuugcuguucu

SEQ ID NO: 4153900 - RNA, 103 nt, Human
ggaggagugugcaggcauggccaggcaccucuggcugagggcagggcagggccuuagccaggggagcagcuuguccacuuacugccagccuuguucacgcccc

SEQ ID NO: 4153901 - RNA, 100 nt, Human
ggaggauaaaugauggucuaguucuagucaggcucaaacuuuuauccuuucugcuuuugagagcugccgagcuggggccaugggaccaacagcugaugcc

SEQ ID NO: 4153902 - RNA, 88 nt, Human
ggaggaucacuugaaccuggaagguggagguugcagugagcugagaucaugccacugcacuccagccugggcaacagagugagauucc

SEQ ID NO: 4153903 - RNA, 65 nt, Human
ggaggaucugggagugucccucugguaauaagccucuuauccccaggggcauucaagcuuccuuc

SEQ ID NO: 4153904 - RNA, 87 nt, Human
ggaggaugcaaucuuauugugucuuugaauaaguacccaggcuaguauggggacuuguguaacacagaaagaacaucugcaaccuuc

SEQ ID NO: 4153905 - RNA, 83 nt, Human
ggaggauuugacagauuugguggagcaaaugcgcgaugauacagaaggugcgugccacaccaacaucuuucagcuuuuucucc

SEQ ID NO: 4153906 - RNA, 69 nt, Human
ggaggccuuacaggguugcagcauugacggguggugcgucugucacucgcucagucccuguggcccucc

SEQ ID NO: 4153907 - RNA, 78 nt, Human
ggaggcgcauagcucaagaucagggugccagaauggcugaguugugauuagggcucucuggcuugcacaguuaccuuc

SEQ ID NO: 4153908 - RNA, 86 nt, Human
ggaggcgccggaggaggagacggaggccuggggacggcagaagaggcuucgccugagccgagcgcucuuucucucgccgcgccguc

SEQ ID NO: 4153909 - RNA, 58 nt, Human
ggaggcggggaaggcaucccaucacccuaagaccugugggugcaaguucucugucuuu

SEQ ID NO: 4153910 - RNA, 69 nt, Human
ggaggcucauggggcauggaugauaagcuggaucaccuugagcuaauggcuaagccccucugagccucc

SEQ ID NO: 4153911 - RNA, 60 nt, Human
ggaggcuccgguaguagccuugauucaacauuuuguucaguaauguuuaugggggccucc

SEQ ID NO: 4153912 - RNA, 59 nt, Human
ggaggcugaggcaggcaggaguucaaggcugcagugagcugucugugccacggcacucc

SEQ ID NO: 4153913 - RNA, 76 nt, Human
ggaggcugagguaggaggaucgcuugagcccgggaguaggaggcuccagugaacuauguucgugccacagcacucc

SEQ ID NO: 4153914 - RNA, 88 nt, Human
ggaggcuggaggcccggcccugggacuuggucugggguuucuugaggaagaucugaggguccaagggaggaaggaugcccuggccuuc

SEQ ID NO: 4153915 - RNA, 62 nt, Human
ggaggcuggcccgguucgaagcuggcugcuccagggcacuaaagcuggagaagggcccuucc

SEQ ID NO: 4153916 - RNA, 62 nt, Human
ggaggcugggcugggcuggguuccaaggcagggcggagccucccagggaagccgcagucacc

SEQ ID NO: 4153917 - RNA, 62 nt, Human
ggaggcuguguugcaaauguguauguuguguuacugcaaauaucacacccaguacagucucc

SEQ ID NO: 4153918 - RNA, 89 nt, Human
ggagggaaaaccaccagcacggguguuggcagccugaugcaagggugcucccggcucugacuuccugcgcuccagguugguggcccucu

SEQ ID NO: 4153919 - RNA, 124 nt, Human
ggagggaaaaugccaucagcacaacaguggccagcucugcauguuucccuugaguugcuucucuccagagguuuagcaggguugggguuuuccacugggguuuacaucuugggauuugucuucc

SEQ ID NO: 4153920 - RNA, 114 nt, Human
ggagggaagaaaaugaaaggggcuuuugugcagagaggaaaaggggcaaggcugcaugucaaagcaaggucagucuuuucugccagcugagcccugcaucucaugguuccaccc

SEQ ID NO: 4153921 - RNA, 92 nt, Human
ggagggaagaggcaggcugugggucucaggcucagccuaggacacuucccccagggcuggauccuccagacuccccuuccccacuuuccucc

SEQ ID NO: 4153922 - RNA, 56 nt, Human
ggagggaauugggaguggaagacaccgaaaggaaaccagcuuucccaagucccuuu

SEQ ID NO: 4153923 - RNA, 64 nt, Human
ggagggacaguggcuucuuccuagagccacuuugcaguguucccuugaggccagcuguccaucc

SEQ ID NO: 4153924 - RNA, 78 nt, Human
ggagggaccugugugccagggcaugcacagggcucgcagacaugcccugggcaucucaugcaccugcacauucucucc

SEQ ID NO: 4153925 - RNA, 77 nt, Human
ggagggacucacucaaggucacacagauagcaacaagaggcagagcuaggucuggaaccaagacguguagcuccucc

SEQ ID NO: 4153926 - RNA, 59 nt, Human
ggagggagcaaguaagguaagagcggugacaaccguaguuaccaauggcuucucuuucc

SEQ ID NO: 4153927 - RNA, 58 nt, Human
ggagggagucagcugauuagaaucacagagcuauuucugaugggucugaaaucccucu

SEQ ID NO: 4153928 - RNA, 67 nt, Human
ggagggcaaaguaauuuggagauauauauauauauauauauauaauuugaaaauacucaugcucuuu

SEQ ID NO: 4153929 - RNA, 55 nt, Human
ggagggcccucugggcacuguggcagugauuggaauugccacaaaacgggccccc

SEQ ID NO: 4153930 - RNA, 79 nt, Human
ggagggcgggggagagacgagcggcucuggccccuuaauuguacuucgggcucguauugucucuccuuucgccaccucc

SEQ ID NO: 4153931 - RNA, 115 nt, Human
ggagggcuagggaggagggcaggcuccccagcuggggcaacgcaccagcuccuugaagcuguucuguggcucggccagcugcugaagccucuccuccugcucccgaagccucucc

SEQ ID NO: 4153932 - RNA, 87 nt, Human
ggagggcucuucucucuaugccuuggggaauauccauucuucagcccccaagucugaguccccagaguaugugggaaaagucucucc

SEQ ID NO: 4153933 - RNA, 88 nt, Human
ggagggcugggcccagcucccaaggcugagguuccugagcugggcagauacaggacagcagccauuggcagucacggggcagcccucc

SEQ ID NO: 4153934 - RNA, 96 nt, Human
ggaggggcgcgcgcccgggggccgggagcucggagauccccgccagccggggcgcaagaaccaggucuuggcccccggaccugcuugugucccucc

SEQ ID NO: 4153935 - RNA, 59 nt, Human
ggaggggcucuuuaauaguaacacugaauagcaaccaguacuagcaacugggcuccuuc

SEQ ID NO: 4153936 - RNA, 89 nt, Human
ggagggggaaggaacucugaccugcaggcacagcaaugucccuacauucaaguucuucugucuuugcagucagucacccugcuccuucc

SEQ ID NO: 4153937 - RNA, 77 nt, Human
ggaggggggcagaaguagugccccugacaucuggugggucauaggugcucagucguuauuuauuuuugcucuccucc

SEQ ID NO: 4153938 - RNA, 59 nt, Human
ggagggguggucaccuggcagggcgguggugaggccggcccgugccugcccuucccucc

SEQ ID NO: 4153939 - RNA, 73 nt, Human
ggaggguaacucagagacaauuuggcuucaggaagguacaguuagaagcugccaaugauucaaguugcccucc

SEQ ID NO: 4153940 - RNA, 66 nt, Human
ggagggucugcauuccaacuuggggguuuccaguagccuaaguuugaaaaugcaaaucaacccucc

SEQ ID NO: 4153941 - RNA, 77 nt, Human
ggagggugaagggggugugcagggcagaggggagacuaccagcuccucucucuuuuuugaacccgcuccaccucucc

SEQ ID NO: 4153942 - RNA, 68 nt, Human
ggagggugacgccagcugugcuggccucgaagacgugcucgaauuccccagcauagcggcucacaucc

SEQ ID NO: 4153943 - RNA, 113 nt, Human
ggagggugaggacagaagcagggacaccaacugggaggcuguggcagggccccccgagagagaugccagggccucgggcucaguggguccaucuggccucugcuucacccucc

SEQ ID NO: 4153944 - RNA, 79 nt, Human
ggagggugcuaacguggucaccugaauuaugcaugucuauuguguucaaauaucauaaaucggugcaugaauacccucc

SEQ ID NO: 4153945 - RNA, 60 nt, Human
ggaggguugacucuaccuggcagauaucaaaucuaacuugagguuuugacucagcuuucu

SEQ ID NO: 4153946 - RNA, 59 nt, Human
ggagguaagaggcccugggccaaggugcagugacccugcaggccagcccuccaaccucc

SEQ ID NO: 4153947 - RNA, 79 nt, Human
ggaggucaucuagagaauguggacgugugccagaccuaaauuaggagugcaauagugccuauucucuugagcacugucc

SEQ ID NO: 4153948 - RNA, 60 nt, Human
ggaggucccaggggguggcgugugccucuuugagcacaugcaggccuaugguggggcccc

SEQ ID NO: 4153949 - RNA, 65 nt, Human
ggaggugaaacuguuuaguuuuugcagguagaauucuaagucuguagaaaaacaguuuaauuucc

SEQ ID NO: 4153950 - RNA, 100 nt, Human
ggaggugagcgacgcuuccuucuugggacccuccugcucucuggucuuggcaaaccugccaggcacaggugggccucagaaccagcccguuuauagcucc

SEQ ID NO: 4153951 - RNA, 83 nt, Human
ggaggugcccacuugguaaagcacaauuucaccuucuuguaaaccacagggcagagugaaaugcuaugaaugugggcacaucc

SEQ ID NO: 4153952 - RNA, 55 nt, Human
ggaggugcugaucccagucaacgaaaaacuuucaacacggcgaagaagcaucucc

SEQ ID NO: 4153953 - RNA, 64 nt, Human
ggaggugcuuccuuugggcucuggguauauuaaagaaaaugaauagaauggaaggaauaucucc

SEQ ID NO: 4153954 - RNA, 89 nt, Human
ggagguggagaauaaacuccucagcuuccuugcccuuugagaguaggguaaggaguagacagcuuggaagauuguucuacauugucucc

SEQ ID NO: 4153955 - RNA, 66 nt, Human
ggagguggagcccucaugaauaaggagcccuuauaaaaggguccugagagaggcuccuugcccuuc

SEQ ID NO: 4153956 - RNA, 77 nt, Human
ggagguggcuaucugcuucauauuucauagugaucugguuacagauucuauggguaauggagucucagcaaaccucu

SEQ ID NO: 4153957 - RNA, 77 nt, Human
ggagguuacucaagccugccuucuccuagcagaagccauaauuccacuucugaguaagguauguuuguguaguguuc

SEQ ID NO: 4153958 - RNA, 102 nt, Human
ggagguuacuugagucuuuagguagcagggagcaugccauuuuucuuuauacucuuggcauucauucaggcucccaggggcaaguuagugaccagcaaaucc

SEQ ID NO: 4153959 - RNA, 65 nt, Human
ggagguucagaggugcauggacacucuguggaugaugacuuaugagauguaccauuugaaguucu

SEQ ID NO: 4153960 - RNA, 107 nt, Human
ggagguugcguaaguguuaucaagacaggcagcagauggaguguugaaauauauggacucagggcugagucugcugccugucaaauccuagcaauuuacuuaacccc

SEQ ID NO: 4153961 - RNA, 55 nt, Human
ggagguugggaaguccaagcuggcagauuuggugucugcuaagggcccacucuuc

SEQ ID NO: 4153962 - RNA, 79 nt, Human
ggagguuuaaauuuagaaauucaucuauggccuuucccuuuauaaagaaagccaaaacaugugaguuuugaguuucucc

SEQ ID NO: 4153963 - RNA, 56 nt, Human
ggagguuuuguaagugcuccucauuuaugaaaauuuugcagcacuugaaaauuucu

SEQ ID NO: 4153964 - RNA, 60 nt, Human
ggaguaaacaguguguguuacaaaguaguacauaaaguuugaaaugcacacauuuacucc

SEQ ID NO: 4153965 - RNA, 65 nt, Human
ggaguacacagagacucaaaagggcaagaaaaauucauuacucuucccucucagaaagugacucc

SEQ ID NO: 4153966 - RNA, 78 nt, Human
ggaguacguggcagugaaaacgaguggaucaaaaccaaacacuaugaggacacuugggagcauugcacaugugccucc

SEQ ID NO: 4153967 - RNA, 96 nt, Human
ggaguagauucuguuguuggaguaaaaauaacuuacugaaucuuuuauauggaacacuauaggaaauuagaagugcucaggaauagaguuuagccc

SEQ ID NO: 4153968 - RNA, 77 nt, Human
ggaguaggaagaacauuuaggggcucaagauucuccucaaaccacugagaucacagcccccagaugccaccuauuuc

SEQ ID NO: 4153969 - RNA, 86 nt, Human
ggaguaggacaacaagaaaugggagagauguuuauguauguuuuuagaacauucugggugauguucuucaguucuuuguuccaccc

SEQ ID NO: 4153970 - RNA, 58 nt, Human
ggaguaggccccgggagagagugggauaaagaguaacuuucucccggcacuccugccc

SEQ ID NO: 4153971 - RNA, 72 nt, Human
ggaguaggcuguaugaauauaccacaauuuagggaaccagaacccugauauggugucauuuaaacagcuucc

SEQ ID NO: 4153972 - RNA, 92 nt, Human
ggaguauccuggggaucaguucaaaugcagauucaggaguucuggggccaggccugagacucugcauuuauagcaagcccccaggugacgcc

SEQ ID NO: 4153973 - RNA, 91 nt, Human
ggaguauucacagagaguaugcagagaagcuguguuuccugacugcagguccaaucauugauuucucuguaguugccugguggaggauucc

SEQ ID NO: 4153974 - RNA, 77 nt, Human
ggaguauuuugauuuacuggauauucucagagucaguaaagaaugacaguggguaauauguguggaucacagauucu

SEQ ID NO: 4153975 - RNA, 77 nt, Human
ggcagagcugauacccuggacucgcccaugcaacucucugacacugaaggcucugcaugcuucaggcuggcucugcc

SEQ ID NO: 4153976 - RNA, 77 nt, Human
ggcagaggaagcagcuggccugagcgguggcgggugagggcaacacgcugucacugggaggggcagcagucccugcu

SEQ ID NO: 4153977 - RNA, 60 nt, Human
ggcagaggaaucugucuagacacaaggcgauugucauuccuuguuccagauccuucuguc

SEQ ID NO: 4153978 - RNA, 64 nt, Human
ggcagaggagugggccguuaugguaugagccacuuagccguggccagagcccagucucucugcu

SEQ ID NO: 4153979 - RNA, 70 nt, Human
ggcagaggccaggcgagacacccggcugcggccuaagaggccaggcugggugggcuuggcugcagccgcc

SEQ ID NO: 4153980 - RNA, 56 nt, Human
ggcaacauucuccagauccuuuccaggguaggaugggcucugguugagugugggcu

SEQ ID NO: 4153981 - RNA, 109 nt, Human
ggcaacauuuguuucccagcuguuggaguuucacugcauuaguagccaaaugugaucagcugaaagaguggugagacguucaauagcugcugcuucugaugauuuugcu

SEQ ID NO: 4153982 - RNA, 67 nt, Human
ggcaacguggagagaauagggcaccagacaggguuguuuggaaagauuaaauccuccaaaguuagcc

SEQ ID NO: 4153983 - RNA, 68 nt, Human
ggcaacuagaauuuuaauuggguauauauugacaaauuauguuacaugagagaaguucuaaaguugcc

SEQ ID NO: 4153984 - RNA, 55 nt, Human
ggcaacuugugucucgacagcuccccuagggacuuuauguagagccagguuugcc

SEQ ID NO: 4153985 - RNA, 57 nt, Human
ggcaacuuucugcagcugagacagacccuaaaggagcugacaguuggagacaagucc

SEQ ID NO: 4153986 - RNA, 111 nt, Human
ggcaagacuuuccguguccauccuuccugaucuguccuccucagagcccagucucauccuggguacucaguuacgggaaagauguccuggaggggugaccacgugucugcc

SEQ ID NO: 4153987 - RNA, 73 nt, Human
ggcaagauggguaaagucuccccaaccuuaagcugacccuuggcucacucugggcggggcuuuucacucugcc

SEQ ID NO: 4153988 - RNA, 72 nt, Human
ggcaagcaugcagggaccuggaaccgaaacucagcaaagagugucauuccagggacccucgcccagcaagcc

SEQ ID NO: 4153989 - RNA, 67 nt, Human
ggcaagcuggcccuggugagaagcucccuuuagcaaccaauuuuaggagauuccacaauaguuuguc

SEQ ID NO: 4153990 - RNA, 60 nt, Human
ggcaaggagagaggaugagacuggaagucuggaguucuguguucauucuuucuacuuacc

SEQ ID NO: 4153991 - RNA, 62 nt, Human
ggcaaggccagauucucucuaggggccaagacuuucuggccucuucuagcucuggcguuucc

SEQ ID NO: 4153992 - RNA, 71 nt, Human
ggcaaggcgagggcgcugcuucaagaagccggguucauucaaaccccgaggacagcaaaccccgccucccc

SEQ ID NO: 4153993 - RNA, 72 nt, Human
ggcaagggcaaacaucuuuauuuggcaaggucuguauuuuaaaucugauguuucuagaugcuugcccuugcu

SEQ ID NO: 4153994 - RNA, 80 nt, Human
ggacaaggucagcccaggucggggagcacugggugggaugcacgguggccucagccagcucuuggacucugaccuggucc

SEQ ID NO: 4153995 - RNA, 75 nt, Human
ggacaaugaauccaggcagugauccaccaaugauaacuaacaucauaaaaagauacauggccggauaugauguuc

SEQ ID NO: 4153996 - RNA, 98 nt, Human
ggacaaugacgggguggggaggcaucccauccagccucagagggcccagagaauggcugagcaggacagugggagaccagacccuaccccgcaacucc

SEQ ID NO: 4153997 - RNA, 77 nt, Human
ggacaaugauuuuuccauugcaggauaauacucuuccauuagaaguugucuccucaggauaaaaucacaucuuguuc

SEQ ID NO: 4153998 - RNA, 80 nt, Human
ggacaaugcuaaguauuauuaaugacacaacaguuccuuccugcaggggaugggugguuccugguucacuuggcagcucu

SEQ ID NO: 4153999 - RNA, 78 nt, Human
ggacaauuuccuuaugcugguaaugguuauuucuguguacucuucugaugcggugaauugacuguuucuaguuugucu

SEQ ID NO: 4154000 - RNA, 80 nt, Human
ggacacacacuacugagagaccaagcaagaugaaaagagaaagggaacaucagcuggugagcuuaguagggugaaaagcc

SEQ ID NO: 4154001 - RNA, 82 nt, Human
ggacacaggaaagguggcccucugauagggucagggucugugacccagugacuaacagagaggcuuccucuucccugaugcc

SEQ ID NO: 4154002 - RNA, 74 nt, Human
ggacacaguggaagacagcuuggaguaggaaaaggacugaagacugcagcagccaggugaacuucuauucgucc

SEQ ID NO: 4154003 - RNA, 60 nt, Human
ggacacauuuuacugacucuugaauuagcaugauauugcuaaaugagagaaaguaauucc

SEQ ID NO: 4154004 - RNA, 70 nt, Human
ggacaccuuucggccugccuguuccucucucugcugucccccagcagcagagcuggcuucaugggugugc

SEQ ID NO: 4154005 - RNA, 73 nt, Human
ggacacucagggcacaggccuguggguucccuggaauuuucuagcaugauccaguuucuguguccaguucucc

SEQ ID NO: 4154006 - RNA, 76 nt, Human
ggacacugcaccgggcccugagguuuggcucugcaggcagaugugcagcaaacaggccuucagggcgacagggucc

SEQ ID NO: 4154007 - RNA, 58 nt, Human
ggacacugcauauguugaguuaguuguuacaguucuggcucagaguauugcacuguuu

SEQ ID NO: 4154008 - RNA, 64 nt, Human
ggacacuggagacugugucuuuugauucuucuuucugagaauucuuucaaauagcuucaggucc

SEQ ID NO: 4154009 - RNA, 69 nt, Human
ggacacuuggggugguaaggcagccugggagccagaaccccugggcugcccagcaggccccaggggucu

SEQ ID NO: 4154010 - RNA, 67 nt, Human
ggacagaagcccugagucaggcccaagccuuggaauccuccaugcaacccuggccagacuucugccc

SEQ ID NO: 4154011 - RNA, 61 nt, Human
ggacagagggcaggagcccagacuuuggcugcugucuuuggucuagcccucccuccugucc

SEQ ID NO: 4154012 - RNA, 67 nt, Human
ggacagauauauuuaagguaauaaguuugguugaaauaucuaauuuaugacagaagauaugcugucu

SEQ ID NO: 4154013 - RNA, 71 nt, Human
ggacagcaggucacagcugauuggccaggacucuccauagguuauggccagucuuagcugugccugcaucc

SEQ ID NO: 4154014 - RNA, 67 nt, Human
ggacagcugagaggccugggcccgugagcucuugcagaggaguugacacgcagaggggcugcugucc

SEQ ID NO: 4154015 - RNA, 58 nt, Human
ggacaggauaagagacacugccuaucauuaaaaccagggacgaugucucucuccuucc

SEQ ID NO: 4154016 - RNA, 57 nt, Human
ggacaggguuccaaugggcaugggguguugcaaguucuccuguucaugacucugucc

SEQ ID NO: 4154017 - RNA, 68 nt, Human
ggacaggguuggggcauauaaaacaggucccuaaagagaugacagaccuuguccuuuuacccgugucc

SEQ ID NO: 4154018 - RNA, 60 nt, Human
ggacaggugugaggcuggcacauggccgggcaacuccacugccagcugcugcaucugucu

SEQ ID NO: 4154019 - RNA, 94 nt, Human
ggacagguucaaacacagacucugggcccacccucagaguuucugauucaguacuguggggugaggcccaagaaucugcauuucugacaagucc

SEQ ID NO: 4154020 - RNA, 79 nt, Human
ggacaguggcuauggcccaggccaggauccagcuuuacaccggaagcucucccgcagccuggugggcccgcccugcuuc

SEQ ID NO: 4154021 - RNA, 66 nt, Human
ggacagugguacaugccaguccucccagcaauuugggaggccaaggugggcagaucacuugagucc

SEQ ID NO: 4154022 - RNA, 55 nt, Human
ggacaguuuccuggaugugggcuccuuaggaucuggcucauucagggaacggucu

SEQ ID NO: 4154023 - RNA, 63 nt, Human
ggacaucugucuucaucagcaugugaucugguggagauacgugcuguuuuaagauacagguuc

SEQ ID NO: 4154024 - RNA, 68 nt, Human
ggacaugcucuccucacauuucccugugucuacaccuggcaacaagacagcugggaaauggagugucc

SEQ ID NO: 4154025 - RNA, 68 nt, Human
ggacauggagcauguagagaaaagaauccaaagagagaagcuuugguguucacucauucuccauuucc

SEQ ID NO: 4154026 - RNA, 60 nt, Human
ggacauugcaguagccugggacugagagugagucuucccacauccaggccugaagugucc

SEQ ID NO: 4154027 - RNA, 77 nt, Human
ggacauuuaguuucauugggcaguuucugaguacagcuucuuuccagcuuauaucugcucugaaaucuuauaugucc

SEQ ID NO: 4154028 - RNA, 68 nt, Human
ggacauuugcaccuaccucagcgucaaaauuaagaugcugauuuuagccaagguaggccaaguagucc

SEQ ID NO: 4154029 - RNA, 78 nt, Human
ggacauuuguuuacgguuugagagcuggaacaaggcggcagagcaucguccuauacagccucagcugagauuuugcac

SEQ ID NO: 4154030 - RNA, 73 nt, Human
ggaccaagcacucccgagaggaagggcaugcucaaauuguuucuguaaaaagucucuggcgguguuuggcucc

SEQ ID NO: 4154031 - RNA, 56 nt, Human
ggaccaaggcccuguuucagcccuucccaaccugcacuagcuggggccucuggucc

SEQ ID NO: 4154032 - RNA, 95 nt, Human
ggaccacugccugucaucccuaggcgaaggucugggugggcagggagccucaugcccuaccucaggccuguccuccuggggguggcugugagucc

SEQ ID NO: 4154033 - RNA, 124 nt, Human
ggaccacuuggucacucauggggcaaugcaggcucucccaggugggugccuggagcagcagugacuaucuaugacuucacaucucugcccucacuuggggccuguugccuuuggcccuuggucu

SEQ ID NO: 4154034 - RNA, 58 nt, Human
ggaccagagaagugagcaccugcuaaggauguaacuugugcuuuguuucuuugugucc

SEQ ID NO: 4154035 - RNA, 82 nt, Human
ggaccagcgucuugccccgcccaucgccgucugagguuaggacaaagaucgagaggcuggacagggcuggggagggcgcucc

SEQ ID NO: 4154036 - RNA, 104 nt, Human
ggaccaggugaugaggaauaguuuauguagcugaaugccuagacaaguuaaaaaagaggcaauguaugugauuauuccucuaccaacugcauuacuaccuggcc

SEQ ID NO: 4154037 - RNA, 66 nt, Human
ggaccaguggggcuggaugcucccggaauacccuagggaagguagggggcuggcucaacuggaucc

SEQ ID NO: 4154038 - RNA, 60 nt, Human
ggaccaugaggagaugggccucagaagauaaauuauucuccuuucauccuucaguggucu

SEQ ID NO: 4154039 - RNA, 64 nt, Human
ggacccaccaggccgggcuccagugguccccucagcccaggacaagggagcugggccugguucc

SEQ ID NO: 4154040 - RNA, 78 nt, Human
ggacccagcgaagaaccuagcggccgaaaagagucccaggaaaugugccccccgggauuacugguauuugcuggcucc

SEQ ID NO: 4154041 - RNA, 59 nt, Human
ggacccaugcguuuaauuucucuugggcaaaugcccagaaguggaauggccgugggguc

SEQ ID NO: 4154042 - RNA, 83 nt, Human
ggaccccagcggagcugcgccgggacacgggaccgcccggcuggccgggacaagcccgcuggcgcagcccucggccuggggcc

SEQ ID NO: 4154043 - RNA, 59 nt, Human
ggacccgcugccagggaauucacaagcccgcuucugcuguggccugggagcugaggucu

SEQ ID NO: 4154044 - RNA, 65 nt, Human
ggacccuuggcuucugcagauuuaaccuuucuuauuuugugguuuguguaaaguccgugggugcc

SEQ ID NO: 4154045 - RNA, 77 nt, Human
ggaccuaggccuuggacuuguguuugguagaagaggugcucuuauuugcugggucagaagccaggagcccaggugcc

SEQ ID NO: 4154046 - RNA, 106 nt, Human
ggaccuauauuucaugaugaugguggccauucuaccgccuucuugcuuccccaugggaggagagaugggcacgugguaauacggcuucaucugauuucugcagucc

SEQ ID NO: 4154047 - RNA, 93 nt, Human
ggaccucuaaggcaacugccucauuagcaaguuguuauccuuugguggcauccagagagaaagauagcuucuaagaacuacagccucaggucc

SEQ ID NO: 4154048 - RNA, 118 nt, Human
ggaccugaucuccaggacucagaagcacuuggaggaaggccuauucacuuagaagcaguuaccagugcugggcaguguccuccaagugccagaggagugcuguggagaaaagaagucc

SEQ ID NO: 4154049 - RNA, 81 nt, Human
ggaccugaugugggccagcuuuucuccugggugugugacugaauccuucuucccagagcaugugcugccuuuguuaggucu

SEQ ID NO: 4154050 - RNA, 64 nt, Human
ggaccugcccuggcucagaugcuccauaccccacaggagccaauagcucuuggggcagcagucc

SEQ ID NO: 4154051 - RNA, 78 nt, Human
ggaccugcucgcuguccgcucgggugcagagggcagaccccggucucuccuccacaccgggugcuggcgggcgggucc

SEQ ID NO: 4154052 - RNA, 76 nt, Human
ggaccugguaacgcugcaucuuucccuucccuguuugauucuuaggguggcaaagccuuccagcuguuaccagucc

SEQ ID NO: 4154053 - RNA, 72 nt, Human
ggaccugugucuuugccucagggucuucucuggauacuuggagaaaugcuuggccugaguauaggacaggcc

SEQ ID NO: 4154054 - RNA, 74 nt, Human
ggacgaauuuagugcugggcaaaaugcauuuccugccuuuuaaaggaauauggauuugcucagcugaggacucc

SEQ ID NO: 4154055 - RNA, 61 nt, Human
ggacgcagcgagggaagcagccucaugagcaggccugagucucugcggucucacugugucc

SEQ ID NO: 4154056 - RNA, 77 nt, Human
ggcaagucaggaagaguagcagaggcagaggcagccagcaugugcugccagucuaugcugcucggcacugcuuggcc

SEQ ID NO: 4154057 - RNA, 63 nt, Human
ggcaaguuugaugaguuucuggaggcuuugaauuugaaguuuuccuaaauuuuuagauuugcc

SEQ ID NO: 4154058 - RNA, 68 nt, Human
ggcaauaauuuacauuggauaccaauugcaacacagcaaguggacuccgugaaguaaaucuacuugcc

SEQ ID NO: 4154059 - RNA, 82 nt, Human
ggcaaucucagaaacggagcugccauuuuauguaacgugaaaaaguaaaggagaggcaguuuugugaagcugaaagauucuc

SEQ ID NO: 4154060 - RNA, 113 nt, Human
ggcaaugauauucuuuuaaacaucucuuacagucuuaugguuaaauagaugcucuuugaacaacucuacagaugguaccauggguaggacaugcaugcuggaguguuacuguc

SEQ ID NO: 4154061 - RNA, 57 nt, Human
ggcaauucauguuaaacagaagcaguccaguacugccauguuuaaaguugaagggcu

SEQ ID NO: 4154062 - RNA, 75 nt, Human
ggcaauucuuguguggaguguccugugcauuguaggauguucagcagugucuuugaccuccacccacgaaaugcc

SEQ ID NO: 4154063 - RNA, 61 nt, Human
ggcaauugucguugacauccuucacuguaaacgguuggagugauguugauacaauguggcc

SEQ ID NO: 4154064 - RNA, 59 nt, Human
ggcacaauauggccucuugggaggaaauagagacagacucggagaggcccggcugugcc

SEQ ID NO: 4154065 - RNA, 55 nt, Human
ggcacacagauggagcacuagcuaaaucguaacuguugagugucacgucagugcc

SEQ ID NO: 4154066 - RNA, 57 nt, Human
ggcacacagcuuggcaggagaugcuuucauucaaguguugaucaccuacugugugcc

SEQ ID NO: 4154067 - RNA, 73 nt, Human
ggcacagacccucuuauuccuacaguaacagguccgcugcuggcccuggauaggggugggaguggccugaguc

SEQ ID NO: 4154068 - RNA, 57 nt, Human
ggcacagagcagauucucccugugucuuuucacagggcucagauuucauucugugcc

SEQ ID NO: 4154069 - RNA, 71 nt, Human
ggcacagagcccagcuuccuaguucaccaccaaugagccagguguuuugcuggguugcuuguuuuugugcc

SEQ ID NO: 4154070 - RNA, 57 nt, Human
ggcacagccacuuuggagaacuguggggcagcuuuuacuaggaaguggccaugugcu

SEQ ID NO: 4154071 - RNA, 71 nt, Human
ggcacagccugugacauugacuaugaaacuguuuccuauuaccucuuuccugucuaaagucaagguugucc

SEQ ID NO: 4154072 - RNA, 66 nt, Human
ggcacaggagagguuaaugggggccugaaagcaccaccccuggaccaucagcuaaccuucuuggcc

SEQ ID NO: 4154073 - RNA, 72 nt, Human
ggcacaggcucauaguaagcacauggacaagugggcacagguucacaggccagaugcauacuaagcauggcu

SEQ ID NO: 4154074 - RNA, 88 nt, Human
ggcacaggcucugagacugcuggccugggcucaagaccaguucacaugcugcuccaggauuucaggccagguccuuaccucccucacc

SEQ ID NO: 4154075 - RNA, 83 nt, Human
ggcacaugaugcugacauauuguuaauaacuauuacauugaugauacuugccauuaauggcuaauaguguguauucaauggcc

SEQ ID NO: 4154076 - RNA, 67 nt, Human
ggcacaugcaugguguuggguuggaugaacccauccaagaucuagccccaaccccaugacacagucc

SEQ ID NO: 4154077 - RNA, 61 nt, Human
ggcacauguacaguggaaacuaacaaauugcuucaauuuguaguucaacucgugcauuguu

SEQ ID NO: 4154078 - RNA, 79 nt, Human
ggcaccaauguuuauuuuccugcugcaaaacugucaauguucccaaauauugguacaggaauuguaaaugauuuaugcc

SEQ ID NO: 4154079 - RNA, 57 nt, Human
ggcaccagcaggcaccgaugccagcugguuggcauccagguagagcuugcggguguc

SEQ ID NO: 4154080 - RNA, 68 nt, Human
ggcaccaugcacagagcuuggucauugcugcauuucgcaccaacuaaggcaacucuggccuugcuguc

SEQ ID NO: 4154081 - RNA, 57 nt, Human
ggcaccccaacggucggcccccacccgggcuccuggagccaacgcgcuggggcugcc

SEQ ID NO: 4154082 - RNA, 61 nt, Human
ggcaccccaggccuggggccugaucccaggagcacacccuacaggcccagcgcugggggcu

SEQ ID NO: 4154083 - RNA, 94 nt, Human
ggcacccgcaggcuuggggcagcuuccagagcuuugcgcuuggaacagaagguuccccuugggcuguggaggaguagagggcuugugcgugacc

SEQ ID NO: 4154084 - RNA, 58 nt, Human
ggcacccugauggccagauuguggagugaagcucuaagccagugggccacagggagcc

SEQ ID NO: 4154085 - RNA, 57 nt, Human
ggcaccgugaccacccuggcccuggcucuacguuucggaggcucugggcauggcgcc

SEQ ID NO: 4154086 - RNA, 109 nt, Human
ggcaccucuguucacccuccaugugcaugucuuuggaggccucccagaacuugagccaugauggucugcccugcagacaugccucagcuggaggauggauggaggggcc

SEQ ID NO: 4154087 - RNA, 124 nt, Human
ggcaccugccagcucucucccuugggccuucuaccuggagcaggaggcagaaucccauucuccuagggagucuguguauauucacugcccaggaguguuccagcagauugccccaucaggugcc

SEQ ID NO: 4154088 - RNA, 72 nt, Human
ggcaccuguaaucccagcuacuagggaggcugagaaucgcuugaacccgggagguggagguugcagugagcc

SEQ ID NO: 4154089 - RNA, 77 nt, Human
ggcaccuguuuguuuguaacugacaugaucugauccacacacucggguacaauuaagugcacaaauagucauuugcc

SEQ ID NO: 4154090 - RNA, 116 nt, Human
ggcaccuucucuguguuagguuuuagaaguuaguggauaaacagcaaaaugcuuuuaagagaauguuuuguauauuuauugauuuuguuaauacucauuacacaguuuagggagcu

SEQ ID NO: 4154091 - RNA, 73 nt, Human
ggcaccuuggacauacugagaugggaguccugguauaaaugggcuuccucagaaaauacuguccaaccaugcc

SEQ ID NO: 4154092 - RNA, 85 nt, Human
ggcacgaagcugaagcuguuagggagugguagguuuggaguacaguacaugcucugaaauaucuagccuuuagcagcuucaugcc

SEQ ID NO: 4154093 - RNA, 60 nt, Human
ggcacgagccaguguguguguuuccaaaguagguuuggagcagcaggugaccucgaugcc

SEQ ID NO: 4154094 - RNA, 83 nt, Human
ggcacgcaccuguaaucccugcuacuugggaggcugaggcaggagaauugcuugaacccgggaggcagagguugcagugagcc

SEQ ID NO: 4154095 - RNA, 65 nt, Human
ggcacgccacccacgaagaugagcggcauggccuugccauagcgguauuccacgugguuggugcc

SEQ ID NO: 4154096 - RNA, 71 nt, Human
ggcacgggcaaucagcauuuuuacauucauguagcacuuugcaguggugguaaagaugcucuaauugugcc

SEQ ID NO: 4154097 - RNA, 85 nt, Human
ggcacggguuguuugaaggcuuaaaauuaguacaagagaaguuugagauguucuaauuacuggaaauuucaaauaacacgaugcc

SEQ ID NO: 4154098 - RNA, 58 nt, Human
ggcacgugcuccaggcuccuccagccgcugaggcuuuggcuugcccuggcaguacccc

SEQ ID NO: 4154099 - RNA, 68 nt, Human
ggcacuaaguugguguuaauuagugaaaauuaucuaaugcaagcucauuuuaacauuagcuuaaagcc

SEQ ID NO: 4154100 - RNA, 61 nt, Human
ggcacuagcuuuucccagccucacuugcagcuuggcaaaggcucaugaaccaggcucggcc

SEQ ID NO: 4154101 - RNA, 62 nt, Human
ggcacuaggagaccugggggucuuucuuguuuuuggcuugcuaccugguucuccugccugcu

SEQ ID NO: 4154102 - RNA, 86 nt, Human
ggcacuauuggcuuaaguaacuuauuugcaaacaggcauuauuaggcagugccuuuugcugcaguugcuucccuuuauuuguagcc

SEQ ID NO: 4154103 - RNA, 61 nt, Human
ggcacucaccuuaagauuaccguggguauuauuuuuaguuccaggucuuuaggucaguguc

SEQ ID NO: 4154104 - RNA, 72 nt, Human
ggcacucacuaauacucauauuaaauggguucaaauaccaaguuugagucucauuaauuaugaaugacugcu

SEQ ID NO: 4154105 - RNA, 69 nt, Human
ggcacucuuaugggaaaguuacacuuuauuuuggagguaccucuugcaacuuuucauuccaaaggugcu

SEQ ID NO: 4154106 - RNA, 74 nt, Human
ggcacucuugcauuuugauccucauauauugcaaacugauuuuuguaggauaaauucuccaaagugugaguguu

SEQ ID NO: 4154107 - RNA, 129 nt, Human
ggcacugaauagaaaacugaacaaccuuugcuauugugaauagugccgcaauaaacauacgugugcaugugucuuuauagcagcaugauuuauaauccuuuggguguauacccaguaauucaucuaccc

SEQ ID NO: 4154108 - RNA, 77 nt, Human
ggcacuggagcggcccucccucccucucuuuuggggaccucgaggguccaggggcgaggggagccgugccagcagcc

SEQ ID NO: 4154109 - RNA, 70 nt, Human
ggcacuggcagauucggugucuggucagggccuacuuccugguuaauagauggcaccuuucugcuguguc

SEQ ID NO: 4154110 - RNA, 60 nt, Human
ggcacuggcagauuugggaucuggugagggcccucuuccagguucacagacugcgguguu

SEQ ID NO: 4154111 - RNA, 76 nt, Human
ggcacugggcaccggcugagggacuugugcuccaggaacuguuggucuugccacuccuccgccugggcccagugcc

SEQ ID NO: 4154112 - RNA, 97 nt, Human
ggcacugguggcugcacuucugggcugaaauuagacagcaugcuuuuuaaauugcagcugcuucugacuaagcugcaugaggguaagucaucuugcc

SEQ ID NO: 4154113 - RNA, 66 nt, Human
ggcacuguguuuugugcuuuuguguaaggaacagcaaaaagcaugcaaaggcacagcaacagagcu

SEQ ID NO: 4154114 - RNA, 66 nt, Human
ggcacuguuuuuguauucaguugguuaaugaguguacuuuuucaaugcugaagcaggaauagugcc

SEQ ID NO: 4154115 - RNA, 76 nt, Human
ggcacuugguagcagaaaauaaacauuuguggaaugaauaaacaaaguucuacuuuucacauuuuuuuaccaugcc

SEQ ID NO: 4154116 - RNA, 63 nt, Human
ggcacuuugauuuugagaugcaucaauuucccacacuccagaucaucuagaacucagagugcu

SEQ ID NO: 4154117 - RNA, 56 nt, Human
ggcacuuuucuccccggucauggaagaaaagcagcacuuaggggagaagcaguguc

SEQ ID NO: 4154118 - RNA, 84 nt, Human
ggcagaaaaaugguugagaggcugugguguaguuuuccuuaugucacugccuugcaaaaacagccuugaggccuucccucugcc

SEQ ID NO: 4154119 - RNA, 66 nt, Human
ggccugggcacugcagcaggcaucagucuuaucguugagacuugguagcuagggcauggcuaggcc

SEQ ID NO: 4154120 - RNA, 58 nt, Human
ggccuggggcugugggagacaaggcaucagaggggugccaugccugugucuccaggcc

SEQ ID NO: 4154121 - RNA, 91 nt, Human
ggccugggugaguugggacugggacaggacagacaucucagccucuuggcagauuccuggcucagcuccuuuugcacaacacacucagggc

SEQ ID NO: 4154122 - RNA, 89 nt, Human
ggccuggguucagcaguucaaccccgucagagcuuugucuaucuuucaugcauucugccucaggguugcaauaugguugccccagugcc

SEQ ID NO: 4154123 - RNA, 63 nt, Human
ggccugguacacugagaugacuuugguuucaaaaucugaagaccagguucuuaguucuagcuc

SEQ ID NO: 4154124 - RNA, 127 nt, Human
ggccugguuggagcucugucuucucucucagagagcacccacauuucugcagugcaagagagugaccucaaucugguacuagaggagugcuggauguggaggcugagggcagggccucccccagacc

SEQ ID NO: 4154125 - RNA, 59 nt, Human
ggccugguuucacuuuucuugaucugcuuacacaccagaagggagauaggaaucaggcc

SEQ ID NO: 4154126 - RNA, 55 nt, Human
ggccuguagcaucugacuccugcgugcuuggugacagggucaguagcacagagcu

SEQ ID NO: 4154127 - RNA, 58 nt, Human
ggccugucucacccccgggugccugugcucucagcagacaguugggggugaacaggcc

SEQ ID NO: 4154128 - RNA, 112 nt, Human
ggccugugagucuccagaugaaagguggguuuagaucuacacaucuccuguuucagggcagugagcuguuuuggacccaucucuaguagaaguuucuuggagcucuccagcc

SEQ ID NO: 4154129 - RNA, 82 nt, Human
ggccuguggcuagaguaagccucugcucuaucugguguuuccaccagaccuuauagggcagggcauugccaggaggcaugcc

SEQ ID NO: 4154130 - RNA, 56 nt, Human
ggccuguggcuuuggcgucuaacuuuccuuaagaguugagcccauucccacuggcc

SEQ ID NO: 4154131 - RNA, 58 nt, Human
ggcacuggguuguaggaauuaaaugagcuaaugucuguaauuuauucagcacaguguu

SEQ ID NO: 4154132 - RNA, 109 nt, Human
ggcacugugccaauuucaaguuuagacuagaagcuuccacuuuucugcuuucuggggaagccagcggcuauaaagaagcauaggcuagacuucugaggggucagaugcc

SEQ ID NO: 4154133 - RNA, 89 nt, Human
ggcacugugucauucauuuaaguauguuuaagccucacauaggccugguuuauagcaaguucucagugaaugauuuaaagagacaugcc

SEQ ID NO: 4154134 - RNA, 114 nt, Human
ggcacuuacuaauuuuacaaacugaauguugaacuaggaucucuugauugauacauaaagacauacauagaucauauaugauuuuauucaaaguaguauaggaauaaaaaugcc

SEQ ID NO: 4154135 - RNA, 86 nt, Human
ggcacuucagagccaugcagaauguggacaguggguuuggaauugucauugagaugccacuuucuuauucuucuuguguuggugcc

SEQ ID NO: 4154136 - RNA, 69 nt, Human
ggcacuuccgugagauuaagcagaauucuucaugucaccagaaagcagcuaagucuuaugauggugacc

SEQ ID NO: 4154137 - RNA, 55 nt, Human
ggcacuucuccagccugccugcuuagugcugggcaggugcucccagagaagugcu

SEQ ID NO: 4154138 - RNA, 69 nt, Human
ggcacuugaaucuucugaguauuugcucccucuccuguaugguggcauugcugggagauucaaacugcu

SEQ ID NO: 4154139 - RNA, 82 nt, Human
ggcagaacccagggagacagugguagggccuaagucuggagcggcagacaaggccuugcugucuccuccuuucuucucugcc

SEQ ID NO: 4154140 - RNA, 77 nt, Human
ggcagaagaagggcuggagacugggucuucaaguucauccuugaagcccaagcuucacagcuaucucaaucugaacc

SEQ ID NO: 4154141 - RNA, 79 nt, Human
ggcagaagagacaggcugcugucugcuaggaacgccuuuuuguugguuuccccuaguugaaucagcagccacaucugcc

SEQ ID NO: 4154142 - RNA, 105 nt, Human
ggcagaagccuguuuaccacgugcauugauuacuuuugcagccacacucucuaaugugcuuagguggccagugauuaaugacgcuuggacagcagccugguugcu

SEQ ID NO: 4154143 - RNA, 60 nt, Human
ggcagaaggcagaucccacaaaaugcagggaaagcacugcaggguguuccugccuuugcu

SEQ ID NO: 4154144 - RNA, 84 nt, Human
ggcagaaugauucagcuucacucugaaugaucgucuccucuuugugcagacagaugcauguauggagugaggguguuaccugcc

SEQ ID NO: 4154145 - RNA, 65 nt, Human
ggcagacacagugaguuucuuucccaagcagaguggcaucuggguggagacggcgcuguguggcc

SEQ ID NO: 4154146 - RNA, 67 nt, Human
ggcagaccuguagacauuugccuguggcauaaaugacuuuagaauagagugucuaauccaggcuguc

SEQ ID NO: 4154147 - RNA, 126 nt, Human
ggcagaccuugggucuuucuuauucauagauuaauuccuagcacugagaauagugcauagcucucauuagcuauucaguaaauaugugcugauuugaugaaugagugaaugugggcuugcccugcu

SEQ ID NO: 4154148 - RNA, 90 nt, Human
ggcagagacuguggauugcuguaaauuaucuuauuaauuggaacaucacuuguuauauuggagcaauuauagcauguucaaagcuuugcu

SEQ ID NO: 4154149 - RNA, 96 nt, Human
ggcagagagcugguaaggcauggcucaccugggacaugaguggggagagacccucaggucacggaucugagcuggaggagccucacugugucugcu

SEQ ID NO: 4154150 - RNA, 64 nt, Human
ggcagagaggaggccagcgcagcugcgcugcccgucagcuucugcugcucugguuuccucuguc

SEQ ID NO: 4154151 - RNA, 77 nt, Human
ggcagagauccaaucugcacagaagauauuaguauuaccacuucuucuguuuuagauugcauacuucuguuauugcc

SEQ ID NO: 4154152 - RNA, 63 nt, Human
ggcagagaugagcuaucaggacagaagggaccauacuagccccugccuuguuccauuucuucu

SEQ ID NO: 4154153 - RNA, 124 nt, Human
ggcagagcuacaaucucuucagaggcagguaguugcugugcuggggccuccugcucuguugaagaagaguggacccccucaaggcagagcuggggccuccugcuggguugaagaagguucugcc

SEQ ID NO: 4154154 - RNA, 59 nt, Human
ggcagagcuaguggcuucucuuguuaaaccauggcaggaaucccgcaccagcugcuguc

SEQ ID NO: 4154155 - RNA, 59 nt, Human
ggcagaggaacagugucauguagcugcuacugcucacucacacauuucuccuucugacc

SEQ ID NO: 4154156 - RNA, 56 nt, Human
ggcagaggaggggugaauuugcccuaucugagcugggacauucaucuucuucugcc

SEQ ID NO: 4154157 - RNA, 81 nt, Human
ggcagaggccugaauugcaaacucuagagacagagaaauaaacucucuuaucuaagacacuguacuuucagucucuuuguc

SEQ ID NO: 4154158 - RNA, 88 nt, Human
ggcagagggagcggagggcgagcccgcggagccaaaaucuucccucgguuccgguugcugagcucgccgccucuccccuuccccugcc

SEQ ID NO: 4154159 - RNA, 129 nt, Human
ggcagagggcauauuaggcacucgacuuguuuuucacagugaugacgugggagcacacauaagaaggcugugugcuuguuguucucaguuguggaaauagauuugugaucaccucucuaagccccuccu

SEQ ID NO: 4154160 - RNA, 66 nt, Human
ggcagaggguaugaguggggcuaaacuccaauccaugagugagcucugcccaccaaacccuaugcc

SEQ ID NO: 4154161 - RNA, 71 nt, Human
ggcagagguggcaugcaggugaccagguguggggcuguuggcccccucauucauguccuugcuuccucucc

SEQ ID NO: 4154162 - RNA, 99 nt, Human
ggcagaggugucugagaagaggcgaggccacaccugcuucugggcaccuccugcccugguauagggguggcuugcugcuuuucgaggcugacuucugcu

SEQ ID NO: 4154163 - RNA, 59 nt, Human
ggcagaguggcagucccaggcccacgcaguagcagucaagguggcacugccgcuaugcc

SEQ ID NO: 4154164 - RNA, 107 nt, Human
ggcagaguugcuagugguuaacuucccaaaacacugguuguuaauaguaacagcugauacgcuguugucuggcugcagcugugcugggaaaucaauaguucuuuguu

SEQ ID NO: 4154165 - RNA, 88 nt, Human
ggcagauuacuucucucuggaccucaacuauuuuaucugugaagugaaagguuugaaguaguagagcuccaagaucuaaaguuuuguc

SEQ ID NO: 4154166 - RNA, 92 nt, Human
ggcagauucugugauucaccugcccuuuaccugguggcccauuuagaugccaauggcagugcaaggaagggacagcugagaccagaacugcu

SEQ ID NO: 4154167 - RNA, 83 nt, Human
ggcagauugggucaguugauuuguuuuuccuucaugcauuuauuauauauaugacuuuggaaaaauuacuugaucuuucuguc

SEQ ID NO: 4154168 - RNA, 69 nt, Human
ggcagauuuugauauggguauucaugaccugggcuccaacagccuaguucucuauucaaggaucaagcc

SEQ ID NO: 4154169 - RNA, 62 nt, Human
ggcagauuuuuagcugugacucgguuaaauugucucuccagauuucaggcuggaaguuugcc

SEQ ID NO: 4154170 - RNA, 86 nt, Human
ggcagcaaagaagucaggccaaguucauucacacccagacugaggcccuuaucaucugggcuuuaagaacucuguuucuuguugcc

SEQ ID NO: 4154171 - RNA, 101 nt, Human
ggcagcaacugugagaggaugaacuugauucugcugaucucggacggaaacugauucuugggagagagacagaaucaaacggcucugacauuugaaaagcc

SEQ ID NO: 4154172 - RNA, 75 nt, Human
ggcagcaaucuguuuccauguuuuauugugagauacagaaaucuuugcagaggauggaagcaccaguuggaugcc

SEQ ID NO: 4154173 - RNA, 73 nt, Human
ggcagcacugacuccaggccucuggcugcuuagucauucuccaugaaggcagcaagugucugcagugccgguc

SEQ ID NO: 4154174 - RNA, 60 nt, Human
ggcagcacugucuugucuuaggacucagaaaguccaguccugagaugagacagugcugcc

SEQ ID NO: 4154175 - RNA, 117 nt, Human
ggcagaaacaucuggucucccucaagugucuauguuaaaugguuuauuauuaauuuuguauguuaaugauuuggaacccuuuaauuuuaugaagccaggaggauuauuauuuuugcc

SEQ ID NO: 4154176 - RNA, 72 nt, Human
ggcagaaagauggaauguaaaggguaugggauuuggauacagacagaccuggauuugcguuuuaacucuucc

SEQ ID NO: 4154177 - RNA, 65 nt, Human
ggcagaaaggacacacaggaggugucuggggaacccccuccaacauagccagaaugucuccugcc

SEQ ID NO: 4154178 - RNA, 98 nt, Human
ggcagaaauuagaugggucguuguccuggaaacuagaggauuuaugagacauagcaucuaacaucuuaggacucugauucaucuauguucauaaugcc

SEQ ID NO: 4154179 - RNA, 59 nt, Human
ggcagaagaaaggcuaagucucccucucucuucuggagcugagacaaacuucuucugcc

SEQ ID NO: 4154180 - RNA, 56 nt, Human
ggcagaagauaggacagggaauuacaauuuucagagcccccgucccauuuucuccc

SEQ ID NO: 4154181 - RNA, 62 nt, Human
ggcagaagcagcagaugggcgcagucagcaagaugcccuuugcgcccaugaacugcucuacc

SEQ ID NO: 4154182 - RNA, 56 nt, Human
ggcagaagcugggcagcgagguggcguaaagcagggucaccgcguccagccucucc

SEQ ID NO: 4154183 - RNA, 66 nt, Human
ggcagaaggcuuggaccagcuacagugggucaugggaggccccugcugguguccaggcuuuggacc

SEQ ID NO: 4154184 - RNA, 60 nt, Human
ggcagaagugaugggauauaacuuccaagacaagguuauaaaaagacuguggcuucugcc

SEQ ID NO: 4154185 - RNA, 69 nt, Human
ggcagaauucaguuccucuguugugacaugccaaggagcgggcuguccucacaggaaugaacuuucgcc

SEQ ID NO: 4154186 - RNA, 82 nt, Human
ggcagacaacccugggacuuccgaguugagcgagccaguaaauucaguuuagcugaaagcaguuuuagguuaguuuuuuguc

SEQ ID NO: 4154187 - RNA, 65 nt, Human
ggcagacguggaggcugcgcagggcucugucacaguuguggacacugccaggcugcacgccugcc

SEQ ID NO: 4154188 - RNA, 83 nt, Human
ggcagacuagauugcaaacucuagggaggcaggaagcaauuacaucuugucccugcuguacuuagagcauccaguucccugcc

SEQ ID NO: 4154189 - RNA, 63 nt, Human
ggcagagaguaaggcaggcucacucgggguguugacccaggugagcccuaccugcucaucucc

SEQ ID NO: 4154190 - RNA, 65 nt, Human
ggcagagaguugccuuauuugaccucagcugagaacaugcaugucaggcaacucaaguuuuugcc

SEQ ID NO: 4154191 - RNA, 65 nt, Human
ggcagagcagaggugcagguuggagccagguuacuagcaaucuaaucccagcucugccaucugcc

SEQ ID NO: 4154192 - RNA, 55 nt, Human
ggcagagcauuggagggacccugggggaccuucucccugguucugauguucugcu

SEQ ID NO: 4154193 - RNA, 63 nt, Human
ggcagagcuaucuucuggauuuggcuccuuucacauuuugccaaugccaggagauggccuggc

SEQ ID NO: 4154194 - RNA, 112 nt, Human
ggcagagcugagccuggagccccuagguggagugugcagggagagcagcagcccugagcugccuacagcuauccugcagcacccagcccugcuuggggcaucggcugcugcc

SEQ ID NO: 4154195 - RNA, 60 nt, Human
ggcagaggaaggaugaauucacuuccuuuuuuugagcuaggauauccaucuuuuccugcc

SEQ ID NO: 4154196 - RNA, 62 nt, Human
ggcagaggaggacccaggaauuauaagacgugucaauguauugaucuguggcaccucuuccc

SEQ ID NO: 4154197 - RNA, 98 nt, Human
ggcagagggcaggugcagcuggaagugacacucuguguuucccugcaucccccugaggucacagguccucaagucagcugggaagccguucucuggcc

SEQ ID NO: 4154198 - RNA, 72 nt, Human
ggcagaggucacuuggagcaaaguuuacaagccuuuucuugauuacauugugcuuaaaguguuaacccuguu

SEQ ID NO: 4154199 - RNA, 68 nt, Human
ggcagagugcucugggcaggggcugggguccgggagucagcccacuccucugcccagggccuccugcc

SEQ ID NO: 4154200 - RNA, 55 nt, Human
ggcagagugugaggguccugcucagccaguaagaguuugacucaggccuuuagcc

SEQ ID NO: 4154201 - RNA, 116 nt, Human
ggcagaguuugcuauuuugugugugugcuuuuuugcuauugaaguggugaagcucucuuuucaaacuaauucucaugcagaagcuggcacaugaaacagauacaagcagagcugcu

SEQ ID NO: 4154202 - RNA, 73 nt, Human
ggcagaucagcuuggucucgggagcuauuucuacacaaaucacguggggcucagaaggccaugcucugcugcu

SEQ ID NO: 4154203 - RNA, 93 nt, Human
ggccaggcugaucucaaacuccugaccuugugauccacucaccuuggccucccaaagugcugguauuacaggugugagccaucaugcccggcc

SEQ ID NO: 4154204 - RNA, 93 nt, Human
ggccaggcuggucucgaacucuugaccucgugauccgcccgcuuuggccucccaaagugcugggauuacaggugugagccaccaugcccggcc

SEQ ID NO: 4154205 - RNA, 93 nt, Human
ggccaggcuggucuugagcuccugaccuugugauccgcccacuuuggccucccaaagugcugggauuacaggcgcgagcuaccgcgccuggcc

SEQ ID NO: 4154206 - RNA, 93 nt, Human
ggccaggcugguguugaacuccugaccuugugauccgcccgccuuggccuccuaaagugcuaggauuacaagcgugagccaccacgccuggcc

SEQ ID NO: 4154207 - RNA, 55 nt, Human
ggccaggugacagaacucagagccuuuggcugcuucaggagaugucaccauggcu

SEQ ID NO: 4154208 - RNA, 93 nt, Human
ggccaggugcgguggcucacaccuguaaucccagcacuuugggaggccgaggugggcagaucacagagucaggaguuugagacuagccuggcc

SEQ ID NO: 4154209 - RNA, 81 nt, Human
ggccagugcggggucugcggcugcccggcgagguuccggcuuccccgggacuggcagggggagccccgagaacugcaggcc

SEQ ID NO: 4154210 - RNA, 83 nt, Human
ggccagugggagaaagguggccggugccagccgggccagacacccauaggccagcccuggccuggccgccagccaccugggcc

SEQ ID NO: 4154211 - RNA, 58 nt, Human
ggccagugggagcuucaucaagcaguuccugggaacuucuugcacagucccacuagcc

SEQ ID NO: 4154212 - RNA, 130 nt, Human
ggccagugggguccuuucuccauguucuguaggcucugcugaggaugguguggucuucucauugguaaaugggguccuuucuccauuuucuguaggcucugcuggggauaguguggucuucucauuggcc

SEQ ID NO: 4154213 - RNA, 69 nt, Human
ggccaguucaugaggccacaggaaagggcccgggcuucccgggucucuuggggccugugugcuagaacc

SEQ ID NO: 4154214 - RNA, 64 nt, Human
ggccaguuggagacccuuggaaagcccuucaagugagagcaugaggcuuggaucuagacaggcc

SEQ ID NO: 4154215 - RNA, 87 nt, Human
ggccauaauuccugagguuuggaucucugauacaacagguguuguauucaguuugauugucuacaaucucagaugauaaaacuggcc

SEQ ID NO: 4154216 - RNA, 76 nt, Human
ggccauacucuuuuguguauguacugcucuucauacuauaauagaauuuggcaguuuuaacagagguaguaugguc

SEQ ID NO: 4154217 - RNA, 80 nt, Human
ggccauagauuauaucauucuauuuauaugaaauuuccagaauaggcaaauucauagaagcagaaaguaaacuaguggcu

SEQ ID NO: 4154218 - RNA, 82 nt, Human
ggccauagcuacuucguaagucuguguacaaaaacauaauaaaacuguugucuguacaaauuuucugugucagcuguaggcu

SEQ ID NO: 4154219 - RNA, 63 nt, Human
ggccauccugcuagcccaggaugcagggacccccaggucccuucggccuggcugcagcuggcc

SEQ ID NO: 4154220 - RNA, 123 nt, Human
ggccaucgcagcuggaaaggcugguuuuuagccacaggagccaagggcccugcagacgcccgcucccgggugccucuccagaggucccuugucucuuuuggcacccuccugcuguaagcagcc

SEQ ID NO: 4154221 - RNA, 71 nt, Human
ggccaucuuggagccaggcggggcagguuuccugagccaggauuuauggccugccugccccauugacugcc

SEQ ID NO: 4154222 - RNA, 56 nt, Human
ggccaugcaccuauaugugaagcuuuauugauguuuaaacauaaccuuguauggcu

SEQ ID NO: 4154223 - RNA, 65 nt, Human
ggccaugcauuccuccucugccuuauaaaucuugaugugccagguacgggagggauugcuuaguu

SEQ ID NO: 4154224 - RNA, 121 nt, Human
ggccauggcaauugaaaacaaggcuaucagaagagcugugggugguaguccugucucugagaaaggaacagggccacuggcugacggcugcauuccagaacgccuccagaugcagagggcc

SEQ ID NO: 4154225 - RNA, 68 nt, Human
ggccaugggcaguuggcagggcucagaaaaagggcuucaugggcugugacggaucagcagcucuggcc

SEQ ID NO: 4154226 - RNA, 73 nt, Human
ggccaugguaaggcuuagauaagugaggauauguaaauagcaacugucaacauuuaucaaguuauugugugcc

SEQ ID NO: 4154227 - RNA, 59 nt, Human
ggccaugucccugggccuggcacucccuagcucggugggguguggccuggggacaggcc

SEQ ID NO: 4154228 - RNA, 81 nt, Human
ggccaugugggaaaguuaaguugguuuaaaaaauggagagaaacauugccuugucuguccauuuauaagcccccaaagguc

SEQ ID NO: 4154229 - RNA, 63 nt, Human
ggccauuggcagcgccagacaauuaacagucgaaaguaauugcucuuggccgugccagcagcc

SEQ ID NO: 4154230 - RNA, 89 nt, Human
ggccauugggcaccaaucuccuauuuuguuucaaagccuaaacagcggaggcagcuuuggaaauagauguaggaaauuggacaguggcc

SEQ ID NO: 4154231 - RNA, 81 nt, Human
ggcccaagaaugucaauuaccagaacagaauaacaaaauacaccgaauucuuaccuuuguaauguaauggacaacuggguc

SEQ ID NO: 4154232 - RNA, 60 nt, Human
ggcccaaggugccaaggccuccagaagaagagaagaaggagcaggcuuuggaguggggcu

SEQ ID NO: 4154233 - RNA, 113 nt, Human
ggcccaauccacuucuuggucacacugauagugguuaggaauacaggcccuggggucaaacugguugggucugaauuccagccccucuguguaccagcuuagugaccauggcc

SEQ ID NO: 4154234 - RNA, 86 nt, Human
ggcccacaagauuuucugccuuucucaagggcaaaagauuacuguuuuuacauguccuucaagagcaguggaucucugccugggcc

SEQ ID NO: 4154235 - RNA, 56 nt, Human
ggcccacagcaccugcagccaguugggagcuuccugcaaguccagggcugugaacu

SEQ ID NO: 4154236 - RNA, 75 nt, Human
ggcccacugcaggcuguguuuauaacuugaaaauuaugagcagguauugggagccacagacuguauuugggaacc

SEQ ID NO: 4154237 - RNA, 56 nt, Human
ggcccagaagccagaagccuccugaccacccccagggaugcuucuccagcugggcc

SEQ ID NO: 4154238 - RNA, 64 nt, Human
ggcccagaauacaugaaguauaaucaaagaaacaggguauuuggguuacuauggaauucgggcc

SEQ ID NO: 4154239 - RNA, 64 nt, Human
ggcccagagcucccuggcaccucuuggacacgaauacaccccuaaggaugcugacuucugggcc

SEQ ID NO: 4154240 - RNA, 107 nt, Human
ggcccagagggagagagacauacagggaggcugcaguggagcagggcaaccucacacuucugcuuccagcucucuguaaggucugacuucacuucucucguuggguc

SEQ ID NO: 4154241 - RNA, 83 nt, Human
ggcccagauucacaggugcagaggugcugaucuaucuaccuagugggucagagcagaccucuggaagcuguggcgucugagcu

SEQ ID NO: 4154242 - RNA, 59 nt, Human
ggcccagccucagacauucccuggcaccuccccagcagggcacagucuaaaguugggcc

SEQ ID NO: 4154243 - RNA, 108 nt, Human
ggcccaggaauccacauccgcucucuguagcaacuacucaacucugccauugugggaaagcagccauggacaguacugaguggacuaggauggcuguggucacgggcu

SEQ ID NO: 4154244 - RNA, 61 nt, Human
ggcccaggcaaguguggcuuacucagaaaccagucagaguggagaaacgcuucgucgggcc

SEQ ID NO: 4154245 - RNA, 73 nt, Human
ggcccaggccuggcuuugguuugcugaguauccaggcuagcagggagggccagugucaagaaagaggagggcc

SEQ ID NO: 4154246 - RNA, 57 nt, Human
ggcccagguccagcgaguaccuggaaacccaggcacacuguguccuggagcugggcc

SEQ ID NO: 4154247 - RNA, 120 nt, Human
ggcccagguuuuauuuaauucuuuucucugggcuguucugggaaauaucuuuuucucccuagaaacaugauaaccaggcugccgaggaaagaaagaaaagauagaaacucuuccugggcu

SEQ ID NO: 4154248 - RNA, 62 nt, Human
ggcccagugucaccaacaggacacucucugaccccugagugcgcccuguagugacuuguguc

SEQ ID NO: 4154249 - RNA, 86 nt, Human
ggcccaucucaauggccaccucauggauaagauaaacugaugguauuucaccaguuaaacuuugccagaugggauucagauaggcc

SEQ ID NO: 4154250 - RNA, 74 nt, Human
ggcccaugguguuugaugcuaaccccuagggcaaaagcugaucuuuuagguuaaucaacaaacauuuuuuggcc

SEQ ID NO: 4154251 - RNA, 67 nt, Human
ggcccauguacacucauguaacuauaugcagauuuaguguucuagaaugauaugagguacucaggcc

SEQ ID NO: 4154252 - RNA, 121 nt, Human
ggccccaccugaggcacagcgcugacucaucacggugguaccaguaggucagccaucuggaaacagaaguggcccuaauugggccaaaaugugguaagacucgcuggccucaggcagggcc

SEQ ID NO: 4154253 - RNA, 87 nt, Human
ggccuagggaggggccgaugagaaaguccuagggguugcggggaagccacaaccucccuggccuucugauucccucucucugaggcc

SEQ ID NO: 4154254 - RNA, 103 nt, Human
ggccuaguaaaguuuggggacuuugaucuuaccauuauuagguggacuugagaucuuuucuuguaccaggugauggagucauaucuucacuguugccagggcu

SEQ ID NO: 4154255 - RNA, 74 nt, Human
ggccucaguguuccugaugcuuugaaauucacguugaaaagcuggaauucauucuuucgguuaacuugacugcc

SEQ ID NO: 4154256 - RNA, 65 nt, Human
ggccucaguuucuugugaaaugaaaucugguuucuugauggaaagggccucacaggucucaggcc

SEQ ID NO: 4154257 - RNA, 57 nt, Human
ggccucaugcuucugaacucacugcucagaaugagaaguggggucucuguggaggcc

SEQ ID NO: 4154258 - RNA, 55 nt, Human
ggccuccaccgucuggcccugucggcugaguggugcccagcaaggugagaaggcc

SEQ ID NO: 4154259 - RNA, 69 nt, Human
ggccuccagguuccgcgagaagggucgguauuaaaggauuccuuggagcggucagcacugguccgggcc

SEQ ID NO: 4154260 - RNA, 71 nt, Human
ggccucccaaagugcugggauuacaggcaugagccacgaugccuggacuguucuaccauuuuuuauaggcc

SEQ ID NO: 4154261 - RNA, 71 nt, Human
ggccucccugcaguaguggcuaagaucaucugugaguuuauccuacugagcuguuaggucccaagagagcc

SEQ ID NO: 4154262 - RNA, 74 nt, Human
ggccuccggccucggcgcgggcucagccgcccggggcugggcgcggcagcuccgcgccguaggacgagggggcc

SEQ ID NO: 4154263 - RNA, 56 nt, Human
ggccuccuaucguuucaaaacacagcuucuuguugaugaagaggaagaggacggcc

SEQ ID NO: 4154264 - RNA, 56 nt, Human
ggccuccugcuucacgggcaccgccaccuccauggggccucccggaccgcagcgcc

SEQ ID NO: 4154265 - RNA, 68 nt, Human
ggccucuccagguaauuuggaugcuaguuaaaguuuaauagccacugcucuaaauuaucuccaaggcc

SEQ ID NO: 4154266 - RNA, 58 nt, Human
ggccucucggaugcaucuggaguguucuggggcugggcaccaggccuccugggagguc

SEQ ID NO: 4154267 - RNA, 63 nt, Human
ggccucucuggcauggcugccccaggagaaugggcagguaguuaauuuccggugaggggggcu

SEQ ID NO: 4154268 - RNA, 66 nt, Human
ggccucugcagcgugcaggcuggugcucuuccagcauuuccucaaucacgcugacacccccaggcc

SEQ ID NO: 4154269 - RNA, 58 nt, Human
ggccucugcaggccucgacaaggcccagccuccugccucccgaaggccugcacaggcc

SEQ ID NO: 4154270 - RNA, 58 nt, Human
ggccucugcaggccucgacaaggccuggccuccugccucccgaaggccugcacaggcc

SEQ ID NO: 4154271 - RNA, 77 nt, Human
ggccucuggaucuggcauuuagacccacagcaacagcuuguguuugcucagggcuaagaaugcaggacucagacacc

SEQ ID NO: 4154272 - RNA, 57 nt, Human
ggccucugucaggugaacgcgcuccugcgggagcagcuggaacauaugaagaaggcc

SEQ ID NO: 4154273 - RNA, 108 nt, Human
ggccucuuaauaaauucaacuuuucauugugugguguuauucuucuucaagaaauggauuagaaauguuaccauacagagcuagaagucaugaauuaauuaggaagcc

SEQ ID NO: 4154274 - RNA, 79 nt, Human
ggccugaaggaugaugguuuuguccucuuugguucucaccugcuugagaaguaaaacaguaacuuuguucuucugggcc

SEQ ID NO: 4154275 - RNA, 61 nt, Human
ggccugacauuugcaucaacacagaugaacugugaggauguuuuuuuaggugaaauaggcc

SEQ ID NO: 4154276 - RNA, 102 nt, Human
ggcgugguggugcaugccuguaauccccgcuacucgggaggcugaggaaggagaaucacuugaaccgggaagguggagguugcagugugccaagaucgcgcc

SEQ ID NO: 4154277 - RNA, 80 nt, Human
ggcguuggagucuucagauagaguauuuaagguaacgauauuaacauauucagaaagcuagaaaugaaaauuccaaagcu

SEQ ID NO: 4154278 - RNA, 99 nt, Human
ggcguuuccucccgggcucccuccauccccccaggcaagcaugacacaugugucuugagggggauggaguguacuggggaccagaugggaagcugagcc

SEQ ID NO: 4154279 - RNA, 58 nt, Human
ggcguuuuuuuggggggaucagggaugggugagagcucuacugcuuacaaaaauaccc

SEQ ID NO: 4154280 - RNA, 61 nt, Human
ggcuaagaucucuuccagccugaaauuuccucaacucgaaggcaggaaugagguaauggcu

SEQ ID NO: 4154281 - RNA, 58 nt, Human
ggcuaagcacagugccuggcucugggucagcuuugcccaugugcaggcuguuauagcc

SEQ ID NO: 4154282 - RNA, 95 nt, Human
ggcuaaggcggguguaucaccugaggucaggaguucaagaccagccuggccaagauggugaaaccccgucucuacuaaaaauacaaaaauuagcc

SEQ ID NO: 4154283 - RNA, 58 nt, Human
ggcuaaucucuucuuaaugauuacaaaauggacauuaaucaggagcugagguuuagcc

SEQ ID NO: 4154284 - RNA, 68 nt, Human
ggcuaauggcuaaauauucggaggagcuguaagugcagacccugacucuaaugcuuggcuuuauagcc

SEQ ID NO: 4154285 - RNA, 63 nt, Human
ggcuaauugguguugaauuuucuuaccaagcugucucacagugacucugcaccaaauuaagcc

SEQ ID NO: 4154286 - RNA, 70 nt, Human
ggcuacaaauauaaaacacagauacucucuaaaggcucacaagggauuguguguguguguguguuugucc

SEQ ID NO: 4154287 - RNA, 67 nt, Human
ggcuaccaguauugaucauugcaagaacauugcaagcuuagcaagaaucagcugcugggucauagcc

SEQ ID NO: 4154288 - RNA, 85 nt, Human
ggcuaccggugcugccuugguucccagccagcaaggaccugauugguaguggggcaugaauagagcuaagaggggcccggagacc

SEQ ID NO: 4154289 - RNA, 78 nt, Human
ggcuacuccgcccagcugagaagcgcggggcccugacgcgggcgcgcuccucgcauucuuccguugggcugggaggcu

SEQ ID NO: 4154290 - RNA, 65 nt, Human
ggcuacuugcuggguguaauuuucuuugagcuauuuuauaaagaugauuaaugacagcaugugcc

SEQ ID NO: 4154291 - RNA, 55 nt, Human
ggcuacuuuguuuaaguugccaugggaagacgguggcagcuauuacaaggaaguc

SEQ ID NO: 4154292 - RNA, 66 nt, Human
ggcuagaaagcccccgcuggcgcacgcugggccacugguccauuugcccuguggggauuuccagcc

SEQ ID NO: 4154293 - RNA, 61 nt, Human
ggcuagaacuuuacacuuugcauaggccuccaaucuugagaacaugcauuguaggcuagcc

SEQ ID NO: 4154294 - RNA, 55 nt, Human
ggcuagagcucucuuacaugggauuauaaaagaaaccccagagagaucucuugcc

SEQ ID NO: 4154295 - RNA, 67 nt, Human
ggcuagcugacagugcacccagggcuggcaggggcaggcugggcagcagcuguuaagcagggaggcu

SEQ ID NO: 4154296 - RNA, 61 nt, Human
ggcuaggcaauguucuaaggaaugaggauacaacagcucaccgagauauacagugccugcu

SEQ ID NO: 4154297 - RNA, 82 nt, Human
ggcuaggcacuacaaggacuaggcuggccccuucuggaauucuguccaaaagucagucucuccuagcucugugguaucagcc

SEQ ID NO: 4154298 - RNA, 70 nt, Human
ggcuaggcucaccuggagaguugagaauagaaugacaaaccuacagauuccccuggguggggucuaaguc

SEQ ID NO: 4154299 - RNA, 55 nt, Human
ggcuagggaaauccugauccaaggaagaccuuugaucucauuguucuccucagcc

SEQ ID NO: 4154300 - RNA, 68 nt, Human
ggcuaggggaagggcacuccuuggcagcucugcccaggguagaaccuccagaguggcccccucuuucc

SEQ ID NO: 4154301 - RNA, 69 nt, Human
ggcuaggggagccgagccacauucaaucugcauccugcuccgcgucugacaggcuuugcuccuucugcc

SEQ ID NO: 4154302 - RNA, 62 nt, Human
ggcuaggugcagcagacagcuuaggggcuuugaagucaaauacaugggccugcauccuaguc

SEQ ID NO: 4154303 - RNA, 66 nt, Human
ggcuagugguguggaaggggcagggaauggaggagcccaagccuuccuucaagcacacaucuagcc

SEQ ID NO: 4154304 - RNA, 112 nt, Human
ggcuaguuaaugcuaaauugagguuuaaaauaauuauaacaguuacaucuuacauaucaggugagaugucauaguucaguucagguaauuuucguguggcagugagcuaguc

SEQ ID NO: 4154305 - RNA, 61 nt, Human
ggcuauaugacauugcuuuuuagaacuuaucugugaguuuuauguagacaauucauuugcc

SEQ ID NO: 4154306 - RNA, 71 nt, Human
ggcuaugaaagcaaugggucuaagguaaaguggcaacaucuuugauaaaagacaccauguuugccuuagcu

SEQ ID NO: 4154307 - RNA, 92 nt, Human
ggcuauggacagcuuucaacacugccuucuuggccuucaaaaccuucgcuuugguuuuggcuuuaggaggggcaggagcuuucuucuuugcc

SEQ ID NO: 4154308 - RNA, 76 nt, Human
ggcuauguacauucaugguuccaccagggcacaggaauauuuuagacaugcccauggaagaacugaugugccagcu

SEQ ID NO: 4154309 - RNA, 74 nt, Human
ggcuauugugaauagagcugcaguggacauugguguacaaggaauugagucgcugcuuucuauucuuuuggguc

SEQ ID NO: 4154310 - RNA, 79 nt, Human
ggcuauuuucauugauucuaccagcuacuuugacagacacguucaaaagugauauguggagccuucgagaggaaaagcc

SEQ ID NO: 4154311 - RNA, 90 nt, Human
ggcuauuuugagaagucuugcagugucuaacagauuuggguucagauaauauuuucaaucuaagggaaauuggagauguaaaggauaguc

SEQ ID NO: 4154312 - RNA, 64 nt, Human
ggcuauuuuuuguuaguggagaauaauggggucuuuugcauuuucuuccaccaauauccaagcc

SEQ ID NO: 4154313 - RNA, 120 nt, Human
ggcucaacaggccccagagccugccuggugucucccucuguaagaucagggguugccucugagcuccagccaggacccugcgccugcucuucagaagggaggggcucucccuguugggcc

SEQ ID NO: 4154314 - RNA, 67 nt, Human
ggccccagcaccacaucaggcccacgaggcccagcucauguggcccugacacgugguacuggaggcu

SEQ ID NO: 4154315 - RNA, 63 nt, Human
ggccccagcagugcuuguuuauuaauuacccuaaugauaacaacagcagugcuggcagcagcc

SEQ ID NO: 4154316 - RNA, 63 nt, Human
ggccccagcucccugguauuugugcuacagaacucuggcaggcacccagggacuuggcuggcc

SEQ ID NO: 4154317 - RNA, 57 nt, Human
ggccccagcuguggugaauagaucuauucacauugaucauguucuacuucaggggcc

SEQ ID NO: 4154318 - RNA, 65 nt, Human
ggccccagcuugcccaggacugagggcuugagagaguccuuggcaaaccagggcagcuggucacc

SEQ ID NO: 4154319 - RNA, 65 nt, Human
ggccccaggaccuccacgguccucugaauagugucaguggcaugagccuagaggucuuaugggcc

SEQ ID NO: 4154320 - RNA, 83 nt, Human
ggccccaggcagugcugcaggcgccugcggucccugcugaccccgugucaccacugccggcgccugcggucccuccuggcccc

SEQ ID NO: 4154321 - RNA, 107 nt, Human
ggcccccacccucggcagugguccuggacuuaggcaggcaccccgugcccacgugcaugggacacccucacgccugcacuagauccccagugccagggcuggaggcc

SEQ ID NO: 4154322 - RNA, 82 nt, Human
ggccccccggggcguaccugucucuuauggucgagucugcagagaugaaauacacuccagucucccauagcgcucccaggcu

SEQ ID NO: 4154323 - RNA, 103 nt, Human
ggcccccuccuccuucccuugcuuccacuuucaguuggguagaucuuucugugaucuuagaaaacacguguuuagcugauggacaguaggaagagugugggcc

SEQ ID NO: 4154324 - RNA, 65 nt, Human
ggccccgggaacauaaagcagugaggaagggaagccauuuggcagcugcguuguguuucugagcc

SEQ ID NO: 4154325 - RNA, 72 nt, Human
ggccccgucguggggccagggaugacccacgcagcaggugguggggcggauccgggggccucgggcggggcc

SEQ ID NO: 4154326 - RNA, 58 nt, Human
ggccccguggagcuggacccaggccucugaggaggggccacaggccgguuccagggcc

SEQ ID NO: 4154327 - RNA, 122 nt, Human
ggccccuaaauuuguaguuccuggguagggauuuguuuguucggcuugauuucuaaucuaauuuggguucugggcucaaauccuggcccugacaaggacuggcugugagaccuugggugguc

SEQ ID NO: 4154328 - RNA, 56 nt, Human
ggccccuggaaaugagugccugggcuuucuucuguccagccucagaucagggagcu

SEQ ID NO: 4154329 - RNA, 71 nt, Human
ggccccuguuauucuugguggcccugcugaaacuuguucuuaguauugucaccugggugaagccuggggcc

SEQ ID NO: 4154330 - RNA, 64 nt, Human
ggcccgaauccccgccuuuccgagcggggacgcugauaggugcagaggcgggguuuuggaggcc

SEQ ID NO: 4154331 - RNA, 107 nt, Human
ggcccgagccaccacugcccugcacgccuggaagagcaggcagacaaugccgaggugcuagagaaacccagccgcugggccugccugcugugugcaaguucugggcc

SEQ ID NO: 4154332 - RNA, 58 nt, Human
ggcccggggguugggugauauccccggcuacagcugaauuucacagacuuacugggcc

SEQ ID NO: 4154333 - RNA, 64 nt, Human
ggcccguagauccccggaagcgccuuugguugccagcaggugucggcgagggucuucaguggcc

SEQ ID NO: 4154334 - RNA, 75 nt, Human
ggcccuagcgggucuugcagagucaaccugccuugagaagggcagccaggcucaaggccugcuccuagaagggcc

SEQ ID NO: 4154335 - RNA, 72 nt, Human
ggcccuaggaagccugcugugcacagcagugauuaggaagcugaguuaugcuggggcagaggcccgaggguc

SEQ ID NO: 4154336 - RNA, 55 nt, Human
ggcccucauuccugauguggcgcccuccagacauggcugcccaggaaggacggcc

SEQ ID NO: 4154337 - RNA, 78 nt, Human
ggcccucccugcuugcucucagcccuuggcugccuggggggcaugcagaaggagugcugaaaggaagcggagauuucc

SEQ ID NO: 4154338 - RNA, 81 nt, Human
ggcccucgcauacaaggaguuuggggauuagucaggagcccgauaaacagcucaggaaucacaaaacuccaugugagugcu

SEQ ID NO: 4154339 - RNA, 61 nt, Human
ggcccucuuuuauccaucauaaaucaucaucagauuuauacuuuguuagcaaaagggggcu

SEQ ID NO: 4154340 - RNA, 56 nt, Human
ggcccugcaagguacccaggcccacaaacaaaagcaauggguucugcccacgggcc

SEQ ID NO: 4154341 - RNA, 66 nt, Human
ggcccugccugcugcccuccagagccugagaacacaugacuucagccuuaaacaucaggcaggguc

SEQ ID NO: 4154342 - RNA, 78 nt, Human
ggcccugcucacuaagcccuggagcaaaggugucuuauucucaagaacacaaaguucucaugggugcuagcagaggcc

SEQ ID NO: 4154343 - RNA, 62 nt, Human
ggcccugcucaggcugcgaugaaaaugcgaagcaccuacuauuuucagccugagcagcugcc

SEQ ID NO: 4154344 - RNA, 112 nt, Human
ggcccuggaaguggggggcagagaugugggucagaauccuacacagccccucaaagucuccacuguacugauuccccacacugccgaucacuuucuguguaacucaagggcu

SEQ ID NO: 4154345 - RNA, 63 nt, Human
ggcccuggcagccacgaaagcccuccagaugccuugaggacgccgucucuagccgggugggcc

SEQ ID NO: 4154346 - RNA, 61 nt, Human
ggcccuggccucucugagcagggagcaggaguccugccucccuguagaggccagccuggcc

SEQ ID NO: 4154347 - RNA, 95 nt, Human
ggcccuggcuccaacucugugucucugccaucucacuggguccugaaaugucagccugugucuguggcgugaggcucggcuuugccuccugggcu

SEQ ID NO: 4154348 - RNA, 72 nt, Human
ggcccugggguccuugccaugugucagcagcugcguugcuguguccugagaucauguguggaccccagggcu

SEQ ID NO: 4154349 - RNA, 55 nt, Human
ggcccuggucauuuugggaggauccuaggagaucuucaaagggauguccaugguu

SEQ ID NO: 4154350 - RNA, 74 nt, Human
ggcccugucccuguguggguggggccucuuccauuucccugacuuagaaaccacacuccacuuagaacaggguu

SEQ ID NO: 4154351 - RNA, 57 nt, Human
ggcccugugugaaaggaacacuugcucaggauuccuggauuuaguucuucacaggcc

SEQ ID NO: 4154352 - RNA, 60 nt, Human
ggcucagaggccagcagguagaagacaaucucagucaaauucauauuuuugcccugggcc

SEQ ID NO: 4154353 - RNA, 65 nt, Human
ggcucagcuacuaugugaaagccaggccaggcaggccuugccagcugcaaaguauguugaaagcc

SEQ ID NO: 4154354 - RNA, 58 nt, Human
ggcucaggaugagccuucucauugaacuaaauccaggaagaagcaucauucugauguc

SEQ ID NO: 4154355 - RNA, 100 nt, Human
ggcucagggcuccccucuuacaagcucgggcagcucauuaaggaaaauuccccguaacuguuugccugggcucagucaguguacagacccaaacagagcc

SEQ ID NO: 4154356 - RNA, 60 nt, Human
ggcucaggggccaggccugucccccagaaaccugccuugagaccucuggccccuuagacc

SEQ ID NO: 4154357 - RNA, 75 nt, Human
ggcucagugcagccuuucuguaucucacuguauucugcaagaugcuccugugaagaaaguugugcugcaucagcc

SEQ ID NO: 4154358 - RNA, 76 nt, Human
ggcucagugggguggaggagggcacaggucauucuggagcacuggggggccucucccuucucacgcaucaacagcc

SEQ ID NO: 4154359 - RNA, 81 nt, Human
ggcucagugucugggcucagaggcagcuggccuuugauccaggucccagacauaggcugccucugaugugcagacgaugcc

SEQ ID NO: 4154360 - RNA, 87 nt, Human
ggcucauuccacuacaucaugcugugccaggagauggaacacuuuucccuguucuccacaagcugaugcuaggauccugaaugagcc

SEQ ID NO: 4154361 - RNA, 79 nt, Human
ggcucauuuuaacaugcaaaugguggcuaaauggauugcuaaauugugagucacuuuaguuuguaaccuaguuugagcc

SEQ ID NO: 4154362 - RNA, 111 nt, Human
ggcuccaagacagcuucaggaggaguggcuccuuacaaguuccaugaggucaaugggauauuguucugggaguccuuacugaaggcucuaccuagaguuguacuuucagcc

SEQ ID NO: 4154363 - RNA, 62 nt, Human
ggcuccagcugcccuuaauaggcauucacugaagauaguggaauucuggguagccugggacc

SEQ ID NO: 4154364 - RNA, 69 nt, Human
ggcuccaggagaugcugggcagccgcagaagccccuuccagggcccagggugcucagcuccugugaguc

SEQ ID NO: 4154365 - RNA, 129 nt, Human
ggcuccaguguuggcaggucuccuccuccaugcagcccucccagggaacuggcucugcuugggaagucuguggggucccuggggcagcagcugggugaguccuggaaucaauccucaugucuggcugcc

SEQ ID NO: 4154366 - RNA, 58 nt, Human
ggcuccaugcugagcuuugaauaccugauacagcugugucagagcaaggaaugggguc

SEQ ID NO: 4154367 - RNA, 61 nt, Human
ggcuccauuaaugagcaaagacaguuauacugaccagucuugaaauucuguuaaaggagcc

SEQ ID NO: 4154368 - RNA, 68 nt, Human
ggcuccauuuccuacagccaugggauaaggguugcauguaaacaauaauauccugugcuguuugggcc

SEQ ID NO: 4154369 - RNA, 76 nt, Human
ggcucccaccugcuggggcuguccaucagcacuaauacuggcagugccugaggccaggacccccagcaggccagcc

SEQ ID NO: 4154370 - RNA, 87 nt, Human
ggcuccccugugaaccugccucuguugggcauggucuggagggggacccuguucacaggaucaucuacagcagggcaggagggagcc

SEQ ID NO: 4154371 - RNA, 81 nt, Human
ggcucccuccgcaguuaucccaagacggacaccugcggcuucugcaggaacauagguuccuugggaacugccgggcgggcc

SEQ ID NO: 4154372 - RNA, 112 nt, Human
ggcucccuggggaaaaugcagagggccacagccauuccagggaggcugaggcuaagugugggcagccuugaaugcgcugcauugguccuaggcacucaguguccggggcgcc

SEQ ID NO: 4154373 - RNA, 61 nt, Human
ggcucccugggggucggagagucuagccuucugcagcguggcugccugccccucgggggcu

SEQ ID NO: 4154374 - RNA, 57 nt, Human
ggcucccuguucuauucccugggguucagcagccccccuaaaugguucagggauguu

SEQ ID NO: 4154375 - RNA, 68 nt, Human
ggcucccuguuuccugaugagcccagacuucgauuccguguggguuuaagaggcagcauguaagaguc

SEQ ID NO: 4154376 - RNA, 82 nt, Human
ggcuccgcucaugagguggccgaggagcaggacauggcacacucauucgccuguccuuccacauggccaacuucugcuggcc

SEQ ID NO: 4154377 - RNA, 84 nt, Human
ggcuccgggagaccuggagcgauugcgggggucagagguuagggucaagggucagaccucucugucgccgccccuccuggagcc

SEQ ID NO: 4154378 - RNA, 72 nt, Human
ggcuccucaggggcagccggggaagccagucccagggcacaggcuggcaucacacucugccucugagggacc

SEQ ID NO: 4154379 - RNA, 74 nt, Human
ggcuccucuagucacuucuggucccagugucacuugcaggauucugggucugggugugaucacauuagggggcc

SEQ ID NO: 4154380 - RNA, 81 nt, Human
ggcuccugagcuuccucucugcacuggcccugcccaguauccuaggcagauggggugacaagagagagagacacaggcccc

SEQ ID NO: 4154381 - RNA, 66 nt, Human
ggcuccuggcaucugguggguagaggcagagaugccgcaaaauauccuccaaugcacgggacagcc

SEQ ID NO: 4154382 - RNA, 76 nt, Human
ggcuccugggaaggcugugccagaagaacuggaggauucugauagccuggaaguucugggccagcccccagguguc

SEQ ID NO: 4154383 - RNA, 62 nt, Human
ggcuccugucuguaucccuguugguaacacugcguacaccagugggauggggacuuugggcc

SEQ ID NO: 4154384 - RNA, 58 nt, Human
ggcuccugugccauccugagcaucccuuugauggaaagggagguggcagcaggaagcc

SEQ ID NO: 4154385 - RNA, 62 nt, Human
ggcuccuucacuccuccacccccgggggggauacuccuugggccuggcccuguggaggagcu

SEQ ID NO: 4154386 - RNA, 98 nt, Human
ggcuccuuccuccucgugacucaccugggccucacccagcucuugccugccugcgggaucaugggugaggcccauggguuucgggggcuuccccagcc

SEQ ID NO: 4154387 - RNA, 86 nt, Human
ggcuccuugaugaauugaauucauuuacucaaaugugcaggcuuaaacuuugcagaaaugaaauugaaugaccaucaagagaagcu

SEQ ID NO: 4154388 - RNA, 56 nt, Human
ggcucgugcgucacugcuauucaucuuguuuagugcuuggcuuggcugcagaugcu

SEQ ID NO: 4154389 - RNA, 57 nt, Human
ggcucuacacuagaccuacugaauuaagaaaucuagguugaagagucagguagggcc

SEQ ID NO: 4154390 - RNA, 56 nt, Human
ggcucucucuuggggauucagcagugaacaaagcaguguggccucuagagacagcc

SEQ ID NO: 4154391 - RNA, 85 nt, Human
ggcucucucuuuucuccagcuccccucagcagguaaucuauauaauagauuaccugcugaggggaagcuggggauagagaggacu

SEQ ID NO: 4154392 - RNA, 64 nt, Human
ggcucugaagauuaccagcuaaaugaucuuaccaaauuauuuagucucucuggcuucaguuucc

SEQ ID NO: 4154393 - RNA, 79 nt, Human
ggcucugaccugagaccucuggguucugagcugugauguugcucucgagcugggaucuccggggucuugguucagggcc

SEQ ID NO: 4154394 - RNA, 71 nt, Human
ggcucugcagggguggcugcagcagagguggcuuguucagggaagcuaccugcuccauccgugcugggacc

SEQ ID NO: 4154395 - RNA, 72 nt, Human
ggcucugcccagaugaagaggacauacaaaggguuggcaacucuuaaaguuucucuccauggguaagagacu

SEQ ID NO: 4154396 - RNA, 57 nt, Human
ggcucugcgcgguaaagugacucacugaaggucacacagccaaguagugacagaacc

SEQ ID NO: 4154397 - RNA, 88 nt, Human
ggcucugcuccccaggcugccugaggcugaggcccgucugcccccgcugcugcgugggcucccccugaggcagcgagggggcggcgcu

SEQ ID NO: 4154398 - RNA, 60 nt, Human
gggagggaggagccccggccauccccacccucguggauguaacugguuuucuucccucuc

SEQ ID NO: 4154399 - RNA, 76 nt, Human
gggagggaggaugggagaagaaugagagaaauauauagaguauaaaguucuucuuuaucucaguauccucuuaccc

SEQ ID NO: 4154400 - RNA, 67 nt, Human
gggagggaggcgacuuguccaaggccacaaagauggcaaauggcagaaccaggucugucugccuccc

SEQ ID NO: 4154401 - RNA, 115 nt, Human
gggagggaggguaaaagauuccagccucuuaauuuaaugucaacauuucugaagagcccuuauagcuccagagcucuucacaggauggcagaggcuguuauguauccucucucuc

SEQ ID NO: 4154402 - RNA, 79 nt, Human
gggagggcaagagaggaagagauggcagcuuuuuaagugaaauuuuaaucuuaucuaucuuuuguucauuuugaguccc

SEQ ID NO: 4154403 - RNA, 118 nt, Human
gggagggccagcucuguggcggugcagggugcuggagguggccugcggcuugacugauucccagggccaggcuccacuguaggcagcuccacaucagcuaacacaggcugucccuucc

SEQ ID NO: 4154404 - RNA, 81 nt, Human
gggaggggaaagaggguaaaggauguaacaguugcuguguccuccugacacuuuacacaucuuuucucauuuaacccucuc

SEQ ID NO: 4154405 - RNA, 55 nt, Human
gggaggggaacguggggcagaugcacaggaaugugcucugcccaguugucugccc

SEQ ID NO: 4154406 - RNA, 71 nt, Human
gggaggggcagccauggaacuccaugggccaaagccccagggcauuaggaguuaauggcugguccuaaccc

SEQ ID NO: 4154407 - RNA, 75 nt, Human
gggaggggcuccagccaccacaccccugccaagcagcugcgccgggaugaggggucauuggcugggaaccuuccc

SEQ ID NO: 4154408 - RNA, 58 nt, Human
gggaggggguugggguccugccuuagggucaaccagagagcaucuccuuccuccugcu

SEQ ID NO: 4154409 - RNA, 72 nt, Human
gggagggguuugugggcuggcucugucuagaaaggccucaggcccuaggcuauccccagucccuuccuuccu

SEQ ID NO: 4154410 - RNA, 68 nt, Human
gggaggguggacaggcaggcugucggggccggccgcgugcccagagaaccuucugugccacuguuccc

SEQ ID NO: 4154411 - RNA, 56 nt, Human
gggaggugauacuuuuucaccuguucauugaucaauugagggaguauugauuuccc

SEQ ID NO: 4154412 - RNA, 75 nt, Human
gggagguggcacuggagucaguggcuauugggcaccucccagugcccuggagucaguggcuauugggcaccuccc

SEQ ID NO: 4154413 - RNA, 55 nt, Human
gggagguggcugcggcgcgugcucauuggcugguguauggcuugcagccacccuu

SEQ ID NO: 4154414 - RNA, 90 nt, Human
gggaguaagucccauucacuaggcccaugauauguguucuauuuuaacuuuuuagcacaaggcaauuccuggugaauuauuuaguuuccc

SEQ ID NO: 4154415 - RNA, 130 nt, Human
gggaguagagagucagucugagauaaggcauagaaguugaucaaguagcgaguucauguuuccuggccagguaaaggaauagaaagcuguugaaauuuuugggcaauguuuuaauuuuucucucucucuu

SEQ ID NO: 4154416 - RNA, 65 nt, Human
gggaguagcaggcugguccguccacauuccaucaggcccugggaaacuuggaugccagcacuccc

SEQ ID NO: 4154417 - RNA, 90 nt, Human
gggaguauguguguguguauauauguauguguguguguugcuaaaagugauuuacuacaguauguguguuauacuucaauaaaauuuucc

SEQ ID NO: 4154418 - RNA, 59 nt, Human
gggagucuagcgugaggucugccugucaccaucaggcaggcaggauggcaguggacccc

SEQ ID NO: 4154419 - RNA, 62 nt, Human
gggagucugaugucccccaggccaggaaacagaaccacugagucaaaggauaucagauuucu

SEQ ID NO: 4154420 - RNA, 90 nt, Human
gggagucuugcucugucacccaggcuggagugcaguggcaucaucucaacucacugcaaucuccaucuccuggguucaagcaauucuccu

SEQ ID NO: 4154421 - RNA, 65 nt, Human
gggagugagaacauacaaacagagaaagggauauuuucuuuauaaaguauguuuuauaguuuccc

SEQ ID NO: 4154422 - RNA, 77 nt, Human
gggagugagacacaagugaauauuuuaaggagguuuauaagauuaaacucuaaaauuucgacauuguaaucagcccc

SEQ ID NO: 4154423 - RNA, 67 nt, Human
gggagugucuggagggaagagaugucaggcugaccuagacuagauguccuuuauuccagugacugcu

SEQ ID NO: 4154424 - RNA, 56 nt, Human
gggagugugcagaagcugggggguaaaugcaaucuugagaaauucagcacaguucc

SEQ ID NO: 4154425 - RNA, 81 nt, Human
gggaguuauaugaagugucuguuguaucugggaaccucauuggaggcucauagauaguuuuagagauuucagauaccucuu

SEQ ID NO: 4154426 - RNA, 60 nt, Human
gggaguuauuacccugauuuucaaaugaggaaaucaaaaccuacagagguaaugacuucc

SEQ ID NO: 4154427 - RNA, 126 nt, Human
gggaaaaaucgaaaaacaaauguaagucuaaaucuccuuacagagaagaaaauguaguguggccuggccuaauauuacgacuuuuccaaggaguuacuauauaugguuuaacagaagauuauuucc

SEQ ID NO: 4154428 - RNA, 61 nt, Human
gggaaaaguccugacugcaggggaugcugagcgaggggcugcagaccccucaggaccuccc

SEQ ID NO: 4154429 - RNA, 67 nt, Human
gggaaaagucucucugugugggauaagaaaaauaauuugugauuccacgucagcagaggaaaccccc

SEQ ID NO: 4154430 - RNA, 56 nt, Human
gggaaaagucugcaagaaagcuuauccuccagaugggcugccuuuuaauucuuccc

SEQ ID NO: 4154431 - RNA, 81 nt, Human
gggaaacaagcagggagcaucaagggaggggccccugcucagcaucccuccuauuuggagcuuccuugucugaugucuccc

SEQ ID NO: 4154432 - RNA, 67 nt, Human
gggaaacacaagagcaaggugcugagguaaaaaacaccugaggcagcuuuuucuguguguuuuuccc

SEQ ID NO: 4154433 - RNA, 60 nt, Human
gggaaacagagugaagcugugaggucaucuuggaggagcucacaucuuuauuucuuucuc

SEQ ID NO: 4154434 - RNA, 62 nt, Human
gggaaaccaaucuauccuucauccugggguccaaaauucccagguaagagacggauuggccc

SEQ ID NO: 4154435 - RNA, 76 nt, Human
gggaaacccuaaagaauaauacccauggagcuuaauaaauaaggcccacagguccuaccucuuucucuuguuuccu

SEQ ID NO: 4154436 - RNA, 68 nt, Human
gggaaacuuugcaagguacuaacuguaagucccaugcugugcagucugccugugcaaaggaaaauccc

SEQ ID NO: 4154437 - RNA, 58 nt, Human
gggaaagaccuuccugggguguggccuuugucuguuuugucccgggugggcuguuccc

SEQ ID NO: 4154438 - RNA, 60 nt, Human
gggaaaggaaucauauccugugaaguacauuuccagguguaagacaugguccuacauccc

SEQ ID NO: 4154439 - RNA, 84 nt, Human
gggaaaggaggaggaaacccuguuccucugauguuugguggccugggugucagcaggcagcaugggacccuccugucugaucuc

SEQ ID NO: 4154440 - RNA, 55 nt, Human
gggaaaggguggccagaagaugggcuuugugcugucaacuuugcuacccuauccu

SEQ ID NO: 4154441 - RNA, 63 nt, Human
gggaaauaccuauuggcuaucugagagacugauccccaucucucagacuccccaugguuuccc

SEQ ID NO: 4154442 - RNA, 60 nt, Human
gggaaaucucguccucuauuuacccuucguuuugaagaugggugcaaugacaugauuccc

SEQ ID NO: 4154443 - RNA, 68 nt, Human
gggaaauucaggacaaagacucuuguguuuuaaaacaugcucaagucucuuuucuuccuguauuaccc

SEQ ID NO: 4154444 - RNA, 59 nt, Human
gggaaauucuuagaaagcaaugcuuugcaaccacaaugcaucaaagucugaaauuucuc

SEQ ID NO: 4154445 - RNA, 70 nt, Human
gggaaauuucaaggggcauugugaguaauaggaguuuucuucuccuugcagcauccuuugcugguuuccc

SEQ ID NO: 4154446 - RNA, 105 nt, Human
gggaaauuugcaaagguguaaggaaauugaguccgcucaggccaggcauaggccugugugaggcuugggcauggcuccugucuuacucccuugcuaaugcugccc

SEQ ID NO: 4154447 - RNA, 55 nt, Human
gggaacacagacuugaugaugauuccugguuccgagcucaugucacugugcuccc

SEQ ID NO: 4154448 - RNA, 89 nt, Human
gggaacagaaaaacgaguucaucugcucugugguccaugagacagcgacuggcucacagaccgucaaguaacuguugucuguaaauccc

SEQ ID NO: 4154449 - RNA, 83 nt, Human
gggaaccaagcagguaguuagaagagucuauuaccugccuagaaaagcaaaauagauuugaauuuaagacuugcaugcuucuu

SEQ ID NO: 4154450 - RNA, 57 nt, Human
gggaacccaugauuaugguuagguccuauggggaucguugugagaacuuggguuuuu

SEQ ID NO: 4154451 - RNA, 59 nt, Human
gggaacccuaucaugguagaacaggaaucugauuuuguuauuaucuguuagguguuccc

SEQ ID NO: 4154452 - RNA, 72 nt, Human
gggaaccuccauacuguguuccaugguggccgcaccaacuugcauucccaccagcagugugcaaggauuccu

SEQ ID NO: 4154453 - RNA, 55 nt, Human
gggaaccuuugugcuccacuggguuuucccagcaguuguuggugcacaucuuccc

SEQ ID NO: 4154454 - RNA, 83 nt, Human
gggaacucaagauggguauagacuuucugaaauacauuuucacagagaacuauaauccaucuuccagaagagccagagauucc

SEQ ID NO: 4154455 - RNA, 56 nt, Human
gggaagaggcagacuggaaaccugggccgguccagcccaggcagcagcaucuucuc

SEQ ID NO: 4154456 - RNA, 61 nt, Human
gggaagcaucugaggguccacuugaacuccagugaaaauggcuccaggauuagaugcacuc

SEQ ID NO: 4154457 - RNA, 61 nt, Human
gggaagccaugcucagagguacaucucuaugcucuuucuaccucuaguaauaaaguuuccc

SEQ ID NO: 4154458 - RNA, 77 nt, Human
gggaagcggcggcacgggaggcguccucgggagccggggucucacgguccagggaacgcccccgccgccggcuugcu

SEQ ID NO: 4154459 - RNA, 75 nt, Human
gggaagcuggagcugggaguccugggcugcugggugaccucugcagaccccuccucucugggccuuagcuucucc

SEQ ID NO: 4154460 - RNA, 66 nt, Human
gggaaggaaggagggagcggcgcggauucugccucugcagcagagcccccaucccucuuuccgccc

SEQ ID NO: 4154461 - RNA, 55 nt, Human
ggcucuggggaagcucucuucagguauccccuugaggagugccagccguggaguc

SEQ ID NO: 4154462 - RNA, 59 nt, Human
ggcucuggguucugcaaugcguacuacaggaaucauugaacuacgcaugagcccgugcc

SEQ ID NO: 4154463 - RNA, 96 nt, Human
ggcucuggugacaccuugauuucagacuucagaacugauaccauaaauuucuguuguucuaagucacucagauuuugguacuuuguuacgguagcc

SEQ ID NO: 4154464 - RNA, 59 nt, Human
ggcucuggugugaagcagccuccaugaggucacacagguagcugcggcaucccagggcc

SEQ ID NO: 4154465 - RNA, 58 nt, Human
ggcucugugguggagugggucaccccccugggcguccccaucauccagccguaucgcc

SEQ ID NO: 4154466 - RNA, 69 nt, Human
ggcucugugugguauacagcaacacaguuugagauauuucugugauguucuguauaucauauaguugcu

SEQ ID NO: 4154467 - RNA, 63 nt, Human
ggcucuguuguauuuccaacuauguaugguaugugguuguuuuagauacacccugcaguagcu

SEQ ID NO: 4154468 - RNA, 111 nt, Human
ggcucuucuucagucacuucccaucuccccagccuugccucugcuuacuggaguguuacucugaggguuguagagagggacggagugagggggaagugauuguuggugguc

SEQ ID NO: 4154469 - RNA, 62 nt, Human
ggcucuugggagcucagaguugaagcuuuuucaaugguauuuacucuggugcuccaagagcc

SEQ ID NO: 4154470 - RNA, 55 nt, Human
ggcucuuuggcgggccuugaacuugcuggaaaagaccaggccugcacacagggcc

SEQ ID NO: 4154471 - RNA, 84 nt, Human
ggcucuuuugggaaccagagacucuuucuaguccugaaugugugguugggggcaggagguguucucuuuuuccuucucuggguc

SEQ ID NO: 4154472 - RNA, 58 nt, Human
ggcugaaacucuuuugcauauuagaggcagaagucucucuuggcuuaggaguguagcu

SEQ ID NO: 4154473 - RNA, 75 nt, Human
ggcugaaauaaaacuuuuucuaaugcaguguuugcaaugcaagauauucuauguagaaugagcuuuauuacaguc

SEQ ID NO: 4154474 - RNA, 65 nt, Human
ggcugaaaucauuccagaacuuuuagagcuacauggaagcucagaaauguucuaaugauucaguc

SEQ ID NO: 4154475 - RNA, 59 nt, Human
ggcugaagaacugggagucucauuuauugaguugugaccaucuuucaguaauuucagcc

SEQ ID NO: 4154476 - RNA, 73 nt, Human
ggcugaaggaguggaguugaguugauggauucuugauccuucuuggagucuaaucccucaucuucaaucagcc

SEQ ID NO: 4154477 - RNA, 77 nt, Human
ggcugaagugcaguggcgugaucuuggcucguugcaaccuccaccucccggguucaagagauucuccugccucagcc

SEQ ID NO: 4154478 - RNA, 99 nt, Human
ggcugaaugucagaagcccuggggauaucaaacccacuguucuggggugagagcucugcagcagcagacauuugaucuucccuguuuccuuggccagcc

SEQ ID NO: 4154479 - RNA, 73 nt, Human
ggcugacaucugucauaaaauguauaaacaagaaaaccaacaauauauauauuuuuugagacagagucuugcc

SEQ ID NO: 4154480 - RNA, 67 nt, Human
ggcugacccugccaugagugacagggacuuucuucuccuugacugccuucaggcugggacaucaguc

SEQ ID NO: 4154481 - RNA, 127 nt, Human
ggcugagagucaggugccaggcuuugucugaauuccagccugcuggaugggcugucccccaggaaguccucucuggggcuagaauccugcaggaacuggggaagagcuguuugcacacacuccagcu

SEQ ID NO: 4154482 - RNA, 60 nt, Human
ggcugagcuuuucaugaugguuccugcugaccuggaaacaucuuaaauggaagguuagcu

SEQ ID NO: 4154483 - RNA, 120 nt, Human
ggcugaggaaaaaggguaacaccgugagucaugagcugcugggagccugucgucuuggauauggcaggacagucccaguucaaacauucuggccuuuuuaccguuugguucacucagacc

SEQ ID NO: 4154484 - RNA, 76 nt, Human
ggcugaggcagguggaucaccugaggucaagaauuugagaccagucugaccaacauggugaaaccuugucucuacu

SEQ ID NO: 4154485 - RNA, 93 nt, Human
ggcugaggcaugaggaucgcuagagccuaggaguuugagacuagccugggcaauauagugaggcccugccucuggaaaaaaaaaaaaaaagcc

SEQ ID NO: 4154486 - RNA, 74 nt, Human
ggcugagggucaggggccaugggccaaggaggucagucagaucuccuuggaucuggaggcccuggcuuucagcc

SEQ ID NO: 4154487 - RNA, 70 nt, Human
ggcugaguccacauuccuggguagauccgugauacacagaauguaaggcccauggagucuggaucuggcc

SEQ ID NO: 4154488 - RNA, 82 nt, Human
ggcugagucuuucucggagggagggcaugcuggcagacagagcuuuguaaacagcauccuccuucccagagaugcuucugcu

SEQ ID NO: 4154489 - RNA, 61 nt, Human
ggcugaguguccuuuuauuagucugagccccuagagagaccaaagaggcaacccucgagcc

SEQ ID NO: 4154490 - RNA, 67 nt, Human
ggcugauacuuccagcuccucucuaaugaacacaaacaccuuauuauccaaagagcugggagcaggc

SEQ ID NO: 4154491 - RNA, 62 nt, Human
ggcugauagacaaucaccaugggaauaggaaugucucucucccaucuauugugaucaaugcc

SEQ ID NO: 4154492 - RNA, 64 nt, Human
ggcugaucauuagcuuuucaaaggagucuaggugaauuuuaaagugauauggcuaugaacaguc

SEQ ID NO: 4154493 - RNA, 57 nt, Human
ggcugaugagcccacagagugcagcccggaugggaccaccugugagacucucagacc

SEQ ID NO: 4154494 - RNA, 64 nt, Human
ggcugaugaguuaguauuagucacuuccugaaaggauaguaucacacuguucuaacuugcagcu

SEQ ID NO: 4154495 - RNA, 63 nt, Human
ggcugaugcaggguugagaggagcugguuuccuccuuccucucucauccuugcaggcuuagcc

SEQ ID NO: 4154496 - RNA, 69 nt, Human
ggcugaugcugcuuugggguuuggaaguacagccccaacaacugggcuguucccacaccagccucagcc

SEQ ID NO: 4154497 - RNA, 73 nt, Human
ggcugcaccugcugccauuagggcacagaccccagcuaauggcaugucuucugcccaggcagacggagcagcu

SEQ ID NO: 4154498 - RNA, 56 nt, Human
ggcugcacuuggugaggcagcccacagccaggggcccgauugccuugcugucaguc

SEQ ID NO: 4154499 - RNA, 60 nt, Human
ggcugcaggcugcaggucugggucaugucuauucuacgugucucauucugggguccagcc

SEQ ID NO: 4154500 - RNA, 64 nt, Human
ggcugcagggugaagggaugugucucacccagggaaagcagagcacacacuuugaucuugagcc

SEQ ID NO: 4154501 - RNA, 106 nt, Human
ggcugcaguacaguggcaucucggcucacugcaaccuccgccugccagguucaagugauuugccugccucagccuccggaguagcugggacuacagaacuacagcc

SEQ ID NO: 4154502 - RNA, 67 nt, Human
ggcugcagugcugagggggaaggaaagcugaugugcaucacugccggucuccucaugcccuguaccc

SEQ ID NO: 4154503 - RNA, 55 nt, Human
ggcugcaguuugcacauccaaggccccagaugggccuuggcuggcaucuagcacc

SEQ ID NO: 4154504 - RNA, 56 nt, Human
gggcacuggugcugccaucuugugagcgccuggugagacuggugcugccgguggcc

SEQ ID NO: 4154505 - RNA, 83 nt, Human
gggcagaacauagccuuuaagucauggucacugauugccucacuuggcagcguguccuuuuagcuucaggucauuuucuguuu

SEQ ID NO: 4154506 - RNA, 59 nt, Human
gggcagagcaguuucuggccauuagaugaacaucugugugcccuaaagccugcucuccu

SEQ ID NO: 4154507 - RNA, 68 nt, Human
gggcagaggcucuggcccauccuggccuccugcucagccuuggccaauggggcuagaggguucugccc

SEQ ID NO: 4154508 - RNA, 61 nt, Human
gggcagaggggauaacagguguagauguuaaaugauuuucugggcaaagucccauuugcuu

SEQ ID NO: 4154509 - RNA, 88 nt, Human
gggcagaucauaaaauguucgaagucaggacaagcuggugagacugacucacacacuguaaggacuaucacugaacauuuuucugucc

SEQ ID NO: 4154510 - RNA, 83 nt, Human
gggcagaugcuuccaucuccaccugaacccucccugaugcauauucaugaggcugugucuugggguggaagugccuucugccu

SEQ ID NO: 4154511 - RNA, 57 nt, Human
gggcagaugggcugccagaacuugucauaguuccagcacagaauuuccuagcugccc

SEQ ID NO: 4154512 - RNA, 101 nt, Human
gggcagcaaggagccaggggcacugcuuuucagagucugccuggccaucggggcaggcgagggcccugaggagcccugaggagcccugaggagcccugcuc

SEQ ID NO: 4154513 - RNA, 57 nt, Human
gggcagcagaauuggacagaaacagcaugagguuuugaugccagucucugccugucu

SEQ ID NO: 4154514 - RNA, 78 nt, Human
gggcagcagguugcagauggauguggacggcgccaaggacccccacugggucugucuucccaaucguggccucugcuc

SEQ ID NO: 4154515 - RNA, 65 nt, Human
gggcagccacguaaggaagcagccucucuugugccuggaggucaggcuggcccuacuggcugccu

SEQ ID NO: 4154516 - RNA, 76 nt, Human
gggcagccaguccagaggagcugagaguagggcagggaguugacucccugagucuuggcuucuuggcuguguuccc

SEQ ID NO: 4154517 - RNA, 60 nt, Human
gggcagcccauaacauuugaggccuccccuaugccaucuggaggcuuuggugggcagcuc

SEQ ID NO: 4154518 - RNA, 65 nt, Human
gggcagcucggaagugggaaagagggccaggaauccauagggcaucauucucccgccagcugccu

SEQ ID NO: 4154519 - RNA, 60 nt, Human
gggcagcugcaaaucugcucuguaggacuucacuucaacaccagacuaaugcaguagccu

SEQ ID NO: 4154520 - RNA, 59 nt, Human
gggcagcuggccagguauucugggcuguccccaagggagccaggggccagcuauuuccc

SEQ ID NO: 4154521 - RNA, 82 nt, Human
gggcagcuguggaugccgcaggcuucauggagcuccccuaggcuggagggggcuggaugggagccuuggccuucaggguccc

SEQ ID NO: 4154522 - RNA, 80 nt, Human
gggcagcuuuaccggagggcaaaacagagaagaugugaauccccuucacccucucuuccguguguuuugcuagcaugcuc

SEQ ID NO: 4154523 - RNA, 92 nt, Human
gggcaggacgagcugcaagggggaggaugccaagcugugcacacggaaagcaccuacuguuacggccauggcaaccucagcugcuccugccu

SEQ ID NO: 4154524 - RNA, 58 nt, Human
gggcaggagaagguggaugucccagauccaggagggcaaauucgcccuuucucugccu

SEQ ID NO: 4154525 - RNA, 59 nt, Human
gggcaggagaggcagccagguaggaggacccacccccugaagcaguucccucucugccc

SEQ ID NO: 4154526 - RNA, 61 nt, Human
gggcaggaggcuaauucugcauacuggaugcaugggccagguucaggugggucuccugccc

SEQ ID NO: 4154527 - RNA, 60 nt, Human
gggcaggcaccgcggcggcagguuguuauuuuugggggcucagcgccgcgcguccugcuu

SEQ ID NO: 4154528 - RNA, 73 nt, Human
gggcaggcacuugggucugaaaauggugaccaccagcagguugcuggcuucuggccauucagccuccugaccc

SEQ ID NO: 4154529 - RNA, 83 nt, Human
gggcaggcgggguagcucugaggccaucuccgguaaaacugugcugggaugcgucuucccaggcuuuguucccuucucugucu

SEQ ID NO: 4154530 - RNA, 57 nt, Human
gggcaggcuguccugggccugccuucaaugauaaggcugugcacagggcaccugccu

SEQ ID NO: 4154531 - RNA, 117 nt, Human
gggcaggcuucccuucccuggggucagauggacaggccucaagacacccaggugguccuagguggaugauguggguccagaugagcccacaugaccccagguggacgaggugggucc

SEQ ID NO: 4154532 - RNA, 58 nt, Human
gggcagggcagggcaagaacuggguguggcuuccuuuggcccaggcucugcccugucc

SEQ ID NO: 4154533 - RNA, 63 nt, Human
gggcaggggcagugguggcauucuggggacaugucucuugcaguaccaucucugccucugccu

SEQ ID NO: 4154534 - RNA, 83 nt, Human
gggcagggggcugaguccagggacagaggcguucccaggaggaaggggcacaaacucugcaccugugauuccaacucaugcuc

SEQ ID NO: 4154535 - RNA, 66 nt, Human
gggcagguagaccaccagaaccuccauuucuuaaagccccaauggacagcuggaaauuacuugccc

SEQ ID NO: 4154536 - RNA, 74 nt, Human
gggcagguaggaaauuuauagagguguuucaaaaagaaauucuagaauaaucacuuuaaguauugcauuugccc

SEQ ID NO: 4154537 - RNA, 71 nt, Human
gggcaggucucauuaaaauaucucaugguguugauuuguggaaguuacucaacauggagguggcacugcuc

SEQ ID NO: 4154538 - RNA, 65 nt, Human
gggcaggugauuuuggcuccauguccccugacuucagguuguaagugugcuagaaucacucaccc

SEQ ID NO: 4154539 - RNA, 56 nt, Human
gggcagguggcagggucucugguuccuggguugggccucccgcucugucccugcuc

SEQ ID NO: 4154540 - RNA, 59 nt, Human
gggcagugcacaugugugcauuuguauguguguguuuugcauauuauguguaucugucu

SEQ ID NO: 4154541 - RNA, 64 nt, Human
gggcagugggacagagggacccaaacagucagccgauugcaggagcuuggcucugucccagccc

SEQ ID NO: 4154542 - RNA, 57 nt, Human
gggcauaguguaaucacagcacuuugggaggccaaggugggaggauugcuugagccc

SEQ ID NO: 4154543 - RNA, 62 nt, Human
gggcaugagggccuggcaguuuucugucuucuggggcaaggugcugccagugccugaugcuu

SEQ ID NO: 4154544 - RNA, 84 nt, Human
gggcaugcaauuaguuuccaaauuuucauuauuaagaaaacagaauuaacaucugugugaacauuucugguuauuugcuggccc

SEQ ID NO: 4154545 - RNA, 65 nt, Human
gggcaugccugagccugccacucuuguugguuugacagcuuuguuggcucugcucagagcagucc

SEQ ID NO: 4154546 - RNA, 65 nt, Human
gggcauggaaguacuaaggggugcccuggagaaucccuggguuccaaacauagucuuccuugucc

SEQ ID NO: 4154547 - RNA, 65 nt, Human
gggcauggaggucugucugcagaggcccgggccugggcacaaagggagagaggccuccauugucc

SEQ ID NO: 4154548 - RNA, 59 nt, Human
gggcauggcagggggagcugcagggccaucugaggggccccagcaucugagccgugucc

SEQ ID NO: 4154549 - RNA, 85 nt, Human
ggcauauggagaugagguaacaagccuggauaaucuacaaacuccugaguccaugcuuaaauaccuuaaagugcgccauauugcc

SEQ ID NO: 4154550 - RNA, 62 nt, Human
ggcaucagagguguguucugcuccacugcuauugccucugcacagaaugcauuucugcuguc

SEQ ID NO: 4154551 - RNA, 63 nt, Human
ggcaucaggaucugucuugcuucuguaaauauuuaaacacugggaggauuauuuuugguagcu

SEQ ID NO: 4154552 - RNA, 77 nt, Human
ggcaucauucuggaaaugguaaacauuuuaauggucagacccuguccacuuaugcauuacuauuuccaguauuaucc

SEQ ID NO: 4154553 - RNA, 74 nt, Human
ggcaucccacugggucuggaggccaaggguggggguggccuccuccacgaagguuucuuggcuuaucugggacc

SEQ ID NO: 4154554 - RNA, 123 nt, Human
ggcaucuauuguuuccugaguuuuuaauggucaucauucuaacuggcaugaaauggcaucucauugugguauugauuugcauuucgaccagugaugaugagcuuuuuuuucauguuuauugcc

SEQ ID NO: 4154555 - RNA, 64 nt, Human
ggcaucuccaaaacaugaacucaacucccaagagcuguggugauguucauuuuauggcgaugcc

SEQ ID NO: 4154556 - RNA, 64 nt, Human
ggcaucugagacagaaguuggaauuagauacugaaccagacugucugucaacuccugggauguc

SEQ ID NO: 4154557 - RNA, 84 nt, Human
ggcaucuucuggaacacaagcguaugucuuugucuuuaaaaaaugauuugggguugcuugugauuuugggggaauauggaugcu

SEQ ID NO: 4154558 - RNA, 65 nt, Human
ggcaucuuucuggugcccaugcaauuuauaucagugagcacugauugggcaccagaugggaugcc

SEQ ID NO: 4154559 - RNA, 73 nt, Human
ggcaugaagagcuuuacuugauauggagcugaggagugauucucacacuauuucaggugacuuucuuuauuuc

SEQ ID NO: 4154560 - RNA, 105 nt, Human
ggcaugacaucaaaggucugggcccauccauaugaggcacauugguuaacugauaccaaaguuugcacauggaugauuuuguucaguccucagaucaaucuugcc

SEQ ID NO: 4154561 - RNA, 77 nt, Human
ggcaugacugaaggcacagggaggcccugguguggagucccacagacuuugacgccagcauucccagcccagcggcc

SEQ ID NO: 4154562 - RNA, 68 nt, Human
ggcaugagaaggccuggccucaaccaaaaacagugcaaauucuggguagaacucuggucuucucaucc

SEQ ID NO: 4154563 - RNA, 61 nt, Human
ggcaugagccacugcccuuggcucauaauuuccauauagccauuuccaguggcaucaugcu

SEQ ID NO: 4154564 - RNA, 91 nt, Human
ggcaugagguaauacaaucaaauucacuagcaccacuccuggcccuuaaaaggugcugcuauuugguaaguauuauuaucauuuguuggcc

SEQ ID NO: 4154565 - RNA, 124 nt, Human
ggcaugcauucuaggguguaaucguuuuagcucugggaacuauaucugguggucagacacuaagagacuaaucuaauuauguuuccagaugugaagauauguaccugcccauguaauacuugcc

SEQ ID NO: 4154566 - RNA, 73 nt, Human
ggcaugccagggcuugcugccuggcaggaccugugcacagcaaagcaccaggcaaguagaagcuguggugguc

SEQ ID NO: 4154567 - RNA, 86 nt, Human
ggcaugccuguguguacguguaugugaguguggugaguugcuucugugcacacacucguguauaugagugugcaugcaagugugcc

SEQ ID NO: 4154568 - RNA, 59 nt, Human
ggcauggaacacauuaaccacagggaagagcaacuucccaaugcuuucguuuuccagcc

SEQ ID NO: 4154569 - RNA, 63 nt, Human
ggcauguacauuguguacuagcacugcucaacagaaacauaauguaagacacaaaugcaagcc

SEQ ID NO: 4154570 - RNA, 84 nt, Human
ggcauguauuugaaacuuagaaauugagcugagaccucaaagcucaguucaguuaagaguuucauguccuggagcgaugcugcc

SEQ ID NO: 4154571 - RNA, 63 nt, Human
ggcauuaaggaauguaggcaagaagucuguucugauuuuucaaguauguauucuuuguauguc

SEQ ID NO: 4154572 - RNA, 55 nt, Human
ggcauuacuccaaguauuuuuggaagucaacuuucagaauugucuggggaauguu

SEQ ID NO: 4154573 - RNA, 61 nt, Human
ggcauuagcgucugccucguccacaugcugugcaagcucagcgaggccaaggggcugggcc

SEQ ID NO: 4154574 - RNA, 89 nt, Human
ggcauucacaggagcguauguuucccaagcuacauuucuguaaguuucaaaacuuuaaagcagaauggcuaugguaauauccuaaugcc

SEQ ID NO: 4154575 - RNA, 66 nt, Human
ggcauucagugaaugaauccuaacaaagacaaugucaaugauuuguuuuucuuuauuccgaaugcu

SEQ ID NO: 4154576 - RNA, 85 nt, Human
ggcauuccacaaugugcuggaacugugcuaagagaaggaaccgugaccuuggagcucuccugcagauucagcauuauugccugcc

SEQ ID NO: 4154577 - RNA, 62 nt, Human
ggcauugcuuuuuauaccgugccaguugagcguuacucgggugugggaguagaaagugaucc

SEQ ID NO: 4154578 - RNA, 59 nt, Human
ggcauuguuuacagcacugcacacugcuuucauuacgaagggcugauguagacaguguc

SEQ ID NO: 4154579 - RNA, 55 nt, Human
ggcauuuagagggcuuuucugauggccacugaaggagagagagcccucagauguc

SEQ ID NO: 4154580 - RNA, 87 nt, Human
ggcauuuaugaugcauugaggaugacaugaguaaaaugaaaacuuagagcacucaccagggucauucuuucauggacaucugaugcc

SEQ ID NO: 4154581 - RNA, 55 nt, Human
ggccccacagccaguggagacugagccauggccaccucucuggaaggugggagcc

SEQ ID NO: 4154582 - RNA, 60 nt, Human
ggccccagccacugugugaccagcuguccuccuguggggccagccucaauaguagggguc

SEQ ID NO: 4154583 - RNA, 86 nt, Human
ggccccagguggugcugagagaagagcgcaguuuguuuuuggauucuauaacaauuugugucuuuugcuuauucaccagcuguguc

SEQ ID NO: 4154584 - RNA, 75 nt, Human
ggccccagguguguacagaacagcacccaccugcccacgaggucacccugugcccuguugcacacuugaggggcc

SEQ ID NO: 4154585 - RNA, 87 nt, Human
ggccccagugcugugggcugacucaggcugagcuaaguuucuauucagggauuuaauuuuccugguaggccuggcaugucaagggcc

SEQ ID NO: 4154586 - RNA, 78 nt, Human
ggccccauuucucuaaauggucucuuuguucccugcugggcugcucaguaucagaugugauuaaagggagaugggguu

SEQ ID NO: 4154587 - RNA, 70 nt, Human
ggcccccaggcaccucacgugggucccacagggcgugcauccauuguggggccuggcacuuuuaugggcc

SEQ ID NO: 4154588 - RNA, 60 nt, Human
ggcccccaggguggguguagacauucaucucugcuucauuugauccaccucugcuuggcc

SEQ ID NO: 4154589 - RNA, 99 nt, Human
ggcccccucccuucagcauggccugcagcggccacccucgcagcucggcuucccccacgcugcuggugguugcauaggccagcagcugggagcacagcc

SEQ ID NO: 4154590 - RNA, 58 nt, Human
ggcccccucuuuggagccagccacccacagggcuuuggugccucagaagcagugggcu

SEQ ID NO: 4154591 - RNA, 77 nt, Human
ggccccgccccggccuucacgugaccuggcgugcggagcgcgcacgcgggaacccgcgcuggaggcgggcgagggcc

SEQ ID NO: 4154592 - RNA, 64 nt, Human
ggccccuagcacggaguucuucccgggcuccaccugcccuggaagguucucuggcucaggagcu

SEQ ID NO: 4154593 - RNA, 94 nt, Human
ggccccucauuaccuaucucacuggccagcuuugcuucuuuccaccuggaggcauuugagccauuggccugugaucuauauaaugucugguguc

SEQ ID NO: 4154594 - RNA, 59 nt, Human
ggccccugagcaaaggaaggaugacugugaccccaaagauauccaucugcucagugucc

SEQ ID NO: 4154595 - RNA, 63 nt, Human
ggcccgcagcucgcucugguucugcagcuggaagacagaagccaagagaugaggcugcaggcu

SEQ ID NO: 4154596 - RNA, 88 nt, Human
ggcccggcucggcaggagucagagcccccagcggcgcgggcgagcccgggccagcagccgagagggggcucugagcggagccgcggcc

SEQ ID NO: 4154597 - RNA, 102 nt, Human
ggcccgugggcagcuggcugaggcccugcagcuuugccuccugaacucagagcucaccagguggggcuguugggacauccuccugccgaugccaucugagcc

SEQ ID NO: 4154598 - RNA, 119 nt, Human
ggcccucaagcagguucaugaugcagugauauuuuugcagacaccugggccaugcuucagcuauaaugcaccauuuccagauguuugaagaauaccauuggcagcauccuuugagaguc

SEQ ID NO: 4154599 - RNA, 76 nt, Human
ggcccucaggaaaggugagagcggccgcgucccuccgcucacgugggccucgcacgcuccucaccgcucccgggcu

SEQ ID NO: 4154600 - RNA, 76 nt, Human
ggcccuccaggcgggaggcgguuccaggaagugaagugagcaggugcugggacuccccuccccuccuggaggcgcc

SEQ ID NO: 4154601 - RNA, 65 nt, Human
ggcccucccggugaugaagagcuggcagcacucacucuguggcgggaucuguuccugggagggcc

SEQ ID NO: 4154602 - RNA, 59 nt, Human
ggcccucugccugugcuggcgagucccuccaucucccuuaucagacaagcagcagggcc

SEQ ID NO: 4154603 - RNA, 55 nt, Human
ggcccucuguggcugccauggagacuggggggccaugggcagaggcagagaggcu

SEQ ID NO: 4154604 - RNA, 77 nt, Human
ggcccucugugggaucacaugaguuaucuaacuuuguucuccaaauaagccagcccaugugaccccucgcaggggcc

SEQ ID NO: 4154605 - RNA, 71 nt, Human
ggcccugagcagcugagccccagcugugaucauccagcaugaugcagcgugaggacagcugagcagggacc

SEQ ID NO: 4154606 - RNA, 57 nt, Human
ggcccugagcccuggcucaucagccccuuucuggggcagguggcucagggcccagcc

SEQ ID NO: 4154607 - RNA, 60 nt, Human
ggcccugcacagccuggcucucuucugguagcaggucaaggagaaucagcuggcaguccc

SEQ ID NO: 4154608 - RNA, 103 nt, Human
ggcccugggcaucccgcagcagcuccauuguguccucauugaccuucaccagccggaugggguacacguggggcaggaugcggcuguugaaaccacaggagcc

SEQ ID NO: 4154609 - RNA, 65 nt, Human
ggcccuggggaccaggagcaagcaggggggugaaaaagagcugccuguuccaggaggccagggcu

SEQ ID NO: 4154610 - RNA, 63 nt, Human
gggcuucaaagcagaaaaacccagguucagguucugacucugcuacuuucuagcugugaaccc

SEQ ID NO: 4154611 - RNA, 60 nt, Human
gggcuucagaagguggcuccacuucuggguggcagugacaggcagaccugcugagagccc

SEQ ID NO: 4154612 - RNA, 73 nt, Human
gggcuucagcuucaacauccucugugugggugagugucagggccuggccucagacagagggugggugagaacc

SEQ ID NO: 4154613 - RNA, 61 nt, Human
gggcuucaggagggucagcccaggccaagcuacuguauuuggguuguucccauccaggccc

SEQ ID NO: 4154614 - RNA, 73 nt, Human
gggcuuccccgcaggugccggcagaugggguagcgaaugguccugugccuccaccugcuccaggagggagucu

SEQ ID NO: 4154615 - RNA, 82 nt, Human
gggcuucgggauucucuguuuggcgcugcuccuucucucgugugggagggaacgggaggcagagccaggcaaguccuagccu

SEQ ID NO: 4154616 - RNA, 63 nt, Human
gggcuucuucaugcacauuuucuguguuuguagcuuucacuuuaaauggcacaugggaagucc

SEQ ID NO: 4154617 - RNA, 74 nt, Human
gggcuugagccaugcugacccugugcaggcaugaugcugucugcuuuugcucagcuucggacaucucucugccu

SEQ ID NO: 4154618 - RNA, 62 nt, Human
gggcuugauaaccacaggccagucuguaucuucaauauagaugccugccaguuauuuagcuc

SEQ ID NO: 4154619 - RNA, 91 nt, Human
gggcuuguucuugggacucagcuuccugucuucugcacaaaauccccugggcuuuguugucaucagugaugaguccucaggccccaagucc

SEQ ID NO: 4154620 - RNA, 86 nt, Human
gggcuuuaucuuccuggcuucauacuuuguacccauccuguugcaugaauguacguuguagagucaugauaugcgguguauagcuc

SEQ ID NO: 4154621 - RNA, 79 nt, Human
gggcuuuccucaggcugguucaagaugggaaaggacuuucuucuguuuucucccaaagugcaaccacaguggaaagccc

SEQ ID NO: 4154622 - RNA, 119 nt, Human
gggcuuugaagagaaacuaagaguuuuccagagggacaagagcuuauuugaggaaagagggggaaguuuuucccaauugagagguucugugucaucuuccaacuucucugccuagaccc

SEQ ID NO: 4154623 - RNA, 79 nt, Human
gggcuuugggcugcagcuggagcaucuucucaucuugcauuugagcguggugggguccuccagugcgggauccaugucc

SEQ ID NO: 4154624 - RNA, 71 nt, Human
gggcuuuggugggagaagacucugguuuccuuuguccuuggaggccucuguccccccaccuuuagggaccc

SEQ ID NO: 4154625 - RNA, 59 nt, Human
gggcuuuucccacuaugccaggcugccuuuacugauguugggcauggucggaagagcuc

SEQ ID NO: 4154626 - RNA, 67 nt, Human
gggcuuuuugguguucugauucuuuccucacuagcagaggcagugaauuuaacacucagauuugcuc

SEQ ID NO: 4154627 - RNA, 76 nt, Human
ggggaaaacagaaggauuaucuaggguacaugcuuuuaaaagcuguuacuucaaucuucucccguuuuaucucccc

SEQ ID NO: 4154628 - RNA, 99 nt, Human
ggggaaaagaaagguuaaguaacuugaacaaggccauacagcugguaggcaguaaagcugggcuucuauucaagucuguuugacuccaaagcugucccc

SEQ ID NO: 4154629 - RNA, 87 nt, Human
ggggaaaaggcugggcgguggcgggucugggguugguggugguggcagcacugcugggcugggcuugcacacagccucaguuucccc

SEQ ID NO: 4154630 - RNA, 58 nt, Human
ggggaaaauuuuauuaacuggauguagccaacacuguuggugcuccaccaauaucccc

SEQ ID NO: 4154631 - RNA, 79 nt, Human
ggggaaacauuagaagaaagugaagcuggggacugaggugggucccaucuccccagcuugcuacuucugcuccaucccc

SEQ ID NO: 4154632 - RNA, 94 nt, Human
ggggaaaggacuuuguuucccggccuggugcaaugcuuggcaggcuuccccagcacgaggaugcugcagugcaggacaauagacagcuuucccc

SEQ ID NO: 4154633 - RNA, 66 nt, Human
ggggaaaggugccucuuacaaggcuuagguuuucgcagcagagccuguuaggcaccuguguucuuc

SEQ ID NO: 4154634 - RNA, 87 nt, Human
ggggaaauauuacaaauuauaaugggagagcauuuuauuucaaagcaaugcuucucucgcuuucgauuugccuuuaacauacacccc

SEQ ID NO: 4154635 - RNA, 76 nt, Human
ggggaacagcuugggcucugccauuugcugacugcgugacccuggguggaugguucaguugcacaggcuguucucu

SEQ ID NO: 4154636 - RNA, 63 nt, Human
ggggaacaggcguaggucagggccagugaccucagggcacuugaggcugggccugcacucccc

SEQ ID NO: 4154637 - RNA, 90 nt, Human
ggggaagaaagcccagcgaggaggagggacccgccugcaacuuuuccccagguaugugcugagcuuuccccgcgugcugcuuucuccucc

SEQ ID NO: 4154638 - RNA, 78 nt, Human
ggggaagaaauaaacagcuaaucuccauugugugcacuagaaacagaaucuaguguaaugacacagguuauucucucc

SEQ ID NO: 4154639 - RNA, 91 nt, Human
ggggaaucacuuggugcuguccagggagccaggcaccuucuguguugggcuaggaggccugcauuuggcuggcucccacagcagggaccuc

SEQ ID NO: 4154640 - RNA, 90 nt, Human
ggggacacuaaaauacugagucucugggcaugguugugacagugccuggcacagucccuggcacagaguagguaguugguugguguugcc

SEQ ID NO: 4154641 - RNA, 77 nt, Human
ggggacagauaaugucuccaggggcagggucuggaggggccaacacccucaucagagcccuccucuggccugucccc

SEQ ID NO: 4154642 - RNA, 63 nt, Human
ggggacaggcagagucagguuggguucagaagucaugaggcccagaggugacugcuucccccc

SEQ ID NO: 4154643 - RNA, 61 nt, Human
ggggacaggccauauggaauacauuuugguggcugagauguaucugugugccuugauuucc

SEQ ID NO: 4154644 - RNA, 76 nt, Human
ggggacauggggaucagacucugggauguagcaguaaaaacuuuggcugugacacuuucuuuuuggugucuucccc

SEQ ID NO: 4154645 - RNA, 103 nt, Human
ggggaccacagggaggaauggaagcuaaguuggcuugagacaccaucagguagggaccucccucucugugccaggcccagcugacuucuaguccucccucccc

SEQ ID NO: 4154646 - RNA, 55 nt, Human
ggggaccaggacucuucugagcugagggugacguguucagggcaguccggucccc

SEQ ID NO: 4154647 - RNA, 102 nt, Human
ggggacccaggaccaucccccgugggagcugggguuggacgucuucaggccggagagggaacagccucaccagcccuggaggaggaggguccuggcuucucc

SEQ ID NO: 4154648 - RNA, 65 nt, Human
ggggacccaggcagggggcagcacagcgccccaagggcagccagccccucugaccucuccucccc

SEQ ID NO: 4154649 - RNA, 128 nt, Human
ggggaccccuguucgugucauccacagggugcugugggcccagaagcgcccaugccugagagcguccaggaccaggcagagcugggccuuaagggcccuuggaccagugucugucugcagggagcccc

SEQ ID NO: 4154650 - RNA, 62 nt, Human
ggggacccuacagcaagagcagucgcaaguaugcaagugauggcuaucccuggaagggcccc

SEQ ID NO: 4154651 - RNA, 124 nt, Human
ggggacccugggggcucaggauccagcaaggggcggcaggaguaaaggaggaaggaaugacaggugcaaauaccuucccaccaaagcccuuguugcccucuggcuccuccccagagcugucccc

SEQ ID NO: 4154652 - RNA, 124 nt, Human
ggggacccugggggcucaggauccagcaaggggcggcaggaguaaaggaggaaggaaugacaggugcaaauaccuucccaccaaagcccuuguugcccucuggcuccuccccagaguugucccc

SEQ ID NO: 4154653 - RNA, 56 nt, Human
ggggaccgggagugggguggcgggagaggacgcgcagaaucucgacuucuggcccc

SEQ ID NO: 4154654 - RNA, 73 nt, Human
ggggcuuauggagaccaugagauuagugacguuuugcccaaauccacuucaaauauggcuucaugagaucccc

SEQ ID NO: 4154655 - RNA, 63 nt, Human
ggggcuucaaaaggcagcagccuacuugugcaaccuugggagaggccagccuuuggagacacc

SEQ ID NO: 4154656 - RNA, 60 nt, Human
ggggcuuucagggacccagaagcagaaaacucucaguucuggaaauguugcugaggccuc

SEQ ID NO: 4154657 - RNA, 66 nt, Human
ggggcuuugacauaagacuuagaguauuguaucuuaauuacagacaaauaacuuuuuauguccccc

SEQ ID NO: 4154658 - RNA, 61 nt, Human
ggggcuuuggugauggaugagcagcuacaggguagcaugcugccugugccaggaggguccc

SEQ ID NO: 4154659 - RNA, 79 nt, Human
ggggcuuuucuaugcuccugagugugcaggagaugcuaaugacagcaccucuugcccuuguuaggacuagacaggccuc

SEQ ID NO: 4154660 - RNA, 63 nt, Human
gggggaaaagcaccuagcauagugcuuagcacaucucaagcacugaacuggugcuggucccuc

SEQ ID NO: 4154661 - RNA, 75 nt, Human
gggggaaacacaguaaaguacuaaaaaauauauauauacaaaugaugugaugcauaguuuuuauugcuuuccucu

SEQ ID NO: 4154662 - RNA, 73 nt, Human
gggggaaagcaauaaaguagcagcucaucaguauuuuacuugcaugacuuguuauuuuauagggcuuuuucuu

SEQ ID NO: 4154663 - RNA, 56 nt, Human
gggggaaaguggagguucgugaaacucuaccuugguuuccccuacuccuuucccuc

SEQ ID NO: 4154664 - RNA, 70 nt, Human
gggggaaauuuauuaucuacaucauuaaacauuaagauuguaaagugccaaguagaaaugaauuuaccuc

SEQ ID NO: 4154665 - RNA, 69 nt, Human
gggggaagagcuccugcauucuucccuggccaccuuggcuccagggcuccccagagagccucuucccuc

SEQ ID NO: 4154666 - RNA, 70 nt, Human
gggggaaguccugaggucaaauaaguuuagaaaguauucuauuaaaguuguuuaccguaggacuuuuaac

SEQ ID NO: 4154667 - RNA, 64 nt, Human
gggggacugaggcccacuugagggaauagcaagugucuuucccuuucaggguuuccaguucucu

SEQ ID NO: 4154668 - RNA, 56 nt, Human
gggggacugggggugagcaggcccagaacccagcucgugcucacucucagucccuc

SEQ ID NO: 4154669 - RNA, 79 nt, Human
gggggacugggucaguuucuguucugguuccaaacccucccaggaaggccaggcucucagugacugccccucacccacc

SEQ ID NO: 4154670 - RNA, 78 nt, Human
gggggagacaagccagagcaggacaggcccgugccaccgaaaggaaagggccaugcuguugccugcuggugcuuccuc

SEQ ID NO: 4154671 - RNA, 55 nt, Human
gggggaggaaguguggccagguggcugagaagccaucuguccaccagccucgccu

SEQ ID NO: 4154672 - RNA, 126 nt, Human
gggggaggagaguuaaucaggcugacaaggaagacaagacgcagcacagcugaaaugcacccucacccacugugaagccuugaacugcaaaccccgucaccagcagagcugacuacucuuuccccc

SEQ ID NO: 4154673 - RNA, 76 nt, Human
gggggaggaggaacagcagggaauaugggaauugggagaaccuuuagcaguucacacugugcuaucugccuuccuc

SEQ ID NO: 4154674 - RNA, 55 nt, Human
gggggaggugaaugcaauaaggguggagaugcacucugugguauggccaucuucc

SEQ ID NO: 4154675 - RNA, 75 nt, Human
gggggagucauuaguagagaauugugcccuuaaauuuauuuuuauaguuggauucugcuaguuaauaucucucuc

SEQ ID NO: 4154676 - RNA, 65 nt, Human
gggggauuucagcccugggggucauuggaaauaucacucaaaugacucugcugcagagacacccc

SEQ ID NO: 4154677 - RNA, 55 nt, Human
gggggcaggugcggcgccgccggugacgguggcccucagucuugcuccugcucuc

SEQ ID NO: 4154678 - RNA, 70 nt, Human
gggggcauggggcauggagucauucuguuugaggcagagcacaguggcuucuaugucuacauuugccucu

SEQ ID NO: 4154679 - RNA, 70 nt, Human
gggggccacaucuaagccaauuuugauuucgccuauaaugagugccgggcgaaggcuggagaaggccucu

SEQ ID NO: 4154680 - RNA, 67 nt, Human
gggggccaccucugccucaagcuucccaaguucucagaaaguguggggagugguuagaacggcuccc

SEQ ID NO: 4154681 - RNA, 58 nt, Human
gggggccccaggucugaacacgcugcccagguauucuaggcagaggcugggagcuccc

SEQ ID NO: 4154682 - RNA, 72 nt, Human
gggggcccccagauggccagauaccaugggcgcccgcaccccauggcuugucuugucuucugauuggucccc

SEQ ID NO: 4154683 - RNA, 57 nt, Human
gggggcccucucagucuguguagcccugucucaaccgcacacaugaggagggacccc

SEQ ID NO: 4154684 - RNA, 95 nt, Human
gggggccguggacccuccuggccugaagcucacuccuuccccgccuccuacaggggcaggggagccagggcugcgaguucugucuguggacucuc

SEQ ID NO: 4154685 - RNA, 74 nt, Human
gggggccucugagcuccuuugaccaccccagcuggaacugggaagcugugggccacugggaggcaagggucccc

SEQ ID NO: 4154686 - RNA, 108 nt, Human
gggggccucuuuaucuucaaaagaaaauaaugcugucuuuucuacuucauaaaguauugugagcuuuggagaagauaacguaaaugcuuuggaaccugugaagcccuc

SEQ ID NO: 4154687 - RNA, 55 nt, Human
gggggccuuauucaucugccagagcccugcugugguaagcagaauaaugccaccc

SEQ ID NO: 4154688 - RNA, 66 nt, Human
gggggcgagaggccaagggauccgugaggccaccucucuggucauccgggccggccucuggccccc

SEQ ID NO: 4154689 - RNA, 66 nt, Human
gggggcgcccucucugcuucacuguucccucuggccucccauaguggggccugggaggguuccccu

SEQ ID NO: 4154690 - RNA, 74 nt, Human
gggggcuaagagugaagguuagggagauccugagugcagcugcucaggcacccucuauuuucaucaacuccccc

SEQ ID NO: 4154691 - RNA, 57 nt, Human
gggggcucaacuugacagagagguuucacuaaaaucucuguacaucauugagucccc

SEQ ID NO: 4154692 - RNA, 120 nt, Human
gggggcuuuuggagcagguuggguucucuagggcuguagacugggcuggcugugaccaguuuccagggauguggcagcaccauagaguggccuaagacugauuggcaucugauuguccuc

SEQ ID NO: 4154693 - RNA, 74 nt, Human
ggcucaugcuggugguugauggcaggaugcagguacucaccagaggccuccuuccauuccucaccacguggacc

SEQ ID NO: 4154694 - RNA, 61 nt, Human
ggcucauucaggagccuaagcagcgaggggcuguugcuggaauuugccuucuggaagagcu

SEQ ID NO: 4154695 - RNA, 82 nt, Human
ggcuccacacaagacuuguuuuggcuaguaugaugucuucagacacaauacagggcucaaaauaugcuuguaugguggagcu

SEQ ID NO: 4154696 - RNA, 88 nt, Human
ggcuccaccccuuucucuuuccccgaccucauugagggucucuuuccuucacaggcuugguuggggcgagggaugcggggucauugcu

SEQ ID NO: 4154697 - RNA, 129 nt, Human
ggcuccaccugggaguuguaagcaggacugccagugcuuugagaggagggugcuuugcugggugggcccuaacuuucuucuccauggcagguccucagcaaagggcagccccuggguccugcgggaguu

SEQ ID NO: 4154698 - RNA, 80 nt, Human
ggcuccacgcuucuucaguggccagcugguugucagaaacauaaacguaacuaccagucccaaggaggaagcagucugcc

SEQ ID NO: 4154699 - RNA, 60 nt, Human
ggcuccagcaccuuccugcaaaggucuuuaaaagcaccuguuuggaggagguguuaggcc

SEQ ID NO: 4154700 - RNA, 121 nt, Human
ggcuccagccucaaagugcugcugacccugugcuugggccuuccagccccccaugguguguaaaaggacagggcuggacaucuaagguagcugucagcgaguuugcacagggguugcugcc

SEQ ID NO: 4154701 - RNA, 58 nt, Human
ggcuccaggaaccuccucuccuguugguuaagagccaggagugcaggcuuuuggagcc

SEQ ID NO: 4154702 - RNA, 65 nt, Human
ggcuccauccuggccucgcuguccaccuuccagcagauguggaucagcaggcaggaauacgaguc

SEQ ID NO: 4154703 - RNA, 110 nt, Human
ggcucccaagucaaugaaaaugccugaucagcuauggaauucguaacauuauucacuaugaaucaaaguucauuugaucaccacuggcauucuggauauugaccugaguc

SEQ ID NO: 4154704 - RNA, 67 nt, Human
ggcucccacuugcccuggcgcugucucuauggagcucaauguacuguaacagcugucagagcaggcc

SEQ ID NO: 4154705 - RNA, 67 nt, Human
ggcucccagacuguggugggcacuaccggucagcugcccagcagccagcccuagucccacuucugcc

SEQ ID NO: 4154706 - RNA, 72 nt, Human
ggcucccagcggaucccccagcccgggcugcaggcugagccaaggcugugcaggguccauauuggucaggcc

SEQ ID NO: 4154707 - RNA, 85 nt, Human
ggcuccccugcuggggauucuuugacaggguguugggugucagaggcccagggccagagcaccaggggccccagugggaggagcc

SEQ ID NO: 4154708 - RNA, 73 nt, Human
ggcuccggacucaccugacaauggcuccuucaucuuugggggcucugggaccuugggugggggcucuggagcu

SEQ ID NO: 4154709 - RNA, 85 nt, Human
ggcuccggcgaggccacuggcacgcccacguaggcacugcacuucacaguuugcaaagccuuccuguggccaccuuguccgagcu

SEQ ID NO: 4154710 - RNA, 93 nt, Human
ggcuccuauauguccugguggguggacgccugcugcuccagacccauuuggggccagcuccuuggcagugccucgcccaccacaugaggggcc

SEQ ID NO: 4154711 - RNA, 81 nt, Human
ggcuccucaacccacccaccugcccuuucuugcuccaccagcaggagagcaagaaaggguagguggguggguugaggggcu

SEQ ID NO: 4154712 - RNA, 60 nt, Human
ggcuccucugaccucuaggacaccccacaccccacucuuugauccagagguguuggagcc

SEQ ID NO: 4154713 - RNA, 71 nt, Human
ggcuccucuuaacugugacaguuucucagacuuuccuuguuuuugauaucauugacaguuuugaggcaguu

SEQ ID NO: 4154714 - RNA, 64 nt, Human
ggcuccugcaccugucccucugcgugaucccccucccguaagggguuugaacaggcagcgagcc

SEQ ID NO: 4154715 - RNA, 78 nt, Human
ggcuccugcuuaugaggaccuugugauuacauugagccugcccaaauaguccaggacaaucuucauauuucaagaguc

SEQ ID NO: 4154716 - RNA, 57 nt, Human
ggcuccuggcccgaucccugugaagagugcucaagccuuucuggagggcugggagcc

SEQ ID NO: 4154717 - RNA, 108 nt, Human
ggcuccugguugguggggaccaugguccuuuaggaaugcucuucagcagugccucacagagaagagcagauuccuaguggagcauacacuucagccagcacccgagcc

SEQ ID NO: 4154718 - RNA, 55 nt, Human
ggcuccuguccccucagcugcuugcguggggcugagcgucgagggcccaggaacc

SEQ ID NO: 4154719 - RNA, 60 nt, Human
ggcuccuguggcaagacagcuugcucccagggagaagcuuccucugaguagcaggagacc

SEQ ID NO: 4154720 - RNA, 55 nt, Human
ggcucggccguggagguuugcuguccucuucccccaggaaacuucacggucagcc

SEQ ID NO: 4154721 - RNA, 81 nt, Human
ggcucuauugcacugacagcccaccucacaggauuugggaacuacccacaucaaucucaugagggggccguuaaaagagcc

SEQ ID NO: 4154722 - RNA, 76 nt, Human
ggcucucaggaaguuuguucugguuguguguaugggggccucccacucagcauauggggccgcuuggcugggagcc

SEQ ID NO: 4154723 - RNA, 71 nt, Human
ggcucucauuacagcugggguuccaagugguccaagauaaaacuggaaacauccucaaguaugaagaggcc

SEQ ID NO: 4154724 - RNA, 73 nt, Human
ggcucucauuugcugaggccuucagaggcaugagcucaugccauccuugcaaaccuccagcaaaaugaguguc

SEQ ID NO: 4154725 - RNA, 61 nt, Human
ggcucuccagcaacuuccuaaagaugaucagccaucuaugcugaggcaggugcuggaaguc

SEQ ID NO: 4154726 - RNA, 104 nt, Human
ggcucucccugggcagguggggcucucccugggcagauguggcucuccuugggcagguguggcucuccuugggcagguguggcucuccuugggcagguguggcu

SEQ ID NO: 4154727 - RNA, 81 nt, Human
ggcucuccgccuucauuuucuugucucuguuguagguaauauauuugacaccaggagagaaaacacggaggacacagaacc

SEQ ID NO: 4154728 - RNA, 69 nt, Human
ggcucugagaggugcagcaguaaaauaaguacuaaauuuuacuuagacaagcauuuuagacucagagcu

SEQ ID NO: 4154729 - RNA, 60 nt, Human
gggcccgcgccgcggccgccgcggccgaccccccgcgcugcuggccucggcgcugggccu

SEQ ID NO: 4154730 - RNA, 60 nt, Human
gggcccgcugaggcuaaccucgagagacaguuauaaaaggcugugagaggcuagcugccc

SEQ ID NO: 4154731 - RNA, 88 nt, Human
gggcccggacgauggcuuauccuuuuuguauuauucacagcaccuaauaucuguugugaaauuacuuaaaggaaauauucccuagccu

SEQ ID NO: 4154732 - RNA, 129 nt, Human
gggcccuacaggagaaaauggcaccccuggaauaucuggcugagcgaggcccacagaggcgccuacccucccaccuccaucugugggccucagcaggacuccaaacucccaugucucuucugucuguuc

SEQ ID NO: 4154733 - RNA, 73 nt, Human
gggccgacucuguggccagcaagugcugccucucccagggaucuggcugaugggcagagcuggugggaggccc

SEQ ID NO: 4154734 - RNA, 58 nt, Human
gggccgccuauugggcaaccuagagcacaccuuuccucaggccaaacccagcgcgccc

SEQ ID NO: 4154735 - RNA, 82 nt, Human
gggccgccugcugggggcguaggccgacuugauguccagagagaaggagggcuugaggcggcugguguccugcagguggucc

SEQ ID NO: 4154736 - RNA, 61 nt, Human
gggccgcgccgacgggcuggcgguggacacgggcguggacgugugggccuucggcgugcuc

SEQ ID NO: 4154737 - RNA, 71 nt, Human
gggccgggcggguccacccaggcugugggucagcccugcaggguugagcugccuggcuguggcucaggccc

SEQ ID NO: 4154738 - RNA, 55 nt, Human
gggccggggccuccccgcgucgcggcucagggcugugauaggugguccccgggcc

SEQ ID NO: 4154739 - RNA, 61 nt, Human
gggccuccugauguauuuuugugagccgcccaccaucgcggucaaacuugcaccagugccc

SEQ ID NO: 4154740 - RNA, 72 nt, Human
gggccucuaauuacugauacacauaagaauuugguggcuuuccaagcuucuuugcuguugucagauagguuu

SEQ ID NO: 4154741 - RNA, 57 nt, Human
gggccucucaguaggaucaaaugcacagcacugcuauccauccuugaugagaggucu

SEQ ID NO: 4154742 - RNA, 58 nt, Human
gggccugacugagagcuccucacaucuucccccugcccggcuccuucuuucauggccc

SEQ ID NO: 4154743 - RNA, 55 nt, Human
gggccugagacugagggugagggaaaagugauguuccucccuuuuuauugggccc

SEQ ID NO: 4154744 - RNA, 120 nt, Human
gggccugagauggcugggaagcaggcggguuuaggacaaugcuuuuuaaaguucauuuuaaguacuuuuaaggauuuccaggccugcgccucgagcggcccuaaguaagcuucuaggccc

SEQ ID NO: 4154745 - RNA, 67 nt, Human
gggccugaggcagagagaacccgggcugcagggcacuaugggccaggguagcucuggcuucuggccc

SEQ ID NO: 4154746 - RNA, 72 nt, Human
gggccugcagcccuugguauuuuccgaucccagcugcucugugaggguggaaaguauuuggggaccaggcuu

SEQ ID NO: 4154747 - RNA, 86 nt, Human
gggccugcaguggcuucuguguccccacacuguauuugaggaugggcaucaccacuucaaauucugggggaagagccccuuggccc

SEQ ID NO: 4154748 - RNA, 96 nt, Human
ggggugggaggggaagcuggagggacuuucucacggauggggccaggcugggccagcagggugagguagccccucccugauccaaucucccagucc

SEQ ID NO: 4154749 - RNA, 61 nt, Human
ggggugggagugccauccuugaugccugcacgcuggccugucauugggugcagcccacccu

SEQ ID NO: 4154750 - RNA, 72 nt, Human
gggguggggcuggggcgccauugaguccaagcaccaucaggcacgccauggcccuggcccagaccccaccuc

SEQ ID NO: 4154751 - RNA, 71 nt, Human
gggguguccagcguggaaugagggugugcagggccaaggcugcagagacccagggaccccgcugacgccuc

SEQ ID NO: 4154752 - RNA, 74 nt, Human
ggggugucuagugcuuaucucuuuacuuugcacauguuaaauggcugcuugucucagauaaaacuaugcauucc

SEQ ID NO: 4154753 - RNA, 118 nt, Human
ggggugugaaggguaugagggaagcacugggcagcucccuugaacuucuccuggccggccagaggcagguuugaaugcaggggauugcaagugguccuagaaaucccauucauucucc

SEQ ID NO: 4154754 - RNA, 77 nt, Human
ggggugugacguagucccugcagcugccaacgguugccagggcaacgguugccaggggcugcugucaccugcgcccc

SEQ ID NO: 4154755 - RNA, 83 nt, Human
gggguguggggagacaggcaggccagggcuguggcuucuccauaagcacacagcucaggggcacugccagccagcgccgcccc

SEQ ID NO: 4154756 - RNA, 58 nt, Human
gggguguguauguaugacugucugauggucucuuuccacucugacacuuacacacccc

SEQ ID NO: 4154757 - RNA, 64 nt, Human
gggguguuggccuccacauuuuccaggugacaucagcugggaagagcugcaguccauccacccu

SEQ ID NO: 4154758 - RNA, 75 nt, Human
gggguuaaaagugcuuacaacuuuauugaggaauuuuugaauuccucaaugucuugucugugggauuuuuauccc

SEQ ID NO: 4154759 - RNA, 70 nt, Human
gggguuaggcaauuucaccauucacugaacauuuuguguguuuucugaaaacugaaguagugcugacuuc

SEQ ID NO: 4154760 - RNA, 88 nt, Human
gggguuagggcuugcauaggaaaaguggcucaguguucaugugugggguucugccagccacugggccacugccaggaagcccgacucu

SEQ ID NO: 4154761 - RNA, 129 nt, Human
gggguugcugaauaucuuuugaaauuuuguuuugagaacuuuuggagacuuuuaguacauccuucagggaaauuagaaaaacucaagggcucuauaaaacuaagguucaaugucacuauauuagaccau

SEQ ID NO: 4154762 - RNA, 71 nt, Human
gggguuggggaggggagguaguagcugcucccuuuagauaaagcauguacuuucuagcucuccccaguucc

SEQ ID NO: 4154763 - RNA, 69 nt, Human
gggguuucacuuguaggauguacuuaucauuucuggaaaucgauaauaucuuacaugugcuuuguuccc

SEQ ID NO: 4154764 - RNA, 81 nt, Human
gggguuuccccuccuugaccuuuuucuucaccuccugcucccauacucccguuggauggucaggcaaggagggcuggccuc

SEQ ID NO: 4154765 - RNA, 68 nt, Human
gggguuuguguuucuaaauguuuuucucgaaccaauguucuucaacaguuuuagaacacuguuacucc

SEQ ID NO: 4154766 - RNA, 79 nt, Human
gggguuuguuauuuuguuacagcgaauacugagauuauaaagggaauuucuguaaucagaguagcagauaauauuuccc

SEQ ID NO: 4154767 - RNA, 55 nt, Human
gggguuuugggaggccugguaaauuacacccccuacccuggguucuccauacccu

SEQ ID NO: 4154768 - RNA, 72 nt, Human
ggguaaagcuggugccugugggcauggugcaugcuggguaaagccagugccugugggcauggugcagugccu

SEQ ID NO: 4154769 - RNA, 72 nt, Human
ggguaaaugugcuucuuuuaacuuaaguugagcacuugcucaagguggaagagagacaggagcauagaacuc

SEQ ID NO: 4154770 - RNA, 69 nt, Human
ggguaacauugaggaguguauuccacaccacuguccacaguguucuucugggguaugcuccugucaccc

SEQ ID NO: 4154771 - RNA, 130 nt, Human
ggguaacccuuuacacuuacaguguacaguuccuuucccuucccuaguagacccagaucauuuccagguuauccuaagauuugacccuaacuaggggucuaguggcuaggagguaggugaggguagaccc

SEQ ID NO: 4154772 - RNA, 92 nt, Human
ggguaaguugggguuggauugucacagaccuugcauguugugcuaaggcaugcagagguuuccaggcaaguuuugacaugaucagauugccc

SEQ ID NO: 4154773 - RNA, 103 nt, Human
ggguaaucaacguaccacagaagcauuccagcaaauaguugagaaguaugauuauuaaugccacaauguuugcugaggauuuugugaucuuaccuuguggccc

SEQ ID NO: 4154774 - RNA, 55 nt, Human
ggguaauuggggccuugcagugcagugucugccacugugggagcuuuagguacuc

SEQ ID NO: 4154775 - RNA, 68 nt, Human
ggguacauaugcacaacaugcagguuuguuacauauguauacaugugccauguuggugugcugcaccc

SEQ ID NO: 4154776 - RNA, 68 nt, Human
ggguacaugugcacaacaugcauguuuguuacauauguauauaugugucauguuggugugcugcaccc

SEQ ID NO: 4154777 - RNA, 68 nt, Human
ggguacaugugcacaacgugcagguuuguuacauauguauacaugugccgcguuggugugcugcaccc

SEQ ID NO: 4154778 - RNA, 64 nt, Human
ggguacuucugaaagugcagcugugacacagcuuucccagcucacauucucaucagaugugucc

SEQ ID NO: 4154779 - RNA, 60 nt, Human
ggguagaauaggaaguccuggucagacccaaaagggcugucacaagacccuagucuaccc

SEQ ID NO: 4154780 - RNA, 58 nt, Human
ggguagagguaaacuuuguaucaucagcauuuaaggaugaucagauuuaacuguaucc

SEQ ID NO: 4154781 - RNA, 60 nt, Human
ggguagaguacagaaaaaggaguacgcaaccgcaaucucacuuucucaugaauuuggccc

SEQ ID NO: 4154782 - RNA, 57 nt, Human
ggguagaucaccugaagucaggaguuggagaccagccugaccaacguggugaaaccc

SEQ ID NO: 4154783 - RNA, 58 nt, Human
ggguagauggguauaauucuccuguaaaacuucauuugcaggaaaacaccuaucaccc

SEQ ID NO: 4154784 - RNA, 77 nt, Human
ggguagcauuuaucaccaucucaugcaggggucugcgaacuagcaaaccacugcccauggugaaaacugaaccaccc

SEQ ID NO: 4154785 - RNA, 130 nt, Human
ggguagccccuccgcgucccggggcuccaaccagcugugccggggaccuggggcagaauagcaaacagccuccuccagagccugcgcacuggcuggcggggccagggaaccgugggcugaggaguccccc

SEQ ID NO: 4154786 - RNA, 72 nt, Human
ggguaggggggcaucgcaucuggcacugccagcacagacuggaggugccuggcgaugucucugaucuuaucu

SEQ ID NO: 4154787 - RNA, 63 nt, Human
ggguagugguagaacuugaaugugaaaucagguaagcucaccugauuccagaguuccuaaccc

SEQ ID NO: 4154788 - RNA, 129 nt, Human
ggguauaauuuguuggauagucacaugcuuccugagguuuuaaaacuauuccuuuugaaugggaauaaucaugaaauucagugaauggcauugcuuaauuaagauaauccacaaacaguugaaguauuc

SEQ ID NO: 4154789 - RNA, 68 nt, Human
ggguauaugugcacaucgugcagguuuguuacauauguauacaugugccauguuggugugcugcaccc

SEQ ID NO: 4154790 - RNA, 88 nt, Human
ggguaucaguugcuaguuaucucuguauuuauccaugcuguuacagagggaaaguacagauggugagguuggaucagcugucauaccc

SEQ ID NO: 4154791 - RNA, 95 nt, Human
ggguaucccugucugcacagugagagggcugggcucaugaucucacccagaucugggcugaaucccaccucugucauuguagggcagcgugaccu

SEQ ID NO: 4154792 - RNA, 80 nt, Human
ggguaucuuguuaaagugaagauacugauacaauaggucuuggcugggaucuuagauuuugcauuucuaacaagcuaccu

SEQ ID NO: 4154793 - RNA, 61 nt, Human
ggguaugcaugucuuugcacacaaaucuacguaaauaugugguagaguauguauauauccc

SEQ ID NO: 4154794 - RNA, 71 nt, Human
ggguaugcuguuucagaagaguagcugaacaaguucauuagggggacuucucggcacccuuuggcagcccc

SEQ ID NO: 4154795 - RNA, 64 nt, Human
ggguauggagacaaauuuuuuagugaccauacauuuguuacaaugcuguuuguuucuacugccc

SEQ ID NO: 4154796 - RNA, 77 nt, Human
ggguauuacauugcacuuuauuagauacaaauaaaacuuuuaugaaaguguuuauaggagugaaugcuggaagaccc

SEQ ID NO: 4154797 - RNA, 70 nt, Human
ggguauuguguuuugcuucucucugguaaaagaugagaauucuuugaauacaggaagcaugagauaaccc

SEQ ID NO: 4154798 - RNA, 75 nt, Human
ggguauuuucuaguucauauucucaaagaagaucacuucuucuuugauuuugagggaggugggcagaguaugccc

SEQ ID NO: 4154799 - RNA, 81 nt, Human
gggucaaagccugguacuugggaauguuuuacagaugugaauuugcuuaugaaugaaaucauugccaaguauugagugccc

SEQ ID NO: 4154800 - RNA, 78 nt, Human
gggucaagggggcagcucuggaagggacugcaggugacccugcugcccugcuuguuuccaguggcgucucucuguccc

SEQ ID NO: 4154801 - RNA, 82 nt, Human
gggucacucagcagguauguuuguucagcacauaagacuccucagaaggccugcaaagaacaaauauacccugaaguaaucc

SEQ ID NO: 4154802 - RNA, 82 nt, Human
gggucagagagggagucuugucuugcaagggcugaggaaggcccuucuugcccucaacaagagcaugauccccacugacacc

SEQ ID NO: 4154803 - RNA, 56 nt, Human
ggcuggcuggcugguagacaagaccccaguuuucuuccaucuuucaguaguuagcc

SEQ ID NO: 4154804 - RNA, 55 nt, Human
ggcuggcuggcuuagcagaggagggaggcaaugugcccuccuggacggccuggcc

SEQ ID NO: 4154805 - RNA, 56 nt, Human
ggcuggcuugcggagucacagauguucacugugccccuucucugugugcccaggcc

SEQ ID NO: 4154806 - RNA, 73 nt, Human
ggcugggaagcgcagaaggggcccuaccagcucgcaggcgaguucagggcucagcaucuggcauuugccagcc

SEQ ID NO: 4154807 - RNA, 89 nt, Human
ggguaaacauuuaaggaagagcuugguaauaggcuaaaaacaauuuuaucaacccuagccuguaccauuuucccuagucuuuucuaccc

SEQ ID NO: 4154808 - RNA, 63 nt, Human
ggguaagaagccaugguagaaaacucaguucaugacgaaucuguucuuucuacuguggcuccc

SEQ ID NO: 4154809 - RNA, 56 nt, Human
ggguaaggucagccagaaguuccuauuguuuaugcuuacugaggccugccuugccu

SEQ ID NO: 4154810 - RNA, 81 nt, Human
ggguaagucacauaauuauauguuaaucuucaauuuucucaucuaugaaaugaaguuggaccauaugauuuugaaaguccc

SEQ ID NO: 4154811 - RNA, 55 nt, Human
ggguaauguugcucuucuuauuugacuauaaacucagugaauagagacauugccc

SEQ ID NO: 4154812 - RNA, 118 nt, Human
ggguaauuauuaauucuuugguguugucaauucucucauugguaugauguguagacuagcauagaucucauuuuucuccaaugggaauuugauaacauuaagguacuuuaaauuucuc

SEQ ID NO: 4154813 - RNA, 59 nt, Human
ggguaauucagaggcugccuggaagacaaaggaugacuagcaggugguaaucugagccu

SEQ ID NO: 4154814 - RNA, 70 nt, Human
ggguacagugagacuggcucagggacugccaaaaaaagggacuagauucuggggccaauugccacugccu

SEQ ID NO: 4154815 - RNA, 104 nt, Human
ggguacaugaacagggcaugagguauauguucauguauguguaaaugaaucccuauauacauuuauauucauguuccugcguguacuugugaaguuguguacuc

SEQ ID NO: 4154816 - RNA, 85 nt, Human
ggguacauuuuugcccagcccugugauaagguuuguuguuuauuaggcagaaaggcaagcauuuauauaggacaggaaugugccu

SEQ ID NO: 4154817 - RNA, 65 nt, Human
ggguaccugcagggccaugguggcggcugccgcguuguugcugcugcuguugucguccggugcuc

SEQ ID NO: 4154818 - RNA, 81 nt, Human
ggguacggggauggauggucgaccaguuggaaaguaauuguuucuaauguacuucaccugguccacuagccguccguaucc

SEQ ID NO: 4154819 - RNA, 68 nt, Human
ggguacuuaugcacaacaugcagguuugugacauauauauacaugugccauguugguaugccgcaccc

SEQ ID NO: 4154820 - RNA, 99 nt, Human
ggguagagugguggaauggggcgaggaagaaaccuacuagaguuucuuguguaaggaaguauuaauaacugguuccuuccuccuccuucuccccucccc

SEQ ID NO: 4154821 - RNA, 65 nt, Human
ggguagcacuggugggaaugggauauuagauauuaacaauaccaccauucuuagucaagugucuc

SEQ ID NO: 4154822 - RNA, 61 nt, Human
ggguagcagucaucggcagagaaaacaugauguauuugucaccuauggcuguccugugccc

SEQ ID NO: 4154823 - RNA, 60 nt, Human
ggguagcaugugucagaguuuguuugcaguaucuuguuagcucuuauaucaugcuuaucc

SEQ ID NO: 4154824 - RNA, 57 nt, Human
ggguagcauuuguagcuaucacagucauggugauuccacauacagcugcaagcaucc

SEQ ID NO: 4154825 - RNA, 72 nt, Human
ggguaggagccagcgccuugccucuggggcuucgcuagagaagccuagggcgcggucguuugcauccauccc

SEQ ID NO: 4154826 - RNA, 64 nt, Human
ggguaggaugguagaagggaccugauguaaaggaagguaguagguuucuuuuacucucuaauuc

SEQ ID NO: 4154827 - RNA, 73 nt, Human
ggguagggauucaaaaauaagcuccuauuuucugcuggaaaaucuacuugagauauuuuugaauuucucuccc

SEQ ID NO: 4154828 - RNA, 68 nt, Human
ggguauaugugcccaacgugcagguuuguuacauaaguauacaugugcuauguugguaugcugcaccc

SEQ ID NO: 4154829 - RNA, 57 nt, Human
ggguauauuuugcaugcaguuuguagaaauuuacaggaaccaugaagacauauaccc

SEQ ID NO: 4154830 - RNA, 67 nt, Human
ggguauguucaugugguuuuuaaaggauuauuguucuguaaucaaaaaugaacaugaacuuaauccc

SEQ ID NO: 4154831 - RNA, 99 nt, Human
ggguauguuggaaaaagagagaugaaguuuucugaggcacuggcucucccagaagaccuggggcagcuucucgggcucuccuuucuucuagccuggccc

SEQ ID NO: 4154832 - RNA, 65 nt, Human
ggguauuauuucucacaaaguugcuuaucccaacaaggauuacauuuugaugagaaagaucaucu

SEQ ID NO: 4154833 - RNA, 81 nt, Human
ggguauugauaguuaauugucugugaguaccugacagcaacggguuauggcuauugaugacaauugguaccuucagugccc

SEQ ID NO: 4154834 - RNA, 88 nt, Human
ggguauugguggggaggggaggccaguggaccgucccccugcggaagcuguguggggaccugcgccacucacuguccacccugugcuu

SEQ ID NO: 4154835 - RNA, 69 nt, Human
gggucaacugagcagcaauugcuggcccagagaccugacucugggucagagcugugcugcccagggccc

SEQ ID NO: 4154836 - RNA, 66 nt, Human
gggucacacugcagcccccuauuaggacucgccauggcguagugauggggcccugcacugauuccc

SEQ ID NO: 4154837 - RNA, 70 nt, Human
gggucacaugcagucacugagcagggacaccagaugcugggcuggacccucuuuaugcugcuugugacuc

SEQ ID NO: 4154838 - RNA, 80 nt, Human
gggucagaacaaggcacaagcuggcuguuuaucaaguaccuacuuugugcugggcagcacaugcucucuuguucaguccu

SEQ ID NO: 4154839 - RNA, 89 nt, Human
gggucagagcacagacauuuucuguauugccuguagaaacuagcacaguacaggcacccccuaagugcaaaagaaguccuugcugaccc

SEQ ID NO: 4154840 - RNA, 65 nt, Human
gggucagcugcugggggcugacgggcaagaggugcagcccgaggcacucaugcaggagcugagcc

SEQ ID NO: 4154841 - RNA, 61 nt, Human
gggucagggcugccugggcucagaugcgcccacgcccaugugcccgagcagcaccuugcuc

SEQ ID NO: 4154842 - RNA, 63 nt, Human
gggucagguccaacuauuuaucuguguuucaauugcgcaaucaaguuuugagacccaccgccc

SEQ ID NO: 4154843 - RNA, 82 nt, Human
gggucauggugcuaguuaaaucuucaggggggcaucucaguauauagcuaccuguucaagguauuaauuaucaucaugacuu

SEQ ID NO: 4154844 - RNA, 87 nt, Human
ggguccaacuaaauguucugccacuugcuuuguaucuaauguguauauuuuaaauugauauaaagaaggcacagcaagacagggccc

SEQ ID NO: 4154845 - RNA, 62 nt, Human
ggguccagacuaugaagaacuuucuagguuacaauggggaguuuuggauuuauucugggcuc

SEQ ID NO: 4154846 - RNA, 72 nt, Human
ggguccaggaaaugcugaugcuccuggagggaagacccuacucugaguaccaaguuuccagauuuugcuccc

SEQ ID NO: 4154847 - RNA, 77 nt, Human
ggguccagggaacuuugaaggauccagcacuucugaguuugaggugguuuguucuccagaauuuccugcauagaccu

SEQ ID NO: 4154848 - RNA, 112 nt, Human
gggucccagaacaggguccaugaagaggaauguauuucccugcaaauugaggcacgguugcaguugcuggaaggacauaaucaacgauggcauccugguuucucugccuccc

SEQ ID NO: 4154849 - RNA, 56 nt, Human
ggguccccucaucauggagacuccccucagaaauagucuucagcaggguuaaaccc

SEQ ID NO: 4154850 - RNA, 65 nt, Human
gggucccuaggagaauugccgcagccccagcccagggcgggccggcaggcgggucucagggaccc

SEQ ID NO: 4154851 - RNA, 57 nt, Human
ggguccgcucaagaagcaggagguggauucagccccacagcuucccaaaguggaccu

SEQ ID NO: 4154852 - RNA, 68 nt, Human
ggguccguucugggguuugucuccucccuccuggccacuguggggagucugacccuuagagaugaccc

SEQ ID NO: 4154853 - RNA, 88 nt, Human
ggguccucccugcuucugcuucagcagcaaaacccaggacagaagcugcucucuguuuuccugccugucucuagaggccggaggaccu

SEQ ID NO: 4154854 - RNA, 88 nt, Human
ggguccucgucccugaagagugugagguugugcuuuuggaugugucccagcagcaccuguccucgcugcuccagggucuggaggaccu

SEQ ID NO: 4154855 - RNA, 74 nt, Human
ggguccugggauuuugaauguuauaagagacaaaauaugucaggcuauuuaugacauuacaauaucaaggaacc

SEQ ID NO: 4154856 - RNA, 77 nt, Human
ggguccuugagggaggcaggaaaguugucugucuggauguuuccucggaccucugucugcuuccuacuccagggccu

SEQ ID NO: 4154857 - RNA, 69 nt, Human
gggucggccugguggcagaaucuaggggacccaguccuaggguaccagagccucaacacagguccuccc

SEQ ID NO: 4154858 - RNA, 79 nt, Human
gggucgguggcuccauccuggccucgcuguccaccuuccagcagauguggaucagcaagcaggaguaugagucaggccc

SEQ ID NO: 4154859 - RNA, 57 nt, Human
gggucuaggagacaugggcaagguucuuaaccuggagcagcccagaggucugggccc

SEQ ID NO: 4154860 - RNA, 104 nt, Human
gggucuauuacugugccaccuggggcaggcacagugauucagaucugcccuacaccacacugaacaucugccuuguggcugccucugguacacaagauagagcc

SEQ ID NO: 4154861 - RNA, 65 nt, Human
gggucucaggaggcagcgcucucaggacgucaccaccauggccugggcucugcuccuccucaccc

SEQ ID NO: 4154862 - RNA, 55 nt, Human
gggucuccaaaccccuuuggcucucacuggggcuucugggcaggacuggggaccc

SEQ ID NO: 4154863 - RNA, 62 nt, Human
gggucucucagaaggcugcaaucaaggugcagugcauggucuguggucucaucugaaggcuc

SEQ ID NO: 4154864 - RNA, 72 nt, Human
gggucugaagcgcugguguuguagaaauccucaucacaaagaggugacugcguuccaguugcugccaggccu

SEQ ID NO: 4154865 - RNA, 88 nt, Human
gggucugagggaagcaggggaguccacucuaugcagacacuuaauuaaucugcaaugugcacaucgucuugcccuuucccucccaccc

SEQ ID NO: 4154866 - RNA, 56 nt, Human
gggucugcgaacugucuggaauucgucccuuaaugaguuuacaacuguccagcccc

SEQ ID NO: 4154867 - RNA, 56 nt, Human
gggucuggccuccgggcaggugggauccauccacccuggacucgaggcccgagccc

SEQ ID NO: 4154868 - RNA, 105 nt, Human
gggucugguucuuguguauaagcuggccggccaccuccaggguugcagagcaggagaagcugcgcccguuguccucugggguggccuucagcaggagcugggccc

SEQ ID NO: 4154869 - RNA, 68 nt, Human
gggucuucauuuauucuacacucaacaaauauuuaucagagcaccuacugugggucagugaauggccu

SEQ ID NO: 4154870 - RNA, 57 nt, Human
gggucuuuggcucccaccucuuggugaaucucuaggaucugugagugcugcagacuc

SEQ ID NO: 4154871 - RNA, 79 nt, Human
gggugaaacugaugaauuuuguuacuaagggcccagaauauagaacaaaaccucagaggcaucauucauaguuacauuc

SEQ ID NO: 4154872 - RNA, 57 nt, Human
gggugaaaggauggggagaaagugcauacagcuagacaaauuucccuccuuccacuc

SEQ ID NO: 4154873 - RNA, 55 nt, Human
gggugaagccuuucuggguagaauucgauuuccccaggaagacacaugcucaucc

SEQ ID NO: 4154874 - RNA, 77 nt, Human
gggugaaggaggguuggggccuggggauggguucugggcaaagacccauagucucugggcccagaccuuccuuauuc

SEQ ID NO: 4154875 - RNA, 109 nt, Human
gggugaaggcagugggggccugcacaaugggaucuugcccugagggcucaggcacgggccggcccuuguccggggucccuccagugucccagccccaagcugcacaccc

SEQ ID NO: 4154876 - RNA, 61 nt, Human
gggugaauaggggaaggcuauuuauuuauuuauuuugagacagagucuuguucuguugccc

SEQ ID NO: 4154877 - RNA, 60 nt, Human
gggugaauguugcuuagcguaucgcaaugcaucauugcuucaugcuucugacaauagcuc

SEQ ID NO: 4154878 - RNA, 88 nt, Human
gggucccagacacaaagcuggccucucaggcuuuacugaaagauaagugcugauaaggccugcgggucaucuucgucuacgcgggccc

SEQ ID NO: 4154879 - RNA, 57 nt, Human
gggagagucagacuaagccauggugaaugaaauuuaccuggccaagcuaacuuugcc

SEQ ID NO: 4154880 - RNA, 76 nt, Human
gggagauauuuuauacagcagcagcaggcuauccacauugugccauaccucgcuuuugugugacuuaauaucucuu

SEQ ID NO: 4154881 - RNA, 60 nt, Human
gggagaugaaucagaagugauccaauaaccagcccuggauuaagugcaucuggcucuccc

SEQ ID NO: 4154882 - RNA, 55 nt, Human
gggagaugcuugucugucuuaucaucggggccuggugacucugcaaccgucucuc

SEQ ID NO: 4154883 - RNA, 58 nt, Human
gggagauggugaaaaaggcugagcaccugucagugcauuaaaaccaucgaccaucccc

SEQ ID NO: 4154884 - RNA, 84 nt, Human
gggagcaaaacagcauuucuauuaaguauguaaacaagccagcaggaugccuaggcuuguuaucugcgugaagaaaaugcuucc

SEQ ID NO: 4154885 - RNA, 78 nt, Human
gggagcaccaaggcucugccaugggaugcccaguucucuuuauaaaacuugacaguccacagggcucuaggcgcuucc

SEQ ID NO: 4154886 - RNA, 126 nt, Human
gggagcagaagguugcagauggggagagacagguggcuucucugcagccuuuguuccucaugugggagaggguagcagguggcuuccagauuuucugccuacaaaugucuguaacaaacaaguccu

SEQ ID NO: 4154887 - RNA, 76 nt, Human
gggagcagacugaggaaaguauugccuggugaauccgaaggggcagaaguuggagcuuuccaucagcuauguuucc

SEQ ID NO: 4154888 - RNA, 56 nt, Human
gggagcaggaaggugcuggcaugucauaguguuggggcccuggcuuuccuguucuu

SEQ ID NO: 4154889 - RNA, 58 nt, Human
gggagcaggcacgggggugaugcugccacggggccugugacacccagagccuccuccc

SEQ ID NO: 4154890 - RNA, 67 nt, Human
gggagcauaaaauaaauaguuugcaugacguuucauuuuucauguauuaugauuauuuucaugcccc

SEQ ID NO: 4154891 - RNA, 72 nt, Human
gggagcaugucagucugggucuccacagucagcacaggcacacuugcaacaggagaguucagggcaguuucu

SEQ ID NO: 4154892 - RNA, 55 nt, Human
gggagccaugcuggucuucuuuugucugcucaaaugcaccagcaccuuggcucuu

SEQ ID NO: 4154893 - RNA, 70 nt, Human
ggucaauuuuccucaagccucuggaaggcauuucuauuuguaccgcuucuuuggcaugaggagaauggcu

SEQ ID NO: 4154894 - RNA, 77 nt, Human
ggucacaggcaugugagacagauugguuaaaaaaacggucucugucguugcuuuugucauucaaaugcucuuugacc

SEQ ID NO: 4154895 - RNA, 79 nt, Human
ggucacaggccuacccuggacccaucauggcugcuggaugauggcagcucugauugguucagccugggucaugugugcc

SEQ ID NO: 4154896 - RNA, 67 nt, Human
ggucacagggcuaaaugaaggguuggaacuuaacuuuguucuaaaucuucucuguggucccugcccc

SEQ ID NO: 4154897 - RNA, 94 nt, Human
ggucacauagauugggaagaggaggagccaggcuuugaacacagaccugcuugaccccaaagccuggguuccucacuaucauauucuauugacc

SEQ ID NO: 4154898 - RNA, 75 nt, Human
ggucacaugagaugcugcccucuaccuugcagaaugggccaucgagaacccggcagccuucucucauaggugacc

SEQ ID NO: 4154899 - RNA, 65 nt, Human
ggucaccaaauuggaacuugagugacauggugauauaugucacucaaguuccaauuuacauuucc

SEQ ID NO: 4154900 - RNA, 71 nt, Human
ggucacggaagcucugggcuuuguacuuggccaggugccuggaccucccgcgacgcucgggcuccgaugcc

SEQ ID NO: 4154901 - RNA, 104 nt, Human
ggucacuaguauuaaguucagguuauucgaaugcauuccacgguagugaugacaauucaucaggcuaguguguguguucaccuugucacucccaccacuagacu

SEQ ID NO: 4154902 - RNA, 78 nt, Human
ggucacucagauuuccucuaccuuucuuuacuucccuccaaguuggugucuggaaauuaagaggagguuuaugucacc

SEQ ID NO: 4154903 - RNA, 83 nt, Human
ggucacucuaggccuuugaaaguugcauccuuuucugagcacaccauuuugauacaggaugaaaugugaaaguucugggugcc

SEQ ID NO: 4154904 - RNA, 79 nt, Human
ggucacucuguguacucaacaugccuacucagucuggaaguauccugggcagugggcaaguuguauucagagaagggcc

SEQ ID NO: 4154905 - RNA, 64 nt, Human
ggucacuggcagggcagugagauuugaacuucagaguaucagaccucugaccuugccaaagacc

SEQ ID NO: 4154906 - RNA, 58 nt, Human
ggucacuuuaccccuuggagccucagcuguggggaggauucaugggagcaaagaggcc

SEQ ID NO: 4154907 - RNA, 63 nt, Human
ggucagaaggauucugggaaauguuaaauaaccuugccuguggagaguaccuuuuuuuuggcc

SEQ ID NO: 4154908 - RNA, 60 nt, Human
ggucagacccugcgguguuuggaugacagagcccugaauggagacaccccaggucugguc

SEQ ID NO: 4154909 - RNA, 88 nt, Human
ggucagagaccuagcaggugaucgcgugugcuccccuccaggaucccagggcagcgaagcuugugaucaguugcugccucuucuugcc

SEQ ID NO: 4154910 - RNA, 59 nt, Human
ggucagagagauaagaguccagguguugaaggugacaucuggcagugauuucugugauc

SEQ ID NO: 4154911 - RNA, 63 nt, Human
ggucagagguguccaggccgggacagaggaacggaaccugggccugcuugggccccucuggcc

SEQ ID NO: 4154912 - RNA, 67 nt, Human
ggucagaguauggucauauaaguaccauaacauauagguuacaguaccuguauggccacugcagacu

SEQ ID NO: 4154913 - RNA, 78 nt, Human
ggucagagucauaacagacacaggcguggagucgcccgggcagcacgucgggggcucggcaucuguggacucugcgcu

SEQ ID NO: 4154914 - RNA, 84 nt, Human
ggucagcaaacacaagagguaauuucuccagaacauagagagaaggagagaggauuuaggaucuuuugcuguuccuagcugacc

SEQ ID NO: 4154915 - RNA, 90 nt, Human
ggucagcacuggaaguccugauuuguguuuugaaaacucaaaucuauugagcaagauaagaggggaugcagagaggcuuauguguagauc

SEQ ID NO: 4154916 - RNA, 74 nt, Human
ggucagcccuagauguauaguauguaauuucugcacagcucucuguuuaguaaauacaucacuauauacugauc

SEQ ID NO: 4154917 - RNA, 79 nt, Human
ggucagcgagauauuuuggcucacacccagaugucccacuuucuuagcuggcugugugccaggcugucugucugcugcu

SEQ ID NO: 4154918 - RNA, 60 nt, Human
ggucagcucaucuuuucauggggagccacagguucaaaagaaaauacaaugagcuugacc

SEQ ID NO: 4154919 - RNA, 58 nt, Human
ggucagcuguacuugauguuuccauucuacauggugggcuguaucaagaagucuggcc

SEQ ID NO: 4154920 - RNA, 58 nt, Human
ggucagcuuuguuggauacugcugaaaggucaaguaacaugaacacacagagcugacc

SEQ ID NO: 4154921 - RNA, 81 nt, Human
ggucaggagcagccuuggagagcgccgcugauguccucuucccccggaucccugccuccauccccgggcgggcucuucacc

SEQ ID NO: 4154922 - RNA, 59 nt, Human
ggucaggagugauaccauuugucauguguccaacuucaugacuaaaugguugcucuacc

SEQ ID NO: 4154923 - RNA, 76 nt, Human
ggucaggauugaaugggagggggaggagaggccagacuuugguguccacucagcccguccugagccagcacugucc

SEQ ID NO: 4154924 - RNA, 66 nt, Human
ggucaggcacugugguugaguggggacaguuguucugauaugugaagcuauuaguucuaggugacc

SEQ ID NO: 4154925 - RNA, 58 nt, Human
ggucaggggcugcucuacagagccucagugaagaggaccugggcgcuaguuccugauu

SEQ ID NO: 4154926 - RNA, 68 nt, Human
ggucaggguauaaucaagugagaagggaaaacacaaaaaaaucuacacccugguuccuacccuggauc

SEQ ID NO: 4154927 - RNA, 58 nt, Human
ggucaguagaaauuugaccaaaauugccucagacugguugguugaauuuuuagugacc

SEQ ID NO: 4154928 - RNA, 64 nt, Human
ggucagucucucccgaguguuguaguggggagaguugacccagaugaugcggaugagacugauc

SEQ ID NO: 4154929 - RNA, 75 nt, Human
ggucagucuucuagcaaauccaggccuuuggaacuagaaccagaaccuugagagaagcugugaagacuucugacu

SEQ ID NO: 4154930 - RNA, 84 nt, Human
ggucaguggcuguagagcugggacugagcucagcccacccgauuucugggcuucucucccccagcuccacauugcaccaccacc

SEQ ID NO: 4154931 - RNA, 62 nt, Human
ggucauacccuguaaucugaaacaugaaccaauuuauggcuuaaauacuacagggcaagauu

SEQ ID NO: 4154932 - RNA, 56 nt, Human
ggucauagagaauucaccaggaucuaaaucuugaaugcuggugagcucauguggcu

SEQ ID NO: 4154933 - RNA, 82 nt, Human
ggucaucucuaugugugucuauguccuaaucucuucuuauaaggauaccaguccuuuuggauuagggcccacccauaugacc

SEQ ID NO: 4154934 - RNA, 60 nt, Human
ggucaucuggaaauaaaauuauaguugauaguucauaaucagaaaauauuuccagaugcc

SEQ ID NO: 4154935 - RNA, 59 nt, Human
ggucaugugccagguagugagcugagaguggcagaaaggaggcugcgugggaugugacc

SEQ ID NO: 4154936 - RNA, 96 nt, Human
ggucaugugggaaaaaauuagcuuauuuuuucuguugucgcccaaagaaugucacuggugauauaaagaaguggaaaaugagaaaacuccaugauc

SEQ ID NO: 4154937 - RNA, 66 nt, Human
ggucauguugaauggccuugauuuuuuucaguaaaguugggggaaggcaaggucauucuacagacu

SEQ ID NO: 4154938 - RNA, 84 nt, Human
ggucauugguaguuuuuggcugagcaguuuuuauggaaaacgcagacagaaaggcugccagguaaaauauuuuuuuaagggacc

SEQ ID NO: 4154939 - RNA, 73 nt, Human
ggucauugucucuugucauuuaguagauggauuaucccuccuacuuuuugugucaagcagucaccaaaugacu

SEQ ID NO: 4154940 - RNA, 58 nt, Human
gguccaacugaccucagcugcagggcacugugucuccagcaggaggugagaugugacc

SEQ ID NO: 4154941 - RNA, 64 nt, Human
gguccacaaccgccauugucuggucgugccaucuaauggccacugccuccgccauggcuggacc

SEQ ID NO: 4154942 - RNA, 74 nt, Human
gguccacacugccuuuaugagcuguaacacuuaccgcgaaggucugcagcuucacucaggaagccagugagacc

SEQ ID NO: 4154943 - RNA, 55 nt, Human
gguccagagaggugcaagaggcugguggccagagacuccugugccucucugggcc

SEQ ID NO: 4154944 - RNA, 75 nt, Human
gguccagagcaggguuuuaacgaacagaagcuggcaugucaccacucucugucccuaggagccuugccuuuugcc

SEQ ID NO: 4154945 - RNA, 75 nt, Human
gguccagcaggccuggguagggccagagaugcugugcuucuaacaagcuccugggccaagcccaugcugcugacc

SEQ ID NO: 4154946 - RNA, 75 nt, Human
gguccaguacggggcaguuucccgcagaaagggucccacgguuggaucuuucucuucgaaaaccugcccuggacu

SEQ ID NO: 4154947 - RNA, 61 nt, Human
gguccagucagauauucaugcaaggcauuuuaugauguacgugauuuuguugacuggggcc

SEQ ID NO: 4154948 - RNA, 75 nt, Human
gguccagucagggugaaucucacaacucuuauguguaugcuggaucacuaaaaguguguuuuuaccuucuggacc

SEQ ID NO: 4154949 - RNA, 75 nt, Human
gguccauugucugcauaucaaauuacuccugguuccugagguccaaggaguucaguugguggcugugcguggacc

SEQ ID NO: 4154950 - RNA, 56 nt, Human
ggucccaagugcuuucaucuagagaugauauucuccggguggcagaacgugggucc

SEQ ID NO: 4154951 - RNA, 66 nt, Human
ggucccaggcccaggggucuggcccacugcuccuccugggguggugcugugagccccuuggccucc

SEQ ID NO: 4154952 - RNA, 76 nt, Human
gguccccacagggucaagggugcuacaaggccagucuguuugaccucggacuuguaagucucaugauccugguacc

SEQ ID NO: 4154953 - RNA, 70 nt, Human
gguccccaucuauuauaagauguaauugcacuuaauuuguagacauccuucaagugauaugugggugacc

SEQ ID NO: 4154954 - RNA, 130 nt, Human
ggucccgcccuugacauguggggauuauuacaauucaaggugagauuugaguggggauacagagccaaaccauaucauucugccucuagcuccucccagaucucaucuccucacauuucaagacacaauc

SEQ ID NO: 4154955 - RNA, 82 nt, Human
ggucccugaggagauccccccagaaguggugcaggaguauguggacaucauggaggagcugcuggggccuucccucggggcc

SEQ ID NO: 4154956 - RNA, 82 nt, Human
gguagggaccgaggcugccuaguccuaaccaagaccgaggucucccccuuggcucugggauuaccagccuuaggccugggcc

SEQ ID NO: 4154957 - RNA, 84 nt, Human
gguagggcaggucagagcagaauucaauuaucaguauaaguaacauguaaagauuugaguucugcuuauagaccaauggcuucc

SEQ ID NO: 4154958 - RNA, 64 nt, Human
gguagggcugaaugcaucuagggaggaaagguaccucgcaggccccagaccauuuugccuuacc

SEQ ID NO: 4154959 - RNA, 60 nt, Human
gguaggucugggacuuggcugggcaggggauagcuggaacagccaagaacaggcagaacc

SEQ ID NO: 4154960 - RNA, 63 nt, Human
gguagguggccugagagccaucugugaccugucacaucucaccuggcuccagccuccccuacc

SEQ ID NO: 4154961 - RNA, 82 nt, Human
gguagguggggauuugaagcaugguacuuguucaacauccugugaauuucauuaguguguuacuauugcuucaccuacuacu

SEQ ID NO: 4154962 - RNA, 71 nt, Human
gguaguaagcugcagaagaguguucacugcuuuuucuccaauugaaagaaauaccuuucucagcuuuaacc

SEQ ID NO: 4154963 - RNA, 63 nt, Human
gguaguacauggaagaguacacagucuagaaggcacuguaucauggcucuacauguuucugcc

SEQ ID NO: 4154964 - RNA, 55 nt, Human
gguaguagaagguaugcuuuaauggaagaacuauauaaagacauaagcuacuauc

SEQ ID NO: 4154965 - RNA, 66 nt, Human
gguagucaggguggcacaucacagcauuaacuacauuuggccugugggcugccauucuuuucuccc

SEQ ID NO: 4154966 - RNA, 96 nt, Human
gguaguccuuaagucuuaucuacuguguccuuggaucuguucuaggcacuaagacagauacagggacuugguauuuacagaauguauaguuauacc

SEQ ID NO: 4154967 - RNA, 87 nt, Human
gguaguggacaucaacaguucuguccaauuaauccuuggaagcacagucagaauuaauugggaacuuguugaaaguugaucgacacc

SEQ ID NO: 4154968 - RNA, 129 nt, Human
gguaguggccagugaugcuucucaacauaccacaaugcacaggaccacacauaaugcacagcugcccacaacaaaguauuauguggcccaaagugucaguggugauguugagaaacccuggcuuaaacc

SEQ ID NO: 4154969 - RNA, 64 nt, Human
gguaguggguaaucaacagauaucugcuaguagcuugugauuauucuguuauuauuacauugcc

SEQ ID NO: 4154970 - RNA, 70 nt, Human
gguagugguggcgugguggugcagggauguuuuugaauuggcucugugcccuacugcucagcuuucugcc

SEQ ID NO: 4154971 - RNA, 88 nt, Human
gguaguguuugcaugcacaugcaauagugcuuucguguguuuaggcaugugcagaagugcuuuguauguuugugugcaaacaucugcc

SEQ ID NO: 4154972 - RNA, 113 nt, Human
gguaguucaaaggcuggaaugggagcuuggcagugucacuagggagccacacuuccucugccugugagcuuccauccuuacugugugggcuccucaucuucagccucacugcu

SEQ ID NO: 4154973 - RNA, 56 nt, Human
gguaguucuucauggguuucauugauugaauuuccuuggcugaugacagagguacc

SEQ ID NO: 4154974 - RNA, 59 nt, Human
gguaguuugagguuuuggagcaggucaugaccaugcagcaaucuagaaacccagacucu

SEQ ID NO: 4154975 - RNA, 65 nt, Human
gguaguuuuugagcuguaaucuuguccagccuuauuuuagagaagaaugcuucugaagagcugcc

SEQ ID NO: 4154976 - RNA, 109 nt, Human
gguauacagaagggaacauucagauccgguuuguaaggggcaagcucagcacucuugccaggggcccuggauuuaagcauggacuuugcaauguacuaauuuugugacc

SEQ ID NO: 4154977 - RNA, 56 nt, Human
gguauaugcugaugugaucgguuguacuuauugauagccagucucaguacuguacu

SEQ ID NO: 4154978 - RNA, 58 nt, Human
gguauaugcuuaugaugguuaauuugaaggugucagcuugacuggagugagguaugcc

SEQ ID NO: 4154979 - RNA, 57 nt, Human
gguaucagagacccaccccaagcauguauuuagacagcuuucuguggacucugcacc

SEQ ID NO: 4154980 - RNA, 64 nt, Human
gguaucagcaguguaguuuaucauucccuaccagagaaugguauaaauuagacugcagaaugcu

SEQ ID NO: 4154981 - RNA, 73 nt, Human
gguaucgcacacuaggaacaaccaucauuuaucuaacugugauguacauguugguuguuuccagucuuuuacc

SEQ ID NO: 4154982 - RNA, 81 nt, Human
gguaucucuuagaagaucagcgucaguuagcaaguugaaugacaggccugugaaacuugcuaauugcacguaggaggaacc

SEQ ID NO: 4154983 - RNA, 100 nt, Human
gguaucugccaaaagagcaaacauguaauagugaaacacggggagcacauuaauuaaaaucaagagcucuauuauuacuccugauuguacugcagauacc

SEQ ID NO: 4154984 - RNA, 92 nt, Human
gguaugaagucuuggaaggcuaugccugcugccagaaugucuggaggaaaacaguagcaugcuuaucuuuugaaagauuuuuuaaaaauauc

SEQ ID NO: 4154985 - RNA, 72 nt, Human
gguaugacacuaacugacuucuugauuuaccauuauccauggaaucuuaggauagucuguuagaaaaguacu

SEQ ID NO: 4154986 - RNA, 70 nt, Human
gguaugacugccguuuaggggacccuaaugcugaacagguaccauggaccucugaaggcagagcagggcc

SEQ ID NO: 4154987 - RNA, 72 nt, Human
gguaugauucagaaacaucaguggauggauuggguacaaccuauccauuacugaacuguauucuuauuaacc

SEQ ID NO: 4154988 - RNA, 95 nt, Human
gguauggaagcuucuggacuuugaacaggcuaguuuuaaagcauauucaaaguauccucugacacuaguuuuguacaaaaucugcaagccaaacc

SEQ ID NO: 4154989 - RNA, 70 nt, Human
gguaugggggaggccggcagcucgccccugagcucaacuggcuggcagggcugauggcuucccucacacc

SEQ ID NO: 4154990 - RNA, 95 nt, Human
gguauguuuggauauagguacagaguuagcagaaaguuggauuuaaacuaaugugaaccaggauucagguuuugcuaagauuguguagauauacc

SEQ ID NO: 4154991 - RNA, 88 nt, Human
gguauuauagacaugaaugagacagccucugcacucauggaacucacauucuagagcaguguuguccaucagaaaaauaaugagaacc

SEQ ID NO: 4154992 - RNA, 94 nt, Human
gguauuggcaggcuuccuugguucugccuggccuggaaguguaucuuuccuuccaccgugccaugugggaccacaaaggagaaugccauguacc

SEQ ID NO: 4154993 - RNA, 80 nt, Human
gguauuguuuaauuaaugaggugauuuguauaugaguaagaacagggcuuacacuaaaguuccucaaauaaaacaugacc

SEQ ID NO: 4154994 - RNA, 68 nt, Human
gguauuuaaggugggagagcagcacuugcuucagggacacccaggagccuugggcgcucucccauccc

SEQ ID NO: 4154995 - RNA, 67 nt, Human
gguauuuauauuucuuuuguuuucauuucugcacacauguaugacugagaacucaagagaaaaggcc

SEQ ID NO: 4154996 - RNA, 80 nt, Human
gguauuugaagaugcgguugaccaugguguguacgcuuuauuugugacguaggacacauggucuacuucuucucaauauc

SEQ ID NO: 4154997 - RNA, 64 nt, Human
gguauuuggaggcagugaacaauuccuguguguugguuugcuaggaccacuguaacaaaguacc

SEQ ID NO: 4154998 - RNA, 61 nt, Human
ggucaaaagcugcccuacacggaagcacuuaauaaaugcuuacugacugggcaguuuuucc

SEQ ID NO: 4154999 - RNA, 78 nt, Human
ggucaaauggcagcagggagaggugguaggaugaauaugaauauuuuccuucuaauauucugccuguuuuuguuuacu

SEQ ID NO: 4155000 - RNA, 89 nt, Human
ggucaaaugugauuaacuugcaggggagaggaacaaacagggccaguuucccuuguagucucauacuuuguuuguguaaucaauuggcc

SEQ ID NO: 4155001 - RNA, 60 nt, Human
ggucaacgcugagaagaacauggccacaggucaccauguggcucugcaccucaguguacc

SEQ ID NO: 4155002 - RNA, 67 nt, Human
ggucaagcuggcugggagaggcacgaacuguacugaagcugugucuucccagccugcuuaagaaacc

SEQ ID NO: 4155003 - RNA, 59 nt, Human
ggucaagggacuugcucaaggccacacagcuagaaagaggcagagccaggccuuuggcc

SEQ ID NO: 4155004 - RNA, 64 nt, Human
ggucaagggggccacaccuggugugagcuuucuuggggcugcaucugguggaagccuucuugcu

SEQ ID NO: 4155005 - RNA, 59 nt, Human
ggucacaagcuuauauaccugcaggagaccacacagguaaugcagaugaguaguguacc

SEQ ID NO: 4155006 - RNA, 70 nt, Human
ggucacacagugagucagagguagauugugcaaguuaaggccaugcuuucucuuaguucauugaaagacc

SEQ ID NO: 4155007 - RNA, 72 nt, Human
ggucacaggcuccacggucacuggcucugugagaacacuugcuccagagccuugccuggggcccugugugcc

SEQ ID NO: 4155008 - RNA, 80 nt, Human
ggucacagugcucagagaccugaguucaaagcccagccccacucuuugggcaccuugggucucaggcaaaugaugugacc

SEQ ID NO: 4155009 - RNA, 80 nt, Human
ggucacaguggaguugggguagcccuagaaugaaccaaauagagguuaaggggucaguaccuuauacauugauguugacc

SEQ ID NO: 4155010 - RNA, 73 nt, Human
ggucacauagcuggugagcaaaggagaaggaugccuacugggaaucuggcuucgcagcucccagccauaaacc

SEQ ID NO: 4155011 - RNA, 69 nt, Human
ggucacaugguugagcuugaucuccagcuccccucccuucccaggagaugaggcucaucuuauguggcu

SEQ ID NO: 4155012 - RNA, 80 nt, Human
ggucaccacagggcagggguucggcugauggcugcugggcucaguggcaggucagagucccccuguccuaacagguggcu

SEQ ID NO: 4155013 - RNA, 68 nt, Human
ggucaccagguggcugaggccaugacacucccagaggagacgugaugaggacccaucaccuggugacu

SEQ ID NO: 4155014 - RNA, 66 nt, Human
ggucaccaugucauuuucuuucuuucauucacggaaguuacuguagaagagaaugauuccaugauu

SEQ ID NO: 4155015 - RNA, 81 nt, Human
ggucacccagcaguuuuaugaaggcccuuaaggugcuucaaguaccagguggccccagcgugguuuaacugucugggggcc

SEQ ID NO: 4155016 - RNA, 55 nt, Human
ggucacgggcugcggugggggcgcgaggcucccggcgcccagugcgguucugacc

SEQ ID NO: 4155017 - RNA, 65 nt, Human
ggucacgguugacauuuuguuaaauaugauacucacuauagugaacauucugucaauugaugacc

SEQ ID NO: 4155018 - RNA, 64 nt, Human
ggucacuggucucugcuuccaucagcucagggcugguucccucggaguggaggccagcguggcc

SEQ ID NO: 4155019 - RNA, 59 nt, Human
ggucagaaggagaaaugugugagugagcaguagcagcuacaugacacuguuccucugcc

SEQ ID NO: 4155020 - RNA, 56 nt, Human
ggucagacugauuccucugugugccuguugcucugaccacaggaguccagucgacc

SEQ ID NO: 4155021 - RNA, 59 nt, Human
ggucagaggccaaacugagcaggguuuuguaggcccugcuaaggauuuugccuuuuacc

SEQ ID NO: 4155022 - RNA, 75 nt, Human
ggucagagggcaggaccgcuggcaggugcccauggguagcagcucaccugccuggcccaccuugccacucucucc

SEQ ID NO: 4155023 - RNA, 62 nt, Human
ggucagaggucacaagcuggcaucccuuggagaauauggccagcacacaugcuucuuuggcc

SEQ ID NO: 4155024 - RNA, 61 nt, Human
gguccugggaugacagggaugcuguguuuuauuuacucaucuuuguaacuuccacauaacc

SEQ ID NO: 4155025 - RNA, 70 nt, Human
gguccugucuccucauacugucauauugagaguuaggcuuuuaucauaugaauuuugaggggacacaacc

SEQ ID NO: 4155026 - RNA, 79 nt, Human
gguccuuaccagaggugccacagaaagagccuggugggcagggcaugggcucugggcugcccucuggacaguaggagcc

SEQ ID NO: 4155027 - RNA, 127 nt, Human
gguccuuccagaccuggaacacuguggaagaguuugggcaagucauaaaugaugcucucgaucacucccacauucugcgacuguccccagacccuccgccucuucucagaggucugccaucaggauc

SEQ ID NO: 4155028 - RNA, 80 nt, Human
gguccuucgaggccuggagccgccuaggcgcugagccacugcccgccgugaucugugcgacuccaggucugggcaggacc

SEQ ID NO: 4155029 - RNA, 64 nt, Human
gguccuuuucccacuguauguucagucuacccagccaacgugcugacugagacagggcaggccc

SEQ ID NO: 4155030 - RNA, 83 nt, Human
ggucgaggauccuggagcugacuccguuugagaggcgaagaucccuuuuguuagaugaacagucacuuccccauccaucgacu

SEQ ID NO: 4155031 - RNA, 67 nt, Human
ggugcgaggcucaccaucccucuguguagaaaugagcauaggaagggugucaugagcccuuuguacu

SEQ ID NO: 4155032 - RNA, 64 nt, Human
ggugcuaggugagggcccaccacccauuuaauuucuggugggucuggggcaggcaucugacacc

SEQ ID NO: 4155033 - RNA, 55 nt, Human
ggugcucaaggugacaggacaugucuuuauagaucuugaaaucucaccgagcauc

SEQ ID NO: 4155034 - RNA, 103 nt, Human
ggugcucacuggccaaggccaccuucuggucugccugacagccguccuggauaggcagguacugcugggccagaaggugguggucgugcacugcaaaggcauc

SEQ ID NO: 4155035 - RNA, 66 nt, Human
ggugcucagcuggugaauggacucaucuggaggguccacgauggcuucacuuacauggcuggugcc

SEQ ID NO: 4155036 - RNA, 57 nt, Human
ggugcucaggaaaugacaggugucuccuuccugagagcugacagcuguccugagccc

SEQ ID NO: 4155037 - RNA, 76 nt, Human
ggugcucauaaaugcuccgcuugguccuucacauuuguguuccacacaggagaagccaaguugugagcagugcacc

SEQ ID NO: 4155038 - RNA, 66 nt, Human
gggugccuggucccauugcggcugccucugugccugcaugggacagacccaugggccaggucaccu

SEQ ID NO: 4155039 - RNA, 64 nt, Human
ggguggaggagaacaggccccaugaugcuaucaaugucccggguucuuuuuaucuuucuacgcc

SEQ ID NO: 4155040 - RNA, 63 nt, Human
ggguggaucaugugaugucaggaguucaagaccagccuggccaacauggugaaacucccaccu

SEQ ID NO: 4155041 - RNA, 82 nt, Human
ggguggcauaggaagcugagugcguagccucugcugguaaagugaauggccagcagcuagcuggguuucacuguggacaucc

SEQ ID NO: 4155042 - RNA, 55 nt, Human
ggguggcauggagaaggaggcaguguccgugacugugcugcucuccgcagccccc

SEQ ID NO: 4155043 - RNA, 56 nt, Human
ggguggccagcugguuccuuacugcccacagcuggcgcugaggauuccuggccccu

SEQ ID NO: 4155044 - RNA, 69 nt, Human
ggguggccucauggaggccaggaaacagccuggagucagguggguccuggcucugccauuuacgccccc

SEQ ID NO: 4155045 - RNA, 63 nt, Human
ggguggcgggacagcccugcccggggaugugggugguccaggaggcaggugcuguccccuccu

SEQ ID NO: 4155046 - RNA, 57 nt, Human
ggguggcucaugccuguaaucccagcacuuugggaggcugaggcaggcaggucaccu

SEQ ID NO: 4155047 - RNA, 61 nt, Human
ggguggcucuugcauggggucucuccugcaguugcagcuggagucccagcaaagccuuccc

SEQ ID NO: 4155048 - RNA, 56 nt, Human
ggguggcuuuacuuaccucuaucuuaaugccaaccagauggguauugaagucaccu

SEQ ID NO: 4155049 - RNA, 102 nt, Human
gggugggacggaauccguuccccgccggaaagauggaugcgcccuucccgggcgugcccggggcugugugcccacuucccauccggggagcucaccccaccc

SEQ ID NO: 4155050 - RNA, 114 nt, Human
gggugggaggcagguuaucaauccaggauguuaggauaugaaacaguauaaguauauguauauguauuuguauuacaucuauucuaaagcugaaacucugccuacuuuacaccu

SEQ ID NO: 4155051 - RNA, 81 nt, Human
gggugggauucugacgucugguuuccaccccgcuguuucagaugaggaaacugaggcacagaugcgcaaagaaucacaccc

SEQ ID NO: 4155052 - RNA, 79 nt, Human
gggugggcaccagccucuggggaggggaggugccaggccagcgguagcuccagcccgggggcaggugaccccagcaccc

SEQ ID NO: 4155053 - RNA, 78 nt, Human
gggugggcagguggucuuggcccacccaggaguggcagcaugggcucuuaccuggacagggccaggccaugcucaucc

SEQ ID NO: 4155054 - RNA, 72 nt, Human
gggugggccgggggguggaaaaugauuucagcccagcacuuccaagcugcugucauagccaucccuccccuc

SEQ ID NO: 4155055 - RNA, 73 nt, Human
ggguggggcgcaggcccgggucagggccgcagccggcugugcgccgugcccgcccggggcgcugcccccuccc

SEQ ID NO: 4155056 - RNA, 71 nt, Human
ggguggggcuggggucccgggucaggccagggaggggacucuggccacccagcugacgccuuccccugucc

SEQ ID NO: 4155057 - RNA, 60 nt, Human
ggguggggugggcugccaugaagucagaagcugccaucuggcuuuaugcucacccagccu

SEQ ID NO: 4155058 - RNA, 60 nt, Human
ggguggguggagauucagugagaugaggcuugugcagugucuggcccucacagucacacc

SEQ ID NO: 4155059 - RNA, 69 nt, Human
gggugggugguggggcgucgagcugaacgcuggucuggacaggaaaggcuccugcuucaugucccaccu

SEQ ID NO: 4155060 - RNA, 80 nt, Human
ggguggucccagauggcaguggggggcuggggaacugggaggucuugcagaggaacaacuccucacugccucuggcacuc

SEQ ID NO: 4155061 - RNA, 59 nt, Human
gggugguggaguaauucgcagagguuguuguuugauagccuaggaauucucuuccauuu

SEQ ID NO: 4155062 - RNA, 78 nt, Human
ggguguagcgugguauccuaagguaguuuuaguuuggauuucuccagacuucucuaacuugaggaccuuuucauauuc

SEQ ID NO: 4155063 - RNA, 57 nt, Human
ggguguauacauguguguucacgcaugugugcauguguguuugugguguguauaccu

SEQ ID NO: 4155064 - RNA, 77 nt, Human
ggguguccagccagcaggugagugcagccugauccaggggaaccaggcagaugcucuuuugugggcuagggacuccc

SEQ ID NO: 4155065 - RNA, 56 nt, Human
ggguguccugggucaaccaggucgagugcacaguauugugggggacccaggacccc

SEQ ID NO: 4155066 - RNA, 56 nt, Human
gggugucuggguggcugcagggaggcuuccagaguuuccugcagucgcuagcgccc

SEQ ID NO: 4155067 - RNA, 56 nt, Human
gggugucuguagucccugcuacucgggaggcugaggcaggagaauggcgugaacuc

SEQ ID NO: 4155068 - RNA, 70 nt, Human
gggugucuuccgagggcucggcggccgccgcaggugcaggcgccuccccaccgcccucggggagcagccc

SEQ ID NO: 4155069 - RNA, 91 nt, Human
gggugugaaaguaaagauaacuuauugacugaucagagagggaacucauuuucuuccacguauuugucauauuuugucauauuuuaacccc

SEQ ID NO: 4155070 - RNA, 95 nt, Human
gggugugaacauggaaggaguuaauauguacuaagugcuuggugucuauucagccuuagauaaaugcuagcucccuuuccauuccuuucucucuc

SEQ ID NO: 4155071 - RNA, 79 nt, Human
ggguguggacugagaugaggaagaaucuagaacuucggcagaaacaucugaauuagaacuuuucaacuccauuccaccc

SEQ ID NO: 4155072 - RNA, 77 nt, Human
gggugugggaugaggaggcucgaagggcacugggcagggacaugcugaaguucacugagaguucaccaucccugcuc

SEQ ID NO: 4155073 - RNA, 78 nt, Human
ggguguggugaagggaagggggauacaggggcacaauggaccauugugugcucuggaguugccuucacuucuggacuc

SEQ ID NO: 4155074 - RNA, 67 nt, Human
gggugugguggcucaugccuguaucccagcacuuugggaggcugaggcaggcagaucacuugaguuc

SEQ ID NO: 4155075 - RNA, 74 nt, Human
ggguguuaaauacugaguuggaguuggcauuggaacucuaugaauguuagcuguuagucaguauugauacacuu

SEQ ID NO: 4155076 - RNA, 75 nt, Human
ggguguuaaauggcuccuucugugcaguuuuggagggaaaagauucaagagagacaauagguagcauuaauaccc

SEQ ID NO: 4155077 - RNA, 57 nt, Human
ggguguuaacuuguuuaugacaauagacuuucucuguugugcacaagauggucacuc

SEQ ID NO: 4155078 - RNA, 61 nt, Human
ggguguuuggcuagaguagaacagcuauugucuaaauguuuuuugucuugcuaggcugccc

SEQ ID NO: 4155079 - RNA, 77 nt, Human
ggguguuuucaguaacauuucaagguagaggaacauguucauauucuucaucuuggguguuuuugaaguuuuaaccc

SEQ ID NO: 4155080 - RNA, 113 nt, Human
ggguuaaaagucguuuuagaagcagaaugcaugugaagcaaagaauguuauagguaaaugggauuuuagagaucauguucauuuaaugcuuucuacuacuaaucuuuuguucc

SEQ ID NO: 4155081 - RNA, 73 nt, Human
ggguuaaaaugaaaaacaucuuauaccagagguugaaucuucaugggaauuagagaugcuuuuuauucaaccc

SEQ ID NO: 4155082 - RNA, 71 nt, Human
ggguuaaagaacauagcuguugguuuugguguugaacucugguuugccuaccugccuaguugguucugccc

SEQ ID NO: 4155083 - RNA, 84 nt, Human
ggguuaagaggagagagcauccuggaaccaugaagaaugcuuugaaaguuagagucaagcugcauguucuguucucuccuaccc

SEQ ID NO: 4155084 - RNA, 71 nt, Human
ggguuacaugauuagagcugagacuggaacgccaaagcccauaucugugucccuucuaauuucagugaccu

SEQ ID NO: 4155085 - RNA, 59 nt, Human
ggguuagcuaagcagguaucugggggaagaacaucccuggcagagaacacggcugaucu

SEQ ID NO: 4155086 - RNA, 83 nt, Human
ggguuagguaacuggggaccagugucuguuuguucaguggguuugccuauggauuucagaaagaaggauucccucaccuuccc

SEQ ID NO: 4155087 - RNA, 76 nt, Human
ggguuauauaagacaaaucagagucugauguauugaacacaauuggaucuuauucugccauauuuguuuuuaauuc

SEQ ID NO: 4155088 - RNA, 87 nt, Human
ggguucaaaggcuugcagggaaacaguuuaggaagugcccccuuuuaggauagcuugaucucucugauuccccagugccuccagccc

SEQ ID NO: 4155089 - RNA, 70 nt, Human
ggguucaaugcagauaccuuccagagaugauagcacuucauugacugccaaagaggaugucagcauaccc

SEQ ID NO: 4155090 - RNA, 74 nt, Human
ggguuccagagggaccagaacauacuguggggaacugcgagggaacacaguauguucuggucccucuagaaccc

SEQ ID NO: 4155091 - RNA, 74 nt, Human
ggguuccaggugucccaauguucaggacggcuucagccaggggccugaccucugcuuggcggcacuuggagcuu

SEQ ID NO: 4155092 - RNA, 115 nt, Human
ggguuccuuuuggccaacagcuuguggcagaccaugagucuaagaauuaguagcuacuacaaaggcugaugggcugauggugccacaaauuugaagacagugggaaggaagaccc

SEQ ID NO: 4155093 - RNA, 67 nt, Human
ggguucugcugcuggcucugucacccacuagucacaugaacuuggguggaacagccugugcaaaccu

SEQ ID NO: 4155094 - RNA, 64 nt, Human
ggguucuuggcauaauguuuagauuaagaaaacggucuaaacacaaugcaagaaguaucucccc

SEQ ID NO: 4155095 - RNA, 81 nt, Human
ggguugacuguuucccagaggagcaagcucucuguggugaccgcaucucuagcuaacccucuggcacccaacagucaaccc

SEQ ID NO: 4155096 - RNA, 56 nt, Human
ggguugaggcggaugucggcgggaacaucggccuuguccucguccgccucgaacuc

SEQ ID NO: 4155097 - RNA, 74 nt, Human
ggguugcugaugucaguuaguggguuacucucagcccucuccuccagggcagcuagcccucuagcccacaaccc

SEQ ID NO: 4155098 - RNA, 77 nt, Human
ggguugggcaagcagcaguacauauaagacuaguguaucauuaguuuuuauuucuguauuuucuugacuugccacuc

SEQ ID NO: 4155099 - RNA, 115 nt, Human
ggguuggggugaccagugggcggcaggacauucagaguggagaccuggguaccaugggaccuuugacaugggcuggccuuucccgcucuccucuccuggccccucccccuucccc

SEQ ID NO: 4155100 - RNA, 64 nt, Human
ggguugggucgcaguggagaccaaucaucuagcauuugguccucagguucucugugcguagccc

SEQ ID NO: 4155101 - RNA, 84 nt, Human
ggguuguagcuguaucuucagcugaagcagaguccauuggagggacauuguggacuucgguagaagaacuaagccacuuacacu

SEQ ID NO: 4155102 - RNA, 66 nt, Human
ggguuguauaggaggccuuugaaagauuccagaauaucucccagaaguccucaguacaaaaagccu

SEQ ID NO: 4155103 - RNA, 69 nt, Human
ggguugucauucugcaggccgagggcugaucccuguggaggggcccuggcugcuuguagucuggcucuc

SEQ ID NO: 4155104 - RNA, 76 nt, Human
ggguuguucgcgaacuugacugugaugggcucagcugcgcccagcggcuucugcccauucaguccuuugauagccu

SEQ ID NO: 4155105 - RNA, 62 nt, Human
ggguuguuuuagucuugauguguuagagagugauaauuuuaugcaaguuaugauuaaaaccc

SEQ ID NO: 4155106 - RNA, 108 nt, Human
ggguuuagauuaggugaguuccuaaaccuuucucagugcuaaaauccugaucccaugagcuggcauugaagaaugguuaagauuuggaacucuauaaacacuaaaccc

SEQ ID NO: 4155107 - RNA, 61 nt, Human
ggguuuugugcccuuuaaagcaagaaucaguuauuaaaaugcuuucaaagggcauaagccu

SEQ ID NO: 4155108 - RNA, 77 nt, Human
ggguuuuuaagacaguguaacuauguugugugauacugucaugguagauacaggacauugugcauuugucaaaaccc

SEQ ID NO: 4155109 - RNA, 74 nt, Human
ggguuuuuugaucucuguucauuuauuuacuggggaaaaauguuaacacauuccagaaagaaugaacugaaccc

SEQ ID NO: 4155110 - RNA, 65 nt, Human
gguaaaaagaguuugagauuuggcaucuaacagacccgguuuuaaaucucaggccucuauuuacu

SEQ ID NO: 4155111 - RNA, 88 nt, Human
gguaaagaaaguuuauuucuugauggaggaacuacaaaauauuguggccauuuuugcaaucuaucaggacugcgugaaguuuuuuacc

SEQ ID NO: 4155112 - RNA, 67 nt, Human
gguaaagcaucucaccugcccccacguuagcaacuguugccagggaaguaguugugagagcacagcc

SEQ ID NO: 4155113 - RNA, 87 nt, Human
gguaaagcugaagguuuuuguuugugaaauguuacacuaagauaggagcuugugacagaucuuuaaauaaugcuuuuaaaaugugcc

SEQ ID NO: 4155114 - RNA, 62 nt, Human
gguaaaugucuguuaacaugaaugagcuaguauuuguaucuggcccauagcagauucuuacu

SEQ ID NO: 4155115 - RNA, 82 nt, Human
gguaaauuguaaacuagacagugcugagccauaucuaauuuauacuuuagguguccucaugauuuucuagaaaaaaauuacu

SEQ ID NO: 4155116 - RNA, 86 nt, Human
gguaacaaagaauuaacugcaauugaaucugaacauuuuuucaagagauccaggguuggauuugcauauuuaaaauuuauguuacc

SEQ ID NO: 4155117 - RNA, 74 nt, Human
gguaacaguaggugauaaugcaaaaggaauuuauacauuaaaagcuaaauucaaaugcaaguuacuacuuuacu

SEQ ID NO: 4155118 - RNA, 83 nt, Human
gguaacaguauguagaguaagaaaaccuucuguuuugcuauauauuuauaagaagucagcuuuacugugcacuauugugagcc

SEQ ID NO: 4155119 - RNA, 62 nt, Human
gguaacauucuagaaacuuaacaucuaauagagaagauggauaggcuaauagacauguuauu

SEQ ID NO: 4155120 - RNA, 73 nt, Human
gguaacuaagggguggagaguguugccaguucugcccagugaagcugcuggcaaaccauucccagcucagacc

SEQ ID NO: 4155121 - RNA, 64 nt, Human
gguaacuugaguguguuguucaaugagguccaaaugagaugaacaaggcauuccggaaguaacc

SEQ ID NO: 4155122 - RNA, 73 nt, Human
gguaagagccuaucagggauggaguugagaauugaaccugaguucucuggcuccaaauucugauguucuuucc

SEQ ID NO: 4155123 - RNA, 60 nt, Human
gguaagauuacccucuccauuugacugaugaggaaacuggcucagagaggguaauuaacc

SEQ ID NO: 4155124 - RNA, 62 nt, Human
gguaagcacaucugugguuauuaaauauaauuuuauuauuccauggcuggagaucugcuacu

SEQ ID NO: 4155125 - RNA, 79 nt, Human
gguaaggacagcagcuacuuuucccucaagcaugugauaggugccagcagggaggggaaaguggccaagcucuuuugcc

SEQ ID NO: 4155126 - RNA, 62 nt, Human
gguaaggcccuuugcucagccuguaacuauguaucugcaaggcuggcuucaggagccucucc

SEQ ID NO: 4155127 - RNA, 62 nt, Human
gguaaggccugaggaucaguagguaguuuguguccagcugcccagaagcuuagagcuuagcc

SEQ ID NO: 4155128 - RNA, 68 nt, Human
gguaagggcgaggggaaggcaagcaaaccugagagaaggagaagccucugccugccccugcuuuuucc

SEQ ID NO: 4155129 - RNA, 55 nt, Human
gguaagguagcaaggggccacagucuuccuuugaucugggccucucauaucugcc

SEQ ID NO: 4155130 - RNA, 67 nt, Human
gguaaguacaaagauaaaaucucaccaucuuguguaaggugauggauguguaucuuuuuauaguacc

SEQ ID NO: 4155131 - RNA, 63 nt, Human
gguaaguucuacagcuucgcaggcaugcccuacucauucaugcuugggcuuagcaaccuuccc

SEQ ID NO: 4155132 - RNA, 77 nt, Human
gguaauaauucaugauggcagaaaggauuauuuuagaagucuaucuuuucaguuuaugucuugaauuaauauuugcc

SEQ ID NO: 4155133 - RNA, 75 nt, Human
gguaauagaaauuuacagacccucccacuaagcuuuaaguaacaggcagaagggacaggguuuguagagguuacc

SEQ ID NO: 4155134 - RNA, 68 nt, Human
gguaauagcuauaggggagcaguuuucagcugaauauaagaaagcaucuucuaucaguuagacuuacc

SEQ ID NO: 4155135 - RNA, 86 nt, Human
gguaauauauacaaagugcauagaguagugccuauuuuauaaugggucuucaauaauguauaaaguaauuauuuguauauauuauu

SEQ ID NO: 4155136 - RNA, 67 nt, Human
gguaauccagcacuuguucaugugaacugaacucugauuggaccuucacggauggagugcaggugcu

SEQ ID NO: 4155137 - RNA, 79 nt, Human
gguaaucugagccagaaaugagguaguaacaguaggaauggggagauuacauucaauuucuagagguauuuagauuauu

SEQ ID NO: 4155138 - RNA, 83 nt, Human
gguaauuuuagagacauugacaaggacggucuccauggaguaguuggagccaaaguccaaaugcaguguguuugagagagacu

SEQ ID NO: 4155139 - RNA, 76 nt, Human
gguacaaaauaaauuagacagauuugucuuguuuuaugagcaagauccuguuuuucuauuucauuuucuuugugcu

SEQ ID NO: 4155140 - RNA, 60 nt, Human
gguacacauugugacuguauuagccaguagacuauggaagugaugaguuacgaugugucc

SEQ ID NO: 4155141 - RNA, 130 nt, Human
gguacagaaacagcuagauugguuacgguuggcauuauugguacacuguuugaacuguggucggccugcaauuggcugaaacucagcagcugugacuggaugagaccuagccacuuguuacaagaguacc

SEQ ID NO: 4155142 - RNA, 63 nt, Human
gguacagaagagaguaguccaguuuuguuuaacagacauacaagcugguaccuccuccguacc

SEQ ID NO: 4155143 - RNA, 78 nt, Human
gguacagacgccucggagaugcuggcugagaucuugcagcugcaguagaucuagguggacaucauccuggugaagacc

SEQ ID NO: 4155144 - RNA, 127 nt, Human
gguacagggacccagucaucauuggaauaaaccaucugcucugggccagcuauuaaccugcuucaguguugccguucccaggcagaugguacguuuuagcuggaugacugcuuugugucucugggcu

SEQ ID NO: 4155145 - RNA, 96 nt, Human
gguacagguacgucagcucuccuuuggcguguacaguggagcaaggguaagaagcacugaguucugacugugaugccaguagcacuaccugcagcc

SEQ ID NO: 4155146 - RNA, 82 nt, Human
gguacaguguguaaagagaaugguauauggaacucaucacaacuaauuuggaauccuggcuauacuauuuuucauuugggcc

SEQ ID NO: 4155147 - RNA, 61 nt, Human
gguacauauuguagcuugauuagguggcucugaaaucugagaaguuacauuguauuguacc

SEQ ID NO: 4155148 - RNA, 72 nt, Human
gguacauuucccagagguaugaauaaguuggauaacuuuccucacauugugacaguuuuggagaaaugaacc

SEQ ID NO: 4155149 - RNA, 96 nt, Human
gguacauuucuuuguguguaugcagucuuuuucuucuagcuaauuucugucugguggagaagaaacauuuguaugucaguaguggagucaugugcc

SEQ ID NO: 4155150 - RNA, 57 nt, Human
gguaccaguuauuucugaaugcaugggaaaauccauuuuguagcaaugacuguugcu

SEQ ID NO: 4155151 - RNA, 69 nt, Human
gguacccuggcacagccuccaugucgucccucugcagagagaggaggacucaggucuggccauggugcu

SEQ ID NO: 4155152 - RNA, 61 nt, Human
gguaccgagaacacagaaguagggccuugucuucacucaagcugcugugugugccucagcc

SEQ ID NO: 4155153 - RNA, 78 nt, Human
gguaccuggccgccauggcccacucuggucccggcacccccgcggggcugcugagcagggagggccgugugaggugcc

SEQ ID NO: 4155154 - RNA, 80 nt, Human
gguacugaugaacauuuaaagccucuugauauagucaguuacacugauuuacaagagguuuugugucacuuuucauugcc

SEQ ID NO: 4155155 - RNA, 61 nt, Human
gguacugcccuggcugagaugcccgggaaugccacuggagugguuaguuauuggcagugcc

SEQ ID NO: 4155156 - RNA, 55 nt, Human
gguagaaacuuauuugcagaaaagaaacaauuauuugcauuuuaaguuuacugcu

SEQ ID NO: 4155157 - RNA, 78 nt, Human
gguagaacuuccuuugcuguucggagguuagauuggggaaagucgcaaaccuacagaaaaguagaaaaagugcugucc

SEQ ID NO: 4155158 - RNA, 58 nt, Human
gguagaagugaugucauguuauagccaaugcuagguuauaaaaaggauuauuucugcc

SEQ ID NO: 4155159 - RNA, 70 nt, Human
gguagaaucuggaucugggcgcauuucuuuugaugaaggucccaugugcuuauggucucugguuguuacc

SEQ ID NO: 4155160 - RNA, 86 nt, Human
gguagaauuguacaggaaguugcuggagggggugcuauaucaaaauccaagaauccaaagacuugcuguauguaaagcauucuauu

SEQ ID NO: 4155161 - RNA, 56 nt, Human
gguagacugagcuccuugaggacagagauugacuguuuuuaaaauaucaguauucc

SEQ ID NO: 4155162 - RNA, 76 nt, Human
gguagagaaagauucugucaguuaggaggagacugugauguuacuuuuccugugauaugaugaguacuuuuuuacc

SEQ ID NO: 4155163 - RNA, 71 nt, Human
gguagagagagcuguguuuaguaguuacggcugcuuacgcuggacuggaggacauagcuugaccaccuacc

SEQ ID NO: 4155164 - RNA, 79 nt, Human
gguagagagccaugguggagauggggucuuucuggacagcacacacugagggcuccccacaccccuccauggcuagacc

SEQ ID NO: 4155165 - RNA, 83 nt, Human
gguagagauauuaguuuggagacuacaauuggagugaucauagauuacaaaagcauuauagucccagacaguaugaaacuacc

SEQ ID NO: 4155166 - RNA, 72 nt, Human
gguagagcacauuucucuaccucacacaaucguccuaggguaauugaucagggcugagaugguggcucugcu

SEQ ID NO: 4155167 - RNA, 93 nt, Human
gguagaggaacccaguagggguguuucgagagagguugggggccuggugcgucuauccuuguugaaagggcuccugaguggagguucuuuauc

SEQ ID NO: 4155168 - RNA, 64 nt, Human
gguagauccaggccuugaaguaccagugcagcgugccacuuacuaucuaagaccuggaauugcu

SEQ ID NO: 4155169 - RNA, 57 nt, Human
ggugggagcuguuucacaugcugcagccagcuaagcaucuucaacaggcauuuuacc

SEQ ID NO: 4155170 - RNA, 64 nt, Human
ggugggagguggggcugaggucagagcucgggucugcaugacuucaaaggcucuacuccuaacc

SEQ ID NO: 4155171 - RNA, 59 nt, Human
ggugggaguguggucauggagggcuggcuguuguugcccucugagaccagcucugcacc

SEQ ID NO: 4155172 - RNA, 62 nt, Human
ggugggaugugccaccccuaggaaggucggcaccuuuaccuuggggaacuggacgugcugcc

SEQ ID NO: 4155173 - RNA, 56 nt, Human
ggugggcacccgagacuggaucgaaggggagaccuaccagugcagggugacccacc

SEQ ID NO: 4155174 - RNA, 56 nt, Human
ggugggcagagccaguucaugaaggauuuaccauuucugagcugcugcugcccauc

SEQ ID NO: 4155175 - RNA, 88 nt, Human
ggugggcagagggcaaggagagggcucuguguggguacuggggagacucgguguccaagcucugucuccaggccucaguuuguccauc

SEQ ID NO: 4155176 - RNA, 56 nt, Human
ggugggcaggcuggcgugggugggcuggcgcugcccacucaggccuccugcucucc

SEQ ID NO: 4155177 - RNA, 59 nt, Human
ggugggccaaauuaaacauauauguauuuucauuuaauguaugugcaguuugguuuauc

SEQ ID NO: 4155178 - RNA, 84 nt, Human
ggugggcccagcgguuccuguggauuggagccaggcagugugauguuaccagucaccacuccaggucccaguuccuggcccgcu

SEQ ID NO: 4155179 - RNA, 87 nt, Human
ggugggcucugagagcaaggguuccaacgagaagggcagaucagcaucugccuuuuauggcuagccucagaagucacagagccuccc

SEQ ID NO: 4155180 - RNA, 58 nt, Human
ggugggcugaggggacaccaaggacccgugcuguuuccugugacccuuccagucuacu

SEQ ID NO: 4155181 - RNA, 69 nt, Human
ggugggcuggaagugcauugaugcuucagggcagagaauccucuuggcaauggauguguuccagucccc

SEQ ID NO: 4155182 - RNA, 60 nt, Human
gguggggaagaacuaaauggaagcaggcauuaacucuucuggauuuauucauuccuuguc

SEQ ID NO: 4155183 - RNA, 72 nt, Human
gguuguagauuuagauagaaauguaauaguccaaaaauacacuacacagcuucaaagucuaauucuacaauu

SEQ ID NO: 4155184 - RNA, 81 nt, Human
gguuguagcugucagugcugugccuguauccccucugcucaugccuuuuucgugcagguaggccugacuuccagcagcacc

SEQ ID NO: 4155185 - RNA, 84 nt, Human
gguuguaugaacuugaaaaaucccuugcucucucagacccucaguauggggucuggaaaaauaagggggacauacucaauagcc

SEQ ID NO: 4155186 - RNA, 83 nt, Human
gguugucuacuaguuaacaguggagcucagaugaaaaucaggucugauugucauuucagccccugccugacuucaaaucagcc

SEQ ID NO: 4155187 - RNA, 118 nt, Human
gguugugcucuuuauauaucugcugguugacauggugggccucaucacagugcauuaguucacccgggcucagagagaggcucaccauucugucagcagugcaacaucaugugcuucc

SEQ ID NO: 4155188 - RNA, 93 nt, Human
gguuguuccugagcagcagcugggccagguuccccaggucgucgaacaggccgcggggcagcguggucagguuguuguuggacagguccagcc

SEQ ID NO: 4155189 - RNA, 79 nt, Human
gguuguuccuguuauuugcuugcuaaggaaauagagggaaaaacuaguauuucagugucaguaaugcagcaggaauacu

SEQ ID NO: 4155190 - RNA, 56 nt, Human
gguuguucucuuuucuccuugggcuuuucuguugcucuuagauauggagaauuacc

SEQ ID NO: 4155191 - RNA, 60 nt, Human
gguuguucugcacccauguaugggguuaaugcuggcuccacucaccgaggcagagcaucu

SEQ ID NO: 4155192 - RNA, 71 nt, Human
gguuguuuucugauaaggucaaugcagugcucuguaauuaaacacuacagaagucuuauuagagaaagauc

SEQ ID NO: 4155193 - RNA, 83 nt, Human
gguuuaagacagggaaucauuuacauagaaacaauauaagcauucuagacauuguauacucuuguaggugaguccucuuagcc

SEQ ID NO: 4155194 - RNA, 93 nt, Human
gguuuaaugcuaaugccacuauccuuacuguucugugaguauuuguucagccacgggugauucaagagaguugggguaucagcaugugcagcc

SEQ ID NO: 4155195 - RNA, 117 nt, Human
gguuuaauuauuuuagagaaucuaaagucuuaaugaaagugaaauaucaaccggucauauaauuuucacuagugauguguguuuauuaacauuuuaaguucucugaaguccagaacc

SEQ ID NO: 4155196 - RNA, 85 nt, Human
gguuuacuaggcccuggggagaguuuuacacccagcugccaagaggcacaaaggagcuguggaagacugucagggucauuaaacc

SEQ ID NO: 4155197 - RNA, 63 nt, Human
gguuuacuguuuuuaacuaauugugccuugcuggguggcaauacaauagaaagaguaaagacc

SEQ ID NO: 4155198 - RNA, 73 nt, Human
gguuuagacuucaucucucacugugaauggcggaauuguucuaacuaacuacaguaagaggaaagcagaggcc

SEQ ID NO: 4155199 - RNA, 82 nt, Human
gguuuagagucacaaagaugggguuucuaacacugcaugccucuccugcaacucuaggaaacauccuuaucuauucuaagcc

SEQ ID NO: 4155200 - RNA, 75 nt, Human
gguuuaguuuuaaguuaaugucaucucagggcuaaaguuuguccaauugagauucccauuaauuuuauauaaacc

SEQ ID NO: 4155201 - RNA, 79 nt, Human
gguuuauuuaagcuuuggagaggcgggcaggaaucaagaagcagaaaaauauccugugccagucuucgaaguaaguacc

SEQ ID NO: 4155202 - RNA, 56 nt, Human
gguuucaaugagaagugcuuguccaugaguuaaagggagaggccucaggugaaacc

SEQ ID NO: 4155203 - RNA, 60 nt, Human
gguuucagauauugauuuuuuuggcauugucaauucugucauugaaauuuuucugagauu

SEQ ID NO: 4155204 - RNA, 79 nt, Human
gguuucagcuguuucuguguucucugaggagccugcaaagcuaaccaagcagguaacagaauagcagaaacagaaaacc

SEQ ID NO: 4155205 - RNA, 65 nt, Human
gguuucaggaggccgugugcucaguggagugucucugccugucuucgcuaagcuugccccugacc

SEQ ID NO: 4155206 - RNA, 65 nt, Human
gguuucauaugcuggagggucgucuagccgagagguucaacauggcuuuauucacauaucugacc

SEQ ID NO: 4155207 - RNA, 91 nt, Human
gguuucauggguguauacauacgucaacacuugucagauucuacacuuugaacacagugugaucguaugucaauuaccccucagugaagcu

SEQ ID NO: 4155208 - RNA, 70 nt, Human
gguuuccagggaccucccugagagcucccaggugacuggcuucaaggcucaaggcaggacccuggguccc

SEQ ID NO: 4155209 - RNA, 97 nt, Human
gguuuccugaguauuuucacauguuacaguccuuuguauuguuuaauccucacuuuaacucucagagacagggacugucauaauugccaaggaagcc

SEQ ID NO: 4155210 - RNA, 77 nt, Human
gguuuccuggucagcugaggcaaccagaggagcacaaacuuccccuucacuccaugccaggcuggcaaaaggaaacc

SEQ ID NO: 4155211 - RNA, 63 nt, Human
gguuucuaagcuguuggagauccuuaccacacaggaucuccaguauccuaguauugugaaauc

SEQ ID NO: 4155212 - RNA, 87 nt, Human
gguuucugcccucauguuguguuuauuuagccugaacugaggcacacguugcauuuucuaaguaaacacagcauacagcagcacucc

SEQ ID NO: 4155213 - RNA, 77 nt, Human
gguuucuuaauauuuuccaagauaauacacagaaacaauguuucaguagggucuuaggugaguaacucuaagcgacu

SEQ ID NO: 4155214 - RNA, 111 nt, Human
gguuucuuuaccugugggucuaaguguuccagugcuguuugaggaccugguguggggcuccuucccagcccaucucaaaggucuagagcgggacuuccaggugaagucacu

SEQ ID NO: 4155215 - RNA, 78 nt, Human
gguuugaaaugaacuuuaauuagcuuuugucuccagaauuccccaucgaugccugggcuuuaggguucuccucacccc

SEQ ID NO: 4155216 - RNA, 73 nt, Human
gguuugagcccaggaguuugaggcuguggugagcuaugauugcaccacugcacuccagccugggcaacagagc

SEQ ID NO: 4155217 - RNA, 55 nt, Human
gguuugauaaaaagggaaaggguuaucagguggccacauccuuuccuugucauuc

SEQ ID NO: 4155218 - RNA, 91 nt, Human
gguuugccacuuacagaguuacuuggagccagcugaaguuagagcuggcuucuccccuuugagucuucaauucuguguuuaugugcaggcc

SEQ ID NO: 4155219 - RNA, 84 nt, Human
gguuugccuguuuaaucagcaauaugauaggcuuugugacuguuuucuuguuauauagguuaucauauuugcccugagugaacc

SEQ ID NO: 4155220 - RNA, 57 nt, Human
gguuugcugaaacacagauugcugggccaacccuugaaaauucuguuucagcagauc

SEQ ID NO: 4155221 - RNA, 57 nt, Human
gguuugcuuagcuagcaguguagccuguucuccagaagcacuguuacaaagcacacc

SEQ ID NO: 4155222 - RNA, 86 nt, Human
gguuuggagggcugcguucauuuugagugcuguuguaaucaauuuuagauacagcauuccacaauggaucaguuugcauccaaacc

SEQ ID NO: 4155223 - RNA, 65 nt, Human
gguuuggauuugauaaguaaaauggcagcgugaaaauguuagccucaugcuuaauaggcuaggcu

SEQ ID NO: 4155224 - RNA, 65 nt, Human
gguuugucaugauauaauuucugugaauauuuauuuuuaaaauaaagagauugugucuacaaauc

SEQ ID NO: 4155225 - RNA, 76 nt, Human
gguuugucuggaguggcagucaucugaaggcuuaauugggcuggaguguucaagaugacccagucacacgauugcc

SEQ ID NO: 4155226 - RNA, 58 nt, Human
gguuugugcaagagggccaccuuaggucuccuugaggacauuuaucuuggcgcagauc

SEQ ID NO: 4155227 - RNA, 92 nt, Human
gguuugugcuagcugacuguugcuguugaugaggcacucaauggcugcagccuucuagaucuucagaaauaacaacaauuacuguacacgcc

SEQ ID NO: 4155228 - RNA, 68 nt, Human
gguuuguggcuaugguuaugucuauaagugcaggggaagccuugcagaaguauuccaggccccaaacc

SEQ ID NO: 4155229 - RNA, 93 nt, Human
gguuuguuaaggguuagaaucacagugccuucguaaauuuuucuuagauggaggugaagguaugaguagauuuauucugaagguagacaaacc

SEQ ID NO: 4155230 - RNA, 58 nt, Human
gguuuuaacuacagaauugcaaguccacaaaaccuggaguugcagcaaaguuaggacc

SEQ ID NO: 4155231 - RNA, 68 nt, Human
gguuuuaagaagagcagcagccauugaaaccagcacgaaggcugggcugacugugaaauucuggagcu

SEQ ID NO: 4155232 - RNA, 59 nt, Human
gguuuuaccagucuguuguugcagagugcuggguguauuuugcuuuagcugacuguucc

SEQ ID NO: 4155233 - RNA, 85 nt, Human
gguuuuauauugagaaauguuuuuuaagcugaaaauaagguacaacuuuagcaacauaagaaacauuuuguucauggacaaggcc

SEQ ID NO: 4155234 - RNA, 94 nt, Human
gguuuucaagaaggauguucuauacuagauuauuugcauagccagcagggcagugugauuaucuggaguagaaaaaucgcuuccugaaguggcc

SEQ ID NO: 4155235 - RNA, 61 nt, Human
gguuuucaggccagaagauagaccuagagacagaauuugggucuggaacgaggucuaagcc

SEQ ID NO: 4155236 - RNA, 68 nt, Human
gguuuucagucuuguuuuucugguccagcuaugaaauuguacuaaucacagaaacagacuguuuggcc

SEQ ID NO: 4155237 - RNA, 65 nt, Human
gguuuuccagauuaagauaccacuucaaaagugacuguucaaggugggcuuaacuuuggaaggcu

SEQ ID NO: 4155238 - RNA, 90 nt, Human
gguuuucccaugaagcagggugucuugacccauggccguguccaccugcuacugaguaaggggcauuccuguuacagaccaaggagaacu

SEQ ID NO: 4155239 - RNA, 69 nt, Human
gguuuucucccccucuucucaggccacuacccagaugcaaaaaauggccugggcagaaguuaggaagcc

SEQ ID NO: 4155240 - RNA, 129 nt, Human
gguuuugacagagucccaagugcaccugcaaagcagacaggcugccacagugcugggcggagaaaggucacccugcccuugccuguucagcauggcucugcagaaagggccuaaugacuaauuaaaacc

SEQ ID NO: 4155241 - RNA, 89 nt, Human
gguuuugaugugccuuauguuaugaauggaugaucugagcuauuugcaaagauuugcauaaucauuacauacauuauauacaaucaacc

SEQ ID NO: 4155242 - RNA, 76 nt, Human
gguuuuggcuccuccaauauggacuccucuaaacacagggagcuuagaggauguccacauggacggugcucauucc

SEQ ID NO: 4155243 - RNA, 57 nt, Human
gguuuuuccuuaaaucuguuucuagugauaacauuagcucacagguuaaaggacauc

SEQ ID NO: 4155244 - RNA, 81 nt, Human
gguuuuuguuuaaugauguuuauguuuggggauuuuuaugucucuuaguaauccaaaguaacauuaaacagaacaaaugcu

SEQ ID NO: 4155245 - RNA, 77 nt, Human
gguuuuuuguccuugugauaguuugcugagaaugaugguuuccagcuucauccaugucacuacaaaggacaugaacu

SEQ ID NO: 4155246 - RNA, 123 nt, Human
guaaaaacgguuucgaaugcuaaagccagcagagaaauuacauauuugagcucugacccuuuguaacagaauccagaucugugguaucucuauuuugggagguuuuagcauaagccaucuuac

SEQ ID NO: 4155247 - RNA, 106 nt, Human
guaaaaacuaucuauauaguuucugaccacagacaaccugcuacaaaccuuagaaaugaguuggcagguuggccuuugguucacaaacucgaugauucaauuuuau

SEQ ID NO: 4155248 - RNA, 92 nt, Human
guaaaagcacuuuaugaagugagugaaaaugcagaauacaaaauugugccuauacuguguuuucaccacuguuuagauucuaugcacauugc

SEQ ID NO: 4155249 - RNA, 78 nt, Human
ggggcucaaugaaugcuuauuaaauugaaaugaauuauaaauuaugaaggcuuuuuaaagcauuuguuggagccaacc

SEQ ID NO: 4155250 - RNA, 88 nt, Human
ggggcucagaagacaguggcuccuccccccaggcucagccucccaguggcugaguggcuacaggcagcuuacaucuccucugagccuc

SEQ ID NO: 4155251 - RNA, 92 nt, Human
ggggcucuaugggugcaaggcaggguacuuaauauuuacgggguguggggaagccugaaccuuucagugcccuuucugucccccagugcccu

SEQ ID NO: 4155252 - RNA, 83 nt, Human
ggggcugagcaaaaggaggaggagccaggagacauugggaauggacccaggaguuccggacgcccgucuuccagcgcagccuc

SEQ ID NO: 4155253 - RNA, 59 nt, Human
ggggcugagggcagaugggguagcugggcagccuuccaccccucagcucuucgugcccc

SEQ ID NO: 4155254 - RNA, 55 nt, Human
ggggcugcaaagggcagcugugacuccagggcagagcuggccugguuugagcucc

SEQ ID NO: 4155255 - RNA, 61 nt, Human
guacagcugugaaaauccacaggauggucaucacuuaucauuccacuguggaacagcuuac

SEQ ID NO: 4155256 - RNA, 68 nt, Human
guacagcuuaaguggguggcagcaugugcgagccauuucuauacaucugauuuaccuacugaaugugc

SEQ ID NO: 4155257 - RNA, 70 nt, Human
guacaggccagucacuuacaaaaauauaauaugacucacaaauugaugcccguugugacuggccuauagc

SEQ ID NO: 4155258 - RNA, 60 nt, Human
guacaggucugcgucuccucuggccugugagcuucugagguauuuuugcaugccugaugc

SEQ ID NO: 4155259 - RNA, 73 nt, Human
guacaguaucuuagggaauuaacuaaaaauuaacuaaaauuaacauuuucuguuaggacccuggagaauguau

SEQ ID NO: 4155260 - RNA, 78 nt, Human
guacauugcacaacuacaggaaaagucauucauaaagucuuugaugugaauaguguucccuggaguuguacaguguac

SEQ ID NO: 4155261 - RNA, 83 nt, Human
guacauugucuuugaaaugucagcaggaguaacauuuuuugaagucauggaauuuauguuugcauuuucaaagauggcagugc

SEQ ID NO: 4155262 - RNA, 78 nt, Human
guacauuucucuuguucuuauuauguaagucugucuuuaaggaauggugggcaaucuuaagagcaaaagaaguuguau

SEQ ID NO: 4155263 - RNA, 95 nt, Human
guaccaagguuacgugaguccagcucauugucugggaugcacugagagcuuuauucuagagaagaccuggaucuucacagugaaaucugcagugc

SEQ ID NO: 4155264 - RNA, 67 nt, Human
guaccagucucugugggcaccugggagaauccucacaccuuccuuucagcccagggggauagguugc

SEQ ID NO: 4155265 - RNA, 123 nt, Human
guaccauuaguaaaauugaaauguguguguguguguguguguguguguguguguguaauacauguauaauauacauacguacauacguauguguaugcauauauauaguuuguaaaaugaaac

SEQ ID NO: 4155266 - RNA, 66 nt, Human
guacccagcuccucagaagaccagauaugaaguccccucccaaccugguuacucuguucugggaac

SEQ ID NO: 4155267 - RNA, 59 nt, Human
guacccugaggccucagguucauuggcuuuuugucagauugccauaggucucaguuugc

SEQ ID NO: 4155268 - RNA, 73 nt, Human
guacccugguaaacaauaccagccuugaucugagaggaaggggaggcaggguguugauuacagagaugggugc

SEQ ID NO: 4155269 - RNA, 116 nt, Human
guacccuguguguugcggggaggcaguggagaagcaccuggcuggaaguuagagaacuugccaucggcaagaacagauucagccugaacuccagccaucuggccacacaccgguac

SEQ ID NO: 4155270 - RNA, 66 nt, Human
guaccugcaccaggcccagcauggugcccccagcauuuagcacacggccugguacauaguaguuac

SEQ ID NO: 4155271 - RNA, 87 nt, Human
guaccuguccuacuagauagugaguauucugguuaauuaaauguccacguuaauaccacugugcucauuauaacuguagauaaggac

SEQ ID NO: 4155272 - RNA, 70 nt, Human
guaccuuagcaaggcagaauucagacucaggcuuuucugaucacaaagcacuuucugcuuccuaaugugc

SEQ ID NO: 4155273 - RNA, 64 nt, Human
guaccuuccuggacuccguccuagauuaaugacucaaaucucuggaguauaaccagggaucugc

SEQ ID NO: 4155274 - RNA, 64 nt, Human
guacgguggaaaugcccccaaauaguguaugaauacauuuuggggaguuuccaugacaacguau

SEQ ID NO: 4155275 - RNA, 75 nt, Human
guacucaauuugucuucuuuuauuucaagggugugauuacuuuagagucccuugguaaaagggguuaucgaguac

SEQ ID NO: 4155276 - RNA, 90 nt, Human
guacucagguaauuguaaugcaauguuugauaugcuauauaauagugauauagcacugagucuagcuuuggaugugcagaacugagcuac

SEQ ID NO: 4155277 - RNA, 60 nt, Human
guacugaauggggcaguaagaaaggauuaagcaucacuuucuagacugcuuuauuuuuac

SEQ ID NO: 4155278 - RNA, 61 nt, Human
guacugagaucauuaugugaaaggaugggacacuuuacccauaaagucaugaucugaguau

SEQ ID NO: 4155279 - RNA, 98 nt, Human
guacugauuuucugccuuagaagugagugugugaauguuucccuggcguuagcuucugagcaugcacaugacuggcuuaauuagaggagaagaagugc

SEQ ID NO: 4155280 - RNA, 81 nt, Human
guacugguguugaaaccuuuuuauugaaggcuggaugcuucuaaaaugguaccugcauacaaagguuuacaacugauguac

SEQ ID NO: 4155281 - RNA, 80 nt, Human
guacuugauuacaaaacucaucuaugacgaauguaaaagaauauccaccuguuguacugaagaguuuugcaaccaaguau

SEQ ID NO: 4155282 - RNA, 70 nt, Human
guacuuggggucguauaucugugggcccaggccgaaggccuggcugcucugaugagcgcccugacuguau

SEQ ID NO: 4155283 - RNA, 113 nt, Human
guacuuuaugcugcaucuucagaagcaccuuuuuauauguauugacuuugauguuuaauuauuaccaagcaaucauaauacaaugaaauuguguugaugcuuucuuaaauugc

SEQ ID NO: 4155284 - RNA, 78 nt, Human
guagaaagugacaauaacuucuuugguuuaaagagaacuuucauucucacagugagccugaggucggucauuuucugc

SEQ ID NO: 4155285 - RNA, 68 nt, Human
guagaaauggaaucucacuauguuacccagguugguuuugaacuccugggcucaagugauccuccuac

SEQ ID NO: 4155286 - RNA, 71 nt, Human
guagaacaugauguugcauuguacugaaaagcccucuggcuucacauagcaaugugagccuucaauuucac

SEQ ID NO: 4155287 - RNA, 57 nt, Human
guagaacugggguggcaaguugagaugacccuaaggucucuguggccuacccucuac

SEQ ID NO: 4155288 - RNA, 81 nt, Human
guagaagagaucauuguaaugauacugauguagucaaccuuucauuguucaucaacauggcaaugcccaucugcauucuau

SEQ ID NO: 4155289 - RNA, 79 nt, Human
guagaagagcaucaaaauuagacauuguugagaaauucacugcuguuucugaauuaucuuguaauuuugaaccuucugc

SEQ ID NO: 4155290 - RNA, 78 nt, Human
guagaagcauaaacuguacuuuaaaaagguauuugaaaauaauguaucaaaaggcuuuaaaauguacauaugcuucac

SEQ ID NO: 4155291 - RNA, 59 nt, Human
guagaauauugaguggcagccugacucccuggacuucagagcugcucagaugucacugc

SEQ ID NO: 4155292 - RNA, 80 nt, Human
guagaauuuggagggcugaguggugcagucaaaugaauuauuuaaucucccacucucagccuaauccucuuguuuucuau

SEQ ID NO: 4155293 - RNA, 76 nt, Human
guagaauuuucuccuuuggcauagaauuauacauuuuaagauaauuaggaaaaugaacagaggaauagaauucugc

SEQ ID NO: 4155294 - RNA, 65 nt, Human
guagacaagcacaggacucagaucacucuuguuuuaccaaccaacugaauucuggguuuaucugc

SEQ ID NO: 4155295 - RNA, 58 nt, Human
guagacaauuucaaaguaauauuaucugcagauuauaucuagcuuuggaguucucugc

SEQ ID NO: 4155296 - RNA, 103 nt, Human
guagacugcagggucaaaaacaaauuagaucaguggauuuucuuccuuuacuuucauagaugagucagaaguuauuggucaaaugugcacaugaccuuucuac

SEQ ID NO: 4155297 - RNA, 87 nt, Human
guagacugggcuccgggaaauguggguaaugggacuggaccugcgccugggguccgcccacccgucaucucccgggagccccccgac

SEQ ID NO: 4155298 - RNA, 72 nt, Human
guagacuucugcugaccagugccgucuuagaaaguuucuuuguaacuuucuaguccuaggagaggagucaac

SEQ ID NO: 4155299 - RNA, 75 nt, Human
guagagaagagguggccaacucaauguuuuucaugagucuugucaugaaggaucaguggcuucuuuuuuaucuac

SEQ ID NO: 4155300 - RNA, 112 nt, Human
guagagacggcuuuucaucguguuagccaggauggucucgaucggcaggaggaucucuugaggccagaauuuugagacuacuugggcaacauagcaagaaucccgucucuau

SEQ ID NO: 4155301 - RNA, 69 nt, Human
ggggggucuagagguggccaagcgaggaaggggcaagcaguuccccaagcaggcaaucucccgcuccuc

SEQ ID NO: 4155302 - RNA, 62 nt, Human
ggggguacaaguauagauuucuuacaugcauauauugaggucugggcucuuaguguacccuc

SEQ ID NO: 4155303 - RNA, 105 nt, Human
ggggguagaaggagggguuggggaggguugugugugugugcauguguauguguguguguaucugacagcuaagcucccacaaccuguagcaugcucauuaccucc

SEQ ID NO: 4155304 - RNA, 106 nt, Human
ggggguagacaggagaccuggucaauuucgagcagcacuguguuuuucugaccuggaaaagagaaggaaacagcugugcuuugagccugaauccuuguuuaaaccc

SEQ ID NO: 4155305 - RNA, 66 nt, Human
ggggguagauaucuuugggguuccuuuuauaagggcacuaacucgccucaugagggaucugcccuc

SEQ ID NO: 4155306 - RNA, 55 nt, Human
ggggguaggcagacaaggacaugauuaaaauagugucacgucuucacauacuccc

SEQ ID NO: 4155307 - RNA, 81 nt, Human
gggggucaagacccaggagugcagagagugggagagaggaucuccuccgcccauccugggcuccugucgggccuaaccucc

SEQ ID NO: 4155308 - RNA, 79 nt, Human
gggggucacgugcaggauuuauagcccagcuuuucuaaagguaggcacuguauaaaucuagcaaguaaauauuaccucc

SEQ ID NO: 4155309 - RNA, 78 nt, Human
gggggucuguagccuugcuuuuucaguagcacuuguccaucacugucaaaggcuuugagaaggcagauacugaaaucc

SEQ ID NO: 4155310 - RNA, 69 nt, Human
gggggugacacagagcagucaggcuaggacacugcuuuccaugagcauccaggggacugcugggcccuc

SEQ ID NO: 4155311 - RNA, 60 nt, Human
ggggguggcaccacgugucuucaagaugaaaugccucuuggggacaaacaugcuacuuuc

SEQ ID NO: 4155312 - RNA, 82 nt, Human
ggggguggcugugcugugcauuguaggagguuuagcaggaucccuggcuucuacccacgagaugcaaauagcauccuccccc

SEQ ID NO: 4155313 - RNA, 93 nt, Human
ggggguggggggaggagugcaaaauucagaagcaauuaauucauuucuuucggagcuaauuuaugaaucuuuacucugaacucuccaaguccc

SEQ ID NO: 4155314 - RNA, 62 nt, Human
gggggugguggcugcuuccucaagaggaggguggaucugcucuccugccagcacacaccccc

SEQ ID NO: 4155315 - RNA, 75 nt, Human
ggggguugccuuggagacaaagcuuccuguggguaauccaagauuaucuagcucuuuguccuacaugugacccuu

SEQ ID NO: 4155316 - RNA, 60 nt, Human
ggggguugggcggagggcuggggccagagccuuccccagcccugcugagacccagcuccc

SEQ ID NO: 4155317 - RNA, 73 nt, Human
gggguaacaaugaauacuaagcaccaggcccuuaucagucucuggcacccugacuuaguguuuggauuacucc

SEQ ID NO: 4155318 - RNA, 72 nt, Human
gggguaacggccaggacagugcagguccauccucugcagauggaagacaggcacguccuuugccgcuguccc

SEQ ID NO: 4155319 - RNA, 103 nt, Human
gggguaccagaaaauugcauggaucuuuaaggcuuacccuggaggcccucugaggccuccugacugggguuucuugagggugcaugugugucauccaggcccc

SEQ ID NO: 4155320 - RNA, 58 nt, Human
ggggucacacuguggugacuggaucugccauucacuuagucaccuguugugugaugcc

SEQ ID NO: 4155321 - RNA, 129 nt, Human
ggggucaggcccuuugcuggcaucagaagaugacuuaauuacuguccaauaugcacaccugcugcauaucaagacagagauuauugcucuuuggugaucuuugccaguaaaucuuugccuugaugauuu

SEQ ID NO: 4155322 - RNA, 91 nt, Human
ggggucaugaggagguucugggggucugccuggcccaggagccugguacccgcuggcuuggccuuucacccagagcccccuucauggucuc

SEQ ID NO: 4155323 - RNA, 79 nt, Human
ggggucauuaucauugagggucucucugcugccugguccuguuaucagugugcauuugcagaagacccucuccagcccc

SEQ ID NO: 4155324 - RNA, 56 nt, Human
ggggucugggcuuagcuggaaucuccaucauuguuccuguggcucagugcagcccc

SEQ ID NO: 4155325 - RNA, 60 nt, Human
ggggucuuccuuuuguuaucugacuuugcugacuagaacaguuaaugaagaggaagccuc

SEQ ID NO: 4155326 - RNA, 67 nt, Human
ggggucuuggguagcauauagagcuggguucaaauccugucucugcccucauugcugccuggaccuc

SEQ ID NO: 4155327 - RNA, 66 nt, Human
ggggugaacagggccaggcgagcucuaccaccccuccaccccuccacccugggccuccaucacccc

SEQ ID NO: 4155328 - RNA, 78 nt, Human
gguuggacaggagccagaggcggauggagcgcggcagaggcgcccccacugucucccgugccacuggcuccugcagcu

SEQ ID NO: 4155329 - RNA, 102 nt, Human
gguuggaguggaccuccucccugagccgugcugggaaguugcgugcaccuggggcagcagggcaagugauccuggagcaccguggagaagaacuaccuggcu

SEQ ID NO: 4155330 - RNA, 103 nt, Human
gguugggauauaacggcugggucaaggaaugcuggugggcagaggagacuucuucaccaccacuauguauaucuuuauggcccuguggcuauuugccucaacc

SEQ ID NO: 4155331 - RNA, 72 nt, Human
gguugggcauagaagagcagaaagauaugacagaaccaacuccugguagcuuuugcuuaucugagugcagcc

SEQ ID NO: 4155332 - RNA, 62 nt, Human
gguugggcugggagcugcccugacauggaagaaccauaucuuaggggagaaccagccuuacu

SEQ ID NO: 4155333 - RNA, 64 nt, Human
gguugggcuugaggugaagguagggagcagcugagugcucccggucauaugcaggucacacacc

SEQ ID NO: 4155334 - RNA, 73 nt, Human
gguugggggugcccuaugaggaagcccuggguaagucuugucaaccugagcuucuugggauacccccauggcc

SEQ ID NO: 4155335 - RNA, 62 nt, Human
gguugggguagggagagcugaagggagauucaaagguucuucagcucucacagaucucaacc

SEQ ID NO: 4155336 - RNA, 129 nt, Human
gguuggguaucuuuugccuaucggagagacgugaauuguuguggccagaggacacauuguagaaaauugucuguaaagacggccaccaacaugcauguugccucucccaucaagagguagaaccuaucu

SEQ ID NO: 4155337 - RNA, 74 nt, Human
gguuggugcaaaaguaauugcgguuuucgccauuuagaauaauagcaaaaaccgcaaauauuuuugcaccaacc

SEQ ID NO: 4155338 - RNA, 61 nt, Human
gguugguuguucuuguuuugccuccuacauccuaaacuuggagcugaacaagucagcaacc

SEQ ID NO: 4155339 - RNA, 69 nt, Human
gguuguaagagugaggggauucaggcaaggugccauuagcaaccauuacccucucucauuguacacucc

SEQ ID NO: 4155340 - RNA, 67 nt, Human
gguugucauggugacugccgcucaaacucuccauuggacagagcagcagauugucuccauggugauc

SEQ ID NO: 4155341 - RNA, 69 nt, Human
gguuguccagcuuguggucucgcagaucuuugaucugacaugugggagaaggaagcaagcuggaacacc

SEQ ID NO: 4155342 - RNA, 57 nt, Human
gguugugaggccacguaggacugaagaaauuguuucuuccugugugucucaucaacc

SEQ ID NO: 4155343 - RNA, 55 nt, Human
gguugugguuccauuuguauucagucaauauggaggcaaauggaucccacaagcc

SEQ ID NO: 4155344 - RNA, 70 nt, Human
gguuguuaaaagcagagacucuggagcuagacuaccugaaucuaaaucucagccuuucugcuuaucagcc

SEQ ID NO: 4155345 - RNA, 73 nt, Human
gguuuaaacuaggucugugcugaguaaacugugauacaugguuacaauacauacagagaugcuaguuaauauc

SEQ ID NO: 4155346 - RNA, 80 nt, Human
gguuuaaauauacaaguaauuaguaagcagagccuuuccagagccgaaggguuucugaagggauuacuugguuuugaacc

SEQ ID NO: 4155347 - RNA, 68 nt, Human
gguuuaacugucuccuuuagaaagcuucagaaaacaacugucuaguuucuagcaaggauuguugaauc

SEQ ID NO: 4155348 - RNA, 66 nt, Human
gguuuaauaauugugguguugguuuuuuugcauagcuuucuauguaccaaacccaucauaacuacc

SEQ ID NO: 4155349 - RNA, 97 nt, Human
gguuuaauggcaagugguugugaaggacugaaugaaaaugucuaccuucugggaaaugacuuuggauugggucccucccaccccuucuauucaaauc

SEQ ID NO: 4155350 - RNA, 114 nt, Human
gguuuacaaaucuguaggguauuccuucaugcacccaagguauuaaacuuguuagcuucauggauaugacagugccuggggguaauguaggauuaacucuaccugauuugaacc

SEQ ID NO: 4155351 - RNA, 68 nt, Human
gguuuacuggguuuuacuuuguuuuaacucucccuggguaauuuuaaaguguagccagguuaagaacc

SEQ ID NO: 4155352 - RNA, 63 nt, Human
gguuuauaaacagguuacaagacauuugcugaaguaacuagcucaugucaucuguuuaaaacc

SEQ ID NO: 4155353 - RNA, 74 nt, Human
gguuuauagaggucuuuaugcugcaagaauaggcuaacaaccuguuuaagcugaugagguaucgcuacaaaacu

SEQ ID NO: 4155354 - RNA, 66 nt, Human
gguuuauaugucuugcauuuuucaaacuucugucugaauguuugaacugucaacgacauuaggacc

SEQ ID NO: 4155355 - RNA, 59 nt, Human
gguuuauugaaggccaccccacaaccaucacacaacgugggagccucugucgaugaacu

SEQ ID NO: 4155356 - RNA, 57 nt, Human
gguuucaaacacucugagaaugggaucagauauuucacuccagcagugcuugaaauc

SEQ ID NO: 4155357 - RNA, 63 nt, Human
gguuucaaacaucugacuugcuuuuucagggucuagaucuugaagauucagugcuugaauucc

SEQ ID NO: 4155358 - RNA, 62 nt, Human
gguuucaaaucuuuugaguuauuuuaaaucauguaauacauggagcugcaaaagguggaacu

SEQ ID NO: 4155359 - RNA, 90 nt, Human
gguuucacauuugacauugacaguccauuaacuguguuaacagcaguaauugcuuuagagcaguuuaauggaagauguuuauguguggcu

SEQ ID NO: 4155360 - RNA, 64 nt, Human
gguuucagcccugcuguuccuggguggaucccucuuacuuuuccaggugcggugggugggagcc

SEQ ID NO: 4155361 - RNA, 73 nt, Human
gguuuccacauccauggaaugggugacucuagagagccucugaucugacuccauauuccauggguugugagcc

SEQ ID NO: 4155362 - RNA, 118 nt, Human
gguuuccagaugacccucagguucuuccgcguugguuagagagggcuacgcaucuucuacugcucagccacagucuguagccagcuuagagcuuagaagacauugcagucuggaugcc

SEQ ID NO: 4155363 - RNA, 58 nt, Human
gguuuccauauuuuuagugccaaugcgaacauuaauguuuuggucuacuauggaaucc

SEQ ID NO: 4155364 - RNA, 66 nt, Human
gguuucccuaguuauuugaaauggauuggaauccacuuuugaaagcauuucaaagagcuggaaauc

SEQ ID NO: 4155365 - RNA, 69 nt, Human
gguuuccugugggcucucggccuccaggcuccucauagccugggagggaauuugacccagcagugagcc

SEQ ID NO: 4155366 - RNA, 106 nt, Human
gguuucgcucccucgcugagucccuucuccccgccaacaaaaggugaugauuccuagcggacugggcacgccuggacggcggaggguggcugggaggggcgagguc

SEQ ID NO: 4155367 - RNA, 72 nt, Human
gguuucugcaugcaaguuaugacagguaggacugaaaaaacacugccuuuugacuucuagcauuuagcaacc

SEQ ID NO: 4155368 - RNA, 83 nt, Human
gguuucugcugcuuccauuuccagcuuucuaggccuguuguugacucuggacauacaugaggaggcuggaaacaguggagacu

SEQ ID NO: 4155369 - RNA, 59 nt, Human
gguuucugugguucugagaugauugcuaaugagaauaagccagauacaccacugaaacc

SEQ ID NO: 4155370 - RNA, 78 nt, Human
gguuugacagcucagaacaugaaaagucuguugccauaaguacugaaacaauuggggcaacauucauguucuguaacc

SEQ ID NO: 4155371 - RNA, 86 nt, Human
gguuugacauggccagaggccuuguugcguccguucggcuuuggcgccacucgauguaaauggucuuuggcagaagguguggaauc

SEQ ID NO: 4155372 - RNA, 87 nt, Human
gguuugccuuguguauuaguaagaauuauguaagaugauauuuacaagugcucuguauguaguucuugcuuugugaguguucaaacc

SEQ ID NO: 4155373 - RNA, 68 nt, Human
gguuugcuaaaaccugggccaucucucugcaaguguccuuauguuaguucagaggcccagagcaggcc

SEQ ID NO: 4155374 - RNA, 73 nt, Human
gguuuggaugagagggugugguacauugguugcaaacaggacccugauccuucacucccucugcauccacucc

SEQ ID NO: 4155375 - RNA, 78 nt, Human
gguuuggcaugccuuauuccaacaaucuagcacucucaagagaauguauuuuguauuagggaugaaaaaugugaagcc

SEQ ID NO: 4155376 - RNA, 80 nt, Human
gguuugggaggagugguaggcaguguuaggaaacuuuuaguauggguuucaagcucgaugcuaucaugggucccaagacu

SEQ ID NO: 4155377 - RNA, 89 nt, Human
gguuugguuauguucuuccaucuuaaaaugugucauaacucucagaaagggugaggagcucaacuaggacagaagagggugaucagauu

SEQ ID NO: 4155378 - RNA, 82 nt, Human
gguuuguaagaugagucguaugcuagggagacaggcagcugaauguauacugucugugugagcaaaugacuucuuuugaacc

SEQ ID NO: 4155379 - RNA, 63 nt, Human
gguuugugaauguguuuuugcuuugucuuauuugguacugagacagcagcauguuuacaggcc

SEQ ID NO: 4155380 - RNA, 78 nt, Human
gguuuguuuuauccaggaccucaguuauuaugaggauucauaucuucucacacagggcuccuugggcugacacaaauu

SEQ ID NO: 4155381 - RNA, 55 nt, Human
gguuuuauagcaguacuaucaggagaguaacuggcaacaguacugcuauaaaacu

SEQ ID NO: 4155382 - RNA, 88 nt, Human
gguuuuauuagacaugacacaugaagaccuaauuggauuucauucuucauguugauuuaauaauuucaugugcaaguuuaugaugacc

SEQ ID NO: 4155383 - RNA, 76 nt, Human
gguuuuauuugugguacgugagaacugggaaauauggaacucuauuuaacagaugcuaugucuaccuauacaaacu

SEQ ID NO: 4155384 - RNA, 69 nt, Human
gguuuucugauuagcaaaucugagggcagggagauauugugaucaggacuguuugauucuggggaagcc

SEQ ID NO: 4155385 - RNA, 81 nt, Human
gguuuucuuagcauagcuguuugaaguauuuuucuauuucauagcuagaaguggaguacucaagacagcacugggaaaagu

SEQ ID NO: 4155386 - RNA, 105 nt, Human
gguuuugaucuguuuucuccauauuuauagaucuggcauuuauuguaaaauacuggggaaaaagaaugcaaauauauggaucagugggaaaaucugauuaaaacc

SEQ ID NO: 4155387 - RNA, 93 nt, Human
gguuuugcuguguagucugaaaggauuuuucuggaugucacuucacugucucaguuucuuguucaguaaaauuacagaucuacauuuaaaauc

SEQ ID NO: 4155388 - RNA, 72 nt, Human
guauuauuuuguauuuguguaccuacaugccuuuagaaaugaauguuccuaggacagaaugcagaaaaauac

SEQ ID NO: 4155389 - RNA, 74 nt, Human
guauucacuuugcugugauaauucaaugagcuguacaagaagguauacuuuuaugcguguuucaguaugaaugc

SEQ ID NO: 4155390 - RNA, 77 nt, Human
guauucagaaggccuagcuacuuacucuuccuugaucuuccgacugaugauauuuggggugaagguuuucugaaagc

SEQ ID NO: 4155391 - RNA, 66 nt, Human
guauucaggagacugugaauugacugucagaaccccaaagggacucucagcgcaguuucccaaugc

SEQ ID NO: 4155392 - RNA, 102 nt, Human
guauucauuuugaagcuagagucagagaaucauuacagccacaccacuugugaauuaguguauuugaaaugcucuuuggaaucuaguuauauaaaaugaugc

SEQ ID NO: 4155393 - RNA, 59 nt, Human
guauucccacaaucugcguguguaucagaaucaagauacuguacugauugugaggaugc

SEQ ID NO: 4155394 - RNA, 76 nt, Human
guauucccaggauaucaaagcuaguggaaauuuccauauggaaaaccuucuagacuuuauauuuuuggaacaaugc

SEQ ID NO: 4155395 - RNA, 78 nt, Human
guauuccuguaacuaguauuuaaaggcuaugauuuuaaccacaguagugaagucaccuuguuuaugcccagggauuac

SEQ ID NO: 4155396 - RNA, 64 nt, Human
guauuccuucagaagacguuuacuaagcgcuugcuguauugggguugcucuucucgaggaguau

SEQ ID NO: 4155397 - RNA, 72 nt, Human
guauucucaggccuucagaccuggcccggaaucuaugucuuuggcucuccagcucuaaggccuuaacuauac

SEQ ID NO: 4155398 - RNA, 58 nt, Human
guauucuguugcagccaagucgcacagaaauagacagggccuggcugcugugggaugc

SEQ ID NO: 4155399 - RNA, 55 nt, Human
guauucuugguuaucaaaauacucguauagcuuugggauuuugaacugggaauau

SEQ ID NO: 4155400 - RNA, 60 nt, Human
guauugagcugugauuaacucugagacuuuagggucucagaguuuacggggcugaagugc

SEQ ID NO: 4155401 - RNA, 76 nt, Human
guauugauucugaaucuaauuuugguuuccagcguauugaggauaacuaaaucuggcauuuagagcacuccaauac

SEQ ID NO: 4155402 - RNA, 59 nt, Human
gucacauugggauuuauuggccucacagcaacaauggcacugagaccagagucccugac

SEQ ID NO: 4155403 - RNA, 63 nt, Human
gucacccacucccugcugcuguuguuucugcuuauccccacagcuuacagggaggggagugac

SEQ ID NO: 4155404 - RNA, 65 nt, Human
gucacccaggcuggagugcaguggcacgaucuuggcucacugcaagcuccaccucccggguucac

SEQ ID NO: 4155405 - RNA, 65 nt, Human
gucacccaggcuggagugcaguggcgcgaucucggcucacugcaagcuccgccucccggguucac

SEQ ID NO: 4155406 - RNA, 62 nt, Human
gucacccaggcuggagugcgguggcacuaucuuggcucugcagucuccaccuccugggugau

SEQ ID NO: 4155407 - RNA, 71 nt, Human
gucacccuggcuggaggugcaguggcgugaucucagcucacugcagucuugaccucccaggcccaggugac

SEQ ID NO: 4155408 - RNA, 70 nt, Human
gucaccuaauucacaugcaugucugugcacacacacaugcgugcacacacacaaacguugagguggguac

SEQ ID NO: 4155409 - RNA, 93 nt, Human
gucaccuagaagcucugacaacacaggcuuccaguccccagcucagauccucuauaucagcaugggcucuggaaucuguguauggcuggugac

SEQ ID NO: 4155410 - RNA, 72 nt, Human
gucaccugcaacucacgcugcaagcccugaagcaagugcuucuggaagcugcagguggccgucaccaggggc

SEQ ID NO: 4155411 - RNA, 59 nt, Human
gucaccugguuaaaauggcacacaacuuugaagcugccugccauuuuaaccaagugugc

SEQ ID NO: 4155412 - RNA, 130 nt, Human
gucacggcuuggugugauaauguauguguugguuugcugcuggaugcgcuugaugguugccccuuuggggcccaccaccagccccaccacgcgguagggcacccgcacacggauggucaccuggccgggc

SEQ ID NO: 4155413 - RNA, 75 nt, Human
gucacguauuguacauaaaauguaugucuuugucucacaagucaagggcaagagaaauuuugauguauuugugau

SEQ ID NO: 4155414 - RNA, 69 nt, Human
gucacuaaggagacagguaaauuucccagugcuggaaucagauuggugaggaagaccugcuccugaggc

SEQ ID NO: 4155415 - RNA, 68 nt, Human
gucacucaggcuggaguucaguggcaaucacagcucacugcagccucgaacuccuagccucaagugau

SEQ ID NO: 4155416 - RNA, 59 nt, Human
gucacucuuuuucagcuagcucaggcuaaagauaagcccaagugggcaaggaagaugac

SEQ ID NO: 4155417 - RNA, 90 nt, Human
gucacugaaaacuuuuucuaaaauagauuuuauggugcaaucuuuaaguuauuuugcauuaggaagguuaucuguuuuaguucaggugac

SEQ ID NO: 4155418 - RNA, 77 nt, Human
gucacugauuuuuuggauggcuguacauuaauuaacauacauuuauugagugcauacccuucuaaaaaguccugugc

SEQ ID NO: 4155419 - RNA, 73 nt, Human
gucacugcacuccagccugggugauagagccagaacugucugaaaaacaacgcuaagggcugggugcgguggc

SEQ ID NO: 4155420 - RNA, 80 nt, Human
gucacugucugccgugcagagcccuuccucccacgggggccuaccucaccugugccaagggcuugucuguggucagugac

SEQ ID NO: 4155421 - RNA, 55 nt, Human
gucacuguuucacuguucauuaacaccuccaggagagggugagcugagucaggac

SEQ ID NO: 4155422 - RNA, 66 nt, Human
gucacuuacacaucucugucaguagugaugcuucugggcauagcaaaauguggauguaguugugac

SEQ ID NO: 4155423 - RNA, 97 nt, Human
gucacuugcuuccccuucugcuuugguuccauggauggccaucggcccuggcucugcagccucuguggugacugggagcagacggggaacaucugau

SEQ ID NO: 4155424 - RNA, 73 nt, Human
gucacuuucccagccuccuuugcagcuaagacauaagcagguggcugaggagcugcugggaugauaaggugac

SEQ ID NO: 4155425 - RNA, 74 nt, Human
gucagaagcaccaugggggaaggcugguccaggcuucagaauggaacucaggccagguuucucccacagcagac

SEQ ID NO: 4155426 - RNA, 76 nt, Human
gucagaauugcagggagggcaggacacccuggcaaaaguagaaaaaugccagcuugcuguccgcuacauuucugau

SEQ ID NO: 4155427 - RNA, 56 nt, Human
gucagaguggaaggccaguggcucugugaaagugccugcuggucaccuaaucugcc

SEQ ID NO: 4155428 - RNA, 67 nt, Human
gucagaguguggcaagcauuaggucucugcuccaccucagugccaauucugccauggggacucuggc

SEQ ID NO: 4155429 - RNA, 125 nt, Human
gucagauauaaaucaacguuacagcacucuuuccaagaauguguuagaaugugcauguguuuggggagcagacaugguauuucuauuauaauuuuguuuguuaggugugaucugaauuguuuggc

SEQ ID NO: 4155430 - RNA, 79 nt, Human
gucagcaggauucauucuggaggcuugagcaaagaaucuaucuucuuagcuuuuccagcuucuagaggccaccugcaac

SEQ ID NO: 4155431 - RNA, 56 nt, Human
gucagcaguggcagcucccggggaccugcagcccccccucggcccugccagcugac

SEQ ID NO: 4155432 - RNA, 100 nt, Human
gucagcaugcugguuuggcagaauguguggcugauugccagaguauuuuugagcaaagcagccauucauuucaccugcaaaaucgaaaguucacuuugac

SEQ ID NO: 4155433 - RNA, 65 nt, Human
gucagccacucucagacagucccacccuauggccugaaagggugguggccagguaggugguugac

SEQ ID NO: 4155434 - RNA, 82 nt, Human
gucagccagcugcccuucucuugcccuuggccacugcagcagaccuuaggccaagggaaggcuaagggcaacagcaccugac

SEQ ID NO: 4155435 - RNA, 72 nt, Human
gucagccugucggcuccuucauucuggccacacaucacaacaguccaugaaugcagcagugacagggcuggc

SEQ ID NO: 4155436 - RNA, 61 nt, Human
gucagccuugggaagaaacauguccaucauuguuuauguggcauuucuucccagugcagac

SEQ ID NO: 4155437 - RNA, 94 nt, Human
gucagcgugcacagcucccagcuccugagcucucagggacagacuaugugagugagcauucuguuaccagagccaguggaaacuguacaccuac

SEQ ID NO: 4155438 - RNA, 61 nt, Human
gucagcuaauaggguguguguccauggcgugcucagccccucacaggccuugugagcagac

SEQ ID NO: 4155439 - RNA, 84 nt, Human
gucagcucugcccugggaggcuuuccuguuuggcacgaggaugacucuaggcaggugaccuggccucccagggaccuggcuggc

SEQ ID NO: 4155440 - RNA, 114 nt, Human
gucagcugcugugggugaguugggggacacgggggacacuguggggagugagcacuggacauagagcucagaggccaagugcccgcccugcccauacuuagccauggccuugac

SEQ ID NO: 4155441 - RNA, 73 nt, Human
gucacacacauuucuuuggugcuaaaggcacaugauucugucaaccggcaacagcacugcagacuguuguggc

SEQ ID NO: 4155442 - RNA, 62 nt, Human
gucacacagguugaaaugcaguggcacaaucauggcucacugcagcuuugaccuucaguggc

SEQ ID NO: 4155443 - RNA, 78 nt, Human
gucacacaguuggggcaguggccagaguggaagcagcauagcagcucuuuccagucucagcccuguaacuauggugau

SEQ ID NO: 4155444 - RNA, 61 nt, Human
gucacacucaaaagcuaggaugggcccaacugagaggcugcccuaguuuucugagcgugac

SEQ ID NO: 4155445 - RNA, 89 nt, Human
gucacacuguggagagccuuaaaggccacuugaaggauuuuucauguuauuuugugagauaaagaugguuuuuagggguucugagugac

SEQ ID NO: 4155446 - RNA, 62 nt, Human
gucacauagcacucagaagcugggucuaguauucugcucucucaaagacuggggcugugugc

SEQ ID NO: 4155447 - RNA, 66 nt, Human
gucacauagucuggaguguccaguucuacucugaaaagauggcucuccccaccuaagaaaugugac

SEQ ID NO: 4155448 - RNA, 74 nt, Human
gucacaugugagcuuuaccuuagguucuguuuucuagagaaaccaaacuaaaauaaggcauuauacucugugac

SEQ ID NO: 4155449 - RNA, 55 nt, Human
gucaccaaccagccugccucuggggccuauuucagaaauaaacugguuuguagau

SEQ ID NO: 4155450 - RNA, 65 nt, Human
gucacccaggcuggagugcaguggcacaaucuuggcucacugcaaguuccaccucccggguucac

SEQ ID NO: 4155451 - RNA, 61 nt, Human
gucacccaggcuggagugcaguggcgccaucucggcucacugcaagcucagccucccggau

SEQ ID NO: 4155452 - RNA, 65 nt, Human
gucacccccaagugugucaguccccagaacaacagccagauuggacucaggcaccaggggauggc

SEQ ID NO: 4155453 - RNA, 72 nt, Human
gucaccguagugccucugagcucugcuacagaugaaauuaauuccuccagagcugagggagccugagcaggc

SEQ ID NO: 4155454 - RNA, 64 nt, Human
gucaccuagcucaugguggaauugccaacuauaaaauagcauuuccacagcccaagcugguggc

SEQ ID NO: 4155455 - RNA, 58 nt, Human
gucaccucgcugucuuccugaguucaauuaaagaaaacaguaacagcaagaggcugac

SEQ ID NO: 4155456 - RNA, 81 nt, Human
gucaccucuuuauaauucuggcauaggcuguugggccugagcuggccucauggucuuuucccuggauuauaggaggguggc

SEQ ID NO: 4155457 - RNA, 59 nt, Human
gucaccugaggggaggugacaggaacugaacccacugucacucuguguuucccugggac

SEQ ID NO: 4155458 - RNA, 94 nt, Human
gucaccugggugggagcuuguuauaaaugcagaauggcaggccaaucucagaccugcuaaucaauauucauuuuaacaagaucccccaggugau

SEQ ID NO: 4155459 - RNA, 65 nt, Human
gucacgccuguaugguuaauuuuccugagugagcgccuggcuugguaaggaccagcaggcgugau

SEQ ID NO: 4155460 - RNA, 83 nt, Human
gucacugaaguccuugauuccucaguuucuuuucccuaguauuagagaggggaaaacaggaauuaacagguucuuuaugucac

SEQ ID NO: 4155461 - RNA, 61 nt, Human
gucacugaggcuggagugcaguggugcaaucguggcuuacugcaaccucugccuccuggac

SEQ ID NO: 4155462 - RNA, 56 nt, Human
gucacugcgcugacugcuacgaucauugggcaggcgugcacaggcaguguaguggc

SEQ ID NO: 4155463 - RNA, 58 nt, Human
gucacuggucggguguggcuguuaggccuuggcugcugcagcgcccucugaccuugau

SEQ ID NO: 4155464 - RNA, 123 nt, Human
gucacuuagcuaauuaauuccagggcuggaacaugggcuaucuguaaauuugagguucuugcuuuaaugcaaaagaauuaugcaucaggugugcaccauguugguugaggaaaaagaaguggc

SEQ ID NO: 4155465 - RNA, 61 nt, Human
gucacuuauaagcagguuugugucucccuuuucauaagcgucucgcccugcuauaaaugac

SEQ ID NO: 4155466 - RNA, 125 nt, Human
gucacuuauuucacaaauaauagcuccauaacaaagugcugucauuguguggacauggagaagaggagcuccucuucuguguucugugcaaugagcacaaagcauugggugugaaucuuccuggc

SEQ ID NO: 4155467 - RNA, 73 nt, Human
gucacuuguacauagagaagaagccuuccauuacuccuauacuagguuagguuccucuccugugcacugucac

SEQ ID NO: 4155468 - RNA, 58 nt, Human
gucacuuucacacuuuauugcugcacacacaaaccagcuggauguuuuuggaagugac

SEQ ID NO: 4155469 - RNA, 126 nt, Human
gucacuuuuggauggaagcuuuuuugccagugagauagucuuacuuuucucugcuacauugcauguaauugguagagaugguggguacuuuagcagcuuggcugacagcuacguugaacuuguggc

SEQ ID NO: 4155470 - RNA, 77 nt, Human
gucagaaaugagcuuauucauaaaagugcaguauggugaagucaaucuguaauuuuauguauaagcuagucucugau

SEQ ID NO: 4155471 - RNA, 90 nt, Human
gucagacaacucgggaaggugcuaaaggucauggagcccuauuguugguucauugcagauuuguagcuuuucagucugucagugucugac

SEQ ID NO: 4155472 - RNA, 62 nt, Human
gucagagaagguaggggguguggcuaagggacaccucguugcagccccacccuuguccuggc

SEQ ID NO: 4155473 - RNA, 73 nt, Human
gucagagccucaggagcaugcugaugccagaaggcaccacuugguggugauuagcagcauccauuggccucac

SEQ ID NO: 4155474 - RNA, 71 nt, Human
gucagagcucugcagccagggagagaagaaaaugccucauuguucggcucccugagcuggagagacugcac

SEQ ID NO: 4155475 - RNA, 93 nt, Human
gucagaggaugggaguucugggggcgaccagggacugcuggguauagcagcagucaguauggguaucgcccaucgguaugacuucucccuggc

SEQ ID NO: 4155476 - RNA, 62 nt, Human
gucggggcacggagccaaggagggagcuagggcaggcuaaggcugggcucgguggcccuggc

SEQ ID NO: 4155477 - RNA, 55 nt, Human
gucgguacuaguacugguguugcgaggauauggcaccgucaguacuaguauugac

SEQ ID NO: 4155478 - RNA, 78 nt, Human
gucguaggagaagauguugcaguugaugcgggagccgaggccaauguagaagcugcacaucuggcccagguccacggc

SEQ ID NO: 4155479 - RNA, 62 nt, Human
gucgucaucuuccucuuccuccauugguucugaagauggggucuccuaauggaggaugacac

SEQ ID NO: 4155480 - RNA, 68 nt, Human
gucgugaggguugggagggcccaaaucuuacuaaauccagcauacauugggcucuuuaacccaggcac

SEQ ID NO: 4155481 - RNA, 76 nt, Human
gucguggagcccagucgggguguagguggagcgggcuguuugcagugugaaagcuucucuggcuggucugccacgc

SEQ ID NO: 4155482 - RNA, 61 nt, Human
gucuaaaacccuagaggaugaaugacauccuuuaugauaucugucaccuguaggguaggau

SEQ ID NO: 4155483 - RNA, 72 nt, Human
gucuaaaugugguugauaucucuguuuaagagcucaucuugcuuuaggaaaaugagccucagcuacauugau

SEQ ID NO: 4155484 - RNA, 63 nt, Human
gucuaauguaucauggcucucagcucucauugaugagaaagcaggggaagggguacuuaguac

SEQ ID NO: 4155485 - RNA, 56 nt, Human
gucuacaaugagcagucauggccuggacuuggcaugcaaagugcugucauguagac

SEQ ID NO: 4155486 - RNA, 59 nt, Human
gucuacagcacuuaauuauuaguucugaauuaaggggcuaaauaauaaguugcugagau

SEQ ID NO: 4155487 - RNA, 63 nt, Human
gucuaccacugccucccuguccaagaaaugacuguugggaggggaaguggcagugagugaggc

SEQ ID NO: 4155488 - RNA, 59 nt, Human
gucuacugugaggcuccuggauggugagcuauuccagagaaaucuagucuuacagagau

SEQ ID NO: 4155489 - RNA, 69 nt, Human
gucuacuugcugugauggagaauucuggaagguucucccauccgaggaugccuuaucgcacugagggac

SEQ ID NO: 4155490 - RNA, 66 nt, Human
gucuagaauaacugcuaucuuucuggccuaaggaacuggguggaagguaaugcagcuuacugagau

SEQ ID NO: 4155491 - RNA, 57 nt, Human
gucuagagccugaugaggaugaacgucauggaaacccauucucacauggcuccgggc

SEQ ID NO: 4155492 - RNA, 56 nt, Human
gucuagagugcuuccuagucaucugguacugggugguugaggugucauucucagac

SEQ ID NO: 4155493 - RNA, 67 nt, Human
gucuagcuggggagcuagaccucagcacaggcgauacuguccugacacugucucuccccagcugugc

SEQ ID NO: 4155494 - RNA, 66 nt, Human
gucuagcuucuuccuucuccccacuggaagauguccuguagcugcccagauaggaggaggcugggu

SEQ ID NO: 4155495 - RNA, 56 nt, Human
gucuagggcuccucagugacaagcagggcugccuccgccguacuguggagcaaggc

SEQ ID NO: 4155496 - RNA, 58 nt, Human
gucuagggucuguagugcaugucugcaauccaucagaucucaugagcugccccuagac

SEQ ID NO: 4155497 - RNA, 59 nt, Human
gucuauacuacuauacagauguaaaugaaauacauguuuacuaagccagugguauagau

SEQ ID NO: 4155498 - RNA, 83 nt, Human
gucuauaguauagaugauucuguugcuuuuagauucuguugcuuuuggaauagaauuacagcuuuuagaauaguauaauggac

SEQ ID NO: 4155499 - RNA, 56 nt, Human
gucuauccuuuaguccuacaacucgaucuucucgguucacuugggcuaggauaugc

SEQ ID NO: 4155500 - RNA, 75 nt, Human
gucuauguaaaguuguugcauaaaguaggaaauauauaaaccguaugucuaauauauucaacagcuuauaugagc

SEQ ID NO: 4155501 - RNA, 107 nt, Human
gucuauuaccucacuccuccuuguucucugccuuucccaggcuacugugguuaugauuuguggcagaaguugggaaggcagaaaaggagagaaggagggaaaaggac

SEQ ID NO: 4155502 - RNA, 86 nt, Human
gucuauuagguagcuuggcagcccuuucacugggacaacugcucacugaagacugggcucuaaaaauuacauugcugcuuugagac

SEQ ID NO: 4155503 - RNA, 76 nt, Human
gucuauuguggcugcucacugaaggacccugucacauucuagagcaggguuuguugguguagcccgaguuacggac

SEQ ID NO: 4155504 - RNA, 96 nt, Human
gucucaaaucaagaaaaauauauuugauaucaguguuuccacaggauagaugaaaaacauagauaauagauagaugauguuguuguugaugaagau

SEQ ID NO: 4155505 - RNA, 81 nt, Human
gucucaacagauuugaguuuucuauccuugugucaucaccgaagcacagaagcaugggugugaagcaggaaacuuaaagac

SEQ ID NO: 4155506 - RNA, 87 nt, Human
gucucaacaucauguaguguacacuaaaugaauacaaacuagcuuuuauguuaguuugauugagguguauauuuauaugugaaagac

SEQ ID NO: 4155507 - RNA, 56 nt, Human
gucucaagggggaacucacuguagugcaguccacacuccagugcuccccuuggggc

SEQ ID NO: 4155508 - RNA, 56 nt, Human
gucucaccccacuaccccuuggugucgugcgggcaggggaguuugguggugaagac

SEQ ID NO: 4155509 - RNA, 73 nt, Human
gucucagccucagggaggccucuguggcuucugugcguagaggccacagccaucaccucccugggucucugau

SEQ ID NO: 4155510 - RNA, 68 nt, Human
gucucagguguucuccacucaguuucauguuagaucuaccagcaaagcuuguggaaaauaccaaggac

SEQ ID NO: 4155511 - RNA, 79 nt, Human
gucucauucagguagcgcaauuuccugggacuggggccucccuuaggcccagguagguguguuacuuuccucaugagac

SEQ ID NO: 4155512 - RNA, 67 nt, Human
gucucauugguucugccagagucaggagucaguccugcacugaacacuguggccggaacagugggac

SEQ ID NO: 4155513 - RNA, 82 nt, Human
gucuccaaccauuggugucugugucauuacuaauagagucuuguaaacacucguuaaucacggaaggccgccggccuggggc

SEQ ID NO: 4155514 - RNA, 74 nt, Human
gucuccaggaaugugugugggcuagugcugaaccuggacagguuucugugcuuccuacaaauauuccuggcugc

SEQ ID NO: 4155515 - RNA, 70 nt, Human
gucucccgagcagcccugaguuagcccacggaccagucaccggucuccggcuccccagggauuguuagau

SEQ ID NO: 4155516 - RNA, 76 nt, Human
gucucccucuaaagauguuuauugacauacaugaugaugaauauguugacuuuaugaacucuucuuuuuggggagc

SEQ ID NO: 4155517 - RNA, 55 nt, Human
gucuccugccacacucagucccacucaggaguguccgugaagguggggaggggac

SEQ ID NO: 4155518 - RNA, 55 nt, Human
gucuccugcuagcaagcaccacguaggaaugaacccaggguuguaagcaggagau

SEQ ID NO: 4155519 - RNA, 130 nt, Human
gucuccugucagcagcuuccacucacccacgcggauggcagccugcacggcgguguuccagaugccaaagccgcccuccagggagccaugcugggcaugguuguagagugggucaauguugugcaggauc

SEQ ID NO: 4155520 - RNA, 70 nt, Human
gucuccuuguuccagccuugcagggggagauccugaucccucccugguguccacuggaggaagacgggac

SEQ ID NO: 4155521 - RNA, 78 nt, Human
gucucuaaaacauguugacuuccauuaaaauaacaccaaaggauguauugcuugggguacaagguauuuauuagggau

SEQ ID NO: 4155522 - RNA, 94 nt, Human
gucucuacaggccuaaagaaagguaaaucagauguauuaaaagugccuuuucaacuuaugagaaucugcaguaugcuuaguucuuugcugggac

SEQ ID NO: 4155523 - RNA, 62 nt, Human
gucucuagauugggagagagaauccugccaagcuuuuuccuucauuucccacuucaggagac

SEQ ID NO: 4155524 - RNA, 84 nt, Human
gucucuagggugcuaauaacagcucuguguauugucaucuggagcagugguucucaaccagagcuuguguuacccccaggggac

SEQ ID NO: 4155525 - RNA, 62 nt, Human
gucucuaugcaggacauucuccuggagcacacagucuguuggggugagacccugcauagggc

SEQ ID NO: 4155526 - RNA, 67 nt, Human
gucucuauguagaggacauuugaaucccagcccugccagcacuagguguguguccuuugcaagaaac

SEQ ID NO: 4155527 - RNA, 58 nt, Human
guccuguuacugaaaugcaccgugccucuucccucugacgcacgcguuuccgugagac

SEQ ID NO: 4155528 - RNA, 62 nt, Human
guccuguuggugaauggcucuuuuacauaauugcaggagcuauuucaaagccagccaagggc

SEQ ID NO: 4155529 - RNA, 73 nt, Human
guccuuaauagagaccuucucugacuuagccagccaugggaaggaagaugaaaguacugcuaacaaaggggac

SEQ ID NO: 4155530 - RNA, 55 nt, Human
guccuuagcaacaggcaggagacagcaaaguucccagugcacugugcugaguggc

SEQ ID NO: 4155531 - RNA, 81 nt, Human
guccuuaguaaacugagguauugaaguaucuucuuuuucuuucagaaaauauuugucaagcaccuucuguguucuaagaac

SEQ ID NO: 4155532 - RNA, 58 nt, Human
guccuuccaacggcaauccaaaugccagauauaagggcauaaaaggauguggaaggau

SEQ ID NO: 4155533 - RNA, 58 nt, Human
guccuucgcggcugaggccauugccaugaaccggcagcuggcccagcacgacgaggac

SEQ ID NO: 4155534 - RNA, 80 nt, Human
guccuugcaguuaaaaaucauuaguuucaguugcaauacaaauuuaggcaagggcugaugauauuugcacuguaauggau

SEQ ID NO: 4155535 - RNA, 60 nt, Human
guccuugcuugagacaggcaguacuagaaguaucagaacauguggugcugaagcaggcac

SEQ ID NO: 4155536 - RNA, 58 nt, Human
guccuuggcauucugagucuugcugucucugcuuacaccagcucucaggcuaaaggau

SEQ ID NO: 4155537 - RNA, 112 nt, Human
guccuuuagucucuauuuuugcuccuaauuguuccugcagguaguagguuaacauguaacguacuuacagaaggaagcaauugaacauggcauagauacugaaagaaagggc

SEQ ID NO: 4155538 - RNA, 92 nt, Human
guccuuuucaggccaaggaggcagagagcauaguuugaguuugcaguucuuauaguaaagcaggcaucucucuccucugccuguaaagugac

SEQ ID NO: 4155539 - RNA, 90 nt, Human
gucgacauuuugaaauaccucugaaguucaucaacucugaccaaaauauuuugauagaauuugggguguguuauuucauugcguguugau

SEQ ID NO: 4155540 - RNA, 81 nt, Human
gucgacuucacaacagcauuacucuccuguuuugcagaguauuuaaggcaugcagggauuaaaugacugccuugaggugau

SEQ ID NO: 4155541 - RNA, 65 nt, Human
gucgauucucaggcuugugcaccuguacugagcuccaggugaacagcagcuuccugggaauugau

SEQ ID NO: 4155542 - RNA, 85 nt, Human
gucgauuuguguauacugaacucagaaaggagacaucugaauagucagauucucaguucacuaguuucuuaugccaaaaguuaac

SEQ ID NO: 4155543 - RNA, 56 nt, Human
gucgcaaacuugcugccugugagugcaauccagcccacagguucauucugugugac

SEQ ID NO: 4155544 - RNA, 61 nt, Human
gucgcaaaggccaugcauuuagaagggccccuugucugguuaaaugcugugcuguugccau

SEQ ID NO: 4155545 - RNA, 60 nt, Human
gucgcaagguccugaccaccauguggauuccuccacguguagguggacaggaucuuugac

SEQ ID NO: 4155546 - RNA, 70 nt, Human
gucgcccaagcuggacugcaguggcaugaucucggcucacugcaaccuccacuucccagguucaagcgau

SEQ ID NO: 4155547 - RNA, 65 nt, Human
gucgcccaggcuggagugcaguggcgccaucucggcucacugcaagcucagccucccggguucac

SEQ ID NO: 4155548 - RNA, 65 nt, Human
gucgcucacauagcccauggacuggucagcugccucggacugacuggaugugcuacugcagcggc

SEQ ID NO: 4155549 - RNA, 109 nt, Human
gucgcucuugguaaagcaauuucucaucuccaccugcccuccagggucucauuuguagaaugaggggggcucuggugaggguaggagauggaaggggcuggaaggugac

SEQ ID NO: 4155550 - RNA, 70 nt, Human
gucgcugugucauugccaugaaaaggcaggggguaucuuccagguguugccauggcaaugauaaacugac

SEQ ID NO: 4155551 - RNA, 67 nt, Human
gucggaggagcaggaggaguauggagggaagacuccuggguggcaugaagcucuugcaccucuaggc

SEQ ID NO: 4155552 - RNA, 77 nt, Human
gucggaugcacagcuccggggucguucagacuaguuagagagauaauaguuucugccucggaagcugaaaauuugac

SEQ ID NO: 4155553 - RNA, 64 nt, Human
gucagcaccucuuuggggagcugcuuccaaaaguucuggaugaggcucaccggggguguggggc

SEQ ID NO: 4155554 - RNA, 69 nt, Human
gucagcacuugucagcgguggcggggcaggacgaggagccugcucaggccagccggacagagagagggc

SEQ ID NO: 4155555 - RNA, 128 nt, Human
gucagcacuuuaggccucuuuaccuccugucguuccugagugacucuagaaaguuucuugagagcacugggcgagaggcugggaagucacaggaaagaagcagagaggaggcuggccugcaggcugau

SEQ ID NO: 4155556 - RNA, 72 nt, Human
gucagccaguccccucggacagccagaggccaugaagucaaggggcucuggucagugaggggccuugcuuac

SEQ ID NO: 4155557 - RNA, 59 nt, Human
gucagcucauccaucccgguggagcagaucuuucuccaccaucaguacuggaugcugac

SEQ ID NO: 4155558 - RNA, 71 nt, Human
gucagcucggcuccgucuugccagggcuggggggacccucauccucacccgcuuccggagcugcaguggau

SEQ ID NO: 4155559 - RNA, 66 nt, Human
gucagcugcuagacagugaucuguugauacugaaaugcccacuaauauuaauaugucuaagcugau

SEQ ID NO: 4155560 - RNA, 60 nt, Human
gucagcuguugugcugggcaguuaccuuauauuaacccacaauccccacaacagccaggc

SEQ ID NO: 4155561 - RNA, 114 nt, Human
gucaggagacuggguaauaugacuuuuuuauaucaacugaagucuugauuauuaaaguugggguguaaggguugaaauggaggucucaucaauuuuuccacccaguuuacugac

SEQ ID NO: 4155562 - RNA, 80 nt, Human
gucaggcagcucugcuucuaagaaccugcagcuuuuggaagaaaggcacccugugguuucagaagcccaagagucccugc

SEQ ID NO: 4155563 - RNA, 91 nt, Human
gucaggcaugguggcuuacgccuguaaucccagcacuuugggaggccgaggugggcggaucacgaggucaggagcuugagaccagccugac

SEQ ID NO: 4155564 - RNA, 56 nt, Human
gucaggggcagaaccaagggcacacuccaucccagcuuguccuguccugcucugac

SEQ ID NO: 4155565 - RNA, 130 nt, Human
gucaggggggccaguacacagggauaaguauacaauggaugagauuuuggcuuugaauccaagagagaugggaagcuaugggggaguuucaaccauaaucuuauuugccuguuaacuggcuuacucuggc

SEQ ID NO: 4155566 - RNA, 85 nt, Human
gucaggucuugauuuaauuguucucuuauuucuacccaagggacauguuucccucaguguuaggauaagagaaagucagguuggc

SEQ ID NO: 4155567 - RNA, 102 nt, Human
gucaggugaguaugagggagaugggcugauucgauggggguagagaggcgggccacgugagcucugcccuggggucagccuccauucaucacuuucucugac

SEQ ID NO: 4155568 - RNA, 77 nt, Human
gucaggugugucauugcuuuacaaaaauugauggugacaugugugucauuauuuguaagagccagugaauaucuuac

SEQ ID NO: 4155569 - RNA, 59 nt, Human
gucaguacccagugcaacuggagucucugcaacagggaacccgcacgcugggugcaaac

SEQ ID NO: 4155570 - RNA, 76 nt, Human
gucagucaagucuggagcagaugggguccuugugccauugacagcuaccaugguuuguuccagucucaaucucggc

SEQ ID NO: 4155571 - RNA, 70 nt, Human
gucagugaaccuucaccaaaccccacgugcauuuuauccucagugaauuguugguggaggugcaccugac

SEQ ID NO: 4155572 - RNA, 66 nt, Human
gucaguggagccaaggccaguucucagggcccagcucuuggugaauaugaucuugguuugaucgac

SEQ ID NO: 4155573 - RNA, 59 nt, Human
gucaguggcagguguuucguggugcuaccggacaggcagaaugaccgaccucgccgggc

SEQ ID NO: 4155574 - RNA, 72 nt, Human
gucagugguagggcuaguucaggggcugcaguagugcuggugcccacagguggaaccuucuccugcccugau

SEQ ID NO: 4155575 - RNA, 70 nt, Human
gucaguggucccagguggucacagccuacagcuucccuugcugugcuguucccauguggggcucagagac

SEQ ID NO: 4155576 - RNA, 59 nt, Human
gucagugugaguugauuccauaagcugagaaaagucaguagugaauuccuaacacuggc

SEQ ID NO: 4155577 - RNA, 88 nt, Human
gucaguguuuuuaaagcaauauaaagcagcugagauuuucuauuauuuacuuacugcaauaagcuguaaugcauuaaauaauauuggc

SEQ ID NO: 4155578 - RNA, 84 nt, Human
gucaguuaugcagaagaaugagcuuggaguugguccagagacuagaaacucuuguauguucaauucuuggcauuuucuuuugac

SEQ ID NO: 4155579 - RNA, 116 nt, Human
gucaguuuucuugcauggugcagagcuagcuuagccugugagguauaaaaucuuaaugccuuuuauccaugggcaaguuugaaguuccccuaaaagcauagugcaauacugcuggc

SEQ ID NO: 4155580 - RNA, 77 nt, Human
gucauaaagucaucuguccuaggcucuacaauguagcauuuucaaauuggaagagccuucagagauuauuuuauuac

SEQ ID NO: 4155581 - RNA, 108 nt, Human
gucauacugaucaacaaccagcugaguucucggauggucagcaucaacuaucagcccuaugagugagccaucuuagaucuccgucucagugugaagcccucagaugac

SEQ ID NO: 4155582 - RNA, 109 nt, Human
gucauagaaagauugugcuuuuugacuuuuaucaaggaagugaucuuugcuauaaaaucaaauuaaccuuaugauagaacuguacgagcuguuuaauuuuucagauuac

SEQ ID NO: 4155583 - RNA, 62 nt, Human
gucauagccucccuuccuuaggauccauguguugaugcugaggccuguguuggggcagugac

SEQ ID NO: 4155584 - RNA, 73 nt, Human
gucauagugaggaaccauauuucaaaugacuucuuuugguaagugauuauuuaaugcgguuuuacauaaugac

SEQ ID NO: 4155585 - RNA, 59 nt, Human
gucuccuggccuccaguuucucugcuugaagcgcccuugaaacugauggccaggaugau

SEQ ID NO: 4155586 - RNA, 63 nt, Human
gucuccuggcucauagagcagcuccaacaacacgugcuuggaugccaagugugccauggagac

SEQ ID NO: 4155587 - RNA, 93 nt, Human
gucuccuugucuccuguuacuucuuaggcauuaguaccuugaaaguuugccauaaaaucucaguuagggccucagaagacagacacaugagau

SEQ ID NO: 4155588 - RNA, 63 nt, Human
gucuccuuuaagauuuccucaggcuuucuuugucuuuauggcacugacauuuuugaaugagac

SEQ ID NO: 4155589 - RNA, 94 nt, Human
gucuccuuuggcuucuucugaugcuccucuucucccacugaaugcaggaaaacucaccuccaucagagugaggaggguaaggauugccugagau

SEQ ID NO: 4155590 - RNA, 63 nt, Human
gucucuaaggacaaaauucaauucgcuaaauacuagcaagcagaauucuguccucuagaagau

SEQ ID NO: 4155591 - RNA, 124 nt, Human
gucucuaccaugggggaaauagagggacagggugugggacugggacagccccaggcaggaaggagccugcauuguggcucaucuucagcuccccccaucugagcagagcccccgugggucugac

SEQ ID NO: 4155592 - RNA, 102 nt, Human
gucucuauccuggcccuuugcaacugccugccucugauucugcacaccacagugcugcaguaucuaugggcaugccauauguauaagauguuauuuagggac

SEQ ID NO: 4155593 - RNA, 59 nt, Human
gucucucuugcucuacuggagucuucugcccuggucuucagagaucuucaggaugggac

SEQ ID NO: 4155594 - RNA, 55 nt, Human
gucucugucacaacuacucaucucuguaacucugcuguuguggugugaaagggac

SEQ ID NO: 4155595 - RNA, 84 nt, Human
gucucugucauuaaacagcugucauuguuuuaaaauguacacauuauuuaauuuaauuguauggcugaguagagacaugaagau

SEQ ID NO: 4155596 - RNA, 67 nt, Human
gucucuuccaccuggcugguguuccugaggccagggggccuuccagagccugcagguuggaugggau

SEQ ID NO: 4155597 - RNA, 98 nt, Human
gucucuugcccuggucuccuaauucagguucgagucuguuaaucguauuucuccuccauugacaacagccacugauacugaauagccaaaucagagac

SEQ ID NO: 4155598 - RNA, 62 nt, Human
gucucuuggcuuuugcucccagaucaucagaaagaugacucaaugagccagagcucuuugau

SEQ ID NO: 4155599 - RNA, 97 nt, Human
gucucuugugaucuugcuguaacuucacuggacucagcagcucuuaaaacagaguacgcuuguaagguggggugggauggacagagauccaggagau

SEQ ID NO: 4155600 - RNA, 57 nt, Human
gucugaacaguuaagaguuugaacuagauaauuucuauguucaaacacugauucagc

SEQ ID NO: 4155601 - RNA, 56 nt, Human
gucugaauagcucugugaauaccagugggcugcaggggcacagagguuauacagac

SEQ ID NO: 4155602 - RNA, 96 nt, Human
gucugaggaaggaagaagguuggugacuauauaagguucaaagcuuuccaaaaggaagaacuuacauuauagagcuguacucuuucuccuucagau

SEQ ID NO: 4155603 - RNA, 82 nt, Human
gucugauaguucuguggccagauggugccaguucacuuccagcugaacugguacagccugaccacacuccaugcugacagau

SEQ ID NO: 4155604 - RNA, 75 nt, Human
gucugauaugaguuugauggcucuuuauggcauauaaaauguauguuaaggagacacaugaaaaauuaacaguac

SEQ ID NO: 4155605 - RNA, 79 nt, Human
gucugauaugugcagugacucacaggaaggaggccaguauuagccuccuucagcugaaucccugcuccaacauauuugc

SEQ ID NO: 4155606 - RNA, 56 nt, Human
gucugauuuacuggaaaaaaggagagcagccuuucuuuucucccagaugauuagac

SEQ ID NO: 4155607 - RNA, 83 nt, Human
gucugcacaguguuucucaggcugccuaucagacugugaaacgcuuuuacgggagagggcgccugagugaagagcucgcaggc

SEQ ID NO: 4155608 - RNA, 96 nt, Human
gucugcacaucagcacggacuucaucucucagcaaggggucucugcccuucagugcgugagaaugaggcccgucaacugcuaaggcuguggcaaac

SEQ ID NO: 4155609 - RNA, 66 nt, Human
gucugcacgugccagggaggggucacaggaugaaugcuauaucccuccuuuuugggaccgugcagc

SEQ ID NO: 4155610 - RNA, 80 nt, Human
gucugccaaacagaguacagacaaaggucagaugacuuaacaguuucucaucuguacccugaugcuuugucaagguuugc

SEQ ID NO: 4155611 - RNA, 83 nt, Human
gucugccauauagucaugcuuuguuaauguggcacaucuugccaugauggugcccucaugaaacgaaggaugcugaagcagau

SEQ ID NO: 4155612 - RNA, 69 nt, Human
gucugccuccuuguuucuguccugugggaauuuugcuuguuacacagcagaauagcaagaaaaacaggc

SEQ ID NO: 4155613 - RNA, 67 nt, Human
gucugccuuuugaucuauaacuguguaugaguuuugucaaaacauagggagucagggggaaucaggc

SEQ ID NO: 4155614 - RNA, 65 nt, Human
gucugcugugccuuggggaaaagagacaaugaaaaauaaccauuguuccucaggggcucacagac

SEQ ID NO: 4155615 - RNA, 106 nt, Human
gucugcuuguuuuguaguugaggaaccagagguugagcaacuagaggccacacaggucaucaguguccucaggcuuuguuccuuagguggcacgaggugaucagac

SEQ ID NO: 4155616 - RNA, 57 nt, Human
gucuggaagggagugcauuuucacauaaugauguugguugauguaauguuucuaggc

SEQ ID NO: 4155617 - RNA, 75 nt, Human
gucuggaagggcggaagggcacagcuucuuagaucuuagggauggagagcuggccagcuucaguauguuucagac

SEQ ID NO: 4155618 - RNA, 61 nt, Human
gucuggacccugggcugugauuuuuggccaggaggacacagccacuuaggguaccugucac

SEQ ID NO: 4155619 - RNA, 63 nt, Human
gucuggagccugggucccugcucccauaccuugaauuccugagauggccuugaggcuccacac

SEQ ID NO: 4155620 - RNA, 64 nt, Human
gucuggaguguccuagcaagccgguccuuugcacagaaggcuggauuuauggggacuucauggc

SEQ ID NO: 4155621 - RNA, 69 nt, Human
gucuggcaucagccuguagaauacaguaaaucauauuuauaauuugcaugggucugcagcaggccaggc

SEQ ID NO: 4155622 - RNA, 77 nt, Human
gucuggcaugcaguaggugcuggauaaagaaugguacugggauagaccuuccgcuuuccacacuguugcccccagac

SEQ ID NO: 4155623 - RNA, 67 nt, Human
gucuggccagcccagugguccucucuagcacauuacagagauuggccuuuggagcugaaagcuggac

SEQ ID NO: 4155624 - RNA, 61 nt, Human
gucuggcguucagcaagugguuuucaaauuauuuaaugaacacuugcaugaacagcuacac

SEQ ID NO: 4155625 - RNA, 89 nt, Human
gucuggcuaaauuggcagauucugaacaaagccuggcccugacaagucuucagaaaaaccgguuuucaccuccagaaugugccccaggc

SEQ ID NO: 4155626 - RNA, 67 nt, Human
ggugaggguaaacuaaaacaucuucagacaaacagaaagagaagguaguuaucagcagauccucacu

SEQ ID NO: 4155627 - RNA, 69 nt, Human
ggugagggugggacagaggguauggucagggcagccagucccugcugucccucaguccugccucucgcc

SEQ ID NO: 4155628 - RNA, 66 nt, Human
ggugagguaaagauggcggcagagccuccggaagcuaggagagaggcaugcaacagauuauuuccc

SEQ ID NO: 4155629 - RNA, 109 nt, Human
ggugaggugccugggucagugcugauagggcagucaggccgccacugaccugagcauccugcagggggaggaggcggccaggcgcucuacaucgauggggaccugaacc

SEQ ID NO: 4155630 - RNA, 59 nt, Human
ggugagguugguaucacuggccgcaaguccucucaguggcccugugcaugcugcuuccc

SEQ ID NO: 4155631 - RNA, 69 nt, Human
ggugaguaaucgaggucucugagugccugggguugaagguugagggaguucaaagacuugaugcugacc

SEQ ID NO: 4155632 - RNA, 106 nt, Human
ggugaguagggggaugaaggaggaacaccaacacaguuuggaggcaggguugaugauggucaguggagucacaacucacagccaccgguguuggcccugcaccacc

SEQ ID NO: 4155633 - RNA, 124 nt, Human
ggugagucauauauguaucauguccuaacuuugucaucuucccuuucugaaucagaacauggauugucaaagguaagacugauuagaagaaugaagggcuaagauugcugacuaaagacucacu

SEQ ID NO: 4155634 - RNA, 76 nt, Human
ggugauaguguuagagccaguauguuccuaagagauacagugucaucagaacaaacuggcacugaaacauuucucc

SEQ ID NO: 4155635 - RNA, 76 nt, Human
ggugaucagucacauuucgacauaacuagaugucaaaagaaguuuaaguuguaugacgaacugugaugcagucacu

SEQ ID NO: 4155636 - RNA, 62 nt, Human
ggugaucgaguuguuuguucuggggauaugaauccuguggagcuuucagcagcucggccauc

SEQ ID NO: 4155637 - RNA, 59 nt, Human
ggugaucggugaucuggcuuauuuguuccuuuguggggguaagggcugggcaccucacu

SEQ ID NO: 4155638 - RNA, 55 nt, Human
ggugaucugcccgccucggccucccaaagugcugagauuacgggcaugagccacc

SEQ ID NO: 4155639 - RNA, 76 nt, Human
gugaagaugcuggcaggguaugauuaccucugaggccuuuagcuugcagauagcgucauucuugcugccucuucac

SEQ ID NO: 4155640 - RNA, 76 nt, Human
gugaagcagaguguggaagcaauaaaacccuauuaagaucaguuuaggccuuuaaaaauuccaugauuccuuucac

SEQ ID NO: 4155641 - RNA, 66 nt, Human
gugaagccucaagaagagggagaccuacagccucaggaauuguaggcccuuuuccuuguccuuugc

SEQ ID NO: 4155642 - RNA, 123 nt, Human
gugaagcguuuagaugagcagaauuugauaucugcagcuuacuuucacaugauucagcaaaauauuaaucaucggugaauccagcugcuagguauuuagguguucauuguacuaaucuuucac

SEQ ID NO: 4155643 - RNA, 81 nt, Human
gugaagcugaaauauuuuaaucucaggauaaacccauuauuuaaguuaagguacucuugagaacaaauaugauuacuucau

SEQ ID NO: 4155644 - RNA, 57 nt, Human
gugaaggaaguaaauucugucuggcaacuuucaggauaaagucuuuauuucuuucau

SEQ ID NO: 4155645 - RNA, 81 nt, Human
gugaaggcuauugcaaguaguccagccuuugggaauuugacuguaaguggacccacugcauggaagcuugcaagcuugcac

SEQ ID NO: 4155646 - RNA, 79 nt, Human
gugaagggauauuguuugcuuacccaccuguaaucauuuagaguuaugauuaauugagccagaaaguaucugcuuuuau

SEQ ID NO: 4155647 - RNA, 61 nt, Human
gugaagguggggagccucaguucugugaauaucagcauugccgagccuacuccaucuccac

SEQ ID NO: 4155648 - RNA, 58 nt, Human
gugaagguugucaugaaguacaaaggacaauuccuuuccuggcagguacaacuuuuac

SEQ ID NO: 4155649 - RNA, 77 nt, Human
gugaaguauauuuagcugagcuugugcauaugacuucaguucauaaaaaguuuacaagugcagcuggaaugcuuagc

SEQ ID NO: 4155650 - RNA, 72 nt, Human
gugaagucaccucuuguuucccagguugcugccccaccugcagcugccacagagccuggccagaggucucac

SEQ ID NO: 4155651 - RNA, 66 nt, Human
gugaauaaaacaccugccaagacgugguaggauuuaaaagugauuuggggcggguguuuuauucac

SEQ ID NO: 4155652 - RNA, 77 nt, Human
gugaauaagucucaugagagcugaugacuuuacaaggggcuuccccuuucacucagcucucauugucucuugucugc

SEQ ID NO: 4155653 - RNA, 81 nt, Human
gugaauagccaacuugaaaaccucaugaauuguacaguucagauaccuguacaaauuguuuugguuuauaaaagcuaucau

SEQ ID NO: 4155654 - RNA, 76 nt, Human
gugaauagugcugcuaggaacauuuauauacaaauacuuguuugaaugcuuguuucuaguucuuuugauuauacac

SEQ ID NO: 4155655 - RNA, 72 nt, Human
gugaaucacaaagcuauauggagucuauggggaaauucaguuuuauauuuuuauccauaagcuuguguucau

SEQ ID NO: 4155656 - RNA, 93 nt, Human
gugaaucaucucuucuggaguugugcaguggaccuggcaugaccaaguuuaugcaucuuagggucccucacaucugcaguugagauaccucac

SEQ ID NO: 4155657 - RNA, 79 nt, Human
gugaaugcucaaucaaugguuuccaaauuuuggauaucacagacugguaaaauuugagaacuauuuuugggucaaucac

SEQ ID NO: 4155658 - RNA, 91 nt, Human
gugaaugggccuggcugccuggcccagggaugggccuggauuugcucaggcucagagguugaggccggcacuuccgucaaaggcccuucgc

SEQ ID NO: 4155659 - RNA, 58 nt, Human
gugaaugucuucuguucccagcugccuccugugaauagucugaggagaaggagaacac

SEQ ID NO: 4155660 - RNA, 118 nt, Human
gugaauuaaagauaaauaaacauugugauacaacuuaacuguggggaaauuuguuuucucauucacuucauuuuaccuugaguuugcaacaccacaguguuuugucacauuaguucac

SEQ ID NO: 4155661 - RNA, 74 nt, Human
gugaauuacuguuagggaaaauauaucaguagcagagauacugauucuguaauuuuuccuaaauaggcacuuac

SEQ ID NO: 4155662 - RNA, 62 nt, Human
gugaauuagcuuuaccuaggauuguuuugggaaaauucuugcaggaaccugguaagcuucac

SEQ ID NO: 4155663 - RNA, 113 nt, Human
gugaauucaaagcugcagacuccugggaggaaauucugcuguuugcuuaugcccaaggugccauuucagagcaaaaguguagcuuucuuuccauccaucagugaacuuuucac

SEQ ID NO: 4155664 - RNA, 57 nt, Human
gugaauugugugaagugugaugcauuuucagcagguggacacauuugcacaauccac

SEQ ID NO: 4155665 - RNA, 66 nt, Human
gugacaaaugaagucacugaccuuguauaagucauuuuaggaagggucaacauuucauugauucau

SEQ ID NO: 4155666 - RNA, 60 nt, Human
gugacaaggaaaauaaauucuaagguuuauaucaaguagaauuccaguuucuuaugucac

SEQ ID NO: 4155667 - RNA, 84 nt, Human
gugacaagucccaugacuuuguuuuccucguuuggaaaaaccuccaguuggugguuccagagcugagcagucauucuacuucac

SEQ ID NO: 4155668 - RNA, 69 nt, Human
gugacaaugucucugcugugguuagcuuuggugccuucuccaagguaaauucagcagugacauuaacac

SEQ ID NO: 4155669 - RNA, 82 nt, Human
gugacacgcugcagaggagcuggaaggcuggacagccucggggaggcucagcuaauuccagggcuacaccuugggguguuau

SEQ ID NO: 4155670 - RNA, 61 nt, Human
gugacagaaacagggcuagaaugcaggucucucgucccuacucugccacuuuuucugucac

SEQ ID NO: 4155671 - RNA, 62 nt, Human
gugacagagaaggagcucaaauauggcuuuucugaagcuacaucuggacucuuuaugugcac

SEQ ID NO: 4155672 - RNA, 83 nt, Human
gugacagagacagauugaagcuuaaauuagcucaucauaggcuaugauuuuaucuaacuuuaggcuuacuuguaccaugucau

SEQ ID NO: 4155673 - RNA, 74 nt, Human
gugacaggcuucuggaauccaguuucuccuacugaauaaaaggagagaguaggacuucagaauccuuaaguuac

SEQ ID NO: 4155674 - RNA, 67 nt, Human
gugacagggacagagaaaugucacuaugagcccucagugucgguggcaguucugugucucuuguucc

SEQ ID NO: 4155675 - RNA, 76 nt, Human
gugacagggauuugaaauggccuuauuaaguguuugggcauuauucuagaaaugagguuuuuuaaagccagagagc

SEQ ID NO: 4155676 - RNA, 85 nt, Human
gugacaugugucuguagcuucuugagaggccaagucaggaggaucacuugagccugaguucaaggcugcaguaagcuaugaucgc

SEQ ID NO: 4155677 - RNA, 69 nt, Human
gugacauuuaaagcuggcguuacaguuuguagguuuuacaaaucauggcucuagcuuacaaauguacac

SEQ ID NO: 4155678 - RNA, 100 nt, Human
gugacccaagguggaaagaacaaggcagaggugacagugucuuuuauaagccagccuuggaagugacguagcaucauuucugccuuauuccauuggucac

SEQ ID NO: 4155679 - RNA, 72 nt, Human
gugacccacagcccacccauaccaggcccccagcucuggccagugggccuccggggugagcuguggggucau

SEQ ID NO: 4155680 - RNA, 55 nt, Human
gugacccaggacacuguguaucccauaggcccugauuuuuaguggacuggcucau

SEQ ID NO: 4155681 - RNA, 65 nt, Human
gugacccuggauagcuacuggccaggcgucccgccacgccucccagccauguucuccgguggcac

SEQ ID NO: 4155682 - RNA, 65 nt, Human
gugaccuaucaacgcugacugguugggcacuccaguaacaaacaccaaagcgagugauaugucau

SEQ ID NO: 4155683 - RNA, 57 nt, Human
gugaccuuauuuggagauggucuuugcagaugauuaaauuaauuaagaugaggucac

SEQ ID NO: 4155684 - RNA, 56 nt, Human
gugaccuuauuuggaguuaggaucuuuacagaguaaucaaguuaaaaugaggucau

SEQ ID NO: 4155685 - RNA, 85 nt, Human
gugacggagcucuguucucguccugcuggagugcccugccauucacgccgcgugccagcgguggggaggaaagaugcuaagugac

SEQ ID NO: 4155686 - RNA, 68 nt, Human
gugacgugcagagucuuggcauucaugcguuccuggagacagggacaucaccguggcuuuggaugcgc

SEQ ID NO: 4155687 - RNA, 61 nt, Human
gugacguugcugcccgaggcccuacuuaaaucaaguguagcuguuggggccagcaggucau

SEQ ID NO: 4155688 - RNA, 83 nt, Human
gugacuaucugaggcaggaagcuaucaguuguguaaauaacccuuugcaccugauugauuucacugcuccagauauaggucac

SEQ ID NO: 4155689 - RNA, 69 nt, Human
gugacuauugccagggucaggaugagaucugcccgucagccgacuuuauuacuaacccugugaaguugc

SEQ ID NO: 4155690 - RNA, 58 nt, Human
gugacucaguuagacaguauuugggucacaauaugugauuuacuguuuaauugauuac

SEQ ID NO: 4155691 - RNA, 78 nt, Human
gugacucgaacucggggaaauuguuccuguaauggaguucucaauuuauuggucaauuucaccuugauuuugugucac

SEQ ID NO: 4155692 - RNA, 77 nt, Human
gugacucguagagcuggccuuuugguaugggugugaggcugcccugcaagguccaccugcuacauaaacugaguuac

SEQ ID NO: 4155693 - RNA, 128 nt, Human
gugacucuguuucuuguggauauaauuucggugggugcaaauggugauggcaaauaauugcccucagggagauaauugcuguuacaauuauuuacccauccaaguuagcucuguuaaaaauuuaacac

SEQ ID NO: 4155694 - RNA, 58 nt, Human
gugacugaagaagccacauuggauguugaucuuccagccuccagcuguuuugagucac

SEQ ID NO: 4155695 - RNA, 117 nt, Human
gugacugcugagggagagucccuugcuuugacuguugcugccauucuggaaagcauugaucucuuaccagaggggcuucagaggcaagagcagcuuccgggggcuccuuagcaucac

SEQ ID NO: 4155696 - RNA, 73 nt, Human
gugacugguacaggaaggagggaguuucagaguccugauaauguucuauuucuugaucuagcaugccaguuac

SEQ ID NO: 4155697 - RNA, 129 nt, Human
gugacuguugcaauggacuuuagcgccuggcaggaagugccuggcucaccuccgcuccagcaacuguggcugccacugcugauggaggaaugagagacacaacccacggccagguuucagcacaggcuc

SEQ ID NO: 4155698 - RNA, 64 nt, Human
gugacuguuuuuaggaggaguagguuuuuuaaaauaagggcuuucuuuuuaauaaaacugucau

SEQ ID NO: 4155699 - RNA, 85 nt, Human
gugcagguucacuugaaucacacucguaagugaguuggaagggacuccagcuaacucuuagcuguaauucaggccaaucucccac

SEQ ID NO: 4155700 - RNA, 64 nt, Human
gugcagguuguugacugcauauaggcacccaccuagccugugcuucacucaacaagccguguac

SEQ ID NO: 4155701 - RNA, 71 nt, Human
gugcagucucuccagcucagggagccgaacaaugaggcauuuucuucucucccuggcugcagagcucugac

SEQ ID NO: 4155702 - RNA, 58 nt, Human
gugcaguucaagguuguacagcucaauccaccgagacuggauagcuuuggacuugugu

SEQ ID NO: 4155703 - RNA, 70 nt, Human
gugcauacaugugugugcauacaugugugugcacguguguguacacgugugugugcacguguguaugcac

SEQ ID NO: 4155704 - RNA, 68 nt, Human
gugcauauguauguacuuauguguguguauuuuugcauuuguguuaacauguguacauauauaugugc

SEQ ID NO: 4155705 - RNA, 102 nt, Human
gugcauauuaaaguuugagaagcccagcuguccuuggaagcucagauaaacuggaggcuacaguagauaaggacggucggggcacuugcuucugaguggcac

SEQ ID NO: 4155706 - RNA, 63 nt, Human
gugcauccugggcugacuuacuucugccagaugugguggaggucccagucugugaugacucac

SEQ ID NO: 4155707 - RNA, 63 nt, Human
gugcaucugggccagauccauggcaauaaccuucagguugaggcuagagggcuucagaugggc

SEQ ID NO: 4155708 - RNA, 73 nt, Human
gugcauguauacuuccuuacugacccauuuccugcagcccauggaagauuucaucaaaggaaguacgugucac

SEQ ID NO: 4155709 - RNA, 115 nt, Human
gugcauguguguguguguaucuucauuuauagguauagguguauauauaucuauaugucuguagauauguuuguauauauuuguauauguguaguacacacacccauaagggcac

SEQ ID NO: 4155710 - RNA, 106 nt, Human
gugcauuaggcagacacagccucagugcagcggcagcagcucuugggaagcaagagcccagggcuuugaacacugcauuacaacaggggaugcguccuaaugucac

SEQ ID NO: 4155711 - RNA, 64 nt, Human
gugcauucuuugaaugcuucuaaugacugacaggauuaggaaucugguauucagagaauggaac

SEQ ID NO: 4155712 - RNA, 60 nt, Human
gugcauuuauauuugccuuugguauggaucguauaacugccuaaggcaguaugauugcac

SEQ ID NO: 4155713 - RNA, 59 nt, Human
gugcauuucaagagcucugcuguuaguuucucuaaugagagccaggguucuggaugcac

SEQ ID NO: 4155714 - RNA, 57 nt, Human
gugccaagcacagaggggccacugugugcagcuacagaggcccagcuggccuggcac

SEQ ID NO: 4155715 - RNA, 78 nt, Human
gugccaaggugucaccaugccagcuucugccuguugaaagggaugcuggcggaagucaugguggcugaguccuggcac

SEQ ID NO: 4155716 - RNA, 66 nt, Human
gugccacaguuugcugacccuugccuuagauggaugaagcaugggcugaaagaguaagcugugaac

SEQ ID NO: 4155717 - RNA, 61 nt, Human
gugccacuggugucauauaaggggcucuguuaucuacagaggauucccuagugaccugcac

SEQ ID NO: 4155718 - RNA, 90 nt, Human
gugccagaacuaagacuagaaaacaggucaucggauucuucucugcaaucugcccuaggaauucuauggccaaguguugguuuggggcac

SEQ ID NO: 4155719 - RNA, 66 nt, Human
gugccagacuuuccuuagguaucucaagagcucuguuucuaggaaacucaaagggaagugggaaac

SEQ ID NO: 4155720 - RNA, 83 nt, Human
gugccagcaagggccaacaacugugcaaaggccuuauguuuuugaggaagacagaggcuagugucacuggcccaggguagcau

SEQ ID NO: 4155721 - RNA, 74 nt, Human
gugccagcauucacacugguuccuucagucccaaauccuaaaaaguaaggcagagggccaagugaugcuugcac

SEQ ID NO: 4155722 - RNA, 63 nt, Human
gugccaggugaugaggagacauacugucugggcucuucagacaggcuucuuucucccuggaac

SEQ ID NO: 4155723 - RNA, 63 nt, Human
gugccauccagaaggguuugaaagaagcauaaaauugauccaaacuucacacuucuggagcau

SEQ ID NO: 4155724 - RNA, 66 nt, Human
gugccaucuguuucuuccagggugcccgagugauacaaagcugauucaccuuacagaaacaggcau

SEQ ID NO: 4155725 - RNA, 57 nt, Human
gugccaugucuguugaggucauugccaguccccugcaccguccccaggacuuggcac

SEQ ID NO: 4155726 - RNA, 65 nt, Human
gucgacauggugacgaauccauagcaucgagcccccgggcugcgggcguucguuaccacuuuggc

SEQ ID NO: 4155727 - RNA, 74 nt, Human
gucgagauagggucucacuauguugcccacgcuggucuugaauuccuggugucaagugauccucccaucuuggc

SEQ ID NO: 4155728 - RNA, 60 nt, Human
gucgagcuuggacagcuauauugaaacugaggagagguucaguauagcuucuaaacuaac

SEQ ID NO: 4155729 - RNA, 59 nt, Human
gucgaggcaggcaggcggaggauaggaaggccccacugucuugcgguuucugccucagc

SEQ ID NO: 4155730 - RNA, 64 nt, Human
gucgauaagauggaagaauggcagcugugcuggagcagacagugguguuuuccauugcauaggc

SEQ ID NO: 4155731 - RNA, 76 nt, Human
gucgccaggcuggaggcuggagugcagugguguaaucucagcucacugcaaccuccgccucccagguucaagcgau

SEQ ID NO: 4155732 - RNA, 71 nt, Human
gucgcccaggcuggagugcaagcagcaagaucauagcucauugcagccuugaccuccagugcucaagugau

SEQ ID NO: 4155733 - RNA, 78 nt, Human
gucgcggagccagggacucccaggguagcuccguccacuaagggcggcuggaggcuggggagucccggcgacggcggc

SEQ ID NO: 4155734 - RNA, 65 nt, Human
gucgcucaggcuggagugcaguggcgcgaucucggcucacugcaagcucagccucccggguucac

SEQ ID NO: 4155735 - RNA, 87 nt, Human
gucggaugaagaucugcagccucaggaugaagaucugcagccucaggaugaagaucugcagccucaggcgacgcucuucagugcgac

SEQ ID NO: 4155736 - RNA, 129 nt, Human
gucgggaaccaagagcagugcaaggcggaaaugaaacuggguaaaggaauuggguuuccuggcuucccaagauguguccauucuuugcuccuccucguuuucuuccuucuugacuucuuuuucuauuuc

SEQ ID NO: 4155737 - RNA, 69 nt, Human
gucggggccugaggagguugacggcacugugaauaauucauccgccuguaaugauuuucuagcccuugc

SEQ ID NO: 4155738 - RNA, 91 nt, Human
gucgucaagccaaagagagaggucucaggagaaaccaugcuugcuggcacuggcaccuugaucuugaacuucuagccucuggaacugugac

SEQ ID NO: 4155739 - RNA, 59 nt, Human
gucuaaacuuuacagagucaaggcuguguggaaaaguaagcuauucuguaagguuggau

SEQ ID NO: 4155740 - RNA, 108 nt, Human
gucuaacugguacgauguaauuuacuuuggauuuucaauaucuuuugcuuacuucaucuccuaaaaggauaacuuugaaaguaaauugcaaaagcgaccauauuagac

SEQ ID NO: 4155741 - RNA, 69 nt, Human
gucuaagaggcuccuccuuacauuuaccuguugucacucaggaaaaguagcagggggaucuucuugcgc

SEQ ID NO: 4155742 - RNA, 58 nt, Human
gucuaagccaaucauggugguuucauuauucuugucaucacacuugauuggcuuagac

SEQ ID NO: 4155743 - RNA, 63 nt, Human
gucuaaggcagugagaagaaacaggugcaguugcaauuuguucucuuuuccuugcuccaugac

SEQ ID NO: 4155744 - RNA, 116 nt, Human
gucuaagggcaguggcagaggcaggaguugcauugaucccagcuugggccauggagagcucaccagcccagguagugcuauuaaggagcaccugcuuugagccaacagugcuagac

SEQ ID NO: 4155745 - RNA, 95 nt, Human
gucuaaguccugcaggcaggugggggagcuaguccagcugaggccagugguccagcuggccuggccucuccugcccgaagcugugggaucuggau

SEQ ID NO: 4155746 - RNA, 63 nt, Human
gucuaaguggguggcacugacaaaguugacauuagcugguuuugaaggggccaucacaaaggc

SEQ ID NO: 4155747 - RNA, 85 nt, Human
gucuaaguucugauaagcugcucauuaagccauaacaguuuguuauggcuuaggagaguuuaacuguacauucagguucuuaggc

SEQ ID NO: 4155748 - RNA, 112 nt, Human
gucuaauucuuguaccuuuccuucacuguuucauccuacuucuaugcucacugauaaaaaugggcauguuggaagcucggugcagagggugaaggacugauuaaaauuagau

SEQ ID NO: 4155749 - RNA, 62 nt, Human
gucuacaaagcauauaaaagaggaaguugagcuuauucuaauuuuauguauguuuugcagau

SEQ ID NO: 4155750 - RNA, 86 nt, Human
gucuacuucauccaagcagggcuaggcuagggcugcaaagaugagugagucugcaaagaagccacagucccagggugaaguuaggc

SEQ ID NO: 4155751 - RNA, 76 nt, Human
gucuagaaacacauacauuaauuguauugaaauguuauaucaauacaucauuuaugauguguguguggucccagac

SEQ ID NO: 4155752 - RNA, 87 nt, Human
gucuagaggcauuaguuagcuguucagagaagaccacucugucuuacucuuuaguguggccuuuuagaauaaacucuuccucugagc

SEQ ID NO: 4155753 - RNA, 68 nt, Human
gucuagcuguccgugcaucuuuucccccauuauggaaaugauauggaaggaagauguacacagcugau

SEQ ID NO: 4155754 - RNA, 76 nt, Human
gucuaggagcacugguuuugcugauaaggcaaacucuauggggcugacuuauugguuaacuagucauugucuagau

SEQ ID NO: 4155755 - RNA, 72 nt, Human
gucuaggguaugugaccuauggaucagcagcagucuuuuagaaaugcaagagucccaggcuccacccuagac

SEQ ID NO: 4155756 - RNA, 60 nt, Human
gucuagguagaagccaagaaacaccugcucacaaggggcuuucuuaggcucuaaaaugac

SEQ ID NO: 4155757 - RNA, 61 nt, Human
gucuaguaugaaucucuuuauucugcugcagagcagauuuguugacuucaugaaucuggau

SEQ ID NO: 4155758 - RNA, 59 nt, Human
gucuagucacauuucaagugcucaaaagccauguguggcugauggcuaguguacuggac

SEQ ID NO: 4155759 - RNA, 59 nt, Human
gucuagucagccucaggacaugcuugcagaugcugccugcaggcacagguugucuggac

SEQ ID NO: 4155760 - RNA, 62 nt, Human
gucuaguuccacguaaagccccagaagugaccuucugggucuuuacccauggaauuccagac

SEQ ID NO: 4155761 - RNA, 80 nt, Human
gucuauaaaacauuuaaacaccaggaagaaucgguaggaaagauaaauacgucugccuguugcuagaaugucauguggac

SEQ ID NO: 4155762 - RNA, 97 nt, Human
gucuauaaauaaauuaacaccuggucuuucuuugauaguggagaacuagaaaguacuguaggucuaauauugucaaagugagaccuugucugugggc

SEQ ID NO: 4155763 - RNA, 76 nt, Human
gucuauacucugaugagaauaaugaucugcugugggaaauacagcagaucaauugauuguucacucauauguagau

SEQ ID NO: 4155764 - RNA, 84 nt, Human
gucuaucauuccagaacucaagaaaugcccuucguuugguggagcacaggggcucugagcucugggaauuauaacugauuagau

SEQ ID NO: 4155765 - RNA, 100 nt, Human
gucuaucuuguguaccaggaguagucacaaggcagauuuucagugugguguagcacaggucugaaucacugugccuaucccagguggcacaguaauagac

SEQ ID NO: 4155766 - RNA, 76 nt, Human
gucuaugagaaaacugaggccaagugaggaaagaugaaauuagaaacauuaucuccugaugcccagauucauagac

SEQ ID NO: 4155767 - RNA, 66 nt, Human
gucuaugcagaugggugccaaagucuggacaguuguguugagacuuuggcacccaucuacaauggc

SEQ ID NO: 4155768 - RNA, 71 nt, Human
gucuauguccuaaucucugaaaccugugccaauguucuauuacauggcagaggagaauuaagauuacagau

SEQ ID NO: 4155769 - RNA, 58 nt, Human
gucuauuuugcaugcagagcaauaugagaaauacauagaagaagcauguguaauaggc

SEQ ID NO: 4155770 - RNA, 66 nt, Human
gucuauuuuugaaagccccucuuaagugcaaagcccagcaccaaggauggguggcaauagaaagac

SEQ ID NO: 4155771 - RNA, 57 nt, Human
gucucaaaucucacucugcauuucucuuauagggacaccugugaguggauuuagggc

SEQ ID NO: 4155772 - RNA, 58 nt, Human
gucucaaggucagcgugaaguucugucagaugaaacuaggauguugcuggccuaagau

SEQ ID NO: 4155773 - RNA, 80 nt, Human
gucucaaguuuauuugaaugauuaucuuucggcauucucuggaauugcuuguugagguguuauuuaauuuuuuuugagac

SEQ ID NO: 4155774 - RNA, 70 nt, Human
guggagaaggggcagggucuccaaggggcauggcugcaugggcacuuuggacccugcacaccagcucuac

SEQ ID NO: 4155775 - RNA, 87 nt, Human
guggagagauuuagaguaagcagaaaaagugggaguuauuaaagaacuaaaugacuuacaggaauuucuccuuucaagacuuuccac

SEQ ID NO: 4155776 - RNA, 77 nt, Human
guggagaguaagguaauaaaagcagguuuugcaauggacaugaaugagcacugauuuuguugcacuuaaauaaccac

SEQ ID NO: 4155777 - RNA, 62 nt, Human
guggagaugucuggaggucagguccugggguccugccccaggucccgccccagcucuaccac

SEQ ID NO: 4155778 - RNA, 106 nt, Human
guggagcagauguguuuuugcaucguugucugagaaaguuuauguuuauuucugcauccuugguucaguagauugcuuuucagacaaugaggcauauccgcuccgc

SEQ ID NO: 4155779 - RNA, 57 nt, Human
guggagcccugccuugcucauguuuuguuauggaggugaagcuagugguugcuccau

SEQ ID NO: 4155780 - RNA, 61 nt, Human
guggagccuuaaauguuugauuugagcauuuaauaagauguuccucacuauuuuggcccau

SEQ ID NO: 4155781 - RNA, 82 nt, Human
gucucccuucucucccucaucccaucgccuaggguguccgggccccuaggagagguaaugaaguucagaaaggccaagggac

SEQ ID NO: 4155782 - RNA, 70 nt, Human
gucuccuaaacauuaaaccacaggaauaugcaagggcaugguuuauugcuuuaaugaaauguagguaggc

SEQ ID NO: 4155783 - RNA, 58 nt, Human
gucuccuauagcugcacugaaucauucuuaacacugagaguugcagcaaaugggggac

SEQ ID NO: 4155784 - RNA, 123 nt, Human
gucuccucaguaaggcauggcuuugauugacagaagacuacugugcguauaugaguucuauugagagcuuuagcccguuggcaguaguugucagaaugucauucacaugcagacaggagagac

SEQ ID NO: 4155785 - RNA, 113 nt, Human
gucuccugguguguaagucucucuccugguucccagcaggaguguaggaaugagugcuuguccuggacucugggcugggaacuagcaccuaguggggacuggacuaggaugac

SEQ ID NO: 4155786 - RNA, 85 nt, Human
gucuccuuagcaucauuagucacuucuuccuucaucacuucccaguggauaggagguuaguaaguggcuuaaccgcuaccgagau

SEQ ID NO: 4155787 - RNA, 88 nt, Human
gucuccuuuagggcuucaucugugccgaaccguacaaacauuuuugugaaggcagagccagugaaaacccugcgaauaaaagugggac

SEQ ID NO: 4155788 - RNA, 75 nt, Human
gucucuaaugcuaaggauuuguuaaggaaucacuaaacacgguuagugcuuaauagauguccagcaucaugggac

SEQ ID NO: 4155789 - RNA, 66 nt, Human
gucucuagccaaagcacaauccauugaauauuauuuauuguuuauuagagauauuugguuagggac

SEQ ID NO: 4155790 - RNA, 72 nt, Human
gucucucagucucugagaggugagaagcagcagugcccaggucuugccuugcuuuggcggaggcuguguggc

SEQ ID NO: 4155791 - RNA, 104 nt, Human
gucucuccuauuucuguguauguuauaaauagagacacuggcugcauuuauucuuaauuguuuuuucaacguauuuauauagcagagccauggaagcuagagac

SEQ ID NO: 4155792 - RNA, 55 nt, Human
gucucucucccaagauuggcuaguguauaguuacuggaccagcugucugaggggc

SEQ ID NO: 4155793 - RNA, 99 nt, Human
gucucucuguuguucuguuucuaguuuaggauccaaucuaagaucccacguuuaguuuuuauaucucuagucuccuuuaaccugaaacaguuucucagc

SEQ ID NO: 4155794 - RNA, 60 nt, Human
gucucugagcucugagcuggcuggggucagccugagcagcgguggaaggagcacagagac

SEQ ID NO: 4155795 - RNA, 73 nt, Human
gucucuggaaggaugucugauugcuugacuucgcagcagccuggucagagccguuagcauucagucugaggac

SEQ ID NO: 4155796 - RNA, 113 nt, Human
gucucugucaacucugcugcugcagcaggaggcuccugcagaugcugggugaaugaaggcgcauggcugugcugcagugagcccuuguugcagaaacaggccccacacaggac

SEQ ID NO: 4155797 - RNA, 57 nt, Human
gucucuguggcaacuacuuagcucugcaguuggagcacaaaagcagccacagaugau

SEQ ID NO: 4155798 - RNA, 76 nt, Human
gucucuguuggugcuuuuccuggcugucaugcccuaguaaccuacugaggucucagguggggaagccacaguuggc

SEQ ID NO: 4155799 - RNA, 74 nt, Human
gucucuucuucucuguaugggauucccuugugaaauauuugggaacucuaucauggaaagcaucgagaagagac

SEQ ID NO: 4155800 - RNA, 106 nt, Human
gucucuuucauucccugauuuagugaggcagauuugaugagguggaaaaacaucuuuagcauguuuaaguacucacagguucugcagcucacagguugagagagac

SEQ ID NO: 4155801 - RNA, 70 nt, Human
gucugaaaauggccugaagaagcaauccuuugaaagcuucuaaucauugauugcugggaccuuuuucaac

SEQ ID NO: 4155802 - RNA, 84 nt, Human
gucugaacacaagagguagcucuuuauggguaaaugccaauuguccacacuugguguccauagugagcacuggugaucucaagc

SEQ ID NO: 4155803 - RNA, 64 nt, Human
gucugaagaguuaauuaugaggugcccuuuacugaagagcaauuauuaugugacuuuuacagau

SEQ ID NO: 4155804 - RNA, 55 nt, Human
gucugacaccuagaguccaggaucagugaacugaucuugguuccguguguuugau

SEQ ID NO: 4155805 - RNA, 57 nt, Human
gucugagccaaaauaaacagcauuugccacuacaaagcuuguuggagauggccagau

SEQ ID NO: 4155806 - RNA, 61 nt, Human
gucugaggcuuguccucucagcuucuuggguuccucugaaggcuaaagaauaagcccagac

SEQ ID NO: 4155807 - RNA, 60 nt, Human
gucugaugagucggcugccaccaggauaggcauccuguugucagugucacucacacaggc

SEQ ID NO: 4155808 - RNA, 77 nt, Human
gucugauggguuuauagggaggcuaacucugaaacacauaccagacugagacugccccuguaacaauuccaauagac

SEQ ID NO: 4155809 - RNA, 62 nt, Human
gucugaugucucugggauuagcuucaaaauaaaauggugagguugggaugagggauacagau

SEQ ID NO: 4155810 - RNA, 79 nt, Human
gucugauuaugagaauaaucugguaaauacuugguuuauauaugugcuaguguuuuuauauguuauucuuauggcagac

SEQ ID NO: 4155811 - RNA, 85 nt, Human
gucugauuucaauguccaaaccucacggcggcuguacgucugagaauaggcugugcgggcagccgugggaggaaggagagcagac

SEQ ID NO: 4155812 - RNA, 98 nt, Human
gucugauuuuuaaugggccaaagcuauuuaaacuguacaugcauuaacaauuuucuuaguggcauguauacuugaguaggagguuauaaagaguagac

SEQ ID NO: 4155813 - RNA, 104 nt, Human
gucugcacaccuagccccagccuuggggguuucugcccuccucucucagucuugugaaaguagggagaccggaggccgccugcaaggggcugggcagccagggc

SEQ ID NO: 4155814 - RNA, 72 nt, Human
gucugccaggcacgugcagcaucaggaaacucauaaaaucuuuucuggcugcuuuuuaacugcuggccaggc

SEQ ID NO: 4155815 - RNA, 75 nt, Human
gucugcccacaauugugaguaugaagugaugagacaauuuaucuuucucugcacuauacaauguuuugggcagau

SEQ ID NO: 4155816 - RNA, 68 nt, Human
gucugccugcuucuucauagucuaugugcucgcucccagugguuuaaaagaaugagggaguagggagc

SEQ ID NO: 4155817 - RNA, 58 nt, Human
gucugccugggacgcugggagugugugagcagauuuggugccagaggcccgggcaggc

SEQ ID NO: 4155818 - RNA, 99 nt, Human
gucugcucagugauguggcaguaguggaucaaaaauaucuguuuggaggucagacaggccuagauucacugcugugcaauuuugaguaaguuccuugac

SEQ ID NO: 4155819 - RNA, 58 nt, Human
gucugcugacagagcauggaccucaguuuuagguucuaccuacccucugcauacagac

SEQ ID NO: 4155820 - RNA, 62 nt, Human
gucugcuuuagugugguguuagagaaggccuugcuucccuagugucaugcuaaaguacaggc

SEQ ID NO: 4155821 - RNA, 64 nt, Human
gucugcuuuuguuuuacugguacuaggucgggaaagaaaugcucagugaaacagaaguccaggc

SEQ ID NO: 4155822 - RNA, 77 nt, Human
gucuggaccccuccccacgaguagguaacccaggccuccugccucucuggggccuccaggccuacucagggccagac

SEQ ID NO: 4155823 - RNA, 60 nt, Human
gucuggaccuuggacuccuuaaugguacuuacuagaagggagcucuuuggucuugccgac

SEQ ID NO: 4155824 - RNA, 67 nt, Human
gucuggagggugggccagauaugaggggcuaggcaugcugggugcccucgucugguuucccuuuggc

SEQ ID NO: 4155825 - RNA, 56 nt, Human
gucuggcagccccuccaccuggcuacugaagccagucaggugugggggcugcagac

SEQ ID NO: 4155826 - RNA, 85 nt, Human
gucuggcauagaauuuagaauuuuagccugacucugagaggcacacuuucauggaggcuuuggaaucagaguucuguccugagac

SEQ ID NO: 4155827 - RNA, 57 nt, Human
gucuggcauucuuccuggagaauaaacucuucacugggaaaauagaguguccuugac

SEQ ID NO: 4155828 - RNA, 57 nt, Human
gucuggcccucugcaagauucuggacacuauggugugcaagaaagguggggccaggc

SEQ ID NO: 4155829 - RNA, 55 nt, Human
gucuggcuuugcucagaugcugcuugagcagcaucuugaaggguaaaccaaggac

SEQ ID NO: 4155830 - RNA, 64 nt, Human
gucugggcagcagcauuucuuauccagcaucacugggcaggcucucagaugugcaggcucaggc

SEQ ID NO: 4155831 - RNA, 55 nt, Human
gucugggguaucugccacaacucugcaaugcguagaguggcaccuuaccugagac

SEQ ID NO: 4155832 - RNA, 65 nt, Human
gucuggguccuggcuuugucaggguuucugaaugaugaaaucugugggcucucaggaucacagac

SEQ ID NO: 4155833 - RNA, 86 nt, Human
gucugguaggggcugcucucugcuucugggaugguggcuugcugcuacaugcuccugaggagaagagugcuagguucucacaugac

SEQ ID NO: 4155834 - RNA, 110 nt, Human
gucuguaauuauuuauucauuuauuuuugcacuugucaaauauuauaguacaccuacuaugugcuagguaacaugcaaguuucuggagauaagugaugaaccaggcagac

SEQ ID NO: 4155835 - RNA, 83 nt, Human
gucuguccagcccuccugggaucacaguaagaagcccccagcuccuauucugaggcccaagagauggcccuugaggcaaugac

SEQ ID NO: 4155836 - RNA, 74 nt, Human
gucugucuuccagucuucccagcugcugcgaugccacugagcuggcugggucccagcugggaggaggagcagac

SEQ ID NO: 4155837 - RNA, 107 nt, Human
gucugugagcucuggguguuccauccugacuugauaccccucccaaaggacccuaaaaagcagggaggugugcaggaugaaccccucagcccccucacuguagagac

SEQ ID NO: 4155838 - RNA, 71 nt, Human
gucugugaucagggaacauguguuguguccuauuauccccagaacauuguacaaaugccugacacacagau

SEQ ID NO: 4155839 - RNA, 56 nt, Human
gucuguggucccugcuggggacagauugugucacgugagccucacagggaccagac

SEQ ID NO: 4155840 - RNA, 65 nt, Human
gucuguguccucccugucccccagagcagacacccucucugugucuggaccggggaggagcagac

SEQ ID NO: 4155841 - RNA, 66 nt, Human
gucuguucagggacccgcacagguagcaugccugguagcacaccuuuaggugggucccauggugac

SEQ ID NO: 4155842 - RNA, 120 nt, Human
gucuguucuaacuugugcagagaaaaugaguuuuuaauuacuucugccaaccucggaacugccggucuuggaggcauuuguguggcggaaggauuccaccuguaggagugggugauaggc

SEQ ID NO: 4155843 - RNA, 100 nt, Human
gucuguugcuaguuggacagucgguauggccuggaggagaagggcuguuuguauuuccaugcauccuccuuuguccucuugcccugggugaagcaaugac

SEQ ID NO: 4155844 - RNA, 55 nt, Human
gucuguugggcaucggcucauggcuuagggcaggcuacugggcaagcccacagac

SEQ ID NO: 4155845 - RNA, 56 nt, Human
gucuguuuauauguuuuucagaccugagauauuauggucgaaaaagauaaacaggc

SEQ ID NO: 4155846 - RNA, 61 nt, Human
gucuguuuccaguucuguguccucagagccauccuccucaacacagcugccggagacggau

SEQ ID NO: 4155847 - RNA, 58 nt, Human
gucuguuuugguggucacuguuucuuuagcaccuagcaagcaguccaaaagggcagac

SEQ ID NO: 4155848 - RNA, 80 nt, Human
gugggggcguccgcuggcugggugcuccaggggugcucggaggagcagcuucuguuucuagccccugugaacguguccac

SEQ ID NO: 4155849 - RNA, 130 nt, Human
gugggggcugagcggcacacagcuuuccauguguguugugcgugucacugaguggcccgugaaguccaguuauugugugcguuagccuaugugggccguguaucuaaauguguguguuguguguguuuac

SEQ ID NO: 4155850 - RNA, 65 nt, Human
gugggggguguuggccuuaaucuggaauggcaacuguauuucucaucaagugccaacucugacau

SEQ ID NO: 4155851 - RNA, 82 nt, Human
guggggguggcuguccugugcauuguaggguauugaguggcaccccuggccucuacacacuagaugccaauagcacccccac

SEQ ID NO: 4155852 - RNA, 115 nt, Human
gugggguccaagggcuuccuggggaagcggaugagcuuguagcaguacuccuucaacuggaguugcuggcauuucaggacucacccgacuuguucuaaugucuccuuggauccac

SEQ ID NO: 4155853 - RNA, 74 nt, Human
guggggugguacaggugggcaccgugcugcaugucacaggaugucaggcagcaucccggccuccacugucccgc

SEQ ID NO: 4155854 - RNA, 63 nt, Human
guggguccuuugaaaggggugugucagugggggagaacuugacaccccauggggaggggcaac

SEQ ID NO: 4155855 - RNA, 64 nt, Human
gugggucuaggaagauaccugagauacugcacuucuaacacacuuucaggauucuagaccacac

SEQ ID NO: 4155856 - RNA, 62 nt, Human
gugggugaaagggcgugggggugggagccuggcauccuccucucugggccauuuucuuccac

SEQ ID NO: 4155857 - RNA, 84 nt, Human
gugggugcucgaugagcaauuguuaaacuuaccaaaauuaagccuaucuaacuuugacaaaauuaugcuaauauugauccccau

SEQ ID NO: 4155858 - RNA, 97 nt, Human
guggguggagcagucuaggaagggcucacaggagggagagacacccaggacugagagcccuacucucccuccuuccccuggaagcugggccaccugc

SEQ ID NO: 4155859 - RNA, 88 nt, Human
gugggugucacauagggcguucucugcaugaugcuguugucgcugggccugagaagcagccucccagggagcagccuguggaccccac

SEQ ID NO: 4155860 - RNA, 75 nt, Human
gugggugugauaagaccaagggcuucaaaagcauauguacaaugggcuugucccuuguguuucuauuauggccac

SEQ ID NO: 4155861 - RNA, 56 nt, Human
guacucauugauuccuuuacucaguaaacaguauugagugcaaggcacugagauac

SEQ ID NO: 4155862 - RNA, 100 nt, Human
guacucggguguggugucuuagcuguauuccugcacuguauagagguuuugagggugacuucuuaauuugugcagugucugagaugccgugucugggugc

SEQ ID NO: 4155863 - RNA, 73 nt, Human
guacugcugcgguaccugcuacuaccgcuucugcugcaagaagcgccacgagaagcuggaccagcgccagugc

SEQ ID NO: 4155864 - RNA, 82 nt, Human
guacuggcuuugagggaauagcuacagaacaaaugggcagaauuucacuaaucacuaguauuuccuguaagcuauaggguac

SEQ ID NO: 4155865 - RNA, 58 nt, Human
guacugggaauggagccugggccucggcaccaugcccagggccgccacuuuccagugc

SEQ ID NO: 4155866 - RNA, 71 nt, Human
guacugggcagcugugcaaacaauauuaaaacagaaaaaauauuuugugccaugcacugccuugauuguac

SEQ ID NO: 4155867 - RNA, 83 nt, Human
guacugguagugcacugagcugauuucaggugccgcaacuuaaagagaaugugaggaaauuggagugguucagggaccaguau

SEQ ID NO: 4155868 - RNA, 129 nt, Human
guacuugguugcuacagcccuuggacaauguccaccgugaugauggaaugugaagauaaauaagacacaauuccugucaucacaguggccacaaucuagaaggcacagcuguggacauuuuuaaauuac

SEQ ID NO: 4155869 - RNA, 86 nt, Human
guacuuuaauuaaauugguugaaaugaaagguggugauugucaagccugacaaacuaaaauucuuuauugaaucuaauuagggugc

SEQ ID NO: 4155870 - RNA, 69 nt, Human
guacuuuauaagguaugaaaaguaaaugggauuugcaaucaccauuucugcaauguaccuuugggcugc

SEQ ID NO: 4155871 - RNA, 55 nt, Human
guacuuuguuaccauagcuccaggaaacuaauggggaacaggacugacacagugc

SEQ ID NO: 4155872 - RNA, 100 nt, Human
guacuuuucaaaaacauaaaauguucacccuuuagaaggcaucucaguuuuuaaaaaacuggcagccacaacuggcaggggagauuuuaguaauagguac

SEQ ID NO: 4155873 - RNA, 55 nt, Human
guagaaaaagcaguaagucucagucaucugguauuuggacuauugcucuuuuugc

SEQ ID NO: 4155874 - RNA, 73 nt, Human
guagaaaauaauaucccaggugggcaccucgaggaagugucuuucucuggcgcccuccuggaauugugacuac

SEQ ID NO: 4155875 - RNA, 69 nt, Human
guagaaagaaauucagauuggcugccuuaucagcucucacuaugaucaaguagccugguuccuuucugc

SEQ ID NO: 4155876 - RNA, 65 nt, Human
guagaaaugguguguuucuucucugacuaaauguaaugcccagagaauggacucagaguuuuuau

SEQ ID NO: 4155877 - RNA, 72 nt, Human
guagaaccaugugauguugcugauauuauguuguuuuugacccagaggaacagcaauuucauuugguuuaac

SEQ ID NO: 4155878 - RNA, 81 nt, Human
guagaacgagaaaagcgaaggaccuggagugccuucagcaaugcacugagucucuuuccucgcuuucauuuugguuucuac

SEQ ID NO: 4155879 - RNA, 57 nt, Human
guagaacucucgcuggaucagacuuccucauagagaggucucuggggggaguauugc

SEQ ID NO: 4155880 - RNA, 84 nt, Human
guagaaggcagagcugauagagagaaacagauuugcgauaauagcauuucuaccuugucuuuucuacuguaagcauauuuuuac

SEQ ID NO: 4155881 - RNA, 76 nt, Human
guagacaguugauauaugggucuggaguuaagggcaagaucaagacuggagauaaaaccaugagucaucugaguau

SEQ ID NO: 4155882 - RNA, 79 nt, Human
guagaccugaguucuaaggcuuuccuugucaucuuugacucuucaaaguuuagggaagggaagccuuauaucacacuac

SEQ ID NO: 4155883 - RNA, 64 nt, Human
guagaccuuggugugagggaagcugcaaagaacuccucugugugcccaccugacaccuggcugc

SEQ ID NO: 4155884 - RNA, 80 nt, Human
guagacuaucaaaaguucuauguaauguuuuuuguauugcuauaaacaaauagugcaugggaauuuauaugacagccugc

SEQ ID NO: 4155885 - RNA, 75 nt, Human
guagacugcacagauuaaguuagauuuagagaaaaauuuuuguuccuuaauaugaauauaagcugugcaguuuau

SEQ ID NO: 4155886 - RNA, 74 nt, Human
guagagacgggguuacucuguguuggucaggcuggucucgaaguccugaccucaggugauccaaccaccucugc

SEQ ID NO: 4155887 - RNA, 99 nt, Human
guagagacugaaauguccucucuucuaauuuucccgaguauuugaguuaacuacacaguuauacaucuggaugaauaggagagugauuguaguguucac

SEQ ID NO: 4155888 - RNA, 83 nt, Human
guagagaggaaugaaguagggugggcaguucuuggggaagaaggauuggcuuccuuuggcuggucaccuucaaagcuuucuau

SEQ ID NO: 4155889 - RNA, 61 nt, Human
guagagauagcugaauucaggcacuuaaacgauguuaggauccuuuuucugcuguuuguau

SEQ ID NO: 4155890 - RNA, 72 nt, Human
guagagauggguucaccauguuggucaggcuggucuugaacuccugaucucaagugauccacccaucucggc

SEQ ID NO: 4155891 - RNA, 58 nt, Human
guagagcagagacuaagacagagacugugcauuccccucugucucuccacugcccugc

SEQ ID NO: 4155892 - RNA, 69 nt, Human
guagagggagaggucuggguuuccauccagguuccaugccucuuagaucuaauuucuccaaaucucuac

SEQ ID NO: 4155893 - RNA, 58 nt, Human
guagaggggugauucugugagacugauaggccugacuauucucaauucuccccacugc

SEQ ID NO: 4155894 - RNA, 80 nt, Human
guagagggugcuggagagacauugcagaaggaaagaguuuugccuucucauuccaguguccucuccuagcagccuccuac

SEQ ID NO: 4155895 - RNA, 82 nt, Human
guagauaaccaauccugugcaaugacugcaucucgcugggaaaaucaggaaggagcacuugcuguaaggauggauauuggac

SEQ ID NO: 4155896 - RNA, 72 nt, Human
guagauaggauuugcauuuuuacaaguagccaguuggugcugcuggaacugcuuugaaaaucacuggucuac

SEQ ID NO: 4155897 - RNA, 91 nt, Human
guagauaguagcucagcaaacuauuguucacaagacaagcuggccugccaccuaguuuugaaaauaaaguuuuauuuggauauaaucaugc

SEQ ID NO: 4155898 - RNA, 60 nt, Human
guagauauguguugggcacucaaaaacugagucaguuuaguauaccaguacaucuucuau

SEQ ID NO: 4155899 - RNA, 68 nt, Human
guagaucucagacuuugaaauuuauaaugaaacucaucucauuuucuguuuuuaggucuuggguuuac

SEQ ID NO: 4155900 - RNA, 101 nt, Human
guagaugacuccagaggggagacaggauuuaaccaaagcuaacuagcagaacuaguuggagcucuuaguuugguguucuuucugcuacucacagucaauac

SEQ ID NO: 4155901 - RNA, 71 nt, Human
guagauggaaguucaggaacauguuggaaagaaaucaagauaacuagauuuucuuguuuuaacuucccuac

SEQ ID NO: 4155902 - RNA, 100 nt, Human
guagauguauguggaguuaagucguggaugauucuucgguuuaaauuauuuucuuguuucugugggaucccaugacuuuccagacaucacucaccucuau

SEQ ID NO: 4155903 - RNA, 85 nt, Human
guagauuaauuuuaugucaucugugucaguuaggcuuucuaccuuaugagcuaugcagaauuuagugacuuaaaacaauaucuau

SEQ ID NO: 4155904 - RNA, 57 nt, Human
guagauucuuggaauucaagucauaucacugaauuagaguagagccuaagaaucugc

SEQ ID NO: 4155905 - RNA, 74 nt, Human
guagauuguaaugguguggugugggaagcaggguaauaauuccuuucuuuuauccaccagccagacaagcuuau

SEQ ID NO: 4155906 - RNA, 78 nt, Human
guagauuucugauucuuuggccuuuauugacagaagaaaacacauuuugucagcaugucagccaaagauagcauuuac

SEQ ID NO: 4155907 - RNA, 74 nt, Human
guagauuuuuacccaggggcugagcagagguucugcuucugguuguacuucuguuucugcuucugguuguguac

SEQ ID NO: 4155908 - RNA, 129 nt, Human
guagcaguuugucuauuucuucuuuuuaggucuucagcaaaaagaacagcuggucucaaucuuuucuaugucaguuuuucacaugcuuggggacuuaaaauggugagcuaggucaugccugucaauuac

SEQ ID NO: 4155909 - RNA, 85 nt, Human
guagccaguaagugguagaguugagauuuaaucccaggacugacugauugcagaaccucaacucuuaaccacuauacuacccugc

SEQ ID NO: 4155910 - RNA, 86 nt, Human
guagccaguugacuuugcaaaugugaguuuagacugcauuccaaaugcaguuuaguguugcauuuggaguuacauaguuugguuau

SEQ ID NO: 4155911 - RNA, 80 nt, Human
guagccccauucuauguuaauauuucagaguggugccaucuucuugcacagaacuucaaacaauuaacagagaaugcuau

SEQ ID NO: 4155912 - RNA, 84 nt, Human
guagccguggaaaauucucagucaguuuggacuguguacauucuggcccuuucauauacacagacuaauuggugacauggcuau

SEQ ID NO: 4155913 - RNA, 73 nt, Human
guagccuagaggucacgucuucauguuccauauuggaugccaaagaguuuaguggaauuuccuucuggguuau

SEQ ID NO: 4155914 - RNA, 76 nt, Human
guagcuaaagagaaccuugagauuuacuuggcuuagcacacucuccauggcaugccauuucuucucuuuaugcuac

SEQ ID NO: 4155915 - RNA, 93 nt, Human
guagcuaacaguuauugaguaguuaccaugugccaggagcuaucuuuaguuuuugacauggaauaacucauuugaugacuauaaacaugcuac

SEQ ID NO: 4155916 - RNA, 62 nt, Human
guagcuguguuccucgcuggguguccacagcuacuauugggcagcccaucucccacagcuac

SEQ ID NO: 4155917 - RNA, 73 nt, Human
guagcuuauuguauaaggugauuuaugauacauaaaacaucacugugcauuuguuaccuuauugcagacuuac

SEQ ID NO: 4155918 - RNA, 74 nt, Human
guagcuuuucuuagcacagauucugggaacaugacuuugacgaugaugacaguggucugggcuaaaugagguac

SEQ ID NO: 4155919 - RNA, 92 nt, Human
guaggaaaaugaugcuaaagcugagacacuugagagacuauucaguguggugcuguggacuuuuuugugucuccuuuauaccugcauccugc

SEQ ID NO: 4155920 - RNA, 75 nt, Human
gugauuucaucaacccauguuggaagcuuaucagacacugcugguauggggcaaaaacuggggagaugaaaccau

SEQ ID NO: 4155921 - RNA, 72 nt, Human
gugauuugcaugccccuguugucuuaaaauggccuaaugucacagcagauccagggguugugucuuugucac

SEQ ID NO: 4155922 - RNA, 77 nt, Human
gugauuuugaugaaugucuguccccuagcccugauugacaccagcaggcuguggaggaugacaaauugucagacaac

SEQ ID NO: 4155923 - RNA, 74 nt, Human
gugauuuuuuuuaagaaacuauggagaagaacugguaugaaacuagaguucuucccuuuucuauggagaaucac

SEQ ID NO: 4155924 - RNA, 63 nt, Human
gugcaaacuuucagggacuuagugucaguuucuauuagaaacugaaaaugguguccugugcgc

SEQ ID NO: 4155925 - RNA, 78 nt, Human
gugcaaaggcacacaguuagauagagcauccuguugguuaugugucucuccucaaacucauaucagugugccuugcac

SEQ ID NO: 4155926 - RNA, 85 nt, Human
gugcaaaguacuggucagugcuugaagggcagagagauggaauuucacuuacuuuaaagaacugauuauuugaauguuuuuguac

SEQ ID NO: 4155927 - RNA, 128 nt, Human
gugcaagagugcguuuggguggguguaguguauuugugugcaugugugugcauguucauguuuacaugguucguguaugugccugcauucacauguacgucugugugcauguguacuugcuuuugugu

SEQ ID NO: 4155928 - RNA, 83 nt, Human
gugcaaggagaccacagagacagagcccagggugccucuuguacaagaacccaggcugcuucucaguggcgcucccuccccac

SEQ ID NO: 4155929 - RNA, 56 nt, Human
gugcacacauguauguauaugugugugugaaugcauaugcacauacgugugugugc

SEQ ID NO: 4155930 - RNA, 66 nt, Human
gugcacagaucuuugagaugauucuauuguguuuagacuaauaacuucaucuucaggauaggugac

SEQ ID NO: 4155931 - RNA, 67 nt, Human
gugcaccaggcacaguuccaagcauuuuauauauauucuauagacuuacauauugucccuggggcau

SEQ ID NO: 4155932 - RNA, 76 nt, Human
gugcaccgugcgcaggagcucugccaggagauggaaaacaagcuccuucacgcaggcugccauguccgugguccac

SEQ ID NO: 4155933 - RNA, 71 nt, Human
gugcaccucugagucucacuguaaccuuuuuugucauugaaaggugcuaauugaucuuaggguacugacac

SEQ ID NO: 4155934 - RNA, 67 nt, Human
gugcaccugaauggaacuuugaaccuccaggccagccugcacagguguucagagcuauucuguggac

SEQ ID NO: 4155935 - RNA, 77 nt, Human
gugcacugacaccaacacaguguuuuuccuggugacaggcaccagggcagcuuccuuuguuaggucagucagugcac

SEQ ID NO: 4155936 - RNA, 88 nt, Human
gugcacuggcuggcaaguuacuggcaagggcugcaguuuuggcugauagcaguuguuuucagugagugguuauuacugcaggguguac

SEQ ID NO: 4155937 - RNA, 62 nt, Human
gugcacuuugggagucucagugguacccaguggcgggggccguggggcuuggccaaggugac

SEQ ID NO: 4155938 - RNA, 58 nt, Human
gugcagaacgugcagguuuguuacauaaguauacacaugccaugguuguuugcugcac

SEQ ID NO: 4155939 - RNA, 87 nt, Human
gugcagaagacagauggaucuuggagaaugacaguggauuauguaagcuuaaccagguggugacuccaauuccugcugcugcuguac

SEQ ID NO: 4155940 - RNA, 55 nt, Human
gugcagaccuuaguucaagccaucagguuagacuuggcuuagacugaguucucac

SEQ ID NO: 4155941 - RNA, 62 nt, Human
gugcagagccauccaggugccuguugauuuucauuacagcagcaaggccuggaacucuccau

SEQ ID NO: 4155942 - RNA, 90 nt, Human
gugcagauaaguaauugaguuuggaagaauuuggucuguuuucauuuuguaaacauucacuauguccaaacucugugcuacguacuguac

SEQ ID NO: 4155943 - RNA, 77 nt, Human
gugcagauggcagagaauaaaucuugacuuugcaaggaagauaaagcaagguggagguguuuucaucgcaaucgcac

SEQ ID NO: 4155944 - RNA, 71 nt, Human
gugcagcaagacaauggagcauaaacguggacaaagaagauaaguuuguguuugucugcaugucucgccac

SEQ ID NO: 4155945 - RNA, 56 nt, Human
gugcagccaccauacagcagaagcuaguagccaagcauuugaaauguggcugaugc

SEQ ID NO: 4155946 - RNA, 74 nt, Human
gugcagccacuuguucauauacccucuggaucagguccccuggacaugggaugagaugaagcauaugguagcac

SEQ ID NO: 4155947 - RNA, 69 nt, Human
gugcagcuuuggagguggaacucuauuuucacacuuuucuauggagccuuccgagucccagguuuucac

SEQ ID NO: 4155948 - RNA, 69 nt, Human
gugcagcuuuuaauuguuuucaauguuaaugaugguauuuaugguaauuaacauacaaaacagcuguac

SEQ ID NO: 4155949 - RNA, 99 nt, Human
gugcaggaugcccaggggccauguggagaggagacggugcagcccugggaaucuggggcaggugaccucuuguccuggccugugaggccgguccugugu

SEQ ID NO: 4155950 - RNA, 65 nt, Human
gugcaggcacuggcuguggccacggcugcucugacggcacagcugccuggccggagccacuggac

SEQ ID NO: 4155951 - RNA, 58 nt, Human
gugcaggcauugggcuagccaugccuauggcguuagugcauggcccagugcuuugcac

SEQ ID NO: 4155952 - RNA, 73 nt, Human
gugcaggcucuggaguaggaucacuggggaucuaaucacagucccacacugaccagcugugagaccugagcac

SEQ ID NO: 4155953 - RNA, 58 nt, Human
gugcagggcagguguccuuccagguccaagggaggccagggcagggccguugccucac

SEQ ID NO: 4155954 - RNA, 57 nt, Human
gugcagggguuccaggcuguagugcaccaggaucucaccugugaauagccacugcac

SEQ ID NO: 4155955 - RNA, 95 nt, Human
gugcaguaaaggaaaaauuauaggcugagcuuguagaucguaacaagcuaaugauaggacuaucagccaguucagaguauucccuaaaacuguac

SEQ ID NO: 4155956 - RNA, 61 nt, Human
gugcagucagguuaaggccuucccaggccucuggccugagaguugcccuacuuguuugugc

SEQ ID NO: 4155957 - RNA, 55 nt, Human
gugcagucccuccucccaaggcacaaagagagucuuggaaagaguggauuugcau

SEQ ID NO: 4155958 - RNA, 78 nt, Human
gugcagucuuuucuaugucuuuuucucacuauaguacaggacuaugggauaagagaaaggcaaagcuaaugacaguac

SEQ ID NO: 4155959 - RNA, 89 nt, Human
gugcaguggcucaaucucagcucugccuccuggguucaagcgauucucuugccuuggccuacuuaguagcugggauuacaagcaugcac

SEQ ID NO: 4155960 - RNA, 61 nt, Human
gugcaguucuaaguagacaagucccugugaggaaggggagugaguacuggaguagcugugu

SEQ ID NO: 4155961 - RNA, 73 nt, Human
gugcauaagggaagaagacaagaaaaugauauugucguuuaauaguucacuuuagaucuucaucucuuaucac

SEQ ID NO: 4155962 - RNA, 66 nt, Human
gugcauacagaaguguguguguaggaaugcacauggcguguauguguguagacacuucuguagcac

SEQ ID NO: 4155963 - RNA, 60 nt, Human
gugcauauaugcacauaugugugugugcaugcauuugcuuuuaugugugcauuugugcau

SEQ ID NO: 4155964 - RNA, 56 nt, Human
gugcauccacugcgcauccccaguguccaggcagggccugcacacaguaggugcac

SEQ ID NO: 4155965 - RNA, 61 nt, Human
gugcauguaaggagcccucagaggaaggaugcccauuugaacuaccucuccuuagcagcac

SEQ ID NO: 4155966 - RNA, 97 nt, Human
gugcauguguauguuuagaaacaggaggccuuccaguccagauucuggucuugguauuuggaaggaccaggccuugauuuugagcagaaauaaccac

SEQ ID NO: 4155967 - RNA, 57 nt, Human
gugcauuaacaacccagaacucuagccauauauuugaguuuggcuuguuuauuguac

SEQ ID NO: 4155968 - RNA, 65 nt, Human
gugcauuaguuuccuauugcugcugugacaaauuaccacaagcuuaguggcuuaaaacaaugcau

SEQ ID NO: 4155969 - RNA, 81 nt, Human
gugcauuggccuggggaccuggccaccuucccacuucugccccucaggucgcagaugaagguggcccggguugaccugcau

SEQ ID NO: 4155970 - RNA, 57 nt, Human
gugcauuggugcgccacuucacccugugcucccuaacagcccugugcaucagugcau

SEQ ID NO: 4155971 - RNA, 55 nt, Human
gugcauuugacgaauacucacugggguaauucacuguguaauuggccaaaugcac

SEQ ID NO: 4155972 - RNA, 77 nt, Human
gugcauuugcccuggagucaggauacauggauucuugucuucuuuuugccccaucugugugauuucagggaagucac

SEQ ID NO: 4155973 - RNA, 76 nt, Human
gugccaacaggacugucgucucccugacaccuuggcucacaugccacggaugucucuggcugcagccuguucucau

SEQ ID NO: 4155974 - RNA, 56 nt, Human
gugccaagaccauuuaauggagaaagaauaaucuuuucaacaagugguguuggaac

SEQ ID NO: 4155975 - RNA, 72 nt, Human
gugccaauggccucagaacggaaaugguuuuggccacgggaaagccaguugcuuccgucucugagacaucac

SEQ ID NO: 4155976 - RNA, 67 nt, Human
gugccacaugguccauguaucaaggggccagcaccagucucugguuucagauacaggauaugggcac

SEQ ID NO: 4155977 - RNA, 60 nt, Human
gugccaccucugccccagaggguauauuuaaaaucauuccucaugucacagaucagguac

SEQ ID NO: 4155978 - RNA, 67 nt, Human
gugccagaccacuguguuugagacuauuuuaaccagcugaugggauacuuuagacauugucugguau

SEQ ID NO: 4155979 - RNA, 55 nt, Human
gugccagagauuccuaaacuuucuguguucagggugccauuaguugucuugguac

SEQ ID NO: 4155980 - RNA, 66 nt, Human
gugccaggacaaggaccacaugguauucaacauugcuuccucagugccugguacuaugucuggcac

SEQ ID NO: 4155981 - RNA, 73 nt, Human
gugccaggaguggagacaggacagucgauacaagaggggccccugucaugucagcugcugaguccccuggggc

SEQ ID NO: 4155982 - RNA, 69 nt, Human
gugccaggcaagggggcgccaccuuccgcgguguggcgcgggggccgggggucccuuugggcugggcac

SEQ ID NO: 4155983 - RNA, 64 nt, Human
gugccaggcacaggaagcagcccccgagacacguuuucgcuggagguuucucugggcuuggcau

SEQ ID NO: 4155984 - RNA, 59 nt, Human
gugccaggcauggugcugggcuaugaccuacaguaucucauucucccgugccauggggc

SEQ ID NO: 4155985 - RNA, 101 nt, Human
gugccauagagugauugagggucagagcuaggagcuggaguuccuggguucaaaucccagcucugccacuuccuagcuaugugaugucaucucucuaugcc

SEQ ID NO: 4155986 - RNA, 112 nt, Human
gugccauauaaaaggcuugauaagagaugagcugucuagcuguuggaaucaagcauucugacagcuucaguaguuuuuaucuuguuuuauuugccucauuucuguuuggcac

SEQ ID NO: 4155987 - RNA, 68 nt, Human
gugccaucuuaggugaugauugaugugaaguaauauaucugucaauuauucacauaggccuggggcau

SEQ ID NO: 4155988 - RNA, 76 nt, Human
gugccauucugcagccucacuaguuucaguauaauuuuuuaaaucacaugccauuauugaggguguagauuggugu

SEQ ID NO: 4155989 - RNA, 71 nt, Human
gugcccaaaccuggcuguugauaauuaauaauaguuaacaguaucaacaauagccaguguuuauugagcac

SEQ ID NO: 4155990 - RNA, 71 nt, Human
gugcccaccuggggccucugagucuccccagccagguggcccugaggcuccccaugaggccccagcugcau

SEQ ID NO: 4155991 - RNA, 100 nt, Human
gugucaaacaaaucaauaaugcaggcagccuucucgucucacaguucagcuccaucuucaccagguggguauggagaccaagaaugugcugcuuugacac

SEQ ID NO: 4155992 - RNA, 55 nt, Human
gugucaacagccgaagauaaauacgauuuuaucagcucggaaucuguugaaacac

SEQ ID NO: 4155993 - RNA, 56 nt, Human
gugucaaugagguuuauuuuugucuuucacaucuugagacugaaccucauuugcac

SEQ ID NO: 4155994 - RNA, 59 nt, Human
gugucacaagagcccaggaaacacuuuggcccccaaagaaucuuuucucucuuggauuc

SEQ ID NO: 4155995 - RNA, 84 nt, Human
gugucacacucuucucaugaaauguagggagccuagacauugauauuuucauggcaucuuugggcugcauggaaggggugacac

SEQ ID NO: 4155996 - RNA, 72 nt, Human
gugucacuuuggcuaguucauuacauaugcuuuuugauugcaguuagagccuuuggagcugcuauuaggcac

SEQ ID NO: 4155997 - RNA, 74 nt, Human
guuauggugcaaccccagauuguaucuccaaggaaauugacaggagaagcaccugcaguugacaaaaauaugac

SEQ ID NO: 4155998 - RNA, 64 nt, Human
guuauguaaguuucugaaaaaacugggcaauggauuugucuuacuuuuucugggcuuccauagc

SEQ ID NO: 4155999 - RNA, 59 nt, Human
guuauguacaaucuaucacaagaagcauagcugugcauucaugagcugauuguauuaac

SEQ ID NO: 4156000 - RNA, 129 nt, Human
guuauguagaauuuuagugaacuuucagggaauuccagaugaagaucauagaauaguauccuuauuaggauagacaauacucaugcucuuuuucuaauucagaaaguugauacuaauauuuauaauaau

SEQ ID NO: 4156001 - RNA, 68 nt, Human
guuaugucugcagcaagagguuucuguugaccacuggugguucacagggauccuuguugaaaaauaau

SEQ ID NO: 4156002 - RNA, 56 nt, Human
guuauuaguaagacucgcacauugcccaaaccaauguguagguuucuuuaguauac

SEQ ID NO: 4156003 - RNA, 80 nt, Human
guuauuccuccuugcuucagaguuuagcugguguuugccuucaacaacaggaaauacuuaugagguaggaaggcuauggc

SEQ ID NO: 4156004 - RNA, 63 nt, Human
guuauucguguuuuguaaaauguguuaaaugcuuguuaaacacauuuuguuaaacccugugac

SEQ ID NO: 4156005 - RNA, 55 nt, Human
guuauugacauguauuaagcacagaauucccaaaugcuaaaugcauguuaauaac

SEQ ID NO: 4156006 - RNA, 56 nt, Human
guuauugcaguauagaggucuaagcaccaauucuuagaucauauacuugccaugac

SEQ ID NO: 4156007 - RNA, 64 nt, Human
guuauugcuaugaugauguguaguuauugauaugauaauauauuguuguuagcaaacagguaac

SEQ ID NO: 4156008 - RNA, 101 nt, Human
guuauuguucugaguuuauuauccuauuuugauuuuaauaggcuucuccuucuugcugagaagccuuugccuaaaacauuaaauaggugagaugcaaugac

SEQ ID NO: 4156009 - RNA, 82 nt, Human
guuauuuagcgugaaccuggagcuaguaguuucaugaguuugaucccaacauggcuaaauuagcuuuacucuguucuaugac

SEQ ID NO: 4156010 - RNA, 67 nt, Human
guuauuuauaagguguaacuccucacuguagcagauguugcuuguguuaguuucaguuuuaggugac

SEQ ID NO: 4156011 - RNA, 130 nt, Human
guuauuugcauacauuuugggcauguaggcagaauggcucaaagacaaaaaucugagguucagccuuguuuggccuccugguguuugaucuugaccgggcuaccugcuucucugacuggcaugcaaaugc

SEQ ID NO: 4156012 - RNA, 64 nt, Human
guuauuuguguugaguauauaguaggucuacagaacugaaauaaauguacuccccacaagcaac

SEQ ID NO: 4156013 - RNA, 83 nt, Human
guuauuuugcagagucaauuuucuguuacauaaucacauagacuuguaucuaaugcaacagaaaauugccuggguggaauaac

SEQ ID NO: 4156014 - RNA, 77 nt, Human
guuauuuugcuuggugcuuaaucuuguuaaauaaggaagaaauuuccacaagguuugguaccacauccaaaaccaac

SEQ ID NO: 4156015 - RNA, 81 nt, Human
guucaaauguuuauuucagauucgagaggaaguggagugguuccuuuccauuuccucgucucuggaaucugcgaguuguau

SEQ ID NO: 4156016 - RNA, 104 nt, Human
guucaacuccaagcugaugaccagugucgaccgccagucauucugaacauuugaccaguugagcuuucaaaugauggcaguccuggcugacauuuugggugaac

SEQ ID NO: 4156017 - RNA, 55 nt, Human
guucaaggagcagcuugcuacaguuuccguuucugcuggugcgcuguuccugagc

SEQ ID NO: 4156018 - RNA, 75 nt, Human
guucaagggauaaauugaguucaggcaugguuugauccaggagcuccuagaaugucaauaacuuuaucccucagc

SEQ ID NO: 4156019 - RNA, 67 nt, Human
guucaagucuggggcugccaguaaagagauaccccaguaucugaucuuggcugccugagauuagaau

SEQ ID NO: 4156020 - RNA, 80 nt, Human
guucaaguuaacucuccuuguacuguucauccugauucuccucuuuccagauuuucaguguaaggaguauaggcuugagc

SEQ ID NO: 4156021 - RNA, 77 nt, Human
guucaaugucauuuaaagaguucuguuugagcugaaaggggagaauccuuguuuagggggcagagguggcauuaggc

SEQ ID NO: 4156022 - RNA, 96 nt, Human
guucaauuuugaaaaaucauuuauuugacuuuggagugaucauuuaauauauacauguccuauguugaaggcaaagaaugaucuuuaauuuugaac

SEQ ID NO: 4156023 - RNA, 72 nt, Human
guucacaaggucguguggggguugcugcuguaggaguagaugagcucacaugaccuuguacguugcaagaac

SEQ ID NO: 4156024 - RNA, 56 nt, Human
guucacagaugccugauguguggcuggcuuacaugugacaacauccgucugggaac

SEQ ID NO: 4156025 - RNA, 67 nt, Human
guucacagcuuguguuuucucuaugugcaaccauuuauuuuuggagaugguacaaggagcugugagc

SEQ ID NO: 4156026 - RNA, 88 nt, Human
guucacucaagauacacagcgaugagaggaggcgccaaaauucaaacccagguuuagccuucuccaacgucuguguccuuagaggaac

SEQ ID NO: 4156027 - RNA, 78 nt, Human
guucagaacaggcucacaucugcgcucugccucauaugagcugugugacuuagggcaggugagauggccucucugaac

SEQ ID NO: 4156028 - RNA, 78 nt, Human
guucagacuccaucuggcaaaaccagcauuaugcauggacuucuauacaauaagguaaggguauugucagauuugaac

SEQ ID NO: 4156029 - RNA, 90 nt, Human
guucagagccacccuuggagagaggcugcucaggcucagcucccugugcugggcuuucuagaucuagcucuguucgggggaguucuuagc

SEQ ID NO: 4156030 - RNA, 80 nt, Human
guucagagggugauccagaggugucuugagccugggaugugaggagguaggggguacuggcuggagccccacauuugaac

SEQ ID NO: 4156031 - RNA, 64 nt, Human
guucagauacagcuagcuccguggcuuggcucucccggccuugagcccgcuguggucugugagc

SEQ ID NO: 4156032 - RNA, 70 nt, Human
guucagauaguggguuuuuuggaggcuacuuuggacaugggugauggcuccaaggcccaacugucuaggc

SEQ ID NO: 4156033 - RNA, 65 nt, Human
guucagauggagaaggaaaacuuuggguuaugcauuuuuuccccucuuuuccuucuccucuuaau

SEQ ID NO: 4156034 - RNA, 55 nt, Human
guucaggaagguccuauagcagagcuuacuaacuuuguuauccaucuuucugugc

SEQ ID NO: 4156035 - RNA, 59 nt, Human
guucagggagggacagaugaagggcguaaaucaugaucugggaagucuggucccugaac

SEQ ID NO: 4156036 - RNA, 76 nt, Human
guucagggucucuuccucaguauugcaugaccaaauccugauuuuguuuguaugcugagaagaauugccucuggau

SEQ ID NO: 4156037 - RNA, 91 nt, Human
guucaggguuauggucagacagaaagaugaguauggcaagaucauuuccuuauuauccuuuuguuuacuuuaucuauaaaugccacugaac

SEQ ID NO: 4156038 - RNA, 63 nt, Human
guucagguccugaggccaagcagcucugccucaaaucccagcugugugaccuuggacuugagc

SEQ ID NO: 4156039 - RNA, 66 nt, Human
guucagugauucucgguguucaugacuguagcucugcagggaguuuugaaucugggaagucugaac

SEQ ID NO: 4156040 - RNA, 58 nt, Human
guucagugguguauccccagugccuaaaacauugccuggcaauacacauuuauugaac

SEQ ID NO: 4156041 - RNA, 71 nt, Human
guucaucaagcuggcauauguaguucuuaacaaacacauuaaggaaacauucggaaugucacuugcagagc

SEQ ID NO: 4156042 - RNA, 110 nt, Human
guucaucagacuugaacagcgaacuugaaccacaugguggggcucuaaagauuccaggaagcuccagcggauggucuuauauuugaugucucagaucaugucuggaaaac

SEQ ID NO: 4156043 - RNA, 98 nt, Human
guucaucucuuuuuccaagcugaaauuuuacugaguauaagacaguaacccaauuauccuaaugguauacucauuaauauuucaucaaaggagagaau

SEQ ID NO: 4156044 - RNA, 59 nt, Human
guucaugcucugggcuucuggggaaccaaaugauuucacccugcaggccagggcugagc

SEQ ID NO: 4156045 - RNA, 65 nt, Human
guucauggcaguuguaugggcuguaugugcacauagacagccucaaagauaaucaugcauagaac

SEQ ID NO: 4156046 - RNA, 89 nt, Human
guucauggccaauauuucccaagugucuuggaccaggggcuugcuuuuggcacuccugguccaaaauauuugggaaauacaggccgagc

SEQ ID NO: 4156047 - RNA, 74 nt, Human
guucauuaacauagagacaggaagugcuuuguaguucaguacaucaaagcacacuuggcucuguguacuguaac

SEQ ID NO: 4156048 - RNA, 59 nt, Human
guucauuauauugcugcaaacaugaauaauccacauguaauuguagcuuuguaaucagc

SEQ ID NO: 4156049 - RNA, 96 nt, Human
guucauugaugccuacucuguuccaggcuccauuccaggagcuagauguugcaaauacauuauauuucaaaggguggggccaggaaggcagugaac

SEQ ID NO: 4156050 - RNA, 77 nt, Human
guuccaaagagagggguuugccauccuaugagucacugauugcuggugcauagccuggaagcccucuccccuggaac

SEQ ID NO: 4156051 - RNA, 59 nt, Human
guuccaaaguuagaguguauuguagggcauuaacuaauuaugccucuaauuuugcaaac

SEQ ID NO: 4156052 - RNA, 61 nt, Human
guuccaaggagagcucgaccucaaagguguuagugcuuuggggucaaggcugccuuggggu

SEQ ID NO: 4156053 - RNA, 130 nt, Human
guuccacaauaucaaaauccaguaauacaaaauugcuuccuucaauuucacucucccugccacuuaccaaugagguggugcuaguagagggugggcaagggagugaauuggagaaaugggauaaaugaac

SEQ ID NO: 4156054 - RNA, 78 nt, Human
guuccagaagccucaccccagcccccuugcuggauccuagggaccaguuucugggggagguuggggagggcggggagc

SEQ ID NO: 4156055 - RNA, 56 nt, Human
guuccagacuugccaguggaagggacuugcacaagauuaaagggaagugcugggac

SEQ ID NO: 4156056 - RNA, 75 nt, Human
guuccagccauaugcuugguuccuacuucuggcccuuuucuggggccauggcccauaccaggugcaugcugaaac

SEQ ID NO: 4156057 - RNA, 76 nt, Human
guuccagcucuaugucuugaucuuuaccaaagauucucaacacaacuggcagauuuugaagacagagaggaagaac

SEQ ID NO: 4156058 - RNA, 67 nt, Human
guuccaggcaagugggauaggacgugcuaugauacggaggcacagauagguccgcuaugucuggaac

SEQ ID NO: 4156059 - RNA, 65 nt, Human
guuccaggccucuagcccucucuucgcugcucccagccaggaagaguccgagaggcgacuggagc

SEQ ID NO: 4156060 - RNA, 63 nt, Human
guuccaggcuaauuuugcauuguuuuaccuccagacccagaauaaguaauuuugccauggaau

SEQ ID NO: 4156061 - RNA, 60 nt, Human
guuccaggcugcuuuauuacucuguuuuggccuacagggaaacauuugggagcuuaggac

SEQ ID NO: 4156062 - RNA, 71 nt, Human
guuccaggucugguuggacagguugaggcugacacaccugagagaauccggaaugccagagagccuggagc

SEQ ID NO: 4156063 - RNA, 60 nt, Human
guuccaguugcaacagguguguuuugguguagcauauacacagacgucugugccugggac

SEQ ID NO: 4156064 - RNA, 130 nt, Human
guuccauacccugggggacaugcaggugagaugcucagggacuuggauccuggcccuacacacaccuccuuguggccuugggcgagucccucagucacccugagccuucauuuccuccucggucaugcac

SEQ ID NO: 4156065 - RNA, 75 nt, Human
guuccauugccauugccauuggcccagcccugcugguugggaccuggagggcuggacuaaggaaagcaaggggac

SEQ ID NO: 4156066 - RNA, 65 nt, Human
guucccacgccuccucuccagcgugacuaguggcugaggaugcggaggagaggaggcugaggagc

SEQ ID NO: 4156067 - RNA, 76 nt, Human
guucccacucaggccccaucgcccaucugcagaugguggccccuccacaggugggcaaugaggccugaguguagac

SEQ ID NO: 4156068 - RNA, 64 nt, Human
guucccagcugagguugaagaaagagaugcucugucuucuuguuuuagcccucauacuguaaac

SEQ ID NO: 4156069 - RNA, 80 nt, Human
guuccccuaaaucuggagagucaucucugacacguuaaauguagacagucaggccaauacucuccagcaccuaggagagc

SEQ ID NO: 4156070 - RNA, 60 nt, Human
guucccuagccugccacucuuucacuacccacauaacagaaagcuggguaggagaggagc

SEQ ID NO: 4156071 - RNA, 96 nt, Human
gugggcaacgucuguccaucccuggccuccuggccuucucauuuccucuugcaguggccgugacaguggaaggagggccgaggacagcuugcucac

SEQ ID NO: 4156072 - RNA, 84 nt, Human
gugggcagagcuugaaagucucugcauguaggaaaaggggaaauccacaguugcucagcacagaccaggccaggaucugcccac

SEQ ID NO: 4156073 - RNA, 63 nt, Human
gugggcaggaugcguugauucuuccccaggucuaugagggagagccugcuccaugcugcuugc

SEQ ID NO: 4156074 - RNA, 58 nt, Human
gugggcaguuggugauucucguguuucucacacacacaugagggucccgcguguccac

SEQ ID NO: 4156075 - RNA, 56 nt, Human
gugggcaucaccagggccuccagauccuccuggggcagaagcugggcgauguucac

SEQ ID NO: 4156076 - RNA, 87 nt, Human
gugggccgcgcccggggcgcggagggcggcggccgggcccggguuccggucgcgcugccucucuggggcccugggggcaucgcuugc

SEQ ID NO: 4156077 - RNA, 77 nt, Human
gugggccgugucaucugcggguggcacugcccucggugggcgggugggccgugucaucugcggguggcacugcccgc

SEQ ID NO: 4156078 - RNA, 64 nt, Human
gugggcgggguuccgugccccagagucgagggagccgugggcuugggguccggaucgcggccgc

SEQ ID NO: 4156079 - RNA, 97 nt, Human
gugggcuccaugacuuuaugaauauucuucauucagguucuaaacugcuagugcacuuucuaggacccugcgugagaacguagagcucagugcucac

SEQ ID NO: 4156080 - RNA, 129 nt, Human
gugggcugccuccaggcggguggcccgaaaguggacagcuguggccagggugugggcgucggcacgugggcucccggccggcgugugcccuucuguccugccacccgcucuggccccagguucaccugc

SEQ ID NO: 4156081 - RNA, 66 nt, Human
gugggcuggguuugacuccuggcuucuccacugacugggaugcugggagugaagccccuggcacac

SEQ ID NO: 4156082 - RNA, 92 nt, Human
guggggaagaaggccgcuuaugcucuauuaucuuuuuuuacugaaaaaaaggaagggcggauaguauaaguuaacagaagccucuuucucac

SEQ ID NO: 4156083 - RNA, 56 nt, Human
guggggagcugggaccaugcugggaaauccaucgcuucaaaucucagacuccugau

SEQ ID NO: 4156084 - RNA, 81 nt, Human
guggggagggggagaaaggccagggggcacugacuccauugcaucgugggaggagcagccuggucucucgccaauacccac

SEQ ID NO: 4156085 - RNA, 56 nt, Human
guggggagguaagauuuguuaaacuggaauuaaaagaagacaguaaacuuccccau

SEQ ID NO: 4156086 - RNA, 81 nt, Human
guggggaggugaaacuggcauuuaguggauggaggccagggugcugcuaaacaucuugcaaugcacaggacaaccucccac

SEQ ID NO: 4156087 - RNA, 94 nt, Human
guggggaguguccaccccccugugauauuguucauaauauccaguccccccucaauauuacacacgguaucacggggaaguguacacacccuac

SEQ ID NO: 4156088 - RNA, 58 nt, Human
guggggcaugcacgcugcuccugaugccacuccgucagagcagcguggauggccccau

SEQ ID NO: 4156089 - RNA, 84 nt, Human
guggggccaugcuggggccucugugagguuaaccugacuccucacuuugacccugagaggugccugcaaugauccuugccucac

SEQ ID NO: 4156090 - RNA, 63 nt, Human
guggggcccuaguacugggaaagagggcuggcuaggccacgucugccugucugggguccccac

SEQ ID NO: 4156091 - RNA, 78 nt, Human
guggggccucugcagcugugagugcuggaugccuccgagcaggacacugggaccuauagcugucagggcucaccccau

SEQ ID NO: 4156092 - RNA, 70 nt, Human
guggggcucagggcugcugucagggcuccagccuccagcugggcccugacuucaagcauccaggccucac

SEQ ID NO: 4156093 - RNA, 124 nt, Human
gugggggcagcucugauaugugggggagcccugggugugggggcagcucugauaugugggggaguccugggugugggggcagcucugauaugggggagccgugggugugagggcugugccucac

SEQ ID NO: 4156094 - RNA, 59 nt, Human
gugggggcgggugcaggcgggcagcucggggagccccagccugugacagccguccucac

SEQ ID NO: 4156095 - RNA, 81 nt, Human
guggggggaggaguuaagagugugaaaauguuaguuagcuauagaguuuguuagcaucaaguaccucgacuucauccuuac

SEQ ID NO: 4156096 - RNA, 75 nt, Human
guggggguagggagugggagagucggagagguagaagaaagccgcuagauccaggccucuagccccuaucucuac

SEQ ID NO: 4156097 - RNA, 82 nt, Human
gugggggugaaaagcauuuauagauaagaauuugaaauucaaaugaaggaacaaguagucugucuaaaaugcuggccuccgc

SEQ ID NO: 4156098 - RNA, 74 nt, Human
gugggggugcucacugacuccaggguucagccacugucugcaugcuaaugagcuaaggagucccacaccuccac

SEQ ID NO: 4156099 - RNA, 84 nt, Human
guggggguggugagcagagcagaaugugaagguggggugaagcccccucgccggccaccccugcucuugcccucccauccccgc

SEQ ID NO: 4156100 - RNA, 86 nt, Human
guggggucugagguuacaguggugggcucacagcgaggcucauccugcguguggcgagaacauuggaccaucagucaccaccccac

SEQ ID NO: 4156101 - RNA, 69 nt, Human
gugggguggugucuuugcauuauggugcuaggauaaauguacagguggagcauaacacacuagccuugc

SEQ ID NO: 4156102 - RNA, 97 nt, Human
gugggguguuguuuuuuuuuuuuuuuugagauggagucuugcucugccacugaggcuggacugcagcggcaccaucucggcucacugcaaccuccgc

SEQ ID NO: 4156103 - RNA, 110 nt, Human
gugggguuaauguucuuugcccugcggccuuccaggguugugggcuucagcagaagugauauuccugcgaaagcuuugaacucuaaaguauguuucggguauaaccuugc

SEQ ID NO: 4156104 - RNA, 66 nt, Human
guggguaaccaggaguaacagugagugguagaacuccuauuucaaccccuugauuccuggaccugu

SEQ ID NO: 4156105 - RNA, 97 nt, Human
gugggucacacagcaucaugggggaugagcuggggcuggagucggcuguaucugacaccagacccuccauucaagcucccuugaugacaacgcccac

SEQ ID NO: 4156106 - RNA, 90 nt, Human
gugggugaacgaaugcaugacugaguggguuucugcuugucaagucuuccucuuuggaagcauacccccuuagcacacauuagagcucac

SEQ ID NO: 4156107 - RNA, 90 nt, Human
gugggugacagaaagauugaaaucacuggaagcuuucagccaugaaggaguuguacauugugaacauucaaaucaagaucuuucauccac

SEQ ID NO: 4156108 - RNA, 61 nt, Human
gugggugcagcacugggcuucgaacccaggccgcugggacucugggcccaugcugccucac

SEQ ID NO: 4156109 - RNA, 83 nt, Human
guggguggggcagugggaagugugccuggggggguccguggacgauuccuccuucgggacugcuugaccacugccuuccccgc

SEQ ID NO: 4156110 - RNA, 58 nt, Human
guggguguuggugauguggcuggcaugaaguuucugucaggagccaccagcacuccgc

SEQ ID NO: 4156111 - RNA, 67 nt, Human
guggguugaccuaugcuaggugcucaaugagcgcaugcacauucagcaugcaauuagguaaucacac

SEQ ID NO: 4156112 - RNA, 77 nt, Human
guggguuggagucugugaugcucugggucuggugacuagaacuuuuaccacaguugccauaagaaccaagugccuau

SEQ ID NO: 4156113 - RNA, 129 nt, Human
guggguuuuguguguauguauguauuuuauuuuucacaagguuauugcuggauagauacaucaugacuuaauguugauauuccagaauaauguagaaaaugauacaaugucuaaauacguguuacugac

SEQ ID NO: 4156114 - RNA, 98 nt, Human
guggguuuuucggccaggcgugguggcucacgccuguaaucccagcacuuugggaggccgaggcagguggaucaccacgucaggaguucaagaccagc

SEQ ID NO: 4156115 - RNA, 66 nt, Human
gugguaaagaagauaacaagcuugagaaaagugcacuuuuuucuagucucgaucucuuaaugccac

SEQ ID NO: 4156116 - RNA, 116 nt, Human
gugguaaauaaaagcaauuucaagaugguguguaugagugugacuaaacuuuuuggcuauuagaugccugagguagucauuuucuacucuuugaagaugcugaauacaaauuucac

SEQ ID NO: 4156117 - RNA, 60 nt, Human
gugguaacaugacugugccuccagcacuggccuuugccaggcuccuuguucaucauccau

SEQ ID NO: 4156118 - RNA, 74 nt, Human
gugguaaggagcugacuuguaaagcauugugcaauucacuccucuuuugaugcagcagccagcuucugaaccac

SEQ ID NO: 4156119 - RNA, 86 nt, Human
gugguagcaaauauaaaaguuaaagguauaaaacaagcacauuuuugucgauuuuauauguuuguacaauuaaguuugccacucac

SEQ ID NO: 4156120 - RNA, 55 nt, Human
gugguagcaugucuggcuuuuuggaggaaucgcaaggaggccaguacugcugaac

SEQ ID NO: 4156121 - RNA, 74 nt, Human
gugguaugucucuugagccacuaauagauugucauguaauaugcaguuuucaaaaguuuacaggauaaugccau

SEQ ID NO: 4156122 - RNA, 66 nt, Human
guggucaggagguaggacauacugguuaguuucauccaccaguauccacucaagccccaggacuau

SEQ ID NO: 4156123 - RNA, 57 nt, Human
guggucagguuaucagaucauauggaaggcccugcuggucuuaugaggccuguccau

SEQ ID NO: 4156124 - RNA, 60 nt, Human
guggucagugccuccuguguuggccgcaaugcugugcuccucacagcuggcgcugaccgc

SEQ ID NO: 4156125 - RNA, 63 nt, Human
guggucaguugcaucagagaagucugcucugaaaugcgaacacuuucucuugcagcuggcagc

SEQ ID NO: 4156126 - RNA, 70 nt, Human
guggucaugugguuucacuguaauaguuaggugcugauguacaccuuccucagcacaaagccaagaucau

SEQ ID NO: 4156127 - RNA, 89 nt, Human
gucagacaugggauuuagaggcaggaggguuuuaccuaagaacauagacugugugcccagacugccucagugaaaaucucagcccuggc

SEQ ID NO: 4156128 - RNA, 82 nt, Human
gucagagagagucaaaucuuugcugcucaaaaucagugcuuuaggcauugauaacacaaguaagcauuuguuucucuuaggc

SEQ ID NO: 4156129 - RNA, 67 nt, Human
gucagagccccacaugggcguaauguccaugguuggaaccguggcucccugccuauuguggcucugc

SEQ ID NO: 4156130 - RNA, 63 nt, Human
gucagagcccuucccugauuuuuuucaaacuguaacuaagagaagagggauggcgcucuagac

SEQ ID NO: 4156131 - RNA, 57 nt, Human
gucagaggggacaagacacagauggcaaaaacaucuggccugucugccucuauugac

SEQ ID NO: 4156132 - RNA, 60 nt, Human
gucagaggggcagcugccaggcucacaccccaccccgucaccccucagcugccccuggac

SEQ ID NO: 4156133 - RNA, 67 nt, Human
gucagaucaugucugggagcagacuccaguuggaauucugugucugcccuuaguacaucuuucugau

SEQ ID NO: 4156134 - RNA, 59 nt, Human
gucagaucuucuauguaaugaagugucuuuacaguuuaagagacuuucuaggagcugac

SEQ ID NO: 4156135 - RNA, 84 nt, Human
gucagcauggaacgucagacucuuagaacgccacagugcagccgacguauguguggcagcugggagugugaggcuauuucugac

SEQ ID NO: 4156136 - RNA, 86 nt, Human
gucagccuugguucuggcaaugagcaggugcucuggaagaagucccaggcaagcucugcugugccccuuaucugaaccgagcugau

SEQ ID NO: 4156137 - RNA, 63 nt, Human
gucagcucagcaggugggagugugccuuggcccugaggaagcaccugccugcuagagccugac

SEQ ID NO: 4156138 - RNA, 112 nt, Human
gucagcucuggucuaggucuguuacagcgggaauggauuuacacaguguuuguauaaauuuaaauuccugcugccuaagcagucuggaugcugugccaugagccuucuugac

SEQ ID NO: 4156139 - RNA, 58 nt, Human
gucagcuggugaacuaguuuuucaugcuccaugagauuucugcaauuaccaagcuuac

SEQ ID NO: 4156140 - RNA, 80 nt, Human
gucagcuguagggcuuagugcuuagugcccaggguccucgcugguggugguguccucacuauagcaagucugcaggugac

SEQ ID NO: 4156141 - RNA, 92 nt, Human
gucagcugugcaauuacuuuguuuuggcaggacacuuuggagucaagaaaacauuggcuggaguucaaggccaagauuuuggaucagcugcc

SEQ ID NO: 4156142 - RNA, 69 nt, Human
gucaggaaggacccacgaagucacuggaugcagcccgggcucuguggcuucugcuugggccucucagac

SEQ ID NO: 4156143 - RNA, 67 nt, Human
gucaggaaugguuucucaagcaagagaaaccugaguuaugucuugaaaugagaagccaugguuugau

SEQ ID NO: 4156144 - RNA, 79 nt, Human
guguucauuuacauauugucugugacugcuuugcacacuacaagagcaaaugugaguuauagcaauagaggcagaaugc

SEQ ID NO: 4156145 - RNA, 86 nt, Human
guguucuccuuguggcugcagcagccgcacuaagacacuggccacaccugguuucuccacagccgcugcagccacgaggagaaggc

SEQ ID NO: 4156146 - RNA, 75 nt, Human
guccgccccgcccgcucuagcucugagagccacucgcccagugcuuccagcaccagcagaggggaguggcaggau

SEQ ID NO: 4156147 - RNA, 128 nt, Human
guccgggucguccugguuuggcuuccuuaggacugugccgcuuucacucgagcuccugcagcggcagcccgccgccuuguggccaggguggaaaacggcacccggcggacagggcaggagaccacggc

SEQ ID NO: 4156148 - RNA, 85 nt, Human
guccggucuuuggcaagguuaacaccacagcugggacaaauucgagguuugugccuguugguguagacauagcuacaagagggau

SEQ ID NO: 4156149 - RNA, 61 nt, Human
guccguaguggcugaugcuuugagcccauggcugcucuggaggcaugagcccugcauggac

SEQ ID NO: 4156150 - RNA, 95 nt, Human
guccuaaaguacaccuaccuucucacuacauuugaacuguguugggcaggauacaugcaguggcaaugggaguggagacagggaggaaacuggau

SEQ ID NO: 4156151 - RNA, 61 nt, Human
guccuacaccggagccuggaagguaucaaauccugguaccaccauuugccugcuguaugac

SEQ ID NO: 4156152 - RNA, 79 nt, Human
guccuagcuuugcgcaugcguagugggcggagaaaaaagguccggucccaggauugguugcgcaggcgcagggaaggau

SEQ ID NO: 4156153 - RNA, 103 nt, Human
guccuauggggccaaucauuaacuuuguauuuuaugguacauucuaaauaccucccauggguauguacauaacaugaaaugcaggguaaugggcagaugggac

SEQ ID NO: 4156154 - RNA, 77 nt, Human
guccuauggguagagauggggguuagggaggcugccuugaauugaaacauacccugguugcaacucuaccuuaggac

SEQ ID NO: 4156155 - RNA, 76 nt, Human
guccucaccccuugugaaugcugcucuggaaggcaagcugguccugcuggauggcauucaccgggugaaugcgggc

SEQ ID NO: 4156156 - RNA, 60 nt, Human
guccucauaauaaacauuugcugagucuagguaagaaaucagcagaccuguuauuuggau

SEQ ID NO: 4156157 - RNA, 70 nt, Human
guccucauugucacuggcccgcagacaggaaaggaaaaguaaauccccgcugaggcaggggcagugggau

SEQ ID NO: 4156158 - RNA, 61 nt, Human
guccuccaaguuugacucaggacacuaccuaugucagugguuuccaaacuugucugaggau

SEQ ID NO: 4156159 - RNA, 69 nt, Human
guccuccucagguaagauuauccuccaagcucuugcuucagugagcagaggcauauaauugcuggggac

SEQ ID NO: 4156160 - RNA, 63 nt, Human
guccucugagacaucagguugagcaguauuguggcugucaucaugaaccuugucaucagggac

SEQ ID NO: 4156161 - RNA, 69 nt, Human
guccugaaagaagacagacauuucuuucuuagggauugccgauagagauccccuguuuuccccugggac

SEQ ID NO: 4156162 - RNA, 55 nt, Human
guccugagaauacuaggcacaacaaaagguucuguuuaagcuuguuauccaggac

SEQ ID NO: 4156163 - RNA, 58 nt, Human
guccugagggcccaggcauucuggauuccaagccuagccuugucuggggccucgggau

SEQ ID NO: 4156164 - RNA, 64 nt, Human
guccugauacaugggcugugacaagaagugagagauagugacagugugacaauugugucagaac

SEQ ID NO: 4156165 - RNA, 55 nt, Human
guccugauagcccaacacugccuaaaaacagcagagagcaguaggcgcgcaggac

SEQ ID NO: 4156166 - RNA, 59 nt, Human
guccugccuaggaacugguugugggugucuccuaccucacccagucaccuagguggcac

SEQ ID NO: 4156167 - RNA, 71 nt, Human
guccugcugcuguccagccugaagagugggggccacaggcucccagaaccaaggcuggggaggcaggaggc

SEQ ID NO: 4156168 - RNA, 80 nt, Human
guccugcugucucugcugcaccuucuggguccugcuaucccccaggagacccaagauggugaguagggaaagcaaaggau

SEQ ID NO: 4156169 - RNA, 78 nt, Human
guccuggaggaguaauuaguguccagcuucugcuuaucaaagcuuugccaggaggcuugguccacaugauuccaggau

SEQ ID NO: 4156170 - RNA, 68 nt, Human
guccuggaugggucugagcagagagguggcgugauggucaucucauuguagaaagacugauuuggaac

SEQ ID NO: 4156171 - RNA, 63 nt, Human
guccugggcaugcagggcuuucucuuucacuggaugggugacagcauggugucuguucagggc

SEQ ID NO: 4156172 - RNA, 62 nt, Human
guccugguagcuggcuuggucaggugucaacucacccuauccauuggcuaggugcuugguac

SEQ ID NO: 4156173 - RNA, 68 nt, Human
guccugguuaguagcacagaugcugaauccagucuuccuguguucacaucucagcacugccucuggac

SEQ ID NO: 4156174 - RNA, 67 nt, Human
guccugucccccaaggcuguggcuguccaucaguccugccuguugcagccauguggggauuuagggc

SEQ ID NO: 4156175 - RNA, 59 nt, Human
guccugugcguuucuuucccagcuucguggagccacgcaggggaggaagguacaccugc

SEQ ID NO: 4156176 - RNA, 78 nt, Human
guccugugcuaagcacuuuauaugcauuaccucauuuaaccaaaugagcauacauauguaaagugcuuggcaaagugc

SEQ ID NO: 4156177 - RNA, 64 nt, Human
guccuguguaaguacuugcucagcaugcucagagauucccaugccagcuuauuuacugcaggac

SEQ ID NO: 4156178 - RNA, 78 nt, Human
guccuguugugguugcugacucuuuucaugccuccugauugagagaaucaagguggagaucagggacuaaggcaggac

SEQ ID NO: 4156179 - RNA, 56 nt, Human
guccuuaaagagagcaucauucgugccaaauggcagguuugcuuggcucuuuggac

SEQ ID NO: 4156180 - RNA, 126 nt, Human
guccuuagcauuugugaaccagguugggaaugagagucagcccaggaggggccgguggcucauuuacuucagggcaugaucuggcuguucccaaagugccucuuggguucagggacugugaaggac

SEQ ID NO: 4156181 - RNA, 87 nt, Human
guccuucccagagcugcuccagugagcuggccauccucagaggagaaagggaggagccagagcacuggggagcccuggcagaggcac

SEQ ID NO: 4156182 - RNA, 56 nt, Human
guccuuccccagccagcucugggccaucuccuuggcccggaguguuggagggaggc

SEQ ID NO: 4156183 - RNA, 130 nt, Human
guccuucgaugccuuaucacagcaagucacgugacccugaaguguauaauccugcaaagggagcuuuucaggcuuccucaugugcaaugcaagcagggcauauguacucaagacuccacccaucccaggc

SEQ ID NO: 4156184 - RNA, 60 nt, Human
guccuucucaaauccuguguuuuaagccacaaagauaggucaggaaaugagaaaggggac

SEQ ID NO: 4156185 - RNA, 58 nt, Human
guccuuggcaucaugauuuggugucuaacuccaccauugucaaacagcugccugggau

SEQ ID NO: 4156186 - RNA, 61 nt, Human
guccuuggcuucuuguugacuguuguccagggguugcugucagcaguaagaggccaauugc

SEQ ID NO: 4156187 - RNA, 80 nt, Human
guccuugguggcuguggggaucucuggugguggucacccccaaaggauaaugaccaguuuccccacuguccugcucgguc

SEQ ID NO: 4156188 - RNA, 96 nt, Human
guccuuucuuuccaagcaaagagauaaccuuuugggacaggggcguaacacaccagcuguacugugaggauuaaaucuuugcgcuaggagagugau

SEQ ID NO: 4156189 - RNA, 87 nt, Human
guccuuuucaggaagugaccagauucaggucacucaggucaagccuaguggccugagugaccugaggucuagucacuacuacauggc

SEQ ID NO: 4156190 - RNA, 75 nt, Human
guccuuuuggccugggaggcugagguugcagugagcugugaucaugccacugcacuucagccugggugaaagagc

SEQ ID NO: 4156191 - RNA, 70 nt, Human
guccuuuuugacccucugauugggaacacacucagugaccuugggaguguuuuacucaaagaaagaggac

SEQ ID NO: 4156192 - RNA, 89 nt, Human
gucgacagugcauuuccagucugggcaggaauggccauuggcaacagguguuucuccacugggcguuucuguccaaucucauucuugac

SEQ ID NO: 4156193 - RNA, 76 nt, Human
gucgacugcacucucuccuuagcugcagaccaugcacagugccuggggcggaaggaggagagguguugcgguuugc

SEQ ID NO: 4156194 - RNA, 82 nt, Human
gucgaggauaccaguugccugaaauuuuccucuggauccuucucuagaucauuuucagagguaugcugcuuaucuuccugac

SEQ ID NO: 4156195 - RNA, 96 nt, Human
gucgcaaccuagaaugugggcuggagagcgcugucccagugguggccccgaggccacagguucugucccagauguucucagcaccauuuuagcgac

SEQ ID NO: 4156196 - RNA, 66 nt, Human
gucgcacucagccaggccaggcauucacacucagggugagugggaaccaggacuggcugaggcagc

SEQ ID NO: 4156197 - RNA, 64 nt, Human
gucgccaauggaggcuggucugcggcaagcaaguggaaagcaaacaguccugccccuuggggac

SEQ ID NO: 4156198 - RNA, 70 nt, Human
gucgccuagccuggagugcaguggcgccaucucggcucacuguagccucugccucccagguucaagcgau

SEQ ID NO: 4156199 - RNA, 130 nt, Human
gucgccuuugugcccggcggcgggguggggaggucagcgccgggccgggccgcggccgccggggaggggcuggaggaccggccucggacaaagcggcggccccgccccgccaugccccggggguuggaac

SEQ ID NO: 4156200 - RNA, 87 nt, Human
gucgcuguuuuuacacuuuucaauguagucuguaaucgauguauacaaccucaaaaacagcagcgugaaguguguuaugacagcgau

SEQ ID NO: 4156201 - RNA, 69 nt, Human
gucgcuugaacccaggaggcagagguugcagugagccgagaucgcgccacugaacuccggccuggcgac

SEQ ID NO: 4156202 - RNA, 82 nt, Human
gucggcucagaccuggcaguagcugacacacuugcugucuagacaaggcuaagagcuggugugccacuguuggggagugggc

SEQ ID NO: 4156203 - RNA, 64 nt, Human
gucgggcugcucgcugcggaacucguucaggaugucgaagaagcucugcucgggcaugcccugc

SEQ ID NO: 4156204 - RNA, 72 nt, Human
gucguaggccuccugguacuccuuguggggcuugaccauuaucacacagguggggcacuuggagccugcggc

SEQ ID NO: 4156205 - RNA, 56 nt, Human
gucguaggggaaaagcuuaggcuugauaaaggagaccugggccaaauucccuggac

SEQ ID NO: 4156206 - RNA, 66 nt, Human
gucguaugcaaaugaaauguuugaggacacuguaauaugcuuacucacucauuuccagcaucugau

SEQ ID NO: 4156207 - RNA, 63 nt, Human
gucguguuuuccuccugggccaaucacagaggcaauagugggaguccuggggaggggcauggc

SEQ ID NO: 4156208 - RNA, 70 nt, Human
gucuaacaugcuccucuauuccccacauuuuugauaaauugaaaguggggucuagagggccugauaagau

SEQ ID NO: 4156209 - RNA, 94 nt, Human
gucuaagaguguggcugaugagcugcuguuauucaucagaacugggaaacagugaauauccauucugugcuaacugcaggccaggcuccgagac

SEQ ID NO: 4156210 - RNA, 72 nt, Human
gucuaagggaagagaacugguccuagccuaggggacuuggacugaggugagagguccaguucugucuuggac

SEQ ID NO: 4156211 - RNA, 109 nt, Human
gucuacaagguauuagauuggugcaaaaguaauugcgguuuuggccaucacuuuuaugguaaaaaccacaauuccuuuuacgucaaccuaauacuuaauuuuuguggac

SEQ ID NO: 4156212 - RNA, 74 nt, Human
gucuacaguacacagguaccaagcugccuuuugucuuucuaauucagaaaaagccugaugccugugcuguaagc

SEQ ID NO: 4156213 - RNA, 69 nt, Human
gucuaggcccuuuugccuuucucugaggcccugaggcuuccugaagaggaugguugaggaagaccugau

SEQ ID NO: 4156214 - RNA, 58 nt, Human
gucuaggcuggagugcaguggcgcgauuucggcucacugcaaccucugcuucccaggc

SEQ ID NO: 4156215 - RNA, 72 nt, Human
gucuagggcaggcuugagagaucagauggcgugaaaggcuugugaucuguucgucucaggcucccccuaaac

SEQ ID NO: 4156216 - RNA, 64 nt, Human
gucuagucugaagcacugcaaugcuuuauugaucuggauagagaagaaagugcucagaggagac

SEQ ID NO: 4156217 - RNA, 68 nt, Human
gucuaguugccacaguagcaaaagguucucauuguaagaacauuuuacuccugaggcagaccacugac

SEQ ID NO: 4156218 - RNA, 74 nt, Human
guuucuccuauuuggcacacuggguucucgugucauuuaaagucagauaauccuguguggccaaagucagauac

SEQ ID NO: 4156219 - RNA, 57 nt, Human
guuucucgaaaguugagaaaaucaguuuccucuucugaggaacucacuuagagaaac

SEQ ID NO: 4156220 - RNA, 81 nt, Human
guuucucucagagaguggcaggcucaguagggagggggcaggaggcucaccucucagccggacugucaggcucgaugaagc

SEQ ID NO: 4156221 - RNA, 61 nt, Human
guuucucucguggcuccaaguacaugaaaauuuuuucauguuaucuuggcucugggaaaac

SEQ ID NO: 4156222 - RNA, 60 nt, Human
guuucucuguuccucagugaucagauuugacucugauuugauuucaaaugcagagaacac

SEQ ID NO: 4156223 - RNA, 57 nt, Human
guuucugaaugcugauuaguaugagaaauuaugcuacgaaugagagcauauagaaac

SEQ ID NO: 4156224 - RNA, 92 nt, Human
guuucugauaugguuuggcuguguguccccacucaaugccagcccgugaaagcagcugggagggaggcuauacccugcaaagccacaggggc

SEQ ID NO: 4156225 - RNA, 56 nt, Human
guuucugcauuuacaaaaugaggguuaguaggagccuucaagacaaugcagcaagc

SEQ ID NO: 4156226 - RNA, 84 nt, Human
guuucugcucugagaaccaggaacacaggagugaauaaaguggaccaaacucccugcccucucauuuucuuaugagacagagac

SEQ ID NO: 4156227 - RNA, 56 nt, Human
guuucugcucuucaggggcuaccagacuucuccugucccuccugggcugcagaugc

SEQ ID NO: 4156228 - RNA, 77 nt, Human
guuucuggcauacaguagcuacucaauaacuauuucuggaauaaauaagugaauguuggcuacugaacacuagagac

SEQ ID NO: 4156229 - RNA, 76 nt, Human
guuucugggcgggaucuggcggggagaggaaggaagaaugacuuuuucucugugcuggguccugaggcuugggggc

SEQ ID NO: 4156230 - RNA, 92 nt, Human
guuucuguaucuugugugggcaauuuggucauuuguauugcaaaaaugcaaugcuaaauugacaaauucaccaucauaagguaauuuuuaac

SEQ ID NO: 4156231 - RNA, 59 nt, Human
guuucugugcuuccuagaugugauuagacacaauagucaacaucuguaaggacagaaac

SEQ ID NO: 4156232 - RNA, 86 nt, Human
guuucuuaacacaggcaggacuaauuguuauuguuucauuauuaagcaaugaccagugaucuuguauacuguaugaauuaagauau

SEQ ID NO: 4156233 - RNA, 96 nt, Human
guuucuuccaaugagaggugggaugcugauaauucaugagaagccauggcaucacaauuuaauuacaguaucacuuaugguugauugugaagaaau

SEQ ID NO: 4156234 - RNA, 58 nt, Human
guuucuuccucuguaaaaggugaccauagcauggauaugguucaugugaggaaggaac

SEQ ID NO: 4156235 - RNA, 75 nt, Human
guuucuucuguuucaugcucauggaacacagcacaaucuuuggggcucaguuuacugaguaugagacagcaggac

SEQ ID NO: 4156236 - RNA, 62 nt, Human
guuucuucuuucccucuggcugcaaggugccccacacuccuguggucuggaaggaauggagc

SEQ ID NO: 4156237 - RNA, 73 nt, Human
guuucuuucaggaacuuguaguaucuugcugcucuaguaucugucugaaauacugcagguucucugaugcuac

SEQ ID NO: 4156238 - RNA, 103 nt, Human
guuucuuugaauauaugguuuccucacagaacaccaaagaaccuuccucaacaggaaaccucaguggcuuguucccucugugugaggauguguugaaaagaac

SEQ ID NO: 4156239 - RNA, 67 nt, Human
guuucuuuugugaucaccaaccugccaauuccuggaggguuaauagaaguggugaaauuagaggagc

SEQ ID NO: 4156240 - RNA, 100 nt, Human
guuucuuuuguguuaacuugacuucccugaaugaccuaguuggugaauuagucacuaguaauuuggucacuaggaaaaucaagccuucaagaaaggaagc

SEQ ID NO: 4156241 - RNA, 112 nt, Human
guuucuuuuuuaauucuuaagugugugcaagagaaccagaggaaaacauuuaucuguaggaaaauaaguaaaugagauuuguucuuuuguucaccuuauguaaaaagguaac

SEQ ID NO: 4156242 - RNA, 129 nt, Human
guuugaaauggagaguuuaaagguuuuauaaaaaggcaguaaagagcagugcugaagaguagggguucagaagcaacagaccucaagucugaguacuggcucugcugcuugcaugaccuugaaacuugc

SEQ ID NO: 4156243 - RNA, 81 nt, Human
guuugaagcaauuacucacucccauuagaaauuugugauuuccaauuuuauaaauuauuaaacagugggaugcuagcagau

SEQ ID NO: 4156244 - RNA, 64 nt, Human
guuugaagcaccaaaggagaaaaugacuugguagauugugcauuuuccacuggguguuuggaac

SEQ ID NO: 4156245 - RNA, 78 nt, Human
guuugaaguugcacacuuucguuaauaaggaugagagaagcagggaucuuuauuauuaauaaaguggcauagccaggc

SEQ ID NO: 4156246 - RNA, 73 nt, Human
guuugacuacauagcgucuucuagguauaguucuuccaaacuccagcuugggauaugcugauguaaacaaaac

SEQ ID NO: 4156247 - RNA, 56 nt, Human
guuugacugcaggcaaaucacuaaaauuaaggauaaugccagcccugcaguuaagc

SEQ ID NO: 4156248 - RNA, 80 nt, Human
guuugagagaucaguuggacaugauuagcagggagagcauuuguguuuuuaugagaguuaugccgagauagguaacagau

SEQ ID NO: 4156249 - RNA, 129 nt, Human
guuugagaggaugaacccugcaggccauguccacaguucugagaggccaccugcuuuugccuuuguugacuggugguagaacuccaguucuguggcaaggggcagccacaccauuucucucucauugac

SEQ ID NO: 4156250 - RNA, 75 nt, Human
guuugagauaagauauacuauuaaguaccaugguaaaguacuaugcaaguuuguggugguauuucaguuucuaau

SEQ ID NO: 4156251 - RNA, 76 nt, Human
guuugagcagucuacacauuucucuuagagacaccauaggauggguuuuugagauagagaguuaggauuuuuaaac

SEQ ID NO: 4156252 - RNA, 95 nt, Human
guuugaggcugcagugaguuaugauggcaccacugcacuccaaucuggggagcugcagugcaauggugccaucauagcucacugcagccucgaac

SEQ ID NO: 4156253 - RNA, 91 nt, Human
guuugaguguaagaucugaagaguuauuuucugauguggcugaaaaguuguguacgaugaaagacuuaaggguuuaacuuacaguucagac

SEQ ID NO: 4156254 - RNA, 65 nt, Human
guuugauaaauugguuggacuagagauguucugaacaucaucaugaacaacuaauccuaucaaac

SEQ ID NO: 4156255 - RNA, 73 nt, Human
guuugauauguaacuacuccuuauaugccauuuuauuuugugcauacaugugauuguaguauacauauuaggu

SEQ ID NO: 4156256 - RNA, 130 nt, Human
guuugauuacaucaacaauugcauguugauguuugauuacaucaacaauugcauguugauguuugauuacaucaacaauugcauguugauguuugauuacaucaacaauugcauguugauguuugauuac

SEQ ID NO: 4156257 - RNA, 129 nt, Human
guuugauuauauuuuauugccuggcuuauguagcaggcucgcaauaaaauguuucuuaaagcaaugaauaaaagacugcauuuuauaaagaguuauuugcugcagaggcauuugaaaauaugagcauuc

SEQ ID NO: 4156258 - RNA, 59 nt, Human
guuugauuucuaauaguguugacuaggaauuccaagucuuuaacauuuggagauugaau

SEQ ID NO: 4156259 - RNA, 55 nt, Human
guuugcaguuuugauagagacgggcuucuggaagucuguucaaggaacuacggau

SEQ ID NO: 4156260 - RNA, 82 nt, Human
guuugcaugggaggugagaaggcaaccuguguguuuuuaucauuacacuguccccugugcuuucacuugcuuccaugcaaac

SEQ ID NO: 4156261 - RNA, 71 nt, Human
guuugcauggguugauuaguacugaauguaguuuucuuuaacuaccauuugaugacucaacucauaaugac

SEQ ID NO: 4156262 - RNA, 61 nt, Human
guuugcauuccaauuuaggggacacaaaaaucccuguccucaucaccauugcaauguaaac

SEQ ID NO: 4156263 - RNA, 87 nt, Human
guuugcugcucuccaaggagcuccugugccggccgcauuggacaagcaucucugcccugcggcgcagagucuccaggaccagcagau

SEQ ID NO: 4156264 - RNA, 67 nt, Human
guuugcuggaaaauuuuuuucugaauaaacaguaauaauacugugucuggaacaaauacuagcaaac

SEQ ID NO: 4156265 - RNA, 63 nt, Human
guuugcugugacacaggaauccucagagauucaucauuacccaggauuucugucauuucagau

SEQ ID NO: 4156266 - RNA, 97 nt, Human
guuugcuuaugcaaucauucauucauucauuuugagaucccauggaaagcacugugcaaaucuuugaaucaaugaaucagugagugaguuagugaac

SEQ ID NO: 4156267 - RNA, 63 nt, Human
guguugaaggcaggccuugaggacuuugcauuuagaaaaguaacaaauagcugccuuuaaagc

SEQ ID NO: 4156268 - RNA, 62 nt, Human
guguugacugaaugaaugaaugaaguggacuggacauucagagauuguuauucagacaacau

SEQ ID NO: 4156269 - RNA, 69 nt, Human
guguugaguguccuuuuugcugacgcauaucuuuuaauaguccguucagugucuagggacaguaaucac

SEQ ID NO: 4156270 - RNA, 78 nt, Human
guguugauuguuggauugguucacuuggagucuguacuuggguuacagagcaguaagaacacagcugacuuucagcac

SEQ ID NO: 4156271 - RNA, 82 nt, Human
guguugcuauaugagcucggguuuuuucuggagggccacagccuaacaagguaagccuggccaugaaaugauggaacaauac

SEQ ID NO: 4156272 - RNA, 59 nt, Human
guguugggccugucucuugucuuccaguccacugguaagauaagagccaggccugccau

SEQ ID NO: 4156273 - RNA, 76 nt, Human
guguuguaagacuucccagaagaaucccauuugguggaguuuguuuauuggaaggagucuuuggggaugacaaggc

SEQ ID NO: 4156274 - RNA, 87 nt, Human
guguugucagaccuuguccuggcugcucaggggcuuaauucugccuuuugaugcaguauuccugagcaccagacacugcacaggcgc

SEQ ID NO: 4156275 - RNA, 65 nt, Human
guguugucuccacaauucauguguuggaaacuuaaucccaaugcaacaggguugggaggcggagc

SEQ ID NO: 4156276 - RNA, 104 nt, Human
guguugugcuuuauucucugaacucuaauucacagaaccauggugcucuccuguccaggcugaacacuaaugcucuugagagucacauugaagaaagccaacau

SEQ ID NO: 4156277 - RNA, 125 nt, Human
guguuguuucugggccauucagaggucuucuuguacccuuuaaaguuuuaccagcagauuguuuaagcauccucuguaugaagcucuuagaauuucaaauggacucuuauuuuuagaagcagcau

SEQ ID NO: 4156278 - RNA, 98 nt, Human
guguuuaaccagacgcaugggcaccuuguggcccagucagguugauacauaaaauuaaccaucacaagugggucacaaccagcguuuucuaaaaauau

SEQ ID NO: 4156279 - RNA, 61 nt, Human
guguuuaaguaaaugaauguguggcuagagcucagacacacauuaggcagugcuuaaauau

SEQ ID NO: 4156280 - RNA, 76 nt, Human
guguuuaagugagguuuccuguuaggacaaggguaaauuguuuaguuauccuagucacaggaaaauuucaaaauac

SEQ ID NO: 4156281 - RNA, 65 nt, Human
guguuuaaguucugcuccuuauuuuguucaccuacagaguaggaaguucuaacuagaaaagacac

SEQ ID NO: 4156282 - RNA, 58 nt, Human
guguuuacagauaaagugagcuggacauugggaaguccacuggcaacuucugaaauac

SEQ ID NO: 4156283 - RNA, 74 nt, Human
guguuuacaucagaaggaaacagcgugcucacgugucuacccgcacacgcuucgccuccuucuccgugcagcac

SEQ ID NO: 4156284 - RNA, 92 nt, Human
guguuuagaauacugaaauuaaauuugaaauccagcugagcucucaccaugucaugcuauuucgaauguaauaugucacguauauuaaacac

SEQ ID NO: 4156285 - RNA, 71 nt, Human
guguuuaugugcaugcugacuugaggagacguuagcacacaucuccauguuaucuguauguccauaagugc

SEQ ID NO: 4156286 - RNA, 76 nt, Human
guguuucacagaugcagaggccauggggcauuuuucagagucugagucuauccccagucuuucauugucagaauac

SEQ ID NO: 4156287 - RNA, 81 nt, Human
guguuucuauguuuaaaaugaggauauucugucuugaacaucagugaaugaugaauaaucuguugacuaacuugggagcau

SEQ ID NO: 4156288 - RNA, 75 nt, Human
guguuucugggaugagcuauauagaaaguuuaguugacugcuggaccuuggauauucuuacucgguucaaaauac

SEQ ID NO: 4156289 - RNA, 57 nt, Human
guguuucuguuagcugcaaccgaaacuaccugguaugucugagucaugcagagauau

SEQ ID NO: 4156290 - RNA, 84 nt, Human
gugaaggcuucauguucaugcuuaggaaaauaauuauuguaaccauaauuuuccuuuaaaaugaaacaugauguuaacauucac

SEQ ID NO: 4156291 - RNA, 60 nt, Human
gugaagggcccggcugugggcagagcacagacagcccugguccccagcccugccugacgc

SEQ ID NO: 4156292 - RNA, 83 nt, Human
gugaagguguuuuaacugauagcauuauuuacaauuaguacagccauuguaugaguacaaauguuucagcugaaggccuucac

SEQ ID NO: 4156293 - RNA, 64 nt, Human
gugaagucagaucagacuccagagcccacaugccauggagccuuggagacagguuugcuuucac

SEQ ID NO: 4156294 - RNA, 92 nt, Human
gugaaguggugugugugugugugugugugcgcgcgcacgugcgcgugcgcucgugugcgugcauaugcacaaggagcaggcuguguguucac

SEQ ID NO: 4156295 - RNA, 69 nt, Human
gugaagugugugcauuuuugauaacuguguacuucuggugacuguacaguuagaaaugcuauuuuuuau

SEQ ID NO: 4156296 - RNA, 106 nt, Human
gugaaguuaaauguuaaaaauguggucuagaaauguucucagggguuugucuguaucaaaucccuaagaacauuccuagauauauuuuauauauauauaauuuugc

SEQ ID NO: 4156297 - RNA, 76 nt, Human
gugaauaugaucuuauuuggaaaaaaggacuuugcagauguaauuguugagaaacuucaggugagaucauguugac

SEQ ID NO: 4156298 - RNA, 68 nt, Human
gugaauauugagaggccacugcggagagagugagcacuuguccucugggaguggccacuucucaucgc

SEQ ID NO: 4156299 - RNA, 81 nt, Human
gugaaucuaacuauuuugcauaauuacugauaugcugauuaucacugguuuuuauuauguaguugugaugguuaauuucau

SEQ ID NO: 4156300 - RNA, 58 nt, Human
gugaaugaaaggaugauucuuuuaucuuaccacaguaaacgaucauuuugccauucac

SEQ ID NO: 4156301 - RNA, 83 nt, Human
gugaaugcaguaucuuccaaauggagaagaugaguucaauccuuugaaaguacauguuuggccauuugcccaggacuggucac

SEQ ID NO: 4156302 - RNA, 92 nt, Human
gugaaugucuuugagaaggcaucuucaaaauugccaaaucguccccuuaggauaaauuucuagcagugaacuugcuugcucaaagauuacac

SEQ ID NO: 4156303 - RNA, 56 nt, Human
gugaauugccucuuauaugaccaugcugaucaugaguagaugagagaguaguguac

SEQ ID NO: 4156304 - RNA, 115 nt, Human
gugaauuuccaaguauuuacuuggcuaaaaguagcucgagaacagauuuuucugcugucacuuaggugcacacaggggaguucucagaaacucuggcgaggcauggaaauggcac

SEQ ID NO: 4156305 - RNA, 103 nt, Human
gugaauuucuacuuccucucuguguaugaccugggagaggcugucagugacgauucucugcucucacauacagaaaagaggcagauacauaauagagaagcac

SEQ ID NO: 4156306 - RNA, 70 nt, Human
gugaauuucugacuaaaagugccaggcaagccuuuucaugcugcagaacauuuacagugagaguuuuuac

SEQ ID NO: 4156307 - RNA, 88 nt, Human
gugacaacguuacuccucuguggaccgggcuuuggccacugcuagguggcccauugcucaugguguauuauuagaggguuuguugcac

SEQ ID NO: 4156308 - RNA, 65 nt, Human
gugacaaguucccaggugaugcugauguugguagcccaaggcucacauuuugggaaugauugcac

SEQ ID NO: 4156309 - RNA, 73 nt, Human
gugacaauuuauagaaugugacuggguggcuacuuuacauuaacuagucauaaaaucugaagaaguuggucac

SEQ ID NO: 4156310 - RNA, 108 nt, Human
gugacacauaggagguguuuagaaaacauauaaugaauaaacuaugauguuauuuucacuguuuguucaauauguguuuguccuuuaaauauuuaaaaguuuugucau

SEQ ID NO: 4156311 - RNA, 106 nt, Human
gugacacauccugggcacauuccaucuugucuucauccuuucucuaauuacagcucuccaugauugcagggauaaaacaagugaaugugugugcguaggucguuau

SEQ ID NO: 4156312 - RNA, 62 nt, Human
gugacaccaugcugcuggugagcaagauuccuucuuauuugcuggagaugagcgugggucac

SEQ ID NO: 4156313 - RNA, 64 nt, Human
gugacacgcauguacacacaacugaaacaaagguuuugugcagcuucuguuuauugugugccac

SEQ ID NO: 4156314 - RNA, 80 nt, Human
gugacacuguccucugaguuugguuaaucauaaagaaauauucuucauuuaaugaauaauucaaaucugagucuugucgc

SEQ ID NO: 4156315 - RNA, 65 nt, Human
gugacagacugcguaguccccaaagccuaaaauguuuaguuauggguuaaauugcagccucucac

SEQ ID NO: 4156316 - RNA, 61 nt, Human
gugacagagcugggauuugaagccagguguguccagcuuuagaguccuugcucuuauucac

SEQ ID NO: 4156317 - RNA, 68 nt, Human
gugacagagucugugugucccccuggguggugagucccaccuugucugugcaccugggcucuggccau

SEQ ID NO: 4156318 - RNA, 85 nt, Human
gugacagagugcuuauuuggaaaagggaagggacauuaucaugaucugcugucuucuauaucauuuccagaugcuggucuguuau

SEQ ID NO: 4156319 - RNA, 56 nt, Human
gugacaggcccuucacccaaauccugccauggggacaggggcguggggauuguuac

SEQ ID NO: 4156320 - RNA, 70 nt, Human
gugacagggugauuaugagagcuaagcuggcucucucaggccaaauguggguuuucauuauuauuguuac

SEQ ID NO: 4156321 - RNA, 97 nt, Human
gugacagguagaguggagauacuugaagaaauggagacaggauaugggauuauuauauuuuucuucaauuuuuaggagacugcuuuacacaugucau

SEQ ID NO: 4156322 - RNA, 87 nt, Human
gugacagucaguuucuucuggguaacaaggcaagaauaguugauauuauugaagcaugaagaacuuaagaugaaacugacugaucau

SEQ ID NO: 4156323 - RNA, 60 nt, Human
gugacagugaaucuagacagacagccuggaaaggaaguugcuuuauugauuuauuuucau

SEQ ID NO: 4156324 - RNA, 79 nt, Human
gugacaugagcuguaagguggcuuccuacacacugaagucagaguccagaggaaguucauauaguagacgcccugucac

SEQ ID NO: 4156325 - RNA, 57 nt, Human
guuacuucuguuagcucugagaguucaguuuagauacucuuuggcuaaagaagucac

SEQ ID NO: 4156326 - RNA, 84 nt, Human
guuagaaaugcaaauucuaggccccucuccagaccuacugaaucaggaacucuggagguggugcccagcaauuuguguucuaac

SEQ ID NO: 4156327 - RNA, 116 nt, Human
guuagaaccucagacugcuuugucagacauuuucugaaaggagagcugcaaggauucucuuugaauucuuacuuguucucuuugcagucaggcaaucaguaaggaggacaucuaau

SEQ ID NO: 4156328 - RNA, 56 nt, Human
guuagaaggagccaaaucagaaccuucaggugagggccuaaugauuuccuacuaac

SEQ ID NO: 4156329 - RNA, 81 nt, Human
guuagaauggugagagucuuguggucccagguugcccaggacuaaaggguuggcugcuacacagggcuuucaguauuaaac

SEQ ID NO: 4156330 - RNA, 61 nt, Human
guuagacuuggagcggaaacucaaguugaaugaaaaugccaucuccaggcuccaggcuaac

SEQ ID NO: 4156331 - RNA, 60 nt, Human
guuagagacaucucugguuucuguucccagccuaacugcacagaaaagagauauucuagc

SEQ ID NO: 4156332 - RNA, 69 nt, Human
guuagauugguuaaguauuacauauaaugauauauaguuauacaguguacuauuuagcagucaucuggc

SEQ ID NO: 4156333 - RNA, 75 nt, Human
guuagcagaccuccagggucuuugcugcccuggugacaaagggcacagcacaguggacccaggagaccugaaaau

SEQ ID NO: 4156334 - RNA, 69 nt, Human
guuagcaguaaagcacgucuauuuaaugaucagccuaagcugauccauggugaugucuuuaaaguuggc

SEQ ID NO: 4156335 - RNA, 63 nt, Human
guuagcaguauggagcgaggcccagauccagacuucugucggccuaauuuuauaucuguggac

SEQ ID NO: 4156336 - RNA, 59 nt, Human
guuagcaguucauugauuaucguccuguuauaaugcagcaggauggugcgggcugcugc

SEQ ID NO: 4156337 - RNA, 58 nt, Human
guuagcauuuguuuaauaucagacauuguuuacuuguuauuuuugagugaaugcuagc

SEQ ID NO: 4156338 - RNA, 56 nt, Human
guuagccaggauggucuugaucuucugaccucgugauccauccaucuuggccuaac

SEQ ID NO: 4156339 - RNA, 85 nt, Human
guuagccugugccugccgcugucuaguacugguuaaugaauauaaaucagauaguuuauaguuagcgagcacggaacaggcuggc

SEQ ID NO: 4156340 - RNA, 71 nt, Human
guuagcuagcacaggucuuguugccauuuuacauuagaauaagguauaaaagacuugguguaauggcugac

SEQ ID NO: 4156341 - RNA, 127 nt, Human
guuaggaaggggguuauaggaagggaggguauaaguuuugguuggccucuucaaacugccagccuccuacaaaacugucaggagaggccaucagcuuuuucucucuuuguauuucucuguuuuuaac

SEQ ID NO: 4156342 - RNA, 64 nt, Human
guuaggauauggugaaauggagaugaugcuuaauaaaggauauaauucagcauuauauucuagc

SEQ ID NO: 4156343 - RNA, 66 nt, Human
guuaggcaauaccucuuacaccaaagugggcacaccuucggaucauguaggcagcgauuguuuagc

SEQ ID NO: 4156344 - RNA, 80 nt, Human
guuaggcugaaccaugaaguugcugaugugcaaaugcauuuguccugcaaaacaggcaauuucaugugguuuaaacuaau

SEQ ID NO: 4156345 - RNA, 83 nt, Human
guuagggaggaccucacuuagaagaugcaguaaagcaaugaagaaguugcccugcggcuaucuagaugaagaguuuuccaggc

SEQ ID NO: 4156346 - RNA, 67 nt, Human
guuaggguuacaccagccuccuggcaugaagauguguuuuucaacucagagcuguccaaacccugac

SEQ ID NO: 4156347 - RNA, 67 nt, Human
guuagucagagagcugagauuugaacccaggcaguugggcuccagaguccauguucuugucuaugac

SEQ ID NO: 4156348 - RNA, 65 nt, Human
guuagugugugugacucaauaaccauucuguacaccaccaggaaagugacuuuuauaccacuaac

SEQ ID NO: 4156349 - RNA, 76 nt, Human
guuaguuagaaggaaaguagacuauaguccuggggaaauccccagcuucugaaagucuguuuuccuacuaacagac

SEQ ID NO: 4156350 - RNA, 88 nt, Human
guuaguucuuuacuguguccaucugugacuucuggcauuuacccgguuaguuucauugcaguggacaugcaugugguuuaggaaaaau

SEQ ID NO: 4156351 - RNA, 60 nt, Human
guuauaagaugcacauuuuuucaugcuuaacaucucugaaauuagggugccucuuauaau

SEQ ID NO: 4156352 - RNA, 60 nt, Human
guuauauaacaaauaccuaguggagccagccuccaauucuaggcaauuuguugucauagc

SEQ ID NO: 4156353 - RNA, 80 nt, Human
guuauauaacucucaucucggaucagaagugaucauugaaauggugucguuuuugggagguggggguucauuuuugugac

SEQ ID NO: 4156354 - RNA, 85 nt, Human
guuauauuccacucacauuaggaaguaauguuguucaugguaugaauaaaaauucacugcuuauuugauguuaaaggaaaguaac

SEQ ID NO: 4156355 - RNA, 66 nt, Human
guuauccaaaggugacacagaauacccauaaugaugacugggcaugcguuuuaccuuugggcagac

SEQ ID NO: 4156356 - RNA, 76 nt, Human
guuaucccaguugcucagucaguuuuugugagagauucagggaucuuaauaaaacugugcugcuacugcuacuaac

SEQ ID NO: 4156357 - RNA, 100 nt, Human
guuaucugaucauaucuggcucaucccauguuguaucauucuguuccuauauuugauagagagugaguuaacugugacaauguuaguauauaaagauaac

SEQ ID NO: 4156358 - RNA, 67 nt, Human
guuaugaacauggguguucaguagauguuacuuuuauguugcuuuagaacaucugugucuuuaugau

SEQ ID NO: 4156359 - RNA, 68 nt, Human
guuaugaauaaugcugcugugaacauuggcauauaaauaucuguucacauaggagcaugguuuuuaac

SEQ ID NO: 4156360 - RNA, 72 nt, Human
guuaugagauuugggucaguuuaguuuucuaaugccaaagcaaagagacaaauugaccgcaagauucauugc

SEQ ID NO: 4156361 - RNA, 69 nt, Human
guuaugcaacuagauccuguuagagaauagaaugaaugaaaaaucaauucuguccucacagagcauaac

SEQ ID NO: 4156362 - RNA, 100 nt, Human
guuaugcaacuguauauguuuucaaaauucauagaacuguacgcugaaauacucuuuucaguguacaguucuaugaauuucacucuguguaaguuauagc

SEQ ID NO: 4156363 - RNA, 76 nt, Human
guuauggaugagcaguuaggaggaugaugaauaaaacuagaugccauguugucaguuugaaagcuacaucuauagc

SEQ ID NO: 4156364 - RNA, 59 nt, Human
guucuucccuuuggggauugugaacaucauguucaaggcaauauccaaauggaaacgac

SEQ ID NO: 4156365 - RNA, 124 nt, Human
guucuuccugggggugcagacaagcgcaugcaguucuggaggugcuucgcuggccacccggccuuggguggccuggcuggcaccaccucacucugcuucauguacccccuggauuucccagaac

SEQ ID NO: 4156366 - RNA, 60 nt, Human
guucuucugaaacauaaucaauagguucaugaggaaguuguagaaguucuucaggagaau

SEQ ID NO: 4156367 - RNA, 71 nt, Human
guucuucuuuaaucauaaccaagaugguaaccuauauucccuuagcucguauugguuuugauuaauaaggc

SEQ ID NO: 4156368 - RNA, 64 nt, Human
guucuuguccaacugccuccaguuucuauaugaaauguuggaaaggacaguugcugauaggaac

SEQ ID NO: 4156369 - RNA, 55 nt, Human
guucuuuucccucugcgcagccuuggcucccuuaaugcacagggugggaagcaac

SEQ ID NO: 4156370 - RNA, 66 nt, Human
guugaaccauauggaauugcuguacagcuucaacagcugaauacuggcaauuucauauggugcaac

SEQ ID NO: 4156371 - RNA, 90 nt, Human
guugaagagaagcacaguucauauuuugaguugaaugaugaugucacuucaauuccaacucugaaaugugaaaugauuauugucuucagc

SEQ ID NO: 4156372 - RNA, 81 nt, Human
guugaagauuaaagucagcuuggaacuucauaaagaauaccaaagugucuuuauguuuacuccagcugagcuauuuuuaac

SEQ ID NO: 4156373 - RNA, 89 nt, Human
guugaagucucauaguuaaaauucuuucccaaauuaucuaacaccuguugggaagauuaucucagaaguuuacauagugagacuugaac

SEQ ID NO: 4156374 - RNA, 83 nt, Human
guugaauccuuaccauucgaguucugaggacuaaagagugacuagcuccaaaucccaaagaacugaauaguaauuguugcagc

SEQ ID NO: 4156375 - RNA, 63 nt, Human
guugaaugagugagcacgacaguacugacauucaguuucugaggagucagcuuacucacuaac

SEQ ID NO: 4156376 - RNA, 97 nt, Human
guugacaaugauaauggcuguauuuauugagcacuuaauuauguuccagacucugugcuauguguuuuacaugcauuaucuuuguaaucaucacaac

SEQ ID NO: 4156377 - RNA, 79 nt, Human
guugaccugggaagcuaugaugacuuuuaaggagauuuuaaaccucuguucaaaaagguuuuauguuuuccacuucaac

SEQ ID NO: 4156378 - RNA, 125 nt, Human
guugacgcuggguggagguuaggcccgacaggagcccaggaugggcggaggagauccucucucccacucucugcacuccugggucuugacccccugcuucccaauuaccaccaccaaaaacauac

SEQ ID NO: 4156379 - RNA, 60 nt, Human
guugacugaaggucacagacuccugucagguggcccugugugucuggauuuuucgguaac

SEQ ID NO: 4156380 - RNA, 84 nt, Human
guugagaucguucaguaugaaguagagcagagaugcccucuccgcagccgggcgguaguucucucucgcuucguugauuuuaac

SEQ ID NO: 4156381 - RNA, 105 nt, Human
guugagauggagucucgcugucucgcugaggcuggagugcaguggugcaaucucggcucacugcaaccucugccucccagguucaagugauucuccugccucagc

SEQ ID NO: 4156382 - RNA, 78 nt, Human
guugagauucuggaggagaaagggugggcgaguacaaaacguaugccuucucuuuccccucuacccuucuguuuuaau

SEQ ID NO: 4156383 - RNA, 57 nt, Human
guugagcagauucagaucagcccaagaaaucugggcugauaaugcauucuguuuaau

SEQ ID NO: 4156384 - RNA, 56 nt, Human
guugagggggagaagauucugcugcuuggaaacaucagaguuucuuauucccugac

SEQ ID NO: 4156385 - RNA, 107 nt, Human
guugaggguagagggcuuaacagcuguuauauaacuuacaaccuguugacauguagaagacaacagauuuauuuuguauagcuuugggggcucuuacuauaaucgau

SEQ ID NO: 4156386 - RNA, 82 nt, Human
guugaguuugagaugccugcuagauauccaggugaaguaggaaacuggauuuauggaucugcaggucaggagcaagauuaau

SEQ ID NO: 4156387 - RNA, 71 nt, Human
guugauaauaaccccugaguaccauaugucuacuuugugggcuuagcacuacaccagguguuauggucaau

SEQ ID NO: 4156388 - RNA, 87 nt, Human
guugauacaugcucuagaguugaacuugaauagcagauccagccuaugaaacauucaggcaaucacugugguauauauguaucauac

SEQ ID NO: 4156389 - RNA, 60 nt, Human
guugauaugugugugugugugugugugugugugugugugcacacaugcauucaugugggc

SEQ ID NO: 4156390 - RNA, 97 nt, Human
guugauccauggaccacacuuugaguagcaaggcuguaagagacauucauccuuggaguucuguuuggcuuaaaaauugugaccccucuguuucaau

SEQ ID NO: 4156391 - RNA, 58 nt, Human
guugauucucauuuacaguaauuauuuucuauacagucacugugaaugcugaauuagc

SEQ ID NO: 4156392 - RNA, 91 nt, Human
guugauucuggguugagauggggggugguugugugaggauuaauggagccauuuugaaaaccguugcuaaucaggcuaaaaugaaucacac

SEQ ID NO: 4156393 - RNA, 91 nt, Human
guugauuucagcuugcugcagcagcacaggaagauggguccgcaucacaggcuccuggcuaaugcugcugauggcgaaaugcuggagaaac

SEQ ID NO: 4156394 - RNA, 57 nt, Human
guugcaaacuccuacuucucauggaaguauguauauagagaaguuagacauugcaau

SEQ ID NO: 4156395 - RNA, 66 nt, Human
guugcaagggguuuaugcagaugagggucccacauguuuucuucaugcuaaagccaccuuugcaau

SEQ ID NO: 4156396 - RNA, 77 nt, Human
guugcagccacuaacauguuaaucaaaagaagcaaauacauguuuuucccuugagaaaacauggauagugguguaac

SEQ ID NO: 4156397 - RNA, 73 nt, Human
guugcaguauuagcauauauagagaacauuuucaucaucacagaaaguucuauuggauagugcuggucucgau

SEQ ID NO: 4156398 - RNA, 74 nt, Human
guugcagugagcagagaucgcgugauugcacuccagucucagugacaagagugaaacucugucucaaaaacaac

SEQ ID NO: 4156399 - RNA, 127 nt, Human
guugcagugauggauucuuuaucccuucauuaacaaugacugcuugacuguacuagguuacaguacuuaauugugagcaguaacuguuggccagagugauguuauuuaagaaaccaacacuaacaac

SEQ ID NO: 4156400 - RNA, 83 nt, Human
guugccacuauguaugccaauguuacggaaugucaaggacuucacagaagucacacuucguaucucuagcauggcaagggaac

SEQ ID NO: 4156401 - RNA, 72 nt, Human
guugccagcuuguuuuaaaacauauuuguacuggauccaauugcuacauguuucuaaaacuugcauggcaau

SEQ ID NO: 4156402 - RNA, 69 nt, Human
guugccagggugcucuguggcgucgcauucucauuggugggcgacggcgaggaucacccccgaggcagc

SEQ ID NO: 4156403 - RNA, 69 nt, Human
guugccaugcuaauacugagccaccagguagggcaguguugcccugguuugggugccagugaguuuaac

SEQ ID NO: 4156404 - RNA, 71 nt, Human
guugcccaggccuggagugcaauggcacagucuuggcucacugcagucuuugccucccagguucaagcgau

SEQ ID NO: 4156405 - RNA, 106 nt, Human
guugcccuacacgugaucacacaugaagaauguacauagcaucaucuaggauagcuuguguccaggauggcccugacacuuucugguauucauguucuuggguaac

SEQ ID NO: 4156406 - RNA, 59 nt, Human
guugcccucacuggcccuuuauugcagcccaggcuggagcugaggacgugaagggcggc

SEQ ID NO: 4156407 - RNA, 79 nt, Human
guugccuaaguguuuaacggugauugagcggggacguugacgguacaaacacugauugaauuuaccacuggagggcaac

SEQ ID NO: 4156408 - RNA, 85 nt, Human
guugccucaccuguaaaauguggaugauacuaguacuucauaggcugugaagauuagacaggauuaugcaugcagagugaaugac

SEQ ID NO: 4156409 - RNA, 62 nt, Human
guugccuuugacggugcagcaguacuuucuucucuuuuguacucugcaauaucacaaggaau

SEQ ID NO: 4156410 - RNA, 78 nt, Human
guugcgaauuuugucugcauauuagauuuguuuuugaaaccaaaugaacaggugaaugucagauuuccaaguuccaac

SEQ ID NO: 4156411 - RNA, 76 nt, Human
guugcuaauauuuuuagaaaucacgagguuucacaugaaaacccugaucucugguuuccccugagaaauuggcaac

SEQ ID NO: 4156412 - RNA, 68 nt, Human
uaaucuuuugauucuagggcuguuucuuacuaccuauuuggcacaguugugagaauucaauaagguua

SEQ ID NO: 4156413 - RNA, 73 nt, Human
uaaugaaauguuuacgaauauaccauuaaugaagcaaguugacauuagguugugcuuuguggacauuuaauua

SEQ ID NO: 4156414 - RNA, 67 nt, Human
uaaugaacucuuuacuuugggacugcuuuccauuguauccuuaagaaacaauagagagugaacauua

SEQ ID NO: 4156415 - RNA, 70 nt, Human
uaaugagaaugucacagauucacgagggcauaacaaaacaaaacucuugguagauaaagcauuuucauua

SEQ ID NO: 4156416 - RNA, 58 nt, Human
uaaugagggggccuggggucuggaugaagcuugagaagccagccuugccuccuuuuua

SEQ ID NO: 4156417 - RNA, 69 nt, Human
uaaugagugaguauaauguuucaacuaugcaaaaugaaugaguucuaaacauucuacuguacugcauug

SEQ ID NO: 4156418 - RNA, 64 nt, Human
uaaugaugguuucaucacuugaacugucuugcauugauggguauguucaaguaaacuauuauua

SEQ ID NO: 4156419 - RNA, 61 nt, Human
uaaugcacguuaacauuugagaagugcuuguuugaaagaugaauuuguuagcugugcauua

SEQ ID NO: 4156420 - RNA, 93 nt, Human
uaaugcucaggggaucacccccuucaguacuuuccaucucacugcagauacuucacauuagggcagguacuggguggugagcuaugagcauug

SEQ ID NO: 4156421 - RNA, 82 nt, Human
uaauggaauaauccuugggaagagaggaauaugaaucuugugcugaugaaaauaauuucucacuuucuauuguuuaucauua

SEQ ID NO: 4156422 - RNA, 122 nt, Human
uaauguaugucucaauaaacuggcaucugauccaauagauauauaugucuugagaaaaagcauucaagaaaauuuucauauaucuucauuaggucgagagaacagcuuuaaacacaauauua

SEQ ID NO: 4156423 - RNA, 63 nt, Human
uaaugucuaugggccagauaauguccauaaauuugacauuuucaguaucuagucuagacauua

SEQ ID NO: 4156424 - RNA, 57 nt, Human
uaaugugugucaucaguagagugggggcaauaaucugcuuugucuauacacacauua

SEQ ID NO: 4156425 - RNA, 94 nt, Human
uaauuaaaauucacuucacagcaaagagacugacauugauguugcuggguauuuucaguucuuaguaaugcagucuuuuggauaguuauaguua

SEQ ID NO: 4156426 - RNA, 59 nt, Human
uaauuagaaaggguuuuggggccagauguuaaacuggucucaaaugccaguuuuauuua

SEQ ID NO: 4156427 - RNA, 83 nt, Human
uaauuagacugagguuaugggguuuuaggaagacuacagugauucaguguccuuuucaucaccccaaaucuauggucuuuuua

SEQ ID NO: 4156428 - RNA, 80 nt, Human
uaauucacuaguauucuuugguugugugcaaaagaaacugacccugacuaacaugaaccaaagaaaacuguggugaguua

SEQ ID NO: 4156429 - RNA, 76 nt, Human
uaauucaguuuguuugacuguuagaguugauccuccaggcauaaaaggauguuuagucaucaaacaaacaggauua

SEQ ID NO: 4156430 - RNA, 63 nt, Human
uaauugcccauauuugagaaugacuuuauuaauuauguuguuucuuucauuuagggcuaguug

SEQ ID NO: 4156431 - RNA, 76 nt, Human
uaauuguauucacaggauguagcuaauuuuuaaaacccaagggguauauuauuaguuauacuacugaauggaguug

SEQ ID NO: 4156432 - RNA, 76 nt, Human
uaauugugagugagauaugucucacuguccuuuguggacaaagaacaaugaaagacauaaacucagggcacaauua

SEQ ID NO: 4156433 - RNA, 74 nt, Human
uaauuugcaauggcuuucagcaaggauagauuacugguaccuugauucuacuuuuuugaggguuauguugauug

SEQ ID NO: 4156434 - RNA, 129 nt, Human
uaauuuguauuuauauguuuguuggggcauaagagaaauaucugucuuaaucacuggauaguaagauuuguaaagguaggacagagauuuguuuuauguacuaucgagcuuccaauaauuggcaaguag

SEQ ID NO: 4156435 - RNA, 55 nt, Human
uacaaagucaccagcuucuugcaguagccaugcuggcauucuguuugauuuugug

SEQ ID NO: 4156436 - RNA, 89 nt, Human
uacaaauaucuguuccagucccugcuuucaguucuuuuggguauucauccagaggagaauugcgggaucauaugguaauucuauuuuua

SEQ ID NO: 4156437 - RNA, 86 nt, Human
uaaguucuaggguacauguacacaacgugcagguuuguuacauauguauacaugugccauguuggugugcugcacccauuaacuug

SEQ ID NO: 4156438 - RNA, 86 nt, Human
uaaguucuaggguguauguguacaacgugcagguuuguuacauauguauacaugugccauguuggugugcugcacccguuaacuug

SEQ ID NO: 4156439 - RNA, 76 nt, Human
uaaguugauuucugauacaggaaaaggagaaucuacuacuuacgcuccuuggcugucuugugugggaaacaauuug

SEQ ID NO: 4156440 - RNA, 97 nt, Human
uaaguuuaaagcucagucauguuaucagacacagaguacuucauucauuuugauacuaugaagugcucugugguagguaugacuaucucacaauuua

SEQ ID NO: 4156441 - RNA, 94 nt, Human
uaaguuuggaugcaucuugcugacuugcauuauuuauaauuacaaacacaagcagcuaugauugagcuuugcagcaaauguuuuccuucucuug

SEQ ID NO: 4156442 - RNA, 72 nt, Human
uaaguuuugucuggucaaaucacuuguagguuucugucuucuaacugaacccugacuaauaagcagaacuug

SEQ ID NO: 4156443 - RNA, 82 nt, Human
uaauaaaugcuaguuuuugauacucaagagggguagauuuuguucagaagauuacuuugguuuuaaaaauuaauauuuauua

SEQ ID NO: 4156444 - RNA, 126 nt, Human
uaauaacucugaucuauaugaaagagcccugaaacucaagaaauuuacagagaagauauaacauacaaaaugucuguaaaacuucuuuguaaauaguaaguggcuauaugcauuggaagguuauua

SEQ ID NO: 4156445 - RNA, 65 nt, Human
uaauaagaggauuaauugucuuaccuagcaagaaucccagagguaaggcaguuucaauuuuguua

SEQ ID NO: 4156446 - RNA, 82 nt, Human
uaauaauugcuuguugaacagauauaugauuguguaaaugaauaauauuugcuucauagaucuguggacauagugguaauua

SEQ ID NO: 4156447 - RNA, 58 nt, Human
uaauacagagcacugaccuaugggggagaaaagccuaaauuuuaguguaucuguuuug

SEQ ID NO: 4156448 - RNA, 72 nt, Human
uaauaccugaugauuucauuucuagcuguaaacucaauugaguuuuagggcugagggaaauuacagagauua

SEQ ID NO: 4156449 - RNA, 128 nt, Human
uaauaccugcaauuacuuggaaggcaaauaauauaccuaauguaccuacagcucuaggagaaacaguuggaaauuuuaguguuaaugguguauauuaggcauugccgacugcauuuggcaagguauua

SEQ ID NO: 4156450 - RNA, 76 nt, Human
uaauagaugaauguauugaacuguuggagagguuuucugagguucgaagaccugcacaguuuaccauuaucaguug

SEQ ID NO: 4156451 - RNA, 83 nt, Human
uaauagguauguaauaauuguugaauagauggauaauucuuuaacccuguaaugaaguguccucauucaacaugcauuuauua

SEQ ID NO: 4156452 - RNA, 73 nt, Human
uaauagucacuuuaugggaagcaaaaauuuagguugauacuuuccaguuuuauugucccagaggugauaguug

SEQ ID NO: 4156453 - RNA, 69 nt, Human
uaauaguuccaucauuuuguauccaaggggaaaggauuuuccucccagagaaaaacugaagagcuguua

SEQ ID NO: 4156454 - RNA, 57 nt, Human
uaauaguugugacuuuguaaagcuuuuaaaucugcuuuccccagagucuagcuuuua

SEQ ID NO: 4156455 - RNA, 96 nt, Human
uaauaugaccuggcacaguguguagcacaugguaagcacacagcuaguuuuagugcugcugcuccugcugcugcugcugcugccauuaucauauug

SEQ ID NO: 4156456 - RNA, 110 nt, Human
uaauaugagagacuuguuagaccuuaaauauaagguggcuuuuuucccgauggauaauuuuugguggaaaaguucaucauauauucaggcauaaauugugucucauauua

SEQ ID NO: 4156457 - RNA, 72 nt, Human
uaauauucacagggggagaaggguauaauacucccgauaucgcaggggguguacacucccccugugaaguug

SEQ ID NO: 4156458 - RNA, 76 nt, Human
uaaucaaggcugcauaagacgagagaauuuuauguaagaauuuccuauccuggucuuaaaaauguagcuuuuuuug

SEQ ID NO: 4156459 - RNA, 74 nt, Human
uaaucacauguuguuugccccaguuguuauugccauaucaggcaacugcaguguuaaacaacugcugcugauua

SEQ ID NO: 4156460 - RNA, 57 nt, Human
uaaucacugaucaugugcacuaggugccacuuaccuuugcuccaucuaaagugauua

SEQ ID NO: 4156461 - RNA, 69 nt, Human
uaaucagauuugaaaacugguuuuuauuucacuaggaaauaggaaaugauuuuaguuuaucauggauug

SEQ ID NO: 4156462 - RNA, 118 nt, Human
uaaucuacauucagaagaugagagaagacuaugauuuucauaugcuugauuucuugcauuugauuugguaggaaacaaugaaauucauucuucacugaauuuucaaacauguugauug

SEQ ID NO: 4156463 - RNA, 85 nt, Human
uaaucuauaaaguuacgauuuguuuacuuauaaauuuauuuuuaauaaaguugugaaaccgaacauguucuguuuuuguggguua

SEQ ID NO: 4156464 - RNA, 92 nt, Human
gugccuagcauguaugauaaccuguuguaguuugauuugggggcagacaggauagacuauaaauuuggguuuucuuuaaaaagcuacugcau

SEQ ID NO: 4156465 - RNA, 129 nt, Human
gugccuagucacuuuccagcugucauuuauuguucuaagagggaguuuuaauggggaaaaaaauuccaggaagauuuauuuuggcuuugaacuuuggcaagaaguguuaauucauaagaggcaguucuc

SEQ ID NO: 4156466 - RNA, 91 nt, Human
gugccuagugcauagugguuguucaguguuuguugaauguauaaauuauuuaugcuauuuuuaucuugaucaaaauuguccaucuggucau

SEQ ID NO: 4156467 - RNA, 79 nt, Human
gugccucaccccaucagaaggccagaggguagcccaagcuagaaggagguugcccaggccuugccugagcccugaccac

SEQ ID NO: 4156468 - RNA, 85 nt, Human
gugccuccuccucuuuguccuagagauggccagagaaaacccuggccccuacauuucucagggcugaggaggagagagaggaaac

SEQ ID NO: 4156469 - RNA, 91 nt, Human
gugccucgugauuggcuucugcauuggaaaccuaagaauaagcaagcacacuugggccagaauucaaagcagagggucaauacagagguau

SEQ ID NO: 4156470 - RNA, 56 nt, Human
gugccucuagcuuaaaauaauccuuaugccacaguggcauauuuuugggcuggcau

SEQ ID NO: 4156471 - RNA, 75 nt, Human
gugccugaggcugugugucccucuggacacaggcaaccugucuuugugcuaugauuggacagaauagcugggcac

SEQ ID NO: 4156472 - RNA, 65 nt, Human
gugccugcccucucggcauagcaggggcugcucagcugcccccaacaggugccaagggggagcac

SEQ ID NO: 4156473 - RNA, 61 nt, Human
gugccugccuguacuagagacccagacguuuaugcucuuggggaggcaggcaggcaggcau

SEQ ID NO: 4156474 - RNA, 71 nt, Human
gugccuguuccauuuagcuggcaaacaauguuagaauuacugauuagccagugaaauggagaaauuggcac

SEQ ID NO: 4156475 - RNA, 90 nt, Human
gugccuuaaaggccuaggugaacauuucuuugguaaacaugggcucugaacugugagcccugagacugaagaacugucccagucaggcac

SEQ ID NO: 4156476 - RNA, 102 nt, Human
gugccuuacacaugguacucuauaauaaaaaauguauugaaguucaauaacugaauaaaugaauaaaucagucauaguuuggagagaauaguguaguggcau

SEQ ID NO: 4156477 - RNA, 71 nt, Human
gugccuucuucaugcugugcuggggcugcuggaggggacugggcugcacaguggacagugaagaugggugc

SEQ ID NO: 4156478 - RNA, 70 nt, Human
gugccuuguaguuucaauugagugauuccauugugugaaaaggaauuacugggucugagauuaauaguau

SEQ ID NO: 4156479 - RNA, 71 nt, Human
gugcgaggagaggggccuuggggaaaagcucagacccacccuaacuugucuccugggucccuuccacccac

SEQ ID NO: 4156480 - RNA, 77 nt, Human
gugcgagggucccaggaggugcuuccuaggagccggcccugagggcucuucugggaagggccccugaggcaugacac

SEQ ID NO: 4156481 - RNA, 63 nt, Human
gugcgaggucuuguugucgccacgcucgauggugagcggcguggcauugacgcugaccugcac

SEQ ID NO: 4156482 - RNA, 61 nt, Human
gugcgcccacuucaggcuaacgggagaacaucucccagagcccaaguuggagagggcgggc

SEQ ID NO: 4156483 - RNA, 85 nt, Human
gugcgcgcgccccucaauugucucuggggacagguaguccagggugccacacauuugucuuccuccucagugagggggcgugcac

SEQ ID NO: 4156484 - RNA, 79 nt, Human
gugcggauggauugcuaauguggggauuuggggggaaaucaaaguguucucaaaugcuguauuguaguaauacuugcac

SEQ ID NO: 4156485 - RNA, 95 nt, Human
gugcggcggcagggcaagguuggccugggccgcccagaggucuucagacccaggggcgaagcuggccacgacccagccccgcggugaagccgcgc

SEQ ID NO: 4156486 - RNA, 73 nt, Human
gugcggcugcguuacaggggccucaguugugaugugucauucugaggucuauuuugaaacugcuaagcugcgc

SEQ ID NO: 4156487 - RNA, 71 nt, Human
gugcggcugucgcugugagucugcaugggagaguggcggcgugcucuccucugcgcggcagugccccgugu

SEQ ID NO: 4156488 - RNA, 60 nt, Human
gugcgggugguugguuaggguccuucccgugcacagcuugacuccggccagcaacugcau

SEQ ID NO: 4156489 - RNA, 108 nt, Human
gugcggucuggagccucuggauggagccauuccugaagacuucaccaccaguggaguuuucauucgugugcuccagguuauucccuuuguugguuaauccagauccac

SEQ ID NO: 4156490 - RNA, 75 nt, Human
gugcguccauuggagguuucccaacuguggggaccccaagcucacaggguuuggaagccuccugaggacagcugc

SEQ ID NO: 4156491 - RNA, 83 nt, Human
gugcguucagugccccacagaggcagauccccuagcuaugcagucauggcugcugggaauaugccagcugucagggccaccac

SEQ ID NO: 4156492 - RNA, 56 nt, Human
gugcguugcaugcugagagccaagcaccgacaaaggcccagagacgugcaauguac

SEQ ID NO: 4156493 - RNA, 77 nt, Human
gugcguuggggacugggagauccuccuggcaucuaguggauagaagccaggggagcugcuagauaucuacagugcac

SEQ ID NO: 4156494 - RNA, 68 nt, Human
gugcuaaagaauuuugcuugaccagaaccagaccacaauauguuugucaagcuuguucuucuagacgc

SEQ ID NO: 4156495 - RNA, 67 nt, Human
gugcuaagauuauaggcuugagccaccgugcccauccggcaccaguguuuaccugugacaaagccac

SEQ ID NO: 4156496 - RNA, 67 nt, Human
gugcuaaugaauuggagugccucucauauacaaauuuaauuugaaggcuuucaauuacuuuuagcau

SEQ ID NO: 4156497 - RNA, 70 nt, Human
gugcuacaguuccaggaucauagggucuucugggguuucccgcguggcccaagaucuggagcugcagggc

SEQ ID NO: 4156498 - RNA, 76 nt, Human
gugcuagacaugcugugagagucccaaagagcucccauucagagagggaccuuuacacagacauucaaaauaguac

SEQ ID NO: 4156499 - RNA, 86 nt, Human
gugcuaggaggcauuuaacaaguuagauuguuaguauaauacauuuuaauugucagugggauuugucaacaugucuccugcuguac

SEQ ID NO: 4156500 - RNA, 78 nt, Human
gugcuaggcauucaguagaaguuagcuauuaucagcuauuggcuuauuaauggccacuucuugcuucaaguuuaacac

SEQ ID NO: 4156501 - RNA, 85 nt, Human
gugcuaucuggagcuacugugauaggaacuguguguaaagaagacugcuuacagcacugugcauagugguucagacuauggacac

SEQ ID NO: 4156502 - RNA, 73 nt, Human
gugcuauguuccuuggugaaauggaaauguuguuauacauacuuccagggcagcaagugaauggaauagacac

SEQ ID NO: 4156503 - RNA, 62 nt, Human
gugcuauucauauuguaaaagaagugaucaaauuauuucuuuuucuuauagugugauuguac

SEQ ID NO: 4156504 - RNA, 66 nt, Human
gugcuauuuuagacauacuuuguauguuugagggacaacuaagagcacaaaguguguggagagcac

SEQ ID NO: 4156505 - RNA, 59 nt, Human
gugcucaggggcaauccugggaaauuucuuuuuggguuggcaugccccugacuggacac

SEQ ID NO: 4156506 - RNA, 84 nt, Human
gugcucauguuuauauauuuguagguaguuuuucauuuuuuaaauugcauauauuauguacaaaauguuuugaaauguguguac

SEQ ID NO: 4156507 - RNA, 56 nt, Human
gugcuccaaaucuuggccaaggaagaaagagagacuggaucugugaucuggggcac

SEQ ID NO: 4156508 - RNA, 56 nt, Human
gugcuccggaucucuaugccucuaguuaaugucagggcaauuaggcuucugaguau

SEQ ID NO: 4156509 - RNA, 55 nt, Human
uaccucagaaucccccaaagauuuguuaucaguggcaccaggcauucuaggggua

SEQ ID NO: 4156510 - RNA, 55 nt, Human
uaccuccuccaacuguuggucucagcugagugagauucccaugucugaggaggug

SEQ ID NO: 4156511 - RNA, 57 nt, Human
uaccuccuuccugggacagagcugggaagaucuccagggcugguagggaagagcgug

SEQ ID NO: 4156512 - RNA, 59 nt, Human
uaccucucggggucuguuugugugaaaacucaaagauaaauaugacucugggugaggug

SEQ ID NO: 4156513 - RNA, 62 nt, Human
uaccugagaagaaacccguguuuucauguucaucucuuuaacauggggcagguccuuaggua

SEQ ID NO: 4156514 - RNA, 89 nt, Human
uaccugagagcuuguuagaaaugcagaauccuaggcccugcuucagaacuuacagaugcggaccugcauuuuaacaagaucuccaggug

SEQ ID NO: 4156515 - RNA, 64 nt, Human
uaccugaucuccugcuguguugggaucauccucugcaaugucccugcacuaagaggagaaggug

SEQ ID NO: 4156516 - RNA, 85 nt, Human
uaccugcugagcccagggaagugggauaggacagagccuugcccgucaggcucugagacuuuucaccucccagcucaagcaggug

SEQ ID NO: 4156517 - RNA, 58 nt, Human
uaccuggggcugggcuuugauucugucaucuucagaaguagugucacucuuccaggua

SEQ ID NO: 4156518 - RNA, 55 nt, Human
uaccugguaucuucccugucacaaggaagcugaacagggcucugacaccaaggua

SEQ ID NO: 4156519 - RNA, 72 nt, Human
uaccuguuaaggaucugggagggaaacuugcccuguguuaaaguguucaauccccagguccugaauucugug

SEQ ID NO: 4156520 - RNA, 75 nt, Human
uaccuuacuuuuguuuaaggaauauauguucugguguguagaauguagaaugauccuuaggauaauaagaaggua

SEQ ID NO: 4156521 - RNA, 56 nt, Human
uaccuuagauagcaagagaaugcauuaauguguuuccauuguccuaucuauaggua

SEQ ID NO: 4156522 - RNA, 85 nt, Human
uaccuucugucuagauguuagaucauuuugaacuaauuuggaaaucuucaugcuuaauuuagaagugauucaucuacagaucgug

SEQ ID NO: 4156523 - RNA, 67 nt, Human
uaccuugggcuauuaucuuugacuuucauuaaauuuugcagaccucaggauauugugugccaaggug

SEQ ID NO: 4156524 - RNA, 58 nt, Human
uaccuugugagcuuucuaacauggugucuuuggaccaaaggggaguucuuuuaaggua

SEQ ID NO: 4156525 - RNA, 84 nt, Human
uacgaauguaauucuuauuauaguaaaacaguacuagggauuauuugaugugcuguuguacuuuagacagaaaaagcagcugua

SEQ ID NO: 4156526 - RNA, 65 nt, Human
uacgagcgcucuugcuggccaacggauacugagucuucugugagugguuugagcuggguguugug

SEQ ID NO: 4156527 - RNA, 67 nt, Human
uacggaauuuucagguagcaauuucauuaaagccccaguuauuuggaagcuaucagaaaauucagua

SEQ ID NO: 4156528 - RNA, 78 nt, Human
uacguuagguucauguuugagaacaaggaguccaacauccagaucagacuucuagaauuucaaaucugaaauaaugua

SEQ ID NO: 4156529 - RNA, 79 nt, Human
uacguugaggagcuucuggaaagugcacauucugacucagcagguauuggagucugcauuucucaugagcacucaggug

SEQ ID NO: 4156530 - RNA, 125 nt, Human
uacuaaaaauaauguaaacuguauauucugccauaauggauaucuugggauuugucaugcagguaguauauuucaagaacuucuauccauaauguguaucaugcuugcuucauuuaaaaucagua

SEQ ID NO: 4156531 - RNA, 80 nt, Human
uacuaaaagccauugaacuguacuuuaaaugggugaauaugaauuuuaucucaauaaagcagugcaaaagcguuuuggug

SEQ ID NO: 4156532 - RNA, 58 nt, Human
uacuaaguuugucucauuugaucuucacaauucugugaaaaagguaggacagauagug

SEQ ID NO: 4156533 - RNA, 82 nt, Human
uacuaauuauugauucaauuucauuaauagauauagaccuauucagaggaucuauuucgcauauaaguuuugguaauuggug

SEQ ID NO: 4156534 - RNA, 56 nt, Human
uacuacaguuuggauccuaugagggcggcgaccugcaugucuuccacacuguagua

SEQ ID NO: 4156535 - RNA, 68 nt, Human
uacuacuaacacaguuuuucagacagagauuuaaugggaucucguuuugagaacuguguuauauagua

SEQ ID NO: 4156536 - RNA, 68 nt, Human
uacuagcugugugguuugggcaaauuacaaaaccucucugugccuuacccucacccauaaaaauagug

SEQ ID NO: 4156537 - RNA, 69 nt, Human
uacuaggccaacugauguggcuggaugauucucugaagaguucacccccuguauuaguagcuaccagug

SEQ ID NO: 4156538 - RNA, 69 nt, Human
uacuauaccauguaagauaugaaggaguucucuucaccuaacucccucaaaugcuaaauggugguggua

SEQ ID NO: 4156539 - RNA, 58 nt, Human
uacuauacucuccauuuuauaguagaggaaacuaaagcuaagaugcgagaauaaagua

SEQ ID NO: 4156540 - RNA, 78 nt, Human
uacuauugugaauagugccgcaauaaacauaugugugcaugugucuuuauagcagcaugauuuacaauccuuucagua

SEQ ID NO: 4156541 - RNA, 65 nt, Human
uacucaaauucucuacuguaugaauuaugcuuuaaguagaauucagugccaaggagaacuuggug

SEQ ID NO: 4156542 - RNA, 65 nt, Human
uacucaaauugccugaguaugucacaugcagaaaugcuuauguccgucacuugguaauauuugua

SEQ ID NO: 4156543 - RNA, 71 nt, Human
uacucaagaccagcuuuuaacacauaaaugaucuugaaaguccugugugauuggaagcugagacuugagua

SEQ ID NO: 4156544 - RNA, 60 nt, Human
uacucaccauaugacuuuacuaacagucugaucauugcagugaggggguaugugugugug

SEQ ID NO: 4156545 - RNA, 76 nt, Human
uacucaccuuuauuguuguuguuagucuguuuucagaguuuauagacaaauuuccugcaaugaaguuuaaggagua

SEQ ID NO: 4156546 - RNA, 67 nt, Human
uacucauuugacacuuuaaacuguuuugucauuuagucucaaaaugguuuggauuuacaaaugagua

SEQ ID NO: 4156547 - RNA, 80 nt, Human
uacucauuugcuaaugaggcaagagucauggcuccauccccucauuuagcauggaguuuugcuucauucugugaguggug

SEQ ID NO: 4156548 - RNA, 55 nt, Human
uacuccaggacuccauuugaaaagaccugguuguucaauguggaguuguggggug

SEQ ID NO: 4156549 - RNA, 70 nt, Human
uacuccugcugaauuugaguuagcugccugucacuuuaaaguuuaagcagcugcagguucaaaggaugua

SEQ ID NO: 4156550 - RNA, 106 nt, Human
uacucucaugaaaacucucuuaacuguuuuauaaaguccaaaagugguuggagaaaagaaauaacuaaugguauugugauauggugagaaagauaaugugagagua

SEQ ID NO: 4156551 - RNA, 55 nt, Human
uacucugccacuaggaguucugccuguaggagggaaaauagaaaauggaagagua

SEQ ID NO: 4156552 - RNA, 129 nt, Human
uacucuugcugcuucaaugauauaaugcuuugcuuuaagguuugcuuaucuucgccugugaaaccacaggugaagaauuauaaacuaaggguuuuagccauguauucaagaagggauuuggcaaacaaa

SEQ ID NO: 4156553 - RNA, 56 nt, Human
gugggcaggagagaagcuaaagaaaguauccuuucuuugauuuccuuaccuuucau

SEQ ID NO: 4156554 - RNA, 78 nt, Human
gugggcccagguacaagcagauuaguguuuauuucacuguggaaacuaaagagguguuuuugcaugggcaauaaccac

SEQ ID NO: 4156555 - RNA, 68 nt, Human
gugggcccuguuuccaguuuuuaaaaaugaacucuugaaaugaaggugggcuggacaugguggcucau

SEQ ID NO: 4156556 - RNA, 61 nt, Human
gugggcucagaacugcucugaaacacgagaaaacccguggacucagggccaugagcgccac

SEQ ID NO: 4156557 - RNA, 57 nt, Human
gugggcuccuggcagucaugcucaucaaccgcauggcagaggcagucaugacccugc

SEQ ID NO: 4156558 - RNA, 58 nt, Human
gugggcugcccuggucccauggcugauuggaaaaauccuguggcuccagggagccggc

SEQ ID NO: 4156559 - RNA, 93 nt, Human
guggggaagacacagccaggccaggaggcuucugcaggccuugggcuucccugagggccucgcggcuucugguggcugcuauaguggccccac

SEQ ID NO: 4156560 - RNA, 57 nt, Human
guggggaccuggacagcggcacagggugugaaguccgugccugcccagguccugcac

SEQ ID NO: 4156561 - RNA, 61 nt, Human
guggggagcuggggaggcuuggccuggcugcagggggccuggcuuccuucccagcccccac

SEQ ID NO: 4156562 - RNA, 122 nt, Human
guggggaucuccuuccucugagaucagccaugcaagacccagaaaucauuagccccacucuuaagggucuggugauuucugggucuugcacggcuauuuuuuggaggaugguggagcuccac

SEQ ID NO: 4156563 - RNA, 73 nt, Human
guggggcccgugcuugagaaucugcuuaagaaucuuacuuuucugugcaccuucuaaugaguacuucauccac

SEQ ID NO: 4156564 - RNA, 78 nt, Human
guggggccuuggcccagugggccucggcaggauuucccuguguucagggagugacucucggggccacuagccccccac

SEQ ID NO: 4156565 - RNA, 130 nt, Human
gugggggcucacugggggcccagcuucuccacccugucaccauccuggccucacuuuccuuucuccugggacuucgguucuuggucaagugaggcuggacaggcccagcuguggccccuggcugagcugc

SEQ ID NO: 4156566 - RNA, 66 nt, Human
gugggggcugcuuuugcuguaagccagagauacaaaccuugaggugagcacaaaggcagagaccac

SEQ ID NO: 4156567 - RNA, 84 nt, Human
guggggggaaccugguggcaacccuguccccacugggcaaccaucugaagacaaaguagggugccugcugcagguucagcccgc

SEQ ID NO: 4156568 - RNA, 111 nt, Human
guggggguaggggaggggacaggccagaggagggcucugaugaggguguuggccccuccagacccugccccuggagacauuaucuguccccaaagccccccauguccucac

SEQ ID NO: 4156569 - RNA, 81 nt, Human
guggggguccugaaggaagcagguggccuguguuacuucugaauguuguaucagguguuuuuguuuguuuccuauccuugc

SEQ ID NO: 4156570 - RNA, 89 nt, Human
gugggggugagugacacugauauuaaacacaauuuaauagauucacccaugaggauuauauugggucugguaucagguucugauuaaac

SEQ ID NO: 4156571 - RNA, 70 nt, Human
gugggguaaauggggagagguuacaguaauaauaauucauguaauugguaaaauucuucccauuuuacau

SEQ ID NO: 4156572 - RNA, 67 nt, Human
gugggguaaggagcaaauaucuuuuuagcuccuagggaaggagcugaaguuuccauuuguaccucac

SEQ ID NO: 4156573 - RNA, 93 nt, Human
gugggguaaugggcuuugcugcaauaugaaaaucuaucaaauggguaaaaucaaugacauuguaucagaguucaugaaaagugccuacugcac

SEQ ID NO: 4156574 - RNA, 77 nt, Human
gugggguaguaaacauuuaaccaaacuguuuaauuagacacagaagacuaauaagcagggucaaaugccuacuccac

SEQ ID NO: 4156575 - RNA, 84 nt, Human
gugggguaguaauaagcacuuugcauauuuguuguaaggauuaaauaaaaucauguguaaaaagugcuuaauauggugcuuggc

SEQ ID NO: 4156576 - RNA, 57 nt, Human
gugggguccugagugcuccacgcugaccagcugcauggccuugaaccaggucuccac

SEQ ID NO: 4156577 - RNA, 87 nt, Human
gugggguuuuccagcagauaaauagacuuggucagacuauuuacuagaaaucagaagaagguauauuuauacuaugggagaagucac

SEQ ID NO: 4156578 - RNA, 57 nt, Human
guggguaaauucaaaaucagaugaaucauuaucuuuuuugucaccugauuugcccac

SEQ ID NO: 4156579 - RNA, 63 nt, Human
gugggugagcagaacagguggcuucucagauucccuuguaggauuccugugacugucauugac

SEQ ID NO: 4156580 - RNA, 82 nt, Human
gugggugauuuaauaugguacuccuuaagcuaacaggccccugucaccauuagcuuaaggaguaccagaucaaaucacccac

SEQ ID NO: 4156581 - RNA, 64 nt, Human
guggguggggagcucucuggaggccacauuguugcuggguucagggcagcagcuucucacccac

SEQ ID NO: 4156582 - RNA, 82 nt, Human
guggguuaggacuccagcauauacuuuuagugggacacaauucaacccauaaaagguggcagugcuugagcacuggauucau

SEQ ID NO: 4156583 - RNA, 72 nt, Human
guggguuauuggggacagucugaucaauccauaaauacuuauugaacaucugugaacuccgaaaauuaccac

SEQ ID NO: 4156584 - RNA, 68 nt, Human
guggguucguggucucgcuggcugcaggagugaagcuguagaccuucccagugagugcuacagcucau

SEQ ID NO: 4156585 - RNA, 79 nt, Human
uaaaggcagccuaggaaguguugauuauucaaguaaaacaguagcucuaaauucuuugacuuuccaggcuuguccuuua

SEQ ID NO: 4156586 - RNA, 61 nt, Human
uaaaggccagggccugagugcuuguguuuuuguguuuugguagccaggccuugagccuuua

SEQ ID NO: 4156587 - RNA, 75 nt, Human
uaaaggcuaagaauauacauaguucugugaaaaguaacagcuguuucuccuccucauuggaacugugugccuuua

SEQ ID NO: 4156588 - RNA, 58 nt, Human
uaaaggcuuuuacaggagugcagggggaaaaaaaucugaucauucuuggcagcuuuug

SEQ ID NO: 4156589 - RNA, 60 nt, Human
uaaagggaagaugacuacagaaaaaagaugccaguuauggcauuggucauuuuaauuuua

SEQ ID NO: 4156590 - RNA, 72 nt, Human
uaaaggggcuuuauuacagaauuuagucaauuuuccugcuauucccacuucauuccaguauaagccucuuug

SEQ ID NO: 4156591 - RNA, 86 nt, Human
uaaaggucauggcauugggcuuuauguaggggaagaagaaaaguuguaucuguuugcucuggaaaaagcccugggucuggaguuug

SEQ ID NO: 4156592 - RNA, 61 nt, Human
uaaaguaaaacuguauuaaugucuucauccacagaguaggcaacugacaguuucugcuuua

SEQ ID NO: 4156593 - RNA, 70 nt, Human
uaaaguagaaugacuucucugcuggacuucaagacucugagauccaggagcuauguacacacuaucuuua

SEQ ID NO: 4156594 - RNA, 69 nt, Human
uaaaguauacugaagguauccagggaacuucacuccaaaauauggcucccugguauaauagguauuuug

SEQ ID NO: 4156595 - RNA, 58 nt, Human
uaaagucaucuuuaaacaugccaugccuuuauguggaguguugaguuuaggugcuuua

SEQ ID NO: 4156596 - RNA, 65 nt, Human
uaaagucuguagcaguauaaauaaucaagagcuguuguucuugacauuguuguuagcaggcucua

SEQ ID NO: 4156597 - RNA, 57 nt, Human
uaaagugugcucuguugaaauguaucauucugugcugccaggagagcaugcacuuug

SEQ ID NO: 4156598 - RNA, 56 nt, Human
uaaaguucagugcaugaaugugggauuuguugucugcaugaguuuauagggcuuug

SEQ ID NO: 4156599 - RNA, 78 nt, Human
uaaaguugaagacuacagaaggagaaauggguaaaugugcuuaguguugcccaccuucuuuucgugccuuuggcuuug

SEQ ID NO: 4156600 - RNA, 93 nt, Human
uaaaguuuaacaauuuaauaucagaaggggagguaaagaaggacucacuuucccucuuuaccuccccuucugauauuaaaugguuaaaucuua

SEQ ID NO: 4156601 - RNA, 85 nt, Human
uaaaguuuguguucugguccagaauuuaugauucuaagucaggaggauggggaguuuguuuugaggccaggaggacauuauuuua

SEQ ID NO: 4156602 - RNA, 92 nt, Human
uaaauaauguuaguaugauuuuucaguauaaaauauaugaguuuauuauaacugauggguuucccucugaaauuauagugcaacauugguua

SEQ ID NO: 4156603 - RNA, 98 nt, Human
uaaauacauaguaagugaauaaauaagucacugaccauuuauaugcauagauagcauuuuggguggcaaccgcugacuuagaacauuugcccuauuua

SEQ ID NO: 4156604 - RNA, 60 nt, Human
uaaauaggccuguaggagaauagaugggagauacuaucauuuugugacaaugccuguuua

SEQ ID NO: 4156605 - RNA, 83 nt, Human
uaaauaggguuuaucaacuguuguguucccauggucuuuagaauaugaauauguagaaaacaaaaguugaaaacuuaaauuua

SEQ ID NO: 4156606 - RNA, 56 nt, Human
uaaauaucaguccagcucuuccuuguugaacuugggcauaauggacugaauguuug

SEQ ID NO: 4156607 - RNA, 67 nt, Human
uaaauauuagguuggugcaaaaguaauugcaaaaacuguaauuacuuuugcaccaaccuaauggaua

SEQ ID NO: 4156608 - RNA, 59 nt, Human
uaaaugcaaggauuuuguuaggccaaucauguuaacguaaaaggcuauuuuugcauuug

SEQ ID NO: 4156609 - RNA, 66 nt, Human
uaaauguuccuuuggauuaaacucaagguggaauuuacccacaaguugcuuuaaaaggagcauuua

SEQ ID NO: 4156610 - RNA, 78 nt, Human
uaaauguuuguggagcaucuuaugccuuuccagaacuacuauuuuuauagcugaagaacgugagauccagaaaguuua

SEQ ID NO: 4156611 - RNA, 91 nt, Human
uaaauucucaucagcaacaaggaaagcugugguucugagaagaaucacugucuccgaucacagguuuucaaucaagcuucugagugauuua

SEQ ID NO: 4156612 - RNA, 77 nt, Human
uaaauugagguaugauuuacaugcaguaaaaugcuuaagucuaggugugcagcucagugaauuuuugcccauguuua

SEQ ID NO: 4156613 - RNA, 73 nt, Human
uagagcaaauggagcuugucuacuaacaugugaaguuuccucauugcaaguagauaccaguucuuugacuuua

SEQ ID NO: 4156614 - RNA, 73 nt, Human
uagagccagagagcuauuccaagaggagucaacauuucucuucaaggaagaaguggcuuugagucagguucug

SEQ ID NO: 4156615 - RNA, 58 nt, Human
uagagcuagcuucaaaaugcgauucaacuggguacucugucacuuuaagcuagcucua

SEQ ID NO: 4156616 - RNA, 59 nt, Human
uagagcuauacacugaguaaaaacagagcuugaaaguuuuugacagguggagagcccua

SEQ ID NO: 4156617 - RNA, 58 nt, Human
uagagcugauuucacuucgcuaguccugggauccaggauucagaguaauucaucuuua

SEQ ID NO: 4156618 - RNA, 97 nt, Human
uagagcugggcuccagggcacagcuugcaaggucaucaugcauuggagucuccauccucuccagccucaucgccugccugucccuacagcuucuuua

SEQ ID NO: 4156619 - RNA, 74 nt, Human
uagaggaggggugggcacauguauagccaggauuuggggacuugacuugguauggaugguguggcuuucuucug

SEQ ID NO: 4156620 - RNA, 60 nt, Human
uagaggccucuuugcaaguaggucuuacuucccaggaccuauaaaaacaaggggccuuug

SEQ ID NO: 4156621 - RNA, 55 nt, Human
uagaggcuccuguguguagguucuuugcacagacuauaccaacuuuuagccucua

SEQ ID NO: 4156622 - RNA, 64 nt, Human
uagaggcugacauugaaaaaguugaggccuuuuaaacaaaggaguaucucagugucagcuccug

SEQ ID NO: 4156623 - RNA, 130 nt, Human
uagaggcugaggcuuccuaguggaugggcaaacugguagcucgccugcccguggccauugguaccaggcuggcugguguucaggcucccuggccaguuggccucuccuagaggagcccucaaauccauua

SEQ ID NO: 4156624 - RNA, 71 nt, Human
uagaggcuuuauaugacaagauggcuaaaauuauucaguuugaagacauauuguuacauaaugacccucug

SEQ ID NO: 4156625 - RNA, 57 nt, Human
uagaggggaagacuucuggacaguggcuugacuuugcucacugggcauuuccuucug

SEQ ID NO: 4156626 - RNA, 91 nt, Human
uagagguccacugugggccuggaaucaugcagggguuacaagacgggggacucccaugaccaagcgugauucuccagcaaggggauuucug

SEQ ID NO: 4156627 - RNA, 85 nt, Human
uagaggugguuuaaaaaggcaucugccuaugaaucuauuaaaaugaucuggaagagguagcauuggcaggugcaaagccuuucua

SEQ ID NO: 4156628 - RNA, 67 nt, Human
uagaguagcagcucuccaggguucacaauguggguuguguaacguccuguugaguuucccugcuuua

SEQ ID NO: 4156629 - RNA, 73 nt, Human
uagaguccguccaucagcaguaacuguucuuacucaaccuugauaaaagcuuugccagaugaguugggcucug

SEQ ID NO: 4156630 - RNA, 72 nt, Human
uagagucuacugguuaaaaauaauuuacuuggcuccaaaaggauggcugugaaacauuuuggcaggacuuua

SEQ ID NO: 4156631 - RNA, 82 nt, Human
uagagucuucugcuuuauuuuguuuuguuguuugcaaaagcaauguaagacuguaugagacaauauaaaccuugaggcucua

SEQ ID NO: 4156632 - RNA, 65 nt, Human
uagaguuugugggaauggaguauugcacagaugcagcugcacaauggucuuccuccaccccucug

SEQ ID NO: 4156633 - RNA, 66 nt, Human
uagauaaugaaugccaugacauuuuccaaauaauucuaugcaaaugaaaaugguguuuauaaucug

SEQ ID NO: 4156634 - RNA, 64 nt, Human
uagauaccugcuggaccucauuugcaacugguaaaaucagaagcugucuuccagcagguguuua

SEQ ID NO: 4156635 - RNA, 73 nt, Human
uagauauucuuauccuuuucucuguagaccagaugggcuagcuggguaaauaguaagagugauggauuaucug

SEQ ID NO: 4156636 - RNA, 66 nt, Human
uagauauuggaaauugagugagaauuggccaagaaggaacucuauacuuaaauuccuugauauuua

SEQ ID NO: 4156637 - RNA, 93 nt, Human
uagaucaaagguugauagagcacuaaguaguguauuccagggcaucuccuagugcagguucuauauauuuaauguuauauaaaguuugaucua

SEQ ID NO: 4156638 - RNA, 84 nt, Human
uagaugagauaggagagcugaacuauugucugcaguguagacuuaaagcaauacaggaauaggaucagcaaaucuacuuauuua

SEQ ID NO: 4156639 - RNA, 66 nt, Human
uagaugaguguaaucugaaaacuugaacauugcauguguucagccucuuccuaauugccugaucua

SEQ ID NO: 4156640 - RNA, 68 nt, Human
uagaugauggacuauuugcauauacuuagagucauugagaucauauguacaaggucuaggcaagucua

SEQ ID NO: 4156641 - RNA, 75 nt, Human
uagaugccugugacagucucugucauauaaauaagaauaugcuacaauuuauaugaacuggacuuuaggaaucug

SEQ ID NO: 4156642 - RNA, 128 nt, Human
uagaugcugaugaagguguggagaaauaggaacacuuuuacgcuguugguggccaugugaguuaguucaaccauuauggaagacaguguggugauuccucaaggaucuagaaccugaaauaccauuug

SEQ ID NO: 4156643 - RNA, 57 nt, Human
uagauggacagcaagcucuguuggcaaaaauuucacaacaggcccuggacccaucug

SEQ ID NO: 4156644 - RNA, 93 nt, Human
uagauggcucugaagauacucuucaggucuugcagacccuccuucaccccugggacauaucucaagaucucaagauggccccagaacccucua

SEQ ID NO: 4156645 - RNA, 61 nt, Human
uagauucccaggaagguauaguguuauuucacuaauacagaauacuaauuccugagaaaua

SEQ ID NO: 4156646 - RNA, 114 nt, Human
uagauuguucagugcuguggaucuguugguuuuuuguaaggagguaaauuaggagaggauuuuacuuuuucccauauagaaagccaacugccccaccucacugauggagaugua

SEQ ID NO: 4156647 - RNA, 94 nt, Human
uagauuucacccauagcguaauacuucaagaugcauaaauucaaggauagaauaaauuaaguagauucaguguuaagggugggaaggaguucua

SEQ ID NO: 4156648 - RNA, 85 nt, Human
uagauuuuacuuaguuagacauuuugcaugcaauagaauuguuaacagugaacuuguugccaaauguaaaauauguaaauauuua

SEQ ID NO: 4156649 - RNA, 88 nt, Human
uagauuuuaguaccagcuguacaguuuacuaggugggcauguugcucaacucuucuacuugcaauaaacuguacuauacuagaagcua

SEQ ID NO: 4156650 - RNA, 57 nt, Human
uagcaaaguuaaauggcuuuuguuucugagagucuucucaaagcauuuaauuugcua

SEQ ID NO: 4156651 - RNA, 72 nt, Human
uagcaaauguauugaacauacauauccacaccuucuucccaagaagggauuuuguuguucauuaucguguua

SEQ ID NO: 4156652 - RNA, 122 nt, Human
uagcaacauucuauuaaguaguucuaaauggaguauauuuugauuguauguguugguguuuuauugagcauugcuguaagguauaucauauuuguaaaucugcucuuaagaauauucugcua

SEQ ID NO: 4156653 - RNA, 68 nt, Human
uagcaaggucccaagcaaugcccuuggcggcuuagccaggacacagugacuuggaauacagcuugcua

SEQ ID NO: 4156654 - RNA, 78 nt, Human
uagcaaugcuguggcaaguuacuuugcaccucuauuuuaugaucucuaaaaugggaguacuaugugauaggauuguua

SEQ ID NO: 4156655 - RNA, 64 nt, Human
uagcacaggcuucuuagauuggcuggaggcuccugaguaccaccagccaacagagccuucacua

SEQ ID NO: 4156656 - RNA, 57 nt, Human
uagcacaguauuucucaacugggggcuauuuuaucucccaggaggaaguuguagcua

SEQ ID NO: 4156657 - RNA, 59 nt, Human
uagcacaguguucacaacagugucuggcaucacaaacauugguguuauuauuguugcug

SEQ ID NO: 4156658 - RNA, 64 nt, Human
uagcacaucuggcgcuuauaggugucaugguucauugucacgacuauaagugacagauggacua

SEQ ID NO: 4156659 - RNA, 65 nt, Human
uagcagaaaaacaaauaugugugcgugugugugugugugcguguguguauguuuugagguugcua

SEQ ID NO: 4156660 - RNA, 92 nt, Human
uagauuugucaucccagcucacauaugguaacucuaucaagaaagaauaucguauuaaugugaaguaauuuagggauaauauuauaaaucua

SEQ ID NO: 4156661 - RNA, 87 nt, Human
uagauuuuugaauuucaaaacaguuuuuuaagucucuagggauacaaaauaucccaagggcaagcucuuuuggcuugcagaagucug

SEQ ID NO: 4156662 - RNA, 67 nt, Human
uagcaaagggaaagaagggccuggagggcauugugugccgaaggaggccaguuuuuccugcuugcug

SEQ ID NO: 4156663 - RNA, 67 nt, Human
uagcaaagguagaguuuugagaaauuuaauguguucccaucacacacuuauaacucuuccuuuguug

SEQ ID NO: 4156664 - RNA, 125 nt, Human
uagcaaaguagggacuuguugauuuugagguuggcauuucuuucccuacuaguuccucaggccugacuucaugccuggcugguagagggggcucaacccacauugaugaaugggccugcaggcua

SEQ ID NO: 4156665 - RNA, 55 nt, Human
uagcaacagguaggggagagcuccaacauguuguguuggugcccccuucuggcug

SEQ ID NO: 4156666 - RNA, 71 nt, Human
uagcaaccaucaguuucuucuuuagauaaaauauauuuuauguuugaucugaugaacagagauaguugcua

SEQ ID NO: 4156667 - RNA, 59 nt, Human
uagcaagaagcugucacaggugugacuuugugacauguguggguggucaguuucuucua

SEQ ID NO: 4156668 - RNA, 79 nt, Human
uagcaagccaaauauuuauucuucugagagcacauguuuaauggcacuauuuucagagaacugaguccuugcucuguua

SEQ ID NO: 4156669 - RNA, 61 nt, Human
uagcaagugagguuucugcuuucagacaugccuuuguguuugaagcucuaccuuuuuucua

SEQ ID NO: 4156670 - RNA, 99 nt, Human
uagcaaucugcuuuuucccugucccucaagguccagucaugggggaguacuuagccagacugcccugaccuuguggccccagcugggaagcagagacua

SEQ ID NO: 4156671 - RNA, 66 nt, Human
gugguggcagcacauugacccgggcuccccuccggggucuuggccuuucagugugucaccaagcac

SEQ ID NO: 4156672 - RNA, 61 nt, Human
guggugugauucggaugaggguccugagaacuggauccguaauuuucauugaagacaguac

SEQ ID NO: 4156673 - RNA, 61 nt, Human
gugguguuuguuaacucccauggugcaaauaccgccaccauggcugauuucaagcuaccac

SEQ ID NO: 4156674 - RNA, 63 nt, Human
gugguuaauuggaugucuacuuuccuccauggauucuuuaugaugggaaggaacgacuaccac

SEQ ID NO: 4156675 - RNA, 67 nt, Human
gugguuacagcugcaggagcugagcacuugcagggaguaggguaaugcgccuggagcuuaaugccac

SEQ ID NO: 4156676 - RNA, 90 nt, Human
gugguuauguucauaucauuuugaaagcugaguggauagauuuaaauagcaagagcuuuguucggaaugauguguggaacccagaaucac

SEQ ID NO: 4156677 - RNA, 69 nt, Human
gugguucaugcaucuguucagagcugucgaucaaaaaauguucagaguucucuguccagaugagaccau

SEQ ID NO: 4156678 - RNA, 76 nt, Human
gugguuccagcucccaccaggcagaccuacccucuaggacccaacuccuucuugguggcugccugguggucuccgc

SEQ ID NO: 4156679 - RNA, 83 nt, Human
gugguugaccucucuggagauaagcagcaaugaaauuccaaugaaguuucaucaucucucaucaccaaaaccauccuaaccac

SEQ ID NO: 4156680 - RNA, 70 nt, Human
gugguugagacagaggcuggcugagucaggccuuggggccuugcugccuucccaggccuuugcuggcuac

SEQ ID NO: 4156681 - RNA, 72 nt, Human
gugguugaggacaugcugaauaacuauaugaaucuauuuucuuuuauauggaauaaguauguuaagugccac

SEQ ID NO: 4156682 - RNA, 58 nt, Human
gugguugccuuuuuucaacgguaguaauauuaagccuaccaagaagaaggaaaacuac

SEQ ID NO: 4156683 - RNA, 94 nt, Human
gugguugcugcggucccgccagggcugcaccggggcuucgcgcagacguucucccgcgaucugcugcagcccaggcgguggcgguggcgguagc

SEQ ID NO: 4156684 - RNA, 61 nt, Human
gugguuggauuccagagagguucuggaggugcuggcaccaccaaaacuuucuggggacugc

SEQ ID NO: 4156685 - RNA, 63 nt, Human
gugguuggguggggauuuaguugcaauuuguccuagauucuucuaggucuuuagccuuaucac

SEQ ID NO: 4156686 - RNA, 71 nt, Human
gugguuuacuguccucugcaaagaauuugucuccauuuaaaauggaggaguggagaggggcaggauaccac

SEQ ID NO: 4156687 - RNA, 76 nt, Human
gugguuugaauuagugagaaagaagaugcaauacugaucuuucaugcuauuucuaucucauuuaaauuuuaauuau

SEQ ID NO: 4156688 - RNA, 71 nt, Human
gugguuuuuaauauccaguggauacaaaugccaggagcguuugauguuuuaccauugugaauuugaacugc

SEQ ID NO: 4156689 - RNA, 91 nt, Human
guguaaacaacaguggucaggaaaagacuccccagaaggugaaauuccaacaaauuuuggcagagucauuucagaaacguuaaaguuacac

SEQ ID NO: 4156690 - RNA, 81 nt, Human
guguaaagacuauuuuuuuguacaccuugaauuaccaggaggguauccaagugaagauauacagaaaauaguuguauacac

SEQ ID NO: 4156691 - RNA, 70 nt, Human
guguaaagugcauuauaacugaauguuguucuuguauuucauggacaccaguugucaugcuaaugugcac

SEQ ID NO: 4156692 - RNA, 79 nt, Human
guguaagaguuuguauuuuuucauguguuuuuauuuaccuuuugaugucuauacauguaagacaugagacucuuuacau

SEQ ID NO: 4156693 - RNA, 84 nt, Human
guguaaguacaaacaucaucagaugggugcuugaacuagauguguucaaaauucauccagcucugagguucuauaaauuuauau

SEQ ID NO: 4156694 - RNA, 125 nt, Human
guguaaguagacaugaacagagcuuggcagagucuaaugaggacuuuauagagagagagaaucaucuuugcuauucugcuccuuauuuccauucuuucaauuauuuaugauauucuaauauauac

SEQ ID NO: 4156695 - RNA, 59 nt, Human
guguaagugccccaagggaagggauggcaucugcugugcuggaacccagggccuaacac

SEQ ID NO: 4156696 - RNA, 86 nt, Human
guguaauccuggguaaguuccuaaggcucauuuucaucauauauaaaaugcagauaauacuagaacuuacuguuuaggauuuucau

SEQ ID NO: 4156697 - RNA, 90 nt, Human
guguaaugagucagaaacagaugaaaaggguaaagaggugaugaaaauggucaucaacacuuuugucuuugucccuggugacuuuuacau

SEQ ID NO: 4156698 - RNA, 60 nt, Human
guguacaaaugguugaauggaugaaugaauacauuuaugaaugcucaacuguguguacau

SEQ ID NO: 4156699 - RNA, 77 nt, Human
guguacacuucugauguuauccucgcucacaugucaccagcuugcaacuuugagugggaugaguuagagguguccau

SEQ ID NO: 4156700 - RNA, 74 nt, Human
guguacagagcaagugacagaaacagggcuagaaugcaggucucucgucccuacucugccacuuuuucugucac

SEQ ID NO: 4156701 - RNA, 108 nt, Human
guguacccuguauugagauaauuuaugaauaucuauuuccacaaccagauacaaacuccuggaaggaaggagccauaucauauccaucuuuguauccagagguaacac

SEQ ID NO: 4156702 - RNA, 98 nt, Human
guguaccuuuccacacuucauuauauuccagcugacaguucaaaaugaaaaacacuuggggacaagugucaucugaacaugcagccugugaguuacac

SEQ ID NO: 4156703 - RNA, 62 nt, Human
guguacgugcaugcacgugugccugugugugaacaugugugggugcgugcaugcauguacau

SEQ ID NO: 4156704 - RNA, 70 nt, Human
guguacuucuaauagcuuuuaugcagucuguaauuuaucuacacuuguguugaaagcuguuagccaccac

SEQ ID NO: 4156705 - RNA, 88 nt, Human
guguagcagaaguacacaaaaagcuagaauagaagccucuguuauguguuucuaacucuguuauguguuucuaacuuacugcuuauau

SEQ ID NO: 4156706 - RNA, 63 nt, Human
guguaggaguggcagagaggguauacuaaggucugaguguaucuauagcuggugcucaaacau

SEQ ID NO: 4156707 - RNA, 78 nt, Human
guguagggagguggcugaaucaaaucaggccucacugucauuuguguggcuuuauuugcagccauuguuucccugugu

SEQ ID NO: 4156708 - RNA, 75 nt, Human
guguagguauguuuguguguguguguguguauguguagguggauauguauuugcaggacauagauauggcuaggc

SEQ ID NO: 4156709 - RNA, 63 nt, Human
guguaguaauaguacauuagaaugggcaucaggagccuaggaauguaaucucuguuaugcaac

SEQ ID NO: 4156710 - RNA, 55 nt, Human
guguaguuuauaguuugagaaggguuuuucuccuuugaaaauuuaagugcuacac

SEQ ID NO: 4156711 - RNA, 73 nt, Human
guguauaacuaucuaucuaguaagcauaaagagauguuaauuuucaguagaauacaagauagagguaauauau

SEQ ID NO: 4156712 - RNA, 73 nt, Human
guguauaaugucucaugcaaaauuuaguuauuuguuucucagcuuaaacuggauuuugaugagcaguuuucac

SEQ ID NO: 4156713 - RNA, 67 nt, Human
guguauacaauaugcugccauguauuauuacaagaugaaaagauaacauacuugcauguguauacac

SEQ ID NO: 4156714 - RNA, 76 nt, Human
guguauacucagcuccuggccgcauucuuggaugugucuuucugaggaccaguaugagagcaucugggguguacac

SEQ ID NO: 4156715 - RNA, 94 nt, Human
guguauaugugcguggaugugcaugcaugugagcaugcauaugagucugucucugugugugcacaugugugccuccuccaagccuuccuaucac

SEQ ID NO: 4156716 - RNA, 130 nt, Human
guguauaugugugcauacauauacgcacuuauauagugucugcauauucaaacuuguguaauauaaaacauacauucagguacaauguaugcagauuuuugugaguguguauguguguauaaauaugcau

SEQ ID NO: 4156717 - RNA, 55 nt, Human
guguaugauauauuguucuaggagcacacauggacuaagacagugucucaagcac

SEQ ID NO: 4156718 - RNA, 63 nt, Human
guguaugcacauauaaccugcacuguagaacuguagggcaggaucuauguaugucacaugcac

SEQ ID NO: 4156719 - RNA, 76 nt, Human
guguaugcaccacagcuuguuuagugacucaccuauccaguuuggguugugaugaauaaagcugcugugugaacau

SEQ ID NO: 4156720 - RNA, 66 nt, Human
guguaugcacgugugugugugugugugugugugcacgcacaugcauacaagcacauguagugucau

SEQ ID NO: 4156721 - RNA, 58 nt, Human
guguaugcauguguguacguguguacauguauguguguacgugugugcauguuuauau

SEQ ID NO: 4156722 - RNA, 72 nt, Human
guguauguguguguguguaauguuucucucuucugugcgagagaagagagaacauuacauaaacuauaacac

SEQ ID NO: 4156723 - RNA, 70 nt, Human
guguauguguucaugagagugugcuuguguauguaugcaugcacauguaacauauauguagcauauauau

SEQ ID NO: 4156724 - RNA, 105 nt, Human
guguauguuuuuuugugucuuggggaagcuuugaaauacuugcugauuuauggagagugaaaagugaaccagacuuucucagaacauuuagaaaaacucagacac

SEQ ID NO: 4156725 - RNA, 97 nt, Human
guguauuagauauuaaaauauaguggcaauuggguuguagagagcacaaauuauuccuaugaaauacaguuacugcauuucuaauaguucuaauuac

SEQ ID NO: 4156726 - RNA, 77 nt, Human
guguauugauucuuucauggaucaugccuuuuguguuuguuccucagaugcauaugaauuggugagagaguauauau

SEQ ID NO: 4156727 - RNA, 56 nt, Human
guguauuuucagaguggcauuucuucaccacggugaagaaggcugaaaugaagcac

SEQ ID NO: 4156728 - RNA, 113 nt, Human
gugucaaucuugaugaaaucaguaaucuugccagucucuaaaucaaucugaaugguaucauucaccuugauaaggggaucaggguagcagauggcgugaguaucaagagucac

SEQ ID NO: 4156729 - RNA, 72 nt, Human
gugucacaaagggagggauagcuggguuuuaauucugauuuugcagcguuucucuuuacuuuugccaggcau

SEQ ID NO: 4156730 - RNA, 116 nt, Human
gugucacguguccaccuuccuuucccuugccucgcaugcccugccucauccaggcacagccuggaagguagaggugagugacaagcacgcaggaagcuuuauggaacauccaacac

SEQ ID NO: 4156731 - RNA, 79 nt, Human
gugucagagccucaguucaguuuccauaguuauaagaaguggagauaaacugugaaaggcuuaacauagcgucugacac

SEQ ID NO: 4156732 - RNA, 88 nt, Human
gugucagcuaccagaugcuuccucuacggccucugagaugcacucaugugacuucagagcuuggagggaggauuccugguucugaggc

SEQ ID NO: 4156733 - RNA, 129 nt, Human
uacugcuuaaguguuuaaagcaagggauaguauaaucagauuugugucaugaaaagguaacucuggcagcuuugucauggacagauuagaugagugaggauccaggggcaggcagagcaguuaaaagug

SEQ ID NO: 4156734 - RNA, 69 nt, Human
uacugguacaauggaccauaaaagcuucaaaaggaaaagaauguuuuguggacuaguuguuucacagua

SEQ ID NO: 4156735 - RNA, 56 nt, Human
uacuggugucuacuacaugguugaaaucgaauagucaauaaggaagacacacagua

SEQ ID NO: 4156736 - RNA, 113 nt, Human
uacugguuuuuuuuggaaguguuucuuaaaccacaaaauucagagauugaaaugaauuguucuuugggaauugauuuggugguauauuagcuaacaaaaccgagaacacagug

SEQ ID NO: 4156737 - RNA, 91 nt, Human
uacuguaauguucuuguggucauaaagcauacuuuguaugacuuuaauucuuuuaaacuuauauuugcuuuaugcuucagaaugucgugua

SEQ ID NO: 4156738 - RNA, 60 nt, Human
uacuguacaaccucugccccuguacggucaugcuaccacaccagagaaguuguuacagug

SEQ ID NO: 4156739 - RNA, 62 nt, Human
uacuguauaugcuuguaucugagucucuugaucaaucucagggaaaaaagcaugcuauagua

SEQ ID NO: 4156740 - RNA, 55 nt, Human
uacugucuauacacuugauuacaagguuguaaagcaaguguggauguggaaggua

SEQ ID NO: 4156741 - RNA, 61 nt, Human
uacugucucugcugcacaaauucaucucugcauuguagugcaaaagcagccagagauggua

SEQ ID NO: 4156742 - RNA, 75 nt, Human
uacugucuuccaggucuggagguuggaaacugaagguucagguaucugcagggcuggaaucuucugagagcggua

SEQ ID NO: 4156743 - RNA, 97 nt, Human
uacuguguagcccucugcccauccccagaaagaccgauguaccucucacuccacaggcuguguccaggugggggugacgcagagaggaacgcuugua

SEQ ID NO: 4156744 - RNA, 71 nt, Human
uacuguuugcaguuugcaguauuaucaucauccccauuaaacagaugagaaaacugaggcuucaagcagug

SEQ ID NO: 4156745 - RNA, 60 nt, Human
uacuuaagaggaaaauguguggauguugccuccagcaugcacaggacggccuuauaagua

SEQ ID NO: 4156746 - RNA, 59 nt, Human
uacuuaagguaggccaaaucuucacacuguuauguaguuggaggugucuuuccugagua

SEQ ID NO: 4156747 - RNA, 84 nt, Human
uacuuaccgcacaguagucucuacucugcacuugaggauuacaguaguauucucagagggaggauuacugccguggguugagua

SEQ ID NO: 4156748 - RNA, 62 nt, Human
uacuuauauaagagauaaaaucugauuuuuaaaaaucagcaagauugugucuuguaaaggug

SEQ ID NO: 4156749 - RNA, 86 nt, Human
uacuuaugugaugugauugauauguuaauuaccuugaguuggguaacauuucacaauguguuugcauauuaaaauauuacauugua

SEQ ID NO: 4156750 - RNA, 99 nt, Human
uacuucaaccagggcagcagcuacucuucuguuuaguuuuauauaaugagguuccauauaagauuauacuuaaagagaaagugccgguuugguuaagua

SEQ ID NO: 4156751 - RNA, 60 nt, Human
uacuuccacuguuuguguagcucugcguauaaaaagaaugcugugcacauaguagaagug

SEQ ID NO: 4156752 - RNA, 65 nt, Human
uacuuccuguuuccaugucuguccuggagcgcuaagaaagggcaugugggagauuucaggaggug

SEQ ID NO: 4156753 - RNA, 62 nt, Human
uacuucugaagcagagauuuggguccaugauaguggauguaauaggaaaauguuuagaagua

SEQ ID NO: 4156754 - RNA, 56 nt, Human
uacuucuguucuuaaaccaagauguuuaucuuccugagguggauugagcagaggug

SEQ ID NO: 4156755 - RNA, 74 nt, Human
uacuucuuuugugugucauuacugaaagauugaagcaagcuucaccuaaguguagugaugcaaaaauaauagua

SEQ ID NO: 4156756 - RNA, 66 nt, Human
uacuugaggccaccaguccucuggcaggguaaaauacacccaacagaauacggauggcugauagug

SEQ ID NO: 4156757 - RNA, 71 nt, Human
uacuugggugguggggagaguucagagaucuuuuaucaccaaauuugaugacucugccaccagccacugua

SEQ ID NO: 4156758 - RNA, 84 nt, Human
uacuugucuuguuagaugaguuaguaaggcugguaaauaauuuauaauaaccaggucuuauuaaaaaucuaaucccuuuaggua

SEQ ID NO: 4156759 - RNA, 67 nt, Human
uacuuguggcacucaccuccguguccccagugcccagcacagcaugacacagaaugggugcucagua

SEQ ID NO: 4156760 - RNA, 67 nt, Human
uacuuuacuuugcaaugggcagaacccagcuccauccaggcugggucuauuuuguagcaaaugagua

SEQ ID NO: 4156761 - RNA, 76 nt, Human
uacuuuccuuugacugucuucaaaugaauauauuucuuguccaaagaauuaugugaggguuagucgacuagaagua

SEQ ID NO: 4156762 - RNA, 60 nt, Human
uacuuucuguccuucuguuaaagcuuaaugggaacugcugcaaaggaggaucagagagua

SEQ ID NO: 4156763 - RNA, 58 nt, Human
uacuuucuucuuaugcauuaaggaacugcuuuuguuucucuuuugccggagggaagug

SEQ ID NO: 4156764 - RNA, 89 nt, Human
uacuuugcagucugagcuuaguguuauaacuguucuaaaaaugucucauuuggaaggaagagcuguagccugcucuuuauugcccagua

SEQ ID NO: 4156765 - RNA, 62 nt, Human
uacuuuggaagaguucauacagugaucccaaaccgugcauugauggaacagcuuugaaagug

SEQ ID NO: 4156766 - RNA, 64 nt, Human
uacuuuggggacaauauggaaucccuuuagggacaauauggaaucucuuguguccaacuaagua

SEQ ID NO: 4156767 - RNA, 70 nt, Human
uacuuuuaaaauucacagguauagcaggcuuugugacugugguguccuguggucuuuacaagcuaaagua

SEQ ID NO: 4156768 - RNA, 66 nt, Human
uacuuuuccccucucagauuggagcagaauagaauggggaaagugugcuccagagagggagaagug

SEQ ID NO: 4156769 - RNA, 64 nt, Human
guguggcuagaauuggguucacaggaggcauuuauuaaaagcccauuuguuccaaaagccacac

SEQ ID NO: 4156770 - RNA, 128 nt, Human
guguggcuaucucugacagguuagacacccuggagguacauguacacacaaagggacaauguagaaggauacauugccuuuaccugagcaugaaugagcccaggguguugugccagcaguccccacac

SEQ ID NO: 4156771 - RNA, 55 nt, Human
guguggcuugccugaggccacucugugcauggagaugccuguggugagcacacau

SEQ ID NO: 4156772 - RNA, 58 nt, Human
gugugggaggaaggugaacagacugguugaucccucaucucuucucucucucucauac

SEQ ID NO: 4156773 - RNA, 70 nt, Human
guguggguggucucugugcucgggcaugggggucaaguuggcugcuggugccccagaggcagccacgugc

SEQ ID NO: 4156774 - RNA, 78 nt, Human
guguggucugaggaccaagagcagaggcaucaucugugagcagguuagaaacccagacucuuaggucccaacccagau

SEQ ID NO: 4156775 - RNA, 129 nt, Human
gugugguggcuggguggaugagggcauaggaaagcagcuggcgacucuccucgaugaaagcauugcucucgauugaguaggccagcacuuucugcaguagccucauguacuccgacuuggccucugugu

SEQ ID NO: 4156776 - RNA, 77 nt, Human
guguggugugugugcauauaacauauacaugguaugcgugugugugcaugcaugugugcacacauuuucugcuacac

SEQ ID NO: 4156777 - RNA, 88 nt, Human
guguguaaaacaacgaggauuucuacauuguaugauuauuguaaaaaaaugauuaaacaauguaaaguucuuguagugcuuggcacac

SEQ ID NO: 4156778 - RNA, 58 nt, Human
guguguacacucagacacacauguagcaaauaucuuuucuauauuugagugugcaugc

SEQ ID NO: 4156779 - RNA, 110 nt, Human
guguguagaaaguuuugucagugcagaucaggacagucucagcuugcugucuaauuacaaguucauggugcuuuccugucucugugaagcugucauaccuucuuacauau

SEQ ID NO: 4156780 - RNA, 55 nt, Human
guguguagaugugagaggacuguaugugugcuauugucaacuuacacuuauaugc

SEQ ID NO: 4156781 - RNA, 78 nt, Human
guguguaguuugggacacucuuggcgaucaaggacagauacauccuuaucacaauggagugucacagccacuccacgc

SEQ ID NO: 4156782 - RNA, 67 nt, Human
guguguauggacacaugucauguugcgauaugugauguauauauaaauaugguauguguaugcacgc

SEQ ID NO: 4156783 - RNA, 78 nt, Human
guguguauguguguacaaauuucauguaaagccucauauuuagaggucuauuuuuacagagaauguacauaaagcuac

SEQ ID NO: 4156784 - RNA, 85 nt, Human
guguguauuguauaaacaagaugaaugaaauuaauuuauuucuugucuucauucuugucuuuguauaguguagcuacuuucacac

SEQ ID NO: 4156785 - RNA, 66 nt, Human
gugugucagaauuuuuguggcaauugaaaugucacaauuuuucuuggaacaacauucuggcaucau

SEQ ID NO: 4156786 - RNA, 65 nt, Human
gugugucagcacuuuuccgaggcagaguuagcuggauucuagcuuugaagaaaagguuguuacac

SEQ ID NO: 4156787 - RNA, 68 nt, Human
guguguccacacucaaauaugugcguguccacacugaccgcccacacuaaauaugagcguguccacac

SEQ ID NO: 4156788 - RNA, 59 nt, Human
gugugucccuccucuccugagugucacugcagccacacucaaggauaccgaggacacau

SEQ ID NO: 4156789 - RNA, 59 nt, Human
guguguccuugggccucugcagaccacggacuguggagcugcgggggcagagguggcac

SEQ ID NO: 4156790 - RNA, 107 nt, Human
gugugugaggacagggaggcugggagauaugaggaucuggauaaaaacuuaucucagcguugagaguaucuuugagcaguguaucccuuuugucuuuaucaaaacac

SEQ ID NO: 4156791 - RNA, 89 nt, Human
gugugugagggugaagaaacaaacugguagguagggucgggucuuggaggacuuuggacgccaugcuguuuggauuuuaacuuauaggc

SEQ ID NO: 4156792 - RNA, 56 nt, Human
gugugugcuuugggaucacauguccccacccuaggacccugguuccaaccauacgc

SEQ ID NO: 4156793 - RNA, 55 nt, Human
guguguggcauguccuauuuuguuuaaagaaugagcuccagggcugcuugcacau

SEQ ID NO: 4156794 - RNA, 90 nt, Human
gugugugggagugacagagcaggaacugaaaaugagacauccaugguauuugucagucucuucuuugccgguccugcccucucccaccau

SEQ ID NO: 4156795 - RNA, 72 nt, Human
gugugugguuuugacagggugaugagguggugagaagacauucugaauuucccugcaagcauuuucacauac

SEQ ID NO: 4156796 - RNA, 66 nt, Human
guguguguauauauacacacacacacagaaacauguuucuguguguguguguguguguguauauau

SEQ ID NO: 4156797 - RNA, 75 nt, Human
guguguguguccugugcccagacccucugugugucuucuccaucucacacagacagucccauaggacucacgugu

SEQ ID NO: 4156798 - RNA, 56 nt, Human
gugugugugugugcgcacacacgcaugugcaugugugugugugcaggcacacacac

SEQ ID NO: 4156799 - RNA, 62 nt, Human
guguguguguguguauccucccauggacauuuauggauauguagguaaacacagacauauau

SEQ ID NO: 4156800 - RNA, 74 nt, Human
gugugugugugugugugagagugugucgcugccgcaguagccgcugcagcaucagguucacugcgugcacgcac

SEQ ID NO: 4156801 - RNA, 75 nt, Human
guguguguguguguguguauguguguguguguguguguguguguacgcauacauagaaacacacagaguacagac

SEQ ID NO: 4156802 - RNA, 101 nt, Human
gugugugugugugugugugaaagugcuaucuaucauaaagcuauguaaaaguuacucuguuuugacagaaaguuauuauuuuuuaaaugcauauauacugc

SEQ ID NO: 4156803 - RNA, 56 nt, Human
gugugugugugugugugugugugagagagaucuacaagugccacccacagaugcau

SEQ ID NO: 4156804 - RNA, 87 nt, Human
gugugugugugugugugugugugugugugcaugcaugugugccugcauuuaugugugcauguauacauuaagucacauuuuuuauau

SEQ ID NO: 4156805 - RNA, 106 nt, Human
guguguguguguguguguguguguguguguaaugcuuauugugcuuauugugugucaggcacuauguuagucauuacacuuacauacgaugcauauauauauguau

SEQ ID NO: 4156806 - RNA, 72 nt, Human
guguguguguguguguguguguguguguguguguaugugcacacaugcauguguguuuacaugcuugcauau

SEQ ID NO: 4156807 - RNA, 74 nt, Human
guguguguguguguguguguguguguguguguguguguguauauguguauguguauacacacaggcaugcagau

SEQ ID NO: 4156808 - RNA, 70 nt, Human
uaucauaugcuuucauucauaugugagagcugaaaaaguugaucucaugaagauagagaguacagugaua

SEQ ID NO: 4156809 - RNA, 81 nt, Human
uaucaucagucuagauucuaguaccaggaccagguuacucagaaguggucacaaaggguggcuggugucaggggggugaug

SEQ ID NO: 4156810 - RNA, 76 nt, Human
uaucauggccuagguuuuuccaaaaagccagacucugggaagaaccuggaguggaggaaaaaaccaggcagaggua

SEQ ID NO: 4156811 - RNA, 58 nt, Human
uaucauuguguuauuucuuccaccagggcgcagcagucuggaaauagaaacaauggug

SEQ ID NO: 4156812 - RNA, 117 nt, Human
uaucauuucuaguugucuaaaguuauguugaagaacugaagacuuuuacuguacaggauaaacaacugacauuaaaugucuuaguugccucugcugaaucacaccuagauaaggaua

SEQ ID NO: 4156813 - RNA, 78 nt, Human
uauccacagaaauuauuaggaugcuugaaccuuucauuuauaguuguuaagggaaagugccugaugaaauuuuggaua

SEQ ID NO: 4156814 - RNA, 72 nt, Human
uauccaucaacaccugcaggucuacucugaaaaaggcuuugcuucaguggaacugucugggugaggaggaug

SEQ ID NO: 4156815 - RNA, 72 nt, Human
uauccauucaaccuugggcaaguuggaaacugaggcuuaguuuccuaacugcaccauagcaauugugagaua

SEQ ID NO: 4156816 - RNA, 66 nt, Human
uauccccaaauuuccuuggaaggguaauugcaaaggauacuuggcuccuaucaaggaguggguuug

SEQ ID NO: 4156817 - RNA, 82 nt, Human
uauccccaacuaaacuccccguguuucuggcuguuugauaagacauuaucauuagauacgcaggcaguuuuaaaggaggaua

SEQ ID NO: 4156818 - RNA, 79 nt, Human
uaucccucgguuagguuccucccgucccugcucccugaggcugauggacaggcaggcgggacagcccgaucgaucgaug

SEQ ID NO: 4156819 - RNA, 72 nt, Human
uauccggagucauuuuuuuaauuauuguugagaagcagaaucuaguuacagagaaaugauuugaugcggaug

SEQ ID NO: 4156820 - RNA, 88 nt, Human
uauccuccaaaaauuugucuugaagcucuaauccccaaagugauaguauuuacagguggaggcuuuaggaggugauuagguuuagaua

SEQ ID NO: 4156821 - RNA, 58 nt, Human
uauccuguguacugucuaguacauuaaauguauguuucuugggcauugcacauagaua

SEQ ID NO: 4156822 - RNA, 126 nt, Human
uauccuugaaaguagaaauagggugagugccagggaguggaggagcuuaaaggaauaagaagacgaaguagacacuuaccaaacaggcacccuuuaacccuacaaucacuuccuacuauugggaua

SEQ ID NO: 4156823 - RNA, 59 nt, Human
uaucgagcuggacgggcuggucugggggaccuccaagcugaugcccgugggcuacggua

SEQ ID NO: 4156824 - RNA, 61 nt, Human
uaucuacaaccccucaaacugugccugguacccaacagguauuucuugaguguaguaggug

SEQ ID NO: 4156825 - RNA, 89 nt, Human
uaucuacagauuauuuaguaagacauugaucugucugugaggaacaucgaucucauccagaaaaaugucuuagccaagaugugugggua

SEQ ID NO: 4156826 - RNA, 64 nt, Human
uaucuacuaccuagcucuugauaacugugcccauuuauaggcauggcagacuagaguauagaug

SEQ ID NO: 4156827 - RNA, 82 nt, Human
guguucuguuuuguuuucagacuucuacugaagucacucaagaagagcuagaggacuucaaaggucaaacaucgcaggucac

SEQ ID NO: 4156828 - RNA, 100 nt, Human
guguucuuaaucugugcgauguuuuaggaaagaggguggcaguaggaccugcacacuccuggauccuagagaugacagauaugugacuuuuaaagaacau

SEQ ID NO: 4156829 - RNA, 68 nt, Human
guguugaugacauuuuagaaacaaaagccaggugcccaugaauagccugaauuaagguggaucagcac

SEQ ID NO: 4156830 - RNA, 86 nt, Human
guguugcagggcagagggugccucaccuggccaagucucuggauagccuggugccaacagagcucccauucuaucucugccagugc

SEQ ID NO: 4156831 - RNA, 99 nt, Human
guguugcauucacauuuuggaaaauaguuauacaggagauuccuuacuugcuuuaaugcaaguagaauuguuuguaagacuuuccaucugauuucucac

SEQ ID NO: 4156832 - RNA, 62 nt, Human
guguugcuagugcaguuucuuguguucaccaucacaguugagauacuaagcauuuccagcac

SEQ ID NO: 4156833 - RNA, 127 nt, Human
guguugcugaggcccauccuggcuccagcuuuuccucucauugcuuaccucuguguuucuggggaagugcaugguggaguggcguggauuauggacccugaaaccaggcugcggcuuuaccacucac

SEQ ID NO: 4156834 - RNA, 81 nt, Human
guguuggagaggauguugaucaaccuaagcucuuauacacugcuggugggaguccaaauugguacaauagcuuuugaagac

SEQ ID NO: 4156835 - RNA, 73 nt, Human
guguuggcugggggugcuauagcugcaucaaacccccacagaaggguagcaccgcuucagcucccuugcccac

SEQ ID NO: 4156836 - RNA, 76 nt, Human
guguuguaggcaguggggucucucuguaccucccacccuugaggagggagguaaagaugagcucaguguccaacac

SEQ ID NO: 4156837 - RNA, 86 nt, Human
guguuguuguuguuuguuugguagaagugagagaauuuuuauacucucaguauagaguuuuauuuuccaauaaacuauaauagaac

SEQ ID NO: 4156838 - RNA, 65 nt, Human
guguuuaaccaccauucuauucugccuugagagagaaugagaaugcaauaaaugguggucagcau

SEQ ID NO: 4156839 - RNA, 63 nt, Human
guguuuaagauacuucacuugccgaaauguauuugaacaauucauuaugugggguaucugcac

SEQ ID NO: 4156840 - RNA, 56 nt, Human
guguuuaauagguagcugaaucugcuuccugaaugguuuaguuaaauauggugcac

SEQ ID NO: 4156841 - RNA, 77 nt, Human
guguuuacugccccaagcuuuauccgccauguaggauuacuuuuccuacuaggaaacguaaaacuucuaguaagcau

SEQ ID NO: 4156842 - RNA, 75 nt, Human
guguuuagaagccaagauuuggguacuagcgccagcuguguuuauuguuaccagaguuuuacugcuucuaagcac

SEQ ID NO: 4156843 - RNA, 85 nt, Human
guguuuaugauaucugucuauguggcuauguaugaauuugguucauugcuucugacugcuacguagauauccaucuucugaauac

SEQ ID NO: 4156844 - RNA, 130 nt, Human
guguuuauucccaaaacaagauuuuguuuugggggauuguauaagucuauuuacaauguacgcuugucuguaaaauuguacauaugauguauguaauauuuccaaggcaaauuauuuuuucaggaaucac

SEQ ID NO: 4156845 - RNA, 57 nt, Human
guguuuccuaguuuaaugaaugacagcaccaucccauucuagaaaccagggaggcau

SEQ ID NO: 4156846 - RNA, 83 nt, Human
guguuuccuucuuauugaacuguagucuucugucuaguccagcuauacagaaauauaauacaagaaaucaaggaaagaaagac

SEQ ID NO: 4156847 - RNA, 82 nt, Human
guguuucuugaggcagguacgcacggacacuguuuuuagagcaagcauuguccuaucucagugccaugugcucaaagagcac

SEQ ID NO: 4156848 - RNA, 69 nt, Human
guguuugaaagaacuuauccuagaauuugguuauaugcuaggugauuuggaaaaggucuuaaggaacac

SEQ ID NO: 4156849 - RNA, 65 nt, Human
guguuugaacauggcaauaaaccuacacaguggcucccacugauguucagccauguucugaacau

SEQ ID NO: 4156850 - RNA, 72 nt, Human
guguuugagaguugccaggugugaguucuggagccaugcguccuggguucauguccuggugcuguuuuuuac

SEQ ID NO: 4156851 - RNA, 60 nt, Human
guguuugcauguguacuuaauugguuaauggggacaggcuaauaauggacauguagauau

SEQ ID NO: 4156852 - RNA, 75 nt, Human
guguuuggaauucugcagcucaugucagcaucucaauaaacaucacugagcagaaguuguaaauuucaucuuuac

SEQ ID NO: 4156853 - RNA, 103 nt, Human
guguuuguauuacugucuuaagaacagcagagggcacuccaagcuaaacuuuggaaugugcuacuguugauuuuuaaagaaguuuuaaauugagaacaagcac

SEQ ID NO: 4156854 - RNA, 64 nt, Human
guguuugucugugugcguguauguugguauuuuauauuuauaacauguuuguacacugaaacac

SEQ ID NO: 4156855 - RNA, 73 nt, Human
guguuuguguauugccuuuuaacuguggaugaccagaaacauuucggcaguuacauuaauaaugcacaugcau

SEQ ID NO: 4156856 - RNA, 84 nt, Human
guguuuuaaaggugcuuguauaguacaaagcacuguauauaguauaauauaaaggauuuuguauaauauaaucauuaagagcac

SEQ ID NO: 4156857 - RNA, 84 nt, Human
guguuuuaaucccaucagguuuaggugggagagucucaagauucaaaucuuuuuuuccugagccuuguggucuaauugaaaggc

SEQ ID NO: 4156858 - RNA, 64 nt, Human
guguuuucaaccucauaccuggagguuacagugagacauggauucuagaagagguugagaauau

SEQ ID NO: 4156859 - RNA, 71 nt, Human
guguuuucaucucuguuguuaauguacuuugccaaaugugcugagugcagaugaacagaagauuaaagcac

SEQ ID NO: 4156860 - RNA, 55 nt, Human
guguuuucuaugugauguugaguagauuugcuccaaagucacagcagagaacugc

SEQ ID NO: 4156861 - RNA, 97 nt, Human
guguuuucugagugaguuaacaggaacuagggcuaugaaauucccaaucaggagagcaagcugcuuauucucugcucuagcucacaaagggagucac

SEQ ID NO: 4156862 - RNA, 85 nt, Human
guguuuuguuuuaaacuguagaagggacacaaaaguccacaauuugggcuucaaacuuauuuuuacagcuguaagaugaaaacac

SEQ ID NO: 4156863 - RNA, 106 nt, Human
guguuuuuguuuguuuguuucaauuuuuuugauaucaaugaagugccuuccaaaggcacuucaguuucccucaacaagauugcauuugacagguugacacugauau

SEQ ID NO: 4156864 - RNA, 77 nt, Human
guuaaaaaugcaguuuccugagacccacucuauuuacuggcucuuuuagauggagcucuggagucugcaauuuuaac

SEQ ID NO: 4156865 - RNA, 89 nt, Human
guuaaaacgguugcauuucaaaagaaauaguugcauuuacuauaugguacuguaauaugguucuuuugaucaccauauugugauuuaac

SEQ ID NO: 4156866 - RNA, 108 nt, Human
guuaaaauauauaugugaguaauuaauugauuuaggcuuguuaugaccaguuuaucaugcuugucaacaguauuaggacauuugaaagaacuuauuuagaaguuuaac

SEQ ID NO: 4156867 - RNA, 66 nt, Human
guuaaaauucaggaggcaguuucagaagucagaaaucuagauuuuuauagaaauccuccaguuagc

SEQ ID NO: 4156868 - RNA, 64 nt, Human
guuaaagaccaugaccugccacuaagcaaggucuuaccuggcuggcaaugguguggucugguau

SEQ ID NO: 4156869 - RNA, 71 nt, Human
guuaaaggaucaagugccaggcaggaaauacagcuccucccagcuccagccugaaaugccucauccugaac

SEQ ID NO: 4156870 - RNA, 68 nt, Human
guuaaauacaugcuuauauggaaaggaagagaaaaaacucucaaucuuuagaccaaggcaugaugaac

SEQ ID NO: 4156871 - RNA, 114 nt, Human
guuaaauauguucacuuuucccccuuucccauagcaaaagcaugugcaauacaccaugauaaagugauuggauaauuauuguuuuagcuagggaaagugaaauuuauguuuuac

SEQ ID NO: 4156872 - RNA, 60 nt, Human
guuaaaugcacuauugaaagcuucacauuucccuggaagauauuuaguggugcauuugac

SEQ ID NO: 4156873 - RNA, 56 nt, Human
guuaaaugcauuuuccaagcacucacagauaggaaguggggcugguggcauuuaac

SEQ ID NO: 4156874 - RNA, 77 nt, Human
guuaaauguucauucuugcguaugccaugguuuauuagaaaugacugucaggaaauguagagaauccuauauuuaac

SEQ ID NO: 4156875 - RNA, 61 nt, Human
guuaaauguucucgccacauacaaaaaaaugguaacuauaugaggugauggacauauuaac

SEQ ID NO: 4156876 - RNA, 93 nt, Human
guuaacaaaaaugcacuuugaguagaguagaugagaaagcaucuguaaugcuucuugcucaaugucuguuuaagguguucaguaaauguuugc

SEQ ID NO: 4156877 - RNA, 64 nt, Human
guuaacaaauguaaagcaauuaaaacagugccaagcacauaguaagugcuuuauacauguuuac

SEQ ID NO: 4156878 - RNA, 60 nt, Human
guuaaccuuuaaugauagucuggggguuuuuugcccccucuacuggcaaaaaagguuaau

SEQ ID NO: 4156879 - RNA, 67 nt, Human
guuaacuuuaugacaugucuugcuuauuaagccacauggugcaagucagggauguaauaugguuaau

SEQ ID NO: 4156880 - RNA, 129 nt, Human
guuaacuuuucugagcuuucauuuccucacuuguaugaagacuucuucuguguucaauuuuauguugauaccaggagagauuuuauugagaagggcguccuggaagagaauuuugaaguugaaucacuc

SEQ ID NO: 4156881 - RNA, 122 nt, Human
uaguuuucguucucaggcacaggagaaccucauaaaggcacacuuguuguuuauccuaauaggcauuuaguaaguguuuauuaugacuuagguccugugcuaaccacuggggauaagagcug

SEQ ID NO: 4156882 - RNA, 75 nt, Human
uaguuuucuccucuauuucuguauguauuuccuuaauauguaguuucagaaguggaauuuauuagagauaaacua

SEQ ID NO: 4156883 - RNA, 66 nt, Human
uacuuuucccugccuuccagcuccaccccuuucccugaucaauggggcuaggaaggggaaaaagug

SEQ ID NO: 4156884 - RNA, 69 nt, Human
uacuuuucucuguaccguauaucuuuguggcaguaauuagcuuuguagaauuguuguuagggaaaagua

SEQ ID NO: 4156885 - RNA, 74 nt, Human
uacuuuuguuaaggucugaauauagaacuuaaguauauuacuuagaaagggauucuagauuuugacuugaugua

SEQ ID NO: 4156886 - RNA, 64 nt, Human
uagaaaacucuacaucuguaugugugcacauauucacacacacacaugcauagagagauuucug

SEQ ID NO: 4156887 - RNA, 66 nt, Human
uagaaacagagagauaugccccucccuucuuuuguuugggaguccaaaugucacucauguucccug

SEQ ID NO: 4156888 - RNA, 109 nt, Human
uagaaacuaaaaaucugagcuuuuacuuuucauuucagccauacuggaugguggacaucucugacucaaugggcugagugaggaaaagguuauaggguagugguaucua

SEQ ID NO: 4156889 - RNA, 67 nt, Human
uagaaagcucuuauguaaacagaaauugcaguagcuaucuuucuguuuagcauaaaguggcuuacua

SEQ ID NO: 4156890 - RNA, 62 nt, Human
uagaaaguaaaucaguuuuauuuacuagauuuccccugggaagaaaacuguauuucuuucua

SEQ ID NO: 4156891 - RNA, 58 nt, Human
uagaaaguagggaagguaggauuuuaaccuaggguggucuuacuuuuuuuccuuuuua

SEQ ID NO: 4156892 - RNA, 72 nt, Human
uagaaaucaaauucaguuauggaaauaaaaagauaauugucuuuuauuuugcaaaccugaguuugaggucua

SEQ ID NO: 4156893 - RNA, 129 nt, Human
uagaaaugcaauauguucuugaucucuauguaugcgauuagaauuuuucccucuacuugguauuuguuucguuaccgaaugaaauuuugagcuuauauuuuuggauauauuucaccucaugcauuucaa

SEQ ID NO: 4156894 - RNA, 73 nt, Human
uagaaauggacagagcugggaucugaacccaggcaucugggcuccagcaccugugcucuuagccauuauucua

SEQ ID NO: 4156895 - RNA, 57 nt, Human
uagaaauggagagagcuggacuuugacccaaucagucuggcucugaauucacuucug

SEQ ID NO: 4156896 - RNA, 60 nt, Human
uagaaauguuagauguauugagggauuugauucugaaucuaucaaagcaagcauguucug

SEQ ID NO: 4156897 - RNA, 80 nt, Human
uagaacauaacuuccuuugaucaaaagcauuugauguaaauuucuauauggaauguggauaagggugucuauauggacua

SEQ ID NO: 4156898 - RNA, 88 nt, Human
uagaacucugacugaccuggaaugaauguauuccaguggaauaaauauggaaugaauguauauucauuccaggucagucagacuucua

SEQ ID NO: 4156899 - RNA, 60 nt, Human
uagaagaaugaugucagaguuuucuuaauauaagaugaaaaccucugcaucaauccuuug

SEQ ID NO: 4156900 - RNA, 59 nt, Human
uagaagacccuugcaugaauuaauucagaauuauuucuggaauugcaggcugucuuuug

SEQ ID NO: 4156901 - RNA, 96 nt, Human
uagaagacuagcaaaaauuuaaguagauguuguuuaaaaacccaucugggucucuuacaagguauccacauuaaauguuuugaauuaguauuuuug

SEQ ID NO: 4156902 - RNA, 71 nt, Human
uagaagagacauagccugugguuauguaaaauuauucaaccuauauugaacuauagacugaguuuguucua

SEQ ID NO: 4156903 - RNA, 62 nt, Human
uagaagcacugacagaguuugacuugaucugaggaaaguucugaaauucugacagucuuuua

SEQ ID NO: 4156904 - RNA, 57 nt, Human
uagaagcucaggaauaggcauagagguaagggauuccucuauuaauccagagcucug

SEQ ID NO: 4156905 - RNA, 56 nt, Human
uagaaggaguauauauauguauacacaaguaaguuuaaauguauaggacccuucua

SEQ ID NO: 4156906 - RNA, 88 nt, Human
uagaaggucguucucuggagucccugggccccgagucacuaagcggguccccaagguaggcuucagaaucaaaggggcagacuauuug

SEQ ID NO: 4156907 - RNA, 61 nt, Human
uagaaguuaaaggaauacagaauuagauguuugcugguuuucugugcuuuuuuggcuccua

SEQ ID NO: 4156908 - RNA, 63 nt, Human
uagaauaguguuuucauuaugggcuaaccugcaaagcuaaccaugauuuaaaauauuauuuug

SEQ ID NO: 4156909 - RNA, 75 nt, Human
uagaaucaauaagugaguuuagcaaguuugcagaauacaaaaaagcacacaugagaaacaucaguugucuuucua

SEQ ID NO: 4156910 - RNA, 118 nt, Human
uagaaucacuggcagagcuuuuaagaaauuuuagugccugggccaguuccagauacauaguugcucugggauggggcccaggcauugauguuuuuaaaaaacucccuaggugauucua

SEQ ID NO: 4156911 - RNA, 87 nt, Human
uagaauugcacuguauuauguauuugguauaguuuggcuaaauuuaccugcuagaauacuugaauacuguaauuacaaacaucucug

SEQ ID NO: 4156912 - RNA, 77 nt, Human
uagaauuggcugucaggucuacaaaaaugcugcugguucuaucucucaucagcuuuguggccuugaccucguuacua

SEQ ID NO: 4156913 - RNA, 72 nt, Human
uagacaaccagaaaggaugccuccuuccggcuucuaaggccaggacuagaggccuucuuucccuacagucug

SEQ ID NO: 4156914 - RNA, 78 nt, Human
uagacaagaggauguggccucuauccuggaagggccuacaguuuaggaaaugaggccaacaugugaacuuugaaacug

SEQ ID NO: 4156915 - RNA, 67 nt, Human
uagacaagcaacuccuaggaggaaaggaaugcagcgcuaucuucccucucuagguagacguagucua

SEQ ID NO: 4156916 - RNA, 67 nt, Human
uagacaaugccaucuugugguucuugugaaaaucauuccuuggaaaauucaagaaggucauuguuua

SEQ ID NO: 4156917 - RNA, 62 nt, Human
uagacacauucccugaaguguaauagauuugaauugcacacaaguuggagaaugaaugucua

SEQ ID NO: 4156918 - RNA, 69 nt, Human
uagacacuuagcagaguugaauguacuguauacauguuauuuuccagauauaguaaaugcuaaggucug

SEQ ID NO: 4156919 - RNA, 55 nt, Human
uagacagauguuuucuggcugugucuucacauggccuucuuccuuugucugucug

SEQ ID NO: 4156920 - RNA, 96 nt, Human
uagaccccucgccuugaauaugagcagaaguuauaaauaagaugagucacuuacucucuugguuagaguacuuuauauggcaaaggugaugggcua

SEQ ID NO: 4156921 - RNA, 57 nt, Human
uagaccuccagcggaggagauugcacaagcucccucagucucccaugccugugucua

SEQ ID NO: 4156922 - RNA, 59 nt, Human
uagacgucauuugccuuuuaaacucacaauggaauuuuccagaggcgaccugaugucua

SEQ ID NO: 4156923 - RNA, 82 nt, Human
uagacuagaauguaagugagaacuaaaccuucuguuguauuaagccacagugcaauuagaacuuauuuauugcugcagucua

SEQ ID NO: 4156924 - RNA, 77 nt, Human
uagacuagccuuguuucucaaacuccugugugcggcagaagcacccagagggcuugcugaacacguggcuggggcug

SEQ ID NO: 4156925 - RNA, 64 nt, Human
uagacuagggaaucauucuuggauugcaaaauucagcccaaaucaaggaaaauuuccuaguuug

SEQ ID NO: 4156926 - RNA, 75 nt, Human
uagacugaaauucuguguuaccagaaagugauaccacauaauauccauggucucuacagaaugcgcuucagucug

SEQ ID NO: 4156927 - RNA, 118 nt, Human
uagacugauagcuccuggagagcaaggaucucgugcuuuuccugcuugucacuuguacuguaaagcacaguggugaaagcaugggucuguucuguucacgcuuuuggcugucagucua

SEQ ID NO: 4156928 - RNA, 65 nt, Human
uagagcacaguggaugacauccuuuugcaaacagcauaguauguauauccacugcccaauaucua

SEQ ID NO: 4156929 - RNA, 60 nt, Human
uagagcagaguucugccaauucugguucgaaugaaacaggcaauuuaggacucuuuucug

SEQ ID NO: 4156930 - RNA, 56 nt, Human
uagagcagggcugguccucaauagccugggcaugaggagccaggaaaccugcucug

SEQ ID NO: 4156931 - RNA, 60 nt, Human
uagagccuggaguuguaacuuaggccacaucuuucucuccagucccaacauucagcucug

SEQ ID NO: 4156932 - RNA, 67 nt, Human
uagagccugggcugcuguccacuaggguuccagaaaaggacucuuggucagaacaauucagguuuug

SEQ ID NO: 4156933 - RNA, 72 nt, Human
uagagcggaaccgcaggaagcccuugcuuaucuuucacuucugaggcucccauuuccugggguuccauugug

SEQ ID NO: 4156934 - RNA, 84 nt, Human
uagagcuacaugugguagggagggcaguggucuauaggaaauccguugagaagauccacucccuaacaccauguuccugcuuug

SEQ ID NO: 4156935 - RNA, 68 nt, Human
uagagcugcuggacuguaacagauauguauuaauuggaaguagaugugacagcuuacagcaguuacua

SEQ ID NO: 4156936 - RNA, 61 nt, Human
uagagcugguuugggagaaucaauucagauaaaucauuucucuaaaugugaaccggcuuua

SEQ ID NO: 4156937 - RNA, 83 nt, Human
uagaggaauuuauggcagccaaggguuuaugguuuugauauggguuuauuaagcacaauuuaggacugaaauagucuccucug

SEQ ID NO: 4156938 - RNA, 129 nt, Human
uagaggacuaaaauguauuacuugaaagcaaauauugcaguguguuuaugugaaucuagaaaauaaaucucuaucuuaaagaaaauacugaauauuuccauaaguauuauuuauaguaguaggccucua

SEQ ID NO: 4156939 - RNA, 58 nt, Human
uagaggagcacaugaggcugagggcauauggacgaugcucuugcugaugucuccuuua

SEQ ID NO: 4156940 - RNA, 60 nt, Human
uagaggagccagacugugcgcgaugggcuugggccaguugaaagaugucuugguucccua

SEQ ID NO: 4156941 - RNA, 81 nt, Human
uagaggaucacauuugugucauaagcaaauccuuuauaaaucaucaagagacugcauagauggccacaaagagauuuugua

SEQ ID NO: 4156942 - RNA, 59 nt, Human
uagaggccagggugucuugagugcuguaacucccaagcacugggcuagccugacuucug

SEQ ID NO: 4156943 - RNA, 129 nt, Human
uagaggcugcaacuuaccagugccuuuguguuuucuucuguagcuuguucacauagcuuuugugaccugaaucucacaggcaugcaaaacaacucagagagauugacaccgcacuucacucaaucucua

SEQ ID NO: 4156944 - RNA, 85 nt, Human
uagagggaguacacuagcuuuuaguacuuaauggcuauggaucauguuauagccagaaacugcaagagcuagcauugguccccug

SEQ ID NO: 4156945 - RNA, 78 nt, Human
uagaggucagaagugcaaaaucaguuucuugggguuaaaccuagguguuggcagagcuuguuccuucuguuuccucug

SEQ ID NO: 4156946 - RNA, 57 nt, Human
uagaggucuuaugcuaagaauauuggacuugaucaucugggcaguucggauccucug

SEQ ID NO: 4156947 - RNA, 57 nt, Human
uagagguggggaaguccugcugagccucucccacagugagccuuccccucaccacug

SEQ ID NO: 4156948 - RNA, 84 nt, Human
uagagguuguguaaaguuuugagaguuaggcggaaucagguagccucugauuaaguugcauuuuaauauuucauacaauuuuug

SEQ ID NO: 4156949 - RNA, 90 nt, Human
uagaguacaaaaauggggagggacacaaagaguucccuguguagacacggggaccacacuuaguguuccucagcacccuucugccuucua

SEQ ID NO: 4156950 - RNA, 55 nt, Human
uagagucuuggugccauauugaaagaaacuuuucacagugcugcaccuggcuuua

SEQ ID NO: 4156951 - RNA, 104 nt, Human
uagagugaaaguagggaaauguaauagcuaguaaugaagaccuagauggggacauacagaauucacuacaguuuccagauuucauauuccuguugcaaacucug

SEQ ID NO: 4156952 - RNA, 78 nt, Human
uagagugaacuaugagaaauugcugauauuugaccauuuuugaccuaaauaaauggcaauuuuguaugguucaaacua

SEQ ID NO: 4156953 - RNA, 58 nt, Human
uaguuuuucuguuccaccccacucugcaaggaguguuacuugccauacagaaaaagua

SEQ ID NO: 4156954 - RNA, 62 nt, Human
uaguuuuugagguugugcuggauaucuucaauuugcccucucccugcacaaaucaauuacua

SEQ ID NO: 4156955 - RNA, 71 nt, Human
uaguuuuugggauaaucaguaaaugcauagggaaucagaacuauccacuuggcugguuguucuaaacucug

SEQ ID NO: 4156956 - RNA, 82 nt, Human
uagguugguacaaaaguaacugugguuuuuaauauaucuaaaauuauauuguaauugccuauuuauuuguuugugccuccua

SEQ ID NO: 4156957 - RNA, 76 nt, Human
uagguuggugcaaaaguaauugcgguuugggcauuaaagguaauggccaaaccgcaauuauuuuugcaccaaccua

SEQ ID NO: 4156958 - RNA, 77 nt, Human
uagguuggugcaaaaguaauugugguuucugucacuaaaaguaaugacaaaacugcaauuacuuuugcaccaaccua

SEQ ID NO: 4156959 - RNA, 64 nt, Human
uagguugguuuuuaaacuccaagucugaugaugaguggguagaggauuuuaaaaacugcaccug

SEQ ID NO: 4156960 - RNA, 55 nt, Human
uagguuuucagaguaaguuuguucucuucuaacuuauuugcaucugaauaacuua

SEQ ID NO: 4156961 - RNA, 55 nt, Human
uaguaacaacaacuagcauuuuggggguguuuucuaaaugccaguuccuguucua

SEQ ID NO: 4156962 - RNA, 64 nt, Human
uaguaagcuuucucuccccuugcauuuuacacccaaagguuugcaacaaugaggaaagcuacug

SEQ ID NO: 4156963 - RNA, 110 nt, Human
uaguaaguuguuccugcagccucaacaucuuagagaauuccaaaugacuacaccaaaugaguuacauggacauucucucccugaguuacaggaaaauauuuaaauuacua

SEQ ID NO: 4156964 - RNA, 69 nt, Human
uaguacccuuuaaguccuggaacaaaguucucucagggggcuugaaauccagauuucagagggaaacug

SEQ ID NO: 4156965 - RNA, 57 nt, Human
uaguacuagaaccugguuguuucagcauuuuucuagaagucagucaguucuauacua

SEQ ID NO: 4156966 - RNA, 59 nt, Human
uaguacuccagaaucgagaucucauauccuugauuuugagucuugagcuuuggauucug

SEQ ID NO: 4156967 - RNA, 78 nt, Human
uaguagaaagacuggcucuaucuccuuggcguuggaggacagagcucuaaggaauaagggcagagucgaucucuacua

SEQ ID NO: 4156968 - RNA, 129 nt, Human
uaguagauuugcauaggaauuaaaaacaauugguguucuuuccauuugcucccugauggcaauuuuauccuuggucauaauuguacagaugagguaagugagaauccaaauaucccuaugauccuguua

SEQ ID NO: 4156969 - RNA, 94 nt, Human
uaguagcauuguuguuucacuaagcagaaauauaccaagguguuaaaaaugcuguuuuguucaucuguuagugaaacuaaaaaacauauuacua

SEQ ID NO: 4156970 - RNA, 78 nt, Human
uaguaguagcuugucauucaacugcacauuaggucauuugcugggauaucuuucugcagugaaugauaagcauagcua

SEQ ID NO: 4156971 - RNA, 74 nt, Human
uaguaguauagagcaguggcugcaaguaaacccuguaauaacguuaaauuuacccaguaacugcuuggcuucug

SEQ ID NO: 4156972 - RNA, 55 nt, Human
uaguagugguggagccagcaacuugugaggcagaaugugcuggcaacuacuauug

SEQ ID NO: 4156973 - RNA, 72 nt, Human
uaguagugugcaucuuucuuccuucuucugcuugcuggagcuuagauacaaggcagagaugugcacucgcug

SEQ ID NO: 4156974 - RNA, 129 nt, Human
uaguauaauggaauauaugaaauuaaaaauaacuacacuggacacugggcucugcauacaguaaauauucagccguugucugcagacuugccuaaguguguacgcaguaguuauucuaggcaggugcug

SEQ ID NO: 4156975 - RNA, 72 nt, Human
uauucccugacagaugagggaguauucucaggcagaccucuagaaucacuguuuccaucuaggcagggugua

SEQ ID NO: 4156976 - RNA, 72 nt, Human
uauuccucagcucagcgagagagaacuaguccaucugguuaaucuaagacuuuccuggaguugacaagaaua

SEQ ID NO: 4156977 - RNA, 107 nt, Human
uauuccucuacagcagugauuuuaaacuauggaugauuucugcccccagggggcaucuagcaauauccggagacuuuuuaaauugucauaagugaggugggggaaua

SEQ ID NO: 4156978 - RNA, 64 nt, Human
uauuccuggcucggcuuggggacuucugcggcugccggggcuccaaggaggccagccuggaaug

SEQ ID NO: 4156979 - RNA, 87 nt, Human
uauucuaauaacaaacagcguucggacagaaauauuagcuuuuggagaucaaugagguaauacuuucaguccuuuguuaauaugaua

SEQ ID NO: 4156980 - RNA, 55 nt, Human
uauucuauucucccucucaguacagaaucugucaggacagggcagcaauaggaua

SEQ ID NO: 4156981 - RNA, 76 nt, Human
uauucuccagaacauguagacuuuccucccuccaucacccucaaggauaaggauucuaguccaugaauggaggaug

SEQ ID NO: 4156982 - RNA, 90 nt, Human
uauucugcccaguuuuguaaagucuguucugaguuguuauuauaaauacauuuagucaucuugaaauacuuucuagaauaaggugggaua

SEQ ID NO: 4156983 - RNA, 61 nt, Human
uauucugcuucccguggcacaagcaggaggcauaaccuuccuaaccaagggggauagagug

SEQ ID NO: 4156984 - RNA, 77 nt, Human
uauucuuacucucgacugcauuauaaagcaccauauguaccagcuuguuuuuguguauuuugaaccgaguaagaaua

SEQ ID NO: 4156985 - RNA, 93 nt, Human
uauucuuucaguggaccacaguuugaugauaucugcagucccaaguguaaaucuaaaaucauagcaugugagucuauuccaguugaaauagua

SEQ ID NO: 4156986 - RNA, 69 nt, Human
uauugagcuacgugugguuauugaguuacauuuaugacuucuguguuuuacuauauguauuucucaaua

SEQ ID NO: 4156987 - RNA, 79 nt, Human
uauugauguagguuuaucuauuguaacaaauguaccacucugguaggggauguggauaauggaggaagcuauguggaua

SEQ ID NO: 4156988 - RNA, 65 nt, Human
uauugccuucuugucuaaggaacacaucauuaaagcugaaagaugguuccuuagaggaggcggug

SEQ ID NO: 4156989 - RNA, 57 nt, Human
uauugcugccaggacccuaucccagaaagcuggagugacuugguuuugguagcggug

SEQ ID NO: 4156990 - RNA, 63 nt, Human
uauugcuugauaugugcuaaccuucccuuugcagggccugcaauugaaagccaugcagcagug

SEQ ID NO: 4156991 - RNA, 57 nt, Human
uauugcuuuugauucaaggcagauuucuguuaucucucuuuggagaaagaugcaaua

SEQ ID NO: 4156992 - RNA, 129 nt, Human
uauuggaagggaaaugacaaguuaaugaagguuugugguuaaccgcacauuuuugugccuacaaauaaacaaggggugcaaguuaaucagcauauacuccauuaacuuggauucuuacccuucuguuua

SEQ ID NO: 4156993 - RNA, 109 nt, Human
uauuggacaagggagaggcuggugauucugaggcagcugcuugcuaauccuggaagcagaggggaacaagauuuagcucccuuaucucucugccuucuccuuuccgaug

SEQ ID NO: 4156994 - RNA, 67 nt, Human
uauuggagauuuaguuucagcuucucuuacaguuaggugcugguauaugacugaguuuugaccaaug

SEQ ID NO: 4156995 - RNA, 66 nt, Human
uauuggauauugagcagcuucucugccaucugcacaccagaugccaguagcacugcuuucccagua

SEQ ID NO: 4156996 - RNA, 130 nt, Human
uauuguauuuuaauuguauguuauccuuccuuugcaucauuucuagaaaguuaauuuuaaugauacuaaugacugaagcugaguuugugcauagaggaagaaucagauaaaauagaaaucucauauaaua

SEQ ID NO: 4156997 - RNA, 61 nt, Human
uauuguguguguguguguguguguguguguguguacagacauacauaagcaccacauuuug

SEQ ID NO: 4156998 - RNA, 77 nt, Human
uauuguuagguucuauacuaagaugagaaagcuagaaucuuuauugcuguguauauaaggucaggaauuugacaaua

SEQ ID NO: 4156999 - RNA, 98 nt, Human
uauuguuuaggauauauuuugaguuggaauuuucaggaaaagaaaagcauaacugagagaucugugcuuacuacaaggugcauccuugaaaaauaaua

SEQ ID NO: 4157000 - RNA, 87 nt, Human
uauuuaaaauauggaacucuuggcaguaaaagaaaaugcuuaggaaccuaaguuucugauauuguuaaagcuacaugugaaauaaua

SEQ ID NO: 4157001 - RNA, 66 nt, Human
uauuuaaauugacaaaucauacuuguauaccuuuauggaguacagugugauauugucauguaggua

SEQ ID NO: 4157002 - RNA, 97 nt, Human
uauuuacauacaugugugcacauacauauuagugucacagaugugcaugcauucauguguauacgaguaugaauaugugugcauauguaugccagug

SEQ ID NO: 4157003 - RNA, 88 nt, Human
uauuuacaucuguccuuuucuuacugcuuagccaccaugacacacucaaauggucaggagcuugguagugugauuagggauguggaua

SEQ ID NO: 4157004 - RNA, 95 nt, Human
uauuuacuacauuccagguacuguggggauauugauuguaaugacaugauccuuuauugucaauaugcuuacaguccacuagggggagccaaaua

SEQ ID NO: 4157005 - RNA, 55 nt, Human
uauuuaggugcagaaagaggggcguguucacuguaaucucucuguacauuagaua

SEQ ID NO: 4157006 - RNA, 112 nt, Human
uauuuauaccuuuaugccuauaccuaaaucucuaccuauuuguuucugugucaucugaaugaauacacagcuagauggauagauagaugauagauagauagauagauagaua

SEQ ID NO: 4157007 - RNA, 71 nt, Human
uauuuauagaguggcaucuaaguuuuagaaagugacaguauuuuuuaaagugagauuucauuucuuagaua

SEQ ID NO: 4157008 - RNA, 60 nt, Human
uauuuauucuuuguacugccuuguaugaaaaccgucuaagaaggcuugcaaagauaagua

SEQ ID NO: 4157009 - RNA, 56 nt, Human
uauuuauugaaguucaagcuguagaaaucugacagcuuugaggacuuuaaaagaua

SEQ ID NO: 4157010 - RNA, 79 nt, Human
uauuuauuuaaugacucuaagaauucuagauguccucaguggagcugcguuuggcauuagaguuauuuguuaauaagug

SEQ ID NO: 4157011 - RNA, 62 nt, Human
uauuucacaagaugcugaugcuucccuaaccugcaaaacucucucagugucuugguaaaaua

SEQ ID NO: 4157012 - RNA, 65 nt, Human
uauuucacaugcagcagggaagugaggagaaaucugagaguuuuacuugggcugacauugagaug

SEQ ID NO: 4157013 - RNA, 64 nt, Human
uauuucacauucucacaagaggaaaauuuuauaagcuuuucuaaucugugggcaugugucugua

SEQ ID NO: 4157014 - RNA, 64 nt, Human
uauuucaucaaaggauaagaauaguaugauuauaugagcauugacuugauucuuugaugaggua

SEQ ID NO: 4157015 - RNA, 63 nt, Human
uauuucccagggagcaacaagccaggcaauagcuggcugaugccacagcuucccuggaaaaug

SEQ ID NO: 4157016 - RNA, 129 nt, Human
uauuuccuaaagagugugucaaagugauaaaagaggugaggaauggacucauaaacagagugauuuugaaauuacuguugguguauccauagcacguguucuucuaaacuuuggcuuuuaaggauuuca

SEQ ID NO: 4157017 - RNA, 58 nt, Human
uauuucugucagccagauauggggcagccauucuucccauuucaugauuauagaaaug

SEQ ID NO: 4157018 - RNA, 61 nt, Human
uauuucuuuucgugacuuauugcaguggcuaagaccugcaguacaauguggaaaaggagug

SEQ ID NO: 4157019 - RNA, 78 nt, Human
uauuugaagguaaucagccuuuccacaauuauuucauggucauggauuuuguguugaugcugguuaauuagccaaaua

SEQ ID NO: 4157020 - RNA, 89 nt, Human
uauuugaucaaguaaguuuauagauaaaugccuaucuaauauauuaaaucagaagauggggauaaugaaguauagcuugcuuuuaaaua

SEQ ID NO: 4157021 - RNA, 96 nt, Human
uauuugcuagaacauagacacaguguugacaucaaauagauaucuuuuuuccaagagguuaagagaaugaugaucacugguuuaucccuucaaaua

SEQ ID NO: 4157022 - RNA, 66 nt, Human
uauuugcuauuguucucucagugcccaguauagugcccucuacugagcagggaccaaaagcauuug

SEQ ID NO: 4157023 - RNA, 59 nt, Human
uauuugcuuggaaaccuaauccuaaauccacugucuuggaauaggacacuaagcaaaua

SEQ ID NO: 4157024 - RNA, 64 nt, Human
uauuugcuuugcuuuauagagauugaccauuggccuuauuugguuacucuguucaaagcaagua

SEQ ID NO: 4157025 - RNA, 58 nt, Human
uauuuggaaacaauucacaugcuuuuucugucuuuguaggcaugugaauguucaaaua

SEQ ID NO: 4157026 - RNA, 59 nt, Human
uauuuggcccuaaucugcaguacuuguuucaucaccuggcaugcagcaagugcuaaaua

SEQ ID NO: 4157027 - RNA, 58 nt, Human
uauuugucuucugagagaauuaucccauugagagugggauaaggcaggaggauaagua

SEQ ID NO: 4157028 - RNA, 61 nt, Human
uauuuguguguuuguauguguccagacuugggaggggaacacauauauucagauacagaug

SEQ ID NO: 4157029 - RNA, 74 nt, Human
uauuuguuauagaagcccaagcugacuaaggcaagaaauuggugcuaagaagugagaugcugcuguaacaaaua

SEQ ID NO: 4157030 - RNA, 70 nt, Human
uauuuguuucuuaugugcagagugaguacagacuuaacagcagguguucauuuuaauauaagaacaaaug

SEQ ID NO: 4157031 - RNA, 67 nt, Human
uauuuuaaucuucacagccaggccguggguuaggaaccacagcuuaugguacagaggaggugaagug

SEQ ID NO: 4157032 - RNA, 78 nt, Human
uauuuuauuuuccagacagcuuaggaaguuucuauuauucaagguuauuggaaaauaugguuucuggaaaauacugua

SEQ ID NO: 4157033 - RNA, 91 nt, Human
uauuuucuuuauugauugaggagugcuaucuucuuuuuagguaaugcugaaccuauaagaugagaucagcuuucuguuuuaaagauugaua

SEQ ID NO: 4157034 - RNA, 59 nt, Human
uauuuucuuucuuaaacauguugugcuuguuaagcuaaaguguguguggaaugagaaua

SEQ ID NO: 4157035 - RNA, 84 nt, Human
uauuuugaaaccuauuuauaacuucuagauaaggguacagccaucccucccuaggacaugguuuuaaguagaguugaaugaaua

SEQ ID NO: 4157036 - RNA, 68 nt, Human
uauuuugucaucuguguuuugcuggaguuugacucaguuauauuucagaagucacaguugacugugua

SEQ ID NO: 4157037 - RNA, 55 nt, Human
uauuuuguuucuuggcucaggcccuaaggaaaagccuguaucagguuacaaagua

SEQ ID NO: 4157038 - RNA, 58 nt, Human
uauuuuuacuguuugaugauucccugcuuaggaggguuucagugggaaagugagagug

SEQ ID NO: 4157039 - RNA, 113 nt, Human
uauuuuuaucugcagggccguuacucucauguuuccugucacagaaucuaaacaucacagaucugcagaggacaggcgaggaugcugagugaugccaagcaguucugaaagua

SEQ ID NO: 4157040 - RNA, 63 nt, Human
uauuuuuccaucuuuguaacucuaguaacauauugcuaacagagggugcaacauggggaucua

SEQ ID NO: 4157041 - RNA, 56 nt, Human
uauuuuucccccuuccacugucuauuucaaaggggugguggcagggaggaaauaua

SEQ ID NO: 4157042 - RNA, 72 nt, Human
uauuuuucggugugauuuggauuggaaaagaggugaaacauuuuucuacuuuggaaugcacugauaagaaua

SEQ ID NO: 4157043 - RNA, 73 nt, Human
uauuuuuggucauccuggaucuuggaaauuagaaacaaaucaugagcacugagauccaggaugucccaaaaua

SEQ ID NO: 4157044 - RNA, 94 nt, Human
guugaaguccuaaaccccaguaccccaggauaugauuguauuugaaaguaaggccuuuauauugguaauugagguuacaugaggucacuucaac

SEQ ID NO: 4157045 - RNA, 73 nt, Human
guugaauagaauugaacuugaucuuuagcuagaaaucuuccuucuagcucgauugguuucauuuguguuucac

SEQ ID NO: 4157046 - RNA, 63 nt, Human
guugaaugacuccuucgucuggguagcugcacaaggcagacagaccuggcagucauccucaac

SEQ ID NO: 4157047 - RNA, 81 nt, Human
guugaaugguaguaaagaucagucugaagcaacauuuaacaaaaguugcuuucuagggcuagauuucuuguacuauaaaac

SEQ ID NO: 4157048 - RNA, 55 nt, Human
guugacaaacuacagccugcaggccacaucuucccugcugccuguuuuugugaau

SEQ ID NO: 4157049 - RNA, 83 nt, Human
guugacuccaucucccaauaggccucuucuggaaauucccuccccauguuagaucuggcagagccacugggagacagagcagc

SEQ ID NO: 4157050 - RNA, 83 nt, Human
guugacuucuuaccaugugcucagcaauggaacaagaggguccgggggcuuccucugugauuucugagccaaugaggauuaac

SEQ ID NO: 4157051 - RNA, 58 nt, Human
guugagaaugaugagauucuuccuucuaggugaggaauauuuucucuuuauuuucuac

SEQ ID NO: 4157052 - RNA, 60 nt, Human
guugagacuccugguguagaauaauuaaauagauugcucuagcucauaggacucaucaac

SEQ ID NO: 4157053 - RNA, 71 nt, Human
guugagagcucuggguguguugucaguuggaaagaaaucugacuguuucggcucagaagcaaaugcucaac

SEQ ID NO: 4157054 - RNA, 105 nt, Human
guugagauggagucucgcucugucauccaggcuggagugcaguggugugaucucggcucacugcaaccuccaccucccggguucaagugauucuccugccucagc

SEQ ID NO: 4157055 - RNA, 121 nt, Human
guugagcaauaaacagguuuuuaauuuuuuccccuuccgucucuugagugucugucucugauggaugaugugacagaggaaggcggcuccauaaauucugaauucugaauacuaaaucagc

SEQ ID NO: 4157056 - RNA, 65 nt, Human
guugagcccaugguguacucuguggcccagggcacggcagggcccgagguauuccaggcugcagc

SEQ ID NO: 4157057 - RNA, 58 nt, Human
guugagcucuccagcuucauuuccagaaggcugcuggcugugcaguucagaguucaau

SEQ ID NO: 4157058 - RNA, 84 nt, Human
guugaggaaaagaaaugcaagcucaguuccaagguuuuucccuugcuaaaacucuuaaaauuuuggcuugcuuauuuccuuaac

SEQ ID NO: 4157059 - RNA, 81 nt, Human
guugaggaggacuaucggacuuaguguuuugcuguagacacaguacugaguacugaguuggauuaagagugcugccccaac

SEQ ID NO: 4157060 - RNA, 82 nt, Human
guugagggccauuuaggcagauuccauauuuuggcuauugugaauagugcugauuaacaugaauguguagauguccuucaau

SEQ ID NO: 4157061 - RNA, 76 nt, Human
guugaguauguggaaagggggugaaaaagcagcuaaacccaagauguaggucacagucccuaucccuacucucaac

SEQ ID NO: 4157062 - RNA, 62 nt, Human
guugaguauuccuuaucugaaaugcuugggacuagaaguguuucagauuugggaguuucggc

SEQ ID NO: 4157063 - RNA, 63 nt, Human
guugaguggguuaggaugcugacauaucuuuugagggccacuaacuauucaacccacuacaac

SEQ ID NO: 4157064 - RNA, 105 nt, Human
guugaucauauaaaugcuaagauagauugaugaguauauaugaacuauuuaauuguuauauuuguucaaacaauucaguguaguuauuaucuuugccugaucaac

SEQ ID NO: 4157065 - RNA, 73 nt, Human
guugaucaucuccauacggucucgcagcggcucggggaugguguccgugacguuggccgugcagaugaacagc

SEQ ID NO: 4157066 - RNA, 87 nt, Human
guugaucuaggagaagagaugggaaggcagacuucaagagccacuaacauuucgugaauguuuucugauuuugauuuuuggggugac

SEQ ID NO: 4157067 - RNA, 68 nt, Human
guugaucuaggauggaugguuugguaggcugaauaacaaccuccaaauauauucacguccuaguagac

SEQ ID NO: 4157068 - RNA, 56 nt, Human
guugaugcauugccgacuuacugggaucuucaguggagguucccaaugcagacaac

SEQ ID NO: 4157069 - RNA, 76 nt, Human
guugauggaggagauggcagggugcaccaugaacuuaagcagcugcuccaaggcugccuugcccucuucccauagc

SEQ ID NO: 4157070 - RNA, 104 nt, Human
guugauggccucaccaaguuuagucauagauacccaaggucagggagggccauuacccugugaaacuuuggggaucuacggcuggaccacguggggccaugagc

SEQ ID NO: 4157071 - RNA, 127 nt, Human
guugauguagggaaaguaaaagaugccacucuucuaaccugaaaguaguaaaagcuggaauggacauuuuagcacuaguuugagguggcaauaaaagagaggaacugugacagaauccuauuagaac

SEQ ID NO: 4157072 - RNA, 116 nt, Human
guugauuccacccaaugcacagaccuauguggaaaccuugaagccauaguuuucucuauaacuuuaaugugcuucauucuacaugacauugaaggccugugucaauuaugaaaaac

SEQ ID NO: 4157073 - RNA, 67 nt, Human
guugcaaagcgucuucaauauguguuuaauauuguacaggcaaucaaaggaugugaggacuugcagc

SEQ ID NO: 4157074 - RNA, 84 nt, Human
guugcacguaauagucucaaacuccuggacucaagccaucugcccccauuggccuuccaaaguguugggauuauaggcaugaac

SEQ ID NO: 4157075 - RNA, 70 nt, Human
guugcagagccuuccuagcagacucugguuucacagucccaaggcagcagcugcagggagggucugcagc

SEQ ID NO: 4157076 - RNA, 57 nt, Human
guugcaggaggauggcugcauaacggcgaaccggggagguugccuccugccugccac

SEQ ID NO: 4157077 - RNA, 93 nt, Human
guugcaggcucauucucuuuuaccaaguuguuagauguugggaugguucaaaaaacaggcauucuuuucugcagcugguauuuauguugcaac

SEQ ID NO: 4157078 - RNA, 59 nt, Human
guugcagggcacuuaagcuugguggagaccgucagugccuccuugccugucccugcagc

SEQ ID NO: 4157079 - RNA, 84 nt, Human
guugcaguaaguugacgauugaauauacccugagcauauggcaaaggaugaauagggaugggagauucucaaacguggcugagc

SEQ ID NO: 4157080 - RNA, 67 nt, Human
guugcaguucuugcagacaaauguguuccaguccuuugcuacacagagugguuuguagaauagcagc

SEQ ID NO: 4157081 - RNA, 86 nt, Human
guugcaugggcuauugguagauggagagagacauguuaauaaaauaaccaacaauguuuuucaagcauuuauuaaugcuaggcaac

SEQ ID NO: 4157082 - RNA, 97 nt, Human
guugccaaaauguugauaauuacugaacugggaugauggacauacagggaguucaauauugauccuauuucaguguauguuuaaaaauuuccguaac

SEQ ID NO: 4157083 - RNA, 73 nt, Human
guugcccauuucuuaugcugagaaugaaagaaugugacauuauuuuuuaaaagcucugcauguugugggccac

SEQ ID NO: 4157084 - RNA, 70 nt, Human
guugcccccuccuugcuuuuucccuuccacagagcuaagugggaaugaguggcugaguaagaggggagac

SEQ ID NO: 4157085 - RNA, 86 nt, Human
guugcccugcaccaaguucuauacuucccuguuuuuuccugagagcuucuuuucacaauccaggaagcaacuuggugggggacagc

SEQ ID NO: 4157086 - RNA, 82 nt, Human
guugccugcggucuccgugggugagggaaaaggcacagggaggugcagaagcguuccuggcgccacggagccggucagugac

SEQ ID NO: 4157087 - RNA, 74 nt, Human
guugccuguaucuaagguauaugaggaaucauugcaaagaacggucuucagaaacuuuagaacuuacccgcagc

SEQ ID NO: 4157088 - RNA, 67 nt, Human
guugccuucaaucaggauggucucaucccagcaguucaucugaugugacugucucauuugaagugau

SEQ ID NO: 4157089 - RNA, 72 nt, Human
guugcugcaaaaguaauugcagguuuugccaucgaaaguaauggcaaaaaccgcaaucacuuuugcaccaac

SEQ ID NO: 4157090 - RNA, 85 nt, Human
guugcuggggaagugacaacagccaucacuuuuagguuuuguuugcaagguuugcauguguaagguuguuuauuuccuuucagau

SEQ ID NO: 4157091 - RNA, 83 nt, Human
guugcuuaguaaguguuuauuuauaacgaucucuuauaacaagaauuauggagacagguguucaguaaaccuuggugaauagc

SEQ ID NO: 4157092 - RNA, 65 nt, Human
guugcuucuuggcuuuuccaacccucugccaugcuugaacaucuuugugaaaguccaggaacaac

SEQ ID NO: 4157093 - RNA, 68 nt, Human
guugcuuuccuggaagcacaacgcauuuauuugacaagaguauuugauacagucuucuaggaggcggc

SEQ ID NO: 4157094 - RNA, 102 nt, Human
guugcuuuucauagugcagcugcuugccugguuaggaagacagauuggugacccgcagucauacacauugauuaggugacagccuguauucugaacaguagc

SEQ ID NO: 4157095 - RNA, 57 nt, Human
guugcuuuuuugauagguggaaauuuuauauacaauuucauuuagaaaaaaagcaau

SEQ ID NO: 4157096 - RNA, 78 nt, Human
guuggaagcuuguaacagguacuaaauaacugccaacaauucuuauuuuaaggcacuuuauuuccuauugcauccagc

SEQ ID NO: 4157097 - RNA, 68 nt, Human
guuggaauaauuaaaaauucuggugcaguggugguauaccaaucuuuagaauucuuaaguauucuaau

SEQ ID NO: 4157098 - RNA, 81 nt, Human
guuggaaucuaagcuuuagguuuugccugagaucugaguuuuaagcucagaauucagggaucuagacuguggguucugagc

SEQ ID NO: 4157099 - RNA, 59 nt, Human
guuggacuuuuuacaugguggcuuaagacuccaaaagccaaugcguaaaaagaucuaau

SEQ ID NO: 4157100 - RNA, 66 nt, Human
guuggaggauggaguuagcaucuuugaugauaaugaauggcucuggauugcaauuccucuucaggc

SEQ ID NO: 4157101 - RNA, 74 nt, Human
guuggaggguuuagcuuuuauguaaauuucuucuugcuuuucugcauuuaaauuaaguucugaucccuaucaac

SEQ ID NO: 4157102 - RNA, 67 nt, Human
uaguauucuucaaagagugucaaaguucaugcaugaugaagaaagacugaggcauugaaggaaacua

SEQ ID NO: 4157103 - RNA, 104 nt, Human
uaguauuuuguuccuugaggagguuguguggauaauauuacuugagcuucauuuugggugauuuauauucaccaguuugucuccuccugggugaacacugucua

SEQ ID NO: 4157104 - RNA, 104 nt, Human
uagucaaagccauacagguucuaggacuccauguguccuggagaugggaauuaucaucccagugagcacagguagugccaauccugauuucugagcugugacua

SEQ ID NO: 4157105 - RNA, 81 nt, Human
uagucaauuauuuuguagcucugaucuuuucccccugcacccgacaggacagaaagguggugguuagggaauaugugagua

SEQ ID NO: 4157106 - RNA, 72 nt, Human
uagucacaaucgauaucauuugaagauacuuuucuuucuugaaauuugccaucuuugggauauuugugauua

SEQ ID NO: 4157107 - RNA, 67 nt, Human
uagucauaauuuugauguuugucaguuuacuauuuucuuucuuacugaaagcauuuacuugugauug

SEQ ID NO: 4157108 - RNA, 82 nt, Human
uagucauauuccacaagaccauaaauuaggggaccucuaacaauaaaucuagcuaagcugugugcuugauggaaaaagauua

SEQ ID NO: 4157109 - RNA, 60 nt, Human
uagucauuaauuaguaggaaggugagggacagcaucauaucuaacuaucuguuauggcug

SEQ ID NO: 4157110 - RNA, 62 nt, Human
uaguccccaggcucugacauagaugggagcacagaguugcuugugugagggccugggagcug

SEQ ID NO: 4157111 - RNA, 80 nt, Human
uagucccgucuauggcugcuacacuacaggagauuuagaaauuuguauaccuguuguuuagcacuuagaacaaggcacug

SEQ ID NO: 4157112 - RNA, 88 nt, Human
uaguccuuuauggugugauugcccagcaccauuguucguucaaaagaucugagagcaagggucuugggcuuacguuauuaaggcgcug

SEQ ID NO: 4157113 - RNA, 57 nt, Human
uagucucugcuuugcccuuggcuagcuagguggugugccaaguggggagagaagcua

SEQ ID NO: 4157114 - RNA, 83 nt, Human
uagucuguccaggauuuuaguuguaguuggugaggaggacagagcuuucuccauauuaacuaaaacuagaacccuggcagcua

SEQ ID NO: 4157115 - RNA, 91 nt, Human
uagucuucuuguauaaacacuuaaugagcacaagaugcccauuuauaaaugaagggcaucuugcuguuauguuuauguauuaaaagggcua

SEQ ID NO: 4157116 - RNA, 65 nt, Human
uagugaaauaggcagugauucauauuugugcaaacucccacugaugccugcugucugcuucccua

SEQ ID NO: 4157117 - RNA, 67 nt, Human
uagugaacuccacugaaggcagggacuucauucacugcuccaucccuaaugcuuacaggaguuccug

SEQ ID NO: 4157118 - RNA, 62 nt, Human
uagugacuaaugaacauauaauggucguagcuuucuuuacaacuaugucauuuaagucacug

SEQ ID NO: 4157119 - RNA, 68 nt, Human
uagugagaagaaguugcuuuccggcgggcagggggggcacccucuccaaaaauggcagcuuuucauua

SEQ ID NO: 4157120 - RNA, 86 nt, Human
uagugagagccgguugauguuuacuacucuucagaacaucuuauguucuagaaauccguaagugaaugcugcugcugcucuugcug

SEQ ID NO: 4157121 - RNA, 63 nt, Human
uagugcaaugugaggcaguacccuuaaugguaagagaaaggggaggguuggaauauugcauua

SEQ ID NO: 4157122 - RNA, 56 nt, Human
uagugcagguuaauaggacuuccugggaugauggaaauauucuauaaucugcccug

SEQ ID NO: 4157123 - RNA, 57 nt, Human
uagugccucggagacaagcagcuucugggugagcgcuaggcaguccugacgguacua

SEQ ID NO: 4157124 - RNA, 63 nt, Human
uagugcuaaugugcaauauagagguagcaauugugucuuagcucuguauuacauaucagucug

SEQ ID NO: 4157125 - RNA, 72 nt, Human
uagugcugaaauacagaaagaccucucgggaaaaguuugaguuucucuuaaugucucugugcuucagugcua

SEQ ID NO: 4157126 - RNA, 81 nt, Human
uagugcuuucauucuuuaguuuuaacugaaagcuaucugggcaagaguggacuuaaggaagcagauauaugaaggcggcug

SEQ ID NO: 4157127 - RNA, 82 nt, Human
uaguggaaugcaauuaggaagccuaaauuaagugguaauggagaaccagcucuugaaacugggguuuccacggcaaccacug

SEQ ID NO: 4157128 - RNA, 57 nt, Human
uaguggagguggucugugaacuacguuuugaaaaacacuaauagccccaccucacug

SEQ ID NO: 4157129 - RNA, 84 nt, Human
uagugggccucaguguuggagaccuucagggagagggagaaaggcagccauagcccugaaguguuaccagcauggagccuguua

SEQ ID NO: 4157130 - RNA, 69 nt, Human
uagugggugauuugaugaggaauaugauauuuccauagccugaaguacuuucucauaaaauacucauua

SEQ ID NO: 4157131 - RNA, 63 nt, Human
uaguggguguggaacugugagaccugaauucgaauccugguuucauauuuucauagcuuguug

SEQ ID NO: 4157132 - RNA, 67 nt, Human
uaguggguucuuggaccagcagcauugacauuaccugggauguuagaaaugcacccaagaccuacug

SEQ ID NO: 4157133 - RNA, 102 nt, Human
uaguggugugcaccuguagucuuagcuacucaggaggcugaugugggaggaucaauugagccugggaggcugaggcugcagugagcugugaucaugccacua

SEQ ID NO: 4157134 - RNA, 116 nt, Human
uagugguuaaaagcauggauucuaaaguuagacuguguucaaauucuccaaccuaccaucuaugugacuuuggacaaaugucugacuuucuuuugaccucaguuuucucaccacua

SEQ ID NO: 4157135 - RNA, 64 nt, Human
uagugguuucauagaaggcaaugguggacucuuagucaacugaagcuuggguggaacuuagcug

SEQ ID NO: 4157136 - RNA, 79 nt, Human
uaguguacagucucugaguuguaaaaaauagucauuccuuucugcuugaaagacuguauuagcuacucagggaauacua

SEQ ID NO: 4157137 - RNA, 70 nt, Human
uaguguacaguucugcaagauauuuuuuuaggcugaagaguaacaaggaagcaggguagagcugauacua

SEQ ID NO: 4157138 - RNA, 56 nt, Human
uagugucaaacagggauuagaaagcuaaugcuuuccauucucaugaauggcagcua

SEQ ID NO: 4157139 - RNA, 67 nt, Human
uagugucucggggcccaggauuccuggcacagggcuggcccagucuuuccugggcuuugguuuacug

SEQ ID NO: 4157140 - RNA, 56 nt, Human
uagugucuucaggagauaugagaaagcacuccccaugucucaaucagaagucauua

SEQ ID NO: 4157141 - RNA, 72 nt, Human
uagugugauaacagugaccucucagcaccgucaccgggcagggugcuccuguggucacuguuuucagaucug

SEQ ID NO: 4157142 - RNA, 55 nt, Human
uagugugggaggccuuagccuguucuuagaucaaacucugaggccaacuacacug

SEQ ID NO: 4157143 - RNA, 55 nt, Human
uagugugggaggggcauggagaugaauugcucacugcccaccaagcuccacacug

SEQ ID NO: 4157144 - RNA, 55 nt, Human
uaguguguuaucugccuuagcucgucagauacaugagaaaucagaccacacacua

SEQ ID NO: 4157145 - RNA, 68 nt, Human
uaguguuaccauaggucagaacguuauugcaacaaauguacaaaacuaugaugacuauggugagauug

SEQ ID NO: 4157146 - RNA, 73 nt, Human
uaguguuguuacaaggaagaauguagguaauucccaacuugcugaaaaccuacucauuuccuuuuaaaaacug

SEQ ID NO: 4157147 - RNA, 75 nt, Human
uaguuacacuugugguuuuagagaguauuugcugcucauuuggagucucaaaugcaaaauauaacccuguagcua

SEQ ID NO: 4157148 - RNA, 114 nt, Human
uaguuacagaaacuaguucuaggagcuuaaaaaaauuccauucugugccuuucaaaauauaagacagguuugguaauuuucuuguuguuccuugguuguucuagaaggugauua

SEQ ID NO: 4157149 - RNA, 79 nt, Human
uaguuacuuuugcucugaguccaaauucuccugcaggugucaccccucagcagagaaucucaggcacccagaagaacua

SEQ ID NO: 4157150 - RNA, 121 nt, Human
uaguuauugaaacgaggaugaauauuauguguauauguguuuauguaugcauuaugcuguauuagccacuguauacauagaugaugaacaagaaugaaguaguccuugcccucauuaauug

SEQ ID NO: 4157151 - RNA, 93 nt, Human
uaguucaaggaaaucaaaguggggaggcucagguggagggaugguagccuaaaguuaaggguuccugcuuugugccucacacuuagagaauua

SEQ ID NO: 4157152 - RNA, 80 nt, Human
uaguucccauguguggccuugggagaggucugagcuggacgguuagacccgcaggcucccacaggccaccguggcugcug

SEQ ID NO: 4157153 - RNA, 86 nt, Human
uaguucccucaucugcaugauuggggucaugauagcaucugugaagaguuguuauaaagacuaaauauguugagauaugggaauug

SEQ ID NO: 4157154 - RNA, 77 nt, Human
uaguugacuucucuaucccagcuccugguuuaauaauuagacauuccgggaauaacugcuuuggcagaagucagcua

SEQ ID NO: 4157155 - RNA, 71 nt, Human
uaguugguagaaagaguauagcuuuaggauugaaaucuuaguuuugaccuaguuuuauauaucacuaacua

SEQ ID NO: 4157156 - RNA, 129 nt, Human
uaguuggugcuguuugagugcaguaaugguggucagacugauuugcuauaggaagauaauguaauuauccauaguuuauagaucaagaaucugaggcacaaggaaguuacuuguaaaacagcucaccua

SEQ ID NO: 4157157 - RNA, 57 nt, Human
uaguugguuaccuuuucacaaggacuccuagaugggaggcaagagguaacuguacua

SEQ ID NO: 4157158 - RNA, 90 nt, Human
uaguuuagcaaaugcaauuuuaguuuuagcauccaugcuucauaguaaaggaauggauacucaaagguagaugguacagauguugagcua

SEQ ID NO: 4157159 - RNA, 58 nt, Human
uaguuuaggucguacaagcaaaggaagggagcuguauccuugcagaugagcugaacua

SEQ ID NO: 4157160 - RNA, 130 nt, Human
uaguuuauuuuuauauuuuacuucaguaguaaugacuauuaacuaugugcuagacgguguucuaaaagcauuacauagauucauuuaguuaauuuuuaugaaacucuuaugaaguagagaagauucuuug

SEQ ID NO: 4157161 - RNA, 77 nt, Human
uaguuuccugguucucagguuccagcccacugcugcuguagcaugugccugggcagaaugugggauccagagaagug

SEQ ID NO: 4157162 - RNA, 58 nt, Human
uaguuucucagggaggaaagaagaugagaauaacaucucucucucuccagggagauua

SEQ ID NO: 4157163 - RNA, 70 nt, Human
uaguuugauuccagauaauaguacugagugugaauggcuaaggaauauuuaguaucuggaaaucacauua

SEQ ID NO: 4157164 - RNA, 120 nt, Human
uaguuuuaacauauauaagcaguuuaagcuuuuuauaaacauuggacuagguuucauaccaaaaagcuauuucaaaguuugagacacuauagguuuggguugugacacaaauggagacug

SEQ ID NO: 4157165 - RNA, 77 nt, Human
uaguuuuaagaagucuauauuggagcuuauuuaccguaauauauuguaaaugaguaauauagcuguuugccaaacua

SEQ ID NO: 4157166 - RNA, 56 nt, Human
uaguuuuaagcugacauuguuccauaugugauaggaacaacuuaguugagagacua

SEQ ID NO: 4157167 - RNA, 62 nt, Human
uaguuuucugucccagugauccugagugcuccccagaugucaucacaggacugggagaacug

SEQ ID NO: 4157168 - RNA, 60 nt, Human
uauaaacagguccuugcaauaaucucaaaugguucaggccaguuuugcaaggcguuuaua

SEQ ID NO: 4157169 - RNA, 76 nt, Human
uauaaagaauccagaagagacacguacagaaaugacccuucagaacuguuuauggcugugucuuccuuucuuuaug

SEQ ID NO: 4157170 - RNA, 65 nt, Human
ucaagaugccuggugaguggucagauggugauugggcucccccuguacagucucuguggcacuga

SEQ ID NO: 4157171 - RNA, 78 nt, Human
ucaagcaccuaccguguguaugguggaacugcuuugcauacguuagcucugaucuuuacaacaaaguaggugguauga

SEQ ID NO: 4157172 - RNA, 69 nt, Human
ucaagcaggguagcaagcuggugcuggauacuguacacgcccuacccaaauucccuucucccuguuuga

SEQ ID NO: 4157173 - RNA, 94 nt, Human
ucaagcaucaggaauggaaauggagugugcuugcuuuguuugaucuuucaagaaccagcacccaauauguccauucugccauuuccugucuugg

SEQ ID NO: 4157174 - RNA, 68 nt, Human
ucaagcaugcaugucugccaguugcuuagguagcugaucuaaauggguuggaggcagcaaagcuguga

SEQ ID NO: 4157175 - RNA, 91 nt, Human
ucaagccaaaugugcugggauuuugucaaauuccaaauguuggaacacauuucaggauguuugacugaguuuggcagaaucaguaccuuga

SEQ ID NO: 4157176 - RNA, 63 nt, Human
ucagcccuagccucaguccagggcaccacacccaagggccccacacugaugcuggugguguga

SEQ ID NO: 4157177 - RNA, 81 nt, Human
ucagcccugcucucccuaccuccucucugcucuugggugguggcaguccuauuggcaggaaccgaggaggggcagggccga

SEQ ID NO: 4157178 - RNA, 60 nt, Human
ucagcccugugugcuuguguuccuuagagcucuccuucaaagagcgccgggcagggcuga

SEQ ID NO: 4157179 - RNA, 68 nt, Human
ucagccuaagucaguacucugccaugccguuaguaagauggcccuggaaagagcuugaguuauucuga

SEQ ID NO: 4157180 - RNA, 91 nt, Human
ucagccucuaugaucuguauuuuguauuguuguauucauuaucacaggaguugaaaccucaggccagugggaaauagggauauggaacuga

SEQ ID NO: 4157181 - RNA, 57 nt, Human
ucagcuaggcacuucucacugagagucaugcaguguggucggauagugcugggcugg

SEQ ID NO: 4157182 - RNA, 130 nt, Human
ucagcuaugggaaaguaauuacaccaaagaaacuggcaaaugcuacauacugggccucuuucccucccacucccagagagccaguuguuaagcacuuaccaacaccacuuuuccugaucucucccacuga

SEQ ID NO: 4157183 - RNA, 57 nt, Human
ucagcuauuuugccuaucaugguaguucacauugauuauuauguuguaaaauguuga

SEQ ID NO: 4157184 - RNA, 68 nt, Human
ucagcuccuuagugccucugcacgagacagagaaauuacuucacuccuccaguagguucuaagacuga

SEQ ID NO: 4157185 - RNA, 84 nt, Human
ucagcucgguucagauaaggggcacagcagagcuugccugggacuucuuccagagcaccugcucauugccagaaccaaggcuga

SEQ ID NO: 4157186 - RNA, 55 nt, Human
ucagcugaugaagaugagcucuuuuaagugaauuuugaaagauuucauuagcuga

SEQ ID NO: 4157187 - RNA, 80 nt, Human
ucagcugcauccauguugcugcaaaggacaugaugucauuccuuuuuauggcuuuguaguauugcauggugaugugcuga

SEQ ID NO: 4157188 - RNA, 62 nt, Human
ucagcuguccgcagcccacuuccuaaucagaucgagagcugggugggaacgcggacagaugg

SEQ ID NO: 4157189 - RNA, 78 nt, Human
ucagcuguuggccaucugccucaaugugugcuuuugaagcccagcagauugcacauucuguguagguggauagcuuga

SEQ ID NO: 4157190 - RNA, 74 nt, Human
ucagcuuaguugauagccaaaauuuaucgcucuguucuuaaugagcgacuauuggcuucucagguuuuugcuga

SEQ ID NO: 4157191 - RNA, 61 nt, Human
ucagcuucuuucacuuaacaugaugcuugugagauucauccauguugguguggguagcuga

SEQ ID NO: 4157192 - RNA, 71 nt, Human
uauugcuacuuugccuuccaaagucuugccuucuacagcuacauaacuccaggaaaucagaagugguaaug

SEQ ID NO: 4157193 - RNA, 111 nt, Human
uauugcucuucagggauuugugaacacgaaccaagacaguaaauucuaugaaaacaaugguacaauauuugcuucuggaacuuucuguucacccacucaagaaaugcagua

SEQ ID NO: 4157194 - RNA, 71 nt, Human
uauugcugaugguauuaugcuaguaguuuuucuuuaaccuuaagaaaacuaaauaaugccaucugguggug

SEQ ID NO: 4157195 - RNA, 62 nt, Human
uauugcugcuggaaccaggaauuugaaguauugcagcuuagaaauaaugguuucaguuaaua

SEQ ID NO: 4157196 - RNA, 60 nt, Human
uauugcuggugcuguucugaaucaccaccaagugggcuuucucaacagcaaccgguagug

SEQ ID NO: 4157197 - RNA, 66 nt, Human
uauugcuuuccacaagugauaucuagcugguuuaacaaaccagucccuguuguuugggagacaaua

SEQ ID NO: 4157198 - RNA, 67 nt, Human
uauuggaauaguuauuagagaagcugguauaaagggauaccacguuuuucuagaauuuaacuuaaua

SEQ ID NO: 4157199 - RNA, 68 nt, Human
uauuggacaagacagaacagaauaauuguuggaugaaucuacgguucugugguucuguucguuuagua

SEQ ID NO: 4157200 - RNA, 129 nt, Human
uauuggcaccaccuggggaguuuugauaacaacugaugccuggguucccaccccaaagauuauaauuuaauuggucuugggugugaccuuggcauugggagugcuacaaauugccaggugguuccuaug

SEQ ID NO: 4157201 - RNA, 88 nt, Human
uauuggggcugaguguauaauauuuaguaguuuauuauugaaacaguaauagagauuuuaauguccagugcauaauagguccucagua

SEQ ID NO: 4157202 - RNA, 82 nt, Human
uauuggguucgugcaagagugauugcaguuuuuguaaugaaaauauggcaagaaccucaauuauuuuugcaccauccuaaua

SEQ ID NO: 4157203 - RNA, 130 nt, Human
uauuguagaaggguuacaguggccacugugagugauaagccugcacaugugugcgccuguauguauaucugcuacaugugcugugugugcacacucucucacacuggugucuguguuggugucugcuaug

SEQ ID NO: 4157204 - RNA, 73 nt, Human
uauuguauuuaagaagcuucugcuaaugccuagcccaaugauaggcauuaaggaugagcuucucuugcugaua

SEQ ID NO: 4157205 - RNA, 56 nt, Human
uauugugcauguugaauaacuaauuagcaaguuugguugaauaaauauguauaaua

SEQ ID NO: 4157206 - RNA, 59 nt, Human
uauugugccagguaauguguuccuuuacuccaggagcaaaaaucacaucugguacaaua

SEQ ID NO: 4157207 - RNA, 87 nt, Human
uauuuaaacaacaguuuagguauuuguagcauguagcugugauaaaaaucaugacagugguuacaaauagcuggauuuugauaaaua

SEQ ID NO: 4157208 - RNA, 83 nt, Human
uauuuaaauccacuuaagagaacagcuauagaagaaugacuguuuaggacuguggcucuguuuucuuguuugucauuuagaua

SEQ ID NO: 4157209 - RNA, 124 nt, Human
uauuuaauaauaguugacauuagauugaagagauauuucaguuccacacuuaggauauuggucuuuauuugguaggaaauuggaaacucuucacugcuauggaugacagaaguuuuaauaaaua

SEQ ID NO: 4157210 - RNA, 97 nt, Human
uauuuaauguauguguaaagcauggugauuguuucuucuuuggacagugauguucuaaagacaaaugacauuacggcuuugcaagcugcagaaagua

SEQ ID NO: 4157211 - RNA, 98 nt, Human
uauuuaccucaucagggagagcuuuguuugauugucagaaaauagaacauguacauuugucugucauaaacacacacaagcucuccagagcauaaaua

SEQ ID NO: 4157212 - RNA, 98 nt, Human
uauuuaccugggucuuccccgagcucagcugagcuccagcucauagugaaucacauguugggaaucagcugagagcuggcccugaagaucccugaaua

SEQ ID NO: 4157213 - RNA, 111 nt, Human
uauuuacuauaaaaauguuugaaaugccuuuaucaucugcugaaaaguaaucauagaauugacauuauugcagauggugugagagauuuuuaagauuaaugauaguagaua

SEQ ID NO: 4157214 - RNA, 56 nt, Human
uauuuaguuuaggaaaaguagguaacugcuugcuuaugagacucuuaggcuaaaua

SEQ ID NO: 4157215 - RNA, 73 nt, Human
uauuuauagaguagauuauuaaccgcaguggugcucauuccagggcccugccggguauuuugugcuauggaug

SEQ ID NO: 4157216 - RNA, 61 nt, Human
uauuucagugcacaaugacgguggcuuucagcucaugaaaggcuuccucgugccuuagaua

SEQ ID NO: 4157217 - RNA, 55 nt, Human
uauuucaguugcguuucccgaguagccccagcaacaggagaagcaucuagaaaua

SEQ ID NO: 4157218 - RNA, 55 nt, Human
uauuucauggacaucuuuggaggccuagugguuuuagguuucacuccauaaaaua

SEQ ID NO: 4157219 - RNA, 68 nt, Human
uauuuccacaccuuuugaaucugggcuggccuugugacuugccuggacucuugaagguggugggagug

SEQ ID NO: 4157220 - RNA, 68 nt, Human
uauuuccagaggaguauagaaggaauagcaauaucuuugauucucaggucugauacuuuuuugaaaua

SEQ ID NO: 4157221 - RNA, 58 nt, Human
uauuucugauugcucaugaggcagaauuggaaagggaaaaaugcagcaaucagaaaua

SEQ ID NO: 4157222 - RNA, 55 nt, Human
uauuucugggaguucagaaauuuuaggccauuuuuggcuaaacuccuaggcaaua

SEQ ID NO: 4157223 - RNA, 67 nt, Human
uauuucuuauauugggucauggauacuugaguauuuauucucuauaucuuuuucaauguuggaaaua

SEQ ID NO: 4157224 - RNA, 69 nt, Human
uauuugagagugugaaugguauaaguugaggguaugaauguuggaaaugaacauauucaccucuaaaua

SEQ ID NO: 4157225 - RNA, 67 nt, Human
uauuugaguaggcuuccuuucacuacccucaguccguguggccugggguggggcaagccaccaugug

SEQ ID NO: 4157226 - RNA, 58 nt, Human
uauuugcaagcaugcacaaaagcagucacacaaaccugcucaugaagcucugcaaaua

SEQ ID NO: 4157227 - RNA, 77 nt, Human
uauuugcugagagaacucuuuaucuguggaaugugcuuaguaggauauagcugguuaaggguugcuuacaguaaaua

SEQ ID NO: 4157228 - RNA, 59 nt, Human
uauuugcuuuccugaaucaugaacuuguuucuacaagcauuggaagaggaagggaaaua

SEQ ID NO: 4157229 - RNA, 70 nt, Human
uauuuggagugcaacacaugccaccuuagaccauuagugcucccaguggccugugcugucuccccaaaua

SEQ ID NO: 4157230 - RNA, 116 nt, Human
uauuuggaguuaaaauguuagucuacauagauggaugauuguaacuuuacugccauuaaaaagauuucagauugcauucaugcuucuguguacacauaaugaaaaauggacaaaua

SEQ ID NO: 4157231 - RNA, 57 nt, Human
uauuugggaacgcugaaaaaggcauguguaucacucucauaucaguguuccagaaua

SEQ ID NO: 4157232 - RNA, 84 nt, Human
uauuuguauggaauguugucucuuuauaucccauuucaaaauggcaggagauugaaacaggaaguaaacagacaauaauaaaug

SEQ ID NO: 4157233 - RNA, 81 nt, Human
uauuuguuaagagaguuggaggugucaggauuuagguauacuguauguggucugacuugcuuuggacagcucugccaagua

SEQ ID NO: 4157234 - RNA, 95 nt, Human
uauuuuccugaguaggcaauugggcaagaggguucuucagcccaacugcgacugguugaaugcucacaugccuaggucacccuacaagggaagug

SEQ ID NO: 4157235 - RNA, 91 nt, Human
uauuuucucuguuuuggaguauuuaacuggaaacacaaugauguaauuacaugauuaauuuuuccaguagguaaauaauaacaaggaaaua

SEQ ID NO: 4157236 - RNA, 76 nt, Human
uauuuucugauuauuuugauuuucccaguggaauaugaaguuaggucgucagcugagaaucaagauggagagggua

SEQ ID NO: 4157237 - RNA, 79 nt, Human
uauuuugcagaugaagagacuggggcuccaggaauugacuuucccagaaucccauugucacuucagggcucucaagaug

SEQ ID NO: 4157238 - RNA, 103 nt, Human
uauuuuggccucaaugaaagugcaaagagaauuuccauaauuuacaaucuacuuaggugugaaauugagaaacuuucaccuaauguucaauugggacagauua

SEQ ID NO: 4157239 - RNA, 64 nt, Human
uauuuugugaccuagagcaauuuauucagguucucugagccacaguuuucugaguuauaaaaua

SEQ ID NO: 4157240 - RNA, 74 nt, Human
uauuuugugugaggaacaggacuagagcacuaauuuacuuagucuuuuauguauuguuucuuaaaacaacaaug

SEQ ID NO: 4157241 - RNA, 56 nt, Human
uauuuuguuguuuauuuuguuuucuuucucuggauaauaauuauggcagcaaagug

SEQ ID NO: 4157242 - RNA, 85 nt, Human
uauuuuuaaagaugcuucuggcagcccuaaaaagacgaaauauaagaaguuagagacgggaugccagagaguaucauggagagua

SEQ ID NO: 4157243 - RNA, 122 nt, Human
uauuuuucaaagauguuuauuuucuguauuucuggcaguguuuugcuuagaaaagcugcugacacgcucucucagugguggcauuccagaccccugcagaaaccccuuacaugagaaaaaua

SEQ ID NO: 4157244 - RNA, 96 nt, Human
uauuuuucccccaacccuaucucauuucacucauucauguuacuuucauggcccauguagguaugugggugagaggaggagguuguuggaagaaug

SEQ ID NO: 4157245 - RNA, 62 nt, Human
uauuuuucuaauauuauuguugaaaaauggaugcccaugaaaaaaugguaauuagagaaaug

SEQ ID NO: 4157246 - RNA, 63 nt, Human
uauuuuugagcuuguagcauugcuauuggaccuaaggauauagcaaugaucaagacagacaua

SEQ ID NO: 4157247 - RNA, 69 nt, Human
uauuuuugauauuuugcauguacauguuugcuguucuaggcagcacuucagcauucagauuugggaaua

SEQ ID NO: 4157248 - RNA, 75 nt, Human
uauuuuugucugaacugcauuugcuccuuaaaugaagaucacccugaaggaggcaacugagauuuagaaaaaaua

SEQ ID NO: 4157249 - RNA, 99 nt, Human
ucaaaaauuugcaugcauuguaauagaugccagacauuaacgacuaugccagacauaugcauuucuuccuggauggcuguuacaauauagcaaggauga

SEQ ID NO: 4157250 - RNA, 82 nt, Human
ucaaaagauugcuuggugaguauggacacagagaaauuagaaugagcugugugaucuuuauguugauuuccucaggcauuga

SEQ ID NO: 4157251 - RNA, 89 nt, Human
ucaaaaguaaucucuuaccuuaaauggcauagaggugaagguaagaaaaucucuuaccuuaaaugccauagaggugaaggauuugguga

SEQ ID NO: 4157252 - RNA, 109 nt, Human
ucaaaauauauuuguguuuaugcuaauauguucuauucugauuauuauagugcaaggacuagaaauuaguugaacaaguuaaguaaaauggccagcuuauguuaaguga

SEQ ID NO: 4157253 - RNA, 64 nt, Human
ucaaaaugcuucugcucauauuucauuccucugugacuauuggagugagcagcagaugccuugg

SEQ ID NO: 4157254 - RNA, 78 nt, Human
ucaaaauucauguaaaugaggugaaauugcauuaaagcggccaacauaacaguuucacacaacauuugcaugauuuga

SEQ ID NO: 4157255 - RNA, 66 nt, Human
ucaaacagaaauuguucaugcugucauggagaagguauuauccggaugaacguguuucuguguuga

SEQ ID NO: 4157256 - RNA, 58 nt, Human
ucaaacaggacuacauucucauauaauuucccaagaaagaguaaguagucuugugugg

SEQ ID NO: 4157257 - RNA, 58 nt, Human
ucaaacauguuagcagucuguguguacuuauuauacaugcaguaguguucauguuuga

SEQ ID NO: 4157258 - RNA, 68 nt, Human
ucaaacauugcuaccagagguuuauuugccagagagcagguaaacuuccugcaguagucgaaguuuga

SEQ ID NO: 4157259 - RNA, 92 nt, Human
ucaaacuauagguugauuugcuugcugucaauccuuggaauaagaauauggauaggcugagcuaagagagcuuauacaauggaaugguuuga

SEQ ID NO: 4157260 - RNA, 81 nt, Human
ucaaagaucagauaguuguagauauguggcauuauuucugagggcucuguucuguuccauuggucuauaucucuguuuugg

SEQ ID NO: 4157261 - RNA, 56 nt, Human
ucaaagauuuccauuucuagcucauuggccauucccaugugcagggaaaucuguga

SEQ ID NO: 4157262 - RNA, 69 nt, Human
ucaaaggaucguagaagcuacaaggagacagguugcaaaagauaaguguccuucucuaugauugucuga

SEQ ID NO: 4157263 - RNA, 60 nt, Human
ucaaaggcaagguucaccgugcuaugaagcuuaucacagggcuuagaacuuggccucuga

SEQ ID NO: 4157264 - RNA, 62 nt, Human
ucaaagguuaacucuguuguuccauuucaaaagaaaauaucaacaggaaaguugaaguuuga

SEQ ID NO: 4157265 - RNA, 55 nt, Human
ucaaaguaccagagugaacugaccucuugagcuccaucaacucugugugccuugg

SEQ ID NO: 4157266 - RNA, 62 nt, Human
ucaaagucacaacucucuaauuaaugaacugcgagcuucaguuuggacaaguugugguuuga

SEQ ID NO: 4157267 - RNA, 61 nt, Human
ucaaagucagccagcuaguaggucagggagcaguuuccuaccugggugugccugacuucga

SEQ ID NO: 4157268 - RNA, 79 nt, Human
ucaaagugaucuucuggcaucugcuguuuuucagguguuuuuagcuuaaacaguuaacaugccagaauaucauauuuga

SEQ ID NO: 4157269 - RNA, 85 nt, Human
ucaaagugcaagcccagcugaaagcauuuuuuuaguaauugugacggaaugagugugaaguuagcucagugugugugcacuuuga

SEQ ID NO: 4157270 - RNA, 74 nt, Human
ucaaauacuauuuguaaagugccugguguagugccuggcacauuuuaagcgcuauauaaguuugucaaguuuga

SEQ ID NO: 4157271 - RNA, 59 nt, Human
ucaaauaggcuuguagugacuggacuggcaacccaaucauuaccguaauguuuauuuga

SEQ ID NO: 4157272 - RNA, 88 nt, Human
ucaaaucuuauauaaucggccauaaauggucagauauugguaauuucuuguggcugaacuaaugugcuguuugguauaagaacuuuga

SEQ ID NO: 4157273 - RNA, 66 nt, Human
ucaaaucuuucacguauggucaugucugccacauucaaacagacaagaaccaaagaaggauauuga

SEQ ID NO: 4157274 - RNA, 62 nt, Human
ucaaaugagaggcagggcagcucuggcuucagguggcagaaauggcuugcccucucguuugg

SEQ ID NO: 4157275 - RNA, 56 nt, Human
ucaaauuauuuaggauagugcuugcaaaaggguaguguaauuucuagguaauuuga

SEQ ID NO: 4157276 - RNA, 99 nt, Human
ucaaauugcaauuuucuguagaugaaauucaguuucaaucauuguagucuugucugucagcuaucgugguugaaaugaaacucaaugcgugugauuuga

SEQ ID NO: 4157277 - RNA, 56 nt, Human
ucaacaauaggauauagcaggugucagucuuuggccugcaaacaaauuauuguugg

SEQ ID NO: 4157278 - RNA, 76 nt, Human
ucaacaaugguaucaccucacagaauuauuuucaggaaugaaacagugccuggcaugggguguuacuuguuguuga

SEQ ID NO: 4157279 - RNA, 65 nt, Human
ucaacacugcaguagcacauaguaaauguucaguaaaugccaucgauuguugcugcugcuguuga

SEQ ID NO: 4157280 - RNA, 129 nt, Human
ucaacagaaaucccauauuaaaugugccuguugccuaggcagagugaagcauuucuuucuauugcucaucaucgauaaagagaaaacugcuacgcuuucuguagcaggcaggacugugagggaauugga

SEQ ID NO: 4157281 - RNA, 69 nt, Human
ucaacagauuuuuucgcucaauggcugcuugaaguucuacucacacaguacauucgaaaaauucuguga

SEQ ID NO: 4157282 - RNA, 73 nt, Human
ucaacagcuccauggagagcagccuagagccuggagauugaaauccuggcucugcugccuccuagcuguguga

SEQ ID NO: 4157283 - RNA, 57 nt, Human
ucaacaggaacgggaggauuaucuacuucuaaaauaguucauucacguagcuguuga

SEQ ID NO: 4157284 - RNA, 128 nt, Human
ucaacaggcaggcacugaguauucaguauaaauuuuugagcagggaauccaccagaagaacuaugcaucuggaggauuaaucuggaaagauuguguagaauguuaugcagugaaagagucugagauga

SEQ ID NO: 4157285 - RNA, 57 nt, Human
ucaacagguucaagccuugcagcagccaggcugcuggagucucuugacccuggguga

SEQ ID NO: 4157286 - RNA, 57 nt, Human
ucaacugcagaguuguuauuuuguuuccaugauauggauaugcaacuuugggguuga

SEQ ID NO: 4157287 - RNA, 65 nt, Human
ucaacugcuauuuuauaacagaagacauacugcuaaaaaugucucuaagauaggaauacaguuga

SEQ ID NO: 4157288 - RNA, 72 nt, Human
ucaacugcuucugugcugucucagauaagcauuguaagcaauauugucuuucagaugcacagaucauaauga

SEQ ID NO: 4157289 - RNA, 61 nt, Human
ucaacugguucuugaauguauauaggguuuaucaggauauacagaaagaauucaagucuga

SEQ ID NO: 4157290 - RNA, 75 nt, Human
ucaacuuacugguuucauacagauuauucaugggaaggcaacauguuccgucaguuaucugagaggcaaaguuga

SEQ ID NO: 4157291 - RNA, 78 nt, Human
ucaacuuguacaaaguccugcuucauacucggaaggcauuuauuugcuuaugaaggaucagguacuuggacagguaga

SEQ ID NO: 4157292 - RNA, 55 nt, Human
ucaagaaagggcuucaccaggaugaucaaugcaaauggauauggagcuuucuugg

SEQ ID NO: 4157293 - RNA, 110 nt, Human
ucaagaagccaucuggagggcuuccccuuggaaucauccuggucugcaaaaccagucaacuguucuggagauaagagguagagcccaaaguucucuagucagcaucuaga

SEQ ID NO: 4157294 - RNA, 129 nt, Human
ucaagacaucucuggaccuaccacuuuggguaggcauggagggaaaggcuggcguuuuacaggugccaaagauagcuucaggcuuugggaaugccacuuguagaccaaggugguggcagaauguccaga

SEQ ID NO: 4157295 - RNA, 88 nt, Human
ucaagacgucagucauggcuguagucaucugaaggcuugccugggucugaagggugguucucggauggcucacccacauggcucuugg

SEQ ID NO: 4157296 - RNA, 89 nt, Human
ucaagagauuuugaaaauccugaauacuguauuccucuuuugggguuucccaaugaacauuauuguauuaaggauucaaguacuccuga

SEQ ID NO: 4157297 - RNA, 60 nt, Human
ucaagaguuuccaugcucugugcuaauucccugaauuguuaugcgggcuggagcuuuuga

SEQ ID NO: 4157298 - RNA, 57 nt, Human
ucaagaugcauggguggcauaaauguauuucauaggcguucucacccauguaugugg

SEQ ID NO: 4157299 - RNA, 129 nt, Human
ucaagcacuguauguaauguaauggcagaagcacaaauuuaguuaggggaaaaacgacagggguccucugacucuuuucuucuaauuguucugccucuagcauuaccauuaucaguauaauuagcuuaa

SEQ ID NO: 4157300 - RNA, 56 nt, Human
ucaagcaugguauucuguuagcucugugauuuagauguaaacuuuaccagcucuga

SEQ ID NO: 4157301 - RNA, 62 nt, Human
ucaagccaguggugagaagauagcaaggaacuagaaaagcuacauagaaaccacugguuugg

SEQ ID NO: 4157302 - RNA, 109 nt, Human
ucaagcccauuauuaacacuacagauauguuuaaugccucaguauuugcacguuugcaaaagcuguguccuagagguguaaaugguagugcuaaauuacauuggcuuga

SEQ ID NO: 4157303 - RNA, 67 nt, Human
ucaagcgcugcugauggggugauuugcuugcaaugggaugacacagcaagcccauuaccaugcuugg

SEQ ID NO: 4157304 - RNA, 64 nt, Human
ucaaggaacuaaauaguucuggaaugacuucagggaaagugguuggacuucaguuaggccuuga

SEQ ID NO: 4157305 - RNA, 82 nt, Human
ucaaggccuugaaagccuugagauccuauaguuguuuggacacaguuaaaacucagacucaaggccaaguucaugcucuuga

SEQ ID NO: 4157306 - RNA, 72 nt, Human
ucaagguccacaacugguaaauggcaaaacugggauuugaauccaggcuucagugucuaguuguggaauuga

SEQ ID NO: 4157307 - RNA, 82 nt, Human
ucaagguuuguaucauucauuuugugugugugugugcugagguaugucaaguaaugauuauguacagaaugugcagagcuga

SEQ ID NO: 4157308 - RNA, 90 nt, Human
ucaaguaacugauucacaauagcuauguaaccugaagaggcagcauuguguagcgucuaaggacauuggcuuuggagucaggcugccuga

SEQ ID NO: 4157309 - RNA, 104 nt, Human
ucaaguacgucuuguguucauuugagauguaagguaugcuuacuugaggaagaggauucucuuuccuaguucuuaugucuguacaucuccacaagauagucuga

SEQ ID NO: 4157310 - RNA, 84 nt, Human
ucaaguauuuuaguugagauugucacauuuuaagauaagcuuugacaaauaagcaaaauguugaggauaucagaaaauauuuga

SEQ ID NO: 4157311 - RNA, 57 nt, Human
ucaagucuggagaucuggaacuucuuccugaagcuccauguuuagccagauaauuga

SEQ ID NO: 4157312 - RNA, 75 nt, Human
ucaaguggugugagggcaacacagcaaacuuacccuuuuuaggccguuuccuuuuucugcccucaaucucuguga

SEQ ID NO: 4157313 - RNA, 63 nt, Human
ucaaguuuuucacauugcuguuguacuuuuuucauagauaauaacuccuguugaagaacuuga

SEQ ID NO: 4157314 - RNA, 82 nt, Human
ucaauaguauuccuuuaguguugcuuaccaaccaugguuucacuguggaaaccagaagugaucuaaagaauauugaaguuga

SEQ ID NO: 4157315 - RNA, 69 nt, Human
ucaauauaguuucgucaauuguaacaaauguaccacuguggugaagauguuaaaauugggggauguuga

SEQ ID NO: 4157316 - RNA, 69 nt, Human
ucaauaugaaauucugccugaaugaagcccuaaaaucuuuagggacaaauuugcagaaccagauauuga

SEQ ID NO: 4157317 - RNA, 70 nt, Human
ucaauauuauauuuaagauggagauuucaaauauaaguuugaaggaggcuccuuuuuaaaauaguacuga

SEQ ID NO: 4157318 - RNA, 114 nt, Human
ucaauccuacuaaacauuuuauuucaguucacauucuucucuuucuaccagaaauguucuucucuauguggggagaagcaauagacucuagcaauggauuggcuguaggguuga

SEQ ID NO: 4157319 - RNA, 81 nt, Human
ucaauccuuaaccucuuagugcaucucauuaguuugguaauuuauucaucaaaaaugcacuccaagauguggugggauuga

SEQ ID NO: 4157320 - RNA, 58 nt, Human
ucaaugagcacucuggggauacaacauggcaguccuaugauuucaagagguuuauugg

SEQ ID NO: 4157321 - RNA, 86 nt, Human
ucaaugaguuaugucucccagaagucaugcccuugagaaaucacaaccuacauugacucugggguugaccagaugacuugcuuuga

SEQ ID NO: 4157322 - RNA, 75 nt, Human
ucaaugcugucucugcuauccaaagguagucagucaacccugaaacucuuucuuuggaaguaaagucagcaggga

SEQ ID NO: 4157323 - RNA, 70 nt, Human
guuuuagaggcuguugucuguucuaggcuuaauauaugggguagaacuucuuacagcuaaguuuugaaac

SEQ ID NO: 4157324 - RNA, 85 nt, Human
guuuuagauugggguggugagggcgcaggggcccgguaggauucucuaacagggcagcagccacucauuuagcaacaggagaggc

SEQ ID NO: 4157325 - RNA, 107 nt, Human
guuuuagcauccaucaagcucccucugagcccucuuuugcagccccaccagccugggguuuguugagagagaggcuccccuugccgccugaguggguccucuggaau

SEQ ID NO: 4157326 - RNA, 71 nt, Human
guuuuagcuuuagaaauauucucagagguuuucugaacugaaucuuugauggaugcuucugaagcuuaugc

SEQ ID NO: 4157327 - RNA, 61 nt, Human
guuuuaggagucaugguuauuuaauaugcuuauauuaggcauucaugcagcuccugugugc

SEQ ID NO: 4157328 - RNA, 76 nt, Human
guuuuagggcagcagcucucaaaguggucuggauucuccugugagucccaagauccucucaggcgcugcauaaggc

SEQ ID NO: 4157329 - RNA, 82 nt, Human
guuuuaggggaucuugggaguugugauuuggacugggugccucuauuucucaggguccaggucccaugugguccuuuagaac

SEQ ID NO: 4157330 - RNA, 86 nt, Human
guuuuauauguuuuggaauaacuuucacaucacacugacuaaaguaugguagcuucuaguugugaaaucuagucaauguguaaaac

SEQ ID NO: 4157331 - RNA, 78 nt, Human
guuuuauauuuuaucaguagugauuucugagaccuauucauucuaucucugaaaucuacgauuagugaaaaugaaaac

SEQ ID NO: 4157332 - RNA, 75 nt, Human
guuuuauuugacuucuugcuaugcuugcauucuaccaagacugugccuucagcuuaccgaugagucagaaaggac

SEQ ID NO: 4157333 - RNA, 87 nt, Human
guuuucagcccaggaguuugaggcuacagugagcuaugaucauaccacugcacuucauaccacugcacuucagccugggcgacaagc

SEQ ID NO: 4157334 - RNA, 74 nt, Human
guuuucagggacuugguuauacuccaggaaccagugaugauauuggcuccugauauccaggaagcuuugaaggc

SEQ ID NO: 4157335 - RNA, 77 nt, Human
guuuucaggucuaggugugauggguauggugacaagucugcuguugcugugcugcuagaccuggauuccugaacaac

SEQ ID NO: 4157336 - RNA, 129 nt, Human
guuuucaugaaacagagcauagcaggcuacuuggagagcaggaagcugcccaagacugaagcaucuacuuucuggaucucucaggagccuccugcucucugauucucccugcacaccugccucauuuuc

SEQ ID NO: 4157337 - RNA, 56 nt, Human
guuuucaugcccucuuguagguuaucugugucauuccuacuuuaggcacugagaau

SEQ ID NO: 4157338 - RNA, 70 nt, Human
guuuucauguucuguggaaauaagguagauacuguuaucucaccuguauuaauacagaacucuguauaac

SEQ ID NO: 4157339 - RNA, 77 nt, Human
guuuuccccuguucuguagugaguuugagcuuaacucugucugccauaacauuugucaucacagagcuggauaggac

SEQ ID NO: 4157340 - RNA, 55 nt, Human
guuuuccugagcccagagaugcaugaaaaauggggaaaaugaggcuuagggaggc

SEQ ID NO: 4157341 - RNA, 77 nt, Human
guuuuccugggcucuuaaugaaugcugcuguauuucuccuugaagagguucaguaaauguuaguugauuaggauaau

SEQ ID NO: 4157342 - RNA, 123 nt, Human
guuuucggucagucucuuccuuugggguggaggaggcaguuguugcugagcagcugagaaagcacugccacauacgcugccccuccacaccuagagcggugcaggagagcacugaguguuggc

SEQ ID NO: 4157343 - RNA, 80 nt, Human
guuuucuauggugcuauuguuucuaugcucugaggccucuccaggugucagugucuaugaagaauuuauuuauggaaaac

SEQ ID NO: 4157344 - RNA, 55 nt, Human
guuuucuggcaguuauuccuuauuucaguagggaacaaauucacugucagaaugc

SEQ ID NO: 4157345 - RNA, 75 nt, Human
guuuucuguauugccugcuaggcccugcugggugauuaagccacucacucagagucuuacaggccacucgaggac

SEQ ID NO: 4157346 - RNA, 62 nt, Human
guuuucuuugaaugcuucuagaaccacaaaauaucagggcagaaaggcaucucagagaaaac

SEQ ID NO: 4157347 - RNA, 86 nt, Human
guuuugacuaaauagugcaacaucuacguagaaaacauaccccaaacuugaguuuuccuggguugugcauuguacauugucaaagc

SEQ ID NO: 4157348 - RNA, 86 nt, Human
guuuugacuggcucuaucaggauaaauugacccuugcuucccaugguauuuauggcauuuauccuugggguagagccaguaccgac

SEQ ID NO: 4157349 - RNA, 76 nt, Human
guuuugagcuuuaugcuuccuacaagcuuguaccaggugauuacaccuauagagcguagaagguaaaguauaaaac

SEQ ID NO: 4157350 - RNA, 67 nt, Human
guuuugauucacaggacauuagucuuguugggaugacuucuuacagcaacucuccugugcucaaaau

SEQ ID NO: 4157351 - RNA, 74 nt, Human
guuuugcagcucuucagugacugcucugggacagguaggcuguuagagggaggucuuugaggggcuuagggagc

SEQ ID NO: 4157352 - RNA, 86 nt, Human
guuuugcaugauccagaguagcuauuugugccaaauuauuucuaagccccugcuuuuuaacauauagguuacaggaucgugaaaac

SEQ ID NO: 4157353 - RNA, 116 nt, Human
guuuugccuacauccaccugcauucccaguuaugagaggucaacuccuaugagcuuuguaugguucaguggauauuucuguggcuggaaggugaugcauggugaugaaaguaaaac

SEQ ID NO: 4157354 - RNA, 114 nt, Human
guuuugcuaugucuuaauguauucaauguuuucaacugacaaguaaaauuuguauguauuuauuguguacuauauguugcauggaaauauguauacauuauggaauggcuagau

SEQ ID NO: 4157355 - RNA, 112 nt, Human
guuuugcuuaauaaauaaauuacacagccaauguauuauacauaauuuguguccucguggauuugagugauauauaaugcaugguccaagucauuuauuuauuaagacuaac

SEQ ID NO: 4157356 - RNA, 57 nt, Human
guuuugcuucucauguuaagugccaacauugcaucucuuauguuggagaggcagggc

SEQ ID NO: 4157357 - RNA, 96 nt, Human
guuuugcuuuagguauuauaaaauaguguauuuuucaaaauuauagccauaaaguuguagauuugcaaugaaaauacucucuuugccaggcuagac

SEQ ID NO: 4157358 - RNA, 70 nt, Human
guuuugcuuuccaucugauuuuugugucugaauuucucaguugguucugaccacagacuggaaagagggc

SEQ ID NO: 4157359 - RNA, 70 nt, Human
guuuuggacacaguuuuucucacgguggucguuccaguuauacccacugugacucggggcuguucagaau

SEQ ID NO: 4157360 - RNA, 62 nt, Human
guuuuggagaaaagagacugauuuccuucagugcuggaaaucauuguugucguuccuagaac

SEQ ID NO: 4157361 - RNA, 83 nt, Human
guuuuggguacuuggagacauugaucuuuugcaaaucugagaagccagcacagcccgugucuccuuuaagugaauccuacgau

SEQ ID NO: 4157362 - RNA, 129 nt, Human
guuuugguuuccucacaggguuuucugauuugcuguucccuccuccccacugggugucuguucuggaggccagggugagagguggaggaggauggccacgcagaucagcacucggggcagccaguguac

SEQ ID NO: 4157363 - RNA, 100 nt, Human
guuuuguaccugcugguuaaguaugguccugaggcuccguauuucacauacuagagaucagagguaaggagucccaaccauccgagccaugguacagaau

SEQ ID NO: 4157364 - RNA, 67 nt, Human
guuuugugaauucuuggaagauugguauuuaaggccuuuuuauccauuucugggagauuuauaaaau

SEQ ID NO: 4157365 - RNA, 65 nt, Human
guuuugugauuauaucaccaacuauaagaguuauaaauugaggucugugauaaaagucaugagac

SEQ ID NO: 4157366 - RNA, 78 nt, Human
guuuuguuuguguccacugcagugauaauuaugaagguaauuuagacccauggaaaauuguguggaaaaaaguagaau

SEQ ID NO: 4157367 - RNA, 70 nt, Human
guuuuuacagcagcaaaauacugcagaggcaaaguugauauugugguagauuugcuguggguguaagaau

SEQ ID NO: 4157368 - RNA, 92 nt, Human
guuuuuacauuugugugaauacauaugaucuauuuuauguucuggaagaaaacuugcuccagugcaauggcucauucauguaagguggaaau

SEQ ID NO: 4157369 - RNA, 130 nt, Human
guuuuuacugcccaguuuauaugugaauaaaauuuuaguaaaaauaugcuuguggcuaaaauugaauuuaauuugguugaauaagauaguuuuauguaauuauuaaaguguauaaaccagcaguaaaagc

SEQ ID NO: 4157370 - RNA, 124 nt, Human
guuuuuaucagaucccugccuauggauuauagaguacugccucaguuaugaauaaaguggcauuuguuucucauuuagguaguguuuuccuguucauagcuguugggacccugugaguagagau

SEQ ID NO: 4157371 - RNA, 101 nt, Human
guuuuucauaaauucucauaaauugagauuauuaggguaauuuaaaucuggaguccggguuuuaccuaaaauagcucaauuuagggcaauuuaauaaaaac

SEQ ID NO: 4157372 - RNA, 111 nt, Human
guuuuuccaaagcucucagcccaauuuuguuuguuuguuuguuuuuaauuucuaacagcuguugaaacagacaaguaaaugucuuggaugcuaagcucugcuggauaaaau

SEQ ID NO: 4157373 - RNA, 88 nt, Human
guuuuuccaucucagagcucuuuaaucccagcaauaacugccugacacagcagaugaugacagugauuagacugggagagggaggaac

SEQ ID NO: 4157374 - RNA, 76 nt, Human
guuuuucccgguuuuuauaggacucauuaaggcagagauaauuuguuguaaucauuuuaugaaaacauggaggaau

SEQ ID NO: 4157375 - RNA, 92 nt, Human
guuuuucugaaguauacaguuaguugaggaguguuugucagucucucaacuucaaaucucugcuacuagcuaugcaauacugagaaggccac

SEQ ID NO: 4157376 - RNA, 62 nt, Human
guuuuucugucauuuuagaaauuuuccuuuucaguggccuuauucuaauuugauggaguagc

SEQ ID NO: 4157377 - RNA, 88 nt, Human
guuuuugacuucccuguucuuuucaguuuaaugccgaguguuuaguagguacucagugacuggguauuaaaucagaggaagcagaaac

SEQ ID NO: 4157378 - RNA, 72 nt, Human
guuuuugaggcaggaguuaaugugcucagcaugaagagcugggucugcacagaaaacugcugcuucuugagc

SEQ ID NO: 4157379 - RNA, 82 nt, Human
guuuuuggcuggacacuuaacuucugagaauaaagauguuuuccaacuuuuucuagcagcuaggugugucuuggccaauaac

SEQ ID NO: 4157380 - RNA, 117 nt, Human
guuuuuguaaaaugagcuguauuugugaauauuuaauuuucugaacuuugaucuauaauaggcacuuacauguuuacggauacacuuuaaauuuuaauaaggcucaauugcaaaaac

SEQ ID NO: 4157381 - RNA, 80 nt, Human
guuuuuguaauuucuaauucauuuucagugaagaaaccaugagaguagaugaacugaaaaugaauuagaaacagcaaugc

SEQ ID NO: 4157382 - RNA, 57 nt, Human
ucacugucugaaagaaauggccagagacacauaucuacauaauuucaugggcaguga

SEQ ID NO: 4157383 - RNA, 70 nt, Human
ucacuguggcuaggaagcugugggacucaggaggccaggccuggucacaugcucaccuaagccacaggga

SEQ ID NO: 4157384 - RNA, 85 nt, Human
ucacuguugagcuccauuccugucccuucauuguugagcugcguuccagccaugacucggacagugagcuauggacccccaguga

SEQ ID NO: 4157385 - RNA, 56 nt, Human
ucacuguuuuaucucaagaguucaaugcaauugcuugagcugagauaaaugcauga

SEQ ID NO: 4157386 - RNA, 63 nt, Human
ucacuguuuuucagaagguaagggauaaauaauguuuguccuuuuuauaguuagagaaacuga

SEQ ID NO: 4157387 - RNA, 59 nt, Human
ucacuuacccuguaagguugcuaggaaggacucaaacuuuaagcaagacagugguguga

SEQ ID NO: 4157388 - RNA, 68 nt, Human
ucacuuacuagguguugaccuugggcgcuuucacuggguaagccucagugucaccaucuaccaagugg

SEQ ID NO: 4157389 - RNA, 78 nt, Human
ucacuuagcuuuagcguuggggauaaaggaagacuucuauacuucuauauuucugaagguugagaagggcugagcuga

SEQ ID NO: 4157390 - RNA, 58 nt, Human
ucacuuaggcuucaguuucuucaucuguuaaaugaggccauggaacuagcuugggugg

SEQ ID NO: 4157391 - RNA, 59 nt, Human
ucacuucucuuuagaaauagaaguguaaugcuacgacuucuuuucuuggcaggaguaga

SEQ ID NO: 4157392 - RNA, 59 nt, Human
ucacuucugugacuccucagagauuuugcaccagugaacucuggcuagcauagaauaga

SEQ ID NO: 4157393 - RNA, 79 nt, Human
ucauaauuugacugcaagucaaaucugcaaaaauguaauaugcuauauuuugggugaauuugccaguuagucucuguga

SEQ ID NO: 4157394 - RNA, 86 nt, Human
ucauacagaguacagagguggucacauuagauuuggcacucuaggacugucuaucugaggaggugacauuuuaguucucuaaguga

SEQ ID NO: 4157395 - RNA, 96 nt, Human
ucauagaaaaaauucccaaguuucaguguugacagaugguguuacucugcaauauaagcagcaauguccucacgagacuauugauuuuguuuguga

SEQ ID NO: 4157396 - RNA, 108 nt, Human
ucauagaaauucugacucuuuuuuguucuuucacaguuaaugcaauauaaauuuuguucauuguacuuuaagagaugccaagggguuugguuugcaauauaucuauga

SEQ ID NO: 4157397 - RNA, 80 nt, Human
ucauagaauguacuuacacagcuguagaagguauagcguacuugcacuugcaggcugugugguagaaccuacugcuguga

SEQ ID NO: 4157398 - RNA, 65 nt, Human
ucauagcaaauauuagcacauaugucuuaugaggcaaugacuuuuaaaagcugguacuugcauga

SEQ ID NO: 4157399 - RNA, 83 nt, Human
ucauagcacaaagccuucauaaucuugggcuuuccucuugaugaaaugggaagccacagagauugugggggaggugguacuga

SEQ ID NO: 4157400 - RNA, 60 nt, Human
ucauaggaguagcagugagaggacagugucacagcaagggccucucugcaugcucccuga

SEQ ID NO: 4157401 - RNA, 67 nt, Human
ucauaguauggaucacauaauuuggaaacagcuagccuagcugucugucucugugacuuaacuguga

SEQ ID NO: 4157402 - RNA, 59 nt, Human
ucauagugcaggauugcggcuuccguaaauggaccugaagcggcagacccugcauuuga

SEQ ID NO: 4157403 - RNA, 93 nt, Human
ucauaguuugugucuuugguugugcauguaccuuauucuggacacucuucucagaacuuuauauguaucauccaugcuuacaacaccuuauga

SEQ ID NO: 4157404 - RNA, 61 nt, Human
ucauaguuuuacuuaguggugugcuagacccagcucuuacccacugauggaaacaaaauga

SEQ ID NO: 4157405 - RNA, 75 nt, Human
ucauaguuuugaagaagaccuugaaaccuuuggagguuuuacgauuuggucuuugcccagaaaauacugcuauga

SEQ ID NO: 4157406 - RNA, 73 nt, Human
ucauauauaaugacagcagcgggccacagaugucacgugcuuagugcucaccgccucugcugucuuauuguga

SEQ ID NO: 4157407 - RNA, 59 nt, Human
ucauaugcuggcuuugcgagaugcauugcuucuguaaucaaguacaaagcaguauauga

SEQ ID NO: 4157408 - RNA, 71 nt, Human
ucauauuauuuauggcacuguuggugguagccagauaucauaaaugcagugucauaaauacuuuuguauga

SEQ ID NO: 4157409 - RNA, 76 nt, Human
ucauauucuuuucucugaaagcagacuguauauugauuauuuuuauauggcaauuuucucagggaagagaauauga

SEQ ID NO: 4157410 - RNA, 61 nt, Human
ucaucaaaagccuucuggguuauauuaaggaauuugaacuagauccugaaggcugugaugg

SEQ ID NO: 4157411 - RNA, 81 nt, Human
ucaucaaguuagagaguaucagagcgaggauuagauccaagacaugguucaauuucuggcucgauucucugaccgggcuga

SEQ ID NO: 4157412 - RNA, 74 nt, Human
ucaucaaugaaaacuuuagccucauuaguauggauaucuuaaugcauuuuaaugguaugaaguccuucaaguga

SEQ ID NO: 4157413 - RNA, 83 nt, Human
ucaucaccaccaucaucgucauuauuggcucagccccuuugauuaaauguaaugccuccaguaaaugaugauagugccuuuga

SEQ ID NO: 4157414 - RNA, 65 nt, Human
ucaucacugugaugucugcuguaaugaaugacauacuuccaguuauaagaagcaucacaggaaga

SEQ ID NO: 4157415 - RNA, 78 nt, Human
ucaucagaggagcucccagcccuaagccacagaagaaagcugcacuuacuggcauucugggagcuagcucugagcuga

SEQ ID NO: 4157416 - RNA, 55 nt, Human
ucaucaggauagaaaugagacacaucaauguguuccuucaaacugucauugguga

SEQ ID NO: 4157417 - RNA, 55 nt, Human
ucaucagguauccauugugagaagacucgccucuucuuaacaauggcucugauga

SEQ ID NO: 4157418 - RNA, 67 nt, Human
ucaucauccacuuguuaauuacagugugaaauaucucaaucacuuuguuuuuagagguggcaugaga

SEQ ID NO: 4157419 - RNA, 70 nt, Human
ucauccagcaaguuuuagcaaguggaaaggguagcaauuggcccucacuacuagcuaugauugguaguga

SEQ ID NO: 4157420 - RNA, 66 nt, Human
ucauccagcgguugucagcuauccaggcucauguggugccugugaugguguuacacuguuggaaga

SEQ ID NO: 4157421 - RNA, 86 nt, Human
ucauccuccucagccagguaauguggagaugguccagaauuauccuugguaaugucuccuguacauuaacucugggagaagcuuga

SEQ ID NO: 4157422 - RNA, 69 nt, Human
ucauccugaacuugccagauacaccaaaaaguacaccacguggcuuuacugucuggaaaguuugguuga

SEQ ID NO: 4157423 - RNA, 77 nt, Human
ucauccugccagcuggagccaagguggacucuccccauagacugggaugagugcccuggcccagcuggaccuggugg

SEQ ID NO: 4157424 - RNA, 76 nt, Human
ucauccuggaugcaccgggcacaggucacacacaugaagcaggagggguggaaggccuggcccagggcccugauga

SEQ ID NO: 4157425 - RNA, 80 nt, Human
ucaucuaacaauggcccugugauggauguauuagguugaacuguaugaaacugccauucuuauagguccaggauagcuga

SEQ ID NO: 4157426 - RNA, 84 nt, Human
ucaucuacagaugccccagauguuuggaugguuuuugguguguagaaaguauucaaaaauauuuggucgaauuauuguaaauga

SEQ ID NO: 4157427 - RNA, 56 nt, Human
ucaucucucagggccaaaggagguacagcccugccuguggcaaguagaugagauga

SEQ ID NO: 4157428 - RNA, 61 nt, Human
ucaucucuguuaguaggauauaaacaguuuaaguuguuagauauucauuaauaggagaaga

SEQ ID NO: 4157429 - RNA, 69 nt, Human
ucaucucuugccagucagaauggugauuauuaaaaaguccagaaacuauagaugcuggcgaggcugugg

SEQ ID NO: 4157430 - RNA, 122 nt, Human
ucaucugaaaacuggguauaacaauauguacuuuucaggauuguugcagggcuucguugaggggauguuuauaaagcucuuaguagcagccuaguaucuaaaaaauguucaguuaaugguga

SEQ ID NO: 4157431 - RNA, 120 nt, Human
ucaucugcaaauaaggauaauucugucuuuacauuuucauuauucguauguccuaacuaggacuuccaagagaacaugacguaauaguggugguaauagacauucuucaugcugccuuga

SEQ ID NO: 4157432 - RNA, 73 nt, Human
ucaucugcacccaugcucuugucucaggacugcguccaaagaagccugagucaagauguaugguaaaggguga

SEQ ID NO: 4157433 - RNA, 129 nt, Human
ucaucuggagaucuuguuaaaggcagcuucugauuagcagcgccugcauuucuaacaagcucucaggcggggcugaugcugcugauccaaggacuguacacacuuugagaaucucuguucuaagcugca

SEQ ID NO: 4157434 - RNA, 63 nt, Human
ucaucuggggaucauaaauugauggaguggcuuauucugacuucauuaggaguucccaggaga

SEQ ID NO: 4157435 - RNA, 101 nt, Human
ucaucuguaggaccccaaaaaaugccaccuccucuagugaaacuuccgcaguuuccuuagacagagguggucauucauuagggucuuccacauccugauga

SEQ ID NO: 4157436 - RNA, 56 nt, Human
ucaucugucauggaaccagaaucuaaauccaaauaggcuguugccaguacagaugg

SEQ ID NO: 4157437 - RNA, 59 nt, Human
ucaucugucccaggcuuuuuucccucaacauacaguaagagaugccuggagauaaauga

SEQ ID NO: 4157438 - RNA, 55 nt, Human
ucaucuguggcugcuuuugugcuccaacugcagagcuaaguaguugccacagaga

SEQ ID NO: 4157439 - RNA, 58 nt, Human
ucaucuguuuuuaaauuacucuagaggucaaagacaaucagaguggaagacaguuuga

SEQ ID NO: 4157440 - RNA, 83 nt, Human
ucaucuuaaccacaucugcagucccuucuguauguaaggucacauuucacagguucuugggauugggaugugguuauauuuga

SEQ ID NO: 4157441 - RNA, 73 nt, Human
ucaucuucccccuaguuccaaagucaguaacuggagauccagaccucugacugugagagcaggaaugggauga

SEQ ID NO: 4157442 - RNA, 77 nt, Human
ucacugauguggcagugccguuugguucaggacacuguccuuugucuccaggaccauugcaacugccccuucacuga

SEQ ID NO: 4157443 - RNA, 56 nt, Human
ucacugauuugcccuuauccugccuacccucugguggugguauucaguaacaguga

SEQ ID NO: 4157444 - RNA, 59 nt, Human
ucacugcucagaguagaguuuagcccagcacggauucagacuuccacuuugugcacuga

SEQ ID NO: 4157445 - RNA, 57 nt, Human
ucacugcucucugcaaguagaugggcuuacucuccauggcuuacagauggagcaugg

SEQ ID NO: 4157446 - RNA, 56 nt, Human
ucacuggcucuucagugcuugguuccuaugcuuuaggagaaugguggggccacuga

SEQ ID NO: 4157447 - RNA, 56 nt, Human
ucacuguaccuuccauuucauuugcaaacccaaauguuggcuggggaaggcaguga

SEQ ID NO: 4157448 - RNA, 61 nt, Human
ucacuguccuccgagggccgaauaucuacacgcaauugcagguaagguuuggaggcagugg

SEQ ID NO: 4157449 - RNA, 76 nt, Human
ucacuuaaacccaggagauggagguuguggugagccaagauugcaccacugcacuccagccugggcaauagaguga

SEQ ID NO: 4157450 - RNA, 91 nt, Human
ucacuuaacuauuuaccuaaugacuuucagugguucaguuuucaaauaaccucugagcuggcuauacuugaaaagucaaaauguuaaauga

SEQ ID NO: 4157451 - RNA, 64 nt, Human
ucacuuaccacagugcaugacuucugaaagcaguuauucagggguuaucagcacugggucauga

SEQ ID NO: 4157452 - RNA, 109 nt, Human
ucacuuaucagcauauguguguggaggauguguguguguguguguguguguguguauguaaaaucacuacauugcaauaauaauucucuucagauuguagauuggguga

SEQ ID NO: 4157453 - RNA, 57 nt, Human
ucacuuaucucauuuaaucaccacaggcuccuccaagguggagaucagagauaagga

SEQ ID NO: 4157454 - RNA, 60 nt, Human
ucacuuccuugcagcuguagaauucauggggacugugucuuuaaggccagcaggagguga

SEQ ID NO: 4157455 - RNA, 61 nt, Human
ucacuucuggucagucugcaaaguggucuuaccugaggccugagaauguaccagaucuuga

SEQ ID NO: 4157456 - RNA, 77 nt, Human
ucacuugaacccaggagacggaguuuguggugagccgagaucacaccauugcacuccagccugggcaacaacaguga

SEQ ID NO: 4157457 - RNA, 76 nt, Human
ucacuugaacccgugaggcggagguuacagugagcaaagauuuugucacugcacuccagucugggugacagaguga

SEQ ID NO: 4157458 - RNA, 76 nt, Human
ucacuugagcccaggaguucaaagcugcagugagcuaugaucgcaccacugcacuccagcccgggcaacagaguga

SEQ ID NO: 4157459 - RNA, 76 nt, Human
ucacuugagccugaaaagcagagguugcagugagcugagaucaugccacugcacuucagcuugggggacagaguga

SEQ ID NO: 4157460 - RNA, 76 nt, Human
ucacuugagccugggagguugaggcugcagugagcaaagaugcugccacugcacuucagccugggugacaaaguga

SEQ ID NO: 4157461 - RNA, 62 nt, Human
ucacuugcaaaaauuauuguauauucugaaauaguggauguaaaauacgcagugcaguguga

SEQ ID NO: 4157462 - RNA, 67 nt, Human
ucacuugcuaacagauauugaggaugagcuugccuuuggugaucaugaacagugcuguuaacaguga

SEQ ID NO: 4157463 - RNA, 58 nt, Human
ucacuuggcaggucaggggauauugcagaggguguagauuaaacugggcugucaagga

SEQ ID NO: 4157464 - RNA, 65 nt, Human
ucacuugggcuuuccgagcacagccacuuauuuugucaggccugcaaggagaguccccagaguga

SEQ ID NO: 4157465 - RNA, 63 nt, Human
ucacuugucacugcccacucucaaaugguauuacacugccugagcugcggggcagugcucuga

SEQ ID NO: 4157466 - RNA, 70 nt, Human
ucacuuuaacucauuuaaacauuuacugaagauaugcucuaagaauuguguugaauagagugggagguga

SEQ ID NO: 4157467 - RNA, 74 nt, Human
ucacuuuucaccaagagaagacucagaguuuaucauauucacucucauuugauucuuagcuggugauaauauga

SEQ ID NO: 4157468 - RNA, 61 nt, Human
ucagaaagacgaaacagaugggacaucaaaggcggucauccuguaauuuugucuuuucuga

SEQ ID NO: 4157469 - RNA, 89 nt, Human
uaauuuuggggggugaguuuguaauuguauuuaguuguuaugggaauaacaguauauuuaccaaaccuuucaccuucuaauuagaguua

SEQ ID NO: 4157470 - RNA, 112 nt, Human
uaauuuuuacuaauauguagauauaaaagguuaagguguucaagaaaugauguuuagcauuguuuuacauugaauccuugaucaucauaauuauauauuucagggaaaauua

SEQ ID NO: 4157471 - RNA, 68 nt, Human
ucaggcagguguuaacccucugagccccucagagccucuggggcucagcaacaugcaccuggcucuga

SEQ ID NO: 4157472 - RNA, 56 nt, Human
ucaggcauacccggguuugauccagcuuugcuguuuucuaacugggugggccuuga

SEQ ID NO: 4157473 - RNA, 70 nt, Human
ucaggccacacaugcauaaggauaauuacuggaaaacaucuaugauuauuuuuacaguaugaauuucugg

SEQ ID NO: 4157474 - RNA, 72 nt, Human
ucaggccucagcagcccacagguaaaaguguuguuucaucaagauuaauagugggcuuuugacagugccugg

SEQ ID NO: 4157475 - RNA, 64 nt, Human
ucaggcgcuccaggcgagcuggaccagagcuuuguucugauuggcugaggccuggauugccuga

SEQ ID NO: 4157476 - RNA, 57 nt, Human
ucaggcuaagggagaggcgcucauccauugacaggugccaggcuguccugggccugg

SEQ ID NO: 4157477 - RNA, 68 nt, Human
ucaggcuaauacagaaguguauuaaaauggccggaugccaauuuaguucaucuuuugugaaauccuga

SEQ ID NO: 4157478 - RNA, 61 nt, Human
ucaggcuauauccagguauccaagaacuugcagggauaaagaacacagggaauagcacuga

SEQ ID NO: 4157479 - RNA, 91 nt, Human
ucaggcuauguauucaagugaagcucaggcucugcagggacuaaggaugccuuuagcccucagcuuggagcgugggaaugcugaugucuga

SEQ ID NO: 4157480 - RNA, 61 nt, Human
ucaggcucaggugccucauucacaccaaugcuccuccacagggugugugcaccugccuuga

SEQ ID NO: 4157481 - RNA, 60 nt, Human
ucaggcugcagcugucagcagcaggaacuucugcugcuuucauuugagacggagcacuga

SEQ ID NO: 4157482 - RNA, 56 nt, Human
ucaggcuggggaggaugcuacgaccugcagagaauugcugucccucccagguauga

SEQ ID NO: 4157483 - RNA, 65 nt, Human
ucaggcuguugcucugaacaggucuugccaaaauagcgagugcccaucggagacaacuuguuuga

SEQ ID NO: 4157484 - RNA, 65 nt, Human
ucaggcuuugaagucuagcugggaaggcacagugcaugacccagggaaggggcucucaaacuuga

SEQ ID NO: 4157485 - RNA, 115 nt, Human
ucagggaaauauccuguauaucuugcuuuguguggugauugcauggguauauguauuccacuaacauggguauauguaaccaccacacaaagcaagaugcaggacauugcacuga

SEQ ID NO: 4157486 - RNA, 60 nt, Human
ucagggaagaugucucaucuuaggcuucuuuaucauccaagugccuggcauuguuccuga

SEQ ID NO: 4157487 - RNA, 65 nt, Human
ucagggcccgaccaggcuguugggcccaguguuaugcacagggggucccauggccuggacccuga

SEQ ID NO: 4157488 - RNA, 64 nt, Human
ucagggccggggcuguggcgagcagagggaugugccagguggucgucguggccucauguccugg

SEQ ID NO: 4157489 - RNA, 81 nt, Human
ucagggccgugccagccuggugcgccugggggacccacagcagagguccugcaugcacuuggcuggcacguguaguucuga

SEQ ID NO: 4157490 - RNA, 89 nt, Human
ucagggcuaguaagugagaaagccauauuuugaacccagaucuugcugacucaaaaccuaggcucucugcuuccucacaaagccuuuga

SEQ ID NO: 4157491 - RNA, 90 nt, Human
ucagggcugcaaguuuaagcagauugcugugguguauacacaugauuuuagcaugauaacacuucuguuuaauguccuuaguuguucugg

SEQ ID NO: 4157492 - RNA, 57 nt, Human
ucagggggaggagacugccagugccgugacucaaaauagcugucucuucccugcuga

SEQ ID NO: 4157493 - RNA, 75 nt, Human
ucaggguauuuaauuucuaagaguauucaagguuuuguugaagaucuaaacagugcuuagaaauuuuuacccugg

SEQ ID NO: 4157494 - RNA, 69 nt, Human
ucaggucuccacuaaaaacuuucacgugcuaaggguuuuauuguuuguggaggaaggguggggauaugg

SEQ ID NO: 4157495 - RNA, 107 nt, Human
ucaggucugcccuccuucuccucccagguagugagaaauggaggucaugcuaugauucuugcuuuuuucacugcuauggucuguggagcuaaaaggcaggcaucuga

SEQ ID NO: 4157496 - RNA, 64 nt, Human
ucaggucuuuugucuccuagaaauaaauaguuuuuaaaaaucaauaaaggggacagaaaucuga

SEQ ID NO: 4157497 - RNA, 66 nt, Human
ucaggugacuucagcucccuguguguuugcagguauaagcgagagcagcaaggaugaagcacuugg

SEQ ID NO: 4157498 - RNA, 59 nt, Human
ucaggugccugcucccagcuugggcaucuucucuugccuaccuggagacagcacucugg

SEQ ID NO: 4157499 - RNA, 77 nt, Human
ucaggugcgcagcuagagaggaagaggcgggcucuucaauauggcaaggccuucgucuccuagcuucuaggcucuga

SEQ ID NO: 4157500 - RNA, 55 nt, Human
ucagguggagaccuccuuggccucccuagcagccaagguuagagucuuccccugg

SEQ ID NO: 4157501 - RNA, 69 nt, Human
ucaggugggaccugcuaggacagguauaacuuuggccaccugcauugcauaaacgucccuuuugcuuga

SEQ ID NO: 4157502 - RNA, 55 nt, Human
ucagguuuaagcuacuggaaucauuccuacaugauuacuggcagcagaaaccuga

SEQ ID NO: 4157503 - RNA, 55 nt, Human
ucagguuuaagugacuggaaucauuucuacaugauuccuggaggcagaaacguga

SEQ ID NO: 4157504 - RNA, 100 nt, Human
ucagguuuacauguuuauuugugaagcuuguauuuaaauaaguuuucuaugcaagugagauacacuuuaagagauacaugccucguaaaaacaugccuga

SEQ ID NO: 4157505 - RNA, 58 nt, Human
ucaguaaaauaaaacaugggaccccacagacuuucagggucuuaugaaaauuuuuuga

SEQ ID NO: 4157506 - RNA, 94 nt, Human
ucaguaaguguuugaauggaauuggaaguaaaaaagcaaauucauucauacaacagguuuucuuaauuugaguuccacuaauaauacuugaaga

SEQ ID NO: 4157507 - RNA, 72 nt, Human
ucaguaaucuugccagucuccaaaucaaucugaaugauaucauucaccuugauaaggggaucaggauagugg

SEQ ID NO: 4157508 - RNA, 68 nt, Human
ucaguaaugugucgcaggugccuagaaguguuccuggcagauaguaggcacugaguacauauugguga

SEQ ID NO: 4157509 - RNA, 62 nt, Human
ucaguagauauucuggugaaaccuuuggaaaguucucuaaaugguacaggauaucucuuuga

SEQ ID NO: 4157510 - RNA, 85 nt, Human
ucaguaucuuccauuagacugucacacuggccaggagcaggagcauuucauguuuacauucccagugugcagcaugguuuacuga

SEQ ID NO: 4157511 - RNA, 122 nt, Human
ucaguaugcaugauauaucaaauuguggacaaggugagucaguuaauguugcuaagaggaauuuccacuuugcauaucaugacuucuaucuuaauauuguauugauauuccaugaucuuuga

SEQ ID NO: 4157512 - RNA, 70 nt, Human
ucagucacccccuccaucacccauaugucauuuuaccuuguguguauuugaugagaggagggucaacuga

SEQ ID NO: 4157513 - RNA, 116 nt, Human
ucaguccaauuugauuuggauuucugucacuugcaaucaagaguugucacuacuacacagucucauuugauggcaggaggauauaauucauguauuauuuuaaagggggaaacuga

SEQ ID NO: 4157514 - RNA, 56 nt, Human
ucaguccacacagccugcugcuguggcacuguuccacagcagagcaaaguggcuga

SEQ ID NO: 4157515 - RNA, 59 nt, Human
ucaguccucacuugguucuaagguuugaccaucaaacuuugagcuugcaugagccuuga

SEQ ID NO: 4157516 - RNA, 55 nt, Human
ucaguccuccacacaggcaccccagggaggaggcugccuugggcagaggaacuga

SEQ ID NO: 4157517 - RNA, 75 nt, Human
ucaguccucccucauuuuuucucuugacacugucucuagaguggcaugggguguauguggcacggaggaagcugg

SEQ ID NO: 4157518 - RNA, 98 nt, Human
ucagucuucauaauuacauugucugauuuagagugugauuacauuaaugcuagaucauguugcucaaaauuaaacaaguggguaauuuccaagauuga

SEQ ID NO: 4157519 - RNA, 118 nt, Human
ucagugaaaugaauagacaucuuguuucaccuguuucaccucccugaacuguaggagaaagagcccaguccuggacuuggagucagggaaaccuauguaagaacgcuagguuugcuga

SEQ ID NO: 4157520 - RNA, 109 nt, Human
ucagugauucuguaaggaugaaggugauguagaguaguagauggcagcucuacucuggaaguccagaauacugcucugauucacaccugcaagccuuauuggucaauga

SEQ ID NO: 4157521 - RNA, 71 nt, Human
ucagugcaggugaagauuuaagcaucucaauuguagauuagcacguauugagaaauuaaucugcccacuga

SEQ ID NO: 4157522 - RNA, 60 nt, Human
ucagugcauuaauaauaucagucuuuuaaaagaagagggcugaccuuugagaugcacugg

SEQ ID NO: 4157523 - RNA, 67 nt, Human
ucagugccaaggagaaggacagccuuguguauuuaauuacuuuagcuuauuuuguccucuggcauga

SEQ ID NO: 4157524 - RNA, 80 nt, Human
ucagugccccaccuacagagaacucagcugcccucagacuuacuuaggaacaagccagauucuguaaggaggggauuuga

SEQ ID NO: 4157525 - RNA, 92 nt, Human
ucagugcuuugcuguccagagccacugucugccaggcaccaugugagcacuauuuuauugcugaauaagacguggcuuguggggcacacuga

SEQ ID NO: 4157526 - RNA, 77 nt, Human
ucaguggaacacuaaaggucaguuagaagauaaucaguugaagugcuuuuaaucuaauuuuuauauugauucauugg

SEQ ID NO: 4157527 - RNA, 66 nt, Human
ucaguggagauugcaugcaagaaguuuguacacuuuaaacugauucaaguuaugcaucuucaauga

SEQ ID NO: 4157528 - RNA, 108 nt, Human
ucaguggccagaggcuucaaggcauucagggcucugggggcucuuauuauaaugguaaugaaaauuggacccuagaacuuuggaccuccccagccuuaaauccacuga

SEQ ID NO: 4157529 - RNA, 90 nt, Human
ucaguggcucauuugauugucaccuaccuugcacaaaaccucccagccccgagcacugucugguggguugacaggcagucagagugcuga

SEQ ID NO: 4157530 - RNA, 66 nt, Human
ucagugggaacagcaaaagugggcucuccaguaaaugcuuuauaguucacugagguugaccacugg

SEQ ID NO: 4157531 - RNA, 89 nt, Human
ucaguguauacaacaaucauuuuuccccuucaguucugcugcuuuauacaacagugugauugacagaaaauuggauggcaugugccugg

SEQ ID NO: 4157532 - RNA, 62 nt, Human
ucagugugcacucugugacccagggucccccagcauguaaggggucacugggaggccacuga

SEQ ID NO: 4157533 - RNA, 56 nt, Human
ucaguguggaauucaacagcaaaauaugucuagacaugugaaaccuuccacgcuga

SEQ ID NO: 4157534 - RNA, 63 nt, Human
ucaguguucgcucagggacuccuuaggcaucaacugucagguuccccuggauggcgaaacuga

SEQ ID NO: 4157535 - RNA, 74 nt, Human
ucaguuaauauggguaaagcauuuaguacuucugucauauucgacaccauguauguguuuuuuucaauaacuga

SEQ ID NO: 4157536 - RNA, 113 nt, Human
ucaguuacauccacggaauaugaaaguucaagcugugguacuugauucacaauuaaacagauuugaaggagcuacagcuuccaacauucuugaauucuuaaagugauaauuga

SEQ ID NO: 4157537 - RNA, 76 nt, Human
ucaguuacuuaaaguuugaaugauauauuaguuugcuagggcugcuauaacaaaauaucacagacugggugacuga

SEQ ID NO: 4157538 - RNA, 70 nt, Human
ucaguuauuuauuuuauuguguguuugugcaugucgguagagcacaguauuuaguagaaugaguuauugg

SEQ ID NO: 4157539 - RNA, 75 nt, Human
ucaguucaucuaguucugaaggguuacucagugucaucuugaucagcccaccaucuucauaacaagauuuacuga

SEQ ID NO: 4157540 - RNA, 63 nt, Human
ucaguucuuaauaccaugugguugccagcuauguagggaaacucagacauguauaaagacuga

SEQ ID NO: 4157541 - RNA, 78 nt, Human
uccagccgcucuuggaggucucucacacucacagggcguccccccaacgccuagggugcucagggacgagcgacugga

SEQ ID NO: 4157542 - RNA, 73 nt, Human
uccagccgguuaaugagggggaugggaaaguguuuguacacgacgucuuucucuucaaugacaaucaggcgga

SEQ ID NO: 4157543 - RNA, 78 nt, Human
ucauuaagcuuucacuuguagcucacugugcagucuuggauauuagcacccugaguuauugagaaauaacugcaauga

SEQ ID NO: 4157544 - RNA, 120 nt, Human
ucauuacuauaagccaagguaaauucuucuaaagccuguccuaucagaaugaauguauucagugaaugagauaacuuuagauuuuuggaaaauuacccugaauauguggauagaaauaga

SEQ ID NO: 4157545 - RNA, 77 nt, Human
ucauuagaaagagcaucuaguuuuauaaaaagucucaccagugacgcagagauggaaagagauguuguuucugaaga

SEQ ID NO: 4157546 - RNA, 104 nt, Human
ucauuagaauuuacuuugaaagauucuaagcauaacgaagauacuauauuuuacugucagugacagaguaugcaucuauuguaccugcuagucaguucuaauga

SEQ ID NO: 4157547 - RNA, 69 nt, Human
ucauuagaucacggguguucuggcaaggaguuaagaacuucucagaggccagaagcuaugugaaaguga

SEQ ID NO: 4157548 - RNA, 81 nt, Human
ucauuagcaccacaggagagaguuguaguagccuuugauuaaucuauaaucuaccacuauugcaauauucuuuguuaaugg

SEQ ID NO: 4157549 - RNA, 104 nt, Human
ucauuaguuuaagaagcuuggaugggcacccaggaaagccgugaggaggaugcacuuacacacuggcuugauggguaaugccuccaagacauugaacgugcuga

SEQ ID NO: 4157550 - RNA, 87 nt, Human
ucauuauagaagaacuuugcuugggucaaacucagaaaaugaaaggaauaaauuuagguuggcuccaaggcaaaggaaauuauagga

SEQ ID NO: 4157551 - RNA, 72 nt, Human
ucauuauuucucaaccaggucaaaaaggcagaaacaguucugcagaauuuuuuaggugguuggaaauguuga

SEQ ID NO: 4157552 - RNA, 73 nt, Human
ucauucagagcauugggaagaagaaauuugggauaguaguaaauucaaagcaauuucaccagugccuguacga

SEQ ID NO: 4157553 - RNA, 60 nt, Human
ucauucagauaggucuuauaggugauuuuuuauuccuuugcuuauaaccuguuuugaugg

SEQ ID NO: 4157554 - RNA, 57 nt, Human
ucauucagcacuguuauggauuugcuccuguuagggcauuuaaauauguguuggaga

SEQ ID NO: 4157555 - RNA, 55 nt, Human
ucauucagcuuguaaauugugaaucugggauuuagaaccacaacuggcugauuga

SEQ ID NO: 4157556 - RNA, 57 nt, Human
ucauucaucaguugguagagauuuggacuguucccacuuuuuggcuguuaugaauga

SEQ ID NO: 4157557 - RNA, 93 nt, Human
ucauucccaugggggaugggcaagggacaggccuggcuuucuugggaccuuagacccaggccaggcaugucugcccugcccuugaggguuugg

SEQ ID NO: 4157558 - RNA, 87 nt, Human
ucauuccgugcuuggccucuacagacuguuggccuacugagcaauauaugcucuguucaucaguuuguugggagaguuuggcaguga

SEQ ID NO: 4157559 - RNA, 125 nt, Human
ucauuccucuggggccuggguuccgucuccaccugggcacugagaacuuggggacagagguugccagugaccucccaccguaucucaguggcaugggguuagggacauggguucuggaacaguga

SEQ ID NO: 4157560 - RNA, 68 nt, Human
ucauucguguaacaaacgguuccaagaugccugcuauaugccaggcauuacguuaguucuagggauga

SEQ ID NO: 4157561 - RNA, 75 nt, Human
ucauucucucucgggccuuggaguccuccacuggaugucgaauucagccagcagcccaaggaugagagcaaguga

SEQ ID NO: 4157562 - RNA, 85 nt, Human
ucauucugucuggaaccugcuguucuugguccccugcuguggcucccacuggcaguagagggagcgcauugccagauaugaagga

SEQ ID NO: 4157563 - RNA, 61 nt, Human
ucauugaacacacuuuucuaguuggcccuuuguccaagcugacugguggacuguucauuga

SEQ ID NO: 4157564 - RNA, 95 nt, Human
ucauugaccuuacaacacuugcugauuuugccuacugauccaccugcagguggggaguaaagaagaaucagggaaagucuguuaaggagagaugg

SEQ ID NO: 4157565 - RNA, 84 nt, Human
ucauugaguauggaaagugagacauauuuauagccaggagaacaugguuaugaagcugauaaucacugauaauccaugccagga

SEQ ID NO: 4157566 - RNA, 56 nt, Human
ucauugauggcuucuuucuugcuguuaggaaggccaagccagagaagcuaaaauga

SEQ ID NO: 4157567 - RNA, 56 nt, Human
ucauugcuguaguccagaugaggcauggugagagucugaaauggcagcgggaauga

SEQ ID NO: 4157568 - RNA, 77 nt, Human
ucauugcuuuaagauacauuuucuucagagaaaguauuuuuuccuuacugugaaauuguauaaugagaugcuaauga

SEQ ID NO: 4157569 - RNA, 88 nt, Human
ucauugucauccaauguccuauuaagacuugggguuuugagggccuugagaauauaauugauagguuuugauguuggagugagaauga

SEQ ID NO: 4157570 - RNA, 119 nt, Human
ucauuuaaaccauguacuuuuuagaauaugcaucauuuguucacuugauuccaagaagauuuugugaaucauaaucagguaauuagguuagcagagaacuaaugugcauggaaaaauga

SEQ ID NO: 4157571 - RNA, 124 nt, Human
ucauuuaaauguugaaguagcuacaagcucaaaguuaucaacugcaacauuauucagaauugcaaauaugaagagugaaaguagagaaaaugcuugagaaaauugugauacagcaacugaauga

SEQ ID NO: 4157572 - RNA, 87 nt, Human
ucauuuaauagucaaugcuuucuuauaaccacugcgaaauucacuauccguaaauguuagaggaaaguguagaaauaaaguuagaga

SEQ ID NO: 4157573 - RNA, 66 nt, Human
ucauuuacauguagugucucauugcucaucaaaauaacuugauugugcaaauauuaucuguaguga

SEQ ID NO: 4157574 - RNA, 56 nt, Human
ucauuuacuggauccauaagcacuuguaaacauugcuaauggaguuugcuaaauga

SEQ ID NO: 4157575 - RNA, 69 nt, Human
ucauuuacuugguuuuaaucuuuaccuuucuuugucaggaacauuguuggauuagaacacagguguuga

SEQ ID NO: 4157576 - RNA, 92 nt, Human
ucauuuauaauuuuuuuaaaagcagcugauagucucaucucauaaaaaucugagggugagauaauuuaguuccuggaaagaaauuagaauga

SEQ ID NO: 4157577 - RNA, 61 nt, Human
ucauuucaugucucaggcacuguaaaaugcugagucacaguacaccugagcgcugcaguga

SEQ ID NO: 4157578 - RNA, 128 nt, Human
ucauuucauuguauaauaaauguuguuuuccuccccuggacucagguccuugguaacagaguuucuuuaaaucuguagucacaguacaugauucagugguagcacauucuguauucauuguagaauga

SEQ ID NO: 4157579 - RNA, 65 nt, Human
ucauuucuaucuaugcagcuucucucugcaccgaugcagaaacugugccugccagauaguaauga

SEQ ID NO: 4157580 - RNA, 64 nt, Human
ucauuucucuguuuuccccucgaugucuggcaaagugcuagauacaggauaagaagagaaaaga

SEQ ID NO: 4157581 - RNA, 126 nt, Human
ucauuucuuugggaaaauuaccucugcuucucaagcucucaguuuccucaacuguaaaaugaucacacacuuuuauaaugagaaacugagaguagugacgugaaggaaggauacaaagagcuguga

SEQ ID NO: 4157582 - RNA, 87 nt, Human
ucauuugaagcuuccauuccaaggccaagucuaagauguucuuuaaagaaaucuuaagcuauugcauuuggagggcacacagauuga

SEQ ID NO: 4157583 - RNA, 91 nt, Human
ucauuugacaugucuuuuaaagucuaauaaucauguauaaaaaagauaacgguucgcugcaucuguuaccuuuaggaguauguacaagugg

SEQ ID NO: 4157584 - RNA, 60 nt, Human
ucauuugagguaagacugccauguggagaugggucuccaucugguggcuuccuuuuguga

SEQ ID NO: 4157585 - RNA, 96 nt, Human
ucauuugggggaccugucuugucugugagggcauuggaguuugugaccccugcuccauguguaaggcucacaggcaggucuuaagucuguaagugg

SEQ ID NO: 4157586 - RNA, 78 nt, Human
ucauuugucagcaagugauggaaaucagagcuggccguguuacgauuuccuccuccaggucuccaacacuugcaauga

SEQ ID NO: 4157587 - RNA, 103 nt, Human
ucauuuguuuauacaugugugguacuguuaauguuuugucauacuuguauguuuauauaacacacaguaguguggaaaaacaugcuauauuuuugaaacuuga

SEQ ID NO: 4157588 - RNA, 71 nt, Human
ucauuuguuucagagaaagcccaaagacuguaaccugcagucauuugucauuuuuuugaggucucaaauga

SEQ ID NO: 4157589 - RNA, 65 nt, Human
ucauuuuaggaaaaugaaauuaccuguccuaauauaaaggaagguuuuuaugauuccuauuuuga

SEQ ID NO: 4157590 - RNA, 98 nt, Human
ucauuuucaguucaaaccugguuauaguaacacucugucauacuuaauauacacagggcaacaugcagugugcuagauuuggacucacuggaaaaaga

SEQ ID NO: 4157591 - RNA, 89 nt, Human
ucauuuugugugugguuugugcaccagcagcaucagcaucaccugggagcugguuggaagugcagacucucaggccccacccagaauga

SEQ ID NO: 4157592 - RNA, 77 nt, Human
ucauuuuucuccauugucuaugaaauauuugaaguggaaauggcuuauuucaacaccagagaccaugcgggaaauga

SEQ ID NO: 4157593 - RNA, 91 nt, Human
ucauuuuuuuaaaguaauugaagcuuguggcuuuacaacuuaguguuuuuugcuauccagauaacaaguuucauuguuuagaacccaguga

SEQ ID NO: 4157594 - RNA, 59 nt, Human
uccaaaaagggauauugacauucuagcucccaguuccugugaauauuuccuucuuugga

SEQ ID NO: 4157595 - RNA, 60 nt, Human
uccaaaacagcuagcaguuugguucuugaaagaucccugaauuguaugcaguuacuugga

SEQ ID NO: 4157596 - RNA, 63 nt, Human
uacauguacacauaucauuugugggaauguguauuuucuacuucuuagguguguguauaugua

SEQ ID NO: 4157597 - RNA, 57 nt, Human
uacauguaccuguuuguuuggggaggauagguuugcucuccagggcaggaacaugua

SEQ ID NO: 4157598 - RNA, 69 nt, Human
uacaugucccagugcugcuaaagagguagaguguauuuccucuccuccugacguugcaauggccaugug

SEQ ID NO: 4157599 - RNA, 70 nt, Human
uacauguucugagccagaguaaaccagagaccauguauaaaguaauauaauauuuauucuggcauaugug

SEQ ID NO: 4157600 - RNA, 67 nt, Human
uacauuaaggauauggacaugauucccaguagaagguggaacauauguuaccauguccuggaaugug

SEQ ID NO: 4157601 - RNA, 69 nt, Human
uacauuagcucaucuauuuauuaauaggagaaggaaaguaauucuuugccaguagguggugcuuuugua

SEQ ID NO: 4157602 - RNA, 56 nt, Human
uacauuaucucauuugagccucacagugacucugugugacucagagaggguaagua

SEQ ID NO: 4157603 - RNA, 85 nt, Human
uacauucauauuugcaguauaccuggagcagugccuggcauguagcaagcacuauagaaagguuuauuaaguaaauagagcugug

SEQ ID NO: 4157604 - RNA, 56 nt, Human
uacauucugguggagaaaguaaacagaagaugguuauuuguucaacuaagaaugua

SEQ ID NO: 4157605 - RNA, 71 nt, Human
uacauuguaacauuuguguugaacugccccacacagcauacuaauguagggguguaacacacauacuugua

SEQ ID NO: 4157606 - RNA, 85 nt, Human
uacauuuaaaacucuuguaaauaucauguuuuagaagggugcauacauauccaaaaagcugaugucuacuagagaaggaaaugug

SEQ ID NO: 4157607 - RNA, 102 nt, Human
uacauuuaucugaucuuuucucacaauuuccauugagcagcaguugcuacaaccaccugagcaucaaaugggcaauuaauuggaacagauuuaauaaaugua

SEQ ID NO: 4157608 - RNA, 96 nt, Human
uacauuuggcuucaguuguuuuccucuuuugucaguaggucaucaggaauuuaccaugaggccaugggaagagguggagagcauguugucagugug

SEQ ID NO: 4157609 - RNA, 79 nt, Human
uacauuuucuacuuuuauuaucacucccguguauauuccagaugcaagagguaaaaugaaaggagaaagcacacaugua

SEQ ID NO: 4157610 - RNA, 73 nt, Human
uacauuuuuaaaccuaucuaagaaauagcccugauauugaaauggcuucuguggaauagguuugacagaugua

SEQ ID NO: 4157611 - RNA, 58 nt, Human
uaccaagaugccagugcauuugaaggaugauguccccaaagcagaagguucuguggua

SEQ ID NO: 4157612 - RNA, 87 nt, Human
uaccacacuuuuaucacucugccauuuuuucacccucagaaccuaaggguggccaccaaguaugucagagucaguauugugugugug

SEQ ID NO: 4157613 - RNA, 67 nt, Human
uaccaccuuccucuguguuccuauauauauuuaagugucuuuauuucagcacaugggauagguugug

SEQ ID NO: 4157614 - RNA, 97 nt, Human
uccaauuaaccagugaguugaacauugauaaugaugauaguaauaugaauaaucauuaacaauuguuuaugcugugccccgcacuguguaccuugga

SEQ ID NO: 4157615 - RNA, 64 nt, Human
uccaauugucccggauuucacacuacaagccagauugguugugccuggaucucugugacaaggg

SEQ ID NO: 4157616 - RNA, 66 nt, Human
uccacaagaugauaaagagagggcagaagauguaaaauguuuaucucucuucaguuaccuugugga

SEQ ID NO: 4157617 - RNA, 118 nt, Human
uccacaccggcacuccagaguguuggcacaucuccagcaauggggagcucuuuccaccuggagcggccccugcccuuggaggacagugccaacucuuguaaacuucccccuuugugga

SEQ ID NO: 4157618 - RNA, 73 nt, Human
uccacaccugcugagcugcuggggguugggggugagguguuguccuggguucuagcagccagccagggauggg

SEQ ID NO: 4157619 - RNA, 63 nt, Human
uccacaccugcuucaaggagguuguuagaacacacguaaacaauguucucugaguugugugga

SEQ ID NO: 4157620 - RNA, 80 nt, Human
uccacagcauucagcuuguuaccgagggaggguacuuggugugggacagguauuacuccuuuucuagcaggugcugugga

SEQ ID NO: 4157621 - RNA, 108 nt, Human
uccacagugggaacagugccaagaggaauuggaaggaagaaccgcgguagcugcccugcaguuaacagcuguugcuucucuucuuccuaaaagucacagcacuuugga

SEQ ID NO: 4157622 - RNA, 81 nt, Human
uccacauccaccgagggggcgggaggcggcaggaccagcaggggcagcccguucucuucgcuggcccucggggaggucggg

SEQ ID NO: 4157623 - RNA, 56 nt, Human
uccacaucuuguguucauaugugagaguuucccuggcauauauaccuagaagugga

SEQ ID NO: 4157624 - RNA, 70 nt, Human
uccaccacccugccucuauucacugaggcagucacaaagacuguccauauucaagggguaggggacugga

SEQ ID NO: 4157625 - RNA, 69 nt, Human
uccacccacccuggccugguucaugugaugucaaacacucaccaggagcuaggacaggcaugggaagga

SEQ ID NO: 4157626 - RNA, 56 nt, Human
uccacccuaagcauuacagauggcuuauagcuguccacgggguugguagagguggg

SEQ ID NO: 4157627 - RNA, 74 nt, Human
uccaccugaaccauguacuuuauucuguuuuacacaucaguugaaacuguaaauacuaguaaguguaggguggg

SEQ ID NO: 4157628 - RNA, 65 nt, Human
uccaccuugggauaucaccuuucagaacccagcugccacguucugaggagaccaagccaagugga

SEQ ID NO: 4157629 - RNA, 64 nt, Human
uccacucaacccuugguuccuguugaagaugauggcagguccugggccacagggugcuggugga

SEQ ID NO: 4157630 - RNA, 62 nt, Human
uccacucagcagguaccacaugaucuuugggaaaaauuuguguuauaccugcuccugguggg

SEQ ID NO: 4157631 - RNA, 86 nt, Human
uccacucagguuugauuaauagaaaguggaucccuuuauacugcauuuuagucagaggccuuucuguugagugaagccauuguggg

SEQ ID NO: 4157632 - RNA, 116 nt, Human
uccacucugcuuaccuucuggagcugccuggauucgcucugcccccuauaggggacuugucuuugagaaugguaaguggaucggcagagaaaggccaauaggaagcaacaguugga

SEQ ID NO: 4157633 - RNA, 126 nt, Human
uccacugccaguuaaccagaggagcauaacaugugggagcugcuggguaacauuuccaaaauacuuagcauuagucagauauguuuuuagaauuauguauccauuuuggcugaaggaaaaugugga

SEQ ID NO: 4157634 - RNA, 56 nt, Human
uccacuggaacaacucugaggcuguuuugcacagucucccagaggaucccagugga

SEQ ID NO: 4157635 - RNA, 56 nt, Human
uccacuggaaguucauucucagaaggucuguuuccuuuugauaaagaacccaggga

SEQ ID NO: 4157636 - RNA, 58 nt, Human
uccacuggccugggagcuacugaaggaaugugccucuccccaucccaggccaggugga

SEQ ID NO: 4157637 - RNA, 80 nt, Human
uccacuuauaauuccugcuguuuggugagugagaaauaaagauauaauuuacuggcuaagccaguccuauaauaagugga

SEQ ID NO: 4157638 - RNA, 55 nt, Human
uccacuuuucuuccaucaucauugguaaaaacgaugaaaaagauguggaaaggga

SEQ ID NO: 4157639 - RNA, 72 nt, Human
uccagaaggcugccgugcccauauuguggguggggaucucuacccgugaagugagcguggggcuuuaacgga

SEQ ID NO: 4157640 - RNA, 61 nt, Human
uccagaauacucugaaaucauugugggugcccaguaagcacuucuuggucagagucugaga

SEQ ID NO: 4157641 - RNA, 78 nt, Human
uccagacuguuccaugcagaggagcugguggcagguccacaucccuagcuccccgcuaauuugcagugugacccugga

SEQ ID NO: 4157642 - RNA, 130 nt, Human
uccagagacaauaagauguuguagcuaguuaauacuuuuaagauccuuuugcugaagucauauugaugcuagcagugccaggauuuugcugaaggauugaaguucuguggaguuuuguuuuuuuuuugga

SEQ ID NO: 4157643 - RNA, 60 nt, Human
uccagagccucagaauccuguggagagaguugagaccaggcgccucccugagguuuugga

SEQ ID NO: 4157644 - RNA, 62 nt, Human
uccagagccugggguuuguaacauugaagaaaaagaauacaaauccccucaggcucccugga

SEQ ID NO: 4157645 - RNA, 56 nt, Human
uccagagccuuucugcuugacauccuuccucucuggguacagagcaggguucuggg

SEQ ID NO: 4157646 - RNA, 59 nt, Human
uccagaggcagcugcggucaggggcagggacugccgccagaugugccugccuuucuggg

SEQ ID NO: 4157647 - RNA, 80 nt, Human
uccagaggcugcgcucaucucagggcaagggcugauugcagccuggcaggggccugggagugggcccagccgccacugga

SEQ ID NO: 4157648 - RNA, 100 nt, Human
uccagaguucuugguucagcaggucuggguuggguuccuggaauuugcauuuccaacaaguccccaggggaugcccacgcugcuggccugagaacuugga

SEQ ID NO: 4157649 - RNA, 128 nt, Human
uccagaucuuuuucuuaagaaaaaaauuucaguauugcaccugaugucuuaguguuagcugucagucaucuugacaaguggagauauuuaaggucaaauauugaaaauggaaugugggagagggugga

SEQ ID NO: 4157650 - RNA, 91 nt, Human
uccagauguuuugucugcuugaugccaagcauccugauuuuucaacuauccagauguuuggcaucaggcagaccaauauccaaaaucugga

SEQ ID NO: 4157651 - RNA, 86 nt, Human
uccagauuaugauuggccuuguacaucauauuaagagauuuaaucuuguagaugaucaagagcuagaggagaauuauaaguaggga

SEQ ID NO: 4157652 - RNA, 64 nt, Human
uccagauuuaagacucagcacuuucuaagaaauuauguaccuugaaagucuguuuaucucugga

SEQ ID NO: 4157653 - RNA, 85 nt, Human
uccagcaaagggaacagacaucuauccauuuaauuaagcucugcuaagaugcuuugaguuaaauuguguauguuugugugcugga

SEQ ID NO: 4157654 - RNA, 94 nt, Human
uccagcaagaccaugaugggaagcucagggcccauggcagauugcuucucccaacaggugccuuugcuaugacucauucauuggugcuucugga

SEQ ID NO: 4157655 - RNA, 58 nt, Human
uccagcacugaaugugagucauggaggagaaacguggcaugcaauggacagagcugga

SEQ ID NO: 4157656 - RNA, 78 nt, Human
uccagcacugagucaaugucagauguuccugguaauagugucccccagagauuugucaaugauuuccagagugcuuga

SEQ ID NO: 4157657 - RNA, 68 nt, Human
uccagcagagggucuuggccauuuacagcugaaggaaugugcuaguggcaaugcugcccucuuuugga

SEQ ID NO: 4157658 - RNA, 63 nt, Human
uccagcagccagaggggccagagucggaagcugggggucggacucuuggcaucuucuggugga

SEQ ID NO: 4157659 - RNA, 71 nt, Human
uccagcaggucuggagugggaucugagagucuaaaauuaaauugcucaccagugauucagaugcugcuggg

SEQ ID NO: 4157660 - RNA, 79 nt, Human
uccagccugaccccagagcagaaccggaacaccagguuggggcccuggugcugccaccuccucugcuggucgggcuggg

SEQ ID NO: 4157661 - RNA, 60 nt, Human
uccagcuuuuauuggaugaggauuugacuucucugagucuuucuuaauugguaaaaugga

SEQ ID NO: 4157662 - RNA, 55 nt, Human
uccaggacagaguagaagcagcuaggcacuuggugacucucucagauguucugga

SEQ ID NO: 4157663 - RNA, 55 nt, Human
uccaggacuugccuguccucccugaguuuggaugggagagacacaagggccugga

SEQ ID NO: 4157664 - RNA, 73 nt, Human
uccaggagcccugacugagccucccuagcccccaacucuacuggagaccugggcugugcuccggguuccugga

SEQ ID NO: 4157665 - RNA, 106 nt, Human
uccaggaguguagccaccaagagaaagggguggcuggagaacuuggggaucuccugcgagggaacccagaaguccagcugcccauuccugguggaaacgcccugga

SEQ ID NO: 4157666 - RNA, 55 nt, Human
uccaggcacgaggcccugugcagagaaagcacuuaguaggagccuuugcacugga

SEQ ID NO: 4157667 - RNA, 113 nt, Human
uccaggcagcaugaggaaugggaagagugauggauguguggggcuuuccggggaguacuuugaggagcccuccaucugugcucaggcugcccugguucucugcaugcacuggg

SEQ ID NO: 4157668 - RNA, 55 nt, Human
uccaggcccgagaugggcuggagguccucauuuugccuucagaaaggggccuggg

SEQ ID NO: 4157669 - RNA, 56 nt, Human
uccaggcuggagugcaguggcgcgaugucggcucacugcaaccuccaccucccggg

SEQ ID NO: 4157670 - RNA, 58 nt, Human
uccagggacagcgcuggagcuagaggaaccuccagagccuuccugccgcugcccuggg

SEQ ID NO: 4157671 - RNA, 71 nt, Human
uccagggauguccuguagcacuaaccuagguaguuuuauuauuuucacaggcaauacaaggcaucucugga

SEQ ID NO: 4157672 - RNA, 92 nt, Human
uccagggcagaggcgagggcaggguaggucgcggccccaguggaaacaaggccugagggacugcauacccagcuuugaaggucugcccugga

SEQ ID NO: 4157673 - RNA, 64 nt, Human
uccagggccgcccgccugacgagcgaccggggcucuccugugacguuccugcuggcgaccugga

SEQ ID NO: 4157674 - RNA, 55 nt, Human
uccagggcuggguuggcucagcucuaccucguguuaucucucauccuccccugga

SEQ ID NO: 4157675 - RNA, 55 nt, Human
uccaggggagugcuacgcacagcaggaggguggcugggcagugcaaagccccgga

SEQ ID NO: 4157676 - RNA, 63 nt, Human
uccagggucccaggagcugcuuucagaccagaaguuuccaugagagggcuggacccaaaggga

SEQ ID NO: 4157677 - RNA, 56 nt, Human
uccagguaaucucauccagaaaucagugaauaaugguuguggaugugggaucugga

SEQ ID NO: 4157678 - RNA, 55 nt, Human
uccagguauguuugggguccuggaaagauugcaggguucuggaauauaaugugga

SEQ ID NO: 4157679 - RNA, 78 nt, Human
uccaggucccgggagcuuggugucccagaaguacuaacucucaguaccuugggagacgccaggcccucuagcccugga

SEQ ID NO: 4157680 - RNA, 56 nt, Human
uccaguaaaugugauuuuucuuguaaguaauuuccuuaugggaacauugaacugga

SEQ ID NO: 4157681 - RNA, 70 nt, Human
uccaguacaccucacuucccuuuguaagugaaagugaauaugaaaaugcaaagggaugaaguguauuggg

SEQ ID NO: 4157682 - RNA, 81 nt, Human
uccaguagucuaucagugcuaagagagggccugcaccccaugaugggguccccgaggccagcucuaagcccuaccccugga

SEQ ID NO: 4157683 - RNA, 59 nt, Human
uccaguaugacugauguccuuccaaaaaggggaaauuuggacaagacagcaugcaagga

SEQ ID NO: 4157684 - RNA, 64 nt, Human
uccagucaagcuugagaauuucagcagcucuugcuuuugguguagauuuucauuuugacugaga

SEQ ID NO: 4157685 - RNA, 84 nt, Human
uccagugagaguacaguugaaacaagucaacuuguuuagaguacaguuaguacaguugacuuguuucaacuguacucuccugga

SEQ ID NO: 4157686 - RNA, 55 nt, Human
uccagugucuacaggcucuggagagccagacucuucaaacacuguuggcacuggg

SEQ ID NO: 4157687 - RNA, 63 nt, Human
uccaguugccugucucugauuaugguuugguuucuagaagguucuaaucagagacgggcagga

SEQ ID NO: 4157688 - RNA, 86 nt, Human
uccaguuggagccuuuuccacccuugaugggcugcucauuucuuagugguugaguguauaugaagguuguaauuauucccacugga

SEQ ID NO: 4157689 - RNA, 65 nt, Human
uccaguuugcacuguauaauagagacuacagaaaagacauguuuuguuuacaguuagaaucugga

SEQ ID NO: 4157690 - RNA, 71 nt, Human
uccccuuuguacaccuaccuaauacagggcauguaugcccuguauuagccaggugcacaaggaacaaugga

SEQ ID NO: 4157691 - RNA, 124 nt, Human
ucccgaccucaggugauuugcccuccucaaccucccaaagugcuaggauuacaggcgugagccaccacgccuggcaauuuuuuguauuuuuaguagagacgggguucugccauguuggccggga

SEQ ID NO: 4157692 - RNA, 105 nt, Human
ucccgagaacuggcccauggucacacaguggaaaugugggaggggaacuugccucgcuccaagccgagugcuccccacucaccacuggccaaagccuccuuguga

SEQ ID NO: 4157693 - RNA, 127 nt, Human
ucccgccguguccggggcaacuacaccgaaggccgagcggcggcuucacgguaccggccgggcaccgccggaggggcccaagccggagcugggagagccgcggcauccuggagcccggcgggcggga

SEQ ID NO: 4157694 - RNA, 65 nt, Human
ucccgcgccgucccucuacggugugacguacgcgucagggccacgcggaggugacgggaacggga

SEQ ID NO: 4157695 - RNA, 74 nt, Human
ucccggaagcccaggcagcgcccgaguccgcagcugccgucggagcugggacgccgcugccuccagcucuggga

SEQ ID NO: 4157696 - RNA, 56 nt, Human
ucccgggagacagccuucccaagaggcagcccuccugggagaccgccuuccuggga

SEQ ID NO: 4157697 - RNA, 66 nt, Human
ucccgugcuugcugguaggcuuguguuugcaguuagcuggcagacacuucccacugcagcgcgggg

SEQ ID NO: 4157698 - RNA, 99 nt, Human
ucccuaaaguaaauaguuggcauaagguuaauuuaguagaguccagauauguguacaggcaccuuaucagcugcuacauuggccucuuuucaacaggga

SEQ ID NO: 4157699 - RNA, 80 nt, Human
ucccuaauagcauccuaaaacauacuugccuuugccaacaagcaucuggaagaggauaguuuagaauguuauuuuaggga

SEQ ID NO: 4157700 - RNA, 69 nt, Human
ucccuaaucucagugauuuaauaccacaaaaguuucuuucucagguacaauccacuguggguuaggugg

SEQ ID NO: 4157701 - RNA, 58 nt, Human
ucccuaggaggcggcaucgucccugcuuuucuagucucggccaaauuccuccuaggga

SEQ ID NO: 4157702 - RNA, 67 nt, Human
ucccucaaauccuauuuuguugccacagauaccacugaugccuuaggucacaaaggaucaugaggga

SEQ ID NO: 4157703 - RNA, 57 nt, Human
ucccucaaugugggucaagaccagcaacugcaacagguucaugucagcauuaaggga

SEQ ID NO: 4157704 - RNA, 60 nt, Human
ucccucaggagaugucagcuggagguuuacucuuccuuccuccugacacagccugaguga

SEQ ID NO: 4157705 - RNA, 59 nt, Human
ucccucaggugguucuuguuucaauuaaaguccuuuugggaaacaaucuauccggggga

SEQ ID NO: 4157706 - RNA, 67 nt, Human
ucccuccacaccugcugguaccuguaaaaugccaaauggaucugccuugucaggugaugggacagga

SEQ ID NO: 4157707 - RNA, 72 nt, Human
ucccucccucugaggcuuugagccugggguugucauuaacagaagagggagcgaggacuucaggggaacgga

SEQ ID NO: 4157708 - RNA, 69 nt, Human
ucccuccucaggcagaaacaccuaacagcuuggauggcuggcagugggcuccguugccuggggcaggga

SEQ ID NO: 4157709 - RNA, 55 nt, Human
ucccuccugagcauccccagcugcuccacaucagugccagggagaucaggacgga

SEQ ID NO: 4157710 - RNA, 58 nt, Human
ucccuccugcuugcguucugagaacacaguuauuucaggacauguaaauggagaggga

SEQ ID NO: 4157711 - RNA, 74 nt, Human
ucccuccuuuaagagauauggcucucuaauacuuugccuguuguuuaagauacagaccucuuauuaaggaggga

SEQ ID NO: 4157712 - RNA, 67 nt, Human
ucccucuggccugcccgugucugugauugccagcauccugguggggcaauuucaugggaagauggga

SEQ ID NO: 4157713 - RNA, 97 nt, Human
ucccucuucccacacuguggcaaccugugcccaaguccuuuuucucaccugauuggguguccugguuuccauagcucuguguauguggggagaggga

SEQ ID NO: 4157714 - RNA, 56 nt, Human
ucccucuuuuacuugucuuuccuuaucuuugaggauucaguuauucagagaaggga

SEQ ID NO: 4157715 - RNA, 77 nt, Human
ucccugagcugucaagguacagugaaccuggggcuucccgcucccgcugugaggcugcacuaugcauggcucugggg

SEQ ID NO: 4157716 - RNA, 58 nt, Human
ucccugagggcagcucaaguccucacccccaggacccaagacacguguccucagcggg

SEQ ID NO: 4157717 - RNA, 86 nt, Human
ucccugauccuaucagcuaugacauggacagaggccaucauucucauagcuauugaggagugaugguuuccagucacugacaggga

SEQ ID NO: 4157718 - RNA, 79 nt, Human
ucccugcacagaguucaaaucuguaucaauuuguacucugcuuaucugaguacaaauugauacagguuuucugugggga

SEQ ID NO: 4157719 - RNA, 68 nt, Human
ucccugccuccuggcugauggguaggcagcacaugccagcccagagaaggggcccguggaggcaggga

SEQ ID NO: 4157720 - RNA, 84 nt, Human
ucccugcucuuuuaaacucugucuuguuacauggggcuugacaguuuggaagcuacauuaagcagauuuacuagccaguaggga

SEQ ID NO: 4157721 - RNA, 69 nt, Human
ucccuggcagauaaccugcugugcccugcuuggggguagagaggagggugcccagguaucugccacuga

SEQ ID NO: 4157722 - RNA, 87 nt, Human
ucccuggcaggccaggcgucgggugcuggugcucgcuccucuggggccagccuggggaggcagcauggcagcagugccugucaggga

SEQ ID NO: 4157723 - RNA, 65 nt, Human
ucccuggcuucugggauguguugacagaaacgaaauugcaaccugacccagccagcccuugggga

SEQ ID NO: 4157724 - RNA, 113 nt, Human
ucccugggacaguaugguuaaccccaccauugcaggugaugauguagugucgguuauucauuucuuacgauacagcauguccuuagcaaggcuggaacuggaggugucaggga

SEQ ID NO: 4157725 - RNA, 57 nt, Human
ucccugggccuaucuuagcucccaggucaaacuuagaguugcagcaggccacaggga

SEQ ID NO: 4157726 - RNA, 98 nt, Human
ucccugggcucccagccucugggcucacccaacccugacacccucuaugaaguuucaggacuuggggcagagcaacagaggcucauugagccaaugga

SEQ ID NO: 4157727 - RNA, 83 nt, Human
ucccuggggacaggcuggaaguuuccuuccuggucaggugacagccuggcuccagguugaacuuugggcccuauccacaggga

SEQ ID NO: 4157728 - RNA, 56 nt, Human
ucccugugacaagucugaguucaauuuuaccuaauuuuaagacuuguaacaaggga

SEQ ID NO: 4157729 - RNA, 57 nt, Human
ucccuguggauuucaguuuguguccugugucugaggacagcggacugaauacaguga

SEQ ID NO: 4157730 - RNA, 92 nt, Human
ucccuuaucaguagccuuguuagcccuaccacugcuaacaaguuaaacauuucagugacauuaguagggcaacaugggcacuaggaaaugga

SEQ ID NO: 4157731 - RNA, 78 nt, Human
ucccuucacucaaccagccuugaggguucguuaacucacagcagugugaccagcccauagagaggcgaggagaaggga

SEQ ID NO: 4157732 - RNA, 65 nt, Human
ucccuucaggggcacagugugcuuccuuguggaggaggaaccagcagacaggcccaguggaggga

SEQ ID NO: 4157733 - RNA, 78 nt, Human
ucccuuccuccuuucacacuucaguaugauauuauaauugucacuagcaucauuuggggaauuguggacaaguaggga

SEQ ID NO: 4157734 - RNA, 69 nt, Human
ucccuucuagguugcugagggaccggcuccugucacauuaugagcuguuucuuuggcaaacugauugga

SEQ ID NO: 4157735 - RNA, 79 nt, Human
ucccuucucuuuaaucaggcaaagcauaauagauauccaugucuuauuaugaagacagucugcauuuagaaagugggga

SEQ ID NO: 4157736 - RNA, 83 nt, Human
ucccuucuugggucaagcagacaccagugguagcccaauuucaaacugggaucugcuagggucuguuuuccagguguuaggga

SEQ ID NO: 4157737 - RNA, 71 nt, Human
ucccuugaaggccuaagcagaacaaaaagguggagugagagaaaauuuacucucugugucuuuaagcugga

SEQ ID NO: 4157738 - RNA, 123 nt, Human
ucccuugguugcauucuuagggaacaucuucagugugcacaugguagcagucccucacccacauuccuagggaaugucuucaguguauacaugguggcaguucuuuggcugcaugcuuaggga

SEQ ID NO: 4157739 - RNA, 55 nt, Human
ucccuuuaggcaauugcauuaaguagguuggcuaagugaaauugcaucagaggga

SEQ ID NO: 4157740 - RNA, 66 nt, Human
ucccuuuuaggauaaaaauggaguugcuuucucuguuaccagcaacuucuuggcuuccuaauggga

SEQ ID NO: 4157741 - RNA, 75 nt, Human
ucccuuuucaaagguucuggugaaggaucugaaguguauggccacaccagucccagaagagccugggagaaggga

SEQ ID NO: 4157742 - RNA, 74 nt, Human
uccgaagcccaguuucacacugagacucucgagcauaugagauuaugccuguuuccugugggaacucggcugga

SEQ ID NO: 4157743 - RNA, 56 nt, Human
uccgccaggacugagggcccaugugcucucuggagccuccccucacuccugccggg

SEQ ID NO: 4157744 - RNA, 78 nt, Human
uccgcgccgacuucuccgacaaccgacgccggggcuucgaggagcagagguaccggcgaccgcugucggaggcgcgga

SEQ ID NO: 4157745 - RNA, 71 nt, Human
uccggacuguccaagggccuccuggggagccugggaggccaggcucaccuggagccccuggugaacaagga

SEQ ID NO: 4157746 - RNA, 66 nt, Human
uccggauggcuguaaaaggugggaaacaggugugccccacauuccuacuccugcagcucagcugga

SEQ ID NO: 4157747 - RNA, 68 nt, Human
uccgggguccucuuguagcggccacguugaucugcgauacgcguguuugcccagugaguggccccgga

SEQ ID NO: 4157748 - RNA, 67 nt, Human
uccgguauuucuagaaaaugcagauuccugugaccugcccgcgaaaauuaugccuaggaagucugga

SEQ ID NO: 4157749 - RNA, 70 nt, Human
uccggugccugguuuggggaauguucaugggauauguuccaaaggacuuacggaccuaucagguacugga

SEQ ID NO: 4157750 - RNA, 79 nt, Human
uccacuuuguccacauaggcauagucaacccgugagccccucugggagacagaaugacagugcaugugacaaaggagga

SEQ ID NO: 4157751 - RNA, 59 nt, Human
uccagaccauggauggcugcaaucgggcagcaagcagcauugcagccucaaugggagga

SEQ ID NO: 4157752 - RNA, 57 nt, Human
uccagacccaugacccuggggacuguugucacacaagggucugguggugggguuggg

SEQ ID NO: 4157753 - RNA, 91 nt, Human
uccagacuccauacuaucagccacuugugaugcuggggaaguuccucuacacaaguuccccuggugccacgaucugcuucacgagucuggg

SEQ ID NO: 4157754 - RNA, 58 nt, Human
uccagacuggggccaugucugccaagagggucaucagggggcaugaaccugucaugga

SEQ ID NO: 4157755 - RNA, 76 nt, Human
uccagagaccuggcugacuuccuuuccucugcacuaaccugcugagggaacuugggcaagucuucgccucuuugga

SEQ ID NO: 4157756 - RNA, 56 nt, Human
uccagagagggcgccaccuggagcccaaggcgguucaaaugcgcagccccuuuggg

SEQ ID NO: 4157757 - RNA, 57 nt, Human
uccagagcaaaguuugcuaacagaguccacugcuguucaccaagucuuuguguugga

SEQ ID NO: 4157758 - RNA, 76 nt, Human
uccagagcauaagagaaagcugggggcccuggucuagggcucuccuccagaaucagcucccagcuuccucucugga

SEQ ID NO: 4157759 - RNA, 120 nt, Human
uccagagccuguggagcucacuuuagcaggcacacaauaaauguuugcugaugagucauucauuuauucaucuaauaaacauuuacugaggccuacuaaugugccaggcugggcucugga

SEQ ID NO: 4157760 - RNA, 59 nt, Human
uccagauguucccccaaagcugcuauggaucaguguccaggcaagggaggagcauggga

SEQ ID NO: 4157761 - RNA, 68 nt, Human
uccagcaagaacauucgaacuauuuucucaaaaauugagaguucacagaauguuuugcuuugcaagga

SEQ ID NO: 4157762 - RNA, 95 nt, Human
uccagcaagcgcggcugaccuuucucugggugcuuggccggaauccaagcccauucuuccgagcaccucagaggggggucagggccucagcaggg

SEQ ID NO: 4157763 - RNA, 71 nt, Human
uccagcaagcuauguucaaugugucccuguuugaaagggaacacaucuuagacugaaauaugcuugcugga

SEQ ID NO: 4157764 - RNA, 86 nt, Human
uccagcaggcucuccuggcucagaaaccucuggugucucgagaccuuaguguucaggccuagguuucagagccuuagucuguucga

SEQ ID NO: 4157765 - RNA, 55 nt, Human
uaggucuccuggccuagagauugccaaacugcagcauagucaccaaggaggccug

SEQ ID NO: 4157766 - RNA, 60 nt, Human
uaggucugauaggaguuuaacuuugcacaauuguuuggaaaaacugucugucaguaucua

SEQ ID NO: 4157767 - RNA, 69 nt, Human
uaggugauuuucuccuuacgauuugauuuuguuaaaagguuauugacaagaaucaugagcaaucaucua

SEQ ID NO: 4157768 - RNA, 56 nt, Human
uaggugccuggacgcaaauggagccuauagcuguguacacuuggucaagguacuua

SEQ ID NO: 4157769 - RNA, 57 nt, Human
uaggugcugcccacgccugggucuuugcguuuuuaagggaaaggcugcugcuaccug

SEQ ID NO: 4157770 - RNA, 67 nt, Human
uaggugugacauuucaccaagcucgugacucaugucauugucaccaagcuuuucuguuuuauaucua

SEQ ID NO: 4157771 - RNA, 71 nt, Human
uagguguggugguuaauacugugugucaacgugacuggauugaaggauacaaaguauuaauccuggaugug

SEQ ID NO: 4157772 - RNA, 78 nt, Human
uagguguuuaggaguuuagcagaaacuuguuugaugaauuauuuaaacaugagcauuucuguuuaauucuguaaucua

SEQ ID NO: 4157773 - RNA, 78 nt, Human
uagguuaguguaaaaguaauugugguuuuugccauugaaaguaauggcaaaaaccccaauuauuuuugcaccaaccua

SEQ ID NO: 4157774 - RNA, 95 nt, Human
uagguuccauuuuuuuucuacauuauauugggacuucaggacuuuuguagcuacuuaggaaguguccugucagugcuaauagaggguguuaccua

SEQ ID NO: 4157775 - RNA, 55 nt, Human
uagguugaguuagguuuugguuugcuuacaaaggcacuggagccaucucagccua

SEQ ID NO: 4157776 - RNA, 78 nt, Human
uagguuggcacaaaaguaauugugguuuuggccauuacuuugaauggcaaaaauugcaauuacuuuugcaucaaucua

SEQ ID NO: 4157777 - RNA, 78 nt, Human
uagguuggugcaaaaauaauugggguuuuugccauuacuuucaauggcaaaaaccacaauuacuuuuacacuaaccua

SEQ ID NO: 4157778 - RNA, 77 nt, Human
uagguuggugcaaaaguaauugcaguuuuggcauaucaaguaacagcaaaaacugcaauuacuuuugcagcaaccua

SEQ ID NO: 4157779 - RNA, 78 nt, Human
uagguuggugcaaaaguaauugcaguuuuugccauugaaaacaauagcaaaaacugcaguuacuuuugcaccaauuua

SEQ ID NO: 4157780 - RNA, 79 nt, Human
uagguuggugcaaaaguaauuguguuuuuuugucauuacuuuuaaaggcaaaaacagcaaugacuuuuucaccaaccua

SEQ ID NO: 4157781 - RNA, 97 nt, Human
uagguuuggugacaaguucuggaguacaggaaucuucccaagcacuguuuccucuuuggcaaaauucucuuguacuugacuucugguuccauuccua

SEQ ID NO: 4157782 - RNA, 60 nt, Human
uagguuugugcucagaggagggacugcacccaaagcagggccuccacugucacugaccug

SEQ ID NO: 4157783 - RNA, 93 nt, Human
uagguuuuauucaguauaggucagauacagguuuuuguuagaugauagguuauuuggggauccuugugucugggguaacugauguagaacuua

SEQ ID NO: 4157784 - RNA, 88 nt, Human
uaguaaaaugggcuggguaauuccagcacucuggaacuccaaagugcuuuggaauuccaaagugcuggaauuacauggcucacaucug

SEQ ID NO: 4157785 - RNA, 62 nt, Human
uaguaaaucucagaaaaagaucacccauaagcauagcacagggguauucugagguuugacua

SEQ ID NO: 4157786 - RNA, 69 nt, Human
uaguaacugggagagucagaauuggcacccagauugaucugaccccaaacccuguauucuucaauauug

SEQ ID NO: 4157787 - RNA, 80 nt, Human
uaguaaguucucaaaaaauguuaucuggugcuguucuaugauguaucaagauuauggcagauaacaauuugaccuugcua

SEQ ID NO: 4157788 - RNA, 119 nt, Human
uaguaauauugccuauucuugugucuuaauucccacuagacucuuacuaguguucucuuuauguauggacauuucaggagcaguuucaguggcuaaagaugcaguuugcuguaaaacua

SEQ ID NO: 4157789 - RNA, 79 nt, Human
uaguaauccuaucaagggacaagugucuugacucagcccccaucccugauuccuaggcacucuucuccuggggucucug

SEQ ID NO: 4157790 - RNA, 71 nt, Human
uaguaaucucuaguaugucugucuucuagucuuccucuaguauauuagagagagcauauuacugguuauua

SEQ ID NO: 4157791 - RNA, 82 nt, Human
uaguacaacaugauuuuacucucuggucuccuacacuuucauuuugagaugagaaaaggagggugaaaccauguugaugcug

SEQ ID NO: 4157792 - RNA, 60 nt, Human
uaguaccuuucuguaugcuuagcugggacuacuuuaccguuuggcagcuucaggguacua

SEQ ID NO: 4157793 - RNA, 59 nt, Human
uaguacuuacaaaauagguugcuguaggaauacacagagacaauauuuguaaagugcug

SEQ ID NO: 4157794 - RNA, 58 nt, Human
uaguagaaaagacuuggagaaauagauuuguaaacuauuggcuuuaaguuuuuugcua

SEQ ID NO: 4157795 - RNA, 67 nt, Human
uaguagacggauggugccaaaacauuaccaggugcaaacugaacacuaggaggagccgucccuacua

SEQ ID NO: 4157796 - RNA, 95 nt, Human
uaguaggaaguauuuuagguuugguuugacaagacugauaauaauccaagugacaaaaggaugauuagucucagaucuaccuucuucagugacua

SEQ ID NO: 4157797 - RNA, 68 nt, Human
uaguaguuaagagaagaguaucuagaacaaggaugccuagguucagauucuuucucuuucacauacua

SEQ ID NO: 4157798 - RNA, 57 nt, Human
uaguaguuaguguuuguuuuuguuauuuuuuagcauuuauuacaaauacaacugcug

SEQ ID NO: 4157799 - RNA, 65 nt, Human
uaguauaaguacaggugcggguaaccucagauaaaucaagguguuaugcagcugucucuauauua

SEQ ID NO: 4157800 - RNA, 69 nt, Human
uaguaucuuuuuguuggauuucaauuggaguuauauugacuauauagauugauuugaacaaagauauua

SEQ ID NO: 4157801 - RNA, 70 nt, Human
uaguauguagauauucauuuuuugcuuuauauuuaaauauauuauuaaagugaaauggaugcugcuacug

SEQ ID NO: 4157802 - RNA, 76 nt, Human
uagucaagcuccaacugagcuuugcuuugcucuauguuuucccaaagcaaagcaaggcucaguuugaacuuggcua

SEQ ID NO: 4157803 - RNA, 68 nt, Human
uagucacaagaaauaagcugccuuucucuaugaaucgaugauugggagguuuuuugcuuggagggcua

SEQ ID NO: 4157804 - RNA, 97 nt, Human
uagucaccugagaacuuguuagaaauguagacccucagacccuaccccaaaacuagugaaucagaaucugcauuuuuacaagauccccaggugauug

SEQ ID NO: 4157805 - RNA, 55 nt, Human
uagucacuuuuuuaccaugugccagacauauuaggcauuggggagacaguugcua

SEQ ID NO: 4157806 - RNA, 63 nt, Human
uaguccagguuuccaucuccacauucugcaaccacuugcagauagacugaagccaugugacua

SEQ ID NO: 4157807 - RNA, 74 nt, Human
uagucccugcucugcaugccacaugagugaccuagaaguagguagcgguuaugucugcagggaguucuggacua

SEQ ID NO: 4157808 - RNA, 65 nt, Human
uaguccucugcuuucaagcugguacucuuuaauaagacaauucacagcugaggcaccugagguua

SEQ ID NO: 4157809 - RNA, 77 nt, Human
uagucucucaaagugcucuagaaauugucagugguuuacaugaaauggccaucgguguccagagcacccugaagcug

SEQ ID NO: 4157810 - RNA, 64 nt, Human
uagucucugugguccugaggaaggugauuugguuucauccucacauggugagccacacaggcug

SEQ ID NO: 4157811 - RNA, 86 nt, Human
uagucuuuccauugcugacuauacauuuagcauuuguugaaaguaacaacaaaucuagagaacuguggggcagccuggagagacug

SEQ ID NO: 4157812 - RNA, 60 nt, Human
uagugacauuuuuacuuccuauuuguuuagcuuuuaugaaauguggaagugaggacacug

SEQ ID NO: 4157813 - RNA, 119 nt, Human
uagugaggaucagcacugagaucuaaauccacaugguccagguggaaggucugugcucugggccacuauggcugcugccuuccccugcucccaugggguggugcugggcuaccuggcua

SEQ ID NO: 4157814 - RNA, 61 nt, Human
uagugagugucuucaccucucagcucugucuugaaugcuuccugggugcaggcacugacug

SEQ ID NO: 4157815 - RNA, 92 nt, Human
uagugauacugugauuagucaaagguguuaguaauaucccuuuauccaacauauuauuuccauuaucaugacaaauuaaaauguguucauua

SEQ ID NO: 4157816 - RNA, 68 nt, Human
uccgcggacuggcacagaugcuguuucucaccuccucccacuaacagcucuguugccagaucugcuga

SEQ ID NO: 4157817 - RNA, 75 nt, Human
uccggagccaggucuaggagucugaaaguaucuccaaggaacucucaggauuucucagaaaacaacagcuccaga

SEQ ID NO: 4157818 - RNA, 57 nt, Human
uccggaucaucauaccuuggucauuacugucagacaaaguguaugaacagaugcggg

SEQ ID NO: 4157819 - RNA, 58 nt, Human
uccggcugcgacuguacagaauugccccugugaaaacacugcagucauucgugccgga

SEQ ID NO: 4157820 - RNA, 91 nt, Human
uccgggacauccuauguggauccuuccuuuacucaucacucaccugcagugacccagaguaacagauggauucucuaagggaaguuuugga

SEQ ID NO: 4157821 - RNA, 61 nt, Human
uccggguuuuacacucacaucauaaaaaucugucuugaacuugucugugcugagcaccggg

SEQ ID NO: 4157822 - RNA, 70 nt, Human
uccggugccugguuuggggaauguucgugggauauguuccaaaggacugacagaccuaucagguacugga

SEQ ID NO: 4157823 - RNA, 70 nt, Human
uccggugccugguuuggggaauguucgugggauauguuccaaaggacugauggaccuaucagguacugga

SEQ ID NO: 4157824 - RNA, 67 nt, Human
uccgguucuccugggcccuccggaucagguaggggauuaccuccuccaaggagccauagggaaugga

SEQ ID NO: 4157825 - RNA, 86 nt, Human
uccguacuccuggcaggauggccccggggcugugcuccaggacccacgucccgaugccagccugaggccgugccugcuccuccgga

SEQ ID NO: 4157826 - RNA, 112 nt, Human
uccguaguugaagaucuugaaaccugcuagaagcaaaugucugauuacauaagaagaaaucagauucuuaauuuaugggauuuaagauuuauauuuaugagucuuuuaugga

SEQ ID NO: 4157827 - RNA, 81 nt, Human
uccgucucuaccuuaaaagaacguucucgagggagucaggggaggugauggacucagaaguguucuuuuauuuuagauggg

SEQ ID NO: 4157828 - RNA, 59 nt, Human
uccgugccaugggcagccucucagggaacccuuugcugaugcccuuguccaggcaagga

SEQ ID NO: 4157829 - RNA, 61 nt, Human
uccguggggauggagguggacaggaaauagcauuccugucuaucaagacaucuucaauuga

SEQ ID NO: 4157830 - RNA, 95 nt, Human
uccguguucuuuuccucaucuggcuggcuagaauggaaaugucauccaagauguugaaacuggcagagucaugguauaggaagagaaagcaugga

SEQ ID NO: 4157831 - RNA, 87 nt, Human
uccguuggcauauacucacacugauaggcuugacaggcagauaaaccuguauuugaaggucagcaggauuaguuguguggccuugga

SEQ ID NO: 4157832 - RNA, 55 nt, Human
uccuaaaauaccuauuauuggcuuuuuuuccagccaaaaggauaggaaauuaggg

SEQ ID NO: 4157833 - RNA, 56 nt, Human
uccuaaauccugaaaaaaagguuugaugcacaaucuuuacagcagcaggauuugga

SEQ ID NO: 4157834 - RNA, 89 nt, Human
uccuaacagaagcuuggcuguguccacauuuuuauucaucaaagcaggggucuccagugaaguguggacgucaccaaugggcuuuagga

SEQ ID NO: 4157835 - RNA, 63 nt, Human
uccuacaaaauugcugugaggugguaguacaaggacuguuauucccauuucauaggcaaagga

SEQ ID NO: 4157836 - RNA, 99 nt, Human
uccuagacuauuuggggaagauaucagugaaaaguauguguaugaagaagcagauaagcauuucacagguguguuugagagugguuuuaugagaaagga

SEQ ID NO: 4157837 - RNA, 79 nt, Human
uccuagagcccagugggccaguagcuacucgcaagccuguuuuacuaauucuugcugcuacucaggccucggcucagga

SEQ ID NO: 4157838 - RNA, 56 nt, Human
uccuagccuggugagaaacugucacucugugccucaguuuccucaucugcauagga

SEQ ID NO: 4157839 - RNA, 59 nt, Human
uccuaggaauacugccugaaaugacagugcauuugcuguucagguaaaauucuuuagga

SEQ ID NO: 4157840 - RNA, 56 nt, Human
uccuaggccccaccucccaugauucugacucggggagucugagguggggccuagga

SEQ ID NO: 4157841 - RNA, 55 nt, Human
uccugagcuacaguaguaugaucuuccauagcacgucauaacugucuguuuagga

SEQ ID NO: 4157842 - RNA, 55 nt, Human
uccugagguauaugcuuugcaguaauuuuaaugcagguuuauuucaacuucagga

SEQ ID NO: 4157843 - RNA, 87 nt, Human
uccugagugccgggcccugccccguggcucugauggauucucccagcguguccucaccacucuuuggagcaggugccacauucagga

SEQ ID NO: 4157844 - RNA, 55 nt, Human
uccugagugguuguuuucuucccacugaccaaagcuggagagggaucccucagga

SEQ ID NO: 4157845 - RNA, 75 nt, Human
uccugauggaggggucaucuuuguggucacaccccagacacuagacagagagguaggccaguucuuuagccagga

SEQ ID NO: 4157846 - RNA, 79 nt, Human
uccugauggcccugagucuccuggggaggugaaugacaggauuucugcugcgacccaggaguuagcggugagguuagga

SEQ ID NO: 4157847 - RNA, 65 nt, Human
uccugauggugguggggugggucugagcaggaaggggccuggaauccaucccaucuucaccaggg

SEQ ID NO: 4157848 - RNA, 63 nt, Human
uccugauucuguuagcucucaggcuggccuugagaaggaaagagagagccagacagcauagga

SEQ ID NO: 4157849 - RNA, 57 nt, Human
uccugcagaucaaagccuuugaccuagggcagugcuuuucaaaggguggucccagga

SEQ ID NO: 4157850 - RNA, 57 nt, Human
uccugcagccaagggucaucgauaucgguugaggacuuuguccuguggcagcaguga

SEQ ID NO: 4157851 - RNA, 72 nt, Human
uccugcauggcuuacagaggcugcagaggcuguggggcaugcuggagaaauacucugugugucagugaagga

SEQ ID NO: 4157852 - RNA, 74 nt, Human
uccugccacugcacauauacuugcaugaugcauuagucauauaccauuccauagcauaugagcuuguggcaggg

SEQ ID NO: 4157853 - RNA, 67 nt, Human
uccugcccuagagaugacacaauccuggaucuacguaacuagcccauguuggucacuuugagcagga

SEQ ID NO: 4157854 - RNA, 66 nt, Human
uccugccugcuucugagccagaggaaagaggaagaugacacucuucucugcuccagagcagaggga

SEQ ID NO: 4157855 - RNA, 67 nt, Human
uccugccuguuagucuagcaguuagacugugugucugcuuccuccaguugacugaugguaaagaggg

SEQ ID NO: 4157856 - RNA, 70 nt, Human
uccugccuucagcuuccucugaggcuucugagucagcaccuggcugucagcagagagcaugaaggaaggg

SEQ ID NO: 4157857 - RNA, 82 nt, Human
uccugcucuggaugaggguggaaaggguguaccugguauuucccuagguccuugcuuuccaccuucuaaacauccagcagga

SEQ ID NO: 4157858 - RNA, 59 nt, Human
uccugcuggacucugaguacaaagcugcccuuugaaugggcugccucagggcugcugga

SEQ ID NO: 4157859 - RNA, 74 nt, Human
uccugcuggcuagagcucuccuuccucuguggauccuguggagcugaagagaaagggagcucuucccucuaggg

SEQ ID NO: 4157860 - RNA, 66 nt, Human
uccugcuuuguguggucccuccagggaugcagagucccuuucccugaccugacccauaagcaagga

SEQ ID NO: 4157861 - RNA, 56 nt, Human
uccuggcaaagcaaguuaugaacugccucugcaaaaugaccccuguucugccagga

SEQ ID NO: 4157862 - RNA, 78 nt, Human
uccuggcauuuucacauaucaacucuauccucucuguacaacuauggaggaaaauguuaauauggaaaauaacaugga

SEQ ID NO: 4157863 - RNA, 58 nt, Human
uccuggccugucuggaguagcuccuuacuagucuggccacagcuccugcaggucagga

SEQ ID NO: 4157864 - RNA, 76 nt, Human
uccuggcuccccuugcucccagacugaccagagguguguggcaucuggggcuguggggagcuggggugggccagga

SEQ ID NO: 4157865 - RNA, 57 nt, Human
uccugggaacaagaggaccagugagcuaaagcauugaaggacaucuuguuucuagga

SEQ ID NO: 4157866 - RNA, 79 nt, Human
uccugggacaggaaggcugguuccaucccuggugugacugcuuaccaccucagggacgggaucacuuggucucccagga

SEQ ID NO: 4157867 - RNA, 83 nt, Human
uccugggacucugccucaggcucuccuggcuagacacagagcagaagccagguaacucuacagccuaaggaagacccccagga

SEQ ID NO: 4157868 - RNA, 56 nt, Human
uccugggagcauggugccgugagcccagccuggcugcuggccgugagcucucggga

SEQ ID NO: 4157869 - RNA, 57 nt, Human
uccugggaguaaaagcugcccugaagagggaauuuauggcagccucauuucccagga

SEQ ID NO: 4157870 - RNA, 79 nt, Human
uccugggccucauugcuucaguuuguuggggauaauugcuguugcacgucccugccaaugauuggagcaagaaccagga

SEQ ID NO: 4157871 - RNA, 78 nt, Human
uccugggcuugggccccauaggagccaaagaccugggacccccagggcuuuggcccccugcugcagaccugcccaggg

SEQ ID NO: 4157872 - RNA, 58 nt, Human
uccuggggcuucaaugcuucggugggcucugcccgcugugggucagggggccccggga

SEQ ID NO: 4157873 - RNA, 77 nt, Human
uccugggugauuaggauuucaacagagggauuuuagagugauagaaacauucaguugcaguccaucacaccuagaga

SEQ ID NO: 4157874 - RNA, 80 nt, Human
uccuggucucuucaaauccuguguagggcuauagguaugucuauugacaguuagcacuaucuugggauuuggaaacagga

SEQ ID NO: 4157875 - RNA, 83 nt, Human
uccuggugagagguucuagaagccuuguucucacuaauaaaauggugaagccccagaaaagcuucuagucaauuucaccagga

SEQ ID NO: 4157876 - RNA, 79 nt, Human
uccuggugcugggaguucaugagacuuauucucaaaucuucagagaagaaaauuccgugaacaccugggaacaucagga

SEQ ID NO: 4157877 - RNA, 55 nt, Human
uccuggugguuugaaaacugaaauauuuauccucucagcagaaggaccacuaggg

SEQ ID NO: 4157878 - RNA, 55 nt, Human
uagugauucccuaucaacccugaaaauucucacaaaauuugcaaggggaucacua

SEQ ID NO: 4157879 - RNA, 95 nt, Human
uagugcaucucuucauucacuucuuucuuagcaaucuaugguuucuaacauggccauaccacugggaaaggacugaggaacaaggagauguuuua

SEQ ID NO: 4157880 - RNA, 130 nt, Human
uagugcauuggaaucaccuggagagcuuguuaaaugagccugcugggcuccacccucaacuguuuaugauucaaaaggcugagguagggccuaaaacauuacaaguucccaggugaaucugaugcugcug

SEQ ID NO: 4157881 - RNA, 55 nt, Human
uagugccaaagccuggugucauggcuaaacccugcacaccaaagcauugucacug

SEQ ID NO: 4157882 - RNA, 78 nt, Human
uagugccuauguuucauauauaguaacugaaauucauacucuucauggaauuucaaacuaugugucaggcaggugcua

SEQ ID NO: 4157883 - RNA, 71 nt, Human
uagugcuaugaaauggugguuuuccauuuacuguagaaaguauguagaaauaauuucaguuccugguauua

SEQ ID NO: 4157884 - RNA, 69 nt, Human
uagugcuuauauaugcacauaugcauauauauauauaaauauagcaauguguguguauaaauuguacua

SEQ ID NO: 4157885 - RNA, 65 nt, Human
uagugcuuuaggccugagugucaguucaaacaucuucgaugauaacuaaaugcuuagagcaacua

SEQ ID NO: 4157886 - RNA, 56 nt, Human
uagugcuuugugccuuuuuuaagcccuugacaagaguuugagaacaccaaguacug

SEQ ID NO: 4157887 - RNA, 86 nt, Human
uagugguaacaguggaugggcugcucucaggcuggggagcacacacuuuguucccuguguccugggggcaccucccugauaugcua

SEQ ID NO: 4157888 - RNA, 64 nt, Human
uagugguagaggggagcaugaucuagauuggccauccaguucucuuugucacccccucccacua

SEQ ID NO: 4157889 - RNA, 59 nt, Human
uaguggugagagcagaccuucuuuucucuuuuuugaaaacguucaggcuuucaccauua

SEQ ID NO: 4157890 - RNA, 62 nt, Human
uaguggugaggauggguuugguaaaagggucuucucccuuucuucauucaccuucaccccua

SEQ ID NO: 4157891 - RNA, 76 nt, Human
uagugguguccuuuuugaauagagaccuuauguuuugacguagucaaauccauucuguuuuaaaaguuuaucucua

SEQ ID NO: 4157892 - RNA, 119 nt, Human
uaguguauuuuaccaccauguauaaaaguauuuguguuuauauguaaaauggaguucaccucuagguucgggcacuuacaaaugguuuuguacccacaugaauuugugguggaacauua

SEQ ID NO: 4157893 - RNA, 55 nt, Human
uagugucaucguugcagcugaguccuuaaauucuccuaguggaaggaagacacua

SEQ ID NO: 4157894 - RNA, 59 nt, Human
uagugucugaaugcaccuguuuaagucagcuucuuguucucccagguauuuaggcauug

SEQ ID NO: 4157895 - RNA, 69 nt, Human
uagugugcugacuuuuauaugcauagcauauguaguauauuuauaugauacauuuagaaguacauauua

SEQ ID NO: 4157896 - RNA, 92 nt, Human
uagugugcuuaucuccaucaggauucaguaucuccagcuaucagacaagcuuggaagagcacaguccucauaggagagugcagcaagcauua

SEQ ID NO: 4157897 - RNA, 63 nt, Human
uagugugcuuuccugccaacgcagcaugacuucuugucaagucagcacuccaggaagccacua

SEQ ID NO: 4157898 - RNA, 62 nt, Human
uaguguguaugguaaugaugaaugcuggugggguauguguguguccuuaacuguauauacua

SEQ ID NO: 4157899 - RNA, 67 nt, Human
uaguuaagagcagaggcuguaggagcagacuauuaugacuugaauucuugccucuguugcuugccug

SEQ ID NO: 4157900 - RNA, 75 nt, Human
uaguuacagucacaauuuguaccuuuuucuccacuccaaacugagacuaagagggaaauuguuggcugcuaacug

SEQ ID NO: 4157901 - RNA, 99 nt, Human
uaguuagaguaucuugagggcaucuguuuugugaauugauauauauucucaauugaaaaagaaguagugugcuccagcggugaguuuguaaucuaauug

SEQ ID NO: 4157902 - RNA, 92 nt, Human
uaguuagccggaguguuggugauugggaugccggcugauaagagucgacucuaauuuuggcauuuuaaccuacauucugagcugucacacua

SEQ ID NO: 4157903 - RNA, 63 nt, Human
uaguuaggaauagcagcgacucuuccgcaagggcucagcguuguuuucuguuuugccugucug

SEQ ID NO: 4157904 - RNA, 74 nt, Human
uaguuagguacuaguauagaauauaccagugcauaaguuaguugacugguucauuagguauuaguggcuuucug

SEQ ID NO: 4157905 - RNA, 79 nt, Human
uaguuaguuuuucugagauggagucuuuuucugucacccaggcucuggagugcaguggcgccaucucagcucauagcua

SEQ ID NO: 4157906 - RNA, 59 nt, Human
uaguuaucuaaauauuauuugaguaaaauacucggucuaaaguaauauuuguguaacug

SEQ ID NO: 4157907 - RNA, 76 nt, Human
uaguuauuaugauuauguacuaaaaacucaguuuuugacuugaacuagagggaaauguauauaaccauagugacua

SEQ ID NO: 4157908 - RNA, 62 nt, Human
uaguucaccccucuuuauuuucccaauaaggaaauuaagacccagagagguuggcugaauug

SEQ ID NO: 4157909 - RNA, 86 nt, Human
uaguucagacccuccaagauugcuuagaagaugccuuucauccaggaaggcagcaagaauuccagguuaucuguggggcuaaauua

SEQ ID NO: 4157910 - RNA, 60 nt, Human
uaguucgaguauucuaaucuguggaaccucaagccacaguaauauugaugcucgucauua

SEQ ID NO: 4157911 - RNA, 57 nt, Human
uaguucuguuuauauuugguguccacguauauuaagaaauucaaauguacagaacua

SEQ ID NO: 4157912 - RNA, 65 nt, Human
uaguucuuggagggcguguuuggcuggacacauccaugcuccauaguuaaaccuuuagagaacua

SEQ ID NO: 4157913 - RNA, 105 nt, Human
uaguugaagacuucucuuugcuauaacuacuugaagaguucagcagaaaaauuuuacugaagaaucccugauccuccuuuaaguagcuguagagaauauucacua

SEQ ID NO: 4157914 - RNA, 92 nt, Human
uaguuuacaauaccauuagcaggaugaguacaagguaacuuaucuaggacuuguaauuaacguucuuguuagauauggucuuugugcaacua

SEQ ID NO: 4157915 - RNA, 77 nt, Human
uaguuuacugagaaugaugauuuccaauuucauccaugucccuacaaaggaaaugaacucaucauuuuuuauggcug

SEQ ID NO: 4157916 - RNA, 58 nt, Human
uaguuuagcacuaagaaaaacaagaguccggggacagguuguuggaggugcugaauua

SEQ ID NO: 4157917 - RNA, 80 nt, Human
uaguuuaugaaauauucuuugguaagaagaaauaaauuccaugccuuuuucuuuaccagugaaauguuauaugaaagcua

SEQ ID NO: 4157918 - RNA, 62 nt, Human
ucccagagacagagccuccucccaccagcagacgggagcuggaggcagggcuguccugagga

SEQ ID NO: 4157919 - RNA, 67 nt, Human
ucccagagcaggguuucucagccucggcacuacugacauuggggauggaugaaucuuugcugugggg

SEQ ID NO: 4157920 - RNA, 58 nt, Human
ucccagagcugauaagccuuuaucuguaaaauagaaagaacaggcuggcucacaggga

SEQ ID NO: 4157921 - RNA, 60 nt, Human
ucccagaguauuagcaauugcuaaugcagcaucaucugcaguuguuuuagugcuguggga

SEQ ID NO: 4157922 - RNA, 56 nt, Human
ucccagagucuucuccuguaauacaaaccacuguauguauaggcauccaucugggg

SEQ ID NO: 4157923 - RNA, 72 nt, Human
ucccagaucuuuguuucuccugucauuucugaucacucgagauuaaaaacagcaauggagaagccaggagga

SEQ ID NO: 4157924 - RNA, 55 nt, Human
ucccagcaccugaugaaguaggacugcaacuauccccacuucccagaugagggga

SEQ ID NO: 4157925 - RNA, 70 nt, Human
ucccagcagggccgaccagccuaccauacaggugccacugaggggcaaugguggguccuguucccuggga

SEQ ID NO: 4157926 - RNA, 79 nt, Human
ucccagcccaguccacccuuacuccccaacuaaagggaagauaguucuuucuccuggggccgugaugugaggccuggga

SEQ ID NO: 4157927 - RNA, 66 nt, Human
ucccagccuguggcagaggucuaauguuaacagaagcguuaaaaucuauacacgagguggguggga

SEQ ID NO: 4157928 - RNA, 57 nt, Human
ucccagccuuaucuccccuggcuccucaacaggaacccaguccuagugaagcuggga

SEQ ID NO: 4157929 - RNA, 86 nt, Human
ucccagcuugugagacguuaaucacucacuggacucugcuuuuuagaggcagaagugaaugugauaaaccauuugaauagcgaaga

SEQ ID NO: 4157930 - RNA, 87 nt, Human
ucccaggaucagguuuuuaacucugugguucaggauucuguuugcuaaggaccuggcauaagggcuugaguccagcuugcccuggga

SEQ ID NO: 4157931 - RNA, 85 nt, Human
ucccaggauucugcuggagggagcugauagugauacuugucccuucuguacauugcuucauguagccuucucagcaucccuagga

SEQ ID NO: 4157932 - RNA, 59 nt, Human
ucccaggccuaggcaugagggagaaguguaccugcaucuccuucccccuuggccuggga

SEQ ID NO: 4157933 - RNA, 80 nt, Human
ucccaggcuccaugcaaaggcuguuuggaagcuccauggauagaaagggccgagggcaggcugcaugggggaagcuggga

SEQ ID NO: 4157934 - RNA, 66 nt, Human
ucccagggacagcuagguggggcuugagguaguuauagcuucuagauuuguccccugucccuggga

SEQ ID NO: 4157935 - RNA, 55 nt, Human
ucccagggacccagccugauacccucauaucuggcacauagcagggucucugggg

SEQ ID NO: 4157936 - RNA, 55 nt, Human
ucccagggccgcaaacgaguuugggcggaagccagggcuuuggggcuuccuggga

SEQ ID NO: 4157937 - RNA, 108 nt, Human
ucccaggugcugcaggugaaugggccugugucacucuucgugggcacugaugucaggcaugggccuggaagaggacagagaaaguguguucugcaagcagccuuggga

SEQ ID NO: 4157938 - RNA, 74 nt, Human
ucccagugagaugaaacagguaacucaguuggaaaugcagaaaucacccgcuuucugugucaaucucacuggga

SEQ ID NO: 4157939 - RNA, 63 nt, Human
ucccagugggaagcagcacgcucccuaugaugguugguagugagaugcagugacccacugggg

SEQ ID NO: 4157940 - RNA, 82 nt, Human
ucccaguugaauuuguguaccuguggaugggagagucacuagagauuucucuuauugaugaaggugcuaaauugccucggga

SEQ ID NO: 4157941 - RNA, 61 nt, Human
ucccaguuuucuuucaucuaucagcaaugagaacacugcuucaggauggaagaggguggga

SEQ ID NO: 4157942 - RNA, 77 nt, Human
ucccaucagcuaaacuuagugaaauaaagggcaaaaaaaucccuguugauuucguucauaaguucagucuccuggga

SEQ ID NO: 4157943 - RNA, 89 nt, Human
ucccauccaauacuagaugguugggugugugaaacagacucugcguuuaccugcacagccagccauguggaugacgguuggaacuggga

SEQ ID NO: 4157944 - RNA, 81 nt, Human
uccucugugcaugaagcaggcagcuccuggcuguugauaaagugccguggacaccuucugcuucgugcagaugcacgauga

SEQ ID NO: 4157945 - RNA, 74 nt, Human
uccucuuagaucuuaauugagccuugaguauauuuaucucaugauguagcgaaugagaaucugaauacagagga

SEQ ID NO: 4157946 - RNA, 95 nt, Human
uccucuuauaaucagacuuucuggaagcuaaaaacacagcaguuugguuuuauugguucuucuacuugaaagugacauuucugagacauagagga

SEQ ID NO: 4157947 - RNA, 64 nt, Human
uccucuucaaaaggauuuccuuucucccuauuaaucaaggucagguaucuuuuguuggggagga

SEQ ID NO: 4157948 - RNA, 61 nt, Human
uccucuucaaaauagcucugaaaaauaugauuggaauuucuggagucuauuuugaaaagga

SEQ ID NO: 4157949 - RNA, 65 nt, Human
uccucuucucuagagccggaauccccuaggagcauuuccuuguuuuccuccucuggagaagaaga

SEQ ID NO: 4157950 - RNA, 107 nt, Human
uccucuucuguucuguuuacagugucuuugggcagcaauucuucagaaucaugaaaugaacugagcuuaauugcugauuuuccccaaaguuauggaggggaagagga

SEQ ID NO: 4157951 - RNA, 90 nt, Human
uccugaacuuagugggaauaucucuaguacuuccucacucacacuaaaacugccuuugugacaaaagagauauuauuuaccaaguuagga

SEQ ID NO: 4157952 - RNA, 85 nt, Human
uccugaagcccaaauaagauuugugcucugacagggugagcauuuacuuuaucagaaaacacauuagggugggcaugucucagga

SEQ ID NO: 4157953 - RNA, 108 nt, Human
uccugacacagaguaauuugucaggaccugcccuggcuugagaaaggugaagaagcugccucacugcucugaaaguacaggguagguacacugugagcuguggaaggg

SEQ ID NO: 4157954 - RNA, 80 nt, Human
uccugacacucaguuuccuuguuuaccuacuggaguauauacuaccuauuuuagauaggugauuaggaaaagccucauga

SEQ ID NO: 4157955 - RNA, 85 nt, Human
uccugagacaccaaaugcaauuuuuccagugcuacuguggugcuguaacaugggcaguguauuggaaggaauauguguauuagga

SEQ ID NO: 4157956 - RNA, 63 nt, Human
uccugagaggugugaggugcagggauacccaccucugccuugacggccgcgcaccccuuagga

SEQ ID NO: 4157957 - RNA, 63 nt, Human
uccugagagguuuauaacgcagaucagauaacaccagcuucuccugucuuuugccucuuuggg

SEQ ID NO: 4157958 - RNA, 84 nt, Human
uccugagauuguuugaagcacaggugaaacagucagguggauaauuucaccacugaacagcaccgugacugugacaauucagga

SEQ ID NO: 4157959 - RNA, 84 nt, Human
uccugagccacugugcuggguccuucuuuugaguuucugauuagucuuucgaaggaggcacucagacaugcaucuaugucaggg

SEQ ID NO: 4157960 - RNA, 63 nt, Human
uccugagcuucaaaacacuuugcuauaaauuuccuuugcuauagagaguucuugggcucagga

SEQ ID NO: 4157961 - RNA, 56 nt, Human
uccugagggacugguuccucgcugggaggaggaggauguagccagaaccucuggga

SEQ ID NO: 4157962 - RNA, 72 nt, Human
uccugagucacugggauuacaggcacgugcuaccacacccagcuaauuuuuguauuuuuaguagagacaggg

SEQ ID NO: 4157963 - RNA, 61 nt, Human
uccugagugucagauguccagggcagcauugcugauguuccccaggacucugaccucaggg

SEQ ID NO: 4157964 - RNA, 67 nt, Human
uccugauccccuucccaguaagccuuuggggcagcagguauugaggcugcuugggaagaggauagga

SEQ ID NO: 4157965 - RNA, 66 nt, Human
uccugaugcacuugccccuccucagaccggccugaugggcgucugugggacucaggagcgucaggg

SEQ ID NO: 4157966 - RNA, 78 nt, Human
uccugauguauaucauguuuccuaaacuagacuggaaacuuccccuggacggggaauaugacuuauuuuuuacagugg

SEQ ID NO: 4157967 - RNA, 60 nt, Human
uccugcagcauccgucgucuguaucauaugaugguccucgauaccaggauguugcagaga

SEQ ID NO: 4157968 - RNA, 58 nt, Human
uccugcagccugaaaaacaacagccuuaagcuguagguuaacauuucuaggugcaggg

SEQ ID NO: 4157969 - RNA, 61 nt, Human
uccugcaguuacaucccagccagggcccguggaggaggggcugggauggagacugcaguga

SEQ ID NO: 4157970 - RNA, 62 nt, Human
uccugcaugucacucugcugucccugaggugcacacacugggggugcuguggucaugcagga

SEQ ID NO: 4157971 - RNA, 66 nt, Human
uccugcauguuuucuggcaggcuuauaaccaugcaaagcaguuauaccuuccacaaaacagcuuga

SEQ ID NO: 4157972 - RNA, 90 nt, Human
uccugcauuguaugguuauaaauagcacccuagugagugcugucguccagucucucuugggugugguuugaaugaucucgggaugcauga

SEQ ID NO: 4157973 - RNA, 68 nt, Human
uccugccuccgagacucgaguguccucagcuccuccagcucugggcucacgagucuggacaugcagga

SEQ ID NO: 4157974 - RNA, 55 nt, Human
uccugccucuuuucuuauuccagauuucucacuuucuggggaauuagcuguagga

SEQ ID NO: 4157975 - RNA, 66 nt, Human
uccugccuguuccaagucagaggcucccuaauauucccgagugucugaaagggaugcugggcagga

SEQ ID NO: 4157976 - RNA, 56 nt, Human
uccugccuugccugggacaucaggagcugagggucuauauaggucaggacccagga

SEQ ID NO: 4157977 - RNA, 56 nt, Human
uccugcucugauggguucuccucugugcuuggugagaauucuccuucagggcagga

SEQ ID NO: 4157978 - RNA, 69 nt, Human
uccugcucuguuuuaugagccauauaaccuugugaugcaauuauggcuaacguacagacucaggcagga

SEQ ID NO: 4157979 - RNA, 67 nt, Human
uccugcugaagcuagguucaugaggucggaaauccccaccacauuugccuagacuuugggcacagga

SEQ ID NO: 4157980 - RNA, 111 nt, Human
uccugcuuccagccuuuccaugagggacacuggaugcugccauuggcucccugcauugccuuauuucagcaccuguggcucaugcucguggagcuggggcugguugugggg

SEQ ID NO: 4157981 - RNA, 57 nt, Human
uccugcuucuucgagcuucugguagccccagguauuccuuagcuuggagcagcauga

SEQ ID NO: 4157982 - RNA, 76 nt, Human
uccugcuuuuguuaauuccacuccagauguauauggucuaguagaacacugguguacaggagguaaaaggagagga

SEQ ID NO: 4157983 - RNA, 80 nt, Human
uccuggaaaguguuucugaugaaguuuauaugaacuuacuggcccaaauaucaaacugaauuaaacacuuguuccaagga

SEQ ID NO: 4157984 - RNA, 59 nt, Human
uccuggagccucauucaaacacaauaaacauucaguugacuuguuaugagacucuagga

SEQ ID NO: 4157985 - RNA, 89 nt, Human
uccuggaggccuuugugucugggacuuugagggagcugcaaggaagagggaacuugucagcccaaagccccaggcuagagagaccagga

SEQ ID NO: 4157986 - RNA, 58 nt, Human
uccuggagggcucacaggcggcacccgcagugcacguguugccacuggucuucaagga

SEQ ID NO: 4157987 - RNA, 84 nt, Human
uccuggauaucaaacaaacauuucagugcucuucaaucuuagauguuugugauuugauguagcuauuuccuuaacaagucagga

SEQ ID NO: 4157988 - RNA, 84 nt, Human
uccuggaugaaauuguuuugauacuuuaaaggauaaaccuuaaacugucuuuaaaaagguuacucagaauaacuuccucuugga

SEQ ID NO: 4157989 - RNA, 61 nt, Human
uccuggcaggcagugugggagcuggggcacauuccccacgcaucccuaugcccugcgggga

SEQ ID NO: 4157990 - RNA, 57 nt, Human
uccuggcccggccgggccugcucacaaaccgaaacgcaggcggcugcggcgccggga

SEQ ID NO: 4157991 - RNA, 64 nt, Human
uccugggacaccccaauaugaggucagggagaugacaaggaacuucauggguggaaugucagga

SEQ ID NO: 4157992 - RNA, 64 nt, Human
uccugggcuccaguuuccccuuggggcccugaagaaaggggcugggggucccuggugccuggga

SEQ ID NO: 4157993 - RNA, 90 nt, Human
uccuggggagcuuuaaaaacugcccugcucugguuuagucagucugggcugggucccaggugucuagaguuuuaguuuuguuucccagga

SEQ ID NO: 4157994 - RNA, 56 nt, Human
uccugggggcuccaacagguuguggguauucucauccugcugauggcccuccagga

SEQ ID NO: 4157995 - RNA, 107 nt, Human
uccuccucuuguuccaucucugugggcuuuugucagccuaggcauuuuucaaaaucacaugccacauccuucagaaagcuuuugggggugggaauaucagaggaggg

SEQ ID NO: 4157996 - RNA, 57 nt, Human
uccuccuuguauucuauuucacuucugcagacaagaagugugaagcccucaggagga

SEQ ID NO: 4157997 - RNA, 67 nt, Human
uccuccuuuggcagucagucuuggugcuuccauaaggagugugcuguagaagggcuugcguggggga

SEQ ID NO: 4157998 - RNA, 76 nt, Human
uccucggaauauugcuucauguacaguuauuggagaugaguaacuuacauucucuuaauuguaaugguuccuugga

SEQ ID NO: 4157999 - RNA, 70 nt, Human
uccucggccgcucugcugcucaguggcggccucugccuugccugcuggagcagggcucuucagccgagga

SEQ ID NO: 4158000 - RNA, 85 nt, Human
uccucgugggacccuccuggaaggugacugucuugaaugcuuuauucauggccaugguaccuuuuugaggagguuucguagagga

SEQ ID NO: 4158001 - RNA, 80 nt, Human
uccucuacgucuucguuggcagagauuuccaagaaaaguuuuuccagucuuugacuucugcccuggcgagggcguuugga

SEQ ID NO: 4158002 - RNA, 63 nt, Human
uccucucagcagccagauccagagcucuccuggggggcgaggguuggggguugcugcacugga

SEQ ID NO: 4158003 - RNA, 89 nt, Human
uccucucccccauccuuucuccagagguggcuagaguugaaaaaacauuugucucucagcugaucaucugggacugaggagaaagagga

SEQ ID NO: 4158004 - RNA, 55 nt, Human
uccucugaaauguguguucggcuuuacuaaaucugaacacauuuucuucaguaga

SEQ ID NO: 4158005 - RNA, 87 nt, Human
uccucugacuggaaugaucuuuccucuuguuugucugaaaaaaaauugguuucaacauucagcugaugggucauauucucaguagga

SEQ ID NO: 4158006 - RNA, 57 nt, Human
uccucugacuucugguugaguuggucaauggggagcaccagcaggagaucagaagga

SEQ ID NO: 4158007 - RNA, 64 nt, Human
uccucugagcauauugucuacauuucagaauaagcauaaugaauaaacaagguugcucugagga

SEQ ID NO: 4158008 - RNA, 56 nt, Human
uccucugagguggcuuccccgagccugcgggcagggcgugcagcccccucagagga

SEQ ID NO: 4158009 - RNA, 59 nt, Human
uccucugcuccuguggcucuggaaggagaugcacuguucucccacccagggggagagga

SEQ ID NO: 4158010 - RNA, 57 nt, Human
uccucugcuuguccccaaacugucugacuacaccagcaaauagacauggcuagagga

SEQ ID NO: 4158011 - RNA, 58 nt, Human
uccucuggcucuuucccuaggaaguguuauagcuucccaaguacuaaagugccaagga

SEQ ID NO: 4158012 - RNA, 61 nt, Human
uccucuguaaaacauugcuaaauaaugcugcagcuucucuggcagccagugguacggugga

SEQ ID NO: 4158013 - RNA, 66 nt, Human
uccucuguaguaagagaacauauggcaaacaaaggccucucuaaauaugcauucauacuuagugga

SEQ ID NO: 4158014 - RNA, 61 nt, Human
uccucuucugcccaucagaggcgcgguggucucccaucgaucguugugggccggagcaggg

SEQ ID NO: 4158015 - RNA, 99 nt, Human
uccucuugaaguuacucuaaaauguugacagaugugaaagugagcauuaucgaaugcuuaguuuuacauuugcauucagaucuguuguuucaaugggga

SEQ ID NO: 4158016 - RNA, 70 nt, Human
uccucuugcuauuuguuuucaaugugucauucaguggugggcugaaauguuaaacaaguggcucugaggg

SEQ ID NO: 4158017 - RNA, 70 nt, Human
uccucuuguauuggaguuaguggggaguguguguuucuccuccacuggccugucaguauauuuagaguga

SEQ ID NO: 4158018 - RNA, 103 nt, Human
uccucuuucccugggaugcucugagguccucagagggaaagguucgggaucccccgugccucucccugcagggcccagggcagcugaucccacucaucgagga

SEQ ID NO: 4158019 - RNA, 85 nt, Human
uccugaaaauuggaccaauauugacagcuuuugcuuaauccagaacagcucauugagaaaggggucaauaucucucccacuagga

SEQ ID NO: 4158020 - RNA, 66 nt, Human
uccugaaauucuuuggaguuuucuuaaaaggaauuucugacagaaacucuggaagaacuuuuagga

SEQ ID NO: 4158021 - RNA, 68 nt, Human
uccugaaguucaagagugacauauuaggcuuauauuaggcuuauuuguaauguuugaauuauacagga

SEQ ID NO: 4158022 - RNA, 58 nt, Human
uccugaauuccucuuugcauccauauucagggaugcaaagagaccugggaaauuagga

SEQ ID NO: 4158023 - RNA, 75 nt, Human
uccugacaguuaaauagauuucuaacagugugcuuguaaugaucaaauggcaagugaacuuagaggucuuaagga

SEQ ID NO: 4158024 - RNA, 69 nt, Human
uccugacccaagauaccugucaguuccuccgucaccaaauaucaggugcguacuucagguguggucuga

SEQ ID NO: 4158025 - RNA, 57 nt, Human
uccugacccauuauagugaccugugguuugaaacacaggguccuacagggcucagga

SEQ ID NO: 4158026 - RNA, 70 nt, Human
uccugacuccaaggccagcuaucuuuccacaucugcugcaaaugucaugaggcuagcccccaaguuggga

SEQ ID NO: 4158027 - RNA, 56 nt, Human
uccugacuuaacuacucucuggagcuacugccuacuagagaagagguuaagcauga

SEQ ID NO: 4158028 - RNA, 101 nt, Human
uccugacuuuucuuaagcauuaaagucucuuuggguacuuuauuuuacuagcugagaauaauaaaaagagcauuuuaaauguuaggcagugaaaaucagga

SEQ ID NO: 4158029 - RNA, 58 nt, Human
uccugagaaggaguuuccauggccuugcuuuaguauuuaacaaacuucauucucagga

SEQ ID NO: 4158030 - RNA, 59 nt, Human
uccugagagggguggguuucccaugaagcuuaagucucagggcuccucucucucaaggg

SEQ ID NO: 4158031 - RNA, 78 nt, Human
uccugagauucaaaagaccaugcagacucuuuugcaccauauuucugugcggagaucuuucuggcuuggauuugggga

SEQ ID NO: 4158032 - RNA, 61 nt, Human
uccugagcaacacagcuaaguggcauuccccaccccugcucuuagcaaaaguuccucagga

SEQ ID NO: 4158033 - RNA, 57 nt, Human
uccugagcccuguaggacccuguguuucaaaccacaggucacuauaaugggucagga

SEQ ID NO: 4158034 - RNA, 90 nt, Human
ucgcagagcaccucgaugggcguggcgcguuugguguccccgaucuucugguaccgcuccuugagcgugucggccugcgggggucugugg

SEQ ID NO: 4158035 - RNA, 61 nt, Human
ucgcaugcagaaaaugaacaacgaagugguggacaagguugguguuuuauucugccuggga

SEQ ID NO: 4158036 - RNA, 63 nt, Human
ucgcauugaccaaaauugaagggaugggggaacaguucaccuuuggauaauuugaguuugcgg

SEQ ID NO: 4158037 - RNA, 58 nt, Human
ucgccgaggcuggagugcaguggcgcgaucuuggcucacugcaagcuccgccucccgg

SEQ ID NO: 4158038 - RNA, 76 nt, Human
ucgccugagccccagagguugagucugcagugagcugugaacaugccacugcacuucagccugggugacagagcga

SEQ ID NO: 4158039 - RNA, 57 nt, Human
ucgccugcugugcagucuauuucgggacucagucucaguugcugcugcugcagguga

SEQ ID NO: 4158040 - RNA, 89 nt, Human
ucgccuuucaaaaaagggaguggcaggaggaacagcgagucagacuugaaaugaaacuucuccacccacucuuuuguugccagagguga

SEQ ID NO: 4158041 - RNA, 78 nt, Human
ucgcgaauugguuuugcugcugguuuugcuguguguggcuugcuggaccagcuguuaucuguaguaucuaaagcgugg

SEQ ID NO: 4158042 - RNA, 76 nt, Human
ucgcucugacacccaggcuggcgugcaguggugugaucucggcucacugcaaacuccgcuuccuggguucaagugg

SEQ ID NO: 4158043 - RNA, 76 nt, Human
ucgcucugucacccaggcuggagugcaguggggcgaucuuggcucaccgcaaccuccgccuccugaguuuaagcga

SEQ ID NO: 4158044 - RNA, 77 nt, Human
ucgcucuuguggcccaggcuggagugcgguggugugaccucggcucacugcauccuccgccucccggguucaaguga

SEQ ID NO: 4158045 - RNA, 86 nt, Human
ucgcugggauuacaagugucagguacuggcaccuggaaagccuggugccagcgccugacacuuguaaccuccuucccuuaugguga

SEQ ID NO: 4158046 - RNA, 60 nt, Human
ucgcugugaaaaccuuggacaaaucccuucccugcggacuccuggguuguacuacaguga

SEQ ID NO: 4158047 - RNA, 77 nt, Human
ucgcuugaacccaggaaguggagguuacagugagcugagaucacuccacugcacuacagccugggcgacaagagcga

SEQ ID NO: 4158048 - RNA, 77 nt, Human
ucgcuugaacccaggaaguggagguugcaaugagcugagaucucaccauuacacuccagccugggcaacaagaguga

SEQ ID NO: 4158049 - RNA, 76 nt, Human
ucgcuugaacccaggagauggagauugcaguaggccaagaugaugccacugcacuccagccugggcuacagagcga

SEQ ID NO: 4158050 - RNA, 77 nt, Human
ucgcuugaacccaggaggcagauguuguggugagcugagauugcgccauugcacuccagccugggugacaaaaguga

SEQ ID NO: 4158051 - RNA, 75 nt, Human
ucgcuugaaccuaggagguggagguugcagugggccaggaucgcaccacugcacuccagccugccaacagagcga

SEQ ID NO: 4158052 - RNA, 77 nt, Human
ucgcuugaauccagguggcggagguuguggugagccaagauugcaccauugcacuccagccugggcaacaagaucga

SEQ ID NO: 4158053 - RNA, 76 nt, Human
ucgcuugagccccugaggcugagguugcagugagccaagauggcgccaccgcacuucagcuugggcuaccgaguga

SEQ ID NO: 4158054 - RNA, 60 nt, Human
ucgcuuugaugcuggagaacuaaucacccagagagaacuggucuccaggcaggugagcga

SEQ ID NO: 4158055 - RNA, 55 nt, Human
ucgcuuuguaucuaaauaucuugaaaugaggcuuacaggguauagguacagauga

SEQ ID NO: 4158056 - RNA, 64 nt, Human
ucggaaauucacugucagcuugcaugggguagaagccccaucagagcugaaggcgguuugcuga

SEQ ID NO: 4158057 - RNA, 65 nt, Human
ucggacacccagcuucggcaagcucucuccaagggugagugggccagugggaccugggucuccgg

SEQ ID NO: 4158058 - RNA, 129 nt, Human
ucggacaucaugccuucaccugugcgcuucugagccucaagggcuuguggcauguuuugaugcuguguuuaugccaugcacacguacccuacaaggcacgccaguguacauauggcaugcauaauugga

SEQ ID NO: 4158059 - RNA, 77 nt, Human
ucggaccccgggaguuuccucuuccgagggggaggcgaggccgcgccagcuagcggggaggaaaugccggagucugg

SEQ ID NO: 4158060 - RNA, 78 nt, Human
ucggacgccugagaagaggaacugggggcugaguccuguccuggccuggccgcuccccauuccucccucugccucuga

SEQ ID NO: 4158061 - RNA, 64 nt, Human
ucggauggggugggcaugcgcuguccuucccguuuauuuaggaaggaggggucuuucccacuga

SEQ ID NO: 4158062 - RNA, 72 nt, Human
ucggccaauucuggcucaauuuguacugcugugggagcuacccacagagacugggagcaagaggcaggcgga

SEQ ID NO: 4158063 - RNA, 71 nt, Human
ucggccauuuaucaggacagggaugccaaccaacaguguccagugucuagcagaugacaggugugugccga

SEQ ID NO: 4158064 - RNA, 129 nt, Human
ucggccucccaaagugcugagauuacaggcaugagacaccauguccggccgcaauggguaguuuagaaaggucauuuugaggcagggcaugguggcccacaccuuaaccccaguacuuugggaggcaga

SEQ ID NO: 4158065 - RNA, 55 nt, Human
ucggccugugggcacugagcauacaguaggugcucaguaaaugcuugcaggccga

SEQ ID NO: 4158066 - RNA, 56 nt, Human
ucggcuauauggcuccagugguaaugaucuucugccacauagcuauagaaagucga

SEQ ID NO: 4158067 - RNA, 59 nt, Human
ucggcugcugguggggcuaucugggccugucugggaaguggaagccaucggcagucuga

SEQ ID NO: 4158068 - RNA, 63 nt, Human
ucgggaacuuugcugagaccucuuaaaauauuuagggagucaacacaguaauguuaacccuga

SEQ ID NO: 4158069 - RNA, 89 nt, Human
ucgggagguucuacuccacgcccagcugaaaucuccaggcucucaacagcuggaggagaauagcagggcuuugggaagaacuuaauaga

SEQ ID NO: 4158070 - RNA, 77 nt, Human
ucgggccuguuggaauuugcucauccauuucaucgugggccagugugaaauggugagggaauugaacagcgucacga

SEQ ID NO: 4158071 - RNA, 57 nt, Human
ucgggcuccugcacuuggagaccagccucugugaaacacagguguagugagucauga

SEQ ID NO: 4158072 - RNA, 129 nt, Human
uauuugucauuuggauggcuaguauugugacucaaguauucuagacaagcugugauuaaauauuucaacagaagaccucaaagaauuacugauuuauaauuacccacguuaccuaugcuacaauaauua

SEQ ID NO: 4158073 - RNA, 66 nt, Human
uauuuguccagguaaauuucagauauuauucucucuuaaauuaucugaaaucugaugggacaaaug

SEQ ID NO: 4158074 - RNA, 60 nt, Human
uauuuguuguauucuuucuauauuuguggcacugcauuauaugcuggaguacaggaaaua

SEQ ID NO: 4158075 - RNA, 84 nt, Human
uauuuguuucuggaaagguauauuucucugguuguuagcucauuugcagaaccauuuugacagauauacugaggccaaugaaua

SEQ ID NO: 4158076 - RNA, 59 nt, Human
uauuuguuuugugugugcugcacuaggccuggggaauacagcagcaaacaaaacaggua

SEQ ID NO: 4158077 - RNA, 71 nt, Human
uauuuuaaauuauugucucauguuuacagcaacugaugcuggauuugcauuuaugauaguaauaugaaaug

SEQ ID NO: 4158078 - RNA, 101 nt, Human
uauuuuaauauaccaccuauuuuauauugaacuuucuuuguauagauucugaguuggagaauugcaaacagaaaguuuauuguggaauguucuuugagaua

SEQ ID NO: 4158079 - RNA, 73 nt, Human
uauuuuacagacuacuuuagaugcuaguaauuuuccugcuggugcauaaauauuuggagugguuuguauuaug

SEQ ID NO: 4158080 - RNA, 61 nt, Human
uauuuuaccuucuuuuaacuacagugcuaauuuuauacacugaguaagacagggugauaua

SEQ ID NO: 4158081 - RNA, 60 nt, Human
uauuuuagagaaccucuugaaaguggccaccucggccuuuugcaauaagucacuggaaua

SEQ ID NO: 4158082 - RNA, 64 nt, Human
uauuuuauaauuauuaauucuuuauguggaacaccgcaaaagagugacugauaaguauaaugug

SEQ ID NO: 4158083 - RNA, 73 nt, Human
uauuuuauaauucagaucccauguucaagugagugauguugugcugcauuugcuggggaugugauuggaaaua

SEQ ID NO: 4158084 - RNA, 79 nt, Human
uauuuuauaugcuucugaagaucuugcauagcuuuccuuguuaaucauuugcaguguuuuucagggcauauugcaaaua

SEQ ID NO: 4158085 - RNA, 114 nt, Human
uauuuuaucagaagccuguaccucaucgaguuccuucuauucagcuccaagaagcuuuaaggaucugggagagggaaagaagacuuacugaggacaggauaacugucuuaaaua

SEQ ID NO: 4158086 - RNA, 68 nt, Human
uauuuuaugaccauaagauuacuguuaacuuuuuuaugugugauaauaguauugugguuaugucuaua

SEQ ID NO: 4158087 - RNA, 67 nt, Human
uauuuuauuaaauuuugggaaugaaacagugccacagugugguccauguacagaguuugauaaagug

SEQ ID NO: 4158088 - RNA, 130 nt, Human
uauuuuauuuauguuuuuugagagucucgcucugucacccaggcuggagugcaguggcacaaucucggcucacugcacuccagccugggagacagacgagacuccgucucaauaaauaaauaaauaaaua

SEQ ID NO: 4158089 - RNA, 55 nt, Human
uauuuucuccuucuccucaagcuccugcuauuggggcacagagaugagcaaagua

SEQ ID NO: 4158090 - RNA, 65 nt, Human
uauuuucucuaccuuuugauuaagccauugaaaaucccuggcggaaugcaaauguaggaagaaua

SEQ ID NO: 4158091 - RNA, 75 nt, Human
uauuuucuuuccguuuaaaauguuuuaacaugagugauuacaucaguucuaacaguuuagaacaaagggaaagug

SEQ ID NO: 4158092 - RNA, 87 nt, Human
uauuuugaaagguacagaaauuaacaaggaaggaguuaacaccuccacucucauaauccuacuggugacuucuguauagcuaaaaua

SEQ ID NO: 4158093 - RNA, 82 nt, Human
uauuuugaacugaaggcaacugagaaaaagcagauacaagaaaaauuuucugccuucuuccuauuugccuaaagacaaaaua

SEQ ID NO: 4158094 - RNA, 77 nt, Human
uauuuuguggcacagugcuggauggugcuggcucccacaggugacacagucaucaccaguacagugugcaggagaua

SEQ ID NO: 4158095 - RNA, 78 nt, Human
uauuuuuauaugaauaugauguauggguccagcuuuggaauauuuggacacaauaacagaugcuucagcauaaaaaua

SEQ ID NO: 4158096 - RNA, 130 nt, Human
uauuuuucuuauuuuuaguguagauuccaagaaauagaauuuaaggaccaagcauuuugauuccaaguccagaguucuuugagaccuuaaauuagguuauucagaauauuaacuaaaacagagagaagua

SEQ ID NO: 4158097 - RNA, 86 nt, Human
uauuuuuuacuuggcauuuucuuggaaacuucaaacaugugcaaaacacauguaucaugcaggguccaugaauuagcuggaaaaua

SEQ ID NO: 4158098 - RNA, 57 nt, Human
ucuccagguggggucaccuuuuuccuccauuccauaagagguggucuaggcuggaga

SEQ ID NO: 4158099 - RNA, 71 nt, Human
ucuccauagccaagcacagaggucaucuuguugccaagcacagagucgccuuguagcuggcacaaugggga

SEQ ID NO: 4158100 - RNA, 78 nt, Human
ucuccauaucccacuguaauuaucugaacgugcagauaccacucugcaucuuggaagauugcacaaauggguguggga

SEQ ID NO: 4158101 - RNA, 63 nt, Human
ucuccaucugucauucuuguccauggcaaauguggacaugucauucggaauguagcauggagg

SEQ ID NO: 4158102 - RNA, 70 nt, Human
ucuccauguuguuguaguugucccuggauugucuucaugucgcagcugaccuuuuacaaaacauguggga

SEQ ID NO: 4158103 - RNA, 71 nt, Human
ucuccauuagaaguucauuuuaagaacuucacagaauacuuuuggaagaggaaaaugagccuagagggaga

SEQ ID NO: 4158104 - RNA, 89 nt, Human
ucuccauuggugaauguuguagcagggcugaccagaagguuaccuauaucucauuugucugccuugcuggacuguaaacucgguggaga

SEQ ID NO: 4158105 - RNA, 55 nt, Human
ucucccacuggccuuguaugaucugagagcuggcaguggacaagcuaaugggaga

SEQ ID NO: 4158106 - RNA, 67 nt, Human
ucuccccauugaaguucacaagacgggaggccauuucuccucauucuuggugcaucaaauccggagg

SEQ ID NO: 4158107 - RNA, 75 nt, Human
ucucccccggaugcagcugagucacccagccaugccugcuaggcaggugggcaccaggcuuguggugggggugga

SEQ ID NO: 4158108 - RNA, 58 nt, Human
ucuccccuggucucgcgcgcugucugaaccccgggcggcagcguccggcuacgggagg

SEQ ID NO: 4158109 - RNA, 57 nt, Human
ucucccuacugacuccaggaccguaaccaaagcaaagguucuucagccaagaggaga

SEQ ID NO: 4158110 - RNA, 121 nt, Human
ucucccucaucugugcugucucugcuucuccaucacaaccagugcuuccugcuggagcuggaucccucagcuccccagggaagggacuggagugaaucaggugcacaggucaugagggaga

SEQ ID NO: 4158111 - RNA, 68 nt, Human
ucucccucauuccugcuuccauagguaccucauauuaccaauuucugaguuuaggggauagagggaga

SEQ ID NO: 4158112 - RNA, 91 nt, Human
ucucccugacaagacuauacacuuuuugaaaauagagacacuguauuuugugucuucuguacuccuugaguagugcuagucccaagggaga

SEQ ID NO: 4158113 - RNA, 86 nt, Human
ucucccuugggcucagcaagaaucagacaaccucaguguuucauuuuuggcugagcuggaaucuucuugacugugccuaugggaga

SEQ ID NO: 4158114 - RNA, 105 nt, Human
ucuccuaaggcacauuaaagaacccaaauuccauuuugugacuauucugagcaguuuuuggagagcauacuauaauggagguggggugauuuaaucacuuugaga

SEQ ID NO: 4158115 - RNA, 77 nt, Human
ucuccuaggacaguggagauaaccagaaaacuucaaaagucuuuucaaucuccagcuguuuuaugauucuaaggaga

SEQ ID NO: 4158116 - RNA, 55 nt, Human
ucuccuagucuaauacgccaggugucuuccugaaauauguggcaggggugggaga

SEQ ID NO: 4158117 - RNA, 65 nt, Human
ucuccuaugcauucaauggaaugcauaguuucaucuccuaugcauucagcggaaugcuuaggaga

SEQ ID NO: 4158118 - RNA, 69 nt, Human
ucuccuauuucucucacgguugccuggguaguagggcaugccacuggcaaauggagagaauguuagaga

SEQ ID NO: 4158119 - RNA, 82 nt, Human
ucuccucagaacacacugccaccugcaugcccugauuggucaggagugcaucuggagggggucaguuauaaggcugaggaga

SEQ ID NO: 4158120 - RNA, 63 nt, Human
ucuccuccaggaagccuuccuugucugcuccuuucucaacuggagcccuguuuccuggagaga

SEQ ID NO: 4158121 - RNA, 64 nt, Human
ucuccucugugacauagggcaaauaaugugucugcuugccuuuugaagccucacagguaggaga

SEQ ID NO: 4158122 - RNA, 78 nt, Human
ucuccugacaauuuccugccugacucuagucucuugagcaugaggagcucuuagauagggcaggaaccugucagggga

SEQ ID NO: 4158123 - RNA, 60 nt, Human
ucuccugccuuugcauccugggccagcaucucccuggucucagccugugaagagcagagg

SEQ ID NO: 4158124 - RNA, 56 nt, Human
ucuccugggaggacaaggaaggggcucugagacccaagccuggucuugucaggaga

SEQ ID NO: 4158125 - RNA, 109 nt, Human
ucuccuguggcugcaccccugacagccaggucugaugacccagauggcaaccacugcaacuggaguggugugggcucugcugucgggcacacacugagucacagugaga

SEQ ID NO: 4158126 - RNA, 85 nt, Human
ucuccuguuuggcccagggccaagccccuuuggcuguagcaacagaucuacugcgggcuguggcccugggucgccucucagugga

SEQ ID NO: 4158127 - RNA, 77 nt, Human
ucuccuucuccccucugcagggugugccucccaacaggaacaggaaaccaucacccuggaucuuagggggauggagg

SEQ ID NO: 4158128 - RNA, 107 nt, Human
ucuccuucugucucacaccaaacacacuacggucuucuugagucuugugcaaugauuacaugauuacacugagcaggaagaagugggggugaagacagagcaggagg

SEQ ID NO: 4158129 - RNA, 101 nt, Human
ucuccuuggacuuccuuuugggaaacuguuuaaggaacucacauacaauacauuuaaacagcuaauggccaggaauagaaguucaauacauaaacaggaga

SEQ ID NO: 4158130 - RNA, 79 nt, Human
ucuccuuuuucugggacccccacugcguagcucggcauggguccaagucuucagggggggcucagcaaagacuugguga

SEQ ID NO: 4158131 - RNA, 102 nt, Human
ucuccuuuuugaaauuccuuuucuuuuaugguuacuuuaauucuguucacuuuugugagcaaugacuuugaaaucaugacucggaaaggucagagaaagaga

SEQ ID NO: 4158132 - RNA, 71 nt, Human
ucucuaaaccuuuccaaaaugaaucuaaugcaggauuguccugcauggaucuuucuggaagaaaauggaga

SEQ ID NO: 4158133 - RNA, 57 nt, Human
ucucuaaaguagaaaagaccccagaauuaagcuugggucuuugcucugauuuagaga

SEQ ID NO: 4158134 - RNA, 60 nt, Human
ucucuaacaaugugaagugcuguucagcccaggauugccugccuggacuuuuauaagaga

SEQ ID NO: 4158135 - RNA, 59 nt, Human
ucucuagggaucuguuuuaauuuccugauucuuccaagacuuagaacauccucuaggga

SEQ ID NO: 4158136 - RNA, 61 nt, Human
ucucuagucacacaguaaggacgggcuaagccagcucugaauccaguugugugacuccaga

SEQ ID NO: 4158137 - RNA, 123 nt, Human
ucucuaucgaugaaacugcuuucucaaauacgucagcaaugggauucaggcuuugcuuacaaugugaaggaaguucuuagucucauuugcacaaagaaggaaggagggcuaaagauaaaaaga

SEQ ID NO: 4158138 - RNA, 58 nt, Human
ucucuaugacaagguuugguugcauaucuacaccugcaaccaaucacugucaaggaga

SEQ ID NO: 4158139 - RNA, 57 nt, Human
ucucuaugacuuuucucuccaugugaagaaaauguauggauggaaaaguugaggaga

SEQ ID NO: 4158140 - RNA, 56 nt, Human
ucucucaaaguaagguguauacauuauccuguuaguguugcaguuguuuuugagga

SEQ ID NO: 4158141 - RNA, 64 nt, Human
ucucucaauuuggguuugacugaugcuuucucaugaaaacaucagaauauccauguugggaaga

SEQ ID NO: 4158142 - RNA, 63 nt, Human
ucucucagcaccuccacaccacccaugccacaccccuguggcacugcaggaggacugagcaga

SEQ ID NO: 4158143 - RNA, 65 nt, Human
ucucucaggguuuccugggggcugcugaugggaaagaggcagcauucgcaggggcccugcagaga

SEQ ID NO: 4158144 - RNA, 129 nt, Human
ucucucaguggcugcaaucucuguugagccucuuguuuugucuuuggaaauuuaauguuuaauuauuuuuaauaugucaaaauauuaguuucucaagagagaggcugugcaguaacaggcauuuggaga

SEQ ID NO: 4158145 - RNA, 80 nt, Human
uccuggggcccucugagagugcuucauggggccagcaaguggugcguggggacccacgugcagcacucgaggccucagga

SEQ ID NO: 4158146 - RNA, 58 nt, Human
uccuggggguuuaaugagcaaccagauaaucuccugcuccagugccugccccacagga

SEQ ID NO: 4158147 - RNA, 76 nt, Human
uccugggugaugaaaugauugaaaucuuuacuguaucuuugggaagagaaaacaaugauuucuaagcaaccuagga

SEQ ID NO: 4158148 - RNA, 89 nt, Human
uccugguauucuuucuguagaucauuuuggugcuccacaaaauuaaccuccaauguuaugucugggaagggguauaucuaaaggcagga

SEQ ID NO: 4158149 - RNA, 67 nt, Human
uccuggucccagaauugguuagcacaagacaugggaauucuauugguuucaauucuugggacuggga

SEQ ID NO: 4158150 - RNA, 61 nt, Human
uccuggucccugauacaggcugucauccagcuccacuggcucagccucagcaggcccagga

SEQ ID NO: 4158151 - RNA, 75 nt, Human
uccuggugaggcuggaacugcuccagacuucagaaggggcuggaaaggauauuuuagguagaccuacaucaagga

SEQ ID NO: 4158152 - RNA, 59 nt, Human
uccuggugaucaaaauucauuuccgaguuauuuccugaaaugguauuuugacaccuggg

SEQ ID NO: 4158153 - RNA, 59 nt, Human
uccuggugcuuguauuugaaguccaagaagaggauuuugauuauuuguuacuuguggga

SEQ ID NO: 4158154 - RNA, 73 nt, Human
uccugguuauacuguaguuucugcagcuguggagccaaguccacuuucugagggaacagcagccaacugagga

SEQ ID NO: 4158155 - RNA, 60 nt, Human
uccugguuuauagcuuagggaaaguuacagcuuaguuauauguaugcuuauaaaccagga

SEQ ID NO: 4158156 - RNA, 55 nt, Human
uccuguacauucucgcuccucucagcuaacagcuggacucaggggaugugaagga

SEQ ID NO: 4158157 - RNA, 71 nt, Human
uccuguagcugucacugggggccccaccuccgacggaauccccggagccaccccggagauaggaacuagga

SEQ ID NO: 4158158 - RNA, 79 nt, Human
uccugucuuugggaaggguuaguuggauuauuuauacuuuauaaauuuucuugcuguacuuaguguuaaagaugaugga

SEQ ID NO: 4158159 - RNA, 66 nt, Human
uccugugccacucggcaaauauuugaagaaaaagaaugcuugcugggccaauggcaauuucaagga

SEQ ID NO: 4158160 - RNA, 68 nt, Human
uccuguggaagacaguguugggguccugccuauauccccugggcacuuaacauuuucuuaugcaugga

SEQ ID NO: 4158161 - RNA, 64 nt, Human
uccuguggcugugugagggauggauuguguuauaaaagacggcagucagggacaccagcuagga

SEQ ID NO: 4158162 - RNA, 67 nt, Human
uccugugguaguaaauuucagcuccauuguagguuucuccugcucauugcugauuuacaugucagga

SEQ ID NO: 4158163 - RNA, 97 nt, Human
uccugugucaaaaccauuacauauguuggcaacauuuaucaucaggaaaagcgucccaggaaguugaauucuaauguaugugugguguuacaaugga

SEQ ID NO: 4158164 - RNA, 81 nt, Human
ucuaaucaacucugcuguuccuuauucucagcucaaaaugggaacauagaguuugauagagaggaaccgggagaagagaga

SEQ ID NO: 4158165 - RNA, 65 nt, Human
ucuaauguauuuucugaggagcauuaggaaaauuauuuugcauuaaucucccaggaaaugaaaga

SEQ ID NO: 4158166 - RNA, 82 nt, Human
ucuaauucuacaaaagucuacaagcuucaacaagguuguuaugacuuuguuuugagcccuggacuugcugagcugaaacaga

SEQ ID NO: 4158167 - RNA, 64 nt, Human
ucuaauugcaauucucagagaugucuauggaaguguucagcagucucuggaguuagcagagaga

SEQ ID NO: 4158168 - RNA, 74 nt, Human
ucuacaagaacuggagcuguucaagguaguggauaucucacuacagugaagacuagcuauaguagaauugagga

SEQ ID NO: 4158169 - RNA, 70 nt, Human
ucuacaaggaguuagcaccagugcucauaacacuauuauaaugguggugguggugcuaacuccuguuuga

SEQ ID NO: 4158170 - RNA, 65 nt, Human
ucuacaauguugguaaaguaucauggacauauuuuaugcaauaaauacuuuccagcuguuggcga

SEQ ID NO: 4158171 - RNA, 73 nt, Human
ucuacacucaggccucauugcccaccuguggaggggccaccaucugcagaugggcgauggggccugaguggga

SEQ ID NO: 4158172 - RNA, 60 nt, Human
ucuacagacuccuauguaacacauuaaccaaacaaggaccugaaaacauagagucugaga

SEQ ID NO: 4158173 - RNA, 87 nt, Human
ucuacaggccagauugcuucuggaaagcaguuuuagaaaucacaugaaaauaguuguuuggaucaauaaaaacacuggcauguuaga

SEQ ID NO: 4158174 - RNA, 59 nt, Human
ucuacaguagaaagaucccaguaaccaaauuuguaauaugggaucucaucugucuuaga

SEQ ID NO: 4158175 - RNA, 63 nt, Human
ucuacauaaaaauucagaaggcacauccguguuugcccauagacuucuggauuauugugugga

SEQ ID NO: 4158176 - RNA, 59 nt, Human
ucuacauagaauuagguaauuuggaugacuuguuuccaaacuuugcuuaacugugugga

SEQ ID NO: 4158177 - RNA, 62 nt, Human
ucuaccagaaugugauaauggcuuccaugagggcggaagccaugugucuuuauucuguuaga

SEQ ID NO: 4158178 - RNA, 66 nt, Human
ucuacccugcagcuuuugcauagucagugacacacuugacaauuggcacagcugugcuggggaaga

SEQ ID NO: 4158179 - RNA, 109 nt, Human
ucuacccuuuaaaaaguuagcucacggucuugaaguuaaggucaacuauaaacauaagcuauggacaagaauuacaagauaugugagaacuagcacaaugaaagggaga

SEQ ID NO: 4158180 - RNA, 60 nt, Human
ucuaccggaacaaccaguuuagccaagaggagcugguuauuguggagaaguuccggaaga

SEQ ID NO: 4158181 - RNA, 84 nt, Human
ucuaccuguuuuccuucugggacucugcuuccuucuccuugguggacagggaggaguccucaaagucauaggagaagaggugga

SEQ ID NO: 4158182 - RNA, 81 nt, Human
ucuacuacagaagcucggguaagcuccauuuugucaugcugcagacuggaugaccucuugaguuucugugcaucucguaga

SEQ ID NO: 4158183 - RNA, 82 nt, Human
ucuacuaugucuaucucuuagcaauguuuuuuaacagaaagccaccauauaucucuguaauuauguuguuagaguauguaga

SEQ ID NO: 4158184 - RNA, 56 nt, Human
ucuacuauguuucuuaaauagaauguauaaguguucugaaauaggagccauguaga

SEQ ID NO: 4158185 - RNA, 55 nt, Human
ucuacucugguggggaccugccaucuugguuggcaagaagcccuuccugggugga

SEQ ID NO: 4158186 - RNA, 55 nt, Human
ucuacucugugccaugaagaccccucccagcuggaggggcugcaugcagagaaga

SEQ ID NO: 4158187 - RNA, 55 nt, Human
ucuacuguugguacuuaaucugcucugccuucuugguguagcagccagcacugga

SEQ ID NO: 4158188 - RNA, 65 nt, Human
ucuacuugucagucuucaaaucagagaaaaucaggaucaauaucugcuuugggaaagacaggaga

SEQ ID NO: 4158189 - RNA, 66 nt, Human
ucuacuuguuucuggaguccaccugacuacaguauguagauucucagaauuuuagaaacuuaugga

SEQ ID NO: 4158190 - RNA, 75 nt, Human
ucuacuuucugccuuaaaaguacuuuuacuuaaaacauccaguuagaaggguauuuuuuggcauugcuaguuagg

SEQ ID NO: 4158191 - RNA, 70 nt, Human
ucuagaagaauccuguccucuuuaggagugagagugagcccuggaauagacagggaucuuuccacauaga

SEQ ID NO: 4158192 - RNA, 60 nt, Human
ucuagaagauaccugcugccaacacaaauuagauuaguuggcauaaaaaucugcucugga

SEQ ID NO: 4158193 - RNA, 59 nt, Human
ucuagaauagauucugcugaucaccauauaacuuacugguuuagagagcuguuacugga

SEQ ID NO: 4158194 - RNA, 64 nt, Human
ucuagacaacuggagauagucugacuugauccaaagugaucaucucaggucauguuguauuaga

SEQ ID NO: 4158195 - RNA, 80 nt, Human
ucuagacaucaaagggguaggaaauccagagguggcuccucuauuuggagaacuggauauuuugcugccaggagucugga

SEQ ID NO: 4158196 - RNA, 74 nt, Human
ucuagacuacucuuggaugugucgccuucacacaacugaaaaugacaaaugcaacauguaagagaguuucaaga

SEQ ID NO: 4158197 - RNA, 61 nt, Human
ucuagagacuauaauguguccuugaagaauaaucuguaggacuauaucagaguuuccugga

SEQ ID NO: 4158198 - RNA, 83 nt, Human
ucuagauuccaagacaauauuucuggugcuucucacucaaggaaagaggaggagaauuuaaaaauacagguuggguuucuaga

SEQ ID NO: 4158199 - RNA, 85 nt, Human
ucuagcagaugaagguguaugcugugggucagggacauugaagcagaaacuuggcccuucuccagucaccucucccugugcuaga

SEQ ID NO: 4158200 - RNA, 59 nt, Human
ucuagcaucuaauuauggaaucuuuguuuuaguuagcaacaauuuaugaagaugcugga

SEQ ID NO: 4158201 - RNA, 64 nt, Human
ucuagcugaauuuugcuuucuaauuacagaaucagaauguaaggagaaaauguuuucagcugga

SEQ ID NO: 4158202 - RNA, 55 nt, Human
ucuagcugaggguaggagaccuggaauucacauggugcuaccuuacacagccaga

SEQ ID NO: 4158203 - RNA, 55 nt, Human
ucuaggaauguucuuagggauuugauacagacaaaccccugagaacauuucuaga

SEQ ID NO: 4158204 - RNA, 73 nt, Human
ucuaggcagguggucacucauccccagcucagaaguggguuguggguaaacaauuaguagaucagccugaaga

SEQ ID NO: 4158205 - RNA, 62 nt, Human
ucuaggccguaggauacagagcacagaaucaguguguguguguuuguaugcuaugaccugga

SEQ ID NO: 4158206 - RNA, 68 nt, Human
ucuaggccuucaggucuugagccaucaggauaugcagucaagucuaccugggcaaggccugugccaga

SEQ ID NO: 4158207 - RNA, 55 nt, Human
ucuaggcugugugugggcaggggcagauacucugcuccuccuugcagagcccaga

SEQ ID NO: 4158208 - RNA, 57 nt, Human
ucuagggaacaugggucaagcuuucucagugguccugcuugagccugucucccuuga

SEQ ID NO: 4158209 - RNA, 97 nt, Human
ucuagggcuaugugguauuuaaggggcuccagaaauuuuagggcagcugagaucuaaauccuucccuuccuggaguacccucugucuaacuccuaga

SEQ ID NO: 4158210 - RNA, 66 nt, Human
ucuagguggaugaggaacauagaagucagaaaaagaagaaacuguggaggccacaucccacccaga

SEQ ID NO: 4158211 - RNA, 66 nt, Human
ucuaggugguuugcaaaauuacaaacgugguaguaaaaccaaaguaaugaugggaauuuacuuaga

SEQ ID NO: 4158212 - RNA, 57 nt, Human
ucuaguaucaucuaagggaguuacugaaacacacuacuaaugccucaugauacuaga

SEQ ID NO: 4158213 - RNA, 58 nt, Human
ucuagucauucaugcuaugauuauugagcuccugcucugugucaggcaugaaucuggg

SEQ ID NO: 4158214 - RNA, 69 nt, Human
ucuaguuagugguugauacuguguguucaugauaaauucuguuuaggccagguacaaacaucaacugga

SEQ ID NO: 4158215 - RNA, 94 nt, Human
ucuaguucucugcuucucucucagacugcaagccuuagaaauuagacuggcuuucuccauccuaagcagagggaguagagguuugagaauuuga

SEQ ID NO: 4158216 - RNA, 110 nt, Human
ucuauaacagagcccaaaaaauauaaaggauguggguuuugcaucuuaaacugaucauguucaugagaaagccauaucuauucuauucuguggccuuuguacauuguaga

SEQ ID NO: 4158217 - RNA, 94 nt, Human
ucuauaaguaacagauaagaaaccugaagaugagggacagcuaaucacguauuuggccauauuuccauuuuuugguuuuugugaugcuggaaga

SEQ ID NO: 4158218 - RNA, 66 nt, Human
ucuauacaaggucgauaacucacacuggacuucagaagucucuugcuagaaucagccauguguaga

SEQ ID NO: 4158219 - RNA, 77 nt, Human
ucuauaguuuuauagucaauacucaacucucugcacauuuaguauauggcagagcauaauugacaugagguaguaga

SEQ ID NO: 4158220 - RNA, 71 nt, Human
ucuaucaaagauggcccaugaucucuuggaggccugacucuaaucaucaggauuaucccauuagggauaga

SEQ ID NO: 4158221 - RNA, 81 nt, Human
ucuaucagaugcccacauauguauaucaaauaugacugaucuauccaguuagucagcauugcagauauauggccugguaga

SEQ ID NO: 4158222 - RNA, 59 nt, Human
ucuauccagcaugcaaucauuuagcauuuaugugugcucagugcuguggcugaauaaga

SEQ ID NO: 4158223 - RNA, 68 nt, Human
ucugaaaguccuguuugaaggaccugccuagaacuugcaggugagggucuggacacagggcugucaga

SEQ ID NO: 4158224 - RNA, 63 nt, Human
ucugaaauaaguggacacauacuccaccauccccagguaguguacagugugugcccuuucagg

SEQ ID NO: 4158225 - RNA, 74 nt, Human
ucugaaaugaccagggcugcucauuggcugguuuagguuuccaccaccagggaauggggagcuugagacacaga

SEQ ID NO: 4158226 - RNA, 86 nt, Human
ucugaaaugcuucuguuuaucccuuuggucagcaccuccugccaggaccaugcuggagcugcuaagaaggaagacaggugcacaga

SEQ ID NO: 4158227 - RNA, 69 nt, Human
ucugaaauggaugagagcagagguuaaauugaaagaaugagggaugagaucuuuagccauccaaucaga

SEQ ID NO: 4158228 - RNA, 128 nt, Human
ucugaacauugagaaaauauuaauggaaugccuguuuuauuucaaguguugagcucauaaugcauauuucaaguuguuuaugaaacauuuaaaucuagguguuccaucuagaaccuaguauguucaga

SEQ ID NO: 4158229 - RNA, 85 nt, Human
ucugaagacaucugucauuucaaugauacuacuaaguccuagaggaagauuuggugguaucauugaaauaacagauguuuccaga

SEQ ID NO: 4158230 - RNA, 59 nt, Human
ucugaagaggacuggguuggaggcagcacaagacugucucuaggauuuucugcuucagg

SEQ ID NO: 4158231 - RNA, 55 nt, Human
ucugaagaggcucuugauaagaucugggggaugaggucugaggagugguuucagg

SEQ ID NO: 4158232 - RNA, 62 nt, Human
ucugaagagucaucuuugggugaccaaugucaagaacagagaauuugaucaaaaucuucagg

SEQ ID NO: 4158233 - RNA, 55 nt, Human
ucugaagcagaaaauggggauacugcauauuuguuuucucuauauuuguuucuga

SEQ ID NO: 4158234 - RNA, 77 nt, Human
ucugaagcaguaaccucacacccuaccagugcuacaagugcuuccuuggauauuggucaaguugaggacccuucagg

SEQ ID NO: 4158235 - RNA, 65 nt, Human
ucugaagcagugaaagagugggacuuggcugauuuuucaugcuucagugcuaccuucaaaucaga

SEQ ID NO: 4158236 - RNA, 67 nt, Human
ucugaagcauaucaugccaaguuuuuguauuuggguucugauuuaacuugaguaaugauaugaagga

SEQ ID NO: 4158237 - RNA, 61 nt, Human
ucugaauagaguugaggauguagaccugcacagacagugagggauccucuagcuucucaga

SEQ ID NO: 4158238 - RNA, 60 nt, Human
ucugaauuaaucaugccucuuuaaucaaugagaaggaagagucucaaagauuaauucaga

SEQ ID NO: 4158239 - RNA, 76 nt, Human
ucugaauuacagcaguggauuagaggauggcuagagguagucauucuuuuuaaaacauuuuaaacugugguuuaga

SEQ ID NO: 4158240 - RNA, 80 nt, Human
ucugaauuuuuagauaguuuaacugcacuuuaggggguauuguauucuccaguguacuugagaauugacuaauuugcaga

SEQ ID NO: 4158241 - RNA, 110 nt, Human
ucugacacucaguuugaagauccuucaagugucuuucugauccugacaggcaguuuuuaaaauguuuguggcauuccaagacgcuuaauaauuuaaagcuguauuuuaga

SEQ ID NO: 4158242 - RNA, 71 nt, Human
ucugacaucaaagugguuuucugugcuuuaaaugagucaguguggagauaggauuauuauuuuguguugga

SEQ ID NO: 4158243 - RNA, 95 nt, Human
ucugaccagcuguauaggcagcucuguggccucccagcccuggaagauagacagcguccuggugagacucagggaugcuuuacauuaaacucaga

SEQ ID NO: 4158244 - RNA, 67 nt, Human
ucugacccuggcugaaagccuggccugccagucccuagggcugagaucauauucagucaggaauaga

SEQ ID NO: 4158245 - RNA, 78 nt, Human
ucugaccuaauaaacugcuacgcuuaguuaucaucaacugagaugaaaaagcugaggggggcagguuuggaaggaaga

SEQ ID NO: 4158246 - RNA, 89 nt, Human
ucugacuagcccuuucucugccuuguuugagcuuugacagaauuugcaaggguggcguuaaggcugagcaggacacuggaaaggccaga

SEQ ID NO: 4158247 - RNA, 57 nt, Human
ucugacuaguucuugcugaaauaauuaaaugucuuuucagcaaauggacuguucagg

SEQ ID NO: 4158248 - RNA, 79 nt, Human
ucugacuguuucguuuccauauuuggucuuugggagcagaaguucuuaauauaaaucaauggaacuaaaggaacacagg

SEQ ID NO: 4158249 - RNA, 85 nt, Human
ucugagaaacaacgaagaggccauugcagcucagggugaugacugcccuaaugcaagucgacauucagggugcagugggagcagg

SEQ ID NO: 4158250 - RNA, 74 nt, Human
ucugagacugugauuucucugccaccuuuacuccugauuagggaggguggcucaaagagagcacagaguucagg

SEQ ID NO: 4158251 - RNA, 65 nt, Human
ucugagagcaucacugggguacagagagaggcaugccaauucauagguacccuugaugcucuaga

SEQ ID NO: 4158252 - RNA, 62 nt, Human
ucugagaggcaucugcacuucugaguuguaacgcagguuaggaagaggcaauuucucuuaga

SEQ ID NO: 4158253 - RNA, 69 nt, Human
ucugagagucucugaggcagaugacccagccaaaccacaccuggauuuugacccacagaaacucugaga

SEQ ID NO: 4158254 - RNA, 63 nt, Human
ucugagaucaacuguguggguuugaaccccagacacuuuccuuaccaccagugugaucuaaga

SEQ ID NO: 4158255 - RNA, 91 nt, Human
ucugagaucucgcuguggaccaggugcugagacaacaggaaacaaggccccaugcagcccucaaauugcucagcgucuaguggguuucaga

SEQ ID NO: 4158256 - RNA, 58 nt, Human
ucugagauugaucuuuggcuaucuuccaggcucuuugguaguuauugaucuauucagg

SEQ ID NO: 4158257 - RNA, 63 nt, Human
ucuacaccacaagcaucaucucugucuacagaacccuguagaaacugauagucuugugcuagg

SEQ ID NO: 4158258 - RNA, 69 nt, Human
ucuacagcuucagugugccccagugcugcccucucugccagcaggaccugggcucgaggaagcuggagg

SEQ ID NO: 4158259 - RNA, 80 nt, Human
ucuaccaucaaugggcaaugccuggcccaacucagagccacagguccucuggucaugccagguuugcugcagagaggaga

SEQ ID NO: 4158260 - RNA, 75 nt, Human
ucuaccucucaggcaggagucucccuuagucaucuuuuagauaaagagguaaugacugcuugaguaaauuguaga

SEQ ID NO: 4158261 - RNA, 60 nt, Human
ucuaccugcaucuucauauacuucuauccaauucuuaacagugugugauaggcaggaaga

SEQ ID NO: 4158262 - RNA, 74 nt, Human
ucuacuagguauaucuuauaugugcagguacuaaugacaacacagggcccaacacauaguaggcauuuggugga

SEQ ID NO: 4158263 - RNA, 129 nt, Human
ucuacuauuggcuccauacuaauguuccuugugauuuaaugcgucucugaguuuugcaugucuaagguuauuuacagcuuaaaagaugcauuuauauuaugauuagucaccggugagcuaugaaguaga

SEQ ID NO: 4158264 - RNA, 90 nt, Human
ucuacuccugcagaacaaaacauauucagaugccaaguccagcaauggcugggaaggagguggcuugaagugagucucuugggaguaaga

SEQ ID NO: 4158265 - RNA, 68 nt, Human
ucuacuggucagcuucagaguguuccaugaaucacauccaugucacuuggagaagcugaucccacaga

SEQ ID NO: 4158266 - RNA, 72 nt, Human
ucuacuuccugcagaacuagcucuccagcacagcagcaggucucugugccauuucuauucugcagcaggaga

SEQ ID NO: 4158267 - RNA, 61 nt, Human
ucuacuuugaguguggucaagugauuuuaaaagucaaagucuggacuugaaucagaguaga

SEQ ID NO: 4158268 - RNA, 73 nt, Human
ucuagacgacuggacuaaggagugauuuaugggccuuacauuaugauuaucucucaaagaccaaaaguguaga

SEQ ID NO: 4158269 - RNA, 63 nt, Human
ucuagagacaaaggaaggagggcucuggacaggagauacagccucuuccuucuuugucguaga

SEQ ID NO: 4158270 - RNA, 72 nt, Human
ucuagagcaguguucuaaauugggugugauuuuguccccaccccaacccuggggauauugucaauuucugga

SEQ ID NO: 4158271 - RNA, 62 nt, Human
ucuagaugcggcugugggggaaugggagcggccggaccucccagccugacagugcaucaaga

SEQ ID NO: 4158272 - RNA, 63 nt, Human
ucuagaugcguguucagcaucugacauguuucuuaauagcaaaggccuuggacacgcuguaga

SEQ ID NO: 4158273 - RNA, 60 nt, Human
ucuagcauuucuuuccugaggaaaauauugcuccccaggggaacuuuggaaauguuuaga

SEQ ID NO: 4158274 - RNA, 69 nt, Human
ucuagccaccucccuaacccuuuuggcucccuaggaucaggggccugggaaucuaggcgaguggccuga

SEQ ID NO: 4158275 - RNA, 67 nt, Human
ucuagccacugggaugggcauaagacccuauuagagccaacgggucuugaugagccuagugcuuaga

SEQ ID NO: 4158276 - RNA, 64 nt, Human
ucuagccuugcagaggagauuaucgggcaaauugaugcuggaaagaauuuucuguuagauuggg

SEQ ID NO: 4158277 - RNA, 67 nt, Human
ucuagcuuuccugcagcaccacaguucuuuaaauagggauccuguggggcggcugcaggggacgggg

SEQ ID NO: 4158278 - RNA, 78 nt, Human
ucuaggaaacaccaggcuuugguacccauggagucaggugucacccuggggaccgagcaagcucuggaacauucugga

SEQ ID NO: 4158279 - RNA, 77 nt, Human
ucuaggaaguucuuuaguuuucaucaaaucuauuccuccuuuauacaagugagaaaacugaagaucagcaagcuaga

SEQ ID NO: 4158280 - RNA, 56 nt, Human
ucuaggacaccauccacaagugugcuauaaagcacaacuucaccaggguuccuaga

SEQ ID NO: 4158281 - RNA, 74 nt, Human
ucuaggcagccaagaagccaacagggcaggagagaauaaagacauuuuuagcugccugguuuccggcugccagg

SEQ ID NO: 4158282 - RNA, 67 nt, Human
ucuaggccacaaagagggcuuugauucucaguucccuaggagcgggaaggagcucucuggucggagg

SEQ ID NO: 4158283 - RNA, 60 nt, Human
ucuaggcucugaugauagagcaguaaguaagacagccauguuccuguuauggagcuuagg

SEQ ID NO: 4158284 - RNA, 55 nt, Human
ucuagggaaccuauccuaugaugugacagaagagucaauuaaggaauucuuuaga

SEQ ID NO: 4158285 - RNA, 81 nt, Human
ucuagggcagccuugucccauggauaccaggcuaugaugcauguugcagacguaucuccauggccaaggugcagcacuggg

SEQ ID NO: 4158286 - RNA, 83 nt, Human
ucuaggggauuaauggccagcugggagaguugauggcccagaggagggacucauuaaccucagcgggccauuaauuccuuagg

SEQ ID NO: 4158287 - RNA, 64 nt, Human
ucuagguuagaauggcacaaaauaaggcauaguucuugucuucaaagugcuuuuaaccuuuaga

SEQ ID NO: 4158288 - RNA, 71 nt, Human
ucuaguauacauagugcuuccucuugguagauuuuuaccuacugugagaaggaaugauuuugauacucaga

SEQ ID NO: 4158289 - RNA, 83 nt, Human
ucuagucaguguuaguguaugucuaacauacacuagucuagucuaguuaguguaugucaaguauauacacuaacuuuggauga

SEQ ID NO: 4158290 - RNA, 61 nt, Human
ucuagucauauuuuuucaguauuuucaaggaugaauaaaaccugaagguguaugugcuggg

SEQ ID NO: 4158291 - RNA, 72 nt, Human
ucuagugccaagcuaaugccagaauuaauuauuagcaauuauuguucuuucuuucaauagcuggcauaugga

SEQ ID NO: 4158292 - RNA, 92 nt, Human
ucuaguuggcccaaagcaguagugucaguacagcaaauugugguaugcucuauugucguuugcugugcuuacauauguauugaagucagaga

SEQ ID NO: 4158293 - RNA, 62 nt, Human
ucuaguuuuccccagguagauagauaauccaguagacaaaucugcauacuucgggaaccaga

SEQ ID NO: 4158294 - RNA, 129 nt, Human
ucuauaaccugguuaucucuacgaugauuuuggcaagaacgugcagaugcauacacauauacacaaaaugcugcacaucuuucagcaucauacaaauuuuguagaagaauggccaaucccuaaauuaga

SEQ ID NO: 4158295 - RNA, 94 nt, Human
ucuauaggacuccgccucucugccggcuucuguaggccaaucacugaggccuuagaauaacagaaggcggggacaaggcggggcucucacgaga

SEQ ID NO: 4158296 - RNA, 67 nt, Human
ucuauaggucacucagugagucaacgacugagcuaugauuaacguugacagcuggugagcugcuagg

SEQ ID NO: 4158297 - RNA, 68 nt, Human
ucuauauucuccucccaauugccaagugcugcucugucagugaccugggagugggagggaguauugga

SEQ ID NO: 4158298 - RNA, 57 nt, Human
ucuauauucuggguggccaagaagccagguagagcucaaaggcucccugacuaugga

SEQ ID NO: 4158299 - RNA, 55 nt, Human
ucagauaaauaaaccugccagagagacaaagcuucuugugguuuagauuaucuga

SEQ ID NO: 4158300 - RNA, 73 nt, Human
ucagauauuacgaauguuagauugcaucucaguguuaaaucuucacugauagauguacguauguaaaucauga

SEQ ID NO: 4158301 - RNA, 95 nt, Human
ucagaucuagaacagaucuaguaggagcuggguuauuaggaugcuagucagcccuaggaacccccaggcuucugaguucucuggccuggaaauga

SEQ ID NO: 4158302 - RNA, 104 nt, Human
ucagaugaaacagcuguuuuaacaguuggguuuuuccaaaauuaaaauauucuauuccugacaguggcuagcaacucaacuguuaaaacagcugcucaugcuga

SEQ ID NO: 4158303 - RNA, 62 nt, Human
ucagaugagcaugggcacaagcauauguaaggacacagacauguguuucuccuuguuucuga

SEQ ID NO: 4158304 - RNA, 74 nt, Human
ucagaugaggucaggacauuuuugcuuugugacagauuugggacgcagagaaaagaguucaggcuuuguacuga

SEQ ID NO: 4158305 - RNA, 78 nt, Human
ucagaugauucucauuugcuggcuauaugauguccugcucuggaaaagcauguagcuuagaaaugagacugcauguga

SEQ ID NO: 4158306 - RNA, 56 nt, Human
ucagaugcuaaguuaucagcaggcucagucaugucccucuugauuuuuagcucugg

SEQ ID NO: 4158307 - RNA, 70 nt, Human
ucagaugucucuguuaucucaagucacaagaguguugacuuucuuugcuugcauuagguaacauauuuga

SEQ ID NO: 4158308 - RNA, 87 nt, Human
ucagauguggcuuaacauuugcucuauaacaagcauuuguaugucuugauguacaaauuucauaggcaaauuuuaaaggaacuuuga

SEQ ID NO: 4158309 - RNA, 77 nt, Human
ucagauugucaauuguuuauuguuucuguuugauaccauugagguauuuguuccagagauaaaaauauguaugcuga

SEQ ID NO: 4158310 - RNA, 89 nt, Human
ucagauuuaucucccaagucuggcagaauuaaacaguguguaauacuaacugcuucauuacugacagucugugacuagguauucucuga

SEQ ID NO: 4158311 - RNA, 58 nt, Human
ucagauuugaggcauguguuagauaucucauaggagauauugcauaccaugaaucuga

SEQ ID NO: 4158312 - RNA, 58 nt, Human
ucagcaaaauguggcuagugcugguggugcaugauuacaccaagcacuuuuuuguuga

SEQ ID NO: 4158313 - RNA, 58 nt, Human
ucagcaaccaggggcacaguccaaaagaagcccagacucucacugcucuuggggcuga

SEQ ID NO: 4158314 - RNA, 55 nt, Human
ucagcaagagacuguucucuaaguccacugggugugcugggugcugucucacuga

SEQ ID NO: 4158315 - RNA, 81 nt, Human
ucagcaccgagaaaugucaggguuuuaagcugccacagagaacauuuagcuugaaaauaagaaagacuuucuggaugguga

SEQ ID NO: 4158316 - RNA, 70 nt, Human
ucagcaggcagugggucacaauuaacugaaucaucucaccacugguugauugugaugaggugccaauuga

SEQ ID NO: 4158317 - RNA, 59 nt, Human
ucagcagggagaggagaaugcagaguugccaaacuucacacucucccaauccuugcuga

SEQ ID NO: 4158318 - RNA, 61 nt, Human
ucagcaggucugaggcggggccugacauucugcacggcuggccugcuccgggcgcugcuga

SEQ ID NO: 4158319 - RNA, 66 nt, Human
ucagcaguccuccaggaucaagaaacuacucauccuaaaagcucgagaucacugggaacugcguga

SEQ ID NO: 4158320 - RNA, 58 nt, Human
ucagcaguggcucucaugcagucaauaggauuggagggcgaggagaggccaguguuga

SEQ ID NO: 4158321 - RNA, 126 nt, Human
ucagcaucaucuggacuccuguuagaaacacacauuguugggcccaacaccagaucuuuacugaaacagaaacucuggauuggaguccagcaaucuguguuuaacaaacucugcaggugauucuga

SEQ ID NO: 4158322 - RNA, 56 nt, Human
ucuggugauuuucugucagucuuuggcauuccuuggcuuauagaaacaucaccaga

SEQ ID NO: 4158323 - RNA, 69 nt, Human
ucuggugcaccuuugugcuugcauagcuugcgucuaaagcagcagcaggacauggaggaguaaacugga

SEQ ID NO: 4158324 - RNA, 126 nt, Human
ucuggugccaagcaugugcuggaaaagccaacaggaaaugaaagcuagcuaauuuguaaaauuuucucaugacuuuuauuucucaauguaugcuuucaucgaucucgcagaguucuuggggcugga

SEQ ID NO: 4158325 - RNA, 101 nt, Human
ucugguguugcacaaggcgauuguuaucgcugaaagucuccuugcauucagcacagcuauagggcuuuucugcggugugaauggccugaugucgcaucaga

SEQ ID NO: 4158326 - RNA, 62 nt, Human
ucugguuaggcuugugagguccccguagcuguggcugcugcagaggccucagccuggccgga

SEQ ID NO: 4158327 - RNA, 76 nt, Human
ucugguucccaggagauaagcugaguuuauaauuuuaaggaagggagugaauguagcuugucuuccuggcaccaga

SEQ ID NO: 4158328 - RNA, 86 nt, Human
ucuguaaagcaguguucaggaucugaggccagggaguuugacuuugaccagagauacuguuugggagccuagcacaucuuugugga

SEQ ID NO: 4158329 - RNA, 84 nt, Human
ucuguaauuuuuuuauguugaccaugaaucaugagcuguuuccauagaaacagcuucaucacauggcauagccaguuucacaga

SEQ ID NO: 4158330 - RNA, 107 nt, Human
ucuguacuauuuguugacggacauuuagcuguuuugcauuuuuaucuauugugaauaaugcuagaaugaauagucuuauaaaugacuccuaagacaaauaggcaaga

SEQ ID NO: 4158331 - RNA, 59 nt, Human
ucuguagagaaggggaaaggcagagaccaacucucugagcugccccuuuacuuuguaga

SEQ ID NO: 4158332 - RNA, 61 nt, Human
ucuguagcaguguuccagcauugugccaccagcacagugggagacaggagauaguuauaga

SEQ ID NO: 4158333 - RNA, 59 nt, Human
ucuguagcauucaccagcccugcugcccaccccuuccagagcuggggaauggauauuga

SEQ ID NO: 4158334 - RNA, 98 nt, Human
ucuguagcugccucagccccugaauggagagagaugcuauauguggcuuucuccagcauuuccggggccugaaauggcuaaucuguaagagcuagagg

SEQ ID NO: 4158335 - RNA, 66 nt, Human
ucuguagcuucuauccuaccaugucuugacuuguaaacaguccaggcauaacugauauaagccaga

SEQ ID NO: 4158336 - RNA, 68 nt, Human
ucuguaggaagauauaaaauaucuggaggcgcuuuugcaucuguauguauccccuaucauuuuacaga

SEQ ID NO: 4158337 - RNA, 78 nt, Human
ucuguauacucauuuauccagcuccucuaguuguagacauuuauuuuaaagagagaauuggauaaauugguaaacaga

SEQ ID NO: 4158338 - RNA, 117 nt, Human
ucuguaugaacagauucauucucauuggggaagcugaggcagcuuaucagaguaauuacuacuuuucuugguauaagcugugucagagcccucagugagaacaaauccacuuacaga

SEQ ID NO: 4158339 - RNA, 63 nt, Human
ucuguaugcaucgacucaagucugaagauaagcaagugcuucagaagcgaaagauggagcaga

SEQ ID NO: 4158340 - RNA, 113 nt, Human
ucuguauuuuaaauuuuuaggcaguuucuucuaaggugaacaaugguauuuaccuuuuggguagaacaugacuuauuuuuggaaguauugcuugaguaauauuaagaauuagg

SEQ ID NO: 4158341 - RNA, 130 nt, Human
ucuguauuuugucugguguuauuuccccuuuaaaugcaucuggaagcccagaaaccuaguuucacuauguccucuggagguuuuuaggugauaagaguuuuggagaccuauacagacuuccaauacagga

SEQ ID NO: 4158342 - RNA, 83 nt, Human
ucugucagggcagccuucuguggggagaguaagcccaauugccacauaaucaggcucugccaccuagauuaaugccuuacaga

SEQ ID NO: 4158343 - RNA, 81 nt, Human
ucuguccagugaggugggcugggcucuaugccaggcacaagucaucuguccuccguccccacucccagcuccugaggcagg

SEQ ID NO: 4158344 - RNA, 72 nt, Human
ucuguccaugcauguugucugcugaguucucucaaacauagccagcagucuuucacauagcauuacgauuga

SEQ ID NO: 4158345 - RNA, 130 nt, Human
ucugucccauuccucugcaccucuccgcugcacgugucacacuaaccacgucugcagcuacaacuuaagaagccuaaagauacggucaguguacacaugugcaggggagagugcaaaggaaugggaugga

SEQ ID NO: 4158346 - RNA, 84 nt, Human
ucuguccugauaaagcauucugauagccaggugugguggcucaggccugcauuccuggcauuaugggaggcugaggcggaugga

SEQ ID NO: 4158347 - RNA, 80 nt, Human
ucuguccuugcuuccagcccacacuccagguaguugggacuucagccauguuggggaaggugggcuagaguuuggaaaga

SEQ ID NO: 4158348 - RNA, 75 nt, Human
ucuguccuuguugagcuagggaggaggcuugcucuucaggagagaagccaaacuacugagcaagacaaggagaga

SEQ ID NO: 4158349 - RNA, 122 nt, Human
ucugucgugaccucuggaguuauccucauucagacaguuuucagauucauucacguagacaugauauguguaugucuugaggauaauaaucaagagcuucccccuuuaucaugaauuacaga

SEQ ID NO: 4158350 - RNA, 58 nt, Human
ucugucucaugucaaggcaugcuauuuaaaucuggugacuuuugaaguaugagacagg

SEQ ID NO: 4158351 - RNA, 71 nt, Human
ucugucuccgagagcuguaccaggaugcuugcccacuguauagggcaccuuucugcaaguucugggacuga

SEQ ID NO: 4158352 - RNA, 65 nt, Human
ucugucugacuaccaugaggcaacccugaagauagaagccaugugccuguggguggcagaauaga

SEQ ID NO: 4158353 - RNA, 58 nt, Human
ucugucuucaacaaguguuuacucucaugggggagagagugcugaaugcgagaacaga

SEQ ID NO: 4158354 - RNA, 74 nt, Human
ucugucuuuuuacuauguucaaucuauauaguauauauuuauguaaagaagagaugagaguaaaaaaaggcagg

SEQ ID NO: 4158355 - RNA, 70 nt, Human
ucugugaaagauacuaggcagaggcaagauccuuucucacaagacuuccucuguucccugucaucacuga

SEQ ID NO: 4158356 - RNA, 77 nt, Human
ucugugaaaugagaaucaucuuauucccuaccucacagcaguauugugaggcucacgaacagaagacucaacacaga

SEQ ID NO: 4158357 - RNA, 57 nt, Human
ucugugaccugcugcauuacucuucucaagggcugucccagaggcaccagguauaga

SEQ ID NO: 4158358 - RNA, 55 nt, Human
ucugugaugguauggaaccacuagguggggaacuagcgucaauaucgucaacagg

SEQ ID NO: 4158359 - RNA, 75 nt, Human
ucugugauuuuguauucuuccuuagcaguacaguuggaacagugugcaugaggauaggaauaacuaaaacauuga

SEQ ID NO: 4158360 - RNA, 55 nt, Human
ucugugcagaaucaaggagcuuuacauaacguagcccugugagucaugcggcaga

SEQ ID NO: 4158361 - RNA, 67 nt, Human
ucugugcuccagcagggccacaauuauugcuaucugaaucugaguuguggcaggcaagauguacaga

SEQ ID NO: 4158362 - RNA, 57 nt, Human
ucuguggaguugaggaagguuguaauacuuuacaucuacaacuuaagauuucacaga

SEQ ID NO: 4158363 - RNA, 69 nt, Human
ucugugggaggagguggguuaaguuguaaaguauuauuauacaaagugagcaaccucuuuucccagaga

SEQ ID NO: 4158364 - RNA, 73 nt, Human
ucuguggguagcaaaaaaacuggcaucucccaguaugguccuuggggaucucaguacuuuuggugucuaaagg

SEQ ID NO: 4158365 - RNA, 87 nt, Human
ucugugucaaaaagugucugcaaaaugacagagccaccuugucacaguggcucuuucauuuugcagacacuuuuugccuucuacaga

SEQ ID NO: 4158366 - RNA, 83 nt, Human
ucuguguccagcuuuuaccaaaugagcauuauucaacaaagauaacugccuagacaauugguacaggcuuggaaaacuucaga

SEQ ID NO: 4158367 - RNA, 67 nt, Human
ucugugucucuuccuuucaaguggggaaacagcccauuauccucacugagaccuuggcgacguaaga

SEQ ID NO: 4158368 - RNA, 84 nt, Human
ucugugucuggacugcaaaauaaggaucuuucuauuacacuuucuguccuauuuuucuugcaguccuuuucagcuggacgugga

SEQ ID NO: 4158369 - RNA, 55 nt, Human
ucuguguggccuugggaaaguugcuuaacuucauacuucccaggaccuacucaga

SEQ ID NO: 4158370 - RNA, 65 nt, Human
ucuguguucuuucucuugauucagauaauuuucuucaugaucugaauuacagauggaauuacaga

SEQ ID NO: 4158371 - RNA, 65 nt, Human
ucuguuagucuuuugcaggagaguaaaaagguaauuuacaacuccaguacucaaaugacagcaga

SEQ ID NO: 4158372 - RNA, 65 nt, Human
ucuguuauagacagcaauguguguguuuuucucaacuuaagugagccaauaccaugcuguucaga

SEQ ID NO: 4158373 - RNA, 70 nt, Human
ucuccagagcugcagauugaaggcauauuuucaucugacuuuggugauuauguuuccaaucucucuggga

SEQ ID NO: 4158374 - RNA, 73 nt, Human
ucuccaggaagugcagcugggacuguaggguccccagggacuugcaggauccucugccugauaaucguggaga

SEQ ID NO: 4158375 - RNA, 68 nt, Human
ucuccagggcuccccaacauccaguccagugccugcugcuccaucugaggcuggggggucccuggaga

SEQ ID NO: 4158376 - RNA, 92 nt, Human
ucuccagggcugccuuuucuauucuggaucuguggcaggggcccagccugccuccuggugcaggcaggcaugugacugaggcagcccgggga

SEQ ID NO: 4158377 - RNA, 88 nt, Human
ucuccagucuucucuuaauugcuuaguugcaacuaugcccugauuuggaggggauaaguguacugguaaccuagaggacacugagagg

SEQ ID NO: 4158378 - RNA, 107 nt, Human
ucuccauccaugaggucauuccaaaugaagauuuggauuccaugucacaguccaagggcucagugagcaugccguccaagucacuuggaagccucuccugguggaga

SEQ ID NO: 4158379 - RNA, 78 nt, Human
ucuccaucuccaugaguucaauuguuucagucauuagucccacaaaugagugagaacaugugaagucugucauguaga

SEQ ID NO: 4158380 - RNA, 121 nt, Human
ucuguuugcaaauaucaaucacuuuccaaacuauuauauaagugaucucuuacaauuuaaauacaguuguaagagaucacuuauguaauaguuuggaaggugauugauauuugcaaacaga

SEQ ID NO: 4158381 - RNA, 77 nt, Human
ucuguuugcucauuuuuaggaaggagacucuauuuucuucuuggagauauaguaauauuccugaacucagccacaga

SEQ ID NO: 4158382 - RNA, 60 nt, Human
ucuguuuggaauagcaguaaacauuccaggcauaggagugaauuugcucuuccaggcaga

SEQ ID NO: 4158383 - RNA, 70 nt, Human
ucuguuuuguaaacaucagccacucuauuucucucucagaaguggacuuugaugucuuauaaauugcaga

SEQ ID NO: 4158384 - RNA, 57 nt, Human
ucuguuuugugcuuuguuuucuuuugcuucuuugugccugacaaaaguacagacaga

SEQ ID NO: 4158385 - RNA, 82 nt, Human
ucuguuuuguguccauucuauuuccaaagacaagcuuaaggguuaagcugugguaaaggguagagggaaugccaaaagcaga

SEQ ID NO: 4158386 - RNA, 59 nt, Human
ucuguuuugugucucucugguguuuggugacauaacauaauaagauggcaggaggcaga

SEQ ID NO: 4158387 - RNA, 88 nt, Human
ucuguuuuuaauggauuuacaagauaaccugaugcugugcgguuuguuuacuguagcggcuuuaugguguuuuguaccaguaaacggg

SEQ ID NO: 4158388 - RNA, 85 nt, Human
ucuuaaaagcaugaaggagggaaggagucaggggagccuccucagcuccucagacuuuccuuguccguggucuuucuguguaaga

SEQ ID NO: 4158389 - RNA, 93 nt, Human
ucuuaaacaaauuugguuaacaagcauuucauucugacugaucaguggguauugaucaguggggacgagaaguuuagcuaaccauuuauaagg

SEQ ID NO: 4158390 - RNA, 73 nt, Human
ucuuaaagccacuucauucuagucuauaugagugacauaggggagacacaauggaaugaagggcagacagaga

SEQ ID NO: 4158391 - RNA, 83 nt, Human
ucuuaaccccuacaaaggacugaaacuggcugucagcucuggggcuugccacagucauagcagccuuuguuaacaaguuaaga

SEQ ID NO: 4158392 - RNA, 55 nt, Human
ucuuaacuugaugucucucugcuguacacuacaugcacaggccaugaaguugaga

SEQ ID NO: 4158393 - RNA, 70 nt, Human
ucuuaagagccucucaugagcauuccuaagggaaagauuuuucucuuggaaccucucaugaguccuuaga

SEQ ID NO: 4158394 - RNA, 57 nt, Human
ucuuaagcauuuggcucugucuuccuucaauagaaaagagcugggacuugccugaga

SEQ ID NO: 4158395 - RNA, 60 nt, Human
ucuuaaggcagguaggugccuguagcuuucacuacgcuguaucuacuggugucuuucaga

SEQ ID NO: 4158396 - RNA, 97 nt, Human
ucuuaaguaggagggcagccauugagggauucuaaguaggcgaguaccauaaacaaaaggagagugucuugggauggcugcccuccauccuucaaga

SEQ ID NO: 4158397 - RNA, 116 nt, Human
ucuuaaguguuucuuuuuggaaugggacagacauuuccugauccaauuuguaaacgaagauuaucuguuggcuugaguaaugucugcaucuuucucccaagaagaaggucuuagga

SEQ ID NO: 4158398 - RNA, 84 nt, Human
ucuuaauagauauuccuaaggccaaaaguaucacugagaaguuggagccaaaaucucagggcuuuucuuuugaauucuauaaga

SEQ ID NO: 4158399 - RNA, 77 nt, Human
ucuuaaucauuggcugccuguggaucgcauuguuuagccugagagugcccauggguccagaggugcuaauuuuuaga

SEQ ID NO: 4158400 - RNA, 69 nt, Human
ucuuaaucuccaggcauuucaagagacugaccugagucuugaguaugaaauccugcagaaaaaguaaga

SEQ ID NO: 4158401 - RNA, 64 nt, Human
ucuuaaugaaugugugcuaacguuccuucuggcauaggaauguguaguaaauacacuucaaggg

SEQ ID NO: 4158402 - RNA, 64 nt, Human
ucuuaaugcacuaaacugccuccuuguuacacacagguuccagggcuguaaauuagugcugaga

SEQ ID NO: 4158403 - RNA, 66 nt, Human
ucuuaauguacaauuuuugcuuaggggguuuauuuucucucccaugguuaaaauaauacauuuugg

SEQ ID NO: 4158404 - RNA, 56 nt, Human
ucuuaauuucccuuggguguguaaucuaacauagugacaaguucuggagauuaggg

SEQ ID NO: 4158405 - RNA, 76 nt, Human
ucuuaauuuuuucacuuccaauuuugaaauuucaaguuauaggaaaguuguuaagaauggaaugaggaauuuagga

SEQ ID NO: 4158406 - RNA, 89 nt, Human
ucuuacagaaguucaguagcauaggucaguauagauggaagcacaucuuuucuguuugcuaugucuuugaggaacuucuagucucagga

SEQ ID NO: 4158407 - RNA, 103 nt, Human
ucuuacuguuucaugugauaccuuguucagauuucaaaauaguuguagacuuauccugguuuaacagaugugaaauuuucaagagauuacugacauuccuaga

SEQ ID NO: 4158408 - RNA, 89 nt, Human
ucuuacuugaaaaauuuaaacauuuuucuggaaccugucaugguaacauugaaaggauuaaauaaaugugcuguguuuuuuaaguauga

SEQ ID NO: 4158409 - RNA, 81 nt, Human
ucuuacuugaauauguguauuugguuagccuacuuguuauaagauagaguugacauuuaaguauacaauuaaaaguuagga

SEQ ID NO: 4158410 - RNA, 91 nt, Human
ucuuagaauuugaagugggugaguggagggcauucuacuuugggaagaaugguuggaguuaagccugaaccauuuacucaccauuucuaga

SEQ ID NO: 4158411 - RNA, 74 nt, Human
ucuuagcagaaugaugacuggggaugaagagaccuuuuaugggaaaauucagccagucaucagucuuguaggga

SEQ ID NO: 4158412 - RNA, 130 nt, Human
ucuuagcauccccuaggaacuugcacacccaggucucucgacuucuggaccugcuucuuaccaugccgucuuaagcagucaggagucgcugccuggguucgaguccuaguuaaauuacuuagugcugaga

SEQ ID NO: 4158413 - RNA, 67 nt, Human
ucuuagguucacacacacaaaaagauaagauguagugcaugaucugguugcugugugugaaugagga

SEQ ID NO: 4158414 - RNA, 88 nt, Human
ucuuaguaagggggcccagcacuaaguuggcgcguaaucaauguuugucuaauacaauggaguugggccccguuuuuuacagauaaga

SEQ ID NO: 4158415 - RNA, 91 nt, Human
ucuuaguaggucaaugauuauuuggggugaacauaugcugauuccuauugcuaauguauucaacuucuuaaaaauugcugacuauacuuga

SEQ ID NO: 4158416 - RNA, 74 nt, Human
ucuuagucacuuuggguugucccagcaacaggagacuuaacucugaccauagguaaggagcccagaggacagga

SEQ ID NO: 4158417 - RNA, 111 nt, Human
ucuuagucuuuggaguuaaacugccuggguaagcacuaauauugaucaauuuaacagaauuaaccucauuuguugcuguuaccugaggggaggagagugacaagacaaaga

SEQ ID NO: 4158418 - RNA, 81 nt, Human
ucuuagugggggccugacgcagaagaccucuaguucucccacagugucuucuggggccaggcccgcuguuucucacugagg

SEQ ID NO: 4158419 - RNA, 127 nt, Human
ucuuauauauaacuauaaacuuuccugaggaaugggugauaaauucaaacauagaguuucaagauccaauucaaauguaaauucuuuugaagcccccucagggaaagcuauuaguuugaucuuggga

SEQ ID NO: 4158420 - RNA, 63 nt, Human
ucuuaucuuauaccuaacagccucauuauuacaauagacacuggcugguagguguaaaggaga

SEQ ID NO: 4158421 - RNA, 66 nt, Human
ucuuaugugcaggggcaggagcucagaccuagucuuguggauggugcugccccauugcaaaggagg

SEQ ID NO: 4158422 - RNA, 73 nt, Human
ucuuauguggccauggucagaauauugguauaaauauggugguaaaggcaguucugauuaggucucagaugga

SEQ ID NO: 4158423 - RNA, 78 nt, Human
ucuuauguuauuauaaaacuaugauuugcaaaugugucuguugaaacagucuugcuguauggucagguggcaauaaga

SEQ ID NO: 4158424 - RNA, 71 nt, Human
ucuuauucuucccauuuuaccgauuauaugauuugccuaaggcuauaugcuugggaaaugguagaacuaga

SEQ ID NO: 4158425 - RNA, 59 nt, Human
ucuuauuguucuugugaauaauagucauauguauggcuuuauacuuaagcacaauagga

SEQ ID NO: 4158426 - RNA, 77 nt, Human
ucuuauuuaaauuccugaugaauccgagguuuaaguguaaagagacaagccuuagaggaaaacauuaguuaauaaga

SEQ ID NO: 4158427 - RNA, 58 nt, Human
ucuucaaacccugguuuugugauaggcccgcaaaggauucaugauccaggguugagga

SEQ ID NO: 4158428 - RNA, 79 nt, Human
ucuucaaagucugguugcuaagauagaggcugguuuccuuaaaugccacuuuggaucugauguaaucagcuguggcaga

SEQ ID NO: 4158429 - RNA, 73 nt, Human
ucuucaagcucccaugguuuaugguaagggaagaucuaucuucauuggcuuccauagaugcauaugaugaaga

SEQ ID NO: 4158430 - RNA, 68 nt, Human
ucuucagacuguuguucuuuuggagccacaguccaauggucccagccacagaaacaacauucuggaga

SEQ ID NO: 4158431 - RNA, 57 nt, Human
ucuucagagcauuucugagguagagaguucucugcuuuucacauccugcccugagga

SEQ ID NO: 4158432 - RNA, 70 nt, Human
ucuucagggacagggaucauuugcuucuacaauguaaagguuuauggacauaucucugguccuuuaaaga

SEQ ID NO: 4158433 - RNA, 101 nt, Human
ucuucauccugagcccauugcuagaucagcagaaguauagaggccauuuauuaaaagggccagucguguauuacuguuucuuauggggcaaagagacaaga

SEQ ID NO: 4158434 - RNA, 67 nt, Human
ucuucaugucauucuucagucuucuuuggaagccuuuagccagaacugucacgagugacaaagagga

SEQ ID NO: 4158435 - RNA, 67 nt, Human
ucuucauuacccacagccucucuucaaaauauuaucaauauuuguggguaugcugggaguaagagga

SEQ ID NO: 4158436 - RNA, 58 nt, Human
ucuucauuuccgcuucucuacucucagcagcuagggcuaagaagcugugaaaugaagg

SEQ ID NO: 4158437 - RNA, 59 nt, Human
ucuuccagaugcagaugcuucuuccugaguuuaggagcuuacugucccauuugagaagg

SEQ ID NO: 4158438 - RNA, 72 nt, Human
ucuuccagcuacucuucuggcuggcuuccaguauguucugccaauggaaggcacugggagaagacuggaaga

SEQ ID NO: 4158439 - RNA, 78 nt, Human
ucuuccaggccauugacugcauccucacugcacauacuggauggcuaaaaaggguaugcagucuauggccuggaaaga

SEQ ID NO: 4158440 - RNA, 110 nt, Human
ucuuccaggcccucuugcucaaaauuaccaugugaucaaaacaaauccuaucguugucccagcaggguucauuggucuuaugaauuuggggacagacagugccuggggga

SEQ ID NO: 4158441 - RNA, 59 nt, Human
ucuuccauuucuugcccugucuccauggaccaaacucaacuggcagcaagaagggaggg

SEQ ID NO: 4158442 - RNA, 66 nt, Human
ucuucccagaggaggugccagcuggauauuggaggaugaguaggugguaccugaaugaagggagga

SEQ ID NO: 4158443 - RNA, 65 nt, Human
ucuucccagauuggagggcagggguguaccaugucaccccuaugcgucuuucccaucugggcaga

SEQ ID NO: 4158444 - RNA, 83 nt, Human
ucuuccccacagugcuuuuagcugacugugugauuuggccguucuuuacugcucaaucaugucacuagggacuuuaggaaaga

SEQ ID NO: 4158445 - RNA, 69 nt, Human
ucuuugucuucacugauuaaccaaaugccaauggcccagcagcuuucuuuaacaguugaagaacaagga

SEQ ID NO: 4158446 - RNA, 71 nt, Human
ucuuuguuuauauuucuccucgaacgucuuccugagggcugaagaaguccagagaggcauauuuacaagga

SEQ ID NO: 4158447 - RNA, 129 nt, Human
ucuuuuauccuguucuucuauucuucuaacaugaaauaccauauaaauauccuuguuuggaguuuguuuuuccaggaaggagggcagauauuaaguuuguauguuagacucaagaggggaaaaaguuaa

SEQ ID NO: 4158448 - RNA, 82 nt, Human
ucuuuuaucuagcaaguaacaugcugacuuauguggguagaaucccccagcacagugcaaaauguuucuccuguuagaaaga

SEQ ID NO: 4158449 - RNA, 63 nt, Human
ucuuuuaucuguuguguaacaaucaugcuacugaauguuagauauuacaugacauaugaagga

SEQ ID NO: 4158450 - RNA, 69 nt, Human
ucuuuucaggaauggcucuaguccuauuccuagggauugauuuuaccucagggccagaucuugcaggga

SEQ ID NO: 4158451 - RNA, 94 nt, Human
ucuuuucagucuuggguaugggcagcagcugccauucauuuaaaaacaauguaggaaggagguagagguuaguugcuggccuaagaauuuagga

SEQ ID NO: 4158452 - RNA, 76 nt, Human
ucuuuucauuuucacauucucagcaucuauacaguuuucaucacuuaguagauucugaguauguguuugcuggaga

SEQ ID NO: 4158453 - RNA, 71 nt, Human
ucuuuuccuaucuagaaacagaguuuuacuaaaauaacauuuggaaaauucuuugguuuggucagaaaaga

SEQ ID NO: 4158454 - RNA, 57 nt, Human
ucuuuucuagcuuugaagaagcaagaugcugugacuccuucagcugcuaggaaauga

SEQ ID NO: 4158455 - RNA, 61 nt, Human
ucuuuucuuauaaaaggcaguuugaggauuuuacuuuauuugucuuucuuauaagaauuga

SEQ ID NO: 4158456 - RNA, 104 nt, Human
ucuuuugaaaacaaccuucaggccucucagaggcccaggagucacugggcuggcccagagacucagagaucccuggagguccugagaagggguugguuggagga

SEQ ID NO: 4158457 - RNA, 76 nt, Human
ucuuuugaaaucuuuaguaggaaaauccccuagaggaguccaacuggggcuugcucugcaaaaguguucauaaaga

SEQ ID NO: 4158458 - RNA, 115 nt, Human
ucuuuugauuauauucugaacccaaacaaagcuacucuggccugcagauccaugcuccagugagcuguguagggaaucagagaaaggcaugauugguugaagugaaucacaagga

SEQ ID NO: 4158459 - RNA, 78 nt, Human
ucuuuugcagaagaauacacacugcauucaugacagucaguacaaggaagggaggccguguguauacucuguaauaga

SEQ ID NO: 4158460 - RNA, 61 nt, Human
ucuuuugcagaguguaucuguguaagcauauguaugugugacuugaugcacucugauuaga

SEQ ID NO: 4158461 - RNA, 70 nt, Human
ucuuuugucaucccuuguacaugcacuaccaauguuuaccaucugucucaggggcuuaagugacagaagg

SEQ ID NO: 4158462 - RNA, 65 nt, Human
ucuuuugucucagugucaccuccagcugcaaucauugccagaagguuagugcugggauucuaaga

SEQ ID NO: 4158463 - RNA, 63 nt, Human
ucuuuugugacucuugggucugugaccauugcuggcuacacaauguugccccaggacaaagga

SEQ ID NO: 4158464 - RNA, 68 nt, Human
ucuuuuuauuucuuauguacuucuaucaguuugacuugaaagaaacagguauauugggaaggggaaga

SEQ ID NO: 4158465 - RNA, 60 nt, Human
ucuuuuucaugggugaugaguggguacauagauggcugcacacaguucucaggaaagaga

SEQ ID NO: 4158466 - RNA, 61 nt, Human
ucuuuuuccgaagaacaugugcagccuagaaacagaaagggcaaauguucaggaaaaaaga

SEQ ID NO: 4158467 - RNA, 66 nt, Human
ucuuuuucuuggaaaguuacgggaguaggaggaaaauccugacucugcuguuuacucucuauaaga

SEQ ID NO: 4158468 - RNA, 76 nt, Human
ucuuuuugucuacugagaagcuaugcaaggaggauagcaguuuauuguagucuagcuacuagauagacauggaaga

SEQ ID NO: 4158469 - RNA, 111 nt, Human
ucuuuuuguuggguugauuucccaaguacccugaaguacacagaauucuacuuguugucaaucaauugaguacuuucugagugccagacugagguccccacugcaaggaga

SEQ ID NO: 4158470 - RNA, 58 nt, Human
ugaaaaacacuaauuggaaagcaauacuauuuucugguuuccaauuuguauguuuuca

SEQ ID NO: 4158471 - RNA, 90 nt, Human
ugaaaaaucugcaauacaaagcaugcaguaguagaaaaccguguuccucugaagcacagguauaacgugcauguuguaauggauuuauca

SEQ ID NO: 4158472 - RNA, 88 nt, Human
ugaaaacagacauuuauacucaaauuccugaaucauuucugaucacuacccugagugacaggaugaugagcagggggaaugcuuuuca

SEQ ID NO: 4158473 - RNA, 61 nt, Human
ucuguuggcuugagauuuaauuugcuaagagaaaagcaacugaaguuacuaagguaauaga

SEQ ID NO: 4158474 - RNA, 127 nt, Human
ucuguugggauacuuggauaguauugauucauuuccuauuguggaaacaucuggaauucaguuucuuuaauauaaaggaaugaauucaauggcaucuaaauuuuuuucuauuccuaaccuacuagga

SEQ ID NO: 4158475 - RNA, 55 nt, Human
ucuguugucugaacucccuaaggucaacgcucaagggcuccgggcaggcgaugga

SEQ ID NO: 4158476 - RNA, 71 nt, Human
ucuguugugucuaagcuaguuucaucuuugaagaaaugcaagggaaaaaagcuggcugggagcagaaggga

SEQ ID NO: 4158477 - RNA, 92 nt, Human
ucuguuguuuuaagccacgcaguuuguggacauuuuuuaugcagucuuggaagcuaaaacgauguuuaaaagcucuggcugaaauaggcaga

SEQ ID NO: 4158478 - RNA, 57 nt, Human
ucuguuuaaugggaaugauacuaacuacuucauaggcugucgugagaauuaaacaga

SEQ ID NO: 4158479 - RNA, 58 nt, Human
ucuguuuagauuuccacuguuguugccguaguguauucagcagugugucugagcuaga

SEQ ID NO: 4158480 - RNA, 67 nt, Human
ucuguuuauucacuuugggagagccauucugagaauugaugaauguguuuuaugagagaauauaaga

SEQ ID NO: 4158481 - RNA, 76 nt, Human
ucuguuuccagcauccaaucaucucucucucucugaaguuucccgaaacuuaaggaguaguggugauggcaacaga

SEQ ID NO: 4158482 - RNA, 79 nt, Human
ucuguuucccuaauauguucuaguuccugagaugugccagaaaguuucaccacacaggaaaauuggaauuaaaagcaga

SEQ ID NO: 4158483 - RNA, 56 nt, Human
ucuguuuccucuuguguaaagugaacguaauuccuccuccauaggauggagauaga

SEQ ID NO: 4158484 - RNA, 56 nt, Human
ucuguuuccugcaucuaucucugguaucauccaagucaaguacuacaggaaacaga

SEQ ID NO: 4158485 - RNA, 80 nt, Human
ucuguuucuugaaaagucuugucaagguucccagucugaagacaaauaugugguccucugaaggcuuuucacuuaauaga

SEQ ID NO: 4158486 - RNA, 64 nt, Human
ucuguuugucuggauugcuguguccaacagaaguuuacaacuggccagcaguguggcaagcaga

SEQ ID NO: 4158487 - RNA, 100 nt, Human
ucuuaaaaucaagcugugacauuugauuuacuugguaggcaacggaaaaacacugaauuuuuuuagcacuaagugauaugcuuaaaguuuauuuuacaga

SEQ ID NO: 4158488 - RNA, 87 nt, Human
ucuuaaaccuugcauggagauagccgaaaaauguucacaauugaacugugaccagcugccuggucuaucugcagcagugguucuaga

SEQ ID NO: 4158489 - RNA, 72 nt, Human
ucuuaaacuuugcuguaauucucuaugacaugccuuuuaagaaggauaugagaauagggcaagguccugaga

SEQ ID NO: 4158490 - RNA, 98 nt, Human
ucuuaaagggagaacauuaaugcgagguauuacugacacucagauauuuacuuuuaaauugagaacauguucucuuccuucagaauacaucuuugaga

SEQ ID NO: 4158491 - RNA, 77 nt, Human
ucuuaaaucacauggcuucugucuuggaaauuuuaccuuuaaaagauuauuuaagacaggaaccaggaggcuuggga

SEQ ID NO: 4158492 - RNA, 80 nt, Human
ucuuaaauucauguguuuguugucaagggcaacaauuggguguuugggagcacugaacaacaaauagugaaugaaugaga

SEQ ID NO: 4158493 - RNA, 103 nt, Human
ucuuaacaccaaaaauacuuucagaggaauaguuugaggauuucaguucaaauaucaucaucaaaauccuggaagaucucugugagauuuggaggacuugaga

SEQ ID NO: 4158494 - RNA, 128 nt, Human
ucuuaacugguauaaagaaagccauuuaacugaucaguguuuauuuacagaugguuugacaguccuagaguuuaagcugaaucugaaauagaauuguuggucugggcugcauuuaauuugguggaaga

SEQ ID NO: 4158495 - RNA, 60 nt, Human
ucuuaaguaccuccuuuaucacagauggcucaaaaccugcagggaaggagaugcuuuaga

SEQ ID NO: 4158496 - RNA, 77 nt, Human
ucuuaauauguagcaugcaaaagcugaaggaauaaaauaaacuuucacugacaguucugguuugcagauauauaaga

SEQ ID NO: 4158497 - RNA, 76 nt, Human
ucuuaaugcguucuccugcacuggagggagaagcugcuaaugcaagcucagcccuccugugcagcucguaaugagg

SEQ ID NO: 4158498 - RNA, 57 nt, Human
ucuuaauggagucaguguuucacaaaggagguucccugaaacacucuuuccaugaga

SEQ ID NO: 4158499 - RNA, 86 nt, Human
ucuuaauucagggagguuguaguuggagguuguauagcagaugcaugugacagcaauaacuacuuaagcauacccugagaaugaga

SEQ ID NO: 4158500 - RNA, 92 nt, Human
ucuuaauuucaugcugaagagugugcuuagagagcugcauuaauuuccuucuaauguuguuuuuucauaaaguaugagcaggaaauguguga

SEQ ID NO: 4158501 - RNA, 71 nt, Human
ucuuacaguuuuguaaaccucuccugagugucucccauagucaggagcugugaauacaaagguaaguaaga

SEQ ID NO: 4158502 - RNA, 84 nt, Human
ucuuaccuuuaccuaccuagguccaaucuaaaguuuccgacuuugaggagguaugacuagguacuguaugggaaaaggauagga

SEQ ID NO: 4158503 - RNA, 57 nt, Human
ucuuacucagggauguaggcuugaaccgugguaaauaucaaggacucccugggaaga

SEQ ID NO: 4158504 - RNA, 85 nt, Human
ucuuacuuaaaaccuagucagcacugcugugauuuaagccccacuauaccagguuccccuccagcccugcugguuuugggcaagg

SEQ ID NO: 4158505 - RNA, 60 nt, Human
ucuuagaaacuguaucgauuaggguuggauucccuugugaucauuuuacuguuucaaaga

SEQ ID NO: 4158506 - RNA, 64 nt, Human
ucuuagaaauccagggaccuacucuacuuauccaggaccggauuuuagaaccuggauuucagga

SEQ ID NO: 4158507 - RNA, 79 nt, Human
ucuuagaguggcucugcugggcacagaaggagggcucugaaacucucccgaauugugcucccagcugggcucuccugga

SEQ ID NO: 4158508 - RNA, 57 nt, Human
ucuuagaugaauaaaaaguuauguuuaaaugccuguaagggugacuauucacugaga

SEQ ID NO: 4158509 - RNA, 62 nt, Human
ucuuagcaauaagagggaauauaguaauacuuucacuccuauagcccccuuuuauucuaaga

SEQ ID NO: 4158510 - RNA, 84 nt, Human
ucuuagcaucguaucuuguuaucugaaccaaaauuauauuaaaaugguauaucucaagguaguaguagcuagcgaauguuaaga

SEQ ID NO: 4158511 - RNA, 62 nt, Human
ucuuaggcagccuucuguuauagcacaucaucuccaccgcuacagaggcauacagcuuaagg

SEQ ID NO: 4158512 - RNA, 63 nt, Human
ucuuaggccugaggcaggacagagaggagcaggguuccuugacacugucacucaggccagaga

SEQ ID NO: 4158513 - RNA, 81 nt, Human
ucuuaggguugggguaaggaaauauggcuucucaggauuauucaagcucagaagcccugucacccugacuucaagcucaga

SEQ ID NO: 4158514 - RNA, 77 nt, Human
ucuuaguauuuucacauaugguuguugauugcagagcaacaugcuggccucagccuacaguguagagcagacuaaga

SEQ ID NO: 4158515 - RNA, 86 nt, Human
ucuuaguuauuauuucucuccuugcuaaauggaggcaauauuuuaaaaaccucaauagcaccacuggugggaaaaacuaacuggga

SEQ ID NO: 4158516 - RNA, 100 nt, Human
ucuuaguuauugggaauaaaguuggagugaacaugagauugucgaugucuguuugauguaccaauuuucaauuccuucagauauauacccaaaacugaga

SEQ ID NO: 4158517 - RNA, 57 nt, Human
ucuuaguuuugccccuuugaagccacaggaguggcuucccaaggagccaggauguga

SEQ ID NO: 4158518 - RNA, 77 nt, Human
ucuuauagccuauuugccucuuuuucuagauugccuuacuuaauucucuggcgggaaugaggcagauagauaaaaga

SEQ ID NO: 4158519 - RNA, 89 nt, Human
uccaaauagccauccuguggauguuggcuucuuucccaagcuacccugugggagagugcucaaugugcaaaguggcuauggcaucagga

SEQ ID NO: 4158520 - RNA, 72 nt, Human
uccaaaucuuugagugacauagugaaaaaucagauuuacauuugaguuucaguucugucauuuauagcugga

SEQ ID NO: 4158521 - RNA, 120 nt, Human
uccaacagaacccuggaggcaggaagguuuggaaccaagguucuauagcaaaaucuguggggguuucaaauggauguguuauagaggcuugcauuacuucuggugucucccgggguugga

SEQ ID NO: 4158522 - RNA, 55 nt, Human
uccaacauuugagcaucuacuaaguguaaagauauacuaaaugccagauguaggg

SEQ ID NO: 4158523 - RNA, 71 nt, Human
uccaacccagcuagcuucccugcagugcuggggcugcugagcaucaaacgagaaguuugcuugguguuggg

SEQ ID NO: 4158524 - RNA, 72 nt, Human
uccaaccuaaguuaguucagccuaguucugacuauaacaaacuugguucaaagggauucaauuuagguuaga

SEQ ID NO: 4158525 - RNA, 87 nt, Human
uccaacugauuuuaauuuagagaauuagaacaguacucaguuugacagauugauguauuuauuuucuaaaugacccaucuguuguga

SEQ ID NO: 4158526 - RNA, 57 nt, Human
uccaacuucugcaaucaguuugaaucuauauucugaaucagaaaagcaggacuugga

SEQ ID NO: 4158527 - RNA, 63 nt, Human
uccaagaacaugaaccucuucuaacuccuuccagcauggcaagaguugagucuucaucuuggg

SEQ ID NO: 4158528 - RNA, 67 nt, Human
uccaagaagcucagcaaacaucagcuuuuccuagcucuguguccuccucugcuuggggcaucuuggg

SEQ ID NO: 4158529 - RNA, 61 nt, Human
uccaagaucaaggugucagcagguuugauuucuccugaggacugacucuccuuggcuugga

SEQ ID NO: 4158530 - RNA, 57 nt, Human
uccaagcuuuccaugcccucacccugacaugugcagggguggcauagagggugugga

SEQ ID NO: 4158531 - RNA, 68 nt, Human
uccaaggacgcuggaccccugcuguaacaagacacagaucacacgggagggguucucagccuuaagga

SEQ ID NO: 4158532 - RNA, 62 nt, Human
uccaagggcagcagccauagcccaccuccaccccaugagggccuggugccuguuguccugga

SEQ ID NO: 4158533 - RNA, 55 nt, Human
uccaaguaucugccucuguuggauuauuuucccccaaaagagacugauucuugga

SEQ ID NO: 4158534 - RNA, 86 nt, Human
uccaagucuuugcuauugugaauagugccgcaauaaacauacgugugcaugugucuuuauagcagcaugauuuauaguccuuuggg

SEQ ID NO: 4158535 - RNA, 64 nt, Human
uccaaguggccaagaaaauagaugcauugguacuuuuccaguucuuucacuugagucacucaga

SEQ ID NO: 4158536 - RNA, 78 nt, Human
uccaaguggcuucccaaugugcuaguuucugggcugacagucaauuccaggcccuaggacuuuggggggaaauuagga

SEQ ID NO: 4158537 - RNA, 124 nt, Human
ucuggauaugucuugaauaauuuugacugagauuaggggaaggauacauagaucucugaagauuuucuuuggucauuguucuuuucugugauucuaaaugcacuuuauuuuccugguguccaga

SEQ ID NO: 4158538 - RNA, 100 nt, Human
ucuggaucagggugcuucgcuuacaucugcacuccaggacaggguuaugaauccuuccuguccuguggaccugaggacguugaaggacccucuuuucaga

SEQ ID NO: 4158539 - RNA, 57 nt, Human
ucuggauccaaagcucuuucauggggacguccucuuccccucuuggcuugguccaga

SEQ ID NO: 4158540 - RNA, 66 nt, Human
ucuggaugacagaauggucauauuauugcuugauuugaagaagagcaccauugacuaucugccgga

SEQ ID NO: 4158541 - RNA, 69 nt, Human
ucuggaugaggcucucaacaccuugaggaaccaaagguaccagacaggcaggugagagcuccauuuaga

SEQ ID NO: 4158542 - RNA, 61 nt, Human
ucuggaugggaugaggcaacaaaucggugacuuuccgccacuccguccccauccaucuaga

SEQ ID NO: 4158543 - RNA, 111 nt, Human
ucuggcaagaaugugcggccacaggauucacagggcagcagcugagccugggcacucugaaaugcagccucguuaguugccugaagacuguaggacccacugcugcugaga

SEQ ID NO: 4158544 - RNA, 78 nt, Human
ucuggcagagauauccaucccagagccuuccccuguccuuguaccguggcucacauaugauguugugucucuguuaga

SEQ ID NO: 4158545 - RNA, 60 nt, Human
ucuggcaguugccgcuucagucuuggccuuagccucaucuugaaguggguagcuggcggg

SEQ ID NO: 4158546 - RNA, 75 nt, Human
ucuggcauguaucuggcucucaacaaauauuuauugaauuagcaaguaaaugaauagagaucagauucugcuuga

SEQ ID NO: 4158547 - RNA, 62 nt, Human
ucuggcauuacaugugcaaaagagaggaguagcuucucaugugguacagugguaagcuauga

SEQ ID NO: 4158548 - RNA, 72 nt, Human
ucuggccaacccucaaguuguauggaccacuauaccuuucacccuauacaguugagggagauugguuccagg

SEQ ID NO: 4158549 - RNA, 81 nt, Human
ucuggccacauggucaugcugagcuacaaaggagacugggcaauacagccuuuguucuuaguaucugugugcuuagcugga

SEQ ID NO: 4158550 - RNA, 60 nt, Human
ucuggcccaaguuuucggugaggacuugacuuggguuaaaaucauccacuuggguccgga

SEQ ID NO: 4158551 - RNA, 65 nt, Human
ucuggccuugccugcugcucugcugggaagagcccaaagcgacagaaaccaaggacaaggccagg

SEQ ID NO: 4158552 - RNA, 89 nt, Human
ucuggcuagggcguggccugggaggugacuggcgccguagguaugguggcaccugggugccuuccugccagccgcaacccuggacugga

SEQ ID NO: 4158553 - RNA, 73 nt, Human
ucuggcucacuucaggcuucacgcaguucaagccugagagcuguuagagaaagugaggccuaacugggcuaga

SEQ ID NO: 4158554 - RNA, 70 nt, Human
ucugggaaagcagggaguauggugggacuuugaauccaaagucccuguacuuuccacugcccuaccuaga

SEQ ID NO: 4158555 - RNA, 57 nt, Human
ucugggaacgaaggcuaauauggcucaaaucccaaacaguccuacauuguuccuagg

SEQ ID NO: 4158556 - RNA, 81 nt, Human
ucugggaagacuuccuggcguagcugacauuuggccauuugagccgaguaggaggugaauaugucgggauggcauccuagg

SEQ ID NO: 4158557 - RNA, 64 nt, Human
ucugggaagggauguaaacaugaauaagaaauggucguugcacauguuuuuaucucaaaccaga

SEQ ID NO: 4158558 - RNA, 75 nt, Human
ucugggaaucuucaggaugauuaaagucccucucuagccaguugcaaugacucuaaguccuagaugauucacaga

SEQ ID NO: 4158559 - RNA, 75 nt, Human
ucugggagaccuucuggugcagaccaugucuuggcuauaacuucaagauccagucaaaauuaguaagguccaaga

SEQ ID NO: 4158560 - RNA, 58 nt, Human
ucugggagacuguguugaccaacuucuuggcaaaguaaacuaccacuguuucaccaga

SEQ ID NO: 4158561 - RNA, 81 nt, Human
ucugggagggguagcugaauugugggagaccuagguggacuugacuuggcuuuccugcuacucugcgucuccuucucaaga

SEQ ID NO: 4158562 - RNA, 73 nt, Human
ucugggaucagaggggagagaccagacccaagugggugcacaggugucuaauucucacccccugcauugcagg

SEQ ID NO: 4158563 - RNA, 79 nt, Human
ucugggauuggucagggccagggcuccauuuccuuuaaaauguaaauugugcagcucugcucuuauucucaucaccagg

SEQ ID NO: 4158564 - RNA, 56 nt, Human
ucugggcaacaacuugcaaaugguuuaauguuuuccaaaugcagggcugcugcgga

SEQ ID NO: 4158565 - RNA, 127 nt, Human
ucugggcagggcagaccuggcugcaagguggggccuggggcuggguuggugcugggguuuccccuucucugccaaaccauccaucuccaggcugcuugugacuggagugaguccuucccugcccagg

SEQ ID NO: 4158566 - RNA, 73 nt, Human
ucugggcagugggggccagagggagguguaguguuaacgccccaguacuucuagccugccccuugugcucaga

SEQ ID NO: 4158567 - RNA, 73 nt, Human
ucugggccccucccugccuccgcagccccacccuucccaccccuggguggcccggaaaggacuagggcucaga

SEQ ID NO: 4158568 - RNA, 63 nt, Human
ucugggccgcugcguuccaugagaacuguuuuauugagagggaugguauguaguggauugaga

SEQ ID NO: 4158569 - RNA, 78 nt, Human
ucugggccuccuuuccauucagagagcgcuuggucaagcaauuauaguccaagauccuuccgauggagugagcccaga

SEQ ID NO: 4158570 - RNA, 66 nt, Human
ucuggggagugccuaaguggaagugcuuauucuccugcugccgcugcucacaggcaucuccccaga

SEQ ID NO: 4158571 - RNA, 62 nt, Human
ucugggggugguaggcacaggcugggguaauucucagaggugcccuggcaucuuucccaaga

SEQ ID NO: 4158572 - RNA, 87 nt, Human
ucuggggugcacagcacaugaauugaugccaagugcucucagauguacuaggaggaggugcuuggcuccauuuuuggugcccucaga

SEQ ID NO: 4158573 - RNA, 83 nt, Human
ucuggguacacaauggcuagcauguaaaauaucacaguaaauuuauuacuagauaauuauaggcuaagccacuugaccucaga

SEQ ID NO: 4158574 - RNA, 66 nt, Human
ucuggguacuugcaagauuuucuccuuaucuuugguuuuuaggaauuuaauuaugaugugccuaga

SEQ ID NO: 4158575 - RNA, 61 nt, Human
ucugggugguucuaacuguugaugcgacaacggaucagagaaaagagagaucacugccaga

SEQ ID NO: 4158576 - RNA, 89 nt, Human
ucuggguucaaguagagaugggucucccuuagcaccuuugccuucuucacacaagggcuaaucugccacccaugucuaucgaccucaga

SEQ ID NO: 4158577 - RNA, 109 nt, Human
ucuggguuccagccacaggggccagcccaggcagggcucaaggaaccugcuuucugggugugcaagguccuuggguccuggccaucugaacccccucugagagccuaga

SEQ ID NO: 4158578 - RNA, 76 nt, Human
ucuggguuguuggagaggaggacuagcccuaggccagguggcugaggcucaauccccuucugacagucacuccaga

SEQ ID NO: 4158579 - RNA, 66 nt, Human
ucuggucagcucucuuauccaugaggugaaaaaaaugcaccuuauaucauaggaguguuggaaaga

SEQ ID NO: 4158580 - RNA, 69 nt, Human
ucuggucaugacaguuuugaaauguagucuauuuuuuuaaauacuuugcauggaaaauggucauacaga

SEQ ID NO: 4158581 - RNA, 65 nt, Human
ucuggucauuaauucuuaccuuuaagcuuacugaaaagauaaaggccuaguaaguugagacugga

SEQ ID NO: 4158582 - RNA, 101 nt, Human
ucugguccauuaguccuuucagauuuuguuaauacccacaccagaggcugagugggaaaaagagagguguuaacaaagauugaaaugacuaauggacgaga

SEQ ID NO: 4158583 - RNA, 65 nt, Human
ucuggucccagcccugggucccugcccuggccccuccucgccagcguggccaaggguggagcagg

SEQ ID NO: 4158584 - RNA, 60 nt, Human
ucuggucuccaggaguggugguagaaugugguuccuaagcaugcagauucuggagccaga

SEQ ID NO: 4158585 - RNA, 59 nt, Human
ucuggucuuuauccuaaaagcaaaaagaagccugaaaaguuuuaagcauagaggccaga

SEQ ID NO: 4158586 - RNA, 62 nt, Human
ucuggugacauuaucauuagaauagugcaucuauaacuuaacuuuuugguaagguuaccaga

SEQ ID NO: 4158587 - RNA, 66 nt, Human
ucugguggagaagccuaggauuucaacuuuuugucagaggauuccuguugggacagcuuuaccaga

SEQ ID NO: 4158588 - RNA, 75 nt, Human
ucugguucaucuucauuuuauagcaucuguguucuguuuggaaguacagaguauucuauugauggaaugaaaaga

SEQ ID NO: 4158589 - RNA, 68 nt, Human
ucugguugucuucaccuaagucacaggaugcagagccaucacuggucaggaagguggggacagacaga

SEQ ID NO: 4158590 - RNA, 65 nt, Human
ucuguaaauuaggacauuaaaaaucaugucaggagaauugacagaaauaguucuuaauuuaugga

SEQ ID NO: 4158591 - RNA, 81 nt, Human
ucuguaacugcauuugguggaucgugcugaaauacaucgcauaggcuuguaaacucaguauguuuuacuuccaucuacaga

SEQ ID NO: 4158592 - RNA, 89 nt, Human
ucuguaaguuguagaaguuucccaggugcugcauauuaguccuggacuccacauugccauuugggaauuauuugccuaauuuuaacaga

SEQ ID NO: 4158593 - RNA, 60 nt, Human
ucuguacaagaaggaaaacuagcaauuuccauuuggcugaggauugcccuuguuuacaga

SEQ ID NO: 4158594 - RNA, 72 nt, Human
ucuuagcagcaucuggauucuuuggucccuggcuaaccuugccagagaggagacuuauccagauugguaaga

SEQ ID NO: 4158595 - RNA, 58 nt, Human
ucuuagcauuucauaacaacugugaccaauuuuuauuauguaguuggaaguguuaaga

SEQ ID NO: 4158596 - RNA, 55 nt, Human
ucuuagcccugggggaaggaggaagccuccaaaccaccccucccucagcuaaaga

SEQ ID NO: 4158597 - RNA, 91 nt, Human
ucuugugaacuuugcuuaguuaggaaacaaaguuguucauguaugcguagaauaaauaguauguccugguauuugaguuugaguuacgaga

SEQ ID NO: 4158598 - RNA, 121 nt, Human
ucuugugagucugauuuaugcuuucaggaaaucauagugugcuaagaugaagacuugugucccaaaucaacaggaauuauaguaguauuugucuuuucaagaggcaucauucaaccaagga

SEQ ID NO: 4158599 - RNA, 83 nt, Human
ucuuguguaguauuucucaacugcggcaaugaaaauaaaacuugcaaccguguggcgcaggcuuuagaaucugcuacaauaga

SEQ ID NO: 4158600 - RNA, 112 nt, Human
ucuuguguuggaggcccggaacaucuggagcacuuccagaccugggcucaccaugccuuggaucugaguccuggcagggucuaggucuaggcuccugggacucccagcagga

SEQ ID NO: 4158601 - RNA, 71 nt, Human
ucuuguguuuuauugcuggccaccuguagccaggcacugugcaggaugaugggauccagcaauguacaaga

SEQ ID NO: 4158602 - RNA, 69 nt, Human
ucuuguuaaagguuaaaggugaaagugaauuuuaaugacuguaguuuugauuugaaaccuuuggcaaga

SEQ ID NO: 4158603 - RNA, 62 nt, Human
ucuuguucauuucugugucuucggugucuagaacaggccuggcacaugauagaugcucaaga

SEQ ID NO: 4158604 - RNA, 73 nt, Human
ucuuguuuccaguuugagguuucaagauguggauaccacauuuuaaagugagaccugaaaccaucagucagga

SEQ ID NO: 4158605 - RNA, 65 nt, Human
ucuuguuuuucccauaguguugcagccuucucugagccacacugcuguaucacugcugaacaaga

SEQ ID NO: 4158606 - RNA, 102 nt, Human
ucuuuaaaucaauagagcuuugucucuuuuucucuuguucagaugaauuuccaauuggaaaugucauuuaaagacaaagaaagagcucugaugacuuaagga

SEQ ID NO: 4158607 - RNA, 71 nt, Human
ucuuuaagguaaagcauuucacacaaaaagugaacauugauuuccacugagugaagacuuugccuuuaaga

SEQ ID NO: 4158608 - RNA, 72 nt, Human
ucuuuaagguaagggcuguagacaagauugcuggacucgaacagcaaacuaauugcaguucuggauugagga

SEQ ID NO: 4158609 - RNA, 79 nt, Human
ucuuuaaguaaagugugcauggucaaauauauuuucgaaauauguagcuaaaacugugcacgacuacucagcuuaaaga

SEQ ID NO: 4158610 - RNA, 59 nt, Human
ucuuuacagaaggaacacuacucaguuuucauugaauggagggguuuuucugucaagga

SEQ ID NO: 4158611 - RNA, 80 nt, Human
ucuuuacagagguaaucaaguuaaaaugaggucguuagaaugggccccaauucagugugacugauggcuuuaugagaaga

SEQ ID NO: 4158612 - RNA, 55 nt, Human
ucuuuacaucacaauuguauggaacagagaccacccauauaauggauggaagaga

SEQ ID NO: 4158613 - RNA, 70 nt, Human
ucuuuacugugguuuggccaaugacugcuguuuuuaacaugccaguuccuaugggcaaaacacaaaaaga

SEQ ID NO: 4158614 - RNA, 78 nt, Human
ucuuuacuuuucacaauccuguaagagucaggcacagauacuuugcuucagaccugaaaggaaaaagagaagcaaaga

SEQ ID NO: 4158615 - RNA, 67 nt, Human
ucuuuagaguugguccccugugagccaugcaaggcuggcuuuucacaggaggauaagcccuuccaga

SEQ ID NO: 4158616 - RNA, 120 nt, Human
ucuuuagguuuaggaggagauacuaagauacuggauguuuauccuaucuuaguuugguuggaguaauaagagagaagaagaggguggacuuuggcuuuucaguguuuuuuccccuaaaga

SEQ ID NO: 4158617 - RNA, 71 nt, Human
ucuuuaguuuuccuuugggacuuucaggauuaguugauccagaaggcaaacaaaaggauuucgauagaaga

SEQ ID NO: 4158618 - RNA, 77 nt, Human
ucuuuccaaaccucaaauaauuaauuuauacacaucucagaagaaggugaugauuaucuguuuuauaggugggaaga

SEQ ID NO: 4158619 - RNA, 59 nt, Human
ucuuuccaaggacucuguagcagcccagccuaucuaggugcuaagugcuccugggaaga

SEQ ID NO: 4158620 - RNA, 76 nt, Human
ucuuuccauauuguacucuuuggaggaaagucacacauaugugcagcccacucuuaaggaaugcagaaugggaaga

SEQ ID NO: 4158621 - RNA, 59 nt, Human
ucuuucccagugauuaaggcagugguguugggcauuggaugcugggcauuggaggagga

SEQ ID NO: 4158622 - RNA, 93 nt, Human
ucuuuccuacccccuagcuccacuccuuaugccagacgguuccaaaacuaaggccagcugacugaguggggauguggagcugaugaagaaaga

SEQ ID NO: 4158623 - RNA, 65 nt, Human
ucuuuccucucaggcuugggucguggcauggcuauuuaugccuuucugaucuugaaguggaauga

SEQ ID NO: 4158624 - RNA, 109 nt, Human
ucuuuccuuggugcaggaaggcagucuuuguuacauacagcagaacauagguuaauguggagauguguucugcuuuguguuaauagcuuuaagcauuguggaggaaagg

SEQ ID NO: 4158625 - RNA, 70 nt, Human
ucuuucggcauuuguauagagauuggugcugucccccauuagcagccagagaugugaaaaugccggagga

SEQ ID NO: 4158626 - RNA, 85 nt, Human
ucuuucuaaucuucaguguccucauuugugagauggggacaguuccaauacauaguacagagggcuacugguugauuaaaugaga

SEQ ID NO: 4158627 - RNA, 57 nt, Human
ucuuucuaaugguucuugaccuuuaaagucaaggaagguuauuuuugcuuagaaaga

SEQ ID NO: 4158628 - RNA, 107 nt, Human
ucuuucuagcuuugcauauaggaauguaauucaaauuucagaaaggcuggggcugaauggcucuuuguucugcauuuaaaauauuacuacaguguucacuggaaaga

SEQ ID NO: 4158629 - RNA, 69 nt, Human
ucuuucuaguaaaccacacuaucuuccuauccuggcccuagggcuaaaugaaguauagugggagaaaga

SEQ ID NO: 4158630 - RNA, 93 nt, Human
ucuuucucguguuucccuucauugcuauuucauguuccuauggccggguucuccuugcugucuaccacaugaaaucugcagaagggaggaaga

SEQ ID NO: 4158631 - RNA, 60 nt, Human
ucuuucugaagucuucuaacagaugauuguucuaagucaucauugacuugugcagagaga

SEQ ID NO: 4158632 - RNA, 78 nt, Human
ucuuucugagcuuuuuuagguaagacccaggcaauagccuaggcuauggugggguuccuggagagucuguaagaaaga

SEQ ID NO: 4158633 - RNA, 105 nt, Human
ucuuucugcaaaaucgaagcuaucuuugaugacuaaugcuuugaaacuaucucuguguugguuauaaagcucuaguguuuuggauaauuuuagucaaaagaaaga

SEQ ID NO: 4158634 - RNA, 77 nt, Human
ucuuucuucuggaacaaguggccuugcaagacacuucacucccuguuuuggcaaacacacuuguucugugagagcga

SEQ ID NO: 4158635 - RNA, 55 nt, Human
ucuuugacugccguucucgaccacguaaagugccagucaucgccggcagcaaaga

SEQ ID NO: 4158636 - RNA, 76 nt, Human
ucuuugaggacuaacuuggcagacgcagccaggugugaacagcgcuuauguggcugccgcggugcuuccuggaaga

SEQ ID NO: 4158637 - RNA, 112 nt, Human
ucuuugaggaguaguucaggugacuaccucaugauuaauggcuugccuuuucuguggaaugucaaggcaagcagucagucuaugaggacuucaguuguuuauucuguaaaga

SEQ ID NO: 4158638 - RNA, 66 nt, Human
ucuuugaggauguagaugugagcuucacccaggaggagugggcuuugcuggauccuucccagaaga

SEQ ID NO: 4158639 - RNA, 56 nt, Human
ucuuugaugggagaucugagaggcaugguggcauggcuccaugucugccacaaaga

SEQ ID NO: 4158640 - RNA, 99 nt, Human
ucuuugcagguggaagguggacauuuguccaggauugcgggcugaggacccuggaggagccuccccgaaguccucacucuccaccuucccacccaggga

SEQ ID NO: 4158641 - RNA, 113 nt, Human
ucuuugccauugcugugcuagaaacugguggugaaugcagaguauggugcaccucaguguguguuuaugcagcguuucaccacccacuguuccuugucaguaauugaaagaga

SEQ ID NO: 4158642 - RNA, 61 nt, Human
ucuuugcuaauuagaauugaaccagcaacaucauuugcacaaucacuucuguuagcaugga

SEQ ID NO: 4158643 - RNA, 89 nt, Human
ucuuugcuauugugaauagugccgcaauaaacuuacgggugcaugugucuuuguagcagcaugauuuauaauccuuuaaaaagucagga

SEQ ID NO: 4158644 - RNA, 61 nt, Human
ucuuugcuccacacucuagagacgaggaagggcucacucuuggauuuuaauggaucaaaga

SEQ ID NO: 4158645 - RNA, 69 nt, Human
ucuuugcugguggcauugugggcuuuggugccauauaaccccagagaggcugugcccaccaggcaagga

SEQ ID NO: 4158646 - RNA, 70 nt, Human
ucuuuggcaugcauauccugaauuggguuauugaauauaaaucuagccuuguacaauggaugccagauga

SEQ ID NO: 4158647 - RNA, 80 nt, Human
ucuuugggcuuaaggccagugugcuuuuaaggaacaaugcauuccaacagagagccugcaucuagccucagagcccuaga

SEQ ID NO: 4158648 - RNA, 71 nt, Human
ucuuuggggagacuuggauauagcuaugaaguuauguucauuuagcuguuucuaaguguuguuuccaugga

SEQ ID NO: 4158649 - RNA, 68 nt, Human
ucuuuggggcaugauuagauuaugaggguggagcccucaugaauaggcuuaaugcccuuauaaaaaga

SEQ ID NO: 4158650 - RNA, 91 nt, Human
ucuuuggucuucucccagggcugugguguucugggaagagcuacaccugcugucucaccucugccagaagccagggucuggagaagaaaga

SEQ ID NO: 4158651 - RNA, 62 nt, Human
ucuuuguacuuucuggcuguccuaacuccggcauccaucguuccaaaagaagugugcaggga

SEQ ID NO: 4158652 - RNA, 71 nt, Human
ucuuuguccuguaacauuaggggccgugguuuuaaucuaaggaauuacaguaaaugcuacaggcacaagga

SEQ ID NO: 4158653 - RNA, 78 nt, Human
ucuuugugaaaucuucuagguauggcauucuuuuugcuggggacaggaggagcucuugaugcuugagggagucuugga

SEQ ID NO: 4158654 - RNA, 55 nt, Human
ucuuugugauaguacuagaaucuaaaucaguuugauucuagcauacuuacaagga

SEQ ID NO: 4158655 - RNA, 62 nt, Human
ucuuuguggcgggcuuaaauacugauccuacaaaaggagcuaaaauuaggcugucauaugga

SEQ ID NO: 4158656 - RNA, 55 nt, Human
ucuuugugucacuggcauuguuuuggugccccagcaaaggcuagagacacaggga

SEQ ID NO: 4158657 - RNA, 81 nt, Human
ucuuuguuggcuuucucuguaucugaaugagcucagagccucuuaccaucucauuuaagaugcuagaaggguccauacuga

SEQ ID NO: 4158658 - RNA, 91 nt, Human
ucuuuguuuugggaaauaucuugcacaugcuauuuauguuuuugaaaaaaaucaaugcaacaaauugugugcaauaugcuccuuagcuaga

SEQ ID NO: 4158659 - RNA, 109 nt, Human
ucuuuuaaguaaucauuuacaacuguuggagucuaugcaacuuuuagugggagugauuaguaaaugcacuuacacuuuaaauccagcuuguuuccuaagauuuaaagga

SEQ ID NO: 4158660 - RNA, 70 nt, Human
ucuuuuaauacgaauccuguggaugaaugucugagcccuuuaagauuaucagacaaccuaggguaaaaga

SEQ ID NO: 4158661 - RNA, 90 nt, Human
ucuuuuacaauuacuuacaguagugaagagcuugcagugauaugggguaaucagugaacacagaucuuuauacuguaauaaugaaugaga

SEQ ID NO: 4158662 - RNA, 80 nt, Human
ucuuuuacacagccuguaaugaugacuucagcugugguuucugaaguuaacucauugaugauuacaguguuuggggagga

SEQ ID NO: 4158663 - RNA, 128 nt, Human
ucuuuuagcacuguuaagguuuauuauuaacgcugcacuuauuaaggagacaguugguccauaaauauuucaccuuacuaagcuguguacaagucguugguuuuaaacucagauaggguuuaacaaga

SEQ ID NO: 4158664 - RNA, 72 nt, Human
uccaauaacuauuggcugauugauuuccuauguaucugaagaugcauuuuaaagggucagcugaguuaugga

SEQ ID NO: 4158665 - RNA, 66 nt, Human
uccaauauccuguccauccucccacuggcugaaccugccagaggccaguggacaagggcccgugga

SEQ ID NO: 4158666 - RNA, 64 nt, Human
uccaaugucaccaguuuccaaauuugacucugacaugggacagaggagacuggugacagauggg

SEQ ID NO: 4158667 - RNA, 69 nt, Human
ugaaguuuuuccagacaagucccaucuaacaauauucuagacaggucgggcuucucucagaaacuauca

SEQ ID NO: 4158668 - RNA, 90 nt, Human
ugaauaaaucuugucuuucacucgccucugccuuugcguagaggauaccugcugugcaaaggugaugugagaaagucaggucuaaauuca

SEQ ID NO: 4158669 - RNA, 65 nt, Human
ugaauaauuaugggaguccuaaaagcccacaguugggcggacuagacggcugcuaugauuaagca

SEQ ID NO: 4158670 - RNA, 72 nt, Human
ugaauaugauacuuuggagacuugaguauauuauuuugcuuaaguaaugcaaaugugugcauuuauuauuca

SEQ ID NO: 4158671 - RNA, 62 nt, Human
ugaauaugugcagguguuaguacuucugcuaguuggaguuguaacaagucugcauacauuca

SEQ ID NO: 4158672 - RNA, 91 nt, Human
ugaauauuagguuggugcaaaaguaauugugguuuuugcuguuaucugcaauggcaaaaaaugcauuacuuuugcaccaaccugaaauuua

SEQ ID NO: 4158673 - RNA, 94 nt, Human
ugaauauuagugaacauuagugaacaucagauuacaugagagcaaaucuucucgagagcucuaauaguccgugauguacugguucauccauuca

SEQ ID NO: 4158674 - RNA, 68 nt, Human
ugaaucaauugucuuaagacaugaaguagaucccaaacugcauuuugucuuucugaaaauugaauuca

SEQ ID NO: 4158675 - RNA, 56 nt, Human
ugaaucacgguguuauuaaagcucgaccaucugguucagcagcaacuguugauuca

SEQ ID NO: 4158676 - RNA, 129 nt, Human
ugaaucagguugaacuugggguugacguguaugucuagguguccauauauguguguaaauguauguguguguguguauauauauauauaugaaucuauacaauggggucuccuguacuaaucuaacaua

SEQ ID NO: 4158677 - RNA, 66 nt, Human
ugaaucaucuugaaagucuauguuuuggguuguuuuuuccagcagccugaugaucuggguuguuca

SEQ ID NO: 4158678 - RNA, 78 nt, Human
ugaauccagauaaauagauagauaaacucuauguccagaaccaaggagucuauuuugguugucuauugucuggaucca

SEQ ID NO: 4158679 - RNA, 119 nt, Human
ugaaucggcucaaagccaaauuuagguuaaugucaaaugagaggggagaacaaugaacgcaucauucuuuaugcuucuguuuaggcuucugaucuaaagaccaauuguugaguuauuua

SEQ ID NO: 4158680 - RNA, 83 nt, Human
ugaaugaauuugccaggcuuguuucuaggcuuugaagauauaacugcugacaguuuagacaaagucuugcauuuucuaguuca

SEQ ID NO: 4158681 - RNA, 67 nt, Human
ugaaugauuuggcacacaggaggggcuuguuaaacauuagcugugaugaucuccuuccaaaucuuca

SEQ ID NO: 4158682 - RNA, 77 nt, Human
ucccuccccuccaccagccaguagcuuugccaggagagcagcaaaugagaagccuggaggcucugggagggcaggga

SEQ ID NO: 4158683 - RNA, 85 nt, Human
ucccuccuucucuucucauacacuggcucacaguauggccucucaaagaaaauggagccagaugugagaaagaacacuguaggga

SEQ ID NO: 4158684 - RNA, 56 nt, Human
ucccucuccaugguaagaugcaggacaucuauuccugcugccauagaccugaggga

SEQ ID NO: 4158685 - RNA, 56 nt, Human
ucccucuccuuuuuucuugaaaugaucuacauucccuucugaaagcagcagaggga

SEQ ID NO: 4158686 - RNA, 60 nt, Human
ucccucucguggcagaagccugaccugaacaucuggccccaucugcccacaagaaaggga

SEQ ID NO: 4158687 - RNA, 65 nt, Human
ucccucugggcuggagcaggguccagcuggcacugccccagagcccugcuccuggcugggaggga

SEQ ID NO: 4158688 - RNA, 55 nt, Human
ucccucuguucuguuccaaguguguuuuugauugcucgugguacaggcugaggga

SEQ ID NO: 4158689 - RNA, 101 nt, Human
ucccugaacaccacaguuagagaagcugagcugaggcauguuguuucuucccuaacaucacuguccaaaguucaguuaucacuguacugcggacacuggga

SEQ ID NO: 4158690 - RNA, 72 nt, Human
ucccugagaaagcccaggagguaacugcccagcagggaccaggcagcaucuuccugagguuugcucacagga

SEQ ID NO: 4158691 - RNA, 70 nt, Human
ucccugagcugagcucaacagccuaaggacauggaucaaaagaguccucugcuggcuaaggcucagguga

SEQ ID NO: 4158692 - RNA, 56 nt, Human
ucccugcacccuugcugggcccuggaucuccuagggaaacagccagauggaggaga

SEQ ID NO: 4158693 - RNA, 62 nt, Human
ucccugcagaagcuuguguguagugcacauccugcagcacuguacacagugguucugaggga

SEQ ID NO: 4158694 - RNA, 64 nt, Human
ucccugcagaguugaugcaaguacugagcugccuuugaagucagcuugcaucaucuuugaugga

SEQ ID NO: 4158695 - RNA, 72 nt, Human
ucccugcagcgccaucacccacccguggcugggaggugaccucccagggucaguggugaggccgcccaggga

SEQ ID NO: 4158696 - RNA, 58 nt, Human
ucccugcaggcauguacucugagccccugaggcaguuuagggacagcucuguagguga

SEQ ID NO: 4158697 - RNA, 61 nt, Human
ucccugcauuucccauuguguggcuccaggauucguuuggguggccggggaggugggggga

SEQ ID NO: 4158698 - RNA, 69 nt, Human
ucccugccccaggcaacggagcccacugccagccauccaagcuguuagguguuucugccugaggaggga

SEQ ID NO: 4158699 - RNA, 78 nt, Human
ucccugccuuuccugccccaucugcccagucugccuugcagaugagggcuggaggugagcaggacaggauauaaggga

SEQ ID NO: 4158700 - RNA, 84 nt, Human
ucccugcggucuaggaccucagugugucaggaagaaaauacacagaccugcaaugcccugggagugcuguaccacagauaugga

SEQ ID NO: 4158701 - RNA, 61 nt, Human
ucccugcugcccacugcagugacucuugcuuagugccuugugugugggcagcccucaggga

SEQ ID NO: 4158702 - RNA, 72 nt, Human
ucccuggaagguagguuaaccugcaggagcuuuauuagggagggcucuugggauacacugccauagaaggga

SEQ ID NO: 4158703 - RNA, 87 nt, Human
ucccuggagauguacgagagcauuaagccaucaucauucacccaugauacauuuaccuauggucuugaucggcucucccaucuugga

SEQ ID NO: 4158704 - RNA, 59 nt, Human
ucccuggaggucacuggucagcacuuuugcccuggggucuggaccugucucuuuaggga

SEQ ID NO: 4158705 - RNA, 64 nt, Human
ucccugggaacugaaugucucgguauaaaacccgauuguacauuuguucaguucugagaaagga

SEQ ID NO: 4158706 - RNA, 63 nt, Human
ucccugggagcucagcccuggggugugcccuguaacgcccgaggccuugaugcuucugcggga

SEQ ID NO: 4158707 - RNA, 98 nt, Human
ucccugggggcuaagaguuaggaaaggccuugggccugcuuuccuuggcccccugccacugaggccugggcccagggaacuaaucuuugcuccuggga

SEQ ID NO: 4158708 - RNA, 63 nt, Human
ucccugggucauucucuggcacaaccuaaaaguggaagugcagaaaucucaaugucccgagga

SEQ ID NO: 4158709 - RNA, 88 nt, Human
ucccugggucuuguucuaucaccuuccuuuguccuuuucuguguggcagggauugagacaguggagggcugauguuaaagcucuggga

SEQ ID NO: 4158710 - RNA, 58 nt, Human
ucccuguacuuacacagcguccuuacccucugacaggccagaucuaugugagcaggga

SEQ ID NO: 4158711 - RNA, 63 nt, Human
ucccuguuaccaggaguuacaggcagcaggcaguccuccugucaauaggcuccuggcagguga

SEQ ID NO: 4158712 - RNA, 57 nt, Human
ucccuuaaaacucauguguuguuuacaaauauacuaaugauaugagagugggaggga

SEQ ID NO: 4158713 - RNA, 66 nt, Human
ucccuuagcaacacuuagcaacugccugcuuucagaaaguaguucaguuaagguuguuuaaaggga

SEQ ID NO: 4158714 - RNA, 77 nt, Human
ucccuuagcccaucucugguuacucucaggguaacuugcauuugagauucaugggucuaaccaguguggcuagugga

SEQ ID NO: 4158715 - RNA, 88 nt, Human
ucccuucugaugucuuggucacaggcuugugugcugggguagcaugucucuaggcagcuuaagcccuggcccaggcccucagauugga

SEQ ID NO: 4158716 - RNA, 75 nt, Human
ucccuugaacccaggaggcaaagguugcagugagccaagaucaugccauuguacuccagccugggugacaagaga

SEQ ID NO: 4158717 - RNA, 69 nt, Human
ucccuugagccagguuggaggcugcagugagcuaugaucgugcuacugcacuccaaccugggcaaugga

SEQ ID NO: 4158718 - RNA, 55 nt, Human
ucccuugccagggacacuuauuggccaugcccagugagaugcuagaaggcaggga

SEQ ID NO: 4158719 - RNA, 85 nt, Human
ucccuuggccugcagaggcuguggggcccaagccuucuuuugggucugaagugccccugccccaccgccuuugcugccuguggga

SEQ ID NO: 4158720 - RNA, 56 nt, Human
ucccuuguccucuucgucacugaagaaccagucugacugcagagaagacaaaagga

SEQ ID NO: 4158721 - RNA, 73 nt, Human
ucccuuuagcaauuggaaaauguauuucuagaagccagucucuuggcaauuggugcauuauccauuaaagaga

SEQ ID NO: 4158722 - RNA, 82 nt, Human
ucccuuuccuuuuauguucuuauguuuuuauuguguuuaccugucagugaauccaaacauugagaaacauugggauaaggga

SEQ ID NO: 4158723 - RNA, 84 nt, Human
uccgacgcaggcugccaaggcuggggaggacaagguucccucuugaguucuuuaaaagcugggccauuggugaguucugaagga

SEQ ID NO: 4158724 - RNA, 84 nt, Human
uccgacugcaacggacuggcuaucuccauguucuccuuguuccggacagagagaagcaaucaguggccacccacugcagcugga

SEQ ID NO: 4158725 - RNA, 127 nt, Human
uccgagcaucugagccucuccaugguacucggggagagguuacccgagcaacuuugcaucuggacgacgaauguugcucggugaaccccuuuucgguaucaaauuccaccagggaggccgucuugga

SEQ ID NO: 4158726 - RNA, 55 nt, Human
uccgaggccaaagcugugaauagggugaccccuucugggcuguggaagccucggg

SEQ ID NO: 4158727 - RNA, 65 nt, Human
uccgauuaaaagugcacaaguuguaauuuagaaauacauggaugccuguggauuuuaaaauugga

SEQ ID NO: 4158728 - RNA, 70 nt, Human
uccgcaucaggaggagaugaagaaaaccuauuguauuaaguuguuuucuucaccuuuccuggguugugga

SEQ ID NO: 4158729 - RNA, 109 nt, Human
uccgccuccucccaguugggcgaguagcccuggcugcugcacagggugccucccguaugccaggcacucugcuggcugcagggcagcuuaaccugcagggcggucagga

SEQ ID NO: 4158730 - RNA, 95 nt, Human
uccgcggccccgggaagcgcggggcggggccucgcgaacggccucgggguuccgcaggcccgccccggccucaccugcgcgcaccuggacgcaga

SEQ ID NO: 4158731 - RNA, 76 nt, Human
uccgcuuguggagccuuuuacccacaggagcugccuuugauggacuuuucugggaggaggguuauucccgaaugga

SEQ ID NO: 4158732 - RNA, 71 nt, Human
uccggcagaaaguccugaugcaugcuguagggaaugucugaacagagaacugcagggaucuuucugccuga

SEQ ID NO: 4158733 - RNA, 65 nt, Human
uccggccaggcacaguggcccacguggacuuguaggggaggcugaggcaggauggccuggcuggg

SEQ ID NO: 4158734 - RNA, 88 nt, Human
uccggcuuguuucacggguguguggccuccucuuccgaagucauuucauucuucggggucuuugacacgcucuggcaacaagcgcgga

SEQ ID NO: 4158735 - RNA, 80 nt, Human
uccgggcugcuuggaggaggcgcucauauuacaaaccuacaaggauggggcgcgggggugccugccucaggcagugugga

SEQ ID NO: 4158736 - RNA, 85 nt, Human
uccggggcaguaaaucacacacaggcuuguuaaaauagauguccacaguguaugggcagauggagccuguguuucugcccaggga

SEQ ID NO: 4158737 - RNA, 70 nt, Human
uccggggcuuccccgcagugcccuccuccgccaccaacagcagcugggcccgggcgggagaagccuuggg

SEQ ID NO: 4158738 - RNA, 65 nt, Human
uccgggggauuucuuagcuaccugagugacugcccaggucugcaggcuggaguccacugccugga

SEQ ID NO: 4158739 - RNA, 70 nt, Human
uccggugccugguuuggggaguguucaugggauauguuccaaaggacugacggaccuaucagguacugga

SEQ ID NO: 4158740 - RNA, 58 nt, Human
uccguugacacugcauggagauuauuucugugacagcagucuucaccaguguuaagga

SEQ ID NO: 4158741 - RNA, 60 nt, Human
uccguuugccuguuucgcugaugugcauucaacucauucucagcaaaauaagcaaaugga

SEQ ID NO: 4158742 - RNA, 83 nt, Human
ugagauucacgugccagaagauucucuaucagaugagggccugcugccugguucauagacaccaucuucucauuguaaccuca

SEQ ID NO: 4158743 - RNA, 89 nt, Human
ugagauugacaaucucacgugugucuuuguuccagguacgagagucaacacuuuguauguugggucaaaguacaugagucccaaucuca

SEQ ID NO: 4158744 - RNA, 71 nt, Human
ugagauuguccagaucacauuagcaaggccuauagcggccacgugugcucagugagucugugacaggauca

SEQ ID NO: 4158745 - RNA, 63 nt, Human
ugagauuugggaggggccagggacugaaugauaugguuugucugugucuccacccaaaucuca

SEQ ID NO: 4158746 - RNA, 64 nt, Human
ugagauuugggaggggcuggggugaaauaauaugguuuggcucugugucuccacccaaaucuca

SEQ ID NO: 4158747 - RNA, 55 nt, Human
ugagcaagacccggccucugccccauggagcuccgagucuagccagguuugcuca

SEQ ID NO: 4158748 - RNA, 86 nt, Human
ugaaugcucugaucuggagagaucuucacaaaaacccacaggcaccugcuguucuuugugaagaccucuccagaucagagcauuca

SEQ ID NO: 4158749 - RNA, 58 nt, Human
ugaauggaaggguucaugugugaaggauugaagugccugcacaugcaacuuuuauuua

SEQ ID NO: 4158750 - RNA, 121 nt, Human
ugaauggaguucaaggcagcucccuuuugucucuggcuuuaugcugguuuuacuuuucauuccaguaagcuguuagggggcagagaugaaacacaguuguuuacaggacuuggaacguuua

SEQ ID NO: 4158751 - RNA, 78 nt, Human
ugaaugggcagagaugggccagugacgcaacacaguaaaguguauuuugguuauaggcaucgucucuaaacuuaugua

SEQ ID NO: 4158752 - RNA, 63 nt, Human
ugaauggugauuggugcuucuccaaagacuugaagauugagaggcaaauagauaguccauaca

SEQ ID NO: 4158753 - RNA, 62 nt, Human
ugaauguaauuuaugucuuuacuguaguucccuaaaaaggagccaggaguagauuacauuua

SEQ ID NO: 4158754 - RNA, 60 nt, Human
ugaauucaggggcuauuauauuuucccucuuccagagagaaauauaauucucugaauuua

SEQ ID NO: 4158755 - RNA, 125 nt, Human
ugaauucuugcugaucaaccaaagaguuugucaccagggagcuuguccucugaaugagcuggauuuauauugcaccugccagaacacagcacccuggugccauggggaugccagacauggauuca

SEQ ID NO: 4158756 - RNA, 94 nt, Human
ugaauugauguaucucacauaacugggagauccaaggguggaugugguuuuaaccagaacucgaucugaggguuugugggaaauauucaaauua

SEQ ID NO: 4158757 - RNA, 81 nt, Human
ugaauugccuaaauuagugauaggaagccagauugaguccaugcacucugcuucuggaaccugugcuguuaggcauuuuca

SEQ ID NO: 4158758 - RNA, 85 nt, Human
ugaauugccuuucauagagaugaauucugcagucuuagugggugcaacaggauugcuuuuuauuugcuuugaauugcuuuguuca

SEQ ID NO: 4158759 - RNA, 81 nt, Human
ugaauuggaaaauguuauaaaguuucgaaagauguaucaaccagauacagugugugugaacuuuauuuuaauccugauuca

SEQ ID NO: 4158760 - RNA, 82 nt, Human
ugaauuuaaaacaaccaggaugugaagccuguguccuuaucccaagaggugccaaaagcuauaauuuggugagaagaauuca

SEQ ID NO: 4158761 - RNA, 70 nt, Human
ugaauuucacugacaguauacuuacgcuucuuauucaaaaggaagcacagcauaaaguuacugguauuca

SEQ ID NO: 4158762 - RNA, 129 nt, Human
ugaauuucucugccuccaguuggcgaauaggagaagaaagaguggagaagguauacccgcuucucacccaccuuggcucagaggagaccuucaccacuuccacuccauuccuuuggugagaaaugauca

SEQ ID NO: 4158763 - RNA, 70 nt, Human
ugaauuugacauacaugaaaccagauuguauguuauuauccugugucuuguuucuguagcucaguauuca

SEQ ID NO: 4158764 - RNA, 105 nt, Human
ugaauuugaccuugucaaaucauuuaccugcagcuguuaugagguguacaugcaaauacuugugauugccuaacacuuaggacuuuggugcugacggcaaauuua

SEQ ID NO: 4158765 - RNA, 60 nt, Human
ugaauuuuuccugugcuuaacaaauauucuguagugauauggagcagcaggagagaugca

SEQ ID NO: 4158766 - RNA, 69 nt, Human
ugacaacuccuggugcugaugaagagaugggucaaugagcacucucacacacgccuagaagucaaguca

SEQ ID NO: 4158767 - RNA, 56 nt, Human
ugacaaugaggcccuccacaaacuugauggcgugggugcggaugccgucauuguca

SEQ ID NO: 4158768 - RNA, 67 nt, Human
ugacaauucucugaagagcucagacuaguuuuccuugcagauaacuuugaguccuuuaggcuuguca

SEQ ID NO: 4158769 - RNA, 58 nt, Human
ugacaauugcagacacagaaguaguucaguuucuaugcauucugguuggcaaugguua

SEQ ID NO: 4158770 - RNA, 55 nt, Human
ugacaauuucagaacuaucugggagugaugauguuuacugucaucugagagguca

SEQ ID NO: 4158771 - RNA, 55 nt, Human
ugacacaguugucgacucuacagaagagucuuuagagcuucagcgaaugugcuca

SEQ ID NO: 4158772 - RNA, 125 nt, Human
ugacacaucucugagguuagggcuuccuggcuguuguguucaagaggguauaaauuaucagugacacuagugacacuuuguugaagaauauguuaggggauucugugcugauagagaagagugca

SEQ ID NO: 4158773 - RNA, 78 nt, Human
ugacacauuaaauuagcaaucacgcagucauuuagcuaucugaaggcaaacaugcuugcauugcuaaacauuugguca

SEQ ID NO: 4158774 - RNA, 98 nt, Human
ugacacauuugcuaguuuacacaguagcagggauuauuuuagguaagguacucauauauuuuaaaaaauccuguauuagauugcaagaguaaguguca

SEQ ID NO: 4158775 - RNA, 94 nt, Human
ugacacauuugcuaguuuacacaguagcagggauuauuuuagguaagguacuuauauauuuuaaaaaauccuguauuagauugcaagaguguca

SEQ ID NO: 4158776 - RNA, 113 nt, Human
ugacacugccucuuuaaucuguagcauccgcaugcaagugcugucccagugcaguacaccugggcuaggacucacagaugguauguuaugcacagagcagagagugccuguca

SEQ ID NO: 4158777 - RNA, 73 nt, Human
ugacagacacagagauaggccuguguuuuccugcuuccacugcucucggcagggcuugucucugugauguaca

SEQ ID NO: 4158778 - RNA, 72 nt, Human
ugacagagaggaaaacaguuauaaacagagucacaucacagugacuguguguauguauuguugaaucugcca

SEQ ID NO: 4158779 - RNA, 65 nt, Human
ugacagagucucauuccagcccuguucacaugcucggugguuguggaaauacagacuccaaguca

SEQ ID NO: 4158780 - RNA, 81 nt, Human
ugacagagucugagcugcagaguggggugguugccuagcaacaacaccuguagcacauuaagcagccagucagcuuuguca

SEQ ID NO: 4158781 - RNA, 59 nt, Human
ugacauaaugcuuugaaguugccauuugcuguuuggcaguaacaggaagcauuauuuua

SEQ ID NO: 4158782 - RNA, 56 nt, Human
ugacauaucaucccauuuucagagaaugaaaauucauuuucucuggaugaugguca

SEQ ID NO: 4158783 - RNA, 80 nt, Human
ugacaucaaccccucuggcucugagcuuuucuucuccagaaggaagcacagaaaaggagcauggagugggcuuugaguca

SEQ ID NO: 4158784 - RNA, 60 nt, Human
ugacauucagccaauuacuuucugcuaauagauauugcaguuauguagagugggauguca

SEQ ID NO: 4158785 - RNA, 56 nt, Human
ugacauuuccuagugcuuugugagcaauccaaauuucacuuaaaagagagguguca

SEQ ID NO: 4158786 - RNA, 81 nt, Human
ugacauuuuggcuaaaggcaugccuccauuucuauguacauaauaauauuuaaggaaugugugugccaaugcaaagaugca

SEQ ID NO: 4158787 - RNA, 73 nt, Human
ugaccacuauaaaacuuggguaugaucccuaauuaauauuagguaagcauccuuaaguguuauucuuugguca

SEQ ID NO: 4158788 - RNA, 129 nt, Human
ugaccagccccucgaaggccgccuccgagauguauuccagccgcuugagcucgcccagguccaggcgccgcagcgagggcacgcgguugaaggcguaggaggggaugcucucgaugggguuguuccgca

SEQ ID NO: 4158789 - RNA, 65 nt, Human
ugaccaucaagcacgucuccccauaccugaggauguggggcggcagaugcucccugugaugguua

SEQ ID NO: 4158790 - RNA, 56 nt, Human
ugaccccgccuuuugacucauaaacaucuaaucaggugagugauggaggcggguca

SEQ ID NO: 4158791 - RNA, 56 nt, Human
ugacccggacagcaaacacccaggaaacgaagugcugggccugauucccaggguca

SEQ ID NO: 4158792 - RNA, 78 nt, Human
ugacccugcagucaucucugagauagaagcuuauaguaaacuugccagcuuacugacagagaaccuggaacugcauca

SEQ ID NO: 4158793 - RNA, 82 nt, Human
ugacccuggcuuuguauaguucccugaacugaaauugaccacauucauccguccuuucagagcuaacucggcaaggaaguca

SEQ ID NO: 4158794 - RNA, 57 nt, Human
ugaccuccaagggaaaauguaagugagcagaaacacucaaauuucgcuuggaguuca

SEQ ID NO: 4158795 - RNA, 64 nt, Human
ugaccuguccuugcuggccagguaugggcauaguucuguggucuggccauucagggacucauca

SEQ ID NO: 4158796 - RNA, 113 nt, Human
ugaccuugaacuugagcacuguugaaaucucaugaugccuaugcaggguuguggucaucaggauuggcaagauagcauaugaggaacucagcaaagcagcugguucacuguca

SEQ ID NO: 4158797 - RNA, 62 nt, Human
ugaccuugcacuguagccugggaucuggcauuuucuugccagcccuggagaugugggaggca

SEQ ID NO: 4158798 - RNA, 84 nt, Human
ugacgcuuccuuggccuccaucuccuccaguacuccaguccagcgccaugggugcaggacuccuggaggaagguaccaagcuca

SEQ ID NO: 4158799 - RNA, 68 nt, Human
ugacuaauccauggugcuuuguuuaaacccaguuuuuacuggguuaauagaaucauuaacugagguca

SEQ ID NO: 4158800 - RNA, 76 nt, Human
ugacuaccucuuaauauugcaccuucucuuuuccagaggacagaacuuuuagaagguuaaaguuaagggaugauca

SEQ ID NO: 4158801 - RNA, 68 nt, Human
ugacuagacugggccagucaaauucucucuccagagaauuuagauuugggauccaaaagugcugguua

SEQ ID NO: 4158802 - RNA, 65 nt, Human
ugacuaguucuagccagugaaauguaagugaaauugaugcaucucauuucuggcugaagcuuuua

SEQ ID NO: 4158803 - RNA, 127 nt, Human
ugacuauauuguguacuggaacauugcuaacagaguagauuuugaguauucucaccacaaaaguaggugagguaauguguacguuaauuaguuuaauuuagccauuccacaauguauacauauguca

SEQ ID NO: 4158804 - RNA, 58 nt, Human
ugacucaacucaauaggggcuuauuguuuacauagacuaagaaguccagaguugagca

SEQ ID NO: 4158805 - RNA, 101 nt, Human
ugacucuaaauaaucuuguauuuccuaaaguaauacuagcccucaaaaccuaacaaucuagaaacuuggaggagauugcaaagaccacuugcagaauguca

SEQ ID NO: 4158806 - RNA, 59 nt, Human
ugacucucccucuccugaggcuuccagacaacuggucucagagauucagggagaaguua

SEQ ID NO: 4158807 - RNA, 88 nt, Human
ugacucuucuuugguccuguaagcaccuacucuagaauguaaggaaguguuagagcaggaguugacagauuuuucaugugaaggguca

SEQ ID NO: 4158808 - RNA, 82 nt, Human
ugacugaacaacucaaaccgcgagaggguaacaggaauaaauccuagugucugcugccaccuuguggugagaaguuccauca

SEQ ID NO: 4158809 - RNA, 83 nt, Human
ugacugcauaauguuagaacaguauaggcuaaacauuaauagucugaugugagguuaaccuacuguuagaaugugugugauca

SEQ ID NO: 4158810 - RNA, 55 nt, Human
ugacuggcuguggcuauuaugcuuuauacgaaggcucuaugucgaaagccaguua

SEQ ID NO: 4158811 - RNA, 110 nt, Human
ugacugucaaaauuccaagaagauaaaauaaagaucaaauuagaguugaaggugcuuucccuaauuuaaugaaugagucuuaaauuuguuuuucuggaaauuuuacagca

SEQ ID NO: 4158812 - RNA, 62 nt, Human
ugacugucaugugcuaacuguccacaaaaugucugcuggcauagaaaaguacaugauuuuca

SEQ ID NO: 4158813 - RNA, 60 nt, Human
ugacugugccugguuaaaggcuaccauuuaagagaauaaauggccaaaaccaggugguua

SEQ ID NO: 4158814 - RNA, 61 nt, Human
ugacuguguuggaggacggucuggauuuuuuuaugacuuuguuguuuuccagcgaaaguca

SEQ ID NO: 4158815 - RNA, 74 nt, Human
uccuaguuaagguggauggguaugaagugguagauaacugaaauacuuuucuucauguucccuccuucugguga

SEQ ID NO: 4158816 - RNA, 103 nt, Human
uccuauaaucaagcuguccaucuaaagaagagcaaauuuguuguauauuagcaagaaaauauaucagcugccuucauuagauuagagacagaaauggucaggg

SEQ ID NO: 4158817 - RNA, 124 nt, Human
uccuauagaccauguguugaaaucuugugauaauguguguguguauguuuacuuuuccuuguuguauuuacagggaauugugcuugauacauacuagguacuucauaaauacuuguugaaugga

SEQ ID NO: 4158818 - RNA, 89 nt, Human
uccuaucaccuccccaccaccucaaucauugacauaucuggugcugacagaccacaggaaaggugugucaugaugggaggcauguagga

SEQ ID NO: 4158819 - RNA, 63 nt, Human
uccuaugcugucuggcucucucuuuccuucucaaggccagccugagagcuaacagaaucagga

SEQ ID NO: 4158820 - RNA, 78 nt, Human
uccuauuucacagagagaacucaaaccauuggcuagaaacuucuucaaaaucuggucugauuuuucaucuguugggga

SEQ ID NO: 4158821 - RNA, 62 nt, Human
uccucaaaagucauacauggugcuuacuacagaguugcugaguaaaugucugauuuccagga

SEQ ID NO: 4158822 - RNA, 95 nt, Human
uccucaaaauuuucuaagaauguucucuagggaguucuuucugggagugauucucccagauucauagaaacucauagauucaaaaaauuguagga

SEQ ID NO: 4158823 - RNA, 65 nt, Human
uccucaacuuucuagcagcagguauaaauugccugaauaauacagacuagcuucaaggaugaggg

SEQ ID NO: 4158824 - RNA, 64 nt, Human
uccucaagugccuaaccccuuguaugaagaaguuacucucucugcugggguuggcaccccaggg

SEQ ID NO: 4158825 - RNA, 76 nt, Human
uccucacagcauggcuucugaucaaggaacucacuucacagaaaaagaagagugucaaugggccaugcucauggga

SEQ ID NO: 4158826 - RNA, 63 nt, Human
uccucaccucccagaacccugccucucucaggaagggaaacugaggcagcugggaaaugaggg

SEQ ID NO: 4158827 - RNA, 81 nt, Human
uccucaccucuccucaugggcggguucugccccacuuccauucuuuggcauggagaggacuggcccugaggggaggcagga

SEQ ID NO: 4158828 - RNA, 78 nt, Human
uccucagacaaggccggaggcccgauuguguuuuucucgacucgccagcauccagucagggccuggccugcugaagga

SEQ ID NO: 4158829 - RNA, 56 nt, Human
uccucagauauaaaugagggugcauaauagcacccaauucauggcagauuugaaga

SEQ ID NO: 4158830 - RNA, 68 nt, Human
uccucagccagugcauuccuggggaagaagcaugugaucugugcucaagaccccucugugacugagga

SEQ ID NO: 4158831 - RNA, 60 nt, Human
uccucagcuccuaucucuguauggccuggcuuuuccuagguuaugauuauagagcgagga

SEQ ID NO: 4158832 - RNA, 79 nt, Human
uccucagcucuaacaugagggcuugagucaaaucagagugcgugucuuaugugacuagcccuucaugaccaagucagga

SEQ ID NO: 4158833 - RNA, 59 nt, Human
uccucaggauguggaguagaaucugguugugguuuugcuuuguacuuuccugauaagga

SEQ ID NO: 4158834 - RNA, 73 nt, Human
uccucagggcauacaagcuccuuauucagcuggggcuagugcuccaagcugauaggagcuuggagucggagga

SEQ ID NO: 4158835 - RNA, 113 nt, Human
uccucaugucagcacuugucucagaucaagccuggcaguccucucauuggccuccuggagccagggugucaggagggggauuggggugggguucaaaguaugacagcaaugga

SEQ ID NO: 4158836 - RNA, 79 nt, Human
uccucauuauucaccuuguuguuacuuuaaucuuuguucaguuugacaaaugagaauguagacagaggguuaaagagga

SEQ ID NO: 4158837 - RNA, 60 nt, Human
uccuccagaccacuucugugcggccuuggcaagguucccucagagugugggcuggaagga

SEQ ID NO: 4158838 - RNA, 60 nt, Human
uccuccauggaaugccuuugccuauuaagguuuagacgaggcacuucauggguucaagga

SEQ ID NO: 4158839 - RNA, 81 nt, Human
uccucccacagcaucuaaucuucaugccggagucacauucucaggcuccggacagaccccaggugcugugcagccugagga

SEQ ID NO: 4158840 - RNA, 64 nt, Human
uccucccagcugccugugaggcagaauuaauauucccauucugcagacaggaagcugaggcuga

SEQ ID NO: 4158841 - RNA, 93 nt, Human
uccucccaggauuucuuucuugugggugcccuuuuugcagcguaaaaaccccaggggaagagguagcagucacaaaagaaauccuagggagga

SEQ ID NO: 4158842 - RNA, 57 nt, Human
uccuccccuggaccuugguugaucugcuuuaugccugccagccaaggaggaggagga

SEQ ID NO: 4158843 - RNA, 104 nt, Human
uccuccccuuccuuccccaaccccgacuguguggaauccaaauauuuccaccucaacagcaaacaggaguggggugcuggggagauggaggagaugggggaggg

SEQ ID NO: 4158844 - RNA, 82 nt, Human
uccucccucuuaaaaacuugauauauuuuaaaacauucuaauaaagugccuaagaaaucguucagguuugaaguagggaggg

SEQ ID NO: 4158845 - RNA, 84 nt, Human
uccuccgcaccccacugccucugcgucccacagagucuaggcucauuucggcucgguggccagccugaggcccuggggagggga

SEQ ID NO: 4158846 - RNA, 63 nt, Human
uccuccuacacauagaugcuuucaguuaucaagcaauauuugauuagcuugguguggugggga

SEQ ID NO: 4158847 - RNA, 85 nt, Human
uccuccuaucuugaaguucauguuauagugacuuuaaugaaaucauagaacacuguuucuucgugaacaaugacgagggagagga

SEQ ID NO: 4158848 - RNA, 85 nt, Human
uccuccugcaggcuuacaacuuguaugugauuguugggacaaccaaaagaugacacaaucuugcuguugaagccaugugcuggga

SEQ ID NO: 4158849 - RNA, 58 nt, Human
uccuccugucuaccaguuccuguuucaggaacuugggaugaccuugugaaggguagga

SEQ ID NO: 4158850 - RNA, 95 nt, Human
uccuccuucccuccuucuuaagugucauaauuuccaagaucugccuuauucuuuacuaucuuuauggaacggugaacuuuggcaggggaggggga

SEQ ID NO: 4158851 - RNA, 72 nt, Human
uccuccuugccccuucuuuagcuagcaaggaauacauuucaggccuggcugagguggggaggcaguucagga

SEQ ID NO: 4158852 - RNA, 55 nt, Human
uccuccuuuccccgcuggagcccuggauagagggcucucuggccugggaggagga

SEQ ID NO: 4158853 - RNA, 68 nt, Human
uccuccuuucugccguucccugcucuguggcggaugcgcagggaucaguagggacggcagcaguaggg

SEQ ID NO: 4158854 - RNA, 65 nt, Human
uccucuaagacagggucuauucuuagucccauuuuguggcugaggaaaccaaugcucagagagga

SEQ ID NO: 4158855 - RNA, 56 nt, Human
uccucuacucgcuugcccuuugaaaaugcacagagcuagccaugccuuguagagga

SEQ ID NO: 4158856 - RNA, 65 nt, Human
uccucuagaaaguagccacuuacagagggaaauuccacuuuuuaaauucuguuauuuucaaagga

SEQ ID NO: 4158857 - RNA, 56 nt, Human
uccucuagcuucuguggugugcuagcaauuuuuggcauuccucggcucauagagga

SEQ ID NO: 4158858 - RNA, 129 nt, Human
uccucuagggcugccaguuugcaugagggccucaugucucuccacuggcaggggcuggugagcauccaguccaucuguaggagggacacacgguggcugucuucugcagugugggcaggccuggaguga

SEQ ID NO: 4158859 - RNA, 63 nt, Human
uccucucacagauccuguguuacucagagcuacuaagccuagaaaacauggaacuggagaggg

SEQ ID NO: 4158860 - RNA, 59 nt, Human
uccucuccauauuuucugauuuguuuccuauuuuggcaaagagugaagauggcagagga

SEQ ID NO: 4158861 - RNA, 88 nt, Human
uccucuccccaucaucauuuguacuaacaugucucagggccucuuagggcugagaugucguuagauaucuccugauggaggcaaguga

SEQ ID NO: 4158862 - RNA, 62 nt, Human
uccucucuccaccaagccacccaaauauuaagcaauggguaggcucuguagguagagauggg

SEQ ID NO: 4158863 - RNA, 70 nt, Human
uccucugaagaugcauggaaaucucauuacaaguguucaacaccuguuuucuaaaagguauccagaagga

SEQ ID NO: 4158864 - RNA, 74 nt, Human
uccucugacccugggucucuuacaggcugugcccaaagaguuggacugcaaagucucaagacccaaguggagga

SEQ ID NO: 4158865 - RNA, 76 nt, Human
uccucugccaaagggaguugccuugccuaaguuuauaccuccucccuaggcuaggggcagccucuguggaagggga

SEQ ID NO: 4158866 - RNA, 56 nt, Human
uccucugccagcuagcuccuaguugaauuggauuaauguaaggcacuggcaguggg

SEQ ID NO: 4158867 - RNA, 59 nt, Human
uccucugcuggugaguccugccugcccucaagcaguccagagcccaccagaggaaugga

SEQ ID NO: 4158868 - RNA, 55 nt, Human
uccucugcuguucugguucuuuaggaaacuccgccuuagacaugauggcaggggg

SEQ ID NO: 4158869 - RNA, 59 nt, Human
uccucugcuuggaacuggacagaaguuccaauaagcuacugucuucuauuaaguaagga

SEQ ID NO: 4158870 - RNA, 69 nt, Human
uccucuggggugugcucagagcagggggccugaagaaugcuucuucuguuuacaacacacccaauagga

SEQ ID NO: 4158871 - RNA, 81 nt, Human
uccucuguuauauucucauucauuaaucugguacuauaguuuauaaacaacaagugacagggaaaaugacacugcugagga

SEQ ID NO: 4158872 - RNA, 80 nt, Human
uccucuuagcauagaagaaagcugggaaauaaauauuaaguaagaaacuacuaauacauucuacaguuuucaaaagaggg

SEQ ID NO: 4158873 - RNA, 58 nt, Human
uccucuucacauauuccuugagcuagaaagacuucuauguggcaugggugggagugga

SEQ ID NO: 4158874 - RNA, 93 nt, Human
uccucuucauucuuucucacugacugggacucagcugguagguccgcagaucaguccuccugggaauuuaguugugagugaaugugaagggga

SEQ ID NO: 4158875 - RNA, 59 nt, Human
uccucuuccuucuguccaaaugagcuuaaguuguuuuauggaccagaugagaaagagga

SEQ ID NO: 4158876 - RNA, 82 nt, Human
uccucuugcugcauuucuuaucugaggucuacaugaaugcuccaguuagagugugcuuuagguuaagauaaguaaaagauga

SEQ ID NO: 4158877 - RNA, 66 nt, Human
ugaagucuuucacugucaauuaauguaauucuaaaucaacauucugucaacagugagcagauuuua

SEQ ID NO: 4158878 - RNA, 77 nt, Human
ugaagugugauuaaucaccauggauguaugauugagucaauugacuguuacuuuuucaugaugauuaaucagcuaca

SEQ ID NO: 4158879 - RNA, 84 nt, Human
ugaaguuaucaggcagagcaguauuuguucccuaucaauguguaucuaacaaaacauuacacagaauacuuucugccugcuuua

SEQ ID NO: 4158880 - RNA, 81 nt, Human
ugaaguuauccugccaggaggaggugggacagacaaggugacuuaucuucuuucucuccucuuucugccucuggguuguca

SEQ ID NO: 4158881 - RNA, 60 nt, Human
ugaaguuugguggaaauuuccugcaauauuaccugagccugaaauuuuuaugugacuuca

SEQ ID NO: 4158882 - RNA, 67 nt, Human
ugaauaaaggcuaugagauagaagauaagaacccucuugucuuuagaccucucuggccucagaauca

SEQ ID NO: 4158883 - RNA, 71 nt, Human
ugaauaaguauggcagaguccuaagccuuuaugggacaguucuuguggcuucauucuccugugaauaauca

SEQ ID NO: 4158884 - RNA, 64 nt, Human
ugaauacaugaacccuccugugguucacugaauaaaugaaaccacaggaggguucauuuauuca

SEQ ID NO: 4158885 - RNA, 66 nt, Human
ugaauaccauccauauuucacuccauuuguucuugacaaauggugaagcuucauggguguuuuuua

SEQ ID NO: 4158886 - RNA, 128 nt, Human
ugaauagaugucauuguuaagccgauuaaauguguaacauauguaaaagcaccugcacagugaugggccuagaguaggugcucaauauaugugugcuaaauuugaaucuacaaucauucauucauuca

SEQ ID NO: 4158887 - RNA, 59 nt, Human
ugaauagcuugacaauuauuuuuguuucuugagaagcaugauuacucccaaguuguuca

SEQ ID NO: 4158888 - RNA, 55 nt, Human
ugaauaguccuuggaauaacugcuucuaucuugguguguuaccuuggacaauuca

SEQ ID NO: 4158889 - RNA, 69 nt, Human
ugaauaucaauguuuugauaauaaguguaaugcagcccuuuugcagaguauucaguccauugauguuua

SEQ ID NO: 4158890 - RNA, 81 nt, Human
ugacuaaaaccuagguuuccucauucagagguugaguuucuuuuagucacacuccugaguuaugagacaggguaugaguca

SEQ ID NO: 4158891 - RNA, 65 nt, Human
ugacuaaggaggacagcuaguuagauagaaaguguuccauuguuaaacagcugucuucuucagca

SEQ ID NO: 4158892 - RNA, 71 nt, Human
ugacuagaauuguauuuaguguauauaugagcuauugugauaugaaaaguuuaaauaccugguuuuaguca

SEQ ID NO: 4158893 - RNA, 58 nt, Human
ugacuaguuuaugcucagaugucuuccauuaggaaaccuaaaagucuugaacuaguua

SEQ ID NO: 4158894 - RNA, 69 nt, Human
ugacuauugggugauuuguuauacagcaguagacaacugaaacaguagauauaaaucucucuuuaguca

SEQ ID NO: 4158895 - RNA, 82 nt, Human
ugacucaccaaggacacugauguucauccuguagauaggaggcuaccauuaaaggguuaaaaucaggucauugacaagguca

SEQ ID NO: 4158896 - RNA, 83 nt, Human
ugacucauacagggauaaagcccacuguuuggaccucacuuuacaacccaccaaccccugcucaguuauccgugugugacuca

SEQ ID NO: 4158897 - RNA, 57 nt, Human
ugacucugcugugaaagcauuuauggacuuuagaggcuguaagcacagcagggauca

SEQ ID NO: 4158898 - RNA, 70 nt, Human
ugacucuggcugaaauuagaagguucaauggaaauggaacuacaggaucugcuauuuacagucacaguua

SEQ ID NO: 4158899 - RNA, 93 nt, Human
ugacucugucugagggcuuuaucaggccuugggagccugccugacccauguaggguaggccagaagggccuggaaguaaacaccccuggagca

SEQ ID NO: 4158900 - RNA, 88 nt, Human
ugacucuuacaugaaucuagcaagaggugaagguuucauuggcagaacucucaaguaccucccaucacccuuguuuuuucugagguua

SEQ ID NO: 4158901 - RNA, 62 nt, Human
ugacugaaaaugugucaucccuacugugacuuagucauacuggauuugaaacauuucauuca

SEQ ID NO: 4158902 - RNA, 66 nt, Human
ugacugcuggaccuucagcuggguuuugguuauuuacaaaacaauguugcugggugcgguggcuca

SEQ ID NO: 4158903 - RNA, 130 nt, Human
ugacuggaggcuagauucaccagcugggagagcccaugguuacuuuucuggcuuuguccucacccagcaugacaaagcaccagcaacuaugggcugccccagagggcacuggaggcaucugaccuuuuca

SEQ ID NO: 4158904 - RNA, 81 nt, Human
ugacuggaguuauuuauguuugacaaugaucuggagauugcgaguaaaccugauuauuguaaauauauuugcucuuauuca

SEQ ID NO: 4158905 - RNA, 62 nt, Human
ugacugggaagucagagagaggcuaccugugaugucaggagccugcccucccuucucaguca

SEQ ID NO: 4158906 - RNA, 55 nt, Human
ugacuggucacacaucccugcagagccuggaaccaaggcagggcuggacaaguca

SEQ ID NO: 4158907 - RNA, 72 nt, Human
ugacuguaaacuauucuuucaggagcuuaaacacuaagggaaaguuagaguugcugggaaagauuucaguua

SEQ ID NO: 4158908 - RNA, 74 nt, Human
ugacugucccuagcuucaagaaagaugggcaaaccacauauuuuauuuuccagccucugugcugggaggcagca

SEQ ID NO: 4158909 - RNA, 86 nt, Human
ugacuguuuuugcauuuuuaguggcucacucaugcuauuguacagaaacuagaguggagccaggguagaagcagaggagacaguca

SEQ ID NO: 4158910 - RNA, 64 nt, Human
ugacuuagaaguucugggugcccaaacaaaaccuccaagugcauucaagauuaauucuauguca

SEQ ID NO: 4158911 - RNA, 69 nt, Human
ugacuucuuacagugaucaacacaaagauuauccaguagucuuugguugaauuuauugucuugacuuca

SEQ ID NO: 4158912 - RNA, 67 nt, Human
ugacuugguuaucauucacccugcucaacugaaacuacaguccccagggugaccaauguggccauca

SEQ ID NO: 4158913 - RNA, 77 nt, Human
ugacuuuucacaguggaaggcugcagggcucucacagggggagauuccauuugucugagccugcagagugugaguca

SEQ ID NO: 4158914 - RNA, 58 nt, Human
ugacuuuuuaacuuuugccuacagaaauguccgugcuggcuuuaagguuaaaguguca

SEQ ID NO: 4158915 - RNA, 60 nt, Human
ugagaaaccuucgguccuaagccagggcaucagcugacugguugcacagaggguguuuca

SEQ ID NO: 4158916 - RNA, 60 nt, Human
ugagaaagacgauuggacaucugacagcuucauugauagcugacacaaauugcuuucuca

SEQ ID NO: 4158917 - RNA, 84 nt, Human
ugagaaagccagacagaaagccagagagaaagggcucacuuuguugccuccugaguccauaauucuggucuuuccuggguccca

SEQ ID NO: 4158918 - RNA, 66 nt, Human
ugagaaaugcuuuagaaaaccagcuuugaucaauuuaauuaggaguaguuuugaaagcaauucuua

SEQ ID NO: 4158919 - RNA, 96 nt, Human
ugagaaauuucacuucagacaguaagaaagagguuaaugagucagaccuuucugcuuuucccaacugcuauuuuaucucugacggugacguucuca

SEQ ID NO: 4158920 - RNA, 63 nt, Human
ugagaacaagcaacaaccuucagcugugggcggacgcugacucacagacuguguugcuacuca

SEQ ID NO: 4158921 - RNA, 57 nt, Human
ugagaacaguuggaagcagucauuucauuugaaaguuagcuuuauccaacuuuuuca

SEQ ID NO: 4158922 - RNA, 87 nt, Human
ugagaaccuguaaauggggcuuaaauugcucaaagccuaaagacaaugaaaaguggcagaaugugaagacccgguuuguugguuuca

SEQ ID NO: 4158923 - RNA, 66 nt, Human
ugagaacuugugcuauugcacaacauuccacaugccaucaacauugugcaauucucacaagucuua

SEQ ID NO: 4158924 - RNA, 75 nt, Human
ugagaagcauagaauaugacuuuuagauccaagaacuuaccuacuugucucuuguuaucauuucugaguugcuca

SEQ ID NO: 4158925 - RNA, 102 nt, Human
ugagaagccuuggugcaugcaccugcagagagaagaagagguaauagaccucuucucuggcagaugugugucccucuacuaccaaauauugcuguugucuca

SEQ ID NO: 4158926 - RNA, 101 nt, Human
ugagaaggaagcagggguagagauugcugguguaagggacuuuuucuucccuucugucuucucucccacuguuuugucuucugcucuugcucucucucuca

SEQ ID NO: 4158927 - RNA, 79 nt, Human
ugagaagguaaauaacuugccaaaggucacuuaguuuuaaaaugauggagcugagacacacuuuggcaauacuggcuca

SEQ ID NO: 4158928 - RNA, 55 nt, Human
ugagaauaggcauagaaccugggccuccuguguccuggcccugugcucauucuca

SEQ ID NO: 4158929 - RNA, 82 nt, Human
ugagaaugagcugcagacugggaggcaggugucccagcaugggcucaccaagcuccuacccucucccgguccagcuuucuca

SEQ ID NO: 4158930 - RNA, 55 nt, Human
ugagaaugggagagaacacaaagucccuuuauucaggggaguggauuccaucuca

SEQ ID NO: 4158931 - RNA, 61 nt, Human
ugagacaauaaggcugagaagcugagaauuugugaagcauuaauuuuaguuuauugucuca

SEQ ID NO: 4158932 - RNA, 101 nt, Human
ugagacagagucuugcuccaucacccaggcuggagugcaguagugcgaucucagcucacugcaacccccaccucccggguucaagcgauucuccugucuca

SEQ ID NO: 4158933 - RNA, 106 nt, Human
ugagacagagugucgcucugucacccaggcuggaguguagcagugcagugcgaucucggcucacugcaacuucugccuuccggguucaagcgauucuccugccuca

SEQ ID NO: 4158934 - RNA, 59 nt, Human
ugagacagaguuucacucuuguugcccaggcuggagugcaauggcgugaucucugcuca

SEQ ID NO: 4158935 - RNA, 102 nt, Human
ugagacagaguuucgcucuuguugcccaggcuggagugcaguggugucaucucggcucacugcaaccuccaccuuccggguucaagugauucuccugccuca

SEQ ID NO: 4158936 - RNA, 63 nt, Human
ugagacaggagaggccccuccuaguuggcaugguuuuaagggggagguaaucuugaggucuua

SEQ ID NO: 4158937 - RNA, 58 nt, Human
ugagacaggaucucccuuugucacucaggcuggaaugcagaggcaugaucacugcuca

SEQ ID NO: 4158938 - RNA, 58 nt, Human
ugagacagggucuugcucuguugcccaggcuggagugcaguggcaggaucuuggcuca

SEQ ID NO: 4158939 - RNA, 63 nt, Human
ugagacaguuuuucuauuuccagccuguugcugggaagauguauuaggaaaguugaugucuca

SEQ ID NO: 4158940 - RNA, 67 nt, Human
ugagacauauaauuugcccacaaaaggaaauguaacauuuuagucugggacagauuauaagucugca

SEQ ID NO: 4158941 - RNA, 83 nt, Human
ugagacaugaugugcuccagaagcuucaaggagauucuagacucaagucuagaccccucccugcuucucaccaucaccucuca

SEQ ID NO: 4158942 - RNA, 109 nt, Human
ugagcaauaauagugauaaaaguuuuuaaguuaauugcauguuaaugacuaaguuaaacucaaaauggcaaucagcagaagcuaggaaacauuugucuuguuuaaauca

SEQ ID NO: 4158943 - RNA, 76 nt, Human
ugagcacaugcaccagaaaucaacauaagaauaaguccuuuugaguguucaaaacugguguauuauuugugacuca

SEQ ID NO: 4158944 - RNA, 59 nt, Human
ugagcaccaucuguuugugugccaaguucugugcacacugcuuuaaacagauggucuca

SEQ ID NO: 4158945 - RNA, 72 nt, Human
ugagcagaacacgggauccauggggcauccuuguguagguccuccguggcuuggaucccugugcacugcuca

SEQ ID NO: 4158946 - RNA, 67 nt, Human
ugagcagagcaauaggacucuccuuuguguugacuguuuuuacaacauagucuuguggcuuugugca

SEQ ID NO: 4158947 - RNA, 57 nt, Human
ugagcagggacuuuggagucuggugacccaggguucaaauguugucccugauucuca

SEQ ID NO: 4158948 - RNA, 57 nt, Human
ugagcauagcccuucuaguguuguagcauagugcacagccuguugguuuacugcuca

SEQ ID NO: 4158949 - RNA, 60 nt, Human
ugagccaaaucccauaauaaauccucucauauaacaggauuuauuaugggauuuggcaca

SEQ ID NO: 4158950 - RNA, 58 nt, Human
ugagccaagaucgcaccacugcacuccagccugggugacagagcaagacuuggucuca

SEQ ID NO: 4158951 - RNA, 82 nt, Human
ugagccagauauaaauggaugugguagaaacuguacaauaauaaaaguuaguauuacuaaaagacaucuauucauaugcuca

SEQ ID NO: 4158952 - RNA, 87 nt, Human
ugagccagaugugcgggaucuugguggcacugacaucagacaccaggcggugcuugacguguagccgccccggcaccaucaugguca

SEQ ID NO: 4158953 - RNA, 65 nt, Human
ugagccagcugcaucuccugggcugcacggagacacauccucagacuucaggaugcacugauuca

SEQ ID NO: 4158954 - RNA, 96 nt, Human
ugagccaggauuugaacccaggaaguuugacuggaaaguuuaugcaaauaaacaacauuucagacagauucuucucaguauaaaaacaauggcuua

SEQ ID NO: 4158955 - RNA, 92 nt, Human
ugagccaggugggcugggcauggugaaucaugccuguaaucccagcacucagggaggcugaggcaggcagaucacuugagcucacgaguuca

SEQ ID NO: 4158956 - RNA, 68 nt, Human
ugagccauaugaaaguguuaauauuuggucauuucugaccugccaaaaugacaguuucauaugguuca

SEQ ID NO: 4158957 - RNA, 65 nt, Human
ugagcccaggaauuggaggcugcagugagcugugauuguaccacugcacuccagccugggcuaca

SEQ ID NO: 4158958 - RNA, 68 nt, Human
ugagccccccaggcagcccuucugacgcacacaugcgccaugugcuccaggccgccuggggcugcuua

SEQ ID NO: 4158959 - RNA, 73 nt, Human
ugagcccuagcaggacagagcccagacugugugcucccugcagcacagugccccuaugccagcuaggagcuca

SEQ ID NO: 4158960 - RNA, 72 nt, Human
ugagcccuugcucccugugccccacuguacucugaaaguacaaugagcugagccagaggcagcaugggcuca

SEQ ID NO: 4158961 - RNA, 58 nt, Human
ugagccugguugcagugucuggucccagcauuccuggauucagagcccggcuagguca

SEQ ID NO: 4158962 - RNA, 55 nt, Human
ugagccuucccaagaacccgcacaaaccuaccggcaagguccugggccuggcuca

SEQ ID NO: 4158963 - RNA, 84 nt, Human
ugagcuacaguacuaagacuccaccuagccauuuaagacaauauuacaaaaugaagcuggguauaauuuucaguaguguaguca

SEQ ID NO: 4158964 - RNA, 62 nt, Human
ugagcucacacagcuccaaauacaauggaaaccacuggguuauuugucagcuguugaguuca

SEQ ID NO: 4158965 - RNA, 66 nt, Human
ugagcucuguuagggcuggaaccaaacauguuuguauguguaucuuugggguuuaacaugggcuua

SEQ ID NO: 4158966 - RNA, 58 nt, Human
ugcauagaggauccagugugguucugccacuguggcaaucauucugauucuuuguaca

SEQ ID NO: 4158967 - RNA, 64 nt, Human
ugcauagagucauaauuacauauauuuugcuugaggcgaaucaaugucuguucugauuggugcg

SEQ ID NO: 4158968 - RNA, 62 nt, Human
ugcauauaagggaaacucaguaaauaauuauguugaauugauuagaguugccauuauaugua

SEQ ID NO: 4158969 - RNA, 66 nt, Human
ugcauauauuugagauuauggcuuuucaguuuucugccaucaccaauaaguuuugaaauauaugcg

SEQ ID NO: 4158970 - RNA, 127 nt, Human
ugcauauguugggcuuugggcuagauacugaguucucagacauguaaucucuaccaauuccaagagagaagguaucugauuuuauucugugugucaguuaauuuaucucaaauguuuaauuagagca

SEQ ID NO: 4158971 - RNA, 106 nt, Human
ugcauauuaaaaagagauuuacugaaguucuuaugaaaacuugagcugauauuucauuucaaugugguuauaauaacuaguauauuuuucuugagcaaauaaugca

SEQ ID NO: 4158972 - RNA, 58 nt, Human
ugcaucacaucauggagaauuaugggaacccuaucgguuuuguuagagugauguggca

SEQ ID NO: 4158973 - RNA, 100 nt, Human
ugcaucacuguagaagacugcauuugacagagaaaagugugacuuauaaauuucugaaaguugucaucuuuucuguugaugguauuuauucacaaaugca

SEQ ID NO: 4158974 - RNA, 63 nt, Human
ugcaucaggacuugcaggaccagagaaagaaggagaauaaauauauccugcagcuucuaugua

SEQ ID NO: 4158975 - RNA, 55 nt, Human
ugcauccgcacgcuugugagaaucugucuaccaaagagucugaggugaggaugca

SEQ ID NO: 4158976 - RNA, 56 nt, Human
ugcaucuaaguggcuaacaacccaugagugccuggguugccuuugcaguuggauca

SEQ ID NO: 4158977 - RNA, 78 nt, Human
ugcaucucuugaggccucaguuugucaucuguaaagugagagcauuguacuagaugaucucugaggccuuucccugua

SEQ ID NO: 4158978 - RNA, 71 nt, Human
ugcaucugcaaaucccuacugggcacaaaugcaaaacaguugccaauguccuuuuugggauuuguagggca

SEQ ID NO: 4158979 - RNA, 59 nt, Human
ugcaucuuuuauucauuaugcaaauguuuauucaacauugaagggaaugcaaagaugca

SEQ ID NO: 4158980 - RNA, 67 nt, Human
ugcaugauggaugugcacuucgcuggguuauaacguguccaguuaagaaacccacgccguacgugua

SEQ ID NO: 4158981 - RNA, 80 nt, Human
ugcaugcacagcccauggccccgccgacacaggauagacgcuccaugaaaggccaccaugccagggacuagugcggugca

SEQ ID NO: 4158982 - RNA, 65 nt, Human
ugcaugcacccagccggguauucagcuugguguggucagugugccugugugcugggcugcaagca

SEQ ID NO: 4158983 - RNA, 61 nt, Human
ugcaugcucaaguuaguugugagauguggcucucagcauuuuauacuaaaaugaaguauca

SEQ ID NO: 4158984 - RNA, 76 nt, Human
ugcaugcucucuguccugcucagagccaguaccuggauggaggcuguguguucuggguggacugggggagaaugca

SEQ ID NO: 4158985 - RNA, 105 nt, Human
ugcauggcucugugcacuuuuagugccaagaagcaugagaagauuuuauaacgagaguaauuguaauaggauuuaaucauggugucggcagcaaaagggccagca

SEQ ID NO: 4158986 - RNA, 75 nt, Human
ugcauggcuuggagcagcauuucucaaagggugguucaaaacuauuuccuucaggugcucuucgaggaccuugua

SEQ ID NO: 4158987 - RNA, 104 nt, Human
ugcauguguugguggucacugagacuuggguggccugauucuguauugugcaugauuugcuuuucuggccacuaauaggucucacggugaagacagcagaacca

SEQ ID NO: 4158988 - RNA, 96 nt, Human
ugcauuauguauuuuauauuguuuauuuuugucugcaugaaagauuggaauaguaaccguguaugauaaauguuaauaauaauaaagugaaaugua

SEQ ID NO: 4158989 - RNA, 66 nt, Human
ugcauucaggauccuaugcuucagggagaguucuuuuguauaccauugcugaaggauccaggugua

SEQ ID NO: 4158990 - RNA, 69 nt, Human
ugcauucaguuggucagcuuuuauugaguacuauacuccucagagugaggcuaaggccaauggaaugua

SEQ ID NO: 4158991 - RNA, 61 nt, Human
ugcauuccagcucccuucuggcccgaggaggcggugggcugcgggaaggugcuggagugca

SEQ ID NO: 4158992 - RNA, 85 nt, Human
ugcauuccuuuccagcccuuucuuccugugugugagucuccagggccuggcugcugcacacacggagauaggcuuuggcugugca

SEQ ID NO: 4158993 - RNA, 100 nt, Human
ugcauucuaguaaaauuggccacuaguauaauugcccuaaccuucugagugucugcucacggguguuaagcauuugucuguaccauuuuugauuagugca

SEQ ID NO: 4158994 - RNA, 97 nt, Human
ugcauugaucugagagcuagaugugucuuccuugacaguucaggcaacccugauucuaauucuuuggagacaaucuguuauuaaauugaucugugua

SEQ ID NO: 4158995 - RNA, 127 nt, Human
ugcauuggaagauuucuccuuucuuacaggucguguccugcaacugaaaggcccugggagagagagccgugagggcauggcagugaggauggcagugugguggaaagggggaguuuucaaucagaca

SEQ ID NO: 4158996 - RNA, 89 nt, Human
ugcauuuaauuaaucauggugaauucaucggaaaguaaauagauauuuuagugaguuuuuccguggcuacgauaaguuaauuuaaugca

SEQ ID NO: 4158997 - RNA, 77 nt, Human
ugcauuucaaacaguuacagcugcaaggauuacucauaguaauagcagugacagacaacuguuugagcuuuagugua

SEQ ID NO: 4158998 - RNA, 109 nt, Human
ugcauuucuccaaggccauucuccuagccuguuuggaaucuguuuaauuucuuuguuugaauuaaugguuccaaaaggccagaauagcaguucauucuugagucuugca

SEQ ID NO: 4158999 - RNA, 75 nt, Human
ugcauuugcaaauuuuaauuucaugguucauggcaaugaccucaaggcauugauucugaagugaaaugcaaauca

SEQ ID NO: 4159000 - RNA, 65 nt, Human
ugcauuuuuaugcggcagugcaauagaauuugaauuuuaugcacaauuagucuuauauugaugua

SEQ ID NO: 4159001 - RNA, 78 nt, Human
ugccaaaaaguucugaaguccuucagaccuucgagucuauuugcaauucugagucuggaaacuuugacaaaaagggca

SEQ ID NO: 4159002 - RNA, 56 nt, Human
ugccaaaggacaugucaauaucaggccuucagaagagggagguagcaguucuggca

SEQ ID NO: 4159003 - RNA, 69 nt, Human
ugccaagcccaaacauguggaacuaaaucuuaaaaccccuaagaaucuugacaguuugggaaaugagca

SEQ ID NO: 4159004 - RNA, 64 nt, Human
ugccaaggagcuggaucagggcagucuuugcacaucauucguggggacccugcaguaccuggua

SEQ ID NO: 4159005 - RNA, 67 nt, Human
ugccaaucuuguagcugacuaucuuguuccagucgauuuuggugcagguaacuggaagcugccggca

SEQ ID NO: 4159006 - RNA, 113 nt, Human
ugccaaugcuccuggaucagaggagagacuccugcccacgugcuacuucugagagccagcggcuaccacagaggcagugggcuggagcccucugcaaggccgaggggaaggca

SEQ ID NO: 4159007 - RNA, 77 nt, Human
ugccacagagcuauuucuuaaaagcuguacuuacacucaggauacaguuuuccuugguauagaacucuuccauggca

SEQ ID NO: 4159008 - RNA, 77 nt, Human
ugccacaggcuuaggagggaggucugaacaaaaaugcaagaaaaaggaacuucuguccuccaagccacgucguggua

SEQ ID NO: 4159009 - RNA, 85 nt, Human
ugccacauuuuguguacuuucucaagcugaauugugucuaaugaugucaaauuauguaaugggaagagaaaaauaaauucaggca

SEQ ID NO: 4159010 - RNA, 55 nt, Human
ugccaccuugugcagcaggagguccuuccauuuccugagcuguccagggugagca

SEQ ID NO: 4159011 - RNA, 66 nt, Human
ugccagaaaguggacucgaacugaggucuucugacccuagacacaguguccuucuacuugccugca

SEQ ID NO: 4159012 - RNA, 62 nt, Human
ugccagaaggagggagcagggauccuaugagccugacaucacugcuuccucucuucauggca

SEQ ID NO: 4159013 - RNA, 92 nt, Human
ugccagaagggaagauacaaaaaugugaccacaggguguuggacuuccuucucaugcauucuguagagcauuuauuacccaaauucuggaca

SEQ ID NO: 4159014 - RNA, 79 nt, Human
ugccagacuccguuguucuuaacccccagugcagauagccaauguguguaccuggccugagcacagcggcugcuuggca

SEQ ID NO: 4159015 - RNA, 59 nt, Human
ugccagauuguggcauggcacucaacuccucaaagaagccauugaguuccagucaggca

SEQ ID NO: 4159016 - RNA, 67 nt, Human
ugccagcacuugggggagauuccgggucauaugcuaauggcucaggauaauuuucccaaagcaggca

SEQ ID NO: 4159017 - RNA, 80 nt, Human
ugccagccuuauucagaccuuggauucuuuucagaagugaaaaagggaacacucaaggucuauugaaucggagcguggca

SEQ ID NO: 4159018 - RNA, 62 nt, Human
ugccaggaggaucauccuguuuucucuaguaagaggcaggucagauaaucuucuuuauggua

SEQ ID NO: 4159019 - RNA, 62 nt, Human
ugccaggcuccggaacgacaguugauaacuagcuggcuguguucuaagagaggaggcugaca

SEQ ID NO: 4159020 - RNA, 61 nt, Human
ugccaggcucuggccuacuggaguccaugauacuuuugugucaugcaggcagaguuuggua

SEQ ID NO: 4159021 - RNA, 58 nt, Human
ugccagggcagucucccccagaccuggggcuccccagggacagagacugcaccuugca

SEQ ID NO: 4159022 - RNA, 114 nt, Human
ugccaggugggaccacccgucccaaagacucacggcugugagccccuagcagcuuacgguugcagugggugaugaguccuggggagagggaugggaguggagacccuaacagca

SEQ ID NO: 4159023 - RNA, 55 nt, Human
ugccagguugaaggaugacggggugcccagauucccaccuucaaauuuccuggca

SEQ ID NO: 4159024 - RNA, 60 nt, Human
ugccaguugggaaaacagacauuuuuagugugugucugcaguucagaucuaauuguggca

SEQ ID NO: 4159025 - RNA, 57 nt, Human
ugccaucugcacccaccugcccauugcucuucacagugguagcugcugcaguuggua

SEQ ID NO: 4159026 - RNA, 61 nt, Human
ugccaucuuugcagcacuguucccagaccacugcuuguguugguuggaauggugcuuggca

SEQ ID NO: 4159027 - RNA, 62 nt, Human
ugccaugaagagaggaagcagugaugucaggcucauaggaucccugcucccuccuucuggca

SEQ ID NO: 4159028 - RNA, 70 nt, Human
ugccauguggcuucugaauggaggaggcugcagaacuuccuucagucuucugagccauaauaaauuggca

SEQ ID NO: 4159029 - RNA, 118 nt, Human
ugcaaauaucccucagaccaaagagaugcuuccgugcuugcacuacgcauaguuuaugucauuuaacauucauuuguaacucuguuaggguggcugcaucuccugaguauaaauugua

SEQ ID NO: 4159030 - RNA, 64 nt, Human
ugcaacaguggggcaugcugaagccuuacagaggagccccucucuagccugcccacacaguuca

SEQ ID NO: 4159031 - RNA, 58 nt, Human
ugcaaccugaacuuucugauucugccaggcccuuuuggaaucagcaagguaggaugug

SEQ ID NO: 4159032 - RNA, 90 nt, Human
ugcaaccuggggacucagcuccaguuuccugacugagccuggccagguuggccgccacccauaaacuggagaccagagugcccagguuca

SEQ ID NO: 4159033 - RNA, 58 nt, Human
ugcaacuuagaaggcaugaaauuaguacuuuuuuuaacaucaugcauuucuaagugca

SEQ ID NO: 4159034 - RNA, 66 nt, Human
ugcaacuuggguuaaagcaaguacuggacuucacuuuuggcucaaagcaguuuuaaucaaguagcg

SEQ ID NO: 4159035 - RNA, 83 nt, Human
ugcaagaauaaaauacauguugaugacagugaugaccgaaagcauaagaaugucucugccaucagcuuauuuccuucugugua

SEQ ID NO: 4159036 - RNA, 70 nt, Human
ugcaagaggguguucaguuugugcaaaucaaccaagcuguauauuuauaauugggcacuuucuucuugca

SEQ ID NO: 4159037 - RNA, 68 nt, Human
ugcaagcaaaaagucuccaaauaauguccucauguguuuggcggacuuguauuuacuucuugauugca

SEQ ID NO: 4159038 - RNA, 63 nt, Human
ugcaagcacucaaugcaaacagucauuguagauuaacacaacaaugcacuugagauguuugua

SEQ ID NO: 4159039 - RNA, 68 nt, Human
ugcaaggcccagacaagagcuccacuucuuaaacaauauguguguggaggcugucaaaggguauugca

SEQ ID NO: 4159040 - RNA, 58 nt, Human
ugcaaggguguuugagcugcccauuaaucuacaggaaaguuuagaccaagccuuucca

SEQ ID NO: 4159041 - RNA, 87 nt, Human
ugaggagcaagugagaaugagacuaugcgagugugauaacaguucuauauccauaacacuuucaucucagaguacacuugugcuuca

SEQ ID NO: 4159042 - RNA, 99 nt, Human
ugaggagcuggaauagcuacuaaaaguaaaacucacaaaaggauggggccucccaugacccuguccugugcuuuuuacugucagacuuuuccaaccuua

SEQ ID NO: 4159043 - RNA, 80 nt, Human
ugaggagcuuguuaaaaugcaaauucugauucauuaagucugaguggaacucaaaagucugcauucuucacaagcuucca

SEQ ID NO: 4159044 - RNA, 94 nt, Human
ugaggaguggccucgaccugccugugacucgucuugggccaguaggggacgcccuggccucaccagacgagcgcagccaugggcgaccgccuca

SEQ ID NO: 4159045 - RNA, 70 nt, Human
ugaggaguuagggugauucaguguuauuagacugucagggcuauauauacuauauuaccuucucaacuua

SEQ ID NO: 4159046 - RNA, 118 nt, Human
ugaggaucgguuaaaagcuuugccacauuuuucacauuuguaggguuucucuccaguaugaauaaucuuauguguagaaaggguugaggacaguuuaaaagcuuugccacauucuuca

SEQ ID NO: 4159047 - RNA, 70 nt, Human
ugaggaucucauggcucuaaagacauagauuucugaauuucaaggaccuauuguccagagccaggccuug

SEQ ID NO: 4159048 - RNA, 116 nt, Human
ugaggaugaggagcaggagcgacugcggucugagauuuuuaauaggcagggcuguaaaauguuggccaggccuaagucacagaugcaccacagagcucuuucaagcccuuauucca

SEQ ID NO: 4159049 - RNA, 56 nt, Human
ugaggauggaaugcugugcaagucucuaauaggcaaauugccagcuucuaauccca

SEQ ID NO: 4159050 - RNA, 69 nt, Human
ugaggauguugaggcagacguugcccucgauuucaauguuggggugauagaccauugucucacacuuca

SEQ ID NO: 4159051 - RNA, 94 nt, Human
ugaggauuauauggauuaaugcauguuaagcucuuaaaauaguguguagcacauggaaagugcucaacauguauuugucacuguaaucagcuca

SEQ ID NO: 4159052 - RNA, 101 nt, Human
ugaggcaagggaaucgcuugaacccaggagguggagauugcagugagccgagaucccgccacugcacuccagccugggcgacagagugaggcuccaucuca

SEQ ID NO: 4159053 - RNA, 100 nt, Human
ugaggcagagaauugcuugaagccagggguuggagguugcagugagccaagaucgugccacugcacuccagccugggcgacagagcgagauuccgucuca

SEQ ID NO: 4159054 - RNA, 101 nt, Human
ugaggcagagucuugcucugucacccaggcuggagugcagugucgcuaucuugguucacugcaaccuccgccucccggauucaagcgauuuuccugccuca

SEQ ID NO: 4159055 - RNA, 102 nt, Human
ugaggcagaguuucacucuuguugcccaggcuggagugcaauagcgagaucucggcucacugcaaccuccaccucccagguucaagugauucuccugccuca

SEQ ID NO: 4159056 - RNA, 55 nt, Human
ugaggcaggacugagcgggaugaagguguaauuucauuccucagccccagccuca

SEQ ID NO: 4159057 - RNA, 101 nt, Human
ugaggcaggagaaucacuugaacccgggagguggagguugcagugagccgagaucucaccacugcacuccauccugggcaacagagcgagauucugucuca

SEQ ID NO: 4159058 - RNA, 104 nt, Human
ugaggcaggagaaucacuugaacccgggagguggagguugcagugagcugccgagaucgcaccacugcacuccagccugggucacagagugagacccggucuca

SEQ ID NO: 4159059 - RNA, 101 nt, Human
ugaggcaggagaaucauuugaacccaggagguagagguugcagugagcugagauugcaucgcugcaccccagccuggguaacaaaaugagacucugucuca

SEQ ID NO: 4159060 - RNA, 101 nt, Human
ugaggcaggagaaucgcucgaaccugugagguggagguugcagugagcugagaucgugucacugcacuccagccugggcaacagagugagacccugucuca

SEQ ID NO: 4159061 - RNA, 103 nt, Human
ugaggcaggagaaucgcuugaaccccagaggcggagguuugcagugagccgagaccgugucauugcacuccagccugggcaacaagagcgaaacuccgucuca

SEQ ID NO: 4159062 - RNA, 103 nt, Human
ugaggcaggagaaucgcuugaaccccggaggcagagguugcagugagcugagaucacacgccacugcacuccagccugggcaacagagcgagacuccgucuca

SEQ ID NO: 4159063 - RNA, 101 nt, Human
ugaggcaggagaaucgcuugaaccugggaggcagagguuguagugagcugagaucaugccacugcgcucuagccugggcaguagagcgagacucagucuca

SEQ ID NO: 4159064 - RNA, 102 nt, Human
ugaggcaggagaaucgcuugaauccgggaggcagagguugcagugagccaagaucaggccacugcacuccagccucggggucaagagcgaaacucugucuca

SEQ ID NO: 4159065 - RNA, 101 nt, Human
ugaggcaggagaauggcaugaacccaugagguggagguugcagugagccgagaucgugccacugcacuccagccugggugacagagcgagacuccaucuca

SEQ ID NO: 4159066 - RNA, 100 nt, Human
ugaggcaggagaauggcgugaacccggaggcggagccugcagugagccgagaucgcaccacuguacuccagccugggagacagagccagacucugucuca

SEQ ID NO: 4159067 - RNA, 105 nt, Human
ugaggcaggagaauggugugaaccugggaggcggagcuugcagugagccuagauugcaccacugcacuccagccugccugggugacagagugagacuccgucuca

SEQ ID NO: 4159068 - RNA, 101 nt, Human
ugaggcaggagaauugcuugaaaccgugagguggauguugcagugagccaggauuguaccacugcacuccagccugggcggcgaagcaagacucugucuca

SEQ ID NO: 4159069 - RNA, 100 nt, Human
ugaggcaggagaauugcuugaaccuggaaggcugaggucagugagccgagaucuugccacugcacuccagcuugggcaacaagagcaaaacuccuuuuca

SEQ ID NO: 4159070 - RNA, 100 nt, Human
ugaggcaggaggaucccuugagccugugagguugaggcuguagugagccgugauggcaucacugcacuccagccugggugacagagugagaccugucuca

SEQ ID NO: 4159071 - RNA, 59 nt, Human
ugaggcaggguuuugcccuuguuguccaggcuggaguacaauggcgagaucuuggcuca

SEQ ID NO: 4159072 - RNA, 64 nt, Human
ugaggcagguaagcaaguuuugucaucuggaaaaugaggguaauacuugccuaugccuaccuca

SEQ ID NO: 4159073 - RNA, 101 nt, Human
ugaggcaugagaauuguuugaacccgggaggcagagguuguggugagccaagauugcaccacugcacuccagccugggugacaaagcaagacucugucuca

SEQ ID NO: 4159074 - RNA, 64 nt, Human
ugaggcaugucuggccugucccaguggagacuuuaaggcccugggcccugccaggcuugccuca

SEQ ID NO: 4159075 - RNA, 56 nt, Human
ugaggccugacagaccaagccuguggugguuuagacaaagguucuuggaggucuca

SEQ ID NO: 4159076 - RNA, 101 nt, Human
ugaggcgggagaaucgcuugaacccaggaggcagagguugcaguggaccaagaucacgccacugcacuccagccugggugacagagugagacuccgucuca

SEQ ID NO: 4159077 - RNA, 59 nt, Human
ugaggcggggaaggaggggacggggaagaggucggaucacguccagccuuugggucuua

SEQ ID NO: 4159078 - RNA, 82 nt, Human
ugaggcuagaccaguucugacacaagcacaguugcccugaucuccgguggcugagugagguccagagcuuggcagggccuca

SEQ ID NO: 4159079 - RNA, 80 nt, Human
ugaggcuagcacuggccacguggagcauccugagccguuuuguggcucucaggcuguggccuaguuuguuauaugucuca

SEQ ID NO: 4159080 - RNA, 83 nt, Human
ugaggcucagaaaaguaacuugcuggaauuugaacuacauccaaaggguuuuaaaaucuaaagcaguugucuuuuuuaccuca

SEQ ID NO: 4159081 - RNA, 74 nt, Human
ugaggcuuaaagcaaugcccguucauuaucuuacaauucuguaagaaugccugguuuaucugcucgaggucuca

SEQ ID NO: 4159082 - RNA, 88 nt, Human
ugaggcuucuggcuacucaucaucagagaagggauauggcuucuugacuuugguugagucaggucccaucucagagagcugguccuua

SEQ ID NO: 4159083 - RNA, 79 nt, Human
ugaggcuugagagugccaagcauccuccgagcuguuugucaucgagccccaaggagcccuuggcaccuaguaggcguca

SEQ ID NO: 4159084 - RNA, 89 nt, Human
ugagggaccugaugugggccagcuuuucuccugggugugugacugaauccuucuucccagagcaugugcugccuuuguuaggucuguca

SEQ ID NO: 4159085 - RNA, 57 nt, Human
ugagggaggccuccaucugccaucuguguugcugagggugggugggggucccccucg

SEQ ID NO: 4159086 - RNA, 60 nt, Human
ugagggcaaaguggugcugagggcccaucuagguguugauagcauacauuuugcaucuua

SEQ ID NO: 4159087 - RNA, 87 nt, Human
ugagggcaggcugcuugauggaaggggacgcuccacaauaagaaagaacaaaggcuuugguuuguccucauccuccagucuguccca

SEQ ID NO: 4159088 - RNA, 57 nt, Human
ugccauguugucaaaauucagucuucauguuacauuacaucuuggcagcaucuggca

SEQ ID NO: 4159089 - RNA, 64 nt, Human
ugcccaaggccauaugauauaaguucucuuaccuucuacacuugugucaugguugacuuuggca

SEQ ID NO: 4159090 - RNA, 73 nt, Human
ugcccacacguccuucccacagaugcuguccagaguauuguacacugauuguagucugugguggcgguuggca

SEQ ID NO: 4159091 - RNA, 57 nt, Human
ugcccacccuagggagccugagagcaguggagcacacugcuuggcacucugggggca

SEQ ID NO: 4159092 - RNA, 62 nt, Human
ugcccaggacccuucaauggcucccacugcugucagggacaauuuauggguccuggugugca

SEQ ID NO: 4159093 - RNA, 61 nt, Human
ugcccauuugcucugugucaguggcacaaaagugccacugggcaugcagaugucccaggca

SEQ ID NO: 4159094 - RNA, 55 nt, Human
ugccccagaaguuugcacaagagacacaagagucugaaaaaugagaccuggggca

SEQ ID NO: 4159095 - RNA, 79 nt, Human
ugccccagguugccugucccaggugcacugggcccaggccagguuucuuucugggauagggggcuugaggaagagggua

SEQ ID NO: 4159096 - RNA, 70 nt, Human
ugcccgcuggcugggcuccagcuuccacuucuugaccuugaaauaggggcuggccccauccaggcuggca

SEQ ID NO: 4159097 - RNA, 63 nt, Human
ugcccucaugguacuuacuguagcugucuaugcagcuacgacugggaaccauaagagaaugca

SEQ ID NO: 4159098 - RNA, 74 nt, Human
ugcccucggcagcgcccgcuccgaugucucuggggguucgguugcuaccuagcagagcgggugcgaggcgggca

SEQ ID NO: 4159099 - RNA, 72 nt, Human
ugcccucuccuuuauuuauccaaaucuuggaaaauucacuugauucaagguucagggagaaauugagaggca

SEQ ID NO: 4159100 - RNA, 63 nt, Human
ugcccucuguugauauccacucacugacauaccacagugugugcccuuguucagcagagugca

SEQ ID NO: 4159101 - RNA, 56 nt, Human
ugcccucuuucuguacagcuccucccccucaauggugccacauuacagaaagggca

SEQ ID NO: 4159102 - RNA, 93 nt, Human
ugcccugacuuucccuacccagugccacccucugagggcugcccaucggggcgguuguuauugucgcugcacugggauuggggcagaggggcg

SEQ ID NO: 4159103 - RNA, 89 nt, Human
ugcccuggaaguuaaauaccugaaacuguauggccauggcauccuugcuugggcaagcagcauucagaagcagauuggcuuucagagca

SEQ ID NO: 4159104 - RNA, 58 nt, Human
ugcccuggaggggcuuacaguccagcagacacauggcucugugagccacuugggggca

SEQ ID NO: 4159105 - RNA, 66 nt, Human
ugcccugggacaugcagcggagugacgaccagucuagacaccuccaggcugcaaggccacagggca

SEQ ID NO: 4159106 - RNA, 56 nt, Human
ugcccugugagccugggacaguuguuuguccacuugcucaggcucuugacagagca

SEQ ID NO: 4159107 - RNA, 93 nt, Human
ugcccugugaguucuuugauauucuacugcaaauccugaccaaguguuuugccauguguaucaggccaguagaguuuaggcuuagagucugca

SEQ ID NO: 4159108 - RNA, 66 nt, Human
ugcccuguggccuugcagccuggaggugucuagacuggucgucacuccgcugcaugucccagggca

SEQ ID NO: 4159109 - RNA, 59 nt, Human
ugcccuuccaccugcugucugagcugucucgccucaugcagcccuucaggugaggggca

SEQ ID NO: 4159110 - RNA, 64 nt, Human
ugcccuucucugacauuacugucagcauugcaguacugugcugaguguaaugauggcagaggca

SEQ ID NO: 4159111 - RNA, 101 nt, Human
ugcaucaugguuuccagcuugucauauuuauaaaauguaagauuaaaacuagaugaucuuuaggacauuccagauuugacauucugugauucccucaugca

SEQ ID NO: 4159112 - RNA, 71 nt, Human
ugcaucccgagcccuccauggagccaggcaucuguuuaaaugucaugcaagggagggcuugaagggaagca

SEQ ID NO: 4159113 - RNA, 115 nt, Human
ugcaucucuuacauuuuuaaucuacaguaaaacauuuuuauuaggaaucuauguuuuuaauuaaacagaacauuuaauuaaggugcuuuuuaagugggugaaacaauuaagugca

SEQ ID NO: 4159114 - RNA, 58 nt, Human
ugcaucugagcacuacgguggagccguggacaagcugcuucacagaggacucagguca

SEQ ID NO: 4159115 - RNA, 60 nt, Human
ugcaucuguaguggaaaccuuagcagacaguaacugcucuggggcugucaaauagaugca

SEQ ID NO: 4159116 - RNA, 80 nt, Human
ugcaucuuacagaugaaguuugccuagagcuuuuaauugacuaguuagcucaaguuuucaaauauuauuuguggauugua

SEQ ID NO: 4159117 - RNA, 73 nt, Human
ugcaugaaugcaauuuacuguacauaaauuauauaccucaauaaaguugaugaaaaugaauugcaugcaugca

SEQ ID NO: 4159118 - RNA, 129 nt, Human
ugcaugagaaacgagcaaugucuguuauuuucugaaaagcugccuuccaugugaggaagugacuaauuuuucauuucacacuauaaagggcgugaaaaggcaaaacagaagaaggcuaaggguucugug

SEQ ID NO: 4159119 - RNA, 85 nt, Human
ugcaugagcuguuguuugcagggcaucgcguacuucucugugaucugagaagucuggaauuccugcagguuugcacucaaacgca

SEQ ID NO: 4159120 - RNA, 70 nt, Human
ugcaugccagguacuugguaugcauucacuucccugauucaggguacugauaccagguacuugguaugca

SEQ ID NO: 4159121 - RNA, 96 nt, Human
ugcauggagugucaggaaggggacgcagcacaggagugcuggauuuacagccagccagccccugacuguguccugcucaccccuuccccuccugca

SEQ ID NO: 4159122 - RNA, 84 nt, Human
ugcauggucuagaagggaggcugugguucuggugacauccacucggacccacagauucuucauucuaugggggugaccagagca

SEQ ID NO: 4159123 - RNA, 88 nt, Human
ugcauguaucuacuguaucugcauguaucucucugcauguaucucucuguauguaucucucugcauguaucuacuguaucugcaugua

SEQ ID NO: 4159124 - RNA, 62 nt, Human
ugcauguaugugcucacauguguauacccaugugucuaugcauaggaaugugcauauaugua

SEQ ID NO: 4159125 - RNA, 69 nt, Human
ugcauguauucuuaguuuuaaucagagcuacugacuguggggcucuuauguaaacaaagaauaaauaca

SEQ ID NO: 4159126 - RNA, 56 nt, Human
ugcauguguaugcauucauacauacacauguguguguguauguguaugcaugugua

SEQ ID NO: 4159127 - RNA, 56 nt, Human
ugcauguguauuuuguacuauugggcagaucuuauuguuuaaaaguacacacugug

SEQ ID NO: 4159128 - RNA, 76 nt, Human
ugcauguuuucuuucagauuaucucaacuuuggucuccugggaccacucguugcugacagucagaaaguaagugua

SEQ ID NO: 4159129 - RNA, 65 nt, Human
ugcauuagaaucaccuggagggacaguugaaacacagauuaccaaccuaacuccaugauuuugca

SEQ ID NO: 4159130 - RNA, 63 nt, Human
ugcauuaugcuugugcuguauauacaugugaauaaauauauauggcacaaaauguauaacgua

SEQ ID NO: 4159131 - RNA, 59 nt, Human
ugcauucauguguguuucauguauggaauaguccaucuguuuuuaacacauauaaugua

SEQ ID NO: 4159132 - RNA, 75 nt, Human
ugcauuccugacccaccaagucuguaagcauaauaaaaugauugcuuuacaaaauuugaagugguuuguuaugca

SEQ ID NO: 4159133 - RNA, 74 nt, Human
ugcauucuaguuuucaguccaccaggucacccucugccucugagagguaacccugguugaggacaagguaugca

SEQ ID NO: 4159134 - RNA, 129 nt, Human
ugcauugacuaaaggcacaguaacuaaguauuaaggguuuuuaaaccgccuuuuaggaagaugcugcugccuuccaguauguuaagauggugguucugcccaugcaguacuguaccacaaugcagugca

SEQ ID NO: 4159135 - RNA, 63 nt, Human
ugcauugcaugugugaaaugcacagaaggucuuuauguucuguuauaaaucacacugcaugua

SEQ ID NO: 4159136 - RNA, 121 nt, Human
ugcauuuaguaagcauuuguuaaaugaauggauggggucaagauacaguacugauauuuucaaguuuuugcaauguauuuccucagucauuuaucuaugcauuuauaugcucauuaaguca

SEQ ID NO: 4159137 - RNA, 110 nt, Human
ugcauuuaguagagccagaacuucagcuguaggccaaugcuuuucaauacccucuugguugaaagcauuagucuaagguagagaagacuaguuuugguaggaaugaggca

SEQ ID NO: 4159138 - RNA, 101 nt, Human
ugcauuuauaauuuuuaacaauuuuuggaagaaauucuuucuagaguagcugauuuugucuguuggaugguuuccaaaagauuuuuaagauuauaugugua

SEQ ID NO: 4159139 - RNA, 67 nt, Human
ugcauuuguuacauagguauguuugcuuuguggagauccauugagcuguauaccuaugacuggugca

SEQ ID NO: 4159140 - RNA, 74 nt, Human
ugcauuuugucagccacuuucaaaauugugaugaauugggcaauucugcaagugacugaccuucauuggaugua

SEQ ID NO: 4159141 - RNA, 66 nt, Human
ugccaacaguuccuccauccucucuuucucucucuugggauuguaaggaggggaggcauugaggca

SEQ ID NO: 4159142 - RNA, 68 nt, Human
ugccaacauauuuucaaaguaagggagugaguguuuaugagacugcccuggaaaugagagguguggcg

SEQ ID NO: 4159143 - RNA, 57 nt, Human
ugccaaggagcccuggccucucacuuccuugauacugaccaggccccgggcccugca

SEQ ID NO: 4159144 - RNA, 97 nt, Human
ugccaagucugagggauaucauuucucugagucugauaauuucuagaucaguaaacagucagggcuuacucagggaguuugaaccucauggguggca

SEQ ID NO: 4159145 - RNA, 59 nt, Human
ugccaauaaacuguaaagagggaaaaaaaggccccuguuuucuuugcaguuacagggca

SEQ ID NO: 4159146 - RNA, 82 nt, Human
ugccaaucaucuuguuacaguuuauuacaugcgugacuugauuuucuugcaugugcguuuuagagguaacaacauauuggua

SEQ ID NO: 4159147 - RNA, 60 nt, Human
ugccaaugguguaaagcucaagagcaggagaaauccaguuucagcucaagcacucaggca

SEQ ID NO: 4159148 - RNA, 63 nt, Human
ucuaaggggccaggacuaaguuaacugccuugaacuacauggaaguauccuggccccuaugga

SEQ ID NO: 4159149 - RNA, 66 nt, Human
ucuaaggugggguccugucaucugauuuucacaggacuuucaggugauucugaugcccacccuagg

SEQ ID NO: 4159150 - RNA, 91 nt, Human
ucuaaguuauugucacaccuuguaaagcaucucugucauauaacugauuguaucaguugugcauuacgauugugaugauacucuacuuaga

SEQ ID NO: 4159151 - RNA, 78 nt, Human
ucuaaugaguuauuuuaaccuacaugagaacuuuaaaggaaaaguggcuuugaagauaggaugugggucucaauuaga

SEQ ID NO: 4159152 - RNA, 89 nt, Human
ucuaaugcccaugguggcaagcaguucgcagcccgccuccuuccucagggcagguccggugugucuguuuaccucaggauccaauuaga

SEQ ID NO: 4159153 - RNA, 64 nt, Human
ucuaaugggagcugaaugacugugucguacaaucuagaggcagagcaagcagaauccaucuaga

SEQ ID NO: 4159154 - RNA, 72 nt, Human
ucuaauuaguauucaguuuauaacaccuaaggugcaaacagcagugugugggaaggcuaggaugcuguugga

SEQ ID NO: 4159155 - RNA, 66 nt, Human
ucuaauuguacaguauuugaagaauaugagguuaaauucauuauucaaauaaucuguagaaagagg

SEQ ID NO: 4159156 - RNA, 76 nt, Human
ucuaauuuugcaugucgcuagcugucaccaauugaaucccuuucaguugcaccugcaugguacuuguaagagaaga

SEQ ID NO: 4159157 - RNA, 121 nt, Human
ucuacaaauccuacuacuuaguauccugggcacauuuugacuaguguuuugaauuuagaaauaacuuuaucagcuauguauuaguccugacagcuaaaaauaguauuggaaaauuuauagg

SEQ ID NO: 4159158 - RNA, 69 nt, Human
ucuacaaucagcaggugccucagauucuuucuguauuacugaagucucugguugcuugcauggguugga

SEQ ID NO: 4159159 - RNA, 72 nt, Human
ucuacagaaguuuggaugccaucauaggguugaaaccuuauuuuggauccaccaaacacaauaauucugaga

SEQ ID NO: 4159160 - RNA, 81 nt, Human
ucuacauccccuugugguuuggaaguuugaugaggcuauggauucuaucaguuuuguucacuacuauauucacaguguaga

SEQ ID NO: 4159161 - RNA, 56 nt, Human
ucuacauuccuuuuauaauaucugucuuucaagauuguuguaaggguugaaugaga

SEQ ID NO: 4159162 - RNA, 63 nt, Human
ucuacauuuugauggguggaguagcagccacauggcuaagacacaugcguacaagauaaaaga

SEQ ID NO: 4159163 - RNA, 69 nt, Human
ucuaccacccaagaaucuugcagcuuagacucccucccggugcaguuuauagcccagauucaugguaga

SEQ ID NO: 4159164 - RNA, 56 nt, Human
ucuaccacuuugaccucucugugcagaggcuaaagguacuggucagggguggugga

SEQ ID NO: 4159165 - RNA, 56 nt, Human
ucuaccagcaacagaaggcaggggaccugagacuccuuucacuguggugcuggaga

SEQ ID NO: 4159166 - RNA, 64 nt, Human
ucuaccucugccauugucauugccacuuguccaaggagaaugagacacgugaagcagaugugga

SEQ ID NO: 4159167 - RNA, 64 nt, Human
ucuaccugguacauagaaauguuuagagagcacauuuauuaauauaucccauguacucugugga

SEQ ID NO: 4159168 - RNA, 55 nt, Human
ucuacgaagccaccauggagacgaaagagccaaucgucuacacgggcaguguaga

SEQ ID NO: 4159169 - RNA, 60 nt, Human
ucuacuaaggaauaucauaagaaguagccauaugaaacugguuacucuauucccuguaga

SEQ ID NO: 4159170 - RNA, 69 nt, Human
ucuacugcacuggugucucaucugugaugauucaaauguucuguuuucuucaugauacuguguuguaga

SEQ ID NO: 4159171 - RNA, 76 nt, Human
ucuacuguguuauuccugugcaaaauuacuucauauuacaaaguggagcaguguuuaaucagaggaauuauagaga

SEQ ID NO: 4159172 - RNA, 63 nt, Human
ucuacuucccaguacugccugccacaacuauaucccuuagaauccagaacagcugggaagaga

SEQ ID NO: 4159173 - RNA, 63 nt, Human
ucuacuucuccuucauuucccauccaaaaacauccuaaaggauaagagaugaaggggaggaga

SEQ ID NO: 4159174 - RNA, 80 nt, Human
ucuacuucugucaaagacagaaggaaauggggguagcucuacauuccuauuugccucaagucuucacuggcagaguuaga

SEQ ID NO: 4159175 - RNA, 68 nt, Human
ucuacuuucugucacaauaauugccagcacauguguguuacauggaauguuguguauaggucaguaga

SEQ ID NO: 4159176 - RNA, 76 nt, Human
ucuagaagcugagauguccaacaucaaggcaccagcgauucagugucugaugaggaccuggucucugcuucauaga

SEQ ID NO: 4159177 - RNA, 93 nt, Human
ucuagaaggugaaguaauucagccaaggucacacugcuagagagagaccuaaaucagcucuagacaucuuggcugcaauuaacacucuccuga

SEQ ID NO: 4159178 - RNA, 71 nt, Human
ucuagaaguuucagaaaucaaaaccaggguccaaaacccuguucuguuuuuaguuucuggcacugacauga

SEQ ID NO: 4159179 - RNA, 72 nt, Human
ucuagaauguuucaauuugacccaaaucuuucuuuuacuagcuaaguaaaauaagagaagggucguucuaga

SEQ ID NO: 4159180 - RNA, 77 nt, Human
ucuagacaaagcgcucugagcugaaacaugagcaugcacacauaugcaucucucucggucucaugagauaaucugga

SEQ ID NO: 4159181 - RNA, 57 nt, Human
ucuagacauuggggauacagcaaugaacgaaacacauagcaucucuacugucauaga

SEQ ID NO: 4159182 - RNA, 94 nt, Human
ucuagagagaggaagggagacaauuuaugugccagauuugucucuuacugaucugagauugguuccacaaagauugucucucuaagcuuauaga

SEQ ID NO: 4159183 - RNA, 80 nt, Human
ucuagaggcaugaccaagaaacaacccucuucugagcauuuucacggcuuuaaaggaauugaguuucuugugguuuuaga

SEQ ID NO: 4159184 - RNA, 76 nt, Human
ucuagaggcuggaaaguucaagauaaagcugcugucagauuugguuccuggugagagucugcuuuccggcuguaga

SEQ ID NO: 4159185 - RNA, 99 nt, Human
ucugaaccagccccugggcagaacucacucuuucaauugaaagaugcuuuuaguaucaguuuaguccagaggagaguugcguuauggggcuauaaaggg

SEQ ID NO: 4159186 - RNA, 78 nt, Human
ucugaacccagcugcaccacagcaucccaggucccuauucuuuacagccuguggagcucagaaguagcaguguucaga

SEQ ID NO: 4159187 - RNA, 85 nt, Human
ucugaagacaaucuaaggggaaugguuaaacacaucucauuauaggaauguuauguagcuauucucauacaugauguuuguuaga

SEQ ID NO: 4159188 - RNA, 56 nt, Human
ucugaagcuauaaggaccggugauacuauggagagagcacuggcuuuagcaucaga

SEQ ID NO: 4159189 - RNA, 72 nt, Human
ucugaaguacuaaacaucaccuucugcaguuggccucugugguuaagagagcggaagauguuuauuaccaga

SEQ ID NO: 4159190 - RNA, 74 nt, Human
ucugaagugagaacaguuuguuggagacugugcccuuaaccaguagagucucugcuaacucuguuagugucaga

SEQ ID NO: 4159191 - RNA, 81 nt, Human
ucugaauccaucaugcagaacaauggauuagcaaacacccaacgaaaaugcaaagaacauuucagacaugguggaggcaga

SEQ ID NO: 4159192 - RNA, 81 nt, Human
ucugaaugcucagggucugagcaucucuucaucauaugggacauucaucaccaugagguaucucauuuccugaaauucggg

SEQ ID NO: 4159193 - RNA, 85 nt, Human
ucugaauggcagccccuguggggcugaaagaggcuuuuccuuaaaguccaucucugccccacacaacuggcgucauccucucaga

SEQ ID NO: 4159194 - RNA, 76 nt, Human
ucugaauuuuaguuuacucaucuauaaaauggagauaauacucacauuuaaagguuguggguaaaagaaaaugaga

SEQ ID NO: 4159195 - RNA, 88 nt, Human
ucugaauuuuauuagaguauaugacuuucuuuugcagacacuacuaguagguauuuugcaaagucuugucuuugaggcugauucuaga

SEQ ID NO: 4159196 - RNA, 90 nt, Human
ucugacacacaggucuuccucaggcauuagcuggacuugcuccuuccugcccgucuagcucaaugagccugauuuccucaguguaucgga

SEQ ID NO: 4159197 - RNA, 78 nt, Human
ucugacagcagccccaccuugagagcagaaacagaagaguucuguucugugugcugggagggagucacacugugcaga

SEQ ID NO: 4159198 - RNA, 55 nt, Human
ucugacaguuauauaagcaccagagcuaggcauggucugacuuguagcugugaga

SEQ ID NO: 4159199 - RNA, 79 nt, Human
ucugacauagccuacugaaagaauacauaauuuccccuaagaaaagaggagggacuuagccuuuuagcuguaauccaga

SEQ ID NO: 4159200 - RNA, 78 nt, Human
ucugaccccagggaagggcuaccugaggcugaggggguguugaggggaggccucauguggccccucccugcggacaga

SEQ ID NO: 4159201 - RNA, 79 nt, Human
ucugaccugcaaauucagaagaacugcccuggcaacugucauuccagggcuuucugaaguuguaaacacacauggcaga

SEQ ID NO: 4159202 - RNA, 129 nt, Human
ucugacuuuauuaagauugagcauaaaaagcaagaggcuggauuaaaaaccaccauuaaaauacccaagugaauuuaauucaguauuuauggaacugaguauguuuuacucuaauaaggaacagcuuaa

SEQ ID NO: 4159203 - RNA, 58 nt, Human
ucugagaauaaaaauugcauuucuuggaagucucugagauugcuguuauguucccagg

SEQ ID NO: 4159204 - RNA, 130 nt, Human
ucugagagccuacguuuuauauacauuuauguaguuacggacuaucaauccuucaauuaacugcuccacugcccuaagcaauuguuagucagacacaccuaaauguacauuaaaagggauugcucuuagg

SEQ ID NO: 4159205 - RNA, 97 nt, Human
ucugagcuguaacauuuggcagguuuccuugcuaacauuuggcaauaauuguuuaucaaaugcuaacaaggaaugcugccaaauguaacagcuccga

SEQ ID NO: 4159206 - RNA, 62 nt, Human
ucugaggaggcagcgugcugagaaguguucgaggugaacauucagggcagcugcucuucaga

SEQ ID NO: 4159207 - RNA, 78 nt, Human
ucugaggaguacagagggcuggugccuuggggaaaccagaagccagcuggcccaagggcaucaaguucuacuucugga

SEQ ID NO: 4159208 - RNA, 65 nt, Human
ucugaggagugacccucuugcaccuacauucuagagcauuuagauuugccagagauacucccaga

SEQ ID NO: 4159209 - RNA, 85 nt, Human
ucugaggauauuguuacaaugcagaucuugguucacauggcaggaauuggggccuaagauucuguauuucuaacaauucccaaga

SEQ ID NO: 4159210 - RNA, 55 nt, Human
ucugaggcuaagagacagaggccuggaagaaggcucuguggucucuguucucagg

SEQ ID NO: 4159211 - RNA, 130 nt, Human
ucugaggcuccauggcuuagccaugcaacuugggcaguggcugggccucucugagguuugugguucucaucagcagaacagggagccggccaugcugaccgcugccuuugggcugagcuuggaccgcagg

SEQ ID NO: 4159212 - RNA, 57 nt, Human
ucugaggcugucaggagaaucugccccgggcucccccugacuccuggcagccucagg

SEQ ID NO: 4159213 - RNA, 63 nt, Human
ucugagggcuguacuaugcacggaagaaucagaaaugaguauaguauuuuucuggcccuccga

SEQ ID NO: 4159214 - RNA, 57 nt, Human
ucugagggguuaucaagugaaaguggaauuagauuuguucuucaugauccugucaga

SEQ ID NO: 4159215 - RNA, 55 nt, Human
ucugagguuuucauguuuucugugacagcacaagagauccauggaagcucugggg

SEQ ID NO: 4159216 - RNA, 67 nt, Human
ucugagugguaguacaggagauaccggggaggguucccuggcuuuuguugguaccaccuuauccaga

SEQ ID NO: 4159217 - RNA, 96 nt, Human
ucugaguuuacaagugcuguuuccuugagaaaguacaaggcuguauuuuucuucacauauagcugcauuucagugaaauauuucuuggccuucaga

SEQ ID NO: 4159218 - RNA, 84 nt, Human
ucugauaagaucuuaucccauccuacuugaaaggugaugcacaauuuacuugugagguagguggugaaaaaugacucuaucaga

SEQ ID NO: 4159219 - RNA, 75 nt, Human
ucugauaggugguagaaggaggccccuagugaucuuuaaaauccuuuuaagcuccucuccuucacugccuucaga

SEQ ID NO: 4159220 - RNA, 61 nt, Human
ucugaucucacuguuuauguugcuuuccaaagauguauguugcauaauacaguggaucuga

SEQ ID NO: 4159221 - RNA, 78 nt, Human
ucugaugauucuuugaccaaaaaauugagacauuugggaaaugaugaagugcacauuguuuggucagagcauacuaga

SEQ ID NO: 4159222 - RNA, 73 nt, Human
ucugaugcaugcauguuuuuacccacagucguccaucaccagggauuuuuguguuugaggcauguugcagaga

SEQ ID NO: 4159223 - RNA, 58 nt, Human
ucugauguucuuggagauaaauucuuacagauuucuuuuguaaucuagucacaucaga

SEQ ID NO: 4159224 - RNA, 61 nt, Human
ucugauguuuuauggaacaaaccaagauaaacugcauguugaaauccaugagacaugaaga

SEQ ID NO: 4159225 - RNA, 74 nt, Human
ucugauucuauaggauuguauaccuuugauugccuuugauuaacuaggcugucuuacaguucuguagaaguaga

SEQ ID NO: 4159226 - RNA, 66 nt, Human
ucugauucuugccuugacaugggaaguaggugagccuuuuccuuuccaggcagagcagggauuaga

SEQ ID NO: 4159227 - RNA, 78 nt, Human
ucugauuuauucuccacaguaaucacacaagguagucauuucuugcuccauuuuacagguggagaaguaaggcucaga

SEQ ID NO: 4159228 - RNA, 78 nt, Human
ucugcaaaaguggguuuugggacagccaagcucugagccccuuccagaguuuguaaccuaagauucagguuuugcugg

SEQ ID NO: 4159229 - RNA, 64 nt, Human
ucugcaaacccccaucuaucauucaugcacagccuuugcgugccuuugaauagggguuugcaga

SEQ ID NO: 4159230 - RNA, 66 nt, Human
ucugcaaacuuaaguugaaauagcuugugaccaaccccaaaugauuuugcuaucagcuuuugcaga

SEQ ID NO: 4159231 - RNA, 89 nt, Human
ucugcaaagcuuaacucuacacugcacuuuauuucccaaacuaaagggagggccuggaaugcagugggagcuuaccaaauauuuguuga

SEQ ID NO: 4159232 - RNA, 62 nt, Human
ucugcaacagugcccuguaaauuaacacuuuaguuucuuuaugggagauguaucugugcaga

SEQ ID NO: 4159233 - RNA, 61 nt, Human
ucugcaagcucaguucugacuuacuccugcauugcaccuucagucacauugagcuuuugga

SEQ ID NO: 4159234 - RNA, 107 nt, Human
ucugcaauuucacuuccaugagcuuccugaagaugaaaagagagguuuccccaccaguucagaaauucucugaagucuuucagggcacucaucaccaguguggcaga

SEQ ID NO: 4159235 - RNA, 102 nt, Human
ucugcacaccaggcguggcccuccuguagcacugacaccauaugugucauuacauguggaaagucaaguuccaggauggauuguaagggcagggagugcaga

SEQ ID NO: 4159236 - RNA, 60 nt, Human
ucugcacccacguaccuuggcugaaccacagcggggcaagugauaaggggugggugcaga

SEQ ID NO: 4159237 - RNA, 58 nt, Human
ucugcacccugaccucuguuucuguguuuauaaagggaacaaaaggcaagggugagga

SEQ ID NO: 4159238 - RNA, 66 nt, Human
ucugcaccucugaaauuggucagcacccugaaacuguccugcuggaccaacugcacaggucacaga

SEQ ID NO: 4159239 - RNA, 60 nt, Human
ucugcagaaggaaucagcugaguuuggagacuauuuugauauccugauucccucuuaaga

SEQ ID NO: 4159240 - RNA, 78 nt, Human
ucugcagagcugaacaguuuacuuagccaaugaggauauaaauauuugcauaucugauagacuaaugccagcucuaga

SEQ ID NO: 4159241 - RNA, 62 nt, Human
ucugcagcugccugcaacacaagcuuggaccacccaggccgaaguggaugggcaucuggaga

SEQ ID NO: 4159242 - RNA, 58 nt, Human
ucugcagggaaguuguaauguaauguuagaguagugacaucuaauuauuucccugaga

SEQ ID NO: 4159243 - RNA, 77 nt, Human
ucugcagggagggcuuuccaggcaugccacuggucucacccaggggaaaagcccauggaaaaccuguccucugcaga

SEQ ID NO: 4159244 - RNA, 92 nt, Human
ugcucaagaugaagucaugugccacaugcuuuucccacaauuauaggaaagucuuucucuaaaaaagucuguucacuugguauuuuggugca

SEQ ID NO: 4159245 - RNA, 67 nt, Human
ugcucacuagaagauucagcaguagggugggaugcucuucuucuccugcccuuggacuuccagagca

SEQ ID NO: 4159246 - RNA, 59 nt, Human
ugcucagcuagggaagguuagcuugcuaaaugacugucaaggggccucuccuauuggca

SEQ ID NO: 4159247 - RNA, 84 nt, Human
ugcucaggaaagucacuugucucuuguaccagaccauaagggguuuacauggccugggagagggauagugcagauccuguugua

SEQ ID NO: 4159248 - RNA, 92 nt, Human
ugcucagggacucucugggggaaacaaggcagggcuguacucaaauuggaguuuuccuugggcuccugccgucuuuucugagucccugugca

SEQ ID NO: 4159249 - RNA, 90 nt, Human
ugcucauucgcucauacacucuuugccacuccgugccuggcucccccuuggcaggugugagaucgaggccaguagugugagccaagcgca

SEQ ID NO: 4159250 - RNA, 55 nt, Human
ugcucauuuauguagguauugcuuuuguuucucacugcaguggcauaguugagua

SEQ ID NO: 4159251 - RNA, 56 nt, Human
ugcuccaggaaaauagggaaugagagaaacagcuuuuuuucauuguuccuggagca

SEQ ID NO: 4159252 - RNA, 114 nt, Human
ugcuccagggucauuuggagugaugguugccugguauuugaauaaagagcuccccuaucagaacauucagguucaaaucuuagugccucuguuccuacuguaugaccuugggca

SEQ ID NO: 4159253 - RNA, 84 nt, Human
ugcuccaguggcuucuucuugggagcugcauucuaugacuuuccuggacugcaugcuucccaagggcggggaccacgucaguca

SEQ ID NO: 4159254 - RNA, 60 nt, Human
ugcucccauaugaaugauuguuccguacaucauaugugucaaaccauucaucugguggca

SEQ ID NO: 4159255 - RNA, 69 nt, Human
ugcucccaucaggaacuuggccugcacuaaccucccaggggagguaauaggucccagguuugggcagca

SEQ ID NO: 4159256 - RNA, 58 nt, Human
ugcuccguucuucugcuucuuguagcuauagagccccacagcaggcagaacgugggca

SEQ ID NO: 4159257 - RNA, 56 nt, Human
ugcuccguuuuugaccggcacugaugccacaucacauagcugaguaaaauggagua

SEQ ID NO: 4159258 - RNA, 78 nt, Human
ugcuccucauuuaccucagagggauguuacaggcauucauuuugaaagccuauaaagcuuuuugagcaaggaggagua

SEQ ID NO: 4159259 - RNA, 74 nt, Human
uggaauucccaaguaacuuuuaaaauguaaaauaggugcccuuuaguuuaaugugcaaagguuagggaguucca

SEQ ID NO: 4159260 - RNA, 87 nt, Human
uggaauucuaguacaagucugaaggucugagaaccaggagagccaaugguguaguuccugucuaaagaccugcaggcuugagaccca

SEQ ID NO: 4159261 - RNA, 69 nt, Human
uggaauuggaaucagaugcugauguuccauuaaaaaucaaugcaucaaaguugauauccaauuaugcca

SEQ ID NO: 4159262 - RNA, 75 nt, Human
uggaauuuggcacugggagcugaggcugacgcugcauugcuaaggagugacagggccagcgcccaggcccagcca

SEQ ID NO: 4159263 - RNA, 65 nt, Human
uggacaaaggucuggggaaccugcagaaccgcucugggcugguguucaaacagacuuugugucca

SEQ ID NO: 4159264 - RNA, 101 nt, Human
uggacacuuuuauuuauucauucauccaacacguauuugcuggccgccugcuaugugccagucucugaguuaggacauugcagugaaaaaucaaaguucca

SEQ ID NO: 4159265 - RNA, 70 nt, Human
uggacagcaucccauucacagucacccuucuccauggaguggccauuggaaggugcacugugacagucca

SEQ ID NO: 4159266 - RNA, 73 nt, Human
uggacagggcagccaggccccgugggaagguggcuggagacugggcccaugggcauccugguggcccuguuua

SEQ ID NO: 4159267 - RNA, 65 nt, Human
uggacauaguuagcuaccacacagaaagagcucacccucuaccugugucuaugcagccauaucca

SEQ ID NO: 4159268 - RNA, 56 nt, Human
uggacaugucuucuccaagaaauagguuaaaacuauugcugaagacaaaaugucca

SEQ ID NO: 4159269 - RNA, 129 nt, Human
uggacauguguuuucauuucuuuuggauguauuccuagcauugcaguugcugggucauauguaaauauguaacuuuacauuuaaccuuugaggaacugccagaguauuuccaauggcugcaccagucua

SEQ ID NO: 4159270 - RNA, 85 nt, Human
uggacauguuucuguugaguauauaccuacaaguagaauugcuguuguaagguagggauguauucagcuuuagaagacacuuuca

SEQ ID NO: 4159271 - RNA, 130 nt, Human
uggacccaacacaaaugguucccaguuuuucaugugcccugccaagacucagugguuggauggcaagcauguggucuuuggcauggugaaggcaugaauaucauggaggccauggaacacuuugggucca

SEQ ID NO: 4159272 - RNA, 62 nt, Human
uggacccagaggugcucuuuggaaguggaaggcucuucuccgcuaaguucucugcagguuca

SEQ ID NO: 4159273 - RNA, 68 nt, Human
uggaccugauugcuuuugagcuagaauuuugcccuaggcaguguucuuguuucuaagcaaaugcgcca

SEQ ID NO: 4159274 - RNA, 74 nt, Human
uggaccugguuuggaggacuaguuaagagaccuuuuggaggucucugcagcucccggccccuuauuggagucca

SEQ ID NO: 4159275 - RNA, 58 nt, Human
uggacuagaagggcaagagucccugaagcaaauucaaacuguuggcuuuucugggcca

SEQ ID NO: 4159276 - RNA, 87 nt, Human
uggacuagugugguaguaggaauucauaucaaaauuagacuuugugacugaaaguguaaacaaaugcauucuugcuaagacuagcca

SEQ ID NO: 4159277 - RNA, 74 nt, Human
uggacuccagauggauuuaagaccuaacuaugaaaaguguauuucuacaauugugucuggaaugcguggagcca

SEQ ID NO: 4159278 - RNA, 103 nt, Human
uggacucugaucucauacucuugccuuauagugcucugcauuggcagaacucagcugaaaugcagaaagcaggugagcccaaugaugcagaggucagaguuca

SEQ ID NO: 4159279 - RNA, 72 nt, Human
uggacuguuacaagagagagacaugaucuuccuuaaggcauugauuugucaugagucucuuuguuauagcca

SEQ ID NO: 4159280 - RNA, 109 nt, Human
uggacuuaccucuuuugcaguuaucuuccuauuauuagauaaucuacuugguaaaauugcaugguacaagaggauuauuaauaaauaaucauuaaaaauggcuaguuca

SEQ ID NO: 4159281 - RNA, 90 nt, Human
uggacuuccgagcucauacucuucaccucuagcuugucccaugagaugguuucagucucagaggugggaguggggcuugggaaaauucca

SEQ ID NO: 4159282 - RNA, 117 nt, Human
uggacuugggcacauuauugagucucugagccuccauuucauaguugucacaauaaggagaaacauccuuaagucaugcuguaaaugugaaaggagaugugauauguaaaaggucua

SEQ ID NO: 4159283 - RNA, 68 nt, Human
uggacuuuguugagaaauuuuccuaggaucuuccucagucgaaccaggaagcuuggcaauaagguuug

SEQ ID NO: 4159284 - RNA, 63 nt, Human
uggagaaacucucucagacacccauuuggaaaugcauuaguguuuuucucagugaguccucca

SEQ ID NO: 4159285 - RNA, 67 nt, Human
uggagaacagggcugaguaacaggaauaacacucaggugguugucugaacuccagcccugcucucca

SEQ ID NO: 4159286 - RNA, 83 nt, Human
uggagaagaaggucuaccagggaucuaggagggcaugcaacauaugccaggcauuauuccgaucccuguguauugguucucca

SEQ ID NO: 4159287 - RNA, 87 nt, Human
uggagaagacaagacuggaaugauugaaaaggaaugauuggugcuuuaacuuacauugagccaucacagucauuuauugucucuuca

SEQ ID NO: 4159288 - RNA, 99 nt, Human
uggagaagccagaaauugagugcagccagcccagugccagaacccacccuccucaccucugcacugugcugccuccaccaacagggcucgguuucucca

SEQ ID NO: 4159289 - RNA, 68 nt, Human
uggagaauguaggaaauacuuuucuguuacuguaaugcugaaggccauccugcauccugaccucucca

SEQ ID NO: 4159290 - RNA, 68 nt, Human
uggagacaggcgguccagcccgccagccuggaauugcucuuaggccagggccagauuagccaccucca

SEQ ID NO: 4159291 - RNA, 65 nt, Human
uggagacaggucugugaaccggagguuaguagaugggcucuccagguaugacauggcuguuucca

SEQ ID NO: 4159292 - RNA, 70 nt, Human
uggagaccuggaagggucagagugaugaggcugaggccagcucacaacucaggcucuuucugcugcucca

SEQ ID NO: 4159293 - RNA, 63 nt, Human
uggagagagucgggauaguacaaagcggguuaccccuagcucacaccuucccugcucccucua

SEQ ID NO: 4159294 - RNA, 68 nt, Human
uggagagauaaagagaaacaugggacugaaggacugucuuguaccuuccagccccaucucaucgucca

SEQ ID NO: 4159295 - RNA, 66 nt, Human
uggagagcucuggcuuuaaggaugccacaggcggaaacugacaaagguguugccagagggauucca

SEQ ID NO: 4159296 - RNA, 62 nt, Human
uggagaguuuagccuacuggaaaaugaaaccggaaaaguagguggggugggcugagcuucca

SEQ ID NO: 4159297 - RNA, 57 nt, Human
uggagauaauaauaguaccuaucucaucagauguagguuuuucuguuauuauguuca

SEQ ID NO: 4159298 - RNA, 65 nt, Human
uggagauagguguacauccaugaaaccaucaucacaaucuauggaggaggaacuucuuaucucca

SEQ ID NO: 4159299 - RNA, 57 nt, Human
uggagaugccuggagauuagggacugggucauguagcaucagauaacagguacucca

SEQ ID NO: 4159300 - RNA, 68 nt, Human
uggagcacagccaaaguaagaaggacaaucagggcucuaaagcauggccucauuaucacuguguucua

SEQ ID NO: 4159301 - RNA, 130 nt, Human
uggagcagaggaugcugguacaaggggaaucugguuugagagugugagcuuuuccagggggauaaaggcaacagcuucuuguauaaugagauugacuuuuaaauugaaagugcuagugcuugugcugcgg

SEQ ID NO: 4159302 - RNA, 119 nt, Human
uggagcagggacugagggcgagcauggggccaggugcuguccugcacaugucuacgggggagaggcuggaccacccaggauggcucuugguugcuugaaauccuuaaguucuaguucca

SEQ ID NO: 4159303 - RNA, 62 nt, Human
ucugggacaggggagcagaggggauggguuaccccucagaucucugcagcccugcuuccagg

SEQ ID NO: 4159304 - RNA, 59 nt, Human
ucugggagccugaaagugaauggaagaaaggcagcuucuccucaccuucauuuuccagg

SEQ ID NO: 4159305 - RNA, 85 nt, Human
ucugggagguagaagguggaggcagaugagcagcuguguuuauuuuaaaacauaucauuuaacccucaccuaaaaacaaauugga

SEQ ID NO: 4159306 - RNA, 105 nt, Human
ucugggcagguuaauaugauguguuuccucugcacagucucguggagcuguacagagguguacauaugauaaauauaaguaaaaaauugacagcugagacccaga

SEQ ID NO: 4159307 - RNA, 74 nt, Human
ucugggcaguaccccucuccuauuaucaaagugguggcuaagacauuaaagugagagaagagguaaagucuagg

SEQ ID NO: 4159308 - RNA, 58 nt, Human
ucugggcugggagcguguggacuggauuuauuuguccaaugccacaccccaccccaga

SEQ ID NO: 4159309 - RNA, 69 nt, Human
ucugggcuuugccuccuguguuuggccuuugucaauaccaguggaacaaacagaagaggcggaaccagg

SEQ ID NO: 4159310 - RNA, 57 nt, Human
ucuggggcagcugauguccucugcuuauucuaggcagggcacagacagugccaagga

SEQ ID NO: 4159311 - RNA, 66 nt, Human
ucuggggcucuuucuacucugccacaugccuuuaaguaggcuuauagaguggcaaaguguccaaga

SEQ ID NO: 4159312 - RNA, 129 nt, Human
ucuggggcugguggacgguguuccucucccagugcugcucucuguaagagagaacucuuagauucaauccuuuccuccagagggcccauucgcaagggaacaaaaggucccugccaacuuucccauaga

SEQ ID NO: 4159313 - RNA, 63 nt, Human
ucugggggcuuagcuuaagggaagggagagcacucugcuuauucacauuaauaagucuucaga

SEQ ID NO: 4159314 - RNA, 95 nt, Human
ucugggguaaggacugugagccgaguauaguucauaggcaggcaaaggccuuguaguguuaugaucuauacugguuuuuguccagcauucccgga

SEQ ID NO: 4159315 - RNA, 69 nt, Human
ucugggguauaugagcucuauguaauggcuugucugaucaugcaaggaaccaagcucuaagcccucaga

SEQ ID NO: 4159316 - RNA, 74 nt, Human
ucuggggugauucaguugcugguguuggcugugaaacaguacgguaugcuucagagaacuugaucgcugccagg

SEQ ID NO: 4159317 - RNA, 61 nt, Human
ucugggucucaggaguucugagggguuucccugaccucucuugagcaauccaggcgccaga

SEQ ID NO: 4159318 - RNA, 56 nt, Human
ucugggugaugaaaugcacugucuggagucaguccauucauuuuuuuucaccuaga

SEQ ID NO: 4159319 - RNA, 56 nt, Human
ucugggugucacuccugccugcccugccugcugggugacguagagcacaucccaga

SEQ ID NO: 4159320 - RNA, 63 nt, Human
ucuggguguggaugcuaugagauuaucaacuauuuauuaaucuuucauucauucauacauaga

SEQ ID NO: 4159321 - RNA, 70 nt, Human
ucugguaaaauccugaaccagagaaagaagcuccuaugccugccaaggaguucucuggcuccuuuccaga

SEQ ID NO: 4159322 - RNA, 66 nt, Human
ucugguaacuucucugauucugugccucuuagauuugugaggucagcaugaguagaagguaaaaga

SEQ ID NO: 4159323 - RNA, 100 nt, Human
ucugguauuacuuaacugaguuaguauguucuguaaguauaacuugggucaacacuguaccuacagagacaucacugaagugggaaaguugaagcacaga

SEQ ID NO: 4159324 - RNA, 55 nt, Human
ucugguccaucuuguuagcuguccacucccuuuccagcaaacaggcuccaccaga

SEQ ID NO: 4159325 - RNA, 97 nt, Human
ucuggugaaugcauuugugcaguuaaucuuucccuauuaaauguggcauauguaguagcaaaaauaaggagagaauguuggucaaauguuuucugga

SEQ ID NO: 4159326 - RNA, 80 nt, Human
ucuggugaccaguaaaauggacuguggcagagaugggcuagaugcccacuaauuccaucuccuuuuccuggccacauaga

SEQ ID NO: 4159327 - RNA, 74 nt, Human
ucuggugcaguucuaagaaaaucagguuauucaucucauucaaagaauccuggguuaauuaugauucaccauga

SEQ ID NO: 4159328 - RNA, 62 nt, Human
ucugguggguuguaucuuuuaggccuuaaacacagauaguuugaaaguaucaacucgccuga

SEQ ID NO: 4159329 - RNA, 55 nt, Human
ucugguuaucaccugagagcuuguuagaaaugcagaaucucagggcauacccaga

SEQ ID NO: 4159330 - RNA, 123 nt, Human
ucugguuauuuaguuauuucauccaaugcauuauacucuacuuuguacucuguauauucuggucuaacuccagauuguacacaguagaguauaaugcguuggaugaaauaacuaaaauacaga

SEQ ID NO: 4159331 - RNA, 90 nt, Human
ucugguucuaacuuacaccaggaaguauucaaaggguccagcagaugucaguaugaauucuugagucucuccugguuaaguauuaacaga

SEQ ID NO: 4159332 - RNA, 66 nt, Human
ugcuugauuaagccuuguuugcaaaaucaaauaucuacagaugugggcaagaaacacaaucaagua

SEQ ID NO: 4159333 - RNA, 83 nt, Human
ugcuugauuucuguugucuccucucagauuauucuaggcauccaggagauaaaacaggcaggaaagcagcagacaucacagca

SEQ ID NO: 4159334 - RNA, 62 nt, Human
ugcuugcuuuguaaguugugauguucaguaaugacuaaguacauucauuugcacagccagua

SEQ ID NO: 4159335 - RNA, 80 nt, Human
ugcuuggaaaacauugcuucucguuuguaaguguaggugcauacaugacaaaucagaggggcuuggaaugaaauaaagca

SEQ ID NO: 4159336 - RNA, 80 nt, Human
ugcuuggauacuucucugacagugaaagaguucaagauaacccuuugaagcucaaauuugugagauaaauguucuuagca

SEQ ID NO: 4159337 - RNA, 59 nt, Human
ugcuugguaaaucuucacuaagacugaguaguaaauuugcucugaagaauuagagagca

SEQ ID NO: 4159338 - RNA, 57 nt, Human
ugcuuguauucauaucacagcucgcuugaguaagugguaacgacagaauaauaagca

SEQ ID NO: 4159339 - RNA, 67 nt, Human
ugcuuguauuguuauuugcagaggugguacuucaaguccaccccugggaaugucaauaucaugggca

SEQ ID NO: 4159340 - RNA, 77 nt, Human
ugcuuguuuauugcuaauuguuuucccaaccagagaauuagaaagggaaaacaugaauagauauuaaacaaauagca

SEQ ID NO: 4159341 - RNA, 60 nt, Human
ugcuuucaggacaagguuuaaacuccuuaaauggugggauuauaaaccuuucuuguggca

SEQ ID NO: 4159342 - RNA, 73 nt, Human
ugcuuucaggauugagcaaauggauuauauacacaacuuggauuaucuauccuuacucauccugcacgaagua

SEQ ID NO: 4159343 - RNA, 55 nt, Human
ugcuuucagucucggccucacucagcuccucuguggggcccugggauucagagca

SEQ ID NO: 4159344 - RNA, 58 nt, Human
ugcuuucauuugauaagaaugccauauagcucacuuggcagcuguguaagagaaagca

SEQ ID NO: 4159345 - RNA, 72 nt, Human
ugcuuucauuugguucaugaacagaaaguuaggguuucccuggcuucacaauuucauaacuaaacaaaagca

SEQ ID NO: 4159346 - RNA, 59 nt, Human
ugcuuuccugggccaaaagaaguguucuuugcucaaaggaacugaggccuagggaggua

SEQ ID NO: 4159347 - RNA, 66 nt, Human
ugcuuucuaagcaugaaauaauguccuuguucucaugggaguaacacauguuuaugcuugggggca

SEQ ID NO: 4159348 - RNA, 130 nt, Human
ugcuuucuccuggccuucauggccuaugaccguuaccuggccaucugcagcccacuccgcuaccccuuccucaugcaucgugggcucugugccagguuggugguggucuccuggugcacaggggucagca

SEQ ID NO: 4159349 - RNA, 61 nt, Human
ugcuuugcuuuggagagccagcagucauaagcucacccuggaagagcucuaaagcagccca

SEQ ID NO: 4159350 - RNA, 60 nt, Human
ugcuuuggcccaacauugaugccugucccagaaauacaggaucaagugucuugccaggca

SEQ ID NO: 4159351 - RNA, 66 nt, Human
ugcuuuucuguuuaugaaauuguguuacagacugcgaguaacauagcuuaaaugagaagauaagua

SEQ ID NO: 4159352 - RNA, 55 nt, Human
ugcuuuugcacaggugaguuccuggacccccuccaggcccacuugaccagaggca

SEQ ID NO: 4159353 - RNA, 60 nt, Human
ugcuuuuggaaauccuggaauuggucugagccuagagcuggcacuagcguuuccaaggca

SEQ ID NO: 4159354 - RNA, 85 nt, Human
ugcuuuugucaucuuugguuuucuauaugccacgaggaguucaggcauguagcaaaccaaaggcaacaagaauuuucuuacagca

SEQ ID NO: 4159355 - RNA, 85 nt, Human
ugcuuuuuaacauuauuugggguauuuuuggcaugaguuacaauucauaugccagcuccaaguaagaguuaagaaacuuucugca

SEQ ID NO: 4159356 - RNA, 83 nt, Human
ugcuuuuucucagucacauugcccugcauuuaagugucucaaauacaguauuaauucccugcaagguaaguacuaagaaggca

SEQ ID NO: 4159357 - RNA, 72 nt, Human
ugcuuuuugugcucugccuggggucauggcagggaaggcccagcaggcucccuugcagagcagggcagagca

SEQ ID NO: 4159358 - RNA, 68 nt, Human
uggaaaaggugguucuaucuggguucuuucuccaaaucugggcagagacugauggagcucacucucca

SEQ ID NO: 4159359 - RNA, 106 nt, Human
uggaaaauaaauugauuuaauuaagugccugaauacuaaucugaauuucaauucauucaacaaauauugauugagaauaugauuuaguauaaggcacuauuggcca

SEQ ID NO: 4159360 - RNA, 126 nt, Human
uggaaaauacaaaggaucugaagcuaaacacacuagagugugaauugauuugacugcuuaauaguuugucaauuacagugucaccuuaagucucagguuucuguuuuugauuuguguuguuuucua

SEQ ID NO: 4159361 - RNA, 83 nt, Human
uggaaacgucugcuacaaguagcugccuagcauggcuuuccuucuugggagaagccagcuucagcugcccgugggcgugugcg

SEQ ID NO: 4159362 - RNA, 78 nt, Human
ugcacagaacuagggaaacggcacauagauuccaaauggaaacaggagaacuguguuuguuucuaggucucugugaca

SEQ ID NO: 4159363 - RNA, 80 nt, Human
ugcacagacuguggcagcuggggcauuugggagccucugcagcucagcagcuccccucaugcuccaccccgcaccuggca

SEQ ID NO: 4159364 - RNA, 78 nt, Human
ugcacagaugacaggaauaacuaugauggucuuaggcacaacaggauguaugguuccccuugucagauacccugagca

SEQ ID NO: 4159365 - RNA, 57 nt, Human
ugcacagguaugcaaagcaugugcaaauucuuucaguuguacacuuugauuugugca

SEQ ID NO: 4159366 - RNA, 59 nt, Human
ugcacagguaugcccuuuagaacauaaaaucuucugaagauuuuugguaaucaugugua

SEQ ID NO: 4159367 - RNA, 72 nt, Human
ugcacagugaggauccggucagcuguauaggaguuaacauccuggggugcuggcugagaccaucagggugua

SEQ ID NO: 4159368 - RNA, 72 nt, Human
ugcacauaucaguugccuguacaauccugauaaaagggcuugcuuucuaccacagagcauaaugguguggca

SEQ ID NO: 4159369 - RNA, 59 nt, Human
ugcacaugcucuccgggcacacacccagccugucugccacugcccagaguguaugcgca

SEQ ID NO: 4159370 - RNA, 87 nt, Human
ugcacauucaaaguacaacuuuucuaucauguggaagcuugaagaacauuuuuuaugugaagaggauuuaucauacucugaaaugca

SEQ ID NO: 4159371 - RNA, 66 nt, Human
ugcacauucacuuagguauugucuauagcugcuuugucacaacaaugccagaguugaguaguugca

SEQ ID NO: 4159372 - RNA, 63 nt, Human
ugcacccauguguaugagugugcuucuuuuaaaggaauaggagcuuuuauacaauguggugca

SEQ ID NO: 4159373 - RNA, 78 nt, Human
ugcaccugcuggggcugaugagaugaacccaucuggcauauucugguucacaauucuucccagugccaugcuguagca

SEQ ID NO: 4159374 - RNA, 97 nt, Human
ugcacgacacaacgcccaccacugcuuccugccaucugucccgagugauggaaauagagccagugacagcaagcagugcugggugggccagucugca

SEQ ID NO: 4159375 - RNA, 129 nt, Human
ugcacgauccugcuucccagcuggccccccugcuggccccacuccugggugcauuucugauucuguucugagucuccagccugcccagagugggcaccaguagagcugaugggaagcgaggcauuugca

SEQ ID NO: 4159376 - RNA, 55 nt, Human
ugcacuauuucgccaugguuguuucacuucaggaucacagugguaaaaugaugca

SEQ ID NO: 4159377 - RNA, 71 nt, Human
ugcacucauuuuuucacuguguugucagccauggacaacauuugaguaaagaaauggucauggucagugca

SEQ ID NO: 4159378 - RNA, 61 nt, Human
ugcacuccagcaccuucccgcagcccaccgccuccucgggccagaagggagcuggaaugca

SEQ ID NO: 4159379 - RNA, 55 nt, Human
ugcacucugugucuuaaagcaccucaugaaaauguaugcugacacuagaugugca

SEQ ID NO: 4159380 - RNA, 62 nt, Human
ugcacugcagugacucguuuauguucuuuacaccuaaggaggacagcauucuacuguaggca

SEQ ID NO: 4159381 - RNA, 58 nt, Human
ugcacugcccaggaacugugcuguggagucuggccacguucccuuauuggggcaggca

SEQ ID NO: 4159382 - RNA, 81 nt, Human
ugcagaaaaaaccagacaggugcucgcccaaguccagcaaaacucugugugaccuugggcaaguuccuucucuuuucugua

SEQ ID NO: 4159383 - RNA, 67 nt, Human
ugcagaaaaggaagagcuauguaaccauuagccaugugcuuacaaggggcuauuucugcuucugaca

SEQ ID NO: 4159384 - RNA, 60 nt, Human
ugcagaaacaagccaucauucaucggacaaagucacgugcuaauuggacuugauucugca

SEQ ID NO: 4159385 - RNA, 60 nt, Human
ugcagaacgggucuucuagcaccuuccagguuuucguuaugaagcacuucuuaggcugca

SEQ ID NO: 4159386 - RNA, 67 nt, Human
ugcagacuuuacugaacugcuaguacaggagucgcuauguuuuuagcuagcccauucaguuuuugua

SEQ ID NO: 4159387 - RNA, 75 nt, Human
ugcagagagcugcacaguuaauaugugacagaacuagucaaaccuaguucucaagacaauuaccuguguagugca

SEQ ID NO: 4159388 - RNA, 63 nt, Human
ugcagaggcacagccccagaugaaggaauucuuggcucuuucccaugggcucacugcccugca

SEQ ID NO: 4159389 - RNA, 63 nt, Human
ugcagagggagugacgguucacuaaagagauaaugugauaaguggccuucuucucccuuagca

SEQ ID NO: 4159390 - RNA, 55 nt, Human
ugcagaggugugcauucuuaaggguuuuucucauugagaauggaacuuucugaca

SEQ ID NO: 4159391 - RNA, 83 nt, Human
ugcagagucaaggagacaauuucuaagaugcuuccuuggggaaaacugaagcaaaaaacagaaguuguggauccugagcugca

SEQ ID NO: 4159392 - RNA, 64 nt, Human
ugcagauaucugaaggaugaaccucucagguagaggaaacauccaaagcaaauaucuuaaagca

SEQ ID NO: 4159393 - RNA, 55 nt, Human
ugcagaugagagggaguuuuuaggacccaguuccagcaauuuuuccuccucugca

SEQ ID NO: 4159394 - RNA, 93 nt, Human
ugcagauugauaugaauauuccuuaagcauaacuaaaaaugauuuccgcaaaaugaggagguuaauuuuaguugucucaagggucucucugca

SEQ ID NO: 4159395 - RNA, 68 nt, Human
ugcagcaagcacccaauuuacagcaguuucaauccugaaauuuuuguacuucuggguccuaugcugca

SEQ ID NO: 4159396 - RNA, 79 nt, Human
ugcagcacagcugaggggcugucuuugcacacgggcugugcgagggaggugggcagccuccucaugcuccgugugagca

SEQ ID NO: 4159397 - RNA, 60 nt, Human
ugcagcagguauggcaagcucccuccuagcaccaucagagagagcguagcccugcugacg

SEQ ID NO: 4159398 - RNA, 127 nt, Human
ugcagccacuuaaaguuuucaaagauuacauaacaugaaaaaugcuucugguauaagaaaaaugaggacuucucuuuauuguauaccaggaugcuuuagaauguuuguuuuuauaaauaguguugca

SEQ ID NO: 4159399 - RNA, 73 nt, Human
ugcagcccugagcucagcugggaccaauguguugguggaaauuaauagcagcauugggcucagaaagguugca

SEQ ID NO: 4159400 - RNA, 76 nt, Human
ugcagccucccagagauuccccuaggcagggugauaaacacgcuccaggaguccugggagugauugucaaguugca

SEQ ID NO: 4159401 - RNA, 104 nt, Human
ugcagcgaucccuucaccuuuaguuaaagaauuggacugugcugcucaaaauaaagaucaguuggagguaggauguccaagacugaagguaaaggacuagugca

SEQ ID NO: 4159402 - RNA, 72 nt, Human
ugcagcgccuucacaaggacaguauauguauccuggcaugugcaaauccaaugugaaugcaaaggcuuugca

SEQ ID NO: 4159403 - RNA, 101 nt, Human
ugcagcuccagucugccuugaugaccaaagggggaggcgaggcccagggaaagccacugagaugccugucucuuucaaucugagagcgccuggagugugca

SEQ ID NO: 4159404 - RNA, 123 nt, Human
ugcagcugguugagauguuuguugaggaaaaucugguuuacagcaacagugcagaggugcauccuguguuggccucucccuggccuguugcucaggccuccacagcauguuuuccuugcugca

SEQ ID NO: 4159405 - RNA, 55 nt, Human
ugcagcuuaucucuuuggcaguagauucccuaacaguguaagagaugcaguugca

SEQ ID NO: 4159406 - RNA, 58 nt, Human
ugcaggaacucgaaaacuauagugaaggagguccucucuauaaaaaugguucuuugcg

SEQ ID NO: 4159407 - RNA, 93 nt, Human
ucuugugugaaacaauuaucauauacauugcaaaauagaauauguauaaauguuuccguguauauguguagauggguuuguguguaugugaga

SEQ ID NO: 4159408 - RNA, 65 nt, Human
ucuuguguguucuuuucugauuaaaaaagcaauaugugcuuauuugagagaaaagaaacucugga

SEQ ID NO: 4159409 - RNA, 57 nt, Human
ucuuguguucuguaugugaagucugauggacaauggagcaugugcaugagcacagga

SEQ ID NO: 4159410 - RNA, 78 nt, Human
ucuuguuagcgucucaauggaagugagcauuccgguuugauacaaauggagucacuuccauaugggaacgugacauga

SEQ ID NO: 4159411 - RNA, 130 nt, Human
ucuuguuauuuauucuucaccugaagccaucaucucaguuucugacauuaaaaucuguuaguauggaaacaauuuugguugugucaagagacugaaggauaauaacuccaugguagccuaaguagcagga

SEQ ID NO: 4159412 - RNA, 75 nt, Human
ucuuguucacagauggcuuuuuuguugcuauguucuaacauggcagaagggaauaaggagcuuucuuuuauaggg

SEQ ID NO: 4159413 - RNA, 94 nt, Human
ucuuguuuaccuuuuaaaaauuuuguauuuuguuagucauuuuaagaaacacaugcauugagaagcuugcagauuuuucuaagggaaaauaaga

SEQ ID NO: 4159414 - RNA, 65 nt, Human
ucuuguuuacucuugcaggccaaggcguucuguacagaguuugaaaguggccugcaagaacgaga

SEQ ID NO: 4159415 - RNA, 62 nt, Human
ucuuguuucugagcauauuaggcauauauaaaaaugaaggccaaauacuuagaaacuuaaga

SEQ ID NO: 4159416 - RNA, 72 nt, Human
ucuuuaaagaggaguagaacagauagucaagaaucaccagauucucuggggacugucucuauucaugaaaga

SEQ ID NO: 4159417 - RNA, 94 nt, Human
ucuuuaaauagcaucuccccuagugcauuaaaguguuuauuuauagaucauuaacuacuugaccaagaugcugcagggcagaguagcuuaaaga

SEQ ID NO: 4159418 - RNA, 82 nt, Human
ucuuuaagcaugucacagcucccauuccuccucucacacaagaaacuucugaggaaaaauuaaguuugacaugaacaaaagg

SEQ ID NO: 4159419 - RNA, 70 nt, Human
ucuuuaaggcaaagagacaaugacacuugggagguagcagccucaaggaaacacucucucugccuaggga

SEQ ID NO: 4159420 - RNA, 111 nt, Human
ucuuuaauugaauuacaucccccucagcccaaaaugaugaacugaaaguuagaaaucauguuggcucugacaaaaauggggcauguuuauuuucuuuguuuaauuugaaga

SEQ ID NO: 4159421 - RNA, 123 nt, Human
ucuuuacacaggucuagaggcuggaaguccaagaucaagguggcagcagggcugguuuccccugaggccucucuccuuggcuugcagauggcugccuucucucuguguccaccuguggcauga

SEQ ID NO: 4159422 - RNA, 66 nt, Human
ucuuuacuguucuucugugggaaagggcucugaaaggauugcguuuugacaggaggaagguguuga

SEQ ID NO: 4159423 - RNA, 76 nt, Human
ucuuuagaagggaggcaguuuuauuucuuuaaagucauaauuucuauuaggcaaauaaaauguuuccauaaaaaga

SEQ ID NO: 4159424 - RNA, 99 nt, Human
ucuuuagagacucaccuuaucccauuaauugagauagucugacaaaugugaauaauacauugaacuacuuguaaugagacugguaguuaaucuagaaga

SEQ ID NO: 4159425 - RNA, 90 nt, Human
ucuuuagcaccaaucuuuucuucuacagugauuaauaguaaaauuguugaaugaaaaauuguuaguuaguguggggagauagcauaaaga

SEQ ID NO: 4159426 - RNA, 76 nt, Human
ucuuuagcacuggaaaguuaagaguuuugaucucagaguucaucaacucaagcuuuugcuuuuuauuuguaaaaga

SEQ ID NO: 4159427 - RNA, 66 nt, Human
ucuuuagcuuuucccuuuccacuuccuggggucaccuuugacugcacugaagaaaggagcucuaga

SEQ ID NO: 4159428 - RNA, 91 nt, Human
ucuuuaggauaagguauauuuguuucauuuugauccugcauauacauuacuuuaauuaugagaauuagguucaggaaacaccucuuaagga

SEQ ID NO: 4159429 - RNA, 98 nt, Human
ucuuuauauuaucaguuauugagauuugggggcuagggcugguuuguuauuuggcucaaacuagcacauccuaaaugcuucagaaauugauaugagga

SEQ ID NO: 4159430 - RNA, 72 nt, Human
ucuuuauccaauucaccauugaugggcaccuagguuaauuccaugucuuuguuauugugaauagggugguga

SEQ ID NO: 4159431 - RNA, 66 nt, Human
ucuuuaucugccuuucuacuuugugaugcuuucuaauacaguauuagggccaaaggcaggaagaga

SEQ ID NO: 4159432 - RNA, 127 nt, Human
ucuuuaugcauuuaccaugugucuggagcugugcuagaggugaccaugauguagcuacuguccuuaagaugguggcagcugagugucagguacagacauacccaagucauugcugaguguaaagaga

SEQ ID NO: 4159433 - RNA, 56 nt, Human
ucuuuauguacauauccacaaggaaccaaaauacuggaucuauauggacauagaga

SEQ ID NO: 4159434 - RNA, 69 nt, Human
ucuuuauuaugacagacuuaagagaauggaaguguaacccaccuucacaggcaagucuguuuuuggaga

SEQ ID NO: 4159435 - RNA, 78 nt, Human
ucuuuauuucacuuuuucucugcuugagacuagccagagugggucuggcucuuaagcagagaagaaguugauuaaaga

SEQ ID NO: 4159436 - RNA, 79 nt, Human
ucuuucacacacauacauuuggaaguuucaagggaacaugaacaucucuuugcauuuugaacguguuugucgugaaagg

SEQ ID NO: 4159437 - RNA, 73 nt, Human
ucuuucacagacagaauagguacagucagucacuauaaagccuuggugucugucuguaccuauuuuuucuaga

SEQ ID NO: 4159438 - RNA, 69 nt, Human
ucuuucacauuucucagcacugaugaagucacagaagcuugucucgacagugcaguagaagguagaaga

SEQ ID NO: 4159439 - RNA, 103 nt, Human
ucuuucauaccugguuuuguccacuucaguuaucaaaacucuuuacuuuaacaguuaaguaggacagugguguucuggaguggaccgagguagggugcaaaga

SEQ ID NO: 4159440 - RNA, 76 nt, Human
ucuuucaugggggccucucaucauuaucgcuuuguccaccaggaugguuuccagagagaugccaccucuuggaaga

SEQ ID NO: 4159441 - RNA, 99 nt, Human
ucuuuccaacacucuccuccaucccugaccacaagguguugcuccagcagaugugggagauaauucauuguguucaaggggguggugcugugguagaga

SEQ ID NO: 4159442 - RNA, 70 nt, Human
ucuuuccacuguacuauauugccuaguguuuguggucaaguauggggcugugugugcacauagggaugga

SEQ ID NO: 4159443 - RNA, 58 nt, Human
ucuuuccaggguuuuccguacgcugacuaaugcuuacagcuggcucucucuggagaga

SEQ ID NO: 4159444 - RNA, 78 nt, Human
ucuuuccccuugggcuugggcauagcuuuagggucuucagcacagucuuccaaacagcuaguaccaauccacuaaaga

SEQ ID NO: 4159445 - RNA, 55 nt, Human
ucuuucccgccagagcaugaguguccauggauggcuaguucugaagcggaagaga

SEQ ID NO: 4159446 - RNA, 57 nt, Human
ucuuuccucugagcuccuguagugcuguugccugcaccacuggggcugaaggaaaga

SEQ ID NO: 4159447 - RNA, 68 nt, Human
ucuuucgugccagaagguucccgcugcagcucuccugcuaguuuagcuuagccuucugguuugaggga

SEQ ID NO: 4159448 - RNA, 94 nt, Human
ucuuucugugcacuggucaccagguagcauuguaggccaaaugcugcuugcuugucacccugccugaguggugccauguagcaguacagagaga

SEQ ID NO: 4159449 - RNA, 79 nt, Human
ucuuucuuccguuacuguguuccaagaaauuugaaaauaugcuacauauguuuuuucuggaacaguaauugaagaaaga

SEQ ID NO: 4159450 - RNA, 55 nt, Human
ucuuucuuccuggagcccaacaccucggaggagaaugggaaacccagaagaagga

SEQ ID NO: 4159451 - RNA, 56 nt, Human
ucuuucuuggaacgguuccucaaaaagauuggagaacugucaucuuucaaggaaga

SEQ ID NO: 4159452 - RNA, 88 nt, Human
ucuuucuuuaguaucucauuggcugugugucuccuuuccacucaaaggguuggcugggaagcugcuuagcuaauguagacagggaaga

SEQ ID NO: 4159453 - RNA, 89 nt, Human
ugccuuaaguaagcucugucuuauaugaggucaugauauauuaggguuggguaugaccuuaaaugugacauagucuagcuucucaugca

SEQ ID NO: 4159454 - RNA, 58 nt, Human
ugccuuaauuuuuuauaaucucuguugaccuccaaaagagaccuguaaaguucaggca

SEQ ID NO: 4159455 - RNA, 61 nt, Human
ugccuuauuuucugcuagagaugucacagacuagcuuuaguucuagaaagugaaacaggua

SEQ ID NO: 4159456 - RNA, 64 nt, Human
ugccuucucccuuggacccugagggcuggguuaaacgcuucaggggucucacaggcaggaggca

SEQ ID NO: 4159457 - RNA, 78 nt, Human
ugccuugagcugccaauuaccuauuucugagaauuuggugacucuuauugguaaugauggcauuuacaacauuuggca

SEQ ID NO: 4159458 - RNA, 62 nt, Human
ugccuugaggguagagucgaugacuuauuuccauuuguguauuuccuguaccuaucaaggca

SEQ ID NO: 4159459 - RNA, 62 nt, Human
ugccuugcacauaauauacauucaaucaguguuuguugaaugaauaaaucaaugugugggca

SEQ ID NO: 4159460 - RNA, 83 nt, Human
ugccuugggauaucugucagcagcuuccuguagucuggcugucccaguggcuggagugcuuugaacaccgauucccagggaca

SEQ ID NO: 4159461 - RNA, 70 nt, Human
ugccuuuccauuggauucucuauccuugcuuaugcgagucccaagcagcaaguggaaucauggaaaagua

SEQ ID NO: 4159462 - RNA, 84 nt, Human
ugccuuugggagagccaaggccaguccauuuuggaagaugagaagcuuuugauuuccaagacuccaguucucccagagagggca

SEQ ID NO: 4159463 - RNA, 64 nt, Human
ugccuuuuccaucucaggcagccaagucucugcuucugacuccacugaagagacuggaggggca

SEQ ID NO: 4159464 - RNA, 79 nt, Human
ugccuuuucuacaagcaaaugugcucauaaacaacauuugguauugauuugcacauuuucaaaguuaguauaaauggua

SEQ ID NO: 4159465 - RNA, 66 nt, Human
ugccuuuucuucauugaugucagguggcuuuuucaucggccgcauuuccaaugaggcaaaguggca

SEQ ID NO: 4159466 - RNA, 90 nt, Human
ugccuuuuuuuuacaucuguauuucugcuuucucuaguacuucaacucugcuaagaaguugcugggaaguggcaaauuugauguggggca

SEQ ID NO: 4159467 - RNA, 81 nt, Human
ugcgaauuuggaugauaacucuuuaugaugaagaugcauugucuugcuuauagagaguuucauacccuucuaaaauaagca

SEQ ID NO: 4159468 - RNA, 128 nt, Human
ugcgaggccuuccgagcaggggcugccuuccuuggcagcagacaaaaggccauuucugaguuacagaaaauguguuccuuugcuacagagccgggugagggcugcccgggccgguccugggccaggcg

SEQ ID NO: 4159469 - RNA, 56 nt, Human
ugcgcauccuugacccacuccugggggccaggagcugggcgagccggggaagugca

SEQ ID NO: 4159470 - RNA, 56 nt, Human
ugcgcccagccaagucuggcacuucucuauuaagcaccuggaauguggcuggugca

SEQ ID NO: 4159471 - RNA, 77 nt, Human
ugcgcgaggcugcacuggcuaaaggcugggugccauugucuuucagcaaauagccuugguuugugcaccuggcugca

SEQ ID NO: 4159472 - RNA, 62 nt, Human
ugcgcgucuucccaaggggucuggggaccaaauuccagcucccgccaucgggaggcacggua

SEQ ID NO: 4159473 - RNA, 57 nt, Human
ugcgcugcuccgccuuguccauaugcgcaggcaaguggcaguucaggaagcagagca

SEQ ID NO: 4159474 - RNA, 56 nt, Human
ugcggcuggguucgggguggguaguugcaguuucauucaugagauaaccagcugua

SEQ ID NO: 4159475 - RNA, 61 nt, Human
ugcgggagagcgacuggcuucuagggcccuguccagccugagaaguccccacucugucgca

SEQ ID NO: 4159476 - RNA, 102 nt, Human
ugcgggucagcaauaggcgcgauucaaaggggacaguacuuugcacucugacaaaaaggggauaaggcuaucuuuugaguguguucaugugcaugguuugca

SEQ ID NO: 4159477 - RNA, 55 nt, Human
ugcggugccaguucucaucaucgggccuguuuccuucugagaacuaggcauugca

SEQ ID NO: 4159478 - RNA, 59 nt, Human
ugcguauuugcuucuugcuuccagcaccaauuguggccaauggagugaggcaaagagca

SEQ ID NO: 4159479 - RNA, 130 nt, Human
ugcguccggcggccaccgggcuccaggcgcaggcggcggugguggcggccacuucagcccugggagccgcucuccugcgcccgccgccuccgccgccgccuggaucugccucgggcggccgggcgcguag

SEQ ID NO: 4159480 - RNA, 60 nt, Human
uggccucccuggcccucccucuucugguaaugaaauagaggcugugcagagggagugcca

SEQ ID NO: 4159481 - RNA, 58 nt, Human
uggccucggacacccucugagggcuuuggcuuuucggagcccugcgugucugggggca

SEQ ID NO: 4159482 - RNA, 68 nt, Human
uggccucuggggucuagcaauagcaggaauggugccccugucuuuagcagaggaccucaguguuucca

SEQ ID NO: 4159483 - RNA, 103 nt, Human
uggccugaacuuucuguaguuuuagcagcaaugggaugcuuugaaaccuagaucucucaccaacuacaucuuccauugacuggugaaacacuaguuuaagcca

SEQ ID NO: 4159484 - RNA, 104 nt, Human
uggccugccugguuuccaggcccaacccuggggcagcugcuagggauagggcugccugcccuuagugaggcuccuucaggcugcccuggaaggcagauucccca

SEQ ID NO: 4159485 - RNA, 55 nt, Human
uggccugcucugacuuugggggcucagccaggcauccaggguccagagaguguca

SEQ ID NO: 4159486 - RNA, 56 nt, Human
uggccugcuuucuuagguguucaucaguuaacauguuugaggugacaagcaggcca

SEQ ID NO: 4159487 - RNA, 82 nt, Human
uggccugggcugcccuccaggccuccugugaguggacccugguggucccaggcugcgggcuggugggccuggccgaggcaca

SEQ ID NO: 4159488 - RNA, 77 nt, Human
uggccuguggauaaucugggagaaaacugaugagaugggcucuucuuucaaguuccccagauaugcaauucaggcca

SEQ ID NO: 4159489 - RNA, 80 nt, Human
uggccuguuuaauuuccuuccagguuccuaaggcucaggacuucuagggccauuagacugccaggaagggccuaaagcca

SEQ ID NO: 4159490 - RNA, 58 nt, Human
uggccuucuuugugaaucaaggcaaaguccacauucagccugucugcaauggagguca

SEQ ID NO: 4159491 - RNA, 120 nt, Human
uggcgacaaaauaauacauguuucgggggaagcagauauugugggaguggggaagaugggcaauugggaccacuggcccaagcauacaguauuugcucuccgcaugcugccacuuugcca

SEQ ID NO: 4159492 - RNA, 70 nt, Human
uggcgggauuacaaaacuggugugucugaguccagugcucaugcagcuuccauauuuugcugauucccua

SEQ ID NO: 4159493 - RNA, 68 nt, Human
uggcgugauggccaagaucacagacuucagugcuuaauugccuggguuugaaucuuggcuuucugcug

SEQ ID NO: 4159494 - RNA, 71 nt, Human
uggcguugucuauacauaaaagguagucagaguaaaaagaauucuagcaacauguguuagacaauagacca

SEQ ID NO: 4159495 - RNA, 113 nt, Human
uggcuaaaacuaggggcgcaacaggagcugauccccagggcaggccucccgcagcaggcaaaccugagaucugggaagggccugcccuuccucccugcggcccuggugaguca

SEQ ID NO: 4159496 - RNA, 92 nt, Human
uggcuaacuguagguauagugaaaacaggcacauaguaacauuugacaaauauuuuaaagccuaccuguuuuccacagaccucaccuggcca

SEQ ID NO: 4159497 - RNA, 77 nt, Human
uggcuaaugguucugcaggcuguacaggaagcauagcagcaucugcuucuggugaggccucaggaagcuuccaguca

SEQ ID NO: 4159498 - RNA, 72 nt, Human
uggcuacaguggcauaucaaauuuagcuuaaaguaauaaaagaaacaugaaauuucuuaugcccuauaguua

SEQ ID NO: 4159499 - RNA, 62 nt, Human
uggcuaccauguuaaaaggcuuuuuuuuaaaggcaucaagucuaauauuuaauauggaguua

SEQ ID NO: 4159500 - RNA, 83 nt, Human
uggcucaccccacuucccucccuacccuccagcugaccaaaaccuucccugcugacuggccgucccuagagaugggguugcca

SEQ ID NO: 4159501 - RNA, 60 nt, Human
uggcucacuaaugucuguuccagaccaggacuggaaauagcagccuuuaguuaacagcca

SEQ ID NO: 4159502 - RNA, 58 nt, Human
uggcucagccauucguguugcccguagccaucaacuaccagacaggugggugagacca

SEQ ID NO: 4159503 - RNA, 68 nt, Human
uggcuccaggaauucauaacagcuauguggcaaccaccugucugaaucaugauuuccuguuuaagcca

SEQ ID NO: 4159504 - RNA, 66 nt, Human
uggcuccaucauccaugcaagaucaugcucccugcucugcauucucuugcauggugauggcugcca

SEQ ID NO: 4159505 - RNA, 60 nt, Human
uggcucccccaucccaaggaggucaugugucuacacagagccccucgguggaggggucca

SEQ ID NO: 4159506 - RNA, 59 nt, Human
uggcucccgcagacccugugcugucuaugcugagccaaguaccuccucugugagaguca

SEQ ID NO: 4159507 - RNA, 64 nt, Human
uggcuccugugucuaggcauguuguguguguuuugcucacacaucaaccuagacauuguuccca

SEQ ID NO: 4159508 - RNA, 55 nt, Human
uggcuccuuuccagccugguuuccagagccucugaccugcuguggggaaggacca

SEQ ID NO: 4159509 - RNA, 76 nt, Human
uggcucuagagcaagcuggaggggcucaugaauauucauuaucaauuuguauucagaguugguuuuuuuagaggca

SEQ ID NO: 4159510 - RNA, 70 nt, Human
uggcucugugucucccagcagccugcacugcucaccugcccuguagauauuguggagaaccauagaguua

SEQ ID NO: 4159511 - RNA, 78 nt, Human
uggcugaagugugaucuguuugacaugugagcguguucuccagugaagcacacagcucagagcacucagacucagcca

SEQ ID NO: 4159512 - RNA, 71 nt, Human
uggcugacuuaugauucaaauaggaucuucuuugucccaauuaagcaagccuacuugaacaaagauagcua

SEQ ID NO: 4159513 - RNA, 58 nt, Human
uggcugagagaaaaggcccaggaaucauccuugacuucucucugccaacucacagcca

SEQ ID NO: 4159514 - RNA, 92 nt, Human
uggcugagaguggagagaguuguggcauggcagaagggcacaggaugaaggccccugcaccccugcuuugccaccaagcuaccucugggcua

SEQ ID NO: 4159515 - RNA, 60 nt, Human
uggcugaggggagggagauuuuucuuguuguggacaaggcagucccuacucccugcacca

SEQ ID NO: 4159516 - RNA, 78 nt, Human
uggcugaguugucccaguuggguauugaauucaugguaugauuuauuugcaggauugggacuggauaaaacucaguca

SEQ ID NO: 4159517 - RNA, 55 nt, Human
uggcugaucaggaaguugcugacugacuagagaagucagcagguucucacagcca

SEQ ID NO: 4159518 - RNA, 56 nt, Human
uggcugcagaaccuccucaggagaccuuauucuuuuccuaggauguuuugagucca

SEQ ID NO: 4159519 - RNA, 63 nt, Human
uggcugccuggugauaagcagugaccucaaauuaauauaggaugucacuguuuaccagcucca

SEQ ID NO: 4159520 - RNA, 72 nt, Human
ucuuugagagaggccuggauacagaagugaauauuuuaaaauauuaggguuuaucaaggcacuuuuuaaaga

SEQ ID NO: 4159521 - RNA, 62 nt, Human
ucuuugaggguuggaauacccacuaaacaucuaagcaaauguggacauuuacccuucaggga

SEQ ID NO: 4159522 - RNA, 74 nt, Human
ucuuugcaauggccuccugugugccaggcacuguuacaaagcaggggcuaaggacacagagagaaacugaagga

SEQ ID NO: 4159523 - RNA, 55 nt, Human
ucuuugcagccccaggaaguggaucuugaguagucuacugaccucuggccagaga

SEQ ID NO: 4159524 - RNA, 59 nt, Human
ucuuugcaugugcuucuuggccauaggaguuggauuuuagccuggaggcaaugggaaga

SEQ ID NO: 4159525 - RNA, 62 nt, Human
ucuuugcucacuuguguauuuucagucucuccacuggaauguaaaccucaggugggcaggga

SEQ ID NO: 4159526 - RNA, 68 nt, Human
ucuuugcuuccccuuauauuuucuggucuugcuaaaaugaugauccaggaaauguucuugaagccuga

SEQ ID NO: 4159527 - RNA, 109 nt, Human
ucuuugcuugccaagaacuuuguuuccauauuuguagcagcuaaauaaggauaagcucaggcauacagaaauggaacuauauugcucucauuugugugcuacuuaaaga

SEQ ID NO: 4159528 - RNA, 89 nt, Human
ucuuuggaaaguuuagcuucgugcaucuauagcacagccaaguggaauuguuuguagaaaauuagaugcaugguuuuggaauucagggg

SEQ ID NO: 4159529 - RNA, 59 nt, Human
ucuuuggaaggagcaguuuuugugguuucagaugagccagaggacugccccuccaaaga

SEQ ID NO: 4159530 - RNA, 78 nt, Human
ucuuuggauaguagcucuggcauucuuuccaaaaguuuacuuuuuaaaaaugaaauguuagaaagcuauuguuuugga

SEQ ID NO: 4159531 - RNA, 66 nt, Human
ucuuugggagauguuauuuauauugagagaaguaaauucuaugaguggauaagcaucuuccauagg

SEQ ID NO: 4159532 - RNA, 72 nt, Human
ucuuugucgcauuacauaguaaucugagaugcacuggaugugcuccagggaacagaauguacuuggcagaga

SEQ ID NO: 4159533 - RNA, 96 nt, Human
ucuuuguggauccaucucugaauggcuuguucauugguaccuguaaggaguuacaaugcagagcccaagagcaagccaugaagacauuccugaaga

SEQ ID NO: 4159534 - RNA, 68 nt, Human
ucuuuguuuuugugaggcagcccauggaacaaauguuccauggcaucucaacuuacaaaagucuuaga

SEQ ID NO: 4159535 - RNA, 65 nt, Human
ucuuuuaaaagaccuugaggguccgauucuaaucugaguuguaccauaaugagucucuuaaaaga

SEQ ID NO: 4159536 - RNA, 70 nt, Human
ucuuuuauacaauccagucucucccagaucccugaccugaggcaucgaggagaguugguuuguuuuuaga

SEQ ID NO: 4159537 - RNA, 89 nt, Human
ucuuuucauggccucguagccuuagcacaugcaaauaucaaccaaccaucauugucugagcaccugugcugaaccugggccugagaagg

SEQ ID NO: 4159538 - RNA, 93 nt, Human
ucuuuucuauacagauaaacucaugccaagaaaugauccuggaaauauauuucagacugaugguuucuggucugaguuuaucucaagacuaga

SEQ ID NO: 4159539 - RNA, 85 nt, Human
ucuuuucucaugcacucuguagucugugccauagcugugcuaaagccagcuuguccuccauauggcuaagggugaaagaaaaaga

SEQ ID NO: 4159540 - RNA, 79 nt, Human
ucuuuucuguugaaaucugcuucuugcauaguacaauguaccauuuacaaaggcuuaaagagauuucuuguaguaaaga

SEQ ID NO: 4159541 - RNA, 126 nt, Human
ucuuuucuucucuuuggugcuggacucugccagccaaaauuuaugacccauuuuccuucugcuuaauuguuguuauaaaucugcugugcagaacccaguuguaaauuuaucacagacuggauugga

SEQ ID NO: 4159542 - RNA, 56 nt, Human
ucuuuucuucuuaaugguuaauuaggucacuaaagaagcucuuaagaagaagauga

SEQ ID NO: 4159543 - RNA, 74 nt, Human
ucuuuugaaauuucauuguugggauaaaguuugaaguaaauuauacaguuuauaaaaauaaugaggucaggaga

SEQ ID NO: 4159544 - RNA, 72 nt, Human
ucuuuuguccugaugcuuuggccccaucaugagguaucccaagggaggccaaggcauucagaggauguauga

SEQ ID NO: 4159545 - RNA, 68 nt, Human
ucuuuuguguggcuuaauauuuauagcagauuccaagucuccuuugaaaguuaggacuguccaagaga

SEQ ID NO: 4159546 - RNA, 71 nt, Human
ucuuuuuuaaggacugaauaguauucuguuguauuguuguaccacaguuuaucuauucagcuguugaaaga

SEQ ID NO: 4159547 - RNA, 76 nt, Human
ucuuuuuuaccuccugaugagaguaaaggaccagccucccuacguggccuccauugacacaacaggaggaaagaga

SEQ ID NO: 4159548 - RNA, 74 nt, Human
ucuuuuuuauuaagcuaaauugagcuggguuucugucaugugaaauccuaaaaguuugacuuaauucagaaaga

SEQ ID NO: 4159549 - RNA, 70 nt, Human
ucuuuuuuucucuaaugccuuucuuuugcccaaaucuuaaaucauuuuggaggcaguuagaaggagauga

SEQ ID NO: 4159550 - RNA, 71 nt, Human
ugaaaaaacaucauccuuugaguauuuaggggcaauauccuaaaagaccacaaggugguaauguaauuuca

SEQ ID NO: 4159551 - RNA, 83 nt, Human
ugaaaaagcuccuuauaacuggccacaaagaaggcaucaaugacuuuacuaggugaaaauguggacuaguguuuggauuuuca

SEQ ID NO: 4159552 - RNA, 71 nt, Human
ugaaaaaggccaugguuggaguguuuacaucauaaaaaugagcaagaugcuacaaaucaggucuuccuuua

SEQ ID NO: 4159553 - RNA, 55 nt, Human
ugaaaacacuuuaguuuaggucagucuaggccugaaaaccaggaagauguucuca

SEQ ID NO: 4159554 - RNA, 86 nt, Human
ugaaaacagacaucacacucagauugcaucauucaaggaaguuuaauaaaaugauuguaaagguuugggugugguguuggagacca

SEQ ID NO: 4159555 - RNA, 55 nt, Human
ugaaaacuccaaguuucaucaguuagccuacaucugaugaagauugguaaauuca

SEQ ID NO: 4159556 - RNA, 77 nt, Human
ugaaggccacucagggaguagcacauguggaacuuuuaugugguucuauagagccuuuuauuacccugugggccuca

SEQ ID NO: 4159557 - RNA, 57 nt, Human
ugaaggccuaacuuccagugcuccauacuguggcugaauuuggagauagagucuuua

SEQ ID NO: 4159558 - RNA, 68 nt, Human
ugaaggcugucauuuucuagagauuaagcagaaaaugcugcucugucugagggagugacauuugagca

SEQ ID NO: 4159559 - RNA, 70 nt, Human
ugaaggcuugguggcagccucugagguugaugggaucuuuaggcagaagguggcugccaccuagcuauca

SEQ ID NO: 4159560 - RNA, 61 nt, Human
ugaaggggacuauuuacucaaaugagguuggugauucugccucagcguuguggcccuauca

SEQ ID NO: 4159561 - RNA, 66 nt, Human
ugaagggggugcuggugguagaguggaaucggcuucuaaauuuacuaaguacuuguaucccuuuua

SEQ ID NO: 4159562 - RNA, 85 nt, Human
ugaagguggaagggugguucugcuguguucucuuccuuggaauuucugggaaaaccacgagcgggacuagaacccaaaaucuuca

SEQ ID NO: 4159563 - RNA, 90 nt, Human
ugaagguugggauuguaaauuuguaauuaugacaaauggaagccauuugcauguuguuuaauuucgagugucacauaaacucauccuuca

SEQ ID NO: 4159564 - RNA, 77 nt, Human
ugaaguauauuaguuuacugcuugaucucugcuccccuaaagcagagccaaaucuaaagugaauauugaugacuuua

SEQ ID NO: 4159565 - RNA, 61 nt, Human
ugaaguauccaucuuguucuaggugaugaaagaaaccacagcauggagcucuggaacuuca

SEQ ID NO: 4159566 - RNA, 61 nt, Human
ugaaguaucccaagauuuacagucacaaugggguggcuggagggauguaggguguauuuca

SEQ ID NO: 4159567 - RNA, 73 nt, Human
ugaaguccuaagucuagcucagagacagaugcuugacucuuuccugcugccuagucugcugagcagagcuuca

SEQ ID NO: 4159568 - RNA, 82 nt, Human
ugaagucugcugugcaacauugcaccuauaguuaacaacacaacaguggguguguaaaaaugugcuaacaggauagaucuca

SEQ ID NO: 4159569 - RNA, 62 nt, Human
ugaaguuauagaagauggagaaguuccauaucagaaaaaugucuucuucagccuaugcuuca

SEQ ID NO: 4159570 - RNA, 65 nt, Human
ugaaguuuucugguugauuaagaucuaugccagcaggaggguauaaaaucaccagcaauacuuca

SEQ ID NO: 4159571 - RNA, 64 nt, Human
ugaauaagugcaucacauaaugauguuagcuauuauuauugugguugcauuaucuuuccguuca

SEQ ID NO: 4159572 - RNA, 78 nt, Human
ugaauacagaugaaauacuaagcuagccgaugaaucuuuuagaaaauggaauuagcaacgguaugcaaucugucuuua

SEQ ID NO: 4159573 - RNA, 87 nt, Human
ugaauaccuuccgcacgguggcucacgucuguaaucccagcacuuugggaggccaaggcagauggaucaccugaggucgggaguuca

SEQ ID NO: 4159574 - RNA, 61 nt, Human
ugaauagacuggggcugugaagucauuggcagaaugacauucaaaguuucaaucuguauca

SEQ ID NO: 4159575 - RNA, 81 nt, Human
ugaauagcugaaguaagagugauaauguaccguuuaagacacuaaaugcacauaaauauggucuuaauaacaagcuauuua

SEQ ID NO: 4159576 - RNA, 86 nt, Human
ugaauaggagcuuuuggaguccuguguuagaacaagaacaagaucacauugugacuuugggcaagugacuucuuugagcccguuca

SEQ ID NO: 4159577 - RNA, 82 nt, Human
ugaauaugugcuuuuuugucuugaagaaaugguguaucaauugauucugucaccgucagguuagaaugagcacuuccauuua

SEQ ID NO: 4159578 - RNA, 70 nt, Human
ugaauauucagaugacgugcuuagaauguauucacuaauggcauugucucagaagugaucaggauguuca

SEQ ID NO: 4159579 - RNA, 103 nt, Human
uggcugcucccggggaggagcagaggugagcccaccugggcaguucuaggggaucaucucccccaggaggguggccucugcccugagcccccaaggacagaca

SEQ ID NO: 4159580 - RNA, 72 nt, Human
uggcuggaaaagacaaagcuauuuuauuggucaccagcuaaacuaauuccccuugucuuuuucauaaugcca

SEQ ID NO: 4159581 - RNA, 98 nt, Human
uggcuggagagcaggaaggggcagggggcugccaaggaauguaacagguuuauuuuuguucaggcugcauucuuugcccagccugcacgccccagcca

SEQ ID NO: 4159582 - RNA, 101 nt, Human
uggcuggagcuuuuguggcagugauuauacuagcaguguucuaugaaggacucgauagcccaagagagccugcuguguaagucacaagucagcuuuugcua

SEQ ID NO: 4159583 - RNA, 56 nt, Human
uggcugucucggcuuugcugcugugucaguccaucagagcacaguaaugacugcua

SEQ ID NO: 4159584 - RNA, 70 nt, Human
uggcugugggggguguucaugaccucucacggccccuucuguguuuggucgugcaaaccugacacagcca

SEQ ID NO: 4159585 - RNA, 121 nt, Human
uggcugugucaugacaggccucaugaugcuaacagagauucuucccuucuuuuuuccaaaagcaccaaaaaaaagggcugaaguagucucuguagcaucuccccaaaguguuaaacagcua

SEQ ID NO: 4159586 - RNA, 58 nt, Human
uggcuuaaccuuuccagaagaaagcaauaggacucauucucugguuggaguugugcca

SEQ ID NO: 4159587 - RNA, 75 nt, Human
uggcuuaauauuucauauuuaacugcuuaccccgucuggaauuuguggggcuguggggugugaagugaggaguua

SEQ ID NO: 4159588 - RNA, 59 nt, Human
uggcuuaccacaggccaaauuugagguuaauuaaccaucagucauugucaguggggcca

SEQ ID NO: 4159589 - RNA, 76 nt, Human
uggcuuagacuagcuuucauucucuagcaccuaggaaauuuccugcuccagaaaaacuugagacucuguuaagcua

SEQ ID NO: 4159590 - RNA, 89 nt, Human
uggcuuauaacauaaguauuauguugcaaaugauucaaaauauauuagcacagacugaacacuguaaagugaugcuuaaauuuaggcua

SEQ ID NO: 4159591 - RNA, 55 nt, Human
uggcuucagaucugccccggaggaacccccacucugggaaaacagagcuggacca

SEQ ID NO: 4159592 - RNA, 62 nt, Human
uggcuucaggcagaauuuagacauagaauaacucuaauuugauuauucugcauugagugcua

SEQ ID NO: 4159593 - RNA, 55 nt, Human
uggcuucuggccaggcacaggagcucuaugggcugucccuggacuccaggagcca

SEQ ID NO: 4159594 - RNA, 80 nt, Human
uggcuucuguucucacauccagacaagcucugcaggagcagaacucccagagcccgggaccuggacuugaauggaaguca

SEQ ID NO: 4159595 - RNA, 81 nt, Human
uggcuucuuaaaacugcugggcauauauuucuaggcuuuaauccaggccuacugaaucagaauguccaguaguggaggcua

SEQ ID NO: 4159596 - RNA, 56 nt, Human
uggcuugaauuguguuuugauaagcguguauugcuuuaguaaagccagucaaguca

SEQ ID NO: 4159597 - RNA, 88 nt, Human
uggcuuucaggcucaggguucaggaggacagauaaggauagggcauggcucugcccuuccaaguucuccuggaucccccaggaagcca

SEQ ID NO: 4159598 - RNA, 80 nt, Human
uggcuuucagggaagcgcuuggcugugucuagcggcuccgacaacuaucugggcccgcagcugcugcucugaaacaguua

SEQ ID NO: 4159599 - RNA, 122 nt, Human
uggcuuuccaggugcagccgcagcuccguggccuggguggcuacugccucccugacccucccaggccuagagagggagugccacacaaggcggcccugcaggcagcagaccuccccaggcca

SEQ ID NO: 4159600 - RNA, 129 nt, Human
uggcuuucuucuuguggaaaauaagagggguagaucuugcuucuggguugguguacaguggaaccccuguacagaagcuagagcaaaugaagguaucuugauguuacaucuuucacaggaagaauacaa

SEQ ID NO: 4159601 - RNA, 124 nt, Human
uggcuuugacaauguacuauggucauauaggauauuaucaucggaggaugcugggggaagggaaccugagaacccuuuguccugauuuugcaacuucuugugagucuucgaccguuucagacua

SEQ ID NO: 4159602 - RNA, 84 nt, Human
uggcuuugacagaugaauugcagucagcauuagcaaaauagaucgugcugcuuguugauucuugacugauuauuuguacuucca

SEQ ID NO: 4159603 - RNA, 68 nt, Human
uggcuuugcaaacucauuccacauucauggaaucccggacauuuucaguguggauaguuuuguagcca

SEQ ID NO: 4159604 - RNA, 66 nt, Human
uggcuuuguguauuuucagacugugaauauagcuguuauguuaacagguaacugaggcugcagcca

SEQ ID NO: 4159605 - RNA, 84 nt, Human
uggcuuuuacuuguguuuguuugauuuuaguggcuacuuuaggguuucuaguaacacuguccaauagauacauaaugugagcca

SEQ ID NO: 4159606 - RNA, 55 nt, Human
ugggaacagcaugauugauccucagcuucaucucugagucaucucacugugccca

SEQ ID NO: 4159607 - RNA, 92 nt, Human
ugggaacaguuuucucuuggugauagucuuucuugcucauaaaagacaaagaguagguacaauggcacugcaccaggauuauaauuuuccca

SEQ ID NO: 4159608 - RNA, 114 nt, Human
ugggaacauucgugggugacaccugaggggcacaguaaagggucccccagguccgaaggcggcagggaccacaaggggugcacuccgggcucuccacccaccuccaccguccca

SEQ ID NO: 4159609 - RNA, 74 nt, Human
ugggaacucaguuccaucuucaucuuucccaucaguauggguggggcgggugcagcugggaagcuuagcuccca

SEQ ID NO: 4159610 - RNA, 97 nt, Human
ugggaacuggaguaaaggucacuugugcuaugcuuuagcaacugccaccacucucuuugcaaaagcguagcacaagugaccuuuaccguaguuccca

SEQ ID NO: 4159611 - RNA, 55 nt, Human
ugggaagccuagcagacagcugccugcauacauucaggucugcuggguucuccua

SEQ ID NO: 4159612 - RNA, 63 nt, Human
ugggaaggacagaacauaauugcuuccaaacaaaauuucaagccuguguacauuuccuuccca

SEQ ID NO: 4159613 - RNA, 82 nt, Human
ugggaaggauaagccugguugcaugcuaaugagggagacaaaguagccucacucuuauuugcaacuggcucagaccuuucca

SEQ ID NO: 4159614 - RNA, 85 nt, Human
ugggaagggcugugcgacagucccuggguagcucaguggcucaccacagacacagagcuaccagggccguacuggucucauccca

SEQ ID NO: 4159615 - RNA, 58 nt, Human
ugggaagggucaacagcuggaaauucuuuaugcagaguugcagcacgggcccuuucca

SEQ ID NO: 4159616 - RNA, 72 nt, Human
ugggaauaacacugagaacaauacagaguccacauccucaaggaacucaauagucuacugcagugguucuca

SEQ ID NO: 4159617 - RNA, 70 nt, Human
ugggaaucuggcucucucauuuacaaaaggaaaacuguccuuuaguuuuugcaagauguuagguuuccca

SEQ ID NO: 4159618 - RNA, 55 nt, Human
ugggaaugauagacacagugaacgguccaagacugaaaugaaaucuaucaucuca

SEQ ID NO: 4159619 - RNA, 66 nt, Human
ugggaauuacauggcauaacuugggauaccuguuuuacagcuaaaucauuugugaucugauuucca

SEQ ID NO: 4159620 - RNA, 55 nt, Human
ugggaauuuagacuuguaugagcucuccuaucucguuucaagucagcaauucuca

SEQ ID NO: 4159621 - RNA, 127 nt, Human
ugggaauuuuccugugauagggauuuuacuccuucuugagguagcacauucuuccuuuacacagccaggggaccacuggaauaugccccuuaaguugaggagaagcccucaguccuuauuccaccca

SEQ ID NO: 4159622 - RNA, 74 nt, Human
ugggacaaggucaggaggaaacuggauucacuucauguugugcagaagcaucauucacuuccuucuggcucccg

SEQ ID NO: 4159623 - RNA, 130 nt, Human
ugggacacacaucacaggcugccuuuguauuucacugguucugccacuuuccccuugaggacuguaaacuccccaagggcagaggcagggccccggggauuucacagggcagucuggcucccuucuccca

SEQ ID NO: 4159624 - RNA, 112 nt, Human
ugggacaggcaguucauauuaaggagucugcauuuuucucucagaagggcaaugggaagacuucggagaguuggaaguagcagaaggaccugauaugacuuguguguuacua

SEQ ID NO: 4159625 - RNA, 79 nt, Human
ugggacauuaucacacauuugaaggccugucaaagguaagcacuauuagauuugucuccagagugugggacuuggccca

SEQ ID NO: 4159626 - RNA, 67 nt, Human
ugggaccaagucauuucuuuagaucuuuugcucuugucaggugggguauuaaggagguuggguccca

SEQ ID NO: 4159627 - RNA, 56 nt, Human
ugggaccugcccuggccccaucuuggcuuucacaaaugggagcuggugaggucuca

SEQ ID NO: 4159628 - RNA, 60 nt, Human
ugguucagaauuguggagaaaggggagcuguguuucucugccucacaggucuaagcacca

SEQ ID NO: 4159629 - RNA, 56 nt, Human
ugguucagagaguugcugaccaccuccucuuaccugugguuaagaucuuaggacua

SEQ ID NO: 4159630 - RNA, 78 nt, Human
ugguucauagccucacaggauauucuuaguaaauauuuguuaaaugaaugaguaaauccuguuaggauuauguaucca

SEQ ID NO: 4159631 - RNA, 59 nt, Human
ugguuccaguuuucaauagagcugucaaaauaggcuugagaaggugaaaacuggcauca

SEQ ID NO: 4159632 - RNA, 79 nt, Human
ugguucuaaaaaacuauuuuauuaugcuauucacauuucuagaugugauucaagaaaguaaaauguugagucagggcua

SEQ ID NO: 4159633 - RNA, 71 nt, Human
ugguucucaggccuucagaccuagacaggaaucuauacuacuagaucucugaaucugaagccuucgaacua

SEQ ID NO: 4159634 - RNA, 84 nt, Human
ugguucugcucaaagguccagaggucccgucaccuaggagcaacaucaucagggaugcagcacuugguuaaccagcaugagcca

SEQ ID NO: 4159635 - RNA, 55 nt, Human
ugguucugcuuuugauucugccuaaugucucagggguauuacaggcuuagaacca

SEQ ID NO: 4159636 - RNA, 62 nt, Human
ugguucuugggugcacaagaaaacuaugauauuauaauaguuuguguccuucuaaagggcca

SEQ ID NO: 4159637 - RNA, 64 nt, Human
ugguucuuugauuuuaagggagucauucaguccaucuagacugaauuuggaacucagagaauua

SEQ ID NO: 4159638 - RNA, 101 nt, Human
ugguugaggaaauugaggcucagagaagucgugacauucccgagguccugcggcuaggaagcaccggaaugaugacuucagccucgacaucucuuguacua

SEQ ID NO: 4159639 - RNA, 72 nt, Human
ugguugaugaucaguggacauggcaugugaagaaauaacuccuuagccaugucacauauggucaucgaacca

SEQ ID NO: 4159640 - RNA, 79 nt, Human
ugguugcaagugaaagagaguuuagugguuucaucauuguuguaguaaaaccauugcaucuuucuuaauauuuugacca

SEQ ID NO: 4159641 - RNA, 100 nt, Human
ugguugccaccuugucagcacgccugccugucagucccccuugagggcuucuguugccugcagagggacuggcaggaagaggugcaccuagguggaucua

SEQ ID NO: 4159642 - RNA, 65 nt, Human
ugguugccuaauucauugggauugcuaguuuuaacuucaauacaccauaggaauagugggcacca

SEQ ID NO: 4159643 - RNA, 81 nt, Human
ugguugcugguucacagcauacgcugcauuuuauaggauugcuucccaauucugcaugguggugucucugagcuagugcca

SEQ ID NO: 4159644 - RNA, 74 nt, Human
ugguugcuuuaggauuuaaguggcaggugaaaauuaguacugcuauuugcuauguauauaucuuuaagcagcua

SEQ ID NO: 4159645 - RNA, 73 nt, Human
ugguugggggucccucccuuggucucccucucgguucauugcugccuucuggggaagggagggccuccaguca

SEQ ID NO: 4159646 - RNA, 61 nt, Human
ugguugugcugaguuuagugcaagacuaauguuuuuucuacuugaccggcuuagcaaacca

SEQ ID NO: 4159647 - RNA, 59 nt, Human
ugguugugcugaucugugugugacucugcuucuguagaugauuagauuaaacacggcca

SEQ ID NO: 4159648 - RNA, 74 nt, Human
ugguuuagugugcauggaucuguggaucuaguuguuccucaugcaaacuuucaacuuucuguggcacuaaauca

SEQ ID NO: 4159649 - RNA, 67 nt, Human
ugguuuauaugauucaguuuuggaguuaaaaguaaauuuucucugucagcauugcgucacugagcca

SEQ ID NO: 4159650 - RNA, 67 nt, Human
ugguuuccuauggcagaggaguuauuuucuagcagaaaccauuuauuccuucuuccuuuaguaacca

SEQ ID NO: 4159651 - RNA, 58 nt, Human
ugguuuccugauggacacuugguuggguagauacuggugucccaaagauuagaaauca

SEQ ID NO: 4159652 - RNA, 73 nt, Human
ugguuucuucaacacauuccuguagguguuugguuuuucugagcuccacaugcagagugucacuugaaaacca

SEQ ID NO: 4159653 - RNA, 99 nt, Human
ugguuucuuuuucugucucucacugagcaugucaccggagugcuguguauagaguaaggccuuaauaaauauguguucaguugacaggagcaggagcca

SEQ ID NO: 4159654 - RNA, 67 nt, Human
ugguuuucauuuuuucagguuccuuuaggaugauguccucugguccugcagcagaucuuuggaacca

SEQ ID NO: 4159655 - RNA, 83 nt, Human
ugguuuuucauguuggauucacugugaguucuuaaaaaaaaggaucacccacugauggauucaaaucuaccuuuggaaaauua

SEQ ID NO: 4159656 - RNA, 68 nt, Human
ugguuuuugucuuuaugcacacugacuugggugguuuuuaagucaaauugucuaaagaaauaauuuca

SEQ ID NO: 4159657 - RNA, 84 nt, Human
ugguuuuuguuccuaagugucuacauuugcuaaccagauucucuguuucugguuucugugaagauagcuaccggcacaaagcca

SEQ ID NO: 4159658 - RNA, 77 nt, Human
uguaaaaauuccaagaauaacacuuagguuuugcucuugaggaggggcaguucuauauuauucuugggauucuuaca

SEQ ID NO: 4159659 - RNA, 90 nt, Human
uguaaaaauugaaaccaaagauguccccucacugugcugcccucagaugcagguauuagacagcaggggagucugguuuucaaaacugcg

SEQ ID NO: 4159660 - RNA, 67 nt, Human
uguaaaauaucuuaaucauuuucauauugauuguauguugaaaugagaaugcuuuggauauauugga

SEQ ID NO: 4159661 - RNA, 101 nt, Human
uguaaacuuaaaaaaggcuguuuauuagaaaaaguauugaaauuguguguaugucuagauucacauagcauuuuuuuggcaacagucuaagguaguuuaua

SEQ ID NO: 4159662 - RNA, 130 nt, Human
uguaaagcaacaagaucugugcaguauaauucugucuuuuaauuaacaugaaucuguuuuuugucaauaaaauguuuuugucucugauaaguaguucaguuggaguacaggcuguuuuuagauuaugcug

SEQ ID NO: 4159663 - RNA, 73 nt, Human
uguaaaguaucugugagcucucaggacauuucaacacucccugacuuggaguuauaucucauggauacuuaca

SEQ ID NO: 4159664 - RNA, 78 nt, Human
uguaaauccauuuuccuaagguagugauaauuuuauaacacaagcaugagaaaugaacacaaccuugggagacuugca

SEQ ID NO: 4159665 - RNA, 81 nt, Human
uguaaaugcgaauugaugucaacucaggagaauugaaacucacaucuucugaacuuugacaagucaauugugcagaaaaca

SEQ ID NO: 4159666 - RNA, 102 nt, Human
uguaaauuagaguauaagcauugcaagggcaugugugcguguguaugaaauagagagaaagugcacagucaauguuuuugcaugugaaugacuaaaaccaca

SEQ ID NO: 4159667 - RNA, 63 nt, Human
uguaacacuucagagugccaaaugcuuuuuaaaaaauagcccuggcucugaaagagugcugca

SEQ ID NO: 4159668 - RNA, 75 nt, Human
uguaacaguugcucuagggaggcaauagcaauguucagaugaauggugaauuccuuuccuauugcugcucuaaca

SEQ ID NO: 4159669 - RNA, 61 nt, Human
uguaacaugguucuuacucucaaggaguucacagauacuuacugagugcuuacuauguaca

SEQ ID NO: 4159670 - RNA, 64 nt, Human
uggaagcaguaugcagucuuucugaccaauuacagaugaaaacuugugcaugcuuuuguuucca

SEQ ID NO: 4159671 - RNA, 58 nt, Human
uggaagcugaacuuagcaaggaagcuuaguaguuaucccuccggauguucagcuugca

SEQ ID NO: 4159672 - RNA, 63 nt, Human
uggaagcugccugccacgcuagauagaucuuuuuucuaucuugggguguguagcauguaucua

SEQ ID NO: 4159673 - RNA, 94 nt, Human
uggaaggaaggagggagaaaacagggaaggagguggaaggccagggcuaugcuggggcuucccuaaaccuuuccacuuuccuucuucucuucua

SEQ ID NO: 4159674 - RNA, 99 nt, Human
uggaagggaaccgcuugaugccucuugcuuguuccacucuugggucagagauaucucccuggcuggaaauuaaguaguggccacaguugguagggucca

SEQ ID NO: 4159675 - RNA, 104 nt, Human
uggaagggcgcucagcucagccaggacagggaaacuagugcauaaagguggggcauuugcacaguucccgucuugcacagcuacugccugccagugccucucca

SEQ ID NO: 4159676 - RNA, 61 nt, Human
uggaaggggagccaggggcuuggguggacucgucccacuggcccccuggacuccucaucca

SEQ ID NO: 4159677 - RNA, 55 nt, Human
uggaagguguggcaggucuagugggcaggugagcuggcccuggccacggcugcca

SEQ ID NO: 4159678 - RNA, 70 nt, Human
uggaauacagugagaauaauucuuaguucugagcuagaaauugagcuuagggaugcucuccuguccucua

SEQ ID NO: 4159679 - RNA, 101 nt, Human
uggaauauguucuuuaguuguaucagucaaguuggcuagguuaugcuacaguaaaaagcaacaacaaaacuucacuggcuucaguaacagaauuuuaucua

SEQ ID NO: 4159680 - RNA, 63 nt, Human
uggaaucucaguggaagcaggaaguuuagaaggcaucacagcuaccaucuacuagagauugca

SEQ ID NO: 4159681 - RNA, 81 nt, Human
uggaaugaaggagauggccuuucuacaccaggugcacauucauucucuguuagucaaaaaggguccauagcuaucauuaca

SEQ ID NO: 4159682 - RNA, 83 nt, Human
uggaaugacagaaguuuauuuuacacauccauggagaauagcugucuccauugggaaaagaaaugcaacuaaguacaugccca

SEQ ID NO: 4159683 - RNA, 67 nt, Human
uggaaugcauugccuggauaagcaggucagaguucacaguugaaacugcucaugcaaugcaugucca

SEQ ID NO: 4159684 - RNA, 129 nt, Human
uggaauggaaaagugcaggcaaacuagaaguuuccaggauaugucuacauuagauuuuuguucauuugcaaaguuagacacauccguggaagcuucuuauagucugccuguacuuuuccuuucauucca

SEQ ID NO: 4159685 - RNA, 64 nt, Human
uggaauggauaagucaaagaguaucccauuuaaaguuuaauggguacugucaaauuguccucua

SEQ ID NO: 4159686 - RNA, 113 nt, Human
uggaauuuugagucagaacaggucuugugaauauaaguuccauguguuuacuaccuacagugaaaaauacgugguuacucuauagaguuacaaaaccacugcuuuaaauucua

SEQ ID NO: 4159687 - RNA, 78 nt, Human
uggacaagggcugggucuuuaugggggccaggaucuugauuaauuccugggcacuuguggagauuagagucuuggcua

SEQ ID NO: 4159688 - RNA, 72 nt, Human
uggacaaggggucacucacgccuggaaucccagcaguuugggaggccaggguggguggaucgcuugagccca

SEQ ID NO: 4159689 - RNA, 62 nt, Human
uggacacuguuccacacuaagaagggaagcaagucuccuuacugcgaagggggcaguggcca

SEQ ID NO: 4159690 - RNA, 56 nt, Human
uggacagagaggaaggccauuucacacagaggaaaugaaaccuaaacuuucugcca

SEQ ID NO: 4159691 - RNA, 68 nt, Human
uggacagcagagcaccagggccacuugcagagucaccugugugauguuucuggguucugccuugucca

SEQ ID NO: 4159692 - RNA, 67 nt, Human
uggacagccaaggaauuaggaagggggcagagaggaauagaucaucccuuccucccugggcugugca

SEQ ID NO: 4159693 - RNA, 82 nt, Human
uggacaggggcugccacagggucagccacucugcaugggaacuccuguaagggggaccguguggcccaccuccaccugcuca

SEQ ID NO: 4159694 - RNA, 67 nt, Human
uggacaggugcaaagggcacaugacaccuucaucaaugcagccucguguaaguccauugccugucua

SEQ ID NO: 4159695 - RNA, 78 nt, Human
uggaccaagucauacaucccauuuuuugcauuuauuucucauagaaaucuugaagaguuugggguaugauuguuucua

SEQ ID NO: 4159696 - RNA, 58 nt, Human
uggaccuagagaaaaaugucuggagcaauguuuugccguucaaagacccucaggucca

SEQ ID NO: 4159697 - RNA, 69 nt, Human
uggaccuugccccuugcccuuuggucauucaaguaaccugaaucccucagagaaaaggagcaaggguca

SEQ ID NO: 4159698 - RNA, 61 nt, Human
uggaccuuggcauccucugaagaaaugauauuuuuuauucuagcauugaugccaaggucca

SEQ ID NO: 4159699 - RNA, 68 nt, Human
uggacgaugagauggggcuggaagguacaagacaguccuucagucccauguuucucuuuaucucucca

SEQ ID NO: 4159700 - RNA, 75 nt, Human
uggacuaaccucacagcuugggcaaacggccuuccucuuugaaugagcuucccaagcugugaaauggaggucaca

SEQ ID NO: 4159701 - RNA, 60 nt, Human
uggacuaugugaagugugaauagggcucaguugcauuuguucacaugucauguacaacua

SEQ ID NO: 4159702 - RNA, 105 nt, Human
uguaggaauguuuauggagugacaggcagauguuuuaguuguacuauguaugugcuaagugaaaacuaaaaugaucucuuuuaugauaucauaggcauucuuaca

SEQ ID NO: 4159703 - RNA, 94 nt, Human
uguaggaucauucugacaugagcucauugagaauaagacccaugguugauuaaucuuuugucugucccaauagccaacaggaugcauuucugca

SEQ ID NO: 4159704 - RNA, 88 nt, Human
uguagggcaaaggcuugcgauuccuuguaacaauauuucauaauuuauauauuugauuaaaaaccggaaucugggccagcagccugca

SEQ ID NO: 4159705 - RNA, 63 nt, Human
uguaggucugcagaggagucagcugagggaucuuccacagaggaaugcaucagcagauuugca

SEQ ID NO: 4159706 - RNA, 85 nt, Human
uguagguuuauagucacuuucacauguugggaucaguaaauguaaaaucacagauuugucaguggaagugauucaaacagcuaca

SEQ ID NO: 4159707 - RNA, 57 nt, Human
uguaguaacgggagagugcaucuuuuagcaaccguagcucguuuuuccgggauugca

SEQ ID NO: 4159708 - RNA, 65 nt, Human
uguaguagcaguaacaagguauaucagcccauaacaaggcaaugugccauugaggcugaggcuca

SEQ ID NO: 4159709 - RNA, 59 nt, Human
uguaguccaaaaauggggaaauauuggcuuuaacccuauuuuauccccacuggauuaca

SEQ ID NO: 4159710 - RNA, 62 nt, Human
uguagugaggggaucuugucuggcuuucuaagagaauaugaagcaggugaaccuccaguaca

SEQ ID NO: 4159711 - RNA, 73 nt, Human
uguaguucaaaggccugagagaugaagggcugaugguauagauuucagucugagucuaaaggcuugagaagca

SEQ ID NO: 4159712 - RNA, 74 nt, Human
uguauaaucuuaguuuagauuagcaauucgggaucucuuuuucccugaauucuaaccauuaagccaagcaagca

SEQ ID NO: 4159713 - RNA, 65 nt, Human
uguauaauuggcuugggaaggaagaucuugaauguuuggauauuucccaguuagucauuuuuaca

SEQ ID NO: 4159714 - RNA, 63 nt, Human
uguauaauuuguguacaauuuagcauagugacauuaacuaauuuggaccauacaaguuaugca

SEQ ID NO: 4159715 - RNA, 79 nt, Human
uguauaauuuucaaacucugucaauaacuugcuggguccaaccugcagacccuggcugcgugauggaugaagaaaugca

SEQ ID NO: 4159716 - RNA, 74 nt, Human
uguauacagaauuuuaccuggcugacuuauguccuuuccaccaccagcagcugagaugguaagauucaguaaca

SEQ ID NO: 4159717 - RNA, 73 nt, Human
uguauacuacagguaaggcaauugguaccugacaaauaaccauucuguaaacaauagcauugccugauauaua

SEQ ID NO: 4159718 - RNA, 72 nt, Human
uguauagacacagcuaugauuugagcagugccauuagugucuuaguaccacucggaggaccuguuuuaugca

SEQ ID NO: 4159719 - RNA, 95 nt, Human
uguauaugaaggugagauugcauuuagguaaacacuuuuguuucuuuaggggugaccucaguuaguguuuaguuaagauuucaaaagcuugugca

SEQ ID NO: 4159720 - RNA, 58 nt, Human
uguauaugcacuuuccuuauccugguguugcaggugcugagagggguuguguauuaca

SEQ ID NO: 4159721 - RNA, 83 nt, Human
uguaucaacaaacuuuaauuguguguuaggccgaauuccuaugugaaauugguaacacaggcauuaaaguuuacaagagugca

SEQ ID NO: 4159722 - RNA, 86 nt, Human
uguaucacaaaggucucagagcacauuaaagucacacacacacacauuaaagucacaguaugcucugagaccuuugugcaucuaca

SEQ ID NO: 4159723 - RNA, 90 nt, Human
uguaucacucuucaaaguguuaugaaauuuuuuuugguuagcccagaaacaguuuauaacaugauacuacuugaccauggggaugauaca

SEQ ID NO: 4159724 - RNA, 67 nt, Human
uggagcccaagucugcacucggcggcacccuuauucaucacuccaugcgccugugguuugguuucca

SEQ ID NO: 4159725 - RNA, 80 nt, Human
uggagccccugauguccugcaaaugaaggaggaggauguccuucaguuccuugcagcaggaacccacuuagguggcacca

SEQ ID NO: 4159726 - RNA, 61 nt, Human
uggagccuaagaauuaaugaauacaccagguaauucugcugcagauauuucuuaggccaca

SEQ ID NO: 4159727 - RNA, 91 nt, Human
uggagcgagagugaugucuguagugaagaauuuggcgccaucuugagaaggucaaagugauucuucgauuaaaugccuuacuuaucgccua

SEQ ID NO: 4159728 - RNA, 61 nt, Human
uggagcucaaggaccuugacagaaauuccccaaaacuuuguuaaggucacuucugagccua

SEQ ID NO: 4159729 - RNA, 104 nt, Human
uggagcugggagcugcucggccuggugggaaagggcggacagggcacauuuccaggcccuggaaggcccccagcgcccccaccuguugacaacuccccacccca

SEQ ID NO: 4159730 - RNA, 58 nt, Human
uggagcugggguuugaaucuggaccaucuagucucagggucauuggucuucagcacca

SEQ ID NO: 4159731 - RNA, 83 nt, Human
uggaggaagcauuaagagagacugaacugcaaaaauucuuucccacugagauacuaguucagagauucucugcuuucaaacca

SEQ ID NO: 4159732 - RNA, 59 nt, Human
uggaggaagggaguguacuugcccucaaaacagcaaagggacuaugcuuuucuucucca

SEQ ID NO: 4159733 - RNA, 77 nt, Human
uggaggaauuaugcuaaaugaaucaagucaguuacagaaagauaauacuggaggauuccacuuacaugaggucucua

SEQ ID NO: 4159734 - RNA, 66 nt, Human
uggaggagaccauuccacucagcauugauucugacaugagccugaaugaugggaugcuuuucuuca

SEQ ID NO: 4159735 - RNA, 96 nt, Human
uggaggagcagucaaagacaucuucagguucauggucauauucauuaugguguuuguggccuuuaugauuggaauguucaaccucuacuccuacua

SEQ ID NO: 4159736 - RNA, 79 nt, Human
uggaggauaauggcccucuuaucacagcuccacuagucagugcuccaguggggacacuguguggggggcuacaacccca

SEQ ID NO: 4159737 - RNA, 56 nt, Human
uggaggaugagugugggcucugaugagaauguuaaaucccaauaacuaguccuuca

SEQ ID NO: 4159738 - RNA, 70 nt, Human
uggaggaugccauccaggauacgucauaaaaaaauucauucaauuugaguauucuuuucagaguccuuua

SEQ ID NO: 4159739 - RNA, 79 nt, Human
uggaggaugccuggggaggccuaagggggaggucagagacccagaaagcccccuacacuucccagaugcugcguuccca

SEQ ID NO: 4159740 - RNA, 60 nt, Human
uggaggcacuaaauggccacaaggaaaugacuuccaagaugccaacauuugggccuauca

SEQ ID NO: 4159741 - RNA, 80 nt, Human
uggaggcuggaagccaaagaccaaggugucagcagaguugauuuccccugaggccccucuugugagcauccagcuagcca

SEQ ID NO: 4159742 - RNA, 73 nt, Human
uggaggcuggaaguccaagaucagggaucagucggguucuagccagggcccucuucuagguuucagccugcca

SEQ ID NO: 4159743 - RNA, 63 nt, Human
uggaggcuucuccuuccuaccuuccuccucacucugagcagugaaggaaggggaggggcaacg

SEQ ID NO: 4159744 - RNA, 67 nt, Human
uggagggaaguggcuggcauaggaacagaccauauccauguggcuuuggacuccagucauuccccca

SEQ ID NO: 4159745 - RNA, 75 nt, Human
uggagggcugcacagaucuucaaggguuggcuuguaaauauguaaucagaagagcuggugcugccugagaaucca

SEQ ID NO: 4159746 - RNA, 68 nt, Human
uggagggcuuuguggcagucacuauaugagaugcugagguuauaguugugaauuaaauaaagucccua

SEQ ID NO: 4159747 - RNA, 61 nt, Human
uggagguacaugaggauacacaggacacucucuauuggccugugaauugaaucuaccacua

SEQ ID NO: 4159748 - RNA, 66 nt, Human
uggaggucaaaaugcuuuucaggucuuuaauaucuacauugaguccaaaacuacuuuugaccuuua

SEQ ID NO: 4159749 - RNA, 84 nt, Human
uggagguggcaaaucauucauaguaagaagagccgcaaaugucucauagcacuuccccuccugagcugguauuguccaucucca

SEQ ID NO: 4159750 - RNA, 93 nt, Human
uggagguguccagggcagggauguugcggcagccuggggcucugcacccuccacccuucaccgccacauucugccucuuggccuuuaccucca

SEQ ID NO: 4159751 - RNA, 91 nt, Human
uggaguaaacuuggagcuaaaugaaucauaaaucaauaaguaccucagccugcugccucaugguuuauugauucagaagcuguuuauccca

SEQ ID NO: 4159752 - RNA, 57 nt, Human
uggaguaguguguuucucugcuaucucggcucaguggaugauuuugcacuaacuuca

SEQ ID NO: 4159753 - RNA, 71 nt, Human
uggaguaucaagaguauugacaagaccaauuuacugauugauugguuuauauaucacaucugauugcuuca

SEQ ID NO: 4159754 - RNA, 67 nt, Human
uggagucaaaguuuguggcaauuuauugauccuguaucaugaauaagcugcuaggaacuuaguucca

SEQ ID NO: 4159755 - RNA, 66 nt, Human
uggagugaugcuggggacacagugguggccaagacagcccuaggcccugcccuuagcacacucaca

SEQ ID NO: 4159756 - RNA, 60 nt, Human
uggagugucuuucuugccacuuuagcccuuugguuugguggcagucuuaagagaucuuca

SEQ ID NO: 4159757 - RNA, 67 nt, Human
uggaguucucaggugagggcuuugaccucagagagcuguuggucucauucucgccugugaaauucca

SEQ ID NO: 4159758 - RNA, 73 nt, Human
uggaguucugaaggcauuuuugcugauuucuggguucccagacaucugcacgguugccguuucuagaagucua

SEQ ID NO: 4159759 - RNA, 55 nt, Human
uggaguucuguugagcaaaauuuucaugacaguugcugugauaagcagaauucca

SEQ ID NO: 4159760 - RNA, 72 nt, Human
uggaguuucauuaccaguuuugccauuugcuaguuaauaugacuugcaggugcagcuggugaaauggcucua

SEQ ID NO: 4159761 - RNA, 96 nt, Human
uggaguuucuaauccaguagcucuggacuggggccugagaacugauauuucuaucaauuucucagguagugcugaugcugcugguagggaacugca

SEQ ID NO: 4159762 - RNA, 77 nt, Human
uggauaaaauuuggguaaaauuuaaauacauggcauagaccauguauuuuaagauuugccucaagguuuguaaacca

SEQ ID NO: 4159763 - RNA, 81 nt, Human
uggauacaugagaugguugaccagagagcacacgcuuuauuugugccguuugugaccugguccacuaacccucaguaucua

SEQ ID NO: 4159764 - RNA, 78 nt, Human
uggauacuguugugaggacagugaacagagagguuugcacuaccauuaaauuccuuguucucaaauucucaguguuua

SEQ ID NO: 4159765 - RNA, 65 nt, Human
uggauagugugcugcuuaaacaguuguggaaacuucauccuuguccccuugcagcucauuuucca

SEQ ID NO: 4159766 - RNA, 59 nt, Human
uggauaucuguuucucuguccaugaaucgucccccaggcacagaguagaacauaugcca

SEQ ID NO: 4159767 - RNA, 82 nt, Human
uggauauuccacauuaugacuauuuaacuucacagacaagagaagcagugaaacaaauggaugucauaguuggauauacuca

SEQ ID NO: 4159768 - RNA, 65 nt, Human
uggauauugagaagugagucccuugagguuauguccuuaguaaucuuacaaguuucuaauaacca

SEQ ID NO: 4159769 - RNA, 77 nt, Human
uggauauugaucugaccucuuguuuuuauuucuaaguuuguuuggcacugaaaaaggagagguuuguuaucaaucca

SEQ ID NO: 4159770 - RNA, 56 nt, Human
uggaucuagccagcaacauuucggagauacaacuuuucaugggcagguaagaucca

SEQ ID NO: 4159771 - RNA, 63 nt, Human
uggaucuaucuccagggguccuugagugcacggaagcuggcuuuccccagaggaggggaucca

SEQ ID NO: 4159772 - RNA, 80 nt, Human
uggaucucaguugucccauggcuuuuguuguuguuguuguugucagucagguacuccgagggcauggguaauugauaaca

SEQ ID NO: 4159773 - RNA, 55 nt, Human
uggaugaacaguuuuggagagaucugcaagacuucccagaagagaugaucaucca

SEQ ID NO: 4159774 - RNA, 118 nt, Human
uggaugagauaaaugggaaaaaugaauggguuuauggaugaguggaugagugugccugauggaaaacaguaccuucugaccaguuaucuugaauuccuuccucuuccccuucuguuca

SEQ ID NO: 4159775 - RNA, 77 nt, Human
uggaugaggcaggcuggucugaagagugcacugauaacuagaagcucauuacuuuuuagcacagugugugccaucca

SEQ ID NO: 4159776 - RNA, 104 nt, Human
uggaugaugaggaaagccucuuaagcuuucauucagggagaauuuggacccuagaaaucacagaauuuccuaugagagauuccucuagagauucuuuuaauccg

SEQ ID NO: 4159777 - RNA, 63 nt, Human
uggcccuuugugugcuagcugagccugccuaccugguuugggcuggaagacacugaagggcca

SEQ ID NO: 4159778 - RNA, 95 nt, Human
uggccgggcacggugucucaugccuguaaucccagcacuuugggaagccaaggugggcagaucacaaggucaagagaucgagaccauccuggcca

SEQ ID NO: 4159779 - RNA, 96 nt, Human
uggccgggcaugguggcucacgccuguaaucccagcacuuugggaggcuugaggugggcggaucacaaggucaggagaucaagaccauccuggcua

SEQ ID NO: 4159780 - RNA, 55 nt, Human
uggccucaaccguccuaagcacacgugugcuagaaaaagggagaguuggguguca

SEQ ID NO: 4159781 - RNA, 75 nt, Human
uggccuccagugcccuccuugggggccuguugccucugcccuggcccccagcagaggaggugccccuggcugcca

SEQ ID NO: 4159782 - RNA, 87 nt, Human
uggccugccucccccagcccaguggccauggguauucuagaaacaaaccauucuucccucugcccugggauuggguggaggcugcca

SEQ ID NO: 4159783 - RNA, 55 nt, Human
uggccugcuuucauuugaugcuguuaguuaaucaagcacaucaguuaccaggcca

SEQ ID NO: 4159784 - RNA, 60 nt, Human
ugguuugggcacguuuaaguaaguuguccguggacaaaacuugaauaggugucaaggcca

SEQ ID NO: 4159785 - RNA, 57 nt, Human
ugguuuguuuguucauguaaaacgggauuuccuguuuauacaaggagaacaaugcua

SEQ ID NO: 4159786 - RNA, 123 nt, Human
ugguuuuaguuuaguuuuuguuuuucuguuuguuccuuuguuuagcagagacauuuuccauaagauacagagguuuucuuguuucacaaaaggcaugcagaugggaagaugagcuaagaacca

SEQ ID NO: 4159787 - RNA, 85 nt, Human
ugguuuucacccuugguuuugcagagcuguagaggccugugaaagugccacagcagcccuccagaaaaagggggaaagaggacca

SEQ ID NO: 4159788 - RNA, 57 nt, Human
ugguuuucauugcuaagguuuuauuccuuauacaaagggaguuagaaaugaaggcca

SEQ ID NO: 4159789 - RNA, 76 nt, Human
ugguuuuccaugguagcauguuuacaguacuugaaaaauguugcuuucaagucauguuaacugcuucuuaagacca

SEQ ID NO: 4159790 - RNA, 73 nt, Human
ugguuuuggggaucagggugagugggaagcagcgucaccuucugagcugcucuugcucuuccucccuugacca

SEQ ID NO: 4159791 - RNA, 61 nt, Human
ugguuuuuagcuuuugugucagauaagaaugguguuguucccaucugaaugaguuaaacca

SEQ ID NO: 4159792 - RNA, 61 nt, Human
ugguuuuugaggauuaaaugacauuguagaaaaacuacaaaguuugggguccucaaaacca

SEQ ID NO: 4159793 - RNA, 92 nt, Human
ugguuuuuggggauaguuaagcccaggccuuaagacaguuugauauucaguuuuguuauuuaggucuggguuagggauaccgccagagagca

SEQ ID NO: 4159794 - RNA, 129 nt, Human
uguaaaacuucaaagaugaaugucauuuuuaaaugugagaaaaagagggguaaaugauggcugguuuaaacauacguuaaacagcuucucuuugucuuagagggacagugcgggccugggaagugagca

SEQ ID NO: 4159795 - RNA, 85 nt, Human
uguaaaagugcugccaguacagaauguguaucauuaccauuuuauggauaaauguguauuaccauuuugucuggauaacuguaca

SEQ ID NO: 4159796 - RNA, 63 nt, Human
uguaaaaguuuuuggaacggcauuguccaauagaacuuuuugccguguuagaaauguuuuaca

SEQ ID NO: 4159797 - RNA, 68 nt, Human
uguaaacacuuaggaacuuuggguugcuggauacaccaguuccaggcuacuuggauuccuggucuaca

SEQ ID NO: 4159798 - RNA, 60 nt, Human
uguaaagaaagcuguuguuguauucugcucaauggaauguaugauacaguuuauuuuaca

SEQ ID NO: 4159799 - RNA, 71 nt, Human
uguaaagauagaaagagugguucuuuuuaccuagauaaaauauuguauaagucauucuuucuauuaagaca

SEQ ID NO: 4159800 - RNA, 79 nt, Human
uguaaaguaagcacacauucaccaugacugaaaaccaaaguucuuuacucucacaaaguggauguggguuggcuagaca

SEQ ID NO: 4159801 - RNA, 57 nt, Human
uguaaaugcuuauuagugucacaaaauuacccauuuugugaugagggagcauuaaca

SEQ ID NO: 4159802 - RNA, 66 nt, Human
uguaaauguacugaggcaacaggaguuuaccguuauguauuuucaguuguuggaaguagauguaca

SEQ ID NO: 4159803 - RNA, 82 nt, Human
uguaaauguuguaaguacaucuaagguaugucaggcuaagcuauagacguuugguagguuagauguauuaagugcauuuuca

SEQ ID NO: 4159804 - RNA, 77 nt, Human
uguaaauguuucucuagcagaucauaaugaaaaagugaaauugcugguucauagugauuguucagauagauauuaca

SEQ ID NO: 4159805 - RNA, 92 nt, Human
uguaacaucucaugaccugcagguguuuccacacuuccuuccccuugcucaggagguguaauuacucuugcaguuugccugugaauuguaca

SEQ ID NO: 4159806 - RNA, 88 nt, Human
uguaagaaaucgaggccaaggcacuggaagucccauugucucuggaugcugagaccuugaauuucaugccauggaccccucccuuaca

SEQ ID NO: 4159807 - RNA, 76 nt, Human
uguaagaaugggaugaaaaguucaggccuaugauaaacaucaguuuaagaggguuucauucccaaauaagcuuaua

SEQ ID NO: 4159808 - RNA, 57 nt, Human
uguaagaccaggcugggcagcucucauucuccgauuggcgguccauccgauuuuaca

SEQ ID NO: 4159809 - RNA, 124 nt, Human
uguaagauggugacaguaaggauuaggacagauuugaagguuugauccuuauuuauaagcuucuugcuugugaauagaagucagaccuacaauuuauuaacuuaccuucuucacuauuucuaca

SEQ ID NO: 4159810 - RNA, 99 nt, Human
uguaagcauucuccuugcuuggcagguuaacuuacaacugucauaacuggcugcaacagugguauagccucuaaacaagagaaauuugcuuuguuuaca

SEQ ID NO: 4159811 - RNA, 71 nt, Human
uguaagguuucucugcagugugaauucugguaugucuugccagguaugaauuacgcacgaaagccuuguca

SEQ ID NO: 4159812 - RNA, 63 nt, Human
uguaaguggaaggaggccacagagaaguuugcuucucuuuagagccuuuccucccgacuugca

SEQ ID NO: 4159813 - RNA, 110 nt, Human
uguaagugucugaauugggaagguuguaccagagagcagcaggaaaccgggaguuccucacgauguuaggcccugcucuguuggucaccugaccaguguauggcaggaca

SEQ ID NO: 4159814 - RNA, 60 nt, Human
uguaaguuuugugaaacaaacauacaaagaaauuugauuuguuuguuagagaagcuucca

SEQ ID NO: 4159815 - RNA, 66 nt, Human
uguaaucauuuacaaacucagcauuguaaggcuuaaaauucuagcgaaggcuguuguaaaguugca

SEQ ID NO: 4159816 - RNA, 64 nt, Human
uguaaucccagcuacucgggaggccgaggcaggagacucgcuugaacccgaggcggagguugca

SEQ ID NO: 4159817 - RNA, 66 nt, Human
uguaaucccagcuacucgggaggcugagacaagagaaucgcuugaacccgggaggcggagguugca

SEQ ID NO: 4159818 - RNA, 66 nt, Human
uguaaucccagcuacucgggaggcugagacaggagaaucgcuugaacccgggaaguggagguugca

SEQ ID NO: 4159819 - RNA, 66 nt, Human
uguaaucccagcuacucgggaggcugagacaggagaauuguuugaaccugaguggcggagguugca

SEQ ID NO: 4159820 - RNA, 81 nt, Human
uguaaugcuuugaaacuucacaagucugauuuuaagauaauggaaugaggcuugcauugugaacuuucuugaugcuuuaca

SEQ ID NO: 4159821 - RNA, 60 nt, Human
uguaauguuagaaacaauugcuggucaaguucaacuuguugcuauuguuuuuaauuugca

SEQ ID NO: 4159822 - RNA, 75 nt, Human
uguaauuauguaguuucauagaacacaguaauggagcugauuuaacugccuacugugcaaauaugcaugaauaca

SEQ ID NO: 4159823 - RNA, 104 nt, Human
uguacaaagcacuauauuggccauccuauuuccgagaaggcacggaagcaaguuuauguacuuuccugggaauguuaaaaugucagcuaggagugcuuucuaca

SEQ ID NO: 4159824 - RNA, 61 nt, Human
uguacacagguagauaaagacuaaaagugaaaaaauguuuaucugcuaucugcugugcuca

SEQ ID NO: 4159825 - RNA, 55 nt, Human
uguacagaacuugcugucccuuaagccggcucagggaugggaagaaauuuguaua

SEQ ID NO: 4159826 - RNA, 69 nt, Human
uguacagccuggucagcggcaucuucugggauccacagaggauccugaccacuaggaccaggcuggaca

SEQ ID NO: 4159827 - RNA, 70 nt, Human
uguacaugaauaaaagaucuuguaagucagaagucacaaaaugauagcaaugggcuguguucagugugca

SEQ ID NO: 4159828 - RNA, 68 nt, Human
uguacaugcauaacauguacauauaaaugcauauauaaaugaguuauguguacaugugugauaguaua

SEQ ID NO: 4159829 - RNA, 60 nt, Human
uguaccauaauguguauuuuaacacuuauuuugcaggaaugguuaaaauuacauggugca

SEQ ID NO: 4159830 - RNA, 59 nt, Human
uguaccaugcuugagauacagugaauacuaaguauuuaaugaauuaaggcaugagugca

SEQ ID NO: 4159831 - RNA, 101 nt, Human
uguacccccucccacccaguuucaacuuuccaguggaaaaauaacucagugauaauaagcaaauuauuuccuggaauggagguggguggguguuguguaca

SEQ ID NO: 4159832 - RNA, 55 nt, Human
uguaccccucuguuucccuuuugucccugggcugccuggaacagcagaggggaca

SEQ ID NO: 4159833 - RNA, 61 nt, Human
uguacucugggauuguuucugguauucccugugggagacaccugagcuaauuccagaggca

SEQ ID NO: 4159834 - RNA, 58 nt, Human
uguacugaauacucuguuaugugggguuuuccuaugcauuguagaauguuuagcagca

SEQ ID NO: 4159835 - RNA, 56 nt, Human
uguacugcauugucuuaauguugaauuuaaaaugagacacaaagcaauggaguaca

SEQ ID NO: 4159836 - RNA, 56 nt, Human
uguacuguauucaucuuuaacugcccugaggaaugcuauuaaaggaauacaguaca

SEQ ID NO: 4159837 - RNA, 106 nt, Human
uguacuugagaauguccacauugucaugacaugguauauuucauuuucaguggaauugcaccauguaagaaauguacgauguuaugcaguauuauucuauaauaca

SEQ ID NO: 4159838 - RNA, 63 nt, Human
uguacuugcuuauuagaaaucuggcuauuuugcucaacauuugaugcacaauggguaaguaca

SEQ ID NO: 4159839 - RNA, 65 nt, Human
uguacuuuagaagaggcaauugaauaagcuaacaaaaauuuuuauguagcauugccucaaguaua

SEQ ID NO: 4159840 - RNA, 73 nt, Human
uguacuuuaucuuguggugggccaguugggccaguuacaaaggucuguggcucagcacggggucaggaauaca

SEQ ID NO: 4159841 - RNA, 94 nt, Human
uguagaaauuuggaaauguagaaaagcagauugaagcauuugaggguauuuucuuugaaguuggucuuucuuuuacauauuugugauuuuuaua

SEQ ID NO: 4159842 - RNA, 56 nt, Human
uguagaacacuugugacaccuugaggucuucagggacacacuccaguguuauuaca

SEQ ID NO: 4159843 - RNA, 65 nt, Human
uguagaacucccagugguauuguucccugauucucacucaccagcagccacugggagugcuuaua

SEQ ID NO: 4159844 - RNA, 72 nt, Human
uguagaaggcggaagguaucaaaaaugaaacuguuguuuccauuauuuuuccaugauacuuaucuguuugca

SEQ ID NO: 4159845 - RNA, 128 nt, Human
uguagacaaaagcaaucaguagagccacaggagaagacacuggguuaggcacguggacucauugucuggagucuacuugccaucagaguuuauuaccuccuucagcaguuacuuuggaaagguuuaca

SEQ ID NO: 4159846 - RNA, 71 nt, Human
uguagacaccuggauuuugcuuagacaugacgugcuaguguaucaacaugugcaaauguccugugguugca

SEQ ID NO: 4159847 - RNA, 55 nt, Human
uguagagauauguguauuuauuuaagguauguaaauuaugucacaugacucugca

SEQ ID NO: 4159848 - RNA, 91 nt, Human
uguagagcuccugcuggauuugaccaaguuggaagguguuuuggacacuacgcggggucaagaguuggucaaauccaaaggaagaaugaca

SEQ ID NO: 4159849 - RNA, 66 nt, Human
uguagaguaauucauggcauuuaaauguugacaucaauacuuacugagugcuaagaauaaucugca

SEQ ID NO: 4159850 - RNA, 86 nt, Human
uguagauugcuuuuaaaggccuugcugagccacucuagaguucuccuauguggacucacaacacgaggguuauaauuccagucaca

SEQ ID NO: 4159851 - RNA, 103 nt, Human
uguagcaagucagguaugagaucuuucaggaaggugaggcacaugagguuaguaccacauuugccaggauuuuccagaaaggcaucuuccugaccuugguaca

SEQ ID NO: 4159852 - RNA, 77 nt, Human
uguggcuuugcaggcauuagcccccauggcugccuucgucggcugggcugguguugagugccuguggcuuuuccaua

SEQ ID NO: 4159853 - RNA, 81 nt, Human
uguggcuuuuccaugccuugcugcuuuggaguccucuguauccagccaguggauaagggaagaggggguagggcagccaca

SEQ ID NO: 4159854 - RNA, 71 nt, Human
ugugggaagcucugccuagauuucagaagauguauggaaaugccuggauguccagguagaaguuugcuaca

SEQ ID NO: 4159855 - RNA, 75 nt, Human
ugugggacaagccacugaguaaucguucuggaaaaaaaccauaaugaacucuucugguuauuuuucuguucggca

SEQ ID NO: 4159856 - RNA, 56 nt, Human
ugugggacagggacagcaagagaagccacugcucccugcacuugucuuugcccaca

SEQ ID NO: 4159857 - RNA, 129 nt, Human
ugugggagcacugggaggggguaggauuccagaaguuggucuugagccaccugcgaggaggggguccaugcaggcuggggaggcagacuuggccgccugggguuacaccugcauccgagaguuccuggg

SEQ ID NO: 4159858 - RNA, 76 nt, Human
ugugggcaaagcuucagguucuguuuugcaggaugcacaaugccuuccccaaguaaagauccugagauguccuaca

SEQ ID NO: 4159859 - RNA, 103 nt, Human
ugugggccuggggugcacacagugcugugcagucugcccucggggauaggccugaggaaggaggcuaagcagcaccuuuucaucguggcauuucaggacucca

SEQ ID NO: 4159860 - RNA, 110 nt, Human
ugugggcgugugcaaggaaucugugaaccgacaggggaagauugugcuuucuucagaacacggcuucuugacuguggguugcagagaaggaaaggucuuugcugccagca

SEQ ID NO: 4159861 - RNA, 61 nt, Human
ugugggcucagguuuaaagugcuuuagccuugcuagccagcugcugaaaccugagaaaaua

SEQ ID NO: 4159862 - RNA, 60 nt, Human
ugugggcuccccuggcauguccaugacagcccuucauggcucacuuccugggagcucaca

SEQ ID NO: 4159863 - RNA, 58 nt, Human
uguggggaggcugcagugcugcuguguagcauuucuuccuggugugagccucuccaca

SEQ ID NO: 4159864 - RNA, 129 nt, Human
uguggggccagaagucaguaucugggcuuaaucacagcucugccaugagccuguccugccaagagcaugugcuguguggucuucaaggcagaguguaguuaaaauguguggggugacuauugucuggca

SEQ ID NO: 4159865 - RNA, 60 nt, Human
ugugggguaguugaugggauaucuggugaacaccacuguuucugccacaauagccccaua

SEQ ID NO: 4159866 - RNA, 110 nt, Human
ugugggucacaguuaccacaugggacagcgcagauagagaacauucuugucacugcagaaaguucuccuggauugugcugcucuagacaguaauugcuguaaaacccaca

SEQ ID NO: 4159867 - RNA, 58 nt, Human
ugugggucccuaaacacaucccaauacuggugaugggugcugcuuuagggggucagca

SEQ ID NO: 4159868 - RNA, 68 nt, Human
ugugggucuggagucacacucaggacagcgggcucugauuuccuggagaacugauucgcggguccaca

SEQ ID NO: 4159869 - RNA, 55 nt, Human
uguggguggagugauauuagcuugauuccaauugcugacuucaugaccacugaug

SEQ ID NO: 4159870 - RNA, 87 nt, Human
ugaucaguuuauuuaagguacagcuagcagcauauucaugauuuugguauguuuuauacacauguaucacuugguuuaaacugagca

SEQ ID NO: 4159871 - RNA, 68 nt, Human
ugaucauguaagccaggugucauuaucaucucuaucuuagugaugaggagacuguggcuuggagguca

SEQ ID NO: 4159872 - RNA, 110 nt, Human
ugaucccaauuuagcccaccucucuaggccucaguuuccccaguugugaagaggaagguaauaaacuuugcauagcucuguaaggcugcuuggagacagcuguaagauua

SEQ ID NO: 4159873 - RNA, 63 nt, Human
ugauccuucuaaugucauagcaucuucuuuaguaaagugguuuaaugaccaauagaaggaaca

SEQ ID NO: 4159874 - RNA, 55 nt, Human
ugauccuucugucaucuuauuuuaaagccagagucuaagguggcagcagguauua

SEQ ID NO: 4159875 - RNA, 61 nt, Human
ugaucucacucacugcacuuugaaauguggggguaauuaggcccucagcugcagugaauca

SEQ ID NO: 4159876 - RNA, 103 nt, Human
ugaucucuggugaagacuacuguugcacucauaugaagcugugccuuuugcccagaaaaucgugcaucuuugugugaacaguaugucauuucacaauuuguca

SEQ ID NO: 4159877 - RNA, 55 nt, Human
ugaucuguauagggacuagccaugcagcugaggugggcuggggccugaccagaca

SEQ ID NO: 4159878 - RNA, 66 nt, Human
ugaucuuaauuacccaaugugguaggcauggucuuguugugauuaagauuguggugauuacaguca

SEQ ID NO: 4159879 - RNA, 63 nt, Human
ugaugaaauuuuaauuauaccucuaauucaaggauagagggagaggagaauuggauuucguua

SEQ ID NO: 4159880 - RNA, 67 nt, Human
ugaugaaucuugggaauuuuccaggagugacaagaaaauuauuacucccuccuucccagcuuccuca

SEQ ID NO: 4159881 - RNA, 85 nt, Human
ugaugaauuauauagagacaauuuucugucauuaguaauguagggcagaagacaauguuucugauagauagauguaaauucauca

SEQ ID NO: 4159882 - RNA, 75 nt, Human
ugaugacaucagacuuuugggaggucuguggccacaguuuaauuugaaaguuacaguuagaaucugaugaaauca

SEQ ID NO: 4159883 - RNA, 64 nt, Human
ugaugacaugugggcuguggcuagcaugaugccaggucauauagagugcucagccaugucguua

SEQ ID NO: 4159884 - RNA, 55 nt, Human
ugaugacuguucuuccuguugccuucagaccuggcauuaggauuuuaggucauca

SEQ ID NO: 4159885 - RNA, 75 nt, Human
ugaugaggaagucaggggaucuagacuugaauaaacuccauuaauucaagucucucuucaaacgucaccucuuca

SEQ ID NO: 4159886 - RNA, 66 nt, Human
ugaugaggacugggacagguacgugcacccugugcuucaccuaacugccugugccgaucucucuca

SEQ ID NO: 4159887 - RNA, 77 nt, Human
ugaugaggauauacucugagaaacgugucacuggguaauuuugccauugugcaaacaucauagaguguacuuacaca

SEQ ID NO: 4159888 - RNA, 56 nt, Human
ugaugagggagauuugagcccaggaauagggacuggguuuccuauuuaccuccuca

SEQ ID NO: 4159889 - RNA, 75 nt, Human
ugaugauguacuaguuaaauauuacuguguaacaaaucaccacaaaacuuagugauuuuaaaaaguaaguuauca

SEQ ID NO: 4159890 - RNA, 73 nt, Human
ugaugcaaagcaccacacuaagaugaguuucuuuaaccuucauguauuuauuuuguuaucagggcuuugcaca

SEQ ID NO: 4159891 - RNA, 57 nt, Human
ugaugcaauguuuacaucuugauggagguuuggguacauagauguaagcauuuguca

SEQ ID NO: 4159892 - RNA, 57 nt, Human
ugaugccaccaccuccagggagacuuccagggucuccuccaguaggaaguggccuca

SEQ ID NO: 4159893 - RNA, 74 nt, Human
ugaugcuaucaacucauuuguuuggcucaguugagcaaauauuaacugagggccaaaggcacugaguaggcaca

SEQ ID NO: 4159894 - RNA, 78 nt, Human
ugaugcuauggaauucaaauauuaaacacgacgauguugaugauuguucugcuuaaauuauugauccucgugggauca

SEQ ID NO: 4159895 - RNA, 56 nt, Human
ugaugcuauguccugagcuucuccugaacacugagguccuggacauaugugcauca

SEQ ID NO: 4159896 - RNA, 82 nt, Human
ugaugcuggcuuuucuuauuucccccuucaucaugguaagccuacuauggugaaggggggagcuaagaaaagcaggguauua

SEQ ID NO: 4159897 - RNA, 80 nt, Human
ugaugcuuaacagacuugggauuuucuagcagccucugccucucugccuggagauuuuccuacaguuuguuuuugcuuca

SEQ ID NO: 4159898 - RNA, 71 nt, Human
ugauggaaauaaaagcauagcuaguuucaaagguucccuugaauaaucauucuaugcuuaaguuucucuca

SEQ ID NO: 4159899 - RNA, 84 nt, Human
ugauggaggcagaucaacagugaagagaucaagagaggaaaugcagaaacugguucuagaccuggcacugcccugucuguguca

SEQ ID NO: 4159900 - RNA, 61 nt, Human
ugauggcugugcugauguuagggugaaaugguguuaaucuugucauuagcacaguguguca

SEQ ID NO: 4159901 - RNA, 56 nt, Human
ugaugggaggugcugcaggaccaccacugcgguaagguuucugcaaaccuuguaca

SEQ ID NO: 4159902 - RNA, 76 nt, Human
ugauggguauguucauuugcuugauaguaaucaguucauuaugucuaucaagauaagucaguauaucaaaacauca

SEQ ID NO: 4159903 - RNA, 71 nt, Human
ugaugggugagaaauuugggcuggaauguggucuucccgaugugccaguguucauaauuuuacacucuuca

SEQ ID NO: 4159904 - RNA, 62 nt, Human
ugauggucaggaugcauggagaggugauggcaagcacucaagucucagcgcugugaccguca

SEQ ID NO: 4159905 - RNA, 57 nt, Human
ugauguaagucuugacuuccuccagugugaaauggagaaggaaggauaacugcauua

SEQ ID NO: 4159906 - RNA, 81 nt, Human
ugaugucacugacuuaauauauuucugcuaagcucaacauauauguugaacuguggccaguaauuaauguuggugguuuca

SEQ ID NO: 4159907 - RNA, 57 nt, Human
ugauguccucaugucaagcuccagagccccuuggaggcaucugccuguaggacauca

SEQ ID NO: 4159908 - RNA, 64 nt, Human
ugaugucugcuauucauagggaaagagaacguagcaauccauuucucaaagaguggcagcuuca

SEQ ID NO: 4159909 - RNA, 73 nt, Human
ugaugugagcuugagaucuuagugaaaguguaaaaauguuucacauacacuaggauauuuuuuucucauguua

SEQ ID NO: 4159910 - RNA, 128 nt, Human
ugauguuuauucucuacuggucaguuauguaacuuucugaugucuucccauguucaugugugucccagacuuauauaaugucagcaugggaagacaaugaguuaucuggcagcaacaaaacggcauua

SEQ ID NO: 4159911 - RNA, 92 nt, Human
ugauuaauuucccauguucuaacaaugagaaaccuaauacagggaggaagaguggguuuugcaggguuaggcauaucugagggagauuuaca

SEQ ID NO: 4159912 - RNA, 55 nt, Human
ugauuaccaugugcuaugugccugcugggcacugcagaacauacacuggugaaca

SEQ ID NO: 4159913 - RNA, 80 nt, Human
ugauuaucucauccuucaguggaagacaguagcagagacauuugcucugcuggccaugaagagagaauuugggaucugca

SEQ ID NO: 4159914 - RNA, 104 nt, Human
ugauuauuaaaugauaaaauaagugugggccagucaaagagguucugacuuuuuuuccccagaauggccauuuucaacauauauauuuuuaauuugaauaauca

SEQ ID NO: 4159915 - RNA, 93 nt, Human
ugauucaauaaauuuaacaauuuugucauuguucaugccaaagaaucauuuuaauaggcauuuuaggugacagugguuaaaauuuguuaauua

SEQ ID NO: 4159916 - RNA, 58 nt, Human
ugauucaguacuuucucuaacuuuauugcacaauaguagugaguagagcacugaguca

SEQ ID NO: 4159917 - RNA, 76 nt, Human
ugauucauuuuauuucugacaaaaaaagacaugaguauaauuucaugguuuuagaaucaggaaaaaaagugacuca

SEQ ID NO: 4159918 - RNA, 56 nt, Human
ugauucuauuacaggaaagggucccaauccagaccccaaaagaguaauagaauuca

SEQ ID NO: 4159919 - RNA, 57 nt, Human
ugauucugcccuuucuucugacauuguuugagagaagucauuuugggggcagaauua

SEQ ID NO: 4159920 - RNA, 115 nt, Human
ugauucuuaugcaaagagagggccggggucagggucuguuguuuguucuggaaaagcuuguaggauuuucaccagaccuugugaccuuuggggacauuuuuuuugugugugauca

SEQ ID NO: 4159921 - RNA, 103 nt, Human
ugauucuugugggggaugaagacauuaaauaaagaagcaaaugguuguauuaucuuacccguuugccucuuuauuuacugucuucauacccuguaagaaugca

SEQ ID NO: 4159922 - RNA, 73 nt, Human
ugauugaaauagauacagaaguaugauuuucauaucaccuuggggauacauaaaaaugugcucuauccaauua

SEQ ID NO: 4159923 - RNA, 60 nt, Human
ugauugccuacuaugugccaugcucuguuccaggcuuuaagggugcagugguagcaauca

SEQ ID NO: 4159924 - RNA, 68 nt, Human
ugauuggcaagggauuguggagaacugaggcauuugccuacuagacuuccaccucccuggccuaguua

SEQ ID NO: 4159925 - RNA, 61 nt, Human
ugauuggcagggcuggaaucugaacccaggcagucuggggccagagcccacuuucuuauca

SEQ ID NO: 4159926 - RNA, 67 nt, Human
ugauuguaaacaguaggacuaaagagaaggaaaauauccuuccuuucauuuacacugcuuacuuuua

SEQ ID NO: 4159927 - RNA, 65 nt, Human
uguguuuucuccuaagacccuucaccaagguugcuggggugaagggccuuaggagacagaucaca

SEQ ID NO: 4159928 - RNA, 71 nt, Human
uguguuuuguucauugcuguauuuguagcacccagcaugcugacuaauaccuuuucagugcacaaaaaaua

SEQ ID NO: 4159929 - RNA, 77 nt, Human
uguuaaaaaaaugacuguagucauauuaaggaauaaaaggcuccauggcuaccuaaugacugcaaguuauuucaaca

SEQ ID NO: 4159930 - RNA, 80 nt, Human
uguuaaaaagauguaguaucuauauuucauggucuugcacagagagccucaugacauucaggugcuacaucauuugaaca

SEQ ID NO: 4159931 - RNA, 76 nt, Human
uguuaaaugcagucucaggcuggccugggagccacucagaccguccacaggcaagauccagaggcugcugucugca

SEQ ID NO: 4159932 - RNA, 67 nt, Human
uguuaacuccauacuuuuuauucuuguguuagucuuauaaugagcauaaaauauuaguaugguagca

SEQ ID NO: 4159933 - RNA, 72 nt, Human
uguuaaggcaauguuagcaacauaauaauagcaauauaggggcucauucugugccuggcauuguccuaaaca

SEQ ID NO: 4159934 - RNA, 68 nt, Human
uguuaaggcucuuguuuaugucuuaguaucccugaauuaggacgugucacaugaacagggcuacagca

SEQ ID NO: 4159935 - RNA, 66 nt, Human
uguuaaguaccuuauugauuccaaagaauucaucagagagaaauggaauaauaagguacauuaaca

SEQ ID NO: 4159936 - RNA, 55 nt, Human
uguuaaugagugggcuguggagaaggaagcuuuucacaacacaaucucguuaaga

SEQ ID NO: 4159937 - RNA, 70 nt, Human
uguuaauuaagaucucauugccuuggggugaguacauugcugcaagaauaaaauugaggucuuauuagca

SEQ ID NO: 4159938 - RNA, 72 nt, Human
uguuaauucaucacgggaaauaugaaagaguaccuccaauucuuuacacauuauuuucaguguguuuugaca

SEQ ID NO: 4159939 - RNA, 57 nt, Human
uguuacaggaaauagaauuaccuuaacuaauguuaagguagcuucccuucuggaaua

SEQ ID NO: 4159940 - RNA, 72 nt, Human
uguuacaggcacugaaaugcuuauuaauacauaauauggauaaagguuagaguauuaaagugccuugaaaca

SEQ ID NO: 4159941 - RNA, 92 nt, Human
uguuacaugauguuugaaaauuuuuacuggguuaucuguaauucuaaauagacaugccaagaaacccaguggcuucuaagcagcauguauca

SEQ ID NO: 4159942 - RNA, 86 nt, Human
uguuaccaacaccaauaacuuguacacucuggagacguucauugaauguuucaugacugagcaaaauuuauuauuguuuucugaca

SEQ ID NO: 4159943 - RNA, 77 nt, Human
uguuacucauaauguaguucauggcuggcuguuuuuugccucagcuucuacugaaauugcaauuaucauggucaaca

SEQ ID NO: 4159944 - RNA, 61 nt, Human
uguuacuggcuugugagacaaugccugaugagaagucagguacauucgugugccacugaua

SEQ ID NO: 4159945 - RNA, 64 nt, Human
uguuacuucugaccccccagccccagcaaagcaggaaguggggccuggguggagaggggugaca

SEQ ID NO: 4159946 - RNA, 63 nt, Human
uguuagacaugcagaaucucaggcaccauccagaacugcugagucugaaucugcauuuucaca

SEQ ID NO: 4159947 - RNA, 69 nt, Human
uguuagauaaacugaagggaacacugaggacaaggagcuuuuguucuaccuucuguuucagaucuagca

SEQ ID NO: 4159948 - RNA, 55 nt, Human
uguuagccauacuaagcagguacgcacaacaacgugauugcuuuguaagcuugca

SEQ ID NO: 4159949 - RNA, 72 nt, Human
uguuagcugcaucauuugaaaacugcagacaucgugacauuucacuucuguacacuucagcaugcaucuuca

SEQ ID NO: 4159950 - RNA, 119 nt, Human
uguuaggaaaauugagaaaguuugccaugaguuaaaucacccaucuccuaaucugggcuccuaucagauugcaaaaugggugauuuaauucaugggaaacuuucucaguuuucccaaca

SEQ ID NO: 4159951 - RNA, 92 nt, Human
uguuaguauuguucuuuaauaggugagcuuaucuccuauaauggcuaaaugaugucauuggaauuugcuucagcuaauaacaguaugcuaca

SEQ ID NO: 4159952 - RNA, 124 nt, Human
uguuauagucagaaaauauagucuauuggggcaguaaucaacacaacuaaguaauauugucauuugagcaauuuaguguguauugcuauuauuuccaacagcauaauaguuuuccucugaaaua

SEQ ID NO: 4159953 - RNA, 98 nt, Human
uguuauguauuagauugcuacaaaaguaauugugguuuuugccauugaaaauaacggucaaaaccgcaauuacuuuugcaccaaccuaaguauaagca

SEQ ID NO: 4159954 - RNA, 67 nt, Human
uguuauguucuuagaagaggcagcagagaguucauucacucucucuucucuguaugaggacauagug

SEQ ID NO: 4159955 - RNA, 116 nt, Human
uguuauuauaacuuuagauauugauauuccuaaugcuaaaauggcacuaaaguuaaagauaagacuauuuugugucauaguauagaguaauuguuaguacuuaaguaauaauaaua

SEQ ID NO: 4159956 - RNA, 75 nt, Human
uguuauuuacagaugaggaaacugaggcacagagguaaaacaacuuugcugaggucaccuugcugcuaagugaca

SEQ ID NO: 4159957 - RNA, 69 nt, Human
uguuauuuauuucaccuccagaauaauuuuaauuuaagauauauuuggaauugguggaggaagggaaca

SEQ ID NO: 4159958 - RNA, 75 nt, Human
uguuauuuccuuugauucagugugaguauauuacaugaacauuuuauucacacuguauacacaggaugucaaaca

SEQ ID NO: 4159959 - RNA, 58 nt, Human
uguuauuugucuggucuaaggagggacuuccaggcccucugcauacaggcgaggagca

SEQ ID NO: 4159960 - RNA, 62 nt, Human
uguuauuuugucaguguggagaauaguucaaaaagggccuuugcucacauuauaauguaaca

SEQ ID NO: 4159961 - RNA, 66 nt, Human
uguuauuuuuaaaccuugggcacguauuacuauuaaagaaaaacuggccuagggguugggaaagca

SEQ ID NO: 4159962 - RNA, 68 nt, Human
uguucaaaucuuuugcuuauuuuguguuggguuguuuuucuccuuccugaguaguaaggguuuggaua

SEQ ID NO: 4159963 - RNA, 56 nt, Human
uguucaacagagccuucuggggcaauggaaauguucuagaucugcacuguuggaca

SEQ ID NO: 4159964 - RNA, 55 nt, Human
uguucaaguggauguggcuuuucuuguuugagaagagcucacuaaggcuugaaca

SEQ ID NO: 4159965 - RNA, 58 nt, Human
uguucacacagucuauacggauggccugggacuggcugccuuuuauggugucugaaca

SEQ ID NO: 4159966 - RNA, 64 nt, Human
uguucagcagcugcuuugugcagaaccugcugaggucagcagcugcccuguagcuguucuagca

SEQ ID NO: 4159967 - RNA, 56 nt, Human
uguucagcccugaaaauauaugcauuuugugccauuguuuucuaaagggcggauca

SEQ ID NO: 4159968 - RNA, 82 nt, Human
uguucaguauuugaagccaagaagugaguaauaguauauuugugugcacccacuuguguauuugauugcuuugugcugaaca

SEQ ID NO: 4159969 - RNA, 77 nt, Human
uguucaguccccuuucauuugcuaguggcagaaacccaaccggauuagcuguugugaaagggguguugacugguuca

SEQ ID NO: 4159970 - RNA, 101 nt, Human
uguucagugacuugcacaccaguuuugauguggacaucaaacacaacuacuuaaugagaugccacaaaacugugugucaaagaacaugucaggacugaaca

SEQ ID NO: 4159971 - RNA, 78 nt, Human
uguucaguucccccucuguugcacguuugcaauuugccuuaaugagaacugcccaugugcaucaaguagaaucgagca

SEQ ID NO: 4159972 - RNA, 58 nt, Human
uguucauacucuucccugggcaaagcuaucuuuuguuugccuaaugaagacuauguca

SEQ ID NO: 4159973 - RNA, 57 nt, Human
uguucauggauccaguggcuucauguauaucugguagcuacaacuuuuccaugagca

SEQ ID NO: 4159974 - RNA, 71 nt, Human
uguucauuacugcuguuugccacugugacauucauuccuauguaugaaggugcagggagcaauugugaaca

SEQ ID NO: 4159975 - RNA, 130 nt, Human
uguucauucagaugaguaaauguguccuuagugaaggcugucaccugcaccuuucaucuguguuacugcugugcuccugcuaggguuaggggcugccauuauuaaaugcugaccucauuuggaacugcca

SEQ ID NO: 4159976 - RNA, 57 nt, Human
uguuccaggauggagacacuaguaguucucacgguuuugcuagugcacguccgaaua

SEQ ID NO: 4159977 - RNA, 67 nt, Human
uguuccaucuguguacaggcagcaaacaccauaaaugucugaucauuuggccugauaucuuggagca

SEQ ID NO: 4159978 - RNA, 79 nt, Human
uguuccaugccaaauuucuuucuguucugaugauucaaaccuuagcagucagacagagcugaacuugguccugguaaua

SEQ ID NO: 4159979 - RNA, 64 nt, Human
uguucccaucagggaugagggugcugaaguauuuacaacugcaccaucagucaugauggggaua

SEQ ID NO: 4159980 - RNA, 64 nt, Human
uguucccauggauaucugcauacaagucuuuguguggacauauguuuuaauaucucugggagca

SEQ ID NO: 4159981 - RNA, 106 nt, Human
uguucccaugucagaagccaucucuagguaucaauuaagguuugggagagagcuugcagccauaucucugcuaagauugugucuagugguguuggugaugggaaca

SEQ ID NO: 4159982 - RNA, 78 nt, Human
uguucccuggguuauuuuggucuagugggagucugucaauucuagggcauuuggaccaaaauagccaacagcgggaca

SEQ ID NO: 4159983 - RNA, 86 nt, Human
uguuccugcaagcaccuggcacggcuagcuucccuccucccuggcugcaggauugugaggugguugugcacggagcugcaggacca

SEQ ID NO: 4159984 - RNA, 71 nt, Human
uguuccugguucucauuagcuucccauuagaauacaguaaggcuagcaagaugagaauaaucuuuggagca

SEQ ID NO: 4159985 - RNA, 57 nt, Human
uguucgcaugucuagcucuaccuuucagggaaagggcucaauggugggcauguagca

SEQ ID NO: 4159986 - RNA, 66 nt, Human
uguucuaaauugcuagcuggaacauaguaaauacuuuaagaguuaugucucuggcaguucagagca

SEQ ID NO: 4159987 - RNA, 58 nt, Human
uguucuaaauuugcaugguccaauaugguagccaccagcgacacaaggauuuagggca

SEQ ID NO: 4159988 - RNA, 65 nt, Human
uguucuaagcugccaaaaugcucagguagacuuacguaagcaccugcuuuggcuguucaagagca

SEQ ID NO: 4159989 - RNA, 63 nt, Human
uguucuacaccagugaaaauuagcugcaccuuccucuguagcugccucugcugguuuagaaua

SEQ ID NO: 4159990 - RNA, 59 nt, Human
uguucuccuggauucugaagggccuggcacaucagagccugaagggacuccagagagca

SEQ ID NO: 4159991 - RNA, 86 nt, Human
uguucucugugugcaacaaauaguccugauuuaaucuggggcagaaaauccccuagcuuugccagugaucugcuuguuggagaaua

SEQ ID NO: 4159992 - RNA, 59 nt, Human
uguucugcagagaagggaucagggcccuaaggaaccccaggauccuggcugcauggacg

SEQ ID NO: 4159993 - RNA, 83 nt, Human
uguucugccccacuguuuccuuucugcuggcuggccugcacacuagccugccuuugugaggaagcggcuguuaagcagacaca

SEQ ID NO: 4159994 - RNA, 93 nt, Human
uguucugcucauuuuuguccuugaugaauaugaaauugcuauaaugacauuuacaauuuuauuaacucauuaaacagagaugugugaggaaua

SEQ ID NO: 4159995 - RNA, 60 nt, Human
uguucugggcccauucugcuggauaguaacuaagugauuaaugccaaugggccuugggca

SEQ ID NO: 4159996 - RNA, 59 nt, Human
uguucuguaccuguccuggggcaccucgccgcccaccagcuggaccacgguggggaaca

SEQ ID NO: 4159997 - RNA, 104 nt, Human
uguucuuauggucgugaauaagucucaugagagcugaugacuuuacaaggggcuuccccuuucacucagcucucauugucucuugucugcucccauguaaugca

SEQ ID NO: 4159998 - RNA, 65 nt, Human
ugggucuuugggcagaugugucugaaucuacaaaguucacugccaggcucucauccagggaccca

SEQ ID NO: 4159999 - RNA, 61 nt, Human
ugggucuuuuugcuuucagcucuacccaaauuccuaacagaaggaagcccuaaaggaccua

SEQ ID NO: 4160000 - RNA, 130 nt, Human
ugggugcugggggguugaggggggcgaggaggcagcuccuccugcaggccugggaggagagggagcuuugguuucccaaagccuggggugagugcugcugaaguuaugugacccggccuuggccaagcua

SEQ ID NO: 4160001 - RNA, 90 nt, Human
ugggugcuuauagagauagcaguauugauucgcuagcaacagcucuucgcucauagcuaugauccaaugagcuucucuggugguuuccca

SEQ ID NO: 4160002 - RNA, 72 nt, Human
ugcuaccauucaucauuaguuguggaauucuugaaacucaaaaacuucagaguaucuaacugauggguagca

SEQ ID NO: 4160003 - RNA, 60 nt, Human
ugcuacuuccaggaaugcugaggcauggucugcauucaacaguguuccggaagacuggca

SEQ ID NO: 4160004 - RNA, 108 nt, Human
ugcuagacagacaguaggaggccucuacucauggauaacccccuggauagaagaaacuaccccaggucaucugagaguccuaucuuccuaacuguguaccaccuagca

SEQ ID NO: 4160005 - RNA, 68 nt, Human
ugcuagagauaccguagucaacuaaaaguggaggcuuccacccacuagaacaucggugucuuggagca

SEQ ID NO: 4160006 - RNA, 62 nt, Human
ugcuagauuuguccugcuuucuaccucccaguaaacaguguacagaggucgggacagaagca

SEQ ID NO: 4160007 - RNA, 57 nt, Human
ugcuagcucacccuugccucccaacagcccugugagggcaugagagggcagcuggca

SEQ ID NO: 4160008 - RNA, 81 nt, Human
ugcuaggcagcuuucuggugcaccauaucuguuaagcuagaaugucauggaaaugagugucacugaugaaagcugacagca

SEQ ID NO: 4160009 - RNA, 64 nt, Human
ugcuagugcaggguuuucaguucuauauagguauaaucaagccacugacugccucugcagugca

SEQ ID NO: 4160010 - RNA, 79 nt, Human
ugcuauaaacuccugcauacucagaagccauauaguuuguuugcuuuuaagcuuuuuuaguggcaguguugcuauagua

SEQ ID NO: 4160011 - RNA, 87 nt, Human
ugcuauaaauguauaaucagcagacuuacuagaauguaagcuccagggaguuggaaauuuugucugcucuuuuuuaucaugauggua

SEQ ID NO: 4160012 - RNA, 58 nt, Human
ugcuauauaauggaauuucuaaccuagaagagaguguagaaaaucuugguauauagca

SEQ ID NO: 4160013 - RNA, 55 nt, Human
ugcuaucaccaacucugcuaagugaucaaguuucauggcacauguaaugauagca

SEQ ID NO: 4160014 - RNA, 57 nt, Human
ugcuaucucagauaaccugcaccaaugcacuucuucgcugggcaccauugagaagca

SEQ ID NO: 4160015 - RNA, 90 nt, Human
ugcuaugaaacagcaucaagugcuacagagaaaucuuucacgaaagaaagaggcaaucaauguagcaaacuucauuguugucuuauugua

SEQ ID NO: 4160016 - RNA, 97 nt, Human
ugcuaugauggugguggcgggggccggggaggcuguccugggcacuguacacuguugagcagcauccccggccuccacccacuggaugauuguagca

SEQ ID NO: 4160017 - RNA, 68 nt, Human
uguucuagcaacacaguuuuggaaaaaacuacaaucucauuauuuccaaaauuaaugaagcaaggaca

SEQ ID NO: 4160018 - RNA, 105 nt, Human
uguucuaucuuuuaaucuggugguggguaaauggguguacguuauuauuacuuuugaaaguguguacauaauuguacgcccucuuucauaucaugaagaugugcg

SEQ ID NO: 4160019 - RNA, 89 nt, Human
uguucuauggccuguuuccucugaaagaaucugacuguccuggaaucuuggcacaugaaggguccuucagaggacggcagccaggaaca

SEQ ID NO: 4160020 - RNA, 60 nt, Human
uguucucaguaauucuauuuuaagggggcuaucuuuucuuucuaaugcuuaccgagaaca

SEQ ID NO: 4160021 - RNA, 58 nt, Human
uguucuccaaggagaggacagucuuaggcucauuauaagcugcuucaccuggacaaca

SEQ ID NO: 4160022 - RNA, 57 nt, Human
uguucucgcucagaccuuagcaguaaaaagccaacuguacaacugcugagcagaaca

SEQ ID NO: 4160023 - RNA, 59 nt, Human
uguucucguuucugaagaaaaguauuauggagagguccgacauucacaggagcagagca

SEQ ID NO: 4160024 - RNA, 110 nt, Human
uguucucucauuacgggacugaaaauguaugcugucuuacaugaaugcaguugguaaacuguggauuuacuugagaagcuuugcauuguuaaguuuuccaugaaagagca

SEQ ID NO: 4160025 - RNA, 67 nt, Human
uguucuugccuggauucgguuguugucauuuuccacugaauguaaucacagggccaugguaauaaca

SEQ ID NO: 4160026 - RNA, 64 nt, Human
uguucuugggaaucuuacaguuugguuaaaaauguuaauacuguacauauggauucuaagaaca

SEQ ID NO: 4160027 - RNA, 81 nt, Human
uguucuuuauuucgaaagugcucagcaggugcaaagaauagauauucaguaaccauuuguugggacaaugaaaagagaaua

SEQ ID NO: 4160028 - RNA, 79 nt, Human
uguucuuugaauaauuagugggacagagaacaaugguugaaaguuauuguucagugucucucuauuuuauaaaugaaua

SEQ ID NO: 4160029 - RNA, 57 nt, Human
uguugaaguaucgcucugcucugcuaacaaccacagccaggccugaggauuucagca

SEQ ID NO: 4160030 - RNA, 71 nt, Human
uguugaaucagaggcugugaaaaucaagggcaaauauuuaucuaaagaugucacaacuuugaauuucaaua

SEQ ID NO: 4160031 - RNA, 61 nt, Human
uguugaccuagaaaaugacugcucuuuagcacaacauugaaggcagcaggauccagggaca

SEQ ID NO: 4160032 - RNA, 74 nt, Human
uguugagcagcagguuguuauugacuuuuuauuuccaacccagagauuuugaaaguaacauuuuguuguuuaca

SEQ ID NO: 4160033 - RNA, 68 nt, Human
uguugcaaugaauccucuugacaguuauccucugacccauggaacuggagagaauguucauugcagca

SEQ ID NO: 4160034 - RNA, 62 nt, Human
uguugcauguggcuguuugccaaggcacacaaagugcuuguaggcagcaaccauaugcuaca

SEQ ID NO: 4160035 - RNA, 64 nt, Human
uguugccaggcuggagugcaauggggcaauuuuggcucaaugcaacuuccaccucccaggcuca

SEQ ID NO: 4160036 - RNA, 67 nt, Human
uguugcccaggcuucagugcaguugcaggaucauagcucacuguagcuuugaacuucugggcucaca

SEQ ID NO: 4160037 - RNA, 77 nt, Human
uguugccugucuuuauuucacuuuacugcugguacauuuugcugcagaaauauggaugugauagauuaugggugaca

SEQ ID NO: 4160038 - RNA, 63 nt, Human
uguugcgagaaauacuuuaaagcagaagcuuaauuacauagugcucaaguuucucuggcaaca

SEQ ID NO: 4160039 - RNA, 55 nt, Human
uguugcuaaggggaaugagagcccaaguggggccagauguuccaguuuggcaaca

SEQ ID NO: 4160040 - RNA, 67 nt, Human
uguugcuggugacgaagcuggugcuaaaacacuuaucccucugagucagcauuuucacugagcuaca

SEQ ID NO: 4160041 - RNA, 95 nt, Human
uguugcuucuggagccuagauuuguuuugccaucucaguuuucuuaggucccccuuccuguuuaccacugaggggcagcugggccaggagcagca

SEQ ID NO: 4160042 - RNA, 100 nt, Human
uguugcuugcucagcuuagcuuacuauuuuaaccaaaaguuuggaagccauagcuaaugaagguauccaaaaaacguuugaauaguugcuguaugcaaua

SEQ ID NO: 4160043 - RNA, 100 nt, Human
uguuggaacacugccaggcacauucauuuaugaaauaucuauaucugcuuuuacgcaaugguagaguugaguagcaugaacagugaccauguggccagca

SEQ ID NO: 4160044 - RNA, 68 nt, Human
uguuggaauaagugcuugaaggaguuuuucuaaugccucuuccucucuuuugucaacugcauccagca

SEQ ID NO: 4160045 - RNA, 91 nt, Human
uguuggaauauugagucauuuuuuucguaauaguggcuuugcugccugaaacaaagaauagccaaaugaagggaugagcaguuuuccagca

SEQ ID NO: 4160046 - RNA, 57 nt, Human
uguuggacacuaccauaugggugucccaccaaccccacuugcucagcauguccaaca

SEQ ID NO: 4160047 - RNA, 57 nt, Human
uguuggagcccgagucagggagacuguggguggucugcuuguucuccagcuccagca

SEQ ID NO: 4160048 - RNA, 96 nt, Human
uguuggccaggauggucucgauaucuugaccuugugaucuguccaccuuggccucccaaagugcugggauuacaagcgugagccaccgauauaaca

SEQ ID NO: 4160049 - RNA, 73 nt, Human
uguuggcuguauguacuacacuagaacauuuguggauaauuacauaagcuuagcugugguauaauaaauaaca

SEQ ID NO: 4160050 - RNA, 78 nt, Human
uguugggcacuuagggaaucuuagagcuggaaggaugcaauagagucuccaucuuuucaccuggcuguaaccccggca

SEQ ID NO: 4160051 - RNA, 59 nt, Human
uguugggggcggcggggagaggcugagacugucuggaaggacccugccagcucccagca

SEQ ID NO: 4160052 - RNA, 82 nt, Human
uguuggguugaauaauauaauauugccauuuuuaugucaaaaaugaucaacuaucagcaauguuaugugguucaacuuaaua

SEQ ID NO: 4160053 - RNA, 60 nt, Human
uguuggucaggcuggucucaaacuccugacaucaggugauccaccagccucggccucuca

SEQ ID NO: 4160054 - RNA, 69 nt, Human
uguuggucugaauaccuacauagagacuggugauagugggacaucagccucagguguucagauuuucca

SEQ ID NO: 4160055 - RNA, 68 nt, Human
uguuggugaaaucuucacagagaaaauuagggccaagcauggcuuuaugaauaugauuuuaccagaca

SEQ ID NO: 4160056 - RNA, 71 nt, Human
uguuggugcagggagaaucagcccauggacacaacccacuccuccuccucuggcuucacucugcaccacca

SEQ ID NO: 4160057 - RNA, 58 nt, Human
uguugguuugcuuggauugagucacugcucuaugugacuuugugcaagugaauuauua

SEQ ID NO: 4160058 - RNA, 95 nt, Human
uguuguaagguaaagcuuuaaaugaguuaauaaaugugaagugcuuagugcaacacucagcacacaguauuagccauuguuacuacuuuagaacg

SEQ ID NO: 4160059 - RNA, 59 nt, Human
uguuguagagaagaaauuaaaauucagguuacuggauuucuaguucauuaucuauucca

SEQ ID NO: 4160060 - RNA, 78 nt, Human
uguuguauuuggaacuuguucugugcaagaacagauuuuggaacuuguucugugcaagaccaacuuucaaauauugua

SEQ ID NO: 4160061 - RNA, 81 nt, Human
uguugucaccuauucugcaugauauuaaauguaaaauugccagcauuuuugucauuucucagcaugaaauugguggaaaca

SEQ ID NO: 4160062 - RNA, 63 nt, Human
uguugucaugcagucagugguaugugaauuuuaggguuuuauuagggaacugcaagacuaaca

SEQ ID NO: 4160063 - RNA, 71 nt, Human
uguuguccucucuguuaugcuuucaugaagauccacccaucuucucgaacaaccuacaggguggaacagca

SEQ ID NO: 4160064 - RNA, 62 nt, Human
uguugucugcuacuagguagagugaauauggcugacauaauuacucuaccagggcagcagca

SEQ ID NO: 4160065 - RNA, 71 nt, Human
uguugucuguugugugugcuaucauaucucuagugucuagaaugugccuggaauacaguaagcacucaaca

SEQ ID NO: 4160066 - RNA, 80 nt, Human
uguuguguggguuaauuaguguuccuaaaauauugaacauuauuaaauguaguuagaagcacuaauuacucacauugaca

SEQ ID NO: 4160067 - RNA, 59 nt, Human
uguuguuagcaaagcaaagguuaagaaacaaaagaugacucuguguuuugguggcagca

SEQ ID NO: 4160068 - RNA, 56 nt, Human
uguuguuaucaggacuggaaacaacauaaaguuuucauauguugcugaaaacagca

SEQ ID NO: 4160069 - RNA, 128 nt, Human
uguuguuggucaucucaggaacuagauaucagaguaaacacauuuugccuaggcaauaagaaaagcuauguagcuaagugugaaaugcccugaguacuuuuguuugguuuauguugaacaguacagca

SEQ ID NO: 4160070 - RNA, 120 nt, Human
uguuguuuaagcuacccaguuugucauacuuugucacagaagcccucgcaaacuacuacauaagugguccauguccauucuguccuagcaaauaggcaaacuucuuuuguuuugaugaca

SEQ ID NO: 4160071 - RNA, 108 nt, Human
uguuguuuaagcugcccggucugugguacuuuguuauggcagcccaaguaaacaaauacagucaucugcugcuggaacaaaucaccccagcacuguggcuuggcagca

SEQ ID NO: 4160072 - RNA, 62 nt, Human
uguuguuugugugugugcgcgugugcgcaugcacaugcguguuuguauacacacaaaaaaua

SEQ ID NO: 4160073 - RNA, 92 nt, Human
uguuuacagagacagauuaauuuuuuucagcuuuuauuuucucuuugggagcuuaguuuacaaaugaagggagcugaagucuucucuaaaca

SEQ ID NO: 4160074 - RNA, 55 nt, Human
uguuuacauaucauuucagguccuguguucccaggauggagacugagagugagca

SEQ ID NO: 4160075 - RNA, 86 nt, Human
uguuuaccguagcauucucugugagcgugauaaauggguauccagcuguguggaaccuaugaacucuuggugugcugaccuaaaca

SEQ ID NO: 4160076 - RNA, 97 nt, Human
uguuuacugaguccauaguaugugccacaccuaauccuguguacugaagcuacaagaguucaaaggaaaggcagugucaacuauugugcaguuuaca

SEQ ID NO: 4160077 - RNA, 129 nt, Human
uuaagucaaggagaaaagucagaggaaaaugggcagguaauaguggaugaggagaacaucuaaaucagugggguucuuaacauugucugcacaucaucugugacauuuuuaaaaccacuagugacucga

SEQ ID NO: 4160078 - RNA, 115 nt, Human
uuaagugaaccaugauuuuauucuuucuacuucugucuauguuuucucucuucauguucuggggacagaggcaaacuagcagaugcugguagaugcaguagcuucauuuauuuga

SEQ ID NO: 4160079 - RNA, 70 nt, Human
uuaaguggaauuggaugugggguuuuuuguacuauuuaauacaacuaaaaccugauugaauucuauuuaa

SEQ ID NO: 4160080 - RNA, 108 nt, Human
uuaagugguuuucaucaaugcuuucucagaguccuucacuagacccuuugcaucagguugaagaaugaaggaagagaucaaguaugaaggaugaaugccccugcuuaa

SEQ ID NO: 4160081 - RNA, 63 nt, Human
uuaauaagccugugugacuaacucccaccaggagaggaugggccugugaugcugggcuauuaa

SEQ ID NO: 4160082 - RNA, 80 nt, Human
uuaauaaggugagcuccuuacuuguggauauguucaagcggaucuagccauguaucugugauguagggguuuccuguuga

SEQ ID NO: 4160083 - RNA, 129 nt, Human
uuaauacuaauacauugguaacuuuaguaaauuuaauuucuagaagugucuaugucuguauaguugauaguucaaaggacagaagugacaauuucuugggugaaacuaaaccaguauauguacugucaa

SEQ ID NO: 4160084 - RNA, 70 nt, Human
uuaauauaaagaucuggauuugauucuggcucaaccacugauuagcuguaaaucucagggaauauauuga

SEQ ID NO: 4160085 - RNA, 88 nt, Human
uuaaucagcaucuuuccuugugauuuggguuuuauaacaauaguauguaaacaaaacuuucuauagguugggauuuuuaguugauuga

SEQ ID NO: 4160086 - RNA, 58 nt, Human
uuaaucugugguuuuaugcagcuguaguuuuucacuguaugaauaugccacaguuuaa

SEQ ID NO: 4160087 - RNA, 88 nt, Human
uuaaugaaucugguguccuuguugaacgaaaauaggugaaaugaaaugccuaccauuugacucucuaaggauaaacaagaguuauuga

SEQ ID NO: 4160088 - RNA, 71 nt, Human
uuaaugucuucgucuucuuuauagcacaauagaagcacuaagugcuuuaaaaauaggagaugaaaaguuaa

SEQ ID NO: 4160089 - RNA, 72 nt, Human
uuaaugugcuuuccaaugcuguagguucuaaaauuuacucaaaaaucuucagcuuuagggaaagaacauuaa

SEQ ID NO: 4160090 - RNA, 67 nt, Human
uuaauuaaauucaugagcauuggacuuggaaaaauaaacuucuagggaaauguuuuugaauaauuga

SEQ ID NO: 4160091 - RNA, 66 nt, Human
uuaauuaacuagccaaccacuaguccuggucacauuggcuaagaggguuuggaggcuagugauuaa

SEQ ID NO: 4160092 - RNA, 64 nt, Human
uuaauuacuggcauggugguugcagaguugaaaugcagcuuuaaaagccuuugugaguaauuag

SEQ ID NO: 4160093 - RNA, 77 nt, Human
uuaauugcucuguccagccagcagguguuagcccucaagugugggcccaagggccggcugcugggcaggcaacuuaa

SEQ ID NO: 4160094 - RNA, 66 nt, Human
uuaauuuaaguugugaauguuuugcaacuguuaucagugccauugccuucacaauuaugaaauuag

SEQ ID NO: 4160095 - RNA, 112 nt, Human
uuaauuuacuaaaugauguacacugaauguuuaagaacuugacuuugagaauguuagugguuguuuauacaaguuuuuaaauuauuaguuugcagaaaaauugguuacuuaa

SEQ ID NO: 4160096 - RNA, 71 nt, Human
uuaauuuaucugauuacuucuguaaugaccuuauuuccaaauaggucacauucugagguauuagggguuag

SEQ ID NO: 4160097 - RNA, 80 nt, Human
uuacaaaagaagaaacagacugaagaguugaagcuucacccaagcucuugacucccaguucugugcacuuuaccuuguaa

SEQ ID NO: 4160098 - RNA, 69 nt, Human
uuacaagaagaggcagagcuggaaguuaaccuguggugcuuuuuucauccagugcuguuuccaauguaa

SEQ ID NO: 4160099 - RNA, 59 nt, Human
uuacaaguucagauuuucucaugaccauuuucuggaaagcagaaaaucugaaauuguaa

SEQ ID NO: 4160100 - RNA, 106 nt, Human
uuacacaugcucagauuccuguguaguuauagugcaaucaugugaccuauuuucuaugaaucauauguauccacaugagaccaggauuucuucaagggcaguguga

SEQ ID NO: 4160101 - RNA, 59 nt, Human
uuacagaaaagggcuuuaagagccuauguuccuuuggcuuuaagagcucuucacuguga

SEQ ID NO: 4160102 - RNA, 61 nt, Human
uuacagaacugcccuaguuggcuuaaaagcuacuagguguuaagcaguuacauaucuguag

SEQ ID NO: 4160103 - RNA, 64 nt, Human
uuacagagaggugacccuugggcaaaccaguaaaacuugugugccuugguuuccucuaauguaa

SEQ ID NO: 4160104 - RNA, 130 nt, Human
uuacagaggaaugcaaagcagaagaauuuagaauuggugacuuaguaagaaggggguguuacauuuuucaaggcuaguuuuaauuaggaaauuucauaugcucaggaaauaauaugguagaccccuguga

SEQ ID NO: 4160105 - RNA, 78 nt, Human
uuacagugaagauucagguucccauuguacuagagagugcagaaaggaaaccuuaauuauuacaccaccuuccuguaa

SEQ ID NO: 4160106 - RNA, 80 nt, Human
uuacaguggaaagagcucagauucuggugucagacccagcuuggguugaaccauggcucugcaguuucuuaauacuguga

SEQ ID NO: 4160107 - RNA, 78 nt, Human
uuacaguguauauuguuuaucuggaguuauggccucuugaaaccuauacaggccuuuauauaaauaaauauuuuguaa

SEQ ID NO: 4160108 - RNA, 56 nt, Human
uuacauauuauccaaaacugcuuuugugcuacaacagcagaguugaguaguaguga

SEQ ID NO: 4160109 - RNA, 56 nt, Human
uuacauauuguccauaguugcuuuugcacugcaaggguagaguugaauaguuguga

SEQ ID NO: 4160110 - RNA, 112 nt, Human
uuacauccgucucccaggguugcagggcugauaaauuacccagcaucuggcccaccccagagccugugauugucaucaccccagacagcccccgaggaggacagguaaguaa

SEQ ID NO: 4160111 - RNA, 74 nt, Human
uuacauggugagagcuggggcaagagagagaggaggaggugccuggcuccuuuaaacaaccagcucucauguga

SEQ ID NO: 4160112 - RNA, 63 nt, Human
uuacauguucucauacacagaguacuguauaacgugagucugccuguguguacaugcauguaa

SEQ ID NO: 4160113 - RNA, 73 nt, Human
uuacauguugaaguccuaacucccaguaccucagaacgugaccauauuuggagacaggauuuuucagagguaa

SEQ ID NO: 4160114 - RNA, 75 nt, Human
uuacauuauagguccuguuaguguuagacuucccuguaugugcuaagggaagacuuugaaaggcuuuaaguguga

SEQ ID NO: 4160115 - RNA, 60 nt, Human
uuacauucagaaagauuugaguacauuguggacaaauucauaagucauucugcaauguag

SEQ ID NO: 4160116 - RNA, 81 nt, Human
uuacauugcuuugagaaacagacgaaagacauguuuuuuuacaauugucuuacagcaaucuguucugagaguaacauguaa

SEQ ID NO: 4160117 - RNA, 56 nt, Human
uuacauuuugcacagauguccccagccggcagguagggccauuagucaagauguaa

SEQ ID NO: 4160118 - RNA, 76 nt, Human
uuaccaaagugugguuguuucauuaaacauuagcucuucaggauuagauguuacaugaaacggccuacuuuuguga

SEQ ID NO: 4160119 - RNA, 64 nt, Human
uuaccagcagacacgugugcucagacugaucugacucuggguuuugacauuucucucugcguga

SEQ ID NO: 4160120 - RNA, 80 nt, Human
uuaccagcuuuugucuaggcuuuuucuuccauguuguuucuccuuaauaggcaagcacaaagucaggacagaguagguga

SEQ ID NO: 4160121 - RNA, 66 nt, Human
uuaccauuguuuugccauuuguguucaugcauccucagaugcaugaacggaggguaagcuggguaa

SEQ ID NO: 4160122 - RNA, 69 nt, Human
uuaccucaauuuuuauugcuuuuuugcuuagaaaaacuauguagaagaugccuuaaaguugaaagguaa

SEQ ID NO: 4160123 - RNA, 57 nt, Human
uuaccugcagagacguggaggcgugagggagaacaugcuuguuaaauaugcagguag

SEQ ID NO: 4160124 - RNA, 55 nt, Human
uuaccuuggguuaaacuggcugcaggugugggguaaguuagcaaggccaagguaa

SEQ ID NO: 4160125 - RNA, 118 nt, Human
uuacgauucaguuuuuaaaaguaaaacagauaaaaguuuggauccagcaaaagagcaguuagauuguuuugcuagucuagauuuaauagucucuguauuaggugucauugaaugguaa

SEQ ID NO: 4160126 - RNA, 65 nt, Human
uuacggaucuuuuagaggcuagauuugggaggaagaaggaggagcaaugcugggagacucuguaa

SEQ ID NO: 4160127 - RNA, 96 nt, Human
uuacggccuugccuagcuggcagggacagcugcgugugaugcugguggagaugccagaugccgccugcccugugaggacggcuggcggggccgugg

SEQ ID NO: 4160128 - RNA, 64 nt, Human
uuacuaaacuacccaugacaguuucagaucuauggccuggaagagucucuggaugguuuaauag

SEQ ID NO: 4160129 - RNA, 79 nt, Human
uuacuagcugucaggcgaaaauuaaaugagcuugcuccgagcuucagauuuaucuuucugucuacaaaaggcuauguga

SEQ ID NO: 4160130 - RNA, 70 nt, Human
uuacuauuaaccuguauuauuuucuuagcucugaacuauuuuagggcauugaagcaauauggaaugguaa

SEQ ID NO: 4160131 - RNA, 62 nt, Human
uuacuauuucuugugggaaaugcagcaucaccccagagaucuguagccaucaggaagaguag

SEQ ID NO: 4160132 - RNA, 72 nt, Human
uuacuauuuuugcaacguauacacuucuaaaauugucauuaguguuuguaccaguguugggaagauguguaa

SEQ ID NO: 4160133 - RNA, 130 nt, Human
uuacucagccuccaugaucucuuguuaagacccagaugcacacacauuaugucugugaauucacaaagacgcgagacagcuggugguuaucgguuuagucgauuaauauagagagaaugguaaugaauga

SEQ ID NO: 4160134 - RNA, 75 nt, Human
uuacuccaaaacauauuugauuggcaucugcuugaagagacuuuggaugucuuucuaauacuggcuuuugaguga

SEQ ID NO: 4160135 - RNA, 90 nt, Human
uuacugagcaugaagugguaucucaugugguuuugauuugcauuuuuguaaugacuaaugacauggagcaucuuuucaugugcucagugg

SEQ ID NO: 4160136 - RNA, 79 nt, Human
uuacugagguauaaauuacagcaaagugcgcagaccuagguaucuaggacugugagguuuuccuguguuaccuguguaa

SEQ ID NO: 4160137 - RNA, 76 nt, Human
uuacugguuauuguuuuugcugcuuucuucuggggauugcuucuagaacaggaauaagggaaauaugaaucaguaa

SEQ ID NO: 4160138 - RNA, 59 nt, Human
uuacuuacaaaggcaaaggaagucgugcuguguuuugcuucuuuagcuuuuguggcuaa

SEQ ID NO: 4160139 - RNA, 82 nt, Human
uuacuucaaauagacaggcuuaaauaggacuguuaucuauucuauaucacuuaacucuuuugccucagucuaguugcuguag

SEQ ID NO: 4160140 - RNA, 76 nt, Human
uuacuugagcccaggaauuggaggcugcagugagcucuaaucccaucacugcacucuagccugggugacagaguga

SEQ ID NO: 4160141 - RNA, 77 nt, Human
uuacuugaguauuguauuuccagcuugaauguccauauaguaguggcaaacauuuugcuaguguaaugcuuugguaa

SEQ ID NO: 4160142 - RNA, 80 nt, Human
uuacuuugccuuguuuuguucaugaacauuggguuuagugccuggcaacuugaugcauauggaagagcaaugccaaguga

SEQ ID NO: 4160143 - RNA, 77 nt, Human
uuacuuuuauaccuucagacaucaacuaucuccaccagccccaugguuugggggaugagaguagggugugaaaguag

SEQ ID NO: 4160144 - RNA, 58 nt, Human
uguccauaccuuuaccuguguagcuaaaugaugcuagaggaaacaguaaagcuggaca

SEQ ID NO: 4160145 - RNA, 67 nt, Human
uguccaucaucuucgaaaaaagucagacuuaagcuggacuucuggcuguuuuagaugagcucagaca

SEQ ID NO: 4160146 - RNA, 62 nt, Human
uguccauggagaagcucagggcugucaauuuagaaagcagcugugugcuggcccauugggca

SEQ ID NO: 4160147 - RNA, 71 nt, Human
ugucccaagauucugagauacaaaauuuacuuuuagaguccuaaaagugggguaucuugaauagucuuaca

SEQ ID NO: 4160148 - RNA, 79 nt, Human
ugucccauccaucuuaacccucagccucccacgacuccaucuguagaggcaaccaguguugagaaaaauuguguggaua

SEQ ID NO: 4160149 - RNA, 88 nt, Human
ugucccauggucaagguggucuugccugaaacuaagacauagcucauuguacuguucaagucagagcaagccaagugugcuuuggaca

SEQ ID NO: 4160150 - RNA, 73 nt, Human
uucaaagguuauuauuacuauuguccagaguguuaccaccugauaaauauugacaguggaaugacccuuugag

SEQ ID NO: 4160151 - RNA, 58 nt, Human
uucaaaucucuccuaauccacuaaugaaccuuuauuaaagugggagagagagguugaa

SEQ ID NO: 4160152 - RNA, 76 nt, Human
uucaaaugucaaaggcuauacauucacacuacucauucacauguuuguaugaauguaugguccugugaauuaugaa

SEQ ID NO: 4160153 - RNA, 122 nt, Human
uucaaauuucugaaaauguagugcagcuaauguauaaaguguuaauaacuuuugaacuuaaauguucuuaaauuaggcauauuauaaggcauuuuguugaacuaagugacuuaacauuugaa

SEQ ID NO: 4160154 - RNA, 91 nt, Human
uucaacaaagauuagcaaauauuuacaaaguuuuagaacuaggaagcaggcaaauacuuuucuuauagagcuuaaaguuaaucuaguugaa

SEQ ID NO: 4160155 - RNA, 75 nt, Human
uucaacacuauccaggcaaucuuagacccauacuaguaauuuuaccaggacgaagaucccugcuguagugaggaa

SEQ ID NO: 4160156 - RNA, 77 nt, Human
uucaacauuugauacaagucaggcaaacucacuaaaggaagagucugcaaaugagggggcuugagucagaucuugga

SEQ ID NO: 4160157 - RNA, 103 nt, Human
uucaacccccaucacgugcugagaguguuauugucaaguacagcuacgacauccaugcuacaauccaaugccauuuuuauguacugcaucacucaggguugaa

SEQ ID NO: 4160158 - RNA, 129 nt, Human
uuagcuuuucaacagccaggacugaagcaaggaggauaccuggguuccauuucucccugcuauauggaauuauuaggcaucaggcuguauaucuugcacucaguaggcccuugguugauacuggcuaca

SEQ ID NO: 4160159 - RNA, 104 nt, Human
uuaggaaagugccucacauaguaagcagucaguaaauaguagcucuuguuauucauucaacaaguauugauaaaaugcucacuaugugccaggcacucuccuag

SEQ ID NO: 4160160 - RNA, 77 nt, Human
uuaggaaauguggcaguucuuccaaguuguuauugcuuaguuaacuuauuuggaagcauuuccaaagcauuuccuga

SEQ ID NO: 4160161 - RNA, 63 nt, Human
uuaggaauauagacuaaguagaaucccugaaguuaagccuucaacuuaguguaggguuccuag

SEQ ID NO: 4160162 - RNA, 67 nt, Human
uuaggacuagagcuaugaagccagaaugugguaagagccaggauuuggccauggcuucgggaacuga

SEQ ID NO: 4160163 - RNA, 127 nt, Human
uuaggagcgauagaugauaauagaauuaaaaguaaucuccaaggguuguggguggucacaugcuagcauuacaaguagcuacucucaaggccuguauggagguugccugugcauaagagugggauaa

SEQ ID NO: 4160164 - RNA, 90 nt, Human
uuaggaugaaauaaaguuuauuccagcaaucugcuuagcagccuuguuaaugucaaggcuaaugagugcugcugaugaauaaauuccuga

SEQ ID NO: 4160165 - RNA, 130 nt, Human
uuaggaugugauaugcuuugucugagcaggggauucuaggacuugagagcuaagcugggcuggauccaucuugaucuggaaaguuuugggaggccaaggaacuauguucagcagaaaguuucaauccuga

SEQ ID NO: 4160166 - RNA, 60 nt, Human
uuaggcaaaggaggccacuuagccagcuuagauucuaggccugggucuccuucugcuuaa

SEQ ID NO: 4160167 - RNA, 65 nt, Human
uuaggcagucguguguguguccgugugcgaauguguauuugugugcacauggccugagugccuga

SEQ ID NO: 4160168 - RNA, 76 nt, Human
uuaggccacaugucugucaucuuccaggaagcucguaugggcuucuucagagggcagucauaauucuaaagccuaa

SEQ ID NO: 4160169 - RNA, 73 nt, Human
uuagggacauuuaauaagugaugauaguaccuagaaaauaauuucaauguaagugaucacuguuauucucuaa

SEQ ID NO: 4160170 - RNA, 123 nt, Human
uuagggagcgcagauauuuaggaaaaggccaggagcgggaaaaggaagaagaaacgaaaaagauucuccccuuuucuuaccuuuugccccuccuuuccccucccgaaauuugcgccuacuuga

SEQ ID NO: 4160171 - RNA, 71 nt, Human
uuagggcgcagugaauuggaugaugccugaccacauuggugaaggcagauuuucuuuacucaguguacuga

SEQ ID NO: 4160172 - RNA, 101 nt, Human
uuagguaauauuccugcacccaaggucucacuuuguggaagugacaguggagauagaaaaaauguuauuuccaucaaaacugagaaggaaaacaauccuaa

SEQ ID NO: 4160173 - RNA, 76 nt, Human
uuagguaucgauuuguauaaaagcugagugugauuugugauuacacuuguaauuauauaacgcgaaauuuaccuaa

SEQ ID NO: 4160174 - RNA, 69 nt, Human
uuaggucaaggccagcgcagaccauuguccaucagcccagagagagauggucuaauuggcccauccugg

SEQ ID NO: 4160175 - RNA, 61 nt, Human
uuaggugcuagaaaaccuggguuucaaauucaacucagcccuaacuaauucuagggccuaa

SEQ ID NO: 4160176 - RNA, 56 nt, Human
uuaggugucuugucacuaccguucacuagcuguguaaucuuagaaaaggcaccuaa

SEQ ID NO: 4160177 - RNA, 70 nt, Human
uuagguugaacuauaugaaauugccaaagguaaaauuaaguugucagcaauuucauaugauucuaccuaa

SEQ ID NO: 4160178 - RNA, 78 nt, Human
uuagguuggugcaaaagcaguugugguuuuugccugaaaggaauggcaaaaaccgcaauuauuuuugcaccaagauaa

SEQ ID NO: 4160179 - RNA, 80 nt, Human
uuagguuggugcaaaaguaauugugguuuuaaccauuacucuuaacagcaaaaacagcaguuacuuuugcaucaaccuaa

SEQ ID NO: 4160180 - RNA, 80 nt, Human
uuagguuggugcaaaagucauugugguuuuugccuuuaauuucaaugucaaaaaccacaaugacuuuugcagcaaucuaa

SEQ ID NO: 4160181 - RNA, 55 nt, Human
uuagguuuaagugacuggaaucauuccuacaugauuccuggcggcagaaacguga

SEQ ID NO: 4160182 - RNA, 88 nt, Human
uuaguaagugcucuauacacauucagaaagguaaauggauuucucagagugggaaaaacagaccuuucaugauuucagcauuuacuga

SEQ ID NO: 4160183 - RNA, 98 nt, Human
uuaguacaucaagacauuuuaaaaugcauuuuuagcacagagauuauuuacaagaaaaucauuuauuuucaacucucuaugcgaggaugcuguacuga

SEQ ID NO: 4160184 - RNA, 68 nt, Human
uuaguacgggcuuucugggccuccugggucccuuacccaagcccugaccugagaguccgugaaacuga

SEQ ID NO: 4160185 - RNA, 62 nt, Human
uuaguaucucugaaccuccguuuccuggccuacaagcuggguauauggaggcagagagcuga

SEQ ID NO: 4160186 - RNA, 123 nt, Human
uuaguaucuucacaaucuuuuggguuaccugggugaauauucuuugugcaguauuggcuaaggugcuaacaggguugauugcucaaaaauagccucacucauauagcugaaaauuggugcugg

SEQ ID NO: 4160187 - RNA, 62 nt, Human
uuagucacaugcccaucucugaaccagcugcugaguccaaggagauggggcagugugacugg

SEQ ID NO: 4160188 - RNA, 59 nt, Human
uuagucuccagcuggacaauagucccuagguggauaccuaggccccagguggacacuag

SEQ ID NO: 4160189 - RNA, 78 nt, Human
uuagugacuuagauaaaacuauguuuguauuagaagaccuaguuuacauauuugucggagucucaaaauggaaacuga

SEQ ID NO: 4160190 - RNA, 58 nt, Human
uuagugagcuuuauugaagacugcucaaaagaggaaaucuuugauuaagcuugacuag

SEQ ID NO: 4160191 - RNA, 69 nt, Human
uuagugauauuuuaggaaaauugcguaaaagagaaucauaccucuuagaaguuuccagcauguuacuaa

SEQ ID NO: 4160192 - RNA, 86 nt, Human
uuaguguccccauaggguagcagcuacuuugaugauugacaauauaaauuuaaaagcugagauauccuguacuaucuugauacuga

SEQ ID NO: 4160193 - RNA, 58 nt, Human
uuaguuaucucugcuacagaaaauguuugugguagguuuucccagcagagauagcugg

SEQ ID NO: 4160194 - RNA, 82 nt, Human
uuaguucaacaauuagugucauguugaggacuugccaauuacaauauacggcaagugucuuuuaugaauuaaaaugaacuaa

SEQ ID NO: 4160195 - RNA, 59 nt, Human
uuaguucacugcuauaucaucagugcccggaagaguaccugaugcaugguagggacuaa

SEQ ID NO: 4160196 - RNA, 81 nt, Human
uuaguugaauccuaccaagauuuuaugaauuuuggcugccaaaguuagaacaucagguugaauuugguuuagauuuacuga

SEQ ID NO: 4160197 - RNA, 61 nt, Human
uuaguugacaucaucagccuggaguuuaucuugcucacuccaagugcagaauguccacuga

SEQ ID NO: 4160198 - RNA, 57 nt, Human
uuaguugaugcuaagggaucccagaaacacugggguccgacaaaacagcacaacuaa

SEQ ID NO: 4160199 - RNA, 90 nt, Human
uuaguuguuugcauuuccuauuucugaguuucccacuugguguguguuuauuaagugagcuagcagaagugacuugauguaagcaaguga

SEQ ID NO: 4160200 - RNA, 69 nt, Human
uuaguuuugugucuacauuuucauuuugacuuugacaugcauggugucagaagugggauacaaagcuga

SEQ ID NO: 4160201 - RNA, 83 nt, Human
uuauaagaaaauauggaauauuuuuuguuaacucaggauagguauaaccauccuggcuaagacaaaaaauccaaguuuuguaa

SEQ ID NO: 4160202 - RNA, 71 nt, Human
uuauaauuucucuugucagcuucucuguggauuuggugucuacaaagaaagcugaggggaaaaaauuauaa

SEQ ID NO: 4160203 - RNA, 71 nt, Human
uuauaauuuguugucuuugaccuguaggaacccaguugucuugauuacagugucuggauaucaaaggauga

SEQ ID NO: 4160204 - RNA, 77 nt, Human
uuauacagcugguaaguggcagagauucuggaggcagacugccugcauuugaauucugucgcuuacuagauguauga

SEQ ID NO: 4160205 - RNA, 73 nt, Human
uuauagaauauuucuggggguguguuucucaaaaauauuccuuugagguugugccuucagaaauaaucuguga

SEQ ID NO: 4160206 - RNA, 59 nt, Human
uuauagauagccugugaguguucugugaaguuagagaagauacacagagcugucuuugg

SEQ ID NO: 4160207 - RNA, 72 nt, Human
uuauagcauuaaaguccaaaaucucauaaucuagaucaucuaaauuagauaugugugagacucuggcuauga

SEQ ID NO: 4160208 - RNA, 101 nt, Human
uuauaggaaccuuuuguaaccuaaggcaggugaacaggguggcaggcuggcugagguccagauaccagcauugcuuuggguuauaguuuauguuguuuuaa

SEQ ID NO: 4160209 - RNA, 78 nt, Human
uuauagggaauuugccagucucuaauggagucuacuucauucuacaaaagaacuggaucucaaauaucugcccuauga

SEQ ID NO: 4160210 - RNA, 75 nt, Human
uuauagugugacauuuucaugaauuugagcuauuuuucuuucuguuaugucaaauuagugaaguguuacuuguaa

SEQ ID NO: 4160211 - RNA, 65 nt, Human
uuauaugcaagcacauagaauacuugcacauuugaguaaguuuuuagauuugcguuugcaugcaa

SEQ ID NO: 4160212 - RNA, 117 nt, Human
uuauauugaaaccaaugaaagcgguuggcaacauugaagagacgguaugagugaaauuucucaguuuauaucuuaugucauuucaauuuuuuagaaacuuuucguuuugaaauauag

SEQ ID NO: 4160213 - RNA, 114 nt, Human
uuauauuuuggaaguaaauuuaagaagcauuuucuguaaaagaccuccaaggaaacagcuagagagagguuuccugguggcucuuugggaaggacuuuuacauucaagauauaa

SEQ ID NO: 4160214 - RNA, 75 nt, Human
uuaucagauaaaauucuuauuuuacccguacuauugaaagauaauuguguuugaugcagaauuuuagguugguaa

SEQ ID NO: 4160215 - RNA, 122 nt, Human
uuaucagucuguguucuacugggaaagaaaagcugaggcuccucauuaaguuguaacccgacugguuuacuauucuguuacuuggugaucuucagaagauuuuggccaauauaaguugauaa

SEQ ID NO: 4160216 - RNA, 60 nt, Human
uuauccagacaucuugcacacauauacugcugguugacaaguaggcaagaguuuggguag

SEQ ID NO: 4160217 - RNA, 58 nt, Human
uuauccuugaguauuggggaagaggacuccaaaugucucuccaaauuccugaggauaa

SEQ ID NO: 4160218 - RNA, 94 nt, Human
uuaucucuccucccaguagucucccuccaucuucccauccaggucuggaggauccagcagccuccaggguagaggaggaagagaggagagauag

SEQ ID NO: 4160219 - RNA, 57 nt, Human
uuaucugcuuuaagccccuugcuuuccacaggaaaacaccaaggcucagagagauaa

SEQ ID NO: 4160220 - RNA, 74 nt, Human
uuaucuguagaccccugauuaaagaccugacguacuaugugguucagugucucauaugagguuucaugcaauaa

SEQ ID NO: 4160221 - RNA, 69 nt, Human
uucaagauggcugcaaauacuuguaccuaccuuccauugagaagcggggucuuugcccccauccuugaa

SEQ ID NO: 4160222 - RNA, 73 nt, Human
uucaagccaaggauacuuuuagagccugagcaccuaacugccaguucuggauagaguccacgaccggagugag

SEQ ID NO: 4160223 - RNA, 72 nt, Human
uucaaggaaugaugacuugucuucaauuuuggaguuaaacucacauauuuaagaaaguuaaaauguuuugaa

SEQ ID NO: 4160224 - RNA, 66 nt, Human
uucaaggacacccaggaauaaggacuggggauacagaauuccaguucccuuuuuggguggaaagaa

SEQ ID NO: 4160225 - RNA, 64 nt, Human
uucaaggacuuaggcagguccuuacugcaggcuuggagccugugggcucuccugaggccaugaa

SEQ ID NO: 4160226 - RNA, 67 nt, Human
uucaaggaugggaguggagguuuaggaaaagguuaaaagaagauauuaaaccuccccauuuucugaa

SEQ ID NO: 4160227 - RNA, 74 nt, Human
uucaagucaacucaaauuguuauccucauguuuauaguugaagaaacaggcuagaugaaguugagugauuugag

SEQ ID NO: 4160228 - RNA, 60 nt, Human
uucaaguccaggucccgggcucugggaguucugcuccugcagagcuugucuggaugugag

SEQ ID NO: 4160229 - RNA, 104 nt, Human
uucaaucagggucuagcccagagggucuggaggguucucacacaaguuuugcagaugaggugagagauuuucaugagugcuucauuguuagggccugauucgga

SEQ ID NO: 4160230 - RNA, 82 nt, Human
uucaauccuuacaacaauccugugaguagauaguauuguuauuuccauuguaaagacaaacuaaagcucacagagguuugga

SEQ ID NO: 4160231 - RNA, 123 nt, Human
uucaaugaauaaucucauauuuugucauaaaugggaccugaagcagguuggcaaagccaaugaggcuaugccccugcauuuaggccugacuguaacugaccucucuauuuauucucagaugaa

SEQ ID NO: 4160232 - RNA, 109 nt, Human
uucaaugaguagaagaguuucagguagaaagacccugggaccuggauucuggucacaggccugucucuuucuaacuuaagaccuuggaacaguacuuaaccucucugaa

SEQ ID NO: 4160233 - RNA, 57 nt, Human
uucaaugcaagggaggucugaagaagugaucacaauuucuucaggcucuugcaugaa

SEQ ID NO: 4160234 - RNA, 56 nt, Human
uucaaugcugguuuguaaaaauaugucaaaaaauuaacaugccugccagcauugga

SEQ ID NO: 4160235 - RNA, 101 nt, Human
uucaaugguuuuaagcuuuuacgaaagacaagaguaucuuugacuuuaggcugcuucugccuugaaaaauaugccuugcuucuuuaaagcuggccauagag

SEQ ID NO: 4160236 - RNA, 80 nt, Human
uucaauuagauauaccaagucaucuauucccauggugagugccacuaagauugguugauugguaagcaauauuuguugaa

SEQ ID NO: 4160237 - RNA, 78 nt, Human
uucacaauguuggcuaggcuggugucaagcuccugacuucaggugaucugccagccucagccucccaaaguguuggaa

SEQ ID NO: 4160238 - RNA, 62 nt, Human
uucacaccugcucaauuaugaggucuugauuuauuccaaaggcaugagaagggcagugugag

SEQ ID NO: 4160239 - RNA, 64 nt, Human
uucacacucagugggcuugaugucgaagauuuucacauguuuccagcuuauugcuuuaggugaa

SEQ ID NO: 4160240 - RNA, 71 nt, Human
uucacagaauuuuucgaauguacugugugaguagaacuucaagcagccauugagcgaaaaaaucuguugag

SEQ ID NO: 4160241 - RNA, 112 nt, Human
uucacagauacagaaacugaggccugcauugcucaggucaccuagcuaauaagagcugaaggugggugaaaucuagguguguguggcuccucgguggacugccaucucugga

SEQ ID NO: 4160242 - RNA, 60 nt, Human
uucacagauugacuggauuccugccauauauauaaccaggauuguuccaggcucugugga

SEQ ID NO: 4160243 - RNA, 58 nt, Human
uucacagauuucccugcacaugggaauggccaaugagcuagaaauggaaaucuuugag

SEQ ID NO: 4160244 - RNA, 88 nt, Human
uucacagcuuucagggauuaagagguggucgugucuguguggaucccauucagcccacgccaccuucuugggaccuggaagaaaagaa

SEQ ID NO: 4160245 - RNA, 56 nt, Human
uucacaguacugugugacuugagcagcucuggaagcuaggaaacacauacugugag

SEQ ID NO: 4160246 - RNA, 73 nt, Human
uucacauuaaugagcguuaaucauuaaaugucauaaccauucugucaaguaguggcugcuucauuggugagga

SEQ ID NO: 4160247 - RNA, 58 nt, Human
uucacauuucucugcuguuugaucuuaaauaagagcaacagacuaggagaggugagaa

SEQ ID NO: 4160248 - RNA, 66 nt, Human
uucacauuugaaaggaaagauauguuaagauauacaaugaauuguaucuuuccuuugaagugugaa

SEQ ID NO: 4160249 - RNA, 68 nt, Human
uucaccauauuggccagacuuauccuucagagcuuuuuaacuggaagauaugcugccagucuggugaa

SEQ ID NO: 4160250 - RNA, 80 nt, Human
uucaccauuuacuuauugugcgaaguugggcaaauaguguaacuucuguuucucaguuuccucauauguaaaaaugggaa

SEQ ID NO: 4160251 - RNA, 73 nt, Human
uucaccccuggggcccugggucugcccuccgccuggcagcugguggagaggagagccaggucccagcugugga

SEQ ID NO: 4160252 - RNA, 96 nt, Human
uucaccuuaggucgauaauuuauuuccauuuguaugcguuuguugauuuauacaaaauaaguuugcagauuauauuagugucauuuuaaggaugaa

SEQ ID NO: 4160253 - RNA, 56 nt, Human
uucaccuuccaggagggucuuugagguuaccuaguacagagacacuggaggaagag

SEQ ID NO: 4160254 - RNA, 95 nt, Human
uucaccuucucugcuacauacuagggcuuuaauaaaauguuacuugaaucuggauccccacaaaguaugagccucaugaagagaaacaagaugag

SEQ ID NO: 4160255 - RNA, 82 nt, Human
uucacgcucaguuccucgggcuuagggguggacuccucgguucagaaggcagaagaggucacacuagguccuagagcgugga

SEQ ID NO: 4160256 - RNA, 67 nt, Human
uucacgugucucggccaaggcgagcauuuccacaaugccguggaugcugcagucaggccagauugaa

SEQ ID NO: 4160257 - RNA, 130 nt, Human
uucacuagagccaaaaguagauuaaaaaucagucacucauuaauacuuugccuagcuacuaaauuggaggugccuaaacaagauacuaaugaggugacugagucuuaaccugguuuuggccuccacuaaa

SEQ ID NO: 4160258 - RNA, 61 nt, Human
uucacuaguuagcaaugcccaggaaugcaauacuugcuauuuaaucauugguagcuaugaa

SEQ ID NO: 4160259 - RNA, 61 nt, Human
uucacucagguucaugucuuuguuccucuugcacauaucugaacacacacaaccuggugga

SEQ ID NO: 4160260 - RNA, 92 nt, Human
uucacucaucaaggaagcagcaaugcaugauuguagccucaagaaauaaaugacuuuggucaugauuggguuuccuuacuugucaaagugaa

SEQ ID NO: 4160261 - RNA, 75 nt, Human
uucacuccccagcugagacugucuucugugauccuguucgaggguuaagucuggaaccucaugcuggcgauugaa

SEQ ID NO: 4160262 - RNA, 56 nt, Human
uucacucucccacaguuuaccccaggaguccaacaggcagagugugagagggugaa

SEQ ID NO: 4160263 - RNA, 66 nt, Human
uucacugcugggggacacagguccggguccagcaccauccccgaaaccuucccccucggcucugag

SEQ ID NO: 4160264 - RNA, 129 nt, Human
uucacugggcaguuggguauaugggccuggagcucagggagaagucuggucaguccuaagcuguggcuuggggcugccugagcaucuccuccugcagaucuggccuaaugcucagaggagaccagagag

SEQ ID NO: 4160265 - RNA, 59 nt, Human
uucacuguacugacugucuuauccauaccaguguggagucaggcagaaguugcaaugag

SEQ ID NO: 4160266 - RNA, 103 nt, Human
uucacugucagccagaagagccaucaucuugaaaaauggcaccaaaauuaaaaaccaauagucaaauuucaguuggaaugagcucuccuggcauaaugaugaa

SEQ ID NO: 4160267 - RNA, 78 nt, Human
uucacuguccauuaagggaccucagcuggcauggaacauugcuuuccuauuucagcugccuuugacugggauauugaa

SEQ ID NO: 4160268 - RNA, 65 nt, Human
uucacuguggagcaaauuuauuuaucugagaauaguaaagauagaaguauucccuccucagagag

SEQ ID NO: 4160269 - RNA, 63 nt, Human
uucacuuaauugucuucugugccauaugacaggcagaucacuuuaggagcaaugagaguagaa

SEQ ID NO: 4160270 - RNA, 62 nt, Human
uucacuuuguagacauguauuuuauagccagcuuugccaagaugcauguuccauaaaguggg

SEQ ID NO: 4160271 - RNA, 56 nt, Human
uucagaaaugucagccaucagagaacaacacaucugugguaaacaacauuucugga

SEQ ID NO: 4160272 - RNA, 82 nt, Human
uucagaaauguuuucaagcaucuggggcauugcuaugguuacaacuacaggccuacgaagucaggugcgagaacugcuugga

SEQ ID NO: 4160273 - RNA, 56 nt, Human
uucagaagcagcgaaguggaagggacucaaggacuauaccagcuugcugcuuggaa

SEQ ID NO: 4160274 - RNA, 60 nt, Human
uucagaagguaggaaugucccucuugauagggcugaaucaagggauuccuggcuuuagaa

SEQ ID NO: 4160275 - RNA, 127 nt, Human
uucagaagugggcaaaaauaucaaauauuuagcaguuaugugaaucaugugacaggugucucaguguagcuggagcaugggccauggaugcagggauauugacagauaaagcacagcccaaacugga

SEQ ID NO: 4160276 - RNA, 59 nt, Human
uucagaaguuuucaaaacuaagcauccccaauugcuuaguuuugucagaauugucagaa

SEQ ID NO: 4160277 - RNA, 69 nt, Human
uucagaauaacauggccaaaucuaaacuguuggaaacuucuucuauagaagguuugucaugguucagaa

SEQ ID NO: 4160278 - RNA, 66 nt, Human
uucagaauaacuuuuuauugaaaucagccagugagcuggcuaaacacaagagaaagaguuauugaa

SEQ ID NO: 4160279 - RNA, 68 nt, Human
uucagaaugauuacauucuggugacaucucuucagaaacagggucuucuuagagguaaucaaucugaa

SEQ ID NO: 4160280 - RNA, 96 nt, Human
uucagaaugccuggcugaggugacagguuuuaacgauaaaagaguuuacagccuucaccaccugcagccagguuuuuauuuaagucacauucugaa

SEQ ID NO: 4160281 - RNA, 82 nt, Human
uucagacucuaguguccauauugacaggacuuuaaauccacuacgugugcaucuggagcuuguuagauguuuauaguuugaa

SEQ ID NO: 4160282 - RNA, 92 nt, Human
uucagagcuggauccagggagcagcgcuggggccuccagacacacacccuucccuugaggccacaaugacugccccuuggcucggcccugga

SEQ ID NO: 4160283 - RNA, 65 nt, Human
uguuaugccccaggaggugccauccauagagaacacagugugagugguggccccugggguuugca

SEQ ID NO: 4160284 - RNA, 80 nt, Human
uguuaugggaaauggcaaguucuaaugauuagaauagcguuuuacuuuaauuaaugaacuguggcaggaagcccaaggca

SEQ ID NO: 4160285 - RNA, 119 nt, Human
uguuauuggaguccuugauuuugcuccuggcuguguguccucggacgaguuuauuuccuucucuggacugcucuguggaacgaggaauuggaguagguaaacauugacaucccuugaua

SEQ ID NO: 4160286 - RNA, 85 nt, Human
uguuauuuuugggguuugcuucuguuuauggaaagauacugauuuccuauaucuugcugcuacaaagugccccuuuaaaauaaua

SEQ ID NO: 4160287 - RNA, 97 nt, Human
uguuauuuuuucuaucucugaaugauuaaaugugauuucauuuauguagcaauacuaugauuguggcugcauuagaucacgcugauagaaagauaca

SEQ ID NO: 4160288 - RNA, 60 nt, Human
uguucaccaggggcuccaggugagccuggccucccaggcuccccaggaggcccuuggaca

SEQ ID NO: 4160289 - RNA, 61 nt, Human
uguucacuuauuguuccuggacccugagucaugucuuagguaaacggcacaguaaagaaca

SEQ ID NO: 4160290 - RNA, 60 nt, Human
uguucagaagccagaauauucauggauuugauauaagcaugaagauuuuuggcuuccaca

SEQ ID NO: 4160291 - RNA, 59 nt, Human
uguucagagacagaaauucuaaaaauggugacauuuugcaagagaggaugucuuuagca

SEQ ID NO: 4160292 - RNA, 70 nt, Human
uguucagaucuuuugacaauuuuuuuaauuggguugucuuuuuauuauugaguuguaagagcucuuuaca

SEQ ID NO: 4160293 - RNA, 82 nt, Human
uguucagcagccuuuacacaugauuucaguuucaacaaggaaguuaagcaaaagucgagugugagcauuguggcuuuggaca

SEQ ID NO: 4160294 - RNA, 57 nt, Human
uguucaguguaaacaguuugggguacaguacacuccucaggcaggucccacugaaca

SEQ ID NO: 4160295 - RNA, 88 nt, Human
uucacagccugagucuuaguuuuucauccaaaaagggugguuaacacuuauuucauggaguugagaaggcuaagaugacagaggugaa

SEQ ID NO: 4160296 - RNA, 56 nt, Human
uucacagcucauacuguucucaccugggaaacuugggaagggcugaugaguuuggg

SEQ ID NO: 4160297 - RNA, 56 nt, Human
uucacagugugaucuaugggcaaugugcugcuacaccaccauguuucaccugugaa

SEQ ID NO: 4160298 - RNA, 67 nt, Human
uucacaguuaaguuggacacauuccuaaaaaacagccuggguuggaaggaaguggccagauugggaa

SEQ ID NO: 4160299 - RNA, 60 nt, Human
uucacauuaucaggauuguuucagugauucucaaucucauaugcauucuguuaaugugga

SEQ ID NO: 4160300 - RNA, 55 nt, Human
uucacauuggugauauguuucuuugggaggaagaaacuuuuuuaaaugaugugaa

SEQ ID NO: 4160301 - RNA, 63 nt, Human
uucacauugugguucaugugaaaggcauucucuagaguugugcaaggcacgaccauaugugga

SEQ ID NO: 4160302 - RNA, 74 nt, Human
uucaccaagcaucuguuaagugccuucaauguguuagacauugagcuaggcacuacaggucaugaacuggugag

SEQ ID NO: 4160303 - RNA, 55 nt, Human
uucaccagauuuuguauagucagcauuuuaaguugacuggaaugugucuugggaa

SEQ ID NO: 4160304 - RNA, 67 nt, Human
uucaccucaucagucagaacuuaagcuuguuacaauugcagcauguuuaagcccauugagagcugag

SEQ ID NO: 4160305 - RNA, 59 nt, Human
uucaccugaaagucuggaguccagcugacugcugcugaauccaggcccacucagcugaa

SEQ ID NO: 4160306 - RNA, 61 nt, Human
uucaccugggagauugaagggaugagccagauugcucucauaccuuggaguuccaggugga

SEQ ID NO: 4160307 - RNA, 68 nt, Human
uucaccugucugcagcacccagcacaaagccugagcaaggcagaugcagggaaugcuugcagcaugaa

SEQ ID NO: 4160308 - RNA, 81 nt, Human
uucacgagcuucagggucgucacuuuuaagggccuuuucuaccuuguugggaagaaacaagcccuagaaguccugagugaa

SEQ ID NO: 4160309 - RNA, 130 nt, Human
uucacuaccuccuugaguuugggcuuggccauguggucugggcuugccugguugugcagccucucuuguuucucucacauugccauuaguucaguuucccauggaaagcguuuaacugaagaaggaugaa

SEQ ID NO: 4160310 - RNA, 111 nt, Human
uucacucacaaaguuauugacaagcauuuuucacagcaacagcucuucucugugacccucgugagcuguuuacaugaaaaaugcucuuccuuguagauuaaugagagugga

SEQ ID NO: 4160311 - RNA, 55 nt, Human
uucacucauuuuuguguccugcaaggcauuugcaaagaaugcagaagagagugga

SEQ ID NO: 4160312 - RNA, 81 nt, Human
uucacucugggccuggggcuguugagagguuccuugcuaaggggguucucucuccuaagagcucuaggaauccaaggugga

SEQ ID NO: 4160313 - RNA, 82 nt, Human
uucacugaauuaaaaagaguauaccacccaucuguucauaaauguuuuaccuagcugggaauacucuucuuuggucagugaa

SEQ ID NO: 4160314 - RNA, 61 nt, Human
uucacuggauccuagcugagccuugcaauguucuaggcacuggguacagauaugcagugaa

SEQ ID NO: 4160315 - RNA, 60 nt, Human
uucacuucacagauauuuauuugguauuuacuauauaccaggcacucuuguggcagugga

SEQ ID NO: 4160316 - RNA, 85 nt, Human
uucacuucuuaauagaaauuuaacuuuugauuuacuccccauauaccuuggaguucaaaaagguaaaguuuaucaggugagugga

SEQ ID NO: 4160317 - RNA, 85 nt, Human
uucacuuuagauuugucacauaaaauggagacugcgcaaugacaugcaaaguaaucuguuuaugugucuaaauaaaauaugugaa

SEQ ID NO: 4160318 - RNA, 86 nt, Human
uucacuuuauauuuagcacuugcuuuaccauuugaucucuagaguccacuggagguauugaggagagucagguuggacaaagugga

SEQ ID NO: 4160319 - RNA, 85 nt, Human
uucacuuuaucuuggccuuuauucuguacuucuguagcuaagauggagucagagagguggggaaugaggagcagagagaggagag

SEQ ID NO: 4160320 - RNA, 58 nt, Human
uucacuuucuauuuuugaaauauaccuucauggguggaauuuuuggugaggaagugag

SEQ ID NO: 4160321 - RNA, 62 nt, Human
uucagaaaucgaguuucauguccucacuaauaacauuuugaugacagaaaaguauuucugaa

SEQ ID NO: 4160322 - RNA, 74 nt, Human
uucagaacuuuucuuucagcuuuaccauuccaugauucuaacaucguugguugguaacugagaggggaugugaa

SEQ ID NO: 4160323 - RNA, 90 nt, Human
uucagaagcuucucugagaucagccacugacuuggagagauaacaguaaggcuuugagaucuagaggcugaucuuagucugcuguuugga

SEQ ID NO: 4160324 - RNA, 57 nt, Human
uucagagugguaugaagugaugauguagauauuugucauuccauuuccagcucugaa

SEQ ID NO: 4160325 - RNA, 91 nt, Human
uucagaguucaugugugacacagucaaucagaacagcauguacaguugcaugugcaguauucaugcauuugcuacacgcaugaacugugaa

SEQ ID NO: 4160326 - RNA, 67 nt, Human
uucagauaaacuacaaauaauuugggggacauauucauacuaaaacauuaauuguuguuugucugaa

SEQ ID NO: 4160327 - RNA, 59 nt, Human
uucagauguggcuuugucaggcguugccaaaguucccuuguuuuacaagccacauugaa

SEQ ID NO: 4160328 - RNA, 90 nt, Human
uucagcagcacgccuggccucuccuggcugaguuuccugcagggcggaggcaggugcgccagcucaaggggaggccggcagugccuagaa

SEQ ID NO: 4160329 - RNA, 72 nt, Human
uucagccgaauaacauucggucauggaggcugcacgacagugauuaucugugagcugaagugacaggcugag

SEQ ID NO: 4160330 - RNA, 64 nt, Human
uucagccucagggagucaucuugcuuauugacauuuguccuggugaggacucuggaggcaugag

SEQ ID NO: 4160331 - RNA, 76 nt, Human
uucagccuuuuaaaaauugcuuuuaugcagggcaugguggcaugugccugugguuccaguuuuuucggaggcugag

SEQ ID NO: 4160332 - RNA, 56 nt, Human
uucagcucaguuucaauaccagguuuaaacucuggacacgguuuauugcagcugga

SEQ ID NO: 4160333 - RNA, 69 nt, Human
uucagcugcaggccucuccuggggaugaccugaccuuggcgcacuccucucugaagucugcaggcugaa

SEQ ID NO: 4160334 - RNA, 79 nt, Human
uucagcuucugccugugcaugcagucagaacuucuugugucacugcaaaucuuuuugauucaucacacgcugaacugga

SEQ ID NO: 4160335 - RNA, 87 nt, Human
uucagcuugagaauauuugaagauguuagaagagggaaaaaauuccaaccaagaaucauauugauauuuaaaauauuuucaguugag

SEQ ID NO: 4160336 - RNA, 79 nt, Human
uucagcuuuugacacuaauugagugcaugaucuuugacaagucacuuaggguauuuaugccucaauuucuucaugugaa

SEQ ID NO: 4160337 - RNA, 59 nt, Human
uucaggaccacagugcauaagaaagguguugguaagcauuaugaauucuggucccuggg

SEQ ID NO: 4160338 - RNA, 73 nt, Human
uucaggacccucuguaauauaauucugggcaaauuuuggaaaggccagaggauuuacuagcaaggauucugaa

SEQ ID NO: 4160339 - RNA, 61 nt, Human
uucagggaggcagagaggaacuggccauauucuauggaagccucaguuugccuucugggaa

SEQ ID NO: 4160340 - RNA, 83 nt, Human
uucaggucaagaugaaauaucuugaagaaauucuuuucuacagagaugaaucccuaagauuuuuauaaaaacagggaucugaa

SEQ ID NO: 4160341 - RNA, 56 nt, Human
uucagguuauuugguuggccuuucucucuuucacggaagggcugcucuggccuggg

SEQ ID NO: 4160342 - RNA, 117 nt, Human
uucagguuuuuugugugugugucugccauugaggaguauaaaacuuuuuucaaagucguuuacauuuggcuuuggcaaggguuuuaauuguucauuggagaguaucuguaaccugaa

SEQ ID NO: 4160343 - RNA, 90 nt, Human
uucaguaggucugaggucaggccucagaaauugcacuggugacaagaucccagguaaucugauggugcuggucuagggccccacuucgag

SEQ ID NO: 4160344 - RNA, 83 nt, Human
uggauuaacuuagugaggaaucugcauaguuguacucagugguggcccugguacaaaaugcugauaucaacauaaguuaucca

SEQ ID NO: 4160345 - RNA, 56 nt, Human
uggauuauugagcugcuuggaaagcaauaguugcugccuguggcucuuguaauuca

SEQ ID NO: 4160346 - RNA, 56 nt, Human
uggauucucaugggaccaguagggauauccaacccagcuaguuccaccgguauuca

SEQ ID NO: 4160347 - RNA, 79 nt, Human
uggauuggaguguguuuuaucuauuguaucuuuaaauauauaaccagaagaagaauaaaucauagaauaccucuaggca

SEQ ID NO: 4160348 - RNA, 81 nt, Human
uggauuucauugacaugggagagaaauaaauguacauuuuauuuaugcuacuguuuugucuguuuuaugcaaccaaaucua

SEQ ID NO: 4160349 - RNA, 61 nt, Human
uggauuuuauguugaacagagugggcagggguuuuucucucuuaaagccaagcauaaacca

SEQ ID NO: 4160350 - RNA, 68 nt, Human
uggauuuucauccucacugauuuccuuugcaaaaugcccuugaaugucaggugugggcagagaaacca

SEQ ID NO: 4160351 - RNA, 58 nt, Human
uggauuuugagcuuccccacuaucucaggguucucugagguggagugcuuagcaucca

SEQ ID NO: 4160352 - RNA, 113 nt, Human
uggcaaacagcuuuaagaaauaaaugaugcucuaaagucuccauuuuuauagcauguuuugauguaaugauguacuuagaaggaucaaauguaauuucuuaauauguagguua

SEQ ID NO: 4160353 - RNA, 77 nt, Human
uggcaaacauuuacagaaacucuaggucaauugaggggcauaguucuuuuaaagucagaguuuuuccaguguagcua

SEQ ID NO: 4160354 - RNA, 59 nt, Human
uggcaaauucaucuuuaguucucugaaacaguucuaagagaccugaccagagguugcca

SEQ ID NO: 4160355 - RNA, 63 nt, Human
uggcaauacauaaucuuaauggcaagaucuaucauaacccuuugcuaugagguuaugauuuca

SEQ ID NO: 4160356 - RNA, 72 nt, Human
uggcaauauagagagaaaauuauguaauacgcauucaucuaauuacauaagcauaugucucuguaucuguca

SEQ ID NO: 4160357 - RNA, 75 nt, Human
uggcaaugaccaaaugugucacaggugaaaauguccaguaguuucuggcauuuaugacguguucggucaauguua

SEQ ID NO: 4160358 - RNA, 92 nt, Human
uggcaauuucugauuaacacugacaguaucagagcuguuuucacauuagauuaaaauaguaauuuagcugcuuaguaaaugauugaaugcca

SEQ ID NO: 4160359 - RNA, 62 nt, Human
uggcacaugguaagacucaguaagugucagauaagauaccucuacuguuguugcuguugcca

SEQ ID NO: 4160360 - RNA, 126 nt, Human
uggcacauuuggcaucuggugagggagucuuucugguucauggaugggcccagcucuguccucacaugguggaaggagcuagcucuccguggucucuuuuaugugggugcuaauuucaaccuccca

SEQ ID NO: 4160361 - RNA, 71 nt, Human
uggcaccucugucccaggccuaugguggagaucucaggugaaaauggugccugggacucaggaggagcuca

SEQ ID NO: 4160362 - RNA, 60 nt, Human
uggcacguaggagcuaugucagggcuccagcaugccuugacaugccuccuacaugaucca

SEQ ID NO: 4160363 - RNA, 71 nt, Human
uggcacuuuaaugauauucuuaauuugaguuggaagaguuuuccagagauccaaagaauaugaagaugcca

SEQ ID NO: 4160364 - RNA, 60 nt, Human
uggcagagcaaaaagauagaaugucuuuaugacaccgaagaacugucuuuuuucucucca

SEQ ID NO: 4160365 - RNA, 62 nt, Human
uggcagagcaggcuccaggcaaaauuucggagcacaaaacuguaucuucugggccuuuccca

SEQ ID NO: 4160366 - RNA, 98 nt, Human
uggcagagccaaaauauuguaacauauguugaaccagguguguaaguugaauaccuuuuagacauguaguugucacuguuaauauaaguggccugcua

SEQ ID NO: 4160367 - RNA, 55 nt, Human
uggcagaguaggauggcccuguagcugagaguggcaggauaaucccccucagcca

SEQ ID NO: 4160368 - RNA, 66 nt, Human
uggcagagucaucacaucuggaauguugugugccggguuccuggagccacguguggaugccugcca

SEQ ID NO: 4160369 - RNA, 63 nt, Human
uggcagagugagauaugaacccaggucuaucagcuaaaaccugaaaucuuggcucgucugcua

SEQ ID NO: 4160370 - RNA, 76 nt, Human
uggcagaugccaugccuuccuuucccuggaaaauuccccaugacucuuucaggaugcaaggaggccccaacugcua

SEQ ID NO: 4160371 - RNA, 103 nt, Human
ugggaaaaauguuguuuagucaauuugcauuggucauaaauugagugauuucauuguugugauuauauacaugacuugcacuugucugaaauagcauugacca

SEQ ID NO: 4160372 - RNA, 57 nt, Human
ugggaaaaggugccuggugccucggggcugggaagcuguggcuccaggaccuaccca

SEQ ID NO: 4160373 - RNA, 128 nt, Human
ugggaaaaugaauuuaaaaugaagucaggggaagcaucagaugugacugaaggcaggaagaguuugccuuggcauguggcauguggcugaaucugucugggcuucuauaucuguucagcagguuccca

SEQ ID NO: 4160374 - RNA, 91 nt, Human
ugggaaaauuaacggaacugucugcuuggaucauaaucccuccagucuaaauaaugcuuccaaaacagaacucugugaauuguuuucacca

SEQ ID NO: 4160375 - RNA, 86 nt, Human
ugggaaauaugcccaagauucuuacaucaugccaagacccuugaaaagggugguaccaugggugaaauaagggguaaaauuaucca

SEQ ID NO: 4160376 - RNA, 71 nt, Human
ugggaacagggauaaguaauuuggcaggcuuucucuuuucuauucaccuccauuugcuuaccuuguuucua

SEQ ID NO: 4160377 - RNA, 60 nt, Human
ugggaacauggaaauucugcucuguuucagccaaaacagaaaaacaggauuguguuccua

SEQ ID NO: 4160378 - RNA, 76 nt, Human
ugggaaccccauccacaugaccauugugcuccugguccuucuggaagaugaggaggugagcggucaugugguccca

SEQ ID NO: 4160379 - RNA, 121 nt, Human
ugggaacugcagucauuugaaaagauagcaaucaagcaucucuuucagagcccuguucaucuuucaguggcuuugcuucuccagaugcuuuugcuccuucaauuaucucugccuucuccca

SEQ ID NO: 4160380 - RNA, 121 nt, Human
ugggaacugcagucauuugaaaagauagcaaucaagcauuucuuucagagcccuguucaucuuucaguggcuuugcuucuccagaugcuuuugcucuuucaauuaucucugccuucuccca

SEQ ID NO: 4160381 - RNA, 55 nt, Human
ugggaagaugaggugccaugggauaacacacaaccauggcaggccuuuuuucuca

SEQ ID NO: 4160382 - RNA, 115 nt, Human
ugggaaggaaaagagaaagaaagugaaauuccuggucuuuguuguauguauccccuugcuuuuuagauaaauuaucagggguuuaaacacacacucucuccccucccuccuccca

SEQ ID NO: 4160383 - RNA, 119 nt, Human
ugggaagggcaagagaauguaagaggcagggcugaaggucccaggccagucaacagcgaggcugggagcucucacuucuggaucacuucucucacuucucacucuuggcaccuuuccca

SEQ ID NO: 4160384 - RNA, 55 nt, Human
ugggaagggucugaaucugagacuccagagggucucuuaccugagacauuuccua

SEQ ID NO: 4160385 - RNA, 71 nt, Human
ugggaagguaacauugccuccaucugaaaggcaaaaucacuugaacucagagaagguaagugaccugccca

SEQ ID NO: 4160386 - RNA, 59 nt, Human
ugggaauagucuuuacugcugaauugagguagaauggccucaaaagacacacauucuca

SEQ ID NO: 4160387 - RNA, 81 nt, Human
ugggaaucuuguuaaaaugcauauucugguucuguagguaaaggauggaaccugagauuuugcauauuuaagaagcuccca

SEQ ID NO: 4160388 - RNA, 84 nt, Human
ugggacacagcuagccucaauacggauaugcaaaaugcaucuuaagucuuuugugugcuugguauugaagacaggcuaaacuca

SEQ ID NO: 4160389 - RNA, 90 nt, Human
ugggacaggaguuagcucuucuaagucugcugucuucaucugcuuauguagaugguaacuuacaggccuuagcuuagcacuuauguguca

SEQ ID NO: 4160390 - RNA, 69 nt, Human
ugggacaugaugauuacucccauuugauagaugaagaacaugaaucagagaggguaaucaauuugccca

SEQ ID NO: 4160391 - RNA, 76 nt, Human
ugggaccuggugcuagcugguguguaacagggcaaagaggcugagaaagacaagcacagcuggugacuacaucuca

SEQ ID NO: 4160392 - RNA, 79 nt, Human
ugggacgaggccgccagugguugcuugcauggcuccaaaaguugacacuugggacaagcacuucacagccuccauccua

SEQ ID NO: 4160393 - RNA, 66 nt, Human
ugggacuggagucagggaaaaagugucuugaaaagugaaauuuuccuccauggcuccauauuacca

SEQ ID NO: 4160394 - RNA, 57 nt, Human
ugggagaaacugucucucccacaucuggauuggggcagagaccagcuguuacuccca

SEQ ID NO: 4160395 - RNA, 104 nt, Human
ugggagacacuaucuuaacucaucucauuacucaagccauuuguuguccuucaggcuuugacagccaggagaugggaaaguagcagaggugaugugaucucuca

SEQ ID NO: 4160396 - RNA, 119 nt, Human
ugggagaggagaguaggcgggagccccugggcgguuuucgccuacagacgcuaccacugugggagugugugugggcggaacggccccggagcagaacaauugcgccccucccccugcca

SEQ ID NO: 4160397 - RNA, 76 nt, Human
ugggagagggaacucaguauugacccaguuuguucucuuugaauagcacugggcauuuugaacguucuuucuugca

SEQ ID NO: 4160398 - RNA, 56 nt, Human
ugggagauggggcaggcaggaauuuccggaccaguucugccugcuccuggcuucca

SEQ ID NO: 4160399 - RNA, 57 nt, Human
ugggagaugguucugagacuuugcaucaccagggaucucuuuuuaaaaucucuccca

SEQ ID NO: 4160400 - RNA, 66 nt, Human
ugggagcacuuaugggccaacggggaguguggagagaaacccuggccagccuuuggacugcuccca

SEQ ID NO: 4160401 - RNA, 114 nt, Human
ugggagcagagggcaaauuggacaucaaagaguugcuaaaggcuuuucggcuguggaaggccgaggagcugaugauucuuugaucuccacuucccccuacacacacugcuccca

SEQ ID NO: 4160402 - RNA, 76 nt, Human
ugggaggaggggcgcuuugucuaugcagucuucuuacggcucaucacgguacagacagggcaccugccuccugcca

SEQ ID NO: 4160403 - RNA, 87 nt, Human
ugggaggaucucaugagcccaggacuuugaggcugcagugagccaugauugcaccacugcagccugggcaacagagugagacuguca

SEQ ID NO: 4160404 - RNA, 81 nt, Human
ugggaggcuuucuccgacuugauaaacuccuccuccucuauuccaguucagaugucaucucuugcaggaagccuucuccca

SEQ ID NO: 4160405 - RNA, 78 nt, Human
ugggagggauugggauggagccugaguauaguuuaccuucucagagaacauucagacaccguaccuauugcccuuuua

SEQ ID NO: 4160406 - RNA, 94 nt, Human
ugggagggucuugcucuuucacccaggcuggagugcaguggcacaaucucagcuaacugcaaccuccaucuugugggcucaagugauccuccca

SEQ ID NO: 4160407 - RNA, 55 nt, Human
ugggagguaaagaaugagaucucaucauuuaacggugagguacacauacuucuca

SEQ ID NO: 4160408 - RNA, 71 nt, Human
ugggaggugaugcaugugccaaaaucugaagugaguaagcacucaaauaaugccauucaucaucaucauca

SEQ ID NO: 4160409 - RNA, 73 nt, Human
ugggaggugcugacaggaggcuugaggccaggcaggagcagcccaucuggcccaucuucugccaccaccccca

SEQ ID NO: 4160410 - RNA, 76 nt, Human
ugggagguggggccugucagagauggggagucagaggugacucuuccgggucuucuugaugauccagggccuccca

SEQ ID NO: 4160411 - RNA, 71 nt, Human
ugggaguugugcugucuccggccucauuugucucccugcgacugauguggccuuaaugacagcagcucgca

SEQ ID NO: 4160412 - RNA, 69 nt, Human
ugggauacaagcagagguagggugugcaguuucugagaagugcauugcaucucugcuucaauccuccca

SEQ ID NO: 4160413 - RNA, 123 nt, Human
ugggauagaagugagggaagagguggcuaggccugaccggaauguagaggccggauagccuauuaacagugucuaguuuuagcuuuuggagccagcugccuagcuucaaaccacaacuuccua

SEQ ID NO: 4160414 - RNA, 63 nt, Human
ugggaugcaggagggcuaaaguaggcccaguaaggaugggcuuccuguauccuccuguaccca

SEQ ID NO: 4160415 - RNA, 87 nt, Human
ugggauggugcaagggguggcaguggucucugacagagcuggcuggcugcugauagccauggccuccuguaaagcugcgguauccua

SEQ ID NO: 4160416 - RNA, 67 nt, Human
ugggauucaaccaauguuuauugaaugaaugagcacugaaguucauuuaaugcugaguugaauguua

SEQ ID NO: 4160417 - RNA, 61 nt, Human
ugggauucaguuaagggucuugagaugggaagaucaucuuggauuaccugggugggucuua

SEQ ID NO: 4160418 - RNA, 67 nt, Human
ugggauuguaacuguggguugauuagaucauuuaaucuugcucucauuucucuacauuauuuucuca

SEQ ID NO: 4160419 - RNA, 56 nt, Human
ugggcaacuuaguguucucaaauacucuuccuauuuagggggcagugggaugcuua

SEQ ID NO: 4160420 - RNA, 63 nt, Human
ugggcacaccacagaauucugucuccaggagugaguaacugcuugugacagaacuguguccca

SEQ ID NO: 4160421 - RNA, 65 nt, Human
ugggcacccaggcaucacgggcauguggccucccaugggcggccucauuccaggagcagguccca

SEQ ID NO: 4160422 - RNA, 57 nt, Human
ugggcaccugaggccuggcaggcccgggcgagcugaggccccagccagggcugccca

SEQ ID NO: 4160423 - RNA, 65 nt, Human
ugggcaccuguucuugugcugccugcagagaagauuggagcacauaccagaaccacagguuucca

SEQ ID NO: 4160424 - RNA, 61 nt, Human
ugggcagacaggccccgucuggggguggugaggucaagccccuaaggacaccugcugucca

SEQ ID NO: 4160425 - RNA, 55 nt, Human
ugggcagacauugaguuuguucugcuaagacaacuuuacuacagaaugucuccca

SEQ ID NO: 4160426 - RNA, 56 nt, Human
ugggcagaggcucugaaguccaccgccuuauuugguauggaaaucuguuucucuca

SEQ ID NO: 4160427 - RNA, 58 nt, Human
ugggcagcagaaccaggccgaccacagggacagacgugguccaggcgugagcugccca

SEQ ID NO: 4160428 - RNA, 70 nt, Human
ugggcagcuagcacaucaggcccaggagucugcugcguugcagaagcugcugaaguguuggcccugccca

SEQ ID NO: 4160429 - RNA, 97 nt, Human
ugggcaggaaccgggccggggcgauggggcugggauucuccucgggcgccccggcaggaccccggccucacuagccucugcccaggauaucucucca

SEQ ID NO: 4160430 - RNA, 71 nt, Human
ugggcaggucacuuaccuucucugaguucaagugauuuugccuuucagauggaggcaauguuaccuuccca

SEQ ID NO: 4160431 - RNA, 57 nt, Human
ugggcaguagagcaauuuuaccuaagcugaaaugcacuauaauugcuuguacuccca

SEQ ID NO: 4160432 - RNA, 58 nt, Human
ugggcagucaucagcacaccggcucucacgagccugugggaaaggaugagauugccca

SEQ ID NO: 4160433 - RNA, 66 nt, Human
uucuaaauagaaaagauuucagcugccaagcgcuacugagguagagugaagauuuuguguuuagaa

SEQ ID NO: 4160434 - RNA, 85 nt, Human
uucuaaccagagcagcaguuguuacaaugaugccuuacuaaaagaagguagauuauuuuagagauugcuuagguaaaggucagaa

SEQ ID NO: 4160435 - RNA, 60 nt, Human
uucuaagauucaugaggacaggauuaggguuugugucuuguuuguuauuguuucuuagaa

SEQ ID NO: 4160436 - RNA, 82 nt, Human
uucuaaggacuaucaaguagguugguuuuuaucaacugcuguugacacacugcagaaaaucacaagcuugggucacuuaggg

SEQ ID NO: 4160437 - RNA, 71 nt, Human
uucuaaggcuugaagucagaucugacccucgaaguugacacuccagccucuuugacucucaggucuuugaa

SEQ ID NO: 4160438 - RNA, 59 nt, Human
uucuaagguguaggagagguggaaacuguagaagcugcugccauccuuauagcugagaa

SEQ ID NO: 4160439 - RNA, 64 nt, Human
uucuaaguccuaccugaaagcaaauaucagguuugauaaaccuugcagggcuggaggcuuagaa

SEQ ID NO: 4160440 - RNA, 77 nt, Human
uucuaagugcuccacuugcauagacccagcaggucagugccuggagggauagaaugcaagaggagaaggucacagaa

SEQ ID NO: 4160441 - RNA, 69 nt, Human
uucuacacucacccagcuguaacaaggugcuccaaccuccccgccucccaugcugagguggugucagag

SEQ ID NO: 4160442 - RNA, 67 nt, Human
uucuacagguguuuucuuuacuuuagagacaaggggcacugagguaaauagaaaaaccaugauagaa

SEQ ID NO: 4160443 - RNA, 67 nt, Human
uucuacaugauuugagggaagauagagacuagaaguuuauuucagcuuucugucagauuauauggga

SEQ ID NO: 4160444 - RNA, 59 nt, Human
uucuacauugugaaguucuuuauccuaccuguguaucccuagggcuuuacagaguggag

SEQ ID NO: 4160445 - RNA, 75 nt, Human
uuagguuugcuuuauguguaugacuugacuuuaaauaagaacagucaaacucauuuuaaacuagagaaaaccuag

SEQ ID NO: 4160446 - RNA, 64 nt, Human
uuagguuuuaaauaugggcaaauuggcuaaugcaaguugauaaccaucaucuuuaaaauccuga

SEQ ID NO: 4160447 - RNA, 72 nt, Human
uuaguaggaguaggaguagaacucaucauucaucuaaucaugggagcaaaugacuucugcuucuagaacuga

SEQ ID NO: 4160448 - RNA, 96 nt, Human
uuaguaugucgcauuuauucuaggcacuaugauugaugcuaggaauaaagacaaaaauaccacacaguccuugcucugggaugauguacauacuga

SEQ ID NO: 4160449 - RNA, 55 nt, Human
uuaguauuuguggugccaaugugaaugccacaaauggccaaaaccauauuauuaa

SEQ ID NO: 4160450 - RNA, 76 nt, Human
uuaguccccuucauaaucugaaauuuguaagguguuaucuccguuuuacagauaagcacauugugacugggaagag

SEQ ID NO: 4160451 - RNA, 63 nt, Human
uuaguccucuguuaugugcuaguaugccuguuaggguacuugacugcaaacagcagagacuga

SEQ ID NO: 4160452 - RNA, 82 nt, Human
uuagucucaucuguauaagcaugcuucauauggauacacaaugcugugcaucuccugacugauguucauuuagggagauuga

SEQ ID NO: 4160453 - RNA, 78 nt, Human
uuagucugauuguuuaagagcauuugcaauuuaugaaauauaucaggaaauguaauguucuugaaaaggaauggcuaa

SEQ ID NO: 4160454 - RNA, 57 nt, Human
uuagucuucuuccuuauauguuguuuauguauauucaagaaugagggacaaggcuga

SEQ ID NO: 4160455 - RNA, 65 nt, Human
uuagugaggaaagauuuuuaaagagcucauucaacauaguucuuugaaaagauauuccuccuuaa

SEQ ID NO: 4160456 - RNA, 64 nt, Human
uuagugaucauccaguuucuuguccagcaccagucuagugcuugacuagauuaucuggaucuaa

SEQ ID NO: 4160457 - RNA, 60 nt, Human
uuagugcuaguuucacaacaagcaaaauaaccauagugucucuugagaaauaagcacuaa

SEQ ID NO: 4160458 - RNA, 66 nt, Human
uuagugucuucuucauccucuguuugcagugaacaugauauucgcuaaucagugaagagacauuaa

SEQ ID NO: 4160459 - RNA, 55 nt, Human
uuaguguguccaguucugaaaauccuuuggguguuaaaggaacaaggcacacugg

SEQ ID NO: 4160460 - RNA, 93 nt, Human
uuaguguuugguuguguuagguuuccuaaaugagacaaagucauuaauguuuaaauuuagaagaaacacugaauugaccaaaaaaaauacuga

SEQ ID NO: 4160461 - RNA, 57 nt, Human
uuaguuacuuauaggugauagaccuuauagaauagaauguucucuauaggugauuga

SEQ ID NO: 4160462 - RNA, 106 nt, Human
uuaguuagggcuuuuaauuaacuuccaaaugaauauuuccauggguucuuguaauccauaaauucauggauuauguucaguguuuaugagagcuggcccuaacuga

SEQ ID NO: 4160463 - RNA, 76 nt, Human
uuaguuguggugagcucuuugauaaauaugugacaaaucuuacugagcaucuauuauuugcaaagaacuacacuag

SEQ ID NO: 4160464 - RNA, 70 nt, Human
uuaguuuccucccuggaaauucucuucccgcccccugggaaagcugugggaagcuccauggaggugcugg

SEQ ID NO: 4160465 - RNA, 93 nt, Human
uuaguuuguagaauggauuaaugaauacauuuuguagcucuuugcauagauuacacauauguccauuaaucaguagugagaaucuaaaacuaa

SEQ ID NO: 4160466 - RNA, 65 nt, Human
uuaguuuguuauucuguuguucaggguugggggaaaccuggagccugacagcugaauuguacuga

SEQ ID NO: 4160467 - RNA, 95 nt, Human
uuaguuuuguuuucagucacuuuauuaaauuauggauuuaggagauaacgucucaugcauacuagauauuuauucagugacuucacaagugcuag

SEQ ID NO: 4160468 - RNA, 56 nt, Human
uuauaaacgagaagacuaagucuuggagggaucaugagaguguucucguuuuauaa

SEQ ID NO: 4160469 - RNA, 66 nt, Human
uuauaaugcagcaguugcaacgaucuggggcaugaggccauuuugaaugaaauugcuguguuauga

SEQ ID NO: 4160470 - RNA, 90 nt, Human
uuauaauuauuuauaguaacugugguaagauauuucacaaaagaguuacccuuuaguggaauguguucuauuuuacagaaguaaauauaa

SEQ ID NO: 4160471 - RNA, 76 nt, Human
uuauaauucaugaaauagcacuuaaguaguacugcuuggacaguuacugcuuguuagcuguauuugcugaauuuaa

SEQ ID NO: 4160472 - RNA, 63 nt, Human
uuauacauguuuauaagguugauaugauucaucuuauuugcuaacuuuuauaaauguguguga

SEQ ID NO: 4160473 - RNA, 108 nt, Human
uuauacuauugguguaauaaaagaguuaaauugucauuugagcaaugaguuucuucuaagaagugugaauauuauuaaauggcagaauuuuugcaucuauagguauaa

SEQ ID NO: 4160474 - RNA, 79 nt, Human
uuauagaagcccuguaaauugcccuuaauuuuggaugauauaucauuaacucuuaacggucauugacuggguucuguga

SEQ ID NO: 4160475 - RNA, 59 nt, Human
uuauagcaggugacuaaugaguauuucaccaccaugauauuuugaguugcaagcuauag

SEQ ID NO: 4160476 - RNA, 60 nt, Human
uuauaggcuuaguucuguguguuuuucuauuauagaauuaaacauaagucuggcuuguag

SEQ ID NO: 4160477 - RNA, 63 nt, Human
uuauauauauaugugcuauugaguuuccuuugauugacagcuccuguaguacauauuauuuag

SEQ ID NO: 4160478 - RNA, 70 nt, Human
uuauaucugucgugauccauucccauggauuuacuggcaacaaagaaucuuggauuggagaaagaagugg

SEQ ID NO: 4160479 - RNA, 107 nt, Human
uuauauggaaaguaaucaaagaauuuuggggggauuaauuuauuuguuuuuauauaucagauacuaguuacagcacucaaaguuuucagguuagccuuuaaauauga

SEQ ID NO: 4160480 - RNA, 60 nt, Human
uuauaugucuauugcuuggguuacaucaguagauuugaguagcugcaacagacuguaugg

SEQ ID NO: 4160481 - RNA, 72 nt, Human
uuauauuucaucagcccugugagauuagaacagcagauauuguuauuuccauuuuaugggugugaaauauag

SEQ ID NO: 4160482 - RNA, 79 nt, Human
uuauauuuccugcuguaaaucacugauuaaaguuagaaugaugcauuauuuuaauucaaagugaauaguggaguuguga

SEQ ID NO: 4160483 - RNA, 128 nt, Human
uuaucacacaccuucacaguuuuaccagugucagaaggaggccuguuuucuccuggaaugcuacauucuuuggggaugaaguguuuugagucuuuagcacugcauuggagugucucuggaguguuuag

SEQ ID NO: 4160484 - RNA, 89 nt, Human
uuaucacauguuuauggaauagauuauuuuuauuucuauuucacagaugaaacugaaacuuaggaaguaaucuuuguaaaaugugguaa

SEQ ID NO: 4160485 - RNA, 124 nt, Human
uuaucaguagaacaguaaguaauuguauuaguauguucuaggaaugguugaugaaggaaggaagaaaauuucacaaauacuugaauuauuaaaauaagaaacuuuccaaaauuuuugcugauag

SEQ ID NO: 4160486 - RNA, 60 nt, Human
uuaucaguuccaauuccaaauuccaaggagaauccgauuggcucaaauuggaauagauga

SEQ ID NO: 4160487 - RNA, 71 nt, Human
uuaucauacaaagaaaagaguaaaaagcuuuuuagaaagaggcagguuuacucuuauuugguaaaagauaa

SEQ ID NO: 4160488 - RNA, 68 nt, Human
ugggcagucuuaucagcauuggacaugcauaaucuugccuugcaaaguuuuugcuaugaaauugcaca

SEQ ID NO: 4160489 - RNA, 65 nt, Human
ugggcaucaaacacgggccaugucacuuugaaugucuccugcuucaagggcuguguucaugccca

SEQ ID NO: 4160490 - RNA, 62 nt, Human
ugggcaucugacuugugaauccuucccauaacuaagccccgagagauuuccaaucaugccca

SEQ ID NO: 4160491 - RNA, 130 nt, Human
ugggcauuggggcccggggaccagccaaccucuugaacaccuggguccccuggggccuacccguguaaguugagccugagcccaggugugcagaggagaggcugggagccaugcccagccccacagccca

SEQ ID NO: 4160492 - RNA, 55 nt, Human
ugggccaauugcuccccaaacuaauaagaucagaguuuagaaguagucuggcuca

SEQ ID NO: 4160493 - RNA, 58 nt, Human
ugggccacuucuagugccucagacacuccgcggucugcacacugcuagauguggugca

SEQ ID NO: 4160494 - RNA, 59 nt, Human
ugggccagcuaacucaucuaaagaaaucauuccgugugauucuagaaguuugcuaccca

SEQ ID NO: 4160495 - RNA, 56 nt, Human
ugggccaguuggugacuacaaacuaucuugggccuguccucacucuuccuggcuca

SEQ ID NO: 4160496 - RNA, 59 nt, Human
ugggccauuuuuggaagacuggggauucugguaggagaccacauaguugaaaugggcua

SEQ ID NO: 4160497 - RNA, 66 nt, Human
ugggcccaggcauuuuucuaaucauuggcaucacaauagugaaccaaacaaaaaugccuguccuca

SEQ ID NO: 4160498 - RNA, 130 nt, Human
ugggcccuccuggggguugcagugccuugggcuuggccuuugaagaucuuugcauugcagggaagccucucuacacuccagagucucaucaugcuucccaggguccugcuuuaaaucucuucccagccca

SEQ ID NO: 4160499 - RNA, 60 nt, Human
ugggccucuguuuccucaucugcaaaguacccauuuuccagaugaggauacugaggccua

SEQ ID NO: 4160500 - RNA, 59 nt, Human
ugggccugcuggggcauuuucaaaagacaaauaguccugcugcugcuccagaggaccca

SEQ ID NO: 4160501 - RNA, 65 nt, Human
ugggccuggagcagagacuagggaaagcuucccuuuccuugauugcuuguuuucucuccagcuca

SEQ ID NO: 4160502 - RNA, 57 nt, Human
ugggccuguugccugaguccauccucaaaagggugacagcaccaggcaacacgccca

SEQ ID NO: 4160503 - RNA, 55 nt, Human
ugggcgccgugacuaaggcuccugucagcgucugcguggagcccacggcguccca

SEQ ID NO: 4160504 - RNA, 113 nt, Human
ugggcgggacuggagaaaggagagaguuuuuuggcuuugaaggauguagggcuccugagaauaccacagguccagcucaaagugcuccuguccuuucacggucccagagccca

SEQ ID NO: 4160505 - RNA, 103 nt, Human
ugggcgggggcacagcugccaccaugccaugccuugggcauuggaagagcaggacccaggagugcagggaugguaucacuguugccccuuugaaaaugaccca

SEQ ID NO: 4160506 - RNA, 83 nt, Human
ugggcuaauaaauagagauaucaauuucauggugaucgucacugaucuuuacuuuaaaaacugauaauucauuuuuugguuca

SEQ ID NO: 4160507 - RNA, 57 nt, Human
ugggcuagauauuuuugggcugcaagaauuccuuuugcuuagauggauuuuggccua

SEQ ID NO: 4160508 - RNA, 57 nt, Human
ugggcucauggcccagcacuggggcccauuaggguuagcugcuguggccagaaucca

SEQ ID NO: 4160509 - RNA, 65 nt, Human
ugggcuccacacugaaauauuaauaucuuauuguuuugaugaugaugaugauguucauuggccca

SEQ ID NO: 4160510 - RNA, 82 nt, Human
ugggcucccugggccugccacggagccagcccucugccgugggguucagggccucuggcaggcaggcccuccagggacccca

SEQ ID NO: 4160511 - RNA, 58 nt, Human
ugggcuccucgucacucgcuguguccucacuggccaugugcugggaaugagcagcuca

SEQ ID NO: 4160512 - RNA, 74 nt, Human
ugggcucuggagggccuaggauccugggacacggugggguuugcgaacucugggagccgggccugccaggcuca

SEQ ID NO: 4160513 - RNA, 57 nt, Human
ugggcugagaguaccuuauaaacagggacagugugucuuaaaaagugcucaggccua

SEQ ID NO: 4160514 - RNA, 78 nt, Human
ugggcugagugcuuccugugauauuagccacugugcagcacugggcaggguucauguuaucacaggugcagaagugca

SEQ ID NO: 4160515 - RNA, 56 nt, Human
ugggcuggaaggcccuuuguugaucucaagagagagaccuuuugccuucuaguuua

SEQ ID NO: 4160516 - RNA, 57 nt, Human
ugggcuggcugaggcauucacugaaacuacaucacagcugaaagucucucucaccca

SEQ ID NO: 4160517 - RNA, 64 nt, Human
ugggcuguucuuuggcuuccuuuccgucuuauguuugauguggaucacacaaggagcuggucua

SEQ ID NO: 4160518 - RNA, 78 nt, Human
ugggcuuagauugaaugcagucaugaaaaguugccacgcaaaaggaguagcuuguucucauccauucuucugaguuca

SEQ ID NO: 4160519 - RNA, 84 nt, Human
ugggcuucaaaaaugcauucucaucgaccuucagauauuuaaggauauuuggagaaaaguugagaccauguuuuuugccaccua

SEQ ID NO: 4160520 - RNA, 62 nt, Human
uucaguuugcugaacuaaaauucugaaggucugguuuucaggugugaugucugcgaacugga

SEQ ID NO: 4160521 - RNA, 105 nt, Human
uucauaaguuuacauguaaauucucuuggauacagaugaaaggaaggaccauagcacaaauguauuuuuuccaaacuguucuaagaauuuugaaaaacuuaugaa

SEQ ID NO: 4160522 - RNA, 63 nt, Human
uucauacauguguacuguuccagggauuuauuuuugaucuaaugguauauaucacaugaugag

SEQ ID NO: 4160523 - RNA, 70 nt, Human
uucauacuuuaaaauagggcaccauuuuuauuuagcagaauaaguaguccugauuuaaccuugguaugga

SEQ ID NO: 4160524 - RNA, 61 nt, Human
uucauaguaucauuuuaguagguguuaccuccuuuuaacuccugaggaaauggucucagaa

SEQ ID NO: 4160525 - RNA, 96 nt, Human
uucauauaaagcuuuauuugucauucacggcugguuggcaaaacugacuuugcuuuugaaaaugacaggugguacucuggugagcucuguauagag

SEQ ID NO: 4160526 - RNA, 60 nt, Human
uucauaugaauuggguuuuuuuuacuuuguuuugaaggaaaguuacccaaucucuaugaa

SEQ ID NO: 4160527 - RNA, 64 nt, Human
uucauaugauguaaauagagccuagguagcaggaguuuccuaccuagguauuuuacacagugaa

SEQ ID NO: 4160528 - RNA, 72 nt, Human
uucauauuaaauauuguuggucacuauauuuaaauaucucuaaauggagaaugugauauagugauaugugga

SEQ ID NO: 4160529 - RNA, 71 nt, Human
uucaucaaagagaaguuuuucuuauuacauguaauacauaguucaugauggacaaagacuucucuugugag

SEQ ID NO: 4160530 - RNA, 55 nt, Human
uucaucaccuugguagcacuccuggacugcaggacuuugcucagcuggugcugaa

SEQ ID NO: 4160531 - RNA, 70 nt, Human
uucaucacuguguguguggcuguuuuccagggagggguuggccuguggacagcccauacacaugucugag

SEQ ID NO: 4160532 - RNA, 123 nt, Human
uucaucagcccaccagaccugggccugcugggccccacaguccccugggagaguugccccuacccacaacccaugggacuugggaaggcccaagccagagguaggugggaagcugcuggugaa

SEQ ID NO: 4160533 - RNA, 63 nt, Human
uucaucuaaauaaaagugcuuaauguuucucuuuuggaaauugccaguguuuauuuaggugaa

SEQ ID NO: 4160534 - RNA, 70 nt, Human
uucaucucaucuguugauuuuaagucuuccaaagguugcuggaaagcaugauuagauagaugauugugaa

SEQ ID NO: 4160535 - RNA, 66 nt, Human
uucaucucuuauguuuauggauacauccccagauccagaacgguauccaucacauggucugaugaa

SEQ ID NO: 4160536 - RNA, 59 nt, Human
uucaucuuucauggcugauuuaagggaggacuugcuuccuguccagcccugaggaagaa

SEQ ID NO: 4160537 - RNA, 78 nt, Human
uucaugagaguuccugaaaucacuacugcuaugccuaaguaaaacaugugucaaguggaauuucaggguauguaugaa

SEQ ID NO: 4160538 - RNA, 76 nt, Human
uucaugcucugugagugaugaaacugagguuccaagagauuacuuaucuugcucagaaucauuucacuaguaugga

SEQ ID NO: 4160539 - RNA, 68 nt, Human
uucaugggcaguggucugacuucuucuuuaugcuuuucccuggagcagcagggucauugcucuuugaa

SEQ ID NO: 4160540 - RNA, 108 nt, Human
uucauguaaucuucuggauaauauauugaaaaggacagcuggcucaggagggaucauuugccuggguuaguaucuguuuccauuuauauuaagaaaauauugcaagaa

SEQ ID NO: 4160541 - RNA, 64 nt, Human
uucauguccagaggaaguugaggggcccagauucucuaccuucaaaacuuccuaggcgcgugga

SEQ ID NO: 4160542 - RNA, 69 nt, Human
uucaugucuuauauccugucuucaugucuugcuuguaccuuaguuuugaacaguaugugggacauugag

SEQ ID NO: 4160543 - RNA, 91 nt, Human
uucaugugaugauaguggaugccggcucuuagcuuccaacacugauugcuauucagggacugggauucuggaucugcuccaaucaugugga

SEQ ID NO: 4160544 - RNA, 60 nt, Human
uucauguuguguugugguuuccaggaagacaaaaugcacuuuggaccacaucaacuugaa

SEQ ID NO: 4160545 - RNA, 63 nt, Human
uucauuaagggcugucaugugucagugaccuuacgguaaggucugaguuacagucuucuugga

SEQ ID NO: 4160546 - RNA, 75 nt, Human
uucauucacuuaacauuuaccaaggaucuaccauaaaucagauaauguugaagauucuggagagagagugaugaa

SEQ ID NO: 4160547 - RNA, 79 nt, Human
uucauucauccauccauucauuaauucuaaagucugcaccacuggggucuauagaaacuugaggggauauaaugaugaa

SEQ ID NO: 4160548 - RNA, 71 nt, Human
uucauucccuuauauuagcauugcuacuuuuagauaaacuauuccugaaaugauuaguguaggaggaugag

SEQ ID NO: 4160549 - RNA, 93 nt, Human
uucauuccuuuuggcuguuuuugguuguuggguaagaguauaaauaucucuauacugauauuuucaacuagaagccagaaaacugggauugaa

SEQ ID NO: 4160550 - RNA, 76 nt, Human
uucauugagcuaggcccuaagagauuguggaguggagaacuucaagguggcuaaauggggcccuggguuggguggg

SEQ ID NO: 4160551 - RNA, 61 nt, Human
uucauugagcucuuccugugugccagguuucaaccuggguaggugcuggggauucagugga

SEQ ID NO: 4160552 - RNA, 61 nt, Human
uucauugagcuguacacuuaggauuugggugcuuuacuguuguauguuauaacucaaugaa

SEQ ID NO: 4160553 - RNA, 64 nt, Human
uucauugagugguuuauucuaauguuaggugaacugucacgaguaaaacuacuaacucaaugag

SEQ ID NO: 4160554 - RNA, 61 nt, Human
uucauugauuuccuuggaauaagauuuuuauaacuuucuuuauuccauagaagucaaggaa

SEQ ID NO: 4160555 - RNA, 77 nt, Human
uucauuggacauucuacucucugauucccuggguucgacuacucuagggaccucauguaaguggauuccagagugaa

SEQ ID NO: 4160556 - RNA, 62 nt, Human
uucauuggcuucucuaccgaauuaguucuauaauuucucucaucuuuggggaagcucgugag

SEQ ID NO: 4160557 - RNA, 55 nt, Human
uucauugguuugauauugccauggcaacucugcaacaugguaacacgccagcgaa

SEQ ID NO: 4160558 - RNA, 59 nt, Human
uucauugugaacacauucugccacaacagcugagguagaacauuguguuuauuugugag

SEQ ID NO: 4160559 - RNA, 111 nt, Human
uucauuucaguucucuucugaugcagaauuauggugcuggcuuccauugaauggcaaaugggaugagaugguacacauacgauucugccucacugaugaauuuggggugga

SEQ ID NO: 4160560 - RNA, 108 nt, Human
uucauuucuuuguaucucugccauuaaugugaaggaaggaaacagagaucccuacucuaauucccucugauuuuaucauuaauguagcucuggaagacauuuaaugga

SEQ ID NO: 4160561 - RNA, 62 nt, Human
uucauuugcaaggugauaaaagaaugaauggaaauuuaccuaugagcaccucuguaauugag

SEQ ID NO: 4160562 - RNA, 55 nt, Human
uucauuuuauaaacccugcugaaagucagguuagcaacaugguauguaaaaugag

SEQ ID NO: 4160563 - RNA, 76 nt, Human
uuccaaaaugugagucccaccucaaagcagggcuauugacugcaucaaaucauaauuugagguguucacuuuggag

SEQ ID NO: 4160564 - RNA, 70 nt, Human
uuccaaagaacaugaacacaauguuuagaaauugguuucugagcccuugguauguucauuguuguuggag

SEQ ID NO: 4160565 - RNA, 76 nt, Human
uuccaaagccuggcucugccguaaccaccaguggggaacugcuccagcucggccagcccagaaccgggccuuggag

SEQ ID NO: 4160566 - RNA, 55 nt, Human
uuccaacaccagcacagggcuccccagggacacugggagcaagcuggugcuggag

SEQ ID NO: 4160567 - RNA, 68 nt, Human
uuccaacaguuuaugugaggagaaacuggcauaugcuauuagaaucuucaguuguaaaaguguuggga

SEQ ID NO: 4160568 - RNA, 67 nt, Human
uuccaacaugaauuuuucuguggguuaauggauagguuugauuaaacacacugagauuuauguggag

SEQ ID NO: 4160569 - RNA, 90 nt, Human
uuccaagagacucuugaagauucuuuuuguuaguagggaaaacauucuccauuuuucugccaacuuuaggguuuucagagaaguuugggg

SEQ ID NO: 4160570 - RNA, 70 nt, Human
uuccaaggcugcuauuuguuucucagauaacuugugaaaauaaaucaagggcaguauuuccuuuuuggag

SEQ ID NO: 4160571 - RNA, 67 nt, Human
uuccaaggguaggucauauaagacaaccagcuuucuccugguucucuggggaugcuuauucuuggaa

SEQ ID NO: 4160572 - RNA, 90 nt, Human
uuccaaggugaauucagaggugggcugagaggauguggggagaggcaucaacaaagucugcugcagucguggcucuaaacacccuuggga

SEQ ID NO: 4160573 - RNA, 80 nt, Human
uuccaaggugacagggagugauauagcagagacagagucuccugucacuucuauaaaagacuuauccuguggcuuuggaa

SEQ ID NO: 4160574 - RNA, 84 nt, Human
uuccaaguauaugugugugugcauguguguguacccagguggaacccuccugcaugcucacauaugccuuuaugaauacuggaa

SEQ ID NO: 4160575 - RNA, 77 nt, Human
uuccaagucucucauggagaaaguuggcagacauucaacauggucaugccaauuucugcauggcuauuucuugcggg

SEQ ID NO: 4160576 - RNA, 59 nt, Human
uuccaauacaguuuuugaaaggcagaaugaaacaucucaaacuagaggcuguaauggaa

SEQ ID NO: 4160577 - RNA, 69 nt, Human
uuccaauucuccuacaccauuagaaguucuggggacaagcaccugcacaguggaggaaauuaguuggga

SEQ ID NO: 4160578 - RNA, 75 nt, Human
uuccaauuguuuaugagcugauuaguguuguagaaauacauucugcagcagaauaaucugcucaguaauuuggaa

SEQ ID NO: 4160579 - RNA, 84 nt, Human
uguauuguuuuugaguugcuuauuuaauaggccuuuauuagcacaagcaucuggucuagaagaguaaguguuaaaaaggaagca

SEQ ID NO: 4160580 - RNA, 64 nt, Human
ugucaaaaccagcaauuuuguuccuagguagauaaccaacagagaugcaaguguguauuugaca

SEQ ID NO: 4160581 - RNA, 67 nt, Human
ugucaaagaacauuuguccauuggcuucucgaaucguuuauucagucaaacaaauguuuauugagca

SEQ ID NO: 4160582 - RNA, 83 nt, Human
ugucaacagaaggauggcuuguaauagccaaaaccucaaacaauacauuugauaggcaaauuaauaagucauauaucuguaca

SEQ ID NO: 4160583 - RNA, 55 nt, Human
ugucaacagaucucaaagcuggcugucuccuauagcuaggaagauguguaugaca

SEQ ID NO: 4160584 - RNA, 56 nt, Human
ugucaacagucauucuaguaugguggcauuccuccaggagggggauggcuguagca

SEQ ID NO: 4160585 - RNA, 74 nt, Human
ugucaacuuccagcagacucuucuccuggggcuuaauaucuauagcagucccacuuuggauucugcuggagaua

SEQ ID NO: 4160586 - RNA, 56 nt, Human
ugucaauaguuuugaguucucuacaaaacuacagagaccaagguacacuauugaca

SEQ ID NO: 4160587 - RNA, 129 nt, Human
ugucaaugauuguugguguauuauauacgugccgggugcuucacugaccuguuuucacaagauagcccuauuuuauggaugaguucaaugaggcagagggcggugaggugaucugcucacuaucacaca

SEQ ID NO: 4160588 - RNA, 82 nt, Human
ugucaauggaucuucgugaguguuuugcuugguaugaaaucuguauacacauaaaaugcucaugguauaacacuaagugaua

SEQ ID NO: 4160589 - RNA, 73 nt, Human
ugucaauguauaugaaaauauccugcuuuagauggauuaaguaugugccagaauguuuuuauacacuuugaua

SEQ ID NO: 4160590 - RNA, 84 nt, Human
ugucacaaauuacucagcagacaguuagcuauauuggugucuuugaaaccauguuuggcucugcugugugcuuuuguuuguaca

SEQ ID NO: 4160591 - RNA, 78 nt, Human
ugucacaagaacauuagagaagcuuggagaugugcaagaaaaagcauuuuuacaauaaauucucaaguauaugugaua

SEQ ID NO: 4160592 - RNA, 64 nt, Human
ugucacaauggagguagcaguuuccuuuugagggacuggaaaugugaccuacuuccuuguaaca

SEQ ID NO: 4160593 - RNA, 55 nt, Human
ugucacaccucguuuagcauucuuuguguauguuggaugcaggggaggggugaua

SEQ ID NO: 4160594 - RNA, 80 nt, Human
ugucaccucugcucacauuuuuauaggucagggcaagucauauggcuucacuuaacuuccaaagagagcagagguaugca

SEQ ID NO: 4160595 - RNA, 78 nt, Human
ugucacugcccuguuccugccuccagcuguuaggccauagccacugccauaguugggaagagcuggaacagguugaca

SEQ ID NO: 4160596 - RNA, 61 nt, Human
uuccauucccuuugauucgcgcugauccugugaucugcuguguguaauggaaugcaacgga

SEQ ID NO: 4160597 - RNA, 90 nt, Human
uuccauuuugaggacacugaaggcuacaagguugaagucacuuggaagaugaaaucaauccugaagucuccuggauuuuucugaguggaa

SEQ ID NO: 4160598 - RNA, 58 nt, Human
uucccaacucugguucagugauuucagguugauagcuugaaaucagccaugaugggag

SEQ ID NO: 4160599 - RNA, 70 nt, Human
uucccaagacuucuuucacaauguuucuagggaaugggagucugaaacacacagagaagggagaagggag

SEQ ID NO: 4160600 - RNA, 67 nt, Human
uucccacuaaugccaucagagaaaacucuuucugaauacuaaucagaaacucucaugaagugaggaa

SEQ ID NO: 4160601 - RNA, 88 nt, Human
uucccacuccugaguaguagcauugucaacauauaauaugaaagccaucaauucauucugacaguguuugcacuucaggugguaagaa

SEQ ID NO: 4160602 - RNA, 71 nt, Human
uucccagagggccaggucggugaauggucaucugucugcccagauggaccgaggccuggccugccagggag

SEQ ID NO: 4160603 - RNA, 61 nt, Human
uucccaggaugcaauuuugaaucagcccuggcuacugagagcugucucuggcuccugggaa

SEQ ID NO: 4160604 - RNA, 62 nt, Human
uucccaggccuuccucaagcaccuauaaauauacauacacagugcagggccuaaaaagggaa

SEQ ID NO: 4160605 - RNA, 59 nt, Human
uucccaggcugugcuaccagagaaucuguuuuucucuggccuggauaugagucugggaa

SEQ ID NO: 4160606 - RNA, 87 nt, Human
uucccagguuucgagcaagacuacaggcagaugaguaaggacacuuguagaacucaucuugcaguguguguucugaaaauugaggaa

SEQ ID NO: 4160607 - RNA, 94 nt, Human
uucccauauagcucccagaccuuggcugggcuccagcaucuacaaaggaggaagagaugcugggcccagaucccaggaucuuggacauggugaa

SEQ ID NO: 4160608 - RNA, 62 nt, Human
uucccauccauauggugacaaggugcucucuggguuaaccucaaaccauguuggauaaggaa

SEQ ID NO: 4160609 - RNA, 61 nt, Human
uucccaucccccaucugcugccuuccuccagcuaacgacaacagcagaaauggggugggaa

SEQ ID NO: 4160610 - RNA, 64 nt, Human
uucccauuaauuuauuuucaaaugaggaaaacccacaacuuugagaaacugauuauuaugggga

SEQ ID NO: 4160611 - RNA, 61 nt, Human
uucccauuucaugcuggcuguggcaugcuuugaguuuguugcuuccacuguaaguggagaa

SEQ ID NO: 4160612 - RNA, 68 nt, Human
uuccccagcuuggccagaaucuuccuagugagcucacauucugcucacuccugcccaggcuuggggaa

SEQ ID NO: 4160613 - RNA, 57 nt, Human
uuccccaggcggcuuuuucagcaucuggccacauguuggcaaggugagccuagggaa

SEQ ID NO: 4160614 - RNA, 58 nt, Human
uuccccauggguggggacacauaugauggagcauccccaugugcccacccacggggaa

SEQ ID NO: 4160615 - RNA, 86 nt, Human
uuccccuaauuuucauguuuuaaugccuuuuucuuaauuuguuauagaucuggaaagugaugaaacugugugagaauuaaugggag

SEQ ID NO: 4160616 - RNA, 72 nt, Human
uuccccucacccacauuccucuaguaugugacuaugaucacguaugugguggaaauguccccagguugggaa

SEQ ID NO: 4160617 - RNA, 65 nt, Human
uuccccucucagaucuggccuacuucaggucuaaaagcuggggaaugggcugggcuagaagggaa

SEQ ID NO: 4160618 - RNA, 56 nt, Human
uuccccuucuucuugucuucacccaggggcucugggaccugcagaggaaaggggag

SEQ ID NO: 4160619 - RNA, 65 nt, Human
uucccgaaggacaccugcagagggaccagaagagcacuuuguguccuucugggagucccagggaa

SEQ ID NO: 4160620 - RNA, 80 nt, Human
uucccgcggcccuugccucccgggagcggcuccccucugacgacugaguggacugcgcuugagggggccgccgcugggaa

SEQ ID NO: 4160621 - RNA, 73 nt, Human
uucccgggagcaaaucacuucagucauuuccucccugaggaaguugcuaaugauguguuugcucuucugggga

SEQ ID NO: 4160622 - RNA, 65 nt, Human
uucccgugcuguucuugugauagugaggaagucucacgagaucuuuugguuauuauaagagggag

SEQ ID NO: 4160623 - RNA, 90 nt, Human
uucccuaaaucccucuuaaugccuacccaugguuagacauacagcaagugcuucugaaguggaugggugcauggauggaugcaaagggga

SEQ ID NO: 4160624 - RNA, 62 nt, Human
uucccuacuaucagaaggcccguugcuaagagaugccuuguuucuuugccucuuagagggaa

SEQ ID NO: 4160625 - RNA, 55 nt, Human
uucccuccccuucaagccaguggcagccugcugcccaggaaggagaggaugggaa

SEQ ID NO: 4160626 - RNA, 128 nt, Human
uucccuccgccuguccacccagccacccacccugucuucuccuuuguuucaggggugaugggagcuggaggucucugaaauaagggagaagggaaucugggagagcucagauggacacauggauggaa

SEQ ID NO: 4160627 - RNA, 72 nt, Human
uucccuccuccauguucaguccagugucugcaacuguccgacacugucucauaugaggggacaucacgggaa

SEQ ID NO: 4160628 - RNA, 75 nt, Human
uucccucuuuccuccaaccauuuaucugggaagcaaguuauuggcaacccagagcugauuguuggagccggggaa

SEQ ID NO: 4160629 - RNA, 56 nt, Human
uucccugacaagagcacaccccaggaaacuccaucucagggucugugucuagggaa

SEQ ID NO: 4160630 - RNA, 79 nt, Human
uucccugacaguucugggaggugcacguccaagaucaggguguccucagaguuggugccuuccgagagcugugagggag

SEQ ID NO: 4160631 - RNA, 72 nt, Human
uucccugacuuguggucauugggcccugccugguccaagcagccaggcagugcucaagacagcagcacggag

SEQ ID NO: 4160632 - RNA, 72 nt, Human
uucccugcucaaccuuaauaguaaacagcaagggcagaagccacagacuguuaacgguaugaugcucggggg

SEQ ID NO: 4160633 - RNA, 76 nt, Human
uucccugcuggcuucccuaccugcaccuuguagauagcaccacccggggugcaggcuggggcaggcugugguggga

SEQ ID NO: 4160634 - RNA, 105 nt, Human
uucccuuccuuagccuugaagcgggaguaaccacuagacagaaggcugugagggaggacucuggcacuuccacuguggcugcuuugccuuugggcaggaggggaa

SEQ ID NO: 4160635 - RNA, 63 nt, Human
uucccuugcgccagggcuucacuggacccuuauaaacuccgccuggcuuccaagguaggggag

SEQ ID NO: 4160636 - RNA, 64 nt, Human
uucccuuucacaauaucuaauuugccaauuaugaagagcacagugauauccuugagaaagggaa

SEQ ID NO: 4160637 - RNA, 60 nt, Human
uuccgggaagauucccaggaacuuccggcgacgagggaauuccuggggacuuccguggga

SEQ ID NO: 4160638 - RNA, 115 nt, Human
uuccuaaaagguucucauucugguuaagguagagggagcacacucacaguuuagauucaaagucggcucaaaucuuggaaguguccacugguguagccagaaagagcccuaggaa

SEQ ID NO: 4160639 - RNA, 79 nt, Human
uuccuaaauaagagauguggaaucauuuacaaggagaauuaucacauugugaagauacgccaucuucauuauugaggaa

SEQ ID NO: 4160640 - RNA, 92 nt, Human
uugaauuucggagcugccaguguaugaauucuuccagacucucccugacagaaaccaucuuuauauaucugcuaagcaguucuauuuuuuaa

SEQ ID NO: 4160641 - RNA, 66 nt, Human
uugaauuuuggacugcccaggauuaaugcugaucuaaaguccaaucuuugcaggccaaauuguuaa

SEQ ID NO: 4160642 - RNA, 67 nt, Human
uugacacaaaaggaagagaaaagcugccucucgguuauaaaaaguaucuuuuccuuucugugugcaa

SEQ ID NO: 4160643 - RNA, 64 nt, Human
uugacagauccacccuuguagugacacauuuuaaaucucugucugucauuuauggaucuggcaa

SEQ ID NO: 4160644 - RNA, 75 nt, Human
uugacagcaaagauugugccuagcccccuaaaagacaguacaggguaaugcaaaggucacaggcuuugaaaucaa

SEQ ID NO: 4160645 - RNA, 60 nt, Human
uugacagcaacacaugcuuagugcagagaccucucugaggaccauaucugugugcugcaa

SEQ ID NO: 4160646 - RNA, 58 nt, Human
uugacauaggauuuggcauuugggaugugauuccaaaucaccagcagccaaugugcag

SEQ ID NO: 4160647 - RNA, 63 nt, Human
uugacauuauuaucaugucaccacccuguugcccaggcuggagugcaauaguaauaaggucaa

SEQ ID NO: 4160648 - RNA, 92 nt, Human
uugacauucagaauauuuguuuucauaauagugcaguuuguuggauuuauauuucaauauuuugguuaugauaauuuuuuuguauaugugaa

SEQ ID NO: 4160649 - RNA, 100 nt, Human
uugacauuuuagauuuaagucgguaaagcacugauuuaaacuggauuuuaacuggaugaaauucugauuuaauaaguguacugacuggauaaaaugccaa

SEQ ID NO: 4160650 - RNA, 72 nt, Human
uugaccacauuaaguguaguuguagacuccuuccaguuucaggaguucacagaugaauuuuaauuguguuag

SEQ ID NO: 4160651 - RNA, 80 nt, Human
uugaccauucugaguguuauugaggcaaaacuguguuaagaugaacugagacaguaaucuuagaaucuaagaauugucag

SEQ ID NO: 4160652 - RNA, 59 nt, Human
uugaccuuggcuuuuaaaauauagcuaaccaccaaguauacgcugaagacuaaggucaa

SEQ ID NO: 4160653 - RNA, 67 nt, Human
uugacuacuaccaaggcucugaggugguauuagaaaccuccaggaagcucuugguaccucuaggcaa

SEQ ID NO: 4160654 - RNA, 87 nt, Human
uugacuccauagugugaaagauugucaacaacagcauuuucuauuuguacuguuuaagauaguguugguggucucuucauuugucag

SEQ ID NO: 4160655 - RNA, 98 nt, Human
uugacuccuagcagccaucaccagcaugaauguguucguagggccuuugaguguggcgauugucauauucuguuggauaacaauguauugggugucga

SEQ ID NO: 4160656 - RNA, 85 nt, Human
uugacucuugcaccagcuacauuagcuucaauggcuaggguaaccauggcauuuuguagcuguguaucuguuugucaggaguuaa

SEQ ID NO: 4160657 - RNA, 111 nt, Human
uugacugcagcuguaacagaugcguuuacacauguaaaagauaaauuaacaaagauguuuauugaaguuuugcaugaaauagaugauaacugacaacaauguaaaugucaa

SEQ ID NO: 4160658 - RNA, 74 nt, Human
uugacuuccucugagggaagaaauuuguaaaacauaaacucacuaaacaaaccucuuuccauuagaggaauuga

SEQ ID NO: 4160659 - RNA, 130 nt, Human
uugagaaagagaacgucuaugcacuuuggcuuggcuucuuuagucaguuuggaauucucucaaauaagagaauaaccagaaaacccaaaaugacaaaggucaaguauagcauauuuuuuucuugcaucaa

SEQ ID NO: 4160660 - RNA, 55 nt, Human
uugagaaauacuuuuguagccuaaggaagaagguggagcaagggauauuuuucag

SEQ ID NO: 4160661 - RNA, 68 nt, Human
uugagaacagccacuaugacagauuuagagcccuuuugcccuaaacuucauauguugcuuuaauucaa

SEQ ID NO: 4160662 - RNA, 58 nt, Human
uugagaaccacuguggagggcuaucaagugcuucuagucccucccagaugcuucccaa

SEQ ID NO: 4160663 - RNA, 67 nt, Human
uugagaacuagcauggucuaucaguuugaaugcuuucagcugcaaguaauagaaccugcaguuucaa

SEQ ID NO: 4160664 - RNA, 72 nt, Human
uugagaauaaauuuguguugguugcuaaguuuacagugauuuguuauggcagcaauagaaauauaaucuuaa

SEQ ID NO: 4160665 - RNA, 62 nt, Human
uugagaauagcuuaaauguuucacaguggggguaauuuggauacauuuuggcauacucucaa

SEQ ID NO: 4160666 - RNA, 66 nt, Human
uugagacacagcagugccugccucagcucuucuugggggaaguggggcggggcaccugcuucucaa

SEQ ID NO: 4160667 - RNA, 103 nt, Human
uugagacacagucuugcucugucacccaggcuggaguacaguggugcaaucuccacucacugcaaccucugccucccagguucaagcgauucuccuuccucag

SEQ ID NO: 4160668 - RNA, 103 nt, Human
uugagacacagucuugcucuguugcccaggcuggagugcaguggcacaaucuuggcucacugcaaccuccgccuuuuggguucaagcaguucuccugccucag

SEQ ID NO: 4160669 - RNA, 102 nt, Human
uugagacagagucucguucugucaccaggcuggagugcaguggcacgaucucggcucacugcaaccucugccucccggguucaagcgauucuccugccucag

SEQ ID NO: 4160670 - RNA, 106 nt, Human
uugagacagagucuugcucuguuguccaggcuggagugcaguggcaugauggucucugcucacugcagccuccaccucccauguucaagcaauucuccugccucag

SEQ ID NO: 4160671 - RNA, 82 nt, Human
uuccuugcagagaggcaugcggucagaacgucacuggcagaucucgccugagaguuuugacgcuuguaacucugcccuggaa

SEQ ID NO: 4160672 - RNA, 98 nt, Human
uuccuuuauucagacuaagguacagaaggauuucuaguaguuguauaaaaaaugaguaacugauacauuauuauuugaguuccucucuaccuaaggaa

SEQ ID NO: 4160673 - RNA, 64 nt, Human
uuccuuuccuaaacuaaucuccuaaaugaacaugucauauccagggaguuuuagggcuugggaa

SEQ ID NO: 4160674 - RNA, 125 nt, Human
uuccuuuccuuuguuaucucuguggcaucuuuugaccuacaccugguaauucucugugaugaaaaugugcagaagaaaacagcugugugcagauagacaauagggaaaaggcacaggaagaggaa

SEQ ID NO: 4160675 - RNA, 79 nt, Human
uuccuuucucaucuguauggcuuuucuuuccuaguguuauugcacuggcuaagaccgccacuacaauauugaguuggag

SEQ ID NO: 4160676 - RNA, 58 nt, Human
uuccuuugccucagagauuuguucacaguuaaaaugcaaauaucuuuggcaaagagaa

SEQ ID NO: 4160677 - RNA, 93 nt, Human
uuccuuuggcuuuuugacauacacagugcuaugcuuucccccaauguuuucacaaaagaacuugcuggcaggcacugaagcagagcagaggaa

SEQ ID NO: 4160678 - RNA, 74 nt, Human
uuccuuuucaaauguaucagcccagggauuuguaucauuacaaauuugugaauauggaugcagauuuguuggaa

SEQ ID NO: 4160679 - RNA, 55 nt, Human
uuccuuuucuucuaccacaugucuugaacauucacauggguuaaagaagauggaa

SEQ ID NO: 4160680 - RNA, 64 nt, Human
uucgaagagcucauuuguuugcucucggucucccugggccucugggcaggcaguggcauucgga

SEQ ID NO: 4160681 - RNA, 86 nt, Human
uucgagguguguuacagguagcaaaaccuuuccugaaugcacaauuuuauauaggaaaggauugcugugcuguuggucacugagaa

SEQ ID NO: 4160682 - RNA, 55 nt, Human
uucgcaccuggacagugacccuagccuggcagaucauggaggggccgggugggaa

SEQ ID NO: 4160683 - RNA, 109 nt, Human
uucggagaucucagauuacccgcccuucugaucaacugacuccaaaucuggggucuucucaaaacaccccucagguuagauaguuuauuagaacucacagaacucagaa

SEQ ID NO: 4160684 - RNA, 130 nt, Human
uucggaggcugcugcauggagaugauagcucccugaagacacgccgggaggggcagcugcccgccugccagcacuucuggcugucugaagugcuucguuucagcuccacgugggugucuuuguugucaga

SEQ ID NO: 4160685 - RNA, 75 nt, Human
uucggcaguggcagagugcacucaggcaccauggcaaccagugcgucagccuggguacacuuagcagcagcggaa

SEQ ID NO: 4160686 - RNA, 78 nt, Human
uucgugugacacugccgggcagcugccuuggcaugagccuucucuguccaagaacagacugccaggccugaacacgga

SEQ ID NO: 4160687 - RNA, 59 nt, Human
uucuaaaagauccaugggcagucauggcagccucauccucuguccugaucuuuucagaa

SEQ ID NO: 4160688 - RNA, 61 nt, Human
uucuaaaccuggagcacccucauaucugucucaauagaggaggaaaaauuuagguuuugaa

SEQ ID NO: 4160689 - RNA, 99 nt, Human
uucuaaagacagauuuaauauuguucgccuugguucuggaaccuagguauuaacugcugggacacaaaagugaauaaaauaggauccuugccuugagga

SEQ ID NO: 4160690 - RNA, 84 nt, Human
uucuaaagcuccuuccacuaaaaaguugacauuuuuaugugaaaauauaucaaaauucgaacgucuuguggauucaggcuagaa

SEQ ID NO: 4160691 - RNA, 66 nt, Human
uucuaaagugcaaucugacagagaauguggcaaaaaucaaacauuaggauguugugcacucuagag

SEQ ID NO: 4160692 - RNA, 103 nt, Human
uucuaaaugccuuuuagccuccuguaguauuuuuagguaaggaaaguauguugaauuauuucucuuuguagggauauaggguugaaaugugaaguauuuggaa

SEQ ID NO: 4160693 - RNA, 78 nt, Human
ugucuaacauuagaaacuguaaacacagcaguacaacuaguguuuggagcugucuuuauaguguuacagugucagaca

SEQ ID NO: 4160694 - RNA, 75 nt, Human
ugucuaccuacaugcaugugaauauggacacaccuauguauaugugugugugcauauauguguauguauauuaca

SEQ ID NO: 4160695 - RNA, 76 nt, Human
ugucuacgaaauuauccuuuuauuguaguaaguuauuuuagaguauuauugcaacuuuagggauagaaagaagaca

SEQ ID NO: 4160696 - RNA, 65 nt, Human
ugucuagcccagauacaaaucaugauaaaagaucuauccaugugaaauguauggggccaaggaua

SEQ ID NO: 4160697 - RNA, 83 nt, Human
ugucuauaggcaguuuuauagucaugucaaugucacauagauucugaguaacaaugauuagugacuacagcaugcuuuccaca

SEQ ID NO: 4160698 - RNA, 65 nt, Human
ugucuauugcuuguucuugauaaggaaugaaucuagaacauuucuauguguugacaagccugaca

SEQ ID NO: 4160699 - RNA, 111 nt, Human
ugucuauuuuuauauacucuccugaaaugcuaucuuuuuugguaggcacacuaucaacaaaugcacuuucacaaagcauagcacuuuaugggauuuaaaugaagaaagaua

SEQ ID NO: 4160700 - RNA, 66 nt, Human
ugucuccacuauaucaagcugccuucauggggaagaagcagggggcaguaaggauauggaaagaca

SEQ ID NO: 4160701 - RNA, 72 nt, Human
ugucuccauguaagaugucaaagggucacaguugcuuacagcugcgacucccugagaucuuucaucaggaua

SEQ ID NO: 4160702 - RNA, 67 nt, Human
ugucucgugcagacuaugaggguagcagauuccuacaucugugccaagcuuauaucugucugaagca

SEQ ID NO: 4160703 - RNA, 77 nt, Human
ugucucucuucagccagggcagagcaggugaggcccugcgucacccgcgcaaggcuugugguucagccagggagaca

SEQ ID NO: 4160704 - RNA, 82 nt, Human
ugucucuguauuuuuaugaugcuauagaacuuuugaguuucucgauauauaauauggguaucaaugacaaacaucagagaca

SEQ ID NO: 4160705 - RNA, 78 nt, Human
ugucucuucguggcauuugggagaugcgugggcggccugccccccgaccgccgccccugcccaccacaugcugggaca

SEQ ID NO: 4160706 - RNA, 71 nt, Human
ugucucuugaccucuggggagaccaggaggaguagccacacgugucagggguccccagggcaucaggagca

SEQ ID NO: 4160707 - RNA, 56 nt, Human
ugucucuuggagggucuagugaguaucagccccugagucacuccucccaggggaca

SEQ ID NO: 4160708 - RNA, 60 nt, Human
ugucucuuugcagcaaggagaaggccaguauuaacuuucaugaggcugcauaaggagacg

SEQ ID NO: 4160709 - RNA, 83 nt, Human
ugucugagcguaucugugaguagccugggagugaaauuggaacugauacuaacccucagcucucacacuuagcuucuaugaua

SEQ ID NO: 4160710 - RNA, 65 nt, Human
ugucugaggccugaggcccugggagcugcugggaccacucgggaacccagagccauagccagaca

SEQ ID NO: 4160711 - RNA, 59 nt, Human
ugucugcaaaguccagcacaggcuuggauugccugugcugccagaaacuauggaagaua

SEQ ID NO: 4160712 - RNA, 69 nt, Human
ugucugccuuucauuguucuacccagcauccgguuuggacuugacugagggcagugaugaaggugaaca

SEQ ID NO: 4160713 - RNA, 61 nt, Human
ugucugcgcgguguugggggaacccugggugccuuggcccagcccucugccauagccagca

SEQ ID NO: 4160714 - RNA, 57 nt, Human
ugucuggauuuaaaucucaaugcugccacuggaagcuuugugacuuugagcuaguca

SEQ ID NO: 4160715 - RNA, 55 nt, Human
ugucuggccuucucuguuacagaaaaucuggaaaauauagaaaggguuaaagaca

SEQ ID NO: 4160716 - RNA, 56 nt, Human
ugucuggggaacugugcauccagggccacacggcuagagcgcaggcccaucagaua

SEQ ID NO: 4160717 - RNA, 72 nt, Human
ugucugggucaccccuccuggcugcccucuuggagcugaauaacagaaggggagggguuaguaacccggaca

SEQ ID NO: 4160718 - RNA, 63 nt, Human
ugucugguacaugguauauucuaauggcaauaaaauggcacaagcagccuugugugccaggca

SEQ ID NO: 4160719 - RNA, 125 nt, Human
ugucuguagguuauggaugugauugagauuggaaauacugagagauaaacacacguucuagugaguucacugguuuaacuuugucuuugcagguuucaguuuuuauugcucuaccccuuuuuaca

SEQ ID NO: 4160720 - RNA, 78 nt, Human
ugucuguccagaaguuccuaagcaucauuguccuuggaagugauugauuucuugggguuacucuccacugaccagaca

SEQ ID NO: 4160721 - RNA, 69 nt, Human
ugucugucucucuccagagugcagggagcaugacccagccacucugcaccuccggcagggacacgggua

SEQ ID NO: 4160722 - RNA, 71 nt, Human
ugucuguuuuguugauugcuguagcccuggcaucuugggcagugccagcaccuguuagcauuaaauacaua

SEQ ID NO: 4160723 - RNA, 60 nt, Human
ugucuuaauuuggaugauguuuuuauucuacaaaauagaauuauuaucuuguucgaggca

SEQ ID NO: 4160724 - RNA, 60 nt, Human
ugucuuaguccuuuccggcugcuauaauaaaaauauuauaaacuggauggauuauaaaca

SEQ ID NO: 4160725 - RNA, 63 nt, Human
ugucuuaugcuucucuuuugauagaugacaugacugucuuuuaaugggagcaguauuuggaca

SEQ ID NO: 4160726 - RNA, 58 nt, Human
ugucuuauugcguauguauacaaggcauuguuuuguaguacuuuuuguaauaagagca

SEQ ID NO: 4160727 - RNA, 64 nt, Human
ugucuucaugaggccgcucuuugacuggugugacuaaaucagaugaagcagcuucauguagaca

SEQ ID NO: 4160728 - RNA, 63 nt, Human
ugucuucauguccuguugcugcuagugaugaguuguaacaucuucacucaggaaaugaugaca

SEQ ID NO: 4160729 - RNA, 64 nt, Human
ugucuucuaccuugacagcauugcaugcguuuguuucuugcuauggcuguacaguaaggagaca

SEQ ID NO: 4160730 - RNA, 62 nt, Human
ugucuucucuugcagucccaucugggagcucauuacuguacugcugggcugcaggggaugca

SEQ ID NO: 4160731 - RNA, 75 nt, Human
ugucuucuucaaaucuauauguugauauucugauucccaaugugaggauauuaaaagguggggccuuaggagaua

SEQ ID NO: 4160732 - RNA, 79 nt, Human
ugucuugcccuggcuuagucauuaguucccucucuagggacuggagaggagcuggccacuaggaugcaggugcaacaca

SEQ ID NO: 4160733 - RNA, 58 nt, Human
ugucuuguaagccucaagaaaaugcaauguugguaauaauuggggugaaugccagaca

SEQ ID NO: 4160734 - RNA, 83 nt, Human
ugucuuuaaaaccugaaacuuggcuaccagcguuaaauauucuaauauuuuaguuauguggcccaggauuugacaccaagaca

SEQ ID NO: 4160735 - RNA, 66 nt, Human
ugucuuuaauccucaugcauagucaaggacucaucucuggaccaugagcugcagguguucuagaca

SEQ ID NO: 4160736 - RNA, 62 nt, Human
ugucuuuccaaggcucugugccucuuuguaguaaagggaagcuggggagcuuuggagaggca

SEQ ID NO: 4160737 - RNA, 112 nt, Human
ugucuuucucuaacaauaccgucugaaaauuuuccagcuuuggaaaaccugcuuucuaggguauugcagaauucgcuggaacauaugccucaaauuauugcugagacagaua

SEQ ID NO: 4160738 - RNA, 83 nt, Human
ugucuuucuucagcugcucccuauccuuuccuuuucaaagagaaauaaagagaaagggacagcaccuugaaugaaccaagaua

SEQ ID NO: 4160739 - RNA, 65 nt, Human
ugucuuugcuauugugaguagugcugcaaugaacauacgcaugcaugugucuuuaugguagaaca

SEQ ID NO: 4160740 - RNA, 62 nt, Human
ugucuuuggaggcacuguugagugaauaaaauauaucacuucccguuggccucuagagguca

SEQ ID NO: 4160741 - RNA, 91 nt, Human
ugucuuuggugaacacauacacauuuuuugcguuauauacuuaggauucgaauugcuggguauuagaaugugugugucuucagcuuuagca

SEQ ID NO: 4160742 - RNA, 80 nt, Human
ugucuuugugccacuaucacacuguuuuaauuacuuugguuuuucaaugugucuugcggcaguugguaacaagaaaggca

SEQ ID NO: 4160743 - RNA, 56 nt, Human
ugucuuuguguacaggaucgccaugggagugguaaacauaggucuugaacaaagca

SEQ ID NO: 4160744 - RNA, 76 nt, Human
ugucuuuguguauacugucuuguuucacaguggacugaaaaccacuuggaaagaugcaacacaguaaaacagaaca

SEQ ID NO: 4160745 - RNA, 83 nt, Human
ugugaaaauguagugacauuucauugaaaguagguuuugaaucauuaagcuuacuuuagaaauagucaucaaaacuugucaua

SEQ ID NO: 4160746 - RNA, 59 nt, Human
uucuucuguccuaagucaaagcaacuggcaaggccuccugcagacagggacagaaugga

SEQ ID NO: 4160747 - RNA, 92 nt, Human
uucuucuucauugcugucuucacuuccugguuucucaaaguauagauaaguggauucagaaagggagugaagaugguauagaaaacggagag

SEQ ID NO: 4160748 - RNA, 130 nt, Human
uucuucuugcuccugauaauccugggcagucuggaggugggggcaagaguguuuguggccacacauucacagacagacacugcacucccaccuucccagcaucugcccgcacccaaggcagagagaagag

SEQ ID NO: 4160749 - RNA, 86 nt, Human
uucuugaaagccccagggcaugggaagaacugaauagaccuggcccucacuuacggauucuaccuauacccacagcagaucaagga

SEQ ID NO: 4160750 - RNA, 75 nt, Human
uucuugaaauagguucuucaggagcuguuuauaaauugaguugugguuaaauauaugagggagcuauuugaagaa

SEQ ID NO: 4160751 - RNA, 69 nt, Human
uucuugaauuuccagaauagauggagcucuaagguaaacuggaacucugauuuuuuggacauucaugaa

SEQ ID NO: 4160752 - RNA, 67 nt, Human
uucuugacaagcauuuugcaugcaguuaaauagacaaauguauucugcugccaggauuuugcaggaa

SEQ ID NO: 4160753 - RNA, 129 nt, Human
uucuugaccugccaacccugugacugagagugugaguuggggcuggguggagaaagagagucccugacuucucaacugcacuugccaggaauuuagccuuugcaacuugguguuggaggugauaagaaa

SEQ ID NO: 4160754 - RNA, 67 nt, Human
uucuugagaacaaauuccuggauacuggcauuagugacaaagaagugucaggacaguuugccaagaa

SEQ ID NO: 4160755 - RNA, 59 nt, Human
uucuugauucuuccuugaaggauacugcgugguccauuccuacacaggauaauuaagaa

SEQ ID NO: 4160756 - RNA, 83 nt, Human
uucuugcaaggugauuuucucucucuuguuaggaagagugacuuccauucuuaacaaaguaacgggaaaagaagagguaagaa

SEQ ID NO: 4160757 - RNA, 98 nt, Human
uucuugcauuuuacaguuggucauauucucacuuuaugagcugauuuucagcuugcacaguuugaagaugacucuggugauuguuaaaugaaaaagaa

SEQ ID NO: 4160758 - RNA, 82 nt, Human
uucuugcccagauucucucuugagguuauuaagcuguuagccagggcuccagacaucucaagaagauucagcugggaaagaa

SEQ ID NO: 4160759 - RNA, 55 nt, Human
uucuugcugggcaucagaagacuuaaaccuaagcugucugucaucucugcgggag

SEQ ID NO: 4160760 - RNA, 86 nt, Human
uucuugcuggggcucaugauguaggcugguaaaaagaaccccuauuuauuuauuagcuuuagccuuuggaugagcucuaggaagaa

SEQ ID NO: 4160761 - RNA, 109 nt, Human
uucuugcuguagaugguaguuugccauuuugcucagcaccaccagcacuguaucaggagugucaaauggcccugcuggccaaaggcuacaaucaacagggugguaagga

SEQ ID NO: 4160762 - RNA, 62 nt, Human
uucuuggccugcuccagaacaaggggcgagucuaugcacuccuggagcagcaggcgcaggga

SEQ ID NO: 4160763 - RNA, 93 nt, Human
uucuugggugaaaaauacauccucaggguucggaugagaacagguguugcuuguucaguaucucaagcccagaaagaugaauuaauccuugaa

SEQ ID NO: 4160764 - RNA, 97 nt, Human
uucuugguugcucccaaaagaaacauauugugauccucuucauuuucugaucuugauucaguguguuacuuucuccuauggagcguuguuucaagag

SEQ ID NO: 4160765 - RNA, 68 nt, Human
uucuuguguaggcccagaaaacggauuuacucaggacuaaauuaaaaucuggagcccuaagcugagaa

SEQ ID NO: 4160766 - RNA, 117 nt, Human
uucuuguuuuuuagaaguuucccaagugauuuucaugcccugcuagggucaggaaccauugcuguuacugaagcagggagugaugaaguaggccuguggaucuuucuaaauguggaa

SEQ ID NO: 4160767 - RNA, 130 nt, Human
uucuuuaauguucccgucuuucucauuucccuaaauaaacugaagccuuuacuggaaggucaaguaaauguuacugugaaucacuacuaguagaggcuccagaaaagggaauccugguugcucucaaaua

SEQ ID NO: 4160768 - RNA, 77 nt, Human
uucuuuaauuguggaagagcagccuucacugauaauaaauuuaacucaagcuguuguucucccuaacaauuacugga

SEQ ID NO: 4160769 - RNA, 59 nt, Human
uucuuuacccucucugcacccuuucuguaagggaaauuuaugcagagagaggcaaagaa

SEQ ID NO: 4160770 - RNA, 70 nt, Human
uucuuuaguucuggagguuauuaggagucucuauugauacucuuuaugacauuccagcauccuuaaggaa

SEQ ID NO: 4160771 - RNA, 65 nt, Human
uucuuucucagugggcagauacuguugccauacacuucucuguuucccugccuccuguggaggag

SEQ ID NO: 4160772 - RNA, 58 nt, Human
uucuuucuucaagcuggucucaaucugacaccacugucugauugaguuuaagaaagaa

SEQ ID NO: 4160773 - RNA, 102 nt, Human
uucuuugaucauuucuccuggguggauugggaaagaaguccuagcugaggcaauugcuucugggcucucuuucugugugccugguaaaugaaacacaaggaa

SEQ ID NO: 4160774 - RNA, 66 nt, Human
uucuuuggcauuuccuguaugucccugccacauucccacucuaagcucaugauaggagccagggaa

SEQ ID NO: 4160775 - RNA, 75 nt, Human
uucuuugguaaaugcagguucuucucacaaagccuuucaucccuuauugcagggagagccacauuuuccaaagaa

SEQ ID NO: 4160776 - RNA, 64 nt, Human
uucuuuggucaucaugggaagcaaggacuuccucagccccugccccucuccugugauccaagaa

SEQ ID NO: 4160777 - RNA, 66 nt, Human
uucuuuggugucgaugucaccugucaacugaacugccuuuuugaaagucacaauggcauuaaagaa

SEQ ID NO: 4160778 - RNA, 84 nt, Human
uucuuuguacauucugacuuaaauagaacuccucaauagggaaacaguucuuaugaggauuuuucuuugacuuuaugcagagaa

SEQ ID NO: 4160779 - RNA, 73 nt, Human
uucuuuguauuucuuuacauaugcucauuggaauauaaguucgauggaagcagaccggaggaauauuuuggag

SEQ ID NO: 4160780 - RNA, 61 nt, Human
uucuuugucuggcagcugugagaacuuuuuaccccauccccucacagaaacaaauagagaa

SEQ ID NO: 4160781 - RNA, 119 nt, Human
uucuuuuaacauaaguucaguaacucaauuaacagaaaauaaaaugucauuguucagagguauggacaaugaaagguauucugaacuuaaagagggauuaaauagagagguuagaagaa

SEQ ID NO: 4160782 - RNA, 65 nt, Human
uucuuuuaauugugggggagugugaguugcuuacguccuuacucaaaucccucagaauuauagaa

SEQ ID NO: 4160783 - RNA, 60 nt, Human
uguuccugauucuuugaagaugcacccucuuauagagaugccaucuugaagaauuuugca

SEQ ID NO: 4160784 - RNA, 55 nt, Human
uguuccugggcacucagcuaacccacaggacuauaaauugaguggccgggggaca

SEQ ID NO: 4160785 - RNA, 63 nt, Human
uguuccuuaaggucuugagugaaugagacuguacauguucagcuuaguguaggaccuggaaua

SEQ ID NO: 4160786 - RNA, 69 nt, Human
uguuccuucuuaucugucccuccucacagccucuccauugaugaauuuguguugggacaaguugggaca

SEQ ID NO: 4160787 - RNA, 81 nt, Human
uguucuaacuuacucaguuugagucauuuccaaccaaaagguuaaugcagaaaucaaacugacaauaagaagccuggaaca

SEQ ID NO: 4160788 - RNA, 91 nt, Human
uguucuacuuuuucucaggaagaauuuaaaugccuugccuaugugcauguacuauaacaaugcaaaaugaauuuaggaugaaaaaagagca

SEQ ID NO: 4160789 - RNA, 77 nt, Human
uguucucuuaccacaaaacaguuagaagucaaaucagccacuacauuuugcacuuuuugcuugugugagagagaaua

SEQ ID NO: 4160790 - RNA, 84 nt, Human
uguucugaccccucuggcugcaggucaauucaccauggccagccauggucugaacuaagacaguaguguggaggaggcagaaua

SEQ ID NO: 4160791 - RNA, 66 nt, Human
uguucugauggccauuuuuucaaaccacucucaguuugacuguagaugugaaauaucaucagagca

SEQ ID NO: 4160792 - RNA, 79 nt, Human
uguucugcagauaauaacacauauuucaagaguaguugugaggauuaaaugagaucauguguuugaucuuugcuuggca

SEQ ID NO: 4160793 - RNA, 72 nt, Human
uguucuguaccugguguguuaguuuccugugccugcccuaacaaagcaccacaaaccaggugaguuaaaaca

SEQ ID NO: 4160794 - RNA, 73 nt, Human
uguucuguagcaagugagaggcauuuuaggucaugaaaagacaauacccaauuccuuuacuugcuauacuaca

SEQ ID NO: 4160795 - RNA, 63 nt, Human
uguucugugcccauuuuaaaauggaaauuugguauuuuaucauuuugauggggcucagaguca

SEQ ID NO: 4160796 - RNA, 58 nt, Human
uguucuguggguccugcugcaucucccaccucacgggcagcagcaggaccccagagca

SEQ ID NO: 4160797 - RNA, 58 nt, Human
uguucuuaugaauucaagacaccuuaauaguagguggcauagaauaucauuaagaaua

SEQ ID NO: 4160798 - RNA, 56 nt, Human
uguucuuccuggaaguggauuuccuguuaucuuuagggaaucuuugcaggaaaaua

SEQ ID NO: 4160799 - RNA, 64 nt, Human
uguucuuuguucaggaauucgugcagacacugaucagcugcucuguacaauugagaagagaaca

SEQ ID NO: 4160800 - RNA, 72 nt, Human
uguugaaaggcuguauguuuccauuugaacucaucauuguuuaauguggcuacaauacagaaccauacaaua

SEQ ID NO: 4160801 - RNA, 68 nt, Human
uguugaacagucacccugggaguuuggugagcagcucucgcuccaugcuuucagggucacugucaaca

SEQ ID NO: 4160802 - RNA, 66 nt, Human
uguugacuugaaccaaaguguugugaaacuggccaaguuguaaacauuuuaaaggucaaguccaca

SEQ ID NO: 4160803 - RNA, 62 nt, Human
uguugagcagucagccauguuccugggauuauccuuccuuuggagcaucugucugcugugca

SEQ ID NO: 4160804 - RNA, 81 nt, Human
uguugauguugguaaauaagagcacuggcuuuggaguauggcagacccaagcucgaauccuugcugugcccuucauuagca

SEQ ID NO: 4160805 - RNA, 55 nt, Human
uguugcaggccccugggguaugugccugucuaucgcgcaccgggucccagcagca

SEQ ID NO: 4160806 - RNA, 86 nt, Human
uguugccauaaauugggguaauugagcaguuuuuaaaacgagcaugaauaacugcauuuaacaaauacucuaucuucaugacaaua

SEQ ID NO: 4160807 - RNA, 69 nt, Human
uguugcccaggcuggagugcaguggugcuaucucggcucacugcaaccuccgccucccggguucaagca

SEQ ID NO: 4160808 - RNA, 85 nt, Human
uguugcuaggaaaaccauuugagaaccuguguccuuuagcaaaauaaaauggagaaaggauaagguuaucaauuuuuguucaaca

SEQ ID NO: 4160809 - RNA, 89 nt, Human
uguugcuuuaagaaauacagaaagggcugaauguggauguauugcgugagcuaauuuuuuuguauuauuauuauuuuuagaagucaaca

SEQ ID NO: 4160810 - RNA, 55 nt, Human
uguuggaauuaggauacagaggagugcaggcaucauugguccuugaauuccaaua

SEQ ID NO: 4160811 - RNA, 105 nt, Human
uguuggaauuuuaacuguucaaacuaguuaaaagucagaaauagucaauuccuauuuggauugcuucuaacguuuaacuaguuugaauaguugucugugaugaua

SEQ ID NO: 4160812 - RNA, 92 nt, Human
uguuggauauucauguuuuagaaagacaaugggaagugcugauuuuuguuucuuuuuccagaaucuucucuaugcagcagaaacuccaaaca

SEQ ID NO: 4160813 - RNA, 92 nt, Human
uguuggauuaauugaaaguuacaguuaugaaacucacaagaacagcccgaccaauuuuucugugggcuuuagagauggugacuuuucuaaua

SEQ ID NO: 4160814 - RNA, 70 nt, Human
uguuggcaggaggcuucaguuccucaucacaugggccucuccauaggauugcuugaguguccucacaaca

SEQ ID NO: 4160815 - RNA, 108 nt, Human
uguuggcagugaugucuggcuucggaggguacaguccuggcucccagacaaggggcggggagaacacuguguccuuccagaggcuguaccacacucccacugcuguca

SEQ ID NO: 4160816 - RNA, 102 nt, Human
uguuggccagaugcaguggcuuacgccuguaaucccagcacuuuggaagccugaggugggcggauucaugaggucaggagaucaagaccaucuuggccaaca

SEQ ID NO: 4160817 - RNA, 88 nt, Human
uguuggccaggauugucuugaucuccugaccuugugaucggcccaccucggccucccaaaguacugagauuacagacgugagccacca

SEQ ID NO: 4160818 - RNA, 69 nt, Human
uuggggggaucuaggggaugggugaggaauggcccagcccagucccagccggugccugggucccaacag

SEQ ID NO: 4160819 - RNA, 85 nt, Human
uuggggguggcuuuuucaggacacuuggcacaaggucacagauauuuguggcuuuggaauggaguucugcccucggcacccccag

SEQ ID NO: 4160820 - RNA, 62 nt, Human
uugggggugggaauuaucaugcuccaguacagaguggauggaugaaugauuucuacucuuaa

SEQ ID NO: 4160821 - RNA, 114 nt, Human
uuggggguuggguuuuauuugcuggagugggggguccgucucagugcauccuccuggauuccccauuaggacgccccgcccauacauccagccuccucucccggauacccccag

SEQ ID NO: 4160822 - RNA, 80 nt, Human
uugggguaagaggacaaggccuugcaauucugaguaggauuuuuauuaagaauaucuccaagccuucuccucuucuuuaa

SEQ ID NO: 4160823 - RNA, 64 nt, Human
uuggggucuucugugcuuugcaagugagugcaccaccacaguuugcuuuacggcaaggccccag

SEQ ID NO: 4160824 - RNA, 67 nt, Human
uugggguucacaacacccggcuguccccagacuuguguccagggaagauaguguugagggcccucaa

SEQ ID NO: 4160825 - RNA, 66 nt, Human
uuggguaucuauuaagaaaacagccauuucaucacggcucguaaaaauugguucauggaugcccaa

SEQ ID NO: 4160826 - RNA, 114 nt, Human
uuggguauuauuuuauucucauuuugcagcugaggaaauugaagccuaaagaaguuaaauaauuugcugaaaauuccauagcuaguaaguguuggaguugagauucaaacccag

SEQ ID NO: 4160827 - RNA, 129 nt, Human
uugggucagauguccaucccuuacccaggcuuuacagcuggcccacugugugguccauucccaaccauggguccaucacugugggccaggaggcagagucguguaagaagaacuguauuaauggcuuga

SEQ ID NO: 4160828 - RNA, 64 nt, Human
uugggucaggaauccagacagggcacagugggaauggcugucucugcuccauuuacuggaccaa

SEQ ID NO: 4160829 - RNA, 99 nt, Human
uugggucuaguuguuaaagugcacuuuauguuuuguuuucaauguguuacauugugauuagagaauauagaguaugccauuuuaaaauuauagauuuga

SEQ ID NO: 4160830 - RNA, 92 nt, Human
uugggucucuccaccgcccccugugagcggcuggaugccuggaggaagcuggagaggcuggccagugcugcagugggccgggacaggaacaa

SEQ ID NO: 4160831 - RNA, 88 nt, Human
uugggugaaacacugggagaaguggagcugcuagguaauaggauaaaugugcacuuuacuuuucaaaaacugccagaguuuuccacaa

SEQ ID NO: 4160832 - RNA, 75 nt, Human
uugggugacuaacuugacaggacaugaggaaucucuucaagaggaaucagauuuucuucaggauacgucauccag

SEQ ID NO: 4160833 - RNA, 66 nt, Human
uuggguuagcuuaucuauacagacuuuuuaacucuaaaauguaacuuuauaggugagaaaacuuaa

SEQ ID NO: 4160834 - RNA, 103 nt, Human
uuggguuaggcugggagugggacagggcaggaaagguucagugauugaaaauugcuuuuuaguucccugaaacuuuuggccacuaacuuugagcauaucccag

SEQ ID NO: 4160835 - RNA, 73 nt, Human
uuggguuaguugagaauauuuuuuaaaauuagggcaaaauauuaaugcuaaagguguucuguauuuaacucag

SEQ ID NO: 4160836 - RNA, 60 nt, Human
uuggguuuuugggagacauuuucucaaaaaaaugagauucugucauuucaagaaaaacaa

SEQ ID NO: 4160837 - RNA, 60 nt, Human
uugguaauaugauggucuccuugccugaacuguucuuugcaagggauuucaugucucuaa

SEQ ID NO: 4160838 - RNA, 130 nt, Human
uugguaccuuauagggacuuaguauauagcuuuuggaaaguuaauucuuacugaauuuugaugauacuucuuguuucauguaaauguggaugcuuccguuaugugaguccuaagauuugggauuuaccaa

SEQ ID NO: 4160839 - RNA, 61 nt, Human
uugguaggggacuagaguccaguguggauauaugcagggcuaaacaaguucccacuaccag

SEQ ID NO: 4160840 - RNA, 56 nt, Human
uugguauaauacaguaaguguuguacaguuuacaacaguuuauaguguuaucuuga

SEQ ID NO: 4160841 - RNA, 62 nt, Human
uugguauauugugcuacuuuauguccacuucuccguggacuuggagagaauauauauaccaa

SEQ ID NO: 4160842 - RNA, 88 nt, Human
uugguaucagacuaauuauagagucuuggcugagaacaagaauauaaauaguguucuuggucucucucaguggcucuguagacaccaa

SEQ ID NO: 4160843 - RNA, 76 nt, Human
uuggucacaggccacggugauuuccuagcaaaggcucaaagaccuuggguuccaagucacugaagccugugacuga

SEQ ID NO: 4160844 - RNA, 65 nt, Human
uuggucacugaguccacugucaugagccacacugugugguuugaaugacaugauucaggcauuaa

SEQ ID NO: 4160845 - RNA, 56 nt, Human
uuggucacuugcuaugugccaaagauguuucucagagcucauagcuuggugaacaa

SEQ ID NO: 4160846 - RNA, 58 nt, Human
uuggucagaugugucuccuccuccucaaccccagagggaggaaggagaaucugagcaa

SEQ ID NO: 4160847 - RNA, 57 nt, Human
uuggucagcuaauaaggacagguagacuugcuccuaacugcuuagcuuccaggccaa

SEQ ID NO: 4160848 - RNA, 81 nt, Human
uugguccaugaguccaggaagaaacagucuuuauauaauccuuuccaugucuccugcugucuccuccugucucuugaucag

SEQ ID NO: 4160849 - RNA, 57 nt, Human
uugguccugcagaggggucuggcuugugacaagggagaucccuacugccaggacgag

SEQ ID NO: 4160850 - RNA, 68 nt, Human
uuggucuguaugccuuggugcuagaagugauaagacuuagguaauggaaagccagagcauaucuccag

SEQ ID NO: 4160851 - RNA, 59 nt, Human
uuggucuguuauuuccuugaggaugggaauuaucccuaauaucuuggaguaaugaucaa

SEQ ID NO: 4160852 - RNA, 83 nt, Human
uuggugaucccagggagcaggcucuguccauccccugcauaaagccagagagggcaccgccugcaccuguggcauuuugccag

SEQ ID NO: 4160853 - RNA, 64 nt, Human
uuggugauuacacagcaguaauuucaggacuguuuuccuuaggaauccggaugguaauuacuaa

SEQ ID NO: 4160854 - RNA, 76 nt, Human
uuggugccucuuagaaagaaacacacuggagccuguuauuuucaguaacccugcuguucagagagaaaagcaccaa

SEQ ID NO: 4160855 - RNA, 79 nt, Human
uugguggaagcagggacaucaguuaggaggccauuauaauacaguaauccaggagaaaacugacggugguuuguaccag

SEQ ID NO: 4160856 - RNA, 83 nt, Human
uugguggaggaugaaaagaucuccccuucaaagaguaugugaggcauaguuuuuugauaauagauaugcauaccuucucccga

SEQ ID NO: 4160857 - RNA, 65 nt, Human
uugguggcaauuaaguuuaucagagguugugagaucaagagcagccauauuuacauugucaccga

SEQ ID NO: 4160858 - RNA, 105 nt, Human
uugguggcaggaccuggagucucucucucucaggccaggcgcuauccaugguuucuggauaaagcauccuuugugucugggggagugacauccucugcucagcga

SEQ ID NO: 4160859 - RNA, 67 nt, Human
uuggugggagagaugaggguugcccauagacugaauuaaagaggaggcccugguuucaacucaugaa

SEQ ID NO: 4160860 - RNA, 101 nt, Human
uugguuauugacuguucugugaauccuggguuccuuggcucaugggagcuucaauguggcuuuucuggccaggaacuugccugacauuuucaauaagccaa

SEQ ID NO: 4160861 - RNA, 64 nt, Human
uugguucagaccagguccaaagcuacugucagggcagcugacagcccugugccugguuccccaa

SEQ ID NO: 4160862 - RNA, 55 nt, Human
uugguucaggacauauuugagugccugcuguauucaaggugcugugcugugcuag

SEQ ID NO: 4160863 - RNA, 82 nt, Human
uugguucuagcaaguagauacucauuuagauguccuuaagaaaagguguuaauuauaugaguaucauaucacuuaggauuaa

SEQ ID NO: 4160864 - RNA, 62 nt, Human
uugguucuccuugagugucccaggggaggcaacugcugugcugauucucaggugagagcugg

SEQ ID NO: 4160865 - RNA, 70 nt, Human
uugguucuucugcuucugggaugauggaguaggccuacuuuuuccuauuccucccaguaaguacaacuaa

SEQ ID NO: 4160866 - RNA, 75 nt, Human
uugguugugcuuguuuuugacccaaauguucacuuuagcccauggucugaucuuuucaaagacaagcuuacucaa

SEQ ID NO: 4160867 - RNA, 78 nt, Human
uugguuuacugaauuccuggaaaugaacuguuuuaagaguuuguacauuucagaaauucauggaguucagaaugccaa

SEQ ID NO: 4160868 - RNA, 62 nt, Human
uugguuugguuuuucugucugcuuaauuauauguuuugauuugcauuuagaaagaucacugg

SEQ ID NO: 4160869 - RNA, 80 nt, Human
uuguaaaaugucagcaguaucucuaucucagagucguuguaaggauuuccugagaugggaugugcacuuggcagugucga

SEQ ID NO: 4160870 - RNA, 59 nt, Human
uuguaaacuggauagaccuauuuauucaauaauauaaaugggaauauucuguguuacaa

SEQ ID NO: 4160871 - RNA, 63 nt, Human
uuguaacaguagcugucagcucauaacucauuggagaagggcugaauuuguugcauguaacag

SEQ ID NO: 4160872 - RNA, 69 nt, Human
uuguaagaguuggaauuuauuuugggaggcuuuauaacccuuacaagcuaauuguuucagcuaauacag

SEQ ID NO: 4160873 - RNA, 58 nt, Human
uuguaagucaaagaggcuaagguuauuugaguaaguaaccugaguuuuuuagaugcaa

SEQ ID NO: 4160874 - RNA, 60 nt, Human
uuguaagucacaccagggcaggaaguagaauagagauuugagcccaaguguaccugacaa

SEQ ID NO: 4160875 - RNA, 64 nt, Human
uuguaagugucuguaagcuuauuguguuguaaaccaagccugacagcacaauagacaccgauaa

SEQ ID NO: 4160876 - RNA, 95 nt, Human
uuguaaucaugccaaaauuaauaacauuguguaucacccagagagacucucagggaggaaagugaaaugguuauuaacuuggguuauuauugcag

SEQ ID NO: 4160877 - RNA, 65 nt, Human
uuguaccuucucuugacaaaugucaaaaugucauuucucaucacaaaugucuagagaggguguga

SEQ ID NO: 4160878 - RNA, 92 nt, Human
uuguacucuccucuuuaaacguuuucuuucauaauaaauagcagagacaaaaguguuucuauugggaagugugagaguaaagagauauacaa

SEQ ID NO: 4160879 - RNA, 75 nt, Human
uuguagccacucacgguuugcaucaagaguguuuuuuguaacugccucuggacuugggacagugaguaggaucaa

SEQ ID NO: 4160880 - RNA, 67 nt, Human
uuguaggaggucaaaauuguaucaggcuccaucuaugggucugagaacauaaauugacuucuuauag

SEQ ID NO: 4160881 - RNA, 81 nt, Human
uuguaggauagggaagaaagcacacaaacuugagugaguuauucuccaauuaauuuuauuugcuuauuccuucucaaauaa

SEQ ID NO: 4160882 - RNA, 64 nt, Human
uuguaggcagugguuggaagagaacuccaucagauguccucacacccauaccacugacccauaa

SEQ ID NO: 4160883 - RNA, 97 nt, Human
uuguagggaagauaacauuuuugagauagucuuguaagaauggguagaguuaccaaagucugaagauauucuugcagggaaaauggaauuaacgcaa

SEQ ID NO: 4160884 - RNA, 61 nt, Human
uuguagguauggaggggacuagggauggugucauuuuacauucagccuucucauccugggg

SEQ ID NO: 4160885 - RNA, 84 nt, Human
uuguaggugcaggguccaucuuucaucacugccaugcgagugagcugugaagugggaggggaccguauauggacuggaccucag

SEQ ID NO: 4160886 - RNA, 123 nt, Human
uuguaguagcccagauaggcugaauugaaaccuuauguuauuuuguuuuguucuauucuggcuuuggucugaaagggcaggcagagaucauauaguguuuuucuauugcacuaguuuuuacaa

SEQ ID NO: 4160887 - RNA, 73 nt, Human
uuguaguccuucaggaaauguauaauuuuauaaaauuuaaaguuuugugaaguuauuuuuucucaggauccaa

SEQ ID NO: 4160888 - RNA, 89 nt, Human
uuguaguggccauccucgaagcgcugacucacagcuugcaggccgcaggguccugggugcaguugcuucccaucuggcccacacugcaa

SEQ ID NO: 4160889 - RNA, 75 nt, Human
uuguaucugugucguucugugcucuggcagcuagaccagcucucacuuacagcaacggaggcgacauaaaagcag

SEQ ID NO: 4160890 - RNA, 80 nt, Human
uuguaugaucuccagagguagggagcuauguuauguucauacaaacauuuaguuucccauuuaguuaaagaucacuacaa

SEQ ID NO: 4160891 - RNA, 59 nt, Human
uuguauucagaaggaugaucuaguagucauuugacauuuaccauugcuuuugaauacaa

SEQ ID NO: 4160892 - RNA, 114 nt, Human
uuaugaaaacaagcaaagggccaaauuugcucugaaaguuuuaguguaugggccaccgguauacacaaaacugauacacaggaagcaauuucagagcaauguaugaugucauaa

SEQ ID NO: 4160893 - RNA, 59 nt, Human
uuaugacagggucuuuauuuuauuccucuguaugagucaagguaggaucggugucauaa

SEQ ID NO: 4160894 - RNA, 77 nt, Human
uuaugagggcagcauugccuuucuccaguuacaucaucgacucccuaaagcugagauuccccaguguguccucauaa

SEQ ID NO: 4160895 - RNA, 70 nt, Human
uuaugauuaggugggguuguuacuguuuaugaaacucaucugucaaauagggugccucauuuaauccuga

SEQ ID NO: 4160896 - RNA, 70 nt, Human
uuaugccuggaaccuuucucuuuggcgggugccaggaagcugagagagaggaaucucaagccagguauga

SEQ ID NO: 4160897 - RNA, 90 nt, Human
uuauggaauuauaaaaucuuaauaggcauugagcacuugcuagguccaagcauagugcugagugauugauauuuuaguuagucuucauaa

SEQ ID NO: 4160898 - RNA, 62 nt, Human
uuauggcaaaugaaagaaagccagucucagaaggcgaugggcugggugauucauuuccauaa

SEQ ID NO: 4160899 - RNA, 66 nt, Human
uuauggcuucuuguguuacugugggagaaggaaacuuuauacgcacaugcacagguugagcaauaa

SEQ ID NO: 4160900 - RNA, 65 nt, Human
uuauggucggguuggauggagugugagcacaaguaagagugugccauuucuaagccuggcuauag

SEQ ID NO: 4160901 - RNA, 93 nt, Human
uuauggucucaucacuggauuaaaaaauguaauaauauucucaguuuaaagaaaaugcacagguuuuaaauccucugugauaagggcccauga

SEQ ID NO: 4160902 - RNA, 94 nt, Human
uuaugguuauugacucugccaucaguaauucucucacguugugauuccacaguguuccuuuguugugacuggcaaagccacauaauagcuauaa

SEQ ID NO: 4160903 - RNA, 75 nt, Human
uuauguaagaaucauauuucucucugugcagaucacuuacagaagugucuguuaacaggagagaaugauacauaa

SEQ ID NO: 4160904 - RNA, 69 nt, Human
uuauguauuaucugugacugcuuugcacuacaaugucagagcugaguaguugcugcagagaauacaugg

SEQ ID NO: 4160905 - RNA, 64 nt, Human
uuaugugcagaggcuuccuugacucugucuccuaacuuggugagucuuagagucugugucauga

SEQ ID NO: 4160906 - RNA, 55 nt, Human
uuaugugggguggaugaauuugugagugaaucacaucaggugucuccccaagugg

SEQ ID NO: 4160907 - RNA, 72 nt, Human
uuauguuccuuacgccucuugccugggcuucaaagggaagaaguacaggaggcaaggguguaaaggaaauga

SEQ ID NO: 4160908 - RNA, 59 nt, Human
uuauuaagauaacacaaugcaucuaggacaggguccagagcuuuccaguuucuugguga

SEQ ID NO: 4160909 - RNA, 72 nt, Human
uuauuaggguggugcugguaaaacuacagcuauuuguguaguuugcgaaauuccugccuccacccuguguga

SEQ ID NO: 4160910 - RNA, 61 nt, Human
uuauuagugcuuuguuauuuuaauagaguuauauuucuaguggaaaaauguggccuaguga

SEQ ID NO: 4160911 - RNA, 61 nt, Human
uuauuaugguauuucuuugcaguugauggguccucagcaggcagaggaaugguauacauaa

SEQ ID NO: 4160912 - RNA, 61 nt, Human
uuauuauugauucgcucucaaacugucaaucuggggacagcucugaggcagucagugaugg

SEQ ID NO: 4160913 - RNA, 57 nt, Human
uuauuauuuuguguacagcaaagucacaguuaaaggaaaaugugcauagaauaauga

SEQ ID NO: 4160914 - RNA, 73 nt, Human
uuauucagcuguguaucccagggccuaguuuaguauagccucugcaaggugcuuaucuauauuuguugaauga

SEQ ID NO: 4160915 - RNA, 130 nt, Human
uuauucauaaguuauuaguucuaauuuucuuguauuuuauuagagaugccgcuaaguaggaaauuaaguggucuccccaguagaauaacaaaggucguaaguagagaauuuagaucauugcuuacuauag

SEQ ID NO: 4160916 - RNA, 79 nt, Human
uuauucuuuugcaccuuuuaaguaaugcgcuacagggcuguagcuaagaacauggacuucugaaggugugucaguuuga

SEQ ID NO: 4160917 - RNA, 77 nt, Human
uuauugagcauggaucaugugcugggugcugggcuauauauuggugggggccagagagacugauacaugcuugauaa

SEQ ID NO: 4160918 - RNA, 89 nt, Human
uuauugaugcuguuaaggccagaggugguacauagcuucucaguucugagauuuuaguaucauuuuuggcauagaauagauuucaauaa

SEQ ID NO: 4160919 - RNA, 88 nt, Human
uuauuggcuaacuguguauuucuaguaauucaaagucuaguguuuaauuuacauaaugaaaugcagaaaucaauuacuuggucaguag

SEQ ID NO: 4160920 - RNA, 57 nt, Human
uuauuggucacggcuaggaugcuauccuuuaggcauccaaucuaguaugauaaauga

SEQ ID NO: 4160921 - RNA, 86 nt, Human
uuauuguaugcuguguaggucuguuugggaaaugugacugccuggucuacuguuaaauuuuagaaacagacucuggcugucaauaa

SEQ ID NO: 4160922 - RNA, 130 nt, Human
uuauuguuuuucacagcauaucuuaugguacaaugauggauaguggcgaauauuuaucucuucauuaucucuuaaaaucggcgucacaucuccauguguuguucauugcuauaucugaugucuacaauaa

SEQ ID NO: 4160923 - RNA, 89 nt, Human
uuauuuaaaaaauaauaauaguaaaugaaagcaauuuuagagguggaaaauaccuuagaauggaaucauuugcauuauuugacaaauga

SEQ ID NO: 4160924 - RNA, 98 nt, Human
uuauuuacaaaaauggcacuuguguauguucuacuuaauauuacugugguaacaugaugguauuacuucuagacacaagcaugugccuuggugaauga

SEQ ID NO: 4160925 - RNA, 81 nt, Human
uuauuuauauuauguugggcaggggucagcaaacuauggccugcaugccaaaucuggccccuugccuauuuuuguaaauaa

SEQ ID NO: 4160926 - RNA, 93 nt, Human
uuauuucucagcuucucugaaaucugaagcauuuauuaagaaacaauaaaauaaauauaaaggcuuuaaagaaccagaacuagugaguuauga

SEQ ID NO: 4160927 - RNA, 99 nt, Human
uuauuucuguuucacuguuguuuuucuuaaaguauauuuuaacuucagaauucuauuuugacaguuuauuuugcagaaugcuguguggcucggaaauga

SEQ ID NO: 4160928 - RNA, 58 nt, Human
uuauuuggaagaucaggcagauuacauagcauuuugucugccugaaauucacauguaa

SEQ ID NO: 4160929 - RNA, 55 nt, Human
uugagaugcacuuuugcacuuguuacccaggcugagugcaauggcgcaaucucgg

SEQ ID NO: 4160930 - RNA, 102 nt, Human
uugagauggagucuagcucugucaccaggcuggagugcaguggcacaaccuuggcucacugcaaccucugccucccggguucaagcgauucuccugccucag

SEQ ID NO: 4160931 - RNA, 103 nt, Human
uugagauggagucucacucuguugccuaggcuggagugcagugacacaaucuuggcucacugcaaccucugccucccggguucaggcgauucuccugccucag

SEQ ID NO: 4160932 - RNA, 102 nt, Human
uugagauggagucucgcucuguugccaggcuggaguucagugaugcuaucuuggcucacugcaaccuccaccucccggguucaagcgauucuccugccucag

SEQ ID NO: 4160933 - RNA, 101 nt, Human
uugagauggagucucgcugucgcccaggcuggagugcaguggggcgaucuccgcucacugcaggcuccgccucccggguucaagccauucuccugccucag

SEQ ID NO: 4160934 - RNA, 72 nt, Human
uugagauggagucucgcuguguuccccaggcugguccugaaccccugggcccaagagagucuccaaccucag

SEQ ID NO: 4160935 - RNA, 103 nt, Human
uugagauggagucuugcucugucacccaggcuggagugcaggggugcgaucucggcucacugcaaccucugccucccggguucaagugauucuccugccucag

SEQ ID NO: 4160936 - RNA, 103 nt, Human
uugagauggagucuugcuuugucacccaggcuggagugcaguggugugaucuccacucacugcaaccuccaccucccagcuucaagugauucuccugccucaa

SEQ ID NO: 4160937 - RNA, 104 nt, Human
uugagauggaguuuuacucuuguugcccaggcuagagugcaauggcgcgaucucggcucauugcaaccucugccucccagauucaagugauucucccauuucag

SEQ ID NO: 4160938 - RNA, 56 nt, Human
uugagauggaguuuugcucuuguugcccaggcuggagugcaauggcaccaucucag

SEQ ID NO: 4160939 - RNA, 101 nt, Human
uugagaugggagaauugcuugaacccaggaaguggagguugcagugagccgagauuauaccccugcacuccagccugggugacagcgagauucugucucaa

SEQ ID NO: 4160940 - RNA, 82 nt, Human
uugagauuugauugagccuccugacccucuguggguaccacucccauuuaaguggaggccaggaaggcucggagaguuuuag

SEQ ID NO: 4160941 - RNA, 91 nt, Human
uugagcagagucaaguaagaugcagcuuuacaauaagggaggcuuuucucuucccucuccguuauacucuaucuugugaacuucuguucag

SEQ ID NO: 4160942 - RNA, 67 nt, Human
uugagcccaggaugucgaggcugcagugagcugugauugcaccacuguacuccagccugggcgacaa

SEQ ID NO: 4160943 - RNA, 88 nt, Human
uugagccccuugaaaugacaggagcacaucaaggcaaccaaacuccuuuuucacugugguaagcuuaaauuauuuuaagggagcacaa

SEQ ID NO: 4160944 - RNA, 78 nt, Human
uugagcccuuguacauaaugaaaggaggcugugcauaaaagccaguuauucauuuauucuguacauuagaggcuucaa

SEQ ID NO: 4160945 - RNA, 71 nt, Human
uugagccuggaaucuuacuuguguuaacucucauccaugaguuuauguugcaagaguuccaaacuguucaa

SEQ ID NO: 4160946 - RNA, 81 nt, Human
uugagcuaaugagagcacugucaccuaaauuuucauuguuuuaagagcaaguggaggcugacaguuuccuuucaagcuuga

SEQ ID NO: 4160947 - RNA, 56 nt, Human
uugaggacugcuaagcauuugaguaauuuuauaacuaaaugcugagaaguccuuaa

SEQ ID NO: 4160948 - RNA, 56 nt, Human
uugaggaggugggcacacagagucagcauccacucgauucuuguuccauuucccag

SEQ ID NO: 4160949 - RNA, 103 nt, Human
uugaggcagagucucgcucugucacccaggcuggagugcaaugacgccaucucggcucccugcaaccuccgccucccagguucaagugauucuccugccucag

SEQ ID NO: 4160950 - RNA, 77 nt, Human
uugaggcagguagucuuguuaucccaguuuuacagaucaggaaacugaagcacagagaaacuaagacauuugcccaa

SEQ ID NO: 4160951 - RNA, 60 nt, Human
uugaggccccauggaugagaacauucuguaauucucuguguacuuguuuauagggcccag

SEQ ID NO: 4160952 - RNA, 71 nt, Human
uugaggcucagagacuuuaaguuucuaucaacauauauagugagccugaggcuugaggcuccugaguccaa

SEQ ID NO: 4160953 - RNA, 67 nt, Human
uugaggcucagggacagugagugacugauuugaccaaacggauuuaaacucaaaucaccugccucaa

SEQ ID NO: 4160954 - RNA, 59 nt, Human
uugaggcucugugaugugccaggcacuguucuaagugcuggggacauagcaggcagcaa

SEQ ID NO: 4160955 - RNA, 59 nt, Human
uugagggagcacagauucuuauugccucacuggagagaaacuuagacugugcccuuuaa

SEQ ID NO: 4160956 - RNA, 55 nt, Human
uugagggcaagaaggcgauuuagugugacagaucgaguccuuccaauguccucag

SEQ ID NO: 4160957 - RNA, 55 nt, Human
uugagggcaagucuuuuccauaccuaaauaacaggggaaaaguacuccuccuuaa

SEQ ID NO: 4160958 - RNA, 112 nt, Human
uugaggucuggaucagguaucugagugucucuugagcucaguucugaugucucugacaucaagugguucuccagguugcacucacaacugaugcuuaauaaaagaauauuaa

SEQ ID NO: 4160959 - RNA, 74 nt, Human
uugaggugaaaauggaaaaucaacugcagaauauaugguauucagaggguugaauuuuuagggcuuugccuuaa

SEQ ID NO: 4160960 - RNA, 56 nt, Human
uugaguagaaaggguuguauagugagcaaauuauucccagccucuuucuaucucag

SEQ ID NO: 4160961 - RNA, 68 nt, Human
uugagucacuuuccuggaggcagcacuucaaguccaauuagaguggcagccgagcaggagauggccaa

SEQ ID NO: 4160962 - RNA, 99 nt, Human
uugagucaggagaaacacaagcccagguggcagagguuucagugagcugagaucacaccauugcacucuagccugggcgauggagcaagacugucucaa

SEQ ID NO: 4160963 - RNA, 59 nt, Human
uugaguccuagcccuggauccaucauuuaagaacugaaugauucuggcaagugacuuaa

SEQ ID NO: 4160964 - RNA, 59 nt, Human
uuucccaucaaauccuuggaguuuuuguugauguuuagagagcccacggaggugugaaa

SEQ ID NO: 4160965 - RNA, 77 nt, Human
uuucccaugggguucagccuugugccagccuuugggguuccagaggugaacaggaggcuguuucuccccucaggagg

SEQ ID NO: 4160966 - RNA, 130 nt, Human
uuuccccaccaucccugguaucuaccaaccuuauuuuccccuuucuuugucauacccuaugcucuugggggguagugaggugaaagagaggugauguuuaaggugagaagaucuagagaugguucucuaa

SEQ ID NO: 4160967 - RNA, 82 nt, Human
uuuccccugaauuuuuuauuggaaaguuacuuacaaguugcugaaacuuacaaguucccuuucucagguagauugggugaga

SEQ ID NO: 4160968 - RNA, 81 nt, Human
uuucccuaagggaagguuccauuauacuucagcaguggaaagcaucuaguagaauguaugcugugguaucuucucaggaag

SEQ ID NO: 4160969 - RNA, 80 nt, Human
uuuccgaguccuuaaauauauguugauacuaauucuggguaagguuuauugcuuaugggaacaaugugaaggauaggaag

SEQ ID NO: 4160970 - RNA, 69 nt, Human
uuuccgcucaucugcaugcaucuuagagagagcugcccugagguggcugauguagcagugugcugggaa

SEQ ID NO: 4160971 - RNA, 58 nt, Human
uuuccuaacacaaugcaugagauauacaaauagacaugucauguuuugugauuggaaa

SEQ ID NO: 4160972 - RNA, 75 nt, Human
uuuccuacugcccuauacacacaagccuauuuuauuacuuuguuugaagacugggugugucuaauguaguggaaa

SEQ ID NO: 4160973 - RNA, 59 nt, Human
uuuccuacuugaacucaauucuccuguuuuagcaggaaaguucucuugcgugugggaaa

SEQ ID NO: 4160974 - RNA, 58 nt, Human
uuuccuacuuucuggggagguauaggaagaaugggccuucucagaucgaguagugaga

SEQ ID NO: 4160975 - RNA, 72 nt, Human
uuuccuagaaugguuagaaaauauguuggcagcaaucaguauaauuuaauauuuucauaacauucuaggaaa

SEQ ID NO: 4160976 - RNA, 67 nt, Human
uuuccuagauguuaguuagucuugacaauaaggccuauauucaagauugaacuggcagauaaggaaa

SEQ ID NO: 4160977 - RNA, 82 nt, Human
uuuccuauuucuaaacaccacucagguuuguggucaguuuucgagaucuagaaaucuuuccugaaguguuuucaauaggaga

SEQ ID NO: 4160978 - RNA, 84 nt, Human
uuuccuccaucucugcaucauuuuucagagccggccaguuucuauggcaacgguuagauugaaagaugagcggcgagcaggaga

SEQ ID NO: 4160979 - RNA, 84 nt, Human
uuuccuccugcaagacuccucacuuucucugggaaaaaaauuugggggaaaguugagaggaucuugauauuauuguaguggaaa

SEQ ID NO: 4160980 - RNA, 63 nt, Human
uuuccuccuguacuuuuauauucgcucgaagucaggugaguauauuuaccauugggugggaga

SEQ ID NO: 4160981 - RNA, 55 nt, Human
uuuccucuucgauuaaguuugggauccucaucugcauuugacuuggagagagaaa

SEQ ID NO: 4160982 - RNA, 71 nt, Human
uuuccucuuguugucacacucugucuaauuuugcugaguuacuggcaggacauugacuacagugauggaga

SEQ ID NO: 4160983 - RNA, 98 nt, Human
uuuccucuuguuucucuuucugcucccucauuaaaugucacaauuccuuggacaaugaugcagaugaguaagauuucugggguagacagugggggaaa

SEQ ID NO: 4160984 - RNA, 55 nt, Human
uuuccugcuccauuugcugagcuccccaaagaagggaucagggagggagaggaga

SEQ ID NO: 4160985 - RNA, 64 nt, Human
uuuccuggaguggagucuguuguuugcaacuaagaacaauaauugauaugccacccaaaggaag

SEQ ID NO: 4160986 - RNA, 84 nt, Human
uuuccugguuuuagaaaagagagcucagcuaaguugacacacaguuaaauuagucaagcuucucuguguucaaaaaucagggaa

SEQ ID NO: 4160987 - RNA, 82 nt, Human
uuuccuguaucagauuuuccacagacuggaagggaaauucccuucuauugggacuuuugugaagaaugccuggcaccggaga

SEQ ID NO: 4160988 - RNA, 62 nt, Human
uuuccuguuuugcaacuggcugccauacucacccgagaacuggcuuuauugcagugcugaag

SEQ ID NO: 4160989 - RNA, 56 nt, Human
uuuccuucccuccugggccuucagccaggccugcugaggaacuggaagggaggaaa

SEQ ID NO: 4160990 - RNA, 87 nt, Human
uuuccuucuuuuuaaaggcugaguagaaucccauuguguagauauuuaauggcucaauuuugaaucaccuuggaagaagcaaggaaa

SEQ ID NO: 4160991 - RNA, 129 nt, Human
uuuccuuuaaucagggcgauuaaagaugccuacucacuuuccauucaagcaccuacugucuucaagucgggguggugaugugggcgggaaggaaaagcgcauuuuuccaugcuuuuguacuuaagguaa

SEQ ID NO: 4160992 - RNA, 118 nt, Human
uuuccuuuagucuuggaaauucagcucucaaaagauuauuuccucgcaggcaccuggcuuacaaucaggaugagcugccugugggugaugauuugauuuucuuugaaauauggggaaa

SEQ ID NO: 4160993 - RNA, 70 nt, Human
uuuccuuuauuauuaaauccauaggaagucuauauuacuuuacuuuggaauauuuuauugagaagggaga

SEQ ID NO: 4160994 - RNA, 89 nt, Human
uuuccuuuauucauucauuugccuacacaguuuuugauuggcugcacugcacuaggcacugcuguaggcagugaggagauggcaggaga

SEQ ID NO: 4160995 - RNA, 61 nt, Human
uuuccuuucccucuuucagcaaauauuuuuaugcgccuuuauuugcuggagaaaaaggaga

SEQ ID NO: 4160996 - RNA, 65 nt, Human
uuuccuuuccucuuauuuucccagugaugucuucugagauaugacaggcccaggagaaaagggaa

SEQ ID NO: 4160997 - RNA, 55 nt, Human
uuuccuuugaggguccuacacuaggcaaacugagggugugaucgucaaagagaaa

SEQ ID NO: 4160998 - RNA, 91 nt, Human
uuucgaugucuauuuuuaucucaugguuuccugucgagcauuuuaaaaaagaauuggaauggcaauucagugaaauuauagaacaugggaa

SEQ ID NO: 4160999 - RNA, 59 nt, Human
uuucgccaucuaccugcacccaagcuggcacaggcccccagcugcagcugauggggaaa

SEQ ID NO: 4161000 - RNA, 86 nt, Human
uuucgcuuccuaaagggguaaucuaaggaauuccagacuuaugccacgauuuagaaucccuugcauuaucccuuuaaaagguggga

SEQ ID NO: 4161001 - RNA, 73 nt, Human
uuucgggaaaaacugguaagacgcuugguucaaaucacuugaaaagaaaaucacuugcauaguucaccugaag

SEQ ID NO: 4161002 - RNA, 63 nt, Human
uuucgucauuuguaaaugaucaagaguucuugugcagcucugaucagaagacaaaugaggaga

SEQ ID NO: 4161003 - RNA, 71 nt, Human
uuucuaacuuaacacuccugugauuaaucuguggcuggauaguuguagaucagggaucuguuaguuggaaa

SEQ ID NO: 4161004 - RNA, 62 nt, Human
uuucuaaggccagagacugcuguuacucaaugcguuagucagucuuuucuuggcuucaggaa

SEQ ID NO: 4161005 - RNA, 63 nt, Human
uuucuacagugauuuggacaaguucaaugaggaauugaaaauauuccuugugacugugugaaa

SEQ ID NO: 4161006 - RNA, 82 nt, Human
uuucuagcauacagguaaucacacuguuauuuuaguuaaaguuagcuuaagccagagguugugugaucaguaaugcuagaaa

SEQ ID NO: 4161007 - RNA, 59 nt, Human
uuucuaggaugugaugaccugcuuaauaaaauagcaagaauguuuacacauucuagaaa

SEQ ID NO: 4161008 - RNA, 56 nt, Human
uuucuagggcaaugacucaaagcgggccucuugcuagauggagucaguucaagaga

SEQ ID NO: 4161009 - RNA, 75 nt, Human
uuucuauguacuguaauucauucaacugaagaaauacucuuucuacagguacugaaguacaugcaaguuuagaga

SEQ ID NO: 4161010 - RNA, 71 nt, Human
uuucuaugugugugauuugggauugguuguuuaaccucuaagcuauuauuuccucaucuauaaaauggaaa

SEQ ID NO: 4161011 - RNA, 66 nt, Human
uuucuauuaauauguuaauucugugaaguacuguauuucuacacgguuacaacguacuaauggaga

SEQ ID NO: 4161012 - RNA, 77 nt, Human
uuucuauuguaccuuuucucucaaacugguuuuauuuugacggauuuagcuucccuggagaaagcugcauauggaaa

SEQ ID NO: 4161013 - RNA, 94 nt, Human
uuucucagauuaagaugucuuggguuucaguuuacuucuuuaaagaaagauucagaguuaguacugaggacccagacuuucuugaugugggaaa

SEQ ID NO: 4161014 - RNA, 56 nt, Human
uuucucagcuuuccuugcaguuaugugcagucauguagcugauacacagugagaaa

SEQ ID NO: 4161015 - RNA, 92 nt, Human
uuucucagguacucuccccacuuuccugcccuugccuuccuuccaagagcucuccuggaagccaaggucagaaggagacaagcuugaagaga

SEQ ID NO: 4161016 - RNA, 119 nt, Human
uuucucauuauguccauuucaguggaaguagcauggagauaaugaaagaugcuuaauauugauugucucuuaaauguggaaauuacuguuguccacugagaaguaaauguggugagaaa

SEQ ID NO: 4161017 - RNA, 69 nt, Human
uuucucauucuguuugugaacuggcugagaggcaaaccuucuugaucuaauuuagaaauagaagagagg

SEQ ID NO: 4161018 - RNA, 65 nt, Human
uuucuccagcucagcauccuugcuuugcaaacccaaucaagccuuaggagcucugugcugggaag

SEQ ID NO: 4161019 - RNA, 129 nt, Human
uuucuccccaauaccuucugccagggguggaaucacugguuuccaggagaaaagagcucugaucaagcaauuucuccuccagagagacacaggccaccccauucugcacaguugguacaggaucagaaa

SEQ ID NO: 4161020 - RNA, 74 nt, Human
uuucucccuggagcccugaagcaucucugugauauaagcaguuacauguuuuauguuccacucaagggaugaga

SEQ ID NO: 4161021 - RNA, 77 nt, Human
uuucucccuuucuacaguacugauuucauaacuuaucuuuagguagaguggaaauuagauuuuaaaaagugaguaaa

SEQ ID NO: 4161022 - RNA, 104 nt, Human
uuucuccugugcugcuuccuggccuuaacgcuuccuggggacuuaccgucauuugcucaguuacgguuucuaugggaugaguggggaagccgcguggugaggaa

SEQ ID NO: 4161023 - RNA, 57 nt, Human
uuucuccuuacaguaaaccugugccuugugggccucaggggucacugugaggagggg

SEQ ID NO: 4161024 - RNA, 60 nt, Human
uuucuccuugugucuccuuugaguuaggcauggaaauagcuaaaggagaacaaagaggaa

SEQ ID NO: 4161025 - RNA, 81 nt, Human
uuucuccuuuccaaguuuacuacuaccugugugucuguucucaugacgcauuagagcuuugaacuucuuggaagaaaggaa

SEQ ID NO: 4161026 - RNA, 106 nt, Human
uuucucggugauggcagguuucucggugauggaagguuucucggugauggaagguuucucggugauggaagguuucucggugauggcagguuucucggugauggaa

SEQ ID NO: 4161027 - RNA, 63 nt, Human
uuucucuccuccaaaccaaagagagcccuuaguuuaagcucucuucauuuuguaggaaaggaa

SEQ ID NO: 4161028 - RNA, 93 nt, Human
uuucucucucugucacauaauuuaucuguaggaacaucuguuguguguguguauaaugucuauggaaagauuaaugugacaaagauuuggaaa

SEQ ID NO: 4161029 - RNA, 74 nt, Human
uuucucuguggauccuaauucuaacaacagauguccucauaaggacauucuuauaagagugaggcagagggaga

SEQ ID NO: 4161030 - RNA, 59 nt, Human
uuucucuugcgauaugcuacaccuauggucauagacagccaguguaagugcaagaggaa

SEQ ID NO: 4161031 - RNA, 55 nt, Human
uuucugaacucuaagggcuuugcaaugaaaacaguugauagagcugguucaggag

SEQ ID NO: 4161032 - RNA, 83 nt, Human
uuucugagcauugcuucccuguuauuuggccucuguaccuugaaccuagguugacaucaugagcagaggacaguucuuaggaa

SEQ ID NO: 4161033 - RNA, 79 nt, Human
uuucugaguaugaagcaguaggagggacaacuaccugaagcauuaggagcuugaucuguuuacugaaaccacuuuaaaa

SEQ ID NO: 4161034 - RNA, 64 nt, Human
uuucugcaagauguugucauaugcucagacauuuuacuugacauaugacuuauccuugaagaaa

SEQ ID NO: 4161035 - RNA, 90 nt, Human
uuucugcuuugcaauucuguuuucaucuaauccgucuucgacugcaguuugggggagaacaggggauuagauagcaggccaucacagaaa

SEQ ID NO: 4161036 - RNA, 61 nt, Human
uuucuggaaacuguaaagaggacaaggccagcaaauuguucauuugccugugguucagaag

SEQ ID NO: 4161037 - RNA, 68 nt, Human
uuucuggccagcuacccaucugcgucaaagugguguuggcuuuggcgccuggguggcuggauuggaga

SEQ ID NO: 4161038 - RNA, 125 nt, Human
uugcggaucucccauauaugucguggugauuuaguccuucagaccagagaguuuuccaauauuuuuuucuggauaacuguaucucuauuucuaacuucugcugagauggcugaggggaucugcga

SEQ ID NO: 4161039 - RNA, 120 nt, Human
uugcuaaacgaaaaggugaggugcuguaaugagugucacauguggagucagucuagugagcgacuguuuccagcuuucugaugcuuggggaagcaguacuguuccugaacuucccagcag

SEQ ID NO: 4161040 - RNA, 61 nt, Human
uugcuaacgagugcagauuauucaauaacagcucuugaacaguuaauuugcacaguugcaa

SEQ ID NO: 4161041 - RNA, 79 nt, Human
uugcuauugauuuacauauugucaagaaguuuauaguguauaguaccuauguuggcaauguguagcuaaugagaagcaa

SEQ ID NO: 4161042 - RNA, 57 nt, Human
uugcucauaaucuauggggcaaggcuuccgccgccuggcuccaggauggcugggcga

SEQ ID NO: 4161043 - RNA, 94 nt, Human
uugcucuaacaauagccuucauggcacaaguuugaugugaguuaaauaagguauugcaugaaaaacacgcaggcuugugccugguacagaguaa

SEQ ID NO: 4161044 - RNA, 55 nt, Human
uuucccaguuagugaagacaugaaaauggacucuguaagcacuuaaucuggggag

SEQ ID NO: 4161045 - RNA, 60 nt, Human
uuucccaucuuagcagauuaaaagggggaaacccuuauaaucucuucaagagaaggggaa

SEQ ID NO: 4161046 - RNA, 83 nt, Human
uuucccucuuauaccucucgggcagaugcuacguagaaaugucaggaacuaagccucccugggaacaaaggaugagaggggga

SEQ ID NO: 4161047 - RNA, 74 nt, Human
uuucccuguucuaucauuaaaagcuauuugcaacauaagugggaaucagaagcagagggcuugggggagggaga

SEQ ID NO: 4161048 - RNA, 76 nt, Human
uuucccuucccugaguugaagucauuagugacccagaaaacaggaagggggugaggccucauuuagggagaggaaa

SEQ ID NO: 4161049 - RNA, 63 nt, Human
uuucccuuguaccuuguggaaucacuggcaaauuguguuggaggucugaggagcagugggaaa

SEQ ID NO: 4161050 - RNA, 100 nt, Human
uuucccuuuauaauuaggaggugcuggguccuccacugcuucccagcuuuggaacuaauuucaggggaagcaggaggaggaggaccuccuagaagggaga

SEQ ID NO: 4161051 - RNA, 60 nt, Human
uuucccuuuguuaaauuggaagaguuuagaaugaaaacucuuuucacagacaaauggaga

SEQ ID NO: 4161052 - RNA, 112 nt, Human
uuuccguuaauuccugggaacucuuuucaguacucaguuuuguaguuucugaggaaaucauuauaguaaacacaagauuguguauugaauuaaagugacaggaauccagaga

SEQ ID NO: 4161053 - RNA, 82 nt, Human
uuuccguuuaugagucugccuggaucuccugcuggguaauggcagaaaagcucaggagacccagguuaggaaguaacugaga

SEQ ID NO: 4161054 - RNA, 69 nt, Human
uuuccuacauucucugaguuuuccuauuuacuauuugugcagagagagaaaggcagagagagagagaaa

SEQ ID NO: 4161055 - RNA, 77 nt, Human
uuuccuagucacauaaauuauacaauuucagcuuuuccuuuaucuggauuugugaaaagugaucauggauuagggaa

SEQ ID NO: 4161056 - RNA, 56 nt, Human
uuuccucaagucugaaacaaaagcucagagugucuucuauguuucacuuggggaaa

SEQ ID NO: 4161057 - RNA, 60 nt, Human
uuuccucagaagugucuacuauggggcuccaccucaugugagugaugcauuucugggaaa

SEQ ID NO: 4161058 - RNA, 71 nt, Human
uuuccucauuugugaagugaaggguuagauuugaugaccaccaaaguucagcccuuuucacgaaaaggaga

SEQ ID NO: 4161059 - RNA, 81 nt, Human
uuuccuccccucagagcacaguuuaugacaguucaaguuuuguucucuguucuguaagcugcuguugugcaagggaggaga

SEQ ID NO: 4161060 - RNA, 76 nt, Human
uuuccucuccccuuccgccagcucuugacgcauuuggccgugguggggagucacagggaggggaauguugaggagg

SEQ ID NO: 4161061 - RNA, 59 nt, Human
uuuccucucugcaaccuucaaagcauauuuugugucuuugugaaaguguugagaggaga

SEQ ID NO: 4161062 - RNA, 82 nt, Human
uuuccugagaugagaaagauggugagagaaauuugagguggaaaaaucaaggguuugguuuuggccaucuuccauguggaga

SEQ ID NO: 4161063 - RNA, 82 nt, Human
uuuccuggcuuuaucucuugguggauggcuuuaucucuuagucuuccuaaaagcuucaagagaagagugaguuucuaggaaa

SEQ ID NO: 4161064 - RNA, 55 nt, Human
uuuccuuguucauuugcccuauucuaaugggauggggaaugcacaaacaaggaag

SEQ ID NO: 4161065 - RNA, 72 nt, Human
uuuccuuuaauguuaucuucccuuugaugauuuaucuguuugauagagacuccaaagaagguaacaaggaaa

SEQ ID NO: 4161066 - RNA, 62 nt, Human
uuuccuuuugucccuauauccuggaagguuuguuuuuccaggaaguaaggauaaucuggaag

SEQ ID NO: 4161067 - RNA, 73 nt, Human
uuuccuuuuucaauauagaauugcauucgggcuauccauagagugccugcaauuucaaauaucagaaaggaaa

SEQ ID NO: 4161068 - RNA, 65 nt, Human
uuucgauuccuauuuggcuccuguuccuuccaaugggaacuuuguggggcugagaggaagggaga

SEQ ID NO: 4161069 - RNA, 56 nt, Human
uuucgcagccagugagcagaggagcuagugcuugugcugagcuucuagcuguggga

SEQ ID NO: 4161070 - RNA, 59 nt, Human
uuucgugacuggacaaacuuggguggcuuuaagccacggccgaugacuccagcauggaa

SEQ ID NO: 4161071 - RNA, 91 nt, Human
uuucuaaaucgcugcuacauuucucccugcaugccugccuguacacuguauacaggaucagcucagaguaaaucuauuagcaauauaggaa

SEQ ID NO: 4161072 - RNA, 104 nt, Human
uuucuaacaagauaaugcugaaucuccuuuugcaugaauguuuguugcucuuaaaaguuaucuaaugauuuggcaaaggaauccaguaauuuacuugucaggaa

SEQ ID NO: 4161073 - RNA, 71 nt, Human
uuucuaauacuguguccacuagccacauguggccauugaacauuggaaauguggcuagugagaccaagaaa

SEQ ID NO: 4161074 - RNA, 108 nt, Human
uuucuaaucaccuaaaucacuuuaagucucaucuuuuugacauggugauggucaaagauuggcacauuauucuuaucaaagcacaggauagggugcuagguggaggaa

SEQ ID NO: 4161075 - RNA, 56 nt, Human
uuucuacagaagauacacugcuguuuucauguuacggagugaauuuucccuggaaa

SEQ ID NO: 4161076 - RNA, 63 nt, Human
uuucuacagcuggugcaacuuucuaugcacagucaugccuguaaagauguuucaucugagaaa

SEQ ID NO: 4161077 - RNA, 58 nt, Human
uuucuagaaacaugacauugaucucuuuauucagagagguaauugcagguuucugaaa

SEQ ID NO: 4161078 - RNA, 55 nt, Human
uuucuagaaugacucaucugagacccgggucucagagugugagacauauuggaga

SEQ ID NO: 4161079 - RNA, 85 nt, Human
uuucuagauuuauucauuuauguacuuauucauucauuuauucagcagcuguauguuauaguuauaaaaugaggagaucuagggg

SEQ ID NO: 4161080 - RNA, 91 nt, Human
uuucuagcagaggucagaaggagcuguuuuguucagcaaagcuuuaaugcuucaugaacacacggaaagcuaaucucuggcuaguuagaaa

SEQ ID NO: 4161081 - RNA, 67 nt, Human
uuucuagcaugacacaguccucauacucaaaaaacugggggcuauugcuauuguuacuugcuagaaa

SEQ ID NO: 4161082 - RNA, 63 nt, Human
uuucuaggucuuccauacugccauacugcccccacuuccaggcagacguagggaaaccagaag

SEQ ID NO: 4161083 - RNA, 61 nt, Human
uuucuaguggguauucccuguugcauaaaauaccacagcaauagcaaaugcucauuugaaa

SEQ ID NO: 4161084 - RNA, 72 nt, Human
uuucuauacugauuugucuauacucuaggaaguccauucucccaaagaaguaguagacaagacucggagaaa

SEQ ID NO: 4161085 - RNA, 71 nt, Human
uuucuauucacauaaugauacaaagcuucugcuguuaaguggcaaagaaucguaaaguuaagugaaugaaa

SEQ ID NO: 4161086 - RNA, 69 nt, Human
uuucuauuuggcuggaugauagaacuaagaauaguauuucuuacauucuuaucucaguuauuuuggaag

SEQ ID NO: 4161087 - RNA, 60 nt, Human
uuucucacauucagaacuuuuauagauuuucuucaguaugaaauuucugauguagagaga

SEQ ID NO: 4161088 - RNA, 70 nt, Human
uuucucagaggagccagacgguccacauacaucaucaacugccucugagcuuucuggcugcucugugaga

SEQ ID NO: 4161089 - RNA, 69 nt, Human
uuucucagaugucuuacccauguugaaaacauuugugugaucacacuggguaacauaucuguuaagaga

SEQ ID NO: 4161090 - RNA, 66 nt, Human
uuucucagggagguccugugcugaaagggaacuugacucaauuccacggagaugcucccuuagaaa

SEQ ID NO: 4161091 - RNA, 79 nt, Human
uuucucaucuguuaaauagauggguuaaacagcaaauuggucuaauaugcugugauucuauacuaaagaacaugaggaa

SEQ ID NO: 4161092 - RNA, 58 nt, Human
uuucuccaauguaucagcacacauuccacuuuauuuugugagcugacccauuuagaag

SEQ ID NO: 4161093 - RNA, 59 nt, Human
uuucuccaugccacuuacuucuccaagagggaaccguagugacuuggcaugaugagaag

SEQ ID NO: 4161094 - RNA, 65 nt, Human
uuucucccugugguucuguggcuucaccgggaaaaugugggccuugcugagcuauggaggggaaa

SEQ ID NO: 4161095 - RNA, 63 nt, Human
uuucuccuucccucccuccuguguucuaauagaggagugcauuugggguaguggaagcagggg

SEQ ID NO: 4161096 - RNA, 57 nt, Human
uuucucgaagauuugggguaauauguagaccucucucaacuucaaaucuuagagaaa

SEQ ID NO: 4161097 - RNA, 93 nt, Human
uuucucuacauuuugcucagcuguuggcagcagcccuacuuucucucuccccaagcagagagagggaaacugcuaaacugcaaaaagaagaaa

SEQ ID NO: 4161098 - RNA, 116 nt, Human
uuucucucaaugggggaugagccauggucauuuuuauuguguugauugguuugaaacuuuaaugaaccuuuucagcuggauguggaagugcuaggagguauccccucucagagaaa

SEQ ID NO: 4161099 - RNA, 62 nt, Human
uuucucuccugcagcucugacuugcuuguaauuaaacgcaagucagagcugcaggagagaaa

SEQ ID NO: 4161100 - RNA, 79 nt, Human
uuucucucgauccucacucuguacaaggauugcucccaaucacugcauuuccugcaaggaguggguuuucaagaagaga

SEQ ID NO: 4161101 - RNA, 84 nt, Human
uuucucugaggugcauucugaaucuuugcagggucuaucugccuagcaggaauaugagguuaauaugagugcauuugagaggaa

SEQ ID NO: 4161102 - RNA, 58 nt, Human
uuucucugcugccugugucgaugacauccagaccauccaagcaggaaagguauagaaa

SEQ ID NO: 4161103 - RNA, 61 nt, Human
uuucucuggccucaguuuaacaggauuugccauauuuuggugaacaaugaggugagagaaa

SEQ ID NO: 4161104 - RNA, 60 nt, Human
uuucucugugugauuuggugugugcgcagaguggguacacagggcggaaagcaugagaag

SEQ ID NO: 4161105 - RNA, 68 nt, Human
uuucucuuagguaaguuaagcauuccccuugaauuuuuaauuggaagaauugauuugcuuaguaggaa

SEQ ID NO: 4161106 - RNA, 71 nt, Human
uuucucuugcuuaauuucuaaguuuuggauaauucuuaccaaaaaguuaagagagguucagucuggagaag

SEQ ID NO: 4161107 - RNA, 114 nt, Human
uuucucuuucacuuaaugcucccaugacccuggcagauaccgucacaaucugcguggacugugaggcuaccugccagggucaugggagcauacagaauguaaggcuuggagaag

SEQ ID NO: 4161108 - RNA, 79 nt, Human
uuucugaaaaccuguaggggacuguugcauccuucuucaauagagcuggguggcugaagcagucuucggggaccaggag

SEQ ID NO: 4161109 - RNA, 64 nt, Human
uuucugagaaauuaaacacuuuauaugacauuuuacagcauguagagagguugaaacucagaga

SEQ ID NO: 4161110 - RNA, 57 nt, Human
uuucugagaauauuucuguucaucgugaaauagaugaaaaaugaaguuguucaggaa

SEQ ID NO: 4161111 - RNA, 57 nt, Human
uuucugcagguauugcauaagucaggaccucccuguucucauccagugccucaggaa

SEQ ID NO: 4161112 - RNA, 96 nt, Human
uuucugcauuuguccuucuucauucagucccgaaccgacagccacaaguggcgcccgaacagggacgugagugaagaaggucugcuggagcagaga

SEQ ID NO: 4161113 - RNA, 64 nt, Human
uuucugccagguuucuggaugagucuugguaccauuugcaucaacuagauccugacuccagaaa

SEQ ID NO: 4161114 - RNA, 58 nt, Human
uuuugcuuucaaugaauuguauacugggaaaccaguuuacccacuguugaaauuaaag

SEQ ID NO: 4161115 - RNA, 65 nt, Human
uuuuggaaccaacagugcaccuggacaaagcagaaaaaaauugcaaucagggcgacugaccaaag

SEQ ID NO: 4161116 - RNA, 83 nt, Human
uuuuggaagucagggaaaauuugguagauuuuuuuaaaaggcaauaaaaugagaagauuuguuguaauuuuuagcuuccaaaa

SEQ ID NO: 4161117 - RNA, 70 nt, Human
uuuuggauguucagaugcuguuuucuuauauaggugaaaguacacaccuauaucagcaaagcauuuaaaa

SEQ ID NO: 4161118 - RNA, 79 nt, Human
uuuuggcaaaggcauucucuuuucaaauugcuuaagaacaggcauagugagauaucagagggagauguuuuucucaaga

SEQ ID NO: 4161119 - RNA, 59 nt, Human
uuuuggccaugcucaaggguauacauacaaagucuuguaucaucugggcagggccaaag

SEQ ID NO: 4161120 - RNA, 88 nt, Human
uuuuggcucaagaaaggcaaaagcugucuucacgauguaucuguugcaugcugagauaaggcuuuagucauucuacuaugaauuaaaa

SEQ ID NO: 4161121 - RNA, 56 nt, Human
uuuuggcucuugguaggucagaguggccuuuccuucaugccugccaaagcacaaag

SEQ ID NO: 4161122 - RNA, 58 nt, Human
uuguccugaggacuguuaucagagaaagaaagaucuggaaauagugccuuauggggaa

SEQ ID NO: 4161123 - RNA, 78 nt, Human
uuguccugauagcugaaacuucccauuaauuguccaagaauacugugcugguggguuagaguuugcgaagcaggacaa

SEQ ID NO: 4161124 - RNA, 109 nt, Human
uuguccuugaaacuuccacugaaagggaagaggcugaacccagugaaacuuauucagcaggguacagaguuuucuaaacuuuugugugagaagaagcccuaguggacag

SEQ ID NO: 4161125 - RNA, 56 nt, Human
uugucugaaagaucauuacauuuugucauccugagagauguguuaaauucagacaa

SEQ ID NO: 4161126 - RNA, 60 nt, Human
uugucugaauucuucuaggcagcaacugugucuauaacagugacuugauaauuuagacaa

SEQ ID NO: 4161127 - RNA, 57 nt, Human
uugucuguaauucagacaguaagcaccaagccaagguuugucugaguaugcugacaa

SEQ ID NO: 4161128 - RNA, 68 nt, Human
uugucugucacaaguaacuggcaaugccacagaaguggcugucgguggcucugugaaagugcugacag

SEQ ID NO: 4161129 - RNA, 108 nt, Human
uugucuuccugugguaacucuggguagaacucaugaguaugaagcaacuuguaucugugcuuccaugguuuauuagagcuuauuuuaugaaaaggaugggaagggcaa

SEQ ID NO: 4161130 - RNA, 101 nt, Human
uugucuucucaaaguucagcuucugauuuagacucugucauucaagaacauaaugaauauuaucaguauuuaggauuaggagagacagugcaggaagacaa

SEQ ID NO: 4161131 - RNA, 77 nt, Human
uugucuuguuuacaacacagcucaaauauuuccuggucagaaauauccaggacuagcuuuggugaugugacagauaa

SEQ ID NO: 4161132 - RNA, 69 nt, Human
uugucuuuucccaaugaguccuugagcauuucuggaauguugguguuuacuggaccagggaggggacag

SEQ ID NO: 4161133 - RNA, 58 nt, Human
uugugaaaucguguuuggaagcuagauugcucuagaccacuaagguaugauuucacag

SEQ ID NO: 4161134 - RNA, 73 nt, Human
uugugaagauaagaaaagugggacccguaaagauugagaccuuggcuagguucacacuuucaugauuucauag

SEQ ID NO: 4161135 - RNA, 62 nt, Human
uugugaauagugccgcaauaaacauacgugugcaugugucuuuguagcagcaugauuuauaa

SEQ ID NO: 4161136 - RNA, 57 nt, Human
uugugacagcuccacccuggggaacaaggccaauuccuccaaccagcagcugcauaa

SEQ ID NO: 4161137 - RNA, 64 nt, Human
uugugacucugggaccagugaagcaacucagcagugaguuccaaaacugcaucccaggauauaa

SEQ ID NO: 4161138 - RNA, 67 nt, Human
uugugauugcuguuuaguaguugagccaacauaaaauugauguugagcuuuacaacagcuguuauag

SEQ ID NO: 4161139 - RNA, 69 nt, Human
uugugcaaaaggacuucuggguugaaacgaguuuacucacaucagagaagccagauccauuuugcaugg

SEQ ID NO: 4161140 - RNA, 84 nt, Human
uugugcaaauguguuuuuucuucuacaucgcccuugaaguaacucuccauguguuucuguaaggaaaauucaugucuuguagga

SEQ ID NO: 4161141 - RNA, 55 nt, Human
uugugcaaggcucuuggaauguacuaaaaacacuuuuuaagucaguguugcacaa

SEQ ID NO: 4161142 - RNA, 59 nt, Human
uugugcaguggaugcuuucaccuguccaaacagcaaaagcaagucucuacaaaguacaa

SEQ ID NO: 4161143 - RNA, 82 nt, Human
uugugccuuaguuuccguggcuauagaauggggauaauaauagcaccagucucuguguguugucaggaggauuaaggcacag

SEQ ID NO: 4161144 - RNA, 76 nt, Human
uugugcuaaacugcaguuuuauccagcauuguuuuuguaucaacagugcaaauaucuacgcggugaaaaaggccaa

SEQ ID NO: 4161145 - RNA, 67 nt, Human
uugugcugguggaauggcagagggaacuucacaggaaccuuaguguucuuuuaccucaaagccacag

SEQ ID NO: 4161146 - RNA, 55 nt, Human
uuguggaauaaaaaucaguuaugugauuuaacugggccaacuauuuguucuacaa

SEQ ID NO: 4161147 - RNA, 80 nt, Human
uuguggaggguucucuugguguguugucgggcauuuaguaacauucccucuacccacagaaugccaaugagaccucccga

SEQ ID NO: 4161148 - RNA, 61 nt, Human
uuguggaugcuugaucagguccugauaguucacuaaugccaucaggcucaaaucaucccaa

SEQ ID NO: 4161149 - RNA, 68 nt, Human
uuguggcacccagaacugagaaaauaaauuucuguuauuugaaguauuucagcgguucuuuguuacag

SEQ ID NO: 4161150 - RNA, 71 nt, Human
uuguggccucugggaaagcagauucccaauaaggaugaucucuccuugaggagcuuccuaugaguccacaa

SEQ ID NO: 4161151 - RNA, 121 nt, Human
uuguggccucuugaguguuggagcuggaggaggcgcugugaauccuguuugcccagccaauuuacaaaugagacagugaggcagagcuuccguggccacuaccgucuugcagaggccauga

SEQ ID NO: 4161152 - RNA, 66 nt, Human
uuguggggcccgaguggccaccuugugggaaggcucccauuaugagcuaaguuguggcccccucaa

SEQ ID NO: 4161153 - RNA, 84 nt, Human
uugugguaaaccucugaacauuuuuaagacucuaguguguagagaaccuuucuuuagaaauucagaucuggugggauaccauaa

SEQ ID NO: 4161154 - RNA, 78 nt, Human
uugugguaauggcaaccauaugggcuggugacugcugucaguaaaaauagcccacauggccuguguggccagacacaa

SEQ ID NO: 4161155 - RNA, 91 nt, Human
uuguggugggggcuguuguuugcauuguaggauguuagaagaauccuucuuggacuucuacccacuagaugccagaaacaccccaccacaa

SEQ ID NO: 4161156 - RNA, 61 nt, Human
uugugguuguugacaagcucggucaugguaacauuggcucaggcuugaaaauagauuucaa

SEQ ID NO: 4161157 - RNA, 60 nt, Human
uuguguaaugaaguuaucauguuuuauagaacaugaaaaacuugcuucauuuuuacacag

SEQ ID NO: 4161158 - RNA, 70 nt, Human
uuguguauuucuggaacagacuauagagagaagauuuaauauuauauuuguagacuguccugaagcacag

SEQ ID NO: 4161159 - RNA, 72 nt, Human
uugugucuuuauuuagguaaacaugaguuuguucuuauuuuaauaaacuuagagcucuccuaaaugacucag

SEQ ID NO: 4161160 - RNA, 62 nt, Human
uugugugaaguuuuggagagggaaaauccucuaauaggcuugaccuuuuuuaacuucagcaa

SEQ ID NO: 4161161 - RNA, 74 nt, Human
uuguguggaagagcagguuucaaugcugaugcuuguuuuauaaagacauuggcaagugaaccugcaucauacaa

SEQ ID NO: 4161162 - RNA, 55 nt, Human
uuguguguagacucagccauuguauauaggccaugguccagccagcugcacagga

SEQ ID NO: 4161163 - RNA, 62 nt, Human
uuguguuucuggccaagauggagugauaaggacuggacugacucucuggccagaaacaacag

SEQ ID NO: 4161164 - RNA, 73 nt, Human
uuguguuuuccuugauuaguacaugaaggaacagcucuguuuugaaugcccugcgugacuggagguuacacag

SEQ ID NO: 4161165 - RNA, 77 nt, Human
uuguguuuuuucacaguggcccucucugaguuuuaaaacugggaauuagaagggaguuauugauaugaaaaccacga

SEQ ID NO: 4161166 - RNA, 86 nt, Human
uuguuaaaacagugucuuagguuccauugccagagucucugauucaguaggucuggaguggggccugagaaucugcacuuuaacaa

SEQ ID NO: 4161167 - RNA, 85 nt, Human
uuguuaaauuugugacaccauugacaguguuaaaguugccuggauaccaucaacacauggacaguguuaaaggugcaauugacag

SEQ ID NO: 4161168 - RNA, 129 nt, Human
uuguuaauucgugaugucacaauucaagugugcuuccugucacuuauguguaguuuaaaauguucuuuaauguagcgugaaaugauugguuagcuuugaaaugguugugaagucaugugaagaaaauaa

SEQ ID NO: 4161169 - RNA, 57 nt, Human
uuguuacagaucacauuucugcggaacaucacguggaccuugucgaaucugugccga

SEQ ID NO: 4161170 - RNA, 90 nt, Human
uuguuacccaguuuuuaaccuguuuuugacgacugugucucuguuuaugcaagaggcaaauugucuagaagggguguagcuagguauuaa

SEQ ID NO: 4161171 - RNA, 62 nt, Human
uuguuagauggugguccauagcuggugaucgaaguggaucaguccagcuccucauuucccaa

SEQ ID NO: 4161172 - RNA, 58 nt, Human
uuguuagcaaagucccacagcuucaggggaauccugccugugggcccuuggcuggcaa

SEQ ID NO: 4161173 - RNA, 77 nt, Human
uuguuauucuugcuacaacuggacaacagauugggcucuuaagcuuucugacacaucaguuguaaaguuaaugacaa

SEQ ID NO: 4161174 - RNA, 62 nt, Human
uuguucacaggauauaugugcaggguuggggagcugcacccuugcacccuuuccugugacaa

SEQ ID NO: 4161175 - RNA, 59 nt, Human
uuguucaucaggugacacauacuaagugccacuuagcacauguggucauccugggacga

SEQ ID NO: 4161176 - RNA, 83 nt, Human
uuguuccugagccugaaguuacuuccauuguugcuacuguuguagauaaugagaauacaguaacuauuucaacugaggaacaa

SEQ ID NO: 4161177 - RNA, 97 nt, Human
uuguuccugugacuaauaguaugcauuugauuugcaauuuuucagcugggaucacaguuuauggccaacaggcauauuucuagauuacaagggauaa

SEQ ID NO: 4161178 - RNA, 90 nt, Human
uuguucgauacaaggagcuuugaaaguuuccgguucuuaguacauauggaacacuuagauuuuuaagguuuuuuuaauuguuuuagacaa

SEQ ID NO: 4161179 - RNA, 60 nt, Human
uuguucucuuaucuggcauuauuggguuagcccccacugugccugguguggagaggguag

SEQ ID NO: 4161180 - RNA, 72 nt, Human
uuguucuucagugauuuuggucugccuuagaguuugaugaguccaaggcuucccagagaugcucaaaaacaa

SEQ ID NO: 4161181 - RNA, 58 nt, Human
uuguucuuccaucaucccucagccugcagagaacagagccugauggugggagugacag

SEQ ID NO: 4161182 - RNA, 81 nt, Human
uuguucuuugcaaauauacacaaucccucugcauuuugagaaaggaugcaucuguaguguuauaugauuagugucggacag

SEQ ID NO: 4161183 - RNA, 100 nt, Human
uuguucuuuuuguucaacucuuauaugcuagcugcucagaguuaaccuaaacuauccauguauucugaccuguaacuguaagagacaaagaaaagaguag

SEQ ID NO: 4161184 - RNA, 77 nt, Human
uuguugagagauuaacauaucuuguaauguaaaugcuuuaucacacauuguugaaagauauguuaaucuuucaguaa

SEQ ID NO: 4161185 - RNA, 69 nt, Human
uuguugaucacuguacagagaccguagaucugaguaacugagagauacaucuuugucuaugaccagcag

SEQ ID NO: 4161186 - RNA, 130 nt, Human
uuguugcuuguaucagaacuucauuccucuucaugguucaguaaucugcuagaaauuugaaaaaacuauuuuugucaguucagugauuacaaaauauuugaaguugaauaacuauaauuuuaagcaagga

SEQ ID NO: 4161187 - RNA, 86 nt, Human
uuguuggaacacagcagcugauuuugaacagcuccaaaauguaacucaaaauccuuuuggcugaauauauauuuguguuuuaacaa

SEQ ID NO: 4161188 - RNA, 66 nt, Human
uuguuggagaagccuuucguggagagaagcucugugccucggauauggacaggcuuauaacagcaa

SEQ ID NO: 4161189 - RNA, 59 nt, Human
uuuuaaugcaggggcauguucucuaguagacacauaaugaaaauggccuuguauuaaaa

SEQ ID NO: 4161190 - RNA, 59 nt, Human
uuuuaaugugcucugcaaugauugaacuguucucaggagaucauuuuugcacaucaaaa

SEQ ID NO: 4161191 - RNA, 81 nt, Human
uuuuaauugaaaaguuuugaaacacucuuuuuguagaauaugcaauuggauauuuggagugcuuugaagccuucauuagaa

SEQ ID NO: 4161192 - RNA, 63 nt, Human
uuuuacagcuucuauacuaugugaucauguguuauggccaaguaguccaaaggagcugcaaag

SEQ ID NO: 4161193 - RNA, 83 nt, Human
uuuuaccauuguuuguaauuaccucuuuugacagagaaaauguucugaguaggagcaaguuacgucucccaaugaaugugaaa

SEQ ID NO: 4161194 - RNA, 87 nt, Human
uuuuacguuucacaaguccauagguuucaugaggguauaaacuguaccugugaaacaaugucuaugugguaaagugcagguguaaaa

SEQ ID NO: 4161195 - RNA, 77 nt, Human
uuuuacuauucaggaacaguuuauauugcauggggauuaucuguuccuugaaaguuugaacugacuugauaauaaaa

SEQ ID NO: 4161196 - RNA, 105 nt, Human
uuuuacuuaaccaaaccggcacuuucucuuuaaguauaaucuuauauggaaccucauuauauaaaacuaaacagaagaguagcugcugcccugguugaaguagaa

SEQ ID NO: 4161197 - RNA, 85 nt, Human
uuuuacuuaacuguuuugugccuuaguuuccccauguggaauauggggauaacuuuaguaccuaccucauaggaauagugugaag

SEQ ID NO: 4161198 - RNA, 78 nt, Human
uuuuagaggugacaucaaguaacauuucaaugauuuaaaggaggaaaucuuugaagaggacuugaagugccuuuaaaa

SEQ ID NO: 4161199 - RNA, 65 nt, Human
uuuuagagugaugaguguguaccagacacaaugcuaagugcuuuacauacauuaucuuuuuaaaa

SEQ ID NO: 4161200 - RNA, 79 nt, Human
uuuuagcaguccugaauacuggacggugggauuaauuuauccuuaaaaucaaacaccuugggaauuuggacucauaaaa

SEQ ID NO: 4161201 - RNA, 69 nt, Human
uuuuagccgaguaaaugcuagcccuuuaaaguugauaucaauacuuugggaagcugcaauugccuaaaa

SEQ ID NO: 4161202 - RNA, 75 nt, Human
uuuuagccuauaaaauggcaucagcuccaaaguucucuccugaugcuuugaagcuaggcugugcauaugcuagaa

SEQ ID NO: 4161203 - RNA, 118 nt, Human
uuuuagcugaaaugguugcuuagaauauuaaguuugugacucacaugaaaccagcauauaagugaaugcuucauaagugguuuauaugcuugaucauuuuucguaauuuagcucaaga

SEQ ID NO: 4161204 - RNA, 58 nt, Human
uuuuagcuuggcaggcuuuccacuaaaguuaauuuuuuggcuucugccaauguuaaga

SEQ ID NO: 4161205 - RNA, 76 nt, Human
uuuuaggaaguagugugacaauuaauauuugaugugaaauacuaacagauauugugcauacugcuguuuucuaaga

SEQ ID NO: 4161206 - RNA, 57 nt, Human
uuuuaggcuuugaugggugagaugugguuugccaccuccaugguaagaagcuuagag

SEQ ID NO: 4161207 - RNA, 71 nt, Human
uuuuaggguugccauggcuuuaauuugauuguuauuuauugagcauucaaacuguguuaggcagcauaaag

SEQ ID NO: 4161208 - RNA, 129 nt, Human
uuuuaguaaacuauuuuuaaauauaugauucagucaguuuugauuccugguucucaguuugguuguggacauguggcauuaaaacauauuuugguuuuauuuuauuucuuagauagaucagcuuaaaua

SEQ ID NO: 4161209 - RNA, 78 nt, Human
uuuuaguaguguggaaaugacuucuaauggaaggcgggauaccaucuuuacagaaugucaauuucuauacuucucaaa

SEQ ID NO: 4161210 - RNA, 67 nt, Human
uuuuagugguacucagggagggaacagcacuaaauauacuuguucaaucugccauguauaacuagaa

SEQ ID NO: 4161211 - RNA, 79 nt, Human
uuuuaguguggcacugauguucaauguuuccuauauuucucuauuuggacaaaauugaauacaggaaaauauacugaaa

SEQ ID NO: 4161212 - RNA, 64 nt, Human
uuuuaguuaauaggucuucagcuuaagcagaauggaugaauaaguugagguauauucauuaaaa

SEQ ID NO: 4161213 - RNA, 59 nt, Human
uuuuaguuacugcaguagcaaagagauucaugaguuuagccuauugcacauagcugaag

SEQ ID NO: 4161214 - RNA, 69 nt, Human
uuuuaguuuuacggugcggauguggguuucaacaccauaauggguuaacuucugcacagaaaauuugaa

SEQ ID NO: 4161215 - RNA, 59 nt, Human
uuuuauaaauacagagugugccagauguuguucaucuuuggcacuucuguuuuaaggaa

SEQ ID NO: 4161216 - RNA, 70 nt, Human
uuuuauaaauucacucuguuccucauggugaauuuauaaauuccucauggagcagggugaauuuauaaaa

SEQ ID NO: 4161217 - RNA, 92 nt, Human
uuuuauauuuugcauuugcaaauaaugaaagcucacauggguuguaauaauuguuacuagcuuuuaauauugggcaaagcacaaauacaaaa

SEQ ID NO: 4161218 - RNA, 79 nt, Human
uuuuaucaacugagauuaaauauuugugauuaaagcaucuucugccuuuuauaaauaaauugggcggcaguugaagaaa

SEQ ID NO: 4161219 - RNA, 65 nt, Human
uuuuaucagcagggauaacaagagucuuuuuuccuucuuucucaacucagucccugcuggucaaa

SEQ ID NO: 4161220 - RNA, 65 nt, Human
uuuuaucaucuucugaauuuggaaucaauggaaaaacagauccaggagucagacagauggugaga

SEQ ID NO: 4161221 - RNA, 89 nt, Human
uuuuaucuccuuuuugcuuucccuuguagaaaguugacaaauagucccuaaagcugucaauagguuggaaauaagaaggaaaaguaaag

SEQ ID NO: 4161222 - RNA, 65 nt, Human
uuuuauggggaccucuauguaucucuagacuacacuuugagaagcguuggccuccccugaugaga

SEQ ID NO: 4161223 - RNA, 74 nt, Human
uuuuauguucaucuguguaugaaaguauaacugcugcauaacaggcaguuuucuuucgcaaagguacaauaaaa

SEQ ID NO: 4161224 - RNA, 74 nt, Human
uuuuauguugaagucuuaacuccagguaccucagaauguggcuguauuuggagauaagauuuuuagauauuuaa

SEQ ID NO: 4161225 - RNA, 92 nt, Human
uuuuauuaaugcacucuagggacaguuguguuugagucaaccuccagcuaaaaugauagaaaacagauguccuuaaaacaggcuaugugaaa

SEQ ID NO: 4161226 - RNA, 86 nt, Human
uuuuauuccuccacagcucuaccuauucaauaucuuauaaaauuuauuuuauggguaaagggcuaggguuuggggcaaaaaugaaa

SEQ ID NO: 4161227 - RNA, 77 nt, Human
uuuuauucugcaccauguauucaguuuggcacagaaccuggcucauaguuggcugaaauacaugacaaugaaugaag

SEQ ID NO: 4161228 - RNA, 120 nt, Human
uuuuauuucagguuaaaaaaagaaaaagacugguguguuacauauaucucaugcuuaggaauauuagugauuuuuucuguuuuguguguggcaucuuguuuuuacggacccuugauaaaa

SEQ ID NO: 4161229 - RNA, 60 nt, Human
uuuuauuugauguuucauuuuaguauggauauuuugcuaaacuugagcagucagaugaag

SEQ ID NO: 4161230 - RNA, 102 nt, Human
uuuucacaaauggcuaacaagaagugagagaaacagauaagaggacuugggcagggaaccuuuaguuguuauuucuucacacaauuuguaacauuugggaaa

SEQ ID NO: 4161231 - RNA, 87 nt, Human
uuuucacaacugauugaaaguguuguagaguacuaauacaaugaauuguacagaaaucacaucgcuuugaguuaagaacagugaaga

SEQ ID NO: 4161232 - RNA, 63 nt, Human
uuuucacaaggguccaacuaguaaauaucuuagguuuugugggccagauggucccugugaaaa

SEQ ID NO: 4161233 - RNA, 57 nt, Human
uuuucacucaugagagaaaacgugcuucucagauucugaaggcuuucugagugaaaa

SEQ ID NO: 4161234 - RNA, 89 nt, Human
uuuucagguuauauuuugaguugugucagccaaagugcaaugugcauuaaggaacaauucuacacacccucaguuuuauguuuugaaaa

SEQ ID NO: 4161235 - RNA, 82 nt, Human
uuuucaguaggcuuggcaugacaguacauccucauaaugaguuugcugcagcuuugucacaugcacaggcauucauagaaag

SEQ ID NO: 4161236 - RNA, 103 nt, Human
uuuucaguauucauaauacauuucuagaguucaucaugguaaaaacagaugagauuuugggagauuacucuggugugcuuuagucuauugugcauggugaaaa

SEQ ID NO: 4161237 - RNA, 59 nt, Human
uuuucagugcuagguaauggagcucagaacacacugacucaaaauuuggcauuugagga

SEQ ID NO: 4161238 - RNA, 63 nt, Human
uuuucaguggagugacaugaucuuacuuguauuguaaaaggauuaugcucauuucggugugga

SEQ ID NO: 4161239 - RNA, 59 nt, Human
uuuucauuuaagaaggaaauauugggcauuaauucucaguauucuuuaugaagugaaaa

SEQ ID NO: 4161240 - RNA, 117 nt, Human
uuuucauuucgcuaccugaaagucagggcuggcucaugaaaaguuguuaaacaacagcuaaaugugaaaugucaacccucccucuaaacuuucccuguucugagcaucaaaugaaga

SEQ ID NO: 4161241 - RNA, 81 nt, Human
uuuuccacaggucucccaucguuugugaggaagagcuaguucucauuuucucuaaauagggaggcuuaagacuguggagaa

SEQ ID NO: 4161242 - RNA, 62 nt, Human
uuuuccaggaagaaaacaggaaucaagucccacagacggauucuucauuaucuucuagaaaa

SEQ ID NO: 4161243 - RNA, 93 nt, Human
uuuuccaucaaaauagucaaaacuccuuggauuguugguuuugguuuaaaauaucaaaguaaccaaggcucaauuaacuaagaaguuggagaa

SEQ ID NO: 4161244 - RNA, 102 nt, Human
uuuuccaucugucacauggaaauccuuuucuauacagcauaagugaacacuucucagcugugcuccauaagggagaggcaauuccaugaagggcagggagag

SEQ ID NO: 4161245 - RNA, 62 nt, Human
uuuucccagcccucuuucuuugaucuccuucuuaaucuuucuaagaggggagagugggaaga

SEQ ID NO: 4161246 - RNA, 81 nt, Human
uuuuccccaagugguucagagcauuccaaaggacacaaggcuauuuuuauucaguggagcuugggacucuugguaggaaaa

SEQ ID NO: 4161247 - RNA, 57 nt, Human
uuuuccuccauuguuacuuuuuguuuauuacuugcaccuuggacacaugggggaaaa

SEQ ID NO: 4161248 - RNA, 89 nt, Human
uuuuccucccauuaaauagauggcuuaagaguaaaaggcaaaacagauuuugucuaguacuugguagcucucaauuccauggaggaaag

SEQ ID NO: 4161249 - RNA, 75 nt, Human
uuguuuaagcccaggaguuggaggcugcagugagcugugaucacaccacugcacuccagccugggcacagagcaa

SEQ ID NO: 4161250 - RNA, 129 nt, Human
uuguuuaaguaauacuugguuuuauaaucuuguaagagaaaagaagugaaaggcauuucagaauucuacuuuuauuuucuauguguucauuucucucugcuguuuguuaugaccaaaucugcuaucaaa

SEQ ID NO: 4161251 - RNA, 64 nt, Human
uuguuuacucacuguauccacaaaucaaugccuggaauuuugcugauacauagugggcaaacaa

SEQ ID NO: 4161252 - RNA, 59 nt, Human
uuguuuacuugucuggcauuauguaguuuuauccuacacauguacagauuaguauuuag

SEQ ID NO: 4161253 - RNA, 94 nt, Human
uuguuuagaacaaugccaacagcaugcuggguaacauuguagacucuuccagguuugccaugguagcacuuguggggcauuccuuuuugaacag

SEQ ID NO: 4161254 - RNA, 68 nt, Human
uuguuuaggcaauuaguaacgcagaaacagcauuacugcuuuucucaguuacuagcugugguaagcag

SEQ ID NO: 4161255 - RNA, 72 nt, Human
uuguuuauuagcaauuauccugguuuucuugagacugauuuccaggggaguacagaauugcuacaugagcaa

SEQ ID NO: 4161256 - RNA, 56 nt, Human
uuguuucaguccagaaggaagucuggugccugucaguccaucuugggcagaagcag

SEQ ID NO: 4161257 - RNA, 59 nt, Human
uuguuucccauuacuuagagguacuuuauucaucugaagggccuaggaaagggaggcaa

SEQ ID NO: 4161258 - RNA, 69 nt, Human
uuguuucuagaugagggugggggcggguguccuuagcccaaagcuugugccagucucuaucagaaauaa

SEQ ID NO: 4161259 - RNA, 59 nt, Human
uuguuucugaggcucagaugacuccaugaucucuguuauuugggcaguccaugaaauaa

SEQ ID NO: 4161260 - RNA, 85 nt, Human
uuguuucuguguauucugcuaagugauuucuacacauuuccuuuuagugaagugggcuucccuuaagccagagagcuagaggcag

SEQ ID NO: 4161261 - RNA, 68 nt, Human
uuguuugaaauauuugggaguguuugacuuagaacuguuaauacuuuugccuuguauucauugaacaa

SEQ ID NO: 4161262 - RNA, 101 nt, Human
uugagauggagucuugcuguugccugggcuggagugcaauggcgccauccuggcucacugcaaucucugccuccuggguucuagcaauucuccugccucag

SEQ ID NO: 4161263 - RNA, 102 nt, Human
uugagauggggucuugcucugucaccaggcuagagugcaguggcacgaucuuggcucaaugcaacaucugccucuugguuucaagcaauucuccuaccucag

SEQ ID NO: 4161264 - RNA, 60 nt, Human
uugagcauuuguuuugaaagaguaguaacagagaagguuccaagauagacagaugcucaa

SEQ ID NO: 4161265 - RNA, 62 nt, Human
uugagccaggucucacucaccuucaaggccuuucuuccaggaagauuuaugggacuugccaa

SEQ ID NO: 4161266 - RNA, 58 nt, Human
uugagccuccucucaguuuucucacuaguacucuaggguggcacacuggggagcucgg

SEQ ID NO: 4161267 - RNA, 81 nt, Human
uugagccuugggacagaaaaggagaagauaacugugaauggaaaguauaucauucuccugguucuggccacaggugcucaa

SEQ ID NO: 4161268 - RNA, 127 nt, Human
uugagcuauccauguguacuuucuguuccuuuugugaguacugcuauuuauauauuccgguaauguuaacuggcaaugguuauguguauagucuguaggacagaaggaaucaaagugaucuguucaa

SEQ ID NO: 4161269 - RNA, 80 nt, Human
uugagcuaucucaggcacucacauuuggaguuucagcuuugucaucuccaaaaugaaggugcuggacugggguucuucaa

SEQ ID NO: 4161270 - RNA, 61 nt, Human
uugaggacaggagacucacuguuugccuauuugagccaaucaccaucucucuuguccccaa

SEQ ID NO: 4161271 - RNA, 82 nt, Human
uugaggacgacuuggcucugacauuaaaacaauggcauauuaccacagccaugaggaugggaagggagccaagauguuccaa

SEQ ID NO: 4161272 - RNA, 68 nt, Human
uugaggagagggauacugaguuuugguuggagaaagaacagcagaaccuggcauccucuugaccucaa

SEQ ID NO: 4161273 - RNA, 66 nt, Human
uugaggagguaguacagaguauuccuguguaccccacccagguuuucucuauuauuaauuucuuaa

SEQ ID NO: 4161274 - RNA, 103 nt, Human
uugaggcacaagaaucacuugaacccgguaggcagagguugcagugagccgagauugugccacugcacuccagccugggcggcagagugaaacugcgucucaa

SEQ ID NO: 4161275 - RNA, 103 nt, Human
uugaggcagagucuugcugugucacccaggcuggagugcaguggcgugaucucggcucacugcaagcucugccucccggguucacgccauccuccugccucag

SEQ ID NO: 4161276 - RNA, 79 nt, Human
uugaggcgccuggaucucgugggccuuucgucugagucgcugucuaacucugaaaacuccaugagcucgucuuccucaa

SEQ ID NO: 4161277 - RNA, 76 nt, Human
uugaggggauucuaaagugguggcaggguuugguuucuugaccaauauuacugauauucauuauggagcuccuuaa

SEQ ID NO: 4161278 - RNA, 73 nt, Human
uugaggucaggcuucugaaaucucugugcguguguggggugcagcucaugaguuuacagagcaaagacuacag

SEQ ID NO: 4161279 - RNA, 64 nt, Human
uugaggucagggcucuuccaguggcucugguccccaggaugguccaacacggggcccugcucag

SEQ ID NO: 4161280 - RNA, 65 nt, Human
uugagguuuaagugucauaguguauuugaagaacuuaguaacauggcuggcaccuuaaauuucag

SEQ ID NO: 4161281 - RNA, 82 nt, Human
uugaguacacggcaaggaauguuggcgaguucucaaguuggaauauuuaacauugaaauauuugcaauagugguguacugag

SEQ ID NO: 4161282 - RNA, 82 nt, Human
uugaguccccucucgcuuggcugaggugagaaaaaauaucccaucugaucccucaugagagacagagaggggaaacacucag

SEQ ID NO: 4161283 - RNA, 58 nt, Human
uugagugcucuggguuuugcugaugaaaaucuuuucagaagugaaauggaguauucaa

SEQ ID NO: 4161284 - RNA, 82 nt, Human
uugaguguacuggagcuggugugugcccgagcacaaacuaauuaacguuugugugcugcccaacucgcagauucacacucag

SEQ ID NO: 4161285 - RNA, 58 nt, Human
uugaguguacuuuagucaucugauacaauuuguguaagauuuauguggucacacucag

SEQ ID NO: 4161286 - RNA, 62 nt, Human
uugaguguauauccuauaugucuuuagaaagcauguggcacaaagaaggaaauagcacucaa

SEQ ID NO: 4161287 - RNA, 78 nt, Human
uugaguuauaggaaauaguucaugcgaucaguucucacuacucaugggucaguucugcauaacuauuucccagaccaa

SEQ ID NO: 4161288 - RNA, 64 nt, Human
uugaguugcuucuaagacaaucuguuagagaugcucaucaggcagguaggauggaagggcucaa

SEQ ID NO: 4161289 - RNA, 103 nt, Human
uugaguuggagucuugcuuuguugccuaggcuggagugcaguggcacaaucuuggcucacugcaaacugugccucccggccucaagcgauucuucugccucag

SEQ ID NO: 4161290 - RNA, 87 nt, Human
uugaguuuucugguccuugcagcuaaacuagguaaacagcaggauuucauuuuuguuuguuuguuuuguuuaggccaagauuuuuaa

SEQ ID NO: 4161291 - RNA, 76 nt, Human
uugauagauuuggcggaaguucaucauuuccagggguauuuagcugcugaaugauaaucuuuugcuggucuuucaa

SEQ ID NO: 4161292 - RNA, 58 nt, Human
uugauaucucugcuguguuaggggaugcucacgagacagcugaaagggauaauauuaa

SEQ ID NO: 4161293 - RNA, 87 nt, Human
uugaucaaucagaucuguugaaguaugauaaguaccuaaguguaucagaggguaaguggacauuucagcaaaguuuugauuggucaa

SEQ ID NO: 4161294 - RNA, 125 nt, Human
uugaucaauuuguuuaacucagugccccauuuacccaacaguaaauugcagaugcuaaaugacucauuacuuuggcagagucacugguucuguaauuaauuauggagcacuuuaagauugaugaa

SEQ ID NO: 4161295 - RNA, 104 nt, Human
uugaucauccaaauugucaggcaaggacucugguaauuuaaucacucuuggaugaaugagaauacagaaguuaucagcuucuuuucuggggggugggaggacag

SEQ ID NO: 4161296 - RNA, 76 nt, Human
uugaucuauucuugcugaggcauuacucuuuaggaccucauccuuacuguuugaucagcaagauaaauagagccaa

SEQ ID NO: 4161297 - RNA, 88 nt, Human
uugaucucccguugcugggugcccaccggauugccuacuauauacuuugaauaagcacgucuggagccccagucaaugaggauuucaa

SEQ ID NO: 4161298 - RNA, 55 nt, Human
uugauggccaccacccucaugacaucauagaugacaucaacaguggugcugugga

SEQ ID NO: 4161299 - RNA, 56 nt, Human
uugaugggauagcaaguuacuccuuggagccagccuaaugcuuuucccaaagucag

SEQ ID NO: 4161300 - RNA, 76 nt, Human
uugauguaagaagagguggacuggaaccuguuauaugauaagacaugacaggaacccagaaacauuucuauaucag

SEQ ID NO: 4161301 - RNA, 55 nt, Human
uugauguagccuaagacagaaccugcaccucccacugcugcuugggagacgucag

SEQ ID NO: 4161302 - RNA, 94 nt, Human
uugauguauuagagugaaaaccuaaucaugcaguuguucauccucauuaauauggauaagucauguguucaucuuucauucuaauuuaauucaa

SEQ ID NO: 4161303 - RNA, 80 nt, Human
uugauuauacauucauugaagucaagaacugugaauuuauguucaacaguguagugugaugucaaaauguguauaaacaa

SEQ ID NO: 4161304 - RNA, 101 nt, Human
uugauucaaccacuuaauaaucuacccagcaguauacuuaccugucuuccauguacacagguaaguauacuguuggguagauuauuaagugguugaaucaa

SEQ ID NO: 4161305 - RNA, 77 nt, Human
uugauucagaauacaaagagagaauagggacugucccugaacaagagaugcccugugacucuccuggaccugagcaa

SEQ ID NO: 4161306 - RNA, 64 nt, Human
uugauucuaggcuugaaacaugaagcaguuuuccgguuuucuucacaaauggccuagaguucaa

SEQ ID NO: 4161307 - RNA, 60 nt, Human
uugauugaauuaugaggucuguaaaucauguaguuuacagucaggcaugaauucagucaa

SEQ ID NO: 4161308 - RNA, 93 nt, Human
uugauugcaaagcagaaaugaaagcaaauuauaggccaucucuuaguagaguaauggucacuuuuugacuguucaucaaugcuuugucaucga

SEQ ID NO: 4161309 - RNA, 74 nt, Human
uugauuguaguguagauccacaaaguacuuaaaggaaugugucuugucucugugagaucugacgaugcuaacaa

SEQ ID NO: 4161310 - RNA, 97 nt, Human
uugauuguaugacccaggaaaaggcugauugauugugggaaaguaggguucacuacuugcauuauauuuaucacaauuucugggcccaugaagacag

SEQ ID NO: 4161311 - RNA, 58 nt, Human
uugauuucagucugggccuggcucuggugaagcugggucaguccaggcuagaaaacaa

SEQ ID NO: 4161312 - RNA, 106 nt, Human
uugauuugaugauuuggguuaauauaaugaggauuugcauauuaggcuagcauuccuauuuuaauuuaagugaaagucuucauuauuuccccagacaccaacucag

SEQ ID NO: 4161313 - RNA, 64 nt, Human
uugauuuguuuagguuuugguugcauaaagccuauuuuucaugcaaaagacuugaacuuuucaa

SEQ ID NO: 4161314 - RNA, 57 nt, Human
uugcaaaguguugagauauaugcuagucaaccagcuauguucuuuacaucugugcaa

SEQ ID NO: 4161315 - RNA, 61 nt, Human
uugcaaauacuuuuagccuauugaguuaauagugauucauaggaucaaaagcuguuugcaa

SEQ ID NO: 4161316 - RNA, 61 nt, Human
uugcaaauauguucuccuauucuguggguugucuucacuuacuugacgauaucauuugcaa

SEQ ID NO: 4161317 - RNA, 71 nt, Human
uugcaaauucaaacauuuuccugugcaguuuaauuuaaugcaugguuggaugcauaugaauacaccugcaa

SEQ ID NO: 4161318 - RNA, 62 nt, Human
uuugcauuucucguaaggaaacacauagcaacuugucuccuugaaugaagagaggugacaaa

SEQ ID NO: 4161319 - RNA, 65 nt, Human
uuugcauuuguucaaguauugauuugauuuagcaaauaugacaccaaucuuggauaaagugcgaa

SEQ ID NO: 4161320 - RNA, 84 nt, Human
uuugccaauuauuugucgagugucugcuaugggcugagccuuauucuagguccuagggauucaacacugaacaaaauaggcaaa

SEQ ID NO: 4161321 - RNA, 73 nt, Human
uuugccuagaacuuuauucuuuauuuccuuacauagaauaauaaaggacauaaaaaaaggaaguucaggcaga

SEQ ID NO: 4161322 - RNA, 83 nt, Human
uuugccuuguuauucaacucucuggaauguuuacaugcccuguuuccucaaacagauuguaaguucauagagggccaggcaaa

SEQ ID NO: 4161323 - RNA, 93 nt, Human
uuugcggggguugugggaggcacaggaggaugccuaguauucugauacuuuucaaagggcaugcuucugagaugucuccucccucaaugcaga

SEQ ID NO: 4161324 - RNA, 57 nt, Human
uuugcgggugagggcauaaggaggugguuguauuuguuuccaggcuccauuggcaga

SEQ ID NO: 4161325 - RNA, 89 nt, Human
uuugcuaucugcaaggaguugacauugucugacaagugaaauauaauuuuugugaggcuguuuuucucuauuugcaguacuauugcaaa

SEQ ID NO: 4161326 - RNA, 64 nt, Human
uuugcuccucugucaaaugagaguguuggucugaacgaucucuaaagccuggaagaggagcaga

SEQ ID NO: 4161327 - RNA, 65 nt, Human
uuugcucuuaugaacaaggugguaaugggcaggcuugugcauggaucuugcugcauaugggcaag

SEQ ID NO: 4161328 - RNA, 61 nt, Human
uuugcucuugagcuaggccuggagucugggucccacuuucugggcugagcucgaguguaga

SEQ ID NO: 4161329 - RNA, 60 nt, Human
uuugcugaauaaaugugugacugaagauucccacuucuguuucaggcaguuauucacaaa

SEQ ID NO: 4161330 - RNA, 69 nt, Human
uuugcugacugagccucugggaauggagccuucuccugaggaaauaccacaacauggcucagaggcgga

SEQ ID NO: 4161331 - RNA, 58 nt, Human
uuugcuuuguuuaaaagugguauuucauguauuucgugacccucuugcacaaagcaaa

SEQ ID NO: 4161332 - RNA, 130 nt, Human
uuuggaaaucaucagaagcuugaaaaaaauacugaugcucagaccucacccccaggaauucugauguaauuggucuguggugggcccugggcuucaggauuuuuaaaagcuccucccagcauuucuacua

SEQ ID NO: 4161333 - RNA, 64 nt, Human
uuuggaaggcccagcuggacaaacugcuugaccccaggaguuugagaccagccugggcaacaag

SEQ ID NO: 4161334 - RNA, 55 nt, Human
uuuggaauguaguuuaaucaucuuuaaaaugagaggauugaacuagaucuccaaa

SEQ ID NO: 4161335 - RNA, 69 nt, Human
uuuggacaaguuuccaguaugaauuuuaaaacaguuuagaaacucaacucugggaauccaugucacaga

SEQ ID NO: 4161336 - RNA, 115 nt, Human
uuugugcucaguagcuggcuucagaaggcagccuugacuagugacuuaguuacaaucucaucccugcucugaguggcuggugagguuagcccuggggucagcuugggaaugugga

SEQ ID NO: 4161337 - RNA, 81 nt, Human
uuuguggacauuuuguuuguuugcagugggaugauuuguuuucuuuaaauagcuuucccagcauaacaaacugcccgcaag

SEQ ID NO: 4161338 - RNA, 64 nt, Human
uuuguggacucgcauggcugaggcggugauaucuguggucacguugaaguaaggcagccacagg

SEQ ID NO: 4161339 - RNA, 88 nt, Human
uuuguggcuucuuuguuugggguucuuuguuuccugccuauagguaccuagaggcuuaagccugaggccccagacauuagaucacaga

SEQ ID NO: 4161340 - RNA, 57 nt, Human
uuugugggcauauggcuggcugcagugggguaaggcugagcagauguugcccagaag

SEQ ID NO: 4161341 - RNA, 94 nt, Human
uuugugguaugagucaucagagugaccuuacauggucuuagucugucuggaccauaaaagagacuguugggguccggucugaaaccaucacaaa

SEQ ID NO: 4161342 - RNA, 67 nt, Human
uuugugucccuguaagacaaagccagggacguaaagccuuggucuuucaaugucaggagacaauaaa

SEQ ID NO: 4161343 - RNA, 63 nt, Human
uuugugucgucacugucuucucaaaucauguguaagaguuuggagaugucauggcggcacaaa

SEQ ID NO: 4161344 - RNA, 76 nt, Human
uuugugugaucuggcuauggggcacuuuuguagaaaccaaaauuuaugucuguuuucauaucagauauucagcaga

SEQ ID NO: 4161345 - RNA, 66 nt, Human
uuuguguuguuuuaagccacuacauuuuugguaauuuauuguaggagcaauauaaacuaacacagg

SEQ ID NO: 4161346 - RNA, 77 nt, Human
uuuguguuuugaggucuugcaauguuuuuguguuucugaugcuaauaacuaaaguuuguaagacuguagaaugcaaa

SEQ ID NO: 4161347 - RNA, 98 nt, Human
uuuguuaagccaauacauuacaguucugcagguaguuuuuaagagacuacuacaugucaggcacugugcuaacuguuggagauaaaauaauuaacaaa

SEQ ID NO: 4161348 - RNA, 59 nt, Human
uuuguucagaaauuuggacuccuguugcaccaggaaaucuuugguuucugagaagcaga

SEQ ID NO: 4161349 - RNA, 59 nt, Human
uuuguucauuaaaagugcuguaaauaacaguuucugugauaguaguuuuaauuaacaaa

SEQ ID NO: 4161350 - RNA, 69 nt, Human
uuuguuccuaggcugugaucucaugauuuguuccagggaacauucacgcucucaaagcugaggaagaaa

SEQ ID NO: 4161351 - RNA, 69 nt, Human
uuuguucguucaugcacgguaggccucagagccaguuguggaaggaaccaguggaugaaugauaacaga

SEQ ID NO: 4161352 - RNA, 67 nt, Human
uuuguucuaacuucugcagacaucaauuuuuucaagaaauuugucauuugagagaagggaggagaga

SEQ ID NO: 4161353 - RNA, 60 nt, Human
uuuguucuuaguccuguuuuugcccugauuuuucagaugggcgcccuggacugaggcaaa

SEQ ID NO: 4161354 - RNA, 62 nt, Human
uuuguugcgugaggaaaugagugggaccuuaaauaaaggcaugcauuccuccauccaacagg

SEQ ID NO: 4161355 - RNA, 80 nt, Human
uuuguugcuauuccaguuuauaugaggguaucaaggcuacaguuuuauguucuuggcauauaaaagaugauaaaaauaaa

SEQ ID NO: 4161356 - RNA, 67 nt, Human
uuuguugggcuuggcugccaagaagaaggagauaaacaucaccaucaucaaacagcugcucaagaaa

SEQ ID NO: 4161357 - RNA, 85 nt, Human
uuuguuguucagcuucauuugucuuuaugcuacaucucccaucuccucacccuuugaguauuaagcugcagcugaucauaacaaa

SEQ ID NO: 4161358 - RNA, 64 nt, Human
uuuguuuacaucucuugacucuuuuaggaguauagccaaggaaggagucauaaaugugaacaaa

SEQ ID NO: 4161359 - RNA, 91 nt, Human
uuuguuuaccucauuagauaguaauguucagugucucacuuaucuuucuaguggcuuaucugggacagcuaacaaauaauguauaaauaga

SEQ ID NO: 4161360 - RNA, 69 nt, Human
uuuguuuagccuuuaacacuucacauugauggaauacaugaguguagaaguguguagaagccagacaga

SEQ ID NO: 4161361 - RNA, 82 nt, Human
uuuguuucaguuaaauucuccaguuaccaauucacuuuagacagugaaaaaauggaaugacagagagucugaaugaaacaga

SEQ ID NO: 4161362 - RNA, 86 nt, Human
uuuguuuucaaauucagaaagugaaucuuguuauuuugguuuuagaauagcaguauuaugagauaacuuacugccuuugaaucaaa

SEQ ID NO: 4161363 - RNA, 76 nt, Human
uuuguuuugcaguuugcaaaugacuuacagagcucuucuggcaggguuucuguuucuccacuugcaaauaaacaaa

SEQ ID NO: 4161364 - RNA, 93 nt, Human
uuuuaaaaaggucagaaugguucacuacacaauauauuucagaguguuuguaaagcauuugaaugugugaguuaacuuuuuugaaaaauaaaa

SEQ ID NO: 4161365 - RNA, 93 nt, Human
uuuuaaaaugucuacuccccuuucuucuugacugaaaacuaaaguuuaaagucuuggaaggaggaaugguaauuuuuagguagauuuuuaaga

SEQ ID NO: 4161366 - RNA, 79 nt, Human
uuuuaaacagagaagacuuugagcaaauggggaucuaauuugaggaagguuuucuuggugcuuaaguagcuguuugaaa

SEQ ID NO: 4161367 - RNA, 96 nt, Human
uuuuaaaggggagaauauuggcuuaguuggcaauuguuauuugggguuuauugaucuaaacggacaguuuuguaauaaggccaaccucugucaaaa

SEQ ID NO: 4161368 - RNA, 129 nt, Human
uuuuaaaguauuaaucauuuugaugugacuuaaaggcugaucuuaauauuaucaaaggauuugguacauuugugugcuugauauuaauacaguggcuuaaaguuguacaguugaaauauaguuuaauag

SEQ ID NO: 4161369 - RNA, 103 nt, Human
uuuuaaaugguauauugaaguuuaucccucucacaguuacuggggaacagucuaacccuauugacagagauggaaugaaucuuuauuguaaaucacuuuaaag

SEQ ID NO: 4161370 - RNA, 68 nt, Human
uuuuaacacauuuuaagccauuuuaacaucucuugagagaagguaggggcuguggaauguguauaaag

SEQ ID NO: 4161371 - RNA, 71 nt, Human
uuuuaaccugggcauucuuugaguucucaguuucgaggugauggggagcaaaaaugaugcccaaguucaaa

SEQ ID NO: 4161372 - RNA, 57 nt, Human
uuuuaagacaccucucugcccuucauguaauauggggaguuuagcgguuucucggga

SEQ ID NO: 4161373 - RNA, 97 nt, Human
uuuuaaguauuugguugguucaaaaguaauugugguuuuugcuauugaauguaauggcaaaagcugcaauuccuuuugcaccaaccuauuaguaaaa

SEQ ID NO: 4161374 - RNA, 77 nt, Human
uuuuaagugacaggugguaaaauggacugucuugaguaugugcuugauacuccaaacuuuaccagucugcacugaga

SEQ ID NO: 4161375 - RNA, 69 nt, Human
uuuuaaucugaguguuggauuuauuguaaucuuuagaauaugagcagaaaggaaagcacucaguuaaaa

SEQ ID NO: 4161376 - RNA, 63 nt, Human
uugcugaaaaugcguaucuuccaggacacacaggagucuuggccuugccacauuugucagcaa

SEQ ID NO: 4161377 - RNA, 76 nt, Human
uugcugaauaaauguuuacuuaguuuaaaaauuaagaguuuaguuuugaauuuagauugauaaacauggacagcag

SEQ ID NO: 4161378 - RNA, 71 nt, Human
uugcugcaaugggaagauucuuugaacuagaccauacuugucugauaauggacuucucaucugcccagcaa

SEQ ID NO: 4161379 - RNA, 78 nt, Human
uugcuggccugcaggaaggggacggaguggggcgccagggaugaggaggcggcgccauccccccuccugcaggagcaa

SEQ ID NO: 4161380 - RNA, 61 nt, Human
uugcuggggaagcauuuuucccuuaugauuuguucagggccauaaaauguucccccauuaa

SEQ ID NO: 4161381 - RNA, 118 nt, Human
uugcugguugacaagaaaaugggugaggagugaggggcacagguccuggugggugaaaaugauugcccucuaucagaagcuuguagucucucuucaguuguguuucaucagccagcag

SEQ ID NO: 4161382 - RNA, 79 nt, Human
uugcuguagguucagugacaucauacugguaucuugaaacuggccaugauggcaguauuuguaucacagaaaucagcaa

SEQ ID NO: 4161383 - RNA, 99 nt, Human
uugcuguuugaugcacuugcugugaccacucuaacuuucugugggaauguccaaagaaugcauuuccuaggguagaugucacagcugugucaauagcaa

SEQ ID NO: 4161384 - RNA, 127 nt, Human
uugcuuaaguaguuuuuuuuuggucuccugcacaaucccuaagguguuuuucagucuuaauugugagauaacaaugauauagggauuggcagugagcaucaucaaucaacaaagagcauaguagcaa

SEQ ID NO: 4161385 - RNA, 69 nt, Human
uugcuuaauugcuaaagauuauguuuucaacaguuuuugaaaaugaugauuuggggcaaauaugugcaa

SEQ ID NO: 4161386 - RNA, 78 nt, Human
uugcuuaccugugauuuugagaccuauauagugaagguuuguugccacuuuuuaguuuccucaaacaugcagaaguaa

SEQ ID NO: 4161387 - RNA, 60 nt, Human
uugcuuccuuccacaccuucagaaugaggaacucccagccuaggaauuuggaggaaacga

SEQ ID NO: 4161388 - RNA, 63 nt, Human
uugcuuccuugagcuggucugaggauuauugccuauaagguucucagcuuaguaaguagguaa

SEQ ID NO: 4161389 - RNA, 67 nt, Human
uugcuucugcagcccacuaauggguggcgaucacauuguacacagggaaguggcugggcagaagcaa

SEQ ID NO: 4161390 - RNA, 106 nt, Human
uugcuucuguucacuucucuccucccuucccaucccucuucuaaacuuugugguggcagauuaguugggguggagaaggauaugggagcauguagggagaaagcaa

SEQ ID NO: 4161391 - RNA, 67 nt, Human
uugcuugaaaucggaaggcggaguugcagugagccgagaucgugccacugcacucuagccugagcaa

SEQ ID NO: 4161392 - RNA, 76 nt, Human
uugcuugaacccgggaggcggagguugcagugagcugagaucgugccacugcacuccagccugggugauagagcga

SEQ ID NO: 4161393 - RNA, 76 nt, Human
uugcuugaagccgagagguggagguugcagugagccaagaucgcaccacugcacuccauccugggaaauggagcaa

SEQ ID NO: 4161394 - RNA, 76 nt, Human
uugcuugagcccaggaguuugaggcuguggugaacuaugaucacaccacugcacuccagccugggcaacacagcaa

SEQ ID NO: 4161395 - RNA, 76 nt, Human
uugcuugaggccagguugucaagggugcagugagcugugauugugucacugcacuccagccugggcaacagagcaa

SEQ ID NO: 4161396 - RNA, 129 nt, Human
uugcuuggguuuccuuguaaacaggggcaaaauguguaagacgucuuauggggcuuagcacuguagcuaagacauaaauaggcuuuuuaaagauuguuuccucuguacaaaauucagugacucaaauag

SEQ ID NO: 4161397 - RNA, 77 nt, Human
uugcuuuagguugggaggucagaaaguuauuaaaaagaagaugacauuuaaguuaaaaccucagugaccaaaaggaa

SEQ ID NO: 4161398 - RNA, 63 nt, Human
uugcuuucuguuuuucauauaauuuggucauguuuaucuagauuguuagcuuuuggaaagcag

SEQ ID NO: 4161399 - RNA, 58 nt, Human
uugcuuugguuuucauagcuccacucuggccagggggacucggugaaaaccaaaacag

SEQ ID NO: 4161400 - RNA, 65 nt, Human
uugcuuuguguggauuauuguccuuugggaauuaaggaauagaucugugugcacauuuggagcag

SEQ ID NO: 4161401 - RNA, 56 nt, Human
uugcuuuguuuaaaagugguauuucauguauuucgugacccucuugcacaaagcaa

SEQ ID NO: 4161402 - RNA, 72 nt, Human
uugcuuuuccuucuccuuucuacuaaggggauccuccguuugcuucuccacuguagaggagaagggaagugg

SEQ ID NO: 4161403 - RNA, 56 nt, Human
uuggaaacgucaccuuuuccuuuagaugcuaauaugcauaaggggauguccuccaa

SEQ ID NO: 4161404 - RNA, 110 nt, Human
uuggaaagggcuuuuucaugcaucuagaacaugcucauguauaaauaaacaauauauuugacaacuuucauugauuuauguuuggcaugcagaagcagugaguuauccag

SEQ ID NO: 4161405 - RNA, 67 nt, Human
uuggaaauagagccuugaaaggggcaauuaagguaaaaugaggcccucagaaugggcucuaauccaa

SEQ ID NO: 4161406 - RNA, 114 nt, Human
uuggaaauguaaugaaacaaaauugaagcuaccaggauuugcuaauauauuacagaaaaacaauacuguguuuauuguucuucacuggucuuauuuuguuggccucaauuccaa

SEQ ID NO: 4161407 - RNA, 61 nt, Human
uuggaaauuuugugacacuucuugagacaccuugaguuucucugaguuguuacaaaaccag

SEQ ID NO: 4161408 - RNA, 65 nt, Human
uugugcugcguaggacguggacaaggaugucacgugaucuccaauaucaaguccuaggcccacaa

SEQ ID NO: 4161409 - RNA, 60 nt, Human
uuguggaacaccuagaauggguaaucuaagagaacuauccaguaccuggguauuucaugg

SEQ ID NO: 4161410 - RNA, 62 nt, Human
uuguggaggacaaaagaagccuuuacaacacaggacguaaagcagggcgauguccuccucag

SEQ ID NO: 4161411 - RNA, 67 nt, Human
uuguggaguggugguucucagucugugugaugucgacauccagggcuccccagaaguacccccauga

SEQ ID NO: 4161412 - RNA, 61 nt, Human
uuguggcagauugcucaccaugguuuuucauuuucagaaacgccuagcucaaucuguccga

SEQ ID NO: 4161413 - RNA, 77 nt, Human
uuguggcauccugguuuugaauaugucugcuucugguggauaagaauuaugguauguucaacaacuggauaccauaa

SEQ ID NO: 4161414 - RNA, 69 nt, Human
uuguggcucagaccucccagcuccagucuaccaggauugugcagaaucagugggggcccugaaucacag

SEQ ID NO: 4161415 - RNA, 56 nt, Human
uugugggaaccuaacaguggcagguuauaaaaggaaaaugcagcauguucccauaa

SEQ ID NO: 4161416 - RNA, 55 nt, Human
uugugggagcuauguaaugagauggggaguuucaucuaaugacauccucugacaa

SEQ ID NO: 4161417 - RNA, 94 nt, Human
uugugggaucuaguguggccuuggcccagaggcccugagccaugauauggcaaagcguggacugcugggcaagguaggcacauggugaucacag

SEQ ID NO: 4161418 - RNA, 68 nt, Human
uuguggugugugcugagguggaaagugauaguguucccucuuugcauucucagcacagagcacugcag

SEQ ID NO: 4161419 - RNA, 72 nt, Human
uugugguguucuaauucuuuuauucaaauuaaaauggggauuuguuuagugaacaaguuaagaacacuaugg

SEQ ID NO: 4161420 - RNA, 100 nt, Human
uugugguugaagcaacauuaagcaacaggcauaauguguugaucuaaaaauucauaggugaaauuaugcauuguuguaccaaggaugagcaauacuauag

SEQ ID NO: 4161421 - RNA, 81 nt, Human
uuguguaugaauacauggaagaguccccauggaugaguauacaauacugugccugaugcuuuuacuacuauucauccacaa

SEQ ID NO: 4161422 - RNA, 61 nt, Human
uuguguccccuguucuaccuguaguauugcuuaauugaauaaugggauuauggggacagaa

SEQ ID NO: 4161423 - RNA, 55 nt, Human
uugugucugguuugaaguccaugauuuuuugaucugccauccgguccagacauaa

SEQ ID NO: 4161424 - RNA, 78 nt, Human
uugugucuuauacagaucaagggaaaagaacuucggaguauaaacagcaaaaucccuuuuaacuugaucugagaccag

SEQ ID NO: 4161425 - RNA, 129 nt, Human
uugugucuuuuguaucuaauuccagaauuauuuaggcuuuccuuguugccauguuaccgaaguguuccuauaguaugugugcaucaaugauagaucuagaaauuguguuuggaaaacaaaaaucaauaa

SEQ ID NO: 4161426 - RNA, 81 nt, Human
uugugugaaccuagaauggacauuucugggagaaccugucaagguuuuggcagccguguucacauaagguaauucaugcaa

SEQ ID NO: 4161427 - RNA, 55 nt, Human
uugugugacuccuagaguagagggaagccuccgcugcucggaaggugucacgugg

SEQ ID NO: 4161428 - RNA, 83 nt, Human
uugugugguagucucagggcaguauuccaagagggcaaaaguagaaacaguaaccuuugagauaggcucugaaacucacacag

SEQ ID NO: 4161429 - RNA, 65 nt, Human
uuguguguccacugaauguguauuaaaauuguuucccaagaaugaugccaagcauggagauacaa

SEQ ID NO: 4161430 - RNA, 69 nt, Human
uuguguuauauaguucuguggguuuugucaaugcacagugucacauauccacauuacaguaucauacaa

SEQ ID NO: 4161431 - RNA, 100 nt, Human
uuguguucugaugguuucaaguuauucuccaauaugguauugacucaaaacguugacucagagaacuggauuagaggaaguacauugaacugggaaccga

SEQ ID NO: 4161432 - RNA, 58 nt, Human
uuguguugagcggccaagaggauaguggugccauuugcuaugcuuuaugcuuauauaa

SEQ ID NO: 4161433 - RNA, 70 nt, Human
uuguguuuguugcauuucuuguguaacugagcuuacucauaugcauaaaauaugagaaauguauucauaa

SEQ ID NO: 4161434 - RNA, 59 nt, Human
uuguuaaggguuaugcagcuuuugggagcaacaaccaagaugcaaccucugcuuaacaa

SEQ ID NO: 4161435 - RNA, 75 nt, Human
uuguuaagucauuugguaggcaugaguugauaaaacuauuguuugugcaauuuauguacuauauaaaggcagcaa

SEQ ID NO: 4161436 - RNA, 99 nt, Human
uuguuaggguaagggugaccuaucuuggucuccagguugagcugagcagaccccagcuauguucauccugacuuggauuagugcucuuaccaguaauaa

SEQ ID NO: 4161437 - RNA, 81 nt, Human
uuguuauaaaucauuguucuucagauuugacuggguaaauauucccucagguuauuuccugacacagcugauuaauaacag

SEQ ID NO: 4161438 - RNA, 129 nt, Human
uuguuaucgaagggcucuuuuugagggggaaaaauggcaacagaagggaguucccugcaccagcaaaaaugcccaugagaagccuucuguugccauuuuuccccuucaaaaagaguccuuggauaacaa

SEQ ID NO: 4161439 - RNA, 57 nt, Human
uuguucacugcuacauccaggugccugggaaagagccaggcuccuagcagcauacag

SEQ ID NO: 4161440 - RNA, 81 nt, Human
uuguuccaagucuuugcuauugugaguagugccacaauaaacauacgugugcaugugucuuuauagcagcaugauuuauaa

SEQ ID NO: 4161441 - RNA, 88 nt, Human
uuguuccuucucuuuuuguuguccacacuaggagacagugauucucgccaagcuccugugugggcaggaugagaacgaggaggaauaa

SEQ ID NO: 4161442 - RNA, 95 nt, Human
uuguucuauuagguugaugcaaauguaauggcagguuuugcuauuaaaagugauggcaaaaccacaauuacuuuuacaccaaccuaacagaacaa

SEQ ID NO: 4161443 - RNA, 65 nt, Human
uuguucuguggagugaccugggcuuugggauauuuaaagucucccaagaucacucuacugugcag

SEQ ID NO: 4161444 - RNA, 69 nt, Human
uuguucuuaacuuuuguguauaugggagaguugacuaucucuuguaaaugcacaauaaaguaaaggcaa

SEQ ID NO: 4161445 - RNA, 82 nt, Human
uuguucuuagaguuucggguguuuuucuccagucuuguuacuguagacuguagaaagcacgggccccaggcucugagcuuag

SEQ ID NO: 4161446 - RNA, 63 nt, Human
uuguugcaaucacuguugcuggguugcuguauauauauucugggcaauauaugagugcaauaa

SEQ ID NO: 4161447 - RNA, 86 nt, Human
uuguugcagaagucuaagacuuccuaagauucaggaauguuagggcaucucuuucauacccaucucuaggagugaguuuguaacaa

SEQ ID NO: 4161448 - RNA, 77 nt, Human
uuguugcuugcucauuuaagaaauauuuugcuguguaaaaguaaugcacacuuagaaaacuugagcaaguagaacag

SEQ ID NO: 4161449 - RNA, 68 nt, Human
uuguuggacaguccaccucagugaagacagauuuagcucuaggugcuuuaaaauggacuguuuugcaa

SEQ ID NO: 4161450 - RNA, 62 nt, Human
uuguugggcaugcaguggcuguaauucuauacaaaaaucacaacgcacuaagugcuggacaa

SEQ ID NO: 4161451 - RNA, 62 nt, Human
uuguuggugaaguaggaaggugcugugggaugaauucugcacugugcuuaguucacuauuaa

SEQ ID NO: 4161452 - RNA, 61 nt, Human
uuguuguaugacucugugaggagaagaaacaaaccauuuuuccucugcucucauaccacaa

SEQ ID NO: 4161453 - RNA, 84 nt, Human
uuguugucugugaccagucucucagcuuucagcuguguaauagaacaugggcauucagguugagaggcaaacauuugacuucag

SEQ ID NO: 4161454 - RNA, 95 nt, Human
uuguugugaggggcuguccugugcguugugaaauguuuagcaucauucuuggccucugcucacuaaaugccaguaguacuccccucguuguacaa

SEQ ID NO: 4161455 - RNA, 79 nt, Human
uuguuguugaugaugaugauauuuugacuggagaaucucucaugauuuuucauagacaaaaugucacucucaacaggga

SEQ ID NO: 4161456 - RNA, 56 nt, Human
uuguuguuggagccaauaugcaaaugcaaguguuuuuauuuggcauccagggagaa

SEQ ID NO: 4161457 - RNA, 69 nt, Human
uuguuguuguuguuuuucuuauggugggaccuauuucuugaagcacuauacagaagaggauaggaacaa

SEQ ID NO: 4161458 - RNA, 62 nt, Human
uuguuuaacgcagaugcugagugagauuuaaaaagaaauuagaaaagcauuuguguuaacag

SEQ ID NO: 4161459 - RNA, 84 nt, Human
uuguuuagauauuugguggccuuguguuuuagagaaagcugagcuucccugauccacaaaggcaaucuguauuagucuaagcaa

SEQ ID NO: 4161460 - RNA, 77 nt, Human
uuguuuauguauuauucaucagugggacauuuggguuguuuccacuuuuuuacuaugaauaauggugcuguaaacga

SEQ ID NO: 4161461 - RNA, 85 nt, Human
uuguuucagaagggugaauagaauuacaguguguuuggaauauaauucaaagauaauguagcauuuuaaagaacccuacuaauaa

SEQ ID NO: 4161462 - RNA, 130 nt, Human
uuguuucauagacagagagggagggugaaaaugaaggcuuuaaagucagggagauugaggcuugaauccuucuggcucuggcuccuggcuuugugguccaggucacauuccuuaaaucugugauccucaa

SEQ ID NO: 4161463 - RNA, 62 nt, Human
uuguuucccucucugaguguuucuuuucccaaagaauaaaugcucaccacagggaugugcaa

SEQ ID NO: 4161464 - RNA, 70 nt, Human
uuguuucuguuguaggaacagcagcaguauugguaucgacagcacuugcuuaguuugcaacagaggacaa

SEQ ID NO: 4161465 - RNA, 111 nt, Human
uuguuugugauugucuguccuaacuuaggugguuuaucuugaagaucuuagguaauuuagccucauagauuuagauagaucgagaaauggcaggcuucaaucacugaauag

SEQ ID NO: 4161466 - RNA, 74 nt, Human
uuguuuguuuugagauggugucucgcuccguugcccaggcuggagugcaauggcacgaucucaguucacugcaa

SEQ ID NO: 4161467 - RNA, 59 nt, Human
uuguuuguuuuucccuuggugccaagcagaguauuuagcaccugggauuagauacccaa

SEQ ID NO: 4161468 - RNA, 80 nt, Human
uuguuuuccugagcuucaguuucuucaucuggugauguuaacacuggcuucauggggaguuugaggaucacaagagauaa

SEQ ID NO: 4161469 - RNA, 130 nt, Human
uuguuuuccuuuuucugaccuguguaaaaaguugacuacuaaggaauguguguuuuagagaauggaagugcugaaaauauuucugugguuuguaaaauuaauuauaugaggugugggguaagggaaggaa

SEQ ID NO: 4161470 - RNA, 72 nt, Human
uuguuuucugcuuaauaauguuuuaggugcugugguaaaaauaucuagacaucugaaacauuuaggaaacaa

SEQ ID NO: 4161471 - RNA, 72 nt, Human
uuguuuuggagaugagcuaaaaggacacuuuauauuuuccccuauccaacacaagcguuaucuucagaacaa

SEQ ID NO: 4161472 - RNA, 78 nt, Human
uuguuuuuggugcauuugaaaguaacuugcagaccucuguacacaacccugcaaacacuucaacgugcaucuuaucag

SEQ ID NO: 4161473 - RNA, 75 nt, Human
uuguuuuuuacaugcuucuauaugugaaguuuagaauaggaacuuuagcuuauauaguaagucugugauauucag

SEQ ID NO: 4161474 - RNA, 77 nt, Human
uuuaaaaaaguguugggaagaaagugcagugacucuauucugauuuucacugcauauucuccuuuauuuuguuugag

SEQ ID NO: 4161475 - RNA, 65 nt, Human
uuuaaaaggcagcuucuuuugucuuaugugcccuuggcuaggaaacaaaggaagucucuuuuaag

SEQ ID NO: 4161476 - RNA, 123 nt, Human
uuuaaaauuucauuguucccaugucugcauucagauuuagaaucuaacauucuuaucugcaggcugcaagauuguuuagauucuaaacuuucuguuggaggauggcgaagaauauauuuuaaa

SEQ ID NO: 4161477 - RNA, 75 nt, Human
uuuaaacaucaguauauggugaugugugugugcauuuaguccauacauguuguaccauauguuuuaaccuuuaaa

SEQ ID NO: 4161478 - RNA, 71 nt, Human
uuuaaagcaacuguugaauuggacuagagugauacuucuugaucugugcugguaaacaguaugcuguuaaa

SEQ ID NO: 4161479 - RNA, 102 nt, Human
uuuaaaggauguggacauaaggaagagcaaagaauuauguucaaacgcaacacacaauuaguuuuaugcuuuaggaugauuccuuuguuacaaaccauuaaa

SEQ ID NO: 4161480 - RNA, 71 nt, Human
uuuaaaggucaugcaguauucaggacaguucuuccuuguaaggacugccuaugcagugcaagauaucuaaa

SEQ ID NO: 4161481 - RNA, 75 nt, Human
uuuaaauaauuuuagacuuagagaagaauuccuaaaauacuauagagaguuucucucaguauagaauaguauaga

SEQ ID NO: 4161482 - RNA, 85 nt, Human
uuuaaauccuugauagcucagugucuuauuugaguucuccaggaaguggagguugggucagagauugaaugcaucuagauuuaag

SEQ ID NO: 4161483 - RNA, 84 nt, Human
uuuaaaucucuuucucucucuguauguguauauuuauauauauauauauauauauauauauauagagagagagagagagagaga

SEQ ID NO: 4161484 - RNA, 77 nt, Human
uuuaaauguggcaauggaaaagugaaaauagcuuuuaagauaaagcaauugucucugaauuuccagcugcaucuaaa

SEQ ID NO: 4161485 - RNA, 73 nt, Human
uuuaacgaaugucauugagcuccaauccuuuucuccaggaauuuauggggguuggaggaaugagaccguuaag

SEQ ID NO: 4161486 - RNA, 83 nt, Human
uuuaagaacaaacugccauaugucaacuguacuaaaaucugggaauuguggaguacaguuauaaguggucuugaauuuuuaaa

SEQ ID NO: 4161487 - RNA, 110 nt, Human
uuuaagacuacauuauccuguuucuaauuccuuuucuuucuuccugcggaaauguaauugcagaagcugggagaagggauuggagugugggcuucuauaucugucuugaa

SEQ ID NO: 4161488 - RNA, 57 nt, Human
uuuaagacuuagauuuauugggggaaccagauauccuaaugacugucaaguuuuaaa

SEQ ID NO: 4161489 - RNA, 73 nt, Human
uuuaagcauaauuugaggaguaauuguuguuccuucuuuucauaaaauaacaugcuuccaaauuauguuggaa

SEQ ID NO: 4161490 - RNA, 93 nt, Human
uuuaaggauauugugaauuuuacaagugaucauuuugguuuuaauuucaacacccagagagauugcuucuaaagaacagagcucaucccuaga

SEQ ID NO: 4161491 - RNA, 130 nt, Human
uuuaaggcaggggucaugucuguuuaaauuaugguauucucagcaccuagcacaauaaauuacuguggguguaaacagaagauuaugauauuuauuauuaguuaaaucagauaauaugaaucucaguaaa

SEQ ID NO: 4161492 - RNA, 59 nt, Human
uuuaagguaaguuucagcuuggaagaggauccuucaguggcaguaagauuuacuuuaag

SEQ ID NO: 4161493 - RNA, 71 nt, Human
uuuaagugggaauaaaugcuucaguuacuaacauaagagaaaaugacacugugcaucuauugccauuuaga

SEQ ID NO: 4161494 - RNA, 72 nt, Human
uuuaaguuccauuccaccugcagcacauucccugccugggaggcauggcaggaacuggagcuggauguugaa

SEQ ID NO: 4161495 - RNA, 127 nt, Human
uuuaauagaacucugugcauuucuugggacaccaaaggaauguuuugacucuagucauagaagugaaguguuuuuuauaucuaucuaguuauacguaugagguguccccaguguuucuguuagugga

SEQ ID NO: 4161496 - RNA, 99 nt, Human
uuuaauauaaaugcauuugucuaugucuuuaaacuuuuucuaaaauaucuauuucauaggaaugggcaagacaaagaaacugauguagauuaucuuaaa

SEQ ID NO: 4161497 - RNA, 96 nt, Human
uuuaaucguggccauuuucaaacacagaucugcacagugaacaauuuucugaggaauucuuacaaagcagagucuguucagaggaugcugauuaaa

SEQ ID NO: 4161498 - RNA, 93 nt, Human
uuuaaugaaauuuuggaacuugaccaguguauuauuugagaaauuggcaauauagucaagaguaauggacuuuaagguauaauuuuuaaugga

SEQ ID NO: 4161499 - RNA, 75 nt, Human
uuuaaugaggcaucugcagucacuagaaaauuaccaccaagggugaaagcuagugccuuggggaguuucaauaaa

SEQ ID NO: 4161500 - RNA, 110 nt, Human
uuuaaugucuugucuguuaguaccaaggccagagggaaaaggggaguaauauuuuauuauaaccuuuucuuuauccuccacaaaggccuuuuagcagaacugaccuuaaa

SEQ ID NO: 4161501 - RNA, 73 nt, Human
uuuaaugugggcucaucuuuaaauuuaugacguuaacuacguacaucauuuuggagaugagcauugcuauaga

SEQ ID NO: 4161502 - RNA, 70 nt, Human
uuuaauuauuucaggaacauuuaaccacaggguuggcaggccggaucuugauacguguuucuuaguugga

SEQ ID NO: 4161503 - RNA, 86 nt, Human
uuuaauuguuauuguuuaugaugaugauguuuuaauuguugauguaacacccugagcaucuucgugaaagcuucauaauaauuaaa

SEQ ID NO: 4161504 - RNA, 90 nt, Human
uuuacaaacaguuacuuugauguacacacacaucuuugcguacuuguccuguuguaugcugagauaguuuacaagaaguagaauuguagg

SEQ ID NO: 4161505 - RNA, 60 nt, Human
uuuacaaagaugucauaugugcucauguguuuacaaauguacauugauuauguuuguaga

SEQ ID NO: 4161506 - RNA, 79 nt, Human
uuuacaagaauguucagugccuuuaaacauacuucucaaaugauagagucuguguccucaggcacuacgaucagguaga

SEQ ID NO: 4161507 - RNA, 56 nt, Human
uuuacaaggcuuuaaauaaccguaaaguuagaaacuuugcaguauagccuaguaga

SEQ ID NO: 4161508 - RNA, 55 nt, Human
uuuacacccgggaccagccgugggcugaccuccuuggcugagccaggugugugga

SEQ ID NO: 4161509 - RNA, 60 nt, Human
uuuacacugccauucugaauacaugcuaacggacauaaagauucagaauaggcauguaaa

SEQ ID NO: 4161510 - RNA, 60 nt, Human
uuuacagcauugcugaaaguucagcagaaaauacagcagaauuuucagcuuuguuguaaa

SEQ ID NO: 4161511 - RNA, 67 nt, Human
uuuacauuuuagccuucaaagcauucucucaguagcagagcaggcuagcuuuaagccaaaaugugaa

SEQ ID NO: 4161512 - RNA, 62 nt, Human
uuuaccaguguuaaacaccagcagaaacugaaaucauguggggugcaagagaggcugguaga

SEQ ID NO: 4161513 - RNA, 65 nt, Human
uuuaccuguuucugaaccacuaaaggcaauucgugucuguuucagcugguuuaggaaaagguagg

SEQ ID NO: 4161514 - RNA, 78 nt, Human
uuuacucauguaauauaugauugacacuggcacccugguuauuuugcaaguagaugcucauguaaugcaugaaguaaa

SEQ ID NO: 4161515 - RNA, 67 nt, Human
uuuacugagguauaauugacauaacauucgcuuguuuuaggugugcaguuaaauuauuuucaguaaa

SEQ ID NO: 4161516 - RNA, 58 nt, Human
uuuacuguaugcugcuaggagccuggcucuuucccaggcaccuggauguagcagugaa

SEQ ID NO: 4161517 - RNA, 57 nt, Human
uuuacugugccccuggggaucucuguaaugccagagagaaagggauaacacguugaa

SEQ ID NO: 4161518 - RNA, 80 nt, Human
uuuacuguguguguacagaugaccuuuuguuuagauugaauugucuccccagaaguaagauuacugugagucauggugaa

SEQ ID NO: 4161519 - RNA, 92 nt, Human
uuuacuuauuguauaagaucauauuguaacuuuauuguguagccauaugucaaaagagaauuuacaaugcgugacuuuacaguguuauuaaa

SEQ ID NO: 4161520 - RNA, 69 nt, Human
uuuagaagacugucccagacuuauuaacacagaauaucugaggaaugagcccuggaggcauuuuuuaaa

SEQ ID NO: 4161521 - RNA, 102 nt, Human
uuuagaagcuauuaaggaagacagaagccuacagcuucauagacauuugguaugagguuuuguuucauuuuguuucauuuuuaauacaauacuacuucuaaa

SEQ ID NO: 4161522 - RNA, 60 nt, Human
uuuagacaucuauaauugcuaaacacccacauggguguuuagcaauuauagaugucuaaa

SEQ ID NO: 4161523 - RNA, 130 nt, Human
uuuagaccuuaauuuuccauagcaggcuggcugcuuuaacauucugaugcuguaauuaccuuuauugaaacauugcuguguaaaaggugauugaagcagcugucccuguuacgaguuuugauuuucugga

SEQ ID NO: 4161524 - RNA, 83 nt, Human
uuuagaguagcagaguuuugugaacaacuugguguuucagggcaacagcaucccaagagguaauacgagauaucugcucuaag

SEQ ID NO: 4161525 - RNA, 66 nt, Human
uuuagaguaguuuauuaugcuaagggccugggaaacacuuuagauucaguaaaaaaacuaccuaga

SEQ ID NO: 4161526 - RNA, 71 nt, Human
uuuagauaucuugcacugcauaggcaguccuuacaaggaagaacuguccugaauacugcaugaccuuuaaa

SEQ ID NO: 4161527 - RNA, 71 nt, Human
uuuagaugugcuuggaaaagcagugguggaaagaaaaccauucaaauauucuccaagcaccauacucugag

SEQ ID NO: 4161528 - RNA, 56 nt, Human
uuuagcaaagaagauauuauugcaugggacauacaugcaauauauauuugccugaa

SEQ ID NO: 4161529 - RNA, 76 nt, Human
uuuagccagagguggaagauuguuuuguggcauuuuaaguuugauguggaucagaagucuucacugucugguugaa

SEQ ID NO: 4161530 - RNA, 56 nt, Human
uuuagccugucaaauuggagccuagccuccccuggccucagugaugauggguuaaa

SEQ ID NO: 4161531 - RNA, 103 nt, Human
uuuagccuucuucauacauacuuuuaaccugugaaccuguuuaacaauuaagcacaugugggaacuguaaauuuugguugcagguaaaagagagaagguuaaa

SEQ ID NO: 4161532 - RNA, 55 nt, Human
uuuaggacugugacuuuuaugguuuguuuaucuagauagaaucacaaguccugaa

SEQ ID NO: 4161533 - RNA, 87 nt, Human
uuuaggcaaauuauuguaugcaguugccuaauuguuagucacagcaggccuaaaauuacaaaacugcuugagauauguuugucuaga

SEQ ID NO: 4161534 - RNA, 84 nt, Human
uuuaggcaaauuucagaugugcuggacuuuacccccacagcauagacacuguguaaaaaguaccaggcacuggaguaucuugag

SEQ ID NO: 4161535 - RNA, 67 nt, Human
uuuaggcaagggcaagauuaucauugugcuuuucccacuguaucagaucuacugcucucugccuaag

SEQ ID NO: 4161536 - RNA, 65 nt, Human
uuuaggggacaccauacucauguugguuccacaccagugcaacugaacauguguguggcccugga

SEQ ID NO: 4161537 - RNA, 84 nt, Human
uuuaggugggcaccuagcaggacucagcagauauugagugaaugcagaugugugugcccugggccugccagugucugacccgaa

SEQ ID NO: 4161538 - RNA, 78 nt, Human
uuuagucaacuguauacaauugucagacauguagaaaucaucagugucuccuuucagggguguauagaauugucuuga

SEQ ID NO: 4161539 - RNA, 129 nt, Human
uuuaguccauuucuuauguguaaacuucuguaagauauuuuuaggauggugaagugagcacaugcauugugcugacacuuccaguuaaaaauauuauuauagaaaaauucacuagaauugaggaauaaa

SEQ ID NO: 4161540 - RNA, 65 nt, Human
uuuagugcuuugcuauucauggagauaggccuggauaguggcugaacagaaagcagggcaguaaa

SEQ ID NO: 4161541 - RNA, 73 nt, Human
uuuaguguagaggauauugaauaucacagugaauggguaaugcuagcugucacaaauauuucucagcacugaa

SEQ ID NO: 4161542 - RNA, 55 nt, Human
uuuaguguagccuaagcagaauuagcugugagucaccuucuguugcugcgcugaa

SEQ ID NO: 4161543 - RNA, 63 nt, Human
uuuagugugacaguccccaguagcugcccaccuuacacuggggacuccccaauauacacuaga

SEQ ID NO: 4161544 - RNA, 56 nt, Human
uuuaguguuuagaggaggaaagaugaaaaacuaucucaaagcuucuggacacaaaa

SEQ ID NO: 4161545 - RNA, 77 nt, Human
uuuaguugggcugagcugguucucuugugaaauugugcugguuaucuuuaagcuuaucaguuauuuguccaauuaaa

SEQ ID NO: 4161546 - RNA, 58 nt, Human
uuuaguuuccuaggcuguauuguugcuuauucagcaaacuaggucacaggaggcggga

SEQ ID NO: 4161547 - RNA, 81 nt, Human
uuuauacauagaacaucugcugagggccaacuaugcugcuugagaacauaaauauggcuaauagauguuuccugucauaaa

SEQ ID NO: 4161548 - RNA, 73 nt, Human
uuuauagagguaaccaguuauuaugaggucauuaggauggguccuaauccaauauaacuggugucuuuguaaa

SEQ ID NO: 4161549 - RNA, 55 nt, Human
uuuauaguguuaauuuccuagggaaaagaauucucccugggucuuauucugugaa

SEQ ID NO: 4161550 - RNA, 71 nt, Human
uuuauaucauacauucagcagauauuugagcaccuacaugcuuuacuuugcagauguguaugucuuaugaa

SEQ ID NO: 4161551 - RNA, 80 nt, Human
uuuaucagacugacuuucuguggcuauacaccauacacaguauaguaaaguaacccucaggaaggacauuagucuuuaaa

SEQ ID NO: 4161552 - RNA, 83 nt, Human
uuuaucagaggccauuucucagagugugacuuggucaugaguuaucagccauuaacauuccugauagcugguguaguggugaa

SEQ ID NO: 4161553 - RNA, 78 nt, Human
uuuauccacagaaaaaggcuugaaaaucccccagagacacuagcugggcugauuggcaaaggucuuucacuguaugaa

SEQ ID NO: 4161554 - RNA, 83 nt, Human
uuuaucuauguuuggccuggcaauuucagcuccaggaaauuuuaagaaaacaguucagauuguuggagccaaacagucaugag

SEQ ID NO: 4161555 - RNA, 124 nt, Human
uuuaugaaauggaugaugguagauauaaauugcuauggcauuuuaucuaauuguauaaacuuaguagaauguuauagcaauuuuauuuuaaaauggaaguauuuaccauauguuagaaaauaaa

SEQ ID NO: 4161556 - RNA, 89 nt, Human
uuuaugaacaauuuguuucauggggauguuuauuauguuuauuaaauauugagccuuuaauguuuucccagugcagacgauaucauaaa

SEQ ID NO: 4161557 - RNA, 58 nt, Human
uuuaugaaccacucuacaccuuaguuuccuucucuauaaaauggggaugguucaugag

SEQ ID NO: 4161558 - RNA, 79 nt, Human
uuuaugaagacaaacgacguugcaaaugugggccaaucuaacuccauugggguugacaauguccuuugaauuucacaaa

SEQ ID NO: 4161559 - RNA, 75 nt, Human
uuuaugacauguuagggaaaugugauaugccauuuaauugaugaacaauccauccucuuugacucauguuaugaa

SEQ ID NO: 4161560 - RNA, 80 nt, Human
uuuaugcagggucaagaggcagaguucuuggcaaggccagagcuaggaacuauggccugugcuuuugauccuagccuaag

SEQ ID NO: 4161561 - RNA, 63 nt, Human
uuuaugccuuuacccauucaaagguuagaagagcuuuccagggcagauggguaaaggcauaaa

SEQ ID NO: 4161562 - RNA, 66 nt, Human
uuuauggcuggcuacauuuauacucucauuaguuuucugaugauugaauaaauauggucacauaga

SEQ ID NO: 4161563 - RNA, 67 nt, Human
uuuaugguaagauggcaaucauuuggagaguuugaauaauguaaucugauuuccaucuuaaaauaaa

SEQ ID NO: 4161564 - RNA, 58 nt, Human
uuuauguuauauuuugucaauugugaguuuauuuacagugggacauuuguuacaugaa

SEQ ID NO: 4161565 - RNA, 130 nt, Human
uuuauguucuucucuuuacuuccuaaagaaugguagaugcauuucaaacauccugacaucuuggcugcugaggauucuguauggaaaagcacuaugaggucuuuaaugcuugguuggaaggagaacuaaa

SEQ ID NO: 4161566 - RNA, 81 nt, Human
uuuauuaaaccguauacaugaagacauugcugagagagcuaaaaccuugccgugcuucugugugugcucuuuguuuaugaa

SEQ ID NO: 4161567 - RNA, 72 nt, Human
uuuauucauuguuucgucgcagcauguugcucagugguuugcaaauacuuguccgaugaaagaaugagugaa

SEQ ID NO: 4161568 - RNA, 60 nt, Human
uuuauucucagcaacacacauggagguguaaugaccuaccaaaguuuucugagugauaag

SEQ ID NO: 4161569 - RNA, 66 nt, Human
uuuauugcaauggugcuucccuucuauguuuagacaugaaagugaaugucacuguugaacaguaaa

SEQ ID NO: 4161570 - RNA, 127 nt, Human
uuuauuggccaccuacugugcaccaggcagugaacuuggaacuggggcuacuggguuacagcagugaccaagacagaggucccuguucuuaaggagcaagugagggcaacagaaaagagcagguaaa

SEQ ID NO: 4161571 - RNA, 65 nt, Human
uuuauuuaaagucguguguuaacaguagaaaauauuccucuaaugaugacaugacuugaaaugga

SEQ ID NO: 4161572 - RNA, 88 nt, Human
uuuauuuaacuuuuaagcuaguguagagauguugcuuauuuauauuaaugaaggucaugguaauauuuuugcuaaaagaguaaaugga

SEQ ID NO: 4161573 - RNA, 74 nt, Human
uuuauuuaaggauaucuacaauguugaaaccucaaaguaggguuuaacuuagaagagauauccucccugaugaa

SEQ ID NO: 4161574 - RNA, 104 nt, Human
uuuauuuauccuauguuucacuacaaauauguuaagguguuugaucauggagcugcuccgaacacauucauauaucugcagugaaacaugggguguuagauaga

SEQ ID NO: 4161575 - RNA, 58 nt, Human
uuuauuuaugcaguguugcaugaauuuucuuguuugugcaucuuucugcauauguaaa

SEQ ID NO: 4161576 - RNA, 89 nt, Human
uuuauuucagaugaaaacugaauucccaagggcauguuuuucaaaaaauauaacuuuguaauguuugugaucauauaguuugaaaugaa

SEQ ID NO: 4161577 - RNA, 63 nt, Human
uuuauuugggauuucucaucugacuaggcuugcuuuuuagagacugauggaucaccaaauaga

SEQ ID NO: 4161578 - RNA, 58 nt, Human
uuuauuuuccucugcauucagcucauguggcaaguuugaaugcaagaaggaacaugaa

SEQ ID NO: 4161579 - RNA, 129 nt, Human
uuuauuuuuaauuuuauaacagauuuacagauuguauucuuccaaaugaauaugguuuucgauuuaacacacuuuugaaauuguucauuggaagugcauuauaggcucuguguaagccauaaaauacaa

SEQ ID NO: 4161580 - RNA, 90 nt, Human
uuuauuuuuucaaggcaaagagagugucucuuuuuaauuugacccgcaaguuagagauuccaucaugcugcuaaugccugauaaaaugaa

SEQ ID NO: 4161581 - RNA, 92 nt, Human
uuucaaaaaaugucuuuuucagaauuagcauaccauugggucgugacuucaaaugccaguguguugauuccagguggugauauuucaggaga

SEQ ID NO: 4161582 - RNA, 88 nt, Human
uuucaaaggguuuuuaggaaggagacagcugaugacuuugucagucaaacagccuccuguucuaaaagaagccaacaaaccauugaag

SEQ ID NO: 4161583 - RNA, 77 nt, Human
uuucaaagguucaugcuuauugcauauuuggagagaucguuccaggcauaagccuugaguguaaugagcuuuugaag

SEQ ID NO: 4161584 - RNA, 61 nt, Human
uuucaaauugcagguuuugacucguucauguauugugaaaucgauucaguggaguuugaaa

SEQ ID NO: 4161585 - RNA, 79 nt, Human
uuucaaccucuucauccagcuuggcagagcuaccugggguguguaggagaggccagagcuggaagaaaggaggcuggaa

SEQ ID NO: 4161586 - RNA, 84 nt, Human
uuucaagaggguucuaguucuuaggaacagacaggaaaauggugacagguaauugguuccugggaggcuggcacauucuggaga

SEQ ID NO: 4161587 - RNA, 72 nt, Human
uuucaagcaugucaaguuaguccuccaaagagacauuuccuuugucuuguaauuuacuuguuguguuaggaa

SEQ ID NO: 4161588 - RNA, 79 nt, Human
uuucaaggauaauuuuagcauuccagugcacaguagaaauaaccuuauucccugcuaauuggaauguauaauucugaaa

SEQ ID NO: 4161589 - RNA, 81 nt, Human
uuucaaggccuauuacagaaaacuucaagcagcagucaccaacucaugacauggcuuuuuuauucugaaugaggcuugaga

SEQ ID NO: 4161590 - RNA, 76 nt, Human
uuucaagguaaguggacucuucccagugcuugggccagggcuggaaaugggcgggacagggugcacgggcgugagg

SEQ ID NO: 4161591 - RNA, 84 nt, Human
uuucaauuggguagaauucacauucaguucuuuucuguuaaguuucacaggguagaucuggaacugagguuuauuggauugaga

SEQ ID NO: 4161592 - RNA, 57 nt, Human
uuucacagcauauagguguacuucuuugggggacuagugcaauuauugugcuagaga

SEQ ID NO: 4161593 - RNA, 55 nt, Human
uuucacauaaauggaguaaagagcauuuaaugaacugagcuccaugcaugugaaa

SEQ ID NO: 4161594 - RNA, 56 nt, Human
uuucacauguggaaugccagguuaaauucuuguugggccaaauuccaugugugaag

SEQ ID NO: 4161595 - RNA, 64 nt, Human
uuucacauuuaggcgugaauugccaguuuugauuugcuaacaauggccuacccuaagugagaaa

SEQ ID NO: 4161596 - RNA, 68 nt, Human
uuucaccaagcuucguggaggaaguuacucaugaacugagcagauguucuccagggagauuguagggg

SEQ ID NO: 4161597 - RNA, 69 nt, Human
uuucaccccaaaggcauuuugcugaccaauuuggagacaugguuacaacucgucuuaugguuuguggga

SEQ ID NO: 4161598 - RNA, 71 nt, Human
uuucaccuauguuacaaauccuacagguagguguccaacagggccagccugagccuucuguagcaaugaaa

SEQ ID NO: 4161599 - RNA, 65 nt, Human
uuucacgcugggagcaagucaggaaaggugaugccucucaccgccaagaaggcucccagcagaga

SEQ ID NO: 4161600 - RNA, 68 nt, Human
uuucacugccagagacucuuagcggccuucaguucucuugagcuggagccacugggucuuguaugaaa

SEQ ID NO: 4161601 - RNA, 65 nt, Human
uuucacuucuuccucuuugucuugagucagcagugacugggaugucuuuaggggaagagaagagg

SEQ ID NO: 4161602 - RNA, 57 nt, Human
uuucacuugaagaugcugaugauaguauuccacagucuuuagccauccacagugaaa

SEQ ID NO: 4161603 - RNA, 68 nt, Human
uuucagaaaaagggauuugugauccaggucucucauuuaucuuacagaucuggugccccuuccugaga

SEQ ID NO: 4161604 - RNA, 92 nt, Human
uuucagaaaacuagagaaggcuuauuuucuuuguaaaaauguugcuuugcuuugcuucacagaaugauccuucucccaaaguguuucugaga

SEQ ID NO: 4161605 - RNA, 76 nt, Human
uuucagaaagacauauuucuaaguuuauuucuagcuuugaagaaagcauaucugccuaguaaugugucgauugaag

SEQ ID NO: 4161606 - RNA, 76 nt, Human
uuucagaaggaggccgaauacuuuaagucauuauccugaugaaaugacuuugaaauauuugaguuucgauuugaga

SEQ ID NO: 4161607 - RNA, 60 nt, Human
uuucagacaugggggcaaacagaggacugggaccugugguucugccaucccgguuuggaa

SEQ ID NO: 4161608 - RNA, 65 nt, Human
uuucagagaugcagaauucaggucccgcuccagacccaugagucagaaucugcauucuccugaga

SEQ ID NO: 4161609 - RNA, 62 nt, Human
uuucagagcucagcagcuagaguccuugcuuaauuauacuccugucagcuggaacucugaaa

SEQ ID NO: 4161610 - RNA, 59 nt, Human
uuucagaggacaaccagccaucuccacucaccauaggaagguggcugcauccucagaag

SEQ ID NO: 4161611 - RNA, 66 nt, Human
uuucagaguaagaauagaaacauucuccuuuagaaaugguggauguauacuuuucuuucucugggg

SEQ ID NO: 4161612 - RNA, 70 nt, Human
uuucagcaauaguauuuugggacaacuuuauaaaauugcugaagugcaaccugaaauacuagaguagaaa

SEQ ID NO: 4161613 - RNA, 84 nt, Human
uuucagcacaaugcaggcuggucugaccaucccucggcccuggccagggggaggauaauggacauaggcuacagcaggcuggag

SEQ ID NO: 4161614 - RNA, 77 nt, Human
uuucagcugaagauccaggcaaaaguuggaaauaaaugcaauuuucaaguucuguucuaggguaacuuaaguugaga

SEQ ID NO: 4161615 - RNA, 76 nt, Human
uuucagcugcucuguugagcugaaggaagcuaggccaguuucagggauacaauucagcucccagggccuguuggaa

SEQ ID NO: 4161616 - RNA, 105 nt, Human
uuucaggaggcaugacuggauucaggggcucaaaugaaguccaaagggcuuaaauuuuaucccuuagcuucauuuuccuguuuuguuuuguuuuguuuucuggaa

SEQ ID NO: 4161617 - RNA, 64 nt, Human
uuucaggcauggaaacuggauuaggauaaucuuuaauuacuaaugcacagguaccugucugaga

SEQ ID NO: 4161618 - RNA, 93 nt, Human
uuucaggcuuccgaacuauuugcuucuagucaguuccaugugcagguaacuccagccaaaggucuugucuugacagaguuugccagccugaaa

SEQ ID NO: 4161619 - RNA, 55 nt, Human
uuucagggaaaaauggguuuucugagaaaaugaaaaucauuaauuuacccugaaa

SEQ ID NO: 4161620 - RNA, 69 nt, Human
uuucagggugcuccagacacccauggccacuucauguaaaccacugacaauuucuagagcacuuugaga

SEQ ID NO: 4161621 - RNA, 79 nt, Human
uuucaggucauagguucaaaaggcagauuucaaaucuuauauuuguuaauaucaaugcugugaauuugcugaaaugaaa

SEQ ID NO: 4161622 - RNA, 59 nt, Human
uuucagguucagugguauggcuaaaaacuuuagccaauaaauuuacaacuagacugaag

SEQ ID NO: 4161623 - RNA, 122 nt, Human
uuucagugagccaacgucaaauaucaggggauuuuacacauaaauguguagacacaaucuggauuuugugucuacguguuuauguguaaaaucccuugauauuugguguucgcucauugaaa

SEQ ID NO: 4161624 - RNA, 60 nt, Human
uuucaguguguaaauugaaauagcaacuaauaguuggaauuucaguguaugacagugaaa

SEQ ID NO: 4161625 - RNA, 88 nt, Human
uuucaguguuacugauaaguuuaguuaaguaaacucuuuacacaguuuaaggaaauuuauaugacagauaaaacagucaauguugaaa

SEQ ID NO: 4161626 - RNA, 78 nt, Human
uuucaguuuucccacauuuggggcgcuagguagacucaaccugaacuacauucaccccaaaguguuggauaauugaaa

SEQ ID NO: 4161627 - RNA, 60 nt, Human
uuucauaccauuucaguaaaaacuuaggaaaaagcaauuguuccacugagagguuugaga

SEQ ID NO: 4161628 - RNA, 55 nt, Human
uuucauaguaucuugcaaaggaaagaaucuuuuccuuugcaagaugucuaugaaa

SEQ ID NO: 4161629 - RNA, 88 nt, Human
uuucauccuucccuccuuguguaagaaaauaauguaaauagccuuuauugcucuuaguuuuucuuguaaaagcugugggaaggugaaa

SEQ ID NO: 4161630 - RNA, 78 nt, Human
uuucaucuucuauuaggucagcguacaaugcacucacaaaaucaaaguuuauugucacgucuuaauucuaggauggaa

SEQ ID NO: 4161631 - RNA, 57 nt, Human
uuucaugagacauuggcauuugcgucccucugcaauaauagucacugucuaaugaag

SEQ ID NO: 4161632 - RNA, 74 nt, Human
uuucaugauugaggguaucuuugcucauuauuccuaugaaagacgugagcuucugccucucaguccaaaugaag

SEQ ID NO: 4161633 - RNA, 100 nt, Human
uuucauguuucugauuucuugacugauuuuucuaaaauuuggaacuuagaaaaacauauaaauuucuugagaaaugucaggaaagaagucccgcauggaa

SEQ ID NO: 4161634 - RNA, 73 nt, Human
uuucauguuugagacuaauuuuucccauuguaggugaauauuauuuaaggagcaguuauuuuuagacaugaaa

SEQ ID NO: 4161635 - RNA, 83 nt, Human
uuucauucagaucucgugccugggcaccagcgucucgugagaacucaaaugggcugagugucccaggccgaagugagaagagg

SEQ ID NO: 4161636 - RNA, 78 nt, Human
uuucauucuaccacuaaaaacauucuguggaaggcaggaccuuccauacacauugaauuuuaguacgguagugugaag

SEQ ID NO: 4161637 - RNA, 75 nt, Human
uuucauugcuucaucuuuucaaacuguagcugccauucuuuuguguuugguuuuggaagggaagagcauuugaga

SEQ ID NO: 4161638 - RNA, 59 nt, Human
uuucauuguagaguagacacaacugcagugagcaguaguggauuacaagacaguugaga

SEQ ID NO: 4161639 - RNA, 81 nt, Human
uuucauuguccccaggcaagacauagauagcgggccagacgcuccuuuccccuuuccugggacucugauaaggcaaugaaa

SEQ ID NO: 4161640 - RNA, 59 nt, Human
uuuccaaguugagcgauuuuccuuucaacguuuuaguagagggucuucagcuuuggaaa

SEQ ID NO: 4161641 - RNA, 60 nt, Human
uuuccaaguuguuaccuucuacaaaaauugcaguacaaguggaagaaaauaacacggaaa

SEQ ID NO: 4161642 - RNA, 60 nt, Human
uuuccacagcuguauaaaauaaggaaauaacuauuuugauuauugagacauuuguggaaa

SEQ ID NO: 4161643 - RNA, 83 nt, Human
uuuccaccaccccguuucccacuguggcagagccucgcauagaagauucgagggccugggugggagaagaggcacuggggaaa

SEQ ID NO: 4161644 - RNA, 86 nt, Human
uuuccacccugaggacaacaggacauguaccagguggucuguauggucaacuagacuuugguuuuguuccuucuucaguuaggaag

SEQ ID NO: 4161645 - RNA, 68 nt, Human
uuuccagaucugcuccucuguccauguagucuuaaagagaacuggaaagagauggcaggguuuagaaa

SEQ ID NO: 4161646 - RNA, 68 nt, Human
uuuccagaugcuagguugaaaggcucauggauaaagcauagagaaauauuugaugaguggucugggag

SEQ ID NO: 4161647 - RNA, 72 nt, Human
uuuccaggaaugacccaacaguuucauauauugugaaauauuugagaucgugucgucauuuauuccuggaag

SEQ ID NO: 4161648 - RNA, 77 nt, Human
uuuccauccuaauaaaagaaguuacucagauggauauuccagauguauuuaagcugcuuuuauuaggacaauggaga

SEQ ID NO: 4161649 - RNA, 57 nt, Human
uuuccauggcagcagccagagucuggaaaagaggccuggagaggaagccgguggaga

SEQ ID NO: 4161650 - RNA, 61 nt, Human
uuuccauguuggugaaaugaggaaaaaucccacccuccccagguuucauuaagauaggaaa

SEQ ID NO: 4161651 - RNA, 60 nt, Human
uuuccauuuucagcuggcuguugugguacaagggcagccacagugagaaauaaauggaaa

SEQ ID NO: 4161652 - RNA, 129 nt, Human
uuucccaaauuaggaguuaauuaguaccaaaaugugcagugcguugaccggccuuccacuggguucccaaagcagagaacugucucauuuugaaaguaccuaauugugccugcaucucuguuuggagaa

SEQ ID NO: 4161653 - RNA, 73 nt, Human
uuucccaaucuaauccccaaguccuguauugacugcaugaucuguacaguucuuugaaggaucuaggaggaga

SEQ ID NO: 4161654 - RNA, 66 nt, Human
uuucccacacugucagaacagaaggcccagcaagcccgcuugagcaccucccugacaguggggaaa

SEQ ID NO: 4161655 - RNA, 78 nt, Human
uuucccagucuccagaucaauuggcagaagccucugguuauuuccuucuggaugcuucuauuauuuggagcugagaag

SEQ ID NO: 4161656 - RNA, 83 nt, Human
uuuccccugaugacuugaguaaagacauuagauuaacguacaucugcuuuuauuuguguguguguaaugucuuuuagggggaa

SEQ ID NO: 4161657 - RNA, 101 nt, Human
uuucccucauggaguuuauaagagcagagguugaauaaauaauuacaagugcaucauuuacuuuaguaaacuuauguuacuuuuuauauucuagaaggaaa

SEQ ID NO: 4161658 - RNA, 83 nt, Human
uuuccguugguuuucuuugacaaaaucuggcgaccugugccaacaagaccugccaggcagugucagauugaggaccauggaaa

SEQ ID NO: 4161659 - RNA, 87 nt, Human
uuuccuaauauuuuauucuugguaaauuauuucuuccaauuacuuaauuuugauggauggauaacgugccacugaauggaaaggaga

SEQ ID NO: 4161660 - RNA, 85 nt, Human
uuuccuagaagaccggugagagcauuugaauuauaauccaaauauuuuccuggcuuucauugaaauacagucuugacuuaggaaa

SEQ ID NO: 4161661 - RNA, 72 nt, Human
uuuccuagagagccagcauuugggcccugcuggcuucauugaaaguaggcaggcucaaaagcugguaggaag

SEQ ID NO: 4161662 - RNA, 59 nt, Human
uuuccucacucaugucaucaguguagcaauugguuugggucagguguauggggagggaa

SEQ ID NO: 4161663 - RNA, 67 nt, Human
uuuccucaggcacagggcugguugugguaauggccacaccugguaaggccucugucauccugggaag

SEQ ID NO: 4161664 - RNA, 81 nt, Human
uuuccuccagguucugugcuuaccugcccaggugagucaaugagcucaucugagguuugaggcaguuguccuggaaagaga

SEQ ID NO: 4161665 - RNA, 73 nt, Human
uuuccugcagcuauugucuccugggcccagcugauggagacagacaaagaggguccagccaauuccaaggaaa

SEQ ID NO: 4161666 - RNA, 83 nt, Human
uuuccuggcuuugaggauccccucuuaaacuagaaaaggcccuugaagucuccagagaaggggggauauaaggcuacuggaaa

SEQ ID NO: 4161667 - RNA, 73 nt, Human
uuuccuggggccagcacugguggacuuaugguaaaugauuguacuucuuaauucaaugcugguccuaaagaga

SEQ ID NO: 4161668 - RNA, 59 nt, Human
uuuccuguacuuccggccugcuacaugaauggcaaaguaggcccuggaggucagagaaa

SEQ ID NO: 4161669 - RNA, 57 nt, Human
uuuccugucucccaacugacauugaucauaauucagugccugugcggacucagggaa

SEQ ID NO: 4161670 - RNA, 62 nt, Human
uuuccuguggguuuucuguagaaaucccuuuuuggauuguacagaugaaccucacucugaaa

SEQ ID NO: 4161671 - RNA, 130 nt, Human
uuuccuuaaaccucaggaaucacugucugccagcuuucaacuuuuuuucugaagauuucucauuucucucguucuucaaaaaguugaagaguuggggccuugcucuggauuagacuuugguuuaagggaa

SEQ ID NO: 4161672 - RNA, 82 nt, Human
uuuccuucauauuuugaauuauuucugaugcuaacugggcauuuagggagucaaagaagaugguuccaaaauaggugggaaa

SEQ ID NO: 4161673 - RNA, 70 nt, Human
uuuccuucaucaucugagagcuggagaacaagcaugugugugccggccaugagaugacuguacaggggaa

SEQ ID NO: 4161674 - RNA, 55 nt, Human
uuuccuuccaaaugcccgggagccaaccaauugcauuccuggcauuuguaggaaa

SEQ ID NO: 4161675 - RNA, 59 nt, Human
uuuccuuccauagcaaaacaugccagccaccaaacaguuggguuuagaauggaaggaaa

SEQ ID NO: 4161676 - RNA, 58 nt, Human
uuuccuuccuaaggugaagcaaugauugaacaaggauugcugagcuuuggcaaggaag

SEQ ID NO: 4161677 - RNA, 82 nt, Human
uuuccuuccucuuucuggaaggaccccaggacuccagaacaccuaagcaccuggcugagccuccaggaagagccugaggaag

SEQ ID NO: 4161678 - RNA, 56 nt, Human
uuuccuucucagggagcuucaaugggaaaggucucgaaagcuucaggaggagcaga

SEQ ID NO: 4161679 - RNA, 63 nt, Human
uuuccuugggucucuuaguggcaugguuuaaugguaauucagaucacucuuggauaaaggaaa

SEQ ID NO: 4161680 - RNA, 73 nt, Human
uuuccuugugagagccagcaguaaagacauugggggaaucugaaugugauuuggaugguauacacaagagagg

SEQ ID NO: 4161681 - RNA, 92 nt, Human
uuuccuuuggcauuaguaaaguaaacccacuuuguagucagcacacagcauguuaaagagaaaguguuugucuuacaguguguuaaagggaa

SEQ ID NO: 4161682 - RNA, 61 nt, Human
uuuccuuugggcacccgagcucacagugcagcauggagcaucaggguaggucugugggaga

SEQ ID NO: 4161683 - RNA, 73 nt, Human
uuuccuuugugcagcuaagaaaauggcaccagugucagaauucacucuagcccuauuaucugcauaagcgaag

SEQ ID NO: 4161684 - RNA, 65 nt, Human
uuuccuuuuccuccuucguauuguugcuuacaaacauaagacaauaacugcugaggagaagcaaa

SEQ ID NO: 4161685 - RNA, 79 nt, Human
uuucgcucgguugucagcuuccuugaauucuguagaagcaauugcuccugcuggaaguagggaaugaucgcuagcgaaa

SEQ ID NO: 4161686 - RNA, 91 nt, Human
uuucggccccugugggacaauggaggccucucucccuucguguccaggccugggccucuggagagagaccuccaugcccagaggucagaag

SEQ ID NO: 4161687 - RNA, 65 nt, Human
uuucuaaaauucugaaagauuccuuauuccagcauaaaacuggccuaaggauuucagaaaagaga

SEQ ID NO: 4161688 - RNA, 80 nt, Human
uuucuaaacuaguuaguuugcauuauuuguauaguuaaaagauaaugcuuauguuaugcaauuugcuuguaguuuagaaa

SEQ ID NO: 4161689 - RNA, 62 nt, Human
uuucuaagccaucagugauuucccuauuggaacaagggaaagaacccuggauggcugggaaa

SEQ ID NO: 4161690 - RNA, 58 nt, Human
uuucuaauccuucacucucacagccacacaauccucagcugagggugagcuuuggaga

SEQ ID NO: 4161691 - RNA, 81 nt, Human
uuucuaccuugcugaguccauguaagauagauuaccuucauggcuguuuccaguuacguggauaaagggaggagauagaaa

SEQ ID NO: 4161692 - RNA, 76 nt, Human
uuucuacuugaaaacauuuucucuugauuccguguaugaacaggaugauggaauggaggacaugugggaguggaga

SEQ ID NO: 4161693 - RNA, 55 nt, Human
uuucuagaggcuccaggggaguauuguuuuccuugccuuuuccagcuucuagagg

SEQ ID NO: 4161694 - RNA, 61 nt, Human
uuucuagagugggcaugucuuauacauauuuagguuuuuaaaauaugcagcuacucagaaa

SEQ ID NO: 4161695 - RNA, 87 nt, Human
uuucuagauuuguuacuuguagaaccuguuuauuauagagaguucuaggcuucuuugaaagcuguucuagaguugauaaaucugaaa

SEQ ID NO: 4161696 - RNA, 97 nt, Human
uuucuagcucaguucuccucagacucugaugcagccuugugaggcaaagccacauaucuuauccaugcucagauuugggggcuucugagcuauggaa

SEQ ID NO: 4161697 - RNA, 60 nt, Human
uuucuaguaaaagcuaauuaccgugcucaauacaguacuuuaaacaguauuuacuaggag

SEQ ID NO: 4161698 - RNA, 82 nt, Human
uuucuauaccugagaauuucccagaggccaugaggagcuaauccucccaaggcuuuugggaauuuucaacccuguguggaaa

SEQ ID NO: 4161699 - RNA, 60 nt, Human
uuucuauaguaugugagcugaccuuccuaauauucugucaguucaugucucaaauagaaa

SEQ ID NO: 4161700 - RNA, 75 nt, Human
uuucuauuagguuggugcaaaaguaauugcgguuuugccauuacuuucaauuacuuuugcaccaauauacagaag

SEQ ID NO: 4161701 - RNA, 82 nt, Human
uuucuauuuguugucagguuacaaaacaguuaaauuaaauuuucuaaacagaaaagaaacuguugcgugacagcgauaggga

SEQ ID NO: 4161702 - RNA, 58 nt, Human
uuucucaagaagagcgagaaggcuuggaccacagccuccgcuuccucuucuggagaaa

SEQ ID NO: 4161703 - RNA, 59 nt, Human
uuucucagcuugaguggaugagcugguaaauaccaccguacauaucaaagcuguagaaa

SEQ ID NO: 4161704 - RNA, 82 nt, Human
uuucucaggcauauagggguaucauuucuuaauaaaucaugacuugauaacugguuaagggugaaauccauaaacugagaaa

SEQ ID NO: 4161705 - RNA, 76 nt, Human
uuucuccaucuuccuuucuuuuccuauuuugcagaccuuguaaugaggcacuuaaaagugaagauacuggcaggaa

SEQ ID NO: 4161706 - RNA, 67 nt, Human
uuucucccuccucaaauaucuuuguguucucaucauuaaaaggaagacaaagaaaggagaggggaaa

SEQ ID NO: 4161707 - RNA, 94 nt, Human
uuucucccuuagccugaugauguauuauauuaauauaucauuaaagagacagcuuucagaaaugauguauuaguacaacacaucacuggagaaa

SEQ ID NO: 4161708 - RNA, 65 nt, Human
uuucuccuucgaggcccagcuccccagugucccccacuggagagggagcuucuggaaggcaggaa

SEQ ID NO: 4161709 - RNA, 87 nt, Human
uuucucggcauuuuggucgggaacacgggcacuugcugggguauuuccgcuaguacaugugguccuggccagagauggugacaggaa

SEQ ID NO: 4161710 - RNA, 82 nt, Human
uuucucuacuacuuuucgcuacuggaacaccugcucuuugagggggcuggccuccugcuagauggaaccugugggagagaaa

SEQ ID NO: 4161711 - RNA, 106 nt, Human
uuucucucaaacugacuucaaaugaauuuugucuaaaauucuacugauguaaaugaugaguaaguggaggagcucagccauucauuugaagguggucugggagaag

SEQ ID NO: 4161712 - RNA, 56 nt, Human
uuucucucgagguggaguuuuccagagcuugcgaaaaucuucugccuaugaagaaa

SEQ ID NO: 4161713 - RNA, 64 nt, Human
uuucucucuauccccuucuucauucucagagauaacuuugggugauauuaaggauagagacaag

SEQ ID NO: 4161714 - RNA, 65 nt, Human
uuucucuggcauuagguauaaaagucauucuguguaacuuggcuccaauaucacuuguagagaaa

SEQ ID NO: 4161715 - RNA, 62 nt, Human
uuucucugggcacucuccaaaccucuccccuacacauuggguugaccagaugcccugaggag

SEQ ID NO: 4161716 - RNA, 80 nt, Human
uuucucuggguagcaaacugaacugugugaaaaaguuucuucuuuauaugugaagguuugcagaaaggagcacagagaaa

SEQ ID NO: 4161717 - RNA, 55 nt, Human
uuucucuguucucuaacuguaauauauuuuaauuacagauggaggaacagauaga

SEQ ID NO: 4161718 - RNA, 84 nt, Human
uuucucuguuuuccacauucuguccuugaacugcaggugucuagugucuuuagagucagaaggaacagacggggagcagagaaa

SEQ ID NO: 4161719 - RNA, 83 nt, Human
uuucucuuggacuucaguguuauuagaugagguuugggaaaguuuuauuagcacuuuuuaucaugacacugggacaggagaga

SEQ ID NO: 4161720 - RNA, 78 nt, Human
uuucucuuguucuggauguugcggaguacagaugucacgucuggaacugcugcagucauuuugcuaccaugagagaga

SEQ ID NO: 4161721 - RNA, 71 nt, Human
uuucucuuuugguccauuauaugcugucaugggcucuacuccugcagccccccagauggccguaugagaag

SEQ ID NO: 4161722 - RNA, 93 nt, Human
uuucugaaaguaucgacagaugacaguagcacuuuuaacuuggagaagaagagcacuuuaagugcauucugucaucuugguuacuuacugaaa

SEQ ID NO: 4161723 - RNA, 78 nt, Human
uuucugaacuguggguaauauauuagacguagaaaaguacaucauguuaugugugaaagagucuuauaguuucagaga

SEQ ID NO: 4161724 - RNA, 65 nt, Human
uuucugaauuuacucaaggucaacacuaugaaacaucaaugacuaaacagcuguaaauucagaga

SEQ ID NO: 4161725 - RNA, 119 nt, Human
uuucugaccaguuccaggugacauggauccuggugagcucuaggguaugcuuugaguaacagagaauauuagaguuaguuuauaaugauaaccauagcaccugaagcuaaauuagcaaa

SEQ ID NO: 4161726 - RNA, 63 nt, Human
uuucugcagaagcucacuaaauccaggaguccccugggugcaaguaaugaauuucugcagaga

SEQ ID NO: 4161727 - RNA, 125 nt, Human
uuucugcagagagcugcugauugauagcugacaguuuuugcuguauuguaaugucccuuuuaucccagcucuauaguugcaguaaaaaauguuuuuguguggcgaaauacaguaguauccagaaa

SEQ ID NO: 4161728 - RNA, 62 nt, Human
uuucugcagcagacucaguguggagccgucagccagcagcacuuagucucuggguacggaaa

SEQ ID NO: 4161729 - RNA, 82 nt, Human
uuucugccaucuaccccuuugacuuuccucacaagucuggagauauuucuagcccagaagagggaagcaacagaggcaggaa

SEQ ID NO: 4161730 - RNA, 62 nt, Human
uuucugcucgcucucaaucaggcagacaacaucccucugacugauuaagacacggggggaaa

SEQ ID NO: 4161731 - RNA, 75 nt, Human
uuucuggcacugcccagccucugcuccaaccucucuggaggcaaaggagguaacaggagggcacaaggccaggaa

SEQ ID NO: 4161732 - RNA, 55 nt, Human
uuucuggcagcgggacagggguggugaggcagucccucccaggaguggccagaga

SEQ ID NO: 4161733 - RNA, 96 nt, Human
uuucugguccagugugugagcuucuggacucugcagagaaaaguaacuuaaaaaaauuugcuuuguguuccagguucagcaggcacuagccaggaa

SEQ ID NO: 4161734 - RNA, 62 nt, Human
uuucuggucccuacgauaagaagaguuguuuggcuagaagguuuuaucugugggaguggaga

SEQ ID NO: 4161735 - RNA, 64 nt, Human
uuucuguaaagaccaagccagcuguucucugccagccuauaauuggccauugagucuauagaaa

SEQ ID NO: 4161736 - RNA, 57 nt, Human
uuucuguaaguucaggcuuuccuaguugaaauggaaagaaaacugaacuuggaguga

SEQ ID NO: 4161737 - RNA, 59 nt, Human
uuucuguagaggaacaagagcucuucccgguucaaaggggaagucuucugucacagaaa

SEQ ID NO: 4161738 - RNA, 84 nt, Human
uuucugugcaauguuugcaacuugcuguauuuuggcaggaauaacaaagccaagugcagagagcugacgaacuucucucagaag

SEQ ID NO: 4161739 - RNA, 82 nt, Human
uuucuguggcauagugauguuuggcuucugguucuuauugagaggugcaguauauggauuuuaaacauugcagcuauagaaa

SEQ ID NO: 4161740 - RNA, 56 nt, Human
uuucugugguuaguuccacuaucuguauuugauagcuauggaaauugaaacagaaa

SEQ ID NO: 4161741 - RNA, 98 nt, Human
uuucuuaacaaauaaggggaagagauguugaaguuuauuaguaaucaaauuauuauugauuaaaaugagacaucauuuuuacuuguugaauuaggaaa

SEQ ID NO: 4161742 - RNA, 64 nt, Human
uuucuuaccagccuuuuaacaugggccuccacugggugcaugugagaaagacugggaucagaga

SEQ ID NO: 4161743 - RNA, 85 nt, Human
uuucuuagauacagaguuuuagagagauuuuugugugugacuuuucucagucuuucagguauuuucaaggcuuguguuaaaggaa

SEQ ID NO: 4161744 - RNA, 56 nt, Human
uuucuuagggacuguaaaauagcaucacuaaaacuauuugaucaagcccugagaaa

SEQ ID NO: 4161745 - RNA, 86 nt, Human
uuucuucacagauuuguauuagcuguaaauuuucugucugaaacccugacacagacagagggagaagcuaaaauaacuggagggaa

SEQ ID NO: 4161746 - RNA, 97 nt, Human
uuucuucagggccugucaauuacaguagagguuagagagccccagugacaauucuuccuuggggguccuccucugcuuaagacaucucuuagggaga

SEQ ID NO: 4161747 - RNA, 73 nt, Human
uuuugaaaacaaauuuggagaaguuugauucacccuauuggaaggagaagcuggacuuuccaaacuuucagaa

SEQ ID NO: 4161748 - RNA, 127 nt, Human
uuuugaaagaaugagaaagggagagaaugagagagaguguguguuuguguauauguguaugucuaaguacuugguauauaucggcacuauuuuaaguuauuuuaauucuuacaucaaccuuuugaag

SEQ ID NO: 4161749 - RNA, 75 nt, Human
uuuugaauaacucucauguuuaggaaugggauuuucuuauuuauuuacauuucugauuacuugaguuauuuagaa

SEQ ID NO: 4161750 - RNA, 90 nt, Human
uuuugacacagcaggcauuugauauauauuucuugauuaaaugaaagauuaaaugaauaccaucuuagaugucugcauagugcuuuaaag

SEQ ID NO: 4161751 - RNA, 76 nt, Human
uuuugagaugacugaauucaaugacucuguguggggaaaacuaaucucugaauaguauauugaaagcaucuaagag

SEQ ID NO: 4161752 - RNA, 83 nt, Human
uuuugagcagcguauugcauggaagcugaaaaagacacgguuaguagccguaugucuggguuucuuaauacguucucucagaa

SEQ ID NO: 4161753 - RNA, 88 nt, Human
uuuugaguggcagcaggguauggugggaagaaucagaggcaugaacuccccuccugguuugcccacaccagccacgggucacucagga

SEQ ID NO: 4161754 - RNA, 90 nt, Human
uuuugaguuacaagaggaaauaaauggggaaaguaagggaaaggagaucacucucuguucuugcuuuucuccaaccuacuaacauuagag

SEQ ID NO: 4161755 - RNA, 66 nt, Human
uuuugaguucuugacuggggugcuucuuuucucuauaagauuguuuaacagcagagacauucaaaa

SEQ ID NO: 4161756 - RNA, 94 nt, Human
uuuugauuaauguuagcuauggauuagaggugaugauuauaaaugcauuuguagguuuugcccauuuaauauauaguuugauaaauuaucaaaa

SEQ ID NO: 4161757 - RNA, 63 nt, Human
uuuugcaaauauuccccuaggucugcucuugcugacagauugauaguugggaauauuuugaaa

SEQ ID NO: 4161758 - RNA, 67 nt, Human
uuuugcagacacagaaaccuggguucaaauuaauguucugacacccauuaucugugugaccucagga

SEQ ID NO: 4161759 - RNA, 63 nt, Human
uuuugcaggguuugcauuaaagcauaagaaaugacaacuugcugaagagcaaaccaggcaaaa

SEQ ID NO: 4161760 - RNA, 69 nt, Human
uuuugcccagcucccugaagccuggucuugguuaacugggagcgugucguagggagugggguuagggaa

SEQ ID NO: 4161761 - RNA, 79 nt, Human
uuuugcccauuucuauuucaagcuucugugaaugaacuuaaugucaaauagguaugaguagaaaucucaaagggugaaa

SEQ ID NO: 4161762 - RNA, 85 nt, Human
uuuuuuguguuacaaacauuccaauuguacuugcuuuuauucucagggaguaaagaaagccauuggaguguuuugagccaaggag

SEQ ID NO: 4161763 - RNA, 82 nt, Human
uuuuuuguuaccuccccaacuagaauguaauucccugaggauggggacagaagucacaucuaauucgguuagguucaagaaa

SEQ ID NO: 4161764 - RNA, 102 nt, Human
uuuuuuguugauuuuucuggauuguguguauuaucuaauuuguucuacugaauucugaacccucuuuaaaugaugcauaucauuuagaaggacaauggaaga

SEQ ID NO: 4161765 - RNA, 88 nt, Human
uuuuuuuccaguaagaaugacuaccaaacuggagguuuaaucuagcaacaugaaucucagucaaugugucagcucuccuggaagagaa

SEQ ID NO: 4161766 - RNA, 64 nt, Human
uuuuuuuccugcacauuugagcaugacuauguauugaaugcuauuuuuguaagcaggugagaga

SEQ ID NO: 4161767 - RNA, 89 nt, Human
uuuuuuucucaacggucucauggcuuucagccaacuaaacacuaauucaaggauuuggugccaagcaugaggacucuucuagaaaaaga

SEQ ID NO: 4161768 - RNA, 105 nt, Human
uuuuuuuuucgccuuuacuguaugucagugacuucuccuaaugucauauccuccucauucuggggguagcaucaagggaacacgauuuacacagagaaauaagaa

SEQ ID NO: 4161769 - RNA, 65 nt, Human
uuuugcuauggucuucauggacaagguuguuguucacuaccacuccagcagacucaucagcaagg

SEQ ID NO: 4161770 - RNA, 75 nt, Human
uuuugcugaaagguagcuguguggucuugggcaaauaaguuaaccucucugagccacgguugcuuuucuguaaaa

SEQ ID NO: 4161771 - RNA, 71 nt, Human
uuuugcugaaauuagggaaaacauuugcuuuucacaagagagguauguuauuucuugaaaccuuugcagaa

SEQ ID NO: 4161772 - RNA, 63 nt, Human
uuuugcugagcugagaaugugggaacgggauaaagaaaccaacaaaugcuuaguucaccaaaa

SEQ ID NO: 4161773 - RNA, 60 nt, Human
uuuugcugcauugaagucagauacccucuuauuagggagcagcuuucaaagcagucagga

SEQ ID NO: 4161774 - RNA, 101 nt, Human
uuuugcuguuaaauauugcagagaauaucuuguacaucuaaguagaaaagagauuuuugcuauaagaauuauauuacucugugcagguuuggcuagcaaaa

SEQ ID NO: 4161775 - RNA, 56 nt, Human
uuuugcuucucaugauagguuagcuagccaugggggacuuuaauuugagagcaaaa

SEQ ID NO: 4161776 - RNA, 56 nt, Human
uuuuggcaagcugggagauauucuugauaacccauaacuuccccaagcugccaagg

SEQ ID NO: 4161777 - RNA, 78 nt, Human
uuuuggcuauuguuaacagugcuguuauaaauguacaugugcauguauuuguuugaguacuuguuuucauuucuagaa

SEQ ID NO: 4161778 - RNA, 71 nt, Human
uuuuggcuuuaagguuuaggaagcaauagaucuaguuacuuauuguaauuucccaagccuugaagaaaaaa

SEQ ID NO: 4161779 - RNA, 61 nt, Human
uuuuggguguucuuuugaguccuuuggaguacaauuaauucagacuaugaacacgucagga

SEQ ID NO: 4161780 - RNA, 91 nt, Human
uuuugguaguagagauggcguuucaccauguugaccaggcugaucucgaacuccugaucucaagugauccacccaccucagccucccaaag

SEQ ID NO: 4161781 - RNA, 72 nt, Human
uuuuguacuugaaacccagggcccugguggucuaggcacccaagggaaucuccuggucuucagguugcaaaa

SEQ ID NO: 4161782 - RNA, 87 nt, Human
uuuuguauauauucaugugucuguagcacauauguauuugagcagaauauaucuauaugugcaaggcauguguauauauguauaaaa

SEQ ID NO: 4161783 - RNA, 104 nt, Human
uuuuguauucuuauucgagggcauguacauaaucuagaaaucauuacaauggcaaauagugauuucuugaccacuauguugauauagccauugggaauauuuga

SEQ ID NO: 4161784 - RNA, 58 nt, Human
uuuugucauugauugaaaccugaguuaagaaucucagugaucagucuauuguauaaga

SEQ ID NO: 4161785 - RNA, 68 nt, Human
uuuugucucccacuuucuggccucuuccaggcauugcagcuggauggggccaggagugggggacagag

SEQ ID NO: 4161786 - RNA, 83 nt, Human
uuuugugaugcauuugucuugucucaugaacuaacuuguaaacucuaugaaguccaggaccaaagacacauguaaucucaaga

SEQ ID NO: 4161787 - RNA, 57 nt, Human
uuuugugauuauuugaucaguguccugagauggauacaauggcaaguaaugacaaaa

SEQ ID NO: 4161788 - RNA, 79 nt, Human
uuuugugcuuuuaucagcaucugaccaauaucuacaggacugacuucuccuuuaggcacagaguugagggaccacaaaa

SEQ ID NO: 4161789 - RNA, 80 nt, Human
uuuuguggacaaagacuggguuugauucugaaagcuccagaacccagcccagagacaaugcucaguauauguuuguagaa

SEQ ID NO: 4161790 - RNA, 56 nt, Human
uuuuguguaaauauacauauguauguaugaauguauguauguauguuuguauggaa

SEQ ID NO: 4161791 - RNA, 78 nt, Human
uuuuguguucuggucaguagcuuuacccucuacaccugacaaaguguauggaaguauaaguuuugaaggaagaugaag

SEQ ID NO: 4161792 - RNA, 65 nt, Human
uuuuguguuuagguucgugucagauaaguuuccauuguuugcaacuaaaagaacuugacacaaaa

SEQ ID NO: 4161793 - RNA, 56 nt, Human
uuuuguuaucuguaagacagacccuaggagggucagucucuccccggacagcaaaa

SEQ ID NO: 4161794 - RNA, 59 nt, Human
uuuuguucaacucugcuaugcuaauguauccauagucaagcaggugcuguuggaggaaa

SEQ ID NO: 4161795 - RNA, 79 nt, Human
uuuuguuccauauaugcauacauguacauaaauguagcacauguaugugcuggguuuccauguagcuguguggacaaaa

SEQ ID NO: 4161796 - RNA, 73 nt, Human
uuuuguucugccuucuacgcuuggaguaagauuuuguugaauaaaacauuccagguuguagaaaaguuugaaa

SEQ ID NO: 4161797 - RNA, 83 nt, Human
uuuuguuugcuuuaaaguggauacaacuauaaaugaagguucaguuauauuguuugaaguuguaguucagugaagaaauaaaa

SEQ ID NO: 4161798 - RNA, 77 nt, Human
uuuuguuuuauagguccugugagauguaugcauuaaagagguucuguuuugauguguuuccaggauuuguuucaaga

SEQ ID NO: 4161799 - RNA, 95 nt, Human
uuuuguuuuuaauugaaggaauaacaucauuuuuguaagcugguaggaauaauuuaauagcaaggaaaaaugagaucuuccaauagagaagaaaa

SEQ ID NO: 4161800 - RNA, 90 nt, Human
uuuuuaaaaagagugaaaaaaguuacauugcacuguaugaaagaaaaauguucacagugguaggauaacuguuuuccucuauuuugagag

SEQ ID NO: 4161801 - RNA, 75 nt, Human
uuuuuaaaagcuguuuuucuuagaacaucagaaaaguugucugaauaaaagagaggaaacauagguuuuuaaaaa

SEQ ID NO: 4161802 - RNA, 55 nt, Human
uuuuuaaagccuucugcagaaauuguauacaucucugccuugauggcauugagaa

SEQ ID NO: 4161803 - RNA, 79 nt, Human
uuuuuaacuuucuuucucagcauucucuuuggaguucaaccuagcgcccaugagccaggcugaggaagcugagugagaa

SEQ ID NO: 4161804 - RNA, 104 nt, Human
uuuuuacaaccucgacagcacugacugaaucaauaguugcaaguauuagccugaauaaugaaggaaguaguguacaucuguugauuucucugcauuugugaaaa

SEQ ID NO: 4161805 - RNA, 76 nt, Human
uuuuuacgguucacauaggccagaagauucaaagagcuauucucuuuccuucuuuuucuucuguggaagguggaag

SEQ ID NO: 4161806 - RNA, 95 nt, Human
uuuuuagguuuagaggacugauuuagauuucacacgugagucuaggauuugucaaccuugugagaacugagucacacuaacuaaauaccuaaaaa

SEQ ID NO: 4161807 - RNA, 58 nt, Human
uuuuuaguuaguaguccuugugaucccccagagauaaucagggccuaagagcugaaaa

SEQ ID NO: 4161808 - RNA, 85 nt, Human
uuuuuaguuucauuuauguuguugcauguauuuguaguucauuuguuuucuauugcagagacacaucauauaaguauacugaaaa

SEQ ID NO: 4161809 - RNA, 94 nt, Human
uuuuuauaaaugaaguuuuauuggaacauagccaugccuggucauuuacauacgucuauggcuucguuugcaauauagcaacagaauauauuaa

SEQ ID NO: 4161810 - RNA, 130 nt, Human
uuuuuauccuugacugaaaaugaaagauuccuuggcugucucuuaaauaccuaaauacaucaaauucaauuuuauuuggucaaggacauuacaguuuugguaauuuauucacuugaggucaaguaaguca

SEQ ID NO: 4161811 - RNA, 98 nt, Human
uuuuuaugaugucucaagguuucuggucaagggaaguaaauguaggauaguauuuuuacaccaaaaugacacagagagaauugagcacaccagaaaga

SEQ ID NO: 4161812 - RNA, 129 nt, Human
uuuuuaugugguucuuugguucauguggguaccaagcugcuugggggcagaaaccccaauucuuauucaaaguuggaucccagggcccacaguguagcagguacucagugaagacaggccagauaugaa

SEQ ID NO: 4161813 - RNA, 67 nt, Human
uuuuuauguuagaaacacauucuuauugauuggacacagucagaagcuaguaguuuuuaaagagaaa

SEQ ID NO: 4161814 - RNA, 62 nt, Human
uuuuuauuaagccaucuuuuagcugacaugugaagagugagcaaaugcuggcuggaugagga

SEQ ID NO: 4161815 - RNA, 56 nt, Human
uuuuucacugcuagcucucuucaacuuuuuguugagaugguuaucuaagugaaaaa

SEQ ID NO: 4161816 - RNA, 60 nt, Human
uuuuucagucuguccuugcugugaucgcuggaauauggaacacagagggcaacugagaaa

SEQ ID NO: 4161817 - RNA, 68 nt, Human
uuuuucaucugugcugccaagacugagugguuggauggcaagcauguggucuucagcaaggugaaaga

SEQ ID NO: 4161818 - RNA, 55 nt, Human
uuuuucaugagacuagaagucauuuauuuaugaaucuuuuaugugucaugaggag

SEQ ID NO: 4161819 - RNA, 83 nt, Human
uuuuuccaggacaauauuuauuguauaugauauucacuucuucaaaauuauugacaaucuacuauguucugguucugggaaaa

SEQ ID NO: 4161820 - RNA, 79 nt, Human
uuuuuccauagauagauagguagcaucauugauuugaaauaaauuaaauugcauugagcugcuuauuaauccagagaaa

SEQ ID NO: 4161821 - RNA, 62 nt, Human
uuuuucccccucugcuguuaggaauuugaauccuacuuguaaugcagcaguggaaggaaaaa

SEQ ID NO: 4161822 - RNA, 86 nt, Human
uuuuuccucuuguaucacuguucauguguagucaccauguguauuagguacucaugcaaugagucaggaggcauuuccaggaagaa

SEQ ID NO: 4161823 - RNA, 64 nt, Human
uuuuuccuuggaugugucucucugagagaagccagcuacuuuaucaugagaaucuauggagagg

SEQ ID NO: 4161824 - RNA, 113 nt, Human
uuuuucuccauccuuuaacuaacauuuaaaauuauuuugcacuuucauuuguaacuaccuaggggugaaaugcaacaguuauuuuuguggugguuagaguggucccugaagaa

SEQ ID NO: 4161825 - RNA, 72 nt, Human
uuuuucucugauuuauauuauaaagugccauggucaaaguggcauuauguugugaaauagauaagcuaaaga

SEQ ID NO: 4161826 - RNA, 90 nt, Human
uuuuugauuuacugagguaaauaaacugaaacaacauaggauaucuuucaaguuguaaaauauaguugaauuuaucaguagcauuagaaa

SEQ ID NO: 4161827 - RNA, 60 nt, Human
uuuuugcacuuuaaaaaauggugaugcccacuggugucauuagaguuaguagugugaggg

SEQ ID NO: 4161828 - RNA, 55 nt, Human
uuuuuggauggggguucuaauucuucacaaauagaauagaaugcccacuuaaaaa

SEQ ID NO: 4161829 - RNA, 63 nt, Human
uuuuuggcaagaucuggggcagagggcaguuuuaaucuugcuucaguuucagucuugcaaaaa

SEQ ID NO: 4161830 - RNA, 112 nt, Human
uuuuugggggaagggguaugugucacuaauagaauaucucugaagcuggauugauacggggaaaacaucuuucccuucuaguuuugagagacuuccucuuggcucccaggag

SEQ ID NO: 4161831 - RNA, 116 nt, Human
uuuuugguuuagaggcauuuuuucuuuaugacaugggaggcagucauaaugacaucuaagagcuuggagucacugggcugcuuccuauaacaucaagguuucuacagguuuaaaag

SEQ ID NO: 4161832 - RNA, 114 nt, Human
uuuuuuacaagccacguaguuuuugguauuuuguuauaggagcugaaauggacuaauacaccagccaacuucugaaugauaggagcagacagagacuauuuuaauuugaaaaaa

SEQ ID NO: 4161833 - RNA, 83 nt, Human
uuuuuuaugccucaucuuguuacagaauggacuuggggcgcuuucauaagggcauauaagcugugggagauuggcauaaagga

SEQ ID NO: 4161834 - RNA, 98 nt, Human
uuuuuucagcauugugccuuucauucuaauaauguuaauugagccccaauuuugugccaggcaauguguuagaagcgaaggauaaacuacugaacaaa

SEQ ID NO: 4161835 - RNA, 56 nt, Human
uuuuuucugggggaguuggagugggcuacaggccucucccaagugaccaggaaaga

SEQ ID NO: 4161836 - RNA, 55 nt, Human
uuuuuugcucugcacagaaguuauaagugcuuagcugaggugcagauccaaagaa

SEQ ID NO: 4161837 - RNA, 93 nt, Human
aaacaauguauuagcuucugugcauggacuuuguagcucuuuaaguuggagacuuuuaaguuaacuguauuaagaaguuuuguauguauguuu

SEQ ID NO: 4161838 - RNA, 71 nt, Human
aaacacuaauaacaguggcugguacaugguaaaagcuccauaaauguuagcauuacuauuacauaguguuu

SEQ ID NO: 4161839 - RNA, 78 nt, Human
aaacacuaguacaagcauucucagaaugucauuuuuauauauacuugauuagaaauggcaagaggauugccuguguuu

SEQ ID NO: 4161840 - RNA, 100 nt, Human
aaacacugcaccaugacaaagggcuuuugagcgcacgucugaagauccggccucuaacuucagcuaugcuacuaacagcccuucugaugcagagcuguuu

SEQ ID NO: 4161841 - RNA, 57 nt, Human
aaacacugcgugguggcaacucuguuagugagcgccauucuaaauuaugcuguguuu

SEQ ID NO: 4161842 - RNA, 76 nt, Human
aaacagacaacacauguguauaugugugugauauauauaugcauguucauauauauguguauguguuugucuguuu

SEQ ID NO: 4161843 - RNA, 63 nt, Human
aaacagcuccuuaguuuccaucugugccgucagcucucaucagaggaagcacaggagcaguuu

SEQ ID NO: 4161844 - RNA, 84 nt, Human
aaacagcugagugaagaaacauugcuuuuauugcugcagggaauaaaucaguuuaaagcaaguucucaucauuuauacucguuu

SEQ ID NO: 4161845 - RNA, 80 nt, Human
aaacaggugaaaauacuggagaaaggugcuauguuguuuuuaaacuauguauguuacuucuguaucugcuuucccuguuu

SEQ ID NO: 4161846 - RNA, 62 nt, Human
aaacauaugccagguuacaaaagugaggcugguaggaaucacauuuuccuugguaucuguuu

SEQ ID NO: 4161847 - RNA, 66 nt, Human
aaacauaugccuucuuuuguaacuuauuguuguuucaaguuacaagaucuuugaaggcaaguguuu

SEQ ID NO: 4161848 - RNA, 76 nt, Human
aaacauggacuuaagagucagaagcugaaguucaaauucugcaaaugacuagcugugugaccucaggucuguuuuu

SEQ ID NO: 4161849 - RNA, 84 nt, Human
aaacaugucaucaaucugugguuccaccacuuugggaaucuucaaacuuaaggagcagcagaauuugaagauuuuaaaauguuu

SEQ ID NO: 4161850 - RNA, 92 nt, Human
aaaccauuaugugucuuuuauuucucuucaaaauugauguaguguguaucaguaugauaauucgaugagaaaaugugaaauacuuaugguuu

SEQ ID NO: 4161851 - RNA, 60 nt, Human
aaacccuuuggugaagaaccagucguaacauuugacuguuaauucaaucaacagguguuu

SEQ ID NO: 4161852 - RNA, 59 nt, Human
aaaccgcacugggagccagcagccuucaagagggaaguugggaguuccuacugcgguuu

SEQ ID NO: 4161853 - RNA, 129 nt, Human
aaaccgcuuucaccuuucucucuuucuuccccucugagccucaggacuucucacugcccauccaguuuuuagaacuugaaccacagaagcugccuuaguggggagaaagugcuggguuuaagucaguuu

SEQ ID NO: 4161854 - RNA, 64 nt, Human
aaaccucuucucaagauuucuggguauuuaaauccucagcaucacagaaaucauuuugggguuu

SEQ ID NO: 4161855 - RNA, 70 nt, Human
aaaccuuaguggucauuguuaaggucacacagccaucgccugaaggugaccugacaguggcuucugguuu

SEQ ID NO: 4161856 - RNA, 79 nt, Human
aaacgaucgaauggauuguugcuucugagaaauuguuccuuguuuuuuggauaauaaacgaucuuccuuuugguaguuu

SEQ ID NO: 4161857 - RNA, 83 nt, Human
aaacgccaaaaagagaaaaaguacuauuuuaacaaaguaggaccauucuuuuaaaauguuaauugaguauuuuuugaguguuu

SEQ ID NO: 4161858 - RNA, 58 nt, Human
aaacuaagggaccagaggugaaaggcccagugacugcacugcugugguccuuuauuuu

SEQ ID NO: 4161859 - RNA, 57 nt, Human
aaacuauugagauguagcuggcaaugauccagcuucuuaguucacuuuuaauaguuu

SEQ ID NO: 4161860 - RNA, 118 nt, Human
aaacuccagcugcucaugaauauagggucagggagggccggcuaaauguuucucugugcuuucucuccagcacagccagcagagcuguuuccuguucuuuguuucaaggcugggguuu

SEQ ID NO: 4161861 - RNA, 67 nt, Human
aaacucuagcuacuaggauaacaucuguugguaccuaauauagagauauuuuacauugcuaguguuu

SEQ ID NO: 4161862 - RNA, 72 nt, Human
aaacucuuaggugucaggcagucagcauggagagcuucuuuucauccccugagugucuggagaugugaguuu

SEQ ID NO: 4161863 - RNA, 65 nt, Human
aaacugaggcuuagagaauuaagugauuuguccaaggucccuuaguuaguaaguuaggucgguuu

SEQ ID NO: 4161864 - RNA, 73 nt, Human
aaacugaguugguuaacugcaacuuggguaaaguaaauaaugaggccucagugcauguucacuggcaugguuu

SEQ ID NO: 4161865 - RNA, 64 nt, Human
aaacugcugguugcuggccagccaauguauuaauuguccuuggucaaaugccaaucuguaguuu

SEQ ID NO: 4161866 - RNA, 62 nt, Human
aaacuguuuaccauacacagugacucgaggaggcaggagucacuguuagaagugaauuguuu

SEQ ID NO: 4161867 - RNA, 129 nt, Human
aaacuuaaaaauuuagagaauagguuaucaguuagagaacacagaaaucuuuggauuaaaauauuuguaugaauaccaaguacuuuuuauaaugcaaagaaaauguuuuugccugucucuuuaugaauu

SEQ ID NO: 4161868 - RNA, 64 nt, Human
aaacuuauuaaacauuuauggaggcagcaacacaauucuguugguuuauguguuuggcaaguuu

SEQ ID NO: 4161869 - RNA, 80 nt, Human
aaacuugucuagaaaaggugucaggcuugggaaagugacauaugguggagcuuugccuguagcauuggccuagagaguuu

SEQ ID NO: 4161870 - RNA, 71 nt, Human
aaacuuuagagauguuggacccauagaguuaguggacaaacaagcacugugguggaagcaucaagaaguuu

SEQ ID NO: 4161871 - RNA, 72 nt, Human
aaacuuuggcgguggagguaguggagguaacggcgugagcuuuacagcacagugcuuuuacugaacaaguuu

SEQ ID NO: 4161872 - RNA, 83 nt, Human
aaagaaacagacuauauaagauuggcauuuuuaaaaaaucaggcauuuuuaaaaauagcuuuuuuggugucgugguugucuuu

SEQ ID NO: 4161873 - RNA, 114 nt, Human
aaagaaaggauguggcauuucccaaacauauuuaucucagagcucacaccuccuggaguaucuugggugggggaugagugcugggcaggaaauggguaugcuaaguaaagcuuu

SEQ ID NO: 4161874 - RNA, 61 nt, Human
aaagaaauguuaucagggaauuguccuagccauauaagggcaguccugcaaauaauucuuu

SEQ ID NO: 4161875 - RNA, 80 nt, Human
aaagaacagguggcauaggcaguuugaagucagauaaaccugaguuugaaucuuagcucugccacuuggacaaauucuuu

SEQ ID NO: 4161876 - RNA, 83 nt, Human
aaagaaguuacaguuacagaauggaguaguuguuuaccauuugcugcucucccuuuagauauucaaauugccccgacuucuuu

SEQ ID NO: 4161877 - RNA, 80 nt, Human
aaagaauuugcuucaaggcuuauuccaguuguugacaaaccuuaguuuguugaagcuguaggucugagguccuguuuuuu

SEQ ID NO: 4161878 - RNA, 61 nt, Human
aaagacugugauccaaauggccuauuuuccagugaaugccaacuuggauauacauuucuuu

SEQ ID NO: 4161879 - RNA, 79 nt, Human
aaagacuugagcuacacacuaggcauggggcaaagggauggugcugcuaccagugccaggugugguaguugaugucuuu

SEQ ID NO: 4161880 - RNA, 64 nt, Human
aaagagaggcugcuggacuauaugcccuuucugaauacuggggccucagauuuuguuucuuuuu

SEQ ID NO: 4161881 - RNA, 85 nt, Human
aaagagcagagaguaucgauuauauuauguaguuuuguccuaugcuauagacugaauaauuuuauaguugcugcugcugcuguuu

SEQ ID NO: 4161882 - RNA, 56 nt, Human
aaagagcuugcuugcuuuauaucauaggguuauaugaggcauuaaacaggcuuuuu

SEQ ID NO: 4161883 - RNA, 57 nt, Human
aaagaggugguauuuucugacacauucguugugaauccagaguaauuauuacccuuu

SEQ ID NO: 4161884 - RNA, 84 nt, Human
aaagaguccauguguauuuauccaugucagauugccccacaaaguaugguaggcagucucucaggugauccucaaagauucuuu

SEQ ID NO: 4161885 - RNA, 91 nt, Human
aaagaguucauguaugugugcgggaaggaaagugauauuuggggguugggagguguuacugaggguaccgaauacauauaaacaacucuuu

SEQ ID NO: 4161886 - RNA, 130 nt, Human
aaagauaacuguguuuaacauuuugcggaacuguuuuccauagcagcugcaucauuuuacagucccaccagugaugcacaaugguuccaguugcuauacagccucaccaacacauguuauagauuucuuu

SEQ ID NO: 4161887 - RNA, 75 nt, Human
aaagauacagauauagagauuuauagaugugagugggauuacugaaucauaugguaauucuaugucuaaauuuuu

SEQ ID NO: 4161888 - RNA, 73 nt, Human
aaagaucuccuuccucugagucaguuugguucugaguuuaagaagucaaagcuuucagaggaaaguuguuuuu

SEQ ID NO: 4161889 - RNA, 81 nt, Human
aaagauggguuuguuuguuauaacaauaaaaagucugggaaauagacuguuugggguuauuacaacuuggagaccguuuuu

SEQ ID NO: 4161890 - RNA, 71 nt, Human
aaagauuaggcggcaacugggcuuagagaccaccugcugucacugauuguccccacugcuggcuaauuuuu

SEQ ID NO: 4161891 - RNA, 84 nt, Human
aaagauuccagcucaguucuucaagugcuucgguucuuauuaaauuuguggaauaugcacacguagaagaacuugacuuucuuu

SEQ ID NO: 4161892 - RNA, 70 nt, Human
aaagauuguacaggaacaugucuccaauuagacagaagucucucaggaggcagguuccuacaagguuuuu

SEQ ID NO: 4161893 - RNA, 76 nt, Human
aaagcaagggguuuagacaagaugacagaggucuuuccagcucugacauucuauuucaucaugucuagugugcuuu

SEQ ID NO: 4161894 - RNA, 63 nt, Human
aaagcacauaguagaaggauuugcugagcaaagaauuaaagcaaaguccacuguaugugcuuu

SEQ ID NO: 4161895 - RNA, 77 nt, Human
aaagcacuccugaugugggcugaugacauuucuaacauaacauuuagugcuauacauguacauauuaguacugcuuu

SEQ ID NO: 4161896 - RNA, 74 nt, Human
aaagcuauccaccaagucccacuauaauuugaaagacauacugaaaaguaguauugggacuugggagauguuuu

SEQ ID NO: 4161897 - RNA, 71 nt, Human
aaagcucagcaugucuccuagaacuagcuaauaacacaaaugcggugaauaggauuuugugcuugagaguu

SEQ ID NO: 4161898 - RNA, 63 nt, Human
aaagcucucugaacaccagaccacucuuaacuauauuuaaguggcuggguucaucagaguuuu

SEQ ID NO: 4161899 - RNA, 61 nt, Human
aaagcugcuuugguuucuggaaucuaagaaaacacuuaccucauugaauuaaagcugcuuu

SEQ ID NO: 4161900 - RNA, 56 nt, Human
aaagcuguuaaaugcauaaugccacuuggcaaaacuacugugcauuuaaugguuuu

SEQ ID NO: 4161901 - RNA, 55 nt, Human
aaagcuucuaggccuauugcuugucacccauuauggcacuggccuggacuguuuu

SEQ ID NO: 4161902 - RNA, 66 nt, Human
aaaggaagaagaaaggcaauacuugcaaccaaugauaaagagguauucugacuuucaucugccuuu

SEQ ID NO: 4161903 - RNA, 129 nt, Human
aaaggaguguuuuugaagggaggcagugaaagcccuauucccugggcuuggggguugcuccuuggaaauguuuccauagaaccacccagagccuuuugggcuaaauuuucaguucagauuacucuuguu

SEQ ID NO: 4161904 - RNA, 70 nt, Human
aaaggaguugaucaucuaagaguaauaguuaucuguaugguaguuuaucauuagcaaugaucaaaacuuu

SEQ ID NO: 4161905 - RNA, 74 nt, Human
aaaggaugaacuuucagcagugcugaaaaucacguaauauuugugcuugucagugugcuagaaacaaaucuuuu

SEQ ID NO: 4161906 - RNA, 59 nt, Human
aaaggauggcucugcauauuuguguaccaaccagaaauagauugcugaggcauuacuuu

SEQ ID NO: 4161907 - RNA, 67 nt, Human
aaaggccacacaacucuuagagauuucagauuaaauuguguauaucucucaggaagguguggaauuu

SEQ ID NO: 4161908 - RNA, 61 nt, Human
aaaggcuauucagggacuugcccugcagagacaguagcaaaacaagucucugaaagcuuuu

SEQ ID NO: 4161909 - RNA, 78 nt, Human
aaaggcucccagcugcgggcagccugugggaaacagagacccuccuggcccaaagcagcccagcagguggaggccuuu

SEQ ID NO: 4161910 - RNA, 64 nt, Human
aaaggcuucucagaaaggccuugcuuauguagucaaggaucaauauuuuugaaaagaaguuuuu

SEQ ID NO: 4161911 - RNA, 65 nt, Human
aaacaagcaggaggagaaguuucugacauuuccuucuccagaggccuugucuucuuugcuaguuu

SEQ ID NO: 4161912 - RNA, 72 nt, Human
aaacaauauucagaaaugaauauugguauucauaacacaagugaaugccaauauucauuuguguuaguguuu

SEQ ID NO: 4161913 - RNA, 59 nt, Human
aaacacacugaccuccuuugugguuguugaggaugaucacaguugaggucugguuguuu

SEQ ID NO: 4161914 - RNA, 105 nt, Human
aaacacagcuugccuaccuuauuauuuuagcacugaggauuacaggcuaggcuuggaaagauguucagugguugaccauaaauaaaggcagcagguuuuguguuu

SEQ ID NO: 4161915 - RNA, 130 nt, Human
aaacacaggauuccuuugcaccuuggaaauucugauuagguagcucugggguggagcccaggaaucuguauuccuaaagggcucuccagauuauuuugaugaggaccaugcugugagaaaugcuguguuu

SEQ ID NO: 4161916 - RNA, 55 nt, Human
aaacaccagucccaguauacacuguaaaggugugugcagaacagggaguggguuu

SEQ ID NO: 4161917 - RNA, 71 nt, Human
aaacaccaugcaggcagauauguucgcuuuaaauacaacuuacugugcuguauauuugccucauauugauu

SEQ ID NO: 4161918 - RNA, 57 nt, Human
aaacacuugaaaguaaugguugugcugcuucaggauaguacaaccucaucaggguuu

SEQ ID NO: 4161919 - RNA, 64 nt, Human
aaacagagugaaaguauucacaaaguucuugauggugaccaccauuucaaugcuugcucuguuu

SEQ ID NO: 4161920 - RNA, 96 nt, Human
aaacagcuuugacagaauuucuuuugaggugguccaaagacuguuuucuggaacauaaaaagcaucuauauuccacugugauuuuguuaacuguuu

SEQ ID NO: 4161921 - RNA, 61 nt, Human
aaacaguauaugaaauguuaggauauucuaaauuggauaucuguauuuuaagaugcuguuu

SEQ ID NO: 4161922 - RNA, 91 nt, Human
aaacagugguacaaucuuuccaguccuuucugaaauccuauacucaaccaugguaucaguccucugagaagaccaaagauagcacuaguuu

SEQ ID NO: 4161923 - RNA, 57 nt, Human
aaacauagcacacacagcucuuguccacuugggagauuucugugugugcauguguuu

SEQ ID NO: 4161924 - RNA, 69 nt, Human
aaacauucauaggaggagaugauuaauuacuguuugaagagugcuuugagauccucuaaugaaggguuu

SEQ ID NO: 4161925 - RNA, 78 nt, Human
aaacauucucagcccugcuugcucugccugucuucuaucuuuguggaccugguuugcauuugggguguggggguguuu

SEQ ID NO: 4161926 - RNA, 123 nt, Human
aaacauugagcuacacuuucuagacuucuuuccuguugacuuuuaguuagauucugccacugaagcacuaguauuagacuaaaagucagaauaaagggagaagagauaaucugccuuauguuu

SEQ ID NO: 4161927 - RNA, 78 nt, Human
aaacauugguacacaaaagaggaaaccggagcagauuucugcauucauuucuauuuuuauuguguucugcuuuuguuu

SEQ ID NO: 4161928 - RNA, 57 nt, Human
aaacauuuuucuucaucauccugaaaccgagcagugaugauccgcugaggaauguuu

SEQ ID NO: 4161929 - RNA, 64 nt, Human
aaaccaauguuuuaggaaguugaggagcuugcucaaagcuacaauuguauaaagcaaaugguuu

SEQ ID NO: 4161930 - RNA, 69 nt, Human
aaaccaauuccauccauuuguuucaacaguaccuaauguuuaauuaaaugguguggagaagagggguuu

SEQ ID NO: 4161931 - RNA, 113 nt, Human
aaacccacacagcccugacccccucgugcucuggcuggucucccggucagcagccccugagggccggcaggcaggccacugagcugugggugacacaggguaguccacgguuu

SEQ ID NO: 4161932 - RNA, 63 nt, Human
aaacccagagacuagaaagaccaggguguguuguggaaggagcuuacugugucugauggguuu

SEQ ID NO: 4161933 - RNA, 56 nt, Human
aaacccauggcugauaucacuaauggaaauccagagugcugacaguauguggguuu

SEQ ID NO: 4161934 - RNA, 67 nt, Human
aaacccucaaaacaaccuacaugugccagagugcagcacuggccuugugaguuauuuucaggaguuu

SEQ ID NO: 4161935 - RNA, 58 nt, Human
aaaccuguuuuuucacugaccuuuagauguuuagacucuucaguggaugaacauguuu

SEQ ID NO: 4161936 - RNA, 59 nt, Human
aaaccuuucugcucucagcguagacugcuggaaagcacuuccugugggcaggaggguuu

SEQ ID NO: 4161937 - RNA, 75 nt, Human
aaacgcugcucaugucuuggcuuaggcacagacuuccagggucuggguccuggaacaggaggugugccgguuuuu

SEQ ID NO: 4161938 - RNA, 57 nt, Human
aaacggagcaaggugugccuggaacuuuucuugaguggggcaucuuugcuccuguuu

SEQ ID NO: 4161939 - RNA, 66 nt, Human
aaacgggggcucucaggucuccccaaauuuagcuguauuuggaccuggaggcaggaguugcuguuu

SEQ ID NO: 4161940 - RNA, 98 nt, Human
aaacgguggccgggagcugcgcagugcccuuccaggacugcaggagugguuguggccguggcugcagggcagggccuccuggcacguggccgcuguuu

SEQ ID NO: 4161941 - RNA, 101 nt, Human
aaacuaugauuuaagaauaugacauugaauauguuaacuagacucacuugagauggauagucacuaacaguucauuguagcccuauucagaucacagguuu

SEQ ID NO: 4161942 - RNA, 84 nt, Human
aaacucuaaacuguuuugcaaaccggagcucugcaagccauauugagcucacacaagccuuugguuuguuggaacauagaauuu

SEQ ID NO: 4161943 - RNA, 130 nt, Human
aaacugaaccuguaagaagugugccuggcaagaacuauguguccuguuaccggcagcuuucuauggaagccuggcugcauguauuaggagacauaucaacucaggaggaacuucuuuaaauugacaguuu

SEQ ID NO: 4161944 - RNA, 55 nt, Human
aaacugaggaaugacagcauuauccuagaugguuuguguuauccuuucuggguuu

SEQ ID NO: 4161945 - RNA, 99 nt, Human
aaacugccgucuuaacgguguugcuuuuacugauaauaaugcuaucuuuuaaaccaaagaagacaucagugaugacauuugacuuuaacauggcaguuu

SEQ ID NO: 4161946 - RNA, 58 nt, Human
aaacuguuuuggcuauucuggggcgcuucaauguccauaugaauuuuagaggcaguuu

SEQ ID NO: 4161947 - RNA, 74 nt, Human
aaacuguuuuugcauuauguuuaauuguuggucuuucaugauaagacuaacagagauagaaauguaaagaguuu

SEQ ID NO: 4161948 - RNA, 84 nt, Human
aaacuugagcugcugcagcuggcucaugggauaucugagcaaggacaacuguauacccugaggcagcugaacagagaaggguuu

SEQ ID NO: 4161949 - RNA, 76 nt, Human
aaacuuuaucuacucugugcuucuuauugguguuugguuucaagcuuuggggguagguauagaguagcccuuguuu

SEQ ID NO: 4161950 - RNA, 78 nt, Human
aaagaaaaagaugcuuauugcuccugcaguguucucucucaggaccuuucugcucuaggucauggguacuuugucuuu

SEQ ID NO: 4161951 - RNA, 74 nt, Human
aaagaaacuucaagaugucuucacaauaguuagcauacauuauuguuuagauguauugguccagugguuuuuuu

SEQ ID NO: 4161952 - RNA, 63 nt, Human
aaagaacauucgccucaaaccaggauaucucaacgauuggcguuugaaagugggugauucuuu

SEQ ID NO: 4161953 - RNA, 66 nt, Human
aaagaacugagugaagggucgccaccagggugcuuguggacacagguggcuucuuucaucuucuuu

SEQ ID NO: 4161954 - RNA, 72 nt, Human
aaagaagacaagccuuguuuuucugcaucuggaaauauguuauagaaaacccaggguuugauuuucuucuuu

SEQ ID NO: 4161955 - RNA, 73 nt, Human
aaagaagugagguggcuagggaggcacucucaggaaugagaaggaccuucacccuggccuccuuguugccuuu

SEQ ID NO: 4161956 - RNA, 56 nt, Human
aaagaauuuguacacccuacuacagagcuuggcaguggggaaucaacagauucuuu

SEQ ID NO: 4161957 - RNA, 122 nt, Human
aaagacaaauguuguauuauuccacuuuucuaaggcaccuagagucaucaaaucuauagagacagacuggacaaugguggcuaccagguccuggggaggguggugauuggggaguuguuuuu

SEQ ID NO: 4161958 - RNA, 95 nt, Human
aaagacacagcuuucucucagccaggcugcaugaauucaggauuugcauucucuugguuggggcugggcugagagaagguggaaugcguguuuuu

SEQ ID NO: 4161959 - RNA, 55 nt, Human
aaagcacuuugagacugacagguguuuaugaccugugcacauuuuccagugcuuu

SEQ ID NO: 4161960 - RNA, 68 nt, Human
aaagcagagaggagcacaaagugaaguuaauuugguuggcuugcuuuaucugguuucucauuuucuuu

SEQ ID NO: 4161961 - RNA, 55 nt, Human
aaagcagcagaaucucucaggggcagcgaggaccuugagguggucucuguguuuu

SEQ ID NO: 4161962 - RNA, 69 nt, Human
aaagcagucuguuuuaaccugaaauaauucuguugauauuugaaucacuuucagugggacauuugcuuu

SEQ ID NO: 4161963 - RNA, 102 nt, Human
aaagcagugcuucuuaaacuuuaaugugcuuaggaaucaccugcagaucuuguagagcugcaaguuccugggugauccugauguugcgguagagcaugcuuu

SEQ ID NO: 4161964 - RNA, 58 nt, Human
aaagcaucagaucugacacuucguuguagcauuugcagugugacaguccugcugcuuu

SEQ ID NO: 4161965 - RNA, 70 nt, Human
aaagcauggaggaguuuucugguacuggguuccacagggaaagcacaugcuaauuaauuccaccugcuuu

SEQ ID NO: 4161966 - RNA, 123 nt, Human
aaagccaucacaggacuagagcuaggacuaggacaggacuagagcauuucuaaugcuuuuuagagcaucucuaaaaagagaaaugcucuaguccuguccauaccugcgacugugagaacauuu

SEQ ID NO: 4161967 - RNA, 73 nt, Human
aaagcccuggccagacaccaguucauuaguggaaauaaaagcuuccuaaauugcagggaacuggcugggcuuu

SEQ ID NO: 4161968 - RNA, 92 nt, Human
aaagccguuguuguagaugacuccugaagucagcucugggaggcaccguggcuuguugggauguuucagagucuggcugcagccuggacuuu

SEQ ID NO: 4161969 - RNA, 90 nt, Human
aaagcggcuugauggaauguaugcagccugggaugagagucagcuagcuggauucuggccuuggcucugucacuucauccaugucacuuu

SEQ ID NO: 4161970 - RNA, 70 nt, Human
aaagcuaucaugaguuuuuaagaguaaggacaguguacuaugucuucuucauguauacucaugguacuuu

SEQ ID NO: 4161971 - RNA, 76 nt, Human
aaagcucuggauuccuauuuuauaucaucuucuuuaggacagauacuauaauguaaagugggaaguguuuaguuuu

SEQ ID NO: 4161972 - RNA, 59 nt, Human
aaagcucuuauagcagagugugauuugggaacuaaccaacagacucugugugagacuuu

SEQ ID NO: 4161973 - RNA, 63 nt, Human
aaagcugacuagcauuuagugcuguaaacauuuucaaaagcauaaagcuagaaccuuagcuuu

SEQ ID NO: 4161974 - RNA, 56 nt, Human
aaagcugcugugaaugguuuggggucuuccacuucugucguucaacuggcugcuuu

SEQ ID NO: 4161975 - RNA, 88 nt, Human
aaagcuuaaauaaucuauauaggaugauaaaauuagaaacuggggaaccaagaaguuugauuuuucuccuagaccucuggauagcuuu

SEQ ID NO: 4161976 - RNA, 63 nt, Human
aaagcuuagaggccaguggagggagaacuuaggaguucuacagggcauuugucucucagcuuu

SEQ ID NO: 4161977 - RNA, 130 nt, Human
aaaggaaaaacuaaaaauuuuugaauggcaaggagagaauuacugggugucauauggcuggugucauauggcugggugcuauccaguacuuuaauuuggguucuuuaaguucauaguagucugcgccuuu

SEQ ID NO: 4161978 - RNA, 77 nt, Human
aaaggaacuuuguaugugauaagacuauucuguaucuugaugggguauguuauguauacacugcaaucaguuccuuu

SEQ ID NO: 4161979 - RNA, 75 nt, Human
aaaggaagcagaguugaauugaugcuguucccagugucuguaaacuuugagaaguaugaauucauuguuuuaguu

SEQ ID NO: 4161980 - RNA, 67 nt, Human
aaaggaaugcgaggaaagagauggaaaauguauaaaccccauuucuaguccucaugcaucauucuuu

SEQ ID NO: 4161981 - RNA, 56 nt, Human
aaaggagccuccgaacuuuguuuuaaaucuugaggggacaaagugcgugcucuuuu

SEQ ID NO: 4161982 - RNA, 91 nt, Human
aaaggagugaagaaaacagucauuguauugaggauacuuaagguuggagaacuuucuucuuaauacuggcugcuaggggcuuuauuucuuu

SEQ ID NO: 4161983 - RNA, 69 nt, Human
aaaggaguuaccaauucagacaucucuuccacuuguggugaugguuaaguuagguaagugaccucuuuu

SEQ ID NO: 4161984 - RNA, 117 nt, Human
aaagggccuugaaugauuuuuuguucauuuucuguuuacauguaauguguuauugaugucauuaccuuauaauacggcagcuuguuucauagaaaaaccaggaauuauucauucuuu

SEQ ID NO: 4161985 - RNA, 68 nt, Human
aaaggggaagccagcggccacugugucuggacauucccauggccacacaguucguuguuuucuacuuu

SEQ ID NO: 4161986 - RNA, 67 nt, Human
aaaggugguuaacguuggaucacuuguaaaacggaaccucaaggagucuaaacaaaaaugcaccuuu

SEQ ID NO: 4161987 - RNA, 130 nt, Human
aaagguuccuuuuccaauuguggggguuagugagacaaaguguaugaaaagcauaaacgcugaagugccauguugguauugcuuagcaacacuuuguucacacugucacguauugcacugcauuuccuuu

SEQ ID NO: 4161988 - RNA, 60 nt, Human
aaagguuuauugauucugcucuuaauuucuguaaggcaaagagcugaguuauuggccuuu

SEQ ID NO: 4161989 - RNA, 70 nt, Human
aaaguaaaaacucuacauggucgcaaaaauguguuuauuucuaauguccuuguggggucauuguugcuuu

SEQ ID NO: 4161990 - RNA, 59 nt, Human
aaaguaagauuugcauuucagauagaugcuuuuacauggaauacagaucuuuagacuuu

SEQ ID NO: 4161991 - RNA, 98 nt, Human
aaaguaaugaucaauuuauguauaaaugauuacaguauuugagauccaagauccuuggaaaaucugauguugcaaucaaaacauaauugagcuauuuu

SEQ ID NO: 4161992 - RNA, 64 nt, Human
aaaguacauguaauuugggucaguucuguaaccacauuaguugagcuccaaaaucauguauuuu

SEQ ID NO: 4161993 - RNA, 80 nt, Human
aaaguacugccuuuauaugcuuuuaaccuguaacugaaacuuucaguuuuguugcauuucaaguaugagagguacacuuu

SEQ ID NO: 4161994 - RNA, 79 nt, Human
aaaguaggagccagaggguugucaggcgccuugucaccauguggacagaggaucccaucagcucuuccucucccucuuu

SEQ ID NO: 4161995 - RNA, 85 nt, Human
aaaguaucucauaaaccauuaaucucacaaggauaaaauaaaagauaaaguauuauccuuggucugguggaguugguggagcuuu

SEQ ID NO: 4161996 - RNA, 65 nt, Human
aaaguauguguaaguaugccaccuucuggauaacaagaggggguaaagauacuuauauguaguuu

SEQ ID NO: 4161997 - RNA, 71 nt, Human
aaaguauugggacuuagugaagacuuacucccuacuucccuagugaaaucuucacuaagucucuucgcuuu

SEQ ID NO: 4161998 - RNA, 56 nt, Human
aaaguccuugcaguuuccucuuacugaacugaaagaggugggaacugaggggcuuu

SEQ ID NO: 4161999 - RNA, 130 nt, Human
aaagugaagccagcuaaaagcuuugucagcucgcucuugaaagcaauaauauggucacaaaacuugcugugaccauucugucucuuuacaaauuuuguaaggcuggccugcuuuuuucuuccuucuaaau

SEQ ID NO: 4162000 - RNA, 94 nt, Human
aaagugcaagguuuuagcauucucugugugcauaaaguuacuuucuuaaugugcuuuauguaugaauauaguagaaguuuuuaaccuuaauuuu

SEQ ID NO: 4162001 - RNA, 57 nt, Human
aaagugcugggauuacaggccugagccacugcacccggccugaaucauccagauuuu

SEQ ID NO: 4162002 - RNA, 71 nt, Human
aaagugugcgucuuauuucagggcaaaguucuuaagugaauugucaaacacaaauaagagucgcacgcuuu

SEQ ID NO: 4162003 - RNA, 56 nt, Human
aaaguguugggauuauaggcgugaaccaccaugccuagccugucuucguauacuuu

SEQ ID NO: 4162004 - RNA, 64 nt, Human
aaaguuagaagcacaaaguguaguuccgaagagaaccucuugcugccuuucguguuccuccuuu

SEQ ID NO: 4162005 - RNA, 71 nt, Human
aaaguugaccgaaagauuuugaaaauccuuaccaguuguuugucauauguuaaagucuuaugguuaauuuu

SEQ ID NO: 4162006 - RNA, 64 nt, Human
aaaguugaguaggguuugggccuuuuacaugaacucuguauuuuccacaagcccuguuauuuuu

SEQ ID NO: 4162007 - RNA, 64 nt, Human
aaaguugugguuugaugcaguugcuggcauagauuuauaugcaauugcauaaauuauauacuuu

SEQ ID NO: 4162008 - RNA, 98 nt, Human
aaaguuuggauuuguaauucuaaaugcagaguaaauauuuaauucuugaucuaagagugagagguuaguucaguaauaagacuugcuaaucccacuuu

SEQ ID NO: 4162009 - RNA, 94 nt, Human
aaauaaaaaucagggacugacaagguugaauugucccaucuuguaagcaaaucuuuuacuggaauuuugcuuugucaggccaggucuuuuauuu

SEQ ID NO: 4162010 - RNA, 63 nt, Human
aaauaagagcauguaauuggauuucugaaaagcauugucaguccucuggaguaugccuuauuu

SEQ ID NO: 4162011 - RNA, 66 nt, Human
aaauaaguuagcagauuccaguacauucuuuggaaugaaggcaggauagggauaugcugaguauuu

SEQ ID NO: 4162012 - RNA, 76 nt, Human
aaauacagaaauugccaccagcucuguaugagagaacccacacagcuccagagcuguggucugauuucauguauuu

SEQ ID NO: 4162013 - RNA, 57 nt, Human
aaauaccacaugagaaaccuaguuaaugaugaagcuaggaauuuugcaugggaauuu

SEQ ID NO: 4162014 - RNA, 78 nt, Human
aaauagaauggaaugaaaaacacaugcaacuggaguuauuaagcuaguauugcucuuuuguauuuuaucuuucuguuu

SEQ ID NO: 4162015 - RNA, 80 nt, Human
aaauagaugguuuuuguuguuuguuuuuaaaggaguuagacauagccuaacaaacuggaaauugacauuuccaucuauuu

SEQ ID NO: 4162016 - RNA, 80 nt, Human
aaauagauugagccaaagcaggaagaauauugaaaaguaagauccuuaucuaguuugucuagcuuugcaaaaucuuauuu

SEQ ID NO: 4162017 - RNA, 58 nt, Human
aaauagcagcuuugacagcacagcuucugcuaggcuaugauaguuaauauugcuguuu

SEQ ID NO: 4162018 - RNA, 76 nt, Human
aaauagggggcauuauuucccaugguacucaaaacuuccuagagugucaugccaggaaauagucccugaucuguuu

SEQ ID NO: 4162019 - RNA, 66 nt, Human
aaauauauuaaauuuaggagguuugaguuagacuucugauucuggcuguaugauauuuaauaauuu

SEQ ID NO: 4162020 - RNA, 96 nt, Human
aaauaucuccuggggagccccugccuugucugggcuaggugagaggcacaucgaucccgcguaaggccccgucuggggaaauccuggaagauguuu

SEQ ID NO: 4162021 - RNA, 76 nt, Human
aaauauguacagauauguguguacaguuguuuuauauaacauuuuauacaaaugacauguauaucuuacgcuauuu

SEQ ID NO: 4162022 - RNA, 56 nt, Human
aaaucagcagcaccuguaagccgugaguggcacaggacacaggguguggcugauuu

SEQ ID NO: 4162023 - RNA, 57 nt, Human
aaaucaggaggccggcaggauuugaccuggaggucagaguuugcugaccccugcuuu

SEQ ID NO: 4162024 - RNA, 77 nt, Human
aaauccuagauauacuguagacuggagugcugaagugaauuacacaugaggugcccagucucacguauacaggauuu

SEQ ID NO: 4162025 - RNA, 76 nt, Human
aaauccucacccuccacuuuaucugucuuuagcacgaaugcagagaccuccuagggaagugugaagggauggguuu

SEQ ID NO: 4162026 - RNA, 68 nt, Human
aaaucgguuucauuuccagugucagcuuugacugauuggucauggcugccuagaggugagauggauuu

SEQ ID NO: 4162027 - RNA, 127 nt, Human
aaaucuuucugaguggugacuggagcuuucuggaguggaaagguauuguaaaugaaagaaagacaggugccaccucuacuccaggguuaucgagagcuugucugaaauacuuuguaaugaaugauuu

SEQ ID NO: 4162028 - RNA, 119 nt, Human
aaaugaaaaggugacccuacaaaucugaggguuuugcaucccacagauguuguauuuucuauucacauuuuguggcagaugcagaaccugcagauacagagggcugaccauauuuauuu

SEQ ID NO: 4162029 - RNA, 73 nt, Human
aaaugaaaggugcgccaaagguccaucugcuguguggggguagauuuacuggagucuuugguguucucaguuu

SEQ ID NO: 4162030 - RNA, 90 nt, Human
aaaugacaaaaagugauggcaaguauaucaagaacugaaucaaugccuccuaaucuaguugauuucuguauguaugccagagcaucguuu

SEQ ID NO: 4162031 - RNA, 64 nt, Human
aaaugauggaaaugaggcugaaucuguggaaaaucagguuuuagcuaaucaguuucagccauuu

SEQ ID NO: 4162032 - RNA, 61 nt, Human
aaaugcaagaucacaccaaacacgugccaucacaauuuguguuagauuugaucuugcauuu

SEQ ID NO: 4162033 - RNA, 58 nt, Human
aaaugcaaggccaugugaaggaaaauaccaguuuucugagcagcuuuguuuuguguuu

SEQ ID NO: 4162034 - RNA, 76 nt, Human
aaaugcagauucuugaguucuauccacagagauugugaaucaauagguucugggugggcccgagaaaucuucauuu

SEQ ID NO: 4162035 - RNA, 70 nt, Human
aaaugcagcugggcaugagaggggaggcucagguacugcagcugugaaaccucugcucgggcaugcguuu

SEQ ID NO: 4162036 - RNA, 75 nt, Human
aaaugcaggugcugauaccuacucccaauguuucuaauuuaauuagucuggagugaggugugggcaucaguauuu

SEQ ID NO: 4162037 - RNA, 63 nt, Human
aaaugccagggucauccccugggucuuugacucccgaucccagcauuuaaauccuggccauuu

SEQ ID NO: 4162038 - RNA, 67 nt, Human
aaaugccugaaugguauuugguucuguugugaauugagacagaguuaauaaauauuauuugguguuu

SEQ ID NO: 4162039 - RNA, 88 nt, Human
aaaugcucuuuguguagacugggauucucccugaucaaugaagcagauugaaccagggaaccauucuugucacauaugaagaaaguuu

SEQ ID NO: 4162040 - RNA, 84 nt, Human
aaaugcugaguaauuucuuacggagaccuuacagauacaguucuuuuuucuauuguuuccccggaauuauucagaaaagcauuu

SEQ ID NO: 4162041 - RNA, 59 nt, Human
aaaugcugaguguuuagagaucaaaggcuuccuuaauggaugucugaaucucagcauuu

SEQ ID NO: 4162042 - RNA, 62 nt, Human
aaaugcuguaacugauauucugggaaaacaaaccugguuccagaagugcagcugugguguuu

SEQ ID NO: 4162043 - RNA, 69 nt, Human
aaaugcuucacauuucucaugaagcugagguagcccagcauucucuacuuuagaaaucuggauguauuu

SEQ ID NO: 4162044 - RNA, 64 nt, Human
aaaugcuucaccucauuaaacuuagaaggcaaugacauucauggcaggaugggguggggcauuu

SEQ ID NO: 4162045 - RNA, 58 nt, Human
aaauggagaggcugugagugagagccucguguacucucaaguagaagccucccuauuu

SEQ ID NO: 4162046 - RNA, 55 nt, Human
aaauggaggauuuugagcugcagccagaaaaacaguagcaaugaguguuccauuu

SEQ ID NO: 4162047 - RNA, 87 nt, Human
aaaugggauggcauuuauuacccagaaaguucugaaaaaacuuaucaggagauacuuguuuucuagggugcuaaaugaacccuauuu

SEQ ID NO: 4162048 - RNA, 76 nt, Human
aaauguagauucuuggaucccauuugccugagguucuaauucaaaggucuggaauaagguccaggaauuugcauuu

SEQ ID NO: 4162049 - RNA, 66 nt, Human
aaaugugacagcuuaauuagugggauaaauagaaaauauggugccacuucuuaggcugguacauuu

SEQ ID NO: 4162050 - RNA, 102 nt, Human
aaaugugggcuuuuauuccaauauucauuaaaaugcagugguucaagugacugaaucuguaaccuguguuaagugaauguuuuuuggauaaaaguuacauuu

SEQ ID NO: 4162051 - RNA, 75 nt, Human
aaauguguauuuguaucaaucucaauauauugcuuuggaaacauuaugugguugguugcauaugugugugcauuu

SEQ ID NO: 4162052 - RNA, 128 nt, Human
aaauguucauuuccuuugcuuuuacuuacaauuccaacauaguacccagauaaaugacagggcuuuagguauacuuucaggucucuuucucauauuacugaucaacuggaauaaggagaugggcauuu

SEQ ID NO: 4162053 - RNA, 117 nt, Human
aaauguugacaaaaacacacaaaaauaucuuaaucagugguauaguauuugaugauuucuaucuauacuacaaauggcugguggguugaguuuuuuguguauacuuuugaagcauuu

SEQ ID NO: 4162054 - RNA, 67 nt, Human
aaauguugaccuccugaauguuuucauaccaguuuggauuggaaaacagaaggguagguaaacauuu

SEQ ID NO: 4162055 - RNA, 76 nt, Human
aaauguugugaguuaauaucgugguuucaggggaacaauuuuucuccucaaaucuuuagaguuauuuccagaauuu

SEQ ID NO: 4162056 - RNA, 76 nt, Human
aaauuaagccguauuucuugaguggucaguuucuaaaauaguagaagagaagcaucaauagguaauggguuaauuu

SEQ ID NO: 4162057 - RNA, 76 nt, Human
aacucaaacuguccaagaaucugguggauuuaaaguuucaaagaaaaacuaaaaccuucagguuuggaguuugguu

SEQ ID NO: 4162058 - RNA, 69 nt, Human
aacucaugguacuaaguugaguuuaauauguuugccacaaaagccaacugcaacuucguaaagugaguu

SEQ ID NO: 4162059 - RNA, 79 nt, Human
aacucgggcuuguucauaaagacaguucagaaaccucuguccuauacuuuauguaauagaauaaagccccuuuggaguu

SEQ ID NO: 4162060 - RNA, 57 nt, Human
aacucuagcucacuggggauuggagaacaccaagucucaguuuugcuagcuggaguu

SEQ ID NO: 4162061 - RNA, 103 nt, Human
aacucuaucaaauguacuaacacuucccuugaaagcuuugcgucuucuagcuuacccggcaggguucugggaggccaccaagcccaagagaacagugagaguu

SEQ ID NO: 4162062 - RNA, 123 nt, Human
aacucuauuaaucuaaacaaggaauccuauuuucuuugugugaagaaaaaaccagcagauaaauuucuaagugucacaaagagaauuguggguguaaaguuguuguuauuauuaauaugaguu

SEQ ID NO: 4162063 - RNA, 60 nt, Human
aacucugccuuucucacucaggcuuuucuugguugacagguuugucucagaggcagaguu

SEQ ID NO: 4162064 - RNA, 73 nt, Human
aacugagucauucgcacaagggaauggcuagcuguaucagucacauucauggugcuaauaaaagagcucaguu

SEQ ID NO: 4162065 - RNA, 73 nt, Human
aacugauguuuuuacuauuguccuucgauaauuuaucagagucagugucagugcuauagugggaauaucuguu

SEQ ID NO: 4162066 - RNA, 56 nt, Human
aacugauuucaaguucaguuucucacaaaacagagauugaaagucaacaaucaguu

SEQ ID NO: 4162067 - RNA, 66 nt, Human
aacugcaagcucuuuacugcuagcuugaaaaauggggagcucuagacacuguaaagaauugcaguu

SEQ ID NO: 4162068 - RNA, 78 nt, Human
aacugcagcaggagcauguccuuaaggcacagaucacucaugcuauuguuuguggcuuaagaaugccuuuaagcaguu

SEQ ID NO: 4162069 - RNA, 86 nt, Human
aacugcagcuugcacagagaauacaguauagguucuuuugacuuugggcaugagucuguaacugugugcucuguggagacccaguu

SEQ ID NO: 4162070 - RNA, 69 nt, Human
aacugcauaauauaucaugcagacuauaccacaguuauauuaaacagucugcuauauugaagugcaguu

SEQ ID NO: 4162071 - RNA, 64 nt, Human
aacugcauuaucaccaagauguaaccgaacccccucgguuugucccuaugagugguaaucaguu

SEQ ID NO: 4162072 - RNA, 62 nt, Human
aacugccuguauugucugcuugggcugccauaacagugaaguuaacagaguacagaguuguu

SEQ ID NO: 4162073 - RNA, 129 nt, Human
aacugcucaaggaaccuggaucaucagcuucuucucuguaucagcaccugcugggcugcuagaaaggugaucaggagauucagcagggcugggagcugugacccaauuggaucccuaaauugagcaccu

SEQ ID NO: 4162074 - RNA, 55 nt, Human
aacuggaauauaaugugguaggugcaguagcaggguccacaaaauuauuuuaguu

SEQ ID NO: 4162075 - RNA, 61 nt, Human
aacuggcauaugaacuuguucuucuuguauacagcucugagcaaagcaccauauggcaguu

SEQ ID NO: 4162076 - RNA, 75 nt, Human
aacugguaacgccuucucucaaaggguuagguuaucauuagcuaguaaaaugcuuugagggaagaugaaaaaguu

SEQ ID NO: 4162077 - RNA, 95 nt, Human
aacuguaguauuagguuggugcaaaaguaauugcgguuuuugucaucacuuucaauggcaaaagccccaauuacuuuugcagcaacuauauaguu

SEQ ID NO: 4162078 - RNA, 57 nt, Human
aacugugggaugcauuaauucauaauuucacaccugaaaugauaagcucccacaguu

SEQ ID NO: 4162079 - RNA, 105 nt, Human
aacuguuuauccuggaauacacugcauagaguugucaguuugagaagcaacuugauuucaaaucugagucuacaauuuuagcguguuuccuugugacuucuaguu

SEQ ID NO: 4162080 - RNA, 95 nt, Human
aacuuaccucguuuuugauuuagccaauauuauauguccauagauuacuuugcaggacauuucuauugagcuaagaccaaccacaaggcuaaguu

SEQ ID NO: 4162081 - RNA, 61 nt, Human
aacuuccuuuucucacucccaagccgggggagcuugggucagaguaagcaaggacaaaguu

SEQ ID NO: 4162082 - RNA, 65 nt, Human
aacuucucaagggacacugguauuccgugaaacauagucugggaaaugcuguuccuugugcaguu

SEQ ID NO: 4162083 - RNA, 82 nt, Human
aacuucuuuaggacaggcucagcucuggccagugcaccccuuacugggaagccugaguccucugaguuuggguuaggaaguu

SEQ ID NO: 4162084 - RNA, 75 nt, Human
aacuugaaaucaugguggaagaaacagacaguguuagcucaugauuugauuugguucuaccuuuggccuugaguu

SEQ ID NO: 4162085 - RNA, 95 nt, Human
aacuugaaucccauaccaguauguuuuucaucuauuugcuuugugaagaaaacguguguuuuucaaaggccaguggagaacaugggauauaaguu

SEQ ID NO: 4162086 - RNA, 62 nt, Human
aacuugugaccuagcuguggauuugcuuucacuguuuaucggcagugucaugguuucaaguu

SEQ ID NO: 4162087 - RNA, 65 nt, Human
aacuuuacacugggcuuccccguguauauggcucucgcuuaugacuauagggcuuaguguuuguu

SEQ ID NO: 4162088 - RNA, 70 nt, Human
aacuuuagugcagaauucucagcuaggcuggcaauccagccuucucugaaauucuguuucuauucaaguu

SEQ ID NO: 4162089 - RNA, 103 nt, Human
aacuuucauuccuuugucaacugcaagaaugguaauauuugacaagaaaaacccaacuugucaaauacuacgauucuugcaguugacaaaggaaugaaaaguu

SEQ ID NO: 4162090 - RNA, 66 nt, Human
aacuuucucuacggcauuuguugaucuaaccccaggguaggaagucuaaacucugaggagaggguu

SEQ ID NO: 4162091 - RNA, 62 nt, Human
aagaaaaaucuuggcgcuugucuggcuagguaaauagccagacaagggccaagauuuuuuuu

SEQ ID NO: 4162092 - RNA, 68 nt, Human
aagaaaacacagauuauugcuggagaccccuaaggccuacuuugucugugcaauaguuuguuuuacuu

SEQ ID NO: 4162093 - RNA, 107 nt, Human
aagaaaaccaacagauaacaagcauacuaaaguauagaacuuaguuuuuuuagugagacacuuaguuuacuuaaguggaauguuuuuguaaaugcagugguuuuuuu

SEQ ID NO: 4162094 - RNA, 99 nt, Human
aagaaaacgcuggaaaaucauugaccaaggaaauuagguuauuuugcugcucacaccauuaagaaucugguuuccuggcaggcuuucauagucuuucuu

SEQ ID NO: 4162095 - RNA, 85 nt, Human
aagaaaagaaauauaauuuuuagguaacuggugaaaugugaauauggaccaggcuugauaccaagaaauuauucuuucuuuuguu

SEQ ID NO: 4162096 - RNA, 60 nt, Human
aagaaacguuugagcuuugacuuugaucucauucagaauauuuugguucaaaaguuuuuu

SEQ ID NO: 4162097 - RNA, 68 nt, Human
aagaaagcucuuucacuuccguucuguguuccaggaaauagaaggccagauggacggggcuuauucuu

SEQ ID NO: 4162098 - RNA, 66 nt, Human
aagaaagugcuuuguaaauuauauagcauaguagaacugugugcaauaauguacaaaaacugucuu

SEQ ID NO: 4162099 - RNA, 60 nt, Human
aagaaaucaauaucuauauguugcagaauuaaaucugcaaguaguugugauugauuuuuu

SEQ ID NO: 4162100 - RNA, 59 nt, Human
aagaacauugacuaagaggggccagaagcuaugacuuucccccucugaucaguauucuu

SEQ ID NO: 4162101 - RNA, 56 nt, Human
aagaacugaaauauauguauguauguguguguguguguguguguauuucaguucuu

SEQ ID NO: 4162102 - RNA, 57 nt, Human
aagaacuugggcugagugaaagucccaaaugggaccuucauuucugccuaguuucuu

SEQ ID NO: 4162103 - RNA, 100 nt, Human
aagaagaauuuagcuuuguaaugacaagaacuuuccauaguaauuccucuaaauguuuaggaccuuauuagggugguuuauguucugugauauucuuuuu

SEQ ID NO: 4162104 - RNA, 81 nt, Human
aagaagacaaaagaagacuuacuuuucagggguaagagaaggucaucuugauugaaguguuuaagucuucuuuguccucuu

SEQ ID NO: 4162105 - RNA, 86 nt, Human
aagaaggguggaauaguuggagguuuagcucuuuuggagguuuacagcccuuuuuagaggcugucccuugcuauuccucucuccuu

SEQ ID NO: 4162106 - RNA, 127 nt, Human
aagaagugcagcuugaagugggcuaaaggcaguguguuuauuggguauuguggagccuggagaccuguuuuucucccagguacucauuuauagagaacuguucaaguccugccauuagucauuucuu

SEQ ID NO: 4162107 - RNA, 58 nt, Human
aagaauaaauuaagauacuuagcuucuguugugaagcuggggacuuguuuuguuacuu

SEQ ID NO: 4162108 - RNA, 58 nt, Human
aagaauacagagacccaguccugcugagguggaaaagauccugggccuuuguauuuuu

SEQ ID NO: 4162109 - RNA, 101 nt, Human
aagaaucaacagcauuuagauagauguuuuaggucccuguagcucaaaguauggcccugagauuaucagcaccugggaacuuauuagaaaugcagaaucuu

SEQ ID NO: 4162110 - RNA, 56 nt, Human
aagaauggaacaguuaaaugggaaaggguuuauccuuaacuacuucuucuauucuu

SEQ ID NO: 4162111 - RNA, 66 nt, Human
aagaauggagagagauuugauuugucagguucaugucagauguugacaaagucaucucuccuucuu

SEQ ID NO: 4162112 - RNA, 89 nt, Human
aagaauuugaagaucuucaguacuugagucuuuccaaagccgucauuaacauggaucuuuuggaaaauucagaaaguuuucuguuucuu

SEQ ID NO: 4162113 - RNA, 71 nt, Human
aagacaaggcuggaguuuaggcagagguguuguacaaucacaugaugugcuuugacucacggcuuaguuuu

SEQ ID NO: 4162114 - RNA, 95 nt, Human
aacaaauuuuuaucauccauuugccgugcuaugugccagauacuauuuuaggugcuagagauacgggaguggauaaaucagauaaaaauucuguu

SEQ ID NO: 4162115 - RNA, 77 nt, Human
aacaacagcacaaauaccucaaaguaaugaugugauuaagucacucugaaugguacugaggauaaguguugugaguu

SEQ ID NO: 4162116 - RNA, 92 nt, Human
aacaacaguuccacaugugauauggccaaucggguggacgccagccauaaaggaugagugcugccuaauggccugucccagugcuguguguu

SEQ ID NO: 4162117 - RNA, 69 nt, Human
aacaaccuaggucucccguauuagugcucauuucauugcauaauacuugggcugagauuuuugguuguu

SEQ ID NO: 4162118 - RNA, 83 nt, Human
aacaagcaccugcuucuugggccaccauguggcagccagccugcugagcauugcugugacgccucaggaauccaaugcguguu

SEQ ID NO: 4162119 - RNA, 58 nt, Human
aacaagcagaugcaaugcacuuuggaacucaugaauuccugcuuugcaucugauuguu

SEQ ID NO: 4162120 - RNA, 73 nt, Human
aacaagcauuuauugaacaucuacuaagugccaggcacucuucaaugugcuagggauauaguagugucuuguu

SEQ ID NO: 4162121 - RNA, 61 nt, Human
aacaaugucucauccuaugugguuuuuaccugguuggagcuuacugggaugaugcuguguu

SEQ ID NO: 4162122 - RNA, 92 nt, Human
aacaauuuguagaguaaaauacugaauuaguugagacaagacuggguaucauuuuuauuguuucaaauauuucagaauaccagcauguuguu

SEQ ID NO: 4162123 - RNA, 81 nt, Human
aacacaaggagagucauuucuguagucauguuucauuucaaaauggagacgggaagaagagaaauugagucaucuugaguu

SEQ ID NO: 4162124 - RNA, 71 nt, Human
aacacacauuaaaaaauguugcaugaacguuacuuccugcucucauguucuguagauuuuuuaauggaguu

SEQ ID NO: 4162125 - RNA, 72 nt, Human
aacacacuuugaaggcuuuagaucuuuguagcugaaauuugcaacagauauccucagucuccaacaguuguu

SEQ ID NO: 4162126 - RNA, 55 nt, Human
aacacagcaucccuuaggucgucaugcaaaaguaaugauaugguuuggcuguguu

SEQ ID NO: 4162127 - RNA, 63 nt, Human
aacacaggaggcuauguuuucuaggugagaaggcucacuguuguaacuggagcuuuuuguguu

SEQ ID NO: 4162128 - RNA, 64 nt, Human
aacaccaagcugcucuggauaguccaugcugugaguuccaggacugcagagcaugcaaaauguu

SEQ ID NO: 4162129 - RNA, 71 nt, Human
aacaccucuggcucugcaccuuucuuaaaaaucgcuuugcagugauucagcauggagggcagauggguguu

SEQ ID NO: 4162130 - RNA, 73 nt, Human
aacacguuucccaagagguguuuguuuacuuauuucuauuauuggaauaaauuacccuuuagggaauuguguu

SEQ ID NO: 4162131 - RNA, 63 nt, Human
aaccuuucaguggcuaccgaugcuuuugggacaaccaaaaucuucagcacagcugacaagguu

SEQ ID NO: 4162132 - RNA, 86 nt, Human
aaccuuucccucucacauugaugugaugcagaaguggcagugguacaaacucuaccaugcagugcuuaaugaugaugguagagguu

SEQ ID NO: 4162133 - RNA, 76 nt, Human
aaccuuuuuucaaugagaaaaacauuagccuucuuuuguuacacauaagagaguucuuucuaguugaagagauguu

SEQ ID NO: 4162134 - RNA, 102 nt, Human
aacgguggguccauuucguuuaagguccacauuuuuggagucaguggaaaacaguauuacgcugacccauauaagaguggagggaaggaagcacucacuguu

SEQ ID NO: 4162135 - RNA, 56 nt, Human
aacuacagcucuugucuuucugauguuuuggacuauuaaaggcaaugacugugguu

SEQ ID NO: 4162136 - RNA, 128 nt, Human
aacuagaagauaugaguauucuauucacaccaaguuagauaaauuaagacuuuacauauucuugugucaggucaguauuugaugccaagugaguguaggauuggccauguuuugccaccaauuaaguu

SEQ ID NO: 4162137 - RNA, 65 nt, Human
aacuagcagaggaaaagagaacauugucuuuugauacugucuuuuuaauuuccuugggccugguu

SEQ ID NO: 4162138 - RNA, 130 nt, Human
aacuagucaugacuccugauuaggcagagaccuaggaagcugugcggacccugcagguuugcuacagcucuuucaggaguguuugcuacaguuuccuuugcuuugcuuuaaccauaaggagacacaaguu

SEQ ID NO: 4162139 - RNA, 68 nt, Human
aacucaaagaugcaugacgcuuucauucuuuuuacaaagcccuuuucuagucauugugccuuuggguu

SEQ ID NO: 4162140 - RNA, 55 nt, Human
aacucacagucucaagaugcuggugcuaauguacauugcagcugacacuggaguu

SEQ ID NO: 4162141 - RNA, 55 nt, Human
aacucacuuuguggcuucugaagaagggaccuuuguggacugucauggaguaguu

SEQ ID NO: 4162142 - RNA, 73 nt, Human
aacucagaaugcaagauucagcaggaagaugauuuauuucugucaucuggauagguuguuuugcaucuggguu

SEQ ID NO: 4162143 - RNA, 58 nt, Human
aacuccuccagacuuacugaaucccacacucuggauguggggcccagcauggaggguu

SEQ ID NO: 4162144 - RNA, 64 nt, Human
aacuccugaccuagugauccguucgccucugccucccaaagugcugggauuacaggcauaaguu

SEQ ID NO: 4162145 - RNA, 89 nt, Human
aacucgccucccuguucuuccacaauacuucugagauucucaaucaggucugucuaugcaauggaaggacugguugaugcaacugaguu

SEQ ID NO: 4162146 - RNA, 88 nt, Human
aacucuauagaaaucagcaagacaauuaaugaggaaauacacaaauaauuuccagcuauuaauguuuuugcugaauuugaauagaguu

SEQ ID NO: 4162147 - RNA, 56 nt, Human
aacucugcaaccuauguagaccaguuuaaagguuuuaaaaaggugaugacaggguu

SEQ ID NO: 4162148 - RNA, 74 nt, Human
aacucuggucucuugagaaaaguacauggagaagcugcuggaaagauuucccuauaguuuucucuuucggaguu

SEQ ID NO: 4162149 - RNA, 70 nt, Human
aacucuguuaauauacuaaaauccacugaauuguacacaucaaaagaguggauuuuaugguauaugaguu

SEQ ID NO: 4162150 - RNA, 71 nt, Human
aacugauuguuuuucauaaucuauaggguuuuagaugaaacucaacuagaacuuauuagaaaggcucaguu

SEQ ID NO: 4162151 - RNA, 58 nt, Human
aacugcaugucuagcauccacuuauuuuaaaggagauauguaaauaggcauuguaguu

SEQ ID NO: 4162152 - RNA, 85 nt, Human
aacugccuuucaaaacaguucuccaggaagccagucugaauuuacucugguuuuuaaaaaagaaucauguguuugaccagcaguu

SEQ ID NO: 4162153 - RNA, 75 nt, Human
aacugcugugaacaauagcagcaucuuugguauucucucaagcucuaggaaauguguuuguuuuaaacagcaguu

SEQ ID NO: 4162154 - RNA, 88 nt, Human
aacugcuuauuagauuugugacauugauuaaacuaugggcaaucccuuuuuccauauuaggauuuguuauacuuccaagauggcaguu

SEQ ID NO: 4162155 - RNA, 68 nt, Human
aacuggaaaugauccugucacaccuuugacgauauuuugugcacaggacuuaagucauuuauaaaguu

SEQ ID NO: 4162156 - RNA, 63 nt, Human
aacuggaaugaaguuaaucugauagucuuuucuacugacauuaaaucguaauuuuuuccaguu

SEQ ID NO: 4162157 - RNA, 59 nt, Human
aacuggaguccugagcauucuggacccaugaagucugcacauguucuauccuccaaguu

SEQ ID NO: 4162158 - RNA, 67 nt, Human
aacugucuuucucccuggguuagccuaaaaguuccuuuucuguucauuuccaggagcaaagccaguu

SEQ ID NO: 4162159 - RNA, 58 nt, Human
aacugugccuuucacuugcacuugacugaaaacacccagaagacagaaaggcacaguu

SEQ ID NO: 4162160 - RNA, 57 nt, Human
aacugugcuguggggagauaguaaaaauggauguaggucaucuuuccauagcauguu

SEQ ID NO: 4162161 - RNA, 92 nt, Human
aacuguuaaucuguaacagagauuuaggaguucuguccaccaagggcaacgugugggccugauucuugaauccugaugcagacagaccaguu

SEQ ID NO: 4162162 - RNA, 76 nt, Human
aacuguuuuucacgugucucauaacuguggugaugagcaaaucagaagucaucaaaugaaauauggaagaaagguu

SEQ ID NO: 4162163 - RNA, 70 nt, Human
aacuuaacccgucacaugccagugcacacaggagccagacccuucguuugcaaagugugcggaaaagguu

SEQ ID NO: 4162164 - RNA, 113 nt, Human
aacuuacaguuuacuuuggcuuuccaauaaggcuaggaauucucugaagucauauagagcuuauucuucacagagucccugauuguuggcagaauugcugaacaauguaaguu

SEQ ID NO: 4162165 - RNA, 61 nt, Human
aacuuacuuuccuauuaaugguugcucagaauacauaaugccagagagagggaaguggguu

SEQ ID NO: 4162166 - RNA, 64 nt, Human
aacuuaggugccuuagacacugccauugaguaagaauuugaacccagucucugaggccuaaguu

SEQ ID NO: 4162167 - RNA, 62 nt, Human
aacuucaucuacuucagucuacugauuuuacagauaaaaauccugaggcaaagagaugaguu

SEQ ID NO: 4162168 - RNA, 83 nt, Human
aacuucuuaugaaaacagaauuguacaccagggagauagauuauaauuuccuugggaauaauaauucugagcuuucagacguu

SEQ ID NO: 4162169 - RNA, 68 nt, Human
aacuucuuugaaucagaggaagucaacggaucuuuccaggucuuaguuuucuccuuugagaagugguu

SEQ ID NO: 4162170 - RNA, 62 nt, Human
aacuugaaacuguuccagaaaaagagggcaugucccauucuggcgaaacaguuugaugaguu

SEQ ID NO: 4162171 - RNA, 76 nt, Human
aacuugcaucauuuucuucuuccugcagguaaaagaggcaaaugaaaacuugcaagaggaugaagacgaugcaguu

SEQ ID NO: 4162172 - RNA, 67 nt, Human
aacuuguacuuacuggaccuagaagaauauaguuuucuauuauggcagcauucaguauguucagguu

SEQ ID NO: 4162173 - RNA, 60 nt, Human
aacuuucuagagaugaguucgggcuuugagauccugaguucuccugcacucuggaaaguu

SEQ ID NO: 4162174 - RNA, 76 nt, Human
aacuuucucuggauggcuuccuccaauaaacaauaucuuacaaugugaguuaacaggaagccacugaaugaaaguu

SEQ ID NO: 4162175 - RNA, 77 nt, Human
aacuuuguaggaagggcuacucuuuaggggaauagucaugauuauuucaaacuuaaauaccuuuccuuugcauuguu

SEQ ID NO: 4162176 - RNA, 75 nt, Human
aacuuuguuuuauucacugcuguguugggaaugccuagaaucauaacuggcacaugguacugagucauuagaguu

SEQ ID NO: 4162177 - RNA, 56 nt, Human
aacuuuuaugaaggaaaucauacauggaaucccaauguaugaaguugauaaaaguu

SEQ ID NO: 4162178 - RNA, 70 nt, Human
aacuuuuuuccuaaggcaacaugauggcauuaaauauuuguuugcuuucaauuaucaauggaaagaaguu

SEQ ID NO: 4162179 - RNA, 56 nt, Human
aagcaccaaguucaacauucccauuuuacagaugagcagguugaggcaugguguuu

SEQ ID NO: 4162180 - RNA, 77 nt, Human
aagcacucaaucagggauguaauugugagcuaaaaaaaauuacaguauauuuucuugauuguuccaucucacggcuu

SEQ ID NO: 4162181 - RNA, 56 nt, Human
aagcacugagcacaguggcugacagauaaugaggucuccacugaggcuugguucuu

SEQ ID NO: 4162182 - RNA, 87 nt, Human
aagcacuggggucuccccaaaggaauauacuauuuugccaguacguugugcagcacugagcacuugguauauuucccccggcugcuu

SEQ ID NO: 4162183 - RNA, 71 nt, Human
aagcacuucacccacauuccaucacucugccacaccagguagagagagagagagugcugggcaaagggcuu

SEQ ID NO: 4162184 - RNA, 76 nt, Human
aagcagcagaggcaaaagagguggagguggcaguggcaacagcagcagcuuugcagacucuuuuaucuugcuguuu

SEQ ID NO: 4162185 - RNA, 56 nt, Human
aagcagcugaaggauucaggguuaacacuuugccuuuugaagagacuucaguucuu

SEQ ID NO: 4162186 - RNA, 99 nt, Human
aagcaggcacccaggacaccuguuuaaggaggggcucacgugggcuucugcaagugcggagugagugccccuuaaguguugcaccugggcaccugacuu

SEQ ID NO: 4162187 - RNA, 78 nt, Human
aagcagguacugugguucaguggacgugucuguuucuacguauuugagaugugauucccacugaaucacugccuccuu

SEQ ID NO: 4162188 - RNA, 61 nt, Human
aagcauaaauuguaagaugaugguaguuuuaagacugccugaacaugaauaguuuaugcuu

SEQ ID NO: 4162189 - RNA, 78 nt, Human
aagcaucuuagaccugaguuccuucauguauaaaaugagaaggaggaaccauaucaccucuaagaucccuuccagcuu

SEQ ID NO: 4162190 - RNA, 94 nt, Human
aagcaugaggauggauuucagagcccagcaguggggacccuuggucaauuaaucucccuguaguucguggucuuugaggcacauucucacguuu

SEQ ID NO: 4162191 - RNA, 94 nt, Human
aagcaugccuaaaauggucucaugugguuacuuuggucgcucuuccagcaggugauauuggauaaagugaguacaaaaugagggugggcggcuu

SEQ ID NO: 4162192 - RNA, 55 nt, Human
aagcauggagcaauagaaugacacuagaucauuucauucuuucccuucagugcuu

SEQ ID NO: 4162193 - RNA, 59 nt, Human
aagcauggccucuccgcuccccucccuccucaagaguccgguggugaugagccauguuu

SEQ ID NO: 4162194 - RNA, 56 nt, Human
aagcauggcugagugcaaugguacccucuuauugaccauuuuguauugucaugcuu

SEQ ID NO: 4162195 - RNA, 109 nt, Human
aagcauguugcaaaauaacuuggugucuaugauucaguuuauguaaaauaauaaauguauguaggaauacguguguugaaagauguacaucaauuugcuaacaaugguu

SEQ ID NO: 4162196 - RNA, 55 nt, Human
aagcauuugugaaauucagauggagaaauacaaaacugaugucacggaaaugcuu

SEQ ID NO: 4162197 - RNA, 58 nt, Human
aagcauuuuguuuuaagaaugagguugcaaaacgccucugcuuuagaauacaauguuu

SEQ ID NO: 4162198 - RNA, 80 nt, Human
aagcauuuuuaucuugcuuauguugaauuguucaagagaccaaaggaauuuggcaaagaucaacauguuaggaugugcuu

SEQ ID NO: 4162199 - RNA, 69 nt, Human
aagccaacaguuguguauuaguuugcuggcuguggcugucauaacaaauuauuacaagcuaguuggcuu

SEQ ID NO: 4162200 - RNA, 75 nt, Human
aagccaagagcucccagaccugggcagcucaggagcugacagaaaccaccccccaggucuggaguucaaggguuu

SEQ ID NO: 4162201 - RNA, 78 nt, Human
aagccaagucuucacacuuuuagcccagcaucuuaucucuuagauuaacuguggcauugugaggacugcaagugguuu

SEQ ID NO: 4162202 - RNA, 100 nt, Human
aagccaaucugaauugcacuaggaaaaggcagccauucuuuuggguagggggagaagugagcuuggcuggucauucugguuguuagcaauuaucuggcuu

SEQ ID NO: 4162203 - RNA, 76 nt, Human
aagccaaugagauucaauuccaacuuuuccuaaauguuggagaaguaucuaaguugugaauagaucugauuggcuu

SEQ ID NO: 4162204 - RNA, 55 nt, Human
aagccacuauggugauucucaaacuugaguggacuuaagaauuaccaaagugcuu

SEQ ID NO: 4162205 - RNA, 61 nt, Human
aagccacuuucagcugucucagaugucguucuacccauuucugauccggcuggaagugcuu

SEQ ID NO: 4162206 - RNA, 58 nt, Human
aagccagccccaucaaagcauuuuccuacugacgaaugcaggguuacagggcugacuu

SEQ ID NO: 4162207 - RNA, 115 nt, Human
aacugaaacauuuuggaagcaucaguuggcaggaaaaacauuggagaucucaaucaugaagaaagaucgccaguucauuuuccugcuugcuuugaucguuuuucaaugugaaguu

SEQ ID NO: 4162208 - RNA, 64 nt, Human
aacugaacagaacucagagauuguaaauucaguaauugaacaagauuucagguuguguucuguu

SEQ ID NO: 4162209 - RNA, 79 nt, Human
aacugaaggaaagagggaaaguacugaguuaaauucuaaugugagcuuugugcacauugcuuuucuaugaccugcaguu

SEQ ID NO: 4162210 - RNA, 96 nt, Human
aacugaggcacuguggaaacucuugggcugcaugcuguuuaaugaucauuuucaaaccaaugugguuuaggagcagucugcugguggucuccaguu

SEQ ID NO: 4162211 - RNA, 70 nt, Human
aacugcaugcuuugagaagaugaaugguucuuagguguuuuaugcauaagaaucuuccagggcauguguu

SEQ ID NO: 4162212 - RNA, 129 nt, Human
aacugcccaauguccucccuuccaguucaugagcggcccaguucuguaccaggagaagcugcugaagccggcagcuuugcugcuggagaagggugccgaccaggaggaagacgaggcccugcgggugcu

SEQ ID NO: 4162213 - RNA, 82 nt, Human
aacuggaacaggacgcagaucaauccugcggagauuggaguauucagucuugcucuugcaucugcuucuuccuguauuaguu

SEQ ID NO: 4162214 - RNA, 63 nt, Human
aacuggaucaguugagggaggcaucuguuuuacucaguccuuuccuucuaaaccgaucugguu

SEQ ID NO: 4162215 - RNA, 58 nt, Human
aacugggagugggccauguguauacucauguacauaaacacacuacacauuccuaguu

SEQ ID NO: 4162216 - RNA, 76 nt, Human
aacugggucccaauagcuuuuguuucuguaaaucacugucucuuagaggaaaaggccacagggacacauuccaguu

SEQ ID NO: 4162217 - RNA, 84 nt, Human
aacuggucggugauuuagguaguuuccuguuguugggauccaccuuucucucgacagcacgacacugccuucauuacuucaguu

SEQ ID NO: 4162218 - RNA, 79 nt, Human
aacugguuucuucucuuguaauuuaaaaaaucuacccacuaggggaagauugauagcuuaggagaauagaagggcaguu

SEQ ID NO: 4162219 - RNA, 93 nt, Human
aacuguacuuucacagucaugguaauuuguauuggccugggcaugguagucaguuucaggcaggacagaccaagaucgugcuaguagccaguu

SEQ ID NO: 4162220 - RNA, 82 nt, Human
aacuguagcaauuauuuuuuccauucaucagugacaaaaauauguuaguggaacaugaauugaaagaagaauaucuaaaguu

SEQ ID NO: 4162221 - RNA, 74 nt, Human
aacugucccaguuggccugggaccgagggucuacuauuaaaccuguaguagucucaggcaaaccaggacaaguu

SEQ ID NO: 4162222 - RNA, 60 nt, Human
aacugugaaagcuaacaucuuagcuugcaaguagguuaaaauauuggaugcuuuacaguu

SEQ ID NO: 4162223 - RNA, 106 nt, Human
aacugugccaaaaauagcuuugaaauuuccacuugaauucuuagaaagggcccuuuucucuccauuuccaucugaggaaaagaggagguagcuuauuuucacaguu

SEQ ID NO: 4162224 - RNA, 58 nt, Human
aacugugccuuucugucuucuggguguuuucagucaagugcaagugaaaggcacaguu

SEQ ID NO: 4162225 - RNA, 91 nt, Human
aacuuaccaacuuuuuuguugccuaugcuuuuggugcuauaucuaaaaauccuuugccaaauacaaggucaugaagguuuacccguaaguu

SEQ ID NO: 4162226 - RNA, 83 nt, Human
aacuuagaauccccuaucuuauucuuuuugguuuuaugaacucgucugauaugaagaaucuaggauaggcaauugacugaguu

SEQ ID NO: 4162227 - RNA, 63 nt, Human
aacuucacgauuuugcaggagacuagcucugucuaguucccacaccugcagggaugagagguu

SEQ ID NO: 4162228 - RNA, 65 nt, Human
aacuucauggagcugguauuuuuaugcccauuuuauggaugugaaaucugaggcccaugaugguu

SEQ ID NO: 4162229 - RNA, 59 nt, Human
aacuuccuuggguaugaaaacacuuaaguuuucuuuucuccccaaugccccaggcaguu

SEQ ID NO: 4162230 - RNA, 105 nt, Human
aacuucgaggcuuagaacauguauuuagcucgugauauaaggucgucuucuucauguaucugaggucagcugugugugcaugaggugguucuacuucugagaguu

SEQ ID NO: 4162231 - RNA, 118 nt, Human
aacuucucuccaucucacuagugaggaugaaugcugucuuccucuaggguaguggaggacaaucaggucacugccagaagacagcuuuucacacucucgcuuuccucgagagaauguu

SEQ ID NO: 4162232 - RNA, 62 nt, Human
aacuugaauucaaagcgaaagcacuggacccuuuagucugugugagcuugggauucugaguu

SEQ ID NO: 4162233 - RNA, 83 nt, Human
aacuuggaggcaaguauuuucagagggugcuuaaagaauuauuuaaaaaaaaggccauucugaacaauucuugucuuuuaguu

SEQ ID NO: 4162234 - RNA, 76 nt, Human
aacuuuagggucugggaaguaaaaagugacagugaugaagaaucacuuggauauguucacuagaccuccugaaguu

SEQ ID NO: 4162235 - RNA, 103 nt, Human
aagaaaaagaauccacaggaacacaauuauuuugaccuuguauccagacaagauuuauaucugugacagggaucagaaugcaauuccuaguugagucauucuu

SEQ ID NO: 4162236 - RNA, 105 nt, Human
aagaaaacuggggcugcugguuugaggggcaucucuuucuuuuguguuuugacucauuaucugagagacuguguccaucgugccuggcaguucuccuuuuuucuu

SEQ ID NO: 4162237 - RNA, 78 nt, Human
aagaaaagaagcagggagauuuauuaaacuguuacauauaaguuauguuaguaaauaaagucuacuuucuucuggcuu

SEQ ID NO: 4162238 - RNA, 83 nt, Human
aagaaaaggaagauaugaaaguaagcaugugugugaauguguuugugccuccaccacauguaacugcuuucuuuucguuucuu

SEQ ID NO: 4162239 - RNA, 83 nt, Human
aagaaacaguuucauuuucaugaccagcaagggguucaggaagcauccuaccacagggucccuggaaaugaaaccugaaucuu

SEQ ID NO: 4162240 - RNA, 125 nt, Human
aagaaaccaaaaacugcugugcugaagacaaagauguguguaauuuaaagagaagugggccauuuaaaauuacuaucuuccuuaugccuaucaaguaucauguaauuuaggaaaaaucauuucuu

SEQ ID NO: 4162241 - RNA, 75 nt, Human
aagacagcagcagauucagcgucuggugaaggccugcuuaccaguucacaaauggcuguguuuuugcugugucuu

SEQ ID NO: 4162242 - RNA, 59 nt, Human
aagacagcucaggacagauucaccauguugaaagcaggagugcugauugauguugucuu

SEQ ID NO: 4162243 - RNA, 92 nt, Human
aagacaggguggaacaggcaauacuuugggguuucuuugucaugaauuuuuuuccaaaguauaagauucugucuguaguacuaccuuaacuu

SEQ ID NO: 4162244 - RNA, 74 nt, Human
aagacaucccucagggugcaguugcuuuugaugaaggauagcaucguuagggcggcaucacucgggggcugcuu

SEQ ID NO: 4162245 - RNA, 56 nt, Human
aagacaugacugcacagccaaauguggcagaguuagccacuuuugcaguauguuuu

SEQ ID NO: 4162246 - RNA, 112 nt, Human
aagacauuuauuuuuauaugucaagccauauuuugaagaaugaauaauauuacagaaaaugacaucauuuaugcaggaauggcauaacauguagauaaauaguauuuguuuu

SEQ ID NO: 4162247 - RNA, 72 nt, Human
aagaccaauggucuaagccaucauaacugcggaaaugucuuucuucaguaucccugcuuggacagugguuuu

SEQ ID NO: 4162248 - RNA, 89 nt, Human
aagaccacacaugugggggauucaucucagagcguaaugaucuagugucucagauacauguaugagagauucuuuuauuguguuuucuu

SEQ ID NO: 4162249 - RNA, 79 nt, Human
aagacggaggaagaaggagaagggcaguucuugauaaggacacaacucagcaauuucccaucucuucugcucacaucuu

SEQ ID NO: 4162250 - RNA, 65 nt, Human
aagacuauaccaucuuaguuaccauagcuuuaucauaagucgugaaauuaggcuguguaagucuu

SEQ ID NO: 4162251 - RNA, 80 nt, Human
aagacucugccagccucuccccucccaaggcgggagucgaguuugcucccuccgcaagggggagagccuggcggaguguu

SEQ ID NO: 4162252 - RNA, 72 nt, Human
aagacucuggcagcagaaccaguguuugaauccacauuucuuguucuuuacacucucgcugcuauaaguguu

SEQ ID NO: 4162253 - RNA, 70 nt, Human
aagacugcauaucugggaguauggagaauggagagaacugauuugcuguauaucaugguuuugcagucuu

SEQ ID NO: 4162254 - RNA, 111 nt, Human
aagagaacagaagugugugcugugcucagcccuccuguccuguccccucaggguaggucugccuuucuggacaagacagagggaguaagagccagaccucuauuagcucuu

SEQ ID NO: 4162255 - RNA, 95 nt, Human
aagagaauagucaagugcaucuuugcagaacgaugaagaugugauucaagguuauuuuucucaugauugccaagaaguagcugaugacuucucuu

SEQ ID NO: 4162256 - RNA, 57 nt, Human
aagagagaacacagcuugggcaaaagcccugagucagaaacauguggacuuauucuu

SEQ ID NO: 4162257 - RNA, 71 nt, Human
aagagagaaggaaacagaugaguugcagcugguccaggaggaggacggcacugaucugauuucccucccuu

SEQ ID NO: 4162258 - RNA, 59 nt, Human
aagagagaccaugggggacagggggaauggagucccuuaagucccucaugucaucucuu

SEQ ID NO: 4162259 - RNA, 78 nt, Human
aagagagggauguucugggguugagagacaaugggccuuuucuaccaugcuugaaaaccccaugaauagucuucuguu

SEQ ID NO: 4162260 - RNA, 120 nt, Human
aagagauaaaaauaaguaaaacuccagcagguuaggaucagauccuggaggguggugaaugccaagccacuacuuuggauuuuauucuguggcaaccuggaagcuacugaggauucucuu

SEQ ID NO: 4162261 - RNA, 69 nt, Human
aagagauuucugauaacauuuaguugauuuagucacauaauuaacuauaaugggguuaggaaaugucuu

SEQ ID NO: 4162262 - RNA, 90 nt, Human
aagagcaaauggaaaugagaaaaagauuuucuucaggcuauuaaauuacagacuuuuggagauggucuguucucauauuccuauguccuu

SEQ ID NO: 4162263 - RNA, 58 nt, Human
aagagcacuaacagagcugauaggaccuagauugccugacagcaacuguaguccucuu

SEQ ID NO: 4162264 - RNA, 81 nt, Human
aagagcacuuuacaguuacgcugagaaacgaauguucaggacuauuugugucucaagugugaacucuuuuauaaggcucuu

SEQ ID NO: 4162265 - RNA, 62 nt, Human
aagagcagguccaccaugccucaagccagcuggcagcugcgcaggcccagguggauguacuu

SEQ ID NO: 4162266 - RNA, 76 nt, Human
aagagcauaguauaugggaaacuuaguaccuuuuaaaugcagagagacaaaguuucaaauguugauuaugccacuu

SEQ ID NO: 4162267 - RNA, 65 nt, Human
aagagccuggggauuggcaagggaaggggccuggccaacacccuucaucacuuccagagguucuu

SEQ ID NO: 4162268 - RNA, 63 nt, Human
aagagccuuuccccacccucugaccuagagaaaauagaaggcauuaugugggaaaauguucuu

SEQ ID NO: 4162269 - RNA, 108 nt, Human
aagagcuaugcagcacagguugcuauaaugaccagggcaucuucuucuacaaggaauaggaggggagcaggacauaauagcaauacuuguuguuugugcauugcucuu

SEQ ID NO: 4162270 - RNA, 128 nt, Human
aagagggauuucaagggauaugaacgugaaagguuuuagauaaugcucaagcaauugcauagcaauuauacauugaacaaucuagauucuagaccuuucuguccaaucccuuuucuguuauccuucuu

SEQ ID NO: 4162271 - RNA, 62 nt, Human
aagagggugguucacuuuuugauggucaaccauuuagaagucuuagaacuauauuuccucuu

SEQ ID NO: 4162272 - RNA, 77 nt, Human
aagaguaucuggggagaaaaucauuuguuuuggauaaacuucugucucacaauauuuaucuuccaauuugaucucuu

SEQ ID NO: 4162273 - RNA, 83 nt, Human
aagaguguucacuccauaggcccugcaguaaucauggcuuaccucauuuauguucacagcaaaccuaugaacugggcauucuu

SEQ ID NO: 4162274 - RNA, 65 nt, Human
aagaguuuaccagugcugcuucccacuuuguguaccuugggaagucugaggcacuugagcaucuu

SEQ ID NO: 4162275 - RNA, 70 nt, Human
aagauaacaucaaacugcauuuucuaauauacuuaaaaauaguagguuguguguuuuugauguuuauuuu

SEQ ID NO: 4162276 - RNA, 70 nt, Human
aagauaugaggucaccugcugggcucuuuccuguguaucugaguauagcuggcaggucauuugauaucuu

SEQ ID NO: 4162277 - RNA, 80 nt, Human
aagggaaauucugggguuagugcagaucugguauagucuauaguccuggaugcugugguaagccccaccggagcucccuu

SEQ ID NO: 4162278 - RNA, 74 nt, Human
aagggaaucagagauugaagacugguggagcugccccaggcaaaugugcagcuuuugucuucaguuuagcccuu

SEQ ID NO: 4162279 - RNA, 78 nt, Human
aagggacauggagagucucugagccagggcaaauaaaaagcuugcuugguuucuaacuuuucauauauuuuguuucuu

SEQ ID NO: 4162280 - RNA, 81 nt, Human
aagggagaggagggucuuguugaacuugaaaaaacuaaauaagcaaaguugauacauaaggacacccuucucuuuacccuu

SEQ ID NO: 4162281 - RNA, 64 nt, Human
aagggcaggaaaagauggaugucccagcucaagcagggagugaaucugccuuuccucagccuuu

SEQ ID NO: 4162282 - RNA, 59 nt, Human
aagggccauugcugagagcagucucccaugccaaaauggaagcuguugguaagguguuu

SEQ ID NO: 4162283 - RNA, 60 nt, Human
aagggcugaaugaaggguugaaccagauuaacaaaggucucuccaaccuuauucaucuuu

SEQ ID NO: 4162284 - RNA, 84 nt, Human
aaggggaccuacugauaggaacacagggacuugaugaccucauggucauugucaucccuguguuuguaugaaauguagcuuuuu

SEQ ID NO: 4162285 - RNA, 61 nt, Human
aaggggagucaggcucccucagagacuggaaagucugggugagcaacugacucggccccuu

SEQ ID NO: 4162286 - RNA, 77 nt, Human
aaggggaguuagugucucaccuaaaaucuggggccaugaugucaccacauuaaauaguagggaugcuugcucaucuu

SEQ ID NO: 4162287 - RNA, 75 nt, Human
aaggggauagaguaugagagauuaagaucaggcuguggaguguuugucaguuaaucaauguggucuaaaccacuu

SEQ ID NO: 4162288 - RNA, 62 nt, Human
aagggggaaauuucaauguuuaaaaaugguuuauaauaggaucacauugaauuuucuucuuu

SEQ ID NO: 4162289 - RNA, 85 nt, Human
aaggguacucauuucugaggaacauacuuauuauucuggcauaagcuaugugaacagacuguucucuacagauuugaguaucuuu

SEQ ID NO: 4162290 - RNA, 64 nt, Human
aagggugagagucaggcagagauuugcuuucuugggcuuugagucaugccgauacucaucgcuu

SEQ ID NO: 4162291 - RNA, 100 nt, Human
aagggugagugguggcauggugauugacugcugagcacacaagagugucugccacggaacauagucuuacucagcagugacccucuuaccauuuucccuu

SEQ ID NO: 4162292 - RNA, 60 nt, Human
aaggguucagugaagaggugcuaaggaaacucuugugacccucuuuguuggcaaacucuu

SEQ ID NO: 4162293 - RNA, 108 nt, Human
aaggguucccagccaagugcaaugaucaggaucagggcuagcagagccacacagccaugugccuuucacagccuucguucugaaacacuuaacucgggcugaccucuu

SEQ ID NO: 4162294 - RNA, 67 nt, Human
aaggguugaguucuaaaggcagaacauaaaauaaaccuuuuauuaaucuuaucuuuggaaaucccuu

SEQ ID NO: 4162295 - RNA, 64 nt, Human
aaggguuggggaagagcaaauucacucucucuuugagcugggacaucugucuucuucugcccuu

SEQ ID NO: 4162296 - RNA, 65 nt, Human
aagguaacacagcuucugagugaggauuuaaguaaaguaaaucugauacaaagucuguauaccuu

SEQ ID NO: 4162297 - RNA, 64 nt, Human
aagguaacagcuucagcuucagaaucggagcgaaaauucuucugccccugacuguugugaccuu

SEQ ID NO: 4162298 - RNA, 123 nt, Human
aagguagcacuugcacguaauguagauaguaaacagacuggcauucugccugcugcugaccugacaggaagcaucuggcagaaagucagaagggcaucugcauuaccuguuaucuagcuccuu

SEQ ID NO: 4162299 - RNA, 59 nt, Human
aaggucacaaagccuggagauacugaaauuagaaagaaaauccagggcuuuauggcuuu

SEQ ID NO: 4162300 - RNA, 56 nt, Human
aagguccuguagccacagagccagacaaggaucaagguucuguggucccaggccuu

SEQ ID NO: 4162301 - RNA, 65 nt, Human
aagguccuuuugcagugugaucucgcugaugauuacugaagcugacauaucugcuaaaggauuuu

SEQ ID NO: 4162302 - RNA, 68 nt, Human
aaggucuguaccuaauaaagguaaauucuguuucauuuauggggcaguguuuacauauuagaaaccuu

SEQ ID NO: 4162303 - RNA, 77 nt, Human
aaggugaaggacccaggguggucaccugaaauguguuugucagaugcaggucauccuuccugggaaucuuuggccuu

SEQ ID NO: 4162304 - RNA, 55 nt, Human
aaggugaaggugggaggggagaaguuuccuccccuucuccuuucucccucaucuu

SEQ ID NO: 4162305 - RNA, 94 nt, Human
aagaaaaaugauggacagcuuuuguguauguaugcuuguacauuuaucuguuuuuaguauuauacauaaaacaaucauguugguuaauguucuu

SEQ ID NO: 4162306 - RNA, 117 nt, Human
aagaaaagcagagagugaauuuucauggaguuagacugcguugagacgaaugaagcuaaggcucaggucucuuucauuacguguuugacuuguccugauucaaaaucuaaauaacuu

SEQ ID NO: 4162307 - RNA, 59 nt, Human
aagaaaagcuauuuuauugcagcucuuucccaagagcuguucugggaauggcuggucuu

SEQ ID NO: 4162308 - RNA, 122 nt, Human
aagaaaagcuuuaggacagggucaugcuugaagaugaguacuuagaagccugaaaguccgugacaucuuccauggguggcucucaaguccuuuugcucagggaccauuccuuaggaaaucuu

SEQ ID NO: 4162309 - RNA, 77 nt, Human
aagaaaauuaaucacuguuuuuauguaaucagugcuucaaaaguacuugaggguacuugaaagcaguugauuuucuu

SEQ ID NO: 4162310 - RNA, 91 nt, Human
aagaaaucucuaguagcaaaacaaucacaguuuacaaaccugcuguuuucugucaaauuucaguuagacuguguuuucauugggguuucuu

SEQ ID NO: 4162311 - RNA, 72 nt, Human
aagaaaugcuggugaauauagguacuuggaaaauaagguguuuucaucaccucccaccuauuucacuuucuu

SEQ ID NO: 4162312 - RNA, 96 nt, Human
aagaaauugagcacagagcagaguaggagaacuguuuaugcuuggaagacuccagagaguaaacauuuuccgggaacuuucggcuuaaauuuacuu

SEQ ID NO: 4162313 - RNA, 118 nt, Human
aagaaccuaaaaguuauaucaauaaugggagcuuagcuguaaaauuuuuuuuagacuggaaguauaccuaagaaaauuuuacugguguuuccuuuggauugugggaguauagguuuuu

SEQ ID NO: 4162314 - RNA, 82 nt, Human
aagaagccuuaagauaagagcgagagauucaacagcaaguacuaucuguaagaacuuugauuucauugcauuuaagcuucuu

SEQ ID NO: 4162315 - RNA, 87 nt, Human
aagaaggcuucucugcuccuaucugugauucuaagaagauuuaaucagcuuccugguaauuuccgaagugaguaagaagagccucuu

SEQ ID NO: 4162316 - RNA, 60 nt, Human
aagaagggcugccagggggugccagggauucccccaaggcucugccuguagaccuagcuu

SEQ ID NO: 4162317 - RNA, 64 nt, Human
aagaagguggcaaguggcaaaucccauggcaguucuuugggaacaacaugcacugccaccucuu

SEQ ID NO: 4162318 - RNA, 72 nt, Human
aagaauacuauguugugacacaugaaaaucauaugaaauuuggauuucagugucuauagauaagguuuucuu

SEQ ID NO: 4162319 - RNA, 80 nt, Human
aagaaucuaaaggacguguacuaggucuaacaugaguaaugcucaacauguuaaaccuaguacagguccuuuagauuguu

SEQ ID NO: 4162320 - RNA, 58 nt, Human
aagacaagcacagauaaaacaggauucuguuguuaagcagaguaaccugugcugucuu

SEQ ID NO: 4162321 - RNA, 95 nt, Human
aagacaaguaccaauauguacagugauagagcaguauuaucaaaauuguguuagauaauuacaacuaucauuuuacaugguugguguuucaucuu

SEQ ID NO: 4162322 - RNA, 73 nt, Human
aagacagacagagcuggagcuugaauggagagcauugcuugguaugcauaggacuccuggcuugcauagucuu

SEQ ID NO: 4162323 - RNA, 57 nt, Human
aagacagauuuggcuaugcaccucugaauuugaaacuaacgaagucaaaucuguuuu

SEQ ID NO: 4162324 - RNA, 56 nt, Human
aagacagcguaacagauugaauacaaaagaagguaugagaacccauacgcugucuu

SEQ ID NO: 4162325 - RNA, 94 nt, Human
aagacagucauguucuaaucccugcuauguaugaauguuaccuuaugguauaugguaaaagggacuuggcagauggaauuaaguuaaaggucuu

SEQ ID NO: 4162326 - RNA, 63 nt, Human
aagacauauacuauggaugguucucauagaugaaaaaaaugagagaagauucuuauaugucuu

SEQ ID NO: 4162327 - RNA, 59 nt, Human
aagacaugccucuuuaucuuccuguccuaaauuagaagcaggauuugagaaggcgucuu

SEQ ID NO: 4162328 - RNA, 58 nt, Human
aagacauuccaaaguggcuaaucauguauauaaguacacaaugcuguuugggaugcuu

SEQ ID NO: 4162329 - RNA, 67 nt, Human
aagacauuuugcaauggguagcuuagaaucugguauccaagaacagugacccauuucagggugucuu

SEQ ID NO: 4162330 - RNA, 70 nt, Human
aagaccugacuuuaaaaguuugugcuugggaguuaaauauuuuuaaacauauacauuuugaaguucucuu

SEQ ID NO: 4162331 - RNA, 83 nt, Human
aagacucacaaaacauuuuucuaggucuugguagucccaauuuuagaauaucggggacuagauagagugaggcugugugucuu

SEQ ID NO: 4162332 - RNA, 56 nt, Human
aagacucagaauuuugccugggugcuucauacacaguaggcagcauucuggggcuu

SEQ ID NO: 4162333 - RNA, 66 nt, Human
aagacuguguccaugugcuggauugcaccacuuaugagcaaucagagcaagacauggaacagacuu

SEQ ID NO: 4162334 - RNA, 114 nt, Human
aagagaaaagauaugggauaggucugugcacuuaggauaggguagaaauggggagaaggaucacaucccugacuucuaggugacauaucagaguuuauguccuguguaucucuu

SEQ ID NO: 4162335 - RNA, 80 nt, Human
aagagaaaugagcaaggaaggagagaugaugggugucagguccggaacccagcaaacguuuccuccagcucccuucuuuu

SEQ ID NO: 4162336 - RNA, 71 nt, Human
aagagaagucaggaacaauaucuguccugguucugacuuggacuugauuuuguuaucuuuuacuuucucuu

SEQ ID NO: 4162337 - RNA, 70 nt, Human
aagagacuggaguuacgaguucauuuuccucuuguuacugaggggucugggccagggaguccgguuucuu

SEQ ID NO: 4162338 - RNA, 72 nt, Human
aagagcagacaggacuucacuguguugccucugauccaggaggcugcauaggcagaagcugugucuguuuuu

SEQ ID NO: 4162339 - RNA, 71 nt, Human
aagagcaggaauggggugcagagggcagacccgucaggccaggcuucccugcuuucccacuccaugcucuu

SEQ ID NO: 4162340 - RNA, 55 nt, Human
aagagcaucaaugacucgcaguuaggauuuaagucuguuuguuauuauugcuuuu

SEQ ID NO: 4162341 - RNA, 56 nt, Human
aagagccagacaagauggggacacuaacaacacaaucuccagugcuucugccucuu

SEQ ID NO: 4162342 - RNA, 69 nt, Human
aagagcgguaggagagacagaaguuagcguuuaggaaguaaauuaauuucuucaucucugcagcuacuu

SEQ ID NO: 4162343 - RNA, 84 nt, Human
aagagcugaaaucauuggaugagucugagauugggcaucaagagaucucacucuuucacuuaccagcaguguugaaagcuacuu

SEQ ID NO: 4162344 - RNA, 75 nt, Human
aagagcuguagaaauaagcuuagcuuuaggacacaguucagagcaaauuccugugagccuuguuucuuuuaucuu

SEQ ID NO: 4162345 - RNA, 105 nt, Human
aagagcuuaagucacacagcugguggaggugccaggauuugaaauuguguguguuugacuuuaaagccucuauucuuaaccacugugcuauacugcauugcucuu

SEQ ID NO: 4162346 - RNA, 87 nt, Human
aagaggaugauuauuuguguaagaugcaauaugguaguaaaacuugcaauacuuuaguuuguauuuuauauuuggguuauuuugcuu

SEQ ID NO: 4162347 - RNA, 83 nt, Human
aagaggcuuucuaaauguguaauugcaggcaaguaacaacacuugagucuccuucauugcaucuuuaagagagagaaccucuu

SEQ ID NO: 4162348 - RNA, 81 nt, Human
aagagggcacaauugaaugucacuuauggggcaguggaagcacuuccucuguuauauugguauauuuacauggacucaauu

SEQ ID NO: 4162349 - RNA, 98 nt, Human
aagaggguuagaaacauaucucagaguguacaagauuacgaauuguuuggaaugauuuuuagcuauucugaagauguguggacuuaacauagccccuu

SEQ ID NO: 4162350 - RNA, 81 nt, Human
aagagguaaggaagaacgaacuuugcuaauuguucuuggucaaagacauuaccuggcauuugaucuucagacaggccucuu

SEQ ID NO: 4162351 - RNA, 60 nt, Human
aagaggucugcauggcagcuggguccacggccagguaauccagcagcucaaggaucucuu

SEQ ID NO: 4162352 - RNA, 68 nt, Human
aagagguggagcagauaucuuucccagcccucugcugugacagaauuggucuguucucucaccuacuu

SEQ ID NO: 4162353 - RNA, 58 nt, Human
aagaguaauaaagucucaggacaguccucuccuugggcucugggacuccugauaccuu

SEQ ID NO: 4162354 - RNA, 78 nt, Human
aagaguaggccuaugggcacaggaugagcacaaaacuguaugugucuucuaacaucaguguucacuauuccuucuuuu

SEQ ID NO: 4162355 - RNA, 76 nt, Human
aagagugcuggacucaugaccagaaggccuggcaucagguuuggugcugccaauuucuggucuugaacaagcuuuu

SEQ ID NO: 4162356 - RNA, 65 nt, Human
aagagugguguuuggcuggcaaauucugauucaucuuucaggacccugcucaagcaucuccucuu

SEQ ID NO: 4162357 - RNA, 75 nt, Human
aagagugugugugugugugugugugugugugugcgugcaugcacgugcacacauguguacaagugcauuucuuuu

SEQ ID NO: 4162358 - RNA, 61 nt, Human
aagaguuauuagucaaauagggaaugauuuacauuguuauaacccaauacuaaugacuuuu

SEQ ID NO: 4162359 - RNA, 62 nt, Human
aagaguuugucagaucugcacgauucugcauucuugugcuuucagcagucuaacacacuuuu

SEQ ID NO: 4162360 - RNA, 99 nt, Human
aagaguuuuagaguuuucauucuuaaauuuaggucugugauucauuuugaguuaauuucuguguaugguuugaagaaugagcccagcuuuaauucuuuu

SEQ ID NO: 4162361 - RNA, 66 nt, Human
aagaguuuucuauaaucuuggcaagacuuauaauccuuguccuucagagaauugugaaaaucucuu

SEQ ID NO: 4162362 - RNA, 72 nt, Human
aagauaagaggccaguauacaaacuuccggugugcugggcacugggacuguaugugcuggacugaaaaucuu

SEQ ID NO: 4162363 - RNA, 77 nt, Human
aagauaaucugaggcuagugauuuuagagacuuagcagcuuccagcugagucucuuaaagacaguguugacaauuuu

SEQ ID NO: 4162364 - RNA, 84 nt, Human
aagauaguguuuuuuaaaauccaggagaauuuccacuuggauuuuuuucaaguggcuguuagacugaggugauuauauugucuu

SEQ ID NO: 4162365 - RNA, 59 nt, Human
aagauccaugagggcagagauugugucugucuuauucagcauuguguuuucaggaucuu

SEQ ID NO: 4162366 - RNA, 65 nt, Human
aagaugaaacaguaggcaugaauugcacugaaaauauuguuugguugccuuuccuguuucaucuu

SEQ ID NO: 4162367 - RNA, 87 nt, Human
aagaugaaagaaguucacagacuggucagucaacuuauuuuuugaaccauguauuagcugaugguccugucuuaauuccuuuaucuu

SEQ ID NO: 4162368 - RNA, 66 nt, Human
aagaugaaggaacuaacuauguagagauucaggcucucuuaucucucguuuuuauucccucguguu

SEQ ID NO: 4162369 - RNA, 127 nt, Human
aagaugagagagaaucuauuuuaaaaugucaagcacauugccuggcacauagguuuuaacauuuaaggcaugaaucuaaguguacaauauguuugugucuuuugaaauauaaauuauccaucaucuu

SEQ ID NO: 4162370 - RNA, 64 nt, Human
aagaugauguuguguuuucacuuuguuggugugaauaguugagugaaaauauccaacucauuuu

SEQ ID NO: 4162371 - RNA, 55 nt, Human
aagaugcuaauuguggaaguugcuuuucaugcaaauaaaaccuaguuggcaucuu

SEQ ID NO: 4162372 - RNA, 129 nt, Human
aagauggggcuugagauaggccuuggcggccccauucaguuugccuugguggagagaaaacagugauccucuacuguagugaugcugcaguguagggcugugaauguaggcaugcuuaagccaggucuu

SEQ ID NO: 4162373 - RNA, 129 nt, Human
aagaaagaauugagguuggcuaaguagacaaacaaugagcuuacgugggaacagacuguguuguaaauaaaggcauugcaguguucuagcgcugugcuuguuguauugagccugcaacuuugagaacuu

SEQ ID NO: 4162374 - RNA, 60 nt, Human
aagaaagggaguggacaacaggcacagcggcaaaacaagcugugucaguuucccuuucuu

SEQ ID NO: 4162375 - RNA, 65 nt, Human
aagaaaggugacugcagcagcuauucacucaacccugaaaggcugaaaauggggucaccugucuu

SEQ ID NO: 4162376 - RNA, 107 nt, Human
aagaaauaaauacaaaagauaaacacagcaauacuggcugucaaagauggaaaauaaccauuuagacaaucuaauauuguuuuguuuugguuugguuuuuacuuuuu

SEQ ID NO: 4162377 - RNA, 89 nt, Human
aagaaaugucagagaagagcaaugauaaauuuucucuuuacaucaagaagaccaaguucaagucugcaucuuuuuuugauuaguuucuu

SEQ ID NO: 4162378 - RNA, 99 nt, Human
aagaacauuaagcaaacaucuuagccauagaguuauaaauaugucaggaauacagacuuuccugccgcucuaugagcagaaugauuguuccauguuguu

SEQ ID NO: 4162379 - RNA, 59 nt, Human
aagaaccgagauuacaugauccaucagcacuucagcugauucucugacucuuggcuuuu

SEQ ID NO: 4162380 - RNA, 80 nt, Human
aagaaccuuuugaucagguugcugugguguauuagauccacuauuauaaaaccaugcuccugauuuagugaggauuucuu

SEQ ID NO: 4162381 - RNA, 130 nt, Human
aagaacucccuccucccaggaacucuggggaaccuagggcaggauggguggggcgucugaagugcccaaaccucuccuagcucuccuccuggucccucggccucccaccuggcuuccuacaaaaucccuu

SEQ ID NO: 4162382 - RNA, 55 nt, Human
aagaacuguaauaggaggucaaaggaaagggcuuauugaaauccauuacguucuu

SEQ ID NO: 4162383 - RNA, 63 nt, Human
aagaacuguuuacaauuuucacccuggaaagguuuuucucuugugugaacuguagauagucuu

SEQ ID NO: 4162384 - RNA, 64 nt, Human
aagaagauucugcuuaccauuugaucugcagauuuguagguuccuuaucugagcugagcuucuu

SEQ ID NO: 4162385 - RNA, 69 nt, Human
aagaagcuggcagcaggagaguaauagcggucaucuggaauagauuguaucgcuuuuuucugucuucuu

SEQ ID NO: 4162386 - RNA, 57 nt, Human
aagaaggccugguagacgucuugaaagucuaauaucgggagcucugucaugcuucuu

SEQ ID NO: 4162387 - RNA, 96 nt, Human
aagaagucugaauagaaaaacauaaaguuaagcuguaaguauuuuguccauaaaaugaaugcuguaaggcuuugugcuuuugacucuaggcuuuuu

SEQ ID NO: 4162388 - RNA, 58 nt, Human
aagaagucuggagcaaugcaauuggaacaaugacuaacaaguaagcaccagaccucuu

SEQ ID NO: 4162389 - RNA, 83 nt, Human
aagaagugaguuacugagagaucaagccacaggauggugggaguaggccaagauccagugcuugacuguugaacuugcuuuuu

SEQ ID NO: 4162390 - RNA, 83 nt, Human
aagaaguuacagucaggagauauuuuguucccuauagaaacugaauauaacaucuuaaaauuugucccugaguguuguuucuu

SEQ ID NO: 4162391 - RNA, 77 nt, Human
aagaauaacuuauacacgaacacaagguguguaccaugccauguacauaucauguuugccguguauaucuuuagcuu

SEQ ID NO: 4162392 - RNA, 73 nt, Human
aagaaucagacccacuguagccacucuggguaacucuuucaauauagaagcucagagugauacauuuauucuu

SEQ ID NO: 4162393 - RNA, 99 nt, Human
aagaaucuaauuuggucuccugguugagucauccauuuacuccauggacacguaaguucuauuucugguggcaaaucaggacacuucuuugcauuacuu

SEQ ID NO: 4162394 - RNA, 102 nt, Human
aagaauggaugaggcuuuuaugguggucagggagcagagccaugaugaauauucccacgugucaucugagccuugggcgauuugaaauccuacacccaucuu

SEQ ID NO: 4162395 - RNA, 66 nt, Human
aagaauggggaagacagcagacacugucucugauguugacauauccugcuuugucuccccucgcuu

SEQ ID NO: 4162396 - RNA, 69 nt, Human
aagacaacaugacauaguagaaaagcccuuguuugucaaucaggaagccugggcucuacucucagucuu

SEQ ID NO: 4162397 - RNA, 83 nt, Human
aagacaauuuuguggaucugucaaauggauuuugucagaaugagcugauggaauucauuaagaaagagcuaaagaacuguuuu

SEQ ID NO: 4162398 - RNA, 65 nt, Human
aagacacugggggcugcagccaagagagcagaaggaguugguggcagcauggucccaguguacuu

SEQ ID NO: 4162399 - RNA, 130 nt, Human
aagacagucuagugggagauguggcuggggcuaagaggaagagcugcaguuuccugggccaaagagcugaguuggacagggagauggcagcuuaccaaggccugcugguucucagcucuagagucugccu

SEQ ID NO: 4162400 - RNA, 55 nt, Human
aagacagugaucucugagagauggaaacaaccaagcugagaacuaugacugucuu

SEQ ID NO: 4162401 - RNA, 63 nt, Human
aagacaguugcugaaguaugaaaaagacaguuacuaaacugucuuuaguucaguaacugucuu

SEQ ID NO: 4162402 - RNA, 61 nt, Human
aagacccgucuccucagggcugggggaaggucaccagcacaggaacauggagaugggucuu

SEQ ID NO: 4162403 - RNA, 55 nt, Human
aagaccugcguuauccugccuggugucucucuccaaagcagaugugccagguuuu

SEQ ID NO: 4162404 - RNA, 82 nt, Human
aagacgcauguaaggaugaaaugaggugaugcccgcucagcacaugugaaaucucuuucucauucauacccuacaugcucuu

SEQ ID NO: 4162405 - RNA, 89 nt, Human
aagacuagcuuuuacagguggcagaagcauuuacucuggcauuccuaggauuaaguacagugcucaguaaucuaauagaagcuuaucuu

SEQ ID NO: 4162406 - RNA, 81 nt, Human
aagacucacuucucuuaggcccugauccgaauccagauuaugauggauugggcauggggaucagggcaugcagaagcucuu

SEQ ID NO: 4162407 - RNA, 69 nt, Human
aagacucagcugggagaaaguuuuagguuucugcucuaacaccugaaaugaguucugcucacugcucuu

SEQ ID NO: 4162408 - RNA, 102 nt, Human
aagagaaaacauuagguuggugcaaaaggcauugugguuuuugccuauaaaaguaauggcaaaaaccgcaauuccuuuugcaccaaccuaauauuuuuacuu

SEQ ID NO: 4162409 - RNA, 82 nt, Human
aagagaaauucaucagaaugcagccagcaguuauuauuugacuaugccuguugauucuuauuuuugccauagaaauucucuu

SEQ ID NO: 4162410 - RNA, 77 nt, Human
aagagaauguaaaaaaggaaaauugcauauagugccucuuugcugaggauacaaagguaucuuuccuagauucucuu

SEQ ID NO: 4162411 - RNA, 57 nt, Human
aagagacuuguccgaaguuguaaaauucagccauuggaacuuuagacauaaucucuu

SEQ ID NO: 4162412 - RNA, 66 nt, Human
aagagagaacuaaaagcuaacaucaggcaaguuucauauuaguuuucugcauuuuaguuuucuuuu

SEQ ID NO: 4162413 - RNA, 79 nt, Human
aagagagagauggaaauagauaguaucauucagcauucagaagcuugaagaguauuagguuauuugaaacucugcuuuu

SEQ ID NO: 4162414 - RNA, 120 nt, Human
aagagaggcacugggauagcgccaucacaacuguucacaaaauucuggccaguggaacagcuagucacaaggccaagguuuugugaacugugucuauggcuguaucucaguacaucucuu

SEQ ID NO: 4162415 - RNA, 65 nt, Human
aagagauauauauuuguuuaccacaagccguggggaguaugaugguauguagaaauaugucccuu

SEQ ID NO: 4162416 - RNA, 55 nt, Human
aagagauuccucacucagaaugucugagaagggguucugagaaaacgaauuuuuu

SEQ ID NO: 4162417 - RNA, 68 nt, Human
aagagauucugugucaaaacgaacuuguaggagaugagaagccauagcuuuguuccauagagucucuu

SEQ ID NO: 4162418 - RNA, 80 nt, Human
aagagcacacauggccuaugcuggguuuuuugccuugugcagaaauaucuuucucuguugcaagcccaguguaugcucuu

SEQ ID NO: 4162419 - RNA, 56 nt, Human
aagagcccagccacuauuaaauguuggucaaaguuuggcaacaugguugagcucuu

SEQ ID NO: 4162420 - RNA, 64 nt, Human
aagagcuagagggagaagggcacuugcggaguagccaagcugcagagagcucccuguagcuguu

SEQ ID NO: 4162421 - RNA, 55 nt, Human
aagagcuuuggagacaggcuggcugaaucugaaucccagcuugccucaagcuuuu

SEQ ID NO: 4162422 - RNA, 82 nt, Human
aagaggaagaaagcauagguggggagagggaggaaagaaacuaugaccuuggccccuauacacucugcauucuuuuauucuu

SEQ ID NO: 4162423 - RNA, 59 nt, Human
aagaggaccaguagauaaauuuugugcuuaauuuuguacuucuuuauaauuggccucuu

SEQ ID NO: 4162424 - RNA, 81 nt, Human
aagggugaaaggaaacagaguagaagaaagcagacuuucacaaaggaaaguugcugauucugucugugaucaaucacgcuu

SEQ ID NO: 4162425 - RNA, 130 nt, Human
aagguauauagcccgguugucucucauuuugcccgguguucaaagucugguaugcuuaauuccauuuugauugugcgucuuaaacuaagacaucauuuuauucuacagagcgcugucgggcuuuggccuu

SEQ ID NO: 4162426 - RNA, 61 nt, Human
aaggucagagcaggaaggagucccgugagcauaccauccucucuuacccaccucugacuuu

SEQ ID NO: 4162427 - RNA, 65 nt, Human
aaggucauugguucugaauucucagguucucucaccucucaauaagaauuuagcucaauggacuu

SEQ ID NO: 4162428 - RNA, 111 nt, Human
aaggucugaagaaacuguuuccucuucugccaagcaagucaucuuuuauagacagugagugcuggucauaaagcuuguugcauuuagagaaaauuaauuucuacagauuuu

SEQ ID NO: 4162429 - RNA, 82 nt, Human
aaggucugugugauuaucuggcauggauguugacauugaauaaacugaaaucauaaaacacaccagguaguuagcauaucuu

SEQ ID NO: 4162430 - RNA, 68 nt, Human
aaggugacguucagggggcugcaguagacuguguuagcugcuucuccucccuggggaugaucacacuu

SEQ ID NO: 4162431 - RNA, 84 nt, Human
aaggugauauuuuuauuucaugguagcaaauggauuguuuugacauauucaguguggacccauuuaaaguaggcauguuauuuu

SEQ ID NO: 4162432 - RNA, 87 nt, Human
aaggugguaguacuacaguagagaggauguagaaauagggcagaaguuguuaagucuugcucugcuguugacuacccaugugaccuu

SEQ ID NO: 4162433 - RNA, 55 nt, Human
aagguuucuccgaggcuauuuuugugaccaccauuuuagucucugaugaggcuuu

SEQ ID NO: 4162434 - RNA, 125 nt, Human
aagguuucuuauuuccaguauuaaaaggaaaaucaucaaggcaaaguaaauauucaaguggcuuugaacaauuugugccugauuguuggccuguuaucuuuaauucaacugugaaguuuaacuuu

SEQ ID NO: 4162435 - RNA, 59 nt, Human
aagguuuggauuuuguuuauuuauugguuuguuucaaccuguuccaaaggccagaccuu

SEQ ID NO: 4162436 - RNA, 97 nt, Human
aagguuuuggaaggagccuguugguaugaauccugugugagcaacacucagauuuguugcauacugaacagcaugcuaaaucucacuucacaaucuu

SEQ ID NO: 4162437 - RNA, 122 nt, Human
aaguaaaggagacuauacaguaaguguuuuuccauuccaaaaggauguuagaaugagacaucuccauccuagaaaacccuauggaacggaaaccucauuuucuuacuaaucuccugcugcuu

SEQ ID NO: 4162438 - RNA, 66 nt, Human
aaguaaaguuaggaauuuguuacuguguauauucacaaugcacauauaaguucuuuagcauagcuu

SEQ ID NO: 4162439 - RNA, 111 nt, Human
aaguaacuaacuacccaucuucaggggcuacaucuguaacuacucagucacuaguucuuagagaaguagcacucuagaagcuuaguuuccaaauauuuccaaacaguacuu

SEQ ID NO: 4162440 - RNA, 83 nt, Human
aaguaauguagcuguuuaugcacuccugccucugaauuccuuuuaacuggggccugaggagaagugcauaagcaacauuacuu

SEQ ID NO: 4162441 - RNA, 59 nt, Human
aaguacagaaauagcaggugcacauuguugaaggauguagcaacugagguuuugugcuu

SEQ ID NO: 4162442 - RNA, 118 nt, Human
aaguacaggugucuucgaaguaguucaacaugccaugggcaaaccuuuacugaguacuuaaauaaagcagagauuaugccauggaaagcaugagaacugaaaagaauauggcugucuu

SEQ ID NO: 4162443 - RNA, 81 nt, Human
aaguaccaauaguaauuauuagugauguuguuacugucauucugaaaauaauaguaaguagcuaauauuuacuggguauuu

SEQ ID NO: 4162444 - RNA, 81 nt, Human
aaguagaacucuucaugguuucaugagaauuacccauucauguguugugaguccugugaagcaugccuauugguuuuacuu

SEQ ID NO: 4162445 - RNA, 76 nt, Human
aaguagcauaauaugguaaaagaacuugagcuuuguaauuggacagagccugguucaaauuuuaccucugcuauuu

SEQ ID NO: 4162446 - RNA, 79 nt, Human
aaguauagacagcuaggccuuuucaguuucugauauuuauugucaggauuauuuuauuaaaagaagccuuacuauauuu

SEQ ID NO: 4162447 - RNA, 102 nt, Human
aaguaugaaacgaaagugcaucucuacagaaucuaugcuucacagucucuuuagugcucuguagcacugauucugcuacagcuuccauuuucauuuaugcuu

SEQ ID NO: 4162448 - RNA, 66 nt, Human
aaguauggauuccaaccugaaacaugcucccaugaauuguaggguuuuagggaggauauuuaacuu

SEQ ID NO: 4162449 - RNA, 77 nt, Human
aaguaugucaaucauacuucaauaaauuuguguacauuacuuucaaaagcuauuauguugaagagguuugcauacuu

SEQ ID NO: 4162450 - RNA, 60 nt, Human
aaguaugugauacauguuaauuagcuuaauuuagccguugcacaguguauacacauauuu

SEQ ID NO: 4162451 - RNA, 88 nt, Human
aaguauucguaggcaaaagguggcuuucauuucaggauguguuacaugggcuuucuugaaaugcaagcccauuggccugaugaaucuu

SEQ ID NO: 4162452 - RNA, 129 nt, Human
aaguauugauaaauaaaguacuaugggacauuagcuuuaaugaguugguaagauauaauaaucauuuuguauaugaugcaauacauuagaguguaaagguuugauauauuacacauaauuuaagucuuu

SEQ ID NO: 4162453 - RNA, 83 nt, Human
aaguauuguuuguggguuauguauggagucugguguucaacuucugguuuacugcuaauucuguagguuugcgcaaauuacuu

SEQ ID NO: 4162454 - RNA, 64 nt, Human
aaguauuugcuaaauaaacuaauggaaugcauauauguauucauggguuaauguuaggauacuu

SEQ ID NO: 4162455 - RNA, 66 nt, Human
aagucaaaugaucuccuggguauuuguuggagaccacagaaacagaaccaggugucauuuagacuu

SEQ ID NO: 4162456 - RNA, 69 nt, Human
aagucaacuuuggauguuagcgacugucuugggaauucuaucagagaaagaagcccauucauugugcuu

SEQ ID NO: 4162457 - RNA, 62 nt, Human
aagucaagcaagcugcuuuguuuauguagggcaugucaacaaagaaaauuguuaauagacuu

SEQ ID NO: 4162458 - RNA, 72 nt, Human
aagucauuugagcucucacuuuaaccuccuaggcuauugggcuuuggaacuguaaggagauggaaauggcuu

SEQ ID NO: 4162459 - RNA, 57 nt, Human
aaguccagcauuuggguagauugaucacaagcaacaggucuaacccaaaguugacuu

SEQ ID NO: 4162460 - RNA, 75 nt, Human
aaguccuugcucuuuucacuguaauaugcugcgugucugaucacauggaauauuugugguaaagguaagaaacuu

SEQ ID NO: 4162461 - RNA, 75 nt, Human
aagucucagaaaacuaguguggcuccuuuuaaaauuuuugcuggacccuauuccacgcagguuuuguugaggcuu

SEQ ID NO: 4162462 - RNA, 55 nt, Human
aagucuggagcucagacuugggagccugguguuccuggguuugaauucuagucuu

SEQ ID NO: 4162463 - RNA, 55 nt, Human
aagucuguuugagugucacacugugaaaucuccagugagggcugcaggcggacuu

SEQ ID NO: 4162464 - RNA, 68 nt, Human
aagucuuugcuauugugaguagugccacaauaaacaugugugcaugugucuuuauagcagcaugauuu

SEQ ID NO: 4162465 - RNA, 88 nt, Human
aauaucaggagguggggcucacuggggccaucuugaagguaguagccagcuuucaagauggcaccagugagugccaccucuugauauu

SEQ ID NO: 4162466 - RNA, 101 nt, Human
aauauccuucacuucacauauuacgaggccucagaaauagaguaaaauugacugucaauccuagcuuuauaugaggugguaagugaagaaagaaggggauu

SEQ ID NO: 4162467 - RNA, 108 nt, Human
aauaucuuucuaauuaaccugcuccauacuucaacaccauaugguccuguuaaaaagcagauaacauauaccuggguggggguagagggcaguuuauacaucauuguu

SEQ ID NO: 4162468 - RNA, 76 nt, Human
aauaugcuuguuuguaaggcucuuagaauaacugucuuugacugcucauuuuuagucuugcugcaaucaguauguu

SEQ ID NO: 4162469 - RNA, 71 nt, Human
aauauggcuuuacuuaaacugaaucacaugaagaacuuucuaaaugguucacuaugggcauaagucauguu

SEQ ID NO: 4162470 - RNA, 73 nt, Human
aauaugguggcaaaggcaugauuaauucugugucucauacuugacacagguaucauugccuguuguuuguauu

SEQ ID NO: 4162471 - RNA, 62 nt, Human
aauauguaguguugagaaugcuugcuaucaaaauagccugaagcacaaaagcacagcuuauu

SEQ ID NO: 4162472 - RNA, 98 nt, Human
aauaugugcucuuuuugugucuagcuucuuuaauucagcaugauguuuuugagccuuauccgcaucaugcugaauuaaagaagaacaucguacauguu

SEQ ID NO: 4162473 - RNA, 94 nt, Human
aauaugugugacuaagggugaagguaaaggaaggaggcuuuuaaaauuaauuagauaugccucugcuuuauuuauugacuuuuucacauguauu

SEQ ID NO: 4162474 - RNA, 82 nt, Human
aauauucauuaguuuguggaagaugguagagaauuguuccaagaagaccauuauugccagcuauuacaacauauuggauauu

SEQ ID NO: 4162475 - RNA, 104 nt, Human
aauauucuuucuguuacaguaaaccacagacccagacuagagagaucaauuaggaauuauuuauucacaaaucucagucuuuuugguuacucaaaaguaguauu

SEQ ID NO: 4162476 - RNA, 56 nt, Human
aauauuggagaaaaguuaguggcauugcauuuuaugucaagcuaguuuccaaaguu

SEQ ID NO: 4162477 - RNA, 103 nt, Human
aauauuguucuugguguauucugagaguauuuuggcauuaucaguauguuauuaaaauacugaagagucaugaaaauauuuauuagaauaaaagggauauguu

SEQ ID NO: 4162478 - RNA, 77 nt, Human
aauauuuaucgaaugccuacuauguuccaggcaccauccugggcccugagcacacaguagcaaagaaaacaaauauu

SEQ ID NO: 4162479 - RNA, 80 nt, Human
aauauuuccaagccaguaaguuuuugucauuuuuuauaauguaaucuaaaugaugaaauguguuggcucugggcuguguu

SEQ ID NO: 4162480 - RNA, 60 nt, Human
aauauuucuccuucguuauagcuucacaaguuggcuaaagacugaggaaggggaaguauu

SEQ ID NO: 4162481 - RNA, 109 nt, Human
aauauuuugauaacuguauuucaagauauuugguuuccuuugauagcuguuucaauauaacugguuuccuuggugcccgauguauuuauguuauggguuuaaaaauauu

SEQ ID NO: 4162482 - RNA, 66 nt, Human
aaucaauuuugaggauacaagaaguuccugggaauccacacugcuauucuuguaccuuaaaugauu

SEQ ID NO: 4162483 - RNA, 55 nt, Human
aaucacacuuauccucaauagccauauuuauggcuuccuguguaaugaggugauu

SEQ ID NO: 4162484 - RNA, 55 nt, Human
aaucacaugaaaacuguguguuuaaguacuagaauacaagucaauccaugugauu

SEQ ID NO: 4162485 - RNA, 58 nt, Human
aaucacauuaagcccuguucagugaaugacaaacuugacucugggaguuuaugugauu

SEQ ID NO: 4162486 - RNA, 99 nt, Human
aaucagauuagaccaggcuuuaccacuugcuaaggacaugggugaauuuguaugcagauugauucacagagugguuagugguagucugguaucgugguu

SEQ ID NO: 4162487 - RNA, 78 nt, Human
aaucagggagcccugggcuccuaaccauccagguuucggaguaggaaucaugaggaaaggaguuagggcaccuuaauu

SEQ ID NO: 4162488 - RNA, 85 nt, Human
aaucaguuuggucagugaugcagauuuaauuaguauaggguaaggaccugguauuuuuauaguuuguaaagcuccccagaugauu

SEQ ID NO: 4162489 - RNA, 107 nt, Human
aaucauuggacacuugccuguugauaaggcgaugccuugcacuucguccuuuauuccugaaggagcaggagcaauggccuaucagaaauggccagguaucuuggauu

SEQ ID NO: 4162490 - RNA, 105 nt, Human
aauccaaaugauuacagauagcacuuaaauuaguugaccuguuugggagauuuuauuacuuccaaucaggauaauaauuagaguuugcuaauaaaauuuuggauu

SEQ ID NO: 4162491 - RNA, 61 nt, Human
aauccaggcaaaaaccaacuacagcuugcauuaaaauaagacugauagauguugcuggauu

SEQ ID NO: 4162492 - RNA, 129 nt, Human
aauccagugaaauguuccggauguuuuggaugagggaauucuauuucauacaggucacacucccuuaccaaccucaggccuggcugaaggaagauucuucuaauccaaaacauccugcaauuuuaauuu

SEQ ID NO: 4162493 - RNA, 72 nt, Human
aauccauaacuugcuuuggagcccggccucagagauuuaaauaaagugccggagggaggcaaguuguguuuu

SEQ ID NO: 4162494 - RNA, 67 nt, Human
aagugggaggaucucuugaggccaggaguucaagacgagccuuggcaacauagugagacccccauuu

SEQ ID NO: 4162495 - RNA, 62 nt, Human
aaguggggacaaugagagcaggucuauucagcugugagaccugugcucuuugcuccccauuu

SEQ ID NO: 4162496 - RNA, 55 nt, Human
aagugugagccagcccuuugcaugaagaagcauuagaagggaucacugcauacuu

SEQ ID NO: 4162497 - RNA, 76 nt, Human
aaguguuaaugguagaaucugaguguuuguauuagagcauuuacuguaaaaacucacucggauuugcuauaugcuu

SEQ ID NO: 4162498 - RNA, 76 nt, Human
aaguguuacauauucuaaaaugcuagcuucugaaaaugaaugcaauacaugguguuuuucuaguuauguugcacuu

SEQ ID NO: 4162499 - RNA, 86 nt, Human
aaguguuauaagacaguacuuacaguuuacauaagaauuguuuaccugaggauuuagcaugaaaugugaaaacuguuuuaauauuu

SEQ ID NO: 4162500 - RNA, 79 nt, Human
aaguguucuccugaggacccuuaggucagacagagaagcuuucucuuucugaugggaagggucaaaguggaaaucucuu

SEQ ID NO: 4162501 - RNA, 96 nt, Human
aaguguuuacaugauucuuuugaguauucucacaaaagcgcauccuuuagugcuauguuuacuuaugagacacucaacaaagauaugacaacacuu

SEQ ID NO: 4162502 - RNA, 91 nt, Human
aaguguuuuuauucguggacucucucccaggccucagaauauggaguaauuuccuguguuaaagggggugcuaggacagaguguagcacuu

SEQ ID NO: 4162503 - RNA, 90 nt, Human
aaguuaccuaccucaaguagccaguuucuuuaacagcaaagugaugauaaaaucuuuguguuaaggugguuggcaaaguguuaggaauuu

SEQ ID NO: 4162504 - RNA, 72 nt, Human
aaguuaggcucuuaagcauaacuuaaaggcccauaagcauaaauuaacuuuuaagacaugugagcauaacuu

SEQ ID NO: 4162505 - RNA, 77 nt, Human
aaguuauuaaguauuagaaugaaguauaggauuugggucuuuugaaguucuauagucuuucuacuaacugcuaacuu

SEQ ID NO: 4162506 - RNA, 61 nt, Human
aaguucagauuugacugguuucucaugagccacaugugggaauguagcaaaucugcaauuu

SEQ ID NO: 4162507 - RNA, 64 nt, Human
aaguuccuugaaugaagcuaggguucucuaccugggcuacacuuuagagucaucuagggaacuu

SEQ ID NO: 4162508 - RNA, 95 nt, Human
aaguucucccacuugcaauauauaaugaggagacauauuuuugaagcaauuaacuguuccuucaaaauuguucuuuauuguugguguaaggacuu

SEQ ID NO: 4162509 - RNA, 110 nt, Human
aaguucuugacugcauuguuuggccuucugguguucauuuuggcuuaugaaugcaaccaauccuuaucuuggcuaaugugaauauaagugggcugucuuguuggggauuu

SEQ ID NO: 4162510 - RNA, 98 nt, Human
aaguugcaaccuagugaugcaucuucagcccucagccagguuucuacucagauguggacccugagcugguggaagcaugcagauuaauugugaaacuu

SEQ ID NO: 4162511 - RNA, 60 nt, Human
aaguugcaagauguucaugggcuguuuugauaauagagagaacacgugcaucugcaauuu

SEQ ID NO: 4162512 - RNA, 85 nt, Human
aaguugcaaugcaugggugucaugcucucgucucauauugccugaagaguguguucaguaugacauucacaggccucugcaauuu

SEQ ID NO: 4162513 - RNA, 60 nt, Human
aaguugcuguuucucugugucugguggaaggugucuaugguugcagagugagggucucuu

SEQ ID NO: 4162514 - RNA, 57 nt, Human
aaguuuacugauucuucugucagcucaaaucugcuguugaaguccucuaguaaauuu

SEQ ID NO: 4162515 - RNA, 81 nt, Human
aaguuuacuucuacagucuuuggaaagagauaguuugcaaagcaaauugauacuuuaaaaaaggcuguagggggaaugcuu

SEQ ID NO: 4162516 - RNA, 55 nt, Human
aaguuuagcgcucucucaaggaguucaagagcuucagagccagacugcugaauuu

SEQ ID NO: 4162517 - RNA, 72 nt, Human
aaguuuaucaacaugugagaacucaggaaauacuguuccugcaaguuuuuccugauuuuacagaaugagcuu

SEQ ID NO: 4162518 - RNA, 64 nt, Human
aaguuucagagaauuagaagcugauuuuagaaaaguaagauuaggugaauauucucugaaauuu

SEQ ID NO: 4162519 - RNA, 99 nt, Human
aaguuuccuucaaaaagaugugccaaauuauuggguaccauuuuaaaaaauuaaaaaguuauuaagaagguacucaaagaucuguauauaaggaugcuu

SEQ ID NO: 4162520 - RNA, 87 nt, Human
aaguuucuaauguguugugugccaguuacuaacaccuuuggcuccaugucggaguuaaaugucaguagcuuaaccauaagggaauuu

SEQ ID NO: 4162521 - RNA, 55 nt, Human
aaguuuggaagccgucugcaaaucuccugggguucucagaauaaauuccuaacuu

SEQ ID NO: 4162522 - RNA, 58 nt, Human
aaguuuguggucauuuauuauagcgcccagaaggcacuaagguaauggccaagaauuu

SEQ ID NO: 4162523 - RNA, 84 nt, Human
aauaaaacuuauuuuaagccagggguugguaugcuaugaccugcaggccaggcuggcccaccucuugucuuuuuaaguuuuauu

SEQ ID NO: 4162524 - RNA, 130 nt, Human
aauaaaguuuuauuggaacacagccaugcccauucaucaugcccauugucuauggcugcuguccugcugaaaggcgaagcugaagcacugggauggaagcaguaugaccacaaaucuggaaauauuuacu

SEQ ID NO: 4162525 - RNA, 81 nt, Human
aauaaauaaugacagcauuuaaggacugcugacccugagcuaggcaguguucuaagucuuuacauguguuauauauuuguu

SEQ ID NO: 4162526 - RNA, 69 nt, Human
aauaaaugucuguaggggcugcaggcuucauuguuugguaagccugacagauuucuccuaucauuuguu

SEQ ID NO: 4162527 - RNA, 81 nt, Human
aauaaccaugaguaugauuauacccaguaaaaucggcuaccuaaaaagacuauacuguugauuucauguuuauggauuguu

SEQ ID NO: 4162528 - RNA, 88 nt, Human
aauaacucaucugccugcugauuaguauugucugagggaaacaaggcacuccgagaacaggauacucaguuagggggcuaugguuauu

SEQ ID NO: 4162529 - RNA, 73 nt, Human
aauaacuugaagaucucuuccaaaccugaaauuguguguaucacagacauugauggaaggcaucugcauuauu

SEQ ID NO: 4162530 - RNA, 74 nt, Human
aauaagaauauuucauugaucaccaaauuugugccaggcauuguacugggugcuucaaggaaugucauuuuguu

SEQ ID NO: 4162531 - RNA, 126 nt, Human
aauaagcaugauauaaucuguaggaugcuuuguuuggaaauaguuugaaagauacaacagagauaggaagacuguagaauagacuuuucaaaaucuagaccacagauuauauuuaagugacuuauu

SEQ ID NO: 4162532 - RNA, 87 nt, Human
aauaagccgcggcauuuguaaaagcuagucaaugauguauuagccucuggauuaucauaaaacuaguuugguaauucugugauuguu

SEQ ID NO: 4162533 - RNA, 59 nt, Human
aauaaggugugggugcuaauauaucacaaacuauaauauauuugcaacuacaucuuauu

SEQ ID NO: 4162534 - RNA, 61 nt, Human
aauaagucacagcagaaggagcaauuuaggagauuguuuuuaaacaugugacugaauuauu

SEQ ID NO: 4162535 - RNA, 64 nt, Human
aauaagucuuuuacuuaguugacauguaucaauuguguguuuucuggguggaagguacuuuauu

SEQ ID NO: 4162536 - RNA, 60 nt, Human
aauaauaguugcaaaguguuuagcacagugcuagacuuacaacuaguugcaguuauuauu

SEQ ID NO: 4162537 - RNA, 84 nt, Human
aauaauuauguuuugggaagugcuuccauugucuacugcugugugacaaacuccaggacuuagugaccuaaaacaacaguuauu

SEQ ID NO: 4162538 - RNA, 84 nt, Human
aauaauucuacgugguuuuauucacccacucagcaagugguacauaaucaauugucaagaaaaauggaugaagcguaaauuauu

SEQ ID NO: 4162539 - RNA, 86 nt, Human
aauaauucuuucuguauguucagugacaucuuugggugcccaauaaccuaagugucuaaaaggcagaacugcagaucauauuuauu

SEQ ID NO: 4162540 - RNA, 67 nt, Human
aauaauuugugaggcuguuuugaggauuaaacaaggaugucucagaaaagagcuucagaaauauauu

SEQ ID NO: 4162541 - RNA, 67 nt, Human
aauacaagacgagggaaguucuuuugacauacaaguuugagagaacuucuuuuguaguuccuuuauu

SEQ ID NO: 4162542 - RNA, 61 nt, Human
aauacaggaaguuacagacuaugaacacugguuaccagcuucagucuguggcuuccuuauu

SEQ ID NO: 4162543 - RNA, 83 nt, Human
aauacaucuggugagaagccguugccagucccagccccugcuuugagucugguauuggucuuuaaucucucauucuguguguu

SEQ ID NO: 4162544 - RNA, 78 nt, Human
aauacaugggauucaguuucauggcacagcuauauuuagcugaagauagcugugccaugaaacugaaacccacauauu

SEQ ID NO: 4162545 - RNA, 96 nt, Human
aauaccugagagauagaaugauauaguauauaggacaagucccauaauauaauuaaauauggcacugauguuuacugcauucuauuugcuuguguu

SEQ ID NO: 4162546 - RNA, 63 nt, Human
aauacucauuagcacucuaaggaagagauccuauugggucucuucucugugcugagagauauu

SEQ ID NO: 4162547 - RNA, 85 nt, Human
aauacuggcuuuugucauuaucuuugaaguugaaguaguuggccucugucaacccuugucuucaaaguuaagaauuugucauauu

SEQ ID NO: 4162548 - RNA, 96 nt, Human
aauagacccauuuguccagcaaagauauugagcacucacuccuauucauauuuguugagcacucacuccuguuugucugcuggacaaauagcuguu

SEQ ID NO: 4162549 - RNA, 120 nt, Human
aauagagaauugaaagugaaaauguagcacugaaugcuuuuacuguaaugccuaguguugucagugucaguaguaucacagugucauauuaucaaugugauauuuguucguucaucuauu

SEQ ID NO: 4162550 - RNA, 130 nt, Human
aauagagagcuagugcuuugguaauacguguguuuaaauauuuguguauuuuuaaggauaauuuaucuuuuuuuaaaaaaagaguauuugguauagaacacucuuuaaguauuaguaaaggcuaugguuu

SEQ ID NO: 4162551 - RNA, 63 nt, Human
aauagcaaaaaugaacaaagcuugcauuuuaaaaacagcaggaauagagguucauuuguuauu

SEQ ID NO: 4162552 - RNA, 67 nt, Human
aauagcaccugagguaguuuguagacucugguucugucuaauaaauuggcuucuucaggugucuauu

SEQ ID NO: 4162553 - RNA, 122 nt, Human
aauagcauuagaauuauuuguuuguuaaaaguuagcuaggacaaaguguaaaacaaucuaauccugaugacacuuuuaauaguagauuuuuaaucagcuuugugauuucuuuaauaguuauu

SEQ ID NO: 4162554 - RNA, 110 nt, Human
aauaggcagugagcauguuuaagccauuaugaacacuauuuuuaagggcuuuagcaaauuaauuuuaugcaaaugguguuucuaaugcuagagcugcuaaucuguucauu

SEQ ID NO: 4162555 - RNA, 62 nt, Human
aauagggaugacuaugauucccaccucaugaguuaggaggauuaaaugagaucauuccuauu

SEQ ID NO: 4162556 - RNA, 83 nt, Human
aauagguagucauauagagggagaaaucagaaaggcaaaucuuuucgucugucuccuugcuuuucccuguaguccuaucuauu

SEQ ID NO: 4162557 - RNA, 85 nt, Human
aauagugccuaccuaguggcauuguugugaggauuaagcuaauuaauauaggaaaguucuuacaguagugccuggauguacuauu

SEQ ID NO: 4162558 - RNA, 59 nt, Human
aauauaugauauugcuuugggcauuuacaauuucaguaaaugguauaaugucauguauu

SEQ ID NO: 4162559 - RNA, 77 nt, Human
aauauauuuucucuucaaagauuauugaaaacaaacugaaaaccagguuguugucauuuugaagggugguuuauguu

SEQ ID NO: 4162560 - RNA, 92 nt, Human
aauaucuagagagauugggagugggaggcugagucuggaggugagauaucuguauccaaucagagaaguuuccuaugccuuccuguaauguu

SEQ ID NO: 4162561 - RNA, 67 nt, Human
aauaugauccuuaaccuucauguuacagugagagauaaauuagcaucaugggaaguaggauuauauu

SEQ ID NO: 4162562 - RNA, 57 nt, Human
aauaugaugcuaagcggugacauguacugaauauuugcuguugccagguaucauguu

SEQ ID NO: 4162563 - RNA, 55 nt, Human
aauaugcauuauacagacugaugccgaguggcguucaaucuguguaauacauguu

SEQ ID NO: 4162564 - RNA, 78 nt, Human
aauaugcuucuuuuucacuuauccugaauaaacauauguaagucuuacaucauggaggguauugaaugaggcuguguu

SEQ ID NO: 4162565 - RNA, 84 nt, Human
aauauguaucugaggaguaaacauuucagauuuauuuucauuuguauaagguaaaugaauguuuagucuuuuuccagacguauu

SEQ ID NO: 4162566 - RNA, 78 nt, Human
aauaagauggcacugaccucccuuguaaguacagagacaauguggagcuuuggggcuggucagaaucugucacuuauu

SEQ ID NO: 4162567 - RNA, 77 nt, Human
aauaagucuuguuggaguucuugcagcuuagcucuuugagggcuaaauaugcaaagcaaaaacccaauaaauuuauu

SEQ ID NO: 4162568 - RNA, 61 nt, Human
aauaaguggcagaguugguaauauuguccacaaccaccuguuaauacaucugccacucauu

SEQ ID NO: 4162569 - RNA, 66 nt, Human
aauaaugagacucaauuguguguguguauuugcuuacuuacguauauauaaguagguuuucuuauu

SEQ ID NO: 4162570 - RNA, 66 nt, Human
aauaaugugauauuucauuuacagcaguaaaggagcauagcuugugaauguuaauauuggauuauu

SEQ ID NO: 4162571 - RNA, 99 nt, Human
aauaauuuaaucggugaagcauaacugaaggauuuagaaaaagugccuaaacuauuaaaagauucuucagcugcugcuuaauguugauaucaaguuauu

SEQ ID NO: 4162572 - RNA, 80 nt, Human
aauaauuuuacucaaguaugcauuuaugguuggaaaugguuagcuaauuauaaaugagcugcuggagcauuaaaacuauu

SEQ ID NO: 4162573 - RNA, 64 nt, Human
aauacaacaaaaugaggaaguggucagcuauagagacugcauuucuuuaauguuuuguuguauu

SEQ ID NO: 4162574 - RNA, 66 nt, Human
aauacagauguuggccaagucacugguuaaugaacauuauuauucauuuuggcucacauuaguauu

SEQ ID NO: 4162575 - RNA, 61 nt, Human
aauacagucuuacuagaaaauccaagagaauucuaucuucugcaauugaugagacuguauu

SEQ ID NO: 4162576 - RNA, 79 nt, Human
aauacauaaauugaaguccuaaucuccaguaccucagaaugugacuguauuuggagaugggaucuucaaagaggugauu

SEQ ID NO: 4162577 - RNA, 56 nt, Human
aauacaugggaugcuaagagaucaaaagaagaauuauucuuaguagagcauguauu

SEQ ID NO: 4162578 - RNA, 71 nt, Human
aauacauguaaagaauuucacacaagaucugacacacaaaauauuaagaucuuaguguaugugcauguguu

SEQ ID NO: 4162579 - RNA, 115 nt, Human
aauaccaacuauacuuaagcaguccugggauacuaagaaauuuugaagugcaaucacuuccuucaaaguacuuacaguaugcuuggaaaaaaacuguuuuaaaagauaguguauu

SEQ ID NO: 4162580 - RNA, 69 nt, Human
aauacucagagugguagccuauuuucugcauauaaauguaaaaauuccugguuacaacucuguaauguu

SEQ ID NO: 4162581 - RNA, 96 nt, Human
aauacugauggauguuuuuuacugguuuacccaagauuugcugaguucuuauaaugaauucggaaaagcucugugaacaggaagacaaucaguguu

SEQ ID NO: 4162582 - RNA, 67 nt, Human
aauacugcccccacucugcccagauccccucaggaccuucacugggaagagugucgguugaaguguu

SEQ ID NO: 4162583 - RNA, 76 nt, Human
aauacugcuuccauucuguaauuuucucuucccagcgcacccgugggaccuguuacauugaguuagaggcaguauu

SEQ ID NO: 4162584 - RNA, 75 nt, Human
aauacuggcuuugagacugaguggcagguguagaaaaacaacuguaacaucuauucagccucuaagacaaguauu

SEQ ID NO: 4162585 - RNA, 69 nt, Human
aauacuucaugaaaguugggcuguuuaaaaaacauacuagcaacaagcccacauuggugcaugaauguu

SEQ ID NO: 4162586 - RNA, 67 nt, Human
aauagaagaaguagauagugcuacggaguuuuaagggagguccagggcuuaucugcuauaucucauu

SEQ ID NO: 4162587 - RNA, 56 nt, Human
aaguauuuuauauggugguuguguaguuuaagugaaauuauacauguaaagugcuu

SEQ ID NO: 4162588 - RNA, 72 nt, Human
aagucaacuaggugguucuaucucggccucucagaaugccugguaccucagcuuggacagcuugguugacuu

SEQ ID NO: 4162589 - RNA, 57 nt, Human
aagucaagauaaaggugcuggcagauucaguugcuaugaggacccuuauccuggcuu

SEQ ID NO: 4162590 - RNA, 124 nt, Human
aagucaaggcaucagcagggcugugcucccucuggaggcucuaggggagaagcucuucucugccuguucaagucuucuagaggcugcucacauuccucagcucaucucacucccaccuuugcuu

SEQ ID NO: 4162591 - RNA, 74 nt, Human
aagucaaugugcuuugcuuuuagaguaaguuucaggccauugcuugaagcaaugauagcagaaugaauugauuu

SEQ ID NO: 4162592 - RNA, 60 nt, Human
aagucacacaguuaacaugaggaagauuuauggggaauugaacuuauauuugugugauuu

SEQ ID NO: 4162593 - RNA, 86 nt, Human
aagucaccucuguccccacccacaugcgcacugcuacacgcugugccuaccaaggcuggcagaagugugcuggcugggagugauuu

SEQ ID NO: 4162594 - RNA, 59 nt, Human
aagucacuugauuguugacagaauuuauuucuuugcaccuguugaauucauggugacuu

SEQ ID NO: 4162595 - RNA, 61 nt, Human
aagucccaucugccuccauguaccagcugaucgcagagcuggacuggggcaggcugggcuu

SEQ ID NO: 4162596 - RNA, 56 nt, Human
aagucuaaccuauuccgguguucucucucccaugagacaagccguuauauagacuu

SEQ ID NO: 4162597 - RNA, 77 nt, Human
aagucugcuuuuaauuagggaggacaaagguacacaucucacauucaaguugcccauucuuccuaauuuguaggcuu

SEQ ID NO: 4162598 - RNA, 61 nt, Human
aagucuggaagucucaguuuucucaucuguaaaauggagauaauauagacuuuauagacuu

SEQ ID NO: 4162599 - RNA, 59 nt, Human
aagucugggaucagggugccagcaugguugauuucuggugagggcucucuuccagacuu

SEQ ID NO: 4162600 - RNA, 70 nt, Human
aagucuuugcuauugugaauagugccacaauaaacauaugugugcaugugucuuuauaguagcaugauuu

SEQ ID NO: 4162601 - RNA, 70 nt, Human
aagucuuugcuauugugaguagugccacaauaaacauaugugugcaugugucuuuauagcagcaugauuu

SEQ ID NO: 4162602 - RNA, 119 nt, Human
aagugaauaaaacagauaggagaggugagacagaugagacuccaggaccuuugcuucaaaguagucacagucucaucuguuuuauauuuugaacuuuuauaguuugguguguaucacuu

SEQ ID NO: 4162603 - RNA, 57 nt, Human
aagugaauggggcagacuucaggguaugagccugacaugaacuuucucccuucacuu

SEQ ID NO: 4162604 - RNA, 70 nt, Human
aagugaauguuagguggaaauucccaaaugcauuuuccaauguuaggaagcuucauaccuuuauuuacuu

SEQ ID NO: 4162605 - RNA, 78 nt, Human
aagugaauuaaaggaauucgaauucuggaaggaauguuuuuuuagcucuggaaggauucugauuuauuugauuuauuu

SEQ ID NO: 4162606 - RNA, 76 nt, Human
aagugacucagccuggcucuuggggcccugcccagaguccccccaggcuccuaagagcugaggcauugggacauuu

SEQ ID NO: 4162607 - RNA, 81 nt, Human
aagugagauauuuuguaagagcauauguaaagguacuagcucagugccacacauuauaggcacuugucauguaguucacuu

SEQ ID NO: 4162608 - RNA, 71 nt, Human
aagugaggaaauugucuuuuuccuugucagauucuaaacccuggcauggagucugacuguuuucuuuucuu

SEQ ID NO: 4162609 - RNA, 59 nt, Human
aagugaguggccuggagaggugaggaaagaaucaaugguaacuccaaggucucuggcuu

SEQ ID NO: 4162610 - RNA, 57 nt, Human
aagugagugguaaggagcaugggcuauaaucagugccccuggcucugucacucacuu

SEQ ID NO: 4162611 - RNA, 61 nt, Human
aagugaugccaugaugcaagccaggcucuggugagcagcuggcucuguagguggcauccuu

SEQ ID NO: 4162612 - RNA, 73 nt, Human
aagugaugcuuuuacacucaucugggaggggguagggucagcauccccuggcagaagguguagaagccuauuu

SEQ ID NO: 4162613 - RNA, 69 nt, Human
aagugauucauugaugaugaggugccauuauuuuugaaaccugcacuugagucgacguaugaauuacuu

SEQ ID NO: 4162614 - RNA, 64 nt, Human
aagugcaggaguggggaaaguagcugccaaccuggaaguuuuuaaucccccuuccugaacacuu

SEQ ID NO: 4162615 - RNA, 116 nt, Human
aagugcauuaaaaugcuuucucagauuuuacuacuccaauuaaugauuccauuuucuucaaggguuauugacugaaaugagagugauucccaugugggaggcauguucauguacuu

SEQ ID NO: 4162616 - RNA, 66 nt, Human
aagugcauuacaggaauuuguuacugaaccuugugaguuuuaguagaaaacagccuguguugacuu

SEQ ID NO: 4162617 - RNA, 90 nt, Human
aagugccgagggcacagaccuuagggagacacucacugucacgguugugcaagugcagcaucuccuuaaaucuuguccccugugugucuu

SEQ ID NO: 4162618 - RNA, 61 nt, Human
aagugcuagugagucuauuguaugguagauaaugacagaauagccuugacucacagcucuu

SEQ ID NO: 4162619 - RNA, 62 nt, Human
aagugcuuuauaaacaaugaagcauaaugcuaauaguguaacagauuguuaauagaguacuu

SEQ ID NO: 4162620 - RNA, 86 nt, Human
aaguggauggucacugauccaguaaaagucuccauuuuacccaucuucaagacuaaaacucagggcuagguuaguggcuaacauuu

SEQ ID NO: 4162621 - RNA, 58 nt, Human
aaguggcagacauaucacaagaguccccagacucugccuagaaacaguguuugcccuu

SEQ ID NO: 4162622 - RNA, 64 nt, Human
aagugguauccucagagcgcguggcauuauucugguucagaaauaaugucuugugcucucacuu

SEQ ID NO: 4162623 - RNA, 83 nt, Human
aagugguuugagucagcccuuuacuuccucuuuuccugaugggcagcagggcccaguggagagcugagcuuacaccccaacuu

SEQ ID NO: 4162624 - RNA, 77 nt, Human
aagugguuuuuccugucgaauacagacaaggcuugggcccgcaucucagucuucauuuguguucaagacaucuacuu

SEQ ID NO: 4162625 - RNA, 86 nt, Human
aaguguacauucaaaagcuccauguuuguuuuuauuucacaaguuaauauuaggaauuaggcauauaugcuuuuaauaguacauuu

SEQ ID NO: 4162626 - RNA, 114 nt, Human
aaguguacuguauauaaaauuagagguuacauuucauguuuaaauacuuccagggauauaaaucaguuaucuguaaauaaauguguguagccaucugugugugugugugcauuu

SEQ ID NO: 4162627 - RNA, 60 nt, Human
aagugucagcagcuugauuuauaauaucuuuauaguggugauauacaagcucuguuacuu

SEQ ID NO: 4162628 - RNA, 90 nt, Human
aagugucagcagggcucucugagggcucgagggacgcguaccucccugccucuugccagcucugcagguuacuggcccucgcuggcgcuu

SEQ ID NO: 4162629 - RNA, 56 nt, Human
aaguguuaagaaugcucuggcgguccuaggugaccgacacaguaaucuuggggcuu

SEQ ID NO: 4162630 - RNA, 82 nt, Human
aaguguuuccaaugccauuaagcuuuagggugcggggcucuaauucugggacucuaaugcuaauaguauuuuuugagcauuu

SEQ ID NO: 4162631 - RNA, 93 nt, Human
aaguuaaguaagaggcaguagccauucagaguauaugucuaauuucagcuucuuccuuauauucuuugaaauacuguuuugcccccuuaauuu

SEQ ID NO: 4162632 - RNA, 59 nt, Human
aaguuacacagaguuggaggcugaguucacuagaaggagucuccgcuuguguguuccuu

SEQ ID NO: 4162633 - RNA, 70 nt, Human
aaguuagcagcucaaguuucccaggucagcgagaguaagauuuucugauuggcuuacaugaugcuuucuu

SEQ ID NO: 4162634 - RNA, 105 nt, Human
aaguuaguggucaccaacagcaagauagcacacacugcaucuacaaauguaugugacauaucuucacauuuugugugugugugugugugugugugaccacaacuu

SEQ ID NO: 4162635 - RNA, 83 nt, Human
aaguuauucaaacucucugagucuugugauccucaucuauaaaauaggcauggaccacaauauuugugagguuuaaauaaguu

SEQ ID NO: 4162636 - RNA, 89 nt, Human
aaguucaguuucuucacugggauuucuucacuggaauaaaaauagaauaagaaguaacuuggacaaucccacaagaaacacuggcacuu

SEQ ID NO: 4162637 - RNA, 121 nt, Human
aaguucuaguuaacgaaguuuuagcauggguuuguguguagcuacuuuguguucaugucacauucuacugcagccuuaugaacagaaggggguauuuacauuuuuauggugacuaggucuu

SEQ ID NO: 4162638 - RNA, 64 nt, Human
aaguucuuguauuugccuuucucuuuucuaacuucuugagauuuggcuuuguguucaagaauuu

SEQ ID NO: 4162639 - RNA, 65 nt, Human
aaguugauuaaucuuucgagaacacccacuuugauguguuuguacuuuggaguauugagggacuu

SEQ ID NO: 4162640 - RNA, 57 nt, Human
aaguuggagaggcagacagaggcccaucucuacccuucacugccugcucuccagcuu

SEQ ID NO: 4162641 - RNA, 67 nt, Human
aauuagcuaggaaauuuugugucucuuucaaucaauuauucuuugaggccaaagacuccagcuaauu

SEQ ID NO: 4162642 - RNA, 71 nt, Human
aauuauuuaacaaucauaggaccauuuagguuaucuacuuuaucaugaaugaguuuugguuguuugugguu

SEQ ID NO: 4162643 - RNA, 83 nt, Human
aauucaaauagcuguauucuccagcucacuguccauauuguguaucuguguguguauguguguugggggagagguguugaauu

SEQ ID NO: 4162644 - RNA, 77 nt, Human
aauucagcaagugggaagguucggaugaagaucuuguggaaaauuaucugaacaaccuuuauuacuuuuccagaauu

SEQ ID NO: 4162645 - RNA, 68 nt, Human
aauucagugagguggggcuuauguucacuaucugggaauuucacaggcuggccccucucacaggaguu

SEQ ID NO: 4162646 - RNA, 67 nt, Human
aauucaguuauuuacuuugcuauagaccagagaaaaagggaaaaugauagugauagauaacugaguu

SEQ ID NO: 4162647 - RNA, 61 nt, Human
aauucaguuggcaaacaugcugauugaucaucugucugcaugccuucugccagauugaguu

SEQ ID NO: 4162648 - RNA, 62 nt, Human
aauucaucugguagccacagucauugcauuuauuuuugccaguggaaggucccagaggaauu

SEQ ID NO: 4162649 - RNA, 95 nt, Human
aauucauuccagggugcauacccaugcauaccuuuagaagaaaauagccuagggugaauuucuguaugugugaugugcacccagggacuugaauu

SEQ ID NO: 4162650 - RNA, 56 nt, Human
aauuccaggggguaccauucauauuguagucuacaggaauggcuuccucugaaguu

SEQ ID NO: 4162651 - RNA, 71 nt, Human
aauuccggaggugacuuuaacuucagauuagauucuagaaucaguuuguaaaauagagucauuuaugaauu

SEQ ID NO: 4162652 - RNA, 61 nt, Human
aauagaauuuguacuguguuuucugagagcuuguucucugaaauacagaugcaaaucuguu

SEQ ID NO: 4162653 - RNA, 69 nt, Human
aauagacacuaugauaggugguauguacgaacgugacuugaugccaugcagcuuauuaaaguggauguu

SEQ ID NO: 4162654 - RNA, 80 nt, Human
aauagagaaggaaaccccuagagcaaggagcuauggcuauagcagaagcuaagcuguugcccugcucuuucuucuucauu

SEQ ID NO: 4162655 - RNA, 80 nt, Human
aauagagccgggcuaggggcgcgucacgugaccugugcagccaacuguuccgagacguggccuuugccugagcugcuguu

SEQ ID NO: 4162656 - RNA, 74 nt, Human
aauagagcuuauucugcucauuuuauuuccagcaaaaauugacugaaguauaaagggcagguugccagucuguu

SEQ ID NO: 4162657 - RNA, 60 nt, Human
aauagaggaagaaaccugauuguucguccagggucagaauaucaggauucuugcuuuguu

SEQ ID NO: 4162658 - RNA, 83 nt, Human
aauagauuuuguacuugcugaaugcaaguuggauagcucaggucaaugagcauccacugaaguauuucagcaucgugccuguu

SEQ ID NO: 4162659 - RNA, 75 nt, Human
aauagccuagcacuaaagaagccaaaguuuucucuaaaacaaucauggagaaaugcuccuuuaugcaaaguuauu

SEQ ID NO: 4162660 - RNA, 63 nt, Human
aauagcuauuugagcauauuccagcuguauuguagggucuggagaagcauucaaauaauuauu

SEQ ID NO: 4162661 - RNA, 69 nt, Human
aauaggcugaccuccuuucucgacuaauugcauuacaucgccagcuggcuccagaaggagucgucuguu

SEQ ID NO: 4162662 - RNA, 96 nt, Human
aauaggggcccgagagccaacuaauucuugauaacugugacaacuagcauuugggucuuuaacaggaauuauuacagaaugcuguugggauuuauu

SEQ ID NO: 4162663 - RNA, 101 nt, Human
aauaguaaauuuaauuuuuaaaagucugcaaauuggugaggaccacuuguauaaaauuauauauuuggccacuaauugcaucucaaauugauacagcuauu

SEQ ID NO: 4162664 - RNA, 105 nt, Human
aauaguagcacuuguuuguacuucguaguuuacaaguucuuuucacauguaacauucagaaucuuguaaaaucuugugacuuaggaaggacacauacauauuauu

SEQ ID NO: 4162665 - RNA, 88 nt, Human
aauaucaaauagagcugaugagagcagauauucuuauucuugauguuaggaagaagucauucugucuuucaccauuaguuuugauguu

SEQ ID NO: 4162666 - RNA, 88 nt, Human
aauaucaagagguggcacucacuggugccaucuugaaagcuggcuacuaccuucaagauggccccagugagccccaccuccugauauu

SEQ ID NO: 4162667 - RNA, 79 nt, Human
aauaucacagggaguguacaccauguguacaccaugucgcagggacuguauaccaugugugcacacucccugugauauu

SEQ ID NO: 4162668 - RNA, 107 nt, Human
aauaucacaggggguauacacccccugugauauuguucauaauaucagaaaaauaggggaugauauuucucccaguaucgcagggguguauacuccccugugauauu

SEQ ID NO: 4162669 - RNA, 81 nt, Human
aauaucagaaagagcuauuauuuuuuagacuggacaaaguuggcucuuuggaaguaaugaagaggugggucugacuguauu

SEQ ID NO: 4162670 - RNA, 80 nt, Human
aauaucagggaacuguacaggagacgucugugcacuaccccuccgaagaacccaauggugcaccuguagucccugauauu

SEQ ID NO: 4162671 - RNA, 115 nt, Human
aauaucaguaugggaagugguuugaaguguaacagucuacaaagugaugugugggaaaaguauuagaacucauauuuauuuuuagcuacauagaaaauuaaauuuuacuaauauu

SEQ ID NO: 4162672 - RNA, 63 nt, Human
aauaucgggcacucugcucagugcaagguuuuauuaaugaugugcugucaggggcuggauguu

SEQ ID NO: 4162673 - RNA, 57 nt, Human
aauaugguaguuacuuuuuacgucuuccugguggaggaaaaaagaggcuauaauauu

SEQ ID NO: 4162674 - RNA, 71 nt, Human
aauauggucaguaaugauucugaauaaugguuauguagcagaugccauuaaguauuauuaaugauuauauu

SEQ ID NO: 4162675 - RNA, 104 nt, Human
aauaugucauuuucauucauuuggaaacuaaagagcugugcuuugcaccacguccuugaugucagcaaagccagcucugucggacuaaaaugcagagacauguu

SEQ ID NO: 4162676 - RNA, 62 nt, Human
aauaugugaacccuccuccuaaggguuuuuauaauccuuucuaucuuggguaucuacguguu

SEQ ID NO: 4162677 - RNA, 129 nt, Human
aauauuauuuuuacugauugagaugcacacaauuuaucugcauucugaccaucuguuacuauagacagaauuugucagauaaauuuguguugaaaauuaagcaaauuaucaguacuuuaagguuauguu

SEQ ID NO: 4162678 - RNA, 75 nt, Human
aauauucauguauuugugauagaugaccaaaaacauuuaacugaugggaugggcaaugacaaaaauaugaagauu

SEQ ID NO: 4162679 - RNA, 71 nt, Human
aauauucuaauaaaugcccaucaauggaugaauggauaaaccaauugugacaugggcauauaagggauauu

SEQ ID NO: 4162680 - RNA, 76 nt, Human
aauauucuauucuccuggcaugugggucaucucucauugacaucuggagguguugcaguggggaaagcagaauauu

SEQ ID NO: 4162681 - RNA, 57 nt, Human
aauauucucuugucacccucaaccugcuuuuccccagggaggucagcaagaaguauu

SEQ ID NO: 4162682 - RNA, 61 nt, Human
aauauuuuugaggcccuguuaugugccaggcacuguuagcugauaggguuuuaguuauauu

SEQ ID NO: 4162683 - RNA, 70 nt, Human
aaucaaucaaguagauaaaaaugauguuguagaugaugucugcuagcagcucugauauuuacaauugauu

SEQ ID NO: 4162684 - RNA, 82 nt, Human
aaucaauuaccaaaugaaauagagauuuuuuuuaaagguucaaaccuuuucaaauuuuuauguuauaggguuuauauugauu

SEQ ID NO: 4162685 - RNA, 76 nt, Human
aaucaauuuggcucccacagauugcuuuuuuucacucuggccaagaagaaaaguaguccuuggagcgaaauggguu

SEQ ID NO: 4162686 - RNA, 89 nt, Human
aaucacuuaggaaaagauguuaugaaauaacuauggucauaaaugggccauggauggguuuaacauaauaucaugauccauucgugauu

SEQ ID NO: 4162687 - RNA, 69 nt, Human
aaucagauaaaggaaaagacagguuaacugugacucugcuggucaguuaagacugcuuuucauaggauu

SEQ ID NO: 4162688 - RNA, 58 nt, Human
aaucagcagaagagaggucuuacugucauagaagaauaccuugaucuacugcuguauu

SEQ ID NO: 4162689 - RNA, 71 nt, Human
aaucaggagaccaggaaggccuacagauagagcaggugcuuugauuuuucaugguuuucuggcuccugguu

SEQ ID NO: 4162690 - RNA, 77 nt, Human
aaucagguagcacaugauuuugauaugucccauuacuggugauauuuaauuuugauuaagauggugucugccagguu

SEQ ID NO: 4162691 - RNA, 130 nt, Human
aaucaguuuauaucaaauauuuuguaugauauuuuaugauaacaugaaaagugcuuaugauauaacuaauuuuaagggcugcauuugaugugucauaauauacaaaauucauuuugaaucuagauagauu

SEQ ID NO: 4162692 - RNA, 55 nt, Human
aaucaugugggauagucugcucuaaaucauguuuagagcagacugccucuagauu

SEQ ID NO: 4162693 - RNA, 57 nt, Human
aaucauugagacaaauuagcuuuaauguuuacaugugaguugagagucacgaugauu

SEQ ID NO: 4162694 - RNA, 89 nt, Human
aaucauuuuuaggaaccuacugugguuuuaauguguccccucuaaaaucagguguugaaacuaagaggugaggucuuuaagagaugauu

SEQ ID NO: 4162695 - RNA, 61 nt, Human
aauccacaggucuggucugggugggacagggugcucgcugagaaucaggcccguagggauu

SEQ ID NO: 4162696 - RNA, 63 nt, Human
aauccuagaacaggcagugguucauagcucuguugguccaguuguccugugucuguuuggauu

SEQ ID NO: 4162697 - RNA, 64 nt, Human
aauccucggaagccugaagauuuuaaccuuguugaauggcuucuagguucucccuuaaaggauu

SEQ ID NO: 4162698 - RNA, 65 nt, Human
aauccuuuuguucaugucuuuuacuuaugccaagcugucacacugugugcaugaacugagggauu

SEQ ID NO: 4162699 - RNA, 103 nt, Human
aaucuauguuuacuaagugagucuauuggucugcaggcaguuuucuguaagcauauacccaggauucugucuguugaccauaguuugcugauugagccagauu

SEQ ID NO: 4162700 - RNA, 87 nt, Human
aaucucacaugggcacgugcuuucuuggaccauuccugccaccauugcaagugggucuucuggaaagcagacugugaaauggagauu

SEQ ID NO: 4162701 - RNA, 57 nt, Human
aaucucagcuggcuuguuuguucuugaggacuuucaggggucauuccaguugggguu

SEQ ID NO: 4162702 - RNA, 75 nt, Human
aaucuccuccagaaaggcugaggauggcugcaaaggcucagacaggcucuaaauaaagucucuucggaggagguu

SEQ ID NO: 4162703 - RNA, 59 nt, Human
aaucuccuuuuuacugaggcuuuuguguuuccaaaaggcucagccccugggaggagauu

SEQ ID NO: 4162704 - RNA, 64 nt, Human
aaucugaagggagauacauguauugguauuuauccaaguaauuucauucaucucuuuucggauu

SEQ ID NO: 4162705 - RNA, 64 nt, Human
aaucugacaucuacuagaacagaagauugauucaacuuaacuuuuguuuuguucagaugugauu

SEQ ID NO: 4162706 - RNA, 72 nt, Human
aaucugcaguguaacaggcucuacgucuccauuaaagagaagucaguuuaauucugugcuacacuccagauu

SEQ ID NO: 4162707 - RNA, 57 nt, Human
aaucuguaguaaaccugcugucuuaguucaagcugcuguaacaaaauacugcagauu

SEQ ID NO: 4162708 - RNA, 104 nt, Human
aaucuguuuaauucuuccaaauucugcuuuaauguaagauauaccaauauauuacuuuaucaugguaaaucuucaaugaggcauuauauggguggauauagauu

SEQ ID NO: 4162709 - RNA, 56 nt, Human
aaucuucuuuucaaaagguggagccuaaucucacuccuauugaauauaggaagauu

SEQ ID NO: 4162710 - RNA, 69 nt, Human
aaucuuuauuuacaaacacaggcugugggcuggauuuggccugcaggcuguaguuugugauccuugauu

SEQ ID NO: 4162711 - RNA, 98 nt, Human
aaucuuugaaauucuagcagaagcagggcaggggcaaauauuggcauguuucacuaauuuguccuaaauguccuguaucuaccgguuuugaaaagauu

SEQ ID NO: 4162712 - RNA, 94 nt, Human
aaucuuuucauuuucugaauaacucuaugauauagacuguuauuauccccauuuugcagauauuaaaacuaugguuuucagagaguuuaagauu

SEQ ID NO: 4162713 - RNA, 64 nt, Human
aaucuuuucuaggaacaaguacauggcugcuuugacauuaugucugcuugguuuuggaaugauu

SEQ ID NO: 4162714 - RNA, 83 nt, Human
aaugaaagcaaaauguuuagaaucauucaaaaguuugcaacaguugaaaugauauuugaaggaucuaauaguugucuuucauu

SEQ ID NO: 4162715 - RNA, 69 nt, Human
gcugucuuugguucaggcaaggagcgcaaaucugagacugcaguguuccuuguggaaacuauggacggc

SEQ ID NO: 4162716 - RNA, 61 nt, Human
gcugugagcugccugugucacacgcgaugaagcugacuacugcauaggacagcuuaugugc

SEQ ID NO: 4162717 - RNA, 91 nt, Human
gcugugagggcuucugaaguggguggugauaucacugccagaugcagccaucgacgguauagcugccccccaccacagcagucucuacagu

SEQ ID NO: 4162718 - RNA, 71 nt, Human
gcugugagguaaccucaaaggcaaagucguucaaaugacugguuuuccagguuacuucuuaaugguacagc

SEQ ID NO: 4162719 - RNA, 90 nt, Human
gcugugcagcuacgugggagaauuucccagucugugcugagaauaccuuucuugccaccacuuuugaaaucguccuguagagggcacagu

SEQ ID NO: 4162720 - RNA, 59 nt, Human
gcugugcaguaguagguacagucuugcacacugcauaaaaugucugcuccugacauggc

SEQ ID NO: 4162721 - RNA, 92 nt, Human
gcugugcccagcaguuuauuccuaacucugaauccucacagcagccuugguggguuggagugacagaugaggaaacugaggcugggagaggc

SEQ ID NO: 4162722 - RNA, 58 nt, Human
gcugugcccagccauucuagauacuguccgggaggacaccuuagaagcuuaggacagc

SEQ ID NO: 4162723 - RNA, 82 nt, Human
gcugugcccagcccuggcucacggcugucgccccacaggucccugggcgugaccaucugggagcucuuugagcugggcacgc

SEQ ID NO: 4162724 - RNA, 64 nt, Human
gcugugcccuuacacauggaaagggauaacucuggucucuucagcccauuauaagggcacuagu

SEQ ID NO: 4162725 - RNA, 62 nt, Human
gcuguggcaauguuuauaauuaggacauaguaaacaaccuaaauuauuuuaaaugccacagu

SEQ ID NO: 4162726 - RNA, 60 nt, Human
gcugugggacagguccagccagagcccaggccagaggggcagaagcuggaguccuggagc

SEQ ID NO: 4162727 - RNA, 61 nt, Human
gcugugggccacacggcugaguucuuccaauacggaagccccgagcuggaggcucacacgc

SEQ ID NO: 4162728 - RNA, 86 nt, Human
gcuguguaaacaucagcgcagaauaagugugugcuggguaaaguugggccaauauacaacuuuaucuguaaugagugaaaugcagc

SEQ ID NO: 4162729 - RNA, 76 nt, Human
gcuguguaaacuuguacagugcauccaaucucccugugccucgaucauuucacuguaaaacagguuucaucauagu

SEQ ID NO: 4162730 - RNA, 84 nt, Human
gcugugucagggcuuugagaauaguggaacaguuuccuugacaugguauacguucccaguguauuucagagcccauuccagagc

SEQ ID NO: 4162731 - RNA, 73 nt, Human
gcugugucaucagcauauaagacagugccugguuacaaauaggcauuuaauaauuauuugcugguggaugagu

SEQ ID NO: 4162732 - RNA, 72 nt, Human
gcugugucgcccaggcuggagugcaguggcacaaucuuggcucacugcaaucuccgucucccggguucaagc

SEQ ID NO: 4162733 - RNA, 89 nt, Human
gcugugucuauagggcauacaaaauuuuccagaacuuuuguuaauuucacauaacugaagagcaaaaauuggagucaugucaggacagc

SEQ ID NO: 4162734 - RNA, 70 nt, Human
gcugugucugcuuggucaucuuucacugggccagagaaagaaucccugaggguuggacaaggggagcagc

SEQ ID NO: 4162735 - RNA, 72 nt, Human
gcugugugagaaugugugacucuauugagcaagucagauuugcuuuuaacauaauauggauuuucaugcagu

SEQ ID NO: 4162736 - RNA, 76 nt, Human
gcuguguuaaccaccaccguaauuuacccauuagcaucaggaauaauaaugaguuugucugagugguaacaacagc

SEQ ID NO: 4162737 - RNA, 83 nt, Human
gcuguguugcacagcuccaugggacuccauucacaucgaaaguguaugcaguguguggcccuuggaguugugaccuguacagc

SEQ ID NO: 4162738 - RNA, 58 nt, Human
gcuguguuugacaguagcagaccccuagguuggcaaguauagcuaagguaagcgcagc

SEQ ID NO: 4162739 - RNA, 104 nt, Human
gcuguguuuuaugcacuugguugcugugaguuuggcccugagaggugacucuacucuuaguguguaaagccaaauuugugagcccccaaggugagaagcagagc

SEQ ID NO: 4162740 - RNA, 130 nt, Human
gcuguuaaggaagauuuaaugagauaaaugugcauggaguccuuaauacacugguggacgcagagaaaucugauauuuaccuguuauuacaguguuuguuguaacucuggauugucuuuaaauuaugugc

SEQ ID NO: 4162741 - RNA, 81 nt, Human
gcuguuacagucucaaguugcucugccucuguaggaaaacagugguaucugagagguaagagucaaaaagauaaaaauagc

SEQ ID NO: 4162742 - RNA, 85 nt, Human
gcuguuacuaguuauauacuuguguauauguuugacaaacugacugugagcuuuuaauauacagguguuuuauaguaaucuaagc

SEQ ID NO: 4162743 - RNA, 64 nt, Human
gcuguuaggugcccugaccuuguccacauaaagaugugauuuaugaagugcagggcacagcagc

SEQ ID NO: 4162744 - RNA, 81 nt, Human
gcuguuauuuaugcugcuccauucuugucacuuuuuaauuugacacugaacuuugagugggcgcugcaaaauucugacagc

SEQ ID NO: 4162745 - RNA, 57 nt, Human
gcuguuauuuuacaagacuuaugcuguaagaagaauuuguuuuaguaaaauaagagu

SEQ ID NO: 4162746 - RNA, 62 nt, Human
gcuguucacauuuugggccaaauaauucucuguuguagggggcuguccugugcauuaacagc

SEQ ID NO: 4162747 - RNA, 92 nt, Human
gcuguucauuauaauauucauaaguuuucuggugauauuugacaucuuagcagugugcagagcccacaggcagcugaaauauaaugaauugc

SEQ ID NO: 4162748 - RNA, 58 nt, Human
gcuguucuuugcaucucuggugccuagcacagugcccagcauggagugaggacucagu

SEQ ID NO: 4162749 - RNA, 68 nt, Human
gcuguugaugggucucagguuuuugucauguggaucucuccacagagcaacuugaguauccucauggc

SEQ ID NO: 4162750 - RNA, 60 nt, Human
gcuguugcagaugagacuggauuuggugcccauguugaagaugaagauaucugcaggggc

SEQ ID NO: 4162751 - RNA, 75 nt, Human
gcuguugcagauugacuguagcuaauguacuugccuaaaugaagaaguauacauuuauuacaggucuucaaccgc

SEQ ID NO: 4162752 - RNA, 63 nt, Human
gcuguugcugggagcagggauccuguuuggaauuacaggauucguucuacucuaagcauaggc

SEQ ID NO: 4162753 - RNA, 62 nt, Human
gcuguuucaguuccucuucuaugugcucugugggaucugaacaggggagaacuagagacagc

SEQ ID NO: 4162754 - RNA, 58 nt, Human
gcuguuucuuuccuggcacuugaacccaugucauucuggguaguuaguaaagaaaagc

SEQ ID NO: 4162755 - RNA, 79 nt, Human
gcuguuuucauggcaggagucagaagcuaaaggggaacaacaagggcuucugcaaguuucugcuuggcauuaggacagu

SEQ ID NO: 4162756 - RNA, 80 nt, Human
gcuuaaaacuuacauuuucaaguuauuauacugacuuccagauuucagaguaguucuuugcagaguggaaauguuuaagu

SEQ ID NO: 4162757 - RNA, 68 nt, Human
gcuuaaaagccacuuagucuauaguacuuuguuauaguacccucaaaggacuacaguagcuucaaagc

SEQ ID NO: 4162758 - RNA, 70 nt, Human
gcuuaaacugccacaagagggacaucauuuaauauaccagagaacuuccuaacagugagcagugaggggc

SEQ ID NO: 4162759 - RNA, 74 nt, Human
gcuuaaaggagacauaucuacagacaggguuugagccuaguaauggugagaacuuucuuggaugucucaacagc

SEQ ID NO: 4162760 - RNA, 94 nt, Human
gcuuaacccuugcuccucccugugcagacccagcuagacagaagaauccagagcugggagggcugggagcugguggagggagagcagggcaagc

SEQ ID NO: 4162761 - RNA, 70 nt, Human
gcuuaacuuaggaacgcucugccuagugaggggucugugcuaagcagaguguuccuaaauguaacugagc

SEQ ID NO: 4162762 - RNA, 85 nt, Human
gcuuaagcagaagaacucuggauuucuugggccucaggcauauuacaaagcuugagguuaggaaccaguguuugacuguaaaugc

SEQ ID NO: 4162763 - RNA, 63 nt, Human
gcuuaagggaauguuguggcugguuugaucuguucagaccaccaaaacuuucuccauaucagc

SEQ ID NO: 4162764 - RNA, 95 nt, Human
gcuuaaguacauuuaucauugccaaaauccuaauuaugaacacuuuauaguugaugauucaagaaaauaggauggccauggaugaacuuucaggc

SEQ ID NO: 4162765 - RNA, 75 nt, Human
gcuuaaguguuuguacauugugaugguuaauuuaugugucaauuuaacuggcuuauggagugccagacauuuggc

SEQ ID NO: 4162766 - RNA, 86 nt, Human
gcuuaaucuuuccuugccaucccuuaccucagucaacacaaguuguugaaaaaugacugaugaaaaagcaaggcugagaaugaagc

SEQ ID NO: 4162767 - RNA, 121 nt, Human
gcuuaauugcuguggcaccaaagcgugggcggcauucucucucuaaauguugucuggguacauugcaauacgcuuaggagaggcaugaguauugucccuguugaguaucauuugcuuaggc

SEQ ID NO: 4162768 - RNA, 69 nt, Human
gcuuacaaggcaucaugauguaguggaaaucuaggcuuuggagccacucacuaucugaguccuuuaagc

SEQ ID NO: 4162769 - RNA, 61 nt, Human
gcuuacacagcuucuauccuugaagaaccuuggugccuacaauagcugagagcugguaggc

SEQ ID NO: 4162770 - RNA, 62 nt, Human
gcuuacaugcauaugucaaaaaagcuacauauauguguuugugugucuaugugcaugugugu

SEQ ID NO: 4162771 - RNA, 80 nt, Human
gcuuacccagccguccugcgggcugguaagaggcuuccuacuuuaggaggcagcuggcagcacccaggggcugggagagc

SEQ ID NO: 4162772 - RNA, 62 nt, Human
gcuuacccaggaggaugguuguuagguggaaauuuaaauucauaggaaccaacuuuuggugc

SEQ ID NO: 4162773 - RNA, 68 nt, Human
gcuuaccucucuugaaggcccaccgcuucagccacagcuuggagaaggccggccaggagugguugagc

SEQ ID NO: 4162774 - RNA, 62 nt, Human
gcuuacuguuccuguuggugcugaaagaaugcucguaauuguuaccaaacaguggacggagc

SEQ ID NO: 4162775 - RNA, 123 nt, Human
gcuuagaaucaugaauuagcuccuucuuuggcuuugccacacccaaugacagccacacaccucuccccagcuuauuugagguggaacagaaccaaagaaagagccaguuccaugauccuaagc

SEQ ID NO: 4162776 - RNA, 64 nt, Human
gcuuagagaggggcugggcagucccuggaugaaaacacauuugcaugagcagccccuccucugc

SEQ ID NO: 4162777 - RNA, 76 nt, Human
gcuuagcaagcuguauuccaagucacuguguccuggcuaagccgccaagggcauugcuugggaccuugcuauaggc

SEQ ID NO: 4162778 - RNA, 60 nt, Human
gcuuagcacagaaugagaguucuaacuuacuguuguugcuauuauggcuguugcuguugc

SEQ ID NO: 4162779 - RNA, 89 nt, Human
gcuuagccagcuauccuaugacaguuuuacaaguauagaacucuugaauaugcugaaguugaauauucugggaaaggaagggcgaaggu

SEQ ID NO: 4162780 - RNA, 84 nt, Human
gcuuagcuggcaguuugcucacgacugcauucaaaggaguaucuuaccuauugcagaguaaaagcagaugcuacugauaaaagc

SEQ ID NO: 4162781 - RNA, 57 nt, Human
gcuuaggaaggaagagccucagauugaagugcagaucugagaaauccuuggccaggc

SEQ ID NO: 4162782 - RNA, 78 nt, Human
gcuuagggacucuugguacaugcagauauuuaguuaugguuauaaugacaaaaaguaaaugugccaggagucugaagc

SEQ ID NO: 4162783 - RNA, 79 nt, Human
gcuuaggguuuuuguucauuaguacaguuguaaaacuuucauuugcuacgugaacucagaacaguucuaaauuucaagc

SEQ ID NO: 4162784 - RNA, 101 nt, Human
gcuuagucacaaacuaauaugcaagugaauuucauuccaauucuuugcuuucaacagaauugaaggaggauccaaaugaauuguuagccgugugacuuugu

SEQ ID NO: 4162785 - RNA, 69 nt, Human
gcuuagucucauaugaagacucauuuauuggguaauuguuacccgacaaucugucuuuauuuagaaagc

SEQ ID NO: 4162786 - RNA, 90 nt, Human
gcuuagugcuaaacaucuguugcuuccuaacaagugcugcauucauuuuaauggcacuggugcacagagguaaacggagcuuuggcaggc

SEQ ID NO: 4162787 - RNA, 70 nt, Human
gcuuaguggcuugcugaggggcuugcuagcugagaggcuuuuugagggccugauuagcaggcuagcuggc

SEQ ID NO: 4162788 - RNA, 71 nt, Human
gcuuaguggggaauuaaaaauauauguagguuagcaauuuaacauacauaugaguucguucuaugcuaagu

SEQ ID NO: 4162789 - RNA, 67 nt, Human
gcucagcugggugauucuucuuuuccucaugguauaaacagaggucacuugguguuauucagcuagc

SEQ ID NO: 4162790 - RNA, 70 nt, Human
gcucagcuucucgggagcgcaugugcucaccccaucugugaaaaaugcgugcgccuugaagaggcguggc

SEQ ID NO: 4162791 - RNA, 57 nt, Human
gcucagcuugggagcgcccgguucuuuuuacuacucugucugccucccuuucugagu

SEQ ID NO: 4162792 - RNA, 62 nt, Human
gcucaggacacagcagacagcaugaucuugaaguucaugccagcuuugcuugucccgugagu

SEQ ID NO: 4162793 - RNA, 60 nt, Human
gcucaggagcugacagccucaagucuagaaccucacuuaugggggccgucugcuucuggc

SEQ ID NO: 4162794 - RNA, 84 nt, Human
gcucaggagggagaacugaaugggggcaacugugcugagaggggaaaugaucuucucuuuggcuuugacucccauuccuugagc

SEQ ID NO: 4162795 - RNA, 67 nt, Human
gcucaggcaccauaugauguguuuccagacuuccauaccuggugcagugcacacguugugcuugagc

SEQ ID NO: 4162796 - RNA, 60 nt, Human
gcucaggccuccagaggggcaaagccacaagcucuccugcuucaacccucuuugccuagc

SEQ ID NO: 4162797 - RNA, 59 nt, Human
gcucaggccuggcccaugggacaucaucuguguguuguaugagucagugucugacccgc

SEQ ID NO: 4162798 - RNA, 68 nt, Human
gcucaggggcaguuuccuaugaucuuuaggccucaaaaugucucuuggacucaaaauugccuuagggc

SEQ ID NO: 4162799 - RNA, 85 nt, Human
gcucagggugaauucagagagcaggcucugaaugggcccaguacucccauucauguggggagccuucuguuuggcagcccugagu

SEQ ID NO: 4162800 - RNA, 72 nt, Human
gcucagugcuagaaguagauugccuggcuucaagcucugcauuugucacuuacuaccugucuggccuugggc

SEQ ID NO: 4162801 - RNA, 65 nt, Human
gcucaguggcuguucauuuuacacaauauaaguauugauguuccuaagugcacagccuauauagc

SEQ ID NO: 4162802 - RNA, 57 nt, Human
gcucaguggguggcugaaggggucuggggucagcuccgcuccaccccacccacuggc

SEQ ID NO: 4162803 - RNA, 93 nt, Human
gcucagugguuaaguucuguccacacccccuccuugcagucuccauucaagcuauucugagacggcagggcuguugaccaaggaccacaaagc

SEQ ID NO: 4162804 - RNA, 80 nt, Human
gcucaguguguuguugauugaauuuacuuuucauucuaaugaacuugagaacauuaauaguuaauuuugccaugcugagu

SEQ ID NO: 4162805 - RNA, 58 nt, Human
gcucauaaauguugacuaccagaccagcugguguuuggcaguuuucuuuugugccagc

SEQ ID NO: 4162806 - RNA, 72 nt, Human
gcucauagggaccuggaaucuggaguuggaaucccugacugggcuuuccaaccugugauuccaauugugagc

SEQ ID NO: 4162807 - RNA, 60 nt, Human
gcucauauucacccgacuuugagucaggggccugaucucagagcaagaugauguaugagc

SEQ ID NO: 4162808 - RNA, 71 nt, Human
gcucauauuccuggcuaguuuugcugaaauaauugcuuugaauuacuuccucaggacugcccaggugacgc

SEQ ID NO: 4162809 - RNA, 60 nt, Human
gcucauccacgugcuuuucuaguugggacuuuuucuuggcuuaaauuguuuguggauagu

SEQ ID NO: 4162810 - RNA, 57 nt, Human
gcucauccagcaagccagggccugucccaaaggccaaggcucuggaaucuggugggc

SEQ ID NO: 4162811 - RNA, 59 nt, Human
gcucaugcugcuguauacugugaaugccucugauacacagugaaacacgcaguaagagu

SEQ ID NO: 4162812 - RNA, 61 nt, Human
gcucauggccaaagucaggagugugcaucuucugagcgcagugggaagguuggcacauggu

SEQ ID NO: 4162813 - RNA, 70 nt, Human
gcucaugugucuugcugcccuccaugugaccccgaguggguccgagugugggcugcagaggcacagcugu

SEQ ID NO: 4162814 - RNA, 107 nt, Human
gcucauuucggucauguugcggugcuuugcuggaaucgaggaaugugcuuaauucgaaggugucuuugucgguuacagcaacgcugcugcugaaugcccugagaagc

SEQ ID NO: 4162815 - RNA, 81 nt, Human
gcuccaaagagaacagaguuguguuuguacaacgcugcacaugcuaguguuggaaggcaagcagcaauuuucucugaaagc

SEQ ID NO: 4162816 - RNA, 65 nt, Human
gcuccaaaucauacagaaccugagcacuucuagacaacuaucugggcaggaaauuguaugagagc

SEQ ID NO: 4162817 - RNA, 73 nt, Human
gcuccaaggcuuccagugaugccucuuugccuagcaaagguuaggacccacagcaguggccaagcccuggagc

SEQ ID NO: 4162818 - RNA, 64 nt, Human
gcuccacuuuggcaagcgaguacuuucugaagaccaacuucaagaaauggugucacgugagagc

SEQ ID NO: 4162819 - RNA, 62 nt, Human
gcuccagagguuacacccucagccccaaauucaaggggaaaagagugugaaucucucccagc

SEQ ID NO: 4162820 - RNA, 55 nt, Human
gcuccagcaccuagagcagguccaggacccauaaauguuuuuaggaugucugagu

SEQ ID NO: 4162821 - RNA, 55 nt, Human
gcuccaggagagggaagcagauuggcacagucaguuuugguccuggcuuaggagc

SEQ ID NO: 4162822 - RNA, 67 nt, Human
gcuccaggagcaaagaucacugggagaggaaaauuccccaucccuggagguguuugcucagggccgc

SEQ ID NO: 4162823 - RNA, 62 nt, Human
gcuccaggaggaugaccuuccucccauuucuuuaauuaaagggggaccaauccucuucgggc

SEQ ID NO: 4162824 - RNA, 62 nt, Human
gcuccaggcaaggauaauaaacaugccacaucuguaucuguggauguuccuucagccugggc

SEQ ID NO: 4162825 - RNA, 70 nt, Human
gcuccaggcagagccucuuucgugugggugggaaaauagggaaaauuucaaggaggagaugcucuggagc

SEQ ID NO: 4162826 - RNA, 62 nt, Human
gcuccaggcagcucaaccuugggagcuucggggccccgagagguggagccugugaguggggc

SEQ ID NO: 4162827 - RNA, 63 nt, Human
gcuccaggcgccgcuuuugcagucccccauuggccgguuuauugccagacggccccugcucgc

SEQ ID NO: 4162828 - RNA, 77 nt, Human
gcuccagggcccucucuccaauuuucaccucauucugggccugagacugagaugagacuggggagaggucugguagc

SEQ ID NO: 4162829 - RNA, 60 nt, Human
gcuccaggggagacuagacccacaccuacucaugagcugggguguagcucuucuggaugc

SEQ ID NO: 4162830 - RNA, 107 nt, Human
gcuccagggugucccuguuccccacagcauucagacugacucaggcucaguauggaaaugcuucaugcuugcccauguuucugaaguaauaguacuuccacuugagc

SEQ ID NO: 4162831 - RNA, 63 nt, Human
gcuccagguauuugcccuuuuagaugaucugaucacucccuguuugaauggcacauuuggggc

SEQ ID NO: 4162832 - RNA, 110 nt, Human
gcuccaguuucauugaucaaggcugccagcaaaguucaucuuaccuagauuuuauccaagugacuaagagaggggcagauggaccuggcacagugucauuugucuggggc

SEQ ID NO: 4162833 - RNA, 69 nt, Human
gcuccaugguuuggccucugaguaccuucucuuuacuuuuucucaggacagauuuuuggccaccagggc

SEQ ID NO: 4162834 - RNA, 78 nt, Human
gcuccauuuuuugacaucauuuucuucaguguuugcucugcucugagcucagggaaacuaauuauguccagguggggu

SEQ ID NO: 4162835 - RNA, 71 nt, Human
gcucccacagguauucuggccaugcgggcuuggcacuaauucaggagucuguggcugaguccuguuggagu

SEQ ID NO: 4162836 - RNA, 86 nt, Human
gcucccacccgugccucaguguccuccucugagggauggaugugucucugcaaguagaugacagugagguuaccauggggaggggc

SEQ ID NO: 4162837 - RNA, 75 nt, Human
gcucccacggggagggucaggccacauucuucucuggcuggagccugagggguggcuggcaccuccugguggagu

SEQ ID NO: 4162838 - RNA, 57 nt, Human
gcucccagaaaccugccuugcuggacuguccacuuggagcaagaagguugugggagc

SEQ ID NO: 4162839 - RNA, 102 nt, Human
gcucccagggccccagacauugcagggacuggugauugaggaguuucaccuuagaccaggaagcaucccuuuguaagugacuuucuggaagcuacugaaagc

SEQ ID NO: 4162840 - RNA, 91 nt, Human
gcucccagucggcaucguuaaucagcaccagaauuccuggccgccugugggaaagaugguggugaguagcaaggagugagaggcaggaggc

SEQ ID NO: 4162841 - RNA, 70 nt, Human
gcucccauggcuggcaggcacaguaugcaagggaaaccuuuguugcugcuccaaccaguguucauucagc

SEQ ID NO: 4162842 - RNA, 71 nt, Human
gcuccccaacucccagcucagggcuuucccugguggacaguggaagccuaagaguagggagccuggcaggc

SEQ ID NO: 4162843 - RNA, 56 nt, Human
gcuccccaaggcggcagucacaguggugacgcuggcugccaugacgccuggggagc

SEQ ID NO: 4162844 - RNA, 127 nt, Human
gcuccccgaccccgcuagucaucugccuuguugucagugguguccuuugugucccgccuuggcacaggcucaggaccugggauugccagaugcugagaggagaugagauggaaaggaugagggaagc

SEQ ID NO: 4162845 - RNA, 124 nt, Human
gcucccuccccaaggcaggugaucuaauuggucugggugugaccuggacaucaggaccuucaaauuuucccagugauuuccacgugcacccagguugagaacgcugcggcccauaaaagggagc

SEQ ID NO: 4162846 - RNA, 61 nt, Human
gcucccucccugcacccccagcugugauuuucauccugagguguguccccagggagguggc

SEQ ID NO: 4162847 - RNA, 87 nt, Human
gcuugcuuaaaauuugcauucccaaaagacacuuacccaaucaggaccuuggagagugaggccugggaaucuaauuuugaagcaggu

SEQ ID NO: 4162848 - RNA, 56 nt, Human
gcuugcuuaugaauaucuuaugucucagcugauucaaagaaguugguaagcagugc

SEQ ID NO: 4162849 - RNA, 60 nt, Human
gcuuggaaauaauucugugucugaacauuucucaaugucuagacaagaaguauugccugc

SEQ ID NO: 4162850 - RNA, 64 nt, Human
gcuuggaggcagagucuugcugaggugcccgugggucugccucagcaauuaccugugucucugc

SEQ ID NO: 4162851 - RNA, 70 nt, Human
gcuuggcacucucugggugaggcuuugugucccuugauccuuuagaccgcacucaggguaugugccaggc

SEQ ID NO: 4162852 - RNA, 84 nt, Human
gcuuggcgagcccugaagaaaggugugggauacuccaggcaaccucguggaguacucuacuccuuccuucuggaagcuggaagu

SEQ ID NO: 4162853 - RNA, 68 nt, Human
gcuugggaggggagcgacauuccgugccgggcuccacgcucggcuacgcugagcuucccagaccgagc

SEQ ID NO: 4162854 - RNA, 66 nt, Human
gcuugggagucugggccugauggcuaaagccccuucuaaucuaggguagccuagagcccuuccagc

SEQ ID NO: 4162855 - RNA, 56 nt, Human
gcuugggcugaaggccugggucucuguguugcuggcacaggcuuacagcagcaggc

SEQ ID NO: 4162856 - RNA, 64 nt, Human
gcuuggggagcucaguguccuugcagaauugggacuggcugcuuuggaccugggccccccaagc

SEQ ID NO: 4162857 - RNA, 81 nt, Human
gcuuggggugguggaggagaggcgccuugcggaaagcccucuucaggcacucgaaggccucuugcuccucgacuccccagu

SEQ ID NO: 4162858 - RNA, 73 nt, Human
gcuugggguugugugcgucgaacuuugaggcuggauucccugcacuugggcagagacgcacagacgcccgagc

SEQ ID NO: 4162859 - RNA, 94 nt, Human
gcuugggugugggauuggaagggaugccagcugcuuuggggggagcgggugcuugcuucuagcagagggcaucugcuguuguugccacuguugc

SEQ ID NO: 4162860 - RNA, 69 nt, Human
gcuugguagauuugagcgugaguagcugacaaauguuaucaauuuuaugcagucgacaucugaucaggu

SEQ ID NO: 4162861 - RNA, 78 nt, Human
gcuuggucacuguuauuuugaaagguuucucaggucgguucccuagggcaagcugaugugauagugaaaaacccaggc

SEQ ID NO: 4162862 - RNA, 99 nt, Human
gcuugguucuguuuauugucgcaucagcccuucagaaugcugucagcaagacugcucacauuuaaagguugaagcugaaguacucauuuuacccauagc

SEQ ID NO: 4162863 - RNA, 72 nt, Human
gcuugguuuccagcugccuccuaucauuuccuugcuugcugucccaaguugagaugucauaggagaccaagc

SEQ ID NO: 4162864 - RNA, 69 nt, Human
gcuuguaggaagacucaucuuggagaaaaugugaaguaaucaaauugcuugagauuagucuccuauugu

SEQ ID NO: 4162865 - RNA, 88 nt, Human
gcuuguaguguuuuauuucagcacuuugaauaugucaucccacuccuuucugacuugcaggguuucuguugagaaguccacuguuagc

SEQ ID NO: 4162866 - RNA, 82 nt, Human
gcugagaagacugcauagucauuucuaucagaugcugccaaauagcaaauacaaugaguggagacuguguguagaguucagc

SEQ ID NO: 4162867 - RNA, 76 nt, Human
gcugagaccagaacccagagggagcacagagccugcuaacaggcaccugaugacugcuucccugggcauucccagc

SEQ ID NO: 4162868 - RNA, 76 nt, Human
gcugagagauucaaacaggccaauugaccugguaccaagugaaaaggcaauuagucuuuuguuauuccaucuuggc

SEQ ID NO: 4162869 - RNA, 82 nt, Human
gcugagaucugcaacuugccucuagccauuacaauauugcaaagguaaagugauuuuggcagagguaauucaaaucccaagc

SEQ ID NO: 4162870 - RNA, 107 nt, Human
gcugagaucuuuccuccaggcaacuccuccuugguuuagccucugauacagccaaaccucuggauucagggaaaccuaaggaagccaggcaagaagggucccgcagc

SEQ ID NO: 4162871 - RNA, 71 nt, Human
gcugagcaaaauaccacgacuuguuuuagccggacaggcauuaaaauauccaguguuauuuugaccucagc

SEQ ID NO: 4162872 - RNA, 56 nt, Human
gcugagcagguuugaugcuuuuaugaagcaagauagaagcaaaaauaugggccagc

SEQ ID NO: 4162873 - RNA, 81 nt, Human
gcugagcccagagcccuuguagggaagaaacuucguuuuauuuauguaacauaucuacccuucaagcucucuggguuuugu

SEQ ID NO: 4162874 - RNA, 71 nt, Human
gcugagccccccugcgugggucccacggcauggaaacacugccuaacgcucccgcaggcugggggcccagc

SEQ ID NO: 4162875 - RNA, 68 nt, Human
gcugagccccuggccgggcuggcauauggaacugauuuagugcccugcuggggcaggagaaggcgggc

SEQ ID NO: 4162876 - RNA, 76 nt, Human
gcugagcugaggcagggcuggggauggugaguaggggccucagcugacccuccggcccccagcccuccagcucagc

SEQ ID NO: 4162877 - RNA, 65 nt, Human
gcugagcugcugcaucgcuucuccccucucuuucccuuuccuaggggagcugacagcagcacggc

SEQ ID NO: 4162878 - RNA, 75 nt, Human
gcugagcugugacucaggcuagacaaagccccaguuaaccuagcagggagcuggcuggcgugaguucugcccagc

SEQ ID NO: 4162879 - RNA, 80 nt, Human
gcugagcuuuaguguccagaguuuuuauuaggguuucaugauguacugauuaaagcacuggccagaugauuaaacucagc

SEQ ID NO: 4162880 - RNA, 58 nt, Human
gcugaggaggugugguuagguggcagucaaaggccaccuauccugcuacccucccagc

SEQ ID NO: 4162881 - RNA, 63 nt, Human
gcugaggcaggaggaucauggaugcaguaagccaugacugcaccacugcacuccagccugggu

SEQ ID NO: 4162882 - RNA, 68 nt, Human
gcugaggcaugaugauugcuugagaccaggagaucugggcugcaguaacgaucauggugccuguaagu

SEQ ID NO: 4162883 - RNA, 55 nt, Human
gcugaggccccagggugaugggagagcucagacuuccuucagcuggcaccucugc

SEQ ID NO: 4162884 - RNA, 55 nt, Human
gcugaggccucagaaggcugaggaucacuugagccuaggacuuugaggcuguagu

SEQ ID NO: 4162885 - RNA, 56 nt, Human
gcugaggcugggagcagccuguauuuacuaguaacauuguuuccuaaagccccagc

SEQ ID NO: 4162886 - RNA, 64 nt, Human
gcugaggcuggggaggcagaggcugcagugagccaagauuguggcacugcccuccagccugagc

SEQ ID NO: 4162887 - RNA, 59 nt, Human
gcugagggagaauugcagccagcguucuguuaauacaauggugguguucuauccugagc

SEQ ID NO: 4162888 - RNA, 60 nt, Human
gcugagggauucugccugcucaggagacucucccuggugacuccugaagauuuccucagc

SEQ ID NO: 4162889 - RNA, 68 nt, Human
gcugaggguguccacauggguugucauuuaacuuuaaucuaccagcauccauggagagcacucugagu

SEQ ID NO: 4162890 - RNA, 61 nt, Human
gcugaggucaauuugccuccccagaguguguuagucugcaggcauuuuugguugucacagc

SEQ ID NO: 4162891 - RNA, 63 nt, Human
gcugaggugcacugaggugggaacuagccccauagcugccacuuucacccagugcucccaagc

SEQ ID NO: 4162892 - RNA, 55 nt, Human
gcugagguggugaugguucaucuuuaucugccuguguuucucugcucaucucagc

SEQ ID NO: 4162893 - RNA, 109 nt, Human
gcugaguaguuaaagaagacauuugguuuuugguguucacagaggccauuucauugugccuaugagaaauaaaaucaguuguuggaaaguuuuacacaaaccacucagu

SEQ ID NO: 4162894 - RNA, 60 nt, Human
gcugagugaaaucuuugggcuuuguuaaaaaugacagaacuuggaacuuuucacacaggc

SEQ ID NO: 4162895 - RNA, 55 nt, Human
gcugagugaggcugucaaaauguuuuacuucuccauuagcauagccugucuuagc

SEQ ID NO: 4162896 - RNA, 65 nt, Human
gcugaguggagcagucagcgcuggagagagcagagagaguagggcuggcuucuauagccaccagc

SEQ ID NO: 4162897 - RNA, 97 nt, Human
gcugaguguuuguguuuaugcaaaggggccucuuccugcauauuuaaucuagaguaaggcaguggcuuuuguuguguuuagcccacauaccuucagu

SEQ ID NO: 4162898 - RNA, 74 nt, Human
gcugaguuuauuuugaaagucuguuuugaauuugcagcacugccucuuuaggaggguauuuuaagaugcucugc

SEQ ID NO: 4162899 - RNA, 82 nt, Human
gcugaguuucuugcgaggaucauuguguccagaugcucaacgucucuuaacgucaaacauucacaacugauccuugcucagc

SEQ ID NO: 4162900 - RNA, 57 nt, Human
gcugauaaauaguugauguaccugucacucaugucgcuacaugaacuguuucucggu

SEQ ID NO: 4162901 - RNA, 74 nt, Human
gcugauaugccagggacauuuccaagagaauuccuuuuuugagagaaaucuccuuugauaucccaucagucagc

SEQ ID NO: 4162902 - RNA, 120 nt, Human
gcugauauugugguaauagugguuauuguuauuguuagaagcagucacauuauuauuguuagugacaauauuauuugacaguaauaaagcacaaguuaauuaguugccaugacauucagc

SEQ ID NO: 4162903 - RNA, 92 nt, Human
gcugaucaguucaguagcagcugccuaaagugcuaagaaagauaaugcauccacaucuggacucuagggggacugugcucugauagauuagu

SEQ ID NO: 4162904 - RNA, 71 nt, Human
gcugaucugggugugguaucuuagccauguguaguuaucucuaucuggcagaugccucauuuccaguuggu

SEQ ID NO: 4162905 - RNA, 60 nt, Human
gcugaugaugcuuuucugagggcuuggcaugucccaucuucaguucacauguaucauggc

SEQ ID NO: 4162906 - RNA, 95 nt, Human
gcugauggaccacgcgcggugugcacugucccccauuuuaagaaagagggaacugggcuucagaggggacagccaccugcccgaggucacccagc

SEQ ID NO: 4162907 - RNA, 62 nt, Human
gcugauggauguuugaaguugcaugugauaugugucauguuuuauaauaaacaucaaguagc

SEQ ID NO: 4162908 - RNA, 61 nt, Human
gcugauggucuagggacucugguguaggaguaacugaacuuagaaagucaaagcuaucagc

SEQ ID NO: 4162909 - RNA, 63 nt, Human
gcugauguaagacuuuugguuuucaauugaauuuaggaaacuuggggcuuucuuacauuuugu

SEQ ID NO: 4162910 - RNA, 99 nt, Human
gcugauguccuuaguucuguagauuaucaaggugccaauuuucagugaacagagcccucuucugaaaggcagguuguuugcaagcuuggucucaucugc

SEQ ID NO: 4162911 - RNA, 73 nt, Human
gcugaugucucagaguggucacugggaagacggaugacgguccugcccgauguccauuguggggccggauagc

SEQ ID NO: 4162912 - RNA, 59 nt, Human
gcugaugugaagcuugugcuaacauaugaaaaguauuuagaaagagcuuggcauguagu

SEQ ID NO: 4162913 - RNA, 58 nt, Human
gcugauucugaugcuucacaaagguaaugauuuauucauucucugccucagaaugagu

SEQ ID NO: 4162914 - RNA, 122 nt, Human
gcugauuucauuugaguuuauaguugcugcucauuauguucagcaucugcuuuauuaaaugaaucaauaaaucaguuaugaccauagagcaugagcuagcaaaagagcaaaaauucuaaagc

SEQ ID NO: 4162915 - RNA, 71 nt, Human
gcugauuugacaggaggcagagcucaggugguaaugcucacuugcccuccgcucaccuccugcucugcagc

SEQ ID NO: 4162916 - RNA, 58 nt, Human
gcugauuuuaauuauaggagguccuuguuauccaaagacaauuuauguuagggucagc

SEQ ID NO: 4162917 - RNA, 108 nt, Human
gcugcaaaaauugaugaaaguaaagaacuuagcagagauaugggcauagaucgugucaaaaacauccccaauaauuuuguuuucuuugcauuaaaaagaacaugcagc

SEQ ID NO: 4162918 - RNA, 84 nt, Human
gcugcaagaugaaguuucagccuuuauuacaugauuugauuucauugagauccauggagauaaacugaaauauuuagugacagu

SEQ ID NO: 4162919 - RNA, 81 nt, Human
gcugcaaggaggcacuuugucuuuccucuuggcugaggcuguuuucugcccagggacaggacacagguugucucaaaaagc

SEQ ID NO: 4162920 - RNA, 63 nt, Human
gcugcaagugcauguugcaacuucgcgugauguucccagggcgguucugcggcaacuugcggc

SEQ ID NO: 4162921 - RNA, 76 nt, Human
gcugcaccgucauugaucaugcagaugcuucacuuuuccacuaagaugaggucuacauuguuaaaaauaguucagu

SEQ ID NO: 4162922 - RNA, 60 nt, Human
gcugcagacuucucaucucauuaguucuuuuagaauacugugggugaagacagcuguagc

SEQ ID NO: 4162923 - RNA, 87 nt, Human
gcugcagagaagccuccacucuggggugggugagaugguggaagcgccuccacccgcuuccagcgguuuggaaguaugucuagcggc

SEQ ID NO: 4162924 - RNA, 74 nt, Human
gcugcagagcucauguuuauaaccauuaggcaaacuguuagccuguuguggaaaaagccugauugucaugcagc

SEQ ID NO: 4162925 - RNA, 56 nt, Human
gcugcagagggucuuagagaggauuuaacccagccucccugagaccagagagcagc

SEQ ID NO: 4162926 - RNA, 57 nt, Human
gcugcagcuguaggacacaauuaauuaugcuaauaguuugugaggagcggauguagc

SEQ ID NO: 4162927 - RNA, 111 nt, Human
gcugcagcuuugaaucugguguuugcgggcuggaaacucagguaggguugcaguucugaagcagcuuugaaucugguguuugcaggcuggaaacucagacaggguugcagu

SEQ ID NO: 4162928 - RNA, 64 nt, Human
gcugcaggagugcgggugggugcucgccccagaaucgguuugcauugucuccccacuucugggc

SEQ ID NO: 4162929 - RNA, 55 nt, Human
gcugcagggacagggcagggccuuuggauccaauuagaggugcccacacccuggc

SEQ ID NO: 4162930 - RNA, 57 nt, Human
gcugcaguagcugaauggcauuucuccaaaggaaaaaaaaccauguaggcacucagu

SEQ ID NO: 4162931 - RNA, 55 nt, Human
gcugcagucacugaggcagagggugcccauguccugucucucagugacugauagc

SEQ ID NO: 4162932 - RNA, 101 nt, Human
gcugcaguccgugggccacacauugagcagcuguuuguaacuaaggugacuuuuaaaaugguuuauaacaaacagcguuucagaugugguuaggaugcugc

SEQ ID NO: 4162933 - RNA, 63 nt, Human
gcugcaucugucagccugggauuaggggccagugguccacgcucauccucucugagaggcagc

SEQ ID NO: 4162934 - RNA, 55 nt, Human
ggaaguugcuguuccaaggguauaauguuucaguuauacaagaugaguaauuucu

SEQ ID NO: 4162935 - RNA, 68 nt, Human
ggaauaaaagaauggugugugaaguuuagugccaauacagucuaauaugcaugcuauguuuuuauuuc

SEQ ID NO: 4162936 - RNA, 82 nt, Human
ggaauaaaauuggcgcucagcugcauuguguaugauauuucgaaacauuaaacuugcuuggcuguaaucccaaauuaauucu

SEQ ID NO: 4162937 - RNA, 61 nt, Human
ggaauaaacauaaaagaacagcagagacacauucuugcuaguucuuaacuguuaugauucc

SEQ ID NO: 4162938 - RNA, 67 nt, Human
ggaauaaguagaguucuggauuauaguguggugaacauauagcaaggucuggauuucugcuucuuuc

SEQ ID NO: 4162939 - RNA, 82 nt, Human
ggaauaagugagaaaacgcgugcagugcuuagcacagugccugccacacaguaagcauuucacgcacacucauuacuauucc

SEQ ID NO: 4162940 - RNA, 60 nt, Human
ggaauacacacugcagcauggggaaaaugaagaaaccucacaucugccguaguguauucu

SEQ ID NO: 4162941 - RNA, 66 nt, Human
ggaauacacagcaaggucugacuuugggauauggaguguaaacuaggugacuaugcugauggcucu

SEQ ID NO: 4162942 - RNA, 57 nt, Human
ggaauauagccaguaacagucaugcaauuauuugcuuucuguuucuugcuguauuuc

SEQ ID NO: 4162943 - RNA, 129 nt, Human
ggacagggccggccucugcugccucacacccaccugucuggccaccagggcgauaguccccccuuuggccuaggcugacgauuguccuggaggaccacaggcuggggcagccaagcacaggcccgacuc

SEQ ID NO: 4162944 - RNA, 72 nt, Human
ggacaggggaagaugccaagggagauagcaaguuugggcaaaguccuccagggggaucuucagccugauucc

SEQ ID NO: 4162945 - RNA, 69 nt, Human
ggacaguauucauggcagugguaacguuucuaguuugggaacccacucacugcaugaagaacaugggcc

SEQ ID NO: 4162946 - RNA, 61 nt, Human
ggacagucagagccuuggccgcuuuccagcugaaggccuuggccaguggccuugacuuucc

SEQ ID NO: 4162947 - RNA, 68 nt, Human
ggacagugaauguggggaugcauuuuaaaaucaguccaaauguuuuuuuccuccccucacccauugcc

SEQ ID NO: 4162948 - RNA, 86 nt, Human
ggacaguggaauaugguccuggucauugaugagcuggauucauugcuuuagccaaauaauauuucagaaccaucccaaacacugcu

SEQ ID NO: 4162949 - RNA, 75 nt, Human
ggacaguggugucuuaaaaucagaggauauaggcucuuguuuacuccacugauuucuaagauugcacuacucucu

SEQ ID NO: 4162950 - RNA, 74 nt, Human
ggacaguucuguugaauuuugacaaauguauauaguuguguaacuacuaccacagucaagacaaagaacagucc

SEQ ID NO: 4162951 - RNA, 86 nt, Human
ggacauaaaauuucuggaugaaagggcuauauauuuuuaagguuuuuggauagcuacugcaaaaaugcccuacauuuuuuaugucc

SEQ ID NO: 4162952 - RNA, 64 nt, Human
ggacauacagcgauucucaguuggggguuccuucuaggauccccagggagugagcugucugccc

SEQ ID NO: 4162953 - RNA, 71 nt, Human
ggacaucaaacucugugucugauuucuggcuauguugguuaugugacagcaggagaucaugauagauguuu

SEQ ID NO: 4162954 - RNA, 74 nt, Human
ggacaucagcagugguugugggacucacaguaaagaacaccuaugacacucacccucccacugccugguuaacc

SEQ ID NO: 4162955 - RNA, 86 nt, Human
ggacaucuauuacaucugcuuagaauucauuguccagaacuacaagaauucugggcaauaugaagggagcacauauauauuuguuc

SEQ ID NO: 4162956 - RNA, 57 nt, Human
ggacaucuguugugguagaggagauuuauuuucccuuccauuucuucagcagagucu

SEQ ID NO: 4162957 - RNA, 102 nt, Human
ggacaugggacauaagugaccuguguuugcuguugcucccccauccccaucucacaacacuggacugugagcucuggcagggcaggucugcugucucauucc

SEQ ID NO: 4162958 - RNA, 72 nt, Human
ggacauuauacuaagugaaguaagccaggcacaagaagacaaauauucugugauuccacuuauaugaggucc

SEQ ID NO: 4162959 - RNA, 82 nt, Human
ggacauuauuuuuagccuuuaucucuuagugguuuuguuuucuuuccgccgccuuuugaccugagagcuggaaauaaagucc

SEQ ID NO: 4162960 - RNA, 129 nt, Human
ggacauucacuaagcccaucaugcauguuauuagagaguuggcagcauuccagccaagcacauaaagugcuggcaccagaaugacugcagacucucauguccacagcagcuguuaggucugugaugucc

SEQ ID NO: 4162961 - RNA, 90 nt, Human
ggacauuuagauugccauauccagaguuauauccaagcagcaaaugauugcacugcuuauaaauucuaggcagaugauaauuuaaagucc

SEQ ID NO: 4162962 - RNA, 104 nt, Human
ggacauuuucuccuuggcuuucagaaucccuaucugccuuuuuaugccagaacagggacuggaggcuucaauguagaggggcaaaaaaaaaaaaaaaaaauucc

SEQ ID NO: 4162963 - RNA, 70 nt, Human
ggaccaaacaugccaucuuugucaggagugggcacgaucagaggcuccugaggagagggcagcgggaucc

SEQ ID NO: 4162964 - RNA, 55 nt, Human
ggaccacagaccucucuggcgucagaagaaguuauucugaauuaguuugugguuu

SEQ ID NO: 4162965 - RNA, 61 nt, Human
ggaccacaucuuuuuuccugaacagcccugaaaaggagcaucaagaaauggaugugggguc

SEQ ID NO: 4162966 - RNA, 62 nt, Human
ggaccagguuguaaauugcuacggaagaacaauuuccgguacucaauucugcaacacugucc

SEQ ID NO: 4162967 - RNA, 72 nt, Human
ggaccagucacagggaggacaucaacaguguggaagugaacagcauuuugaucuguucucccuggacucucu

SEQ ID NO: 4162968 - RNA, 59 nt, Human
ggacccagcucugagacccugccucucuggccagggcuguggugucagugcugggcucc

SEQ ID NO: 4162969 - RNA, 129 nt, Human
ggaccccagaaagcagucugcucucaguuuuuacuacagggcaaugggaugugcugggcuaguacuaguugaaggacauccuauuucuagaagagacuggaacagagccugggcuguucuggucaguuc

SEQ ID NO: 4162970 - RNA, 86 nt, Human
ggacccuauccuggugccugcaucuuggaggccccacccuagcagaaguagagugucagagagcaggcaguagaaugaugggcuuu

SEQ ID NO: 4162971 - RNA, 60 nt, Human
ggacccugaccagcaguacuugguaugaguuuacucuuacuauaacgcugugucagcucc

SEQ ID NO: 4162972 - RNA, 61 nt, Human
ggaccugaaaaucucgagggcucuuucccauuccagucuuucagcauucuaguucagguuc

SEQ ID NO: 4162973 - RNA, 79 nt, Human
ggaccugaccaggcuauccugcuguuaacagggaagaaagaaaacuaccuacagcagagaccagccacaucagucaucc

SEQ ID NO: 4162974 - RNA, 62 nt, Human
ggaccuggagcugagaaguggagcucugguccuagggccaccucucuggguucccaaagucc

SEQ ID NO: 4162975 - RNA, 60 nt, Human
ggaccugggguggaaggaaggcaagacugaccuuaauguucucuguucaccccagcugcc

SEQ ID NO: 4162976 - RNA, 82 nt, Human
ggaccuucuguccagggacagugauucacccagcccagaaugcucacaucugcaugggagaacacugcucuggaugggcgcc

SEQ ID NO: 4162977 - RNA, 76 nt, Human
ggacgaggugcugcuguacuucuugcggcuggaggccaucccugcccugaacagcaagagacagagcauccuguuc

SEQ ID NO: 4162978 - RNA, 101 nt, Human
ggacguaccacaggggguggcagacuuuuucucugaaggggucagcauggcuccauugagacuuucuuuagagacacugagguuucccuggugagacggcu

SEQ ID NO: 4162979 - RNA, 82 nt, Human
ggacguuagaagagaaagcccuuggauuagaggcucucaauauaaauuuaaccaagaggguuuuccuugaaucucagccucc

SEQ ID NO: 4162980 - RNA, 61 nt, Human
ggacguuauugaaucuuuguuauagcaaggcauuuuguaacagaguuguacaguuacgucu

SEQ ID NO: 4162981 - RNA, 76 nt, Human
ggacuacaacaauaagaacagcucuauggaaauggucaguaugucaaucuuuuguuguuguuuuugccagcagucc

SEQ ID NO: 4162982 - RNA, 80 nt, Human
ggacuacauuucccagcagccccuggggcauaccagcuggggcgagucagggccucuagggcuguugggaauuggagucc

SEQ ID NO: 4162983 - RNA, 63 nt, Human
ggacuagaagagcguaccuauccugucuccuuugcgaguaccacuugggugguuuuucucucc

SEQ ID NO: 4162984 - RNA, 77 nt, Human
ggacuagauuucuugggagcuuggccgagauguaggauggaccugggugucuguagguucuuaaccaucuggacucu

SEQ ID NO: 4162985 - RNA, 77 nt, Human
ggacuaucuaacucaugauauacgggaaauuauaguucuaaaaugcauauauaaaauauucuggguuagauauguuu

SEQ ID NO: 4162986 - RNA, 70 nt, Human
ggacuauuauguaaucauuacaguacauggacauaaaaacugugcauaacuagaguaauuacaguagucu

SEQ ID NO: 4162987 - RNA, 108 nt, Human
ggacucaaagccauauacuaguucccaauaggccugcacaaguuauuagaacaagcugcuuugcauucuugugugaucagaaccaguaacuagauggcaaucaggucu

SEQ ID NO: 4162988 - RNA, 80 nt, Human
ggacucaaggccaguucuucugacucugcagccagaagaaugaauguaauaaaagucaggcagcugagcuuuauggguuc

SEQ ID NO: 4162989 - RNA, 81 nt, Human
ggacucaugguuucucacugugucuauggcauguaaaccuggcauucaaguaaacacugaaggaaccauuauguagaaucu

SEQ ID NO: 4162990 - RNA, 57 nt, Human
ggacuccauaucucugucucugggcaaaaucaaaccauaaucaggguuguggggucc

SEQ ID NO: 4162991 - RNA, 67 nt, Human
ggacucucagggcugcgggcuuggcccggcccgggcggcgcaggcagaccgcgggcucgaggagucc

SEQ ID NO: 4162992 - RNA, 55 nt, Human
ggacugaaggcauuccuuggaacacucuuuccuuuugaauuuaucucuucagucc

SEQ ID NO: 4162993 - RNA, 66 nt, Human
gcugcauuguaggcauuuccuuaguguaguuaagugaaaugcacugaggaacauauauaagauggc

SEQ ID NO: 4162994 - RNA, 62 nt, Human
gcugcauuucaaguguucaguagccacauguggcuaauagauaccacauuggacagugcagc

SEQ ID NO: 4162995 - RNA, 71 nt, Human
gcugcauuucuggaauuuucuagggcaucauuuuaucuugugauaguuacaagaaggguucaaaaugcugc

SEQ ID NO: 4162996 - RNA, 56 nt, Human
gcugccaaauuuucucagagaugcugaacacagcuuuugcugagagauuugggggu

SEQ ID NO: 4162997 - RNA, 56 nt, Human
gcugccaccguggagaugaguggugauuaauugcagguugcaagccacggugcagu

SEQ ID NO: 4162998 - RNA, 93 nt, Human
gcugccagggaagaggccccagguugcuuggguccuagaacaagacauauuguuccagcccaucccuagccugggagaucuguuucugguugu

SEQ ID NO: 4162999 - RNA, 79 nt, Human
gcugccauccugggcaguuuugagugcuaagaacuggaaaucuacccaaagcagucaauuugcugccaugggaggcagu

SEQ ID NO: 4163000 - RNA, 62 nt, Human
gcugccauguggcggggcaggacugcaaacccgcaugcucagucacucugcuacaugacagc

SEQ ID NO: 4163001 - RNA, 64 nt, Human
gcugcccagagcucagugugcaaggucagcagacuaccaugcugccagcucuguuuagagcagc

SEQ ID NO: 4163002 - RNA, 56 nt, Human
gcugcccaggguggagccggcugcucgggagagagcuggugccugcuuugggcugc

SEQ ID NO: 4163003 - RNA, 61 nt, Human
gcugcccauugcacguuguggccgugaaucaacauugugacagagagggcacugggucagc

SEQ ID NO: 4163004 - RNA, 94 nt, Human
gcugcccccuguguguagucaguucauggcucuguccucauucuaagcaggaaccagagagucagagcugaaggcaaacgcuggcaugugcagc

SEQ ID NO: 4163005 - RNA, 76 nt, Human
gcugcccccuuguccaccgaacucggccccgggcagcgaggcuguccugcggccucaguggugagaaggcggaggc

SEQ ID NO: 4163006 - RNA, 56 nt, Human
gcugccccgagccauccuucagugaaucuuuaacugagggcugacaggaggacagc

SEQ ID NO: 4163007 - RNA, 63 nt, Human
gcugccccuauuucagcaagaagaauguggaggcugaugccuuguccauagcuggaugguagc

SEQ ID NO: 4163008 - RNA, 98 nt, Human
gcugccccugagaaacagguaacgagggaggggcuaagcgccacuggcagaugcucagcuugaagcugccucccugugcuuguccccucagccugagc

SEQ ID NO: 4163009 - RNA, 62 nt, Human
gcugcccggggucauguagucccuguguggcuucaaacuuaggcuucugcuguccccgacgc

SEQ ID NO: 4163010 - RNA, 60 nt, Human
gcugcccucucuggccccacacuguuuuugagacaggcaucuggagcccagagagggggc

SEQ ID NO: 4163011 - RNA, 76 nt, Human
gcugcccucugcggagccuuuguacugggcuucaaagucaugaugcuggagcucaaaggccugugggagugguggc

SEQ ID NO: 4163012 - RNA, 81 nt, Human
gcugcccucuucaacaaaaucacugaugcuggagucgccugagucaucacucagcaccaggauauuguuggagaggacagc

SEQ ID NO: 4163013 - RNA, 55 nt, Human
gcugcccugacuccagcagccugcagcuccaacccacgcugcugguggagggagc

SEQ ID NO: 4163014 - RNA, 55 nt, Human
gcugcccugugguagaggguggaggaaagccccaccaccccuggaugaggggggc

SEQ ID NO: 4163015 - RNA, 56 nt, Human
gcugccugaaauguugccuagcuucaaacacgagcagguaagaccguuuaggcagu

SEQ ID NO: 4163016 - RNA, 60 nt, Human
gcugccugaagugucuacacugcaccucuggugcacugaugugguuaacuucuggcaagu

SEQ ID NO: 4163017 - RNA, 58 nt, Human
gcugccugcaguguuuucccaguacacaugcugcuggggugaaugucugcaggccagu

SEQ ID NO: 4163018 - RNA, 91 nt, Human
ggagcccagagcugggucugcuggugccuggccugcggcagcugcuuacacaacagugcaucagcaggugcucccagggcuucugggcucc

SEQ ID NO: 4163019 - RNA, 117 nt, Human
ggagcccagcccaaaaucccauucccugccuccugguccuguguucuuccugccucccuuaaagauaggagcugcaagucuguguggggaggaggcgggaauggguggcucuucucc

SEQ ID NO: 4163020 - RNA, 100 nt, Human
ggagcccagcugcugcugagcugcuccuucccuucccagugagcuccaggcagauguggggcacacgggaugggcagggagacggcaggcaagcugcucc

SEQ ID NO: 4163021 - RNA, 72 nt, Human
ggagccccacccacucugaccagaagcuccccauccauggcugugcugucuagaguuggaaguucuggcuuu

SEQ ID NO: 4163022 - RNA, 91 nt, Human
ggagcccccgcggugcagaacugacagcaggaaccauuccgaggagaaagcugucggaaguucaguugcuaguuucauucgcaaaugcucc

SEQ ID NO: 4163023 - RNA, 68 nt, Human
ggagccccguguggccagcugaccgcuccuccagcuaugaugggcagcaguccauggcccaaggcucc

SEQ ID NO: 4163024 - RNA, 86 nt, Human
ggagccccucuccgucuguauuuguuaauuucagguucugugaacaucgccucugcucuggaggucagguguggugguggggcucc

SEQ ID NO: 4163025 - RNA, 73 nt, Human
ggagcccuaagaggaggacagcugacuccgagauggucaguuccgucugagaguagagcugccucuuuucuuc

SEQ ID NO: 4163026 - RNA, 59 nt, Human
ggagcccucaccggcgagugccugacaccucggccuuuucucuuccggaggggcgcucc

SEQ ID NO: 4163027 - RNA, 64 nt, Human
ggagcccugaagcaagaaaguagcuugaccauccaaaacugucuucuuugucuuccacgggucc

SEQ ID NO: 4163028 - RNA, 84 nt, Human
ggagccgagcuuucccuuacaggcugugggggguuugcccaccuugcccauggcaaagccuucuucggucugugauucuguucu

SEQ ID NO: 4163029 - RNA, 70 nt, Human
ggagccgauuaccaagcguguuuaggaaaugcugccucuguaagggcacauuacacgcaguaauugcccc

SEQ ID NO: 4163030 - RNA, 86 nt, Human
ggagccggaugucgugaaauccaugggcuccuccucugacuguggcuugugagccagagccuguggauuuaaccucuucugguucc

SEQ ID NO: 4163031 - RNA, 129 nt, Human
ggagccucauucacccuugccuuuguuuucauuucuccucuccagagugcagugggggcccucccagcuacagcugcgcuucuggaaggagcuuauugauaggcacagaguaugggugagucuucaucc

SEQ ID NO: 4163032 - RNA, 66 nt, Human
ggagccucccuaugcaccuucaggaacaacacccaagcagggugccugucugcaagggguggaucc

SEQ ID NO: 4163033 - RNA, 97 nt, Human
ggagccugcuggccacaggaaucaaacacuggccacagccacuuugcaguggaucauugcaggcuggcagugcugaaauccuggccacagaggcucu

SEQ ID NO: 4163034 - RNA, 72 nt, Human
ggagccugguggaaggugagugaggccucguuggugccaacccaaguugccuuugaccuuccccacugcucc

SEQ ID NO: 4163035 - RNA, 113 nt, Human
ggagccuguccaggaggaaggggccagggcugcggugcggggagcccugucugaggaggguuucccaaagccagggaucccugcccucagccuggacacucggggugggcucu

SEQ ID NO: 4163036 - RNA, 56 nt, Human
ggagccugugcccaagcccagagucgucucagguuuccugggcuuaggugggcuuu

SEQ ID NO: 4163037 - RNA, 59 nt, Human
ggagccuguggccgucacgacucaaccucaguacauguggcaguccggccgcacguuuc

SEQ ID NO: 4163038 - RNA, 56 nt, Human
ggagcgagcaagccacugagguuaaugcacagugagugacccuggcaugcucuucc

SEQ ID NO: 4163039 - RNA, 62 nt, Human
ggagcgcagcacuggggccacuggaguuaaugcagacuccucccgcucccaugccgucaucc

SEQ ID NO: 4163040 - RNA, 59 nt, Human
ggagcguauauaaauauauaauauauguguguguacauguguguauaaauauauguuuc

SEQ ID NO: 4163041 - RNA, 61 nt, Human
ggagcuacacugaaaaggagaucccucuuacguccuagauucuccaguugacagugucucc

SEQ ID NO: 4163042 - RNA, 67 nt, Human
ggagcuaguugcgugucccagaauggaggguguucugacaccccacccugagccgcaagagcagucc

SEQ ID NO: 4163043 - RNA, 82 nt, Human
ggagcucacaaucugagaauaaagccagcaggagcuaauguuggggcauuuacucugagccaugcuuuguucuaaauucuuc

SEQ ID NO: 4163044 - RNA, 76 nt, Human
ggagcucagaaaaguuuuguugauuguggaauuguggaaaaaaacagcaauauagaguuggaaagaccugagcuuc

SEQ ID NO: 4163045 - RNA, 130 nt, Human
ggagcucagaugucagacagcaggaggaauaaaaaugcuacuugugaaaacccaggcuguagguaaaacuuacucuuuuguugguugcacugguggguugggacuuucuccugaacuggccuugaaaucc

SEQ ID NO: 4163046 - RNA, 76 nt, Human
ggagcucaguagaguccucuuugaucaucugaccugccccagagaauagaccuaaagagacugauacggaaguucc

SEQ ID NO: 4163047 - RNA, 62 nt, Human
ggagcucugugucucuccugccacagugcgguggauugaccgggaugggggcacagggugcc

SEQ ID NO: 4163048 - RNA, 59 nt, Human
ggagcugaaccccaucgugcugcugcuggacaacaagugaggcuccuggggcucagccc

SEQ ID NO: 4163049 - RNA, 65 nt, Human
ggagcugcagcugcaguucugagagaaacucuauuuuucagccagaauacaguugcaaaggaccc

SEQ ID NO: 4163050 - RNA, 74 nt, Human
ggagcugccuuucaugcuuggagggccacacaaugacucaaggcucauggccccccagagcuggaggacagccc

SEQ ID NO: 4163051 - RNA, 61 nt, Human
ggagcuggcuacagagaacuccuccguuaaggagccucucuccaaagggcccuuuggcucc

SEQ ID NO: 4163052 - RNA, 86 nt, Human
ggagcugggcauaggucucgaggccccaguuccucuggggucagaacaugggagcuggucagccuugagcauuucauccccucucc

SEQ ID NO: 4163053 - RNA, 63 nt, Human
ggagcugggggaagggcuggguucugguccuuaagcccaagccuggcuuaauccuccuuuucc

SEQ ID NO: 4163054 - RNA, 77 nt, Human
ggagcuuacgauucagaggggcuaaguacuugcucugaaacacauggcaguaaguggugaucccuggauuggcaucc

SEQ ID NO: 4163055 - RNA, 104 nt, Human
ggagcuucucuccgaggaggaccugggccugguguggcaccugcugugugagcggggccauguccaacggccuucuuggggacuuugggucggggagaaguucu

SEQ ID NO: 4163056 - RNA, 74 nt, Human
ggagcuugggugccaugcugagcccaaagaaaauuauaaagguguccaggcuuguuugcaugguccccagcucc

SEQ ID NO: 4163057 - RNA, 84 nt, Human
ggagcuuggguuucacauacaguguauaguagauuauagcauaccauuuucuguucagugcauauguauugauuuccaaguucc

SEQ ID NO: 4163058 - RNA, 76 nt, Human
ggagcuuguucaaaugcagauucucauuccauaaaucuguggcagggccugagaauuugcauuucuaacaagcucc

SEQ ID NO: 4163059 - RNA, 55 nt, Human
ggagcuuguuggggaaggagaaagggcaagucccucgugguccacagcaggcacc

SEQ ID NO: 4163060 - RNA, 81 nt, Human
ggagcuuguuuaaaaugcaugugccugggccauacugagaauuuuauuucaagucuguuuaugcauauuuaaaaccccucu

SEQ ID NO: 4163061 - RNA, 101 nt, Human
ggagcuuuagaaaauggcauuaagaugucugcugguugagugaccucauagaacagaagagguuuauucugccaggagcgucagugcaaugaaaagacucc

SEQ ID NO: 4163062 - RNA, 55 nt, Human
ggagcuuugaguugagcuggcuccaugugagugacggaaacucggcucugguucc

SEQ ID NO: 4163063 - RNA, 56 nt, Human
ggaggaaauccuuaguaaggcaguccggcucguccaggccugcguggauguccucu

SEQ ID NO: 4163064 - RNA, 73 nt, Human
ggaggaagaguuggucugagguugcaccacaagaaguuuauaugcaccugaccuaccugaagucuacaccucc

SEQ ID NO: 4163065 - RNA, 73 nt, Human
ggaggaagccaggcugcacuugcugggcagucggaggggacagguggcaccagaaggcaguuggacuuacccu

SEQ ID NO: 4163066 - RNA, 63 nt, Human
ggaggaagcuagagccaccggacuggguccucuuuucacaggaggcaggcauagcauuccucc

SEQ ID NO: 4163067 - RNA, 76 nt, Human
ggaggaaggcccagcaagaacaaucagggaacaaggacagaauccuggauuugccuauggugcuuuaugaucuucc

SEQ ID NO: 4163068 - RNA, 81 nt, Human
ggaggaauacuauauaggugauauuauuugaggcagcaccuccgauaccucugaauaauguccuuguaucauuguuccuuu

SEQ ID NO: 4163069 - RNA, 65 nt, Human
ggaggaauucaccugcuuucccaaggucacacaauuauuuagggacauggcuaggauuccaaucc

SEQ ID NO: 4163070 - RNA, 65 nt, Human
ggaggacaaguuguggagaagagggugaccuuuaacacaccccuacauucccaaacuuggucucu

SEQ ID NO: 4163071 - RNA, 67 nt, Human
ggaggacaggagugaaucuggcacuuaucuuucaguggggccugagugcaaauucuuccuaccuucc

SEQ ID NO: 4163072 - RNA, 57 nt, Human
ggaggagaugcuguugaaggccagaaacaggucauucacagauuaaauauuucuucu

SEQ ID NO: 4163073 - RNA, 90 nt, Human
ggaggagcaagacacaggucaugaaagugccaggccaugggggcuucaguccuggcugcugucacugaccauggacacacuugcuuuccc

SEQ ID NO: 4163074 - RNA, 85 nt, Human
ggaggagcauuucuaaggaaugcaguaugacuuuggugggcucacgguucucaguguuuacaugcauccuugaaugugcugcuuu

SEQ ID NO: 4163075 - RNA, 65 nt, Human
ggaggagccacagccugguaacagggugacuucuggagucugggugcaggcugugcgcuccugcc

SEQ ID NO: 4163076 - RNA, 59 nt, Human
ggagaaagaggcauguuuuaugccugcugaauuucaagguggccuuugccucuuucucu

SEQ ID NO: 4163077 - RNA, 91 nt, Human
ggagaaagaucaucaguuauuuuuaagcuauaaaaucaaccauagaauuuguagacugaaggaacuuagaugaaccucaagcuuuuucuuc

SEQ ID NO: 4163078 - RNA, 66 nt, Human
ggagaaaggaggcagaacucacauggacacacccagugcaguccagaguuugagucuccuuccuuc

SEQ ID NO: 4163079 - RNA, 61 nt, Human
ggagaaaggcauagcagaaccuggacugagaccuacgggagacagguauugcuuuuucucu

SEQ ID NO: 4163080 - RNA, 78 nt, Human
ggagaaagggggcggcagccaguggaaggaucgcauggagucucuaauuccaaaggcugcaccuugcccccagucucc

SEQ ID NO: 4163081 - RNA, 129 nt, Human
ggagaacaauuucuuuauauuaguucauaugguauuggaauaguuaaggaagauuauauuaagaaucugaguuuacuuuaaugcuauuuacaaauuauuaagugacagacuggaaaagaaaaauacuuc

SEQ ID NO: 4163082 - RNA, 58 nt, Human
ggagaacagagccugcuauucucuuggaauaucuuucaucagcaggugcuguuucuuu

SEQ ID NO: 4163083 - RNA, 78 nt, Human
ggagaacagcugccugucuggaggcaaugauagcagagacauaaugaccuuagccuccgaaaggcagcugcagaaucc

SEQ ID NO: 4163084 - RNA, 79 nt, Human
ggagaacaggaugcucugucucuugcuguucagggcagggauggccuccagccgcaagaaguacagcagcaccucgucc

SEQ ID NO: 4163085 - RNA, 76 nt, Human
ggagaacgcagcccugcagagggcgcuccucagcagaaaggccgagcagccagccagcccacugcaggugcgcucc

SEQ ID NO: 4163086 - RNA, 76 nt, Human
ggagaacguuccagacagagggcacagaaagugcaaagaagaccacuugcugugccuucugccuggaacauucucc

SEQ ID NO: 4163087 - RNA, 64 nt, Human
ggagaacuagaacgagaaagcugaacugggcaagucaguugccuucuaugauucucaguccucc

SEQ ID NO: 4163088 - RNA, 87 nt, Human
ggagaacuuggucagcccacgguccuuaaacugggagacaccaguuuagugugcccauuccacuugaguaccgagggcaccauuucc

SEQ ID NO: 4163089 - RNA, 71 nt, Human
ggagaagaccagggaaagggccugaaaugagugaccuuuaggggcauuucuguucucuuccuguacucucc

SEQ ID NO: 4163090 - RNA, 95 nt, Human
ggagaagagagccaagagaagggguaaagaguccugggguugagcccccagaauugucuuaugaccccugauuagucacuucggcucucugagcc

SEQ ID NO: 4163091 - RNA, 96 nt, Human
ggagcaguaacugccgugaaucgggugguuuaauguuguuguguucagaaacccaggcccaacaacaugaaacuaccuaauucacucagcaguucc

SEQ ID NO: 4163092 - RNA, 106 nt, Human
ggagcaguggaugugggccaugggccauggugaagccaggucccgagacaggcagagugagccaguccccugagcuuuccuggcccucccgaguaugcacugcucc

SEQ ID NO: 4163093 - RNA, 55 nt, Human
ggagcaguggucauucagcuggccuuuucuucagcugauugauuguccugacucu

SEQ ID NO: 4163094 - RNA, 80 nt, Human
ggagcaguuuuccugagcuccucaugcaaauggacgccacucccuucggcaaaguccugggagcucaagggaggcugccc

SEQ ID NO: 4163095 - RNA, 57 nt, Human
ggagcaucaucacacacacccaugccagaccaggccacauggcaagaugaugcauuc

SEQ ID NO: 4163096 - RNA, 62 nt, Human
ggagcaucuccagggugucccacucccugggaugucacugggcauggacaccuggagucucc

SEQ ID NO: 4163097 - RNA, 81 nt, Human
ggagcaugagaaaccugagugcagaucaggaaaauuauuaauuuccaacugucugccaucaguaucauuucucuuuguuuc

SEQ ID NO: 4163098 - RNA, 89 nt, Human
ggagcauggagggcagccaggagccucugcaacuaucuccaucucaugguaaaaaucucuagucagagucuucucuguuguccagcuuc

SEQ ID NO: 4163099 - RNA, 97 nt, Human
ggagcaugguuguaucugaagcucugugugugugcauaaggaauauaauauaggcucuccaaauguuuuucauaccaguguugggauuuagccuucc

SEQ ID NO: 4163100 - RNA, 65 nt, Human
ggagccaaaugugcagacauuguuccaaaaugaauauuugcaugcauggaugcacgcuuggaucu

SEQ ID NO: 4163101 - RNA, 60 nt, Human
ggagccagaaaugcugugguuggggcauuucaucaaccaaaucacaguuguucugccuuc

SEQ ID NO: 4163102 - RNA, 63 nt, Human
ggagccagaaguaaggaaagaauuucuaccaggaucuccuguguagaaucuacuauuuggccc

SEQ ID NO: 4163103 - RNA, 90 nt, Human
ggagccagacucagagcagagcagccugaggagcauucucacuaaacaaacaugucuccagaacugcagugcucuguaucuccaggcucc

SEQ ID NO: 4163104 - RNA, 55 nt, Human
ggagccagaguuuaauguggagcucuuccauuuaauagaaguuacuuuggcuacc

SEQ ID NO: 4163105 - RNA, 99 nt, Human
ggagccagcagugugggcccagguccugggagaagugagguucacccugucugcucgcagcccuggcuuagucuccaaacugccuuccuuauuggcucc

SEQ ID NO: 4163106 - RNA, 56 nt, Human
ggagccagcuacauggucugcaaaugggcacaucuuugaguccagguacugguucu

SEQ ID NO: 4163107 - RNA, 71 nt, Human
ggagccaggcuuucuccugacucacauaaacauggcccaaaugugcagcucuagagccaagccucuguucc

SEQ ID NO: 4163108 - RNA, 60 nt, Human
ggagccaguauuuaguggucuuccacauauaaggaguguuacuacagacugguuaaagcc

SEQ ID NO: 4163109 - RNA, 89 nt, Human
ggagccccagcuuguggugaccaguguccccucugaggagugagagggagacccugaccccacaggggugcuagagccaccugaguucc

SEQ ID NO: 4163110 - RNA, 90 nt, Human
ggagccccagguggguuaaggggagugggcuuauuggacauggaacccuucugucugcauaccccuuuagcagagucagcuuggggcucc

SEQ ID NO: 4163111 - RNA, 67 nt, Human
ggagcccgucuucccucccuggguguguccaucagcucugcccaaaccaggcugggagggcaguucc

SEQ ID NO: 4163112 - RNA, 76 nt, Human
ggagcccucaccucugcauucgcuuuaugacugaguuucuccugaaacaguggagaagcaaaugcagugaggaucu

SEQ ID NO: 4163113 - RNA, 128 nt, Human
ggagccuauguaagggugaugguuauaugcaaguuuacaauguguauguguuggggcugggaacugaaaagcugaaacacugcagauguaauuugagucauguggcuagcuacuuuuucauaggaucc

SEQ ID NO: 4163114 - RNA, 80 nt, Human
ggagccucuaaacaguucucaucaugaagcauaagauuugugauuuugacagcuugcagugagaccugugcuuauguucu

SEQ ID NO: 4163115 - RNA, 59 nt, Human
ggagccugagagcagggguccaguggaggcugccauguugagcccuugccucagagccc

SEQ ID NO: 4163116 - RNA, 59 nt, Human
ggagccugcagggaagggcuaggauggucaggaucucuucagugcaugcccucaggccc

SEQ ID NO: 4163117 - RNA, 97 nt, Human
ggagccugggugggaacugcuuuagagcugagccucagaucagaucacagcacuggugccacugaguuuucuuuggguguuccacacccugagcucc

SEQ ID NO: 4163118 - RNA, 77 nt, Human
ggagccuuacaaaauaacaagaaauacauugguucuuacauuaggugauggacuuauaguauucucuugguugcucu

SEQ ID NO: 4163119 - RNA, 80 nt, Human
ggagccuucgagaaggcaguaaauggcuguuuuuauugacaaaaggaaaacauuuuacugccaucucacugauggcaucu

SEQ ID NO: 4163120 - RNA, 66 nt, Human
ggagcgagcucugggaaacaaaguguagcucuuguugcugccugcccuuuccacacagccagcucc

SEQ ID NO: 4163121 - RNA, 104 nt, Human
ggagcgcgaugagccaguccgcgcgcaggcguggaacgccgagacgcuggcgcggagccggcucugcggcgugugcgcaggcgcgaggucggcggcucgccccc

SEQ ID NO: 4163122 - RNA, 84 nt, Human
ggaggagcggggacgggcgagacuggcauaagcgucuucgcgagggagcaaggcggccugugggucggccucaccccggccucc

SEQ ID NO: 4163123 - RNA, 84 nt, Human
ggaggagcuuaaccagcaggugguagggaaacaauauuaaaaaccuaucaggauuuggccuuguguucucuccauuucuccuuu

SEQ ID NO: 4163124 - RNA, 96 nt, Human
ggaggaggaggaggaaggaggaaagcuuaaaaugggauggaacuuccacuugacaauaaacugagcuuuuuuagccuuuaauccaauucuuucuuc

SEQ ID NO: 4163125 - RNA, 81 nt, Human
ggaggaggcugaagauguguuucuaguuccugcaugcugcuuuguugugugaccucggacaugucaccuccagccuucuuc

SEQ ID NO: 4163126 - RNA, 57 nt, Human
ggaggagggcagggguugaccagagaaggccuccucugcaccugugccccauccuuc

SEQ ID NO: 4163127 - RNA, 64 nt, Human
ggaggagggggacguauccugguaugaagcugcagguggugugcagaaugcuucccccaccgcc

SEQ ID NO: 4163128 - RNA, 56 nt, Human
ggaggaggucccccgacaugccugaggcaaaaccagguggcgccaggacccccucc

SEQ ID NO: 4163129 - RNA, 77 nt, Human
ggaggaggugcagaaacuguuuguuaauauuuacccaaauuaauaagauguugagcaacagcuucuacacaaaagcc

SEQ ID NO: 4163130 - RNA, 56 nt, Human
ggaggaguguggggcacucugcccugcagccaacagggcccucccuccgcuccucc

SEQ ID NO: 4163131 - RNA, 57 nt, Human
ggaggaucacuugaggucaggaguucgagacgagccuggccaacguggugaaacccc

SEQ ID NO: 4163132 - RNA, 73 nt, Human
ggaggaucccagcucacuuacuugguaugaccaccacuugguuccccuucccaaaagcgagucuguuguuccc

SEQ ID NO: 4163133 - RNA, 55 nt, Human
ggaggaugaggguggugguguugggcacacuuugcagggccucacccacaccucc

SEQ ID NO: 4163134 - RNA, 56 nt, Human
ggaggauggauccgaccccuuccagcucccauggcugggagguuuuccaucucucc

SEQ ID NO: 4163135 - RNA, 69 nt, Human
ggaggcaaugcugcaagaggugaaaagauggaagcuccgucucuucugcugcugcggcagcgucccucc

SEQ ID NO: 4163136 - RNA, 55 nt, Human
ggaggcagaacuucccgucaguaaaacuuucucugugugaggacaucugccuacc

SEQ ID NO: 4163137 - RNA, 68 nt, Human
ggaggcagaaguagggggagacaaaaugcuagguuuugauggcaaugcuguauucuucuccuuccucc

SEQ ID NO: 4163138 - RNA, 65 nt, Human
ggaggcaggaaagacagguucagugaugugacaugagaaguauuuaaccugucauuucugucuuu

SEQ ID NO: 4163139 - RNA, 63 nt, Human
ggaggcaggggaggcucuccaggcuuuggggccgugacagcagcuugggucucuccugcuucc

SEQ ID NO: 4163140 - RNA, 57 nt, Human
ggaggcagggucgaggccuuggugcugaccuccggcuuccucugccagcccgccucu

SEQ ID NO: 4163141 - RNA, 72 nt, Human
ggaggcagugaauucuucaguuucugggacuccuggcaacacagggccugugagaaucaaggaaaagcuucc

SEQ ID NO: 4163142 - RNA, 63 nt, Human
ggaggcaguguuuacugcccuguggauucauuagcacuccaaggccggccugcucucgccucc

SEQ ID NO: 4163143 - RNA, 60 nt, Human
ggaggccaauuuucuaacugcauuccauuucaaaggauguaagaaaaaucauuugccucc

SEQ ID NO: 4163144 - RNA, 108 nt, Human
ggaggccaccagauguccccaccuccagggucaggccagcaaaggggcccaccuucauuugaccaccccgacugcugguccuggagcuggguuccuggaggggcuucc

SEQ ID NO: 4163145 - RNA, 62 nt, Human
ggaggccaccauggagucacuucugggaaggcaauagaacgcagugguucaugguggccucc

SEQ ID NO: 4163146 - RNA, 58 nt, Human
ggaggccacgguuuagcaccgaugucugcggaggaggugggugcucgcccuggucuuu

SEQ ID NO: 4163147 - RNA, 56 nt, Human
ggaggccaggaagagccgcccuuccuccuagcaggcgcgggccucccuggcacuuu

SEQ ID NO: 4163148 - RNA, 65 nt, Human
ggaggccaggugggagucaucucacccugccagguaacggggcuggugggcccgcgcuggucucu

SEQ ID NO: 4163149 - RNA, 77 nt, Human
ggaggccaggugggcgugucuucaccuucccucuuacgggugaggauguuguagagaugcccaguugaaaaggcccc

SEQ ID NO: 4163150 - RNA, 71 nt, Human
ggaggcccccggcgccccccgguguccccgcgagggguccagggcggggucugccggcccugcgggccgcc

SEQ ID NO: 4163151 - RNA, 61 nt, Human
ggaggcccucuguaacuauuuguugaaugaacacaucacaguagaguaaaagggagccucc

SEQ ID NO: 4163152 - RNA, 56 nt, Human
ggaggccuggcucugcccuccuggcccuuccaguccaguggggaggagaggccucu

SEQ ID NO: 4163153 - RNA, 55 nt, Human
ggaggccugggcucuagaucucucacaugcugugugaccuugggcaagugccuuc

SEQ ID NO: 4163154 - RNA, 56 nt, Human
ggaggccuuacgaagcaagccuuguuuugcugagagcucuguacguuggugccuuc

SEQ ID NO: 4163155 - RNA, 75 nt, Human
ggaggcgcugaccagcagugugggacuccuggggcccaacccccagccugcucucagauguugagccagcccucc

SEQ ID NO: 4163156 - RNA, 102 nt, Human
ggaggcgcugagcugggagcagagggagcagggaggggacugcugaguagggcuccuccccggccuccacuuuucucucuccuguggcugcccacgcccacc

SEQ ID NO: 4163157 - RNA, 75 nt, Human
ggaggcggagguugcaguaagccgagauugcgcuauugaacuccagccugggcgacagagcaagacuccgucucc

SEQ ID NO: 4163158 - RNA, 109 nt, Human
ggaggcggcugccgucuggcuccgcugggcccccggacaggcauucauccgauaucuggaucucccagacggguggucugcgaggccugagugccaaaugguccccucc

SEQ ID NO: 4163159 - RNA, 100 nt, Human
ggaggcgugcccgguucauccaaggcgcaagauggcgcugcuuuuugcacguucuuugcgcuugugccgcuggggagccaaacgauugggaguugccucc

SEQ ID NO: 4163160 - RNA, 63 nt, Human
ggaggcgugcccuggccccgaggcugcugcaccgccucagccucacugucagugccgucgucc

SEQ ID NO: 4163161 - RNA, 58 nt, Human
ggaggcucagacuccauccucaaggcuggcaagaagacagggugagacaugagccucc

SEQ ID NO: 4163162 - RNA, 63 nt, Human
ggaggcuccaggauauguuggauaccuggcgcagugccuggcaaauaacaauccugagugucu

SEQ ID NO: 4163163 - RNA, 58 nt, Human
ggaggcucccacgcagcucacacacgagggaggugugagacucagaugugugguuucc

SEQ ID NO: 4163164 - RNA, 60 nt, Human
ggaggcugagaaguccaagaucauagcaccaacaucugguaaggacuucuuacagugucc

SEQ ID NO: 4163165 - RNA, 75 nt, Human
ggaggcugaggcaggaggauugcuugagcccaggaguucaaggcugaaguagcuaugauccugccagugcacucc

SEQ ID NO: 4163166 - RNA, 70 nt, Human
ggaggcugagguucaguccugcucugucaugaauuggcuacaugacugaggaccaaggacuugaguuuuc

SEQ ID NO: 4163167 - RNA, 72 nt, Human
ggaugccugaauaucauuuacauuuggagucuaagcaagugaaugauucccaaugacacuugauuuucaucc

SEQ ID NO: 4163168 - RNA, 56 nt, Human
ggaugccuucuuggugcuacaccagcugcgcugcaaugggguccuggaggggaucc

SEQ ID NO: 4163169 - RNA, 105 nt, Human
ggaugcggaaaaauaggaaugcuuuuacacuguuggugggaauguaaguuaauucaacuauuauggaagacagugugguuggugguuccucaaggauuuacaacc

SEQ ID NO: 4163170 - RNA, 74 nt, Human
ggaugcgggggucuucaggucuaguugguaucacuccacagaaauccauucaucugagggccaggccuguuucc

SEQ ID NO: 4163171 - RNA, 101 nt, Human
ggaugcuaauuguuggauacagagaugaauuagacagggucucugcccucagggaguuucacagucugucauuguuuguauuguaauaguuaaguuacucc

SEQ ID NO: 4163172 - RNA, 59 nt, Human
ggaugcuaugaugugccauuucuuugggcuuuuccgaggacugcucacuugaggcuucc

SEQ ID NO: 4163173 - RNA, 126 nt, Human
ggaugcuccgaagccaguguuaguauuuguucucauugaccucugugguauaagcguccugaagaagcugggcccuuuaucauggagguaaauaugcauagcugccccaugaaaaaaggagaaucc

SEQ ID NO: 4163174 - RNA, 60 nt, Human
ggaugcugagggaaggcggcaaaagcugcagcugcugugcugcccugccuucagcucucc

SEQ ID NO: 4163175 - RNA, 82 nt, Human
ggaugcugcagauucgggcucaagcuggaggaggggcccaggugguaucgaccagccccucuccgcccugagucguggcgcc

SEQ ID NO: 4163176 - RNA, 117 nt, Human
ggaugcuuaugguggaaugaaggagcacuauuuaggcaauaucauuggaguugcuuugaaauacucaauuaacuaguaauucuguugcuaauguucuguacagauacauaagcaucu

SEQ ID NO: 4163177 - RNA, 79 nt, Human
ggaugcuuauugaguucugcuagcaguggugcacuuaaaccagcuuguacuaacuucugagaaccaauuguuagcaucu

SEQ ID NO: 4163178 - RNA, 88 nt, Human
ggaugcuugcugcaggcacaucucugcugcuccccacaacugcaccuccaugaagccuugucuagcagaagugccuuagcaaucacuc

SEQ ID NO: 4163179 - RNA, 80 nt, Human
ggaugcuuugcucuuguuugagguuguuugcauacagaauuguucauguguuugauagcccagagaaugcacagagcucu

SEQ ID NO: 4163180 - RNA, 74 nt, Human
ggauggaacugaucaggagugccaagucaaaagcagcagaucuuaagcccucacugguuguuccuuuaacaucc

SEQ ID NO: 4163181 - RNA, 66 nt, Human
ggauggaagcagaggccacagagugggcaugaaaacuaaaugaucacuccucauucugccccaucc

SEQ ID NO: 4163182 - RNA, 78 nt, Human
ggauggacucgaucucuugaccucgugauccgccugcuuuggccucccaaaguacuuggauuacaggcaugagccacc

SEQ ID NO: 4163183 - RNA, 57 nt, Human
ggauggagcaggggccagcucccuugagggccaggccuuuuguguccuugcccgucc

SEQ ID NO: 4163184 - RNA, 72 nt, Human
ggauggaggaccccagcagcuccccagccggcugucagcucgcuauggaggagggcuggugucuguauuucc

SEQ ID NO: 4163185 - RNA, 64 nt, Human
ggauggaguuaacucugaaaagacauuuauuuaaaaauuagaauaaucacaguuaacucuuucu

SEQ ID NO: 4163186 - RNA, 56 nt, Human
ggauggcaaacugggaccagaggaucuccugggcccuggguucuggauuugccucu

SEQ ID NO: 4163187 - RNA, 56 nt, Human
ggauggcaagcacauaauaaaugcucucugaauagcaauuauuggugcugcuguuc

SEQ ID NO: 4163188 - RNA, 71 nt, Human
ggauggcucgugguuggugcuccgcaccgccgagaaggcgaccuuggaguuggccgcccggaccgauaucc

SEQ ID NO: 4163189 - RNA, 113 nt, Human
ggaugggcacacugugaauucauuagcaugguagccaggucagcagagucauuaguggucauuuuaaugaugacuuggaaacccugccuggucaauuuaagugaggcucauuc

SEQ ID NO: 4163190 - RNA, 102 nt, Human
ggaugggcacugauccugaguuuggccacugccaggguggucaauccuccucccgauaacccucagacagcuguggccagauguggacuucuuccugccucc

SEQ ID NO: 4163191 - RNA, 121 nt, Human
ggauggucagccaggcgcgguggcuuacgccuguaaucccagcacuuugggaggccaaagugggcggaucacaaggucaagaguucaagaccagccuggucagcauagugaauccccaucu

SEQ ID NO: 4163192 - RNA, 57 nt, Human
ggauggugacggcggcccgcuucaucugcaggaagugccgacgcuccagcaccaucc

SEQ ID NO: 4163193 - RNA, 71 nt, Human
ggaugguuuccuuucagaucuguaacuggcaagguguauauuuuguuuagagaauugaagcagagcccucc

SEQ ID NO: 4163194 - RNA, 58 nt, Human
ggauguagccauucuugugacaaaucaaaaacagacucagaggaauaaugcugcauuu

SEQ ID NO: 4163195 - RNA, 75 nt, Human
ggauguauuucuuuccauuauagucagcgaaauaugacauacacuucaacuggcugagaaaaaagagcuauaucc

SEQ ID NO: 4163196 - RNA, 59 nt, Human
ggaugucauugcuuuguagagagggucugcuuucugauacaucugccugcagggcaucu

SEQ ID NO: 4163197 - RNA, 91 nt, Human
ggauguccugggacaaguuuccccuaagugaaguguugauaagucugcuuaucagaaagauauuacugggggugugauauguagggcaucu

SEQ ID NO: 4163198 - RNA, 87 nt, Human
ggaugucuuuuguuuucuuuucuugccugauugcucuggcuaggacuuccagugcaauguuaaauaggaaaggagaaagugggcacc

SEQ ID NO: 4163199 - RNA, 71 nt, Human
ggaugugcugaccuaaauugaggaagaguuuucuuuucuauuaacucauuuugcaugguaacagcauaucc

SEQ ID NO: 4163200 - RNA, 73 nt, Human
ggauguggaggccuaagguacaguuugcaucuggagugagaggcaugggccagaaaaggcuucccaggcauuu

SEQ ID NO: 4163201 - RNA, 71 nt, Human
ggauguggaggggaagguuagagugaucuccaugguggccucugaggcaccuuugccaaaccagugcagcc

SEQ ID NO: 4163202 - RNA, 103 nt, Human
ggauguucaguggcuagggauucccaggucuuguuugacaucaauuaccguacaguuuccuacauuggugaacaaauagggcuauaacuuagcuuagacuucc

SEQ ID NO: 4163203 - RNA, 92 nt, Human
ggauuaaaugagaucaugaauguguagcauuuaaugcagucucugacacgugggcugcauuccguucacuuuagcgaucaucauuauuaucu

SEQ ID NO: 4163204 - RNA, 89 nt, Human
ggauuaacucggauaagcaauaagggauccucuauaagucaaaggggugauuuagggagauuugcuuaguugugguuugaaggauggcc

SEQ ID NO: 4163205 - RNA, 75 nt, Human
ggauuaauguaauagaacacucagcauggaaagccaccccggggcugcuccuguauauauuuuguuacauauucc

SEQ ID NO: 4163206 - RNA, 64 nt, Human
ggcauguggucaucuaacuaaauuuucuuugauuuuuuggagaaggguguggguguuacaggcu

SEQ ID NO: 4163207 - RNA, 63 nt, Human
ggcauguuaaugacuuacgauaguguccuacucugggcagcuguguaggaucauaacacgguu

SEQ ID NO: 4163208 - RNA, 86 nt, Human
ggcauguuuacauacuucuuggccugauuccaauaccugccagcaguuuuauugcaauuuggcuaaagaauacaaucaaacugacc

SEQ ID NO: 4163209 - RNA, 129 nt, Human
ggcauuaauuggcaaacaacuuaauuaaaaugcuuucucaaguaauuagcaacaaauacgucccuaucuguuuugcaugccauuugucuuguuguguuuguuaagcuggccugucagucaaacuuugcu

SEQ ID NO: 4163210 - RNA, 74 nt, Human
ggcauuagauacauucacauuguugugcaacaguuucacucguuuuaccaaauugaauguuuugucuacuggcc

SEQ ID NO: 4163211 - RNA, 86 nt, Human
ggcauuagggcugcacagacuugcucauuuaucuauuuuaacaguuaacaaaguauuguuuguguaucucugaaauucuaaaugcc

SEQ ID NO: 4163212 - RNA, 80 nt, Human
ggcauuauuacuauuuuuauugucacaacuguuaucaauaauaaagaaaaugguuacagaaaugaaaguaaggaggugcc

SEQ ID NO: 4163213 - RNA, 96 nt, Human
ggcauucacuguacugccccccaaagcugccauugcggucggaccccaggucgaacucauagucguagcuguagcuggggcgguagggguugugcu

SEQ ID NO: 4163214 - RNA, 72 nt, Human
ggcauuccugcagagaguaacugaaauauagacaguaacucuaugccuuucaugugacuccuguugauagcc

SEQ ID NO: 4163215 - RNA, 61 nt, Human
ggcauucuugguaugaaggacagacugguagacacaaccuagccuauguuaucaagaagcu

SEQ ID NO: 4163216 - RNA, 71 nt, Human
ggcauugcaggcaaagugcuguguccucagugaugaacccugaagggccaugcuaggugcccgcagcugcc

SEQ ID NO: 4163217 - RNA, 83 nt, Human
ggcauugggauugggaaaguuaaauuaaagauuggagaaggaccucuugcuaggucuuucuuuauuuugguguccuuaaugcc

SEQ ID NO: 4163218 - RNA, 82 nt, Human
ggcauugucuuuaaaaauauacaaccaaaacagaaaaaucuaagccguggugccuggggauguguauuuggaagacaaaacu

SEQ ID NO: 4163219 - RNA, 79 nt, Human
ggcauuuacuuguuugggguguucaggguacuucugggggaacuugagaagccccuucccacccccacccagugaaucu

SEQ ID NO: 4163220 - RNA, 68 nt, Human
ggcauuuaucuaauauaguuuauggcuaugugagcauauggagagcagaauuaugcuagagaggugcc

SEQ ID NO: 4163221 - RNA, 130 nt, Human
ggcauuuaugucugggaugcaaacugaguaugccccugguugucuguuaucucuuuuaauaaucuuuuugcaggaggaggcuggaguacacccagggggugggcaagugggcagauaccagauuagaucu

SEQ ID NO: 4163222 - RNA, 56 nt, Human
ggcauuucagucuuguggacuuuugggaaaaaaauguuaaacauaacugaagagcc

SEQ ID NO: 4163223 - RNA, 86 nt, Human
ggcauuucuaacugguuucauaucauuuccggguggaaacaauccagauuuacgaggaaagagauugcaaucuuuuagcaaaugcc

SEQ ID NO: 4163224 - RNA, 127 nt, Human
ggcauuugcagguccccacgguggcggaggcagcugggccccagccucuccacugucacccucaccccaggacguggugcgaaggagccuggagcccaccuggccguccccgggaccggcuggugcc

SEQ ID NO: 4163225 - RNA, 57 nt, Human
ggcauuuguucuccaucccgaaggucacagcccacccaagguggcaggucagaugcc

SEQ ID NO: 4163226 - RNA, 80 nt, Human
ggcauuuucugcucagagaaaugaaguagggauucagugauauagacaaauccuagaaauuuauuugaaguagaauggcc

SEQ ID NO: 4163227 - RNA, 69 nt, Human
ggcauuuucuuucuugcuggcaaaaaauuccuaucagccaguaggguggacaguaggguagacagugcc

SEQ ID NO: 4163228 - RNA, 61 nt, Human
ggcauuuuucuccucauaauguuuccugaagcaugaaaggauccuugaucagaagagugcu

SEQ ID NO: 4163229 - RNA, 90 nt, Human
ggccaaaaugggcagagguuucugcagcauaguggcaggucugcuuaccuugcauugugaagcggagaucuuguuuugaaccauagggcu

SEQ ID NO: 4163230 - RNA, 114 nt, Human
ggccaaaccuacugagagcuaggcugggcuggcauggcuguugaagucagcuccacgggggagcugaccuugacguuagcagacggagaccagucccaguuccagggggaggcc

SEQ ID NO: 4163231 - RNA, 59 nt, Human
ggccaaaugaaggcaaugggacuugauaagaacaaucacaagaaccccucuaucuggcc

SEQ ID NO: 4163232 - RNA, 63 nt, Human
ggccaaauuuauuugcagcuggauauugaaugggacuuuucugguugucuuagaauucuggcu

SEQ ID NO: 4163233 - RNA, 116 nt, Human
ggccaacuaagugugagugaaauggaagguggagugugccacuucugggccaaggaaguuaaacacagaugugcuccacccucacacucuucccuuguaugcugaccuuggaggcc

SEQ ID NO: 4163234 - RNA, 102 nt, Human
ggccaagaaucaaguguuuaugucuggcauguuguaauuaauuaaaccauuuuuaugcaauaauugcagggugucagaauacaaugcauuuggugacaagcu

SEQ ID NO: 4163235 - RNA, 74 nt, Human
ggccaagcccucugugccucguguccucugcaccgcgauggcuucgcugggggagggaguggggagagcuggcc

SEQ ID NO: 4163236 - RNA, 59 nt, Human
ggccaagccucuuccagcuccuuucuaguccuuaauacugacaguaaugagaggcugcc

SEQ ID NO: 4163237 - RNA, 55 nt, Human
ggccaauucaggcuuuggccuccugugagaaccaggauuucaaagcagaguggcc

SEQ ID NO: 4163238 - RNA, 83 nt, Human
ggcagaugaccaaccauccugguuuuucugguuuuagcauugaaaauccuguacucaagguaaaccaggauaguuggucaccc

SEQ ID NO: 4163239 - RNA, 64 nt, Human
ggcagaugaguggugggagugaguguuuggcacaaacaagcuucucucuuugcacucacaggcu

SEQ ID NO: 4163240 - RNA, 72 nt, Human
ggcagaugcccugaaagauucaaaggcugucuguaaauggagaaugccuuuauuguuuauucagugccugcc

SEQ ID NO: 4163241 - RNA, 55 nt, Human
ggcagcaacuuggacagcagucuuggcaacaaguacccaauauuaggauguugcc

SEQ ID NO: 4163242 - RNA, 116 nt, Human
ggcagcacacacuaggcucugaacgguggagaggauggcacacauuuaauaaacugugcucagcacuuucuccaaccacuaaguucagguuuggaaaugacuguggaauuugugcc

SEQ ID NO: 4163243 - RNA, 79 nt, Human
ggcagcaccccagcucuagcugccccgaggcagggucggggcugaugcuaucucccugguaguuaauggggccgcugcc

SEQ ID NO: 4163244 - RNA, 57 nt, Human
ggcagcaggguagccauuucucccugacugggguguccaccauggugcucugcagcc

SEQ ID NO: 4163245 - RNA, 57 nt, Human
ggcagccacccugggaggcagacauggccuguuuccugaggcccagguuggacugcu

SEQ ID NO: 4163246 - RNA, 60 nt, Human
ggcagccagcaguugaaauugacaugugagaguucuucuaagucccagaugcuagcugcc

SEQ ID NO: 4163247 - RNA, 88 nt, Human
ggcagcccagaagcaaggcucagagccuggagcugcugaccucuuggggacacugcagcccuggccuggccuacuuuucucuucuccc

SEQ ID NO: 4163248 - RNA, 56 nt, Human
ggcagcccuggacccuggagaaucuggacuggaggagcucuggcuccugggcugcc

SEQ ID NO: 4163249 - RNA, 56 nt, Human
ggcagcggcgccugcuucagucacuugaguagaguugcuuggcagguuuuguugcc

SEQ ID NO: 4163250 - RNA, 67 nt, Human
ggcagcuaaacagagggggacccaacccccaacaucuggggcaguggcuucaacucugucggcagcc

SEQ ID NO: 4163251 - RNA, 62 nt, Human
ggcagcuaacacuugggggcauccuuagugaucucacugggguacccuccaggguaccugcc

SEQ ID NO: 4163252 - RNA, 129 nt, Human
ggcagcuauucuucacucaguuauuuagggaucuaggcugaagacagcacuggcauuuucaagauauggcuucuaagauggcuuagugcguccccagucuauagguagaaaagaaaagaacagauagcc

SEQ ID NO: 4163253 - RNA, 84 nt, Human
ggcagcucagcagagauggcagcuggcuugggcaccucggaggagggagacccgaggaaguugccugacugcuggccuccugcu

SEQ ID NO: 4163254 - RNA, 60 nt, Human
ggcagcuccuccuagucugccccucccguggcugccacagacuccaggagggaggcugcu

SEQ ID NO: 4163255 - RNA, 62 nt, Human
ggcagcuccugccugggcagcugucugagaaggacagagucugacagguaggcgcccaugcc

SEQ ID NO: 4163256 - RNA, 62 nt, Human
ggcagcuccuggagacuucauggcaaaccaacauauugaaugcaggaaauuccaggguggcc

SEQ ID NO: 4163257 - RNA, 64 nt, Human
ggcagcuggguagugugggggcuggauuggaauuuucuagaaaguuagcagacucuuggcugcc

SEQ ID NO: 4163258 - RNA, 60 nt, Human
ggcagcugucucauucacaccugaucagaguccacacagaacaggugcaaauuagcugcc

SEQ ID NO: 4163259 - RNA, 67 nt, Human
ggcagcuuccuugguuuuaucuuaagauucuuugcaagagcaaacugugaggccgggaagcacagcc

SEQ ID NO: 4163260 - RNA, 63 nt, Human
ggcagcuuuuguguguucgcuccuacuuggucuugucagacuuccugggcaugcagagucccc

SEQ ID NO: 4163261 - RNA, 74 nt, Human
ggcaggaaaacaaggcagcucagcucauggcaguccugaugaugaucccugagggcugaucuuggccucuagcc

SEQ ID NO: 4163262 - RNA, 77 nt, Human
ggcaggaagcccccauggggaaggguggggugugugaccccagcagccuugucccuucucuugggggcgguggugcc

SEQ ID NO: 4163263 - RNA, 62 nt, Human
ggcaggaagcucauguggacugauucuagccauuggcuccagcuuagcaugggcuuccuguu

SEQ ID NO: 4163264 - RNA, 64 nt, Human
ggcaggacucucaggaccaagcaagguagcagaagagaggcucagagcuuuccuuagggucucc

SEQ ID NO: 4163265 - RNA, 86 nt, Human
ggcaggacugaucagugggauggucccuacggaauggaaugucccagcugccgucaccacugccaccuccccaucucuguccugcc

SEQ ID NO: 4163266 - RNA, 99 nt, Human
ggcaggaggaucacuugcaucugggaggccaagguuacagugaguggcgauccugccauugcacuccagccugggccacagaguaagccucugucugcu

SEQ ID NO: 4163267 - RNA, 70 nt, Human
ggcaggagugcagguggugaggcaggcagacacagugcccagccugggccugacucaccugccucccgcc

SEQ ID NO: 4163268 - RNA, 89 nt, Human
ggcaggauuaaggugaggggaguaaagccauguuacacagauacaaaaaacauucaguaaucgcaaugguucccucaccucaccuggcc

SEQ ID NO: 4163269 - RNA, 62 nt, Human
ggcaggcacuguguuuuguguugagaauaaaaucaugaacaagguaagacccaggcucugcc

SEQ ID NO: 4163270 - RNA, 58 nt, Human
ggcaggcaggagcucugucucccggccuucuccacuggagccugaagcaccuccugcc

SEQ ID NO: 4163271 - RNA, 70 nt, Human
ggcaggcaggccggccggccccagcucugcuggugaaugcagaggggcucaagcaguggucuucccugcc

SEQ ID NO: 4163272 - RNA, 62 nt, Human
ggcaggcauccucguugguuacuggcuaaagaaaauuaccaugugagcagggagaugcugcc

SEQ ID NO: 4163273 - RNA, 59 nt, Human
ggcaggccugcaguggcccuucauuucaccuauuugacucugccugccuagagcuugcc

SEQ ID NO: 4163274 - RNA, 75 nt, Human
ggcaggcuagaaacucaggcaagaaagacccugcuuucucugcagcauuuucuuguuugaguuuaccuagcugcc

SEQ ID NO: 4163275 - RNA, 68 nt, Human
ggcaggcuccguguuccauuccagcugagccuuugcuggaguaauuacccacauggagucuucaagcc

SEQ ID NO: 4163276 - RNA, 67 nt, Human
ggcaggcuguaggggcugggcugcugcggccaccagcacagacagcccugucccugagggaccuguc

SEQ ID NO: 4163277 - RNA, 57 nt, Human
ggcaggcuguuugaaggauuaggccagauaacccuggcaagcccucuuuagccugcc

SEQ ID NO: 4163278 - RNA, 66 nt, Human
ggcagggacagggguucugcuccuucucacuucaccaccggcacacagcuugccccugucuuugcc

SEQ ID NO: 4163279 - RNA, 58 nt, Human
ggcagggacgcagcacucuccgucacaugcugugugacgugcaguggagugucccgcc

SEQ ID NO: 4163280 - RNA, 68 nt, Human
ggcagggagggagucgggaacugugggucugugguaugcggcuugcaaaccuguuucucucaccuguc

SEQ ID NO: 4163281 - RNA, 58 nt, Human
ggcagggcaggaaagucaggaagccagaacaggcucccuccccuucccugccucugcc

SEQ ID NO: 4163282 - RNA, 74 nt, Human
ggcagggcuauggaggaggaggcugagaagcugccuauuuugcaggcaauagcuuuuacuccuccgaggagguc

SEQ ID NO: 4163283 - RNA, 58 nt, Human
ggcagggcugagucaggugcuggggguauuugcgcccagagaucuacugagcccagcc

SEQ ID NO: 4163284 - RNA, 76 nt, Human
ggcagggucgaggagcucccgugaggagaccaaucgccuagcgugagucuucuuccgggauugcucgcccucugcc

SEQ ID NO: 4163285 - RNA, 90 nt, Human
ggcagggugggguacuugggacuccugguaccuuugccagggcaaaugaugcccaggaaccaggagagucccugaacccaagcccaggcc

SEQ ID NO: 4163286 - RNA, 58 nt, Human
ggcagguagcagcaccaugagcacgaccugcgcagcucaugucccguugcuggcugcc

SEQ ID NO: 4163287 - RNA, 55 nt, Human
ggcaggucagguccaugaccaacacguuggcaguggggauauggaaggccaugcc

SEQ ID NO: 4163288 - RNA, 60 nt, Human
ggcaggucaguuuuaggaaagagcaccuaugggugucaugggucuaaacauugauaagcu

SEQ ID NO: 4163289 - RNA, 88 nt, Human
ggcaggucgcugcaucucugugagccucaguuuccucaucugugauauggggugagcaguaacagcucacaggguuguggcgacgguu

SEQ ID NO: 4163290 - RNA, 78 nt, Human
ggcaggucucagcagugugcuuggaauggaacaagauguuuagccucuaucuucaaucuguaguagcugagaacugcc

SEQ ID NO: 4163291 - RNA, 66 nt, Human
ggcaggugaagaggauaaaaaguugggaaaaacuggacucaaccauguuauuuauuaucacguguc

SEQ ID NO: 4163292 - RNA, 58 nt, Human
ggcaggugccaguuggcuugggggcuugaaagccauaaaaaggagccagggcuuuguc

SEQ ID NO: 4163293 - RNA, 55 nt, Human
ggcaggugcgcauguugcauuagugucauaagguggcaugagacuguaccaggcc

SEQ ID NO: 4163294 - RNA, 112 nt, Human
ggcagguggauccgucugcaggcaggaaagagcugaugcauuucaaccgcauccuguguaaugaaggccagcucuuuaucagccugccuggcccuggauuuuuaucucugcc

SEQ ID NO: 4163295 - RNA, 80 nt, Human
ggcagguucacagcccagucauuccuaaccaagaacaucagcaccugacuggagggugggaaugagguuccugaccugcu

SEQ ID NO: 4163296 - RNA, 76 nt, Human
ggcagguugguguccugguuacaaggacuuugggaucagauagauccaggcuugagaccaggcucuggcaguugcc

SEQ ID NO: 4163297 - RNA, 68 nt, Human
ggcaguacccuggcacugaguggcuuaugaccucugcuggcauccuguccucgggggccgaugcugcc

SEQ ID NO: 4163298 - RNA, 87 nt, Human
ggcaguaggcagcugcaaacauccgacugaaagcccaucuguggcuucacagcuuccagucgaggauguuuacagucgcucacuguc

SEQ ID NO: 4163299 - RNA, 67 nt, Human
ggcaguaggggcaguguucugguugucaggacuucagagucccagccuggacccugccagugacucc

SEQ ID NO: 4163300 - RNA, 58 nt, Human
ggcaguaguccauuaaauuagauucaauuaaaguugauuugauugaugaacuaagguc

SEQ ID NO: 4163301 - RNA, 108 nt, Human
ggcagucaucuuggccagcccucaauuuuagguauaaggacugcaccugagacugaaggaggcugauauaccuuacaccuaaaaugagaguuggccaacaugacugcu

SEQ ID NO: 4163302 - RNA, 86 nt, Human
ggcagucugcuccuuggcucugcauguuugccucuccuuaggaaagacucaagugggaauagaaaugaaggucugggguuguugcu

SEQ ID NO: 4163303 - RNA, 89 nt, Human
ggcagucuugggucccacaguucagaagagucuacggcuucuggcggcuaugggagcagcuguucugacuugucuacccauauucugcc

SEQ ID NO: 4163304 - RNA, 72 nt, Human
ggcagugagcugagaugcuuuuaggaaaggcugcuagauugugguuucuugauuagucucaugccaacuguu

SEQ ID NO: 4163305 - RNA, 84 nt, Human
ggcagugagucuucacauaggcaguguucaaguuguggucuuaacucuuagaaugugaacuuugucauguaaccacucuaggcc

SEQ ID NO: 4163306 - RNA, 68 nt, Human
ggcagugcaguugguggcagggguuggggagguccaggaaucaacucccucuaccaauuucacaugcc

SEQ ID NO: 4163307 - RNA, 62 nt, Human
ggcagugccacuaagcucugcugugaccucgagguuaccucugaaguuuaugagccacugcc

SEQ ID NO: 4163308 - RNA, 115 nt, Human
ggcagugcggccagcucccgcaggcagcccggguucccgugaauguaggacaguagugugucuggcccccacaggcgggcucggguuccugugccaugcucaccacuugucugcc

SEQ ID NO: 4163309 - RNA, 74 nt, Human
ggcaguggaggcucagggccggagggcauuugccugagaccauggggcaggccaggcccugggcacuucguguu

SEQ ID NO: 4163310 - RNA, 71 nt, Human
ggcaguggcuguagucucuuggaauaugcuaccccaucuaccaguuccuugacaaggacacagucccugcu

SEQ ID NO: 4163311 - RNA, 63 nt, Human
ggcagugguuagaaacaugagcuccagaaucagaaaaaccuguguucagauucugauucugcc

SEQ ID NO: 4163312 - RNA, 64 nt, Human
ggcaguguccuuggggucauccauuauccauguguuggaggagugggacccuagggaagaugcu

SEQ ID NO: 4163313 - RNA, 61 nt, Human
ggcaguguugagccagcugggggcuggacccugcugucuguucugagcacucaucacuguc

SEQ ID NO: 4163314 - RNA, 65 nt, Human
ggcaguucuggaugcauugucacuugguguccauccauguuuucacuagcauccaguaacaugcc

SEQ ID NO: 4163315 - RNA, 122 nt, Human
ggagugcaguggugugaucauagcucacuguagccucaacucuuggacucaagugaucuuccugccucaaccucccaaguaguugagacuacaggugugugcugucucacccagcuaauuuu

SEQ ID NO: 4163316 - RNA, 70 nt, Human
ggagugccaggccaggcugcauuugccccucgcaguaaacccuggggugaaaccagccagccugugcucc

SEQ ID NO: 4163317 - RNA, 74 nt, Human
ggaguggauauuuaaaaaaauuaucuaguuauaauggaauuucacuguauaauuuuuguuugauguccaauuuc

SEQ ID NO: 4163318 - RNA, 84 nt, Human
ggaguggcuaaaguaugucauggccuaguaagucuuucacauuuuccccuuucugccuuaauccauggcauaauuuuccucucc

SEQ ID NO: 4163319 - RNA, 61 nt, Human
ggaguggcuguuucugcccccauuucucaaccaucccuguggaggguccugagccaccucc

SEQ ID NO: 4163320 - RNA, 60 nt, Human
ggaguggggagcgaggcucagcccuguccucuggacagccuggacuggcucucugcaucu

SEQ ID NO: 4163321 - RNA, 103 nt, Human
ggagugggguagguaguggcaggucacgagccuagaggagaugguuuggggccauuuggggcuuuggucuucuagcugugagccaacaggacccacacccucc

SEQ ID NO: 4163322 - RNA, 58 nt, Human
ggagugggugccaagcgggugcaacaggcuccuggcugcucuucuuggcgaccucuuc

SEQ ID NO: 4163323 - RNA, 83 nt, Human
ggaguggugcugguggcuuugcaguuagccuaggauugagcaauugcugcaauuguugcucucugcaucuucgguguuacuuc

SEQ ID NO: 4163324 - RNA, 64 nt, Human
ggaguguaaaguuguagaucccugugggaggcaccagucccuggagggauuucucaaucacuuc

SEQ ID NO: 4163325 - RNA, 62 nt, Human
ggaguguuguuaugucauauuguaauucguaggaaaauuauagaagauuauugcaacagucc

SEQ ID NO: 4163326 - RNA, 104 nt, Human
ggaguguuugugagagcacuguguguugcugugcgcgugcagcggaguguuugugagugcagccuguguugcugugcgcauguugugguuguuuucuucauucc

SEQ ID NO: 4163327 - RNA, 64 nt, Human
ggaguuaaaaccuuaaauuucucugugaucugugauuaggcaaagaaagccaaggucuaacucu

SEQ ID NO: 4163328 - RNA, 65 nt, Human
ggaguuaacaugguccugaaugccuucauagucccauacccugggaggaggcaucuuaggcuuuc

SEQ ID NO: 4163329 - RNA, 63 nt, Human
ggaguuaaggguauucucuccgguaggcccaaaucuacaaagguugaggugcccuggugaccc

SEQ ID NO: 4163330 - RNA, 98 nt, Human
ggaguuaccguugugguuauagguuggugggaagcaauguaaauuauuuuauuacaaugucucucaccugacuucucuuuggcuaacucaguggcucu

SEQ ID NO: 4163331 - RNA, 85 nt, Human
ggaguuauaaaugaaauuuagcaagcaggcaaauucacaaaugcaaaauuuguaaauaaugagguuugacuguauuucugauuuc

SEQ ID NO: 4163332 - RNA, 59 nt, Human
gggaaggagcacaggacuuugauuaucauaagaugugaaaauacuacugucuucuuccc

SEQ ID NO: 4163333 - RNA, 73 nt, Human
gggaaggaugacaggcagugguccagguaaacaaaggugggagucugagcuacgaugccugucaccccuucuc

SEQ ID NO: 4163334 - RNA, 60 nt, Human
gggaaggcagcuucaccacagcauugccuuaggacaggcucugaguagagcugccagccc

SEQ ID NO: 4163335 - RNA, 64 nt, Human
gggaaggcuggucuauacggagacgagacugacaucagucauugcuccaacaagaugcuuucuu

SEQ ID NO: 4163336 - RNA, 86 nt, Human
gggaaggcugugacuucagcucugaacucgagggcgucguuagaacccugaguggccaggcagcugugggaaguuggggccuugcc

SEQ ID NO: 4163337 - RNA, 67 nt, Human
gggaaggcuuuagagagauauaaauuuaucuccuuuauuuaguuuaucuccuuuacuuagccuuuuc

SEQ ID NO: 4163338 - RNA, 77 nt, Human
gggaaggggcgucuguaggcagugggugaggaggcugucucugucccagcuggacccugacagaucucucuuuuccc

SEQ ID NO: 4163339 - RNA, 68 nt, Human
gggaagggggggcgccugagauuugccagccccucgggcccucaggucucugcagccccucugugccc

SEQ ID NO: 4163340 - RNA, 61 nt, Human
gggaagggugcauggagggaaguccagaggaaacuaggcacacgcuuuggugucucucccc

SEQ ID NO: 4163341 - RNA, 55 nt, Human
gggaagguagguaagauggggcaauuugauaaauucugacuugaucuauucuccc

SEQ ID NO: 4163342 - RNA, 74 nt, Human
gggaaguccagugucaaggugccauuagguuuggugauucugauuccaggauggcaccuugaacgcugcguccu

SEQ ID NO: 4163343 - RNA, 100 nt, Human
gggaaguggcauguugucuugucuugacauuucagauaugguauuuuuccagcuuuacugaugaaaaacccugaaguucaauuaaguucauucgcuuccc

SEQ ID NO: 4163344 - RNA, 56 nt, Human
gggaauaggggaaaggaggaguuauuuacauguguagcaccuucaauucuauuguc

SEQ ID NO: 4163345 - RNA, 98 nt, Human
gggaauaugaucuuauuuggaaauagggucuuugcagauguaaucaaguuaagaugaggucauuaguguggacccuaauuuaauaagacuaguguccu

SEQ ID NO: 4163346 - RNA, 75 nt, Human
gggaauauuaguguagguagcuaauauuaguguagguaauauuagguaggaauauuaguauagguagcuuguccc

SEQ ID NO: 4163347 - RNA, 78 nt, Human
gggaaucuuuuaauuauacucaucgaaauuagcagugccucuggccggggcagcaugaugagugcaguuuggaguccu

SEQ ID NO: 4163348 - RNA, 99 nt, Human
gggaauggaauggggucaggaagccacaggacagguagagaaucaaaacguguuggcuguuuuugugcugugucucccugucaugccuugcuccagccc

SEQ ID NO: 4163349 - RNA, 63 nt, Human
gggaauggccaguuagaaaucaaaaagucccauaaauggucuuucaguuaaguggcuaguccc

SEQ ID NO: 4163350 - RNA, 62 nt, Human
gggaaugggaaagaggcagccuuuauuuccugagguucagcaggcugccuccuuccuuuccu

SEQ ID NO: 4163351 - RNA, 79 nt, Human
gggaauguugcagagguaauaaaauugugucaaacaucuucuaaaguguuuauaaauuuucuugccaugcuuuauucuu

SEQ ID NO: 4163352 - RNA, 59 nt, Human
gggaauuauagcugucacaggcucagcaguaaugucuuaggcuuaauaauguaauuccc

SEQ ID NO: 4163353 - RNA, 86 nt, Human
gggacaaaauaagguaauauuugaaaacuguuuagcagcgucccacuucgcuaaugaauuuaaaauaaauguaguuuguuguaccc

SEQ ID NO: 4163354 - RNA, 87 nt, Human
gggacaaaggaucagagguugggagagcuuguuacacauuuuauaaacagaugauucaaacguuugguuuuuugaaaauuacuuccc

SEQ ID NO: 4163355 - RNA, 60 nt, Human
gggacaaaugauuaucacagaggaguacauguguguucucucugugucauuauggacacc

SEQ ID NO: 4163356 - RNA, 100 nt, Human
gggacacucaugaacuuuuucccaggugauauguuccucaaacugcugcaacugcagaaugcugagagcuguccaccugugggaauggucagagggucuu

SEQ ID NO: 4163357 - RNA, 68 nt, Human
gggacacucuuuuuguauagaaaugaacuaaugugcacuaacuugguggaaaugggauaagagguccu

SEQ ID NO: 4163358 - RNA, 64 nt, Human
gggacagagcagcacccagccccucacaggaugauggagugaggaggagguugcucucuguucu

SEQ ID NO: 4163359 - RNA, 56 nt, Human
gggacagcuguagugcuuggcuugaguuccccuccgcauggagcacagagcugccc

SEQ ID NO: 4163360 - RNA, 92 nt, Human
gggacagcuuagcgcuggcugcaaaggauuguggcucaggguuggaagaugcacggacuugguuacauauccuuuggagccucaguuuucuc

SEQ ID NO: 4163361 - RNA, 110 nt, Human
gggacaggggacacugagaaaagauuuuguugaacugagggacaccugacagccacuuaaguggcucagugcauucacaguaaaaacuauuuugccuucuccccauaccc

SEQ ID NO: 4163362 - RNA, 76 nt, Human
gggacauguccucagaagccugcuuagcuucuuagccacuagcaagaaggcagacuuaccuucuggggagaugccu

SEQ ID NO: 4163363 - RNA, 122 nt, Human
gggacauucuuccacaaagacuuagcuuuuuccuccguucauaccucugcucccauuacccacuucccuuaugacauggcaugauaggaggugcagaauggaaagagcugauggagauuccc

SEQ ID NO: 4163364 - RNA, 125 nt, Human
gggaccaagguuuacgcccccaagcugauccgucccuggcugggggcugccuugggugagguggcuacucuguucuaccaaggcaguuccccagagggcugacagcucugugaccuugaaguccu

SEQ ID NO: 4163365 - RNA, 65 nt, Human
gggaccagaagaaggauggugaaauucccaggauuauacaagcucacuuuccucucuuugggccc

SEQ ID NO: 4163366 - RNA, 57 nt, Human
gggaccagcuggugaaaaccaauuguuaaauagacaggaauuuuacaagcugguugc

SEQ ID NO: 4163367 - RNA, 74 nt, Human
gggaccccagggcugccagccuccuaagggacagagacauugggaucggcccuggugagcccuggguagguccu

SEQ ID NO: 4163368 - RNA, 125 nt, Human
gggacccuggacuuucgaagggcgggcagagccgggaggcagcgagaggaaagucccacucggcuccuuccugugugggccccuugguuuccugagccacugucauuuaccgaaagucagggccc

SEQ ID NO: 4163369 - RNA, 60 nt, Human
gggacccugggcucugggccuauccagcaaggauggccuaaaaugcagacccuggguccu

SEQ ID NO: 4163370 - RNA, 102 nt, Human
gggaccgugcacccguggcuaucagagccccuccgcugucccacccugggccugggacacgggccuggggcagugugugucugcuggucaugugcuggugcc

SEQ ID NO: 4163371 - RNA, 63 nt, Human
gggaccuagggcuuucuggaauacaguuugaaaaucaguguguccugugaucucuaggguucc

SEQ ID NO: 4163372 - RNA, 58 nt, Human
gggaccuggcgagggucacacagccuuucugugauagggcguugaucucccagcuucc

SEQ ID NO: 4163373 - RNA, 70 nt, Human
gggaccuugcagaugugacuaaauuaaugaucuagagaugaggagauuauuuuagguuauccaggggccc

SEQ ID NO: 4163374 - RNA, 56 nt, Human
gggaccuugccugcucaagccuccauugcccuggcccgagcauggcacaggcuccc

SEQ ID NO: 4163375 - RNA, 79 nt, Human
gggacgagagagacauaggaguuuuuauucugguaauuuauguuuaacagaagcauugacuccuugcucuucuucuucc

SEQ ID NO: 4163376 - RNA, 120 nt, Human
gggacgcagcaccaagaucccauuuuagagucuguuccuaggauccuuccuggcaccaacugucacagguuggguucccaggaaaacacucgaggacggagauuugugugcaggcuucuc

SEQ ID NO: 4163377 - RNA, 63 nt, Human
gggacgggcaguccaaggggucuaggaacugguaucguuaauaaccuccagaguguuuguucc

SEQ ID NO: 4163378 - RNA, 75 nt, Human
gggacggggcugcgcucuuccugccgcuucggccggaggcuucauugugcagugggaagaaugcagccuccuccc

SEQ ID NO: 4163379 - RNA, 72 nt, Human
gggacggucacgagcagagcucccaaggggaccgcuggggacugggcgggggcucugcuucucaccuguucc

SEQ ID NO: 4163380 - RNA, 88 nt, Human
gggacuacaggugcgugccaccaugucuggcugaguuuuguauuuuuugauagagacgggguuucgacauguuggccaggcugguccc

SEQ ID NO: 4163381 - RNA, 97 nt, Human
gggacuaggcuaaggcaaacaaagcacaggaucuugaggagcgagugccuucuuaaauuuuguaccuuaggugccuugcuugccucacacuagugcu

SEQ ID NO: 4163382 - RNA, 90 nt, Human
gggacuagguaagccaugacaucugcacugcuuucugagucauugucgugaaaugauacaugcuuggguguagugcggcuacuugguucc

SEQ ID NO: 4163383 - RNA, 63 nt, Human
gggacucagggcuggguucucugcaaaccuguccacagggaggccacaguccugaggcauccc

SEQ ID NO: 4163384 - RNA, 98 nt, Human
gggacuccaugggccucugugccuuaaugccaguucucugcgauaauguccugguuauuccuaauacuuguuuuggggaccagggguccugagagccu

SEQ ID NO: 4163385 - RNA, 80 nt, Human
gggacuccuucauuugcauuuggauaauugugcaguuauaugauuuguuacauggagaccagauggaaguaagagagcuc

SEQ ID NO: 4163386 - RNA, 68 nt, Human
gggacucugagggucucucucggcuccacgcgcccacucaagugucgcggcagaaagagucggagccc

SEQ ID NO: 4163387 - RNA, 100 nt, Human
gggacugaaauacagcaggagagaagcagaacugggaaguagugggucugauaugccccagugcuaagguagccucugcugcucugcuggcuucagucuc

SEQ ID NO: 4163388 - RNA, 57 nt, Human
ggcgagggaaguuuacugugaguugggcuugucuuucucuagguaagguucucagcc

SEQ ID NO: 4163389 - RNA, 58 nt, Human
ggcgagguguccucagccaacucugcuacaccugaagcuugucccugaggucgcugcc

SEQ ID NO: 4163390 - RNA, 56 nt, Human
ggcgaggugucugccaucaagcuggcuucugcccugaauggcagcagcagcucucc

SEQ ID NO: 4163391 - RNA, 130 nt, Human
ggcgaucucagccuccagcuugaccuugauguuuggcagggccugguacuccugggccuggcccugucccucugcccaggucugugccagcucugacuccaggugcagcaggaucccauugaguuguucc

SEQ ID NO: 4163392 - RNA, 56 nt, Human
ggcgcaagcggggguugugagcguuggucaaacaugcuggcucaaaugcuuguguc

SEQ ID NO: 4163393 - RNA, 59 nt, Human
ggcgcaaggugcagucggagaaggccaaccugaugauccucuuugacaaguaccugccc

SEQ ID NO: 4163394 - RNA, 56 nt, Human
ggcgcaggccccccuggagggccccgcucagggccucucgccagcggggcugcgcu

SEQ ID NO: 4163395 - RNA, 57 nt, Human
ggcucuugcccgcccaggcuggcacaguugccauccagggugccugggcggagagcc

SEQ ID NO: 4163396 - RNA, 99 nt, Human
ggcucuugcuccauccccacugccccuggugauggacgccaugggaaauggugagcaaggcagggagguggagggagguggggaggaggagggggagcu

SEQ ID NO: 4163397 - RNA, 73 nt, Human
ggcucuuggucugccugaaggggccuggggcuauuuguacuccaccccagguccuggcagcugacucagggcu

SEQ ID NO: 4163398 - RNA, 60 nt, Human
ggcucuuuagaguugaguuucuaugagaacugaguuccuguuccaucucucaacuuugcc

SEQ ID NO: 4163399 - RNA, 73 nt, Human
ggcucuuuuagguguuuugcucaggauuugagacacguuuucucucccucagaggagcaccuguugaagaauc

SEQ ID NO: 4163400 - RNA, 61 nt, Human
ggcugaaacagauuucaagacacugcaaugucagugacuugaaaagaaucuguuucuugcc

SEQ ID NO: 4163401 - RNA, 58 nt, Human
ggcugaagcgauccucccaucucaaccucccacguggcugagacuacaggcgcuugcc

SEQ ID NO: 4163402 - RNA, 100 nt, Human
ggcugaaggauacugagggaaucauaugccuacagagcagcaggaccagaguuuguauccagaucuguccagcucuggggcucaccucuuccuguuagcc

SEQ ID NO: 4163403 - RNA, 67 nt, Human
ggcugaagggaggcggccagugcggggcccugggacucugcgccacccucgccugcucgcaccagcc

SEQ ID NO: 4163404 - RNA, 70 nt, Human
ggcugacauuuggugcugugugucuugguccugacugacaaaggcagcacagcaacugcucaugucagcc

SEQ ID NO: 4163405 - RNA, 93 nt, Human
ggcugacccucugugggccuggcugggcugccggggccacccuggcggugaccaccccuggcagcgccgaagcuggccccaugugggaaagcc

SEQ ID NO: 4163406 - RNA, 115 nt, Human
ggcugagagaagugugccuuccagaagugcuccuuucauugcugcccaaauccaaaccucuucuuugagaagggaagggcacaagaaaggagguaccugaacccuucucugaguc

SEQ ID NO: 4163407 - RNA, 77 nt, Human
ggcugagaguauuuguaccugugaauuccucagcaggauuuauuccuugagcuguaggaaugacauguaccuuaguu

SEQ ID NO: 4163408 - RNA, 69 nt, Human
ggcugagagugagcacuggauauaauucauuuugauugaaauugauaugguguuauuguucuuccaguu

SEQ ID NO: 4163409 - RNA, 57 nt, Human
ggcugagcacuuuaggcaggagcccauucuggcugggauuccugccugcgggcuccc

SEQ ID NO: 4163410 - RNA, 77 nt, Human
ggcugagcagcucuggcuauugaggaccacccugaggaauaagggugguccucacccuacccagcugcuccucaccc

SEQ ID NO: 4163411 - RNA, 96 nt, Human
ggcugaggcagacggauuaccugaggucaggaguucgagaccaaccuggccgacauggugaaacgcugucucuacuaaaaauauaaaaaauuagcc

SEQ ID NO: 4163412 - RNA, 76 nt, Human
ggcugaggcagguggaucaccgaaggucaggaguuuaagaccagccugaccaacguggugaaaccccgucucuacu

SEQ ID NO: 4163413 - RNA, 70 nt, Human
ggcugaguccccuucaucuggaugucugguuagaagaacucucauccagaguccaaggcugggcucuccc

SEQ ID NO: 4163414 - RNA, 72 nt, Human
ggcugauacaggaguauuuaaucagaaaauuguccuagauuuucacagguacaaacacuccugauguucgcu

SEQ ID NO: 4163415 - RNA, 82 nt, Human
ggcugauagauuucagguuuugucucugucuacaugaucucaccaugauagaaaaugaagacgagauaaaauggugucagcc

SEQ ID NO: 4163416 - RNA, 69 nt, Human
ggcugaugacuggagaccucaguagggucuccaugacaaagacucucucugauggaacuuuagccagcc

SEQ ID NO: 4163417 - RNA, 78 nt, Human
ggcugaugcagcacaacuuucuuucacagaaguaucuugcagaauacaguaugagauacagaaaggcugcauugaguc

SEQ ID NO: 4163418 - RNA, 77 nt, Human
ggcugaugcuggacacaugcuggaugaauuaccuacacauggcucuuuuguguucacauggcauuuucacaucgguu

SEQ ID NO: 4163419 - RNA, 72 nt, Human
ggcugauuggcauuccauuguauguguagacuauauuuaucuaucuuuucauucaacaauggacaguuggcc

SEQ ID NO: 4163420 - RNA, 63 nt, Human
ggcugcagagggguugaaggguccaggcacuagcugggcucuuuuaccucuccucugagggcc

SEQ ID NO: 4163421 - RNA, 55 nt, Human
ggcugcagcagagggacucacgggggugugcagguucugaggccucugcugggcc

SEQ ID NO: 4163422 - RNA, 75 nt, Human
ggcugcaggagggcuggggaagccagacucaguccccuagaccugggagcugggcuccuugcccauccagcagcc

SEQ ID NO: 4163423 - RNA, 74 nt, Human
ggcugcagguugguuggcagcuagagagacucccccaucuuccccgucauauuuuugccagcuaagcugcagcu

SEQ ID NO: 4163424 - RNA, 86 nt, Human
ggcugcauuacaguuugaguccauuauaguuauugcaaguuaaauuguuuauaguaagugauuuguaguauacuaugacuucagcc

SEQ ID NO: 4163425 - RNA, 57 nt, Human
ggcugcauugcuauaaaauacaauccauuccuuuuuguuaacaauagcaauguaguu

SEQ ID NO: 4163426 - RNA, 65 nt, Human
ggcugcccuaugcggugggagcuggggugcccagagccucaaugcccaccccauaaggcagaacc

SEQ ID NO: 4163427 - RNA, 61 nt, Human
ggcugcccucgucuacugcccaugcuguccucacagaccuuucagagaagagguguuaguc

SEQ ID NO: 4163428 - RNA, 63 nt, Human
ggcugccgagugguggguauugccuuauagcugcucugcccugcaaggccuaucauggcagcu

SEQ ID NO: 4163429 - RNA, 71 nt, Human
ggcugccgccccaccugcuaccuuccagcagccguccugggcgcugucccaggcaggcugggguggcagcu

SEQ ID NO: 4163430 - RNA, 94 nt, Human
ggcugccgggggcccaccgccgcccaggcaaggccgcccugccuugggcgcagcgcugccauggcugggggccguggggcccccgggcgcggcc

SEQ ID NO: 4163431 - RNA, 63 nt, Human
ggcugccuacuuucccagaguuuguaccaugucuuuugagaauggucuguggagagggcaguu

SEQ ID NO: 4163432 - RNA, 55 nt, Human
ggcugccuccacugcuugucccagagaauacagaggcguuggcaguuuggcggcc

SEQ ID NO: 4163433 - RNA, 64 nt, Human
ggcugccuggaaacagugagcgaaggaaaugaggcuucuaccucccugcuguuuccauggggcc

SEQ ID NO: 4163434 - RNA, 57 nt, Human
ggcugccuggaccuccucuuucagguuaacgcugacagaauggaggcucaggcuguc

SEQ ID NO: 4163435 - RNA, 81 nt, Human
ggcugccuguguggggacugaagcugggcgcuggcugcugcgcgagaugagggggccagguccagcuuccaaagggcagcu

SEQ ID NO: 4163436 - RNA, 56 nt, Human
ggcugccuucagacuccagcuucagccucaucucuucccugggucuccaggcugcc

SEQ ID NO: 4163437 - RNA, 59 nt, Human
ggcugcucaaggacucugaucgcuagauccuuuuuccagcuucaugucucugggcagcu

SEQ ID NO: 4163438 - RNA, 66 nt, Human
ggcugcucggagagagugugacgguggauuccauaaauuaacugaaaaucccucuucuccggagcc

SEQ ID NO: 4163439 - RNA, 70 nt, Human
ggcugcucugccuuccagcugggaggaggccauuguaugggugcuggggacagagggaaggggagcagcc

SEQ ID NO: 4163440 - RNA, 86 nt, Human
ggcugcugacacaguaaccccaggacugggacccuuuaucaguuugggugcuucagcuuucuuggugucaccauguuucagcugcc

SEQ ID NO: 4163441 - RNA, 79 nt, Human
ggcugcugggcaccacccaagggagaccugucccugagccagcccugcagcccucccugggugugucugcccugcagcu

SEQ ID NO: 4163442 - RNA, 73 nt, Human
ggcugcuuuauggcacacaaauaucaaaaugaguuuuauacauuugaauuagugauuccaugcaaaugcaguc

SEQ ID NO: 4163443 - RNA, 83 nt, Human
ggcugcuuuucugguuacaguggcagaguuggguaguugcaacaaaguauuuacucucuggcccuuuagaggaaaagcuggcc

SEQ ID NO: 4163444 - RNA, 87 nt, Human
ggcuggaacuguucugguggguccagagguuaucagcccaggacuugacccucucuggcugagucugugacccaugcguuuccagcu

SEQ ID NO: 4163445 - RNA, 57 nt, Human
ggcuggaagagacugaggacacuggccagguugucaagaucugagucuuguuccacc

SEQ ID NO: 4163446 - RNA, 78 nt, Human
ggcuggacauggggacugaugggccggguguguucauggcgcccuuguggcacugccaucaggccuccguguccagcc

SEQ ID NO: 4163447 - RNA, 63 nt, Human
ggcuggagucagcaaggacgaggccuaggacagggagcccagccuccgccuuccugucucccc

SEQ ID NO: 4163448 - RNA, 83 nt, Human
ggcuggagugcagugaguuaugaucaugccacugcagugcaguggugccaucauagcucacugcagccucaaacuccuaagcu

SEQ ID NO: 4163449 - RNA, 105 nt, Human
ggcuggagugcgguggugcgaucacgguucaccgaagccuccaccucccaggcucagcaauccucccacaggugggcccacaggugugcaccaccacagccagcu

SEQ ID NO: 4163450 - RNA, 62 nt, Human
ggcuggagugcugaggugcaguggugcaaucauagcucacggcagccucaaacuccugagcc

SEQ ID NO: 4163451 - RNA, 70 nt, Human
ggcuggcaauggaggcagcaccccagcagcuuauuaucugauugagguaguggccuccaaaugaauggcu

SEQ ID NO: 4163452 - RNA, 79 nt, Human
ggcuggcacaaaggcauaggauguggaaucggcaggcucugcuacucguccacaggcugugugaccuuggauggugguc

SEQ ID NO: 4163453 - RNA, 78 nt, Human
ggcuggcaccuuccugggaugaaagcagcccacugugcugcaugugcucugaaaaucucagaagaaaguaugccagcc

SEQ ID NO: 4163454 - RNA, 73 nt, Human
ggcuggccaggcugggcacaugauugcaggagccuguguccugcagcaaauggggcccguccuggcagcagcc

SEQ ID NO: 4163455 - RNA, 60 nt, Human
ggcuggcuacauuggaggaaggaaaacuggucgcaucccuagcccugcaugugcacagcc

SEQ ID NO: 4163456 - RNA, 65 nt, Human
ggcuggcuaucugugguugccugccaaucuucugcagccagucaguccccagaucccugccagcc

SEQ ID NO: 4163457 - RNA, 75 nt, Human
ggcuggcucagagaaggcugaggaucccuguguucucccugaacagggguacagggccccucagcagggccagcu

SEQ ID NO: 4163458 - RNA, 58 nt, Human
ggcuggcucagggcuugagagaaucuagcaaaaugauucuaugacucgucagucagcc

SEQ ID NO: 4163459 - RNA, 64 nt, Human
ggcuggcucauuuuagcaucagguuucauuucuaaugucaccucugccaagaugugcucccgcc

SEQ ID NO: 4163460 - RNA, 56 nt, Human
ggcuggcugcuaggacagcuacagagagaagggcucuguuggccuugcaggcagcu

SEQ ID NO: 4163461 - RNA, 96 nt, Human
ggcuggcuguggagcugagcaggcuccaggcuggccaucuggaacaccugcagcuggcccagcguggggccgugcgccaguccaaacggcccagcu

SEQ ID NO: 4163462 - RNA, 63 nt, Human
ggcuggcuuugcacugggugcauggucacagggaauugacacagucuagugggguagccagcc

SEQ ID NO: 4163463 - RNA, 63 nt, Human
ggcugggaaugggccuagaaggcuggcuuugcagccagaagcccgcuuccuaacuucccagcc

SEQ ID NO: 4163464 - RNA, 63 nt, Human
ggcugggacgaugaggauuaguuuaacgagguuuguuugcacagaguuccguuggccccagcu

SEQ ID NO: 4163465 - RNA, 88 nt, Human
ggcuggucuggaacuccugaccucgugauccacccaccucggccuccugaagugcugggauuacaggcaugagccaccacacccagcc

SEQ ID NO: 4163466 - RNA, 66 nt, Human
ggcugguuccuccaucagcaggaagucuaaaaaggcaaguucaauucugaugaaggcaauacaccc

SEQ ID NO: 4163467 - RNA, 66 nt, Human
ggcugguucguugagucuuucaucguugagugauaccaccucugcagauggcucaguggggcagcc

SEQ ID NO: 4163468 - RNA, 74 nt, Human
ggcuguaacacacagaaggaagccccacuuaaucaaaaguaacugggccaacuccuccugcccaaccccaugcc

SEQ ID NO: 4163469 - RNA, 83 nt, Human
ggcuguaauguauuuguucagaagaguuagcccaaaaacuccuaaguagauucuuuagccagcagguauauauccaaucaguc

SEQ ID NO: 4163470 - RNA, 102 nt, Human
ggcuguaauucaauagaaaauuucugauaaacguaagcugcaagaaucuaguucuagccaggguacauuuugucagagccuccugugaauugaauuacagcu

SEQ ID NO: 4163471 - RNA, 83 nt, Human
ggcuguaggaagacugugcagagcugagacccaaaaucuggccuccugauuccugauucaugcucuuuguacuuccuugagcc

SEQ ID NO: 4163472 - RNA, 79 nt, Human
ggcugucaccucuuucagcuauaacauugagacuuuccccauaggaaagcuuuugauuuuuaguuugauggaacaugcc

SEQ ID NO: 4163473 - RNA, 82 nt, Human
ggcuguccaugcgaauguaacaggugaagcucugagaguacauaacccuccagugcaaugauacauucucauauguguagcc

SEQ ID NO: 4163474 - RNA, 82 nt, Human
ggcugucgggguuaugaggggaguggggcuguggccaggacagggcggccccgugccuggcucucugcagauccuggcagcc

SEQ ID NO: 4163475 - RNA, 97 nt, Human
ggcugucuagaagagucaguuguugcaccacuagugucuguuuuauuucuacauggguguuaugggcgaugcaaaccugauuuucuucgaaucggcc

SEQ ID NO: 4163476 - RNA, 78 nt, Human
ggcugucucaugugucuaucaugugggucaucuggaggcuuggccauccaggcuggccucgcgugacauguggcaguu

SEQ ID NO: 4163477 - RNA, 73 nt, Human
ggcugucugcccagcuucaggagauacaguccagccuccuuggugacugugugaggcugggugagucacugcc

SEQ ID NO: 4163478 - RNA, 55 nt, Human
ggcugucugugguggagcguugugcacccucaggaugauaccaucacuggcaguc

SEQ ID NO: 4163479 - RNA, 59 nt, Human
ggcugucuugaucauuuacaggccaauugugaagccacugaugaaaucacugggcagcc

SEQ ID NO: 4163480 - RNA, 62 nt, Human
ggcugugaacacucuuagcauccauucaaagauaggaagaggugcagggauucuucacagcc

SEQ ID NO: 4163481 - RNA, 56 nt, Human
ggcugugaggaaugaauuugaugguguucaaauaugaccaauuucauccuuaagcc

SEQ ID NO: 4163482 - RNA, 71 nt, Human
ggcugugagugucuauuaacacgugcacuuuugcuucacaaauggaggaaaaaccuguuaaugguagagcc

SEQ ID NO: 4163483 - RNA, 70 nt, Human
ggcugugcagaggugagaauccaaccucccacccugggucugcggucucuuugguucuccuuccacaguc

SEQ ID NO: 4163484 - RNA, 56 nt, Human
ggcugugccaccagugcuuuugaaauauaucucacaaagcagcccauggcacaguc

SEQ ID NO: 4163485 - RNA, 58 nt, Human
ggcugugccucuucugccacuggacuuuuuguucagcuaggaauggagaugcuuagcc

SEQ ID NO: 4163486 - RNA, 59 nt, Human
ggcuguggaguacagagcugguucagaugaaugaauagcuuucucaugacuucaccccc

SEQ ID NO: 4163487 - RNA, 69 nt, Human
ggcuguggggccggguacagugacagaccugagaccccaucagcgcugacaccauaggccccaagagcc

SEQ ID NO: 4163488 - RNA, 59 nt, Human
ggcuguggucugggugcuccccauccacuaucuaaagugcagcccccagacagcaggcc

SEQ ID NO: 4163489 - RNA, 68 nt, Human
ggcugugguggcucaugccuguaauuccagcacuuugggaggcugaggcaggcagaucacuugaggcc

SEQ ID NO: 4163490 - RNA, 69 nt, Human
ggcuguguaauacuccauuguauggauggaccauauuuuguuuauccuuucaucugguaauauauagcu

SEQ ID NO: 4163491 - RNA, 63 nt, Human
ggcuguguccuguaugauuauuuauggaaagagagucagacaaucaggccgaggacaucagcc

SEQ ID NO: 4163492 - RNA, 80 nt, Human
ggcugugugguccagcccugguggagaggggcggagcggccacugcuccaaccaccgccgccaccgccacacucgcagcc

SEQ ID NO: 4163493 - RNA, 55 nt, Human
ggcuguguuccaagugucaggaucaaguggauccaaugaccuauucagcaaagcc

SEQ ID NO: 4163494 - RNA, 74 nt, Human
ggcuguuccuucugccuggauuccauucuccagccccuucuguuggcagcuguguccagguagaaggaauggcu

SEQ ID NO: 4163495 - RNA, 77 nt, Human
ggcuguugccccugagagacugggcagggccggcagcucuuugcuugcugauucucucaucucccagagcaacagcc

SEQ ID NO: 4163496 - RNA, 62 nt, Human
ggcuguugggcucucagucagacuggcaaauggaugccauuuuugaguggggccucagagcc

SEQ ID NO: 4163497 - RNA, 100 nt, Human
ggcuguuguaaagaggaaugucagugacauuacagcagugccucucauuggaguaagcacacaugugaguguccuuucuuccuccuuuauuccuuuaguu

SEQ ID NO: 4163498 - RNA, 75 nt, Human
ggcuguuuggagaguucugcugugucucagcagguuuucaguaaagcugucaugggagagcuuggaaagcagacc

SEQ ID NO: 4163499 - RNA, 77 nt, Human
ggcuguuugucucuguguggcuucccuagggcucaccuggaagcccugggaagacuccucaggaggcgugcugagcc

SEQ ID NO: 4163500 - RNA, 70 nt, Human
ggcuguuuguucuuuuguaccuaaggcauuaacuaauaaauccucaggucaaagcaggagaaucuaugcc

SEQ ID NO: 4163501 - RNA, 81 nt, Human
ggcuguuuucaguguuccuuggagcgcuaaagcucuaagguuccguaacuuuauagcgagcucuccaggaaagcauaagcc

SEQ ID NO: 4163502 - RNA, 67 nt, Human
ggcuuaagaacagcugagaagugauagcugcauucccaucuugauugcagcauuauucacaguagcc

SEQ ID NO: 4163503 - RNA, 59 nt, Human
ggcuuaagauuugagauaccuaauaccuagcuggcauuagguaucgcaaaucuuaagcc

SEQ ID NO: 4163504 - RNA, 62 nt, Human
ggcuuacacuucaucucauccaggagcaucugucuugggggccccugggaugagggugggcc

SEQ ID NO: 4163505 - RNA, 65 nt, Human
ggcuuacuguagaaggaaccaacuagucugauuggcaaaagcugggaagaguuuucugcagagcc

SEQ ID NO: 4163506 - RNA, 79 nt, Human
ggcuuagagguccacuuagucccuuaggagacagauggaagaauaaguuaguuugaauggacugagaaucuugagagcu

SEQ ID NO: 4163507 - RNA, 76 nt, Human
ggcuuagagucauggaguugaacugugcuuccuuauaccaagagaagugagcuuguucacucuucccucuaaagcc

SEQ ID NO: 4163508 - RNA, 73 nt, Human
ggcuuagggcggucucugcaggcguguuggacuucagugcgcuccgacacccagcuuuugaaugcccugcucc

SEQ ID NO: 4163509 - RNA, 72 nt, Human
ggcuuagugaguuugcucagugccuacagaaaucagaaauguguuuaccaaggcauaguaaucucugaggcc

SEQ ID NO: 4163510 - RNA, 65 nt, Human
ggcuuauaaauauuaggcuuuggguaaaaacuaauacuguggauucaaggggaguaguaugggcc

SEQ ID NO: 4163511 - RNA, 74 nt, Human
ggcuuauuuaauuuucacagugcugugagauaauaauagcuaucgucaguccugugagauauuauuauuaaucc

SEQ ID NO: 4163512 - RNA, 78 nt, Human
ggcuucaacagguguuugcugaauucaucucaggaacaaaaguagccacagaugaaguaaacaacucuuugagaagcu

SEQ ID NO: 4163513 - RNA, 74 nt, Human
ggcuucaaguugggcggcgggcagcgaacuugacagaaccucgaaacucugcagauccgccgcccaacccagcc

SEQ ID NO: 4163514 - RNA, 57 nt, Human
ggcuucacagccccauuagugcucuugcuuuccggcugaaguguggucuguggagcc

SEQ ID NO: 4163515 - RNA, 58 nt, Human
ggcuucacaguuguagcagcucaccaccaaggcucuuaguucugccagcuguggggcc

SEQ ID NO: 4163516 - RNA, 61 nt, Human
ggcuucagacaucaaacuggaaguuuucugaauuuaggauaucagguagaucuuugagguc

SEQ ID NO: 4163517 - RNA, 55 nt, Human
ggcuuccagccuuuucuccucugugggucaccucaagaugacaaggcuggaggcu

SEQ ID NO: 4163518 - RNA, 56 nt, Human
ggcuuccagugugcccuggucucuaaacaacaggcagaaauucucacacugaggcc

SEQ ID NO: 4163519 - RNA, 76 nt, Human
ggcuuccggggugaggggccgacuucagggccuuuuuccuaaaagaagcuucaaggccggccuccucuggcaggcc

SEQ ID NO: 4163520 - RNA, 86 nt, Human
ggcuuccuagggcuacgguaacagauaccacagacugguggcuuccacagcccaaguuuauugucuguaucacagcuccggaagcu

SEQ ID NO: 4163521 - RNA, 93 nt, Human
ggcuuccuauucuguguuuuuaguuuguucugugacaguucuaugcuaccuuaauuuuuacaguuucuaguaauacuugauaucugguaggcc

SEQ ID NO: 4163522 - RNA, 56 nt, Human
ggcuuccugggcauguguucuaaugcagucacacaggacagguguucagaggggcc

SEQ ID NO: 4163523 - RNA, 68 nt, Human
ggcuucucccugggaguccacugaugucagcuguggucacuaggcaucagggcuucuaggaggcagcu

SEQ ID NO: 4163524 - RNA, 59 nt, Human
ggcuucucuaaagaucaugcgugaacccaacaaaacgcauuuccgggucagaagaagcc

SEQ ID NO: 4163525 - RNA, 67 nt, Human
ggcuucugcagcagggcuugcccaccucugagugggagugaaaaguaggcccuccugcuccccugcc

SEQ ID NO: 4163526 - RNA, 67 nt, Human
ggcuucuggugaaccucggguguauucucaaaauuauguguugugaauucuuaaggucacuaaaguc

SEQ ID NO: 4163527 - RNA, 66 nt, Human
ggcuucuuccugugaacauguucuguugaaagugcuaccgaaaaaggauacuguucuaaaggagcc

SEQ ID NO: 4163528 - RNA, 66 nt, Human
ggaugaagcacagaaugguuaacaugucguuaugcugucaguugacaaauuuuugcugcuauauuc

SEQ ID NO: 4163529 - RNA, 80 nt, Human
ggaugacagacagcaaaugguuuucugucugaggcuggauugaccaggcccgggcacugccuuuguugauuugucucucc

SEQ ID NO: 4163530 - RNA, 88 nt, Human
ggaugaccugcuuuucuuuucuacagaggaggugguugggagugguuucuucauuugugagaugcuuccuuugguaaagugguuguuc

SEQ ID NO: 4163531 - RNA, 67 nt, Human
ggaugacugaugucuggggcagagucuagcuuuuuagaaggcagacucuuccuccgacauccucucc

SEQ ID NO: 4163532 - RNA, 74 nt, Human
ggaugacugcuuuuuguaggucccagaggcaacuguucauagaucuuuuugguagccaacaaaauguugucucc

SEQ ID NO: 4163533 - RNA, 79 nt, Human
ggaugacuugugcuuuuuccgggcuguuuucagaaagcucuguaacucauguccuaggaguaaagcacccugcucaucc

SEQ ID NO: 4163534 - RNA, 75 nt, Human
ggaugaggauauaaggaugccaaugacaucuugcagugucuaggucuagguuggcaauuccuaauaauuacaucc

SEQ ID NO: 4163535 - RNA, 58 nt, Human
ggaugagggcagcuauguaaguguaagucauuaucauuaaacuaaacugccuuccucc

SEQ ID NO: 4163536 - RNA, 64 nt, Human
ggaugaggugggcucaagucacuugcuccuaaguuauucaucuggaagcagagcccaugcauuc

SEQ ID NO: 4163537 - RNA, 97 nt, Human
ggaugaguuugagcaacauacaugguucucagcccuugcccuaccuuuuguuucucugguguauugguggaggcccaugucaugugugaacugauuc

SEQ ID NO: 4163538 - RNA, 113 nt, Human
ggaugauaguuaacauuuauugaguguuuaucugcaggaaucugugcuaggugcugcauagacauuaccucauuuauuccucacaacaacauucaagguagaacuuaucaucc

SEQ ID NO: 4163539 - RNA, 82 nt, Human
ggaugaucccccucuugggcuauaaauauaaccauaugaugccauacaugaauauaugaaguucaacagggauaggguuucc

SEQ ID NO: 4163540 - RNA, 79 nt, Human
ggaugauugugagguuuugaaugauaguauuggaccuaagaaauaggauuagcaucaugaucagaacuguugagaaucc

SEQ ID NO: 4163541 - RNA, 57 nt, Human
ggaugcaaggggaaagacuguuuagacuaggcuacacaacaguaccccccuuguucu

SEQ ID NO: 4163542 - RNA, 76 nt, Human
ggcuuauucguuuucuaggaccaacagagacgggggacauuagguuuguuuguggcguaguuccuaggaagaagcc

SEQ ID NO: 4163543 - RNA, 85 nt, Human
ggcuucaagccucuccagugccucccagugccuuucggguagaccccagguccuccaggccacugcagaggcucugaucucugcc

SEQ ID NO: 4163544 - RNA, 104 nt, Human
ggcuucaaggguguagacagauguacauucuaaguauguguaguuuauuguacuuuaauuauauguuaaugaagguauaauuguuuuaaaaauccuuauuagcu

SEQ ID NO: 4163545 - RNA, 57 nt, Human
ggcuucacagagcaucucggagcaacgccuaaugcagccugggaaaucugggaagcc

SEQ ID NO: 4163546 - RNA, 77 nt, Human
ggcuucacauauaaauacagaggggucacaauucacuccauaauggguggauuugcuaccuucugauaugaagggcc

SEQ ID NO: 4163547 - RNA, 129 nt, Human
ggcuucacccccagggaggcugccagacuuuugguuaaggaccauggcucuggggacaguaagucccacauccgaaucugaggugagcuccccaggccagucacuuggccccuuggaaccuccuugucc

SEQ ID NO: 4163548 - RNA, 56 nt, Human
ggcuucacuccucaagccuggguguuagaggcaaccacaggugggucagugaggcc

SEQ ID NO: 4163549 - RNA, 63 nt, Human
ggcuucacuuccgcaugcuggccuuucucccccggcugaggccacagccugggaggugacguu

SEQ ID NO: 4163550 - RNA, 111 nt, Human
gggauuagugagaaggccuuguucaccaugggaugacaacaguuguacaacucgaaaacuguuggcuucugguagugaccaugcauggcgccaagcucacccccuaauccc

SEQ ID NO: 4163551 - RNA, 95 nt, Human
gggauuccucaggccggagauggccagccagaaagaagccuuugacccagaggcugcucagcugucuggcccacuacuggcccuguggugcuccc

SEQ ID NO: 4163552 - RNA, 89 nt, Human
gggauucgcucuuuugugcccaggcuggagugcagaggcgagaucucggcccacugcaaccuccgccuccccggguucaggcgagucuc

SEQ ID NO: 4163553 - RNA, 66 nt, Human
gggauucugaggcuuucccguccccuccucacucaacaggccaggggaaucuaacuucggaacccc

SEQ ID NO: 4163554 - RNA, 76 nt, Human
gggauugcuauauuucuuggcuuuaaacacugaugagagugaaauguuuaaggaagaaauaauuccaguuuuaccc

SEQ ID NO: 4163555 - RNA, 96 nt, Human
gggauugguauuuuauggcuuugucuuaaaauucucagcaauguuuuguuuucuuuuaaaagccugaagauuauaaacagacauaagagcaagccc

SEQ ID NO: 4163556 - RNA, 89 nt, Human
gggauugucuccauccugccuuuagggaaaagcaagcuacccaucuagggucuggguagagcaccccgggaagagcaaggagacauccc

SEQ ID NO: 4163557 - RNA, 77 nt, Human
gggauugugguggugauggugccaguaguuuguuuaguauccugagacaaugcaccagcaucuucaccagcuguucc

SEQ ID NO: 4163558 - RNA, 77 nt, Human
gggauuguguuaggaugcagauucugauucaauaggucuuggguaggccugagaaucugcauuucuaauaagcuccc

SEQ ID NO: 4163559 - RNA, 61 nt, Human
gggauuuguguaguuuuguccgugcuguuauauggugcacugggcagagccagccaguccc

SEQ ID NO: 4163560 - RNA, 93 nt, Human
gggcaaacacguuuauuccauguauauauacugaauuccuacuaugcaccuucaacaauaaaggcuuuugguauauaggaguauacugagccc

SEQ ID NO: 4163561 - RNA, 67 nt, Human
gggcaacacauagcucaguaucacuuacuuugaugccaaaaugugaggaagaggggcuugguugccc

SEQ ID NO: 4163562 - RNA, 71 nt, Human
gggcaacagugucaagggguggcccaggcccuggagccaacccuggaagcaucacuucuugccuguugccc

SEQ ID NO: 4163563 - RNA, 60 nt, Human
gggcaacuauguaaauuaggccuucccuugcguucuugggagggucugaugugguggccc

SEQ ID NO: 4163564 - RNA, 59 nt, Human
gggcaagcuggcuccugcccucaagggcugucgagcagggaggaaggcggcggcugccc

SEQ ID NO: 4163565 - RNA, 60 nt, Human
gggcaagcuuaugaggcucugguauaagcuauguuggguuucaggcuggugggcuuuccc

SEQ ID NO: 4163566 - RNA, 90 nt, Human
gggcaagucuggucacugugcagguagaugccugggcucagaacgcgaaccucaguccagucaucucccuucacauugcucaugaaaccc

SEQ ID NO: 4163567 - RNA, 91 nt, Human
gggcaaguggagugagaagggaaguauuucugacagcuugccagcaggaaucuucuggcaaacuggaggaagcccugugcugagcuugccu

SEQ ID NO: 4163568 - RNA, 63 nt, Human
gggcaaguugagaagaaugcuaccaacccuaaaccccaguuaagucacuccucucgacugucc

SEQ ID NO: 4163569 - RNA, 58 nt, Human
gggcaauaaucuucaaagugugguaugugaucuauuaccauauggaaagauauuguuc

SEQ ID NO: 4163570 - RNA, 106 nt, Human
gggcacacagcucgcaaaugucaacccagggcucaagcguaggcagcacggcaccagagcugcugcucagaaccccugggcugcaggugcacagcacacugugccc

SEQ ID NO: 4163571 - RNA, 106 nt, Human
gggcacagugugcugugcaccugcagcccagggguucugagcagcagcucuggugccgugcugccuacgcuugagcccuggguugacauuugcgagcugugugccc

SEQ ID NO: 4163572 - RNA, 62 nt, Human
gggcaccuagcugaggagugugaguggcagaagccacuggugucugagcagggugagggccc

SEQ ID NO: 4163573 - RNA, 60 nt, Human
gggcaccugggagggggcaauaauguguuggagccagcccaugccagcucacaggagcuc

SEQ ID NO: 4163574 - RNA, 85 nt, Human
gggcacgggcagggcucagccgcucccaccuccccacagaagcccaggaguguguggacgucugagcccagcuuucugcgugccc

SEQ ID NO: 4163575 - RNA, 85 nt, Human
gggcacucagucaauuuuccugccuuugcucagggaaauaccagguuuuugugcagguauaggcggagagaggaccaauaugccc

SEQ ID NO: 4163576 - RNA, 58 nt, Human
gggcacugagaauuuuccacuuuguugcuugugcaagugacaguguucuggguugccc

SEQ ID NO: 4163577 - RNA, 61 nt, Human
gggcacuggcggggcagcucuggcuucucaggagcugaggagaucagccucccugcaaccc

SEQ ID NO: 4163578 - RNA, 59 nt, Human
gggcacugggcugugggguggagggacaguaucguaaaucagagauggcuccagugcuc

SEQ ID NO: 4163579 - RNA, 75 nt, Human
gggcagaaccugggccuaaacaaacaagagccagggcagccagggucucugcguggcugggcccagggcuugccc

SEQ ID NO: 4163580 - RNA, 55 nt, Human
gggcagaacuagggcaaacugcugagagcaucaggaagcccauuuuagucuaccu

SEQ ID NO: 4163581 - RNA, 66 nt, Human
gggcagagggcaugugaaguaaccuaggaccugcuggucacccugggugaugugcugcccucguuc

SEQ ID NO: 4163582 - RNA, 71 nt, Human
gggcagagggccaacuagcaccacuuuguacccacaagaggguauaugguagugccaguuggccuucuccc

SEQ ID NO: 4163583 - RNA, 69 nt, Human
gggcagaggucagguuggacauuauagggucuucuguuucuagucuccccagucuuggcuucuacuccc

SEQ ID NO: 4163584 - RNA, 55 nt, Human
gggcagaugucuuuugcaagggaaacagacuguuuucugccacugcacucugccc

SEQ ID NO: 4163585 - RNA, 88 nt, Human
gggcagcagagaggggucagaaggagggagcuuaagccaggcaggguuacuugucucugugacuccuuccgccuggcacaugcugccc

SEQ ID NO: 4163586 - RNA, 71 nt, Human
gggcagcagggugcaaggagaaaacggcuucugaaggcacagcuucagagacuuucuccuccuggcugccu

SEQ ID NO: 4163587 - RNA, 82 nt, Human
gggcagcagguggagacugugagugauuuccuucuggggcccacugcccaggaaggugggagcugaugacuucccucuggcu

SEQ ID NO: 4163588 - RNA, 87 nt, Human
gggcagcauguaagccuugcagcauuaggcucugugaccuaagcuugcacaagaaccugauucuggcaacugagcaaacauuugccc

SEQ ID NO: 4163589 - RNA, 93 nt, Human
gggcagccagccccucgaccaaggccucaggaagguaaagaagccggguccacccgugcucaacaccugacuucaguccaggguaggcggccc

SEQ ID NO: 4163590 - RNA, 79 nt, Human
gggcagcugcuggagggaggcaggacacaaugcuggaguguagcagaggccacagcccugcucccuccuagccuugccc

SEQ ID NO: 4163591 - RNA, 70 nt, Human
gggcagcuggauaguuuuaaauaagagggaaccgagaucauuauuuuugaaacugucagcuuuuacgccu

SEQ ID NO: 4163592 - RNA, 75 nt, Human
gggcaggaaguuaagaaggucaacgagggaaaaggccagaggccugagaaugucccuguccuucaacuucugucc

SEQ ID NO: 4163593 - RNA, 71 nt, Human
gggcaggagaaggaaaagcuaugccagaaucccaggcuuauuuauuugcauaguucuccuuccuccuccuc

SEQ ID NO: 4163594 - RNA, 69 nt, Human
gggcaggagaggaggcuacuucuuacccugggcuacugaggaggcaaguaggaagucuuccucccuccc

SEQ ID NO: 4163595 - RNA, 61 nt, Human
gggcaggagaugcaugucccuggaggcugauccagacucucuuccaugcaucaccaggccc

SEQ ID NO: 4163596 - RNA, 66 nt, Human
gggcaggaugucccccugggcacacggccuaggacauggcuucucccaggaggacauuccauaccc

SEQ ID NO: 4163597 - RNA, 77 nt, Human
gggcaggcaguguggugugaaacagagaguucaaguucauagggacucgggaguuaaguugggcuauaccccugccc

SEQ ID NO: 4163598 - RNA, 83 nt, Human
gggcaggccugccagaggcucuguuugcugugguaccaagcaacaggcggcaaggguggcauucagaagagcuggcucugccc

SEQ ID NO: 4163599 - RNA, 63 nt, Human
gggcagggaacaggagcuggugugggggagcccucagguccuccagcuguauccugccugucc

SEQ ID NO: 4163600 - RNA, 56 nt, Human
gggcagggacuccuaaggaggagguuucagggucuuccuccuucaaguccuggccu

SEQ ID NO: 4163601 - RNA, 81 nt, Human
gggcagggcaucccugagcgggugcaggugccccaccaccaccguggcccuccgccuccgcuccucccugugcuucugcuc

SEQ ID NO: 4163602 - RNA, 98 nt, Human
gggcagggcuguguuccccucuggaggcugcaggggagaaucccuuuccuugccuuucccagcuucuagaggcugccugcauuccuuggcuccuggcc

SEQ ID NO: 4163603 - RNA, 61 nt, Human
gggcagggcuuaucuuuuuuugccaccauauuaugagguaaggaacuuggugcccgugccc

SEQ ID NO: 4163604 - RNA, 80 nt, Human
gggcagguauuaggaaagcaguagagccaggauugaaacucugguuucucucgagccuaugcuuuuccuuauaucugguc

SEQ ID NO: 4163605 - RNA, 58 nt, Human
gggcagguauuuaucuucuauuucauagauaaggagauuaauaauaaauaacuugccc

SEQ ID NO: 4163606 - RNA, 84 nt, Human
gggcaggucauccugcaggagggggcggacgccggucaucccugccgcguccagggcgggcuccccucagcugcaggucugucc

SEQ ID NO: 4163607 - RNA, 113 nt, Human
gggcaggugagaggugugacugggaggcugguaggaaaggaaacauuaagaauccugaaauugcuguacucauugccuacaggccucugggucuauuacagcugaccaagccc

SEQ ID NO: 4163608 - RNA, 56 nt, Human
gggcagguggagggcccagccaggaggcacaggccuaggugagcccucgccugccu

SEQ ID NO: 4163609 - RNA, 64 nt, Human
gggcagguuccuugacuucucugcuacucaaggcucuucaguagauguuuggggaacuuugccc

SEQ ID NO: 4163610 - RNA, 66 nt, Human
gggcagguuuguguuuucaguccuucccuuuccugugggagaaaugaaaccaaagccuagagcacc

SEQ ID NO: 4163611 - RNA, 56 nt, Human
gggcagugauuuuccuuagaggggagcaagaaggucaccaggaaagucugcugucc

SEQ ID NO: 4163612 - RNA, 63 nt, Human
gggcaguggauuagccagagcuggauucaaaaacugguuccuagcuaaguuaauuaacuuccc

SEQ ID NO: 4163613 - RNA, 59 nt, Human
gggcaguggcaccgcuggcucuggccacacuggacccgccauugcucgugccaucaccc

SEQ ID NO: 4163614 - RNA, 85 nt, Human
gggcaguggcucgguccagggguaccggccaggcagccucugcagccccccacggcugugccucuggccuauuagagcccagccc

SEQ ID NO: 4163615 - RNA, 121 nt, Human
gggcagugggauugaguaggggagcaggaaauaggcguuuguccucucucuuuuaagaugaguccugggaggcgugcuugucacuuuccuucacauucuguuggucaguacucaguugccc

SEQ ID NO: 4163616 - RNA, 64 nt, Human
gggagggcagggacuauguuucauggagcacugcuuccaugggauucagccuugagcccauccc

SEQ ID NO: 4163617 - RNA, 115 nt, Human
gggagggcgcugugaccagcgcacucaggcaccaagugucggcauggcucacugugcugggugaaggccuccccgagcauuagguccuccacggggcugugucaaaugcccuccc

SEQ ID NO: 4163618 - RNA, 81 nt, Human
gggagggcugugcugugcaugguaagaugcuucacaguaucugugaccucugcauaccaugagccagcggcacccccuccu

SEQ ID NO: 4163619 - RNA, 103 nt, Human
gggaggggauagggaggucugaaggacagaauagucagcuguaggcccaggucucuaagcuucugggucagugacuuuuuucuguggccccuuuugcccuccu

SEQ ID NO: 4163620 - RNA, 76 nt, Human
gggaggggauagggccagacugagggucccugagcuugugcauggucaggaacuuacucgguuuggauuuccugcc

SEQ ID NO: 4163621 - RNA, 70 nt, Human
gggaggggcagagguagagaacaagaauacagaggaaaggcccucgcacuugcugccuccuguuccuccc

SEQ ID NO: 4163622 - RNA, 106 nt, Human
gggagggggacaagagauggcgcugcagaggugagaagggccucccaggggucuuaccaucccagggagucucauucuccucucccaggauauccucacccacccc

SEQ ID NO: 4163623 - RNA, 68 nt, Human
gggagggggccuuguuaguggauggaguguggauugauaacacucugaggauaagaugcucccgaccc

SEQ ID NO: 4163624 - RNA, 66 nt, Human
gggaggguccugccaucuauuuucagucuccagcccggucuucugucaaguauagcaggcccuccc

SEQ ID NO: 4163625 - RNA, 71 nt, Human
gggagggugcugccggacagguggguccccggguacucacugcugcccgcccggccgcggcgccccguccc

SEQ ID NO: 4163626 - RNA, 56 nt, Human
gggagguagacuucuuggaaguagacccuccagucccagcucuucaagucaccccc

SEQ ID NO: 4163627 - RNA, 129 nt, Human
gggaggucaccugggacugguagagggaacacaaagcuuaagguagguacagaggccagcagucacauuaguguuucucagcuuucuuugcgcauuuuguucucccaaccuuuuacuuuccugccuucc

SEQ ID NO: 4163628 - RNA, 98 nt, Human
gggaggucaggggcuucuuucugggguugguacccagggcaucauggcucugggcagccgccccauaggauuguugcgugaggcucuugacacagacc

SEQ ID NO: 4163629 - RNA, 82 nt, Human
gggagguccuguccuuggucucugauaggugcaauccauauaccagucucagugaaggccaugugauauaggaaggacaccc

SEQ ID NO: 4163630 - RNA, 86 nt, Human
gggaggucugcuaugugucugacagugugcaagaaaugggggauaugucccuaggauuccuccacuuagcgccacugggcccuccc

SEQ ID NO: 4163631 - RNA, 79 nt, Human
gggaggugacugggauguggagcaggugggaugucgugaccgauugguacaagcauaaggcuugcuucagucuucucuc

SEQ ID NO: 4163632 - RNA, 68 nt, Human
gggaggugcuugcgauacacagccauucuguuuuuccuuaguggaaggcacugcuuugcugcgccccc

SEQ ID NO: 4163633 - RNA, 64 nt, Human
gggagguuaauuggagcagcaggccuggagccacugcagggcuccuggcuccaaucaaccuccc

SEQ ID NO: 4163634 - RNA, 59 nt, Human
gggagguugugaggaauucaccuagaucauaugaccagugugggccucacaaugcuccc

SEQ ID NO: 4163635 - RNA, 60 nt, Human
gggaguagaaguauuuguaaaaaggcagcaauguuuccauaggaucugcuucauacugcu

SEQ ID NO: 4163636 - RNA, 71 nt, Human
gggagucaugaaguuagaacuaugaggauaaaugaguaaguuuguaaaccagaaucuggcugcaaauuccc

SEQ ID NO: 4163637 - RNA, 128 nt, Human
gggagucuugcccacccucaagcucguggguuaggaaggggcuucccuacauggcccuacgucugugcuagucucaggguggccucugugcuccugccuacuucagcgacugugggaacccaucuucu

SEQ ID NO: 4163638 - RNA, 94 nt, Human
gggagugaggacugggaagugugggcggcgucccagucccauccgucccaucuaggaugggcccgggacggcgcugcucuccuguccuccucuc

SEQ ID NO: 4163639 - RNA, 56 nt, Human
gggagugcugaagacuggcuagggagauaucugcucuccuuucuuggcgcuggccc

SEQ ID NO: 4163640 - RNA, 61 nt, Human
gggagugcuggaggugugagugggacccuaacccccaccucuacccaccccaguggauccc

SEQ ID NO: 4163641 - RNA, 99 nt, Human
gggaguuacaaccauaaauacgugggaugguagguagguaauaaggcugauuauucacaaauauguugguucuuaugcacccacauggaugugauuccu

SEQ ID NO: 4163642 - RNA, 71 nt, Human
gggaguugaagaguuuccaguuguggcucagucacuaacuagugcugagacugcgaggcacuucagcucuc

SEQ ID NO: 4163643 - RNA, 89 nt, Human
gggaguuggggcccaggaaaugaggcugaagggugugaugaugaauuuccaguuccccaccuuccccagacucaguccugccagcuucc

SEQ ID NO: 4163644 - RNA, 83 nt, Human
gggaguuucucugugagaaaugcagaaucuugagaaaaauuccagacauacuggaucaggaucugcaucauaagaagauucuc

SEQ ID NO: 4163645 - RNA, 55 nt, Human
gggaguuugagguccaggugugggcaggguugguucuguuggaggccucucuucc

SEQ ID NO: 4163646 - RNA, 91 nt, Human
gggaguuuuguguuggcuggagucuggugcuagccagagaauagaaacucaggcagcgcugaaaggcccaucugugcuagcaaggucugcc

SEQ ID NO: 4163647 - RNA, 81 nt, Human
gggauacucggugaacaagacaaacuuggcccugcugucucugggcagcaaaguccagucuguguacaccagguguggccc

SEQ ID NO: 4163648 - RNA, 57 nt, Human
gggauacuugucucaaggucaaauauauaugaacuuggcaaugaggucagaugucuu

SEQ ID NO: 4163649 - RNA, 88 nt, Human
gggauagcugguguuuuggcugcugcucuugugcauuagugagcagucauaggucacagagacagcagagucaccucugagcucuccc

SEQ ID NO: 4163650 - RNA, 84 nt, Human
gggaucaggaagcuuguguguauuggucacauguucacggacuggcguggcccaaggaucauugcucauaaguccacagauccc

SEQ ID NO: 4163651 - RNA, 59 nt, Human
gggaucaggugaagucacugagugggucuuuaccugaggucacaacuucgcuugauucc

SEQ ID NO: 4163652 - RNA, 63 nt, Human
gggauccgcagaggaggaguugcugucagcuggugcucacggggugccucucucuacggaccc

SEQ ID NO: 4163653 - RNA, 93 nt, Human
gggauccuuuccuuagauuaucuuuuuaaggguuggccugggcauagauaggucaacuuuaagaugaucuuuuuucaauugagggcauauccc

SEQ ID NO: 4163654 - RNA, 80 nt, Human
gggaucuggaacuauggaagggaugcaaagaaaggaaguggccucucucugucuuaccacccuccaucauuccuugucuu

SEQ ID NO: 4163655 - RNA, 76 nt, Human
gggaucuucuuugcauguagaauacucaacuuucuugaaaacagagcaguagagauggccuauaguggaagaaacc

SEQ ID NO: 4163656 - RNA, 55 nt, Human
gggaucuugaaacagcuggauucuuaaugcauauucauauuguuucaaugaucuu

SEQ ID NO: 4163657 - RNA, 78 nt, Human
gggaucuuguuaaagugcagauucugacuuacugggucugggguggggccugagagucugcauuucuaacaagcuccc

SEQ ID NO: 4163658 - RNA, 67 nt, Human
gggaugaaguggcagguuauaagcaucucaacagauaauugaaaauguugaauuuccgcuuuggccc

SEQ ID NO: 4163659 - RNA, 73 nt, Human
gggaugaauguugcaaguuaaaucuuacugaguuuagagcacuuagaugauuuuaugucuugucauuuuuccc

SEQ ID NO: 4163660 - RNA, 58 nt, Human
gggaugagguagaugaacaagggccucaggccaggcccaucaucccuaccuccguccc

SEQ ID NO: 4163661 - RNA, 78 nt, Human
gggaugcacuuuaccuuguggugacuugagcuuccuaagggccucaccaaguucugagcaccaggcaccacagcuccc

SEQ ID NO: 4163662 - RNA, 62 nt, Human
gggaugcagacuacagggcuuaggggccaguucauucucuuuccucuggagucauugcuccc

SEQ ID NO: 4163663 - RNA, 58 nt, Human
gggaugcaggggagauggagagguuccuuuucacuacaaaagucucccuuucuuucuc

SEQ ID NO: 4163664 - RNA, 130 nt, Human
gggaugcgggugagugucuggcucugggcaggacacagaugcaaggccaggggaauggacagggggcucucacucagccuguggucuuugcccugggauuuugccucuagauucuccccaacggcugccc

SEQ ID NO: 4163665 - RNA, 72 nt, Human
gggauggcugggucuguaaucggccagggauccucuacccccacgaccccugguggcaucacucagccuccc

SEQ ID NO: 4163666 - RNA, 130 nt, Human
gggaugggacugugagggaggagggccucagguucuggagaagggccagguauuuccaugucaacccugcuuuuuauaaccagagagaacauaugagguagcaccaaugaccuccgccaccaauccuucc

SEQ ID NO: 4163667 - RNA, 55 nt, Human
gggaugggacuugccucaggccaaauaggaacucccggcugagcaaauuccuccc

SEQ ID NO: 4163668 - RNA, 99 nt, Human
gggauggggccaggagcugggcaggaguguggguggaggggccuggaaccugccucagcagcugcuccacuugcuuaaucccaccuggaaccuuguccc

SEQ ID NO: 4163669 - RNA, 83 nt, Human
gggauggugacaguaguguuagaacugauucuuuccauugagucauagaagaacuccguuaaaaucuacuguccugccuaccc

SEQ ID NO: 4163670 - RNA, 103 nt, Human
gggaugguuuaugucugcuccucggcccugggagggaacccgcacaagaguugcuaagcagcugguggagccuuucuguuuuaagccaggacacuauugucuc

SEQ ID NO: 4163671 - RNA, 63 nt, Human
gggauguauaugugaaugcguguauguguguuuaggguacgcaugcauguuacaguauaugcc

SEQ ID NO: 4163672 - RNA, 58 nt, Human
gggauguauguuuguguggagauguuuuuuucugucuguaggcacauguauauauccc

SEQ ID NO: 4163673 - RNA, 55 nt, Human
gggaugugggagugaaggucaaaucccaagagagaccagcauuccacacuguccc

SEQ ID NO: 4163674 - RNA, 91 nt, Human
gggauguguuuaaaaugugggagacaggagcuguauggaaaucauuauuuucaaaugcggucauggcuuuuagguugugaauuuuuguucc

SEQ ID NO: 4163675 - RNA, 77 nt, Human
gggauguuuuaugugcuggacuggcagugcccugcuuggagacuuuggggaacaaguggguccuacauaaagcuacc

SEQ ID NO: 4163676 - RNA, 81 nt, Human
ggcagcccuucccagggacucgggauucuaggaaccucucagucaggucaccugaguccaaaagucuuuagcaggguaguc

SEQ ID NO: 4163677 - RNA, 63 nt, Human
ggcagccucugccauggcuucagccuccauggacaauccuggcacuggggcuuugguacugcc

SEQ ID NO: 4163678 - RNA, 62 nt, Human
ggcagcuaggccauuuguucagugaguaaucaugucucauccugugcacagggccuggagcc

SEQ ID NO: 4163679 - RNA, 64 nt, Human
ggcagcugggugccuaauaaugauaaaaaccauaauacuucauaauuacgcacugcccuuugcc

SEQ ID NO: 4163680 - RNA, 60 nt, Human
ggcagcuguuggcucucuaggaugggucgccaucccuagagcugcagaccacucacugcc

SEQ ID NO: 4163681 - RNA, 70 nt, Human
ggcagcuuacguuuugcuagugacagucuccuguaaaaauaacucucuuauuagcgaugacauaagagcc

SEQ ID NO: 4163682 - RNA, 62 nt, Human
ggcagcuuggcuuccgcuuuacuguccuucuggauaaguuguucugugggaagccagcugcc

SEQ ID NO: 4163683 - RNA, 80 nt, Human
ggcaggaagagcagcauguggggugugugggacaggaggugcaugcacugcugccagcuggcccagcugugcucccugcc

SEQ ID NO: 4163684 - RNA, 76 nt, Human
ggcaggaaguacaaagugaaauaauucugagacuauuaaaguccagggccuugucacauugauuacauucuuagcu

SEQ ID NO: 4163685 - RNA, 87 nt, Human
ggcaggaaucuguuugugauuagcaguggguuuuaguguugccgaggaauguacccaacguuaccguuacccccgcagguugcugcc

SEQ ID NO: 4163686 - RNA, 96 nt, Human
ggcaggagaaucacuugaacccaggaguuagagguuguggugagccaagaucauaccauugcacucuagccugggcaagaagagcaaaacucuguc

SEQ ID NO: 4163687 - RNA, 130 nt, Human
ggcaggagaucccugggggugucaggaggaacauggcagagccugcaggugggugagcaguauucuccauggauugguugguccaggcugcagucuugcccucucucucggauucucccacucuggaaac

SEQ ID NO: 4163688 - RNA, 57 nt, Human
ggccugagcuugggcagcguauucugugcaaagcauguggggcaccaaacucagguc

SEQ ID NO: 4163689 - RNA, 61 nt, Human
ggccugaggcccugcccuuucuggccacuugcagggcucagcacagggcccagccuaggcc

SEQ ID NO: 4163690 - RNA, 80 nt, Human
ggccugagggaugggcugggccgccagggagaugggaagggagcauccaaggugaccaggguggucagcucauucaggcc

SEQ ID NO: 4163691 - RNA, 63 nt, Human
ggccugagucucccauaggcuaaguauuugcccugagucauaaagccagugggaggcagugcu

SEQ ID NO: 4163692 - RNA, 65 nt, Human
ggccugagugugcuaggugucucgguaggauugucagugccaggcaguucaaguacaccagcguc

SEQ ID NO: 4163693 - RNA, 61 nt, Human
ggccugcacagagguggcucuaggagaaaugaccaucacaauagccucccugugccaggcc

SEQ ID NO: 4163694 - RNA, 129 nt, Human
ggccugcccugaggucacagcccuugugcccagcuccuagagccagaggaggcuggggucaguagggccugugaaugaugccaccuccuaggccuggagaagccagggcaggggauggacauggaggcc

SEQ ID NO: 4163695 - RNA, 62 nt, Human
ggccugcggccuguggacuucauuuagcagccucgguccugcuguccaggggaucguuggcc

SEQ ID NO: 4163696 - RNA, 63 nt, Human
ggggaggguuguguaccuguugucucaaaaagaugagcacgacagcacaacagcauccuccuu

SEQ ID NO: 4163697 - RNA, 92 nt, Human
ggggagguggcccagggagcuggcuucaaagggcggcugucggagggugacucaugguacucuucacuuccccugccagcgguuuccucccc

SEQ ID NO: 4163698 - RNA, 65 nt, Human
ggggagguguccaagagucaagaagggggcggagggacaccccauggccucauuuccaccucccc

SEQ ID NO: 4163699 - RNA, 100 nt, Human
ggggagucagggagcuagagcaagggcugggcuuggggcuggcagaacagccaagaacccagagcuccgguccugcccaugccccugagaaauucucccc

SEQ ID NO: 4163700 - RNA, 58 nt, Human
ggggaguggugucacugagaggaaggcccaagcacuuuccccuucugcaccucuuccc

SEQ ID NO: 4163701 - RNA, 73 nt, Human
ggggaguguaacuugguuggugggcaggagaauuuaaggucucuccauggauucccacucaagucagcucccu

SEQ ID NO: 4163702 - RNA, 86 nt, Human
ggggagugucaggaggagucagacccugcugagcuauagacaggcccagcuguaacgggucugcaccucucuuccugcccuucccc

SEQ ID NO: 4163703 - RNA, 67 nt, Human
ggggaguguuuucaugggcuugaaaugcaguucaaaaucuguuaaaggguaaggaaaaugauucuuc

SEQ ID NO: 4163704 - RNA, 80 nt, Human
ggggauccucucauuucuguuugcacugauuucagcaccugucaccugcaaggcgcugaguaggcaaggagggaaucccc

SEQ ID NO: 4163705 - RNA, 116 nt, Human
ggggaucuaaggggcucuggccaauguggcagccucagugauccuggugggacagaaaaccucaccaugcguggggccuccagcacuaggcagccacccugacucugaccuuccuc

SEQ ID NO: 4163706 - RNA, 70 nt, Human
ggggaugaagccugacuucucggugguucucauucaugcaucauugggaagaaaugcuucacaagacccc

SEQ ID NO: 4163707 - RNA, 64 nt, Human
ggggauggaggcgugugguccucauuccccuggucauccccagaggcaccacaucucccucccc

SEQ ID NO: 4163708 - RNA, 77 nt, Human
ggggauggaucaccugaggucaggaguucaagcuggucaagagacuagacuggccaaaauggugaaacuccaucucu

SEQ ID NO: 4163709 - RNA, 71 nt, Human
ggggaugggacccacucuuuuuucaccuccggucguaccuacugggugugcccagauggugucccuucccu

SEQ ID NO: 4163710 - RNA, 56 nt, Human
ggggaugggggguguuagugauggccauuauaucauuuguucucauucucuacuuc

SEQ ID NO: 4163711 - RNA, 59 nt, Human
ggggaugggggugaugaggguacacagcacauacucacccuucaggacccauccucccc

SEQ ID NO: 4163712 - RNA, 64 nt, Human
ggggaugguagaccggugacgugcacuucauuuacgauguaggucacccguuugacuauccacc

SEQ ID NO: 4163713 - RNA, 64 nt, Human
ggggauucccgagauagucacccccagcaacccuggcugagaggcacuaucuccggaccgcccc

SEQ ID NO: 4163714 - RNA, 83 nt, Human
ggggcaaauggauguggggaugacugucaaucaggcaauggagcagaugucugaggaagucagcccuuuauuuaucuucuccc

SEQ ID NO: 4163715 - RNA, 82 nt, Human
ggggcaacagugauaccaucccugcacuccuggguccugcucuuccaaugcccaaggcauggcaugguggcagcugugcccc

SEQ ID NO: 4163716 - RNA, 90 nt, Human
ggggcaagcaaggagacacaguggguaguggggauuagcagggcagccaggucaugcuuucaguuguugccuuuguucuuugagugcuuu

SEQ ID NO: 4163717 - RNA, 104 nt, Human
ggggcacauuuucuccucauuguuccucuuuuuucaccguggaucuucaugaaauuccacuguaagcaaaugaaucucaggaagaucucugcaggagcugcucc

SEQ ID NO: 4163718 - RNA, 57 nt, Human
ggggcaccauauguauauauccugauuacauagugcuguggucuaaaugugugcccc

SEQ ID NO: 4163719 - RNA, 85 nt, Human
ggggcaccauguaaaaaugggaugguaugcuuccaagacugaugcuguuuuaaaguuuuugcacauucugacuacauuaugccuu

SEQ ID NO: 4163720 - RNA, 78 nt, Human
ggggcaccugcauucuauuucuuaagaguuauuuagcaaaaagcaaggugcagugaaggaaaaggaaauagcugccuc

SEQ ID NO: 4163721 - RNA, 60 nt, Human
ggggcagagaaggauugaaaccagagcccaucacuacucuccucucugccuuucugcccu

SEQ ID NO: 4163722 - RNA, 55 nt, Human
ggggcagcaguugcccuaaucaagaauucacacucuggagguggucugcuguccu

SEQ ID NO: 4163723 - RNA, 76 nt, Human
ggggcagcccuacccucuggaauauacaaaauguuacacagacacaguauguacaccggggaaggugggccacccc

SEQ ID NO: 4163724 - RNA, 101 nt, Human
ggggcagcugcuguggcugcggggccaggaagagagcgcagccuccacagagccauuccggaccgcugccuccgccggcuccacagcccacgcgcgcacuc

SEQ ID NO: 4163725 - RNA, 64 nt, Human
ggggcagggaugaagguuggagucuccaggcugggcagggucuucccaccauuccugcagaccc

SEQ ID NO: 4163726 - RNA, 85 nt, Human
ggggcagggcucugacgccucuucccugcugcacugugccugauggugggggaaggagacagggaagggcgggauguucugcucc

SEQ ID NO: 4163727 - RNA, 60 nt, Human
ggggcagggucugggggcugcuucugcagcuucagcgcagaaaacccagagcucaguccc

SEQ ID NO: 4163728 - RNA, 85 nt, Human
ggggcaguuaccgaaggcccuguuuucccuauuuuucaugugaauaaacgggggcuccggggcuuuauucauuuaaccugacucc

SEQ ID NO: 4163729 - RNA, 130 nt, Human
ggggcauggggucugcuguccugaguacggagaauccucugcuugggguuaggguguccugacgcuagagggccuggucccaggacaguggcaauccuagacucagauuguaggaagaaacauguaaccc

SEQ ID NO: 4163730 - RNA, 57 nt, Human
ggggccacggaaggaccaguggguagcccucuccccaccgugccuugcugucgcccc

SEQ ID NO: 4163731 - RNA, 84 nt, Human
ggggccagccaggggccucugggggaggauggccuagaaaacagggcucugcuucagaaggcucauucuuguuggcggggcccc

SEQ ID NO: 4163732 - RNA, 66 nt, Human
ggggccagcugguucagugucuggugagggccuguuccucacugauggcacuggauagguauccuc

SEQ ID NO: 4163733 - RNA, 76 nt, Human
ggggccaggguucagggcgggcgucccggcuccacucuggagccccgagcaugcagcccccuggugcccgggcccc

SEQ ID NO: 4163734 - RNA, 81 nt, Human
ggggccccggguggugggagugaucagaagaaccugccgaagagcacacccccucuggucugauggucccaccaccgcccc

SEQ ID NO: 4163735 - RNA, 72 nt, Human
ggggcccucucaccuuauagacucuuguuguuagaagaaauucacagaauagcacuguaagcgcagggcucc

SEQ ID NO: 4163736 - RNA, 69 nt, Human
ggggcccuggcgagcuuuguucuccaggacaauggccacuguccauugaggaaggacuugccuggcuuu

SEQ ID NO: 4163737 - RNA, 113 nt, Human
ggggccgcagcaucccucgccagcccaugccccagcugcaggugacaucacguggcugacaucaggccugcagucuggguuagcugugcugggggcccagaagcuguggcucc

SEQ ID NO: 4163738 - RNA, 70 nt, Human
ggggccggcucugagcagcaacccagagccucccugugggaugggaccugcugcugcucugcuguguccc

SEQ ID NO: 4163739 - RNA, 66 nt, Human
ggggccgggaaggggaauuggcaaagaaggcaacaaacugccuccuggguggcucugcccggcucc

SEQ ID NO: 4163740 - RNA, 59 nt, Human
ggggccggugcucagguucccaugagugcccgguggcaccaggcagcugagcaggcccu

SEQ ID NO: 4163741 - RNA, 78 nt, Human
ggggccgguuccauagccaucuuuagcuuccagguuaaagaaccugguuaguuuggugauuggcucuguaauggcucc

SEQ ID NO: 4163742 - RNA, 68 nt, Human
ggggccucauuucuguugugcaucacugcauuucuagugccuagcaccaugccugacagagaagcucc

SEQ ID NO: 4163743 - RNA, 114 nt, Human
ggggccucugaaugggaggaaaucaggacaacaauaugcugaguuuuucaccacuggcugcugggcaauucaggauauugagcccugugugaccuucccaacagaaaaaucacc

SEQ ID NO: 4163744 - RNA, 59 nt, Human
ggggccucugcagucacgcugggucacgugcuccagucagccaagcugcagcggccacc

SEQ ID NO: 4163745 - RNA, 56 nt, Human
ggggccugacacugcagguguagacccgucacaggugucucugccgaucagggccc

SEQ ID NO: 4163746 - RNA, 60 nt, Human
ggggccuggggggcagguggagggccgcugcuguuuucucucacucauuuccuaggucuu

SEQ ID NO: 4163747 - RNA, 69 nt, Human
ggggccuuguccagggagacaacugugagggcuggaguaaucagggagggcuuccuggaggagagccuc

SEQ ID NO: 4163748 - RNA, 92 nt, Human
ggggccuugugcaauaaaguggaggcccgggcugugccacagccacagcucuucucauggggccucagcuuccugauuguuuaauggguccc

SEQ ID NO: 4163749 - RNA, 61 nt, Human
ggggccuuugagaggagaguaauacaggucaauucucaagaucuguuauugucagagcucc

SEQ ID NO: 4163750 - RNA, 57 nt, Human
ggggcgaggaagcaauugaguuauaugccccuuaaaauucacagguauccucucccu

SEQ ID NO: 4163751 - RNA, 61 nt, Human
ggggcgccgguaggagccggggauggcugcgucccucaggcugucuuccuucuggugucuc

SEQ ID NO: 4163752 - RNA, 79 nt, Human
ggggcggaggccagcgggaagcaccugcaccucuucaggguacauccgagccugggccuggcuucccgcccuccaccuc

SEQ ID NO: 4163753 - RNA, 78 nt, Human
ggggcgggcuccggcuggggcuccgcggcccccugcggaagcuggugcugcagagucucgugccgcugcugcugcgcc

SEQ ID NO: 4163754 - RNA, 109 nt, Human
ggggcgggcuggggcggggcugcgcaguggugcugcgcgcggagcucuguugccggaacugguccgagucgugcgccgggccgcgcgcagccccgccccgccccgcccc

SEQ ID NO: 4163755 - RNA, 73 nt, Human
ggggcguaggaacuggccacaacuagcccaggaccgcagguccucuacuugccguugggccucccugggcccc

SEQ ID NO: 4163756 - RNA, 86 nt, Human
ggggcgugccuguggcccgucuugcagguuccgcggcugugcagugagugcgcuucugggcugcaggaguggggcaaggacgcccc

SEQ ID NO: 4163757 - RNA, 122 nt, Human
ggggcuaaaguagauguggaaguugaaucaaccugagucuggaauguguucauacucugcucaguugcagaguaugaaucuuucagaccguaauacaauuuuauuuccagucuuauaauccu

SEQ ID NO: 4163758 - RNA, 96 nt, Human
ggggcuaagguugacuugagcccaggagguugaggcugcagugagccaaaaucaugucacugcacuccagccugggcaagaguaagauccugucuc

SEQ ID NO: 4163759 - RNA, 59 nt, Human
ggggcuccccggcugcuugucuggaaacggagugcaugugaccgcugggugagcgaccc

SEQ ID NO: 4163760 - RNA, 114 nt, Human
ggggcuccggaggugucagggcgccuccuugcucucaggguugcaugcaucuguggggaggaagacauccgugagaugcugacggccaggaccgcccucgcuucccgcagcccc

SEQ ID NO: 4163761 - RNA, 76 nt, Human
ggccuggcuuccauauggcacauaguggcuuuucuaagacuguucacaugucugccaaugaggaauggcccuggcc

SEQ ID NO: 4163762 - RNA, 63 nt, Human
ggccugggaagguaagccuugccugagaaaaggcugcugggccugcagggcugccucccagcu

SEQ ID NO: 4163763 - RNA, 75 nt, Human
ggccugggagggcagauggggcacaggcugagcucgggguccucugcuuagccugcccucguggccuucccugcc

SEQ ID NO: 4163764 - RNA, 83 nt, Human
ggccuggggugggaaacacuggcugugcagagggcaguaggaacggcuguggcucuccggcauggccagagcuguucuaggcu

SEQ ID NO: 4163765 - RNA, 59 nt, Human
ggccuguacccuggcuguuaugagaaccagagggguucucaggucaccagggugccacc

SEQ ID NO: 4163766 - RNA, 63 nt, Human
ggccugugcuugcggguguggagccggccuccccgggcucugccugcccagcagcaccuugcc

SEQ ID NO: 4163767 - RNA, 58 nt, Human
ggccuguguggaugggccccuggcucuccugugcuccagccuccucuccacacaugcc

SEQ ID NO: 4163768 - RNA, 60 nt, Human
ggccuguuuccaagcacucugugugauucuuaugaugucugaggcuggagacaccaggcc

SEQ ID NO: 4163769 - RNA, 89 nt, Human
ggccuguuugccuuggccccgggccagggccgccccgccagugaguaaugcgugaggaccgccuggcuccgguucaagggaaacgggcu

SEQ ID NO: 4163770 - RNA, 56 nt, Human
ggccuuagagaccaccuagucugauuaucacacuucacugacagggaacuaaggcu

SEQ ID NO: 4163771 - RNA, 79 nt, Human
ggccuucaaagcaaagguccagaguugagauacagaagcaaugaggcauuugugaaagucuuugaccuuagcgagggcc

SEQ ID NO: 4163772 - RNA, 75 nt, Human
ggccuucaauaauuaggaguguaagggggccagguggaguggcucacgccuguauucccagcacuuugggaggcc

SEQ ID NO: 4163773 - RNA, 94 nt, Human
ggccuuccuggagguuggcugccacugucauacccuggcaauggcauucauaccauuggcaggcaauggcaugucauacagcuucaugaggguu

SEQ ID NO: 4163774 - RNA, 86 nt, Human
ggccuucggcagcagcagaggcugucggggcacugaagaguccucuugugccuucucaguccugcucacacccugagaccgaggcc

SEQ ID NO: 4163775 - RNA, 61 nt, Human
ggccuucggggugggacucaggggcaggcagaaccuguccaggaauugacccugcaagguc

SEQ ID NO: 4163776 - RNA, 64 nt, Human
ggccuucuguuuuccugggugaagaaggaggggugcugagugcaccaggaugggcagguagguc

SEQ ID NO: 4163777 - RNA, 56 nt, Human
ggccuugagcagggagaaaccagcacucuucucagcugggccuuucuggcagggcu

SEQ ID NO: 4163778 - RNA, 67 nt, Human
ggccuugauuccggucauugaacacacuuuauucauuucugugucuggcacuguccuagucgaggcc

SEQ ID NO: 4163779 - RNA, 80 nt, Human
ggccuugcuauuuaagcaggaugaacuaacaccugcagaauaauaucugcaucugucacugcuuaguuggauuucaggcc

SEQ ID NO: 4163780 - RNA, 71 nt, Human
ggccuuggaaauaguugugagucaggcaguaugcuuuuguugcuucucacccuuacuaucucuuugaugcc

SEQ ID NO: 4163781 - RNA, 73 nt, Human
ggccuuggagucagccuugagcgggcaggagaccacaaugaagccgacgaacuugaggcugcacuccagggcc

SEQ ID NO: 4163782 - RNA, 59 nt, Human
ggccuuggauccaagcugcggcuccagcuggagacuaaccagcuaugugaccuuaggcc

SEQ ID NO: 4163783 - RNA, 63 nt, Human
ggccuuggcuccugcagggaguuggagagaagaaugugcucagugcucaggggagccgaggcu

SEQ ID NO: 4163784 - RNA, 89 nt, Human
ggccuugggcaagucagcuugccucugagucucuacaaaaaugaagagcuucagcuugcagcugugaucugugauuugcccccguagcu

SEQ ID NO: 4163785 - RNA, 67 nt, Human
ggccuugugggucaaagaaagcauguuuguuccugaagacaaaugccaucuggugauguauuaggcu

SEQ ID NO: 4163786 - RNA, 84 nt, Human
ggccuuugaggucccuucaauucucauagucuaguuuuuggugagaaguaggacuagggguugaggcaucuuauuuugcuggcc

SEQ ID NO: 4163787 - RNA, 69 nt, Human
ggcgacagcagguguccuuuugguggagaaucuccaggucugugagcuaaaugguacacuugcugggcu

SEQ ID NO: 4163788 - RNA, 129 nt, Human
ggcgacaggaggcagcugccagcaugacuuugaaaacccuuggagauccuagaagacuugccacauguaacguggagcagcugcugggaucauuuaggagaaaugcagaacuuggcacccacccacgcc

SEQ ID NO: 4163789 - RNA, 65 nt, Human
ggcgaggaaauagacacuuucuaugaauuaaaaauggguucaugauucuguuuuuuucacuugcc

SEQ ID NO: 4163790 - RNA, 82 nt, Human
ggcgaggcuuaguagagcaguuguggguaccaguucucccaggaauuagugcccaggcugccucuucacacccccaccuccc

SEQ ID NO: 4163791 - RNA, 61 nt, Human
ggcgagggaggggacuaugcggaccaaguugucuucaaagugcaccugcuucuucuuggcc

SEQ ID NO: 4163792 - RNA, 98 nt, Human
ggcgaugccgcgcgcccccucgccuuuguuccagcccgagggcgcugaugagcaaacucaaggcgaccugggugggggugacuggagccgggcucgcc

SEQ ID NO: 4163793 - RNA, 81 nt, Human
ggcgauguucaagcucuucuuuccaucccuagccacuagcucaguaucagguguuuaggagaugcagaaugaauguuugcc

SEQ ID NO: 4163794 - RNA, 58 nt, Human
ggcgcacuggccgcacgcguagggcuucucgccuguguggaugcgccggugcucggcc

SEQ ID NO: 4163795 - RNA, 59 nt, Human
ggcgcagcuggccaaucagggcgcccuggacuccgggaggccugcgagccacgcgcacc

SEQ ID NO: 4163796 - RNA, 60 nt, Human
ggcgcaguagcggggcccagagcauacaagggauugggcuuuggcuucucugcugcagcc

SEQ ID NO: 4163797 - RNA, 103 nt, Human
ggcgcccagaauauuuaauacccggcccuuuaugaaaagcucuguguaccuauguuuagaggggacagaaaaaugagggagcuggauuaauuuucuaaggccc

SEQ ID NO: 4163798 - RNA, 94 nt, Human
ggcgcccuggcagacacagucuccuuccgggagcaggcaggugcaaggcaggcaccggggcuuuggaaggggcugguggagaugcuugggugcc

SEQ ID NO: 4163799 - RNA, 86 nt, Human
ggcgccuccucaagcuacagggcggcgcgaucuuggcuacgccuuggccugaacguccucaccuguaacuugggacgagaaccgcc

SEQ ID NO: 4163800 - RNA, 100 nt, Human
ggcgccucuccccuccccgcgcgaguucccuggcccgcacguagcgcagcaccugcucgccgcugugcacccugccugccugcggguccucgggggcgcc

SEQ ID NO: 4163801 - RNA, 76 nt, Human
ggcgcggagagccuccggcuggggagcuaaaccgcuggggacuccgcggcugcugccugagucgcuguccgcugcc

SEQ ID NO: 4163802 - RNA, 60 nt, Human
ggcgcggcggucagcgugggagaggcugcaggcccugcacgccucugcagcugccgggcc

SEQ ID NO: 4163803 - RNA, 120 nt, Human
ggcgcgggcgugcugccacacuccuggagcuggcuuugugaacacugcgcagaacuuucagaguugguggggucuuucgucaucagugggaaacaggacguggugcaggucaugggugcc

SEQ ID NO: 4163804 - RNA, 108 nt, Human
ggcgcuagucacacacacuaacuagaaaucucuguuuacaucaugcagacacaaugggcugaaagugaaccaagcaacgagaucucugugugugugugucucucuguc

SEQ ID NO: 4163805 - RNA, 57 nt, Human
ggcgcucccgaggcggccucuugugcgauccagggcgcacaaggcugggagagcgcc

SEQ ID NO: 4163806 - RNA, 75 nt, Human
ggcgcugcugggugguggagccgcugcaguggccucuggugcugcuucugcagaggccucgccuccucuggcgcc

SEQ ID NO: 4163807 - RNA, 86 nt, Human
ggcgcuggacccggccccucaccuccgcggaccccgaggaacaagccggcaggugagggagccgcggucuccucgacgaucacgcc

SEQ ID NO: 4163808 - RNA, 58 nt, Human
ggcgcuggccacgguggcucuguccccucccucaacaggugcuccuggggccaacgcc

SEQ ID NO: 4163809 - RNA, 76 nt, Human
ggcgcuucaaguacauuguguuuuccugaaagccugggcugaggcauugagaaggaagguaaugaacugaggagcu

SEQ ID NO: 4163810 - RNA, 121 nt, Human
ggcggcaauagaacuaagauuaaaaucaacagcuggaguguuggugagguaucuguguuucuuggcaccaauuuuguuauucauuuaggaauguuguuuuaagggguguucauuagcuacu

SEQ ID NO: 4163811 - RNA, 74 nt, Human
ggcggcaggggugugggggccgugcaggucuucugcccgcauuggggcugcauuccuccaccuccugcacagcc

SEQ ID NO: 4163812 - RNA, 128 nt, Human
ggcggccgcccuucuccgcuuacuguucccggcuccccgcaggccgggugcucgcagccgggcuggcuaugccucgccuggcagcccagagcgccgcuccccgggaacagcacacaaaggcagccucc

SEQ ID NO: 4163813 - RNA, 123 nt, Human
ggcggccgggaagaggcgcuccucacuuccuagaugggauggcggccgggcggagacgcuccucacuuuccagacuaggcagccaggcagaggggcuccucacaucccagacgaugggcggcc

SEQ ID NO: 4163814 - RNA, 60 nt, Human
ggcggcggcccgggaccgagcaccagcacguaagccagcuccaggcccacggccgcggcc

SEQ ID NO: 4163815 - RNA, 106 nt, Human
ggcggcggggagcccccggcgcgccgcgcaccauccuccgccgggcaccgcggcggcgccucugccaagggggcugcgggucugggccgggggcgccgccgccgcc

SEQ ID NO: 4163816 - RNA, 78 nt, Human
ggcgggaagcacagccagguuaggggcugccugggagaguaguuuuggcuucagucuuggcuaugcgcaguaucugcc

SEQ ID NO: 4163817 - RNA, 58 nt, Human
ggcgggaggcuugugguguaagagcggugcacugugcauccacuagggcucucccguc

SEQ ID NO: 4163818 - RNA, 109 nt, Human
ggcgggcgggaggucacuguccugcauaccaggcuaauuggggucuggcagagugcacucucagacagcaggccuggauguguagcccugcaugcugaccucccccgcc

SEQ ID NO: 4163819 - RNA, 60 nt, Human
ggcgggcuccucagcgcaagagugggagaguucuccaccccugggugcagggagcgagcc

SEQ ID NO: 4163820 - RNA, 103 nt, Human
ggcgggcugagcuccugggcagggcaguuuggcaggauggaggggugugcaggccaaccccgggacaaucgccgcacugugcccagugguggggccccaagcc

SEQ ID NO: 4163821 - RNA, 64 nt, Human
ggggagcagaagcagcaacaacugcaaccaccaauuuucagcagcuguguugugccuucucccc

SEQ ID NO: 4163822 - RNA, 77 nt, Human
ggggagcagcagaagugcgugggaacagaguugaacaggauguggacuuggaccugagccuggcccugccgcucccc

SEQ ID NO: 4163823 - RNA, 56 nt, Human
ggggagcaggcugggcugucugggaacauuugcccuguaauaucaguuugcuucuu

SEQ ID NO: 4163824 - RNA, 58 nt, Human
ggggagcaugcuggccuguuggugugucugauuuucacggaaggccuagucccucucu

SEQ ID NO: 4163825 - RNA, 58 nt, Human
ggggagccagcagccggcaccaccaucagcugaugauggauugcccacgcgguuccuc

SEQ ID NO: 4163826 - RNA, 76 nt, Human
ggggagccagcucccuccuugugauccgaaccuuucauuuccgggcgugauaaagauggggcuguguuuaauuucc

SEQ ID NO: 4163827 - RNA, 62 nt, Human
ggggagccugcaagacuggagggaggagcagggacccauuccuccuuuugcuugugcuuccc

SEQ ID NO: 4163828 - RNA, 58 nt, Human
ggggagcgccagcauggacaggaaguagcacaugggcuggugcaggcugggguuccuc

SEQ ID NO: 4163829 - RNA, 56 nt, Human
ggggaggaaggaacaggaaaguucuugcacaaacuguuacuguuaauucauuuccc

SEQ ID NO: 4163830 - RNA, 59 nt, Human
ggggaggagaauggcgauauaagagaagcaugagcuaguuucuagucaaucuucuuucc

SEQ ID NO: 4163831 - RNA, 69 nt, Human
ggggaggagaggugggaccugcccuaggcccuggcaccuuugggcccucaccaggaaccucuccuuuuu

SEQ ID NO: 4163832 - RNA, 75 nt, Human
ggggaggcacaaccugggagagccuuuccugaguccagcuggagccagagauaaaggaggccucccugcuucccc

SEQ ID NO: 4163833 - RNA, 104 nt, Human
ggggagggagagagcagucuuguugggucgugaauucuguuuugguuccagggaaauaggguuuccauuacauauggugcaacaggauauuuccuccacgcucc

SEQ ID NO: 4163834 - RNA, 94 nt, Human
ggcuacaaagguuauuuucauuuguucuauguaacuugucaauaacaacaagguacaaaguuauacagcgugggaauauauaacuaggguaguu

SEQ ID NO: 4163835 - RNA, 82 nt, Human
ggcuacacauaugagaauguaucauugcacuggaggguuauguacucucagagcuucaccuguuacauucgcauggacagcc

SEQ ID NO: 4163836 - RNA, 56 nt, Human
ggcuacagacugcauaagggcagggaucauauucaccuuauuuugcugcuguagcc

SEQ ID NO: 4163837 - RNA, 57 nt, Human
ggcuacagaggccgugagccuggcuuucguccaugcugggcucuggcggcuguagcc

SEQ ID NO: 4163838 - RNA, 70 nt, Human
ggcuaccagcgcuggguguaaaggagaggaagaaaaaaucuuccuuuucuauccuucuagguucuuggcu

SEQ ID NO: 4163839 - RNA, 77 nt, Human
ggcuaccuucccagcaccugugugagcuagaugugggucauuuuauagaugagcaaacagaguccuguugaguaguu

SEQ ID NO: 4163840 - RNA, 76 nt, Human
ggcuacuaagcugguuuccuuaucuauaaagugggcuaauacuguggauuaaaugagauuauguggaaaaguagcu

SEQ ID NO: 4163841 - RNA, 87 nt, Human
ggcuacuaggucaggaacuucuaggaaagcugcggaugggcugcugcuauuccacugagggguucaaaucagcugagucuaggaguc

SEQ ID NO: 4163842 - RNA, 58 nt, Human
ggcuacugaaaaagaauccagaccucugaaaggguuugugacaaauuuuuuagaaguu

SEQ ID NO: 4163843 - RNA, 78 nt, Human
ggcuagaaauccaagaucuaggugucaacagguuugauuucucccaaggccucucucuuacuuaggcuuguuuuggcc

SEQ ID NO: 4163844 - RNA, 92 nt, Human
ggcuagaauauaagcaggcagaaaaaugugaaaugagagacuggccuagucucccagccuacaucuuucuccugugcuggaugcuucuugcc

SEQ ID NO: 4163845 - RNA, 79 nt, Human
ggcuagagggguccugggaaggaagccagggaaggccacaccaucugccucuuucaucaggaaucuaauaucuuuuccc

SEQ ID NO: 4163846 - RNA, 59 nt, Human
ggcuagcacuguaaaggccaaaguagacaauuugcaggcucugguuuauagugccuucu

SEQ ID NO: 4163847 - RNA, 90 nt, Human
ggcuagcuaugaaggugggcaggaaaaacuaagggugauaacuuuaccugaauugauuugaccuguagggccauuaacuuuaugccuccc

SEQ ID NO: 4163848 - RNA, 65 nt, Human
ggcuaggagccgcugcacuaggugcuagggacccacugaauuuucaccagagcaguggcuugguc

SEQ ID NO: 4163849 - RNA, 68 nt, Human
ggcuaggcaggcucagagccuauaaaggauuaugccaucugaggaaaggacucuaguguguucuagcu

SEQ ID NO: 4163850 - RNA, 70 nt, Human
ggcuagggacacagauaaucacacagauaaauguaagucaucgucaguguucuaguuucugucuuugguc

SEQ ID NO: 4163851 - RNA, 106 nt, Human
ggcuagggaggagggcaggcuccccagcuggggcaacgcaccagcuccuugaagcuguucuguggcucggccagcugcugaagccucuccuccugcucuggaagcc

SEQ ID NO: 4163852 - RNA, 76 nt, Human
ggcuaggggcaaagggguaggguagggagcaaauccagagaaacaugccauuuucccuccuuuccuccccucagcu

SEQ ID NO: 4163853 - RNA, 95 nt, Human
ggcuagguuggagccagccugcauuuguaucuguaucuuggaagcaaacuuagaaugcagagacagauguggcauggacgcugucagcucuagcc

SEQ ID NO: 4163854 - RNA, 92 nt, Human
ggcuaguauuuuuaauuuugaugagguucaguuuauuaauuuuuuccuuuuauggauuuugcuuuuggugucaagucuuacaaauauuugcc

SEQ ID NO: 4163855 - RNA, 58 nt, Human
ggcuagugggacugugcaagaaguucccaggaacugcuugaugaagcucccacuggcc

SEQ ID NO: 4163856 - RNA, 60 nt, Human
ggcuaguucugugcugugauuccaggaguugcuucuggaaauggguauagagcacaugcc

SEQ ID NO: 4163857 - RNA, 90 nt, Human
ggcuaguuuaauggagaagggcaugguaguuuuaaaguuucuguugcuugaauugcugaagcugaguguuccucugcgugugugcuaguu

SEQ ID NO: 4163858 - RNA, 94 nt, Human
ggcuauaaagucagccagagaacaucucugagaccucagcuggggagaagcuauccccugaccgcugagauucaagacccucuggagaacugcc

SEQ ID NO: 4163859 - RNA, 64 nt, Human
ggcuauaacugcaaaaaugguagucuuaacaaugcuguuuucacacuugauuugcaguuaaguu

SEQ ID NO: 4163860 - RNA, 60 nt, Human
ggcuauacuucuuugauguucacagggaggaccucucugaggaauaagaaggaaguggcc

SEQ ID NO: 4163861 - RNA, 64 nt, Human
ggcuauagugucucuagaucaaagacagaggauuuccuccucacucuggaguccgcuaccagcu

SEQ ID NO: 4163862 - RNA, 55 nt, Human
ggcuaugaauggcugcauuuguaucuacauacaaacuucaguagugucaucagcc

SEQ ID NO: 4163863 - RNA, 79 nt, Human
ggcuauggaugguucugggcggcagcaggugcuagagacaaaggcauaugcuggggcagaagagccaagaucaggagcc

SEQ ID NO: 4163864 - RNA, 57 nt, Human
ggcuauugaugagaucucugcacuccuauuuuuauugcagcacuguucacaauagcc

SEQ ID NO: 4163865 - RNA, 100 nt, Human
ggcuauuucaggagcugcuugccuguggcuaguuggcucuguuggauggagcagugaguuaaugaggccaagggcaggaggcugacuuucugcaaaagcc

SEQ ID NO: 4163866 - RNA, 66 nt, Human
ggcuauuugaugguucuaaaacagcuuguaguuaagcuguggggagagaacacacaagcaguagcc

SEQ ID NO: 4163867 - RNA, 55 nt, Human
ggcucacaaaauguugcuuaauaaucaugcguugguucuguaacauucuguagcc

SEQ ID NO: 4163868 - RNA, 69 nt, Human
ggcucacagcacagagugguauggcugccagacuaaauuaugugcuugucauuuuucucuguguugucc

SEQ ID NO: 4163869 - RNA, 76 nt, Human
ggcucaccaagcagagacucugggaagaggcccaguggccucccagacagaccagagguccugcucacuggugucc

SEQ ID NO: 4163870 - RNA, 88 nt, Human
ggcucaccccacucguuuagguagcuuuggcguuucuuggcuguuggacccaaguagaacagagcuaccuugcccaugggauggagcc

SEQ ID NO: 4163871 - RNA, 64 nt, Human
ggcucacgccuguaaucccaacacuuugggaguccaagguggguggaucacgaggucaggaguu

SEQ ID NO: 4163872 - RNA, 60 nt, Human
ggcucacgccugucaucucaacuacucaggaggcugagaggugaaaggauaguuugagcc

SEQ ID NO: 4163873 - RNA, 71 nt, Human
ggcucagagagguuugugucuugcuuaagguuguacagccaggaagucagccaagcccaccuucugguucc

SEQ ID NO: 4163874 - RNA, 79 nt, Human
ggcucagauccucagccggcgggaaguucuugcccacuuucauaaagagggcugcaaucuuauugcugcguaggaagcc

SEQ ID NO: 4163875 - RNA, 95 nt, Human
ggcucagcugggcaguuuuucugcuggucucacuagucacuugugcugcuguauucagcuggugggucggcugggagagcugcaaugacugggcu

SEQ ID NO: 4163876 - RNA, 60 nt, Human
ggcucaggcuggagugcaguggggcaaucuuggcucacugcauucucagccuucuggguu

SEQ ID NO: 4163877 - RNA, 56 nt, Human
ggcucagggaaugaggaagaauucugucuuuugacuucugucuccuucuccuagcc

SEQ ID NO: 4163878 - RNA, 109 nt, Human
ggcucagggccuccagcggcugcacagcucagggccuggcugcggacucuggcgugcauggggucugggucugggcuguggagagugagaugcauggaccucucgagcc

SEQ ID NO: 4163879 - RNA, 80 nt, Human
ggcucaggucugugguggccgcgggagagccagcuccacgcuguguggcuggugacauuuccggcugccagggcccagcc

SEQ ID NO: 4163880 - RNA, 105 nt, Human
ggcucaucaugcuguucuucugggguuccggguuggaagcgggggcgggauaagcugagcuuugcuggaagccuggggacuucccgcgaagggugcgguggagcc

SEQ ID NO: 4163881 - RNA, 68 nt, Human
gggauagcuuggcuucugauguauuccugauuugugugucgugaacagcagguugccagaaagguucu

SEQ ID NO: 4163882 - RNA, 56 nt, Human
gggauaucauugagcccaggaguuugaaaccagccugggcaacauagugagauccc

SEQ ID NO: 4163883 - RNA, 77 nt, Human
gggaucaagcauauauaaaacugcaggggagaagagcagcucuuaccuuaauuuuuacauguuugaguuauugcccc

SEQ ID NO: 4163884 - RNA, 58 nt, Human
gggaucaagcugaacacugucuucaaggaugaaaucauauccuuguugagcucguucc

SEQ ID NO: 4163885 - RNA, 68 nt, Human
gggaucaauggcucugggugaauggcagauugcagcagcaauugcuuucuuaccaagagaauuaucuu

SEQ ID NO: 4163886 - RNA, 78 nt, Human
gggaucagacucgaaggggcuaucacgggacaugcccagguacagggccugcuucucagugagcuuggucagcuucuc

SEQ ID NO: 4163887 - RNA, 63 nt, Human
gggaucagcagacacagauaugcauauggcuuuuggagcccugugugaucugcuguuagcccc

SEQ ID NO: 4163888 - RNA, 77 nt, Human
gggaucagucuguguuuauagguuuggaaacuauaacaaggaagcauacuagucuaacuugugaguauagaugaccu

SEQ ID NO: 4163889 - RNA, 105 nt, Human
gggaucauucacacuuucuguauuccauuuggaauuccauuucugcauuuaaauuuauuuaagcagaugaaucccagauaaaguagaagccuuuggaugcagccc

SEQ ID NO: 4163890 - RNA, 65 nt, Human
gggaucugucuuuaguacaaaaaaugucauguuuauaauaauacagacauuuaaauucagaucuc

SEQ ID NO: 4163891 - RNA, 77 nt, Human
gggaucuuguuaaaaugcagaaacugauccuguaugucuggaggagaacuaagacucugcauuucuaauaagcuccc

SEQ ID NO: 4163892 - RNA, 62 nt, Human
gggaugagcucauccgagucacacugggccagggcucagccuauuccaggaugagcucaccc

SEQ ID NO: 4163893 - RNA, 72 nt, Human
gggaugauaguguuggcacugcgguaguguccucuccuaucucuuucuaccaucuguaaacacuuucauucu

SEQ ID NO: 4163894 - RNA, 67 nt, Human
gggaugcauccaucuuuccugcugaacugugagcccauggucaacaggcagggaugaaaugcaucuu

SEQ ID NO: 4163895 - RNA, 60 nt, Human
gggaugcgggguuccagguagcagcugagaacacggcuggugccuccucccugugcuucc

SEQ ID NO: 4163896 - RNA, 83 nt, Human
gggaugcucucuggaggccacuguacagauuguauggaugcaggccacguaaccuguuaagggcugacccaggauuucauccc

SEQ ID NO: 4163897 - RNA, 58 nt, Human
gggauggaucuuggcugaggcuggguuuuucuugcuagcuucuuucauuuuccauccc

SEQ ID NO: 4163898 - RNA, 63 nt, Human
gggaugggagugaugguguucuuagaccuucgcacgguuucugagcacguucauuuaaauccc

SEQ ID NO: 4163899 - RNA, 58 nt, Human
gggaugggcagagguucaacuucaacaauaugguuuguuuucugggcuguugcccccu

SEQ ID NO: 4163900 - RNA, 64 nt, Human
gggauggggagcuggaaaggggaaggaauaggaagauaaucuuccccuggaguuugacuauucc

SEQ ID NO: 4163901 - RNA, 65 nt, Human
gggauggggggaagcguccaugcgccauggugggcgcccaccgcucugguuguuccccucaucuc

SEQ ID NO: 4163902 - RNA, 60 nt, Human
gggauggguggguucugugagaggggcuggggagcuccucuggcaccccccaccuguccc

SEQ ID NO: 4163903 - RNA, 71 nt, Human
gggauguccaggaggcuuugggauccaagucuuggaguuuagaagacggauuugggccuccugcccagccc

SEQ ID NO: 4163904 - RNA, 75 nt, Human
gggauguuauaaagcguugugcccugguagcagaacaauuacugcuucaaauggguaugcuuuauaauaaaugcc

SEQ ID NO: 4163905 - RNA, 56 nt, Human
gggauguuuugaacugaaggccucaguaccuugcuggcuguuaguugggggcuccc

SEQ ID NO: 4163906 - RNA, 80 nt, Human
gggauuaaugaguacccagggaaugugggaugacucuaggcuggagcuggggucauuaaauuccgcuggucauuaauccc

SEQ ID NO: 4163907 - RNA, 91 nt, Human
gggauuacaggcgugagccacugagcccggccauuguuuguuuauaugcucugcuaauaaugguuuggcucugugucuccacccagaucuc

SEQ ID NO: 4163908 - RNA, 60 nt, Human
gggauuagcuuucuuggagaauuacauggucaugauuuucacccagaauagcugcuaccc

SEQ ID NO: 4163909 - RNA, 120 nt, Human
gggauuauuugguauucaugugagcaguuagguuuugugucagaguagaaugaccacucuaucaaaagcuccauacuauuuugacaugaaauugaucugcaaacaccuauccagaauccc

SEQ ID NO: 4163910 - RNA, 55 nt, Human
gggcucuguucuccuuugcaucucgggacaccccgaggucucagagcaagagccc

SEQ ID NO: 4163911 - RNA, 61 nt, Human
gggcucuucucucaggcuugauggaugggggaccggggcccggaggucugaggaagagccu

SEQ ID NO: 4163912 - RNA, 104 nt, Human
gggcugaaaggacugucugaggaucuucugaaauuuuguguacuuacauuuuucuaggaaaaggguacaaagauuucauaagauuuauaaggaggucuaugccc

SEQ ID NO: 4163913 - RNA, 67 nt, Human
gggcugaaaugccuuguaaauauuauucuguuuagaagauaguuuuaaaauguggcguuuuaugucc

SEQ ID NO: 4163914 - RNA, 69 nt, Human
gggcugacucaaccuugcaaaggcuauugaaucucaggaaguagaauuuugcuuuauugaguuagaccu

SEQ ID NO: 4163915 - RNA, 65 nt, Human
gggcugagugggccucuuacuugaaaagauucauguucccuucuagagagaaggccauauggucc

SEQ ID NO: 4163916 - RNA, 103 nt, Human
gggcugcaggcuggacacccaggagagucaagggugcagaggaaguccgaaggcagacugcuggaggauucacucuugcucaggguggccagacuuuugguuc

SEQ ID NO: 4163917 - RNA, 82 nt, Human
gggcugccuggaaagaggaaggaagccuggcaucucuggacacaugacccccaggcucuuuuuuggugcuuuccgugcuccu

SEQ ID NO: 4163918 - RNA, 99 nt, Human
gggcugcuuuccugcuggcauucuugcucccuggacagauucuugcaauacccagguagcaguagccugccagcgugguuuugauaaaagcacaugccc

SEQ ID NO: 4163919 - RNA, 79 nt, Human
gggcugcuuuggaaagcauggaaaccugaacuugaauccgccaguuaagugcuguuucccagccucagcucagcagcuc

SEQ ID NO: 4163920 - RNA, 64 nt, Human
gggcuggaacucaggaugguuaggaugcagcucaagccuuguggcaucucuggguucucugucc

SEQ ID NO: 4163921 - RNA, 76 nt, Human
gggcuggaccaccagaggccccgaccagcuuguccgaaagggugggcugcucggagccuccugugaguaccaggcc

SEQ ID NO: 4163922 - RNA, 99 nt, Human
gggcuggagccaggcaaaacugugagguuagcugggauuucaugagucacccuuuuagaccucccagcaaucucaugccaugaauuugcaucugagccc

SEQ ID NO: 4163923 - RNA, 70 nt, Human
gggcuggaguuggcaaggcauguacagcaggacaaggugauaccaaacuuuauaugcagccaacacuccc

SEQ ID NO: 4163924 - RNA, 56 nt, Human
gggcuggaguugggaagacaaacuguuucugcugcguuuguguucugacccagccc

SEQ ID NO: 4163925 - RNA, 57 nt, Human
gggcuggaucucacgugagaccuuaaaguuccuccugucucauuuggauucuagcuu

SEQ ID NO: 4163926 - RNA, 90 nt, Human
gggcuggaucuggugauaccucagcccaacccagcacuguggucuccauggcugccuguccugaggaguccgggccggagcuccaugccc

SEQ ID NO: 4163927 - RNA, 82 nt, Human
gggcuggaucuuuucugcacaaauuaaucaguuaaugcauagaaagcauucaacuagugauuguguuauaagagaucugcuc

SEQ ID NO: 4163928 - RNA, 64 nt, Human
gggcuggcccugucugcacacaggauuagggucaccagucuggugggcaggcacgggcugaccc

SEQ ID NO: 4163929 - RNA, 75 nt, Human
gggcuggcucaugcaucugggcuggcuggugaggauggcacuggccagcuguaagcuggggugaugagccugccc

SEQ ID NO: 4163930 - RNA, 60 nt, Human
gggcuggcugguagaauugugaccucugaaugacagauccaguuagaccacaguuacccc

SEQ ID NO: 4163931 - RNA, 66 nt, Human
gggcuggcuugggccaagagcagcuggcacugcagaucuguuggaauagcucugcccaggcugccc

SEQ ID NO: 4163932 - RNA, 57 nt, Human
gggcugggaggugagucuggggugaaggccccaaucacccccacaccuccuuaguuc

SEQ ID NO: 4163933 - RNA, 75 nt, Human
gggcugggcaggccucaugguguguccuuccuccugagggugaagggcaagauacgugagcauggccucagaccc

SEQ ID NO: 4163934 - RNA, 61 nt, Human
gggcugggccucucccucagcugugugggccaaggccucggcccagggggaggcugagccc

SEQ ID NO: 4163935 - RNA, 87 nt, Human
gggcugggggaaggauuguuuagcacuuacuguuuucugugacaguaucaggaguuuagccaauuugguccccauuugaaucaguuc

SEQ ID NO: 4163936 - RNA, 68 nt, Human
gggcuggugcugcuuucagcaucuauucagagguuucugaaucuggcauuugagaguaggacugggcc

SEQ ID NO: 4163937 - RNA, 69 nt, Human
gggcugguuaccuuauucauuugagccaguaaauauuaccuggccucacucugcaggaaggagcagccc

SEQ ID NO: 4163938 - RNA, 78 nt, Human
gggcugguuucuaccugcaucuccaggagguggcugucccuucagugagcaggcugggagcagcugggaacacagccc

SEQ ID NO: 4163939 - RNA, 55 nt, Human
gggcuguaccaagugcccgcugccgaggucgcugugacgggcgcggguagagccc

SEQ ID NO: 4163940 - RNA, 58 nt, Human
gggcugugucaaggauguugcuucucagcaggggcacagaagucuaagacaucagucc

SEQ ID NO: 4163941 - RNA, 66 nt, Human
gggcugugugcaguacggguccccugaccaguaugcaggucauuaaaccaaaccgcaugcuagcuc

SEQ ID NO: 4163942 - RNA, 55 nt, Human
gggcuguuccuuccacccagaggcaacuggagccuuccuggggaaggagcugccu

SEQ ID NO: 4163943 - RNA, 57 nt, Human
gggcuguuugcaggaggcgucaguguuuagcaacguggccucucuaccaggcagccu

SEQ ID NO: 4163944 - RNA, 64 nt, Human
gggcuuauugauuaaaacacagauugcugggcccugcaaaaaaaguuucugauucaguaggucu

SEQ ID NO: 4163945 - RNA, 74 nt, Human
gggcuucccggcgcugggaggugggucugcuuuuacagagaccuccguguacaccucccagcgccauuugcacc

SEQ ID NO: 4163946 - RNA, 61 nt, Human
gggcuucuacuugcaaaggauagggagagcuucuguucauccuugugaaguaggcuggcuc

SEQ ID NO: 4163947 - RNA, 88 nt, Human
gggcuucugggauaugggugcucuaggggucagugguuagaggccauaugacuggugccugugggguagcuuuuguuccauguggucu

SEQ ID NO: 4163948 - RNA, 64 nt, Human
gggcuucuugagcugccggcccuggggcauugagccucaggaggcccucgggcucaaggggccc

SEQ ID NO: 4163949 - RNA, 59 nt, Human
gggcuucuugccauggggacggggcuaccaugagccuagucacaacauucaggaguccc

SEQ ID NO: 4163950 - RNA, 62 nt, Human
gggcuugagguagaaaaagcuuguaguguuugagacaugaaaagccugucuagcuggaguuu

SEQ ID NO: 4163951 - RNA, 69 nt, Human
gggcuugcuuuuauuucuucacaaaaguagaagauaacucuauuuccuggaggaauggaagcaucuccc

SEQ ID NO: 4163952 - RNA, 57 nt, Human
gggcuuguuugugccucugcagaaccaauccaguuuuacaggaacaaaaacaaaccc

SEQ ID NO: 4163953 - RNA, 67 nt, Human
gggcuuucugagucaaacacugaaaagcugaacauuuucagucuuuaaaagcucaggaacugggccc

SEQ ID NO: 4163954 - RNA, 78 nt, Human
gggcuuugagaccagccugcuauguccccucagaucuggccucugaggccccugggcaggauggcauuuucacugccu

SEQ ID NO: 4163955 - RNA, 82 nt, Human
gggcuuuggagauggaggcagguggaggagugaaggcccaaggauggcucuucagcccuucccuguuuucaucagccagccu

SEQ ID NO: 4163956 - RNA, 84 nt, Human
gggcuuuuuaaaacuugcugaagcugccaaaccaguguuguguucucacaucccagaauccuagcauuguugggggcaaagccc

SEQ ID NO: 4163957 - RNA, 66 nt, Human
ggggaaaaccuguuuccugucuucucacuaugucuccacaugguguaauggacaagggaacucucc

SEQ ID NO: 4163958 - RNA, 75 nt, Human
ggggaaaaguaauugaugcaaucguauaguucaaaugcuuaacaggauuuaggauaguuuaaauugguucuccuc

SEQ ID NO: 4163959 - RNA, 69 nt, Human
ggggaaaggauagggaaugggucugagggcaaagaggccuagaacagcacaucuucugaucuuuugccc

SEQ ID NO: 4163960 - RNA, 90 nt, Human
ggggaaaggcagccagagaauggaugguuccucugaguagguucauuuauuaaaucuaccaugugcugugcauuggcugggcguuucccc

SEQ ID NO: 4163961 - RNA, 73 nt, Human
ggggaaaugucgucuucccugcccaaggcuguguugugacggcggcaugucugggcaagggagauggcgccuc

SEQ ID NO: 4163962 - RNA, 58 nt, Human
ggggaacagugacugugagggaccuguguccagcccugcucucuaguccugccucccc

SEQ ID NO: 4163963 - RNA, 72 nt, Human
ggggaagaggcgugauggauccaagacaggacguugaccucacccuggagaucucccucaugcccauucccu

SEQ ID NO: 4163964 - RNA, 107 nt, Human
ggggaagaugucccagcucuggacucagcacugauccucaugaagagcugcucgaccccaucguguauguuuacagaggaagugccuccauggcccacuucuucccu

SEQ ID NO: 4163965 - RNA, 65 nt, Human
ggggaagcugggaacuagcgggggaaaguggucuccugccacucugccccgaguucugggaaccc

SEQ ID NO: 4163966 - RNA, 58 nt, Human
ggggaaggagggccagggggacccuugggcaaagccgggggcugggcccuguuucucc

SEQ ID NO: 4163967 - RNA, 76 nt, Human
ggggaaggaguaguucuuauuuuggaacugaggcuucagugcaguuguagcucaaggguaaggacaccuccucccc

SEQ ID NO: 4163968 - RNA, 73 nt, Human
ggggaaggcagugagaucuuggagggugagagcacgcucuacacccagguaccgugauuucaucagcacccuc

SEQ ID NO: 4163969 - RNA, 85 nt, Human
ggggaaggcucagaagggcaccuucagucggaggguggagaaccaggucugggagccuucugcacugaccuuuugucccuucuuc

SEQ ID NO: 4163970 - RNA, 68 nt, Human
ggggaagguuugaaauagguauagaagaagcuaagugcaauauucuguuuauauuucaaaccuucuuu

SEQ ID NO: 4163971 - RNA, 85 nt, Human
ggggaaguccagguagcauugcuuauuucagcuaaaguugagaauaaauacaauuaaaugagcuguggcacugcccuuggccccc

SEQ ID NO: 4163972 - RNA, 59 nt, Human
ggggaagucugagauucccuuuaccugagaaggaaagucaguuggccagaucacucccc

SEQ ID NO: 4163973 - RNA, 88 nt, Human
ggggaagugaguuaaguggauuuagauaaugcuuuuuguucuggcugaaaguauucucccugaauuuucuuccuugaaucccuucucc

SEQ ID NO: 4163974 - RNA, 76 nt, Human
ggggaagugcagauuaacaaauuucauauccaauaauauuuauugaguguuugcuuuguuaaacugaaaauucucc

SEQ ID NO: 4163975 - RNA, 93 nt, Human
ggcugggaagucauauaguacagccauugagagccaggguucuagaaucugccccugcucugcugcuuacuagauggugacuuuaaaccugcc

SEQ ID NO: 4163976 - RNA, 76 nt, Human
ggcugggacugacuuaggcgagcagcugcucuuaccaggggccacugggcaugcuugccaugggccagugcuggcu

SEQ ID NO: 4163977 - RNA, 77 nt, Human
ggcugggacuugggcuaugcucuggacaaggcuggcuggugcaaugaugcccucuagaggauggaucaggcccaguc

SEQ ID NO: 4163978 - RNA, 69 nt, Human
ggcugggaggguagguaauuucucaugaccacauagccacacagagaaaguccugaucucucuaaugcc

SEQ ID NO: 4163979 - RNA, 66 nt, Human
ggcugggagugagugggcauguugcacauugagaaccucuuuacacaauugcccauccuccuagcc

SEQ ID NO: 4163980 - RNA, 80 nt, Human
ggcugggaguguaaggugcucacgggcucagggagggcuuggaaccucccuuuguacucaccagcaccacgcucugagcc

SEQ ID NO: 4163981 - RNA, 129 nt, Human
ggcugggcacaaggucgggaccagcgucgugcccagccuuugggucagaagauuccacaggaguagggcuggggguggaucuggagccggggagggguuuggagcugggauccggcagagugcccggcc

SEQ ID NO: 4163982 - RNA, 90 nt, Human
ggcugggcacaguggcucaugccuggaaucucaccacuuugggaggccuaggugggaggacuguuugaggcauggaguuugagaccagcc

SEQ ID NO: 4163983 - RNA, 67 nt, Human
ggcugggcacauggauagacucacugcugugaaaaauaugagugaaguaaaagaugugcauccaguc

SEQ ID NO: 4163984 - RNA, 75 nt, Human
ggcugggcuccugugggugggccagaucagguuggguauuggaaaaggccuccccauaggaauugcauuucagcu

SEQ ID NO: 4163985 - RNA, 69 nt, Human
ggcuggggaagcugaugacgcuccccuggcagcccuggggcggcggcuccaccagcuucuucaccagcu

SEQ ID NO: 4163986 - RNA, 60 nt, Human
ggggagaugauaagugcauuuguuucaccaagagugguuuaagaacauuaucuucuuccu

SEQ ID NO: 4163987 - RNA, 61 nt, Human
ggggagaugcucacgguucccucacuugcugcuccuguagaggagcuggcagcgucuccgc

SEQ ID NO: 4163988 - RNA, 121 nt, Human
ggggagcaacaugaaugaugccaggaaaggcuuucacggcacccagggaaucugcauuacguauuugcaaauuaaauuggacgcugggggaagauccugguguggugagcaacagcucccc

SEQ ID NO: 4163989 - RNA, 59 nt, Human
ggggagcaggggcucugcugccguccccuggugaguuacgguagcagcugcugucaucc

SEQ ID NO: 4163990 - RNA, 77 nt, Human
ggggagcggcagcaucuguacauagacgcucaauaaauaucugucgaaggagugagugaacaaugucugucaacccc

SEQ ID NO: 4163991 - RNA, 72 nt, Human
ggggagcucuaagaccucuucuaugaacgcaaaaaauacggcuucaagaagaggugauugguaaguggcccc

SEQ ID NO: 4163992 - RNA, 61 nt, Human
ggggagcucugaggcauaaccuguucugcuuugaaaucaguggcaggcuucuuugcucccu

SEQ ID NO: 4163993 - RNA, 123 nt, Human
ggggagcuguugacucuauuagaaacuaguuguagagaaagaucuuucauuaggcacugucagcuaugugucugaguuagcucuucucaguaauuaacuaauuaaauuaaguugucagccccu

SEQ ID NO: 4163994 - RNA, 70 nt, Human
ggggagcuuagggucucugaaugcugcagcuuccccugucaagcagagaaaagcuuagguucaguucccc

SEQ ID NO: 4163995 - RNA, 77 nt, Human
ggggaggaacaaugccugaugaccuccuggggccucagauggcccccaccaugagccuacaggugauuggacccccu

SEQ ID NO: 4163996 - RNA, 55 nt, Human
ggggaggagcccacagcaggcuccuaugucacaugagccuggggaauuccacccc

SEQ ID NO: 4163997 - RNA, 88 nt, Human
ggggaggcaggcacaaaaggaccccagcaugcagguucccccauucaggcagcagguucuguuuggcuccuuacuguccuguaucccc

SEQ ID NO: 4163998 - RNA, 57 nt, Human
ggggaggccagaaucuguguuggacuggccagagucuagccugucaucagccucucc

SEQ ID NO: 4163999 - RNA, 77 nt, Human
ggggaggcccaagggacugagggugcacaggcaggcagacgggcuggagcugccuggcaccuacaggggguucaccc

SEQ ID NO: 4164000 - RNA, 59 nt, Human
ggggaggguucaggcgagugugauucuagaagacaaugcagccuauggauccagcaccc

SEQ ID NO: 4164001 - RNA, 71 nt, Human
ggggagguacaagcuuuuagugauauuguuugagucuuggauaaagauucacuugaagcuagaaucugccc

SEQ ID NO: 4164002 - RNA, 61 nt, Human
ggggaggucagcuggaggggaggcuggcaccuuccaagccccucuccuugugcaccugcuc

SEQ ID NO: 4164003 - RNA, 104 nt, Human
ggggaguacuguugguauagcagaggacaguucuuuguugugugggaguugucaggcuugugcauugcaguuaacucaguauucuugcccuccacaacaccccc

SEQ ID NO: 4164004 - RNA, 73 nt, Human
ggggagucuaugggaacaguagcugcugagcucugugccagauccggcggcuucuguaucagaaagacagccc

SEQ ID NO: 4164005 - RNA, 87 nt, Human
ggggaguggaaccugagcccagguggcauuugguggcccuguaguuucagagagugagugccaaccugagcugguucccccugcccc

SEQ ID NO: 4164006 - RNA, 73 nt, Human
ggggaguggaucagauauucucuaagaacaauucuugcucugagaacucuuugauuguaucugggcauuccuu

SEQ ID NO: 4164007 - RNA, 72 nt, Human
ggggaguggcaggagggcaucacuuggaagccgacauuaccugucccuagagccgcaccuccuccacacccc

SEQ ID NO: 4164008 - RNA, 92 nt, Human
ggggauagugaugaugggggaugcuauguuugugugagggcagauauuauauaggacauguuuguaucuuccuuucaauuuugcuauaaacc

SEQ ID NO: 4164009 - RNA, 66 nt, Human
ggggauauauaaccuggauaaggcuuucaauuuuuauauuuaagcuguuacucaguuguuuucccc

SEQ ID NO: 4164010 - RNA, 73 nt, Human
ggggauauaucguguuccuggguugagaggauucuuucaacacaggaacaugauauaaaugucaguccucccc

SEQ ID NO: 4164011 - RNA, 87 nt, Human
ggggaucacuucagcccaggaguuggaggcuacgguaagcugugaucacaguacugcacuccagccugggugacagagugagacccc

SEQ ID NO: 4164012 - RNA, 62 nt, Human
ggggaucauuuaaaacaagucucuauuuuacaggugaagaggaagaugguugaguggucccc

SEQ ID NO: 4164013 - RNA, 81 nt, Human
ggggaucugccggcaucuucguggucgcaggcugcucugugccacugugccacugggggccggcaauacugcuggauuccc

SEQ ID NO: 4164014 - RNA, 72 nt, Human
ggggaugcacagggagggggccagcuccauucugccuugagaggccugugcuuucuucccuccugccacccc

SEQ ID NO: 4164015 - RNA, 78 nt, Human
ggggauggggggaaggguuguuaaugaucugaguuuauuaaaugucagaauuauguaggccugguucuuuccucugcc

SEQ ID NO: 4164016 - RNA, 60 nt, Human
ggggauggugggaaggcaaucuggccaggagaagcugcgcgggagacucccgccaucccc

SEQ ID NO: 4164017 - RNA, 107 nt, Human
ggggauugggcacuuccuguuuccaggcagcuggaaaacuccaggcucugaaaacgcucuuuauucuaagucuggcagaucgagcagcccagggaagccgauucccc

SEQ ID NO: 4164018 - RNA, 92 nt, Human
ggggauuuuugacaucguaaagcccuauggcuucaugugacagaugguacaauugaggccuagggucuugguuaugugugaauugagucccu

SEQ ID NO: 4164019 - RNA, 56 nt, Human
ggggcaaaaaaagggaguuauuuaauacuuccccuaauaacucuuuccuuuucccc

SEQ ID NO: 4164020 - RNA, 81 nt, Human
ggggcaaagcuugguuuugggauguacaaaggggucagagaugccucauuuucugcuuucaaggcuucauaguuuugccuc

SEQ ID NO: 4164021 - RNA, 72 nt, Human
ggggcaccauaaugucuguuugcugagcccggcaggcucuggagccgcuggugagcgcacagacacagcccc

SEQ ID NO: 4164022 - RNA, 74 nt, Human
ggggcacuuaggcauuuugcugcaggauuuuugauuuaaacaauuuuucaugcuaguaugugcuguucugucuc

SEQ ID NO: 4164023 - RNA, 76 nt, Human
ggggcagagccccugggaguagcugcugccugggauggaagaaggggagcagucagggccccgggggcccugugcc

SEQ ID NO: 4164024 - RNA, 82 nt, Human
ggggcagauuacuaaguuuuaugcaacuuagaagcaaauuuucaaauauucuauggguuuguauacuuaguauauuaguuuc

SEQ ID NO: 4164025 - RNA, 57 nt, Human
ggggcagcaugcaggaaccacauggcaaggauugccauguugugcugcuguggcucu

SEQ ID NO: 4164026 - RNA, 82 nt, Human
ggggcagccguguggcggggagccggccgggccuuccugcucaucgaggaccugacuggcuccugcuucgagccacugcccc

SEQ ID NO: 4164027 - RNA, 62 nt, Human
ggggcaggacagacauggcggagccugggccagacccccaggugcagcccuggaccugcccc

SEQ ID NO: 4164028 - RNA, 89 nt, Human
ggggcaggauuaaggugaggggaguaaagucauguuacacagaaaaaaacauucaguaaucaacaugcuucccucacuucaccuggccc

SEQ ID NO: 4164029 - RNA, 68 nt, Human
ggggcaggcagagaaggaacauuuacucaguaucuacuuuguaagugacacauuuugcuaagugcuuu

SEQ ID NO: 4164030 - RNA, 72 nt, Human
ggggcaggccucacagcauggaauuuucuggccccaaaugucaguagggcuguguuugagaaacgcugcccu

SEQ ID NO: 4164031 - RNA, 79 nt, Human
ggggcagggacaaagugagaaaggaauaucaguggggcagauccagaguucauuucuuugcuuauuuuauucuuuuucc

SEQ ID NO: 4164032 - RNA, 101 nt, Human
ggggcagggacaagucacagugguggaacgucguaauguugguuaaucaguuaaggcaggaacuggcuguuuuacuucuuuugugguuuuucggcugcccc

SEQ ID NO: 4164033 - RNA, 62 nt, Human
ggguuagguucuagaggcacaaugaugaauaagguuacuugaucugucuuagagcuugaccc

SEQ ID NO: 4164034 - RNA, 83 nt, Human
ggguuaguuuguagagcuccuggcuucugaaaucgugguuuugaaggacgauuaugacuuuggauaggcaggaaagguaaucc

SEQ ID NO: 4164035 - RNA, 76 nt, Human
ggguuauaaccaauuuaaauauaaagacuacaacuaaauauguauuucuagauauggagagugguacuguuaaccu

SEQ ID NO: 4164036 - RNA, 74 nt, Human
ggguucaaauucuugcucagaugcuugaaaucuaagugaauuuagauacaggcucucugagccucaguggacuc

SEQ ID NO: 4164037 - RNA, 58 nt, Human
ggguucagagucaggugugauacuauugauauacuaucaguuccccuccucuguaccu

SEQ ID NO: 4164038 - RNA, 95 nt, Human
ggguucccagccgccucgcaagucgcuccgguuacugggcucaaccgaugugcucccccauaaaguggcugagugacugugacuccuuggagccc

SEQ ID NO: 4164039 - RNA, 61 nt, Human
ggguucccaggaugccucugcugcuaauuaggaaugaggcagugagaggucuccugguccc

SEQ ID NO: 4164040 - RNA, 60 nt, Human
ggguuccuggagccaugucuugacugcucccgagcagauccauaaugguuucuggaagcc

SEQ ID NO: 4164041 - RNA, 101 nt, Human
ggguuccuggcgggggaguugcagccuggccguuuccuggagggcugggacugcccagcccagccgagggccuggcugcagcgccaccuucuaggcagccc

SEQ ID NO: 4164042 - RNA, 81 nt, Human
ggguucguauguaguucccgggcagcacagagugguggaaacaccaugugcauuggggccagggaggcaggcauggagccu

SEQ ID NO: 4164043 - RNA, 81 nt, Human
ggguucucuagagccagcugaguuacucugaggucuuggcaagugcagagauugagagcacagacugguguuggacagccc

SEQ ID NO: 4164044 - RNA, 70 nt, Human
ggguucugagcuguacuccuccccagggcaagauucugcuucugcugggaggcgcugcuucuaggagcuc

SEQ ID NO: 4164045 - RNA, 60 nt, Human
ggguucuguuauggaaguuuccuuuuuuggagggaaaggguuacuuucuuaacauaaucc

SEQ ID NO: 4164046 - RNA, 72 nt, Human
ggguucuuuuggggaagaggguuggccaguggcauuuucugcagauuugcuuucccuucccugacagauucc

SEQ ID NO: 4164047 - RNA, 59 nt, Human
ggguugagauggagaaggaagcuguuuaauaaaauuucuaauuucucucucucucucuc

SEQ ID NO: 4164048 - RNA, 88 nt, Human
ggguugagccugccugcaggugugcuuaaccugggccacagauuaaggcagguaagggagaaacaccugcagagguagguuuugaccc

SEQ ID NO: 4164049 - RNA, 73 nt, Human
ggguugaguggucauuagcuauuucaguaagacucccaagacuggaagcaaagcgcugagggccacccagccc

SEQ ID NO: 4164050 - RNA, 62 nt, Human
ggguugauguuauuuacauuguaguauuguugcgauuaagugaaauagcauuuaugaagccc

SEQ ID NO: 4164051 - RNA, 69 nt, Human
ggguugcgguaaaauaguguggagguggcuucuaaagauccuuauugccacuuuacugagcuguaauuc

SEQ ID NO: 4164052 - RNA, 75 nt, Human
ggguugcugugucugauggcugagacuuguguaugcuccagguagugacauuucuggccuuagagacggcuuuuc

SEQ ID NO: 4164053 - RNA, 65 nt, Human
ggguuggcuggaggcuauuccuugggagucagccccucccauuccagagcugccucugcuauucc

SEQ ID NO: 4164054 - RNA, 74 nt, Human
ggguugggaagaugauaauucacagugcccagaagauaguaaauauaguaagugaauuauuuucuccuccuccc

SEQ ID NO: 4164055 - RNA, 100 nt, Human
ggguugggagccuccgccugagaugcucuggggaguggagaugggcugaucagagcagggcccagcucuuccugggagcuaagccagcggccucccuccc

SEQ ID NO: 4164056 - RNA, 65 nt, Human
ggguugggggaaggagcuuggcgugccucuccacguagcagagcucuguucuuaucuccuugccu

SEQ ID NO: 4164057 - RNA, 79 nt, Human
ggguugguacacugguugaauuguauaacuggugauaucacugcugugguugaauaacucaugccaguauuugccacuc

SEQ ID NO: 4164058 - RNA, 88 nt, Human
ggguugguuccaagucuuugcuauugugaauagugccacaauaaacaugugugugcaugugucuuuauaguagcaugauuuauaaccc

SEQ ID NO: 4164059 - RNA, 64 nt, Human
ggguugugaggaggacccggggaagcccccuggacucgggcucccuggcucugccucagagccc

SEQ ID NO: 4164060 - RNA, 69 nt, Human
ggguuggccuagaauucucugguugaaaaguggugucagcuguggggagcuugggccaucaaucaaucc

SEQ ID NO: 4164061 - RNA, 90 nt, Human
ggguuggcggggagaggggcccuuuuucaggagacaguuuuccuuuuuaccuccuggaccugggguggccuccucuccacuggcaggccc

SEQ ID NO: 4164062 - RNA, 60 nt, Human
ggguugggacauguaagcuggaaguggcugcugucaguuuucuucauucucccacaaucc

SEQ ID NO: 4164063 - RNA, 94 nt, Human
ggguugggaugaacaagugcacuugaguacgcgcugcacaguguaggcaucaggccacgucagugugucucugcauuugggcagaugccaggcc

SEQ ID NO: 4164064 - RNA, 77 nt, Human
ggguugggcccugcugucccaggaaccugugauagugaaacuacacacuaaagcaacugagacacauaguucagccc

SEQ ID NO: 4164065 - RNA, 76 nt, Human
ggguuggggcaaacugagacacgaacuaugauuuggccaaaagucauuuugccagucuucagggaaugcuccgcuc

SEQ ID NO: 4164066 - RNA, 81 nt, Human
ggguuggucuggauaguucacaauggcuuuaccuaaguggguggcaugauggugaggauugcuggaagacugggcuaagcu

SEQ ID NO: 4164067 - RNA, 63 nt, Human
ggguugucagccaaaugagucauaaaugucaguaaagaaugugauuuuacacguuuggcuccc

SEQ ID NO: 4164068 - RNA, 59 nt, Human
ggguugugacccucgggacaguuugcaauaucuacagacaugcuuguuuuucacaaccu

SEQ ID NO: 4164069 - RNA, 79 nt, Human
ggguugugauaaugauacaaaucugaaaugcguuccaaaacauccuauguccauugagcuguuucauuauuacaacacc

SEQ ID NO: 4164070 - RNA, 64 nt, Human
ggguugugguagagcuuaaaugagguaaugcaugcacggaccccagcucugagccacaccacuc

SEQ ID NO: 4164071 - RNA, 56 nt, Human
ggguuuagauugcaagugcuagaagcauuuugcugaagcugcucucauccagaccu

SEQ ID NO: 4164072 - RNA, 90 nt, Human
ggguuuaggcuaaucugacuugucucuuugggagacauuuauuuuauuuucuuuuauauuuccuugagacggagucucgcucuguagccc

SEQ ID NO: 4164073 - RNA, 70 nt, Human
ggguuucaccaugauggcuaggcugguuuugaacucccgacuucaaaugaucugccugccucagccuccc

SEQ ID NO: 4164074 - RNA, 82 nt, Human
ggguuuccacugcuuauucacaugugaucucaugacauuguguugucugauacccucacuguaaacuaggucaguccuaccc

SEQ ID NO: 4164075 - RNA, 56 nt, Human
ggguuuccugggacaugagacuuucauuacgaaaacugggacagucccagggaccc

SEQ ID NO: 4164076 - RNA, 74 nt, Human
ggguuugcacaaggcuccuggcgugcgucugccccauggggugggugcuggaugccaggcugccuggccagccu

SEQ ID NO: 4164077 - RNA, 70 nt, Human
ggguuugcauaauguuuuaaaacaaauuuauagaaauauagaugauggaaaaaagcaauaggguaaaccu

SEQ ID NO: 4164078 - RNA, 77 nt, Human
ggguuugccagcgguuccccuaccccugacguggucuucucagcuccauagugcagaggaggagccucugcaggccc

SEQ ID NO: 4164079 - RNA, 84 nt, Human
ggguuugggaauaacacauagauauuuuaacuuuucgagagaggaaaaggaaaaaauggcuugugauagacauuuuuuggaccc

SEQ ID NO: 4164080 - RNA, 55 nt, Human
ggguuugguggaggggaagggcagugguucuugcccuugggcuuccacccagccc

SEQ ID NO: 4164081 - RNA, 62 nt, Human
ggguuuuauuaacuuuaacaucacugggcuuccagaggucuucugugugguuggugaaacuc

SEQ ID NO: 4164082 - RNA, 70 nt, Human
ggguuuucuuuuauauucuugucaaugugaugauuccaagaaucuuacaaguacugaauaugauuugccc

SEQ ID NO: 4164083 - RNA, 100 nt, Human
ggguuuugagcaguugucugaucaugaggcagggcugggguguggaguaaaucuuguuuucaauaaccuguugagugacauuuuauauugccauuggccc

SEQ ID NO: 4164084 - RNA, 60 nt, Human
ggguuuugaggcuucugagacugagugaaucauuugcuuaaacugaaagcuacaagauuc

SEQ ID NO: 4164085 - RNA, 106 nt, Human
ggguuuugagggaguugggguagaaaacuguaucuucuugggacuugaaucaaauguuuuaagucugccaagccagaucauguuagaccuucaccucuuagauccu

SEQ ID NO: 4164086 - RNA, 82 nt, Human
ggguuuugauauuguaggcauauuaaggcuagccagcuuaauuggcuccugcauuugugcuaacaacuauuagucuuuaccc

SEQ ID NO: 4164087 - RNA, 89 nt, Human
ggguuuuggaagggcucugucuuaguuugggguggggauaguuggagcugauuauguguaccucaaucugaggccuuuccucaaaaucc

SEQ ID NO: 4164088 - RNA, 56 nt, Human
ggguuuugggcaaugaccuaaacaccuuuaucagugccugggaaugcucaaggccc

SEQ ID NO: 4164089 - RNA, 72 nt, Human
ggguuuugguuuuuugguguaucuuauuccuucaaagcaggaaugugucauuauccagaauaaccauaacuu

SEQ ID NO: 4164090 - RNA, 83 nt, Human
ggguuuuucucugacaguggcaucauuuugugauugucuuauccaaacauuuaugguagucauugcaauuucagggauagccu

SEQ ID NO: 4164091 - RNA, 130 nt, Human
gguaaaaaaaucuaguacuaaagagauagcaagguaugacuggagcccaggccaucuaacucaguccaggucucuuacauuagguuuuaguuuuuguaacuuuguucuauuaucuauacuccucauuauc

SEQ ID NO: 4164092 - RNA, 92 nt, Human
gguaaaaaauaauuagaugcaaaaguaucauuuuaaugcuaucuuuaaauuuggacauaaauugugcuuuugacaucucaggaguuuauacc

SEQ ID NO: 4164093 - RNA, 68 nt, Human
gguaaacacaagauggccucuucugugauugcuuauacuuccaggaaacggcuauucuuuuguauauc

SEQ ID NO: 4164094 - RNA, 89 nt, Human
gguaaacaugugucaugggguuuguuauacagauuauuucauugcccccaaaauuuguuaacaauaaguccaggcauuuuccagcuacc

SEQ ID NO: 4164095 - RNA, 130 nt, Human
gguaaagaaaaagaaaaucuaauuauguggcauguuucagccagguguuccugguuccaaugacucagacccuauuggagcccugaggaucuggauaauugggccugcauagacagagaugaaggaugcc

SEQ ID NO: 4164096 - RNA, 70 nt, Human
gguaaagacagagcuguaggggaaagccuaaaauguuaacucuaucuucuaaagcucucucuaccauacc

SEQ ID NO: 4164097 - RNA, 66 nt, Human
ggcuucuauauguugguguaugggugaguuccauuuguaaaaugaaucaaacuguacacugaggcu

SEQ ID NO: 4164098 - RNA, 57 nt, Human
ggcuucucagaucucagcuuugaggucucaucuuggagguuuccgcuucugagaacc

SEQ ID NO: 4164099 - RNA, 125 nt, Human
ggcuucuccagucgcgucuuucucacucacuggggagcccggcgguggcggcaccuuucgagguagacccgcugagcugcuagcccgccggccagcgagugagaggucggacagacuguggagcc

SEQ ID NO: 4164100 - RNA, 55 nt, Human
ggcuucucccauucuucagggggucugauguggaaacuguguugaagggagaguc

SEQ ID NO: 4164101 - RNA, 57 nt, Human
ggcuucucgugccgaagcaagaucugcaugauuaugcugccaagcacgaguugaguu

SEQ ID NO: 4164102 - RNA, 63 nt, Human
ggcuucucucuucacauggcuuuccaugugguuuauccacauagucuuuguagcaggggagcc

SEQ ID NO: 4164103 - RNA, 65 nt, Human
ggcuucugaagaaguguaagucuguuucaccagaacauucgguggaggaaacacaucagaagacc

SEQ ID NO: 4164104 - RNA, 91 nt, Human
ggcuucugccccacucaaucuggcucgcuaggcucugggguccaucuggccagcucuccugggcuuaguggcuaggucuggggugggagcc

SEQ ID NO: 4164105 - RNA, 74 nt, Human
ggcuucugccucucuaacccaugcccaagccaccuccugaccccuggcugcaaaagaugggaggggcagaagcc

SEQ ID NO: 4164106 - RNA, 80 nt, Human
ggcuucuggggacggcuggggcaggcgaagcgcagcuggccccagacgcaagcccugcuccuccgucccacgacauggcu

SEQ ID NO: 4164107 - RNA, 58 nt, Human
ggcuucugucucaagcaccagcauaaucuggugccauguacugagauaugaaacugcu

SEQ ID NO: 4164108 - RNA, 83 nt, Human
ggcuucuucuuuaugucauaugccagcuguuaaggguggauucugauaaugcugcugacaggugauaaggaagaaaaguggcc

SEQ ID NO: 4164109 - RNA, 65 nt, Human
ggcuucuugauuaguguagucuucucuccugcuacuccugaggacacuaacauuugcaaggggcu

SEQ ID NO: 4164110 - RNA, 99 nt, Human
ggcuugcaacaauguuggugugaaauauaaucauugaauugcuuuguucuuuuuuccaauaaaagguggaagcuauugaguguuguuauuaggcaagcu

SEQ ID NO: 4164111 - RNA, 80 nt, Human
ggcuugcccgaaggaggggaggauuaaugacaaagacggccccgcucuuucccauucaaucccgcucugcgaggcgcgcc

SEQ ID NO: 4164112 - RNA, 59 nt, Human
ggcuugccuggaugguccccagagauaaagcaucuuauauucauggggguccagguacc

SEQ ID NO: 4164113 - RNA, 102 nt, Human
ggcuugccuuguaggcucauucauuuauuugcuccuuaggcauauuuugacacuugggacccugggaguagaagaaaaccaugaaugagacugagacaggcc

SEQ ID NO: 4164114 - RNA, 62 nt, Human
ggcuuggaaaugguaaugagcuagcugugugacaucagcaaauuacuugccauuucugagcc

SEQ ID NO: 4164115 - RNA, 56 nt, Human
ggcuuggccagacagggagcuccagugagcuggggcuucuccuguaggcucaugcc

SEQ ID NO: 4164116 - RNA, 69 nt, Human
ggcuuggcggaggaaacugaggcaagagggaagugucccagauaugcagccgguuuccccugagggguc

SEQ ID NO: 4164117 - RNA, 72 nt, Human
ggcuugggaacugagguaucuucgcccccaggaauccagcuccuuccccugccagaagcccagaucccagcc

SEQ ID NO: 4164118 - RNA, 120 nt, Human
ggcuuggguuuggaagggcugggaggucugugaccccugcccuguguuuggggacuagguaggcaggccugugacuguaggaggaggggguucaggucuugguccugcugagcccgaguc

SEQ ID NO: 4164119 - RNA, 82 nt, Human
ggcuuguauuuguguacaggaugacuguacuuauuuugguaaauagauacucguacauuguguacacaugugcuuuugagcc

SEQ ID NO: 4164120 - RNA, 80 nt, Human
ggcuugucucacagugcacuaagcuccggggcccggccagcccugggugcuggggacagggugagacugggggagcagcu

SEQ ID NO: 4164121 - RNA, 61 nt, Human
ggcuuucagaagccggaagggcaggcagguguuccaacuccccacuggcucucugguuacc

SEQ ID NO: 4164122 - RNA, 60 nt, Human
ggcuuucucacagcauggcagcuggcuuccaagugcgggaauguccugauugagagagcc

SEQ ID NO: 4164123 - RNA, 79 nt, Human
ggcuuugaaugcaucagggaacaaaguggcaaaaaugguauuugcagauucugucaguguuuccuagagcauauaaacu

SEQ ID NO: 4164124 - RNA, 75 nt, Human
ggcuuugagggagcaggucuuugguaaugcuuacgaucgguggagagcuuuagcugagaccugcuuuuacagacc

SEQ ID NO: 4164125 - RNA, 67 nt, Human
ggcuuugcagggauuaccuuauuuuuuccuuucucacagaaaucagaaauggguauuccucagggcu

SEQ ID NO: 4164126 - RNA, 68 nt, Human
ggcuuuggcuagaaucugauggcccgucugggcucaggcugagcccgucgguuccaggaagccaaguc

SEQ ID NO: 4164127 - RNA, 55 nt, Human
ggcuuuguauuccauuuagauguaauucaacaucuucagugagaccagcaaggcc

SEQ ID NO: 4164128 - RNA, 85 nt, Human
ggcuuugucuucucuauauguguuuuucugcagacaagccauugaguuuagaagggaaugcaucacauauaaccuagacaaggcc

SEQ ID NO: 4164129 - RNA, 55 nt, Human
ggcuuuuaaacaccuggggagugggggaggugcccacuccucagucccagagguc

SEQ ID NO: 4164130 - RNA, 82 nt, Human
ggcuuuuacuuuaauccacaauagagauuaucugcacuuuaaguccuuguuagaguauuugauugugaaucgaaugagaguc

SEQ ID NO: 4164131 - RNA, 61 nt, Human
ggcuuuuccucaggaggagacgcguccgcgccggcgucgccucgccgcucugggggcggcc

SEQ ID NO: 4164132 - RNA, 87 nt, Human
ggcuuuugaauauuuaauaguaucacucucucuccucugcucaugcagaaggcagggaauguggugcuagaugaguauauuaacgcu

SEQ ID NO: 4164133 - RNA, 64 nt, Human
ggcuuuugccuaggguugacccguuuccgccacugaucagcugaaugacccugggacaaguccc

SEQ ID NO: 4164134 - RNA, 60 nt, Human
ggucaucauaagggccaaaggugugaaaguaaaagacaacauuuggaacuuuuugaugcc

SEQ ID NO: 4164135 - RNA, 61 nt, Human
ggucaugaaaccagcaaggaugagacacaaaauuuuaacccaugcuucuggaaccaugauc

SEQ ID NO: 4164136 - RNA, 82 nt, Human
ggucaugcagcuaguuagugguagaaucaggaugaggacccaagucuucugaccccuggucuacagcugucucugcuagauc

SEQ ID NO: 4164137 - RNA, 59 nt, Human
ggucaugccuggcuucuuagacaaaagacauagaaguagaugugugaggccaggugacc

SEQ ID NO: 4164138 - RNA, 68 nt, Human
ggucauggccuuuuuaucucaccaaguguggugccugcuccuucacaugcuuggagaaggcuaugacc

SEQ ID NO: 4164139 - RNA, 56 nt, Human
ggucauggcuauuaggcagucacacaagucauaaauggcuacugaggcccaggacc

SEQ ID NO: 4164140 - RNA, 70 nt, Human
ggucauggucugcugagcagcaagaagcugcccuaagcaagcccucuuccagccagcacagacauggacc

SEQ ID NO: 4164141 - RNA, 108 nt, Human
ggucaugugugugcaugugcuuaugugugcauguaugugcgugugugcaugccuguguauuaauaugugugugcauguaugugugugcauaugugugugugugugguc

SEQ ID NO: 4164142 - RNA, 60 nt, Human
ggucauguuggcugaggcuguauuuguuuuugacauguagaggucauggccaguaugauc

SEQ ID NO: 4164143 - RNA, 89 nt, Human
ggucauuguguguccaaggguuuguagguguucaccaguccacugggaagccagugacagcaccugugcccugauggagaccaccaacc

SEQ ID NO: 4164144 - RNA, 106 nt, Human
ggucauuuggccaaaugccuggguuuuguuguuguuucuuauugacgagugaugaaggagaaaccaauagaagcaagaacagaauggaggugugugccuagaaacc

SEQ ID NO: 4164145 - RNA, 83 nt, Human
gguccaauagaaaggguggaauuguuggcaucggagauaucuugguucaaauucaugcacuauuucuucuagcuauugugacc

SEQ ID NO: 4164146 - RNA, 85 nt, Human
gguccacagaccccaugaugcggaggggauggcagugccccagucugaacgcagccucucucugcaucuggagggcacggggacu

SEQ ID NO: 4164147 - RNA, 57 nt, Human
gguccacaugccuauuaaccaaacgagcagcucaggcuuggcuggauggcuggggcu

SEQ ID NO: 4164148 - RNA, 80 nt, Human
gguccagaaagacuccucguguggacuuugcuucuuuauuugccaggaagcaguuuggcccgagcaguucuuuuuugacu

SEQ ID NO: 4164149 - RNA, 60 nt, Human
gguccagaaaugcaagccagguguagaggacaauagaacuacccuaccagcuucuggacc

SEQ ID NO: 4164150 - RNA, 87 nt, Human
gguccagaacugggcucgcucugguuuggcucuguuaaaacgucgaugcaggcccugggcaguuggagugaggcgguucuugugauc

SEQ ID NO: 4164151 - RNA, 60 nt, Human
gguccagaagcugguaggguaguucuauuguccucuacaccuggcuugcauuucuggacc

SEQ ID NO: 4164152 - RNA, 65 nt, Human
gguccagcucccuagaaaacagacucagauguagauugcaugcaggaaguuuuuugggaaguacc

SEQ ID NO: 4164153 - RNA, 56 nt, Human
gguccagcugaucuugacccagccuggagaacaagcggucaaaucaccagcggacc

SEQ ID NO: 4164154 - RNA, 76 nt, Human
gguccaggaagcacauuuggaaaacauggacuuagacuaauucuccuucauuguucuggccaaaguuuucuguucc

SEQ ID NO: 4164155 - RNA, 71 nt, Human
gguccaggaaggaaaggguguggagacagaacuauccuuuccaaucagucccuuucuuuuccuaccagacc

SEQ ID NO: 4164156 - RNA, 70 nt, Human
gguccagggucagagaucggccaugugagcaucccugcuccagcucaguggccuccuccacugacccgcc

SEQ ID NO: 4164157 - RNA, 78 nt, Human
gguccagucaacuaaagacagaagccucuagaaaugaaauucuucagaggaagucagucuuuaucugcaaacuggauu

SEQ ID NO: 4164158 - RNA, 75 nt, Human
gguccagucacuucauuuuacagauggggacucuaagccccagagauuugucuacaugaugugauuauaugggcc

SEQ ID NO: 4164159 - RNA, 57 nt, Human
gguccaugagacagcaacugaaaguauaaagaaugcuucacaguguggucaugagcc

SEQ ID NO: 4164160 - RNA, 83 nt, Human
gguccaugugaugugcauucacuuuaggagcacugacaaauguauuuuuuucagucuguaaaggugaggacagaucacagacc

SEQ ID NO: 4164161 - RNA, 76 nt, Human
gguccauuucuuccaccacucuguguacaacuacuacaugucagguaccauggacacaguggugaagguacagacu

SEQ ID NO: 4164162 - RNA, 65 nt, Human
ggucccaaggaggaugaggcuagacagugaaugguucaucacaacucauuccuauccuggagacc

SEQ ID NO: 4164163 - RNA, 65 nt, Human
ggucccaaucuaaucacaugaguccuuagaagaaacuuaagagggaaaugugacuauggaagacu

SEQ ID NO: 4164164 - RNA, 73 nt, Human
ggucccacagaggaugcccaagcgaucuccaagcccagacuuuguuucgguugccuguggcucccuguuaacc

SEQ ID NO: 4164165 - RNA, 88 nt, Human
ggucccacuguucuucccaaaccugggcauuccucugcucucuccuccccaaccagaaaggcaggugcccagagagcacgaugggucu

SEQ ID NO: 4164166 - RNA, 64 nt, Human
ggucccagaacccugccagguccugggcuguggggcguggguuggcaucaggguucugugggcc

SEQ ID NO: 4164167 - RNA, 97 nt, Human
ggucccauguuucauguaaaagauuauuuuccuguuuagucuuaggugauauugggugaguauauggaagauaaucuugaacuagagggaagggacu

SEQ ID NO: 4164168 - RNA, 65 nt, Human
ggucccucugaugaacuguuuuaacagcauauuuuuauguuccugaggcaugugucaaugguucu

SEQ ID NO: 4164169 - RNA, 58 nt, Human
ggucccugcccuaaaacucgucagugccucauaaccagcaaggacaaguggaggggcc

SEQ ID NO: 4164170 - RNA, 55 nt, Human
ggucccugcugaagccuugguguuuggguccugauaccuuuggcccaaggggucc

SEQ ID NO: 4164171 - RNA, 68 nt, Human
ggucccugggaaaggagagggcagccugauccucgcgacagcgucucuacccucuuucuuccuuggcc

SEQ ID NO: 4164172 - RNA, 72 nt, Human
ggucccuuaauccaggaggcuucguccguggaguuggcugacucaacagacucugccaucccuuaggggucc

SEQ ID NO: 4164173 - RNA, 81 nt, Human
ggucccuuacuggcuuccauaaucuuguuuauuuacgggacacccauaugaaaugccauuacuggaagaagucuugggacc

SEQ ID NO: 4164174 - RNA, 90 nt, Human
gguccgcccuugucucugccuguccugaggaugagggucaucaacugagucggggccacagggcagccaugggugcgcgagugcagggcc

SEQ ID NO: 4164175 - RNA, 73 nt, Human
gguccgugguguuuucauuuucacauuugcccuuuugucuagacaguggcaauguagagagugaucccguucc

SEQ ID NO: 4164176 - RNA, 79 nt, Human
gguccuaauggaggacaaugucaccuucagauggugugugcaucucuggaggacguguccaccaugaaagauuuggacu

SEQ ID NO: 4164177 - RNA, 55 nt, Human
gguccucaaucccaacaaggcacccagaaagcuagccugucugguccugggggcc

SEQ ID NO: 4164178 - RNA, 62 nt, Human
gguccucacccgagugugcugccuuguuugguuccacuuuugcagcagcucagggaggcacc

SEQ ID NO: 4164179 - RNA, 63 nt, Human
gguccuggcucugugggaccuggccuaggauggaaacuuaggucuggaggcggagucaggacc

SEQ ID NO: 4164180 - RNA, 56 nt, Human
gguccuucauaucauggauuauauuccugugcauauuuuccaguuugucaaggauc

SEQ ID NO: 4164181 - RNA, 94 nt, Human
gguccuuccucagguccgaaucagaaacuuuggagaauggcacuacuguuuaacgagaccuucaaguaauucugauggcuagaguuugaggacc

SEQ ID NO: 4164182 - RNA, 77 nt, Human
gguccuucucgggguagacgccagcucggaggaacgaggccuuccagcuguccacgucuuccugggagucacaggcc

SEQ ID NO: 4164183 - RNA, 100 nt, Human
gguccuuguugaaauccacuguaauagacagugaacuccuagcaagugguauugguucucggucaucuguguauccucagugggauaucuugaaagggcc

SEQ ID NO: 4164184 - RNA, 56 nt, Human
gguccuuuaaaguagaccuguuuguaagacacuaagcauguuuacacucaggggcu

SEQ ID NO: 4164185 - RNA, 66 nt, Human
gguccuuuggcugccaauggcuuggaaaggcuacagccccaggcuugagggggcuagugagagacc

SEQ ID NO: 4164186 - RNA, 106 nt, Human
gguccuuuuggaaccauugccuuuuuggugauaauuuguuacuguuccaaacagucauuagaaacaguacaaaugcagccagaguaguugggagcuaaauaugacu

SEQ ID NO: 4164187 - RNA, 76 nt, Human
gggggcaggaggccuggcuggggagauccagaggccuauggccggcucuccucuucaguucaaggccuccgucucc

SEQ ID NO: 4164188 - RNA, 60 nt, Human
gggggcaggguaggguagguuaaagccagugauggggccucagcucugcucugcaaaacc

SEQ ID NO: 4164189 - RNA, 63 nt, Human
gggggccacuacauauuuaggaccacuuuaaacuacuggugucauuuuauguauguggucugc

SEQ ID NO: 4164190 - RNA, 59 nt, Human
gggggccauaaugcuauuguagaaccacauuauuuuacaaugcacuuuaaaugguuccc

SEQ ID NO: 4164191 - RNA, 81 nt, Human
gggggccgcagaggggcuugaggcccugauggccaaggaagacggagccaggggcagggccaugggccucguguggccccc

SEQ ID NO: 4164192 - RNA, 63 nt, Human
gggggcucacaccucccuaagggcucgcuaauugaaccccuugggccugagguugagaaaccu

SEQ ID NO: 4164193 - RNA, 74 nt, Human
gggggcucagcaggcucugguucaucaugauggcugugaugcugcccauuaccacuggcccugcuauagccucc

SEQ ID NO: 4164194 - RNA, 75 nt, Human
gggggcuccaggcgagaauguguucccgccuuucccagcgucuagaggcacccacaucccuugcucggggccccu

SEQ ID NO: 4164195 - RNA, 71 nt, Human
gggggcuggaauauccaucaaccaacgcccaccuauaguugguugaggucuccaaguguucuagccagccc

SEQ ID NO: 4164196 - RNA, 59 nt, Human
gggggcugggaggaagaagagacugacuucagucugagccugcugcccugucagccucu

SEQ ID NO: 4164197 - RNA, 68 nt, Human
gggggcugucucucaccacagacacacaggauggcuaaguccuuaaccucugggagggacaagucucc

SEQ ID NO: 4164198 - RNA, 77 nt, Human
gggggcuugggcuucaaugugugaauuuuguggggacauaauucaguccauagcacguggaaugcucaugagccucc

SEQ ID NO: 4164199 - RNA, 81 nt, Human
ggggggaagaguguuuauuucauguuuuacuaaggaaaaaacuguucaagaaccuuauagaacuuaaauauguuuucccuc

SEQ ID NO: 4164200 - RNA, 56 nt, Human
ggggggaucaacugagauggcuuaggauuuaccuggaugccugcucugcucucccc

SEQ ID NO: 4164201 - RNA, 114 nt, Human
ggggggcagagaaacgcuugaaaagggaaguugcacauguuccccucucucugaucugaugggaaugcacuagacugugaaacuuccuccuccaccucuucucccgagucccuc

SEQ ID NO: 4164202 - RNA, 78 nt, Human
ggggggcaguuuuccacuggacagcuacuccaugucaucuugagucagcuggugccacucagucaaagaccgucccuu

SEQ ID NO: 4164203 - RNA, 60 nt, Human
ggggggcuguucuggacaggaagaugaacaaaugccuuccucuucucuucacugcccccc

SEQ ID NO: 4164204 - RNA, 85 nt, Human
gggggggacccagagacccgcagccucggagcugggccuagagcaaggcagagcaccaggucgcuggcacgcucgcauccucccc

SEQ ID NO: 4164205 - RNA, 109 nt, Human
gggggggagaggggagcauuuuuaauguuaauguuuuaaguuauagagaauauucaauuacauuuuacuaaaaugggcuuaaaauuagauaugguugucucuucccuuu

SEQ ID NO: 4164206 - RNA, 74 nt, Human
ggggguagcuuaagggcacguugggcuacuugaauggaaaaugcgguagcuugguggcccuccuggcuggaccc

SEQ ID NO: 4164207 - RNA, 81 nt, Human
gggggucgcugcugaaaacaauaaugaugagacuguaaaauguauaagaaaaucacauuauaauuucuaguuguuuccccc

SEQ ID NO: 4164208 - RNA, 71 nt, Human
gggggucucuuuuggcucaucucaguccuaggaggggacaugugccuccugacccuuugaggcggaucccc

SEQ ID NO: 4164209 - RNA, 57 nt, Human
gggggugaaggccacggucucucagcaagcucgugguggggaugggcccucacccuc

SEQ ID NO: 4164210 - RNA, 109 nt, Human
ggugaggcgacagcugcuucugcaugaagugcuucauuacaggcgugggcaaccauccgccccaagaggcugcuuugaugacaggagcaaaauuacugaaggcgucacu

SEQ ID NO: 4164211 - RNA, 59 nt, Human
ggugaggcuuggcaaaagagugguauagccauggcuuaaucacagaucuucccagcccc

SEQ ID NO: 4164212 - RNA, 85 nt, Human
ggugaggggcagucacagacaguaugguggggcugagaaacauauggcuuccucacuuaauauugcugcacaguugucccacacc

SEQ ID NO: 4164213 - RNA, 56 nt, Human
ggugaggggcuccucugcccggccgcccccacugggaagugaggagccccucugcc

SEQ ID NO: 4164214 - RNA, 56 nt, Human
ggugaggugguaagucagguugaccuucucgucucccacucaugacuccacucacc

SEQ ID NO: 4164215 - RNA, 62 nt, Human
ggugaguagaggucaggggugcugcuaaauaucuuaccaugcacaggacagccucuacuccc

SEQ ID NO: 4164216 - RNA, 55 nt, Human
ggugaguagguuucauuuugcaaugaaauaagauuugcaaacugaaaaauucacu

SEQ ID NO: 4164217 - RNA, 75 nt, Human
ggugagucgcugcagcugcaggcccccagguccucgugagaggcagucagcaccugcagcugcuggggcuccacc

SEQ ID NO: 4164218 - RNA, 77 nt, Human
ggugagugggccaaagguaaagaucugcugugggcaugcaauugccucucagcuagcuauaccucaccucucucauu

SEQ ID NO: 4164219 - RNA, 86 nt, Human
ggugaguugcaucuaccauaucaaagaugggaagucugaguuacagauagacucaacaucuuucgauguaauagguguauuuuauu

SEQ ID NO: 4164220 - RNA, 58 nt, Human
ggugauaagagcauggccccggggcccggcgccuuggcccccggaacgcucugugacc

SEQ ID NO: 4164221 - RNA, 55 nt, Human
ggugauagugguggugauucuuugcaaaggacaaaguacuuccacagcuaugauc

SEQ ID NO: 4164222 - RNA, 56 nt, Human
ggugaugauuucccugcucacuguauacagaacacagugacuaugacauuauuacc

SEQ ID NO: 4164223 - RNA, 80 nt, Human
ggugaugcagagggcggggugccuaccuucauggagcuugcacuccacaagugaaguacaccugccauacgagcguuauc

SEQ ID NO: 4164224 - RNA, 68 nt, Human
ggugauggauggauuaaugaguggaggguuggaugaaaugaucacaauucagugucuacuccauugcc

SEQ ID NO: 4164225 - RNA, 61 nt, Human
ggugauggggagauuguggaauggggcauugccugagucccauaauguugccaauguuauc

SEQ ID NO: 4164226 - RNA, 63 nt, Human
ggugauguacauuuuccuaauguuuugggacucuugaaaaccaguggaaaguuuacaaacauc

SEQ ID NO: 4164227 - RNA, 56 nt, Human
ggugaugugaccguggaggcagagauuggagugaugugcccacaauucacaaugcc

SEQ ID NO: 4164228 - RNA, 129 nt, Human
ggugaugugcuuaugaaauacccucacuaaaugacugaggaagagguaccauuuguagcacuaggcuacaaauggacucucaucuuuugcauuuacauguuccuauccguacuucuaaguacuagcacc

SEQ ID NO: 4164229 - RNA, 68 nt, Human
ggugauguuuaugaccuccauaaggauuuccauuaaucccuaauuucugucggucaugacacucuacc

SEQ ID NO: 4164230 - RNA, 61 nt, Human
ggugauuagcugaggcagcgauucuccaggugugguccuggacagcagcagcagugucacc

SEQ ID NO: 4164231 - RNA, 72 nt, Human
ggugauuaggaggugaaugagguuggugccuuuauaaaagagacuugaaggagcuuguucgccuuccucacc

SEQ ID NO: 4164232 - RNA, 71 nt, Human
ggugauucugccccacuguuugguauugaguaagaaaguaagaggaucucagagaacucgggcagaugacc

SEQ ID NO: 4164233 - RNA, 56 nt, Human
ggugauuuucgaguuucauguuucuuccugccucggggcucugaccggaaaucauc

SEQ ID NO: 4164234 - RNA, 63 nt, Human
ggugcaaaaaucuaucaccagcaacagaaggugcagacuguguugguggcgguaauuuugucc

SEQ ID NO: 4164235 - RNA, 71 nt, Human
ggugcaaagaugcugauguuggaucaaccgaggaaauacaguuuuggucacaaaagugguauuuaugcacu

SEQ ID NO: 4164236 - RNA, 74 nt, Human
ggugcacagagcacagaaguuauauguuacuuuucuaagguaauggcguguuucuuuugagcugaaacuguacc

SEQ ID NO: 4164237 - RNA, 59 nt, Human
ggugcacugguguguuaguaagggaugccagaaaugcgugccuucucuuaucagucacc

SEQ ID NO: 4164238 - RNA, 57 nt, Human
ggugcagaguccacagaaagcugucuaaauacaugcuuggggugggucucugauacc

SEQ ID NO: 4164239 - RNA, 85 nt, Human
ggugcagcaauuuuaacccagugcuuuuaaaacaacaucaguaacugauuaugcaugagacaguacuaggguuacagucugcucc

SEQ ID NO: 4164240 - RNA, 91 nt, Human
ggugcagcuucuauagcaggacugaagggcacagggaaugucucuaaacaaccgucccauucauauguuucugaguccucuggcagccacc

SEQ ID NO: 4164241 - RNA, 75 nt, Human
ggugcagguuauagggcacuccagauucuugcucuggcguguucuggcaagagugaggagugucucuagccuacc

SEQ ID NO: 4164242 - RNA, 59 nt, Human
ggugcagugaaggaaguuugucuugggcugccuccaagcaccccuuccucccugacucc

SEQ ID NO: 4164243 - RNA, 55 nt, Human
ggugcagugugauuuucuggcugaguggugucugccucagucauauaucugcacc

SEQ ID NO: 4164244 - RNA, 63 nt, Human
ggugcaugcaccaguucaaaugggaaauaaaaagcacuuacaucuugagcagugcuuagcacc

SEQ ID NO: 4164245 - RNA, 59 nt, Human
ggugcauggaaagaguaaguaaguaauaaaugcuacuuauuauuaauauuccaugaacu

SEQ ID NO: 4164246 - RNA, 59 nt, Human
ggugcauggggagcacucucagggccucucaugcgcauccugagcccuuccugugaacc

SEQ ID NO: 4164247 - RNA, 91 nt, Human
ggugcauuaacuuccuggaaccacuaggcuaccaauuaguaacagacugcuucuuugugccuauuggugacccacaggagauaaugucacc

SEQ ID NO: 4164248 - RNA, 87 nt, Human
ggugccaaacuuaauauucugccuguagucccacaccuccaucuggcucugacuugggguggcugguuauuacaggcaaguggcauc

SEQ ID NO: 4164249 - RNA, 107 nt, Human
ggggugguauaugggucaugaaggcaagggugguauugggagcauaccuccuagccccacaccugguugccccuuuaccacuuugcauugucauucauugccaccuu

SEQ ID NO: 4164250 - RNA, 71 nt, Human
gggguggugccuuaggugauggcucagcuggcacugccuccuggggugccaucaucuucaggugcagcucc

SEQ ID NO: 4164251 - RNA, 67 nt, Human
ggggugugucuuuugcuccuggagcccagacaacucaagauaaggcuuugagagccaagaacauccc

SEQ ID NO: 4164252 - RNA, 55 nt, Human
gggguguuucauugcaucguguccgugcuggcugacugauggaauuugacauucc

SEQ ID NO: 4164253 - RNA, 64 nt, Human
gggguguuuuauuaacugaucuuuuugguuucuugacuuuuuaaauucagcagugaaaugcccc

SEQ ID NO: 4164254 - RNA, 68 nt, Human
gggguuaaggagcaggagagucuucauuguuucccuucagaacugacagacuuuacuucuccuauucc

SEQ ID NO: 4164255 - RNA, 95 nt, Human
gggguuagacuuuccuucucagagaugguauaauuaaguuagaugucuuuuuuuagacaaucacacaugcaauuauacagaugggaaguagcuuu

SEQ ID NO: 4164256 - RNA, 79 nt, Human
gggguuaguagguaauugguagaaggaaaagggaggucuggaaaguccucagccucacacaguuaucucuucauaccuc

SEQ ID NO: 4164257 - RNA, 58 nt, Human
gggguuaucagcugucgcuggagcccaggcagggaauauguuggcagcugaaagcucu

SEQ ID NO: 4164258 - RNA, 68 nt, Human
gggguuaucuguuaaaacaagcuuuaaacuauuaauagagugaaauuacagcuucagcagcuaacccc

SEQ ID NO: 4164259 - RNA, 67 nt, Human
gggguucuucccagucccaagaaaagccaguuucucucugcagcuaauugggauuggggaggagcuu

SEQ ID NO: 4164260 - RNA, 68 nt, Human
gggguugggugugggcccugaugucagcauguuggggaaucugucuggcauaguugcucccugacucu

SEQ ID NO: 4164261 - RNA, 56 nt, Human
gggguuggugccuuuauaaagaacacaacacguaucugcugaauggagccaaccuc

SEQ ID NO: 4164262 - RNA, 72 nt, Human
gggguuugcagagccccagauuggagaguggaaggcuggacaccacucuccaaauaugggccuguguguccu

SEQ ID NO: 4164263 - RNA, 116 nt, Human
gggguuuuguuuuuuuggcccaggaauaugcuguuuuucuugacguugcugugaaaauccugagggguuuugaauagaacaagguagacagcuuuggauguaagcagcagaagcuc

SEQ ID NO: 4164264 - RNA, 83 nt, Human
ggguaaaauauuuauuuccaucuucauuuuagucuagugauaacuauacaaauguggacauggauaaugaacagguuuuaccc

SEQ ID NO: 4164265 - RNA, 73 nt, Human
ggguaaagacuggcccagcuucacggagagcaggaaguaauuguccucuguagggcugggccacaaguuagcc

SEQ ID NO: 4164266 - RNA, 70 nt, Human
ggguaacauaucucuuuccuauucaaguuaggaccuuguccuguauuugaaagaaaagauuuaauagcuc

SEQ ID NO: 4164267 - RNA, 114 nt, Human
ggguaacaugaguuuucacucucucuuucucaguuuuauuaaaauuaaauggcaaugaagguuugugcaggaauauugaugaacuuagagagauaaguuuaccuuaaguuaccc

SEQ ID NO: 4164268 - RNA, 89 nt, Human
ggguaacguuugauaacuucuguucuuuggagggacaagagaucccuucuagaccaccaguuaauuuuuguauguuuagacuguuaucu

SEQ ID NO: 4164269 - RNA, 94 nt, Human
ggguaagagggggcugaacuuacucuuucauaauggugcuaauuccacuugugaggauggaguucuacaggccuaauaaccucuuaaaacuccc

SEQ ID NO: 4164270 - RNA, 66 nt, Human
ggguaaguguaguucaagcaaaagccuggauuuggaaugucccaggguagcugagcuggcaggccu

SEQ ID NO: 4164271 - RNA, 99 nt, Human
ggguaaugauuuauucgggugauuaugcuuagucugcugaaccucuguacuuaauuucuuuugcugcagcaggcugaguauuacccuaguccacugccc

SEQ ID NO: 4164272 - RNA, 74 nt, Human
ggguacacaugcuccagucuccaggaucugucccugaccaaucuccugagauguggagcuccaugugaucaccc

SEQ ID NO: 4164273 - RNA, 59 nt, Human
ggguacaccaauggaugccagggcacaucagugcacaccugugcaugccaggguacacc

SEQ ID NO: 4164274 - RNA, 69 nt, Human
ggguacagaaacugaggcuuagaaacaauggagcauuugaaccuuaccuuggcuucagugucuguacuc

SEQ ID NO: 4164275 - RNA, 56 nt, Human
ggguacaggccugaucauccacagacacuaguggacacaugaggaaggccucaccc

SEQ ID NO: 4164276 - RNA, 82 nt, Human
ggguaccaagguuucuuugccaggcaguugucccugaggaaauuuccagugcccagucucccugguccauaccuuggcaucc

SEQ ID NO: 4164277 - RNA, 85 nt, Human
ggguaccuggcauuaaacaaccuugaaucaauccuggugggauuaacuggacugaguuucuguauacugcacaugcuauggaucu

SEQ ID NO: 4164278 - RNA, 86 nt, Human
ggguacuaggaaagggugacucuguggcucuuaggugugcuacacaucccugaagccacagagcaucugccucccuuaaaccaccc

SEQ ID NO: 4164279 - RNA, 70 nt, Human
ggguacuuuucugaagaauuuuaauaaaggcaaauaaaugccuuuucuaggaugcuuuauaguagagccc

SEQ ID NO: 4164280 - RNA, 64 nt, Human
ggguagaaagagcuuugcuuccuuucagaaaccacugagggugugcuguugggucuuucagcuc

SEQ ID NO: 4164281 - RNA, 92 nt, Human
ggguagaagccguuuauuuauucauucagcaagcaugugcuuaguguaaggugugucugaaguugaguagacauuuaguggaggguaagccc

SEQ ID NO: 4164282 - RNA, 76 nt, Human
ggguagagguggccaggaaguggggagcaggggcuaaaauucagcccgugcuucgcccccuggugcagcuguaucc

SEQ ID NO: 4164283 - RNA, 97 nt, Human
ggguagauacuuucacuaacuggguaguagcauuuccaugccuuacagagaaguccucugagguaguaaagguguuaguuaaugaaauuauuccccc

SEQ ID NO: 4164284 - RNA, 62 nt, Human
ggguagcaaauggcugucaaguagccaagagggcugagaguugacaaggagccauugcaucu

SEQ ID NO: 4164285 - RNA, 68 nt, Human
ggguagcaagaugaugaauuauucagccugcaauuuguuagcagugagcaacuugccaucuguuuccc

SEQ ID NO: 4164286 - RNA, 80 nt, Human
ggggaagagauaaaugcagcagcuaauugaaaaggaucuguuugccauuuucccauuuugcuuuuguaauauuucucccc

SEQ ID NO: 4164287 - RNA, 58 nt, Human
ggggaagauuuuuaauuaguaacuuugcauauuuuuaugggaauuaaaaauuuucccc

SEQ ID NO: 4164288 - RNA, 55 nt, Human
ggggaagcagaagggagcgggcauggagccugugcuuaauuccucugcuucaccu

SEQ ID NO: 4164289 - RNA, 65 nt, Human
ggggaagcagaccuccaaggugagagaggauggcaaaguagccgaucuucagaccuuggggcccc

SEQ ID NO: 4164290 - RNA, 74 nt, Human
ggggaagccggccucugguucacagggaggaugccacugggcuuuuccuccucuaucagacagugcccuccccc

SEQ ID NO: 4164291 - RNA, 61 nt, Human
ggggaaggaaaguuauuagcagagaucucccagaaguccucuguaacugucccuuuugccc

SEQ ID NO: 4164292 - RNA, 75 nt, Human
ggggaaggacagccagugcgauggauucacacuccucucacugugaccuuggagacccucgcucuggcccacccc

SEQ ID NO: 4164293 - RNA, 73 nt, Human
ggggaaggacuggggccaacaccucccuuggccuucauaguacaccagagggaggugguuccccaguggaccc

SEQ ID NO: 4164294 - RNA, 60 nt, Human
ggggaaguacuauuuuucuauacuugagaaaagugagguggagagauuaguaauucaccc

SEQ ID NO: 4164295 - RNA, 79 nt, Human
ggggaagugacaggagucaagggccugacuguuucuauaaccuguucccugguccuugacacccuccuccagcgucccc

SEQ ID NO: 4164296 - RNA, 88 nt, Human
ggggaagugggaacauauaaaauaagguaugaagguggagguuaaaaaggauagccacuuuacuuucauauuuuaauucugccucccc

SEQ ID NO: 4164297 - RNA, 62 nt, Human
ggggaauucccuauccaguguccuguggggacacccagaaaggagcaccgugggggaucccc

SEQ ID NO: 4164298 - RNA, 79 nt, Human
ggggacacaugcuuuaagucacagaguuggaagucagauccaagucugauuccuaaacuguggauaaaguuguguuucc

SEQ ID NO: 4164299 - RNA, 57 nt, Human
ggggacaccccaccuugugcucaucuuuguagaaucugggcaaguuuggggguccuc

SEQ ID NO: 4164300 - RNA, 70 nt, Human
ggggacagacagugauggacaggcagacucugaaaguggagcugagucuugagcacugagcaugucaucc

SEQ ID NO: 4164301 - RNA, 71 nt, Human
ggggacaggaagugccugugguggaaggugugcagacuuugcucccguauuauaaguuuuuccuucucccc

SEQ ID NO: 4164302 - RNA, 74 nt, Human
ggggacaggacugauuuacuaacucuuuguacugguuaggccaggcugggucugaaauuaugucacugcucucc

SEQ ID NO: 4164303 - RNA, 60 nt, Human
ggggaccuucccagagcaguugaaaauaauauacagaaucucagaaauggaaaggucccc

SEQ ID NO: 4164304 - RNA, 61 nt, Human
ggggacgggacuuagcaugaguugggaaggccuuucacaucccacugaggagcuuguuccc

SEQ ID NO: 4164305 - RNA, 78 nt, Human
ggggacuuucuugcauaauuugaaaccagauaaaguagagaaaguuuucagguuccgucaagauguaagguaguuuuc

SEQ ID NO: 4164306 - RNA, 69 nt, Human
ggggagaaaguuguuuuagccaaaccuccugggggaguccaucugguccaggcuguaacaacuuacccc

SEQ ID NO: 4164307 - RNA, 66 nt, Human
ggggagaaaugucuggccugcugugagcuugguuucugcaguaggacccaggauauuuucuucccc

SEQ ID NO: 4164308 - RNA, 75 nt, Human
ggggagaaguacaguagaauuuuuaguaacuuucuuaaucacagcaguucacuuucucuguacaaaauucuuuuc

SEQ ID NO: 4164309 - RNA, 82 nt, Human
ggggagaauagagagaaaaggcaauaucaagagaauucgucaccacaguugucuggaugcuguugccuucuuugcucacccu

SEQ ID NO: 4164310 - RNA, 82 nt, Human
ggggagaauucuauagacagaaggucaauguuguccccauccauagggguugaauuaccuugcuguuaaguggucuuccccc

SEQ ID NO: 4164311 - RNA, 72 nt, Human
ggggagacagauggaacacagaaaggagagcaaugaguuuuauccugcuguguuuccaaucagauuuucccc

SEQ ID NO: 4164312 - RNA, 60 nt, Human
ggggagagaaauuauagcaaugagucacccaauucugcugcaucugcuguaucucuuuuc

SEQ ID NO: 4164313 - RNA, 76 nt, Human
ggggagaggcaggcagcagaggagugugggaagcuuuuugccacugcuauucuguugacugacuuuuaauuaaccc

SEQ ID NO: 4164314 - RNA, 78 nt, Human
ggggagaggggaggaggggcagggccacuggggagcaccugggacgcugcaucuccccacauuucucccugucucccc

SEQ ID NO: 4164315 - RNA, 70 nt, Human
ggggagauguuucagcauuugcuccuugagcuugcucaagcaggagccaaaagcugaacaagaucuuccu

SEQ ID NO: 4164316 - RNA, 70 nt, Human
ggggagcgagcggcuugcguacacacacagcgucugucacucuggguguggcagggcguuugcagacccc

SEQ ID NO: 4164317 - RNA, 68 nt, Human
ggggagcgcgggcugaucugcuccacgugcuggcaacagagccugugggagaugcagcuccugccccc

SEQ ID NO: 4164318 - RNA, 92 nt, Human
ggggagcguggaguggguuagaaaggcaagaagaugaguuuugguucuggaucacaaucucaacugccuuuuagacucugucacugcugucu

SEQ ID NO: 4164319 - RNA, 58 nt, Human
ggggagcugcggugagcgcggccgagagauggccgugagcucccagccugcagucccc

SEQ ID NO: 4164320 - RNA, 80 nt, Human
ggggagcugguuaaaaugcagauuucugggucaaaaucaaagguguguggcacaggaaucugcauuuugaccgguacccu

SEQ ID NO: 4164321 - RNA, 80 nt, Human
ggggagcugugcuguacacugcaggaugcauugcaagauccuuggccugaauucaauagcugucaguagcacuguucccc

SEQ ID NO: 4164322 - RNA, 80 nt, Human
ggggagcuugguuauucaugcacccaucuuaugacaagaagaccaugcaugguaguaaccuacauuugagagcuuacccc

SEQ ID NO: 4164323 - RNA, 71 nt, Human
ggggaggagagagcuggcuggacucaggaaaaacccccuuuaauucucugaaugucuuuucucccuuccuc

SEQ ID NO: 4164324 - RNA, 91 nt, Human
ggggaggcauguguuaaauaacagagucuucaagauagugaaaacuaugcaucauuucuaggguccucuuuuguguagcuccugucucccc

SEQ ID NO: 4164325 - RNA, 95 nt, Human
ggggaggcccucgguuccuggagagugggcgagcacagcuuggccugggguuggccgcuggcucccggggaugcuucugcgaggguguuuucccc

SEQ ID NO: 4164326 - RNA, 64 nt, Human
ggggaggcuugugccaaggggaaagucgaaucuaaagaguguuuccuccuggccaggcggcccc

SEQ ID NO: 4164327 - RNA, 56 nt, Human
gguagaucugaaucucauccgaggaguggagguuccucaagaaugauggaucugcc

SEQ ID NO: 4164328 - RNA, 66 nt, Human
gguagaucugccuuaaccugggaguggcgagggagugaugcaucugccaaaacgaggagggucacu

SEQ ID NO: 4164329 - RNA, 98 nt, Human
gguagaugagggcuuagcuuucuccuuuccugaagcaagccuauuggagaaguguggcuggcucaugcaaagggugauggaggggcaacugaucugcu

SEQ ID NO: 4164330 - RNA, 56 nt, Human
gguagcaagcgcuugcccugcggcugcugcauggggcuaacuaacgcuuccucacc

SEQ ID NO: 4164331 - RNA, 107 nt, Human
gguagcacauacaaauagaaagagcauuuaagaaguugguaaggaaugauaaugacacacuuugucagggccugcuuccuucuuguucauugcuccuaguauuugcc

SEQ ID NO: 4164332 - RNA, 76 nt, Human
gguagcaggagaugcaaaguuccuacuuuacuggaugcuggaauuucagguccagaggaaaguuugcaaagcuacc

SEQ ID NO: 4164333 - RNA, 83 nt, Human
gguagcaggcaggcagaggagaaugaucuucccauuucauggcauggaagaaggaagaaaugcucuucuaugcgccagcugcc

SEQ ID NO: 4164334 - RNA, 56 nt, Human
gguagcagggcugugagucagauauaacccagauacugauaucaccacucuguucc

SEQ ID NO: 4164335 - RNA, 65 nt, Human
gguagccaucauaauaacccagacacagaugagaaguauuggucuggaguaugaugauaacuacu

SEQ ID NO: 4164336 - RNA, 79 nt, Human
gguagccccggugcacucuguccucuccuggcuugcccacacuccugggaugccugaagaacagcugugaggagcugcc

SEQ ID NO: 4164337 - RNA, 55 nt, Human
gguagcuacuagucauaugugccuauucagcacuugaaaugugucuagugcaacc

SEQ ID NO: 4164338 - RNA, 69 nt, Human
gguagcucaggcucuggguacaccugacaaguaugcacacacuugacagguauuugagagcugggaucc

SEQ ID NO: 4164339 - RNA, 110 nt, Human
gguagcucagggcgugcacugugagacaggaccuguugacuccguggugagcaucuauuuagcuucagguggucuuguuucuguauagagugacauagcauucugcugcc

SEQ ID NO: 4164340 - RNA, 68 nt, Human
gguagcuuccuagaguccugugugcucugugguacggcaacccaggaauucagggcucaagggcagcc

SEQ ID NO: 4164341 - RNA, 68 nt, Human
gguagcuugcaguuccugcuccaugcucugcccugggcaaugagcuguggaaggcagggaccaggucc

SEQ ID NO: 4164342 - RNA, 77 nt, Human
gguaggaaagaaaugaguagugauauucaaaaucuuguaaaauuucagaagcauaucacuuauucauuuuacuuacc

SEQ ID NO: 4164343 - RNA, 77 nt, Human
gguaggagguugaguguugugcaugcaccagaugcugccuugauuguuuggcugugucacaauaucaauuaauugcc

SEQ ID NO: 4164344 - RNA, 102 nt, Human
gguaggaguggggauagccucaaaggcagcuggaggcagagacuacaauagcaucaguguuguuucugcuucuucugugggucagcuucauucucucaagcc

SEQ ID NO: 4164345 - RNA, 60 nt, Human
gguaggcuggaaauccaaggaagagcugauguugcagcugaagucugaagccagucugcu

SEQ ID NO: 4164346 - RNA, 71 nt, Human
gguagggaugcuuugcugacagauucgggcguccuccccugaacgaauguccuggcggggcgugcccagcc

SEQ ID NO: 4164347 - RNA, 73 nt, Human
gguagguaggagaggacuguucuauuucuuuguaccuuugagacauggauaacccaguucauuucucccugcu

SEQ ID NO: 4164348 - RNA, 82 nt, Human
gguaggugugguugcaggagcuggaaagugauguugauucaggggugaagaaaccaucauacccacuguuguacacgccacu

SEQ ID NO: 4164349 - RNA, 63 nt, Human
gguagguucucacauuuuaaaaggacauaaaguuaugccugucuaaaagcugaguacaugacc

SEQ ID NO: 4164350 - RNA, 72 nt, Human
gguaguagaaagaugacuauuuaucuguaagugaagucacauacauacagaaaauauauuuugauuccugcc

SEQ ID NO: 4164351 - RNA, 73 nt, Human
gguagugucccaucacagaggagacuagaugcaauuuuuuccugccccuggucccuagugugggagcuuggcc

SEQ ID NO: 4164352 - RNA, 84 nt, Human
gguaguugcugggggcuucucuugcugggcugguuuagugcuucccugaguaacuggcccgggagcagaggccugaguaaugcc

SEQ ID NO: 4164353 - RNA, 68 nt, Human
gguaguuuaagaaauaauuguugauugggugaauaaauauaggucauaaaguuauuucuaaauuuacc

SEQ ID NO: 4164354 - RNA, 95 nt, Human
gguauaacaacuugggguguuguguguuucugguggcccugagguccugucugaaguguccagaagcagugcacaucacagggauugauuucacc

SEQ ID NO: 4164355 - RNA, 97 nt, Human
gguauaaccaguugaauguagaauuggagaagaacaugaauuagcguggauauugcuguauauggcuuacuuuauauuacugcauuuucaucuuacc

SEQ ID NO: 4164356 - RNA, 74 nt, Human
gguauaagaaugcuuguuuggggugggcaagagauguaguaaaguagcagaccccacuguucaggcauucaacc

SEQ ID NO: 4164357 - RNA, 75 nt, Human
gguauaaugaaagaaugaaacagcccacagacaagcucaauuuugggucuuuggaugcuuuuuguucuguucacc

SEQ ID NO: 4164358 - RNA, 76 nt, Human
gguauagcagcugggacugccauucacagccaguggagaccagugggaugggaggggcagcugagccagcaggacc

SEQ ID NO: 4164359 - RNA, 73 nt, Human
gguauauauguguuuuggccauggaagaacccaacugauaccucucaggcuccugacauauauguucaaggcc

SEQ ID NO: 4164360 - RNA, 82 nt, Human
gguauccauugggccuucugaaaccuuaauuguagcucgggagucucaguugcagccuucaggagaccccagguggaauucc

SEQ ID NO: 4164361 - RNA, 82 nt, Human
gguucucuccaccgguaaacucaugccauuaauccuuuugauguguacaacaaaggccauggcauguuuaucuggcaauucc

SEQ ID NO: 4164362 - RNA, 114 nt, Human
gguucucuuuggcugcuccucaggccucuuggcgucucugggcugacccaggucuccggugguaaagggacuggagcccguggaggcgcaggcuccagaguagcuagcuuugcc

SEQ ID NO: 4164363 - RNA, 75 nt, Human
gguucugcaaagggcucugggcuacgcacuggagaaggcccuguuagugcuauggccagagcccuugcauucacc

SEQ ID NO: 4164364 - RNA, 65 nt, Human
gguucugcuggccuuagcaggucuaggcuuauccuagaccaauugguucuaggccaguagcuucc

SEQ ID NO: 4164365 - RNA, 68 nt, Human
gguucuggauccucucuggggggccaggguuguguucuucuccagacaacagagggugauccaguacc

SEQ ID NO: 4164366 - RNA, 55 nt, Human
gguucuggcuguggauuaucacaggcuguggccugagagcagccauggugaggcc

SEQ ID NO: 4164367 - RNA, 70 nt, Human
gguucugugucuccggaggaaucagcccugacugcuggguccuaagcuguacuucuggauccgcagggcc

SEQ ID NO: 4164368 - RNA, 74 nt, Human
gguucuuacugauagcacaaaugacauuaggaggaaauguugguucuaaaugugcugugcuauaagcugaaacu

SEQ ID NO: 4164369 - RNA, 74 nt, Human
gguucuucaguguagcaacuguauuuucaaauauaaaucugauuuaugcaguuagcacuacagaagaaaacgcc

SEQ ID NO: 4164370 - RNA, 79 nt, Human
gguucuuccuauaguuuuggcuacugaggggucaguuaaaggaaaaaccagcucagaagccagaaagaugggacagacu

SEQ ID NO: 4164371 - RNA, 129 nt, Human
gguucuucuuaguuggcuaaugaacuccugacuaguuacagaugaaagggauuaaaaugacuuuacugagcacucacuuuagucuguuucauuaucugaacuaaggaagucuaagacaauuaggauucc

SEQ ID NO: 4164372 - RNA, 88 nt, Human
gguucuugcaauaaggaaaauuggagaaauuggauucccgaaauggguucugaagauuuccaccaaaucacauuuuuuuacaggaacc

SEQ ID NO: 4164373 - RNA, 77 nt, Human
gguucuuggccaaauucaguuccaugccauccuuguguugaagucuccauuuccuuacuggcugguggcuaagaauc

SEQ ID NO: 4164374 - RNA, 58 nt, Human
gguucuuuggcagucugauugauaacugcuuuaucaaauaggccggaccacaagaccc

SEQ ID NO: 4164375 - RNA, 115 nt, Human
gguugaaaaugggggauagggaaagagcguggggugccgugacuguccuuugcaugugucugcucaggcucugcaguccaucccgugucucuucuucuuguccaaaaauucuacc

SEQ ID NO: 4164376 - RNA, 63 nt, Human
gguugaacaucucuggcaccaaacucccuucuucucuuucagucacuuggcagagguucagcc

SEQ ID NO: 4164377 - RNA, 81 nt, Human
gguugaaucucuugaaucucuguuuucucaucaguuaaagaggcuuaaaggggcauaacagggauucaaugaggucaugcc

SEQ ID NO: 4164378 - RNA, 89 nt, Human
gguugacauucgcuggcagcugauuagauggugcccaccagaugaagggugggucugccuuccgcagcccacugacucuaguguuaauc

SEQ ID NO: 4164379 - RNA, 71 nt, Human
gguugaccgugugaggggugaucaggccccgccauccgcagacgggggcuggcuuucucuccgcaccugcc

SEQ ID NO: 4164380 - RNA, 89 nt, Human
gguugagaugggcaaggaacaaaugcucugcuucucgucugcucucugcucguggagcagaacguugguuccuuuuuacauccacagcc

SEQ ID NO: 4164381 - RNA, 76 nt, Human
gguugagcucauggaaaaguacugaaauacauuggaggggaaguuggucagugugauuaggcuaucugaguucacu

SEQ ID NO: 4164382 - RNA, 68 nt, Human
gguugaggagcaagcaugugucucccucccagcauccaauggguaaggauaugacuugucugccaacc

SEQ ID NO: 4164383 - RNA, 120 nt, Human
gguugaucaaagacaugauuuauuaaaacugauaauguuaaagggagugcgaaugacuaaaacaaaucuuuaagaguaauuauuuuggaguuuuagugcuuuaugucuauguacccuccc

SEQ ID NO: 4164384 - RNA, 55 nt, Human
ggucagaggaaaggucagauggcuuagaguaugggccaucagcuugcuucugguu

SEQ ID NO: 4164385 - RNA, 67 nt, Human
ggucagagggugggcugccugucauuucugcagccacagccugggugcugggcagcucccucugucc

SEQ ID NO: 4164386 - RNA, 86 nt, Human
ggucagagguuugcuugcacagugguuuagagccuggacuggccacucagccaaggcucaaauuuugugucuggcacuuucuggcu

SEQ ID NO: 4164387 - RNA, 69 nt, Human
ggucagaucuagaaguggcaugaauuacuucugcccauguuucauuggccaguacucagucaccugacc

SEQ ID NO: 4164388 - RNA, 55 nt, Human
ggucagcaucugguugagggcaguauaaccacgccgccugugcuaggagcugacc

SEQ ID NO: 4164389 - RNA, 130 nt, Human
ggucagccacuuuggaggacaggugggacacuagcaagguagagaugucauuggucagcagggaaaccauacauaaaauaauuucuucuuucaaugagcauucuuucccccacuugccccgcugcuggcu

SEQ ID NO: 4164390 - RNA, 61 nt, Human
ggucagccuggcaggauggccugggucagcucauggggccacagcugccagccccgcugcc

SEQ ID NO: 4164391 - RNA, 84 nt, Human
ggucagcuccuuuccugggaagauuugccaaucgggggagggaggacaaagcucuccugggagucuuccuggauggggucggcc

SEQ ID NO: 4164392 - RNA, 87 nt, Human
ggucagcugugcuauucuuccaguuuugacuguguuuacucauuuguccacgguuagccacaggcuggaaauuugucucagcugauc

SEQ ID NO: 4164393 - RNA, 65 nt, Human
ggucaggagguuaugucccaggugcugaccaugauuauacugcuuugggagaugaucuccuugcu

SEQ ID NO: 4164394 - RNA, 66 nt, Human
ggucaggauguuaauauagcauuaaggaagcaaauguguauuaaacuuuauuagcagcuccugggc

SEQ ID NO: 4164395 - RNA, 130 nt, Human
ggucaggccaaaaugugcaugcuggcugaccccccugaagcuaggucaaaaaagggccuggggaaaugaagcagucuuugaugaccuacuucaggcagccagugugcagagccaaacaacaggccagauu

SEQ ID NO: 4164396 - RNA, 77 nt, Human
ggucagggaagggcaaagauuugaaauuaggcaucacuggguucucagcugggccuccaaguuccccuccucucacu

SEQ ID NO: 4164397 - RNA, 68 nt, Human
ggucagggcuccacagugggcugaagccacacuuuacuaaaaagaggccucaccucacugcccccacc

SEQ ID NO: 4164398 - RNA, 102 nt, Human
ggucagggucccugcugacaucuggcuugugcccugccacaaaggugcugugaguccuaagagcggggcacagugauggagcacggauccuagagucugacc

SEQ ID NO: 4164399 - RNA, 59 nt, Human
ggucaggucauuuccuugauuugaagagaccagaaugguaucaggaagagagacugacc

SEQ ID NO: 4164400 - RNA, 68 nt, Human
ggucaguaagcaugaaaggcgugccaacuucagugaaauggaaagcuggcagcuuucaugaucugucc

SEQ ID NO: 4164401 - RNA, 57 nt, Human
ggucagucuugcuucucuugggucagcaugcugccugggagugcagaggcuuuugcc

SEQ ID NO: 4164402 - RNA, 57 nt, Human
ggucagugccuaucaugugggccuuccaguccgggcagcccgugagggcaucugacc

SEQ ID NO: 4164403 - RNA, 87 nt, Human
ggucagugguauuugagagaauggauaacuugaaguuguccaaauuccacagauuucucuauuuccauucuugaggucccacuuucc

SEQ ID NO: 4164404 - RNA, 68 nt, Human
ggucaguuacagccacggcgggugcuggccaagccgguaugcagggcuugccugguguguggcugacc

SEQ ID NO: 4164405 - RNA, 56 nt, Human
ggucaucggaaauaccagcugccgaucacaugcagucuucauuguauuuccagacc

SEQ ID NO: 4164406 - RNA, 62 nt, Human
ggucaucugguggcauguucaaagucaugcuccuaggcaguggcagagacagcaccaagacc

SEQ ID NO: 4164407 - RNA, 65 nt, Human
ggucaugaauguuauucaggggaauucaaauugaauucucuccaggguaacaucaccauaaaacc

SEQ ID NO: 4164408 - RNA, 81 nt, Human
ggucaugagggagcagugcaggcgugaagcugaaaccccccauuucuagucuuuguucugcugcuagcucacucugugacc

SEQ ID NO: 4164409 - RNA, 61 nt, Human
ggucaugcagcuagauuuuccagugucaugacgcugaugcugagcagagcugacaugcacu

SEQ ID NO: 4164410 - RNA, 62 nt, Human
ggucauuccagucagugugaguuuauugcaauucaguaauaauuuccagccaacuggaaacc

SEQ ID NO: 4164411 - RNA, 86 nt, Human
ggucauugacugcgucuacacaggguauggcuugaggauugguuagguucuccaagaugaagcuguguaggaugugguaaugcacc

SEQ ID NO: 4164412 - RNA, 57 nt, Human
ggucauuuuagcuccugaagcuccuauugucaucugagcgcaggagccgaggugacc

SEQ ID NO: 4164413 - RNA, 59 nt, Human
gguccaaggugagacugaagauaaguagaaucuccacacuuauuuguuuacuuuggucc

SEQ ID NO: 4164414 - RNA, 79 nt, Human
gguccacaauaugggauauacauuuuacuaagauucucaucaaaaugaacauaugaaaugucaguguuuuauaaggacc

SEQ ID NO: 4164415 - RNA, 120 nt, Human
gguccacgugggcagggaaguuggugaagucaauggggauguucugcagcugccccucuccugccagccugcccccgucugcccgacuguucuucaccacuuuguuguccagcagggacc

SEQ ID NO: 4164416 - RNA, 129 nt, Human
gguccacuuccuguuuuacucaauaaaguuuuauuggaacacagccaugcucauucuuuauggauugucuauggcugcauucccauaacaacagcagaguuaaguaguugcgacagagacuguauggcc

SEQ ID NO: 4164417 - RNA, 58 nt, Human
gguccaggaucaaggcaucaccacauuugaugucuggugagggccugccuucugguuc

SEQ ID NO: 4164418 - RNA, 58 nt, Human
gguccagguauguggugugaaugaauacuugaccaggucccacaauauaacuuggacu

SEQ ID NO: 4164419 - RNA, 122 nt, Human
gguccaggugagggcagggcgaggcugggggcaggcaaguggggagagugggcuggggcguccaggaccugacugggccugccugccuugagacccuguuucucccuacagcgccaggggcu

SEQ ID NO: 4164420 - RNA, 87 nt, Human
gguccaguccuggcauggaguggauggccccagagagcggagaggaccccgugccuggggccaucucacccacuguugagacaggcc

SEQ ID NO: 4164421 - RNA, 73 nt, Human
gguccaguuuugggcauguuguggccagcugguuauccagguggaacguucaggugcuagccaguccuggacc

SEQ ID NO: 4164422 - RNA, 77 nt, Human
gguccaugaguaaguggguaagcaugggguauauugguucuauuccuaauuugcucugcuuuccucuuacacacucc

SEQ ID NO: 4164423 - RNA, 63 nt, Human
gguccauugacuagagucacaguugcaguugcugaacuggauaauuagcucaaagcuuggacu

SEQ ID NO: 4164424 - RNA, 59 nt, Human
ggucccaaguacuaccaaucuaaucuaauuuuauaggcuuagcaagauaguacugggcc

SEQ ID NO: 4164425 - RNA, 62 nt, Human
ggucccaagugcuuuuccugcaggugcuccugaucuuugcauggaaucgaggcauuugggcc

SEQ ID NO: 4164426 - RNA, 69 nt, Human
ggucccacagccaguaaggaaagacccagaccucccaggcucccuuccuuuauuggcugccuguggacu

SEQ ID NO: 4164427 - RNA, 89 nt, Human
ggucccaccaggaaggaggccccaucaggaaggaggccccaacaggaaggaggccccaucaggaaggaggucccaccaggaaggagacc

SEQ ID NO: 4164428 - RNA, 70 nt, Human
ggucccacugcucacaaagccaaggucaauacccuagaacagccccuggcccuuuugugaaguggccacc

SEQ ID NO: 4164429 - RNA, 74 nt, Human
gguccccagcaccagcuguguccuggcugcagccuucuccugugccauccuagggcugcugaaaucugggggcu

SEQ ID NO: 4164430 - RNA, 63 nt, Human
gguccccagugccuccuaauuugucaauaaucaagaagcgauggaaaaaggcacugugggacc

SEQ ID NO: 4164431 - RNA, 83 nt, Human
ggucccccaggagccuuugacaaggauguaaaggacacauuaaaaagauguggccuuagguucuaguggcucuggugugggcc

SEQ ID NO: 4164432 - RNA, 59 nt, Human
gguccccccauggugagcacuguaggcucuaggaggcugaaguccuggccugggggacc

SEQ ID NO: 4164433 - RNA, 62 nt, Human
ggucccgggcgcuccucucuucugagaaguagucgaggcggcggaagugcccguacggcacc

SEQ ID NO: 4164434 - RNA, 55 nt, Human
ggggccuguaugagggaggccugucucugcaaaaaggcuguccuuugccagcccu

SEQ ID NO: 4164435 - RNA, 119 nt, Human
ggggccuugcccacuuacacuugucugucagcuggguugacaagauggaaagagagccucccccaccuuucccugcccaucagcucugcugacaggugcaagcaggcaagggacucccc

SEQ ID NO: 4164436 - RNA, 128 nt, Human
ggggcgauuacauagggguugagacgccgugcucuaaggcaccacugagcgcccucuuuugcuggguaguucaacaguggcugucuuggggauuggcuuuucuucagcuuccuggcauagcugcaccc

SEQ ID NO: 4164437 - RNA, 67 nt, Human
ggggcgcacgggaagagcacgaauauggagaccugaaggucuucuggaaguuuucuccugugguccu

SEQ ID NO: 4164438 - RNA, 74 nt, Human
ggggcggggcagugcaggcugggggcccugcggggcuguuucugaugggguccuugaccuggccaucccgcccc

SEQ ID NO: 4164439 - RNA, 58 nt, Human
ggggcgucaccggggcaccugggaccgggcuuucugcuguaggacccugguggccccc

SEQ ID NO: 4164440 - RNA, 75 nt, Human
ggggcuacucuuccaauuuuugcugcuauuguuauauauuaauauucacuggguacuaaaaagaugggcagcccc

SEQ ID NO: 4164441 - RNA, 79 nt, Human
ggggcuagguauugcuuagguucgugaaugcuguucuuacagacacagaugguaccugagccccucagacaccugcccu

SEQ ID NO: 4164442 - RNA, 55 nt, Human
ggggcuaggucugaucagagaagcaaguccuaccuguguuuaccugccuggcccc

SEQ ID NO: 4164443 - RNA, 85 nt, Human
gguccuuuaagaaaugaggagaacagggcuuagaaaucuguugccuagcaacaugguacuaacuuugccuuccauuuuccaaacc

SEQ ID NO: 4164444 - RNA, 108 nt, Human
gguccuuucugauacuuauuuuaacguauccucauaaacaauucuuugagguaagcaggucuuaugaggaaugagucuuaugaggaaugaguuaccagauuaaggauc

SEQ ID NO: 4164445 - RNA, 72 nt, Human
ggucgaggguauuuguaguuuacucaagcuuucacugcuaugaaguucaagggcuacauuugcacuuagguc

SEQ ID NO: 4164446 - RNA, 88 nt, Human
ggucgauggggaggugaggaggacagagcagcacgugcuuaagugcgugcuccgagugcccugucgcucacucccaccuccauuguuc

SEQ ID NO: 4164447 - RNA, 89 nt, Human
ggucgcauggcuaacuuguggcccagcccuacagaggacaauuacuuccugcucuccgugaagcugggccagucuuuacccuguggauc

SEQ ID NO: 4164448 - RNA, 56 nt, Human
ggucgccucccugagucacccaagcacuggccugagugcugcacaguggggugacc

SEQ ID NO: 4164449 - RNA, 103 nt, Human
ggucgcuaaagcccuucccacagacuaggcacuuguaaggccgcucgcccgugugugugcgcuggugcuuggucaagugggacgucuugcugaagccuuugcc

SEQ ID NO: 4164450 - RNA, 75 nt, Human
ggucgcuuggcaacucugcuccuguccugugcccccgucagggugcugggagcccaagggagcugccgggagacc

SEQ ID NO: 4164451 - RNA, 84 nt, Human
ggucggaggcuggcagcuggaggcuagaggccccgaggcauuccccucgcuguggcucucaaggcucagauucagcuacuggcc

SEQ ID NO: 4164452 - RNA, 75 nt, Human
ggucggggauggccaggcucccaagguccagcucaagaagagacugagcaaagggugccggcccuucucccggcu

SEQ ID NO: 4164453 - RNA, 58 nt, Human
ggucggguggagcuggcucuuuugacccacaugcuccaggggagcuuuccaucugucc

SEQ ID NO: 4164454 - RNA, 76 nt, Human
ggucuaaggcuuguagauuugggcuuuaauucccuguagaaggaaagggagcuuaauuucuacgaggccuaggacu

SEQ ID NO: 4164455 - RNA, 63 nt, Human
ggucuaaggucaggggaaaguuugggcacagaggccugaagcgugaccccucaccucugcgcc

SEQ ID NO: 4164456 - RNA, 55 nt, Human
ggucuacaguguuugguuugaggauuccauccucaaucggccagcacaguagucc

SEQ ID NO: 4164457 - RNA, 63 nt, Human
ggucuagcucacggccugcaccugggauguuggggcugugcagaggcgccguggguggggacc

SEQ ID NO: 4164458 - RNA, 78 nt, Human
ggucuagggguccaggcggcauaguuguaggcccugggugggguaugcaaagguuugugcuuggaaaaaacuggagcc

SEQ ID NO: 4164459 - RNA, 108 nt, Human
ggucuauuugauuugcgagcccauaucuguaaucacuaugccuuccucuggcccacuguguaggcuggcaugaggccugguuugcaugagaauggguaucagaaggcc

SEQ ID NO: 4164460 - RNA, 85 nt, Human
ggucucagcuugagccugugcuguguuugcuccaugauucagccuuggcacgucuggaggaugacagagaugggcuguugggacu

SEQ ID NO: 4164461 - RNA, 59 nt, Human
ggucuccaaagcugcauugauguggagaaaacaccuuucccuucuaguuuugagagacu

SEQ ID NO: 4164462 - RNA, 84 nt, Human
ggucucccuaaccgcuccccuaccucccuucaaguuaauguuggagcuucuccagggcugacuugggagaggagccggcagacc

SEQ ID NO: 4164463 - RNA, 121 nt, Human
ggucucucagcccggcgggccgcggccggagagggggcucccugcuuggcgguccagggccgccagcgcgcccaggagccuggccauuuccgcagagaaagcuccgugccucugagagacc

SEQ ID NO: 4164464 - RNA, 55 nt, Human
ggucucugaagcuuuuagucccuuggauucuuuaggccugagggcaacagaggcu

SEQ ID NO: 4164465 - RNA, 67 nt, Human
ggucucugugugaccauaagccagcuuuccucaucaaugagaguaaauguuuaucacacagauggcc

SEQ ID NO: 4164466 - RNA, 58 nt, Human
ggucucuugugguuuauaaagauauauuuuaugucuuuuaugauuacgggaugaugcc

SEQ ID NO: 4164467 - RNA, 75 nt, Human
ggucucuuuugaaugcuagugugauauguaagggccugauuucugccuuaauuucacugguguuucuuuggggcu

SEQ ID NO: 4164468 - RNA, 64 nt, Human
ggucugaaaccagcacacggcgggugugggcacuugcauccauugucuuguuggcuucuaugcc

SEQ ID NO: 4164469 - RNA, 64 nt, Human
ggucugcagggcugcagagggcacuguugcuaccaaacauacacugccguaguccuagucuacc

SEQ ID NO: 4164470 - RNA, 77 nt, Human
ggucugcaguaaacaguuacuaagaagauucucuaacuacaugagaugggucucuaccuuucuguguacuguuugcc

SEQ ID NO: 4164471 - RNA, 59 nt, Human
ggucugccaguagcucgcagaguugggcaccaucagauguucccagagcuacugagacu

SEQ ID NO: 4164472 - RNA, 130 nt, Human
ggucugccuccccaaccccugccugaaacagugcagggagaagguggaagugcagagugggcucaccucucgcccacacuguccccuucuccccagcgagcugaggcugcccagcgggagguggaaaguc

SEQ ID NO: 4164473 - RNA, 94 nt, Human
ggucugccuuagcuugccugcccuuggcaccaggcucugucccagugccaggagcccugggcaaguucauacaucaaacgaggaggcaguggcu

SEQ ID NO: 4164474 - RNA, 129 nt, Human
ggucugcuccacuccucuguucugugccgcucgguucugccuguggcuucuguggcauuccucugcagucuuuucugccauaggacccagguugaacaccagagguggaggccagaggcggggcacgcu

SEQ ID NO: 4164475 - RNA, 87 nt, Human
ggucuggaacuccugggcucaagccuucugcccaccucagccucccaaagugcugggauuacagaugugagccauugagcccagacu

SEQ ID NO: 4164476 - RNA, 56 nt, Human
ggucuggcacgaggccuagagaggggccaaagccaagggaggccucugccggugcc

SEQ ID NO: 4164477 - RNA, 63 nt, Human
ggucuggcugggccgccuauuuugggagcaggaguggccagcccgaggcuucccaggcaggcc

SEQ ID NO: 4164478 - RNA, 69 nt, Human
ggucuggcuucugcagaaaccaauucaaguaaguguuuccauuucuaugaaaggggcucugaccagacc

SEQ ID NO: 4164479 - RNA, 72 nt, Human
ggucugggcccaggugcucuugccagggcugcuuucuaggguagaauggaggaagagccuugggcaagggcc

SEQ ID NO: 4164480 - RNA, 82 nt, Human
ggucuggggguggaccaggggaugguuggcacugugggauuagggcugagugccuuccccaugcuuugggauuccccagucc

SEQ ID NO: 4164481 - RNA, 80 nt, Human
ggucugguggaggugcauuucggagcuuggagacugccccacccacccccgucugcucuaggagugcaccuccccccacc

SEQ ID NO: 4164482 - RNA, 61 nt, Human
ggucugguggcgacaggcuaacguagagcuggcugcuuuuaugagaaugcgccacuugacc

SEQ ID NO: 4164483 - RNA, 56 nt, Human
ggucuguccugcccuugaggauuuugauuacaugaagaggccuuacaggauagacc

SEQ ID NO: 4164484 - RNA, 57 nt, Human
ggucugugaccucagugucucagaaccuuuguuauuaugcacccugaggucauggcc

SEQ ID NO: 4164485 - RNA, 67 nt, Human
ggucugugaucuuauggauucuuucuguaugauuugauuuugaugaucccauaggauucuucaggcu

SEQ ID NO: 4164486 - RNA, 124 nt, Human
ggucuuaaaauauuugagaauccgguccguacaaacucugcuguguugaaugauuggugaguuuguuugcucauugauugaaucacugcagaguuuguacggaccggauucuccaauauaggcc

SEQ ID NO: 4164487 - RNA, 72 nt, Human
ggucuuaaguuuguucagggcuuacauuauaauuugcccaaauuuaauguaacuuuaagcaaauucaaggcu

SEQ ID NO: 4164488 - RNA, 95 nt, Human
ggucuuagagcuaagaccaaggggcaacagagcucccuuccuucugcaagcuguagggaaggcucuguuccuugacuuuucuggcuucuaaggcc

SEQ ID NO: 4164489 - RNA, 55 nt, Human
ggucuuagugacucauaaguggaggagaaauccacauauagcagccacuaagguc

SEQ ID NO: 4164490 - RNA, 63 nt, Human
ggucuucucaacaauugugugagauguauuacgauacccauuuuaucaaucagaaagaagacu

SEQ ID NO: 4164491 - RNA, 64 nt, Human
ggucuucucccagaguuugcugcacauuggccauggauacaaaugugcagaggguaggaaggcc

SEQ ID NO: 4164492 - RNA, 55 nt, Human
ggucuugcccuagaggucugggggccugcaaagucccucaccccuaggcaaugcc

SEQ ID NO: 4164493 - RNA, 125 nt, Human
ggucuugggcugcugguggcucucuccacggagcuaagcagccaccucaucuccacucagcauggcugcagugggugucuuggcugugagcggccccugggagggugcccaccacgccccaugcc

SEQ ID NO: 4164494 - RNA, 68 nt, Human
ggucuuuaaagggggcuggcauugggcauugguguuuuaaguccagaccugaggcccucacuaaggcc

SEQ ID NO: 4164495 - RNA, 92 nt, Human
ggucuuugauggugcugagaguaaggaaaugggagaucuccaccauccucauggaguccuucacguccugcuuauuggcaaauaucaggacu

SEQ ID NO: 4164496 - RNA, 76 nt, Human
ggugaaacugcugacuuugagggauacaaacauuuugaaagaaagugucuuuuaaaaaguuuauaacauuuucucc

SEQ ID NO: 4164497 - RNA, 79 nt, Human
ggugaaaucccuggauagcaaagcuccugguucucaacuucauucauauaagaaagguucuugguguccagauuucggc

SEQ ID NO: 4164498 - RNA, 89 nt, Human
ggugaacaaagcccucggagagcucacagcuguggcccagggaacacauuccaccuggcucagcugugaguucuuccuugcacugugcc

SEQ ID NO: 4164499 - RNA, 72 nt, Human
ggugaacagagggucucucgucugagcgugugguccgugggccguguggcagccucagacaaggaccucacc

SEQ ID NO: 4164500 - RNA, 62 nt, Human
ggugaacagauaauagaaaugaacucucucucccagccauguucuugcuuuaucuguuccuc

SEQ ID NO: 4164501 - RNA, 70 nt, Human
ggugaacagaucaccugaggucaggaguucgagaccagccugaccaacguggugaaacccugugucuacc

SEQ ID NO: 4164502 - RNA, 88 nt, Human
ggugaagagguucaggaugugaggugguaaacagggacagaaagccucccagaugugccccaaccccucauaucuucccaucaucacu

SEQ ID NO: 4164503 - RNA, 55 nt, Human
ggugaagcguauuuguggagcuuuuaaaauaggcccauagacucuuuaguuuccc

SEQ ID NO: 4164504 - RNA, 64 nt, Human
ggugaaggagggguaggaaaggguuacuugggaaagguaacaagaugucacuccuguccauacu

SEQ ID NO: 4164505 - RNA, 61 nt, Human
ggugaaggcacuugccuaggggcacauagucugugcaccuguagugagcugugccuuugcu

SEQ ID NO: 4164506 - RNA, 57 nt, Human
ggugaaggggcucucacagggcaguauguuugagacccuuagagggcucuccuuacu

SEQ ID NO: 4164507 - RNA, 80 nt, Human
gggucugcccacccagagugacaggaccaccucaaaacaugcaaagaggguccuggcagcucuguguccaugggcaacuc

SEQ ID NO: 4164508 - RNA, 56 nt, Human
gggucuggagauccgggugaaggucucagacuauguacaagaccggauucgggccc

SEQ ID NO: 4164509 - RNA, 55 nt, Human
gggucuggagggcagcccuucuguguuacugaauccucggggccacuucaggcuc

SEQ ID NO: 4164510 - RNA, 94 nt, Human
gggucuggccagcugcggcccugaugaggcucagugagcccugcagagugcagccuguuggggguccugggccuugggccagcuccccagaccu

SEQ ID NO: 4164511 - RNA, 69 nt, Human
gggucugucacuucaggaaugcagggagugggauuuauuuguugucuugauccccccugaagcagaccc

SEQ ID NO: 4164512 - RNA, 56 nt, Human
gggucuuauggcuauuuucauuucuagggacauggaagaaagauaauuaaggaccc

SEQ ID NO: 4164513 - RNA, 69 nt, Human
gggucuugcuuuguuacccagguuguagugcaguggugcauucauagcucaguacagacucaacuuccc

SEQ ID NO: 4164514 - RNA, 81 nt, Human
gggucuuggauuuauguuugaguauaugacucagaugcaauuuugaauuauauucacgagcaaauucuuuaucucagauuu

SEQ ID NO: 4164515 - RNA, 78 nt, Human
gggucuuggguguggggcaugauaggagcccaucuguggauuaggacacugagcagccccaccagccauuaaagacuc

SEQ ID NO: 4164516 - RNA, 76 nt, Human
gggucuuuggcuguggguuugcucaggccucuucugaauccagggugauccccucuggcaacuucacagcccaccc

SEQ ID NO: 4164517 - RNA, 84 nt, Human
gggugaaaagggggauuuaauaucuguuacuggaaguaucuggcuucagaagugguauuaauuagauuucagucuuuuucacuc

SEQ ID NO: 4164518 - RNA, 76 nt, Human
gggugaagcagggcugcuauguugauucagaccaugguacuccagaguugugcagaauacagccuugugaccaccu

SEQ ID NO: 4164519 - RNA, 79 nt, Human
gggugaagggaggggccaugcuugcaggggccagugaccgaggcccgccguuggaacugauggccuucaucccgagccc

SEQ ID NO: 4164520 - RNA, 113 nt, Human
gggugaaggggcagaggugagugggagggaaggcugggggcuggggagaacuucaugaccagagugggccagcucccugccccuggggcugccucccacgugcccccucaccc

SEQ ID NO: 4164521 - RNA, 60 nt, Human
gggugaauaagcugaacacuuggguaaauaaaaauaccuagggauuguucuuauucauuc

SEQ ID NO: 4164522 - RNA, 129 nt, Human
gggugaauauuggccuuguuccuuuagcccagcucaaggacuuauucaugccuguagucuaccaccaugaauuaggucugguauugagucuuggaagcaugggguuuggguuaauaaggcauauucccc

SEQ ID NO: 4164523 - RNA, 126 nt, Human
gguggggcugggggacaaggaccuucccucccucucagauuuggggcucaccagggcugagauggcgucuccccucagacucugggcucccugggguaggggcagggucccgcccucagaaucagc

SEQ ID NO: 4164524 - RNA, 60 nt, Human
gguggggcuuaccucugaagcuggcaucucaccucugucagcauucuuggccaguccacc

SEQ ID NO: 4164525 - RNA, 73 nt, Human
gguggggggcugcaaacccaggucccuuuaaacagauagcauagauccuggcucauuaugugcccccagcacu

SEQ ID NO: 4164526 - RNA, 102 nt, Human
gguggggguggggcugugugcugagagugggugcagugcuucaccaagaggccccugcaggugcuguucucuuuuuuaacauguggaccuccauccucagcc

SEQ ID NO: 4164527 - RNA, 70 nt, Human
gguggggguggguagaagugacaaaaauuaaaaaaccaagaaguuuagagucccuuucucaccacccucc

SEQ ID NO: 4164528 - RNA, 58 nt, Human
ggugggucaguagccuugcagaacuguccugagaaguuauugcuggugcuggccagcc

SEQ ID NO: 4164529 - RNA, 81 nt, Human
gguggguccuggguuggcucugcagcagugugcgugcucauuauagguaagaccugccugcagggcuggaggggauuugcu

SEQ ID NO: 4164530 - RNA, 65 nt, Human
gguggguggauggagagaggcccccagccuaaggacccaggcuccugccuucccaccacccgucc

SEQ ID NO: 4164531 - RNA, 86 nt, Human
gguggguguaaaugagguuaaggaaaguacauguuuugacuccacagcagaaagaagucauuuauaugucuuuccuucaucccacc

SEQ ID NO: 4164532 - RNA, 79 nt, Human
ggugguaagaggggcuguguguggaguuucuguacauguguuucugcuaugguuccuacagcccugaaucucuaucacc

SEQ ID NO: 4164533 - RNA, 64 nt, Human
ggugguagaauugcacgaacugcuggggaaggaaaacauauccuagcuggccaauucuauuacu

SEQ ID NO: 4164534 - RNA, 66 nt, Human
ggugguccugggccaucacugggacagacugaaaaggguggucuggcaggugaggacucagccacc

SEQ ID NO: 4164535 - RNA, 68 nt, Human
ggugguggaagagauagugagaagcuguaacuuaugcaauggucgccuggcugacucuuccuaucauu

SEQ ID NO: 4164536 - RNA, 56 nt, Human
ggugguggucccgacuugggagauccugggagguccuguggugggggcuggccucc

SEQ ID NO: 4164537 - RNA, 84 nt, Human
ggugguggugcaauguggagcugggggagagaagcccagaaaucgggugggcugagcucagucccagcucuacagccacugacc

SEQ ID NO: 4164538 - RNA, 55 nt, Human
ggugguguaugccugcaguccuagcuauucgagaggcugagauggcagaaucacc

SEQ ID NO: 4164539 - RNA, 64 nt, Human
gguggugugggcguggcaggcaagcccagcacccuaggguuucuagccagguucugcauuuucc

SEQ ID NO: 4164540 - RNA, 55 nt, Human
ggugguucacgccuauaaucccagcacuuugggaggccaagguggguggaucacu

SEQ ID NO: 4164541 - RNA, 55 nt, Human
ggugguucacgccuauaaucccagcacuuugggaggccgaggcagguggaucacc

SEQ ID NO: 4164542 - RNA, 55 nt, Human
ggugguucacgccuauaaucccagcacuuugggaggcugaggcggguggaucacc

SEQ ID NO: 4164543 - RNA, 55 nt, Human
ggugguucaugccuguaaucccagcauuuugggaggcugaggcaggcggaucacc

SEQ ID NO: 4164544 - RNA, 72 nt, Human
ggugguucgaguguaguaggccauaugaacuucauaugauugguuuuuugugauggcauuacauuuaucauc

SEQ ID NO: 4164545 - RNA, 88 nt, Human
ggugguucugggucugggauccucuauggggugucaggucuaaguccuggagccuucaccaggggaaaggucccugacccacacuccc

SEQ ID NO: 4164546 - RNA, 86 nt, Human
ggugguugucuccgugagccacagcugcugucaucgucugugcccccaaccgagugcagggacugugaucucacagaaaagccacu

SEQ ID NO: 4164547 - RNA, 68 nt, Human
ggugguuucauuuaauuuguauaauguaauuuuuguaaauguauuauacauuuuguguagagaucauu

SEQ ID NO: 4164548 - RNA, 85 nt, Human
ggugguuuguggaagauggcuucucucuagcuugguguuacaugcuuacaugaccaggucccuagggauaggcccacccagcccc

SEQ ID NO: 4164549 - RNA, 71 nt, Human
ggugguuuugcuuuauuauuauuauuguuauuauuauuaguagcaguauauuuuaaggaagcuuuuuuauc

SEQ ID NO: 4164550 - RNA, 61 nt, Human
gguguaaaaacauacuauuucuagccaacugagggacuaccuaggaaauauguuuuuaccc

SEQ ID NO: 4164551 - RNA, 70 nt, Human
gguguaacgcagagccucucagaggucagacaauuuuguugugaccucagcaggcuacuaugauuagacu

SEQ ID NO: 4164552 - RNA, 74 nt, Human
gguguagcugucugaguuuuuacuuacucaauucucacauuguccugagauaaggaacagaccuuuucugcacu

SEQ ID NO: 4164553 - RNA, 61 nt, Human
gguguaugugagugcaugcaugcacaugugugaguguguguguuucugcucauacagagcc

SEQ ID NO: 4164554 - RNA, 70 nt, Human
gguguauuacugcuguuaggauauuuuuuaguacuggaaaaaugacacuaacagcuguaugaaauaaacc

SEQ ID NO: 4164555 - RNA, 86 nt, Human
gguguauuuuuuaaauuccauaucugugauuauuagcauuucauugagcuaaugagauacuccagaaugggacuuggauugagacc

SEQ ID NO: 4164556 - RNA, 90 nt, Human
ggugucagaagaacagcucgcagagggcaggcagugcugguggguacccagccacuauuuuauccugucccuugguucucucugaacacc

SEQ ID NO: 4164557 - RNA, 124 nt, Human
ggugucccagcauccagcccggggguuucaucuccugagcccugucaugaaugugcugcugccuuucaguagacucucuugcuagagugaagggucuugaggcuccugaaggaaaggggacacc

SEQ ID NO: 4164558 - RNA, 72 nt, Human
gguguccccagugcccagcugcccaggcacugaggggcaguucugggcagagcuggagcugcuggugaugcc

SEQ ID NO: 4164559 - RNA, 58 nt, Human
gguguccucaaggagccaagcagccuccauuucucugcuuuucucuccgcaggacauu

SEQ ID NO: 4164560 - RNA, 86 nt, Human
gguguccuccugcugugaagccaggccuguaggagccugcaagccucggggggcacaggggacaggccugacacacagagggcucc

SEQ ID NO: 4164561 - RNA, 123 nt, Human
ggugucuaucugcuguccagggaggaggggcgaagagaggcugggcguagggcuuccccgcacucugcgaaguccucccggccuccuuccggagaauuccuugaugacgauucagcagacauc

SEQ ID NO: 4164562 - RNA, 68 nt, Human
ggugucucuguggcuggcuccuuccagcgguuccacccucugggcaggaggcgcagccacggauagcc

SEQ ID NO: 4164563 - RNA, 55 nt, Human
ggugucuguggggacucuguaguaugaauuucuacuucagggcuuuggggacacc

SEQ ID NO: 4164564 - RNA, 60 nt, Human
ggugucuuggggucugcuuaagugagaaaacacgguagcagcagacagcccaagaaaauc

SEQ ID NO: 4164565 - RNA, 84 nt, Human
ggugucuugucaaacaugcagugagccgaugagggaacugccgccucuuucgaggaaacugccaugguaagcaagcaggacgcc

SEQ ID NO: 4164566 - RNA, 72 nt, Human
ggugucuuuuuccuuuaagagaaugguauauuuugaauaugcauuggucuuaaucuucaggggaaaagcauu

SEQ ID NO: 4164567 - RNA, 74 nt, Human
ggugugaaggcacacaggcuggcugagcccugaccccagugccaagcuaucccagccucuguggcugccacacc

SEQ ID NO: 4164568 - RNA, 65 nt, Human
ggugugaaggcgacaggaccacguggcacggggccccuggccuaaaguccuggcgccgccacacc

SEQ ID NO: 4164569 - RNA, 85 nt, Human
ggugugagaaaugagguuguagauguucucuugaaaaauauaccuuucuguuucuuaagaaaccaucacauuccuuuuucacuuc

SEQ ID NO: 4164570 - RNA, 66 nt, Human
ggugugcaacuuucauuaauauuugguaaugccuuuucuuauaucccagguauugaaguugacacc

SEQ ID NO: 4164571 - RNA, 60 nt, Human
ggugugcaguucagaguggucuuggggaagcgguggugcuagacccucuggacugggccc

SEQ ID NO: 4164572 - RNA, 61 nt, Human
ggugugcaucucacccuuccccgucggcuuuuugaggaugguccugguugaggugggcccc

SEQ ID NO: 4164573 - RNA, 68 nt, Human
ggugugcauguuuagggaaacaaacauuuucuuccugcuguggauaagugucauguuucuuugucacc

SEQ ID NO: 4164574 - RNA, 86 nt, Human
ggugugcauugcaaguaucuucaaguuucuucuagacuuuaaagaaauuaaaacuggaaauuggagaugauguuuuaugugucgcu

SEQ ID NO: 4164575 - RNA, 69 nt, Human
ggugugcgccaccuugugauccacccgccuuggccucccagaguguugggauuacaggcauaagccacc

SEQ ID NO: 4164576 - RNA, 100 nt, Human
ggugugcugugacacacugggauucugaaaauggauuacaaauacgccaagguauugguucuucagcccucagguccuaggccagucaccccuggcagcc

SEQ ID NO: 4164577 - RNA, 77 nt, Human
gguguggaugucucagagacaucagguuguagcagugucugaaauuuguuuccuaagugucucugaaguccagcgcu

SEQ ID NO: 4164578 - RNA, 67 nt, Human
gguguggcugugaguuuuugauuugcucaaugauauaggacuucagcauuuuaaauacagucauauu

SEQ ID NO: 4164579 - RNA, 108 nt, Human
gguguggugauggugaguacauccuguaucagaauguuaaaagccucaguugacggacugagaguugugcauucaugccaaggacugacucuccucugagacuaugcc

SEQ ID NO: 4164580 - RNA, 68 nt, Human
gguguguagcauguuuaagaccguuaucucuugccucaucuuaaagguccaggaaaggcagcagcacc

SEQ ID NO: 4164581 - RNA, 78 nt, Human
guaucacaguggguggcagagauagaacuggaauuaauaguaaccucauuuuaaauuucuguuauauccacuuugaac

SEQ ID NO: 4164582 - RNA, 94 nt, Human
gguuaacuguuuuuguguguguguguuuuauacagugaaacauuuuuaaugugaaauucuugaaaugcacacaaaaguacagaaaaugcuaacu

SEQ ID NO: 4164583 - RNA, 77 nt, Human
gguuaagaacuuguugaaggucucagagcuaggacuucaaaccaggcagacuggcaccagguucuguguacuuaacc

SEQ ID NO: 4164584 - RNA, 64 nt, Human
gguuaagaauuuggcagucagcagcucagacucugucuucaggcuccuggauucaaauccugcc

SEQ ID NO: 4164585 - RNA, 61 nt, Human
gguuaaguggcuggucuaaggucacagagcaagucaguggcagagccguugccaucugacc

SEQ ID NO: 4164586 - RNA, 57 nt, Human
gguuacacagugcacaagcagagugauuauugucuacucggcguugugcuguguacc

SEQ ID NO: 4164587 - RNA, 68 nt, Human
gguuacaguuugugcugagaauaggcugcacguggcugcagcccuuuuuugguacaaccguuguuccc

SEQ ID NO: 4164588 - RNA, 75 nt, Human
gguuaccuuaacgaugucaugaauacuucaugaaauaugauguuucuaauuuucugagauuguuaggcacuaacu

SEQ ID NO: 4164589 - RNA, 97 nt, Human
gguuacuagagccugguuauuggagccugguuacuagagccugguuauuggagccugguuacuagagccugguuauuggagccucguuacuggagcc

SEQ ID NO: 4164590 - RNA, 71 nt, Human
gguuagacauuggguguacaauuggcaaugucugccaaagauacugccaguaauagcucuuuguacuugcc

SEQ ID NO: 4164591 - RNA, 55 nt, Human
gguuagagggcaugcgaucuuuucuuacaugauuaugaucucaugugcugugacu

SEQ ID NO: 4164592 - RNA, 66 nt, Human
gguuagagguggagccuggacuagaauccugcucucuugacuuccaguccaggagucacccaagcc

SEQ ID NO: 4164593 - RNA, 71 nt, Human
gguuagcuagggggcuuugguugucucaaagcucauuaugagucauugaacgaagagcuccauuccucacc

SEQ ID NO: 4164594 - RNA, 74 nt, Human
gguuaggagugggguccauccacacgugcuuccagcccuggagaccagcagcauggaugggccucagccuagcu

SEQ ID NO: 4164595 - RNA, 63 nt, Human
gguuaggauuauauaucccaugaugcccuacaguggggaucagaggauagaaauacuuauucc

SEQ ID NO: 4164596 - RNA, 67 nt, Human
gguuaggcuggggcaaaauaggguuuccuuucuuggacgugcuuuaucuguguccucuugccuggcc

SEQ ID NO: 4164597 - RNA, 81 nt, Human
gguuaguauaagcugaaggacuuggugauaguugagacaguuauaaccucaacuaucugguaaguucuuuggaaaauaacc

SEQ ID NO: 4164598 - RNA, 83 nt, Human
gguuaguaugauuuguaauucaauuagaauagugccuggcauauaauaggcacuugauuaaugugaauucauuaugacuagcu

SEQ ID NO: 4164599 - RNA, 74 nt, Human
gguuagugcagggcaggcaggagcccaacugccugggccacuuccgggcucugguacuuccuggcucugugacc

SEQ ID NO: 4164600 - RNA, 78 nt, Human
gguuaguuggcuccccuguucaggucacaggcuccaaggcuugguucugucaucuguaacaggaggguugaaauaacu

SEQ ID NO: 4164601 - RNA, 120 nt, Human
gguuauacuccuccucuuauugaacccuauuguuucuggucucuguauucuuccuggauacagagccaaaaggacauaguagcauaaaguaugguguagcuagaaggaagggugauaacc

SEQ ID NO: 4164602 - RNA, 64 nt, Human
gguuauagucagggaugcaauuaugugugggcuauacaugauuuugucaucugaauucuuagcc

SEQ ID NO: 4164603 - RNA, 57 nt, Human
gguuaucgaagcuggacauucuaaauguugugcgucaagugucuggauuuuguaacc

SEQ ID NO: 4164604 - RNA, 64 nt, Human
gguuaugggugguugaauauccucauauccagcugauuggaguaugaauggaaacuaccuaucc

SEQ ID NO: 4164605 - RNA, 75 nt, Human
gguuaugguugacucaucugaaaaaugaggagaauacacuucuuuucaccuucagauguagacaggacuaggacc

SEQ ID NO: 4164606 - RNA, 80 nt, Human
gguuauuuugaaacugcauuugcauaaguccaucugagcaaacauuuuuauggaguuaugaggugugguuugcaucagcc

SEQ ID NO: 4164607 - RNA, 62 nt, Human
gguucaagccuccccuggggcagguggcuucaaacccaccugggucccagccaggcuuugcc

SEQ ID NO: 4164608 - RNA, 65 nt, Human
gguucaaggcauacuccuuucucagccuccugaguagcugggacuauagaaugugccacugugcc

SEQ ID NO: 4164609 - RNA, 55 nt, Human
gguucacauauugagaguauucucaaaugugaagaguacaucucaaauguaaauc

SEQ ID NO: 4164610 - RNA, 75 nt, Human
gguucagauaguuuagguaacugucuugaguuccuacagauagauaauaaguaacagaucuacauugucugaccc

SEQ ID NO: 4164611 - RNA, 107 nt, Human
gguucagcauuagauuguugcccuguuaagaaugucuaaugugcauuuaaaaguauuggaaagcaggcauuuuugacaaagagcaaugucacuauaacauaugaacu

SEQ ID NO: 4164612 - RNA, 59 nt, Human
gguucaguaacuuggccgaggucauacagcuaacaaguuuaagagucaagaucugaacc

SEQ ID NO: 4164613 - RNA, 121 nt, Human
gguucaguccuuaacuugccauucucuuguuuuaaagauucuccuuuagauaacucacuugcuuaugaauuauuagcaauucucugugggggugucuuaaccuagagcucuaggcugggcc

SEQ ID NO: 4164614 - RNA, 129 nt, Human
gguucagucuuucaugggaaagcucugaggaagcuuugucuugucuccuggacuaucuccugagagaaaguauugucagccaggagucaaauaaagccaggccuggagauucagaggagacgaugagcu

SEQ ID NO: 4164615 - RNA, 88 nt, Human
gguucagugacugugcuuuucucugcuccuggacacugcagcucgcaagcugcuuucccucggaacagaaaagucacagcuaugagcu

SEQ ID NO: 4164616 - RNA, 114 nt, Human
gguucaucaagaggcugagggauccaguuguggcuccgauguuugggugcccuugggauacccgggaggcaggagucauagauuuggagcgucccgaguggccagacgagagcc

SEQ ID NO: 4164617 - RNA, 78 nt, Human
gguucauccaugucagagcauguaucagccucuucuucuuuuuaaaggcugaaugauauuccauuguauggauagacc

SEQ ID NO: 4164618 - RNA, 92 nt, Human
gguuccaagagggucuggaagcuucugagaugcucucagaccucaccugagggcugccugguuuagugcugacuccagaaccccugggggcc

SEQ ID NO: 4164619 - RNA, 82 nt, Human
gguuccaagucuuugcuacugugaauagugccacaauaaacauacgugugcaugugucuuuauagcagcaugauuuauaauc

SEQ ID NO: 4164620 - RNA, 82 nt, Human
gguuccaagucuuugcuacugugaauagugccgcaauaaacauacgugugcaugugucuuuauagcagcaugauuuauaauc

SEQ ID NO: 4164621 - RNA, 80 nt, Human
gguuccaucucuguggacagauuccagugggggagccuguaggaggcuaguuccuggucugugccauucagagagaagcc

SEQ ID NO: 4164622 - RNA, 73 nt, Human
gguucccaauguggggaaauguccugccuucccucccauuccagguaaaguaguaaauuucccauuggucacu

SEQ ID NO: 4164623 - RNA, 77 nt, Human
gguucccauggcuagugucgggaacgcaggccuguccacuccccaagccccuuccuguccgcaauggccugggagcc

SEQ ID NO: 4164624 - RNA, 67 nt, Human
gguuccgucuuugaagauuugaugcugugaauuuggaccuggccuggcagcagaucuuaaagugacc

SEQ ID NO: 4164625 - RNA, 56 nt, Human
gguuccuggcagauguagggcugauguuccugcuuccuuacugucagccaggaauc

SEQ ID NO: 4164626 - RNA, 58 nt, Human
gguucguauuguggagucacuuaaggagcuaucccaaaguacuuuaggauauguaacu

SEQ ID NO: 4164627 - RNA, 64 nt, Human
gguucuaaauguuuuuuguacauauuuguuguaagcauaacacauauuugcaguaagcagaacc

SEQ ID NO: 4164628 - RNA, 63 nt, Human
gguucuaggagucugguuccugccuuggugcaggagucuugggggagcuggacuccuagaucc

SEQ ID NO: 4164629 - RNA, 78 nt, Human
gguucuauaagcaaauucuggaggugaggugcaguuguuucaaauacauccuccuccuucagaguauuuaucugaauc

SEQ ID NO: 4164630 - RNA, 71 nt, Human
gguucuaugguaauaugauuuguuguaauacagcaauuccuguaucacaucuugugauguuuucaugaacc

SEQ ID NO: 4164631 - RNA, 73 nt, Human
gguucucaagaauagcugcaaacagggcaauuggccuaaaaacaauuuucugaaagccaauucauugaaagcc

SEQ ID NO: 4164632 - RNA, 63 nt, Human
gguucugaaguggucccauuccgggcugugcugaccuuuuuuccgggaccaaagaucagaacu

SEQ ID NO: 4164633 - RNA, 80 nt, Human
gguucugagccuguaccgcgaucugcugcgcgccgggcgugggaagccgggcgccgaggcgcgagugcgggcagaguucc

SEQ ID NO: 4164634 - RNA, 62 nt, Human
gguucugcacaucacacaggugcuggaagaaaugaagacaugcacucagagguagcagaacc

SEQ ID NO: 4164635 - RNA, 59 nt, Human
gguucuguggcuuuucucuuuggguuccuuccuagagaugcgguuccaugguuaugacc

SEQ ID NO: 4164636 - RNA, 69 nt, Human
gguucuuccuuuccacauucacagcuacuucuggaaucagaggucaaugggacuuggaucugaagaacu

SEQ ID NO: 4164637 - RNA, 57 nt, Human
gguucuugacaaucuuggucuuugcuuucagaggagacuguauuguuuucaaggauc

SEQ ID NO: 4164638 - RNA, 120 nt, Human
gguucuuuggaaggauguauagugucuguaucuuugucuucauguuggauggguguggagguaagauauacaauagauguggauacagauguacaaauauauacacaagaaaagagaucc

SEQ ID NO: 4164639 - RNA, 80 nt, Human
gguugaacauuuugauacugagaaaaacaaauggaauccauguuuucauuguccuuuuccugaguguuguauuguucucc

SEQ ID NO: 4164640 - RNA, 73 nt, Human
gguugaaccauaugaaauugacaauuugugggucaaaaauacuugaacauuggcaauuucauauuuuucaacc

SEQ ID NO: 4164641 - RNA, 59 nt, Human
gguugaagcuacuuucuggaugccuaguuacugcugaugucuagacauuagcuucagcu

SEQ ID NO: 4164642 - RNA, 66 nt, Human
gguugaggacaggagccaagaaccucaggccaggcugccuggcuggacuugguccuguuuugagcu

SEQ ID NO: 4164643 - RNA, 109 nt, Human
gguugaggagacagucucuagguagauaacuuguccaaggucaguggcuaaaaaguggcagaugugguuugagacaggucuuccugcucuagagccuguauucuuuuuc

SEQ ID NO: 4164644 - RNA, 71 nt, Human
gguugaguggagugagcaccggacuaggaguccucaggagaaaggagucuggugcucgcucugcuucuacc

SEQ ID NO: 4164645 - RNA, 75 nt, Human
gguugauaacagaaguuuguuauguaaacaaaugcuaucaaccauuuguucaccuagcaaacuuuuguuaagacc

SEQ ID NO: 4164646 - RNA, 99 nt, Human
gguugauucauaauucuugguauaaaaccaaguuuuccuuagucuugaggaauuugaagaaagguaaaauguuggauuuuaagcaaaguaggauugacc

SEQ ID NO: 4164647 - RNA, 82 nt, Human
gguugcaagucuuugcuguugugaacagugccgcaauaaacauacgugugcaugugucuuuauaguagaaugauuuauaauc

SEQ ID NO: 4164648 - RNA, 55 nt, Human
gguugcacuagacacauuucaagugcugaauaggcacauaugacuaguagcuacc

SEQ ID NO: 4164649 - RNA, 73 nt, Human
gguugcagcagggaggucuagcacgugggucuugagaucagcauaccaguggacuucucccuguggugcagcc

SEQ ID NO: 4164650 - RNA, 119 nt, Human
gguugcaggggaugugugcccagcaucaggagcaccccugcaggccucgcagcuauagaugguggaaguccagugcuggaggcugaguugggucuccugugaggcagucccccguggcc

SEQ ID NO: 4164651 - RNA, 94 nt, Human
gggugacaaaaacaauauaaacaaguuguugaaaauaauuaucuuugggugauuggguuaugaugauuuuauuuuauuguuuugcuguuuucuc

SEQ ID NO: 4164652 - RNA, 62 nt, Human
gggugacauagugauggggcauaaagcacuucccaccaagcuagcaaaucacuguuucaguc

SEQ ID NO: 4164653 - RNA, 61 nt, Human
gggugaccucacaucccagugagccccucaauucagggccagggagguugauugguuaccc

SEQ ID NO: 4164654 - RNA, 64 nt, Human
gggugagcacauuaaugguuucauccauuaaaucuuuuggugcugagaauugauguccuugucc

SEQ ID NO: 4164655 - RNA, 60 nt, Human
guggcaaggcauggcauggggcagaugugggaucacaucccagccuuccugcuuacccgc

SEQ ID NO: 4164656 - RNA, 92 nt, Human
guggcaauauguacgugcuaggaagaagggugcuugaaagaacauauguccuggauauuucauagcuuuuucuuuguaauaugugaagcuac

SEQ ID NO: 4164657 - RNA, 85 nt, Human
guggcaaugcagauuccugggccugccucuagugauucccauucaguagguuugggguggggcccaggaaaucuauauuuuucac

SEQ ID NO: 4164658 - RNA, 61 nt, Human
guggcacauaggauccuguggcuagagugcuuacucaugugacaugaaacuguguugcuac

SEQ ID NO: 4164659 - RNA, 72 nt, Human
guggcacuguugagucaaaagaaaaccagguuugaaaucagaaaaccuggcuucuaaucauggcucugccac

SEQ ID NO: 4164660 - RNA, 98 nt, Human
guggcagaaagugugguacuuagaaguuaugauaauaauagugucuuacuaaagucaucaaagaacuuucguauguauuacuauuaaauuuucucuac

SEQ ID NO: 4164661 - RNA, 62 nt, Human
guggcagaaauauucuugcucugggucuuagcaaucaugagagcauaagcauuauuugccac

SEQ ID NO: 4164662 - RNA, 57 nt, Human
guggcagaaguacacaagcaugcagcugucugugcugugagcugauacauucucuac

SEQ ID NO: 4164663 - RNA, 59 nt, Human
uacaguuucccagcagaugcaagccuucaggacuuguuauuuuggugaggaaauuagug

SEQ ID NO: 4164664 - RNA, 55 nt, Human
uacaguuucuguccuuguggagaugacagucuacucuggaaaacagaaaguugua

SEQ ID NO: 4164665 - RNA, 83 nt, Human
uacauaauuucuaccagggccauauuagcagugaaacauuuuaaacugcagaaauugugguuuugguucagaaacaaguugua

SEQ ID NO: 4164666 - RNA, 129 nt, Human
uacauacaaaccauaguagccuggagggcaggagggaguaacguacuacagugcagccuuagaaacuggucgcuucagcugauauuacucccacugcugccaccacugccucuaucauuacugucucua

SEQ ID NO: 4164667 - RNA, 57 nt, Human
uacauacauauguggaugucauauuuaauauuugaguguggugagugugugugugua

SEQ ID NO: 4164668 - RNA, 76 nt, Human
uacauaccugacagaggcucaccagccuuucacuggacauuuuccagcgaccagggaagcuucuucauagguagua

SEQ ID NO: 4164669 - RNA, 64 nt, Human
uacauagaaggaggcuggcagcucuagcugagagguagcaggagcuggugccugcuuuugugug

SEQ ID NO: 4164670 - RNA, 83 nt, Human
uacauagagguuaguuuuucagaucuggaaucaguuaaauuauuuacuaagggcgccagugucagaaagauuauccucuggua

SEQ ID NO: 4164671 - RNA, 88 nt, Human
uacauauuagucauuuaaacacucacuucauagccauuauugucaaaacaacaugugugcuuuggguguggguguguacagguaugua

SEQ ID NO: 4164672 - RNA, 55 nt, Human
uacaucacucaaaaccuagugccuggccuugguuggugcagguaaugaugauaua

SEQ ID NO: 4164673 - RNA, 60 nt, Human
uacaucauggugagcaggaggcucacuacugagcacaguucuaacugccuaccagaugug

SEQ ID NO: 4164674 - RNA, 110 nt, Human
uacaucccuuuagccacucaucaaacuaaaguugauaagguaucguaguuauucagacugaugauacuuuucuacuuucauauggggugauuaauucaauagagaaugua

SEQ ID NO: 4164675 - RNA, 61 nt, Human
uacaucugucuggcuuuccauuccuuggguggaauuaccuuggcaaggccagcuugaugug

SEQ ID NO: 4164676 - RNA, 55 nt, Human
uacaugaguccugaaggcacuauaaaguaguuucuccuuuagaaacucauaugua

SEQ ID NO: 4164677 - RNA, 106 nt, Human
uacaugaucauuuguaacucaauuagguauaaagcuaagacuuacaugaaacuuauacaaguucaugaaguuugguuuauaguuuauacaaacagaagucagagua

SEQ ID NO: 4164678 - RNA, 129 nt, Human
uacaugauuaugugcauuugcuaaaaucccuagaccuacacauggaaguugcaguuuucguaggucgaaaacaguccaagagcugcaauuucaugugguguaaccuaugcauaucacaugaaggugaua

SEQ ID NO: 4164679 - RNA, 77 nt, Human
uacaugcagaguugcguccaugcagaguugcaugcaguuacaugcagagcugcaccuaugcagaccucucugcugua

SEQ ID NO: 4164680 - RNA, 69 nt, Human
uacauuaggauaaaauauguggccuuuaguuccccuggaaggugccugaguguuuuuuccacuggugug

SEQ ID NO: 4164681 - RNA, 93 nt, Human
uacauucauuuuguguuuguuuuguagaaguauuauagaaggugcuuuauaaauauuuucuuuaauucucacagcaaucauaaaaggaaggua

SEQ ID NO: 4164682 - RNA, 57 nt, Human
uacauuccucagcaggccuuuuguugguugcacuaacugcaagguugcugggaagua

SEQ ID NO: 4164683 - RNA, 63 nt, Human
uacauucugcuagaggaagaaauugaggcccacugagagucuguuccucuugcagguuuugua

SEQ ID NO: 4164684 - RNA, 57 nt, Human
uacauugacucucugucccuaaaugaacugagauuuuggaggggagagaauugugua

SEQ ID NO: 4164685 - RNA, 129 nt, Human
uacauugauagaauuaaacaggcuuuggaaaugcauuuguuauuaucuggcuacuuuuguuaguuccucagaugcuaaucaaacuuucugcagguauuuucaauuacuauuuaauuauuuuacagugua

SEQ ID NO: 4164686 - RNA, 63 nt, Human
uacauugcucauuauauugcuucagauugaggauaaaacauagaagcaaccugggccaaugua

SEQ ID NO: 4164687 - RNA, 77 nt, Human
uacauuguugguggcacccagaauaaggacaggacuuggagugucaggaagccugugagcuggguccuuacagugug

SEQ ID NO: 4164688 - RNA, 61 nt, Human
uacauuucacaaggugauaugguuuggcuguguccccacucaaaucucaucuugaauugua

SEQ ID NO: 4164689 - RNA, 60 nt, Human
uacauuucacuauucacuaaaaggacauuuagucacuuugauuugugaugugagacugug

SEQ ID NO: 4164690 - RNA, 73 nt, Human
uacauuuccaggcagagugagaagcccuugucaagccccaacagggagcuggcuggcugugccaaggacagua

SEQ ID NO: 4164691 - RNA, 77 nt, Human
uaccaagaugcagcuagauuccgauuuacaagaaauuccaaguuaauugggugcaacagcugaauaucaggauggua

SEQ ID NO: 4164692 - RNA, 55 nt, Human
uaccaaguagcugggacuacaggugcccgccaccacgcccggcuaauuuuuggua

SEQ ID NO: 4164693 - RNA, 74 nt, Human
uaccaaucagagaucugucuacuauuuaagacucagcuaucuugcuuuuuauaauaguuggacucucauaggua

SEQ ID NO: 4164694 - RNA, 73 nt, Human
uaccaauggagaagaggggauucagacacuucuuuaggaucuuuaaguucuuuuccauuucuuaacuuuggug

SEQ ID NO: 4164695 - RNA, 65 nt, Human
uaccacagccuccuucagagagcaucaugacguuaaugacgugaacagguggauggcugauggug

SEQ ID NO: 4164696 - RNA, 121 nt, Human
uaccacauucugaauuuauaagaauuuauuuuaguccugggcuuuggaacaguacuugcuuauaagaaguauuagcuuuaaaacccagacauguaaauuaauaagaaaaagagauggggua

SEQ ID NO: 4164697 - RNA, 97 nt, Human
uaccaccuacagccuccccagaccuccaccgcuauguuaggucccagggcugggucccagcugcccuguggggaggguugucagggcuguagaggug

SEQ ID NO: 4164698 - RNA, 88 nt, Human
uaccacucuauaacucuuuacuauacauuuauuuucaacaguuuagccagaaggguugguguaauuaaagaguguuacagggucggua

SEQ ID NO: 4164699 - RNA, 84 nt, Human
uaccagaaggagagaaauugagguagcaagcaguacacauuuacuauucuguuucccugccugccuauuuuuuaaaacuuggua

SEQ ID NO: 4164700 - RNA, 56 nt, Human
uaccagagcaccuccaccuuuccugugcacuuaggccucugugcagcugccuggua

SEQ ID NO: 4164701 - RNA, 62 nt, Human
uaccagaucuaucuguugauggugcuuucagaagagccaccaauauuugguagaucacugua

SEQ ID NO: 4164702 - RNA, 63 nt, Human
uaccagcaccaugaccuugccauugaagaauguguuucaguugguuugggaaugguacuagug

SEQ ID NO: 4164703 - RNA, 79 nt, Human
uaccaguaugcuuaauaaugaacauuuaaaaccuguuuccuacagccaaacaggucauaguugagugauaccaguggua

SEQ ID NO: 4164704 - RNA, 62 nt, Human
uaccaucaguuugagauuuuccucuuucccacccuucucagaggggcaucaaagugcuggug

SEQ ID NO: 4164705 - RNA, 74 nt, Human
uaccauccaucugcaucugaauaucccaggcauaucuauagcagauuguaacauguucagaucacugggaggua

SEQ ID NO: 4164706 - RNA, 126 nt, Human
uaccauuauauuugguauguuguggaauaguucggacaguagauaacauuuuugcauguuaauacauaaaaaaaguuucaacugccaacucuuugucacacaccaaaccugauuauuuaccuggua

SEQ ID NO: 4164707 - RNA, 72 nt, Human
uacccaggagcccugcaggaugagggaggucucuggagaggccauugagaacucagggcucagcacugggug

SEQ ID NO: 4164708 - RNA, 128 nt, Human
uacccgugggcuuuuucagcauuccuaguauuguauauccucacauaaaaagugauaauauuauguuggaaauuacuuuaugugauggauuagugugaacauauuugggguguuugaauaauucagug

SEQ ID NO: 4164709 - RNA, 70 nt, Human
uacccucagagaacuccacaccuuagggcuagcagagcuuguccagggaugauaguuuuccuguugggug

SEQ ID NO: 4164710 - RNA, 69 nt, Human
uacccucaugaagcuggccuggacuuauauauuuaauucuaaauacuccaagugggguucaugacugua

SEQ ID NO: 4164711 - RNA, 120 nt, Human
uacccucgaugccacuggauacucacaagcaggguuaugcuccuucaucuugggcuuguuugccuaaaugaaaggguuuaauuuauuuuguaccuccuaugcgugggauaguccagggug

SEQ ID NO: 4164712 - RNA, 86 nt, Human
uacccucuaggguaccagggaaggcuguugauggggaggugugucaguggagacacccugcuacaaagccuccuggugagggggug

SEQ ID NO: 4164713 - RNA, 69 nt, Human
uacccuucaauuauucccuccuguugcuucccaucuuauugacuugugugcaggcagggaaugggggug

SEQ ID NO: 4164714 - RNA, 56 nt, Human
uacccuuuccuagaaauauauacuuacugcacucugaguacuugcugggaagggug

SEQ ID NO: 4164715 - RNA, 82 nt, Human
uaccgaaaugccuggcuaaguucauaagcuuauucuuaugaguguuaauaaguuaauguacuaugaauuuccacaugcggug

SEQ ID NO: 4164716 - RNA, 79 nt, Human
uaccgagaccugagaauguuuaacagagaaaauaaagagcauauuuuaaauucucaaguaaaauacucucugauuggua

SEQ ID NO: 4164717 - RNA, 76 nt, Human
uaccuaugaaugugaccuuauuugaaaauagagauuuuguagaucuaaucaguuuaagaugaggucauacugggua

SEQ ID NO: 4164718 - RNA, 60 nt, Human
uaccugacaggggagcuuauuugugaauucagcaaccauguuuugagcuucaaucaggug

SEQ ID NO: 4164719 - RNA, 86 nt, Human
uaccugcagcacagagagcagugggggacacccuccugucccagcguugagcacccuguuccccacuggcuucguguagcagagug

SEQ ID NO: 4164720 - RNA, 74 nt, Human
uaccugccucaggucccacugcuaguaagugacacuggagguggaacucaugggugggccugaaagaacaggug

SEQ ID NO: 4164721 - RNA, 62 nt, Human
uaccuggaugugaaggugguaugacugagaccuuagucauaugacccuucacaaacuuugua

SEQ ID NO: 4164722 - RNA, 87 nt, Human
uaccuguuucaggguguggaggagagggaacuagaauccacaaaaggauucaguucuggcugccuuccuucaccuguucagcaggug

SEQ ID NO: 4164723 - RNA, 81 nt, Human
uaccuuccagucuacacaaugauuugguucaaaaauaggccucccauuucugauauaccacauuagauguguuggauggua

SEQ ID NO: 4164724 - RNA, 69 nt, Human
uacgaagcugccuuugcaucacuuuaaaacuguaaauaugcccuugaaacaugcaaagaggcuuuugug

SEQ ID NO: 4164725 - RNA, 55 nt, Human
uacgacuguacaaggcauauugaaaaccuucaguauuagugucuuugcuguugug

SEQ ID NO: 4164726 - RNA, 82 nt, Human
uacgagugugguagguaguaucaucuccauuucacugaugaugaaacuuaucagugauugguggacugccuagcccaaagua

SEQ ID NO: 4164727 - RNA, 84 nt, Human
uacgcacuugcauuuugguguaugaggccucagcaaacuauauaaggcaucaaccauuuauuaugccaaaauggaaaguguaua

SEQ ID NO: 4164728 - RNA, 75 nt, Human
guuuucauguaguuucuguauaaaaauuagcuucucuguaaacuacguuaguuucuauguaagcuacgugaaaac

SEQ ID NO: 4164729 - RNA, 73 nt, Human
guuuuccaagcugaaaugguuuucucaugagguuagagauucagaggaacacuguuucaugccuggccaagac

SEQ ID NO: 4164730 - RNA, 64 nt, Human
guuuucccucucuuuuuuccagggaacuuacauuguuccagggcauggggagagaguggggaac

SEQ ID NO: 4164731 - RNA, 66 nt, Human
guuuuccuugguauuauuagacauggguguuauaaccaaucuguuucaacaaugcuuagagaaaac

SEQ ID NO: 4164732 - RNA, 70 nt, Human
guuuucuacugauggaugcuacguaagaggccgacccaggccucuucuggguaagcuauuggaacgaggc

SEQ ID NO: 4164733 - RNA, 59 nt, Human
guuuucucaaauauaagcuaaaugugguugacagaccacugauggugauuugaggccac

SEQ ID NO: 4164734 - RNA, 66 nt, Human
guuuucucaucuccucaaugguacgaguaauauuaaauaguaucuguccaggauucuugagagaac

SEQ ID NO: 4164735 - RNA, 97 nt, Human
guuuucucuuuuuggaagcucuucuguauucagcuuugucaguugaagaguuaguucuucaggacagguucggguggguacagaaaguagggaaaac

SEQ ID NO: 4164736 - RNA, 69 nt, Human
guuuucugcucagaaaagugaggcucaguaucaucuauauugaaaacuaguuuuucucagcagaccuac

SEQ ID NO: 4164737 - RNA, 62 nt, Human
guuuucuggcuuggacacaaucuucccugaaacccaaucugggaaaccuuccaagcagagac

SEQ ID NO: 4164738 - RNA, 57 nt, Human
guuuucuggguaagaucagagaaagaaaaucauuaucuuuaucuggcucagagacac

SEQ ID NO: 4164739 - RNA, 95 nt, Human
guuuucuucauuguuguuaauguucuuucagccagugcaucaauucauccuauuugaaugcugagacuaaagagcuugagggcauguuugaaaac

SEQ ID NO: 4164740 - RNA, 83 nt, Human
guuuucuugccuagugacaaaacggaacauacagaacacagaacauguuccguauguucagauuugucaauaggcaaaagaau

SEQ ID NO: 4164741 - RNA, 76 nt, Human
guuuucuuguagugccagguuucugugauaaagguauaaacacagucuaacagaaauucugacaaaaugagaagau

SEQ ID NO: 4164742 - RNA, 80 nt, Human
guuuugaaauuuaguucuucucuggccugagauggucucaauucuuaacucuuagccuuagaaaaauaagauuuuaaagc

SEQ ID NO: 4164743 - RNA, 55 nt, Human
guuuugaauacuacuagaacuugggcagguccuacaaacuuggugguguugagac

SEQ ID NO: 4164744 - RNA, 92 nt, Human
guuuugaauuuacaucgccuguuucaagcaauagcauuucaccacagguugccuuaugaacuuuuauuugaugacaggagauguuccaaaac

SEQ ID NO: 4164745 - RNA, 72 nt, Human
guuuugagugcuuuagagaaauggugcuccaaauauuugaagcauuacuauucucaaaaacaguaucaagac

SEQ ID NO: 4164746 - RNA, 89 nt, Human
guuuugcuguugucggguggaucacgaugcaauuuugaugaguaucauaggagaaaaauugcacgguauccaucuguaaaccgcaggac

SEQ ID NO: 4164747 - RNA, 79 nt, Human
guuuuggguacauguggaguuuucuagucaaagcaaagagagauuuggaauuggcugaguucuccaggaguagucaugc

SEQ ID NO: 4164748 - RNA, 60 nt, Human
guuuugguaagaauagucauccuucccuguaaaggguccacuggcuaauuuuauagaggc

SEQ ID NO: 4164749 - RNA, 69 nt, Human
guuuugucacugguaaauuaugcgacuuuggacaaauuauucagucucagauguuuaccaguguuguac

SEQ ID NO: 4164750 - RNA, 66 nt, Human
guuuuguguauugcuguauuucuggcaccuaguagagugccuggcauauaguaguugugcaauaac

SEQ ID NO: 4164751 - RNA, 75 nt, Human
guuuugugucaucuccauguagacagcucuccuggacacucucccugguggcuuugcccuggacugaggcaaaac

SEQ ID NO: 4164752 - RNA, 90 nt, Human
guuuuuacucagaccuuccacauagugaauaacauuuuuuccuuuacagguuuaccuuagauuguagcuaugugggaggugagauuaaac

SEQ ID NO: 4164753 - RNA, 100 nt, Human
guuuuuacuggaauauagagguauugauuguaaauugcgucuugguggucaaaccacaaaggcaugauguaaucaaugauaaaacuauauauaguacuac

SEQ ID NO: 4164754 - RNA, 82 nt, Human
guuuuuagacuguuaauugugaauuuuacauuugggucaucacuguuguguagauuuguucaccuauuaaaauaaugaaaac

SEQ ID NO: 4164755 - RNA, 62 nt, Human
guuuuuagccaagccauaggucugauuaaguacagucagauuccuugagcagguuacaaagc

SEQ ID NO: 4164756 - RNA, 59 nt, Human
guuuuuagugaagcuuugcauuucacauaagguaugugaagugaaauuucacaagggac

SEQ ID NO: 4164757 - RNA, 90 nt, Human
guuuuuaguuuuguucuggcaucuuugucccagaagcugaaucuaccaucagaucccacaguugcaagggugccaugaacaggauggaac

SEQ ID NO: 4164758 - RNA, 78 nt, Human
guuuuucagacgauguugcauuugucagugguuucuuccuuucuauuacugaauagugcugcauuguacagauagaac

SEQ ID NO: 4164759 - RNA, 81 nt, Human
guuuuucauuuggugcuuaaccuaguuucuaguacagaaaaagaagucuuugcuggcguuaguuaaguauaauugaacaac

SEQ ID NO: 4164760 - RNA, 78 nt, Human
guuuuucauuuguaaaagaaccucuuuaaagaacagaauggaaacaagcaguucuucaaaggguuucaaaugagaaau

SEQ ID NO: 4164761 - RNA, 77 nt, Human
guuuuuccaaaacaauauucugugaaagcuucagauuuuucaaaaugcuuucaauuuagugauguuguuggaaaaau

SEQ ID NO: 4164762 - RNA, 72 nt, Human
guuuuuccugaugcaugugggugcagagaugacacuggccaaaucaaguaccaaaucuguauuaggaaacac

SEQ ID NO: 4164763 - RNA, 55 nt, Human
guuuuucuaaaguuggugacaguuuccguaaggaaauacacauucauagaaaaau

SEQ ID NO: 4164764 - RNA, 78 nt, Human
guuuuucuauccaauucuaauauuguguuuucagauuauaaggcugagacuauggugugcagaaauugguuggugaac

SEQ ID NO: 4164765 - RNA, 84 nt, Human
guuuuucuuugcuuuguuucuuuuucuugcaggacuaaacaaugucauccaaggccauaagagauacaaaacccaaggaaaaau

SEQ ID NO: 4164766 - RNA, 63 nt, Human
guuuuugguucauaauuugcacuacugugagaaacacggaggacacaaucaugagccaaauac

SEQ ID NO: 4164767 - RNA, 69 nt, Human
guuuuuguccauggaggcaaaccaagaggacaggggaugcugacuccaggcuggcuccacacauaaagc

SEQ ID NO: 4164768 - RNA, 76 nt, Human
guuuuuuauaauaauggugauagggaggggucccagggauuccauuuccagacuguucacauuggcauuaaagaac

SEQ ID NO: 4164769 - RNA, 81 nt, Human
guuuuuucaauuccaccaaagcgcccuagaaaccacaugcagaacaaagucgauggggcgcugccuggaaggcgagaggau

SEQ ID NO: 4164770 - RNA, 78 nt, Human
guuuuuuccuuucauuccuuugcucugaacacuuggccguaugcugugugcagcagagacaggacucagggaagagac

SEQ ID NO: 4164771 - RNA, 62 nt, Human
guuuuuuuaaguucagaaaggauaaaaggaucuuggcccuuuuaauuuggacauaagaagau

SEQ ID NO: 4164772 - RNA, 78 nt, Human
uaaaaaagugacuaugauugaugaagauguuggauguuugugaaauaagcaucuaaacuaucaguuugaauuuuuuua

SEQ ID NO: 4164773 - RNA, 104 nt, Human
uaaaaacagauuuagcaaugcuccaaguaguuaguccgccugcucuguaaugguuuaucauagucauaaagcugacuguuggggucagcugaucucugcuuuua

SEQ ID NO: 4164774 - RNA, 76 nt, Human
uaaaaagagggccucuaccauccaagguuagggaaucaacucuggccuuuacacuaauggagggcuuuaauuuuua

SEQ ID NO: 4164775 - RNA, 129 nt, Human
uaaaaagagugaagaguugagaggcuccauuugguuucaguuuguaccauuguuugaaguacucaguugguugaauacuccaaauaaugguucaaauucaaaccaaauggagccucuccacucuuuuua

SEQ ID NO: 4164776 - RNA, 83 nt, Human
uaaaaagccugaugcccagguuauaccccagaccaauaacagcagacuuucuggggaugaaacccaggcaucugaccuuuuua

SEQ ID NO: 4164777 - RNA, 93 nt, Human
uaaaaaugccccaguuguaacuuacacauuuacuacacuucuuauuacauuuugaggucauuaaguuuaagucauguuugaugggcauuuuua

SEQ ID NO: 4164778 - RNA, 72 nt, Human
uaaaaauucauccaugaacaauuccacauuucaucacugcccuuggaacugacacugugggugugauuuuua

SEQ ID NO: 4164779 - RNA, 56 nt, Human
uagaaaccaggcugugggccuccaauaaauguaauaggcccagccucuccuuucua

SEQ ID NO: 4164780 - RNA, 55 nt, Human
uagaaacccugccuuaguagcuacuccuugaaguggucuaggauggggcuuucug

SEQ ID NO: 4164781 - RNA, 66 nt, Human
uagaaagcaggauugccaccacuccucgaagcaccccacgauuagagugucugagcgcugcuucug

SEQ ID NO: 4164782 - RNA, 73 nt, Human
uagaaagcaugcaaguuugaugguuuauauguaacaaaaugguuuuguuguuaaacuuguuuauuguauucug

SEQ ID NO: 4164783 - RNA, 58 nt, Human
uagaaagugguugagaguuuagguucuggagccagacugaguuuuaaucacuuuucua

SEQ ID NO: 4164784 - RNA, 58 nt, Human
uagaaaugcagugacuaggcugaaacgacacagaauguuucucuacacuacauuucua

SEQ ID NO: 4164785 - RNA, 79 nt, Human
uagaaccauuguguuuggcuugaauaucugacaggaccuauauagcuuuccucuggauauaagccucaccaugccucug

SEQ ID NO: 4164786 - RNA, 90 nt, Human
uagaagaaguuucugaaaugggguugugaucagggaugggagaguccuccucuaggcauuguuauuacaacucuuuuauaaacucuuuua

SEQ ID NO: 4164787 - RNA, 103 nt, Human
uagaagcaugacuuucuacauauguaugaagguaauuuagagaccaaauggagaaaauagcugaaucuaaggccuucaugucaguaucaaagacccucuucua

SEQ ID NO: 4164788 - RNA, 64 nt, Human
uagaagggccuucacugucuaagcaacucaaucagcugcuucagcacuuugagagccuccuuua

SEQ ID NO: 4164789 - RNA, 70 nt, Human
uagaaggguuuggggugaaauagacuuacucaaucagaguaugucuuguuaaucugaagcaaguuuucua

SEQ ID NO: 4164790 - RNA, 58 nt, Human
uagaaguggggcaggaaagauugcauaggcucacuccaguccccuguccuuacuucua

SEQ ID NO: 4164791 - RNA, 56 nt, Human
uagaaguuucaaaagacuucauuuuaucaugauggguucuauuuugcaaacuucug

SEQ ID NO: 4164792 - RNA, 62 nt, Human
uagaaguuucauuguucauguaacaauauuggccaguuguucagguuugcaaugaagcucug

SEQ ID NO: 4164793 - RNA, 61 nt, Human
uagaauaggggugacggugccauagucucagggacccaggugcacccagcuucuuguucua

SEQ ID NO: 4164794 - RNA, 64 nt, Human
uagaauagucaggaguaggaguuuuggagucuaccugcccaggguuuaaauucugacuaugcug

SEQ ID NO: 4164795 - RNA, 80 nt, Human
uagaauauaucuuccauauuuugaagcaggaaaauuucuauuuuuaaaguggucauuucuguuucaguagguguauucua

SEQ ID NO: 4164796 - RNA, 67 nt, Human
uagaauaugucagauguuuaucugauuuuuuaauauuagcaaaucagauuauuugauuggcagucua

SEQ ID NO: 4164797 - RNA, 72 nt, Human
uagaaucacaaguugagaauuccaugcuguugaaacuaucaaaaguaauagugaaucgacuaugaugaucug

SEQ ID NO: 4164798 - RNA, 70 nt, Human
uagaaucuaaauaugcaauuugaagagccuguaacaggcucaagguauuaauuuguuuauuucagaucua

SEQ ID NO: 4164799 - RNA, 61 nt, Human
uagaaucugcccuuuuugagcauucagaaaucacucuaaaaugucaaacagagcagagcua

SEQ ID NO: 4164800 - RNA, 63 nt, Human
uagaaucuuagcaucgaugugauugucugaguggauuucaaaugcaauggcgugcuaguucug

SEQ ID NO: 4164801 - RNA, 105 nt, Human
uagaaugagaauacaaaaguaucaacugcaaucuggauccuagaagacaaugaaaaaaugucuucuuggguucugagauuacauuauuuugaaccaagaauucua

SEQ ID NO: 4164802 - RNA, 55 nt, Human
uagaaugaggccugcaugccugcucugcagaguccgggcagcuccccucauucug

SEQ ID NO: 4164803 - RNA, 79 nt, Human
uaauuauauggugaaguucuaccucccaguaucucagaaugugaaguauuuggagauaagggcuuuaaagagguaauua

SEQ ID NO: 4164804 - RNA, 89 nt, Human
uaauugaagaagagucuuaggcaaaaauaauggaguagaaauauuugguagcauaacuuauuuuccuuaucugggacuuacuucaauua

SEQ ID NO: 4164805 - RNA, 91 nt, Human
uaauugcaugugcuuuauuugguaguaccugacaguuuauuaaagcaaaaagaaacuguugugguuuaucauuaaacucccacuguaauua

SEQ ID NO: 4164806 - RNA, 100 nt, Human
uaauugccauugcguuuugaugaucugggcuggacacacuuaaccucuuguuuuguaaucugaguugcaugguaccgguccauuauuuucauggcaauug

SEQ ID NO: 4164807 - RNA, 58 nt, Human
uaauuguaguagcuguuuaauauuugcacagccuucauuagaaagcucacuacaguua

SEQ ID NO: 4164808 - RNA, 57 nt, Human
uaauugucagguuuuaguaucaagguuauauucaccuggugaaagacuugagaguua

SEQ ID NO: 4164809 - RNA, 61 nt, Human
uaauuuaauuccauggauucuaaugguggaaauauuaaagagggaucuugggguugaauug

SEQ ID NO: 4164810 - RNA, 82 nt, Human
uaauuuacuaaugcccagucucuuaaaguggaguccauuucacuccacuuuagcaaugauugaauguuggcuuuuuaaauua

SEQ ID NO: 4164811 - RNA, 121 nt, Human
uaauuuaucuccauggcuuucuguucuucuagggugacaguuugucaguuugacuucccauuuaaaggucaaagcagugcaccuuaauugaugguggguggaaaaugucuugagaagauua

SEQ ID NO: 4164812 - RNA, 60 nt, Human
uaauuuauguagggaacucagcucugugccuggcacauaaugagcucuuuauaaauguua

SEQ ID NO: 4164813 - RNA, 108 nt, Human
uaauuugaauuucagauuaacaguguaucauuuuuugauauaaguaugucacaaauauugcauagacauacugaaaaaugauuugcuguuuaccugagauucauauua

SEQ ID NO: 4164814 - RNA, 63 nt, Human
uaauuuggugccuagaauguuaaugccucgauugagaugcucugaaguucgcgggcaagauua

SEQ ID NO: 4164815 - RNA, 87 nt, Human
uaauuuguuggaaauggucuucucaagcaacacugggaauaguuuguuuucuccagugcugccaaagggaccuuggucaggagguua

SEQ ID NO: 4164816 - RNA, 61 nt, Human
uacaaaacagugcucugguccuuguugaucauaaagaagagguuaagagugcuauuuugua

SEQ ID NO: 4164817 - RNA, 74 nt, Human
uacaaacagauguugcuugucauucucuuguuguuaagcaggcaccagauuggaucaagcagcaguugugugug

SEQ ID NO: 4164818 - RNA, 124 nt, Human
uacaaagagaauaauauggcaguuugauggcgaaugucuaaacauagcuuuuauuauauaaagagaaaaguugaggcucuuagaaauuuggaaaucauaucgacuucaacacauuuuuuuugua

SEQ ID NO: 4164819 - RNA, 68 nt, Human
uacaaagcugggcuggccaacccagguccucgagaggggagguuggguguccccggccgaguuuggua

SEQ ID NO: 4164820 - RNA, 76 nt, Human
uacaaauaauugcucugauauaaaagugacauucauuugaaaauauugaagaucaguuuugugucugauauuugug

SEQ ID NO: 4164821 - RNA, 79 nt, Human
uacaaaugaagagggcaacuucugagcugaacuuugucucucucuaguucagaaagcacaggauccucaaucauuugua

SEQ ID NO: 4164822 - RNA, 79 nt, Human
uacaaauucauguuugccuauuugacuuugcaggugaacuuaguaucaguaaguugaaugcguacgugacauacuugua

SEQ ID NO: 4164823 - RNA, 71 nt, Human
uacaacaugugguccuuuaugacuggcuucuuucacuuagcguaaugcugucaggauucauccauguugua

SEQ ID NO: 4164824 - RNA, 64 nt, Human
uacaagcucacaaauuuuuaagagggaaaggaaauacucuuuugauagauucaagugagcugug

SEQ ID NO: 4164825 - RNA, 56 nt, Human
uacaaggcuucagcucagcuauuucagagauaucuggguuucaaagaagccuuuua

SEQ ID NO: 4164826 - RNA, 57 nt, Human
uacaagucaguugcgcuacuaacaggauuuggcugugagcaagagaaacugacugua

SEQ ID NO: 4164827 - RNA, 96 nt, Human
uacaaguucauuuuaaugcauuuugauauuauagagaaaugucagauccacaguuggacuacaauacucuuaguaaaagugaauucugagccugua

SEQ ID NO: 4164828 - RNA, 59 nt, Human
uacaauacuuaaccuauuuugcaaaugaagaacaugagucaggaagguuaaguaaugug

SEQ ID NO: 4164829 - RNA, 62 nt, Human
uacaaugucaccucucauguuuuagacacaaagagguccagaaaugaaagauggcuauugua

SEQ ID NO: 4164830 - RNA, 55 nt, Human
uacaauuuuaagccagaguggguugaccugucacccaagcaugguuaaaauugua

SEQ ID NO: 4164831 - RNA, 62 nt, Human
uacacaaaugcaccccagaagcugcagugacaaauggccuucugggaagaugucaugcugua

SEQ ID NO: 4164832 - RNA, 58 nt, Human
uacacaauucuggaugcaugucuauuugggagaauuaaaugcagcuggaguuggggug

SEQ ID NO: 4164833 - RNA, 65 nt, Human
uacacagauggguagaaaacagaaguccacagccuaugaauucucuuuuuacugucugucuggua

SEQ ID NO: 4164834 - RNA, 56 nt, Human
uacacaggcugccucuuugcauguuccuugaaguugugcaggacagagccugugug

SEQ ID NO: 4164835 - RNA, 61 nt, Human
uacacaggggagcaugguugacugggcucuguuaaauaucuguuucccauaacucugugua

SEQ ID NO: 4164836 - RNA, 109 nt, Human
uacacauaaaacacugccuacauaacacugccaaacuguacacuuagagaucuuaaccaucucuaaguguacaguuuggcaguguuauguagguucacauuguugugua

SEQ ID NO: 4164837 - RNA, 67 nt, Human
uacacaugacaguggacugagaugcuuugucugaguuaguucuuacaucucaauuccaauaugugug

SEQ ID NO: 4164838 - RNA, 61 nt, Human
uacacaugaucauuuaguagcaaagucuguucaucagaaaacucuaauugcuuuaugugug

SEQ ID NO: 4164839 - RNA, 63 nt, Human
uacacauucacaagccuacaagguugucagaggcaacccgguggaagcauuguggaaagugug

SEQ ID NO: 4164840 - RNA, 60 nt, Human
uacacccacaugccuaggagggagaaccauuuuccuccacgugagggcauacagggugug

SEQ ID NO: 4164841 - RNA, 77 nt, Human
uacaccuaccuggcucagcaaggcauucuguggauuaucuuauuaguaauuauaacaugcuuucuggcuauagugua

SEQ ID NO: 4164842 - RNA, 66 nt, Human
uacacguaucuggacacugcagagguuguagaugcauggacguuuacaacaguguccauauuugua

SEQ ID NO: 4164843 - RNA, 61 nt, Human
uacacuaauguuuuugcaaagccuauacguaugacaggcuuugcaaaaacauuagucagug

SEQ ID NO: 4164844 - RNA, 111 nt, Human
uacacuaauuuuccuuaaugccuucaaaaguuguuauauuacuuuuagaauagcuauguagaugucagaaaagguagcugugacaaaaugucauuaaggugacauagugua

SEQ ID NO: 4164845 - RNA, 81 nt, Human
uacacugaagucugacaguagcagaacucaaaacaagaucaucuuguacuagaaugccacuguuaguguugauuucuugua

SEQ ID NO: 4164846 - RNA, 98 nt, Human
uacacuucaaaauguugguaaaauguauauauuuuggugugacauugugacaguuaagguauacauucagccuuuucucaggcauauugaaaauggua

SEQ ID NO: 4164847 - RNA, 67 nt, Human
uacacuuuauggauccuacuuuauauguaauaucaaaaaaucauaauagugagauacgugaagugua

SEQ ID NO: 4164848 - RNA, 79 nt, Human
uacacuuuccauuacagaauuuaggauauuuuagagaaacucuguugccuauaauccuggugaguuugaaaaaagugua

SEQ ID NO: 4164849 - RNA, 83 nt, Human
uacacuuucccuucugugccagcagccuccuggagauagcuguggucucuccuugggaggguguuuggccaugggucagugua

SEQ ID NO: 4164850 - RNA, 60 nt, Human
uacagaaguuaacacuauugcuaugacacagaacuuagggacaaguguguaacuugugua

SEQ ID NO: 4164851 - RNA, 72 nt, Human
uacagaauccacauaguugaugcucaguuuuauuaauaaaugaauaagcaagccugugugcaagacuuugua

SEQ ID NO: 4164852 - RNA, 62 nt, Human
uacagaaugauguguuuaaauaaauuguccuguugacugaauuuugaucacauuauugggua

SEQ ID NO: 4164853 - RNA, 70 nt, Human
uacagaauuauauguagucagucagaguaaacauuauguauuacuuucaaaaacuacgugggcuucugug

SEQ ID NO: 4164854 - RNA, 69 nt, Human
uacagacacagauuuuggaaaagauccauauauggaaaaucuuuauggccaaaaauuuucuuugcugua

SEQ ID NO: 4164855 - RNA, 87 nt, Human
uacagacgcguucuucuuuuuguguuuugcuuuuugucuuuccagauaaauagugugucauaaagucugaguuuuuuugugugugua

SEQ ID NO: 4164856 - RNA, 60 nt, Human
uacagaggcugacaaaauauugcuucaguuaggcaagcauaaccuguacagccuucugug

SEQ ID NO: 4164857 - RNA, 77 nt, Human
uacagagggcaaggagaaggguaaucaacacagaagacugaaauuauccuuuccuugcauuacuuuucccucuugug

SEQ ID NO: 4164858 - RNA, 92 nt, Human
uacagagugucuuuugaaauuauguucuugagaaagguaaguucccuaaaaaucccaccaccucaggaacagaauuuucuaaaacuguugua

SEQ ID NO: 4164859 - RNA, 72 nt, Human
uacagauauauagugugugccuccuuccucuggacgaagagaguuggucuaaauacacauuguauucuagug

SEQ ID NO: 4164860 - RNA, 70 nt, Human
uacagcaucuucuagauccaggcuaucgagcacuugaaaugcggcuaagucugaauugagaugugcugug

SEQ ID NO: 4164861 - RNA, 58 nt, Human
uacagccaugguuaauuuaccuauguugccuaagcguaggcugcauuuauauggugug

SEQ ID NO: 4164862 - RNA, 76 nt, Human
uacagcugaagcucagcccaguaguuuucucuuacucaccaucaaucagaaaauuaauacugugcuugggcuagua

SEQ ID NO: 4164863 - RNA, 60 nt, Human
uacagcugcuggugcuccaugcuggcaggaauagaauuauuauggggccucagcagggug

SEQ ID NO: 4164864 - RNA, 77 nt, Human
uacaggaaaagagguccaggcucaaaagguuguuauuuguccaaggucacacagcugacagagccuuuuucacugua

SEQ ID NO: 4164865 - RNA, 68 nt, Human
uacaggaaaguuugcugaugaagaaaauuucagaaagggggagauuuugggguuggcaggcuccugug

SEQ ID NO: 4164866 - RNA, 63 nt, Human
uacaggaggcuacaggagacgccaggaguaaaacgaccuauucugaguccuguagucucugua

SEQ ID NO: 4164867 - RNA, 86 nt, Human
uacaggccagggcaggaucgugcauuuuuauuaacccugaaagaguuugaggaaaggagaugacaugaucagauuguauguuugua

SEQ ID NO: 4164868 - RNA, 60 nt, Human
uacaggcccauagucccugcuuugaaaaccaggggugaugacaggggccauggguuucua

SEQ ID NO: 4164869 - RNA, 63 nt, Human
uacaggccucaaauagggugccuccucccccaaauagggagacaucugaauuugaagccagua

SEQ ID NO: 4164870 - RNA, 72 nt, Human
uagcaaugacacagacaugcagugucaucuacaccucucuaucucugauucuuguguggucuggucuugcua

SEQ ID NO: 4164871 - RNA, 74 nt, Human
uagcaauuaccagcagcuuugcauacacuaaauugaaccccuccguuuguggggugaagcuguugcuguugcua

SEQ ID NO: 4164872 - RNA, 106 nt, Human
uagcacacacuuacaguguaguccaugccugagcaggauuuugaagugcaaguagaaucauugguugccaagagucuucucaguuauaaacacugcaggauugcua

SEQ ID NO: 4164873 - RNA, 62 nt, Human
uagcacagcuuuuuaaaauggcauucucagaguucuagagaguggcagcaaaaagugugcug

SEQ ID NO: 4164874 - RNA, 130 nt, Human
uagcacaucagagaggcucaagaaauccucggugaacuacucuugaguuaaugaauaggcuuauuuguuuguucauccaacacaagguuguugauuaccucugauauguuggccccucugcaaugugcug

SEQ ID NO: 4164875 - RNA, 69 nt, Human
uagcacauuuaggcuggugccaggaaaucuguauuuuugaacaagaaccuuggugagucuaaccugcua

SEQ ID NO: 4164876 - RNA, 55 nt, Human
uagcacuacuuagguacagccaaggcccagagcagacuguccuugaguagaguug

SEQ ID NO: 4164877 - RNA, 60 nt, Human
uagcacuuuagcauugguuuacacccaugcucuuggggucuuaccauaccuacaguacua

SEQ ID NO: 4164878 - RNA, 90 nt, Human
gugucuaauacgauguuuucaauaugcccuccucuuuuucuucucuaaaauagaacacaaaaaagaggagggcagauucaaggcaggcac

SEQ ID NO: 4164879 - RNA, 89 nt, Human
gugucuacccuucauguagcguuccauagagaucuaugaaaaugucggucuggaagaacuagggauguugacauauuugggucagauac

SEQ ID NO: 4164880 - RNA, 99 nt, Human
gugucucaauagccaagacauuuagaaaagcuggguauccacaugcacaaagugcauuugucugcauuugggagccaguaaaauguggaaugggaucac

SEQ ID NO: 4164881 - RNA, 64 nt, Human
gugucucagcugggagcuccauuagauagugaaauugucuccugaggaucccagcugggagcac

SEQ ID NO: 4164882 - RNA, 93 nt, Human
gugucuccagagcuuaaaacaguguguacacaucauaggcgcucagaugucugugcaugaaugaauaaacuggcuuugacagguuuggggagc

SEQ ID NO: 4164883 - RNA, 73 nt, Human
gugucucccagaaaccggcugcuuuggcgucccugaggaucacucacuggccaggcacagcugugggagguac

SEQ ID NO: 4164884 - RNA, 79 nt, Human
gugucucucuaccugaggauguuuucugccacagggugaacuagaagugcccaggagauaacguucccaagagugacac

SEQ ID NO: 4164885 - RNA, 78 nt, Human
gugucucuguuguggcuuccaaauuaucccuagaauagauuaagaaauucuaggaaauaucaagucaggaagagacac

SEQ ID NO: 4164886 - RNA, 88 nt, Human
gugucugaggcagcaugguaccuuggagaacacaugaaagcuauagauaaauugugaggcuucaaguuccaguguuguccauagggac

SEQ ID NO: 4164887 - RNA, 83 nt, Human
gugucugcaggagcagagauggcuggaaggggccucugcacacggaagauggcuuguucagccgauucaccuccugaggaugc

SEQ ID NO: 4164888 - RNA, 70 nt, Human
gugucuggagcaauauaaauguuggguagaugcguuuaaauaucuacagucaaguuauauugcuagacac

SEQ ID NO: 4164889 - RNA, 65 nt, Human
gugucuguaagccagauguggcuuguuaacuuuguuaauugguaaccucuggacuagacagaggc

SEQ ID NO: 4164890 - RNA, 63 nt, Human
gugucuguauaucacuuuuguccuuucuguggaagaauuagaacaacaguggucuacagaggc

SEQ ID NO: 4164891 - RNA, 78 nt, Human
gugucugucaguucacaguggcuuaggcuaugguuguuagugaaaguuguggugaggcuuugcuggagaugaggacac

SEQ ID NO: 4164892 - RNA, 62 nt, Human
gugucugugucacuugauucuuccugguugaguuaucaacacucagagcagcggcaucacac

SEQ ID NO: 4164893 - RNA, 107 nt, Human
gugucuguuucacaaacaaggaaaucugccaaaaucaugccaaaaaauuucucuguuucaggccugcaaaugaaugguagaaucuauguguguguguauauagauau

SEQ ID NO: 4164894 - RNA, 83 nt, Human
gugucuuaacuggauuauuguaagacaaaguaugcacuuuucaugucguauuaguauuuuguuaauaauccaguccaugauau

SEQ ID NO: 4164895 - RNA, 55 nt, Human
gugucuuagaaagacugaaugcuuuuuguuagaguucucauucuacuaaguacac

SEQ ID NO: 4164896 - RNA, 55 nt, Human
gugucuuuauuccucuauguuucccaacucugguuccaaagaauagugaagacac

SEQ ID NO: 4164897 - RNA, 77 nt, Human
gugucuuuuauucaacaaauauaacuuuugagcacuuacugcaugccagguauuaugcugcugaaugcuggagauac

SEQ ID NO: 4164898 - RNA, 56 nt, Human
gugucuuuugaggcugaccaguuguacgguaggacuacugggccuaggggaggcau

SEQ ID NO: 4164899 - RNA, 65 nt, Human
gugugaaaucaucaaaagagccauuggaggggacaccagagagucguguggcugagguuucacau

SEQ ID NO: 4164900 - RNA, 95 nt, Human
gugugaaaugagauaacagaaauaguacagcauaguucuugauauaugguaagagcucaggaaauguucauuauuaaauguuaguuauuuuccac

SEQ ID NO: 4164901 - RNA, 66 nt, Human
gugugaagacucauaauuuuagcccagauuguacugaggaucuaauuauugggucuguuaucacau

SEQ ID NO: 4164902 - RNA, 70 nt, Human
gugugaauuucugcuuaagcaagaaagcagcaaguuguugcugcugaggcuaaaguauaggaaaauccau

SEQ ID NO: 4164903 - RNA, 66 nt, Human
gugugacagaaacaagaaauaaacauugucugugccacagaaauguuguggguuuuguuaccacac

SEQ ID NO: 4164904 - RNA, 60 nt, Human
gugugacuuuauuuggaaauaguguuauugccgauguaauugauuaagaugaggucacac

SEQ ID NO: 4164905 - RNA, 55 nt, Human
gugugagagacugaagaaagccaugcuagcaaugacugggcucagucacuuaugc

SEQ ID NO: 4164906 - RNA, 84 nt, Human
gugugagaggauacucuguugucuggccuuccugucugccuauggccaguccugcccaggcugacagaaucaucugccucacau

SEQ ID NO: 4164907 - RNA, 75 nt, Human
gugugagagggggugcauguguggcagauuugagcccaguguaaacugcuucugcccacagccuccuguccacgc

SEQ ID NO: 4164908 - RNA, 81 nt, Human
gugugagcagacuugaugaggcagccucaugcuggcccgcccaggugaucuguguggcugucucuccuucugcuccugcac

SEQ ID NO: 4164909 - RNA, 55 nt, Human
gugugaggcagagaugccaaaacuguccugggaaauagugccucugcgccuccac

SEQ ID NO: 4164910 - RNA, 129 nt, Human
gugugagguagguuuacguaugaaauuccugggccgucaugucauuuugcauuaaaccaucaauuucuuggucugagaugacaagcauaugacacguccaaauaauuuuucugucaagucuauucagac

SEQ ID NO: 4164911 - RNA, 67 nt, Human
gugugaguguaccuauuuucaaaagugcuguuaacauaaacagagcaguaaaucuggggcaccaugc

SEQ ID NO: 4164912 - RNA, 80 nt, Human
gugugaugaaaagucauugugguauguucuuuuaauaggaauaagagagauaauaguuacaaagacuuuuuaaacaacau

SEQ ID NO: 4164913 - RNA, 70 nt, Human
gugugauuagagguauauauguauguaugugugucugcauauguguguguuccuccucagcuaauuccau

SEQ ID NO: 4164914 - RNA, 79 nt, Human
gugugcacaugacaguaaguagagcagagcaggagcaacaauauagaagcugaaguguucugaagcugcagaugcagau

SEQ ID NO: 4164915 - RNA, 64 nt, Human
gugugcagcagcagacgaaauugcaagccucucucugaaacuucaucaguugcuguugcagaac

SEQ ID NO: 4164916 - RNA, 64 nt, Human
gugugcagugagcaaaagaucuuaaauuugauuucaaguugcauaucucagcaugcugacacac

SEQ ID NO: 4164917 - RNA, 92 nt, Human
gugugcaucuguauuuauauauaaacaucuguauaugugcauauaugugugcauauacacauuugcuuauguguauauaugugggugcauau

SEQ ID NO: 4164918 - RNA, 119 nt, Human
gugugcaugcaauaaauacauuauauauuuuuucuggcaauaggcagugucccaauaguaacacccuguugugcucuuauugugcagggaauauauuauuugguuaauuauuagcacac

SEQ ID NO: 4164919 - RNA, 116 nt, Human
gugugcaugggggagcugcugccaggcugcccuccagucugcuccugugguuacuggcuccacagcaccucagagagggcggcccuggcuucagaaaugccagccauagugcucac

SEQ ID NO: 4164920 - RNA, 62 nt, Human
gugugcaugugcuugcacagauguaucuuuguccacaugugucugugcgucugcgugugugc

SEQ ID NO: 4164921 - RNA, 58 nt, Human
gugugccugagaggauggggccccucugcagagggccugggauguccuccuaggccac

SEQ ID NO: 4164922 - RNA, 127 nt, Human
gugugccuggccaauauaauguguggcagguuccucacauccuucuugggccaggcggggugccuucgcuagggcacugcagccucagauggugguagcaccugcccccauguauggaucaggccac

SEQ ID NO: 4164923 - RNA, 63 nt, Human
gugugccuucaugucauuggacaccuugaugucgccaucagagauagccacacugaaggccau

SEQ ID NO: 4164924 - RNA, 99 nt, Human
gugugcgggcugccaguccauauuuauacugccgggacauggcucucccugucuggagggcacuauggaguguggauauggggguggcucucugcagac

SEQ ID NO: 4164925 - RNA, 67 nt, Human
gugugcucagccaggggcaggccauaucacaggcuuggcauuggucucccuugcugguuggcugcac

SEQ ID NO: 4164926 - RNA, 101 nt, Human
gugugcugagaacuugacuccugaguuucaucguagaguacuucugagggucagaaacacucuacgugcagcuccuaacacagucgaggcacacagcaggc

SEQ ID NO: 4164927 - RNA, 63 nt, Human
gugugcuggguuggucaauaaauuauauagucauucuacuaauuaucagccgucccacuacau

SEQ ID NO: 4164928 - RNA, 56 nt, Human
gugugcuuuuuaugugagggaagccagauaaaggaucuggcuuuggaaggguagac

SEQ ID NO: 4164929 - RNA, 65 nt, Human
guguggaauggaguuuuugcccgggcuggagccagcaggacaguacagagauuuuacuuccucac

SEQ ID NO: 4164930 - RNA, 73 nt, Human
guguggaguagagauaagccaugagaacuguaauacugaacaguuccaggaagacaucucaggaacugcagau

SEQ ID NO: 4164931 - RNA, 62 nt, Human
guguggcaaagaccauuucuuucacccaauaugauuguaggaagaauaagucuuuguaccac

SEQ ID NO: 4164932 - RNA, 82 nt, Human
guguggccuggaugagcuucgacaucuggucaacaucagccacagaugcugucgagaccucucaccguguuccaggccacac

SEQ ID NO: 4164933 - RNA, 94 nt, Human
uaggcuucaucauaugguugaauucuggccaauggaaugugagaagaaguaauguaugccacuuccagaauuagaauuuaagaugguaggccug

SEQ ID NO: 4164934 - RNA, 91 nt, Human
uaggcuuccggggacacugcaguguucccacugggcuaagacuggaaccucucuagccauguguggaacacagccugguuccuggucccug

SEQ ID NO: 4164935 - RNA, 77 nt, Human
uaggcuuccuuccucuauguucagguagaauaaguacugcucagagcauuuccauuugcgcauaaagaggaagccug

SEQ ID NO: 4164936 - RNA, 64 nt, Human
uagggaaaagugacaguuuacaauucuuaaugggagcccuaagaaacaugauacuuuuccucua

SEQ ID NO: 4164937 - RNA, 58 nt, Human
uagggaaauauagauuuagggcugaaaacugaucccagcuuuuuucauuauuuccuug

SEQ ID NO: 4164938 - RNA, 71 nt, Human
uagggaacauuuugcuugaugagaaaauccgccagcaaggauguugggcucuaagcagaacugaagcucug

SEQ ID NO: 4164939 - RNA, 76 nt, Human
uagggaagaugaggcccuuccccaaggucacgggcuccuaaguggaggcugugggaugggaccucagcugccccug

SEQ ID NO: 4164940 - RNA, 58 nt, Human
uagggaagcuccugauuccccugcucuauucacaccagggagucaugauguuuccuug

SEQ ID NO: 4164941 - RNA, 79 nt, Human
uagggaaguuccuuauugugagaugcgauaauuuuauauaauugcagcagcuucagcaguuuugaaggagguuucccug

SEQ ID NO: 4164942 - RNA, 77 nt, Human
uagggacauguggaagagcuucuaggagacaguguggaccuuuccaucccuagaggucuucacaagauaaauuccua

SEQ ID NO: 4164943 - RNA, 82 nt, Human
uagggagucgacggggugauggcugaugaggccuucaacccuaauaacugcuuuaucaucacuguaauccguugaguucuua

SEQ ID NO: 4164944 - RNA, 88 nt, Human
uagggaguuuacauccacccauuauugaugcaacagcccuuaauagcaccuuuguugucagaggguguuguguugcuuaauaucccua

SEQ ID NO: 4164945 - RNA, 57 nt, Human
uagggaugauggagccuauguaccugguaacuacguggaacugccaagccaucccua

SEQ ID NO: 4164946 - RNA, 81 nt, Human
uagggauggccuugggccaacuguccccauagcccugaaggaagcaaggagcugaggaagucagguggcccagcaacccua

SEQ ID NO: 4164947 - RNA, 70 nt, Human
uagggcaagaucagcuuaacauccuacacuguugucuuuaagaggagcacaacauugggguguuacccua

SEQ ID NO: 4164948 - RNA, 59 nt, Human
uagggcaguuucauguuaucuuggcucauuccuucucccgagaugaagagauuguuuua

SEQ ID NO: 4164949 - RNA, 69 nt, Human
uaggggaacugcugaccucaggucauccuaaaaccugaggaugucagaugaugucagcaggacacucua

SEQ ID NO: 4164950 - RNA, 76 nt, Human
uagggguacagguuuggggaucaaagagaccuagauuaaaaucuuugcucugccauuuaucagaacugugaucuua

SEQ ID NO: 4164951 - RNA, 74 nt, Human
uaggggucuggcgaugcacuuugugccagaauuggaaugccauacucugcccugagucaugccagauggaacug

SEQ ID NO: 4164952 - RNA, 61 nt, Human
uacauguacauugggcauuaauuugcuaggccagcacugcucaacagauauguaacaugug

SEQ ID NO: 4164953 - RNA, 70 nt, Human
uacaugugcauguguauauguguguacaugugcauauguauauguacauacaugugcauacguauaugua

SEQ ID NO: 4164954 - RNA, 57 nt, Human
uacauguggguuaaaaacacucuugucuucccuaggggugcgaauacucauaaugua

SEQ ID NO: 4164955 - RNA, 93 nt, Human
uacaugugucuuuuucuccuuuuuccacuugggacccauuaguuaucauggaaauaaugauucuggugagaaugaggaauaaagacauaagua

SEQ ID NO: 4164956 - RNA, 76 nt, Human
uacauuauuaggcugugaguuacuugagaaagggaccuccuuuuuuaucuacagauucucagcuauuaguaaugug

SEQ ID NO: 4164957 - RNA, 62 nt, Human
uacauucagaagaauggacacgcuaaaaaacaacugcgucuuauguuucuuaacugagugua

SEQ ID NO: 4164958 - RNA, 57 nt, Human
uacauuccccagcaggccuuuuguugguugcacuaacugcaagguugcugggaagua

SEQ ID NO: 4164959 - RNA, 130 nt, Human
uacauuggcaucacuugggagaacuuuaaaacauacuggugccaggcucccagcucaggcauuguaguuuaugguguggccugagggagcacuggcacuuaaaauuugauucccgaaugauucuaauaug

SEQ ID NO: 4164960 - RNA, 56 nt, Human
uacauuuaucgaaacuuguucuguggcccaacauagaguuuguaguggugaaugua

SEQ ID NO: 4164961 - RNA, 85 nt, Human
uacauuuauuuuauucaugaagugugauuuuguuuugaccauuauaaaaugguaggaaugauuacgacuuuauaauauugaugua

SEQ ID NO: 4164962 - RNA, 88 nt, Human
uacauuuggcuuauauucacccaauaauacugaauaacaauuuaacacaaaguuacuuggaugauggguugaugugaagggggaugua

SEQ ID NO: 4164963 - RNA, 60 nt, Human
uacauuuuaaaugcagauggagaugucagguuucacugaauauaugugcauaugugugua

SEQ ID NO: 4164964 - RNA, 57 nt, Human
uacauuuuaugaucugaacaauacacuuugcaagaggugucagauacauaggaagua

SEQ ID NO: 4164965 - RNA, 129 nt, Human
uacauuuuccuucauaacuuaucuguguauuuguuuauuuauauucugccuucugcugaggaugacuuugagcagccugcaaaggcacauauauuugagauuacaauguguuuaaaauaagaaaaauga

SEQ ID NO: 4164966 - RNA, 130 nt, Human
uacauuuugacaaacaauacaaagagcauagaugguggauaguuaaggguuuagagacaaaugucuuucaaacaucuaaacuacccacuuuagaagcaucuuuaacauauuguugaugugaauauuugug

SEQ ID NO: 4164967 - RNA, 130 nt, Human
uaccaaaacuguaaacugcccaguauguuagaggacuugaaagggugaacaacuucucauauuaucuucucaauucaaaaggugucacuguuucuggccuucauacuguaagaaucauagagucaaggua

SEQ ID NO: 4164968 - RNA, 55 nt, Human
uaccaaaagcuuguuucauacaaaauuuuaguuuguaugaaguguucuucuggua

SEQ ID NO: 4164969 - RNA, 100 nt, Human
uaccaagaccugaguaccuuauguggguuaacaguuuauaccagagcagacacagaaugcuuggugcagguuguggccuguagguagucaguaaauggua

SEQ ID NO: 4164970 - RNA, 87 nt, Human
uaccaccaaacgaggauauauuugugacuguuauuaugcugagugauauugcaucauauauuucuacaagugccucauuuguuggua

SEQ ID NO: 4164971 - RNA, 68 nt, Human
uaccacggaaagagcauuuuuguggcauaucgacuaagaaaauaaccaggcugcucuuucuuguggua

SEQ ID NO: 4164972 - RNA, 55 nt, Human
uaccacugcucugugccaccgugcgaagaacacaggaugggaaucggagcuggua

SEQ ID NO: 4164973 - RNA, 100 nt, Human
uaccagagacaccacaugggaacaggcaugaucauaggaguuuauacuguacuccaauuaguugaaaauuaugaacaugcauguuacaugguagcuggua

SEQ ID NO: 4164974 - RNA, 71 nt, Human
uaccagauggcgcccgugagcagugccgcccuucccuauggcuuuuauuuccacucuucgggcgcuaggua

SEQ ID NO: 4164975 - RNA, 61 nt, Human
uaccagcaucuaacgcuccugggacuccugucgguucuaugauucauuuagaaguuuggug

SEQ ID NO: 4164976 - RNA, 57 nt, Human
uaccaggcauuuguaaugcugugccaguaugucugguucuuagcacagugccuggua

SEQ ID NO: 4164977 - RNA, 70 nt, Human
uaccaguauggccaugccaguuuacagccaauaccuguucuaaaugguuggugcccaggccauacuggug

SEQ ID NO: 4164978 - RNA, 97 nt, Human
uaccauccauuauugugaacucucucuaggcaucuauuuucaggggguaguuaauguagucuuuuccugguagugauuuagggagcauuaggaggua

SEQ ID NO: 4164979 - RNA, 102 nt, Human
uaccauccccucucccagaguuguggugaguucuuugucaucucuggaguaccgcuugcccaggaguugaagggcugacuuuuacuggagguggagauggua

SEQ ID NO: 4164980 - RNA, 75 nt, Human
uaccauggcaauguuagcaaagcauuuccugccaaauccaaaaggagauacauuguucuaagcauugcauuugua

SEQ ID NO: 4164981 - RNA, 79 nt, Human
uaccauuuaugguuucucauuccauuacaugugcuccaucacugugcaggggaagagagaaaaacauggagaauuggua

SEQ ID NO: 4164982 - RNA, 55 nt, Human
uacccacaacuaauuagugaauuucagaauuaaggaaaaucuuaguuguguggua

SEQ ID NO: 4164983 - RNA, 58 nt, Human
uacccagcuucaagucaggacuuaaauacuacuuccuaaguaaaggcuuaacugggug

SEQ ID NO: 4164984 - RNA, 84 nt, Human
uacccagggaaucuugguaagcugacauugcuuugaagagauugauuccaagagcagccuuagguauugugauuccuugaugua

SEQ ID NO: 4164985 - RNA, 61 nt, Human
uacccugcaucccccacauucacaaaguaacuguggccuaaaugggaugaugcagaaggua

SEQ ID NO: 4164986 - RNA, 100 nt, Human
uacccuggcauuauguagcagggagcacuaaucucauuuucaguugagaaaacuggagcugaaaugggugcacuuccuuaccugccuaagcuauuaggua

SEQ ID NO: 4164987 - RNA, 79 nt, Human
uacccuguuuuucaguuccaucucugcucuguccuauagcuuuauaaaaccagaguguguggggcugaggucaggagua

SEQ ID NO: 4164988 - RNA, 63 nt, Human
uaccguacacauuaacuacaguuauaacaaacuacggaauaagcgguagugguguaaacggug

SEQ ID NO: 4164989 - RNA, 62 nt, Human
uaccuaccaugagucaggaacuguuuccauacauuauaaaauaacacugugcgugguaggug

SEQ ID NO: 4164990 - RNA, 87 nt, Human
uaccuagcauauagaagcuguuccauaagugauagccuguuguugacauugacuaacauuuauugagcacuuaguauaugccaggug

SEQ ID NO: 4164991 - RNA, 73 nt, Human
uaccuagucuucacaucagucuaaagaguugguguuacuaucuccauucuuuaggaagauggagggccacgua

SEQ ID NO: 4164992 - RNA, 100 nt, Human
uaccucagugagacuccuggccaguaagagauaggaggcagaaagaagccaacaggaaaacucugcuccuauccuccugcugacagguaguucugaggug

SEQ ID NO: 4164993 - RNA, 62 nt, Human
uaccucauagggcuguugugaggauuaaaugaguuaauucaaguagcacaccuagaauggua

SEQ ID NO: 4164994 - RNA, 60 nt, Human
uaccugcaggagcuuucuucccaaacuuuacauguaaaguucgaaaaagcuccccaggug

SEQ ID NO: 4164995 - RNA, 76 nt, Human
uaccuggccagcggucggucacaccugagugcccagagugagcgggcggcagaggcauuucugacgcugccaggua

SEQ ID NO: 4164996 - RNA, 68 nt, Human
uagucuccagccagaagcugcucccccacucaacucccccggagcuucugcuugcuggcgggggucug

SEQ ID NO: 4164997 - RNA, 87 nt, Human
uagucugcugguaaggcucagauucacauuugguuuggggaagacccaggaucuagccaacugugaucugaguaccagggaagucua

SEQ ID NO: 4164998 - RNA, 64 nt, Human
uagucuuccuggaagaaguguucuagacuuugaaacacuaguaggauucaguuagagagggcua

SEQ ID NO: 4164999 - RNA, 104 nt, Human
uagucuuugggagguaggugagauuuguuuuauaaaauagcggcuuauuaauccacaguguauuuuauuuauaaauuuuugaaugauuuauuuuucuaggacua

SEQ ID NO: 4165000 - RNA, 65 nt, Human
uagugaaagcauguguaaucucaauaccuccauuggggguuguaggaauauauguagucucacug

SEQ ID NO: 4165001 - RNA, 99 nt, Human
uagugacaagggcaucccaaggcacuugcccagagcugcagaguugugugugccauaccugcggcucaaagggaaggccuucuauccccugaguuucua

SEQ ID NO: 4165002 - RNA, 69 nt, Human
uagugaccuuugaacagcccagggaugcuucacagugucuuauucuugaugcuuguuuaaagguuucua

SEQ ID NO: 4165003 - RNA, 119 nt, Human
uagugagaaggcccuggauuagggaucaugcuaccugaguuauauuaauaauuacauuucugcuaugaauuuggguauucucaggccaaagccucucggaaucccuguuuucucuucug

SEQ ID NO: 4165004 - RNA, 57 nt, Human
uagugcaaaggucuugcaccaggcuacuuuuuagacuaugggccaaccuaugcacua

SEQ ID NO: 4165005 - RNA, 87 nt, Human
uagugcaggaggaacaagcugcuuuaucuuccucuccaggcagaugccuguguguggaagauggaugcacagcaucugccugcauug

SEQ ID NO: 4165006 - RNA, 57 nt, Human
uagugcaggguuuuaagcacugagaaaaucaauuccaaagucuuuuacccuccauua

SEQ ID NO: 4165007 - RNA, 60 nt, Human
uagugccauagauaggaccauuugccccuaccuugaaggcauaguccuacccauggucua

SEQ ID NO: 4165008 - RNA, 60 nt, Human
uagugcccaguuagguuggagcacaguucuuuuggaaccuguucagaccaacuuggacug

SEQ ID NO: 4165009 - RNA, 57 nt, Human
uagugcucuccaaauggcucuauguaccccaauuguucaagaguccaggagagucug

SEQ ID NO: 4165010 - RNA, 59 nt, Human
uagugcuugcaaauuucugugguaaacauacuccuaccauggccaaugucaagcuacua

SEQ ID NO: 4165011 - RNA, 58 nt, Human
uaguggaacugugucauacaaaugcagccuguuguauugaauguacuuguucucacua

SEQ ID NO: 4165012 - RNA, 68 nt, Human
uaguggcugccaagagcaaugcugugaauaacugagguuucacugggccuucuuagggcagaguacua

SEQ ID NO: 4165013 - RNA, 62 nt, Human
uaguggguguuucagauuuuaguuuagugguaguuauauaugcagaaucccaggccccacug

SEQ ID NO: 4165014 - RNA, 55 nt, Human
uaguguaauuccccuucauguauuuucauaugcuugaaugggauggaauucacug

SEQ ID NO: 4165015 - RNA, 73 nt, Human
uaguguccuuagagucuccagaggcaucccuaacccagaaucuuuugacuguccucuggagagaaaggcagua

SEQ ID NO: 4165016 - RNA, 124 nt, Human
uaguguccuuugacuuacuuaggcugcugaggucuaguuaacucuggagaguuggaagacauucuuucuuaaauagguggauugguuugagccuugguuaggucuggguugguuugcuuuacug

SEQ ID NO: 4165017 - RNA, 92 nt, Human
uagugugcaaaauugagaggcgcucacucucagguuccugaagugcagggccggcaccugacagugaaugccucuguaaauuuugcacccua

SEQ ID NO: 4165018 - RNA, 77 nt, Human
uagugugcucaguuugauuccagggauaucucaggcuuauuuaacaaugcuacccuuagaacaacauuagcauacua

SEQ ID NO: 4165019 - RNA, 80 nt, Human
uaguuaaaaauuuuaaauuaguuuccuggucacacugggcacauuuuaagugcucaaaagacacaggaggcuagugacua

SEQ ID NO: 4165020 - RNA, 61 nt, Human
uaguuaaauguguuagccaggguucucuggagaaacagaaccaauaagacacauugagcua

SEQ ID NO: 4165021 - RNA, 125 nt, Human
uaguuaaauuuaaauuucagauaaauaaugaauaauguuuuuguauaagcaugucccaaaauuauaaggggcauuuaguuauacuaaaacauuuuugcuguuuagcugaaauucaaauuuaauug

SEQ ID NO: 4165022 - RNA, 108 nt, Human
uaguuaccaaauuagaaugugggcuuggaugcugucuaagcugaggacuuccuuucaccuucucagaucccaguuugauguauucuuucauuuucaauuuggaaucua

SEQ ID NO: 4165023 - RNA, 64 nt, Human
uaguuaccugggguacaugguuaauuugauuuagcagauucuuuggcuaaacccuaguaaauua

SEQ ID NO: 4165024 - RNA, 84 nt, Human
uaguuacucuuaucuuuugaguucucaagauguaugaagacauaacaccuguaucuaagaauuccagagaaaggaggaagacua

SEQ ID NO: 4165025 - RNA, 58 nt, Human
guauuauguaguaugaguguauauguguguaugcauguauacacaugcagacagaugc

SEQ ID NO: 4165026 - RNA, 77 nt, Human
guauuauuuaccugguguuuaugguccaucugcucucaaacuagaaugguuucaguaagcaccagguacacccuuac

SEQ ID NO: 4165027 - RNA, 129 nt, Human
guauuauuuuauugucacauauauaucucaguuaaugccgacaugauuguucuugcuguuguaaccugaauuaggaauuuucacaguuggguauugaucauucauguaauuguaugaugaaggaaauac

SEQ ID NO: 4165028 - RNA, 97 nt, Human
guauucacucauuagcauuacuucaaagaguauuuaaugauuuuggaauuuucuauguagaaugauuuuuuuaaguagucuuacaugauguggguau

SEQ ID NO: 4165029 - RNA, 57 nt, Human
guauucaucauuuuuuggaugaugauucaaaaaaucgucauccuuuggaugaaucac

SEQ ID NO: 4165030 - RNA, 80 nt, Human
guauuccacaacauucuuaaauacacugaauuugcaguaugucugucucuucaguaaguauaagaaguguugguccaugc

SEQ ID NO: 4165031 - RNA, 71 nt, Human
guauucugguggugugaaaagugauaugguugagauacccagcacauaauacauguuccacuuaugaauac

SEQ ID NO: 4165032 - RNA, 58 nt, Human
guauugaugcaauauauugauacaauauauuaauugugucaguguauacauacaguau

SEQ ID NO: 4165033 - RNA, 67 nt, Human
guauugcauagaccugggaugaguuacuaauucacaauuuacucucuaccaggcuuuaugcaaauac

SEQ ID NO: 4165034 - RNA, 80 nt, Human
guauugcauucuaaaaauaagcuaggugcuagucagaaaagugaaucaggcucaagcccugcuuauauaaagaugcuggc

SEQ ID NO: 4165035 - RNA, 71 nt, Human
guauugcuguagggggaaaauacuuauuagauuuauucauaaaauuaaguacauuuuuaacuuacagcugc

SEQ ID NO: 4165036 - RNA, 91 nt, Human
guauuggacuaagugaauuuacauuuguaauggaaaauggaauagggaacaauuauuuagcauuacuaaaaugaaaacuuggauuugguac

SEQ ID NO: 4165037 - RNA, 79 nt, Human
guauuggcaaugaucucaaucuucucaucuugaaagacacccacuuaggaaaggauggugaaggaucagugccaguugc

SEQ ID NO: 4165038 - RNA, 55 nt, Human
guauuuacagcugugccucuggagugcuuucuaaacgacagugcaguuguaguac

SEQ ID NO: 4165039 - RNA, 68 nt, Human
guauuuagacacaaaagugccauggagaccaaugauuuauaaggggaccauucacuggugucaaauac

SEQ ID NO: 4165040 - RNA, 58 nt, Human
guauuuaguccauugcacaguguaaccucauuauaacacugucucauggauagacugc

SEQ ID NO: 4165041 - RNA, 82 nt, Human
guauuuagugauuuuuuagcccuguacugugauacuaagaaguagggcuuaaauagggccuaaaaaguauugcuaaaauuac

SEQ ID NO: 4165042 - RNA, 66 nt, Human
guauuuaucaacugguguguguggccucaguccuucagaggugaccugucacauuuugaugaaugc

SEQ ID NO: 4165043 - RNA, 89 nt, Human
guauuucaccccugggaagcaagucagggcacaauggcauaaaauugagaacucuguauguccagcuugcuuuccaaucugauaaaugc

SEQ ID NO: 4165044 - RNA, 112 nt, Human
guauuugaauaucuuucauugggcaaaaagaagaugguauucaugaugcuuuuaaaaguuuaaaggauuagagauaccaugccuuacuuucugccuaggaugucuuuaauac

SEQ ID NO: 4165045 - RNA, 64 nt, Human
guauuugagcuuuauguauauuuuuaaaaauaauccauugaugugcauaaagaaauacaaauac

SEQ ID NO: 4165046 - RNA, 85 nt, Human
guauuugauuggugugaaaguaauugcgguuuugccauuauuuuugaaggcaaaaaucacaauuauuuucgcaccaaucuaauac

SEQ ID NO: 4165047 - RNA, 76 nt, Human
guauuugcucaacacauugaagcuaugaugauucacugaaacauggaucucaauuaguacaagugugagcaggcac

SEQ ID NO: 4165048 - RNA, 126 nt, Human
guauuuggaaagagggcugggcuggagaugaggaaacuugggguccagaagcugcucugccacacuccagcucacugacccuggucaaguugccucacccacuugggccucucuuuccucauuugc

SEQ ID NO: 4165049 - RNA, 68 nt, Human
guauuuguguucucuccuaaauuggcaacaucuuccggaauuguuuuguuuaugagagcacagcauau

SEQ ID NO: 4165050 - RNA, 84 nt, Human
guauuuguuuagaaaugugcagaauguguuagauaaaccaaucaauaucuaauuacuagucugcagccuucucuauuuuaaugc

SEQ ID NO: 4165051 - RNA, 86 nt, Human
guauuuuauauuguauucucucaauauuucauaauguuggauugguugaaauauugaguggaaauaacuacagagguauaaaacac

SEQ ID NO: 4165052 - RNA, 66 nt, Human
guauuuucaaagacagacaucagucaaaggucagacacuuauuagcugguguuuuucuuugcauac

SEQ ID NO: 4165053 - RNA, 59 nt, Human
guggaaaaggcuggaaacugaagauaagugucuuauucuuagccauccggccuaaccac

SEQ ID NO: 4165054 - RNA, 103 nt, Human
guggaaagcacugcauugcagagcucuagggggcgccuuucacaaagacuacaaaguaaauggugccugcugcagcugagcaguguacaaccugcacaaccau

SEQ ID NO: 4165055 - RNA, 120 nt, Human
guggaaauuauuuuaauguuguuguuauaauagaucaaugagcaauuuaauaguucaugggguugcuaguuuguuuaaauuuuaauucaacuuuuccaaaagauuagaacuauuucucac

SEQ ID NO: 4165056 - RNA, 65 nt, Human
guggaacacucagaaaugcucguccuugaaauaaugucauugggagcauucccugagggucccau

SEQ ID NO: 4165057 - RNA, 65 nt, Human
guggaacacuguggaugagaagagacaugagaaguccaccaucuucugcaggcaguguagaccau

SEQ ID NO: 4165058 - RNA, 62 nt, Human
guggaaccaaggaaaggcauuugcucccagcccgggcagcacuuaugcucaccuuguucuac

SEQ ID NO: 4165059 - RNA, 107 nt, Human
guggaaccagcuaccggagauaauuuaaaacuccaggcugugguuuuucugacccaacauugaccugauuuugaagacagucuuauuuccuugguggugaguuucau

SEQ ID NO: 4165060 - RNA, 68 nt, Human
guggaacccaggcuagaagugaauuaugauagugcaguuaauuaaaguuuaucauagccggggaccac

SEQ ID NO: 4165061 - RNA, 61 nt, Human
guggaaccggggugccccacaguaaguccccuuuguuaggcauccugucccuggauucgac

SEQ ID NO: 4165062 - RNA, 89 nt, Human
guggaacugcucccaccagauuaguccugggcuuuugucaggccaggccuggcagguccagcuggacucaacuccaggguguguuuggc

SEQ ID NO: 4165063 - RNA, 70 nt, Human
guggaagacaguggcuuuuuaguggcagauguucacucaucucacuucugaaaggcccuccauugaccac

SEQ ID NO: 4165064 - RNA, 58 nt, Human
guggaagaggcaagauagcucucuggggccucuuccuaagggcacuaaucuuuuucau

SEQ ID NO: 4165065 - RNA, 76 nt, Human
guggaagauguaugaucguaugugugauuuccucagugacaggaaauaucagauuuaugaauauacuaugcuccau

SEQ ID NO: 4165066 - RNA, 66 nt, Human
guggaagcaguaaggcaaguuuagaagauggaauauucuauaaacaaaugaccugauuucuuccac

SEQ ID NO: 4165067 - RNA, 79 nt, Human
guggaagcuagcccauuaccuuuggauuggaggcuuuccuuucuucauaaagugaaggaugaugggcauuucuuuguac

SEQ ID NO: 4165068 - RNA, 94 nt, Human
guggaagcucauuaccaguaacguuuucgaggacuuuaaaaccaacuuuucugugcugagcugucuggaaguuccucaugauaccggugaccac

SEQ ID NO: 4165069 - RNA, 55 nt, Human
guggaagggucacagccccuaccugaagacacuggccuggguauggcccuuccau

SEQ ID NO: 4165070 - RNA, 78 nt, Human
guggaagguuaagagcuccaauauuuguggcaacuauuugagaugccaaaaauuagaaggggcucagagcaccucuac

SEQ ID NO: 4165071 - RNA, 60 nt, Human
guggaagugauggugugcuaguggucagccugugccuccagagcucuuucaugcuuccau

SEQ ID NO: 4165072 - RNA, 65 nt, Human
guggaauguaguguccauggaauuuuuuuucagcaaaaaauuauugaguguccacaauauuucac

SEQ ID NO: 4165073 - RNA, 58 nt, Human
guggaaugugagaauaccguuuugagcaccuaccaugugccaggacucacuacuucac

SEQ ID NO: 4165074 - RNA, 73 nt, Human
guggacaggccaggacaucgucaucauggggaguggcucccugucuccuuguguguccugcccgcgugucugc

SEQ ID NO: 4165075 - RNA, 73 nt, Human
guggacaguuaggggcuggaugccaggcacagaggagccagccuggaagaccacaagcccuuaacuguguugc

SEQ ID NO: 4165076 - RNA, 86 nt, Human
guggaccugccuugucuagcucugcuuaucauggcucccaccauccuuggagcugagaagagagcucagaucacugugaauuccac

SEQ ID NO: 4165077 - RNA, 63 nt, Human
guggaccugcuggaugggcagguaguauagacaggguggaucugcuagacaggcagguaguau

SEQ ID NO: 4165078 - RNA, 111 nt, Human
guggaccuuccaaacagauccaaaauuugucccucugaggcuucccugguacuacaugcuguuucagucaagaucaagggggauagaauuuggcagcugauauaaagccac

SEQ ID NO: 4165079 - RNA, 59 nt, Human
guggacggcggugccaggacagggagggcggccuuucaccagcuuggcaccucugccau

SEQ ID NO: 4165080 - RNA, 86 nt, Human
guggacuaucuuggagaauguuucauguguauguuagaagaauauguauucugcugcuuuagguggaauguucuauagaugucuau

SEQ ID NO: 4165081 - RNA, 69 nt, Human
guggacuccugaccuugugacccacccaccuuggccucccaaagugcugggauuacaagugugagccac

SEQ ID NO: 4165082 - RNA, 74 nt, Human
guggacuguuucuugcccucaguagcaguugcucuaagaucaaggcugguucuggguaacagcucuggguucac

SEQ ID NO: 4165083 - RNA, 55 nt, Human
guggagacaaaggcugagugaggacuuggauuuuggcucagaaggcugccuucac

SEQ ID NO: 4165084 - RNA, 89 nt, Human
guggagagaccuugaaacauuaggaaaucauuauuucucccgucuuuuuguaagagaugagguauucguaauauuuccaaguccugcau

SEQ ID NO: 4165085 - RNA, 68 nt, Human
guggagagcggagcuaguuuuuguccuccauagauccccacuucugaggcuugaucagcuuccuccac

SEQ ID NO: 4165086 - RNA, 72 nt, Human
guggagagggccaggagaaugggauuacccuaugaccaaggagacaugggaagaagcccuccuuccuuccac

SEQ ID NO: 4165087 - RNA, 102 nt, Human
guggagaguugaaaauaugcgaagcuguaagacuuucuuguuuauuucugugucgaaggcaaggcagcuuaauagaauuugaauauaacuaaauccauccac

SEQ ID NO: 4165088 - RNA, 69 nt, Human
guggagcaaucagagggucaguugaauuguuuccugauucucagagaucacuggccuuuguugcuucau

SEQ ID NO: 4165089 - RNA, 80 nt, Human
guggagcacggcaaggauagguacuauguaauaaagcuuuugauucauguuuuauauauguuuguuuuugugugggccac

SEQ ID NO: 4165090 - RNA, 89 nt, Human
guggaggagccuucuuggggcagccuaagcugagccucuaccccuaugagcugcuccuggccgggcugcuccuggaugagguacuccac

SEQ ID NO: 4165091 - RNA, 78 nt, Human
guggaggaggagacagcgggggcucccaagacccaggccugccucuugcuccugagcccugcugggaccuccugcuac

SEQ ID NO: 4165092 - RNA, 61 nt, Human
guggaggcugcuggcaggcguggacgucucagaugucugauccuucaggagcccccuccac

SEQ ID NO: 4165093 - RNA, 59 nt, Human
guggaggcuguguuucagugaggccuuggaaguucggggcugguacuacagccugcuau

SEQ ID NO: 4165094 - RNA, 57 nt, Human
guggaggguuugcaaugugcaggguaauccuaucuccuagcacuguauccucuucau

SEQ ID NO: 4165095 - RNA, 88 nt, Human
guggaggucccaccacaauguccuggagggcggccgcuggcucagugagaagcgacaccgccugcaggccauccaggaugggcuccac

SEQ ID NO: 4165096 - RNA, 103 nt, Human
guggagguggugguaauagacuuguauuaugguucgcuuaguuccugaguacgugauuaauacuaauuguaacuacaaacaaguacugaagcuacuccucugc

SEQ ID NO: 4165097 - RNA, 56 nt, Human
guggaggugguuuguauuccuggcucuuaucaaggcacuauuacauucauuuccac

SEQ ID NO: 4165098 - RNA, 114 nt, Human
uccugggggggucuucccagcaagcucuacagaagcagcgcggcucuucucucguggguguggaucuugagaugggcgcgcugcucugaugcggugcugcgucucccuucagga

SEQ ID NO: 4165099 - RNA, 92 nt, Human
uccuggguagcugcggugauuucguacugugaagugcacauguguacuccauacagcccucacaaugaaaaacacuacauauuauccaguga

SEQ ID NO: 4165100 - RNA, 66 nt, Human
uccugggugaaagaacaggcagucgaagauuccauggccuaaauuaauucuauuucauccccagga

SEQ ID NO: 4165101 - RNA, 82 nt, Human
uccugggugacagucaauagcugggauuaauuuuauuuguucuugcacagauauuuguaucuugcuauuguaaaccucagga

SEQ ID NO: 4165102 - RNA, 90 nt, Human
uccugguaaggaccuggguugccaggcuugggagguagggagcaugccaggugcucuccugcuccucagcccaacucaccuuggccggga

SEQ ID NO: 4165103 - RNA, 66 nt, Human
uccuggugauuauaagccacuguaucagcccugaauugcuuaucuccagauugugaucaucagaga

SEQ ID NO: 4165104 - RNA, 101 nt, Human
uccuggugggggucaucucucugggucucucugcuuucccccagacccugaaccgaccagagguccuggcacauugcaggggcucaggaaaugcucaugga

SEQ ID NO: 4165105 - RNA, 72 nt, Human
uccuggugucuggggguucugaaagcugacuuuucaccuuuggcaggaacuuuuaacccucagagcucagga

SEQ ID NO: 4165106 - RNA, 81 nt, Human
uccuguaccccaguccaguguguucuggcagcagggacaccugggccaaggggccaucuggaccaaagguggggugugggg

SEQ ID NO: 4165107 - RNA, 72 nt, Human
uccuguccauugcaaggaaaacagaugaucaacaugagaagcucagcuguugauuaauuuucccaaacaggg

SEQ ID NO: 4165108 - RNA, 67 nt, Human
uccugucugucugugcccugcuggcccggugacccuuccuccuccagcuccagguagaugggcaggg

SEQ ID NO: 4165109 - RNA, 76 nt, Human
uccugucugucuuuugugaauggaauccacagacugaccucauccagucuuaggaugcuauuagcaagaaacagga

SEQ ID NO: 4165110 - RNA, 61 nt, Human
uccugugaccagcuuccaugcugaguccugcuuuuagcauaaggucaggugugguccaaga

SEQ ID NO: 4165111 - RNA, 59 nt, Human
uccugugauggcuugcgauguguaaaauuuuccuacaacguguugcagaaaucacugga

SEQ ID NO: 4165112 - RNA, 66 nt, Human
uccuguggcucuguggaaccuuagaccucuucuagcucagagaguugcaaacagauaccuacaggg

SEQ ID NO: 4165113 - RNA, 90 nt, Human
uccuguucauaugaaacucuagagcagacacaacuaaucuaccgauaccgaaguaagaauaguguuugccuuugggagauauugacuaga

SEQ ID NO: 4165114 - RNA, 84 nt, Human
uccuguuccagcagcguuccaagguggcuucguagaugaagggcauuugagcuguaaggugggaugugaaagguggagcuaggg

SEQ ID NO: 4165115 - RNA, 60 nt, Human
uccuguucucccucagauaagacucagaucucuuacaugguccaguggaggaggacagga

SEQ ID NO: 4165116 - RNA, 99 nt, Human
uccuguuguguauucuagguugcuuugagucacugucuuggagauuuuuuaauccuccagagauuugaguuauuuaggccacuucauauaugcguggga

SEQ ID NO: 4165117 - RNA, 76 nt, Human
uauagaacgguucagugugcuucaggacguuagccuuaaaggagcuauucaguggacauauugaaagauuucugua

SEQ ID NO: 4165118 - RNA, 57 nt, Human
uauagacuuggcaugcauguucucauucaccucacaggcaugcugguaagaucugua

SEQ ID NO: 4165119 - RNA, 58 nt, Human
uauagauagacugacgauacagguucccuaacauugccgucuucucauucugucugug

SEQ ID NO: 4165120 - RNA, 58 nt, Human
uauagccauguaagaacuccauuuucaguuucacguagacaguccuuacgaggcuaua

SEQ ID NO: 4165121 - RNA, 75 nt, Human
uauagcugugcaaauuccacuggaaagcuugggguuauauccacaguaaaccacagggaugcugcacugacugug

SEQ ID NO: 4165122 - RNA, 66 nt, Human
uauaggaaagcgugugugaugggcaaugccuuagggcaagaugauucacuacaauguucucuuaua

SEQ ID NO: 4165123 - RNA, 80 nt, Human
uauagguuucaaaguucuauauaugcauguguugaaaauaaaacacaugguaaauugguaaaggacuuuagaaacaagua

SEQ ID NO: 4165124 - RNA, 82 nt, Human
uauaguaccagauuaaugaaugagaauauaacagaggauuuggacuucuguuaagcccauucucuuuaaaauaaggacuaug

SEQ ID NO: 4165125 - RNA, 59 nt, Human
uauagucuuuauuuuggguggccauggauccaggucaaaacaaaguuaagaauucugua

SEQ ID NO: 4165126 - RNA, 69 nt, Human
uauaguguuuuuacauuaucuuguuaucuuucaaccuugguugaauuaggcaagguagguaucauugua

SEQ ID NO: 4165127 - RNA, 59 nt, Human
uauauacaguagugccucuguuuuauauuuuuaauaaccagaggcaggcucugugugug

SEQ ID NO: 4165128 - RNA, 74 nt, Human
uauauagcaugauuacuaauuucuugggaacaaaggugaaaaccuugacagucccaggaaaauagaacuauaua

SEQ ID NO: 4165129 - RNA, 80 nt, Human
uauauauaauacuugcugugggccuguuaugcuuaaguuuaguugccaauaauaauaaaguucauggcugauuguauaua

SEQ ID NO: 4165130 - RNA, 64 nt, Human
uauauauaauccugaaaauugaauggaagguauaucuuccuuuauuguuuucagauaauguaug

SEQ ID NO: 4165131 - RNA, 106 nt, Human
uauauaugcuaaagggggauuuagacuauuuuuaauccauaagcuguacaauuauuguuguaguauauugcucuuaaucauagaaacuucuuguuuaguguauaua

SEQ ID NO: 4165132 - RNA, 58 nt, Human
uauauccauaggcugugccuagccuaguccuucagguuguugcagggcccaggauaua

SEQ ID NO: 4165133 - RNA, 78 nt, Human
uauaucccagaaacagaugacaagcccugaacccucuugacucaagugaaaaagauuugucucuguuuccugaauaug

SEQ ID NO: 4165134 - RNA, 104 nt, Human
uauauccugagugcuuucugaucagaaacagaguuugguaaauagcccuugcuuauuguauggcugcuauauaaaugcuguuuuuaauaagcaccaaaaauaua

SEQ ID NO: 4165135 - RNA, 62 nt, Human
uauaugguagguacaacagcaggcagagucacauuuuugccaucugugcauuuuaaaauaug

SEQ ID NO: 4165136 - RNA, 106 nt, Human
uauauguagauguacuugguugguacaaaaguuauugcgguuuuugccauggaauguaauggcaaaaccacaguuacuuuugcaccaaccuauacauguagauaua

SEQ ID NO: 4165137 - RNA, 82 nt, Human
uauauguguauauguguuuauguguguguguguauauauguuuauguacauacauauguuuaaaugcauguuucugcaugua

SEQ ID NO: 4165138 - RNA, 86 nt, Human
uauauguuguuuuuauaagauuaagggaaugauaauuaugccuauguaagcauuagucuacugucuaauaaaugagauuacaugug

SEQ ID NO: 4165139 - RNA, 57 nt, Human
uauauuagugagauuuauccauguuaugcauaguugaaguucauucucacugaugua

SEQ ID NO: 4165140 - RNA, 129 nt, Human
uauauucagugaagagagaauaauaaaagugcauugagaugugggugucaggcagugagcuagaauuacccauuagcuacaugauuuguucccacacaucagcuugucugugugcucaauuugaaugug

SEQ ID NO: 4165141 - RNA, 58 nt, Human
uauauucauauuguugucucucacucugagagguccuggagauauaguuaugagugug

SEQ ID NO: 4165142 - RNA, 78 nt, Human
uauauucuggauuaucaguccaccaagaaagcaguagcauuaagcugugauaguugaaggacugagugucugaauaua

SEQ ID NO: 4165143 - RNA, 83 nt, Human
uauauuuagacuacuaguggcuacaauaaugaaauuacuguggauuguaaacaugagguauugcuacuguggucuaccaugua

SEQ ID NO: 4165144 - RNA, 75 nt, Human
uauauuuugacauuaaggaacauauauugagggcuucucaaaaacucaaaugugugaacacuaaugcaacaugua

SEQ ID NO: 4165145 - RNA, 87 nt, Human
uaucaaguguucugaggucucuuuccauagugacagacuuuuaguguuguuucauugggaaugggagguucucaaaauuauuugaua

SEQ ID NO: 4165146 - RNA, 60 nt, Human
uaucacacucggaaaucuaggaugguaccuguaauuccauccuggacaaugggguggaua

SEQ ID NO: 4165147 - RNA, 79 nt, Human
uaucacauucugcuagaauuucaagugugacaacagugaacucuguggcuccaugauaguucuuacaggagaguggaua

SEQ ID NO: 4165148 - RNA, 74 nt, Human
uaucaccagaauucuugguccuaguguauaagaauauccuuauggacucgagacaaagaaagcuaucagugaua

SEQ ID NO: 4165149 - RNA, 65 nt, Human
uaucagaaacucuggggcaggggcacaguaaucugcuuuaauaaauucuccagguaauucugaua

SEQ ID NO: 4165150 - RNA, 105 nt, Human
uaucagaacugauaguauaaagucaugaguuuuuuaguucaugcagaauguggaucaugucugagauaaaaauucauaagauuuuugaauauccuggggcugaug

SEQ ID NO: 4165151 - RNA, 90 nt, Human
uaucagauacuggguugagcacuguggauacagaaauuaguaacauacaauacugauucuaguaauauaguauaaugugggugucagaua

SEQ ID NO: 4165152 - RNA, 82 nt, Human
uaucagcaaaggcucacuaaugcuuccauugcacaguuccugaugugaggcacaucacuuggugcauuagucucaguugaug

SEQ ID NO: 4165153 - RNA, 62 nt, Human
uaucagcagcaguggcugcagaacagcagauauugguguaccgcaaaugcugcugccugaua

SEQ ID NO: 4165154 - RNA, 55 nt, Human
uaucagcuuaauucucaacaggucccagccuguguugacagaauuacagcuguua

SEQ ID NO: 4165155 - RNA, 55 nt, Human
uaucagcuucauaaaguuggucaguauaucaacugagucuuucaggaagcagaug

SEQ ID NO: 4165156 - RNA, 57 nt, Human
uaucaggaucugggagccugaaacaaagagaauguauuccaggcacagauguugaug

SEQ ID NO: 4165157 - RNA, 97 nt, Human
uaucaggccccacaccagaccauuugaaucaggaucucgggggaaccugaccuccaaguggcucugguguuccaaagcuucccaggggcuucugaug

SEQ ID NO: 4165158 - RNA, 57 nt, Human
uaucaguuuauucuauaaauagugaaccaucacuuuauuauuaggaguaaaguggua

SEQ ID NO: 4165159 - RNA, 92 nt, Human
uaucauaagguuaauuugauuuuauagcaaagaucacuuccuugauaaaagucaaaaagcacaaucuuucuaugacagguugacuuaugaua

SEQ ID NO: 4165160 - RNA, 64 nt, Human
uaucauagauuuaucaacauguaccauuggcaggcccucugcugguacuagagauauuguggua

SEQ ID NO: 4165161 - RNA, 69 nt, Human
uaucauggacaccuuccaggucgguacaaaaggaucaauuuuuaaauggccacagggugcuccauugua

SEQ ID NO: 4165162 - RNA, 81 nt, Human
uaucauguuaauuacaagaugcauccauauuucagaguuguuagaaugcagagauaugugcgucuuagauugaaugugaua

SEQ ID NO: 4165163 - RNA, 84 nt, Human
uaucauuugcaacuaaaauggaaguugucuggcaugugaugcuauggcaugcaaauagucaugcuuccauagaaacauaugaug

SEQ ID NO: 4165164 - RNA, 65 nt, Human
uaucauuuguuauuauuaguggagaugggacgccaagucccuggaaugcuaaaauaaggaagaug

SEQ ID NO: 4165165 - RNA, 71 nt, Human
uauccagaaaauuucuccaagaaugcuuagagaguccauaugucauggcacucaagcucuugucuaggaua

SEQ ID NO: 4165166 - RNA, 56 nt, Human
uauccaguucacuccuuaguaugcgagccaacgcacacucugaagaguccuggcua

SEQ ID NO: 4165167 - RNA, 72 nt, Human
uauccccaagauccugaaccaucucuguucuguauuaggaaaguaaaguuucucagugauguucuggggaug

SEQ ID NO: 4165168 - RNA, 81 nt, Human
uaucccgcaucucaggcugaggcuggcagcuccaggaaguccucugggagcucuuuccggcuugagucagguguagugaug

SEQ ID NO: 4165169 - RNA, 69 nt, Human
uaucccucaauggcaucuggcccugggcuuacuuuuauucuccccauuuuucagcuucauugaggcaua

SEQ ID NO: 4165170 - RNA, 56 nt, Human
uaucccucccaccuggaaaugcuguauucccuggcuccaggccucaggaagggaug

SEQ ID NO: 4165171 - RNA, 123 nt, Human
uauccuagucucugauggugcugcuccacagguacagacaaguaguucagacaagauccucucacuacccaaacucuugccuacuugucaaccagcaguauaugugugcaagaugucuggaua

SEQ ID NO: 4165172 - RNA, 57 nt, Human
uauccucauuuguugaaaauguaauagugaaauucucguacauugcugguggggaug

SEQ ID NO: 4165173 - RNA, 106 nt, Human
uauccugaaagauuuuuaacaugcuaggaagagugauugaauugaauaaggucaaguuuaaaaauccuuuuuuugguccauuuugauuauuuugcuuucagguaua

SEQ ID NO: 4165174 - RNA, 79 nt, Human
uauccuuugagguaggcagaccaguggaugggucuccuuggauucauggugccaguggauuugucugagacccagggua

SEQ ID NO: 4165175 - RNA, 81 nt, Human
uaucgagggugcuugugcuuuuaccagcuccaccuggggaaguaaaucucgcugagcuagaaaaggaccacacucuucaua

SEQ ID NO: 4165176 - RNA, 130 nt, Human
uaucgucauaaccuggaagcuggugagaaacgcagauucucaggucacaccccagacagacugaaucaggaacucuggaggugaggcccagugaucuguguuucaacaagcccuccagaugauucugaug

SEQ ID NO: 4165177 - RNA, 60 nt, Human
uaucguuuguuugauuuuucuaaagcaugaaaaagguacagaaauaucagagagaugaua

SEQ ID NO: 4165178 - RNA, 66 nt, Human
uaucuaagagagucaauauuuauaccggccaaggauuaaguauauuagguggcuuuuguuuagaua

SEQ ID NO: 4165179 - RNA, 77 nt, Human
uaucuacacgcagcaucauauauaugguucauggaaagccagggagccacagucugaugccugagauuuuguaggua

SEQ ID NO: 4165180 - RNA, 81 nt, Human
uaucucauguuuguuuggguccacaaacaucagauauugacccaaaguuugugagauguggacccaaacgugauugagaua

SEQ ID NO: 4165181 - RNA, 65 nt, Human
uaucuccagagcgggagccagacgccgacccaagcggaagugacguuagguguccgccggaggug

SEQ ID NO: 4165182 - RNA, 103 nt, Human
uaucugaaugauucaucugccagaguugcuagaacuacaucuuuuaauagaccaauuauugugguuaggauuuggcuuuagucaggugaugagaaauuagaua

SEQ ID NO: 4165183 - RNA, 75 nt, Human
uaucugcgaaccacagugcuuugucaaagcaguccaguaaugcagugcuuuaucaaagcuauagugagcauggug

SEQ ID NO: 4165184 - RNA, 60 nt, Human
uaucuggucuguaaaaugggugauguaagggccucaucuacuuuaaggauucuggggaua

SEQ ID NO: 4165185 - RNA, 72 nt, Human
uaucugugaccauggcuuuugagucucaagacccaaauuaaaagguguuuugaggagcacauggcagagaug

SEQ ID NO: 4165186 - RNA, 63 nt, Human
uccuuaaaggacuagaagucaagugaucaaaaugugaagaccuuuguucuaguucucuagggg

SEQ ID NO: 4165187 - RNA, 98 nt, Human
uccuuaacugguaucucuucccugguucucucugguuugucaccuucucuuucucacuguaugguggccaagaggggacuggauaccuaaggcaagga

SEQ ID NO: 4165188 - RNA, 66 nt, Human
uccuuaagaugagagcauccuggaaaauauuuauuuuucuaagacauuugucaucuuuuuaaagga

SEQ ID NO: 4165189 - RNA, 91 nt, Human
uccuuaaugaaagccugaugauaaaguucauuggagauuuuuguuaucuuugguacuauucuuaucauccaaggcuagccuuugugaagga

SEQ ID NO: 4165190 - RNA, 112 nt, Human
uccuuaauuuggcugaggcuccuuuucuauaaugcaagccacugcaugcacagguaucauuuggccuucuuugcauuguguugggaauagggguucagaaaacuagugagga

SEQ ID NO: 4165191 - RNA, 108 nt, Human
uccuuaucgcaagaagguugaugagcuagggaucugauuugcuguuuaaggauugcucuaauguaacauaaaagaucgucuaaucauggcaucuaauugcugagagga

SEQ ID NO: 4165192 - RNA, 106 nt, Human
uccuuaugcacggaaaaguuugagaaccauuaauaugggcuauugaucaauaaaucauaaauugucagagaauuguuuaauggaauucucauuuuguagguaagga

SEQ ID NO: 4165193 - RNA, 118 nt, Human
uccuuauggcccagucugcuuccccuucauagaagggaguuuuuccuacugcugcuagguuaugucaugaccagggaccacauccccucuguggagagggucccaggcccagagagga

SEQ ID NO: 4165194 - RNA, 66 nt, Human
uccuuauguuuuaaguguguaucuuagccucucaauuauuauaagguaaauaugaagacagaagga

SEQ ID NO: 4165195 - RNA, 62 nt, Human
uccuucaaucacccaguggggaaaauguguuauaaaacacugcccccuggaguauucuggga

SEQ ID NO: 4165196 - RNA, 72 nt, Human
uccuucacccaggcuggagugcaguggcauggucucgguucacugcaaccuccaccucccggguucaagcga

SEQ ID NO: 4165197 - RNA, 63 nt, Human
uccuucaccucaagcuuuugaagugaaugcugaacuaugucggagggaauggggaaaggagga

SEQ ID NO: 4165198 - RNA, 79 nt, Human
uccuucacuaggcugggggucaaugacgaacagcaauuccaguucccugcccucaaggagcccacagucuaaugagggg

SEQ ID NO: 4165199 - RNA, 69 nt, Human
uccuucagccuuuguuuaucagaauuccugugcuuaccaguguuugguggucugugagcaacgugagga

SEQ ID NO: 4165200 - RNA, 59 nt, Human
uccuucagggcugaccacaggcgaucacaaagacuuugccuggcaggccucaugagggg

SEQ ID NO: 4165201 - RNA, 74 nt, Human
uccuucauucaguuuuuauuggaccagcuauucuaugccagauaguaugcugagcuuguaagaagaauaaagga

SEQ ID NO: 4165202 - RNA, 56 nt, Human
uccuucccauagaucuugagugccaaugagaggcaccuguguaagaucuggaacga

SEQ ID NO: 4165203 - RNA, 59 nt, Human
uccuucggucaggauauuaggcuaaggucccuucuugauucuggugacugauggaagga

SEQ ID NO: 4165204 - RNA, 56 nt, Human
uccuucuaucacuggaagugaguuuaaaaguauucacacuucaguuuuuaaaggga

SEQ ID NO: 4165205 - RNA, 75 nt, Human
uccuucucagccccagcucccgcucaccccugccacgucaaaggaggcagaaggggaguugggagcagagagggg

SEQ ID NO: 4165206 - RNA, 71 nt, Human
uccuucugccuuugaaaguucuguugagaaguugcacauaaugacguuagcagucuucgcuaggcauagga

SEQ ID NO: 4165207 - RNA, 83 nt, Human
uccuucugggaaauguuuggguuugugugaagguuuuaacuuaugagagaguucacacuaagacaaaauaauuuuaguaagga

SEQ ID NO: 4165208 - RNA, 90 nt, Human
uccuucugucccuuggaggacugcugcuucuucuguaagguaucuagugugugccugaaaaagauuaagaugguccccagggguggggga

SEQ ID NO: 4165209 - RNA, 55 nt, Human
uccuucuuguuuuauccaucugggacucccuccccaguuuaauaacaaagaagga

SEQ ID NO: 4165210 - RNA, 86 nt, Human
uccuugacaaauggcauuggaagacauaucaugcuagaaaauguuuaucugguauuuuuccuucuuugaaguuaugaggucaagga

SEQ ID NO: 4165211 - RNA, 56 nt, Human
uccuugcauuuaaaggcguagggccccacagcagaggguaagccggaaagcgagga

SEQ ID NO: 4165212 - RNA, 81 nt, Human
uccuuggagaagacauuaaugaggugaugacacauuuuuauuuaaaugccuuauguagauuauuaauccauuucuccugga

SEQ ID NO: 4165213 - RNA, 60 nt, Human
uccuuggaggucaacgggacggacaucccuccuuguacuguauuguuauucuuugaagga

SEQ ID NO: 4165214 - RNA, 61 nt, Human
uccuuggcaagacacagcacagcucacuaagcucugcugcacacuauuguuuagcuaagga

SEQ ID NO: 4165215 - RNA, 82 nt, Human
uccuugggaaaagauguuuuacauagcaccuuuggguuugcaaucuugaauugcucaucuguaaagcacuuuuguugaugga

SEQ ID NO: 4165216 - RNA, 83 nt, Human
uccuugggugauccuacucaguuuaugauuucaaguuggcaggacuugcuuuguuuauggaugaguggccugucagucaagga

SEQ ID NO: 4165217 - RNA, 66 nt, Human
uccuuggguuaagagggaguaaggaacaguugucaaagcacccuucuuucuuuugaucacagguga

SEQ ID NO: 4165218 - RNA, 109 nt, Human
uccuugucugcgugacgugagagugacugugggugagagcguuccagcaagacaaugaugaucucugcugucugauucccacuucccagauucucacaguagacgagga

SEQ ID NO: 4165219 - RNA, 62 nt, Human
uccuugugucuagaaggugggcuugcuuaagcuggagcuagggcuuucguagacaguuugga

SEQ ID NO: 4165220 - RNA, 81 nt, Human
uccuuguucaggcagcagggcacugugagauguggcuccuuggcccuuuccagccaccaccuugauugccugcuacaagga

SEQ ID NO: 4165221 - RNA, 73 nt, Human
uccuuguucucuuggaacacuugcucuuagaacccagccacucuaaugcaaggaauuccaaguagcccgugga

SEQ ID NO: 4165222 - RNA, 56 nt, Human
uccuuguugucuuagguagcauucccuagaagcagagccuaaggcagacauuugga

SEQ ID NO: 4165223 - RNA, 70 nt, Human
uccuuuauucacaguugauuuacaguugucuuaggaauugacaacugugagauauacuugaccuaaggga

SEQ ID NO: 4165224 - RNA, 64 nt, Human
uccuuuccaccugaaccucaguggcugacuuuaccccaggcccugaaggcagagguggagcuga

SEQ ID NO: 4165225 - RNA, 69 nt, Human
uccuuuccugccccauccuugccacggagggccagggcccugccuggcaagaggggcuggcucuaagga

SEQ ID NO: 4165226 - RNA, 111 nt, Human
uccuuucuacuccuauacuguauuuaaaugacgggacuggguuuuguugcaaauaaaucauuucacuguugaagaaaaucuugacuguuuuuagaauugggagagauugga

SEQ ID NO: 4165227 - RNA, 56 nt, Human
uccuuucucccagguuaguugucaaccugcuggagcucaacccugcagagaaagga

SEQ ID NO: 4165228 - RNA, 71 nt, Human
uccuuugagaaaaauggggcucccugugccaacuuuucaagagcuugauggcagggcagccucucagaggg

SEQ ID NO: 4165229 - RNA, 85 nt, Human
uccuuugagauaugguuucuucuuucauuuaagagcuguuauuuugcuugguuucaaagaugauaggaaaucauaguuuagagga

SEQ ID NO: 4165230 - RNA, 61 nt, Human
uccuuugcugcuuguuccugcugcugcucaguggcagcugccaaguuggaguagcaaaggg

SEQ ID NO: 4165231 - RNA, 76 nt, Human
uccuuuggugguauaauguuugugugauuauuuguuaucuguguagcuuugcauugaugucuauacgcugaaagga

SEQ ID NO: 4165232 - RNA, 62 nt, Human
uccuuuuaaaaugaaccugcagaagugcagaguggcaguuucugcaaaucauuuuuauggga

SEQ ID NO: 4165233 - RNA, 63 nt, Human
uccuuuuccccucaguacuaaacauauauauauauauuuuuuguaaauugaggugggagauga

SEQ ID NO: 4165234 - RNA, 76 nt, Human
uccuuuucuuuccugagccagaguuucauugucaauaaaauuagaccaaugcuaacucccauagggguugaaggga

SEQ ID NO: 4165235 - RNA, 71 nt, Human
uccuuuugccguuuucauaucguugccugucaaaagcacacaaguuacagauuugaucugagaacaaagga

SEQ ID NO: 4165236 - RNA, 81 nt, Human
uccuuuugcuccucuuucucuuucuugucagucacauuuugcguauuguucugcugacaaugagaaagagcaaaagaaggg

SEQ ID NO: 4165237 - RNA, 80 nt, Human
uccuuuugucucuucaguaaaugacacuguuggggaaaugauuguccaguuaugucaaagucacugaggcaauaaaauga

SEQ ID NO: 4165238 - RNA, 76 nt, Human
uccuuuuucaucuuuggacuuuuuauauucugcuuuuuuaagauggguuuuggaaguauaaagaugucugaaugga

SEQ ID NO: 4165239 - RNA, 64 nt, Human
uccuuuuugguccaaggugaccauauucuuuugacuuugacaucguuuguggaucaggaaaggg

SEQ ID NO: 4165240 - RNA, 78 nt, Human
uccuuuuuucccagauaaaugucaaaaugugaaauuucuggcucacagucuacauguauguuuaucuugagaaacgga

SEQ ID NO: 4165241 - RNA, 74 nt, Human
ucgaacacuugcacugucguggaaaugauuuucugguaucaaaacguuuucagugacugugcuucgggguucgg

SEQ ID NO: 4165242 - RNA, 99 nt, Human
ucgaacuuuauauaggcaaacaguuuucucauuuaguguuuguuaaugcuuguucuaaauaacauuuugaaagggaaauuguuugguuaucuauuuuga

SEQ ID NO: 4165243 - RNA, 67 nt, Human
ucgaauucuuuucuaaguagagauuacauugcauguguuaucuuggacuacagaagagagggaaagg

SEQ ID NO: 4165244 - RNA, 66 nt, Human
ucgacuucaaauuguauugucgaguauuuuauacaaagaaaaccaauaugcauuguuugaaguuga

SEQ ID NO: 4165245 - RNA, 83 nt, Human
ucgacuucuugucuuguguguagaauagaacaugggaaagaacaaaaacgcuuauggcaagaaacacauagauaagaagcuga

SEQ ID NO: 4165246 - RNA, 66 nt, Human
ucgaggaguugcagagccaguauggguaacuauucuaaaauccuuaaaucgcuccugggcccucga

SEQ ID NO: 4165247 - RNA, 82 nt, Human
ucgauaauaguaaaaugcaguaaaauaggagguaaugugccuugaguauuuauuaccuuggauuuugauguaacuaauuuga

SEQ ID NO: 4165248 - RNA, 100 nt, Human
ucgauccaggggugcugaagaaccugaugagcuguguagcgcuuuuuggggucuaccaccagcaaccggcucaccagaucuuuagcagcuguuggaauga

SEQ ID NO: 4165249 - RNA, 69 nt, Human
ucgaugccaggccagucguggcauuaacuccuggcaaaguauccgaugccaggcuggccaugguauuga

SEQ ID NO: 4165250 - RNA, 55 nt, Human
ucgauggcaguggugucugcacaggccagggccagcaaggguccacugucacaga

SEQ ID NO: 4165251 - RNA, 57 nt, Human
ucgauggcuuuacuugucaacagacggcaucuuuacugcuuggcauaggccacuuga

SEQ ID NO: 4165252 - RNA, 100 nt, Human
ucgaugugaaugacucuucaaagauauucaaagauuuauuagaaccuaacaugguaguuaauaaaguaugaauuggaaaaaaagucacuuuuuacauugg

SEQ ID NO: 4165253 - RNA, 66 nt, Human
ucgcacucaggacucucaucaguaagaugggaauacuaaugcuaccacaugagagaucugagguga

SEQ ID NO: 4165254 - RNA, 68 nt, Human
ucgcagaccgcggugcacguggcccugaccaggggcagagccaccacacgcugcaccacguucugcgg

SEQ ID NO: 4165255 - RNA, 59 nt, Human
ucccaucgucuccuggaugauaugcaauguccugcagucacagggagauggugacagga

SEQ ID NO: 4165256 - RNA, 88 nt, Human
ucccaugcugugacccuccaaagggaagcgcuuucuguuuguuuucucuuaaacaaagugccucccuuuagaguguuaccguuuggga

SEQ ID NO: 4165257 - RNA, 58 nt, Human
ucccauguguuccucuagucuacguacaacacauaauauguagauaacgcaguaggga

SEQ ID NO: 4165258 - RNA, 79 nt, Human
ucccauugagccacugaaaguaccagcaaauccuuugauguugcugauucuguauuuaaggugaugucuucauuuggga

SEQ ID NO: 4165259 - RNA, 64 nt, Human
ucccauuucacaacaaaacuggccagauuccacacccacaugccuggucagauguggaauggga

SEQ ID NO: 4165260 - RNA, 86 nt, Human
ucccauuucaucugcuucuuccuuucugaccauuucuaagugaccucaggcucaugccacacagaugguaagggagggagcuggga

SEQ ID NO: 4165261 - RNA, 56 nt, Human
uccccaaagcuuuguggucaggguauccagagcugcucaccacacaacuaugggga

SEQ ID NO: 4165262 - RNA, 57 nt, Human
uccccaacucccugacacccuagacccaagaaucuggagguuuuacugaguugagga

SEQ ID NO: 4165263 - RNA, 72 nt, Human
uccccaagggcauuuggcucaaccuaaguaagagaggauaagcuugagggagaaagcugaggugucugggga

SEQ ID NO: 4165264 - RNA, 88 nt, Human
uccccacacccacccucucccccacagcagccuucucccccacagaggcugggauaggaugaggggggcggaguuggggacugaggga

SEQ ID NO: 4165265 - RNA, 79 nt, Human
uccccacagaaaaccuguaucaauuuguacucagauaagcagaguacaaauugauacagauuugaacucugugcaggga

SEQ ID NO: 4165266 - RNA, 94 nt, Human
uccccacauaggcugccuuguuacagaagcuuuugaaaagaugaggaaccuuuggaucugggaauggaagccuucuguggggccgcauggggga

SEQ ID NO: 4165267 - RNA, 55 nt, Human
uccccacuccugggcagaugcguacccagugcagcgagaaugucugcgaggggga

SEQ ID NO: 4165268 - RNA, 60 nt, Human
uccccagccccucagcagcguccccccacaaggugggcuggcugauaaaggguugaggga

SEQ ID NO: 4165269 - RNA, 64 nt, Human
uccccagcugcucucccaccccaccccagcugcccggcggcugggcccacgagggcucugggga

SEQ ID NO: 4165270 - RNA, 72 nt, Human
uccccaggaaucaggugguugcuuucagcggguuagcuucaugcauuuuaugcugauuugauuuccuggaga

SEQ ID NO: 4165271 - RNA, 99 nt, Human
uccccaggggagaggccccguucccgccagccacauucccacgccggccugggaggcugccagagaguggcugggugucgggggcugccucccagggga

SEQ ID NO: 4165272 - RNA, 55 nt, Human
uccccagguguggcauugggaggagcacuggccucuccagugccggcgcugggga

SEQ ID NO: 4165273 - RNA, 58 nt, Human
uccccagucgugacaaccaaaaauaucuccagauauugccaaaugucugcuggaagga

SEQ ID NO: 4165274 - RNA, 62 nt, Human
uccccaguuuugauaacuucuggcuggaaaguuuuccaggcuagcuguuucagggcuaggga

SEQ ID NO: 4165275 - RNA, 128 nt, Human
uccccauugaacgggacugggaggcaguauagugguuaaaugcuccgaucuuggugccagacuaauuuggauucaagccuggcauuuagcucucugagaaucuguuuucucuucugcaaaauggagga

SEQ ID NO: 4165276 - RNA, 66 nt, Human
ucccccagucugggcguggucaacuuugcuguauguucagggagacccagccacagcauugaggga

SEQ ID NO: 4165277 - RNA, 80 nt, Human
ucccccucucuaauccuugcuaucugggugcuagugcuggcucaaugcaaugcaccugggcaaggauucagagaggggga

SEQ ID NO: 4165278 - RNA, 67 nt, Human
uccccgcaguggaagccucuuuaagcaagucucucuucucugcauauguaggcuuuagcucugggga

SEQ ID NO: 4165279 - RNA, 77 nt, Human
uccccgcguuggccaggcuggucucaaacuccugaccucaggugauccaccagccucggccucccaaagugcuggga

SEQ ID NO: 4165280 - RNA, 56 nt, Human
uccccuaggccgaagugagguaccuugucuaagguccuguuucuucccuggggaga

SEQ ID NO: 4165281 - RNA, 67 nt, Human
uccccucucccagcucaucccugccagcagggucagggagaagguuuagcugugaggguccucggga

SEQ ID NO: 4165282 - RNA, 67 nt, Human
uccccucucccucccugcccugcuugucagccugggagucagacagcuugcagggaggugggcggga

SEQ ID NO: 4165283 - RNA, 58 nt, Human
uccccucuuucuggaaacacaagcagucuccucaugucaguuuugcaggcagagggga

SEQ ID NO: 4165284 - RNA, 78 nt, Human
uccccugagcaggcgguggagcggcucgccgccccaggccgcggccgagucuaggccccgccgcuguucacccuggga

SEQ ID NO: 4165285 - RNA, 59 nt, Human
uccccugcuccuuugaauguccaggcugcuggaauugauauacagaggggaacaggaga

SEQ ID NO: 4165286 - RNA, 65 nt, Human
uccccuggagauaugcuucacauuuaucuaaauuuuugcaaaagugugauaaacuccaaguggga

SEQ ID NO: 4165287 - RNA, 130 nt, Human
uccccuggccgucgccucaacaggccggccgcugucagggagccuggccccucgcccagcucaggguuggccgagaagcugggcgcaguggcuggugagauguggcugccugcaaucagagggccuggga

SEQ ID NO: 4165288 - RNA, 75 nt, Human
uccccuuccaagaggaagugccuuuacgcauuugaaacuugacaugccaugaagguauuuuuggagggcagggga

SEQ ID NO: 4165289 - RNA, 81 nt, Human
uccccuuuacccaacacagauggauuuuguaggcugaucaugguaaggucaaaugcacagaaccauuaaggguugggggga

SEQ ID NO: 4165290 - RNA, 95 nt, Human
uccccuuuuucucccugucauuuaggucugucagaaauguuuguauauauuuggugacaccuuucuaaauauuagggaaugcagagcuaggggga

SEQ ID NO: 4165291 - RNA, 68 nt, Human
ucccgaacucuucaccuaugucaagggcacauaaaacauugaugagaguagggacagagaguugguga

SEQ ID NO: 4165292 - RNA, 59 nt, Human
ucccgauaggcagggcucuggcucucaucugggagcacggcagaagcuguugucuggga

SEQ ID NO: 4165293 - RNA, 74 nt, Human
ucccgcagcucuucagagugagcaaugccaguuucuugaaugcuauugcugaugcugaagggaagucacaggga

SEQ ID NO: 4165294 - RNA, 70 nt, Human
ucccggagugugucggucagcguggcgcugaacagcagugucugccugcgggccggcacagccgccagga

SEQ ID NO: 4165295 - RNA, 78 nt, Human
ucccggcagugucuccugggucuggccuaacuaagcugggcuucggccaagcuggccggccuccagguggauuuggga

SEQ ID NO: 4165296 - RNA, 65 nt, Human
ucccggcgcgcaggccgcggcuccucggaguugaggugcuggggcuuggccugcuugcgccgcga

SEQ ID NO: 4165297 - RNA, 83 nt, Human
ucccggcuucuucagagcuauuuguagauggcacacuuggcacccucagugggagugugugccagccuacgaggagcccagga

SEQ ID NO: 4165298 - RNA, 56 nt, Human
ucccgggagcuuccugcugcgcacgcggcgcgcaccaggagaaaagcuuugcggga

SEQ ID NO: 4165299 - RNA, 87 nt, Human
ucccgggagugggaagagguggcaggaaggggaucugaggaggagaacagggguccugguggucugugcuucuucccagacacggga

SEQ ID NO: 4165300 - RNA, 98 nt, Human
ucccguccccucgaggcagucguggaaaggcuggguuugggaugugauggggguagcccugggguccucucagucccacggaggccacggggaaggga

SEQ ID NO: 4165301 - RNA, 70 nt, Human
ucccuaacugucaucuuuucuaucauauaauuguauacuuuuauugacagaaaagauguuggauuaggga

SEQ ID NO: 4165302 - RNA, 96 nt, Human
ucccuacccuguaauuguuuugggcccaguguauggcagcgugccuguuucuaagcuuguuuugccacuggacccagaacucuuuuagggcuugga

SEQ ID NO: 4165303 - RNA, 61 nt, Human
ucccuacuguuagggacucagcuagcauccaguguucuuaaggucuuuaggcagauagaga

SEQ ID NO: 4165304 - RNA, 65 nt, Human
ucccuagaauaucugcugcagcuuuagaugccaguacacguaacucucuggcagguaauuaggga

SEQ ID NO: 4165305 - RNA, 73 nt, Human
ucccuaggagcaauagcaccaauuaacucucacccguggaggaagaauugguuauuggagagacccuaaggga

SEQ ID NO: 4165306 - RNA, 106 nt, Human
ucccuaguaggggaggaaagguuguccuggaguggcauggcauggacaguaguaaaaagacuccuucacagccccacacaggagcacugccuguguucucugggga

SEQ ID NO: 4165307 - RNA, 83 nt, Human
ucccuaguaggggcugaggucaggagcuguggggucagucaaggcuccuccgacuuucugacuucaccacuuuggcucaggga

SEQ ID NO: 4165308 - RNA, 88 nt, Human
ucccuaguaucaugccagguacauauuaaaggucuauaaauaaaugauuguuuauuagugcauaauguguaaggcauugugcuaaaga

SEQ ID NO: 4165309 - RNA, 101 nt, Human
ucccuaucauuacucucccugcaccccuuacaucagcucugguauccuggaguugggugaaggagcugauguaagggguacagggagaguaaggauaggga

SEQ ID NO: 4165310 - RNA, 66 nt, Human
ucccuaucccccaggagcuuguuuuagagacgguugucuuaugagccacucccuggauggaaggga

SEQ ID NO: 4165311 - RNA, 89 nt, Human
ucccuauguuaauguaaacugauuuaggccuaguuaaaucucuaaaaucccuuuauagcagugccuagauauuguuugaaccauuggga

SEQ ID NO: 4165312 - RNA, 84 nt, Human
ucccuauuuuaauauaucuuauguuuaaauuccaaugaucauauauuagggcuguuuaaaagugaggugcauucauaccaggga

SEQ ID NO: 4165313 - RNA, 74 nt, Human
ucccucagaaucugugaucuuuccucaggagcagggugugcuccuuggccguuaaugucacaaacacugggggg

SEQ ID NO: 4165314 - RNA, 61 nt, Human
ucccucagcuucucccugcagcucuugucgacaagacccaggccagaugagaggucaggga

SEQ ID NO: 4165315 - RNA, 58 nt, Human
ucccucccuacgugugugacccauugugaggugggaagcauuaaugauagggggugga

SEQ ID NO: 4165316 - RNA, 87 nt, Human
ucccucccucaggugaaaggaaaaauuuuggaaaaguaaaacacugaagagucauaguauucuccuguaacuuggaacuggagagga

SEQ ID NO: 4165317 - RNA, 69 nt, Human
ucccuccugcaugaggcucggcccgaggcagggcucccuccugcaugagucuguggccuccaggaggga

SEQ ID NO: 4165318 - RNA, 61 nt, Human
ucccuccuuaaagggagcagcagcuuggcagugaguaugcuggcaccuuugagugguggga

SEQ ID NO: 4165319 - RNA, 63 nt, Human
ucccucguggagcuuguauucaguugucaauuuccccuuacuagaugcaagcuccaugaggga

SEQ ID NO: 4165320 - RNA, 78 nt, Human
ucccucuaaaagcaccucuaaaaguuuucuguggcugcugacagaagaggaagucagaguuuugaggugugacaggga

SEQ ID NO: 4165321 - RNA, 62 nt, Human
ucccucuaugggggcucaaauggcaaaaaccauaugccagccuucugggccaguagaaggga

SEQ ID NO: 4165322 - RNA, 59 nt, Human
ucccucucuagccuguucaguaggagguauaguuuacuuggaugugauuagagagagga

SEQ ID NO: 4165323 - RNA, 86 nt, Human
ucccucuucuccugugauaccguuuggaagcuauccuacuauccccuggaagggggagcucuuccuaauuccugggaggugaggga

SEQ ID NO: 4165324 - RNA, 78 nt, Human
ucccucuugcugaugggaugguaacuucuuugaauguauuauaugacacagaccaucuuagcagacugcagugaggga

SEQ ID NO: 4165325 - RNA, 57 nt, Human
uccugguguaaugguaagcaugucaugaugaaggcagguuuugucaagacagcagga

SEQ ID NO: 4165326 - RNA, 63 nt, Human
uccugguguugaaccucagcaggggcugucccuggccugcugaaacaguucagcugaccagga

SEQ ID NO: 4165327 - RNA, 58 nt, Human
uccugguuagagcucucugggguaugaggauuccaguaaagaguugucugagauggga

SEQ ID NO: 4165328 - RNA, 111 nt, Human
uccugucaacauauuccaugaacauccuauccguguucagcuguuaaguauauuaacuauuucagggagugaugucagcaagaauaggaauaggaguuugucagaacagga

SEQ ID NO: 4165329 - RNA, 130 nt, Human
uccugucagaucagcagagguauuagauuugcauaggagcaugaacgcuauugugaacugugcaugcgagggauguagguugugugcuccuuaugagaaccuaagaauuacccugaugaucugaagugga

SEQ ID NO: 4165330 - RNA, 92 nt, Human
uccugucccucauccacaucagaaccaaggagcugagaaugauucuguucaugggucuccaguguucaggugacuggauuugagugacggga

SEQ ID NO: 4165331 - RNA, 79 nt, Human
uccuguccugaggaucccuaacuaaauuuuguuagaaaaucuugcaguuugcuuuuaaugggagaucuuucuggcagga

SEQ ID NO: 4165332 - RNA, 63 nt, Human
uccugugcccuuuguccucgucucacugacagguugccuuggagauggggcagagggguggga

SEQ ID NO: 4165333 - RNA, 59 nt, Human
uccugugcugaggaugcaguuucuggacaguucagggcucuguuggggucagcacuggg

SEQ ID NO: 4165334 - RNA, 56 nt, Human
uccuguggcguuaucaugugauuaguucacaugaccuaaauacuaauuuuguagga

SEQ ID NO: 4165335 - RNA, 70 nt, Human
uccugugggggcaggaugacacuuugauccucaaacucugcugucucuucugccuccagcuguuucagga

SEQ ID NO: 4165336 - RNA, 79 nt, Human
uccuguuauaacuguuuuugaaauauaucuagguagcgguuaccgaaagaaagguuucauaaagcaggcuuaaacguga

SEQ ID NO: 4165337 - RNA, 106 nt, Human
uccuguuaugcgcugguccuccauguggaucaggcagugcuucuggcaagcuuagggaugcucuucacagcuguuuuguccauuaauuggaggcucagccacaggg

SEQ ID NO: 4165338 - RNA, 89 nt, Human
uccuguucauugguuuuuuaguuaggucagaaugugcuugaggagaguaagagaauauguggauguggugaagguuaaaaugagaagga

SEQ ID NO: 4165339 - RNA, 76 nt, Human
uccuguucucugcgugugagcacacucgggccagcccuugcuggaccaggugugcacaggcagcaucugaauggga

SEQ ID NO: 4165340 - RNA, 70 nt, Human
uccuguuugccacuggccuaguccagggaagagaagcugauggccuggacugggcuaauggcagacagga

SEQ ID NO: 4165341 - RNA, 59 nt, Human
uccuguuuuagucuuccacgccuggcucuugauaugccaaguggagaagaaaagcugga

SEQ ID NO: 4165342 - RNA, 76 nt, Human
uccuguuuuugucauauagacuauugugaugaacuauuauauuacagauacuuuguaggcaagauaaacaacagga

SEQ ID NO: 4165343 - RNA, 58 nt, Human
uccuuaagacacaaagcuucccuuuucgcuuccuggaguguggacgugugcuggagga

SEQ ID NO: 4165344 - RNA, 70 nt, Human
uccuuaagguuuuauucuccaugaucaaaugacuuugaaaaauuaaagaguuuggaaaaugagacaagga

SEQ ID NO: 4165345 - RNA, 66 nt, Human
uccuuaauaccuccguaacacuugcuaaccucugaaagagaaaggaaggaagcagggcgggaagga

SEQ ID NO: 4165346 - RNA, 80 nt, Human
uccuuaauuuucccuuacccaguauucacucauccuuugccucuccugugauuuggguucuuaaagggcuagguuaggga

SEQ ID NO: 4165347 - RNA, 94 nt, Human
uccuuacaauugaguuucuguuucuggaaaguagauguacuaaggauuagaacauuuuuucuguauuuucuccuuuucccagguacucagagga

SEQ ID NO: 4165348 - RNA, 67 nt, Human
uccuuagcuuuuuugaguagugcuauauugucucccacauuuaacacugcuccaaaaaaggcuuuga

SEQ ID NO: 4165349 - RNA, 82 nt, Human
uccuuaggcugggaacucugcuugcagaugagaaauaaaccuaccucucuccagggcaugaguuccacagugaaacugagga

SEQ ID NO: 4165350 - RNA, 77 nt, Human
uccuuaugacuaccugcuggcaauauucaguccagcgcauggacaaagcugaccuggaagagcagggagucaaggga

SEQ ID NO: 4165351 - RNA, 55 nt, Human
uccuucaaagaguauuuccugagcacuuugugccaggcaguagcuauugaaguga

SEQ ID NO: 4165352 - RNA, 57 nt, Human
uccuucaagaugccacagcuuucccuuuacuuaggaaucuuggcaucugugaaguga

SEQ ID NO: 4165353 - RNA, 59 nt, Human
uccuucaccuuagcccuccuagaccugacaucacuuacagcgggacuaaggugcaggga

SEQ ID NO: 4165354 - RNA, 73 nt, Human
uccuucauggaccugccagcuccucacuuuucgaaggaugaaggugaaacuggaagcuggccaggguggagga

SEQ ID NO: 4165355 - RNA, 78 nt, Human
uccuucauucaacaagcauugauugagugccuaugguguuucagggccugcaucaggagcuugggauagaaagaagga

SEQ ID NO: 4165356 - RNA, 76 nt, Human
uccuuccccagcuugcuaauuuugacuucaggccuguccgcgguuagagugaagggaaagaguaagggggaaagga

SEQ ID NO: 4165357 - RNA, 61 nt, Human
uccuuccucggggacccagaucuguggccuccguggggagaucugggcccccgaguaagga

SEQ ID NO: 4165358 - RNA, 59 nt, Human
uccuuccugcaggccaaguccuaacaucucagucaggcuaucaacgcacuagggaagga

SEQ ID NO: 4165359 - RNA, 66 nt, Human
uccuuccugugaagccgguggucucaccuuucccguucagguggcguugcuggucaugggaaugga

SEQ ID NO: 4165360 - RNA, 81 nt, Human
uccuucucuggccuggucuggccucuccacuccugagcugggcuaccugaguugaggguccagcccccggucauggcagga

SEQ ID NO: 4165361 - RNA, 117 nt, Human
uccuugagugaguacugcuauaaaaugcauuauuauugcuagugucauuucacaagagccuauaauuucagugugauagagcuacaauauaaguauaguauugcaaaaccaucagga

SEQ ID NO: 4165362 - RNA, 61 nt, Human
uccuugccuuuuucaucuccuccaggaagcccaugagccuccagaggcaaaaagguaugga

SEQ ID NO: 4165363 - RNA, 57 nt, Human
uccuuggaagcugguuuuucauauacacgaauaugaccacauuccagcuguccagga

SEQ ID NO: 4165364 - RNA, 129 nt, Human
uccuuggaccuagccaggaaugcucucaugggaauggcagaggcaaagaugguaagcucagccaugcaaguacuuucaagccucuguugcgucuccucugcugacaucucauuggccaaagcacagcaa

SEQ ID NO: 4165365 - RNA, 60 nt, Human
uccuuggagcaacacaugacaucuagaacucuacaugguccaaggucugucucacaagga

SEQ ID NO: 4165366 - RNA, 126 nt, Human
uccuuggaucugaagacuaaaaugugcucagcugcagaccaauuaugauauucaaguauuuucaagacugcugaaugggauauguugagcugugcuugugugauuagcuucauugauuucuauaga

SEQ ID NO: 4165367 - RNA, 55 nt, Human
uccuuggcacacucggaucugauucauuccagggucagcaccacagugcccagga

SEQ ID NO: 4165368 - RNA, 116 nt, Human
uccuuggcgcgguguaggaaaggugaggaugccugccgcgcggugccccucguggugacagagacacugcggaggucggguggcucucggagaaccuugucucagugccaaaagga

SEQ ID NO: 4165369 - RNA, 57 nt, Human
uccuuggucugugccugacucccucugggacagggagauccaggcaaggccgcaggg

SEQ ID NO: 4165370 - RNA, 62 nt, Human
uccuuguauccugugguacaugcacuugugcagugucaccaguuccaggaaauaaauaagga

SEQ ID NO: 4165371 - RNA, 117 nt, Human
uccuugucucagucuuuucaucuauaaaaugggacccuaaugcaucuaguuccuagaauuuaaauauuccuggcagguguauuggcuguuguguggaaucugagcagcgaacaagga

SEQ ID NO: 4165372 - RNA, 80 nt, Human
uccuuuagcaguccucauccuuuagcagucuccaugccccacagaagauggaacuuaaugaucuaugacaacuuagagga

SEQ ID NO: 4165373 - RNA, 61 nt, Human
uccuuuaguuugugauacgaagauuguuaguuucucuauuauuuuuucauagacuauugga

SEQ ID NO: 4165374 - RNA, 77 nt, Human
uccuuuauuuagaaagcuggaggaauucuuucggguaacucauuuucagaguuuaauauccuucaacuuuccaagga

SEQ ID NO: 4165375 - RNA, 69 nt, Human
uccuuucaaucaaaguuucuaguggaacaaaagcauuugguuaaccauauagaacuugguggaaaugga

SEQ ID NO: 4165376 - RNA, 88 nt, Human
uccuuucacuggaauuuucuugguuaggggaaauaggcaguguaaucauuuuuccugucugaccucaaccagggguaaacuaaaagga

SEQ ID NO: 4165377 - RNA, 84 nt, Human
uccuuucagcaguuuagguucuuggaaucagucucccagugacagaugugaggacauugagcugucaagaacuuaaugaaggga

SEQ ID NO: 4165378 - RNA, 67 nt, Human
uccuuucuagauuguguugaccagcaccaaauuaucucaguuuggugacacauaguuugauaaagga

SEQ ID NO: 4165379 - RNA, 58 nt, Human
uccuuucuguuguucaucuuccuuagugcacuaauuaggaagacagcaaaagaaugga

SEQ ID NO: 4165380 - RNA, 69 nt, Human
uccuuugagauuagcucucucugauagccuaauaaauaaauguauguaucagagaggcugugugaggga

SEQ ID NO: 4165381 - RNA, 57 nt, Human
uccuuugcagaagaaaacaugaacaaguguggccuuguucagcaaaauuuuguagga

SEQ ID NO: 4165382 - RNA, 55 nt, Human
uccuuugucuucauuccuccuucccgugagggugggguggucugcugaagaggga

SEQ ID NO: 4165383 - RNA, 106 nt, Human
uccuuuguuaaguuuucuucuuagcaaauacuacuuagaaugcauuugaucaaaaugauauucuguuuucuacauggucauaggcugagucaagagagacaaagga

SEQ ID NO: 4165384 - RNA, 76 nt, Human
uccuuuucugacuuaccucaagcauacaaaucuggaacaggaguguugcuucagggaagccagcaucagaauggga

SEQ ID NO: 4165385 - RNA, 93 nt, Human
ucgaagagaucuaguguaaacuuaugcugagcccgacagccuagugucauugugcuacuggccgagcaaagauugcguaaucuauggcuuuga

SEQ ID NO: 4165386 - RNA, 65 nt, Human
ucgaagccuucaguccguugcagaggagcgaguuggacgccacuguggggcucugaggguccuga

SEQ ID NO: 4165387 - RNA, 55 nt, Human
ucgaaugugacugcagggggagugagaccacaagccagaccugcacccacuucga

SEQ ID NO: 4165388 - RNA, 58 nt, Human
ucgacugaaugucagcccagguuguagguggcagugagcagcugggcugucacaguga

SEQ ID NO: 4165389 - RNA, 55 nt, Human
ucgaggaucugggaaucuugacagaauaaaugucuuaaagaacugagguccuaga

SEQ ID NO: 4165390 - RNA, 55 nt, Human
ucgaucaucuuuuauaugucaaguacauauguacuggguauacaaagaugaauga

SEQ ID NO: 4165391 - RNA, 105 nt, Human
ucgcagggugccaccgccguuuccaggcacuuuuucugcuagacgcucaagacaagagaagggcaugugaagggccaggaagccggggcaggggccgccgugaga

SEQ ID NO: 4165392 - RNA, 81 nt, Human
ucgcccugccuaucgccaccaugucaggacacggugcaccugcuugcgggaugucacugugccuggcacagcaccggguga

SEQ ID NO: 4165393 - RNA, 78 nt, Human
ucgcccuuaggggcaaauuggcagguuguccccugcuccuccuggcccacacagccuugcuuauuugucucuguguga

SEQ ID NO: 4165394 - RNA, 73 nt, Human
ucccugaagccagggaaggaagauacaaagcagaguccauccccuguggcuccuugacccuaggcuuuuggga

SEQ ID NO: 4165395 - RNA, 84 nt, Human
ucccugaagcuucauuccagccacugugaugccagagauuaaucaggagaagcaucacaucacuagcugguaaugagaagggga

SEQ ID NO: 4165396 - RNA, 69 nt, Human
ucccugaaugauucuauuugcagcuuggauugagauucacuagcauuguugaaggacuuggggcagggg

SEQ ID NO: 4165397 - RNA, 117 nt, Human
ucccugacgugagccccuugaacuuccaguugucuccacaggugucagcucacuaagugucuggcauuuucugagcagcuacuguguucagggacugggacaaggcacguguaggga

SEQ ID NO: 4165398 - RNA, 64 nt, Human
ucccugagagguaggaaaugaacaaggugaucuggacaauuugcccagcaucugccuuagggga

SEQ ID NO: 4165399 - RNA, 93 nt, Human
ucccugcccaaacacuaagguuugcccuuuugagggcuaauagugccaucugugugccuagaggguggccgacaagugguuguuuggcaggga

SEQ ID NO: 4165400 - RNA, 61 nt, Human
ucccugccuccugcaccuucugcagauggcgccggccauggccagguagaggagguaguga

SEQ ID NO: 4165401 - RNA, 63 nt, Human
ucccuggacccaaugacaaugggacugcuaagccuauucuagucugucauguccaaaauggga

SEQ ID NO: 4165402 - RNA, 68 nt, Human
ucccuggacgggaacauuguuggugggaacagccccagccagcaagcucccaguucucaaaaaaggga

SEQ ID NO: 4165403 - RNA, 55 nt, Human
ucccuggagauaacuucugggagaaaccaccucaccagaauuuucuuccagguga

SEQ ID NO: 4165404 - RNA, 57 nt, Human
ucccuggcucucgcugggaguacuugacccugagagcuuaacucagagagcugugga

SEQ ID NO: 4165405 - RNA, 66 nt, Human
ucccugguggcgaauggugguagguggagaaaccagcuguaucuaccucugaauuccuauccugga

SEQ ID NO: 4165406 - RNA, 56 nt, Human
ucccuguagggugagaugucucuguugucacaggcaguuaguccacuuugcagaga

SEQ ID NO: 4165407 - RNA, 64 nt, Human
ucccuguaugguccuuccugaccagccagguccaacagugcaucugggucggaagccccaggga

SEQ ID NO: 4165408 - RNA, 55 nt, Human
ucccuguccugggcaaucccagcaacacacccucugggagcagcccccuugggga

SEQ ID NO: 4165409 - RNA, 56 nt, Human
ucccugucuaguacaaugagggcuaacacaccuucagagaaguuguaggcugggga

SEQ ID NO: 4165410 - RNA, 57 nt, Human
ucccugucucccuugagacuagaacaagaaaauuggaccuaauuugaggagaaggga

SEQ ID NO: 4165411 - RNA, 93 nt, Human
ucccugucuuggggcagagggcaguagccucguacccugaggauucuugaaggucugggguccgagcagcuccaucagaagccccaucgggga

SEQ ID NO: 4165412 - RNA, 72 nt, Human
ucccugugauuuaaaaggcguugacuauccguuuuuaaaaggguaggauaugugaaaucauauuaaauggga

SEQ ID NO: 4165413 - RNA, 67 nt, Human
ucccuguggcaggguacaccuuaacaccaccugucagggaugcuguagaaggacccuggcacuggga

SEQ ID NO: 4165414 - RNA, 56 nt, Human
ucccugugucuuccucuugcccccuggaacccagauggcagguccugaagacagga

SEQ ID NO: 4165415 - RNA, 71 nt, Human
ucccuguuggaagucuuggcaacuuuuccucuuaaaaacaagaacagcuugcaauggcuuucaacucugga

SEQ ID NO: 4165416 - RNA, 98 nt, Human
ucccuuauggcaucuugaguguucagugauugucaaccgugaguaacucauuguuuuagagaccacaugaacaaaacauuuuucaaagcaugagguga

SEQ ID NO: 4165417 - RNA, 97 nt, Human
ucccuucaaagaugagacugggaaaagcgggugguaagggaauuccacggucugaauaccuuauuguguguauuuucuaguacucauuaucagggga

SEQ ID NO: 4165418 - RNA, 91 nt, Human
ucccuuccccuccccuucuccugucuucucagcacccccaggguuacauggcggucaggcugagaggcaggggugacaggaugggguggga

SEQ ID NO: 4165419 - RNA, 69 nt, Human
ucccuuccuuuggauuuuuagcagcuuugguagaauaguucaaauggcugacuaaauuaaauuugggga

SEQ ID NO: 4165420 - RNA, 65 nt, Human
ucccuucuuccugaaagcuggcucuuccuucaggcaggagcaucugaacagggagaaguauagga

SEQ ID NO: 4165421 - RNA, 71 nt, Human
ucccuugcccucuaauuucugguuggauuuggcuagugugaaaccuuggcuagagauugaagggugaggga

SEQ ID NO: 4165422 - RNA, 112 nt, Human
ucccuuggagcugcauucucuaguccaaaaacaggcuuagggcuugggcccggagcucaggccugggauccaggggcugagaugauggggcuggugggugcuaucaggggga

SEQ ID NO: 4165423 - RNA, 60 nt, Human
ucccuuggcagcucuugauggcaccccuuccuggggggcuggucaugaaugccucaugga

SEQ ID NO: 4165424 - RNA, 66 nt, Human
ucccuuguuuccuguacaaauuugcucuuauuuugccugauaccugagcaugccaggagaguggga

SEQ ID NO: 4165425 - RNA, 60 nt, Human
ucccuuuaccgaguuugcuggccccuucucgaauauauucagcaagaacguucugaggga

SEQ ID NO: 4165426 - RNA, 78 nt, Human
ucccuuuuuaauccacaguaggaacaaguugucgauuccuagauuggguuuuugcucucugcugugcacagauuggga

SEQ ID NO: 4165427 - RNA, 79 nt, Human
ucccuuuuuauccccuggcuuuuaguuuuucaucauccuuucuacagaugaccugcagucaagaggggaaaguugggga

SEQ ID NO: 4165428 - RNA, 58 nt, Human
uccgacugucuuguuucuaagaugagggagacuuuauuugaaccuugcaaggagcgga

SEQ ID NO: 4165429 - RNA, 78 nt, Human
uccgagaagaauagcuuggacccauugcuuuaauugcuucuuuuuggagaauggaccauccaagcugaucugccugga

SEQ ID NO: 4165430 - RNA, 88 nt, Human
uccgagacagagucaagugcauaagugggguugaagguugguaucugucugcuucacuugcauuuuucaagcaugauuguguugagga

SEQ ID NO: 4165431 - RNA, 95 nt, Human
uccgagaccccaaguucugggcccuggguugcuuuauucccaagaacugcugugagcugagagugucgggggccccaggaugaugggguacaggg

SEQ ID NO: 4165432 - RNA, 130 nt, Human
uccgagcaacuaccacugacugggaagggcacuuugacccugagggguauagcagaagaguguacacauuuucauuauacagcuucauaaacagggugucuuuccuauagguaugugguaaucaguugug

SEQ ID NO: 4165433 - RNA, 60 nt, Human
uccgcacaggucaugcccacugaauaucagccgagguucucucugggaggacuugugaga

SEQ ID NO: 4165434 - RNA, 71 nt, Human
uccgcccuguaaacuuucuguucuuuaaaugcacugacaguaucuugcagaugaaguuuacaggaaacgga

SEQ ID NO: 4165435 - RNA, 94 nt, Human
uccgccucuucucuccaccuuaagagucuuucuguguuuauacguauauaaaacauuuaagauuuuuguugugcuuagugggaagaaaagggga

SEQ ID NO: 4165436 - RNA, 70 nt, Human
uccgggaaacagcugugagaacaagaaugcuuugauagguuccaucaaagcuuccuucacgucuccuggg

SEQ ID NO: 4165437 - RNA, 55 nt, Human
uccgguccggguacuccucucuaaucuuguucaugagcagagugcccaucccgga

SEQ ID NO: 4165438 - RNA, 56 nt, Human
uccgucucuaaaaagggcagugggagggaauugcgcugcucuuuucagagaugaga

SEQ ID NO: 4165439 - RNA, 80 nt, Human
uccgugaaaccccaucaucuuugaggucauuauaaauaauuaguugcagacgcagagauguugaggcuucgucacuagga

SEQ ID NO: 4165440 - RNA, 61 nt, Human
uccgugcuuuaaaccacugugcuguacugccgaguacaguauaaugcuguagggagaagga

SEQ ID NO: 4165441 - RNA, 80 nt, Human
uccgugggagugcacggccaugcacuuuagagauaaugagagccagggcucuggaguggguggccgggagcccccuugga

SEQ ID NO: 4165442 - RNA, 63 nt, Human
uccuaaaaguuccccacuggccucacacaggacucugggcagagugaggaagagcuuccaggg

SEQ ID NO: 4165443 - RNA, 72 nt, Human
uccuaaaaucuagaaguuuaaaaggauaaucuuuguuuauuuguuuagaauuuucugggucagaaauuagga

SEQ ID NO: 4165444 - RNA, 62 nt, Human
uccuaaagauugcaaaucauuacaaaggaaaguuuccaguucuuuucuuuguuugcuuagga

SEQ ID NO: 4165445 - RNA, 130 nt, Human
uccuaaaucucaauaucucagaagguuacuguauuuggagggucuuuaaauaguuaauuuauuuaaauuaggucauggggaggcccuaauccaauaugacuagugucuuuauaagaagagaagauuagga

SEQ ID NO: 4165446 - RNA, 55 nt, Human
uccuaaaugggagacggcauggucacaugugaaccaaaugcuguaauguuuggga

SEQ ID NO: 4165447 - RNA, 84 nt, Human
uccuaacuuauuccauaggcucacugauagaauuauauaccauuauuaguugaauuauccuaugaggaaaguugaacuguagga

SEQ ID NO: 4165448 - RNA, 58 nt, Human
uccuaagaaauguugugaaugccauguuaaaaaccuggcauuucuaagauuuuuguga

SEQ ID NO: 4165449 - RNA, 56 nt, Human
uccuaagauuuccuauucucauuucaaaagaaauggagaauuuagagucucuagga

SEQ ID NO: 4165450 - RNA, 56 nt, Human
uccuaaggaagugacagugggauugacuaggacaagccccaaggaacuuccuggga

SEQ ID NO: 4165451 - RNA, 67 nt, Human
uccuacagaaugauauuauuucgugcuggcacauuaauguuuccagcacgauacugucauuccugga

SEQ ID NO: 4165452 - RNA, 65 nt, Human
uccuacagauacuaaggagaucuuauaaaugguuguuugcuuggcccuugguuuuuguugcagga

SEQ ID NO: 4165453 - RNA, 59 nt, Human
uccuacaugaauggguguauuacuucauuaauaacugaaguuggacuguuucaugggga

SEQ ID NO: 4165454 - RNA, 82 nt, Human
uccuacccagcuacacugccagcagcacuuucuccuuccucaggcaaguaugguaaagugcugugggcuguaagugggagga

SEQ ID NO: 4165455 - RNA, 80 nt, Human
uccuacuuccuugauaauaauccauuuaugaaauguucaaaaucacauucugaguagaaauuauucuucgaggguaagga

SEQ ID NO: 4165456 - RNA, 64 nt, Human
uccuagaaacuuaacugucauucuuaguauuucauuucuauuaagugauuccaaguuucaggga

SEQ ID NO: 4165457 - RNA, 66 nt, Human
uccuagacgaaagcacuggguggccuucuucacaaauugguccacacuggcugagcuucucuaggg

SEQ ID NO: 4165458 - RNA, 85 nt, Human
uccuagacugugcagagcuucuccaucugcccagagagggugcuuagcucaucagggacugcagagggaagcucagccaagagga

SEQ ID NO: 4165459 - RNA, 119 nt, Human
uccuagagcccacagagcaggccugcccagaagugacucagcacugucugccagccucagcacggguugaguggacacucugcuugcagguaacaaucuucucauggcggcugcuggga

SEQ ID NO: 4165460 - RNA, 59 nt, Human
uccuagagucucauaacaagucaacugaauguuuauuguguuugaaugaggcuccagga

SEQ ID NO: 4165461 - RNA, 64 nt, Human
uccuagccagggagacacuguggagcucaguggaacuagcuccucagaacagccuuggcuggga

SEQ ID NO: 4165462 - RNA, 75 nt, Human
uccuaggcaggccugucuugcucgcccuugcaucugggaagcagugggcagggugggcuagacucuuccccagga

SEQ ID NO: 4165463 - RNA, 61 nt, Human
uccuagggcuucccugggaggugggcugggcccagcauccaccuuuggaaagacccuggga

SEQ ID NO: 4165464 - RNA, 72 nt, Human
uccuagguagugacacaguagaaagaugaugagccaguaggacugguucugccacuagugguuaccuuagga

SEQ ID NO: 4165465 - RNA, 68 nt, Human
uaucuucugggcagugaaaauuggauugagaacagugaauaucaacaugauugaacucucagaaggug

SEQ ID NO: 4165466 - RNA, 58 nt, Human
uaucuucuugccaggcugguguguuggcuauacauaguuggaccuggguaagaaaaug

SEQ ID NO: 4165467 - RNA, 81 nt, Human
uaucuugggagaucgaaguauuucugaguugcccagugggcaaaauccuuacagggcaucucugaaucuucacccaaggug

SEQ ID NO: 4165468 - RNA, 70 nt, Human
uaucuugguccuggaugagacagguaguuuuaaccgagacuuuuguauaaaucuagggcuguaaaggaug

SEQ ID NO: 4165469 - RNA, 63 nt, Human
uaucuuuaucuuuuuauucuccuaauaaccaccugugagugggagaaucaggaaggauugaug

SEQ ID NO: 4165470 - RNA, 95 nt, Human
uaucuuuuguauaaaccuguacaggucaaugauaagauaguuuaaauauucucuaucuuucagggccauuuguauuugguuuagacuuagugaua

SEQ ID NO: 4165471 - RNA, 129 nt, Human
uaucuuuuuuuugagcagugagauuaacauuuuacaguuuaccaagaauauuguauauuuauuuauuuaauaucuuggcaagguguuggugauuuuacacaagaggauacagaaguucagaaucaguua

SEQ ID NO: 4165472 - RNA, 88 nt, Human
uaugaaacuuaaaauacauaugguaauucuugaaaaguguuucacacagugcuuugcaaacgauuaccacaugauaaaguguuucaug

SEQ ID NO: 4165473 - RNA, 129 nt, Human
uaugaacaaggggccacgcuuuuuuuaguuugcacuggacccugcaaaucaggugucugguucuggaugggaguaauacuuaccuugcagagucuaugagaacucaaugagauaaugucuaaaagucua

SEQ ID NO: 4165474 - RNA, 56 nt, Human
uaugaacuguacuguacuaagcuacgguaaaauuguuugguacaauuuagggcaua

SEQ ID NO: 4165475 - RNA, 129 nt, Human
uaugaagagugaauaggaaaaugaugaaauuguugcugcuuuuuacagaggcuuagaaucauggaaaucauuugcuuucagguauaaaagggaauaauuucauuuucuacuuuuuacuuuaaauuucug

SEQ ID NO: 4165476 - RNA, 91 nt, Human
uaugaccucuauuccagaacagggagaugggugaaagcggaaacauuuaggucaccuuccucauccauuucucuugguuuaucggguuaua

SEQ ID NO: 4165477 - RNA, 71 nt, Human
uaugaccuggcaauauuaacaguacuuaucucauagaaauguaguacuggguauguuucuggccagucaua

SEQ ID NO: 4165478 - RNA, 73 nt, Human
uaugagaaaggagaaugacuuucaggaaaagcucuuugcuauaaugaugaauaaggguucucuuugacucgug

SEQ ID NO: 4165479 - RNA, 75 nt, Human
uaugaggucuaaagaauauagaggucucuaggauugaacuuaauuuacugucuguacuucuugcaaggcuucaug

SEQ ID NO: 4165480 - RNA, 73 nt, Human
uaugaguucucuccggggcauccaaaccaaggaaguugcuauucucugguaguggcuuuggagggagguucua

SEQ ID NO: 4165481 - RNA, 56 nt, Human
uaugaguuuuaaaaaggccuucugcaccucaagggaggcuuggauagauauucaua

SEQ ID NO: 4165482 - RNA, 63 nt, Human
uaugauauuuuugaaagucuuuuuucaccucuguggugaaaugaaaguucuuaaaaugucaug

SEQ ID NO: 4165483 - RNA, 76 nt, Human
uaugaucaaucuaauaaaacugaugccuuuaaaacauuucuuuugaacauuugauggaguuaguagguugaacaug

SEQ ID NO: 4165484 - RNA, 61 nt, Human
uaugaucccuuuugaaauaagcuuuuacacauuucuaaugcuuucuucagagcggcucaua

SEQ ID NO: 4165485 - RNA, 77 nt, Human
uaugaugcaaaagaggauuguuacugauuagcucuuguaacuacgaagcuggauuaaauauagcuuucuguauuaug

SEQ ID NO: 4165486 - RNA, 92 nt, Human
uaugaugguggcauuacaagcuggcgcaguuaagauccuggaagucagguuugccuauguuguaacugcacuaugcugugccaugcaccgua

SEQ ID NO: 4165487 - RNA, 85 nt, Human
uaugauguugaacugaucugcagaaagcugagaugauuaaucggcuuaauucacaaaguuuucuguuuaucuguccaauuucaua

SEQ ID NO: 4165488 - RNA, 72 nt, Human
uaugauguuuagcuucacuuuuguugaugcggucacacagauuuugcacagagggaggcauaaaauuuuaua

SEQ ID NO: 4165489 - RNA, 79 nt, Human
uaugauucuuuuugucccuucacauuucaauaauucacauuuguuaaaacuagugguugggacuaaagaaaaggucaua

SEQ ID NO: 4165490 - RNA, 83 nt, Human
uaugcaaaguccuaagaaagaaaugcaagagggaaggccagaaaaaugcauauauucuuuauuaguuuagugagcuuugugua

SEQ ID NO: 4165491 - RNA, 72 nt, Human
uaugcaacacuguggucuuuucaguaaaggaucauucacccuuugcuuucuuuuagacuuaguguuuucaua

SEQ ID NO: 4165492 - RNA, 79 nt, Human
uaugcacauugaugcaauaauuaugaaaggaaaacaaaucuuuccuuucaccaaaaaguguuguguuaaagcgugcaua

SEQ ID NO: 4165493 - RNA, 66 nt, Human
uaugcagauaguuugccauucauacugacaguucugccaggucagauggugcaauuaucgugcaug

SEQ ID NO: 4165494 - RNA, 87 nt, Human
uaugcagcagccauaauagcagauaggacauuucauucucagccaccuucuggcaaagauggaauucaguccugggcuuuuugcaug

SEQ ID NO: 4165495 - RNA, 69 nt, Human
uaugcaucuauugauugccuggcuaguuuaauucuugacugaccaaaugaaaggauggauggaugggug

SEQ ID NO: 4165496 - RNA, 105 nt, Human
uaugcauuuguacaagcuuguuuaucugcacucucuuguaguguauuuacuuaacaagccaaguuagauuguaaucgaaagcaggugcugucauaucacugcaug

SEQ ID NO: 4165497 - RNA, 56 nt, Human
uaugccaaaauguuacauuucuuucggaaaaugggaagaggaagcauuauggcaua

SEQ ID NO: 4165498 - RNA, 70 nt, Human
uaugccacauguuguguuaagcucugagcauucaauggucaaugagaaagacacagucuuauggggcaua

SEQ ID NO: 4165499 - RNA, 79 nt, Human
uaugccagaaggcagaauuuaucuuccauggacuaacauuuugucagaaaaagaaauugauaaucugguuucuggcaua

SEQ ID NO: 4165500 - RNA, 62 nt, Human
uaugccuccucaauacuuucguugaaauccuaucccuuaaggugaugguauuaggaggugug

SEQ ID NO: 4165501 - RNA, 64 nt, Human
uaugcuaaaugaccuuagaccacuuauaaaaugcauaugagugcuuuaaauguuauuuugugug

SEQ ID NO: 4165502 - RNA, 62 nt, Human
uaugcuaguguccuugugcuucuucuguaugcauagacacaaaucucagugacaccggcaua

SEQ ID NO: 4165503 - RNA, 94 nt, Human
uaugcucuacauacccuugcugugggagaugaccuggcuuagcuaucccuuccugggccacgucaucucccacaacaaggauauauagagcaug

SEQ ID NO: 4165504 - RNA, 65 nt, Human
uaugcuggauuggagcaauagagucuuggggcacuuuuagagauccguugcaaccaauuagcaug

SEQ ID NO: 4165505 - RNA, 62 nt, Human
uaugcuguguauucaguguugaagaaggacguagugcuuguccucagggaguuuacagcaug

SEQ ID NO: 4165506 - RNA, 61 nt, Human
uaugcuuuacuuuucauugugaaucauugugaauauauacaaaggugaaaagugaagcaua

SEQ ID NO: 4165507 - RNA, 55 nt, Human
uaugcuuugaaaaugugcugaaaucauuuauuccuuagcauguguagaaagcaug

SEQ ID NO: 4165508 - RNA, 72 nt, Human
uauggaaaacagaaguaaggaacagaaacagcuggauggguucuagcuuggcguuugccuucuuugaacaug

SEQ ID NO: 4165509 - RNA, 55 nt, Human
uauggagauucaaaagcaucuugaaugauggcauuuauuaugcuucaucugcaug

SEQ ID NO: 4165510 - RNA, 90 nt, Human
uauggaguuagugagaauguugucaguugcagggagaauggauaagggcauugcauuaagguaauuguauaauauugcauuuccuccaua

SEQ ID NO: 4165511 - RNA, 74 nt, Human
uauggaucugaagauaugagcuuuaugauuaauuccuauaaauaaguuaugaaguuccuguuacaguggucaua

SEQ ID NO: 4165512 - RNA, 83 nt, Human
uauggcaucuguugagaguuucauaauuuccaugacaggcuuaucuuuaguauguagaaaucucugaacuuaauaaugccaua

SEQ ID NO: 4165513 - RNA, 98 nt, Human
uauggcauuguggcuucacugcauuuguuuguuuguuuuucugggauaaucaacaggauggugagaaagauacauagcugugagcacacacaaccaua

SEQ ID NO: 4165514 - RNA, 60 nt, Human
uauggcuuugggccaaaucuacugucuguucuuauaaaguuuuauuggaacaaagccaug

SEQ ID NO: 4165515 - RNA, 126 nt, Human
uaugggaguaguaggccacuaaaguugaaaguuauucaaaagaggaacuucaucucuaugccauuuuucuaaguguguugaagccauuccacugguggcaaacuuucacuugguccuggccccaua

SEQ ID NO: 4165516 - RNA, 59 nt, Human
uaugggguuuuuuuuaagcucuggaagcccacagccuucagaaaagagaaaaucuuaua

SEQ ID NO: 4165517 - RNA, 83 nt, Human
uauggucuucugaugagucuucugccuaaagaaguaggacuacacagcuaauuuuucuaggaagaauuucuuggccagccaug

SEQ ID NO: 4165518 - RNA, 89 nt, Human
uauggugguaacaaacacaaugccuacuaguacuauuuuguggcacugcuucaauuugugcuaaggcaccgguagucuuauccacugua

SEQ ID NO: 4165519 - RNA, 110 nt, Human
uaugguucuuauauaugauaaauauuuucuauacugaaacuauauguugacaaaugaacaacauguacuguuggugaagaggcuguaagugucaaauacuaauuaccaug

SEQ ID NO: 4165520 - RNA, 80 nt, Human
uaugguugcagaacuuaaagacagagugcuuacuccaccuccaucugugagagcuuaacaagucaugacuucuguccaug

SEQ ID NO: 4165521 - RNA, 91 nt, Human
uaugguugccagacuuaggcagggccaguggguugaaaggcaguaauacuuugcuaggcaauaauugguuuaggggugcugguuagcugua

SEQ ID NO: 4165522 - RNA, 69 nt, Human
uauguaaaaaugcacaguaaugagcugguuguuucaaaauuccagcuuuaauuguguguuacauucaua

SEQ ID NO: 4165523 - RNA, 55 nt, Human
uauguaaugcucuacccacaugaagcuuccucucuagugggacagacauuacaua

SEQ ID NO: 4165524 - RNA, 77 nt, Human
uauguaauguugucucaaguuauuuguguuuucaugcuuuacaauuaauuccaaguugagacaugcaaagauacaua

SEQ ID NO: 4165525 - RNA, 112 nt, Human
uauguacaaaugccaaguagacaugggcagaaguggcaucauuaacaucuacuguaucauaguuaaccauccacucauguucauucuucacugccauugguucuuuaaagua

SEQ ID NO: 4165526 - RNA, 112 nt, Human
uauguaccagucacgugcaggauauguauuaacauuaauaaaauggcauucauaggauaccauuaauauuaguguuaauauuaguuagcaugaauaggaugacauggacaua

SEQ ID NO: 4165527 - RNA, 64 nt, Human
uauguagcagauauuugugcacacgaguacaugcaaguaugagugugcauguguguguugcaug

SEQ ID NO: 4165528 - RNA, 89 nt, Human
uauguaggaaaguuuuugauguuggaggagagauguguuuugaaauguuggaaauauaauuucugccucaauaaugcccucccugcgua

SEQ ID NO: 4165529 - RNA, 71 nt, Human
uauguauaaagcacuaggucacacaaguuauguuauuuaauucacauaaccgugugacaugggcaugcaua

SEQ ID NO: 4165530 - RNA, 58 nt, Human
uauguauaugguagaaguaugugucuauggguacauauauaucuuacacauauaugug

SEQ ID NO: 4165531 - RNA, 77 nt, Human
uaugucauggcugaaauucuucgcuugcaauagauugugacccucucuaggauaagcauauuccagucauguccaua

SEQ ID NO: 4165532 - RNA, 74 nt, Human
ucgccucuuugaagaccuuaucucuaaauagcacuacagucugugcuacuggggauugguucuucaacauguga

SEQ ID NO: 4165533 - RNA, 68 nt, Human
ucgccugaggcugggaagguaaaguuguagugagccgugauuacuucauugcauuccagccuggguga

SEQ ID NO: 4165534 - RNA, 69 nt, Human
ucgccuuucugagaugugaaucugucaaauguaaaacauuagaagaaaagcacuuagagauuuggauga

SEQ ID NO: 4165535 - RNA, 125 nt, Human
ucgcgcgccgcguacgugcagcaaccgacuccgcccagcgaggcggagccuagggaagccgcgggcggcccgccgcuguccuggagcugcugcugcugcugcggcggcugcaccggcggcgccga

SEQ ID NO: 4165536 - RNA, 61 nt, Human
ucgcgcggcggaacgcuccgcgcugcgccgguggcggcaggauacagcggcuucugcgcga

SEQ ID NO: 4165537 - RNA, 106 nt, Human
ucgcggguguuuguucuggaaacguugacuuagggcuugaccgcguccugaaaccguggcacucaggcccagagucacggauccauguaaaggauuuuucccguga

SEQ ID NO: 4165538 - RNA, 78 nt, Human
ucgcucccugcaggaccugggcauggcgcagcacaguuccucgauguuugcccucagcagcagcuccugccacaguga

SEQ ID NO: 4165539 - RNA, 75 nt, Human
ucgcucugccacugaggcuggagugcagcagcaugaucucggcucacugcagcuccgccucccggguuuaagcga

SEQ ID NO: 4165540 - RNA, 76 nt, Human
ucgcucugucgcccaggcuggaaugcaguggcgcaaucucagcucacugcaaccuccgccugcugggaucaagcga

SEQ ID NO: 4165541 - RNA, 102 nt, Human
ucgcugggcuggggaaaguccagguccucauuccauccuucuuuagccccagccucgggaugggaaccagcagagggccuagacuauccagaaacccccuga

SEQ ID NO: 4165542 - RNA, 77 nt, Human
ucgcuugaacccaggaggcggagguuguggugagccgcgauugcaccauugcacuccagccugggcaacaagagcga

SEQ ID NO: 4165543 - RNA, 76 nt, Human
ucgcuugaacccccgaggcagaguuugcagugagccaagaucgugccacugcacuccagccugggcgacagaguga

SEQ ID NO: 4165544 - RNA, 75 nt, Human
ucgcuugaacccggcaggcugagguugcagugagcugagaucgcgccacugcacuccagccuggcgacagagcga

SEQ ID NO: 4165545 - RNA, 72 nt, Human
ucgcuugaacccggguggagguuguggugagccaagaucgcaucauugcacuccagccugggcagcaagaga

SEQ ID NO: 4165546 - RNA, 77 nt, Human
ucgcuugaacccuugggguggagguugcagugagccgagagugcgccacugcacuccagccuggggugacagaguga

SEQ ID NO: 4165547 - RNA, 76 nt, Human
ucgcuugaaucugggauguggagguugcaaugagccgagaucaugccauugcacuccaggcugggugacagaguga

SEQ ID NO: 4165548 - RNA, 57 nt, Human
ucgcuuuaauggucuucacagcacgucguguuuaugagucagaggacccuagagcga

SEQ ID NO: 4165549 - RNA, 56 nt, Human
ucggccacuguugcuagacagagcugucacugaguacgcuguugagauguggcuga

SEQ ID NO: 4165550 - RNA, 95 nt, Human
ucggccuccugacgucagugaagcuuuuacuggccuagacacuuuggccuugggcccagaaagcaucauuguggacagcccagaccugaggcuga

SEQ ID NO: 4165551 - RNA, 64 nt, Human
ucggcgcagucgggaggcggggucggucuccgacuucccaacgugggccucccagcugcgcugg

SEQ ID NO: 4165552 - RNA, 65 nt, Human
ucggcggcuucagccgggcacuuaaugaucccuuucuggggauuguuaccagcuggagguggcgg

SEQ ID NO: 4165553 - RNA, 68 nt, Human
ucggcuuugagggguuuugaaucgggggaaggaaacccgaucgcuagaccaaacccacucagcgcuga

SEQ ID NO: 4165554 - RNA, 130 nt, Human
ucgggagucaucgcugggcuggggaaaguccagguccucauuccauccuucuuuagccccagccucgggaugggaaccagcagagggccuagacuauccagaaacccccugaccccagaagcuccguuga

SEQ ID NO: 4165555 - RNA, 63 nt, Human
ucgggcgccgcggcucucaggcgggccccucugggccggcugcuucugagccccggcgcugga

SEQ ID NO: 4165556 - RNA, 69 nt, Human
ucggggaucucuguauucugauauucacuuuugcacaaggaguguguucagcuugcagaaagugccugg

SEQ ID NO: 4165557 - RNA, 63 nt, Human
ucgguguuguacaguauauuucaaagccaggaaauuggcacugggaugcuacuguuaacuaga

SEQ ID NO: 4165558 - RNA, 81 nt, Human
ucguagcuacuuagagccguucuuaauguuugccuuacacauuaaaauuagagggggagagaaugugcguuaauaauacga

SEQ ID NO: 4165559 - RNA, 57 nt, Human
ucguagcugugccuuaaggucaucaucucacagaggaggggacaggcucagugacga

SEQ ID NO: 4165560 - RNA, 79 nt, Human
ucguagucacuggugugagaggagcaaagccaccauucccuuuacagguuguugcucuucauacaucaaugaauuaaga

SEQ ID NO: 4165561 - RNA, 120 nt, Human
ucguauacugaaguucuaagccccaguaccccagaaugugaccuucuuuggaaauagggucauugcagauaugauuaguuaagaggagaucauacuggagugggcuuuaauccaauauga

SEQ ID NO: 4165562 - RNA, 64 nt, Human
ucgucauccagaacuucaaugcacacacuacugaaucgcauugagaauccauuugagaugagga

SEQ ID NO: 4165563 - RNA, 63 nt, Human
ucgucgggggucgggggucgggggucggggguugggggcuccugucccggggaccgccgagga

SEQ ID NO: 4165564 - RNA, 75 nt, Human
ucgugaaacuguuuuucugugcacaguagcuuuagauuacuaccagacugugcacacaaaaauagauuuuaguga

SEQ ID NO: 4165565 - RNA, 56 nt, Human
ucgugcaaaggcccaugugggucaaagucuagaaacaacugugggcuggugcauga

SEQ ID NO: 4165566 - RNA, 115 nt, Human
ucguguagugcuaagaagauaguaugugcccaggaaauaaaagugggcuugucaagccuggaagccaugcucaguuccuggagcauccucaguaccuguuuuguuaucuauguga

SEQ ID NO: 4165567 - RNA, 74 nt, Human
ucguugaagggggauuugugcuuguaacuccuauuaauaggacuugcauguguaaaucuuccuccugucaauga

SEQ ID NO: 4165568 - RNA, 75 nt, Human
ucguuuuagcugugaagagcuaaaaaauggaaaaugcauauuucauguaaaguucaguacaguuuuuuaagauga

SEQ ID NO: 4165569 - RNA, 86 nt, Human
ucuaaaaucccaugaugcugagucuugauauguagaucuguuuucuuccauuauguugagcauucagugaucucuuuggauuugga

SEQ ID NO: 4165570 - RNA, 61 nt, Human
ucuaaacaguacuggacaaggagucaggggaucuggguucugauaccagcacugugacaga

SEQ ID NO: 4165571 - RNA, 77 nt, Human
ucuaaagaucaagugggccuuggaucgcuaagcuggcugugaugcuauuuaugcaaguuagggucuauguauuuaga

SEQ ID NO: 4165572 - RNA, 103 nt, Human
ucuaaauaaaguuuguagguuagauaacaguagaauaucaacaucaauuuccugauuuugauaaucauauugugguuauguaggagaauguucuuuuuuuagg

SEQ ID NO: 4165573 - RNA, 96 nt, Human
ucuaaaugaugcaaacauuuuaaguauuuuuggaaaauaaaaucauaaacuuauugauagaaagcuugggguguuuaaaaauaacaucagauugga

SEQ ID NO: 4165574 - RNA, 70 nt, Human
ucuaacagaaucaaggcugcuucagacuagugacaucuuugucgaagguaacgcagcuugacccugugga

SEQ ID NO: 4165575 - RNA, 75 nt, Human
ucuaacagccaggggacacuccugcuugggcugagacuugugcagcucuaguaggaaugucccucugugcuuaga

SEQ ID NO: 4165576 - RNA, 79 nt, Human
ucuaagcgcuuucgaugcauucuugcuuuacuucauuauuuuauugaauucuccaggaauguaugauacagugguuagg

SEQ ID NO: 4165577 - RNA, 79 nt, Human
ucuaagcuccaucuauuggcaacauggcuuggaucaaccuuuucuugcccaaauguuucaagagaaaaagagacuugga

SEQ ID NO: 4165578 - RNA, 70 nt, Human
ucuaaggauacaagguggagucaggaaaaggaugucccuuucuccguugccuccuugagcuuccauuaga

SEQ ID NO: 4165579 - RNA, 66 nt, Human
ucuaaggauguuaucugugcaggugggacugaauugguuucuugccacuaauaaauauucuuaaga

SEQ ID NO: 4165580 - RNA, 58 nt, Human
ucuaagucccaagauuagguuggaaaggguauuucuuguuggcuuaguuuggguugga

SEQ ID NO: 4165581 - RNA, 86 nt, Human
ucuaaguugaaguaugcugagucguauuauuuuuuaaaugcugaaacuuuuugaagcuauuuugcauucaguuauuucaauuaaga

SEQ ID NO: 4165582 - RNA, 61 nt, Human
ucuaaguuuggugauuaccaauuaggcagcuagagaaagucgaugggacaguaaacuugga

SEQ ID NO: 4165583 - RNA, 68 nt, Human
ucuaaguuuuuccucaggaucugugacuaguggucucaugguccagacauuucugagguaaaaguggg

SEQ ID NO: 4165584 - RNA, 82 nt, Human
ucuaauaaauuuuguuggcauugcccuuuuuuugaaguccaaaucuuucaaauuugguaugcaagccaucaaguuuaaaaga

SEQ ID NO: 4165585 - RNA, 60 nt, Human
ucuaauauguauuuuaacguguaagggcuuggauacaacuacccuagaauacauaguaga

SEQ ID NO: 4165586 - RNA, 64 nt, Human
ucuaauccacugucaacuuugaauaacaccaaaaaauucacaguaaguaggauaguugauuaga

SEQ ID NO: 4165587 - RNA, 87 nt, Human
ucuaaugcaauuaucacuaaggggcgagcaagauguuuauaugaucuuaaaaugucugucugcacguugcuuauuaguugcaaaaga

SEQ ID NO: 4165588 - RNA, 130 nt, Human
ucuaauggcaguucuguuuucuuccacauaaggauuuuuagagaggcucuguaaaauguccccuuucgacagugguuauuuuaaaugucuucuuugcccuuuugugcuggagucaaggauucucacagga

SEQ ID NO: 4165589 - RNA, 87 nt, Human
ucuaauggcauugcuuccagacaaggucaaauuaaauguucaauuuagacauucuucagcuuugucaggcaagcaaugugaauuaga

SEQ ID NO: 4165590 - RNA, 90 nt, Human
ucuaaugugcuaucaaugauaggauucaccauuauuuuaugcaccauggaagaugaauaaagauucuaagaccaagauguguauauuaga

SEQ ID NO: 4165591 - RNA, 57 nt, Human
ucuaaugugugcuucuuugccccaaacagucauagggcagaaggucuaagcuuuaga

SEQ ID NO: 4165592 - RNA, 61 nt, Human
ucuaauguucugggagagaagcuguugggucuuuccuaccuaaucugguagaaauguuaga

SEQ ID NO: 4165593 - RNA, 72 nt, Human
ucuaauugagguaguacuuauuauuggaagccuaugcaaagguauuggaauggggauuauuuugcaauugga

SEQ ID NO: 4165594 - RNA, 87 nt, Human
ucuaauuuguaaaagaauaccauaauauagaaagauguguccacuguuugcucuuuuguuucuauaguauacuugguaugaauuaga

SEQ ID NO: 4165595 - RNA, 57 nt, Human
ucuacacaucuggagaagcccugugguaggaccacagcaugcuguccagggugcaga

SEQ ID NO: 4165596 - RNA, 92 nt, Human
ucuacauuagacauuuauuucugcucauccuaguggagcaugcccaaauaucugcuggcuuuaaggaugaccagauggagguacuaucuaga

SEQ ID NO: 4165597 - RNA, 76 nt, Human
ucuacccaaaagguaagaaggaacucaccaauuccuaauuuacaaaggugguuuaaaguagcuuccuuuugguaga

SEQ ID NO: 4165598 - RNA, 56 nt, Human
ucuaccuuguuuuagcauuuuggaagauaaauaacaauaugcugagugaaggcaga

SEQ ID NO: 4165599 - RNA, 125 nt, Human
ucuacgugaauauuuauuuaugcaguuguguuauuuccuugggguacaguucuuccagugucauuggcaucaaugaauaugugacuuugauuucaaguguaaacaaaccacugguucacggcagg

SEQ ID NO: 4165600 - RNA, 56 nt, Human
ucuacguuuugaaauaagguggcaaauaaauaugccaccuuauagauaaaauuaga

SEQ ID NO: 4165601 - RNA, 57 nt, Human
ucuacuagguguacuacugcaggaauaucaugcucagguaguuaacagucaaguaga

SEQ ID NO: 4165602 - RNA, 77 nt, Human
ucuacugaaaucugaacaacagcugucagcugaaaguguaagcucucugacuuccucguuuuucauguuucucugga

SEQ ID NO: 4165603 - RNA, 55 nt, Human
ucuacugagugcugagauuuuggcugaaauugcccggauccuucggccuagugga

SEQ ID NO: 4165604 - RNA, 55 nt, Human
ucuacuggacaugauuuuuuugucccuauaugggaucuggaaauucugccagaga

SEQ ID NO: 4165605 - RNA, 80 nt, Human
ucuacuggcuggguuccuucgccaugagcauccugguguuccuuacaggaaacauucuugguaaggacaaggcuuuggga

SEQ ID NO: 4165606 - RNA, 76 nt, Human
ucuacuguuucccaaauguuuuuagguacacaggaguuauuugauuaagucugguaaacugaaaaauauuaguaga

SEQ ID NO: 4165607 - RNA, 88 nt, Human
ucuacuuauauucaauuuccagaauagggaaauucaugaagacagaaaauagauuggugauuuccuaggucuggagaagauggggaga

SEQ ID NO: 4165608 - RNA, 61 nt, Human
ucuacuuccuuauccucaaggcacacaccagaguuccacugggugaggacagggaaguagg

SEQ ID NO: 4165609 - RNA, 60 nt, Human
ucuacuucuagaaguuuaggcaucaucacucugucuaagugccaccucucuagcaguaga

SEQ ID NO: 4165610 - RNA, 99 nt, Human
ucuacuuuggccugauugucuuaaaagcuggcucugauauuaacggacggauguucacaucuuuaauuuggaucagggccacugacacaauagaguaga

SEQ ID NO: 4165611 - RNA, 127 nt, Human
ucuagaaacgauuucuagaaacagguuucuagaaacgauuucuagaaacagguuucuagaaacgauuucuagaaacagguuucuagaaacgauuucuagaaacagguuucuagaaacgauuucuaga

SEQ ID NO: 4165612 - RNA, 76 nt, Human
ucuagaaaggcagucuaaguuaauuuccacaauuuucauuguauuggcaaagaacuugaggcuuuguuguucaaga

SEQ ID NO: 4165613 - RNA, 57 nt, Human
ucuagaacuucucuaaaaugaaaaguuuuuuaagcacuucagggugagaguucuagg

SEQ ID NO: 4165614 - RNA, 66 nt, Human
ucuagaauucccuuuugacaauccucgaaauggcaguuggucucaugaaagggaaugaacuuugga

SEQ ID NO: 4165615 - RNA, 57 nt, Human
ucuagaauuugcguagguuagaugcuuucagcagaaagagcuauguaaauaucuaga

SEQ ID NO: 4165616 - RNA, 73 nt, Human
ucuagagaaguuuccuuuugaaaaauuauaguauuucagcugaaguaaggggaaaaaaggaauauucuuuggg

SEQ ID NO: 4165617 - RNA, 58 nt, Human
ucuagagauacauuggucauuuaacuuaaugucacagguuaccagcuguaucacuaga

SEQ ID NO: 4165618 - RNA, 74 nt, Human
ucuagagccacuguugggcacuuuccuuacuggccuugaccugucugggauaucgccuaccaguagucuccaga

SEQ ID NO: 4165619 - RNA, 82 nt, Human
ucuagagcuugaaguuuuguaacuuaauaaugguguaucuaccugucuucuacacugaauugcaauuuucuuaaggucuagg

SEQ ID NO: 4165620 - RNA, 93 nt, Human
ucuagauaaacccauuguuaaauugaaaauauuguagaccauaaaugcacauaugguguaugauguuuucaauuuaugauggguuuauuugga

SEQ ID NO: 4165621 - RNA, 57 nt, Human
ucuagauccugguguuaacugggaaaacacuuaaauaacauuccauggaucugcaga

SEQ ID NO: 4165622 - RNA, 63 nt, Human
ucuagcagggaaagcagagaauaaacaaacaaauauauuuucagugugugauaccugcuguga

SEQ ID NO: 4165623 - RNA, 61 nt, Human
ucuagcuacaaaucugauaaguggguagacuaauuggccacuauuauauuuguugugcaga

SEQ ID NO: 4165624 - RNA, 64 nt, Human
ucuagcuaguuccuggguauggaagggauacuaaggcaggcccauuucugggagacaugcuaga

SEQ ID NO: 4165625 - RNA, 130 nt, Human
ucuagcuaugucuuuuaaacugcugccagauauguucuuccuuuuguaccuucugaaaucuguauaaccugggguucaacaaggcugucaaaaguuucaagaacugaucugaugaacuacauuaaagcua

SEQ ID NO: 4165626 - RNA, 72 nt, Human
ucuagcugcuugaaauaccauagugaauaaggcagacacaguuuuacucuuauggaaauuuuaacuagcaga

SEQ ID NO: 4165627 - RNA, 67 nt, Human
ucuagcugggucucuguuuucucaucucuacaaggggguugagaaucgaaugagacacuggauuaga

SEQ ID NO: 4165628 - RNA, 85 nt, Human
ucuaggaaauggguaauaacuugugauuaaaugcagauguuaaccugaaaaauucaguuaaucacagauauuaaacaugccugga

SEQ ID NO: 4165629 - RNA, 64 nt, Human
ucuaggaagaacaucuaauuacagguaguaauuacagguaguaauuagauguugauuccugaga

SEQ ID NO: 4165630 - RNA, 62 nt, Human
ucuaggaugaaaauccagcuuauaaucuaucuucaauuuuuaugagcuuauuuauccugaga

SEQ ID NO: 4165631 - RNA, 66 nt, Human
ucuaggauucuuccucuggcuccaaccuugcucuagaugaguggagccaaaaagggaaggagaaga

SEQ ID NO: 4165632 - RNA, 62 nt, Human
ucuaggccuggcaccuggcucccucguuccuucuucaccagugagcagcuguagggcaagga

SEQ ID NO: 4165633 - RNA, 85 nt, Human
ucuaggcugccugcccccaaagcccucgcauuuacaaaucagccagccagaggggcuucagcuggggauggagcagguugccagg

SEQ ID NO: 4165634 - RNA, 75 nt, Human
ucuaggggcaucagugugugcacacagcauggcuugugaaugcggaagugccugugugcauaguugugcucaaga

SEQ ID NO: 4165635 - RNA, 70 nt, Human
ucuagguauaaugaaugagguggcagaaaguuuuucgguuaaaaggacuaaaauccauuuaaugccugga

SEQ ID NO: 4165636 - RNA, 69 nt, Human
ucuaggucuguguccuggaaaucuaguucugacuuuuaugaagugaauauuuuuagacacccaacuaga

SEQ ID NO: 4165637 - RNA, 62 nt, Human
ucuaggucuucagacacuauuaaugcagauuguagccucuagguccugaagauuuuacuaga

SEQ ID NO: 4165638 - RNA, 63 nt, Human
ucuagguuagaacccagaaaagugcuaaguuagaggguagcuagcucuagguuagaaccuaga

SEQ ID NO: 4165639 - RNA, 56 nt, Human
ucuagguuucuuuugcuccuggaccuucauacuaguuccaguggccugaaucugga

SEQ ID NO: 4165640 - RNA, 106 nt, Human
ucuaguauaaucuucaugaaguuauggauuucucugcaccuagaacagugccuguuagugcacaguagauguuugagaaguuuauguucaaugaaagaauaauaga

SEQ ID NO: 4165641 - RNA, 57 nt, Human
ucuagucagugcacagacacuugugagcacccacugugugccaggcgcuggucuagg

SEQ ID NO: 4165642 - RNA, 57 nt, Human
ucuagugccuuccuucacccuugcugcuuccuucuagagcugaaguuaggcugcaga

SEQ ID NO: 4165643 - RNA, 95 nt, Human
ucuaguguuacauuccacugucccauuaaguauuucaguuacuguucuucccagggcaaauuguguguuaaugguguuuuauauguaauauuuga

SEQ ID NO: 4165644 - RNA, 57 nt, Human
ucuaguuaauuccuuugguguuacuuauaauuuggguagagaggguaguagacuaga

SEQ ID NO: 4165645 - RNA, 64 nt, Human
ucuauaccaaaaaaauucuugucugccuaaauuuaggaagauggauuuagauuuuuuuggaaga

SEQ ID NO: 4165646 - RNA, 79 nt, Human
ucuauagaaggcgaauuagagaucgcaauaacgggccagcuuccaugaugaccccagguuguagugaugucuauguaga

SEQ ID NO: 4165647 - RNA, 63 nt, Human
ucuauagcaaauucuuuaggugcuuuccaugcauguguuguaagcuuuaaggaauuuuaugga

SEQ ID NO: 4165648 - RNA, 110 nt, Human
ucuauauauaccuuuccauuauaacaugacacaaaguuugucagaaauuacuuggcacacugggaguucuugauaauuuugauggaauaugauguaaugguauauaugga

SEQ ID NO: 4165649 - RNA, 60 nt, Human
ucuauaucuuggcugcugugaauaaugcugcaaugaacauggcagcucagauaucucaga

SEQ ID NO: 4165650 - RNA, 84 nt, Human
ucuauccagcacagaacuggagucaugacgguuggagguagguaaucucacagcuguuuucuccaggcagugugaccaaguaga

SEQ ID NO: 4165651 - RNA, 63 nt, Human
ucuaucuccuuccugccccagugauaaggccucagcuuacuccgcccugcaggaaggcauaga

SEQ ID NO: 4165652 - RNA, 67 nt, Human
ucuaucugcuugggaggcaagcauuccauuaaugaugcggauaguuagccucucaguucagaaaaga

SEQ ID NO: 4165653 - RNA, 123 nt, Human
ucuaucuuugaaaaugcuuugucauguguggauucaucucaaagagauaaaccuuuuucuaauucagcauguuggaaaugcucuuuggauagaauuacaaagggaaaguuuggagcauauaga

SEQ ID NO: 4165654 - RNA, 56 nt, Human
ucuaugcacuggauuacaaagcaaguaccaaaaagcucugcauuuguguguaugga

SEQ ID NO: 4165655 - RNA, 74 nt, Human
ucuaugggggcucacagcagaccacuacuaguaggaggcuugccucuuaccucugccugguccuuuuuuguaga

SEQ ID NO: 4165656 - RNA, 56 nt, Human
ucuaugucucgacccaagacaacuaugucacacuaugucuugggucgagacauaga

SEQ ID NO: 4165657 - RNA, 60 nt, Human
ucuauguuucucugcagugccucucacuauggaaguuaggcacucgacagaaauauugga

SEQ ID NO: 4165658 - RNA, 57 nt, Human
ucuauguuucuuggcuaauuguucagugaugccaaaggaaaguugagaaacaaugga

SEQ ID NO: 4165659 - RNA, 108 nt, Human
ucuauuauaggaggaucaggaauuguuucuucagggaagcuuguuaauucuguaaucgcucaauuucauauguaucaccuagcccagugccugauuugaugagauggg

SEQ ID NO: 4165660 - RNA, 62 nt, Human
ucuauuccuggauuuauucugaguggguaucucucuuguucuuaaugaguuccaugaaaaga

SEQ ID NO: 4165661 - RNA, 55 nt, Human
ucuauucuagaggguagauggcgaaugauaagauuuguuuacucuagaggguaga

SEQ ID NO: 4165662 - RNA, 57 nt, Human
ucuauucucagguaagaauguguaagcuguagcugccagaguuacaugagggucaga

SEQ ID NO: 4165663 - RNA, 104 nt, Human
ucuauucucugagcacaaaguacaccaacaccaguagaaaaaaaccuguuugcuuccuguguguugguggcagaaugucagagccuguaaaaaauucgaaugga

SEQ ID NO: 4165664 - RNA, 85 nt, Human
ucuauucuguucuauuggucuaugugucugcuuuuaugacagcaccaugcuguuuuaguuacuauagcuuuguaguagauuuuga

SEQ ID NO: 4165665 - RNA, 58 nt, Human
ucuauugccauguggaagggggagcagaugcauucugcauuccucacagggcagaaga

SEQ ID NO: 4165666 - RNA, 60 nt, Human
ucuauugccauuuuccagaauaguguguaaaggaauauaauuuggggaaagugguguaga

SEQ ID NO: 4165667 - RNA, 62 nt, Human
ucuauugccugaugcaauuugagaauagaacuugugccaacucucugugcauuaucaauaga

SEQ ID NO: 4165668 - RNA, 65 nt, Human
ucuauuguaggcauguagcuuggugccaccaguugauggagauugggcuaguuugccauuuuagg

SEQ ID NO: 4165669 - RNA, 61 nt, Human
ucuauugucuucaacucuacuuuugagccagaccucaaaauagagccugugagauaaaaga

SEQ ID NO: 4165670 - RNA, 73 nt, Human
ucuauuuagcagcaggacuggcccacaggugcuuuuacagcggcuggcaagugucugcucaugaaugaaugga

SEQ ID NO: 4165671 - RNA, 89 nt, Human
ucuauuucaagcuaggaaauguggacuuaauucuaaaagcuaugagacaccucucacaagcucaaggauuaguagacuugaauuauaga

SEQ ID NO: 4165672 - RNA, 108 nt, Human
uaugucauuaauacuuaugcucuuuuacguaccaaauuauaauacuggggcuuugaauacauauuuucugagacaacaucuaguuugguggauggaggggauggcaua

SEQ ID NO: 4165673 - RNA, 78 nt, Human
uauguccaugacagugauucccaaaguguuguccccaaaccagcagcaucagcaucaccugggaacuuguuagacaug

SEQ ID NO: 4165674 - RNA, 72 nt, Human
uaugucuacauguguacaguacauguguagugauguguguaugucuacauguguacaguacaugugugcaug

SEQ ID NO: 4165675 - RNA, 65 nt, Human
uaugucuaggaaagacacagagaguuucugugacaaagagaguuucugugucuuuccuagauaug

SEQ ID NO: 4165676 - RNA, 66 nt, Human
uaugucuggaaguguacuugucacuucugcucacaauacaugggcaaaacaagucacauggacaua

SEQ ID NO: 4165677 - RNA, 60 nt, Human
uaugucuggaccacugcagcccaauuucagaugggaugcaauaaaaguaggucuugcaua

SEQ ID NO: 4165678 - RNA, 82 nt, Human
uaugucugucagcauuuaggagaauuugagaaauguuuuucccuuugauauuccuuaaaugugaucuagauuugaguacgua

SEQ ID NO: 4165679 - RNA, 64 nt, Human
uaugugauagcuguagaauguauacacauauuuuucuguguguguaauaccuauguuuuacaua

SEQ ID NO: 4165680 - RNA, 86 nt, Human
uaugugcuggaaaauuaucuauuccaaauaucagcguguuuuacagccaaaagcagcuaaggaaucagaagagguuucaacauaug

SEQ ID NO: 4165681 - RNA, 63 nt, Human
uauguggcagaguucaggcguuuggcuccguaaucaugguuucaaacacaaguuugucaugua

SEQ ID NO: 4165682 - RNA, 120 nt, Human
uauguguauauccauguauacacgcauacacuuauacacauguguguauucauauguuuguguauauguguacauauuuguguauguguaugcaugugugugugcuugcauauauauaua

SEQ ID NO: 4165683 - RNA, 55 nt, Human
uauguguauguguguguguguguagauagauagacagacagacagauugcauaug

SEQ ID NO: 4165684 - RNA, 87 nt, Human
uaugugucaacuugacuggcucaugggaugcccagauaacugguuaaauacuguuucugggugugucucaccuucagugugagcgug

SEQ ID NO: 4165685 - RNA, 99 nt, Human
uaugugucgccacugguucuaagagcugugcuuauaccaauucauuggguccuggcaacucuaugaaauguacaagugcuuuuuucuaugugacacaug

SEQ ID NO: 4165686 - RNA, 71 nt, Human
uaugugugagacauaaaccuugagauauuaaaacugugugucuugauguggugggguuauggguacauuua

SEQ ID NO: 4165687 - RNA, 87 nt, Human
uauguuaaauuacuuguuuguucuuuauauuuagggauucauguagaagauaaugaccugaaauuugugguagaacaggcagacaua

SEQ ID NO: 4165688 - RNA, 95 nt, Human
uauguuauauauauguacaguuugguaaaaucauagugguaacugagagguugugucuauuguuauauuuacugagcauauacaugcaucacaua

SEQ ID NO: 4165689 - RNA, 60 nt, Human
uauguugucguggcuucucaacucugcuacuguaaugugaaagcagccauagacaauaug

SEQ ID NO: 4165690 - RNA, 56 nt, Human
uauguuguuuuucuuuaguggagcuacuauugagccucacagaugauugacacaua

SEQ ID NO: 4165691 - RNA, 78 nt, Human
uauuaaaaaaucaguaaaguaccaaagugugaguaugauuucauacacacccugaaggcuauugcucauuaacuagug

SEQ ID NO: 4165692 - RNA, 76 nt, Human
ucaaggacuucucacaggauuucuuuuaguaaauuuugauagguaugcuugaggagacuuuugggggagacuuuga

SEQ ID NO: 4165693 - RNA, 62 nt, Human
ucaaggaggaugagauuccagggucaauuguuaucauuaacaagaccaucuugucguucuga

SEQ ID NO: 4165694 - RNA, 90 nt, Human
ucaaggggaggagaguacccagaggcaugaucccagaaggugggugucuuugggggucacuuugggucuuuccacuacauucuccauuga

SEQ ID NO: 4165695 - RNA, 69 nt, Human
ucaagguaaggaucauuggcuuccccgaaacauuguaucugggaauacacacugauuuaucuauuuugg

SEQ ID NO: 4165696 - RNA, 84 nt, Human
ucaagguggucuguucaagguggcugauuaaauuucuugcuuuggaacauucgacagugauuuuuucgagcagaacuucucaga

SEQ ID NO: 4165697 - RNA, 98 nt, Human
ucaagguuuaaaggguauggcucuugaaaauuggaacacagaagaaaaccagccucaucugagugaaauauuucaagaauugccuucucagaccauga

SEQ ID NO: 4165698 - RNA, 86 nt, Human
ucaaguaauuccuagcaagucaaagacuagaacuaguuagccauuaauuauaaaaacuauuuuagauuauugacuggaaugacuga

SEQ ID NO: 4165699 - RNA, 60 nt, Human
ucaaguagaaaagugagaagagagcugaggaaauuguucuguucaaggcuuucuccuuga

SEQ ID NO: 4165700 - RNA, 84 nt, Human
ucaaguaguucauguuaucacagaagcaaaugaaaagucucccaaccuuuucauuuacuucuaugacaacaugcucugagagga

SEQ ID NO: 4165701 - RNA, 72 nt, Human
ucaaguaugaugauauuucuuguauuaaaggacagagaugccuaagucuuauuuaaggacaagaagacuuga

SEQ ID NO: 4165702 - RNA, 69 nt, Human
ucaaguucucagggcccuggggugcacugacaccaucaagguaguucauccugggaagucccagcuuga

SEQ ID NO: 4165703 - RNA, 78 nt, Human
ucaaguugaaggaggucugcauucuacaguucagugcuaggaugaaauagaaaaacaggcuucuauauuggacuuuga

SEQ ID NO: 4165704 - RNA, 58 nt, Human
ucaaguuguagguauuccugggucaucagggcagcacucauaccuauauuuacuuaga

SEQ ID NO: 4165705 - RNA, 63 nt, Human
ucaaguuuguuauuuuaaagcuucuuucaaggguuuaccuggaagcuacagaaaauaauuuga

SEQ ID NO: 4165706 - RNA, 90 nt, Human
ucaaguuuuacaauggcauuuugggguuccuguucuugguaguauugguaauauuagcagaaccagucagugagccauugaaugacuuga

SEQ ID NO: 4165707 - RNA, 90 nt, Human
ucaauaaauaguggaaaaaaggguauucuggcaugaagacuguuuauauguuauacuggauuugugcucauuuuccauuaaacucauuga

SEQ ID NO: 4165708 - RNA, 129 nt, Human
ucaauaagaaggcagguguguguuguuuauuaccuccaaacauuugggacccucucuucacugcauaggggccgugaguacuggaguuccaaaaggagagugggacacacaugaaacccauuuuaauga

SEQ ID NO: 4165709 - RNA, 95 nt, Human
ucaauaugccaaguauugggaguagguguuuaaaaguauggugguccuuuuuaaauaaaugauuuaaaucacuguacuuuauuccugggcaguga

SEQ ID NO: 4165710 - RNA, 70 nt, Human
ucaauauucuucuuuaguaggauuucauuuuuauuacuaaaugcaucuuucuguuagagcggguuauuga

SEQ ID NO: 4165711 - RNA, 60 nt, Human
ucaaucauuaacccuugaugcugggaagagcuuggucucagucucuugggcugugaagga

SEQ ID NO: 4165712 - RNA, 84 nt, Human
ucaauccaagcaacaauccugagguacugcagggccgaacaccaucuuucugggacuggguccucaggacaagcaaggaguuga

SEQ ID NO: 4165713 - RNA, 87 nt, Human
ucaaucuacauggggagaagcagcagaccugauuuugaaauugaagaagggcaauuugaggacaggcugauuguauaucuugguuga

SEQ ID NO: 4165714 - RNA, 55 nt, Human
ucaaucugcuuuugucauuuaugauuuaucaggaucagugugacuggcaaauuga

SEQ ID NO: 4165715 - RNA, 83 nt, Human
ucaaugcaucugaaauauuuguuaguguuuuaaugaccucagcagucuuuaaucaagauaaguauacuuuagaaauguguuga

SEQ ID NO: 4165716 - RNA, 87 nt, Human
ucaaugcccaggauuuaaaguagaccuuuguuuaaaaaacuuuuguauaaagacaaauaaagguccacuuuagggcuugggcauugg

SEQ ID NO: 4165717 - RNA, 59 nt, Human
ucaaugggaguccaacaucaaggacuuugaauaaagucuucuguucagcuccuaucuga

SEQ ID NO: 4165718 - RNA, 81 nt, Human
ucaaugugcagcuauaaacagggccucagcugauucuggagggagcccuggagcagagauggccccuuggagcugccauga

SEQ ID NO: 4165719 - RNA, 69 nt, Human
ucaauguugaaagaacaauucugugaugacuucuggugucauauuaugcauguuguucuuucuauuugg

SEQ ID NO: 4165720 - RNA, 58 nt, Human
ucaauucaauugaacaguuacugucugccuuuuagggacugcuucuugauugaguuga

SEQ ID NO: 4165721 - RNA, 87 nt, Human
ucaauuuaaacucuucaugucuugccugauauauccuagguauaagccuaagaaaauugccuuaaguaagacugaacagugccuugg

SEQ ID NO: 4165722 - RNA, 58 nt, Human
ucaauuucagaccuuuccuuggauguccucgaagcuucccaggaaugucugaaaguga

SEQ ID NO: 4165723 - RNA, 77 nt, Human
ucaauuucucaccaguuccugaacauuucuaaguugaaauuauuuuagaguaguuauucauggggcuugcaaauuga

SEQ ID NO: 4165724 - RNA, 74 nt, Human
ucacaaaagcacugcagaguaagcacugaaaaaacacuguuaggagcuauuacuuuuggagugugggauugugg

SEQ ID NO: 4165725 - RNA, 100 nt, Human
ucacaauuauuugcucuaacuuuagcuuagauuaucaauauguuuaacauuaaucugcauguuagaugucuuccuaaaguuagggaugaaauaaauauga

SEQ ID NO: 4165726 - RNA, 76 nt, Human
ucacaauuuguauuaacaauuuagcuagcuagcauuuaagccugugggcauggcuuuguucauauaauuucuguga

SEQ ID NO: 4165727 - RNA, 56 nt, Human
ucacacagugagaaagugcggauuuaagcccaauugucuguggaucucagguguga

SEQ ID NO: 4165728 - RNA, 105 nt, Human
ucacacauaagaagugaaauacaaauucaaauuacaauaguuguuuucuaauuuaucaguuuggcaaagauaaaaugauuugauuuguguugcuaaggguguaga

SEQ ID NO: 4165729 - RNA, 60 nt, Human
ucacacauguaagggcuuuggaguaagauggaccuugguuauccaacgcuuacuguguga

SEQ ID NO: 4165730 - RNA, 82 nt, Human
ucacacccguuuccagcaacgagaagcacaaaauaaauucacuaagaaauuuagcuguguuucuuguuguuuuuguaugugg

SEQ ID NO: 4165731 - RNA, 69 nt, Human
ucacaccuggaguagcaagguaauuggauacacacucccaccauuaccuccauuaccucacagugguga

SEQ ID NO: 4165732 - RNA, 67 nt, Human
ucacacugaugagucugcguuccggggaagguugcguuucucuggcagugagcaacuugacaggugg

SEQ ID NO: 4165733 - RNA, 62 nt, Human
ucacacuuagagcgaauuguuucauaaguccaauauuuuuggaaguucgacuuuaacuguga

SEQ ID NO: 4165734 - RNA, 70 nt, Human
ucacacuugauuuugaaccuuucuacuaaggugcucugguuugguggaaagaacacaaaauuaggaauga

SEQ ID NO: 4165735 - RNA, 55 nt, Human
ucacacuuuccauggcuguuaaaauccucauaugacagcaauauucaaaguguga

SEQ ID NO: 4165736 - RNA, 83 nt, Human
ucacagaacuacagugggcagaggcaauauuuaaaccaauuucuuuccagaaacucauugucuuuccacugagaaguucauga

SEQ ID NO: 4165737 - RNA, 59 nt, Human
ucacagaaugucuagcauaauuguuugcauacaauaggugcucaaugaccauuugguga

SEQ ID NO: 4165738 - RNA, 55 nt, Human
ucacagacauggugagguaacaaacacauguuguuuuaaacagccaagucuguga

SEQ ID NO: 4165739 - RNA, 88 nt, Human
ucacagagaagcaauggcaaaggggcuguggaugggccugacugucuggacauggccaaaucugcugcccagccacuugcucuuguga

SEQ ID NO: 4165740 - RNA, 70 nt, Human
ucacagagccuagaaggugaaugagggcuguggaaugcaagcaucacaucucucauugccucugcuguga

SEQ ID NO: 4165741 - RNA, 55 nt, Human
ucacagcaacacuggggcagacacuugugugcuccuguuccuucaauugcuguga

SEQ ID NO: 4165742 - RNA, 67 nt, Human
ucacagcacauggaccgaguccuguggauuuguuuugcaaauggguuuucgcauguguuaacuguga

SEQ ID NO: 4165743 - RNA, 60 nt, Human
ucacagcaguaaagaaaacacugacugauucuacaguuuuuguuucuguaauuguuauga

SEQ ID NO: 4165744 - RNA, 71 nt, Human
ucacagcaguuacuagcaauuugugaaguaccaggcaaacuuuuuguaauuguaagugauugcaacuguga

SEQ ID NO: 4165745 - RNA, 61 nt, Human
ucacagcccuggcccuguggggacaggucugucucccccacuccuggagcuagggcucuga

SEQ ID NO: 4165746 - RNA, 82 nt, Human
ucacagccuauuugccuuuauaucccugauaucuaguauguuguuagcuagguaauggauaaugaagugagugagugaauga

SEQ ID NO: 4165747 - RNA, 56 nt, Human
ucacagcugaguuuccauuucuucaacaccauuguugcugaagaaaucagguguga

SEQ ID NO: 4165748 - RNA, 61 nt, Human
ucacaggccugaugccuuggcugggacgauugaacucagcucugguucauguggucucugg

SEQ ID NO: 4165749 - RNA, 83 nt, Human
ucacagggccuguucguaguggcagaacuugggucccuggaauuccaggguccauguuuccaguuaauuccaggcaucaguga

SEQ ID NO: 4165750 - RNA, 55 nt, Human
ucacaguaacuuuguugcuuuuuauaagaaugcauaggcaaugggguuguugugg

SEQ ID NO: 4165751 - RNA, 60 nt, Human
ucacagugcaccccucacaggguuucacaugacuuagugaguuauuaugugcacugguga

SEQ ID NO: 4165752 - RNA, 78 nt, Human
ucacagugcuugagaaaguguagauccaacauccaaacauaguugccauugggaaggaacugccuuuagcuucuguga

SEQ ID NO: 4165753 - RNA, 64 nt, Human
ucacauacugaaaguccagugauccaucaaacacacucaggacaagacuuuuuauuguauguga

SEQ ID NO: 4165754 - RNA, 81 nt, Human
ucacauaugguuuauccuuuaccagucgagaggcauuuggauuguuugcacuuuuggcuguuacggauaauaccgcuguga

SEQ ID NO: 4165755 - RNA, 86 nt, Human
ucacaucaauugauuguacaugugcuauuuguuuuguauuccccucagugcauaguacaucagcauauaacaguuaauaguagugg

SEQ ID NO: 4165756 - RNA, 60 nt, Human
ucacaugaagaucccucaauuuaugcucaacuugggccugaggaauuucuuuaugaauga

SEQ ID NO: 4165757 - RNA, 76 nt, Human
ucacaugcacaacagagauaggagcauaguccuggucuucagaacccaugugcucuuuuguacccagcagacguga

SEQ ID NO: 4165758 - RNA, 68 nt, Human
ucacauggacacugguggauauggaauggcuuuuuucugcgcaauucacauccgaccaggucaaguga

SEQ ID NO: 4165759 - RNA, 69 nt, Human
ucacaugguaauguguugaauauuuguacaagucagaggaauguaugaguaguggcacaagcaauguga

SEQ ID NO: 4165760 - RNA, 70 nt, Human
ucacaugugacaugugugagcauguaugugugugugauuguguaugcauguauucaugugugacauguga

SEQ ID NO: 4165761 - RNA, 92 nt, Human
ucacauguggcuuucagauguugaaaaggaaaaguauucauauauaacaaugggaacuuuuuuaguacaauucuugaugugagccacuugga

SEQ ID NO: 4165762 - RNA, 104 nt, Human
ucacauucuuaugcagucacugaggcuaguauaaagagcaugauccauuuggcgaaucagaucaaguucucuaaaguccagugucacagcacaagauaauguga

SEQ ID NO: 4165763 - RNA, 82 nt, Human
ucacauugauguucaucagggauauuggccugaaguuuucuuucuuuucuugggucuguuccugguuuugguaucaggauga

SEQ ID NO: 4165764 - RNA, 72 nt, Human
ucacauugauuacauuccauguauauguuugucuuugacauuucuuuaaacagggaaaagucaucaguguga

SEQ ID NO: 4165765 - RNA, 76 nt, Human
ucacauugugauaaaaugcugacuccacugacggauccugcuggucagugauuucaucauuuuaucaagcauguga

SEQ ID NO: 4165766 - RNA, 61 nt, Human
ucaccaaaaguaauccacugugauacaggaagagcaaacuuacagaaucuacucgugguga

SEQ ID NO: 4165767 - RNA, 100 nt, Human
ucaccaaagaucuccaacugucaaaugcaaugaacucauucucagucuucauuuuccuugaugaguuugcagcauuugacaucauuggcaauuucaguga

SEQ ID NO: 4165768 - RNA, 71 nt, Human
ucaccaaggguuggagguagccagggagggcccacuuucuggguuuaugucacagcuuugcaccuuggagg

SEQ ID NO: 4165769 - RNA, 104 nt, Human
ucaccaagucaucucgccaagcugagaaagcugcccuugugaaacaaggaugguagaauucaugaaacgaggcagcuuugaauacugugagauaauucagguga

SEQ ID NO: 4165770 - RNA, 109 nt, Human
ucucuggccuguaauagauggugaccugaauuuuauuacuagucaacugccaucagagagguaugacaguuucguagggguugggcagcuauuucaagaagggucagga

SEQ ID NO: 4165771 - RNA, 87 nt, Human
ucucuggcuuucgagauaaauuuuugauaaauauguuagccaguuucccucauguuuuaaggaaauguaucaugaaagaugcggaga

SEQ ID NO: 4165772 - RNA, 58 nt, Human
ucucugggacuaggaaauuauguagccuuuuacauaauuaaucuuuaaguuccauugg

SEQ ID NO: 4165773 - RNA, 61 nt, Human
ucucugggacuugaugaaaugacugucagaucuuuuguuaguauucuacaggucccugagg

SEQ ID NO: 4165774 - RNA, 93 nt, Human
ucucugggccuuucccuuccaaauucuagggccuugguucucacuuuauaaggaaaacaggugauaagaagaaugggaggcuggccuggcagg

SEQ ID NO: 4165775 - RNA, 82 nt, Human
ucucugggcuugggaaguguuuaaagcugacuuguucucaucuguauccugugggguuuuaggacauucccaucaccagaga

SEQ ID NO: 4165776 - RNA, 58 nt, Human
ucucuggggccuuucuacaucacucccugguucuguaauuaaguuagguaccuagaga

SEQ ID NO: 4165777 - RNA, 59 nt, Human
ucucuggguauucacugccuuccugauauuagcccuuggaauuguugacuccccagaga

SEQ ID NO: 4165778 - RNA, 58 nt, Human
ucucuguaaaauguggaugauaccugacucccaggcauuuugccaggauuacauggga

SEQ ID NO: 4165779 - RNA, 63 nt, Human
ucucuguagaccugaccagcacgcugucugucuccuugcgguccauggcaaggucugcggggg

SEQ ID NO: 4165780 - RNA, 55 nt, Human
ucucuguauugcccacagcuagauuccuuaacaucucauguguguccuacagaga

SEQ ID NO: 4165781 - RNA, 59 nt, Human
ucucuguccccaucuucuagcuggaauccagaguuccuuguuaggagguuggacaugga

SEQ ID NO: 4165782 - RNA, 63 nt, Human
ucucugugagucuuaagcaccaccuuucuugguccaaagaaaggcaaacugagacacaagaga

SEQ ID NO: 4165783 - RNA, 71 nt, Human
ucucugugggaaguuuggagggaaagguuauccaaccuucaaaagccaaucccuuguccuucccuacagga

SEQ ID NO: 4165784 - RNA, 58 nt, Human
ucucugugugucauggacaagugucauacauagugauuugcacagaaaaccauagaga

SEQ ID NO: 4165785 - RNA, 109 nt, Human
ucucuuacuaacaguaugaaaaauguagauuuuagugucuuauucucuguuaaccaaaaggagauauaguaaaugcuaaagcuuugcuuucauuauuauaaggaagaga

SEQ ID NO: 4165786 - RNA, 59 nt, Human
ucucuucaaugccaacagccagcauucuucaaggugagggcaugagggcagugagcaga

SEQ ID NO: 4165787 - RNA, 59 nt, Human
ucucuuccugacuugcagacagccaccuucuagcugugucucugcauggcaggaagaga

SEQ ID NO: 4165788 - RNA, 63 nt, Human
ucucuucuguccaggugggauuucaaagccugcuggagaagggaauccugggacagaggcagg

SEQ ID NO: 4165789 - RNA, 69 nt, Human
ucucuuggaaagcuugcccacuucucucuuauuugcaacccugaacgaggcacugaagguuccagggga

SEQ ID NO: 4165790 - RNA, 62 nt, Human
ucucuuuaaaguuggagcuugcaaggaaaugaauauaccaccuucaagaaggcuuaaaggga

SEQ ID NO: 4165791 - RNA, 65 nt, Human
ucucuuucuauugcaccaugcuauggccugaucaaagacucaagcaucuaggacagagaaagagg

SEQ ID NO: 4165792 - RNA, 56 nt, Human
ucucuuuuagcuggcagcaucugugaacuggccuugccugccaugcagaaagcuga

SEQ ID NO: 4165793 - RNA, 67 nt, Human
ucucuuuuuugauuucccuuugauaguaaauauaaucagaacuucaaaggguagcccagggaagaga

SEQ ID NO: 4165794 - RNA, 90 nt, Human
ucugaaaacucuugaaaguaucuuauuuugucccuaugaaagaccuagauguacaugaagacagaaagugagcuacaggaguugaaaaga

SEQ ID NO: 4165795 - RNA, 71 nt, Human
ucugaaacuuccaggucaagcuccccuguggucagucaugcuuaccgaggagcacugacgcuuguuuuaga

SEQ ID NO: 4165796 - RNA, 81 nt, Human
ucugaaagauuggcuuuauacauaagaauaaggacuauauccaucaauuucuuuuucuuauggugaagcacaaaugucaga

SEQ ID NO: 4165797 - RNA, 69 nt, Human
ucugaaagcuuugggacagugugaccuuucaggaggaaaauuuaaucugcugucaaaagggcuaacaga

SEQ ID NO: 4165798 - RNA, 93 nt, Human
ucugaaaguagguuuccuucuuuccaagaaugcagauaccuuguuggaaagcaaaguuguaugucuuagaaaguagaaacacggcugaucaga

SEQ ID NO: 4165799 - RNA, 57 nt, Human
ucugaaaugcuugggaccagaagucuuuuagacuuugguuuuuuuguguguuuugga

SEQ ID NO: 4165800 - RNA, 72 nt, Human
ucugaacaucuaguuccuauauaauaacagaaaugucuuaaauauuuauuaauaugggacuggauuaguagg

SEQ ID NO: 4165801 - RNA, 74 nt, Human
ucugaaccugaggccagcuucagcaguggacaaaguugcagcuccauuccaggcacagaguuggucaguucaga

SEQ ID NO: 4165802 - RNA, 69 nt, Human
ucugaagaacuuuaaagcacuuaugaaaaguaugaugauacucauggggucacuuuagaguacacaaga

SEQ ID NO: 4165803 - RNA, 59 nt, Human
ucugaagcacagaaguucaauuuuccacugccagaaaguugaguuuuauguguuacagg

SEQ ID NO: 4165804 - RNA, 85 nt, Human
ucugaagcugcaagaagccaaucgugugaacuuaguaaucaauuugauuaaugugaauaaaguuggcauuuugccuccuuuauga

SEQ ID NO: 4165805 - RNA, 57 nt, Human
ucugaaggaaaaggguagauauuccaaaagugguuuaaaaccuuuagauccuucaga

SEQ ID NO: 4165806 - RNA, 67 nt, Human
ucugaagggcaggucagaaguagaauaguguuuguucugaugccuuugaaguugacugccuuccaga

SEQ ID NO: 4165807 - RNA, 71 nt, Human
ucugaaguuacauuuuggucuaauugcuagauugaaaauaucuguuaaugugucugaaaugucauuuuuga

SEQ ID NO: 4165808 - RNA, 79 nt, Human
ucugaauaccugaggcaaaaacacugauuaggcugugucccccuguuagcuuuguggggucuuuccucaaauccucaga

SEQ ID NO: 4165809 - RNA, 71 nt, Human
ucugaauagagagagguccuuuaaaaaugucguucuggaauuuggcaaauuaguaccucucuccauugagg

SEQ ID NO: 4165810 - RNA, 59 nt, Human
ucugaaugagaacaacagcauugcucuuuucguaguguuguaauaaauaucaucuuaga

SEQ ID NO: 4165811 - RNA, 81 nt, Human
ucugaauuaaaacaaaacacagcuaacuuaaacuaaccuaaacucguuuagagagguuugaauuggcugccuaauuacgga

SEQ ID NO: 4165812 - RNA, 73 nt, Human
ucugaauugggaauaacguaauaacaugcagcuggggagcuaggcuguguuucuugcguuuuccucuuucaga

SEQ ID NO: 4165813 - RNA, 80 nt, Human
ucugaauuguuuuaaguagagucgucuggcuucuggggacuuucuccagugaucagcuagaucuacuuguccaauccaga

SEQ ID NO: 4165814 - RNA, 57 nt, Human
ucugacaauaacugaguuuaacugaguuuagacaguuuaauuuaguucuuguuuaga

SEQ ID NO: 4165815 - RNA, 60 nt, Human
ucugaccaggcuggcucagggcuuccuggagugggcagcucuggagcugggccuggcagg

SEQ ID NO: 4165816 - RNA, 66 nt, Human
ucugacccuuuaggguauguuuauacuaacacuauuaguucuuggauaaaaucuguaaggcucaga

SEQ ID NO: 4165817 - RNA, 129 nt, Human
ucugaccuuuucuuuuaaaauguuuuucaagggaagucagugcuggcagcagggucuagauugauggcaucagaugcugagaaguggagccucugccucacgucgcuucaauugguacuuugggucgga

SEQ ID NO: 4165818 - RNA, 55 nt, Human
ucugacucuuggaaauagccuaacaauacuuugaacgguuauuugaggguuaaga

SEQ ID NO: 4165819 - RNA, 67 nt, Human
ucugacugacuuuggacuuuauucuuuaaacaaauugcagagaauagagaaaaagguuauuuacaga

SEQ ID NO: 4165820 - RNA, 75 nt, Human
ucugacugcugguuagucuuagugggauuuguuuggcuuuuaugaaugccauuaaauuuuaaugugcagaucaga

SEQ ID NO: 4165821 - RNA, 68 nt, Human
ucugacugggaggguucagcuggguugcaucuguucuguguaccucuuuucccccuccuagcaucaga

SEQ ID NO: 4165822 - RNA, 56 nt, Human
ucugacuuaugcuaaaggggagggguacauaaucucuguccuaauagacaagcaga

SEQ ID NO: 4165823 - RNA, 55 nt, Human
ucugacuuccuccacaucuguuccaaauuuaaagaacucaugugaugaaguuagg

SEQ ID NO: 4165824 - RNA, 90 nt, Human
ucugacuuggaaguccauuuggagaagucuucagcuuguucacacaauaggcaaggguaaaggcauucaagauggaaguugaaguacaga

SEQ ID NO: 4165825 - RNA, 77 nt, Human
ucugagaacaucauucagauauuuuauaguggacuuuucuuaauuucuucccauaauaucaaggugauguucccaga

SEQ ID NO: 4165826 - RNA, 62 nt, Human
ucugagaagcuagaggacaaaguaaggagacuuuccacugaauauccuuugcuaucuuuuga

SEQ ID NO: 4165827 - RNA, 56 nt, Human
ucugagaaggagaaaacagagagccugggaggguucuuuguuugccuuuaucaaga

SEQ ID NO: 4165828 - RNA, 58 nt, Human
ucugagaagugcaggacuuggccuccucacagugagugcagagaccugucuucacaga

SEQ ID NO: 4165829 - RNA, 98 nt, Human
ucugagaggggaaaauuggcagguggguggaggugcguugagcugcacauggggcccagcugcagcugccuccuucccuuguacuuccucuacugaga

SEQ ID NO: 4165830 - RNA, 98 nt, Human
ucugagauuagagagccagaguucuuuggaguauuuucuagcugaauuggaaaaccuugauucugcauguguuucaaauacugaggcuuuuuaacaga

SEQ ID NO: 4165831 - RNA, 70 nt, Human
ucugagcacccuuugcacaucagucguuucuugucuaucacuugcaguggugugcuggagcuugcuuaga

SEQ ID NO: 4165832 - RNA, 65 nt, Human
ucugagcacuuuagaauuuagaguugcaauugaaugccagcuguggagauggggugcauaucaga

SEQ ID NO: 4165833 - RNA, 56 nt, Human
ucugagccacagauguccuguuuccucuaugagggacuauaggccagguggccagg

SEQ ID NO: 4165834 - RNA, 62 nt, Human
ucugagccaguauagaauaguuaaggacaagggagcccugcuugcuucuguuugggcuuaga

SEQ ID NO: 4165835 - RNA, 83 nt, Human
ucugaggcaggcacuuugcugggggcgcacacaggauuccaaaacccacugugaaaaugcacaccccagggagugcauucaga

SEQ ID NO: 4165836 - RNA, 64 nt, Human
ucugaggccucuguucaccagaauuaugccugcuuccuaacacuucugccuccagagcuuuaga

SEQ ID NO: 4165837 - RNA, 56 nt, Human
ucugaggcugcaucuaugugacucaguugagagucugagguccaccaguuugcaga

SEQ ID NO: 4165838 - RNA, 60 nt, Human
ucugaggggcuggaagggcugcuuucuugugaaaaagaguccuuuuugagucccuugaga

SEQ ID NO: 4165839 - RNA, 69 nt, Human
ucugaguaaugucugccucuauucaguucaacagcccacaaagagaguaauagacaaagacaugccaga

SEQ ID NO: 4165840 - RNA, 57 nt, Human
ucugagucagauuggcaugcuugcagaaguaaaacacuuccauguauuugaaacaga

SEQ ID NO: 4165841 - RNA, 64 nt, Human
ucugagugacuuaauucuggcuguuugaaaagauaugaucaaacacuagcaggaagcacugaga

SEQ ID NO: 4165842 - RNA, 74 nt, Human
ucugaguggcccugagcccuuugacagaguccccuuugggacuacacgcugucagacgugcagggcuggacgga

SEQ ID NO: 4165843 - RNA, 95 nt, Human
uccugugucucucccuuccuuagugccucuuccgcugcacaugcuggguccugggcgagguacuggggcuguaacggggaacgaaacaaacaggg

SEQ ID NO: 4165844 - RNA, 58 nt, Human
uccugugugccuuaagcucuauagacaaagaugcuauggaaacagagggcauuuggga

SEQ ID NO: 4165845 - RNA, 67 nt, Human
uccuguuaagagcuuggacacucuucaguaguaauggggaaugagaauuacuguuuuuauaacagga

SEQ ID NO: 4165846 - RNA, 62 nt, Human
uccuguuauugacucucuuguggcuucuuucuucaucagagaagcaaguggcucaaccaggg

SEQ ID NO: 4165847 - RNA, 63 nt, Human
uccuguuauuugcacaacaugaguaaaccugguggacauuauguuaagugaaauaggccagga

SEQ ID NO: 4165848 - RNA, 66 nt, Human
uccuguucugauguguuuuaguuugguaauagcagcuguuaaagagucuacugcacaucccaagga

SEQ ID NO: 4165849 - RNA, 68 nt, Human
uccuguugcuguagugguuaaggggaaacauaguuuauuauuuccuagggcaaugccagaugacagga

SEQ ID NO: 4165850 - RNA, 99 nt, Human
uccuguuguaauuuuauaguauaauagggaugggaaguagggauguugauacauuaaaauauacuuucaauucacugagauauaugaaauagcagagga

SEQ ID NO: 4165851 - RNA, 87 nt, Human
uccuguuucuacuaaaaauacaaaaauuagccgggaguaguggcucaugcccguaauccuagcuacuucuccuaggcugaggcggga

SEQ ID NO: 4165852 - RNA, 124 nt, Human
uccuguuuguuucuuaucaucacacagacucagaaucugccaaguucaggaauccacuucggcugucuggguugucuuggugaggaugaugauggucauguuaaaggugaaagagacagcugga

SEQ ID NO: 4165853 - RNA, 92 nt, Human
uccuuacaaauuaucuugcagugaaacaaaaugguaauguugcucaagaagcugggucuugagucacacauuucuucauacaauauagaggg

SEQ ID NO: 4165854 - RNA, 75 nt, Human
uccuuacccuucaggaaugaggauaaacauugcucccccaggauagcauugcgucauuucuggagugucuuagga

SEQ ID NO: 4165855 - RNA, 69 nt, Human
uccuuacgucuugugacuugauaggguagaguagaaaauguauuucuuuuaagacacacagauuaagga

SEQ ID NO: 4165856 - RNA, 58 nt, Human
uccuuagagauacugucuugaauucaguaccauugcucuauuacaguuucuuucagga

SEQ ID NO: 4165857 - RNA, 63 nt, Human
uccuuagcagcucugauucugggcccaauuuguagauuugggggguuucugagcagcuaauga

SEQ ID NO: 4165858 - RNA, 70 nt, Human
uccuuagcuucuuacuuaaugcgauucugcgaagcagccaacuuugugggaugcaggaguugaagaagga

SEQ ID NO: 4165859 - RNA, 56 nt, Human
uccuuauaacaacaggaguggaaugcaucuaccaccuuuguuggauuuguagguga

SEQ ID NO: 4165860 - RNA, 56 nt, Human
uccuuauagcccaagugauggagucagccucccucagagcacauggguuuugugga

SEQ ID NO: 4165861 - RNA, 57 nt, Human
uccuuaugccaggauggcugcuauaaaguaagcuaagccuugaucuugguaacagga

SEQ ID NO: 4165862 - RNA, 62 nt, Human
uccuucagcuuauuucuuaggaaauuaccuccagaucuacccaagaaacaaaggcugcagga

SEQ ID NO: 4165863 - RNA, 80 nt, Human
uccuucaggagaauauauuugagaauauucaugagacuuggcaacagcucuugcacuucaugaauauguuuuccuguuga

SEQ ID NO: 4165864 - RNA, 60 nt, Human
uccuucaucaucaagguaugguuccuggaguagcaggacaggaugcugaagaugaaguga

SEQ ID NO: 4165865 - RNA, 57 nt, Human
uccuucauuaagcaugaggcagccacuggaggcuuugcugccucagggcuuugagga

SEQ ID NO: 4165866 - RNA, 55 nt, Human
uccuucauuucuccugauuuguauguuuuauuuucaggucuauagaagaggaggg

SEQ ID NO: 4165867 - RNA, 69 nt, Human
uccuuccaagugcugcuuuuuccuugacuguuguaauuauaucuaugaggagagggaggauugugagga

SEQ ID NO: 4165868 - RNA, 58 nt, Human
uccuuccaggugcaggcaagccugaggcgucagggcagcaggcggccgccaggaagga

SEQ ID NO: 4165869 - RNA, 119 nt, Human
uccuuccccucuauaacauugaacuaguuuagcuuuuuaagacguuuauccuuaccuuccuuucauuuuagucauauguguuuuagaugagugcuguuccaauugucuaugguuaagga

SEQ ID NO: 4165870 - RNA, 125 nt, Human
uccuuccugccuuguaucuuaugacccaggguuggcccugugggagcccaggcagauauguaagccuuaauugacucauuucugucuccuacaggcucccuggccaugaaggucugcaggaagga

SEQ ID NO: 4165871 - RNA, 55 nt, Human
uccuuccuucauucaacaaauaguaauuaacugugauucucagaagagggaagga

SEQ ID NO: 4165872 - RNA, 79 nt, Human
uccuucuacaguaaccuuauuugucauuagaaugcaacucaauccucuaagauugucaggcuugcuguauugccuugga

SEQ ID NO: 4165873 - RNA, 64 nt, Human
uccuugcuggccauucucuuugagaugaaaggacugcagaucaagcuguauggucagagaagga

SEQ ID NO: 4165874 - RNA, 88 nt, Human
uccuuggagcauagauguuuagaggucaggugaggaauuaagauuuauaucuuaacaguuuccugagccugaguuguaauucuaaggg

SEQ ID NO: 4165875 - RNA, 56 nt, Human
uccuuggcaagcugcaaugggauugaaaaagaugaaucacaaaaguagcucaggga

SEQ ID NO: 4165876 - RNA, 113 nt, Human
uccuuggccuggcugcccuuccugggaggcuguguacuugcagcaauaacgaugacucgaacaacgucagcaacugcagcugccucccggggagggccugcgccagccagggg

SEQ ID NO: 4165877 - RNA, 102 nt, Human
uccuuggcuccuuuuccuccugggaaaugaaggggcaguggcccagccucucguagcauuucucccuccuucuauuuacucgguuggaauggcugccaaaga

SEQ ID NO: 4165878 - RNA, 79 nt, Human
uccuugggcaguuuggucucgcucaauucuggccccgcuggucagggaugagcagauggagcaacacuuugcaaaggga

SEQ ID NO: 4165879 - RNA, 104 nt, Human
uccuugguggugugagaccuguuggguuauguccugguggguuaaccaauccucccgaaccucgccaggacucuuccuagaaggugcucaagaauuuaucugga

SEQ ID NO: 4165880 - RNA, 56 nt, Human
uccuugugccaucagcagugagggaaagaacauuucugccuugaaugguacuggga

SEQ ID NO: 4165881 - RNA, 81 nt, Human
uccuugugucugcaggacuuagggccuugacuucuugccggcucucagccggaggcugcccucagcuccuggacacauggg

SEQ ID NO: 4165882 - RNA, 115 nt, Human
uccuuguuaagggauuauuuuuaccacagacaccuaauagaugaauucacauaaacgcauguuuguugcaggauuauguguaggggugaaaagccuaaguguacuaugacaggga

SEQ ID NO: 4165883 - RNA, 59 nt, Human
uccuuguucuagucagaaauuucuaggugcuuaccuaggccacagaugagacauaagga

SEQ ID NO: 4165884 - RNA, 129 nt, Human
uccuuguucuuuucuuaguugaacuucauuacuuguaccaauccuuuaaaacaacaaaacuuacugauuugguuuagaagggcuggucagaaauggcagucucugauuaaagaccuaagccaacuugga

SEQ ID NO: 4165885 - RNA, 97 nt, Human
uccuuuaaguccuuggcaaugauuucagagcuggugucuacagcugcaucugacaugguggggcacgccggugaucugaugcaggggauuaaaaaga

SEQ ID NO: 4165886 - RNA, 70 nt, Human
uccuuuacaaacaauuuaacaugcaaauuguuugcaucaaaguaugagugugagugaguuuguggcagga

SEQ ID NO: 4165887 - RNA, 74 nt, Human
uccuuuagcuuuuuauaaccagaaaugauccagaguauuuguaaucacaugagguuaugacaaagcaaaagaga

SEQ ID NO: 4165888 - RNA, 82 nt, Human
uccuuuauuuuugagaauagcaugaugucuuuuggugguguuuggaagauauaauaacuguugucaucccaagauagggaga

SEQ ID NO: 4165889 - RNA, 80 nt, Human
uccuuucaagcauggcucaggucuuacccaugccugagaagauuuucuuagcugggaauuaucugguugcauggaagaga

SEQ ID NO: 4165890 - RNA, 67 nt, Human
uccuuuccacuuuucucucucaugccuuuugcucuucccuggagguggaggagagaaguggaguaga

SEQ ID NO: 4165891 - RNA, 56 nt, Human
uccuuucugacuccugauauuaugaauagagaugaugcagcagaguaagcagggga

SEQ ID NO: 4165892 - RNA, 61 nt, Human
uccuuucugggccucagugacuccucugcaaaggggcgagaaagucacagcccaggaggga

SEQ ID NO: 4165893 - RNA, 56 nt, Human
uccuuucuucuucugcccauggccuccuuccugcuaugcugggcuuggagaaaaga

SEQ ID NO: 4165894 - RNA, 118 nt, Human
uccuuucuuggggaauauugcaaagugucuucaauucaauugcauuucuguggucgugggguuuuauauaauuacagaaguucuguaguugauuugaauguuauaucccuguugugga

SEQ ID NO: 4165895 - RNA, 85 nt, Human
uccuuugacaacaauaauguggagcugaacacucaugacugcauuagugacuuuuaauuaacuccaccuuaagugugucugagga

SEQ ID NO: 4165896 - RNA, 74 nt, Human
uccuuugaccuuuuuacuguguacgcugugcuuggugcuuuacuucagcuacuugcaguggaaaagaagaaggg

SEQ ID NO: 4165897 - RNA, 64 nt, Human
uccuuugagggugugaucaaugccauagcgacaugaaguaaauauggcucaggccaucaaugga

SEQ ID NO: 4165898 - RNA, 55 nt, Human
uccuuuggaacugacuccguuaacucuuugagggacagcaguagguuuuagagga

SEQ ID NO: 4165899 - RNA, 129 nt, Human
uccuuuggaccugaagcuccucgaagguagauacuuugcuuuauucacaucuauauucucugucuaggagaguauaugcacauaacagggacuauccuuugauggcuggcuauuguuguauacaaggga

SEQ ID NO: 4165900 - RNA, 72 nt, Human
uccuuugucagagcacugaguugugggccuuuuccgguaaggcccuuauaaaauguguucuguuuugaagga

SEQ ID NO: 4165901 - RNA, 56 nt, Human
uccuuuguuacugcugaccuucuccucccugggccuuucucagcaaagacaaagga

SEQ ID NO: 4165902 - RNA, 85 nt, Human
uccuuuuagcauauuuugauguauguaauccuuuuuucccccaaauuugauggguaacacuuuggauuaaaauucuguuugagga

SEQ ID NO: 4165903 - RNA, 94 nt, Human
uccuuuucagccucuuuggucuccgucaucaaucaccgggaaugguuuuuaccugaaacugaucuugcuggagaauuaacuggguuugagggga

SEQ ID NO: 4165904 - RNA, 65 nt, Human
uccuuuucuccuuuagcagauggaguacucucccaaucagaucaugcaagaauaauaggaaggga

SEQ ID NO: 4165905 - RNA, 65 nt, Human
uccuuuucugcaccuugcgaugugaacuuugauauucuguaaugucuggggcgccagaagagaga

SEQ ID NO: 4165906 - RNA, 58 nt, Human
uccuuuugcugggaucaucagggaaaguccuucucauggugauagcacaguuaaggga

SEQ ID NO: 4165907 - RNA, 72 nt, Human
uccuuuuucacagacugugagugauuucaauaguauaugaaaacuaugacucagaggcuggaaaucaaaggg

SEQ ID NO: 4165908 - RNA, 62 nt, Human
ucgaaucuugguuaacuaugugauuugcggcauuagcaaaugcaaagcaagcagagauuuga

SEQ ID NO: 4165909 - RNA, 90 nt, Human
ucgaauuaaggcuucuguaguucuuacaagucacccgcuuucuuucaggaggaauguuaaagauuaagagcggcaagaagucagagucgg

SEQ ID NO: 4165910 - RNA, 85 nt, Human
ucgacagcauuguacacuggagcccuuggggucuggcaucagcccagagaccuuaguagcuuuuaaugguugcauucucuguuga

SEQ ID NO: 4165911 - RNA, 79 nt, Human
ucuauuugaaauaugaggcauuaugagaagacuguuaaguuuugaaaucacucacugucuuauuuuugcaaguuuugga

SEQ ID NO: 4165912 - RNA, 83 nt, Human
ucuauuugaucucauuugaucaugugcuaugagguaggcacuauuaacucuauuauauaggugaauaaaugaguuuagacaga

SEQ ID NO: 4165913 - RNA, 84 nt, Human
ucuauuuuucucaaucacaaagguucugucaaguaauacaaagucaucugguggcuuuacaaggcagaacugauuaaaaaugga

SEQ ID NO: 4165914 - RNA, 59 nt, Human
ucucaaaauaucacuuguguuuagauuuguuagagaucaaugaaguggcuauuuugagg

SEQ ID NO: 4165915 - RNA, 71 nt, Human
ucucaaauaaugaauggguuuaauauuuuagguggaugccaacauaaaaugccagaccaguucacgugaga

SEQ ID NO: 4165916 - RNA, 70 nt, Human
ucucaaauaggccuugguccugaccuaacugaacaggauagguuaggucaggaccaaggccuguuugaga

SEQ ID NO: 4165917 - RNA, 73 nt, Human
ucucaaauggguuaaaaguugaaugaauugacacccugauguuaugauguuggaauuuuaacuuaaacuggga

SEQ ID NO: 4165918 - RNA, 68 nt, Human
ucucaaauucucaucuuucuggucaaaaaaugguuggaagauuuuguccaacuagaaagguuuugaga

SEQ ID NO: 4165919 - RNA, 84 nt, Human
ucucaagacuccuaaauaaagcauuuccccugugugggcgaccccugggucccauguggggucaguguuugggucucucugaga

SEQ ID NO: 4165920 - RNA, 70 nt, Human
ucucaagacuuagagcaucuugaaaauagggaucaugucuuacuuauuucuuuggucuccaagucuaaga

SEQ ID NO: 4165921 - RNA, 59 nt, Human
ucucaagauauagaggguucuagaguugguugauucaguggcccaaugucaucaugaga

SEQ ID NO: 4165922 - RNA, 82 nt, Human
ucucaagucuuuuuuguagauguaguuuuuauuuagauaugaguugaggcagcaaaauauaucauaagagggcaucuugggg

SEQ ID NO: 4165923 - RNA, 79 nt, Human
ucucaaugcuuugacaugggaagugcuugauugaugucuauuaaaaugaaucaacauuguuuuaagucaagcaaugagg

SEQ ID NO: 4165924 - RNA, 66 nt, Human
ucucacagaagagcauuaagaugacauagugccauacacaacucgcuuauuagcucuuuagugaga

SEQ ID NO: 4165925 - RNA, 57 nt, Human
ucucaccaaagccuugaccauaggcagaggguaccaguggaaaagguggggugaaga

SEQ ID NO: 4165926 - RNA, 79 nt, Human
ucucaccuccagauggugcaggugaagugcugguggucuucgcugguccccagacucaucugccauugcuggggagaga

SEQ ID NO: 4165927 - RNA, 65 nt, Human
ucucacuccugguuuguguccuggcuccacuagacagagugagcucccagaagccagagucgggg

SEQ ID NO: 4165928 - RNA, 92 nt, Human
ucucacucuugaaauauaaugcaauaccuuuuuaugcugcuuucuguuaucacggcagcaugaaaaguguugcuaucuuucuuugggagagg

SEQ ID NO: 4165929 - RNA, 87 nt, Human
ucucacuguucucucugcucacgccaccguucaucagacucuaguccauggucagaacucagcgugcuuguagaugagauaauggga

SEQ ID NO: 4165930 - RNA, 88 nt, Human
ucucacuuacgugaccugccugggcucgguagccaucgaguuugcauugcuugaugccacggagcccaggcaagucacauaaaugaga

SEQ ID NO: 4165931 - RNA, 119 nt, Human
ucucacuuccauuguggccuuuugaguuucagauuaagccugacauccaauuacguggauuucguacaggccugauacacugaacucugcguguucuuggccucauggaacauuuggga

SEQ ID NO: 4165932 - RNA, 105 nt, Human
ucucacuugauuuccacaauuguugcuguaacgauggacuacugaggagagaaacuuaauuucucuggcagaucuucccacguuuaagcaacauguucauggaga

SEQ ID NO: 4165933 - RNA, 56 nt, Human
ucucagaaauuacaaaagggacauuuaggaauuguucacaaggugaugcuuugaga

SEQ ID NO: 4165934 - RNA, 64 nt, Human
ucucagaaggguggugcuggagccccaagaagcagacaagaaggggagcccagauccuuuggga

SEQ ID NO: 4165935 - RNA, 82 nt, Human
ucucagaaguauuaugcuaaaggaaagagacagaauuaaagcacuacauacugcaugaguccauuuacaugauauuuugaga

SEQ ID NO: 4165936 - RNA, 92 nt, Human
ucucagaaucuagaauugucacuggaaguucuaaauacccaggacuugugugcuaaauuuagacuucccagcacugugacuggcauuuugga

SEQ ID NO: 4165937 - RNA, 61 nt, Human
ucucagagaccugaacucccugaaacccacuuucagagaacaguaaggcagguuucugagg

SEQ ID NO: 4165938 - RNA, 57 nt, Human
ucucagagcuucaguuauuuucuuuguagaacaagagagguuggacucaacucugga

SEQ ID NO: 4165939 - RNA, 56 nt, Human
ucucagaggcccgacguucuccaucuggcugauccugggagccucguccucugugg

SEQ ID NO: 4165940 - RNA, 106 nt, Human
ucucagauuucuaaaacaaugaucaacugccccaaauguauuugagcauauagaaaauauugaaagauaucauugagguuguugacauguguuauggagaaugaga

SEQ ID NO: 4165941 - RNA, 58 nt, Human
ucucagcaacgauccggaguaagucacuggacuucguaccacuggauguuggugauga

SEQ ID NO: 4165942 - RNA, 95 nt, Human
ucucagcaccagguauuaaguguuuuacauacauuauuauguugugauaauuaaaugagguaaugcacauagaaguacuuaguacagugucugga

SEQ ID NO: 4165943 - RNA, 75 nt, Human
ucucagcuuccccuuuguaagauggaaacgcaguacuaauaugugcacuguuuaauuucacaaaguugacugaga

SEQ ID NO: 4165944 - RNA, 57 nt, Human
ucucaggaagauuagggcuaaggaugcuauuguccacagcccuguaaauccccugga

SEQ ID NO: 4165945 - RNA, 58 nt, Human
ucucaggaggaggguacaccaucaguuuacacauugauugcagccacucuuccagagg

SEQ ID NO: 4165946 - RNA, 70 nt, Human
ucucagggcucagagcucaggcagaccuaaguccaaaucccaucucuagcuuuagcucuauguccugagg

SEQ ID NO: 4165947 - RNA, 61 nt, Human
ucucaggggcccuucccucagcaggucaagagacauucucugcugggcaggaccccucaga

SEQ ID NO: 4165948 - RNA, 126 nt, Human
ucucaguaaaaaugucaauggcugugauuuguaaauagcaaagccuggcacaaugauaauaaacaacuaugaagcucaucagugcuguuuuacuuuugcagauuacuccaucgauuauuacuguga

SEQ ID NO: 4165949 - RNA, 66 nt, Human
ucucaguacugcuugugggagcagaaauuaauguccuguuuuuagcuagccuguguguacuuggga

SEQ ID NO: 4165950 - RNA, 76 nt, Human
ucucaguaguuuacacugugaaacagguaucuugaacacacccauuggaucccuuguccacgguguauaugcugga

SEQ ID NO: 4165951 - RNA, 97 nt, Human
ucucagucaagcuaguaguguauuaaugcuccaggaguuguaucccacccccagugcacccuggcugauuuacugaauucuggcuuugaaucagaga

SEQ ID NO: 4165952 - RNA, 92 nt, Human
ucucagucuguuucccuaugcgugccucugucugucugugggugucucuaagucucuguagauagacagguagguagggagagagaaagaga

SEQ ID NO: 4165953 - RNA, 70 nt, Human
ucucagugucuguuuuccuccugguuucugccccugagagugaaguugggggcagggagggauacugagg

SEQ ID NO: 4165954 - RNA, 83 nt, Human
ucucaguuucugccuuggaucagaugauaucuuuguugguccuuuucugacaugaggugcuauaggucuacaguuuacugaga

SEQ ID NO: 4165955 - RNA, 59 nt, Human
ucucaguuuuguauguuguaagucugguaggcucagcuuagcaucuuacaaugcugagg

SEQ ID NO: 4165956 - RNA, 97 nt, Human
ucucauaauuggguugcacuuugcuguuaguaaaggagcuguuucguagucaaaaggaacaugcauucucuaaaagcaaauuuuaagcuacuggaga

SEQ ID NO: 4165957 - RNA, 62 nt, Human
ucucauagcuguaguggugaaugauuuuggcuucacaaaagaccauguuuacagcuaggagg

SEQ ID NO: 4165958 - RNA, 74 nt, Human
ucucauaguccaggaugacccccacuuuccuaggaggcucaggaaguuucagguugguucugggcucagugaga

SEQ ID NO: 4165959 - RNA, 73 nt, Human
ucucauauccaguguuuuucuucacagguuuugcacacuagggaccaagaagcccucggggacacugcugaga

SEQ ID NO: 4165960 - RNA, 59 nt, Human
ucucauaugugcaaaugugaguggcaugaaaauagcaugccagcauguacacaugugga

SEQ ID NO: 4165961 - RNA, 85 nt, Human
ucucauccuggccucugagucaagaacccagugaacugacuuucuaguucuagaaguuccgcugcaaggccaggaaagcuugaga

SEQ ID NO: 4165962 - RNA, 65 nt, Human
ucucaucuagaaugaccuccucuuagcuugauuauaucggggguaggacuugucuuucuagggga

SEQ ID NO: 4165963 - RNA, 61 nt, Human
ucucaucuccucccacagccccagcccuaauguagacagagagcucugaugggaggugaga

SEQ ID NO: 4165964 - RNA, 77 nt, Human
ucucaucuucuucaucuguaaaacuuggauaauaauaggaccuacaucacaggguuguugauggggauuacaugaga

SEQ ID NO: 4165965 - RNA, 86 nt, Human
ucucaugauuugcuuagugucaaauagccugagcuugcuuuaccagaacuaucugcaacaucaggaucuuguuacaguaaaugaga

SEQ ID NO: 4165966 - RNA, 84 nt, Human
ucucaugcagucauucuccaaaagggagcacuuucuguuugaaagaaaacaaagugccuccuuuuagaguguuacuguuugaga

SEQ ID NO: 4165967 - RNA, 61 nt, Human
ucucauggucuugauuuuccauagguucuugugacuucagaguuaguuauagaccaugaga

SEQ ID NO: 4165968 - RNA, 59 nt, Human
ucucauguguguguguguguauaugugugggcacauguucaugcaugcacaggugcaga

SEQ ID NO: 4165969 - RNA, 66 nt, Human
ucucauguguuguuaguaccagcaguccuuaggggcuguggggaccaacaggacuaaaucaugaga

SEQ ID NO: 4165970 - RNA, 70 nt, Human
ucucauguuuuucaaaagaagaaugcuugcacacaaauaacacaggcaacucaucaugaaagacuugaga

SEQ ID NO: 4165971 - RNA, 56 nt, Human
ucucauucaaacagcccuuuaugugugguggguacagaugaaggcacugaguggga

SEQ ID NO: 4165972 - RNA, 73 nt, Human
ucucauuccaugcuuccaacaguucugugaaguaaaguuaucuacauucuacagauaggaauaugaaugcaga

SEQ ID NO: 4165973 - RNA, 106 nt, Human
ucucauugauguaacaggcacacaccaaucaaaugucagaagaacacagaaaauuaucugacuagggacuugguguaugcuuguguguaugugugcaugugugaga

SEQ ID NO: 4165974 - RNA, 68 nt, Human
ucucauugcagcggcuauuccauuauuaucuucaauauacugaugaagaguaccacuguuagaugagg

SEQ ID NO: 4165975 - RNA, 55 nt, Human
ucucauuguccaauugaauuuaaauaguuuucuagauuuaauguggaaaaugaga

SEQ ID NO: 4165976 - RNA, 77 nt, Human
ucucauugugcaucacagaacucauacaggagagaaaccuuaugaaugcagagacugugggaaagcauucaguggga

SEQ ID NO: 4165977 - RNA, 69 nt, Human
ucucauuuacuuccacaggcugguucauccucaaagcccuccuuacguagaucugugggaucagugagg

SEQ ID NO: 4165978 - RNA, 106 nt, Human
ucucauuugauuuuuguauguuugguucaacuguucacacugaugugacgucucaggcaucacaucagugugaacaguugaaccaaacauacaaaaugcccugaga

SEQ ID NO: 4165979 - RNA, 88 nt, Human
ucucauuuuagaccugcugcuaauuucaaaauccuacaggcauuaaagaugcuaaggagggucuugcaaauuagccucuauuauguga

SEQ ID NO: 4165980 - RNA, 65 nt, Human
ucugaguugcuccuccugucugugggcccugggggaauuagguacagaaggaguagucacuaaga

SEQ ID NO: 4165981 - RNA, 87 nt, Human
ucugaguugugacucucuggagaugguucucaauugguucucuugccaguucugacaauaucuccauggcccauuccacaacucaga

SEQ ID NO: 4165982 - RNA, 76 nt, Human
ucugaucugggguggcagaauguuuaagaacauaagcugcacucagacagcaguucauaaacauuuugaggucagg

SEQ ID NO: 4165983 - RNA, 59 nt, Human
ucugaugauaaagcauccuuuaaaaauucugaauaauuuauuggaugcuugcuuacaga

SEQ ID NO: 4165984 - RNA, 80 nt, Human
ucugauuaaaaucucaguguucuaagcauuggaaguaauacuuuuuccaagcagcaacaaacuggauaaaaauuaucaga

SEQ ID NO: 4165985 - RNA, 82 nt, Human
ucugauuauguauccgugguuuuauucaugaaauuuguuuuuagcuaauacagcuuuuuucggaauaaauacgaacaucaga

SEQ ID NO: 4165986 - RNA, 66 nt, Human
ucugauuuauaauuuuaaaagaucacuacggaaaaugacguguaggcaucugagauuauaaacaga

SEQ ID NO: 4165987 - RNA, 77 nt, Human
ucugauuucugcacccuucuggguuggaacaagcccuuuugcuuccuuuuucccucccagggugcugguaggucaga

SEQ ID NO: 4165988 - RNA, 64 nt, Human
ucugcaaauuuugcugcuggaauuuuuggaauuuaccaggagguguugauagaagguuugcaga

SEQ ID NO: 4165989 - RNA, 69 nt, Human
ucugcaaccugaauucugcuuuggcaugugucauaccauauucuuagguuccagagauuagggugugga

SEQ ID NO: 4165990 - RNA, 62 nt, Human
ucugcaagugacccgggcccagccccugggauuauuuggcaagcgccuguugucacugcaga

SEQ ID NO: 4165991 - RNA, 82 nt, Human
ucugcaaucagcaucaacaaugaacauaaauaaguacacuuccuuuuuauuaauaguuacauaguugaaaugcaguugagga

SEQ ID NO: 4165992 - RNA, 84 nt, Human
ucugcaaucugugauaguuuguuacuuuuuccuugucuuucaugaucuggaaacuagaagaauacuagucaguuguuuuguaga

SEQ ID NO: 4165993 - RNA, 69 nt, Human
ucugcacacagccagcugagggcuacaccuuguagggccagguaucuagauccuauggcugugugcaga

SEQ ID NO: 4165994 - RNA, 60 nt, Human
ucugcagagccucaggagaacaagaccuagcccuuccccuuuuucugcaggcacuccaga

SEQ ID NO: 4165995 - RNA, 77 nt, Human
ucugcagaggacagguuuuccaugggcuuuuccccugggugagaccaguggcaugccuggaaagcccucccugcaga

SEQ ID NO: 4165996 - RNA, 63 nt, Human
ucugcagggcuggggcugcuccugaguuucugguaaggccuucgggagucccagcucugcgga

SEQ ID NO: 4165997 - RNA, 100 nt, Human
ucugcagggggcaggagagucagguggccccucgaggccucagggagucaccccuuggcccagccaccucggcuuucucugcucaccuacaacuugcagg

SEQ ID NO: 4165998 - RNA, 62 nt, Human
ucugcaggucagugugcagcuguuucagcaucaccuccagcugguacaccuugccugucaga

SEQ ID NO: 4165999 - RNA, 59 nt, Human
ucugcaggucucugugugcauuccggguggcgggaggugacaugaggaggcacugugga

SEQ ID NO: 4166000 - RNA, 75 nt, Human
ucugcagucucauauuuaggacucugccuuggcuagacaggcagacacuuuuauucugcauaugagagaggcggg

SEQ ID NO: 4166001 - RNA, 61 nt, Human
ucugcaguuagauccagagauuucaauaucugaauuauuguucuaaggguuuaauuaaaga

SEQ ID NO: 4166002 - RNA, 91 nt, Human
ucugcauccauuaacacuaucugucauaauuaaaggugaaauaaagacauucccagguaaaugaaagaugugugaauuuguugcuagcaga

SEQ ID NO: 4166003 - RNA, 73 nt, Human
ucugcaucccgcuucuggagucuuuacagacaaaacucauuuuugucuguaaagacuccaaaagccauguaga

SEQ ID NO: 4166004 - RNA, 100 nt, Human
ucugcauguuuaugaaagaggugguuucacggagugccuugcuaaucgagugugguguuuagaccagcagcggcacccgggaacuuauuagaaaugcaga

SEQ ID NO: 4166005 - RNA, 64 nt, Human
ucugccagagaagacccagucacucauccuguagcucugagagucauauugcuuuucugguagg

SEQ ID NO: 4166006 - RNA, 71 nt, Human
ucugccaggagccaugagcaagaauccagccaaucaccaccuucuuuguugcuugccaguucccuggcaga

SEQ ID NO: 4166007 - RNA, 65 nt, Human
ucugccagguggggagaggccaggcccgccucugcccccaggccugccugccccgcccuggcaga

SEQ ID NO: 4166008 - RNA, 69 nt, Human
ucugccaucuuaauucucuuuugucuuguaacauaacacauucgcagguucuggggauuaggauguaga

SEQ ID NO: 4166009 - RNA, 57 nt, Human
ucugcccaaggcugucacuagauguuacacgucccagugcaccccuggccuggcaga

SEQ ID NO: 4166010 - RNA, 122 nt, Human
ucugccccuauauuuugcuugaacuauuucaaacuguguaauuuauaaaauguaaggagcuaucaugccuaguuuguaagucagcuaguuacagaguggacaaacaaucauccagguccaga

SEQ ID NO: 4166011 - RNA, 99 nt, Human
ucugcccucucuccuuccuuugccaaacuucucaggcguuaagauucaacacgggcaauuuaggauuuuuggccaggggaaugagagaaugcaggcaga

SEQ ID NO: 4166012 - RNA, 76 nt, Human
ucugccgcaauacugcucaugguacaugugggucucuuuuauuggagcagauguuucagagcaggcuuguaucaga

SEQ ID NO: 4166013 - RNA, 55 nt, Human
ucugccggcuaaguaggaaccugggcagagggagcccagccugcaggcccgcaga

SEQ ID NO: 4166014 - RNA, 83 nt, Human
ucugccucacuuucuggcuuucauuuguuuaaaguuauaaaauuguccaaccuugaacuauaaguaaagcuacuuggggcaga

SEQ ID NO: 4166015 - RNA, 109 nt, Human
ucugccuccgauaguuggcucagaguuuaugaagcuugaggugagagcugccgaggaauaaaggcacugcucaggucucagcuuaauuuauccuggucugucugacaga

SEQ ID NO: 4166016 - RNA, 59 nt, Human
ucugccugagggagcugaggaaggcauccugaaggaugaucaggcauuugucaggcaga

SEQ ID NO: 4166017 - RNA, 69 nt, Human
ucugccugcccuguaucuucucccaaucccccaaaucagggggaagugagcuuugaaauagggcaggga

SEQ ID NO: 4166018 - RNA, 67 nt, Human
ucugccuggacccuggugagcugggaaccugucacacagugcccuacacgccaugguucucggcagg

SEQ ID NO: 4166019 - RNA, 108 nt, Human
ucugccuggguuuugaggaugccagugguacucuuuaaucuggcuuugccucuagccccauccuagucccagcugguguuccuuaggacccaagagacuguuggcaga

SEQ ID NO: 4166020 - RNA, 116 nt, Human
ucugccuuaauuuucagucacuucuuuggcuuacugaggagcauaucugagucaguuuuguguaagcauucaugauaguuucugaguaauuugaaaugaaucagaguuaacuaaga

SEQ ID NO: 4166021 - RNA, 65 nt, Human
ucugccuuauuuaugucugaccuggugcaguacugcugaccuuggaaaguuuaauugaggcuaga

SEQ ID NO: 4166022 - RNA, 84 nt, Human
ucugccuucuauuuucaugccugggucuggggucucugaggagggggaaggggacagaggauguggcauaagagugaacacaga

SEQ ID NO: 4166023 - RNA, 57 nt, Human
ucugccuuguugcaggcgcuauguaggcacaaaggucacagcucugaacacagcaga

SEQ ID NO: 4166024 - RNA, 58 nt, Human
ucugcguccaucugccugcuuggcacagcugcaucuguagggcaccauggacagcaga

SEQ ID NO: 4166025 - RNA, 56 nt, Human
ucugcguggcgugguucugugccuugggaagagaugaaugggaagcggccagcgga

SEQ ID NO: 4166026 - RNA, 61 nt, Human
ucugcguguuuuuguuuguaaugagauggauaaguacaucagacuagauacaacaugcaga

SEQ ID NO: 4166027 - RNA, 55 nt, Human
ucugcuaccucucugccuggggaauaagggucuucuagcaagcaggaggugcaga

SEQ ID NO: 4166028 - RNA, 75 nt, Human
ucugcuaccugugcaaucuugagcaauuuauuuaaccuuuaugagaaugaauugaauguuguacagauuagcuga

SEQ ID NO: 4166029 - RNA, 69 nt, Human
ucugcuacuuuaauuccccuuugccauguaacaugauuuguucacaggcucuagggauuaagauguaga

SEQ ID NO: 4166030 - RNA, 93 nt, Human
ucugcuaucaguggggaaaauggaggcccaagauucuacagcauauuccuggcggggcugaaauuggaaccugggccuccugacuuuggcaga

SEQ ID NO: 4166031 - RNA, 96 nt, Human
ucugcuaugaugcaagacccaccaccuccccuggggucagggacucuggcucagagagggaguguggauugaacucugagcuaaagucauggcaga

SEQ ID NO: 4166032 - RNA, 76 nt, Human
ucugcucaaagugugugagccugucaggcucugcccaguaugccaagucugcaggaccgcgucacauuugaccaga

SEQ ID NO: 4166033 - RNA, 62 nt, Human
ucugcucacuaguauucgaaggcacaugcuuugagaaaggcugauggaagcuggugagcaga

SEQ ID NO: 4166034 - RNA, 55 nt, Human
ucugcuccuaguuuagcuuacauuuuucuuacuuggagcuuuuacuaacagcaga

SEQ ID NO: 4166035 - RNA, 87 nt, Human
ucugcuccuaucccacuauucuagauuacaguauaaaggauuuaacuccuuaauacuagccuggaguacugggugcgucaggauaga

SEQ ID NO: 4166036 - RNA, 69 nt, Human
ucugcucuagguauugaggcuaaagcauaagauaggauguggucuuugaccucuaguacugggagcagg

SEQ ID NO: 4166037 - RNA, 63 nt, Human
ucugcucucuggguggugggcaacagggaggcuccuaaguaagucaguggcccagaguuugga

SEQ ID NO: 4166038 - RNA, 62 nt, Human
ucugcucuguggcuucagcuaaaaugcuguccucagcuccuccucugaacuauggaagcagg

SEQ ID NO: 4166039 - RNA, 130 nt, Human
ucugcugcuccugccucuaaccucaccccuucucccucuccaacaagccuugcugcuuucugucauucauaagugccuuggcugugauggggaccaguggauggugaggcaugugagaaaaggggaauga

SEQ ID NO: 4166040 - RNA, 93 nt, Human
ucugcugcugaaggcuuuuaauucuuuggacaauaaguggugcuacacugggcacaauuuggugcuaaagaaagaaaguuauuuguaggcaga

SEQ ID NO: 4166041 - RNA, 91 nt, Human
ucugcugcugcagcuguagaggacaguggccacuugucuccuggaaccaccauugugcuucaauagcuaccacagaaugagcaucagcaga

SEQ ID NO: 4166042 - RNA, 87 nt, Human
ucugcugucacugucuggaggacaggggcugcagcacacugggguaaccaugagcagcaccucuguucuuugguaguuguuuucaga

SEQ ID NO: 4166043 - RNA, 60 nt, Human
ucugcugugagggagagggcgaaaaugaaaugauuauugcaagccuaggcucucacaaga

SEQ ID NO: 4166044 - RNA, 109 nt, Human
ucugcuuaugugaaauacggaggguguauaaugucaagagugauguuaagagcuuaauauaauguucaguuuugaaaacauugaaugcaauuugucaacucagggcagg

SEQ ID NO: 4166045 - RNA, 76 nt, Human
ucugcuuccuugguauuuuggcugggcccucgcaacucauugaauuauuuugcagggcugaaugcagagaagcaga

SEQ ID NO: 4166046 - RNA, 72 nt, Human
ucugcuugagaaucaaagaaaacccgggaaaaguguuuuuuuccuguguccuauuucgacuuucuaaguaga

SEQ ID NO: 4166047 - RNA, 65 nt, Human
ucugcuugcuuaguccccaagagagaccacagccccucuguggcuccucaguggacugggccaga

SEQ ID NO: 4166048 - RNA, 63 nt, Human
ucugcuuuagugcaaagucuuagguguguggcuccaccuaagacuuugcacuaaaguccaaga

SEQ ID NO: 4166049 - RNA, 91 nt, Human
ucuccaagaaugauaggugugagcagaacuugucaagaguuuuauuguuugaaagcaccuacauuuuucuauuuucaacuucuuuuggaga

SEQ ID NO: 4166050 - RNA, 62 nt, Human
ucuccacaaguguugagaguacacagcuucaaauaugcauacauuucaagacuugugagaga

SEQ ID NO: 4166051 - RNA, 56 nt, Human
ucuccacucugagugccuuucagcgagagcccgccugagguucuuugagauggaga

SEQ ID NO: 4166052 - RNA, 60 nt, Human
ucuccagagaagaaaagcaccuuuuuugguucaugcgagaggagcaauucuuucugggga

SEQ ID NO: 4166053 - RNA, 129 nt, Human
ucuccagcaguuauagcuguuuuacaucuuauuugcaacaaaagggaacucuaauuaucuucaaaaagagcauaaaauggugugucuugcugcugauguaauguugauuccugaaugcugcugauagga

SEQ ID NO: 4166054 - RNA, 57 nt, Human
ucuccagcaucagucagauuuugcuucuuuuccaagaaggaucauggugcuggcaga

SEQ ID NO: 4166055 - RNA, 60 nt, Human
ucuccagccacaaguggccgugucaagucccagagacacagcagcugccucagcugggga

SEQ ID NO: 4166056 - RNA, 60 nt, Human
ucuccagguacacuuuggccagcaccagcauguagaacugugccucauguaucuggauga

SEQ ID NO: 4166057 - RNA, 55 nt, Human
ucuccagucccuucucuguuaguaauuaaucugcaacuguagagguucuggauga

SEQ ID NO: 4166058 - RNA, 82 nt, Human
ucuccauauggacuauuuucauuuuauuauuuugcugccuugggagaaucuagaugaaugugaggauauccugggcuggaga

SEQ ID NO: 4166059 - RNA, 64 nt, Human
ucuccaucacugacaaacuuaauuuucugaagccaaauucagggcagagaguucagggaagaga

SEQ ID NO: 4166060 - RNA, 129 nt, Human
ucuccaucuucugcucagagccacugcucucagucccacucccaggcaggccucugggucuggcuuuggggcuucagagggacugcucugguaguugugacacaacagugccucuggcggagacagaga

SEQ ID NO: 4166061 - RNA, 84 nt, Human
ucucccaagagcugccacugagggugcacagugcaacagauagcucuuuccuguguccuuuuaguugcuguggcccuggugaga

SEQ ID NO: 4166062 - RNA, 84 nt, Human
ucucccaaggggagcugguuccugcccuccaugugcaccuugaucaggggguuuuggagaacagggucaucacccuuccggaga

SEQ ID NO: 4166063 - RNA, 57 nt, Human
ucucccaaucagcugcuaaguguguuuuccuccucaaguagcagcugccaaaggaga

SEQ ID NO: 4166064 - RNA, 63 nt, Human
ucucccauagugucugcugagcuggauagucccucuccagggagcuuugcaggggauggguga

SEQ ID NO: 4166065 - RNA, 55 nt, Human
ucucccccagucucuacagcagcauccagcauguguguaaggaaaggggaugaga

SEQ ID NO: 4166066 - RNA, 67 nt, Human
ucuccccuuuuucauucauccauuucuuccuuauguugaaauucugaugagucagagaaaggaaaga

SEQ ID NO: 4166067 - RNA, 57 nt, Human
ucucccucaauucuuugccucacuuuuuuugacaggugcagcagauuugggggaaga

SEQ ID NO: 4166068 - RNA, 78 nt, Human
ucucccucuuaggaaacugugaggaucuuaacuuuccaggugggaaggccaaagacaccuacacagcacugugggaga

SEQ ID NO: 4166069 - RNA, 60 nt, Human
ucucccugcaaccucaggacugaugaucauaaggugucuguggagcccuuuguugggaga

SEQ ID NO: 4166070 - RNA, 67 nt, Human
ucucccugguuuauuugcuagcuuugccaguuggugaagagaggacauggugaaccuguaagggaga

SEQ ID NO: 4166071 - RNA, 62 nt, Human
ucucccuuuuuuuccuucacaaggagguuugauaggacuuuuuuauaaggaagaagauaaga

SEQ ID NO: 4166072 - RNA, 55 nt, Human
ucuccgaagucaacauucugaagaugacuucggagaaugaagaugacuucggaga

SEQ ID NO: 4166073 - RNA, 129 nt, Human
ucuccgcaguugaaaugaguuuuuaaaugggccuugcacaggcucgugcgcgcacgugugucugugaugaaugggacggugccgguggugaugagccuggccuguugauuccuuucacaacguaaaaga

SEQ ID NO: 4166074 - RNA, 95 nt, Human
ucuccggauggauggaaaccaaaaguagugaaguuguacauaaucuuauaagaaaugaacgucauuguuuuuaagcuuucuguauuaucugcuga

SEQ ID NO: 4166075 - RNA, 61 nt, Human
ucuccguaucuacuuucauacuguccccuuuucaaggauaauuggaggcaagacauggagg

SEQ ID NO: 4166076 - RNA, 77 nt, Human
ucuccuagaugaccuauauaaaguuauuuuacaaucccaaugaaaguaaccuaguaauagugucaaagacaaggaga

SEQ ID NO: 4166077 - RNA, 105 nt, Human
ucuccucauuuuccaaggguaagaacuagucuuacagccucacccagauggaauggggugggguggaaaaauguagucuaguuauaugccaggaaaaagaggaga

SEQ ID NO: 4166078 - RNA, 57 nt, Human
ucuccuccaaugguucucuguccccucuccuccaguggaacaggcuauugcaggaga

SEQ ID NO: 4166079 - RNA, 60 nt, Human
ucuccucuccuuucauguuguuugacccaaguuuuuuaacaauugaagggaacaaggaga

SEQ ID NO: 4166080 - RNA, 127 nt, Human
ucuccucuuuuuuccuuuuuucuacccuuaaguuucuguggggccuuaaauucugugagcugcagaaggacucucuccacagcuguaaauauaggggacgugggagagagaaagaaaaaaggagaga

SEQ ID NO: 4166081 - RNA, 76 nt, Human
ucuccugagcucaaagggugccuggugauauuuaagcuuuauugccuaagcuccuggcaucuucaguuuagguaga

SEQ ID NO: 4166082 - RNA, 55 nt, Human
ucuccugauagcucccauaugauacacccugauuagcaaggcagcaucaggcaga

SEQ ID NO: 4166083 - RNA, 82 nt, Human
ucuccugcaauuuggaaaacacugaaaauuuuggucaucuuaucugggacagucuuaauucagugauuuuucaaccagggga

SEQ ID NO: 4166084 - RNA, 87 nt, Human
ucuccugcugugacccucaagauggaagcaguuucuguugucugaaaggaaagaaagugcuuccuuuuugaggguuacuguuugaga

SEQ ID NO: 4166085 - RNA, 67 nt, Human
ucuccuggacaguuuguaaauauauaucaaaauguuaaaugugcaugugcguugacuguccauggga

SEQ ID NO: 4166086 - RNA, 57 nt, Human
ucuccugggugcuuuaucagaacaggcuuucaccagcuuuaugaggcucucaggaga

SEQ ID NO: 4166087 - RNA, 63 nt, Human
ucuccugguagccccaaccacugaccugugggcugcacccgggcucagggggcugauaggagg

SEQ ID NO: 4166088 - RNA, 58 nt, Human
ucuccuggucaccucagaaguccagggaaccuuagggcauacuguauggaucaguagg

SEQ ID NO: 4166089 - RNA, 110 nt, Human
ucuccuucccauucccuggcccccggcucugcccugggccguuguaaaucggagagauucugcggagcggagggcagagguggcggccgcggggacucgggaggcggaga

SEQ ID NO: 4166090 - RNA, 60 nt, Human
ucuccuuccccuacucagcauccagucugccuagaaggaaaucugaaugcggggaggaga

SEQ ID NO: 4166091 - RNA, 68 nt, Human
ucuccuuccuccaaauggaccagaccaguauuuguaagucaccagguccaugauaggaaguuccgaga

SEQ ID NO: 4166092 - RNA, 55 nt, Human
ucuccuugcucuuaaccacuaugcauauuauuuauagcaaauggagaguaagaga

SEQ ID NO: 4166093 - RNA, 68 nt, Human
ucuccuugugcuggguccuuccagugccaugaguugggauucuugaugggcuuagaaagcaaguggga

SEQ ID NO: 4166094 - RNA, 78 nt, Human
ucuccuuguucucuucucauugaacauguuuugcucauuagcaucaucauugcacaaugaggaaaggcagaauggaga

SEQ ID NO: 4166095 - RNA, 62 nt, Human
ucuccuuuccucugaugcugacuuggaccagaaggcuguuccuauggacaggaggaaggaga

SEQ ID NO: 4166096 - RNA, 68 nt, Human
ucuccuuucuccuuccgacuucaugcccagcaggagcuuuucagaauacaaggagggggaagagggga

SEQ ID NO: 4166097 - RNA, 122 nt, Human
ucuccuuucugccuuuuauuaccugcgugaccugagauauuuuacuuguuauuuuucucaucuuuaaaaugaagauaagaacagugucugucucacagggcuagugugaugcagcagggaga

SEQ ID NO: 4166098 - RNA, 55 nt, Human
ucuccuuuucuaucuggauugagggccaccaacccaaaugcauggaaguuggaga

SEQ ID NO: 4166099 - RNA, 89 nt, Human
ucucgguuuauccugaugcguaaacagaagcugugucaaguggagggcggggaggucccucuccauucccuacaguuuucauccugagg

SEQ ID NO: 4166100 - RNA, 74 nt, Human
ucucuaaagaggcagacaaggcuggcuuccauaaagagcaagggaagaggccuuggucugaccugaggaagagg

SEQ ID NO: 4166101 - RNA, 61 nt, Human
ucucuacagacacuguugacuucugcuucuaauugggggaccucauaguuaacuguaaaga

SEQ ID NO: 4166102 - RNA, 74 nt, Human
ucucuacuucacugaguuucauccaggugcaaaaaugaaaaauuauaaccugccaagcaucaguggcagaguga

SEQ ID NO: 4166103 - RNA, 76 nt, Human
ucucuagaaucgaucccccagcucagguccugaggacaucuggcaggauccugggaaugggagggucaugaggaga

SEQ ID NO: 4166104 - RNA, 105 nt, Human
ucucuagacccgaaaauguccucugugguuuggcugacaaauggaaucucuuuagaaaacaugcaaaaggguaucucagcuauccaugaacgauucggucuagga

SEQ ID NO: 4166105 - RNA, 64 nt, Human
ucucuaggaauagcaaaguaggacagaaauaaggcuuucugucucccaggcaauuccuaggaga

SEQ ID NO: 4166106 - RNA, 84 nt, Human
ucucuaguuucacaacuuguuguauggaaaacugaaaugggcccuagaaucagccuaucaucuuguugucaugcagccuggaga

SEQ ID NO: 4166107 - RNA, 113 nt, Human
ucucuauaugugauagcccauuuaagcaggccccacuuaacuugaaagccaaauaacaagcucgguuucaaguuaaauggggucuuucuucaauaggccaccccauauagaga

SEQ ID NO: 4166108 - RNA, 99 nt, Human
ucucuauccagaugcuauauuguugauugauauacuauaauacacuuccucaggacagauguuacaguaugaucucuauaauguuaacagaaauggaga

SEQ ID NO: 4166109 - RNA, 55 nt, Human
ucucucaaggcugcuggauggugucaucugcagcacugucauuugcuuagggagg

SEQ ID NO: 4166110 - RNA, 63 nt, Human
ucucucagauggagugugaaugguaaccaguauaguuugcuaguccauaaauaucugggauga

SEQ ID NO: 4166111 - RNA, 66 nt, Human
ucucuccccaggacuaaguugcaaucuguuggauuucuuugaguuuuguucuuguccagggaaaga

SEQ ID NO: 4166112 - RNA, 60 nt, Human
ucucuccucucuuggccucaguuacccucacugcaaaaugggugcaaaggugaggagaga

SEQ ID NO: 4166113 - RNA, 80 nt, Human
ucucuccugcauucaggcugacucagggucaugaguaucucucaggaacauggcagugauucagccuuugucggugggga

SEQ ID NO: 4166114 - RNA, 74 nt, Human
ucucuccuuauugcacagaaucauuuucagcuguuuuaugaacugcuggaagauuauuuuguauuuagggugga

SEQ ID NO: 4166115 - RNA, 84 nt, Human
ucucucucuuucuccuuaccuugccuauuguucuuacauguucuuuuagcaacaggaauauuauggcaauuuugaagagagugg

SEQ ID NO: 4166116 - RNA, 55 nt, Human
ucucucugcgaauuagguuugcauuaaguuuucuaucuuuauuacgcagagaaga

SEQ ID NO: 4166117 - RNA, 66 nt, Human
ucucucuuaacaucugucucuaguuggguucagucaguggggagcccuggcagaugacaggagaga

SEQ ID NO: 4166118 - RNA, 58 nt, Human
ucucucuucuuuguuaagaauguugcuuuuacaguuuucugauacuuaggagaggaga

SEQ ID NO: 4166119 - RNA, 115 nt, Human
ucgaccacugcccuucuuucccagcauaggucagcuaagggcgugugggcggagcuuaugugucucuguccaugguccuuauuaccagggcaaaacgaaggaggcagaaggaaga

SEQ ID NO: 4166120 - RNA, 120 nt, Human
ucgacugucauggauuuggagcuuuccuugccaguggcugaguuacgaacagagcaaacauagagcccgcuaugcuuuguaguaauauggcggauaaagagcuuuuguccugguagcuga

SEQ ID NO: 4166121 - RNA, 86 nt, Human
ucgaggacucugugggugguagccaugggcaaaugcagagcugcugcuguugcuuugcagugccuguaggacuuagagggccugga

SEQ ID NO: 4166122 - RNA, 80 nt, Human
ucgaucguuuagaaaucuuauuagcuugcuuugggcuuucuuuuagaguuggagaaauuaaaauuuagagaccagguugg

SEQ ID NO: 4166123 - RNA, 93 nt, Human
ucgauggaaucuuauagaauuagagagauuuugaucacagugauguaguccccuagagaaucucuccaauaucugccugccugauaccaugga

SEQ ID NO: 4166124 - RNA, 55 nt, Human
ucgauguuacaaugggcagauuaaaguggagacuuguuuugcaugguaacauuga

SEQ ID NO: 4166125 - RNA, 71 nt, Human
ucgauuucuaguccagugaucuuuccaggcugccucuugguugugucacuuagauuagaaccuuaaauuga

SEQ ID NO: 4166126 - RNA, 62 nt, Human
ucgcaccuguccucugauuauggugucucucaaaaauuccaucagguucugguaggcuguga

SEQ ID NO: 4166127 - RNA, 55 nt, Human
ucgcaugggucccccagagacgguguaacccugcaagcauuuuggugacccugga

SEQ ID NO: 4166128 - RNA, 129 nt, Human
ucgcauucucucagagacacuuugcucauguacaccauuuggcaagaaagagucauuggcauguccuuggaugaccccuugucuaaguggacuuuuuggaugguacuguugaucaaugggggcuuugua

SEQ ID NO: 4166129 - RNA, 58 nt, Human
ucgccaucgucggacacagugacuuguuuuugagaugcucacagucugaugguggaga

SEQ ID NO: 4166130 - RNA, 69 nt, Human
ucgcccucgguggucccagccccggagcgcgaggccgagcgcgucugaguugcgggggcucacgggcga

SEQ ID NO: 4166131 - RNA, 55 nt, Human
ucgcccugccagcccucugaacacaggccuuucugggagagggaaagcaggcuga

SEQ ID NO: 4166132 - RNA, 68 nt, Human
ucgccugaacccaggaggcagagguugcagugagccgagaucuugccacugcacuccagccuaggcga

SEQ ID NO: 4166133 - RNA, 84 nt, Human
ucgccugucuuaaguacaggguuagugacggucagggggguucuuggauccuguagugaaccacuguacacugggacucuguga

SEQ ID NO: 4166134 - RNA, 121 nt, Human
ucgccuuccuuggcaggucugucuggugcugacucugucgugagcaguaguugcuccagaguuuguuccuuccuguuccucuggucagagucucaccaugagaugccuucagcucaggcga

SEQ ID NO: 4166135 - RNA, 87 nt, Human
ucgcgguggccccuggggguuguaguuucugucgcaaacaaaacgcgccggcagcaucgaaacuacauuccccacaagucaacgcga

SEQ ID NO: 4166136 - RNA, 70 nt, Human
ucgcucccagcugaggcagccacacaggagcaggaggcaccugacaggagaagcgcagcauggagagugg

SEQ ID NO: 4166137 - RNA, 71 nt, Human
ucgcuccuguccuccggagcgggcugugcggaggcagccgggagaacagucggcuccgaggacaagaguga

SEQ ID NO: 4166138 - RNA, 73 nt, Human
ucgcucuaccuugggcugcugucugcacaugcucguaacgacacccccagcaggggcccagcggcacgggcga

SEQ ID NO: 4166139 - RNA, 76 nt, Human
ucgcuugaacccaggaggcagaaguugcagugagcugagaucaugccacugcacuccauccugggaaacagaguga

SEQ ID NO: 4166140 - RNA, 76 nt, Human
ucgcuugaacccuggaggcggagguugcagugagccgagauggcaccacugcacuccagccugggcaacaaaguga

SEQ ID NO: 4166141 - RNA, 68 nt, Human
ucgcuugaaccugggaggcagagguugcagugagccgagaucgcaccacugaauuccagccugggcga

SEQ ID NO: 4166142 - RNA, 77 nt, Human
ucgcuugagaccaggagguuggaggcugcagugagcugagaucaugccacugcacuccagccugggugacagaguga

SEQ ID NO: 4166143 - RNA, 76 nt, Human
ucgcuugagcccaggaggagaggcugcagugagcugagaucaugccacugcacuccagccugggugacaaaagcga

SEQ ID NO: 4166144 - RNA, 76 nt, Human
ucgcuugagccugggaggcggagguugcagugagccgauguggccccacugcaccucagccugggcgacagaguga

SEQ ID NO: 4166145 - RNA, 63 nt, Human
ucggauggcaaauuuuggcagagcaguuccaacagcacugcuggcuacauuauugcugucugg

SEQ ID NO: 4166146 - RNA, 76 nt, Human
ucggauguacagagacuaccauuaauauugcagugugugucuuuuguauuaaguugguuucugaaaauaucucuga

SEQ ID NO: 4166147 - RNA, 85 nt, Human
ucggcagccagcgcugcgggggaggacguggcuccugggauuuugccugucggagcuguccgccccugggccgagcgccugcuga

SEQ ID NO: 4166148 - RNA, 56 nt, Human
ucggcagggccgugagcggugucugugcuugaggaccagcuccaggccccugcuga

SEQ ID NO: 4166149 - RNA, 88 nt, Human
ucggcauugguugaucugacaaguuguguguauagaaacuagccuauauggagacacgaaugucaaaagaaguuuuaccgaugauaga

SEQ ID NO: 4166150 - RNA, 74 nt, Human
ucggcucuauccugagaaggcacagcuugcacgugaccuccugggcccggcggcugugucuucacaggagccga

SEQ ID NO: 4166151 - RNA, 56 nt, Human
ucgggacgguggcauuugugcccccugggaaggggaugagcacugcugccuccugg

SEQ ID NO: 4166152 - RNA, 60 nt, Human
ucgggcagagccuaaagcaugugauaaaugaaaugcuaucacaauacagguugugucuga

SEQ ID NO: 4166153 - RNA, 77 nt, Human
ucgggccagcgccgggcugagguguccagaggcggcggcagcuggcagugcccucagcccccaaguguccagccugg

SEQ ID NO: 4166154 - RNA, 66 nt, Human
ucgggccugguugugugugguuguauguggacuuggacaugucugcaccgaacccacagcucccga

SEQ ID NO: 4166155 - RNA, 61 nt, Human
ucggggcacuuccaggcugaggcugggcggaauuggcccggcuuucccuguggaguuccga

SEQ ID NO: 4166156 - RNA, 96 nt, Human
ucggggucagcuaggcccucugggcagccucaggccaggguggggaaggaugcuccccccugcuccccacaggcugcccgcaggccaccugcccga

SEQ ID NO: 4166157 - RNA, 87 nt, Human
ucggucauguguuuuucaucuuuguaucccuaacacauaacaguacuuggcauuuguuaguaaucaauaaguguaccacaugacuga

SEQ ID NO: 4166158 - RNA, 60 nt, Human
ucggugucccuuagagauaugggguuuauuuccccuccccaugauucugggcuacacugg

SEQ ID NO: 4166159 - RNA, 70 nt, Human
ucgguguucacugugaacuuugcuuucuccucccaggugagcaggagccagcuguaagcagugauucuga

SEQ ID NO: 4166160 - RNA, 87 nt, Human
ucgguucgcauaugauuaaauguuuaaguguaggagcaacagaaacaugucaauguuuaggcauuauaaacaucaggagguggaaga

SEQ ID NO: 4166161 - RNA, 69 nt, Human
ucgguugcauuucucaguggaauaaaaugcaauaaauugggcuuguuuugcugagacugaugugaggga

SEQ ID NO: 4166162 - RNA, 80 nt, Human
ucguaaauuauuuuucaugucuuacaugguuaaagauacguuucacuugagcuuguaacagacauaaaaaugacccaugg

SEQ ID NO: 4166163 - RNA, 94 nt, Human
ucgucuuaaggagauauaauuauagccgcuauuuugcuggcuuuuaauugaagacaaagcaaacagugugcuaagaaauuauauucaaugauga

SEQ ID NO: 4166164 - RNA, 65 nt, Human
ucgugaaaggcaugugcaacuacaaauacuucauagcuguuuggguugcucauucuacaucacga

SEQ ID NO: 4166165 - RNA, 77 nt, Human
ucgugauccaccagaggauggaaaauuucuggcuuggacgucuggucaauauauucugucucuuugagagaaaacga

SEQ ID NO: 4166166 - RNA, 57 nt, Human
ucguggcucacgucugucaucucagcacuuugggaggcugaggcaggcggaucacga

SEQ ID NO: 4166167 - RNA, 87 nt, Human
ucguguuucccuucauugcuauuucauguuccuauggccggguucuccuugcugucuaccacaugaaaucugcagaagggaagaaga

SEQ ID NO: 4166168 - RNA, 74 nt, Human
ucguucaaucaaccaauaucuauucagcagcuacuuggugccaggcacugaaguggguguuggguacacaauga

SEQ ID NO: 4166169 - RNA, 72 nt, Human
ucguuucuccauaccagcuucagacacaccuuggguuuaaaaaggugguuguaggcuggucugagagcccga

SEQ ID NO: 4166170 - RNA, 64 nt, Human
ucguuuuuauugcugauaguguuuauaaaaauguuuuauaguuuauggucggcugugagaaaga

SEQ ID NO: 4166171 - RNA, 71 nt, Human
ucuaaaauguaucacagcaauguagucacucagugccugcccugacuguaugaacugugucucauuaugga

SEQ ID NO: 4166172 - RNA, 55 nt, Human
ucuaaacauugugauagaccuuggguccuuuuagggaaauacugcaauuuuugga

SEQ ID NO: 4166173 - RNA, 63 nt, Human
ucuaaacuugaauaucaacgaccgguguugaguuagucagcacugccuguguucaggguaaga

SEQ ID NO: 4166174 - RNA, 102 nt, Human
ucuaaagacugaugggcaugaaaauaacauuguugugaauaagugagaaaguaacuaacauacuagucauauaauauguuauucguaauuauugguccaaga

SEQ ID NO: 4166175 - RNA, 68 nt, Human
ucuaaaggcugggaaaccugaaguugugauguccaagggcagcagaagaagggugucccagcucuaga

SEQ ID NO: 4166176 - RNA, 77 nt, Human
ucuaaaguuaguugcagucacacucuaaaguaguaacccagcuggcaacugugaguuuggcugcauggauuaguaga

SEQ ID NO: 4166177 - RNA, 69 nt, Human
ucuaaauggugaaaugaugggcuuagaaggaagaaaccaaauuuuaguaccaucauuugccucuuuagg

SEQ ID NO: 4166178 - RNA, 82 nt, Human
ucuaaauuuggcaaguuucacuaaacaaauguuucuguaagaauuucauagaaaagugcucuagugagagcuuaucuuuaga

SEQ ID NO: 4166179 - RNA, 58 nt, Human
ucuaacucugccaggacacagauccacagggucagcccugcauccugagcagcuuaga

SEQ ID NO: 4166180 - RNA, 72 nt, Human
ucuaagguccagaagggcaugggaugaaaaguagggcucucuucugcucucuccuaucucucaggccccaga

SEQ ID NO: 4166181 - RNA, 76 nt, Human
ucuaaucugucuucuugccuucuguuauaccugucucuauacuaaagccagggugaaguucaaaagacagauuuga

SEQ ID NO: 4166182 - RNA, 79 nt, Human
ucuaaugaaaaggagaauuaaaaaaggagagcuugcuuuguuaggagcuugcggucaguuuugaccuucuugaauugga

SEQ ID NO: 4166183 - RNA, 78 nt, Human
ucuaauuacucaucuuuucauuaauucuuuggauaaaaacuuauuggccaaagugugggagaagagguaggaauaaga

SEQ ID NO: 4166184 - RNA, 119 nt, Human
ucuacaaauggggcugugcccuggaggaaacagugaacuuggcaggccauggggaacgcuuggccucaacgccucuucucuucauuuuuuccucccaggguguguacucauugaacaga

SEQ ID NO: 4166185 - RNA, 56 nt, Human
ucuacaacaagucaauugccugggucuucgaucaggauucaguugaaauguuugga

SEQ ID NO: 4166186 - RNA, 84 nt, Human
ucuacaauuuauaguuauucugauuaucuguguuugaaaguugauagacacagauuucacuggaauagaugaaagaauuuuaga

SEQ ID NO: 4166187 - RNA, 70 nt, Human
ucuacacaagugaguggcacaaacaggaaggcauaaauucaauuuugccuuugccauucaccauguuaga

SEQ ID NO: 4166188 - RNA, 75 nt, Human
ucaccaccaccuccccugcucccugcuucugaggugauagccuuggggaaaggaucagugggaggcuggcuguga

SEQ ID NO: 4166189 - RNA, 59 nt, Human
ucaccacuaggaauuguguaguuuacaaaacacauaaaaagcccuuuccugagagguga

SEQ ID NO: 4166190 - RNA, 55 nt, Human
ucaccacugaacagaccuuuggcaaagagucuacaaagguaaguuuucagaguga

SEQ ID NO: 4166191 - RNA, 63 nt, Human
ucaccagacaguagcccagcaguugucucuuauuagaagagcucagggcgaucugucucggga

SEQ ID NO: 4166192 - RNA, 62 nt, Human
ucaccaggacugagaccuugggguagucacaucauucuagaccucaugucucucaucuguga

SEQ ID NO: 4166193 - RNA, 69 nt, Human
ucaccaugucaugugucuuuaggucacagcuucuuccccuugauguuguacuaucaccaugucauguga

SEQ ID NO: 4166194 - RNA, 69 nt, Human
ucaccauuaaggacuuucagcugagguuuucaaacuguguuucucaaagucugagguucuguguggugg

SEQ ID NO: 4166195 - RNA, 72 nt, Human
ucaccauucuuuacaucagcacagcauuuuauccauuuugaggaagcugcaguugaggucaggaguggauga

SEQ ID NO: 4166196 - RNA, 65 nt, Human
ucacccaugcauguuuugcaacaagugaccccuguuuggggucaugcuugugcagcgucagguga

SEQ ID NO: 4166197 - RNA, 88 nt, Human
ucacccgggguucguguuaaaugcagauucugacucagcaggucugaguggguccaggauucuguguuucucauauguuccuggguga

SEQ ID NO: 4166198 - RNA, 55 nt, Human
ucacccucaguuuguuucagcagugugagcuggcugagguccugcugaguggugg

SEQ ID NO: 4166199 - RNA, 60 nt, Human
ucacccucauuccuaagguucuagggaaaguauuuuuaacacaggaacucugagaggugg

SEQ ID NO: 4166200 - RNA, 64 nt, Human
ucacccugcuccuauccaguugccugguccaagcucagauccaggcugucuaaugggagaguga

SEQ ID NO: 4166201 - RNA, 62 nt, Human
ucacccuucacccucacauucccucccucccuugaguguccagagccgggcugaaugggugg

SEQ ID NO: 4166202 - RNA, 130 nt, Human
ucacccuuuccccaggaaaucccucuuaacuuuuccggauuacagccaggcugagcacaauguuucccgcaacccagcagggcuggauuuggcaagagugacuaaugggaccuggccaggagucagguga

SEQ ID NO: 4166203 - RNA, 68 nt, Human
ucaccucagauuacaguuaauuuaccuucuuuacauauuuagagaaaaucacugacugugcuugguga

SEQ ID NO: 4166204 - RNA, 63 nt, Human
ucaccuccgcuuguguauaccuccaacugucgguugauguuggauuugucuaccagggaauga

SEQ ID NO: 4166205 - RNA, 88 nt, Human
ucaccucuaaacuccaugaagauagcugcacaggaaguaagauuuaacuagggguugaaucagugacaguuggaugggguggagguga

SEQ ID NO: 4166206 - RNA, 72 nt, Human
ucaccucugccuaauuucugacucacauacugacugguuucauguacugucgaaguugauggauggagguga

SEQ ID NO: 4166207 - RNA, 76 nt, Human
ucaccucuuuuacaccaaaaggccuacaggguguggucacuguuucuuuugggucauuuugggguggaaauggugg

SEQ ID NO: 4166208 - RNA, 59 nt, Human
ucaccucuuuuuuaacaggcuuccauccuuaucucagugaccagccugggaaggaguga

SEQ ID NO: 4166209 - RNA, 63 nt, Human
ucaccugcacccagucaccugcaggguuugaugcugccuccagggcagacggggagcaucuga

SEQ ID NO: 4166210 - RNA, 75 nt, Human
ucaccuggaagcuuguuagaaacgcagaguauuacauuguaacaagcaguccauuguaacaaguucccuagguga

SEQ ID NO: 4166211 - RNA, 72 nt, Human
ucaccugggggcaggggugcagugggggcugcuggccacaggcucccaagcacugaccccacaucccuguga

SEQ ID NO: 4166212 - RNA, 113 nt, Human
ucaccugggggugcucguuaaaacagacugcugggcuccauccccacaguuucucauugaguaggucugggguggggccaggcaauuugcauuucuaacacauucccgaguga

SEQ ID NO: 4166213 - RNA, 64 nt, Human
ucaccuuaacaaucugaccaucucauuuaaccuccucauguagcugucucagauguuagggugg

SEQ ID NO: 4166214 - RNA, 112 nt, Human
ucaccuuggagcuuguuaaaauucaaauuccugggcuccuucccggguuccuguuucaguagguccagggugggguccaggaaccacugcguuuaacaagcuccccagguga

SEQ ID NO: 4166215 - RNA, 100 nt, Human
ucaccuuuuccuggggaagaugaauucuuguuauguugguuucuuaucgcauccuggauuagggaggaaaugugcagcgaauucagacuagggaugguga

SEQ ID NO: 4166216 - RNA, 73 nt, Human
ucacggacaaaccaggacuuuguauucagcuucaaggaagaggugagagaagaaucuugguaauaguaaguga

SEQ ID NO: 4166217 - RNA, 100 nt, Human
ucacgggguaggcucgggaugggcuuagcaaaagcaggcugucucuguuuggugcugccugcugccuguggaggguucccccaucucgggcccuguguga

SEQ ID NO: 4166218 - RNA, 86 nt, Human
ucacgugcucugcuccaccuggucagagacccuugaccuuuagaagacuggaccugagggcguggcugguggaccugagggcgugg

SEQ ID NO: 4166219 - RNA, 70 nt, Human
ucacuaucaccugagagcuauaagguuuuacuagaauuuuguuuuaaguaggaagcuaugggagauguga

SEQ ID NO: 4166220 - RNA, 130 nt, Human
ucacuccagaaauacuauaauagucaaaaguacgaauaaagcuauuccucucuuuuuauggcaguaaaauagaaagagaugaaugcuuuaaguguaauucugccugugguuucaguaguuuuggacagga

SEQ ID NO: 4166221 - RNA, 76 nt, Human
ucacuccaucacccaagcuggagugcaguggcucuaucuuggcccacugcaaacuccaccuccuggguucaagugg

SEQ ID NO: 4166222 - RNA, 70 nt, Human
ucacucccacagaucucaagcaggccaggagcugugauaccgccuggaagugugucgugggaauuuguga

SEQ ID NO: 4166223 - RNA, 66 nt, Human
ucacuccuucccuaccaucaauguuucucuacugcaugaugaacaaagaugggugggaaagagaga

SEQ ID NO: 4166224 - RNA, 62 nt, Human
ucacucucaaauauuaaucuuuggcaugucuuuauuugcuugggguauauuuugagaaguga

SEQ ID NO: 4166225 - RNA, 92 nt, Human
ucacucucagagcccacucugagcuuugcagccccugggcaacagaagguuacaggaggauuaucaaaggauuagggggcucugcugaguga

SEQ ID NO: 4166226 - RNA, 77 nt, Human
ucacucuuguugccuaggcuggaaugcagugguaugaucgcagcucacugcaaccuccgccucucagguucaaguga

SEQ ID NO: 4166227 - RNA, 99 nt, Human
ucacugaaaaauuaagagcaccuuagaaaucgaacucagguuagaaucauuuaagcaaucugacacuuugauuugauuuuugacuuggaauuugaguga

SEQ ID NO: 4166228 - RNA, 74 nt, Human
ucacugagcugauagauucugaaugcuagauaaaauuuauaacaguauuucugaauauuaucauaaggcagugg

SEQ ID NO: 4166229 - RNA, 69 nt, Human
ucacugaggaugaacaacuguuuuguuuuccagguuuuuuggaguuaacacauuaguucuccuagauga

SEQ ID NO: 4166230 - RNA, 72 nt, Human
ucacugaggccagcagaaagcuuauuuugacugucuaugaagcaguuaauucuguuuuuucuccuucaguga

SEQ ID NO: 4166231 - RNA, 67 nt, Human
ucacugauacuauagagaccucaaaaagaaugaaugaccuucagugagaucuuuguaguaucaauga

SEQ ID NO: 4166232 - RNA, 101 nt, Human
ucacuggaguaacaucugugucauuggaguaaugucugugucacuggaguaacaucugugucacuggaauacugucugugucacuggaguaacaucugugg

SEQ ID NO: 4166233 - RNA, 68 nt, Human
ucacugggccuucucacuuccugcuagaauuauuacaaaauauaucuggaagacagugagcccgcuga

SEQ ID NO: 4166234 - RNA, 75 nt, Human
ucacugucuccauuuucaaguagcagaauaucuguagaaacagaggguugcugucagauaaaugaaugauaauga

SEQ ID NO: 4166235 - RNA, 70 nt, Human
ucacugugagcaauucaaaggcaggaauuaagucuuauuaauuucucucuuccguugcccagcauaguga

SEQ ID NO: 4166236 - RNA, 82 nt, Human
ucacuguggcucuuacuugaggucuucagcugacaccuucuccagggaggcuggcagccaccucagcagaaagccaccuuga

SEQ ID NO: 4166237 - RNA, 100 nt, Human
ucacuguguuguccguucucacaauaucucugugagccagguccuagugcugccccacuuuauagauuaggaggcuacagaggggcgaggugaucugugg

SEQ ID NO: 4166238 - RNA, 60 nt, Human
ucacuguuucuucccagcagagcuaagagacuucuagagccucuuguggauggucagcga

SEQ ID NO: 4166239 - RNA, 93 nt, Human
ucacuguuugaagccaagucauuucucauggaacauagcuccuccauaaccacuuauucuuggaggcgcugcaugugaaggaguuugcaguga

SEQ ID NO: 4166240 - RNA, 71 nt, Human
ucacuguuuugccugcacuuccuggguuuucuauacuuagcuccgggcuucaguuuuagguaacgcacuga

SEQ ID NO: 4166241 - RNA, 85 nt, Human
ucacuguuuuuggaauaucuuggaagugcguaaaacugcuucaguuuauuauguagaagugcauuuccagauuucuggagugugg

SEQ ID NO: 4166242 - RNA, 76 nt, Human
ucacuuaaacccaggaggccaagguugcagugagcagagauaaugccacugcacuccauccugggcaacaaaguga

SEQ ID NO: 4166243 - RNA, 75 nt, Human
ucacuucaaggaauaucuagaaaaauugggaguccauguugcaggaguucucuaguuuccagauuucuugaagga

SEQ ID NO: 4166244 - RNA, 95 nt, Human
ucacuucauacuuguugauggcaaccgaugacugaguccagaugagagcuuaacugaagcuucaguggacuguagugugucaucuaauugaguga

SEQ ID NO: 4166245 - RNA, 58 nt, Human
ucacuuccaggccccccacgcuaauggcuggugaaaccuuagccagguggggcuguga

SEQ ID NO: 4166246 - RNA, 59 nt, Human
ucacuucccucuucagcucccacaccuccaucuggagcccaguuggggcagggaagaga

SEQ ID NO: 4166247 - RNA, 59 nt, Human
ucacuucuaaauaacuguucaucuguaaccucuaacagagacaggucagggagagguga

SEQ ID NO: 4166248 - RNA, 75 nt, Human
ucacuugaacccaggagacggaggugcagugagccgugaucgugccacugaacuccagccuggguggcugaguga

SEQ ID NO: 4166249 - RNA, 76 nt, Human
ucacuugaacccaggagcugaagguugcagugagcugagaucacaccacugcacuccagcccgggcaacagagugg

SEQ ID NO: 4166250 - RNA, 76 nt, Human
ucacuugaacccaggaggcagaaguugcagugagccgaguuugcgccauugcacuccugccugggcaacaagagga

SEQ ID NO: 4166251 - RNA, 77 nt, Human
ucacuugaacccgggaggaggaaguugcagugagccaagaucgcgccauugcacuccagccugggcaacaagaguga

SEQ ID NO: 4166252 - RNA, 68 nt, Human
ucacuugaaccugggaggcagagguugcagugagcugagaucgugccucugcaccccagccugaguga

SEQ ID NO: 4166253 - RNA, 77 nt, Human
ucacuugagcccaggaggcagauguugcagugagcggagauggggcuacugcacuccagccugggacacaagaguga

SEQ ID NO: 4166254 - RNA, 69 nt, Human
ucacuuggcccagaacagugucacaugucagcuagauuaguagacauggaaauguuuuacccauugugg

SEQ ID NO: 4166255 - RNA, 88 nt, Human
ucacuugggggcuuguuagagaugcagagucucaggccccaccccagaccugaaucacacacugcauuucaacaaggcccacagguga

SEQ ID NO: 4166256 - RNA, 90 nt, Human
ucacuuuccacuucccaccuguccaggggugcccuguguugaccucggcaugagcuucccagacaggauggguugcaguggguggaguga

SEQ ID NO: 4166257 - RNA, 72 nt, Human
ucugcuuucagcaaaagccagcauaagcucauuuacccaggugugacugaagcgguugguuuugcaaucaga

SEQ ID NO: 4166258 - RNA, 111 nt, Human
ucugcuuugcagcaaauaugguuauagcaagauuccaguuuauuuccaagaugacaaaaaugaauuugauauguuaggaagacugauuugaacaaauguagcagagacaga

SEQ ID NO: 4166259 - RNA, 77 nt, Human
ucugcuuuuucauugacugaaaaauaaugaacuugaaaucuagccuuaauuuuucagccagugaugcugaagacaga

SEQ ID NO: 4166260 - RNA, 66 nt, Human
ucuggaaacagaucauaacuaagccaaucacggaaaccucauccgcuuaugagugauuuguucaga

SEQ ID NO: 4166261 - RNA, 58 nt, Human
ucuggaaggaagagcugagucccuggcuauacccugccauagccugcuuucuccuaga

SEQ ID NO: 4166262 - RNA, 68 nt, Human
ucuggaaguacuuuuguugccugcagcacuagcucaccuggcacugugacagcaagagugagguuaga

SEQ ID NO: 4166263 - RNA, 67 nt, Human
ucuggaaugcggagaguuggagaaucagauaaaagucgagguaucucucucuucagcagcuuccaga

SEQ ID NO: 4166264 - RNA, 111 nt, Human
ucuggaauguuugucugugccugggccugugcugggugugagggacauaacaagugugucacuguccuccagggcuccagccuaggacaaggaacaggcucacaagccaga

SEQ ID NO: 4166265 - RNA, 82 nt, Human
ucuggaccaaucagcgugcugucaugauguaguggaccauuauguugaucugcaggauguuaggaugaucaggauuucuaga

SEQ ID NO: 4166266 - RNA, 93 nt, Human
ucuggacccauggacugccuuccaaccccagacuccacacaacccacaacccuugagugggaguagaagcgggugagggcccugggguccagg

SEQ ID NO: 4166267 - RNA, 105 nt, Human
ucuggagagaccugugaucgucaugccacagcuucccagaggggcuauccaaagucuucuggcuggcagugauggugugcaccaugaucacgaguccuuccacga

SEQ ID NO: 4166268 - RNA, 60 nt, Human
ucuggagauaagacagacagaugacaaagauucaugacauucagacuguuccucucuaga

SEQ ID NO: 4166269 - RNA, 76 nt, Human
ucuggagcuaggaaguccaagaucagagugcuggcaaauucaauaucugguaaggaucugcuuucuaguucauaga

SEQ ID NO: 4166270 - RNA, 66 nt, Human
ucuggaguugcuguuaggucugauugaaugauugacacaccacaagcagaaaucuagaacuccaga

SEQ ID NO: 4166271 - RNA, 83 nt, Human
ucuggaguuuuggaaagaggucuaugcuaggggaacuuguggaaguucucuuuggauagcuuugguauucucagaaaaauaga

SEQ ID NO: 4166272 - RNA, 69 nt, Human
ucuggaucugcaguagcaccuguggcuuuugagcaccuuaaauguggcuagcgcaacugaggaaccaga

SEQ ID NO: 4166273 - RNA, 110 nt, Human
ucuggaugacuucacugguguuggggacuuugcaaagccuagccuuguccaaguuggucaacagcugaucuuugaugaagcaaccaucacuugugaaagguuauuucagg

SEQ ID NO: 4166274 - RNA, 58 nt, Human
ucuggaugagcuagauccaaugcuaccuccuccaggaagcccucauugguucuccaga

SEQ ID NO: 4166275 - RNA, 67 nt, Human
ucuggaugagguuaugcaucaugguaauggaauuaugccauguccuucucauugccucauaccaugg

SEQ ID NO: 4166276 - RNA, 59 nt, Human
ucuggauggucagcucuuccugcucugugacaggcagaaaggcagggcagggccccggg

SEQ ID NO: 4166277 - RNA, 91 nt, Human
ucuggauuccuagcugagagacuacaucagcacuuuguucccgaagccacagggaaccguggauuuguagucauuucuaauggaguccaga

SEQ ID NO: 4166278 - RNA, 61 nt, Human
ucuggcaaggcacaggguuugcaauuugauucacagucacugucugccccuguuuaccaga

SEQ ID NO: 4166279 - RNA, 56 nt, Human
ucuggcagcacagcaugccccaggauggagcuggcucagacagcugugcagugggg

SEQ ID NO: 4166280 - RNA, 59 nt, Human
ucuggcagggguucugcacuugaccuaagagguaaggcaccagcacuucugaaaccaga

SEQ ID NO: 4166281 - RNA, 69 nt, Human
ucuggcaguaaagagccuucauuaaauuauuuuuaauaguaagcauuuauugaagcuuauuacguuaga

SEQ ID NO: 4166282 - RNA, 97 nt, Human
ucuggcaugucauagggcucagggacuaggugcugccugaaacucuuguggccgagucaggucccccauuagcucugaguucuggaaauugaccaga

SEQ ID NO: 4166283 - RNA, 72 nt, Human
ucuggccaacagucuugaaaacagugacccaguaguugggaaacugaauucaggacucuuuuagcaaguaga

SEQ ID NO: 4166284 - RNA, 77 nt, Human
ucuggccagcaugguuuugauuguauguuggguugucagccagcuacacaccagaacuauuauuuuaggcggcugga

SEQ ID NO: 4166285 - RNA, 86 nt, Human
ucuggccccacugaaagcuugaaaccuaagucaggauguuaacagacaaggcuucccaauuaacagguaucaggcaucaggcuaga

SEQ ID NO: 4166286 - RNA, 61 nt, Human
ucuggccccuccccuuucugggucagagcacccaaggcaggucugaggagguugggccaga

SEQ ID NO: 4166287 - RNA, 75 nt, Human
ucuggccccugacuucugauuucucccaaaucuuucuuagggaggcagugggagcuuaggcagugcuggggcuga

SEQ ID NO: 4166288 - RNA, 55 nt, Human
ucuccauuuuauagauaaugaaacuaagccucaguuucauguacaggaaaggaga

SEQ ID NO: 4166289 - RNA, 68 nt, Human
ucucccaguggugcagaaagcagugaauuacaaagucaguguucuggggaagcuaccaacuugggaga

SEQ ID NO: 4166290 - RNA, 74 nt, Human
ucucccauuaugucaggacucuucuuggaaugcugacuguguuuuguagagugcagcccuaggaagaugggaga

SEQ ID NO: 4166291 - RNA, 57 nt, Human
ucuccccaggccccacauugucuacugaagcagauaggccagggugaccuggggaga

SEQ ID NO: 4166292 - RNA, 64 nt, Human
ucuccccuggccuuuuguacucacucucccuuuugaaggaagugagggacuagugcuggggaga

SEQ ID NO: 4166293 - RNA, 72 nt, Human
ucucccuacccagggcuuuucugaugcauuacggagaugaggugcagccaggagguccagggcgaggugaga

SEQ ID NO: 4166294 - RNA, 69 nt, Human
ucucccugagcauucaugugagcuugcuuucaauaauuaaguuaggcuagcugauugccuuagaagaga

SEQ ID NO: 4166295 - RNA, 112 nt, Human
ucucccugucuaucauuuauaaauuuauccugccauuauugagcuccuaucccauacagaggacaauuucagguggauagguuuucagagagugauuguuuuuacagggaga

SEQ ID NO: 4166296 - RNA, 72 nt, Human
ucucccuucccuccgaaccucagugcugccugucaaauaggccacgcugcggcuuugcaggguuguuggaga

SEQ ID NO: 4166297 - RNA, 109 nt, Human
ucuccgcgccauggcagugauggagaugggucccuggccgcccucggggcacagguggcccgcagggcccggcgggcucagcagagcacgggcacgccguccguggaga

SEQ ID NO: 4166298 - RNA, 76 nt, Human
ucuccuauuucuugacugcuuaggaaugcagcaacucauacuggugcauucugagcaauuaagaaguuaugggaga

SEQ ID NO: 4166299 - RNA, 55 nt, Human
ucuccucuacugggucugcagaucauucaggcuuuguguucccagaggaaggaga

SEQ ID NO: 4166300 - RNA, 63 nt, Human
ucuccucugugccacagcuugggaaagccagaucuaguccaauaucuuuguuacagaugggga

SEQ ID NO: 4166301 - RNA, 56 nt, Human
ucuccugccacugcuucccauugacugaacuugucaggaagccagggugcagggga

SEQ ID NO: 4166302 - RNA, 58 nt, Human
ucuccuggaagugauuccccugagucacaccucagauaugggucuccccuuucagaga

SEQ ID NO: 4166303 - RNA, 65 nt, Human
ucuccuggcuuucugcacagaauugguugggugccauccuccucugcagcagagagccagagaga

SEQ ID NO: 4166304 - RNA, 55 nt, Human
ucuccugggagaguuugauucauuaggucuauaauuuaacagacuccccagguga

SEQ ID NO: 4166305 - RNA, 64 nt, Human
ucuccugguuuguuaaauaauucuugauugaguaccugccauuauauuugaugaauuagagaga

SEQ ID NO: 4166306 - RNA, 113 nt, Human
ucuccuuauuuucagaaugaugauaguaaugguauuuaauuauagaguugcuggcaaauuaaaugagaguaacacaugguuaguacacaauauaguuauuauuuauaagggga

SEQ ID NO: 4166307 - RNA, 56 nt, Human
ucuccuucuauguuccauuuuugucaucaguaggcuagggacagaaagaggguaga

SEQ ID NO: 4166308 - RNA, 75 nt, Human
ucuccuugacuucugaaucuauuuggcaauccugguacagguugagaccagacuuuuaguagugaguuagagaga

SEQ ID NO: 4166309 - RNA, 71 nt, Human
ucuccuuggagccagcccugucccccacauccaggggucugggcgaggcccagggcugcguuccugggaga

SEQ ID NO: 4166310 - RNA, 90 nt, Human
ucuccuuggcagagcugcaugagcacucagagccauuccuuaaccagcuguccugggcccugccauguaguuccuuccuugccagccuga

SEQ ID NO: 4166311 - RNA, 126 nt, Human
ucuccuuguucagagucagggcucagacucaagacuuuccaggacgaugagccuucucaggggauauggacuuccugacaguuaauuguccuguaaacuguuuucugaagcuuguagcuugggaga

SEQ ID NO: 4166312 - RNA, 63 nt, Human
ucucgcaaucaugcagcaacaagcaaggcagagcuggcauguuguugacugauaacaucgaga

SEQ ID NO: 4166313 - RNA, 61 nt, Human
ucucgcggcgacgccugcgagggacccgggccgcgggucgaggcgggcggcgccugcgagg

SEQ ID NO: 4166314 - RNA, 84 nt, Human
ucucuacacacucaggcuagggaaaaagugggcacauuucaaaacucaaugcuuaaacuauagcuugaugugaaaaaguagaga

SEQ ID NO: 4166315 - RNA, 60 nt, Human
ucucuacauguuugaauugugugugaccaagaauuguguuucauuacaaauuuguaggga

SEQ ID NO: 4166316 - RNA, 78 nt, Human
ucucuacuaaaaaauacaaaaauuagccaggcauggugaugggcgccugucccaggcuguuuuuauguuaugugggga

SEQ ID NO: 4166317 - RNA, 65 nt, Human
ucucuagaacccuaggcugguaaugaacuuaauaauauuaaguccuaacagacugggggcaggga

SEQ ID NO: 4166318 - RNA, 124 nt, Human
ucucuagacugcuaauggguuuugcauguuggcaaggauacagcagaauaaauaauaacuaaaaauccauguugaccuguugucuucauugucauaucaaaauaagauuuuaguuuuuuaaaga

SEQ ID NO: 4166319 - RNA, 72 nt, Human
ucucuagaguaugccacagggcccuuagauccuuuuacccuuaaaaauuagaagggccuuggggucugggga

SEQ ID NO: 4166320 - RNA, 66 nt, Human
ucucuaggaucccuuauggggccccucaggguccucucugacaacuccuucuuggguccuggcuga

SEQ ID NO: 4166321 - RNA, 64 nt, Human
ucucuaggcagugucagaaucauucucaaugaagauaauaauguugaauccaucugccaagaga

SEQ ID NO: 4166322 - RNA, 73 nt, Human
ucucuagguaaauauaaaucuuacucuaauagcaacauuuggagaaguaauguuauuugcccugauuuagaga

SEQ ID NO: 4166323 - RNA, 80 nt, Human
ucucuagugcccgagguagggaagacaaauaugcaguaggcuugcugcaaaauuuacacuccuucuuccugcaacuggga

SEQ ID NO: 4166324 - RNA, 81 nt, Human
ucucuaguggcaucccugcuugcuuguugugccaugugaacauaggccauuugagggccagguuugggcugcagcugugga

SEQ ID NO: 4166325 - RNA, 67 nt, Human
ucucucaacauucugguucuaaaaaccuccagugacucaggggagcuauaauuagaauguugucuga

SEQ ID NO: 4166326 - RNA, 88 nt, Human
ucucucaaccuccuuaaguuauguuuaccauuauuaaaauuaagugacauucacuuggaagaagugguaauacaaacagguugugaga

SEQ ID NO: 4166327 - RNA, 77 nt, Human
ucucucaauugcuggcugccaucuugcccccaugaagggagguccugucugagaauggaguaagucagucugagaga

SEQ ID NO: 4166328 - RNA, 80 nt, Human
ucucucacaucuuuuucucaauacaccuaucacccagcacauacuggguuucugauaaacaugggagaaaggaauggagg

SEQ ID NO: 4166329 - RNA, 58 nt, Human
ucucucacucucucucaauauacaaauguguguguauauuggugggggcagagagaga

SEQ ID NO: 4166330 - RNA, 59 nt, Human
ucucucagaggaagaggcagugagaaaacaauuuuacauugucuuuaaccucugagggg

SEQ ID NO: 4166331 - RNA, 69 nt, Human
ucucuccauucaccuucaucucaguuuucuauucuagucucugaacuggacaugaagcaaaaugggagg

SEQ ID NO: 4166332 - RNA, 68 nt, Human
ucucuccucugccaucuucacucuuugccaaaauaggaaacaaaucagaaaauauggagaggaugggg

SEQ ID NO: 4166333 - RNA, 57 nt, Human
ucucuccuuaucauuguguuuagugucuuagaaauaagccaguuacugagugagaga

SEQ ID NO: 4166334 - RNA, 57 nt, Human
ucucucuagaugguaaauauugcauguaaacuaugcugcuuuuguauaucagagaga

SEQ ID NO: 4166335 - RNA, 63 nt, Human
ucucucuauaugucaacagggggaaaaagacuuaaauaaucaaaacugaugacucuagaggga

SEQ ID NO: 4166336 - RNA, 92 nt, Human
ucucucucucucucucucuuuucugaacagaaagucugguuacccugagguagcuguuuagaaagacagcguggagggaacagacagagaga

SEQ ID NO: 4166337 - RNA, 103 nt, Human
ucucucucuuacccaccuucacuuuggaguccaugcuguccuguggaugggugugugggucuuccaaagaagggcuucgaggguaacaucuacagcagggaga

SEQ ID NO: 4166338 - RNA, 130 nt, Human
ucucucugaaggugaacucugggugcacagcuagaggauacaguggcugugagcugggcccuccaggugaggucuggccugcccauugccacagugggcuugcuggcauccaggggggcuuucuggguga

SEQ ID NO: 4166339 - RNA, 71 nt, Human
ucucucugccagcuucucuucuauuugcaggaugagcacaaucagacugucuagggaauccggcugaggga

SEQ ID NO: 4166340 - RNA, 62 nt, Human
ucucucugcccuggguuccaggcuccuggucccaaaggcuggugcuuccuagggcaggaaga

SEQ ID NO: 4166341 - RNA, 66 nt, Human
ucucucuucaugcuuuuagaauagccuaagauugaccuaggggaugaaagaccacauggagagaga

SEQ ID NO: 4166342 - RNA, 63 nt, Human
ucucucuuuaggcauacuuuugggagaaaaaauauuucuucucauuuguguucuaauuugaga

SEQ ID NO: 4166343 - RNA, 58 nt, Human
ucucucuuucucccacucuugcuuuguauugaggcagagguguuggugaauggagaga

SEQ ID NO: 4166344 - RNA, 75 nt, Human
ucucucuuugucgcuuuucauuuuggaaacaucaauaaaaauguccaguuugaggaagaaguagauagcccgaga

SEQ ID NO: 4166345 - RNA, 57 nt, Human
ucucugagcuggauuuguucuuauuauuuuacagaugaggacagagggucucagaga

SEQ ID NO: 4166346 - RNA, 55 nt, Human
ucucugaguuuuaaggaugaugucucuggugacuccauucuugcuuacuuauaga

SEQ ID NO: 4166347 - RNA, 103 nt, Human
ucucugauuugguccugucugacaucacugcuauaugcuuugcuccucucaauuuccucugcccucaugccagcaggagucaugccagagaucauaucugaga

SEQ ID NO: 4166348 - RNA, 61 nt, Human
ucucugcccagggacccacagggagagagauggugcuuccuagugguuucccaggcaguga

SEQ ID NO: 4166349 - RNA, 76 nt, Human
ucucugccugggaauguuugcucccuucagggcaccccgccugcuggaccucaacacauuucauacuagguugaga

SEQ ID NO: 4166350 - RNA, 78 nt, Human
ucucugcugcggcaccaccuggccuuggguuuuacucuguuccaaaaagccccaggccuguuggauggcgcucagaga

SEQ ID NO: 4166351 - RNA, 56 nt, Human
ucucuggaugacgaauccagaaagauggagcuucuuucugauauucauuuagaaga

SEQ ID NO: 4166352 - RNA, 67 nt, Human
ucucuggccaauguccucuuccagaacucuuccuuccagcccuccuggccuccgacacuggccaaga

SEQ ID NO: 4166353 - RNA, 64 nt, Human
ucucugggcucaggagcccggcaaaaugaguaccacgagcagccagggcaaccaaguccagaga

SEQ ID NO: 4166354 - RNA, 64 nt, Human
ucucuguaucccagaaccaaaaaggagcccacuaaauauuccguuuugacucaaugaacagaga

SEQ ID NO: 4166355 - RNA, 89 nt, Human
ucucuguccugguuuauacuggcccugcugcuuuccacagcauccagaugccaggaugacuauacaacagccgagaaagaugacagagg

SEQ ID NO: 4166356 - RNA, 81 nt, Human
ucucugugccuccagggcagaaaaagagggaaugagggaagccucauuaccuggaaugcucugucugcggcacgccaggga

SEQ ID NO: 4166357 - RNA, 63 nt, Human
ucugcucggcucaggguagggguccggguucggcuucccuguggauaucugcagcugagcagg

SEQ ID NO: 4166358 - RNA, 68 nt, Human
ucugcucuaguugcuuccugccugaaggcaaaaagacaggcugugacucuugcaauuaccugaguaga

SEQ ID NO: 4166359 - RNA, 76 nt, Human
ucugcucuggacacucggcagacuucuuucucuggaagacucagggacagaugaaugacugagugaaagagccaga

SEQ ID NO: 4166360 - RNA, 64 nt, Human
ucugcugacauuuaugaauagaccaucgccaauugugacauuucuauguugugugucacacaga

SEQ ID NO: 4166361 - RNA, 67 nt, Human
ucugcugaucuaccugcaguuaugugauaaaugcuuguuguagauauggcuguugguagccaacaga

SEQ ID NO: 4166362 - RNA, 66 nt, Human
ucugcugccuauggcuaauucuuuacugaccaaaccuuggugaugugguggugccaaugcagcaga

SEQ ID NO: 4166363 - RNA, 82 nt, Human
ucugcugcuuucauuucaguuuugagaugaccuggcuggcagugggcugagccagucucucagaacccuuugaagcacugga

SEQ ID NO: 4166364 - RNA, 68 nt, Human
ucugcugggagcucugagccugcugugggucuucuccaugggccuuacucuaagggcuucuggcuagg

SEQ ID NO: 4166365 - RNA, 90 nt, Human
ucugcugggucuguugucaucugcucugcucuccagccuuucuucagcacugaggaguggucagcagcagugggaguguaacucagugga

SEQ ID NO: 4166366 - RNA, 57 nt, Human
ucugcuguaaagaauuucugcccagggucugggcuccccugaggaguuuccagcaga

SEQ ID NO: 4166367 - RNA, 62 nt, Human
ucugcuguacuuuuggucuguuuuccuugguuaaaaaaggcuguaucaaaaguaguggcaga

SEQ ID NO: 4166368 - RNA, 71 nt, Human
ucugcugucccuagcacagggucuugcucacaggggagcauucuuccugggcugggggcucugugggcgga

SEQ ID NO: 4166369 - RNA, 83 nt, Human
ucugcugugaauaagaugcuuuccaagaaauccucagcaagcguucuuacaaguugagauuuuacuugaaggcauucaguuga

SEQ ID NO: 4166370 - RNA, 80 nt, Human
ucugcuguguuugcaacaaacguccuucauaauacaaggaguuccuugucugugacagaccuuugcuaagacacuggaga

SEQ ID NO: 4166371 - RNA, 64 nt, Human
ucugcuucacggucucuggcugaugccaucaagcugugucaguccaggggcugugaugucaugg

SEQ ID NO: 4166372 - RNA, 77 nt, Human
ucugcuucugaccccaucuuugagccaaaccuugccagaauaagccuggucucugggguuggguacugauaggcaga

SEQ ID NO: 4166373 - RNA, 56 nt, Human
ucugcuucugugaaggcagucugagaccacacugacugcuggcuuuuacagacaga

SEQ ID NO: 4166374 - RNA, 77 nt, Human
ucugcuucuuuuuccuagugcuuucugguaaguuaucucagccuauuauuauaguuauugggaagauuuugaucgga

SEQ ID NO: 4166375 - RNA, 64 nt, Human
ucugcuuuuccccuacuaacacugaguuaugucuucuaauucucugaugcagguggaagauaga

SEQ ID NO: 4166376 - RNA, 90 nt, Human
ucuggaagcaucaacaauguggaaaugcaguuuuaccaugugagccacaagcaguuaaauggcugcguuuuccgauguauuugucccaga

SEQ ID NO: 4166377 - RNA, 82 nt, Human
ucuggaaggagguuuaggauuauagagcugucauugcugccugaaggacaccaugggaguuggguaaggaucauucuucuga

SEQ ID NO: 4166378 - RNA, 57 nt, Human
ucuggaaggcuucaaggucuaagagcagaaacacagcagggaccuggguguucuaga

SEQ ID NO: 4166379 - RNA, 55 nt, Human
ucuggaaggggaucuguggucauuccauccaggacaggccaccucucuucccagg

SEQ ID NO: 4166380 - RNA, 61 nt, Human
ucuggaaugauuuccuuccccuucuagaucggcaggauugggagaaggguauuuuucuaga

SEQ ID NO: 4166381 - RNA, 72 nt, Human
ucuggacaucugcuccuggcccccacccucaguggucagcuaggcacguggcgccaggagugaguuugcagg

SEQ ID NO: 4166382 - RNA, 55 nt, Human
ucuggacuuucggugcaagagucuuggaauugauucuaaaacuuguagguccaga

SEQ ID NO: 4166383 - RNA, 56 nt, Human
ucuggagcaacagagcaggacagauagagaguuuuacauuugcucauaguuccaga

SEQ ID NO: 4166384 - RNA, 65 nt, Human
ucuggagcacaccgggagcuugccuacugugauggaaggcgccucucccuuggugggguuagaga

SEQ ID NO: 4166385 - RNA, 64 nt, Human
ucuggagccucuaucaguuuuaggaugucagaacuuugaaucuguggcuggugagaggcaggga

SEQ ID NO: 4166386 - RNA, 75 nt, Human
ucuggaggcugggaagugcaagaucaaggugcuggcagguggugucugguguggaacuacuuccuggccuccaga

SEQ ID NO: 4166387 - RNA, 58 nt, Human
ucuggagugcccugcucugcccuccuccuuucccugggggcuccugccacacuucagg

SEQ ID NO: 4166388 - RNA, 72 nt, Human
ucuggauucuugcuagaacugggcuauggagguccagggagaaugggggccaaagucgaagucuaguccaga

SEQ ID NO: 4166389 - RNA, 81 nt, Human
ucuggcaauaucuggagaugcuuuuuguugucacaaugggggagagagugugcuacuggcaucuaguggguagaggucagg

SEQ ID NO: 4166390 - RNA, 78 nt, Human
ucuggcauugggacaaaggguggagccucugacuuuccaaucaguuuuuuaguuccuuuagucuuaaucaugaccaga

SEQ ID NO: 4166391 - RNA, 65 nt, Human
ucuggccaaugccuggggaauaguuaagauagaugacauuggaauagugcccagcauuagucgga

SEQ ID NO: 4166392 - RNA, 63 nt, Human
ucuggcguugguaucaaaauauagcagccuuuuuuggcucuagcuuuugauaccaguguggga

SEQ ID NO: 4166393 - RNA, 59 nt, Human
ucuggcucagggcucugagggaacaccuacaauccuuccuaucaccuaccugagucaga

SEQ ID NO: 4166394 - RNA, 96 nt, Human
ucuggcucucuggguuugugggcugcagcggauuggggauugcgaaaaugauguucuucgcaggcgcugcagggcgcggagacaggagaggccuga

SEQ ID NO: 4166395 - RNA, 69 nt, Human
ucuggcugaggucugcucaagucccugguaaacggcugggaaguccagggguuggcugcuucucucaga

SEQ ID NO: 4166396 - RNA, 89 nt, Human
ucuggcuggauagaauaagccugacgaaaccuagcuauuguaagcuaguuucuucaguuauucuuuucccuaucccugucuaagcuaga

SEQ ID NO: 4166397 - RNA, 57 nt, Human
ucuggcuugaacaauuagguaaauguugguaucauuuacugaaugggacaggcuaga

SEQ ID NO: 4166398 - RNA, 55 nt, Human
ucuggcuuuccuggagcaagaaaaccagugguuuucuuggccgaagaagugaaga

SEQ ID NO: 4166399 - RNA, 59 nt, Human
ucugggaaccauugguggggaugggagagggggagcgugcccaccucuggguccacaga

SEQ ID NO: 4166400 - RNA, 63 nt, Human
ucugggaaugaauaagaccugugggcucuagaaaacucagaacagguuuuaaaucuuuccaga

SEQ ID NO: 4166401 - RNA, 62 nt, Human
ucugggacgccuggggacauuuccacuuugcugggaggggaguguccuccgggccccucgga

SEQ ID NO: 4166402 - RNA, 97 nt, Human
ucugggccaggaagcaucagcucagggccaucggcccuuuuccuggugccccuugggagcaaagggccagaugcccuagagguguaccuggccuggg

SEQ ID NO: 4166403 - RNA, 84 nt, Human
ucugggcccuuaugaagcucaagacagaagggacacauauagauaguauugaaaguuucaauucuugaacuucauaggucuaga

SEQ ID NO: 4166404 - RNA, 87 nt, Human
ucugggccgaggaaagccaugcucugcagcagaccugugcgcccccagggcugcaggcugcuggcaguagcuuccugaucagccaga

SEQ ID NO: 4166405 - RNA, 60 nt, Human
ucugggccucaguuucuucaucuguaaaaugggacuuugaugaggauuggaggagucaga

SEQ ID NO: 4166406 - RNA, 69 nt, Human
ucugggcugaaaugaaggccuugggaguuugacuucuucaauuaggcuguuuguuuuucugaguccaga

SEQ ID NO: 4166407 - RNA, 68 nt, Human
ucugggcuggcccaccacaccucgagcuuucccagccauaaguaauaucgagggcguggccacucagg

SEQ ID NO: 4166408 - RNA, 68 nt, Human
ucugggcugguggucacucuguucuucuggaucaggcaucagaugcuuagugacuacacaggaccagg

SEQ ID NO: 4166409 - RNA, 65 nt, Human
ucugggcugguugugcuugcuuugacuggcagaauacagcagaagcaaugcugagccaguucuga

SEQ ID NO: 4166410 - RNA, 85 nt, Human
ucuggggaauuucuucuuuauugagacuucauuguuagaguccuugacacagugaucuuuuaguuggaacagagauucacucaga

SEQ ID NO: 4166411 - RNA, 85 nt, Human
ucuggggauaaauugcgcaugcaggagagaaagacggcuaggaaauccgguccuuaguuacuuuucauguccuuuuauuuccaga

SEQ ID NO: 4166412 - RNA, 129 nt, Human
ucuggggcaucugugagaagggagcuccugggagggugaggacaaggugauuuauaggaaggagcaacuucgagucauguucucccauuaaucucaucaacugguagcuccaaaacauagcugucaaca

SEQ ID NO: 4166413 - RNA, 84 nt, Human
ucuggggugcgcuucuggaggccugagcucagggcccguauucuccuuggggaugcccugcugcuggggcagugcagcugcagg

SEQ ID NO: 4166414 - RNA, 115 nt, Human
ucuggguauccaggccucaucccaccaaggcagaagccagccagggucccagggcagguugugagggccccuugcugcucugcugguuuggggagggagcaaggccuggcccaga

SEQ ID NO: 4166415 - RNA, 79 nt, Human
ucugggucuucuggcaaauggaggcuugauuuaagcuauuacaauaggaaaucauagcccccauccgauuguucccaga

SEQ ID NO: 4166416 - RNA, 55 nt, Human
ucugggugcauaagucccagcaugcugaagcagcucuggggagcugcucccacga

SEQ ID NO: 4166417 - RNA, 65 nt, Human
ucugggugcccagcgaaguggcugugcugaccuuggccagucucacagcugucagcugaccuagg

SEQ ID NO: 4166418 - RNA, 86 nt, Human
ucuggguuaucugcuccuauguccuccaccacagaguguucacagcgagugcucugucauuggugggaugagacagauuucccaga

SEQ ID NO: 4166419 - RNA, 76 nt, Human
ucuggguuuuaauaagcucuccaggugaucaugaugcacauuagaaccaccuggagagcuuuuaacaaaaccuagg

SEQ ID NO: 4166420 - RNA, 56 nt, Human
ucugguacagcacagagcaggugcuuggcuugacccagcaucuggcugcuucuaga

SEQ ID NO: 4166421 - RNA, 67 nt, Human
ucuggucccuuuuccugcagucugagugugcucuguacucagcagaugccacggugggggacauaga

SEQ ID NO: 4166422 - RNA, 71 nt, Human
ucuggucuagagucaccagauaaagcauggaccauaugccuccauuuauuauuugcugaaucugauucaga

SEQ ID NO: 4166423 - RNA, 55 nt, Human
ucuggugaggaggggcuggacagggccuccugguacuucaguuuccucaucugga

SEQ ID NO: 4166424 - RNA, 78 nt, Human
ucuggugaugucccugacaaugguggcucaucagcucaaugcuggcaaccuugagccuguggggugacaaccauuaga

SEQ ID NO: 4166425 - RNA, 75 nt, Human
ucuggugauuaauguaacaaggaaagccagcaaacaucauccuuggccuaaucugaaugcacuuaguuaccaaga

SEQ ID NO: 4166426 - RNA, 74 nt, Human
ucugguggaccaugauguguagauucuguuauguuuuaugauuuuuucuaacacagucgucgucauuuuccagg

SEQ ID NO: 4166427 - RNA, 59 nt, Human
ucugguggauuaaaggucuguucccuucccuuuccuauggaggaggccaugccacuaga

SEQ ID NO: 4166428 - RNA, 60 nt, Human
ucugguguguagagaaauagccugaaggcacuuugugcuugccuggccucucugcccaga

SEQ ID NO: 4166429 - RNA, 57 nt, Human
ucuuccugcuuggugugucuggcuuaguguucagccagguucauaccuuuggggaga

SEQ ID NO: 4166430 - RNA, 63 nt, Human
ucuuccuggcagugucugagaacauaccaaacugaaagcaucucaggauugugccuagggaga

SEQ ID NO: 4166431 - RNA, 72 nt, Human
ucuuccuggccaggcauggagucacagcagaggagggggcugugacugaggaucuuccuggccaggcaugga

SEQ ID NO: 4166432 - RNA, 66 nt, Human
ucuucggugagcugcgggcgaggacuggggugcggcuccuuagccagggcagcucaaaauccagga

SEQ ID NO: 4166433 - RNA, 60 nt, Human
ucuucggugcuauugugcuagaguucuauccuggcccucuuuccucagcacacaccaaga

SEQ ID NO: 4166434 - RNA, 59 nt, Human
ucuucuacagugacugcagccauagcauugaugcugguggaugcugugcugugugagga

SEQ ID NO: 4166435 - RNA, 67 nt, Human
ucuucucagugucuuauuguacacaucuuaucuccuaggaugaguuuuccgacauuggcucaggaga

SEQ ID NO: 4166436 - RNA, 68 nt, Human
ucuucucauuccaggacuaaaggaacagccuccuacugggacaugcuguucuccaggaagaaaggaga

SEQ ID NO: 4166437 - RNA, 87 nt, Human
ucuucuccauuaguuuagugaaugguuaaagaaauaaaugaaaauuagcucgguuuucuaaacuacgucaaaacuaguuagagaaga

SEQ ID NO: 4166438 - RNA, 57 nt, Human
ucuucucccuguccuaucaagacuuacagcaaggucccagguugacagggagacaga

SEQ ID NO: 4166439 - RNA, 85 nt, Human
ucuucucccuucccuuucucccccacucaacaccuaggccaucucuggcccuugaguguagugggugaggaaggaaggaaggaga

SEQ ID NO: 4166440 - RNA, 62 nt, Human
ucuucucccuuuuuggguagcaacuguaaaaguaacuuacaggaagcagaugggguagaaga

SEQ ID NO: 4166441 - RNA, 69 nt, Human
ucuucuccugguauguaugcaccuggugagagaucauggaacaggaaacauaugugcuugaggaucgga

SEQ ID NO: 4166442 - RNA, 61 nt, Human
ucuucucugcagcuuaggcccaguucuuuaguaugaggacugggucuaucuccagagaaga

SEQ ID NO: 4166443 - RNA, 83 nt, Human
ucuucucugucagcaugaacccugaauuacuuacuguuuuucuaaacacauuaauaggugguuaaugcaugguuugagaauga

SEQ ID NO: 4166444 - RNA, 129 nt, Human
ucuucucuucccugugcuccccuacacagcagccucccucccgggcucuggggcagccagccgcaggagggauagucugggaggggcugccauugcuguucacuuggggaggacgucagaggacucaga

SEQ ID NO: 4166445 - RNA, 88 nt, Human
ucuucugaggcaaaggguaauggaauggaacaucauaguugagguauuggcaagugguggccaauucacagggcucauuggcagagga

SEQ ID NO: 4166446 - RNA, 55 nt, Human
ucuucuggaucgaucacauuguucuaaaugaaugaugcugucagaguccugaaga

SEQ ID NO: 4166447 - RNA, 103 nt, Human
ucuucugggucagaccagugcagggccagguacaagaagcaggggcucuccuuccccaguugcugcugacauuuggggcuugcuuuggucuucucccaggaga

SEQ ID NO: 4166448 - RNA, 80 nt, Human
ucuucuguccuaguuaggacuuguagauauuucauugcaacuguucuuggaauguugcauaagaucugagugauagagga

SEQ ID NO: 4166449 - RNA, 58 nt, Human
ucuucuguggcuuguaaaguggcucugaaggaaagucaugucuuaggaaagcagagga

SEQ ID NO: 4166450 - RNA, 62 nt, Human
ucuucuuaaaguauguucucuuuuucucuuaauacccuaaggagcacaauauuggaagaaga

SEQ ID NO: 4166451 - RNA, 76 nt, Human
ucuucuuaagugacuuucugaaggucucgcagugucagaucugaggcauugugcugccucauggaagcagagaagg

SEQ ID NO: 4166452 - RNA, 78 nt, Human
ucuucuuccacccuaucucuguccaccucaaagccguccauucccuuuggcuguaggaagacagaaugcagaagaaga

SEQ ID NO: 4166453 - RNA, 69 nt, Human
ucuucuucuuucccagaagauauguuuaaauugcagaguaaaagccuuucucucugggaaggagaguga

SEQ ID NO: 4166454 - RNA, 78 nt, Human
ucuucuugcuuguauucugccuaaccuucaaaaacaggaauuggguuuauggaggaaggauugggugcugguugaugg

SEQ ID NO: 4166455 - RNA, 100 nt, Human
ucuugaacuuaaguacacuuaaacuuacguaguguguguauggugaagggugugccuaugcauaccugcccacauauauauguauucuuaaauucugaga

SEQ ID NO: 4166456 - RNA, 110 nt, Human
ucuugaauucuuaaaauauccuuccagcuggcuuugaaggucuuuccuauaagaaagccuuuuagaaaacgccuucaaaauuacacagaaggagauuuuauuauucuaga

SEQ ID NO: 4166457 - RNA, 120 nt, Human
ucuugaccuccagaaauuguguguuggacaauaaauguuuauuguuuuaagcugcuaacuauugggguagcguguuauguagcaauagauaacuaauacauaauuuaauggauuaaauga

SEQ ID NO: 4166458 - RNA, 65 nt, Human
ucuugagaauguguuuugcuaaguuugguggguauuuuuuagcuuggcauugaccauuaucauga

SEQ ID NO: 4166459 - RNA, 60 nt, Human
ucuugagucagcaaggaaaaugugucacguuguuggugagacaagauuuguaggcagaga

SEQ ID NO: 4166460 - RNA, 81 nt, Human
ucuugaugguugagcuucauuguuaugaaugucaaagacuaauuugcauuuaagaaaacaugagucuacaauaacucagga

SEQ ID NO: 4166461 - RNA, 82 nt, Human
ucuugauuuaaauguagauuuuggagucuacaaguagcuuugaauauuugaaauggauuuugaaacuaauuuuuaaggagga

SEQ ID NO: 4166462 - RNA, 105 nt, Human
ucuugcacagcauuuaguacagugcuugguaucuaguaagcucucaauagacauugcuaccauugauaccagcacugccucuacuaauaauucugcuacaaaaga

SEQ ID NO: 4166463 - RNA, 84 nt, Human
ucuugcacuucagguaggaagggccacaaugucuguauacacagugugcuaugguagaacagaaggcaccuucucuaggcagga

SEQ ID NO: 4166464 - RNA, 60 nt, Human
ucuugcaucuaauaacaugguacauuguaaaugcucaauaaauguuuguuggauguuuga

SEQ ID NO: 4166465 - RNA, 64 nt, Human
ucuugcaugauauucuguauuuacuggcuuuuuguugaguuagauacagaacauugauccaaga

SEQ ID NO: 4166466 - RNA, 66 nt, Human
ucuugccucuuccccuuuccaugccuugaggccuuuuuuccagaauggaaugggaagaguguguga

SEQ ID NO: 4166467 - RNA, 106 nt, Human
ucuugccugaaguugucaccaggguugaguguguguuuuugaguguguguuuggcacacagagggcagaagauacauguuucuuagucucacaacucauggcaagg

SEQ ID NO: 4166468 - RNA, 62 nt, Human
ucuugccugcccugugucauaaaaggggagucccuuacugcauuaucaaggggaagguaaga

SEQ ID NO: 4166469 - RNA, 62 nt, Human
ucuugccugcccugugucguaaaaugggggucccuuacugcauuaucaaggggaaggcaaga

SEQ ID NO: 4166470 - RNA, 62 nt, Human
ucuugccuuccccuugauaaugcaguaagggacccccauuuuacgacauagggcaggcaaga

SEQ ID NO: 4166471 - RNA, 83 nt, Human
ucuuggagcuucaaagcuaggaagaucuagauucuugugaucuaguauuuguuuauuccguuucuuuaaaguuaaugcuaaga

SEQ ID NO: 4166472 - RNA, 73 nt, Human
ucuuggaggagaguaaguaccugauucuuagaagauuauguguagaugaaaugacuuaguuuuucucacagga

SEQ ID NO: 4166473 - RNA, 64 nt, Human
ucuuggcagggcuuugagcagagacuugugugucaacaggaucaugcuggcugcccuguugaga

SEQ ID NO: 4166474 - RNA, 96 nt, Human
ucuuggccaucugguagaaguauucugcauguacugagauuucugacuuauuuuggaaaaucaaaaagcagaauaauuuuugccacauugucaggg

SEQ ID NO: 4166475 - RNA, 64 nt, Human
ucuugggaccauuuacacauacacauucacugugaugucuguguuuaaaagauauguccugaga

SEQ ID NO: 4166476 - RNA, 73 nt, Human
ucuugggagacuaaaggaggaguuaaugagacucuagaguuauuuuauuuccucuuuucacagcauaccaggg

SEQ ID NO: 4166477 - RNA, 56 nt, Human
ucuugggccucaccccagacauccuggaucagaaacucuggggaugaggucuagga

SEQ ID NO: 4166478 - RNA, 79 nt, Human
ucuuggguuauuaucaguguagauuccugagccccacccuugacuuacuaaaucacaucacugagaaugaggcccaaga

SEQ ID NO: 4166479 - RNA, 58 nt, Human
ucuuggucagcacugauguuucagagcccagcacugaucuagaaagggcuggccaagg

SEQ ID NO: 4166480 - RNA, 69 nt, Human
ucuuggugccaaaaggagcauuguauuuacauagaaugcauuguuuagaacucuuuggccugccaguga

SEQ ID NO: 4166481 - RNA, 71 nt, Human
ucuugguggaauuucuucccuuccuucuuaggguuaacaaggcuaauuuggaagauacauuccaugcaaga

SEQ ID NO: 4166482 - RNA, 65 nt, Human
ucuugguugagggugugcggcccagacaggccgaaugcuuguuuugucuguugccuuucuccaga

SEQ ID NO: 4166483 - RNA, 60 nt, Human
ucuuguaaaagguacauuaugcuuguagguaaacugauaaucauaauagccuuuucgaga

SEQ ID NO: 4166484 - RNA, 81 nt, Human
ucuuguaaaauguucuacauaaucuggauuugucugauuacuuccucuugauuagauucagguuaaacauuuuuggcaaga

SEQ ID NO: 4166485 - RNA, 83 nt, Human
ucuuguaugccugcaauaucagauucaacacauuggucuugauaaagaauuauguuuauuuauuuguguuguaugggccaaga

SEQ ID NO: 4166486 - RNA, 91 nt, Human
ucuugucugauuuuuuucucuugguuauucuuuguaugguuuggcuaauauuuuugauugcuguacacuaagaacaaagaucuguauagga

SEQ ID NO: 4166487 - RNA, 113 nt, Human
ucuugucuuuacauucagccuucagccuucauccuuccuucacugguuuaggaaauaaaguagggaaggagacuaaggccagauaugcaagaauugugaauguauggauaaga

SEQ ID NO: 4166488 - RNA, 69 nt, Human
ucuugugaaacaagauguuucagguucaucuuauccuuucuuugccuggaaucagccuuuuuuccaagg

SEQ ID NO: 4166489 - RNA, 55 nt, Human
ucuugugagcugagauaaagccuugucuuuggucuauugucuuagcugcauaaga

SEQ ID NO: 4166490 - RNA, 105 nt, Human
ucuuguuccccugccaccuuauacagagaguacagcauccacaugagugucccucuuguggaggcuuuggcuuucuuccaugcuccgugugccaugggagcaaga

SEQ ID NO: 4166491 - RNA, 90 nt, Human
ucuuuaaaagucuaacacugucagcuuagcacuuauuggccauuuacuuugugugaggcuccaugcuaagcgauaugggggaaauaaaga

SEQ ID NO: 4166492 - RNA, 82 nt, Human
ucuuuaagccucaguuuucuccucuguaaaauggagaugaaucucauuuacuguaggagugaaccaagaugaggaaugagga

SEQ ID NO: 4166493 - RNA, 63 nt, Human
ucuuuaaucucuuggcguugaauacuuaauccaguucagauucuuggcaaggagauuuaaaga

SEQ ID NO: 4166494 - RNA, 68 nt, Human
ucuuuaaugcauugcucaacagaauacagauaaguucucauaucugcuucugcauucaauguuggaga

SEQ ID NO: 4166495 - RNA, 55 nt, Human
ucuuuaauucagcaugaugcggauaaggcucaaaaacaucaugcugaauuaaaga

SEQ ID NO: 4166496 - RNA, 96 nt, Human
ucuuuacuuagagaacauaaugaauggcauugucagccuuuaugcuguguaaagugaugaagguuuggccaauguuacauaaacauuaagugaaga

SEQ ID NO: 4166497 - RNA, 57 nt, Human
ucuuuagaguuaacaauaaugaaauaugguaacagauaguuuuggggacucuaaaga

SEQ ID NO: 4166498 - RNA, 67 nt, Human
ucucugugggcauuuauaaucugguccagaaggcucucaagccuccuccaauaaagcucuauaggga

SEQ ID NO: 4166499 - RNA, 61 nt, Human
ucucuguguguuggcuguauauccuuccuggaaauugcagaguuacagcuucauauagaga

SEQ ID NO: 4166500 - RNA, 65 nt, Human
ucucuguucucugugggaucugaaucccucaguuaugaaggaagcacaccaaacaggaacaggga

SEQ ID NO: 4166501 - RNA, 60 nt, Human
ucucuuaaaagaguaauagagaaggaaauggaagcccacuucuauucaucaguuaagaga

SEQ ID NO: 4166502 - RNA, 104 nt, Human
ucucuuaaucgacuaaagggaauccacaggaggauguucagacaagccagggcacaccuuugacuguguuuuauugugguuucuguggcuuugggacugagggg

SEQ ID NO: 4166503 - RNA, 74 nt, Human
ucucuuaggccaagcugcugccauaauuaacugcucacugggcacuugagccaaugcuaguagauaguuagaga

SEQ ID NO: 4166504 - RNA, 63 nt, Human
ucucuucacauuccuggcaaaccacaucagcacccaaauuagguuucugaguuaugggagaga

SEQ ID NO: 4166505 - RNA, 88 nt, Human
ucucuucacuuuaaguccuucuuuauaugagaguaaggucaaaugaaaacuugucauggaaaagauaauaguaugaaaaguuaaggga

SEQ ID NO: 4166506 - RNA, 81 nt, Human
ucucuucccacugcaggaagauugcagaaggcuguggauuaauuguagcauuucacugaucuucacuccagucacuaggga

SEQ ID NO: 4166507 - RNA, 85 nt, Human
ucucuucuguucaccagucagucaauacucuuugagcacauacucugugccaggcugugggcuacugcugaagauacagaaccga

SEQ ID NO: 4166508 - RNA, 85 nt, Human
ucucuucuuggguguguuuucuugacauauuuggaaugagugcucgugcaaauggagcauguauaagaaaaccucaaacuggaga

SEQ ID NO: 4166509 - RNA, 88 nt, Human
ucucuucuuucaguucuuucaguuuuugcucgauguauuuugaucuuuuguuaugugcauggacuagaauugguuuaggaggaagaga

SEQ ID NO: 4166510 - RNA, 86 nt, Human
ucucuuggaagcgauggugucugagcaaaaacccggaggguaggaaagaauggggagcucucuggguucagaacagcaagcagaga

SEQ ID NO: 4166511 - RNA, 104 nt, Human
ucucuuggaaggcauuuagggcacccaauuugaaccugcaucuuuuucuuuagagaaguguuaggguaaaguugguaggaugugcuauugcccuuucaaucaga

SEQ ID NO: 4166512 - RNA, 130 nt, Human
ucucuuggagcagccaaucaagaauugaccucaguguuuuguuacuugggcacagaugugauucacugugcccugagucaugcaaauguggcaguuacugaauuaacgagaagcuuggcaggcuccauga

SEQ ID NO: 4166513 - RNA, 124 nt, Human
ucucuugggcagagaugcuaauuuaagaauguugucgguuuaaauguuccuaagaggauuaagcaaauucuacagcauauaaauggacauauuuggaagauuuuuuuccccaagcaauuucaga

SEQ ID NO: 4166514 - RNA, 62 nt, Human
ucucuugugguuuuguaguugaaugaauuaauucauguauaaccugcagaaucacuaaaaga

SEQ ID NO: 4166515 - RNA, 62 nt, Human
ucucuuuaagaugcuggaggcuuaauaggacucaaagccuuaaauucuccauuugaaagaga

SEQ ID NO: 4166516 - RNA, 83 nt, Human
ucucuuuaggcaucauguagacauagucaaacacucaucuccaguuuucucuguguuuggaugauuuaaaaaccuaacagaga

SEQ ID NO: 4166517 - RNA, 56 nt, Human
ucucuuucauguauaugcaaccuaaauuuacaauuagugcuuaaaaguggaagaga

SEQ ID NO: 4166518 - RNA, 90 nt, Human
ucucuuuccccuuuguucucccuggagucuguggcuuaggcuuaaugaagcuaacagacugggguggggaauagggguuggggaaagaga

SEQ ID NO: 4166519 - RNA, 75 nt, Human
ucucuuucugguagggagacaucuuuacaaaugaaaauuuccuuuguaaaugugaauuuccuuuucaaaagaaga

SEQ ID NO: 4166520 - RNA, 67 nt, Human
ucucuuugacugacagaauuguauuaacuuucaucuauagguaguacacucuguaaguuuaaagugg

SEQ ID NO: 4166521 - RNA, 80 nt, Human
ucucuuugauuaggacugguuucaacucagaugguucaaaugaagggauaauuuacagagauacagucaggguaaaggga

SEQ ID NO: 4166522 - RNA, 84 nt, Human
ucucuuuuauuuuauauaguuugauacuuagcauguuacuucagaacaacauagcucuuaagucugugauagaaaagaaagaga

SEQ ID NO: 4166523 - RNA, 75 nt, Human
ucucuuuucccaagaccgaacacagagaacucaugagagauaaggcauguacguugaguucaaggucaagagaga

SEQ ID NO: 4166524 - RNA, 72 nt, Human
ucugaaaggagcagcauagaagcugggaggaugaggccugucuuccuggcauugaugcugcaggacuacagg

SEQ ID NO: 4166525 - RNA, 69 nt, Human
ucugaaauagccaggagaugaugggggaauuguagacacuaucacccacaucuuuuaggcacuuucaga

SEQ ID NO: 4166526 - RNA, 76 nt, Human
ucugaaaugcauccuauuuuccaaggcugugugcuucgcagcagagcacuucagcccagaggaagggauguccaga

SEQ ID NO: 4166527 - RNA, 55 nt, Human
ucugaaauggcgauggccguugugggagcguggaugggccuuugccuuuuacaga

SEQ ID NO: 4166528 - RNA, 99 nt, Human
ucugaacccuggagaggcugacaccgaggugucuugaaggaagcaggcacacucucaugcuuccccaccuaggguuucgccuuucuucuaauauuuagg

SEQ ID NO: 4166529 - RNA, 91 nt, Human
ucugaacucaguucuugcaguucccaaauucacagcuaucuugggauauguugauuugugggcugcaaaauaugagaaauucuaccucaga

SEQ ID NO: 4166530 - RNA, 65 nt, Human
ucugaacuuaaaagcaaaauucuuaggaagagccuuuugaaaucuaagacuuuuguaaguugaga

SEQ ID NO: 4166531 - RNA, 74 nt, Human
ucugaagacuuuagggccaugguagguaauaaucguuggaaacauacuacccaagguuuuaauaggcuucuaga

SEQ ID NO: 4166532 - RNA, 80 nt, Human
ucugaagaguaugaauuaaguucacuguuuggacuugugcaggaaugcuuagucccacagugaaguucaugauauuccga

SEQ ID NO: 4166533 - RNA, 79 nt, Human
ucugaaggguuccaacacuugacacuugaacaccaggaaaaucacuguguuuaacugggagugugggaaaggacgcaga

SEQ ID NO: 4166534 - RNA, 77 nt, Human
ucugaagugauaaggucaguguuugaacccaggguuaucugauuccauagcuaugcucuuaaacaugauccuucaga

SEQ ID NO: 4166535 - RNA, 125 nt, Human
ucugaaugucacauucaacauuucaccuuuaggggauucucaguugggaugauuuggauuuauuugaauaaguucaaaucaucccaacuuagaauccccuaaagcugaaaaguaacauuaacaga

SEQ ID NO: 4166536 - RNA, 73 nt, Human
ucugacaaggguauauucaacaggcuaaugucagccuuccaggugguaguggccuguggguauugucuucaga

SEQ ID NO: 4166537 - RNA, 72 nt, Human
ucugacaaugaacaaucuauaguuauauccuggauaagccuagucaaacucaaagauugguuagaugucaga

SEQ ID NO: 4166538 - RNA, 90 nt, Human
ucugacauggcugauuuggguugacauugacuguuuuaucuucgugacacucuguaaugucacacuccuacaaagauccuccuugucaga

SEQ ID NO: 4166539 - RNA, 58 nt, Human
ucugacccacaagcauccuggaccaccucaagauggaccaggggaaagcuagguccgg

SEQ ID NO: 4166540 - RNA, 105 nt, Human
ucugacgaaaaacuuuuuaggauguauuuguugcuuuggcuuugaucuuaauguuugcaaacuaauacauuaauacaugugaagccuuaaggaguuuuucuaaga

SEQ ID NO: 4166541 - RNA, 68 nt, Human
ucugacgacagaggcuggagcaccuccugaggucacagcacugcucucagccucugcuaugcaucaga

SEQ ID NO: 4166542 - RNA, 73 nt, Human
ucugacuaugauguguaguccacaauucuggcaacauagcuugccuagaaauauuuuacagucaagguuuuga

SEQ ID NO: 4166543 - RNA, 60 nt, Human
ucugacuccugcccccaucuggccaagcguugguguggauaggaugggagcaagagaaga

SEQ ID NO: 4166544 - RNA, 88 nt, Human
ucugacuuggcugucgugcucugaguuugcaugucaggaaguaaacaccuuucacguuuuuaugccuagagcacugcuccaacucuga

SEQ ID NO: 4166545 - RNA, 59 nt, Human
ucugacuuuggacaguggcgaagaugacuacaugauucauugcaacuguaagaagcagg

SEQ ID NO: 4166546 - RNA, 62 nt, Human
ucugacuuuggacuggucugggugaugcaggacccauaggccacggucagcccacagucaga

SEQ ID NO: 4166547 - RNA, 76 nt, Human
ucugacuuuuuaauuuuagcccuucugguggguagauaguagccaccagaauuugguggguaggaauuugguuuga

SEQ ID NO: 4166548 - RNA, 71 nt, Human
ucugagaaaauaggaaacuugagucuguuggccaauuugucucacauugaguuucuugauuuuuaauuaga

SEQ ID NO: 4166549 - RNA, 69 nt, Human
ucugagacuucuguagcuucaagacugagucuuuaauggcugaguauggucaagcacagguguuucagg

SEQ ID NO: 4166550 - RNA, 59 nt, Human
ucugagagccucuagccuaagucuaaauguaacgcuugagucagcuggaggcugucuga

SEQ ID NO: 4166551 - RNA, 92 nt, Human
ucugagcaggagggagacuuggcuuggaugcuucuuucucuuccaucuaaggcgaguggaaagcauucaugugucuuugacuguaucucaga

SEQ ID NO: 4166552 - RNA, 64 nt, Human
ucugagcugcuauugcaugccaggcuccaugcuuggaccugggaguaugcaguggugagaaaga

SEQ ID NO: 4166553 - RNA, 75 nt, Human
ucugagcuggguauuuuaagaaaggaaacaauagguuuccacaagauguuucuuagaaauccaaaugagccuaga

SEQ ID NO: 4166554 - RNA, 55 nt, Human
ucugagcuguaaguagacaaggucuaaagacuggaggguuugagagcagcugaga

SEQ ID NO: 4166555 - RNA, 110 nt, Human
ucugaggauaccauggcacguuugcccacaggugcaaguuuuuugaggaagugggcaaacucauuccccagaggccugcacagaggcaagcucuucaggggguccucaga

SEQ ID NO: 4166556 - RNA, 74 nt, Human
ucugaggauggucucuggagaccaugacuguguacaguucacaugguaaccagaagacuaugacauacuucaga

SEQ ID NO: 4166557 - RNA, 77 nt, Human
ucugagggguuugaucaacaugucauaaagugaaaagaaucaugucuguuuugcaaugagaugcuugucacccuuga

SEQ ID NO: 4166558 - RNA, 74 nt, Human
ucugaggguguggggggaagcaugggucugcccggacugaagcugggcaggugggaacccuccccacccugaga

SEQ ID NO: 4166559 - RNA, 55 nt, Human
ucugaggucugaguggggacaggggcccagagguuucuggaccuggaggcccgga

SEQ ID NO: 4166560 - RNA, 103 nt, Human
ucugaggugugauacauccuugccuggucucugcccuccugacauugcugcuucuggugcugcuguguccugggcugguagagcugcgauguguuuucuugga

SEQ ID NO: 4166561 - RNA, 57 nt, Human
ucugaguuuuugcagcugcuguuggaaucucucuaacacagagcuucucaacuggga

SEQ ID NO: 4166562 - RNA, 57 nt, Human
ucugauauuuugugaaaauuuuccuguaauuugcaggugauuucuacaaaugucaga

SEQ ID NO: 4166563 - RNA, 107 nt, Human
ucugaucgggucagcugcacaggguguuucuaugccuuaauuacuuaucugcggccagggcacaggauggcagaugaagggugucccugugagcauccugcaucaga

SEQ ID NO: 4166564 - RNA, 118 nt, Human
ucugaucucuggacuuugaaaauuagguuaguuuccuaugccagguccccaagccagggaacuuggcuuaaaguagugaucgcuauauaauaauuuuaagcggaguaugauguucaga

SEQ ID NO: 4166565 - RNA, 72 nt, Human
ucaguagauuccucuucgggguucagccucaggcaugucagaaggcugcucugagaguggguuuuacacuga

SEQ ID NO: 4166566 - RNA, 64 nt, Human
ucaguagccucugacagugcaaauuuuauugccucccaaauuuguagacgucagaaguuacuga

SEQ ID NO: 4166567 - RNA, 67 nt, Human
ucaguauggagaagacaugauuggggauuaauuaagguacuuguuaucaucuuuuccuuauaacuga

SEQ ID NO: 4166568 - RNA, 84 nt, Human
ucaguauuucuggaugcucugaagccccaaauaguccggaaauccucugagauugugugcuucagaaauucagcaggcugcuga

SEQ ID NO: 4166569 - RNA, 55 nt, Human
ucagucccaagguccugagguggucccguaggaccucagaaccaucuuuggguga

SEQ ID NO: 4166570 - RNA, 70 nt, Human
ucagucuaacagggcaugugcaagagacaucauggaaaugccagaaaugucaugggcaugcacucacuga

SEQ ID NO: 4166571 - RNA, 76 nt, Human
ucagucucccaaagugcugggauuauaggcaugagccacugugccuagccaaguccaguauuuauaggagauguga

SEQ ID NO: 4166572 - RNA, 83 nt, Human
ucagucugugaggccaccaggguacuauucacugcuuugcagcagcaauuuaccaaaugguacccuggugacuuagagaguga

SEQ ID NO: 4166573 - RNA, 57 nt, Human
ucagucuucaaaucugagucgugccuacuccaggcugaugcagcccugagcggcuga

SEQ ID NO: 4166574 - RNA, 129 nt, Human
ucagucuucauggagcauacugaagcacauguuuguaagcagucugcuugugacaauaucauaauauuggauacaguaaccagucuacuuagaaaaagugugcccuucgguuaacuggaagauaacugg

SEQ ID NO: 4166575 - RNA, 91 nt, Human
ucagugaacagaauacaucuagugcugcaugagggagcuucuuuuuuagugaaggaggacauuagacacagauguauaaaugagucauuga

SEQ ID NO: 4166576 - RNA, 66 nt, Human
ucagugaauaacacaaucuuccaguuugcuguaugcauuguugcacugauggucuggaagaacuga

SEQ ID NO: 4166577 - RNA, 68 nt, Human
ucagugaauugggccuagaaugaacaggacuuggcagcaguccuggacucaggaccacaggacaccga

SEQ ID NO: 4166578 - RNA, 66 nt, Human
ucagugauaccucuggcacucaagacuuaucccuggugaguccaguguuuaccaggggugaauuga

SEQ ID NO: 4166579 - RNA, 127 nt, Human
ucagugaucaugagaaacgggagggcccaaugaaagagacuggggcauuuuggccaggggaguagagagacccuccacagcuccucagccucuuucacugauuucuuucaccuuuuaugaaugcugg

SEQ ID NO: 4166580 - RNA, 87 nt, Human
ucagugauccuuuugcuuuuggaaauuguaaugaacuucaccaucguagagcuuuaauauuucuuuccugaagcagaaagcauguga

SEQ ID NO: 4166581 - RNA, 67 nt, Human
ucagugauuguugcuguuuuaagccacgcaauuuuggaguagcuuguuacacagcaauguuauguga

SEQ ID NO: 4166582 - RNA, 56 nt, Human
ucagugcaaucaagguauguuuuugcuaaccuacacagacauauugauagcauuga

SEQ ID NO: 4166583 - RNA, 61 nt, Human
ucagugcaggaaucucuagccaaaucuuaagaaacaccauggcuggcaaaacugcaacuga

SEQ ID NO: 4166584 - RNA, 86 nt, Human
ucagugccaguccaugcucauuucuucucgaaaagacccacugauuuuuauaggguaaggagggggaaugauuggcaaggcacuga

SEQ ID NO: 4166585 - RNA, 70 nt, Human
ucagugcuuacccucuauuagaagaaaaauauaccacacauuuccauagugaauggguaaugcaaacuga

SEQ ID NO: 4166586 - RNA, 59 nt, Human
ucaguggaagcugcauauaauugucuucagaagcaggauuuagcagacacuucuauuga

SEQ ID NO: 4166587 - RNA, 62 nt, Human
ucaguggaguauggaugaagucagugccagaacaaaaucauuuuguauuuauauuccauuga

SEQ ID NO: 4166588 - RNA, 63 nt, Human
ucaguggccagcagccuagccuaggcccuucuuuuggucagugccagcugcuuggccuacuga

SEQ ID NO: 4166589 - RNA, 85 nt, Human
ucagugggcguggcgcccgagguggcccugguggaugucaacguguaccugaucaucgccaucugcgcgguguccagcuugcugg

SEQ ID NO: 4166590 - RNA, 63 nt, Human
ucagugggcuauugagaaugaagaaaugauucacuguucuuuuuguaguccaaguucagcuga

SEQ ID NO: 4166591 - RNA, 56 nt, Human
ucagugggcucagaacuggcaggcggugcaagcucugcuucccugggccacacuga

SEQ ID NO: 4166592 - RNA, 55 nt, Human
ucagugguucccuuguuggaauaaauucauggcauuccagaagggcagcuaugga

SEQ ID NO: 4166593 - RNA, 61 nt, Human
ucagugucagucuuuuagauauguguuagaaaagaggcauauuuaaauuguacuaugcuga

SEQ ID NO: 4166594 - RNA, 65 nt, Human
ucagugugccugaaucaaguguuaugcuuucuuuaccaaauaacgaaacuugccaggcauagugg

SEQ ID NO: 4166595 - RNA, 68 nt, Human
ucaguguuacagucauuguuuucugacucaagaguucuuugcuuagaggaaagugacuccgauguuga

SEQ ID NO: 4166596 - RNA, 60 nt, Human
ucaguguucagcggugugugcagagaaaagucgucugguacaugcggugugaugcucugg

SEQ ID NO: 4166597 - RNA, 66 nt, Human
ucaguuauuagagucaaaauggcauguuaccugaaccugguaggcugaaauagcucugacaauugg

SEQ ID NO: 4166598 - RNA, 122 nt, Human
ucaguuccaagacagacuaaauuagaauccccaggagagaggccaguuggccuguguauauuuaacgcuagcccuggcugauucuucucaggcaauuuugggaaauuauagcuuuaaauuga

SEQ ID NO: 4166599 - RNA, 70 nt, Human
ucaguuccugguggucauggcagcucaaaacaaauguagggcagugcaaaaugaacacuauggaagauga

SEQ ID NO: 4166600 - RNA, 98 nt, Human
ucaguucugggugaguauaggaaagggacuaggacaagugucgaaguuuguggaaagacgcuuucccuuuuuauugcuggcuuuaacagaaacacuga

SEQ ID NO: 4166601 - RNA, 129 nt, Human
ucaguugaauuuaaauuucagauaagcaaggaauacuuuuuuuuaguauaaguauguaccaaauauuacaugagacauacuuaugcuaaaaauauauuuguggcuuaccugaaauucaaauauaacugg

SEQ ID NO: 4166602 - RNA, 82 nt, Human
ucaguugagaaaagaaccuagcuccucagucuccuuucuaaagguguccgaauguuggagcaggaucucagauuacagcuga

SEQ ID NO: 4166603 - RNA, 76 nt, Human
ucaguugcuaauguacauacugcauuuucaaagaauuauauauucuauguguuguggauguauaaaaugcaauuga

SEQ ID NO: 4166604 - RNA, 59 nt, Human
ucaguugggguaacuucagagcaccguacaaccucugaaugauuaaaacccggacuaga

SEQ ID NO: 4166605 - RNA, 81 nt, Human
ucaguugugucaggggcccauacucaggaaccuacagaaaaagauuuacuuccugaggccaaugacccugggcaggacuga

SEQ ID NO: 4166606 - RNA, 84 nt, Human
ucaguuuagagaaaaggagugggaguggggugaggacagggcuuauuuuucacuccauagcuuaacucuuuggcucugagauga

SEQ ID NO: 4166607 - RNA, 78 nt, Human
ucaguuucccagauaaagaaaaguagcugugagugugcgugcgugcauguauguggcuacuuuucuugcuaucacuga

SEQ ID NO: 4166608 - RNA, 60 nt, Human
ucaguuuccucaucugugaaaugagaucaaugccuacuuauugccacagauaaaaacuga

SEQ ID NO: 4166609 - RNA, 61 nt, Human
ucaguuuccugguugugauauuguacuacaguuugcaaauguuaccaauggaggaaauugg

SEQ ID NO: 4166610 - RNA, 83 nt, Human
ucaguuuuauagacauguugacaauaaagucuaccaugugugucucccugccauggugauuauuuugcucaauaugugauuga

SEQ ID NO: 4166611 - RNA, 56 nt, Human
ucaguuuucucaucugugaaaugggucugucagcccuuccaaugaauuaaggcuga

SEQ ID NO: 4166612 - RNA, 59 nt, Human
ucaguuuuguaugaaguuauauugcauagaauaugcacuuaugcuuuuuauaagauuga

SEQ ID NO: 4166613 - RNA, 76 nt, Human
ucauaaaacaaggaugcuuucuggugauacaguacaagaaugcucuguacacaguaugaggcaucuuuaaauguga

SEQ ID NO: 4166614 - RNA, 96 nt, Human
ucauaaagcagccaccaccccuucucauaauagcauuucucaccaggggaauuuuugguagcuguugggggagggauuugaguagguuguggauga

SEQ ID NO: 4166615 - RNA, 93 nt, Human
ucauaaagcucuuccaaauguaaguucauauuuuguucucacacacaagaagugagaacaaaauaugaacuugcauuuggaagagcuuuauga

SEQ ID NO: 4166616 - RNA, 56 nt, Human
ucauaaauuagcugucuuugaacucaaauauuagucuaaaguaugcuaauauguga

SEQ ID NO: 4166617 - RNA, 74 nt, Human
ucauaacaauuacauuaacauaauauuauuggcuaaauauuucccuugccaaguagaaggaugugauuguaugg

SEQ ID NO: 4166618 - RNA, 62 nt, Human
ucauaagucucauauauguccauacaagaucaugaaaauggacaugucucuggguauuuuga

SEQ ID NO: 4166619 - RNA, 59 nt, Human
ucauacucagcuggaugcaaagcacaggcaucugucacuuaaauucaggcugaaaauga

SEQ ID NO: 4166620 - RNA, 82 nt, Human
ucauacugaggagccaacuuagaagaaauuugauuguuauucuuacuaugucaauguguuuaugucuggcuuaaaaguauga

SEQ ID NO: 4166621 - RNA, 75 nt, Human
ucauacuggaucucuuuuauggucuaccucuuuauuuuaaaauagacacuuuagaaguaaggguucuccagauga

SEQ ID NO: 4166622 - RNA, 83 nt, Human
ucauagaaagauguuugugaccugcguaggugguuucugcauaucguugcugauuucacuuagcuagguuuuuguugauauga

SEQ ID NO: 4166623 - RNA, 115 nt, Human
ucauagaaucucaggacucuuuguaugauccuuccacuucccuccagcaggacaauuuuucuguuuauacgacagguggaggcaucaagcacaaagauucuacugaauaaaauga

SEQ ID NO: 4166624 - RNA, 85 nt, Human
ucauagcagugauggugagcaggauucgccucuugcagaaggacugccacagagcaauucugcugaauuuucauugagaaguuga

SEQ ID NO: 4166625 - RNA, 82 nt, Human
ucauaguuauuuaguaauaugaauuauuguuacaagucauugucuuguacgaguaacaugaauucaugaagaugaugcuugg

SEQ ID NO: 4166626 - RNA, 78 nt, Human
ucauauaauuguguugcuguucuuuaaauggaaucuauguuucucguauuguagaacaugcagcacaauguauauaga

SEQ ID NO: 4166627 - RNA, 57 nt, Human
ucauauaccagagaguuuauauuguuucugcaguuucaaauuuuuguguguguguga

SEQ ID NO: 4166628 - RNA, 67 nt, Human
ucauaucagaagguagcaaauccacccauuauggagugaauugugaccccucuguauuuauauguga

SEQ ID NO: 4166629 - RNA, 63 nt, Human
ucauauccccuucaagaaagccuaaagauuuggagagucaggccugugcuggaggagauauga

SEQ ID NO: 4166630 - RNA, 60 nt, Human
ucauauccucuucugguucucaccccacuacugagaaccugagauaauaggagaguauga

SEQ ID NO: 4166631 - RNA, 77 nt, Human
ucauaucuuggaaucaaguuuuuggagaaagaaaaaucucuuagauuucuuugguucucuauuccauuuagauauga

SEQ ID NO: 4166632 - RNA, 69 nt, Human
ucauaugcuaugcugaagaaauaguucauacauacaaaaaacaacuagcagucagcgguuggcaauuga

SEQ ID NO: 4166633 - RNA, 66 nt, Human
ucauauucaagggguaaggcaaaaccgccuaugaauuggcauauuuguuuauuucucuguuuguga

SEQ ID NO: 4166634 - RNA, 62 nt, Human
ucauauuucuguguugacugugugucacagaggacugacccacagucaauguagaaauauga

SEQ ID NO: 4166635 - RNA, 68 nt, Human
ucugguuccuauauagccuuaaggauuaauuuuagugauccucaaggaauuaaauagggaauuucaga

SEQ ID NO: 4166636 - RNA, 82 nt, Human
ucuguaaacccaaucucauaaucgucauugcuuucauagucacuauagagagaaaugguguuuguagaacuaggaaaauaga

SEQ ID NO: 4166637 - RNA, 69 nt, Human
ucuguaaauguguuuaguuaaugaguugcuaugaagcauagugaacuuauauuuagauauauuagaaga

SEQ ID NO: 4166638 - RNA, 82 nt, Human
ucuguacauuccucagcauuagcacagacauucaaaaaaaugggugcaaugugugauaaugguggcaaacaggaaagacaga

SEQ ID NO: 4166639 - RNA, 89 nt, Human
ucuguacuaggcaucaaagcagugcgcucaucuaaggguucuguuugaaugacaccuuuagguauuacugcagccccccuuaguacaga

SEQ ID NO: 4166640 - RNA, 85 nt, Human
ucuguaggaaauuauauugagaaauccagaugugcaguugugcaagagcaagcugguguggauuuuugaauggauauucugaaga

SEQ ID NO: 4166641 - RNA, 130 nt, Human
ucuguagguacaaaugaagcugucaaauuugaucaggcgcuugauaugacaggcugugggagucaggaccccuugaacagagugggccuugucugucacaguccgccugacacuucccauaaugcccaga

SEQ ID NO: 4166642 - RNA, 58 nt, Human
ucuguauaaaguaccgguggcauguguauuaguggagaugcagccugugcucugcaga

SEQ ID NO: 4166643 - RNA, 58 nt, Human
ucuguauaaggacaaacauuuaguccagucaagguaugaaugugcuucacuugacaga

SEQ ID NO: 4166644 - RNA, 97 nt, Human
ucuguaugcacacacauauaccacuguaaaugacuuuuucuguaccugugugcuugccucuuucaauugcaugugugugugucuguguguguacaga

SEQ ID NO: 4166645 - RNA, 56 nt, Human
ucuguauugagaaagccggacaugguuugcuuuugcuggcuuuuugcuagugcaga

SEQ ID NO: 4166646 - RNA, 78 nt, Human
ucugucaauguagacagcaaccaaaccagguggcuguuuaagcuagaaugaccuggguuggcuucuacauugaugaga

SEQ ID NO: 4166647 - RNA, 59 nt, Human
ucugucacucuagagauggcagccuagaugaggugcuuauauuuuaagaagucgauaga

SEQ ID NO: 4166648 - RNA, 130 nt, Human
ucugucagacucuuacuaacucuuuuggguuggaacgugguugaggaagauccgggcaggguccucggacagccugucagcagaucuccugcagccacagucccacuugcuggggauggcgagggcuggg

SEQ ID NO: 4166649 - RNA, 94 nt, Human
ucugucagauauguggcucagaaguuaauauauaaauuuucaaagaaaguuauaaccgaugacuucugugaugucauauuuacauuauggcaga

SEQ ID NO: 4166650 - RNA, 68 nt, Human
ucugucagauggcacugauaauuaauccuuuggaaagaucccaagggcuuucaggcucucuggcuaga

SEQ ID NO: 4166651 - RNA, 61 nt, Human
ucugucagccccucagcugucacucugcucccaaaaauagcaaugguugaggggagggaga

SEQ ID NO: 4166652 - RNA, 62 nt, Human
ucugucaucucuaaaauagaaauguuauaguauccauuucuaacggucauagagaugauuga

SEQ ID NO: 4166653 - RNA, 57 nt, Human
ucuguccaacacucucuagacauauaauuacauugucuucuuuggagugggaguaga

SEQ ID NO: 4166654 - RNA, 82 nt, Human
ucuguccaaugggagaugaacaacugugaauguaaaacuguuugaauuuacauuucuaguuguucaucucccagugccuaga

SEQ ID NO: 4166655 - RNA, 67 nt, Human
ucuguccaggucagccuacauucuguaaaacucuuaauauauucagauggauggcugaauggacaga

SEQ ID NO: 4166656 - RNA, 57 nt, Human
ucuguccaguggcucucagggaaggguuggaugccucuccagggucuccuggccagg

SEQ ID NO: 4166657 - RNA, 58 nt, Human
ucuguccccacagagaaggcuggggcuggaguccgacagcuggcgccuggggaccaga

SEQ ID NO: 4166658 - RNA, 61 nt, Human
ucuguccucagcauuuggauuggauuuggcuuacuuccacccacucugaguguugaacaga

SEQ ID NO: 4166659 - RNA, 83 nt, Human
ucugucuaguacugucagcaggguguugaagucucccacuauuauugugugggaguguuaagucucuuugaagugcucuaaga

SEQ ID NO: 4166660 - RNA, 71 nt, Human
ucugucugagugguguuagaguuguccagagcaauuauccugagggaccacacagacaucagauagacaga

SEQ ID NO: 4166661 - RNA, 62 nt, Human
ucugucugcgcuugcccuggugaaaaaccccaccguucaggcugcagggugcgagacccagg

SEQ ID NO: 4166662 - RNA, 58 nt, Human
ucugucugggauguaauuccugccugagcuccauggggcagcuuuuaucccugacaga

SEQ ID NO: 4166663 - RNA, 111 nt, Human
ucugucuguaacauccugcucccccaggcucagcugucaugugacaagaugcuguccuuggagauggacagauuuuaaaugacacucccuaagcaggcuugcggaaacaga

SEQ ID NO: 4166664 - RNA, 57 nt, Human
ucugucuguccagggcccccgcuccaggaggacauggcaggagcacugggcaggagg

SEQ ID NO: 4166665 - RNA, 120 nt, Human
ucugucuuaacuaaaaacguuggcauuuucugggaaguuggcuguaugcuuauugagaaagagagacuucucuucaguacagugugacauuucuacaaaaaucaaugauuuagaaacagg

SEQ ID NO: 4166666 - RNA, 63 nt, Human
ucugucuuagccaucucaggcugcucuaacaaaauaccauguccagguggcugaaacuacaga

SEQ ID NO: 4166667 - RNA, 80 nt, Human
ucugucuucauaacacuggugauuaagaaaauguauacccuaauuuguuuacuauucaucuaucagguuagaagacauga

SEQ ID NO: 4166668 - RNA, 78 nt, Human
ucugugaacugcugccaccuguuggucauagauuacaauacaucagaucauggcuccagcugguagagauuuuucaga

SEQ ID NO: 4166669 - RNA, 72 nt, Human
ucugugaguugauggcccaguuuagacuagaaucuuggucaccuugagccaaggccucaagaauuucaugga

SEQ ID NO: 4166670 - RNA, 101 nt, Human
ucugugaugguggguuugagaaguggugaacaggagaaagugauggaagggagacuuuccaaugugugccuguuuauauuuuuaggcuuugagucacauga

SEQ ID NO: 4166671 - RNA, 67 nt, Human
ucugugauuccguggcauuuuauuuguucauuuaugacagcacuuuaaauguucacggaaauaauga

SEQ ID NO: 4166672 - RNA, 65 nt, Human
ucugugcacugugucauuagguuaaaggcaugggaaaacaaaugcacuuggacacaggccacaga

SEQ ID NO: 4166673 - RNA, 66 nt, Human
ucugugcaggauuugaggaacccagcaguuuuaaguaccuguauuuaauuuagauccugagacaga

SEQ ID NO: 4166674 - RNA, 98 nt, Human
ucugugccuucccugaccugugagcccugugaggaaagagggugugggaacccucuuugugucucugcagucuaguucaaggucuagaacgcagcaga

SEQ ID NO: 4166675 - RNA, 55 nt, Human
ucugugcugugaggcucuuccaguucagucacuggauaaagcugugcugcauagg

SEQ ID NO: 4166676 - RNA, 60 nt, Human
ucuguggacuagagaauucuguugauguaauccauguaaaugaagcucaugggccacaga

SEQ ID NO: 4166677 - RNA, 60 nt, Human
ucuguggauucaggcuuuugccuaauaaauaugggaaagaggcaggugugaauccguaga

SEQ ID NO: 4166678 - RNA, 80 nt, Human
ucuguggcccuaauguguuggacagcuucuacugugaccuuccucggcuucucagacuagccuguaccgacaccuacaga

SEQ ID NO: 4166679 - RNA, 65 nt, Human
ucuguggccuguguccaagugcauuuguuuucccaugccuuuaaccuaaugacacagugcacaga

SEQ ID NO: 4166680 - RNA, 88 nt, Human
ucuguggcuugugaccacggcagacgcgcggcaccgccuccuccguccuuggcccacgcuucgcuuugcccguugucauuugccagga

SEQ ID NO: 4166681 - RNA, 68 nt, Human
ucugugggaucagcuucuccaagugacauggaugugauucauggaacacucugaagcugaccaguaga

SEQ ID NO: 4166682 - RNA, 58 nt, Human
ucuguggguauuucccagggaaacuucuuccagcuggggcccuggagaauacccugga

SEQ ID NO: 4166683 - RNA, 66 nt, Human
ucuguguagugcugcaaaacuugccuaauccucauagucacacggaaagcuuugcagaaauacaga

SEQ ID NO: 4166684 - RNA, 79 nt, Human
ucugugucaucguggagcaguggugcucuaagggcucugcccacauggacacaucacugcagccacugcugggcacaga

SEQ ID NO: 4166685 - RNA, 57 nt, Human
ucugugucugcagaaguucagcggugaaggcuacaccaggaaaucucaagagacaga

SEQ ID NO: 4166686 - RNA, 71 nt, Human
ucugugucuguuacuucacugcagguagguaggcguuacaggcauuggcggaaggggaaacagaccacaga

SEQ ID NO: 4166687 - RNA, 58 nt, Human
ucugugucuugaguaauucggugagcaguggggugcacacuuagcuuaggagcacggg

SEQ ID NO: 4166688 - RNA, 60 nt, Human
ucugugugauugaaacuuaggguacaguguagucccuauuagugaccacaucauaugaga

SEQ ID NO: 4166689 - RNA, 103 nt, Human
ucugugugcugaccuugggcgggcguccugagcuccucgcaggugcuguuguagcagcugugcaguaggucagggcuggcccccagugcagcuuugcacauga

SEQ ID NO: 4166690 - RNA, 121 nt, Human
ucugugugucacucgagaugaugcucgcacaggugcccuguaaaagccaugcaugucuuaaacguguuggcuguggcucagguaaacaaaugugggagcaaaucgucccguggcucagaga

SEQ ID NO: 4166691 - RNA, 75 nt, Human
ucuguguguguguguacaugcaugcauguuuguguguuguguaugcuugcaugcaugugugcagacagucacaga

SEQ ID NO: 4166692 - RNA, 64 nt, Human
ucugugugugugugugugugugugugugugugugugugugaucacucaagugggcaugcgcaga

SEQ ID NO: 4166693 - RNA, 68 nt, Human
ucuguguucuguggguguuguggccuaaacuauuauaggaaagccuauugcacacauagaaacauaga

SEQ ID NO: 4166694 - RNA, 72 nt, Human
ucuguguugauucucaaagaaaacugugauuaugauuuuuuaaaauaacagaaacuugagcaucaauucaga

SEQ ID NO: 4166695 - RNA, 61 nt, Human
ucuguguuuugguuuuaggaucagugcaaauucacaugacauaauaauccaaacauacaga

SEQ ID NO: 4166696 - RNA, 85 nt, Human
ucuguuaacccucggcuucccuuaaaguuuucuguguucauuggucaguuuggaauuagaggcauaagagggaagcagggauaga

SEQ ID NO: 4166697 - RNA, 55 nt, Human
ucuguuaaccuggucuuggcuuuuuuuggagugccuggaguaaaccaguaacaga

SEQ ID NO: 4166698 - RNA, 71 nt, Human
ucuguuaauggagcagagcauuucacagccugguucccuaccccuagguguuccugcucugcuucugcagg

SEQ ID NO: 4166699 - RNA, 75 nt, Human
ucuguuacuugacccucugcagaucuucuucauguauuuuucagugucugagauuucuguaggcaaguuagcagg

SEQ ID NO: 4166700 - RNA, 87 nt, Human
ucuguuaguagaaugcuaucggcucuaagcaugauccaauuucagauuuugugaguaagcuugguaaaagucauucuuuguaauaga

SEQ ID NO: 4166701 - RNA, 61 nt, Human
ucuguucagaaauggaagugccaugcuaaugcuuguggcagugccauugucucauagcagg

SEQ ID NO: 4166702 - RNA, 67 nt, Human
ucuguucccaggagcauauuacaugggcucagggcuuagggcauuagaauuucuccuggguaacaga

SEQ ID NO: 4166703 - RNA, 87 nt, Human
ucuguucucauggaacuugaacucuaguagaccucagcggacuccacuccaggcugggaagaacaggagagaauucaaggaggcaga

SEQ ID NO: 4166704 - RNA, 76 nt, Human
ucuguugaguaugagaucugggucccccgugggcuaguggauggccaggggggcguagaugcuggguucagcugga

SEQ ID NO: 4166705 - RNA, 61 nt, Human
ucugauguugaugcuucugccucucucuuccacagucaaggccccuggguauuacaucgga

SEQ ID NO: 4166706 - RNA, 90 nt, Human
ucugauuaagccguucuggaguggugccaggccugagccagccccaggaaaggcaggaaagaggcugguggcacaggaugggaaaucaga

SEQ ID NO: 4166707 - RNA, 58 nt, Human
ucugauucaccagauuugccaugggacuuaagcaugugcauucuucaugugauucaga

SEQ ID NO: 4166708 - RNA, 85 nt, Human
ucugauucaucuguaagacauugggaguugggugacuuugcaagucuaucugacugugcccaucucccagcuugacaugggcaga

SEQ ID NO: 4166709 - RNA, 55 nt, Human
ucugauuccagugacccuaggaugggcaagagccgcagucaagacuguagucaga

SEQ ID NO: 4166710 - RNA, 62 nt, Human
ucugauucucuccaguuauuuaugggaaaaauagucucuauuuguaccugugggaauacaga

SEQ ID NO: 4166711 - RNA, 83 nt, Human
ucugcaacuuugugcuuuuaauucuggugaguacuccuuuaaagcuaaagugcucaugaugccuuuuaaaagaagacuguaga

SEQ ID NO: 4166712 - RNA, 57 nt, Human
ucugcaagggcacagccaaccccauggagggcucuggagcuggaaugcccuuuuaga

SEQ ID NO: 4166713 - RNA, 80 nt, Human
ucugcaaguuccccugcagagcaggagaggcaucgggagcucguggucccccuccacucucgcaaaccuggggaaccaga

SEQ ID NO: 4166714 - RNA, 61 nt, Human
ucugcacauagguaggcuggaagcguggguccgccuaaggcaagccagaucucuguguagg

SEQ ID NO: 4166715 - RNA, 63 nt, Human
ucugcacccuggcccuuaggaaaacaaaguugaagaaaauucguuuuccuaagggccaccaga

SEQ ID NO: 4166716 - RNA, 55 nt, Human
ucugcaccuccugcuugcuagaagacccuuauuccccaggcagagagguagcaga

SEQ ID NO: 4166717 - RNA, 85 nt, Human
ucugcaccuugcuauugaagcucagaccugcuuauguauuuauuacccaugacagucuugcacuucuaucagcauucagugggga

SEQ ID NO: 4166718 - RNA, 67 nt, Human
ucugcacugagcaucuaaccuuauaggcauaucuuccuuucuugugaauguuuauucucggugcaga

SEQ ID NO: 4166719 - RNA, 110 nt, Human
ucugcacuggcuucugagguugcugccugaggagcaacacugacauaucuggaggacaaaaguggcuuccuuggcagcaagaaucucagacccuuuaagucuaguggaga

SEQ ID NO: 4166720 - RNA, 113 nt, Human
ucugcagaacuggaaauggaggacaaagauucaguugauguguuccagaagcagacaggagggucuacugagaacauacucacugcuuuacuccagaacucuguuucuacaga

SEQ ID NO: 4166721 - RNA, 66 nt, Human
ucugcagcucgggcuuagggugggcaggugggcucugaggcccccacccucaggcuugaauggaga

SEQ ID NO: 4166722 - RNA, 58 nt, Human
ucugcaggcucuagaugagguuggaggcagacagacccaucccacccagccuuguaga

SEQ ID NO: 4166723 - RNA, 91 nt, Human
ucugcauaguucugugugccuuucacacacugggaugccuugguuuaagaggagauucccagcuguguggaggagaugacaacagugcaga

SEQ ID NO: 4166724 - RNA, 57 nt, Human
ucugcaucuguguugagugccccuccaacugugagaggugguggugcagggugcagg

SEQ ID NO: 4166725 - RNA, 96 nt, Human
ucugcauggcuaaccagcuccuaggugaugccagugaggcugguccaugaccaccaggaccagcuucaugggcaugcaccagugcaguugugcaga

SEQ ID NO: 4166726 - RNA, 63 nt, Human
ucugcauuacacugauaaagacaaaauuauguacauguuuaguccuuuaauaguuaaugugga

SEQ ID NO: 4166727 - RNA, 91 nt, Human
ucugccaacagauuguccgugauguccccucaccaggacugcagaccugacucagcuccucaugcaggggauacaugggacaccaggcaga

SEQ ID NO: 4166728 - RNA, 67 nt, Human
ucugccacaucuaucuuuaguaugaacacccagugucuguacuaucuauagauauaguagugggaga

SEQ ID NO: 4166729 - RNA, 63 nt, Human
ucugccacuuaccuccauguacauguauacucuauuauggaaugcauggaggaaaguuauaga

SEQ ID NO: 4166730 - RNA, 66 nt, Human
ucugccaggcauugugcugcucauuaaagaucaagagacacaaagcacagucccugacuuugcaga

SEQ ID NO: 4166731 - RNA, 57 nt, Human
ucugccaguuuauagacaagccagcauauaggcuuugacauauauaagcugucauga

SEQ ID NO: 4166732 - RNA, 88 nt, Human
ucugccauauacuuaccaaugugcuuuugcuacaguuucuugacccaucugcuuuagacagcaucuggugacuucuuuguaugguaga

SEQ ID NO: 4166733 - RNA, 73 nt, Human
ucugccaugccaggcuguuuggccucagggaagcagcuucccugaccaguccuuagcaccuggcacgugguga

SEQ ID NO: 4166734 - RNA, 56 nt, Human
ucugccccacaguccuuaugaaaauauuaaaaaugcucaaaauaggugugggcgga

SEQ ID NO: 4166735 - RNA, 72 nt, Human
ucugccccugcucauggcuguccccugcaaucagccccuucacugugggacggccacccacgcagggucuga

SEQ ID NO: 4166736 - RNA, 82 nt, Human
ucugcccggcugccccccagggagcagcucagagccaagaaccugggcagggcccugauuccuggggcacagacuggguaga

SEQ ID NO: 4166737 - RNA, 58 nt, Human
ucugcccuuggcauguuugcucugcgugucccaaaaugccagcugagccaaggggaga

SEQ ID NO: 4166738 - RNA, 67 nt, Human
ucugccuaaggcuuggggaaaagugaggcccagucgcugcccucaaauagcccccagucuaguuaga

SEQ ID NO: 4166739 - RNA, 73 nt, Human
ucugccucccuuagagauucugucagagucuagucaggaaaacugaaaccacuccaguauuucaaagagcaga

SEQ ID NO: 4166740 - RNA, 63 nt, Human
ucugccugucuccuugaauuguggccaguuucacaugggaagcaacgucgagggacagggaga

SEQ ID NO: 4166741 - RNA, 72 nt, Human
ucugccugucucugacugccauuagcaaaagacauuauuccuguccucaauggaccaguuagagaggcaaga

SEQ ID NO: 4166742 - RNA, 63 nt, Human
ucugccuuggagaaaaaggaauugauaacauucucguuaccauucaaguucucuccuuacaga

SEQ ID NO: 4166743 - RNA, 59 nt, Human
ucugccuuucacacagacggccaaccucuggaaggaccgggccucugaggacaaggaga

SEQ ID NO: 4166744 - RNA, 64 nt, Human
ucugcgaggaacugagaagcagcuaugccaucuaaaugaggcaggagcucuccaguuugccaga

SEQ ID NO: 4166745 - RNA, 66 nt, Human
ucugcgaguccaggguuaggaguccgagcacagcucacuugguccucuacucaggggcucaccaga

SEQ ID NO: 4166746 - RNA, 56 nt, Human
ucugcgccgcauguguucuuucagggucucaggccaaaaggacauuuguugccagg

SEQ ID NO: 4166747 - RNA, 63 nt, Human
ucugcgcuccaggccccagcaccuugggagcuuaugcugucaauuacuugcgcuuaguucaga

SEQ ID NO: 4166748 - RNA, 58 nt, Human
ucugcggccucccaggcgucggcgcccauucucggggcgcccaagcgccggccgcaga

SEQ ID NO: 4166749 - RNA, 83 nt, Human
ucugcuauucuguguauuuacuggcuggacguucaccuguuccucuugguguaguaaagcuauaaauaggaagaagaagcaga

SEQ ID NO: 4166750 - RNA, 79 nt, Human
ucugcucaaaggugugggugacauacagccugcaagugaccuugagaaguaggcuguuucucucccaccccuucccagg

SEQ ID NO: 4166751 - RNA, 59 nt, Human
ucugcuccagaggcuucccuagagugaagagcucuacuauguaugcuuuaugcggcaga

SEQ ID NO: 4166752 - RNA, 93 nt, Human
ucugcuccucuccuuuguaauuuauauggaauuguugcucagaaaggcaguuaucugaaguaccauuagauuaggaugacaaggaagagcaga

SEQ ID NO: 4166753 - RNA, 105 nt, Human
ucugcugaaugguaaauaacagucauuugcccaguacuugggggguucuaaguguacggcugcccacugccugccuuccagguacugagugaccuagaaagcaga

SEQ ID NO: 4166754 - RNA, 72 nt, Human
ucugcugaccuuucucugacacuacuuacuauauuuuagugucggaaucaauugaacgguggguucuaaaga

SEQ ID NO: 4166755 - RNA, 94 nt, Human
ucugcugacuuuuugcugaggugcuacuuucaagguuuuaaaauucaguaaauccuugauaguuugcccuaauuuggagagaaggucaaucaga

SEQ ID NO: 4166756 - RNA, 56 nt, Human
ucugcuggaaaaccagggaauugguccaaaccaacucucagguucuuuccagcagg

SEQ ID NO: 4166757 - RNA, 72 nt, Human
ucugcuggacugggagaucuguugggacugggcagagucugucuuggucacuguggauccccagugcacaga

SEQ ID NO: 4166758 - RNA, 81 nt, Human
ucugcuggcaccugucucagugcccaaugccauaaggagccuggugcaucagagggccugaaagaccaggugugaggcaga

SEQ ID NO: 4166759 - RNA, 72 nt, Human
ucugcuggcagccaagugggauacucuggggucagcaacuugcugaagugaguaacccccucugccagcagg

SEQ ID NO: 4166760 - RNA, 66 nt, Human
ucugcuguucauagaaauggucucauuggaauaauuccuuuuggaacguuacuaaggacaccaaga

SEQ ID NO: 4166761 - RNA, 59 nt, Human
ucugcuuacuggauuguggggagguuccagggugggggccgggcagccagugcagcagg

SEQ ID NO: 4166762 - RNA, 89 nt, Human
ucugcuucugugucuucucucuccaggcgagguccuacugagguuguugccagcgauaguccucuccuggagcuugaauuggaagcaga

SEQ ID NO: 4166763 - RNA, 84 nt, Human
ucugcuuguuaauuuaauuucaugccagccuguuggucccugaaaguaacugcuguaaaaggcuggggaauugaauuugcuaga

SEQ ID NO: 4166764 - RNA, 115 nt, Human
ucugcuuuauuuauucugacaugcugacuuguuagugacagucugauuucucaaaacuagaauuuucaggauuuaagagguuacucgaugucagcaaguaauaaaugagcgcuga

SEQ ID NO: 4166765 - RNA, 71 nt, Human
ucugcuuugaccuucuugaugcuaaacuuuccuuuucggauacauguaguagagagggaaauuagggcaga

SEQ ID NO: 4166766 - RNA, 56 nt, Human
ucugcuuugcugccuccugaucuagaagauuuagacuaggaauucaaguagacaga

SEQ ID NO: 4166767 - RNA, 56 nt, Human
ucuggaagagcauguguuuacaaaugcagaauagcaugcaauacugcuuauccagg

SEQ ID NO: 4166768 - RNA, 74 nt, Human
ucuggaagguccugcccacccaccccaucccagcccggccaccauggucugggauaguggccaggacccccagg

SEQ ID NO: 4166769 - RNA, 70 nt, Human
ucuggacaaccaagaacagagggaaagaggcagagcacucuuuggagaaaaguucuugggcuuguccaga

SEQ ID NO: 4166770 - RNA, 66 nt, Human
ucuggacagggacacagccagugagguggaugaccuggagccugacagcgugucccuggcccugga

SEQ ID NO: 4166771 - RNA, 62 nt, Human
ucuggagaagcagugagagucagguuacaaaucacaaagcauuugguaacugcaucuccaga

SEQ ID NO: 4166772 - RNA, 64 nt, Human
ucuggagagguaagaagauaggguguguguauuucaggcucuguguuuugugccuacugcuaga

SEQ ID NO: 4166773 - RNA, 57 nt, Human
ucuggagauuuuacaucuaaucauuuauuuauaaaucuguagauggcagucugcaga

SEQ ID NO: 4166774 - RNA, 83 nt, Human
ucuggaggacauuuauuuauggaggacauuuauucuggauguggaaggccagaaaaugcucuccaaaaugaaagucauuugga

SEQ ID NO: 4166775 - RNA, 97 nt, Human
ucuggaggacccgaccgaauuugcuuucgugacagggucaagcgcccuuuccucgccggccgcagcccucaccaaaggggauuugggggccuccgga

SEQ ID NO: 4166776 - RNA, 110 nt, Human
ucauauuuuaaagcccuaacccccaaugucacuguguuuggcaauagggccuuaaaggaggucauuaaaguuaaaugagguaauagggguggggccuuaauccaauauga

SEQ ID NO: 4166777 - RNA, 79 nt, Human
ucaucaggaagugagucuugugaaaaauggcacuguaagaaaauacuuucccuuccauuuuucauaaacuauccaauga

SEQ ID NO: 4166778 - RNA, 66 nt, Human
ucaucaucugcaagcucaugucagauauuuaaugcucagcaugaguauaugaugcagcguugauga

SEQ ID NO: 4166779 - RNA, 112 nt, Human
ucaucaugguacccuagagcuuaagcugcucaguggaagacucagcucucccaauuuccuccauggggggcugcugacuguuacauagccaggcgagggguugcccugaaga

SEQ ID NO: 4166780 - RNA, 68 nt, Human
ucauccagauagcaggucagaagugccucgugagcaggagguguuccugcaagcuguucugaucauga

SEQ ID NO: 4166781 - RNA, 72 nt, Human
ucauccaggcugcuuucuaugccccuuguuagucugcuugggcugccauaacagaguaccacagauggguga

SEQ ID NO: 4166782 - RNA, 129 nt, Human
ucauccaucuuugucuaccauggacuuauaguuuuuaaagcugaacuccagaaagcuacaauccuacuuucauggaguccuaguauuggaaacauaagaggaggccucgcauggcuaggagauggaaga

SEQ ID NO: 4166783 - RNA, 66 nt, Human
ucaucccaugcuacauacaauuugucuguaaaauucuuacagugcaaugugauguagauuaaauga

SEQ ID NO: 4166784 - RNA, 59 nt, Human
ucaucccucagccaccuuugaggaaguaaacauggacuuccucccugagcuguggggga

SEQ ID NO: 4166785 - RNA, 60 nt, Human
ucaucccuuccuugaauccuuuagggucuacaguuacuugcaaaguugaggaaggcaugg

SEQ ID NO: 4166786 - RNA, 83 nt, Human
ucauccgguuucagucucugucucugguauuaggugaaaagacaucuuuuucccugcugcugagacuguauguaauuagauga

SEQ ID NO: 4166787 - RNA, 97 nt, Human
ucauccuaguagacugcagguuaggagcacuccuuuagagcaaaacguuuuagcauuuaacccagugacauccuuuaccuguuuuuuguuuuuuuga

SEQ ID NO: 4166788 - RNA, 56 nt, Human
ucauccucuugccccuugauuuucuccugagagucugacuuggccaggagcuguga

SEQ ID NO: 4166789 - RNA, 80 nt, Human
ucaucuagguuuuucuguauuauugugcuucagcucagagagugaauauuuaacaaaaugcagaguaugaauuucaguga

SEQ ID NO: 4166790 - RNA, 59 nt, Human
ucaucucucucuaugcguuguuccuacuugacagggaugggaacuaugguagaggauga

SEQ ID NO: 4166791 - RNA, 81 nt, Human
ucaucucugacaacaucagaaguagaagacucaggccauaauugauucuuugguuuuucugagguaucuguuuuagucuga

SEQ ID NO: 4166792 - RNA, 59 nt, Human
ucaucucugccuaugcuguaccuuuguuaauucuuuaauagacauuuggcuagggaugg

SEQ ID NO: 4166793 - RNA, 57 nt, Human
ucaucucuuuuguauugggguuugaauucuagauccugggagcaugaagagggauga

SEQ ID NO: 4166794 - RNA, 57 nt, Human
ucaucugcaucccccaggaaaugcuggguugccuugacccccugggaggaguuauga

SEQ ID NO: 4166795 - RNA, 89 nt, Human
ucaucugggacauguuagaaaugcagaaucucaggccucacccagaccuacuaaaucagaauuugcauuuuaacaagaucuccagauga

SEQ ID NO: 4166796 - RNA, 61 nt, Human
ucaucugggccaucagaggggcuggaaguguucagcuuguaugauauguggccugagauga

SEQ ID NO: 4166797 - RNA, 61 nt, Human
ucaucuguaucuagaccuaauguggauuaugagauuaacagcuuugggucugauaucauga

SEQ ID NO: 4166798 - RNA, 60 nt, Human
ucaucugucauccacaaagcuguuugcauucuucuggagucuugaugggucuacagaugg

SEQ ID NO: 4166799 - RNA, 59 nt, Human
ucaucugucugagagacuucuguccaaguuggauggagaaacagcucuaagacacgugg

SEQ ID NO: 4166800 - RNA, 58 nt, Human
ucaucugugcaggacucagaaggaagcagcuguuuguuguguccuaagcaccagaugg

SEQ ID NO: 4166801 - RNA, 87 nt, Human
ucaucuucagugcuguuucccaagguuucaaccuccccagccuaaccaggauacuugaaacuuuucuuggagaaacagucacuauga

SEQ ID NO: 4166802 - RNA, 74 nt, Human
ucaucuuuaugauucaccucuaugauuaggaacaaguuccaaucagcaguuggaauuagauaaauuagagauga

SEQ ID NO: 4166803 - RNA, 75 nt, Human
ucaucuuuuuacuaacacugcuuauaauuucaacuggaucauuugugaugcuuaaugcagugcuguagaaaaugg

SEQ ID NO: 4166804 - RNA, 85 nt, Human
ucaugaaauuugcagauuuaggaauguuaaaaaaucagaaauagagaaaaaaguccucuggucaagacauccuaacaucucaugg

SEQ ID NO: 4166805 - RNA, 62 nt, Human
ucaugaacacauguccuccuuggauugccacagcagcagggaaugaugccuguguuucuuga

SEQ ID NO: 4166806 - RNA, 60 nt, Human
ucaugaauauugaaugcuucaugaauacugaaugccucaugaauauugaaugucuuauga

SEQ ID NO: 4166807 - RNA, 90 nt, Human
ucaugaauguucuuaauggcaucuacaauagugaauccuuuccagaaguuuuccaauuuacuuugcugagauccaucaaaggaaucauga

SEQ ID NO: 4166808 - RNA, 58 nt, Human
ucaugacaacuugcacaguuuugagguugagacuuuugauauguguaaguugcauaga

SEQ ID NO: 4166809 - RNA, 70 nt, Human
ucaugagagaaguucaggucagguccacaaaugucugauaugugccuuugaaagccuggcuuuucucuga

SEQ ID NO: 4166810 - RNA, 66 nt, Human
ucaugagagagaggcccaagaauacagauggacuugcacuugaguccacugggcuuguccucgugg

SEQ ID NO: 4166811 - RNA, 56 nt, Human
ucaugagagugcucuuaaacaaacucgcaagcccgagaauuuuguucacuccaugg

SEQ ID NO: 4166812 - RNA, 84 nt, Human
ucaugaguuuguaaaaguucauugaugacugaggugaagcauugucauucuugucacuaaugaauuaucuuaaauaaauuguga

SEQ ID NO: 4166813 - RNA, 55 nt, Human
ucaugauaauacaggccuucuacccauucuguuaaagguuugcuguauaucaugg

SEQ ID NO: 4166814 - RNA, 93 nt, Human
ucaugaucagcuauagugaaauaugugcugauagcauuuuuggggacaagaagaguuagcuagacauucuuucacuguuuguuguucucaugg

SEQ ID NO: 4166815 - RNA, 83 nt, Human
ucaugauccugguuccaugacuuccacagcauuuucauuucccagcccuucugugguggggacagucgaucuagugauuguga

SEQ ID NO: 4166816 - RNA, 68 nt, Human
ucaugauucaguguagggcagaccccuggugcauaggcuaccacuuucuuaucccauacugcauuaga

SEQ ID NO: 4166817 - RNA, 84 nt, Human
ucaugcaauugucucuuuauucaggcaaaugguuucauuucucucuucuuuccucuccuuagugaaacagaggcaauuuauuga

SEQ ID NO: 4166818 - RNA, 65 nt, Human
ucaugcaggccuauggagcaguguagacacuagggagcagagcacugcagcguggucuggcagga

SEQ ID NO: 4166819 - RNA, 68 nt, Human
ucaugcaguuacuguuaugcaaacccucugccaggugagcugugagugcaucugcauacugcacauga

SEQ ID NO: 4166820 - RNA, 77 nt, Human
ucaugcaguuguagucaggcaggggcuggggcgagagucaucuccaaggcuuccugaccuacaugucugcugccugg

SEQ ID NO: 4166821 - RNA, 76 nt, Human
ucaugcauuucagacaagggaauagguaauauuuaaacauuaauauacaucuaugccuuucugacacaugcauuga

SEQ ID NO: 4166822 - RNA, 58 nt, Human
ucaugcugaguccuggcuuuguaaaaugacuuauaaagguccaaggauuuagagauga

SEQ ID NO: 4166823 - RNA, 57 nt, Human
ucaugcuugccagcagagcugucccaucacuuuaaauuauggcuggcagagcaguga

SEQ ID NO: 4166824 - RNA, 70 nt, Human
ucaugcuuucuuaguaauuuguucuuaaaugcuucaaucagagauuuacugagaacugauuacagcauga

SEQ ID NO: 4166825 - RNA, 84 nt, Human
ucauggcauguugucauuugaucuuucuuuguugauaaauuaauauuuaauacagauacaaaggaggacagugaaauugccugg

SEQ ID NO: 4166826 - RNA, 60 nt, Human
ucauggcugugauguacacuggggugacccacaugcugaaccccuucaucuacagccuga

SEQ ID NO: 4166827 - RNA, 74 nt, Human
ucauggcuuuuguuuucaguaauuugauuuccauuacauauugagaucagagaugcuaaaagagcugccaguga

SEQ ID NO: 4166828 - RNA, 59 nt, Human
ucauggggcguaggggauggauccauucuauguguggcuugccucuaccuaccccuaga

SEQ ID NO: 4166829 - RNA, 56 nt, Human
ucauggggugacagaagggaggagaaguccugcuucccugugucagugcccccuga

SEQ ID NO: 4166830 - RNA, 84 nt, Human
ucauggucccuuccuugugucuggauuucagcuuuccuaucucugcggaggggguuggaccagauuacacgugggugacucaga

SEQ ID NO: 4166831 - RNA, 104 nt, Human
ucaugguugaaaauuuuguccaugugcuuccucaggggaacgaugacuuucuaauuuauuauucccuuggcuaauacaugguaaacaaauucuaauaacaguga

SEQ ID NO: 4166832 - RNA, 74 nt, Human
ucauguaguauuuaucuguauuguagaacuguugcucaaugguaauaauuaacagugaugggucuauugcaugg

SEQ ID NO: 4166833 - RNA, 60 nt, Human
ucaugucagauguuuucucauuaagacagauucuguuuuuugugauaugacacuguaugg

SEQ ID NO: 4166834 - RNA, 101 nt, Human
ucaugugguuuuugucuuugguuccguuuauaugcuggauuacguuuauugauuuguauaugucaaaccagccuugcaucccagggaugaagcccacuuga

SEQ ID NO: 4166835 - RNA, 60 nt, Human
ucaugugugucaugaauaucucaguauacaucucuaacucagaaauacaugcaugcauga

SEQ ID NO: 4166836 - RNA, 59 nt, Human
ucauguguguguguuuguguguguaaacuccuucaauguguaaugcacuuaacacaugg

SEQ ID NO: 4166837 - RNA, 56 nt, Human
ucauguugccagagcuuuucaauauuccucaacuuuggaaaugcuaggcuacauga

SEQ ID NO: 4166838 - RNA, 81 nt, Human
ucauguuguugucauuauucugggauucuauaacuuggcauagaaagaccuguagguuccauagugcgaaaugcagcauga

SEQ ID NO: 4166839 - RNA, 88 nt, Human
ucauguuuacugauuaccuuugcuggucugcugugagggcaagggucuucagaaccagccagaagaggaucuaguuagauuuccauga

SEQ ID NO: 4166840 - RNA, 56 nt, Human
ucauguuugcccuaagaaaaaguaaaaaaaaguacuuuugauuuggggcaagcuga

SEQ ID NO: 4166841 - RNA, 55 nt, Human
ucauguuuguuggaaauguggccucuuaauggggcucacugaaccagagacguga

SEQ ID NO: 4166842 - RNA, 76 nt, Human
ucauuaauccaacaauucugugcaggcagagcuauacuuacaggaauagaaaugucuugcauauaauauuaaauga

SEQ ID NO: 4166843 - RNA, 65 nt, Human
ucauuaaucccgggguccagggacuuaaggacugaucccgauucagugaccccgggaucugucga

SEQ ID NO: 4166844 - RNA, 92 nt, Human
ucauuauauaagaacuagaacaaauuaggaggcauaaugaguguggcaaagcaaaaauucaauauccuugcuauuuucuaucuuacaaauga

SEQ ID NO: 4166845 - RNA, 128 nt, Human
ucauuauccaggcuacuuuuccuucuugaugcuccuguuaguuuaugcuuaagaaugcaaagaaugcaucuuaaugcuagccaauagagaacauaauaaagaugguaaaugucccauaagaauaauga

SEQ ID NO: 4166846 - RNA, 57 nt, Human
ucauucacugaugccuuaaugugaaugaguuuuacauuagaagguagaguggaauga

SEQ ID NO: 4166847 - RNA, 84 nt, Human
ucuuuagcuuucagucucugaaggaacaaaaucaaaacugcuugaacaaguaucccggcuggaggaaaaacuggaggcugugga

SEQ ID NO: 4166848 - RNA, 64 nt, Human
ucuuuaggaugaauuuguuuuauucucauuggccauugaucauggaaugaauauguuuuaagga

SEQ ID NO: 4166849 - RNA, 70 nt, Human
ucuuuaggcuaggugcuuagacauugaacugcugaggcgaacagugucugccuauuuuucaagccucuga

SEQ ID NO: 4166850 - RNA, 62 nt, Human
ucuuuaucacaguuuugugccuuguggacggauaguggguccaucccaugggagcuguagga

SEQ ID NO: 4166851 - RNA, 85 nt, Human
ucuuuauccuuaagcuauuuuuuaaauuuugaguaucuuuuauuugcuugagaaguugagaauaagagauaguuuauuuuccaga

SEQ ID NO: 4166852 - RNA, 76 nt, Human
ucuuucaaauaggccuugauaaauuaguaagccauuggguaaauaggcuugcuucuuguccaggaauccugagaga

SEQ ID NO: 4166853 - RNA, 70 nt, Human
ucuuucaccugggcuuucucugggacucaccuaggaguuccccagugugguagguccacagguguaaagg

SEQ ID NO: 4166854 - RNA, 128 nt, Human
ucuuucagaaugcuaauaccgauacuuuaaugagaaugaggauuuuuagaucacuuuucuugcaacagaaaagagaacaucugaggaucugaggucuuaaagcaacgaacauaaagcaaaguggaggg

SEQ ID NO: 4166855 - RNA, 87 nt, Human
ucuuucaggaaaacuaaaggccauuauucugauauauucacuguauugaacuauaaaccagugaugcccucuagugguacugaugga

SEQ ID NO: 4166856 - RNA, 91 nt, Human
ucuuucagucauucacucauucagcaagaauuuacugagcuuauuuagugagaccaguucccuucuuggcugacggaaugucacugaaaga

SEQ ID NO: 4166857 - RNA, 77 nt, Human
ucuuucauucuccuccugcccccuguaugacaaaauaggcaaaaugaguacaucagagggugagauggagaaaaaga

SEQ ID NO: 4166858 - RNA, 61 nt, Human
ucuuuccaugauagacuggugcuuuuuaaggaauaucucaagugccaguagguauggagga

SEQ ID NO: 4166859 - RNA, 77 nt, Human
ucuuucccgacuugaacccaaaaagauauugcuuccuugugggaggagcuugucugauaauggggccaacggaaaga

SEQ ID NO: 4166860 - RNA, 74 nt, Human
ucuuucccuuuuuucugugcccugcuagcuggaaaucuuccauuugguuauguaucgaaacuaccagcggaaga

SEQ ID NO: 4166861 - RNA, 130 nt, Human
ucuuuccuucguuuuauaacaggcuuugucuucuguugcucugugcaaauagcaccccuugacaagucauaaggccgugauaugugcacgguacaucgcagugaaagagcagcuuuaugcgaggggagga

SEQ ID NO: 4166862 - RNA, 70 nt, Human
ucuuuccuuguaggcucugucaccuaugagcugacacagucacccucagcgucaguggccccaggacaga

SEQ ID NO: 4166863 - RNA, 78 nt, Human
ucuuuccuuuccuguccugguacuuggcaccuuguagacaguugcauguccccugcccagggaugggaugaggagagg

SEQ ID NO: 4166864 - RNA, 56 nt, Human
ucuuucuagggcucuugucuucugcugggaggcagagcaucucuagcccaggaaga

SEQ ID NO: 4166865 - RNA, 67 nt, Human
ucuuucucuaucuguucaucuggaaacauacuuuguuuucucucuauuuagacagguauggauaagg

SEQ ID NO: 4166866 - RNA, 63 nt, Human
ucuuucucuucagcacccagccccggggccagcaccguggguggagcaguguggggugaaaga

SEQ ID NO: 4166867 - RNA, 68 nt, Human
ucuuucuuauuaugcucaauguuugcaaguuucacaugaagccugaaugcaagcaugaagaguagaga

SEQ ID NO: 4166868 - RNA, 62 nt, Human
ucuuucuuuaucaccugauaugggucccuaaaagggggggaacaugcagggaagaagagggg

SEQ ID NO: 4166869 - RNA, 60 nt, Human
ucuuugaaguaucuuaaauggugaggaaacuccaaaagacuucuauuugagauuuaaaga

SEQ ID NO: 4166870 - RNA, 68 nt, Human
ucuuugaauguuuuagguacuuaagaaaauggagcauuucuuauaguaugaaggaaaacauuuguggg

SEQ ID NO: 4166871 - RNA, 60 nt, Human
ucuuugaggccagucucaucacaggcugagaggccuaggaguacagaaugguuuuggggg

SEQ ID NO: 4166872 - RNA, 78 nt, Human
ucuuugagugaguaggugguuaagcauggaugccucucagcucuccucugauuugauuaccuaguuuaaacuuccaga

SEQ ID NO: 4166873 - RNA, 79 nt, Human
ucuuugaugcuccuuccagucuuuucaguggagucagaagcagagacuugacugccugagaugggaaaggcauuggaga

SEQ ID NO: 4166874 - RNA, 122 nt, Human
ucuuugauuuucaaauuauuauuuauacuuacuuagcauuauguaauuacuaggacugagaauucagaauuaggagcuauaaugugaagucuaaaguuucuggaucugauuaaaaucaaaga

SEQ ID NO: 4166875 - RNA, 63 nt, Human
ucuuugccccuucuacccgucucuguaugaccccaaugggguaggguacgaaggggagccaga

SEQ ID NO: 4166876 - RNA, 90 nt, Human
ucuuugcccuaaaaguguagacuauuuuuaugguucugaauacagcccuccuuucagauccguggauuauaauuuagauaucagcacaga

SEQ ID NO: 4166877 - RNA, 60 nt, Human
ucuuugcccugaauaauagaguggggaaggcuuuugagccauucucaguucaggagaaga

SEQ ID NO: 4166878 - RNA, 80 nt, Human
ucuuugcuauugugaauagugcugcaauaaacauaugugugcaugugucuuuauagcagcaugauuuauaguccuuuagg

SEQ ID NO: 4166879 - RNA, 68 nt, Human
ucuuugcucuuacacaguuagugaauuaaaugagauuuuacagagaagagacugugaagagcaaauga

SEQ ID NO: 4166880 - RNA, 59 nt, Human
ucuuugcucuuauguuacuauggcuuuuggcaguuagcuuugguugaggggagugugga

SEQ ID NO: 4166881 - RNA, 59 nt, Human
ucuuuggaacccagcccaucggaacucuguaaaguaugaacaugcugugguuauaaaga

SEQ ID NO: 4166882 - RNA, 58 nt, Human
ucuuuggaauaauuuccuggaguauucaaaucaaagugcuaggggaacauuucagaga

SEQ ID NO: 4166883 - RNA, 71 nt, Human
ucuuuggagauggcucugcaaggucuaaggcccucccagagccuuagaccuuggaaagccgucuccaaagg

SEQ ID NO: 4166884 - RNA, 64 nt, Human
ucuuuggccuuaggagcccuugggaggaagcugcuacugccuuggggguugggagagucaggga

SEQ ID NO: 4166885 - RNA, 67 nt, Human
ucuuugggaacacuccagggcuuggaagacauaauuuuuccaggugauggucggaguucagugaagg

SEQ ID NO: 4166886 - RNA, 80 nt, Human
ucuuugucuggccaggcugggcuacaaguugaguggaggguaauccuacaugcacacagcugggccuggcugggagcuga

SEQ ID NO: 4166887 - RNA, 101 nt, Human
ucuuugucuuaguuggaguucucucaaauggauuucuggccccuccugugaggugggacuggcagauaccuuuuguuggaauuucccaugagcuuagaaga

SEQ ID NO: 4166888 - RNA, 61 nt, Human
uccagugccucacugaggauucagcucugcucaagucugccuguuuccuggggauacugga

SEQ ID NO: 4166889 - RNA, 67 nt, Human
uccaguggagugugggggugaauauggcuccacuucuaaaucccuuccuucaucuccauccacugga

SEQ ID NO: 4166890 - RNA, 67 nt, Human
uccaguguuucagguagauaaauuuucauuaagaaauaagggaagaaucaacauugaaagagcugga

SEQ ID NO: 4166891 - RNA, 55 nt, Human
uccaguugcccaucucucuucuucaggaugcggaaggugaggggugggugcugga

SEQ ID NO: 4166892 - RNA, 81 nt, Human
uccaguugccuugaauuuuugcuaauccccagccacugccccuuuuggggcacuugucguuacagaaugcaggaaaugaga

SEQ ID NO: 4166893 - RNA, 64 nt, Human
uccauacagaucacaguccuaggccacagaaaagggugggaaacuggggacugaaucugaagga

SEQ ID NO: 4166894 - RNA, 59 nt, Human
uccauacauacauaugcagaaaagaaugaggaacuucucuuuggauauguauggauaga

SEQ ID NO: 4166895 - RNA, 75 nt, Human
uccauaccgauuuguaucaaaaccucagcgucagaaacaaacucugcagaauggguauuuagauucaaguaugga

SEQ ID NO: 4166896 - RNA, 92 nt, Human
uccauagaaccuugaagcagcuuucuggugaggaggugagcuacuuccugcaaaacuacuaguagcugcuauugauuaauguauucuuccaa

SEQ ID NO: 4166897 - RNA, 58 nt, Human
uccauaguuauagcaaaugaguugguacucauuccaaaugacacuuuguugcuguggg

SEQ ID NO: 4166898 - RNA, 79 nt, Human
uccauauaaugauacuguuggaucagugucuucagcugcaguauguaagcacacaggacuugauucaugaucauauggg

SEQ ID NO: 4166899 - RNA, 60 nt, Human
uccauauuucuuguuaaccagacuuaaaaggaggcucuggucaguaauaagaagugggga

SEQ ID NO: 4166900 - RNA, 72 nt, Human
uccaucaauuaugugauugauaguuaagagauaacaaauuuaucucuuaacugguucagcaauuugauagga

SEQ ID NO: 4166901 - RNA, 103 nt, Human
uccaucacaccccaucccagcaguggcagaggcugugaggaugccgcugggucaggugguguccuacuuaaccacugucagcuugggauauggcauucuugga

SEQ ID NO: 4166902 - RNA, 76 nt, Human
uccaucaggcuagcucauguaagagagcauuaguuuguuccaaaacaagggcauuuuuacagagcccuaggauggg

SEQ ID NO: 4166903 - RNA, 61 nt, Human
uccaucaggcucgugggcucuccaaucacucagccagccaggagcacccugggccagugga

SEQ ID NO: 4166904 - RNA, 61 nt, Human
uccaucaguaaauauucauugugcacauacuauguccacaccucauguauugugcugggga

SEQ ID NO: 4166905 - RNA, 82 nt, Human
uccaucaugggugagcagguggccuccugucuguccuccuggagggcuggacacuggccaucugcuuguuucccaugaagga

SEQ ID NO: 4166906 - RNA, 60 nt, Human
uccaucauuuguuugcaugcaggauuuuauuugacaguccuguauuguuuuagauguaga

SEQ ID NO: 4166907 - RNA, 65 nt, Human
uccaucuuuaaagaaauuccucaucuuuugauauuucgagcaggaaggcuuuggggguuccugga

SEQ ID NO: 4166908 - RNA, 61 nt, Human
uccaugacagcgugagaguuugcagccaaagacuaguauggcggguccauggugucaagga

SEQ ID NO: 4166909 - RNA, 57 nt, Human
uccaugagaacccuuggagauaagcagaauaaaucuuauccccauuauuuucauggg

SEQ ID NO: 4166910 - RNA, 61 nt, Human
uccaugagagguaacuuuacaaugaaauauguuuucuuugugcauggcuacuuuuuaugga

SEQ ID NO: 4166911 - RNA, 67 nt, Human
uccaugaugcugugagaccauuuguugaggaagguguccuucuuaaaguugucacagcugcuaagga

SEQ ID NO: 4166912 - RNA, 66 nt, Human
uccaugcagaguccaggccucauuccucauuugaagcucacgugguaaaaccugggcucuguugga

SEQ ID NO: 4166913 - RNA, 80 nt, Human
uccaugcagguuaagaagcuagagaugaacacgcagaguuuauauacuuuggaagaaucgugucacuggcucuguaggga

SEQ ID NO: 4166914 - RNA, 57 nt, Human
uccaugcaguagaggcgcugggcagagagucaaggcccagcagccaucgaccaugga

SEQ ID NO: 4166915 - RNA, 61 nt, Human
uccauggagcauucagguuucccuuuugacugacaagaacuaaaaagaaugcuccaguggg

SEQ ID NO: 4166916 - RNA, 79 nt, Human
uccauggcuguuucuccugcccagaugccugggguaccgcugccccauggagcuaaaggaggagcaaacugccaugaga

SEQ ID NO: 4166917 - RNA, 62 nt, Human
uccauggcuuucuuucauuguaaugucuuuuuuugauaucagagaaaugcugagcucaugga

SEQ ID NO: 4166918 - RNA, 57 nt, Human
uccauggucucuuccagauaaccgagacauaaacaaggggcuggagaagccugugga

SEQ ID NO: 4166919 - RNA, 59 nt, Human
uccaugucuagacacuacuaguaaccggugccuucuguaccugcugugcuuuccaugga

SEQ ID NO: 4166920 - RNA, 71 nt, Human
uccauuaauugucauuuaaugccuuugccauccagguuacuuggagaggaaagaaauuaaauuugaacgga

SEQ ID NO: 4166921 - RNA, 89 nt, Human
uccauuagccauugugauguucucuuccuggucagugaguaaugacugugauccaggccaggagagcgagguuuauguuuuuugaugga

SEQ ID NO: 4166922 - RNA, 69 nt, Human
uccauuaugauucaggauugaaccauuucuuuugaggagguaaaugaacucuuccugcaucccccugga

SEQ ID NO: 4166923 - RNA, 73 nt, Human
uccauuauggauuagccuuaauguuucuugaauuucuguuagggaacaucaaggucugugucuaguucuuggg

SEQ ID NO: 4166924 - RNA, 60 nt, Human
uccauucagcauuggcaccauggauugccacaggagguuuauacacaguguugauaugga

SEQ ID NO: 4166925 - RNA, 58 nt, Human
uccauucuuuugcugucuuccuaauuagugcacuaaggaagaugaacaacagaaagga

SEQ ID NO: 4166926 - RNA, 56 nt, Human
uccauugauagcuuucuggaagcagccaaugaguuguuucaaguuugcucaaagga

SEQ ID NO: 4166927 - RNA, 68 nt, Human
uccauugccuggaaagcacugacaaugugguagcuuucaucacugcugcaguuuugccaggcaaugga

SEQ ID NO: 4166928 - RNA, 55 nt, Human
uccauuggucucugugcccaggugguuuuggaucccuuggagcagcgcuaaugga

SEQ ID NO: 4166929 - RNA, 79 nt, Human
uccauugguucauuuuuccaccuccuaggaaguuaaugaguuucacacagggucggaaagagugauaaaacacagagga

SEQ ID NO: 4166930 - RNA, 58 nt, Human
uccauugucacugcuuuagguucaggcuuuuaucaucuugaacuucaacuacaaugga

SEQ ID NO: 4166931 - RNA, 130 nt, Human
uccauuuacagaggccagcucugggugaaggguaccauugaaagaugucgaagaacccaguaccauugacaguaagccuggugguaacccuucaccuguaagggcauggagaggaaccaguguuagugga

SEQ ID NO: 4166932 - RNA, 91 nt, Human
uccauuuaguauguuuuuauuguguaaaugugggaguguagguuuugaaagccccuauguuuuacaguauugaaaauuccaaacuaaagga

SEQ ID NO: 4166933 - RNA, 64 nt, Human
uccauuucuagccucugaaguaggagguggcuucuccaugaggaaccaggggcuggagauagga

SEQ ID NO: 4166934 - RNA, 64 nt, Human
uccauuucugaggauggcauuauucugauuaauuuagucagacugaucaucuaucagaugagga

SEQ ID NO: 4166935 - RNA, 63 nt, Human
uccauuuucuugcucuagguaaccucuggaaugaacauuacagagauagagcaaggaagugga

SEQ ID NO: 4166936 - RNA, 72 nt, Human
ucccaaagcuuguugggucaguuuugggggacugcauuuucaugaaccagagcugcauccagcagguugggg

SEQ ID NO: 4166937 - RNA, 62 nt, Human
ucccaaagucagugcucagucguccuugcccuccaggacuuuggcaucuagacauuguugga

SEQ ID NO: 4166938 - RNA, 63 nt, Human
ucccaagagcucugggauaaggacaggaucaugaccaaacuucucaaugagcuuuuuaaggga

SEQ ID NO: 4166939 - RNA, 59 nt, Human
ucccaagagggguuauuaugccacugguucucaucgggggcuaaaggcccucuguggga

SEQ ID NO: 4166940 - RNA, 119 nt, Human
ucccaaugcaaguauuaagagcuggggccuucggagcaugauuaggucaugagagccccgccuucaugaauggaaucaaugcucuuauaaaaggcccaaguuacauuuucuggauggga

SEQ ID NO: 4166941 - RNA, 102 nt, Human
ucccaauugaacauucauuuucucuagggagaguuguuauggguuaaccgauugagggagccaaaauaagucuccguauaacaugaaaaugauuuccaagga

SEQ ID NO: 4166942 - RNA, 74 nt, Human
ucccacacaggcagcggcuggcucagugcaacuccagagacuaggagcugccugccaugccgcugguaagggga

SEQ ID NO: 4166943 - RNA, 130 nt, Human
ucccacagcuccucaacagccugccuaagcccgguggcagcucgggccucccucucccgggcccucaaucuugccuccccgggaagggcggcccagugccccaucaggagcagguuggggaggugaccug

SEQ ID NO: 4166944 - RNA, 58 nt, Human
ucccacagggcuucucuguacagagugagugccucguacuugagaagucuccugggga

SEQ ID NO: 4166945 - RNA, 119 nt, Human
ucccacggcuguggggggucucagggcagaggcccauggucauggcugugggacucucaggguggagggcuuguggucguggcugugggggucucugggcagaguccauggcugugggg

SEQ ID NO: 4166946 - RNA, 67 nt, Human
ucuuagcuguucccucacugcagucacugcaagcagccuggugcaguccaaagggagcagagcugga

SEQ ID NO: 4166947 - RNA, 59 nt, Human
ucuuaggauuccaguucagggcaucguaagcuacacagaucccagucuagguccuagga

SEQ ID NO: 4166948 - RNA, 79 nt, Human
ucuuaggcucggcuuagcaguuaaucugagccaagauugucuaaaauaaucuuagauaaacugcuccccuucccugaga

SEQ ID NO: 4166949 - RNA, 92 nt, Human
ucuuagguaauuugaggaauaaauuggugucauuugcauucuauuccagaagacaaaccugcugcuauuuuauccaguauuuuauccuaaga

SEQ ID NO: 4166950 - RNA, 79 nt, Human
ucuuaguaaccuuauuuaguaugcuugauacaacagcaaggcugaacucaagcaacugaauucuaaaaggaagcugaga

SEQ ID NO: 4166951 - RNA, 61 nt, Human
ucuuagucacagaggugagaaacuucauuuaguuuggucuuaugccucugucccacuguga

SEQ ID NO: 4166952 - RNA, 82 nt, Human
ucuuagugaaaggaguauauaauuaauuggucugguggucuccacucaaccagugauauguguaauugguuucucacugaga

SEQ ID NO: 4166953 - RNA, 102 nt, Human
ucuuaguuucuccaacuacaaaaugugcaaaguaaaguaauuuuccaaauacauuaaaaaguugcacaacuuuguauacggguggaaagaggcuuguugaga

SEQ ID NO: 4166954 - RNA, 130 nt, Human
ucuuauaaaguuguguaaaacaugguucuuuucucaaaaugcuuccagauugguaggggugucaaacauguucauuccuauuaugggguagaaaccaguaagugaaucaaggguuacggaaauucagaga

SEQ ID NO: 4166955 - RNA, 71 nt, Human
ucuuauaaucucuauuuuaauguuagugcuggucaguugugccuacacuccaaaagaaggaggguauaaga

SEQ ID NO: 4166956 - RNA, 87 nt, Human
ucuuauaccucaaauccaacaucccuuccuagcacuuggugugggggaccccaggccaagugcugggacaggugugcagguacaagg

SEQ ID NO: 4166957 - RNA, 78 nt, Human
ucuuauauggcagaauuucuagcagauucuauaaauguaaugcaugaagugagcgaagaaguuuuguccaaaauaaga

SEQ ID NO: 4166958 - RNA, 129 nt, Human
ucuuaugguggguguuguaaugcuuuuauuuugcagacucuacuggggccagugaacaaugagggaaugaaguacaucauuccacauguuagcugguuaaagucauggcacuuggcagccuccuugaga

SEQ ID NO: 4166959 - RNA, 66 nt, Human
ucuuauuacucagcaucaucuuucugcacaagcugaagcugcaguguuuggaugcugagucugaga

SEQ ID NO: 4166960 - RNA, 76 nt, Human
ucuuauuaucauguuaauuagugggagggcuguugagguuuuccacuucauuaccuacuaauuucaagauaaauga

SEQ ID NO: 4166961 - RNA, 101 nt, Human
ucuuauugucagggacuagccaacuuagaaagaguuuucuccccuacuaaggugauuucauuuuuucugaguggaagcaauauuucccugauuaaguaaga

SEQ ID NO: 4166962 - RNA, 71 nt, Human
ucuuauuugaucaggaaggagagggauguugcucacccucagcuucuuggauuaauccagcauuuauagga

SEQ ID NO: 4166963 - RNA, 62 nt, Human
ucuuauuuuaaagugaagggucuugucauuuuaguguaagagccauucaaguuaaucuuaga

SEQ ID NO: 4166964 - RNA, 74 nt, Human
ucuuauuuuaauguugaagaugcugaccauguggugauucuuuacuauuaaauacucuucaaauugaaguuaga

SEQ ID NO: 4166965 - RNA, 57 nt, Human
ucuuauuuuguuagaugcuguacagcaaguaaaagcuguagcuucuuaagaauaagg

SEQ ID NO: 4166966 - RNA, 63 nt, Human
ucuucaaaguguuuuccaugcaaugaagcacuugcuguguugaacugaaugcacuacuggaga

SEQ ID NO: 4166967 - RNA, 81 nt, Human
ucuucaaauccuacagugucuggucauuucugcccaagauaccuuugguaauuuaauuucagauaucugucuauuuggaga

SEQ ID NO: 4166968 - RNA, 95 nt, Human
ucuucaagaacaaauauuguccacaucacucacuugucauuuauuguuaguugacguguguguguguguguguguguguguguaucugugugaga

SEQ ID NO: 4166969 - RNA, 72 nt, Human
ucuucaagauccccucugaaguguguguagcacuaguugcucuaucuuugcuugagggaaagagcuuggaga

SEQ ID NO: 4166970 - RNA, 86 nt, Human
ucuucacagugcuggauaaugcauuauaagaaauuuucgugaauauacuugaaagucauuuagccuuaucucccacucagugagga

SEQ ID NO: 4166971 - RNA, 78 nt, Human
ucuucagaagcuaauuaauaugagacaagucaugaagguagguguccucaugauuauauuaauggcuucauaaggaga

SEQ ID NO: 4166972 - RNA, 73 nt, Human
ucuucauaugagaucuccaagucaauaucacuggccaggucccugacacugguuggcugagauccauaggaga

SEQ ID NO: 4166973 - RNA, 63 nt, Human
ucuucaugggcaggaacuuggagacggaaccacaagaauggucuccugagaggcucuuggaga

SEQ ID NO: 4166974 - RNA, 57 nt, Human
ucuucauguacuuacugagcacauaccaugugcugggcacugucuagguacugagga

SEQ ID NO: 4166975 - RNA, 56 nt, Human
ucuucauguauuugacaaccauuuaaucacuuuaucugguauguuuggccugaaga

SEQ ID NO: 4166976 - RNA, 64 nt, Human
ucuucauucuuuccuuaauugaugcucagccacaaaaaguucguugucaugaggaaggagaaga

SEQ ID NO: 4166977 - RNA, 94 nt, Human
ucuucauugucaucaagucucuuccucugccaaagaacaauugaucccugcaacuucuagcagagggaagaggcuuuccaaggacagcagaagg

SEQ ID NO: 4166978 - RNA, 67 nt, Human
ucuucauuuuacaggcagaccugucuaacuacaagccagacuuggguuuucuccuguaguuugaaga

SEQ ID NO: 4166979 - RNA, 129 nt, Human
ucuuccaaucauggguuuccugugaauccucccucauucuuccucuggccuccuuucagcaagaacgcgaccccacugagguggcugaagagugggugaggguuuccagaggccaggcacucugguaga

SEQ ID NO: 4166980 - RNA, 59 nt, Human
ucuuccacuugcaaguuuauggaaauaucaguaugucaaaauaaauaaaaagugggaga

SEQ ID NO: 4166981 - RNA, 57 nt, Human
ucuuccagggagccucaaaccugauuaacggguuagaaaauagggccuguggagcga

SEQ ID NO: 4166982 - RNA, 63 nt, Human
ucuuccagggccugcuuucuucuguucgugauagaaucaucccaguguggcaggccauggaga

SEQ ID NO: 4166983 - RNA, 63 nt, Human
ucuuccagugcuguguagagcuggauacauguacagcccugccuucccaugcagcuggggaga

SEQ ID NO: 4166984 - RNA, 69 nt, Human
ucuuccauuuucccaccaucuccugcaauaccuccucuucccuuaggcuuuccugggcagaugagaaga

SEQ ID NO: 4166985 - RNA, 72 nt, Human
ucuucccaauauucugcuuuuauguuucauccugcaggcaccuccucauauagagcaaggaugucaggaagg

SEQ ID NO: 4166986 - RNA, 61 nt, Human
ucuucccagagguugagucacuuaugcugcugagcacaggaauuuugaccuuugggugagg

SEQ ID NO: 4166987 - RNA, 57 nt, Human
ucuuccccuucauggcagcagccaggcccucccugcacaggccuugaagggagagga

SEQ ID NO: 4166988 - RNA, 89 nt, Human
ucuuccucaaauaucuggguguguuacaaugaugccgacaucauucugguuuuggaauucaaguuguagcuuagccagcauguggaagg

SEQ ID NO: 4166989 - RNA, 64 nt, Human
ucuuccucaauguaacaacccccaucuuccagaguacacagggggcagcguguggacaggaagg

SEQ ID NO: 4166990 - RNA, 56 nt, Human
ucuuccucaccauccuccaucccuccagcuaacaaagggcagaagguguaggggga

SEQ ID NO: 4166991 - RNA, 67 nt, Human
ucuuccucagcuccaaaguccaagacugggugccaggcccagugugguucuuuggagaaaggcugga

SEQ ID NO: 4166992 - RNA, 80 nt, Human
ucuucgugauaugcuggcuggaggagggagguugugagaacaaauugcuaacugucagacuagaaucaugucuauggaga

SEQ ID NO: 4166993 - RNA, 70 nt, Human
ucuucuauaggagcagaaagucauucacaauguaaauaaacaguuggaagaauguuugccuuauaacaga

SEQ ID NO: 4166994 - RNA, 70 nt, Human
ucuucuaugaggcaggcccugaaugagucacugagaaggcaguugaauacaugguuccugcucucgaaga

SEQ ID NO: 4166995 - RNA, 72 nt, Human
ucuucucaucagaguggggacuaauaacagugaccuccccgccagguccuguguguugccggcugaagaagg

SEQ ID NO: 4166996 - RNA, 76 nt, Human
ucuucucguucagguagagcuccaccaccuucaggcagacgucaucgcucacgagguggugcagcuggcgggagga

SEQ ID NO: 4166997 - RNA, 108 nt, Human
ucuucucguuucuugcaucuggccacugacuucugauucucucuggaugguuaucaucuugcagucuagagguagaggcagugggaacuuuguuuaggaucuugaaga

SEQ ID NO: 4166998 - RNA, 59 nt, Human
ucuucucucagcucgucaaagucauucuccauccagcuuugauccguugcuggugagga

SEQ ID NO: 4166999 - RNA, 84 nt, Human
ucuucucuggaggccguuggcccuuacugguccuauguauguuggaaagaucugagguucugccgaccugguuuccagcccuga

SEQ ID NO: 4167000 - RNA, 107 nt, Human
ucuucucuuccaucauaguuuuacuaaggacucuaaguucuauuguugacuuguauuggagcaggaagucuauggcugugacuuuggauggaauauaacaaagagga

SEQ ID NO: 4167001 - RNA, 76 nt, Human
ucuucugagugggaagaauucugcaacacccuguagcuugucgcugcaaugaauuacuucccaaacuucacaaaga

SEQ ID NO: 4167002 - RNA, 60 nt, Human
ucuucugcuuccaaauucagggcucuuuucacucuaccauccuggcuuugcagcaugaga

SEQ ID NO: 4167003 - RNA, 101 nt, Human
ucuucuggugcuuuccuccugacuuuaaaauaacaaguuuagaaggccauuucuugauuuuccaguuuaaaugucacgggaugaacuuccaccauggaaga

SEQ ID NO: 4167004 - RNA, 74 nt, Human
ucuucugugguguaggucacaguuaggaugaaucugaccucaucuuaauucugugucuucacuagucacuaaga

SEQ ID NO: 4167005 - RNA, 63 nt, Human
ucuucuuaugugccauuaucuccuuucccuacucaugggaguaagagacauguagauagaaga

SEQ ID NO: 4167006 - RNA, 68 nt, Human
ucuucuucugguuuauguggcaaggacuaucauaauuaauuuuuccucugaacauugaugggagaaga

SEQ ID NO: 4167007 - RNA, 61 nt, Human
ucuucuugaagcagagaaauacuugaacuuuuguuuagauuaugcucugcuucaaucaaga

SEQ ID NO: 4167008 - RNA, 68 nt, Human
ucuucuugauucaucucagcagagcuuucccaagggcauccagggccagcugaugagaaugaggaagg

SEQ ID NO: 4167009 - RNA, 84 nt, Human
ucuucuuugguguuuauuugugaaucauuuaucuacuuuauagaacaauugguagaguuauccuucacagguauauucagaaga

SEQ ID NO: 4167010 - RNA, 84 nt, Human
ucuugaaauggcauuauuugguuugauccaugugagcacucaauauauuauucacaugucaaaaacuacauaaaaacauuuaga

SEQ ID NO: 4167011 - RNA, 70 nt, Human
ucuugaaauuccugccaggauuccuauucugucucagcuugggauccaguucuaggcuaggggaguaaga

SEQ ID NO: 4167012 - RNA, 60 nt, Human
ucuugaaggcuuggacuugaacugggauccuuucuggcucucaaguuuugcuugacaaga

SEQ ID NO: 4167013 - RNA, 58 nt, Human
ucuugagggucuggaucugcugcuggaaggccagcugcaccggcuggaccacugagga

SEQ ID NO: 4167014 - RNA, 60 nt, Human
ucuugaguguggacagguguccuggacagguaggugucuggaugccacgaagcaccagga

SEQ ID NO: 4167015 - RNA, 71 nt, Human
ugaagacauugcaugauaaugcugcaaccauaaaaugaaauauuauguagcuguuaccaguuuugucuuca

SEQ ID NO: 4167016 - RNA, 117 nt, Human
ugaagagaccauuugacaacuucaaaaaucacuaaguuauaguguggagaacaaaaauccuacucugaauugaagugauauuaagauuuuggaaaugaaaauucauagggcuuuuca

SEQ ID NO: 4167017 - RNA, 56 nt, Human
ugaagagagcugucaguuagaaguucccuuggucuucucacugucugcuuuguuua

SEQ ID NO: 4167018 - RNA, 116 nt, Human
ugaagauagugugaugcuauuuaaaguagcuuuguagguacaguuaguugaguaaacaagcugccuuaugucuauuaguauauuuugucaagauaguaucacauuuccccucuuca

SEQ ID NO: 4167019 - RNA, 86 nt, Human
ugaagaucuaaauaugguuauguaaucaguuguucagacaagagaaacguagauuaauugaauuagauaaucccaguggucucuca

SEQ ID NO: 4167020 - RNA, 80 nt, Human
ugaagaugucagcaggggugguugcuucuaagggugucucucuuuggcuugcagaugaucaccuuccugugacaucuuca

SEQ ID NO: 4167021 - RNA, 71 nt, Human
ugaagcagaaacaaucugauuuagggggcagucagauaagagacuguuaaaguaauuaauugucuauuuca

SEQ ID NO: 4167022 - RNA, 71 nt, Human
ugaagcagagaggaaucuagcauuacaaaaacuguuaagucagaugagcucuaagauccccucaagcuuua

SEQ ID NO: 4167023 - RNA, 79 nt, Human
ugaagcagcauuuacauucccccaauuaccaaugggaugaguuucccugggaaggagaggggaguggggagcugcugca

SEQ ID NO: 4167024 - RNA, 64 nt, Human
ugaagcccuuuaucaaaagagagagaauaaaaguauuuucugacugguguauaauagggcuuua

SEQ ID NO: 4167025 - RNA, 58 nt, Human
ugaagcuagaauguccauauuuaaucaagggaugagugaacaggaaaagcuggcuuca

SEQ ID NO: 4167026 - RNA, 94 nt, Human
ugaagcucugcggugcacugaacagcccuguuaagucuguucugcuacugguauuuugagcaggagggccuguucagugcacugcagagcuuca

SEQ ID NO: 4167027 - RNA, 106 nt, Human
ugaagcuuggccugcccaacauuuagcaagaugcccuggcuuucuacuaaaaggaacuugccuuaucuuuuaaauuaaaauuguggcauaugaauagccagcuaca

SEQ ID NO: 4167028 - RNA, 62 nt, Human
ugaaggaaaugacggcagaagauaugacaagugccaucuucauuucuguguuaauuccuuua

SEQ ID NO: 4167029 - RNA, 56 nt, Human
ugaaggaagaauaggcaguguugugacgccauuaacuugcucugauuuuccuguca

SEQ ID NO: 4167030 - RNA, 64 nt, Human
ugaaggcauuugaguuggugagcccuaauuuaaccucccugggucaccauuuuuuuugcuuuca

SEQ ID NO: 4167031 - RNA, 123 nt, Human
ugaaggcucucuugccuggcuucacaagcugacuuagagcaguuggcagcuguauucaccgcucaccaucaggaucacuguucucaacuuucuucggcagccggaaagagauaaacaccuuca

SEQ ID NO: 4167032 - RNA, 71 nt, Human
ugaagggagacuagaguugaacuauuugccaucaaugaugaugacuaauugauaacucuguaauccuuuua

SEQ ID NO: 4167033 - RNA, 83 nt, Human
ugaagggagggcggcagaagacacucccucucgguucaugcaaaucgcugggggaacuucagccaauagucacuggcucuuca

SEQ ID NO: 4167034 - RNA, 57 nt, Human
ugaagggcuguuuuacauugauaaggauuugcugcaaauguauaacagagcccauca

SEQ ID NO: 4167035 - RNA, 73 nt, Human
ugaaggucgauugauuuccucuacuagcaauuaugccucauaauuguuugcugaaggagaaauuggcauuuua

SEQ ID NO: 4167036 - RNA, 63 nt, Human
ugaaggugcucguuauggccaguggaaggaugcuuuuaacacagagauggccagggcacauca

SEQ ID NO: 4167037 - RNA, 72 nt, Human
ugaaguaagcaugggaaucccacaggguacaaggucccgcauacccuucugggauuuccgaugcccucuuug

SEQ ID NO: 4167038 - RNA, 129 nt, Human
ugaaguagcauagaaaugaugcuguguucucaggacaucauaucaggaggcauguaauagacuauugucccaggauugugauguuaacuuugaucacuuggcuaaggugguaucucuuagcugucucua

SEQ ID NO: 4167039 - RNA, 57 nt, Human
ugaaguaggcagcaugcugagaucaaggagcuuuacucagaaucacugucuguuuca

SEQ ID NO: 4167040 - RNA, 57 nt, Human
ugaagucuuggcugaaaacccucaauuacccuuugggggcaguuugcuaagccucca

SEQ ID NO: 4167041 - RNA, 55 nt, Human
ugaagugcagccauucccuggggcuucacaguccuggcuggauucucugcauuca

SEQ ID NO: 4167042 - RNA, 73 nt, Human
ugaagugcaggcucagagccuuauugauuucccauaacaacugauggaucuuuagggcucuauuuuuauuuca

SEQ ID NO: 4167043 - RNA, 77 nt, Human
ugaaguuaaagggcuuguccaaguucauacaacuaguuagauguauaagcagaacuuggaccugguccuuugguuca

SEQ ID NO: 4167044 - RNA, 86 nt, Human
ugaauaaaugccuaaggcugggccccaacccgggucaaugcaaacaggaucuuugggagaaggggucccagccuccauguuguuua

SEQ ID NO: 4167045 - RNA, 80 nt, Human
ugaauaacuuaaaaugaugguacucauguuuagcauuauuaacuuauaguuagacauguuugcuaaaaugauugaauuca

SEQ ID NO: 4167046 - RNA, 99 nt, Human
ugaauaagacauacagcuugcucuggguggcauggcaaagaaauagcuaggacuacuggcuuucccugcccucagaaggaagggcuguaguugcuauca

SEQ ID NO: 4167047 - RNA, 95 nt, Human
ugaauaauccacagucauucaucuuuuuuauaguuaguuugcucaggguccugaaggacauuaucagaaacgugagacauuuggaacaguauuca

SEQ ID NO: 4167048 - RNA, 82 nt, Human
ugaauaaugcuaucaggacaaccacagccgggugccucggccgcuggcacguccuuggcugggcuugccucggcagaguuca

SEQ ID NO: 4167049 - RNA, 128 nt, Human
ugaauacaacaaagacagcuugcauaggacaugccaguaacaggaaagacuagcacuugaaggauuuguuucucugugugggagaucuuuuuauugcuguuguuuuguuuguugguuauuuguaauca

SEQ ID NO: 4167050 - RNA, 94 nt, Human
ugaauacgauugagugguauuuguugaaugaaucauuaugcuaauuuuaagucaggauagaucacaaugguucacuuucacuauucaguauuca

SEQ ID NO: 4167051 - RNA, 68 nt, Human
ugaauacuuacucacucagauauauuuugcaaaaaagcaugaaugagaaacaggugagauaggauuca

SEQ ID NO: 4167052 - RNA, 57 nt, Human
ugaauaucuccuuacagggaaaauagcuggagaguuuuaacucuguggagguguuua

SEQ ID NO: 4167053 - RNA, 97 nt, Human
ugaauaugccacagaauuaucccuuaaggaaggaggauaggacauuauccucugacuccuguccccauuguuugaggguuagccccagugguauuca

SEQ ID NO: 4167054 - RNA, 79 nt, Human
ugaaucaaacacuguuuuugauuuuuuguaaauuaucucuacagaauggugugcaggcuaucacagacagaguguuuca

SEQ ID NO: 4167055 - RNA, 60 nt, Human
ugaaucagcugaguguuggcagauccaagcugggcuccacugugcagcucugcugauuca

SEQ ID NO: 4167056 - RNA, 122 nt, Human
ugaauccucugggacuugguuaacaugcgaauuccugggucucuuccuuaguucuuuugauucgguaggaauggugugaggcccuggagcaugcacuguuaaaagcacccagguaagguuca

SEQ ID NO: 4167057 - RNA, 94 nt, Human
ugaaucuaacuaagaagccugaaugagauguugaauuauuguuuaauagaaauaaucccaauucuggcucucaguaaaccaggucuuaagguca

SEQ ID NO: 4167058 - RNA, 64 nt, Human
ugaaucucagaggaaucuguacuugaaaugugugucuaauuuucaguuccuccucugaggcuua

SEQ ID NO: 4167059 - RNA, 71 nt, Human
ugaaucuuuuuucuugccaggcacuacucuagcuguuuguuaguucugcagucauaagaagaaagaucuca

SEQ ID NO: 4167060 - RNA, 89 nt, Human
ugaaugaaagcagcaauuggacagacugauucauugcucagggaaacuccugaaagcaacucaucuguguaaaugugucucuccauuca

SEQ ID NO: 4167061 - RNA, 64 nt, Human
ugaaugaaugaucauuauaaagugcucugguaauuccaugagcucaacugguggucuuuauuca

SEQ ID NO: 4167062 - RNA, 66 nt, Human
ugaaugaaugcaugcuuauuuugcaagguugccaggaagauguaaauaaugcauguaaaucauuua

SEQ ID NO: 4167063 - RNA, 68 nt, Human
ugaaugaccugggugucauuucauggcugaaauauuuaacggccaacagaagaccuucuagcucuuua

SEQ ID NO: 4167064 - RNA, 65 nt, Human
ugaaugaguuucuuacucaggagcuggcugaagauggcuacucuggaguugagaugcgaguuaca

SEQ ID NO: 4167065 - RNA, 74 nt, Human
ugaaugauagcuggauucacauggcugaaaagaggucacaauuuacugaaagucuguggguccuccccucuuca

SEQ ID NO: 4167066 - RNA, 72 nt, Human
ugaauggcucugguggcaauugacuggaucccuacuggcucagaccucccuugucccaggaaccccauauca

SEQ ID NO: 4167067 - RNA, 69 nt, Human
ugaaugggcaaccugcaacaacugaaacagguauuaugccugggccagcuugggucaggugccugcuca

SEQ ID NO: 4167068 - RNA, 72 nt, Human
ugaauguaggcaucacucucucuugggcaguuaucacauuggcagacugaagggaugugauuucuacaguca

SEQ ID NO: 4167069 - RNA, 81 nt, Human
ugaauguggcuacuagaacauuuaacauuacaaugugauacauguuauauuuauuggacaguguugcuguagacccauuca

SEQ ID NO: 4167070 - RNA, 84 nt, Human
ugaauuaauacuaccccagauacacagagcaucuucagaggagugcagugccucuucugagucauuuguuuuuguuugucuuca

SEQ ID NO: 4167071 - RNA, 75 nt, Human
ugaauuacuuaagagaaacuuugagauggccuuaaaugucauucccucaaagcguucuuuauauaagucaauuua

SEQ ID NO: 4167072 - RNA, 55 nt, Human
ugaauuagagugaauucugugcaugcguguaugcacagcugaacacucuaaaaca

SEQ ID NO: 4167073 - RNA, 62 nt, Human
ugaauucccugcaggcauccucagucucucuaaguccaaaggucagcucugcagggaaauua

SEQ ID NO: 4167074 - RNA, 64 nt, Human
ugaauuucuccuauaauuuauauaauuaacaaagaagagauuguauggauuugugggugaguca

SEQ ID NO: 4167075 - RNA, 75 nt, Human
ugaauuuucuagguacaaggagggauucuugauacuuaaucuauccuguguuccugugugccaagcugagaauca

SEQ ID NO: 4167076 - RNA, 66 nt, Human
ugaauuuugacagacuauucauuucacgucaucuuugacugugaaagacaagguuuuuucagauca

SEQ ID NO: 4167077 - RNA, 74 nt, Human
ugacaaaaguuaacuguguucaugcaugcucagccuugcuggguucuugcucguggagcauaguucucugcuca

SEQ ID NO: 4167078 - RNA, 65 nt, Human
ugacaaacuguauagggaaaaguagaaugcaugcuugauucucucccuuuccuuaucaguuuuca

SEQ ID NO: 4167079 - RNA, 68 nt, Human
ugacaaaggcuagagagguauucaagucauucugguaccaggcagagacuuucuuuuugacuuuguca

SEQ ID NO: 4167080 - RNA, 61 nt, Human
ugacaacucuaguuaaugaauucugaguaguuucuugggcuuucagagcaggaguguguca

SEQ ID NO: 4167081 - RNA, 68 nt, Human
ugacaagaauuugggacuguuagcaaauauucuagaugacagaaucagguucucccaaguucuugaca

SEQ ID NO: 4167082 - RNA, 56 nt, Human
ugacaagagaccccuccgcaggcgcaguugcuagucuuuaaggggccuuuguguca

SEQ ID NO: 4167083 - RNA, 77 nt, Human
ugacaagcauguacauucuguuuccccaaagagagcaggaacuuuucaguggaaaaagagugauuucugcuuuguca

SEQ ID NO: 4167084 - RNA, 68 nt, Human
ugacaagggauggugccaggaucuaaucccacgguuggauuaguagauccugagcccuaucuacuuca

SEQ ID NO: 4167085 - RNA, 75 nt, Human
ugacaagggccccacuguggaaccuaagucugggagcccccugacuucuggcuggccagaggcugcgguccguca

SEQ ID NO: 4167086 - RNA, 75 nt, Human
ugacaagugacaaaaggguauccaaagcaugaauccaguagaaggacuuuuuagaaacccuguuugcauugguua

SEQ ID NO: 4167087 - RNA, 58 nt, Human
ugacaagugcaaauguaaagugcagugccaucuuccauugcaguguccucacuuguca

SEQ ID NO: 4167088 - RNA, 74 nt, Human
ugacaaucugccgagcuguuguuuuaugcagugagacuuugcagaccgugacaagacagcuugcagacaacuca

SEQ ID NO: 4167089 - RNA, 55 nt, Human
ugacacacugccaggcgcucggaaacuauuuacggguugccugaagcugcuguca

SEQ ID NO: 4167090 - RNA, 127 nt, Human
ugacacagucagauauuaaguugauaugccuaucauugaaugucuggagcaagguaaccucaccucagacuugauuccuaacaaacuucagugaauauucaauuuuuguuuuaucacaaauguauua

SEQ ID NO: 4167091 - RNA, 59 nt, Human
ugacaccuggcugaggucaccaguagcugagagacuccuuagcuagugcucagcuguca

SEQ ID NO: 4167092 - RNA, 57 nt, Human
ugacagaacuggaauuggaacucaggcagccugauuucagaguucacguucuuguca

SEQ ID NO: 4167093 - RNA, 89 nt, Human
ugacagaauggccacccagucaacuacagaaucauagaaaauaacaacucauguuguuuuaagccacugaguauugguaugguuuguua

SEQ ID NO: 4167094 - RNA, 58 nt, Human
ugacagacacaccuuaggaaaguggccccaccgguuuccccagccuggagugcuguua

SEQ ID NO: 4167095 - RNA, 100 nt, Human
ugacagagaauaauuacaaggaaaguucaaaggcagauugguuuaaacauuacuuguaaauugucucuauuuugauucgcuagugauucuuguucuguca

SEQ ID NO: 4167096 - RNA, 56 nt, Human
ugacagcaaccucaugagaaacuucgaaccagagguaccaugcuuggccugcugca

SEQ ID NO: 4167097 - RNA, 55 nt, Human
ugacagcagcauagugagcaaugagcaguagcucaccauucugcacaugcuguca

SEQ ID NO: 4167098 - RNA, 60 nt, Human
ugacagcugauacagugaaaucgugccuucucuuuaagaguacauauuauaucagcugca

SEQ ID NO: 4167099 - RNA, 87 nt, Human
ugacagcuuaacuguuucaugcccagucugcaugagcuacaauagccccugccauacaaugcugugcauguaauggaugcccuguca

SEQ ID NO: 4167100 - RNA, 78 nt, Human
ugacaggauugaauaagacagugaguguagguaaaacucuggaaagcgugacuuuaacuguuauuacucacccuguua

SEQ ID NO: 4167101 - RNA, 56 nt, Human
ugacaggcacugcuguagugcugauugcuuucucauucuauuuccagucucuguca

SEQ ID NO: 4167102 - RNA, 77 nt, Human
ugacaggcagagaggaagagagaaagggaauuacucuuuccauuuacuauucucauaucgcuuucucguauuuguua

SEQ ID NO: 4167103 - RNA, 61 nt, Human
ugacagggcuagaggcaaugcagggaaccgaccaaugcugauucagcuacuggugcuguca

SEQ ID NO: 4167104 - RNA, 58 nt, Human
ugacaguggcugaaaacgugaucaucauccuauuggugcugcaaaaucggccacugca

SEQ ID NO: 4167105 - RNA, 81 nt, Human
ugacaguuuugaggagcacuagucagguauuugguagaauaugccucuauugggauuugucugauguuuuucucaugguua

SEQ ID NO: 4167106 - RNA, 61 nt, Human
ugacaucauuggccauuggggauagacucaaccucaguaccucuccccuuccaggaaguca

SEQ ID NO: 4167107 - RNA, 57 nt, Human
ugacaucuguuuggugaagucuucucugacuccccagagaauccccagacagaguua

SEQ ID NO: 4167108 - RNA, 61 nt, Human
ugacauucaggccacaguggagucagugcuggguucugccuccucuaggacuuguguuuca

SEQ ID NO: 4167109 - RNA, 130 nt, Human
ugacauuccucaguguugugagcggggaagagagaaaugcuuuuugguuggcucagauuaccuuguucugguuaaaugaaaaaguauuaacauacguuucuugucaccacaauuccagcuguccaaguca

SEQ ID NO: 4167110 - RNA, 69 nt, Human
ugacauucucgucugagcugcuuuagugaaauggccuagcaccugaagcaggaacagcgagauugcuca

SEQ ID NO: 4167111 - RNA, 91 nt, Human
ugacauucugugggugguuugugaagaaggcaauacaaagaagagaauaugucucuucuaugucuuugucagcaaacugaacuaagaguca

SEQ ID NO: 4167112 - RNA, 62 nt, Human
ugaccaacagaauuuccuguuuucuguuaaggagcaaccagaaaauguuuccuuguugguua

SEQ ID NO: 4167113 - RNA, 87 nt, Human
ugaccaaggaccauucuccaguccugccccuacuccagaccaaagacccugaaggagcagggcaggacaggggaauguuugggguca

SEQ ID NO: 4167114 - RNA, 130 nt, Human
ugaccaccgggaggguccucaguugcacccggucuguccugggccggcgacuggucauggcucuggagggaggagcaggacuggccagagccuaggaagcccggauggagggccaggugguggaauaaag

SEQ ID NO: 4167115 - RNA, 87 nt, Human
ugaccaggagccugacuguggucuguucuccaggugggucugaucauucuacuugaucauagccacaguuauucucaucugauguca

SEQ ID NO: 4167116 - RNA, 101 nt, Human
ugaccagguauccuggugugccuggaacuguccugauuucaauaccgagucccaugucuugagaaagccuuuagucccaggcaaaccaggaugguugguca

SEQ ID NO: 4167117 - RNA, 62 nt, Human
ugaccauuugaucuacauuccauuauuuuggcagcauggugggaguggauucggaauggaca

SEQ ID NO: 4167118 - RNA, 78 nt, Human
ugacccagagauggaaaauauagacagagaaugggguacgugaucucucucagaguuuuuuuccaggacuucugggca

SEQ ID NO: 4167119 - RNA, 71 nt, Human
ugacccagauugagagccggccacgcagcuuugggacacccugagugcucccaggcaggcucucuggguca

SEQ ID NO: 4167120 - RNA, 58 nt, Human
ugacccagcuaaccagguggggagggcucaggcauccaggguaggguuagcuggguca

SEQ ID NO: 4167121 - RNA, 67 nt, Human
ugacccauaguuguucuugcagugaguauucuucucuaauacuuauagccagaauuaauuauguuca

SEQ ID NO: 4167122 - RNA, 58 nt, Human
ugacccugaaauguagugguuuaaacaauaaccauuuuauugcaucauuuauggguca

SEQ ID NO: 4167123 - RNA, 56 nt, Human
ugaccguuuuggcacccaugcugcgggcgauguccgcuguggggccagggggguca

SEQ ID NO: 4167124 - RNA, 68 nt, Human
ugaccucauuugauccuugcuaugagaggcauauugucauuaugcuuuuacaagagccagagagguca

SEQ ID NO: 4167125 - RNA, 62 nt, Human
ugaccugaaauaugagggugaugcccagagccaguuuuggcagaugacccucaaguugguca

SEQ ID NO: 4167126 - RNA, 105 nt, Human
ugaccuuaggcaagcagccuccuucuggggccccaguguccucgcugguggaaagugcugugaguuucaaaggaggccacagagagagcuagcuugggaagguca

SEQ ID NO: 4167127 - RNA, 77 nt, Human
ugaccuucaaauuaccuaauucugacauuuucucucuuaggaauaugggagugaaggaaacaauugguugaggguug

SEQ ID NO: 4167128 - RNA, 125 nt, Human
ugaccuugauuauuugauugugugguaucugacagaguguuuuuaaguauauuuaugaaugccuaaagcagaauauagaaaaaggaauacucuucaaacagcuacccugaagauuucuuggauua

SEQ ID NO: 4167129 - RNA, 117 nt, Human
ugaccuuugacuuacuuucugacaguuacauguagcacaauaauuuuuuuaagaggacaagaacaaguguccucuacauuauagugucugccuguguaggaacacaaauaaagguua

SEQ ID NO: 4167130 - RNA, 64 nt, Human
ugacgcacagugcuaaguuaaucucucuaaugauauuaaugcuauuuacuuguauugugcuuua

SEQ ID NO: 4167131 - RNA, 73 nt, Human
ugacguccugggacuuucaaggcuaggucauaacaagucuuacagugucugccugaaucucuuagaacacuca

SEQ ID NO: 4167132 - RNA, 67 nt, Human
ugacguccuucagggagucaaacacuuuggaaagaaacgcgaacugaaaaugcuauuggaggacgca

SEQ ID NO: 4167133 - RNA, 72 nt, Human
ugacuacaauauuguacccagaaguuuuuggaaacaguuuauguaaauuauggguaagauaugauaaaguca

SEQ ID NO: 4167134 - RNA, 87 nt, Human
ugacuacuguucuaggggacauaauaugaaaagucuuuuagcugugacauuuuaugguuuuucuauuguaagucuccuauaguggca

SEQ ID NO: 4167135 - RNA, 95 nt, Human
ugacuacuuguuuuuuaaauaaugaacacuuagccuuucuaugcgcauaaugguguaaaaguuagaugguuagguguuugacaaacagaugguug

SEQ ID NO: 4167136 - RNA, 55 nt, Human
ugacuagagcaauuggaaacaauuguuaaaaauuguuuuuaaaauguccugguua

SEQ ID NO: 4167137 - RNA, 101 nt, Human
ugacuauucuccaacauguacuguuuuaacauuuagaaaguguccauuuuuagcaaaaucacagcugugugaauguaacauauugguguggaggaggguua

SEQ ID NO: 4167138 - RNA, 84 nt, Human
ugacuauuucuguaguuuucucugauguuaauaguuuucucaagugacaucaaugugcagagaugaacguuuagaaucuaguua

SEQ ID NO: 4167139 - RNA, 58 nt, Human
ugacucaccagguagccagugcucagaauuuuuugcaucaguugccaaagugauguca

SEQ ID NO: 4167140 - RNA, 64 nt, Human
ugacuccgaagcccuguucuuucucucacccuggaggauggaugagggugggauggggcaguua

SEQ ID NO: 4167141 - RNA, 94 nt, Human
ugacuccuccaggucuuggaguaggucauuggguggauccucuauuuccuuacgugggccacuggauggcuccuccaugucuuggaguagauca

SEQ ID NO: 4167142 - RNA, 56 nt, Human
ugacuccuccucccaaguccuguuucugucuauugcagggcccaggaagagaguua

SEQ ID NO: 4167143 - RNA, 83 nt, Human
ugacucuacuguauugugaaagcagccaugggcauucucuaugugaaugggcaugacuguguuucaaagcaacaguauguaca

SEQ ID NO: 4167144 - RNA, 129 nt, Human
ugacucuccaugaccugcucacagugcgaaagaaacccagccucugaggcugcgaaacagaaaaacaagcuaaaugguugggaguuuucuauaugcauuuacuguaguggguaauucacucugauguca

SEQ ID NO: 4167145 - RNA, 91 nt, Human
ugacugaguuguauaguuauuuuugccuucacuuugaaaguaaaaucucugcagguuuuggaggcagucaaaugacugacaacuucgguua

SEQ ID NO: 4167146 - RNA, 60 nt, Human
ugacugccacaaaauugcuagaccaacugaagucaugguguaauuauuucugugcaguca

SEQ ID NO: 4167147 - RNA, 62 nt, Human
ugacuggaguuaguuuucagagguuuuaucauauuuuagaugaaacagcaacuuccuaguca

SEQ ID NO: 4167148 - RNA, 66 nt, Human
ugacuggucugccuguuuuccugcugcucauaggacuccuuucagcagguuaacagaggcugguca

SEQ ID NO: 4167149 - RNA, 84 nt, Human
ugacuguccccgcuuggaugggggguccagaguauaggcagggcuggccuguccauccagagccccagucuaguggggaagaca

SEQ ID NO: 4167150 - RNA, 55 nt, Human
ugacugugccuguugaaugaauugacaaggagauucaugaaacaugacacgguca

SEQ ID NO: 4167151 - RNA, 78 nt, Human
ugacuguggcagaaauguuguugacauagcagauggucuugauauuucugaaaaccggcaacaucuuugccauggcca

SEQ ID NO: 4167152 - RNA, 73 nt, Human
ucuugaucuccucaccuugugauccucuugccuuggccucccaaagugcugggauuacaggccugagucaaga

SEQ ID NO: 4167153 - RNA, 71 nt, Human
ucuugaugcuuuuucuaaauguggacaaaauacucuuccaucagaaugacuuuagaaagagcgugauaaga

SEQ ID NO: 4167154 - RNA, 84 nt, Human
ucuugauguuugacagcuugagcauaaacucagggacacacagacucuucuguguucccguuugugaguuucugauaugcaaga

SEQ ID NO: 4167155 - RNA, 58 nt, Human
ucuugcagacucacaagguacuugcgcauaucaaaggccuugagaaguccugcaguga

SEQ ID NO: 4167156 - RNA, 68 nt, Human
ucuugccaaaucucauauugacauguaaucuaaauuaaugucaaggugauagauuuguaguuguaaga

SEQ ID NO: 4167157 - RNA, 61 nt, Human
ucuugccugugcuuuaggccucaaacugaucuccuggcagugcucagggcauuaggcuaga

SEQ ID NO: 4167158 - RNA, 101 nt, Human
ucuugcugaaauagccaaaguauguaauauggaaaucgaggagaaaucugcuucucagugcuauccauauuccaggaacauugagcuguuucugauaaaga

SEQ ID NO: 4167159 - RNA, 92 nt, Human
ucuugcugaauuuguugcauuuguuugaguagaaugagacauuguauagcuuucaucuaguucacaaaugaugauaaugcuagcuaaaaaga

SEQ ID NO: 4167160 - RNA, 62 nt, Human
ucuugcugcacuugaguuuaggaacaugauuugccauccuugaagcaacgugcagacagcga

SEQ ID NO: 4167161 - RNA, 58 nt, Human
ucuugcugccuuucaauguugucauauuuagauaugacucuuagcuaaagguaagaga

SEQ ID NO: 4167162 - RNA, 66 nt, Human
ucuugcuugagcuaauagaaugcagcagaagcaauguuguacaaguuuugagcuuaaguuucaaga

SEQ ID NO: 4167163 - RNA, 104 nt, Human
ucuugcuugcuggggaaagagaugauaaauuguugguacuuuagggacugcuguuugaaccacccugaggcagcaauugauuauucaggccuaaggaaacaaga

SEQ ID NO: 4167164 - RNA, 106 nt, Human
ucuuggaaacccagacacacgccuggccucuccgaguaaccugauuauuaacuugcaugcuuuaacuuaccaccagaggcucagugcgaggucugggcaggcaaga

SEQ ID NO: 4167165 - RNA, 61 nt, Human
ucuuggaagcccuggauuaaagaugccagaaucgcaagguggcaaaauccugggucuauga

SEQ ID NO: 4167166 - RNA, 93 nt, Human
ucuuggaaugcagauuuuacagaauggugaccagcuucuacuaguagaggcuuuggggcauucuguguuugucauuaguuaugcaaucuaagg

SEQ ID NO: 4167167 - RNA, 70 nt, Human
ucuuggaccaucagagcagggaggaacuaggcagaucauuugguucaaccccuugaugguacaguuaaga

SEQ ID NO: 4167168 - RNA, 59 nt, Human
ucuuggagauaguccaggugaagggauagcuggcauuguccaucagauuaucuccauga

SEQ ID NO: 4167169 - RNA, 78 nt, Human
ucuuggauacagauaaauuuuaaguagaaagaaauucaaaaucaaguuuucuaaaauaaguuuaucugguaucuagga

SEQ ID NO: 4167170 - RNA, 83 nt, Human
ucuuggauguuguguauuuguuuuaauguuuagaacuuguucuuuuauuucagaacaauaugaacagaacacaauguugaaga

SEQ ID NO: 4167171 - RNA, 63 nt, Human
ucuuggcauucuuaauuucaucuauucccauacuuacaauagguggccaccagaauguuaagg

SEQ ID NO: 4167172 - RNA, 68 nt, Human
ucuuggcuacaucgaggcuccagcagcaaacaguuuaaaagcugcucaucugccaugaugaguuuuga

SEQ ID NO: 4167173 - RNA, 74 nt, Human
ucuuggcuuccaggggcuuuuacagauacccccagucuggaggggaaacuguuucuggcugacuggggcuagga

SEQ ID NO: 4167174 - RNA, 64 nt, Human
ucuuggcuuucuccuagggauguggccugaguccucuaguuucaauccuuggcagaauccagga

SEQ ID NO: 4167175 - RNA, 74 nt, Human
ucuugggaggagcaccugccugugacucccuuccucccugucuuuuucuggcaggugacucgccuuucucaaga

SEQ ID NO: 4167176 - RNA, 85 nt, Human
ucuugggauacaaggcugugggagaaccucuuuuugaagugugaggucaaagaaagagggacccaacaugcuuugcauaauaaga

SEQ ID NO: 4167177 - RNA, 56 nt, Human
ucuugggcauguguuugauuuccuguuuccauggggauaaaauaacugccacaaga

SEQ ID NO: 4167178 - RNA, 65 nt, Human
ucuugggcucuuccuauaguuuauaacuuuuguuuuaguuuuauauuaccuggaauagcuuagga

SEQ ID NO: 4167179 - RNA, 78 nt, Human
ucuugggggaaguuguguaaccucugggcccugcgacgcccuuuccuggagccuggagcuggaacgaagccccuugga

SEQ ID NO: 4167180 - RNA, 129 nt, Human
ucuugggucuauaaaauuggaacugaaaucucauggaaacuggcuuucuccagaaauuuuuggugagccagaaauacugugagagcagccuuucccgugguguuuuggcauuuuuacuuuggccccaga

SEQ ID NO: 4167181 - RNA, 111 nt, Human
ucuuggguuuggaauacuauuuuauggcuaugaacagaaugcuucuucauugccaguugcucaccagcagcuaagaaguaccucuuuuccugaagccuccaaaucaaugga

SEQ ID NO: 4167182 - RNA, 68 nt, Human
ucuugguuugcuuugguuacuuccacauguugaucaaacaucuguaaaaggaaaucaaagcacuaaga

SEQ ID NO: 4167183 - RNA, 74 nt, Human
ucuuguauuucacacuuuucauuuauuaagcaagcaaugacguaauugcucugaagagcuuuggaaguaugagg

SEQ ID NO: 4167184 - RNA, 63 nt, Human
ucuugucccuggugacacgcuaaacauacuaauugauaugaagcugauuuuuaggagacagga

SEQ ID NO: 4167185 - RNA, 59 nt, Human
ucuugugaacauauuaaaagccucagccuaaagugauguuucccaaauuguucacaggg

SEQ ID NO: 4167186 - RNA, 80 nt, Human
ucuugugagaccuuggaagaaauaucaauaguguucaacaauccugagucaagaugagaauucuuuuuaauuucacagga

SEQ ID NO: 4167187 - RNA, 71 nt, Human
ucuugugccuuggggaugaauuaugaggaaccauguaacuauaaacccaaccaaucucccauuggccaagg

SEQ ID NO: 4167188 - RNA, 107 nt, Human
ucuuguggcuuguuuugaagccagcguaacaaaacauuugccucuauuacuuuugcaguacugcugggcaaguguuuugucugccugggcucucucuagccaggaga

SEQ ID NO: 4167189 - RNA, 84 nt, Human
ucuuguguguauguaaguuuguguaguuuagcauccuuguauuauauugcauggguuacugcuucaaaaaauuaugcgccaagg

SEQ ID NO: 4167190 - RNA, 61 nt, Human
ucuuguuguaacuacuuuaucugccuugggauuuugaggcugagguacauuuacaggaaga

SEQ ID NO: 4167191 - RNA, 92 nt, Human
ucuuguuuuaaucauguuuuagcauggaaaaaugacacauaucucaaaguauacauuuugagguuuuugauauguauauggcuaauuuagga

SEQ ID NO: 4167192 - RNA, 74 nt, Human
ucuuuaaaagccuuggucaucugguucccugacccuaaaugauugagaggaaucagagcagaggcuguuagagg

SEQ ID NO: 4167193 - RNA, 70 nt, Human
ucuuuacaggaaaagguggcuguggccauuaccaaguuauuaaaaccacagagaucuugacuuguaugga

SEQ ID NO: 4167194 - RNA, 63 nt, Human
ucuuuaccuucuuugcuugugccagucuuguuucauugaaagguuuggcaguggaggaagaga

SEQ ID NO: 4167195 - RNA, 58 nt, Human
ucuuuacuuguguauuguauauauuccaacuggaauacaagcuuuauguaagcagaga

SEQ ID NO: 4167196 - RNA, 75 nt, Human
ucuuuaguuucuugauuagccacuuuggccugugauguuuggaaauaggaaaacaguggcauuaagacacaaagg

SEQ ID NO: 4167197 - RNA, 99 nt, Human
ucuuuauagcagugccccacuccucaguaucaacuuccuguauuaguucauucucacgcugcuauacagagacacuugagacuggguaauuuauaaaga

SEQ ID NO: 4167198 - RNA, 66 nt, Human
ucuuuaugcuguuuguuuuccuaagcauuuuaugauaaggauguaaacuuagauaagcaguaagga

SEQ ID NO: 4167199 - RNA, 83 nt, Human
ucuuuauggacauggcucugcugggcaaagcaaggacgggcacauccagccuaugcgguccaucaggggcacucacauuuaga

SEQ ID NO: 4167200 - RNA, 130 nt, Human
ucuuuaugggagcaccaucuuuuuuggugaucacaccucuggaaaugauguuauaagaccaggaaauugauuuccugcauugcaaaaucauucccagggucaucaguaucaaagccaagugguucaugga

SEQ ID NO: 4167201 - RNA, 65 nt, Human
ucuuuauucaggcucucuuuggcuagauuucugagugucugcuacauaucugccuguagugcaga

SEQ ID NO: 4167202 - RNA, 82 nt, Human
ucuuuauuugcguggucuccauucuucacauggauaggaucugacucaacacagccccauguugaagaaagaauuauaagga

SEQ ID NO: 4167203 - RNA, 75 nt, Human
ucuuucaaacauagaucugaauaugaaagagaaaagaaacacuuccauauuuguuagagucuauguguggacaga

SEQ ID NO: 4167204 - RNA, 129 nt, Human
ucuuucaacucucccugucguaaguuuugcccuuagaaaaguccuggagaagaggggcuuggacggacagaauccuccaucccucuccuccaagccgucaggggccuauuuaaaaugaggaaggacaga

SEQ ID NO: 4167205 - RNA, 85 nt, Human
ucuuucagucugauaucagaaaaaguaaagcaguaaagugagguucuguuuucucuuuuaagauacaguaagaucugcugagaga

SEQ ID NO: 4167206 - RNA, 60 nt, Human
ucuuucagugaaggcucagauuguuugauuaccccaaagcaagagcauaguacaggaaga

SEQ ID NO: 4167207 - RNA, 88 nt, Human
ucuuucauggcacaguugagagacugagaccuauagaaaugucauguaauuuucucaaguuucuacaguuaaguaguggcaggaaaga

SEQ ID NO: 4167208 - RNA, 59 nt, Human
ucuuuccaugccucuauuuagaauucccuuaauaguuaagugugugaggugugguagga

SEQ ID NO: 4167209 - RNA, 109 nt, Human
ucuuuccccucaagucugagaucagggugccagagcaaucaggcucugggaagggcccucuuccagguugcagauuccugacuuguuguauccucucacgggagaaaga

SEQ ID NO: 4167210 - RNA, 92 nt, Human
ucuuuccuaaaauauuacagauagaugaucauuuaugagaguacagguuacuucacaaagagaucaucuaaugauuggaauaacaggaaaga

SEQ ID NO: 4167211 - RNA, 73 nt, Human
ucuuuccuaggugauaugcaauuaaacugaagucuuccuucuccuuuggacuugugcauauaucuaugaaaga

SEQ ID NO: 4167212 - RNA, 62 nt, Human
ucuuuccuccacccaguguuucuacaggugugaucugcaaguugaugugggggaggacauga

SEQ ID NO: 4167213 - RNA, 70 nt, Human
ucuuucugaggagcugucauuugauucacacuugcaggauaaguaggaauuuuacagguuuagagaggga

SEQ ID NO: 4167214 - RNA, 68 nt, Human
ucuuucuggaccuuauuuauagguaggcagauucuaaauuuaggccucuauaagcagcuccaggcaga

SEQ ID NO: 4167215 - RNA, 73 nt, Human
ucuuucuggugugaauugguucucuuccaucggugucaaacacgugagcccaggagacccaaugccagaaaga

SEQ ID NO: 4167216 - RNA, 96 nt, Human
ucuuucuguguucugcuguaacaacacuucccugaggcaaagaaugccuaaaggucugguuugaacagggaauguuccacaggacauaaaaaaaga

SEQ ID NO: 4167217 - RNA, 71 nt, Human
ucuuugaaacacccuaaccuuucauagcaaacuucuuuuccugcagcagaaagguggagugucaguauaga

SEQ ID NO: 4167218 - RNA, 61 nt, Human
ucuuugaaacauucacucucaauuuuagaaugcuguggacauucugagugugaaacagaga

SEQ ID NO: 4167219 - RNA, 105 nt, Human
ucuuugaacuucuccuccuucucuauaugaaaggugacauuucuuggauccuaaaaucuuuugaagucauccuuuuuaucuuagucaagggagaagcccccaaga

SEQ ID NO: 4167220 - RNA, 73 nt, Human
ucccacuuaguuuuucagaauucuacacagcuuuuccucaugaagaucaagugucauucugugaauuuaggga

SEQ ID NO: 4167221 - RNA, 58 nt, Human
ucccagaagccucugcccccgggagauguaagaggagcuggaggcagagccagaggga

SEQ ID NO: 4167222 - RNA, 82 nt, Human
ucccagacacaagagauaccugcuguugcuauuugugaccaaauaccauauuugucaauaacuaccaacaggggcucuggga

SEQ ID NO: 4167223 - RNA, 71 nt, Human
ucccagacauugugucuguauuaguuuccuagggccgucguaacaaacuaucacaaacagagugucuuaga

SEQ ID NO: 4167224 - RNA, 99 nt, Human
ucccagauaauaagcugucuuccuccagagcuucauccugccccgcugggaguugacuggggccaagaucaggggauuuggcaggcaggcagccuggga

SEQ ID NO: 4167225 - RNA, 69 nt, Human
ucccagcaagaauaaaggcauauauccuuucaauaaaaauaauaaauguaugcuuauuccuuguuguga

SEQ ID NO: 4167226 - RNA, 84 nt, Human
ucccagccacuuugccuucuuacuguguuguguguuuuuccuggugcuucaagagcgugugcagggcaagugccgucacuggga

SEQ ID NO: 4167227 - RNA, 75 nt, Human
ucccagcucccuucccuuucaugcccacagcaaggucuauugcugcaaauugguggugaggcaaguuggcuggga

SEQ ID NO: 4167228 - RNA, 60 nt, Human
ucccaggaauugaagccaguguuuuucaaagaggauuccacacaggcauuauuccugcga

SEQ ID NO: 4167229 - RNA, 65 nt, Human
ucccaggcagcuucuuucaucaaugaggucacugaagccagaaaugaucaggaagcggcuuggga

SEQ ID NO: 4167230 - RNA, 90 nt, Human
ucccaggcccagaccuugaacuuaguuggggacaccauggugggggaacucagcuauggcuccuucucuacuggggggcuggggguggga

SEQ ID NO: 4167231 - RNA, 75 nt, Human
ucccaggccucaaacugcaaugacagguaggagauccuccucuccuccucuaugcggggcagugugaucuggaga

SEQ ID NO: 4167232 - RNA, 56 nt, Human
ucccaggcuaggccucugcguuucuaagcagaacuaggagcaggcguugccuggga

SEQ ID NO: 4167233 - RNA, 56 nt, Human
ucccagggcuuuucucaugcuuuauucuuucuggagccuaagauuagcccuguggg

SEQ ID NO: 4167234 - RNA, 85 nt, Human
ucccagggucugagauuaggcuggaaccacuggccagaaacuuaguuucauggcaggcuucuucagccuuucuggcaucugcgga

SEQ ID NO: 4167235 - RNA, 130 nt, Human
ucccaguagacuucuauccccaggacaugaguggugcccaccugagccugagaccacaguugcuuuucagaugucucucagcaggguuccacaucgucaugcccuggcacaagcacagagguuaagggga

SEQ ID NO: 4167236 - RNA, 74 nt, Human
ucccaguccggugggcuggagcaaugauuucagaggcccggaaucugaggcaagcugggcccauggacuaggga

SEQ ID NO: 4167237 - RNA, 61 nt, Human
ucccagugcuacagacagggcacaaugggcaaggccacacuguacaaaguagcugcuggga

SEQ ID NO: 4167238 - RNA, 58 nt, Human
ucccaguggcuucauaaggcagaguuuauuucuuccuuucaugaaguccacugaagga

SEQ ID NO: 4167239 - RNA, 76 nt, Human
ucccaguggcuucuauuuucucagugagacaggaagugacaucaucagcugagaguagaaauggaggcuccaggga

SEQ ID NO: 4167240 - RNA, 62 nt, Human
ucccaguuuggcagacuccagaguccuugcucuaaaucacuccccagacugccaugcuggga

SEQ ID NO: 4167241 - RNA, 76 nt, Human
ucccauaaccauuuaugaaauuaucuuuucauuagugcuucaacagaaaaggaaauuuauagagaucgagauggga

SEQ ID NO: 4167242 - RNA, 61 nt, Human
ucccaucacuuuugccauauucuauuggauacuagguccagcugacacuuaaggggaggga

SEQ ID NO: 4167243 - RNA, 64 nt, Human
ucccaugccccacucugcuuuucugcuggcuggugcaggagacaauggcuguggggcauguggg

SEQ ID NO: 4167244 - RNA, 56 nt, Human
ucccauuuauuugcugcuauagucucauaaugauacaagcaguuauaugcauggga

SEQ ID NO: 4167245 - RNA, 62 nt, Human
ucccauuuuugacuauggucccggguuuacauggccacggaaacacagguuauaagauagga

SEQ ID NO: 4167246 - RNA, 84 nt, Human
uccccaaaucccaauauucuggauacacacaggccuuugcaacauggaacagaggcuaagaguguccaaaguuuaugggaggga

SEQ ID NO: 4167247 - RNA, 130 nt, Human
uccccacacuacacugcuccaggcugggugccagagugacccugaagcaggcacucagcuugugacaaggcugggggcagcuggggguagcuucuggccugagagagacuaaucagauguacagugggaa

SEQ ID NO: 4167248 - RNA, 73 nt, Human
uccccaccccuucuaccacuaugagccaguguuauuaacaauagugugucuuauccugggagaaaagagggga

SEQ ID NO: 4167249 - RNA, 56 nt, Human
uccccacuucccacacccuguuuucucacuccuggagugagcaugggcagugggga

SEQ ID NO: 4167250 - RNA, 70 nt, Human
uccccagagcauuuugugcacacguggaguuccgcgcagggacaggcgccgggcacagaguggcuuggga

SEQ ID NO: 4167251 - RNA, 70 nt, Human
uccccagggcagcgccccuccacgccacuguuccgagaaccugcgcaggaggugguggcugcuccaggga

SEQ ID NO: 4167252 - RNA, 58 nt, Human
uccccagggcugcagaggguguccuggucuucccccaucaguucugcaccccugagga

SEQ ID NO: 4167253 - RNA, 106 nt, Human
uccccagguucccaguaauggccacguuugaggcaaccucucagguacugauguaugugaccuacagcagacugaagguuguguuagguccugagggcuuguggga

SEQ ID NO: 4167254 - RNA, 81 nt, Human
uccccagguugagcugaccugaaucauucgggguccagagaggacccaggagccgugagagguuauuccaaccagagggga

SEQ ID NO: 4167255 - RNA, 90 nt, Human
uccccauauuuuuccugccaucuuugggaacugggccuggcacacuggugaggcuaggguaacagauguggcagacaagggguauaagga

SEQ ID NO: 4167256 - RNA, 69 nt, Human
uccccauuuccucuucccaggccacugugccauagaaauggagacagaguauuggaaaggcagugggga

SEQ ID NO: 4167257 - RNA, 69 nt, Human
ucccccaauucugcagguggaggauggcaggagacuagacuaccauccuccaccugcagaacuggggga

SEQ ID NO: 4167258 - RNA, 69 nt, Human
ucccccauaagcuagaagccuccucugccagauugcaggaacagggcuucaagcuucaugcuuggggga

SEQ ID NO: 4167259 - RNA, 69 nt, Human
ucccccuaaaugucucagagggagacaaaucagcggacuaccuugcuuccuuugaugacuuggaaagga

SEQ ID NO: 4167260 - RNA, 91 nt, Human
uccccgacugcccuguccagcccgggcuccgccagccucccucuagugcuguucugcgucccaggcugguccgcguggauuucagagggga

SEQ ID NO: 4167261 - RNA, 77 nt, Human
uccccuaaugcacuuaguaugaaugccuuaauaagauccuuuccugggcaauauauacuagugcagcgugagggugg

SEQ ID NO: 4167262 - RNA, 74 nt, Human
uccccucacaccaaauuuccccaagcuguccaaaccgaaguuuguacaaugcugcagggaaauuaggaugggga

SEQ ID NO: 4167263 - RNA, 83 nt, Human
uccccucggcugcuuggcacagagcugcagccugggacucuccguggacccagacuggggauuuugccaggggggcgauggga

SEQ ID NO: 4167264 - RNA, 68 nt, Human
uccccucguuggucaaacugcuuauagggcacuauuuucuuaagcaaauagcuagaucagagaggggg

SEQ ID NO: 4167265 - RNA, 69 nt, Human
uccccuggugacccugaggaugcaccagcagggcuccugcuugcuguggcaucucagggagcuagaaga

SEQ ID NO: 4167266 - RNA, 88 nt, Human
uccccugugcuccuucugggacuugggcugagggccagcagcugucagggcgugcuguucucaggcucgauuaccaggguacaaggga

SEQ ID NO: 4167267 - RNA, 82 nt, Human
uccccuguuccucagcuccucacgagucuugaaaaauaacaggcuaucuuuucaguacuggagggagcagagcacauuugga

SEQ ID NO: 4167268 - RNA, 61 nt, Human
uccccuuaaggaagacacagaugaagugaccucuuuuucauuucuucaacuuccuggggga

SEQ ID NO: 4167269 - RNA, 55 nt, Human
uccccuucuccagucaaagagagagaauauagcccucuggacugucagacaggga

SEQ ID NO: 4167270 - RNA, 117 nt, Human
ucccgaaauaacugauaauuggccauuuuauguaacuguuuaguaaauugaaauggagauauguugagauccaugauggcugcugguaaaauagguuuuggaagcuuguuucuagga

SEQ ID NO: 4167271 - RNA, 58 nt, Human
ucccggagccauggccuaguacucuuaugugaagucuagcaagcucgugcucaaggga

SEQ ID NO: 4167272 - RNA, 123 nt, Human
ucccggcacacggugcugugucucuccacucuugggcucugcagugacuugaggggucaagucuaggaccccaggggaggcugggcucaugaggggaccagagaccucagugcugugcaggga

SEQ ID NO: 4167273 - RNA, 88 nt, Human
ucccggcgccaucucagaguccuuccagcaggcauuuauugaacaccuaaugugccuugcucucuggggcugaagggaagguauggga

SEQ ID NO: 4167274 - RNA, 100 nt, Human
ucccuaaaaacagaaugugucaacuauguuaauaaguuucauuauuuaugguaacaaugacccugauuggcaaguugcaccucggacuguggacuagggg

SEQ ID NO: 4167275 - RNA, 69 nt, Human
ucccuaaacuguuuuuuacuagaggacuucuaaagaaugaaguugaacugggaaaaaaaugggcuggga

SEQ ID NO: 4167276 - RNA, 65 nt, Human
ucccuaaauacagucauguucugagguacugggaguuaggacuuuaacauauuaacuguuagggg

SEQ ID NO: 4167277 - RNA, 75 nt, Human
ucccuaauuuguaguaaagcuuuauggauugagaauucuucuuggagucaaagagcucuaucuucaaaacuggga

SEQ ID NO: 4167278 - RNA, 72 nt, Human
ucccuacucaguauucuuuucacuaguguacccucggagugaggacuaugaaaguauaauauugaauagaga

SEQ ID NO: 4167279 - RNA, 130 nt, Human
ucccuagagcuuuuaaguuauuaauuuuuaaauaacaauuuaaguuauugcuaaugugucuaaagguaaaagcuacagcgaaaauuuagcuugauugcaguugaauaaauggcuugauuacuuuuaggga

SEQ ID NO: 4167280 - RNA, 62 nt, Human
ucccuaggcugaaaucagcucucccagggucagauccugagauggcaacaccagcuuuggga

SEQ ID NO: 4167281 - RNA, 68 nt, Human
ucccuagucuaugguauucuguuguagcagcccaaacaggcuaaaacaucaugauagccaacuuggga

SEQ ID NO: 4167282 - RNA, 63 nt, Human
ucccuaucuguaagcuuguccaccucuucuccuuucuggggacaagaauuuacauguagugga

SEQ ID NO: 4167283 - RNA, 79 nt, Human
ucccuaugauauuuuaugagcuuucauaaaugggucauuuguccagauaagaaauuuaguuauagaaugaacauagaga

SEQ ID NO: 4167284 - RNA, 69 nt, Human
ucccuauguuauugguagaggcaagcggaaggugagugcuuugccaagaucagccagcuaacaugggga

SEQ ID NO: 4167285 - RNA, 55 nt, Human
ucccucagcaggaacuggccugacaauuuuguuccugcucugugaugcugagggg

SEQ ID NO: 4167286 - RNA, 111 nt, Human
ucccucagccugcugcuugaacaguugcgaaugaaugaagaucaccgcagccuuccccccugcuguugcucauuugcccauuagcaucugcuuaagcagcaggcuggggga

SEQ ID NO: 4167287 - RNA, 81 nt, Human
ucccucccccaucagcccuggcccaggugccuuagcaaagcuucuucccugacaccuggaagcugcgguuuggccaaggga

SEQ ID NO: 4167288 - RNA, 97 nt, Human
ucuuuuaggcccagcucuugucuuccaagaucuacagcaguuuaggguuugugcuuugaggccugcuggaagguguucccaggaggugggaggaaga

SEQ ID NO: 4167289 - RNA, 60 nt, Human
ucuuuuauauuaacaaaugugagagcuccaaaagaacuaaacauuuguggaucugagaga

SEQ ID NO: 4167290 - RNA, 73 nt, Human
ucuuuuauauucuucucuauccuucccucauaguaaaaagaaaggggaaaaagaguagcaguaauauggaaga

SEQ ID NO: 4167291 - RNA, 90 nt, Human
ucuuuuaucugaugagaugacuagaggagggauggccaaauaagguuuaucuggggucccaacucugauugauuggaauuggcugaagga

SEQ ID NO: 4167292 - RNA, 73 nt, Human
ucuuuucaagccuuauuucuacuugaugaaguggcuuucaagaguauauucagaagaguaauagggugagaga

SEQ ID NO: 4167293 - RNA, 73 nt, Human
ucuuuuccaguggaaccuucuugucuugugucucauuaccucaagucccaagauuuccaacccuggguaaaga

SEQ ID NO: 4167294 - RNA, 56 nt, Human
ucuuuucugccacagccugagccagaguggaagcugggcugugcagcagagcagga

SEQ ID NO: 4167295 - RNA, 58 nt, Human
ucuuuucugccucuaaacaauugacaaagggcaagaguuucuaaggaggaagaaaaga

SEQ ID NO: 4167296 - RNA, 72 nt, Human
ucuuuugaaucuuuuuggaaauaaagagggcucaucauuugucuucuguuucaauuggaagguuccaauaga

SEQ ID NO: 4167297 - RNA, 61 nt, Human
ucuuuugugauucuucacuugcuucaggccaacuggacauaaaggugcaggucacagggga

SEQ ID NO: 4167298 - RNA, 61 nt, Human
ucuuuugugauucuuuaguuacuucaggccaucugggcguauacgugcaagucacagggga

SEQ ID NO: 4167299 - RNA, 78 nt, Human
ucuuuuuagagcugaggugauguggucguucucaauuuaaagaugaacguuuaaagccaucucaugugcauagcugga

SEQ ID NO: 4167300 - RNA, 74 nt, Human
ucuuuuucuucccagucuuggguaguauuuaucagcagcauguaaguggacuaauacaaggacuaagaaaagga

SEQ ID NO: 4167301 - RNA, 58 nt, Human
ucuuuuugggccugaaauucccauuuuacuuaaaccuuuaaguucaggcuuucaagga

SEQ ID NO: 4167302 - RNA, 130 nt, Human
ucuuuuuucacgccucuucucuauugugcugcaagcaucaugucugcaggaauguguugugaccagaauacacaauacagaucccacagcaugugacugacagcguuauuuagucagugguccaaaaaga

SEQ ID NO: 4167303 - RNA, 130 nt, Human
ucuuuuuuuuuuuuuuugagacagaauuuugcucuugucgcccaggcuggagagcaguggcaugaucuugccucacugcaaccucugccuccgggguucaagcaauucuugugccucagucucuagaaga

SEQ ID NO: 4167304 - RNA, 80 nt, Human
ugaaaaacaauugagggagauguugacuucaguucuuauugggggagcaagagguuaugacauuugucuuuaaauauucg

SEQ ID NO: 4167305 - RNA, 129 nt, Human
ugaaaaacacaucagcuauaaaguucugucaagguacuauugaccuaggugcuaauaauguguuaauuuccaucagggaaacagcaaauuauggcaauugggcagcagauaggauuuagcuauuuuuca

SEQ ID NO: 4167306 - RNA, 76 nt, Human
ugaaaaauguuucauggcugacauggcauuucuacucuguuuuaaaagauuuuggcaacagccaugagccaguuca

SEQ ID NO: 4167307 - RNA, 70 nt, Human
ugaaaaauuguaccaacuuuucucuuuaaauuugcuuuaaaagcaaauucagaaaauugguagaggguca

SEQ ID NO: 4167308 - RNA, 56 nt, Human
ugaaaacauccagagauagaccuuaccuucagguaaggcuggauccagguguuuca

SEQ ID NO: 4167309 - RNA, 71 nt, Human
ugaaaagaugugcuucuguaaugaauguuacuuacuauuaauggcagguagucagaggcgacauuuuugca

SEQ ID NO: 4167310 - RNA, 59 nt, Human
ugaaaagauucaccugaaauguuuuggcuaucugaguucaucacaggaugauuuuuuca

SEQ ID NO: 4167311 - RNA, 72 nt, Human
ugaaaagcauaugcuugcuuggugcuaaugacguuuuacagucuuauagaugaagcaacauguguaauuuca

SEQ ID NO: 4167312 - RNA, 129 nt, Human
ugaaaaggguuucuuuugugcucauccugcugagugagccgaauugcuucauuaacauuuaggccauguuacacauucaagugcuugugagguauuuggauuucagaugaguuuuuuuuuuuuuuuuua

SEQ ID NO: 4167313 - RNA, 81 nt, Human
ugaaaauaaagugugccaccagucaaggugaauaaugucuauagauuuuucaccuguguuuuguggcugaauuuauuuaca

SEQ ID NO: 4167314 - RNA, 64 nt, Human
ugaaaaucugcacaauucaguuucagcucuggauaacuucaguugaccuuugugaagguuuuua

SEQ ID NO: 4167315 - RNA, 77 nt, Human
ugaaaauguguagcaggacaauaugggaucaggaaaccaaguguucugacucugcauugucugccccuccguguuca

SEQ ID NO: 4167316 - RNA, 58 nt, Human
ugaaacagggucucacucuguagcccaggcuggaaugcaguggugagaucuuggcuca

SEQ ID NO: 4167317 - RNA, 63 nt, Human
ugaaaccauccugagaaaauaaaggagauaccacuucugucuugucucuucucccugguuuua

SEQ ID NO: 4167318 - RNA, 74 nt, Human
ugaaacuacaguagagguugucagggauuguggcaaagauuguguaggugacaaaccucacuguaggcgacuca

SEQ ID NO: 4167319 - RNA, 78 nt, Human
ugaaacucacugcagccuuuuccucuguaugcgugagauuuauuaucagcucauuuugauggaaaugcagugacuuca

SEQ ID NO: 4167320 - RNA, 90 nt, Human
ugaaagaaaaauacugaacuguaguuaauacuacacaugcaguguguauguguguauaauaaugucugcaguuuacuuuucaaucuuuca

SEQ ID NO: 4167321 - RNA, 60 nt, Human
ugaaagaagccucccuuuggaguugcuaaugcggcgauggaaggguuuggcucugaauca

SEQ ID NO: 4167322 - RNA, 64 nt, Human
ugaaagagaggucagauuucuccuggugaugaaagagucaccgcuggggacuaaccuccuuuca

SEQ ID NO: 4167323 - RNA, 55 nt, Human
ugaaagcagaacugagagagcugggguuuaccuccacugguuuuauucucuuuca

SEQ ID NO: 4167324 - RNA, 69 nt, Human
ugaaagcaggcgggcuacuuuagcaucugaugccagggauaugagagaguagcccaguguguucauuca

SEQ ID NO: 4167325 - RNA, 62 nt, Human
ugaaagccaggcugaaguucuccuccucuaccacacugagaagaaaaaccagcauguuuuca

SEQ ID NO: 4167326 - RNA, 99 nt, Human
ugaaauaaaugaagaucucuacaaguauucuacaaagaaauugaauugguaguuuaaucuucaguuuccuagguuuuguuuggauguuuguuuuuuuca

SEQ ID NO: 4167327 - RNA, 73 nt, Human
ugaaauaagauuuucuguaaaauuguuagcacagcauuccaguuuugauaacacuucagaugauuuuguugca

SEQ ID NO: 4167328 - RNA, 69 nt, Human
ugaaauaguccucuguuccuugauuaugagcugauagcaaucauaugaaguucaacagagaugaaguca

SEQ ID NO: 4167329 - RNA, 90 nt, Human
ugaaauauggaagguauauuugguuucaggauucucagggacauuuuggccuguagaaucuguagacccauuguuuuugcacauauuuua

SEQ ID NO: 4167330 - RNA, 58 nt, Human
ugaaaucugaguuuaugcucccccaacaaauuggaggacacauuuauuucagaauuca

SEQ ID NO: 4167331 - RNA, 61 nt, Human
ugaaaucuuauacuuugguagucuucucaagguucagaggauagagcuccaugagauuuca

SEQ ID NO: 4167332 - RNA, 60 nt, Human
ugaaaugcauucuaacacuuguguuaaaaaaagugaacacuugguggaacguguauuuua

SEQ ID NO: 4167333 - RNA, 80 nt, Human
ugaaaugcugaggcugcugagagcaaggacaaagcauuagaccucaugcuugugggguugcuucaggguuuaguauuuca

SEQ ID NO: 4167334 - RNA, 64 nt, Human
ugaaaugcuugugcuucugggaguuugccccauucuucguggcacucccugcauaagugauuua

SEQ ID NO: 4167335 - RNA, 90 nt, Human
ugaaaugugagggcaugagauuugggaggggucaggggaggaaugauauggguuggcucuguccccacccaaaucucaucuuuaauuuua

SEQ ID NO: 4167336 - RNA, 68 nt, Human
ugaaauguuaaucacacaaaggcucccaaagcaauuucgcucuggacuccucaugguuaugcauuaca

SEQ ID NO: 4167337 - RNA, 60 nt, Human
ugaaauuauucuuaccaaggugauauccaggaucucugcccuuguucaggaauaguuuca

SEQ ID NO: 4167338 - RNA, 63 nt, Human
ugaaauuccacagcuaguugaauaugaaugucauuaauucaagagcuggcuuugaaaugcuca

SEQ ID NO: 4167339 - RNA, 68 nt, Human
ugaaauuuggaaaaucugguuauagagacaaaacaauucagguuuuuuuggucagauuccagguuuua

SEQ ID NO: 4167340 - RNA, 80 nt, Human
ugaacaauuggggagaugggagacugcugaaauaagaaacucaaagcuuuuucucuacauaaccucaauacucagguuca

SEQ ID NO: 4167341 - RNA, 128 nt, Human
ugaacacauuucauauccuauuuuuguuaggcccuaugcucuuuuggaaaugccauagaccacucucuauuaaugauucaauaguguccauauggggccuggcaaugggucaggugcuguguaguaca

SEQ ID NO: 4167342 - RNA, 79 nt, Human
ugaacaccaccacacacugacaccuuaucuuguugccuaguagcagcuacaagaaugaauucaauguguggugugucca

SEQ ID NO: 4167343 - RNA, 126 nt, Human
ugaacacuuucuauaaaugaauaauucagugaaaaccucagaaauguauagacuagugucauggaaagucugcuuuccuaacaagucuaucuuugaucagugauucauuuacauagauucugucua

SEQ ID NO: 4167344 - RNA, 81 nt, Human
ugaacagcuaaaugcauuucaagacuggaucucuauuucuuacugaaacaguccccuggaaguggguuuagccuauguuca

SEQ ID NO: 4167345 - RNA, 90 nt, Human
ugaacagggcaccuugccauuugcaguauauggaaaauugaagaaauacagucuacuuccgcaaaaggcacauacaaagggcucuguuua

SEQ ID NO: 4167346 - RNA, 67 nt, Human
ugaacaggugccuucagggaguguaaagaauuagggaacugcccugucccucagaagcucuugguca

SEQ ID NO: 4167347 - RNA, 72 nt, Human
ugaacaugauaauuguuaacaaaguacuuugacauuauauguaauugugcauuggugauaauuacguauuca

SEQ ID NO: 4167348 - RNA, 68 nt, Human
ugaaccaagugaaauugccauucuuauaagucaaaaaugguugucuaauggcaauuucaugugguuca

SEQ ID NO: 4167349 - RNA, 58 nt, Human
ugaaccagagucuccagugguuucagcugcuuugaccacacuguggcacauugguuua

SEQ ID NO: 4167350 - RNA, 58 nt, Human
ugaaccagcagccagcugcauuuauuguccuggaugucagugccaacuuugcugguca

SEQ ID NO: 4167351 - RNA, 130 nt, Human
ugaaccaucuggcaaaggggcaaauggggugccauuucuaggagagauggaaauugaugaggcacagugaguuguuugguccuuuaagucuuucucuggucucuagucugccccuccuguuucaguguca

SEQ ID NO: 4167352 - RNA, 64 nt, Human
ugaacccaggagguggagauugcagugaaccaagauggcgccacugcacuccagccuggggaca

SEQ ID NO: 4167353 - RNA, 71 nt, Human
ugaacccuggucugugcgucucccaggacagcugcagcagcugccuguccuaggccaucaguccugguuca

SEQ ID NO: 4167354 - RNA, 101 nt, Human
ugaacguuuuuuaaaaccagaaaaggaauaacaggugucuucacuguucauuucaguuggaggcauuugauguucauaaucaacauuuugaaauauguuca

SEQ ID NO: 4167355 - RNA, 82 nt, Human
ugaacuacggcaaggcccaggaauccucugagauuguacauccacuuucccauggagagauuccagggcuuugauucucuca

SEQ ID NO: 4167356 - RNA, 71 nt, Human
ucuuugacccuuuggagguagucaccacucuuuauccagugacuggcugccucuaaggaguauaacagagg

SEQ ID NO: 4167357 - RNA, 57 nt, Human
ucuuugauacagauguaagcuguaucuuauauagauguagcuuaccuauaucaaaga

SEQ ID NO: 4167358 - RNA, 56 nt, Human
ucuuugaucagccuuucacugaauacacaaucuccaugugagaggcagguagagga

SEQ ID NO: 4167359 - RNA, 61 nt, Human
ucuuugauccauuaaaauccaagagugagcccuuccucgucucuagaguguggagcaaaga

SEQ ID NO: 4167360 - RNA, 71 nt, Human
ucuuugcugccuuccgaauccucuccuuugugauccuguaauuugugagagagccuggaggguagcaugga

SEQ ID NO: 4167361 - RNA, 58 nt, Human
ucuuugcuuucacauguuugaaugcuauuuaauagggcaucuuaauugaaagcagaga

SEQ ID NO: 4167362 - RNA, 100 nt, Human
ucuuuggacagagagucucagaugugcauuucucauacacuaaaugugagucaugagcaagcaaguggaagagaaguuaucuuagauccugugcaacaga

SEQ ID NO: 4167363 - RNA, 56 nt, Human
ucuuugggcuaggaguuuggauuggguucagcuuggugauucuucuggucuauggg

SEQ ID NO: 4167364 - RNA, 91 nt, Human
ucuuugggguauugauaauguauucuucaaccuugcuaaacucacuaguucuagcagcauuuuuguagaguauauugaauuuucucaagga

SEQ ID NO: 4167365 - RNA, 55 nt, Human
ucuuugugaaaguucauuugcaauucaauuggaacugcagcugguuucacaggga

SEQ ID NO: 4167366 - RNA, 64 nt, Human
ucuuugugguacuuucucugucugaccagaaaggaauggccagcagguggagagaucaaggaga

SEQ ID NO: 4167367 - RNA, 69 nt, Human
ucuuuguggugggggcagaacugugcauuguacgauguuuagcagccuuccugaccucuacccauuuga

SEQ ID NO: 4167368 - RNA, 110 nt, Human
ucuuuguucugcugacauaaauuuucauaaacaaauuaaggccugguccaaaaaauucaaauuucauuuuuucaggcugauuuguguuaguaugauuggcauucaaaaga

SEQ ID NO: 4167369 - RNA, 76 nt, Human
ucuuuuaauaaaaucagucuguguuagaaaagaguugggagaaaccuuuucagagacagaugaguauccuaauaga

SEQ ID NO: 4167370 - RNA, 64 nt, Human
ucuuuuauaagcauaguaccguagcagcugcuuaagugcagcguucagggaauguuuaacaaga

SEQ ID NO: 4167371 - RNA, 67 nt, Human
ucuuuuauaagggcacugauuccauucaugaagguugugcccucaugaccuaaucacuguccaaaga

SEQ ID NO: 4167372 - RNA, 78 nt, Human
ucuuuuauucucuggcuuccaugcaguuauugagaaaguagucacaauuacccagggaccaagagaaacccugagaga

SEQ ID NO: 4167373 - RNA, 64 nt, Human
ucuuuucacaccagcauggucucagugugauggggacgcaccuccugagaggcugugugaugga

SEQ ID NO: 4167374 - RNA, 78 nt, Human
ucuuuucagugucucagccccaacuagagaaagacagacaucuguucccucugcaugggugcucagaccuagggagga

SEQ ID NO: 4167375 - RNA, 67 nt, Human
ucuuuuccucuugcuuauuuccaaauggaaggaauucuuaugagguaauagggcaguggggaggaga

SEQ ID NO: 4167376 - RNA, 62 nt, Human
ucuuuucgugucucaggggcauugaaauaaaaauuauuucauuauuucuugagcaaaaagga

SEQ ID NO: 4167377 - RNA, 71 nt, Human
ucuuuucuccagaccugggaucuggccucuggaauucucucuccccacucuguccuagauuugagaaagga

SEQ ID NO: 4167378 - RNA, 59 nt, Human
ucuuuucuugcauuauugcacugguuacaaucucuauguucaaugaugccuagaaauga

SEQ ID NO: 4167379 - RNA, 75 nt, Human
ucuuuucuuugcccuguggauuaaugagcaggcauggagaugucuauuauuugggcuacagugcagaagaaauga

SEQ ID NO: 4167380 - RNA, 80 nt, Human
ucuuuugauaaguuucacagaggguuagacgcaguuuccacccagcuguuguccaguguucucugaaaucaaucaaaaga

SEQ ID NO: 4167381 - RNA, 69 nt, Human
ucuuuugguuuuaucagccacauuuuauggguuauuaaaauagcaccugugaugggaugagcaaaaaga

SEQ ID NO: 4167382 - RNA, 130 nt, Human
ucuuuuguacuguuuuuguuuuguaauaguaucagaguaauaguggccucauaaaauguacugggaagcauuuccucuauauucugaaacaguuaguguagagauggaauacgguagaauucagcaguga

SEQ ID NO: 4167383 - RNA, 69 nt, Human
ucuuuuuauguaugcuuuuaaggaauuccauuccugggauucaacauagcugaggcauauauggacaga

SEQ ID NO: 4167384 - RNA, 66 nt, Human
ucuuuuuauuccaaacuuaccccagaggaauggaguucaucaucaucuuuaguuuggaaugagaga

SEQ ID NO: 4167385 - RNA, 59 nt, Human
ucuuuuucucuacaaaauaaccagccagaauucuugggaugggcgaugagagaggcaga

SEQ ID NO: 4167386 - RNA, 92 nt, Human
ucuuuuugcccuuuauucaauuaguccuaauguuucaguucucuaauuaccaauuaguuaaauuauggaaauuggggaaagugguaaaauga

SEQ ID NO: 4167387 - RNA, 55 nt, Human
ucuuuuuucaaacugagguagugucagcacugacacagacaguccagagaaaaga

SEQ ID NO: 4167388 - RNA, 56 nt, Human
ucuuuuuucauaauaccuggcauggugcuaccugcacaggaggcuguggagaagga

SEQ ID NO: 4167389 - RNA, 58 nt, Human
ucuuuuuuucucacuuuauuuccugauggugugcaggaaaguguguggggaagaagga

SEQ ID NO: 4167390 - RNA, 99 nt, Human
ugaaaacauuuaugauguacaauaacaugggcacuuaccuuuccuuucacuauauuuugagagaaaacaaguucuccauuuuaucugggucaguuuuua

SEQ ID NO: 4167391 - RNA, 79 nt, Human
ugaaaaccaguuaauacaaccaugaucuucucaacauaauggucugaggugauuuauuuguguugacaguguuuacuca

SEQ ID NO: 4167392 - RNA, 59 nt, Human
ugaaaaccuaagugcuguugaacguuugaaaaagcaugucauuaggacuuaggucauca

SEQ ID NO: 4167393 - RNA, 116 nt, Human
ugaaaagaaacaaugugaaggaaggaaagaagggagggaggaccaaugugugguuaugaacauagagcaaagggauuuuucuaccuuuuagaucuauccaacauacuuucuuuuua

SEQ ID NO: 4167394 - RNA, 79 nt, Human
ugaaaagaagguugaaggggcaugcuuuugccaggaccuguuuucguggcacccaugaccucuuaggccuuugguguca

SEQ ID NO: 4167395 - RNA, 82 nt, Human
ugaaaagugcagggugcucugguaugucuaagaaugaacaaagucuacaauucuguaagaugcuggccuccugcaguuuuua

SEQ ID NO: 4167396 - RNA, 71 nt, Human
ugaaaaguuggugcuaugaucccaaguuacagaagagaacugaagccuggagaggcgccauacacuguuca

SEQ ID NO: 4167397 - RNA, 66 nt, Human
ugaaaaugccaacaaacacauugugcaaguuuugugacuguacaauguguuuguuggcuuuuuuca

SEQ ID NO: 4167398 - RNA, 57 nt, Human
ugaaacacaagccugguuagugguauaguuaguauauacuucaggccugauguuuua

SEQ ID NO: 4167399 - RNA, 123 nt, Human
ugaaacaccaacuacaacuacuuucuauuauacuucguuuuuguuauggucugcaucuauguuccuccguguacauaaagcccugguacaguauaguggcuaaacaauguagugggaguuuca

SEQ ID NO: 4167400 - RNA, 68 nt, Human
ugaaacagugacugguacauaauacgccuccaguagauguuagguauuagaauuacguuacuguugca

SEQ ID NO: 4167401 - RNA, 60 nt, Human
ugaaacauguauauauuguaggauggcuaaaucuagcuaauucacauauacauugcuuca

SEQ ID NO: 4167402 - RNA, 80 nt, Human
ugaaaccauaguagagucagcuugauaugcugucauauaauuuaucuuuuagcauucaaugauuggacuugccuguuuua

SEQ ID NO: 4167403 - RNA, 85 nt, Human
ugaaacgcguuucuuuucccauguacauuuucagacgguaaaaguguuucgauuuguuugggggagaagucaggcgcugguuuua

SEQ ID NO: 4167404 - RNA, 85 nt, Human
ugaaacuauaaagccaaauaauguagguacauaaaauauucauuugauauuaauguauuugcuuguuauggauuugaaaguauca

SEQ ID NO: 4167405 - RNA, 78 nt, Human
ugaaacucuugaauucugauuuauuuauacauuggggcaaaauaacaccucaguugagguuagaauguaagaguuuca

SEQ ID NO: 4167406 - RNA, 67 nt, Human
ugaaacuucagugaaugacuuauguuuauuuuaaaaucuuaguggcaugaagucacuggagcuuuca

SEQ ID NO: 4167407 - RNA, 79 nt, Human
ugaaagaggaaaucucuacuuugucauuugcucacuagaaaauguugguaaaugugagaaaagagguuucuaucaguca

SEQ ID NO: 4167408 - RNA, 72 nt, Human
ugaaagcaaaugugggugcagaauuucugaggugccacaggaaacuuuccacagccacaugcugugcuuuca

SEQ ID NO: 4167409 - RNA, 100 nt, Human
ugaaagccugagaaucuuguuacauuugaguuaaguuauauaagcaugucuuauacaaguuaaugagaaugacaugaaaggaaaauaaaucucuuuuuca

SEQ ID NO: 4167410 - RNA, 68 nt, Human
ugaaagcuggcucugcagagugccuuaaaaaugacuuuaauuaggaaauucugaguugucagucuuca

SEQ ID NO: 4167411 - RNA, 85 nt, Human
ugaaagcuucagucauacagagaaggauaauaaagccaauacuccucuugccgagguuuuaugaguuucugugcugaagacagca

SEQ ID NO: 4167412 - RNA, 72 nt, Human
ugaaaggcugaggcucaugccaucuuggcaugcuuuaggauuauggcaaggagguaaaaguccauuuuuuca

SEQ ID NO: 4167413 - RNA, 85 nt, Human
ugaaaggcuugcuuuuggcuggcacacugggaccguuguuuucagccaacagaugaaacccagcuaguuggaagaggcccauuca

SEQ ID NO: 4167414 - RNA, 66 nt, Human
ugaaagguaaaggaguaaaucaguccucucacuuuuaagcugccuccuauuaaaauuuaccuuuca

SEQ ID NO: 4167415 - RNA, 76 nt, Human
ugaaaguaaauuuccuuuucgugauuugaugauauugaugguuauugucaaacuugguaagagaaauacagcuuca

SEQ ID NO: 4167416 - RNA, 67 nt, Human
ugaaaguagucguucucuagauaccuaggaauacacauuuuaacauucugagagcaacugcccuuua

SEQ ID NO: 4167417 - RNA, 91 nt, Human
ugaaaguaucuauaggacucuauuuccucaucuauguaaugggguuaguaagacucaguugcuaugagaaauaaaugaggugaugccuuca

SEQ ID NO: 4167418 - RNA, 83 nt, Human
ugaaaguggcucccuugagaagagauuuauauuugcuucccccaggcauuugaaaauacucuuuuccagccagggccacguca

SEQ ID NO: 4167419 - RNA, 60 nt, Human
ugaaaguguuuuugagcuguaguuucacauuuguaacugcuuccuuggcaggcauguuca

SEQ ID NO: 4167420 - RNA, 88 nt, Human
ugaaauauauuugacaucuggaacaggaccuuuucuguuucgcuaaacaggaaauuuugugaucuguucuucuuuacuuaugauuuca

SEQ ID NO: 4167421 - RNA, 71 nt, Human
ugaaauauucgcauguuuuacugagaaaacaaggaaccucugauuuucuugggaaacaaugagagucguca

SEQ ID NO: 4167422 - RNA, 62 nt, Human
ugaaauauugcuuacuaaucaucuucagaggaacuuugugagcuaugaguaagcaaguuuca

SEQ ID NO: 4167423 - RNA, 122 nt, Human
ugaaauccagcgauggugccaugggagugaauaggaugaugugugugaagagccuggcucagugucugcugugcauauuuaucuaggagguguuuaauacauggcagaauuuggggauuaca

SEQ ID NO: 4167424 - RNA, 68 nt, Human
ugaaaugcaaauacuuuccuauauaaggugcuuggcauagcaucuggcccauaguaaguaagcuuuua

SEQ ID NO: 4167425 - RNA, 106 nt, Human
ugaacuaggccagucuucucauugccugaguuguuaacacagaugacaggcauucacggauguaaugcuaauuguuuuaaugagguaggagugggaaaguaguuca

SEQ ID NO: 4167426 - RNA, 73 nt, Human
ugaacucggucugagauauuuguucagcuggcagguccaggccagaaaguuaaauggauaucucugaaguuca

SEQ ID NO: 4167427 - RNA, 65 nt, Human
ugaacugaauugcugggggcucaguguggaaaacugagaguuaaaaacuccagggaacucaguca

SEQ ID NO: 4167428 - RNA, 79 nt, Human
ugaacuguaucuuaaaggcuucggaucagaagguaaaacauuuuacuuuaauauaugugaaguucugagacucaacuca

SEQ ID NO: 4167429 - RNA, 55 nt, Human
ugaacuugaauuuuggaaauacugagggcucaguauugcugcuauugucaguuca

SEQ ID NO: 4167430 - RNA, 60 nt, Human
ugaacuuggguuuuaacuucucucucaccuaugggggaguauagucuggccucauuauca

SEQ ID NO: 4167431 - RNA, 82 nt, Human
ugaagaauaguuuugggaaguuuaaugacagacuuuggcaaggcuaaaauggcugaugcaaacuucccaauagcucucuaca

SEQ ID NO: 4167432 - RNA, 66 nt, Human
ugaagacauguuaucucuggcuucaaaagagcauauaguuuugaauaggaagaaagcauguauuca

SEQ ID NO: 4167433 - RNA, 76 nt, Human
ugaagagaaugagaagagcaaggaacugguucacacagugcgagccccauuggugugcuuuacguggucugcuuca

SEQ ID NO: 4167434 - RNA, 64 nt, Human
ugaagagagagggggaagggagggaacugugaucacauccauucuuuuuaccucucagagguca

SEQ ID NO: 4167435 - RNA, 69 nt, Human
ugaagagaggaaggacguggucaagcugcacaauagaaguaaagguuggcugcucuuuuccuaauuuca

SEQ ID NO: 4167436 - RNA, 70 nt, Human
ugaagagucuuguucucuuucuccacucagcccagaucugucagugggagaaugaauaagggccucuuca

SEQ ID NO: 4167437 - RNA, 58 nt, Human
ugaagagugccacugacaggucccugcugcagcccaggcuccacaugggcacuuugca

SEQ ID NO: 4167438 - RNA, 62 nt, Human
ugaagauauuuuaaaauacugacaguucuugugaagaaaaucagugagguugagauauguca

SEQ ID NO: 4167439 - RNA, 57 nt, Human
ugaagauccuaucugcaaauauagucacauucugaggcauuugggguuaggguuuca

SEQ ID NO: 4167440 - RNA, 70 nt, Human
ugaagauuagauaccuuuguguuguagaauguuuuaagcaaucugaacuauagaaaaguauuuuccuuca

SEQ ID NO: 4167441 - RNA, 98 nt, Human
ugaagauuccugcucuccugcugagguggagauugcagugagcugagaucgcaccauugcacuccagccugggcaacaagugcaaaacucagucuuca

SEQ ID NO: 4167442 - RNA, 74 nt, Human
ugaagauuuugaggccugugagugaguguucuguuaagaaugugcacuuugaugcagggcucaguaauuuugca

SEQ ID NO: 4167443 - RNA, 59 nt, Human
ugaagcaggugaauggaugucggguggcaaaaaauaaucgacguccaauacccgcuuca

SEQ ID NO: 4167444 - RNA, 61 nt, Human
ugaagccaaucugccaggcagaagggaaaagagaugauuuguuugcucugggauuggguca

SEQ ID NO: 4167445 - RNA, 69 nt, Human
ugaagccaauguugccuggguuucugcuucauccugucagagauaaaggaaccaaggaaccaaggcuca

SEQ ID NO: 4167446 - RNA, 68 nt, Human
ugaagccagccucccagguauggaagucccaggugauauccacagccaucccuuggaagcugguuuua

SEQ ID NO: 4167447 - RNA, 93 nt, Human
ugaagccuguccaaauaaguugcaaaauagugucuagagccugcaauccuguccguggugcuauuuuguuauuugugugagucucagguuuca

SEQ ID NO: 4167448 - RNA, 64 nt, Human
ugaagcucagcaagauuaagcagcuugccugaauucacccagcugaugguuuugcugagacuca

SEQ ID NO: 4167449 - RNA, 82 nt, Human
ugaagcugaggauguuggguuacagauauguguuauugauaaaaucaaaagacacauaugcuuaacccaccaccacagaaca

SEQ ID NO: 4167450 - RNA, 65 nt, Human
ugaagcuggcugaaguucagcuagacuuagcagaagggggauuggcugagguccagguaguuuca

SEQ ID NO: 4167451 - RNA, 91 nt, Human
ugaagcuuagagccacagagaauacugcucuugcuagaagcuaggacccuaauugaccuagggcaaagcggcccuguggccagaagcauca

SEQ ID NO: 4167452 - RNA, 90 nt, Human
ugaagcuucaguuucccacaauaggauuguuuugcagaaauuuuuuucuaggcuccucucacauucuauuguugagauacugggguuuua

SEQ ID NO: 4167453 - RNA, 58 nt, Human
ugaaggaaaauuuaggagaucaugcuucacaaagcacugucugauauguuuuccauca

SEQ ID NO: 4167454 - RNA, 79 nt, Human
ugaaggaacaagucaugaguccucuucugugaaguguguguguuacuuuaagaaaauuauauuuagauuugaccuggca

SEQ ID NO: 4167455 - RNA, 57 nt, Human
ugaaggaagcugcuaagaaacaauggugaauugcuauaaucugggaaguuuccuaca

SEQ ID NO: 4167456 - RNA, 66 nt, Human
ugaaggcagcugugaggacuggauucuuggccuguggauuuccagugacucucacagguggcagca

SEQ ID NO: 4167457 - RNA, 61 nt, Human
ugaaggccaucagagcuccagagcugccuguguaacagguugaggcucuguugugccugca

SEQ ID NO: 4167458 - RNA, 63 nt, Human
ugaaggcuggagaugguuggaauggcucaccuggggcuguauaucuggcgccuccauucuuca

SEQ ID NO: 4167459 - RNA, 68 nt, Human
ugaaggcugguuuccuugauguuucucagcuuccauuaugcuccagcaaauacagaaacuuguuuuca

SEQ ID NO: 4167460 - RNA, 77 nt, Human
ugaaggcuuguguaaauuauuuuuaaugauucccuccuggcacaucauuauguuuguaguugcacacaggcacuuca

SEQ ID NO: 4167461 - RNA, 104 nt, Human
ugaagguagugcuauuaugguagucauuuguagaguaggaaagaguggcuuugagcaguuauguaucuugcccaugcucuuaaucacuauguuauacugccuca

SEQ ID NO: 4167462 - RNA, 130 nt, Human
ugaagguguauauucaguuauuauucccuuaaugcacaagcaagagauaauggauuuuaggaaaccuaguagacucugccauuaucuaauugucauguaucuaaguacuguaauaaagucuaauuagcug

SEQ ID NO: 4167463 - RNA, 103 nt, Human
ugaaguaauaccaaguacaacauucagcuaaugggaauaagaguauuauuuugcauauacucucaguuacuaauaauuggaaauguuggcuacauuuacuuua

SEQ ID NO: 4167464 - RNA, 56 nt, Human
ugaaguauagcagauguuauuuaauucaaccuauuagguagauacugcuaucuuca

SEQ ID NO: 4167465 - RNA, 74 nt, Human
ugaaguauaugucuuuaaucuauucuugaauuaaacuugaagucuuuggagauagaugaagacuuguacuguca

SEQ ID NO: 4167466 - RNA, 78 nt, Human
ugaagucugaaggcaaucugcugacagaauucucucuugcuuggggaaggucagcccuuuguucuguucaggucuuca

SEQ ID NO: 4167467 - RNA, 62 nt, Human
ugaagucuuucagggcuagaaucaagucucuggcauuuuuuucuaguucugaaagccugaca

SEQ ID NO: 4167468 - RNA, 58 nt, Human
ugaagugaagcugaguggacucuggccacaucccuugugagaaauaucagcugcuuca

SEQ ID NO: 4167469 - RNA, 87 nt, Human
ugaagugaguauccuuaugaaccauaguuccuaccuaagcauaacuuugguuggaaguuaggaggaaauaugagcauacuuauuuca

SEQ ID NO: 4167470 - RNA, 89 nt, Human
ugaagugcagcucucuguuuuguuaaugguguguagaaugaucugacaaaaaguuuucacaaacugaggagacaaugagcaucauuuca

SEQ ID NO: 4167471 - RNA, 62 nt, Human
ugaagugcgguaacuguucucauagcagcauggaugcacaaagagggcaggcacccauuuca

SEQ ID NO: 4167472 - RNA, 72 nt, Human
ugaaguggugggggaggcccgugcaggccuacagcuuugucaucugcaacauuccucuccccacuuucuuua

SEQ ID NO: 4167473 - RNA, 73 nt, Human
ugaagugguugguaauugugcacagucuaaaccaauacaagcuggauuguauaauuguauugccaaaucuuca

SEQ ID NO: 4167474 - RNA, 57 nt, Human
ugaaguguuugccugagcugaguuauaacagagugacuauggcuuggcaaagcuuca

SEQ ID NO: 4167475 - RNA, 71 nt, Human
ugaaguuaaucacauuacaaaggacuccagucuacacaggcuguugagucccugugauuuguggggcuuca

SEQ ID NO: 4167476 - RNA, 76 nt, Human
ugaaguuaucugagaaauagauucaugguagauucuaagauaguauuguucuagaauuuuuuuuccuguggcuuua

SEQ ID NO: 4167477 - RNA, 68 nt, Human
ugaaguucuguguuucucccauguuaaaaacuuucucaccuucagaacagaaggaauacagaucuuca

SEQ ID NO: 4167478 - RNA, 62 nt, Human
ugaaguugaggugcaaaccaguuuaaugcaagcuguaccaugcgacgccucucacugcuuca

SEQ ID NO: 4167479 - RNA, 56 nt, Human
ugaaguuuaauuuuggacaugacagaaaugugaugugucauaaaauuaaaacuuca

SEQ ID NO: 4167480 - RNA, 70 nt, Human
uuuguauauauucuuaaagauguuuuugcugaaucaaaagauaugcaacucucuaaggauuugaugcaaa

SEQ ID NO: 4167481 - RNA, 60 nt, Human
uuugucaguuaaaugagguacaagagggacgcucuauuugccccuaauuagcugcacaga

SEQ ID NO: 4167482 - RNA, 79 nt, Human
uuugucauuuacugugaauauuuuauaaauugauggguuuuaauucuaaaacuuaguagaguucauauuaugugauaga

SEQ ID NO: 4167483 - RNA, 63 nt, Human
uuuguccagguuagcuucaaacacauagcaucgccagcuugugcgccaggacaaccugacgga

SEQ ID NO: 4167484 - RNA, 71 nt, Human
uuugucccugagguugguuucuugggcuguguuaucuggacaagguauaugaggccacuaauaggggcaga

SEQ ID NO: 4167485 - RNA, 61 nt, Human
uuuguccugcuugggcuuaaaagggcuuugccuuuauccaaagccucaagcagaagacaga

SEQ ID NO: 4167486 - RNA, 73 nt, Human
uuuguccugugacugacuuauuucauggaucauaauguccucaaggcucauccaugucguaacauaugacaag

SEQ ID NO: 4167487 - RNA, 84 nt, Human
uuugucucaggcuuugggucaggcucugggggugcaaugacgagucacgccacagugcuugcccuuaaaaagcccacaggcaaa

SEQ ID NO: 4167488 - RNA, 75 nt, Human
uuugucucauaguccuugcugggcacagaguagacccaccaugucaacuuuguuggcauaggaacuggagaugaa

SEQ ID NO: 4167489 - RNA, 70 nt, Human
uuugucugcugccuccaaucugugccccggcugggggaggcggggagagggaugggagguaggaggugga

SEQ ID NO: 4167490 - RNA, 61 nt, Human
uuugugaagggaacagaagugucugacuggacacuugaaagaaguuuccuuaaaauacgaa

SEQ ID NO: 4167491 - RNA, 66 nt, Human
uuugugacuugcuucucagaauacaacaaagguaauggaauaucacuucugagauuagguuacaaa

SEQ ID NO: 4167492 - RNA, 68 nt, Human
uuugugagcaauaugugaauuuucuuuuguaacccacuaaagagagugaucuauugcuucucuacaga

SEQ ID NO: 4167493 - RNA, 86 nt, Human
uuugugccaugcugagugguuauagcuuauccaggaaacuaaaguuuccaagaauacagauuugugaacacacagguaugcauaaa

SEQ ID NO: 4167494 - RNA, 57 nt, Human
uuugugcugaggcugauaguggaacugaaaaugcuccuaccuucagaguggcacaaa

SEQ ID NO: 4167495 - RNA, 87 nt, Human
uuugugcugauaccauaggaaaggaucagccuuccacuuguguagaaagaaagaauauuaggcagccuuccuuaugguucauacaga

SEQ ID NO: 4167496 - RNA, 66 nt, Human
uuugugggaaaguuugcuauaaaaugcauuuauuuaaaauguugcagagcauagacuucucaggaa

SEQ ID NO: 4167497 - RNA, 66 nt, Human
uuugugucccugcggcugaggagaaacggcuacuccgcgccaccucauccaccgacaggccacaaa

SEQ ID NO: 4167498 - RNA, 63 nt, Human
uuugugugcccagagcaguggccauguggagaagccaucagccaacugccugaggcucacagg

SEQ ID NO: 4167499 - RNA, 60 nt, Human
uuuguguuguuggauuaguuaacguuuaugccauaugcuugacauaauccauaguacaaa

SEQ ID NO: 4167500 - RNA, 57 nt, Human
uuuguguuuuagcuggugaggcuuuaaacguucaaccuugaaggcuguaagcacaga

SEQ ID NO: 4167501 - RNA, 69 nt, Human
uuuguguuuuuguaaucuuccuuuugcuguugugggguauagcaauagcaggucuacagagagagugaa

SEQ ID NO: 4167502 - RNA, 68 nt, Human
uuuguuauagcaggccaaacuaacuaacacagaaauugauauggggaguaggguguugcuauaacaag

SEQ ID NO: 4167503 - RNA, 77 nt, Human
uuuguuaucugguugucugauuacuuacauaauuucaugcggaauuuaagaugguggucagaaaucucaguggcaaa

SEQ ID NO: 4167504 - RNA, 86 nt, Human
uuuguucaugguaauggcugggauuuccuuugcguucuauuucuauuuaaugcaucuuuguaaacucagcuauuaacuauaauaag

SEQ ID NO: 4167505 - RNA, 64 nt, Human
uuuguuccugccagcucucuaaaggggaaugcuuauggcccugggaagagcugacaggagggag

SEQ ID NO: 4167506 - RNA, 70 nt, Human
uuuguucgggaggauugcuaugaaaaagagguaauagcuucuguaacucaaaguaguuuuauccaauaaa

SEQ ID NO: 4167507 - RNA, 129 nt, Human
uuuguugauauuccgaauggugaugauuuugccuugggugcugucauggggcacggaguauauguuuucuucuucauuccuuggcuucaccacagcauccauggguucagcauagucagaaggaucaaa

SEQ ID NO: 4167508 - RNA, 72 nt, Human
uuuguugcauauucuugucuuuuccagaaauucaaacgauaccugaaacuggaggcagggagaugugauaaa

SEQ ID NO: 4167509 - RNA, 86 nt, Human
uuuguugugauauuggagcuuuuuuauuagguugaaagcuuacuuaaauuucucacuugaaaggaagcucuaaaacuugcaaaaga

SEQ ID NO: 4167510 - RNA, 66 nt, Human
uuuguuuacaguauuacuguguuguuuugguuaacagaaugaaaaacagcacuguaauacuacaag

SEQ ID NO: 4167511 - RNA, 57 nt, Human
uuuguuuacucauucauugauggacacuuuuggcuaucaugaacaugaguguacaaa

SEQ ID NO: 4167512 - RNA, 106 nt, Human
uuuguuuauucauuuauuuauuuggcaauuauuuaaauaucacaggcacugggauauauaaugccuguaauaaugcuaagcacugggagauauaaugauagacaag

SEQ ID NO: 4167513 - RNA, 129 nt, Human
uuuguuucucugaggccaaugggugggaggaaguauaaagaaguguaaacaggaaagccagcugggccuggaguuccaagugcccauauuucaucagcuuccucuccauaacuguggcagggacacuua

SEQ ID NO: 4167514 - RNA, 69 nt, Human
uuuguuucuuacaggcaagggcgcuagcuggugggagccaccccgccaugcugaugucagagaagcaag

SEQ ID NO: 4167515 - RNA, 89 nt, Human
uuuguuugcauucauucagcauuuauuuauuguguaccuacugugugccacacacaguuccagacacaggagauaaagcuguaaacaaa

SEQ ID NO: 4167516 - RNA, 60 nt, Human
uuuguuugucuguguuuucuguguggguggaucacauuaacuagaaagccagaaaacaga

SEQ ID NO: 4167517 - RNA, 123 nt, Human
uuuuaaaagcgauguaacuuggcagguguuaagcugguuucaguaaucuuagcaucuauuuccuuuuccccagugauuuucaaguagcuaaauuagcugccugccggguccagguuuuugaag

SEQ ID NO: 4167518 - RNA, 91 nt, Human
uuuuaaaauuagaaauuauuaugccccucuauaaucauggguguuaugauucaguagauuaagguggggcuaagaauuaacaauuuuaaga

SEQ ID NO: 4167519 - RNA, 66 nt, Human
uuuuaaagggcauuaguguuucaagcaaguaggauggugcucagagaaagauuagucccuguggag

SEQ ID NO: 4167520 - RNA, 75 nt, Human
uuuuaacaugagaaugcauucauguuuugucugugaacauuuacuuucaaaaguaauguaugcucaucguagaaa

SEQ ID NO: 4167521 - RNA, 65 nt, Human
uuuuaacuucccuuccucacucuacuuguuuuucuuacaauggggggaggaagggauaggaaaaa

SEQ ID NO: 4167522 - RNA, 71 nt, Human
uuuuaagauggcaucuccuauagaugguaacugcacaggcccuucuaagcugagaaugccuuuucuugaaa

SEQ ID NO: 4167523 - RNA, 72 nt, Human
uuuuaaggaaauaucacaacaugguauuaaauuguggaagaaguugcucauacucauguugugauuuugaag

SEQ ID NO: 4167524 - RNA, 130 nt, Human
uuuuaaggguuguggguuccggccucuacccguuccugggacuggagcagcccaggaggcccucuccugaggcugagacucuguguccuuccggacggaaccugaggacgcuggacccuacaguuuaaag

SEQ ID NO: 4167525 - RNA, 129 nt, Human
uuuuaauaaguccaaggguagaaaaguccccacuaaaaugucauugugaguuaggcuugugacuguuucuaaggcugucuuucacagggaauguuuugcuugggugaucuuuauucuuguuuauuaaua

SEQ ID NO: 4167526 - RNA, 87 nt, Human
uuuuaauauagugcuauaauagucacagggugcuacugauaugcaggaguagcugccuaguagauugauugggaguguuagguagag

SEQ ID NO: 4167527 - RNA, 97 nt, Human
uuuuaaugcacugaaucaguaucugcaggccuagaguccuuaaauaauacaaguauacuuuggacugcaugaugaucuggaacacaggauauuggag

SEQ ID NO: 4167528 - RNA, 92 nt, Human
uuuuaauugaauuuguugauuucuuccuugucauuagaaugcuuaugguucuagcagaaaaguugggaagaaaaaugccuauucaggugaag

SEQ ID NO: 4167529 - RNA, 96 nt, Human
uuuuacaagcuaguaaguugguaucagucuuuugcccugaggagucuugaauuguaagaccaggaagagauuccaauuuacuuaaaucuuuugaga

SEQ ID NO: 4167530 - RNA, 63 nt, Human
uuuuacaccucagaugagcagagcucaaagguuuggcugcugucucuggaugaggugcugaga

SEQ ID NO: 4167531 - RNA, 76 nt, Human
uuuuacauaauccucacagcaaccuaugguaugauuaucaucaucauuuuauggcugagaggacuaagucuuaaag

SEQ ID NO: 4167532 - RNA, 63 nt, Human
uuuuaccugaaccacacaguauuguguccuagcaugcugauguauauagugauugagguagaa

SEQ ID NO: 4167533 - RNA, 72 nt, Human
uuuuacuaggacugucagccugaguugucauaacugcauuauaaucucuuuuaggacagagccuaaguagaa

SEQ ID NO: 4167534 - RNA, 92 nt, Human
uuuuacuaugauuauuccugacuagugguuuaaaucaagcugauuuaaaccaaguugauuuaaacuacuagucaggaauaaucauaguaaaa

SEQ ID NO: 4167535 - RNA, 104 nt, Human
uuuuacugaacagcuaugcaguuagcaguagcuccccaaauucacacaaauugccuuuggggaaaguuaaugugacuggaugguuuucucuacguuuauuaaga

SEQ ID NO: 4167536 - RNA, 56 nt, Human
uuuuacugcauauagcuuagagcugaaugagccauccuguaaguuauagcagaaga

SEQ ID NO: 4167537 - RNA, 63 nt, Human
uuuuagaaagaucccuggcaggcaauauggagagugauuuagagcccagggagcuuauuagga

SEQ ID NO: 4167538 - RNA, 74 nt, Human
uuuuagaaauacugauuuagugacuuuuugaugguugaccuggauaaagacaguagaugcaguagcuuuugaga

SEQ ID NO: 4167539 - RNA, 63 nt, Human
uuuuagaauguuagcguuaaagggaccucauagaucaucuugucccaugccaucauuuuaaag

SEQ ID NO: 4167540 - RNA, 90 nt, Human
uuuuagagagcuucacucugggccucauccagccacaaccuucccuaaggaugagcuguccaugaggccaagggaaugugcccucuggga

SEQ ID NO: 4167541 - RNA, 126 nt, Human
uuuuagaugguuuagucggagcuguuacauuuggcagcauuccuuguuagcauuugauaaacaauuauugccaaauguuagcaaggaaaccugccaaauguuacagcucagauuuaacugcugaaa

SEQ ID NO: 4167542 - RNA, 89 nt, Human
uuuuagauuuuucugguucuacacuuuucaagucaguagauuuacuuacaaagagaaguuguagaauuguucgcugggaagucuuaaaa

SEQ ID NO: 4167543 - RNA, 109 nt, Human
uuuuagccgggcacauuaggguaagcaugucucuguuccauaaugucugaggccucagcuugcaggaugaaggcagaggcugaaucugaaucugcaauagaggcugaaa

SEQ ID NO: 4167544 - RNA, 83 nt, Human
uuuuagguugaaaaauaugaaguugucaguaugauuguucuucuugaccuauaaaacagcaauucauaugguuuagccuagag

SEQ ID NO: 4167545 - RNA, 59 nt, Human
uuuuaguuuggauuucuaaagcugcuccucuuugaagcagcuuuaagacacagcuaaaa

SEQ ID NO: 4167546 - RNA, 83 nt, Human
uuuuauaaaaacaugaaaucacaauaaucccacuauauaccagcauaaccggguucagcuagaauuucauguuuuuggugaga

SEQ ID NO: 4167547 - RNA, 129 nt, Human
uuuucuuguuucuagauaaauacaucaugauuccauuauacuucugauucaaaaucaggauuacaguuuucugugucuuugcuucacaaguaugguucugacuguuguauggcaaauaggaggagaaag

SEQ ID NO: 4167548 - RNA, 55 nt, Human
uuuucuuuccauacauauugcuaucacuucggugaugguaauguaagagaggaga

SEQ ID NO: 4167549 - RNA, 83 nt, Human
uuuucuuugcagauuucaaggugaugacaaaagagacaacagucuuagcauuuguuaauacccacuugacccacaaaagaaaa

SEQ ID NO: 4167550 - RNA, 102 nt, Human
uuuucuuugccuaccauacauacaucuagagucauaaaaacauuuggguggcauuccaucaguugcucuauguguguucuaugugugugaacagucagaaaa

SEQ ID NO: 4167551 - RNA, 56 nt, Human
uuuucuuuguaagaugagucugggccggcgaacugggaagccucuggcagagagaa

SEQ ID NO: 4167552 - RNA, 72 nt, Human
uuuucuuuuaccaaaguacucugaggcagagaaauuaaauuucuaucuaauacuauuggugaaaacagaaga

SEQ ID NO: 4167553 - RNA, 126 nt, Human
uuuucuuuucuucuaacagaauacgggcagagagaagguuuauguuucaucugauaaucacagcuauuccggauucagaaauacaaaacacuuacuuuuaacgugggaaggagauuuaaaagaaaa

SEQ ID NO: 4167554 - RNA, 89 nt, Human
uuuucuuuuguauaagagcauuuccacuggcacugggacauuauuucucuguggccuuuguuggaggucccuuucuuccuaagagagag

SEQ ID NO: 4167555 - RNA, 57 nt, Human
uuuugaaagccagguuuguauggaaaugcucucacuccacuuggacugcuuucggaa

SEQ ID NO: 4167556 - RNA, 94 nt, Human
uuuugaaaugagaguggacaguaauuucaaaucaauggggaaagaaucaaaucuucagcaaauggcuugagauaauuagcuacacauuucagaa

SEQ ID NO: 4167557 - RNA, 64 nt, Human
uuuugaugugagauuuguauacagcguauacuauacaucuguuuaaccagaucucauaucaaga

SEQ ID NO: 4167558 - RNA, 76 nt, Human
uuuugauguuguugauuugguuuugcugugggaguuaguaagcuauggggcaggcaccagcucagcaauauucuga

SEQ ID NO: 4167559 - RNA, 56 nt, Human
uuuugauuuugaaagaaauuaccucauuuuacagaugagguagcucagacucaaag

SEQ ID NO: 4167560 - RNA, 57 nt, Human
uuuugcagccacugaugaucauugcuuagauacauuauuucauuagggauugcaaag

SEQ ID NO: 4167561 - RNA, 66 nt, Human
uuuugcccccuagaauacugugagcacauuacuggugggggcaguguuccuucuacuggggcagag

SEQ ID NO: 4167562 - RNA, 64 nt, Human
uuuugcccuuucuuuuccuucacuugggaaaguuuagagguggagugaaggaaaggcaguaaga

SEQ ID NO: 4167563 - RNA, 75 nt, Human
uuuugccuauugacaaaucugaacauacggaacauguucuguguucuguauguuccguuuugucacuaggcaaga

SEQ ID NO: 4167564 - RNA, 79 nt, Human
uuuugccugcaaugauaagcuaauguuauaaauacuguuauaaaagucaagcaauaugcagcuuaucuucuagggagaa

SEQ ID NO: 4167565 - RNA, 75 nt, Human
uuuugccuuuucaacuucugugcccuuagcuccaguuuaauuccucgccaagugucagaaacaggaaggggaaaa

SEQ ID NO: 4167566 - RNA, 65 nt, Human
uuuugcugcguccucacacagugggagggcaaaaaagaugaacacuguguccucauguggcagaa

SEQ ID NO: 4167567 - RNA, 106 nt, Human
uuuugcuggacuaacaauguuuuggccauuuggaaguagaaaauaaucuaaucgauuacuuuuugcauaguaagugucuuuaauaccuuguauuuuucaaguaaaa

SEQ ID NO: 4167568 - RNA, 90 nt, Human
uuuugcuuuuuuuguaugcauuuguaguaucuguuuauauaucaauugguuauauagugagagauuacagaagcaaagaaagaauuaaaa

SEQ ID NO: 4167569 - RNA, 77 nt, Human
uuuuggaagcuucccagcccugcauaaaucaguugguacaaauagacugaggaguguggggugcagggagcccaaaa

SEQ ID NO: 4167570 - RNA, 60 nt, Human
uuuuggaggaggaugcauuuguuguuugauggagucuacgaccuugcccucauuccaaag

SEQ ID NO: 4167571 - RNA, 64 nt, Human
uuuuggaguggacuucaugaggccacauuucagauuagugccuagaggagucaguauucugaga

SEQ ID NO: 4167572 - RNA, 65 nt, Human
uuuuggcaaaagauuggguacuuaguuuccuguuacugaguuagcucuauucuuuuggaccaaag

SEQ ID NO: 4167573 - RNA, 59 nt, Human
uuuuggcagauuacuuaauaugucuuucuuggcgugaaauuagugagugauccccaaag

SEQ ID NO: 4167574 - RNA, 108 nt, Human
uuuuggccuucuuauaucuggcuccacuggcucaugaaauugugguauuucagaaagaacugcagaaagcaggaaaugcuaucauagcugagcaugaggaguucaaaa

SEQ ID NO: 4167575 - RNA, 61 nt, Human
uuuuggggagaacgguugcuauuacuuagccugugugcaugguagcugaguucccacagaa

SEQ ID NO: 4167576 - RNA, 60 nt, Human
uuuugggggggagccgcagggaaccguugggagaggggcccugugugugucccuuuaaga

SEQ ID NO: 4167577 - RNA, 75 nt, Human
uuuuggguuccccuagaugugaggggaggggccuuucucccuaugccaaucccuucaagauuuggggaaauaaaa

SEQ ID NO: 4167578 - RNA, 60 nt, Human
uuuuggguuguuuuuauuuguuugaaguagugggauauuuuggacaaaugcaauuuaaag

SEQ ID NO: 4167579 - RNA, 86 nt, Human
uuuugguaccacucaaauguccucugacucagccuugggaaagguugugacaaguuccuugagugaggggcauuagaaaaccgaaa

SEQ ID NO: 4167580 - RNA, 74 nt, Human
uuuugguauauucaguaaacauccacuauuaucauucauuuaugaaaauugugaagguuucugaaauacuagga

SEQ ID NO: 4167581 - RNA, 90 nt, Human
uuuugguuagaauucuuguucacaaugccuuguugaugguauugcggaagcagccaucaaaucagagcauuaaucuuuucuaugccagaa

SEQ ID NO: 4167582 - RNA, 70 nt, Human
uuuuguaaauagcaguacucaugugacccaguuaauaauugucucaguccaugggguugcuauagcaaaa

SEQ ID NO: 4167583 - RNA, 57 nt, Human
uuuuguaacucagacaggaggcaaacagcacauggcauugcugacugagcugcaaaa

SEQ ID NO: 4167584 - RNA, 71 nt, Human
uuuuguaauugacaaauaaugcugucaguuguuuuccuugaagugacagccucacuuuguuaauuuuagag

SEQ ID NO: 4167585 - RNA, 60 nt, Human
uuuuguauagucaaagacaagaacaucacuggaaggagucuuuguuuugaugauacaaga

SEQ ID NO: 4167586 - RNA, 59 nt, Human
uuuuguaugcucugaauuuucaaguuuaaauuugagaaagugaauacagagauacagaa

SEQ ID NO: 4167587 - RNA, 96 nt, Human
uuuugucauuaauauggcuuugguggccagugggaaugggcucaacucuuaaggaaaguuagacgccaaagccacaggccauccaaugagacgaaa

SEQ ID NO: 4167588 - RNA, 70 nt, Human
uuuuguguuaugcauuuuaaagcauuauuuugaggaggguccacaggcuucaccaggugcaugcaugaaa

SEQ ID NO: 4167589 - RNA, 129 nt, Human
uuuuguuaauugcccaaauucaauaucagguuuagaacuaagacauuguuaguagaccaguggcaguuucuucugcugauguagacucauaguaaucaaaguaugaaauugauaugcaaaaauccagaa

SEQ ID NO: 4167590 - RNA, 81 nt, Human
uuuuguucugaaaaucuucccuuaauacaucacauggguuuuugaggcagauguuuggagggcaugauuuuuagggcagaa

SEQ ID NO: 4167591 - RNA, 86 nt, Human
uuuuguucuggaccauuugcuaguaaauugcagagguugcaacccuuuaagcuauguaguuuaguaugugucccuuaagaacaaag

SEQ ID NO: 4167592 - RNA, 55 nt, Human
uuuaccaaauagauuaugucagcuguucaguagucagcuugauauuauugguaaa

SEQ ID NO: 4167593 - RNA, 58 nt, Human
uuuaccacagaaaaaaguaacuucguuuucccucuagguuacuuaauguagugguaaa

SEQ ID NO: 4167594 - RNA, 55 nt, Human
uuuaccagcugucugucacucccuauaucuaugagauucaguuaaggcugguaga

SEQ ID NO: 4167595 - RNA, 83 nt, Human
uuuaccgagggcacaggucaggagaugagauucguuucgcuuuuugaauuaccuuuuggccuguaccaagaugaacugguggg

SEQ ID NO: 4167596 - RNA, 78 nt, Human
uuuacucaaauguuuugcuuccuaguuggguaauaaguauugugcuuacacgucggagaggaugcaagaacgaguaaa

SEQ ID NO: 4167597 - RNA, 100 nt, Human
uuuacucccaauagcuuuaucacuccuucaacuuuuuacuugcccugguuuacccagucaagauagaaauuuugaagcuuaggguuguuccaauuguaaa

SEQ ID NO: 4167598 - RNA, 84 nt, Human
uuuacucgaauguguuggauauuaguggggagcacauaauagagauggccguccagccacguauuaucucacugagagaguaaa

SEQ ID NO: 4167599 - RNA, 85 nt, Human
uuuacucuauuagguaugcagccuauuugccagggugaguuaucuccucuuagaguuugguuauauaccuagucuauuuuguaaa

SEQ ID NO: 4167600 - RNA, 86 nt, Human
uuuacucuguuuaugaauaaaacauuuuaaucagugcuguaucaacacugaucaauuuuuuucauggaaguguaauacagggugaa

SEQ ID NO: 4167601 - RNA, 61 nt, Human
uuuacuuugaaaccuaagauauugaggaguuuuaaauacauguccuagguuugaagguaaa

SEQ ID NO: 4167602 - RNA, 82 nt, Human
uuuacuuuggauguauuggaggaaaccaagaagaaaaggccucuuucucuucacaugcuugcuccaagacucaaagaauaga

SEQ ID NO: 4167603 - RNA, 64 nt, Human
uuuacuuuuaugugaugaaaucugccucuguauuaagaggcaagaacuuguaagugaaggugaa

SEQ ID NO: 4167604 - RNA, 74 nt, Human
uuuagaaauugcagagugggugugggcgugccauguuucuuaaguugccuaagacccaaaagguuauuuuuaaa

SEQ ID NO: 4167605 - RNA, 78 nt, Human
uuuagaaguccaguaauuuguuuuucugaaauugaauauauuuguuuacugucucagagagacaaauauauuucuaga

SEQ ID NO: 4167606 - RNA, 56 nt, Human
uuuagaauaggauccaaacucugcagguuggccuucaaguccugaccuagucuaaa

SEQ ID NO: 4167607 - RNA, 130 nt, Human
uuuagaaucacguggggagcauuugaaaacuacugaugccugggcccuaacccagauuaauuaaauuagaacuucugaggguaggucccaggcauagcuggucuuuuaaagcuccccagcagauaguaag

SEQ ID NO: 4167608 - RNA, 62 nt, Human
uuuagacacguaaaggaaaacugagguaaugugagaccucaggggcuuuucguuguuguuga

SEQ ID NO: 4167609 - RNA, 76 nt, Human
uuuagacaguaccaggccaaaccaugagaaugugacuccaagacuaauggauugugucagguaucugcauucugaa

SEQ ID NO: 4167610 - RNA, 68 nt, Human
uuuagacaucauauugagccucucugugugaucuggaaagcucccuccacagacaggacuugucugaa

SEQ ID NO: 4167611 - RNA, 73 nt, Human
uuuagagacccucugcuauuuuuaaaauuuccuuccuugcuuuguuuuagucaaccuaguaggggguucugaa

SEQ ID NO: 4167612 - RNA, 63 nt, Human
uuuagagcccaugugagugugaucgagugaaagcucuguguuaaugcuccauggguuauuaaa

SEQ ID NO: 4167613 - RNA, 65 nt, Human
uuuagaucucucaugucuggagagugauuagacuagaauuacaaccuagaacugagaaauuuaaa

SEQ ID NO: 4167614 - RNA, 60 nt, Human
uuuagcagaaacuguuacagaaggcacaauugucuccugaauuagcaguuugugucugaa

SEQ ID NO: 4167615 - RNA, 61 nt, Human
uuuagcagagcauaugauauccuugugggcaagaugaaggaguaugauauagucugguaga

SEQ ID NO: 4167616 - RNA, 73 nt, Human
uuuagcagcucacagccucccauugaggaaaggguaauguugauucuggaaauggaggcuuguucugguuaag

SEQ ID NO: 4167617 - RNA, 70 nt, Human
uuuagcauccaagguuaugacugacauuuguacaaggugauacuggucaaguaauccugggugucaugaa

SEQ ID NO: 4167618 - RNA, 67 nt, Human
uuuaggagagagaugccgccuugcuccuugaacaggaggagcaaggcggcaucucucugauacuaaa

SEQ ID NO: 4167619 - RNA, 55 nt, Human
uuuaggcagaagcccugcugaugggagagggcuaggagggagggccgggccugag

SEQ ID NO: 4167620 - RNA, 93 nt, Human
uuuagggaaacacaaaauaaggccagcaugaaugcagcagugagaacuacuuauuauucagucauugauuggccuugauaguauuuaucuaaa

SEQ ID NO: 4167621 - RNA, 84 nt, Human
uuuuaauguauaugcagauuuucaucaucguuucuaucuugcaauaaaugaagcugcgaguaauuggaaauuugcuauuuagaa

SEQ ID NO: 4167622 - RNA, 65 nt, Human
uuuuaauuucuucagugauauagaaagaagguuuuuccuuuuacauuuguugaagaguauugagg

SEQ ID NO: 4167623 - RNA, 63 nt, Human
uuuuacaaggcaguuauuuuccuaaaguguuacauaucaaggaaaguugagcugucuguagga

SEQ ID NO: 4167624 - RNA, 100 nt, Human
uuuuacaaugcaccguucaguuuucuauaugaguuguggcuuagucacaguauuucacugugacagcuuagcuuaagaaaaagaaaggugcaggagaaaa

SEQ ID NO: 4167625 - RNA, 75 nt, Human
uuuuacacagaauuugguaguuauuuuugguaaauaauuuuuacagaggauguuugaucaaauuaaaauguaaaa

SEQ ID NO: 4167626 - RNA, 80 nt, Human
uuuuacagcagcaauuuugguuccuggaguucugcagguuccuuucuggcaggaagauuagaccaagagcugcauuaaag

SEQ ID NO: 4167627 - RNA, 66 nt, Human
uuuuacagcugaaggagcuaguccagaugaauuuaaccauuuguuuuaacgacucagcuuguaaaa

SEQ ID NO: 4167628 - RNA, 61 nt, Human
uuuuaccacugggugacauggaaaucacaauaaggaauucuaaugucauuuguggcugaag

SEQ ID NO: 4167629 - RNA, 73 nt, Human
uuuuacuggaggcagaagaugguauuugauaaguuauucuaaucaacagaauugcugcugccaaugugugaga

SEQ ID NO: 4167630 - RNA, 84 nt, Human
uuuuacuguguaugcuucuguaaugugggaauguuuuuacaagcauguaucacuccuauaauuaaagaugcaaaucuaguaaaa

SEQ ID NO: 4167631 - RNA, 83 nt, Human
uuuuacuucuuuaguuuuucuuacugucugugauccucagcuagaaugcagguucuuagugagguagggauggggagguaaaa

SEQ ID NO: 4167632 - RNA, 130 nt, Human
uuuuagaaauguaggcagacuuuuugcacacugggaccuguuuguguccauuagugacuagaaggaucacaaggauagaaugguucugguugugaaaucauaccucucagccuuucaugcaagaaggaaa

SEQ ID NO: 4167633 - RNA, 87 nt, Human
uuuuagagcaaggcuaauuaugccuuggggcuuuggcgaaugugcuugucuuuaugaaagaguccuuggcaucaucaguaccuagaa

SEQ ID NO: 4167634 - RNA, 88 nt, Human
uuuuagauuccuaguuagcauaauuuguagaaaaucaaagcuagacaguagugaugucucucaaauuuguuugacaagaggucuaaaa

SEQ ID NO: 4167635 - RNA, 64 nt, Human
uuuuagauugggaaauguaaagucaacuuaaagcaguugaaaucauaacauuuccuaacugaag

SEQ ID NO: 4167636 - RNA, 66 nt, Human
uuuuaggaaaggguuuucuaacagaaguugguugcguaagcuuuugaggcaaacucuuuucugaaa

SEQ ID NO: 4167637 - RNA, 55 nt, Human
uuuuaggguagcauguucuuaacuccacggugcccugggcaugcuggcucuagag

SEQ ID NO: 4167638 - RNA, 58 nt, Human
uuuuaguacagaaucaaaagcaaugguagaaaacuaugaugguuuuucuguauuggag

SEQ ID NO: 4167639 - RNA, 88 nt, Human
uuuuaguguguuaaguuaauagggaucccuggagugauguggaaagagccaagucacuggaggaacucuacuaaauuuguaacuggaa

SEQ ID NO: 4167640 - RNA, 77 nt, Human
uuuuauaaagugagaagugcuaugcacagguaaaggaucauuacccaguuaauucaugggauuucugcuuugugaga

SEQ ID NO: 4167641 - RNA, 56 nt, Human
uuuuaucauuacccagcugaaaugucucaggcagucauauuaggguaaugauaaga

SEQ ID NO: 4167642 - RNA, 64 nt, Human
uuuuaucuguuguaccugcauugucucuguaacggggauuacaacgcauguucaauaugugaaa

SEQ ID NO: 4167643 - RNA, 104 nt, Human
uuuuauguuuucagucauugauaggacauuugggcuuaguguuuuuguguaacauuaagaacaugaagucacaaaugcagcuagagaagagacaaagcauggga

SEQ ID NO: 4167644 - RNA, 82 nt, Human
uuuuauuaccauaguacuaucaguuuaagacguucaaaacaaaagaugcuaaaaauaaaugauaguauugaagguagggaaa

SEQ ID NO: 4167645 - RNA, 60 nt, Human
uuuuauucucagcuccagagagcacaacaguucacucacucucaggagcuggauuugaga

SEQ ID NO: 4167646 - RNA, 56 nt, Human
uuuuauugggaguccucuacugcucaauugaaaguugacacaggcucccagugagg

SEQ ID NO: 4167647 - RNA, 70 nt, Human
uuuuauuggguaucuucuuucucaguuguccacacauaggaugauuauacaaggcuggugccuaauugaa

SEQ ID NO: 4167648 - RNA, 58 nt, Human
uuuuauugugucacaggcagcaagagcaggugaguucuuuccuaaugaaacagugaaa

SEQ ID NO: 4167649 - RNA, 88 nt, Human
uuuuauuucauauugacuuuagaacauagcaacagaauuaguugguuuguugauucaaguuuuguguucuugucacuauugagugaag

SEQ ID NO: 4167650 - RNA, 73 nt, Human
uuuuauuucccagagauuggcuugcuggacauuuguaugaugaugcacucugcuuauacucuggagaauaaga

SEQ ID NO: 4167651 - RNA, 96 nt, Human
uuuuauuuggcauuaaaacugcacuuuauuuugucaaaggagagguuuccccuugaauuguaaguacaaaaaaaguguuuuuaaucuuuagugaaa

SEQ ID NO: 4167652 - RNA, 79 nt, Human
uuuuauuuggucugugcaaauaaagagcaacauuaucugaaaauguuuuuaaguuuauuugugacagcaucaaagaaaa

SEQ ID NO: 4167653 - RNA, 81 nt, Human
uuuucaaagaaauuuacagccaguagugauaagguugugaacacugaaagcugccuggcugaugaaaauucuguuugaaaa

SEQ ID NO: 4167654 - RNA, 62 nt, Human
uuuucaagagggaacugaacacaggucaacagaauucugugcugcaauucacuucuugagaa

SEQ ID NO: 4167655 - RNA, 81 nt, Human
uuuucaagugcuagaugaguuuugagaagugaguaagaaaacagugucuccaccaucaagaccuuaucuaguuggagaaag

SEQ ID NO: 4167656 - RNA, 94 nt, Human
uuuucaaucacuguuuagauguugaagagaaauauccauaaggagguuugauuuguccuuacagauauuucucuucaacaacagugauugaaag

SEQ ID NO: 4167657 - RNA, 68 nt, Human
uuuucaccauagucacaggaaguuucaauguauguacuagcgguacauugaguaacugugugggagga

SEQ ID NO: 4167658 - RNA, 58 nt, Human
uuuucacccacuuucaugaguuucaucaaauacugagccuacucaaggguggagagaa

SEQ ID NO: 4167659 - RNA, 71 nt, Human
uuuucacucaaucagguauucucauguagauagcaaaaauggaaaaacugaagauaucugugggauggaga

SEQ ID NO: 4167660 - RNA, 80 nt, Human
uuuucacugacuuuggugguuguguuuugacuugagcuuuccuuaagcagugauaagagcuaccauugaaucagugaaag

SEQ ID NO: 4167661 - RNA, 58 nt, Human
uuuucagauauucugcucugucaucagcuauagacacugacagguauuuaucuggaaa

SEQ ID NO: 4167662 - RNA, 71 nt, Human
uuuucagcaaaguuaagguuucucuuuuuaugcuagaaagacuaacauugagacucuaacuuugaagagaa

SEQ ID NO: 4167663 - RNA, 60 nt, Human
uuuucaguaaugucuacauaauaguacccaucucagggagcucuuguagcuuacugaagg

SEQ ID NO: 4167664 - RNA, 72 nt, Human
uuuucaguugugcucucuaguuaguuuuuuugggaguaaggacaaaccuggaauagauagcaaaacugaaaa

SEQ ID NO: 4167665 - RNA, 76 nt, Human
uuuucauaguuuaaagagagaagacuguaaaucugguuuaucauguucuuaucauucuuucggaaacaugugagga

SEQ ID NO: 4167666 - RNA, 74 nt, Human
uuuucauccuauugcuuuuuccucuggcuucagucuguggcauauuagaaaugggccuggaaagaggauguaaa

SEQ ID NO: 4167667 - RNA, 58 nt, Human
uuuucaucucccaggggcccaaggagcugccuagaggggcugccugggaagaagaaga

SEQ ID NO: 4167668 - RNA, 71 nt, Human
uuuucaugacaaacuaccuacagauguucagauuaguauauccagugggcauccugguguuucagugagga

SEQ ID NO: 4167669 - RNA, 80 nt, Human
uuuucauggaucauaaaugugcuaaaguuaauucucccaagcucaaugauuauauuuuagcagaucuauguaugugaaaa

SEQ ID NO: 4167670 - RNA, 59 nt, Human
uuuucauuuuuauggugaaacagagcuaaaagucaucugugucaugcauuagaugaaga

SEQ ID NO: 4167671 - RNA, 79 nt, Human
uuuuccacagcauuucucuguuguguugaaacauuugaagcauuaucucagcacaaauauaaaaaugucugauggaaaa

SEQ ID NO: 4167672 - RNA, 60 nt, Human
uuuuccacucuugcaagcugcacaaguaccauacuuaguguucugggcugagaggggaga

SEQ ID NO: 4167673 - RNA, 58 nt, Human
uuuuccccauuaacuugcagaguagaccuucuugauacugcaagauggguggggagaa

SEQ ID NO: 4167674 - RNA, 74 nt, Human
uuuucccccagcaugcuucccucacauauccuggccugcaaugcagaggccagggggaaacacuggggagaggg

SEQ ID NO: 4167675 - RNA, 88 nt, Human
uuuucccugguccugucugccauuagcccaguccaggccaucagcuucucuucccuggacuaggccaguggcaaacaggacuggaaga

SEQ ID NO: 4167676 - RNA, 66 nt, Human
uuuucccugugggaguaggaaaguucaucugcacauagcauguuuauuuucauuuccaggggagga

SEQ ID NO: 4167677 - RNA, 77 nt, Human
uuuuccucaggagaaacaaucaucaugugauuugaaucaaacuauuuaaaauauguauuguuuuaaaccagggagag

SEQ ID NO: 4167678 - RNA, 56 nt, Human
uuuuccucugcaauaaaagcagccuuuuucuuaauguuuucuuugauagagggaag

SEQ ID NO: 4167679 - RNA, 78 nt, Human
uuuuccuuuuuucuugugccuaauuuugggccaguucuucugguuagaugauugaggugaccagaacauacaggaaaa

SEQ ID NO: 4167680 - RNA, 75 nt, Human
uuuucgcacuaaauccuguuauuaaaaagcucaggcuaagaucaagccaagggcuguaacggacuugacagagaa

SEQ ID NO: 4167681 - RNA, 58 nt, Human
uuuucuaaaauauccaggacagucuuuggugaauaggucuugguauguauuuaggagg

SEQ ID NO: 4167682 - RNA, 89 nt, Human
uuuucuagaauggagaacuucaggauuauucaaguucaaauucagaaugugaauacagugaggucuaugagaaucauuuuugcagaaga

SEQ ID NO: 4167683 - RNA, 57 nt, Human
uuuucuaguucuuagagaauuggucugccauagaucuuucuacucagaaguagaaga

SEQ ID NO: 4167684 - RNA, 106 nt, Human
uuuucuauacuugacauuucaaucucauuaugggucaaugcucaauuuuugcuuuauauauggguuccaauaaagagaggaaugucuguuucacugucauagaaaa

SEQ ID NO: 4167685 - RNA, 88 nt, Human
uuuucuaucacucaauuauuuuuuggcacaguguugcagccaaacuugaaauacuauguagccaaaauaauguggaguaggaugaaga

SEQ ID NO: 4167686 - RNA, 61 nt, Human
uuuucuaucuccuagaacugccugguuguccaccuccagauugcagaugggagaaagagaa

SEQ ID NO: 4167687 - RNA, 84 nt, Human
uuuucuauuuuuugggcuuauaagaguauauaguguacuauauaauuaguauuugccaauauucuuuguaagcuugauaggaaa

SEQ ID NO: 4167688 - RNA, 100 nt, Human
uuuucucagugcuuacgugcuccuggacauggagcggaggaugaacucgacugcauucucaaugaucucugugcccaggaggcuuaggaauuuggggaag

SEQ ID NO: 4167689 - RNA, 55 nt, Human
uuuucucaucuggaaacagugcuagggauaccuaacugugacccaggugaggagg

SEQ ID NO: 4167690 - RNA, 63 nt, Human
uuuucuccagggaacaaggugaggaacugcaaaccacuuaccuuuauagcaaccuggugaaaa

SEQ ID NO: 4167691 - RNA, 57 nt, Human
uucugucagugauuuuucccccacgugguaaugauggaaaggucuuaacuuacagag

SEQ ID NO: 4167692 - RNA, 91 nt, Human
uucuguccuuccuuuugcuugccucaugcccaauuuuccaagccaaggaaaggauugggaaggcguggaaguagaaggucugggcacagaa

SEQ ID NO: 4167693 - RNA, 121 nt, Human
uucugucuggacuuaucugagucacuuucuauucucugcagcugaauguuuccuagguuucuacacuccagacaucucucugcaaaacgagauugaaagagacucagucuucuacccagaa

SEQ ID NO: 4167694 - RNA, 61 nt, Human
uucugucuucucgguuguuuaccuaauuccccaacagaacaguaagucuuaggagacagag

SEQ ID NO: 4167695 - RNA, 76 nt, Human
uucugugaaaacuaccugaugggucuugguccaaccugaaggaacacaugaaucacugguggaagauuauauagaa

SEQ ID NO: 4167696 - RNA, 75 nt, Human
uucugugacaguggucacuuguaguuucaaaugacauuuugcuggcugcaauaagacuauuuuuauccucaagaa

SEQ ID NO: 4167697 - RNA, 88 nt, Human
uucuguguuuucccauugggucuuaauuugaaaacuucugccauaaacucuuauuuucagaggaagccuuggugggaguaauacagaa

SEQ ID NO: 4167698 - RNA, 122 nt, Human
uucuguuaugguuauuuguuggccagucucuucuugcuagacugagugcccuuggauugggaagaucgcauugcccggcacuaggucugccccagaaggaugcucaauaucauuguacagaa

SEQ ID NO: 4167699 - RNA, 76 nt, Human
uucuguucacccaagggcuugugauuucacgcucauguggaaacaugagguaagcacugggcccaaguggacagga

SEQ ID NO: 4167700 - RNA, 80 nt, Human
uucuguuggagauaguuucuaauguugaaauuaucagugaauguucauuaauucuucauguugaagcugucaccauggaa

SEQ ID NO: 4167701 - RNA, 84 nt, Human
uucuguuuaucaugaaguuuuaccuaauguaggcuuucucuuaaauuuccuauauagaguaauuauuugguguucauggcggaa

SEQ ID NO: 4167702 - RNA, 84 nt, Human
uucuguuuuccaguccauggauucccaaggucauauuggaggguuuauuugaccaaaagccauggggacuucauggauuuagaa

SEQ ID NO: 4167703 - RNA, 56 nt, Human
uucuuaagcaguuuggcauguuuacguuucaaaacucggucaagcuucuuuaagaa

SEQ ID NO: 4167704 - RNA, 64 nt, Human
uucuuaagugagaaagcaggagaaagucagaggaaaaagaauagauuuaccugccauuuaagaa

SEQ ID NO: 4167705 - RNA, 56 nt, Human
uucuuaaguuuagcaacuugugaugaaauaugccacauaaggcuuucacuuaagaa

SEQ ID NO: 4167706 - RNA, 74 nt, Human
uucuuaaucuuguuauucuucauacagacaaguccuguucuuuaggauuuggggaagaaaacacuaaguaggaa

SEQ ID NO: 4167707 - RNA, 67 nt, Human
uucuuagaagaacaucagaaauuggauuuaggggccacuguaaaugcagaaugauuucaucuaggga

SEQ ID NO: 4167708 - RNA, 55 nt, Human
uucuuagaaguuuauggcacggaggcaguaacccucuguugcucagucuauagaa

SEQ ID NO: 4167709 - RNA, 57 nt, Human
uucuuagaauuuuaauccagaaagccuccaaagauguuuaggaugggagucuaagaa

SEQ ID NO: 4167710 - RNA, 78 nt, Human
uucuuagcagaagaacaacaugaucugacauagcacaaaggauaaaaguuagauuuagcaaaucuuacuagcuaagga

SEQ ID NO: 4167711 - RNA, 61 nt, Human
uucuuauauguguuuuuuuguguguguguacacacaugaaauaauauuaugcauauaugga

SEQ ID NO: 4167712 - RNA, 101 nt, Human
uucuuauuauaauuauuagguucuugcaguacuggaguugauuacauaaaacugauuacuuggguuuaauuaauuaauuccacagcaagagauaauaagaa

SEQ ID NO: 4167713 - RNA, 55 nt, Human
uucuucaaaauccagcaugauucaagauacugauggauuuuggguauuugaagag

SEQ ID NO: 4167714 - RNA, 69 nt, Human
uucuucacaguccuggucaguggaaaguucuacaucagacaguccaaccuccauugccaugaucaagga

SEQ ID NO: 4167715 - RNA, 77 nt, Human
uucuucacugaucuguuauaaucucuuuuaugucauuggagcugaauaaauacugguugaauggauuagggaaugaa

SEQ ID NO: 4167716 - RNA, 61 nt, Human
uucuucagcuucuaccugcgucccaauccugaagugggagagaauaggagaaauugaagga

SEQ ID NO: 4167717 - RNA, 77 nt, Human
uucuucaggggaaagaaaaacauggauaccuuaucuagcauugcucauaaaaguacucauguucauccuuuuuggaa

SEQ ID NO: 4167718 - RNA, 129 nt, Human
uucuucaguugguugaacaguaguuaggaaccuucuugcuguugauucaucuucuaauacccacacagauguggguacaugaaaauagaacaaugcaagaacaccucacauuaccaucacaacugauaa

SEQ ID NO: 4167719 - RNA, 63 nt, Human
uucuuccauaauuaaguggagagaaagggggacuuuacuagucaauaacuuaaugugggagaa

SEQ ID NO: 4167720 - RNA, 106 nt, Human
uucuucccaagguuaguuugaggacuaauuaugauggagcguaaaauguaccuguguauguuaaguguaccauauaucaguucuucuucaccuucccccugaagaa

SEQ ID NO: 4167721 - RNA, 70 nt, Human
uucuucccuaaauagagucagauguaauguucuuuccacauuggccaucugcucuguuuuaugugaagaa

SEQ ID NO: 4167722 - RNA, 81 nt, Human
uucuucgaguucaugagagaacuguuucuggggucuuuaaauuuuaagaggaacuuaugauauucuacucaacuauaagga

SEQ ID NO: 4167723 - RNA, 96 nt, Human
uucuucuaaaggaaaaaaacucuauggacauggauuuugucauaaauaauaagggcauguaaauccuucuuuaggccacauuuccauuugggagaa

SEQ ID NO: 4167724 - RNA, 66 nt, Human
uucuucuaggaucugggauuuuugacacugaaggguccuggcugccuuaaauccuuucuagaagaa

SEQ ID NO: 4167725 - RNA, 75 nt, Human
uucuucuccccaggcucucuaugggaaagagacauucauuuucuucuuccaguuauaagagcuuuucaagaagga

SEQ ID NO: 4167726 - RNA, 103 nt, Human
uucuucuugggcuuuugggcuuuuucucuccauaaauauuuucaggacaagugagaauuguccuuuuggcugucuaugguuagagccaaaagcuagggaggaa

SEQ ID NO: 4167727 - RNA, 65 nt, Human
uucuugaacuuuaugaaaaccagauuggggcaugagcauguucuccauugaaucauguucaagga

SEQ ID NO: 4167728 - RNA, 118 nt, Human
uucuugacaaugcuuucagcagccuuucagaaauucuaaggucacaauguuggauuagcuguuuaagcugcaagcaacaugguagauuuugggaagggauguaagcuugaaccaagaa

SEQ ID NO: 4167729 - RNA, 96 nt, Human
uucuugaggcauguaauucauggaugauuuucaaaaugucauauuugaauugggaaaguaacauuucuugaauuaaucagccaauugcuucaagaa

SEQ ID NO: 4167730 - RNA, 59 nt, Human
uucuugauucuuccuugaaggauacugcaugguccauuccuacacaggauaauuaagaa

SEQ ID NO: 4167731 - RNA, 89 nt, Human
uucuugcuuuguuacuugucugucaggucuaaaaugggucucugguagucacccagggaccuagacugauggagaaccacauuccugaa

SEQ ID NO: 4167732 - RNA, 65 nt, Human
uucuuggaugauauguguccuaagcauauugauaucaauauguguccuaagcaaucauccaaggg

SEQ ID NO: 4167733 - RNA, 81 nt, Human
uucuuggccaggcgagguggucaugccuguaaucccagcacuuugggaggccaaggugggcggaucacuugagguaaagag

SEQ ID NO: 4167734 - RNA, 71 nt, Human
uuucauuuggaguagggcuuuagcgauggcgucuuuguggaggugacauuuuaagaguguucucagugaaa

SEQ ID NO: 4167735 - RNA, 62 nt, Human
uuuccaaaacuuauuugaagucaucugaaugggauaucucacuuaguuaaguauuuuggaaa

SEQ ID NO: 4167736 - RNA, 84 nt, Human
uuuccaacagaaucugccuucaguguccucucuaguagacacaaucaguagugcuguagaggauuugaccacugcuguugggga

SEQ ID NO: 4167737 - RNA, 59 nt, Human
uuuccaagucacccuuagggucacaugccugcaaguugaccccuagguuggcucagaaa

SEQ ID NO: 4167738 - RNA, 56 nt, Human
uuuccaccagaguuugauggaaacagagcuguuuccuccauucagcauuguggaaa

SEQ ID NO: 4167739 - RNA, 60 nt, Human
uuuccagccgucagaugugccgcagccugcugggagcuccgguagguuugaggccggaga

SEQ ID NO: 4167740 - RNA, 56 nt, Human
uuuccagcuggaccugcccuagcuccugaggacuaugagggagguagcauuggaaa

SEQ ID NO: 4167741 - RNA, 116 nt, Human
uuuccaggccaggggaguaggaggugggcugccugucucauucugugagcuguggaggagcccacagagcacagggccaaguaaacccuaccuccaaggagcucacaguuuggaga

SEQ ID NO: 4167742 - RNA, 59 nt, Human
uuuccauauucugcgucugccaauaauuaagaguuggcucuauaccaauaauaugggag

SEQ ID NO: 4167743 - RNA, 84 nt, Human
uuuccaucccaaggagcucauauucuuguuggaggcuucccauuuaccacuucagggaugaaccaagaguccuugaaauggaaa

SEQ ID NO: 4167744 - RNA, 64 nt, Human
uuucccaagaaaaauaauuggaguaagaggccagacuacacuuuccaaaguuuuuuguggggag

SEQ ID NO: 4167745 - RNA, 70 nt, Human
uuucccagaagcagagccugaggcagggauucagaugcucaugaacuguuugaggguuugcuuucagaag

SEQ ID NO: 4167746 - RNA, 67 nt, Human
uuucccagaggacuguuggugcuaggccugacugauuuucaccuagcagcuccauuucucuggcaag

SEQ ID NO: 4167747 - RNA, 64 nt, Human
uuucccaggaaguuauuugcuaucuacugagcuaaauggucaguuuaaaugacuuccuuggagg

SEQ ID NO: 4167748 - RNA, 55 nt, Human
uuucccaguucccugcucuauaccaggucauccugcuaagcgcugagaugggaga

SEQ ID NO: 4167749 - RNA, 109 nt, Human
uuucccaucaccuagcaccaucugagaauucuagucacacacauucagagagaccuuucucaugguguuucuacaauucuguugccagucuugacuaggaggcgggggg

SEQ ID NO: 4167750 - RNA, 97 nt, Human
uuucccauccuguagcuagcuuugcuuacuggugucugcaugccuuugacaacauguaucagaaaauagcaaaauuuuggcuuacagauuuaggaag

SEQ ID NO: 4167751 - RNA, 64 nt, Human
uuuccccauaugcuaugugugggcucauccuguggaaacaggccagagcgcgugguugggggaa

SEQ ID NO: 4167752 - RNA, 63 nt, Human
uuucccccaguuuuuggaucuuauaguuccacaggacaagauacaucuaagagaugggggaaa

SEQ ID NO: 4167753 - RNA, 126 nt, Human
uuuccccgucugcgcgccccacauauucgcuuuccgcagguucucucgcugagauucgcguccuucaaacuaauggaacuuugcaagggggcccugcggcggcuucgcgugggagcgccggggaaa

SEQ ID NO: 4167754 - RNA, 83 nt, Human
uuucccuccgcuccugggcuucacugguacaagugggagcucucaggguccacacaugugugcagcuuagaagugcagggaaa

SEQ ID NO: 4167755 - RNA, 66 nt, Human
uuucccuucuuuccugaguaaucguagacugcuuuauuuuacuuugugacagaggaagaggggagg

SEQ ID NO: 4167756 - RNA, 91 nt, Human
uuucccuugugugacucuauggaaguuaacuuuuucuuauggccauagugugaaucgaaggccacaagagaaguuaaggguuauauugaaa

SEQ ID NO: 4167757 - RNA, 59 nt, Human
uuucccuuguuccuuccucugaagacaguaggagcuauaaacaggaacaguuugggaga

SEQ ID NO: 4167758 - RNA, 76 nt, Human
uuucccuuuaagcaaaagggagaccaaaggcuuuugagcaauaaagagacccagucacacuugugcuuuggggaaa

SEQ ID NO: 4167759 - RNA, 87 nt, Human
uuuccgcaagaggaucugcugcuuagcaugugguguccuuguacauuuguccuaggagaaccacaguugaacugauacuuuuggaaa

SEQ ID NO: 4167760 - RNA, 125 nt, Human
uuuccguggugagggaagcacagguggugggagcaggcuuggcagggaggcugguuucuagcggggagcucgccuucuccgcucagcuauuuccauaaaccaauuaucgccgaucaucucgggag

SEQ ID NO: 4167761 - RNA, 86 nt, Human
uuuccuaagcuggugauggcuauagucccagugggcuucuguuuugcuuccagggcucugugacuaucacugccucuaguaggaga

SEQ ID NO: 4167762 - RNA, 66 nt, Human
uuuccuaaguuaaaacuuauuaagcuaguugggcaaaauuaggaaaaaugagaugacuuagaggaa

SEQ ID NO: 4167763 - RNA, 101 nt, Human
uuuccuagucaugcaucaucugagccagagcuucccccgagugugguccggagaucccugggggcccucugguuagucuauaaugcuucaugaggaggaag

SEQ ID NO: 4167764 - RNA, 57 nt, Human
uuuccucacacagaagaucuugaaacuuucucuucaugucuucauccugugagggaa

SEQ ID NO: 4167765 - RNA, 69 nt, Human
uuuccucacuucaugagaguuucugauuaguauucagaaagaguuuucucugauggcauuagugggaaa

SEQ ID NO: 4167766 - RNA, 129 nt, Human
uuuccucagcaaagggcggagggaguggacgugggggaagggcaggugggcauuucuggagcaauacugccaucaagaggaacuggcuuggcaaucccgcgcacccuucgcugugcucgccuggggagg

SEQ ID NO: 4167767 - RNA, 61 nt, Human
uuuccuccuuccugccccccacucaucccuccacaccugagucuuggcaccaggagagaga

SEQ ID NO: 4167768 - RNA, 56 nt, Human
uuuccuccuuuucuucacugauaucaaugaaugggauuacaagguagaggagggaa

SEQ ID NO: 4167769 - RNA, 67 nt, Human
uuuccucgaucuggggugguauggugggugcuagaacaagcuacucagaguuccacucuaaaggaaa

SEQ ID NO: 4167770 - RNA, 97 nt, Human
uuuccucuaugaugacaucgcccuggggaagagaagcugagaggaacuccucacucagcuagcuucaggagccaugacaucaucucuaccauggaaa

SEQ ID NO: 4167771 - RNA, 62 nt, Human
uuuccucuucuucccaugucauuuugucuuccgguaaguuagggaugagguggaggagggaa

SEQ ID NO: 4167772 - RNA, 55 nt, Human
uuuccugagucagagacaccagccaagccaugcccagauuccugacucagagaaa

SEQ ID NO: 4167773 - RNA, 63 nt, Human
uuuccugccugugcuuuuggugucauauucaagaaaucauugccaagagcaaugcuaaggaga

SEQ ID NO: 4167774 - RNA, 56 nt, Human
uuuccuggucuauuuagaauugcccccugggaaugcaaggucuuucagaaaggaaa

SEQ ID NO: 4167775 - RNA, 64 nt, Human
uuuccuguaugucagugaagagcagggcacuucuguucuuggacagucacuggcauaugguaga

SEQ ID NO: 4167776 - RNA, 64 nt, Human
uuuccuguguuaacuaugaagcuguuuggagaugaacaccacaugcaacaggucagccaggaag

SEQ ID NO: 4167777 - RNA, 63 nt, Human
uuuccuguucaggaaaguuguguucuacaaagaaaagguuggaagacacccccugacagggaa

SEQ ID NO: 4167778 - RNA, 57 nt, Human
uuuccuguucuucuauuuaaaagggucacucuucuauuuaaaaagagucacaggaga

SEQ ID NO: 4167779 - RNA, 73 nt, Human
uuuccuuccuuacuccuuucuaccagccaucuccagggcagggauguggcuuggcagggaauauggggggaga

SEQ ID NO: 4167780 - RNA, 76 nt, Human
uuuccuucuuagcgguguucuuuggcuggagaagcagaaggcugggagccuacagcacaucaaagcagggaggaga

SEQ ID NO: 4167781 - RNA, 92 nt, Human
uuuccuugguuauggcaggugcaugguguauuggguucauguuuuuaguugacaacuuuugacacgugugcuaacuuucaggaugaaggaag

SEQ ID NO: 4167782 - RNA, 75 nt, Human
uuuccuugucaggcauuugaagcacuuacaaaaauuaaauguauuuauaaguguaguuucaaauguuuaaggaaa

SEQ ID NO: 4167783 - RNA, 58 nt, Human
uuuccuuuaugacaucaccacucugcaggaaggggcugaggugggguaagagaggaga

SEQ ID NO: 4167784 - RNA, 78 nt, Human
uuuccuuuuaagcagucggccugcccaaguucaagaagauuaguaaacagagauggagaggccuuguuuauagugaga

SEQ ID NO: 4167785 - RNA, 69 nt, Human
uuucgcuagaaggaaccuccuggugggauuaaucauccaaauucccauuagaaaggcuuucuggugaaa

SEQ ID NO: 4167786 - RNA, 80 nt, Human
uuucuaaugaaauugggggcacuuugagacugucaggguuuguuccugucucagaauggcucauaauaaacucacugaaa

SEQ ID NO: 4167787 - RNA, 56 nt, Human
uuucuacauguuuucuauugaaugucccuccuaggccacaauagaaacaguaggaa

SEQ ID NO: 4167788 - RNA, 55 nt, Human
uuucuacuccucauggcagguuguuuuuaaaagauuacauucagaggaguggaag

SEQ ID NO: 4167789 - RNA, 59 nt, Human
uuucuagauguuuuucucugaaauaguugacuggagacagagagaggagaguccaggag

SEQ ID NO: 4167790 - RNA, 59 nt, Human
uuucuaggaaguucagucuauacugauucuuauuuuauggaauggcuauuuucuaggga

SEQ ID NO: 4167791 - RNA, 61 nt, Human
uuucuaggacaugauaggauauuucaaucuguacaugcaaguuauccuucauuucuggaaa

SEQ ID NO: 4167792 - RNA, 56 nt, Human
uuucuaggcacagugucuuccccggcugaagugggaacugcaccuguguuugggaa

SEQ ID NO: 4167793 - RNA, 59 nt, Human
uuucuagugugcauagcagugauccccaaccuauuuuugcugcaaaaugacauuaggaa

SEQ ID NO: 4167794 - RNA, 59 nt, Human
uuucuauuccugaucuuauuggauccucaugguggccccagugugguuuaggauaggga

SEQ ID NO: 4167795 - RNA, 118 nt, Human
uuucuauugaugugggguggccaggacuuuaaguccagcacuacugcuguagggagacuccuaacaaggcuaugagagcuauggcaugaaguccugagcuucuacaagauaauggaaa

SEQ ID NO: 4167796 - RNA, 78 nt, Human
uuucuauuuggauuggguuggaaauaguguggcaauaugaaaaugagcauguuauguaucugcccagcuggagagaaa

SEQ ID NO: 4167797 - RNA, 68 nt, Human
uuucuauuuuguccuugucaugaagaguuaaccaaaaagugccacuguuggucagggauauugugaaa

SEQ ID NO: 4167798 - RNA, 86 nt, Human
uuucucacaauuuggauacagcuaugaggagauuggacaugaaaguuauuuuucaggacacagcugggauuuaaaguugugugaaa

SEQ ID NO: 4167799 - RNA, 72 nt, Human
uuucucacugugaugaugaagcaugguuacauuggcgaauuugaaaucauugaugaucacagagcugggaaa

SEQ ID NO: 4167800 - RNA, 56 nt, Human
uuucucccuccacuacaggcuccuaacacuggagugagcccaaguuaggggagaaa

SEQ ID NO: 4167801 - RNA, 60 nt, Human
uuucucgcguuugagcucucagacuggugggcgccaucaucccugagcaaacuugggaga

SEQ ID NO: 4167802 - RNA, 94 nt, Human
uuucucguuugccuucuuguuguucaucguuuauaacuauaguucuuuuggggcagagucuuagauaagugaccaaugggaggguggugaggaa

SEQ ID NO: 4167803 - RNA, 57 nt, Human
uuucucuauuaugcauuuugcugaugcugacagaagcaggcaggcuggauagagagg

SEQ ID NO: 4167804 - RNA, 85 nt, Human
uuucucuccccuuugcagcacuuuucaguuuccagcuuugucauucuguggccuuugcugugacaaugcugggaaggguuagaaa

SEQ ID NO: 4167805 - RNA, 97 nt, Human
uuucucuguguacuaacuuuguuuuauuaaguuuuggguuuuauuuuaaaugugcucaaagcauaagacaucuaaaguaguuagugggcgugaggaa

SEQ ID NO: 4167806 - RNA, 60 nt, Human
uuucugaaaucucuuuugaggaacucacguuacuuacaauuauagaaggagauucagaaa

SEQ ID NO: 4167807 - RNA, 81 nt, Human
uuucugaauacuuuuugauuuguguggccaaguccucagccaugauccaccaggccuagcaaguacauuaauaucaagaaa

SEQ ID NO: 4167808 - RNA, 77 nt, Human
uuucugacggcuccccaaagauaacggcuucuucuuuuuugcaagccagcaagcuguucuuggagaguacaaagaga

SEQ ID NO: 4167809 - RNA, 105 nt, Human
uuucugaugggaacggaaggugagcuggucuugaguguagcugaaucuaguggaugacaacuuuucacaggcuagcucuuucuucucuucucuguuuugcagaaa

SEQ ID NO: 4167810 - RNA, 65 nt, Human
uuucugcacauuucuaaaguugaaaggaaugagucuaucaucccaaagugagagaauggcagaaa

SEQ ID NO: 4167811 - RNA, 89 nt, Human
uuucugccacugaagcaauugagagauguuucugcuuuuuaaaauauaaagcauauauguaaaacaacuuaauugcuagguuccagaga

SEQ ID NO: 4167812 - RNA, 60 nt, Human
uuucugcuuaguuuaccggaggguauccagaguucuugaaacuuuaguaaacuaaggaaa

SEQ ID NO: 4167813 - RNA, 90 nt, Human
uuucuggaagcauuucuguauuuauggaagagaacaggacuaaagaacgauguguuuagcauguuccuuucauagagagccuuccagaaa

SEQ ID NO: 4167814 - RNA, 124 nt, Human
uuucuggcucagacccagucuuagcaucucaggaucuguuaaguuguuccauuuucuaaaaggcaauuggaacuugagaggaauucuaacauccuuugugcaaauggaugcugcaaaccagaaa

SEQ ID NO: 4167815 - RNA, 93 nt, Human
uuucugggauaaacaggggcaugaaaaaguggaagaugguugugggcacugccauguucuuuggcuucacagcucuuguucugauccgggaga

SEQ ID NO: 4167816 - RNA, 71 nt, Human
uuucugggcaaaugaauuucccugcaaaugaagugaauuauuauauauguaaaaagaucauuucucagaga

SEQ ID NO: 4167817 - RNA, 85 nt, Human
uuucuggguauaggcuguguuuaauaacucgacugaggaaguuuaauaacuuugcuccugacaguuuuaggcucagacccugaaa

SEQ ID NO: 4167818 - RNA, 56 nt, Human
uuucuggguucucacucucugauaggcagaucagaaauguacacgacacccagaga

SEQ ID NO: 4167819 - RNA, 69 nt, Human
uuucugucauugcaauaaaauuucaucagacacuuaaaaguuugagaaauuauaaugaauagacgggaa

SEQ ID NO: 4167820 - RNA, 84 nt, Human
uuucugugccauuccuuguguuaagugcuggggaaagagucaugagucuuccucuuauauagccuuggccaauugguagggaaa

SEQ ID NO: 4167821 - RNA, 60 nt, Human
uuucuguggauuuuccauucaaagaucuuaaucagucucuggaggaauaaagcacagaag

SEQ ID NO: 4167822 - RNA, 72 nt, Human
uuucuguguucuuuauuuagugaugcugguugacuacaagaaguauuuuuaauuagaagagaauuuaagaaa

SEQ ID NO: 4167823 - RNA, 83 nt, Human
uuucuguucccucagucacgucucaggacuuggggauguguggacaguuacauauaucaaauugaggcagcugggggaggaaa

SEQ ID NO: 4167824 - RNA, 96 nt, Human
uucuuuuuccuggacgccaggagcgccgucuagggacaauggagacauuuuucuccagcuuuuucccaguuggcucuggugcaggaaagcaaagaa

SEQ ID NO: 4167825 - RNA, 69 nt, Human
uucuuuuucucccuuuccuggaagauuggaaaccuuuagguuuuuauaagcaagaaagggaaaaaugaa

SEQ ID NO: 4167826 - RNA, 63 nt, Human
uugaaaagacaacagagaugacagacucuuauuuaucucuaggaguggaucuguuguuuucga

SEQ ID NO: 4167827 - RNA, 96 nt, Human
uugaaaaggaauggaaggcguaguagauguagauugaauuuucccugauguuuauaauuauuugcaauuacucaugucauuuucauccuuuuacaa

SEQ ID NO: 4167828 - RNA, 58 nt, Human
uugaaaauuguuguacuugauaauggagccuccuuguggggaaucagcaguauuucag

SEQ ID NO: 4167829 - RNA, 63 nt, Human
uugaaacucccucuccaucagauucugugugcccaaagaacuguccuuggaggagaguuucaa

SEQ ID NO: 4167830 - RNA, 129 nt, Human
uugaaacuggcacaaggugcaguggcucacaccuguaaucucaggacuuugggaagcucaggagggaggauccuuugagcccugcaggucgagguuucagugagcuacggcugccccgcuacacuccag

SEQ ID NO: 4167831 - RNA, 123 nt, Human
uugaaagaacgguuggugucugugugauuuuccuugagucuguucuucagugugucuucugcagcuugccaugacugccugggaaagaguagggaaauacccagagccaaaaccuccuuucag

SEQ ID NO: 4167832 - RNA, 70 nt, Human
uugaaagcaacuucugcuuucuuccuugccacaaaccuguccugaggcaaggaagcagaguugcuaucag

SEQ ID NO: 4167833 - RNA, 76 nt, Human
uugaaaguccaggacuguuucagcugaaccagagggcacacaauuugcaucacugaaacuguccuggguuagucaa

SEQ ID NO: 4167834 - RNA, 61 nt, Human
uugaaauacugcauuguucaguacuccuguuugggagucacuuagagugacgcagugucag

SEQ ID NO: 4167835 - RNA, 107 nt, Human
uugaaauauaaaugauguuugggagcaagcuacuuagggaaugcaugaauaaugcuuguugcauuccuuuuauuauaguuuauuccuagauuaucuuacccuuuuga

SEQ ID NO: 4167836 - RNA, 60 nt, Human
uugaaaucaccacuagcauuuguugaaaugccuucugucggcuaggcuggugauugucaa

SEQ ID NO: 4167837 - RNA, 103 nt, Human
uugaaaucagaaugcugggucgcuucucauucaagcaaaacagauggcccuccuugccacacuucugucaaacuugaggggaaaugauuaaaagcauuuucaa

SEQ ID NO: 4167838 - RNA, 80 nt, Human
uugaaaucauaagauguuuugaaugugagcaaauauugggaaauuuuaaaacucuauuuauggcaucuuuauggcuuuga

SEQ ID NO: 4167839 - RNA, 130 nt, Human
uugaaaucgccuggggagcuuuuaaaaaauuacugauguccaggccccaccccuagagagcucauuuaauugguccaggguggagcuuggacaccaguaauuuuuuuaaaagcuccccaggugaucuuaa

SEQ ID NO: 4167840 - RNA, 57 nt, Human
uugaaaugcagauuccaauccauacaccuagggaggggguuguguucuauauuucaa

SEQ ID NO: 4167841 - RNA, 83 nt, Human
uugaaauuaaaagauaacaguguugaggugcuuguuuccaugcauuugagaaauuuuagcugagccugugcuuuugauuuuga

SEQ ID NO: 4167842 - RNA, 111 nt, Human
uugaaauuaagcuuuugguuucuucuuguuaagaaugugccuuuugguuggcauuauaaaaugcuuaacacaugaaagcaccuucuuuugaagcugguacagugauuacag

SEQ ID NO: 4167843 - RNA, 99 nt, Human
uugaaauuuaagcuaugaaaucauugaagagauuuaauuggauuaacuuaauuuggauuagauuugaugcaauuggauugaagugaauuagaauuuuaa

SEQ ID NO: 4167844 - RNA, 71 nt, Human
uugaacaguuuggaacucuugcaacauaaacucauggaugagaguuaacacaaguaagauuccaggcucaa

SEQ ID NO: 4167845 - RNA, 129 nt, Human
uugaacccgggcagucuaacuccaguguccauauuccuaaccacugugccaaauaaugccuucuauauuaaggaggcacugcaguacagugacuagcauguaacuggaauguauuagauaacucaucaa

SEQ ID NO: 4167846 - RNA, 76 nt, Human
uugaaccuuuuuccaaguaaacaaagaagggauaaugagugaugccauccgacuuguuuacauggagaaucuucaa

SEQ ID NO: 4167847 - RNA, 130 nt, Human
uugaacuaaaugaaaaggugaccugaaaugagauuugauguugcucuuaacaguaugaugccaccaauuauauugcaauagaugcaucauuuuaaagguuuuaaauuacuuucuuugccuuuuuugucaa

SEQ ID NO: 4167848 - RNA, 93 nt, Human
uugaacucagcauucaaggccucacacaacagaugcaucuuuuauggguuuagaaaaugcuuguugagccuugacuaugugcuauguauucaa

SEQ ID NO: 4167849 - RNA, 128 nt, Human
uugaacuucagucccuccugacucgggcacccagcccuggcuuucugcucccuguguacucaaugguggucauagcagaggccguggcaggagaagcacaguggcaggagggcuggcacaagguucag

SEQ ID NO: 4167850 - RNA, 59 nt, Human
uugaagcaaggcgaaucuuguguguuccggacugaacugcaaguuuguucaugcuuugg

SEQ ID NO: 4167851 - RNA, 67 nt, Human
uugaagcagcucaggaggcuuagcuuggauaugagaaagcucagagacaccagagagcuguguucag

SEQ ID NO: 4167852 - RNA, 92 nt, Human
uugaagcucagaauggaaaacagagguuuccauugagguuucagcuaaaauaaauuuaaauuuaagccuuucuuugccaguuugugcuucaa

SEQ ID NO: 4167853 - RNA, 130 nt, Human
uugaaggaugagauauuuugcauugguaaaauguugugauuaaguuaagcuucaaaugcucaaagccuuuuaagcagcaaguguaacugaauauaauuuuaccauugcuugaugaacuagggucuuuuaa

SEQ ID NO: 4167854 - RNA, 74 nt, Human
uugaagggagaaauauguaaagaaagacaagccucuuacugaacagguggacucucauugccuucacucuucag

SEQ ID NO: 4167855 - RNA, 79 nt, Human
uugaagucaggacugugauccguaguauaucgagcuauauuagugauacaugauggguguauaguuuugaaaacuuuga

SEQ ID NO: 4167856 - RNA, 59 nt, Human
uugaaguccuaacucccaguaccucagaauaugacugaaucuggagauagggccuuuaa

SEQ ID NO: 4167857 - RNA, 69 nt, Human
uugaaguguccacugggcuuucucugcaccagguaucacaacuugcagggaaaacccaggaugcuuuaa

SEQ ID NO: 4167858 - RNA, 82 nt, Human
uugaauaaucauuauacaggcagucaagccucacugauuugaaucaguggagugggacuggucugauuauaaagauuuacaa

SEQ ID NO: 4167859 - RNA, 70 nt, Human
uugaauaguagucuuugaugucacacaagagaauacuguuggcuaacagucuggaggcugcuucauuuga

SEQ ID NO: 4167860 - RNA, 65 nt, Human
uugaaucucaucccaauguuguuuuguuguucugcaaaaguggcaagcauggagagagaggucag

SEQ ID NO: 4167861 - RNA, 60 nt, Human
uugaaugauuaaagucaucugaugaaaggugacugaagugugauguauuuaauuauuuaa

SEQ ID NO: 4167862 - RNA, 77 nt, Human
uugaaugcagaugcuuucuuaagucaguagguaguggugggugggccaccuggucaaggagagucucugcaacucaa

SEQ ID NO: 4167863 - RNA, 59 nt, Human
uugaaugcauaaauguacucugaaacggaaaccaaaauggagugcauuuuauguuucaa

SEQ ID NO: 4167864 - RNA, 70 nt, Human
uugaaugcaucuuugagcuccuuuuguccucugcauauguccacugaggagaggagggagguguguacaa

SEQ ID NO: 4167865 - RNA, 92 nt, Human
uugaaugugagguuuuucuucuuugaacuuuuuguaaguuagauucugaaacucugacuucaugaaauguucaauaagaccucaauauucag

SEQ ID NO: 4167866 - RNA, 67 nt, Human
uugaauuaagggccaauccuccagccugugcacacaguuugauaguaaugugagcucuuaauaucag

SEQ ID NO: 4167867 - RNA, 57 nt, Human
uugacagagcuaggucaacucugcuucacaggguguugguugacacuggcucuucag

SEQ ID NO: 4167868 - RNA, 70 nt, Human
uugacaugaugcauccugucaaaggaccacuuacaaaguuggaagguucauuuaugauguaacaugucaa

SEQ ID NO: 4167869 - RNA, 64 nt, Human
uugaccaagaggccacccuaugggucccagucaacccggcagacccauaauugagccuagucaa

SEQ ID NO: 4167870 - RNA, 65 nt, Human
uugaccaaugggcuuggagcauugagaccacacccuauucugaguucuaguguggcccugguuaa

SEQ ID NO: 4167871 - RNA, 77 nt, Human
uugaccagaugaggcucuuggggcugaacccugccugggagcagcuccagagccacauccaucauacagcuggucaa

SEQ ID NO: 4167872 - RNA, 58 nt, Human
uugacccuggcagcccgggcaucgucacucuccauguccaggagcucauccacgucaa

SEQ ID NO: 4167873 - RNA, 61 nt, Human
uugaccucagugagaugcucagcgaaguccaaaggcuauugcugacugucuucugagucaa

SEQ ID NO: 4167874 - RNA, 83 nt, Human
uugaccucaucucugugagauuuguauuaaggaaaacuucacagaagaagugacguuuaauucgggucuuaagaaugaguuaa

SEQ ID NO: 4167875 - RNA, 67 nt, Human
uugacuagugcccucagaccuagaacacucuagcccauaauguucucuguucauggcacuaugucag

SEQ ID NO: 4167876 - RNA, 84 nt, Human
uugacucacgccucgggcuggcucccuaccucucccaggaguucagagccugcguguggggcaguggccugggagcaaagucaa

SEQ ID NO: 4167877 - RNA, 75 nt, Human
uugacugccuggcugugcagucuuccagaagagcacggcauggacuucuggaauucuugcagccacucgacucaa

SEQ ID NO: 4167878 - RNA, 90 nt, Human
uugacuggaauggacccaaggaauacccucccuuuuugccuauugaagaggcuaagcaggagaugggugcuuuucauguuagccagucaa

SEQ ID NO: 4167879 - RNA, 64 nt, Human
uugacuguaaagcuuuucucaugcggaaauauggaugaucuguauagaaagguuuuggcauuaa

SEQ ID NO: 4167880 - RNA, 77 nt, Human
uugacuugacauuguacuaugcauaugaccccaagcuuguuacuaaauaagacuuucauaguauaguauuaaguugg

SEQ ID NO: 4167881 - RNA, 90 nt, Human
uuggaacuuaaugaauuuuagaacauauguguugaauauuugaggacagauuugcaaccucuguaauguucuaggagaaguugagcccaa

SEQ ID NO: 4167882 - RNA, 64 nt, Human
uuggaacuugagaauauuggcugugauuucaaucaggaaugagucuagcucugucuuauuccaa

SEQ ID NO: 4167883 - RNA, 82 nt, Human
uuggaagaauauggggguacagaaguucuaaccuaacaauccaggucaagucaauaaaucugacucccauauuccacuucaa

SEQ ID NO: 4167884 - RNA, 73 nt, Human
uuggaagcagagaccagguccucaccagacacugaccugcuggcaccuugaccuuggacuucccagcuuccag

SEQ ID NO: 4167885 - RNA, 84 nt, Human
uuggaagccauuugucaagguuggcagggcagagauacagccucugaguaucugaugaccuguccugccaguccuggacuccga

SEQ ID NO: 4167886 - RNA, 65 nt, Human
uuggaagcccugugauaggccagaucucauuuauagauauguuucaugaugcucacaggguccaa

SEQ ID NO: 4167887 - RNA, 82 nt, Human
uuggaauuuaauuaccuucaccagcgaauguuuggagaaccucucuccaucaauugauucugaagucagauuuuuauuccga

SEQ ID NO: 4167888 - RNA, 98 nt, Human
uuggacaaggugauuguauaggaaugacgucauuuccuugauugggcaacauaaacccugaggaagcccuugucauuucuguaaguuauauuuuccaa

SEQ ID NO: 4167889 - RNA, 61 nt, Human
uuggacagaauuuugugugugugcuguccacaagccauggggugcauggggugcuguccag

SEQ ID NO: 4167890 - RNA, 58 nt, Human
uuggacaugagcugagugggugugggugugagcccacgcaagcaucaucucuguucag

SEQ ID NO: 4167891 - RNA, 81 nt, Human
uuggaccuuguucauagcacuuguguuaugccuugugccauuaucauuuguauacacacugaguguccccacuagguuuga

SEQ ID NO: 4167892 - RNA, 56 nt, Human
uuggacgcuaaacucugugagcgugaaguucacgccucauuuauuuuuguguccaa

SEQ ID NO: 4167893 - RNA, 91 nt, Human
uuggacuacuuaguaucuaugauccuuuauaucucucaauuuucaucaugugaguaaaggauuagagaugucacccaggaguguuguccag

SEQ ID NO: 4167894 - RNA, 66 nt, Human
uuggacucuuuuucuacguagccauuugagaauugccacuuuauugggcuugggagagggagcuaa

SEQ ID NO: 4167895 - RNA, 60 nt, Human
uuggagaaagacgacugcaauuuguuucuacauguguggagugaguguguguuucucuaa

SEQ ID NO: 4167896 - RNA, 82 nt, Human
uuggagacagcagcuuccugacuguacucauuuacauggcuaaucaccaugagcagcacuugucaggcagcucuaucuguag

SEQ ID NO: 4167897 - RNA, 77 nt, Human
uuggagagcuuuccauguguacuggccagaagcagaagggagcugcuuuagguuuuuucacguggcuaagcuuacaa

SEQ ID NO: 4167898 - RNA, 87 nt, Human
uuggagauagcugaaagaaaguuuagauuaaguuuaucucucaaggcaauuuuauuagauagauuaaguuucuguucauaucucuga

SEQ ID NO: 4167899 - RNA, 66 nt, Human
uuggagauuugaguagaacuuuugcauaaagacuugauuuauuauguaauuuguuugcucuuccaa

SEQ ID NO: 4167900 - RNA, 75 nt, Human
uuggagcagaagcugaagccggaucaaaaaguccuuaagaaagcugggcuugccuacucgcuucagcagcuccag

SEQ ID NO: 4167901 - RNA, 69 nt, Human
uuggaggacagugugagaugauugaggagcaaaugccuuugcccugaauuuuuuaccuagucuuuccag

SEQ ID NO: 4167902 - RNA, 62 nt, Human
uuggaggcuucuggaaagccuggcaguugguggagugcugcuggagcccaggcggccuuuga

SEQ ID NO: 4167903 - RNA, 76 nt, Human
uuggagucagaagguaugaauuggaauacuaguuguacugacugugugacuuucaauagcauacuuuugcucucaa

SEQ ID NO: 4167904 - RNA, 79 nt, Human
uuggaguccuuagcacagccaaaauagagcauggaggggaaaaaauccuguagguucuggcauugcucaguaaacccaa

SEQ ID NO: 4167905 - RNA, 58 nt, Human
uuggaguuccuuugaaaggcucugcuuuuagucagaguagcuauuuugggaacucgaa

SEQ ID NO: 4167906 - RNA, 58 nt, Human
uuggaguuggggcuuccuugccugcuucacaggucaggcugagcucucccagcuucag

SEQ ID NO: 4167907 - RNA, 83 nt, Human
uuggauaaaaggacaaaaugguacagaauguggcagucacuguuaguugucuauucaauauccauuucuucuuuacaaaccaa

SEQ ID NO: 4167908 - RNA, 87 nt, Human
uuggauagaggggugcagguggggaacagggguaccaagggagaucauggaauguuuccccagccugcaaucuccccuccuaaccaa

SEQ ID NO: 4167909 - RNA, 76 nt, Human
uuggauuuuccugaagaacgaagucauguagucugagucaaagcagaauacuugacauuucuuuaggguuauuugg

SEQ ID NO: 4167910 - RNA, 92 nt, Human
uuggauuuuuauguagugugagguagcagcccagcuuuacuuucuucuaauuggaaagcuguuuuuuccucaccacuuaacuaaauaaccaa

SEQ ID NO: 4167911 - RNA, 59 nt, Human
uuggcaaaaccagguagcaaaggagacauguguuaugcagagucccauccuggugccag

SEQ ID NO: 4167912 - RNA, 72 nt, Human
uuggcaauuuguaucuucuaauauuaucuccuucuaaccauacuggggauaauucuagcagauacaggcuaa

SEQ ID NO: 4167913 - RNA, 64 nt, Human
uuggcacucugcaauguggcaagaacauagucacuggcuuguuccagcucauauugaggaccaa

SEQ ID NO: 4167914 - RNA, 75 nt, Human
uuggcacugaccaaagaaguccagugagcaucccuguaccugcucacagggagggaggauucuuugaagugcuag

SEQ ID NO: 4167915 - RNA, 58 nt, Human
uuggcagagggaccagccuacaggaacuacaccugcagaagagcucagccacugccag

SEQ ID NO: 4167916 - RNA, 62 nt, Human
uuggcagcagagaaauuaaacuucugccauugguuuggggauuuguuuuucuguucagucaa

SEQ ID NO: 4167917 - RNA, 78 nt, Human
uuggcagccuggaagagcucauauaugguaacuauagugauuauuauuaccaugaucaggcucauccuuguuugcuaa

SEQ ID NO: 4167918 - RNA, 56 nt, Human
uuggcagugucugcaaaauggaauauuuaauaccuaugaaaugcacucacugucaa

SEQ ID NO: 4167919 - RNA, 64 nt, Human
uuggcauuacaggaacuggauauaaugugagauuguuuucuucauuaauuuuuccagaugucaa

SEQ ID NO: 4167920 - RNA, 68 nt, Human
uuggccaacaaaaacagcugcuucaguacuugaacccaugguuuuggcuccguagcucuuuuagucaa

SEQ ID NO: 4167921 - RNA, 55 nt, Human
uuggccagugaaccaggccuggcuucaucccacccaaggcuuggauuguggccaa

SEQ ID NO: 4167922 - RNA, 76 nt, Human
uuggccauagguauucucuuguuagugguuuggaacagcauuuuucagagucuaugcaacagaauucuguggucag

SEQ ID NO: 4167923 - RNA, 79 nt, Human
uuggcccagugccuggcacccggcgugcccagggccgugagcugggcaugguccugguagcggugugcuuccuggccaa

SEQ ID NO: 4167924 - RNA, 65 nt, Human
uuggccggugggugaagaguacagagggauguuacuauacuuaauuugauucuuccucuccccag

SEQ ID NO: 4167925 - RNA, 79 nt, Human
uuggccugcgggucucgugagcuggaagaaaucaggaaagggaagcugagcauuuaauccuacauagaucacaggcuaa

SEQ ID NO: 4167926 - RNA, 76 nt, Human
uuggccugugagccuuaguuuauagauucucaccuguauggaacuauguaaagagaaggcuuauaaaguggcacaa

SEQ ID NO: 4167927 - RNA, 64 nt, Human
uuggccuuugcugggcuguugagaaugagggcaacuuucccugugaggacacccggcuggccaa

SEQ ID NO: 4167928 - RNA, 95 nt, Human
uuggccuuuggaugauaaugaugugucaguguagguucaucaguccuaacaacuaaaugaaacuaaacuacauaaguuaaacuaaagcuugccaa

SEQ ID NO: 4167929 - RNA, 65 nt, Human
uuggcguauaguguccuauuggcagguuucccauguguacuuguaaguggaagguuauaugcuaa

SEQ ID NO: 4167930 - RNA, 74 nt, Human
uuggcguauuaagggcaaggguugaagauaagauagcaaugucuacuuuauauuuuugguccugacuaugcuaa

SEQ ID NO: 4167931 - RNA, 60 nt, Human
uuggcuaucacuaggcagguuucccaggaugucacccuggucucagccugugagagcuga

SEQ ID NO: 4167932 - RNA, 57 nt, Human
uuggcucaggaccccugugacugccagggcacuggucccagcacugccugagugcag

SEQ ID NO: 4167933 - RNA, 56 nt, Human
uuggcucccacuaacuccagcaguugcacuuugccuggaacacaguaggcagucaa

SEQ ID NO: 4167934 - RNA, 98 nt, Human
uuggcucgacuggguaacuuguucuguuuacucuuguuuugggcagcaccgauugcccuagggcuaagcaggacugccaccccagacucgauugccaa

SEQ ID NO: 4167935 - RNA, 70 nt, Human
uuggcugaagauaagugaagaggcugacuagcaauggccacuagccuacuucucuugcauucuuuaucga

SEQ ID NO: 4167936 - RNA, 130 nt, Human
uuggcugguugaaaggaacacuugauucuuugucagaaagcagccuugcgcuucuaaggggucugcugucugaaagaagccuucgaggcucgcagaccuggggaagaacucaaccugccuucagcccaug

SEQ ID NO: 4167937 - RNA, 71 nt, Human
uuggcuguagggcauuaauaauauuauguacuauuagugcguuaauaacauuaauaaugcccuauagccaa

SEQ ID NO: 4167938 - RNA, 59 nt, Human
uuggcugugcagaucuugccuacuucauaaagaauuugaaguagguuacagccagccag

SEQ ID NO: 4167939 - RNA, 100 nt, Human
uuggcuguuucucccuagcuaggcugggagccugaggcuaggggcuugguaccacuggcaccaggguuuccagccuuggguagcucaggagacggcucag

SEQ ID NO: 4167940 - RNA, 70 nt, Human
uuggcuucauugaucucacuuucuucaaaauacuuuuugaucauuacauugaaguggucaaugaaggcag

SEQ ID NO: 4167941 - RNA, 71 nt, Human
uuggcuucuucgcacagcaguagucuucuaaaucucauuuuggacuuugcuguaaagagaagaaagcacaa

SEQ ID NO: 4167942 - RNA, 55 nt, Human
uuggcuuggagaguugaaauguuaauuugaugugcacaucuauucuuaaagccaa

SEQ ID NO: 4167943 - RNA, 129 nt, Human
uugggaaaaggauauucuuguuuuaggaauccugacuccacuaaucagcaaauguuuaucaaauacuuauguaugaaacauucagcuggguggagcagaagauaccgaccuauaaggaaagcauccuaa

SEQ ID NO: 4167944 - RNA, 83 nt, Human
uugggaaauaagacuuuaaguccuaucugugcgacuuuaaaugagugaugcuagucuugggggcuuaaguagcuuauuuacaa

SEQ ID NO: 4167945 - RNA, 85 nt, Human
uugggaacagaggucaccuuuguaucuuccacaaagcuuugcucgguaagaaugcauaaagguacucaauuuauacuguuccuag

SEQ ID NO: 4167946 - RNA, 63 nt, Human
uugggaagaagggggagaagggugguaaccaggggcaacccuccuuucucucccucaucccga

SEQ ID NO: 4167947 - RNA, 66 nt, Human
uugggagauucauugagccaagauguuauuuuggaaggaucuuugagcuuuaagugauucucucaa

SEQ ID NO: 4167948 - RNA, 83 nt, Human
uugggagcgaggcagggucagcuggcugucaggggcugaaagaggcuuggccacuggcauccagcugccaucccagcucccaa

SEQ ID NO: 4167949 - RNA, 59 nt, Human
uugggaggcugagguuggcagaucaccuaaggucaggaauuugagaccagucugcccaa

SEQ ID NO: 4167950 - RNA, 58 nt, Human
uugggaguagcccagguucagggguuguuaaugcccugggcauggguggggcucccag

SEQ ID NO: 4167951 - RNA, 77 nt, Human
uugggaguugggauucuuagucugaaugggcuuguuuucagaaucucucagaacagcucucagauauccacuaacaa

SEQ ID NO: 4167952 - RNA, 124 nt, Human
uugggcaucacugaauugcauguggcuugucuucaggguucuuguaccuugaaauuaucucucuuaauucccagguucucagaaggcagucacaucuggacagcauuccuugacuacgcaucaa

SEQ ID NO: 4167953 - RNA, 81 nt, Human
uugggccagugacccuuggaguaggauguauagcaacuaaagaaacucauacauuacugagaaggguguaaauuggcucaa

SEQ ID NO: 4167954 - RNA, 64 nt, Human
uugggcuagauaauuauuugugaauagggagcuuuccugugcauuguaggauguuuagcagcaa

SEQ ID NO: 4167955 - RNA, 77 nt, Human
uugggcugagacuuauaaccuggauucuggcacuaaccacaguuagagccauggacgaguuaguuacccucgcccag

SEQ ID NO: 4167956 - RNA, 79 nt, Human
uugggcuuggaggucuuacccagggcuauuaauguuuuguaauugaaaccauggauuuggaugagauuacuuaacccaa

SEQ ID NO: 4167957 - RNA, 65 nt, Human
uugggcuuggucgguuugaggcuuuuucucucccauugacaauugucucgagaccugacccccaa

SEQ ID NO: 4167958 - RNA, 65 nt, Human
uugggcuuucaaaaguauuguuucugaucugggaucaagaacuuauuuuggaaauuagcacccaa

SEQ ID NO: 4167959 - RNA, 99 nt, Human
uuggggaggucgaggccaggcucccacuuggcuuaaagggacauuuucagacauuucuuucugucacuuggggugucuaugccucucaaauuucccuaa

SEQ ID NO: 4167960 - RNA, 85 nt, Human
uugggggaaaaaaugaucuguggaaauuuccugaggcaaacuaugaaguuguuucuugauuuacagacuugucuuuccuagucaa

SEQ ID NO: 4167961 - RNA, 90 nt, Human
uugggugcccugucugugccaggccugggcuggguaucaggaaacaccuuccugccccucaaggccuggugcgcacauucggauacccaa

SEQ ID NO: 4167962 - RNA, 64 nt, Human
uugggugcucugcuucccugcacucacagauauuucccagggucagggaggcagugucaccuga

SEQ ID NO: 4167963 - RNA, 129 nt, Human
uugggugggaaguggcagaaugguuaugcacaaggagaaauagauauugacauacugaggaauacuuagauucgucgauuucucaguguccuucguucuuguuguuucauuugucuugauuccccaaaa

SEQ ID NO: 4167964 - RNA, 87 nt, Human
uuggguuaacuagauucagcugggaaguucucgcuuggggacuuuuugugacugcaaguugaagucccaguugggcuguuuuucuaa

SEQ ID NO: 4167965 - RNA, 97 nt, Human
uuggguucucugcccaggcccuuccucagaagaaccccuagauuaugguuuuagccagaauuuaggguuuuguggauugggcuuaggauggacucag

SEQ ID NO: 4167966 - RNA, 74 nt, Human
uuggguuuaguuggugcucauugcagccacccauacauguguguucagaugcugagaaccacgacugugcuuaa

SEQ ID NO: 4167967 - RNA, 73 nt, Human
uuggguuuugauacaugucuaaucagacugauuucugucacauauagaaauuuagauacuguauuaaaccuag

SEQ ID NO: 4167968 - RNA, 87 nt, Human
uugguaagucacugaacuaaaugauauuuugguuuccucaacucuaacauggggaagauaaucauaucuuuuuuaauggguuaucag

SEQ ID NO: 4167969 - RNA, 60 nt, Human
uugguacaaugugcuagguaggcacuuguucacuuauucagcaagaccaccauguaccag

SEQ ID NO: 4167970 - RNA, 74 nt, Human
uugguacuagccuaaauaugacuauaccaacuuaccaauauaauccgguacuucaauuauuuuggcuaugcuaa

SEQ ID NO: 4167971 - RNA, 59 nt, Human
uugguagaauuuuaauaauggagauguuaacaugcauuaugcugauaagauucuaucag

SEQ ID NO: 4167972 - RNA, 72 nt, Human
uugguagcagaaacuggagagcugccacagaagagugaucuccugggcuugcuccuccagcugaagacacag

SEQ ID NO: 4167973 - RNA, 68 nt, Human
uugguagucuguugggcaccauuugggaaagaaauaaauuggucucaguguagcagacuuguagccaa

SEQ ID NO: 4167974 - RNA, 119 nt, Human
uugguauauucagauuuuuggauaacagacugacaguuuuauuugcauaauuauaaucagcauuguacauagaaaggauacagcugcuuuuuguuaaauccacacuuucuaaaugucaa

SEQ ID NO: 4167975 - RNA, 95 nt, Human
uugguaucuuaaauauaaccucuauauaacuuguuuuucuuuaguguucaaaugguaauguauacuugagguagcaacuuaaggguuugaaccaa

SEQ ID NO: 4167976 - RNA, 93 nt, Human
uugguauucagaguuuggggauuuuggaauugcucauaagagagaacaugagucugucucagucaauuucaccacuaaauaaaugaguuucag

SEQ ID NO: 4167977 - RNA, 61 nt, Human
uuggucacacaauacaaaggaaggcuacaagaagucaaaugcugucauuuguugugacuag

SEQ ID NO: 4167978 - RNA, 65 nt, Human
uuggucacagggaugagcagguaucuaagacugggcugaugauagaacuccaucccucugaccaa

SEQ ID NO: 4167979 - RNA, 57 nt, Human
uuggucacuaaauaucugcagcauguuuuaugacaugcaccagagcagggugcccaa

SEQ ID NO: 4167980 - RNA, 64 nt, Human
uuggucaggcauguggcgcaugcuauuccugagcaggucgggcagcuggugcuugccuggcuaa

SEQ ID NO: 4167981 - RNA, 58 nt, Human
uuggucauauuaauucaaucggugaauaaccacaaauugagcuaguaauauagaccag

SEQ ID NO: 4167982 - RNA, 61 nt, Human
uuggucccugcuaaaucugacugaaaacuguacaguacacagaaauuguguagggauucaa

SEQ ID NO: 4167983 - RNA, 69 nt, Human
uuggucuuugacuuuguuugcaagaauaagugacuuuaagccuuuugccagcacaaguuaagagaucaa

SEQ ID NO: 4167984 - RNA, 130 nt, Human
uuggugacaaaagguaaagcuuucccaccuuccuucugucucauucaucuauccaggauguuuauaccuguagauuagugauaugugacuagaccaggauucggggauuugcaaugcugaccguuaaaaa

SEQ ID NO: 4167985 - RNA, 63 nt, Human
uuggugcaaauuccuguaagagauucuuuuagucauauauuucucaaggacuuugggcacuaa

SEQ ID NO: 4167986 - RNA, 59 nt, Human
uuggugcucucuaugacaugaacccaaucauaagccaggggacaaagggagcccaccaa

SEQ ID NO: 4167987 - RNA, 55 nt, Human
uugguggauccuccugaaagcagaccuaaugacuaacagcccagggugcuaccaa

SEQ ID NO: 4167988 - RNA, 114 nt, Human
uuggugguuauaaaauaccuuaagcucuucagauaaaagggauauuagugcaaaauacuaauaagcauuauuauuauaaguggucugagcacuaagguguuugcuuaguacugg

SEQ ID NO: 4167989 - RNA, 64 nt, Human
uugguuaguaacuaagagaggcacccuuggcaauuucacaaagugucuaacugguuacuucuga

SEQ ID NO: 4167990 - RNA, 80 nt, Human
uugguuauugcauuguaucuaauaauucugaugauaggauugaaguccuguuuguuggcuauugacaguguagaggucaa

SEQ ID NO: 4167991 - RNA, 81 nt, Human
uugguucauuauuuuuuagucuuuugaauuguuuagucauccucagcugacuagauggcuuucugagguauuuagaaccag

SEQ ID NO: 4167992 - RNA, 58 nt, Human
uugguucuggaggcaacuaaccuaguucaugaguagcaugagcuugccuaagcucuaa

SEQ ID NO: 4167993 - RNA, 55 nt, Human
uugguuguuuacacugcagaauuggggugaguuccagcgaagguguggcaauuaa

SEQ ID NO: 4167994 - RNA, 84 nt, Human
uugguuuccuugacucuguuugguaaaggcuguccuaauuguaugcaagagauggcagacacaggcaggcagaggagagaucga

SEQ ID NO: 4167995 - RNA, 64 nt, Human
uugguuugaguccuuacaggcuagucuaggauuuuucuuagaaagcaguugugggggcucccaa

SEQ ID NO: 4167996 - RNA, 89 nt, Human
uugguuuuaguuuuuuguuggguagaacggaaaacacagggcaagauccuaaagccccacaguuccucauccaggaaagcgaaaaccaa

SEQ ID NO: 4167997 - RNA, 69 nt, Human
uugguuuugaaauagcuuauugucuacauguaagaauuaagcaaagacuucggcuguggacaagauuag

SEQ ID NO: 4167998 - RNA, 80 nt, Human
uuguaaaccaauucuuaaaguagaauacaagaccugcaaaaacagguaugcauuuuuacuuuagggaaagagggauacga

SEQ ID NO: 4167999 - RNA, 105 nt, Human
uuguaaaggauguuugaugagauugugaaauauuuaaaauguggucaguaaagucuguuucauauaacuggauauuuucaaaauuauauuuucuauuuuuuuuaa

SEQ ID NO: 4168000 - RNA, 60 nt, Human
uuguaagacauggaauguuggagcuggaaggaaacucccaguucauccccauguuuucaa

SEQ ID NO: 4168001 - RNA, 59 nt, Human
uuguaagcacagaaucucuccuuacgugacugaccuucaagagacccuguagcuugcag

SEQ ID NO: 4168002 - RNA, 76 nt, Human
uuguaagcaucugucucuucugcacuuuucagugaggcuggaaagauggagauguugaaggacuggagcuuugcag

SEQ ID NO: 4168003 - RNA, 58 nt, Human
uuguaagugcuuguuagaaaaucccuggaggcagagauaguucuggauguacuuauag

SEQ ID NO: 4168004 - RNA, 66 nt, Human
uuguaauguucauugauuaaaugaaugaguggacaucucauucauuuaauuaaugaacucgugcag

SEQ ID NO: 4168005 - RNA, 56 nt, Human
uuguacaaauaggaaccucugaugucauucuucaacguuuguuccuguguguacaa

SEQ ID NO: 4168006 - RNA, 56 nt, Human
uuguacacacaggaacaaacguugaagaaugacaucagagguuccuauuuguacaa

SEQ ID NO: 4168007 - RNA, 55 nt, Human
uuguacagacccugaaaagcucccuuggcuauuugauccuuucaguucugugcaa

SEQ ID NO: 4168008 - RNA, 56 nt, Human
uuguagaguacacaacacuuggagccugcuauggcuugaauguuuguccucucuaa

SEQ ID NO: 4168009 - RNA, 60 nt, Human
uuguagauggcuuauuucugugccaaagugucaauacuggaguagaagugugcuauacaa

SEQ ID NO: 4168010 - RNA, 129 nt, Human
uuguagauguucuuuaucaguuuuaggaaguuuucuucuauuccucauuuguugagaaccacaaaacgcaggcuggugguuuucucugaggaaggagagaaggagauggaauugggaagaagcaaaaga

SEQ ID NO: 4168011 - RNA, 85 nt, Human
uuguagccagggaccccugacucauuaggacucaagacaccuaccugguuucauagccuucuaaugaguugucgccggguugcaa

SEQ ID NO: 4168012 - RNA, 62 nt, Human
uuguauauauuuacgggguacaaugugaucuuuugaucaauguacauuguagaaauauucaa

SEQ ID NO: 4168013 - RNA, 69 nt, Human
uuguauguaaaguuauagugggcuugcuuagagauuuuucugcuaaguuacacuuaacuuacuaggcaa

SEQ ID NO: 4168014 - RNA, 59 nt, Human
uuguauuaguaagucagcugcuugguuucaugucaccauagccugacuauucuggacaa

SEQ ID NO: 4168015 - RNA, 90 nt, Human
uuguauucggucagugcaaaaguaauugugguuuuugccauuacuuucaauagcaaaagccacgauuacuuuuguaccaaccuaauauaa

SEQ ID NO: 4168016 - RNA, 112 nt, Human
uuguauuggaagggaagagggguuugaggucaauucuguuuccugggguuuucacgaauuucggggcccacaguaggcuugccaacuuuaacuuuugccuaacacuuuacga

SEQ ID NO: 4168017 - RNA, 78 nt, Human
uuguauuuaucugaagacauaugauauggugcaucauuucacaugcuuauuugcuaucuuauaucuucuuuggugcag

SEQ ID NO: 4168018 - RNA, 69 nt, Human
uuguauuuugcaacacaggcuacuucacguucuauuuuaagcuugaaguuguuaagguugccauuacag

SEQ ID NO: 4168019 - RNA, 63 nt, Human
uugucaagcaccaugauaagugguggaaaauaaugauucugacacuugaaugguguuuuacaa

SEQ ID NO: 4168020 - RNA, 58 nt, Human
uugucaaugcccagauuaaucacaggacagauacucaggaagauuuggucauugauaa

SEQ ID NO: 4168021 - RNA, 130 nt, Human
uugucacacacuggaaaacgagcgaguuucuauuucaggcuguggggugaguuagcgucggcuuggccggcugucuggcagaggcuccgauucaucaaugacagcuaagugugguuugcugugugucagg

SEQ ID NO: 4168022 - RNA, 71 nt, Human
uugucacauuugcuaucccacuccuuagggcgucuucucuuaauaaccaggcaguggugguaacaugucaa

SEQ ID NO: 4168023 - RNA, 73 nt, Human
uugucagcaaagugcuuauuguuuuaaaccauugaguuuuggggugauuuguuaugcagcauuguuguggcaa

SEQ ID NO: 4168024 - RNA, 64 nt, Human
uugucagcuggcagguuaaauucuaaauuagacgcaacaccugaaugagcaugcgagcugagaa

SEQ ID NO: 4168025 - RNA, 75 nt, Human
uugucagguacuuuuggaguauuuucagucuugaccaagucugaaguuaguuaugccuaaaagauuccuggacaa

SEQ ID NO: 4168026 - RNA, 89 nt, Human
uugucaguuauuuugugcuauacacagauggccaauuauucagagaacuugauaaagcaauagauuguguaaugcgaaaauaaagacaa

SEQ ID NO: 4168027 - RNA, 59 nt, Human
uugucaucaagaugcauuggucacauucacugagugacacuuugggucuugggugauaa

SEQ ID NO: 4168028 - RNA, 62 nt, Human
uugucauucugccaauuuguuaguacauaaagaucagcugaaaacaaauuggcaaaaugcaa

SEQ ID NO: 4168029 - RNA, 76 nt, Human
uugucauuggaaucucuuugucccugaguuucagaagcaaauagugaagcuuugggcagaagaggauucaugggaa

SEQ ID NO: 4168030 - RNA, 67 nt, Human
uugucauuuccuuggcauugcuagagauggguugaagaauagucuggcaguaauaggggagagacaa

SEQ ID NO: 4168031 - RNA, 77 nt, Human
uuguccaagacugggagcagagagcggaagaugcaggaaaaacugcuagagucaaaucucugcccccagacugacag

SEQ ID NO: 4168032 - RNA, 59 nt, Human
uuguccagcugcagcugggcagaacucaaggaguuguggucccccacugcagcugacaa

SEQ ID NO: 4168033 - RNA, 73 nt, Human
uugucccugcuguccccugagccuggacaaucucuguccuccugauaugcuuagugacagccuuuagggccag

SEQ ID NO: 4168034 - RNA, 73 nt, Human
uuguccuggguggaugcuucauuguuaccaugaagaauugugggucaggaagugagcauuuaucccagcauaa

SEQ ID NO: 4168035 - RNA, 69 nt, Human
uuguccuggucaggguaguguugcagauugagucagaugaugucugagaacaugcuuugaucauugcaa

SEQ ID NO: 4168036 - RNA, 65 nt, Human
uugucggggucacucagaagcucaucuuuguuuggccauuuguugggcuaagagugaccaggcag

SEQ ID NO: 4168037 - RNA, 69 nt, Human
uugucuauggcuguguucaugcuacaacagcagcaguauguaguuguuacacagaccauagucccacaa

SEQ ID NO: 4168038 - RNA, 64 nt, Human
uugucucugcucaaaggcuggggaggcauccucugugugugcucccuugccagaggggaagcgg

SEQ ID NO: 4168039 - RNA, 60 nt, Human
uugucugaaccaucucccuggcccagcacccgggauuuauccugggagguguucagagaa

SEQ ID NO: 4168040 - RNA, 65 nt, Human
uugucugaaggccugaccuacauugccccuaggauauaggaagaaggacaaggcauuucagagaa

SEQ ID NO: 4168041 - RNA, 58 nt, Human
uugucugagagauggcagaggugggugaggcaccacagcucugucuuucucuuaguaa

SEQ ID NO: 4168042 - RNA, 97 nt, Human
uugucugauguauuuaaauuuauucacagaaaauucauuuauguggaagaauuuggggauaaauuuuugguagauacauagaaaacagagcagacag

SEQ ID NO: 4168043 - RNA, 77 nt, Human
uugucuguccucuugcuuggccucuucucagggugggcucugcucucccuccccagggccaaaggauucagaggcaa

SEQ ID NO: 4168044 - RNA, 68 nt, Human
uugucuuucaguuuuauuguacugcuauccugaaauagauguuagcucagagaacugguaugugacag

SEQ ID NO: 4168045 - RNA, 80 nt, Human
uugucuuuccugaggaguauggcuguaguuacagauacauaucuaacagaaagcagucauaucauuccaacagggaacag

SEQ ID NO: 4168046 - RNA, 68 nt, Human
uugucuuucuugguauaaagcagggauauccaaucuuuugacuucccugccuauauuaaaagaagcaa

SEQ ID NO: 4168047 - RNA, 69 nt, Human
uugucuuuuuguagaacugauaucgaugcugagaucuaaaguagaagaagucagcccuacagagagcag

SEQ ID NO: 4168048 - RNA, 75 nt, Human
uugugaauagucagcauuuuguuagaaucagcccguuguguuaagggcacuauaauugguacugauuauguacaa

SEQ ID NO: 4168049 - RNA, 57 nt, Human
uugugagacucguaagagaagggcuucggucagcugccuucuccacagggucuccgg

SEQ ID NO: 4168050 - RNA, 69 nt, Human
uugugagcaggaaggagcacaggacccugacauuugaugagauacagcaguuugugauccuagcagcaa

SEQ ID NO: 4168051 - RNA, 79 nt, Human
uugugagguguuguuuucuuauuguuuauuaucaagguaaaauacacaauaaacugguaggaaaacaguaaauucagaa

SEQ ID NO: 4168052 - RNA, 88 nt, Human
uugugauaguucacugagaaugaugauuuccaauuucauccaugucccuaaaaaggacaugaacucaucguuuuuuauggcugcauag

SEQ ID NO: 4168053 - RNA, 73 nt, Human
uugugaucccauuuccuaguacaucaucaauguccuacugugcuccaugauccucuagaaaaggguaucacag

SEQ ID NO: 4168054 - RNA, 82 nt, Human
uugugauuuaauuccugcauacauaaucgagaccaguaauaccauuagugucucaggacuguuguggggauugaaugaauaa

SEQ ID NO: 4168055 - RNA, 70 nt, Human
uugugauuuaucuaugauaaacggauggugaagugaauuuccucauuugauuacuaaagauaauucagaa

SEQ ID NO: 4168056 - RNA, 61 nt, Human
uugugcacuggaauuaccuuuaucaggggugcacucugcacacaaguaauuucaugcucag

SEQ ID NO: 4168057 - RNA, 63 nt, Human
uuuucucccucuauuggcuucuguuuagaauacaguggugagcucugaaauagggaaagagga

SEQ ID NO: 4168058 - RNA, 57 nt, Human
uuuucucuuuccguaaguuaguggauucuucugugucuauuccaaggguagagaaaa

SEQ ID NO: 4168059 - RNA, 71 nt, Human
uuuucugacuauacauugaauguuaagguaauccuacaauuuauacuuugaauuuaaguguauacagagag

SEQ ID NO: 4168060 - RNA, 62 nt, Human
uuuucugagcucagugacuuaccaggaagagacacuugugugauguaacugauuucagaagg

SEQ ID NO: 4168061 - RNA, 56 nt, Human
uuuucuggaaaauaauacuuuuuuugaagaaauuuaggguauuaguuuucagagag

SEQ ID NO: 4168062 - RNA, 68 nt, Human
uuuucuguaggacuucugccaacucuccuguaaggaggcaaagucucuggaaguaaaccugcaggggg

SEQ ID NO: 4168063 - RNA, 63 nt, Human
uuuucugucagcaaagugcaaauaauguaccccguuucccuuauugccuuggcugccaggaaa

SEQ ID NO: 4168064 - RNA, 68 nt, Human
uuuucugugugaaugagagaagggaguuaugucuuuuuguuuauucuaucucuauucccacgaggaaa

SEQ ID NO: 4168065 - RNA, 95 nt, Human
uuuucuuaguuuauuuguuguuugguaauauggggguaguuauucuuaaacuauuuugacugcauuacagaacagagaaaaauaaauuuggaaaa

SEQ ID NO: 4168066 - RNA, 85 nt, Human
uuuucuuccucuccuugacccuucccuucaguuggcugggcuuuucaguucauugacucagggaaggggaaaugaagagagaaaa

SEQ ID NO: 4168067 - RNA, 58 nt, Human
uuuucuuccuggauuuuggcauuauauuuaauggugaaaaauuaaaacaggaagaaga

SEQ ID NO: 4168068 - RNA, 65 nt, Human
uuuucuuggaguggcuguccuuuuccucuuagauuauuagaagccagcaguuccucuuaagagaa

SEQ ID NO: 4168069 - RNA, 62 nt, Human
uuuucuuggcacagauauuuacagggaaaguaaugucugagugaucauuuguguaaaggaga

SEQ ID NO: 4168070 - RNA, 58 nt, Human
uuuucuuggcuacugugagauuccagaggagggagauuacuuuggauggucaagaaag

SEQ ID NO: 4168071 - RNA, 55 nt, Human
uuuucuuugcaugacagugcauguauauagacauacacuguuuuuggaaagaaga

SEQ ID NO: 4168072 - RNA, 94 nt, Human
uuuugaaaaaaaugaaguucucaauaaucauguugcaaacaaacuuuuagaaaagacauaauuauaaauggugggcugcauauauuuuucaaga

SEQ ID NO: 4168073 - RNA, 71 nt, Human
uuuugaaaacugauaaggaaagggagagaaucaagcaugcauucuacuuuucccuauacaguuugucaggg

SEQ ID NO: 4168074 - RNA, 122 nt, Human
uuuugaaacagcaaauggauuuggucuguucugaaaaaacaaucuguccuguggcuuguuuggaauaacaucuagaguugcuauagaaggauggaggcagaugacccaugucugauuuggaa

SEQ ID NO: 4168075 - RNA, 130 nt, Human
uuuugaaaccuuuauuaucuauaucugugaugaccucaaaguucaaguaguguuacauggaaaauguuaguuuuauacugugcaagacuuacuuuaauacagguucacucuuuggauucuguuuguaaaa

SEQ ID NO: 4168076 - RNA, 89 nt, Human
uuuugaaauaaaaguaaguaaaguuucuguucgcuuuaauaauuaucaaaauuaaaaggguaagcagcaacuuacagcuuguuacagga

SEQ ID NO: 4168077 - RNA, 104 nt, Human
uuuugaaauuucauuuuaaugucaaaucaguuuuaucagagggaauccugauuaguugcaguuguuuguuuggggauauuuauugacuuuaaaagaaaacaaaa

SEQ ID NO: 4168078 - RNA, 79 nt, Human
uuuugaacacuuaaagauagauggcauuguacccagagccagcugguacaauggcaucuaucuauaauuguguauaaag

SEQ ID NO: 4168079 - RNA, 78 nt, Human
uuuugaacuaaggucuaugaggccagaacaucuuggcgggcgcugcaugucaucugguuucuaggcaguauuuuagaa

SEQ ID NO: 4168080 - RNA, 59 nt, Human
uuuugaacuguggaagaguauucugcaucugcaggaauuacucaucugugguauugaag

SEQ ID NO: 4168081 - RNA, 84 nt, Human
uuuugaagaucauuagcaagucacuauuuuauguuacaaccaagcuguaccuaauagaaagucuugcugauucgaugauuaaga

SEQ ID NO: 4168082 - RNA, 79 nt, Human
uuuugaauccaggguuguuugagcuagaagagccucuagagcuuuugauauagcaagaaguagcucuggauuaacagag

SEQ ID NO: 4168083 - RNA, 88 nt, Human
uuuugacagcaaaauagugguuuggggccucauuuauuauuugaauauuuauuuggauuuccagacagcuuaauuuauucucucagaa

SEQ ID NO: 4168084 - RNA, 104 nt, Human
uuuugacagugucuuauuuaugugucucugaguuuguguaugaguguggguaaguguagguacugcacaagucagaguaacauuuaagguuaauaugguugaaa

SEQ ID NO: 4168085 - RNA, 104 nt, Human
uuuugaccaaugggacauuagcaagcuugauaccaggagaggcacuugcaauggggauucuccuuugcaaaacuccuuggagcugagcugcaugcuaugcgaaa

SEQ ID NO: 4168086 - RNA, 101 nt, Human
uuuugacugauugugacagcuugaguuuuggaugaagugccaaccucuaauuuuuauucccuuggcuacuguaaacuaaagcuuguaauuuuucuucaaga

SEQ ID NO: 4168087 - RNA, 75 nt, Human
uuuugagagacaggcaauauauaaauuaugagcucaugguuuuugaguuuaguauguaguguuuguuuuucugaa

SEQ ID NO: 4168088 - RNA, 95 nt, Human
uuuugagcaugugaggggauggcguggagaagguuggguucaucaugugguuucuuggcacuauuuuucuccaguuucucccuucagugucaaag

SEQ ID NO: 4168089 - RNA, 57 nt, Human
uuuugagggaaaucagcugaauguugaauaucagcauucaucugauuaaccucgaag

SEQ ID NO: 4168090 - RNA, 75 nt, Human
uuuugccuaaaaaacagcacaguauguuugacuuucagaaaauaaacauccaucugagcugucuuuucagcagaa

SEQ ID NO: 4168091 - RNA, 105 nt, Human
uuuugcuccagcagggcacaguugccucugccagaguagagaagguuaacaacagaacugggcuuuggcugggcaaagggaggugugucgguuagggagacaaga

SEQ ID NO: 4168092 - RNA, 64 nt, Human
uuuugcucuuugugcaaacccuagaaucacaaacguagauucuuaguuucauagaauugcagga

SEQ ID NO: 4168093 - RNA, 58 nt, Human
uuuugcugagggagagccucacugggguguccugaugcuggcaguuuccucaccgagg

SEQ ID NO: 4168094 - RNA, 71 nt, Human
uuuugcugguuuaucucuauuaguugguuuuccucuucagucaccuuucuaaaaguggauaagcuguagga

SEQ ID NO: 4168095 - RNA, 75 nt, Human
uuuugcuuagauuauauugaccaguacaauugguacaauuuugccuuuguuucaugguucauauuugaggcaaaa

SEQ ID NO: 4168096 - RNA, 120 nt, Human
uuuuggaaaagaacuuacacuaccugauuucaagacuuucuguaaagcuacaguaaucaagacacuacuguuggcauuaagauagucauguagaucaguaaaacauacuagaguccagaa

SEQ ID NO: 4168097 - RNA, 64 nt, Human
uuuuggaugcuuaaaucguuugaauaauuuggagagacaagauucaaacaguuugacaccagaa

SEQ ID NO: 4168098 - RNA, 73 nt, Human
uuuuggcauuuuguuuguucacuugacagacauuuucuuggguguuuauugugugccaagcacugugccagga

SEQ ID NO: 4168099 - RNA, 66 nt, Human
uuuuggcuaauuuucaucauggguuuaacauuagcuuggcugauguuugacaugaagaagccaaaa

SEQ ID NO: 4168100 - RNA, 72 nt, Human
uuuuggcucugagguuguucuucucaguggcauaucuacauuugccaugcaauauauauccucaagccaagg

SEQ ID NO: 4168101 - RNA, 62 nt, Human
uuuuggcuuuuccucagcaagcuugcccuuagugacaggauugcagaagagagaagcuagaa

SEQ ID NO: 4168102 - RNA, 78 nt, Human
uuuugguagagauggaaucuuucuauguugcccagguuggucccaaccuccuggccucaagcaauccuccugccaaag

SEQ ID NO: 4168103 - RNA, 59 nt, Human
uuuugguauauugugaugaaaagugcaaacauuuacucaggcaucuacaaaugccagaa

SEQ ID NO: 4168104 - RNA, 76 nt, Human
uuuugguauuguguauauuaggacacauucugauuucugcaucagaacgcugagugagugugcacaguaagcaaag

SEQ ID NO: 4168105 - RNA, 61 nt, Human
uuuugguccaguucugugauauugcuguugaucaagggcaaugaaaugaauucgaccagga

SEQ ID NO: 4168106 - RNA, 77 nt, Human
uuuuggugacuaguuuuuuaacuuguggaaaauuaauaauuaguauuauggucauuuguuagugcuuuucaccaaaa

SEQ ID NO: 4168107 - RNA, 80 nt, Human
uuuugguguauggugugagaaaagugucaaauuaauuuuuucauaaguauguacaguuaaucuuaagccauuuaucaaaa

SEQ ID NO: 4168108 - RNA, 129 nt, Human
uuuugguuaaauauugauaacuuugcacagcagaaugcagaauguucauuuuguggguagauagcagacaacuaacagguagagugaagcuuuuuauauucugugaaagugcagaagucauauaucaua

SEQ ID NO: 4168109 - RNA, 79 nt, Human
uuuugguucagagccugcccaguauagcacuacaauaagcugaauuuuauaaauuggguuuugaguuaaggaaucaaaa

SEQ ID NO: 4168110 - RNA, 95 nt, Human
uuuugguugcggggguugcuacuggcaucucguggguaggaggcaggcaugcugcugaacaucuacagugcacaggacagccccuacaaggagaa

SEQ ID NO: 4168111 - RNA, 103 nt, Human
uuuuguaaaauuuggcaugagaaaauuuaacuuugacaccccccucuacuccuauaaggagagauucugagaaguuaaguccaaugccaaauuguagacagag

SEQ ID NO: 4168112 - RNA, 92 nt, Human
uuuuguacuagccacuguaugaugugucugggauauagguuagaaaaauaaacaugacucuuccucucaugcggucauacacuaguggagaa

SEQ ID NO: 4168113 - RNA, 130 nt, Human
uuuugucccucuauaguccaaguaauuucucucauuuguuuagcagcuuuugauguaucaaagaaaacuugcaucagauggauuuaaacaggcagagaauaauuuaagacuauuguaauaggggacagag

SEQ ID NO: 4168114 - RNA, 55 nt, Human
uuuugucugcccugagggaaagaaauuauggucaaucucuucuggggagauaaaa

SEQ ID NO: 4168115 - RNA, 61 nt, Human
uuuugucuuugauguacaucaguuggacacuuuugucucugauguauaucagagaacggaa

SEQ ID NO: 4168116 - RNA, 130 nt, Human
uuuugugagaagaaguaauuauauaccauauuuaaaauaagugcuauuaacaucuauaagcacaagagaaguuacgaguuugcaauuuuaaaugugguaggcuuaaugagaaaaugacauuugaacaaag

SEQ ID NO: 4168117 - RNA, 74 nt, Human
uuuugugcuacaauuucuacugaaccugcauuuggaggaucagcagcagauucagcaggaauggaagcagagaa

SEQ ID NO: 4168118 - RNA, 58 nt, Human
uuuuguggugugugauauacagguaagggauggucuaaucugugcaccugcuacaagg

SEQ ID NO: 4168119 - RNA, 97 nt, Human
uuuugugguuuccauaucuguugcauaucauguucaaacaaagaucucacauuggagcagaaauaugcugauuagaugaauggcauuaaguacaaaa

SEQ ID NO: 4168120 - RNA, 91 nt, Human
uuuuguguaaagaucaauuaugacagacuaauaugaaauuugaccuuuauuuggaagaaaucugucacagguugucauugauuacaugaaa

SEQ ID NO: 4168121 - RNA, 63 nt, Human
uuuuguguagagauggggucuugcuauauuguccaggcugagccacuucuuuucaacacagga

SEQ ID NO: 4168122 - RNA, 84 nt, Human
uuuuguguguguuguuuauaguuaugaaagacugaggcguauauaaaacuuuucagaaaauuuaauuaugaacacaugucaaag

SEQ ID NO: 4168123 - RNA, 59 nt, Human
uuuuguguuugugugugagugugguggagucagcuaccucaagaauguauaacacagaa

SEQ ID NO: 4168124 - RNA, 63 nt, Human
uuuuguguuuucacuagcaguguagauucauuuaaucugaacacuaaaugugaaggagcaaag

SEQ ID NO: 4168125 - RNA, 109 nt, Human
uuuuguuccuuacuauauucacuuuuuaauagggcccaaugagacugauuaaaauuaugaguuauuuuaugcgggcuuuauuuuagguaauucacagcaggauacaaaa

SEQ ID NO: 4168126 - RNA, 92 nt, Human
uuuuguucuuuugaaccuaaugcaguuuccuuucuagucuuuucuuaauaguuugcaaaaagggggaauugcagauugguucaugaauggag

SEQ ID NO: 4168127 - RNA, 70 nt, Human
uuuuguuguuguuauuauugucucccaugaacucuuguguuuucuggucagagaaguagggacaaugaag

SEQ ID NO: 4168128 - RNA, 70 nt, Human
uuuuguuguuguugaaguuugaggguuaagcagaaaauaacaguaaccaggaaauuuggcaacaaagaga

SEQ ID NO: 4168129 - RNA, 76 nt, Human
uuuuguuuuauagguccugugagauucaugcucaaagagguucuguuuugauguguuuccaggauuuguuucaaga

SEQ ID NO: 4168130 - RNA, 84 nt, Human
uuuuuaaacugauuguuggaugauagugcugcugguaaauuuugcaacccauauuccacugcuuuucagacaguuauuuaaaaa

SEQ ID NO: 4168131 - RNA, 72 nt, Human
uuuuuaacaugcaguauguuuauuggaauaaauucaauuuuauugaaagauaggcuacugugguguuagagg

SEQ ID NO: 4168132 - RNA, 63 nt, Human
uuuuuaacccaaucauuguuucagcaugcaucauuugucaaaugcuauguuugguguuggaga

SEQ ID NO: 4168133 - RNA, 79 nt, Human
uuuuuaaccugguaugcacauugguuuccucauuagcaaaaucgggauaguaauggugccuaccuaauagaguuaugaa

SEQ ID NO: 4168134 - RNA, 56 nt, Human
uuuuuaagagauucuccagucucuggagaucccuuauucuggaguauccuugaaaa

SEQ ID NO: 4168135 - RNA, 75 nt, Human
uuuuuaaugucuuaguaccuuaauuuccucauguccaaagugaggcuaaaaacagggugauugugacaagaaaaa

SEQ ID NO: 4168136 - RNA, 84 nt, Human
uuuuuacacauggcaugagacaagagucuaaauucauauuuuuugcauguggauauucaauugugucagagccauuuguugaaa

SEQ ID NO: 4168137 - RNA, 68 nt, Human
uuuuuacugaccuccaaucccacucauucugacuaguggauucuagugggcuuuggggucucuaagaa

SEQ ID NO: 4168138 - RNA, 63 nt, Human
uuuuuagaguaguaaccauuagaaguaaaauuaaauucuucuaauaaauaaaugcucuaggag

SEQ ID NO: 4168139 - RNA, 84 nt, Human
uuuuuagauuccuuuucuuaaacauauguggcuaugagaaauaaggaagucaguaauuuaagauaaggaaugcauuuuuaagag

SEQ ID NO: 4168140 - RNA, 80 nt, Human
uuuuuagccuguugucugugaaaaggugaacuuacuguaaauuucaguaacucuccuuugacauauuuaaagguuaagag

SEQ ID NO: 4168141 - RNA, 61 nt, Human
uuuuuaguuguacugucaacaguuucaaaacaaagaagaaacugcgacuggcaaaugagga

SEQ ID NO: 4168142 - RNA, 63 nt, Human
uuuuuaguuugauguucuacuccuugcuuuccagguguaggauguuggacaucaugcuaagaa

SEQ ID NO: 4168143 - RNA, 74 nt, Human
uuuuuaguuuguaugcauaccauuuccauguuacauuaauaguauugaugcuuuggugaugguggaacuaaaag

SEQ ID NO: 4168144 - RNA, 78 nt, Human
uuuuuauaauuaggcaggucauauuagauuagggcccgcucuaaugacccuauuuuaacuugauuaccucuguagaga

SEQ ID NO: 4168145 - RNA, 129 nt, Human
uuuuuauaucuuucagaagcuuggaaugcucaaacaugcaguacauacaaacacugauuucuuuaaaccaugaggugguauuugccuuuguacugcacagugacaaguuuccauuuuaaugauguuuga

SEQ ID NO: 4168146 - RNA, 100 nt, Human
uuuuucaccaaauaucuauagcauauacagauaagcuguguguguguguguguguguguguguguguguguguguguguguguguguguuuggagaaaga

SEQ ID NO: 4168147 - RNA, 60 nt, Human
uuuuucacgugacaagaaguccugagguugagcugcuuaggguguuaagucagugauuga

SEQ ID NO: 4168148 - RNA, 61 nt, Human
uuuuucagacaagagggucaagcucagcaauauucuuuguuguaacuccuggucugaaggg

SEQ ID NO: 4168149 - RNA, 60 nt, Human
uuuuucaugugcuguauucuguuuggcuccaacuagcagaaauacccagcauuuggagag

SEQ ID NO: 4168150 - RNA, 73 nt, Human
uuuuuccugaauggcgaguuaguuaguuagaauaacuucucucagauuaaacuauugcuauuuuaagggagaa

SEQ ID NO: 4168151 - RNA, 118 nt, Human
uuuuuccugccccuagcauguaugcccugugugugcaagcacugucuggcgaaccacuguacacccagugucuggcacauagcaggugacccauacauauuugcguauuaaggggaaa

SEQ ID NO: 4168152 - RNA, 66 nt, Human
uuuuuccugugugaaugugugugugugugugugugugugugcauacacacgugcacgugggaaaga

SEQ ID NO: 4168153 - RNA, 68 nt, Human
uuuuucuaguauguguggcugaagagcagaggcaugcuugagcagacuggucuucagccuuggaagag

SEQ ID NO: 4168154 - RNA, 91 nt, Human
uuuuucucaccugcaucucugaacaguacuuuucacccauucuccacccagauaugggucaugugauguucaaaggauggggaaugaaaga

SEQ ID NO: 4168155 - RNA, 74 nt, Human
uuuuucucaguauuugcauuaucucacuuauauauguaugugucacuugagaauguaagcuccuuggagaaaag

SEQ ID NO: 4168156 - RNA, 104 nt, Human
uuuuucuguuaccaaguaaguuuuaaagaacaguuucaguuacugaugaguaugcacuuaucuuauuuuggucaguguacugggcugcccuuuggucagaaaaa

SEQ ID NO: 4168157 - RNA, 56 nt, Human
uuuuucuuucugcuugcccuuugaacuuugaggucugagcagugcaggaagaagag

SEQ ID NO: 4168158 - RNA, 70 nt, Human
uuuuugaaagcagguugcaauuacagugcuucauuuuguggaaguacugccauuauccugcugaaagaaa

SEQ ID NO: 4168159 - RNA, 76 nt, Human
uuuuugaacaagcugggguugugaugccauuuauaaguguaauaccauuucaaaacaacacucagguguaagaaaa

SEQ ID NO: 4168160 - RNA, 56 nt, Human
uuuuugagggcuaguagaccuaucuuugugauuaccccugcuuuaggccuuaaaag

SEQ ID NO: 4168161 - RNA, 64 nt, Human
uuuuugccagagugguauuacucaguuuggugacccaggcuuauuaauaugauucugcugaaaa

SEQ ID NO: 4168162 - RNA, 122 nt, Human
uuuuugcccaggugugaaaaccuuauuuguauaagccuugucuacgggccaugggguuuccuucuuuaugcaucucuaggaagggccaugucacaggaaggggagcacauuuggggcaaaga

SEQ ID NO: 4168163 - RNA, 78 nt, Human
uuuuugcccugcuuucuauuauauucuuauuuacuuuuaguggaugaugguuuuauuaauaggacccaauggcaaaaa

SEQ ID NO: 4168164 - RNA, 55 nt, Human
uuuuugcugaguauacucauacccugagucugguucagguccugaucagcaagga

SEQ ID NO: 4168165 - RNA, 66 nt, Human
uuuuuggaaagcuauuugugaguuauagacaccugucaauuucucagaaauggucuuaucuggaaa

SEQ ID NO: 4168166 - RNA, 75 nt, Human
uuuuuggcuugcagacuguuauuuuaauaggaauguguuaaauauccauuugaaagaacaguccagagauagaaa

SEQ ID NO: 4168167 - RNA, 84 nt, Human
uuuuuggggccucucacacauaucaaaugauaagauuaaacaaauagcauaauaauucauaaauauuugugggggcuuuuuaaa

SEQ ID NO: 4168168 - RNA, 91 nt, Human
uuuuugguuguuguuugaugacgacauuguagaaaaaauagauacacaagcuauugaagaauucuacggguugacaucagauacucaaaga

SEQ ID NO: 4168169 - RNA, 73 nt, Human
uuuuuguaaauguaaguuggguuuagcauuaggaaaucaauuagugcaauuccccauacuaacagauuaaaaa

SEQ ID NO: 4168170 - RNA, 78 nt, Human
uuuuuguaccugaggggugagggcuguagggaacacaacuguguagggucuggagcuuccucauuuacagugcaagag

SEQ ID NO: 4168171 - RNA, 70 nt, Human
uuuuugugcuguuucugaacacccugaccucucuccagggcuagguggaagcuccgaggcaccauaaaaa

SEQ ID NO: 4168172 - RNA, 130 nt, Human
uuuuuguuuugucuucagauuucccaaaaugaaagaagauucauuucaauacuaucugagaauuauuuugauuuaagaugugaugaaauucuacugaucauauggguauaaaucugauagagguuaagaa

SEQ ID NO: 4168173 - RNA, 88 nt, Human
uuuuuuaaagcaagauuucugguacauucauuucugagaagguaaauaaggauugacaggucuuugggaguauauuugcuuuaaaaaa

SEQ ID NO: 4168174 - RNA, 129 nt, Human
uuuuuuaacccauuauaaauacauguaaauguugcauuuauggguagacagaacuaaaagaacaaaauuuggccuacuuuugagaugcaagauuuaucuggcauaaugcauugaacagguuauuauuga

SEQ ID NO: 4168175 - RNA, 74 nt, Human
uuuuuuaucuaugguaguaccaucaagaguaauucacuaucagaaaucuuaccuggauugccauuuauagaaag

SEQ ID NO: 4168176 - RNA, 77 nt, Human
uuuuuucaaagguuaauguugucauguuauuuuacucauguaauuauugccauggaagauuaacucuacugggaaga

SEQ ID NO: 4168177 - RNA, 108 nt, Human
uuuuuucaggcuuuacauugcaguaaucuggugaaauuguugacagugcuacugugacccauaaauacauuuuauucagauaccugcagauugaaauuucugaggaag

SEQ ID NO: 4168178 - RNA, 66 nt, Human
uuuuuuccaccaggagauauuucaaaaugucuggaaauguuuugauugucacacuggaggggaaaa

SEQ ID NO: 4168179 - RNA, 97 nt, Human
uuuuuuccgucuucuauaguguuucuuccugccucuagaaauaugaagccccuugggugugguuaguggagcaggaaacaucuagaggcagaaaagg

SEQ ID NO: 4168180 - RNA, 80 nt, Human
uuuuuuccugugguuuacaugacaguuauuaauggcucuccuacuaggagccugacaucauggugagcaucgagaaagga

SEQ ID NO: 4168181 - RNA, 83 nt, Human
uuuuuucuuacauucccacguguucuuugcuucuauucucaauugaaggugauggguaggaaauguggcgaaaugagaagaag

SEQ ID NO: 4168182 - RNA, 86 nt, Human
uuuuuuggcacauaguagaaauauuuaucucugagaguccacagauuucauuacuccuuaggcuaguuucuguuguagccacagaa

SEQ ID NO: 4168183 - RNA, 113 nt, Human
uuuuuuggguuuuauuuuguauuuggcagcuacuuccccagugccuacaguggugccccaugcuccauaagccugggggaauauuuguugaaugaaugaaugagugcaagaaa

SEQ ID NO: 4168184 - RNA, 123 nt, Human
uuuuuugugacucguuucuucuguauuagguuggugcaaauguaauugcgguuuuuaccauuacuuucaauggcaaaaacugcaauuacuuuugucccaacccaguaaaaggguaauaauaaa

SEQ ID NO: 4168185 - RNA, 86 nt, Human
uuuuuuuaacgguguguggguucugaucccaggacugcuacuguggcagucauggguagaacucaagaaaaugcauccgaaagaaa

SEQ ID NO: 4168186 - RNA, 77 nt, Human
uuuuuuuugagaagaggucuuuugggaugcauggugcuccacauacagcuucacaaaauauuucauuauaagagaaa

SEQ ID NO: 4168187 - RNA, 56 nt, Human
uuuuuuuugcacagcuuauaguacagaaaugugauauacagcuauggcaagacaaa

SEQ ID NO: 4168188 - RNA, 66 nt, Human
uugugcagcuauaaagaaauggguauucuauauuuuuaaauagcccauugcuuuuuagcuacauaa

SEQ ID NO: 4168189 - RNA, 73 nt, Human
uugugcaggaagcauagaagaaugccaagaucauuccagaucaaggcaggaugcuuauguccuuucuggacaa

SEQ ID NO: 4168190 - RNA, 75 nt, Human
uugugcagucaggaauagcauagaguuaaaaugcaggaggucugccuuuguauucucuugguaucuacuguacaa

SEQ ID NO: 4168191 - RNA, 61 nt, Human
uugugcaguuucuauguuguccaaacccuuugccccaggagugggugagaagcugcagcaa

SEQ ID NO: 4168192 - RNA, 65 nt, Human
uugugcccaaggaggaggcugcagugagccaagaucaugccacugcacuccauccugggcaacag

SEQ ID NO: 4168193 - RNA, 80 nt, Human
uugugcuaaauauaaguuggcaauaauacuguaauagugauaggaaccaucuauuccagugugcuuuuauguuagaauaa

SEQ ID NO: 4168194 - RNA, 59 nt, Human
uuucuucuaugugugauauuuugguauuaaagagccgggguauuaaaaugaaggagaaa

SEQ ID NO: 4168195 - RNA, 61 nt, Human
uuucuugacagaggacaguguuuaucaaguagaauuuggaacacuagaaucuguacugagg

SEQ ID NO: 4168196 - RNA, 68 nt, Human
uuucuugaucugagaucuaaaccagagguuguuugaaagaccucuggugaauuaguccagaccugaaa

SEQ ID NO: 4168197 - RNA, 62 nt, Human
uuucuugccagagaaaaagaguuaaacaaaaucaauagccagaguuuauuuuuggcaagaaa

SEQ ID NO: 4168198 - RNA, 60 nt, Human
uuucuuguaaagucaaugauuucuccuggagugauuuuauuccuucauuggcauaagaaa

SEQ ID NO: 4168199 - RNA, 61 nt, Human
uuucuuguuucauggugucucagcuccccaaaaggagaucuaggacgcccaggacaagaaa

SEQ ID NO: 4168200 - RNA, 62 nt, Human
uuucuuuagacuacuaugcugccagaaaaacacauaguucucugggagaguagauaaaggaa

SEQ ID NO: 4168201 - RNA, 75 nt, Human
uuucuuucaaaaggcuguuuucugugucauuacaaaguguauuaguuaacaagagaacagucguggugagagaaa

SEQ ID NO: 4168202 - RNA, 60 nt, Human
uuucuuucaaugcuuguaagggaaagcuuguaagaauucccuuacaagcauugaaagaaa

SEQ ID NO: 4168203 - RNA, 56 nt, Human
uuucuuucauuuguagaacacuguaugaguuuuacagacaacacugaugagagaaa

SEQ ID NO: 4168204 - RNA, 89 nt, Human
uuucuuuguuuucuggagcucaguuauuuugccacucagauuuuaucuccuccccaagggcagcaaacuggcuucaggcuacagcaaaa

SEQ ID NO: 4168205 - RNA, 67 nt, Human
uuucuuuugacccgagcugaagaaauucaccacacaccaaaucuucaauaacucggguuaaaauaga

SEQ ID NO: 4168206 - RNA, 57 nt, Human
uuucuuuuuaauuuuauguugcaucauugguuuuugaagcagcugcuugaaaagaaa

SEQ ID NO: 4168207 - RNA, 72 nt, Human
uuugaaagagugugugugugugugugugugugugugugcgugcaugcacagaauaauauauguucuuauaag

SEQ ID NO: 4168208 - RNA, 67 nt, Human
uuugaaaggagauggagauuuggguaagguuuagucuggauacacuaaaucuucaucuuuuagaaaa

SEQ ID NO: 4168209 - RNA, 89 nt, Human
uuugaaagugcacuugaucuagacagauucccuugccuauuaauaugcaaaucagccucaguuuuucuuuguuuauugcaacuuucaga

SEQ ID NO: 4168210 - RNA, 87 nt, Human
uuugaaauguuucaaaugaaagcaacuuauuugagauggccauuucauggguugauucucauuuggguuucuuucucacauuuugaa

SEQ ID NO: 4168211 - RNA, 59 nt, Human
uuugaacaaguugcccaacuauggagguagaaauagauauugauaggcagcuugucagg

SEQ ID NO: 4168212 - RNA, 61 nt, Human
uuugaacuguucuaggauuuaaaacuguacuucagcaauuaugauccagcaacaguuuaga

SEQ ID NO: 4168213 - RNA, 61 nt, Human
uuugaagcucgaguguggacugauuuugcuccugcuuuugggcuuugcucagcuuaccaaa

SEQ ID NO: 4168214 - RNA, 106 nt, Human
uuugaauaaacaucacacuuuaaaacugacagcccuuggguuucacuucgcacucaggaggcacagcucugucagauuuuaagugaaaggauauaguuuguuuaag

SEQ ID NO: 4168215 - RNA, 74 nt, Human
uuugaaugcucugcacguccuuaguuaaauacaguccugcagucuguaaccugggauguagcacagacuucaga

SEQ ID NO: 4168216 - RNA, 56 nt, Human
uuugaaugcugugauuuauuaaguaucaaaaaugcuugaaaguuauuucauuugaa

SEQ ID NO: 4168217 - RNA, 81 nt, Human
uuugaauucuccagguaguuauuucaagaacauccuuuugcauguuucuuggaaacugauuccuuguugugugaauucaaa

SEQ ID NO: 4168218 - RNA, 101 nt, Human
uuugaauugguguauacauuagaggguaggaauuuacuucccccugcuucuauaaggggaaagauaaucaauuacuccuuguguauauuuaugaaaucaga

SEQ ID NO: 4168219 - RNA, 56 nt, Human
uuugacaaauaggggaauaaggcucaauuacuuugccuauuuguuuauuuguuaga

SEQ ID NO: 4168220 - RNA, 61 nt, Human
uuugacaacagcaaaugucacacaacuaaaaugaguuggaugguucaucacugaugucaga

SEQ ID NO: 4168221 - RNA, 59 nt, Human
uuugacaaccaggcagguaagaucggaggagguaaagaaucugcuuagguuuguucaga

SEQ ID NO: 4168222 - RNA, 57 nt, Human
uuugacagagcucuuagucucuaacaccaacuggagaacaggcaagcaucuggcaga

SEQ ID NO: 4168223 - RNA, 81 nt, Human
uuugacagaugaaauuagaaauauguaugggcauuuaaaaauguuuguauaagaacauucuagcauuuauggcaugucaaa

SEQ ID NO: 4168224 - RNA, 64 nt, Human
uuugaccucagagagccaucaaaaaugugcugcaaggaacaauucugugguugucuguggcaga

SEQ ID NO: 4168225 - RNA, 85 nt, Human
uuugacuagaugguucucuggcauaaaaucuacacuuucaggcaaaaugagagucugaaugcucagaguuggauaucuggucaaa

SEQ ID NO: 4168226 - RNA, 87 nt, Human
uuugacuauuuggaacccuagguuuauugauuucagaauauuuuuaaugaaucauccugaagucaauaaaguuccaugacuugcaag

SEQ ID NO: 4168227 - RNA, 74 nt, Human
uuugacucaagccuuucuuuaggagacacaggagggucccaagaaguuuccagaagaaaugccaggaagucaga

SEQ ID NO: 4168228 - RNA, 92 nt, Human
uuugacucaguuuugacagcaugagagaugccagugauuccagaacuacuguaugguacaugcuggcuaaaauauucaaaauugcaggagga

SEQ ID NO: 4168229 - RNA, 57 nt, Human
uuugacucccaaacugugauuuuuucaguauuagacaagaucacuugggauguuaaa

SEQ ID NO: 4168230 - RNA, 84 nt, Human
uuugacuccuuuguuuuugacaacuuucuuuuuaagguaugaaugaaaauugaagugaucaggaacuauauaauuggagucaag

SEQ ID NO: 4168231 - RNA, 69 nt, Human
uuugacuuggacugguacuacaccaucagcucuuuugguuuucuagcuugccaguugaagaucuucaga

SEQ ID NO: 4168232 - RNA, 63 nt, Human
uuugagaaaggggauuuaauuccacgguaauacagaaauggcauuaaguaaucuuuucuuaga

SEQ ID NO: 4168233 - RNA, 68 nt, Human
uuugagaccagccugggcaacacagcaagacccccaucuaccaaguggaacccagguuggccuacaga

SEQ ID NO: 4168234 - RNA, 99 nt, Human
uuugagagcguuuggaaauuggaagacuugguggcgaacgagggucaggaccugcauccugccucagaguuaucgacguauccggaaugugggaucaga

SEQ ID NO: 4168235 - RNA, 55 nt, Human
uuugagagucagauccgaagaugugguauauccgccaucuuuagcaacuuucaaa

SEQ ID NO: 4168236 - RNA, 59 nt, Human
uuugagcaggacccuccaagggaccauccuuauucugcucucugagaggucugcuuaga

SEQ ID NO: 4168237 - RNA, 87 nt, Human
uuugagccagggaagucaagccuguagugaauugugauugugccacugcacuccaaucugggcaacagagcaagacccugucucgaa

SEQ ID NO: 4168238 - RNA, 76 nt, Human
uuugagcuccaggagggauugggcugugggucacccaaagggggcuuccagagucuagacccuggugaugcuggaa

SEQ ID NO: 4168239 - RNA, 104 nt, Human
uuugaggcaggagaaucacuugaaacaggaggcagagguugcagugagcugagauagcgccacugcacuccagccugggugacagagugagacuccaucucaaa

SEQ ID NO: 4168240 - RNA, 58 nt, Human
uuugagucucaguuuuccugcuuauuaugugcauaguaguaaacccaugaggcuuaaa

SEQ ID NO: 4168241 - RNA, 107 nt, Human
uuugauagauuuuucccuccagaauguuugcaucuauucacaugugcaucagcagugcauuuguaguuaaauguguaguuaacguucuguuuuuaaaacuauacaaa

SEQ ID NO: 4168242 - RNA, 83 nt, Human
uuugauagcugguuugucaugcaagguuuuaauucucuuuccuucagaaauagcauguucaugauaaaauaagacagaucaaa

SEQ ID NO: 4168243 - RNA, 117 nt, Human
uuugauauuuguuagccuugauguuugaaguacucaucggugaccaauaagcuguuauacagccuugaacacugacugaagggggucugaaauaccauggggauuaaaaauagcaaa

SEQ ID NO: 4168244 - RNA, 64 nt, Human
uuugaucagguggacuguguuggaguugaccuucuggcacuccacccagcaguccaggaucaga

SEQ ID NO: 4168245 - RNA, 69 nt, Human
uuugauccagggcuuacacauaccaagagacuucguuacaaucaccaaaugugucaggcccugauuaaa

SEQ ID NO: 4168246 - RNA, 93 nt, Human
uuugaugcaacuaguaacaucaacaugaauuucucugaagauaaauaauauguguuucaggauuuuucuaugugaaucagcuaguugaugaaa

SEQ ID NO: 4168247 - RNA, 71 nt, Human
uuugaugggugucuauuaaaaguuaaauacuuguuuguuuagcuuucguuccuuagacacauauaaucaag

SEQ ID NO: 4168248 - RNA, 66 nt, Human
uuugauuaagaugcagauucugacucauuaaaucugagaugggcaagagucugcauuucugacaag

SEQ ID NO: 4168249 - RNA, 81 nt, Human
uuugauuccacagccgauaccaugacuacuaagcuauacugucucccucuguggaucacugggcgugcugugugaaacaaa

SEQ ID NO: 4168250 - RNA, 80 nt, Human
uuugauuucuucuaauacacgguaugacuuugcucguuuuucauacaaguagacacugaaauguauugaagaguauuaaa

SEQ ID NO: 4168251 - RNA, 62 nt, Human
uuugcaaacggcccugagucccccaguuuaugucuuaauucgcagccagggcugauuguaga

SEQ ID NO: 4168252 - RNA, 86 nt, Human
uuugcaaacuggggcuuuuucuucuaggugugccugcauuuacucaugugcuguaugucuauggaaaagacuguuaagcugucaaa

SEQ ID NO: 4168253 - RNA, 116 nt, Human
uuugcaaguucuuuguuugggguugugaaauugaaagauagugaagccagccucucuggagggaagaggugagaggaggcaucgugauuguuuuuuaccaugcugagagcuucaga

SEQ ID NO: 4168254 - RNA, 57 nt, Human
uuugcacacauucuuagaaauggauauuaucuguuuuuagcaagagugucguguaaa

SEQ ID NO: 4168255 - RNA, 55 nt, Human
uuugcauauccuccaacacauggauuuuacugauucaauuauggaugugugcaaa

SEQ ID NO: 4168256 - RNA, 123 nt, Human
uuugcaugguguaaaauacucucacuguggcugauuucaaccuaacaguaugaccucacggagcauguaguugggaagaaaagcacaguagcacaguauuauaugguauuuucaccauccaga

SEQ ID NO: 4168257 - RNA, 67 nt, Human
uuugcauguaccauggaggcuuaggagucaauuucuaggaaugucuucaucuccaugcacagacaga

SEQ ID NO: 4168258 - RNA, 58 nt, Human
uuugcauugccucugacuuaugagcuuacuauccuagaaaucagcaggcauauguaga

SEQ ID NO: 4168259 - RNA, 127 nt, Human
uuugccaauguuuggccauagagggcaaauucucaaucuuagacaagggcuccuuaaaagguaaauuaucagaaaauagacacugagcaccuguuauagguuaggaauuaugcuaagcauugggaaa

SEQ ID NO: 4168260 - RNA, 130 nt, Human
uuugccacucugcuaagcauuuguguuugcuaauucuuaaucccauaaagugaggauaauuguuuucuucaguuuuaagguuugagaauugaaguaaagauauauuaaaccuuagccaguaaguggcaga

SEQ ID NO: 4168261 - RNA, 100 nt, Human
uuugccuauccucaccuggaguggaauuuuuaccuaugaaugauuuuguagcaucaugcauucauuauuuuaaaaauauugcuucacugaguuaugcaaa

SEQ ID NO: 4168262 - RNA, 75 nt, Human
uuugccuauggauguuuaucuacaggcuccaaauaauauggauuuauucugguaauauacagaccauuugguaga

SEQ ID NO: 4168263 - RNA, 63 nt, Human
uucuuuguccucuccaacagccucuguguacacugcacaguagagaguuggugagggccugaa

SEQ ID NO: 4168264 - RNA, 71 nt, Human
uucuuuguucagaguuaggggugggcgagugucaaccuugauauucuucauuguugauucauguucaugaa

SEQ ID NO: 4168265 - RNA, 63 nt, Human
uucuuuuaauccaucugguaaaccucagcaacaacugcaggaauugggcacggagugaaagga

SEQ ID NO: 4168266 - RNA, 76 nt, Human
uucuuuuaauuucuauguucuaagucucaaggcccuggcaggguguggguagccagagaaaguggggagggaggaa

SEQ ID NO: 4168267 - RNA, 78 nt, Human
uucuuuugcucuuucucauugucagcagaacaauacgcaaaaugugacugacaagaaagagaaagaggagcaaaagga

SEQ ID NO: 4168268 - RNA, 57 nt, Human
uucuuuuggacucaaagagaacuguaaagcaauacaguucucuuuggguccagagaa

SEQ ID NO: 4168269 - RNA, 76 nt, Human
uucuuuuucacucuagccaugauuucauuaaucuuuugguccagaaugaaauaguuggcuguagagggaaaaagga

SEQ ID NO: 4168270 - RNA, 63 nt, Human
uucuuuuucuuauucccacacugggauauuaugucccuggugcggcaugauugagcagaugag

SEQ ID NO: 4168271 - RNA, 69 nt, Human
uucuuuuugcaucuggugaagaccagcagaggcaacucucaaacuguuuucaccagauugcaaugagaa

SEQ ID NO: 4168272 - RNA, 57 nt, Human
uucuuuuuguuucuuauagcgacacugaugucagcuaaugugauagagcagaaagag

SEQ ID NO: 4168273 - RNA, 93 nt, Human
uucuuuuuuguggucuccagauacuuagccaucauugauugcuauaauccuuauuaaguauuugaagauguugaguaccauccacugaaggag

SEQ ID NO: 4168274 - RNA, 87 nt, Human
uugaaaaacuucuggcacuaauagacagcuuuuuaaaaaccaauuuaaaagcucuucuguugaguuaaaaagcaagaaggcuuucaa

SEQ ID NO: 4168275 - RNA, 96 nt, Human
uugaaaaaucauacuccauucacuuauuuuuaaggauguuugaauaacuuuuaaggauguuugaauaacuuggauauauugaaugugcuuuuucaa

SEQ ID NO: 4168276 - RNA, 64 nt, Human
uugaaaagcaaaugauggguagugugaugaagcauuaaaaccauaucccaucagaguuuuauaa

SEQ ID NO: 4168277 - RNA, 84 nt, Human
uugaaaauggccucagagaagaggaaagaggaaagacauggggauuccaugucaccuuuacccuuuuauagacuggcuuuucag

SEQ ID NO: 4168278 - RNA, 127 nt, Human
uugaaagaaggagcguuuugcugccuuugaucuguuuccacugggcacggggccagcgguguaggagcuaucucacugcccugugcacaggaaacugaagauggaguuucucgccugucguuuucag

SEQ ID NO: 4168279 - RNA, 71 nt, Human
uugaaaggcagcaauugaaaucauuguggagaagauucaaucuuguagcagggauugucaaugcugcucaa

SEQ ID NO: 4168280 - RNA, 67 nt, Human
uugaaagguaucauguccauacaguccuuugcugcccucaucagcauuugauacauguaccucucgg

SEQ ID NO: 4168281 - RNA, 90 nt, Human
uugaaaggugcgauauuccaaucuugugguucaggauggcacugggaaucgaucacaggcuuuucugacauaggcuugggauuaguucaa

SEQ ID NO: 4168282 - RNA, 79 nt, Human
uucugaugcggucccucugcucaauggcucagcagauuugucaggagcauuucugggcaaaggcuguaacccaucagag

SEQ ID NO: 4168283 - RNA, 62 nt, Human
uucugauucuuuuggcagucaaaggcagcucugugcugcugagggcuguuaaggaagcagaa

SEQ ID NO: 4168284 - RNA, 72 nt, Human
uucugcacaugcacggcaccaucuucugugagcacccaugggaggucaugccugaugacuacuucugcagag

SEQ ID NO: 4168285 - RNA, 81 nt, Human
uucugcagguucacaguuaggacaacugcuucacacuuguuaaauguguuaaguugugguucuaaccaugugauaucagag

SEQ ID NO: 4168286 - RNA, 68 nt, Human
uucugcauucugcucucccucuugucuccucccugcucuacuggcagcccucgagggcagaggcggaa

SEQ ID NO: 4168287 - RNA, 62 nt, Human
uucugcccuaauucagugcuuaggguaguguucuugccauuaggcacuuaguagggccagag

SEQ ID NO: 4168288 - RNA, 57 nt, Human
uucugcccuggcuccucccacgcuggggaucucagcacauggauggaguuaggagaa

SEQ ID NO: 4168289 - RNA, 69 nt, Human
uucugcccuugggauuuagguaaggcuggcaaugggggagacauuugaccugggucucuagggaaugga

SEQ ID NO: 4168290 - RNA, 72 nt, Human
uucugcuaacauuaccugcaacucccauggugaugcucaaaucccauuugggaauucagugaacuagcagaa

SEQ ID NO: 4168291 - RNA, 63 nt, Human
uucugcuuagagggcauuugcaauuagaaauaaacauuucugugugaguccaucugagcagaa

SEQ ID NO: 4168292 - RNA, 56 nt, Human
uucugcuugcugcgugcucuaaaauggacauacuugaggcaaacauguaaguagga

SEQ ID NO: 4168293 - RNA, 89 nt, Human
uucugcuuuuguaacaugaaugcagccauaacacuauguaaaugagugaguauggcuguguucacauaaaauuuuuuuauaaaauagga

SEQ ID NO: 4168294 - RNA, 73 nt, Human
uucuggaacucccugacucguuuugggaagcuguugauuggcccacaguggguuccugagcagggaucuggaa

SEQ ID NO: 4168295 - RNA, 55 nt, Human
uucuggaaggguggaguagcuucuuuauauucuagccucuaaacucuucucagag

SEQ ID NO: 4168296 - RNA, 66 nt, Human
uucuggacugaauggaagauauauggauaaucacugugaauuuaguguacuuccauucauccugaa

SEQ ID NO: 4168297 - RNA, 66 nt, Human
uucuggcagagacugguauuagggcuccuuuaacugaaagcaaauucuauuuccaguccuucagag

SEQ ID NO: 4168298 - RNA, 56 nt, Human
uucuggcaucuguuuucauauuuauuuuauugguaggaacugagcugaugucaggg

SEQ ID NO: 4168299 - RNA, 58 nt, Human
uucuggccaugcccagagucucuguggcaucacucauggaggaaguggcuggccagaa

SEQ ID NO: 4168300 - RNA, 70 nt, Human
uucuggcccuguccucauuucaucucccuuugacacaaucucauugauggaggaguaaggacaggcugaa

SEQ ID NO: 4168301 - RNA, 75 nt, Human
uucuggcugcaauaguaaauuacggaggagaguaaaucccuacugguucgucucuuuuacaguucacacccagaa

SEQ ID NO: 4168302 - RNA, 121 nt, Human
uucuggcugcacaugagaaucacaugggagcuuaaaacauagccagacugagccccacuucagacugugaaacugauguauuuuuaaaaugcuucccagguguuuucaugugcagucagga

SEQ ID NO: 4168303 - RNA, 75 nt, Human
uucuggcuggccggaggcaucccuguuguuccagcacaaggcucuucagaggggacccuccacagccagccugag

SEQ ID NO: 4168304 - RNA, 127 nt, Human
uucuggcuuagagaaauguuccaggcaugaaagcaagaagugaguugagaaccuaccccaucauccccuucucaccucucccauuucucugcucuuucacuugcucugcauuucacuguacccagga

SEQ ID NO: 4168305 - RNA, 75 nt, Human
uucuggcuuuacagaccaaagaccuacagauccaacuacacuggcugugcaggggauuugguuauaaggaaagaa

SEQ ID NO: 4168306 - RNA, 95 nt, Human
uucugggaaagaugucguguuucaguaaggauacagaggcaggccaaucccguucuaccucuggacauuguggagcauggcuauaauaccuggaa

SEQ ID NO: 4168307 - RNA, 75 nt, Human
uucugggcauuucucauagagcugaugguuugaacccucccaggaggcuccagccaaugggucugugcucuagga

SEQ ID NO: 4168308 - RNA, 110 nt, Human
uucugggggcagggggcugugguuuagcuuugaaggauaugguucaugguggaauuuaauuauguccuuagagacuaagagccaagcaaaacccuguagaguuaccagaa

SEQ ID NO: 4168309 - RNA, 101 nt, Human
uucuggguauuuuuagagagguuuacugagggugcugguuuucuccacccauugagauaacuggagcuaacaguagaagacucagaaagggucacuuagaa

SEQ ID NO: 4168310 - RNA, 72 nt, Human
uucuggguuuacaucugacuucugauuggguucuuauccguuaaaaaaguuaaaaugucaauuagcuuggaa

SEQ ID NO: 4168311 - RNA, 102 nt, Human
uucuggucauccgaguauucuguuuauuucugugggucccuugguaaacaggaauuuacaguacccagcaaagauaaacuuauggaacucauuaccccagaa

SEQ ID NO: 4168312 - RNA, 67 nt, Human
uucuguaaauauugucccaugagcgauaacauuacaaaguccuuaggagugaggaguguuuacagaa

SEQ ID NO: 4168313 - RNA, 118 nt, Human
uucuguaucaaggcacauuaguaugaccuauuagauuuccuugccagaaauugauguugagcaguaggagguaaguuugagaacuaguuauucacauacuaauagcacaaauacugaa

SEQ ID NO: 4168314 - RNA, 61 nt, Human
uucugucaaaacuuuuuuauguggccacagagacacuguagcagagaaaguuugggcagaa

SEQ ID NO: 4168315 - RNA, 67 nt, Human
uucugucacagcauccuaugcagggugugcacaaccaagcaccaauaaaagugaguuguugaaagaa

SEQ ID NO: 4168316 - RNA, 63 nt, Human
uucugucacagugcugguaucagaacccagauccccugacuccuuguccaguacuguuuagag

SEQ ID NO: 4168317 - RNA, 56 nt, Human
uucugucauccuuucuagaugugagaauuuagguucauuuaggagcuauggcagaa

SEQ ID NO: 4168318 - RNA, 91 nt, Human
uucugucauuuuugggggauuguucauugcuaguacuuucccaugagggcauaaagugguagacaaagauaauuggucaauauuguuugag

SEQ ID NO: 4168319 - RNA, 86 nt, Human
uucuguccaguggcuacacucacacuuuaaaucaaaucuucuaacauuccuugaaguaaagcagucuguguaugugaacugaagaa

SEQ ID NO: 4168320 - RNA, 66 nt, Human
uucugucccacuggucuguuugucuaucccugugagaaccacagagcucaggccuuugagacagaa

SEQ ID NO: 4168321 - RNA, 57 nt, Human
uucuguccccacacucuaagguccugguuuccacugcagggcugagaaggggaagag

SEQ ID NO: 4168322 - RNA, 63 nt, Human
uucugucccuccuggcaccaaagucaccuaucauaaguaacuugaguuucagaggggaaggaa

SEQ ID NO: 4168323 - RNA, 112 nt, Human
uucugucugugagauuguccugggcuuacgaccucugacuggcaguugaaucuuugcaacacucuuacaguagcagagucagucguguguuagcagucucaugaacacagaa

SEQ ID NO: 4168324 - RNA, 77 nt, Human
uucugugaccaaauuuauauuaagauucuuguuuccugucaaauucaauggagucauauuuauauguuggcacagag

SEQ ID NO: 4168325 - RNA, 97 nt, Human
uucugugagagagcauaaagucucauaauucacuuagauugauuuaauauacuagguuacugaauuaucaggcuuugaaauagucuuuccuuuagaa

SEQ ID NO: 4168326 - RNA, 89 nt, Human
uucugugggcccagcaacagccccucuucucuccucggagccagggccaggcuauuccaggaggacugagggggcuggaucuaucagag

SEQ ID NO: 4168327 - RNA, 66 nt, Human
uucuguguuccagaaggugacucagggaguugugcaaaugacugacucauauuucauggauacgag

SEQ ID NO: 4168328 - RNA, 64 nt, Human
uucuguuacauggggcacagugaaucagcucucugaucagcccugacauugucuccuagcagaa

SEQ ID NO: 4168329 - RNA, 55 nt, Human
uucuguuacuguuggucauaacugagauaucauuaaagauuaaucaguggcagaa

SEQ ID NO: 4168330 - RNA, 84 nt, Human
uucuguucacuuuuauauucuuggcuucuaacacguaguagguacucauuaaauaucuguuagcuaaugaaugagugaaaugaa

SEQ ID NO: 4168331 - RNA, 64 nt, Human
uucuguuuuagaaauaaguagucuuagcaauaugagaaaaaacggacuuguucuaaaaucagga

SEQ ID NO: 4168332 - RNA, 97 nt, Human
uucuuaaaaugguaauuauguccaaaugaacuaagagucauuaguguaggaaauuuucuuccacaauaauguuuuuagguuauuuaguaucaaagaa

SEQ ID NO: 4168333 - RNA, 73 nt, Human
uucuuaaaguaacccugaauguuuauuauaucaauuaauauaagcagauacugaggcucaggguguuuaggaa

SEQ ID NO: 4168334 - RNA, 93 nt, Human
uucuuaaguagggagcaucccuaggaaauuuaaaauaugauuugauuuaucauagaucaguuuauuaauuuucuaggagcuucugccuuagaa

SEQ ID NO: 4168335 - RNA, 61 nt, Human
uucuuacagcccuauuacuaaaucugcagguaacagcagugauagaguaauacuguaagga

SEQ ID NO: 4168336 - RNA, 75 nt, Human
ugguuagggagcuaucuguauucugacagucacuuuaggguauggggugaccagggucaguagcuuucuuugcca

SEQ ID NO: 4168337 - RNA, 79 nt, Human
ugguuauuuuuuguaacagcuguuuauauaguaaggauaucaacccuaugcuugucauaguuguuacaaauauuuauca
